United States Patent Application Publication US 2021/0180091 A1 - sequence listing, part 2

SEQ ID NO: 21367 - DNA, 20 bp, Artificial Sequence
  Synthetic oligonucleotide; GAG chr11 5336304 5336323 5336320 +
tctgacccttccccaaatca

SEQ ID NO: 21368 - DNA, 20 bp, Artificial Sequence
  Synthetic oligonucleotide; GAG chr11 5336306 5336325 5336322 +
tgacccttccccaaatcaga

SEQ ID NO: 21369 - DNA, 20 bp, Artificial Sequence
  Synthetic oligonucleotide; TGG chr11 5336325 5336344 5336341 +
agagaattattccttattga

SEQ ID NO: 21370 - DNA, 20 bp, Artificial Sequence
  Synthetic oligonucleotide; TGG chr11 5336337 5336356 5336353 +
cttattgatggccttcaaac

SEQ ID NO: 21371 - DNA, 20 bp, Artificial Sequence
  Synthetic oligonucleotide; TAG chr11 5336344 5336363 5336360 +
atggccttcaaactggaatc

SEQ ID NO: 21372 - DNA, 20 bp, Artificial Sequence
  Synthetic oligonucleotide; TAG chr11 5336364 5336383 5336380 +
tagacctttttttctgcctt

SEQ ID NO: 21373 - DNA, 20 bp, Artificial Sequence
  Synthetic oligonucleotide; TGG chr11 5336392 5336411 5336408 +
actgaaacatcaaaacttcc

SEQ ID NO: 21374 - DNA, 20 bp, Artificial Sequence
  Synthetic oligonucleotide; GGG chr11 5336393 5336412 5336409 +
ctgaaacatcaaaacttcct

SEQ ID NO: 21375 - DNA, 20 bp, Artificial Sequence
  Synthetic oligonucleotide; AAG chr11 5336400 5336419 5336416 +
atcaaaacttcctgggtctg

SEQ ID NO: 21376 - DNA, 20 bp, Artificial Sequence
  Synthetic oligonucleotide; TGG chr11 5336408 5336427 5336424 +
ttcctgggtctgaagcctga

SEQ ID NO: 21377 - DNA, 20 bp, Artificial Sequence
  Synthetic oligonucleotide; TGG chr11 5336415 5336434 5336431 +
gtctgaagcctgatggcttt

SEQ ID NO: 21378 - DNA, 20 bp, Artificial Sequence
  Synthetic oligonucleotide; GGG chr11 5336416 5336435 5336432 +
tctgaagcctgatggctttt

SEQ ID NO: 21379 - DNA, 20 bp, Artificial Sequence
  Synthetic oligonucleotide; AAG chr11 5336423 5336442 5336439 +
cctgatggcttttgggttgc

SEQ ID NO: 21380 - DNA, 20 bp, Artificial Sequence
  Synthetic oligonucleotide; CAG chr11 5336450 5336469 5336466 +
ccatcaatcctcctgtttcc

SEQ ID NO: 21381 - DNA, 20 bp, Artificial Sequence
  Synthetic oligonucleotide; AGG chr11 5336451 5336470 5336467 +
catcaatcctcctgtttccc

SEQ ID NO: 21382 - DNA, 20 bp, Artificial Sequence
  Synthetic oligonucleotide; CAG chr11 5336458 5336477 5336474 +
cctcctgtttcccaggcctt

SEQ ID NO: 21383 - DNA, 20 bp, Artificial Sequence
  Synthetic oligonucleotide; TGG chr11 5336464 5336483 5336480 +
gtttcccaggccttcagact

SEQ ID NO: 21384 - DNA, 20 bp, Artificial Sequence
  Synthetic oligonucleotide; TGG chr11 5336469 5336488 5336485 +
ccaggccttcagacttggac

SEQ ID NO: 21385 - DNA, 20 bp, Artificial Sequence
  Synthetic oligonucleotide; GGG chr11 5336470 5336489 5336486 +
caggccttcagacttggact

SEQ ID NO: 21386 - DNA, 20 bp, Artificial Sequence
  Synthetic oligonucleotide; CAG chr11 5336483 5336502 5336499 +
ttggactgggactaaactac

SEQ ID NO: 21387 - DNA, 20 bp, Artificial Sequence
  Synthetic oligonucleotide; AGG chr11 5336484 5336503 5336500 +
tggactgggactaaactacc

SEQ ID NO: 21388 - DNA, 20 bp, Artificial Sequence
  Synthetic oligonucleotide; GAG chr11 5336494 5336513 5336510 +
ctaaactaccaggctctctt

SEQ ID NO: 21389 - DNA, 20 bp, Artificial Sequence
  Synthetic oligonucleotide; TGG chr11 5336528 5336547 5336544 +
atgactcactctgcatatct

SEQ ID NO: 21390 - DNA, 20 bp, Artificial Sequence
  Synthetic oligonucleotide; GGG chr11 5336529 5336548 5336545 +
tgactcactctgcatatctt

SEQ ID NO: 21391 - DNA, 20 bp, Artificial Sequence
  Synthetic oligonucleotide; TAG chr11 5336573 5336592 5336589 +
catctgctatttccttatat

SEQ ID NO: 21392 - DNA, 20 bp, Artificial Sequence
  Synthetic oligonucleotide; AGG chr11 5336574 5336593 5336590 +
atctgctatttccttatatt

SEQ ID NO: 21393 - DNA, 20 bp, Artificial Sequence
  Synthetic oligonucleotide; TGG chr11 5336578 5336597 5336594 +
gctatttccttatattaggt

SEQ ID NO: 21394 - DNA, 20 bp, Artificial Sequence
  Synthetic oligonucleotide; CAG chr11 5336586 5336605 5336602 +
cttatattaggttggtgcaa

SEQ ID NO: 21395 - DNA, 20 bp, Artificial Sequence
  Synthetic oligonucleotide; CAG chr11 5336595 5336614 5336611 +
ggttggtgcaacagtaattg

SEQ ID NO: 21396 - DNA, 20 bp, Artificial Sequence
  Synthetic oligonucleotide; CAG chr11 5336623 5336642 5336639 +
gccattatttttttttaatg

SEQ ID NO: 21397 - DNA, 20 bp, Artificial Sequence
  Synthetic oligonucleotide; AAG chr11 5336682 5336701 5336698 +
attcaatttttttaattttt

SEQ ID NO: 21398 - DNA, 20 bp, Artificial Sequence
  Synthetic oligonucleotide; GAG chr11 5336689 5336708 5336705 +
ttttttaatttttaagttct

SEQ ID NO: 21399 - DNA, 20 bp, Artificial Sequence
  Synthetic oligonucleotide; AGG chr11 5336690 5336709 5336706 +
tttttaatttttaagttctg

SEQ ID NO: 21400 - DNA, 20 bp, Artificial Sequence
  Synthetic oligonucleotide; CAG chr11 5336701 5336720 5336717 +
taagttctgaggtacatgtg

SEQ ID NO: 21401 - DNA, 20 bp, Artificial Sequence
  Synthetic oligonucleotide; AGG chr11 5336702 5336721 5336718 +
aagttctgaggtacatgtgc

SEQ ID NO: 21402 - DNA, 20 bp, Artificial Sequence
  Synthetic oligonucleotide; CAG chr11 5336710 5336729 5336726 +
aggtacatgtgcaggatgtg

SEQ ID NO: 21403 - DNA, 20 bp, Artificial Sequence
  Synthetic oligonucleotide; AGG chr11 5336711 5336730 5336727 +
ggtacatgtgcaggatgtgc

SEQ ID NO: 21404 - DNA, 20 bp, Artificial Sequence
  Synthetic oligonucleotide; TGG chr11 5336740 5336759 5336756 +
acatacgtaaatgtgtgcaa

SEQ ID NO: 21405 - DNA, 20 bp, Artificial Sequence
  Synthetic oligonucleotide; TGG chr11 5336743 5336762 5336759 +
tacgtaaatgtgtgcaatgg

SEQ ID NO: 21406 - DNA, 20 bp, Artificial Sequence
  Synthetic oligonucleotide; TAG chr11 5336772 5336791 5336788 +
gtacctatcaacccatcacc

SEQ ID NO: 21407 - DNA, 20 bp, Artificial Sequence
  Synthetic oligonucleotide; AGG chr11 5336773 5336792 5336789 +
tacctatcaacccatcacct

SEQ ID NO: 21408 - DNA, 20 bp, Artificial Sequence
  Synthetic oligonucleotide; AAG chr11 5336780 5336799 5336796 +
caacccatcacctaggtgtt

SEQ ID NO: 21409 - DNA, 20 bp, Artificial Sequence
  Synthetic oligonucleotide; CAG chr11 5336785 5336804 5336801 +
catcacctaggtgttaagcc

SEQ ID NO: 21410 - DNA, 20 bp, Artificial Sequence
  Synthetic oligonucleotide; TAG chr11 5336795 5336814 5336811 +
gtgttaagcccagcatgcat

SEQ ID NO: 21411 - DNA, 20 bp, Artificial Sequence
  Synthetic oligonucleotide; CAG chr11 5336841 5336860 5336857 +
caccacaccccatgccctga

SEQ ID NO: 21412 - DNA, 20 bp, Artificial Sequence
  Synthetic oligonucleotide; AGG chr11 5336842 5336861 5336858 +
accacaccccatgccctgac

SEQ ID NO: 21413 - DNA, 20 bp, Artificial Sequence
  Synthetic oligonucleotide; CAG chr11 5336848 5336867 5336864 +
ccccatgccctgacaggctc

SEQ ID NO: 21414 - DNA, 20 bp, Artificial Sequence
  Synthetic oligonucleotide; CAG chr11 5336899 5336918 5336915 +
gtgttctcattctcattgtt

SEQ ID NO: 21415 - DNA, 20 bp, Artificial Sequence
  Synthetic oligonucleotide; AAG chr11 5336913 5336932 5336929 +
attgttcagctcccacttct

SEQ ID NO: 21416 - DNA, 20 bp, Artificial Sequence
  Synthetic oligonucleotide; GAG chr11 5336917 5336936 5336933 +
ttcagctcccacttctaagt

SEQ ID NO: 21417 - DNA, 20 bp, Artificial Sequence
  Synthetic oligonucleotide; TGG chr11 5336926 5336945 5336942 +
cacttctaagtgagaacatg

SEQ ID NO: 21418 - DNA, 20 bp, Artificial Sequence
  Synthetic oligonucleotide; TGG chr11 5336933 5336952 5336949 +
aagtgagaacatgtggtgtt

SEQ ID NO: 21419 - DNA, 20 bp, Artificial Sequence
  Synthetic oligonucleotide; TAG chr11 5336952 5336971 5336968 +
ttggttttctgttcctgcat

SEQ ID NO: 21420 - DNA, 20 bp, Artificial Sequence
  Synthetic oligonucleotide; AAG chr11 5336962 5336981 5336978 +
gttcctgcattagtttactg

SEQ ID NO: 21421 - DNA, 20 bp, Artificial Sequence
  Synthetic oligonucleotide; TGG chr11 5336969 5336988 5336985 +
cattagtttactgaagataa

SEQ ID NO: 21422 - DNA, 20 bp, Artificial Sequence
  Synthetic oligonucleotide; CGG chr11 5336976 5336995 5336992 +
ttactgaagataatggcttt

SEQ ID NO: 21423 - DNA, 20 bp, Artificial Sequence
  Synthetic oligonucleotide; CAG chr11 5336993 5337012 5337009 +
tttcggctccatccatgtcc

SEQ ID NO: 21424 - DNA, 20 bp, Artificial Sequence
  Synthetic oligonucleotide; AAG chr11 5336998 5337017 5337014 +
gctccatccatgtcccagca

SEQ ID NO: 21425 - DNA, 20 bp, Artificial Sequence
  Synthetic oligonucleotide; AGG chr11 5336999 5337018 5337015 +
ctccatccatgtcccagcaa

SEQ ID NO: 21426 - DNA, 20 bp, Artificial Sequence
  Synthetic oligonucleotide; GGG chr11 5337000 5337019 5337016 +
tccatccatgtcccagcaaa

SEQ ID NO: 21427 - DNA, 20 bp, Artificial Sequence
  Synthetic oligonucleotide; TGG chr11 5337023 5337042 5337039 +
catgatctcatcccttttta

SEQ ID NO: 21428 - DNA, 20 bp, Artificial Sequence
  Synthetic oligonucleotide; TAG chr11 5337027 5337046 5337043 +
atctcatccctttttatggt

SEQ ID NO: 21429 - DNA, 20 bp, Artificial Sequence
  Synthetic oligonucleotide; TAG chr11 5337031 5337050 5337047 +
catccctttttatggttaga

SEQ ID NO: 21430 - DNA, 20 bp, Artificial Sequence
  Synthetic oligonucleotide; TGG chr11 5337041 5337060 5337057 +
tatggttagatagtatttca

SEQ ID NO: 21431 - DNA, 20 bp, Artificial Sequence
  Synthetic oligonucleotide; TGG chr11 5337082 5337101 5337098 +
tttaaattgtctatcattga

SEQ ID NO: 21432 - DNA, 20 bp, Artificial Sequence
  Synthetic oligonucleotide; TGG chr11 5337090 5337109 5337106 +
gtctatcattgatggccatt

SEQ ID NO: 21433 - DNA, 20 bp, Artificial Sequence
  Synthetic oligonucleotide; GGG chr11 5337091 5337110 5337107 +
tctatcattgatggccattt

SEQ ID NO: 21434 - DNA, 20 bp, Artificial Sequence
  Synthetic oligonucleotide; TAG chr11 5337121 5337140 5337137 +
tatgtctttgctattgtgaa

SEQ ID NO: 21435 - DNA, 20 bp, Artificial Sequence
  Synthetic oligonucleotide; TAG chr11 5337155 5337174 5337171 +
acatacatgtgcatgtatct

SEQ ID NO: 21436 - DNA, 20 bp, Artificial Sequence
  Synthetic oligonucleotide; TAG chr11 5337161 5337180 5337177 +
atgtgcatgtatcttagtaa

SEQ ID NO: 21437 - DNA, 20 bp, Artificial Sequence
  Synthetic oligonucleotide; TAG chr11 5337181 5337200 5337197 +
tagaatgatttatactcctt

SEQ ID NO: 21438 - DNA, 20 bp, Artificial Sequence
  Synthetic oligonucleotide; AGG chr11 5337182 5337201 5337198 +
agaatgatttatactccttt

SEQ ID NO: 21439 - DNA, 20 bp, Artificial Sequence
  Synthetic oligonucleotide; CAG chr11 5337193 5337212 5337209 +
tactcctttaggtatatacc

SEQ ID NO: 21440 - DNA, 20 bp, Artificial Sequence
  Synthetic oligonucleotide; TGG chr11 5337199 5337218 5337215 +
tttaggtatatacccagtaa

SEQ ID NO: 21441 - DNA, 20 bp, Artificial Sequence
  Synthetic oligonucleotide; GGG chr11 5337200 5337219 5337216 +
ttaggtatatacccagtaat

SEQ ID NO: 21442 - DNA, 20 bp, Artificial Sequence
  Synthetic oligonucleotide; GAG chr11 5337208 5337227 5337224 +
atacccagtaatgggattgt

SEQ ID NO: 21443 - DNA, 20 bp, Artificial Sequence
  Synthetic oligonucleotide; AGG chr11 5337209 5337228 5337225 +
tacccagtaatgggattgtg

SEQ ID NO: 21444 - DNA, 20 bp, Artificial Sequence
  Synthetic oligonucleotide; TGG chr11 5337217 5337236 5337233 +
aatgggattgtgaggtcaaa

SEQ ID NO: 21445 - DNA, 20 bp, Artificial Sequence
  Synthetic oligonucleotide; TGG chr11 5337226 5337245 5337242 +
gtgaggtcaaatggtatttc

SEQ ID NO: 21446 - DNA, 20 bp, Artificial Sequence
  Synthetic oligonucleotide; GAG chr11 5337241 5337260 5337257 +
atttctggttctaaatcttt

SEQ ID NO: 21447 - DNA, 20 bp, Artificial Sequence
  Synthetic oligonucleotide; AGG chr11 5337242 5337261 5337258 +
tttctggttctaaatctttg

SEQ ID NO: 21448 - DNA, 20 bp, Artificial Sequence
  Synthetic oligonucleotide; TGG chr11 5337268 5337287 5337284 +
tgccacactgtcttccacaa

SEQ ID NO: 21449 - DNA, 20 bp, Artificial Sequence
  Synthetic oligonucleotide; TAG chr11 5337277 5337296 5337293 +
gtcttccacaatggttgaat

SEQ ID NO: 21450 - DNA, 20 bp, Artificial Sequence
  Synthetic oligonucleotide; CAG chr11 5337284 5337303 5337300 +
acaatggttgaattagttta

SEQ ID NO: 21451 - DNA, 20 bp, Artificial Sequence
  Synthetic oligonucleotide; CAG chr11 5337296 5337315 5337312 +
ttagtttacagtcccaccaa

SEQ ID NO: 21452 - DNA, 20 bp, Artificial Sequence
  Synthetic oligonucleotide; AAG chr11 5337304 5337323 5337320 +
cagtcccaccaacagtgtaa

SEQ ID NO: 21453 - DNA, 20 bp, Artificial Sequence
  Synthetic oligonucleotide; TAG chr11 5337332 5337351 5337348 +
ctatttctctgcaaccttgc

SEQ ID NO: 21454 - DNA, 20 bp, Artificial Sequence
  Synthetic oligonucleotide; TGG chr11 5337374 5337393 5337390 +
ttaaaaaccaccattctgac

SEQ ID NO: 21455 - DNA, 20 bp, Artificial Sequence
  Synthetic oligonucleotide; CAG chr11 5337380 5337399 5337396 +
accaccattctgactggtgt

SEQ ID NO: 21456 - DNA, 20 bp, Artificial Sequence
  Synthetic oligonucleotide; TGG chr11 5337384 5337403 5337400 +
ccattctgactggtgtcaga

SEQ ID NO: 21457 - DNA, 20 bp, Artificial Sequence
  Synthetic oligonucleotide; TGG chr11 5337397 5337416 5337413 +
tgtcagatggtatttcattg

SEQ ID NO: 21458 - DNA, 20 bp, Artificial Sequence
  Synthetic oligonucleotide; CAG chr11 5337425 5337444 5337441 +
atttgcatttctctaatgat

SEQ ID NO: 21459 - DNA, 20 bp, Artificial Sequence
  Synthetic oligonucleotide; GAG chr11 5337435 5337454 5337451 +
ctctaatgatcagtgacatt

SEQ ID NO: 21460 - DNA, 20 bp, Artificial Sequence
  Synthetic oligonucleotide; TAG chr11 5337457 5337476 5337473 +
gacttttttcgtatgtttct

SEQ ID NO: 21461 - DNA, 20 bp, Artificial Sequence
  Synthetic oligonucleotide; GAG chr11 5337480 5337499 5337496 +
ccacataaatgtcttctttt

SEQ ID NO: 21462 - DNA, 20 bp, Artificial Sequence
  Synthetic oligonucleotide; AAG chr11 5337483 5337502 5337499 +
cataaatgtcttcttttgag

SEQ ID NO: 21463 - DNA, 20 bp, Artificial Sequence
  Synthetic oligonucleotide; TGG chr11 5337517 5337536 5337533 +
gtcctttgcccactttttaa

SEQ ID NO: 21464 - DNA, 20 bp, Artificial Sequence
  Synthetic oligonucleotide; GGG chr11 5337518 5337537 5337534 +
tcctttgcccactttttaat

SEQ ID NO: 21465 - DNA, 20 bp, Artificial Sequence
  Synthetic oligonucleotide; GGG chr11 5337519 5337538 5337535 +
cctttgcccactttttaatg

SEQ ID NO: 21466 - DNA, 20 bp, Artificial Sequence
  Synthetic oligonucleotide; AAG chr11 5337553 5337572 5337569 +
tttcttttgtaaatatgtct

SEQ ID NO: 21467 - DNA, 20 bp, Artificial Sequence
  Synthetic oligonucleotide; TAG chr11 5337563 5337582 5337579 +
aaatatgtctaagttcctca

SEQ ID NO: 21468 - DNA, 20 bp, Artificial Sequence
  Synthetic oligonucleotide; TGG chr11 5337570 5337589 5337586 +
tctaagttcctcatagattc

SEQ ID NO: 21469 - DNA, 20 bp, Artificial Sequence
  Synthetic oligonucleotide; TAG chr11 5337577 5337596 5337593 +
tcctcatagattctggatat

SEQ ID NO: 21470 - DNA, 20 bp, Artificial Sequence
  Synthetic oligonucleotide; CAG chr11 5337588 5337607 5337604 +
tctggatattagacctttgt

SEQ ID NO: 21471 - DNA, 20 bp, Artificial Sequence
  Synthetic oligonucleotide; TGG chr11 5337592 5337611 5337608 +
gatattagacctttgtcaga

SEQ ID NO: 21472 - DNA, 20 bp, Artificial Sequence
  Synthetic oligonucleotide; GGG chr11 5337593 5337612 5337609 +
atattagacctttgtcagat

SEQ ID NO: 21473 - DNA, 20 bp, Artificial Sequence
  Synthetic oligonucleotide; TAG chr11 5337596 5337615 5337612 +
ttagacctttgtcagatggg

SEQ ID NO: 21474 - DNA, 20 bp, Artificial Sequence
  Synthetic oligonucleotide; CAG chr11 5337603 5337622 5337619 +
tttgtcagatgggtagattg

SEQ ID NO: 21475 - DNA, 20 bp, Artificial Sequence
  Synthetic oligonucleotide; TAG chr11 5337624 5337643 5337640 +
agaaattttctcccattctg

SEQ ID NO: 21476 - DNA, 20 bp, Artificial Sequence
  Synthetic oligonucleotide; AGG chr11 5337625 5337644 5337641 +
gaaattttctcccattctgt

SEQ ID NO: 21477 - DNA, 20 bp, Artificial Sequence
  Synthetic oligonucleotide; TAG chr11 5337648 5337667 5337664 +
ttgcctgttcgctctgatga

SEQ ID NO: 21478 - DNA, 20 bp, Artificial Sequence
  Synthetic oligonucleotide; TAG chr11 5337665 5337684 5337681 +
tgatagtttattttgctgtt

SEQ ID NO: 21479 - DNA, 20 bp, Artificial Sequence
  Synthetic oligonucleotide; AAG chr11 5337668 5337687 5337684 +
tagtttattttgctgtttag

SEQ ID NO: 21480 - DNA, 20 bp, Artificial Sequence
  Synthetic oligonucleotide; GAG chr11 5337702 5337721 5337718 +
attgtatttttctttatttt

SEQ ID NO: 21481 - DNA, 20 bp, Artificial Sequence
  Synthetic oligonucleotide; AAG chr11 5337708 5337727 5337724 +
tttttctttattttgagatg

SEQ ID NO: 21482 - DNA, 20 bp, Artificial Sequence
  Synthetic oligonucleotide; TAG chr11 5337731 5337750 5337747 +
tctcactctttcacccatgc

SEQ ID NO: 21483 - DNA, 20 bp, Artificial Sequence
  Synthetic oligonucleotide; GAG chr11 5337733 5337752 5337749 +
tcactctttcacccatgcta

SEQ ID NO: 21484 - DNA, 20 bp, Artificial Sequence
  Synthetic oligonucleotide; CAG chr11 5337738 5337757 5337754 +
ctttcacccatgctagagtg

SEQ ID NO: 21485 - DNA, 20 bp, Artificial Sequence
  Synthetic oligonucleotide; TGG chr11 5337741 5337760 5337757 +
tcacccatgctagagtgcag

SEQ ID NO: 21486 - DNA, 20 bp, Artificial Sequence
  Synthetic oligonucleotide; CAG chr11 5337752 5337771 5337768 +
agagtgcagtggtgcgatct

SEQ ID NO: 21487 - DNA, 20 bp, Artificial Sequence
  Synthetic oligonucleotide; TGG chr11 5337776 5337795 5337792 +
tcactgcaacctctgcctcc

SEQ ID NO: 21488 - DNA, 20 bp, Artificial Sequence
  Synthetic oligonucleotide; GGG chr11 5337777 5337796 5337793 +
cactgcaacctctgcctcct

SEQ ID NO: 21489 - DNA, 20 bp, Artificial Sequence
  Synthetic oligonucleotide; AAG chr11 5337783 5337802 5337799 +
aacctctgcctcctgggttc

SEQ ID NO: 21490 - DNA, 20 bp, Artificial Sequence
  Synthetic oligonucleotide; CAG chr11 5337800 5337819 5337816 +
ttcaagcaattctcctgcct

SEQ ID NO: 21491 - DNA, 20 bp, Artificial Sequence
  Synthetic oligonucleotide; GAG chr11 5337809 5337828 5337825 +
ttctcctgcctcagcctcct

SEQ ID NO: 21492 - DNA, 20 bp, Artificial Sequence
  Synthetic oligonucleotide; TAG chr11 5337812 5337831 5337828 +
tcctgcctcagcctcctgag

SEQ ID NO: 21493 - DNA, 20 bp, Artificial Sequence
  Synthetic oligonucleotide; GAG chr11 5337817 5337836 5337833 +
cctcagcctcctgagtagct

SEQ ID NO: 21494 - DNA, 20 bp, Artificial Sequence
  Synthetic oligonucleotide; CAG chr11 5337824 5337843 5337840 +
ctcctgagtagctgagatta

SEQ ID NO: 21495 - DNA, 20 bp, Artificial Sequence
  Synthetic oligonucleotide; AGG chr11 5337825 5337844 5337841 +
tcctgagtagctgagattac

SEQ ID NO: 21496 - DNA, 20 bp, Artificial Sequence
  Synthetic oligonucleotide; CAG chr11 5337844 5337863 5337860 +
caggtacgcaccaccatacc

SEQ ID NO: 21497 - DNA, 20 bp, Artificial Sequence
  Synthetic oligonucleotide; TAG chr11 5337864 5337883 5337880 +
cagcacattttttgtatttt

SEQ ID NO: 21498 - DNA, 20 bp, Artificial Sequence
  Synthetic oligonucleotide; TAG chr11 5337867 5337886 5337883 +
cacattttttgtatttttag

SEQ ID NO: 21499 - DNA, 20 bp, Artificial Sequence
  Synthetic oligonucleotide; GAG chr11 5337869 5337888 5337885 +
cattttttgtatttttagta

SEQ ID NO: 21500 - DNA, 20 bp, Artificial Sequence
  Synthetic oligonucleotide; TGG chr11 5337873 5337892 5337889 +
ttttgtatttttagtagaga

SEQ ID NO: 21501 - DNA, 20 bp, Artificial Sequence
  Synthetic oligonucleotide; GAG chr11 5337875 5337894 5337891 +
ttgtatttttagtagagatg

SEQ ID NO: 21502 - DNA, 20 bp, Artificial Sequence
  Synthetic oligonucleotide; TGG chr11 5337889 5337908 5337905 +
gagatggagtttcaccatgt

SEQ ID NO: 21503 - DNA, 20 bp, Artificial Sequence
  Synthetic oligonucleotide; CAG chr11 5337893 5337912 5337909 +
tggagtttcaccatgttggc

SEQ ID NO: 21504 - DNA, 20 bp, Artificial Sequence
  Synthetic oligonucleotide; AGG chr11 5337894 5337913 5337910 +
ggagtttcaccatgttggcc

SEQ ID NO: 21505 - DNA, 20 bp, Artificial Sequence
  Synthetic oligonucleotide; AAG chr11 5337919 5337938 5337935 +
gctcttatactccccacctc

SEQ ID NO: 21506 - DNA, 20 bp, Artificial Sequence
  Synthetic oligonucleotide; TGG chr11 5337936 5337955 5337952 +
ctcaagtgatccacccacct

SEQ ID NO: 21507 - DNA, 20 bp, Artificial Sequence
  Synthetic oligonucleotide; AAG chr11 5337946 5337965 5337962 +
ccacccaccttggcctccca

SEQ ID NO: 21508 - DNA, 20 bp, Artificial Sequence
  Synthetic oligonucleotide; TGG chr11 5337952 5337971 5337968 +
accttggcctcccaaagtgc

SEQ ID NO: 21509 - DNA, 20 bp, Artificial Sequence
  Synthetic oligonucleotide; GGG chr11 5337953 5337972 5337969 +
ccttggcctcccaaagtgct

SEQ ID NO: 21510 - DNA, 20 bp, Artificial Sequence
  Synthetic oligonucleotide; CAG chr11 5337960 5337979 5337976 +
ctcccaaagtgctgggatta

SEQ ID NO: 21511 - DNA, 20 bp, Artificial Sequence
  Synthetic oligonucleotide; AGG chr11 5337961 5337980 5337977 +
tcccaaagtgctgggattac

SEQ ID NO: 21512 - DNA, 20 bp, Artificial Sequence
  Synthetic oligonucleotide; GAG chr11 5337967 5337986 5337983 +
agtgctgggattacaggcgt

SEQ ID NO: 21513 - DNA, 20 bp, Artificial Sequence
  Synthetic oligonucleotide; TAG chr11 5337989 5338008 5338005 +
gccaccatgcccgatctctt

SEQ ID NO: 21514 - DNA, 20 bp, Artificial Sequence
  Synthetic oligonucleotide; TAG chr11 5337998 5338017 5338014 +
cccgatctctttagtttaat

SEQ ID NO: 21515 - DNA, 20 bp, Artificial Sequence
  Synthetic oligonucleotide; CAG chr11 5338012 5338031 5338028 +
tttaattagatctcatttga

SEQ ID NO: 21516 - DNA, 20 bp, Artificial Sequence
  Synthetic oligonucleotide; CGG chr11 5338079 5338098 5338095 +
tctttgcctgtgtctatgtc

SEQ ID NO: 21517 - DNA, 20 bp, Artificial Sequence
  Synthetic oligonucleotide; TGG chr11 5338084 5338103 5338100 +
gcctgtgtctatgtccggaa

SEQ ID NO: 21518 - DNA, 20 bp, Artificial Sequence
  Synthetic oligonucleotide; TAG chr11 5338094 5338113 5338110 +
atgtccggaatggtattgcc

SEQ ID NO: 21519 - DNA, 20 bp, Artificial Sequence
  Synthetic oligonucleotide; AGG chr11 5338095 5338114 5338111 +
tgtccggaatggtattgcct

SEQ ID NO: 21520 - DNA, 20 bp, Artificial Sequence
  Synthetic oligonucleotide; AAG chr11 5338108 5338127 5338124 +
attgcctaggttttcttcta

SEQ ID NO: 21521 - DNA, 20 bp, Artificial Sequence
  Synthetic oligonucleotide; TAG chr11 5338117 5338136 5338133 +
gttttcttctaaagttttta

SEQ ID NO: 21522 - DNA, 20 bp, Artificial Sequence
  Synthetic oligonucleotide; TGG chr11 5338123 5338142 5338139 +
ttctaaagtttttatagttt

SEQ ID NO: 21523 - DNA, 20 bp, Artificial Sequence
  Synthetic oligonucleotide; GGG chr11 5338124 5338143 5338140 +
tctaaagtttttatagtttt

SEQ ID NO: 21524 - DNA, 20 bp, Artificial Sequence
  Synthetic oligonucleotide; AAG chr11 5338137 5338156 5338153 +
tagttttgggttttacactt

SEQ ID NO: 21525 - DNA, 20 bp, Artificial Sequence
  Synthetic oligonucleotide; GAG chr11 5338155 5338174 5338171 +
ttaagtctttaatgcatctt

SEQ ID NO: 21526 - DNA, 20 bp, Artificial Sequence
  Synthetic oligonucleotide; AAG chr11 5338171 5338190 5338187 +
tcttgagttaatttatgtat

SEQ ID NO: 21527 - DNA, 20 bp, Artificial Sequence
  Synthetic oligonucleotide; AAG chr11 5338178 5338197 5338194 +
ttaatttatgtataagatgt

SEQ ID NO: 21528 - DNA, 20 bp, Artificial Sequence
  Synthetic oligonucleotide; AGG chr11 5338179 5338198 5338195 +
taatttatgtataagatgta

SEQ ID NO: 21529 - DNA, 20 bp, Artificial Sequence
  Synthetic oligonucleotide; AAG chr11 5338182 5338201 5338198 +
tttatgtataagatgtaagg

SEQ ID NO: 21530 - DNA, 20 bp, Artificial Sequence
  Synthetic oligonucleotide; AGG chr11 5338183 5338202 5338199 +
ttatgtataagatgtaagga

SEQ ID NO: 21531 - DNA, 20 bp, Artificial Sequence
  Synthetic oligonucleotide; GGG chr11 5338184 5338203 5338200 +
tatgtataagatgtaaggaa

SEQ ID NO: 21532 - DNA, 20 bp, Artificial Sequence
  Synthetic oligonucleotide; GGG chr11 5338185 5338204 5338201 +
atgtataagatgtaaggaag

SEQ ID NO: 21533 - DNA, 20 bp, Artificial Sequence
  Synthetic oligonucleotide; CAG chr11 5338190 5338209 5338206 +
taagatgtaaggaaggggtc

SEQ ID NO: 21534 - DNA, 20 bp, Artificial Sequence
  Synthetic oligonucleotide; TGG chr11 5338210 5338229 5338226 +
cagtttcaattttctgcata

SEQ ID NO: 21535 - DNA, 20 bp, Artificial Sequence
  Synthetic oligonucleotide; TAG chr11 5338214 5338233 5338230 +
ttcaattttctgcatatggc

SEQ ID NO: 21536 - DNA, 20 bp, Artificial Sequence
  Synthetic oligonucleotide; CAG chr11 5338218 5338237 5338234 +
attttctgcatatggctagc

SEQ ID NO: 21537 - DNA, 20 bp, Artificial Sequence
  Synthetic oligonucleotide; CAG chr11 5338227 5338246 5338243 +
atatggctagccagttctcc

SEQ ID NO: 21538 - DNA, 20 bp, Artificial Sequence
  Synthetic oligonucleotide; TAG chr11 5338244 5338263 5338260 +
tcccagcacaatttataaaa

SEQ ID NO: 21539 - DNA, 20 bp, Artificial Sequence
  Synthetic oligonucleotide; AGG chr11 5338245 5338264 5338261 +
cccagcacaatttataaaat

SEQ ID NO: 21540 - DNA, 20 bp, Artificial Sequence
  Synthetic oligonucleotide; GGG chr11 5338246 5338265 5338262 +
ccagcacaatttataaaata

SEQ ID NO: 21541 - DNA, 20 bp, Artificial Sequence
  Synthetic oligonucleotide; CAG chr11 5338276 5338295 5338292 +
tccccattacttgtttttac

SEQ ID NO: 21542 - DNA, 20 bp, Artificial Sequence
  Synthetic oligonucleotide; AGG chr11 5338277 5338296 5338293 +
ccccattacttgtttttacc

SEQ ID NO: 21543 - DNA, 20 bp, Artificial Sequence
  Synthetic oligonucleotide; AAG chr11 5338287 5338306 5338303 +
tgtttttaccaggtttgttg

SEQ ID NO: 21544 - DNA, 20 bp, Artificial Sequence
  Synthetic oligonucleotide; CAG chr11 5338292 5338311 5338308 +
ttaccaggtttgttgaagat

SEQ ID NO: 21545 - DNA, 20 bp, Artificial Sequence
  Synthetic oligonucleotide; CAG chr11 5338302 5338321 5338318 +
tgttgaagatcagattgttt

SEQ ID NO: 21546 - DNA, 20 bp, Artificial Sequence
  Synthetic oligonucleotide; CGG chr11 5338310 5338329 5338326 +
atcagattgtttcagatgcg

SEQ ID NO: 21547 - DNA, 20 bp, Artificial Sequence
  Synthetic oligonucleotide; GAG chr11 5338323 5338342 5338339 +
agatgcgcggtcttacttct

SEQ ID NO: 21548 - DNA, 20 bp, Artificial Sequence
  Synthetic oligonucleotide; TAG chr11 5338344 5338363 5338360 +
agttctccattctgttccat

SEQ ID NO: 21549 - DNA, 20 bp, Artificial Sequence
  Synthetic oligonucleotide; CAG chr11 5338348 5338367 5338364 +
ctccattctgttccattagt

SEQ ID NO: 21550 - DNA, 20 bp, Artificial Sequence
  Synthetic oligonucleotide; TGG chr11 5338361 5338380 5338377 +
cattagtcagtgtgtctgtt

SEQ ID NO: 21551 - DNA, 20 bp, Artificial Sequence
  Synthetic oligonucleotide; CAG chr11 5338367 5338386 5338383 +
tcagtgtgtctgtttggtat

SEQ ID NO: 21552 - DNA, 20 bp, Artificial Sequence
  Synthetic oligonucleotide; CAG chr11 5338383 5338402 5338399 +
gtatcagtaccatgctgttt

SEQ ID NO: 21553 - DNA, 20 bp, Artificial Sequence
  Synthetic oligonucleotide; TAG chr11 5338387 5338406 5338403 +
cagtaccatgctgtttcagt

SEQ ID NO: 21554 - DNA, 20 bp, Artificial Sequence
  Synthetic oligonucleotide; TAG chr11 5338404 5338423 5338420 +
agttagttactgtcaccttg

SEQ ID NO: 21555 - DNA, 20 bp, Artificial Sequence
  Synthetic oligonucleotide; AAG chr11 5338416 5338435 5338432 +
tcaccttgtagtataatttg

SEQ ID NO: 21556 - DNA, 20 bp, Artificial Sequence
  Synthetic oligonucleotide; TGG chr11 5338420 5338439 5338436 +
cttgtagtataatttgaagt

SEQ ID NO: 21557 - DNA, 20 bp, Artificial Sequence
  Synthetic oligonucleotide; GGG chr11 5338421 5338440 5338437 +
ttgtagtataatttgaagtt

SEQ ID NO: 21558 - DNA, 20 bp, Artificial Sequence
  Synthetic oligonucleotide; TGG chr11 5338448 5338467 5338464 +
tcctgttgattctatttttc

SEQ ID NO: 21559 - DNA, 20 bp, Artificial Sequence
  Synthetic oligonucleotide; GAG chr11 5338450 5338469 5338466 +
ctgttgattctatttttctg

SEQ ID NO: 21560 - DNA, 20 bp, Artificial Sequence
  Synthetic oligonucleotide; TAG chr11 5338467 5338486 5338483 +
ctggagaaccatgactaaca

SEQ ID NO: 21561 - DNA, 20 bp, Artificial Sequence
  Synthetic oligonucleotide; AGG chr11 5338468 5338487 5338484 +
tggagaaccatgactaacat

SEQ ID NO: 21562 - DNA, 20 bp, Artificial Sequence
  Synthetic oligonucleotide; GGG chr11 5338469 5338488 5338485 +
ggagaaccatgactaacata

SEQ ID NO: 21563 - DNA, 20 bp, Artificial Sequence
  Synthetic oligonucleotide; GAG chr11 5338484 5338503 5338500 +
acatagggccatctattttt

SEQ ID NO: 21564 - DNA, 20 bp, Artificial Sequence
  Synthetic oligonucleotide; AGG chr11 5338485 5338504 5338501 +
catagggccatctatttttg

SEQ ID NO: 21565 - DNA, 20 bp, Artificial Sequence
  Synthetic oligonucleotide; CAG chr11 5338516 5338535 5338532 +
gactaatcactgtcatctgt

SEQ ID NO: 21566 - DNA, 20 bp, Artificial Sequence
  Synthetic oligonucleotide; TGG chr11 5338521 5338540 5338537 +
atcactgtcatctgtcagtt

SEQ ID NO: 21567 - DNA, 20 bp, Artificial Sequence
  Synthetic oligonucleotide; TGG chr11 5338524 5338543 5338540 +
actgtcatctgtcagtttgg

SEQ ID NO: 21568 - DNA, 20 bp, Artificial Sequence
  Synthetic oligonucleotide; TAG chr11 5338542 5338561 5338558 +
ggtggcatgtacttgaaatc

SEQ ID NO: 21569 - DNA, 20 bp, Artificial Sequence
  Synthetic oligonucleotide; AGG chr11 5338543 5338562 5338559 +
gtggcatgtacttgaaatct

SEQ ID NO: 21570 - DNA, 20 bp, Artificial Sequence
  Synthetic oligonucleotide; GGG chr11 5338544 5338563 5338560 +
tggcatgtacttgaaatcta

SEQ ID NO: 21571 - DNA, 20 bp, Artificial Sequence
  Synthetic oligonucleotide; GAG chr11 5338588 5338607 5338604 +
ataaaataaattttgtctat

SEQ ID NO: 21572 - DNA, 20 bp, Artificial Sequence
  Synthetic oligonucleotide; AAG chr11 5338616 5338635 5338632 +
taataacaatgactgtgtct

SEQ ID NO: 21573 - DNA, 20 bp, Artificial Sequence
  Synthetic oligonucleotide; AGG chr11 5338617 5338636 5338633 +
aataacaatgactgtgtcta

SEQ ID NO: 21574 - DNA, 20 bp, Artificial Sequence
  Synthetic oligonucleotide; TAG chr11 5338623 5338642 5338639 +
aatgactgtgtctaaggatt

SEQ ID NO: 21575 - DNA, 20 bp, Artificial Sequence
  Synthetic oligonucleotide; AGG chr11 5338624 5338643 5338640 +
atgactgtgtctaaggattt

SEQ ID NO: 21576 - DNA, 20 bp, Artificial Sequence
  Synthetic oligonucleotide; CAG chr11 5338642 5338661 5338658 +
ttaggctataaaatcaaaaa

SEQ ID NO: 21577 - DNA, 20 bp, Artificial Sequence
  Synthetic oligonucleotide; TGG chr11 5338661 5338680 5338677 +
acagatttacattctttaat

SEQ ID NO: 21578 - DNA, 20 bp, Artificial Sequence
  Synthetic oligonucleotide; TGG chr11 5338667 5338686 5338683 +
ttacattctttaattggaca

SEQ ID NO: 21579 - DNA, 20 bp, Artificial Sequence
  Synthetic oligonucleotide; GAG chr11 5338669 5338688 5338685 +
acattctttaattggacatg

SEQ ID NO: 21580 - DNA, 20 bp, Artificial Sequence
  Synthetic oligonucleotide; TGG chr11 5338677 5338696 5338693 +
taattggacatggagacctc

SEQ ID NO: 21581 - DNA, 20 bp, Artificial Sequence
  Synthetic oligonucleotide; GGG chr11 5338678 5338697 5338694 +
aattggacatggagacctct

SEQ ID NO: 21582 - DNA, 20 bp, Artificial Sequence
  Synthetic oligonucleotide; TAG chr11 5338733 5338752 5338749 +
aatttaatactcatataatc

SEQ ID NO: 21583 - DNA, 20 bp, Artificial Sequence
  Synthetic oligonucleotide; AAG chr11 5338737 5338756 5338753 +
taatactcatataatctagt

SEQ ID NO: 21584 - DNA, 20 bp, Artificial Sequence
  Synthetic oligonucleotide; TGG chr11 5338789 5338808 5338805 +
cctataaaaatctgcatctc

SEQ ID NO: 21585 - DNA, 20 bp, Artificial Sequence
  Synthetic oligonucleotide; AAG chr11 5338794 5338813 5338810 +
aaaaatctgcatctctggtg

SEQ ID NO: 21586 - DNA, 20 bp, Artificial Sequence
  Synthetic oligonucleotide; AGG chr11 5338795 5338814 5338811 +
aaaatctgcatctctggtga

SEQ ID NO: 21587 - DNA, 20 bp, Artificial Sequence
  Synthetic oligonucleotide; CAG chr11 5338802 5338821 5338818 +
gcatctctggtgaaggaacc

SEQ ID NO: 21588 - DNA, 20 bp, Artificial Sequence
  Synthetic oligonucleotide; GAG chr11 5338820 5338839 5338836 +
cccagcaattatttgttaat

SEQ ID NO: 21589 - DNA, 20 bp, Artificial Sequence
  Synthetic oligonucleotide; GAG chr11 5338822 5338841 5338838 +
cagcaattatttgttaatga

SEQ ID NO: 21590 - DNA, 20 bp, Artificial Sequence
  Synthetic oligonucleotide; AGG chr11 5338823 5338842 5338839 +
agcaattatttgttaatgag

SEQ ID NO: 21591 - DNA, 20 bp, Artificial Sequence
  Synthetic oligonucleotide; AAG chr11 5338830 5338849 5338846 +
atttgttaatgagaggaata

SEQ ID NO: 21592 - DNA, 20 bp, Artificial Sequence
  Synthetic oligonucleotide; TAG chr11 5338850 5338869 5338866 +
aagttcatcttccccttatc

SEQ ID NO: 21593 - DNA, 20 bp, Artificial Sequence
  Synthetic oligonucleotide; TGG chr11 5338870 5338889 5338886 +
tagtataaattcattttata

SEQ ID NO: 21594 - DNA, 20 bp, Artificial Sequence
  Synthetic oligonucleotide; GGG chr11 5338871 5338890 5338887 +
agtataaattcattttatat

SEQ ID NO: 21595 - DNA, 20 bp, Artificial Sequence
  Synthetic oligonucleotide; GAG chr11 5338873 5338892 5338889 +
tataaattcattttatatgg

SEQ ID NO: 21596 - DNA, 20 bp, Artificial Sequence
  Synthetic oligonucleotide; AGG chr11 5338874 5338893 5338890 +
ataaattcattttatatggg

SEQ ID NO: 21597 - DNA, 20 bp, Artificial Sequence
  Synthetic oligonucleotide; AAG chr11 5338879 5338898 5338895 +
ttcattttatatgggaggaa

SEQ ID NO: 21598 - DNA, 20 bp, Artificial Sequence
  Synthetic oligonucleotide; TAG chr11 5338898 5338917 5338914 +
aaagtgatctgtaaactcat

SEQ ID NO: 21599 - DNA, 20 bp, Artificial Sequence
  Synthetic oligonucleotide; CAG chr11 5338917 5338936 5338933 +
ttagaccatacatatttttt

SEQ ID NO: 21600 - DNA, 20 bp, Artificial Sequence
  Synthetic oligonucleotide; AAG chr11 5338929 5338948 5338945 +
tattttttcagtgtgtctct

SEQ ID NO: 21601 - DNA, 20 bp, Artificial Sequence
  Synthetic oligonucleotide; AAG chr11 5338960 5338979 5338976 +
acgtcttcttaatcatttct

SEQ ID NO: 21602 - DNA, 20 bp, Artificial Sequence
  Synthetic oligonucleotide; TGG chr11 5338965 5338984 5338981 +
ttcttaatcatttctaagat

SEQ ID NO: 21603 - DNA, 20 bp, Artificial Sequence
  Synthetic oligonucleotide; TAG chr11 5338970 5338989 5338986 +
aatcatttctaagattggct

SEQ ID NO: 21604 - DNA, 20 bp, Artificial Sequence
  Synthetic oligonucleotide; CAG chr11 5338977 5338996 5338993 +
tctaagattggcttagtcta

SEQ ID NO: 21605 - DNA, 20 bp, Artificial Sequence
  Synthetic oligonucleotide; TAG chr11 5338991 5339010 5339007 +
agtctacagaaatgcacact

SEQ ID NO: 21606 - DNA, 20 bp, Artificial Sequence
  Synthetic oligonucleotide; TGG chr11 5339028 5339047 5339044 +
actcaaattaaatattctta

SEQ ID NO: 21607 - DNA, 20 bp, Artificial Sequence
  Synthetic oligonucleotide; AAG chr11 5339045 5339064 5339061 +
ttatggtatgttatcccttc

SEQ ID NO: 21608 - DNA, 20 bp, Artificial Sequence
  Synthetic oligonucleotide; AAG chr11 5339060 5339079 5339076 +
ccttcaagcccatactacac

SEQ ID NO: 21609 - DNA, 20 bp, Artificial Sequence
  Synthetic oligonucleotide; AAG chr11 5339080 5339099 5339096 +
aagtatattattatttgaaa

SEQ ID NO: 21610 - DNA, 20 bp, Artificial Sequence
  Synthetic oligonucleotide; AAG chr11 5339084 5339103 5339100 +
atattattatttgaaaaaga

SEQ ID NO: 21611 - DNA, 20 bp, Artificial Sequence
  Synthetic oligonucleotide; AGG chr11 5339085 5339104 5339101 +
tattattatttgaaaaagaa

SEQ ID NO: 21612 - DNA, 20 bp, Artificial Sequence
  Synthetic oligonucleotide; TGG chr11 5339089 5339108 5339105 +
attatttgaaaaagaaagga

SEQ ID NO: 21613 - DNA, 20 bp, Artificial Sequence
  Synthetic oligonucleotide; TGG chr11 5339096 5339115 5339112 +
gaaaaagaaaggatggtatt

SEQ ID NO: 21614 - DNA, 20 bp, Artificial Sequence
  Synthetic oligonucleotide; AAG chr11 5339100 5339119 5339116 +
aagaaaggatggtatttggc

SEQ ID NO: 21615 - DNA, 20 bp, Artificial Sequence
  Synthetic oligonucleotide; AGG chr11 5339101 5339120 5339117 +
agaaaggatggtatttggca

SEQ ID NO: 21616 - DNA, 20 bp, Artificial Sequence
  Synthetic oligonucleotide; GGG chr11 5339102 5339121 5339118 +
gaaaggatggtatttggcaa

SEQ ID NO: 21617 - DNA, 20 bp, Artificial Sequence
  Synthetic oligonucleotide; TAG chr11 5339134 5339153 5339150 +
atgtatattcttttacacct

SEQ ID NO: 21618 - DNA, 20 bp, Artificial Sequence
  Synthetic oligonucleotide; TGG chr11 5339153 5339172 5339169 +
ttagatttcccataactaca

SEQ ID NO: 21619 - DNA, 20 bp, Artificial Sequence
  Synthetic oligonucleotide; TAG chr11 5339172 5339191 5339188 +
atggtacttatttatcttaa

SEQ ID NO: 21620 - DNA, 20 bp, Artificial Sequence
  Synthetic oligonucleotide; AGG chr11 5339173 5339192 5339189 +
tggtacttatttatcttaat

SEQ ID NO: 21621 - DNA, 20 bp, Artificial Sequence
  Synthetic oligonucleotide; GAG chr11 5339198 5339217 5339214 +
ccatgaaatttattcctcat

SEQ ID NO: 21622 - DNA, 20 bp, Artificial Sequence
  Synthetic oligonucleotide; AGG chr11 5339199 5339218 5339215 +
catgaaatttattcctcatg

SEQ ID NO: 21623 - DNA, 20 bp, Artificial Sequence
  Synthetic oligonucleotide; AAG chr11 5339215 5339234 5339231 +
catgaggtccttctctatat

SEQ ID NO: 21624 - DNA, 20 bp, Artificial Sequence
  Synthetic oligonucleotide; CAG chr11 5339232 5339251 5339248 +
tataagttatattcttcttt

SEQ ID NO: 21625 - DNA, 20 bp, Artificial Sequence
  Synthetic oligonucleotide; AAG chr11 5339249 5339268 5339265 +
tttcagtcttgaatgatgaa

SEQ ID NO: 21626 - DNA, 20 bp, Artificial Sequence
  Synthetic oligonucleotide; CAG chr11 5339260 5339279 5339276 +
aatgatgaaaagctgaatta

SEQ ID NO: 21627 - DNA, 20 bp, Artificial Sequence
  Synthetic oligonucleotide; AGG chr11 5339261 5339280 5339277 +
atgatgaaaagctgaattac

SEQ ID NO: 21628 - DNA, 20 bp, Artificial Sequence
  Synthetic oligonucleotide; AAG chr11 5339277 5339296 5339293 +
ttacaggcttcacctgctgt

SEQ ID NO: 21629 - DNA, 20 bp, Artificial Sequence
  Synthetic oligonucleotide; AAG chr11 5339280 5339299 5339296 +
caggcttcacctgctgtaag

SEQ ID NO: 21630 - DNA, 20 bp, Artificial Sequence
  Synthetic oligonucleotide; AGG chr11 5339281 5339300 5339297 +
aggcttcacctgctgtaaga

SEQ ID NO: 21631 - DNA, 20 bp, Artificial Sequence
  Synthetic oligonucleotide; TGG chr11 5339284 5339303 5339300 +
cttcacctgctgtaagaagg

SEQ ID NO: 21632 - DNA, 20 bp, Artificial Sequence
  Synthetic oligonucleotide; CAG chr11 5339292 5339311 5339308 +
gctgtaagaaggtggttcac

SEQ ID NO: 21633 - DNA, 20 bp, Artificial Sequence
  Synthetic oligonucleotide; TAG chr11 5339300 5339319 5339316 +
aaggtggttcaccagtttgt

SEQ ID NO: 21634 - DNA, 20 bp, Artificial Sequence
  Synthetic oligonucleotide; TGG chr11 5339308 5339327 5339324 +
tcaccagtttgttagtccac

SEQ ID NO: 21635 - DNA, 20 bp, Artificial Sequence
  Synthetic oligonucleotide; CAG chr11 5339354 5339373 5339370 +
tatgaatacaaattcatgtg

SEQ ID NO: 21636 - DNA, 20 bp, Artificial Sequence
  Synthetic oligonucleotide; TAG chr11 5339364 5339383 5339380 +
aattcatgtgcagtgtttcc

SEQ ID NO: 21637 - DNA, 20 bp, Artificial Sequence
  Synthetic oligonucleotide; AGG chr11 5339365 5339384 5339381 +
attcatgtgcagtgtttcct

SEQ ID NO: 21638 - DNA, 20 bp, Artificial Sequence
  Synthetic oligonucleotide; GAG chr11 5339367 5339386 5339383 +
tcatgtgcagtgtttcctag

SEQ ID NO: 21639 - DNA, 20 bp, Artificial Sequence
  Synthetic oligonucleotide; TAG chr11 5339371 5339390 5339387 +
gtgcagtgtttcctaggaga

SEQ ID NO: 21640 - DNA, 20 bp, Artificial Sequence
  Synthetic oligonucleotide; TAG chr11 5339383 5339402 5339399 +
ctaggagatagtgttataaa

SEQ ID NO: 21641 - DNA, 20 bp, Artificial Sequence
  Synthetic oligonucleotide; AGG chr11 5339384 5339403 5339400 +
taggagatagtgttataaat

SEQ ID NO: 21642 - DNA, 20 bp, Artificial Sequence
  Synthetic oligonucleotide; TAG chr11 5339413 5339432 5339429 +
ttcctaactaacttttattt

SEQ ID NO: 21643 - DNA, 20 bp, Artificial Sequence
  Synthetic oligonucleotide; AGG chr11 5339414 5339433 5339430 +
tcctaactaacttttatttt

SEQ ID NO: 21644 - DNA, 20 bp, Artificial Sequence
  Synthetic oligonucleotide; CAG chr11 5339419 5339438 5339435 +
actaacttttattttaggtt

SEQ ID NO: 21645 - DNA, 20 bp, Artificial Sequence
  Synthetic oligonucleotide; AGG chr11 5339420 5339439 5339436 +
ctaacttttattttaggttc

SEQ ID NO: 21646 - DNA, 20 bp, Artificial Sequence
  Synthetic oligonucleotide; GAG chr11 5339422 5339441 5339438 +
aacttttattttaggttcag

SEQ ID NO: 21647 - DNA, 20 bp, Artificial Sequence
  Synthetic oligonucleotide; AAG chr11 5339428 5339447 5339444 +
tattttaggttcaggagtac

SEQ ID NO: 21648 - DNA, 20 bp, Artificial Sequence
  Synthetic oligonucleotide; GAG chr11 5339430 5339449 5339446 +
ttttaggttcaggagtacaa

SEQ ID NO: 21649 - DNA, 20 bp, Artificial Sequence
  Synthetic oligonucleotide; CAG chr11 5339433 5339452 5339449 +
taggttcaggagtacaagag

SEQ ID NO: 21650 - DNA, 20 bp, Artificial Sequence
  Synthetic oligonucleotide; AGG chr11 5339434 5339453 5339450 +
aggttcaggagtacaagagc

SEQ ID NO: 21651 - DNA, 20 bp, Artificial Sequence
  Synthetic oligonucleotide; GAG chr11 5339464 5339483 5339480 +
catatttaaacttgtgtcac

SEQ ID NO: 21652 - DNA, 20 bp, Artificial Sequence
  Synthetic oligonucleotide; AGG chr11 5339465 5339484 5339481 +
atatttaaacttgtgtcacg

SEQ ID NO: 21653 - DNA, 20 bp, Artificial Sequence
  Synthetic oligonucleotide; GGG chr11 5339466 5339485 5339482 +
tatttaaacttgtgtcacga

SEQ ID NO: 21654 - DNA, 20 bp, Artificial Sequence
  Synthetic oligonucleotide; CAG chr11 5339478 5339497 5339494 +
tgtcacgagggtttgttgta

SEQ ID NO: 21655 - DNA, 20 bp, Artificial Sequence
  Synthetic oligonucleotide; CAG chr11 5339499 5339518 5339515 +
agattatgtcatcactcact

SEQ ID NO: 21656 - DNA, 20 bp, Artificial Sequence
  Synthetic oligonucleotide; AGG chr11 5339500 5339519 5339516 +
gattatgtcatcactcactc

SEQ ID NO: 21657 - DNA, 20 bp, Artificial Sequence
  Synthetic oligonucleotide; AAG chr11 5339507 5339526 5339523 +
tcatcactcactcaggtatt

SEQ ID NO: 21658 - DNA, 20 bp, Artificial Sequence
  Synthetic oligonucleotide; TAG chr11 5339512 5339531 5339528 +
actcactcaggtattaagcc

SEQ ID NO: 21659 - DNA, 20 bp, Artificial Sequence
  Synthetic oligonucleotide; TAG chr11 5339570 5339589 5339586 +
tttcaccctccatcctccaa

SEQ ID NO: 21660 - DNA, 20 bp, Artificial Sequence
  Synthetic oligonucleotide; AGG chr11 5339571 5339590 5339587 +
ttcaccctccatcctccaat

SEQ ID NO: 21661 - DNA, 20 bp, Artificial Sequence
  Synthetic oligonucleotide; CAG chr11 5339577 5339596 5339593 +
ctccatcctccaataggccc

SEQ ID NO: 21662 - DNA, 20 bp, Artificial Sequence
  Synthetic oligonucleotide; TAG chr11 5339622 5339641 5339638 +
gtccatgtgttctcatcatt

SEQ ID NO: 21663 - DNA, 20 bp, Artificial Sequence
  Synthetic oligonucleotide; AAG chr11 5339636 5339655 5339652 +
atcatttagctcccactcat

SEQ ID NO: 21664 - DNA, 20 bp, Artificial Sequence
  Synthetic oligonucleotide; GAG chr11 5339640 5339659 5339656 +
tttagctcccactcataagt

SEQ ID NO: 21665 - DNA, 20 bp, Artificial Sequence
  Synthetic oligonucleotide; TGG chr11 5339649 5339668 5339665 +
cactcataagtgagaacacg

SEQ ID NO: 21666 - DNA, 20 bp, Artificial Sequence
  Synthetic oligonucleotide; TGG chr11 5339656 5339675 5339672 +
aagtgagaacacgtggtatt

SEQ ID NO: 21667 - DNA, 20 bp, Artificial Sequence
  Synthetic oligonucleotide; AAG chr11 5339684 5339703 5339700 +
tgttcctgtattaatttgct

SEQ ID NO: 21668 - DNA, 20 bp, Artificial Sequence
  Synthetic oligonucleotide; AGG chr11 5339685 5339704 5339701 +
gttcctgtattaatttgcta

SEQ ID NO: 21669 - DNA, 20 bp, Artificial Sequence
  Synthetic oligonucleotide; TAG chr11 5339695 5339714 5339711 +
taatttgctaaggcttctaa

SEQ ID NO: 21670 - DNA, 20 bp, Artificial Sequence
  Synthetic oligonucleotide; TAG chr11 5339702 5339721 5339718 +
ctaaggcttctaatagtaca

SEQ ID NO: 21671 - DNA, 20 bp, Artificial Sequence
  Synthetic oligonucleotide; CAG chr11 5339715 5339734 5339731 +
tagtacatagcattttacca

SEQ ID NO: 21672 - DNA, 20 bp, Artificial Sequence
  Synthetic oligonucleotide; AGG chr11 5339716 5339735 5339732 +
agtacatagcattttaccac

SEQ ID NO: 21673 - DNA, 20 bp, Artificial Sequence
  Synthetic oligonucleotide; AAG chr11 5339719 5339738 5339735 +
acatagcattttaccacagg

SEQ ID NO: 21674 - DNA, 20 bp, Artificial Sequence
  Synthetic oligonucleotide; TAG chr11 5339727 5339746 5339743 +
ttttaccacaggaagacttg

SEQ ID NO: 21675 - DNA, 20 bp, Artificial Sequence
  Synthetic oligonucleotide; AGG chr11 5339728 5339747 5339744 +
tttaccacaggaagacttgt

SEQ ID NO: 21676 - DNA, 20 bp, Artificial Sequence
  Synthetic oligonucleotide; GAG chr11 5339730 5339749 5339746 +
taccacaggaagacttgtag

SEQ ID NO: 21677 - DNA, 20 bp, Artificial Sequence
  Synthetic oligonucleotide; CAG chr11 5339737 5339756 5339753 +
ggaagacttgtaggagatca

SEQ ID NO: 21678 - DNA, 20 bp, Artificial Sequence
  Synthetic oligonucleotide; AAG chr11 5339741 5339760 5339757 +
gacttgtaggagatcacaga

SEQ ID NO: 21679 - DNA, 20 bp, Artificial Sequence
  Synthetic oligonucleotide; TGG chr11 5339796 5339815 5339812 +
gtttatgttgattgttacaa

SEQ ID NO: 21680 - DNA, 20 bp, Artificial Sequence
  Synthetic oligonucleotide; GGG chr11 5339797 5339816 5339813 +
tttatgttgattgttacaat

SEQ ID NO: 21681 - DNA, 20 bp, Artificial Sequence
  Synthetic oligonucleotide; TAG chr11 5339807 5339826 5339823 +
ttgttacaatgggttttgaa

SEQ ID NO: 21682 - DNA, 20 bp, Artificial Sequence
  Synthetic oligonucleotide; GAG chr11 5339822 5339841 5339838 +
ttgaatagaaaaacatgtct

SEQ ID NO: 21683 - DNA, 20 bp, Artificial Sequence
  Synthetic oligonucleotide; TGG chr11 5339825 5339844 5339841 +
aatagaaaaacatgtctgag

SEQ ID NO: 21684 - DNA, 20 bp, Artificial Sequence
  Synthetic oligonucleotide; TAG chr11 5339840 5339859 5339856 +
ctgagtggatttccaccatg

SEQ ID NO: 21685 - DNA, 20 bp, Artificial Sequence
  Synthetic oligonucleotide; AAG chr11 5339857 5339876 5339873 +
atgtagccttctgtataact

SEQ ID NO: 21686 - DNA, 20 bp, Artificial Sequence
  Synthetic oligonucleotide; GAG chr11 5339863 5339882 5339879 +
ccttctgtataactaagttt

SEQ ID NO: 21687 - DNA, 20 bp, Artificial Sequence
  Synthetic oligonucleotide; TAG chr11 5339875 5339894 5339891 +
ctaagtttgagataattatt

SEQ ID NO: 21688 - DNA, 20 bp, Artificial Sequence
  Synthetic oligonucleotide; CAG chr11 5339920 5339939 5339936 +
ctgtgtctgtattcatccta

SEQ ID NO: 21689 - DNA, 20 bp, Artificial Sequence
  Synthetic oligonucleotide; CAG chr11 5339931 5339950 5339947 +
ttcatcctacagcatcttct

SEQ ID NO: 21690 - DNA, 20 bp, Artificial Sequence
  Synthetic oligonucleotide; TAG chr11 5339940 5339959 5339956 +
cagcatcttctcagtgaatt

SEQ ID NO: 21691 - DNA, 20 bp, Artificial Sequence
  Synthetic oligonucleotide; AAG chr11 5339959 5339978 5339975 +
ttagtttcacacttactttc

SEQ ID NO: 21692 - DNA, 20 bp, Artificial Sequence
  Synthetic oligonucleotide; CAG chr11 5339963 5339982 5339979 +
tttcacacttactttcaagt

SEQ ID NO: 21693 - DNA, 20 bp, Artificial Sequence
  Synthetic oligonucleotide; AAG chr11 5339983 5340002 5339999 +
cagaaatgaacttcttaaac

SEQ ID NO: 21694 - DNA, 20 bp, Artificial Sequence
  Synthetic oligonucleotide; AGG chr11 5339984 5340003 5340000 +
agaaatgaacttcttaaaca

SEQ ID NO: 21695 - DNA, 20 bp, Artificial Sequence
  Synthetic oligonucleotide; GGG chr11 5339985 5340004 5340001 +
gaaatgaacttcttaaacaa

SEQ ID NO: 21696 - DNA, 20 bp, Artificial Sequence
  Synthetic oligonucleotide; TGG chr11 5340015 5340034 5340031 +
ttcataaatcattcaccaaa

SEQ ID NO: 21697 - DNA, 20 bp, Artificial Sequence
  Synthetic oligonucleotide; TAG chr11 5340037 5340056 5340053 +
gtcaactttcctgccatttt

SEQ ID NO: 21698 - DNA, 20 bp, Artificial Sequence
  Synthetic oligonucleotide; AGG chr11 5340038 5340057 5340054 +
tcaactttcctgccattttt

SEQ ID NO: 21699 - DNA, 20 bp, Artificial Sequence
  Synthetic oligonucleotide; TAG chr11 5340058 5340077 5340074 +
aggttccatttcctgtattt

SEQ ID NO: 21700 - DNA, 20 bp, Artificial Sequence
  Synthetic oligonucleotide; AAG chr11 5340064 5340083 5340080 +
catttcctgtattttagaaa

SEQ ID NO: 21701 - DNA, 20 bp, Artificial Sequence
  Synthetic oligonucleotide; GAG chr11 5340066 5340085 5340082 +
tttcctgtattttagaaaaa

SEQ ID NO: 21702 - DNA, 20 bp, Artificial Sequence
  Synthetic oligonucleotide; AGG chr11 5340067 5340086 5340083 +
ttcctgtattttagaaaaag

SEQ ID NO: 21703 - DNA, 20 bp, Artificial Sequence
  Synthetic oligonucleotide; CAG chr11 5340070 5340089 5340086 +
ctgtattttagaaaaagagg

SEQ ID NO: 21704 - DNA, 20 bp, Artificial Sequence
  Synthetic oligonucleotide; CAG chr11 5340086 5340105 5340102 +
gaggcagctcttctacctaa

SEQ ID NO: 21705 - DNA, 20 bp, Artificial Sequence
  Synthetic oligonucleotide; CAG chr11 5340096 5340115 5340112 +
ttctacctaacagtattttc

SEQ ID NO: 21706 - DNA, 20 bp, Artificial Sequence
  Synthetic oligonucleotide; TAG chr11 5340109 5340128 5340125 +
tattttccagttttaaatat

SEQ ID NO: 21707 - DNA, 20 bp, Artificial Sequence
  Synthetic oligonucleotide; TAG chr11 5340113 5340132 5340129 +
ttccagttttaaatattagt

SEQ ID NO: 21708 - DNA, 20 bp, Artificial Sequence
  Synthetic oligonucleotide; GAG chr11 5340115 5340134 5340131 +
ccagttttaaatattagtta

SEQ ID NO: 21709 - DNA, 20 bp, Artificial Sequence
  Synthetic oligonucleotide; AAG chr11 5340118 5340137 5340134 +
gttttaaatattagttagag

SEQ ID NO: 21710 - DNA, 20 bp, Artificial Sequence
  Synthetic oligonucleotide; GAG chr11 5340139 5340158 5340155 +
agattcacatatctataact

SEQ ID NO: 21711 - DNA, 20 bp, Artificial Sequence
  Synthetic oligonucleotide; TAG chr11 5340158 5340177 5340174 +
tgagatgatataattattaa

SEQ ID NO: 21712 - DNA, 20 bp, Artificial Sequence
  Synthetic oligonucleotide; TGG chr11 5340165 5340184 5340181 +
atataattattaatagcctt

SEQ ID NO: 21713 - DNA, 20 bp, Artificial Sequence
  Synthetic oligonucleotide; AAG chr11 5340172 5340191 5340188 +
tattaatagcctttggttat

SEQ ID NO: 21714 - DNA, 20 bp, Artificial Sequence
  Synthetic oligonucleotide; TAG chr11 5340192 5340211 5340208 +
aagtgaaactcaactgaaac

SEQ ID NO: 21715 - DNA, 20 bp, Artificial Sequence
  Synthetic oligonucleotide; AGG chr11 5340193 5340212 5340209 +
agtgaaactcaactgaaact

SEQ ID NO: 21716 - DNA, 20 bp, Artificial Sequence
  Synthetic oligonucleotide; AAG chr11 5340214 5340233 5340230 +
ggctgaacaaaacaaattac

SEQ ID NO: 21717 - DNA, 20 bp, Artificial Sequence
  Synthetic oligonucleotide; AAG chr11 5340217 5340236 5340233 +
tgaacaaaacaaattacaag

SEQ ID NO: 21718 - DNA, 20 bp, Artificial Sequence
  Synthetic oligonucleotide; GAG chr11 5340219 5340238 5340235 +
aacaaaacaaattacaagaa

SEQ ID NO: 21719 - DNA, 20 bp, Artificial Sequence
  Synthetic oligonucleotide; AGG chr11 5340220 5340239 5340236 +
acaaaacaaattacaagaag

SEQ ID NO: 21720 - DNA, 20 bp, Artificial Sequence
  Synthetic oligonucleotide; GAG chr11 5340222 5340241 5340238 +
aaaacaaattacaagaagag

SEQ ID NO: 21721 - DNA, 20 bp, Artificial Sequence
  Synthetic oligonucleotide; TAG chr11 5340230 5340249 5340246 +
ttacaagaagaggagtttat

SEQ ID NO: 21722 - DNA, 20 bp, Artificial Sequence
  Synthetic oligonucleotide; AGG chr11 5340231 5340250 5340247 +
tacaagaagaggagtttatt

SEQ ID NO: 21723 - DNA, 20 bp, Artificial Sequence
  Synthetic oligonucleotide; TGG chr11 5340237 5340256 5340253 +
aagaggagtttattaggctg

SEQ ID NO: 21724 - DNA, 20 bp, Artificial Sequence
  Synthetic oligonucleotide; AAG chr11 5340250 5340269 5340266 +
taggctgtggaatcaaaaaa

SEQ ID NO: 21725 - DNA, 20 bp, Artificial Sequence
  Synthetic oligonucleotide; GAG chr11 5340277 5340296 5340293 +
aaactgtcctccttgtcact

SEQ ID NO: 21726 - DNA, 20 bp, Artificial Sequence
  Synthetic oligonucleotide; CAG chr11 5340283 5340302 5340299 +
tcctccttgtcactgagtct

SEQ ID NO: 21727 - DNA, 20 bp, Artificial Sequence
  Synthetic oligonucleotide; AGG chr11 5340284 5340303 5340300 +
cctccttgtcactgagtctc

SEQ ID NO: 21728 - DNA, 20 bp, Artificial Sequence
  Synthetic oligonucleotide; TGG chr11 5340293 5340312 5340309 +
cactgagtctcaggaaaaca

SEQ ID NO: 21729 - DNA, 20 bp, Artificial Sequence
  Synthetic oligonucleotide; CAG chr11 5340299 5340318 5340315 +
gtctcaggaaaacatggaat

SEQ ID NO: 21730 - DNA, 20 bp, Artificial Sequence
  Synthetic oligonucleotide; GAG chr11 5340301 5340320 5340317 +
ctcaggaaaacatggaatca

SEQ ID NO: 21731 - DNA, 20 bp, Artificial Sequence
  Synthetic oligonucleotide; AAG chr11 5340309 5340328 5340325 +
aacatggaatcagagatttg

SEQ ID NO: 21732 - DNA, 20 bp, Artificial Sequence
  Synthetic oligonucleotide; TAG chr11 5340367 5340386 5340383 +
tttactctaaatatttatta

SEQ ID NO: 21733 - DNA, 20 bp, Artificial Sequence
  Synthetic oligonucleotide; AAG chr11 5340374 5340393 5340390 +
taaatatttattatagtttg

SEQ ID NO: 21734 - DNA, 20 bp, Artificial Sequence
  Synthetic oligonucleotide; AAG chr11 5340415 5340434 5340431 +
acattgtcattaacaattct

SEQ ID NO: 21735 - DNA, 20 bp, Artificial Sequence
  Synthetic oligonucleotide; TAG chr11 5340428 5340447 5340444 +
caattctaagcattgcattt

SEQ ID NO: 21736 - DNA, 20 bp, Artificial Sequence
  Synthetic oligonucleotide; AAG chr11 5340445 5340464 5340461 +
ttttagtaattctacaacaa

SEQ ID NO: 21737 - DNA, 20 bp, Artificial Sequence
  Synthetic oligonucleotide; AAG chr11 5340498 5340517 5340514 +
ttgaaaaattctttttaaaa

SEQ ID NO: 21738 - DNA, 20 bp, Artificial Sequence
  Synthetic oligonucleotide; CGG chr11 5340512 5340531 5340528 +
ttaaaaaagttcttctactg

SEQ ID NO: 21739 - DNA, 20 bp, Artificial Sequence
  Synthetic oligonucleotide; TAG chr11 5340516 5340535 5340532 +
aaaagttcttctactgcggt

SEQ ID NO: 21740 - DNA, 20 bp, Artificial Sequence
  Synthetic oligonucleotide; AGG chr11 5340517 5340536 5340533 +
aaagttcttctactgcggtt

SEQ ID NO: 21741 - DNA, 20 bp, Artificial Sequence
  Synthetic oligonucleotide; GAG chr11 5340519 5340538 5340535 +
agttcttctactgcggttag

SEQ ID NO: 21742 - DNA, 20 bp, Artificial Sequence
  Synthetic oligonucleotide; TGG chr11 5340524 5340543 5340540 +
ttctactgcggttaggagtt

SEQ ID NO: 21743 - DNA, 20 bp, Artificial Sequence
  Synthetic oligonucleotide; GAG chr11 5340526 5340545 5340542 +
ctactgcggttaggagtttg

SEQ ID NO: 21744 - DNA, 20 bp, Artificial Sequence
  Synthetic oligonucleotide; CAG chr11 5340545 5340564 5340561 +
ggagatacaatgcaaaatat

SEQ ID NO: 21745 - DNA, 20 bp, Artificial Sequence
  Synthetic oligonucleotide; TAG chr11 5340554 5340573 5340570 +
atgcaaaatatcagttttca

SEQ ID NO: 21746 - DNA, 20 bp, Artificial Sequence
  Synthetic oligonucleotide; AGG chr11 5340555 5340574 5340571 +
tgcaaaatatcagttttcat

SEQ ID NO: 21747 - DNA, 20 bp, Artificial Sequence
  Synthetic oligonucleotide; GGG chr11 5340556 5340575 5340572 +
gcaaaatatcagttttcata

SEQ ID NO: 21748 - DNA, 20 bp, Artificial Sequence
  Synthetic oligonucleotide; TGG chr11 5340570 5340589 5340586 +
ttcatagggaacaatatttt

SEQ ID NO: 21749 - DNA, 20 bp, Artificial Sequence
  Synthetic oligonucleotide; GAG chr11 5340572 5340591 5340588 +
catagggaacaatatttttg

SEQ ID NO: 21750 - DNA, 20 bp, Artificial Sequence
  Synthetic oligonucleotide; TAG chr11 5340575 5340594 5340591 +
agggaacaatatttttggag

SEQ ID NO: 21751 - DNA, 20 bp, Artificial Sequence
  Synthetic oligonucleotide; AAG chr11 5340578 5340597 5340594 +
gaacaatatttttggagtag

SEQ ID NO: 21752 - DNA, 20 bp, Artificial Sequence
  Synthetic oligonucleotide; AGG chr11 5340579 5340598 5340595 +
aacaatatttttggagtaga

SEQ ID NO: 21753 - DNA, 20 bp, Artificial Sequence
  Synthetic oligonucleotide; GAG chr11 5340581 5340600 5340597 +
caatatttttggagtagaag

SEQ ID NO: 21754 - DNA, 20 bp, Artificial Sequence
  Synthetic oligonucleotide; AGG chr11 5340582 5340601 5340598 +
aatatttttggagtagaagg

SEQ ID NO: 21755 - DNA, 20 bp, Artificial Sequence
  Synthetic oligonucleotide; GAG chr11 5340584 5340603 5340600 +
tatttttggagtagaaggag

SEQ ID NO: 21756 - DNA, 20 bp, Artificial Sequence
  Synthetic oligonucleotide; CAG chr11 5340594 5340613 5340610 +
gtagaaggaggagaaatttt

SEQ ID NO: 21757 - DNA, 20 bp, Artificial Sequence
  Synthetic oligonucleotide; AAG chr11 5340600 5340619 5340616 +
ggaggagaaattttcagaaa

SEQ ID NO: 21758 - DNA, 20 bp, Artificial Sequence
  Synthetic oligonucleotide; AAG chr11 5340604 5340623 5340620 +
gagaaattttcagaaaaaga

SEQ ID NO: 21759 - DNA, 20 bp, Artificial Sequence
  Synthetic oligonucleotide; TAG chr11 5340607 5340626 5340623 +
aaattttcagaaaaagaaag

SEQ ID NO: 21760 - DNA, 20 bp, Artificial Sequence
  Synthetic oligonucleotide; AGG chr11 5340608 5340627 5340624 +
aattttcagaaaaagaaagt

SEQ ID NO: 21761 - DNA, 20 bp, Artificial Sequence
  Synthetic oligonucleotide; AAG chr11 5340617 5340636 5340633 +
aaaaagaaagtaggtactac

SEQ ID NO: 21762 - DNA, 20 bp, Artificial Sequence
  Synthetic oligonucleotide; CGG chr11 5340625 5340644 5340641 +
agtaggtactacaagcatga

SEQ ID NO: 21763 - DNA, 20 bp, Artificial Sequence
  Synthetic oligonucleotide; AAG chr11 5340633 5340652 5340649 +
ctacaagcatgacggaatac

SEQ ID NO: 21764 - DNA, 20 bp, Artificial Sequence
  Synthetic oligonucleotide; AGG chr11 5340634 5340653 5340650 +
tacaagcatgacggaataca

SEQ ID NO: 21765 - DNA, 20 bp, Artificial Sequence
  Synthetic oligonucleotide; AAG chr11 5340641 5340660 5340657 +
atgacggaatacaaggcaaa

SEQ ID NO: 21766 - DNA, 20 bp, Artificial Sequence
  Synthetic oligonucleotide; TAG chr11 5340644 5340663 5340660 +
acggaatacaaggcaaaaag

SEQ ID NO: 21767 - DNA, 20 bp, Artificial Sequence
  Synthetic oligonucleotide; AAG chr11 5340647 5340666 5340663 +
gaatacaaggcaaaaagtag

SEQ ID NO: 21768 - DNA, 20 bp, Artificial Sequence
  Synthetic oligonucleotide; AAG chr11 5340655 5340674 5340671 +
ggcaaaaagtagaagccact

SEQ ID NO: 21769 - DNA, 20 bp, Artificial Sequence
  Synthetic oligonucleotide; AGG chr11 5340656 5340675 5340672 +
gcaaaaagtagaagccacta

SEQ ID NO: 21770 - DNA, 20 bp, Artificial Sequence
  Synthetic oligonucleotide; TAG chr11 5340660 5340679 5340676 +
aaagtagaagccactaagga

SEQ ID NO: 21771 - DNA, 20 bp, Artificial Sequence
  Synthetic oligonucleotide; TAG chr11 5340670 5340689 5340686 +
ccactaaggatagtctactg

SEQ ID NO: 21772 - DNA, 20 bp, Artificial Sequence
  Synthetic oligonucleotide; TGG chr11 5340673 5340692 5340689 +
ctaaggatagtctactgtag

SEQ ID NO: 21773 - DNA, 20 bp, Artificial Sequence
  Synthetic oligonucleotide; GAG chr11 5340675 5340694 5340691 +
aaggatagtctactgtagtg

SEQ ID NO: 21774 - DNA, 20 bp, Artificial Sequence
  Synthetic oligonucleotide; TGG chr11 5340690 5340709 5340706 +
tagtggagtaccattcacac

SEQ ID NO: 21775 - DNA, 20 bp, Artificial Sequence
  Synthetic oligonucleotide; TAG chr11 5340698 5340717 5340714 +
taccattcacactggcctta

SEQ ID NO: 21776 - DNA, 20 bp, Artificial Sequence
  Synthetic oligonucleotide; TAG chr11 5340702 5340721 5340718 +
attcacactggccttatagt

SEQ ID NO: 21777 - DNA, 20 bp, Artificial Sequence
  Synthetic oligonucleotide; AAG chr11 5340705 5340724 5340721 +
cacactggccttatagttag

SEQ ID NO: 21778 - DNA, 20 bp, Artificial Sequence
  Synthetic oligonucleotide; TGG chr11 5340754 5340773 5340770 +
aattaaaaatgttatgccct

SEQ ID NO: 21779 - DNA, 20 bp, Artificial Sequence
  Synthetic oligonucleotide; GAG chr11 5340756 5340775 5340772 +
ttaaaaatgttatgcccttg

SEQ ID NO: 21780 - DNA, 20 bp, Artificial Sequence
  Synthetic oligonucleotide; AGG chr11 5340757 5340776 5340773 +
taaaaatgttatgcccttgg

SEQ ID NO: 21781 - DNA, 20 bp, Artificial Sequence
  Synthetic oligonucleotide; GGG chr11 5340758 5340777 5340774 +
aaaaatgttatgcccttgga

SEQ ID NO: 21782 - DNA, 20 bp, Artificial Sequence
  Synthetic oligonucleotide; AAG chr11 5340795 5340814 5340811 +
ttatattaaatttccccatc

SEQ ID NO: 21783 - DNA, 20 bp, Artificial Sequence
  Synthetic oligonucleotide; CAG chr11 5340802 5340821 5340818 +
aaatttccccatcaagaaaa

SEQ ID NO: 21784 - DNA, 20 bp, Artificial Sequence
  Synthetic oligonucleotide; AAG chr11 5340843 5340862 5340859 +
aatatttttatgaataaaat

SEQ ID NO: 21785 - DNA, 20 bp, Artificial Sequence
  Synthetic oligonucleotide; TGG chr11 5340849 5340868 5340865 +
tttatgaataaaataagttg

SEQ ID NO: 21786 - DNA, 20 bp, Artificial Sequence
  Synthetic oligonucleotide; TAG chr11 5340855 5340874 5340871 +
aataaaataagttgtggatg

SEQ ID NO: 21787 - DNA, 20 bp, Artificial Sequence
  Synthetic oligonucleotide; TAG chr11 5340858 5340877 5340874 +
aaaataagttgtggatgtag

SEQ ID NO: 21788 - DNA, 20 bp, Artificial Sequence
  Synthetic oligonucleotide; GAG chr11 5340860 5340879 5340876 +
aataagttgtggatgtagta

SEQ ID NO: 21789 - DNA, 20 bp, Artificial Sequence
  Synthetic oligonucleotide; AAG chr11 5340870 5340889 5340886 +
ggatgtagtagagcataatt

SEQ ID NO: 21790 - DNA, 20 bp, Artificial Sequence
  Synthetic oligonucleotide; AGG chr11 5340871 5340890 5340887 +
gatgtagtagagcataatta

SEQ ID NO: 21791 - DNA, 20 bp, Artificial Sequence
  Synthetic oligonucleotide; GGG chr11 5340872 5340891 5340888 +
atgtagtagagcataattaa

SEQ ID NO: 21792 - DNA, 20 bp, Artificial Sequence
  Synthetic oligonucleotide; TGG chr11 5340884 5340903 5340900 +
ataattaagggacacatgtt

SEQ ID NO: 21793 - DNA, 20 bp, Artificial Sequence
  Synthetic oligonucleotide; CAG chr11 5340906 5340925 5340922 +
gttttatgaatgattgaaaa

SEQ ID NO: 21794 - DNA, 20 bp, Artificial Sequence
  Synthetic oligonucleotide; AGG chr11 5340907 5340926 5340923 +
ttttatgaatgattgaaaac

SEQ ID NO: 21795 - DNA, 20 bp, Artificial Sequence
  Synthetic oligonucleotide; TAG chr11 5340952 5340971 5340968 +
atgcactcacactcacaatt

SEQ ID NO: 21796 - DNA, 20 bp, Artificial Sequence
  Synthetic oligonucleotide; CAG chr11 5340959 5340978 5340975 +
cacactcacaatttagtatt

SEQ ID NO: 21797 - DNA, 20 bp, Artificial Sequence
  Synthetic oligonucleotide; CAG chr11 5340973 5340992 5340989 +
agtattcagactgtgttgct

SEQ ID NO: 21798 - DNA, 20 bp, Artificial Sequence
  Synthetic oligonucleotide; AGG chr11 5340974 5340993 5340990 +
gtattcagactgtgttgctc

SEQ ID NO: 21799 - DNA, 20 bp, Artificial Sequence
  Synthetic oligonucleotide; TGG chr11 5340982 5341001 5340998 +
actgtgttgctcaggtgaca

SEQ ID NO: 21800 - DNA, 20 bp, Artificial Sequence
  Synthetic oligonucleotide; AAG chr11 5340991 5341010 5341007 +
ctcaggtgacatggcgtgac

SEQ ID NO: 21801 - DNA, 20 bp, Artificial Sequence
  Synthetic oligonucleotide; AGG chr11 5340992 5341011 5341008 +
tcaggtgacatggcgtgaca

SEQ ID NO: 21802 - DNA, 20 bp, Artificial Sequence
  Synthetic oligonucleotide; AAG chr11 5341010 5341029 5341026 +
caaggataaaaaacatgata

SEQ ID NO: 21803 - DNA, 20 bp, Artificial Sequence
  Synthetic oligonucleotide; CAG chr11 5341031 5341050 5341047 +
agctgatttttttatatgtt

SEQ ID NO: 21804 - DNA, 20 bp, Artificial Sequence
  Synthetic oligonucleotide; CAG chr11 5341063 5341082 5341079 +
aattacatctcttaatgaaa

SEQ ID NO: 21805 - DNA, 20 bp, Artificial Sequence
  Synthetic oligonucleotide; AAG chr11 5341075 5341094 5341091 +
taatgaaacagaatataaat

SEQ ID NO: 21806 - DNA, 20 bp, Artificial Sequence
  Synthetic oligonucleotide; AGG chr11 5341076 5341095 5341092 +
aatgaaacagaatataaata

SEQ ID NO: 21807 - DNA, 20 bp, Artificial Sequence
  Synthetic oligonucleotide; CAG chr11 5341083 5341102 5341099 +
cagaatataaataaggattg

SEQ ID NO: 21808 - DNA, 20 bp, Artificial Sequence
  Synthetic oligonucleotide; AAG chr11 5341094 5341113 5341110 +
taaggattgcagtttttctt

SEQ ID NO: 21809 - DNA, 20 bp, Artificial Sequence
  Synthetic oligonucleotide; TGG chr11 5341098 5341117 5341114 +
gattgcagtttttcttaagt

SEQ ID NO: 21810 - DNA, 20 bp, Artificial Sequence
  Synthetic oligonucleotide; GAG chr11 5341110 5341129 5341126 +
tcttaagttggactctctat

SEQ ID NO: 21811 - DNA, 20 bp, Artificial Sequence
  Synthetic oligonucleotide; GAG chr11 5341121 5341140 5341137 +
actctctatgagcaatacct

SEQ ID NO: 21812 - DNA, 20 bp, Artificial Sequence
  Synthetic oligonucleotide; TAG chr11 5341125 5341144 5341141 +
tctatgagcaatacctgaga

SEQ ID NO: 21813 - DNA, 20 bp, Artificial Sequence
  Synthetic oligonucleotide; AGG chr11 5341126 5341145 5341142 +
ctatgagcaatacctgagat

SEQ ID NO: 21814 - DNA, 20 bp, Artificial Sequence
  Synthetic oligonucleotide; GGG chr11 5341127 5341146 5341143 +
tatgagcaatacctgagata

SEQ ID NO: 21815 - DNA, 20 bp, Artificial Sequence
  Synthetic oligonucleotide; CAG chr11 5341164 5341183 5341180 +
aatttattaatgaatgctct

SEQ ID NO: 21816 - DNA, 20 bp, Artificial Sequence
  Synthetic oligonucleotide; AGG chr11 5341165 5341184 5341181 +
atttattaatgaatgctctc

SEQ ID NO: 21817 - DNA, 20 bp, Artificial Sequence
  Synthetic oligonucleotide; GAG chr11 5341167 5341186 5341183 +
ttattaatgaatgctctcag

SEQ ID NO: 21818 - DNA, 20 bp, Artificial Sequence
  Synthetic oligonucleotide; CAG chr11 5341171 5341190 5341187 +
taatgaatgctctcaggaga

SEQ ID NO: 21819 - DNA, 20 bp, Artificial Sequence
  Synthetic oligonucleotide; AGG chr11 5341172 5341191 5341188 +
aatgaatgctctcaggagac

SEQ ID NO: 21820 - DNA, 20 bp, Artificial Sequence
  Synthetic oligonucleotide; GGG chr11 5341173 5341192 5341189 +
atgaatgctctcaggagaca

SEQ ID NO: 21821 - DNA, 20 bp, Artificial Sequence
  Synthetic oligonucleotide; GAG chr11 5341175 5341194 5341191 +
gaatgctctcaggagacagg

SEQ ID NO: 21822 - DNA, 20 bp, Artificial Sequence
  Synthetic oligonucleotide; AAG chr11 5341179 5341198 5341195 +
gctctcaggagacagggagc

SEQ ID NO: 21823 - DNA, 20 bp, Artificial Sequence
  Synthetic oligonucleotide; AAG chr11 5341185 5341204 5341201 +
aggagacagggagcaagtaa

SEQ ID NO: 21824 - DNA, 20 bp, Artificial Sequence
  Synthetic oligonucleotide; CAG chr11 5341188 5341207 5341204 +
agacagggagcaagtaaaag

SEQ ID NO: 21825 - DNA, 20 bp, Artificial Sequence
  Synthetic oligonucleotide; TGG chr11 5341193 5341212 5341209 +
gggagcaagtaaaagcagtg

SEQ ID NO: 21826 - DNA, 20 bp, Artificial Sequence
  Synthetic oligonucleotide; CAG chr11 5341197 5341216 5341213 +
gcaagtaaaagcagtgtgga

SEQ ID NO: 21827 - DNA, 20 bp, Artificial Sequence
  Synthetic oligonucleotide; AGG chr11 5341198 5341217 5341214 +
caagtaaaagcagtgtggac

SEQ ID NO: 21828 - DNA, 20 bp, Artificial Sequence
  Synthetic oligonucleotide; GGG chr11 5341199 5341218 5341215 +
aagtaaaagcagtgtggaca

SEQ ID NO: 21829 - DNA, 20 bp, Artificial Sequence
  Synthetic oligonucleotide; GGG chr11 5341200 5341219 5341216 +
agtaaaagcagtgtggacag

SEQ ID NO: 21830 - DNA, 20 bp, Artificial Sequence
  Synthetic oligonucleotide; AAG chr11 5341203 5341222 5341219 +
aaaagcagtgtggacagggg

SEQ ID NO: 21831 - DNA, 20 bp, Artificial Sequence
  Synthetic oligonucleotide; AGG chr11 5341204 5341223 5341220 +
aaagcagtgtggacagggga

SEQ ID NO: 21832 - DNA, 20 bp, Artificial Sequence
  Synthetic oligonucleotide; GAG chr11 5341206 5341225 5341222 +
agcagtgtggacaggggaag

SEQ ID NO: 21833 - DNA, 20 bp, Artificial Sequence
  Synthetic oligonucleotide; AGG chr11 5341207 5341226 5341223 +
gcagtgtggacaggggaagg

SEQ ID NO: 21834 - DNA, 20 bp, Artificial Sequence
  Synthetic oligonucleotide; AAG chr11 5341211 5341230 5341227 +
tgtggacaggggaaggaggt

SEQ ID NO: 21835 - DNA, 20 bp, Artificial Sequence
  Synthetic oligonucleotide; AAG chr11 5341215 5341234 5341231 +
gacaggggaaggaggtaagc

SEQ ID NO: 21836 - DNA, 20 bp, Artificial Sequence
  Synthetic oligonucleotide; AAG chr11 5341227 5341246 5341243 +
aggtaagcaagtgcatactg

SEQ ID NO: 21837 - DNA, 20 bp, Artificial Sequence
  Synthetic oligonucleotide; TGG chr11 5341231 5341250 5341247 +
aagcaagtgcatactgaagc

SEQ ID NO: 21838 - DNA, 20 bp, Artificial Sequence
  Synthetic oligonucleotide; GAG chr11 5341233 5341252 5341249 +
gcaagtgcatactgaagctg

SEQ ID NO: 21839 - DNA, 20 bp, Artificial Sequence
  Synthetic oligonucleotide; TAG chr11 5341238 5341257 5341254 +
tgcatactgaagctggagct

SEQ ID NO: 21840 - DNA, 20 bp, Artificial Sequence
  Synthetic oligonucleotide; CAG chr11 5341244 5341263 5341260 +
ctgaagctggagcttagctt

SEQ ID NO: 21841 - DNA, 20 bp, Artificial Sequence
  Synthetic oligonucleotide; AAG chr11 5341247 5341266 5341263 +
aagctggagcttagcttcag

SEQ ID NO: 21842 - DNA, 20 bp, Artificial Sequence
  Synthetic oligonucleotide; AGG chr11 5341248 5341267 5341264 +
agctggagcttagcttcaga

SEQ ID NO: 21843 - DNA, 20 bp, Artificial Sequence
  Synthetic oligonucleotide; AAG chr11 5341252 5341271 5341268 +
ggagcttagcttcagaaggc

SEQ ID NO: 21844 - DNA, 20 bp, Artificial Sequence
  Synthetic oligonucleotide; GAG chr11 5341254 5341273 5341270 +
agcttagcttcagaaggcaa

SEQ ID NO: 21845 - DNA, 20 bp, Artificial Sequence
  Synthetic oligonucleotide; AGG chr11 5341255 5341274 5341271 +
gcttagcttcagaaggcaag

SEQ ID NO: 21846 - DNA, 20 bp, Artificial Sequence
  Synthetic oligonucleotide; GGG chr11 5341256 5341275 5341272 +
cttagcttcagaaggcaaga

SEQ ID NO: 21847 - DNA, 20 bp, Artificial Sequence
  Synthetic oligonucleotide; CAG chr11 5341260 5341279 5341276 +
gcttcagaaggcaagagggt

SEQ ID NO: 21848 - DNA, 20 bp, Artificial Sequence
  Synthetic oligonucleotide; TGG chr11 5341273 5341292 5341289 +
agagggtcagtatttgccta

SEQ ID NO: 21849 - DNA, 20 bp, Artificial Sequence
  Synthetic oligonucleotide; AAG chr11 5341286 5341305 5341302 +
ttgcctatggcctgctacct

SEQ ID NO: 21850 - DNA, 20 bp, Artificial Sequence
  Synthetic oligonucleotide; AGG chr11 5341287 5341306 5341303 +
tgcctatggcctgctaccta

SEQ ID NO: 21851 - DNA, 20 bp, Artificial Sequence
  Synthetic oligonucleotide; GAG chr11 5341289 5341308 5341305 +
cctatggcctgctacctaag

SEQ ID NO: 21852 - DNA, 20 bp, Artificial Sequence
  Synthetic oligonucleotide; CAG chr11 5341292 5341311 5341308 +
atggcctgctacctaaggag

SEQ ID NO: 21853 - DNA, 20 bp, Artificial Sequence
  Synthetic oligonucleotide; AGG chr11 5341293 5341312 5341309 +
tggcctgctacctaaggagc

SEQ ID NO: 21854 - DNA, 20 bp, Artificial Sequence
  Synthetic oligonucleotide; GGG chr11 5341294 5341313 5341310 +
ggcctgctacctaaggagca

SEQ ID NO: 21855 - DNA, 20 bp, Artificial Sequence
  Synthetic oligonucleotide; GGG chr11 5341295 5341314 5341311 +
gcctgctacctaaggagcag

SEQ ID NO: 21856 - DNA, 20 bp, Artificial Sequence
  Synthetic oligonucleotide; AAG chr11 5341311 5341330 5341327 +
gcaggggccattttcttcat

SEQ ID NO: 21857 - DNA, 20 bp, Artificial Sequence
  Synthetic oligonucleotide; GAG chr11 5341326 5341345 5341342 +
ttcataagacatttcctgct

SEQ ID NO: 21858 - DNA, 20 bp, Artificial Sequence
  Synthetic oligonucleotide; GAG chr11 5341331 5341350 5341347 +
aagacatttcctgctgagtt

SEQ ID NO: 21859 - DNA, 20 bp, Artificial Sequence
  Synthetic oligonucleotide; CAG chr11 5341346 5341365 5341362 +
gagttgagaacaacaacctg

SEQ ID NO: 21860 - DNA, 20 bp, Artificial Sequence
  Synthetic oligonucleotide; AAG chr11 5341350 5341369 5341366 +
tgagaacaacaacctgcaga

SEQ ID NO: 21861 - DNA, 20 bp, Artificial Sequence
  Synthetic oligonucleotide; CAG chr11 5341353 5341372 5341369 +
gaacaacaacctgcagaaag

SEQ ID NO: 21862 - DNA, 20 bp, Artificial Sequence
  Synthetic oligonucleotide; GAG chr11 5341369 5341388 5341385 +
aaagcagaaacatgaacaat

SEQ ID NO: 21863 - DNA, 20 bp, Artificial Sequence
  Synthetic oligonucleotide; CAG chr11 5341372 5341391 5341388 +
gcagaaacatgaacaatgag

SEQ ID NO: 21864 - DNA, 20 bp, Artificial Sequence
  Synthetic oligonucleotide; CAG chr11 5341385 5341404 5341401 +
caatgagcagccaacattca

SEQ ID NO: 21865 - DNA, 20 bp, Artificial Sequence
  Synthetic oligonucleotide; AGG chr11 5341386 5341405 5341402 +
aatgagcagccaacattcac

SEQ ID NO: 21866 - DNA, 20 bp, Artificial Sequence
  Synthetic oligonucleotide; CGG chr11 5341410 5341429 5341426 +
gcacaattctgtaaaatgat

SEQ ID NO: 21867 - DNA, 20 bp, Artificial Sequence
  Synthetic oligonucleotide; GGG chr11 5341411 5341430 5341427 +
cacaattctgtaaaatgatc

SEQ ID NO: 21868 - DNA, 20 bp, Artificial Sequence
  Synthetic oligonucleotide; GGG chr11 5341412 5341431 5341428 +
acaattctgtaaaatgatcg

SEQ ID NO: 21869 - DNA, 20 bp, Artificial Sequence
  Synthetic oligonucleotide; AAG chr11 5341425 5341444 5341441 +
atgatcggggtaaaacacca

SEQ ID NO: 21870 - DNA, 20 bp, Artificial Sequence
  Synthetic oligonucleotide; TAG chr11 5341449 5341468 5341465 +
cataaacaatatcttctata

SEQ ID NO: 21871 - DNA, 20 bp, Artificial Sequence
  Synthetic oligonucleotide; AAG chr11 5341472 5341491 5341488 +
tcccctctcttgtctcactg

SEQ ID NO: 21872 - DNA, 20 bp, Artificial Sequence
  Synthetic oligonucleotide; AAG chr11 5341495 5341514 5341511 +
tattatttttgctctgatta

SEQ ID NO: 21873 - DNA, 20 bp, Artificial Sequence
  Synthetic oligonucleotide; AAG chr11 5341505 5341524 5341521 +
gctctgattaaagtataatt

SEQ ID NO: 21874 - DNA, 20 bp, Artificial Sequence
  Synthetic oligonucleotide; TAG chr11 5341526 5341545 5341542 +
agacataacctccctctttt

SEQ ID NO: 21875 - DNA, 20 bp, Artificial Sequence
  Synthetic oligonucleotide; AGG chr11 5341527 5341546 5341543 +
gacataacctccctcttttt

SEQ ID NO: 21876 - DNA, 20 bp, Artificial Sequence
  Synthetic oligonucleotide; GAG chr11 5341542 5341561 5341558 +
tttttaggatattttaaatt

SEQ ID NO: 21877 - DNA, 20 bp, Artificial Sequence
  Synthetic oligonucleotide; TGG chr11 5341548 5341567 5341564 +
ggatattttaaattgagtta

SEQ ID NO: 21878 - DNA, 20 bp, Artificial Sequence
  Synthetic oligonucleotide; GGG chr11 5341549 5341568 5341565 +
gatattttaaattgagttat

SEQ ID NO: 21879 - DNA, 20 bp, Artificial Sequence
  Synthetic oligonucleotide; CAG chr11 5341568 5341587 5341584 +
tgggtcccttcctaactcat

SEQ ID NO: 21880 - DNA, 20 bp, Artificial Sequence
  Synthetic oligonucleotide; GAG chr11 5341587 5341606 5341603 +
tcagacaattttaatcaaat

SEQ ID NO: 21881 - DNA, 20 bp, Artificial Sequence
  Synthetic oligonucleotide; TGG chr11 5341610 5341629 5341626 +
aatgacattgttgtattctt

SEQ ID NO: 21882 - DNA, 20 bp, Artificial Sequence
  Synthetic oligonucleotide; GGG chr11 5341611 5341630 5341627 +
atgacattgttgtattcttt

SEQ ID NO: 21883 - DNA, 20 bp, Artificial Sequence
  Synthetic oligonucleotide; TGG chr11 5341632 5341651 5341648 +
ggaaatttacacttattaca

SEQ ID NO: 21884 - DNA, 20 bp, Artificial Sequence
  Synthetic oligonucleotide; CAG chr11 5341638 5341657 5341654 +
ttacacttattacatggaat

SEQ ID NO: 21885 - DNA, 20 bp, Artificial Sequence
  Synthetic oligonucleotide; CAG chr11 5341651 5341670 5341667 +
atggaatcagaatgtatgta

SEQ ID NO: 21886 - DNA, 20 bp, Artificial Sequence
  Synthetic oligonucleotide; AAG chr11 5341655 5341674 5341671 +
aatcagaatgtatgtacaga

SEQ ID NO: 21887 - DNA, 20 bp, Artificial Sequence
  Synthetic oligonucleotide; CAG chr11 5341679 5341698 5341695 +
aatcattcttcaaaaaaatg

SEQ ID NO: 21888 - DNA, 20 bp, Artificial Sequence
  Synthetic oligonucleotide; CAG chr11 5341705 5341724 5341721 +
cctatttttttttgttcctt

SEQ ID NO: 21889 - DNA, 20 bp, Artificial Sequence
  Synthetic oligonucleotide; TAG chr11 5341718 5341737 5341734 +
gttccttcagacctttttca

SEQ ID NO: 21890 - DNA, 20 bp, Artificial Sequence
  Synthetic oligonucleotide; AAG chr11 5341724 5341743 5341740 +
tcagacctttttcatagcaa

SEQ ID NO: 21891 - DNA, 20 bp, Artificial Sequence
  Synthetic oligonucleotide; AGG chr11 5341725 5341744 5341741 +
cagacctttttcatagcaaa

SEQ ID NO: 21892 - DNA, 20 bp, Artificial Sequence
  Synthetic oligonucleotide; GAG chr11 5341727 5341746 5341743 +
gacctttttcatagcaaaag

SEQ ID NO: 21893 - DNA, 20 bp, Artificial Sequence
  Synthetic oligonucleotide; AGG chr11 5341728 5341747 5341744 +
acctttttcatagcaaaagg

SEQ ID NO: 21894 - DNA, 20 bp, Artificial Sequence
  Synthetic oligonucleotide; GGG chr11 5341729 5341748 5341745 +
cctttttcatagcaaaagga

SEQ ID NO: 21895 - DNA, 20 bp, Artificial Sequence
  Synthetic oligonucleotide; AAG chr11 5341734 5341753 5341750 +
ttcatagcaaaaggagggtg

SEQ ID NO: 21896 - DNA, 20 bp, Artificial Sequence
  Synthetic oligonucleotide; AGG chr11 5341735 5341754 5341751 +
tcatagcaaaaggagggtga

SEQ ID NO: 21897 - DNA, 20 bp, Artificial Sequence
  Synthetic oligonucleotide; TGG chr11 5341758 5341777 5341774 +
aactgtctcttccactaatt

SEQ ID NO: 21898 - DNA, 20 bp, Artificial Sequence
  Synthetic oligonucleotide; TAG chr11 5341763 5341782 5341779 +
tctcttccactaatttggac

SEQ ID NO: 21899 - DNA, 20 bp, Artificial Sequence
  Synthetic oligonucleotide; CAG chr11 5341767 5341786 5341783 +
ttccactaatttggactagt

SEQ ID NO: 21900 - DNA, 20 bp, Artificial Sequence
  Synthetic oligonucleotide; CAG chr11 5341771 5341790 5341787 +
actaatttggactagtcagc

SEQ ID NO: 21901 - DNA, 20 bp, Artificial Sequence
  Synthetic oligonucleotide; TAG chr11 5341776 5341795 5341792 +
tttggactagtcagccagcg

SEQ ID NO: 21902 - DNA, 20 bp, Artificial Sequence
  Synthetic oligonucleotide; GAG chr11 5341785 5341804 5341801 +
gtcagccagcgtagatatct

SEQ ID NO: 21903 - DNA, 20 bp, Artificial Sequence
  Synthetic oligonucleotide; AGG chr11 5341786 5341805 5341802 +
tcagccagcgtagatatctg

SEQ ID NO: 21904 - DNA, 20 bp, Artificial Sequence
  Synthetic oligonucleotide; TGG chr11 5341790 5341809 5341806 +
ccagcgtagatatctgagga

SEQ ID NO: 21905 - DNA, 20 bp, Artificial Sequence
  Synthetic oligonucleotide; TGG chr11 5341802 5341821 5341818 +
tctgaggatggcctcaacat

SEQ ID NO: 21906 - DNA, 20 bp, Artificial Sequence
  Synthetic oligonucleotide; GAG chr11 5341804 5341823 5341820 +
tgaggatggcctcaacattg

SEQ ID NO: 21907 - DNA, 20 bp, Artificial Sequence
  Synthetic oligonucleotide; TAG chr11 5341808 5341827 5341824 +
gatggcctcaacattggagc

SEQ ID NO: 21908 - DNA, 20 bp, Artificial Sequence
  Synthetic oligonucleotide; TAG chr11 5341815 5341834 5341831 +
tcaacattggagctagcaac

SEQ ID NO: 21909 - DNA, 20 bp, Artificial Sequence
  Synthetic oligonucleotide; AGG chr11 5341816 5341835 5341832 +
caacattggagctagcaact

SEQ ID NO: 21910 - DNA, 20 bp, Artificial Sequence
  Synthetic oligonucleotide; GGG chr11 5341817 5341836 5341833 +
aacattggagctagcaacta

SEQ ID NO: 21911 - DNA, 20 bp, Artificial Sequence
  Synthetic oligonucleotide; TAG chr11 5341820 5341839 5341836 +
attggagctagcaactaggg

SEQ ID NO: 21912 - DNA, 20 bp, Artificial Sequence
  Synthetic oligonucleotide; TAG chr11 5341823 5341842 5341839 +
ggagctagcaactagggtag

SEQ ID NO: 21913 - DNA, 20 bp, Artificial Sequence
  Synthetic oligonucleotide; AAG chr11 5341829 5341848 5341845 +
agcaactagggtagtagaat

SEQ ID NO: 21914 - DNA, 20 bp, Artificial Sequence
  Synthetic oligonucleotide; GAG chr11 5341835 5341854 5341851 +
tagggtagtagaataagaat

SEQ ID NO: 21915 - DNA, 20 bp, Artificial Sequence
  Synthetic oligonucleotide; GAG chr11 5341837 5341856 5341853 +
gggtagtagaataagaatga

SEQ ID NO: 21916 - DNA, 20 bp, Artificial Sequence
  Synthetic oligonucleotide; AAG chr11 5341841 5341860 5341857 +
agtagaataagaatgagagc

SEQ ID NO: 21917 - DNA, 20 bp, Artificial Sequence
  Synthetic oligonucleotide; TAG chr11 5341845 5341864 5341861 +
gaataagaatgagagcaaga

SEQ ID NO: 21918 - DNA, 20 bp, Artificial Sequence
  Synthetic oligonucleotide; AAG chr11 5341848 5341867 5341864 +
taagaatgagagcaagatag

SEQ ID NO: 21919 - DNA, 20 bp, Artificial Sequence
  Synthetic oligonucleotide; AGG chr11 5341849 5341868 5341865 +
aagaatgagagcaagataga

SEQ ID NO: 21920 - DNA, 20 bp, Artificial Sequence
  Synthetic oligonucleotide; GAG chr11 5341851 5341870 5341867 +
gaatgagagcaagatagaag

SEQ ID NO: 21921 - DNA, 20 bp, Artificial Sequence
  Synthetic oligonucleotide; AGG chr11 5341852 5341871 5341868 +
aatgagagcaagatagaagg

SEQ ID NO: 21922 - DNA, 20 bp, Artificial Sequence
  Synthetic oligonucleotide; AAG chr11 5341917 5341936 5341933 +
ttctcacatttttttgttac

SEQ ID NO: 21923 - DNA, 20 bp, Artificial Sequence
  Synthetic oligonucleotide; CAG chr11 5341925 5341944 5341941 +
tttttttgttacaagtttgt

SEQ ID NO: 21924 - DNA, 20 bp, Artificial Sequence
  Synthetic oligonucleotide; AAG chr11 5341928 5341947 5341944 +
ttttgttacaagtttgtcag

SEQ ID NO: 21925 - DNA, 20 bp, Artificial Sequence
  Synthetic oligonucleotide; AGG chr11 5341929 5341948 5341945 +
tttgttacaagtttgtcaga

SEQ ID NO: 21926 - DNA, 20 bp, Artificial Sequence
  Synthetic oligonucleotide; TGG chr11 5341940 5341959 5341956 +
tttgtcagaaggtactgcct

SEQ ID NO: 21927 - DNA, 20 bp, Artificial Sequence
  Synthetic oligonucleotide; GGG chr11 5341941 5341960 5341957 +
ttgtcagaaggtactgcctt

SEQ ID NO: 21928 - DNA, 20 bp, Artificial Sequence
  Synthetic oligonucleotide; GGG chr11 5341942 5341961 5341958 +
tgtcagaaggtactgccttg

SEQ ID NO: 21929 - DNA, 20 bp, Artificial Sequence
  Synthetic oligonucleotide; GAG chr11 5341954 5341973 5341970 +
ctgccttggggaataaatat

SEQ ID NO: 21930 - DNA, 20 bp, Artificial Sequence
  Synthetic oligonucleotide; TGG chr11 5341961 5341980 5341977 +
ggggaataaatatgagttta

SEQ ID NO: 21931 - DNA, 20 bp, Artificial Sequence
  Synthetic oligonucleotide; GAG chr11 5341969 5341988 5341985 +
aatatgagtttatggttttt

SEQ ID NO: 21932 - DNA, 20 bp, Artificial Sequence
  Synthetic oligonucleotide; TGG chr11 5341992 5342011 5342008 +
acaaattcattataatttga

SEQ ID NO: 21933 - DNA, 20 bp, Artificial Sequence
  Synthetic oligonucleotide; GAG chr11 5341994 5342013 5342010 +
aaattcattataatttgatg

SEQ ID NO: 21934 - DNA, 20 bp, Artificial Sequence
  Synthetic oligonucleotide; AGG chr11 5341995 5342014 5342011 +
aattcattataatttgatgg

SEQ ID NO: 21935 - DNA, 20 bp, Artificial Sequence
  Synthetic oligonucleotide; GGG chr11 5341996 5342015 5342012 +
attcattataatttgatgga

SEQ ID NO: 21936 - DNA, 20 bp, Artificial Sequence
  Synthetic oligonucleotide; GAG chr11 5341998 5342017 5342014 +
tcattataatttgatggagg

SEQ ID NO: 21937 - DNA, 20 bp, Artificial Sequence
  Synthetic oligonucleotide; AGG chr11 5341999 5342018 5342015 +
cattataatttgatggaggg

SEQ ID NO: 21938 - DNA, 20 bp, Artificial Sequence
  Synthetic oligonucleotide; GAG chr11 5342001 5342020 5342017 +
ttataatttgatggagggag

SEQ ID NO: 21939 - DNA, 20 bp, Artificial Sequence
  Synthetic oligonucleotide; AGG chr11 5342002 5342021 5342018 +
tataatttgatggagggagg

SEQ ID NO: 21940 - DNA, 20 bp, Artificial Sequence
  Synthetic oligonucleotide; TAG chr11 5342012 5342031 5342028 +
tggagggaggaggaaccaac

SEQ ID NO: 21941 - DNA, 20 bp, Artificial Sequence
  Synthetic oligonucleotide; GAG chr11 5342021 5342040 5342037 +
gaggaaccaactagactgtt

SEQ ID NO: 21942 - DNA, 20 bp, Artificial Sequence
  Synthetic oligonucleotide; AAG chr11 5342029 5342048 5342045 +
aactagactgttgagatgat

SEQ ID NO: 21943 - DNA, 20 bp, Artificial Sequence
  Synthetic oligonucleotide; TAG chr11 5342036 5342055 5342052 +
ctgttgagatgataagtaat

SEQ ID NO: 21944 - DNA, 20 bp, Artificial Sequence
  Synthetic oligonucleotide; AGG chr11 5342037 5342056 5342053 +
tgttgagatgataagtaatt

SEQ ID NO: 21945 - DNA, 20 bp, Artificial Sequence
  Synthetic oligonucleotide; AAG chr11 5342050 5342069 5342066 +
agtaattaggtcactgatca

SEQ ID NO: 21946 - DNA, 20 bp, Artificial Sequence
  Synthetic oligonucleotide; AAG chr11 5342053 5342072 5342069 +
aattaggtcactgatcaaag

SEQ ID NO: 21947 - DNA, 20 bp, Artificial Sequence
  Synthetic oligonucleotide; CAG chr11 5342072 5342091 5342088 +
gaagattatattcttttttg

SEQ ID NO: 21948 - DNA, 20 bp, Artificial Sequence
  Synthetic oligonucleotide; AGG chr11 5342073 5342092 5342089 +
aagattatattcttttttgc

SEQ ID NO: 21949 - DNA, 20 bp, Artificial Sequence
  Synthetic oligonucleotide; TGG chr11 5342084 5342103 5342100 +
cttttttgcaggaaaattcc

SEQ ID NO: 21950 - DNA, 20 bp, Artificial Sequence
  Synthetic oligonucleotide; CAG chr11 5342091 5342110 5342107 +
gcaggaaaattcctggactt

SEQ ID NO: 21951 - DNA, 20 bp, Artificial Sequence
  Synthetic oligonucleotide; TAG chr11 5342106 5342125 5342122 +
gacttcagtgaccaaattta

SEQ ID NO: 21952 - DNA, 20 bp, Artificial Sequence
  Synthetic oligonucleotide; AGG chr11 5342107 5342126 5342123 +
acttcagtgaccaaatttat

SEQ ID NO: 21953 - DNA, 20 bp, Artificial Sequence
  Synthetic oligonucleotide; TGG chr11 5342125 5342144 5342141 +
ataggttcccattgtttgta

SEQ ID NO: 21954 - DNA, 20 bp, Artificial Sequence
  Synthetic oligonucleotide; CAG chr11 5342135 5342154 5342151 +
attgtttgtatggacacctg

SEQ ID NO: 21955 - DNA, 20 bp, Artificial Sequence
  Synthetic oligonucleotide; GAG chr11 5342137 5342156 5342153 +
tgtttgtatggacacctgca

SEQ ID NO: 21956 - DNA, 20 bp, Artificial Sequence
  Synthetic oligonucleotide; AAG chr11 5342148 5342167 5342164 +
acacctgcagagaaattcat

SEQ ID NO: 21957 - DNA, 20 bp, Artificial Sequence
  Synthetic oligonucleotide; GAG chr11 5342150 5342169 5342166 +
acctgcagagaaattcataa

SEQ ID NO: 21958 - DNA, 20 bp, Artificial Sequence
  Synthetic oligonucleotide; TGG chr11 5342154 5342173 5342170 +
gcagagaaattcataagagt

SEQ ID NO: 21959 - DNA, 20 bp, Artificial Sequence
  Synthetic oligonucleotide; TAG chr11 5342161 5342180 5342177 +
aattcataagagttggaaat

SEQ ID NO: 21960 - DNA, 20 bp, Artificial Sequence
  Synthetic oligonucleotide; TAG chr11 5342172 5342191 5342188 +
gttggaaattagatttgaca

SEQ ID NO: 21961 - DNA, 20 bp, Artificial Sequence
  Synthetic oligonucleotide; TAG chr11 5342277 5342296 5342293 +
accatgaaataaacatatgt

SEQ ID NO: 21962 - DNA, 20 bp, Artificial Sequence
  Synthetic oligonucleotide; TAG chr11 5342288 5342307 5342304 +
aacatatgttagttacatta

SEQ ID NO: 21963 - DNA, 20 bp, Artificial Sequence
  Synthetic oligonucleotide; TAG chr11 5342300 5342319 5342316 +
ttacattatagacataccaa

SEQ ID NO: 21964 - DNA, 20 bp, Artificial Sequence
  Synthetic oligonucleotide; AAG chr11 5342309 5342328 5342325 +
agacataccaatagatgcct

SEQ ID NO: 21965 - DNA, 20 bp, Artificial Sequence
  Synthetic oligonucleotide; AGG chr11 5342310 5342329 5342326 +
gacataccaatagatgccta

SEQ ID NO: 21966 - DNA, 20 bp, Artificial Sequence
  Synthetic oligonucleotide; TAG chr11 5342332 5342351 5342348 +
gtattgttatcacaataatt

SEQ ID NO: 21967 - DNA, 20 bp, Artificial Sequence
  Synthetic oligonucleotide; TGG chr11 5342335 5342354 5342351 +
ttgttatcacaataatttag

SEQ ID NO: 21968 - DNA, 20 bp, Artificial Sequence
  Synthetic oligonucleotide; AAG chr11 5342339 5342358 5342355 +
tatcacaataatttagtgga

SEQ ID NO: 21969 - DNA, 20 bp, Artificial Sequence
  Synthetic oligonucleotide; TAG chr11 5342344 5342363 5342360 +
caataatttagtggaaagct

SEQ ID NO: 21970 - DNA, 20 bp, Artificial Sequence
  Synthetic oligonucleotide; GAG chr11 5342346 5342365 5342362 +
ataatttagtggaaagctta

SEQ ID NO: 21971 - DNA, 20 bp, Artificial Sequence
  Synthetic oligonucleotide; CAG chr11 5342363 5342382 5342379 +
ttagagaaatattccgttta

SEQ ID NO: 21972 - DNA, 20 bp, Artificial Sequence
  Synthetic oligonucleotide; AGG chr11 5342364 5342383 5342380 +
tagagaaatattccgtttac

SEQ ID NO: 21973 - DNA, 20 bp, Artificial Sequence
  Synthetic oligonucleotide; TAG chr11 5342397 5342416 5342413 +
aaatttgtacaaactacatt

SEQ ID NO: 21974 - DNA, 20 bp, Artificial Sequence
  Synthetic oligonucleotide; AAG chr11 5342403 5342422 5342419 +
gtacaaactacatttagcta

SEQ ID NO: 21975 - DNA, 20 bp, Artificial Sequence
  Synthetic oligonucleotide; GAG chr11 5342405 5342424 5342421 +
acaaactacatttagctaaa

SEQ ID NO: 21976 - DNA, 20 bp, Artificial Sequence
  Synthetic oligonucleotide; TGG chr11 5342409 5342428 5342425 +
actacatttagctaaagagt

SEQ ID NO: 21977 - DNA, 20 bp, Artificial Sequence
  Synthetic oligonucleotide; GGG chr11 5342410 5342429 5342426 +
ctacatttagctaaagagtt

SEQ ID NO: 21978 - DNA, 20 bp, Artificial Sequence
  Synthetic oligonucleotide; AAG chr11 5342417 5342436 5342433 +
tagctaaagagttgggctta

SEQ ID NO: 21979 - DNA, 20 bp, Artificial Sequence
  Synthetic oligonucleotide; GAG chr11 5342419 5342438 5342435 +
gctaaagagttgggcttaaa

SEQ ID NO: 21980 - DNA, 20 bp, Artificial Sequence
  Synthetic oligonucleotide; TAG chr11 5342428 5342447 5342444 +
ttgggcttaaagagatacct

SEQ ID NO: 21981 - DNA, 20 bp, Artificial Sequence
  Synthetic oligonucleotide; AGG chr11 5342429 5342448 5342445 +
tgggcttaaagagatacctt

SEQ ID NO: 21982 - DNA, 20 bp, Artificial Sequence
  Synthetic oligonucleotide; GGG chr11 5342430 5342449 5342446 +
gggcttaaagagatacctta

SEQ ID NO: 21983 - DNA, 20 bp, Artificial Sequence
  Synthetic oligonucleotide; AAG chr11 5342440 5342459 5342456 +
agataccttagggaaacttg

SEQ ID NO: 21984 - DNA, 20 bp, Artificial Sequence
  Synthetic oligonucleotide; AAG chr11 5342467 5342486 5342483 +
attttaacacctattttacc

SEQ ID NO: 21985 - DNA, 20 bp, Artificial Sequence
  Synthetic oligonucleotide; GAG chr11 5342476 5342495 5342492 +
cctattttaccaagtcatat

SEQ ID NO: 21986 - DNA, 20 bp, Artificial Sequence
  Synthetic oligonucleotide; TAG chr11 5342488 5342507 5342504 +
agtcatatgagcatgcatgc

SEQ ID NO: 21987 - DNA, 20 bp, Artificial Sequence
  Synthetic oligonucleotide; GAG chr11 5342495 5342514 5342511 +
tgagcatgcatgctagatat

SEQ ID NO: 21988 - DNA, 20 bp, Artificial Sequence
  Synthetic oligonucleotide; TAG chr11 5342523 5342542 5342539 +
tttgctctcctgctaaatat

SEQ ID NO: 21989 - DNA, 20 bp, Artificial Sequence
  Synthetic oligonucleotide; GAG chr11 5342525 5342544 5342541 +
tgctctcctgctaaatatta

SEQ ID NO: 21990 - DNA, 20 bp, Artificial Sequence
  Synthetic oligonucleotide; GAG chr11 5342542 5342561 5342558 +
ttagagtttttacattctgt

SEQ ID NO: 21991 - DNA, 20 bp, Artificial Sequence
  Synthetic oligonucleotide; GAG chr11 5342544 5342563 5342560 +
agagtttttacattctgtga

SEQ ID NO: 21992 - DNA, 20 bp, Artificial Sequence
  Synthetic oligonucleotide; TGG chr11 5342560 5342579 5342576 +
gtgagagtgactgtgatgat

SEQ ID NO: 21993 - DNA, 20 bp, Artificial Sequence
  Synthetic oligonucleotide; GAG chr11 5342562 5342581 5342578 +
gagagtgactgtgatgattg

SEQ ID NO: 21994 - DNA, 20 bp, Artificial Sequence
  Synthetic oligonucleotide; CAG chr11 5342567 5342586 5342583 +
tgactgtgatgattggagat

SEQ ID NO: 21995 - DNA, 20 bp, Artificial Sequence
  Synthetic oligonucleotide; AGG chr11 5342568 5342587 5342584 +
gactgtgatgattggagatc

SEQ ID NO: 21996 - DNA, 20 bp, Artificial Sequence
  Synthetic oligonucleotide; TGG chr11 5342582 5342601 5342598 +
gagatcaggttccaattcta

SEQ ID NO: 21997 - DNA, 20 bp, Artificial Sequence
  Synthetic oligonucleotide; GGG chr11 5342583 5342602 5342599 +
agatcaggttccaattctat

SEQ ID NO: 21998 - DNA, 20 bp, Artificial Sequence
  Synthetic oligonucleotide; TAG chr11 5342586 5342605 5342602 +
tcaggttccaattctatggg

SEQ ID NO: 21999 - DNA, 20 bp, Artificial Sequence
  Synthetic oligonucleotide; AAG chr11 5342593 5342612 5342609 +
ccaattctatgggtagtaaa

SEQ ID NO: 22000 - DNA, 20 bp, Artificial Sequence
  Synthetic oligonucleotide; AGG chr11 5342594 5342613 5342610 +
caattctatgggtagtaaaa

SEQ ID NO: 22001 - DNA, 20 bp, Artificial Sequence
  Synthetic oligonucleotide; AAG chr11 5342599 5342618 5342615 +
ctatgggtagtaaaaaggtg

SEQ ID NO: 22002 - DNA, 20 bp, Artificial Sequence
  Synthetic oligonucleotide; TGG chr11 5342604 5342623 5342620 +
ggtagtaaaaaggtgaagaa

SEQ ID NO: 22003 - DNA, 20 bp, Artificial Sequence
  Synthetic oligonucleotide; TGG chr11 5342622 5342641 5342638 +
aatggcattctgaatctgct

SEQ ID NO: 22004 - DNA, 20 bp, Artificial Sequence
  Synthetic oligonucleotide; TAG chr11 5342643 5342662 5342659 +
ggtcttgacactatatgtta

SEQ ID NO: 22005 - DNA, 20 bp, Artificial Sequence
  Synthetic oligonucleotide; AGG chr11 5342644 5342663 5342660 +
gtcttgacactatatgttat

SEQ ID NO: 22006 - DNA, 20 bp, Artificial Sequence
  Synthetic oligonucleotide; TAG chr11 5342653 5342672 5342669 +
ctatatgttataggattcat

SEQ ID NO: 22007 - DNA, 20 bp, Artificial Sequence
  Synthetic oligonucleotide; TGG chr11 5342656 5342675 5342672 +
tatgttataggattcattag

SEQ ID NO: 22008 - DNA, 20 bp, Artificial Sequence
  Synthetic oligonucleotide; GAG chr11 5342658 5342677 5342674 +
tgttataggattcattagtg

SEQ ID NO: 22009 - DNA, 20 bp, Artificial Sequence
  Synthetic oligonucleotide; AGG chr11 5342659 5342678 5342675 +
gttataggattcattagtgg

SEQ ID NO: 22010 - DNA, 20 bp, Artificial Sequence
  Synthetic oligonucleotide; GGG chr11 5342660 5342679 5342676 +
ttataggattcattagtgga

SEQ ID NO: 22011 - DNA, 20 bp, Artificial Sequence
  Synthetic oligonucleotide; CAG chr11 5342665 5342684 5342681 +
ggattcattagtggagggaa

SEQ ID NO: 22012 - DNA, 20 bp, Artificial Sequence
  Synthetic oligonucleotide; TAG chr11 5342672 5342691 5342688 +
ttagtggagggaacagaaaa

SEQ ID NO: 22013 - DNA, 20 bp, Artificial Sequence
  Synthetic oligonucleotide; AGG chr11 5342673 5342692 5342689 +
tagtggagggaacagaaaat

SEQ ID NO: 22014 - DNA, 20 bp, Artificial Sequence
  Synthetic oligonucleotide; TAG chr11 5342678 5342697 5342694 +
gagggaacagaaaataggca

SEQ ID NO: 22015 - DNA, 20 bp, Artificial Sequence
  Synthetic oligonucleotide; GAG chr11 5342689 5342708 5342705 +
aaataggcatagctcataat

SEQ ID NO: 22016 - DNA, 20 bp, Artificial Sequence
  Synthetic oligonucleotide; AGG chr11 5342690 5342709 5342706 +
aataggcatagctcataatg

SEQ ID NO: 22017 - DNA, 20 bp, Artificial Sequence
  Synthetic oligonucleotide; TGG chr11 5342704 5342723 5342720 +
ataatgaggtgaacaatatg

SEQ ID NO: 22018 - DNA, 20 bp, Artificial Sequence
  Synthetic oligonucleotide; CAG chr11 5342731 5342750 5342747 +
tgctttccaaaacgatgaat

SEQ ID NO: 22019 - DNA, 20 bp, Artificial Sequence
  Synthetic oligonucleotide; GAG chr11 5342733 5342752 5342749 +
ctttccaaaacgatgaatca

SEQ ID NO: 22020 - DNA, 20 bp, Artificial Sequence
  Synthetic oligonucleotide; CAG chr11 5342764 5342783 5342780 +
atcactgtgacataaaaaac

SEQ ID NO: 22021 - DNA, 20 bp, Artificial Sequence
  Synthetic oligonucleotide; AGG chr11 5342765 5342784 5342781 +
tcactgtgacataaaaaacc

SEQ ID NO: 22022 - DNA, 20 bp, Artificial Sequence
  Synthetic oligonucleotide; CAG chr11 5342771 5342790 5342787 +
tgacataaaaaaccaggaca

SEQ ID NO: 22023 - DNA, 20 bp, Artificial Sequence
  Synthetic oligonucleotide; CAG chr11 5342774 5342793 5342790 +
cataaaaaaccaggacacag

SEQ ID NO: 22024 - DNA, 20 bp, Artificial Sequence
  Synthetic oligonucleotide; TGG chr11 5342780 5342799 5342796 +
aaaccaggacacagcagata

SEQ ID NO: 22025 - DNA, 20 bp, Artificial Sequence
  Synthetic oligonucleotide; GGG chr11 5342781 5342800 5342797 +
aaccaggacacagcagatat

SEQ ID NO: 22026 - DNA, 20 bp, Artificial Sequence
  Synthetic oligonucleotide; GAG chr11 5342783 5342802 5342799 +
ccaggacacagcagatatgg

SEQ ID NO: 22027 - DNA, 20 bp, Artificial Sequence
  Synthetic oligonucleotide; CAG chr11 5342789 5342808 5342805 +
cacagcagatatgggagaca

SEQ ID NO: 22028 - DNA, 20 bp, Artificial Sequence
  Synthetic oligonucleotide; AGG chr11 5342790 5342809 5342806 +
acagcagatatgggagacac

SEQ ID NO: 22029 - DNA, 20 bp, Artificial Sequence
  Synthetic oligonucleotide; GAG chr11 5342797 5342816 5342813 +
atatgggagacacaggtaat

SEQ ID NO: 22030 - DNA, 20 bp, Artificial Sequence
  Synthetic oligonucleotide; GAG chr11 5342799 5342818 5342815 +
atgggagacacaggtaatga

SEQ ID NO: 22031 - DNA, 20 bp, Artificial Sequence
  Synthetic oligonucleotide; TGG chr11 5342805 5342824 5342821 +
gacacaggtaatgagagcct

SEQ ID NO: 22032 - DNA, 20 bp, Artificial Sequence
  Synthetic oligonucleotide; TGG chr11 5342820 5342839 5342836 +
agccttggccctctcctctc

SEQ ID NO: 22033 - DNA, 20 bp, Artificial Sequence
  Synthetic oligonucleotide; GAG chr11 5342822 5342841 5342838 +
ccttggccctctcctctctg

SEQ ID NO: 22034 - DNA, 20 bp, Artificial Sequence
  Synthetic oligonucleotide; AGG chr11 5342823 5342842 5342839 +
cttggccctctcctctctgg

SEQ ID NO: 22035 - DNA, 20 bp, Artificial Sequence
  Synthetic oligonucleotide; CAG chr11 5342833 5342852 5342849 +
tcctctctggaggcaatgct

SEQ ID NO: 22036 - DNA, 20 bp, Artificial Sequence
  Synthetic oligonucleotide; AGG chr11 5342834 5342853 5342850 +
cctctctggaggcaatgctc

SEQ ID NO: 22037 - DNA, 20 bp, Artificial Sequence
  Synthetic oligonucleotide; CAG chr11 5342838 5342857 5342854 +
tctggaggcaatgctcagga

SEQ ID NO: 22038 - DNA, 20 bp, Artificial Sequence
  Synthetic oligonucleotide; GAG chr11 5342845 5342864 5342861 +
gcaatgctcaggacagtctt

SEQ ID NO: 22039 - DNA, 20 bp, Artificial Sequence
  Synthetic oligonucleotide; TAG chr11 5342858 5342877 5342874 +
cagtcttgagtatcaacaca

SEQ ID NO: 22040 - DNA, 20 bp, Artificial Sequence
  Synthetic oligonucleotide; AGG chr11 5342859 5342878 5342875 +
agtcttgagtatcaacacat

SEQ ID NO: 22041 - DNA, 20 bp, Artificial Sequence
  Synthetic oligonucleotide; GAG chr11 5342861 5342880 5342877 +
tcttgagtatcaacacatag

SEQ ID NO: 22042 - DNA, 20 bp, Artificial Sequence
  Synthetic oligonucleotide; AAG chr11 5342867 5342886 5342883 +
gtatcaacacataggagatg

SEQ ID NO: 22043 - DNA, 20 bp, Artificial Sequence
  Synthetic oligonucleotide; CAG chr11 5342875 5342894 5342891 +
acataggagatgaagataat

SEQ ID NO: 22044 - DNA, 20 bp, Artificial Sequence
  Synthetic oligonucleotide; CAG chr11 5342884 5342903 5342900 +
atgaagataatcagataatc

SEQ ID NO: 22045 - DNA, 20 bp, Artificial Sequence
  Synthetic oligonucleotide; AAG chr11 5342897 5342916 5342913 +
gataatccagcacaaatata

SEQ ID NO: 22046 - DNA, 20 bp, Artificial Sequence
  Synthetic oligonucleotide; AAG chr11 5342905 5342924 5342921 +
agcacaaatataaagactac

SEQ ID NO: 22047 - DNA, 20 bp, Artificial Sequence
  Synthetic oligonucleotide; CAG chr11 5342910 5342929 5342926 +
aaatataaagactacaagca

SEQ ID NO: 22048 - DNA, 20 bp, Artificial Sequence
  Synthetic oligonucleotide; TGG chr11 5342914 5342933 5342930 +
ataaagactacaagcacagc

SEQ ID NO: 22049 - DNA, 20 bp, Artificial Sequence
  Synthetic oligonucleotide; GGG chr11 5342915 5342934 5342931 +
taaagactacaagcacagct

SEQ ID NO: 22050 - DNA, 20 bp, Artificial Sequence
  Synthetic oligonucleotide; CAG chr11 5342920 5342939 5342936 +
actacaagcacagctgggta

SEQ ID NO: 22051 - DNA, 20 bp, Artificial Sequence
  Synthetic oligonucleotide; CGG chr11 5342924 5342943 5342940 +
caagcacagctgggtacagt

SEQ ID NO: 22052 - DNA, 20 bp, Artificial Sequence
  Synthetic oligonucleotide; AAG chr11 5342930 5342949 5342946 +
cagctgggtacagtcggttg

SEQ ID NO: 22053 - DNA, 20 bp, Artificial Sequence
  Synthetic oligonucleotide; AGG chr11 5342931 5342950 5342947 +
agctgggtacagtcggttga

SEQ ID NO: 22054 - DNA, 20 bp, Artificial Sequence
  Synthetic oligonucleotide; TGG chr11 5342934 5342953 5342950 +
tgggtacagtcggttgaagg

SEQ ID NO: 22055 - DNA, 20 bp, Artificial Sequence
  Synthetic oligonucleotide; CAG chr11 5342940 5342959 5342956 +
cagtcggttgaaggtggtat

SEQ ID NO: 22056 - DNA, 20 bp, Artificial Sequence
  Synthetic oligonucleotide; CAG chr11 5342945 5342964 5342961 +
ggttgaaggtggtatcagca

SEQ ID NO: 22057 - DNA, 20 bp, Artificial Sequence
  Synthetic oligonucleotide; AGG chr11 5342946 5342965 5342962 +
gttgaaggtggtatcagcac

SEQ ID NO: 22058 - DNA, 20 bp, Artificial Sequence
  Synthetic oligonucleotide; GAG chr11 5342950 5342969 5342966 +
aaggtggtatcagcacaggc

SEQ ID NO: 22059 - DNA, 20 bp, Artificial Sequence
  Synthetic oligonucleotide; TGG chr11 5342966 5342985 5342982 +
aggcgagtttaatgacatcc

SEQ ID NO: 22060 - DNA, 20 bp, Artificial Sequence
  Synthetic oligonucleotide; AAG chr11 5342971 5342990 5342987 +
agtttaatgacatcctggtg

SEQ ID NO: 22061 - DNA, 20 bp, Artificial Sequence
  Synthetic oligonucleotide; AGG chr11 5342972 5342991 5342988 +
gtttaatgacatcctggtga

SEQ ID NO: 22062 - DNA, 20 bp, Artificial Sequence
  Synthetic oligonucleotide; CAG chr11 5342975 5342994 5342991 +
taatgacatcctggtgaagg

SEQ ID NO: 22063 - DNA, 20 bp, Artificial Sequence
  Synthetic oligonucleotide; AAG chr11 5342989 5343008 5343005 +
tgaaggcagaatgcatgtga

SEQ ID NO: 22064 - DNA, 20 bp, Artificial Sequence
  Synthetic oligonucleotide; TGG chr11 5342996 5343015 5343012 +
agaatgcatgtgaaagaaca

SEQ ID NO: 22065 - DNA, 20 bp, Artificial Sequence
  Synthetic oligonucleotide; GGG chr11 5342997 5343016 5343013 +
gaatgcatgtgaaagaacat

SEQ ID NO: 22066 - DNA, 20 bp, Artificial Sequence
  Synthetic oligonucleotide; GAG chr11 5342999 5343018 5343015 +
atgcatgtgaaagaacatgg

SEQ ID NO: 22067 - DNA, 20 bp, Artificial Sequence
  Synthetic oligonucleotide; CAG chr11 5343010 5343029 5343026 +
agaacatgggagtgacaata

SEQ ID NO: 22068 - DNA, 20 bp, Artificial Sequence
  Synthetic oligonucleotide; TAG chr11 5343020 5343039 5343036 +
agtgacaatacagaaaaaaa

SEQ ID NO: 22069 - DNA, 20 bp, Artificial Sequence
  Synthetic oligonucleotide; GAG chr11 5343022 5343041 5343038 +
tgacaatacagaaaaaaata

SEQ ID NO: 22070 - DNA, 20 bp, Artificial Sequence
  Synthetic oligonucleotide; AGG chr11 5343023 5343042 5343039 +
gacaatacagaaaaaaatag

SEQ ID NO: 22071 - DNA, 20 bp, Artificial Sequence
  Synthetic oligonucleotide; GGG chr11 5343024 5343043 5343040 +
acaatacagaaaaaaataga

SEQ ID NO: 22072 - DNA, 20 bp, Artificial Sequence
  Synthetic oligonucleotide; GGG chr11 5343025 5343044 5343041 +
caatacagaaaaaaatagag

SEQ ID NO: 22073 - DNA, 20 bp, Artificial Sequence
  Synthetic oligonucleotide; TGG chr11 5343034 5343053 5343050 +
aaaaaatagaggggcctgat

SEQ ID NO: 22074 - DNA, 20 bp, Artificial Sequence
  Synthetic oligonucleotide; GGG chr11 5343035 5343054 5343051 +
aaaaatagaggggcctgatt

SEQ ID NO: 22075 - DNA, 20 bp, Artificial Sequence
  Synthetic oligonucleotide; GGG chr11 5343036 5343055 5343052 +
aaaatagaggggcctgattg

SEQ ID NO: 22076 - DNA, 20 bp, Artificial Sequence
  Synthetic oligonucleotide; GGG chr11 5343037 5343056 5343053 +
aaatagaggggcctgattgg

SEQ ID NO: 22077 - DNA, 20 bp, Artificial Sequence
  Synthetic oligonucleotide; CGG chr11 5343045 5343064 5343061 +
gggcctgattgggggaacaa

SEQ ID NO: 22078 - DNA, 20 bp, Artificial Sequence
  Synthetic oligonucleotide; CAG chr11 5343064 5343083 5343080 +
acggatacaaatcccctcat

SEQ ID NO: 22079 - DNA, 20 bp, Artificial Sequence
  Synthetic oligonucleotide; CAG chr11 5343073 5343092 5343089 +
aatcccctcatcagaactcc

SEQ ID NO: 22080 - DNA, 20 bp, Artificial Sequence
  Synthetic oligonucleotide; GAG chr11 5343093 5343112 5343109 +
cagcccaatcttcactactc

SEQ ID NO: 22081 - DNA, 20 bp, Artificial Sequence
  Synthetic oligonucleotide; TAG chr11 5343099 5343118 5343115 +
aatcttcactactcgagtat

SEQ ID NO: 22082 - DNA, 20 bp, Artificial Sequence
  Synthetic oligonucleotide; AAG chr11 5343103 5343122 5343119 +
ttcactactcgagtattagt

SEQ ID NO: 22083 - DNA, 20 bp, Artificial Sequence
  Synthetic oligonucleotide; CAG chr11 5343108 5343127 5343124 +
tactcgagtattagtaagta

SEQ ID NO: 22084 - DNA, 20 bp, Artificial Sequence
  Synthetic oligonucleotide; GAG chr11 5343110 5343129 5343126 +
ctcgagtattagtaagtaca

SEQ ID NO: 22085 - DNA, 20 bp, Artificial Sequence
  Synthetic oligonucleotide; AGG chr11 5343111 5343130 5343127 +
tcgagtattagtaagtacag

SEQ ID NO: 22086 - DNA, 20 bp, Artificial Sequence
  Synthetic oligonucleotide; AAG chr11 5343121 5343140 5343137 +
gtaagtacagaggtatatct

SEQ ID NO: 22087 - DNA, 20 bp, Artificial Sequence
  Synthetic oligonucleotide; GAG chr11 5343123 5343142 5343139 +
aagtacagaggtatatctaa

SEQ ID NO: 22088 - DNA, 20 bp, Artificial Sequence
  Synthetic oligonucleotide; AGG chr11 5343124 5343143 5343140 +
agtacagaggtatatctaag

SEQ ID NO: 22089 - DNA, 20 bp, Artificial Sequence
  Synthetic oligonucleotide; GGG chr11 5343125 5343144 5343141 +
gtacagaggtatatctaaga

SEQ ID NO: 22090 - DNA, 20 bp, Artificial Sequence
  Synthetic oligonucleotide; CAG chr11 5343131 5343150 5343147 +
aggtatatctaagagggttg

SEQ ID NO: 22091 - DNA, 20 bp, Artificial Sequence
  Synthetic oligonucleotide; TGG chr11 5343135 5343154 5343151 +
atatctaagagggttgcaga

SEQ ID NO: 22092 - DNA, 20 bp, Artificial Sequence
  Synthetic oligonucleotide; CGG chr11 5343146 5343165 5343162 +
ggttgcagatggcaataaaa

SEQ ID NO: 22093 - DNA, 20 bp, Artificial Sequence
  Synthetic oligonucleotide; TAG chr11 5343152 5343171 5343168 +
agatggcaataaaacggtca

SEQ ID NO: 22094 - DNA, 20 bp, Artificial Sequence
  Synthetic oligonucleotide; AGG chr11 5343153 5343172 5343169 +
gatggcaataaaacggtcat

SEQ ID NO: 22095 - DNA, 20 bp, Artificial Sequence
  Synthetic oligonucleotide; TGG chr11 5343159 5343178 5343175 +
aataaaacggtcataggcca

SEQ ID NO: 22096 - DNA, 20 bp, Artificial Sequence
  Synthetic oligonucleotide; AAG chr11 5343163 5343182 5343179 +
aaacggtcataggccatggc

SEQ ID NO: 22097 - DNA, 20 bp, Artificial Sequence
  Synthetic oligonucleotide; CAG chr11 5343166 5343185 5343182 +
cggtcataggccatggcaag

SEQ ID NO: 22098 - DNA, 20 bp, Artificial Sequence
  Synthetic oligonucleotide; CAG chr11 5343174 5343193 5343190 +
ggccatggcaagcagaatgc

SEQ ID NO: 22099 - DNA, 20 bp, Artificial Sequence
  Synthetic oligonucleotide; GAG chr11 5343181 5343200 5343197 +
gcaagcagaatgccagactc

SEQ ID NO: 22100 - DNA, 20 bp, Artificial Sequence
  Synthetic oligonucleotide; AAG chr11 5343185 5343204 5343201 +
gcagaatgccagactcgaga

SEQ ID NO: 22101 - DNA, 20 bp, Artificial Sequence
  Synthetic oligonucleotide; AGG chr11 5343186 5343205 5343202 +
cagaatgccagactcgagaa

SEQ ID NO: 22102 - DNA, 20 bp, Artificial Sequence
  Synthetic oligonucleotide; AAG chr11 5343190 5343209 5343206 +
atgccagactcgagaaagga

SEQ ID NO: 22103 - DNA, 20 bp, Artificial Sequence
  Synthetic oligonucleotide; GAG chr11 5343194 5343213 5343210 +
cagactcgagaaaggaaagt

SEQ ID NO: 22104 - DNA, 20 bp, Artificial Sequence
  Synthetic oligonucleotide; AAG chr11 5343203 5343222 5343219 +
gaaaggaaagtgagtgtata

SEQ ID NO: 22105 - DNA, 20 bp, Artificial Sequence
  Synthetic oligonucleotide; TAG chr11 5343206 5343225 5343222 +
aggaaagtgagtgtataaag

SEQ ID NO: 22106 - DNA, 20 bp, Artificial Sequence
  Synthetic oligonucleotide; AGG chr11 5343207 5343226 5343223 +
ggaaagtgagtgtataaagt

SEQ ID NO: 22107 - DNA, 20 bp, Artificial Sequence
  Synthetic oligonucleotide; TGG chr11 5343212 5343231 5343228 +
gtgagtgtataaagtaggcc

SEQ ID NO: 22108 - DNA, 20 bp, Artificial Sequence
  Synthetic oligonucleotide; GGG chr11 5343213 5343232 5343229 +
tgagtgtataaagtaggcct

SEQ ID NO: 22109 - DNA, 20 bp, Artificial Sequence
  Synthetic oligonucleotide; AAG chr11 5343218 5343237 5343234 +
gtataaagtaggcctgggaa

SEQ ID NO: 22110 - DNA, 20 bp, Artificial Sequence
  Synthetic oligonucleotide; CAG chr11 5343221 5343240 5343237 +
taaagtaggcctgggaaaag

SEQ ID NO: 22111 - DNA, 20 bp, Artificial Sequence
  Synthetic oligonucleotide; AGG chr11 5343222 5343241 5343238 +
aaagtaggcctgggaaaagc

SEQ ID NO: 22112 - DNA, 20 bp, Artificial Sequence
  Synthetic oligonucleotide; CAG chr11 5343250 5343269 5343266 +
cttccaatctccctgtgatc

SEQ ID NO: 22113 - DNA, 20 bp, Artificial Sequence
  Synthetic oligonucleotide; CAG chr11 5343254 5343273 5343270 +
caatctccctgtgatccagc

SEQ ID NO: 22114 - DNA, 20 bp, Artificial Sequence
  Synthetic oligonucleotide; GAG chr11 5343256 5343275 5343272 +
atctccctgtgatccagcca

SEQ ID NO: 22115 - DNA, 20 bp, Artificial Sequence
  Synthetic oligonucleotide; AGG chr11 5343257 5343276 5343273 +
tctccctgtgatccagccag

SEQ ID NO: 22116 - DNA, 20 bp, Artificial Sequence
  Synthetic oligonucleotide; CAG chr11 5343265 5343284 5343281 +
tgatccagccagaggactcc

SEQ ID NO: 22117 - DNA, 20 bp, Artificial Sequence
  Synthetic oligonucleotide; TGG chr11 5343273 5343292 5343289 +
ccagaggactcccagcaccg

SEQ ID NO: 22118 - DNA, 20 bp, Artificial Sequence
  Synthetic oligonucleotide; GGG chr11 5343274 5343293 5343290 +
cagaggactcccagcaccgt

SEQ ID NO: 22119 - DNA, 20 bp, Artificial Sequence
  Synthetic oligonucleotide; TGG chr11 5343282 5343301 5343298 +
tcccagcaccgtgggcattg

SEQ ID NO: 22120 - DNA, 20 bp, Artificial Sequence
  Synthetic oligonucleotide; CAG chr11 5343286 5343305 5343302 +
agcaccgtgggcattgtggt

SEQ ID NO: 22121 - DNA, 20 bp, Artificial Sequence
  Synthetic oligonucleotide; AGG chr11 5343287 5343306 5343303 +
gcaccgtgggcattgtggtc

SEQ ID NO: 22122 - DNA, 20 bp, Artificial Sequence
  Synthetic oligonucleotide; GGG chr11 5343288 5343307 5343304 +
caccgtgggcattgtggtca

SEQ ID NO: 22123 - DNA, 20 bp, Artificial Sequence
  Synthetic oligonucleotide; CAG chr11 5343292 5343311 5343308 +
gtgggcattgtggtcagggc

SEQ ID NO: 22124 - DNA, 20 bp, Artificial Sequence
  Synthetic oligonucleotide; CAG chr11 5343298 5343317 5343314 +
attgtggtcagggccagccc

SEQ ID NO: 22125 - DNA, 20 bp, Artificial Sequence
  Synthetic oligonucleotide; AGG chr11 5343299 5343318 5343315 +
ttgtggtcagggccagcccc

SEQ ID NO: 22126 - DNA, 20 bp, Artificial Sequence
  Synthetic oligonucleotide; TGG chr11 5343306 5343325 5343322 +
cagggccagccccaggtctg

SEQ ID NO: 22127 - DNA, 20 bp, Artificial Sequence
  Synthetic oligonucleotide; CAG chr11 5343309 5343328 5343325 +
ggccagccccaggtctgtgg

SEQ ID NO: 22128 - DNA, 20 bp, Artificial Sequence
  Synthetic oligonucleotide; CAG chr11 5343313 5343332 5343329 +
agccccaggtctgtggcagc

SEQ ID NO: 22129 - DNA, 20 bp, Artificial Sequence
  Synthetic oligonucleotide; TGG chr11 5343318 5343337 5343334 +
caggtctgtggcagccagca

SEQ ID NO: 22130 - DNA, 20 bp, Artificial Sequence
  Synthetic oligonucleotide; CAG chr11 5343322 5343341 5343338 +
tctgtggcagccagcatggc

SEQ ID NO: 22131 - DNA, 20 bp, Artificial Sequence
  Synthetic oligonucleotide; AAG chr11 5343326 5343345 5343342 +
tggcagccagcatggccaga

SEQ ID NO: 22132 - DNA, 20 bp, Artificial Sequence
  Synthetic oligonucleotide; AAG chr11 5343329 5343348 5343345 +
cagccagcatggccagaaag

SEQ ID NO: 22133 - DNA, 20 bp, Artificial Sequence
  Synthetic oligonucleotide; TGG chr11 5343336 5343355 5343352 +
catggccagaaagaagtaca

SEQ ID NO: 22134 - DNA, 20 bp, Artificial Sequence
  Synthetic oligonucleotide; GGG chr11 5343337 5343356 5343353 +
atggccagaaagaagtacat

SEQ ID NO: 22135 - DNA, 20 bp, Artificial Sequence
  Synthetic oligonucleotide; AAG chr11 5343346 5343365 5343362 +
aagaagtacatgggctcatg

SEQ ID NO: 22136 - DNA, 20 bp, Artificial Sequence
  Synthetic oligonucleotide; GAG chr11 5343367 5343386 5343383 +
agattgtgatcttccttaat

SEQ ID NO: 22137 - DNA, 20 bp, Artificial Sequence
  Synthetic oligonucleotide; AAG chr11 5343370 5343389 5343386 +
ttgtgatcttccttaatgag

SEQ ID NO: 22138 - DNA, 20 bp, Artificial Sequence
  Synthetic oligonucleotide; AAG chr11 5343373 5343392 5343389 +
tgatcttccttaatgagaag

SEQ ID NO: 22139 - DNA, 20 bp, Artificial Sequence
  Synthetic oligonucleotide; AGG chr11 5343374 5343393 5343390 +
gatcttccttaatgagaaga

SEQ ID NO: 22140 - DNA, 20 bp, Artificial Sequence
  Synthetic oligonucleotide; GAG chr11 5343376 5343395 5343392 +
tcttccttaatgagaagaag

SEQ ID NO: 22141 - DNA, 20 bp, Artificial Sequence
  Synthetic oligonucleotide; AGG chr11 5343377 5343396 5343393 +
cttccttaatgagaagaagg

SEQ ID NO: 22142 - DNA, 20 bp, Artificial Sequence
  Synthetic oligonucleotide; GGG chr11 5343378 5343397 5343394 +
ttccttaatgagaagaagga

SEQ ID NO: 22143 - DNA, 20 bp, Artificial Sequence
  Synthetic oligonucleotide; AAG chr11 5343394 5343413 5343410 +
aggagggtgccattgccaaa

SEQ ID NO: 22144 - DNA, 20 bp, Artificial Sequence
  Synthetic oligonucleotide; AGG chr11 5343395 5343414 5343411 +
ggagggtgccattgccaaaa

SEQ ID NO: 22145 - DNA, 20 bp, Artificial Sequence
  Synthetic oligonucleotide; TGG chr11 5343399 5343418 5343415 +
ggtgccattgccaaaaagga

SEQ ID NO: 22146 - DNA, 20 bp, Artificial Sequence
  Synthetic oligonucleotide; AAG chr11 5343416 5343435 5343432 +
ggatggatatatacatgaac

SEQ ID NO: 22147 - DNA, 20 bp, Artificial Sequence
  Synthetic oligonucleotide; CGG chr11 5343426 5343445 5343442 +
atacatgaacaagaaaaata

SEQ ID NO: 22148 - DNA, 20 bp, Artificial Sequence
  Synthetic oligonucleotide; CAG chr11 5343434 5343453 5343450 +
acaagaaaaatacggaaatc

SEQ ID NO: 22149 - DNA, 20 bp, Artificial Sequence
  Synthetic oligonucleotide; GAG chr11 5343441 5343460 5343457 +
aaatacggaaatccagtgat

SEQ ID NO: 22150 - DNA, 20 bp, Artificial Sequence
  Synthetic oligonucleotide; AAG chr11 5343452 5343471 5343468 +
tccagtgatgagcttcctcc

SEQ ID NO: 22151 - DNA, 20 bp, Artificial Sequence
  Synthetic oligonucleotide; TGG chr11 5343457 5343476 5343473 +
tgatgagcttcctccaagcc

SEQ ID NO: 22152 - DNA, 20 bp, Artificial Sequence
  Synthetic oligonucleotide; CAG chr11 5343465 5343484 5343481 +
ttcctccaagcctggaaaac

SEQ ID NO: 22153 - DNA, 20 bp, Artificial Sequence
  Synthetic oligonucleotide; TAG chr11 5343472 5343491 5343488 +
aagcctggaaaaccagtcaa

SEQ ID NO: 22154 - DNA, 20 bp, Artificial Sequence
  Synthetic oligonucleotide; AGG chr11 5343473 5343492 5343489 +
agcctggaaaaccagtcaat

SEQ ID NO: 22155 - DNA, 20 bp, Artificial Sequence
  Synthetic oligonucleotide; AAG chr11 5343476 5343495 5343492 +
ctggaaaaccagtcaatagg

SEQ ID NO: 22156 - DNA, 20 bp, Artificial Sequence
  Synthetic oligonucleotide; AGG chr11 5343477 5343496 5343493 +
tggaaaaccagtcaatagga

SEQ ID NO: 22157 - DNA, 20 bp, Artificial Sequence
  Synthetic oligonucleotide; GGG chr11 5343478 5343497 5343494 +
ggaaaaccagtcaataggaa

SEQ ID NO: 22158 - DNA, 20 bp, Artificial Sequence
  Synthetic oligonucleotide; TGG chr11 5343482 5343501 5343498 +
aaccagtcaataggaaggga

SEQ ID NO: 22159 - DNA, 20 bp, Artificial Sequence
  Synthetic oligonucleotide; GGG chr11 5343483 5343502 5343499 +
accagtcaataggaagggat

SEQ ID NO: 22160 - DNA, 20 bp, Artificial Sequence
  Synthetic oligonucleotide; GAG chr11 5343485 5343504 5343501 +
cagtcaataggaagggatgg

SEQ ID NO: 22161 - DNA, 20 bp, Artificial Sequence
  Synthetic oligonucleotide; TGG chr11 5343495 5343514 5343511 +
gaagggatgggagctgccgc

SEQ ID NO: 22162 - DNA, 20 bp, Artificial Sequence
  Synthetic oligonucleotide; TGG chr11 5343507 5343526 5343523 +
gctgccgctggacgacatcc

SEQ ID NO: 22163 - DNA, 20 bp, Artificial Sequence
  Synthetic oligonucleotide; GGG chr11 5343508 5343527 5343524 +
ctgccgctggacgacatcct

SEQ ID NO: 22164 - DNA, 20 bp, Artificial Sequence
  Synthetic oligonucleotide; TAG chr11 5343517 5343536 5343533 +
gacgacatcctgggtttata

SEQ ID NO: 22165 - DNA, 20 bp, Artificial Sequence
  Synthetic oligonucleotide; AAG chr11 5343520 5343539 5343536 +
gacatcctgggtttatatag

SEQ ID NO: 22166 - DNA, 20 bp, Artificial Sequence
  Synthetic oligonucleotide; CAG chr11 5343551 5343570 5343567 +
ttctgtttctgttattacca

SEQ ID NO: 22167 - DNA, 20 bp, Artificial Sequence
  Synthetic oligonucleotide; CAG chr11 5343558 5343577 5343574 +
tctgttattaccacagtgca

SEQ ID NO: 22168 - DNA, 20 bp, Artificial Sequence
  Synthetic oligonucleotide; AAG chr11 5343571 5343590 5343587 +
cagtgcacagttctaccttc

SEQ ID NO: 22169 - DNA, 20 bp, Artificial Sequence
  Synthetic oligonucleotide; AGG chr11 5343572 5343591 5343588 +
agtgcacagttctaccttca

SEQ ID NO: 22170 - DNA, 20 bp, Artificial Sequence
  Synthetic oligonucleotide; CAG chr11 5343598 5343617 5343614 +
cacttcgactatatcattct

SEQ ID NO: 22171 - DNA, 20 bp, Artificial Sequence
  Synthetic oligonucleotide; AAG chr11 5343613 5343632 5343629 +
attctcagaattttttccta

SEQ ID NO: 22172 - DNA, 20 bp, Artificial Sequence
  Synthetic oligonucleotide; AAG chr11 5343635 5343654 5343651 +
gataataatgacatcaatat

SEQ ID NO: 22173 - DNA, 20 bp, Artificial Sequence
  Synthetic oligonucleotide; CAG chr11 5343662 5343681 5343678 +
tgtttctcaaaatacattct

SEQ ID NO: 22174 - DNA, 20 bp, Artificial Sequence
  Synthetic oligonucleotide; AGG chr11 5343663 5343682 5343679 +
gtttctcaaaatacattctc

SEQ ID NO: 22175 - DNA, 20 bp, Artificial Sequence
  Synthetic oligonucleotide; GGG chr11 5343664 5343683 5343680 +
tttctcaaaatacattctca

SEQ ID NO: 22176 - DNA, 20 bp, Artificial Sequence
  Synthetic oligonucleotide; CAG chr11 5343702 5343721 5343718 +
gtattcttaactgcacattc

SEQ ID NO: 22177 - DNA, 20 bp, Artificial Sequence
  Synthetic oligonucleotide; AGG chr11 5343703 5343722 5343719 +
tattcttaactgcacattcc

SEQ ID NO: 22178 - DNA, 20 bp, Artificial Sequence
  Synthetic oligonucleotide; TGG chr11 5343736 5343755 5343752 +
tacctacgtaatcaaattct

SEQ ID NO: 22179 - DNA, 20 bp, Artificial Sequence
  Synthetic oligonucleotide; GAG chr11 5343738 5343757 5343754 +
cctacgtaatcaaattcttg

SEQ ID NO: 22180 - DNA, 20 bp, Artificial Sequence
  Synthetic oligonucleotide; AAG chr11 5343763 5343782 5343779 +
tcaactgtttatatgcattt

SEQ ID NO: 22181 - DNA, 20 bp, Artificial Sequence
  Synthetic oligonucleotide; CAG chr11 5343775 5343794 5343791 +
atgcatttaagcattctctt

SEQ ID NO: 22182 - DNA, 20 bp, Artificial Sequence
  Synthetic oligonucleotide; CAG chr11 5343827 5343846 5343843 +
aactgttacccttaactatg

SEQ ID NO: 22183 - DNA, 20 bp, Artificial Sequence
  Synthetic oligonucleotide; AAG chr11 5343836 5343855 5343852 +
ccttaactatgcagatttta

SEQ ID NO: 22184 - DNA, 20 bp, Artificial Sequence
  Synthetic oligonucleotide; TGG chr11 5343852 5343871 5343868 +
tttaaagaattcgtattcta

SEQ ID NO: 22185 - DNA, 20 bp, Artificial Sequence
  Synthetic oligonucleotide; GGG chr11 5343853 5343872 5343869 +
ttaaagaattcgtattctat

SEQ ID NO: 22186 - DNA, 20 bp, Artificial Sequence
  Synthetic oligonucleotide; GGG chr11 5343854 5343873 5343870 +
taaagaattcgtattctatg

SEQ ID NO: 22187 - DNA, 20 bp, Artificial Sequence
  Synthetic oligonucleotide; AAG chr11 5343862 5343881 5343878 +
tcgtattctatggggcattc

SEQ ID NO: 22188 - DNA, 20 bp, Artificial Sequence
  Synthetic oligonucleotide; AGG chr11 5343863 5343882 5343879 +
cgtattctatggggcattca

SEQ ID NO: 22189 - DNA, 20 bp, Artificial Sequence
  Synthetic oligonucleotide; GGG chr11 5343864 5343883 5343880 +
gtattctatggggcattcaa

SEQ ID NO: 22190 - DNA, 20 bp, Artificial Sequence
  Synthetic oligonucleotide; GGG chr11 5343865 5343884 5343881 +
tattctatggggcattcaag

SEQ ID NO: 22191 - DNA, 20 bp, Artificial Sequence
  Synthetic oligonucleotide; CAG chr11 5343873 5343892 5343889 +
ggggcattcaaggggatttc

SEQ ID NO: 22192 - DNA, 20 bp, Artificial Sequence
  Synthetic oligonucleotide; AAG chr11 5343877 5343896 5343893 +
cattcaaggggatttccaga

SEQ ID NO: 22193 - DNA, 20 bp, Artificial Sequence
  Synthetic oligonucleotide; TGG chr11 5343898 5343917 5343914 +
agctaacactaatttttttc

SEQ ID NO: 22194 - DNA, 20 bp, Artificial Sequence
  Synthetic oligonucleotide; CAG chr11 5343930 5343949 5343946 +
taaacctgtaattgccttca

SEQ ID NO: 22195 - DNA, 20 bp, Artificial Sequence
  Synthetic oligonucleotide; TAG chr11 5343933 5343952 5343949 +
acctgtaattgccttcacag

SEQ ID NO: 22196 - DNA, 20 bp, Artificial Sequence
  Synthetic oligonucleotide; AAG chr11 5343966 5343985 5343982 +
tccacattttcctgcatgta

SEQ ID NO: 22197 - DNA, 20 bp, Artificial Sequence
  Synthetic oligonucleotide; CAG chr11 5343984 5344003 5344000 +
taaagacttacctgaattat

SEQ ID NO: 22198 - DNA, 20 bp, Artificial Sequence
  Synthetic oligonucleotide; AAG chr11 5343990 5344009 5344006 +
cttacctgaattatcagcta

SEQ ID NO: 22199 - DNA, 20 bp, Artificial Sequence
  Synthetic oligonucleotide; CAG chr11 5343999 5344018 5344015 +
attatcagctaaagtctcaa

SEQ ID NO: 22200 - DNA, 20 bp, Artificial Sequence
  Synthetic oligonucleotide; AAG chr11 5344005 5344024 5344021 +
agctaaagtctcaacagcct

SEQ ID NO: 22201 - DNA, 20 bp, Artificial Sequence
  Synthetic oligonucleotide; AAG chr11 5344009 5344028 5344025 +
aaagtctcaacagcctaaga

SEQ ID NO: 22202 - DNA, 20 bp, Artificial Sequence
  Synthetic oligonucleotide; AAG chr11 5344014 5344033 5344030 +
ctcaacagcctaagaaagaa

SEQ ID NO: 22203 - DNA, 20 bp, Artificial Sequence
  Synthetic oligonucleotide; TGG chr11 5344019 5344038 5344035 +
cagcctaagaaagaaaagtg

SEQ ID NO: 22204 - DNA, 20 bp, Artificial Sequence
  Synthetic oligonucleotide; GGG chr11 5344020 5344039 5344036 +
agcctaagaaagaaaagtgt

SEQ ID NO: 22205 - DNA, 20 bp, Artificial Sequence
  Synthetic oligonucleotide; AAG chr11 5344023 5344042 5344039 +
ctaagaaagaaaagtgtggg

SEQ ID NO: 22206 - DNA, 20 bp, Artificial Sequence
  Synthetic oligonucleotide; GAG chr11 5344025 5344044 5344041 +
aagaaagaaaagtgtgggaa

SEQ ID NO: 22207 - DNA, 20 bp, Artificial Sequence
  Synthetic oligonucleotide; TAG chr11 5344048 5344067 5344064 +
aaactctgccactaccactg

SEQ ID NO: 22208 - DNA, 20 bp, Artificial Sequence
  Synthetic oligonucleotide; AAG chr11 5344053 5344072 5344069 +
ctgccactaccactgtagct

SEQ ID NO: 22209 - DNA, 20 bp, Artificial Sequence
  Synthetic oligonucleotide; AGG chr11 5344054 5344073 5344070 +
tgccactaccactgtagcta

SEQ ID NO: 22210 - DNA, 20 bp, Artificial Sequence
  Synthetic oligonucleotide; GAG chr11 5344056 5344075 5344072 +
ccactaccactgtagctaag

SEQ ID NO: 22211 - DNA, 20 bp, Artificial Sequence
  Synthetic oligonucleotide; CAG chr11 5344059 5344078 5344075 +
ctaccactgtagctaaggag

SEQ ID NO: 22212 - DNA, 20 bp, Artificial Sequence
  Synthetic oligonucleotide; CAG chr11 5344063 5344082 5344079 +
cactgtagctaaggagcagt

SEQ ID NO: 22213 - DNA, 20 bp, Artificial Sequence
  Synthetic oligonucleotide; GAG chr11 5344069 5344088 5344085 +
agctaaggagcagtcagatt

SEQ ID NO: 22214 - DNA, 20 bp, Artificial Sequence
  Synthetic oligonucleotide; AAG chr11 5344073 5344092 5344089 +
aaggagcagtcagattgaga

SEQ ID NO: 22215 - DNA, 20 bp, Artificial Sequence
  Synthetic oligonucleotide; GAG chr11 5344075 5344094 5344091 +
ggagcagtcagattgagaaa

SEQ ID NO: 22216 - DNA, 20 bp, Artificial Sequence
  Synthetic oligonucleotide; TGG chr11 5344083 5344102 5344099 +
cagattgagaaagagacact

SEQ ID NO: 22217 - DNA, 20 bp, Artificial Sequence
  Synthetic oligonucleotide; CAG chr11 5344090 5344109 5344106 +
agaaagagacacttggcctc

SEQ ID NO: 22218 - DNA, 20 bp, Artificial Sequence
  Synthetic oligonucleotide; TGG chr11 5344099 5344118 5344115 +
cacttggcctccagatttca

SEQ ID NO: 22219 - DNA, 20 bp, Artificial Sequence
  Synthetic oligonucleotide; TAG chr11 5344104 5344123 5344120 +
ggcctccagatttcatggac

SEQ ID NO: 22220 - DNA, 20 bp, Artificial Sequence
  Synthetic oligonucleotide; TGG chr11 5344110 5344129 5344126 +
cagatttcatggactagtga

SEQ ID NO: 22221 - DNA, 20 bp, Artificial Sequence
  Synthetic oligonucleotide; GGG chr11 5344111 5344130 5344127 +
agatttcatggactagtgat

SEQ ID NO: 22222 - DNA, 20 bp, Artificial Sequence
  Synthetic oligonucleotide; GGG chr11 5344112 5344131 5344128 +
gatttcatggactagtgatg

SEQ ID NO: 22223 - DNA, 20 bp, Artificial Sequence
  Synthetic oligonucleotide; CAG chr11 5344117 5344136 5344133 +
catggactagtgatggggaa

SEQ ID NO: 22224 - DNA, 20 bp, Artificial Sequence
  Synthetic oligonucleotide; TAG chr11 5344131 5344150 5344147 +
ggggaacagacattcacgat

SEQ ID NO: 22225 - DNA, 20 bp, Artificial Sequence
  Synthetic oligonucleotide; TAG chr11 5344151 5344170 5344167 +
tagtgtgaattaccctcttg

SEQ ID NO: 22226 - DNA, 20 bp, Artificial Sequence
  Synthetic oligonucleotide; CAG chr11 5344161 5344180 5344177 +
taccctcttgtagaatcctt

SEQ ID NO: 22227 - DNA, 20 bp, Artificial Sequence
  Synthetic oligonucleotide; TAG chr11 5344186 5344205 5344202 +
ctactcactacttgtgacaa

SEQ ID NO: 22228 - DNA, 20 bp, Artificial Sequence
  Synthetic oligonucleotide; CAG chr11 5344191 5344210 5344207 +
cactacttgtgacaatagct

SEQ ID NO: 22229 - DNA, 20 bp, Artificial Sequence
  Synthetic oligonucleotide; AAG chr11 5344203 5344222 5344219 +
caatagctcagtctaattat

SEQ ID NO: 22230 - DNA, 20 bp, Artificial Sequence
  Synthetic oligonucleotide; TAG chr11 5344207 5344226 5344223 +
agctcagtctaattataagt

SEQ ID NO: 22231 - DNA, 20 bp, Artificial Sequence
  Synthetic oligonucleotide; TGG chr11 5344214 5344233 5344230 +
tctaattataagttagactt

SEQ ID NO: 22232 - DNA, 20 bp, Artificial Sequence
  Synthetic oligonucleotide; GGG chr11 5344215 5344234 5344231 +
ctaattataagttagacttt

SEQ ID NO: 22233 - DNA, 20 bp, Artificial Sequence
  Synthetic oligonucleotide; GGG chr11 5344216 5344235 5344232 +
taattataagttagactttg

SEQ ID NO: 22234 - DNA, 20 bp, Artificial Sequence
  Synthetic oligonucleotide; TGG chr11 5344220 5344239 5344236 +
tataagttagactttggggc

SEQ ID NO: 22235 - DNA, 20 bp, Artificial Sequence
  Synthetic oligonucleotide; TAG chr11 5344233 5344252 5344249 +
ttggggctggaataaatgat

SEQ ID NO: 22236 - DNA, 20 bp, Artificial Sequence
  Synthetic oligonucleotide; AGG chr11 5344234 5344253 5344250 +
tggggctggaataaatgatt

SEQ ID NO: 22237 - DNA, 20 bp, Artificial Sequence
  Synthetic oligonucleotide; CAG chr11 5344238 5344257 5344254 +
gctggaataaatgattaggc

SEQ ID NO: 22238 - DNA, 20 bp, Artificial Sequence
  Synthetic oligonucleotide; AAG chr11 5344244 5344263 5344260 +
ataaatgattaggccagcca

SEQ ID NO: 22239 - DNA, 20 bp, Artificial Sequence
  Synthetic oligonucleotide; TAG chr11 5344260 5344279 5344276 +
gccaaagacatcacttataa

SEQ ID NO: 22240 - DNA, 20 bp, Artificial Sequence
  Synthetic oligonucleotide; CAG chr11 5344274 5344293 5344290 +
ttataatagtgtatctcctt

SEQ ID NO: 22241 - DNA, 20 bp, Artificial Sequence
  Synthetic oligonucleotide; AAG chr11 5344305 5344324 5344321 +
tcttactgtttcttatttac

SEQ ID NO: 22242 - DNA, 20 bp, Artificial Sequence
  Synthetic oligonucleotide; TAG chr11 5344308 5344327 5344324 +
tactgtttcttatttacaag

SEQ ID NO: 22243 - DNA, 20 bp, Artificial Sequence
  Synthetic oligonucleotide; TAG chr11 5344340 5344359 5344356 +
ctttttaaattatttttcta

SEQ ID NO: 22244 - DNA, 20 bp, Artificial Sequence
  Synthetic oligonucleotide; AGG chr11 5344341 5344360 5344357 +
tttttaaattatttttctat

SEQ ID NO: 22245 - DNA, 20 bp, Artificial Sequence
  Synthetic oligonucleotide; AAG chr11 5344351 5344370 5344367 +
atttttctataggcctactg

SEQ ID NO: 22246 - DNA, 20 bp, Artificial Sequence
  Synthetic oligonucleotide; TAG chr11 5344362 5344381 5344378 +
ggcctactgaagtaattccc

SEQ ID NO: 22247 - DNA, 20 bp, Artificial Sequence
  Synthetic oligonucleotide; AAG chr11 5344385 5344404 5344401 +
aatctgacctctctcatttc

SEQ ID NO: 22248 - DNA, 20 bp, Artificial Sequence
  Synthetic oligonucleotide; TGG chr11 5344419 5344438 5344435 +
tatttaaacatccatcttcc

SEQ ID NO: 22249 - DNA, 20 bp, Artificial Sequence
  Synthetic oligonucleotide; CAG chr11 5344440 5344459 5344456 +
ggtttccttccctttatccc

SEQ ID NO: 22250 - DNA, 20 bp, Artificial Sequence
  Synthetic oligonucleotide; TAG chr11 5344446 5344465 5344462 +
cttccctttatccccagcca

SEQ ID NO: 22251 - DNA, 20 bp, Artificial Sequence
  Synthetic oligonucleotide; AGG chr11 5344447 5344466 5344463 +
ttccctttatccccagccat

SEQ ID NO: 22252 - DNA, 20 bp, Artificial Sequence
  Synthetic oligonucleotide; GAG chr11 5344476 5344495 5344492 +
aatctgttctccccaatact

SEQ ID NO: 22253 - DNA, 20 bp, Artificial Sequence
  Synthetic oligonucleotide; GAG chr11 5344480 5344499 5344496 +
tgttctccccaatactgagt

SEQ ID NO: 22254 - DNA, 20 bp, Artificial Sequence
  Synthetic oligonucleotide; GAG chr11 5344482 5344501 5344498 +
ttctccccaatactgagtga

SEQ ID NO: 22255 - DNA, 20 bp, Artificial Sequence
  Synthetic oligonucleotide; TGG chr11 5344504 5344523 5344520 +
gctatttccctgcttaaacg

SEQ ID NO: 22256 - DNA, 20 bp, Artificial Sequence
  Synthetic oligonucleotide; AAG chr11 5344522 5344541 5344538 +
cgtggtgctgtcttttactg

SEQ ID NO: 22257 - DNA, 20 bp, Artificial Sequence
  Synthetic oligonucleotide; GAG chr11 5344524 5344543 5344540 +
tggtgctgtcttttactgaa

SEQ ID NO: 22258 - DNA, 20 bp, Artificial Sequence
  Synthetic oligonucleotide; AAG chr11 5344527 5344546 5344543 +
tgctgtcttttactgaagag

SEQ ID NO: 22259 - DNA, 20 bp, Artificial Sequence
  Synthetic oligonucleotide; GAG chr11 5344529 5344548 5344545 +
ctgtcttttactgaagagaa

SEQ ID NO: 22260 - DNA, 20 bp, Artificial Sequence
  Synthetic oligonucleotide; TAG chr11 5344534 5344553 5344550 +
ttttactgaagagaagagat

SEQ ID NO: 22261 - DNA, 20 bp, Artificial Sequence
  Synthetic oligonucleotide; GAG chr11 5344543 5344562 5344559 +
agagaagagattagtccttt

SEQ ID NO: 22262 - DNA, 20 bp, Artificial Sequence
  Synthetic oligonucleotide; AAG chr11 5344546 5344565 5344562 +
gaagagattagtcctttgag

SEQ ID NO: 22263 - DNA, 20 bp, Artificial Sequence
  Synthetic oligonucleotide; AGG chr11 5344547 5344566 5344563 +
aagagattagtcctttgaga

SEQ ID NO: 22264 - DNA, 20 bp, Artificial Sequence
  Synthetic oligonucleotide; TAG chr11 5344571 5344590 5344587 +
tttaatattccttctgccac

SEQ ID NO: 22265 - DNA, 20 bp, Artificial Sequence
  Synthetic oligonucleotide; TAG chr11 5344576 5344595 5344592 +
tattccttctgccactagac

SEQ ID NO: 22266 - DNA, 20 bp, Artificial Sequence
  Synthetic oligonucleotide; AGG chr11 5344577 5344596 5344593 +
attccttctgccactagact

SEQ ID NO: 22267 - DNA, 20 bp, Artificial Sequence
  Synthetic oligonucleotide; GGG chr11 5344578 5344597 5344594 +
ttccttctgccactagacta

SEQ ID NO: 22268 - DNA, 20 bp, Artificial Sequence
  Synthetic oligonucleotide; GGG chr11 5344579 5344598 5344595 +
tccttctgccactagactag

SEQ ID NO: 22269 - DNA, 20 bp, Artificial Sequence
  Synthetic oligonucleotide; TAG chr11 5344593 5344612 5344609 +
gactaggggcttcttgcata

SEQ ID NO: 22270 - DNA, 20 bp, Artificial Sequence
  Synthetic oligonucleotide; TGG chr11 5344599 5344618 5344615 +
gggcttcttgcatatagaca

SEQ ID NO: 22271 - DNA, 20 bp, Artificial Sequence
  Synthetic oligonucleotide; AAG chr11 5344631 5344650 5344647 +
gctttgctcaacaccttgca

SEQ ID NO: 22272 - DNA, 20 bp, Artificial Sequence
  Synthetic oligonucleotide; TAG chr11 5344663 5344682 5344679 +
tgtgactgataaacatttct

SEQ ID NO: 22273 - DNA, 20 bp, Artificial Sequence
  Synthetic oligonucleotide; CAG chr11 5344699 5344718 5344715 +
tgtgaacacgcatcatgtga

SEQ ID NO: 22274 - DNA, 20 bp, Artificial Sequence
  Synthetic oligonucleotide; AAG chr11 5344714 5344733 5344730 +
tgtgacagccatgatattta

SEQ ID NO: 22275 - DNA, 20 bp, Artificial Sequence
  Synthetic oligonucleotide; TGG chr11 5344722 5344741 5344738 +
ccatgatatttaaagctctc

SEQ ID NO: 22276 - DNA, 20 bp, Artificial Sequence
  Synthetic oligonucleotide; TGG chr11 5344732 5344751 5344748 +
taaagctctctggaattaaa

SEQ ID NO: 22277 - DNA, 20 bp, Artificial Sequence
  Synthetic oligonucleotide; AAG chr11 5344739 5344758 5344755 +
ctctggaattaaatggtaat

SEQ ID NO: 22278 - DNA, 20 bp, Artificial Sequence
  Synthetic oligonucleotide; AAG chr11 5344745 5344764 5344761 +
aattaaatggtaataagaca

SEQ ID NO: 22279 - DNA, 20 bp, Artificial Sequence
  Synthetic oligonucleotide; AAG chr11 5344773 5344792 5344789 +
aatcttataaaccataaatt

SEQ ID NO: 22280 - DNA, 20 bp, Artificial Sequence
  Synthetic oligonucleotide; AAG chr11 5344789 5344808 5344805 +
aattaagttgaaaaataaat

SEQ ID NO: 22281 - DNA, 20 bp, Artificial Sequence
  Synthetic oligonucleotide; AAG chr11 5344816 5344835 5344832 +
ttttaaacaaatataaatgc

SEQ ID NO: 22282 - DNA, 20 bp, Artificial Sequence
  Synthetic oligonucleotide; CAG chr11 5344831 5344850 5344847 +
aatgcaagtttaacataaaa

SEQ ID NO: 22283 - DNA, 20 bp, Artificial Sequence
  Synthetic oligonucleotide; TAG chr11 5344846 5344865 5344862 +
taaaacagtactacttgatg

SEQ ID NO: 22284 - DNA, 20 bp, Artificial Sequence
  Synthetic oligonucleotide; TGG chr11 5344855 5344874 5344871 +
actacttgatgtagattaat

SEQ ID NO: 22285 - DNA, 20 bp, Artificial Sequence
  Synthetic oligonucleotide; TGG chr11 5344859 5344878 5344875 +
cttgatgtagattaattgga

SEQ ID NO: 22286 - DNA, 20 bp, Artificial Sequence
  Synthetic oligonucleotide; AAG chr11 5344872 5344891 5344888 +
aattggatggtattgtatac

SEQ ID NO: 22287 - DNA, 20 bp, Artificial Sequence
  Synthetic oligonucleotide; TAG chr11 5344876 5344895 5344892 +
ggatggtattgtatacaaga

SEQ ID NO: 22288 - DNA, 20 bp, Artificial Sequence
  Synthetic oligonucleotide; TAG chr11 5344881 5344900 5344897 +
gtattgtatacaagatagta

SEQ ID NO: 22289 - DNA, 20 bp, Artificial Sequence
  Synthetic oligonucleotide; CAG chr11 5344884 5344903 5344900 +
ttgtatacaagatagtatag

SEQ ID NO: 22290 - DNA, 20 bp, Artificial Sequence
  Synthetic oligonucleotide; GAG chr11 5344890 5344909 5344906 +
acaagatagtatagcagttt

SEQ ID NO: 22291 - DNA, 20 bp, Artificial Sequence
  Synthetic oligonucleotide; AGG chr11 5344891 5344910 5344907 +
caagatagtatagcagtttg

SEQ ID NO: 22292 - DNA, 20 bp, Artificial Sequence
  Synthetic oligonucleotide; GGG chr11 5344892 5344911 5344908 +
aagatagtatagcagtttga

SEQ ID NO: 22293 - DNA, 20 bp, Artificial Sequence
  Synthetic oligonucleotide; GGG chr11 5344893 5344912 5344909 +
agatagtatagcagtttgag

SEQ ID NO: 22294 - DNA, 20 bp, Artificial Sequence
  Synthetic oligonucleotide; TAG chr11 5344898 5344917 5344914 +
gtatagcagtttgaggggcc

SEQ ID NO: 22295 - DNA, 20 bp, Artificial Sequence
  Synthetic oligonucleotide; GAG chr11 5344913 5344932 5344929 +
gggcctagaactgcacctat

SEQ ID NO: 22296 - DNA, 20 bp, Artificial Sequence
  Synthetic oligonucleotide; AGG chr11 5344914 5344933 5344930 +
ggcctagaactgcacctatg

SEQ ID NO: 22297 - DNA, 20 bp, Artificial Sequence
  Synthetic oligonucleotide; GAG chr11 5344916 5344935 5344932 +
cctagaactgcacctatgag

SEQ ID NO: 22298 - DNA, 20 bp, Artificial Sequence
  Synthetic oligonucleotide; AGG chr11 5344917 5344936 5344933 +
ctagaactgcacctatgagg

SEQ ID NO: 22299 - DNA, 20 bp, Artificial Sequence
  Synthetic oligonucleotide; GAG chr11 5344933 5344952 5344949 +
gaggaggtcccatttgaact

SEQ ID NO: 22300 - DNA, 20 bp, Artificial Sequence
  Synthetic oligonucleotide; AAG chr11 5344948 5344967 5344964 +
gaactgagacctcaatacaa

SEQ ID NO: 22301 - DNA, 20 bp, Artificial Sequence
  Synthetic oligonucleotide; CAG chr11 5344967 5344986 5344983 +
aaagaaaacctgaccgtata

SEQ ID NO: 22302 - DNA, 20 bp, Artificial Sequence
  Synthetic oligonucleotide; TAG chr11 5344973 5344992 5344989 +
aacctgaccgtatacagacc

SEQ ID NO: 22303 - DNA, 20 bp, Artificial Sequence
  Synthetic oligonucleotide; GAG chr11 5344975 5344994 5344991 +
cctgaccgtatacagaccta

SEQ ID NO: 22304 - DNA, 20 bp, Artificial Sequence
  Synthetic oligonucleotide; AGG chr11 5344976 5344995 5344992 +
ctgaccgtatacagacctag

SEQ ID NO: 22305 - DNA, 20 bp, Artificial Sequence
  Synthetic oligonucleotide; CAG chr11 5344989 5345008 5345005 +
gacctagaggaaaactgttc

SEQ ID NO: 22306 - DNA, 20 bp, Artificial Sequence
  Synthetic oligonucleotide; GAG chr11 5344991 5345010 5345007 +
cctagaggaaaactgttcca

SEQ ID NO: 22307 - DNA, 20 bp, Artificial Sequence
  Synthetic oligonucleotide; AGG chr11 5344992 5345011 5345008 +
ctagaggaaaactgttccag

SEQ ID NO: 22308 - DNA, 20 bp, Artificial Sequence
  Synthetic oligonucleotide; GGG chr11 5344993 5345012 5345009 +
tagaggaaaactgttccaga

SEQ ID NO: 22309 - DNA, 20 bp, Artificial Sequence
  Synthetic oligonucleotide; CAG chr11 5345001 5345020 5345017 +
aactgttccagagggaaaat

SEQ ID NO: 22310 - DNA, 20 bp, Artificial Sequence
  Synthetic oligonucleotide; TGG chr11 5345010 5345029 5345026 +
agagggaaaatcagcatgac

SEQ ID NO: 22311 - DNA, 20 bp, Artificial Sequence
  Synthetic oligonucleotide; AAG chr11 5345021 5345040 5345037 +
cagcatgactggcatttgat

SEQ ID NO: 22312 - DNA, 20 bp, Artificial Sequence
  Synthetic oligonucleotide; CAG chr11 5345028 5345047 5345044 +
actggcatttgataagaaaa

SEQ ID NO: 22313 - DNA, 20 bp, Artificial Sequence
  Synthetic oligonucleotide; AGG chr11 5345029 5345048 5345045 +
ctggcatttgataagaaaac

SEQ ID NO: 22314 - DNA, 20 bp, Artificial Sequence
  Synthetic oligonucleotide; GAG chr11 5345031 5345050 5345047 +
ggcatttgataagaaaacag

SEQ ID NO: 22315 - DNA, 20 bp, Artificial Sequence
  Synthetic oligonucleotide; GAG chr11 5345033 5345052 5345049 +
catttgataagaaaacagga

SEQ ID NO: 22316 - DNA, 20 bp, Artificial Sequence
  Synthetic oligonucleotide; AGG chr11 5345034 5345053 5345050 +
atttgataagaaaacaggag

SEQ ID NO: 22317 - DNA, 20 bp, Artificial Sequence
  Synthetic oligonucleotide; GGG chr11 5345035 5345054 5345051 +
tttgataagaaaacaggaga

SEQ ID NO: 22318 - DNA, 20 bp, Artificial Sequence
  Synthetic oligonucleotide; TAG chr11 5345042 5345061 5345058 +
agaaaacaggagagggacaa

SEQ ID NO: 22319 - DNA, 20 bp, Artificial Sequence
  Synthetic oligonucleotide; AAG chr11 5345054 5345073 5345070 +
agggacaatagatgatgtca

SEQ ID NO: 22320 - DNA, 20 bp, Artificial Sequence
  Synthetic oligonucleotide; AAG chr11 5345057 5345076 5345073 +
gacaatagatgatgtcaaag

SEQ ID NO: 22321 - DNA, 20 bp, Artificial Sequence
  Synthetic oligonucleotide; CAG chr11 5345060 5345079 5345076 +
aatagatgatgtcaaagaag

SEQ ID NO: 22322 - DNA, 20 bp, Artificial Sequence
  Synthetic oligonucleotide; AGG chr11 5345061 5345080 5345077 +
atagatgatgtcaaagaagc

SEQ ID NO: 22323 - DNA, 20 bp, Artificial Sequence
  Synthetic oligonucleotide; TAG chr11 5345064 5345083 5345080 +
gatgatgtcaaagaagcagg

SEQ ID NO: 22324 - DNA, 20 bp, Artificial Sequence
  Synthetic oligonucleotide; AAG chr11 5345072 5345091 5345088 +
caaagaagcaggtagtaatc

SEQ ID NO: 22325 - DNA, 20 bp, Artificial Sequence
  Synthetic oligonucleotide; TAG chr11 5345080 5345099 5345096 +
caggtagtaatcaagtgtca

SEQ ID NO: 22326 - DNA, 20 bp, Artificial Sequence
  Synthetic oligonucleotide; AGG chr11 5345081 5345100 5345097 +
aggtagtaatcaagtgtcat

SEQ ID NO: 22327 - DNA, 20 bp, Artificial Sequence
  Synthetic oligonucleotide; GGG chr11 5345082 5345101 5345098 +
ggtagtaatcaagtgtcata

SEQ ID NO: 22328 - DNA, 20 bp, Artificial Sequence
  Synthetic oligonucleotide; CAG chr11 5345090 5345109 5345106 +
tcaagtgtcatagggcctta

SEQ ID NO: 22329 - DNA, 20 bp, Artificial Sequence
  Synthetic oligonucleotide; CGG chr11 5345100 5345119 5345116 +
tagggccttacagaccacca

SEQ ID NO: 22330 - DNA, 20 bp, Artificial Sequence
  Synthetic oligonucleotide; TAG chr11 5345141 5345160 5345157 +
ttttcttcttactataaatg

SEQ ID NO: 22331 - DNA, 20 bp, Artificial Sequence
  Synthetic oligonucleotide; AAG chr11 5345146 5345165 5345162 +
ttcttactataaatgtagta

SEQ ID NO: 22332 - DNA, 20 bp, Artificial Sequence
  Synthetic oligonucleotide; TAG chr11 5345153 5345172 5345169 +
tataaatgtagtaaagacat

SEQ ID NO: 22333 - DNA, 20 bp, Artificial Sequence
  Synthetic oligonucleotide; AGG chr11 5345154 5345173 5345170 +
ataaatgtagtaaagacatt

SEQ ID NO: 22334 - DNA, 20 bp, Artificial Sequence
  Synthetic oligonucleotide; TGG chr11 5345175 5345194 5345191 +
ggacactttgaaaatcacaa

SEQ ID NO: 22335 - DNA, 20 bp, Artificial Sequence
  Synthetic oligonucleotide; TAG chr11 5345182 5345201 5345198 +
ttgaaaatcacaatggaaaa

SEQ ID NO: 22336 - DNA, 20 bp, Artificial Sequence
  Synthetic oligonucleotide; TGG chr11 5345187 5345206 5345203 +
aatcacaatggaaaatagtg

SEQ ID NO: 22337 - DNA, 20 bp, Artificial Sequence
  Synthetic oligonucleotide; TAG chr11 5345226 5345245 5345242 +
gtatttttaaattactcact

SEQ ID NO: 22338 - DNA, 20 bp, Artificial Sequence
  Synthetic oligonucleotide; AAG chr11 5345240 5345259 5345256 +
ctcacttagactgctatgtg

SEQ ID NO: 22339 - DNA, 20 bp, Artificial Sequence
  Synthetic oligonucleotide; AAG chr11 5345243 5345262 5345259 +
acttagactgctatgtgaag

SEQ ID NO: 22340 - DNA, 20 bp, Artificial Sequence
  Synthetic oligonucleotide; AAG chr11 5345249 5345268 5345265 +
actgctatgtgaagaagact

SEQ ID NO: 22341 - DNA, 20 bp, Artificial Sequence
  Synthetic oligonucleotide; AAG chr11 5345253 5345272 5345269 +
ctatgtgaagaagactaagc

SEQ ID NO: 22342 - DNA, 20 bp, Artificial Sequence
  Synthetic oligonucleotide; GAG chr11 5345255 5345274 5345271 +
atgtgaagaagactaagcaa

SEQ ID NO: 22343 - DNA, 20 bp, Artificial Sequence
  Synthetic oligonucleotide; AAG chr11 5345260 5345279 5345276 +
aagaagactaagcaagagac

SEQ ID NO: 22344 - DNA, 20 bp, Artificial Sequence
  Synthetic oligonucleotide; AAG chr11 5345265 5345284 5345281 +
gactaagcaagagacaagaa

SEQ ID NO: 22345 - DNA, 20 bp, Artificial Sequence
  Synthetic oligonucleotide; GAG chr11 5345267 5345286 5345283 +
ctaagcaagagacaagaaaa

SEQ ID NO: 22346 - DNA, 20 bp, Artificial Sequence
  Synthetic oligonucleotide; GAG chr11 5345272 5345291 5345288 +
caagagacaagaaaagagat

SEQ ID NO: 22347 - DNA, 20 bp, Artificial Sequence
  Synthetic oligonucleotide; TAG chr11 5345276 5345295 5345292 +
agacaagaaaagagatgagt

SEQ ID NO: 22348 - DNA, 20 bp, Artificial Sequence
  Synthetic oligonucleotide; AAG chr11 5345280 5345299 5345296 +
aagaaaagagatgagttaga

SEQ ID NO: 22349 - DNA, 20 bp, Artificial Sequence
  Synthetic oligonucleotide; AAG chr11 5345303 5345322 5345319 +
ctattttaaaaatccatatg

SEQ ID NO: 22350 - DNA, 20 bp, Artificial Sequence
  Synthetic oligonucleotide; GAG chr11 5345305 5345324 5345321 +
attttaaaaatccatatgaa

SEQ ID NO: 22351 - DNA, 20 bp, Artificial Sequence
  Synthetic oligonucleotide; TGG chr11 5345311 5345330 5345327 +
aaaatccatatgaagagtca

SEQ ID NO: 22352 - DNA, 20 bp, Artificial Sequence
  Synthetic oligonucleotide; TAG chr11 5345324 5345343 5345340 +
agagtcatggtgaccttgac

SEQ ID NO: 22353 - DNA, 20 bp, Artificial Sequence
  Synthetic oligonucleotide; AGG chr11 5345325 5345344 5345341 +
gagtcatggtgaccttgact

SEQ ID NO: 22354 - DNA, 20 bp, Artificial Sequence
  Synthetic oligonucleotide; GAG chr11 5345327 5345346 5345343 +
gtcatggtgaccttgactag

SEQ ID NO: 22355 - DNA, 20 bp, Artificial Sequence
  Synthetic oligonucleotide; GAG chr11 5345329 5345348 5345345 +
catggtgaccttgactagga

SEQ ID NO: 22356 - DNA, 20 bp, Artificial Sequence
  Synthetic oligonucleotide; AAG chr11 5345332 5345351 5345348 +
ggtgaccttgactaggagag

SEQ ID NO: 22357 - DNA, 20 bp, Artificial Sequence
  Synthetic oligonucleotide; CAG chr11 5345335 5345354 5345351 +
gaccttgactaggagagaag

SEQ ID NO: 22358 - DNA, 20 bp, Artificial Sequence
  Synthetic oligonucleotide; AGG chr11 5345336 5345355 5345352 +
accttgactaggagagaagc

SEQ ID NO: 22359 - DNA, 20 bp, Artificial Sequence
  Synthetic oligonucleotide; GGG chr11 5345337 5345356 5345353 +
ccttgactaggagagaagca

SEQ ID NO: 22360 - DNA, 20 bp, Artificial Sequence
  Synthetic oligonucleotide; GGG chr11 5345338 5345357 5345354 +
cttgactaggagagaagcag

SEQ ID NO: 22361 - DNA, 20 bp, Artificial Sequence
  Synthetic oligonucleotide; AAG chr11 5345351 5345370 5345367 +
gaagcaggggaaatgaaaaa

SEQ ID NO: 22362 - DNA, 20 bp, Artificial Sequence
  Synthetic oligonucleotide; GAG chr11 5345353 5345372 5345369 +
agcaggggaaatgaaaaaaa

SEQ ID NO: 22363 - DNA, 20 bp, Artificial Sequence
  Synthetic oligonucleotide; TAG chr11 5345361 5345380 5345377 +
aaatgaaaaaaagagaaaaa

SEQ ID NO: 22364 - DNA, 20 bp, Artificial Sequence
  Synthetic oligonucleotide; CAG chr11 5345375 5345394 5345391 +
gaaaaatagaaaaacttaaa

SEQ ID NO: 22365 - DNA, 20 bp, Artificial Sequence
  Synthetic oligonucleotide; GAG chr11 5345377 5345396 5345393 +
aaaatagaaaaacttaaaca

SEQ ID NO: 22366 - DNA, 20 bp, Artificial Sequence
  Synthetic oligonucleotide; CAG chr11 5345381 5345400 5345397 +
tagaaaaacttaaacagaga

SEQ ID NO: 22367 - DNA, 20 bp, Artificial Sequence
  Synthetic oligonucleotide; AAG chr11 5345395 5345414 5345411 +
cagagacagatgcatttttg

SEQ ID NO: 22368 - DNA, 20 bp, Artificial Sequence
  Synthetic oligonucleotide; TAG chr11 5345398 5345417 5345414 +
agacagatgcatttttgaag

SEQ ID NO: 22369 - DNA, 20 bp, Artificial Sequence
  Synthetic oligonucleotide; AAG chr11 5345405 5345424 5345421 +
tgcatttttgaagtagtgcc

SEQ ID NO: 22370 - DNA, 20 bp, Artificial Sequence
  Synthetic oligonucleotide; TGG chr11 5345428 5345447 5345444 +
atttgctgatatattaaaaa

SEQ ID NO: 22371 - DNA, 20 bp, Artificial Sequence
  Synthetic oligonucleotide; GGG chr11 5345429 5345448 5345445 +
tttgctgatatattaaaaat

SEQ ID NO: 22372 - DNA, 20 bp, Artificial Sequence
  Synthetic oligonucleotide; GAG chr11 5345431 5345450 5345447 +
tgctgatatattaaaaatgg

SEQ ID NO: 22373 - DNA, 20 bp, Artificial Sequence
  Synthetic oligonucleotide; GAG chr11 5345435 5345454 5345451 +
gatatattaaaaatgggagt

SEQ ID NO: 22374 - DNA, 20 bp, Artificial Sequence
  Synthetic oligonucleotide; AGG chr11 5345436 5345455 5345452 +
atatattaaaaatgggagtg

SEQ ID NO: 22375 - DNA, 20 bp, Artificial Sequence
  Synthetic oligonucleotide; GGG chr11 5345437 5345456 5345453 +
tatattaaaaatgggagtga

SEQ ID NO: 22376 - DNA, 20 bp, Artificial Sequence
  Synthetic oligonucleotide; GAG chr11 5345451 5345470 5345467 +
gagtgagggaaaaatcaaat

SEQ ID NO: 22377 - DNA, 20 bp, Artificial Sequence
  Synthetic oligonucleotide; AGG chr11 5345452 5345471 5345468 +
agtgagggaaaaatcaaatg

SEQ ID NO: 22378 - DNA, 20 bp, Artificial Sequence
  Synthetic oligonucleotide; TAG chr11 5345462 5345481 5345478 +
aaatcaaatgaggtttcccc

SEQ ID NO: 22379 - DNA, 20 bp, Artificial Sequence
  Synthetic oligonucleotide; AAG chr11 5345485 5345504 5345501 +
atttctgtttgaacaaatga

SEQ ID NO: 22380 - DNA, 20 bp, Artificial Sequence
  Synthetic oligonucleotide; TGG chr11 5345490 5345509 5345506 +
tgtttgaacaaatgaaagaa

SEQ ID NO: 22381 - DNA, 20 bp, Artificial Sequence
  Synthetic oligonucleotide; AAG chr11 5345495 5345514 5345511 +
gaacaaatgaaagaatggtg

SEQ ID NO: 22382 - DNA, 20 bp, Artificial Sequence
  Synthetic oligonucleotide; TGG chr11 5345512 5345531 5345528 +
gtgaagccatttactcaaaa

SEQ ID NO: 22383 - DNA, 20 bp, Artificial Sequence
  Synthetic oligonucleotide; AAG chr11 5345515 5345534 5345531 +
aagccatttactcaaaatgg

SEQ ID NO: 22384 - DNA, 20 bp, Artificial Sequence
  Synthetic oligonucleotide; GAG chr11 5345521 5345540 5345537 +
tttactcaaaatggaagtct

SEQ ID NO: 22385 - DNA, 20 bp, Artificial Sequence
  Synthetic oligonucleotide; AGG chr11 5345522 5345541 5345538 +
ttactcaaaatggaagtctg

SEQ ID NO: 22386 - DNA, 20 bp, Artificial Sequence
  Synthetic oligonucleotide; GGG chr11 5345523 5345542 5345539 +
tactcaaaatggaagtctga

SEQ ID NO: 22387 - DNA, 20 bp, Artificial Sequence
  Synthetic oligonucleotide; GGG chr11 5345524 5345543 5345540 +
actcaaaatggaagtctgag

SEQ ID NO: 22388 - DNA, 20 bp, Artificial Sequence
  Synthetic oligonucleotide; GGG chr11 5345525 5345544 5345541 +
ctcaaaatggaagtctgagg

SEQ ID NO: 22389 - DNA, 20 bp, Artificial Sequence
  Synthetic oligonucleotide; GAG chr11 5345544 5345563 5345560 +
ggggatacatattcacttgt

SEQ ID NO: 22390 - DNA, 20 bp, Artificial Sequence
  Synthetic oligonucleotide; AGG chr11 5345545 5345564 5345561 +
gggatacatattcacttgtg

SEQ ID NO: 22391 - DNA, 20 bp, Artificial Sequence
  Synthetic oligonucleotide; AAG chr11 5345553 5345572 5345569 +
tattcacttgtgaggaaatc

SEQ ID NO: 22392 - DNA, 20 bp, Artificial Sequence
  Synthetic oligonucleotide; GAG chr11 5345555 5345574 5345571 +
ttcacttgtgaggaaatcaa

SEQ ID NO: 22393 - DNA, 20 bp, Artificial Sequence
  Synthetic oligonucleotide; TAG chr11 5345562 5345581 5345578 +
gtgaggaaatcaagagtcat

SEQ ID NO: 22394 - DNA, 20 bp, Artificial Sequence
  Synthetic oligonucleotide; TAG chr11 5345571 5345590 5345587 +
tcaagagtcattagtaaata

SEQ ID NO: 22395 - DNA, 20 bp, Artificial Sequence
  Synthetic oligonucleotide; TAG chr11 5345580 5345599 5345596 +
attagtaaatatagctgaat

SEQ ID NO: 22396 - DNA, 20 bp, Artificial Sequence
  Synthetic oligonucleotide; GAG chr11 5345582 5345601 5345598 +
tagtaaatatagctgaatta

SEQ ID NO: 22397 - DNA, 20 bp, Artificial Sequence
  Synthetic oligonucleotide; CAG chr11 5345621 5345640 5345637 +
ttttttttcttgtcacatgc

SEQ ID NO: 22398 - DNA, 20 bp, Artificial Sequence
  Synthetic oligonucleotide; AAG chr11 5345636 5345655 5345652 +
catgccagaacaacttcttg

SEQ ID NO: 22399 - DNA, 20 bp, Artificial Sequence
  Synthetic oligonucleotide; AAG chr11 5345652 5345671 5345668 +
cttgaagttgtttttatcct

SEQ ID NO: 22400 - DNA, 20 bp, Artificial Sequence
  Synthetic oligonucleotide; AAG chr11 5345660 5345679 5345676 +
tgtttttatcctaagttaaa

SEQ ID NO: 22401 - DNA, 20 bp, Artificial Sequence
  Synthetic oligonucleotide; TGG chr11 5345664 5345683 5345680 +
tttatcctaagttaaaaaga

SEQ ID NO: 22402 - DNA, 20 bp, Artificial Sequence
  Synthetic oligonucleotide; CAG chr11 5345688 5345707 5345704 +
cgtatccaaatatacccctt

SEQ ID NO: 22403 - DNA, 20 bp, Artificial Sequence
  Synthetic oligonucleotide; GAG chr11 5345690 5345709 5345706 +
tatccaaatataccccttca

SEQ ID NO: 22404 - DNA, 20 bp, Artificial Sequence
  Synthetic oligonucleotide; CAG chr11 5345702 5345721 5345718 +
ccccttcagagttactttgt

SEQ ID NO: 22405 - DNA, 20 bp, Artificial Sequence
  Synthetic oligonucleotide; AAG chr11 5345708 5345727 5345724 +
cagagttactttgtcagtgt

SEQ ID NO: 22406 - DNA, 20 bp, Artificial Sequence
  Synthetic oligonucleotide; AGG chr11 5345709 5345728 5345725 +
agagttactttgtcagtgta

SEQ ID NO: 22407 - DNA, 20 bp, Artificial Sequence
  Synthetic oligonucleotide; AAG chr11 5345722 5345741 5345738 +
cagtgtaaggcactacccta

SEQ ID NO: 22408 - DNA, 20 bp, Artificial Sequence
  Synthetic oligonucleotide; AAG chr11 5345734 5345753 5345750 +
ctaccctaaagatgccacca

SEQ ID NO: 22409 - DNA, 20 bp, Artificial Sequence
  Synthetic oligonucleotide; AGG chr11 5345735 5345754 5345751 +
taccctaaagatgccaccaa

SEQ ID NO: 22410 - DNA, 20 bp, Artificial Sequence
  Synthetic oligonucleotide; TAG chr11 5345763 5345782 5345779 +
atcctcttaccttccaccca

SEQ ID NO: 22411 - DNA, 20 bp, Artificial Sequence
  Synthetic oligonucleotide; GAG chr11 5345765 5345784 5345781 +
cctcttaccttccacccata

SEQ ID NO: 22412 - DNA, 20 bp, Artificial Sequence
  Synthetic oligonucleotide; GAG chr11 5345770 5345789 5345786 +
taccttccacccatagagat

SEQ ID NO: 22413 - DNA, 20 bp, Artificial Sequence
  Synthetic oligonucleotide; TAG chr11 5345785 5345804 5345801 +
gagatgagatctaactgtaa

SEQ ID NO: 22414 - DNA, 20 bp, Artificial Sequence
  Synthetic oligonucleotide; CAG chr11 5345791 5345810 5345807 +
agatctaactgtaatagttt

SEQ ID NO: 22415 - DNA, 20 bp, Artificial Sequence
  Synthetic oligonucleotide; AAG chr11 5345796 5345815 5345812 +
taactgtaatagtttcagtg

SEQ ID NO: 22416 - DNA, 20 bp, Artificial Sequence
  Synthetic oligonucleotide; GAG chr11 5345798 5345817 5345814 +
actgtaatagtttcagtgaa

SEQ ID NO: 22417 - DNA, 20 bp, Artificial Sequence
  Synthetic oligonucleotide; CAG chr11 5345805 5345824 5345821 +
tagtttcagtgaagagatgc

SEQ ID NO: 22418 - DNA, 20 bp, Artificial Sequence
  Synthetic oligonucleotide; TGG chr11 5345813 5345832 5345829 +
gtgaagagatgccagacaac

SEQ ID NO: 22419 - DNA, 20 bp, Artificial Sequence
  Synthetic oligonucleotide; GGG chr11 5345814 5345833 5345830 +
tgaagagatgccagacaact

SEQ ID NO: 22420 - DNA, 20 bp, Artificial Sequence
  Synthetic oligonucleotide; GAG chr11 5345820 5345839 5345836 +
gatgccagacaactgggcgt

SEQ ID NO: 22421 - DNA, 20 bp, Artificial Sequence
  Synthetic oligonucleotide; AGG chr11 5345821 5345840 5345837 +
atgccagacaactgggcgtg

SEQ ID NO: 22422 - DNA, 20 bp, Artificial Sequence
  Synthetic oligonucleotide; CAG chr11 5345832 5345851 5345848 +
ctgggcgtgaggcaacaact

SEQ ID NO: 22423 - DNA, 20 bp, Artificial Sequence
  Synthetic oligonucleotide; AAG chr11 5345843 5345862 5345859 +
gcaacaactcagcactttga

SEQ ID NO: 22424 - DNA, 20 bp, Artificial Sequence
  Synthetic oligonucleotide; CAG chr11 5345856 5345875 5345872 +
actttgaaagaatcattttt

SEQ ID NO: 22425 - DNA, 20 bp, Artificial Sequence
  Synthetic oligonucleotide; TAG chr11 5345875 5345894 5345891 +
tcagcatccatattctgtcc

SEQ ID NO: 22426 - DNA, 20 bp, Artificial Sequence
  Synthetic oligonucleotide; AGG chr11 5345876 5345895 5345892 +
cagcatccatattctgtcct

SEQ ID NO: 22427 - DNA, 20 bp, Artificial Sequence
  Synthetic oligonucleotide; GAG chr11 5345882 5345901 5345898 +
ccatattctgtcctaggact

SEQ ID NO: 22428 - DNA, 20 bp, Artificial Sequence
  Synthetic oligonucleotide; GAG chr11 5345884 5345903 5345900 +
atattctgtcctaggactga

SEQ ID NO: 22429 - DNA, 20 bp, Artificial Sequence
  Synthetic oligonucleotide; CAG chr11 5345895 5345914 5345911 +
taggactgagagacataaac

SEQ ID NO: 22430 - DNA, 20 bp, Artificial Sequence
  Synthetic oligonucleotide; CAG chr11 5345902 5345921 5345918 +
gagagacataaaccagaatt

SEQ ID NO: 22431 - DNA, 20 bp, Artificial Sequence
  Synthetic oligonucleotide; GAG chr11 5345924 5345943 5345940 +
gtgcctactgaacatacaat

SEQ ID NO: 22432 - DNA, 20 bp, Artificial Sequence
  Synthetic oligonucleotide; CAG chr11 5345941 5345960 5345957 +
aatgagtgatgtatattctt

SEQ ID NO: 22433 - DNA, 20 bp, Artificial Sequence
  Synthetic oligonucleotide; TAG chr11 5345948 5345967 5345964 +
gatgtatattcttcagttac

SEQ ID NO: 22434 - DNA, 20 bp, Artificial Sequence
  Synthetic oligonucleotide; AAG chr11 5345956 5345975 5345972 +
ttcttcagttactagacgca

SEQ ID NO: 22435 - DNA, 20 bp, Artificial Sequence
  Synthetic oligonucleotide; CAG chr11 5345965 5345984 5345981 +
tactagacgcaaagataatc

SEQ ID NO: 22436 - DNA, 20 bp, Artificial Sequence
  Synthetic oligonucleotide; TAG chr11 5345970 5345989 5345986 +
gacgcaaagataatccagct

SEQ ID NO: 22437 - DNA, 20 bp, Artificial Sequence
  Synthetic oligonucleotide; CAG chr11 5346037 5346056 5346053 +
ctcttacttctctgacgttt

SEQ ID NO: 22438 - DNA, 20 bp, Artificial Sequence
  Synthetic oligonucleotide; CAG chr11 5346102 5346121 5346118 +
tgtgaaaaattccttcttat

SEQ ID NO: 22439 - DNA, 20 bp, Artificial Sequence
  Synthetic oligonucleotide; GAG chr11 5346104 5346123 5346120 +
tgaaaaattccttcttatca

SEQ ID NO: 22440 - DNA, 20 bp, Artificial Sequence
  Synthetic oligonucleotide; CAG chr11 5346113 5346132 5346129 +
ccttcttatcagagaatatg

SEQ ID NO: 22441 - DNA, 20 bp, Artificial Sequence
  Synthetic oligonucleotide; AAG chr11 5346119 5346138 5346135 +
tatcagagaatatgcagcac

SEQ ID NO: 22442 - DNA, 20 bp, Artificial Sequence
  Synthetic oligonucleotide; CAG chr11 5346135 5346154 5346151 +
gcacaagtgatgaatcacta

SEQ ID NO: 22443 - DNA, 20 bp, Artificial Sequence
  Synthetic oligonucleotide; AGG chr11 5346136 5346155 5346152 +
cacaagtgatgaatcactac

SEQ ID NO: 22444 - DNA, 20 bp, Artificial Sequence
  Synthetic oligonucleotide; GGG chr11 5346137 5346156 5346153 +
acaagtgatgaatcactaca

SEQ ID NO: 22445 - DNA, 20 bp, Artificial Sequence
  Synthetic oligonucleotide; AAG chr11 5346141 5346160 5346157 +
gtgatgaatcactacaggga

SEQ ID NO: 22446 - DNA, 20 bp, Artificial Sequence
  Synthetic oligonucleotide; AAG chr11 5346157 5346176 5346173 +
gggaaagctaaccaaactgt

SEQ ID NO: 22447 - DNA, 20 bp, Artificial Sequence
  Synthetic oligonucleotide; AGG chr11 5346158 5346177 5346174 +
ggaaagctaaccaaactgta

SEQ ID NO: 22448 - DNA, 20 bp, Artificial Sequence
  Synthetic oligonucleotide; AAG chr11 5346198 5346217 5346214 +
caataataacctgcaactta

SEQ ID NO: 22449 - DNA, 20 bp, Artificial Sequence
  Synthetic oligonucleotide; AAG chr11 5346221 5346240 5346237 +
tttcctccttctccattccc

SEQ ID NO: 22450 - DNA, 20 bp, Artificial Sequence
  Synthetic oligonucleotide; CAG chr11 5346233 5346252 5346249 +
ccattcccaagaattccatg

SEQ ID NO: 22451 - DNA, 20 bp, Artificial Sequence
  Synthetic oligonucleotide; TGG chr11 5346243 5346262 5346259 +
gaattccatgcagacatacc

SEQ ID NO: 22452 - DNA, 20 bp, Artificial Sequence
  Synthetic oligonucleotide; CAG chr11 5346251 5346270 5346267 +
tgcagacatacctggtaatg

SEQ ID NO: 22453 - DNA, 20 bp, Artificial Sequence
  Synthetic oligonucleotide; TAG chr11 5346260 5346279 5346276 +
acctggtaatgcagctataa

SEQ ID NO: 22454 - DNA, 20 bp, Artificial Sequence
  Synthetic oligonucleotide; TGG chr11 5346270 5346289 5346286 +
gcagctataatagtgatcta

SEQ ID NO: 22455 - DNA, 20 bp, Artificial Sequence
  Synthetic oligonucleotide; CAG chr11 5346311 5346330 5346327 +
tgtgaaaattcttgtgtcct

SEQ ID NO: 22456 - DNA, 20 bp, Artificial Sequence
  Synthetic oligonucleotide; TAG chr11 5346315 5346334 5346331 +
aaaattcttgtgtcctcagc

SEQ ID NO: 22457 - DNA, 20 bp, Artificial Sequence
  Synthetic oligonucleotide; TGG chr11 5346321 5346340 5346337 +
cttgtgtcctcagctagtcg

SEQ ID NO: 22458 - DNA, 20 bp, Artificial Sequence
  Synthetic oligonucleotide; TGG chr11 5346328 5346347 5346344 +
cctcagctagtcgtggctct

SEQ ID NO: 22459 - DNA, 20 bp, Artificial Sequence
  Synthetic oligonucleotide; GAG chr11 5346336 5346355 5346352 +
agtcgtggctcttggtttct

SEQ ID NO: 22460 - DNA, 20 bp, Artificial Sequence
  Synthetic oligonucleotide; AAG chr11 5346339 5346358 5346355 +
cgtggctcttggtttctgag

SEQ ID NO: 22461 - DNA, 20 bp, Artificial Sequence
  Synthetic oligonucleotide; AAG chr11 5346343 5346362 5346359 +
gctcttggtttctgagaaga

SEQ ID NO: 22462 - DNA, 20 bp, Artificial Sequence
  Synthetic oligonucleotide; GAG chr11 5346351 5346370 5346367 +
tttctgagaagaaagacaat

SEQ ID NO: 22463 - DNA, 20 bp, Artificial Sequence
  Synthetic oligonucleotide; GAG chr11 5346353 5346372 5346369 +
tctgagaagaaagacaatga

SEQ ID NO: 22464 - DNA, 20 bp, Artificial Sequence
  Synthetic oligonucleotide; AAG chr11 5346356 5346375 5346372 +
gagaagaaagacaatgagag

SEQ ID NO: 22465 - DNA, 20 bp, Artificial Sequence
  Synthetic oligonucleotide; GAG chr11 5346358 5346377 5346374 +
gaagaaagacaatgagagaa

SEQ ID NO: 22466 - DNA, 20 bp, Artificial Sequence
  Synthetic oligonucleotide; AAG chr11 5346365 5346384 5346381 +
gacaatgagagaagagataa

SEQ ID NO: 22467 - DNA, 20 bp, Artificial Sequence
  Synthetic oligonucleotide; GAG chr11 5346370 5346389 5346386 +
tgagagaagagataaaagct

SEQ ID NO: 22468 - DNA, 20 bp, Artificial Sequence
  Synthetic oligonucleotide; AGG chr11 5346371 5346390 5346387 +
gagagaagagataaaagctg

SEQ ID NO: 22469 - DNA, 20 bp, Artificial Sequence
  Synthetic oligonucleotide; TAG chr11 5346384 5346403 5346400 +
aaagctgaggaaaaaaaata

SEQ ID NO: 22470 - DNA, 20 bp, Artificial Sequence
  Synthetic oligonucleotide; AGG chr11 5346385 5346404 5346401 +
aagctgaggaaaaaaaatat

SEQ ID NO: 22471 - DNA, 20 bp, Artificial Sequence
  Synthetic oligonucleotide; GGG chr11 5346386 5346405 5346402 +
agctgaggaaaaaaaatata

SEQ ID NO: 22472 - DNA, 20 bp, Artificial Sequence
  Synthetic oligonucleotide; AAG chr11 5346389 5346408 5346405 +
tgaggaaaaaaaatataggg

SEQ ID NO: 22473 - DNA, 20 bp, Artificial Sequence
  Synthetic oligonucleotide; AGG chr11 5346390 5346409 5346406 +
gaggaaaaaaaatataggga

SEQ ID NO: 22474 - DNA, 20 bp, Artificial Sequence
  Synthetic oligonucleotide; AAG chr11 5346394 5346413 5346410 +
aaaaaaaatatagggaagga

SEQ ID NO: 22475 - DNA, 20 bp, Artificial Sequence
  Synthetic oligonucleotide; GAG chr11 5346396 5346415 5346412 +
aaaaaatatagggaaggaaa

SEQ ID NO: 22476 - DNA, 20 bp, Artificial Sequence
  Synthetic oligonucleotide; AAG chr11 5346405 5346424 5346421 +
agggaaggaaagagatcata

SEQ ID NO: 22477 - DNA, 20 bp, Artificial Sequence
  Synthetic oligonucleotide; GAG chr11 5346411 5346430 5346427 +
ggaaagagatcataaagact

SEQ ID NO: 22478 - DNA, 20 bp, Artificial Sequence
  Synthetic oligonucleotide; AGG chr11 5346412 5346431 5346428 +
gaaagagatcataaagactg

SEQ ID NO: 22479 - DNA, 20 bp, Artificial Sequence
  Synthetic oligonucleotide; TAG chr11 5346416 5346435 5346432 +
gagatcataaagactgagga

SEQ ID NO: 22480 - DNA, 20 bp, Artificial Sequence
  Synthetic oligonucleotide; AAG chr11 5346419 5346438 5346435 +
atcataaagactgaggatag

SEQ ID NO: 22481 - DNA, 20 bp, Artificial Sequence
  Synthetic oligonucleotide; AAG chr11 5346423 5346442 5346439 +
taaagactgaggatagaagc

SEQ ID NO: 22482 - DNA, 20 bp, Artificial Sequence
  Synthetic oligonucleotide; AAG chr11 5346426 5346445 5346442 +
agactgaggatagaagcaag

SEQ ID NO: 22483 - DNA, 20 bp, Artificial Sequence
  Synthetic oligonucleotide; TGG chr11 5346438 5346457 5346454 +
gaagcaagaagattctataa

SEQ ID NO: 22484 - DNA, 20 bp, Artificial Sequence
  Synthetic oligonucleotide; TAG chr11 5346447 5346466 5346463 +
agattctataatggaacacc

SEQ ID NO: 22485 - DNA, 20 bp, Artificial Sequence
  Synthetic oligonucleotide; CAG chr11 5346455 5346474 5346471 +
taatggaacacctagaaaat

SEQ ID NO: 22486 - DNA, 20 bp, Artificial Sequence
  Synthetic oligonucleotide; CAG chr11 5346476 5346495 5346492 +
agataaacttctaacattta

SEQ ID NO: 22487 - DNA, 20 bp, Artificial Sequence
  Synthetic oligonucleotide; AAG chr11 5346506 5346525 5346522 +
ttttctctgctttgtttaaa

SEQ ID NO: 22488 - DNA, 20 bp, Artificial Sequence
  Synthetic oligonucleotide; TAG chr11 5346516 5346535 5346532 +
tttgtttaaaaagtaaaatg

SEQ ID NO: 22489 - DNA, 20 bp, Artificial Sequence
  Synthetic oligonucleotide; TAG chr11 5346519 5346538 5346535 +
gtttaaaaagtaaaatgtag

SEQ ID NO: 22490 - DNA, 20 bp, Artificial Sequence
  Synthetic oligonucleotide; AAG chr11 5346525 5346544 5346541 +
aaagtaaaatgtagtagaat

SEQ ID NO: 22491 - DNA, 20 bp, Artificial Sequence
  Synthetic oligonucleotide; GAG chr11 5346527 5346546 5346543 +
agtaaaatgtagtagaataa

SEQ ID NO: 22492 - DNA, 20 bp, Artificial Sequence
  Synthetic oligonucleotide; AGG chr11 5346528 5346547 5346544 +
gtaaaatgtagtagaataag

SEQ ID NO: 22493 - DNA, 20 bp, Artificial Sequence
  Synthetic oligonucleotide; TAG chr11 5346550 5346569 5346566 +
gtgccttcctgttcatcttt

SEQ ID NO: 22494 - DNA, 20 bp, Artificial Sequence
  Synthetic oligonucleotide; AAG chr11 5346554 5346573 5346570 +
cttcctgttcatcttttaga

SEQ ID NO: 22495 - DNA, 20 bp, Artificial Sequence
  Synthetic oligonucleotide; AGG chr11 5346555 5346574 5346571 +
ttcctgttcatcttttagaa

SEQ ID NO: 22496 - DNA, 20 bp, Artificial Sequence
  Synthetic oligonucleotide; AAG chr11 5346559 5346578 5346575 +
tgttcatcttttagaaagga

SEQ ID NO: 22497 - DNA, 20 bp, Artificial Sequence
  Synthetic oligonucleotide; AAG chr11 5346562 5346581 5346578 +
tcatcttttagaaaggaaag

SEQ ID NO: 22498 - DNA, 20 bp, Artificial Sequence
  Synthetic oligonucleotide; GAG chr11 5346571 5346590 5346587 +
agaaaggaaagaagacatat

SEQ ID NO: 22499 - DNA, 20 bp, Artificial Sequence
  Synthetic oligonucleotide; GAG chr11 5346573 5346592 5346589 +
aaaggaaagaagacatatga

SEQ ID NO: 22500 - DNA, 20 bp, Artificial Sequence
  Synthetic oligonucleotide; AGG chr11 5346574 5346593 5346590 +
aaggaaagaagacatatgag

SEQ ID NO: 22501 - DNA, 20 bp, Artificial Sequence
  Synthetic oligonucleotide; GGG chr11 5346575 5346594 5346591 +
aggaaagaagacatatgaga

SEQ ID NO: 22502 - DNA, 20 bp, Artificial Sequence
  Synthetic oligonucleotide; GAG chr11 5346598 5346617 5346614 +
tcaatcatattcacatcact

SEQ ID NO: 22503 - DNA, 20 bp, Artificial Sequence
  Synthetic oligonucleotide; CAG chr11 5346603 5346622 5346619 +
catattcacatcactgagta

SEQ ID NO: 22504 - DNA, 20 bp, Artificial Sequence
  Synthetic oligonucleotide; AAG chr11 5346606 5346625 5346622 +
attcacatcactgagtacag

SEQ ID NO: 22505 - DNA, 20 bp, Artificial Sequence
  Synthetic oligonucleotide; AGG chr11 5346607 5346626 5346623 +
ttcacatcactgagtacaga

SEQ ID NO: 22506 - DNA, 20 bp, Artificial Sequence
  Synthetic oligonucleotide; TAG chr11 5346613 5346632 5346629 +
tcactgagtacagaaggtct

SEQ ID NO: 22507 - DNA, 20 bp, Artificial Sequence
  Synthetic oligonucleotide; AGG chr11 5346614 5346633 5346630 +
cactgagtacagaaggtctt

SEQ ID NO: 22508 - DNA, 20 bp, Artificial Sequence
  Synthetic oligonucleotide; TAG chr11 5346617 5346636 5346633 +
tgagtacagaaggtcttagg

SEQ ID NO: 22509 - DNA, 20 bp, Artificial Sequence
  Synthetic oligonucleotide; TGG chr11 5346621 5346640 5346637 +
tacagaaggtcttaggtagt

SEQ ID NO: 22510 - DNA, 20 bp, Artificial Sequence
  Synthetic oligonucleotide; TGG chr11 5346625 5346644 5346641 +
gaaggtcttaggtagttggt

SEQ ID NO: 22511 - DNA, 20 bp, Artificial Sequence
  Synthetic oligonucleotide; TAG chr11 5346628 5346647 5346644 +
ggtcttaggtagttggttgg

SEQ ID NO: 22512 - DNA, 20 bp, Artificial Sequence
  Synthetic oligonucleotide; TGG chr11 5346635 5346654 5346651 +
ggtagttggttggtagcact

SEQ ID NO: 22513 - DNA, 20 bp, Artificial Sequence
  Synthetic oligonucleotide; AAG chr11 5346649 5346668 5346665 +
agcacttggaattgcttttg

SEQ ID NO: 22514 - DNA, 20 bp, Artificial Sequence
  Synthetic oligonucleotide; CAG chr11 5346664 5346683 5346680 +
ttttgaagttctatcaactt

SEQ ID NO: 22515 - DNA, 20 bp, Artificial Sequence
  Synthetic oligonucleotide; AAG chr11 5346690 5346709 5346706 +
gaaatctgtgcacacatcca

SEQ ID NO: 22516 - DNA, 20 bp, Artificial Sequence
  Synthetic oligonucleotide; TGG chr11 5346696 5346715 5346712 +
tgtgcacacatccaaagctg

SEQ ID NO: 22517 - DNA, 20 bp, Artificial Sequence
  Synthetic oligonucleotide; GAG chr11 5346705 5346724 5346721 +
atccaaagctgtggactatt

SEQ ID NO: 22518 - DNA, 20 bp, Artificial Sequence
  Synthetic oligonucleotide; TGG chr11 5346737 5346756 5346753 +
ttcttctccgtatctttctc

SEQ ID NO: 22519 - DNA, 20 bp, Artificial Sequence
  Synthetic oligonucleotide; GAG chr11 5346739 5346758 5346755 +
cttctccgtatctttctctg

SEQ ID NO: 22520 - DNA, 20 bp, Artificial Sequence
  Synthetic oligonucleotide; GAG chr11 5346741 5346760 5346757 +
tctccgtatctttctctgga

SEQ ID NO: 22521 - DNA, 20 bp, Artificial Sequence
  Synthetic oligonucleotide; TAG chr11 5346748 5346767 5346764 +
atctttctctggagagctta

SEQ ID NO: 22522 - DNA, 20 bp, Artificial Sequence
  Synthetic oligonucleotide; GAG chr11 5346750 5346769 5346766 +
ctttctctggagagcttata

SEQ ID NO: 22523 - DNA, 20 bp, Artificial Sequence
  Synthetic oligonucleotide; AGG chr11 5346751 5346770 5346767 +
tttctctggagagcttatag

SEQ ID NO: 22524 - DNA, 20 bp, Artificial Sequence
  Synthetic oligonucleotide; GAG chr11 5346753 5346772 5346769 +
tctctggagagcttatagag

SEQ ID NO: 22525 - DNA, 20 bp, Artificial Sequence
  Synthetic oligonucleotide; TAG chr11 5346761 5346780 5346777 +
gagcttatagaggagtctcc

SEQ ID NO: 22526 - DNA, 20 bp, Artificial Sequence
  Synthetic oligonucleotide; TAG chr11 5346781 5346800 5346797 +
tagtacactctttatatatc

SEQ ID NO: 22527 - DNA, 20 bp, Artificial Sequence
  Synthetic oligonucleotide; AGG chr11 5346782 5346801 5346798 +
agtacactctttatatatct

SEQ ID NO: 22528 - DNA, 20 bp, Artificial Sequence
  Synthetic oligonucleotide; GAG chr11 5346784 5346803 5346800 +
tacactctttatatatctag

SEQ ID NO: 22529 - DNA, 20 bp, Artificial Sequence
  Synthetic oligonucleotide; CAG chr11 5346803 5346822 5346819 +
ggagtatttcaccatactcc

SEQ ID NO: 22530 - DNA, 20 bp, Artificial Sequence
  Synthetic oligonucleotide; AGG chr11 5346804 5346823 5346820 +
gagtatttcaccatactccc

SEQ ID NO: 22531 - DNA, 20 bp, Artificial Sequence
  Synthetic oligonucleotide; TGG chr11 5346824 5346843 5346840 +
aggtaccataacttgtttga

SEQ ID NO: 22532 - DNA, 20 bp, Artificial Sequence
  Synthetic oligonucleotide; GAG chr11 5346828 5346847 5346844 +
accataacttgtttgatggt

SEQ ID NO: 22533 - DNA, 20 bp, Artificial Sequence
  Synthetic oligonucleotide; AGG chr11 5346829 5346848 5346845 +
ccataacttgtttgatggtg

SEQ ID NO: 22534 - DNA, 20 bp, Artificial Sequence
  Synthetic oligonucleotide; AAG chr11 5346832 5346851 5346848 +
taacttgtttgatggtgagg

SEQ ID NO: 22535 - DNA, 20 bp, Artificial Sequence
  Synthetic oligonucleotide; GAG chr11 5346834 5346853 5346850 +
acttgtttgatggtgaggaa

SEQ ID NO: 22536 - DNA, 20 bp, Artificial Sequence
  Synthetic oligonucleotide; CAG chr11 5346837 5346856 5346853 +
tgtttgatggtgaggaagag

SEQ ID NO: 22537 - DNA, 20 bp, Artificial Sequence
  Synthetic oligonucleotide; AGG chr11 5346838 5346857 5346854 +
gtttgatggtgaggaagagc

SEQ ID NO: 22538 - DNA, 20 bp, Artificial Sequence
  Synthetic oligonucleotide; GGG chr11 5346839 5346858 5346855 +
tttgatggtgaggaagagca

SEQ ID NO: 22539 - DNA, 20 bp, Artificial Sequence
  Synthetic oligonucleotide; AAG chr11 5346859 5346878 5346875 +
gggttcttgtgtcttaccta

SEQ ID NO: 22540 - DNA, 20 bp, Artificial Sequence
  Synthetic oligonucleotide; TAG chr11 5346865 5346884 5346881 +
ttgtgtcttacctaaagact

SEQ ID NO: 22541 - DNA, 20 bp, Artificial Sequence
  Synthetic oligonucleotide; AAG chr11 5346896 5346915 5346912 +
gttccttctcaacatctgtg

SEQ ID NO: 22542 - DNA, 20 bp, Artificial Sequence
  Synthetic oligonucleotide; GAG chr11 5346898 5346917 5346914 +
tccttctcaacatctgtgaa

SEQ ID NO: 22543 - DNA, 20 bp, Artificial Sequence
  Synthetic oligonucleotide; AAG chr11 5346901 5346920 5346917 +
ttctcaacatctgtgaagag

SEQ ID NO: 22544 - DNA, 20 bp, Artificial Sequence
  Synthetic oligonucleotide; CAG chr11 5346904 5346923 5346920 +
tcaacatctgtgaagagaag

SEQ ID NO: 22545 - DNA, 20 bp, Artificial Sequence
  Synthetic oligonucleotide; TGG chr11 5346913 5346932 5346929 +
gtgaagagaagcagtcactg

SEQ ID NO: 22546 - DNA, 20 bp, Artificial Sequence
  Synthetic oligonucleotide; AAG chr11 5346925 5346944 5346941 +
agtcactgtggttattaata

SEQ ID NO: 22547 - DNA, 20 bp, Artificial Sequence
  Synthetic oligonucleotide; TAG chr11 5346929 5346948 5346945 +
actgtggttattaataaaga

SEQ ID NO: 22548 - DNA, 20 bp, Artificial Sequence
  Synthetic oligonucleotide; CAG chr11 5346940 5346959 5346956 +
taataaagatagcaccttcc

SEQ ID NO: 22549 - DNA, 20 bp, Artificial Sequence
  Synthetic oligonucleotide; TAG chr11 5346957 5346976 5346973 +
tcccagatgtctccctttta

SEQ ID NO: 22550 - DNA, 20 bp, Artificial Sequence
  Synthetic oligonucleotide; TGG chr11 5346966 5346985 5346982 +
tctcccttttatagccaact

SEQ ID NO: 22551 - DNA, 20 bp, Artificial Sequence
  Synthetic oligonucleotide; AAG chr11 5346974 5346993 5346990 +
ttatagccaacttggatctt

SEQ ID NO: 22552 - DNA, 20 bp, Artificial Sequence
  Synthetic oligonucleotide; TAG chr11 5347005 5347024 5347021 +
actctgtattaactcctcct

SEQ ID NO: 22553 - DNA, 20 bp, Artificial Sequence
  Synthetic oligonucleotide; GAG chr11 5347007 5347026 5347023 +
tctgtattaactcctcctta

SEQ ID NO: 22554 - DNA, 20 bp, Artificial Sequence
  Synthetic oligonucleotide; AGG chr11 5347008 5347027 5347024 +
ctgtattaactcctccttag

SEQ ID NO: 22555 - DNA, 20 bp, Artificial Sequence
  Synthetic oligonucleotide; GGG chr11 5347009 5347028 5347025 +
tgtattaactcctccttaga

SEQ ID NO: 22556 - DNA, 20 bp, Artificial Sequence
  Synthetic oligonucleotide; GAG chr11 5347011 5347030 5347027 +
tattaactcctccttagagg

SEQ ID NO: 22557 - DNA, 20 bp, Artificial Sequence
  Synthetic oligonucleotide; TGG chr11 5347015 5347034 5347031 +
aactcctccttagagggagc

SEQ ID NO: 22558 - DNA, 20 bp, Artificial Sequence
  Synthetic oligonucleotide; TAG chr11 5347028 5347047 5347044 +
agggagctggaacacttaat

SEQ ID NO: 22559 - DNA, 20 bp, Artificial Sequence
  Synthetic oligonucleotide; AAG chr11 5347038 5347057 5347054 +
aacacttaattagtcccccc

SEQ ID NO: 22560 - DNA, 20 bp, Artificial Sequence
  Synthetic oligonucleotide; AAG chr11 5347069 5347088 5347085 +
taatctttcttttttcaaat

SEQ ID NO: 22561 - DNA, 20 bp, Artificial Sequence
  Synthetic oligonucleotide; TGG chr11 5347076 5347095 5347092 +
tcttttttcaaataagttac

SEQ ID NO: 22562 - DNA, 20 bp, Artificial Sequence
  Synthetic oligonucleotide; AAG chr11 5347086 5347105 5347102 +
aataagttactggctgaatc

SEQ ID NO: 22563 - DNA, 20 bp, Artificial Sequence
  Synthetic oligonucleotide; TGG chr11 5347093 5347112 5347109 +
tactggctgaatcaagccac

SEQ ID NO: 22564 - DNA, 20 bp, Artificial Sequence
  Synthetic oligonucleotide; TAG chr11 5347096 5347115 5347112 +
tggctgaatcaagccactgg

SEQ ID NO: 22565 - DNA, 20 bp, Artificial Sequence
  Synthetic oligonucleotide; AGG chr11 5347097 5347116 5347113 +
ggctgaatcaagccactggt

SEQ ID NO: 22566 - DNA, 20 bp, Artificial Sequence
  Synthetic oligonucleotide; TGG chr11 5347111 5347130 5347127 +
actggtaggacctttatgtg

SEQ ID NO: 22567 - DNA, 20 bp, Artificial Sequence
  Synthetic oligonucleotide; GGG chr11 5347112 5347131 5347128 +
ctggtaggacctttatgtgt

SEQ ID NO: 22568 - DNA, 20 bp, Artificial Sequence
  Synthetic oligonucleotide; GGG chr11 5347113 5347132 5347129 +
tggtaggacctttatgtgtg

SEQ ID NO: 22569 - DNA, 20 bp, Artificial Sequence
  Synthetic oligonucleotide; CAG chr11 5347119 5347138 5347135 +
gacctttatgtgtggggaat

SEQ ID NO: 22570 - DNA, 20 bp, Artificial Sequence
  Synthetic oligonucleotide; CAG chr11 5347123 5347142 5347139 +
tttatgtgtggggaatcaga

SEQ ID NO: 22571 - DNA, 20 bp, Artificial Sequence
  Synthetic oligonucleotide; TAG chr11 5347136 5347155 5347152 +
aatcagacagcctgtcttca

SEQ ID NO: 22572 - DNA, 20 bp, Artificial Sequence
  Synthetic oligonucleotide; CAG chr11 5347142 5347161 5347158 +
acagcctgtcttcatagccc

SEQ ID NO: 22573 - DNA, 20 bp, Artificial Sequence
  Synthetic oligonucleotide; CAG chr11 5347145 5347164 5347161 +
gcctgtcttcatagccccag

SEQ ID NO: 22574 - DNA, 20 bp, Artificial Sequence
  Synthetic oligonucleotide; TGG chr11 5347152 5347171 5347168 +
ttcatagccccagcagactc

SEQ ID NO: 22575 - DNA, 20 bp, Artificial Sequence
  Synthetic oligonucleotide; TGG chr11 5347164 5347183 5347180 +
gcagactctggtatcacctc

SEQ ID NO: 22576 - DNA, 20 bp, Artificial Sequence
  Synthetic oligonucleotide; GGG chr11 5347165 5347184 5347181 +
cagactctggtatcacctct

SEQ ID NO: 22577 - DNA, 20 bp, Artificial Sequence
  Synthetic oligonucleotide; GAG chr11 5347167 5347186 5347183 +
gactctggtatcacctctgg

SEQ ID NO: 22578 - DNA, 20 bp, Artificial Sequence
  Synthetic oligonucleotide; AGG chr11 5347168 5347187 5347184 +
actctggtatcacctctggg

SEQ ID NO: 22579 - DNA, 20 bp, Artificial Sequence
  Synthetic oligonucleotide; CAG chr11 5347197 5347216 5347213 +
attccctacatttacttcaa

SEQ ID NO: 22580 - DNA, 20 bp, Artificial Sequence
  Synthetic oligonucleotide; CAG chr11 5347212 5347231 5347228 +
ttcaacagtcaaatctttcc

SEQ ID NO: 22581 - DNA, 20 bp, Artificial Sequence
  Synthetic oligonucleotide; AAG chr11 5347223 5347242 5347239 +
aatctttcccagtttatctc

SEQ ID NO: 22582 - DNA, 20 bp, Artificial Sequence
  Synthetic oligonucleotide; GAG chr11 5347225 5347244 5347241 +
tctttcccagtttatctcaa

SEQ ID NO: 22583 - DNA, 20 bp, Artificial Sequence
  Synthetic oligonucleotide; AAG chr11 5347229 5347248 5347245 +
tcccagtttatctcaagaga

SEQ ID NO: 22584 - DNA, 20 bp, Artificial Sequence
  Synthetic oligonucleotide; TGG chr11 5347246 5347265 5347262 +
agaaagcctatatatcttct

SEQ ID NO: 22585 - DNA, 20 bp, Artificial Sequence
  Synthetic oligonucleotide; TGG chr11 5347284 5347303 5347300 +
tttctactatatttcctgct

SEQ ID NO: 22586 - DNA, 20 bp, Artificial Sequence
  Synthetic oligonucleotide; TAG chr11 5347289 5347308 5347305 +
actatatttcctgcttggtt

SEQ ID NO: 22587 - DNA, 20 bp, Artificial Sequence
  Synthetic oligonucleotide; CAG chr11 5347294 5347313 5347310 +
atttcctgcttggtttagat

SEQ ID NO: 22588 - DNA, 20 bp, Artificial Sequence
  Synthetic oligonucleotide; GAG chr11 5347296 5347315 5347312 +
ttcctgcttggtttagatca

SEQ ID NO: 22589 - DNA, 20 bp, Artificial Sequence
  Synthetic oligonucleotide; AAG chr11 5347300 5347319 5347316 +
tgcttggtttagatcagaga

SEQ ID NO: 22590 - DNA, 20 bp, Artificial Sequence
  Synthetic oligonucleotide; AAG chr11 5347308 5347327 5347324 +
ttagatcagagaaagcttga

SEQ ID NO: 22591 - DNA, 20 bp, Artificial Sequence
  Synthetic oligonucleotide; CAG chr11 5347311 5347330 5347327 +
gatcagagaaagcttgaaag

SEQ ID NO: 22592 - DNA, 20 bp, Artificial Sequence
  Synthetic oligonucleotide; GAG chr11 5347313 5347332 5347329 +
tcagagaaagcttgaaagca

SEQ ID NO: 22593 - DNA, 20 bp, Artificial Sequence
  Synthetic oligonucleotide; GAG chr11 5347315 5347334 5347331 +
agagaaagcttgaaagcaga

SEQ ID NO: 22594 - DNA, 20 bp, Artificial Sequence
  Synthetic oligonucleotide; TAG chr11 5347319 5347338 5347335 +
aaagcttgaaagcagagagc

SEQ ID NO: 22595 - DNA, 20 bp, Artificial Sequence
  Synthetic oligonucleotide; TAG chr11 5347323 5347342 5347339 +
cttgaaagcagagagctaga

SEQ ID NO: 22596 - DNA, 20 bp, Artificial Sequence
  Synthetic oligonucleotide; TAG chr11 5347328 5347347 5347344 +
aagcagagagctagatagac

SEQ ID NO: 22597 - DNA, 20 bp, Artificial Sequence
  Synthetic oligonucleotide; GAG chr11 5347330 5347349 5347346 +
gcagagagctagatagacta

SEQ ID NO: 22598 - DNA, 20 bp, Artificial Sequence
  Synthetic oligonucleotide; CAG chr11 5347349 5347368 5347365 +
agagtcaatataataaaatt

SEQ ID NO: 22599 - DNA, 20 bp, Artificial Sequence
  Synthetic oligonucleotide; AGG chr11 5347350 5347369 5347366 +
gagtcaatataataaaattc

SEQ ID NO: 22600 - DNA, 20 bp, Artificial Sequence
  Synthetic oligonucleotide; CAG chr11 5347353 5347372 5347369 +
tcaatataataaaattcagg

SEQ ID NO: 22601 - DNA, 20 bp, Artificial Sequence
  Synthetic oligonucleotide; TAG chr11 5347363 5347382 5347379 +
aaaattcaggcagccttctc

SEQ ID NO: 22602 - DNA, 20 bp, Artificial Sequence
  Synthetic oligonucleotide; CAG chr11 5347390 5347409 5347406 +
caacgtgaacgcacattctg

SEQ ID NO: 22603 - DNA, 20 bp, Artificial Sequence
  Synthetic oligonucleotide; GAG chr11 5347416 5347435 5347432 +
tcactaactattcccttctt

SEQ ID NO: 22604 - DNA, 20 bp, Artificial Sequence
  Synthetic oligonucleotide; TAG chr11 5347421 5347440 5347437 +
aactattcccttcttgagtt

SEQ ID NO: 22605 - DNA, 20 bp, Artificial Sequence
  Synthetic oligonucleotide; CAG chr11 5347429 5347448 5347445 +
ccttcttgagtttagcctac

SEQ ID NO: 22606 - DNA, 20 bp, Artificial Sequence
  Synthetic oligonucleotide; AAG chr11 5347432 5347451 5347448 +
tcttgagtttagcctaccag

SEQ ID NO: 22607 - DNA, 20 bp, Artificial Sequence
  Synthetic oligonucleotide; CAG chr11 5347447 5347466 5347463 +
accagaagttttctcttttc

SEQ ID NO: 22608 - DNA, 20 bp, Artificial Sequence
  Synthetic oligonucleotide; AGG chr11 5347448 5347467 5347464 +
ccagaagttttctcttttcc

SEQ ID NO: 22609 - DNA, 20 bp, Artificial Sequence
  Synthetic oligonucleotide; GGG chr11 5347449 5347468 5347465 +
cagaagttttctcttttcca

SEQ ID NO: 22610 - DNA, 20 bp, Artificial Sequence
  Synthetic oligonucleotide; GGG chr11 5347450 5347469 5347466 +
agaagttttctcttttccag

SEQ ID NO: 22611 - DNA, 20 bp, Artificial Sequence
  Synthetic oligonucleotide; CAG chr11 5347456 5347475 5347472 +
tttctcttttccaggggatg

SEQ ID NO: 22612 - DNA, 20 bp, Artificial Sequence
  Synthetic oligonucleotide; CAG chr11 5347459 5347478 5347475 +
ctcttttccaggggatgcag

SEQ ID NO: 22613 - DNA, 20 bp, Artificial Sequence
  Synthetic oligonucleotide; AGG chr11 5347460 5347479 5347476 +
tcttttccaggggatgcagc

SEQ ID NO: 22614 - DNA, 20 bp, Artificial Sequence
  Synthetic oligonucleotide; TGG chr11 5347476 5347495 5347492 +
cagcaggcatactcatcaca

SEQ ID NO: 22615 - DNA, 20 bp, Artificial Sequence
  Synthetic oligonucleotide; CAG chr11 5347484 5347503 5347500 +
atactcatcacatggtgctt

SEQ ID NO: 22616 - DNA, 20 bp, Artificial Sequence
  Synthetic oligonucleotide; AAG chr11 5347489 5347508 5347505 +
catcacatggtgcttcagcc

SEQ ID NO: 22617 - DNA, 20 bp, Artificial Sequence
  Synthetic oligonucleotide; TGG chr11 5347512 5347531 5347528 +
cacaccacatcactttgtga

SEQ ID NO: 22618 - DNA, 20 bp, Artificial Sequence
  Synthetic oligonucleotide; CAG chr11 5347535 5347554 5347551 +
caattattatatgcgtttta

SEQ ID NO: 22619 - DNA, 20 bp, Artificial Sequence
  Synthetic oligonucleotide; AAG chr11 5347539 5347558 5347555 +
tattatatgcgttttacagt

SEQ ID NO: 22620 - DNA, 20 bp, Artificial Sequence
  Synthetic oligonucleotide; AGG chr11 5347540 5347559 5347556 +
attatatgcgttttacagta

SEQ ID NO: 22621 - DNA, 20 bp, Artificial Sequence
  Synthetic oligonucleotide; GAG chr11 5347558 5347577 5347574 +
taaggactatgaaatgcaat

SEQ ID NO: 22622 - DNA, 20 bp, Artificial Sequence
  Synthetic oligonucleotide; AAG chr11 5347575 5347594 5347591 +
aatgagataaaataattcca

SEQ ID NO: 22623 - DNA, 20 bp, Artificial Sequence
  Synthetic oligonucleotide; TAG chr11 5347578 5347597 5347594 +
gagataaaataattccaaag

SEQ ID NO: 22624 - DNA, 20 bp, Artificial Sequence
  Synthetic oligonucleotide; CAG chr11 5347583 5347602 5347599 +
aaaataattccaaagtagca

SEQ ID NO: 22625 - DNA, 20 bp, Artificial Sequence
  Synthetic oligonucleotide; AAG chr11 5347587 5347606 5347603 +
taattccaaagtagcacagc

SEQ ID NO: 22626 - DNA, 20 bp, Artificial Sequence
  Synthetic oligonucleotide; GAG chr11 5347589 5347608 5347605 +
attccaaagtagcacagcaa

SEQ ID NO: 22627 - DNA, 20 bp, Artificial Sequence
  Synthetic oligonucleotide; AAG chr11 5347595 5347614 5347611 +
aagtagcacagcaagagcca

SEQ ID NO: 22628 - DNA, 20 bp, Artificial Sequence
  Synthetic oligonucleotide; TAG chr11 5347606 5347625 5347622 +
caagagccaaagccacaatg

SEQ ID NO: 22629 - DNA, 20 bp, Artificial Sequence
  Synthetic oligonucleotide; CAG chr11 5347629 5347648 5347645 +
acaaaatattcaacctccaa

SEQ ID NO: 22630 - DNA, 20 bp, Artificial Sequence
  Synthetic oligonucleotide; GAG chr11 5347631 5347650 5347647 +
aaaatattcaacctccaaca

SEQ ID NO: 22631 - DNA, 20 bp, Artificial Sequence
  Synthetic oligonucleotide; AGG chr11 5347632 5347651 5347648 +
aaatattcaacctccaacag

SEQ ID NO: 22632 - DNA, 20 bp, Artificial Sequence
  Synthetic oligonucleotide; CAG chr11 5347643 5347662 5347659 +
ctccaacagaggaaaacctc

SEQ ID NO: 22633 - DNA, 20 bp, Artificial Sequence
  Synthetic oligonucleotide; AAG chr11 5347649 5347668 5347665 +
cagaggaaaacctccagtaa

SEQ ID NO: 22634 - DNA, 20 bp, Artificial Sequence
  Synthetic oligonucleotide; CAG chr11 5347653 5347672 5347669 +
ggaaaacctccagtaaaagc

SEQ ID NO: 22635 - DNA, 20 bp, Artificial Sequence
  Synthetic oligonucleotide; AGG chr11 5347654 5347673 5347670 +
gaaaacctccagtaaaagcc

SEQ ID NO: 22636 - DNA, 20 bp, Artificial Sequence
  Synthetic oligonucleotide; CAG chr11 5347658 5347677 5347674 +
acctccagtaaaagccagga

SEQ ID NO: 22637 - DNA, 20 bp, Artificial Sequence
  Synthetic oligonucleotide; GAG chr11 5347660 5347679 5347676 +
ctccagtaaaagccaggaca

SEQ ID NO: 22638 - DNA, 20 bp, Artificial Sequence
  Synthetic oligonucleotide; CAG chr11 5347664 5347683 5347680 +
agtaaaagccaggacagaga

SEQ ID NO: 22639 - DNA, 20 bp, Artificial Sequence
  Synthetic oligonucleotide; GAG chr11 5347666 5347685 5347682 +
taaaagccaggacagagaca

SEQ ID NO: 22640 - DNA, 20 bp, Artificial Sequence
  Synthetic oligonucleotide; GAG chr11 5347674 5347693 5347690 +
aggacagagacagagatctt

SEQ ID NO: 22641 - DNA, 20 bp, Artificial Sequence
  Synthetic oligonucleotide; AAG chr11 5347689 5347708 5347705 +
atcttgagttgtgctgttca

SEQ ID NO: 22642 - DNA, 20 bp, Artificial Sequence
  Synthetic oligonucleotide; AAG chr11 5347704 5347723 5347720 +
gttcaaagcccaatacccac

SEQ ID NO: 22643 - DNA, 20 bp, Artificial Sequence
  Synthetic oligonucleotide; AGG chr11 5347705 5347724 5347721 +
ttcaaagcccaatacccaca

SEQ ID NO: 22644 - DNA, 20 bp, Artificial Sequence
  Synthetic oligonucleotide; GAG chr11 5347710 5347729 5347726 +
agcccaatacccacaaggct

SEQ ID NO: 22645 - DNA, 20 bp, Artificial Sequence
  Synthetic oligonucleotide; AGG chr11 5347711 5347730 5347727 +
gcccaatacccacaaggctg

SEQ ID NO: 22646 - DNA, 20 bp, Artificial Sequence
  Synthetic oligonucleotide; GGG chr11 5347712 5347731 5347728 +
cccaatacccacaaggctga

SEQ ID NO: 22647 - DNA, 20 bp, Artificial Sequence
  Synthetic oligonucleotide; TAG chr11 5347724 5347743 5347740 +
aaggctgagggcacaaataa

SEQ ID NO: 22648 - DNA, 20 bp, Artificial Sequence
  Synthetic oligonucleotide; GAG chr11 5347726 5347745 5347742 +
ggctgagggcacaaataata

SEQ ID NO: 22649 - DNA, 20 bp, Artificial Sequence
  Synthetic oligonucleotide; AAG chr11 5347732 5347751 5347748 +
gggcacaaataatagagaaa

SEQ ID NO: 22650 - DNA, 20 bp, Artificial Sequence
  Synthetic oligonucleotide; TGG chr11 5347736 5347755 5347752 +
acaaataatagagaaaaaga

SEQ ID NO: 22651 - DNA, 20 bp, Artificial Sequence
  Synthetic oligonucleotide; AAG chr11 5347739 5347758 5347755 +
aataatagagaaaaagatgg

SEQ ID NO: 22652 - DNA, 20 bp, Artificial Sequence
  Synthetic oligonucleotide; AGG chr11 5347740 5347759 5347756 +
ataatagagaaaaagatgga

SEQ ID NO: 22653 - DNA, 20 bp, Artificial Sequence
  Synthetic oligonucleotide; AAG chr11 5347743 5347762 5347759 +
atagagaaaaagatggaagg

SEQ ID NO: 22654 - DNA, 20 bp, Artificial Sequence
  Synthetic oligonucleotide; AGG chr11 5347744 5347763 5347760 +
tagagaaaaagatggaagga

SEQ ID NO: 22655 - DNA, 20 bp, Artificial Sequence
  Synthetic oligonucleotide; GAG chr11 5347746 5347765 5347762 +
gagaaaaagatggaaggaag

SEQ ID NO: 22656 - DNA, 20 bp, Artificial Sequence
  Synthetic oligonucleotide; AGG chr11 5347747 5347766 5347763 +
agaaaaagatggaaggaagg

SEQ ID NO: 22657 - DNA, 20 bp, Artificial Sequence
  Synthetic oligonucleotide; TAG chr11 5347750 5347769 5347766 +
aaaagatggaaggaaggagg

SEQ ID NO: 22658 - DNA, 20 bp, Artificial Sequence
  Synthetic oligonucleotide; AGG chr11 5347751 5347770 5347767 +
aaagatggaaggaaggaggt

SEQ ID NO: 22659 - DNA, 20 bp, Artificial Sequence
  Synthetic oligonucleotide; GGG chr11 5347752 5347771 5347768 +
aagatggaaggaaggaggta

SEQ ID NO: 22660 - DNA, 20 bp, Artificial Sequence
  Synthetic oligonucleotide; GAG chr11 5347754 5347773 5347770 +
gatggaaggaaggaggtagg

SEQ ID NO: 22661 - DNA, 20 bp, Artificial Sequence
  Synthetic oligonucleotide; GAG chr11 5347756 5347775 5347772 +
tggaaggaaggaggtaggga

SEQ ID NO: 22662 - DNA, 20 bp, Artificial Sequence
  Synthetic oligonucleotide; GAG chr11 5347758 5347777 5347774 +
gaaggaaggaggtagggaga

SEQ ID NO: 22663 - DNA, 20 bp, Artificial Sequence
  Synthetic oligonucleotide; AGG chr11 5347759 5347778 5347775 +
aaggaaggaggtagggagag

SEQ ID NO: 22664 - DNA, 20 bp, Artificial Sequence
  Synthetic oligonucleotide; GGG chr11 5347760 5347779 5347776 +
aggaaggaggtagggagaga

SEQ ID NO: 22665 - DNA, 20 bp, Artificial Sequence
  Synthetic oligonucleotide; AAG chr11 5347763 5347782 5347779 +
aaggaggtagggagagaggg

SEQ ID NO: 22666 - DNA, 20 bp, Artificial Sequence
  Synthetic oligonucleotide; GAG chr11 5347765 5347784 5347781 +
ggaggtagggagagagggaa

SEQ ID NO: 22667 - DNA, 20 bp, Artificial Sequence
  Synthetic oligonucleotide; GAG chr11 5347767 5347786 5347783 +
aggtagggagagagggaaga

SEQ ID NO: 22668 - DNA, 20 bp, Artificial Sequence
  Synthetic oligonucleotide; AGG chr11 5347768 5347787 5347784 +
ggtagggagagagggaagag

SEQ ID NO: 22669 - DNA, 20 bp, Artificial Sequence
  Synthetic oligonucleotide; GAG chr11 5347770 5347789 5347786 +
tagggagagagggaagagag

SEQ ID NO: 22670 - DNA, 20 bp, Artificial Sequence
  Synthetic oligonucleotide; AGG chr11 5347771 5347790 5347787 +
agggagagagggaagagagg

SEQ ID NO: 22671 - DNA, 20 bp, Artificial Sequence
  Synthetic oligonucleotide; GGG chr11 5347772 5347791 5347788 +
gggagagagggaagagagga

SEQ ID NO: 22672 - DNA, 20 bp, Artificial Sequence
  Synthetic oligonucleotide; GAG chr11 5347774 5347793 5347790 +
gagagagggaagagaggagg

SEQ ID NO: 22673 - DNA, 20 bp, Artificial Sequence
  Synthetic oligonucleotide; CAG chr11 5347777 5347796 5347793 +
agagggaagagaggagggag

SEQ ID NO: 22674 - DNA, 20 bp, Artificial Sequence
  Synthetic oligonucleotide; AAG chr11 5347780 5347799 5347796 +
gggaagagaggagggagcag

SEQ ID NO: 22675 - DNA, 20 bp, Artificial Sequence
  Synthetic oligonucleotide; GAG chr11 5347782 5347801 5347798 +
gaagagaggagggagcagaa

SEQ ID NO: 22676 - DNA, 20 bp, Artificial Sequence
  Synthetic oligonucleotide; AGG chr11 5347783 5347802 5347799 +
aagagaggagggagcagaag

SEQ ID NO: 22677 - DNA, 20 bp, Artificial Sequence
  Synthetic oligonucleotide; GGG chr11 5347784 5347803 5347800 +
agagaggagggagcagaaga

SEQ ID NO: 22678 - DNA, 20 bp, Artificial Sequence
  Synthetic oligonucleotide; GAG chr11 5347786 5347805 5347802 +
agaggagggagcagaagagg

SEQ ID NO: 22679 - DNA, 20 bp, Artificial Sequence
  Synthetic oligonucleotide; AGG chr11 5347787 5347806 5347803 +
gaggagggagcagaagaggg

SEQ ID NO: 22680 - DNA, 20 bp, Artificial Sequence
  Synthetic oligonucleotide; GGG chr11 5347788 5347807 5347804 +
aggagggagcagaagaggga

SEQ ID NO: 22681 - DNA, 20 bp, Artificial Sequence
  Synthetic oligonucleotide; GAG chr11 5347790 5347809 5347806 +
gagggagcagaagagggagg

SEQ ID NO: 22682 - DNA, 20 bp, Artificial Sequence
  Synthetic oligonucleotide; AGG chr11 5347791 5347810 5347807 +
agggagcagaagagggaggg

SEQ ID NO: 22683 - DNA, 20 bp, Artificial Sequence
  Synthetic oligonucleotide; GGG chr11 5347792 5347811 5347808 +
gggagcagaagagggaggga

SEQ ID NO: 22684 - DNA, 20 bp, Artificial Sequence
  Synthetic oligonucleotide; AAG chr11 5347795 5347814 5347811 +
agcagaagagggagggaggg

SEQ ID NO: 22685 - DNA, 20 bp, Artificial Sequence
  Synthetic oligonucleotide; CAG chr11 5347816 5347835 5347832 +
agaacaataattatctaaat

SEQ ID NO: 22686 - DNA, 20 bp, Artificial Sequence
  Synthetic oligonucleotide; AGG chr11 5347817 5347836 5347833 +
gaacaataattatctaaatc

SEQ ID NO: 22687 - DNA, 20 bp, Artificial Sequence
  Synthetic oligonucleotide; TGG chr11 5347822 5347841 5347838 +
ataattatctaaatcaggaa

SEQ ID NO: 22688 - DNA, 20 bp, Artificial Sequence
  Synthetic oligonucleotide; TGG chr11 5347829 5347848 5347845 +
tctaaatcaggaatggtctc

SEQ ID NO: 22689 - DNA, 20 bp, Artificial Sequence
  Synthetic oligonucleotide; GGG chr11 5347830 5347849 5347846 +
ctaaatcaggaatggtctct

SEQ ID NO: 22690 - DNA, 20 bp, Artificial Sequence
  Synthetic oligonucleotide; GGG chr11 5347831 5347850 5347847 +
taaatcaggaatggtctctg

SEQ ID NO: 22691 - DNA, 20 bp, Artificial Sequence
  Synthetic oligonucleotide; GAG chr11 5347833 5347852 5347849 +
aatcaggaatggtctctggg

SEQ ID NO: 22692 - DNA, 20 bp, Artificial Sequence
  Synthetic oligonucleotide; AGG chr11 5347834 5347853 5347850 +
atcaggaatggtctctgggg

SEQ ID NO: 22693 - DNA, 20 bp, Artificial Sequence
  Synthetic oligonucleotide; GAG chr11 5347836 5347855 5347852 +
caggaatggtctctggggag

SEQ ID NO: 22694 - DNA, 20 bp, Artificial Sequence
  Synthetic oligonucleotide; CAG chr11 5347861 5347880 5347877 +
tctaaaataaatgttcctac

SEQ ID NO: 22695 - DNA, 20 bp, Artificial Sequence
  Synthetic oligonucleotide; CAG chr11 5347865 5347884 5347881 +
aaataaatgttcctaccagc

SEQ ID NO: 22696 - DNA, 20 bp, Artificial Sequence
  Synthetic oligonucleotide; AGG chr11 5347866 5347885 5347882 +
aataaatgttcctaccagcc

SEQ ID NO: 22697 - DNA, 20 bp, Artificial Sequence
  Synthetic oligonucleotide; CAG chr11 5347877 5347896 5347893 +
ctaccagccaggctcatgtg

SEQ ID NO: 22698 - DNA, 20 bp, Artificial Sequence
  Synthetic oligonucleotide; AAG chr11 5347888 5347907 5347904 +
gctcatgtgcagattctgaa

SEQ ID NO: 22699 - DNA, 20 bp, Artificial Sequence
  Synthetic oligonucleotide; CGG chr11 5347912 5347931 5347928 +
tgatgcccaaatctttcata

SEQ ID NO: 22700 - DNA, 20 bp, Artificial Sequence
  Synthetic oligonucleotide; AAG chr11 5347918 5347937 5347934 +
ccaaatctttcatacggcta

SEQ ID NO: 22701 - DNA, 20 bp, Artificial Sequence
  Synthetic oligonucleotide; GAG chr11 5347925 5347944 5347941 +
tttcatacggctaaagatgt

SEQ ID NO: 22702 - DNA, 20 bp, Artificial Sequence
  Synthetic oligonucleotide; TGG chr11 5347939 5347958 5347955 +
agatgtgagatacatgacta

SEQ ID NO: 22703 - DNA, 20 bp, Artificial Sequence
  Synthetic oligonucleotide; AAG chr11 5347947 5347966 5347963 +
gatacatgactatggaactg

SEQ ID NO: 22704 - DNA, 20 bp, Artificial Sequence
  Synthetic oligonucleotide; TGG chr11 5347952 5347971 5347968 +
atgactatggaactgaagaa

SEQ ID NO: 22705 - DNA, 20 bp, Artificial Sequence
  Synthetic oligonucleotide; AAG chr11 5347955 5347974 5347971 +
actatggaactgaagaatgg

SEQ ID NO: 22706 - DNA, 20 bp, Artificial Sequence
  Synthetic oligonucleotide; AGG chr11 5347956 5347975 5347972 +
ctatggaactgaagaatgga

SEQ ID NO: 22707 - DNA, 20 bp, Artificial Sequence
  Synthetic oligonucleotide; GGG chr11 5347957 5347976 5347973 +
tatggaactgaagaatggaa

SEQ ID NO: 22708 - DNA, 20 bp, Artificial Sequence
  Synthetic oligonucleotide; AAG chr11 5347964 5347983 5347980 +
ctgaagaatggaagggaaca

SEQ ID NO: 22709 - DNA, 20 bp, Artificial Sequence
  Synthetic oligonucleotide; CAG chr11 5347970 5347989 5347986 +
aatggaagggaacaaagttt

SEQ ID NO: 22710 - DNA, 20 bp, Artificial Sequence
  Synthetic oligonucleotide; AGG chr11 5347971 5347990 5347987 +
atggaagggaacaaagtttc

SEQ ID NO: 22711 - DNA, 20 bp, Artificial Sequence
  Synthetic oligonucleotide; CAG chr11 5347975 5347994 5347991 +
aagggaacaaagtttcaggt

SEQ ID NO: 22712 - DNA, 20 bp, Artificial Sequence
  Synthetic oligonucleotide; GAG chr11 5347979 5347998 5347995 +
gaacaaagtttcaggtcagt

SEQ ID NO: 22713 - DNA, 20 bp, Artificial Sequence
  Synthetic oligonucleotide; AGG chr11 5347980 5347999 5347996 +
aacaaagtttcaggtcagtg

SEQ ID NO: 22714 - DNA, 20 bp, Artificial Sequence
  Synthetic oligonucleotide; GGG chr11 5347981 5348000 5347997 +
acaaagtttcaggtcagtga

SEQ ID NO: 22715 - DNA, 20 bp, Artificial Sequence
  Synthetic oligonucleotide; AAG chr11 5348005 5348024 5348021 +
atttaatgaatctcctctgt

SEQ ID NO: 22716 - DNA, 20 bp, Artificial Sequence
  Synthetic oligonucleotide; CAG chr11 5348017 5348036 5348033 +
tcctctgtaagatctcattg

SEQ ID NO: 22717 - DNA, 20 bp, Artificial Sequence
  Synthetic oligonucleotide; AGG chr11 5348018 5348037 5348034 +
cctctgtaagatctcattgc

SEQ ID NO: 22718 - DNA, 20 bp, Artificial Sequence
  Synthetic oligonucleotide; AAG chr11 5348025 5348044 5348041 +
aagatctcattgcaggaacc

SEQ ID NO: 22719 - DNA, 20 bp, Artificial Sequence
  Synthetic oligonucleotide; AGG chr11 5348026 5348045 5348042 +
agatctcattgcaggaacca

SEQ ID NO: 22720 - DNA, 20 bp, Artificial Sequence
  Synthetic oligonucleotide; CAG chr11 5348040 5348059 5348056 +
gaaccaaggcaaaaaaaaaa

SEQ ID NO: 22721 - DNA, 20 bp, Artificial Sequence
  Synthetic oligonucleotide; GAG chr11 5348042 5348061 5348058 +
accaaggcaaaaaaaaaaca

SEQ ID NO: 22722 - DNA, 20 bp, Artificial Sequence
  Synthetic oligonucleotide; GAG chr11 5348044 5348063 5348060 +
caaggcaaaaaaaaaacaga

SEQ ID NO: 22723 - DNA, 20 bp, Artificial Sequence
  Synthetic oligonucleotide; AAG chr11 5348051 5348070 5348067 +
aaaaaaaaacagagagatcg

SEQ ID NO: 22724 - DNA, 20 bp, Artificial Sequence
  Synthetic oligonucleotide; TAG chr11 5348063 5348082 5348079 +
agagatcgaagctgatttct

SEQ ID NO: 22725 - DNA, 20 bp, Artificial Sequence
  Synthetic oligonucleotide; AAG chr11 5348067 5348086 5348083 +
atcgaagctgatttcttagc

SEQ ID NO: 22726 - DNA, 20 bp, Artificial Sequence
  Synthetic oligonucleotide; GAG chr11 5348069 5348088 5348085 +
cgaagctgatttcttagcaa

SEQ ID NO: 22727 - DNA, 20 bp, Artificial Sequence
  Synthetic oligonucleotide; AAG chr11 5348074 5348093 5348090 +
ctgatttcttagcaagagaa

SEQ ID NO: 22728 - DNA, 20 bp, Artificial Sequence
  Synthetic oligonucleotide; TAG chr11 5348080 5348099 5348096 +
tcttagcaagagaaaagtaa

SEQ ID NO: 22729 - DNA, 20 bp, Artificial Sequence
  Synthetic oligonucleotide; AAG chr11 5348094 5348113 5348110 +
aagtaatagtgttgtctgct

SEQ ID NO: 22730 - DNA, 20 bp, Artificial Sequence
  Synthetic oligonucleotide; GAG chr11 5348096 5348115 5348112 +
gtaatagtgttgtctgctaa

SEQ ID NO: 22731 - DNA, 20 bp, Artificial Sequence
  Synthetic oligonucleotide; TAG chr11 5348099 5348118 5348115 +
atagtgttgtctgctaagag

SEQ ID NO: 22732 - DNA, 20 bp, Artificial Sequence
  Synthetic oligonucleotide; TAG chr11 5348109 5348128 5348125 +
ctgctaagagtagatatatg

SEQ ID NO: 22733 - DNA, 20 bp, Artificial Sequence
  Synthetic oligonucleotide; TAG chr11 5348112 5348131 5348128 +
ctaagagtagatatatgtag

SEQ ID NO: 22734 - DNA, 20 bp, Artificial Sequence
  Synthetic oligonucleotide; AGG chr11 5348113 5348132 5348129 +
taagagtagatatatgtagt

SEQ ID NO: 22735 - DNA, 20 bp, Artificial Sequence
  Synthetic oligonucleotide; TGG chr11 5348118 5348137 5348134 +
gtagatatatgtagtaggca

SEQ ID NO: 22736 - DNA, 20 bp, Artificial Sequence
  Synthetic oligonucleotide; GGG chr11 5348119 5348138 5348135 +
tagatatatgtagtaggcat

SEQ ID NO: 22737 - DNA, 20 bp, Artificial Sequence
  Synthetic oligonucleotide; AAG chr11 5348127 5348146 5348143 +
tgtagtaggcatgggtccta

SEQ ID NO: 22738 - DNA, 20 bp, Artificial Sequence
  Synthetic oligonucleotide; TGG chr11 5348152 5348171 5348168 +
tccctgacatctctaaaact

SEQ ID NO: 22739 - DNA, 20 bp, Artificial Sequence
  Synthetic oligonucleotide; GAG chr11 5348162 5348181 5348178 +
ctctaaaacttggtttcttt

SEQ ID NO: 22740 - DNA, 20 bp, Artificial Sequence
  Synthetic oligonucleotide; GAG chr11 5348164 5348183 5348180 +
ctaaaacttggtttctttga

SEQ ID NO: 22741 - DNA, 20 bp, Artificial Sequence
  Synthetic oligonucleotide; AAG chr11 5348187 5348206 5348203 +
ttacctcttcaaatataaaa

SEQ ID NO: 22742 - DNA, 20 bp, Artificial Sequence
  Synthetic oligonucleotide; AAG chr11 5348192 5348211 5348208 +
tcttcaaatataaaaaagtg

SEQ ID NO: 22743 - DNA, 20 bp, Artificial Sequence
  Synthetic oligonucleotide; AGG chr11 5348193 5348212 5348209 +
cttcaaatataaaaaagtga

SEQ ID NO: 22744 - DNA, 20 bp, Artificial Sequence
  Synthetic oligonucleotide; TAG chr11 5348197 5348216 5348213 +
aaatataaaaaagtgaagga

SEQ ID NO: 22745 - DNA, 20 bp, Artificial Sequence
  Synthetic oligonucleotide; TGG chr11 5348204 5348223 5348220 +
aaaaagtgaaggatagattc

SEQ ID NO: 22746 - DNA, 20 bp, Artificial Sequence
  Synthetic oligonucleotide; AAG chr11 5348214 5348233 5348230 +
ggatagattctggaacacat

SEQ ID NO: 22747 - DNA, 20 bp, Artificial Sequence
  Synthetic oligonucleotide; AGG chr11 5348215 5348234 5348231 +
gatagattctggaacacata

SEQ ID NO: 22748 - DNA, 20 bp, Artificial Sequence
  Synthetic oligonucleotide; CAG chr11 5348239 5348258 5348255 +
aaacaattctacgaacaaac

SEQ ID NO: 22749 - DNA, 20 bp, Artificial Sequence
  Synthetic oligonucleotide; GAG chr11 5348241 5348260 5348257 +
acaattctacgaacaaacca

SEQ ID NO: 22750 - DNA, 20 bp, Artificial Sequence
  Synthetic oligonucleotide; TGG chr11 5348246 5348265 5348262 +
tctacgaacaaaccagagca

SEQ ID NO: 22751 - DNA, 20 bp, Artificial Sequence
  Synthetic oligonucleotide; GGG chr11 5348247 5348266 5348263 +
ctacgaacaaaccagagcat

SEQ ID NO: 22752 - DNA, 20 bp, Artificial Sequence
  Synthetic oligonucleotide; CAG chr11 5348258 5348277 5348274 +
ccagagcatgggtgttgact

SEQ ID NO: 22753 - DNA, 20 bp, Artificial Sequence
  Synthetic oligonucleotide; AGG chr11 5348259 5348278 5348275 +
cagagcatgggtgttgactc

SEQ ID NO: 22754 - DNA, 20 bp, Artificial Sequence
  Synthetic oligonucleotide; TGG chr11 5348271 5348290 5348287 +
gttgactcaggcatgaatta

SEQ ID NO: 22755 - DNA, 20 bp, Artificial Sequence
  Synthetic oligonucleotide; GGG chr11 5348272 5348291 5348288 +
ttgactcaggcatgaattat

SEQ ID NO: 22756 - DNA, 20 bp, Artificial Sequence
  Synthetic oligonucleotide; GGG chr11 5348273 5348292 5348289 +
tgactcaggcatgaattatg

SEQ ID NO: 22757 - DNA, 20 bp, Artificial Sequence
  Synthetic oligonucleotide; TAG chr11 5348279 5348298 5348295 +
aggcatgaattatggggttg

SEQ ID NO: 22758 - DNA, 20 bp, Artificial Sequence
  Synthetic oligonucleotide; TGG chr11 5348318 5348337 5348334 +
gactgattctttaatctctc

SEQ ID NO: 22759 - DNA, 20 bp, Artificial Sequence
  Synthetic oligonucleotide; GAG chr11 5348337 5348356 5348353 +
ctggcttccattctaaccct

SEQ ID NO: 22760 - DNA, 20 bp, Artificial Sequence
  Synthetic oligonucleotide; GAG chr11 5348339 5348358 5348355 +
ggcttccattctaaccctga

SEQ ID NO: 22761 - DNA, 20 bp, Artificial Sequence
  Synthetic oligonucleotide; TAG chr11 5348374 5348393 5348390 +
caaccccatgtcttttacct

SEQ ID NO: 22762 - DNA, 20 bp, Artificial Sequence
  Synthetic oligonucleotide; AAG chr11 5348377 5348396 5348393 +
ccccatgtcttttaccttag

SEQ ID NO: 22763 - DNA, 20 bp, Artificial Sequence
  Synthetic oligonucleotide; CAG chr11 5348382 5348401 5348398 +
tgtcttttaccttagaagtc

SEQ ID NO: 22764 - DNA, 20 bp, Artificial Sequence
  Synthetic oligonucleotide; AAG chr11 5348387 5348406 5348403 +
tttaccttagaagtccagat

SEQ ID NO: 22765 - DNA, 20 bp, Artificial Sequence
  Synthetic oligonucleotide; TAG chr11 5348399 5348418 5348415 +
gtccagataagtgccaaata

SEQ ID NO: 22766 - DNA, 20 bp, Artificial Sequence
  Synthetic oligonucleotide; GAG chr11 5348423 5348442 5348439 +
atcaactcttccaaattctt

SEQ ID NO: 22767 - DNA, 20 bp, Artificial Sequence
  Synthetic oligonucleotide; AGG chr11 5348424 5348443 5348440 +
tcaactcttccaaattcttg

SEQ ID NO: 22768 - DNA, 20 bp, Artificial Sequence
  Synthetic oligonucleotide; GAG chr11 5348426 5348445 5348442 +
aactcttccaaattcttgag

SEQ ID NO: 22769 - DNA, 20 bp, Artificial Sequence
  Synthetic oligonucleotide; AGG chr11 5348427 5348446 5348443 +
actcttccaaattcttgagg

SEQ ID NO: 22770 - DNA, 20 bp, Artificial Sequence
  Synthetic oligonucleotide; CAG chr11 5348447 5348466 5348463 +
aggtatacctctgtaatcat

SEQ ID NO: 22771 - DNA, 20 bp, Artificial Sequence
  Synthetic oligonucleotide; GAG chr11 5348449 5348468 5348465 +
gtatacctctgtaatcatca

SEQ ID NO: 22772 - DNA, 20 bp, Artificial Sequence
  Synthetic oligonucleotide; AGG chr11 5348450 5348469 5348466 +
tatacctctgtaatcatcag

SEQ ID NO: 22773 - DNA, 20 bp, Artificial Sequence
  Synthetic oligonucleotide; TAG chr11 5348466 5348485 5348482 +
tcagaggttcaaatactttc

SEQ ID NO: 22774 - DNA, 20 bp, Artificial Sequence
  Synthetic oligonucleotide; AAG chr11 5348474 5348493 5348490 +
tcaaatactttctagaaaaa

SEQ ID NO: 22775 - DNA, 20 bp, Artificial Sequence
  Synthetic oligonucleotide; AAG chr11 5348517 5348536 5348533 +
taataaaccaattcaaaatt

SEQ ID NO: 22776 - DNA, 20 bp, Artificial Sequence
  Synthetic oligonucleotide; TGG chr11 5348522 5348541 5348538 +
aaccaattcaaaattaagct

SEQ ID NO: 22777 - DNA, 20 bp, Artificial Sequence
  Synthetic oligonucleotide; CGG chr11 5348526 5348545 5348542 +
aattcaaaattaagcttgga

SEQ ID NO: 22778 - DNA, 20 bp, Artificial Sequence
  Synthetic oligonucleotide; GAG chr11 5348528 5348547 5348544 +
ttcaaaattaagcttggacg

SEQ ID NO: 22779 - DNA, 20 bp, Artificial Sequence
  Synthetic oligonucleotide; TGG chr11 5348533 5348552 5348549 +
aattaagcttggacggagct

SEQ ID NO: 22780 - DNA, 20 bp, Artificial Sequence
  Synthetic oligonucleotide; GGG chr11 5348534 5348553 5348550 +
attaagcttggacggagctt

SEQ ID NO: 22781 - DNA, 20 bp, Artificial Sequence
  Synthetic oligonucleotide; TGG chr11 5348550 5348569 5348566 +
gcttgggttatgtgtgcctc

SEQ ID NO: 22782 - DNA, 20 bp, Artificial Sequence
  Synthetic oligonucleotide; CAG chr11 5348555 5348574 5348571 +
ggttatgtgtgcctctggat

SEQ ID NO: 22783 - DNA, 20 bp, Artificial Sequence
  Synthetic oligonucleotide; AGG chr11 5348556 5348575 5348572 +
gttatgtgtgcctctggatc

SEQ ID NO: 22784 - DNA, 20 bp, Artificial Sequence
  Synthetic oligonucleotide; GGG chr11 5348557 5348576 5348573 +
ttatgtgtgcctctggatca

SEQ ID NO: 22785 - DNA, 20 bp, Artificial Sequence
  Synthetic oligonucleotide; GGG chr11 5348558 5348577 5348574 +
tatgtgtgcctctggatcag

SEQ ID NO: 22786 - DNA, 20 bp, Artificial Sequence
  Synthetic oligonucleotide; CAG chr11 5348563 5348582 5348579 +
gtgcctctggatcaggggta

SEQ ID NO: 22787 - DNA, 20 bp, Artificial Sequence
  Synthetic oligonucleotide; TAG chr11 5348573 5348592 5348589 +
atcaggggtacagattcaca

SEQ ID NO: 22788 - DNA, 20 bp, Artificial Sequence
  Synthetic oligonucleotide; TAG chr11 5348588 5348607 5348604 +
tcacatagcctgtgtgactt

SEQ ID NO: 22789 - DNA, 20 bp, Artificial Sequence
  Synthetic oligonucleotide; TGG chr11 5348595 5348614 5348611 +
gcctgtgtgactttagcacc

SEQ ID NO: 22790 - DNA, 20 bp, Artificial Sequence
  Synthetic oligonucleotide; AAG chr11 5348599 5348618 5348615 +
gtgtgactttagcacctgga

SEQ ID NO: 22791 - DNA, 20 bp, Artificial Sequence
  Synthetic oligonucleotide; AGG chr11 5348600 5348619 5348616 +
tgtgactttagcacctggaa

SEQ ID NO: 22792 - DNA, 20 bp, Artificial Sequence
  Synthetic oligonucleotide; CAG chr11 5348617 5348636 5348633 +
gaaaggtttatattgtgtaa

SEQ ID NO: 22793 - DNA, 20 bp, Artificial Sequence
  Synthetic oligonucleotide; AGG chr11 5348618 5348637 5348634 +
aaaggtttatattgtgtaac

SEQ ID NO: 22794 - DNA, 20 bp, Artificial Sequence
  Synthetic oligonucleotide; TAG chr11 5348660 5348679 5348676 +
ttcttttgcctgctttcttc

SEQ ID NO: 22795 - DNA, 20 bp, Artificial Sequence
  Synthetic oligonucleotide; TGG chr11 5348669 5348688 5348685 +
ctgctttcttctagccgccc

SEQ ID NO: 22796 - DNA, 20 bp, Artificial Sequence
  Synthetic oligonucleotide; CAG chr11 5348672 5348691 5348688 +
ctttcttctagccgccctgg

SEQ ID NO: 22797 - DNA, 20 bp, Artificial Sequence
  Synthetic oligonucleotide; TAG chr11 5348680 5348699 5348696 +
tagccgccctggcagctgat

SEQ ID NO: 22798 - DNA, 20 bp, Artificial Sequence
  Synthetic oligonucleotide; TAG chr11 5348684 5348703 5348700 +
cgccctggcagctgattaga

SEQ ID NO: 22799 - DNA, 20 bp, Artificial Sequence
  Synthetic oligonucleotide; CAG chr11 5348695 5348714 5348711 +
ctgattagatagtacccacc

SEQ ID NO: 22800 - DNA, 20 bp, Artificial Sequence
  Synthetic oligonucleotide; CGG chr11 5348699 5348718 5348715 +
ttagatagtacccacccaga

SEQ ID NO: 22801 - DNA, 20 bp, Artificial Sequence
  Synthetic oligonucleotide; GAG chr11 5348701 5348720 5348717 +
agatagtacccacccagacg

SEQ ID NO: 22802 - DNA, 20 bp, Artificial Sequence
  Synthetic oligonucleotide; AGG chr11 5348702 5348721 5348718 +
gatagtacccacccagacgg

SEQ ID NO: 22803 - DNA, 20 bp, Artificial Sequence
  Synthetic oligonucleotide; GGG chr11 5348703 5348722 5348719 +
atagtacccacccagacgga

SEQ ID NO: 22804 - DNA, 20 bp, Artificial Sequence
  Synthetic oligonucleotide; TGG chr11 5348706 5348725 5348722 +
gtacccacccagacggaggg

SEQ ID NO: 22805 - DNA, 20 bp, Artificial Sequence
  Synthetic oligonucleotide; GGG chr11 5348707 5348726 5348723 +
tacccacccagacggagggt

SEQ ID NO: 22806 - DNA, 20 bp, Artificial Sequence
  Synthetic oligonucleotide; TGG chr11 5348710 5348729 5348726 +
ccacccagacggagggtggg

SEQ ID NO: 22807 - DNA, 20 bp, Artificial Sequence
  Synthetic oligonucleotide; GGG chr11 5348711 5348730 5348727 +
cacccagacggagggtgggt

SEQ ID NO: 22808 - DNA, 20 bp, Artificial Sequence
  Synthetic oligonucleotide; CAG chr11 5348725 5348744 5348741 +
gtgggtgggtctgcctctcc

SEQ ID NO: 22809 - DNA, 20 bp, Artificial Sequence
  Synthetic oligonucleotide; TGG chr11 5348755 5348774 5348771 +
actcaaatgttaatctcctt

SEQ ID NO: 22810 - DNA, 20 bp, Artificial Sequence
  Synthetic oligonucleotide; CAG chr11 5348769 5348788 5348785 +
ctcctttggcaacaccctta

SEQ ID NO: 22811 - DNA, 20 bp, Artificial Sequence
  Synthetic oligonucleotide; CAG chr11 5348778 5348797 5348794 +
caacacccttacagcacacc

SEQ ID NO: 22812 - DNA, 20 bp, Artificial Sequence
  Synthetic oligonucleotide; AGG chr11 5348779 5348798 5348795 +
aacacccttacagcacaccc

SEQ ID NO: 22813 - DNA, 20 bp, Artificial Sequence
  Synthetic oligonucleotide; AAG chr11 5348811 5348830 5348827 +
ttgcatccttcaatccaatc

SEQ ID NO: 22814 - DNA, 20 bp, Artificial Sequence
  Synthetic oligonucleotide; CAG chr11 5348837 5348856 5348853 +
gcactcaatattaaccatca

SEQ ID NO: 22815 - DNA, 20 bp, Artificial Sequence
  Synthetic oligonucleotide; AAG chr11 5348841 5348860 5348857 +
tcaatattaaccatcacaga

SEQ ID NO: 22816 - DNA, 20 bp, Artificial Sequence
  Synthetic oligonucleotide; AGG chr11 5348842 5348861 5348858 +
caatattaaccatcacagaa

SEQ ID NO: 22817 - DNA, 20 bp, Artificial Sequence
  Synthetic oligonucleotide; TAG chr11 5348849 5348868 5348865 +
aaccatcacagaaaggataa

SEQ ID NO: 22818 - DNA, 20 bp, Artificial Sequence
  Synthetic oligonucleotide; AAG chr11 5348855 5348874 5348871 +
cacagaaaggataatagcca

SEQ ID NO: 22819 - DNA, 20 bp, Artificial Sequence
  Synthetic oligonucleotide; AGG chr11 5348856 5348875 5348872 +
acagaaaggataatagccaa

SEQ ID NO: 22820 - DNA, 20 bp, Artificial Sequence
  Synthetic oligonucleotide; AAG chr11 5348860 5348879 5348876 +
aaaggataatagccaaaggt

SEQ ID NO: 22821 - DNA, 20 bp, Artificial Sequence
  Synthetic oligonucleotide; AGG chr11 5348861 5348880 5348877 +
aaggataatagccaaaggta

SEQ ID NO: 22822 - DNA, 20 bp, Artificial Sequence
  Synthetic oligonucleotide; GGG chr11 5348862 5348881 5348878 +
aggataatagccaaaggtaa

SEQ ID NO: 22823 - DNA, 20 bp, Artificial Sequence
  Synthetic oligonucleotide; GGG chr11 5348863 5348882 5348879 +
ggataatagccaaaggtaag

SEQ ID NO: 22824 - DNA, 20 bp, Artificial Sequence
  Synthetic oligonucleotide; GGG chr11 5348864 5348883 5348880 +
gataatagccaaaggtaagg

SEQ ID NO: 22825 - DNA, 20 bp, Artificial Sequence
  Synthetic oligonucleotide; AAG chr11 5348873 5348892 5348889 +
caaaggtaagggggtaaaaa

SEQ ID NO: 22826 - DNA, 20 bp, Artificial Sequence
  Synthetic oligonucleotide; AGG chr11 5348874 5348893 5348890 +
aaaggtaagggggtaaaaaa

SEQ ID NO: 22827 - DNA, 20 bp, Artificial Sequence
  Synthetic oligonucleotide; TGG chr11 5348878 5348897 5348894 +
gtaagggggtaaaaaaagga

SEQ ID NO: 22828 - DNA, 20 bp, Artificial Sequence
  Synthetic oligonucleotide; GAG chr11 5348880 5348899 5348896 +
aagggggtaaaaaaaggatg

SEQ ID NO: 22829 - DNA, 20 bp, Artificial Sequence
  Synthetic oligonucleotide; AAG chr11 5348888 5348907 5348904 +
aaaaaaaggatggagatact

SEQ ID NO: 22830 - DNA, 20 bp, Artificial Sequence
  Synthetic oligonucleotide; GAG chr11 5348896 5348915 5348912 +
gatggagatactaagtgctt

SEQ ID NO: 22831 - DNA, 20 bp, Artificial Sequence
  Synthetic oligonucleotide; CAG chr11 5348900 5348919 5348916 +
gagatactaagtgcttgaga

SEQ ID NO: 22832 - DNA, 20 bp, Artificial Sequence
  Synthetic oligonucleotide; AAG chr11 5348905 5348924 5348921 +
actaagtgcttgagacagaa

SEQ ID NO: 22833 - DNA, 20 bp, Artificial Sequence
  Synthetic oligonucleotide; GAG chr11 5348907 5348926 5348923 +
taagtgcttgagacagaaaa

SEQ ID NO: 22834 - DNA, 20 bp, Artificial Sequence
  Synthetic oligonucleotide; CAG chr11 5348913 5348932 5348929 +
cttgagacagaaaagagtgt

SEQ ID NO: 22835 - DNA, 20 bp, Artificial Sequence
  Synthetic oligonucleotide; AGG chr11 5348914 5348933 5348930 +
ttgagacagaaaagagtgtc

SEQ ID NO: 22836 - DNA, 20 bp, Artificial Sequence
  Synthetic oligonucleotide; AAG chr11 5348919 5348938 5348935 +
acagaaaagagtgtcaggaa

SEQ ID NO: 22837 - DNA, 20 bp, Artificial Sequence
  Synthetic oligonucleotide; AAG chr11 5348924 5348943 5348940 +
aaagagtgtcaggaaaagtg

SEQ ID NO: 22838 - DNA, 20 bp, Artificial Sequence
  Synthetic oligonucleotide; AGG chr11 5348925 5348944 5348941 +
aagagtgtcaggaaaagtga

SEQ ID NO: 22839 - DNA, 20 bp, Artificial Sequence
  Synthetic oligonucleotide; AAG chr11 5348932 5348951 5348948 +
tcaggaaaagtgaaggaaaa

SEQ ID NO: 22840 - DNA, 20 bp, Artificial Sequence
  Synthetic oligonucleotide; AAG chr11 5348938 5348957 5348954 +
aaagtgaaggaaaaaagcca

SEQ ID NO: 22841 - DNA, 20 bp, Artificial Sequence
  Synthetic oligonucleotide; AGG chr11 5348939 5348958 5348955 +
aagtgaaggaaaaaagccaa

SEQ ID NO: 22842 - DNA, 20 bp, Artificial Sequence
  Synthetic oligonucleotide; GGG chr11 5348940 5348959 5348956 +
agtgaaggaaaaaagccaaa

SEQ ID NO: 22843 - DNA, 20 bp, Artificial Sequence
  Synthetic oligonucleotide; AAG chr11 5348943 5348962 5348959 +
gaaggaaaaaagccaaaggg

SEQ ID NO: 22844 - DNA, 20 bp, Artificial Sequence
  Synthetic oligonucleotide; AGG chr11 5348944 5348963 5348960 +
aaggaaaaaagccaaaggga

SEQ ID NO: 22845 - DNA, 20 bp, Artificial Sequence
  Synthetic oligonucleotide; GAG chr11 5348948 5348967 5348964 +
aaaaaagccaaagggaaggt

SEQ ID NO: 22846 - DNA, 20 bp, Artificial Sequence
  Synthetic oligonucleotide; GAG chr11 5348950 5348969 5348966 +
aaaagccaaagggaaggtga

SEQ ID NO: 22847 - DNA, 20 bp, Artificial Sequence
  Synthetic oligonucleotide; AAG chr11 5348962 5348981 5348978 +
gaaggtgagagaatatatga

SEQ ID NO: 22848 - DNA, 20 bp, Artificial Sequence
  Synthetic oligonucleotide; TGG chr11 5348977 5348996 5348993 +
tatgaaagttaacatctgaa

SEQ ID NO: 22849 - DNA, 20 bp, Artificial Sequence
  Synthetic oligonucleotide; GGG chr11 5348978 5348997 5348994 +
atgaaagttaacatctgaat

SEQ ID NO: 22850 - DNA, 20 bp, Artificial Sequence
  Synthetic oligonucleotide; GAG chr11 5348989 5349008 5349005 +
catctgaatgggctcctgct

SEQ ID NO: 22851 - DNA, 20 bp, Artificial Sequence
  Synthetic oligonucleotide; AGG chr11 5348990 5349009 5349006 +
atctgaatgggctcctgctg

SEQ ID NO: 22852 - DNA, 20 bp, Artificial Sequence
  Synthetic oligonucleotide; TAG chr11 5349001 5349020 5349017 +
ctcctgctgaggtgtctgca

SEQ ID NO: 22853 - DNA, 20 bp, Artificial Sequence
  Synthetic oligonucleotide; GAG chr11 5349003 5349022 5349019 +
cctgctgaggtgtctgcata

SEQ ID NO: 22854 - DNA, 20 bp, Artificial Sequence
  Synthetic oligonucleotide; CAG chr11 5349010 5349029 5349026 +
aggtgtctgcatagagccat

SEQ ID NO: 22855 - DNA, 20 bp, Artificial Sequence
  Synthetic oligonucleotide; CGG chr11 5349019 5349038 5349035 +
catagagccatcagtttatg

SEQ ID NO: 22856 - DNA, 20 bp, Artificial Sequence
  Synthetic oligonucleotide; CAG chr11 5349022 5349041 5349038 +
agagccatcagtttatgcgg

SEQ ID NO: 22857 - DNA, 20 bp, Artificial Sequence
  Synthetic oligonucleotide; GAG chr11 5349024 5349043 5349040 +
agccatcagtttatgcggca

SEQ ID NO: 22858 - DNA, 20 bp, Artificial Sequence
  Synthetic oligonucleotide; GAG chr11 5349030 5349049 5349046 +
cagtttatgcggcagagttt

SEQ ID NO: 22859 - DNA, 20 bp, Artificial Sequence
  Synthetic oligonucleotide; GAG chr11 5349038 5349057 5349054 +
gcggcagagtttgagacttt

SEQ ID NO: 22860 - DNA, 20 bp, Artificial Sequence
  Synthetic oligonucleotide; TAG chr11 5349044 5349063 5349060 +
gagtttgagactttgagaat

SEQ ID NO: 22861 - DNA, 20 bp, Artificial Sequence
  Synthetic oligonucleotide; AAG chr11 5349067 5349086 5349083 +
tttctcattaataaaaactc

SEQ ID NO: 22862 - DNA, 20 bp, Artificial Sequence
  Synthetic oligonucleotide; CAG chr11 5349082 5349101 5349098 +
aactcaagtctattctatga

SEQ ID NO: 22863 - DNA, 20 bp, Artificial Sequence
  Synthetic oligonucleotide; GAG chr11 5349084 5349103 5349100 +
ctcaagtctattctatgaca

SEQ ID NO: 22864 - DNA, 20 bp, Artificial Sequence
  Synthetic oligonucleotide; TGG chr11 5349091 5349110 5349107 +
ctattctatgacagagaccc

SEQ ID NO: 22865 - DNA, 20 bp, Artificial Sequence
  Synthetic oligonucleotide; AAG chr11 5349094 5349113 5349110 +
ttctatgacagagaccctgg

SEQ ID NO: 22866 - DNA, 20 bp, Artificial Sequence
  Synthetic oligonucleotide; GAG chr11 5349096 5349115 5349112 +
ctatgacagagaccctggaa

SEQ ID NO: 22867 - DNA, 20 bp, Artificial Sequence
  Synthetic oligonucleotide; AGG chr11 5349097 5349116 5349113 +
tatgacagagaccctggaag

SEQ ID NO: 22868 - DNA, 20 bp, Artificial Sequence
  Synthetic oligonucleotide; GGG chr11 5349098 5349117 5349114 +
atgacagagaccctggaaga

SEQ ID NO: 22869 - DNA, 20 bp, Artificial Sequence
  Synthetic oligonucleotide; TGG chr11 5349105 5349124 5349121 +
agaccctggaagagggtgaa

SEQ ID NO: 22870 - DNA, 20 bp, Artificial Sequence
  Synthetic oligonucleotide; CAG chr11 5349111 5349130 5349127 +
tggaagagggtgaatggctg

SEQ ID NO: 22871 - DNA, 20 bp, Artificial Sequence
  Synthetic oligonucleotide; AGG chr11 5349112 5349131 5349128 +
ggaagagggtgaatggctgc

SEQ ID NO: 22872 - DNA, 20 bp, Artificial Sequence
  Synthetic oligonucleotide; GGG chr11 5349113 5349132 5349129 +
gaagagggtgaatggctgca

SEQ ID NO: 22873 - DNA, 20 bp, Artificial Sequence
  Synthetic oligonucleotide; GAG chr11 5349118 5349137 5349134 +
gggtgaatggctgcagggat

SEQ ID NO: 22874 - DNA, 20 bp, Artificial Sequence
  Synthetic oligonucleotide; AGG chr11 5349119 5349138 5349135 +
ggtgaatggctgcagggatg

SEQ ID NO: 22875 - DNA, 20 bp, Artificial Sequence
  Synthetic oligonucleotide; AAG chr11 5349124 5349143 5349140 +
atggctgcagggatgaggca

SEQ ID NO: 22876 - DNA, 20 bp, Artificial Sequence
  Synthetic oligonucleotide; AGG chr11 5349125 5349144 5349141 +
tggctgcagggatgaggcaa

SEQ ID NO: 22877 - DNA, 20 bp, Artificial Sequence
  Synthetic oligonucleotide; TAG chr11 5349131 5349150 5349147 +
cagggatgaggcaaaggttt

SEQ ID NO: 22878 - DNA, 20 bp, Artificial Sequence
  Synthetic oligonucleotide; CAG chr11 5349157 5349176 5349173 +
tttatcccctctgaaactca

SEQ ID NO: 22879 - DNA, 20 bp, Artificial Sequence
  Synthetic oligonucleotide; AAG chr11 5349179 5349198 5349195 +
gatcatctcatataccacaa

SEQ ID NO: 22880 - DNA, 20 bp, Artificial Sequence
  Synthetic oligonucleotide; GAG chr11 5349187 5349206 5349203 +
catataccacaaaagcaact

SEQ ID NO: 22881 - DNA, 20 bp, Artificial Sequence
  Synthetic oligonucleotide; AAG chr11 5349196 5349215 5349212 +
caaaagcaactgagtgaatc

SEQ ID NO: 22882 - DNA, 20 bp, Artificial Sequence
  Synthetic oligonucleotide; AAG chr11 5349202 5349221 5349218 +
caactgagtgaatcaagtga

SEQ ID NO: 22883 - DNA, 20 bp, Artificial Sequence
  Synthetic oligonucleotide; CAG chr11 5349209 5349228 5349225 +
gtgaatcaagtgaaagcact

SEQ ID NO: 22884 - DNA, 20 bp, Artificial Sequence
  Synthetic oligonucleotide; CAG chr11 5349227 5349246 5349243 +
ctcagttttcaatatgaaaa

SEQ ID NO: 22885 - DNA, 20 bp, Artificial Sequence
  Synthetic oligonucleotide; AAG chr11 5349232 5349251 5349248 +
ttttcaatatgaaaacagac

SEQ ID NO: 22886 - DNA, 20 bp, Artificial Sequence
  Synthetic oligonucleotide; CAG chr11 5349240 5349259 5349256 +
atgaaaacagacaagacaaa

SEQ ID NO: 22887 - DNA, 20 bp, Artificial Sequence
  Synthetic oligonucleotide; AAG chr11 5349250 5349269 5349266 +
acaagacaaacagctatttt

SEQ ID NO: 22888 - DNA, 20 bp, Artificial Sequence
  Synthetic oligonucleotide; AGG chr11 5349251 5349270 5349267 +
caagacaaacagctatttta

SEQ ID NO: 22889 - DNA, 20 bp, Artificial Sequence
  Synthetic oligonucleotide; GAG chr11 5349270 5349289 5349286 +
aaggattcttcccaaaaaat

SEQ ID NO: 22890 - DNA, 20 bp, Artificial Sequence
  Synthetic oligonucleotide; AGG chr11 5349271 5349290 5349287 +
aggattcttcccaaaaaatg

SEQ ID NO: 22891 - DNA, 20 bp, Artificial Sequence
  Synthetic oligonucleotide; CAG chr11 5349288 5349307 5349304 +
atgaggtgtatataatgccc

SEQ ID NO: 22892 - DNA, 20 bp, Artificial Sequence
  Synthetic oligonucleotide; CGG chr11 5349307 5349326 5349323 +
ccagtccaatacttgacaca

SEQ ID NO: 22893 - DNA, 20 bp, Artificial Sequence
  Synthetic oligonucleotide; TAG chr11 5349310 5349329 5349326 +
gtccaatacttgacacacgg

SEQ ID NO: 22894 - DNA, 20 bp, Artificial Sequence
  Synthetic oligonucleotide; CAG chr11 5349349 5349368 5349365 +
tgttccatacatttgtttct

SEQ ID NO: 22895 - DNA, 20 bp, Artificial Sequence
  Synthetic oligonucleotide; TGG chr11 5349368 5349387 5349384 +
tcagctttattttccctatc

SEQ ID NO: 22896 - DNA, 20 bp, Artificial Sequence
  Synthetic oligonucleotide; TAG chr11 5349417 5349436 5349433 +
ttatcaattatatgtttatt

SEQ ID NO: 22897 - DNA, 20 bp, Artificial Sequence
  Synthetic oligonucleotide; TAG chr11 5349420 5349439 5349436 +
tcaattatatgtttatttag

SEQ ID NO: 22898 - DNA, 20 bp, Artificial Sequence
  Synthetic oligonucleotide; TAG chr11 5349441 5349460 5349457 +
agtaatataacacaattaac

SEQ ID NO: 22899 - DNA, 20 bp, Artificial Sequence
  Synthetic oligonucleotide; CAG chr11 5349473 5349492 5349489 +
ctgtattatcttttccctcc

SEQ ID NO: 22900 - DNA, 20 bp, Artificial Sequence
  Synthetic oligonucleotide; TAG chr11 5349483 5349502 5349499 +
ttttccctcccagctttatt

SEQ ID NO: 22901 - DNA, 20 bp, Artificial Sequence
  Synthetic oligonucleotide; AGG chr11 5349484 5349503 5349500 +
tttccctcccagctttattt

SEQ ID NO: 22902 - DNA, 20 bp, Artificial Sequence
  Synthetic oligonucleotide; AAG chr11 5349504 5349523 5349520 +
aggtatatttaaaatttgct

SEQ ID NO: 22903 - DNA, 20 bp, Artificial Sequence
  Synthetic oligonucleotide; AAG chr11 5349508 5349527 5349524 +
atatttaaaatttgctaaga

SEQ ID NO: 22904 - DNA, 20 bp, Artificial Sequence
  Synthetic oligonucleotide; CAG chr11 5349511 5349530 5349527 +
tttaaaatttgctaagaaag

SEQ ID NO: 22905 - DNA, 20 bp, Artificial Sequence
  Synthetic oligonucleotide; AAG chr11 5349545 5349564 5349561 +
ttttactaccaaaaaaatta

SEQ ID NO: 22906 - DNA, 20 bp, Artificial Sequence
  Synthetic oligonucleotide; GAG chr11 5349557 5349576 5349573 +
aaaaattaaagttattatgt

SEQ ID NO: 22907 - DNA, 20 bp, Artificial Sequence
  Synthetic oligonucleotide; AGG chr11 5349558 5349577 5349574 +
aaaattaaagttattatgtg

SEQ ID NO: 22908 - DNA, 20 bp, Artificial Sequence
  Synthetic oligonucleotide; TAG chr11 5349564 5349583 5349580 +
aaagttattatgtgaggtga

SEQ ID NO: 22909 - DNA, 20 bp, Artificial Sequence
  Synthetic oligonucleotide; TAG chr11 5349577 5349596 5349593 +
gaggtgatagatatattaat

SEQ ID NO: 22910 - DNA, 20 bp, Artificial Sequence
  Synthetic oligonucleotide; TGG chr11 5349588 5349607 5349604 +
tatattaattagtttgatta

SEQ ID NO: 22911 - DNA, 20 bp, Artificial Sequence
  Synthetic oligonucleotide; AAG chr11 5349627 5349646 5349643 +
aatacctataataaaacaat

SEQ ID NO: 22912 - DNA, 20 bp, Artificial Sequence
  Synthetic oligonucleotide; AAG chr11 5349683 5349702 5349699 +
ctgcttctttaatcctgcat

SEQ ID NO: 22913 - DNA, 20 bp, Artificial Sequence
  Synthetic oligonucleotide; GAG chr11 5349688 5349707 5349704 +
tctttaatcctgcataagct

SEQ ID NO: 22914 - DNA, 20 bp, Artificial Sequence
  Synthetic oligonucleotide; TGG chr11 5349710 5349729 5349726 +
gtattgtctgaacctctcac

SEQ ID NO: 22915 - DNA, 20 bp, Artificial Sequence
  Synthetic oligonucleotide; CAG chr11 5349713 5349732 5349729 +
ttgtctgaacctctcactgg

SEQ ID NO: 22916 - DNA, 20 bp, Artificial Sequence
  Synthetic oligonucleotide; AGG chr11 5349714 5349733 5349730 +
tgtctgaacctctcactggc

SEQ ID NO: 22917 - DNA, 20 bp, Artificial Sequence
  Synthetic oligonucleotide; CAG chr11 5349717 5349736 5349733 +
ctgaacctctcactggcagg

SEQ ID NO: 22918 - DNA, 20 bp, Artificial Sequence
  Synthetic oligonucleotide; GAG chr11 5349723 5349742 5349739 +
ctctcactggcaggcagatt

SEQ ID NO: 22919 - DNA, 20 bp, Artificial Sequence
  Synthetic oligonucleotide; GAG chr11 5349753 5349772 5349769 +
acctccttttctcacttttt

SEQ ID NO: 22920 - DNA, 20 bp, Artificial Sequence
  Synthetic oligonucleotide; AGG chr11 5349754 5349773 5349770 +
cctccttttctcactttttg

SEQ ID NO: 22921 - DNA, 20 bp, Artificial Sequence
  Synthetic oligonucleotide; CAG chr11 5349758 5349777 5349774 +
cttttctcactttttgagga

SEQ ID NO: 22922 - DNA, 20 bp, Artificial Sequence
  Synthetic oligonucleotide; GAG chr11 5349760 5349779 5349776 +
tttctcactttttgaggaca

SEQ ID NO: 22923 - DNA, 20 bp, Artificial Sequence
  Synthetic oligonucleotide; CAG chr11 5349785 5349804 5349801 +
gctttcccctctacttccct

SEQ ID NO: 22924 - DNA, 20 bp, Artificial Sequence
  Synthetic oligonucleotide; CAG chr11 5349799 5349818 5349815 +
ttccctcagtcccaatgccc

SEQ ID NO: 22925 - DNA, 20 bp, Artificial Sequence
  Synthetic oligonucleotide; AGG chr11 5349800 5349819 5349816 +
tccctcagtcccaatgcccc

SEQ ID NO: 22926 - DNA, 20 bp, Artificial Sequence
  Synthetic oligonucleotide; TAG chr11 5349817 5349836 5349833 +
cccaggctcaacgttacttt

SEQ ID NO: 22927 - DNA, 20 bp, Artificial Sequence
  Synthetic oligonucleotide; CAG chr11 5349826 5349845 5349842 +
aacgttacttttagctatgt

SEQ ID NO: 22928 - DNA, 20 bp, Artificial Sequence
  Synthetic oligonucleotide; AAG chr11 5349829 5349848 5349845 +
gttacttttagctatgtcag

SEQ ID NO: 22929 - DNA, 20 bp, Artificial Sequence
  Synthetic oligonucleotide; TGG chr11 5349841 5349860 5349857 +
tatgtcagaagttcccacat

SEQ ID NO: 22930 - DNA, 20 bp, Artificial Sequence
  Synthetic oligonucleotide; CAG chr11 5349877 5349896 5349893 +
tctcctttccctttcccacc

SEQ ID NO: 22931 - DNA, 20 bp, Artificial Sequence
  Synthetic oligonucleotide; TAG chr11 5349904 5349923 5349920 +
atcacattttatctgctgat

SEQ ID NO: 22932 - DNA, 20 bp, Artificial Sequence
  Synthetic oligonucleotide; GAG chr11 5349906 5349925 5349922 +
cacattttatctgctgatta

SEQ ID NO: 22933 - DNA, 20 bp, Artificial Sequence
  Synthetic oligonucleotide; TAG chr11 5349915 5349934 5349931 +
tctgctgattagagaaacta

SEQ ID NO: 22934 - DNA, 20 bp, Artificial Sequence
  Synthetic oligonucleotide; AAG chr11 5349935 5349954 5349951 +
tagtttaatatctttattta

SEQ ID NO: 22935 - DNA, 20 bp, Artificial Sequence
  Synthetic oligonucleotide; CAG chr11 5349945 5349964 5349961 +
tctttatttaaagtcaaaca

SEQ ID NO: 22936 - DNA, 20 bp, Artificial Sequence
  Synthetic oligonucleotide; AGG chr11 5349946 5349965 5349962 +
ctttatttaaagtcaaacac

SEQ ID NO: 22937 - DNA, 20 bp, Artificial Sequence
  Synthetic oligonucleotide; AAG chr11 5349986 5350005 5350002 +
atcatcttatatctgttccc

SEQ ID NO: 22938 - DNA, 20 bp, Artificial Sequence
  Synthetic oligonucleotide; AGG chr11 5349987 5350006 5350003 +
tcatcttatatctgttccca

SEQ ID NO: 22939 - DNA, 20 bp, Artificial Sequence
  Synthetic oligonucleotide; CAG chr11 5349996 5350015 5350012 +
atctgttcccaaggcttcca

SEQ ID NO: 22940 - DNA, 20 bp, Artificial Sequence
  Synthetic oligonucleotide; AAG chr11 5350004 5350023 5350020 +
ccaaggcttccacagaaaaa

SEQ ID NO: 22941 - DNA, 20 bp, Artificial Sequence
  Synthetic oligonucleotide; AGG chr11 5350005 5350024 5350021 +
caaggcttccacagaaaaaa

SEQ ID NO: 22942 - DNA, 20 bp, Artificial Sequence
  Synthetic oligonucleotide; TGG chr11 5350027 5350046 5350043 +
gaaatcatttgacacacctc

SEQ ID NO: 22943 - DNA, 20 bp, Artificial Sequence
  Synthetic oligonucleotide; GGG chr11 5350028 5350047 5350044 +
aaatcatttgacacacctct

SEQ ID NO: 22944 - DNA, 20 bp, Artificial Sequence
  Synthetic oligonucleotide; TAG chr11 5350055 5350074 5350071 +
taatcctgacatgtactcac

SEQ ID NO: 22945 - DNA, 20 bp, Artificial Sequence
  Synthetic oligonucleotide; GAG chr11 5350057 5350076 5350073 +
atcctgacatgtactcacta

SEQ ID NO: 22946 - DNA, 20 bp, Artificial Sequence
  Synthetic oligonucleotide; AAG chr11 5350061 5350080 5350077 +
tgacatgtactcactagaga

SEQ ID NO: 22947 - DNA, 20 bp, Artificial Sequence
  Synthetic oligonucleotide; GAG chr11 5350063 5350082 5350079 +
acatgtactcactagagaaa

SEQ ID NO: 22948 - DNA, 20 bp, Artificial Sequence
  Synthetic oligonucleotide; AAG chr11 5350067 5350086 5350083 +
gtactcactagagaaagaga

SEQ ID NO: 22949 - DNA, 20 bp, Artificial Sequence
  Synthetic oligonucleotide; AGG chr11 5350068 5350087 5350084 +
tactcactagagaaagagaa

SEQ ID NO: 22950 - DNA, 20 bp, Artificial Sequence
  Synthetic oligonucleotide; GAG chr11 5350070 5350089 5350086 +
ctcactagagaaagagaaag

SEQ ID NO: 22951 - DNA, 20 bp, Artificial Sequence
  Synthetic oligonucleotide; AGG chr11 5350071 5350090 5350087 +
tcactagagaaagagaaagg

SEQ ID NO: 22952 - DNA, 20 bp, Artificial Sequence
  Synthetic oligonucleotide; AAG chr11 5350155 5350174 5350171 +
atttccccttactttgtgtc

SEQ ID NO: 22953 - DNA, 20 bp, Artificial Sequence
  Synthetic oligonucleotide; GAG chr11 5350157 5350176 5350173 +
ttccccttactttgtgtcaa

SEQ ID NO: 22954 - DNA, 20 bp, Artificial Sequence
  Synthetic oligonucleotide; GAG chr11 5350167 5350186 5350183 +
tttgtgtcaagagaatgact

SEQ ID NO: 22955 - DNA, 20 bp, Artificial Sequence
  Synthetic oligonucleotide; AAG chr11 5350170 5350189 5350186 +
gtgtcaagagaatgactgag

SEQ ID NO: 22956 - DNA, 20 bp, Artificial Sequence
  Synthetic oligonucleotide; CAG chr11 5350174 5350193 5350190 +
caagagaatgactgagaaga

SEQ ID NO: 22957 - DNA, 20 bp, Artificial Sequence
  Synthetic oligonucleotide; TAG chr11 5350184 5350203 5350200 +
actgagaagacagaaatcac

SEQ ID NO: 22958 - DNA, 20 bp, Artificial Sequence
  Synthetic oligonucleotide; TAG chr11 5350187 5350206 5350203 +
gagaagacagaaatcactag

SEQ ID NO: 22959 - DNA, 20 bp, Artificial Sequence
  Synthetic oligonucleotide; CAG chr11 5350196 5350215 5350212 +
gaaatcactagtagtcttta

SEQ ID NO: 22960 - DNA, 20 bp, Artificial Sequence
  Synthetic oligonucleotide; AGG chr11 5350197 5350216 5350213 +
aaatcactagtagtctttac

SEQ ID NO: 22961 - DNA, 20 bp, Artificial Sequence
  Synthetic oligonucleotide; AAG chr11 5350217 5350236 5350233 +
aggttatgtaaccaaatctc

SEQ ID NO: 22962 - DNA, 20 bp, Artificial Sequence
  Synthetic oligonucleotide; AAG chr11 5350236 5350255 5350252 +
caagattaaattactttccc

SEQ ID NO: 22963 - DNA, 20 bp, Artificial Sequence
  Synthetic oligonucleotide; TAG chr11 5350250 5350269 5350266 +
tttcccaagatcattattgt

SEQ ID NO: 22964 - DNA, 20 bp, Artificial Sequence
  Synthetic oligonucleotide; AAG chr11 5350254 5350273 5350270 +
ccaagatcattattgttaga

SEQ ID NO: 22965 - DNA, 20 bp, Artificial Sequence
  Synthetic oligonucleotide; GAG chr11 5350256 5350275 5350272 +
aagatcattattgttagaaa

SEQ ID NO: 22966 - DNA, 20 bp, Artificial Sequence
  Synthetic oligonucleotide; CAG chr11 5350259 5350278 5350275 +
atcattattgttagaaagag

SEQ ID NO: 22967 - DNA, 20 bp, Artificial Sequence
  Synthetic oligonucleotide; GAG chr11 5350261 5350280 5350277 +
cattattgttagaaagagca

SEQ ID NO: 22968 - DNA, 20 bp, Artificial Sequence
  Synthetic oligonucleotide; AAG chr11 5350295 5350314 5350311 +
acaaattcttctgaaaatga

SEQ ID NO: 22969 - DNA, 20 bp, Artificial Sequence
  Synthetic oligonucleotide; CAG chr11 5350300 5350319 5350316 +
ttcttctgaaaatgaaagtc

SEQ ID NO: 22970 - DNA, 20 bp, Artificial Sequence
  Synthetic oligonucleotide; TGG chr11 5350309 5350328 5350325 +
aaatgaaagtccagtaatct

SEQ ID NO: 22971 - DNA, 20 bp, Artificial Sequence
  Synthetic oligonucleotide; TGG chr11 5350326 5350345 5350342 +
tcttggatgcattcttttca

SEQ ID NO: 22972 - DNA, 20 bp, Artificial Sequence
  Synthetic oligonucleotide; CAG chr11 5350330 5350349 5350346 +
ggatgcattcttttcatgga

SEQ ID NO: 22973 - DNA, 20 bp, Artificial Sequence
  Synthetic oligonucleotide; AAG chr11 5350334 5350353 5350350 +
gcattcttttcatggacaga

SEQ ID NO: 22974 - DNA, 20 bp, Artificial Sequence
  Synthetic oligonucleotide; GAG chr11 5350336 5350355 5350352 +
attcttttcatggacagaaa

SEQ ID NO: 22975 - DNA, 20 bp, Artificial Sequence
  Synthetic oligonucleotide; AGG chr11 5350337 5350356 5350353 +
ttcttttcatggacagaaag

SEQ ID NO: 22976 - DNA, 20 bp, Artificial Sequence
  Synthetic oligonucleotide; TAG chr11 5350383 5350402 5350399 +
acatcaatatgctctttcaa

SEQ ID NO: 22977 - DNA, 20 bp, Artificial Sequence
  Synthetic oligonucleotide; GAG chr11 5350391 5350410 5350407 +
atgctctttcaatagtatat

SEQ ID NO: 22978 - DNA, 20 bp, Artificial Sequence
  Synthetic oligonucleotide; TAG chr11 5350399 5350418 5350415 +
tcaatagtatatgagatgta

SEQ ID NO: 22979 - DNA, 20 bp, Artificial Sequence
  Synthetic oligonucleotide; AAG chr11 5350416 5350435 5350432 +
gtatagtccaaaccaaccat

SEQ ID NO: 22980 - DNA, 20 bp, Artificial Sequence
  Synthetic oligonucleotide; GAG chr11 5350418 5350437 5350434 +
atagtccaaaccaaccataa

SEQ ID NO: 22981 - DNA, 20 bp, Artificial Sequence
  Synthetic oligonucleotide; AAG chr11 5350421 5350440 5350437 +
gtccaaaccaaccataagag

SEQ ID NO: 22982 - DNA, 20 bp, Artificial Sequence
  Synthetic oligonucleotide; AGG chr11 5350422 5350441 5350438 +
tccaaaccaaccataagaga

SEQ ID NO: 22983 - DNA, 20 bp, Artificial Sequence
  Synthetic oligonucleotide; TGG chr11 5350425 5350444 5350441 +
aaaccaaccataagagaagg

SEQ ID NO: 22984 - DNA, 20 bp, Artificial Sequence
  Synthetic oligonucleotide; GGG chr11 5350426 5350445 5350442 +
aaccaaccataagagaaggt

SEQ ID NO: 22985 - DNA, 20 bp, Artificial Sequence
  Synthetic oligonucleotide; TGG chr11 5350440 5350459 5350456 +
gaaggtgggcctattttctc

SEQ ID NO: 22986 - DNA, 20 bp, Artificial Sequence
  Synthetic oligonucleotide; CAG chr11 5350475 5350494 5350491 +
acacacaatttatgtattct

SEQ ID NO: 22987 - DNA, 20 bp, Artificial Sequence
  Synthetic oligonucleotide; GAG chr11 5350477 5350496 5350493 +
acacaatttatgtattctca

SEQ ID NO: 22988 - DNA, 20 bp, Artificial Sequence
  Synthetic oligonucleotide; AGG chr11 5350478 5350497 5350494 +
cacaatttatgtattctcag

SEQ ID NO: 22989 - DNA, 20 bp, Artificial Sequence
  Synthetic oligonucleotide; TGG chr11 5350482 5350501 5350498 +
atttatgtattctcagaggt

SEQ ID NO: 22990 - DNA, 20 bp, Artificial Sequence
  Synthetic oligonucleotide; CAG chr11 5350495 5350514 5350511 +
cagaggttggctgcctgcac

SEQ ID NO: 22991 - DNA, 20 bp, Artificial Sequence
  Synthetic oligonucleotide; TAG chr11 5350507 5350526 5350523 +
gcctgcaccagctgaaatct

SEQ ID NO: 22992 - DNA, 20 bp, Artificial Sequence
  Synthetic oligonucleotide; GAG chr11 5350519 5350538 5350535 +
tgaaatcttagaattctaat

SEQ ID NO: 22993 - DNA, 20 bp, Artificial Sequence
  Synthetic oligonucleotide; CAG chr11 5350525 5350544 5350541 +
cttagaattctaatgagtca

SEQ ID NO: 22994 - DNA, 20 bp, Artificial Sequence
  Synthetic oligonucleotide; GAG chr11 5350527 5350546 5350543 +
tagaattctaatgagtcaca

SEQ ID NO: 22995 - DNA, 20 bp, Artificial Sequence
  Synthetic oligonucleotide; CAG chr11 5350555 5350574 5350571 +
tcacttttgtcaaatcccat

SEQ ID NO: 22996 - DNA, 20 bp, Artificial Sequence
  Synthetic oligonucleotide; TAG chr11 5350564 5350583 5350580 +
tcaaatcccatcagattcca

SEQ ID NO: 22997 - DNA, 20 bp, Artificial Sequence
  Synthetic oligonucleotide; AAG chr11 5350628 5350647 5350644 +
atttttatttttgcatcacc

SEQ ID NO: 22998 - DNA, 20 bp, Artificial Sequence
  Synthetic oligonucleotide; TAG chr11 5350631 5350650 5350647 +
tttatttttgcatcaccaag

SEQ ID NO: 22999 - DNA, 20 bp, Artificial Sequence
  Synthetic oligonucleotide; AGG chr11 5350632 5350651 5350648 +
ttatttttgcatcaccaagt

SEQ ID NO: 23000 - DNA, 20 bp, Artificial Sequence
  Synthetic oligonucleotide; CAG chr11 5350645 5350664 5350661 +
accaagtaggtgatatgcaa

SEQ ID NO: 23001 - DNA, 20 bp, Artificial Sequence
  Synthetic oligonucleotide; TAG chr11 5350648 5350667 5350664 +
aagtaggtgatatgcaacag

SEQ ID NO: 23002 - DNA, 20 bp, Artificial Sequence
  Synthetic oligonucleotide; TGG chr11 5350653 5350672 5350669 +
ggtgatatgcaacagtagtt

SEQ ID NO: 23003 - DNA, 20 bp, Artificial Sequence
  Synthetic oligonucleotide; TAG chr11 5350669 5350688 5350685 +
agtttggtgctattatcaat

SEQ ID NO: 23004 - DNA, 20 bp, Artificial Sequence
  Synthetic oligonucleotide; AAG chr11 5350681 5350700 5350697 +
ttatcaattagtgccttcaa

SEQ ID NO: 23005 - DNA, 20 bp, Artificial Sequence
  Synthetic oligonucleotide; AAG chr11 5350750 5350769 5350766 +
atgaaaatttgaattctttg

SEQ ID NO: 23006 - DNA, 20 bp, Artificial Sequence
  Synthetic oligonucleotide; CAG chr11 5350753 5350772 5350769 +
aaaatttgaattctttgaag

SEQ ID NO: 23007 - DNA, 20 bp, Artificial Sequence
  Synthetic oligonucleotide; TAG chr11 5350768 5350787 5350784 +
tgaagcagtgtatcaataac

SEQ ID NO: 23008 - DNA, 20 bp, Artificial Sequence
  Synthetic oligonucleotide; AGG chr11 5350769 5350788 5350785 +
gaagcagtgtatcaataact

SEQ ID NO: 23009 - DNA, 20 bp, Artificial Sequence
  Synthetic oligonucleotide; GGG chr11 5350770 5350789 5350786 +
aagcagtgtatcaataacta

SEQ ID NO: 23010 - DNA, 20 bp, Artificial Sequence
  Synthetic oligonucleotide; AAG chr11 5350778 5350797 5350794 +
tatcaataactagggttata

SEQ ID NO: 23011 - DNA, 20 bp, Artificial Sequence
  Synthetic oligonucleotide; TGG chr11 5350782 5350801 5350798 +
aataactagggttataaagc

SEQ ID NO: 23012 - DNA, 20 bp, Artificial Sequence
  Synthetic oligonucleotide; GGG chr11 5350783 5350802 5350799 +
ataactagggttataaagct

SEQ ID NO: 23013 - DNA, 20 bp, Artificial Sequence
  Synthetic oligonucleotide; TAG chr11 5350791 5350810 5350807 +
ggttataaagctgggcaact

SEQ ID NO: 23014 - DNA, 20 bp, Artificial Sequence
  Synthetic oligonucleotide; GAG chr11 5350793 5350812 5350809 +
ttataaagctgggcaactta

SEQ ID NO: 23015 - DNA, 20 bp, Artificial Sequence
  Synthetic oligonucleotide; TGG chr11 5350808 5350827 5350824 +
acttagagttctatgtgctt

SEQ ID NO: 23016 - DNA, 20 bp, Artificial Sequence
  Synthetic oligonucleotide; CAG chr11 5350820 5350839 5350836 +
atgtgctttggaaacacaca

SEQ ID NO: 23017 - DNA, 20 bp, Artificial Sequence
  Synthetic oligonucleotide; AGG chr11 5350821 5350840 5350837 +
tgtgctttggaaacacacac

SEQ ID NO: 23018 - DNA, 20 bp, Artificial Sequence
  Synthetic oligonucleotide; AAG chr11 5350825 5350844 5350841 +
ctttggaaacacacacaggt

SEQ ID NO: 23019 - DNA, 20 bp, Artificial Sequence
  Synthetic oligonucleotide; AAG chr11 5350858 5350877 5350874 +
gtcattttctaactacccaa

SEQ ID NO: 23020 - DNA, 20 bp, Artificial Sequence
  Synthetic oligonucleotide; TGG chr11 5350865 5350884 5350881 +
tctaactacccaaaagtctc

SEQ ID NO: 23021 - DNA, 20 bp, Artificial Sequence
  Synthetic oligonucleotide; GAG chr11 5350867 5350886 5350883 +
taactacccaaaagtctctg

SEQ ID NO: 23022 - DNA, 20 bp, Artificial Sequence
  Synthetic oligonucleotide; CAG chr11 5350893 5350912 5350909 +
catcaattgaattttccctc

SEQ ID NO: 23023 - DNA, 20 bp, Artificial Sequence
  Synthetic oligonucleotide; AGG chr11 5350894 5350913 5350910 +
atcaattgaattttccctcc

SEQ ID NO: 23024 - DNA, 20 bp, Artificial Sequence
  Synthetic oligonucleotide; AAG chr11 5350904 5350923 5350920 +
ttttccctccaggaatattg

SEQ ID NO: 23025 - DNA, 20 bp, Artificial Sequence
  Synthetic oligonucleotide; AAG chr11 5350909 5350928 5350925 +
cctccaggaatattgaagaa

SEQ ID NO: 23026 - DNA, 20 bp, Artificial Sequence
  Synthetic oligonucleotide; TAG chr11 5351007 5351026 5351023 +
ctttatatctgcttttccaa

SEQ ID NO: 23027 - DNA, 20 bp, Artificial Sequence
  Synthetic oligonucleotide; TAG chr11 5351014 5351033 5351030 +
tctgcttttccaatagtgct

SEQ ID NO: 23028 - DNA, 20 bp, Artificial Sequence
  Synthetic oligonucleotide; TAG chr11 5351039 5351058 5351055 +
ccatttttctactgatcttt

SEQ ID NO: 23029 - DNA, 20 bp, Artificial Sequence
  Synthetic oligonucleotide; AGG chr11 5351040 5351059 5351056 +
catttttctactgatctttt

SEQ ID NO: 23030 - DNA, 20 bp, Artificial Sequence
  Synthetic oligonucleotide; TAG chr11 5351050 5351069 5351066 +
ctgatcttttaggtctcaca

SEQ ID NO: 23031 - DNA, 20 bp, Artificial Sequence
  Synthetic oligonucleotide; TGG chr11 5351055 5351074 5351071 +
cttttaggtctcacatagcc

SEQ ID NO: 23032 - DNA, 20 bp, Artificial Sequence
  Synthetic oligonucleotide; GGG chr11 5351056 5351075 5351072 +
ttttaggtctcacatagcct

SEQ ID NO: 23033 - DNA, 20 bp, Artificial Sequence
  Synthetic oligonucleotide; CAG chr11 5351088 5351107 5351104 +
catccaccctataataccac

SEQ ID NO: 23034 - DNA, 20 bp, Artificial Sequence
  Synthetic oligonucleotide; CAG chr11 5351092 5351111 5351108 +
caccctataataccaccagt

SEQ ID NO: 23035 - DNA, 20 bp, Artificial Sequence
  Synthetic oligonucleotide; AGG chr11 5351093 5351112 5351109 +
accctataataccaccagtc

SEQ ID NO: 23036 - DNA, 20 bp, Artificial Sequence
  Synthetic oligonucleotide; AAG chr11 5351099 5351118 5351115 +
taataccaccagtcaggatg

SEQ ID NO: 23037 - DNA, 20 bp, Artificial Sequence
  Synthetic oligonucleotide; GAG chr11 5351101 5351120 5351117 +
ataccaccagtcaggatgaa

SEQ ID NO: 23038 - DNA, 20 bp, Artificial Sequence
  Synthetic oligonucleotide; AAG chr11 5351113 5351132 5351129 +
aggatgaagagcaccatgaa

SEQ ID NO: 23039 - DNA, 20 bp, Artificial Sequence
  Synthetic oligonucleotide; AAG chr11 5351124 5351143 5351140 +
caccatgaaaagtgacctat

SEQ ID NO: 23040 - DNA, 20 bp, Artificial Sequence
  Synthetic oligonucleotide; CAG chr11 5351130 5351149 5351146 +
gaaaagtgacctataagttt

SEQ ID NO: 23041 - DNA, 20 bp, Artificial Sequence
  Synthetic oligonucleotide; AGG chr11 5351131 5351150 5351147 +
aaaagtgacctataagtttc

SEQ ID NO: 23042 - DNA, 20 bp, Artificial Sequence
  Synthetic oligonucleotide; CAG chr11 5351140 5351159 5351156 +
ctataagtttcaggccatta

SEQ ID NO: 23043 - DNA, 20 bp, Artificial Sequence
  Synthetic oligonucleotide; TAG chr11 5351156 5351175 5351172 +
attacagcactattcaaata

SEQ ID NO: 23044 - DNA, 20 bp, Artificial Sequence
  Synthetic oligonucleotide; TGG chr11 5351190 5351209 5351206 +
ttcattttgtttttattttc

SEQ ID NO: 23045 - DNA, 20 bp, Artificial Sequence
  Synthetic oligonucleotide; GGG chr11 5351191 5351210 5351207 +
tcattttgtttttattttct

SEQ ID NO: 23046 - DNA, 20 bp, Artificial Sequence
  Synthetic oligonucleotide; TAG chr11 5351238 5351257 5351254 +
caatgtttattctgcatgaa

SEQ ID NO: 23047 - DNA, 20 bp, Artificial Sequence
  Synthetic oligonucleotide; TAG chr11 5351255 5351274 5351271 +
gaatagctgtatccccaacg

SEQ ID NO: 23048 - DNA, 20 bp, Artificial Sequence
  Synthetic oligonucleotide; TAG chr11 5351275 5351294 5351291 +
tagtatccaataatcttaca

SEQ ID NO: 23049 - DNA, 20 bp, Artificial Sequence
  Synthetic oligonucleotide; GAG chr11 5351277 5351296 5351293 +
gtatccaataatcttacata

SEQ ID NO: 23050 - DNA, 20 bp, Artificial Sequence
  Synthetic oligonucleotide; TAG chr11 5351326 5351345 5351342 +
acattctattttcccatacc

SEQ ID NO: 23051 - DNA, 20 bp, Artificial Sequence
  Synthetic oligonucleotide; AGG chr11 5351327 5351346 5351343 +
cattctattttcccatacct

SEQ ID NO: 23052 - DNA, 20 bp, Artificial Sequence
  Synthetic oligonucleotide; CAG chr11 5351336 5351355 5351352 +
ttcccatacctaggatctcc

SEQ ID NO: 23053 - DNA, 20 bp, Artificial Sequence
  Synthetic oligonucleotide; AGG chr11 5351337 5351356 5351353 +
tcccatacctaggatctccc

SEQ ID NO: 23054 - DNA, 20 bp, Artificial Sequence
  Synthetic oligonucleotide; AAG chr11 5351372 5351391 5351388 +
atcatccttgctgtcactga

SEQ ID NO: 23055 - DNA, 20 bp, Artificial Sequence
  Synthetic oligonucleotide; CAG chr11 5351376 5351395 5351392 +
tccttgctgtcactgaaagt

SEQ ID NO: 23056 - DNA, 20 bp, Artificial Sequence
  Synthetic oligonucleotide; AGG chr11 5351377 5351396 5351393 +
ccttgctgtcactgaaagtc

SEQ ID NO: 23057 - DNA, 20 bp, Artificial Sequence
  Synthetic oligonucleotide; TGG chr11 5351382 5351401 5351398 +
ctgtcactgaaagtcaggac

SEQ ID NO: 23058 - DNA, 20 bp, Artificial Sequence
  Synthetic oligonucleotide; CAG chr11 5351400 5351419 5351416 +
actggtgaacatcttatgaa

SEQ ID NO: 23059 - DNA, 20 bp, Artificial Sequence
  Synthetic oligonucleotide; AGG chr11 5351401 5351420 5351417 +
ctggtgaacatcttatgaac

SEQ ID NO: 23060 - DNA, 20 bp, Artificial Sequence
  Synthetic oligonucleotide; TAG chr11 5351404 5351423 5351420 +
gtgaacatcttatgaacagg

SEQ ID NO: 23061 - DNA, 20 bp, Artificial Sequence
  Synthetic oligonucleotide; AAG chr11 5351414 5351433 5351430 +
tatgaacaggtagaattctc

SEQ ID NO: 23062 - DNA, 20 bp, Artificial Sequence
  Synthetic oligonucleotide; AGG chr11 5351415 5351434 5351431 +
atgaacaggtagaattctca

SEQ ID NO: 23063 - DNA, 20 bp, Artificial Sequence
  Synthetic oligonucleotide; GAG chr11 5351417 5351436 5351433 +
gaacaggtagaattctcaag

SEQ ID NO: 23064 - DNA, 20 bp, Artificial Sequence
  Synthetic oligonucleotide; TGG chr11 5351454 5351473 5351470 +
ctgattactattgctttacc

SEQ ID NO: 23065 - DNA, 20 bp, Artificial Sequence
  Synthetic oligonucleotide; GAG chr11 5351456 5351475 5351472 +
gattactattgctttacctg

SEQ ID NO: 23066 - DNA, 20 bp, Artificial Sequence
  Synthetic oligonucleotide; AAG chr11 5351479 5351498 5351495 +
taaatatttgcctctttgca

SEQ ID NO: 23067 - DNA, 20 bp, Artificial Sequence
  Synthetic oligonucleotide; TGG chr11 5351483 5351502 5351499 +
tatttgcctctttgcaaagc

SEQ ID NO: 23068 - DNA, 20 bp, Artificial Sequence
  Synthetic oligonucleotide; TGG chr11 5351489 5351508 5351505 +
cctctttgcaaagctggcaa

SEQ ID NO: 23069 - DNA, 20 bp, Artificial Sequence
  Synthetic oligonucleotide; GGG chr11 5351490 5351509 5351506 +
ctctttgcaaagctggcaat

SEQ ID NO: 23070 - DNA, 20 bp, Artificial Sequence
  Synthetic oligonucleotide; GGG chr11 5351491 5351510 5351507 +
tctttgcaaagctggcaatg

SEQ ID NO: 23071 - DNA, 20 bp, Artificial Sequence
  Synthetic oligonucleotide; AAG chr11 5351500 5351519 5351516 +
agctggcaatggggctcaat

SEQ ID NO: 23072 - DNA, 20 bp, Artificial Sequence
  Synthetic oligonucleotide; CAG chr11 5351518 5351537 5351534 +
ataagtctgcttccaccttc

SEQ ID NO: 23073 - DNA, 20 bp, Artificial Sequence
  Synthetic oligonucleotide; TGG chr11 5351526 5351545 5351542 +
gcttccaccttccagcttac

SEQ ID NO: 23074 - DNA, 20 bp, Artificial Sequence
  Synthetic oligonucleotide; CAG chr11 5351534 5351553 5351550 +
cttccagcttactggcttcc

SEQ ID NO: 23075 - DNA, 20 bp, Artificial Sequence
  Synthetic oligonucleotide; AGG chr11 5351535 5351554 5351551 +
ttccagcttactggcttccc

SEQ ID NO: 23076 - DNA, 20 bp, Artificial Sequence
  Synthetic oligonucleotide; TGG chr11 5351540 5351559 5351556 +
gcttactggcttcccaggca

SEQ ID NO: 23077 - DNA, 20 bp, Artificial Sequence
  Synthetic oligonucleotide; GAG chr11 5351542 5351561 5351558 +
ttactggcttcccaggcatg

SEQ ID NO: 23078 - DNA, 20 bp, Artificial Sequence
  Synthetic oligonucleotide; AAG chr11 5351545 5351564 5351561 +
ctggcttcccaggcatggag

SEQ ID NO: 23079 - DNA, 20 bp, Artificial Sequence
  Synthetic oligonucleotide; AGG chr11 5351546 5351565 5351562 +
tggcttcccaggcatggaga

SEQ ID NO: 23080 - DNA, 20 bp, Artificial Sequence
  Synthetic oligonucleotide; TGG chr11 5351557 5351576 5351573 +
gcatggagaaggcacatcac

SEQ ID NO: 23081 - DNA, 20 bp, Artificial Sequence
  Synthetic oligonucleotide; TGG chr11 5351576 5351595 5351592 +
ctggatattcatcccattat

SEQ ID NO: 23082 - DNA, 20 bp, Artificial Sequence
  Synthetic oligonucleotide; CAG chr11 5351579 5351598 5351595 +
gatattcatcccattattgg

SEQ ID NO: 23083 - DNA, 20 bp, Artificial Sequence
  Synthetic oligonucleotide; TGG chr11 5351601 5351620 5351617 +
gcctacatctccatacttct

SEQ ID NO: 23084 - DNA, 20 bp, Artificial Sequence
  Synthetic oligonucleotide; TGG chr11 5351607 5351626 5351623 +
atctccatacttcttggcaa

SEQ ID NO: 23085 - DNA, 20 bp, Artificial Sequence
  Synthetic oligonucleotide; CAG chr11 5351628 5351647 5351644 +
ggcactcttctctttctcat

SEQ ID NO: 23086 - DNA, 20 bp, Artificial Sequence
  Synthetic oligonucleotide; AGG chr11 5351629 5351648 5351645 +
gcactcttctctttctcatc

SEQ ID NO: 23087 - DNA, 20 bp, Artificial Sequence
  Synthetic oligonucleotide; GAG chr11 5351650 5351669 5351666 +
ggaatgatcataacctccat

SEQ ID NO: 23088 - DNA, 20 bp, Artificial Sequence
  Synthetic oligonucleotide; TAG chr11 5351669 5351688 5351685 +
tgagcccatgtactatttct

SEQ ID NO: 23089 - DNA, 20 bp, Artificial Sequence
  Synthetic oligonucleotide; TGG chr11 5351678 5351697 5351694 +
gtactatttcttagctatgt

SEQ ID NO: 23090 - DNA, 20 bp, Artificial Sequence
  Synthetic oligonucleotide; CAG chr11 5351681 5351700 5351697 +
ctatttcttagctatgttgg

SEQ ID NO: 23091 - DNA, 20 bp, Artificial Sequence
  Synthetic oligonucleotide; CAG chr11 5351687 5351706 5351703 +
cttagctatgttggcagcta

SEQ ID NO: 23092 - DNA, 20 bp, Artificial Sequence
  Synthetic oligonucleotide; CGG chr11 5351694 5351713 5351710 +
atgttggcagctacagacct

SEQ ID NO: 23093 - DNA, 20 bp, Artificial Sequence
  Synthetic oligonucleotide; GAG chr11 5351696 5351715 5351712 +
gttggcagctacagacctcg

SEQ ID NO: 23094 - DNA, 20 bp, Artificial Sequence
  Synthetic oligonucleotide; CAG chr11 5351720 5351739 5351736 +
gacattgaccacaatgccca

SEQ ID NO: 23095 - DNA, 20 bp, Artificial Sequence
  Synthetic oligonucleotide; TAG chr11 5351726 5351745 5351742 +
gaccacaatgcccacagtgc

SEQ ID NO: 23096 - DNA, 20 bp, Artificial Sequence
  Synthetic oligonucleotide; AGG chr11 5351727 5351746 5351743 +
accacaatgcccacagtgct

SEQ ID NO: 23097 - DNA, 20 bp, Artificial Sequence
  Synthetic oligonucleotide; TGG chr11 5351737 5351756 5351753 +
ccacagtgctaggtgttctg

SEQ ID NO: 23098 - DNA, 20 bp, Artificial Sequence
  Synthetic oligonucleotide; TAG chr11 5351741 5351760 5351757 +
agtgctaggtgttctgtggt

SEQ ID NO: 23099 - DNA, 20 bp, Artificial Sequence
  Synthetic oligonucleotide; CAG chr11 5351748 5351767 5351764 +
ggtgttctgtggttagatca

SEQ ID NO: 23100 - DNA, 20 bp, Artificial Sequence
  Synthetic oligonucleotide; AGG chr11 5351749 5351768 5351765 +
gtgttctgtggttagatcac

SEQ ID NO: 23101 - DNA, 20 bp, Artificial Sequence
  Synthetic oligonucleotide; GGG chr11 5351750 5351769 5351766 +
tgttctgtggttagatcaca

SEQ ID NO: 23102 - DNA, 20 bp, Artificial Sequence
  Synthetic oligonucleotide; GAG chr11 5351752 5351771 5351768 +
ttctgtggttagatcacagg

SEQ ID NO: 23103 - DNA, 20 bp, Artificial Sequence
  Synthetic oligonucleotide; TGG chr11 5351757 5351776 5351773 +
tggttagatcacagggagat

SEQ ID NO: 23104 - DNA, 20 bp, Artificial Sequence
  Synthetic oligonucleotide; TGG chr11 5351763 5351782 5351779 +
gatcacagggagattggcca

SEQ ID NO: 23105 - DNA, 20 bp, Artificial Sequence
  Synthetic oligonucleotide; GAG chr11 5351765 5351784 5351781 +
tcacagggagattggccatg

SEQ ID NO: 23106 - DNA, 20 bp, Artificial Sequence
  Synthetic oligonucleotide; CAG chr11 5351779 5351798 5351795 +
gccatggagcctgcttctct

SEQ ID NO: 23107 - DNA, 20 bp, Artificial Sequence
  Synthetic oligonucleotide; AGG chr11 5351780 5351799 5351796 +
ccatggagcctgcttctctc

SEQ ID NO: 23108 - DNA, 20 bp, Artificial Sequence
  Synthetic oligonucleotide; TGG chr11 5351810 5351829 5351826 +
tatccatactctttctgtca

SEQ ID NO: 23109 - DNA, 20 bp, Artificial Sequence
  Synthetic oligonucleotide; GAG chr11 5351812 5351831 5351828 +
tccatactctttctgtcatg

SEQ ID NO: 23110 - DNA, 20 bp, Artificial Sequence
  Synthetic oligonucleotide; CAG chr11 5351816 5351835 5351832 +
tactctttctgtcatggagt

SEQ ID NO: 23111 - DNA, 20 bp, Artificial Sequence
  Synthetic oligonucleotide; AGG chr11 5351817 5351836 5351833 +
actctttctgtcatggagtc

SEQ ID NO: 23112 - DNA, 20 bp, Artificial Sequence
  Synthetic oligonucleotide; TGG chr11 5351834 5351853 5351850 +
gtcaggtgtcttgcttgcca

SEQ ID NO: 23113 - DNA, 20 bp, Artificial Sequence
  Synthetic oligonucleotide; CAG chr11 5351862 5351881 5351878 +
gactgtttcattaccatccg

SEQ ID NO: 23114 - DNA, 20 bp, Artificial Sequence
  Synthetic oligonucleotide; AAG chr11 5351871 5351890 5351887 +
attaccatccgcagcccctt

SEQ ID NO: 23115 - DNA, 20 bp, Artificial Sequence
  Synthetic oligonucleotide; CAG chr11 5351899 5351918 5351915 +
cctctatcctgaccaacacc

SEQ ID NO: 23116 - DNA, 20 bp, Artificial Sequence
  Synthetic oligonucleotide; AGG chr11 5351900 5351919 5351916 +
ctctatcctgaccaacaccc

SEQ ID NO: 23117 - DNA, 20 bp, Artificial Sequence
  Synthetic oligonucleotide; AAG chr11 5351908 5351927 5351924 +
tgaccaacacccaggtaatg

SEQ ID NO: 23118 - DNA, 20 bp, Artificial Sequence
  Synthetic oligonucleotide; TGG chr11 5351913 5351932 5351929 +
aacacccaggtaatgaagat

SEQ ID NO: 23119 - DNA, 20 bp, Artificial Sequence
  Synthetic oligonucleotide; CGG chr11 5351920 5351939 5351936 +
aggtaatgaagattggtgtg

SEQ ID NO: 23120 - DNA, 20 bp, Artificial Sequence
  Synthetic oligonucleotide; GGG chr11 5351921 5351940 5351937 +
ggtaatgaagattggtgtgc

SEQ ID NO: 23121 - DNA, 20 bp, Artificial Sequence
  Synthetic oligonucleotide; AAG chr11 5351931 5351950 5351947 +
attggtgtgcgggtattgac

SEQ ID NO: 23122 - DNA, 20 bp, Artificial Sequence
  Synthetic oligonucleotide; AGG chr11 5351932 5351951 5351948 +
ttggtgtgcgggtattgaca

SEQ ID NO: 23123 - DNA, 20 bp, Artificial Sequence
  Synthetic oligonucleotide; GGG chr11 5351933 5351952 5351949 +
tggtgtgcgggtattgacaa

SEQ ID NO: 23124 - DNA, 20 bp, Artificial Sequence
  Synthetic oligonucleotide; TGG chr11 5351937 5351956 5351953 +
gtgcgggtattgacaagggc

SEQ ID NO: 23125 - DNA, 20 bp, Artificial Sequence
  Synthetic oligonucleotide; TAG chr11 5351957 5351976 5351973 +
tggtctgtccattatgccaa

SEQ ID NO: 23126 - DNA, 20 bp, Artificial Sequence
  Synthetic oligonucleotide; TGG chr11 5351974 5351993 5351990 +
caatagttgttcgcctacac

SEQ ID NO: 23127 - DNA, 20 bp, Artificial Sequence
  Synthetic oligonucleotide; AAG chr11 5352026 5352045 5352042 +
ccatgctttctgtctacacc

SEQ ID NO: 23128 - DNA, 20 bp, Artificial Sequence
  Synthetic oligonucleotide; AAG chr11 5352037 5352056 5352053 +
gtctacaccaagatgtcatc

SEQ ID NO: 23129 - DNA, 20 bp, Artificial Sequence
  Synthetic oligonucleotide; TAG chr11 5352041 5352060 5352057 +
acaccaagatgtcatcaagc

SEQ ID NO: 23130 - DNA, 20 bp, Artificial Sequence
  Synthetic oligonucleotide; CAG chr11 5352077 5352096 5352093 +
caccttcaaccgtctctatc

SEQ ID NO: 23131 - DNA, 20 bp, Artificial Sequence
  Synthetic oligonucleotide; TAG chr11 5352083 5352102 5352099 +
caaccgtctctatccagttg

SEQ ID NO: 23132 - DNA, 20 bp, Artificial Sequence
  Synthetic oligonucleotide; TGG chr11 5352098 5352117 5352114 +
agttgtagttttatttgcaa

SEQ ID NO: 23133 - DNA, 20 bp, Artificial Sequence
  Synthetic oligonucleotide; TGG chr11 5352107 5352126 5352123 +
tttatttgcaatggtcttgt

SEQ ID NO: 23134 - DNA, 20 bp, Artificial Sequence
  Synthetic oligonucleotide; AAG chr11 5352148 5352167 5352164 +
tctcctacattttgattctc

SEQ ID NO: 23135 - DNA, 20 bp, Artificial Sequence
  Synthetic oligonucleotide; TGG chr11 5352158 5352177 5352174 +
tttgattctcaagactgtca

SEQ ID NO: 23136 - DNA, 20 bp, Artificial Sequence
  Synthetic oligonucleotide; GGG chr11 5352159 5352178 5352175 +
ttgattctcaagactgtcat

SEQ ID NO: 23137 - DNA, 20 bp, Artificial Sequence
  Synthetic oligonucleotide; TGG chr11 5352165 5352184 5352181 +
ctcaagactgtcatgggcat

SEQ ID NO: 23138 - DNA, 20 bp, Artificial Sequence
  Synthetic oligonucleotide; TGG chr11 5352171 5352190 5352187 +
actgtcatgggcattggttc

SEQ ID NO: 23139 - DNA, 20 bp, Artificial Sequence
  Synthetic oligonucleotide; GAG chr11 5352173 5352192 5352189 +
tgtcatgggcattggttctg

SEQ ID NO: 23140 - DNA, 20 bp, Artificial Sequence
  Synthetic oligonucleotide; AGG chr11 5352174 5352193 5352190 +
gtcatgggcattggttctgg

SEQ ID NO: 23141 - DNA, 20 bp, Artificial Sequence
  Synthetic oligonucleotide; GAG chr11 5352176 5352195 5352192 +
catgggcattggttctggag

SEQ ID NO: 23142 - DNA, 20 bp, Artificial Sequence
  Synthetic oligonucleotide; AAG chr11 5352180 5352199 5352196 +
ggcattggttctggaggaga

SEQ ID NO: 23143 - DNA, 20 bp, Artificial Sequence
  Synthetic oligonucleotide; AGG chr11 5352181 5352200 5352197 +
gcattggttctggaggagaa

SEQ ID NO: 23144 - DNA, 20 bp, Artificial Sequence
  Synthetic oligonucleotide; GGG chr11 5352182 5352201 5352198 +
cattggttctggaggagaaa

SEQ ID NO: 23145 - DNA, 20 bp, Artificial Sequence
  Synthetic oligonucleotide; AAG chr11 5352187 5352206 5352203 +
gttctggaggagaaagggcc

SEQ ID NO: 23146 - DNA, 20 bp, Artificial Sequence
  Synthetic oligonucleotide; AGG chr11 5352188 5352207 5352204 +
ttctggaggagaaagggcca

SEQ ID NO: 23147 - DNA, 20 bp, Artificial Sequence
  Synthetic oligonucleotide; TGG chr11 5352227 5352246 5352243 +
ctctcatatctgctgcatcc

SEQ ID NO: 23148 - DNA, 20 bp, Artificial Sequence
  Synthetic oligonucleotide; TAG chr11 5352245 5352264 5352261 +
cctggtcttctatgtcactg

SEQ ID NO: 23149 - DNA, 20 bp, Artificial Sequence
  Synthetic oligonucleotide; TAG chr11 5352267 5352286 5352283 +
gtttgtctgacatttattca

SEQ ID NO: 23150 - DNA, 20 bp, Artificial Sequence
  Synthetic oligonucleotide; AGG chr11 5352268 5352287 5352284 +
tttgtctgacatttattcat

SEQ ID NO: 23151 - DNA, 20 bp, Artificial Sequence
  Synthetic oligonucleotide; TGG chr11 5352273 5352292 5352289 +
ctgacatttattcataggtt

SEQ ID NO: 23152 - DNA, 20 bp, Artificial Sequence
  Synthetic oligonucleotide; AAG chr11 5352277 5352296 5352293 +
catttattcataggtttgga

SEQ ID NO: 23153 - DNA, 20 bp, Artificial Sequence
  Synthetic oligonucleotide; GAG chr11 5352309 5352328 5352325 +
catgtcgttcacatcacaat

SEQ ID NO: 23154 - DNA, 20 bp, Artificial Sequence
  Synthetic oligonucleotide; TAG chr11 5352357 5352376 5352373 +
tttatgaacccatttatcta

SEQ ID NO: 23155 - DNA, 20 bp, Artificial Sequence
  Synthetic oligonucleotide; AAG chr11 5352370 5352389 5352386 +
ttatctatagcattaaaact

SEQ ID NO: 23156 - DNA, 20 bp, Artificial Sequence
  Synthetic oligonucleotide; CAG chr11 5352373 5352392 5352389 +
tctatagcattaaaactaag

SEQ ID NO: 23157 - DNA, 20 bp, Artificial Sequence
  Synthetic oligonucleotide; CAG chr11 5352379 5352398 5352395 +
gcattaaaactaagcagatt

SEQ ID NO: 23158 - DNA, 20 bp, Artificial Sequence
  Synthetic oligonucleotide; GAG chr11 5352381 5352400 5352397 +
attaaaactaagcagattca

SEQ ID NO: 23159 - DNA, 20 bp, Artificial Sequence
  Synthetic oligonucleotide; TGG chr11 5352384 5352403 5352400 +
aaaactaagcagattcagag

SEQ ID NO: 23160 - DNA, 20 bp, Artificial Sequence
  Synthetic oligonucleotide; TAG chr11 5352417 5352436 5352433 +
ttattctctctgcctcactc

SEQ ID NO: 23161 - DNA, 20 bp, Artificial Sequence
  Synthetic oligonucleotide; GAG chr11 5352419 5352438 5352435 +
attctctctgcctcactcta

SEQ ID NO: 23162 - DNA, 20 bp, Artificial Sequence
  Synthetic oligonucleotide; TGG chr11 5352438 5352457 5352454 +
agagcatgacattgtttcac

SEQ ID NO: 23163 - DNA, 20 bp, Artificial Sequence
  Synthetic oligonucleotide; GAG chr11 5352446 5352465 5352462 +
acattgtttcactggtctct

SEQ ID NO: 23164 - DNA, 20 bp, Artificial Sequence
  Synthetic oligonucleotide; AGG chr11 5352447 5352466 5352463 +
cattgtttcactggtctctg

SEQ ID NO: 23165 - DNA, 20 bp, Artificial Sequence
  Synthetic oligonucleotide; CAG chr11 5352457 5352476 5352473 +
ctggtctctgaggaataatt

SEQ ID NO: 23166 - DNA, 20 bp, Artificial Sequence
  Synthetic oligonucleotide; AGG chr11 5352458 5352477 5352474 +
tggtctctgaggaataattc

SEQ ID NO: 23167 - DNA, 20 bp, Artificial Sequence
  Synthetic oligonucleotide; GGG chr11 5352459 5352478 5352475 +
ggtctctgaggaataattca

SEQ ID NO: 23168 - DNA, 20 bp, Artificial Sequence
  Synthetic oligonucleotide; GGG chr11 5352460 5352479 5352476 +
gtctctgaggaataattcag

SEQ ID NO: 23169 - DNA, 20 bp, Artificial Sequence
  Synthetic oligonucleotide; TGG chr11 5352466 5352485 5352482 +
gaggaataattcaggggacc

SEQ ID NO: 23170 - DNA, 20 bp, Artificial Sequence
  Synthetic oligonucleotide; CAG chr11 5352470 5352489 5352486 +
aataattcaggggacctgga

SEQ ID NO: 23171 - DNA, 20 bp, Artificial Sequence
  Synthetic oligonucleotide; AGG chr11 5352471 5352490 5352487 +
ataattcaggggacctggac

SEQ ID NO: 23172 - DNA, 20 bp, Artificial Sequence
  Synthetic oligonucleotide; CAG chr11 5352487 5352506 5352503 +
ggacaggatgacaatgttgc

SEQ ID NO: 23173 - DNA, 20 bp, Artificial Sequence
  Synthetic oligonucleotide; AAG chr11 5352493 5352512 5352509 +
gatgacaatgttgccagcat

SEQ ID NO: 23174 - DNA, 20 bp, Artificial Sequence
  Synthetic oligonucleotide; TAG chr11 5352500 5352519 5352516 +
atgttgccagcataagtaac

SEQ ID NO: 23175 - DNA, 20 bp, Artificial Sequence
  Synthetic oligonucleotide; AGG chr11 5352501 5352520 5352517 +
tgttgccagcataagtaact

SEQ ID NO: 23176 - DNA, 20 bp, Artificial Sequence
  Synthetic oligonucleotide; GGG chr11 5352502 5352521 5352518 +
gttgccagcataagtaacta

SEQ ID NO: 23177 - DNA, 20 bp, Artificial Sequence
  Synthetic oligonucleotide; AAG chr11 5352506 5352525 5352522 +
ccagcataagtaactaggga

SEQ ID NO: 23178 - DNA, 20 bp, Artificial Sequence
  Synthetic oligonucleotide; GAG chr11 5352519 5352538 5352535 +
ctagggaaagtcatttcaat

SEQ ID NO: 23179 - DNA, 20 bp, Artificial Sequence
  Synthetic oligonucleotide; GAG chr11 5352537 5352556 5352553 +
atgagaactaatcaatccct

SEQ ID NO: 23180 - DNA, 20 bp, Artificial Sequence
  Synthetic oligonucleotide; CAG chr11 5352545 5352564 5352561 +
taatcaatccctgagcattt

SEQ ID NO: 23181 - DNA, 20 bp, Artificial Sequence
  Synthetic oligonucleotide; TGG chr11 5352548 5352567 5352564 +
tcaatccctgagcatttcag

SEQ ID NO: 23182 - DNA, 20 bp, Artificial Sequence
  Synthetic oligonucleotide; CAG chr11 5352555 5352574 5352571 +
ctgagcatttcagtggaaat

SEQ ID NO: 23183 - DNA, 20 bp, Artificial Sequence
  Synthetic oligonucleotide; TAG chr11 5352575 5352594 5352591 +
cagtcaatccctctgctact

SEQ ID NO: 23184 - DNA, 20 bp, Artificial Sequence
  Synthetic oligonucleotide; AAG chr11 5352617 5352636 5352633 +
tgtctattgctgatttgtat

SEQ ID NO: 23185 - DNA, 20 bp, Artificial Sequence
  Synthetic oligonucleotide; AAG chr11 5352636 5352655 5352652 +
taagatatatgtacaacact

SEQ ID NO: 23186 - DNA, 20 bp, Artificial Sequence
  Synthetic oligonucleotide; CAG chr11 5352648 5352667 5352664 +
acaacactaagtacatatct

SEQ ID NO: 23187 - DNA, 20 bp, Artificial Sequence
  Synthetic oligonucleotide; CAG chr11 5352673 5352692 5352689 +
ctcaactgatattgttttct

SEQ ID NO: 23188 - DNA, 20 bp, Artificial Sequence
  Synthetic oligonucleotide; AGG chr11 5352674 5352693 5352690 +
tcaactgatattgttttctc

SEQ ID NO: 23189 - DNA, 20 bp, Artificial Sequence
  Synthetic oligonucleotide; TAG chr11 5352700 5352719 5352716 +
tttaactcacattgtttgat

SEQ ID NO: 23190 - DNA, 20 bp, Artificial Sequence
  Synthetic oligonucleotide; TGG chr11 5352707 5352726 5352723 +
cacattgtttgattagctta

SEQ ID NO: 23191 - DNA, 20 bp, Artificial Sequence
  Synthetic oligonucleotide; TGG chr11 5352711 5352730 5352727 +
ttgtttgattagcttatggc

SEQ ID NO: 23192 - DNA, 20 bp, Artificial Sequence
  Synthetic oligonucleotide; CAG chr11 5352759 5352778 5352775 +
cacacatacatatacacaca

SEQ ID NO: 23193 - DNA, 20 bp, Artificial Sequence
  Synthetic oligonucleotide; TAG chr11 5352833 5352852 5352849 +
tatatatacttaatatataa

SEQ ID NO: 23194 - DNA, 20 bp, Artificial Sequence
  Synthetic oligonucleotide; TGG chr11 5352914 5352933 5352930 +
ccaattatatatataattct

SEQ ID NO: 23195 - DNA, 20 bp, Artificial Sequence
  Synthetic oligonucleotide; GGG chr11 5352915 5352934 5352931 +
caattatatatataattctt

SEQ ID NO: 23196 - DNA, 20 bp, Artificial Sequence
  Synthetic oligonucleotide; TGG chr11 5352927 5352946 5352943 +
taattcttgggtctatgatt

SEQ ID NO: 23197 - DNA, 20 bp, Artificial Sequence
  Synthetic oligonucleotide; GGG chr11 5352928 5352947 5352944 +
aattcttgggtctatgattt

SEQ ID NO: 23198 - DNA, 20 bp, Artificial Sequence
  Synthetic oligonucleotide; CGG chr11 5352935 5352954 5352951 +
gggtctatgatttgggtcac

SEQ ID NO: 23199 - DNA, 20 bp, Artificial Sequence
  Synthetic oligonucleotide; CAG chr11 5352943 5352962 5352959 +
gatttgggtcaccggcattt

SEQ ID NO: 23200 - DNA, 20 bp, Artificial Sequence
  Synthetic oligonucleotide; TGG chr11 5352968 5352987 5352984 +
aatgcccattgctctccata

SEQ ID NO: 23201 - DNA, 20 bp, Artificial Sequence
  Synthetic oligonucleotide; TAG chr11 5352982 5353001 5352998 +
tccatatggcttgcatatat

SEQ ID NO: 23202 - DNA, 20 bp, Artificial Sequence
  Synthetic oligonucleotide; TAG chr11 5352997 5353016 5353013 +
tatattagtcctgttataca

SEQ ID NO: 23203 - DNA, 20 bp, Artificial Sequence
  Synthetic oligonucleotide; AGG chr11 5352998 5353017 5353014 +
atattagtcctgttatacat

SEQ ID NO: 23204 - DNA, 20 bp, Artificial Sequence
  Synthetic oligonucleotide; AAG chr11 5353004 5353023 5353020 +
gtcctgttatacataggaat

SEQ ID NO: 23205 - DNA, 20 bp, Artificial Sequence
  Synthetic oligonucleotide; AGG chr11 5353005 5353024 5353021 +
tcctgttatacataggaata

SEQ ID NO: 23206 - DNA, 20 bp, Artificial Sequence
  Synthetic oligonucleotide; TGG chr11 5353014 5353033 5353030 +
acataggaataaggcatttt

SEQ ID NO: 23207 - DNA, 20 bp, Artificial Sequence
  Synthetic oligonucleotide; CAG chr11 5353020 5353039 5353036 +
gaataaggcatttttggctt

SEQ ID NO: 23208 - DNA, 20 bp, Artificial Sequence
  Synthetic oligonucleotide; CAG chr11 5353032 5353051 5353048 +
tttggcttcagacatacatc

SEQ ID NO: 23209 - DNA, 20 bp, Artificial Sequence
  Synthetic oligonucleotide; TGG chr11 5353049 5353068 5353065 +
atccagttctcttgcatata

SEQ ID NO: 23210 - DNA, 20 bp, Artificial Sequence
  Synthetic oligonucleotide; GAG chr11 5353051 5353070 5353067 +
ccagttctcttgcatatatg

SEQ ID NO: 23211 - DNA, 20 bp, Artificial Sequence
  Synthetic oligonucleotide; TGG chr11 5353055 5353074 5353071 +
ttctcttgcatatatggagc

SEQ ID NO: 23212 - DNA, 20 bp, Artificial Sequence
  Synthetic oligonucleotide; TAG chr11 5353068 5353087 5353084 +
atggagctggctgctgtttc

SEQ ID NO: 23213 - DNA, 20 bp, Artificial Sequence
  Synthetic oligonucleotide; AAG chr11 5353084 5353103 5353100 +
tttctagaaaattgcacgtg

SEQ ID NO: 23214 - DNA, 20 bp, Artificial Sequence
  Synthetic oligonucleotide; GAG chr11 5353091 5353110 5353107 +
aaaattgcacgtgaagaaat

SEQ ID NO: 23215 - DNA, 20 bp, Artificial Sequence
  Synthetic oligonucleotide; GAG chr11 5353106 5353125 5353122 +
gaaatgagactttcttcaat

SEQ ID NO: 23216 - DNA, 20 bp, Artificial Sequence
  Synthetic oligonucleotide; GAG chr11 5353108 5353127 5353124 +
aatgagactttcttcaatga

SEQ ID NO: 23217 - DNA, 20 bp, Artificial Sequence
  Synthetic oligonucleotide; AAG chr11 5353112 5353131 5353128 +
agactttcttcaatgagagt

SEQ ID NO: 23218 - DNA, 20 bp, Artificial Sequence
  Synthetic oligonucleotide; GAG chr11 5353142 5353161 5353158 +
cctcaattactttcttcaat

SEQ ID NO: 23219 - DNA, 20 bp, Artificial Sequence
  Synthetic oligonucleotide; AGG chr11 5353143 5353162 5353159 +
ctcaattactttcttcaatg

SEQ ID NO: 23220 - DNA, 20 bp, Artificial Sequence
  Synthetic oligonucleotide; GGG chr11 5353144 5353163 5353160 +
tcaattactttcttcaatga

SEQ ID NO: 23221 - DNA, 20 bp, Artificial Sequence
  Synthetic oligonucleotide; GAG chr11 5353175 5353194 5353191 +
ttccctcaattcaaaatgat

SEQ ID NO: 23222 - DNA, 20 bp, Artificial Sequence
  Synthetic oligonucleotide; TAG chr11 5353180 5353199 5353196 +
tcaattcaaaatgatgagtc

SEQ ID NO: 23223 - DNA, 20 bp, Artificial Sequence
  Synthetic oligonucleotide; AGG chr11 5353181 5353200 5353197 +
caattcaaaatgatgagtct

SEQ ID NO: 23224 - DNA, 20 bp, Artificial Sequence
  Synthetic oligonucleotide; GGG chr11 5353182 5353201 5353198 +
aattcaaaatgatgagtcta

SEQ ID NO: 23225 - DNA, 20 bp, Artificial Sequence
  Synthetic oligonucleotide; AAG chr11 5353186 5353205 5353202 +
caaaatgatgagtctaggga

SEQ ID NO: 23226 - DNA, 20 bp, Artificial Sequence
  Synthetic oligonucleotide; GAG chr11 5353198 5353217 5353214 +
tctagggaaagtatctctat

SEQ ID NO: 23227 - DNA, 20 bp, Artificial Sequence
  Synthetic oligonucleotide; CAG chr11 5353210 5353229 5353226 +
atctctatgagaaatgtgtt

SEQ ID NO: 23228 - DNA, 20 bp, Artificial Sequence
  Synthetic oligonucleotide; TGG chr11 5353222 5353241 5353238 +
aatgtgttcagttaaaactt

SEQ ID NO: 23229 - DNA, 20 bp, Artificial Sequence
  Synthetic oligonucleotide; CAG chr11 5353263 5353282 5353279 +
tattgataataatttgaaaa

SEQ ID NO: 23230 - DNA, 20 bp, Artificial Sequence
  Synthetic oligonucleotide; GAG chr11 5353265 5353284 5353281 +
ttgataataatttgaaaaca

SEQ ID NO: 23231 - DNA, 20 bp, Artificial Sequence
  Synthetic oligonucleotide; CAG chr11 5353283 5353302 5353299 +
cagagatataatttctaatt

SEQ ID NO: 23232 - DNA, 20 bp, Artificial Sequence
  Synthetic oligonucleotide; TAG chr11 5353302 5353321 5353318 +
tcagatgaccattgtcttga

SEQ ID NO: 23233 - DNA, 20 bp, Artificial Sequence
  Synthetic oligonucleotide; CAG chr11 5353312 5353331 5353328 +
attgtcttgatagttaattc

SEQ ID NO: 23234 - DNA, 20 bp, Artificial Sequence
  Synthetic oligonucleotide; CAG chr11 5353326 5353345 5353342 +
taattccagttactactgaa

SEQ ID NO: 23235 - DNA, 20 bp, Artificial Sequence
  Synthetic oligonucleotide; GAG chr11 5353328 5353347 5353344 +
attccagttactactgaaca

SEQ ID NO: 23236 - DNA, 20 bp, Artificial Sequence
  Synthetic oligonucleotide; GAG chr11 5353330 5353349 5353346 +
tccagttactactgaacaga

SEQ ID NO: 23237 - DNA, 20 bp, Artificial Sequence
  Synthetic oligonucleotide; AAG chr11 5353346 5353365 5353362 +
cagagagatgcattttcata

SEQ ID NO: 23238 - DNA, 20 bp, Artificial Sequence
  Synthetic oligonucleotide; TGG chr11 5353349 5353368 5353365 +
agagatgcattttcataaag

SEQ ID NO: 23239 - DNA, 20 bp, Artificial Sequence
  Synthetic oligonucleotide; GAG chr11 5353355 5353374 5353371 +
gcattttcataaagtggtat

SEQ ID NO: 23240 - DNA, 20 bp, Artificial Sequence
  Synthetic oligonucleotide; GAG chr11 5353357 5353376 5353373 +
attttcataaagtggtatga

SEQ ID NO: 23241 - DNA, 20 bp, Artificial Sequence
  Synthetic oligonucleotide; AGG chr11 5353358 5353377 5353374 +
ttttcataaagtggtatgag

SEQ ID NO: 23242 - DNA, 20 bp, Artificial Sequence
  Synthetic oligonucleotide; TGG chr11 5353363 5353382 5353379 +
ataaagtggtatgagaggtc

SEQ ID NO: 23243 - DNA, 20 bp, Artificial Sequence
  Synthetic oligonucleotide; TAG chr11 5353368 5353387 5353384 +
gtggtatgagaggtctggtt

SEQ ID NO: 23244 - DNA, 20 bp, Artificial Sequence
  Synthetic oligonucleotide; AGG chr11 5353369 5353388 5353385 +
tggtatgagaggtctggttt

SEQ ID NO: 23245 - DNA, 20 bp, Artificial Sequence
  Synthetic oligonucleotide; GGG chr11 5353370 5353389 5353386 +
ggtatgagaggtctggttta

SEQ ID NO: 23246 - DNA, 20 bp, Artificial Sequence
  Synthetic oligonucleotide; GGG chr11 5353371 5353390 5353387 +
gtatgagaggtctggtttag

SEQ ID NO: 23247 - DNA, 20 bp, Artificial Sequence
  Synthetic oligonucleotide; CAG chr11 5353379 5353398 5353395 +
ggtctggtttaggggaacat

SEQ ID NO: 23248 - DNA, 20 bp, Artificial Sequence
  Synthetic oligonucleotide; GAG chr11 5353381 5353400 5353397 +
tctggtttaggggaacatca

SEQ ID NO: 23249 - DNA, 20 bp, Artificial Sequence
  Synthetic oligonucleotide; AAG chr11 5353386 5353405 5353402 +
tttaggggaacatcagagat

SEQ ID NO: 23250 - DNA, 20 bp, Artificial Sequence
  Synthetic oligonucleotide; TAG chr11 5353391 5353410 5353407 +
gggaacatcagagataagac

SEQ ID NO: 23251 - DNA, 20 bp, Artificial Sequence
  Synthetic oligonucleotide; TAG chr11 5353395 5353414 5353411 +
acatcagagataagactaga

SEQ ID NO: 23252 - DNA, 20 bp, Artificial Sequence
  Synthetic oligonucleotide; AGG chr11 5353396 5353415 5353412 +
catcagagataagactagat

SEQ ID NO: 23253 - DNA, 20 bp, Artificial Sequence
  Synthetic oligonucleotide; GGG chr11 5353397 5353416 5353413 +
atcagagataagactagata

SEQ ID NO: 23254 - DNA, 20 bp, Artificial Sequence
  Synthetic oligonucleotide; GGG chr11 5353398 5353417 5353414 +
tcagagataagactagatag

SEQ ID NO: 23255 - DNA, 20 bp, Artificial Sequence
  Synthetic oligonucleotide; TGG chr11 5353405 5353424 5353421 +
taagactagataggggtgtc

SEQ ID NO: 23256 - DNA, 20 bp, Artificial Sequence
  Synthetic oligonucleotide; TAG chr11 5353419 5353438 5353435 +
ggtgtctggcatgtgcaaaa

SEQ ID NO: 23257 - DNA, 20 bp, Artificial Sequence
  Synthetic oligonucleotide; CAG chr11 5353422 5353441 5353438 +
gtctggcatgtgcaaaatag

SEQ ID NO: 23258 - DNA, 20 bp, Artificial Sequence
  Synthetic oligonucleotide; GAG chr11 5353424 5353443 5353440 +
ctggcatgtgcaaaatagca

SEQ ID NO: 23259 - DNA, 20 bp, Artificial Sequence
  Synthetic oligonucleotide; CAG chr11 5353439 5353458 5353455 +
tagcagagttgaaaaacaaa

SEQ ID NO: 23260 - DNA, 20 bp, Artificial Sequence
  Synthetic oligonucleotide; TGG chr11 5353443 5353462 5353459 +
agagttgaaaaacaaacagt

SEQ ID NO: 23261 - DNA, 20 bp, Artificial Sequence
  Synthetic oligonucleotide; TGG chr11 5353453 5353472 5353469 +
aacaaacagttggtcatatg

SEQ ID NO: 23262 - DNA, 20 bp, Artificial Sequence
  Synthetic oligonucleotide; GAG chr11 5353455 5353474 5353471 +
caaacagttggtcatatgtg

SEQ ID NO: 23263 - DNA, 20 bp, Artificial Sequence
  Synthetic oligonucleotide; GAG chr11 5353457 5353476 5353473 +
aacagttggtcatatgtgga

SEQ ID NO: 23264 - DNA, 20 bp, Artificial Sequence
  Synthetic oligonucleotide; TGG chr11 5353460 5353479 5353476 +
agttggtcatatgtggagag

SEQ ID NO: 23265 - DNA, 20 bp, Artificial Sequence
  Synthetic oligonucleotide; GGG chr11 5353461 5353480 5353477 +
gttggtcatatgtggagagt

SEQ ID NO: 23266 - DNA, 20 bp, Artificial Sequence
  Synthetic oligonucleotide; GGG chr11 5353462 5353481 5353478 +
ttggtcatatgtggagagtg

SEQ ID NO: 23267 - DNA, 20 bp, Artificial Sequence
  Synthetic oligonucleotide; GAG chr11 5353464 5353483 5353480 +
ggtcatatgtggagagtggg

SEQ ID NO: 23268 - DNA, 20 bp, Artificial Sequence
  Synthetic oligonucleotide; AGG chr11 5353465 5353484 5353481 +
gtcatatgtggagagtgggg

SEQ ID NO: 23269 - DNA, 20 bp, Artificial Sequence
  Synthetic oligonucleotide; AAG chr11 5353468 5353487 5353484 +
atatgtggagagtggggagg

SEQ ID NO: 23270 - DNA, 20 bp, Artificial Sequence
  Synthetic oligonucleotide; AGG chr11 5353469 5353488 5353485 +
tatgtggagagtggggagga

SEQ ID NO: 23271 - DNA, 20 bp, Artificial Sequence
  Synthetic oligonucleotide; GGG chr11 5353470 5353489 5353486 +
atgtggagagtggggaggaa

SEQ ID NO: 23272 - DNA, 20 bp, Artificial Sequence
  Synthetic oligonucleotide; GAG chr11 5353472 5353491 5353488 +
gtggagagtggggaggaagg

SEQ ID NO: 23273 - DNA, 20 bp, Artificial Sequence
  Synthetic oligonucleotide; GAG chr11 5353474 5353493 5353490 +
ggagagtggggaggaaggga

SEQ ID NO: 23274 - DNA, 20 bp, Artificial Sequence
  Synthetic oligonucleotide; AGG chr11 5353475 5353494 5353491 +
gagagtggggaggaagggag

SEQ ID NO: 23275 - DNA, 20 bp, Artificial Sequence
  Synthetic oligonucleotide; TGG chr11 5353479 5353498 5353495 +
gtggggaggaagggagagga

SEQ ID NO: 23276 - DNA, 20 bp, Artificial Sequence
  Synthetic oligonucleotide; GAG chr11 5353481 5353500 5353497 +
ggggaggaagggagaggatg

SEQ ID NO: 23277 - DNA, 20 bp, Artificial Sequence
  Synthetic oligonucleotide; AGG chr11 5353482 5353501 5353498 +
gggaggaagggagaggatgg

SEQ ID NO: 23278 - DNA, 20 bp, Artificial Sequence
  Synthetic oligonucleotide; TAG chr11 5353498 5353517 5353514 +
atggaggcaatgctcataac

SEQ ID NO: 23279 - DNA, 20 bp, Artificial Sequence
  Synthetic oligonucleotide; AAG chr11 5353501 5353520 5353517 +
gaggcaatgctcataactag

SEQ ID NO: 23280 - DNA, 20 bp, Artificial Sequence
  Synthetic oligonucleotide; TGG chr11 5353510 5353529 5353526 +
ctcataactagaagataaaa

SEQ ID NO: 23281 - DNA, 20 bp, Artificial Sequence
  Synthetic oligonucleotide; TGG chr11 5353520 5353539 5353536 +
gaagataaaatggccttttc

SEQ ID NO: 23282 - DNA, 20 bp, Artificial Sequence
  Synthetic oligonucleotide; CAG chr11 5353546 5353565 5353562 +
caaatacttttgattctttt

SEQ ID NO: 23283 - DNA, 20 bp, Artificial Sequence
  Synthetic oligonucleotide; GAG chr11 5353548 5353567 5353564 +
aatacttttgattcttttca

SEQ ID NO: 23284 - DNA, 20 bp, Artificial Sequence
  Synthetic oligonucleotide; TAG chr11 5353553 5353572 5353569 +
ttttgattcttttcagagtc

SEQ ID NO: 23285 - DNA, 20 bp, Artificial Sequence
  Synthetic oligonucleotide; AGG chr11 5353554 5353573 5353570 +
tttgattcttttcagagtct

SEQ ID NO: 23286 - DNA, 20 bp, Artificial Sequence
  Synthetic oligonucleotide; GAG chr11 5353560 5353579 5353576 +
tcttttcagagtctaggcat

SEQ ID NO: 23287 - DNA, 20 bp, Artificial Sequence
  Synthetic oligonucleotide; AAG chr11 5353563 5353582 5353579 +
tttcagagtctaggcatgag

SEQ ID NO: 23288 - DNA, 20 bp, Artificial Sequence
  Synthetic oligonucleotide; GAG chr11 5353565 5353584 5353581 +
tcagagtctaggcatgagaa

SEQ ID NO: 23289 - DNA, 20 bp, Artificial Sequence
  Synthetic oligonucleotide; AGG chr11 5353566 5353585 5353582 +
cagagtctaggcatgagaag

SEQ ID NO: 23290 - DNA, 20 bp, Artificial Sequence
  Synthetic oligonucleotide; GGG chr11 5353567 5353586 5353583 +
agagtctaggcatgagaaga

SEQ ID NO: 23291 - DNA, 20 bp, Artificial Sequence
  Synthetic oligonucleotide; GGG chr11 5353568 5353587 5353584 +
gagtctaggcatgagaagag

SEQ ID NO: 23292 - DNA, 20 bp, Artificial Sequence
  Synthetic oligonucleotide; GGG chr11 5353569 5353588 5353585 +
agtctaggcatgagaagagg

SEQ ID NO: 23293 - DNA, 20 bp, Artificial Sequence
  Synthetic oligonucleotide; TGG chr11 5353576 5353595 5353592 +
gcatgagaagagggggtttg

SEQ ID NO: 23294 - DNA, 20 bp, Artificial Sequence
  Synthetic oligonucleotide; TGG chr11 5353584 5353603 5353600 +
agagggggtttgtggtccta

SEQ ID NO: 23295 - DNA, 20 bp, Artificial Sequence
  Synthetic oligonucleotide; CAG chr11 5353588 5353607 5353604 +
ggggtttgtggtcctatggc

SEQ ID NO: 23296 - DNA, 20 bp, Artificial Sequence
  Synthetic oligonucleotide; AGG chr11 5353589 5353608 5353605 +
gggtttgtggtcctatggcc

SEQ ID NO: 23297 - DNA, 20 bp, Artificial Sequence
  Synthetic oligonucleotide; AAG chr11 5353594 5353613 5353610 +
tgtggtcctatggccaggtg

SEQ ID NO: 23298 - DNA, 20 bp, Artificial Sequence
  Synthetic oligonucleotide; GAG chr11 5353596 5353615 5353612 +
tggtcctatggccaggtgaa

SEQ ID NO: 23299 - DNA, 20 bp, Artificial Sequence
  Synthetic oligonucleotide; CAG chr11 5353600 5353619 5353616 +
cctatggccaggtgaagagc

SEQ ID NO: 23300 - DNA, 20 bp, Artificial Sequence
  Synthetic oligonucleotide; AAG chr11 5353622 5353641 5353638 +
gtatccatgactcaaatgat

SEQ ID NO: 23301 - DNA, 20 bp, Artificial Sequence
  Synthetic oligonucleotide; AAG chr11 5353642 5353661 5353658 +
aagttttaaattaattttaa

SEQ ID NO: 23302 - DNA, 20 bp, Artificial Sequence
  Synthetic oligonucleotide; AAG chr11 5353646 5353665 5353662 +
tttaaattaattttaaaaga

SEQ ID NO: 23303 - DNA, 20 bp, Artificial Sequence
  Synthetic oligonucleotide; CAG chr11 5353669 5353688 5353685 +
atattcttttgaccaaaata

SEQ ID NO: 23304 - DNA, 20 bp, Artificial Sequence
  Synthetic oligonucleotide; AGG chr11 5353670 5353689 5353686 +
tattcttttgaccaaaatac

SEQ ID NO: 23305 - DNA, 20 bp, Artificial Sequence
  Synthetic oligonucleotide; GGG chr11 5353671 5353690 5353687 +
attcttttgaccaaaataca

SEQ ID NO: 23306 - DNA, 20 bp, Artificial Sequence
  Synthetic oligonucleotide; TGG chr11 5353685 5353704 5353701 +
aatacagggtatgatgtgct

SEQ ID NO: 23307 - DNA, 20 bp, Artificial Sequence
  Synthetic oligonucleotide; AAG chr11 5353695 5353714 5353711 +
atgatgtgcttggactacac

SEQ ID NO: 23308 - DNA, 20 bp, Artificial Sequence
  Synthetic oligonucleotide; AGG chr11 5353696 5353715 5353712 +
tgatgtgcttggactacaca

SEQ ID NO: 23309 - DNA, 20 bp, Artificial Sequence
  Synthetic oligonucleotide; GGG chr11 5353697 5353716 5353713 +
gatgtgcttggactacacaa

SEQ ID NO: 23310 - DNA, 20 bp, Artificial Sequence
  Synthetic oligonucleotide; GGG chr11 5353698 5353717 5353714 +
atgtgcttggactacacaag

SEQ ID NO: 23311 - DNA, 20 bp, Artificial Sequence
  Synthetic oligonucleotide; CAG chr11 5353706 5353725 5353722 +
ggactacacaaggggccacc

SEQ ID NO: 23312 - DNA, 20 bp, Artificial Sequence
  Synthetic oligonucleotide; CAG chr11 5353713 5353732 5353729 +
acaaggggccacccagtgac

SEQ ID NO: 23313 - DNA, 20 bp, Artificial Sequence
  Synthetic oligonucleotide; CAG chr11 5353717 5353736 5353733 +
ggggccacccagtgaccagt

SEQ ID NO: 23314 - DNA, 20 bp, Artificial Sequence
  Synthetic oligonucleotide; TGG chr11 5353721 5353740 5353737 +
ccacccagtgaccagtcagc

SEQ ID NO: 23315 - DNA, 20 bp, Artificial Sequence
  Synthetic oligonucleotide; TGG chr11 5353738 5353757 5353754 +
agctggatgcccctcatctc

SEQ ID NO: 23316 - DNA, 20 bp, Artificial Sequence
  Synthetic oligonucleotide; CAG chr11 5353760 5353779 5353776 +
gcctctgtcatactgacact

SEQ ID NO: 23317 - DNA, 20 bp, Artificial Sequence
  Synthetic oligonucleotide; TGG chr11 5353770 5353789 5353786 +
tactgacactcagtgatcta

SEQ ID NO: 23318 - DNA, 20 bp, Artificial Sequence
  Synthetic oligonucleotide; CAG chr11 5353794 5353813 5353810 +
tgcccacctactcttcatca

SEQ ID NO: 23319 - DNA, 20 bp, Artificial Sequence
  Synthetic oligonucleotide; AAG chr11 5353798 5353817 5353814 +
cacctactcttcatcacaga

SEQ ID NO: 23320 - DNA, 20 bp, Artificial Sequence
  Synthetic oligonucleotide; AGG chr11 5353799 5353818 5353815 +
acctactcttcatcacagaa

SEQ ID NO: 23321 - DNA, 20 bp, Artificial Sequence
  Synthetic oligonucleotide; TGG chr11 5353802 5353821 5353818 +
tactcttcatcacagaaagg

SEQ ID NO: 23322 - DNA, 20 bp, Artificial Sequence
  Synthetic oligonucleotide; GGG chr11 5353803 5353822 5353819 +
actcttcatcacagaaaggt

SEQ ID NO: 23323 - DNA, 20 bp, Artificial Sequence
  Synthetic oligonucleotide; GGG chr11 5353804 5353823 5353820 +
ctcttcatcacagaaaggtg

SEQ ID NO: 23324 - DNA, 20 bp, Artificial Sequence
  Synthetic oligonucleotide; TAG chr11 5353813 5353832 5353829 +
acagaaaggtggggattttt

SEQ ID NO: 23325 - DNA, 20 bp, Artificial Sequence
  Synthetic oligonucleotide; AGG chr11 5353814 5353833 5353830 +
cagaaaggtggggatttttt

SEQ ID NO: 23326 - DNA, 20 bp, Artificial Sequence
  Synthetic oligonucleotide; TGG chr11 5353822 5353841 5353838 +
tggggattttttaggattct

SEQ ID NO: 23327 - DNA, 20 bp, Artificial Sequence
  Synthetic oligonucleotide; GGG chr11 5353823 5353842 5353839 +
ggggattttttaggattctt

SEQ ID NO: 23328 - DNA, 20 bp, Artificial Sequence
  Synthetic oligonucleotide; CAG chr11 5353840 5353859 5353856 +
cttgggatgtataaataaca

SEQ ID NO: 23329 - DNA, 20 bp, Artificial Sequence
  Synthetic oligonucleotide; GAG chr11 5353842 5353861 5353858 +
tgggatgtataaataacaca

SEQ ID NO: 23330 - DNA, 20 bp, Artificial Sequence
  Synthetic oligonucleotide; TAG chr11 5353874 5353893 5353890 +
ataaaataataccttcacaa

SEQ ID NO: 23331 - DNA, 20 bp, Artificial Sequence
  Synthetic oligonucleotide; CAG chr11 5353881 5353900 5353897 +
aataccttcacaatagtttc

SEQ ID NO: 23332 - DNA, 20 bp, Artificial Sequence
  Synthetic oligonucleotide; AGG chr11 5353882 5353901 5353898 +
ataccttcacaatagtttcc

SEQ ID NO: 23333 - DNA, 20 bp, Artificial Sequence
  Synthetic oligonucleotide; TAG chr11 5353886 5353905 5353902 +
cttcacaatagtttccaggc

SEQ ID NO: 23334 - DNA, 20 bp, Artificial Sequence
  Synthetic oligonucleotide; TAG chr11 5353908 5353927 5353924 +
gtaaatgatctttatctgat

SEQ ID NO: 23335 - DNA, 20 bp, Artificial Sequence
  Synthetic oligonucleotide; AAG chr11 5353916 5353935 5353932 +
tctttatctgattagaccaa

SEQ ID NO: 23336 - DNA, 20 bp, Artificial Sequence
  Synthetic oligonucleotide; TGG chr11 5353941 5353960 5353957 +
tttgtttgttttactcaact

SEQ ID NO: 23337 - DNA, 20 bp, Artificial Sequence
  Synthetic oligonucleotide; TAG chr11 5353973 5353992 5353989 +
aaatttgcctttctcttttg

SEQ ID NO: 23338 - DNA, 20 bp, Artificial Sequence
  Synthetic oligonucleotide; GAG chr11 5353994 5354013 5354010 +
agcttcttgactgtgtgctc

SEQ ID NO: 23339 - DNA, 20 bp, Artificial Sequence
  Synthetic oligonucleotide; AGG chr11 5353995 5354014 5354011 +
gcttcttgactgtgtgctcg

SEQ ID NO: 23340 - DNA, 20 bp, Artificial Sequence
  Synthetic oligonucleotide; TGG chr11 5353999 5354018 5354015 +
cttgactgtgtgctcgagga

SEQ ID NO: 23341 - DNA, 20 bp, Artificial Sequence
  Synthetic oligonucleotide; TAG chr11 5354013 5354032 5354029 +
cgaggatggtaaatataaca

SEQ ID NO: 23342 - DNA, 20 bp, Artificial Sequence
  Synthetic oligonucleotide; CAG chr11 5354037 5354056 5354053 +
tcttattccctactgtatta

SEQ ID NO: 23343 - DNA, 20 bp, Artificial Sequence
  Synthetic oligonucleotide; TAG chr11 5354051 5354070 5354067 +
gtattacagaacttctcaca

SEQ ID NO: 23344 - DNA, 20 bp, Artificial Sequence
  Synthetic oligonucleotide; AAG chr11 5354105 5354124 5354121 +
aaatgaataaataaaattta

SEQ ID NO: 23345 - DNA, 20 bp, Artificial Sequence
  Synthetic oligonucleotide; TAG chr11 5354134 5354153 5354150 +
atgtctttctgtgtgtctgc

SEQ ID NO: 23346 - DNA, 20 bp, Artificial Sequence
  Synthetic oligonucleotide; AAG chr11 5354173 5354192 5354189 +
tgctctctgtattgtcttcc

SEQ ID NO: 23347 - DNA, 20 bp, Artificial Sequence
  Synthetic oligonucleotide; TGG chr11 5354179 5354198 5354195 +
ctgtattgtcttccaagata

SEQ ID NO: 23348 - DNA, 20 bp, Artificial Sequence
  Synthetic oligonucleotide; GGG chr11 5354180 5354199 5354196 +
tgtattgtcttccaagatat

SEQ ID NO: 23349 - DNA, 20 bp, Artificial Sequence
  Synthetic oligonucleotide; TGG chr11 5354215 5354234 5354231 +
aatcctgttctttcttccct

SEQ ID NO: 23350 - DNA, 20 bp, Artificial Sequence
  Synthetic oligonucleotide; GGG chr11 5354216 5354235 5354232 +
atcctgttctttcttccctt

SEQ ID NO: 23351 - DNA, 20 bp, Artificial Sequence
  Synthetic oligonucleotide; TGG chr11 5354223 5354242 5354239 +
tctttcttcccttgggcttt

SEQ ID NO: 23352 - DNA, 20 bp, Artificial Sequence
  Synthetic oligonucleotide; GGG chr11 5354224 5354243 5354240 +
ctttcttcccttgggctttt

SEQ ID NO: 23353 - DNA, 20 bp, Artificial Sequence
  Synthetic oligonucleotide; CAG chr11 5354235 5354254 5354251 +
tgggcttttgggaatgaatt

SEQ ID NO: 23354 - DNA, 20 bp, Artificial Sequence
  Synthetic oligonucleotide; AGG chr11 5354236 5354255 5354252 +
gggcttttgggaatgaattc

SEQ ID NO: 23355 - DNA, 20 bp, Artificial Sequence
  Synthetic oligonucleotide; GGG chr11 5354237 5354256 5354253 +
ggcttttgggaatgaattca

SEQ ID NO: 23356 - DNA, 20 bp, Artificial Sequence
  Synthetic oligonucleotide; GGG chr11 5354238 5354257 5354254 +
gcttttgggaatgaattcag

SEQ ID NO: 23357 - DNA, 20 bp, Artificial Sequence
  Synthetic oligonucleotide; GGG chr11 5354239 5354258 5354255 +
cttttgggaatgaattcagg

SEQ ID NO: 23358 - DNA, 20 bp, Artificial Sequence
  Synthetic oligonucleotide; AAG chr11 5354246 5354265 5354262 +
gaatgaattcagggggatct

SEQ ID NO: 23359 - DNA, 20 bp, Artificial Sequence
  Synthetic oligonucleotide; AAG chr11 5354257 5354276 5354273 +
gggggatctaagccacatca

SEQ ID NO: 23360 - DNA, 20 bp, Artificial Sequence
  Synthetic oligonucleotide; TAG chr11 5354283 5354302 5354299 +
atctttcttgactcaccctc

SEQ ID NO: 23361 - DNA, 20 bp, Artificial Sequence
  Synthetic oligonucleotide; AGG chr11 5354284 5354303 5354300 +
tctttcttgactcaccctct

SEQ ID NO: 23362 - DNA, 20 bp, Artificial Sequence
  Synthetic oligonucleotide; CAG chr11 5354289 5354308 5354305 +
cttgactcaccctctaggtc

SEQ ID NO: 23363 - DNA, 20 bp, Artificial Sequence
  Synthetic oligonucleotide; TAG chr11 5354310 5354329 5354326 +
agtgatcctgaaacctgcca

SEQ ID NO: 23364 - DNA, 20 bp, Artificial Sequence
  Synthetic oligonucleotide; CAG chr11 5354313 5354332 5354329 +
gatcctgaaacctgccatag

SEQ ID NO: 23365 - DNA, 20 bp, Artificial Sequence
  Synthetic oligonucleotide; AGG chr11 5354314 5354333 5354330 +
atcctgaaacctgccatagc

SEQ ID NO: 23366 - DNA, 20 bp, Artificial Sequence
  Synthetic oligonucleotide; TAG chr11 5354318 5354337 5354334 +
tgaaacctgccatagcaggc

SEQ ID NO: 23367 - DNA, 20 bp, Artificial Sequence
  Synthetic oligonucleotide; AAG chr11 5354325 5354344 5354341 +
tgccatagcaggctagtata

SEQ ID NO: 23368 - DNA, 20 bp, Artificial Sequence
  Synthetic oligonucleotide; TAG chr11 5354333 5354352 5354349 +
caggctagtataaagataac

SEQ ID NO: 23369 - DNA, 20 bp, Artificial Sequence
  Synthetic oligonucleotide; AGG chr11 5354334 5354353 5354350 +
aggctagtataaagataact

SEQ ID NO: 23370 - DNA, 20 bp, Artificial Sequence
  Synthetic oligonucleotide; TGG chr11 5354366 5354385 5354382 +
cattttataaattctgtaaa

SEQ ID NO: 23371 - DNA, 20 bp, Artificial Sequence
  Synthetic oligonucleotide; GAG chr11 5354390 5354409 5354406 +
cacatttgactgacaaccct

SEQ ID NO: 23372 - DNA, 20 bp, Artificial Sequence
  Synthetic oligonucleotide; AAG chr11 5354427 5354446 5354443 +
ttctgttcttccttatactg

SEQ ID NO: 23373 - DNA, 20 bp, Artificial Sequence
  Synthetic oligonucleotide; GAG chr11 5354429 5354448 5354445 +
ctgttcttccttatactgaa

SEQ ID NO: 23374 - DNA, 20 bp, Artificial Sequence
  Synthetic oligonucleotide; AAG chr11 5354440 5354459 5354456 +
tatactgaagagatgtgatg

SEQ ID NO: 23375 - DNA, 20 bp, Artificial Sequence
  Synthetic oligonucleotide; GAG chr11 5354442 5354461 5354458 +
tactgaagagatgtgatgaa

SEQ ID NO: 23376 - DNA, 20 bp, Artificial Sequence
  Synthetic oligonucleotide; AAG chr11 5354447 5354466 5354463 +
aagagatgtgatgaagagac

SEQ ID NO: 23377 - DNA, 20 bp, Artificial Sequence
  Synthetic oligonucleotide; AAG chr11 5354455 5354474 5354471 +
tgatgaagagacaagataaa

SEQ ID NO: 23378 - DNA, 20 bp, Artificial Sequence
  Synthetic oligonucleotide; AAG chr11 5354461 5354480 5354477 +
agagacaagataaaaagtcc

SEQ ID NO: 23379 - DNA, 20 bp, Artificial Sequence
  Synthetic oligonucleotide; GAG chr11 5354463 5354482 5354479 +
agacaagataaaaagtccaa

SEQ ID NO: 23380 - DNA, 20 bp, Artificial Sequence
  Synthetic oligonucleotide; GAG chr11 5354465 5354484 5354481 +
acaagataaaaagtccaaga

SEQ ID NO: 23381 - DNA, 20 bp, Artificial Sequence
  Synthetic oligonucleotide; AGG chr11 5354466 5354485 5354482 +
caagataaaaagtccaagag

SEQ ID NO: 23382 - DNA, 20 bp, Artificial Sequence
  Synthetic oligonucleotide; AAG chr11 5354472 5354491 5354488 +
aaaaagtccaagagaggtga

SEQ ID NO: 23383 - DNA, 20 bp, Artificial Sequence
  Synthetic oligonucleotide; TGG chr11 5354477 5354496 5354493 +
gtccaagagaggtgaaagac

SEQ ID NO: 23384 - DNA, 20 bp, Artificial Sequence
  Synthetic oligonucleotide; GGG chr11 5354478 5354497 5354494 +
tccaagagaggtgaaagact

SEQ ID NO: 23385 - DNA, 20 bp, Artificial Sequence
  Synthetic oligonucleotide; CAG chr11 5354486 5354505 5354502 +
aggtgaaagactgggacttg

SEQ ID NO: 23386 - DNA, 20 bp, Artificial Sequence
  Synthetic oligonucleotide; TGG chr11 5354498 5354517 5354514 +
gggacttgcagttctctttg

SEQ ID NO: 23387 - DNA, 20 bp, Artificial Sequence
  Synthetic oligonucleotide; GAG chr11 5354500 5354519 5354516 +
gacttgcagttctctttgtg

SEQ ID NO: 23388 - DNA, 20 bp, Artificial Sequence
  Synthetic oligonucleotide; CAG chr11 5354513 5354532 5354529 +
ctttgtggagtcccgtgaaa

SEQ ID NO: 23389 - DNA, 20 bp, Artificial Sequence
  Synthetic oligonucleotide; GAG chr11 5354515 5354534 5354531 +
ttgtggagtcccgtgaaaca

SEQ ID NO: 23390 - DNA, 20 bp, Artificial Sequence
  Synthetic oligonucleotide; CAG chr11 5354518 5354537 5354534 +
tggagtcccgtgaaacagag

SEQ ID NO: 23391 - DNA, 20 bp, Artificial Sequence
  Synthetic oligonucleotide; GAG chr11 5354520 5354539 5354536 +
gagtcccgtgaaacagagca

SEQ ID NO: 23392 - DNA, 20 bp, Artificial Sequence
  Synthetic oligonucleotide; TGG chr11 5354526 5354545 5354542 +
cgtgaaacagagcagagctc

SEQ ID NO: 23393 - DNA, 20 bp, Artificial Sequence
  Synthetic oligonucleotide; GGG chr11 5354527 5354546 5354543 +
gtgaaacagagcagagctct

SEQ ID NO: 23394 - DNA, 20 bp, Artificial Sequence
  Synthetic oligonucleotide; TGG chr11 5354537 5354556 5354553 +
gcagagctctgggctcccga

SEQ ID NO: 23395 - DNA, 20 bp, Artificial Sequence
  Synthetic oligonucleotide; CAG chr11 5354559 5354578 5354575 +
gtccctgaacaacatatcaa

SEQ ID NO: 23396 - DNA, 20 bp, Artificial Sequence
  Synthetic oligonucleotide; TAG chr11 5354562 5354581 5354578 +
cctgaacaacatatcaacag

SEQ ID NO: 23397 - DNA, 20 bp, Artificial Sequence
  Synthetic oligonucleotide; AGG chr11 5354563 5354582 5354579 +
ctgaacaacatatcaacagt

SEQ ID NO: 23398 - DNA, 20 bp, Artificial Sequence
  Synthetic oligonucleotide; GGG chr11 5354564 5354583 5354580 +
tgaacaacatatcaacagta

SEQ ID NO: 23399 - DNA, 20 bp, Artificial Sequence
  Synthetic oligonucleotide; AAG chr11 5354570 5354589 5354586 +
acatatcaacagtagggtcg

SEQ ID NO: 23400 - DNA, 20 bp, Artificial Sequence
  Synthetic oligonucleotide; CAG chr11 5354625 5354644 5354641 +
ctcccgcccctccacgccac

SEQ ID NO: 23401 - DNA, 20 bp, Artificial Sequence
  Synthetic oligonucleotide; GAG chr11 5354635 5354654 5354651 +
tccacgccaccagccacact

SEQ ID NO: 23402 - DNA, 20 bp, Artificial Sequence
  Synthetic oligonucleotide; CAG chr11 5354642 5354661 5354658 +
caccagccacactgagcgct

SEQ ID NO: 23403 - DNA, 20 bp, Artificial Sequence
  Synthetic oligonucleotide; CAG chr11 5354652 5354671 5354668 +
actgagcgctcagctcctcc

SEQ ID NO: 23404 - DNA, 20 bp, Artificial Sequence
  Synthetic oligonucleotide; AGG chr11 5354653 5354672 5354669 +
ctgagcgctcagctcctccc

SEQ ID NO: 23405 - DNA, 20 bp, Artificial Sequence
  Synthetic oligonucleotide; TGG chr11 5354659 5354678 5354675 +
gctcagctcctcccaggtcc

SEQ ID NO: 23406 - DNA, 20 bp, Artificial Sequence
  Synthetic oligonucleotide; CAG chr11 5354667 5354686 5354683 +
cctcccaggtcctggacctg

SEQ ID NO: 23407 - DNA, 20 bp, Artificial Sequence
  Synthetic oligonucleotide; TGG chr11 5354673 5354692 5354689 +
aggtcctggacctgcagccc

SEQ ID NO: 23408 - DNA, 20 bp, Artificial Sequence
  Synthetic oligonucleotide; AAG chr11 5354684 5354703 5354700 +
ctgcagccctggccaacatc

SEQ ID NO: 23409 - DNA, 20 bp, Artificial Sequence
  Synthetic oligonucleotide; GAG chr11 5354686 5354705 5354702 +
gcagccctggccaacatcaa

SEQ ID NO: 23410 - DNA, 20 bp, Artificial Sequence
  Synthetic oligonucleotide; AGG chr11 5354687 5354706 5354703 +
cagccctggccaacatcaag

SEQ ID NO: 23411 - DNA, 20 bp, Artificial Sequence
  Synthetic oligonucleotide; GGG chr11 5354688 5354707 5354704 +
agccctggccaacatcaaga

SEQ ID NO: 23412 - DNA, 20 bp, Artificial Sequence
  Synthetic oligonucleotide; AAG chr11 5354701 5354720 5354717 +
atcaagagggcatctttgcc

SEQ ID NO: 23413 - DNA, 20 bp, Artificial Sequence
  Synthetic oligonucleotide; TGG chr11 5354710 5354729 5354726 +
gcatctttgccaagaatgcc

SEQ ID NO: 23414 - DNA, 20 bp, Artificial Sequence
  Synthetic oligonucleotide; AAG chr11 5354713 5354732 5354729 +
tctttgccaagaatgcctgg

SEQ ID NO: 23415 - DNA, 20 bp, Artificial Sequence
  Synthetic oligonucleotide; GAG chr11 5354715 5354734 5354731 +
tttgccaagaatgcctggaa

SEQ ID NO: 23416 - DNA, 20 bp, Artificial Sequence
  Synthetic oligonucleotide; CAG chr11 5354721 5354740 5354737 +
aagaatgcctggaagagact

SEQ ID NO: 23417 - DNA, 20 bp, Artificial Sequence
  Synthetic oligonucleotide; CAG chr11 5354731 5354750 5354747 +
ggaagagactcagccactca

SEQ ID NO: 23418 - DNA, 20 bp, Artificial Sequence
  Synthetic oligonucleotide; AGG chr11 5354732 5354751 5354748 +
gaagagactcagccactcac

SEQ ID NO: 23419 - DNA, 20 bp, Artificial Sequence
  Synthetic oligonucleotide; CAG chr11 5354746 5354765 5354762 +
actcacaggaaaacgtcctc

SEQ ID NO: 23420 - DNA, 20 bp, Artificial Sequence
  Synthetic oligonucleotide; AAG chr11 5354749 5354768 5354765 +
cacaggaaaacgtcctccag

SEQ ID NO: 23421 - DNA, 20 bp, Artificial Sequence
  Synthetic oligonucleotide; CAG chr11 5354753 5354772 5354769 +
ggaaaacgtcctccagaagc

SEQ ID NO: 23422 - DNA, 20 bp, Artificial Sequence
  Synthetic oligonucleotide; AGG chr11 5354754 5354773 5354770 +
gaaaacgtcctccagaagcc

SEQ ID NO: 23423 - DNA, 20 bp, Artificial Sequence
  Synthetic oligonucleotide; GGG chr11 5354755 5354774 5354771 +
aaaacgtcctccagaagcca

SEQ ID NO: 23424 - DNA, 20 bp, Artificial Sequence
  Synthetic oligonucleotide; AAG chr11 5354759 5354778 5354775 +
cgtcctccagaagccaggga

SEQ ID NO: 23425 - DNA, 20 bp, Artificial Sequence
  Synthetic oligonucleotide; GAG chr11 5354767 5354786 5354783 +
agaagccagggaaagctgct

SEQ ID NO: 23426 - DNA, 20 bp, Artificial Sequence
  Synthetic oligonucleotide; AAG chr11 5354774 5354793 5354790 +
agggaaagctgctgagacaa

SEQ ID NO: 23427 - DNA, 20 bp, Artificial Sequence
  Synthetic oligonucleotide; CAG chr11 5354782 5354801 5354798 +
ctgctgagacaaaagacaaa

SEQ ID NO: 23428 - DNA, 20 bp, Artificial Sequence
  Synthetic oligonucleotide; AAG chr11 5354789 5354808 5354805 +
gacaaaagacaaacagtttg

SEQ ID NO: 23429 - DNA, 20 bp, Artificial Sequence
  Synthetic oligonucleotide; CAG chr11 5354800 5354819 5354816 +
aacagtttgaagaatatgtc

SEQ ID NO: 23430 - DNA, 20 bp, Artificial Sequence
  Synthetic oligonucleotide; AAG chr11 5354809 5354828 5354825 +
aagaatatgtccagaacttc

SEQ ID NO: 23431 - DNA, 20 bp, Artificial Sequence
  Synthetic oligonucleotide; AAG chr11 5354816 5354835 5354832 +
tgtccagaacttcaagccac

SEQ ID NO: 23432 - DNA, 20 bp, Artificial Sequence
  Synthetic oligonucleotide; AAG chr11 5354819 5354838 5354835 +
ccagaacttcaagccacaag

SEQ ID NO: 23433 - DNA, 20 bp, Artificial Sequence
  Synthetic oligonucleotide; CAG chr11 5354822 5354841 5354838 +
gaacttcaagccacaagaag

SEQ ID NO: 23434 - DNA, 20 bp, Artificial Sequence
  Synthetic oligonucleotide; GAG chr11 5354824 5354843 5354840 +
acttcaagccacaagaagca

SEQ ID NO: 23435 - DNA, 20 bp, Artificial Sequence
  Synthetic oligonucleotide; AGG chr11 5354825 5354844 5354841 +
cttcaagccacaagaagcag

SEQ ID NO: 23436 - DNA, 20 bp, Artificial Sequence
  Synthetic oligonucleotide; GGG chr11 5354826 5354845 5354842 +
ttcaagccacaagaagcaga

SEQ ID NO: 23437 - DNA, 20 bp, Artificial Sequence
  Synthetic oligonucleotide; CAG chr11 5354832 5354851 5354848 +
ccacaagaagcagagggtac

SEQ ID NO: 23438 - DNA, 20 bp, Artificial Sequence
  Synthetic oligonucleotide; GAG chr11 5354839 5354858 5354855 +
aagcagagggtaccagacct

SEQ ID NO: 23439 - DNA, 20 bp, Artificial Sequence
  Synthetic oligonucleotide; GAG chr11 5354841 5354860 5354857 +
gcagagggtaccagacctga

SEQ ID NO: 23440 - DNA, 20 bp, Artificial Sequence
  Synthetic oligonucleotide; GAG chr11 5354850 5354869 5354866 +
accagacctgagagaactct

SEQ ID NO: 23441 - DNA, 20 bp, Artificial Sequence
  Synthetic oligonucleotide; AGG chr11 5354851 5354870 5354867 +
ccagacctgagagaactctg

SEQ ID NO: 23442 - DNA, 20 bp, Artificial Sequence
  Synthetic oligonucleotide; TAG chr11 5354859 5354878 5354875 +
gagagaactctgaggatgtt

SEQ ID NO: 23443 - DNA, 20 bp, Artificial Sequence
  Synthetic oligonucleotide; AAG chr11 5354862 5354881 5354878 +
agaactctgaggatgtttag

SEQ ID NO: 23444 - DNA, 20 bp, Artificial Sequence
  Synthetic oligonucleotide; AAG chr11 5354871 5354890 5354887 +
aggatgtttagaagcaatca

SEQ ID NO: 23445 - DNA, 20 bp, Artificial Sequence
  Synthetic oligonucleotide; AGG chr11 5354872 5354891 5354888 +
ggatgtttagaagcaatcaa

SEQ ID NO: 23446 - DNA, 20 bp, Artificial Sequence
  Synthetic oligonucleotide; AAG chr11 5354880 5354899 5354896 +
agaagcaatcaaaggcattc

SEQ ID NO: 23447 - DNA, 20 bp, Artificial Sequence
  Synthetic oligonucleotide; GAG chr11 5354882 5354901 5354898 +
aagcaatcaaaggcattcaa

SEQ ID NO: 23448 - DNA, 20 bp, Artificial Sequence
  Synthetic oligonucleotide; AAG chr11 5354894 5354913 5354910 +
gcattcaagagaccttgacg

SEQ ID NO: 23449 - DNA, 20 bp, Artificial Sequence
  Synthetic oligonucleotide; GAG chr11 5354899 5354918 5354915 +
caagagaccttgacgaagct

SEQ ID NO: 23450 - DNA, 20 bp, Artificial Sequence
  Synthetic oligonucleotide; AAG chr11 5354912 5354931 5354928 +
cgaagctgagtcactgtgtg

SEQ ID NO: 23451 - DNA, 20 bp, Artificial Sequence
  Synthetic oligonucleotide; TGG chr11 5354924 5354943 5354940 +
actgtgtgaagtctgtgcgc

SEQ ID NO: 23452 - DNA, 20 bp, Artificial Sequence
  Synthetic oligonucleotide; TGG chr11 5354929 5354948 5354945 +
gtgaagtctgtgcgctggat

SEQ ID NO: 23453 - DNA, 20 bp, Artificial Sequence
  Synthetic oligonucleotide; TGG chr11 5354934 5354953 5354950 +
gtctgtgcgctggattggtc

SEQ ID NO: 23454 - DNA, 20 bp, Artificial Sequence
  Synthetic oligonucleotide; GGG chr11 5354935 5354954 5354951 +
tctgtgcgctggattggtct

SEQ ID NO: 23455 - DNA, 20 bp, Artificial Sequence
  Synthetic oligonucleotide; CAG chr11 5354938 5354957 5354954 +
gtgcgctggattggtctggg

SEQ ID NO: 23456 - DNA, 20 bp, Artificial Sequence
  Synthetic oligonucleotide; AGG chr11 5354939 5354958 5354955 +
tgcgctggattggtctgggc

SEQ ID NO: 23457 - DNA, 20 bp, Artificial Sequence
  Synthetic oligonucleotide; AAG chr11 5354942 5354961 5354958 +
gctggattggtctgggcagg

SEQ ID NO: 23458 - DNA, 20 bp, Artificial Sequence
  Synthetic oligonucleotide; AGG chr11 5354943 5354962 5354959 +
ctggattggtctgggcagga

SEQ ID NO: 23459 - DNA, 20 bp, Artificial Sequence
  Synthetic oligonucleotide; TGG chr11 5354954 5354973 5354970 +
tgggcaggaaggtgtgaaaa

SEQ ID NO: 23460 - DNA, 20 bp, Artificial Sequence
  Synthetic oligonucleotide; TGG chr11 5354958 5354977 5354974 +
caggaaggtgtgaaaatggt

SEQ ID NO: 23461 - DNA, 20 bp, Artificial Sequence
  Synthetic oligonucleotide; GAG chr11 5354962 5354981 5354978 +
aaggtgtgaaaatggttggt

SEQ ID NO: 23462 - DNA, 20 bp, Artificial Sequence
  Synthetic oligonucleotide; AAG chr11 5354966 5354985 5354982 +
tgtgaaaatggttggtgaga

SEQ ID NO: 23463 - DNA, 20 bp, Artificial Sequence
  Synthetic oligonucleotide; AGG chr11 5354967 5354986 5354983 +
gtgaaaatggttggtgagaa

SEQ ID NO: 23464 - DNA, 20 bp, Artificial Sequence
  Synthetic oligonucleotide; TGG chr11 5354980 5354999 5354996 +
gtgagaaaggtgatgtgctc

SEQ ID NO: 23465 - DNA, 20 bp, Artificial Sequence
  Synthetic oligonucleotide; GGG chr11 5354981 5355000 5354997 +
tgagaaaggtgatgtgctct

SEQ ID NO: 23466 - DNA, 20 bp, Artificial Sequence
  Synthetic oligonucleotide; GAG chr11 5354983 5355002 5354999 +
agaaaggtgatgtgctctgg

SEQ ID NO: 23467 - DNA, 20 bp, Artificial Sequence
  Synthetic oligonucleotide; AGG chr11 5354984 5355003 5355000 +
gaaaggtgatgtgctctggg

SEQ ID NO: 23468 - DNA, 20 bp, Artificial Sequence
  Synthetic oligonucleotide; TGG chr11 5355005 5355024 5355021 +
ggatatccacaaaaaactca

SEQ ID NO: 23469 - DNA, 20 bp, Artificial Sequence
  Synthetic oligonucleotide; TGG chr11 5355026 5355045 5355042 +
ggatgcatccttgctaacac

SEQ ID NO: 23470 - DNA, 20 bp, Artificial Sequence
  Synthetic oligonucleotide; TGG chr11 5355038 5355057 5355054 +
gctaacactggaaaactacc

SEQ ID NO: 23471 - DNA, 20 bp, Artificial Sequence
  Synthetic oligonucleotide; AAG chr11 5355058 5355077 5355074 +
tggaccaatttcctgacttg

SEQ ID NO: 23472 - DNA, 20 bp, Artificial Sequence
  Synthetic oligonucleotide; AAG chr11 5355073 5355092 5355089 +
acttgaagaatcacatcacc

SEQ ID NO: 23473 - DNA, 20 bp, Artificial Sequence
  Synthetic oligonucleotide; CAG chr11 5355078 5355097 5355094 +
aagaatcacatcaccaagtg

SEQ ID NO: 23474 - DNA, 20 bp, Artificial Sequence
  Synthetic oligonucleotide; CAG chr11 5355081 5355100 5355097 +
aatcacatcaccaagtgcag

SEQ ID NO: 23475 - DNA, 20 bp, Artificial Sequence
  Synthetic oligonucleotide; AGG chr11 5355082 5355101 5355098 +
atcacatcaccaagtgcagc

SEQ ID NO: 23476 - DNA, 20 bp, Artificial Sequence
  Synthetic oligonucleotide; AAG chr11 5355085 5355104 5355101 +
acatcaccaagtgcagcagg

SEQ ID NO: 23477 - DNA, 20 bp, Artificial Sequence
  Synthetic oligonucleotide; CGG chr11 5355092 5355111 5355108 +
caagtgcagcaggaagctta

SEQ ID NO: 23478 - DNA, 20 bp, Artificial Sequence
  Synthetic oligonucleotide; CAG chr11 5355102 5355121 5355118 +
aggaagcttacggactatga

SEQ ID NO: 23479 - DNA, 20 bp, Artificial Sequence
  Synthetic oligonucleotide; CGG chr11 5355122 5355141 5355138 +
cagtgcctgcccacctccat

SEQ ID NO: 23480 - DNA, 20 bp, Artificial Sequence
  Synthetic oligonucleotide; GGG chr11 5355123 5355142 5355139 +
agtgcctgcccacctccatc

SEQ ID NO: 23481 - DNA, 20 bp, Artificial Sequence
  Synthetic oligonucleotide; CAG chr11 5355131 5355150 5355147 +
cccacctccatcgggctcaa

SEQ ID NO: 23482 - DNA, 20 bp, Artificial Sequence
  Synthetic oligonucleotide; GAG chr11 5355133 5355152 5355149 +
cacctccatcgggctcaaca

SEQ ID NO: 23483 - DNA, 20 bp, Artificial Sequence
  Synthetic oligonucleotide; CAG chr11 5355139 5355158 5355155 +
catcgggctcaacagagctt

SEQ ID NO: 23484 - DNA, 20 bp, Artificial Sequence
  Synthetic oligonucleotide; AGG chr11 5355140 5355159 5355156 +
atcgggctcaacagagcttc

SEQ ID NO: 23485 - DNA, 20 bp, Artificial Sequence
  Synthetic oligonucleotide; GAG chr11 5355142 5355161 5355158 +
cgggctcaacagagcttcag

SEQ ID NO: 23486 - DNA, 20 bp, Artificial Sequence
  Synthetic oligonucleotide; AGG chr11 5355143 5355162 5355159 +
gggctcaacagagcttcagg

SEQ ID NO: 23487 - DNA, 20 bp, Artificial Sequence
  Synthetic oligonucleotide; AAG chr11 5355146 5355165 5355162 +
ctcaacagagcttcaggagg

SEQ ID NO: 23488 - DNA, 20 bp, Artificial Sequence
  Synthetic oligonucleotide; AGG chr11 5355147 5355166 5355163 +
tcaacagagcttcaggagga

SEQ ID NO: 23489 - DNA, 20 bp, Artificial Sequence
  Synthetic oligonucleotide; TAG chr11 5355151 5355170 5355167 +
cagagcttcaggaggaagga

SEQ ID NO: 23490 - DNA, 20 bp, Artificial Sequence
  Synthetic oligonucleotide; AGG chr11 5355152 5355171 5355168 +
agagcttcaggaggaaggat

SEQ ID NO: 23491 - DNA, 20 bp, Artificial Sequence
  Synthetic oligonucleotide; GAG chr11 5355154 5355173 5355170 +
agcttcaggaggaaggatag

SEQ ID NO: 23492 - DNA, 20 bp, Artificial Sequence
  Synthetic oligonucleotide; AAG chr11 5355166 5355185 5355182 +
aaggataggagcctctgtct

SEQ ID NO: 23493 - DNA, 20 bp, Artificial Sequence
  Synthetic oligonucleotide; AGG chr11 5355167 5355186 5355183 +
aggataggagcctctgtcta

SEQ ID NO: 23494 - DNA, 20 bp, Artificial Sequence
  Synthetic oligonucleotide; CAG chr11 5355170 5355189 5355186 +
ataggagcctctgtctaagg

SEQ ID NO: 23495 - DNA, 20 bp, Artificial Sequence
  Synthetic oligonucleotide; AAG chr11 5355173 5355192 5355189 +
ggagcctctgtctaaggcag

SEQ ID NO: 23496 - DNA, 20 bp, Artificial Sequence
  Synthetic oligonucleotide; TAG chr11 5355176 5355195 5355192 +
gcctctgtctaaggcagaag

SEQ ID NO: 23497 - DNA, 20 bp, Artificial Sequence
  Synthetic oligonucleotide; CAG chr11 5355184 5355203 5355200 +
ctaaggcagaagtagaattt

SEQ ID NO: 23498 - DNA, 20 bp, Artificial Sequence
  Synthetic oligonucleotide; AAG chr11 5355188 5355207 5355204 +
ggcagaagtagaatttcaga

SEQ ID NO: 23499 - DNA, 20 bp, Artificial Sequence
  Synthetic oligonucleotide; TAG chr11 5355193 5355212 5355209 +
aagtagaatttcagaaagca

SEQ ID NO: 23500 - DNA, 20 bp, Artificial Sequence
  Synthetic oligonucleotide; GAG chr11 5355195 5355214 5355211 +
gtagaatttcagaaagcata

SEQ ID NO: 23501 - DNA, 20 bp, Artificial Sequence
  Synthetic oligonucleotide; AAG chr11 5355199 5355218 5355215 +
aatttcagaaagcatagaga

SEQ ID NO: 23502 - DNA, 20 bp, Artificial Sequence
  Synthetic oligonucleotide; AAG chr11 5355206 5355225 5355222 +
gaaagcatagagaaagtttg

SEQ ID NO: 23503 - DNA, 20 bp, Artificial Sequence
  Synthetic oligonucleotide; GAG chr11 5355208 5355227 5355224 +
aagcatagagaaagtttgaa

SEQ ID NO: 23504 - DNA, 20 bp, Artificial Sequence
  Synthetic oligonucleotide; TGG chr11 5355216 5355235 5355232 +
agaaagtttgaagagtttaa

SEQ ID NO: 23505 - DNA, 20 bp, Artificial Sequence
  Synthetic oligonucleotide; AAG chr11 5355227 5355246 5355243 +
agagtttaatggtgacttac

SEQ ID NO: 23506 - DNA, 20 bp, Artificial Sequence
  Synthetic oligonucleotide; AAG chr11 5355232 5355251 5355248 +
ttaatggtgacttacaagaa

SEQ ID NO: 23507 - DNA, 20 bp, Artificial Sequence
  Synthetic oligonucleotide; TAG chr11 5355247 5355266 5355263 +
aagaaaagttaccattatta

SEQ ID NO: 23508 - DNA, 20 bp, Artificial Sequence
  Synthetic oligonucleotide; AAG chr11 5355252 5355271 5355268 +
aagttaccattattatagtc

SEQ ID NO: 23509 - DNA, 20 bp, Artificial Sequence
  Synthetic oligonucleotide; TGG chr11 5355261 5355280 5355277 +
ttattatagtcaagacgaat

SEQ ID NO: 23510 - DNA, 20 bp, Artificial Sequence
  Synthetic oligonucleotide; CAG chr11 5355294 5355313 5355310 +
aatactttcaaaaacatctc

SEQ ID NO: 23511 - DNA, 20 bp, Artificial Sequence
  Synthetic oligonucleotide; AAG chr11 5355302 5355321 5355318 +
caaaaacatctccagccttg

SEQ ID NO: 23512 - DNA, 20 bp, Artificial Sequence
  Synthetic oligonucleotide; AAG chr11 5355307 5355326 5355323 +
acatctccagccttgaagct

SEQ ID NO: 23513 - DNA, 20 bp, Artificial Sequence
  Synthetic oligonucleotide; AAG chr11 5355316 5355335 5355332 +
gccttgaagctaagtttcat

SEQ ID NO: 23514 - DNA, 20 bp, Artificial Sequence
  Synthetic oligonucleotide; AGG chr11 5355317 5355336 5355333 +
ccttgaagctaagtttcata

SEQ ID NO: 23515 - DNA, 20 bp, Artificial Sequence
  Synthetic oligonucleotide; TGG chr11 5355326 5355345 5355342 +
taagtttcataaggaaactg

SEQ ID NO: 23516 - DNA, 20 bp, Artificial Sequence
  Synthetic oligonucleotide; TGG chr11 5355334 5355353 5355350 +
ataaggaaactgtggtgctt

SEQ ID NO: 23517 - DNA, 20 bp, Artificial Sequence
  Synthetic oligonucleotide; CAG chr11 5355343 5355362 5355359 +
ctgtggtgctttggtacaaa

SEQ ID NO: 23518 - DNA, 20 bp, Artificial Sequence
  Synthetic oligonucleotide; AAG chr11 5355350 5355369 5355366 +
gctttggtacaaacagtatg

SEQ ID NO: 23519 - DNA, 20 bp, Artificial Sequence
  Synthetic oligonucleotide; TGG chr11 5355365 5355384 5355381 +
gtatgaagtgatgatgaaac

SEQ ID NO: 23520 - DNA, 20 bp, Artificial Sequence
  Synthetic oligonucleotide; GGG chr11 5355366 5355385 5355382 +
tatgaagtgatgatgaaact

SEQ ID NO: 23521 - DNA, 20 bp, Artificial Sequence
  Synthetic oligonucleotide; CAG chr11 5355373 5355392 5355389 +
tgatgatgaaactgggtgac

SEQ ID NO: 23522 - DNA, 20 bp, Artificial Sequence
  Synthetic oligonucleotide; AAG chr11 5355385 5355404 5355401 +
tgggtgaccagtatgctgac

SEQ ID NO: 23523 - DNA, 20 bp, Artificial Sequence
  Synthetic oligonucleotide; AGG chr11 5355386 5355405 5355402 +
gggtgaccagtatgctgaca

SEQ ID NO: 23524 - DNA, 20 bp, Artificial Sequence
  Synthetic oligonucleotide; AAG chr11 5355402 5355421 5355418 +
gacaaggccttcaacattca

SEQ ID NO: 23525 - DNA, 20 bp, Artificial Sequence
  Synthetic oligonucleotide; GAG chr11 5355404 5355423 5355420 +
caaggccttcaacattcaaa

SEQ ID NO: 23526 - DNA, 20 bp, Artificial Sequence
  Synthetic oligonucleotide; TGG chr11 5355422 5355441 5355438 +
aagagcaacacccactgatt

SEQ ID NO: 23527 - DNA, 20 bp, Artificial Sequence
  Synthetic oligonucleotide; GGG chr11 5355423 5355442 5355439 +
agagcaacacccactgattt

SEQ ID NO: 23528 - DNA, 20 bp, Artificial Sequence
  Synthetic oligonucleotide; AAG chr11 5355442 5355461 5355458 +
tgggtcctctccacattgca

SEQ ID NO: 23529 - DNA, 20 bp, Artificial Sequence
  Synthetic oligonucleotide; TGG chr11 5355454 5355473 5355470 +
acattgcaaagatgtcctca

SEQ ID NO: 23530 - DNA, 20 bp, Artificial Sequence
  Synthetic oligonucleotide; TAG chr11 5355459 5355478 5355475 +
gcaaagatgtcctcatggcc

SEQ ID NO: 23531 - DNA, 20 bp, Artificial Sequence
  Synthetic oligonucleotide; AGG chr11 5355460 5355479 5355476 +
caaagatgtcctcatggcct

SEQ ID NO: 23532 - DNA, 20 bp, Artificial Sequence
  Synthetic oligonucleotide; GGG chr11 5355461 5355480 5355477 +
aaagatgtcctcatggccta

SEQ ID NO: 23533 - DNA, 20 bp, Artificial Sequence
  Synthetic oligonucleotide; GAG chr11 5355463 5355482 5355479 +
agatgtcctcatggcctagg

SEQ ID NO: 23534 - DNA, 20 bp, Artificial Sequence
  Synthetic oligonucleotide; CAG chr11 5355480 5355499 5355496 +
agggagctttcattccaccc

SEQ ID NO: 23535 - DNA, 20 bp, Artificial Sequence
  Synthetic oligonucleotide; TAG chr11 5355492 5355511 5355508 +
ttccaccccagcccaacaac

SEQ ID NO: 23536 - DNA, 20 bp, Artificial Sequence
  Synthetic oligonucleotide; AAG chr11 5355498 5355517 5355514 +
cccagcccaacaactagttc

SEQ ID NO: 23537 - DNA, 20 bp, Artificial Sequence
  Synthetic oligonucleotide; TAG chr11 5355509 5355528 5355525 +
aactagttcaagtgaaacac

SEQ ID NO: 23538 - DNA, 20 bp, Artificial Sequence
  Synthetic oligonucleotide; CAG chr11 5355530 5355549 5355546 +
agcacctgcttctcctatgc

SEQ ID NO: 23539 - DNA, 20 bp, Artificial Sequence
  Synthetic oligonucleotide; GAG chr11 5355541 5355560 5355557 +
ctcctatgccagcatgacct

SEQ ID NO: 23540 - DNA, 20 bp, Artificial Sequence
  Synthetic oligonucleotide; CAG chr11 5355553 5355572 5355569 +
catgacctgagtcactcttg

SEQ ID NO: 23541 - DNA, 20 bp, Artificial Sequence
  Synthetic oligonucleotide; AAG chr11 5355571 5355590 5355587 +
tgcagtcctgtatctgtcta

SEQ ID NO: 23542 - DNA, 20 bp, Artificial Sequence
  Synthetic oligonucleotide; AAG chr11 5355584 5355603 5355600 +
ctgtctaaagtcacttgaca

SEQ ID NO: 23543 - DNA, 20 bp, Artificial Sequence
  Synthetic oligonucleotide; AGG chr11 5355585 5355604 5355601 +
tgtctaaagtcacttgacaa

SEQ ID NO: 23544 - DNA, 20 bp, Artificial Sequence
  Synthetic oligonucleotide; CAG chr11 5355593 5355612 5355609 +
gtcacttgacaaaggaactg

SEQ ID NO: 23545 - DNA, 20 bp, Artificial Sequence
  Synthetic oligonucleotide; CAG chr11 5355596 5355615 5355612 +
acttgacaaaggaactgcag

SEQ ID NO: 23546 - DNA, 20 bp, Artificial Sequence
  Synthetic oligonucleotide; AGG chr11 5355597 5355616 5355613 +
cttgacaaaggaactgcagc

SEQ ID NO: 23547 - DNA, 20 bp, Artificial Sequence
  Synthetic oligonucleotide; CAG chr11 5355616 5355635 5355632 +
caggaaaaatatcatcttca

SEQ ID NO: 23548 - DNA, 20 bp, Artificial Sequence
  Synthetic oligonucleotide; AAG chr11 5355628 5355647 5355644 +
catcttcacagactgtccta

SEQ ID NO: 23549 - DNA, 20 bp, Artificial Sequence
  Synthetic oligonucleotide; AAG chr11 5355632 5355651 5355648 +
ttcacagactgtcctaaagt

SEQ ID NO: 23550 - DNA, 20 bp, Artificial Sequence
  Synthetic oligonucleotide; TAG chr11 5355636 5355655 5355652 +
cagactgtcctaaagtaaga

SEQ ID NO: 23551 - DNA, 20 bp, Artificial Sequence
  Synthetic oligonucleotide; AGG chr11 5355637 5355656 5355653 +
agactgtcctaaagtaagat

SEQ ID NO: 23552 - DNA, 20 bp, Artificial Sequence
  Synthetic oligonucleotide; AAG chr11 5355672 5355691 5355688 +
tatccacaaatcatctgtaa

SEQ ID NO: 23553 - DNA, 20 bp, Artificial Sequence
  Synthetic oligonucleotide; CAG chr11 5355684 5355703 5355700 +
atctgtaaaagttatgtttt

SEQ ID NO: 23554 - DNA, 20 bp, Artificial Sequence
  Synthetic oligonucleotide; TGG chr11 5355687 5355706 5355703 +
tgtaaaagttatgttttcag

SEQ ID NO: 23555 - DNA, 20 bp, Artificial Sequence
  Synthetic oligonucleotide; TGG chr11 5355711 5355730 5355727 +
gtgtcatttcaaataaacct

SEQ ID NO: 23556 - DNA, 20 bp, Artificial Sequence
  Synthetic oligonucleotide; GGG chr11 5355712 5355731 5355728 +
tgtcatttcaaataaacctt

SEQ ID NO: 23557 - DNA, 20 bp, Artificial Sequence
  Synthetic oligonucleotide; AAG chr11 5355755 5355774 5355771 +
taaaaattaaaaaaaaaaaa

SEQ ID NO: 23558 - DNA, 20 bp, Artificial Sequence
  Synthetic oligonucleotide; GAG chr11 5355757 5355776 5355773 +
aaaattaaaaaaaaaaaaaa

SEQ ID NO: 23559 - DNA, 20 bp, Artificial Sequence
  Synthetic oligonucleotide; TAG chr11 5355760 5355779 5355776 +
attaaaaaaaaaaaaaagag

SEQ ID NO: 23560 - DNA, 20 bp, Artificial Sequence
  Synthetic oligonucleotide; AGG chr11 5355761 5355780 5355777 +
ttaaaaaaaaaaaaaagagt

SEQ ID NO: 23561 - DNA, 20 bp, Artificial Sequence
  Synthetic oligonucleotide; GGG chr11 5355762 5355781 5355778 +
taaaaaaaaaaaaaagagta

SEQ ID NO: 23562 - DNA, 20 bp, Artificial Sequence
  Synthetic oligonucleotide; AAG chr11 5355767 5355786 5355783 +
aaaaaaaaaagagtagggtc

SEQ ID NO: 23563 - DNA, 20 bp, Artificial Sequence
  Synthetic oligonucleotide; AGG chr11 5355768 5355787 5355784 +
aaaaaaaaagagtagggtca

SEQ ID NO: 23564 - DNA, 20 bp, Artificial Sequence
  Synthetic oligonucleotide; GGG chr11 5355769 5355788 5355785 +
aaaaaaaagagtagggtcaa

SEQ ID NO: 23565 - DNA, 20 bp, Artificial Sequence
  Synthetic oligonucleotide; GGG chr11 5355770 5355789 5355786 +
aaaaaaagagtagggtcaag

SEQ ID NO: 23566 - DNA, 20 bp, Artificial Sequence
  Synthetic oligonucleotide; TAG chr11 5355775 5355794 5355791 +
aagagtagggtcaaggggta

SEQ ID NO: 23567 - DNA, 20 bp, Artificial Sequence
  Synthetic oligonucleotide; AGG chr11 5355776 5355795 5355792 +
agagtagggtcaaggggtat

SEQ ID NO: 23568 - DNA, 20 bp, Artificial Sequence
  Synthetic oligonucleotide; GGG chr11 5355777 5355796 5355793 +
gagtagggtcaaggggtata

SEQ ID NO: 23569 - DNA, 20 bp, Artificial Sequence
  Synthetic oligonucleotide; TAG chr11 5355780 5355799 5355796 +
tagggtcaaggggtataggg

SEQ ID NO: 23570 - DNA, 20 bp, Artificial Sequence
  Synthetic oligonucleotide; AAG chr11 5355796 5355815 5355812 +
agggtagcaaaattttctta

SEQ ID NO: 23571 - DNA, 20 bp, Artificial Sequence
  Synthetic oligonucleotide; AGG chr11 5355797 5355816 5355813 +
gggtagcaaaattttcttaa

SEQ ID NO: 23572 - DNA, 20 bp, Artificial Sequence
  Synthetic oligonucleotide; TAG chr11 5355829 5355848 5355845 +
atgccctgctctgattcctg

SEQ ID NO: 23573 - DNA, 20 bp, Artificial Sequence
  Synthetic oligonucleotide; TAG chr11 5355837 5355856 5355853 +
ctctgattcctgtagtgaca

SEQ ID NO: 23574 - DNA, 20 bp, Artificial Sequence
  Synthetic oligonucleotide; AGG chr11 5355838 5355857 5355854 +
tctgattcctgtagtgacat

SEQ ID NO: 23575 - DNA, 20 bp, Artificial Sequence
  Synthetic oligonucleotide; CAG chr11 5355851 5355870 5355867 +
gtgacataggcgtcaatata

SEQ ID NO: 23576 - DNA, 20 bp, Artificial Sequence
  Synthetic oligonucleotide; AAG chr11 5355856 5355875 5355872 +
ataggcgtcaatatacagac

SEQ ID NO: 23577 - DNA, 20 bp, Artificial Sequence
  Synthetic oligonucleotide; AGG chr11 5355857 5355876 5355873 +
taggcgtcaatatacagaca

SEQ ID NO: 23578 - DNA, 20 bp, Artificial Sequence
  Synthetic oligonucleotide; TGG chr11 5355863 5355882 5355879 +
tcaatatacagacaaggtcc

SEQ ID NO: 23579 - DNA, 20 bp, Artificial Sequence
  Synthetic oligonucleotide; AAG chr11 5355866 5355885 5355882 +
atatacagacaaggtcctgg

SEQ ID NO: 23580 - DNA, 20 bp, Artificial Sequence
  Synthetic oligonucleotide; AAG chr11 5355889 5355908 5355905 +
ttcttttaaaaatctgctgc

SEQ ID NO: 23581 - DNA, 20 bp, Artificial Sequence
  Synthetic oligonucleotide; GAG chr11 5355894 5355913 5355910 +
ttaaaaatctgctgcaagct

SEQ ID NO: 23582 - DNA, 20 bp, Artificial Sequence
  Synthetic oligonucleotide; AGG chr11 5355895 5355914 5355911 +
taaaaatctgctgcaagctg

SEQ ID NO: 23583 - DNA, 20 bp, Artificial Sequence
  Synthetic oligonucleotide; GGG chr11 5355896 5355915 5355912 +
aaaaatctgctgcaagctga

SEQ ID NO: 23584 - DNA, 20 bp, Artificial Sequence
  Synthetic oligonucleotide; TAG chr11 5355905 5355924 5355921 +
ctgcaagctgagggtcctgt

SEQ ID NO: 23585 - DNA, 20 bp, Artificial Sequence
  Synthetic oligonucleotide; AAG chr11 5355908 5355927 5355924 +
caagctgagggtcctgttag

SEQ ID NO: 23586 - DNA, 20 bp, Artificial Sequence
  Synthetic oligonucleotide; AGG chr11 5355909 5355928 5355925 +
aagctgagggtcctgttaga

SEQ ID NO: 23587 - DNA, 20 bp, Artificial Sequence
  Synthetic oligonucleotide; CAG chr11 5355924 5355943 5355940 +
ttagaaggaaaactaacaaa

SEQ ID NO: 23588 - DNA, 20 bp, Artificial Sequence
  Synthetic oligonucleotide; AAG chr11 5355928 5355947 5355944 +
aaggaaaactaacaaacaga

SEQ ID NO: 23589 - DNA, 20 bp, Artificial Sequence
  Synthetic oligonucleotide; AGG chr11 5355929 5355948 5355945 +
aggaaaactaacaaacagaa

SEQ ID NO: 23590 - DNA, 20 bp, Artificial Sequence
  Synthetic oligonucleotide; AAG chr11 5355972 5355991 5355988 +
tctgtacgtcaccatcatca

SEQ ID NO: 23591 - DNA, 20 bp, Artificial Sequence
  Synthetic oligonucleotide; AAG chr11 5355979 5355998 5355995 +
gtcaccatcatcaaagacca

SEQ ID NO: 23592 - DNA, 20 bp, Artificial Sequence
  Synthetic oligonucleotide; AGG chr11 5355980 5355999 5355996 +
tcaccatcatcaaagaccaa

SEQ ID NO: 23593 - DNA, 20 bp, Artificial Sequence
  Synthetic oligonucleotide; TAG chr11 5355983 5356002 5355999 +
ccatcatcaaagaccaaagg

SEQ ID NO: 23594 - DNA, 20 bp, Artificial Sequence
  Synthetic oligonucleotide; AAG chr11 5355997 5356016 5356013 +
caaaggtagataaaaccaca

SEQ ID NO: 23595 - DNA, 20 bp, Artificial Sequence
  Synthetic oligonucleotide; TGG chr11 5356001 5356020 5356017 +
ggtagataaaaccacaaaga

SEQ ID NO: 23596 - DNA, 20 bp, Artificial Sequence
  Synthetic oligonucleotide; GGG chr11 5356002 5356021 5356018 +
gtagataaaaccacaaagat

SEQ ID NO: 23597 - DNA, 20 bp, Artificial Sequence
  Synthetic oligonucleotide; GGG chr11 5356003 5356022 5356019 +
tagataaaaccacaaagatg

SEQ ID NO: 23598 - DNA, 20 bp, Artificial Sequence
  Synthetic oligonucleotide; CAG chr11 5356011 5356030 5356027 +
accacaaagatggggaaaaa

SEQ ID NO: 23599 - DNA, 20 bp, Artificial Sequence
  Synthetic oligonucleotide; GAG chr11 5356013 5356032 5356029 +
cacaaagatggggaaaaaca

SEQ ID NO: 23600 - DNA, 20 bp, Artificial Sequence
  Synthetic oligonucleotide; CAG chr11 5356016 5356035 5356032 +
aaagatggggaaaaacagag

SEQ ID NO: 23601 - DNA, 20 bp, Artificial Sequence
  Synthetic oligonucleotide; TGG chr11 5356025 5356044 5356041 +
gaaaaacagagcagaaaaac

SEQ ID NO: 23602 - DNA, 20 bp, Artificial Sequence
  Synthetic oligonucleotide; CAG chr11 5356041 5356060 5356057 +
aaactggaaactctaaaaat

SEQ ID NO: 23603 - DNA, 20 bp, Artificial Sequence
  Synthetic oligonucleotide; GAG chr11 5356043 5356062 5356059 +
actggaaactctaaaaatca

SEQ ID NO: 23604 - DNA, 20 bp, Artificial Sequence
  Synthetic oligonucleotide; AAG chr11 5356062 5356081 5356078 +
agagtgcctctcctcctcca

SEQ ID NO: 23605 - DNA, 20 bp, Artificial Sequence
  Synthetic oligonucleotide; AGG chr11 5356063 5356082 5356079 +
gagtgcctctcctcctccaa

SEQ ID NO: 23606 - DNA, 20 bp, Artificial Sequence
  Synthetic oligonucleotide; CAG chr11 5356070 5356089 5356086 +
tctcctcctccaaaggaatg

SEQ ID NO: 23607 - DNA, 20 bp, Artificial Sequence
  Synthetic oligonucleotide; CAG chr11 5356081 5356100 5356097 +
aaaggaatgcagctcctcac

SEQ ID NO: 23608 - DNA, 20 bp, Artificial Sequence
  Synthetic oligonucleotide; CGG chr11 5356087 5356106 5356103 +
atgcagctcctcaccagcaa

SEQ ID NO: 23609 - DNA, 20 bp, Artificial Sequence
  Synthetic oligonucleotide; AAG chr11 5356094 5356113 5356110 +
tcctcaccagcaacggtaca

SEQ ID NO: 23610 - DNA, 20 bp, Artificial Sequence
  Synthetic oligonucleotide; TGG chr11 5356098 5356117 5356114 +
caccagcaacggtacaaagc

SEQ ID NO: 23611 - DNA, 20 bp, Artificial Sequence
  Synthetic oligonucleotide; CAG chr11 5356102 5356121 5356118 +
agcaacggtacaaagctgga

SEQ ID NO: 23612 - DNA, 20 bp, Artificial Sequence
  Synthetic oligonucleotide; GAG chr11 5356104 5356123 5356120 +
caacggtacaaagctggaca

SEQ ID NO: 23613 - DNA, 20 bp, Artificial Sequence
  Synthetic oligonucleotide; AAG chr11 5356119 5356138 5356135 +
ggacagagaatgactttgac

SEQ ID NO: 23614 - DNA, 20 bp, Artificial Sequence
  Synthetic oligonucleotide; GAG chr11 5356124 5356143 5356140 +
gagaatgactttgacaagtt

SEQ ID NO: 23615 - DNA, 20 bp, Artificial Sequence
  Synthetic oligonucleotide; GAG chr11 5356126 5356145 5356142 +
gaatgactttgacaagttga

SEQ ID NO: 23616 - DNA, 20 bp, Artificial Sequence
  Synthetic oligonucleotide; AAG chr11 5356129 5356148 5356145 +
tgactttgacaagttgagag

SEQ ID NO: 23617 - DNA, 20 bp, Artificial Sequence
  Synthetic oligonucleotide; AAG chr11 5356132 5356151 5356148 +
ctttgacaagttgagagaag

SEQ ID NO: 23618 - DNA, 20 bp, Artificial Sequence
  Synthetic oligonucleotide; AGG chr11 5356133 5356152 5356149 +
tttgacaagttgagagaaga

SEQ ID NO: 23619 - DNA, 20 bp, Artificial Sequence
  Synthetic oligonucleotide; CAG chr11 5356139 5356158 5356155 +
aagttgagagaagaaggctt

SEQ ID NO: 23620 - DNA, 20 bp, Artificial Sequence
  Synthetic oligonucleotide; GAG chr11 5356158 5356177 5356174 +
tcagacgatcaaactactcc

SEQ ID NO: 23621 - DNA, 20 bp, Artificial Sequence
  Synthetic oligonucleotide; AAG chr11 5356164 5356183 5356180 +
gatcaaactactccgagcta

SEQ ID NO: 23622 - DNA, 20 bp, Artificial Sequence
  Synthetic oligonucleotide; AGG chr11 5356165 5356184 5356181 +
atcaaactactccgagctaa

SEQ ID NO: 23623 - DNA, 20 bp, Artificial Sequence
  Synthetic oligonucleotide; GAG chr11 5356167 5356186 5356183 +
caaactactccgagctaaag

SEQ ID NO: 23624 - DNA, 20 bp, Artificial Sequence
  Synthetic oligonucleotide; AGG chr11 5356168 5356187 5356184 +
aaactactccgagctaaagg

SEQ ID NO: 23625 - DNA, 20 bp, Artificial Sequence
  Synthetic oligonucleotide; AAG chr11 5356171 5356190 5356187 +
ctactccgagctaaaggagg

SEQ ID NO: 23626 - DNA, 20 bp, Artificial Sequence
  Synthetic oligonucleotide; TGG chr11 5356184 5356203 5356200 +
aaggaggaagctcgaaccca

SEQ ID NO: 23627 - DNA, 20 bp, Artificial Sequence
  Synthetic oligonucleotide; AAG chr11 5356192 5356211 5356208 +
agctcgaacccatggcaaaa

SEQ ID NO: 23628 - DNA, 20 bp, Artificial Sequence
  Synthetic oligonucleotide; TAG chr11 5356216 5356235 5356232 +
taaaaaccttgaaaataaat

SEQ ID NO: 23629 - DNA, 20 bp, Artificial Sequence
  Synthetic oligonucleotide; TGG chr11 5356224 5356243 5356240 +
ttgaaaataaattagactaa

SEQ ID NO: 23630 - DNA, 20 bp, Artificial Sequence
  Synthetic oligonucleotide; TAG chr11 5356232 5356251 5356248 +
aaattagactaatggctaac

SEQ ID NO: 23631 - DNA, 20 bp, Artificial Sequence
  Synthetic oligonucleotide; CAG chr11 5356246 5356265 5356262 +
gctaactagaataaccaata

SEQ ID NO: 23632 - DNA, 20 bp, Artificial Sequence
  Synthetic oligonucleotide; GAG chr11 5356248 5356267 5356264 +
taactagaataaccaataca

SEQ ID NO: 23633 - DNA, 20 bp, Artificial Sequence
  Synthetic oligonucleotide; AAG chr11 5356251 5356270 5356267 +
ctagaataaccaatacagag

SEQ ID NO: 23634 - DNA, 20 bp, Artificial Sequence
  Synthetic oligonucleotide; AAG chr11 5356260 5356279 5356276 +
ccaatacagagaagtcctta

SEQ ID NO: 23635 - DNA, 20 bp, Artificial Sequence
  Synthetic oligonucleotide; AGG chr11 5356261 5356280 5356277 +
caatacagagaagtccttaa

SEQ ID NO: 23636 - DNA, 20 bp, Artificial Sequence
  Synthetic oligonucleotide; TGG chr11 5356270 5356289 5356286 +
gaagtccttaaaggacctga

SEQ ID NO: 23637 - DNA, 20 bp, Artificial Sequence
  Synthetic oligonucleotide; GAG chr11 5356272 5356291 5356288 +
agtccttaaaggacctgatg

SEQ ID NO: 23638 - DNA, 20 bp, Artificial Sequence
  Synthetic oligonucleotide; AAG chr11 5356284 5356303 5356300 +
acctgatggagctgaaaacc

SEQ ID NO: 23639 - DNA, 20 bp, Artificial Sequence
  Synthetic oligonucleotide; AGG chr11 5356285 5356304 5356301 +
cctgatggagctgaaaacca

SEQ ID NO: 23640 - DNA, 20 bp, Artificial Sequence
  Synthetic oligonucleotide; GAG chr11 5356291 5356310 5356307 +
ggagctgaaaaccaaggcat

SEQ ID NO: 23641 - DNA, 20 bp, Artificial Sequence
  Synthetic oligonucleotide; AAG chr11 5356313 5356332 5356329 +
gaactacatgatgaatgcac

SEQ ID NO: 23642 - DNA, 20 bp, Artificial Sequence
  Synthetic oligonucleotide; CAG chr11 5356319 5356338 5356335 +
catgatgaatgcacaagact

SEQ ID NO: 23643 - DNA, 20 bp, Artificial Sequence
  Synthetic oligonucleotide; TAG chr11 5356322 5356341 5356338 +
gatgaatgcacaagactcag

SEQ ID NO: 23644 - DNA, 20 bp, Artificial Sequence
  Synthetic oligonucleotide; TGG chr11 5356339 5356358 5356355 +
cagtagctgattcgatcaac

SEQ ID NO: 23645 - DNA, 20 bp, Artificial Sequence
  Synthetic oligonucleotide; AAG chr11 5356342 5356361 5356358 +
tagctgattcgatcaactgg

SEQ ID NO: 23646 - DNA, 20 bp, Artificial Sequence
  Synthetic oligonucleotide; AAG chr11 5356346 5356365 5356362 +
tgattcgatcaactggaaga

SEQ ID NO: 23647 - DNA, 20 bp, Artificial Sequence
  Synthetic oligonucleotide; AGG chr11 5356347 5356366 5356363 +
gattcgatcaactggaagaa

SEQ ID NO: 23648 - DNA, 20 bp, Artificial Sequence
  Synthetic oligonucleotide; GGG chr11 5356348 5356367 5356364 +
attcgatcaactggaagaaa

SEQ ID NO: 23649 - DNA, 20 bp, Artificial Sequence
  Synthetic oligonucleotide; CAG chr11 5356354 5356373 5356370 +
tcaactggaagaaagggtat

SEQ ID NO: 23650 - DNA, 20 bp, Artificial Sequence
  Synthetic oligonucleotide; TGG chr11 5356360 5356379 5356376 +
ggaagaaagggtatcagtga

SEQ ID NO: 23651 - DNA, 20 bp, Artificial Sequence
  Synthetic oligonucleotide; AAG chr11 5356363 5356382 5356379 +
agaaagggtatcagtgatgg

SEQ ID NO: 23652 - DNA, 20 bp, Artificial Sequence
  Synthetic oligonucleotide; AAG chr11 5356383 5356402 5356399 +
aagatcaaatgaatgaaatg

SEQ ID NO: 23653 - DNA, 20 bp, Artificial Sequence
  Synthetic oligonucleotide; AAG chr11 5356387 5356406 5356403 +
tcaaatgaatgaaatgaagc

SEQ ID NO: 23654 - DNA, 20 bp, Artificial Sequence
  Synthetic oligonucleotide; AAG chr11 5356390 5356409 5356406 +
aatgaatgaaatgaagcaag

SEQ ID NO: 23655 - DNA, 20 bp, Artificial Sequence
  Synthetic oligonucleotide; GAG chr11 5356392 5356411 5356408 +
tgaatgaaatgaagcaagaa

SEQ ID NO: 23656 - DNA, 20 bp, Artificial Sequence
  Synthetic oligonucleotide; AAG chr11 5356395 5356414 5356411 +
atgaaatgaagcaagaagag

SEQ ID NO: 23657 - DNA, 20 bp, Artificial Sequence
  Synthetic oligonucleotide; TAG chr11 5356400 5356419 5356416 +
atgaagcaagaagagaagtt

SEQ ID NO: 23658 - DNA, 20 bp, Artificial Sequence
  Synthetic oligonucleotide; GAG chr11 5356402 5356421 5356418 +
gaagcaagaagagaagttta

SEQ ID NO: 23659 - DNA, 20 bp, Artificial Sequence
  Synthetic oligonucleotide; AAG chr11 5356409 5356428 5356425 +
gaagagaagtttagagaaaa

SEQ ID NO: 23660 - DNA, 20 bp, Artificial Sequence
  Synthetic oligonucleotide; AAG chr11 5356418 5356437 5356434 +
tttagagaaaaaagaataaa

SEQ ID NO: 23661 - DNA, 20 bp, Artificial Sequence
  Synthetic oligonucleotide; AAG chr11 5356430 5356449 5356446 +
agaataaaaagaaatgaaca

SEQ ID NO: 23662 - DNA, 20 bp, Artificial Sequence
  Synthetic oligonucleotide; AAG chr11 5356438 5356457 5356454 +
aagaaatgaacaaagcctcc

SEQ ID NO: 23663 - DNA, 20 bp, Artificial Sequence
  Synthetic oligonucleotide; TGG chr11 5356446 5356465 5356462 +
aacaaagcctccaagaaata

SEQ ID NO: 23664 - DNA, 20 bp, Artificial Sequence
  Synthetic oligonucleotide; GGG chr11 5356447 5356466 5356463 +
acaaagcctccaagaaatat

SEQ ID NO: 23665 - DNA, 20 bp, Artificial Sequence
  Synthetic oligonucleotide; AAG chr11 5356460 5356479 5356476 +
gaaatatgggactatgtgaa

SEQ ID NO: 23666 - DNA, 20 bp, Artificial Sequence
  Synthetic oligonucleotide; TGG chr11 5356481 5356500 5356497 +
agaccaaatctatatctgat

SEQ ID NO: 23667 - DNA, 20 bp, Artificial Sequence
  Synthetic oligonucleotide; AAG chr11 5356493 5356512 5356509 +
tatctgattggtgtacctga

SEQ ID NO: 23668 - DNA, 20 bp, Artificial Sequence
  Synthetic oligonucleotide; CGG chr11 5356499 5356518 5356515 +
attggtgtacctgaaagtga

SEQ ID NO: 23669 - DNA, 20 bp, Artificial Sequence
  Synthetic oligonucleotide; GGG chr11 5356500 5356519 5356516 +
ttggtgtacctgaaagtgac

SEQ ID NO: 23670 - DNA, 20 bp, Artificial Sequence
  Synthetic oligonucleotide; CAG chr11 5356503 5356522 5356519 +
gtgtacctgaaagtgacggg

SEQ ID NO: 23671 - DNA, 20 bp, Artificial Sequence
  Synthetic oligonucleotide; TGG chr11 5356508 5356527 5356524 +
cctgaaagtgacgggcagaa

SEQ ID NO: 23672 - DNA, 20 bp, Artificial Sequence
  Synthetic oligonucleotide; AAG chr11 5356515 5356534 5356531 +
gtgacgggcagaatggaacc

SEQ ID NO: 23673 - DNA, 20 bp, Artificial Sequence
  Synthetic oligonucleotide; TGG chr11 5356519 5356538 5356535 +
cgggcagaatggaaccaagt

SEQ ID NO: 23674 - DNA, 20 bp, Artificial Sequence
  Synthetic oligonucleotide; CAG chr11 5356533 5356552 5356549 +
ccaagttggaaaacactctg

SEQ ID NO: 23675 - DNA, 20 bp, Artificial Sequence
  Synthetic oligonucleotide; AGG chr11 5356534 5356553 5356550 +
caagttggaaaacactctgc

SEQ ID NO: 23676 - DNA, 20 bp, Artificial Sequence
  Synthetic oligonucleotide; CAG chr11 5356545 5356564 5356561 +
acactctgcaggatattatc

SEQ ID NO: 23677 - DNA, 20 bp, Artificial Sequence
  Synthetic oligonucleotide; AGG chr11 5356546 5356565 5356562 +
cactctgcaggatattatcc

SEQ ID NO: 23678 - DNA, 20 bp, Artificial Sequence
  Synthetic oligonucleotide; GAG chr11 5356548 5356567 5356564 +
ctctgcaggatattatccag

SEQ ID NO: 23679 - DNA, 20 bp, Artificial Sequence
  Synthetic oligonucleotide; TAG chr11 5356564 5356583 5356580 +
ccaggagaacttccccaatc

SEQ ID NO: 23680 - DNA, 20 bp, Artificial Sequence
  Synthetic oligonucleotide; AAG chr11 5356568 5356587 5356584 +
gagaacttccccaatctagc

SEQ ID NO: 23681 - DNA, 20 bp, Artificial Sequence
  Synthetic oligonucleotide; AGG chr11 5356569 5356588 5356585 +
agaacttccccaatctagca

SEQ ID NO: 23682 - DNA, 20 bp, Artificial Sequence
  Synthetic oligonucleotide; CAG chr11 5356572 5356591 5356588 +
acttccccaatctagcaagg

SEQ ID NO: 23683 - DNA, 20 bp, Artificial Sequence
  Synthetic oligonucleotide; AGG chr11 5356573 5356592 5356589 +
cttccccaatctagcaaggc

SEQ ID NO: 23684 - DNA, 20 bp, Artificial Sequence
  Synthetic oligonucleotide; CAG chr11 5356590 5356609 5356606 +
ggcaggtcaacattcaaatt

SEQ ID NO: 23685 - DNA, 20 bp, Artificial Sequence
  Synthetic oligonucleotide; AGG chr11 5356591 5356610 5356607 +
gcaggtcaacattcaaattc

SEQ ID NO: 23686 - DNA, 20 bp, Artificial Sequence
  Synthetic oligonucleotide; CAG chr11 5356599 5356618 5356615 +
acattcaaattcaggaaata

SEQ ID NO: 23687 - DNA, 20 bp, Artificial Sequence
  Synthetic oligonucleotide; GAG chr11 5356601 5356620 5356617 +
attcaaattcaggaaataca

SEQ ID NO: 23688 - DNA, 20 bp, Artificial Sequence
  Synthetic oligonucleotide; AAG chr11 5356613 5356632 5356629 +
gaaatacagagaacgccaca

SEQ ID NO: 23689 - DNA, 20 bp, Artificial Sequence
  Synthetic oligonucleotide; GAG chr11 5356625 5356644 5356641 +
acgccacaaagatactcctt

SEQ ID NO: 23690 - DNA, 20 bp, Artificial Sequence
  Synthetic oligonucleotide; AAG chr11 5356628 5356647 5356644 +
ccacaaagatactccttgag

SEQ ID NO: 23691 - DNA, 20 bp, Artificial Sequence
  Synthetic oligonucleotide; GAG chr11 5356630 5356649 5356646 +
acaaagatactccttgagaa

SEQ ID NO: 23692 - DNA, 20 bp, Artificial Sequence
  Synthetic oligonucleotide; AAG chr11 5356640 5356659 5356656 +
tccttgagaagagcaactac

SEQ ID NO: 23693 - DNA, 20 bp, Artificial Sequence
  Synthetic oligonucleotide; AGG chr11 5356641 5356660 5356657 +
ccttgagaagagcaactaca

SEQ ID NO: 23694 - DNA, 20 bp, Artificial Sequence
  Synthetic oligonucleotide; CAG chr11 5356655 5356674 5356671 +
actacaaggcacataattgt

SEQ ID NO: 23695 - DNA, 20 bp, Artificial Sequence
  Synthetic oligonucleotide; AAG chr11 5356666 5356685 5356682 +
cataattgtcagattcacca

SEQ ID NO: 23696 - DNA, 20 bp, Artificial Sequence
  Synthetic oligonucleotide; AAG chr11 5356677 5356696 5356693 +
gattcaccaaagttgaaatg

SEQ ID NO: 23697 - DNA, 20 bp, Artificial Sequence
  Synthetic oligonucleotide; AGG chr11 5356678 5356697 5356694 +
attcaccaaagttgaaatga

SEQ ID NO: 23698 - DNA, 20 bp, Artificial Sequence
  Synthetic oligonucleotide; GGG chr11 5356679 5356698 5356695 +
ttcaccaaagttgaaatgaa

SEQ ID NO: 23699 - DNA, 20 bp, Artificial Sequence
  Synthetic oligonucleotide; AAG chr11 5356691 5356710 5356707 +
gaaatgaagggaaaaatgtt

SEQ ID NO: 23700 - DNA, 20 bp, Artificial Sequence
  Synthetic oligonucleotide; AGG chr11 5356692 5356711 5356708 +
aaatgaagggaaaaatgtta

SEQ ID NO: 23701 - DNA, 20 bp, Artificial Sequence
  Synthetic oligonucleotide; GGG chr11 5356693 5356712 5356709 +
aatgaagggaaaaatgttaa

SEQ ID NO: 23702 - DNA, 20 bp, Artificial Sequence
  Synthetic oligonucleotide; TAG chr11 5356696 5356715 5356712 +
gaagggaaaaatgttaaggg

SEQ ID NO: 23703 - DNA, 20 bp, Artificial Sequence
  Synthetic oligonucleotide; CAG chr11 5356700 5356719 5356716 +
ggaaaaatgttaagggtagc

SEQ ID NO: 23704 - DNA, 20 bp, Artificial Sequence
  Synthetic oligonucleotide; GAG chr11 5356702 5356721 5356718 +
aaaaatgttaagggtagcca

SEQ ID NO: 23705 - DNA, 20 bp, Artificial Sequence
  Synthetic oligonucleotide; GAG chr11 5356704 5356723 5356720 +
aaatgttaagggtagccaga

SEQ ID NO: 23706 - DNA, 20 bp, Artificial Sequence
  Synthetic oligonucleotide; AAG chr11 5356708 5356727 5356724 +
gttaagggtagccagagaga

SEQ ID NO: 23707 - DNA, 20 bp, Artificial Sequence
  Synthetic oligonucleotide; AGG chr11 5356709 5356728 5356725 +
ttaagggtagccagagagaa

SEQ ID NO: 23708 - DNA, 20 bp, Artificial Sequence
  Synthetic oligonucleotide; CGG chr11 5356713 5356732 5356729 +
gggtagccagagagaaaggt

SEQ ID NO: 23709 - DNA, 20 bp, Artificial Sequence
  Synthetic oligonucleotide; GGG chr11 5356714 5356733 5356730 +
ggtagccagagagaaaggtc

SEQ ID NO: 23710 - DNA, 20 bp, Artificial Sequence
  Synthetic oligonucleotide; AAG chr11 5356726 5356745 5356742 +
gaaaggtcgggttacccaca

SEQ ID NO: 23711 - DNA, 20 bp, Artificial Sequence
  Synthetic oligonucleotide; AGG chr11 5356727 5356746 5356743 +
aaaggtcgggttacccacaa

SEQ ID NO: 23712 - DNA, 20 bp, Artificial Sequence
  Synthetic oligonucleotide; GGG chr11 5356728 5356747 5356744 +
aaggtcgggttacccacaaa

SEQ ID NO: 23713 - DNA, 20 bp, Artificial Sequence
  Synthetic oligonucleotide; AAG chr11 5356731 5356750 5356747 +
gtcgggttacccacaaaggg

SEQ ID NO: 23714 - DNA, 20 bp, Artificial Sequence
  Synthetic oligonucleotide; CAG chr11 5356739 5356758 5356755 +
acccacaaagggaagcccat

SEQ ID NO: 23715 - DNA, 20 bp, Artificial Sequence
  Synthetic oligonucleotide; CAG chr11 5356747 5356766 5356763 +
agggaagcccatcagaataa

SEQ ID NO: 23716 - DNA, 20 bp, Artificial Sequence
  Synthetic oligonucleotide; CAG chr11 5356750 5356769 5356766 +
gaagcccatcagaataacag

SEQ ID NO: 23717 - DNA, 20 bp, Artificial Sequence
  Synthetic oligonucleotide; CAG chr11 5356759 5356778 5356775 +
cagaataacagcagatctct

SEQ ID NO: 23718 - DNA, 20 bp, Artificial Sequence
  Synthetic oligonucleotide; CAG chr11 5356762 5356781 5356778 +
aataacagcagatctctcag

SEQ ID NO: 23719 - DNA, 20 bp, Artificial Sequence
  Synthetic oligonucleotide; AAG chr11 5356774 5356793 5356790 +
tctctcagcagaaactctac

SEQ ID NO: 23720 - DNA, 20 bp, Artificial Sequence
  Synthetic oligonucleotide; CAG chr11 5356778 5356797 5356794 +
tcagcagaaactctacaagc

SEQ ID NO: 23721 - DNA, 20 bp, Artificial Sequence
  Synthetic oligonucleotide; AAG chr11 5356781 5356800 5356797 +
gcagaaactctacaagccag

SEQ ID NO: 23722 - DNA, 20 bp, Artificial Sequence
  Synthetic oligonucleotide; GAG chr11 5356783 5356802 5356799 +
agaaactctacaagccagaa

SEQ ID NO: 23723 - DNA, 20 bp, Artificial Sequence
  Synthetic oligonucleotide; GAG chr11 5356785 5356804 5356801 +
aaactctacaagccagaaga

SEQ ID NO: 23724 - DNA, 20 bp, Artificial Sequence
  Synthetic oligonucleotide; TGG chr11 5356788 5356807 5356804 +
ctctacaagccagaagagag

SEQ ID NO: 23725 - DNA, 20 bp, Artificial Sequence
  Synthetic oligonucleotide; GGG chr11 5356789 5356808 5356805 +
tctacaagccagaagagagt

SEQ ID NO: 23726 - DNA, 20 bp, Artificial Sequence
  Synthetic oligonucleotide; GGG chr11 5356790 5356809 5356806 +
ctacaagccagaagagagtg

SEQ ID NO: 23727 - DNA, 20 bp, Artificial Sequence
  Synthetic oligonucleotide; GGG chr11 5356791 5356810 5356807 +
tacaagccagaagagagtgg

SEQ ID NO: 23728 - DNA, 20 bp, Artificial Sequence
  Synthetic oligonucleotide; AAG chr11 5356813 5356832 5356829 +
gccaatattcaacatcctta

SEQ ID NO: 23729 - DNA, 20 bp, Artificial Sequence
  Synthetic oligonucleotide; AGG chr11 5356814 5356833 5356830 +
ccaatattcaacatccttaa

SEQ ID NO: 23730 - DNA, 20 bp, Artificial Sequence
  Synthetic oligonucleotide; AAG chr11 5356818 5356837 5356834 +
tattcaacatccttaaagga

SEQ ID NO: 23731 - DNA, 20 bp, Artificial Sequence
  Synthetic oligonucleotide; CAG chr11 5356832 5356851 5356848 +
aaaggaaagaattttcaaca

SEQ ID NO: 23732 - DNA, 20 bp, Artificial Sequence
  Synthetic oligonucleotide; CAG chr11 5356846 5356865 5356862 +
tcaacacagaatttcatatc

SEQ ID NO: 23733 - DNA, 20 bp, Artificial Sequence
  Synthetic oligonucleotide; AAG chr11 5356856 5356875 5356872 +
atttcatatccagccaaact

SEQ ID NO: 23734 - DNA, 20 bp, Artificial Sequence
  Synthetic oligonucleotide; AAG chr11 5356865 5356884 5356881 +
ccagccaaactaagcttcat

SEQ ID NO: 23735 - DNA, 20 bp, Artificial Sequence
  Synthetic oligonucleotide; AAG chr11 5356870 5356889 5356886 +
caaactaagcttcataagtg

SEQ ID NO: 23736 - DNA, 20 bp, Artificial Sequence
  Synthetic oligonucleotide; AGG chr11 5356871 5356890 5356887 +
aaactaagcttcataagtga

SEQ ID NO: 23737 - DNA, 20 bp, Artificial Sequence
  Synthetic oligonucleotide; GAG chr11 5356873 5356892 5356889 +
actaagcttcataagtgaag

SEQ ID NO: 23738 - DNA, 20 bp, Artificial Sequence
  Synthetic oligonucleotide; CAG chr11 5356891 5356910 5356907 +
aggagaaataaaatacttta

SEQ ID NO: 23739 - DNA, 20 bp, Artificial Sequence
  Synthetic oligonucleotide; AAG chr11 5356896 5356915 5356912 +
aaataaaatactttacagac

SEQ ID NO: 23740 - DNA, 20 bp, Artificial Sequence
  Synthetic oligonucleotide; GAG chr11 5356907 5356926 5356923 +
tttacagacaagcaaatgct

SEQ ID NO: 23741 - DNA, 20 bp, Artificial Sequence
  Synthetic oligonucleotide; GAG chr11 5356909 5356928 5356925 +
tacagacaagcaaatgctga

SEQ ID NO: 23742 - DNA, 20 bp, Artificial Sequence
  Synthetic oligonucleotide; CAG chr11 5356925 5356944 5356941 +
ctgagagattttgtcatcac

SEQ ID NO: 23743 - DNA, 20 bp, Artificial Sequence
  Synthetic oligonucleotide; AGG chr11 5356926 5356945 5356942 +
tgagagattttgtcatcacc

SEQ ID NO: 23744 - DNA, 20 bp, Artificial Sequence
  Synthetic oligonucleotide; AAG chr11 5356939 5356958 5356955 +
catcaccaggcctgacctaa

SEQ ID NO: 23745 - DNA, 20 bp, Artificial Sequence
  Synthetic oligonucleotide; GAG chr11 5356941 5356960 5356957 +
tcaccaggcctgacctaaaa

SEQ ID NO: 23746 - DNA, 20 bp, Artificial Sequence
  Synthetic oligonucleotide; AAG chr11 5356950 5356969 5356966 +
ctgacctaaaagagctcctg

SEQ ID NO: 23747 - DNA, 20 bp, Artificial Sequence
  Synthetic oligonucleotide; AGG chr11 5356951 5356970 5356967 +
tgacctaaaagagctcctga

SEQ ID NO: 23748 - DNA, 20 bp, Artificial Sequence
  Synthetic oligonucleotide; AAG chr11 5356954 5356973 5356970 +
cctaaaagagctcctgaagg

SEQ ID NO: 23749 - DNA, 20 bp, Artificial Sequence
  Synthetic oligonucleotide; TGG chr11 5356966 5356985 5356982 +
cctgaaggaagcactaaata

SEQ ID NO: 23750 - DNA, 20 bp, Artificial Sequence
  Synthetic oligonucleotide; AAG chr11 5356970 5356989 5356986 +
aaggaagcactaaatatgga

SEQ ID NO: 23751 - DNA, 20 bp, Artificial Sequence
  Synthetic oligonucleotide; AGG chr11 5356971 5356990 5356987 +
aggaagcactaaatatggaa

SEQ ID NO: 23752 - DNA, 20 bp, Artificial Sequence
  Synthetic oligonucleotide; CGG chr11 5356980 5356999 5356996 +
taaatatggaaaggcacaac

SEQ ID NO: 23753 - DNA, 20 bp, Artificial Sequence
  Synthetic oligonucleotide; CAG chr11 5356986 5357005 5357002 +
tggaaaggcacaaccggtac

SEQ ID NO: 23754 - DNA, 20 bp, Artificial Sequence
  Synthetic oligonucleotide; AAG chr11 5357015 5357034 5357031 +
caaaaacatgccaaattgta

SEQ ID NO: 23755 - DNA, 20 bp, Artificial Sequence
  Synthetic oligonucleotide; GAG chr11 5357024 5357043 5357040 +
gccaaattgtaaagaccatt

SEQ ID NO: 23756 - DNA, 20 bp, Artificial Sequence
  Synthetic oligonucleotide; AGG chr11 5357025 5357044 5357041 +
ccaaattgtaaagaccattg

SEQ ID NO: 23757 - DNA, 20 bp, Artificial Sequence
  Synthetic oligonucleotide; TAG chr11 5357029 5357048 5357045 +
attgtaaagaccattgaggc

SEQ ID NO: 23758 - DNA, 20 bp, Artificial Sequence
  Synthetic oligonucleotide; AGG chr11 5357030 5357049 5357046 +
ttgtaaagaccattgaggct

SEQ ID NO: 23759 - DNA, 20 bp, Artificial Sequence
  Synthetic oligonucleotide; AAG chr11 5357033 5357052 5357049 +
taaagaccattgaggctagg

SEQ ID NO: 23760 - DNA, 20 bp, Artificial Sequence
  Synthetic oligonucleotide; GAG chr11 5357053 5357072 5357069 +
aagaaactgcatcaactaat

SEQ ID NO: 23761 - DNA, 20 bp, Artificial Sequence
  Synthetic oligonucleotide; CAG chr11 5357065 5357084 5357081 +
caactaatgagcaaaataac

SEQ ID NO: 23762 - DNA, 20 bp, Artificial Sequence
  Synthetic oligonucleotide; CAG chr11 5357083 5357102 5357099 +
accagctaacatcataatga

SEQ ID NO: 23763 - DNA, 20 bp, Artificial Sequence
  Synthetic oligonucleotide; AGG chr11 5357084 5357103 5357100 +
ccagctaacatcataatgac

SEQ ID NO: 23764 - DNA, 20 bp, Artificial Sequence
  Synthetic oligonucleotide; TGG chr11 5357125 5357144 5357141 +
aatattaaccttaatgtaaa

SEQ ID NO: 23765 - DNA, 20 bp, Artificial Sequence
  Synthetic oligonucleotide; GGG chr11 5357126 5357145 5357142 +
atattaaccttaatgtaaat

SEQ ID NO: 23766 - DNA, 20 bp, Artificial Sequence
  Synthetic oligonucleotide; CAG chr11 5357139 5357158 5357155 +
tgtaaatgggctaaatgctc

SEQ ID NO: 23767 - DNA, 20 bp, Artificial Sequence
  Synthetic oligonucleotide; AAG chr11 5357146 5357165 5357162 +
gggctaaatgctccagtaaa

SEQ ID NO: 23768 - DNA, 20 bp, Artificial Sequence
  Synthetic oligonucleotide; CAG chr11 5357152 5357171 5357168 +
aatgctccagtaaaaagaca

SEQ ID NO: 23769 - DNA, 20 bp, Artificial Sequence
  Synthetic oligonucleotide; CGG chr11 5357156 5357175 5357172 +
ctccagtaaaaagacacaga

SEQ ID NO: 23770 - DNA, 20 bp, Artificial Sequence
  Synthetic oligonucleotide; GGG chr11 5357157 5357176 5357173 +
tccagtaaaaagacacagac

SEQ ID NO: 23771 - DNA, 20 bp, Artificial Sequence
  Synthetic oligonucleotide; TAG chr11 5357165 5357184 5357181 +
aaagacacagacgggcaaat

SEQ ID NO: 23772 - DNA, 20 bp, Artificial Sequence
  Synthetic oligonucleotide; AAG chr11 5357171 5357190 5357187 +
acagacgggcaaattagata

SEQ ID NO: 23773 - DNA, 20 bp, Artificial Sequence
  Synthetic oligonucleotide; GAG chr11 5357173 5357192 5357189 +
agacgggcaaattagataaa

SEQ ID NO: 23774 - DNA, 20 bp, Artificial Sequence
  Synthetic oligonucleotide; AAG chr11 5357178 5357197 5357194 +
ggcaaattagataaagagtc

SEQ ID NO: 23775 - DNA, 20 bp, Artificial Sequence
  Synthetic oligonucleotide; CAG chr11 5357187 5357206 5357203 +
gataaagagtcaagacccat

SEQ ID NO: 23776 - DNA, 20 bp, Artificial Sequence
  Synthetic oligonucleotide; CAG chr11 5357201 5357220 5357217 +
acccatcagtgtgctgtatt

SEQ ID NO: 23777 - DNA, 20 bp, Artificial Sequence
  Synthetic oligonucleotide; AGG chr11 5357202 5357221 5357218 +
cccatcagtgtgctgtattc

SEQ ID NO: 23778 - DNA, 20 bp, Artificial Sequence
  Synthetic oligonucleotide; TAG chr11 5357233 5357252 5357249 +
ctcatgtgcacacacacaca

SEQ ID NO: 23779 - DNA, 20 bp, Artificial Sequence
  Synthetic oligonucleotide; AGG chr11 5357234 5357253 5357250 +
tcatgtgcacacacacacat

SEQ ID NO: 23780 - DNA, 20 bp, Artificial Sequence
  Synthetic oligonucleotide; AAG chr11 5357246 5357265 5357262 +
acacacataggctcaaaata

SEQ ID NO: 23781 - DNA, 20 bp, Artificial Sequence
  Synthetic oligonucleotide; AGG chr11 5357247 5357266 5357263 +
cacacataggctcaaaataa

SEQ ID NO: 23782 - DNA, 20 bp, Artificial Sequence
  Synthetic oligonucleotide; GGG chr11 5357248 5357267 5357264 +
acacataggctcaaaataaa

SEQ ID NO: 23783 - DNA, 20 bp, Artificial Sequence
  Synthetic oligonucleotide; TGG chr11 5357252 5357271 5357268 +
ataggctcaaaataaaggga

SEQ ID NO: 23784 - DNA, 20 bp, Artificial Sequence
  Synthetic oligonucleotide; GAG chr11 5357254 5357273 5357270 +
aggctcaaaataaagggatg

SEQ ID NO: 23785 - DNA, 20 bp, Artificial Sequence
  Synthetic oligonucleotide; AGG chr11 5357255 5357274 5357271 +
ggctcaaaataaagggatgg

SEQ ID NO: 23786 - DNA, 20 bp, Artificial Sequence
  Synthetic oligonucleotide; AAG chr11 5357258 5357277 5357274 +
tcaaaataaagggatggagg

SEQ ID NO: 23787 - DNA, 20 bp, Artificial Sequence
  Synthetic oligonucleotide; AAG chr11 5357268 5357287 5357284 +
gggatggaggaagatctacc

SEQ ID NO: 23788 - DNA, 20 bp, Artificial Sequence
  Synthetic oligonucleotide; TGG chr11 5357275 5357294 5357291 +
aggaagatctaccaagaaaa

SEQ ID NO: 23789 - DNA, 20 bp, Artificial Sequence
  Synthetic oligonucleotide; AAG chr11 5357288 5357307 5357304 +
aagaaaatggaaaacaaaaa

SEQ ID NO: 23790 - DNA, 20 bp, Artificial Sequence
  Synthetic oligonucleotide; AGG chr11 5357289 5357308 5357305 +
agaaaatggaaaacaaaaaa

SEQ ID NO: 23791 - DNA, 20 bp, Artificial Sequence
  Synthetic oligonucleotide; CAG chr11 5357292 5357311 5357308 +
aaatggaaaacaaaaaaagg

SEQ ID NO: 23792 - DNA, 20 bp, Artificial Sequence
  Synthetic oligonucleotide; AGG chr11 5357293 5357312 5357309 +
aatggaaaacaaaaaaaggc

SEQ ID NO: 23793 - DNA, 20 bp, Artificial Sequence
  Synthetic oligonucleotide; GGG chr11 5357294 5357313 5357310 +
atggaaaacaaaaaaaggca

SEQ ID NO: 23794 - DNA, 20 bp, Artificial Sequence
  Synthetic oligonucleotide; GGG chr11 5357295 5357314 5357311 +
tggaaaacaaaaaaaggcag

SEQ ID NO: 23795 - DNA, 20 bp, Artificial Sequence
  Synthetic oligonucleotide; CAG chr11 5357322 5357341 5357338 +
aatcctcatctctgataaaa

SEQ ID NO: 23796 - DNA, 20 bp, Artificial Sequence
  Synthetic oligonucleotide; AGG chr11 5357323 5357342 5357339 +
atcctcatctctgataaaac

SEQ ID NO: 23797 - DNA, 20 bp, Artificial Sequence
  Synthetic oligonucleotide; AAG chr11 5357339 5357358 5357355 +
aaacaggctttaaaccaaca

SEQ ID NO: 23798 - DNA, 20 bp, Artificial Sequence
  Synthetic oligonucleotide; AAG chr11 5357347 5357366 5357363 +
tttaaaccaacaaagatcaa

SEQ ID NO: 23799 - DNA, 20 bp, Artificial Sequence
  Synthetic oligonucleotide; GAG chr11 5357349 5357368 5357365 +
taaaccaacaaagatcaaaa

SEQ ID NO: 23800 - DNA, 20 bp, Artificial Sequence
  Synthetic oligonucleotide; AAG chr11 5357355 5357374 5357371 +
aacaaagatcaaaagagaca

SEQ ID NO: 23801 - DNA, 20 bp, Artificial Sequence
  Synthetic oligonucleotide; AAG chr11 5357358 5357377 5357374 +
aaagatcaaaagagacaaag

SEQ ID NO: 23802 - DNA, 20 bp, Artificial Sequence
  Synthetic oligonucleotide; AGG chr11 5357359 5357378 5357375 +
aagatcaaaagagacaaaga

SEQ ID NO: 23803 - DNA, 20 bp, Artificial Sequence
  Synthetic oligonucleotide; TGG chr11 5357373 5357392 5357389 +
caaagaaggccattacataa

SEQ ID NO: 23804 - DNA, 20 bp, Artificial Sequence
  Synthetic oligonucleotide; AAG chr11 5357378 5357397 5357394 +
aaggccattacataatggta

SEQ ID NO: 23805 - DNA, 20 bp, Artificial Sequence
  Synthetic oligonucleotide; AGG chr11 5357379 5357398 5357395 +
aggccattacataatggtaa

SEQ ID NO: 23806 - DNA, 20 bp, Artificial Sequence
  Synthetic oligonucleotide; GGG chr11 5357380 5357399 5357396 +
ggccattacataatggtaaa

SEQ ID NO: 23807 - DNA, 20 bp, Artificial Sequence
  Synthetic oligonucleotide; AAG chr11 5357394 5357413 5357410 +
ggtaaagggatcaattcaac

SEQ ID NO: 23808 - DNA, 20 bp, Artificial Sequence
  Synthetic oligonucleotide; AAG chr11 5357397 5357416 5357413 +
aaagggatcaattcaacaag

SEQ ID NO: 23809 - DNA, 20 bp, Artificial Sequence
  Synthetic oligonucleotide; GAG chr11 5357399 5357418 5357415 +
agggatcaattcaacaagaa

SEQ ID NO: 23810 - DNA, 20 bp, Artificial Sequence
  Synthetic oligonucleotide; CAG chr11 5357433 5357452 5357449 +
aaacatatatgcacccaata

SEQ ID NO: 23811 - DNA, 20 bp, Artificial Sequence
  Synthetic oligonucleotide; AGG chr11 5357434 5357453 5357450 +
aacatatatgcacccaatac

SEQ ID NO: 23812 - DNA, 20 bp, Artificial Sequence
  Synthetic oligonucleotide; CAG chr11 5357443 5357462 5357459 +
gcacccaatacaggaacacc

SEQ ID NO: 23813 - DNA, 20 bp, Artificial Sequence
  Synthetic oligonucleotide; AGG chr11 5357444 5357463 5357460 +
cacccaatacaggaacaccc

SEQ ID NO: 23814 - DNA, 20 bp, Artificial Sequence
  Synthetic oligonucleotide; AAG chr11 5357453 5357472 5357469 +
caggaacacccaggttcata

SEQ ID NO: 23815 - DNA, 20 bp, Artificial Sequence
  Synthetic oligonucleotide; AAG chr11 5357457 5357476 5357473 +
aacacccaggttcataaagc

SEQ ID NO: 23816 - DNA, 20 bp, Artificial Sequence
  Synthetic oligonucleotide; TAG chr11 5357464 5357483 5357480 +
aggttcataaagcaagtcct

SEQ ID NO: 23817 - DNA, 20 bp, Artificial Sequence
  Synthetic oligonucleotide; GAG chr11 5357466 5357485 5357482 +
gttcataaagcaagtcctta

SEQ ID NO: 23818 - DNA, 20 bp, Artificial Sequence
  Synthetic oligonucleotide; AAG chr11 5357476 5357495 5357492 +
caagtccttagagacctaca

SEQ ID NO: 23819 - DNA, 20 bp, Artificial Sequence
  Synthetic oligonucleotide; GAG chr11 5357478 5357497 5357494 +
agtccttagagacctacaaa

SEQ ID NO: 23820 - DNA, 20 bp, Artificial Sequence
  Synthetic oligonucleotide; TAG chr11 5357484 5357503 5357500 +
tagagacctacaaagagact

SEQ ID NO: 23821 - DNA, 20 bp, Artificial Sequence
  Synthetic oligonucleotide; TGG chr11 5357505 5357524 5357521 +
agactctcacacaataacaa

SEQ ID NO: 23822 - DNA, 20 bp, Artificial Sequence
  Synthetic oligonucleotide; GGG chr11 5357506 5357525 5357522 +
gactctcacacaataacaat

SEQ ID NO: 23823 - DNA, 20 bp, Artificial Sequence
  Synthetic oligonucleotide; GAG chr11 5357508 5357527 5357524 +
ctctcacacaataacaatgg

SEQ ID NO: 23824 - DNA, 20 bp, Artificial Sequence
  Synthetic oligonucleotide; TAG chr11 5357535 5357554 5357551 +
taacaccccactgtcaacat

SEQ ID NO: 23825 - DNA, 20 bp, Artificial Sequence
  Synthetic oligonucleotide; CAG chr11 5357539 5357558 5357555 +
accccactgtcaacattaga

SEQ ID NO: 23826 - DNA, 20 bp, Artificial Sequence
  Synthetic oligonucleotide; TAG chr11 5357550 5357569 5357566 +
aacattagacagatcaacat

SEQ ID NO: 23827 - DNA, 20 bp, Artificial Sequence
  Synthetic oligonucleotide; CAG chr11 5357554 5357573 5357570 +
ttagacagatcaacattaga

SEQ ID NO: 23828 - DNA, 20 bp, Artificial Sequence
  Synthetic oligonucleotide; GAG chr11 5357563 5357582 5357579 +
tcaacattagacagatcaac

SEQ ID NO: 23829 - DNA, 20 bp, Artificial Sequence
  Synthetic oligonucleotide; CAG chr11 5357567 5357586 5357583 +
cattagacagatcaacgaga

SEQ ID NO: 23830 - DNA, 20 bp, Artificial Sequence
  Synthetic oligonucleotide; AAG chr11 5357571 5357590 5357587 +
agacagatcaacgagacaga

SEQ ID NO: 23831 - DNA, 20 bp, Artificial Sequence
  Synthetic oligonucleotide; AAG chr11 5357579 5357598 5357595 +
caacgagacagaaagttaac

SEQ ID NO: 23832 - DNA, 20 bp, Artificial Sequence
  Synthetic oligonucleotide; AGG chr11 5357580 5357599 5357596 +
aacgagacagaaagttaaca

SEQ ID NO: 23833 - DNA, 20 bp, Artificial Sequence
  Synthetic oligonucleotide; CAG chr11 5357588 5357607 5357604 +
agaaagttaacaaggatatc

SEQ ID NO: 23834 - DNA, 20 bp, Artificial Sequence
  Synthetic oligonucleotide; AGG chr11 5357589 5357608 5357605 +
gaaagttaacaaggatatcc

SEQ ID NO: 23835 - DNA, 20 bp, Artificial Sequence
  Synthetic oligonucleotide; CAG chr11 5357601 5357620 5357617 +
ggatatccaggaattgaact

SEQ ID NO: 23836 - DNA, 20 bp, Artificial Sequence
  Synthetic oligonucleotide; AAG chr11 5357613 5357632 5357629 +
attgaactcagctctgcacc

SEQ ID NO: 23837 - DNA, 20 bp, Artificial Sequence
  Synthetic oligonucleotide; CGG chr11 5357616 5357635 5357632 +
gaactcagctctgcaccaag

SEQ ID NO: 23838 - DNA, 20 bp, Artificial Sequence
  Synthetic oligonucleotide; TAG chr11 5357625 5357644 5357641 +
tctgcaccaagcggacctaa

SEQ ID NO: 23839 - DNA, 20 bp, Artificial Sequence
  Synthetic oligonucleotide; CAG chr11 5357635 5357654 5357651 +
gcggacctaatagacatcta

SEQ ID NO: 23840 - DNA, 20 bp, Artificial Sequence
  Synthetic oligonucleotide; CAG chr11 5357658 5357677 5357674 +
aactctccaccccaaatcaa

SEQ ID NO: 23841 - DNA, 20 bp, Artificial Sequence
  Synthetic oligonucleotide; CAG chr11 5357676 5357695 5357692 +
aacagaatatacattctttt

SEQ ID NO: 23842 - DNA, 20 bp, Artificial Sequence
  Synthetic oligonucleotide; TAG chr11 5357712 5357731 5357728 +
ctattccaaaattgaccaca

SEQ ID NO: 23843 - DNA, 20 bp, Artificial Sequence
  Synthetic oligonucleotide; TGG chr11 5357716 5357735 5357732 +
tccaaaattgaccacatagt

SEQ ID NO: 23844 - DNA, 20 bp, Artificial Sequence
  Synthetic oligonucleotide; AAG chr11 5357719 5357738 5357735 +
aaaattgaccacatagttgg

SEQ ID NO: 23845 - DNA, 20 bp, Artificial Sequence
  Synthetic oligonucleotide; AAG chr11 5357724 5357743 5357740 +
tgaccacatagttggaagta

SEQ ID NO: 23846 - DNA, 20 bp, Artificial Sequence
  Synthetic oligonucleotide; CAG chr11 5357734 5357753 5357750 +
gttggaagtaaagcactcct

SEQ ID NO: 23847 - DNA, 20 bp, Artificial Sequence
  Synthetic oligonucleotide; AAG chr11 5357746 5357765 5357762 +
gcactcctcagcaaatgtaa

SEQ ID NO: 23848 - DNA, 20 bp, Artificial Sequence
  Synthetic oligonucleotide; CAG chr11 5357751 5357770 5357767 +
cctcagcaaatgtaaaagaa

SEQ ID NO: 23849 - DNA, 20 bp, Artificial Sequence
  Synthetic oligonucleotide; CAG chr11 5357775 5357794 5357791 +
aattataacaaactgtctct

SEQ ID NO: 23850 - DNA, 20 bp, Artificial Sequence
  Synthetic oligonucleotide; CAG chr11 5357782 5357801 5357798 +
acaaactgtctctcagacca

SEQ ID NO: 23851 - DNA, 20 bp, Artificial Sequence
  Synthetic oligonucleotide; TAG chr11 5357796 5357815 5357812 +
agaccacagtgcaatcaaac

SEQ ID NO: 23852 - DNA, 20 bp, Artificial Sequence
  Synthetic oligonucleotide; CAG chr11 5357803 5357822 5357819 +
agtgcaatcaaactagaact

SEQ ID NO: 23853 - DNA, 20 bp, Artificial Sequence
  Synthetic oligonucleotide; AGG chr11 5357804 5357823 5357820 +
gtgcaatcaaactagaactc

SEQ ID NO: 23854 - DNA, 20 bp, Artificial Sequence
  Synthetic oligonucleotide; AAG chr11 5357810 5357829 5357826 +
tcaaactagaactcaggatt

SEQ ID NO: 23855 - DNA, 20 bp, Artificial Sequence
  Synthetic oligonucleotide; TGG chr11 5357840 5357859 5357856 +
ctcaaaaccgctcaactaca

SEQ ID NO: 23856 - DNA, 20 bp, Artificial Sequence
  Synthetic oligonucleotide; TGG chr11 5357873 5357892 5357889 +
aattgctcctgaatgactac

SEQ ID NO: 23857 - DNA, 20 bp, Artificial Sequence
  Synthetic oligonucleotide; GGG chr11 5357874 5357893 5357890 +
attgctcctgaatgactact

SEQ ID NO: 23858 - DNA, 20 bp, Artificial Sequence
  Synthetic oligonucleotide; AAG chr11 5357891 5357910 5357907 +
actgggttcataacaaaatg

SEQ ID NO: 23859 - DNA, 20 bp, Artificial Sequence
  Synthetic oligonucleotide; AGG chr11 5357892 5357911 5357908 +
ctgggttcataacaaaatga

SEQ ID NO: 23860 - DNA, 20 bp, Artificial Sequence
  Synthetic oligonucleotide; CAG chr11 5357895 5357914 5357911 +
ggttcataacaaaatgaagg

SEQ ID NO: 23861 - DNA, 20 bp, Artificial Sequence
  Synthetic oligonucleotide; TGG chr11 5357914 5357933 5357930 +
gcagaaataaaaatgttctt

SEQ ID NO: 23862 - DNA, 20 bp, Artificial Sequence
  Synthetic oligonucleotide; AAG chr11 5357922 5357941 5357938 +
aaaaatgttctttggaacca

SEQ ID NO: 23863 - DNA, 20 bp, Artificial Sequence
  Synthetic oligonucleotide; GAG chr11 5357924 5357943 5357940 +
aaatgttctttggaaccaaa

SEQ ID NO: 23864 - DNA, 20 bp, Artificial Sequence
  Synthetic oligonucleotide; AAG chr11 5357931 5357950 5357947 +
ctttggaaccaaagagaaca

SEQ ID NO: 23865 - DNA, 20 bp, Artificial Sequence
  Synthetic oligonucleotide; CAG chr11 5357945 5357964 5357961 +
agaacaaagacacaacatac

SEQ ID NO: 23866 - DNA, 20 bp, Artificial Sequence
  Synthetic oligonucleotide; TGG chr11 5357954 5357973 5357970 +
acacaacataccagaatctc

SEQ ID NO: 23867 - DNA, 20 bp, Artificial Sequence
  Synthetic oligonucleotide; GGG chr11 5357955 5357974 5357971 +
cacaacataccagaatctct

SEQ ID NO: 23868 - DNA, 20 bp, Artificial Sequence
  Synthetic oligonucleotide; AAG chr11 5357967 5357986 5357983 +
gaatctctgggacacattca

SEQ ID NO: 23869 - DNA, 20 bp, Artificial Sequence
  Synthetic oligonucleotide; CAG chr11 5357970 5357989 5357986 +
tctctgggacacattcaaag

SEQ ID NO: 23870 - DNA, 20 bp, Artificial Sequence
  Synthetic oligonucleotide; TAG chr11 5357977 5357996 5357993 +
gacacattcaaagcagtgtg

SEQ ID NO: 23871 - DNA, 20 bp, Artificial Sequence
  Synthetic oligonucleotide; GAG chr11 5357979 5357998 5357995 +
cacattcaaagcagtgtgta

SEQ ID NO: 23872 - DNA, 20 bp, Artificial Sequence
  Synthetic oligonucleotide; AGG chr11 5357980 5357999 5357996 +
acattcaaagcagtgtgtag

SEQ ID NO: 23873 - DNA, 20 bp, Artificial Sequence
  Synthetic oligonucleotide; GGG chr11 5357981 5358000 5357997 +
cattcaaagcagtgtgtaga

SEQ ID NO: 23874 - DNA, 20 bp, Artificial Sequence
  Synthetic oligonucleotide; TAG chr11 5357991 5358010 5358007 +
agtgtgtagagggaaattta

SEQ ID NO: 23875 - DNA, 20 bp, Artificial Sequence
  Synthetic oligonucleotide; CAG chr11 5358005 5358024 5358021 +
aatttatagcactaaacgcc

SEQ ID NO: 23876 - DNA, 20 bp, Artificial Sequence
  Synthetic oligonucleotide; AAG chr11 5358008 5358027 5358024 +
ttatagcactaaacgcccag

SEQ ID NO: 23877 - DNA, 20 bp, Artificial Sequence
  Synthetic oligonucleotide; GAG chr11 5358010 5358029 5358026 +
atagcactaaacgcccagaa

SEQ ID NO: 23878 - DNA, 20 bp, Artificial Sequence
  Synthetic oligonucleotide; AAG chr11 5358014 5358033 5358030 +
cactaaacgcccagaagaga

SEQ ID NO: 23879 - DNA, 20 bp, Artificial Sequence
  Synthetic oligonucleotide; CAG chr11 5358017 5358036 5358033 +
taaacgcccagaagagaaag

SEQ ID NO: 23880 - DNA, 20 bp, Artificial Sequence
  Synthetic oligonucleotide; AGG chr11 5358018 5358037 5358034 +
aaacgcccagaagagaaagc

SEQ ID NO: 23881 - DNA, 20 bp, Artificial Sequence
  Synthetic oligonucleotide; AAG chr11 5358022 5358041 5358038 +
gcccagaagagaaagcagga

SEQ ID NO: 23882 - DNA, 20 bp, Artificial Sequence
  Synthetic oligonucleotide; AAG chr11 5358057 5358076 5358073 +
caccctaacatcacaattaa

SEQ ID NO: 23883 - DNA, 20 bp, Artificial Sequence
  Synthetic oligonucleotide; TAG chr11 5358063 5358082 5358079 +
aacatcacaattaaaagaac

SEQ ID NO: 23884 - DNA, 20 bp, Artificial Sequence
  Synthetic oligonucleotide; GAG chr11 5358065 5358084 5358081 +
catcacaattaaaagaacta

SEQ ID NO: 23885 - DNA, 20 bp, Artificial Sequence
  Synthetic oligonucleotide; AAG chr11 5358068 5358087 5358084 +
cacaattaaaagaactagag

SEQ ID NO: 23886 - DNA, 20 bp, Artificial Sequence
  Synthetic oligonucleotide; AAG chr11 5358072 5358091 5358088 +
attaaaagaactagagaagc

SEQ ID NO: 23887 - DNA, 20 bp, Artificial Sequence
  Synthetic oligonucleotide; GAG chr11 5358074 5358093 5358090 +
taaaagaactagagaagcaa

SEQ ID NO: 23888 - DNA, 20 bp, Artificial Sequence
  Synthetic oligonucleotide; TAG chr11 5358094 5358113 5358110 +
gagcaaacacattcaaatgc

SEQ ID NO: 23889 - DNA, 20 bp, Artificial Sequence
  Synthetic oligonucleotide; CAG chr11 5358097 5358116 5358113 +
caaacacattcaaatgctag

SEQ ID NO: 23890 - DNA, 20 bp, Artificial Sequence
  Synthetic oligonucleotide; AAG chr11 5358100 5358119 5358116 +
acacattcaaatgctagcag

SEQ ID NO: 23891 - DNA, 20 bp, Artificial Sequence
  Synthetic oligonucleotide; AGG chr11 5358101 5358120 5358117 +
cacattcaaatgctagcaga

SEQ ID NO: 23892 - DNA, 20 bp, Artificial Sequence
  Synthetic oligonucleotide; AAG chr11 5358105 5358124 5358121 +
ttcaaatgctagcagaaggc

SEQ ID NO: 23893 - DNA, 20 bp, Artificial Sequence
  Synthetic oligonucleotide; CAG chr11 5358121 5358140 5358137 +
aggcaagaaataactaaaat

SEQ ID NO: 23894 - DNA, 20 bp, Artificial Sequence
  Synthetic oligonucleotide; GAG chr11 5358123 5358142 5358139 +
gcaagaaataactaaaatca

SEQ ID NO: 23895 - DNA, 20 bp, Artificial Sequence
  Synthetic oligonucleotide; CAG chr11 5358126 5358145 5358142 +
agaaataactaaaatcagag

SEQ ID NO: 23896 - DNA, 20 bp, Artificial Sequence
  Synthetic oligonucleotide; AAG chr11 5358134 5358153 5358150 +
ctaaaatcagagcagaactg

SEQ ID NO: 23897 - DNA, 20 bp, Artificial Sequence
  Synthetic oligonucleotide; AGG chr11 5358135 5358154 5358151 +
taaaatcagagcagaactga

SEQ ID NO: 23898 - DNA, 20 bp, Artificial Sequence
  Synthetic oligonucleotide; TAG chr11 5358141 5358160 5358157 +
cagagcagaactgaaggaaa

SEQ ID NO: 23899 - DNA, 20 bp, Artificial Sequence
  Synthetic oligonucleotide; GAG chr11 5358143 5358162 5358159 +
gagcagaactgaaggaaata

SEQ ID NO: 23900 - DNA, 20 bp, Artificial Sequence
  Synthetic oligonucleotide; CAG chr11 5358179 5358198 5358195 +
cttcaaaaaatcaatgaatc

SEQ ID NO: 23901 - DNA, 20 bp, Artificial Sequence
  Synthetic oligonucleotide; AAG chr11 5358182 5358201 5358198 +
caaaaaatcaatgaatccag

SEQ ID NO: 23902 - DNA, 20 bp, Artificial Sequence
  Synthetic oligonucleotide; TGG chr11 5358186 5358205 5358202 +
aaatcaatgaatccagaagc

SEQ ID NO: 23903 - DNA, 20 bp, Artificial Sequence
  Synthetic oligonucleotide; AAG chr11 5358198 5358217 5358214 +
ccagaagctggtttttcaaa

SEQ ID NO: 23904 - DNA, 20 bp, Artificial Sequence
  Synthetic oligonucleotide; TAG chr11 5358215 5358234 5358231 +
aaaaagatcaacaaaattga

SEQ ID NO: 23905 - DNA, 20 bp, Artificial Sequence
  Synthetic oligonucleotide; TAG chr11 5358223 5358242 5358239 +
caacaaaattgatagactgc

SEQ ID NO: 23906 - DNA, 20 bp, Artificial Sequence
  Synthetic oligonucleotide; AAG chr11 5358227 5358246 5358243 +
aaaattgatagactgctagc

SEQ ID NO: 23907 - DNA, 20 bp, Artificial Sequence
  Synthetic oligonucleotide; AAG chr11 5358237 5358256 5358253 +
gactgctagcaagactaata

SEQ ID NO: 23908 - DNA, 20 bp, Artificial Sequence
  Synthetic oligonucleotide; AAG chr11 5358240 5358259 5358256 +
tgctagcaagactaataaag

SEQ ID NO: 23909 - DNA, 20 bp, Artificial Sequence
  Synthetic oligonucleotide; AAG chr11 5358245 5358264 5358261 +
gcaagactaataaagaagaa

SEQ ID NO: 23910 - DNA, 20 bp, Artificial Sequence
  Synthetic oligonucleotide; GAG chr11 5358247 5358266 5358263 +
aagactaataaagaagaaaa

SEQ ID NO: 23911 - DNA, 20 bp, Artificial Sequence
  Synthetic oligonucleotide; GAG chr11 5358249 5358268 5358265 +
gactaataaagaagaaaaga

SEQ ID NO: 23912 - DNA, 20 bp, Artificial Sequence
  Synthetic oligonucleotide; AAG chr11 5358252 5358271 5358268 +
taataaagaagaaaagagag

SEQ ID NO: 23913 - DNA, 20 bp, Artificial Sequence
  Synthetic oligonucleotide; TAG chr11 5358262 5358281 5358278 +
gaaaagagagaagaatcaaa

SEQ ID NO: 23914 - DNA, 20 bp, Artificial Sequence
  Synthetic oligonucleotide; AAG chr11 5358283 5358302 5358299 +
agatgcaataaaaaatgata

SEQ ID NO: 23915 - DNA, 20 bp, Artificial Sequence
  Synthetic oligonucleotide; AGG chr11 5358284 5358303 5358300 +
gatgcaataaaaaatgataa

SEQ ID NO: 23916 - DNA, 20 bp, Artificial Sequence
  Synthetic oligonucleotide; GGG chr11 5358285 5358304 5358301 +
atgcaataaaaaatgataaa

SEQ ID NO: 23917 - DNA, 20 bp, Artificial Sequence
  Synthetic oligonucleotide; CAG chr11 5358307 5358326 5358323 +
gtatatcaccaccgatccca

SEQ ID NO: 23918 - DNA, 20 bp, Artificial Sequence
  Synthetic oligonucleotide; CAG chr11 5358326 5358345 5358342 +
acagaaatacaaaccaccat

SEQ ID NO: 23919 - DNA, 20 bp, Artificial Sequence
  Synthetic oligonucleotide; GAG chr11 5358328 5358347 5358344 +
agaaatacaaaccaccatca

SEQ ID NO: 23920 - DNA, 20 bp, Artificial Sequence
  Synthetic oligonucleotide; TAG chr11 5358361 5358380 5358377 +
acacctctacacaaataaac

SEQ ID NO: 23921 - DNA, 20 bp, Artificial Sequence
  Synthetic oligonucleotide; TAG chr11 5358370 5358389 5358386 +
cacaaataaactagaaaatc

SEQ ID NO: 23922 - DNA, 20 bp, Artificial Sequence
  Synthetic oligonucleotide; AAG chr11 5358373 5358392 5358389 +
aaataaactagaaaatctag

SEQ ID NO: 23923 - DNA, 20 bp, Artificial Sequence
  Synthetic oligonucleotide; TGG chr11 5358379 5358398 5358395 +
actagaaaatctagaagaaa

SEQ ID NO: 23924 - DNA, 20 bp, Artificial Sequence
  Synthetic oligonucleotide; AAG chr11 5358410 5358429 5358426 +
cttgacacatacaccctccc

SEQ ID NO: 23925 - DNA, 20 bp, Artificial Sequence
  Synthetic oligonucleotide; CAG chr11 5358420 5358439 5358436 +
acaccctcccaagactaaac

SEQ ID NO: 23926 - DNA, 20 bp, Artificial Sequence
  Synthetic oligonucleotide; AGG chr11 5358421 5358440 5358437 +
caccctcccaagactaaacc

SEQ ID NO: 23927 - DNA, 20 bp, Artificial Sequence
  Synthetic oligonucleotide; AAG chr11 5358424 5358443 5358440 +
cctcccaagactaaaccagg

SEQ ID NO: 23928 - DNA, 20 bp, Artificial Sequence
  Synthetic oligonucleotide; AAG chr11 5358427 5358446 5358443 +
cccaagactaaaccaggaag

SEQ ID NO: 23929 - DNA, 20 bp, Artificial Sequence
  Synthetic oligonucleotide; TAG chr11 5358443 5358462 5358459 +
gaagaagttgaatctctgaa

SEQ ID NO: 23930 - DNA, 20 bp, Artificial Sequence
  Synthetic oligonucleotide; CAG chr11 5358454 5358473 5358470 +
atctctgaatagaccaataa

SEQ ID NO: 23931 - DNA, 20 bp, Artificial Sequence
  Synthetic oligonucleotide; AGG chr11 5358455 5358474 5358471 +
tctctgaatagaccaataac

SEQ ID NO: 23932 - DNA, 20 bp, Artificial Sequence
  Synthetic oligonucleotide; GAG chr11 5358468 5358487 5358484 +
caataacaggatctgaaatt

SEQ ID NO: 23933 - DNA, 20 bp, Artificial Sequence
  Synthetic oligonucleotide; AGG chr11 5358469 5358488 5358485 +
aataacaggatctgaaattg

SEQ ID NO: 23934 - DNA, 20 bp, Artificial Sequence
  Synthetic oligonucleotide; TAG chr11 5358482 5358501 5358498 +
gaaattgaggcaataattaa

SEQ ID NO: 23935 - DNA, 20 bp, Artificial Sequence
  Synthetic oligonucleotide; CAG chr11 5358500 5358519 5358516 +
aatagcttaccaaccaaaaa

SEQ ID NO: 23936 - DNA, 20 bp, Artificial Sequence
  Synthetic oligonucleotide; CAG chr11 5358505 5358524 5358521 +
cttaccaaccaaaaacagtc

SEQ ID NO: 23937 - DNA, 20 bp, Artificial Sequence
  Synthetic oligonucleotide; AGG chr11 5358506 5358525 5358522 +
ttaccaaccaaaaacagtcc

SEQ ID NO: 23938 - DNA, 20 bp, Artificial Sequence
  Synthetic oligonucleotide; CAG chr11 5358511 5358530 5358527 +
aaccaaaaacagtccaggac

SEQ ID NO: 23939 - DNA, 20 bp, Artificial Sequence
  Synthetic oligonucleotide; TGG chr11 5358515 5358534 5358531 +
aaaaacagtccaggaccaga

SEQ ID NO: 23940 - DNA, 20 bp, Artificial Sequence
  Synthetic oligonucleotide; GAG chr11 5358517 5358536 5358533 +
aaacagtccaggaccagatg

SEQ ID NO: 23941 - DNA, 20 bp, Artificial Sequence
  Synthetic oligonucleotide; CAG chr11 5358523 5358542 5358539 +
tccaggaccagatggagtca

SEQ ID NO: 23942 - DNA, 20 bp, Artificial Sequence
  Synthetic oligonucleotide; CAG chr11 5358537 5358556 5358553 +
gagtcacagccaaattctac

SEQ ID NO: 23943 - DNA, 20 bp, Artificial Sequence
  Synthetic oligonucleotide; GAG chr11 5358539 5358558 5358555 +
gtcacagccaaattctacca

SEQ ID NO: 23944 - DNA, 20 bp, Artificial Sequence
  Synthetic oligonucleotide; AGG chr11 5358540 5358559 5358556 +
tcacagccaaattctaccag

SEQ ID NO: 23945 - DNA, 20 bp, Artificial Sequence
  Synthetic oligonucleotide; AAG chr11 5358546 5358565 5358562 +
ccaaattctaccagaggtac

SEQ ID NO: 23946 - DNA, 20 bp, Artificial Sequence
  Synthetic oligonucleotide; AGG chr11 5358547 5358566 5358563 +
caaattctaccagaggtaca

SEQ ID NO: 23947 - DNA, 20 bp, Artificial Sequence
  Synthetic oligonucleotide; GAG chr11 5358549 5358568 5358565 +
aattctaccagaggtacaag

SEQ ID NO: 23948 - DNA, 20 bp, Artificial Sequence
  Synthetic oligonucleotide; AGG chr11 5358550 5358569 5358566 +
attctaccagaggtacaagg

SEQ ID NO: 23949 - DNA, 20 bp, Artificial Sequence
  Synthetic oligonucleotide; GAG chr11 5358552 5358571 5358568 +
tctaccagaggtacaaggag

SEQ ID NO: 23950 - DNA, 20 bp, Artificial Sequence
  Synthetic oligonucleotide; TGG chr11 5358556 5358575 5358572 +
ccagaggtacaaggaggagc

SEQ ID NO: 23951 - DNA, 20 bp, Artificial Sequence
  Synthetic oligonucleotide; TAG chr11 5358589 5358608 5358605 +
tctgaaactattcgaatcaa

SEQ ID NO: 23952 - DNA, 20 bp, Artificial Sequence
  Synthetic oligonucleotide; AAG chr11 5358595 5358614 5358611 +
actattcgaatcaatagtaa

SEQ ID NO: 23953 - DNA, 20 bp, Artificial Sequence
  Synthetic oligonucleotide; GAG chr11 5358597 5358616 5358613 +
tattcgaatcaatagtaaaa

SEQ ID NO: 23954 - DNA, 20 bp, Artificial Sequence
  Synthetic oligonucleotide; AGG chr11 5358598 5358617 5358614 +
attcgaatcaatagtaaaag

SEQ ID NO: 23955 - DNA, 20 bp, Artificial Sequence
  Synthetic oligonucleotide; GGG chr11 5358599 5358618 5358615 +
ttcgaatcaatagtaaaaga

SEQ ID NO: 23956 - DNA, 20 bp, Artificial Sequence
  Synthetic oligonucleotide; GAG chr11 5358624 5358643 5358640 +
tcctccctaactcattttat

SEQ ID NO: 23957 - DNA, 20 bp, Artificial Sequence
  Synthetic oligonucleotide; AGG chr11 5358625 5358644 5358641 +
cctccctaactcattttatg

SEQ ID NO: 23958 - DNA, 20 bp, Artificial Sequence
  Synthetic oligonucleotide; CAG chr11 5358629 5358648 5358645 +
cctaactcattttatgaggc

SEQ ID NO: 23959 - DNA, 20 bp, Artificial Sequence
  Synthetic oligonucleotide; AAG chr11 5358648 5358667 5358664 +
ccagcatcatcctgatacca

SEQ ID NO: 23960 - DNA, 20 bp, Artificial Sequence
  Synthetic oligonucleotide; CGG chr11 5358652 5358671 5358668 +
catcatcctgataccaaagc

SEQ ID NO: 23961 - DNA, 20 bp, Artificial Sequence
  Synthetic oligonucleotide; GGG chr11 5358653 5358672 5358669 +
atcatcctgataccaaagcc

SEQ ID NO: 23962 - DNA, 20 bp, Artificial Sequence
  Synthetic oligonucleotide; CAG chr11 5358656 5358675 5358672 +
atcctgataccaaagccggg

SEQ ID NO: 23963 - DNA, 20 bp, Artificial Sequence
  Synthetic oligonucleotide; GAG chr11 5358658 5358677 5358674 +
cctgataccaaagccgggca

SEQ ID NO: 23964 - DNA, 20 bp, Artificial Sequence
  Synthetic oligonucleotide; AAG chr11 5358673 5358692 5358689 +
gggcagagacacaacaaaaa

SEQ ID NO: 23965 - DNA, 20 bp, Artificial Sequence
  Synthetic oligonucleotide; GAG chr11 5358675 5358694 5358691 +
gcagagacacaacaaaaaaa

SEQ ID NO: 23966 - DNA, 20 bp, Artificial Sequence
  Synthetic oligonucleotide; TAG chr11 5358683 5358702 5358699 +
acaacaaaaaaagagaattt

SEQ ID NO: 23967 - DNA, 20 bp, Artificial Sequence
  Synthetic oligonucleotide; TGG chr11 5358700 5358719 5358716 +
ttttagaccaatatccctga

SEQ ID NO: 23968 - DNA, 20 bp, Artificial Sequence
  Synthetic oligonucleotide; TGG chr11 5358733 5358752 5358749 +
aaaaaacctcaataaaatac

SEQ ID NO: 23969 - DNA, 20 bp, Artificial Sequence
  Synthetic oligonucleotide; AAG chr11 5358738 5358757 5358754 +
acctcaataaaatactggca

SEQ ID NO: 23970 - DNA, 20 bp, Artificial Sequence
  Synthetic oligonucleotide; CAG chr11 5358747 5358766 5358763 +
aaatactggcaaagcaaatc

SEQ ID NO: 23971 - DNA, 20 bp, Artificial Sequence
  Synthetic oligonucleotide; CAG chr11 5358750 5358769 5358766 +
tactggcaaagcaaatccag

SEQ ID NO: 23972 - DNA, 20 bp, Artificial Sequence
  Synthetic oligonucleotide; AAG chr11 5358762 5358781 5358778 +
aaatccagcagcacatccaa

SEQ ID NO: 23973 - DNA, 20 bp, Artificial Sequence
  Synthetic oligonucleotide; AAG chr11 5358781 5358800 5358797 +
aaagcttatccaccatgatc

SEQ ID NO: 23974 - DNA, 20 bp, Artificial Sequence
  Synthetic oligonucleotide; TGG chr11 5358784 5358803 5358800 +
gcttatccaccatgatcaag

SEQ ID NO: 23975 - DNA, 20 bp, Artificial Sequence
  Synthetic oligonucleotide; GGG chr11 5358785 5358804 5358801 +
cttatccaccatgatcaagt

SEQ ID NO: 23976 - DNA, 20 bp, Artificial Sequence
  Synthetic oligonucleotide; TGG chr11 5358797 5358816 5358813 +
gatcaagtgggcttcatccc

SEQ ID NO: 23977 - DNA, 20 bp, Artificial Sequence
  Synthetic oligonucleotide; GGG chr11 5358798 5358817 5358814 +
atcaagtgggcttcatccct

SEQ ID NO: 23978 - DNA, 20 bp, Artificial Sequence
  Synthetic oligonucleotide; AAG chr11 5358805 5358824 5358821 +
gggcttcatccctgggatgc

SEQ ID NO: 23979 - DNA, 20 bp, Artificial Sequence
  Synthetic oligonucleotide; AGG chr11 5358806 5358825 5358822 +
ggcttcatccctgggatgca

SEQ ID NO: 23980 - DNA, 20 bp, Artificial Sequence
  Synthetic oligonucleotide; TGG chr11 5358810 5358829 5358826 +
tcatccctgggatgcaaggc

SEQ ID NO: 23981 - DNA, 20 bp, Artificial Sequence
  Synthetic oligonucleotide; CAG chr11 5358843 5358862 5358859 +
gcaaatcaataaatgtaatc

SEQ ID NO: 23982 - DNA, 20 bp, Artificial Sequence
  Synthetic oligonucleotide; CAG chr11 5358854 5358873 5358870 +
aatgtaatccagcatataaa

SEQ ID NO: 23983 - DNA, 20 bp, Artificial Sequence
  Synthetic oligonucleotide; AAG chr11 5358862 5358881 5358878 +
ccagcatataaacagaacca

SEQ ID NO: 23984 - DNA, 20 bp, Artificial Sequence
  Synthetic oligonucleotide; TAG chr11 5358889 5358908 5358905 +
aaaccacatgattatctcaa

SEQ ID NO: 23985 - DNA, 20 bp, Artificial Sequence
  Synthetic oligonucleotide; CAG chr11 5358895 5358914 5358911 +
catgattatctcaatagatg

SEQ ID NO: 23986 - DNA, 20 bp, Artificial Sequence
  Synthetic oligonucleotide; AAG chr11 5358900 5358919 5358916 +
ttatctcaatagatgcagaa

SEQ ID NO: 23987 - DNA, 20 bp, Artificial Sequence
  Synthetic oligonucleotide; AGG chr11 5358901 5358920 5358917 +
tatctcaatagatgcagaaa

SEQ ID NO: 23988 - DNA, 20 bp, Artificial Sequence
  Synthetic oligonucleotide; TAG chr11 5358952 5358971 5358968 +
gctaaaaactctcaataaat

SEQ ID NO: 23989 - DNA, 20 bp, Artificial Sequence
  Synthetic oligonucleotide; AGG chr11 5358953 5358972 5358969 +
ctaaaaactctcaataaatt

SEQ ID NO: 23990 - DNA, 20 bp, Artificial Sequence
  Synthetic oligonucleotide; TGG chr11 5358962 5358981 5358978 +
ctcaataaattaggtattga

SEQ ID NO: 23991 - DNA, 20 bp, Artificial Sequence
  Synthetic oligonucleotide; GGG chr11 5358963 5358982 5358979 +
tcaataaattaggtattgat

SEQ ID NO: 23992 - DNA, 20 bp, Artificial Sequence
  Synthetic oligonucleotide; AAG chr11 5358983 5359002 5358999 +
gggacgtatctcaaaataat

SEQ ID NO: 23993 - DNA, 20 bp, Artificial Sequence
  Synthetic oligonucleotide; GAG chr11 5358985 5359004 5359001 +
gacgtatctcaaaataataa

SEQ ID NO: 23994 - DNA, 20 bp, Artificial Sequence
  Synthetic oligonucleotide; CAG chr11 5359006 5359025 5359022 +
agccatctatgacaaaccca

SEQ ID NO: 23995 - DNA, 20 bp, Artificial Sequence
  Synthetic oligonucleotide; TGG chr11 5359025 5359044 5359041 +
acagccaatatcatactgaa

SEQ ID NO: 23996 - DNA, 20 bp, Artificial Sequence
  Synthetic oligonucleotide; TGG chr11 5359036 5359055 5359052 +
catactgaatggacaaaaac

SEQ ID NO: 23997 - DNA, 20 bp, Artificial Sequence
  Synthetic oligonucleotide; AAG chr11 5359039 5359058 5359055 +
actgaatggacaaaaactgg

SEQ ID NO: 23998 - DNA, 20 bp, Artificial Sequence
  Synthetic oligonucleotide; TGG chr11 5359058 5359077 5359074 +
gaagcattccctttgaaaac

SEQ ID NO: 23999 - DNA, 20 bp, Artificial Sequence
  Synthetic oligonucleotide; AAG chr11 5359064 5359083 5359080 +
ttccctttgaaaactggcac

SEQ ID NO: 24000 - DNA, 20 bp, Artificial Sequence
  Synthetic oligonucleotide; CAG chr11 5359068 5359087 5359084 +
ctttgaaaactggcacaaga

SEQ ID NO: 24001 - DNA, 20 bp, Artificial Sequence
  Synthetic oligonucleotide; AGG chr11 5359069 5359088 5359085 +
tttgaaaactggcacaagac

SEQ ID NO: 24002 - DNA, 20 bp, Artificial Sequence
  Synthetic oligonucleotide; GGG chr11 5359070 5359089 5359086 +
ttgaaaactggcacaagaca

SEQ ID NO: 24003 - DNA, 20 bp, Artificial Sequence
  Synthetic oligonucleotide; TAG chr11 5359102 5359121 5359118 +
ctcactactcctattcaaca

SEQ ID NO: 24004 - DNA, 20 bp, Artificial Sequence
  Synthetic oligonucleotide; TGG chr11 5359108 5359127 5359124 +
actcctattcaacatagtgt

SEQ ID NO: 24005 - DNA, 20 bp, Artificial Sequence
  Synthetic oligonucleotide; TGG chr11 5359117 5359136 5359133 +
caacatagtgttggaatttc

SEQ ID NO: 24006 - DNA, 20 bp, Artificial Sequence
  Synthetic oligonucleotide; CAG chr11 5359121 5359140 5359137 +
atagtgttggaatttctggc

SEQ ID NO: 24007 - DNA, 20 bp, Artificial Sequence
  Synthetic oligonucleotide; AGG chr11 5359122 5359141 5359138 +
tagtgttggaatttctggcc

SEQ ID NO: 24008 - DNA, 20 bp, Artificial Sequence
  Synthetic oligonucleotide; GGG chr11 5359123 5359142 5359139 +
agtgttggaatttctggcca

SEQ ID NO: 24009 - DNA, 20 bp, Artificial Sequence
  Synthetic oligonucleotide; TAG chr11 5359130 5359149 5359146 +
gaatttctggccagggcaat

SEQ ID NO: 24010 - DNA, 20 bp, Artificial Sequence
  Synthetic oligonucleotide; AGG chr11 5359131 5359150 5359147 +
aatttctggccagggcaatt

SEQ ID NO: 24011 - DNA, 20 bp, Artificial Sequence
  Synthetic oligonucleotide; CAG chr11 5359134 5359153 5359150 +
ttctggccagggcaattagg

SEQ ID NO: 24012 - DNA, 20 bp, Artificial Sequence
  Synthetic oligonucleotide; AGG chr11 5359135 5359154 5359151 +
tctggccagggcaattaggc

SEQ ID NO: 24013 - DNA, 20 bp, Artificial Sequence
  Synthetic oligonucleotide; GAG chr11 5359137 5359156 5359153 +
tggccagggcaattaggcag

SEQ ID NO: 24014 - DNA, 20 bp, Artificial Sequence
  Synthetic oligonucleotide; AAG chr11 5359140 5359159 5359156 +
ccagggcaattaggcaggag

SEQ ID NO: 24015 - DNA, 20 bp, Artificial Sequence
  Synthetic oligonucleotide; AGG chr11 5359141 5359160 5359157 +
cagggcaattaggcaggaga

SEQ ID NO: 24016 - DNA, 20 bp, Artificial Sequence
  Synthetic oligonucleotide; AAG chr11 5359149 5359168 5359165 +
ttaggcaggagaaggaaaaa

SEQ ID NO: 24017 - DNA, 20 bp, Artificial Sequence
  Synthetic oligonucleotide; AGG chr11 5359150 5359169 5359166 +
taggcaggagaaggaaaaaa

SEQ ID NO: 24018 - DNA, 20 bp, Artificial Sequence
  Synthetic oligonucleotide; TAG chr11 5359161 5359180 5359177 +
aggaaaaaaaggtattcaat

SEQ ID NO: 24019 - DNA, 20 bp, Artificial Sequence
  Synthetic oligonucleotide; AGG chr11 5359162 5359181 5359178 +
ggaaaaaaaggtattcaatt

SEQ ID NO: 24020 - DNA, 20 bp, Artificial Sequence
  Synthetic oligonucleotide; AAG chr11 5359167 5359186 5359183 +
aaaaggtattcaattaggaa

SEQ ID NO: 24021 - DNA, 20 bp, Artificial Sequence
  Synthetic oligonucleotide; GAG chr11 5359169 5359188 5359185 +
aaggtattcaattaggaaaa

SEQ ID NO: 24022 - DNA, 20 bp, Artificial Sequence
  Synthetic oligonucleotide; AGG chr11 5359170 5359189 5359186 +
aggtattcaattaggaaaag

SEQ ID NO: 24023 - DNA, 20 bp, Artificial Sequence
  Synthetic oligonucleotide; AAG chr11 5359173 5359192 5359189 +
tattcaattaggaaaagagg

SEQ ID NO: 24024 - DNA, 20 bp, Artificial Sequence
  Synthetic oligonucleotide; CAG chr11 5359194 5359213 5359210 +
agtcaaattgtccctgtttg

SEQ ID NO: 24025 - DNA, 20 bp, Artificial Sequence
  Synthetic oligonucleotide; TAG chr11 5359215 5359234 5359231 +
agatgacacgattgtatatc

SEQ ID NO: 24026 - DNA, 20 bp, Artificial Sequence
  Synthetic oligonucleotide; CAG chr11 5359233 5359252 5359249 +
tctagaaaaccccactgtct

SEQ ID NO: 24027 - DNA, 20 bp, Artificial Sequence
  Synthetic oligonucleotide; TAG chr11 5359257 5359276 5359273 +
ccaaaatgtccttaaactga

SEQ ID NO: 24028 - DNA, 20 bp, Artificial Sequence
  Synthetic oligonucleotide; AGG chr11 5359258 5359277 5359274 +
caaaatgtccttaaactgat

SEQ ID NO: 24029 - DNA, 20 bp, Artificial Sequence
  Synthetic oligonucleotide; CAG chr11 5359267 5359286 5359283 +
cttaaactgataggcaactt

SEQ ID NO: 24030 - DNA, 20 bp, Artificial Sequence
  Synthetic oligonucleotide; AAG chr11 5359272 5359291 5359288 +
actgataggcaacttcagca

SEQ ID NO: 24031 - DNA, 20 bp, Artificial Sequence
  Synthetic oligonucleotide; CAG chr11 5359278 5359297 5359294 +
aggcaacttcagcaaagtct

SEQ ID NO: 24032 - DNA, 20 bp, Artificial Sequence
  Synthetic oligonucleotide; AGG chr11 5359279 5359298 5359295 +
ggcaacttcagcaaagtctc

SEQ ID NO: 24033 - DNA, 20 bp, Artificial Sequence
  Synthetic oligonucleotide; AAG chr11 5359308 5359327 5359324 +
aatcaatgtgcaaaaatcac

SEQ ID NO: 24034 - DNA, 20 bp, Artificial Sequence
  Synthetic oligonucleotide; CAG chr11 5359330 5359349 5359346 +
gcattcttatacaccaataa

SEQ ID NO: 24035 - DNA, 20 bp, Artificial Sequence
  Synthetic oligonucleotide; CAG chr11 5359338 5359357 5359354 +
atacaccaataacagacaaa

SEQ ID NO: 24036 - DNA, 20 bp, Artificial Sequence
  Synthetic oligonucleotide; GAG chr11 5359340 5359359 5359356 +
acaccaataacagacaaaca

SEQ ID NO: 24037 - DNA, 20 bp, Artificial Sequence
  Synthetic oligonucleotide; GAG chr11 5359342 5359361 5359358 +
accaataacagacaaacaga

SEQ ID NO: 24038 - DNA, 20 bp, Artificial Sequence
  Synthetic oligonucleotide; GAG chr11 5359354 5359373 5359370 +
caaacagagagccaaatcat

SEQ ID NO: 24039 - DNA, 20 bp, Artificial Sequence
  Synthetic oligonucleotide; AGG chr11 5359355 5359374 5359371 +
aaacagagagccaaatcatg

SEQ ID NO: 24040 - DNA, 20 bp, Artificial Sequence
  Synthetic oligonucleotide; GGG chr11 5359356 5359375 5359372 +
aacagagagccaaatcatga

SEQ ID NO: 24041 - DNA, 20 bp, Artificial Sequence
  Synthetic oligonucleotide; AAG chr11 5359382 5359401 5359398 +
tcccattcacaattgcttca

SEQ ID NO: 24042 - DNA, 20 bp, Artificial Sequence
  Synthetic oligonucleotide; GAG chr11 5359384 5359403 5359400 +
ccattcacaattgcttcaaa

SEQ ID NO: 24043 - DNA, 20 bp, Artificial Sequence
  Synthetic oligonucleotide; TAG chr11 5359398 5359417 5359414 +
ttcaaagagaataaaatacc

SEQ ID NO: 24044 - DNA, 20 bp, Artificial Sequence
  Synthetic oligonucleotide; AGG chr11 5359399 5359418 5359415 +
tcaaagagaataaaatacct

SEQ ID NO: 24045 - DNA, 20 bp, Artificial Sequence
  Synthetic oligonucleotide; AAG chr11 5359414 5359433 5359430 +
tacctaggaatccaacttac

SEQ ID NO: 24046 - DNA, 20 bp, Artificial Sequence
  Synthetic oligonucleotide; GAG chr11 5359416 5359435 5359432 +
cctaggaatccaacttacaa

SEQ ID NO: 24047 - DNA, 20 bp, Artificial Sequence
  Synthetic oligonucleotide; GAG chr11 5359418 5359437 5359434 +
taggaatccaacttacaaga

SEQ ID NO: 24048 - DNA, 20 bp, Artificial Sequence
  Synthetic oligonucleotide; AGG chr11 5359419 5359438 5359435 +
aggaatccaacttacaagag

SEQ ID NO: 24049 - DNA, 20 bp, Artificial Sequence
  Synthetic oligonucleotide; AAG chr11 5359424 5359443 5359440 +
tccaacttacaagagaggtg

SEQ ID NO: 24050 - DNA, 20 bp, Artificial Sequence
  Synthetic oligonucleotide; AGG chr11 5359425 5359444 5359441 +
ccaacttacaagagaggtga

SEQ ID NO: 24051 - DNA, 20 bp, Artificial Sequence
  Synthetic oligonucleotide; AAG chr11 5359436 5359455 5359452 +
gagaggtgaaggacctcttc

SEQ ID NO: 24052 - DNA, 20 bp, Artificial Sequence
  Synthetic oligonucleotide; AGG chr11 5359437 5359456 5359453 +
agaggtgaaggacctcttca

SEQ ID NO: 24053 - DNA, 20 bp, Artificial Sequence
  Synthetic oligonucleotide; GAG chr11 5359439 5359458 5359455 +
aggtgaaggacctcttcaag

SEQ ID NO: 24054 - DNA, 20 bp, Artificial Sequence
  Synthetic oligonucleotide; AAG chr11 5359470 5359489 5359486 +
accactgctgaatgaaataa

SEQ ID NO: 24055 - DNA, 20 bp, Artificial Sequence
  Synthetic oligonucleotide; AAG chr11 5359473 5359492 5359489 +
actgctgaatgaaataaaag

SEQ ID NO: 24056 - DNA, 20 bp, Artificial Sequence
  Synthetic oligonucleotide; TGG chr11 5359487 5359506 5359503 +
taaaagaagatacaaacaaa

SEQ ID NO: 24057 - DNA, 20 bp, Artificial Sequence
  Synthetic oligonucleotide; AAG chr11 5359490 5359509 5359506 +
aagaagatacaaacaaatgg

SEQ ID NO: 24058 - DNA, 20 bp, Artificial Sequence
  Synthetic oligonucleotide; TGG chr11 5359508 5359527 5359524 +
ggaagaacattccatgctca

SEQ ID NO: 24059 - DNA, 20 bp, Artificial Sequence
  Synthetic oligonucleotide; GGG chr11 5359509 5359528 5359525 +
gaagaacattccatgctcat

SEQ ID NO: 24060 - DNA, 20 bp, Artificial Sequence
  Synthetic oligonucleotide; TAG chr11 5359512 5359531 5359528 +
gaacattccatgctcatggg

SEQ ID NO: 24061 - DNA, 20 bp, Artificial Sequence
  Synthetic oligonucleotide; AGG chr11 5359513 5359532 5359529 +
aacattccatgctcatgggt

SEQ ID NO: 24062 - DNA, 20 bp, Artificial Sequence
  Synthetic oligonucleotide; AAG chr11 5359516 5359535 5359532 +
attccatgctcatgggtagg

SEQ ID NO: 24063 - DNA, 20 bp, Artificial Sequence
  Synthetic oligonucleotide; TGG chr11 5359536 5359555 5359552 +
aagaatcaatatcatgaaaa

SEQ ID NO: 24064 - DNA, 20 bp, Artificial Sequence
  Synthetic oligonucleotide; CAG chr11 5359544 5359563 5359560 +
atatcatgaaaatggccata

SEQ ID NO: 24065 - DNA, 20 bp, Artificial Sequence
  Synthetic oligonucleotide; AAG chr11 5359550 5359569 5359566 +
tgaaaatggccatacagccc

SEQ ID NO: 24066 - DNA, 20 bp, Artificial Sequence
  Synthetic oligonucleotide; AGG chr11 5359551 5359570 5359567 +
gaaaatggccatacagccca

SEQ ID NO: 24067 - DNA, 20 bp, Artificial Sequence
  Synthetic oligonucleotide; TAG chr11 5359561 5359580 5359577 +
atacagcccaaggtaattta

SEQ ID NO: 24068 - DNA, 20 bp, Artificial Sequence
  Synthetic oligonucleotide; AAG chr11 5359583 5359602 5359599 +
gattcaatgccatccccatc

SEQ ID NO: 24069 - DNA, 20 bp, Artificial Sequence
  Synthetic oligonucleotide; CAG chr11 5359605 5359624 5359621 +
gctaccaatgactttcttca

SEQ ID NO: 24070 - DNA, 20 bp, Artificial Sequence
  Synthetic oligonucleotide; TGG chr11 5359611 5359630 5359627 +
aatgactttcttcacagaat

SEQ ID NO: 24071 - DNA, 20 bp, Artificial Sequence
  Synthetic oligonucleotide; AAG chr11 5359628 5359647 5359644 +
aattggaaaaaactacttta

SEQ ID NO: 24072 - DNA, 20 bp, Artificial Sequence
  Synthetic oligonucleotide; TGG chr11 5359637 5359656 5359653 +
aaactactttaaagttcata

SEQ ID NO: 24073 - DNA, 20 bp, Artificial Sequence
  Synthetic oligonucleotide; AAG chr11 5359648 5359667 5359664 +
aagttcatatggaaccaaaa

SEQ ID NO: 24074 - DNA, 20 bp, Artificial Sequence
  Synthetic oligonucleotide; GAG chr11 5359650 5359669 5359666 +
gttcatatggaaccaaaaaa

SEQ ID NO: 24075 - DNA, 20 bp, Artificial Sequence
  Synthetic oligonucleotide; AAG chr11 5359675 5359694 5359691 +
cacattgacatgccaatcct

SEQ ID NO: 24076 - DNA, 20 bp, Artificial Sequence
  Synthetic oligonucleotide; AAG chr11 5359682 5359701 5359698 +
acatgccaatcctaagccaa

SEQ ID NO: 24077 - DNA, 20 bp, Artificial Sequence
  Synthetic oligonucleotide; AAG chr11 5359689 5359708 5359705 +
aatcctaagccaaaagaaca

SEQ ID NO: 24078 - DNA, 20 bp, Artificial Sequence
  Synthetic oligonucleotide; TGG chr11 5359693 5359712 5359709 +
ctaagccaaaagaacaaagc

SEQ ID NO: 24079 - DNA, 20 bp, Artificial Sequence
  Synthetic oligonucleotide; GAG chr11 5359695 5359714 5359711 +
aagccaaaagaacaaagctg

SEQ ID NO: 24080 - DNA, 20 bp, Artificial Sequence
  Synthetic oligonucleotide; AGG chr11 5359696 5359715 5359712 +
agccaaaagaacaaagctgg

SEQ ID NO: 24081 - DNA, 20 bp, Artificial Sequence
  Synthetic oligonucleotide; AAG chr11 5359730 5359749 5359746 +
ctgacttcaaactatactac

SEQ ID NO: 24082 - DNA, 20 bp, Artificial Sequence
  Synthetic oligonucleotide; AGG chr11 5359731 5359750 5359747 +
tgacttcaaactatactaca

SEQ ID NO: 24083 - DNA, 20 bp, Artificial Sequence
  Synthetic oligonucleotide; CAG chr11 5359737 5359756 5359753 +
caaactatactacaaggcta

SEQ ID NO: 24084 - DNA, 20 bp, Artificial Sequence
  Synthetic oligonucleotide; CAG chr11 5359749 5359768 5359765 +
caaggctacagtaaccaaaa

SEQ ID NO: 24085 - DNA, 20 bp, Artificial Sequence
  Synthetic oligonucleotide; TGG chr11 5359754 5359773 5359770 +
ctacagtaaccaaaacagca

SEQ ID NO: 24086 - DNA, 20 bp, Artificial Sequence
  Synthetic oligonucleotide; TGG chr11 5359760 5359779 5359776 +
taaccaaaacagcatggtac

SEQ ID NO: 24087 - DNA, 20 bp, Artificial Sequence
  Synthetic oligonucleotide; CAG chr11 5359771 5359790 5359787 +
gcatggtactggtaccaaaa

SEQ ID NO: 24088 - DNA, 20 bp, Artificial Sequence
  Synthetic oligonucleotide; GAG chr11 5359773 5359792 5359789 +
atggtactggtaccaaaaca

SEQ ID NO: 24089 - DNA, 20 bp, Artificial Sequence
  Synthetic oligonucleotide; TAG chr11 5359779 5359798 5359795 +
ctggtaccaaaacagagata

SEQ ID NO: 24090 - DNA, 20 bp, Artificial Sequence
  Synthetic oligonucleotide; TGG chr11 5359787 5359806 5359803 +
aaaacagagatatagaccaa

SEQ ID NO: 24091 - DNA, 20 bp, Artificial Sequence
  Synthetic oligonucleotide; CAG chr11 5359792 5359811 5359808 +
agagatatagaccaatggaa

SEQ ID NO: 24092 - DNA, 20 bp, Artificial Sequence
  Synthetic oligonucleotide; CAG chr11 5359797 5359816 5359813 +
tatagaccaatggaacagaa

SEQ ID NO: 24093 - DNA, 20 bp, Artificial Sequence
  Synthetic oligonucleotide; GAG chr11 5359799 5359818 5359815 +
tagaccaatggaacagaaca

SEQ ID NO: 24094 - DNA, 20 bp, Artificial Sequence
  Synthetic oligonucleotide; AGG chr11 5359800 5359819 5359816 +
agaccaatggaacagaacag

SEQ ID NO: 24095 - DNA, 20 bp, Artificial Sequence
  Synthetic oligonucleotide; CAG chr11 5359806 5359825 5359822 +
atggaacagaacagaggcct

SEQ ID NO: 24096 - DNA, 20 bp, Artificial Sequence
  Synthetic oligonucleotide; TGG chr11 5359868 5359887 5359884 +
aacctgacaaaaaaaacaaa

SEQ ID NO: 24097 - DNA, 20 bp, Artificial Sequence
  Synthetic oligonucleotide; GGG chr11 5359869 5359888 5359885 +
acctgacaaaaaaaacaaat

SEQ ID NO: 24098 - DNA, 20 bp, Artificial Sequence
  Synthetic oligonucleotide; GGG chr11 5359870 5359889 5359886 +
cctgacaaaaaaaacaaatg

SEQ ID NO: 24099 - DNA, 20 bp, Artificial Sequence
  Synthetic oligonucleotide; AAG chr11 5359874 5359893 5359890 +
acaaaaaaaacaaatgggga

SEQ ID NO: 24100 - DNA, 20 bp, Artificial Sequence
  Synthetic oligonucleotide; AGG chr11 5359875 5359894 5359891 +
caaaaaaaacaaatggggaa

SEQ ID NO: 24101 - DNA, 20 bp, Artificial Sequence
  Synthetic oligonucleotide; TGG chr11 5359895 5359914 5359911 +
aggattccctatttaataaa

SEQ ID NO: 24102 - DNA, 20 bp, Artificial Sequence
  Synthetic oligonucleotide; TGG chr11 5359901 5359920 5359917 +
ccctatttaataaatggtgc

SEQ ID NO: 24103 - DNA, 20 bp, Artificial Sequence
  Synthetic oligonucleotide; GGG chr11 5359902 5359921 5359918 +
cctatttaataaatggtgct

SEQ ID NO: 24104 - DNA, 20 bp, Artificial Sequence
  Synthetic oligonucleotide; TGG chr11 5359910 5359929 5359926 +
ataaatggtgctgggaaaac

SEQ ID NO: 24105 - DNA, 20 bp, Artificial Sequence
  Synthetic oligonucleotide; CAG chr11 5359924 5359943 5359940 +
gaaaactggctaaccatacg

SEQ ID NO: 24106 - DNA, 20 bp, Artificial Sequence
  Synthetic oligonucleotide; AAG chr11 5359928 5359947 5359944 +
actggctaaccatacgcaga

SEQ ID NO: 24107 - DNA, 20 bp, Artificial Sequence
  Synthetic oligonucleotide; TGG chr11 5359938 5359957 5359954 +
catacgcagaaagctgaaac

SEQ ID NO: 24108 - DNA, 20 bp, Artificial Sequence
  Synthetic oligonucleotide; AAG chr11 5359975 5359994 5359991 +
ccttatacaaaaattaattc

SEQ ID NO: 24109 - DNA, 20 bp, Artificial Sequence
  Synthetic oligonucleotide; TGG chr11 5359979 5359998 5359995 +
atacaaaaattaattcaaga

SEQ ID NO: 24110 - DNA, 20 bp, Artificial Sequence
  Synthetic oligonucleotide; CAG chr11 5359986 5360005 5360002 +
aattaattcaagatggatta

SEQ ID NO: 24111 - DNA, 20 bp, Artificial Sequence
  Synthetic oligonucleotide; TAG chr11 5359999 5360018 5360015 +
tggattacagacttaaatgt

SEQ ID NO: 24112 - DNA, 20 bp, Artificial Sequence
  Synthetic oligonucleotide; TGG chr11 5360022 5360041 5360038 +
actgaaaaccataaaaactc

SEQ ID NO: 24113 - DNA, 20 bp, Artificial Sequence
  Synthetic oligonucleotide; AAG chr11 5360025 5360044 5360041 +
gaaaaccataaaaactctgg

SEQ ID NO: 24114 - DNA, 20 bp, Artificial Sequence
  Synthetic oligonucleotide; TAG chr11 5360034 5360053 5360050 +
aaaaactctggaagaaaacc

SEQ ID NO: 24115 - DNA, 20 bp, Artificial Sequence
  Synthetic oligonucleotide; AGG chr11 5360035 5360054 5360051 +
aaaactctggaagaaaacct

SEQ ID NO: 24116 - DNA, 20 bp, Artificial Sequence
  Synthetic oligonucleotide; CAG chr11 5360048 5360067 5360064 +
aaaacctaggcaataccatt

SEQ ID NO: 24117 - DNA, 20 bp, Artificial Sequence
  Synthetic oligonucleotide; AGG chr11 5360049 5360068 5360065 +
aaacctaggcaataccattc

SEQ ID NO: 24118 - DNA, 20 bp, Artificial Sequence
  Synthetic oligonucleotide; TAG chr11 5360055 5360074 5360071 +
aggcaataccattcaggaca

SEQ ID NO: 24119 - DNA, 20 bp, Artificial Sequence
  Synthetic oligonucleotide; AGG chr11 5360056 5360075 5360072 +
ggcaataccattcaggacat

SEQ ID NO: 24120 - DNA, 20 bp, Artificial Sequence
  Synthetic oligonucleotide; TGG chr11 5360061 5360080 5360077 +
taccattcaggacataggca

SEQ ID NO: 24121 - DNA, 20 bp, Artificial Sequence
  Synthetic oligonucleotide; GGG chr11 5360062 5360081 5360078 +
accattcaggacataggcat

SEQ ID NO: 24122 - DNA, 20 bp, Artificial Sequence
  Synthetic oligonucleotide; AAG chr11 5360066 5360085 5360082 +
ttcaggacataggcatgggc

SEQ ID NO: 24123 - DNA, 20 bp, Artificial Sequence
  Synthetic oligonucleotide; AGG chr11 5360067 5360086 5360083 +
tcaggacataggcatgggca

SEQ ID NO: 24124 - DNA, 20 bp, Artificial Sequence
  Synthetic oligonucleotide; AAG chr11 5360091 5360110 5360107 +
cttcatgtctaaaacaccaa

SEQ ID NO: 24125 - DNA, 20 bp, Artificial Sequence
  Synthetic oligonucleotide; TGG chr11 5360097 5360116 5360113 +
gtctaaaacaccaaaagcaa

SEQ ID NO: 24126 - DNA, 20 bp, Artificial Sequence
  Synthetic oligonucleotide; AAG chr11 5360106 5360125 5360122 +
accaaaagcaatggcaacaa

SEQ ID NO: 24127 - DNA, 20 bp, Artificial Sequence
  Synthetic oligonucleotide; TGG chr11 5360115 5360134 5360131 +
aatggcaacaaaagccaaaa

SEQ ID NO: 24128 - DNA, 20 bp, Artificial Sequence
  Synthetic oligonucleotide; TGG chr11 5360123 5360142 5360139 +
caaaagccaaaatggacaaa

SEQ ID NO: 24129 - DNA, 20 bp, Artificial Sequence
  Synthetic oligonucleotide; GGG chr11 5360124 5360143 5360140 +
aaaagccaaaatggacaaat

SEQ ID NO: 24130 - DNA, 20 bp, Artificial Sequence
  Synthetic oligonucleotide; AAG chr11 5360141 5360160 5360157 +
aatgggatctaattaaacta

SEQ ID NO: 24131 - DNA, 20 bp, Artificial Sequence
  Synthetic oligonucleotide; GAG chr11 5360143 5360162 5360159 +
tgggatctaattaaactaaa

SEQ ID NO: 24132 - DNA, 20 bp, Artificial Sequence
  Synthetic oligonucleotide; CAG chr11 5360154 5360173 5360170 +
taaactaaagagcttctgca

SEQ ID NO: 24133 - DNA, 20 bp, Artificial Sequence
  Synthetic oligonucleotide; AAG chr11 5360160 5360179 5360176 +
aaagagcttctgcacagcaa

SEQ ID NO: 24134 - DNA, 20 bp, Artificial Sequence
  Synthetic oligonucleotide; CAG chr11 5360173 5360192 5360189 +
acagcaaaagaaactaccat

SEQ ID NO: 24135 - DNA, 20 bp, Artificial Sequence
  Synthetic oligonucleotide; GAG chr11 5360175 5360194 5360191 +
agcaaaagaaactaccatca

SEQ ID NO: 24136 - DNA, 20 bp, Artificial Sequence
  Synthetic oligonucleotide; CAG chr11 5360182 5360201 5360198 +
gaaactaccatcagagtgaa

SEQ ID NO: 24137 - DNA, 20 bp, Artificial Sequence
  Synthetic oligonucleotide; AGG chr11 5360183 5360202 5360199 +
aaactaccatcagagtgaac

SEQ ID NO: 24138 - DNA, 20 bp, Artificial Sequence
  Synthetic oligonucleotide; CAG chr11 5360193 5360212 5360209 +
cagagtgaacaggcaacata

SEQ ID NO: 24139 - DNA, 20 bp, Artificial Sequence
  Synthetic oligonucleotide; TGG chr11 5360198 5360217 5360214 +
tgaacaggcaacatacagaa

SEQ ID NO: 24140 - DNA, 20 bp, Artificial Sequence
  Synthetic oligonucleotide; GGG chr11 5360199 5360218 5360215 +
gaacaggcaacatacagaat

SEQ ID NO: 24141 - DNA, 20 bp, Artificial Sequence
  Synthetic oligonucleotide; GAG chr11 5360201 5360220 5360217 +
acaggcaacatacagaatgg

SEQ ID NO: 24142 - DNA, 20 bp, Artificial Sequence
  Synthetic oligonucleotide; AAG chr11 5360232 5360251 5360248 +
tgcaatctactcatccgaca

SEQ ID NO: 24143 - DNA, 20 bp, Artificial Sequence
  Synthetic oligonucleotide; AGG chr11 5360233 5360252 5360249 +
gcaatctactcatccgacaa

SEQ ID NO: 24144 - DNA, 20 bp, Artificial Sequence
  Synthetic oligonucleotide; GGG chr11 5360234 5360253 5360250 +
caatctactcatccgacaaa

SEQ ID NO: 24145 - DNA, 20 bp, Artificial Sequence
  Synthetic oligonucleotide; CAG chr11 5360245 5360264 5360261 +
tccgacaaagggctaatatc

SEQ ID NO: 24146 - DNA, 20 bp, Artificial Sequence
  Synthetic oligonucleotide; AAG chr11 5360276 5360295 5360292 +
atgaactcaaacaaatttac

SEQ ID NO: 24147 - DNA, 20 bp, Artificial Sequence
  Synthetic oligonucleotide; AAG chr11 5360299 5360318 5360315 +
aaaaaaacaaccccatcaaa

SEQ ID NO: 24148 - DNA, 20 bp, Artificial Sequence
  Synthetic oligonucleotide; TGG chr11 5360302 5360321 5360318 +
aaaacaaccccatcaaaaag

SEQ ID NO: 24149 - DNA, 20 bp, Artificial Sequence
  Synthetic oligonucleotide; GGG chr11 5360303 5360322 5360319 +
aaacaaccccatcaaaaagt

SEQ ID NO: 24150 - DNA, 20 bp, Artificial Sequence
  Synthetic oligonucleotide; AAG chr11 5360308 5360327 5360324 +
accccatcaaaaagtgggca

SEQ ID NO: 24151 - DNA, 20 bp, Artificial Sequence
  Synthetic oligonucleotide; AGG chr11 5360309 5360328 5360325 +
ccccatcaaaaagtgggcaa

SEQ ID NO: 24152 - DNA, 20 bp, Artificial Sequence
  Synthetic oligonucleotide; CAG chr11 5360319 5360338 5360335 +
aagtgggcaaaggatatgaa

SEQ ID NO: 24153 - DNA, 20 bp, Artificial Sequence
  Synthetic oligonucleotide; AAG chr11 5360333 5360352 5360349 +
tatgaacagacacttctcaa

SEQ ID NO: 24154 - DNA, 20 bp, Artificial Sequence
  Synthetic oligonucleotide; AAG chr11 5360336 5360355 5360352 +
gaacagacacttctcaaaag

SEQ ID NO: 24155 - DNA, 20 bp, Artificial Sequence
  Synthetic oligonucleotide; CAG chr11 5360348 5360367 5360364 +
ctcaaaagaagacatttatg

SEQ ID NO: 24156 - DNA, 20 bp, Artificial Sequence
  Synthetic oligonucleotide; CAG chr11 5360355 5360374 5360371 +
gaagacatttatgcagtcaa

SEQ ID NO: 24157 - DNA, 20 bp, Artificial Sequence
  Synthetic oligonucleotide; TGG chr11 5360384 5360403 5360400 +
gaaaaaatgctcatcatcac

SEQ ID NO: 24158 - DNA, 20 bp, Artificial Sequence
  Synthetic oligonucleotide; CAG chr11 5360391 5360410 5360407 +
tgctcatcatcactggccat

SEQ ID NO: 24159 - DNA, 20 bp, Artificial Sequence
  Synthetic oligonucleotide; GAG chr11 5360393 5360412 5360409 +
ctcatcatcactggccatca

SEQ ID NO: 24160 - DNA, 20 bp, Artificial Sequence
  Synthetic oligonucleotide; CAG chr11 5360414 5360433 5360430 +
agaaatacaaatcaaaacca

SEQ ID NO: 24161 - DNA, 20 bp, Artificial Sequence
  Synthetic oligonucleotide; GAG chr11 5360418 5360437 5360434 +
atacaaatcaaaaccacagt

SEQ ID NO: 24162 - DNA, 20 bp, Artificial Sequence
  Synthetic oligonucleotide; CAG chr11 5360435 5360454 5360451 +
agtgagataccatctcacac

SEQ ID NO: 24163 - DNA, 20 bp, Artificial Sequence
  Synthetic oligonucleotide; TAG chr11 5360439 5360458 5360455 +
agataccatctcacaccagt

SEQ ID NO: 24164 - DNA, 20 bp, Artificial Sequence
  Synthetic oligonucleotide; TGG chr11 5360444 5360463 5360460 +
ccatctcacaccagttagaa

SEQ ID NO: 24165 - DNA, 20 bp, Artificial Sequence
  Synthetic oligonucleotide; AAG chr11 5360458 5360477 5360474 +
ttagaatggcgatcattaaa

SEQ ID NO: 24166 - DNA, 20 bp, Artificial Sequence
  Synthetic oligonucleotide; CAG chr11 5360462 5360481 5360478 +
aatggcgatcattaaaaagt

SEQ ID NO: 24167 - DNA, 20 bp, Artificial Sequence
  Synthetic oligonucleotide; AGG chr11 5360463 5360482 5360479 +
atggcgatcattaaaaagtc

SEQ ID NO: 24168 - DNA, 20 bp, Artificial Sequence
  Synthetic oligonucleotide; CAG chr11 5360472 5360491 5360488 +
attaaaaagtcaggaaacaa

SEQ ID NO: 24169 - DNA, 20 bp, Artificial Sequence
  Synthetic oligonucleotide; AGG chr11 5360473 5360492 5360489 +
ttaaaaagtcaggaaacaac

SEQ ID NO: 24170 - DNA, 20 bp, Artificial Sequence
  Synthetic oligonucleotide; TGG chr11 5360479 5360498 5360495 +
agtcaggaaacaacaggtgc

SEQ ID NO: 24171 - DNA, 20 bp, Artificial Sequence
  Synthetic oligonucleotide; GAG chr11 5360481 5360500 5360497 +
tcaggaaacaacaggtgctg

SEQ ID NO: 24172 - DNA, 20 bp, Artificial Sequence
  Synthetic oligonucleotide; GAG chr11 5360483 5360502 5360499 +
aggaaacaacaggtgctgga

SEQ ID NO: 24173 - DNA, 20 bp, Artificial Sequence
  Synthetic oligonucleotide; AGG chr11 5360484 5360503 5360500 +
ggaaacaacaggtgctggag

SEQ ID NO: 24174 - DNA, 20 bp, Artificial Sequence
  Synthetic oligonucleotide; AAG chr11 5360492 5360511 5360508 +
caggtgctggagaggatgtg

SEQ ID NO: 24175 - DNA, 20 bp, Artificial Sequence
  Synthetic oligonucleotide; AAG chr11 5360495 5360514 5360511 +
gtgctggagaggatgtgaag

SEQ ID NO: 24176 - DNA, 20 bp, Artificial Sequence
  Synthetic oligonucleotide; TAG chr11 5360498 5360517 5360514 +
ctggagaggatgtgaagaag

SEQ ID NO: 24177 - DNA, 20 bp, Artificial Sequence
  Synthetic oligonucleotide; AGG chr11 5360499 5360518 5360515 +
tggagaggatgtgaagaagt

SEQ ID NO: 24178 - DNA, 20 bp, Artificial Sequence
  Synthetic oligonucleotide; TGG chr11 5360518 5360537 5360534 +
taggaacacttttacactgt

SEQ ID NO: 24179 - DNA, 20 bp, Artificial Sequence
  Synthetic oligonucleotide; GAG chr11 5360522 5360541 5360538 +
aacacttttacactgttggt

SEQ ID NO: 24180 - DNA, 20 bp, Artificial Sequence
  Synthetic oligonucleotide; TAG chr11 5360534 5360553 5360550 +
ctgttggtgagactgtaaac

SEQ ID NO: 24181 - DNA, 20 bp, Artificial Sequence
  Synthetic oligonucleotide; TGG chr11 5360548 5360567 5360564 +
gtaaactagttcaaccattg

SEQ ID NO: 24182 - DNA, 20 bp, Artificial Sequence
  Synthetic oligonucleotide; AAG chr11 5360551 5360570 5360567 +
aactagttcaaccattgtgg

SEQ ID NO: 24183 - DNA, 20 bp, Artificial Sequence
  Synthetic oligonucleotide; CAG chr11 5360555 5360574 5360571 +
agttcaaccattgtggaagt

SEQ ID NO: 24184 - DNA, 20 bp, Artificial Sequence
  Synthetic oligonucleotide; TGG chr11 5360560 5360579 5360576 +
aaccattgtggaagtcagtg

SEQ ID NO: 24185 - DNA, 20 bp, Artificial Sequence
  Synthetic oligonucleotide; CAG chr11 5360571 5360590 5360587 +
aagtcagtgtggcgattcct

SEQ ID NO: 24186 - DNA, 20 bp, Artificial Sequence
  Synthetic oligonucleotide; AGG chr11 5360572 5360591 5360588 +
agtcagtgtggcgattcctc

SEQ ID NO: 24187 - DNA, 20 bp, Artificial Sequence
  Synthetic oligonucleotide; GGG chr11 5360573 5360592 5360589 +
gtcagtgtggcgattcctca

SEQ ID NO: 24188 - DNA, 20 bp, Artificial Sequence
  Synthetic oligonucleotide; TAG chr11 5360579 5360598 5360595 +
gtggcgattcctcagggatc

SEQ ID NO: 24189 - DNA, 20 bp, Artificial Sequence
  Synthetic oligonucleotide; TAG chr11 5360585 5360604 5360601 +
attcctcagggatctagaac

SEQ ID NO: 24190 - DNA, 20 bp, Artificial Sequence
  Synthetic oligonucleotide; CAG chr11 5360603 5360622 5360619 +
actagaaataccatttgacc

SEQ ID NO: 24191 - DNA, 20 bp, Artificial Sequence
  Synthetic oligonucleotide; TGG chr11 5360618 5360637 5360634 +
tgacccagccatcccattac

SEQ ID NO: 24192 - DNA, 20 bp, Artificial Sequence
  Synthetic oligonucleotide; GGG chr11 5360619 5360638 5360635 +
gacccagccatcccattact

SEQ ID NO: 24193 - DNA, 20 bp, Artificial Sequence
  Synthetic oligonucleotide; AAG chr11 5360632 5360651 5360648 +
cattactgggtacatactca

SEQ ID NO: 24194 - DNA, 20 bp, Artificial Sequence
  Synthetic oligonucleotide; AGG chr11 5360633 5360652 5360649 +
attactgggtacatactcaa

SEQ ID NO: 24195 - DNA, 20 bp, Artificial Sequence
  Synthetic oligonucleotide; AAG chr11 5360657 5360676 5360673 +
ttataaatcatgctgctata

SEQ ID NO: 24196 - DNA, 20 bp, Artificial Sequence
  Synthetic oligonucleotide; TGG chr11 5360684 5360703 5360700 +
atgcacatgtatgtttattg

SEQ ID NO: 24197 - DNA, 20 bp, Artificial Sequence
  Synthetic oligonucleotide; TAG chr11 5360699 5360718 5360715 +
tattgtggcactattcacaa

SEQ ID NO: 24198 - DNA, 20 bp, Artificial Sequence
  Synthetic oligonucleotide; AAG chr11 5360704 5360723 5360720 +
tggcactattcacaatagca

SEQ ID NO: 24199 - DNA, 20 bp, Artificial Sequence
  Synthetic oligonucleotide; TGG chr11 5360710 5360729 5360726 +
tattcacaatagcaaagact

SEQ ID NO: 24200 - DNA, 20 bp, Artificial Sequence
  Synthetic oligonucleotide; TAG chr11 5360738 5360757 5360754 +
acccaaatgtccaacaatga

SEQ ID NO: 24201 - DNA, 20 bp, Artificial Sequence
  Synthetic oligonucleotide; TGG chr11 5360743 5360762 5360759 +
aatgtccaacaatgatagac

SEQ ID NO: 24202 - DNA, 20 bp, Artificial Sequence
  Synthetic oligonucleotide; AAG chr11 5360749 5360768 5360765 +
caacaatgatagactggatt

SEQ ID NO: 24203 - DNA, 20 bp, Artificial Sequence
  Synthetic oligonucleotide; TGG chr11 5360758 5360777 5360774 +
tagactggattaagaaaacg

SEQ ID NO: 24204 - DNA, 20 bp, Artificial Sequence
  Synthetic oligonucleotide; TGG chr11 5360774 5360793 5360790 +
aacgtggcacatatacacca

SEQ ID NO: 24205 - DNA, 20 bp, Artificial Sequence
  Synthetic oligonucleotide; CAG chr11 5360786 5360805 5360802 +
atacaccatggaatactatg

SEQ ID NO: 24206 - DNA, 20 bp, Artificial Sequence
  Synthetic oligonucleotide; AAG chr11 5360801 5360820 5360817 +
ctatgcagccataaaaaatg

SEQ ID NO: 24207 - DNA, 20 bp, Artificial Sequence
  Synthetic oligonucleotide; GAG chr11 5360803 5360822 5360819 +
atgcagccataaaaaatgaa

SEQ ID NO: 24208 - DNA, 20 bp, Artificial Sequence
  Synthetic oligonucleotide; TAG chr11 5360819 5360838 5360835 +
tgaagagttcatgtcctttg

SEQ ID NO: 24209 - DNA, 20 bp, Artificial Sequence
  Synthetic oligonucleotide; AGG chr11 5360820 5360839 5360836 +
gaagagttcatgtcctttgt

SEQ ID NO: 24210 - DNA, 20 bp, Artificial Sequence
  Synthetic oligonucleotide; GGG chr11 5360821 5360840 5360837 +
aagagttcatgtcctttgta

SEQ ID NO: 24211 - DNA, 20 bp, Artificial Sequence
  Synthetic oligonucleotide; TGG chr11 5360827 5360846 5360843 +
tcatgtcctttgtagggaca

SEQ ID NO: 24212 - DNA, 20 bp, Artificial Sequence
  Synthetic oligonucleotide; AAG chr11 5360833 5360852 5360849 +
cctttgtagggacatggatg

SEQ ID NO: 24213 - DNA, 20 bp, Artificial Sequence
  Synthetic oligonucleotide; TGG chr11 5360837 5360856 5360853 +
tgtagggacatggatgaagc

SEQ ID NO: 24214 - DNA, 20 bp, Artificial Sequence
  Synthetic oligonucleotide; CAG chr11 5360853 5360872 5360869 +
aagctggaaaccatcattct

SEQ ID NO: 24215 - DNA, 20 bp, Artificial Sequence
  Synthetic oligonucleotide; AAG chr11 5360867 5360886 5360883 +
cattctcagcaaactatcgc

SEQ ID NO: 24216 - DNA, 20 bp, Artificial Sequence
  Synthetic oligonucleotide; AGG chr11 5360868 5360887 5360884 +
attctcagcaaactatcgca

SEQ ID NO: 24217 - DNA, 20 bp, Artificial Sequence
  Synthetic oligonucleotide; TAG chr11 5360902 5360921 5360918 +
acactgcatgttctcactca

SEQ ID NO: 24218 - DNA, 20 bp, Artificial Sequence
  Synthetic oligonucleotide; AGG chr11 5360903 5360922 5360919 +
cactgcatgttctcactcat

SEQ ID NO: 24219 - DNA, 20 bp, Artificial Sequence
  Synthetic oligonucleotide; TGG chr11 5360906 5360925 5360922 +
tgcatgttctcactcatagg

SEQ ID NO: 24220 - DNA, 20 bp, Artificial Sequence
  Synthetic oligonucleotide; GGG chr11 5360907 5360926 5360923 +
gcatgttctcactcataggt

SEQ ID NO: 24221 - DNA, 20 bp, Artificial Sequence
  Synthetic oligonucleotide; GAG chr11 5360921 5360940 5360937 +
ataggtgggaattgaacaat

SEQ ID NO: 24222 - DNA, 20 bp, Artificial Sequence
  Synthetic oligonucleotide; TGG chr11 5360930 5360949 5360946 +
aattgaacaatgagaacaca

SEQ ID NO: 24223 - DNA, 20 bp, Artificial Sequence
  Synthetic oligonucleotide; CAG chr11 5360936 5360955 5360952 +
acaatgagaacacatggaca

SEQ ID NO: 24224 - DNA, 20 bp, Artificial Sequence
  Synthetic oligonucleotide; AGG chr11 5360937 5360956 5360953 +
caatgagaacacatggacac

SEQ ID NO: 24225 - DNA, 20 bp, Artificial Sequence
  Synthetic oligonucleotide; AAG chr11 5360940 5360959 5360956 +
tgagaacacatggacacagg

SEQ ID NO: 24226 - DNA, 20 bp, Artificial Sequence
  Synthetic oligonucleotide; AGG chr11 5360941 5360960 5360957 +
gagaacacatggacacagga

SEQ ID NO: 24227 - DNA, 20 bp, Artificial Sequence
  Synthetic oligonucleotide; GGG chr11 5360942 5360961 5360958 +
agaacacatggacacaggaa

SEQ ID NO: 24228 - DNA, 20 bp, Artificial Sequence
  Synthetic oligonucleotide; GGG chr11 5360943 5360962 5360959 +
gaacacatggacacaggaag

SEQ ID NO: 24229 - DNA, 20 bp, Artificial Sequence
  Synthetic oligonucleotide; CAG chr11 5360958 5360977 5360974 +
ggaaggggaacatcacacac

SEQ ID NO: 24230 - DNA, 20 bp, Artificial Sequence
  Synthetic oligonucleotide; AGG chr11 5360959 5360978 5360975 +
gaaggggaacatcacacacc

SEQ ID NO: 24231 - DNA, 20 bp, Artificial Sequence
  Synthetic oligonucleotide; GGG chr11 5360960 5360979 5360976 +
aaggggaacatcacacacca

SEQ ID NO: 24232 - DNA, 20 bp, Artificial Sequence
  Synthetic oligonucleotide; CAG chr11 5360967 5360986 5360983 +
acatcacacaccagggcctg

SEQ ID NO: 24233 - DNA, 20 bp, Artificial Sequence
  Synthetic oligonucleotide; TGG chr11 5360970 5360989 5360986 +
tcacacaccagggcctgcag

SEQ ID NO: 24234 - DNA, 20 bp, Artificial Sequence
  Synthetic oligonucleotide; GGG chr11 5360971 5360990 5360987 +
cacacaccagggcctgcagt

SEQ ID NO: 24235 - DNA, 20 bp, Artificial Sequence
  Synthetic oligonucleotide; GGG chr11 5360972 5360991 5360988 +
acacaccagggcctgcagtg

SEQ ID NO: 24236 - DNA, 20 bp, Artificial Sequence
  Synthetic oligonucleotide; TGG chr11 5360975 5360994 5360991 +
caccagggcctgcagtgggg

SEQ ID NO: 24237 - DNA, 20 bp, Artificial Sequence
  Synthetic oligonucleotide; GGG chr11 5360976 5360995 5360992 +
accagggcctgcagtggggt

SEQ ID NO: 24238 - DNA, 20 bp, Artificial Sequence
  Synthetic oligonucleotide; GGG chr11 5360977 5360996 5360993 +
ccagggcctgcagtggggtg

SEQ ID NO: 24239 - DNA, 20 bp, Artificial Sequence
  Synthetic oligonucleotide; GGG chr11 5360978 5360997 5360994 +
cagggcctgcagtggggtgg

SEQ ID NO: 24240 - DNA, 20 bp, Artificial Sequence
  Synthetic oligonucleotide; CGG chr11 5360982 5361001 5360998 +
gcctgcagtggggtgggggt

SEQ ID NO: 24241 - DNA, 20 bp, Artificial Sequence
  Synthetic oligonucleotide; GGG chr11 5360983 5361002 5360999 +
cctgcagtggggtgggggtc

SEQ ID NO: 24242 - DNA, 20 bp, Artificial Sequence
  Synthetic oligonucleotide; GGG chr11 5360984 5361003 5361000 +
ctgcagtggggtgggggtcg

SEQ ID NO: 24243 - DNA, 20 bp, Artificial Sequence
  Synthetic oligonucleotide; GGG chr11 5360985 5361004 5361001 +
tgcagtggggtgggggtcgg

SEQ ID NO: 24244 - DNA, 20 bp, Artificial Sequence
  Synthetic oligonucleotide; GGG chr11 5360986 5361005 5361002 +
gcagtggggtgggggtcggg

SEQ ID NO: 24245 - DNA, 20 bp, Artificial Sequence
  Synthetic oligonucleotide; GAG chr11 5360988 5361007 5361004 +
agtggggtgggggtcggggg

SEQ ID NO: 24246 - DNA, 20 bp, Artificial Sequence
  Synthetic oligonucleotide; AGG chr11 5360989 5361008 5361005 +
gtggggtgggggtcgggggg

SEQ ID NO: 24247 - DNA, 20 bp, Artificial Sequence
  Synthetic oligonucleotide; GGG chr11 5360990 5361009 5361006 +
tggggtgggggtcgggggga

SEQ ID NO: 24248 - DNA, 20 bp, Artificial Sequence
  Synthetic oligonucleotide; TAG chr11 5360994 5361013 5361010 +
gtgggggtcggggggaggga

SEQ ID NO: 24249 - DNA, 20 bp, Artificial Sequence
  Synthetic oligonucleotide; TAG chr11 5361000 5361019 5361016 +
gtcggggggagggatagcat

SEQ ID NO: 24250 - DNA, 20 bp, Artificial Sequence
  Synthetic oligonucleotide; AGG chr11 5361001 5361020 5361017 +
tcggggggagggatagcatt

SEQ ID NO: 24251 - DNA, 20 bp, Artificial Sequence
  Synthetic oligonucleotide; GAG chr11 5361003 5361022 5361019 +
ggggggagggatagcattag

SEQ ID NO: 24252 - DNA, 20 bp, Artificial Sequence
  Synthetic oligonucleotide; AAG chr11 5361020 5361039 5361036 +
taggagatatacctaatgct

SEQ ID NO: 24253 - DNA, 20 bp, Artificial Sequence
  Synthetic oligonucleotide; GAG chr11 5361027 5361046 5361043 +
tatacctaatgctaagtgac

SEQ ID NO: 24254 - DNA, 20 bp, Artificial Sequence
  Synthetic oligonucleotide; TGG chr11 5361034 5361053 5361050 +
aatgctaagtgacgagttaa

SEQ ID NO: 24255 - DNA, 20 bp, Artificial Sequence
  Synthetic oligonucleotide; GGG chr11 5361035 5361054 5361051 +
atgctaagtgacgagttaat

SEQ ID NO: 24256 - DNA, 20 bp, Artificial Sequence
  Synthetic oligonucleotide; CAG chr11 5361040 5361059 5361056 +
aagtgacgagttaatgggtg

SEQ ID NO: 24257 - DNA, 20 bp, Artificial Sequence
  Synthetic oligonucleotide; TGG chr11 5361053 5361072 5361069 +
atgggtgcagcacaccaaca

SEQ ID NO: 24258 - DNA, 20 bp, Artificial Sequence
  Synthetic oligonucleotide; AAG chr11 5361112 5361131 5361128 +
caaatgtaccctaaaactta

SEQ ID NO: 24259 - DNA, 20 bp, Artificial Sequence
  Synthetic oligonucleotide; AAG chr11 5361126 5361145 5361142 +
aacttaaagtataataataa

SEQ ID NO: 24260 - DNA, 20 bp, Artificial Sequence
  Synthetic oligonucleotide; AAG chr11 5361130 5361149 5361146 +
taaagtataataataaaaga

SEQ ID NO: 24261 - DNA, 20 bp, Artificial Sequence
  Synthetic oligonucleotide; AAG chr11 5361134 5361153 5361150 +
gtataataataaaagaaaga

SEQ ID NO: 24262 - DNA, 20 bp, Artificial Sequence
  Synthetic oligonucleotide; AAG chr11 5361138 5361157 5361154 +
aataataaaagaaagaaaga

SEQ ID NO: 24263 - DNA, 20 bp, Artificial Sequence
  Synthetic oligonucleotide; AAG chr11 5361155 5361174 5361171 +
agaaagaaatctgctgcaaa

SEQ ID NO: 24264 - DNA, 20 bp, Artificial Sequence
  Synthetic oligonucleotide; AGG chr11 5361156 5361175 5361172 +
gaaagaaatctgctgcaaaa

SEQ ID NO: 24265 - DNA, 20 bp, Artificial Sequence
  Synthetic oligonucleotide; TGG chr11 5361218 5361237 5361234 +
cttaaaataaatcttatttc

SEQ ID NO: 24266 - DNA, 20 bp, Artificial Sequence
  Synthetic oligonucleotide; GAG chr11 5361220 5361239 5361236 +
taaaataaatcttatttctg

SEQ ID NO: 24267 - DNA, 20 bp, Artificial Sequence
  Synthetic oligonucleotide; TGG chr11 5361226 5361245 5361242 +
aaatcttatttctggagatg

SEQ ID NO: 24268 - DNA, 20 bp, Artificial Sequence
  Synthetic oligonucleotide; TAG chr11 5361243 5361262 5361259 +
atgtggctaattccctaacc

SEQ ID NO: 24269 - DNA, 20 bp, Artificial Sequence
  Synthetic oligonucleotide; CAG chr11 5361249 5361268 5361265 +
ctaattccctaacctagatg

SEQ ID NO: 24270 - DNA, 20 bp, Artificial Sequence
  Synthetic oligonucleotide; AGG chr11 5361250 5361269 5361266 +
taattccctaacctagatgc

SEQ ID NO: 24271 - DNA, 20 bp, Artificial Sequence
  Synthetic oligonucleotide; AAG chr11 5361253 5361272 5361269 +
ttccctaacctagatgcagg

SEQ ID NO: 24272 - DNA, 20 bp, Artificial Sequence
  Synthetic oligonucleotide; TAG chr11 5361262 5361281 5361278 +
ctagatgcaggaagaaacct

SEQ ID NO: 24273 - DNA, 20 bp, Artificial Sequence
  Synthetic oligonucleotide; AAG chr11 5361279 5361298 5361295 +
ccttagcgactcctgttcca

SEQ ID NO: 24274 - DNA, 20 bp, Artificial Sequence
  Synthetic oligonucleotide; CAG chr11 5361294 5361313 5361310 +
ttccaaagttctaaatccct

SEQ ID NO: 24275 - DNA, 20 bp, Artificial Sequence
  Synthetic oligonucleotide; AGG chr11 5361295 5361314 5361311 +
tccaaagttctaaatccctc

SEQ ID NO: 24276 - DNA, 20 bp, Artificial Sequence
  Synthetic oligonucleotide; TGG chr11 5361299 5361318 5361315 +
aagttctaaatccctcaggc

SEQ ID NO: 24277 - DNA, 20 bp, Artificial Sequence
  Synthetic oligonucleotide; GGG chr11 5361300 5361319 5361316 +
agttctaaatccctcaggct

SEQ ID NO: 24278 - DNA, 20 bp, Artificial Sequence
  Synthetic oligonucleotide; GAG chr11 5361302 5361321 5361318 +
ttctaaatccctcaggctgg

SEQ ID NO: 24279 - DNA, 20 bp, Artificial Sequence
  Synthetic oligonucleotide; AAG chr11 5361309 5361328 5361325 +
tccctcaggctgggagaata

SEQ ID NO: 24280 - DNA, 20 bp, Artificial Sequence
  Synthetic oligonucleotide; AAG chr11 5361312 5361331 5361328 +
ctcaggctgggagaataaag

SEQ ID NO: 24281 - DNA, 20 bp, Artificial Sequence
  Synthetic oligonucleotide; AGG chr11 5361313 5361332 5361329 +
tcaggctgggagaataaaga

SEQ ID NO: 24282 - DNA, 20 bp, Artificial Sequence
  Synthetic oligonucleotide; GAG chr11 5361315 5361334 5361331 +
aggctgggagaataaagaag

SEQ ID NO: 24283 - DNA, 20 bp, Artificial Sequence
  Synthetic oligonucleotide; AGG chr11 5361316 5361335 5361332 +
ggctgggagaataaagaagg

SEQ ID NO: 24284 - DNA, 20 bp, Artificial Sequence
  Synthetic oligonucleotide; GGG chr11 5361317 5361336 5361333 +
gctgggagaataaagaagga

SEQ ID NO: 24285 - DNA, 20 bp, Artificial Sequence
  Synthetic oligonucleotide; GAG chr11 5361319 5361338 5361335 +
tgggagaataaagaaggagg

SEQ ID NO: 24286 - DNA, 20 bp, Artificial Sequence
  Synthetic oligonucleotide; AGG chr11 5361320 5361339 5361336 +
gggagaataaagaaggaggg

SEQ ID NO: 24287 - DNA, 20 bp, Artificial Sequence
  Synthetic oligonucleotide; GAG chr11 5361322 5361341 5361338 +
gagaataaagaaggagggag

SEQ ID NO: 24288 - DNA, 20 bp, Artificial Sequence
  Synthetic oligonucleotide; GAG chr11 5361324 5361343 5361340 +
gaataaagaaggagggagga

SEQ ID NO: 24289 - DNA, 20 bp, Artificial Sequence
  Synthetic oligonucleotide; GAG chr11 5361326 5361345 5361342 +
ataaagaaggagggaggaga

SEQ ID NO: 24290 - DNA, 20 bp, Artificial Sequence
  Synthetic oligonucleotide; AGG chr11 5361327 5361346 5361343 +
taaagaaggagggaggagag

SEQ ID NO: 24291 - DNA, 20 bp, Artificial Sequence
  Synthetic oligonucleotide; GAG chr11 5361329 5361348 5361345 +
aagaaggagggaggagagag

SEQ ID NO: 24292 - DNA, 20 bp, Artificial Sequence
  Synthetic oligonucleotide; TGG chr11 5361332 5361351 5361348 +
aaggagggaggagagaggag

SEQ ID NO: 24293 - DNA, 20 bp, Artificial Sequence
  Synthetic oligonucleotide; GGG chr11 5361333 5361352 5361349 +
aggagggaggagagaggagt

SEQ ID NO: 24294 - DNA, 20 bp, Artificial Sequence
  Synthetic oligonucleotide; TAG chr11 5361339 5361358 5361355 +
gaggagagaggagtgggccg

SEQ ID NO: 24295 - DNA, 20 bp, Artificial Sequence
  Synthetic oligonucleotide; AGG chr11 5361340 5361359 5361356 +
aggagagaggagtgggccgt

SEQ ID NO: 24296 - DNA, 20 bp, Artificial Sequence
  Synthetic oligonucleotide; GGG chr11 5361341 5361360 5361357 +
ggagagaggagtgggccgta

SEQ ID NO: 24297 - DNA, 20 bp, Artificial Sequence
  Synthetic oligonucleotide; GAG chr11 5361343 5361362 5361359 +
agagaggagtgggccgtagg

SEQ ID NO: 24298 - DNA, 20 bp, Artificial Sequence
  Synthetic oligonucleotide; AGG chr11 5361344 5361363 5361360 +
gagaggagtgggccgtaggg

SEQ ID NO: 24299 - DNA, 20 bp, Artificial Sequence
  Synthetic oligonucleotide; GAG chr11 5361346 5361365 5361362 +
gaggagtgggccgtagggag

SEQ ID NO: 24300 - DNA, 20 bp, Artificial Sequence
  Synthetic oligonucleotide; CAG chr11 5361371 5361390 5361387 +
tctgaaactaattttctttg

SEQ ID NO: 24301 - DNA, 20 bp, Artificial Sequence
  Synthetic oligonucleotide; TGG chr11 5361376 5361395 5361392 +
aactaattttctttgcagct

SEQ ID NO: 24302 - DNA, 20 bp, Artificial Sequence
  Synthetic oligonucleotide; GAG chr11 5361384 5361403 5361400 +
ttctttgcagcttggcttct

SEQ ID NO: 24303 - DNA, 20 bp, Artificial Sequence
  Synthetic oligonucleotide; TAG chr11 5361389 5361408 5361405 +
tgcagcttggcttctgagta

SEQ ID NO: 24304 - DNA, 20 bp, Artificial Sequence
  Synthetic oligonucleotide; AAG chr11 5361398 5361417 5361414 +
gcttctgagtatagtctaaa

SEQ ID NO: 24305 - DNA, 20 bp, Artificial Sequence
  Synthetic oligonucleotide; TGG chr11 5361402 5361421 5361418 +
ctgagtatagtctaaaaagt

SEQ ID NO: 24306 - DNA, 20 bp, Artificial Sequence
  Synthetic oligonucleotide; TGG chr11 5361408 5361427 5361424 +
atagtctaaaaagttggtgt

SEQ ID NO: 24307 - DNA, 20 bp, Artificial Sequence
  Synthetic oligonucleotide; CAG chr11 5361426 5361445 5361442 +
gttggatccaatatcttgac

SEQ ID NO: 24308 - DNA, 20 bp, Artificial Sequence
  Synthetic oligonucleotide; AGG chr11 5361427 5361446 5361443 +
ttggatccaatatcttgacc

SEQ ID NO: 24309 - DNA, 20 bp, Artificial Sequence
  Synthetic oligonucleotide; TAG chr11 5361432 5361451 5361448 +
tccaatatcttgaccaggct

SEQ ID NO: 24310 - DNA, 20 bp, Artificial Sequence
  Synthetic oligonucleotide; AGG chr11 5361433 5361452 5361449 +
ccaatatcttgaccaggctt

SEQ ID NO: 24311 - DNA, 20 bp, Artificial Sequence
  Synthetic oligonucleotide; GGG chr11 5361434 5361453 5361450 +
caatatcttgaccaggctta

SEQ ID NO: 24312 - DNA, 20 bp, Artificial Sequence
  Synthetic oligonucleotide; GGG chr11 5361435 5361454 5361451 +
aatatcttgaccaggcttag

SEQ ID NO: 24313 - DNA, 20 bp, Artificial Sequence
  Synthetic oligonucleotide; TAG chr11 5361442 5361461 5361458 +
tgaccaggcttaggggttca

SEQ ID NO: 24314 - DNA, 20 bp, Artificial Sequence
  Synthetic oligonucleotide; TGG chr11 5361454 5361473 5361470 +
ggggttcatagtcacatctg

SEQ ID NO: 24315 - DNA, 20 bp, Artificial Sequence
  Synthetic oligonucleotide; CAG chr11 5361467 5361486 5361483 +
acatctgtggcaacaatgaa

SEQ ID NO: 24316 - DNA, 20 bp, Artificial Sequence
  Synthetic oligonucleotide; CAG chr11 5361479 5361498 5361495 +
acaatgaacagacttatgaa

SEQ ID NO: 24317 - DNA, 20 bp, Artificial Sequence
  Synthetic oligonucleotide; AGG chr11 5361480 5361499 5361496 +
caatgaacagacttatgaac

SEQ ID NO: 24318 - DNA, 20 bp, Artificial Sequence
  Synthetic oligonucleotide; CGG chr11 5361484 5361503 5361500 +
gaacagacttatgaacaggt

SEQ ID NO: 24319 - DNA, 20 bp, Artificial Sequence
  Synthetic oligonucleotide; AAG chr11 5361489 5361508 5361505 +
gacttatgaacaggtcggta

SEQ ID NO: 24320 - DNA, 20 bp, Artificial Sequence
  Synthetic oligonucleotide; CAG chr11 5361497 5361516 5361513 +
aacaggtcggtaaagaactc

SEQ ID NO: 24321 - DNA, 20 bp, Artificial Sequence
  Synthetic oligonucleotide; TGG chr11 5361507 5361526 5361523 +
taaagaactccagtgtgtct

SEQ ID NO: 24322 - DNA, 20 bp, Artificial Sequence
  Synthetic oligonucleotide; TAG chr11 5361512 5361531 5361528 +
aactccagtgtgtcttggcc

SEQ ID NO: 24323 - DNA, 20 bp, Artificial Sequence
  Synthetic oligonucleotide; GAG chr11 5361514 5361533 5361530 +
ctccagtgtgtcttggccta

SEQ ID NO: 24324 - DNA, 20 bp, Artificial Sequence
  Synthetic oligonucleotide; AGG chr11 5361515 5361534 5361531 +
tccagtgtgtcttggcctag

SEQ ID NO: 24325 - DNA, 20 bp, Artificial Sequence
  Synthetic oligonucleotide; TAG chr11 5361525 5361544 5361541 +
cttggcctagaggctccgca

SEQ ID NO: 24326 - DNA, 20 bp, Artificial Sequence
  Synthetic oligonucleotide; AGG chr11 5361526 5361545 5361542 +
ttggcctagaggctccgcat

SEQ ID NO: 24327 - DNA, 20 bp, Artificial Sequence
  Synthetic oligonucleotide; GAG chr11 5361532 5361551 5361548 +
tagaggctccgcataggaat

SEQ ID NO: 24328 - DNA, 20 bp, Artificial Sequence
  Synthetic oligonucleotide; CAG chr11 5361535 5361554 5361551 +
aggctccgcataggaatgag

SEQ ID NO: 24329 - DNA, 20 bp, Artificial Sequence
  Synthetic oligonucleotide; TAG chr11 5361538 5361557 5361554 +
ctccgcataggaatgagcag

SEQ ID NO: 24330 - DNA, 20 bp, Artificial Sequence
  Synthetic oligonucleotide; CGG chr11 5361542 5361561 5361558 +
gcataggaatgagcagtaga

SEQ ID NO: 24331 - DNA, 20 bp, Artificial Sequence
  Synthetic oligonucleotide; TGG chr11 5361546 5361565 5361562 +
aggaatgagcagtagacggt

SEQ ID NO: 24332 - DNA, 20 bp, Artificial Sequence
  Synthetic oligonucleotide; CAG chr11 5361554 5361573 5361570 +
gcagtagacggttggcttat

SEQ ID NO: 24333 - DNA, 20 bp, Artificial Sequence
  Synthetic oligonucleotide; GAG chr11 5361556 5361575 5361572 +
agtagacggttggcttatca

SEQ ID NO: 24334 - DNA, 20 bp, Artificial Sequence
  Synthetic oligonucleotide; CAG chr11 5361563 5361582 5361579 +
ggttggcttatcagagattg

SEQ ID NO: 24335 - DNA, 20 bp, Artificial Sequence
  Synthetic oligonucleotide; GAG chr11 5361565 5361584 5361581 +
ttggcttatcagagattgca

SEQ ID NO: 24336 - DNA, 20 bp, Artificial Sequence
  Synthetic oligonucleotide; GAG chr11 5361567 5361586 5361583 +
ggcttatcagagattgcaga

SEQ ID NO: 24337 - DNA, 20 bp, Artificial Sequence
  Synthetic oligonucleotide; AGG chr11 5361568 5361587 5361584 +
gcttatcagagattgcagag

SEQ ID NO: 24338 - DNA, 20 bp, Artificial Sequence
  Synthetic oligonucleotide; GGG chr11 5361569 5361588 5361585 +
cttatcagagattgcagaga

SEQ ID NO: 24339 - DNA, 20 bp, Artificial Sequence
  Synthetic oligonucleotide; CAG chr11 5361577 5361596 5361593 +
agattgcagagagggaaatg

SEQ ID NO: 24340 - DNA, 20 bp, Artificial Sequence
  Synthetic oligonucleotide; CAG chr11 5361588 5361607 5361604 +
agggaaatgcagtaatgtat

SEQ ID NO: 24341 - DNA, 20 bp, Artificial Sequence
  Synthetic oligonucleotide; AAG chr11 5361593 5361612 5361609 +
aatgcagtaatgtatcagtc

SEQ ID NO: 24342 - DNA, 20 bp, Artificial Sequence
  Synthetic oligonucleotide; TGG chr11 5361602 5361621 5361618 +
atgtatcagtcaagatgtga

SEQ ID NO: 24343 - DNA, 20 bp, Artificial Sequence
  Synthetic oligonucleotide; GGG chr11 5361603 5361622 5361619 +
tgtatcagtcaagatgtgat

SEQ ID NO: 24344 - DNA, 20 bp, Artificial Sequence
  Synthetic oligonucleotide; GGG chr11 5361604 5361623 5361620 +
gtatcagtcaagatgtgatg

SEQ ID NO: 24345 - DNA, 20 bp, Artificial Sequence
  Synthetic oligonucleotide; AAG chr11 5361610 5361629 5361626 +
gtcaagatgtgatggggtat

SEQ ID NO: 24346 - DNA, 20 bp, Artificial Sequence
  Synthetic oligonucleotide; AAG chr11 5361627 5361646 5361643 +
tataagaatctatcatccca

SEQ ID NO: 24347 - DNA, 20 bp, Artificial Sequence
  Synthetic oligonucleotide; TAG chr11 5361645 5361664 5361661 +
caaagactccctaaaatctt

SEQ ID NO: 24348 - DNA, 20 bp, Artificial Sequence
  Synthetic oligonucleotide; TGG chr11 5361652 5361671 5361668 +
tccctaaaatctttagaact

SEQ ID NO: 24349 - DNA, 20 bp, Artificial Sequence
  Synthetic oligonucleotide; TAG chr11 5361683 5361702 5361699 +
taatctcttttgcaaattcc

SEQ ID NO: 24350 - DNA, 20 bp, Artificial Sequence
  Synthetic oligonucleotide; AAG chr11 5361686 5361705 5361702 +
tctcttttgcaaattcctag

SEQ ID NO: 24351 - DNA, 20 bp, Artificial Sequence
  Synthetic oligonucleotide; GAG chr11 5361688 5361707 5361704 +
tcttttgcaaattcctagaa

SEQ ID NO: 24352 - DNA, 20 bp, Artificial Sequence
  Synthetic oligonucleotide; AGG chr11 5361689 5361708 5361705 +
cttttgcaaattcctagaag

SEQ ID NO: 24353 - DNA, 20 bp, Artificial Sequence
  Synthetic oligonucleotide; GGG chr11 5361690 5361709 5361706 +
ttttgcaaattcctagaaga

SEQ ID NO: 24354 - DNA, 20 bp, Artificial Sequence
  Synthetic oligonucleotide; TAG chr11 5361700 5361719 5361716 +
tcctagaagagggaaaatcc

SEQ ID NO: 24355 - DNA, 20 bp, Artificial Sequence
  Synthetic oligonucleotide; TAG chr11 5361721 5361740 5361737 +
agatctcctttttcattccc

SEQ ID NO: 24356 - DNA, 20 bp, Artificial Sequence
  Synthetic oligonucleotide; CAG chr11 5361724 5361743 5361740 +
tctcctttttcattccctag

SEQ ID NO: 24357 - DNA, 20 bp, Artificial Sequence
  Synthetic oligonucleotide; GAG chr11 5361726 5361745 5361742 +
tcctttttcattccctagca

SEQ ID NO: 24358 - DNA, 20 bp, Artificial Sequence
  Synthetic oligonucleotide; TAG chr11 5361734 5361753 5361750 +
cattccctagcagagtgatc

SEQ ID NO: 24359 - DNA, 20 bp, Artificial Sequence
  Synthetic oligonucleotide; TAG chr11 5361738 5361757 5361754 +
ccctagcagagtgatctagt

SEQ ID NO: 24360 - DNA, 20 bp, Artificial Sequence
  Synthetic oligonucleotide; AGG chr11 5361739 5361758 5361755 +
cctagcagagtgatctagtt

SEQ ID NO: 24361 - DNA, 20 bp, Artificial Sequence
  Synthetic oligonucleotide; AAG chr11 5361750 5361769 5361766 +
gatctagttaggaaaaaatc

SEQ ID NO: 24362 - DNA, 20 bp, Artificial Sequence
  Synthetic oligonucleotide; CGG chr11 5361764 5361783 5361780 +
aaaatcaagttgaaaatcca

SEQ ID NO: 24363 - DNA, 20 bp, Artificial Sequence
  Synthetic oligonucleotide; GGG chr11 5361765 5361784 5361781 +
aaatcaagttgaaaatccac

SEQ ID NO: 24364 - DNA, 20 bp, Artificial Sequence
  Synthetic oligonucleotide; CAG chr11 5361772 5361791 5361788 +
gttgaaaatccacgggaata

SEQ ID NO: 24365 - DNA, 20 bp, Artificial Sequence
  Synthetic oligonucleotide; TGG chr11 5361786 5361805 5361802 +
ggaatacagaatgatatctc

SEQ ID NO: 24366 - DNA, 20 bp, Artificial Sequence
  Synthetic oligonucleotide; TAG chr11 5361791 5361810 5361807 +
acagaatgatatctctggtg

SEQ ID NO: 24367 - DNA, 20 bp, Artificial Sequence
  Synthetic oligonucleotide; CAG chr11 5361797 5361816 5361813 +
tgatatctctggtgtagttc

SEQ ID NO: 24368 - DNA, 20 bp, Artificial Sequence
  Synthetic oligonucleotide; TGG chr11 5361804 5361823 5361820 +
tctggtgtagttccagactc

SEQ ID NO: 24369 - DNA, 20 bp, Artificial Sequence
  Synthetic oligonucleotide; TGG chr11 5361809 5361828 5361825 +
tgtagttccagactctggtt

SEQ ID NO: 24370 - DNA, 20 bp, Artificial Sequence
  Synthetic oligonucleotide; CGG chr11 5361839 5361858 5361855 +
atttcctttgttgctctctt

SEQ ID NO: 24371 - DNA, 20 bp, Artificial Sequence
  Synthetic oligonucleotide; GGG chr11 5361840 5361859 5361856 +
tttcctttgttgctctcttc

SEQ ID NO: 24372 - DNA, 20 bp, Artificial Sequence
  Synthetic oligonucleotide; CAG chr11 5361853 5361872 5361869 +
tctcttcgggctgcataaac

SEQ ID NO: 24373 - DNA, 20 bp, Artificial Sequence
  Synthetic oligonucleotide; AAG chr11 5361884 5361903 5361900 +
ttgcctctatgtgttctacc

SEQ ID NO: 24374 - DNA, 20 bp, Artificial Sequence
  Synthetic oligonucleotide; AAG chr11 5361902 5361921 5361918 +
ccaagtacttactcccaaaa

SEQ ID NO: 24375 - DNA, 20 bp, Artificial Sequence
  Synthetic oligonucleotide; AAG chr11 5361908 5361927 5361924 +
acttactcccaaaaaagatg

SEQ ID NO: 24376 - DNA, 20 bp, Artificial Sequence
  Synthetic oligonucleotide; TAG chr11 5361912 5361931 5361928 +
actcccaaaaaagatgaagt

SEQ ID NO: 24377 - DNA, 20 bp, Artificial Sequence
  Synthetic oligonucleotide; GAG chr11 5361914 5361933 5361930 +
tcccaaaaaagatgaagtta

SEQ ID NO: 24378 - DNA, 20 bp, Artificial Sequence
  Synthetic oligonucleotide; GAG chr11 5361918 5361937 5361934 +
aaaaaagatgaagttagagt

SEQ ID NO: 24379 - DNA, 20 bp, Artificial Sequence
  Synthetic oligonucleotide; AGG chr11 5361919 5361938 5361935 +
aaaaagatgaagttagagtg

SEQ ID NO: 24380 - DNA, 20 bp, Artificial Sequence
  Synthetic oligonucleotide; TAG chr11 5361923 5361942 5361939 +
agatgaagttagagtgagga

SEQ ID NO: 24381 - DNA, 20 bp, Artificial Sequence
  Synthetic oligonucleotide; AGG chr11 5361924 5361943 5361940 +
gatgaagttagagtgaggat

SEQ ID NO: 24382 - DNA, 20 bp, Artificial Sequence
  Synthetic oligonucleotide; GGG chr11 5361925 5361944 5361941 +
atgaagttagagtgaggata

SEQ ID NO: 24383 - DNA, 20 bp, Artificial Sequence
  Synthetic oligonucleotide; GGG chr11 5361926 5361945 5361942 +
tgaagttagagtgaggatag

SEQ ID NO: 24384 - DNA, 20 bp, Artificial Sequence
  Synthetic oligonucleotide; AAG chr11 5361942 5361961 5361958 +
ataggggacactgtaatgac

SEQ ID NO: 24385 - DNA, 20 bp, Artificial Sequence
  Synthetic oligonucleotide; AGG chr11 5361943 5361962 5361959 +
taggggacactgtaatgaca

SEQ ID NO: 24386 - DNA, 20 bp, Artificial Sequence
  Synthetic oligonucleotide; GGG chr11 5361944 5361963 5361960 +
aggggacactgtaatgacaa

SEQ ID NO: 24387 - DNA, 20 bp, Artificial Sequence
  Synthetic oligonucleotide; TAG chr11 5361949 5361968 5361965 +
acactgtaatgacaagggta

SEQ ID NO: 24388 - DNA, 20 bp, Artificial Sequence
  Synthetic oligonucleotide; CAG chr11 5361957 5361976 5361973 +
atgacaagggtatagactaa

SEQ ID NO: 24389 - DNA, 20 bp, Artificial Sequence
  Synthetic oligonucleotide; AAG chr11 5361961 5361980 5361977 +
caagggtatagactaacaga

SEQ ID NO: 24390 - DNA, 20 bp, Artificial Sequence
  Synthetic oligonucleotide; TAG chr11 5361978 5361997 5361994 +
agaaagaaaaacttaccaaa

SEQ ID NO: 24391 - DNA, 20 bp, Artificial Sequence
  Synthetic oligonucleotide; TAG chr11 5361983 5362002 5361999 +
gaaaaacttaccaaatagat

SEQ ID NO: 24392 - DNA, 20 bp, Artificial Sequence
  Synthetic oligonucleotide; CAG chr11 5361989 5362008 5362005 +
cttaccaaatagattagtgt

SEQ ID NO: 24393 - DNA, 20 bp, Artificial Sequence
  Synthetic oligonucleotide; GAG chr11 5361995 5362014 5362011 +
aaatagattagtgtcagatt

SEQ ID NO: 24394 - DNA, 20 bp, Artificial Sequence
  Synthetic oligonucleotide; AAG chr11 5362000 5362019 5362016 +
gattagtgtcagattgagta

SEQ ID NO: 24395 - DNA, 20 bp, Artificial Sequence
  Synthetic oligonucleotide; GAG chr11 5362016 5362035 5362032 +
agtaaagcaaactttgacat

SEQ ID NO: 24396 - DNA, 20 bp, Artificial Sequence
  Synthetic oligonucleotide; AGG chr11 5362017 5362036 5362033 +
gtaaagcaaactttgacatg

SEQ ID NO: 24397 - DNA, 20 bp, Artificial Sequence
  Synthetic oligonucleotide; CAG chr11 5362048 5362067 5362064 +
tttaaattgctgcatattcc

SEQ ID NO: 24398 - DNA, 20 bp, Artificial Sequence
  Synthetic oligonucleotide; GAG chr11 5362055 5362074 5362071 +
tgctgcatattcccagaaat

SEQ ID NO: 24399 - DNA, 20 bp, Artificial Sequence
  Synthetic oligonucleotide; TAG chr11 5362060 5362079 5362076 +
catattcccagaaatgagcc

SEQ ID NO: 24400 - DNA, 20 bp, Artificial Sequence
  Synthetic oligonucleotide; CAG chr11 5362070 5362089 5362086 +
gaaatgagcctagtatccat

SEQ ID NO: 24401 - DNA, 20 bp, Artificial Sequence
  Synthetic oligonucleotide; AAG chr11 5362100 5362119 5362116 +
atgcaaatccttataaacca

SEQ ID NO: 24402 - DNA, 20 bp, Artificial Sequence
  Synthetic oligonucleotide; CAG chr11 5362104 5362123 5362120 +
aaatccttataaaccaaagt

SEQ ID NO: 24403 - DNA, 20 bp, Artificial Sequence
  Synthetic oligonucleotide; GAG chr11 5362106 5362125 5362122 +
atccttataaaccaaagtca

SEQ ID NO: 24404 - DNA, 20 bp, Artificial Sequence
  Synthetic oligonucleotide; GAG chr11 5362108 5362127 5362124 +
ccttataaaccaaagtcaga

SEQ ID NO: 24405 - DNA, 20 bp, Artificial Sequence
  Synthetic oligonucleotide; GAG chr11 5362110 5362129 5362126 +
ttataaaccaaagtcagaga

SEQ ID NO: 24406 - DNA, 20 bp, Artificial Sequence
  Synthetic oligonucleotide; TGG chr11 5362118 5362137 5362134 +
caaagtcagagagagcttgt

SEQ ID NO: 24407 - DNA, 20 bp, Artificial Sequence
  Synthetic oligonucleotide; GAG chr11 5362139 5362158 5362155 +
ggttcacttcattccatgct

SEQ ID NO: 24408 - DNA, 20 bp, Artificial Sequence
  Synthetic oligonucleotide; CAG chr11 5362146 5362165 5362162 +
ttcattccatgctgagctat

SEQ ID NO: 24409 - DNA, 20 bp, Artificial Sequence
  Synthetic oligonucleotide; CAG chr11 5362154 5362173 5362170 +
atgctgagctatcagcactg

SEQ ID NO: 24410 - DNA, 20 bp, Artificial Sequence
  Synthetic oligonucleotide; AAG chr11 5362163 5362182 5362179 +
tatcagcactgcagattttg

SEQ ID NO: 24411 - DNA, 20 bp, Artificial Sequence
  Synthetic oligonucleotide; CAG chr11 5362180 5362199 5362196 +
ttgaagatctcaaccacacc

SEQ ID NO: 24412 - DNA, 20 bp, Artificial Sequence
  Synthetic oligonucleotide; TAG chr11 5362184 5362203 5362200 +
agatctcaaccacacccaga

SEQ ID NO: 24413 - DNA, 20 bp, Artificial Sequence
  Synthetic oligonucleotide; GAG chr11 5362186 5362205 5362202 +
atctcaaccacacccagata

SEQ ID NO: 24414 - DNA, 20 bp, Artificial Sequence
  Synthetic oligonucleotide; GAG chr11 5362188 5362207 5362204 +
ctcaaccacacccagataga

SEQ ID NO: 24415 - DNA, 20 bp, Artificial Sequence
  Synthetic oligonucleotide; TAG chr11 5362194 5362213 5362210 +
cacacccagatagagagtga

SEQ ID NO: 24416 - DNA, 20 bp, Artificial Sequence
  Synthetic oligonucleotide; TGG chr11 5362197 5362216 5362213 +
acccagatagagagtgatag

SEQ ID NO: 24417 - DNA, 20 bp, Artificial Sequence
  Synthetic oligonucleotide; CGG chr11 5362215 5362234 5362231 +
agtggatcccgtgtttctgt

SEQ ID NO: 24418 - DNA, 20 bp, Artificial Sequence
  Synthetic oligonucleotide; GGG chr11 5362216 5362235 5362232 +
gtggatcccgtgtttctgtc

SEQ ID NO: 24419 - DNA, 20 bp, Artificial Sequence
  Synthetic oligonucleotide; GGG chr11 5362217 5362236 5362233 +
tggatcccgtgtttctgtcg

SEQ ID NO: 24420 - DNA, 20 bp, Artificial Sequence
  Synthetic oligonucleotide; GGG chr11 5362218 5362237 5362234 +
ggatcccgtgtttctgtcgg

SEQ ID NO: 24421 - DNA, 20 bp, Artificial Sequence
  Synthetic oligonucleotide; TGG chr11 5362222 5362241 5362238 +
cccgtgtttctgtcggggga

SEQ ID NO: 24422 - DNA, 20 bp, Artificial Sequence
  Synthetic oligonucleotide; GGG chr11 5362223 5362242 5362239 +
ccgtgtttctgtcgggggat

SEQ ID NO: 24423 - DNA, 20 bp, Artificial Sequence
  Synthetic oligonucleotide; GAG chr11 5362225 5362244 5362241 +
gtgtttctgtcgggggatgg

SEQ ID NO: 24424 - DNA, 20 bp, Artificial Sequence
  Synthetic oligonucleotide; TAG chr11 5362228 5362247 5362244 +
tttctgtcgggggatgggag

SEQ ID NO: 24425 - DNA, 20 bp, Artificial Sequence
  Synthetic oligonucleotide; AAG chr11 5362233 5362252 5362249 +
gtcgggggatgggagtagat

SEQ ID NO: 24426 - DNA, 20 bp, Artificial Sequence
  Synthetic oligonucleotide; AGG chr11 5362234 5362253 5362250 +
tcgggggatgggagtagata

SEQ ID NO: 24427 - DNA, 20 bp, Artificial Sequence
  Synthetic oligonucleotide; AAG chr11 5362239 5362258 5362255 +
ggatgggagtagataaggaa

SEQ ID NO: 24428 - DNA, 20 bp, Artificial Sequence
  Synthetic oligonucleotide; CAG chr11 5362258 5362277 5362274 +
aaagtgtttactatttttac

SEQ ID NO: 24429 - DNA, 20 bp, Artificial Sequence
  Synthetic oligonucleotide; CAG chr11 5362261 5362280 5362277 +
gtgtttactatttttaccag

SEQ ID NO: 24430 - DNA, 20 bp, Artificial Sequence
  Synthetic oligonucleotide; AGG chr11 5362262 5362281 5362278 +
tgtttactatttttaccagc

SEQ ID NO: 24431 - DNA, 20 bp, Artificial Sequence
  Synthetic oligonucleotide; GGG chr11 5362263 5362282 5362279 +
gtttactatttttaccagca

SEQ ID NO: 24432 - DNA, 20 bp, Artificial Sequence
  Synthetic oligonucleotide; GGG chr11 5362264 5362283 5362280 +
tttactatttttaccagcag

SEQ ID NO: 24433 - DNA, 20 bp, Artificial Sequence
  Synthetic oligonucleotide; CAG chr11 5362275 5362294 5362291 +
taccagcaggggaaactacc

SEQ ID NO: 24434 - DNA, 20 bp, Artificial Sequence
  Synthetic oligonucleotide; TGG chr11 5362285 5362304 5362301 +
ggaaactacccagatgaaaa

SEQ ID NO: 24435 - DNA, 20 bp, Artificial Sequence
  Synthetic oligonucleotide; TGG chr11 5362291 5362310 5362307 +
tacccagatgaaaatggtgc

SEQ ID NO: 24436 - DNA, 20 bp, Artificial Sequence
  Synthetic oligonucleotide; TGG chr11 5362300 5362319 5362316 +
gaaaatggtgctggatgctt

SEQ ID NO: 24437 - DNA, 20 bp, Artificial Sequence
  Synthetic oligonucleotide; GGG chr11 5362301 5362320 5362317 +
aaaatggtgctggatgcttt

SEQ ID NO: 24438 - DNA, 20 bp, Artificial Sequence
  Synthetic oligonucleotide; AAG chr11 5362308 5362327 5362324 +
tgctggatgctttgggcaaa

SEQ ID NO: 24439 - DNA, 20 bp, Artificial Sequence
  Synthetic oligonucleotide; CAG chr11 5362316 5362335 5362332 +
gctttgggcaaaaagccatt

SEQ ID NO: 24440 - DNA, 20 bp, Artificial Sequence
  Synthetic oligonucleotide; GAG chr11 5362318 5362337 5362334 +
tttgggcaaaaagccattca

SEQ ID NO: 24441 - DNA, 20 bp, Artificial Sequence
  Synthetic oligonucleotide; AAG chr11 5362336 5362355 5362352 +
cagagccataatcaactacg

SEQ ID NO: 24442 - DNA, 20 bp, Artificial Sequence
  Synthetic oligonucleotide; TGG chr11 5362340 5362359 5362356 +
gccataatcaactacgaaga

SEQ ID NO: 24443 - DNA, 20 bp, Artificial Sequence
  Synthetic oligonucleotide; CAG chr11 5362344 5362363 5362360 +
taatcaactacgaagatggt

SEQ ID NO: 24444 - DNA, 20 bp, Artificial Sequence
  Synthetic oligonucleotide; AGG chr11 5362345 5362364 5362361 +
aatcaactacgaagatggtc

SEQ ID NO: 24445 - DNA, 20 bp, Artificial Sequence
  Synthetic oligonucleotide; TAG chr11 5362352 5362371 5362368 +
tacgaagatggtcaggaatt

SEQ ID NO: 24446 - DNA, 20 bp, Artificial Sequence
  Synthetic oligonucleotide; TAG chr11 5362363 5362382 5362379 +
tcaggaatttagtgtatttg

SEQ ID NO: 24447 - DNA, 20 bp, Artificial Sequence
  Synthetic oligonucleotide; CAG chr11 5362368 5362387 5362384 +
aatttagtgtatttgtagat

SEQ ID NO: 24448 - DNA, 20 bp, Artificial Sequence
  Synthetic oligonucleotide; CAG chr11 5362376 5362395 5362392 +
gtatttgtagatcagatgat

SEQ ID NO: 24449 - DNA, 20 bp, Artificial Sequence
  Synthetic oligonucleotide; TGG chr11 5362383 5362402 5362399 +
tagatcagatgatcagtcta

SEQ ID NO: 24450 - DNA, 20 bp, Artificial Sequence
  Synthetic oligonucleotide; TGG chr11 5362389 5362408 5362405 +
agatgatcagtctatggctt

SEQ ID NO: 24451 - DNA, 20 bp, Artificial Sequence
  Synthetic oligonucleotide; TAG chr11 5362406 5362425 5362422 +
ctttggaaaattgtgaacat

SEQ ID NO: 24452 - DNA, 20 bp, Artificial Sequence
  Synthetic oligonucleotide; GAG chr11 5362414 5362433 5362430 +
aattgtgaacattagttgtt

SEQ ID NO: 24453 - DNA, 20 bp, Artificial Sequence
  Synthetic oligonucleotide; GAG chr11 5362426 5362445 5362442 +
tagttgttgagccttataat

SEQ ID NO: 24454 - DNA, 20 bp, Artificial Sequence
  Synthetic oligonucleotide; CAG chr11 5362445 5362464 5362461 +
tgagaatgtgatgattaaat

SEQ ID NO: 24455 - DNA, 20 bp, Artificial Sequence
  Synthetic oligonucleotide; AGG chr11 5362446 5362465 5362462 +
gagaatgtgatgattaaatc

SEQ ID NO: 24456 - DNA, 20 bp, Artificial Sequence
  Synthetic oligonucleotide; TGG chr11 5362454 5362473 5362470 +
gatgattaaatcaggtctac

SEQ ID NO: 24457 - DNA, 20 bp, Artificial Sequence
  Synthetic oligonucleotide; CAG chr11 5362468 5362487 5362484 +
gtctactggatactatgaat

SEQ ID NO: 24458 - DNA, 20 bp, Artificial Sequence
  Synthetic oligonucleotide; TAG chr11 5362473 5362492 5362489 +
ctggatactatgaatcagaa

SEQ ID NO: 24459 - DNA, 20 bp, Artificial Sequence
  Synthetic oligonucleotide; TAG chr11 5362486 5362505 5362502 +
atcagaatagataacattgt

SEQ ID NO: 24460 - DNA, 20 bp, Artificial Sequence
  Synthetic oligonucleotide; TAG chr11 5362500 5362519 5362516 +
cattgttagatataattacc

SEQ ID NO: 24461 - DNA, 20 bp, Artificial Sequence
  Synthetic oligonucleotide; CAG chr11 5362504 5362523 5362520 +
gttagatataattacctagt

SEQ ID NO: 24462 - DNA, 20 bp, Artificial Sequence
  Synthetic oligonucleotide; GAG chr11 5362506 5362525 5362522 +
tagatataattacctagtca

SEQ ID NO: 24463 - DNA, 20 bp, Artificial Sequence
  Synthetic oligonucleotide; GAG chr11 5362508 5362527 5362524 +
gatataattacctagtcaga

SEQ ID NO: 24464 - DNA, 20 bp, Artificial Sequence
  Synthetic oligonucleotide; CAG chr11 5362511 5362530 5362527 +
ataattacctagtcagagag

SEQ ID NO: 24465 - DNA, 20 bp, Artificial Sequence
  Synthetic oligonucleotide; GAG chr11 5362513 5362532 5362529 +
aattacctagtcagagagca

SEQ ID NO: 24466 - DNA, 20 bp, Artificial Sequence
  Synthetic oligonucleotide; AAG chr11 5362519 5362538 5362535 +
ctagtcagagagcagagatg

SEQ ID NO: 24467 - DNA, 20 bp, Artificial Sequence
  Synthetic oligonucleotide; CAG chr11 5362523 5362542 5362539 +
tcagagagcagagatgaagt

SEQ ID NO: 24468 - DNA, 20 bp, Artificial Sequence
  Synthetic oligonucleotide; AGG chr11 5362524 5362543 5362540 +
cagagagcagagatgaagtc

SEQ ID NO: 24469 - DNA, 20 bp, Artificial Sequence
  Synthetic oligonucleotide; AAG chr11 5362528 5362547 5362544 +
gagcagagatgaagtcagga

SEQ ID NO: 24470 - DNA, 20 bp, Artificial Sequence
  Synthetic oligonucleotide; AAG chr11 5362534 5362553 5362550 +
agatgaagtcaggaaagcaa

SEQ ID NO: 24471 - DNA, 20 bp, Artificial Sequence
  Synthetic oligonucleotide; AAG chr11 5362539 5362558 5362555 +
aagtcaggaaagcaaaagat

SEQ ID NO: 24472 - DNA, 20 bp, Artificial Sequence
  Synthetic oligonucleotide; CAG chr11 5362548 5362567 5362564 +
aagcaaaagataagaaataa

SEQ ID NO: 24473 - DNA, 20 bp, Artificial Sequence
  Synthetic oligonucleotide; AAG chr11 5362551 5362570 5362567 +
caaaagataagaaataacag

SEQ ID NO: 24474 - DNA, 20 bp, Artificial Sequence
  Synthetic oligonucleotide; TGG chr11 5362559 5362578 5362575 +
aagaaataacagaagtcttc

SEQ ID NO: 24475 - DNA, 20 bp, Artificial Sequence
  Synthetic oligonucleotide; TGG chr11 5362562 5362581 5362578 +
aaataacagaagtcttctgg

SEQ ID NO: 24476 - DNA, 20 bp, Artificial Sequence
  Synthetic oligonucleotide; CAG chr11 5362565 5362584 5362581 +
taacagaagtcttctggtgg

SEQ ID NO: 24477 - DNA, 20 bp, Artificial Sequence
  Synthetic oligonucleotide; GAG chr11 5362567 5362586 5362583 +
acagaagtcttctggtggca

SEQ ID NO: 24478 - DNA, 20 bp, Artificial Sequence
  Synthetic oligonucleotide; TGG chr11 5362570 5362589 5362586 +
gaagtcttctggtggcagag

SEQ ID NO: 24479 - DNA, 20 bp, Artificial Sequence
  Synthetic oligonucleotide; TGG chr11 5362573 5362592 5362589 +
gtcttctggtggcagagtgg

SEQ ID NO: 24480 - DNA, 20 bp, Artificial Sequence
  Synthetic oligonucleotide; TAG chr11 5362578 5362597 5362594 +
ctggtggcagagtggtggct

SEQ ID NO: 24481 - DNA, 20 bp, Artificial Sequence
  Synthetic oligonucleotide; TGG chr11 5362586 5362605 5362602 +
agagtggtggcttagcctgc

SEQ ID NO: 24482 - DNA, 20 bp, Artificial Sequence
  Synthetic oligonucleotide; GGG chr11 5362587 5362606 5362603 +
gagtggtggcttagcctgct

SEQ ID NO: 24483 - DNA, 20 bp, Artificial Sequence
  Synthetic oligonucleotide; GGG chr11 5362588 5362607 5362604 +
agtggtggcttagcctgctg

SEQ ID NO: 24484 - DNA, 20 bp, Artificial Sequence
  Synthetic oligonucleotide; TGG chr11 5362596 5362615 5362612 +
cttagcctgctggggcaaaa

SEQ ID NO: 24485 - DNA, 20 bp, Artificial Sequence
  Synthetic oligonucleotide; GAG chr11 5362598 5362617 5362614 +
tagcctgctggggcaaaatg

SEQ ID NO: 24486 - DNA, 20 bp, Artificial Sequence
  Synthetic oligonucleotide; AAG chr11 5362604 5362623 5362620 +
gctggggcaaaatggagctc

SEQ ID NO: 24487 - DNA, 20 bp, Artificial Sequence
  Synthetic oligonucleotide; AGG chr11 5362605 5362624 5362621 +
ctggggcaaaatggagctca

SEQ ID NO: 24488 - DNA, 20 bp, Artificial Sequence
  Synthetic oligonucleotide; GAG chr11 5362612 5362631 5362628 +
aaaatggagctcaaggccat

SEQ ID NO: 24489 - DNA, 20 bp, Artificial Sequence
  Synthetic oligonucleotide; CAG chr11 5362615 5362634 5362631 +
atggagctcaaggccatgag

SEQ ID NO: 24490 - DNA, 20 bp, Artificial Sequence
  Synthetic oligonucleotide; CAG chr11 5362624 5362643 5362640 +
aaggccatgagcagatacaa

SEQ ID NO: 24491 - DNA, 20 bp, Artificial Sequence
  Synthetic oligonucleotide; CGG chr11 5362629 5362648 5362645 +
catgagcagatacaacagcc

SEQ ID NO: 24492 - DNA, 20 bp, Artificial Sequence
  Synthetic oligonucleotide; CAG chr11 5362638 5362657 5362654 +
atacaacagcccggtcaacc

SEQ ID NO: 24493 - DNA, 20 bp, Artificial Sequence
  Synthetic oligonucleotide; TAG chr11 5362662 5362681 5362678 +
tgtcttcccccatctgattg

SEQ ID NO: 24494 - DNA, 20 bp, Artificial Sequence
  Synthetic oligonucleotide; GAG chr11 5362664 5362683 5362680 +
tcttcccccatctgattgta

SEQ ID NO: 24495 - DNA, 20 bp, Artificial Sequence
  Synthetic oligonucleotide; TGG chr11 5362671 5362690 5362687 +
ccatctgattgtagagcttt

SEQ ID NO: 24496 - DNA, 20 bp, Artificial Sequence
  Synthetic oligonucleotide; TGG chr11 5362697 5362716 5362713 +
tcgacatgttcttcaccacc

SEQ ID NO: 24497 - DNA, 20 bp, Artificial Sequence
  Synthetic oligonucleotide; GAG chr11 5362712 5362731 5362728 +
ccacctggttctttgtttac

SEQ ID NO: 24498 - DNA, 20 bp, Artificial Sequence
  Synthetic oligonucleotide; AGG chr11 5362713 5362732 5362729 +
cacctggttctttgtttacg

SEQ ID NO: 24499 - DNA, 20 bp, Artificial Sequence
  Synthetic oligonucleotide; AAG chr11 5362727 5362746 5362743 +
tttacgaggtcacctctacc

SEQ ID NO: 24500 - DNA, 20 bp, Artificial Sequence
  Synthetic oligonucleotide; AAG chr11 5362749 5362768 5362765 +
gtacacttgtgatatctata

SEQ ID NO: 24501 - DNA, 20 bp, Artificial Sequence
  Synthetic oligonucleotide; GAG chr11 5362751 5362770 5362767 +
acacttgtgatatctataaa

SEQ ID NO: 24502 - DNA, 20 bp, Artificial Sequence
  Synthetic oligonucleotide; TGG chr11 5362762 5362781 5362778 +
atctataaagagtatctcct

SEQ ID NO: 24503 - DNA, 20 bp, Artificial Sequence
  Synthetic oligonucleotide; TGG chr11 5362765 5362784 5362781 +
tataaagagtatctccttgg

SEQ ID NO: 24504 - DNA, 20 bp, Artificial Sequence
  Synthetic oligonucleotide; TGG chr11 5362780 5362799 5362796 +
cttggtggcctcactcttca

SEQ ID NO: 24505 - DNA, 20 bp, Artificial Sequence
  Synthetic oligonucleotide; GGG chr11 5362781 5362800 5362797 +
ttggtggcctcactcttcat

SEQ ID NO: 24506 - DNA, 20 bp, Artificial Sequence
  Synthetic oligonucleotide; AAG chr11 5362789 5362808 5362805 +
ctcactcttcatgggctttg

SEQ ID NO: 24507 - DNA, 20 bp, Artificial Sequence
  Synthetic oligonucleotide; TGG chr11 5362809 5362828 5362825 +
aagtcctcttcctgatgctc

SEQ ID NO: 24508 - DNA, 20 bp, Artificial Sequence
  Synthetic oligonucleotide; GGG chr11 5362810 5362829 5362826 +
agtcctcttcctgatgctct

SEQ ID NO: 24509 - DNA, 20 bp, Artificial Sequence
  Synthetic oligonucleotide; TGG chr11 5362814 5362833 5362830 +
ctcttcctgatgctctgggt

SEQ ID NO: 24510 - DNA, 20 bp, Artificial Sequence
  Synthetic oligonucleotide; GAG chr11 5362828 5362847 5362844 +
ctgggttggcatctacatgt

SEQ ID NO: 24511 - DNA, 20 bp, Artificial Sequence
  Synthetic oligonucleotide; AAG chr11 5362836 5362855 5362852 +
gcatctacatgtgagtgccc

SEQ ID NO: 24512 - DNA, 20 bp, Artificial Sequence
  Synthetic oligonucleotide; GAG chr11 5362838 5362857 5362854 +
atctacatgtgagtgcccaa

SEQ ID NO: 24513 - DNA, 20 bp, Artificial Sequence
  Synthetic oligonucleotide; CAG chr11 5362848 5362867 5362864 +
gagtgcccaagagtaacaac

SEQ ID NO: 24514 - DNA, 20 bp, Artificial Sequence
  Synthetic oligonucleotide; AGG chr11 5362849 5362868 5362865 +
agtgcccaagagtaacaacc

SEQ ID NO: 24515 - DNA, 20 bp, Artificial Sequence
  Synthetic oligonucleotide; TGG chr11 5362852 5362871 5362868 +
gcccaagagtaacaaccagg

SEQ ID NO: 24516 - DNA, 20 bp, Artificial Sequence
  Synthetic oligonucleotide; AAG chr11 5362883 5362902 5362899 +
aatccctgcttttgtaaatt

SEQ ID NO: 24517 - DNA, 20 bp, Artificial Sequence
  Synthetic oligonucleotide; TGG chr11 5362901 5362920 5362917 +
ttaagttttctttctattgc

SEQ ID NO: 24518 - DNA, 20 bp, Artificial Sequence
  Synthetic oligonucleotide; AAG chr11 5362904 5362923 5362920 +
agttttctttctattgctgg

SEQ ID NO: 24519 - DNA, 20 bp, Artificial Sequence
  Synthetic oligonucleotide; CAG chr11 5362934 5362953 5362950 +
cctgttgcttataataaatg

SEQ ID NO: 24520 - DNA, 20 bp, Artificial Sequence
  Synthetic oligonucleotide; TGG chr11 5362942 5362961 5362958 +
ttataataaatgcagatgta

SEQ ID NO: 24521 - DNA, 20 bp, Artificial Sequence
  Synthetic oligonucleotide; AAG chr11 5362959 5362978 5362975 +
gtatggcattaaaaaaaaaa

SEQ ID NO: 24522 - DNA, 20 bp, Artificial Sequence
  Synthetic oligonucleotide; TAG chr11 5362968 5362987 5362984 +
taaaaaaaaaaaagaaataa

SEQ ID NO: 24523 - DNA, 20 bp, Artificial Sequence
  Synthetic oligonucleotide; AAG chr11 5362971 5362990 5362987 +
aaaaaaaaaagaaataatag

SEQ ID NO: 24524 - DNA, 20 bp, Artificial Sequence
  Synthetic oligonucleotide; TAG chr11 5362975 5362994 5362991 +
aaaaaagaaataatagaagt

SEQ ID NO: 24525 - DNA, 20 bp, Artificial Sequence
  Synthetic oligonucleotide; AGG chr11 5362976 5362995 5362992 +
aaaaagaaataatagaagtt

SEQ ID NO: 24526 - DNA, 20 bp, Artificial Sequence
  Synthetic oligonucleotide; CAG chr11 5362979 5362998 5362995 +
aagaaataatagaagttagg

SEQ ID NO: 24527 - DNA, 20 bp, Artificial Sequence
  Synthetic oligonucleotide; AGG chr11 5362980 5362999 5362996 +
agaaataatagaagttaggc

SEQ ID NO: 24528 - DNA, 20 bp, Artificial Sequence
  Synthetic oligonucleotide; GGG chr11 5362981 5363000 5362997 +
gaaataatagaagttaggca

SEQ ID NO: 24529 - DNA, 20 bp, Artificial Sequence
  Synthetic oligonucleotide; TGG chr11 5362986 5363005 5363002 +
aatagaagttaggcagggat

SEQ ID NO: 24530 - DNA, 20 bp, Artificial Sequence
  Synthetic oligonucleotide; GGG chr11 5362987 5363006 5363003 +
atagaagttaggcagggatt

SEQ ID NO: 24531 - DNA, 20 bp, Artificial Sequence
  Synthetic oligonucleotide; GGG chr11 5362988 5363007 5363004 +
tagaagttaggcagggattg

SEQ ID NO: 24532 - DNA, 20 bp, Artificial Sequence
  Synthetic oligonucleotide; AAG chr11 5362995 5363014 5363011 +
taggcagggattggggcatg

SEQ ID NO: 24533 - DNA, 20 bp, Artificial Sequence
  Synthetic oligonucleotide; AGG chr11 5362996 5363015 5363012 +
aggcagggattggggcatga

SEQ ID NO: 24534 - DNA, 20 bp, Artificial Sequence
  Synthetic oligonucleotide; AAG chr11 5363007 5363026 5363023 +
ggggcatgaaggttgaaaac

SEQ ID NO: 24535 - DNA, 20 bp, Artificial Sequence
  Synthetic oligonucleotide; AGG chr11 5363008 5363027 5363024 +
gggcatgaaggttgaaaaca

SEQ ID NO: 24536 - DNA, 20 bp, Artificial Sequence
  Synthetic oligonucleotide; AAG chr11 5363013 5363032 5363029 +
tgaaggttgaaaacaaggaa

SEQ ID NO: 24537 - DNA, 20 bp, Artificial Sequence
  Synthetic oligonucleotide; AGG chr11 5363014 5363033 5363030 +
gaaggttgaaaacaaggaaa

SEQ ID NO: 24538 - DNA, 20 bp, Artificial Sequence
  Synthetic oligonucleotide; GAG chr11 5363016 5363035 5363032 +
aggttgaaaacaaggaaaag

SEQ ID NO: 24539 - DNA, 20 bp, Artificial Sequence
  Synthetic oligonucleotide; AAG chr11 5363022 5363041 5363038 +
aaaacaaggaaaaggagccc

SEQ ID NO: 24540 - DNA, 20 bp, Artificial Sequence
  Synthetic oligonucleotide; AGG chr11 5363023 5363042 5363039 +
aaacaaggaaaaggagccca

SEQ ID NO: 24541 - DNA, 20 bp, Artificial Sequence
  Synthetic oligonucleotide; AAG chr11 5363032 5363051 5363048 +
aaaggagcccaaggaaatgc

SEQ ID NO: 24542 - DNA, 20 bp, Artificial Sequence
  Synthetic oligonucleotide; AAG chr11 5363051 5363070 5363067 +
caagtgttgtaaaatgtgct

SEQ ID NO: 24543 - DNA, 20 bp, Artificial Sequence
  Synthetic oligonucleotide; TAG chr11 5363054 5363073 5363070 +
gtgttgtaaaatgtgctaag

SEQ ID NO: 24544 - DNA, 20 bp, Artificial Sequence
  Synthetic oligonucleotide; GAG chr11 5363063 5363082 5363079 +
aatgtgctaagtagatgtct

SEQ ID NO: 24545 - DNA, 20 bp, Artificial Sequence
  Synthetic oligonucleotide; TGG chr11 5363066 5363085 5363082 +
gtgctaagtagatgtctgag

SEQ ID NO: 24546 - DNA, 20 bp, Artificial Sequence
  Synthetic oligonucleotide; GAG chr11 5363080 5363099 5363096 +
tctgagtggcattcctccat

SEQ ID NO: 24547 - DNA, 20 bp, Artificial Sequence
  Synthetic oligonucleotide; GAG chr11 5363082 5363101 5363098 +
tgagtggcattcctccatga

SEQ ID NO: 24548 - DNA, 20 bp, Artificial Sequence
  Synthetic oligonucleotide; AAG chr11 5363086 5363105 5363102 +
tggcattcctccatgagaga

SEQ ID NO: 24549 - DNA, 20 bp, Artificial Sequence
  Synthetic oligonucleotide; AAG chr11 5363092 5363111 5363108 +
tcctccatgagagaaagctt

SEQ ID NO: 24550 - DNA, 20 bp, Artificial Sequence
  Synthetic oligonucleotide; AGG chr11 5363093 5363112 5363109 +
cctccatgagagaaagctta

SEQ ID NO: 24551 - DNA, 20 bp, Artificial Sequence
  Synthetic oligonucleotide; GGG chr11 5363094 5363113 5363110 +
ctccatgagagaaagcttaa

SEQ ID NO: 24552 - DNA, 20 bp, Artificial Sequence
  Synthetic oligonucleotide; AAG chr11 5363097 5363116 5363113 +
catgagagaaagcttaaggg

SEQ ID NO: 24553 - DNA, 20 bp, Artificial Sequence
  Synthetic oligonucleotide; AAG chr11 5363101 5363120 5363117 +
agagaaagcttaagggaaga

SEQ ID NO: 24554 - DNA, 20 bp, Artificial Sequence
  Synthetic oligonucleotide; GAG chr11 5363103 5363122 5363119 +
agaaagcttaagggaagaaa

SEQ ID NO: 24555 - DNA, 20 bp, Artificial Sequence
  Synthetic oligonucleotide; GAG chr11 5363111 5363130 5363127 +
taagggaagaaagagaccct

SEQ ID NO: 24556 - DNA, 20 bp, Artificial Sequence
  Synthetic oligonucleotide; AAG chr11 5363129 5363148 5363145 +
ctgagtgtcttcaaaactca

SEQ ID NO: 24557 - DNA, 20 bp, Artificial Sequence
  Synthetic oligonucleotide; CAG chr11 5363141 5363160 5363157 +
aaaactcaaagttttacgaa

SEQ ID NO: 24558 - DNA, 20 bp, Artificial Sequence
  Synthetic oligonucleotide; TAG chr11 5363150 5363169 5363166 +
agttttacgaacagaatgat

SEQ ID NO: 24559 - DNA, 20 bp, Artificial Sequence
  Synthetic oligonucleotide; TGG chr11 5363155 5363174 5363171 +
tacgaacagaatgattagtc

SEQ ID NO: 24560 - DNA, 20 bp, Artificial Sequence
  Synthetic oligonucleotide; GAG chr11 5363157 5363176 5363173 +
cgaacagaatgattagtctg

SEQ ID NO: 24561 - DNA, 20 bp, Artificial Sequence
  Synthetic oligonucleotide; CAG chr11 5363179 5363198 5363195 +
gaaatcatttttcatcaata

SEQ ID NO: 24562 - DNA, 20 bp, Artificial Sequence
  Synthetic oligonucleotide; AGG chr11 5363180 5363199 5363196 +
aaatcatttttcatcaatac

SEQ ID NO: 24563 - DNA, 20 bp, Artificial Sequence
  Synthetic oligonucleotide; AAG chr11 5363188 5363207 5363204 +
tttcatcaatacaggatctc

SEQ ID NO: 24564 - DNA, 20 bp, Artificial Sequence
  Synthetic oligonucleotide; CGG chr11 5363267 5363286 5363283 +
acacacacacacacacacac

SEQ ID NO: 24565 - DNA, 20 bp, Artificial Sequence
  Synthetic oligonucleotide; GAG chr11 5363271 5363290 5363287 +
acacacacacacacaccggt

SEQ ID NO: 24566 - DNA, 20 bp, Artificial Sequence
  Synthetic oligonucleotide; TGG chr11 5363274 5363293 5363290 +
cacacacacacaccggtgag

SEQ ID NO: 24567 - DNA, 20 bp, Artificial Sequence
  Synthetic oligonucleotide; CAG chr11 5363278 5363297 5363294 +
cacacacaccggtgagtgga

SEQ ID NO: 24568 - DNA, 20 bp, Artificial Sequence
  Synthetic oligonucleotide; AAG chr11 5363293 5363312 5363309 +
gtggacagacatcgtttttc

SEQ ID NO: 24569 - DNA, 20 bp, Artificial Sequence
  Synthetic oligonucleotide; CAG chr11 5363304 5363323 5363320 +
tcgtttttcaagtcatgatg

SEQ ID NO: 24570 - DNA, 20 bp, Artificial Sequence
  Synthetic oligonucleotide; CAG chr11 5363307 5363326 5363323 +
tttttcaagtcatgatgcag

SEQ ID NO: 24571 - DNA, 20 bp, Artificial Sequence
  Synthetic oligonucleotide; TGG chr11 5363313 5363332 5363329 +
aagtcatgatgcagcagtat

SEQ ID NO: 24572 - DNA, 20 bp, Artificial Sequence
  Synthetic oligonucleotide; CAG chr11 5363321 5363340 5363337 +
atgcagcagtattggaatta

SEQ ID NO: 24573 - DNA, 20 bp, Artificial Sequence
  Synthetic oligonucleotide; TGG chr11 5363331 5363350 5363347 +
attggaattacagttttttt

SEQ ID NO: 24574 - DNA, 20 bp, Artificial Sequence
  Synthetic oligonucleotide; AAG chr11 5363354 5363373 5363370 +
tttttgtttttttttacttc

SEQ ID NO: 24575 - DNA, 20 bp, Artificial Sequence
  Synthetic oligonucleotide; TGG chr11 5363360 5363379 5363376 +
tttttttttacttcaagcta

SEQ ID NO: 24576 - DNA, 20 bp, Artificial Sequence
  Synthetic oligonucleotide; GAG chr11 5363367 5363386 5363383 +
ttacttcaagctatggtgtt

SEQ ID NO: 24577 - DNA, 20 bp, Artificial Sequence
  Synthetic oligonucleotide; AAG chr11 5363404 5363423 5363420 +
caccaattaattgttccttt

SEQ ID NO: 24578 - DNA, 20 bp, Artificial Sequence
  Synthetic oligonucleotide; AAG chr11 5363455 5363474 5363471 +
acactctctctctcacacaa

SEQ ID NO: 24579 - DNA, 20 bp, Artificial Sequence
  Synthetic oligonucleotide; CAG chr11 5363496 5363515 5363512 +
aaacacacatcaccaccact

SEQ ID NO: 24580 - DNA, 20 bp, Artificial Sequence
  Synthetic oligonucleotide; GAG chr11 5363505 5363524 5363521 +
tcaccaccactcagctccat

SEQ ID NO: 24581 - DNA, 20 bp, Artificial Sequence
  Synthetic oligonucleotide; AGG chr11 5363506 5363525 5363522 +
caccaccactcagctccatg

SEQ ID NO: 24582 - DNA, 20 bp, Artificial Sequence
  Synthetic oligonucleotide; AAG chr11 5363533 5363552 5363549 +
ctcactacttttattaaacc

SEQ ID NO: 24583 - DNA, 20 bp, Artificial Sequence
  Synthetic oligonucleotide; CAG chr11 5363538 5363557 5363554 +
tacttttattaaaccaagca

SEQ ID NO: 24584 - DNA, 20 bp, Artificial Sequence
  Synthetic oligonucleotide; AAG chr11 5363546 5363565 5363562 +
ttaaaccaagcacagatacc

SEQ ID NO: 24585 - DNA, 20 bp, Artificial Sequence
  Synthetic oligonucleotide; GAG chr11 5363554 5363573 5363570 +
agcacagataccaagttttt

SEQ ID NO: 24586 - DNA, 20 bp, Artificial Sequence
  Synthetic oligonucleotide; CAG chr11 5363565 5363584 5363581 +
caagtttttgagtgtgaatg

SEQ ID NO: 24587 - DNA, 20 bp, Artificial Sequence
  Synthetic oligonucleotide; AAG chr11 5363569 5363588 5363585 +
tttttgagtgtgaatgcaga

SEQ ID NO: 24588 - DNA, 20 bp, Artificial Sequence
  Synthetic oligonucleotide; AAG chr11 5363572 5363591 5363588 +
ttgagtgtgaatgcagaaag

SEQ ID NO: 24589 - DNA, 20 bp, Artificial Sequence
  Synthetic oligonucleotide; GAG chr11 5363582 5363601 5363598 +
atgcagaaagaagatatatt

SEQ ID NO: 24590 - DNA, 20 bp, Artificial Sequence
  Synthetic oligonucleotide; AGG chr11 5363583 5363602 5363599 +
tgcagaaagaagatatattg

SEQ ID NO: 24591 - DNA, 20 bp, Artificial Sequence
  Synthetic oligonucleotide; TAG chr11 5363586 5363605 5363602 +
agaaagaagatatattgagg

SEQ ID NO: 24592 - DNA, 20 bp, Artificial Sequence
  Synthetic oligonucleotide; TAG chr11 5363599 5363618 5363615 +
attgaggtagatttttctca

SEQ ID NO: 24593 - DNA, 20 bp, Artificial Sequence
  Synthetic oligonucleotide; AAG chr11 5363610 5363629 5363626 +
tttttctcatagatactact

SEQ ID NO: 24594 - DNA, 20 bp, Artificial Sequence
  Synthetic oligonucleotide; TGG chr11 5363624 5363643 5363640 +
actactaagattatattgtc

SEQ ID NO: 24595 - DNA, 20 bp, Artificial Sequence
  Synthetic oligonucleotide; CAG chr11 5363641 5363660 5363657 +
gtctggaatcttatgtgaca

SEQ ID NO: 24596 - DNA, 20 bp, Artificial Sequence
  Synthetic oligonucleotide; AAG chr11 5363647 5363666 5363663 +
aatcttatgtgacacagaaa

SEQ ID NO: 24597 - DNA, 20 bp, Artificial Sequence
  Synthetic oligonucleotide; TGG chr11 5363665 5363684 5363681 +
aaaagaacaactctgccatt

SEQ ID NO: 24598 - DNA, 20 bp, Artificial Sequence
  Synthetic oligonucleotide; TGG chr11 5363683 5363702 5363699 +
tttggccatttgcttgtgtt

SEQ ID NO: 24599 - DNA, 20 bp, Artificial Sequence
  Synthetic oligonucleotide; AAG chr11 5363693 5363712 5363709 +
tgcttgtgtttggacttgtg

SEQ ID NO: 24600 - DNA, 20 bp, Artificial Sequence
  Synthetic oligonucleotide; AGG chr11 5363694 5363713 5363710 +
gcttgtgtttggacttgtga

SEQ ID NO: 24601 - DNA, 20 bp, Artificial Sequence
  Synthetic oligonucleotide; TGG chr11 5363717 5363736 5363733 +
tctttccatcattctgttat

SEQ ID NO: 24602 - DNA, 20 bp, Artificial Sequence
  Synthetic oligonucleotide; AAG chr11 5363721 5363740 5363737 +
tccatcattctgttattgga

SEQ ID NO: 24603 - DNA, 20 bp, Artificial Sequence
  Synthetic oligonucleotide; CGG chr11 5363724 5363743 5363740 +
atcattctgttattggaaag

SEQ ID NO: 24604 - DNA, 20 bp, Artificial Sequence
  Synthetic oligonucleotide; GGG chr11 5363725 5363744 5363741 +
tcattctgttattggaaagc

SEQ ID NO: 24605 - DNA, 20 bp, Artificial Sequence
  Synthetic oligonucleotide; AAG chr11 5363729 5363748 5363745 +
tctgttattggaaagcggga

SEQ ID NO: 24606 - DNA, 20 bp, Artificial Sequence
  Synthetic oligonucleotide; TAG chr11 5363732 5363751 5363748 +
gttattggaaagcgggaaag

SEQ ID NO: 24607 - DNA, 20 bp, Artificial Sequence
  Synthetic oligonucleotide; GAG chr11 5363744 5363763 5363760 +
cgggaaagtagcattttcat

SEQ ID NO: 24608 - DNA, 20 bp, Artificial Sequence
  Synthetic oligonucleotide; AGG chr11 5363745 5363764 5363761 +
gggaaagtagcattttcatg

SEQ ID NO: 24609 - DNA, 20 bp, Artificial Sequence
  Synthetic oligonucleotide; TAG chr11 5363762 5363781 5363778 +
atgaggattctattaaaaac

SEQ ID NO: 24610 - DNA, 20 bp, Artificial Sequence
  Synthetic oligonucleotide; AGG chr11 5363763 5363782 5363779 +
tgaggattctattaaaaact

SEQ ID NO: 24611 - DNA, 20 bp, Artificial Sequence
  Synthetic oligonucleotide; GGG chr11 5363764 5363783 5363780 +
gaggattctattaaaaacta

SEQ ID NO: 24612 - DNA, 20 bp, Artificial Sequence
  Synthetic oligonucleotide; CAG chr11 5363784 5363803 5363800 +
gggaccatatgcaatacatc

SEQ ID NO: 24613 - DNA, 20 bp, Artificial Sequence
  Synthetic oligonucleotide; TAG chr11 5363795 5363814 5363811 +
caatacatccagactatatt

SEQ ID NO: 24614 - DNA, 20 bp, Artificial Sequence
  Synthetic oligonucleotide; TAG chr11 5363805 5363824 5363821 +
agactatatttagtgtacaa

SEQ ID NO: 24615 - DNA, 20 bp, Artificial Sequence
  Synthetic oligonucleotide; AAG chr11 5363809 5363828 5363825 +
tatatttagtgtacaataga

SEQ ID NO: 24616 - DNA, 20 bp, Artificial Sequence
  Synthetic oligonucleotide; TAG chr11 5363821 5363840 5363837 +
acaatagaaagcaattacca

SEQ ID NO: 24617 - DNA, 20 bp, Artificial Sequence
  Synthetic oligonucleotide; TAG chr11 5363837 5363856 5363853 +
accatagcaattatgttccc

SEQ ID NO: 24618 - DNA, 20 bp, Artificial Sequence
  Synthetic oligonucleotide; CAG chr11 5363863 5363882 5363879 +
tcttctctctttgcaaaccc

SEQ ID NO: 24619 - DNA, 20 bp, Artificial Sequence
  Synthetic oligonucleotide; CAG chr11 5363874 5363893 5363890 +
tgcaaaccccagcccccact

SEQ ID NO: 24620 - DNA, 20 bp, Artificial Sequence
  Synthetic oligonucleotide; TGG chr11 5363884 5363903 5363900 +
agcccccactcagcatgaca

SEQ ID NO: 24621 - DNA, 20 bp, Artificial Sequence
  Synthetic oligonucleotide; CAG chr11 5363887 5363906 5363903 +
ccccactcagcatgacatgg

SEQ ID NO: 24622 - DNA, 20 bp, Artificial Sequence
  Synthetic oligonucleotide; AGG chr11 5363888 5363907 5363904 +
cccactcagcatgacatggc

SEQ ID NO: 24623 - DNA, 20 bp, Artificial Sequence
  Synthetic oligonucleotide; TAG chr11 5363899 5363918 5363915 +
tgacatggcaggtataaaaa

SEQ ID NO: 24624 - DNA, 20 bp, Artificial Sequence
  Synthetic oligonucleotide; AGG chr11 5363900 5363919 5363916 +
gacatggcaggtataaaaat

SEQ ID NO: 24625 - DNA, 20 bp, Artificial Sequence
  Synthetic oligonucleotide; CAG chr11 5363908 5363927 5363924 +
aggtataaaaataggcaact

SEQ ID NO: 24626 - DNA, 20 bp, Artificial Sequence
  Synthetic oligonucleotide; AAG chr11 5363924 5363943 5363940 +
aactcagacccatttctgta

SEQ ID NO: 24627 - DNA, 20 bp, Artificial Sequence
  Synthetic oligonucleotide; AGG chr11 5363925 5363944 5363941 +
actcagacccatttctgtaa

SEQ ID NO: 24628 - DNA, 20 bp, Artificial Sequence
  Synthetic oligonucleotide; GAG chr11 5363927 5363946 5363943 +
tcagacccatttctgtaaag

SEQ ID NO: 24629 - DNA, 20 bp, Artificial Sequence
  Synthetic oligonucleotide; AGG chr11 5363928 5363947 5363944 +
cagacccatttctgtaaagg

SEQ ID NO: 24630 - DNA, 20 bp, Artificial Sequence
  Synthetic oligonucleotide; GAG chr11 5363930 5363949 5363946 +
gacccatttctgtaaaggag

SEQ ID NO: 24631 - DNA, 20 bp, Artificial Sequence
  Synthetic oligonucleotide; AAG chr11 5363933 5363952 5363949 +
ccatttctgtaaaggaggag

SEQ ID NO: 24632 - DNA, 20 bp, Artificial Sequence
  Synthetic oligonucleotide; TAG chr11 5363943 5363962 5363959 +
aaaggaggagaagcttgtgt

SEQ ID NO: 24633 - DNA, 20 bp, Artificial Sequence
  Synthetic oligonucleotide; AGG chr11 5363944 5363963 5363960 +
aaggaggagaagcttgtgtt

SEQ ID NO: 24634 - DNA, 20 bp, Artificial Sequence
  Synthetic oligonucleotide; TGG chr11 5363949 5363968 5363965 +
ggagaagcttgtgttaggaa

SEQ ID NO: 24635 - DNA, 20 bp, Artificial Sequence
  Synthetic oligonucleotide; AAG chr11 5363952 5363971 5363968 +
gaagcttgtgttaggaatgg

SEQ ID NO: 24636 - DNA, 20 bp, Artificial Sequence
  Synthetic oligonucleotide; TGG chr11 5363961 5363980 5363977 +
gttaggaatggaagaatgcc

SEQ ID NO: 24637 - DNA, 20 bp, Artificial Sequence
  Synthetic oligonucleotide; GGG chr11 5363962 5363981 5363978 +
ttaggaatggaagaatgcct

SEQ ID NO: 24638 - DNA, 20 bp, Artificial Sequence
  Synthetic oligonucleotide; TGG chr11 5363966 5363985 5363982 +
gaatggaagaatgcctgggc

SEQ ID NO: 24639 - DNA, 20 bp, Artificial Sequence
  Synthetic oligonucleotide; GAG chr11 5363968 5363987 5363984 +
atggaagaatgcctgggctg

SEQ ID NO: 24640 - DNA, 20 bp, Artificial Sequence
  Synthetic oligonucleotide; CAG chr11 5363973 5363992 5363989 +
agaatgcctgggctggagaa

SEQ ID NO: 24641 - DNA, 20 bp, Artificial Sequence
  Synthetic oligonucleotide; AGG chr11 5363974 5363993 5363990 +
gaatgcctgggctggagaac

SEQ ID NO: 24642 - DNA, 20 bp, Artificial Sequence
  Synthetic oligonucleotide; GGG chr11 5363975 5363994 5363991 +
aatgcctgggctggagaaca

SEQ ID NO: 24643 - DNA, 20 bp, Artificial Sequence
  Synthetic oligonucleotide; CAG chr11 5363986 5364005 5364002 +
tggagaacagggcttcacaa

SEQ ID NO: 24644 - DNA, 20 bp, Artificial Sequence
  Synthetic oligonucleotide; TAG chr11 5363991 5364010 5364007 +
aacagggcttcacaacagtg

SEQ ID NO: 24645 - DNA, 20 bp, Artificial Sequence
  Synthetic oligonucleotide; TAG chr11 5363997 5364016 5364013 +
gcttcacaacagtgtagtga

SEQ ID NO: 24646 - DNA, 20 bp, Artificial Sequence
  Synthetic oligonucleotide; TGG chr11 5364023 5364042 5364039 +
cacccacatattatgtgatg

SEQ ID NO: 24647 - DNA, 20 bp, Artificial Sequence
  Synthetic oligonucleotide; GAG chr11 5364032 5364051 5364048 +
attatgtgatgtggacctct

SEQ ID NO: 24648 - DNA, 20 bp, Artificial Sequence
  Synthetic oligonucleotide; CAG chr11 5364036 5364055 5364052 +
tgtgatgtggacctctgagc

SEQ ID NO: 24649 - DNA, 20 bp, Artificial Sequence
  Synthetic oligonucleotide; AGG chr11 5364037 5364056 5364053 +
gtgatgtggacctctgagcc

SEQ ID NO: 24650 - DNA, 20 bp, Artificial Sequence
  Synthetic oligonucleotide; TGG chr11 5364057 5364076 5364073 +
aggtactatctcattctcca

SEQ ID NO: 24651 - DNA, 20 bp, Artificial Sequence
  Synthetic oligonucleotide; AAG chr11 5364067 5364086 5364083 +
tcattctccatggttgcaat

SEQ ID NO: 24652 - DNA, 20 bp, Artificial Sequence
  Synthetic oligonucleotide; AGG chr11 5364068 5364087 5364084 +
cattctccatggttgcaata

SEQ ID NO: 24653 - DNA, 20 bp, Artificial Sequence
  Synthetic oligonucleotide; TAG chr11 5364078 5364097 5364094 +
ggttgcaataaggtcgatta

SEQ ID NO: 24654 - DNA, 20 bp, Artificial Sequence
  Synthetic oligonucleotide; AAG chr11 5364089 5364108 5364105 +
ggtcgattatagattcaata

SEQ ID NO: 24655 - DNA, 20 bp, Artificial Sequence
  Synthetic oligonucleotide; AGG chr11 5364090 5364109 5364106 +
gtcgattatagattcaataa

SEQ ID NO: 24656 - DNA, 20 bp, Artificial Sequence
  Synthetic oligonucleotide; AAG chr11 5364093 5364112 5364109 +
gattatagattcaataaagg

SEQ ID NO: 24657 - DNA, 20 bp, Artificial Sequence
  Synthetic oligonucleotide; GAG chr11 5364095 5364114 5364111 +
ttatagattcaataaaggaa

SEQ ID NO: 24658 - DNA, 20 bp, Artificial Sequence
  Synthetic oligonucleotide; AGG chr11 5364096 5364115 5364112 +
tatagattcaataaaggaag

SEQ ID NO: 24659 - DNA, 20 bp, Artificial Sequence
  Synthetic oligonucleotide; AAG chr11 5364112 5364131 5364128 +
gaagaggtatctcaacacta

SEQ ID NO: 24660 - DNA, 20 bp, Artificial Sequence
  Synthetic oligonucleotide; AAG chr11 5364116 5364135 5364132 +
aggtatctcaacactaaaga

SEQ ID NO: 24661 - DNA, 20 bp, Artificial Sequence
  Synthetic oligonucleotide; GAG chr11 5364118 5364137 5364134 +
gtatctcaacactaaagaaa

SEQ ID NO: 24662 - DNA, 20 bp, Artificial Sequence
  Synthetic oligonucleotide; CAG chr11 5364130 5364149 5364146 +
taaagaaagagtaaaatttt

SEQ ID NO: 24663 - DNA, 20 bp, Artificial Sequence
  Synthetic oligonucleotide; AGG chr11 5364131 5364150 5364147 +
aaagaaagagtaaaattttc

SEQ ID NO: 24664 - DNA, 20 bp, Artificial Sequence
  Synthetic oligonucleotide; GGG chr11 5364132 5364151 5364148 +
aagaaagagtaaaattttca

SEQ ID NO: 24665 - DNA, 20 bp, Artificial Sequence
  Synthetic oligonucleotide; AAG chr11 5364141 5364160 5364157 +
taaaattttcagggttcaac

SEQ ID NO: 24666 - DNA, 20 bp, Artificial Sequence
  Synthetic oligonucleotide; AAG chr11 5364153 5364172 5364169 +
ggttcaacaagcgaccacct

SEQ ID NO: 24667 - DNA, 20 bp, Artificial Sequence
  Synthetic oligonucleotide; AGG chr11 5364154 5364173 5364170 +
gttcaacaagcgaccaccta

SEQ ID NO: 24668 - DNA, 20 bp, Artificial Sequence
  Synthetic oligonucleotide; GGG chr11 5364155 5364174 5364171 +
ttcaacaagcgaccacctaa

SEQ ID NO: 24669 - DNA, 20 bp, Artificial Sequence
  Synthetic oligonucleotide; AAG chr11 5364189 5364208 5364205 +
cctaaattttgacaaacttt

SEQ ID NO: 24670 - DNA, 20 bp, Artificial Sequence
  Synthetic oligonucleotide; AAG chr11 5364198 5364217 5364214 +
tgacaaactttaagttcaaa

SEQ ID NO: 24671 - DNA, 20 bp, Artificial Sequence
  Synthetic oligonucleotide; TAG chr11 5364207 5364226 5364223 +
ttaagttcaaaaagctcatc

SEQ ID NO: 24672 - DNA, 20 bp, Artificial Sequence
  Synthetic oligonucleotide; AAG chr11 5364218 5364237 5364234 +
aagctcatctagctatgaca

SEQ ID NO: 24673 - DNA, 20 bp, Artificial Sequence
  Synthetic oligonucleotide; TAG chr11 5364228 5364247 5364244 +
agctatgacaaagtttgaca

SEQ ID NO: 24674 - DNA, 20 bp, Artificial Sequence
  Synthetic oligonucleotide; TAG chr11 5364232 5364251 5364248 +
atgacaaagtttgacatagt

SEQ ID NO: 24675 - DNA, 20 bp, Artificial Sequence
  Synthetic oligonucleotide; GAG chr11 5364237 5364256 5364253 +
aaagtttgacatagttagat

SEQ ID NO: 24676 - DNA, 20 bp, Artificial Sequence
  Synthetic oligonucleotide; TGG chr11 5364299 5364318 5364315 +
tcttgacttcacaaaaccat

SEQ ID NO: 24677 - DNA, 20 bp, Artificial Sequence
  Synthetic oligonucleotide; TGG chr11 5364306 5364325 5364322 +
ttcacaaaaccattggaatt

SEQ ID NO: 24678 - DNA, 20 bp, Artificial Sequence
  Synthetic oligonucleotide; GGG chr11 5364307 5364326 5364323 +
tcacaaaaccattggaattt

SEQ ID NO: 24679 - DNA, 20 bp, Artificial Sequence
  Synthetic oligonucleotide; GGG chr11 5364308 5364327 5364324 +
cacaaaaccattggaatttg

SEQ ID NO: 24680 - DNA, 20 bp, Artificial Sequence
  Synthetic oligonucleotide; TGG chr11 5364316 5364335 5364332 +
cattggaatttggggtgata

SEQ ID NO: 24681 - DNA, 20 bp, Artificial Sequence
  Synthetic oligonucleotide; GAG chr11 5364318 5364337 5364334 +
ttggaatttggggtgatatg

SEQ ID NO: 24682 - DNA, 20 bp, Artificial Sequence
  Synthetic oligonucleotide; AGG chr11 5364319 5364338 5364335 +
tggaatttggggtgatatgg

SEQ ID NO: 24683 - DNA, 20 bp, Artificial Sequence
  Synthetic oligonucleotide; AAG chr11 5364323 5364342 5364339 +
atttggggtgatatggaggc

SEQ ID NO: 24684 - DNA, 20 bp, Artificial Sequence
  Synthetic oligonucleotide; CAG chr11 5364333 5364352 5364349 +
atatggaggcaagccaaatg

SEQ ID NO: 24685 - DNA, 20 bp, Artificial Sequence
  Synthetic oligonucleotide; CAG chr11 5364339 5364358 5364355 +
aggcaagccaaatgcagaaa

SEQ ID NO: 24686 - DNA, 20 bp, Artificial Sequence
  Synthetic oligonucleotide; AGG chr11 5364340 5364359 5364356 +
ggcaagccaaatgcagaaac

SEQ ID NO: 24687 - DNA, 20 bp, Artificial Sequence
  Synthetic oligonucleotide; GAG chr11 5364342 5364361 5364358 +
caagccaaatgcagaaacag

SEQ ID NO: 24688 - DNA, 20 bp, Artificial Sequence
  Synthetic oligonucleotide; AGG chr11 5364343 5364362 5364359 +
aagccaaatgcagaaacagg

SEQ ID NO: 24689 - DNA, 20 bp, Artificial Sequence
  Synthetic oligonucleotide; TGG chr11 5364349 5364368 5364365 +
aatgcagaaacaggaggtca

SEQ ID NO: 24690 - DNA, 20 bp, Artificial Sequence
  Synthetic oligonucleotide; AAG chr11 5364353 5364372 5364369 +
cagaaacaggaggtcatggt

SEQ ID NO: 24691 - DNA, 20 bp, Artificial Sequence
  Synthetic oligonucleotide; AGG chr11 5364354 5364373 5364370 +
agaaacaggaggtcatggta

SEQ ID NO: 24692 - DNA, 20 bp, Artificial Sequence
  Synthetic oligonucleotide; CAG chr11 5364365 5364384 5364381 +
gtcatggtaaggctatgatg

SEQ ID NO: 24693 - DNA, 20 bp, Artificial Sequence
  Synthetic oligonucleotide; TAG chr11 5364370 5364389 5364386 +
ggtaaggctatgatgcagtt

SEQ ID NO: 24694 - DNA, 20 bp, Artificial Sequence
  Synthetic oligonucleotide; AGG chr11 5364371 5364390 5364387 +
gtaaggctatgatgcagttt

SEQ ID NO: 24695 - DNA, 20 bp, Artificial Sequence
  Synthetic oligonucleotide; GAG chr11 5364373 5364392 5364389 +
aaggctatgatgcagtttag

SEQ ID NO: 24696 - DNA, 20 bp, Artificial Sequence
  Synthetic oligonucleotide; CAG chr11 5364400 5364419 5364416 +
gtgatgtgtcatttctgtga

SEQ ID NO: 24697 - DNA, 20 bp, Artificial Sequence
  Synthetic oligonucleotide; AGG chr11 5364401 5364420 5364417 +
tgatgtgtcatttctgtgac

SEQ ID NO: 24698 - DNA, 20 bp, Artificial Sequence
  Synthetic oligonucleotide; GAG chr11 5364408 5364427 5364424 +
tcatttctgtgacaggatat

SEQ ID NO: 24699 - DNA, 20 bp, Artificial Sequence
  Synthetic oligonucleotide; GAG chr11 5364410 5364429 5364426 +
atttctgtgacaggatatga

SEQ ID NO: 24700 - DNA, 20 bp, Artificial Sequence
  Synthetic oligonucleotide; TAG chr11 5364430 5364449 5364446 +
gagctgcacatctttctgtt

SEQ ID NO: 24701 - DNA, 20 bp, Artificial Sequence
  Synthetic oligonucleotide; TGG chr11 5364461 5364480 5364477 +
gccatatttgtaattctcaa

SEQ ID NO: 24702 - DNA, 20 bp, Artificial Sequence
  Synthetic oligonucleotide; CAG chr11 5364465 5364484 5364481 +
tatttgtaattctcaatggt

SEQ ID NO: 24703 - DNA, 20 bp, Artificial Sequence
  Synthetic oligonucleotide; TGG chr11 5364477 5364496 5364493 +
tcaatggtcagtctccttgc

SEQ ID NO: 24704 - DNA, 20 bp, Artificial Sequence
  Synthetic oligonucleotide; CAG chr11 5364501 5364520 5364517 +
ctataaattcaactacatgc

SEQ ID NO: 24705 - DNA, 20 bp, Artificial Sequence
  Synthetic oligonucleotide; AAG chr11 5364508 5364527 5364524 +
ttcaactacatgccagcttt

SEQ ID NO: 24706 - DNA, 20 bp, Artificial Sequence
  Synthetic oligonucleotide; CAG chr11 5364513 5364532 5364529 +
ctacatgccagctttaagca

SEQ ID NO: 24707 - DNA, 20 bp, Artificial Sequence
  Synthetic oligonucleotide; AAG chr11 5364523 5364542 5364539 +
gctttaagcacagtgctttg

SEQ ID NO: 24708 - DNA, 20 bp, Artificial Sequence
  Synthetic oligonucleotide; GAG chr11 5364525 5364544 5364541 +
tttaagcacagtgctttgaa

SEQ ID NO: 24709 - DNA, 20 bp, Artificial Sequence
  Synthetic oligonucleotide; GAG chr11 5364527 5364546 5364543 +
taagcacagtgctttgaaga

SEQ ID NO: 24710 - DNA, 20 bp, Artificial Sequence
  Synthetic oligonucleotide; TAG chr11 5364530 5364549 5364546 +
gcacagtgctttgaagagag

SEQ ID NO: 24711 - DNA, 20 bp, Artificial Sequence
  Synthetic oligonucleotide; AGG chr11 5364531 5364550 5364547 +
cacagtgctttgaagagagt

SEQ ID NO: 24712 - DNA, 20 bp, Artificial Sequence
  Synthetic oligonucleotide; GAG chr11 5364533 5364552 5364549 +
cagtgctttgaagagagtag

SEQ ID NO: 24713 - DNA, 20 bp, Artificial Sequence
  Synthetic oligonucleotide; AAG chr11 5364573 5364592 5364589 +
attaaatgaaaaaataaact

SEQ ID NO: 24714 - DNA, 20 bp, Artificial Sequence
  Synthetic oligonucleotide; GAG chr11 5364579 5364598 5364595 +
tgaaaaaataaactaagcgt

SEQ ID NO: 24715 - DNA, 20 bp, Artificial Sequence
  Synthetic oligonucleotide; GAG chr11 5364581 5364600 5364597 +
aaaaaataaactaagcgtga

SEQ ID NO: 24716 - DNA, 20 bp, Artificial Sequence
  Synthetic oligonucleotide; AGG chr11 5364582 5364601 5364598 +
aaaaataaactaagcgtgag

SEQ ID NO: 24717 - DNA, 20 bp, Artificial Sequence
  Synthetic oligonucleotide; AAG chr11 5364662 5364681 5364678 +
tctctgattttgtgcactct

SEQ ID NO: 24718 - DNA, 20 bp, Artificial Sequence
  Synthetic oligonucleotide; AGG chr11 5364663 5364682 5364679 +
ctctgattttgtgcactcta

SEQ ID NO: 24719 - DNA, 20 bp, Artificial Sequence
  Synthetic oligonucleotide; CAG chr11 5364666 5364685 5364682 +
tgattttgtgcactctaagg

SEQ ID NO: 24720 - DNA, 20 bp, Artificial Sequence
  Synthetic oligonucleotide; AAG chr11 5364675 5364694 5364691 +
gcactctaaggcagccctct

SEQ ID NO: 24721 - DNA, 20 bp, Artificial Sequence
  Synthetic oligonucleotide; CAG chr11 5364691 5364710 5364707 +
ctctaagctgtttgcccatc

SEQ ID NO: 24722 - DNA, 20 bp, Artificial Sequence
  Synthetic oligonucleotide; CAG chr11 5364701 5364720 5364717 +
tttgcccatccagcatatga

SEQ ID NO: 24723 - DNA, 20 bp, Artificial Sequence
  Synthetic oligonucleotide; AAG chr11 5364704 5364723 5364720 +
gcccatccagcatatgacag

SEQ ID NO: 24724 - DNA, 20 bp, Artificial Sequence
  Synthetic oligonucleotide; AAG chr11 5364715 5364734 5364731 +
atatgacagaagactcttca

SEQ ID NO: 24725 - DNA, 20 bp, Artificial Sequence
  Synthetic oligonucleotide; AAG chr11 5364728 5364747 5364744 +
ctcttcaaagtgaatgatca

SEQ ID NO: 24726 - DNA, 20 bp, Artificial Sequence
  Synthetic oligonucleotide; CAG chr11 5364742 5364761 5364758 +
tgatcaaagtcccttgttta

SEQ ID NO: 24727 - DNA, 20 bp, Artificial Sequence
  Synthetic oligonucleotide; AGG chr11 5364743 5364762 5364759 +
gatcaaagtcccttgtttac

SEQ ID NO: 24728 - DNA, 20 bp, Artificial Sequence
  Synthetic oligonucleotide; GGG chr11 5364744 5364763 5364760 +
atcaaagtcccttgtttaca

SEQ ID NO: 24729 - DNA, 20 bp, Artificial Sequence
  Synthetic oligonucleotide; GAG chr11 5364769 5364788 5364785 +
cccccaccctcttccttcct

SEQ ID NO: 24730 - DNA, 20 bp, Artificial Sequence
  Synthetic oligonucleotide; TGG chr11 5364781 5364800 5364797 +
tccttcctgagcatgtgttc

SEQ ID NO: 24731 - DNA, 20 bp, Artificial Sequence
  Synthetic oligonucleotide; AAG chr11 5364792 5364811 5364808 +
catgtgttctggatatgctg

SEQ ID NO: 24732 - DNA, 20 bp, Artificial Sequence
  Synthetic oligonucleotide; CAG chr11 5364804 5364823 5364820 +
atatgctgaagccaacctca

SEQ ID NO: 24733 - DNA, 20 bp, Artificial Sequence
  Synthetic oligonucleotide; AGG chr11 5364805 5364824 5364821 +
tatgctgaagccaacctcac

SEQ ID NO: 24734 - DNA, 20 bp, Artificial Sequence
  Synthetic oligonucleotide; AAG chr11 5364825 5364844 5364841 +
aggactttgttacctttcct

SEQ ID NO: 24735 - DNA, 20 bp, Artificial Sequence
  Synthetic oligonucleotide; TGG chr11 5364835 5364854 5364851 +
tacctttcctaagtttctat

SEQ ID NO: 24736 - DNA, 20 bp, Artificial Sequence
  Synthetic oligonucleotide; TAG chr11 5364855 5364874 5364871 +
tggtgaatttccatttaata

SEQ ID NO: 24737 - DNA, 20 bp, Artificial Sequence
  Synthetic oligonucleotide; TAG chr11 5364874 5364893 5364890 +
atagttttattaaatgattt

SEQ ID NO: 24738 - DNA, 20 bp, Artificial Sequence
  Synthetic oligonucleotide; TAG chr11 5364897 5364916 5364913 +
taaataatttttaatcattg

SEQ ID NO: 24739 - DNA, 20 bp, Artificial Sequence
  Synthetic oligonucleotide; TGG chr11 5364906 5364925 5364922 +
tttaatcattgtagcttcta

SEQ ID NO: 24740 - DNA, 20 bp, Artificial Sequence
  Synthetic oligonucleotide; TGG chr11 5364909 5364928 5364925 +
aatcattgtagcttctatgg

SEQ ID NO: 24741 - DNA, 20 bp, Artificial Sequence
  Synthetic oligonucleotide; AAG chr11 5364918 5364937 5364934 +
agcttctatggtggatacac

SEQ ID NO: 24742 - DNA, 20 bp, Artificial Sequence
  Synthetic oligonucleotide; AGG chr11 5364919 5364938 5364935 +
gcttctatggtggatacaca

SEQ ID NO: 24743 - DNA, 20 bp, Artificial Sequence
  Synthetic oligonucleotide; GAG chr11 5364921 5364940 5364937 +
ttctatggtggatacacaag

SEQ ID NO: 24744 - DNA, 20 bp, Artificial Sequence
  Synthetic oligonucleotide; AAG chr11 5364924 5364943 5364940 +
tatggtggatacacaaggag

SEQ ID NO: 24745 - DNA, 20 bp, Artificial Sequence
  Synthetic oligonucleotide; CAG chr11 5364927 5364946 5364943 +
ggtggatacacaaggagaag

SEQ ID NO: 24746 - DNA, 20 bp, Artificial Sequence
  Synthetic oligonucleotide; GAG chr11 5364929 5364948 5364945 +
tggatacacaaggagaagca

SEQ ID NO: 24747 - DNA, 20 bp, Artificial Sequence
  Synthetic oligonucleotide; GAG chr11 5364931 5364950 5364947 +
gatacacaaggagaagcaga

SEQ ID NO: 24748 - DNA, 20 bp, Artificial Sequence
  Synthetic oligonucleotide; GAG chr11 5364933 5364952 5364949 +
tacacaaggagaagcagaga

SEQ ID NO: 24749 - DNA, 20 bp, Artificial Sequence
  Synthetic oligonucleotide; GAG chr11 5364935 5364954 5364951 +
cacaaggagaagcagagaga

SEQ ID NO: 24750 - DNA, 20 bp, Artificial Sequence
  Synthetic oligonucleotide; AGG chr11 5364936 5364955 5364952 +
acaaggagaagcagagagag

SEQ ID NO: 24751 - DNA, 20 bp, Artificial Sequence
  Synthetic oligonucleotide; GGG chr11 5364937 5364956 5364953 +
caaggagaagcagagagaga

SEQ ID NO: 24752 - DNA, 20 bp, Artificial Sequence
  Synthetic oligonucleotide; AAG chr11 5364949 5364968 5364965 +
gagagagagggaaaaaaatg

SEQ ID NO: 24753 - DNA, 20 bp, Artificial Sequence
  Synthetic oligonucleotide; CAG chr11 5364955 5364974 5364971 +
gagggaaaaaaatgaagtaa

SEQ ID NO: 24754 - DNA, 20 bp, Artificial Sequence
  Synthetic oligonucleotide; AAG chr11 5364958 5364977 5364974 +
ggaaaaaaatgaagtaacag

SEQ ID NO: 24755 - DNA, 20 bp, Artificial Sequence
  Synthetic oligonucleotide; AGG chr11 5364959 5364978 5364975 +
gaaaaaaatgaagtaacaga

SEQ ID NO: 24756 - DNA, 20 bp, Artificial Sequence
  Synthetic oligonucleotide; AAG chr11 5364966 5364985 5364982 +
atgaagtaacagaaggctac

SEQ ID NO: 24757 - DNA, 20 bp, Artificial Sequence
  Synthetic oligonucleotide; AGG chr11 5364967 5364986 5364983 +
tgaagtaacagaaggctaca

SEQ ID NO: 24758 - DNA, 20 bp, Artificial Sequence
  Synthetic oligonucleotide; GGG chr11 5364968 5364987 5364984 +
gaagtaacagaaggctacaa

SEQ ID NO: 24759 - DNA, 20 bp, Artificial Sequence
  Synthetic oligonucleotide; GGG chr11 5364969 5364988 5364985 +
aagtaacagaaggctacaag

SEQ ID NO: 24760 - DNA, 20 bp, Artificial Sequence
  Synthetic oligonucleotide; AAG chr11 5364979 5364998 5364995 +
aggctacaaggggatttctc

SEQ ID NO: 24761 - DNA, 20 bp, Artificial Sequence
  Synthetic oligonucleotide; CAG chr11 5365010 5365029 5365026 +
tcttcttgtcattcttgtca

SEQ ID NO: 24762 - DNA, 20 bp, Artificial Sequence
  Synthetic oligonucleotide; TGG chr11 5365023 5365042 5365039 +
cttgtcacagcaatgaatct

SEQ ID NO: 24763 - DNA, 20 bp, Artificial Sequence
  Synthetic oligonucleotide; GGG chr11 5365024 5365043 5365040 +
ttgtcacagcaatgaatctt

SEQ ID NO: 24764 - DNA, 20 bp, Artificial Sequence
  Synthetic oligonucleotide; AAG chr11 5365032 5365051 5365048 +
gcaatgaatcttgggcaaat

SEQ ID NO: 24765 - DNA, 20 bp, Artificial Sequence
  Synthetic oligonucleotide; AGG chr11 5365033 5365052 5365049 +
caatgaatcttgggcaaata

SEQ ID NO: 24766 - DNA, 20 bp, Artificial Sequence
  Synthetic oligonucleotide; GGG chr11 5365034 5365053 5365050 +
aatgaatcttgggcaaataa

SEQ ID NO: 24767 - DNA, 20 bp, Artificial Sequence
  Synthetic oligonucleotide; AAG chr11 5365091 5365110 5365107 +
cttgtaataaccttgaattc

SEQ ID NO: 24768 - DNA, 20 bp, Artificial Sequence
  Synthetic oligonucleotide; TGG chr11 5365094 5365113 5365110 +
gtaataaccttgaattcaag

SEQ ID NO: 24769 - DNA, 20 bp, Artificial Sequence
  Synthetic oligonucleotide; TAG chr11 5365097 5365116 5365113 +
ataaccttgaattcaagtgg

SEQ ID NO: 24770 - DNA, 20 bp, Artificial Sequence
  Synthetic oligonucleotide; TGG chr11 5365136 5365155 5365152 +
aataacttttcttctttgtc

SEQ ID NO: 24771 - DNA, 20 bp, Artificial Sequence
  Synthetic oligonucleotide; GAG chr11 5365140 5365159 5365156 +
acttttcttctttgtctggt

SEQ ID NO: 24772 - DNA, 20 bp, Artificial Sequence
  Synthetic oligonucleotide; TAG chr11 5365148 5365167 5365164 +
tctttgtctggtgagttctg

SEQ ID NO: 24773 - DNA, 20 bp, Artificial Sequence
  Synthetic oligonucleotide; TAG chr11 5365156 5365175 5365172 +
tggtgagttctgtagacatt

SEQ ID NO: 24774 - DNA, 20 bp, Artificial Sequence
  Synthetic oligonucleotide; GAG chr11 5365158 5365177 5365174 +
gtgagttctgtagacattta

SEQ ID NO: 24775 - DNA, 20 bp, Artificial Sequence
  Synthetic oligonucleotide; TAG chr11 5365163 5365182 5365179 +
ttctgtagacatttagagtg

SEQ ID NO: 24776 - DNA, 20 bp, Artificial Sequence
  Synthetic oligonucleotide; AGG chr11 5365164 5365183 5365180 +
tctgtagacatttagagtgt

SEQ ID NO: 24777 - DNA, 20 bp, Artificial Sequence
  Synthetic oligonucleotide; GGG chr11 5365165 5365184 5365181 +
ctgtagacatttagagtgta

SEQ ID NO: 24778 - DNA, 20 bp, Artificial Sequence
  Synthetic oligonucleotide; TGG chr11 5365169 5365188 5365185 +
agacatttagagtgtagggc

SEQ ID NO: 24779 - DNA, 20 bp, Artificial Sequence
  Synthetic oligonucleotide; AAG chr11 5365188 5365207 5365204 +
ctggcaactgtgtttaaaat

SEQ ID NO: 24780 - DNA, 20 bp, Artificial Sequence
  Synthetic oligonucleotide; CAG chr11 5365204 5365223 5365220 +
aaataagttgtctattatat

SEQ ID NO: 24781 - DNA, 20 bp, Artificial Sequence
  Synthetic oligonucleotide; AGG chr11 5365205 5365224 5365221 +
aataagttgtctattatatc

SEQ ID NO: 24782 - DNA, 20 bp, Artificial Sequence
  Synthetic oligonucleotide; TGG chr11 5365214 5365233 5365230 +
tctattatatcaggactcca

SEQ ID NO: 24783 - DNA, 20 bp, Artificial Sequence
  Synthetic oligonucleotide; TAG chr11 5365224 5365243 5365240 +
caggactccatggaaacatc

SEQ ID NO: 24784 - DNA, 20 bp, Artificial Sequence
  Synthetic oligonucleotide; CAG chr11 5365232 5365251 5365248 +
catggaaacatctagtgaac

SEQ ID NO: 24785 - DNA, 20 bp, Artificial Sequence
  Synthetic oligonucleotide; AAG chr11 5365235 5365254 5365251 +
ggaaacatctagtgaaccag

SEQ ID NO: 24786 - DNA, 20 bp, Artificial Sequence
  Synthetic oligonucleotide; AGG chr11 5365236 5365255 5365252 +
gaaacatctagtgaaccaga

SEQ ID NO: 24787 - DNA, 20 bp, Artificial Sequence
  Synthetic oligonucleotide; GGG chr11 5365237 5365256 5365253 +
aaacatctagtgaaccagaa

SEQ ID NO: 24788 - DNA, 20 bp, Artificial Sequence
  Synthetic oligonucleotide; TGG chr11 5365241 5365260 5365257 +
atctagtgaaccagaagggc

SEQ ID NO: 24789 - DNA, 20 bp, Artificial Sequence
  Synthetic oligonucleotide; TGG chr11 5365244 5365263 5365260 +
tagtgaaccagaagggctgg

SEQ ID NO: 24790 - DNA, 20 bp, Artificial Sequence
  Synthetic oligonucleotide; GAG chr11 5365248 5365267 5365264 +
gaaccagaagggctggtggt

SEQ ID NO: 24791 - DNA, 20 bp, Artificial Sequence
  Synthetic oligonucleotide; CAG chr11 5365253 5365272 5365269 +
agaagggctggtggtgagaa

SEQ ID NO: 24792 - DNA, 20 bp, Artificial Sequence
  Synthetic oligonucleotide; TAG chr11 5365262 5365281 5365278 +
ggtggtgagaacagtgttat

SEQ ID NO: 24793 - DNA, 20 bp, Artificial Sequence
  Synthetic oligonucleotide; TGG chr11 5365273 5365292 5365289 +
cagtgttattagaataccac

SEQ ID NO: 24794 - DNA, 20 bp, Artificial Sequence
  Synthetic oligonucleotide; CAG chr11 5365283 5365302 5365299 +
agaataccactggtgtttgc

SEQ ID NO: 24795 - DNA, 20 bp, Artificial Sequence
  Synthetic oligonucleotide; TGG chr11 5365289 5365308 5365305 +
ccactggtgtttgccagctg

SEQ ID NO: 24796 - DNA, 20 bp, Artificial Sequence
  Synthetic oligonucleotide; TGG chr11 5365298 5365317 5365314 +
tttgccagctgtggaaaaca

SEQ ID NO: 24797 - DNA, 20 bp, Artificial Sequence
  Synthetic oligonucleotide; GGG chr11 5365299 5365318 5365315 +
ttgccagctgtggaaaacat

SEQ ID NO: 24798 - DNA, 20 bp, Artificial Sequence
  Synthetic oligonucleotide; TAG chr11 5365304 5365323 5365320 +
agctgtggaaaacatgggta

SEQ ID NO: 24799 - DNA, 20 bp, Artificial Sequence
  Synthetic oligonucleotide; GAG chr11 5365306 5365325 5365322 +
ctgtggaaaacatgggtata

SEQ ID NO: 24800 - DNA, 20 bp, Artificial Sequence
  Synthetic oligonucleotide; AAG chr11 5365324 5365343 5365340 +
tagagcatacactgatgcca

SEQ ID NO: 24801 - DNA, 20 bp, Artificial Sequence
  Synthetic oligonucleotide; AGG chr11 5365325 5365344 5365341 +
agagcatacactgatgccaa

SEQ ID NO: 24802 - DNA, 20 bp, Artificial Sequence
  Synthetic oligonucleotide; TGG chr11 5365340 5365359 5365356 +
gccaaaggcaaaccaatgca

SEQ ID NO: 24803 - DNA, 20 bp, Artificial Sequence
  Synthetic oligonucleotide; TGG chr11 5365344 5365363 5365360 +
aaggcaaaccaatgcatggc

SEQ ID NO: 24804 - DNA, 20 bp, Artificial Sequence
  Synthetic oligonucleotide; CGG chr11 5365350 5365369 5365366 +
aaccaatgcatggctggtcc

SEQ ID NO: 24805 - DNA, 20 bp, Artificial Sequence
  Synthetic oligonucleotide; TGG chr11 5365355 5365374 5365371 +
atgcatggctggtcccggca

SEQ ID NO: 24806 - DNA, 20 bp, Artificial Sequence
  Synthetic oligonucleotide; AAG chr11 5365362 5365381 5365378 +
gctggtcccggcatggcaac

SEQ ID NO: 24807 - DNA, 20 bp, Artificial Sequence
  Synthetic oligonucleotide; TGG chr11 5365375 5365394 5365391 +
tggcaacaagtaaccaaata

SEQ ID NO: 24808 - DNA, 20 bp, Artificial Sequence
  Synthetic oligonucleotide; GGG chr11 5365376 5365395 5365392 +
ggcaacaagtaaccaaatat

SEQ ID NO: 24809 - DNA, 20 bp, Artificial Sequence
  Synthetic oligonucleotide; GAG chr11 5365381 5365400 5365397 +
caagtaaccaaatatgggat

SEQ ID NO: 24810 - DNA, 20 bp, Artificial Sequence
  Synthetic oligonucleotide; GAG chr11 5365383 5365402 5365399 +
agtaaccaaatatgggatga

SEQ ID NO: 24811 - DNA, 20 bp, Artificial Sequence
  Synthetic oligonucleotide; AAG chr11 5365388 5365407 5365404 +
ccaaatatgggatgagagac

SEQ ID NO: 24812 - DNA, 20 bp, Artificial Sequence
  Synthetic oligonucleotide; AAG chr11 5365394 5365413 5365410 +
atgggatgagagacaagatc

SEQ ID NO: 24813 - DNA, 20 bp, Artificial Sequence
  Synthetic oligonucleotide; TAG chr11 5365404 5365423 5365420 +
agacaagatcaagcatactg

SEQ ID NO: 24814 - DNA, 20 bp, Artificial Sequence
  Synthetic oligonucleotide; TGG chr11 5365416 5365435 5365432 +
gcatactgtagaaatcgctg

SEQ ID NO: 24815 - DNA, 20 bp, Artificial Sequence
  Synthetic oligonucleotide; GAG chr11 5365418 5365437 5365434 +
atactgtagaaatcgctgtg

SEQ ID NO: 24816 - DNA, 20 bp, Artificial Sequence
  Synthetic oligonucleotide; GAG chr11 5365420 5365439 5365436 +
actgtagaaatcgctgtgga

SEQ ID NO: 24817 - DNA, 20 bp, Artificial Sequence
  Synthetic oligonucleotide; TAG chr11 5365430 5365449 5365446 +
tcgctgtggagagatgcatt

SEQ ID NO: 24818 - DNA, 20 bp, Artificial Sequence
  Synthetic oligonucleotide; AAG chr11 5365438 5365457 5365454 +
gagagatgcatttagatgaa

SEQ ID NO: 24819 - DNA, 20 bp, Artificial Sequence
  Synthetic oligonucleotide; AGG chr11 5365439 5365458 5365455 +
agagatgcatttagatgaaa

SEQ ID NO: 24820 - DNA, 20 bp, Artificial Sequence
  Synthetic oligonucleotide; TGG chr11 5365453 5365472 5365469 +
atgaaaaggtaacccaattc

SEQ ID NO: 24821 - DNA, 20 bp, Artificial Sequence
  Synthetic oligonucleotide; CAG chr11 5365461 5365480 5365477 +
gtaacccaattctggtctgc

SEQ ID NO: 24822 - DNA, 20 bp, Artificial Sequence
  Synthetic oligonucleotide; CAG chr11 5365465 5365484 5365481 +
cccaattctggtctgccagt

SEQ ID NO: 24823 - DNA, 20 bp, Artificial Sequence
  Synthetic oligonucleotide; CAG chr11 5365490 5365509 5365506 +
accattttcctgtctatgca

SEQ ID NO: 24824 - DNA, 20 bp, Artificial Sequence
  Synthetic oligonucleotide; AGG chr11 5365491 5365510 5365507 +
ccattttcctgtctatgcac

SEQ ID NO: 24825 - DNA, 20 bp, Artificial Sequence
  Synthetic oligonucleotide; TAG chr11 5365495 5365514 5365511 +
tttcctgtctatgcacagga

SEQ ID NO: 24826 - DNA, 20 bp, Artificial Sequence
  Synthetic oligonucleotide; AGG chr11 5365496 5365515 5365512 +
ttcctgtctatgcacaggat

SEQ ID NO: 24827 - DNA, 20 bp, Artificial Sequence
  Synthetic oligonucleotide; TGG chr11 5365502 5365521 5365518 +
tctatgcacaggataggata

SEQ ID NO: 24828 - DNA, 20 bp, Artificial Sequence
  Synthetic oligonucleotide; AAG chr11 5365518 5365537 5365534 +
gatatggctgtactacctcg

SEQ ID NO: 24829 - DNA, 20 bp, Artificial Sequence
  Synthetic oligonucleotide; AAG chr11 5365531 5365550 5365547 +
tacctcgaagttttttcaca

SEQ ID NO: 24830 - DNA, 20 bp, Artificial Sequence
  Synthetic oligonucleotide; GAG chr11 5365559 5365578 5365575 +
tgatacacaaaaacattatc

SEQ ID NO: 24831 - DNA, 20 bp, Artificial Sequence
  Synthetic oligonucleotide; CGG chr11 5365575 5365594 5365591 +
tatcgagatgcacatgacat

SEQ ID NO: 24832 - DNA, 20 bp, Artificial Sequence
  Synthetic oligonucleotide; CAG chr11 5365588 5365607 5365604 +
atgacatcggtttgccatga

SEQ ID NO: 24833 - DNA, 20 bp, Artificial Sequence
  Synthetic oligonucleotide; AGG chr11 5365589 5365608 5365605 +
tgacatcggtttgccatgac

SEQ ID NO: 24834 - DNA, 20 bp, Artificial Sequence
  Synthetic oligonucleotide; GGG chr11 5365590 5365609 5365606 +
gacatcggtttgccatgaca

SEQ ID NO: 24835 - DNA, 20 bp, Artificial Sequence
  Synthetic oligonucleotide; TGG chr11 5365597 5365616 5365613 +
gtttgccatgacagggctct

SEQ ID NO: 24836 - DNA, 20 bp, Artificial Sequence
  Synthetic oligonucleotide; GAG chr11 5365641 5365660 5365657 +
aacacacctccaaatgtgtt

SEQ ID NO: 24837 - DNA, 20 bp, Artificial Sequence
  Synthetic oligonucleotide; AGG chr11 5365642 5365661 5365658 +
acacacctccaaatgtgttg

SEQ ID NO: 24838 - DNA, 20 bp, Artificial Sequence
  Synthetic oligonucleotide; GAG chr11 5365652 5365671 5365668 +
aaatgtgttgaggccctaat

SEQ ID NO: 24839 - DNA, 20 bp, Artificial Sequence
  Synthetic oligonucleotide; TAG chr11 5365720 5365739 5365736 +
tcctgtaattatttaaaaaa

SEQ ID NO: 24840 - DNA, 20 bp, Artificial Sequence
  Synthetic oligonucleotide; AAG chr11 5365727 5365746 5365743 +
attatttaaaaaatagatat

SEQ ID NO: 24841 - DNA, 20 bp, Artificial Sequence
  Synthetic oligonucleotide; GAG chr11 5365735 5365754 5365751 +
aaaaatagatataagctttt

SEQ ID NO: 24842 - DNA, 20 bp, Artificial Sequence
  Synthetic oligonucleotide; AGG chr11 5365736 5365755 5365752 +
aaaatagatataagcttttg

SEQ ID NO: 24843 - DNA, 20 bp, Artificial Sequence
  Synthetic oligonucleotide; GGG chr11 5365737 5365756 5365753 +
aaatagatataagcttttga

SEQ ID NO: 24844 - DNA, 20 bp, Artificial Sequence
  Synthetic oligonucleotide; CAG chr11 5365740 5365759 5365756 +
tagatataagcttttgaggg

SEQ ID NO: 24845 - DNA, 20 bp, Artificial Sequence
  Synthetic oligonucleotide; CAG chr11 5365754 5365773 5365770 +
tgagggcagatattataatc

SEQ ID NO: 24846 - DNA, 20 bp, Artificial Sequence
  Synthetic oligonucleotide; AGG chr11 5365755 5365774 5365771 +
gagggcagatattataatcc

SEQ ID NO: 24847 - DNA, 20 bp, Artificial Sequence
  Synthetic oligonucleotide; TAG chr11 5365783 5365802 5365799 +
cctccattacccacattgtc

SEQ ID NO: 24848 - DNA, 20 bp, Artificial Sequence
  Synthetic oligonucleotide; TAG chr11 5365793 5365812 5365809 +
ccacattgtctagcacatta

SEQ ID NO: 24849 - DNA, 20 bp, Artificial Sequence
  Synthetic oligonucleotide; TAG chr11 5365801 5365820 5365817 +
tctagcacattatagatgct

SEQ ID NO: 24850 - DNA, 20 bp, Artificial Sequence
  Synthetic oligonucleotide; TGG chr11 5365811 5365830 5365827 +
tatagatgcttagtatgtgc

SEQ ID NO: 24851 - DNA, 20 bp, Artificial Sequence
  Synthetic oligonucleotide; CAG chr11 5365822 5365841 5365838 +
agtatgtgctggcttgatga

SEQ ID NO: 24852 - DNA, 20 bp, Artificial Sequence
  Synthetic oligonucleotide; AGG chr11 5365823 5365842 5365839 +
gtatgtgctggcttgatgac

SEQ ID NO: 24853 - DNA, 20 bp, Artificial Sequence
  Synthetic oligonucleotide; AAG chr11 5365829 5365848 5365845 +
gctggcttgatgacaggatg

SEQ ID NO: 24854 - DNA, 20 bp, Artificial Sequence
  Synthetic oligonucleotide; AAG chr11 5365835 5365854 5365851 +
ttgatgacaggatgaagttt

SEQ ID NO: 24855 - DNA, 20 bp, Artificial Sequence
  Synthetic oligonucleotide; TAG chr11 5365852 5365871 5365868 +
tttaagttgctaaccattct

SEQ ID NO: 24856 - DNA, 20 bp, Artificial Sequence
  Synthetic oligonucleotide; GAG chr11 5365854 5365873 5365870 +
taagttgctaaccattctta

SEQ ID NO: 24857 - DNA, 20 bp, Artificial Sequence
  Synthetic oligonucleotide; AGG chr11 5365855 5365874 5365871 +
aagttgctaaccattcttag

SEQ ID NO: 24858 - DNA, 20 bp, Artificial Sequence
  Synthetic oligonucleotide; TGG chr11 5365874 5365893 5365890 +
gaggaactctgcttacctct

SEQ ID NO: 24859 - DNA, 20 bp, Artificial Sequence
  Synthetic oligonucleotide; GGG chr11 5365875 5365894 5365891 +
aggaactctgcttacctctt

SEQ ID NO: 24860 - DNA, 20 bp, Artificial Sequence
  Synthetic oligonucleotide; AAG chr11 5365883 5365902 5365899 +
tgcttacctcttgggttctg

SEQ ID NO: 24861 - DNA, 20 bp, Artificial Sequence
  Synthetic oligonucleotide; AGG chr11 5365884 5365903 5365900 +
gcttacctcttgggttctga

SEQ ID NO: 24862 - DNA, 20 bp, Artificial Sequence
  Synthetic oligonucleotide; GGG chr11 5365885 5365904 5365901 +
cttacctcttgggttctgaa

SEQ ID NO: 24863 - DNA, 20 bp, Artificial Sequence
  Synthetic oligonucleotide; CAG chr11 5365898 5365917 5365914 +
ttctgaagggtctgactgac

SEQ ID NO: 24864 - DNA, 20 bp, Artificial Sequence
  Synthetic oligonucleotide; GAG chr11 5365900 5365919 5365916 +
ctgaagggtctgactgacca

SEQ ID NO: 24865 - DNA, 20 bp, Artificial Sequence
  Synthetic oligonucleotide; GAG chr11 5365902 5365921 5365918 +
gaagggtctgactgaccaga

SEQ ID NO: 24866 - DNA, 20 bp, Artificial Sequence
  Synthetic oligonucleotide; AGG chr11 5365903 5365922 5365919 +
aagggtctgactgaccagag

SEQ ID NO: 24867 - DNA, 20 bp, Artificial Sequence
  Synthetic oligonucleotide; AAG chr11 5365910 5365929 5365926 +
tgactgaccagagaggcatg

SEQ ID NO: 24868 - DNA, 20 bp, Artificial Sequence
  Synthetic oligonucleotide; AGG chr11 5365911 5365930 5365927 +
gactgaccagagaggcatga

SEQ ID NO: 24869 - DNA, 20 bp, Artificial Sequence
  Synthetic oligonucleotide; GGG chr11 5365912 5365931 5365928 +
actgaccagagaggcatgaa

SEQ ID NO: 24870 - DNA, 20 bp, Artificial Sequence
  Synthetic oligonucleotide; GGG chr11 5365913 5365932 5365929 +
ctgaccagagaggcatgaag

SEQ ID NO: 24871 - DNA, 20 bp, Artificial Sequence
  Synthetic oligonucleotide; GGG chr11 5365914 5365933 5365930 +
tgaccagagaggcatgaagg

SEQ ID NO: 24872 - DNA, 20 bp, Artificial Sequence
  Synthetic oligonucleotide; CAG chr11 5365917 5365936 5365933 +
ccagagaggcatgaaggggg

SEQ ID NO: 24873 - DNA, 20 bp, Artificial Sequence
  Synthetic oligonucleotide; AGG chr11 5365918 5365937 5365934 +
cagagaggcatgaagggggc

SEQ ID NO: 24874 - DNA, 20 bp, Artificial Sequence
  Synthetic oligonucleotide; CAG chr11 5365923 5365942 5365939 +
aggcatgaagggggcaggct

SEQ ID NO: 24875 - DNA, 20 bp, Artificial Sequence
  Synthetic oligonucleotide; CAG chr11 5365935 5365954 5365951 +
ggcaggctcagcatgatcac

SEQ ID NO: 24876 - DNA, 20 bp, Artificial Sequence
  Synthetic oligonucleotide; GAG chr11 5365942 5365961 5365958 +
tcagcatgatcaccagcact

SEQ ID NO: 24877 - DNA, 20 bp, Artificial Sequence
  Synthetic oligonucleotide; AAG chr11 5365959 5365978 5365975 +
actgagaaccacacaaactg

SEQ ID NO: 24878 - DNA, 20 bp, Artificial Sequence
  Synthetic oligonucleotide; TAG chr11 5365968 5365987 5365984 +
cacacaaactgaagaactgc

SEQ ID NO: 24879 - DNA, 20 bp, Artificial Sequence
  Synthetic oligonucleotide; AGG chr11 5365969 5365988 5365985 +
acacaaactgaagaactgct

SEQ ID NO: 24880 - DNA, 20 bp, Artificial Sequence
  Synthetic oligonucleotide; TGG chr11 5365975 5365994 5365991 +
actgaagaactgctaggtgc

SEQ ID NO: 24881 - DNA, 20 bp, Artificial Sequence
  Synthetic oligonucleotide; TAG chr11 5365979 5365998 5365995 +
aagaactgctaggtgctggc

SEQ ID NO: 24882 - DNA, 20 bp, Artificial Sequence
  Synthetic oligonucleotide; TGG chr11 5365982 5366001 5365998 +
aactgctaggtgctggctag

SEQ ID NO: 24883 - DNA, 20 bp, Artificial Sequence
  Synthetic oligonucleotide; GGG chr11 5365983 5366002 5365999 +
actgctaggtgctggctagt

SEQ ID NO: 24884 - DNA, 20 bp, Artificial Sequence
  Synthetic oligonucleotide; GAG chr11 5365985 5366004 5366001 +
tgctaggtgctggctagtgg

SEQ ID NO: 24885 - DNA, 20 bp, Artificial Sequence
  Synthetic oligonucleotide; AAG chr11 5365992 5366011 5366008 +
tgctggctagtgggagactt

SEQ ID NO: 24886 - DNA, 20 bp, Artificial Sequence
  Synthetic oligonucleotide; TGG chr11 5366012 5366031 5366028 +
aagaccaaccaaccacccta

SEQ ID NO: 24887 - DNA, 20 bp, Artificial Sequence
  Synthetic oligonucleotide; GAG chr11 5366014 5366033 5366030 +
gaccaaccaaccaccctatg

SEQ ID NO: 24888 - DNA, 20 bp, Artificial Sequence
  Synthetic oligonucleotide; CAG chr11 5366017 5366036 5366033 +
caaccaaccaccctatggag

SEQ ID NO: 24889 - DNA, 20 bp, Artificial Sequence
  Synthetic oligonucleotide; CAG chr11 5366021 5366040 5366037 +
caaccaccctatggagcagc

SEQ ID NO: 24890 - DNA, 20 bp, Artificial Sequence
  Synthetic oligonucleotide; AGG chr11 5366022 5366041 5366038 +
aaccaccctatggagcagcc

SEQ ID NO: 24891 - DNA, 20 bp, Artificial Sequence
  Synthetic oligonucleotide; CAG chr11 5366029 5366048 5366045 +
ctatggagcagccaggtaat

SEQ ID NO: 24892 - DNA, 20 bp, Artificial Sequence
  Synthetic oligonucleotide; TGG chr11 5366038 5366057 5366054 +
agccaggtaatcagcatgtt

SEQ ID NO: 24893 - DNA, 20 bp, Artificial Sequence
  Synthetic oligonucleotide; GGG chr11 5366039 5366058 5366055 +
gccaggtaatcagcatgttt

SEQ ID NO: 24894 - DNA, 20 bp, Artificial Sequence
  Synthetic oligonucleotide; GGG chr11 5366040 5366059 5366056 +
ccaggtaatcagcatgtttg

SEQ ID NO: 24895 - DNA, 20 bp, Artificial Sequence
  Synthetic oligonucleotide; GGG chr11 5366041 5366060 5366057 +
caggtaatcagcatgtttgg

SEQ ID NO: 24896 - DNA, 20 bp, Artificial Sequence
  Synthetic oligonucleotide; TGG chr11 5366051 5366070 5366067 +
gcatgtttgggggctgttaa

SEQ ID NO: 24897 - DNA, 20 bp, Artificial Sequence
  Synthetic oligonucleotide; AAG chr11 5366054 5366073 5366070 +
tgtttgggggctgttaatgg

SEQ ID NO: 24898 - DNA, 20 bp, Artificial Sequence
  Synthetic oligonucleotide; GAG chr11 5366056 5366075 5366072 +
tttgggggctgttaatggaa

SEQ ID NO: 24899 - DNA, 20 bp, Artificial Sequence
  Synthetic oligonucleotide; GAG chr11 5366064 5366083 5366080 +
ctgttaatggaagagttgct

SEQ ID NO: 24900 - DNA, 20 bp, Artificial Sequence
  Synthetic oligonucleotide; AGG chr11 5366065 5366084 5366081 +
tgttaatggaagagttgctg

SEQ ID NO: 24901 - DNA, 20 bp, Artificial Sequence
  Synthetic oligonucleotide; GGG chr11 5366066 5366085 5366082 +
gttaatggaagagttgctga

SEQ ID NO: 24902 - DNA, 20 bp, Artificial Sequence
  Synthetic oligonucleotide; GGG chr11 5366067 5366086 5366083 +
ttaatggaagagttgctgag

SEQ ID NO: 24903 - DNA, 20 bp, Artificial Sequence
  Synthetic oligonucleotide; CAG chr11 5366084 5366103 5366100 +
gaggggtatgcttacttgtc

SEQ ID NO: 24904 - DNA, 20 bp, Artificial Sequence
  Synthetic oligonucleotide; TAG chr11 5366099 5366118 5366115 +
ttgtccagttgtgtgtgact

SEQ ID NO: 24905 - DNA, 20 bp, Artificial Sequence
  Synthetic oligonucleotide; GAG chr11 5366101 5366120 5366117 +
gtccagttgtgtgtgactta

SEQ ID NO: 24906 - DNA, 20 bp, Artificial Sequence
  Synthetic oligonucleotide; AGG chr11 5366102 5366121 5366118 +
tccagttgtgtgtgacttag

SEQ ID NO: 24907 - DNA, 20 bp, Artificial Sequence
  Synthetic oligonucleotide; CAG chr11 5366111 5366130 5366127 +
gtgtgacttagaggtgaacc

SEQ ID NO: 24908 - DNA, 20 bp, Artificial Sequence
  Synthetic oligonucleotide; TGG chr11 5366114 5366133 5366130 +
tgacttagaggtgaacccag

SEQ ID NO: 24909 - DNA, 20 bp, Artificial Sequence
  Synthetic oligonucleotide; GGG chr11 5366115 5366134 5366131 +
gacttagaggtgaacccagt

SEQ ID NO: 24910 - DNA, 20 bp, Artificial Sequence
  Synthetic oligonucleotide; AAG chr11 5366124 5366143 5366140 +
gtgaacccagtgggcaaaat

SEQ ID NO: 24911 - DNA, 20 bp, Artificial Sequence
  Synthetic oligonucleotide; CAG chr11 5366130 5366149 5366146 +
ccagtgggcaaaataagaaa

SEQ ID NO: 24912 - DNA, 20 bp, Artificial Sequence
  Synthetic oligonucleotide; AAG chr11 5366139 5366158 5366155 +
aaaataagaaacagtatgtg

SEQ ID NO: 24913 - DNA, 20 bp, Artificial Sequence
  Synthetic oligonucleotide; GAG chr11 5366141 5366160 5366157 +
aataagaaacagtatgtgaa

SEQ ID NO: 24914 - DNA, 20 bp, Artificial Sequence
  Synthetic oligonucleotide; AGG chr11 5366142 5366161 5366158 +
ataagaaacagtatgtgaag

SEQ ID NO: 24915 - DNA, 20 bp, Artificial Sequence
  Synthetic oligonucleotide; TAG chr11 5366146 5366165 5366162 +
gaaacagtatgtgaagagga

SEQ ID NO: 24916 - DNA, 20 bp, Artificial Sequence
  Synthetic oligonucleotide; GAG chr11 5366148 5366167 5366164 +
aacagtatgtgaagaggata

SEQ ID NO: 24917 - DNA, 20 bp, Artificial Sequence
  Synthetic oligonucleotide; AAG chr11 5366152 5366171 5366168 +
gtatgtgaagaggatagagc

SEQ ID NO: 24918 - DNA, 20 bp, Artificial Sequence
  Synthetic oligonucleotide; AAG chr11 5366159 5366178 5366175 +
aagaggatagagcaagcctt

SEQ ID NO: 24919 - DNA, 20 bp, Artificial Sequence
  Synthetic oligonucleotide; TAG chr11 5366162 5366181 5366178 +
aggatagagcaagccttaag

SEQ ID NO: 24920 - DNA, 20 bp, Artificial Sequence
  Synthetic oligonucleotide; AGG chr11 5366163 5366182 5366179 +
ggatagagcaagccttaagt

SEQ ID NO: 24921 - DNA, 20 bp, Artificial Sequence
  Synthetic oligonucleotide; AAG chr11 5366166 5366185 5366182 +
tagagcaagccttaagtagg

SEQ ID NO: 24922 - DNA, 20 bp, Artificial Sequence
  Synthetic oligonucleotide; AAG chr11 5366171 5366190 5366187 +
caagccttaagtaggaagtt

SEQ ID NO: 24923 - DNA, 20 bp, Artificial Sequence
  Synthetic oligonucleotide; AGG chr11 5366172 5366191 5366188 +
aagccttaagtaggaagtta

SEQ ID NO: 24924 - DNA, 20 bp, Artificial Sequence
  Synthetic oligonucleotide; GAG chr11 5366177 5366196 5366193 +
ttaagtaggaagttaaggat

SEQ ID NO: 24925 - DNA, 20 bp, Artificial Sequence
  Synthetic oligonucleotide; AGG chr11 5366178 5366197 5366194 +
taagtaggaagttaaggatg

SEQ ID NO: 24926 - DNA, 20 bp, Artificial Sequence
  Synthetic oligonucleotide; GGG chr11 5366179 5366198 5366195 +
aagtaggaagttaaggatga

SEQ ID NO: 24927 - DNA, 20 bp, Artificial Sequence
  Synthetic oligonucleotide; CAG chr11 5366185 5366204 5366201 +
gaagttaaggatgagggaaa

SEQ ID NO: 24928 - DNA, 20 bp, Artificial Sequence
  Synthetic oligonucleotide; AGG chr11 5366186 5366205 5366202 +
aagttaaggatgagggaaac

SEQ ID NO: 24929 - DNA, 20 bp, Artificial Sequence
  Synthetic oligonucleotide; AAG chr11 5366189 5366208 5366205 +
ttaaggatgagggaaacagg

SEQ ID NO: 24930 - DNA, 20 bp, Artificial Sequence
  Synthetic oligonucleotide; AGG chr11 5366190 5366209 5366206 +
taaggatgagggaaacagga

SEQ ID NO: 24931 - DNA, 20 bp, Artificial Sequence
  Synthetic oligonucleotide; CAG chr11 5366198 5366217 5366214 +
agggaaacaggaaggaaaat

SEQ ID NO: 24932 - DNA, 20 bp, Artificial Sequence
  Synthetic oligonucleotide; TAG chr11 5366201 5366220 5366217 +
gaaacaggaaggaaaatcag

SEQ ID NO: 24933 - DNA, 20 bp, Artificial Sequence
  Synthetic oligonucleotide; AGG chr11 5366202 5366221 5366218 +
aaacaggaaggaaaatcagt

SEQ ID NO: 24934 - DNA, 20 bp, Artificial Sequence
  Synthetic oligonucleotide; AAG chr11 5366206 5366225 5366222 +
aggaaggaaaatcagtagga

SEQ ID NO: 24935 - DNA, 20 bp, Artificial Sequence
  Synthetic oligonucleotide; TAG chr11 5366211 5366230 5366227 +
ggaaaatcagtaggaaagta

SEQ ID NO: 24936 - DNA, 20 bp, Artificial Sequence
  Synthetic oligonucleotide; AAG chr11 5366214 5366233 5366230 +
aaatcagtaggaaagtatag

SEQ ID NO: 24937 - DNA, 20 bp, Artificial Sequence
  Synthetic oligonucleotide; AAG chr11 5366220 5366239 5366236 +
gtaggaaagtatagaagaca

SEQ ID NO: 24938 - DNA, 20 bp, Artificial Sequence
  Synthetic oligonucleotide; AGG chr11 5366221 5366240 5366237 +
taggaaagtatagaagacaa

SEQ ID NO: 24939 - DNA, 20 bp, Artificial Sequence
  Synthetic oligonucleotide; GAG chr11 5366223 5366242 5366239 +
ggaaagtatagaagacaaag

SEQ ID NO: 24940 - DNA, 20 bp, Artificial Sequence
  Synthetic oligonucleotide; AAG chr11 5366227 5366246 5366243 +
agtatagaagacaaaggaga

SEQ ID NO: 24941 - DNA, 20 bp, Artificial Sequence
  Synthetic oligonucleotide; AGG chr11 5366228 5366247 5366244 +
gtatagaagacaaaggagaa

SEQ ID NO: 24942 - DNA, 20 bp, Artificial Sequence
  Synthetic oligonucleotide; GGG chr11 5366229 5366248 5366245 +
tatagaagacaaaggagaaa

SEQ ID NO: 24943 - DNA, 20 bp, Artificial Sequence
  Synthetic oligonucleotide; CAG chr11 5366233 5366252 5366249 +
gaagacaaaggagaaagggc

SEQ ID NO: 24944 - DNA, 20 bp, Artificial Sequence
  Synthetic oligonucleotide; GAG chr11 5366235 5366254 5366251 +
agacaaaggagaaagggcca

SEQ ID NO: 24945 - DNA, 20 bp, Artificial Sequence
  Synthetic oligonucleotide; CAG chr11 5366241 5366260 5366257 +
aggagaaagggccagagaaa

SEQ ID NO: 24946 - DNA, 20 bp, Artificial Sequence
  Synthetic oligonucleotide; AAG chr11 5366244 5366263 5366260 +
agaaagggccagagaaacag

SEQ ID NO: 24947 - DNA, 20 bp, Artificial Sequence
  Synthetic oligonucleotide; AGG chr11 5366245 5366264 5366261 +
gaaagggccagagaaacaga

SEQ ID NO: 24948 - DNA, 20 bp, Artificial Sequence
  Synthetic oligonucleotide; AAG chr11 5366248 5366267 5366264 +
agggccagagaaacagaagg

SEQ ID NO: 24949 - DNA, 20 bp, Artificial Sequence
  Synthetic oligonucleotide; AAG chr11 5366259 5366278 5366275 +
aacagaaggaagaatctgaa

SEQ ID NO: 24950 - DNA, 20 bp, Artificial Sequence
  Synthetic oligonucleotide; AGG chr11 5366260 5366279 5366276 +
acagaaggaagaatctgaaa

SEQ ID NO: 24951 - DNA, 20 bp, Artificial Sequence
  Synthetic oligonucleotide; GAG chr11 5366262 5366281 5366278 +
agaaggaagaatctgaaaag

SEQ ID NO: 24952 - DNA, 20 bp, Artificial Sequence
  Synthetic oligonucleotide; AAG chr11 5366268 5366287 5366284 +
aagaatctgaaaaggagctc

SEQ ID NO: 24953 - DNA, 20 bp, Artificial Sequence
  Synthetic oligonucleotide; AGG chr11 5366269 5366288 5366285 +
agaatctgaaaaggagctca

SEQ ID NO: 24954 - DNA, 20 bp, Artificial Sequence
  Synthetic oligonucleotide; GGG chr11 5366270 5366289 5366286 +
gaatctgaaaaggagctcaa

SEQ ID NO: 24955 - DNA, 20 bp, Artificial Sequence
  Synthetic oligonucleotide; AAG chr11 5366273 5366292 5366289 +
tctgaaaaggagctcaaggg

SEQ ID NO: 24956 - DNA, 20 bp, Artificial Sequence
  Synthetic oligonucleotide; AGG chr11 5366274 5366293 5366290 +
ctgaaaaggagctcaaggga

SEQ ID NO: 24957 - DNA, 20 bp, Artificial Sequence
  Synthetic oligonucleotide; TGG chr11 5366285 5366304 5366301 +
ctcaagggaaggttcctctg

SEQ ID NO: 24958 - DNA, 20 bp, Artificial Sequence
  Synthetic oligonucleotide; GGG chr11 5366286 5366305 5366302 +
tcaagggaaggttcctctgt

SEQ ID NO: 24959 - DNA, 20 bp, Artificial Sequence
  Synthetic oligonucleotide; TAG chr11 5366289 5366308 5366305 +
agggaaggttcctctgtggg

SEQ ID NO: 24960 - DNA, 20 bp, Artificial Sequence
  Synthetic oligonucleotide; AAG chr11 5366299 5366318 5366315 +
cctctgtgggtagcctgtta

SEQ ID NO: 24961 - DNA, 20 bp, Artificial Sequence
  Synthetic oligonucleotide; AAG chr11 5366304 5366323 5366320 +
gtgggtagcctgttaaagaa

SEQ ID NO: 24962 - DNA, 20 bp, Artificial Sequence
  Synthetic oligonucleotide; AGG chr11 5366305 5366324 5366321 +
tgggtagcctgttaaagaaa

SEQ ID NO: 24963 - DNA, 20 bp, Artificial Sequence
  Synthetic oligonucleotide; CAG chr11 5366316 5366335 5366332 +
ttaaagaaaaggctacatta

SEQ ID NO: 24964 - DNA, 20 bp, Artificial Sequence
  Synthetic oligonucleotide; CAG chr11 5366336 5366355 5366352 +
cagactcatgcctgtaatcc

SEQ ID NO: 24965 - DNA, 20 bp, Artificial Sequence
  Synthetic oligonucleotide; TGG chr11 5366344 5366363 5366360 +
tgcctgtaatcccagcactt

SEQ ID NO: 24966 - DNA, 20 bp, Artificial Sequence
  Synthetic oligonucleotide; GGG chr11 5366345 5366364 5366361 +
gcctgtaatcccagcacttt

SEQ ID NO: 24967 - DNA, 20 bp, Artificial Sequence
  Synthetic oligonucleotide; TGG chr11 5366348 5366367 5366364 +
tgtaatcccagcactttggg

SEQ ID NO: 24968 - DNA, 20 bp, Artificial Sequence
  Synthetic oligonucleotide; GAG chr11 5366353 5366372 5366369 +
tcccagcactttgggtggct

SEQ ID NO: 24969 - DNA, 20 bp, Artificial Sequence
  Synthetic oligonucleotide; AGG chr11 5366354 5366373 5366370 +
cccagcactttgggtggctg

SEQ ID NO: 24970 - DNA, 20 bp, Artificial Sequence
  Synthetic oligonucleotide; CAG chr11 5366357 5366376 5366373 +
agcactttgggtggctgagg

SEQ ID NO: 24971 - DNA, 20 bp, Artificial Sequence
  Synthetic oligonucleotide; AGG chr11 5366358 5366377 5366374 +
gcactttgggtggctgaggc

SEQ ID NO: 24972 - DNA, 20 bp, Artificial Sequence
  Synthetic oligonucleotide; GAG chr11 5366360 5366379 5366376 +
actttgggtggctgaggcag

SEQ ID NO: 24973 - DNA, 20 bp, Artificial Sequence
  Synthetic oligonucleotide; AGG chr11 5366361 5366380 5366377 +
ctttgggtggctgaggcagg

SEQ ID NO: 24974 - DNA, 20 bp, Artificial Sequence
  Synthetic oligonucleotide; GAG chr11 5366371 5366390 5366387 +
ctgaggcaggaggatcacct

SEQ ID NO: 24975 - DNA, 20 bp, Artificial Sequence
  Synthetic oligonucleotide; AGG chr11 5366372 5366391 5366388 +
tgaggcaggaggatcacctg

SEQ ID NO: 24976 - DNA, 20 bp, Artificial Sequence
  Synthetic oligonucleotide; GGG chr11 5366373 5366392 5366389 +
gaggcaggaggatcacctga

SEQ ID NO: 24977 - DNA, 20 bp, Artificial Sequence
  Synthetic oligonucleotide; AAG chr11 5366377 5366396 5366393 +
caggaggatcacctgagggc

SEQ ID NO: 24978 - DNA, 20 bp, Artificial Sequence
  Synthetic oligonucleotide; GAG chr11 5366379 5366398 5366395 +
ggaggatcacctgagggcaa

SEQ ID NO: 24979 - DNA, 20 bp, Artificial Sequence
  Synthetic oligonucleotide; GAG chr11 5366385 5366404 5366401 +
tcacctgagggcaagagttc

SEQ ID NO: 24980 - DNA, 20 bp, Artificial Sequence
  Synthetic oligonucleotide; CAG chr11 5366390 5366409 5366406 +
tgagggcaagagttcgagac

SEQ ID NO: 24981 - DNA, 20 bp, Artificial Sequence
  Synthetic oligonucleotide; TGG chr11 5366404 5366423 5366420 +
cgagaccagcctgaccaaca

SEQ ID NO: 24982 - DNA, 20 bp, Artificial Sequence
  Synthetic oligonucleotide; TAG chr11 5366441 5366460 5366457 +
taataaaaatacaaaaaaat

SEQ ID NO: 24983 - DNA, 20 bp, Artificial Sequence
  Synthetic oligonucleotide; CAG chr11 5366444 5366463 5366460 +
taaaaatacaaaaaaattag

SEQ ID NO: 24984 - DNA, 20 bp, Artificial Sequence
  Synthetic oligonucleotide; AGG chr11 5366445 5366464 5366461 +
aaaaatacaaaaaaattagc

SEQ ID NO: 24985 - DNA, 20 bp, Artificial Sequence
  Synthetic oligonucleotide; GGG chr11 5366446 5366465 5366462 +
aaaatacaaaaaaattagca

SEQ ID NO: 24986 - DNA, 20 bp, Artificial Sequence
  Synthetic oligonucleotide; TGG chr11 5366451 5366470 5366467 +
acaaaaaaattagcagggcc

SEQ ID NO: 24987 - DNA, 20 bp, Artificial Sequence
  Synthetic oligonucleotide; TGG chr11 5366454 5366473 5366470 +
aaaaaattagcagggcctgg

SEQ ID NO: 24988 - DNA, 20 bp, Artificial Sequence
  Synthetic oligonucleotide; CAG chr11 5366457 5366476 5366473 +
aaattagcagggcctggtgg

SEQ ID NO: 24989 - DNA, 20 bp, Artificial Sequence
  Synthetic oligonucleotide; CAG chr11 5366473 5366492 5366489 +
gtggcagatgcctgtaattg

SEQ ID NO: 24990 - DNA, 20 bp, Artificial Sequence
  Synthetic oligonucleotide; CAG chr11 5366481 5366500 5366497 +
tgcctgtaattgcagctaca

SEQ ID NO: 24991 - DNA, 20 bp, Artificial Sequence
  Synthetic oligonucleotide; AGG chr11 5366482 5366501 5366498 +
gcctgtaattgcagctacac

SEQ ID NO: 24992 - DNA, 20 bp, Artificial Sequence
  Synthetic oligonucleotide; GAG chr11 5366484 5366503 5366500 +
ctgtaattgcagctacacag

SEQ ID NO: 24993 - DNA, 20 bp, Artificial Sequence
  Synthetic oligonucleotide; AGG chr11 5366485 5366504 5366501 +
tgtaattgcagctacacagg

SEQ ID NO: 24994 - DNA, 20 bp, Artificial Sequence
  Synthetic oligonucleotide; GAG chr11 5366490 5366509 5366506 +
ttgcagctacacaggaggct

SEQ ID NO: 24995 - DNA, 20 bp, Artificial Sequence
  Synthetic oligonucleotide; AGG chr11 5366491 5366510 5366507 +
tgcagctacacaggaggctg

SEQ ID NO: 24996 - DNA, 20 bp, Artificial Sequence
  Synthetic oligonucleotide; TAG chr11 5366494 5366513 5366510 +
agctacacaggaggctgagg

SEQ ID NO: 24997 - DNA, 20 bp, Artificial Sequence
  Synthetic oligonucleotide; AGG chr11 5366495 5366514 5366511 +
gctacacaggaggctgaggt

SEQ ID NO: 24998 - DNA, 20 bp, Artificial Sequence
  Synthetic oligonucleotide; GAG chr11 5366497 5366516 5366513 +
tacacaggaggctgaggtag

SEQ ID NO: 24999 - DNA, 20 bp, Artificial Sequence
  Synthetic oligonucleotide; TGG chr11 5366513 5366532 5366529 +
gtaggagaatcgcttgaacc

SEQ ID NO: 25000 - DNA, 20 bp, Artificial Sequence
  Synthetic oligonucleotide; GGG chr11 5366514 5366533 5366530 +
taggagaatcgcttgaacct

SEQ ID NO: 25001 - DNA, 20 bp, Artificial Sequence
  Synthetic oligonucleotide; GAG chr11 5366516 5366535 5366532 +
ggagaatcgcttgaacctgg

SEQ ID NO: 25002 - DNA, 20 bp, Artificial Sequence
  Synthetic oligonucleotide; AGG chr11 5366517 5366536 5366533 +
gagaatcgcttgaacctggg

SEQ ID NO: 25003 - DNA, 20 bp, Artificial Sequence
  Synthetic oligonucleotide; CGG chr11 5366520 5366539 5366536 +
aatcgcttgaacctgggagg

SEQ ID NO: 25004 - DNA, 20 bp, Artificial Sequence
  Synthetic oligonucleotide; GAG chr11 5366522 5366541 5366538 +
tcgcttgaacctgggaggcg

SEQ ID NO: 25005 - DNA, 20 bp, Artificial Sequence
  Synthetic oligonucleotide; AGG chr11 5366523 5366542 5366539 +
cgcttgaacctgggaggcgg

SEQ ID NO: 25006 - DNA, 20 bp, Artificial Sequence
  Synthetic oligonucleotide; CAG chr11 5366529 5366548 5366545 +
aacctgggaggcggaggttg

SEQ ID NO: 25007 - DNA, 20 bp, Artificial Sequence
  Synthetic oligonucleotide; GAG chr11 5366533 5366552 5366549 +
tgggaggcggaggttgcagt

SEQ ID NO: 25008 - DNA, 20 bp, Artificial Sequence
  Synthetic oligonucleotide; GAG chr11 5366538 5366557 5366554 +
ggcggaggttgcagtgagcc

SEQ ID NO: 25009 - DNA, 20 bp, Artificial Sequence
  Synthetic oligonucleotide; CAG chr11 5366558 5366577 5366574 +
gagatcgcgccattgcactc

SEQ ID NO: 25010 - DNA, 20 bp, Artificial Sequence
  Synthetic oligonucleotide; CAG chr11 5366561 5366580 5366577 +
atcgcgccattgcactccag

SEQ ID NO: 25011 - DNA, 20 bp, Artificial Sequence
  Synthetic oligonucleotide; TGG chr11 5366566 5366585 5366582 +
gccattgcactccagcagcc

SEQ ID NO: 25012 - DNA, 20 bp, Artificial Sequence
  Synthetic oligonucleotide; AAG chr11 5366569 5366588 5366585 +
attgcactccagcagcctgg

SEQ ID NO: 25013 - DNA, 20 bp, Artificial Sequence
  Synthetic oligonucleotide; AGG chr11 5366570 5366589 5366586 +
ttgcactccagcagcctgga

SEQ ID NO: 25014 - DNA, 20 bp, Artificial Sequence
  Synthetic oligonucleotide; AAG chr11 5366576 5366595 5366592 +
tccagcagcctggaaggcaa

SEQ ID NO: 25015 - DNA, 20 bp, Artificial Sequence
  Synthetic oligonucleotide; AAG chr11 5366580 5366599 5366596 +
gcagcctggaaggcaaaagc

SEQ ID NO: 25016 - DNA, 20 bp, Artificial Sequence
  Synthetic oligonucleotide; GAG chr11 5366585 5366604 5366601 +
ctggaaggcaaaagcaagat

SEQ ID NO: 25017 - DNA, 20 bp, Artificial Sequence
  Synthetic oligonucleotide; AAG chr11 5366589 5366608 5366605 +
aaggcaaaagcaagatgaga

SEQ ID NO: 25018 - DNA, 20 bp, Artificial Sequence
  Synthetic oligonucleotide; TAG chr11 5366595 5366614 5366611 +
aaagcaagatgagaaagaaa

SEQ ID NO: 25019 - DNA, 20 bp, Artificial Sequence
  Synthetic oligonucleotide; GAG chr11 5366597 5366616 5366613 +
agcaagatgagaaagaaata

SEQ ID NO: 25020 - DNA, 20 bp, Artificial Sequence
  Synthetic oligonucleotide; AAG chr11 5366601 5366620 5366617 +
agatgagaaagaaatagaga

SEQ ID NO: 25021 - DNA, 20 bp, Artificial Sequence
  Synthetic oligonucleotide; GAG chr11 5366603 5366622 5366619 +
atgagaaagaaatagagaaa

SEQ ID NO: 25022 - DNA, 20 bp, Artificial Sequence
  Synthetic oligonucleotide; GAG chr11 5366605 5366624 5366621 +
gagaaagaaatagagaaaga

SEQ ID NO: 25023 - DNA, 20 bp, Artificial Sequence
  Synthetic oligonucleotide; GAG chr11 5366607 5366626 5366623 +
gaaagaaatagagaaagaga

SEQ ID NO: 25024 - DNA, 20 bp, Artificial Sequence
  Synthetic oligonucleotide; GAG chr11 5366609 5366628 5366625 +
aagaaatagagaaagagaga

SEQ ID NO: 25025 - DNA, 20 bp, Artificial Sequence
  Synthetic oligonucleotide; AGG chr11 5366610 5366629 5366626 +
agaaatagagaaagagagag

SEQ ID NO: 25026 - DNA, 20 bp, Artificial Sequence
  Synthetic oligonucleotide; TAG chr11 5366613 5366632 5366629 +
aatagagaaagagagagagg

SEQ ID NO: 25027 - DNA, 20 bp, Artificial Sequence
  Synthetic oligonucleotide; AGG chr11 5366614 5366633 5366630 +
atagagaaagagagagaggt

SEQ ID NO: 25028 - DNA, 20 bp, Artificial Sequence
  Synthetic oligonucleotide; GGG chr11 5366615 5366634 5366631 +
tagagaaagagagagaggta

SEQ ID NO: 25029 - DNA, 20 bp, Artificial Sequence
  Synthetic oligonucleotide; GAG chr11 5366617 5366636 5366633 +
gagaaagagagagaggtagg

SEQ ID NO: 25030 - DNA, 20 bp, Artificial Sequence
  Synthetic oligonucleotide; AGG chr11 5366618 5366637 5366634 +
agaaagagagagaggtaggg

SEQ ID NO: 25031 - DNA, 20 bp, Artificial Sequence
  Synthetic oligonucleotide; GGG chr11 5366619 5366638 5366635 +
gaaagagagagaggtaggga

SEQ ID NO: 25032 - DNA, 20 bp, Artificial Sequence
  Synthetic oligonucleotide; GAG chr11 5366621 5366640 5366637 +
aagagagagaggtagggagg

SEQ ID NO: 25033 - DNA, 20 bp, Artificial Sequence
  Synthetic oligonucleotide; AGG chr11 5366622 5366641 5366638 +
agagagagaggtagggaggg

SEQ ID NO: 25034 - DNA, 20 bp, Artificial Sequence
  Synthetic oligonucleotide; AAG chr11 5366625 5366644 5366641 +
gagagaggtagggagggagg

SEQ ID NO: 25035 - DNA, 20 bp, Artificial Sequence
  Synthetic oligonucleotide; AGG chr11 5366626 5366645 5366642 +
agagaggtagggagggagga

SEQ ID NO: 25036 - DNA, 20 bp, Artificial Sequence
  Synthetic oligonucleotide; AAG chr11 5366629 5366648 5366645 +
gaggtagggagggaggaagg

SEQ ID NO: 25037 - DNA, 20 bp, Artificial Sequence
  Synthetic oligonucleotide; AGG chr11 5366630 5366649 5366646 +
aggtagggagggaggaagga

SEQ ID NO: 25038 - DNA, 20 bp, Artificial Sequence
  Synthetic oligonucleotide; GGG chr11 5366631 5366650 5366647 +
ggtagggagggaggaaggaa

SEQ ID NO: 25039 - DNA, 20 bp, Artificial Sequence
  Synthetic oligonucleotide; AAG chr11 5366634 5366653 5366650 +
agggagggaggaaggaaggg

SEQ ID NO: 25040 - DNA, 20 bp, Artificial Sequence
  Synthetic oligonucleotide; AGG chr11 5366635 5366654 5366651 +
gggagggaggaaggaaggga

SEQ ID NO: 25041 - DNA, 20 bp, Artificial Sequence
  Synthetic oligonucleotide; AAG chr11 5366639 5366658 5366655 +
gggaggaaggaagggaagga

SEQ ID NO: 25042 - DNA, 20 bp, Artificial Sequence
  Synthetic oligonucleotide; AGG chr11 5366640 5366659 5366656 +
ggaggaaggaagggaaggaa

SEQ ID NO: 25043 - DNA, 20 bp, Artificial Sequence
  Synthetic oligonucleotide; AAG chr11 5366643 5366662 5366659 +
ggaaggaagggaaggaaagg

SEQ ID NO: 25044 - DNA, 20 bp, Artificial Sequence
  Synthetic oligonucleotide; AGG chr11 5366644 5366663 5366660 +
gaaggaagggaaggaaagga

SEQ ID NO: 25045 - DNA, 20 bp, Artificial Sequence
  Synthetic oligonucleotide; AAG chr11 5366647 5366666 5366663 +
ggaagggaaggaaaggaagg

SEQ ID NO: 25046 - DNA, 20 bp, Artificial Sequence
  Synthetic oligonucleotide; GAG chr11 5366649 5366668 5366665 +
aagggaaggaaaggaaggaa

SEQ ID NO: 25047 - DNA, 20 bp, Artificial Sequence
  Synthetic oligonucleotide; AAG chr11 5366652 5366671 5366668 +
ggaaggaaaggaaggaagag

SEQ ID NO: 25048 - DNA, 20 bp, Artificial Sequence
  Synthetic oligonucleotide; AAG chr11 5366655 5366674 5366671 +
aggaaaggaaggaagagaag

SEQ ID NO: 25049 - DNA, 20 bp, Artificial Sequence
  Synthetic oligonucleotide; AAG chr11 5366658 5366677 5366674 +
aaaggaaggaagagaagaag

SEQ ID NO: 25050 - DNA, 20 bp, Artificial Sequence
  Synthetic oligonucleotide; AAG chr11 5366661 5366680 5366677 +
ggaaggaagagaagaagaag

SEQ ID NO: 25051 - DNA, 20 bp, Artificial Sequence
  Synthetic oligonucleotide; AAG chr11 5366664 5366683 5366680 +
aggaagagaagaagaagaag

SEQ ID NO: 25052 - DNA, 20 bp, Artificial Sequence
  Synthetic oligonucleotide; AGG chr11 5366665 5366684 5366681 +
ggaagagaagaagaagaaga

SEQ ID NO: 25053 - DNA, 20 bp, Artificial Sequence
  Synthetic oligonucleotide; GAG chr11 5366667 5366686 5366683 +
aagagaagaagaagaagaag

SEQ ID NO: 25054 - DNA, 20 bp, Artificial Sequence
  Synthetic oligonucleotide; AAG chr11 5366670 5366689 5366686 +
agaagaagaagaagaaggag

SEQ ID NO: 25055 - DNA, 20 bp, Artificial Sequence
  Synthetic oligonucleotide; AGG chr11 5366671 5366690 5366687 +
gaagaagaagaagaaggaga

SEQ ID NO: 25056 - DNA, 20 bp, Artificial Sequence
  Synthetic oligonucleotide; GAG chr11 5366673 5366692 5366689 +
agaagaagaagaaggagaag

SEQ ID NO: 25057 - DNA, 20 bp, Artificial Sequence
  Synthetic oligonucleotide; AAG chr11 5366676 5366695 5366692 +
agaagaagaaggagaaggag

SEQ ID NO: 25058 - DNA, 20 bp, Artificial Sequence
  Synthetic oligonucleotide; AAG chr11 5366682 5366701 5366698 +
agaaggagaaggagaagaaa

SEQ ID NO: 25059 - DNA, 20 bp, Artificial Sequence
  Synthetic oligonucleotide; TAG chr11 5366685 5366704 5366701 +
aggagaaggagaagaaaaag

SEQ ID NO: 25060 - DNA, 20 bp, Artificial Sequence
  Synthetic oligonucleotide; GAG chr11 5366687 5366706 5366703 +
gagaaggagaagaaaaagta

SEQ ID NO: 25061 - DNA, 20 bp, Artificial Sequence
  Synthetic oligonucleotide; AGG chr11 5366688 5366707 5366704 +
agaaggagaagaaaaagtag

SEQ ID NO: 25062 - DNA, 20 bp, Artificial Sequence
  Synthetic oligonucleotide; GAG chr11 5366690 5366709 5366706 +
aaggagaagaaaaagtagag

SEQ ID NO: 25063 - DNA, 20 bp, Artificial Sequence
  Synthetic oligonucleotide; AGG chr11 5366691 5366710 5366707 +
aggagaagaaaaagtagagg

SEQ ID NO: 25064 - DNA, 20 bp, Artificial Sequence
  Synthetic oligonucleotide; GAG chr11 5366693 5366712 5366709 +
gagaagaaaaagtagaggag

SEQ ID NO: 25065 - DNA, 20 bp, Artificial Sequence
  Synthetic oligonucleotide; AGG chr11 5366694 5366713 5366710 +
agaagaaaaagtagaggagg

SEQ ID NO: 25066 - DNA, 20 bp, Artificial Sequence
  Synthetic oligonucleotide; AAG chr11 5366698 5366717 5366714 +
gaaaaagtagaggaggagga

SEQ ID NO: 25067 - DNA, 20 bp, Artificial Sequence
  Synthetic oligonucleotide; AGG chr11 5366699 5366718 5366715 +
aaaaagtagaggaggaggaa

SEQ ID NO: 25068 - DNA, 20 bp, Artificial Sequence
  Synthetic oligonucleotide; AAG chr11 5366703 5366722 5366719 +
agtagaggaggaggaaagga

SEQ ID NO: 25069 - DNA, 20 bp, Artificial Sequence
  Synthetic oligonucleotide; AGG chr11 5366704 5366723 5366720 +
gtagaggaggaggaaaggaa

SEQ ID NO: 25070 - DNA, 20 bp, Artificial Sequence
  Synthetic oligonucleotide; AAG chr11 5366708 5366727 5366724 +
aggaggaggaaaggaaagga

SEQ ID NO: 25071 - DNA, 20 bp, Artificial Sequence
  Synthetic oligonucleotide; AAG chr11 5366711 5366730 5366727 +
aggaggaaaggaaaggaaag

SEQ ID NO: 25072 - DNA, 20 bp, Artificial Sequence
  Synthetic oligonucleotide; AGG chr11 5366712 5366731 5366728 +
ggaggaaaggaaaggaaaga

SEQ ID NO: 25073 - DNA, 20 bp, Artificial Sequence
  Synthetic oligonucleotide; AAG chr11 5366715 5366734 5366731 +
ggaaaggaaaggaaagaagg

SEQ ID NO: 25074 - DNA, 20 bp, Artificial Sequence
  Synthetic oligonucleotide; AGG chr11 5366716 5366735 5366732 +
gaaaggaaaggaaagaagga

SEQ ID NO: 25075 - DNA, 20 bp, Artificial Sequence
  Synthetic oligonucleotide; AAG chr11 5366719 5366738 5366735 +
aggaaaggaaagaaggaagg

SEQ ID NO: 25076 - DNA, 20 bp, Artificial Sequence
  Synthetic oligonucleotide; AGG chr11 5366720 5366739 5366736 +
ggaaaggaaagaaggaagga

SEQ ID NO: 25077 - DNA, 20 bp, Artificial Sequence
  Synthetic oligonucleotide; CAG chr11 5366727 5366746 5366743 +
aaagaaggaaggaaggaaat

SEQ ID NO: 25078 - DNA, 20 bp, Artificial Sequence
  Synthetic oligonucleotide; AGG chr11 5366728 5366747 5366744 +
aagaaggaaggaaggaaatc

SEQ ID NO: 25079 - DNA, 20 bp, Artificial Sequence
  Synthetic oligonucleotide; GGG chr11 5366729 5366748 5366745 +
agaaggaaggaaggaaatca

SEQ ID NO: 25080 - DNA, 20 bp, Artificial Sequence
  Synthetic oligonucleotide; GAG chr11 5366741 5366760 5366757 +
ggaaatcagggtattcactt

SEQ ID NO: 25081 - DNA, 20 bp, Artificial Sequence
  Synthetic oligonucleotide; AAG chr11 5366749 5366768 5366765 +
gggtattcacttgagattca

SEQ ID NO: 25082 - DNA, 20 bp, Artificial Sequence
  Synthetic oligonucleotide; TAG chr11 5366756 5366775 5366772 +
cacttgagattcaaagtctt

SEQ ID NO: 25083 - DNA, 20 bp, Artificial Sequence
  Synthetic oligonucleotide; TGG chr11 5366775 5366794 5366791 +
ttagaataaaaattaaaatt

SEQ ID NO: 25084 - DNA, 20 bp, Artificial Sequence
  Synthetic oligonucleotide; GGG chr11 5366776 5366795 5366792 +
tagaataaaaattaaaattt

SEQ ID NO: 25085 - DNA, 20 bp, Artificial Sequence
  Synthetic oligonucleotide; AAG chr11 5366784 5366803 5366800 +
aaattaaaatttgggaaaat

SEQ ID NO: 25086 - DNA, 20 bp, Artificial Sequence
  Synthetic oligonucleotide; AAG chr11 5366814 5366833 5366830 +
tgatgactaattccaatccc

SEQ ID NO: 25087 - DNA, 20 bp, Artificial Sequence
  Synthetic oligonucleotide; CGG chr11 5366819 5366838 5366835 +
actaattccaatcccaagca

SEQ ID NO: 25088 - DNA, 20 bp, Artificial Sequence
  Synthetic oligonucleotide; GGG chr11 5366820 5366839 5366836 +
ctaattccaatcccaagcac

SEQ ID NO: 25089 - DNA, 20 bp, Artificial Sequence
  Synthetic oligonucleotide; CAG chr11 5366836 5366855 5366852 +
gcacgggtctctgtgcaatg

SEQ ID NO: 25090 - DNA, 20 bp, Artificial Sequence
  Synthetic oligonucleotide; AGG chr11 5366837 5366856 5366853 +
cacgggtctctgtgcaatgc

SEQ ID NO: 25091 - DNA, 20 bp, Artificial Sequence
  Synthetic oligonucleotide; TGG chr11 5366842 5366861 5366858 +
gtctctgtgcaatgcaggac

SEQ ID NO: 25092 - DNA, 20 bp, Artificial Sequence
  Synthetic oligonucleotide; GGG chr11 5366843 5366862 5366859 +
tctctgtgcaatgcaggact

SEQ ID NO: 25093 - DNA, 20 bp, Artificial Sequence
  Synthetic oligonucleotide; AAG chr11 5366846 5366865 5366862 +
ctgtgcaatgcaggactggg

SEQ ID NO: 25094 - DNA, 20 bp, Artificial Sequence
  Synthetic oligonucleotide; AGG chr11 5366847 5366866 5366863 +
tgtgcaatgcaggactggga

SEQ ID NO: 25095 - DNA, 20 bp, Artificial Sequence
  Synthetic oligonucleotide; TAG chr11 5366852 5366871 5366868 +
aatgcaggactgggaaggtt

SEQ ID NO: 25096 - DNA, 20 bp, Artificial Sequence
  Synthetic oligonucleotide; AGG chr11 5366853 5366872 5366869 +
atgcaggactgggaaggttt

SEQ ID NO: 25097 - DNA, 20 bp, Artificial Sequence
  Synthetic oligonucleotide; CAG chr11 5366856 5366875 5366872 +
caggactgggaaggtttagg

SEQ ID NO: 25098 - DNA, 20 bp, Artificial Sequence
  Synthetic oligonucleotide; AGG chr11 5366857 5366876 5366873 +
aggactgggaaggtttaggc

SEQ ID NO: 25099 - DNA, 20 bp, Artificial Sequence
  Synthetic oligonucleotide; GGG chr11 5366858 5366877 5366874 +
ggactgggaaggtttaggca

SEQ ID NO: 25100 - DNA, 20 bp, Artificial Sequence
  Synthetic oligonucleotide; GGG chr11 5366859 5366878 5366875 +
gactgggaaggtttaggcag

SEQ ID NO: 25101 - DNA, 20 bp, Artificial Sequence
  Synthetic oligonucleotide; GAG chr11 5366877 5366896 5366893 +
aggggtgctatctgattcat

SEQ ID NO: 25102 - DNA, 20 bp, Artificial Sequence
  Synthetic oligonucleotide; CAG chr11 5366884 5366903 5366900 +
ctatctgattcatgagacaa

SEQ ID NO: 25103 - DNA, 20 bp, Artificial Sequence
  Synthetic oligonucleotide; AGG chr11 5366885 5366904 5366901 +
tatctgattcatgagacaac

SEQ ID NO: 25104 - DNA, 20 bp, Artificial Sequence
  Synthetic oligonucleotide; AAG chr11 5366892 5366911 5366908 +
ttcatgagacaacaggcaca

SEQ ID NO: 25105 - DNA, 20 bp, Artificial Sequence
  Synthetic oligonucleotide; TAG chr11 5366898 5366917 5366914 +
agacaacaggcacaaagttt

SEQ ID NO: 25106 - DNA, 20 bp, Artificial Sequence
  Synthetic oligonucleotide; TGG chr11 5366909 5366928 5366925 +
acaaagttttagtccctgcc

SEQ ID NO: 25107 - DNA, 20 bp, Artificial Sequence
  Synthetic oligonucleotide; TGG chr11 5366915 5366934 5366931 +
ttttagtccctgcctggact

SEQ ID NO: 25108 - DNA, 20 bp, Artificial Sequence
  Synthetic oligonucleotide; GAG chr11 5366929 5366948 5366945 +
tggacttggtgtcatctctt

SEQ ID NO: 25109 - DNA, 20 bp, Artificial Sequence
  Synthetic oligonucleotide; TGG chr11 5366943 5366962 5366959 +
tctcttgagcacatgcctaa

SEQ ID NO: 25110 - DNA, 20 bp, Artificial Sequence
  Synthetic oligonucleotide; AAG chr11 5366967 5366986 5366983 +
ctcctaacattcccctccca

SEQ ID NO: 25111 - DNA, 20 bp, Artificial Sequence
  Synthetic oligonucleotide; CAG chr11 5366996 5367015 5367012 +
aatgcttccacctcccgctg

SEQ ID NO: 25112 - DNA, 20 bp, Artificial Sequence
  Synthetic oligonucleotide; CAG chr11 5367008 5367027 5367024 +
tcccgctgcagtccatgaac

SEQ ID NO: 25113 - DNA, 20 bp, Artificial Sequence
  Synthetic oligonucleotide; AGG chr11 5367009 5367028 5367025 +
cccgctgcagtccatgaacc

SEQ ID NO: 25114 - DNA, 20 bp, Artificial Sequence
  Synthetic oligonucleotide; TAG chr11 5367023 5367042 5367039 +
tgaaccaggataaaattctc

SEQ ID NO: 25115 - DNA, 20 bp, Artificial Sequence
  Synthetic oligonucleotide; CAG chr11 5367026 5367045 5367042 +
accaggataaaattctctag

SEQ ID NO: 25116 - DNA, 20 bp, Artificial Sequence
  Synthetic oligonucleotide; CAG chr11 5367029 5367048 5367045 +
aggataaaattctctagcag

SEQ ID NO: 25117 - DNA, 20 bp, Artificial Sequence
  Synthetic oligonucleotide; GAG chr11 5367031 5367050 5367047 +
gataaaattctctagcagca

SEQ ID NO: 25118 - DNA, 20 bp, Artificial Sequence
  Synthetic oligonucleotide; AAG chr11 5367038 5367057 5367054 +
ttctctagcagcagagacca

SEQ ID NO: 25119 - DNA, 20 bp, Artificial Sequence
  Synthetic oligonucleotide; AAG chr11 5367051 5367070 5367067 +
gagaccaaagacattctctc

SEQ ID NO: 25120 - DNA, 20 bp, Artificial Sequence
  Synthetic oligonucleotide; CAG chr11 5367057 5367076 5367073 +
aaagacattctctcaagtct

SEQ ID NO: 25121 - DNA, 20 bp, Artificial Sequence
  Synthetic oligonucleotide; AGG chr11 5367058 5367077 5367074 +
aagacattctctcaagtctc

SEQ ID NO: 25122 - DNA, 20 bp, Artificial Sequence
  Synthetic oligonucleotide; TGG chr11 5367065 5367084 5367081 +
tctctcaagtctcaggaatg

SEQ ID NO: 25123 - DNA, 20 bp, Artificial Sequence
  Synthetic oligonucleotide; AAG chr11 5367073 5367092 5367089 +
gtctcaggaatgtggttctg

SEQ ID NO: 25124 - DNA, 20 bp, Artificial Sequence
  Synthetic oligonucleotide; AGG chr11 5367074 5367093 5367090 +
tctcaggaatgtggttctga

SEQ ID NO: 25125 - DNA, 20 bp, Artificial Sequence
  Synthetic oligonucleotide; AAG chr11 5367077 5367096 5367093 +
caggaatgtggttctgaagg

SEQ ID NO: 25126 - DNA, 20 bp, Artificial Sequence
  Synthetic oligonucleotide; GAG chr11 5367079 5367098 5367095 +
ggaatgtggttctgaaggaa

SEQ ID NO: 25127 - DNA, 20 bp, Artificial Sequence
  Synthetic oligonucleotide; AAG chr11 5367082 5367101 5367098 +
atgtggttctgaaggaagag

SEQ ID NO: 25128 - DNA, 20 bp, Artificial Sequence
  Synthetic oligonucleotide; AAG chr11 5367115 5367134 5367131 +
catacacatgccaccttgca

SEQ ID NO: 25129 - DNA, 20 bp, Artificial Sequence
  Synthetic oligonucleotide; TAG chr11 5367123 5367142 5367139 +
tgccaccttgcaaagccact

SEQ ID NO: 25130 - DNA, 20 bp, Artificial Sequence
  Synthetic oligonucleotide; CAG chr11 5367131 5367150 5367147 +
tgcaaagccacttagtgaca

SEQ ID NO: 25131 - DNA, 20 bp, Artificial Sequence
  Synthetic oligonucleotide; GAG chr11 5367133 5367152 5367149 +
caaagccacttagtgacaca

SEQ ID NO: 25132 - DNA, 20 bp, Artificial Sequence
  Synthetic oligonucleotide; TAG chr11 5367139 5367158 5367155 +
cacttagtgacacagagttt

SEQ ID NO: 25133 - DNA, 20 bp, Artificial Sequence
  Synthetic oligonucleotide; TGG chr11 5367158 5367177 5367174 +
ttagttatttcattgtgaac

SEQ ID NO: 25134 - DNA, 20 bp, Artificial Sequence
  Synthetic oligonucleotide; AAG chr11 5367177 5367196 5367193 +
ctggaataaaatcattttga

SEQ ID NO: 25135 - DNA, 20 bp, Artificial Sequence
  Synthetic oligonucleotide; AGG chr11 5367178 5367197 5367194 +
tggaataaaatcattttgaa

SEQ ID NO: 25136 - DNA, 20 bp, Artificial Sequence
  Synthetic oligonucleotide; GAG chr11 5367180 5367199 5367196 +
gaataaaatcattttgaaag

SEQ ID NO: 25137 - DNA, 20 bp, Artificial Sequence
  Synthetic oligonucleotide; AAG chr11 5367190 5367209 5367206 +
attttgaaaggagatttttg

SEQ ID NO: 25138 - DNA, 20 bp, Artificial Sequence
  Synthetic oligonucleotide; AAG chr11 5367197 5367216 5367213 +
aaggagatttttgaagttaa

SEQ ID NO: 25139 - DNA, 20 bp, Artificial Sequence
  Synthetic oligonucleotide; CAG chr11 5367206 5367225 5367222 +
tttgaagttaaaagcattgc

SEQ ID NO: 25140 - DNA, 20 bp, Artificial Sequence
  Synthetic oligonucleotide; AAG chr11 5367210 5367229 5367226 +
aagttaaaagcattgccaga

SEQ ID NO: 25141 - DNA, 20 bp, Artificial Sequence
  Synthetic oligonucleotide; AGG chr11 5367211 5367230 5367227 +
agttaaaagcattgccagaa

SEQ ID NO: 25142 - DNA, 20 bp, Artificial Sequence
  Synthetic oligonucleotide; GAG chr11 5367213 5367232 5367229 +
ttaaaagcattgccagaaag

SEQ ID NO: 25143 - DNA, 20 bp, Artificial Sequence
  Synthetic oligonucleotide; CAG chr11 5367224 5367243 5367240 +
gccagaaaggagtcacaatc

SEQ ID NO: 25144 - DNA, 20 bp, Artificial Sequence
  Synthetic oligonucleotide; AAG chr11 5367232 5367251 5367248 +
ggagtcacaatccagaccct

SEQ ID NO: 25145 - DNA, 20 bp, Artificial Sequence
  Synthetic oligonucleotide; GAG chr11 5367234 5367253 5367250 +
agtcacaatccagaccctaa

SEQ ID NO: 25146 - DNA, 20 bp, Artificial Sequence
  Synthetic oligonucleotide; GAG chr11 5367236 5367255 5367252 +
tcacaatccagaccctaaga

SEQ ID NO: 25147 - DNA, 20 bp, Artificial Sequence
  Synthetic oligonucleotide; AGG chr11 5367237 5367256 5367253 +
cacaatccagaccctaagag

SEQ ID NO: 25148 - DNA, 20 bp, Artificial Sequence
  Synthetic oligonucleotide; GGG chr11 5367238 5367257 5367254 +
acaatccagaccctaagaga

SEQ ID NO: 25149 - DNA, 20 bp, Artificial Sequence
  Synthetic oligonucleotide; TGG chr11 5367245 5367264 5367261 +
agaccctaagagagggttct

SEQ ID NO: 25150 - DNA, 20 bp, Artificial Sequence
  Synthetic oligonucleotide; AAG chr11 5367259 5367278 5367275 +
ggttcttggatttcgtgccc

SEQ ID NO: 25151 - DNA, 20 bp, Artificial Sequence
  Synthetic oligonucleotide; AAG chr11 5367263 5367282 5367279 +
cttggatttcgtgcccaaga

SEQ ID NO: 25152 - DNA, 20 bp, Artificial Sequence
  Synthetic oligonucleotide; TGG chr11 5367270 5367289 5367286 +
ttcgtgcccaagaaagaatt

SEQ ID NO: 25153 - DNA, 20 bp, Artificial Sequence
  Synthetic oligonucleotide; GGG chr11 5367271 5367290 5367287 +
tcgtgcccaagaaagaattt

SEQ ID NO: 25154 - DNA, 20 bp, Artificial Sequence
  Synthetic oligonucleotide; GGG chr11 5367272 5367291 5367288 +
cgtgcccaagaaagaatttg

SEQ ID NO: 25155 - DNA, 20 bp, Artificial Sequence
  Synthetic oligonucleotide; CAG chr11 5367285 5367304 5367301 +
gaatttggggcaaatccata

SEQ ID NO: 25156 - DNA, 20 bp, Artificial Sequence
  Synthetic oligonucleotide; AAG chr11 5367290 5367309 5367306 +
tggggcaaatccatacagaa

SEQ ID NO: 25157 - DNA, 20 bp, Artificial Sequence
  Synthetic oligonucleotide; AAG chr11 5367296 5367315 5367312 +
aaatccatacagaaaagtga

SEQ ID NO: 25158 - DNA, 20 bp, Artificial Sequence
  Synthetic oligonucleotide; AAG chr11 5367300 5367319 5367316 +
ccatacagaaaagtgaaagc

SEQ ID NO: 25159 - DNA, 20 bp, Artificial Sequence
  Synthetic oligonucleotide; AAG chr11 5367309 5367328 5367325 +
aaagtgaaagcaagttaatt

SEQ ID NO: 25160 - DNA, 20 bp, Artificial Sequence
  Synthetic oligonucleotide; AAG chr11 5367313 5367332 5367329 +
tgaaagcaagttaattaaga

SEQ ID NO: 25161 - DNA, 20 bp, Artificial Sequence
  Synthetic oligonucleotide; AAG chr11 5367318 5367337 5367334 +
gcaagttaattaagaaagta

SEQ ID NO: 25162 - DNA, 20 bp, Artificial Sequence
  Synthetic oligonucleotide; AGG chr11 5367319 5367338 5367335 +
caagttaattaagaaagtaa

SEQ ID NO: 25163 - DNA, 20 bp, Artificial Sequence
  Synthetic oligonucleotide; GAG chr11 5367321 5367340 5367337 +
agttaattaagaaagtaaag

SEQ ID NO: 25164 - DNA, 20 bp, Artificial Sequence
  Synthetic oligonucleotide; TGG chr11 5367332 5367351 5367348 +
aaagtaaaggagtaaaataa

SEQ ID NO: 25165 - DNA, 20 bp, Artificial Sequence
  Synthetic oligonucleotide; TAG chr11 5367343 5367362 5367359 +
gtaaaataatggctacccta

SEQ ID NO: 25166 - DNA, 20 bp, Artificial Sequence
  Synthetic oligonucleotide; AGG chr11 5367344 5367363 5367360 +
taaaataatggctaccctat

SEQ ID NO: 25167 - DNA, 20 bp, Artificial Sequence
  Synthetic oligonucleotide; CAG chr11 5367347 5367366 5367363 +
aataatggctaccctatagg

SEQ ID NO: 25168 - DNA, 20 bp, Artificial Sequence
  Synthetic oligonucleotide; CAG chr11 5367352 5367371 5367368 +
tggctaccctataggcagaa

SEQ ID NO: 25169 - DNA, 20 bp, Artificial Sequence
  Synthetic oligonucleotide; GAG chr11 5367359 5367378 5367375 +
cctataggcagaacagtcct

SEQ ID NO: 25170 - DNA, 20 bp, Artificial Sequence
  Synthetic oligonucleotide; AGG chr11 5367360 5367379 5367376 +
ctataggcagaacagtcctg

SEQ ID NO: 25171 - DNA, 20 bp, Artificial Sequence
  Synthetic oligonucleotide; TGG chr11 5367368 5367387 5367384 +
agaacagtcctgaggactgc

SEQ ID NO: 25172 - DNA, 20 bp, Artificial Sequence
  Synthetic oligonucleotide; TGG chr11 5367384 5367403 5367400 +
ctgctggttgcccattttta

SEQ ID NO: 25173 - DNA, 20 bp, Artificial Sequence
  Synthetic oligonucleotide; AAG chr11 5367411 5367430 5367427 +
ttattgatgatatgctaaac

SEQ ID NO: 25174 - DNA, 20 bp, Artificial Sequence
  Synthetic oligonucleotide; AGG chr11 5367412 5367431 5367428 +
tattgatgatatgctaaaca

SEQ ID NO: 25175 - DNA, 20 bp, Artificial Sequence
  Synthetic oligonucleotide; GGG chr11 5367413 5367432 5367429 +
attgatgatatgctaaacaa

SEQ ID NO: 25176 - DNA, 20 bp, Artificial Sequence
  Synthetic oligonucleotide; GGG chr11 5367414 5367433 5367430 +
ttgatgatatgctaaacaag

SEQ ID NO: 25177 - DNA, 20 bp, Artificial Sequence
  Synthetic oligonucleotide; TGG chr11 5367417 5367436 5367433 +
atgatatgctaaacaagggg

SEQ ID NO: 25178 - DNA, 20 bp, Artificial Sequence
  Synthetic oligonucleotide; CAG chr11 5367441 5367460 5367457 +
ttattcatgcctcccctttt

SEQ ID NO: 25179 - DNA, 20 bp, Artificial Sequence
  Synthetic oligonucleotide; TAG chr11 5367450 5367469 5367466 +
cctccccttttcagaccgct

SEQ ID NO: 25180 - DNA, 20 bp, Artificial Sequence
  Synthetic oligonucleotide; TGG chr11 5367474 5367493 5367490 +
gtaacttcctgatgttgcca

SEQ ID NO: 25181 - DNA, 20 bp, Artificial Sequence
  Synthetic oligonucleotide; CAG chr11 5367487 5367506 5367503 +
gttgccatggcatttctaaa

SEQ ID NO: 25182 - DNA, 20 bp, Artificial Sequence
  Synthetic oligonucleotide; TAG chr11 5367493 5367512 5367509 +
atggcatttctaaacagtca

SEQ ID NO: 25183 - DNA, 20 bp, Artificial Sequence
  Synthetic oligonucleotide; TGG chr11 5367499 5367518 5367515 +
tttctaaacagtcatagtgc

SEQ ID NO: 25184 - DNA, 20 bp, Artificial Sequence
  Synthetic oligonucleotide; TGG chr11 5367502 5367521 5367518 +
ctaaacagtcatagtgctgg

SEQ ID NO: 25185 - DNA, 20 bp, Artificial Sequence
  Synthetic oligonucleotide; GGG chr11 5367503 5367522 5367519 +
taaacagtcatagtgctggt

SEQ ID NO: 25186 - DNA, 20 bp, Artificial Sequence
  Synthetic oligonucleotide; GAG chr11 5367505 5367524 5367521 +
aacagtcatagtgctggtgg

SEQ ID NO: 25187 - DNA, 20 bp, Artificial Sequence
  Synthetic oligonucleotide; GAG chr11 5367507 5367526 5367523 +
cagtcatagtgctggtggga

SEQ ID NO: 25188 - DNA, 20 bp, Artificial Sequence
  Synthetic oligonucleotide; TAG chr11 5367510 5367529 5367526 +
tcatagtgctggtgggagag

SEQ ID NO: 25189 - DNA, 20 bp, Artificial Sequence
  Synthetic oligonucleotide; CAG chr11 5367513 5367532 5367529 +
tagtgctggtgggagagtag

SEQ ID NO: 25190 - DNA, 20 bp, Artificial Sequence
  Synthetic oligonucleotide; GAG chr11 5367517 5367536 5367533 +
gctggtgggagagtagcagt

SEQ ID NO: 25191 - DNA, 20 bp, Artificial Sequence
  Synthetic oligonucleotide; AGG chr11 5367518 5367537 5367534 +
ctggtgggagagtagcagtg

SEQ ID NO: 25192 - DNA, 20 bp, Artificial Sequence
  Synthetic oligonucleotide; CAG chr11 5367526 5367545 5367542 +
agagtagcagtgaggactac

SEQ ID NO: 25193 - DNA, 20 bp, Artificial Sequence
  Synthetic oligonucleotide; GAG chr11 5367528 5367547 5367544 +
agtagcagtgaggactacca

SEQ ID NO: 25194 - DNA, 20 bp, Artificial Sequence
  Synthetic oligonucleotide; AGG chr11 5367529 5367548 5367545 +
gtagcagtgaggactaccag

SEQ ID NO: 25195 - DNA, 20 bp, Artificial Sequence
  Synthetic oligonucleotide; TGG chr11 5367550 5367569 5367566 +
ggtcactctcatcacaatct

SEQ ID NO: 25196 - DNA, 20 bp, Artificial Sequence
  Synthetic oligonucleotide; TGG chr11 5367555 5367574 5367571 +
ctctcatcacaatcttggtt

SEQ ID NO: 25197 - DNA, 20 bp, Artificial Sequence
  Synthetic oligonucleotide; TGG chr11 5367558 5367577 5367574 +
tcatcacaatcttggtttgg

SEQ ID NO: 25198 - DNA, 20 bp, Artificial Sequence
  Synthetic oligonucleotide; GGG chr11 5367559 5367578 5367575 +
catcacaatcttggtttggt

SEQ ID NO: 25199 - DNA, 20 bp, Artificial Sequence
  Synthetic oligonucleotide; CAG chr11 5367565 5367584 5367581 +
aatcttggtttggtgggttt

SEQ ID NO: 25200 - DNA, 20 bp, Artificial Sequence
  Synthetic oligonucleotide; CAG chr11 5367569 5367588 5367585 +
ttggtttggtgggtttcagc

SEQ ID NO: 25201 - DNA, 20 bp, Artificial Sequence
  Synthetic oligonucleotide; CAG chr11 5367596 5367615 5367612 +
tttactgcaaactgtttttt

SEQ ID NO: 25202 - DNA, 20 bp, Artificial Sequence
  Synthetic oligonucleotide; AAG chr11 5367600 5367619 5367616 +
ctgcaaactgttttttcagc

SEQ ID NO: 25203 - DNA, 20 bp, Artificial Sequence
  Synthetic oligonucleotide; AGG chr11 5367601 5367620 5367617 +
tgcaaactgttttttcagca

SEQ ID NO: 25204 - DNA, 20 bp, Artificial Sequence
  Synthetic oligonucleotide; GAG chr11 5367652 5367671 5367668 +
tcttatctcatcctgtgact

SEQ ID NO: 25205 - DNA, 20 bp, Artificial Sequence
  Synthetic oligonucleotide; TGG chr11 5367669 5367688 5367685 +
actgagaatgcctaactttc

SEQ ID NO: 25206 - DNA, 20 bp, Artificial Sequence
  Synthetic oligonucleotide; GGG chr11 5367670 5367689 5367686 +
ctgagaatgcctaactttct

SEQ ID NO: 25207 - DNA, 20 bp, Artificial Sequence
  Synthetic oligonucleotide; CAG chr11 5367677 5367696 5367693 +
tgcctaactttctgggaata

SEQ ID NO: 25208 - DNA, 20 bp, Artificial Sequence
  Synthetic oligonucleotide; CAG chr11 5367682 5367701 5367698 +
aactttctgggaatacagcc

SEQ ID NO: 25209 - DNA, 20 bp, Artificial Sequence
  Synthetic oligonucleotide; TAG chr11 5367685 5367704 5367701 +
tttctgggaatacagcccag

SEQ ID NO: 25210 - DNA, 20 bp, Artificial Sequence
  Synthetic oligonucleotide; AGG chr11 5367686 5367705 5367702 +
ttctgggaatacagcccagt

SEQ ID NO: 25211 - DNA, 20 bp, Artificial Sequence
  Synthetic oligonucleotide; CAG chr11 5367692 5367711 5367708 +
gaatacagcccagtaggtct

SEQ ID NO: 25212 - DNA, 20 bp, Artificial Sequence
  Synthetic oligonucleotide; CAG chr11 5367707 5367726 5367723 +
ggtctcagccttattgtacc

SEQ ID NO: 25213 - DNA, 20 bp, Artificial Sequence
  Synthetic oligonucleotide; AAG chr11 5367719 5367738 5367735 +
attgtacccagctcctattt

SEQ ID NO: 25214 - DNA, 20 bp, Artificial Sequence
  Synthetic oligonucleotide; TGG chr11 5367723 5367742 5367739 +
tacccagctcctatttaaga

SEQ ID NO: 25215 - DNA, 20 bp, Artificial Sequence
  Synthetic oligonucleotide; GAG chr11 5367725 5367744 5367741 +
cccagctcctatttaagatg

SEQ ID NO: 25216 - DNA, 20 bp, Artificial Sequence
  Synthetic oligonucleotide; TGG chr11 5367734 5367753 5367750 +
tatttaagatggagttgctc

SEQ ID NO: 25217 - DNA, 20 bp, Artificial Sequence
  Synthetic oligonucleotide; AAG chr11 5367755 5367774 5367771 +
ggttcaaatgcctctgacaa

SEQ ID NO: 25218 - DNA, 20 bp, Artificial Sequence
  Synthetic oligonucleotide; AGG chr11 5367756 5367775 5367772 +
gttcaaatgcctctgacaaa

SEQ ID NO: 25219 - DNA, 20 bp, Artificial Sequence
  Synthetic oligonucleotide; TGG chr11 5367776 5367795 5367792 +
aggaacaaaaatgttgtttc

SEQ ID NO: 25220 - DNA, 20 bp, Artificial Sequence
  Synthetic oligonucleotide; TAG chr11 5367784 5367803 5367800 +
aaatgttgtttctggtatgc

SEQ ID NO: 25221 - DNA, 20 bp, Artificial Sequence
  Synthetic oligonucleotide; CAG chr11 5367791 5367810 5367807 +
gtttctggtatgctagcacc

SEQ ID NO: 25222 - DNA, 20 bp, Artificial Sequence
  Synthetic oligonucleotide; TAG chr11 5367796 5367815 5367812 +
tggtatgctagcacccagaa

SEQ ID NO: 25223 - DNA, 20 bp, Artificial Sequence
  Synthetic oligonucleotide; GAG chr11 5367798 5367817 5367814 +
gtatgctagcacccagaata

SEQ ID NO: 25224 - DNA, 20 bp, Artificial Sequence
  Synthetic oligonucleotide; AGG chr11 5367799 5367818 5367815 +
tatgctagcacccagaatag

SEQ ID NO: 25225 - DNA, 20 bp, Artificial Sequence
  Synthetic oligonucleotide; AAG chr11 5367896 5367915 5367912 +
ctcatgcttaaatcttgacc

SEQ ID NO: 25226 - DNA, 20 bp, Artificial Sequence
  Synthetic oligonucleotide; AGG chr11 5367897 5367916 5367913 +
tcatgcttaaatcttgacca

SEQ ID NO: 25227 - DNA, 20 bp, Artificial Sequence
  Synthetic oligonucleotide; CAG chr11 5367923 5367942 5367939 +
tgcattttcctatccttact

SEQ ID NO: 25228 - DNA, 20 bp, Artificial Sequence
  Synthetic oligonucleotide; CAG chr11 5367926 5367945 5367942 +
attttcctatccttactcag

SEQ ID NO: 25229 - DNA, 20 bp, Artificial Sequence
  Synthetic oligonucleotide; GAG chr11 5367934 5367953 5367950 +
atccttactcagcagtttgt

SEQ ID NO: 25230 - DNA, 20 bp, Artificial Sequence
  Synthetic oligonucleotide; AGG chr11 5367935 5367954 5367951 +
tccttactcagcagtttgtg

SEQ ID NO: 25231 - DNA, 20 bp, Artificial Sequence
  Synthetic oligonucleotide; CAG chr11 5367941 5367960 5367957 +
ctcagcagtttgtgaggaat

SEQ ID NO: 25232 - DNA, 20 bp, Artificial Sequence
  Synthetic oligonucleotide; AAG chr11 5367954 5367973 5367970 +
gaggaatcagacattcttca

SEQ ID NO: 25233 - DNA, 20 bp, Artificial Sequence
  Synthetic oligonucleotide; CAG chr11 5367969 5367988 5367985 +
cttcaaagtttcacttctac

SEQ ID NO: 25234 - DNA, 20 bp, Artificial Sequence
  Synthetic oligonucleotide; GAG chr11 5367971 5367990 5367987 +
tcaaagtttcacttctacca

SEQ ID NO: 25235 - DNA, 20 bp, Artificial Sequence
  Synthetic oligonucleotide; TAG chr11 5367974 5367993 5367990 +
aagtttcacttctaccagag

SEQ ID NO: 25236 - DNA, 20 bp, Artificial Sequence
  Synthetic oligonucleotide; GAG chr11 5367976 5367995 5367992 +
gtttcacttctaccagagta

SEQ ID NO: 25237 - DNA, 20 bp, Artificial Sequence
  Synthetic oligonucleotide; AAG chr11 5368021 5368040 5368037 +
ttacaccccacaactaaccc

SEQ ID NO: 25238 - DNA, 20 bp, Artificial Sequence
  Synthetic oligonucleotide; TGG chr11 5368031 5368050 5368047 +
caactaacccaagcttcact

SEQ ID NO: 25239 - DNA, 20 bp, Artificial Sequence
  Synthetic oligonucleotide; TGG chr11 5368047 5368066 5368063 +
cacttggttctttgctccta

SEQ ID NO: 25240 - DNA, 20 bp, Artificial Sequence
  Synthetic oligonucleotide; GAG chr11 5368049 5368068 5368065 +
cttggttctttgctcctatg

SEQ ID NO: 25241 - DNA, 20 bp, Artificial Sequence
  Synthetic oligonucleotide; CAG chr11 5368055 5368074 5368071 +
tctttgctcctatggagacc

SEQ ID NO: 25242 - DNA, 20 bp, Artificial Sequence
  Synthetic oligonucleotide; AGG chr11 5368056 5368075 5368072 +
ctttgctcctatggagaccc

SEQ ID NO: 25243 - DNA, 20 bp, Artificial Sequence
  Synthetic oligonucleotide; CAG chr11 5368065 5368084 5368081 +
tatggagacccaggctcact

SEQ ID NO: 25244 - DNA, 20 bp, Artificial Sequence
  Synthetic oligonucleotide; CAG chr11 5368100 5368119 5368116 +
ttgttttttcctctgccatt

SEQ ID NO: 25245 - DNA, 20 bp, Artificial Sequence
  Synthetic oligonucleotide; CAG chr11 5368140 5368159 5368156 +
ccaataacttaactatgaac

SEQ ID NO: 25246 - DNA, 20 bp, Artificial Sequence
  Synthetic oligonucleotide; AAG chr11 5368159 5368178 5368175 +
ccagcatgaaaaatcctgtt

SEQ ID NO: 25247 - DNA, 20 bp, Artificial Sequence
  Synthetic oligonucleotide; TAG chr11 5368169 5368188 5368185 +
aaatcctgttaagtgttctg

SEQ ID NO: 25248 - DNA, 20 bp, Artificial Sequence
  Synthetic oligonucleotide; AGG chr11 5368170 5368189 5368186 +
aatcctgttaagtgttctgt

SEQ ID NO: 25249 - DNA, 20 bp, Artificial Sequence
  Synthetic oligonucleotide; CAG chr11 5368207 5368226 5368223 +
ttgtttcatgcttcttcata

SEQ ID NO: 25250 - DNA, 20 bp, Artificial Sequence
  Synthetic oligonucleotide; CAG chr11 5368217 5368236 5368233 +
cttcttcatacagtcttatg

SEQ ID NO: 25251 - DNA, 20 bp, Artificial Sequence
  Synthetic oligonucleotide; TAG chr11 5368220 5368239 5368236 +
cttcatacagtcttatgcag

SEQ ID NO: 25252 - DNA, 20 bp, Artificial Sequence
  Synthetic oligonucleotide; TGG chr11 5368226 5368245 5368242 +
acagtcttatgcagtagttt

SEQ ID NO: 25253 - DNA, 20 bp, Artificial Sequence
  Synthetic oligonucleotide; GGG chr11 5368227 5368246 5368243 +
cagtcttatgcagtagtttt

SEQ ID NO: 25254 - DNA, 20 bp, Artificial Sequence
  Synthetic oligonucleotide; CAG chr11 5368237 5368256 5368253 +
cagtagttttgggaattaaa

SEQ ID NO: 25255 - DNA, 20 bp, Artificial Sequence
  Synthetic oligonucleotide; TGG chr11 5368242 5368261 5368258 +
gttttgggaattaaacagtt

SEQ ID NO: 25256 - DNA, 20 bp, Artificial Sequence
  Synthetic oligonucleotide; TGG chr11 5368269 5368288 5368285 +
caatcccaccttccacttat

SEQ ID NO: 25257 - DNA, 20 bp, Artificial Sequence
  Synthetic oligonucleotide; TAG chr11 5368284 5368303 5368300 +
cttattggctgcgtacccta

SEQ ID NO: 25258 - DNA, 20 bp, Artificial Sequence
  Synthetic oligonucleotide; AAG chr11 5368289 5368308 5368305 +
tggctgcgtaccctatagca

SEQ ID NO: 25259 - DNA, 20 bp, Artificial Sequence
  Synthetic oligonucleotide; TGG chr11 5368312 5368331 5368328 +
caatttatctttctgtgttt

SEQ ID NO: 25260 - DNA, 20 bp, Artificial Sequence
  Synthetic oligonucleotide; AAG chr11 5368328 5368347 5368344 +
gttttggtccactcatcttt

SEQ ID NO: 25261 - DNA, 20 bp, Artificial Sequence
  Synthetic oligonucleotide; TGG chr11 5368331 5368350 5368347 +
ttggtccactcatctttaag

SEQ ID NO: 25262 - DNA, 20 bp, Artificial Sequence
  Synthetic oligonucleotide; GGG chr11 5368332 5368351 5368348 +
tggtccactcatctttaagt

SEQ ID NO: 25263 - DNA, 20 bp, Artificial Sequence
  Synthetic oligonucleotide; GGG chr11 5368333 5368352 5368349 +
ggtccactcatctttaagtg

SEQ ID NO: 25264 - DNA, 20 bp, Artificial Sequence
  Synthetic oligonucleotide; TAG chr11 5368343 5368362 5368359 +
tctttaagtggggataccaa

SEQ ID NO: 25265 - DNA, 20 bp, Artificial Sequence
  Synthetic oligonucleotide; TGG chr11 5368354 5368373 5368370 +
ggataccaatagtacccaca

SEQ ID NO: 25266 - DNA, 20 bp, Artificial Sequence
  Synthetic oligonucleotide; TAG chr11 5368405 5368424 5368421 +
aatatgtctaacgtgttcaa

SEQ ID NO: 25267 - DNA, 20 bp, Artificial Sequence
  Synthetic oligonucleotide; TGG chr11 5368412 5368431 5368428 +
ctaacgtgttcaatagtgcc

SEQ ID NO: 25268 - DNA, 20 bp, Artificial Sequence
  Synthetic oligonucleotide; AAG chr11 5368423 5368442 5368439 +
aatagtgcctggtccattgt

SEQ ID NO: 25269 - DNA, 20 bp, Artificial Sequence
  Synthetic oligonucleotide; TAG chr11 5368431 5368450 5368447 +
ctggtccattgtaagtatta

SEQ ID NO: 25270 - DNA, 20 bp, Artificial Sequence
  Synthetic oligonucleotide; GAG chr11 5368483 5368502 5368499 +
attgaaaattttgtgaaaat

SEQ ID NO: 25271 - DNA, 20 bp, Artificial Sequence
  Synthetic oligonucleotide; TGG chr11 5368499 5368518 5368515 +
aaatgagacaatttgacctt

SEQ ID NO: 25272 - DNA, 20 bp, Artificial Sequence
  Synthetic oligonucleotide; GGG chr11 5368500 5368519 5368516 +
aatgagacaatttgaccttt

SEQ ID NO: 25273 - DNA, 20 bp, Artificial Sequence
  Synthetic oligonucleotide; GAG chr11 5368505 5368524 5368521 +
gacaatttgacctttgggct

SEQ ID NO: 25274 - DNA, 20 bp, Artificial Sequence
  Synthetic oligonucleotide; AAG chr11 5368508 5368527 5368524 +
aatttgacctttgggctgag

SEQ ID NO: 25275 - DNA, 20 bp, Artificial Sequence
  Synthetic oligonucleotide; TAG chr11 5368521 5368540 5368537 +
ggctgagaagatactctgtc

SEQ ID NO: 25276 - DNA, 20 bp, Artificial Sequence
  Synthetic oligonucleotide; AAG chr11 5368532 5368551 5368548 +
tactctgtctagctctgaca

SEQ ID NO: 25277 - DNA, 20 bp, Artificial Sequence
  Synthetic oligonucleotide; AAG chr11 5368553 5368572 5368569 +
agaaaataaaaacctttaaa

SEQ ID NO: 25278 - DNA, 20 bp, Artificial Sequence
  Synthetic oligonucleotide; AAG chr11 5368579 5368598 5368595 +
tctcacaatcgtaatacttg

SEQ ID NO: 25279 - DNA, 20 bp, Artificial Sequence
  Synthetic oligonucleotide; AAG chr11 5368588 5368607 5368604 +
cgtaatacttgaagttacac

SEQ ID NO: 25280 - DNA, 20 bp, Artificial Sequence
  Synthetic oligonucleotide; AAG chr11 5368604 5368623 5368620 +
acacaagatattctaacata

SEQ ID NO: 25281 - DNA, 20 bp, Artificial Sequence
  Synthetic oligonucleotide; GAG chr11 5368638 5368657 5368654 +
tattctcacatgcatcctgt

SEQ ID NO: 25282 - DNA, 20 bp, Artificial Sequence
  Synthetic oligonucleotide; AAG chr11 5368642 5368661 5368658 +
ctcacatgcatcctgtgaga

SEQ ID NO: 25283 - DNA, 20 bp, Artificial Sequence
  Synthetic oligonucleotide; CAG chr11 5368645 5368664 5368661 +
acatgcatcctgtgagaaag

SEQ ID NO: 25284 - DNA, 20 bp, Artificial Sequence
  Synthetic oligonucleotide; GAG chr11 5368647 5368666 5368663 +
atgcatcctgtgagaaagca

SEQ ID NO: 25285 - DNA, 20 bp, Artificial Sequence
  Synthetic oligonucleotide; TAG chr11 5368652 5368671 5368668 +
tcctgtgagaaagcagagca

SEQ ID NO: 25286 - DNA, 20 bp, Artificial Sequence
  Synthetic oligonucleotide; TAG chr11 5368655 5368674 5368671 +
tgtgagaaagcagagcatag

SEQ ID NO: 25287 - DNA, 20 bp, Artificial Sequence
  Synthetic oligonucleotide; GAG chr11 5368657 5368676 5368673 +
tgagaaagcagagcatagta

SEQ ID NO: 25288 - DNA, 20 bp, Artificial Sequence
  Synthetic oligonucleotide; AGG chr11 5368658 5368677 5368674 +
gagaaagcagagcatagtag

SEQ ID NO: 25289 - DNA, 20 bp, Artificial Sequence
  Synthetic oligonucleotide; CAG chr11 5368664 5368683 5368680 +
gcagagcatagtagaggttt

SEQ ID NO: 25290 - DNA, 20 bp, Artificial Sequence
  Synthetic oligonucleotide; AAG chr11 5368678 5368697 5368694 +
aggtttcagttttatctgtc

SEQ ID NO: 25291 - DNA, 20 bp, Artificial Sequence
  Synthetic oligonucleotide; GAG chr11 5368680 5368699 5368696 +
gtttcagttttatctgtcaa

SEQ ID NO: 25292 - DNA, 20 bp, Artificial Sequence
  Synthetic oligonucleotide; GAG chr11 5368691 5368710 5368707 +
atctgtcaagagcaaaattt

SEQ ID NO: 25293 - DNA, 20 bp, Artificial Sequence
  Synthetic oligonucleotide; AGG chr11 5368692 5368711 5368708 +
tctgtcaagagcaaaatttg

SEQ ID NO: 25294 - DNA, 20 bp, Artificial Sequence
  Synthetic oligonucleotide; GAG chr11 5368707 5368726 5368723 +
atttgaggtttctaaacatt

SEQ ID NO: 25295 - DNA, 20 bp, Artificial Sequence
  Synthetic oligonucleotide; AAG chr11 5368738 5368757 5368754 +
aatattatgctttaaaactg

SEQ ID NO: 25296 - DNA, 20 bp, Artificial Sequence
  Synthetic oligonucleotide; AGG chr11 5368739 5368758 5368755 +
atattatgctttaaaactga

SEQ ID NO: 25297 - DNA, 20 bp, Artificial Sequence
  Synthetic oligonucleotide; AAG chr11 5368742 5368761 5368758 +
ttatgctttaaaactgaagg

SEQ ID NO: 25298 - DNA, 20 bp, Artificial Sequence
  Synthetic oligonucleotide; CAG chr11 5368753 5368772 5368769 +
aactgaaggaagcaaaacct

SEQ ID NO: 25299 - DNA, 20 bp, Artificial Sequence
  Synthetic oligonucleotide; TAG chr11 5368758 5368777 5368774 +
aaggaagcaaaacctcagca

SEQ ID NO: 25300 - DNA, 20 bp, Artificial Sequence
  Synthetic oligonucleotide; AGG chr11 5368759 5368778 5368775 +
aggaagcaaaacctcagcat

SEQ ID NO: 25301 - DNA, 20 bp, Artificial Sequence
  Synthetic oligonucleotide; AAG chr11 5368770 5368789 5368786 +
cctcagcataggccttctga

SEQ ID NO: 25302 - DNA, 20 bp, Artificial Sequence
  Synthetic oligonucleotide; TGG chr11 5368780 5368799 5368796 +
ggccttctgaaagcttacga

SEQ ID NO: 25303 - DNA, 20 bp, Artificial Sequence
  Synthetic oligonucleotide; CAG chr11 5368800 5368819 5368816 +
tggcttttctttttttcccc

SEQ ID NO: 25304 - DNA, 20 bp, Artificial Sequence
  Synthetic oligonucleotide; AGG chr11 5368801 5368820 5368817 +
ggcttttctttttttccccc

SEQ ID NO: 25305 - DNA, 20 bp, Artificial Sequence
  Synthetic oligonucleotide; GGG chr11 5368802 5368821 5368818 +
gcttttctttttttccccca

SEQ ID NO: 25306 - DNA, 20 bp, Artificial Sequence
  Synthetic oligonucleotide; AAG chr11 5368807 5368826 5368823 +
tctttttttcccccagggca

SEQ ID NO: 25307 - DNA, 20 bp, Artificial Sequence
  Synthetic oligonucleotide; TAG chr11 5368816 5368835 5368832 +
cccccagggcaaagtgttct

SEQ ID NO: 25308 - DNA, 20 bp, Artificial Sequence
  Synthetic oligonucleotide; AGG chr11 5368817 5368836 5368833 +
ccccagggcaaagtgttctt

SEQ ID NO: 25309 - DNA, 20 bp, Artificial Sequence
  Synthetic oligonucleotide; GAG chr11 5368819 5368838 5368835 +
ccagggcaaagtgttcttag

SEQ ID NO: 25310 - DNA, 20 bp, Artificial Sequence
  Synthetic oligonucleotide; AAG chr11 5368823 5368842 5368839 +
ggcaaagtgttcttaggagc

SEQ ID NO: 25311 - DNA, 20 bp, Artificial Sequence
  Synthetic oligonucleotide; TGG chr11 5368830 5368849 5368846 +
tgttcttaggagcaagatgt

SEQ ID NO: 25312 - DNA, 20 bp, Artificial Sequence
  Synthetic oligonucleotide; TGG chr11 5368852 5368871 5368868 +
gaatttacaccattcttatg

SEQ ID NO: 25313 - DNA, 20 bp, Artificial Sequence
  Synthetic oligonucleotide; AAG chr11 5368858 5368877 5368874 +
acaccattcttatgtggatt

SEQ ID NO: 25314 - DNA, 20 bp, Artificial Sequence
  Synthetic oligonucleotide; GAG chr11 5368860 5368879 5368876 +
accattcttatgtggattaa

SEQ ID NO: 25315 - DNA, 20 bp, Artificial Sequence
  Synthetic oligonucleotide; GAG chr11 5368862 5368881 5368878 +
cattcttatgtggattaaga

SEQ ID NO: 25316 - DNA, 20 bp, Artificial Sequence
  Synthetic oligonucleotide; AGG chr11 5368863 5368882 5368879 +
attcttatgtggattaagag

SEQ ID NO: 25317 - DNA, 20 bp, Artificial Sequence
  Synthetic oligonucleotide; GAG chr11 5368875 5368894 5368891 +
attaagagaggtttccttct

SEQ ID NO: 25318 - DNA, 20 bp, Artificial Sequence
  Synthetic oligonucleotide; AGG chr11 5368876 5368895 5368892 +
ttaagagaggtttccttctg

SEQ ID NO: 25319 - DNA, 20 bp, Artificial Sequence
  Synthetic oligonucleotide; TGG chr11 5368883 5368902 5368899 +
aggtttccttctgaggatgt

SEQ ID NO: 25320 - DNA, 20 bp, Artificial Sequence
  Synthetic oligonucleotide; AAG chr11 5368886 5368905 5368902 +
tttccttctgaggatgttgg

SEQ ID NO: 25321 - DNA, 20 bp, Artificial Sequence
  Synthetic oligonucleotide; CAG chr11 5368897 5368916 5368913 +
ggatgttggaagcctctgtt

SEQ ID NO: 25322 - DNA, 20 bp, Artificial Sequence
  Synthetic oligonucleotide; AGG chr11 5368898 5368917 5368914 +
gatgttggaagcctctgttc

SEQ ID NO: 25323 - DNA, 20 bp, Artificial Sequence
  Synthetic oligonucleotide; CGG chr11 5368914 5368933 5368930 +
gttcaggaactttttctttc

SEQ ID NO: 25324 - DNA, 20 bp, Artificial Sequence
  Synthetic oligonucleotide; CAG chr11 5368927 5368946 5368943 +
ttctttccggatcatgctta

SEQ ID NO: 25325 - DNA, 20 bp, Artificial Sequence
  Synthetic oligonucleotide; AAG chr11 5368944 5368963 5368960 +
ttacagatctgattacaccc

SEQ ID NO: 25326 - DNA, 20 bp, Artificial Sequence
  Synthetic oligonucleotide; AAG chr11 5368947 5368966 5368963 +
cagatctgattacacccaag

SEQ ID NO: 25327 - DNA, 20 bp, Artificial Sequence
  Synthetic oligonucleotide; CAG chr11 5368964 5368983 5368980 +
aagaagcctaaattgtgtgt

SEQ ID NO: 25328 - DNA, 20 bp, Artificial Sequence
  Synthetic oligonucleotide; TAG chr11 5368972 5368991 5368988 +
taaattgtgtgtcagccaac

SEQ ID NO: 25329 - DNA, 20 bp, Artificial Sequence
  Synthetic oligonucleotide; TGG chr11 5368978 5368997 5368994 +
gtgtgtcagccaactagatg

SEQ ID NO: 25330 - DNA, 20 bp, Artificial Sequence
  Synthetic oligonucleotide; AAG chr11 5368983 5369002 5368999 +
tcagccaactagatgtggac

SEQ ID NO: 25331 - DNA, 20 bp, Artificial Sequence
  Synthetic oligonucleotide; TAG chr11 5368987 5369006 5369003 +
ccaactagatgtggacaaga

SEQ ID NO: 25332 - DNA, 20 bp, Artificial Sequence
  Synthetic oligonucleotide; TAG chr11 5368994 5369013 5369010 +
gatgtggacaagatagtttt

SEQ ID NO: 25333 - DNA, 20 bp, Artificial Sequence
  Synthetic oligonucleotide; TGG chr11 5369005 5369024 5369021 +
gatagtttttagcctccttc

SEQ ID NO: 25334 - DNA, 20 bp, Artificial Sequence
  Synthetic oligonucleotide; GGG chr11 5369006 5369025 5369022 +
atagtttttagcctccttct

SEQ ID NO: 25335 - DNA, 20 bp, Artificial Sequence
  Synthetic oligonucleotide; TAG chr11 5369011 5369030 5369027 +
ttttagcctccttctgggac

SEQ ID NO: 25336 - DNA, 20 bp, Artificial Sequence
  Synthetic oligonucleotide; AAG chr11 5369027 5369046 5369043 +
ggactagatattcattcacc

SEQ ID NO: 25337 - DNA, 20 bp, Artificial Sequence
  Synthetic oligonucleotide; GAG chr11 5369032 5369051 5369048 +
agatattcattcaccaagat

SEQ ID NO: 25338 - DNA, 20 bp, Artificial Sequence
  Synthetic oligonucleotide; AAG chr11 5369043 5369062 5369059 +
caccaagatgagtgcctttg

SEQ ID NO: 25339 - DNA, 20 bp, Artificial Sequence
  Synthetic oligonucleotide; CAG chr11 5369046 5369065 5369062 +
caagatgagtgcctttgaag

SEQ ID NO: 25340 - DNA, 20 bp, Artificial Sequence
  Synthetic oligonucleotide; TAG chr11 5369058 5369077 5369074 +
ctttgaagcagaatctgtga

SEQ ID NO: 25341 - DNA, 20 bp, Artificial Sequence
  Synthetic oligonucleotide; AGG chr11 5369059 5369078 5369075 +
tttgaagcagaatctgtgat

SEQ ID NO: 25342 - DNA, 20 bp, Artificial Sequence
  Synthetic oligonucleotide; GGG chr11 5369060 5369079 5369076 +
ttgaagcagaatctgtgata

SEQ ID NO: 25343 - DNA, 20 bp, Artificial Sequence
  Synthetic oligonucleotide; TGG chr11 5369063 5369082 5369079 +
aagcagaatctgtgataggg

SEQ ID NO: 25344 - DNA, 20 bp, Artificial Sequence
  Synthetic oligonucleotide; TGG chr11 5369067 5369086 5369083 +
agaatctgtgatagggtggt

SEQ ID NO: 25345 - DNA, 20 bp, Artificial Sequence
  Synthetic oligonucleotide; GGG chr11 5369068 5369087 5369084 +
gaatctgtgatagggtggtt

SEQ ID NO: 25346 - DNA, 20 bp, Artificial Sequence
  Synthetic oligonucleotide; TAG chr11 5369076 5369095 5369092 +
gatagggtggttgggccacc

SEQ ID NO: 25347 - DNA, 20 bp, Artificial Sequence
  Synthetic oligonucleotide; GAG chr11 5369078 5369097 5369094 +
tagggtggttgggccaccta

SEQ ID NO: 25348 - DNA, 20 bp, Artificial Sequence
  Synthetic oligonucleotide; TGG chr11 5369086 5369105 5369102 +
ttgggccacctagagacata

SEQ ID NO: 25349 - DNA, 20 bp, Artificial Sequence
  Synthetic oligonucleotide; TAG chr11 5369096 5369115 5369112 +
tagagacatatggccatgac

SEQ ID NO: 25350 - DNA, 20 bp, Artificial Sequence
  Synthetic oligonucleotide; AAG chr11 5369104 5369123 5369120 +
tatggccatgactagaatct

SEQ ID NO: 25351 - DNA, 20 bp, Artificial Sequence
  Synthetic oligonucleotide; AGG chr11 5369105 5369124 5369121 +
atggccatgactagaatcta

SEQ ID NO: 25352 - DNA, 20 bp, Artificial Sequence
  Synthetic oligonucleotide; TAG chr11 5369109 5369128 5369125 +
ccatgactagaatctaaggt

SEQ ID NO: 25353 - DNA, 20 bp, Artificial Sequence
  Synthetic oligonucleotide; CAG chr11 5369117 5369136 5369133 +
agaatctaaggttagacata

SEQ ID NO: 25354 - DNA, 20 bp, Artificial Sequence
  Synthetic oligonucleotide; AAG chr11 5369121 5369140 5369137 +
tctaaggttagacatacaga

SEQ ID NO: 25355 - DNA, 20 bp, Artificial Sequence
  Synthetic oligonucleotide; AGG chr11 5369122 5369141 5369138 +
ctaaggttagacatacagaa

SEQ ID NO: 25356 - DNA, 20 bp, Artificial Sequence
  Synthetic oligonucleotide; AAG chr11 5369128 5369147 5369144 +
ttagacatacagaaaggatg

SEQ ID NO: 25357 - DNA, 20 bp, Artificial Sequence
  Synthetic oligonucleotide; TAG chr11 5369141 5369160 5369157 +
aaggatgaagtctttaaaaa

SEQ ID NO: 25358 - DNA, 20 bp, Artificial Sequence
  Synthetic oligonucleotide; AGG chr11 5369142 5369161 5369158 +
aggatgaagtctttaaaaat

SEQ ID NO: 25359 - DNA, 20 bp, Artificial Sequence
  Synthetic oligonucleotide; GAG chr11 5369183 5369202 5369199 +
tccattcacacatataacct

SEQ ID NO: 25360 - DNA, 20 bp, Artificial Sequence
  Synthetic oligonucleotide; TAG chr11 5369201 5369220 5369217 +
ctgagtccctactgattttc

SEQ ID NO: 25361 - DNA, 20 bp, Artificial Sequence
  Synthetic oligonucleotide; GAG chr11 5369217 5369236 5369233 +
tttctagtactgtactgaat

SEQ ID NO: 25362 - DNA, 20 bp, Artificial Sequence
  Synthetic oligonucleotide; AGG chr11 5369218 5369237 5369234 +
ttctagtactgtactgaatg

SEQ ID NO: 25363 - DNA, 20 bp, Artificial Sequence
  Synthetic oligonucleotide; TAG chr11 5369230 5369249 5369246 +
actgaatgaggccaacatga

SEQ ID NO: 25364 - DNA, 20 bp, Artificial Sequence
  Synthetic oligonucleotide; AAG chr11 5369233 5369252 5369249 +
gaatgaggccaacatgatag

SEQ ID NO: 25365 - DNA, 20 bp, Artificial Sequence
  Synthetic oligonucleotide; AAG chr11 5369236 5369255 5369252 +
tgaggccaacatgatagaag

SEQ ID NO: 25366 - DNA, 20 bp, Artificial Sequence
  Synthetic oligonucleotide; TGG chr11 5369258 5369277 5369274 +
gatatgtatgcccatgtgtg

SEQ ID NO: 25367 - DNA, 20 bp, Artificial Sequence
  Synthetic oligonucleotide; GGG chr11 5369259 5369278 5369275 +
atatgtatgcccatgtgtgt

SEQ ID NO: 25368 - DNA, 20 bp, Artificial Sequence
  Synthetic oligonucleotide; GGG chr11 5369260 5369279 5369276 +
tatgtatgcccatgtgtgtg

SEQ ID NO: 25369 - DNA, 20 bp, Artificial Sequence
  Synthetic oligonucleotide; TAG chr11 5369263 5369282 5369279 +
gtatgcccatgtgtgtgggg

SEQ ID NO: 25370 - DNA, 20 bp, Artificial Sequence
  Synthetic oligonucleotide; TAG chr11 5369266 5369285 5369282 +
tgcccatgtgtgtggggtag

SEQ ID NO: 25371 - DNA, 20 bp, Artificial Sequence
  Synthetic oligonucleotide; AAG chr11 5369274 5369293 5369290 +
tgtgtggggtagtagaaaca

SEQ ID NO: 25372 - DNA, 20 bp, Artificial Sequence
  Synthetic oligonucleotide; CGG chr11 5369280 5369299 5369296 +
gggtagtagaaacaaagtca

SEQ ID NO: 25373 - DNA, 20 bp, Artificial Sequence
  Synthetic oligonucleotide; AAG chr11 5369301 5369320 5369317 +
ggcttaacaaatattaatta

SEQ ID NO: 25374 - DNA, 20 bp, Artificial Sequence
  Synthetic oligonucleotide; TAG chr11 5369314 5369333 5369330 +
ttaattaaagttattattac

SEQ ID NO: 25375 - DNA, 20 bp, Artificial Sequence
  Synthetic oligonucleotide; TAG chr11 5369318 5369337 5369334 +
ttaaagttattattactagt

SEQ ID NO: 25376 - DNA, 20 bp, Artificial Sequence
  Synthetic oligonucleotide; TGG chr11 5369321 5369340 5369337 +
aagttattattactagttag

SEQ ID NO: 25377 - DNA, 20 bp, Artificial Sequence
  Synthetic oligonucleotide; TAG chr11 5369346 5369365 5369362 +
tactattaacaataatattt

SEQ ID NO: 25378 - DNA, 20 bp, Artificial Sequence
  Synthetic oligonucleotide; CAG chr11 5369349 5369368 5369365 +
tattaacaataatattttag

SEQ ID NO: 25379 - DNA, 20 bp, Artificial Sequence
  Synthetic oligonucleotide; TAG chr11 5369378 5369397 5369394 +
tttgcaaaatataacacttt

SEQ ID NO: 25380 - DNA, 20 bp, Artificial Sequence
  Synthetic oligonucleotide; AGG chr11 5369379 5369398 5369395 +
ttgcaaaatataacactttt

SEQ ID NO: 25381 - DNA, 20 bp, Artificial Sequence
  Synthetic oligonucleotide; GAG chr11 5369381 5369400 5369397 +
gcaaaatataacacttttag

SEQ ID NO: 25382 - DNA, 20 bp, Artificial Sequence
  Synthetic oligonucleotide; CAG chr11 5369403 5369422 5369419 +
gaattacatctattatacct

SEQ ID NO: 25383 - DNA, 20 bp, Artificial Sequence
  Synthetic oligonucleotide; CAG chr11 5369421 5369440 5369437 +
ctcagtaaaactctatgaaa

SEQ ID NO: 25384 - DNA, 20 bp, Artificial Sequence
  Synthetic oligonucleotide; TGG chr11 5369443 5369462 5369459 +
gactttttatatattttttc

SEQ ID NO: 25385 - DNA, 20 bp, Artificial Sequence
  Synthetic oligonucleotide; GAG chr11 5369470 5369489 5369486 +
aaaataaaatctgataattt

SEQ ID NO: 25386 - DNA, 20 bp, Artificial Sequence
  Synthetic oligonucleotide; AAG chr11 5369483 5369502 5369499 +
ataatttgagacatttaaaa

SEQ ID NO: 25387 - DNA, 20 bp, Artificial Sequence
  Synthetic oligonucleotide; TAG chr11 5369494 5369513 5369510 +
catttaaaaaagtatacaac

SEQ ID NO: 25388 - DNA, 20 bp, Artificial Sequence
  Synthetic oligonucleotide; AAG chr11 5369498 5369517 5369514 +
taaaaaagtatacaactagt

SEQ ID NO: 25389 - DNA, 20 bp, Artificial Sequence
  Synthetic oligonucleotide; TAG chr11 5369501 5369520 5369517 +
aaaagtatacaactagtaag

SEQ ID NO: 25390 - DNA, 20 bp, Artificial Sequence
  Synthetic oligonucleotide; AAG chr11 5369593 5369612 5369609 +
ctccatgtatattaaatata

SEQ ID NO: 25391 - DNA, 20 bp, Artificial Sequence
  Synthetic oligonucleotide; AAG chr11 5369598 5369617 5369614 +
tgtatattaaatataaagta

SEQ ID NO: 25392 - DNA, 20 bp, Artificial Sequence
  Synthetic oligonucleotide; TGG chr11 5369630 5369649 5369646 +
ccttacctttctatcctccc

SEQ ID NO: 25393 - DNA, 20 bp, Artificial Sequence
  Synthetic oligonucleotide; GAG chr11 5369632 5369651 5369648 +
ttacctttctatcctccctg

SEQ ID NO: 25394 - DNA, 20 bp, Artificial Sequence
  Synthetic oligonucleotide; TAG chr11 5369720 5369739 5369736 +
tatgaacatactcaaataaa

SEQ ID NO: 25395 - DNA, 20 bp, Artificial Sequence
  Synthetic oligonucleotide; TGG chr11 5369729 5369748 5369745 +
actcaaataaatagtcctat

SEQ ID NO: 25396 - DNA, 20 bp, Artificial Sequence
  Synthetic oligonucleotide; TGG chr11 5369733 5369752 5369749 +
aaataaatagtcctattggc

SEQ ID NO: 25397 - DNA, 20 bp, Artificial Sequence
  Synthetic oligonucleotide; TAG chr11 5369736 5369755 5369752 +
taaatagtcctattggctgg

SEQ ID NO: 25398 - DNA, 20 bp, Artificial Sequence
  Synthetic oligonucleotide; AAG chr11 5369740 5369759 5369756 +
tagtcctattggctggtagc

SEQ ID NO: 25399 - DNA, 20 bp, Artificial Sequence
  Synthetic oligonucleotide; AGG chr11 5369741 5369760 5369757 +
agtcctattggctggtagca

SEQ ID NO: 25400 - DNA, 20 bp, Artificial Sequence
  Synthetic oligonucleotide; GGG chr11 5369742 5369761 5369758 +
gtcctattggctggtagcaa

SEQ ID NO: 25401 - DNA, 20 bp, Artificial Sequence
  Synthetic oligonucleotide; TAG chr11 5369752 5369771 5369768 +
ctggtagcaagggctatgtg

SEQ ID NO: 25402 - DNA, 20 bp, Artificial Sequence
  Synthetic oligonucleotide; CAG chr11 5369786 5369805 5369802 +
ccatgatgccacactaaaat

SEQ ID NO: 25403 - DNA, 20 bp, Artificial Sequence
  Synthetic oligonucleotide; CAG chr11 5369815 5369834 5369831 +
ttgtctgcatttttgtgtta

SEQ ID NO: 25404 - DNA, 20 bp, Artificial Sequence
  Synthetic oligonucleotide; TAG chr11 5369824 5369843 5369840 +
tttttgtgttacagtgaatg

SEQ ID NO: 25405 - DNA, 20 bp, Artificial Sequence
  Synthetic oligonucleotide; AAG chr11 5369842 5369861 5369858 +
tgtagactaaaatccaaaat

SEQ ID NO: 25406 - DNA, 20 bp, Artificial Sequence
  Synthetic oligonucleotide; CAG chr11 5369849 5369868 5369865 +
taaaatccaaaataagtcaa

SEQ ID NO: 25407 - DNA, 20 bp, Artificial Sequence
  Synthetic oligonucleotide; AAG chr11 5369859 5369878 5369875 +
aataagtcaacagttgttaa

SEQ ID NO: 25408 - DNA, 20 bp, Artificial Sequence
  Synthetic oligonucleotide; TGG chr11 5369874 5369893 5369890 +
gttaaaagtgatgacctcat

SEQ ID NO: 25409 - DNA, 20 bp, Artificial Sequence
  Synthetic oligonucleotide; TAG chr11 5369891 5369910 5369907 +
cattggttttgctatcaaca

SEQ ID NO: 25410 - DNA, 20 bp, Artificial Sequence
  Synthetic oligonucleotide; AAG chr11 5369895 5369914 5369911 +
ggttttgctatcaacataga

SEQ ID NO: 25411 - DNA, 20 bp, Artificial Sequence
  Synthetic oligonucleotide; AAG chr11 5369899 5369918 5369915 +
ttgctatcaacatagaaaga

SEQ ID NO: 25412 - DNA, 20 bp, Artificial Sequence
  Synthetic oligonucleotide; AGG chr11 5369900 5369919 5369916 +
tgctatcaacatagaaagaa

SEQ ID NO: 25413 - DNA, 20 bp, Artificial Sequence
  Synthetic oligonucleotide; GGG chr11 5369901 5369920 5369917 +
gctatcaacatagaaagaaa

SEQ ID NO: 25414 - DNA, 20 bp, Artificial Sequence
  Synthetic oligonucleotide; AAG chr11 5369904 5369923 5369920 +
atcaacatagaaagaaaggg

SEQ ID NO: 25415 - DNA, 20 bp, Artificial Sequence
  Synthetic oligonucleotide; CAG chr11 5369916 5369935 5369932 +
agaaagggaagacattttct

SEQ ID NO: 25416 - DNA, 20 bp, Artificial Sequence
  Synthetic oligonucleotide; AGG chr11 5369917 5369936 5369933 +
gaaagggaagacattttctc

SEQ ID NO: 25417 - DNA, 20 bp, Artificial Sequence
  Synthetic oligonucleotide; AAG chr11 5369930 5369949 5369946 +
ttttctcaggatttttactc

SEQ ID NO: 25418 - DNA, 20 bp, Artificial Sequence
  Synthetic oligonucleotide; AGG chr11 5369931 5369950 5369947 +
tttctcaggatttttactca

SEQ ID NO: 25419 - DNA, 20 bp, Artificial Sequence
  Synthetic oligonucleotide; AAG chr11 5369935 5369954 5369951 +
tcaggatttttactcaagga

SEQ ID NO: 25420 - DNA, 20 bp, Artificial Sequence
  Synthetic oligonucleotide; AGG chr11 5369936 5369955 5369952 +
caggatttttactcaaggaa

SEQ ID NO: 25421 - DNA, 20 bp, Artificial Sequence
  Synthetic oligonucleotide; CAG chr11 5369939 5369958 5369955 +
gatttttactcaaggaaagg

SEQ ID NO: 25422 - DNA, 20 bp, Artificial Sequence
  Synthetic oligonucleotide; TGG chr11 5369942 5369961 5369958 +
ttttactcaaggaaaggcag

SEQ ID NO: 25423 - DNA, 20 bp, Artificial Sequence
  Synthetic oligonucleotide; GGG chr11 5369943 5369962 5369959 +
tttactcaaggaaaggcagt

SEQ ID NO: 25424 - DNA, 20 bp, Artificial Sequence
  Synthetic oligonucleotide; GGG chr11 5369944 5369963 5369960 +
ttactcaaggaaaggcagtg

SEQ ID NO: 25425 - DNA, 20 bp, Artificial Sequence
  Synthetic oligonucleotide; AAG chr11 5369948 5369967 5369964 +
tcaaggaaaggcagtgggga

SEQ ID NO: 25426 - DNA, 20 bp, Artificial Sequence
  Synthetic oligonucleotide; GAG chr11 5369950 5369969 5369966 +
aaggaaaggcagtggggaaa

SEQ ID NO: 25427 - DNA, 20 bp, Artificial Sequence
  Synthetic oligonucleotide; AGG chr11 5369951 5369970 5369967 +
aggaaaggcagtggggaaag

SEQ ID NO: 25428 - DNA, 20 bp, Artificial Sequence
  Synthetic oligonucleotide; TGG chr11 5369957 5369976 5369973 +
ggcagtggggaaagaggctt

SEQ ID NO: 25429 - DNA, 20 bp, Artificial Sequence
  Synthetic oligonucleotide; AAG chr11 5369984 5370003 5370000 +
ctgtgtcaatctgtatcaac

SEQ ID NO: 25430 - DNA, 20 bp, Artificial Sequence
  Synthetic oligonucleotide; TGG chr11 5370008 5370027 5370024 +
tcttcaaacctccctctgca

SEQ ID NO: 25431 - DNA, 20 bp, Artificial Sequence
  Synthetic oligonucleotide; CAG chr11 5370014 5370033 5370030 +
aacctccctctgcatggccc

SEQ ID NO: 25432 - DNA, 20 bp, Artificial Sequence
  Synthetic oligonucleotide; AGG chr11 5370015 5370034 5370031 +
acctccctctgcatggcccc

SEQ ID NO: 25433 - DNA, 20 bp, Artificial Sequence
  Synthetic oligonucleotide; GAG chr11 5370017 5370036 5370033 +
ctccctctgcatggccccag

SEQ ID NO: 25434 - DNA, 20 bp, Artificial Sequence
  Synthetic oligonucleotide; GAG chr11 5370019 5370038 5370035 +
ccctctgcatggccccagga

SEQ ID NO: 25435 - DNA, 20 bp, Artificial Sequence
  Synthetic oligonucleotide; CAG chr11 5370023 5370042 5370039 +
ctgcatggccccaggagagt

SEQ ID NO: 25436 - DNA, 20 bp, Artificial Sequence
  Synthetic oligonucleotide; TGG chr11 5370054 5370073 5370070 +
aaacctctcctgccatctta

SEQ ID NO: 25437 - DNA, 20 bp, Artificial Sequence
  Synthetic oligonucleotide; CAG chr11 5370063 5370082 5370079 +
ctgccatcttatggtttgta

SEQ ID NO: 25438 - DNA, 20 bp, Artificial Sequence
  Synthetic oligonucleotide; AAG chr11 5370073 5370092 5370089 +
atggtttgtacagcatgtgc

SEQ ID NO: 25439 - DNA, 20 bp, Artificial Sequence
  Synthetic oligonucleotide; TAG chr11 5370085 5370104 5370101 +
gcatgtgcaagctgcttcta

SEQ ID NO: 25440 - DNA, 20 bp, Artificial Sequence
  Synthetic oligonucleotide; TAG chr11 5370097 5370116 5370113 +
tgcttctatagaaatgcata

SEQ ID NO: 25441 - DNA, 20 bp, Artificial Sequence
  Synthetic oligonucleotide; CAG chr11 5370106 5370125 5370122 +
agaaatgcatatagaaaata

SEQ ID NO: 25442 - DNA, 20 bp, Artificial Sequence
  Synthetic oligonucleotide; AGG chr11 5370107 5370126 5370123 +
gaaatgcatatagaaaatac

SEQ ID NO: 25443 - DNA, 20 bp, Artificial Sequence
  Synthetic oligonucleotide; TAG chr11 5370121 5370140 5370137 +
aaatacaggtatataaatgc

SEQ ID NO: 25444 - DNA, 20 bp, Artificial Sequence
  Synthetic oligonucleotide; GAG chr11 5370123 5370142 5370139 +
atacaggtatataaatgcta

SEQ ID NO: 25445 - DNA, 20 bp, Artificial Sequence
  Synthetic oligonucleotide; AGG chr11 5370124 5370143 5370140 +
tacaggtatataaatgctag

SEQ ID NO: 25446 - DNA, 20 bp, Artificial Sequence
  Synthetic oligonucleotide; AAG chr11 5370132 5370151 5370148 +
tataaatgctagaggctacc

SEQ ID NO: 25447 - DNA, 20 bp, Artificial Sequence
  Synthetic oligonucleotide; CAG chr11 5370189 5370208 5370205 +
gtatttattattatcattaa

SEQ ID NO: 25448 - DNA, 20 bp, Artificial Sequence
  Synthetic oligonucleotide; CAG chr11 5370195 5370214 5370211 +
attattatcattaacagtca

SEQ ID NO: 25449 - DNA, 20 bp, Artificial Sequence
  Synthetic oligonucleotide; TAG chr11 5370205 5370224 5370221 +
ttaacagtcacagtctttta

SEQ ID NO: 25450 - DNA, 20 bp, Artificial Sequence
  Synthetic oligonucleotide; AAG chr11 5370217 5370236 5370233 +
gtcttttatagtaaatccta

SEQ ID NO: 25451 - DNA, 20 bp, Artificial Sequence
  Synthetic oligonucleotide; AAG chr11 5370223 5370242 5370239 +
tatagtaaatcctaaagttg

SEQ ID NO: 25452 - DNA, 20 bp, Artificial Sequence
  Synthetic oligonucleotide; AGG chr11 5370224 5370243 5370240 +
atagtaaatcctaaagttga

SEQ ID NO: 25453 - DNA, 20 bp, Artificial Sequence
  Synthetic oligonucleotide; AAG chr11 5370258 5370277 5370274 +
aatgctatgaaatattaaat

SEQ ID NO: 25454 - DNA, 20 bp, Artificial Sequence
  Synthetic oligonucleotide; TAG chr11 5370267 5370286 5370283 +
aaatattaaataagtgacga

SEQ ID NO: 25455 - DNA, 20 bp, Artificial Sequence
  Synthetic oligonucleotide; CAG chr11 5370290 5370309 5370306 +
tatcttttatgctgactgtc

SEQ ID NO: 25456 - DNA, 20 bp, Artificial Sequence
  Synthetic oligonucleotide; AGG chr11 5370291 5370310 5370307 +
atcttttatgctgactgtcc

SEQ ID NO: 25457 - DNA, 20 bp, Artificial Sequence
  Synthetic oligonucleotide; TGG chr11 5370296 5370315 5370312 +
ttatgctgactgtccaggat

SEQ ID NO: 25458 - DNA, 20 bp, Artificial Sequence
  Synthetic oligonucleotide; CAG chr11 5370307 5370326 5370323 +
gtccaggattggaaatgcta

SEQ ID NO: 25459 - DNA, 20 bp, Artificial Sequence
  Synthetic oligonucleotide; AAG chr11 5370312 5370331 5370328 +
ggattggaaatgctacagca

SEQ ID NO: 25460 - DNA, 20 bp, Artificial Sequence
  Synthetic oligonucleotide; GAG chr11 5370316 5370335 5370332 +
tggaaatgctacagcaaagt

SEQ ID NO: 25461 - DNA, 20 bp, Artificial Sequence
  Synthetic oligonucleotide; TAG chr11 5370320 5370339 5370336 +
aatgctacagcaaagtgaga

SEQ ID NO: 25462 - DNA, 20 bp, Artificial Sequence
  Synthetic oligonucleotide; AGG chr11 5370321 5370340 5370337 +
atgctacagcaaagtgagat

SEQ ID NO: 25463 - DNA, 20 bp, Artificial Sequence
  Synthetic oligonucleotide; AAG chr11 5370346 5370365 5370362 +
ttttatgtatatcatctgca

SEQ ID NO: 25464 - DNA, 20 bp, Artificial Sequence
  Synthetic oligonucleotide; TAG chr11 5370361 5370380 5370377 +
ctgcaaagactaaactaaaa

SEQ ID NO: 25465 - DNA, 20 bp, Artificial Sequence
  Synthetic oligonucleotide; TGG chr11 5370365 5370384 5370381 +
aaagactaaactaaaatagc

SEQ ID NO: 25466 - DNA, 20 bp, Artificial Sequence
  Synthetic oligonucleotide; GGG chr11 5370366 5370385 5370382 +
aagactaaactaaaatagct

SEQ ID NO: 25467 - DNA, 20 bp, Artificial Sequence
  Synthetic oligonucleotide; CAG chr11 5370373 5370392 5370389 +
aactaaaatagctgggttgt

SEQ ID NO: 25468 - DNA, 20 bp, Artificial Sequence
  Synthetic oligonucleotide; AGG chr11 5370374 5370393 5370390 +
actaaaatagctgggttgtc

SEQ ID NO: 25469 - DNA, 20 bp, Artificial Sequence
  Synthetic oligonucleotide; CAG chr11 5370378 5370397 5370394 +
aaatagctgggttgtcaggt

SEQ ID NO: 25470 - DNA, 20 bp, Artificial Sequence
  Synthetic oligonucleotide; GAG chr11 5370380 5370399 5370396 +
atagctgggttgtcaggtca

SEQ ID NO: 25471 - DNA, 20 bp, Artificial Sequence
  Synthetic oligonucleotide; CAG chr11 5370390 5370409 5370406 +
tgtcaggtcagagcaattta

SEQ ID NO: 25472 - DNA, 20 bp, Artificial Sequence
  Synthetic oligonucleotide; AGG chr11 5370391 5370410 5370407 +
gtcaggtcagagcaatttac

SEQ ID NO: 25473 - DNA, 20 bp, Artificial Sequence
  Synthetic oligonucleotide; GGG chr11 5370392 5370411 5370408 +
tcaggtcagagcaatttaca

SEQ ID NO: 25474 - DNA, 20 bp, Artificial Sequence
  Synthetic oligonucleotide; CAG chr11 5370414 5370433 5370430 +
gaaaattaaattcaaatctt

SEQ ID NO: 25475 - DNA, 20 bp, Artificial Sequence
  Synthetic oligonucleotide; GAG chr11 5370416 5370435 5370432 +
aaattaaattcaaatcttca

SEQ ID NO: 25476 - DNA, 20 bp, Artificial Sequence
  Synthetic oligonucleotide; AGG chr11 5370417 5370436 5370433 +
aattaaattcaaatcttcag

SEQ ID NO: 25477 - DNA, 20 bp, Artificial Sequence
  Synthetic oligonucleotide; TGG chr11 5370429 5370448 5370445 +
atcttcagaggatcatttgt

SEQ ID NO: 25478 - DNA, 20 bp, Artificial Sequence
  Synthetic oligonucleotide; GAG chr11 5370450 5370469 5370466 +
ggtatgtctctgtccaattt

SEQ ID NO: 25479 - DNA, 20 bp, Artificial Sequence
  Synthetic oligonucleotide; AGG chr11 5370451 5370470 5370467 +
gtatgtctctgtccaatttg

SEQ ID NO: 25480 - DNA, 20 bp, Artificial Sequence
  Synthetic oligonucleotide; GGG chr11 5370452 5370471 5370468 +
tatgtctctgtccaatttga

SEQ ID NO: 25481 - DNA, 20 bp, Artificial Sequence
  Synthetic oligonucleotide; CAG chr11 5370469 5370488 5370485 +
tgagggcaataatttaatgc

SEQ ID NO: 25482 - DNA, 20 bp, Artificial Sequence
  Synthetic oligonucleotide; TAG chr11 5370551 5370570 5370567 +
tttctcactctttctgtgtt

SEQ ID NO: 25483 - DNA, 20 bp, Artificial Sequence
  Synthetic oligonucleotide; TAG chr11 5370564 5370583 5370580 +
ctgtgtttagaaatgaataa

SEQ ID NO: 25484 - DNA, 20 bp, Artificial Sequence
  Synthetic oligonucleotide; AAG chr11 5370591 5370610 5370607 +
actaaatacatttatttaac

SEQ ID NO: 25485 - DNA, 20 bp, Artificial Sequence
  Synthetic oligonucleotide; CGG chr11 5370594 5370613 5370610 +
aaatacatttatttaacaag

SEQ ID NO: 25486 - DNA, 20 bp, Artificial Sequence
  Synthetic oligonucleotide; TAG chr11 5370605 5370624 5370621 +
tttaacaagcggtcattgtt

SEQ ID NO: 25487 - DNA, 20 bp, Artificial Sequence
  Synthetic oligonucleotide; GAG chr11 5370625 5370644 5370641 +
tagttgtttgtttatctaat

SEQ ID NO: 25488 - DNA, 20 bp, Artificial Sequence
  Synthetic oligonucleotide; GAG chr11 5370627 5370646 5370643 +
gttgtttgtttatctaatga

SEQ ID NO: 25489 - DNA, 20 bp, Artificial Sequence
  Synthetic oligonucleotide; AGG chr11 5370628 5370647 5370644 +
ttgtttgtttatctaatgag

SEQ ID NO: 25490 - DNA, 20 bp, Artificial Sequence
  Synthetic oligonucleotide; TAG chr11 5370642 5370661 5370658 +
aatgagaggcttctctattt

SEQ ID NO: 25491 - DNA, 20 bp, Artificial Sequence
  Synthetic oligonucleotide; TGG chr11 5370652 5370671 5370668 +
ttctctattttagcaactac

SEQ ID NO: 25492 - DNA, 20 bp, Artificial Sequence
  Synthetic oligonucleotide; GGG chr11 5370653 5370672 5370669 +
tctctattttagcaactact

SEQ ID NO: 25493 - DNA, 20 bp, Artificial Sequence
  Synthetic oligonucleotide; TGG chr11 5370669 5370688 5370685 +
tactgggtacaaaaatacat

SEQ ID NO: 25494 - DNA, 20 bp, Artificial Sequence
  Synthetic oligonucleotide; AAG chr11 5370695 5370714 5370711 +
atatattctctgttcctatg

SEQ ID NO: 25495 - DNA, 20 bp, Artificial Sequence
  Synthetic oligonucleotide; CGG chr11 5370710 5370729 5370726 +
ctatgaagcttgtattttaa

SEQ ID NO: 25496 - DNA, 20 bp, Artificial Sequence
  Synthetic oligonucleotide; AAG chr11 5370714 5370733 5370730 +
gaagcttgtattttaacgga

SEQ ID NO: 25497 - DNA, 20 bp, Artificial Sequence
  Synthetic oligonucleotide; AGG chr11 5370715 5370734 5370731 +
aagcttgtattttaacggaa

SEQ ID NO: 25498 - DNA, 20 bp, Artificial Sequence
  Synthetic oligonucleotide; AAG chr11 5370729 5370748 5370745 +
acggaaaggaaataataaaa

SEQ ID NO: 25499 - DNA, 20 bp, Artificial Sequence
  Synthetic oligonucleotide; TAG chr11 5370757 5370776 5370773 +
aaaataattacaacctcata

SEQ ID NO: 25500 - DNA, 20 bp, Artificial Sequence
  Synthetic oligonucleotide; AAG chr11 5370769 5370788 5370785 +
acctcatatagctgctatga

SEQ ID NO: 25501 - DNA, 20 bp, Artificial Sequence
  Synthetic oligonucleotide; AAG chr11 5370773 5370792 5370789 +
catatagctgctatgaaaga

SEQ ID NO: 25502 - DNA, 20 bp, Artificial Sequence
  Synthetic oligonucleotide; TAG chr11 5370792 5370811 5370808 +
aaagaaaaaatttgatgcaa

SEQ ID NO: 25503 - DNA, 20 bp, Artificial Sequence
  Synthetic oligonucleotide; GAG chr11 5370794 5370813 5370810 +
agaaaaaatttgatgcaata

SEQ ID NO: 25504 - DNA, 20 bp, Artificial Sequence
  Synthetic oligonucleotide; AAG chr11 5370814 5370833 5370830 +
gagaataacaaaatttatgt

SEQ ID NO: 25505 - DNA, 20 bp, Artificial Sequence
  Synthetic oligonucleotide; TAG chr11 5370818 5370837 5370834 +
ataacaaaatttatgtaagc

SEQ ID NO: 25506 - DNA, 20 bp, Artificial Sequence
  Synthetic oligonucleotide; CGG chr11 5370832 5370851 5370848 +
gtaagctagtgtgacaaatg

SEQ ID NO: 25507 - DNA, 20 bp, Artificial Sequence
  Synthetic oligonucleotide; GGG chr11 5370833 5370852 5370849 +
taagctagtgtgacaaatgc

SEQ ID NO: 25508 - DNA, 20 bp, Artificial Sequence
  Synthetic oligonucleotide; GAG chr11 5370840 5370859 5370856 +
gtgtgacaaatgcgggttct

SEQ ID NO: 25509 - DNA, 20 bp, Artificial Sequence
  Synthetic oligonucleotide; GAG chr11 5370842 5370861 5370858 +
gtgacaaatgcgggttctga

SEQ ID NO: 25510 - DNA, 20 bp, Artificial Sequence
  Synthetic oligonucleotide; AGG chr11 5370843 5370862 5370859 +
tgacaaatgcgggttctgag

SEQ ID NO: 25511 - DNA, 20 bp, Artificial Sequence
  Synthetic oligonucleotide; GAG chr11 5370845 5370864 5370861 +
acaaatgcgggttctgagag

SEQ ID NO: 25512 - DNA, 20 bp, Artificial Sequence
  Synthetic oligonucleotide; AGG chr11 5370846 5370865 5370862 +
caaatgcgggttctgagagg

SEQ ID NO: 25513 - DNA, 20 bp, Artificial Sequence
  Synthetic oligonucleotide; CAG chr11 5370857 5370876 5370873 +
tctgagaggaggtaatattt

SEQ ID NO: 25514 - DNA, 20 bp, Artificial Sequence
  Synthetic oligonucleotide; GAG chr11 5370869 5370888 5370885 +
taatatttcagctgtgacct

SEQ ID NO: 25515 - DNA, 20 bp, Artificial Sequence
  Synthetic oligonucleotide; GAG chr11 5370871 5370890 5370887 +
atatttcagctgtgacctga

SEQ ID NO: 25516 - DNA, 20 bp, Artificial Sequence
  Synthetic oligonucleotide; TAG chr11 5370877 5370896 5370893 +
cagctgtgacctgagagttg

SEQ ID NO: 25517 - DNA, 20 bp, Artificial Sequence
  Synthetic oligonucleotide; GAG chr11 5370879 5370898 5370895 +
gctgtgacctgagagttgta

SEQ ID NO: 25518 - DNA, 20 bp, Artificial Sequence
  Synthetic oligonucleotide; AGG chr11 5370880 5370899 5370896 +
ctgtgacctgagagttgtag

SEQ ID NO: 25519 - DNA, 20 bp, Artificial Sequence
  Synthetic oligonucleotide; AAG chr11 5370886 5370905 5370902 +
cctgagagttgtagaggcaa

SEQ ID NO: 25520 - DNA, 20 bp, Artificial Sequence
  Synthetic oligonucleotide; AAG chr11 5370889 5370908 5370905 +
gagagttgtagaggcaaaag

SEQ ID NO: 25521 - DNA, 20 bp, Artificial Sequence
  Synthetic oligonucleotide; TAG chr11 5370900 5370919 5370916 +
aggcaaaagaagtattgcca

SEQ ID NO: 25522 - DNA, 20 bp, Artificial Sequence
  Synthetic oligonucleotide; TGG chr11 5370903 5370922 5370919 +
caaaagaagtattgccatag

SEQ ID NO: 25523 - DNA, 20 bp, Artificial Sequence
  Synthetic oligonucleotide; TGG chr11 5370909 5370928 5370925 +
aagtattgccatagtggtat

SEQ ID NO: 25524 - DNA, 20 bp, Artificial Sequence
  Synthetic oligonucleotide; TGG chr11 5370915 5370934 5370931 +
tgccatagtggtattggtcc

SEQ ID NO: 25525 - DNA, 20 bp, Artificial Sequence
  Synthetic oligonucleotide; GAG chr11 5370917 5370936 5370933 +
ccatagtggtattggtcctg

SEQ ID NO: 25526 - DNA, 20 bp, Artificial Sequence
  Synthetic oligonucleotide; TGG chr11 5370923 5370942 5370939 +
tggtattggtcctggagctc

SEQ ID NO: 25527 - DNA, 20 bp, Artificial Sequence
  Synthetic oligonucleotide; GAG chr11 5370932 5370951 5370948 +
tcctggagctctggttcaat

SEQ ID NO: 25528 - DNA, 20 bp, Artificial Sequence
  Synthetic oligonucleotide; CAG chr11 5370935 5370954 5370951 +
tggagctctggttcaatgag

SEQ ID NO: 25529 - DNA, 20 bp, Artificial Sequence
  Synthetic oligonucleotide; CAG chr11 5370939 5370958 5370955 +
gctctggttcaatgagcaga

SEQ ID NO: 25530 - DNA, 20 bp, Artificial Sequence
  Synthetic oligonucleotide; AAG chr11 5370942 5370961 5370958 +
ctggttcaatgagcagacag

SEQ ID NO: 25531 - DNA, 20 bp, Artificial Sequence
  Synthetic oligonucleotide; AGG chr11 5370943 5370962 5370959 +
tggttcaatgagcagacaga

SEQ ID NO: 25532 - DNA, 20 bp, Artificial Sequence
  Synthetic oligonucleotide; AAG chr11 5370946 5370965 5370962 +
ttcaatgagcagacagaagg

SEQ ID NO: 25533 - DNA, 20 bp, Artificial Sequence
  Synthetic oligonucleotide; GAG chr11 5370948 5370967 5370964 +
caatgagcagacagaaggaa

SEQ ID NO: 25534 - DNA, 20 bp, Artificial Sequence
  Synthetic oligonucleotide; CAG chr11 5370969 5370988 5370985 +
agaaccatatgatcatactt

SEQ ID NO: 25535 - DNA, 20 bp, Artificial Sequence
  Synthetic oligonucleotide; AGG chr11 5370970 5370989 5370986 +
gaaccatatgatcatacttc

SEQ ID NO: 25536 - DNA, 20 bp, Artificial Sequence
  Synthetic oligonucleotide; AAG chr11 5370976 5370995 5370992 +
tatgatcatacttcaggaaa

SEQ ID NO: 25537 - DNA, 20 bp, Artificial Sequence
  Synthetic oligonucleotide; TGG chr11 5370992 5371011 5371008 +
gaaaaagacttacacatgat

SEQ ID NO: 25538 - DNA, 20 bp, Artificial Sequence
  Synthetic oligonucleotide; GGG chr11 5370993 5371012 5371009 +
aaaaagacttacacatgatt

SEQ ID NO: 25539 - DNA, 20 bp, Artificial Sequence
  Synthetic oligonucleotide; GGG chr11 5370994 5371013 5371010 +
aaaagacttacacatgattg

SEQ ID NO: 25540 - DNA, 20 bp, Artificial Sequence
  Synthetic oligonucleotide; AAG chr11 5371004 5371023 5371020 +
cacatgattggggctaccca

SEQ ID NO: 25541 - DNA, 20 bp, Artificial Sequence
  Synthetic oligonucleotide; AGG chr11 5371005 5371024 5371021 +
acatgattggggctacccaa

SEQ ID NO: 25542 - DNA, 20 bp, Artificial Sequence
  Synthetic oligonucleotide; GGG chr11 5371006 5371025 5371022 +
catgattggggctacccaaa

SEQ ID NO: 25543 - DNA, 20 bp, Artificial Sequence
  Synthetic oligonucleotide; TGG chr11 5371011 5371030 5371027 +
ttggggctacccaaagggac

SEQ ID NO: 25544 - DNA, 20 bp, Artificial Sequence
  Synthetic oligonucleotide; AAG chr11 5371021 5371040 5371037 +
ccaaagggactggtttttcc

SEQ ID NO: 25545 - DNA, 20 bp, Artificial Sequence
  Synthetic oligonucleotide; GAG chr11 5371023 5371042 5371039 +
aaagggactggtttttccaa

SEQ ID NO: 25546 - DNA, 20 bp, Artificial Sequence
  Synthetic oligonucleotide; CAG chr11 5371026 5371045 5371042 +
gggactggtttttccaagag

SEQ ID NO: 25547 - DNA, 20 bp, Artificial Sequence
  Synthetic oligonucleotide; GAG chr11 5371036 5371055 5371052 +
tttccaagagcagataattt

SEQ ID NO: 25548 - DNA, 20 bp, Artificial Sequence
  Synthetic oligonucleotide; TAG chr11 5371048 5371067 5371064 +
gataatttgagtgataaaaa

SEQ ID NO: 25549 - DNA, 20 bp, Artificial Sequence
  Synthetic oligonucleotide; TAG chr11 5371074 5371093 5371090 +
ttttgaacccttccttctgc

SEQ ID NO: 25550 - DNA, 20 bp, Artificial Sequence
  Synthetic oligonucleotide; TAG chr11 5371080 5371099 5371096 +
acccttccttctgctagccc

SEQ ID NO: 25551 - DNA, 20 bp, Artificial Sequence
  Synthetic oligonucleotide; TGG chr11 5371086 5371105 5371102 +
ccttctgctagccctagcta

SEQ ID NO: 25552 - DNA, 20 bp, Artificial Sequence
  Synthetic oligonucleotide; TGG chr11 5371096 5371115 5371112 +
gccctagctatggaccacca

SEQ ID NO: 25553 - DNA, 20 bp, Artificial Sequence
  Synthetic oligonucleotide; AAG chr11 5371105 5371124 5371121 +
atggaccaccatggatattg

SEQ ID NO: 25554 - DNA, 20 bp, Artificial Sequence
  Synthetic oligonucleotide; AAG chr11 5371109 5371128 5371125 +
accaccatggatattgaagt

SEQ ID NO: 25555 - DNA, 20 bp, Artificial Sequence
  Synthetic oligonucleotide; AGG chr11 5371110 5371129 5371126 +
ccaccatggatattgaagta

SEQ ID NO: 25556 - DNA, 20 bp, Artificial Sequence
  Synthetic oligonucleotide; GGG chr11 5371111 5371130 5371127 +
caccatggatattgaagtaa

SEQ ID NO: 25557 - DNA, 20 bp, Artificial Sequence
  Synthetic oligonucleotide; TGG chr11 5371122 5371141 5371138 +
ttgaagtaagggctttgttt

SEQ ID NO: 25558 - DNA, 20 bp, Artificial Sequence
  Synthetic oligonucleotide; GAG chr11 5371145 5371164 5371161 +
aattactctccacacattct

SEQ ID NO: 25559 - DNA, 20 bp, Artificial Sequence
  Synthetic oligonucleotide; AGG chr11 5371146 5371165 5371162 +
attactctccacacattctg

SEQ ID NO: 25560 - DNA, 20 bp, Artificial Sequence
  Synthetic oligonucleotide; AAG chr11 5371155 5371174 5371171 +
cacacattctgaggatatac

SEQ ID NO: 25561 - DNA, 20 bp, Artificial Sequence
  Synthetic oligonucleotide; AGG chr11 5371156 5371175 5371172 +
acacattctgaggatataca

SEQ ID NO: 25562 - DNA, 20 bp, Artificial Sequence
  Synthetic oligonucleotide; GGG chr11 5371157 5371176 5371173 +
cacattctgaggatatacaa

SEQ ID NO: 25563 - DNA, 20 bp, Artificial Sequence
  Synthetic oligonucleotide; TAG chr11 5371173 5371192 5371189 +
acaagggcactgaaatattc

SEQ ID NO: 25564 - DNA, 20 bp, Artificial Sequence
  Synthetic oligonucleotide; AAG chr11 5371177 5371196 5371193 +
gggcactgaaatattctaga

SEQ ID NO: 25565 - DNA, 20 bp, Artificial Sequence
  Synthetic oligonucleotide; TAG chr11 5371184 5371203 5371200 +
gaaatattctagaaagtcca

SEQ ID NO: 25566 - DNA, 20 bp, Artificial Sequence
  Synthetic oligonucleotide; AAG chr11 5371209 5371228 5371225 +
cattctgatgtttatactct

SEQ ID NO: 25567 - DNA, 20 bp, Artificial Sequence
  Synthetic oligonucleotide; CAG chr11 5371217 5371236 5371233 +
tgtttatactctaagccaca

SEQ ID NO: 25568 - DNA, 20 bp, Artificial Sequence
  Synthetic oligonucleotide; CGG chr11 5371230 5371249 5371246 +
agccacacagcacctttccc

SEQ ID NO: 25569 - DNA, 20 bp, Artificial Sequence
  Synthetic oligonucleotide; TAG chr11 5371236 5371255 5371252 +
acagcacctttccccggatc

SEQ ID NO: 25570 - DNA, 20 bp, Artificial Sequence
  Synthetic oligonucleotide; AGG chr11 5371237 5371256 5371253 +
cagcacctttccccggatct

SEQ ID NO: 25571 - DNA, 20 bp, Artificial Sequence
  Synthetic oligonucleotide; GGG chr11 5371238 5371257 5371254 +
agcacctttccccggatcta

SEQ ID NO: 25572 - DNA, 20 bp, Artificial Sequence
  Synthetic oligonucleotide; TAG chr11 5371251 5371270 5371267 +
ggatctagggtctttcacat

SEQ ID NO: 25573 - DNA, 20 bp, Artificial Sequence
  Synthetic oligonucleotide; AGG chr11 5371252 5371271 5371268 +
gatctagggtctttcacatt

SEQ ID NO: 25574 - DNA, 20 bp, Artificial Sequence
  Synthetic oligonucleotide; CAG chr11 5371278 5371297 5371294 +
atttttttaaaactcaaaca

SEQ ID NO: 25575 - DNA, 20 bp, Artificial Sequence
  Synthetic oligonucleotide; AAG chr11 5371281 5371300 5371297 +
tttttaaaactcaaacacag

SEQ ID NO: 25576 - DNA, 20 bp, Artificial Sequence
  Synthetic oligonucleotide; TGG chr11 5371319 5371338 5371335 +
catataattctcattctctg

SEQ ID NO: 25577 - DNA, 20 bp, Artificial Sequence
  Synthetic oligonucleotide; TAG chr11 5371337 5371356 5371353 +
tgtggctcataaacatttaa

SEQ ID NO: 25578 - DNA, 20 bp, Artificial Sequence
  Synthetic oligonucleotide; GAG chr11 5371339 5371358 5371355 +
tggctcataaacatttaata

SEQ ID NO: 25579 - DNA, 20 bp, Artificial Sequence
  Synthetic oligonucleotide; GAG chr11 5371366 5371385 5371382 +
tgatgaaactgtaaaaccct

SEQ ID NO: 25580 - DNA, 20 bp, Artificial Sequence
  Synthetic oligonucleotide; TAG chr11 5371372 5371391 5371388 +
aactgtaaaaccctgagttg

SEQ ID NO: 25581 - DNA, 20 bp, Artificial Sequence
  Synthetic oligonucleotide; AGG chr11 5371373 5371392 5371389 +
actgtaaaaccctgagttgt

SEQ ID NO: 25582 - DNA, 20 bp, Artificial Sequence
  Synthetic oligonucleotide; CGG chr11 5371377 5371396 5371393 +
taaaaccctgagttgtaggc

SEQ ID NO: 25583 - DNA, 20 bp, Artificial Sequence
  Synthetic oligonucleotide; GAG chr11 5371379 5371398 5371395 +
aaaccctgagttgtaggccg

SEQ ID NO: 25584 - DNA, 20 bp, Artificial Sequence
  Synthetic oligonucleotide; AAG chr11 5371400 5371419 5371416 +
agatataaaatttcaacata

SEQ ID NO: 25585 - DNA, 20 bp, Artificial Sequence
  Synthetic oligonucleotide; CAG chr11 5371418 5371437 5371434 +
taaagaatgaacaaaatgac

SEQ ID NO: 25586 - DNA, 20 bp, Artificial Sequence
  Synthetic oligonucleotide; GAG chr11 5371420 5371439 5371436 +
aagaatgaacaaaatgacca

SEQ ID NO: 25587 - DNA, 20 bp, Artificial Sequence
  Synthetic oligonucleotide; AGG chr11 5371421 5371440 5371437 +
agaatgaacaaaatgaccag

SEQ ID NO: 25588 - DNA, 20 bp, Artificial Sequence
  Synthetic oligonucleotide; CAG chr11 5371424 5371443 5371440 +
atgaacaaaatgaccagagg

SEQ ID NO: 25589 - DNA, 20 bp, Artificial Sequence
  Synthetic oligonucleotide; GAG chr11 5371426 5371445 5371442 +
gaacaaaatgaccagaggca

SEQ ID NO: 25590 - DNA, 20 bp, Artificial Sequence
  Synthetic oligonucleotide; AGG chr11 5371427 5371446 5371443 +
aacaaaatgaccagaggcag

SEQ ID NO: 25591 - DNA, 20 bp, Artificial Sequence
  Synthetic oligonucleotide; GAG chr11 5371436 5371455 5371452 +
accagaggcagaggtaccct

SEQ ID NO: 25592 - DNA, 20 bp, Artificial Sequence
  Synthetic oligonucleotide; GAG chr11 5371438 5371457 5371454 +
cagaggcagaggtaccctga

SEQ ID NO: 25593 - DNA, 20 bp, Artificial Sequence
  Synthetic oligonucleotide; CAG chr11 5371442 5371461 5371458 +
ggcagaggtaccctgagaga

SEQ ID NO: 25594 - DNA, 20 bp, Artificial Sequence
  Synthetic oligonucleotide; TAG chr11 5371448 5371467 5371464 +
ggtaccctgagagacagtga

SEQ ID NO: 25595 - DNA, 20 bp, Artificial Sequence
  Synthetic oligonucleotide; AAG chr11 5371460 5371479 5371476 +
gacagtgatagctgtatcta

SEQ ID NO: 25596 - DNA, 20 bp, Artificial Sequence
  Synthetic oligonucleotide; GAG chr11 5371462 5371481 5371478 +
cagtgatagctgtatctaaa

SEQ ID NO: 25597 - DNA, 20 bp, Artificial Sequence
  Synthetic oligonucleotide; TAG chr11 5371480 5371499 5371496 +
aagagtactgatattaaaaa

SEQ ID NO: 25598 - DNA, 20 bp, Artificial Sequence
  Synthetic oligonucleotide; GAG chr11 5371482 5371501 5371498 +
gagtactgatattaaaaata

SEQ ID NO: 25599 - DNA, 20 bp, Artificial Sequence
  Synthetic oligonucleotide; AAG chr11 5371510 5371529 5371526 +
catatatctcattatatcca

SEQ ID NO: 25600 - DNA, 20 bp, Artificial Sequence
  Synthetic oligonucleotide; AGG chr11 5371511 5371530 5371527 +
atatatctcattatatccaa

SEQ ID NO: 25601 - DNA, 20 bp, Artificial Sequence
  Synthetic oligonucleotide; GGG chr11 5371512 5371531 5371528 +
tatatctcattatatccaaa

SEQ ID NO: 25602 - DNA, 20 bp, Artificial Sequence
  Synthetic oligonucleotide; AAG chr11 5371521 5371540 5371537 +
ttatatccaaagggttacat

SEQ ID NO: 25603 - DNA, 20 bp, Artificial Sequence
  Synthetic oligonucleotide; AAG chr11 5371528 5371547 5371544 +
caaagggttacataagtttt

SEQ ID NO: 25604 - DNA, 20 bp, Artificial Sequence
  Synthetic oligonucleotide; GAG chr11 5371530 5371549 5371546 +
aagggttacataagttttaa

SEQ ID NO: 25605 - DNA, 20 bp, Artificial Sequence
  Synthetic oligonucleotide; TGG chr11 5371533 5371552 5371549 +
ggttacataagttttaagag

SEQ ID NO: 25606 - DNA, 20 bp, Artificial Sequence
  Synthetic oligonucleotide; AAG chr11 5371546 5371565 5371562 +
ttaagagtggaaataacatg

SEQ ID NO: 25607 - DNA, 20 bp, Artificial Sequence
  Synthetic oligonucleotide; AGG chr11 5371547 5371566 5371563 +
taagagtggaaataacatga

SEQ ID NO: 25608 - DNA, 20 bp, Artificial Sequence
  Synthetic oligonucleotide; TAG chr11 5371562 5371581 5371578 +
catgaaggaccctaaacaat

SEQ ID NO: 25609 - DNA, 20 bp, Artificial Sequence
  Synthetic oligonucleotide; AGG chr11 5371563 5371582 5371579 +
atgaaggaccctaaacaatt

SEQ ID NO: 25610 - DNA, 20 bp, Artificial Sequence
  Synthetic oligonucleotide; CAG chr11 5371569 5371588 5371585 +
gaccctaaacaattaggaaa

SEQ ID NO: 25611 - DNA, 20 bp, Artificial Sequence
  Synthetic oligonucleotide; CAG chr11 5371587 5371606 5371603 +
aacagaaatttgacttgctt

SEQ ID NO: 25612 - DNA, 20 bp, Artificial Sequence
  Synthetic oligonucleotide; AAG chr11 5371594 5371613 5371610 +
atttgacttgcttcagataa

SEQ ID NO: 25613 - DNA, 20 bp, Artificial Sequence
  Synthetic oligonucleotide; AAG chr11 5371621 5371640 5371637 +
taaaatattttatctgaaac

SEQ ID NO: 25614 - DNA, 20 bp, Artificial Sequence
  Synthetic oligonucleotide; AAG chr11 5371625 5371644 5371641 +
atattttatctgaaacaagt

SEQ ID NO: 25615 - DNA, 20 bp, Artificial Sequence
  Synthetic oligonucleotide; TAG chr11 5371643 5371662 5371659 +
gtaagcttgttcaaaaaata

SEQ ID NO: 25616 - DNA, 20 bp, Artificial Sequence
  Synthetic oligonucleotide; AGG chr11 5371644 5371663 5371660 +
taagcttgttcaaaaaatat

SEQ ID NO: 25617 - DNA, 20 bp, Artificial Sequence
  Synthetic oligonucleotide; TAG chr11 5371660 5371679 5371676 +
atataggatatatgtgtaca

SEQ ID NO: 25618 - DNA, 20 bp, Artificial Sequence
  Synthetic oligonucleotide; GAG chr11 5371664 5371683 5371680 +
aggatatatgtgtacatagt

SEQ ID NO: 25619 - DNA, 20 bp, Artificial Sequence
  Synthetic oligonucleotide; AAG chr11 5371682 5371701 5371698 +
gtgagatgattacttcaatc

SEQ ID NO: 25620 - DNA, 20 bp, Artificial Sequence
  Synthetic oligonucleotide; TAG chr11 5371719 5371738 5371735 +
catcaatacaacaccttcca

SEQ ID NO: 25621 - DNA, 20 bp, Artificial Sequence
  Synthetic oligonucleotide; AAG chr11 5371746 5371765 5371762 +
cttttgctttttctttgtgt

SEQ ID NO: 25622 - DNA, 20 bp, Artificial Sequence
  Synthetic oligonucleotide; AGG chr11 5371747 5371766 5371763 +
ttttgctttttctttgtgta

SEQ ID NO: 25623 - DNA, 20 bp, Artificial Sequence
  Synthetic oligonucleotide; GGG chr11 5371748 5371767 5371764 +
tttgctttttctttgtgtaa

SEQ ID NO: 25624 - DNA, 20 bp, Artificial Sequence
  Synthetic oligonucleotide; TAG chr11 5371781 5371800 5371797 +
ctactgtcataacaaatgtt

SEQ ID NO: 25625 - DNA, 20 bp, Artificial Sequence
  Synthetic oligonucleotide; CAG chr11 5371788 5371807 5371804 +
cataacaaatgtttagttta

SEQ ID NO: 25626 - DNA, 20 bp, Artificial Sequence
  Synthetic oligonucleotide; CAG chr11 5371793 5371812 5371809 +
caaatgtttagtttacagta

SEQ ID NO: 25627 - DNA, 20 bp, Artificial Sequence
  Synthetic oligonucleotide; AAG chr11 5371800 5371819 5371816 +
ttagtttacagtacagtatt

SEQ ID NO: 25628 - DNA, 20 bp, Artificial Sequence
  Synthetic oligonucleotide; TAG chr11 5371819 5371838 5371835 +
taagtcttcatgccatacac

SEQ ID NO: 25629 - DNA, 20 bp, Artificial Sequence
  Synthetic oligonucleotide; CAG chr11 5371846 5371865 5371862 +
ctaaacttatttatcctata

SEQ ID NO: 25630 - DNA, 20 bp, Artificial Sequence
  Synthetic oligonucleotide; AAG chr11 5371853 5371872 5371869 +
tatttatcctatacagctgc

SEQ ID NO: 25631 - DNA, 20 bp, Artificial Sequence
  Synthetic oligonucleotide; GAG chr11 5371946 5371965 5371962 +
tttgaccttatttttctttt

SEQ ID NO: 25632 - DNA, 20 bp, Artificial Sequence
  Synthetic oligonucleotide; AAG chr11 5371960 5371979 5371976 +
tcttttgagattccacatat

SEQ ID NO: 25633 - DNA, 20 bp, Artificial Sequence
  Synthetic oligonucleotide; TGG chr11 5371993 5372012 5372009 +
cctttatttgtttctgtgtc

SEQ ID NO: 25634 - DNA, 20 bp, Artificial Sequence
  Synthetic oligonucleotide; TAG chr11 5372007 5372026 5372023 +
tgtgtctggtttatttcact

SEQ ID NO: 25635 - DNA, 20 bp, Artificial Sequence
  Synthetic oligonucleotide; TAG chr11 5372022 5372041 5372038 +
tcacttagcaaaatgtactc

SEQ ID NO: 25636 - DNA, 20 bp, Artificial Sequence
  Synthetic oligonucleotide; AGG chr11 5372023 5372042 5372039 +
cacttagcaaaatgtactct

SEQ ID NO: 25637 - DNA, 20 bp, Artificial Sequence
  Synthetic oligonucleotide; AAG chr11 5372054 5372073 5372070 +
ttccccccatctcctttttt

SEQ ID NO: 25638 - DNA, 20 bp, Artificial Sequence
  Synthetic oligonucleotide; AGG chr11 5372055 5372074 5372071 +
tccccccatctcctttttta

SEQ ID NO: 25639 - DNA, 20 bp, Artificial Sequence
  Synthetic oligonucleotide; CAG chr11 5372113 5372132 5372129 +
atatatcacaatatcatata

SEQ ID NO: 25640 - DNA, 20 bp, Artificial Sequence
  Synthetic oligonucleotide; TAG chr11 5372151 5372170 5372167 +
tttatctgttcatctatata

SEQ ID NO: 25641 - DNA, 20 bp, Artificial Sequence
  Synthetic oligonucleotide; TAG chr11 5372162 5372181 5372178 +
atctatatatagataccact

SEQ ID NO: 25642 - DNA, 20 bp, Artificial Sequence
  Synthetic oligonucleotide; TGG chr11 5372180 5372199 5372196 +
cttagattgtttccatgtct

SEQ ID NO: 25643 - DNA, 20 bp, Artificial Sequence
  Synthetic oligonucleotide; GAG chr11 5372211 5372230 5372227 +
aataatgctgcaattaacat

SEQ ID NO: 25644 - DNA, 20 bp, Artificial Sequence
  Synthetic oligonucleotide; GAG chr11 5372213 5372232 5372229 +
taatgctgcaattaacatga

SEQ ID NO: 25645 - DNA, 20 bp, Artificial Sequence
  Synthetic oligonucleotide; CAG chr11 5372218 5372237 5372234 +
ctgcaattaacatgagagtg

SEQ ID NO: 25646 - DNA, 20 bp, Artificial Sequence
  Synthetic oligonucleotide; TAG chr11 5372222 5372241 5372238 +
aattaacatgagagtgcaga

SEQ ID NO: 25647 - DNA, 20 bp, Artificial Sequence
  Synthetic oligonucleotide; TAG chr11 5372228 5372247 5372244 +
catgagagtgcagatagctc

SEQ ID NO: 25648 - DNA, 20 bp, Artificial Sequence
  Synthetic oligonucleotide; CGG chr11 5372237 5372256 5372253 +
gcagatagctctagaaaatg

SEQ ID NO: 25649 - DNA, 20 bp, Artificial Sequence
  Synthetic oligonucleotide; TGG chr11 5372253 5372272 5372269 +
aatgcggattttatttattt

SEQ ID NO: 25650 - DNA, 20 bp, Artificial Sequence
  Synthetic oligonucleotide; CAG chr11 5372265 5372284 5372281 +
atttattttggatacatata

SEQ ID NO: 25651 - DNA, 20 bp, Artificial Sequence
  Synthetic oligonucleotide; CAG chr11 5372268 5372287 5372284 +
tattttggatacatatacag

SEQ ID NO: 25652 - DNA, 20 bp, Artificial Sequence
  Synthetic oligonucleotide; GAG chr11 5372270 5372289 5372286 +
ttttggatacatatacagca

SEQ ID NO: 25653 - DNA, 20 bp, Artificial Sequence
  Synthetic oligonucleotide; TAG chr11 5372304 5372323 5372320 +
tcatacaataactctatttt

SEQ ID NO: 25654 - DNA, 20 bp, Artificial Sequence
  Synthetic oligonucleotide; GAG chr11 5372313 5372332 5372329 +
aactctatttttagttgttt

SEQ ID NO: 25655 - DNA, 20 bp, Artificial Sequence
  Synthetic oligonucleotide; TGG chr11 5372339 5372358 5372355 +
cttccatacgttttctataa

SEQ ID NO: 25656 - DNA, 20 bp, Artificial Sequence
  Synthetic oligonucleotide; CAG chr11 5372364 5372383 5372380 +
atgttaacttacattcccac

SEQ ID NO: 25657 - DNA, 20 bp, Artificial Sequence
  Synthetic oligonucleotide; AAG chr11 5372375 5372394 5372391 +
cattcccaccagctatgcac

SEQ ID NO: 25658 - DNA, 20 bp, Artificial Sequence
  Synthetic oligonucleotide; GAG chr11 5372377 5372396 5372393 +
ttcccaccagctatgcacaa

SEQ ID NO: 25659 - DNA, 20 bp, Artificial Sequence
  Synthetic oligonucleotide; CAG chr11 5372394 5372413 5372410 +
caagagttctcctttctcca

SEQ ID NO: 25660 - DNA, 20 bp, Artificial Sequence
  Synthetic oligonucleotide; TAG chr11 5372432 5372451 5372448 +
tctcttgtcttttttgataa

SEQ ID NO: 25661 - DNA, 20 bp, Artificial Sequence
  Synthetic oligonucleotide; CAG chr11 5372444 5372463 5372460 +
tttgataatagccatctcaa

SEQ ID NO: 25662 - DNA, 20 bp, Artificial Sequence
  Synthetic oligonucleotide; AGG chr11 5372445 5372464 5372461 +
ttgataatagccatctcaac

SEQ ID NO: 25663 - DNA, 20 bp, Artificial Sequence
  Synthetic oligonucleotide; GAG chr11 5372451 5372470 5372467 +
atagccatctcaacaggtgt

SEQ ID NO: 25664 - DNA, 20 bp, Artificial Sequence
  Synthetic oligonucleotide; TGG chr11 5372463 5372482 5372479 +
acaggtgtgagtgatacttg

SEQ ID NO: 25665 - DNA, 20 bp, Artificial Sequence
  Synthetic oligonucleotide; TGG chr11 5372491 5372510 5372507 +
atttgcattttcctgatgat

SEQ ID NO: 25666 - DNA, 20 bp, Artificial Sequence
  Synthetic oligonucleotide; TAG chr11 5372499 5372518 5372515 +
tttcctgatgattggtgatg

SEQ ID NO: 25667 - DNA, 20 bp, Artificial Sequence
  Synthetic oligonucleotide; CAG chr11 5372541 5372560 5372557 +
gctgaccatttgcatgtctt

SEQ ID NO: 25668 - DNA, 20 bp, Artificial Sequence
  Synthetic oligonucleotide; GAG chr11 5372543 5372562 5372559 +
tgaccatttgcatgtcttca

SEQ ID NO: 25669 - DNA, 20 bp, Artificial Sequence
  Synthetic oligonucleotide; CAG chr11 5372557 5372576 5372573 +
tcttcagagaaatgtatatt

SEQ ID NO: 25670 - DNA, 20 bp, Artificial Sequence
  Synthetic oligonucleotide; TAG chr11 5372580 5372599 5372596 +
atcctttgcccatttttact

SEQ ID NO: 25671 - DNA, 20 bp, Artificial Sequence
  Synthetic oligonucleotide; AGG chr11 5372581 5372600 5372597 +
tcctttgcccatttttactt

SEQ ID NO: 25672 - DNA, 20 bp, Artificial Sequence
  Synthetic oligonucleotide; TAG chr11 5372607 5372626 5372623 +
ctattatattttttcatatt

SEQ ID NO: 25673 - DNA, 20 bp, Artificial Sequence
  Synthetic oligonucleotide; GAG chr11 5372616 5372635 5372632 +
tttttcatatttagttgatt

SEQ ID NO: 25674 - DNA, 20 bp, Artificial Sequence
  Synthetic oligonucleotide; TGG chr11 5372633 5372652 5372649 +
attgagttccttatatattt

SEQ ID NO: 25675 - DNA, 20 bp, Artificial Sequence
  Synthetic oligonucleotide; GGG chr11 5372634 5372653 5372650 +
ttgagttccttatatatttt

SEQ ID NO: 25676 - DNA, 20 bp, Artificial Sequence
  Synthetic oligonucleotide; TAG chr11 5372640 5372659 5372656 +
tccttatatattttgggtat

SEQ ID NO: 25677 - DNA, 20 bp, Artificial Sequence
  Synthetic oligonucleotide; CAG chr11 5372651 5372670 5372667 +
tttgggtattagacttgtat

SEQ ID NO: 25678 - DNA, 20 bp, Artificial Sequence
  Synthetic oligonucleotide; CAG chr11 5372717 5372736 5372733 +
tgattgttttctttgctgtg

SEQ ID NO: 25679 - DNA, 20 bp, Artificial Sequence
  Synthetic oligonucleotide; TAG chr11 5372728 5372747 5372744 +
tttgctgtgcagaaaatatt

SEQ ID NO: 25680 - DNA, 20 bp, Artificial Sequence
  Synthetic oligonucleotide; GAG chr11 5372772 5372791 5372788 +
tatttttgcttttgttacct

SEQ ID NO: 25681 - DNA, 20 bp, Artificial Sequence
  Synthetic oligonucleotide; TGG chr11 5372778 5372797 5372794 +
tgcttttgttacctgagctc

SEQ ID NO: 25682 - DNA, 20 bp, Artificial Sequence
  Synthetic oligonucleotide; CAG chr11 5372790 5372809 5372806 +
ctgagctctggcacatttta

SEQ ID NO: 25683 - DNA, 20 bp, Artificial Sequence
  Synthetic oligonucleotide; CAG chr11 5372822 5372841 5372838 +
tgaaaatttgtatgaaacca

SEQ ID NO: 25684 - DNA, 20 bp, Artificial Sequence
  Synthetic oligonucleotide; TGG chr11 5372837 5372856 5372853 +
aaccacagaacacccccaaa

SEQ ID NO: 25685 - DNA, 20 bp, Artificial Sequence
  Synthetic oligonucleotide; GAG chr11 5372853 5372872 5372869 +
caaatggccaaaacaatctt

SEQ ID NO: 25686 - DNA, 20 bp, Artificial Sequence
  Synthetic oligonucleotide; AAG chr11 5372857 5372876 5372873 +
tggccaaaacaatcttgaga

SEQ ID NO: 25687 - DNA, 20 bp, Artificial Sequence
  Synthetic oligonucleotide; TGG chr11 5372874 5372893 5372890 +
agaaagaaaaaccaacttga

SEQ ID NO: 25688 - DNA, 20 bp, Artificial Sequence
  Synthetic oligonucleotide; CAG chr11 5372877 5372896 5372893 +
aagaaaaaccaacttgatgg

SEQ ID NO: 25689 - DNA, 20 bp, Artificial Sequence
  Synthetic oligonucleotide; AAG chr11 5372909 5372928 5372925 +
tgatttcaaattatattaca

SEQ ID NO: 25690 - DNA, 20 bp, Artificial Sequence
  Synthetic oligonucleotide; TAG chr11 5372915 5372934 5372931 +
caaattatattacaaagcta

SEQ ID NO: 25691 - DNA, 20 bp, Artificial Sequence
  Synthetic oligonucleotide; AAG chr11 5372927 5372946 5372943 +
caaagctatagtaaccaaaa

SEQ ID NO: 25692 - DNA, 20 bp, Artificial Sequence
  Synthetic oligonucleotide; TGG chr11 5372932 5372951 5372948 +
ctatagtaaccaaaaaagta

SEQ ID NO: 25693 - DNA, 20 bp, Artificial Sequence
  Synthetic oligonucleotide; TAG chr11 5372949 5372968 5372965 +
gtatggtactatcacataaa

SEQ ID NO: 25694 - DNA, 20 bp, Artificial Sequence
  Synthetic oligonucleotide; TAG chr11 5372957 5372976 5372973 +
ctatcacataaatagacaca

SEQ ID NO: 25695 - DNA, 20 bp, Artificial Sequence
  Synthetic oligonucleotide; CAG chr11 5372971 5372990 5372987 +
gacacatagaccaaattgaa

SEQ ID NO: 25696 - DNA, 20 bp, Artificial Sequence
  Synthetic oligonucleotide; AAG chr11 5372978 5372997 5372994 +
agaccaaattgaacagaata

SEQ ID NO: 25697 - DNA, 20 bp, Artificial Sequence
  Synthetic oligonucleotide; GAG chr11 5372980 5372999 5372996 +
accaaattgaacagaataaa

SEQ ID NO: 25698 - DNA, 20 bp, Artificial Sequence
  Synthetic oligonucleotide; CAG chr11 5372985 5373004 5373001 +
attgaacagaataaagagcc

SEQ ID NO: 25699 - DNA, 20 bp, Artificial Sequence
  Synthetic oligonucleotide; CAG chr11 5373007 5373026 5373023 +
gaaataaatttacgtatata

SEQ ID NO: 25700 - DNA, 20 bp, Artificial Sequence
  Synthetic oligonucleotide; CAG chr11 5373012 5373031 5373028 +
aaatttacgtatatacagtc

SEQ ID NO: 25701 - DNA, 20 bp, Artificial Sequence
  Synthetic oligonucleotide; AAG chr11 5373026 5373045 5373042 +
acagtccagtaattctcaac

SEQ ID NO: 25702 - DNA, 20 bp, Artificial Sequence
  Synthetic oligonucleotide; AGG chr11 5373027 5373046 5373043 +
cagtccagtaattctcaaca

SEQ ID NO: 25703 - DNA, 20 bp, Artificial Sequence
  Synthetic oligonucleotide; TAG chr11 5373042 5373061 5373058 +
caacaaggccaccaacacaa

SEQ ID NO: 25704 - DNA, 20 bp, Artificial Sequence
  Synthetic oligonucleotide; AGG chr11 5373043 5373062 5373059 +
aacaaggccaccaacacaat

SEQ ID NO: 25705 - DNA, 20 bp, Artificial Sequence
  Synthetic oligonucleotide; GGG chr11 5373044 5373063 5373060 +
acaaggccaccaacacaata

SEQ ID NO: 25706 - DNA, 20 bp, Artificial Sequence
  Synthetic oligonucleotide; GGG chr11 5373045 5373064 5373061 +
caaggccaccaacacaatag

SEQ ID NO: 25707 - DNA, 20 bp, Artificial Sequence
  Synthetic oligonucleotide; AAG chr11 5373048 5373067 5373064 +
ggccaccaacacaatagggg

SEQ ID NO: 25708 - DNA, 20 bp, Artificial Sequence
  Synthetic oligonucleotide; AGG chr11 5373049 5373068 5373065 +
gccaccaacacaatagggga

SEQ ID NO: 25709 - DNA, 20 bp, Artificial Sequence
  Synthetic oligonucleotide; TAG chr11 5373053 5373072 5373069 +
ccaacacaataggggaagga

SEQ ID NO: 25710 - DNA, 20 bp, Artificial Sequence
  Synthetic oligonucleotide; TAG chr11 5373069 5373088 5373085 +
aggatagtctcctcaacaaa

SEQ ID NO: 25711 - DNA, 20 bp, Artificial Sequence
  Synthetic oligonucleotide; TGG chr11 5373075 5373094 5373091 +
gtctcctcaacaaatagtgt

SEQ ID NO: 25712 - DNA, 20 bp, Artificial Sequence
  Synthetic oligonucleotide; GGG chr11 5373076 5373095 5373092 +
tctcctcaacaaatagtgtt

SEQ ID NO: 25713 - DNA, 20 bp, Artificial Sequence
  Synthetic oligonucleotide; TGG chr11 5373084 5373103 5373100 +
acaaatagtgttgggaaaac

SEQ ID NO: 25714 - DNA, 20 bp, Artificial Sequence
  Synthetic oligonucleotide; AAG chr11 5373101 5373120 5373117 +
aactggatatccaaatgcaa

SEQ ID NO: 25715 - DNA, 20 bp, Artificial Sequence
  Synthetic oligonucleotide; TGG chr11 5373112 5373131 5373128 +
caaatgcaaaagaataaaat

SEQ ID NO: 25716 - DNA, 20 bp, Artificial Sequence
  Synthetic oligonucleotide; AAG chr11 5373126 5373145 5373142 +
taaaattggacctttacctt

SEQ ID NO: 25717 - DNA, 20 bp, Artificial Sequence
  Synthetic oligonucleotide; AAG chr11 5373133 5373152 5373149 +
ggacctttaccttaagccat

SEQ ID NO: 25718 - DNA, 20 bp, Artificial Sequence
  Synthetic oligonucleotide; TAG chr11 5373147 5373166 5373163 +
agccataagtcaactcaaaa

SEQ ID NO: 25719 - DNA, 20 bp, Artificial Sequence
  Synthetic oligonucleotide; AAG chr11 5373154 5373173 5373170 +
agtcaactcaaaatagatta

SEQ ID NO: 25720 - DNA, 20 bp, Artificial Sequence
  Synthetic oligonucleotide; AAG chr11 5373167 5373186 5373183 +
tagattaaagacataaatgt

SEQ ID NO: 25721 - DNA, 20 bp, Artificial Sequence
  Synthetic oligonucleotide; TGG chr11 5373190 5373209 5373206 +
acctgaaatcacaaaactcc

SEQ ID NO: 25722 - DNA, 20 bp, Artificial Sequence
  Synthetic oligonucleotide; AAG chr11 5373193 5373212 5373209 +
tgaaatcacaaaactcctgg

SEQ ID NO: 25723 - DNA, 20 bp, Artificial Sequence
  Synthetic oligonucleotide; TAG chr11 5373204 5373223 5373220 +
aactcctggaagaacatgta

SEQ ID NO: 25724 - DNA, 20 bp, Artificial Sequence
  Synthetic oligonucleotide; GAG chr11 5373206 5373225 5373222 +
ctcctggaagaacatgtata

SEQ ID NO: 25725 - DNA, 20 bp, Artificial Sequence
  Synthetic oligonucleotide; TAG chr11 5373210 5373229 5373226 +
tggaagaacatgtatagaga

SEQ ID NO: 25726 - DNA, 20 bp, Artificial Sequence
  Synthetic oligonucleotide; CAG chr11 5373224 5373243 5373240 +
tagagatagctgcttgatat

SEQ ID NO: 25727 - DNA, 20 bp, Artificial Sequence
  Synthetic oligonucleotide; CGG chr11 5373230 5373249 5373246 +
tagctgcttgatatcagtct

SEQ ID NO: 25728 - DNA, 20 bp, Artificial Sequence
  Synthetic oligonucleotide; TAG chr11 5373241 5373260 5373257 +
tatcagtctcggcaattttt

SEQ ID NO: 25729 - DNA, 20 bp, Artificial Sequence
  Synthetic oligonucleotide; AAG chr11 5373260 5373279 5373276 +
ttagatattgtcttgatttg

SEQ ID NO: 25730 - DNA, 20 bp, Artificial Sequence
  Synthetic oligonucleotide; TGG chr11 5373274 5373293 5373290 +
gatttgaagaaaattttcac

SEQ ID NO: 25731 - DNA, 20 bp, Artificial Sequence
  Synthetic oligonucleotide; AAG chr11 5373277 5373296 5373293 +
ttgaagaaaattttcactgg

SEQ ID NO: 25732 - DNA, 20 bp, Artificial Sequence
  Synthetic oligonucleotide; AAG chr11 5373312 5373331 5373328 +
gattttttctttcacaaata

SEQ ID NO: 25733 - DNA, 20 bp, Artificial Sequence
  Synthetic oligonucleotide; CAG chr11 5373318 5373337 5373334 +
ttctttcacaaataaagttc

SEQ ID NO: 25734 - DNA, 20 bp, Artificial Sequence
  Synthetic oligonucleotide; GAG chr11 5373326 5373345 5373342 +
caaataaagttccagttttt

SEQ ID NO: 25735 - DNA, 20 bp, Artificial Sequence
  Synthetic oligonucleotide; AAG chr11 5373331 5373350 5373347 +
aaagttccagtttttgagcc

SEQ ID NO: 25736 - DNA, 20 bp, Artificial Sequence
  Synthetic oligonucleotide; TGG chr11 5373335 5373354 5373351 +
ttccagtttttgagccaaga

SEQ ID NO: 25737 - DNA, 20 bp, Artificial Sequence
  Synthetic oligonucleotide; TAG chr11 5373343 5373362 5373359 +
tttgagccaagatggccaaa

SEQ ID NO: 25738 - DNA, 20 bp, Artificial Sequence
  Synthetic oligonucleotide; AGG chr11 5373344 5373363 5373360 +
ttgagccaagatggccaaat

SEQ ID NO: 25739 - DNA, 20 bp, Artificial Sequence
  Synthetic oligonucleotide; CAG chr11 5373349 5373368 5373365 +
ccaagatggccaaataggaa

SEQ ID NO: 25740 - DNA, 20 bp, Artificial Sequence
  Synthetic oligonucleotide; TGG chr11 5373355 5373374 5373371 +
tggccaaataggaacagctc

SEQ ID NO: 25741 - DNA, 20 bp, Artificial Sequence
  Synthetic oligonucleotide; CAG chr11 5373362 5373381 5373378 +
ataggaacagctctggtcta

SEQ ID NO: 25742 - DNA, 20 bp, Artificial Sequence
  Synthetic oligonucleotide; CAG chr11 5373369 5373388 5373385 +
cagctctggtctacagctcc

SEQ ID NO: 25743 - DNA, 20 bp, Artificial Sequence
  Synthetic oligonucleotide; CAG chr11 5373383 5373402 5373399 +
agctcccagcgtgaacaaca

SEQ ID NO: 25744 - DNA, 20 bp, Artificial Sequence
  Synthetic oligonucleotide; AAG chr11 5373386 5373405 5373402 +
tcccagcgtgaacaacacag

SEQ ID NO: 25745 - DNA, 20 bp, Artificial Sequence
  Synthetic oligonucleotide; CGG chr11 5373390 5373409 5373406 +
agcgtgaacaacacagaaga

SEQ ID NO: 25746 - DNA, 20 bp, Artificial Sequence
  Synthetic oligonucleotide; GGG chr11 5373391 5373410 5373407 +
gcgtgaacaacacagaagac

SEQ ID NO: 25747 - DNA, 20 bp, Artificial Sequence
  Synthetic oligonucleotide; GAG chr11 5373414 5373433 5373430 +
tgatttctgcatttccatct

SEQ ID NO: 25748 - DNA, 20 bp, Artificial Sequence
  Synthetic oligonucleotide; AGG chr11 5373415 5373434 5373431 +
gatttctgcatttccatctg

SEQ ID NO: 25749 - DNA, 20 bp, Artificial Sequence
  Synthetic oligonucleotide; TGG chr11 5373420 5373439 5373436 +
ctgcatttccatctgaggta

SEQ ID NO: 25750 - DNA, 20 bp, Artificial Sequence
  Synthetic oligonucleotide; GGG chr11 5373421 5373440 5373437 +
tgcatttccatctgaggtat

SEQ ID NO: 25751 - DNA, 20 bp, Artificial Sequence
  Synthetic oligonucleotide; GGG chr11 5373422 5373441 5373438 +
gcatttccatctgaggtatg

SEQ ID NO: 25752 - DNA, 20 bp, Artificial Sequence
  Synthetic oligonucleotide; TAG chr11 5373435 5373454 5373451 +
aggtatggggttcatctcgc

SEQ ID NO: 25753 - DNA, 20 bp, Artificial Sequence
  Synthetic oligonucleotide; AGG chr11 5373436 5373455 5373452 +
ggtatggggttcatctcgct

SEQ ID NO: 25754 - DNA, 20 bp, Artificial Sequence
  Synthetic oligonucleotide; GGG chr11 5373437 5373456 5373453 +
gtatggggttcatctcgcta

SEQ ID NO: 25755 - DNA, 20 bp, Artificial Sequence
  Synthetic oligonucleotide; GAG chr11 5373439 5373458 5373455 +
atggggttcatctcgctagg

SEQ ID NO: 25756 - DNA, 20 bp, Artificial Sequence
  Synthetic oligonucleotide; CAG chr11 5373445 5373464 5373461 +
ttcatctcgctagggagtgc

SEQ ID NO: 25757 - DNA, 20 bp, Artificial Sequence
  Synthetic oligonucleotide; CAG chr11 5373449 5373468 5373465 +
tctcgctagggagtgccaga

SEQ ID NO: 25758 - DNA, 20 bp, Artificial Sequence
  Synthetic oligonucleotide; TGG chr11 5373452 5373471 5373468 +
cgctagggagtgccagacag

SEQ ID NO: 25759 - DNA, 20 bp, Artificial Sequence
  Synthetic oligonucleotide; GGG chr11 5373453 5373472 5373469 +
gctagggagtgccagacagt

SEQ ID NO: 25760 - DNA, 20 bp, Artificial Sequence
  Synthetic oligonucleotide; CAG chr11 5373458 5373477 5373474 +
ggagtgccagacagtgggca

SEQ ID NO: 25761 - DNA, 20 bp, Artificial Sequence
  Synthetic oligonucleotide; AGG chr11 5373459 5373478 5373475 +
gagtgccagacagtgggcac

SEQ ID NO: 25762 - DNA, 20 bp, Artificial Sequence
  Synthetic oligonucleotide; CAG chr11 5373463 5373482 5373479 +
gccagacagtgggcacaggt

SEQ ID NO: 25763 - DNA, 20 bp, Artificial Sequence
  Synthetic oligonucleotide; TGG chr11 5373466 5373485 5373482 +
agacagtgggcacaggtcag

SEQ ID NO: 25764 - DNA, 20 bp, Artificial Sequence
  Synthetic oligonucleotide; GGG chr11 5373467 5373486 5373483 +
gacagtgggcacaggtcagt

SEQ ID NO: 25765 - DNA, 20 bp, Artificial Sequence
  Synthetic oligonucleotide; CAG chr11 5373472 5373491 5373488 +
tgggcacaggtcagtgggtg

SEQ ID NO: 25766 - DNA, 20 bp, Artificial Sequence
  Synthetic oligonucleotide; CAG chr11 5373487 5373506 5373503 +
gggtgcagcacaccatgcac

SEQ ID NO: 25767 - DNA, 20 bp, Artificial Sequence
  Synthetic oligonucleotide; AAG chr11 5373493 5373512 5373509 +
agcacaccatgcaccagccg

SEQ ID NO: 25768 - DNA, 20 bp, Artificial Sequence
  Synthetic oligonucleotide; CAG chr11 5373496 5373515 5373512 +
acaccatgcaccagccgaag

SEQ ID NO: 25769 - DNA, 20 bp, Artificial Sequence
  Synthetic oligonucleotide; AGG chr11 5373497 5373516 5373513 +
caccatgcaccagccgaagc

SEQ ID NO: 25770 - DNA, 20 bp, Artificial Sequence
  Synthetic oligonucleotide; GGG chr11 5373498 5373517 5373514 +
accatgcaccagccgaagca

SEQ ID NO: 25771 - DNA, 20 bp, Artificial Sequence
  Synthetic oligonucleotide; GAG chr11 5373502 5373521 5373518 +
tgcaccagccgaagcagggt

SEQ ID NO: 25772 - DNA, 20 bp, Artificial Sequence
  Synthetic oligonucleotide; AGG chr11 5373503 5373522 5373519 +
gcaccagccgaagcagggtg

SEQ ID NO: 25773 - DNA, 20 bp, Artificial Sequence
  Synthetic oligonucleotide; TGG chr11 5373518 5373537 5373534 +
gggtgaggcattgcctcact

SEQ ID NO: 25774 - DNA, 20 bp, Artificial Sequence
  Synthetic oligonucleotide; GGG chr11 5373519 5373538 5373535 +
ggtgaggcattgcctcactt

SEQ ID NO: 25775 - DNA, 20 bp, Artificial Sequence
  Synthetic oligonucleotide; AAG chr11 5373522 5373541 5373538 +
gaggcattgcctcacttggg

SEQ ID NO: 25776 - DNA, 20 bp, Artificial Sequence
  Synthetic oligonucleotide; AAG chr11 5373528 5373547 5373544 +
ttgcctcacttgggaagcac

SEQ ID NO: 25777 - DNA, 20 bp, Artificial Sequence
  Synthetic oligonucleotide; AGG chr11 5373529 5373548 5373545 +
tgcctcacttgggaagcaca

SEQ ID NO: 25778 - DNA, 20 bp, Artificial Sequence
  Synthetic oligonucleotide; GGG chr11 5373530 5373549 5373546 +
gcctcacttgggaagcacaa

SEQ ID NO: 25779 - DNA, 20 bp, Artificial Sequence
  Synthetic oligonucleotide; GGG chr11 5373531 5373550 5373547 +
cctcacttgggaagcacaag

SEQ ID NO: 25780 - DNA, 20 bp, Artificial Sequence
  Synthetic oligonucleotide; TGG chr11 5373537 5373556 5373553 +
ttgggaagcacaaggggtca

SEQ ID NO: 25781 - DNA, 20 bp, Artificial Sequence
  Synthetic oligonucleotide; GAG chr11 5373539 5373558 5373555 +
gggaagcacaaggggtcatg

SEQ ID NO: 25782 - DNA, 20 bp, Artificial Sequence
  Synthetic oligonucleotide; TGG chr11 5373552 5373571 5373568 +
ggtcatggagttccctttcc

SEQ ID NO: 25783 - DNA, 20 bp, Artificial Sequence
  Synthetic oligonucleotide; AAG chr11 5373557 5373576 5373573 +
tggagttccctttcctggtc

SEQ ID NO: 25784 - DNA, 20 bp, Artificial Sequence
  Synthetic oligonucleotide; AGG chr11 5373558 5373577 5373574 +
ggagttccctttcctggtca

SEQ ID NO: 25785 - DNA, 20 bp, Artificial Sequence
  Synthetic oligonucleotide; AAG chr11 5373562 5373581 5373578 +
ttccctttcctggtcaagga

SEQ ID NO: 25786 - DNA, 20 bp, Artificial Sequence
  Synthetic oligonucleotide; AGG chr11 5373563 5373582 5373579 +
tccctttcctggtcaaggaa

SEQ ID NO: 25787 - DNA, 20 bp, Artificial Sequence
  Synthetic oligonucleotide; GGG chr11 5373564 5373583 5373580 +
ccctttcctggtcaaggaaa

SEQ ID NO: 25788 - DNA, 20 bp, Artificial Sequence
  Synthetic oligonucleotide; GGG chr11 5373565 5373584 5373581 +
cctttcctggtcaaggaaag

SEQ ID NO: 25789 - DNA, 20 bp, Artificial Sequence
  Synthetic oligonucleotide; CGG chr11 5373575 5373594 5373591 +
tcaaggaaaggggtgacata

SEQ ID NO: 25790 - DNA, 20 bp, Artificial Sequence
  Synthetic oligonucleotide; TGG chr11 5373582 5373601 5373598 +
aaggggtgacatacggcacc

SEQ ID NO: 25791 - DNA, 20 bp, Artificial Sequence
  Synthetic oligonucleotide; TGG chr11 5373590 5373609 5373606 +
acatacggcacctggaaaat

SEQ ID NO: 25792 - DNA, 20 bp, Artificial Sequence
  Synthetic oligonucleotide; GGG chr11 5373591 5373610 5373607 +
catacggcacctggaaaatt

SEQ ID NO: 25793 - DNA, 20 bp, Artificial Sequence
  Synthetic oligonucleotide; CAG chr11 5373625 5373644 5373641 +
cgaatactgtgcttttctga

SEQ ID NO: 25794 - DNA, 20 bp, Artificial Sequence
  Synthetic oligonucleotide; AGG chr11 5373626 5373645 5373642 +
gaatactgtgcttttctgac

SEQ ID NO: 25795 - DNA, 20 bp, Artificial Sequence
  Synthetic oligonucleotide; TAG chr11 5373631 5373650 5373647 +
ctgtgcttttctgacaggct

SEQ ID NO: 25796 - DNA, 20 bp, Artificial Sequence
  Synthetic oligonucleotide; AGG chr11 5373632 5373651 5373648 +
tgtgcttttctgacaggctt

SEQ ID NO: 25797 - DNA, 20 bp, Artificial Sequence
  Synthetic oligonucleotide; TGG chr11 5373638 5373657 5373654 +
tttctgacaggcttaggaaa

SEQ ID NO: 25798 - DNA, 20 bp, Artificial Sequence
  Synthetic oligonucleotide; CAG chr11 5373646 5373665 5373662 +
aggcttaggaaatggcgcac

SEQ ID NO: 25799 - DNA, 20 bp, Artificial Sequence
  Synthetic oligonucleotide; AGG chr11 5373647 5373666 5373663 +
ggcttaggaaatggcgcacc

SEQ ID NO: 25800 - DNA, 20 bp, Artificial Sequence
  Synthetic oligonucleotide; GAG chr11 5373649 5373668 5373665 +
cttaggaaatggcgcaccag

SEQ ID NO: 25801 - DNA, 20 bp, Artificial Sequence
  Synthetic oligonucleotide; TGG chr11 5373667 5373686 5373683 +
aggagattatatcctgcaca

SEQ ID NO: 25802 - DNA, 20 bp, Artificial Sequence
  Synthetic oligonucleotide; GAG chr11 5373674 5373693 5373690 +
tatatcctgcacatggctcc

SEQ ID NO: 25803 - DNA, 20 bp, Artificial Sequence
  Synthetic oligonucleotide; AGG chr11 5373675 5373694 5373691 +
atatcctgcacatggctccg

SEQ ID NO: 25804 - DNA, 20 bp, Artificial Sequence
  Synthetic oligonucleotide; GGG chr11 5373676 5373695 5373692 +
tatcctgcacatggctccga

SEQ ID NO: 25805 - DNA, 20 bp, Artificial Sequence
  Synthetic oligonucleotide; CGG chr11 5373690 5373709 5373706 +
ctccgagggtcctacgccca

SEQ ID NO: 25806 - DNA, 20 bp, Artificial Sequence
  Synthetic oligonucleotide; GAG chr11 5373692 5373711 5373708 +
ccgagggtcctacgcccacg

SEQ ID NO: 25807 - DNA, 20 bp, Artificial Sequence
  Synthetic oligonucleotide; TAG chr11 5373708 5373727 5373724 +
cacggagtctccctgattgc

SEQ ID NO: 25808 - DNA, 20 bp, Artificial Sequence
  Synthetic oligonucleotide; CAG chr11 5373713 5373732 5373729 +
agtctccctgattgctagca

SEQ ID NO: 25809 - DNA, 20 bp, Artificial Sequence
  Synthetic oligonucleotide; CAG chr11 5373716 5373735 5373732 +
ctccctgattgctagcacag

SEQ ID NO: 25810 - DNA, 20 bp, Artificial Sequence
  Synthetic oligonucleotide; GAG chr11 5373722 5373741 5373738 +
gattgctagcacagcagtct

SEQ ID NO: 25811 - DNA, 20 bp, Artificial Sequence
  Synthetic oligonucleotide; AAG chr11 5373735 5373754 5373751 +
gcagtctgagatcaaactgc

SEQ ID NO: 25812 - DNA, 20 bp, Artificial Sequence
  Synthetic oligonucleotide; AGG chr11 5373736 5373755 5373752 +
cagtctgagatcaaactgca

SEQ ID NO: 25813 - DNA, 20 bp, Artificial Sequence
  Synthetic oligonucleotide; TGG chr11 5373739 5373758 5373755 +
tctgagatcaaactgcaagg

SEQ ID NO: 25814 - DNA, 20 bp, Artificial Sequence
  Synthetic oligonucleotide; CAG chr11 5373742 5373761 5373758 +
gagatcaaactgcaaggtgg

SEQ ID NO: 25815 - DNA, 20 bp, Artificial Sequence
  Synthetic oligonucleotide; GAG chr11 5373746 5373765 5373762 +
tcaaactgcaaggtggcagc

SEQ ID NO: 25816 - DNA, 20 bp, Artificial Sequence
  Synthetic oligonucleotide; AGG chr11 5373747 5373766 5373763 +
caaactgcaaggtggcagcg

SEQ ID NO: 25817 - DNA, 20 bp, Artificial Sequence
  Synthetic oligonucleotide; TGG chr11 5373751 5373770 5373767 +
ctgcaaggtggcagcgaggc

SEQ ID NO: 25818 - DNA, 20 bp, Artificial Sequence
  Synthetic oligonucleotide; GGG chr11 5373752 5373771 5373768 +
tgcaaggtggcagcgaggct

SEQ ID NO: 25819 - DNA, 20 bp, Artificial Sequence
  Synthetic oligonucleotide; GGG chr11 5373753 5373772 5373769 +
gcaaggtggcagcgaggctg

SEQ ID NO: 25820 - DNA, 20 bp, Artificial Sequence
  Synthetic oligonucleotide; GGG chr11 5373754 5373773 5373770 +
caaggtggcagcgaggctgg

SEQ ID NO: 25821 - DNA, 20 bp, Artificial Sequence
  Synthetic oligonucleotide; GAG chr11 5373756 5373775 5373772 +
aggtggcagcgaggctgggg

SEQ ID NO: 25822 - DNA, 20 bp, Artificial Sequence
  Synthetic oligonucleotide; AGG chr11 5373757 5373776 5373773 +
ggtggcagcgaggctggggg

SEQ ID NO: 25823 - DNA, 20 bp, Artificial Sequence
  Synthetic oligonucleotide; GGG chr11 5373758 5373777 5373774 +
gtggcagcgaggctggggga

SEQ ID NO: 25824 - DNA, 20 bp, Artificial Sequence
  Synthetic oligonucleotide; GGG chr11 5373759 5373778 5373775 +
tggcagcgaggctgggggag

SEQ ID NO: 25825 - DNA, 20 bp, Artificial Sequence
  Synthetic oligonucleotide; CAG chr11 5373762 5373781 5373778 +
cagcgaggctgggggagggg

SEQ ID NO: 25826 - DNA, 20 bp, Artificial Sequence
  Synthetic oligonucleotide; CAG chr11 5373776 5373795 5373792 +
gaggggcagccgccattgcc

SEQ ID NO: 25827 - DNA, 20 bp, Artificial Sequence
  Synthetic oligonucleotide; AGG chr11 5373777 5373796 5373793 +
aggggcagccgccattgccc

SEQ ID NO: 25828 - DNA, 20 bp, Artificial Sequence
  Synthetic oligonucleotide; TAG chr11 5373786 5373805 5373802 +
cgccattgcccaggcttgct

SEQ ID NO: 25829 - DNA, 20 bp, Artificial Sequence
  Synthetic oligonucleotide; AGG chr11 5373787 5373806 5373803 +
gccattgcccaggcttgctt

SEQ ID NO: 25830 - DNA, 20 bp, Artificial Sequence
  Synthetic oligonucleotide; AAG chr11 5373796 5373815 5373812 +
caggcttgcttaggtaaaca

SEQ ID NO: 25831 - DNA, 20 bp, Artificial Sequence
  Synthetic oligonucleotide; CAG chr11 5373799 5373818 5373815 +
gcttgcttaggtaaacaaag

SEQ ID NO: 25832 - DNA, 20 bp, Artificial Sequence
  Synthetic oligonucleotide; CAG chr11 5373803 5373822 5373819 +
gcttaggtaaacaaagcagc

SEQ ID NO: 25833 - DNA, 20 bp, Artificial Sequence
  Synthetic oligonucleotide; AGG chr11 5373804 5373823 5373820 +
cttaggtaaacaaagcagcc

SEQ ID NO: 25834 - DNA, 20 bp, Artificial Sequence
  Synthetic oligonucleotide; AAG chr11 5373807 5373826 5373823 +
aggtaaacaaagcagccagg

SEQ ID NO: 25835 - DNA, 20 bp, Artificial Sequence
  Synthetic oligonucleotide; TGG chr11 5373817 5373836 5373833 +
agcagccaggaagctcaaac

SEQ ID NO: 25836 - DNA, 20 bp, Artificial Sequence
  Synthetic oligonucleotide; GGG chr11 5373818 5373837 5373834 +
gcagccaggaagctcaaact

SEQ ID NO: 25837 - DNA, 20 bp, Artificial Sequence
  Synthetic oligonucleotide; TGG chr11 5373821 5373840 5373837 +
gccaggaagctcaaactggg

SEQ ID NO: 25838 - DNA, 20 bp, Artificial Sequence
  Synthetic oligonucleotide; CAG chr11 5373833 5373852 5373849 +
aaactgggtggaccccacca

SEQ ID NO: 25839 - DNA, 20 bp, Artificial Sequence
  Synthetic oligonucleotide; AAG chr11 5373839 5373858 5373855 +
ggtggaccccaccacagctc

SEQ ID NO: 25840 - DNA, 20 bp, Artificial Sequence
  Synthetic oligonucleotide; AGG chr11 5373840 5373859 5373856 +
gtggaccccaccacagctca

SEQ ID NO: 25841 - DNA, 20 bp, Artificial Sequence
  Synthetic oligonucleotide; GAG chr11 5373842 5373861 5373858 +
ggaccccaccacagctcaag

SEQ ID NO: 25842 - DNA, 20 bp, Artificial Sequence
  Synthetic oligonucleotide; AGG chr11 5373843 5373862 5373859 +
gaccccaccacagctcaagg

SEQ ID NO: 25843 - DNA, 20 bp, Artificial Sequence
  Synthetic oligonucleotide; TAG chr11 5373860 5373879 5373876 +
aggaggcctgcctgcctctg

SEQ ID NO: 25844 - DNA, 20 bp, Artificial Sequence
  Synthetic oligonucleotide; AGG chr11 5373861 5373880 5373877 +
ggaggcctgcctgcctctgt

SEQ ID NO: 25845 - DNA, 20 bp, Artificial Sequence
  Synthetic oligonucleotide; TGG chr11 5373873 5373892 5373889 +
gcctctgtaggctccacctt

SEQ ID NO: 25846 - DNA, 20 bp, Artificial Sequence
  Synthetic oligonucleotide; GGG chr11 5373874 5373893 5373890 +
cctctgtaggctccaccttt

SEQ ID NO: 25847 - DNA, 20 bp, Artificial Sequence
  Synthetic oligonucleotide; GGG chr11 5373875 5373894 5373891 +
ctctgtaggctccacctttg

SEQ ID NO: 25848 - DNA, 20 bp, Artificial Sequence
  Synthetic oligonucleotide; GGG chr11 5373876 5373895 5373892 +
tctgtaggctccacctttgg

SEQ ID NO: 25849 - DNA, 20 bp, Artificial Sequence
  Synthetic oligonucleotide; CAG chr11 5373879 5373898 5373895 +
gtaggctccacctttggggg

SEQ ID NO: 25850 - DNA, 20 bp, Artificial Sequence
  Synthetic oligonucleotide; AGG chr11 5373880 5373899 5373896 +
taggctccacctttgggggc

SEQ ID NO: 25851 - DNA, 20 bp, Artificial Sequence
  Synthetic oligonucleotide; GGG chr11 5373881 5373900 5373897 +
aggctccacctttgggggca

SEQ ID NO: 25852 - DNA, 20 bp, Artificial Sequence
  Synthetic oligonucleotide; CAG chr11 5373886 5373905 5373902 +
ccacctttgggggcagggca

SEQ ID NO: 25853 - DNA, 20 bp, Artificial Sequence
  Synthetic oligonucleotide; AAG chr11 5373898 5373917 5373914 +
gcagggcacagacaaacaaa

SEQ ID NO: 25854 - DNA, 20 bp, Artificial Sequence
  Synthetic oligonucleotide; CAG chr11 5373902 5373921 5373918 +
ggcacagacaaacaaaaaga

SEQ ID NO: 25855 - DNA, 20 bp, Artificial Sequence
  Synthetic oligonucleotide; CAG chr11 5373905 5373924 5373921 +
acagacaaacaaaaagacag

SEQ ID NO: 25856 - DNA, 20 bp, Artificial Sequence
  Synthetic oligonucleotide; CAG chr11 5373917 5373936 5373933 +
aaagacagcagtaacctctg

SEQ ID NO: 25857 - DNA, 20 bp, Artificial Sequence
  Synthetic oligonucleotide; CAG chr11 5373940 5373959 5373956 +
acttaaatgtccctgtctga

SEQ ID NO: 25858 - DNA, 20 bp, Artificial Sequence
  Synthetic oligonucleotide; GAG chr11 5373947 5373966 5373963 +
tgtccctgtctgacagcttt

SEQ ID NO: 25859 - DNA, 20 bp, Artificial Sequence
  Synthetic oligonucleotide; AGG chr11 5373948 5373967 5373964 +
gtccctgtctgacagctttg

SEQ ID NO: 25860 - DNA, 20 bp, Artificial Sequence
  Synthetic oligonucleotide; GAG chr11 5373950 5373969 5373966 +
ccctgtctgacagctttgag

SEQ ID NO: 25861 - DNA, 20 bp, Artificial Sequence
  Synthetic oligonucleotide; GAG chr11 5373952 5373971 5373968 +
ctgtctgacagctttgagga

SEQ ID NO: 25862 - DNA, 20 bp, Artificial Sequence
  Synthetic oligonucleotide; CAG chr11 5373955 5373974 5373971 +
tctgacagctttgaggagag

SEQ ID NO: 25863 - DNA, 20 bp, Artificial Sequence
  Synthetic oligonucleotide; TGG chr11 5373958 5373977 5373974 +
gacagctttgaggagagcag

SEQ ID NO: 25864 - DNA, 20 bp, Artificial Sequence
  Synthetic oligonucleotide; CAG chr11 5373967 5373986 5373983 +
gaggagagcagtggttctcc

SEQ ID NO: 25865 - DNA, 20 bp, Artificial Sequence
  Synthetic oligonucleotide; CAG chr11 5373974 5373993 5373990 +
gcagtggttctcccagcaca

SEQ ID NO: 25866 - DNA, 20 bp, Artificial Sequence
  Synthetic oligonucleotide; TGG chr11 5373978 5373997 5373994 +
tggttctcccagcacacagc

SEQ ID NO: 25867 - DNA, 20 bp, Artificial Sequence
  Synthetic oligonucleotide; GAG chr11 5373980 5373999 5373996 +
gttctcccagcacacagctg

SEQ ID NO: 25868 - DNA, 20 bp, Artificial Sequence
  Synthetic oligonucleotide; GAG chr11 5373987 5374006 5374003 +
cagcacacagctggagatct

SEQ ID NO: 25869 - DNA, 20 bp, Artificial Sequence
  Synthetic oligonucleotide; CGG chr11 5373992 5374011 5374008 +
cacagctggagatctgagaa

SEQ ID NO: 25870 - DNA, 20 bp, Artificial Sequence
  Synthetic oligonucleotide; GGG chr11 5373993 5374012 5374009 +
acagctggagatctgagaac

SEQ ID NO: 25871 - DNA, 20 bp, Artificial Sequence
  Synthetic oligonucleotide; CAG chr11 5373996 5374015 5374012 +
gctggagatctgagaacggg

SEQ ID NO: 25872 - DNA, 20 bp, Artificial Sequence
  Synthetic oligonucleotide; AAG chr11 5374010 5374029 5374026 +
aacgggcagactgcctcctc

SEQ ID NO: 25873 - DNA, 20 bp, Artificial Sequence
  Synthetic oligonucleotide; TGG chr11 5374013 5374032 5374029 +
gggcagactgcctcctcaag

SEQ ID NO: 25874 - DNA, 20 bp, Artificial Sequence
  Synthetic oligonucleotide; GGG chr11 5374014 5374033 5374030 +
ggcagactgcctcctcaagt

SEQ ID NO: 25875 - DNA, 20 bp, Artificial Sequence
  Synthetic oligonucleotide; GAG chr11 5374036 5374055 5374052 +
gtccctgacccctgaccccc

SEQ ID NO: 25876 - DNA, 20 bp, Artificial Sequence
  Synthetic oligonucleotide; CAG chr11 5374039 5374058 5374055 +
cctgacccctgacccccgag

SEQ ID NO: 25877 - DNA, 20 bp, Artificial Sequence
  Synthetic oligonucleotide; TGG chr11 5374048 5374067 5374064 +
tgacccccgagcagcctaac

SEQ ID NO: 25878 - DNA, 20 bp, Artificial Sequence
  Synthetic oligonucleotide; GGG chr11 5374049 5374068 5374065 +
gacccccgagcagcctaact

SEQ ID NO: 25879 - DNA, 20 bp, Artificial Sequence
  Synthetic oligonucleotide; GAG chr11 5374051 5374070 5374067 +
cccccgagcagcctaactgg

SEQ ID NO: 25880 - DNA, 20 bp, Artificial Sequence
  Synthetic oligonucleotide; AGG chr11 5374052 5374071 5374068 +
ccccgagcagcctaactggg

SEQ ID NO: 25881 - DNA, 20 bp, Artificial Sequence
  Synthetic oligonucleotide; AAG chr11 5374062 5374081 5374078 +
cctaactgggaggcaccccc

SEQ ID NO: 25882 - DNA, 20 bp, Artificial Sequence
  Synthetic oligonucleotide; AAG chr11 5374066 5374085 5374082 +
actgggaggcacccccaagt

SEQ ID NO: 25883 - DNA, 20 bp, Artificial Sequence
  Synthetic oligonucleotide; AGG chr11 5374067 5374086 5374083 +
ctgggaggcacccccaagta

SEQ ID NO: 25884 - DNA, 20 bp, Artificial Sequence
  Synthetic oligonucleotide; GGG chr11 5374068 5374087 5374084 +
tgggaggcacccccaagtaa

SEQ ID NO: 25885 - DNA, 20 bp, Artificial Sequence
  Synthetic oligonucleotide; CAG chr11 5374071 5374090 5374087 +
gaggcacccccaagtaaggg

SEQ ID NO: 25886 - DNA, 20 bp, Artificial Sequence
  Synthetic oligonucleotide; CGG chr11 5374088 5374107 5374104 +
gggcagactgacacctcaca

SEQ ID NO: 25887 - DNA, 20 bp, Artificial Sequence
  Synthetic oligonucleotide; CAG chr11 5374092 5374111 5374108 +
agactgacacctcacacggc

SEQ ID NO: 25888 - DNA, 20 bp, Artificial Sequence
  Synthetic oligonucleotide; AGG chr11 5374093 5374112 5374109 +
gactgacacctcacacggcc

SEQ ID NO: 25889 - DNA, 20 bp, Artificial Sequence
  Synthetic oligonucleotide; GAG chr11 5374105 5374124 5374121 +
acacggccaggtactcctct

SEQ ID NO: 25890 - DNA, 20 bp, Artificial Sequence
  Synthetic oligonucleotide; CAG chr11 5374118 5374137 5374134 +
ctcctctgagacaaaacttc

SEQ ID NO: 25891 - DNA, 20 bp, Artificial Sequence
  Synthetic oligonucleotide; GAG chr11 5374120 5374139 5374136 +
cctctgagacaaaacttcca

SEQ ID NO: 25892 - DNA, 20 bp, Artificial Sequence
  Synthetic oligonucleotide; AGG chr11 5374121 5374140 5374137 +
ctctgagacaaaacttccag

SEQ ID NO: 25893 - DNA, 20 bp, Artificial Sequence
  Synthetic oligonucleotide; CAG chr11 5374130 5374149 5374146 +
aaaacttccagaggaacgat

SEQ ID NO: 25894 - DNA, 20 bp, Artificial Sequence
  Synthetic oligonucleotide; CAG chr11 5374134 5374153 5374150 +
cttccagaggaacgatcaga

SEQ ID NO: 25895 - DNA, 20 bp, Artificial Sequence
  Synthetic oligonucleotide; CAG chr11 5374137 5374156 5374153 +
ccagaggaacgatcagacag

SEQ ID NO: 25896 - DNA, 20 bp, Artificial Sequence
  Synthetic oligonucleotide; CGG chr11 5374146 5374165 5374162 +
cgatcagacagcagcattcg

SEQ ID NO: 25897 - DNA, 20 bp, Artificial Sequence
  Synthetic oligonucleotide; CGG chr11 5374163 5374182 5374179 +
tcgcggatcacgaaaatctg

SEQ ID NO: 25898 - DNA, 20 bp, Artificial Sequence
  Synthetic oligonucleotide; CAG chr11 5374171 5374190 5374187 +
cacgaaaatctgcggttctg

SEQ ID NO: 25899 - DNA, 20 bp, Artificial Sequence
  Synthetic oligonucleotide; CAG chr11 5374191 5374210 5374207 +
cagacaccgctgctgatacc

SEQ ID NO: 25900 - DNA, 20 bp, Artificial Sequence
  Synthetic oligonucleotide; AGG chr11 5374192 5374211 5374208 +
agacaccgctgctgataccc

SEQ ID NO: 25901 - DNA, 20 bp, Artificial Sequence
  Synthetic oligonucleotide; CAG chr11 5374199 5374218 5374215 +
gctgctgatacccaggcaaa

SEQ ID NO: 25902 - DNA, 20 bp, Artificial Sequence
  Synthetic oligonucleotide; AGG chr11 5374200 5374219 5374216 +
ctgctgatacccaggcaaac

SEQ ID NO: 25903 - DNA, 20 bp, Artificial Sequence
  Synthetic oligonucleotide; GGG chr11 5374201 5374220 5374217 +
tgctgatacccaggcaaaca

SEQ ID NO: 25904 - DNA, 20 bp, Artificial Sequence
  Synthetic oligonucleotide; TGG chr11 5374206 5374225 5374222 +
atacccaggcaaacagggtc

SEQ ID NO: 25905 - DNA, 20 bp, Artificial Sequence
  Synthetic oligonucleotide; GAG chr11 5374208 5374227 5374224 +
acccaggcaaacagggtctg

SEQ ID NO: 25906 - DNA, 20 bp, Artificial Sequence
  Synthetic oligonucleotide; TGG chr11 5374211 5374230 5374227 +
caggcaaacagggtctggag

SEQ ID NO: 25907 - DNA, 20 bp, Artificial Sequence
  Synthetic oligonucleotide; TAG chr11 5374219 5374238 5374235 +
cagggtctggagtggacctc

SEQ ID NO: 25908 - DNA, 20 bp, Artificial Sequence
  Synthetic oligonucleotide; CAG chr11 5374232 5374251 5374248 +
ggacctctagcaaactccaa

SEQ ID NO: 25909 - DNA, 20 bp, Artificial Sequence
  Synthetic oligonucleotide; CAG chr11 5374240 5374259 5374256 +
agcaaactccaacagacctg

SEQ ID NO: 25910 - DNA, 20 bp, Artificial Sequence
  Synthetic oligonucleotide; GAG chr11 5374245 5374264 5374261 +
actccaacagacctgcagct

SEQ ID NO: 25911 - DNA, 20 bp, Artificial Sequence
  Synthetic oligonucleotide; AGG chr11 5374246 5374265 5374262 +
ctccaacagacctgcagctg

SEQ ID NO: 25912 - DNA, 20 bp, Artificial Sequence
  Synthetic oligonucleotide; GGG chr11 5374247 5374266 5374263 +
tccaacagacctgcagctga

SEQ ID NO: 25913 - DNA, 20 bp, Artificial Sequence
  Synthetic oligonucleotide; TAG chr11 5374260 5374279 5374276 +
cagctgagggtcctgtctgt

SEQ ID NO: 25914 - DNA, 20 bp, Artificial Sequence
  Synthetic oligonucleotide; AAG chr11 5374263 5374282 5374279 +
ctgagggtcctgtctgttag

SEQ ID NO: 25915 - DNA, 20 bp, Artificial Sequence
  Synthetic oligonucleotide; AGG chr11 5374264 5374283 5374280 +
tgagggtcctgtctgttaga

SEQ ID NO: 25916 - DNA, 20 bp, Artificial Sequence
  Synthetic oligonucleotide; CAG chr11 5374279 5374298 5374295 +
ttagaaggaaaactaacaaa

SEQ ID NO: 25917 - DNA, 20 bp, Artificial Sequence
  Synthetic oligonucleotide; AAG chr11 5374283 5374302 5374299 +
aaggaaaactaacaaacaga

SEQ ID NO: 25918 - DNA, 20 bp, Artificial Sequence
  Synthetic oligonucleotide; AGG chr11 5374284 5374303 5374300 +
aggaaaactaacaaacagaa

SEQ ID NO: 25919 - DNA, 20 bp, Artificial Sequence
  Synthetic oligonucleotide; CGG chr11 5374308 5374327 5374324 +
catccacaccaaaaacccat

SEQ ID NO: 25920 - DNA, 20 bp, Artificial Sequence
  Synthetic oligonucleotide; AAG chr11 5374327 5374346 5374343 +
tcggtacatcactatcatca

SEQ ID NO: 25921 - DNA, 20 bp, Artificial Sequence
  Synthetic oligonucleotide; AAG chr11 5374335 5374354 5374351 +
tcactatcatcaaagaccaa

SEQ ID NO: 25922 - DNA, 20 bp, Artificial Sequence
  Synthetic oligonucleotide; TAG chr11 5374338 5374357 5374354 +
ctatcatcaaagaccaaaag

SEQ ID NO: 25923 - DNA, 20 bp, Artificial Sequence
  Synthetic oligonucleotide; AAG chr11 5374352 5374371 5374368 +
caaaagtagatacaaccaca

SEQ ID NO: 25924 - DNA, 20 bp, Artificial Sequence
  Synthetic oligonucleotide; TGG chr11 5374356 5374375 5374372 +
agtagatacaaccacaaagt

SEQ ID NO: 25925 - DNA, 20 bp, Artificial Sequence
  Synthetic oligonucleotide; GGG chr11 5374357 5374376 5374373 +
gtagatacaaccacaaagtt

SEQ ID NO: 25926 - DNA, 20 bp, Artificial Sequence
  Synthetic oligonucleotide; GGG chr11 5374358 5374377 5374374 +
tagatacaaccacaaagttg

SEQ ID NO: 25927 - DNA, 20 bp, Artificial Sequence
  Synthetic oligonucleotide; CAG chr11 5374367 5374386 5374383 +
ccacaaagttggggaaaaaa

SEQ ID NO: 25928 - DNA, 20 bp, Artificial Sequence
  Synthetic oligonucleotide; GAG chr11 5374369 5374388 5374385 +
acaaagttggggaaaaaaca

SEQ ID NO: 25929 - DNA, 20 bp, Artificial Sequence
  Synthetic oligonucleotide; CAG chr11 5374372 5374391 5374388 +
aagttggggaaaaaacagag

SEQ ID NO: 25930 - DNA, 20 bp, Artificial Sequence
  Synthetic oligonucleotide; TGG chr11 5374381 5374400 5374397 +
aaaaaacagagcagaaaaac

SEQ ID NO: 25931 - DNA, 20 bp, Artificial Sequence
  Synthetic oligonucleotide; AAG chr11 5374394 5374413 5374410 +
gaaaaactggaaactctaaa

SEQ ID NO: 25932 - DNA, 20 bp, Artificial Sequence
  Synthetic oligonucleotide; CAG chr11 5374397 5374416 5374413 +
aaactggaaactctaaaaag

SEQ ID NO: 25933 - DNA, 20 bp, Artificial Sequence
  Synthetic oligonucleotide; GAG chr11 5374399 5374418 5374415 +
actggaaactctaaaaagca

SEQ ID NO: 25934 - DNA, 20 bp, Artificial Sequence
  Synthetic oligonucleotide; AAG chr11 5374418 5374437 5374434 +
agagcacctttcctcctcca

SEQ ID NO: 25935 - DNA, 20 bp, Artificial Sequence
  Synthetic oligonucleotide; AGG chr11 5374419 5374438 5374435 +
gagcacctttcctcctccaa

SEQ ID NO: 25936 - DNA, 20 bp, Artificial Sequence
  Synthetic oligonucleotide; AAG chr11 5374423 5374442 5374439 +
acctttcctcctccaaagga

SEQ ID NO: 25937 - DNA, 20 bp, Artificial Sequence
  Synthetic oligonucleotide; CAG chr11 5374426 5374445 5374442 +
tttcctcctccaaaggaaag

SEQ ID NO: 25938 - DNA, 20 bp, Artificial Sequence
  Synthetic oligonucleotide; CAG chr11 5374437 5374456 5374453 +
aaaggaaagcagttcctcac

SEQ ID NO: 25939 - DNA, 20 bp, Artificial Sequence
  Synthetic oligonucleotide; CGG chr11 5374443 5374462 5374459 +
aagcagttcctcaccagcaa

SEQ ID NO: 25940 - DNA, 20 bp, Artificial Sequence
  Synthetic oligonucleotide; AAG chr11 5374450 5374469 5374466 +
tcctcaccagcaacggaaca

SEQ ID NO: 25941 - DNA, 20 bp, Artificial Sequence
  Synthetic oligonucleotide; TGG chr11 5374454 5374473 5374470 +
caccagcaacggaacaaagc

SEQ ID NO: 25942 - DNA, 20 bp, Artificial Sequence
  Synthetic oligonucleotide; TGG chr11 5374458 5374477 5374474 +
agcaacggaacaaagctgga

SEQ ID NO: 25943 - DNA, 20 bp, Artificial Sequence
  Synthetic oligonucleotide; GAG chr11 5374460 5374479 5374476 +
caacggaacaaagctggatg

SEQ ID NO: 25944 - DNA, 20 bp, Artificial Sequence
  Synthetic oligonucleotide; GAG chr11 5374475 5374494 5374491 +
ggatggagaatgactttgac

SEQ ID NO: 25945 - DNA, 20 bp, Artificial Sequence
  Synthetic oligonucleotide; GAG chr11 5374480 5374499 5374496 +
gagaatgactttgacgagct

SEQ ID NO: 25946 - DNA, 20 bp, Artificial Sequence
  Synthetic oligonucleotide; GAG chr11 5374482 5374501 5374498 +
gaatgactttgacgagctga

SEQ ID NO: 25947 - DNA, 20 bp, Artificial Sequence
  Synthetic oligonucleotide; AAG chr11 5374485 5374504 5374501 +
tgactttgacgagctgagag

SEQ ID NO: 25948 - DNA, 20 bp, Artificial Sequence
  Synthetic oligonucleotide; AAG chr11 5374488 5374507 5374504 +
ctttgacgagctgagagaag

SEQ ID NO: 25949 - DNA, 20 bp, Artificial Sequence
  Synthetic oligonucleotide; CAG chr11 5374495 5374514 5374511 +
gagctgagagaagaagactt

SEQ ID NO: 25950 - DNA, 20 bp, Artificial Sequence
  Synthetic oligonucleotide; GAG chr11 5374514 5374533 5374530 +
tcagacgatgaaactactcc

SEQ ID NO: 25951 - DNA, 20 bp, Artificial Sequence
  Synthetic oligonucleotide; CAG chr11 5374520 5374539 5374536 +
gatgaaactactccgagcta

SEQ ID NO: 25952 - DNA, 20 bp, Artificial Sequence
  Synthetic oligonucleotide; AGG chr11 5374521 5374540 5374537 +
atgaaactactccgagctac

SEQ ID NO: 25953 - DNA, 20 bp, Artificial Sequence
  Synthetic oligonucleotide; GAG chr11 5374523 5374542 5374539 +
gaaactactccgagctacag

SEQ ID NO: 25954 - DNA, 20 bp, Artificial Sequence
  Synthetic oligonucleotide; AGG chr11 5374524 5374543 5374540 +
aaactactccgagctacagg

SEQ ID NO: 25955 - DNA, 20 bp, Artificial Sequence
  Synthetic oligonucleotide; AAG chr11 5374539 5374558 5374555 +
acaggaggaaattcaaacca

SEQ ID NO: 25956 - DNA, 20 bp, Artificial Sequence
  Synthetic oligonucleotide; AGG chr11 5374540 5374559 5374556 +
caggaggaaattcaaaccaa

SEQ ID NO: 25957 - DNA, 20 bp, Artificial Sequence
  Synthetic oligonucleotide; AAG chr11 5374545 5374564 5374561 +
ggaaattcaaaccaaaggca

SEQ ID NO: 25958 - DNA, 20 bp, Artificial Sequence
  Synthetic oligonucleotide; AAG chr11 5374548 5374567 5374564 +
aattcaaaccaaaggcaaag

SEQ ID NO: 25959 - DNA, 20 bp, Artificial Sequence
  Synthetic oligonucleotide; TAG chr11 5374573 5374592 5374589 +
aaaaactttgaaaaaaaatt

SEQ ID NO: 25960 - DNA, 20 bp, Artificial Sequence
  Synthetic oligonucleotide; TAG chr11 5374589 5374608 5374605 +
aatttagatgaatgtataac

SEQ ID NO: 25961 - DNA, 20 bp, Artificial Sequence
  Synthetic oligonucleotide; CAG chr11 5374603 5374622 5374619 +
tataactagaataaccaata

SEQ ID NO: 25962 - DNA, 20 bp, Artificial Sequence
  Synthetic oligonucleotide; GAG chr11 5374605 5374624 5374621 +
taactagaataaccaataca

SEQ ID NO: 25963 - DNA, 20 bp, Artificial Sequence
  Synthetic oligonucleotide; AAG chr11 5374608 5374627 5374624 +
ctagaataaccaatacagag

SEQ ID NO: 25964 - DNA, 20 bp, Artificial Sequence
  Synthetic oligonucleotide; AAG chr11 5374617 5374636 5374633 +
ccaatacagagaagtgctta

SEQ ID NO: 25965 - DNA, 20 bp, Artificial Sequence
  Synthetic oligonucleotide; AGG chr11 5374618 5374637 5374634 +
caatacagagaagtgcttaa

SEQ ID NO: 25966 - DNA, 20 bp, Artificial Sequence
  Synthetic oligonucleotide; GAG chr11 5374620 5374639 5374636 +
atacagagaagtgcttaaag

SEQ ID NO: 25967 - DNA, 20 bp, Artificial Sequence
  Synthetic oligonucleotide; TGG chr11 5374627 5374646 5374643 +
gaagtgcttaaaggagctga

SEQ ID NO: 25968 - DNA, 20 bp, Artificial Sequence
  Synthetic oligonucleotide; GAG chr11 5374629 5374648 5374645 +
agtgcttaaaggagctgatg

SEQ ID NO: 25969 - DNA, 20 bp, Artificial Sequence
  Synthetic oligonucleotide; AAG chr11 5374636 5374655 5374652 +
aaaggagctgatggagctga

SEQ ID NO: 25970 - DNA, 20 bp, Artificial Sequence
  Synthetic oligonucleotide; AAG chr11 5374641 5374660 5374657 +
agctgatggagctgaaagcc

SEQ ID NO: 25971 - DNA, 20 bp, Artificial Sequence
  Synthetic oligonucleotide; AGG chr11 5374642 5374661 5374658 +
gctgatggagctgaaagcca

SEQ ID NO: 25972 - DNA, 20 bp, Artificial Sequence
  Synthetic oligonucleotide; GAG chr11 5374648 5374667 5374664 +
ggagctgaaagccaaggctc

SEQ ID NO: 25973 - DNA, 20 bp, Artificial Sequence
  Synthetic oligonucleotide; AAG chr11 5374660 5374679 5374676 +
caaggctcgagaatgacgtg

SEQ ID NO: 25974 - DNA, 20 bp, Artificial Sequence
  Synthetic oligonucleotide; TGG chr11 5374665 5374684 5374681 +
ctcgagaatgacgtgaagaa

SEQ ID NO: 25975 - DNA, 20 bp, Artificial Sequence
  Synthetic oligonucleotide; GAG chr11 5374667 5374686 5374683 +
cgagaatgacgtgaagaatg

SEQ ID NO: 25976 - DNA, 20 bp, Artificial Sequence
  Synthetic oligonucleotide; AAG chr11 5374670 5374689 5374686 +
gaatgacgtgaagaatggag

SEQ ID NO: 25977 - DNA, 20 bp, Artificial Sequence
  Synthetic oligonucleotide; CAG chr11 5374676 5374695 5374692 +
cgtgaagaatggagaagcct

SEQ ID NO: 25978 - DNA, 20 bp, Artificial Sequence
  Synthetic oligonucleotide; AGG chr11 5374677 5374696 5374693 +
gtgaagaatggagaagcctc

SEQ ID NO: 25979 - DNA, 20 bp, Artificial Sequence
  Synthetic oligonucleotide; GAG chr11 5374679 5374698 5374695 +
gaagaatggagaagcctcag

SEQ ID NO: 25980 - DNA, 20 bp, Artificial Sequence
  Synthetic oligonucleotide; TGG chr11 5374696 5374715 5374712 +
caggagctgatgcgatcaac

SEQ ID NO: 25981 - DNA, 20 bp, Artificial Sequence
  Synthetic oligonucleotide; AAG chr11 5374699 5374718 5374715 +
gagctgatgcgatcaactgg

SEQ ID NO: 25982 - DNA, 20 bp, Artificial Sequence
  Synthetic oligonucleotide; AAG chr11 5374703 5374722 5374719 +
tgatgcgatcaactggaaga

SEQ ID NO: 25983 - DNA, 20 bp, Artificial Sequence
  Synthetic oligonucleotide; AGG chr11 5374704 5374723 5374720 +
gatgcgatcaactggaagaa

SEQ ID NO: 25984 - DNA, 20 bp, Artificial Sequence
  Synthetic oligonucleotide; GGG chr11 5374705 5374724 5374721 +
atgcgatcaactggaagaaa

SEQ ID NO: 25985 - DNA, 20 bp, Artificial Sequence
  Synthetic oligonucleotide; CAG chr11 5374711 5374730 5374727 +
tcaactggaagaaagggtat

SEQ ID NO: 25986 - DNA, 20 bp, Artificial Sequence
  Synthetic oligonucleotide; TGG chr11 5374717 5374736 5374733 +
ggaagaaagggtatcagtga

SEQ ID NO: 25987 - DNA, 20 bp, Artificial Sequence
  Synthetic oligonucleotide; AAG chr11 5374720 5374739 5374736 +
agaaagggtatcagtgatgg

SEQ ID NO: 25988 - DNA, 20 bp, Artificial Sequence
  Synthetic oligonucleotide; AAG chr11 5374740 5374759 5374756 +
aagatgaaataaatgaaatg

SEQ ID NO: 25989 - DNA, 20 bp, Artificial Sequence
  Synthetic oligonucleotide; GAG chr11 5374744 5374763 5374760 +
tgaaataaatgaaatgaagc

SEQ ID NO: 25990 - DNA, 20 bp, Artificial Sequence
  Synthetic oligonucleotide; AAG chr11 5374747 5374766 5374763 +
aataaatgaaatgaagcgag

SEQ ID NO: 25991 - DNA, 20 bp, Artificial Sequence
  Synthetic oligonucleotide; AGG chr11 5374748 5374767 5374764 +
ataaatgaaatgaagcgaga

SEQ ID NO: 25992 - DNA, 20 bp, Artificial Sequence
  Synthetic oligonucleotide; GGG chr11 5374749 5374768 5374765 +
taaatgaaatgaagcgagaa

SEQ ID NO: 25993 - DNA, 20 bp, Artificial Sequence
  Synthetic oligonucleotide; AAG chr11 5374752 5374771 5374768 +
atgaaatgaagcgagaaggg

SEQ ID NO: 25994 - DNA, 20 bp, Artificial Sequence
  Synthetic oligonucleotide; TAG chr11 5374757 5374776 5374773 +
atgaagcgagaagggaagtt

SEQ ID NO: 25995 - DNA, 20 bp, Artificial Sequence
  Synthetic oligonucleotide; GAG chr11 5374759 5374778 5374775 +
gaagcgagaagggaagttta

SEQ ID NO: 25996 - DNA, 20 bp, Artificial Sequence
  Synthetic oligonucleotide; AAG chr11 5374766 5374785 5374782 +
gaagggaagtttagagaaaa

SEQ ID NO: 25997 - DNA, 20 bp, Artificial Sequence
  Synthetic oligonucleotide; AAG chr11 5374775 5374794 5374791 +
tttagagaaaaaagaataaa

SEQ ID NO: 25998 - DNA, 20 bp, Artificial Sequence
  Synthetic oligonucleotide; AAG chr11 5374787 5374806 5374803 +
agaataaaaagaaatgaaca

SEQ ID NO: 25999 - DNA, 20 bp, Artificial Sequence
  Synthetic oligonucleotide; AAG chr11 5374795 5374814 5374811 +
aagaaatgaacaaagcctcc

SEQ ID NO: 26000 - DNA, 20 bp, Artificial Sequence
  Synthetic oligonucleotide; TGG chr11 5374803 5374822 5374819 +
aacaaagcctccaagaaata

SEQ ID NO: 26001 - DNA, 20 bp, Artificial Sequence
  Synthetic oligonucleotide; GGG chr11 5374804 5374823 5374820 +
acaaagcctccaagaaatat

SEQ ID NO: 26002 - DNA, 20 bp, Artificial Sequence
  Synthetic oligonucleotide; AAG chr11 5374817 5374836 5374833 +
gaaatatgggactatgtgaa

SEQ ID NO: 26003 - DNA, 20 bp, Artificial Sequence
  Synthetic oligonucleotide; TAG chr11 5374828 5374847 5374844 +
ctatgtgaaaagatcaaatc

SEQ ID NO: 26004 - DNA, 20 bp, Artificial Sequence
  Synthetic oligonucleotide; AGG chr11 5374829 5374848 5374845 +
tatgtgaaaagatcaaatct

SEQ ID NO: 26005 - DNA, 20 bp, Artificial Sequence
  Synthetic oligonucleotide; TGG chr11 5374838 5374857 5374854 +
agatcaaatctaggtctgat

SEQ ID NO: 26006 - DNA, 20 bp, Artificial Sequence
  Synthetic oligonucleotide; AAG chr11 5374850 5374869 5374866 +
ggtctgattggtgtacctga

SEQ ID NO: 26007 - DNA, 20 bp, Artificial Sequence
  Synthetic oligonucleotide; CGG chr11 5374856 5374875 5374872 +
attggtgtacctgaaagtga

SEQ ID NO: 26008 - DNA, 20 bp, Artificial Sequence
  Synthetic oligonucleotide; GGG chr11 5374857 5374876 5374873 +
ttggtgtacctgaaagtgac

SEQ ID NO: 26009 - DNA, 20 bp, Artificial Sequence
  Synthetic oligonucleotide; GGG chr11 5374858 5374877 5374874 +
tggtgtacctgaaagtgacg

SEQ ID NO: 26010 - DNA, 20 bp, Artificial Sequence
  Synthetic oligonucleotide; GAG chr11 5374860 5374879 5374876 +
gtgtacctgaaagtgacggg

SEQ ID NO: 26011 - DNA, 20 bp, Artificial Sequence
  Synthetic oligonucleotide; AAG chr11 5374872 5374891 5374888 +
gtgacggggagaatcgaacc

SEQ ID NO: 26012 - DNA, 20 bp, Artificial Sequence
  Synthetic oligonucleotide; TGG chr11 5374876 5374895 5374892 +
cggggagaatcgaaccaagt

SEQ ID NO: 26013 - DNA, 20 bp, Artificial Sequence
  Synthetic oligonucleotide; CAG chr11 5374890 5374909 5374906 +
ccaagttggaaaacactctg

SEQ ID NO: 26014 - DNA, 20 bp, Artificial Sequence
  Synthetic oligonucleotide; AGG chr11 5374891 5374910 5374907 +
caagttggaaaacactctgc

SEQ ID NO: 26015 - DNA, 20 bp, Artificial Sequence
  Synthetic oligonucleotide; CAG chr11 5374902 5374921 5374918 +
acactctgcaggatattatc

SEQ ID NO: 26016 - DNA, 20 bp, Artificial Sequence
  Synthetic oligonucleotide; AGG chr11 5374903 5374922 5374919 +
cactctgcaggatattatcc

SEQ ID NO: 26017 - DNA, 20 bp, Artificial Sequence
  Synthetic oligonucleotide; GAG chr11 5374905 5374924 5374921 +
ctctgcaggatattatccag

SEQ ID NO: 26018 - DNA, 20 bp, Artificial Sequence
  Synthetic oligonucleotide; TAG chr11 5374921 5374940 5374937 +
ccaggagaacttccccaatc

SEQ ID NO: 26019 - DNA, 20 bp, Artificial Sequence
  Synthetic oligonucleotide; AAG chr11 5374925 5374944 5374941 +
gagaacttccccaatctagc

SEQ ID NO: 26020 - DNA, 20 bp, Artificial Sequence
  Synthetic oligonucleotide; AGG chr11 5374926 5374945 5374942 +
agaacttccccaatctagca

SEQ ID NO: 26021 - DNA, 20 bp, Artificial Sequence
  Synthetic oligonucleotide; CAG chr11 5374929 5374948 5374945 +
acttccccaatctagcaagg

SEQ ID NO: 26022 - DNA, 20 bp, Artificial Sequence
  Synthetic oligonucleotide; AGG chr11 5374930 5374949 5374946 +
cttccccaatctagcaaggc

SEQ ID NO: 26023 - DNA, 20 bp, Artificial Sequence
  Synthetic oligonucleotide; CAG chr11 5374941 5374960 5374957 +
tagcaaggcaggccaacatt

SEQ ID NO: 26024 - DNA, 20 bp, Artificial Sequence
  Synthetic oligonucleotide; CAG chr11 5374947 5374966 5374963 +
ggcaggccaacattcagatt

SEQ ID NO: 26025 - DNA, 20 bp, Artificial Sequence
  Synthetic oligonucleotide; AGG chr11 5374948 5374967 5374964 +
gcaggccaacattcagattc

SEQ ID NO: 26026 - DNA, 20 bp, Artificial Sequence
  Synthetic oligonucleotide; CAG chr11 5374956 5374975 5374972 +
acattcagattcaggaaata

SEQ ID NO: 26027 - DNA, 20 bp, Artificial Sequence
  Synthetic oligonucleotide; GAG chr11 5374958 5374977 5374974 +
attcagattcaggaaataca

SEQ ID NO: 26028 - DNA, 20 bp, Artificial Sequence
  Synthetic oligonucleotide; GAG chr11 5374982 5375001 5374998 +
acgccacaaacatactcctc

SEQ ID NO: 26029 - DNA, 20 bp, Artificial Sequence
  Synthetic oligonucleotide; AAG chr11 5374985 5375004 5375001 +
ccacaaacatactcctcgag

SEQ ID NO: 26030 - DNA, 20 bp, Artificial Sequence
  Synthetic oligonucleotide; GAG chr11 5374987 5375006 5375003 +
acaaacatactcctcgagaa

SEQ ID NO: 26031 - DNA, 20 bp, Artificial Sequence
  Synthetic oligonucleotide; AAG chr11 5374997 5375016 5375013 +
tcctcgagaagagcaactcc

SEQ ID NO: 26032 - DNA, 20 bp, Artificial Sequence
  Synthetic oligonucleotide; CAG chr11 5375012 5375031 5375028 +
actccaagacacataattgt

SEQ ID NO: 26033 - DNA, 20 bp, Artificial Sequence
  Synthetic oligonucleotide; AAG chr11 5375023 5375042 5375039 +
cataattgtcagattcacca

SEQ ID NO: 26034 - DNA, 20 bp, Artificial Sequence
  Synthetic oligonucleotide; AAG chr11 5375034 5375053 5375050 +
gattcaccaaagttgaaatg

SEQ ID NO: 26035 - DNA, 20 bp, Artificial Sequence
  Synthetic oligonucleotide; AGG chr11 5375035 5375054 5375051 +
attcaccaaagttgaaatga

SEQ ID NO: 26036 - DNA, 20 bp, Artificial Sequence
  Synthetic oligonucleotide; AAG chr11 5375048 5375067 5375064 +
gaaatgaaggaaaaaatgtt

SEQ ID NO: 26037 - DNA, 20 bp, Artificial Sequence
  Synthetic oligonucleotide; AGG chr11 5375049 5375068 5375065 +
aaatgaaggaaaaaatgtta

SEQ ID NO: 26038 - DNA, 20 bp, Artificial Sequence
  Synthetic oligonucleotide; GGG chr11 5375050 5375069 5375066 +
aatgaaggaaaaaatgttaa

SEQ ID NO: 26039 - DNA, 20 bp, Artificial Sequence
  Synthetic oligonucleotide; CAG chr11 5375053 5375072 5375069 +
gaaggaaaaaatgttaaggg

SEQ ID NO: 26040 - DNA, 20 bp, Artificial Sequence
  Synthetic oligonucleotide; CAG chr11 5375057 5375076 5375073 +
gaaaaaatgttaagggcagc

SEQ ID NO: 26041 - DNA, 20 bp, Artificial Sequence
  Synthetic oligonucleotide; GAG chr11 5375059 5375078 5375075 +
aaaaatgttaagggcagcca

SEQ ID NO: 26042 - DNA, 20 bp, Artificial Sequence
  Synthetic oligonucleotide; GAG chr11 5375061 5375080 5375077 +
aaatgttaagggcagccaga

SEQ ID NO: 26043 - DNA, 20 bp, Artificial Sequence
  Synthetic oligonucleotide; AAG chr11 5375065 5375084 5375081 +
gttaagggcagccagagaga

SEQ ID NO: 26044 - DNA, 20 bp, Artificial Sequence
  Synthetic oligonucleotide; AGG chr11 5375066 5375085 5375082 +
ttaagggcagccagagagaa

SEQ ID NO: 26045 - DNA, 20 bp, Artificial Sequence
  Synthetic oligonucleotide; CGG chr11 5375070 5375089 5375086 +
gggcagccagagagaaaggt

SEQ ID NO: 26046 - DNA, 20 bp, Artificial Sequence
  Synthetic oligonucleotide; GGG chr11 5375071 5375090 5375087 +
ggcagccagagagaaaggtc

SEQ ID NO: 26047 - DNA, 20 bp, Artificial Sequence
  Synthetic oligonucleotide; AAG chr11 5375083 5375102 5375099 +
gaaaggtcgggttacccaca

SEQ ID NO: 26048 - DNA, 20 bp, Artificial Sequence
  Synthetic oligonucleotide; AGG chr11 5375084 5375103 5375100 +
aaaggtcgggttacccacaa

SEQ ID NO: 26049 - DNA, 20 bp, Artificial Sequence
  Synthetic oligonucleotide; GGG chr11 5375085 5375104 5375101 +
aaggtcgggttacccacaaa

SEQ ID NO: 26050 - DNA, 20 bp, Artificial Sequence
  Synthetic oligonucleotide; AAG chr11 5375088 5375107 5375104 +
gtcgggttacccacaaaggg

SEQ ID NO: 26051 - DNA, 20 bp, Artificial Sequence
  Synthetic oligonucleotide; CAG chr11 5375096 5375115 5375112 +
acccacaaagggaagcccat

SEQ ID NO: 26052 - DNA, 20 bp, Artificial Sequence
  Synthetic oligonucleotide; CAG chr11 5375104 5375123 5375120 +
agggaagcccatcagactaa

SEQ ID NO: 26053 - DNA, 20 bp, Artificial Sequence
  Synthetic oligonucleotide; CAG chr11 5375107 5375126 5375123 +
gaagcccatcagactaacag

SEQ ID NO: 26054 - DNA, 20 bp, Artificial Sequence
  Synthetic oligonucleotide; TGG chr11 5375116 5375135 5375132 +
cagactaacagcagctctct

SEQ ID NO: 26055 - DNA, 20 bp, Artificial Sequence
  Synthetic oligonucleotide; CAG chr11 5375119 5375138 5375135 +
actaacagcagctctcttgg

SEQ ID NO: 26056 - DNA, 20 bp, Artificial Sequence
  Synthetic oligonucleotide; AAG chr11 5375131 5375150 5375147 +
tctcttggcagaaactctac

SEQ ID NO: 26057 - DNA, 20 bp, Artificial Sequence
  Synthetic oligonucleotide; CAG chr11 5375135 5375154 5375151 +
ttggcagaaactctacaagc

SEQ ID NO: 26058 - DNA, 20 bp, Artificial Sequence
  Synthetic oligonucleotide; AAG chr11 5375138 5375157 5375154 +
gcagaaactctacaagccag

SEQ ID NO: 26059 - DNA, 20 bp, Artificial Sequence
  Synthetic oligonucleotide; GAG chr11 5375140 5375159 5375156 +
agaaactctacaagccagaa

SEQ ID NO: 26060 - DNA, 20 bp, Artificial Sequence
  Synthetic oligonucleotide; GAG chr11 5375142 5375161 5375158 +
aaactctacaagccagaaga

SEQ ID NO: 26061 - DNA, 20 bp, Artificial Sequence
  Synthetic oligonucleotide; TGG chr11 5375145 5375164 5375161 +
ctctacaagccagaagagag

SEQ ID NO: 26062 - DNA, 20 bp, Artificial Sequence
  Synthetic oligonucleotide; GGG chr11 5375146 5375165 5375162 +
tctacaagccagaagagagt

SEQ ID NO: 26063 - DNA, 20 bp, Artificial Sequence
  Synthetic oligonucleotide; GGG chr11 5375147 5375166 5375163 +
ctacaagccagaagagagtg

SEQ ID NO: 26064 - DNA, 20 bp, Artificial Sequence
  Synthetic oligonucleotide; GGG chr11 5375148 5375167 5375164 +
tacaagccagaagagagtgg

SEQ ID NO: 26065 - DNA, 20 bp, Artificial Sequence
  Synthetic oligonucleotide; AAG chr11 5375170 5375189 5375186 +
gccaatattcaacatcctta

SEQ ID NO: 26066 - DNA, 20 bp, Artificial Sequence
  Synthetic oligonucleotide; AGG chr11 5375171 5375190 5375187 +
ccaatattcaacatccttaa

SEQ ID NO: 26067 - DNA, 20 bp, Artificial Sequence
  Synthetic oligonucleotide; AAG chr11 5375175 5375194 5375191 +
tattcaacatccttaaagga

SEQ ID NO: 26068 - DNA, 20 bp, Artificial Sequence
  Synthetic oligonucleotide; CAG chr11 5375189 5375208 5375205 +
aaaggaaagaattttcaaca

SEQ ID NO: 26069 - DNA, 20 bp, Artificial Sequence
  Synthetic oligonucleotide; CAG chr11 5375203 5375222 5375219 +
tcaacacagaatttaatatc

SEQ ID NO: 26070 - DNA, 20 bp, Artificial Sequence
  Synthetic oligonucleotide; AAG chr11 5375213 5375232 5375229 +
atttaatatccagccaaact

SEQ ID NO: 26071 - DNA, 20 bp, Artificial Sequence
  Synthetic oligonucleotide; AAG chr11 5375222 5375241 5375238 +
ccagccaaactaagcttcat

SEQ ID NO: 26072 - DNA, 20 bp, Artificial Sequence
  Synthetic oligonucleotide; AAG chr11 5375227 5375246 5375243 +
caaactaagcttcataagtg

SEQ ID NO: 26073 - DNA, 20 bp, Artificial Sequence
  Synthetic oligonucleotide; AGG chr11 5375228 5375247 5375244 +
aaactaagcttcataagtga

SEQ ID NO: 26074 - DNA, 20 bp, Artificial Sequence
  Synthetic oligonucleotide; GAG chr11 5375230 5375249 5375246 +
actaagcttcataagtgaag

SEQ ID NO: 26075 - DNA, 20 bp, Artificial Sequence
  Synthetic oligonucleotide; CAG chr11 5375248 5375267 5375264 +
aggagaaataaaatacttta

SEQ ID NO: 26076 - DNA, 20 bp, Artificial Sequence
  Synthetic oligonucleotide; AAG chr11 5375253 5375272 5375269 +
aaataaaatactttacagac

SEQ ID NO: 26077 - DNA, 20 bp, Artificial Sequence
  Synthetic oligonucleotide; GAG chr11 5375264 5375283 5375280 +
tttacagacaagcaaatgct

SEQ ID NO: 26078 - DNA, 20 bp, Artificial Sequence
  Synthetic oligonucleotide; GAG chr11 5375266 5375285 5375282 +
tacagacaagcaaatgctga

SEQ ID NO: 26079 - DNA, 20 bp, Artificial Sequence
  Synthetic oligonucleotide; CAG chr11 5375282 5375301 5375298 +
ctgagagattttgtcatcac

SEQ ID NO: 26080 - DNA, 20 bp, Artificial Sequence
  Synthetic oligonucleotide; AGG chr11 5375283 5375302 5375299 +
tgagagattttgtcatcacc

SEQ ID NO: 26081 - DNA, 20 bp, Artificial Sequence
  Synthetic oligonucleotide; AAG chr11 5375296 5375315 5375312 +
catcaccaggcctgacctaa

SEQ ID NO: 26082 - DNA, 20 bp, Artificial Sequence
  Synthetic oligonucleotide; GAG chr11 5375298 5375317 5375314 +
tcaccaggcctgacctaaaa

SEQ ID NO: 26083 - DNA, 20 bp, Artificial Sequence
  Synthetic oligonucleotide; AAG chr11 5375307 5375326 5375323 +
ctgacctaaaagagctcctg

SEQ ID NO: 26084 - DNA, 20 bp, Artificial Sequence
  Synthetic oligonucleotide; AGG chr11 5375308 5375327 5375324 +
tgacctaaaagagctcctga

SEQ ID NO: 26085 - DNA, 20 bp, Artificial Sequence
  Synthetic oligonucleotide; AAG chr11 5375311 5375330 5375327 +
cctaaaagagctcctgaagg

SEQ ID NO: 26086 - DNA, 20 bp, Artificial Sequence
  Synthetic oligonucleotide; TGG chr11 5375323 5375342 5375339 +
cctgaaggaagcactaaaca

SEQ ID NO: 26087 - DNA, 20 bp, Artificial Sequence
  Synthetic oligonucleotide; AAG chr11 5375327 5375346 5375343 +
aaggaagcactaaacatgga

SEQ ID NO: 26088 - DNA, 20 bp, Artificial Sequence
  Synthetic oligonucleotide; AGG chr11 5375328 5375347 5375344 +
aggaagcactaaacatggaa

SEQ ID NO: 26089 - DNA, 20 bp, Artificial Sequence
  Synthetic oligonucleotide; CGG chr11 5375337 5375356 5375353 +
taaacatggaaaggcacaac

SEQ ID NO: 26090 - DNA, 20 bp, Artificial Sequence
  Synthetic oligonucleotide; CAG chr11 5375343 5375362 5375359 +
tggaaaggcacaaccggtac

SEQ ID NO: 26091 - DNA, 20 bp, Artificial Sequence
  Synthetic oligonucleotide; CAG chr11 5375358 5375377 5375374 +
ggtaccagccactgcaaaat

SEQ ID NO: 26092 - DNA, 20 bp, Artificial Sequence
  Synthetic oligonucleotide; AGG chr11 5375359 5375378 5375375 +
gtaccagccactgcaaaatc

SEQ ID NO: 26093 - DNA, 20 bp, Artificial Sequence
  Synthetic oligonucleotide; AAG chr11 5375372 5375391 5375388 +
caaaatcaggccaaaatgtg

SEQ ID NO: 26094 - DNA, 20 bp, Artificial Sequence
  Synthetic oligonucleotide; AAG chr11 5375381 5375400 5375397 +
gccaaaatgtgaagaccatc

SEQ ID NO: 26095 - DNA, 20 bp, Artificial Sequence
  Synthetic oligonucleotide; TAG chr11 5375386 5375405 5375402 +
aatgtgaagaccatcaagac

SEQ ID NO: 26096 - DNA, 20 bp, Artificial Sequence
  Synthetic oligonucleotide; AGG chr11 5375387 5375406 5375403 +
atgtgaagaccatcaagact

SEQ ID NO: 26097 - DNA, 20 bp, Artificial Sequence
  Synthetic oligonucleotide; AAG chr11 5375390 5375409 5375406 +
tgaagaccatcaagactagg

SEQ ID NO: 26098 - DNA, 20 bp, Artificial Sequence
  Synthetic oligonucleotide; GAG chr11 5375410 5375429 5375426 +
aagaaactgcatcaactaac

SEQ ID NO: 26099 - DNA, 20 bp, Artificial Sequence
  Synthetic oligonucleotide; CAG chr11 5375422 5375441 5375438 +
caactaacgagcaaaataac

SEQ ID NO: 26100 - DNA, 20 bp, Artificial Sequence
  Synthetic oligonucleotide; CAG chr11 5375437 5375456 5375453 +
ataaccagctatcataatga

SEQ ID NO: 26101 - DNA, 20 bp, Artificial Sequence
  Synthetic oligonucleotide; AGG chr11 5375438 5375457 5375454 +
taaccagctatcataatgac

SEQ ID NO: 26102 - DNA, 20 bp, Artificial Sequence
  Synthetic oligonucleotide; TGG chr11 5375479 5375498 5375495 +
atattaactttaaatgtaaa

SEQ ID NO: 26103 - DNA, 20 bp, Artificial Sequence
  Synthetic oligonucleotide; AAG chr11 5375485 5375504 5375501 +
actttaaatgtaaatggact

SEQ ID NO: 26104 - DNA, 20 bp, Artificial Sequence
  Synthetic oligonucleotide; AAG chr11 5375500 5375519 5375516 +
ggactaagtgctccaattga

SEQ ID NO: 26105 - DNA, 20 bp, Artificial Sequence
  Synthetic oligonucleotide; CAG chr11 5375506 5375525 5375522 +
agtgctccaattgaaagaca

SEQ ID NO: 26106 - DNA, 20 bp, Artificial Sequence
  Synthetic oligonucleotide; TGG chr11 5375511 5375530 5375527 +
tccaattgaaagacacagac

SEQ ID NO: 26107 - DNA, 20 bp, Artificial Sequence
  Synthetic oligonucleotide; TGG chr11 5375519 5375538 5375535 +
aaagacacagactggcaaat

SEQ ID NO: 26108 - DNA, 20 bp, Artificial Sequence
  Synthetic oligonucleotide; AAG chr11 5375525 5375544 5375541 +
acagactggcaaattggata

SEQ ID NO: 26109 - DNA, 20 bp, Artificial Sequence
  Synthetic oligonucleotide; GAG chr11 5375527 5375546 5375543 +
agactggcaaattggataaa

SEQ ID NO: 26110 - DNA, 20 bp, Artificial Sequence
  Synthetic oligonucleotide; CAG chr11 5375536 5375555 5375552 +
aattggataaagagtgtatt

SEQ ID NO: 26111 - DNA, 20 bp, Artificial Sequence
  Synthetic oligonucleotide; AGG chr11 5375537 5375556 5375553 +
attggataaagagtgtattc

SEQ ID NO: 26112 - DNA, 20 bp, Artificial Sequence
  Synthetic oligonucleotide; TAG chr11 5375568 5375587 5375584 +
ctcatgtgcacacacacaca

SEQ ID NO: 26113 - DNA, 20 bp, Artificial Sequence
  Synthetic oligonucleotide; AGG chr11 5375569 5375588 5375585 +
tcatgtgcacacacacacat

SEQ ID NO: 26114 - DNA, 20 bp, Artificial Sequence
  Synthetic oligonucleotide; AAG chr11 5375582 5375601 5375598 +
cacacataggctcaaaataa

SEQ ID NO: 26115 - DNA, 20 bp, Artificial Sequence
  Synthetic oligonucleotide; AGG chr11 5375583 5375602 5375599 +
acacataggctcaaaataaa

SEQ ID NO: 26116 - DNA, 20 bp, Artificial Sequence
  Synthetic oligonucleotide; TGG chr11 5375587 5375606 5375603 +
ataggctcaaaataaaagga

SEQ ID NO: 26117 - DNA, 20 bp, Artificial Sequence
  Synthetic oligonucleotide; GAG chr11 5375589 5375608 5375605 +
aggctcaaaataaaaggatg

SEQ ID NO: 26118 - DNA, 20 bp, Artificial Sequence
  Synthetic oligonucleotide; AGG chr11 5375590 5375609 5375606 +
ggctcaaaataaaaggatgg

SEQ ID NO: 26119 - DNA, 20 bp, Artificial Sequence
  Synthetic oligonucleotide; AAG chr11 5375593 5375612 5375609 +
tcaaaataaaaggatggagg

SEQ ID NO: 26120 - DNA, 20 bp, Artificial Sequence
  Synthetic oligonucleotide; AAG chr11 5375603 5375622 5375619 +
aggatggaggaagatctacc

SEQ ID NO: 26121 - DNA, 20 bp, Artificial Sequence
  Synthetic oligonucleotide; TGG chr11 5375610 5375629 5375626 +
aggaagatctaccaagcaaa

SEQ ID NO: 26122 - DNA, 20 bp, Artificial Sequence
  Synthetic oligonucleotide; AAG chr11 5375623 5375642 5375639 +
aagcaaatggaaaacaaaaa

SEQ ID NO: 26123 - DNA, 20 bp, Artificial Sequence
  Synthetic oligonucleotide; AGG chr11 5375624 5375643 5375640 +
agcaaatggaaaacaaaaaa

SEQ ID NO: 26124 - DNA, 20 bp, Artificial Sequence
  Synthetic oligonucleotide; CAG chr11 5375627 5375646 5375643 +
aaatggaaaacaaaaaaagg

SEQ ID NO: 26125 - DNA, 20 bp, Artificial Sequence
  Synthetic oligonucleotide; AGG chr11 5375628 5375647 5375644 +
aatggaaaacaaaaaaaggc

SEQ ID NO: 26126 - DNA, 20 bp, Artificial Sequence
  Synthetic oligonucleotide; GGG chr11 5375629 5375648 5375645 +
atggaaaacaaaaaaaggca

SEQ ID NO: 26127 - DNA, 20 bp, Artificial Sequence
  Synthetic oligonucleotide; GGG chr11 5375630 5375649 5375646 +
tggaaaacaaaaaaaggcag

SEQ ID NO: 26128 - DNA, 20 bp, Artificial Sequence
  Synthetic oligonucleotide; TAG chr11 5375642 5375661 5375658 +
aaaggcaggggttgcaatcc

SEQ ID NO: 26129 - DNA, 20 bp, Artificial Sequence
  Synthetic oligonucleotide; CAG chr11 5375657 5375676 5375673 +
aatcctagtctctgataaaa

SEQ ID NO: 26130 - DNA, 20 bp, Artificial Sequence
  Synthetic oligonucleotide; AGG chr11 5375658 5375677 5375674 +
atcctagtctctgataaaac

SEQ ID NO: 26131 - DNA, 20 bp, Artificial Sequence
  Synthetic oligonucleotide; AAG chr11 5375674 5375693 5375690 +
aaacaggctttaaaccaaca

SEQ ID NO: 26132 - DNA, 20 bp, Artificial Sequence
  Synthetic oligonucleotide; AAG chr11 5375682 5375701 5375698 +
tttaaaccaacaaagatcaa

SEQ ID NO: 26133 - DNA, 20 bp, Artificial Sequence
  Synthetic oligonucleotide; GAG chr11 5375684 5375703 5375700 +
taaaccaacaaagatcaaaa

SEQ ID NO: 26134 - DNA, 20 bp, Artificial Sequence
  Synthetic oligonucleotide; AAG chr11 5375690 5375709 5375706 +
aacaaagatcaaaagagaca

SEQ ID NO: 26135 - DNA, 20 bp, Artificial Sequence
  Synthetic oligonucleotide; AAG chr11 5375693 5375712 5375709 +
aaagatcaaaagagacaaag

SEQ ID NO: 26136 - DNA, 20 bp, Artificial Sequence
  Synthetic oligonucleotide; AGG chr11 5375694 5375713 5375710 +
aagatcaaaagagacaaaga

SEQ ID NO: 26137 - DNA, 20 bp, Artificial Sequence
  Synthetic oligonucleotide; TGG chr11 5375708 5375727 5375724 +
caaagaaggccattacataa

SEQ ID NO: 26138 - DNA, 20 bp, Artificial Sequence
  Synthetic oligonucleotide; AAG chr11 5375713 5375732 5375729 +
aaggccattacataatggta

SEQ ID NO: 26139 - DNA, 20 bp, Artificial Sequence
  Synthetic oligonucleotide; AGG chr11 5375714 5375733 5375730 +
aggccattacataatggtaa

SEQ ID NO: 26140 - DNA, 20 bp, Artificial Sequence
  Synthetic oligonucleotide; GGG chr11 5375715 5375734 5375731 +
ggccattacataatggtaaa

SEQ ID NO: 26141 - DNA, 20 bp, Artificial Sequence
  Synthetic oligonucleotide; AAG chr11 5375729 5375748 5375745 +
ggtaaagggatcaattcaac

SEQ ID NO: 26142 - DNA, 20 bp, Artificial Sequence
  Synthetic oligonucleotide; AAG chr11 5375732 5375751 5375748 +
aaagggatcaattcaacaag

SEQ ID NO: 26143 - DNA, 20 bp, Artificial Sequence
  Synthetic oligonucleotide; GAG chr11 5375734 5375753 5375750 +
agggatcaattcaacaagaa

SEQ ID NO: 26144 - DNA, 20 bp, Artificial Sequence
  Synthetic oligonucleotide; CAG chr11 5375768 5375787 5375784 +
aaatatatatgcacccaata

SEQ ID NO: 26145 - DNA, 20 bp, Artificial Sequence
  Synthetic oligonucleotide; AGG chr11 5375769 5375788 5375785 +
aatatatatgcacccaatac

SEQ ID NO: 26146 - DNA, 20 bp, Artificial Sequence
  Synthetic oligonucleotide; GAG chr11 5375771 5375790 5375787 +
tatatatgcacccaatacag

SEQ ID NO: 26147 - DNA, 20 bp, Artificial Sequence
  Synthetic oligonucleotide; CAG chr11 5375778 5375797 5375794 +
gcacccaatacaggagcacc

SEQ ID NO: 26148 - DNA, 20 bp, Artificial Sequence
  Synthetic oligonucleotide; AAG chr11 5375788 5375807 5375804 +
caggagcacccagattcata

SEQ ID NO: 26149 - DNA, 20 bp, Artificial Sequence
  Synthetic oligonucleotide; AAG chr11 5375792 5375811 5375808 +
agcacccagattcataaagc

SEQ ID NO: 26150 - DNA, 20 bp, Artificial Sequence
  Synthetic oligonucleotide; TAG chr11 5375799 5375818 5375815 +
agattcataaagcaagtcct

SEQ ID NO: 26151 - DNA, 20 bp, Artificial Sequence
  Synthetic oligonucleotide; GAG chr11 5375801 5375820 5375817 +
attcataaagcaagtcctta

SEQ ID NO: 26152 - DNA, 20 bp, Artificial Sequence
  Synthetic oligonucleotide; AAG chr11 5375811 5375830 5375827 +
caagtccttagagacctaca

SEQ ID NO: 26153 - DNA, 20 bp, Artificial Sequence
  Synthetic oligonucleotide; GAG chr11 5375813 5375832 5375829 +
agtccttagagacctacaaa

SEQ ID NO: 26154 - DNA, 20 bp, Artificial Sequence
  Synthetic oligonucleotide; TAG chr11 5375819 5375838 5375835 +
tagagacctacaaagagact

SEQ ID NO: 26155 - DNA, 20 bp, Artificial Sequence
  Synthetic oligonucleotide; TGG chr11 5375840 5375859 5375856 +
agactcccacactttaataa

SEQ ID NO: 26156 - DNA, 20 bp, Artificial Sequence
  Synthetic oligonucleotide; GGG chr11 5375841 5375860 5375857 +
gactcccacactttaataat

SEQ ID NO: 26157 - DNA, 20 bp, Artificial Sequence
  Synthetic oligonucleotide; GAG chr11 5375843 5375862 5375859 +
ctcccacactttaataatgg

SEQ ID NO: 26158 - DNA, 20 bp, Artificial Sequence
  Synthetic oligonucleotide; TAG chr11 5375870 5375889 5375886 +
taataccccactgtcaacat

SEQ ID NO: 26159 - DNA, 20 bp, Artificial Sequence
  Synthetic oligonucleotide; CAG chr11 5375874 5375893 5375890 +
accccactgtcaacattaga

SEQ ID NO: 26160 - DNA, 20 bp, Artificial Sequence
  Synthetic oligonucleotide; GAG chr11 5375883 5375902 5375899 +
tcaacattagacagatcaac

SEQ ID NO: 26161 - DNA, 20 bp, Artificial Sequence
  Synthetic oligonucleotide; CAG chr11 5375887 5375906 5375903 +
cattagacagatcaacgaga

SEQ ID NO: 26162 - DNA, 20 bp, Artificial Sequence
  Synthetic oligonucleotide; AAG chr11 5375891 5375910 5375907 +
agacagatcaacgagacaga

SEQ ID NO: 26163 - DNA, 20 bp, Artificial Sequence
  Synthetic oligonucleotide; AAG chr11 5375899 5375918 5375915 +
caacgagacagaaagttaac

SEQ ID NO: 26164 - DNA, 20 bp, Artificial Sequence
  Synthetic oligonucleotide; AGG chr11 5375900 5375919 5375916 +
aacgagacagaaagttaaca

SEQ ID NO: 26165 - DNA, 20 bp, Artificial Sequence
  Synthetic oligonucleotide; CAG chr11 5375908 5375927 5375924 +
agaaagttaacaaggatatc

SEQ ID NO: 26166 - DNA, 20 bp, Artificial Sequence
  Synthetic oligonucleotide; AGG chr11 5375909 5375928 5375925 +
gaaagttaacaaggatatcc

SEQ ID NO: 26167 - DNA, 20 bp, Artificial Sequence
  Synthetic oligonucleotide; CAG chr11 5375921 5375940 5375937 +
ggatatccaggaattgaaca

SEQ ID NO: 26168 - DNA, 20 bp, Artificial Sequence
  Synthetic oligonucleotide; AAG chr11 5375933 5375952 5375949 +
attgaacacagctctgcacc

SEQ ID NO: 26169 - DNA, 20 bp, Artificial Sequence
  Synthetic oligonucleotide; CAG chr11 5375936 5375955 5375952 +
gaacacagctctgcaccaag

SEQ ID NO: 26170 - DNA, 20 bp, Artificial Sequence
  Synthetic oligonucleotide; TAG chr11 5375945 5375964 5375961 +
tctgcaccaagcagacctaa

SEQ ID NO: 26171 - DNA, 20 bp, Artificial Sequence
  Synthetic oligonucleotide; CAG chr11 5375955 5375974 5375971 +
gcagacctaatagacatcta

SEQ ID NO: 26172 - DNA, 20 bp, Artificial Sequence
  Synthetic oligonucleotide; CAG chr11 5375978 5375997 5375994 +
aactctccaccccaaatcaa

SEQ ID NO: 26173 - DNA, 20 bp, Artificial Sequence
  Synthetic oligonucleotide; CAG chr11 5375997 5376016 5376013 +
acagaatatacatttttttt

SEQ ID NO: 26174 - DNA, 20 bp, Artificial Sequence
  Synthetic oligonucleotide; TGG chr11 5376037 5376056 5376053 +
tccaaaattgaccacatact

SEQ ID NO: 26175 - DNA, 20 bp, Artificial Sequence
  Synthetic oligonucleotide; AAG chr11 5376040 5376059 5376056 +
aaaattgaccacatacttgg

SEQ ID NO: 26176 - DNA, 20 bp, Artificial Sequence
  Synthetic oligonucleotide; AAG chr11 5376045 5376064 5376061 +
tgaccacatacttggaagta

SEQ ID NO: 26177 - DNA, 20 bp, Artificial Sequence
  Synthetic oligonucleotide; CAG chr11 5376055 5376074 5376071 +
cttggaagtaaagctctcct

SEQ ID NO: 26178 - DNA, 20 bp, Artificial Sequence
  Synthetic oligonucleotide; AAG chr11 5376067 5376086 5376083 +
gctctcctcagcaaatataa

SEQ ID NO: 26179 - DNA, 20 bp, Artificial Sequence
  Synthetic oligonucleotide; CAG chr11 5376072 5376091 5376088 +
cctcagcaaatataaaagaa

SEQ ID NO: 26180 - DNA, 20 bp, Artificial Sequence
  Synthetic oligonucleotide; CAG chr11 5376096 5376115 5376112 +
aattataacaaactgtctct

SEQ ID NO: 26181 - DNA, 20 bp, Artificial Sequence
  Synthetic oligonucleotide; CAG chr11 5376103 5376122 5376119 +
acaaactgtctctcagacca

SEQ ID NO: 26182 - DNA, 20 bp, Artificial Sequence
  Synthetic oligonucleotide; TAG chr11 5376117 5376136 5376133 +
agaccacagtgcaatcaaac

SEQ ID NO: 26183 - DNA, 20 bp, Artificial Sequence
  Synthetic oligonucleotide; CAG chr11 5376124 5376143 5376140 +
agtgcaatcaaactagaact

SEQ ID NO: 26184 - DNA, 20 bp, Artificial Sequence
  Synthetic oligonucleotide; AGG chr11 5376125 5376144 5376141 +
gtgcaatcaaactagaactc

SEQ ID NO: 26185 - DNA, 20 bp, Artificial Sequence
  Synthetic oligonucleotide; AAG chr11 5376131 5376150 5376147 +
tcaaactagaactcaggatt

SEQ ID NO: 26186 - DNA, 20 bp, Artificial Sequence
  Synthetic oligonucleotide; TGG chr11 5376161 5376180 5376177 +
ctcaaaaccactcaactaca

SEQ ID NO: 26187 - DNA, 20 bp, Artificial Sequence
  Synthetic oligonucleotide; TGG chr11 5376194 5376213 5376210 +
acctgctcctgaatgactac

SEQ ID NO: 26188 - DNA, 20 bp, Artificial Sequence
  Synthetic oligonucleotide; GGG chr11 5376195 5376214 5376211 +
cctgctcctgaatgactact

SEQ ID NO: 26189 - DNA, 20 bp, Artificial Sequence
  Synthetic oligonucleotide; AAG chr11 5376212 5376231 5376228 +
actgggtacataacgaaatg

SEQ ID NO: 26190 - DNA, 20 bp, Artificial Sequence
  Synthetic oligonucleotide; AGG chr11 5376213 5376232 5376229 +
ctgggtacataacgaaatga

SEQ ID NO: 26191 - DNA, 20 bp, Artificial Sequence
  Synthetic oligonucleotide; CAG chr11 5376216 5376235 5376232 +
ggtacataacgaaatgaagg

SEQ ID NO: 26192 - DNA, 20 bp, Artificial Sequence
  Synthetic oligonucleotide; AAG chr11 5376224 5376243 5376240 +
acgaaatgaaggcagaaata

SEQ ID NO: 26193 - DNA, 20 bp, Artificial Sequence
  Synthetic oligonucleotide; GAG chr11 5376245 5376264 5376261 +
agatgttctttgaaaccaat

SEQ ID NO: 26194 - DNA, 20 bp, Artificial Sequence
  Synthetic oligonucleotide; AAG chr11 5376252 5376271 5376268 +
ctttgaaaccaatgagaaca

SEQ ID NO: 26195 - DNA, 20 bp, Artificial Sequence
  Synthetic oligonucleotide; CAG chr11 5376266 5376285 5376282 +
agaacaaagacacaacatac

SEQ ID NO: 26196 - DNA, 20 bp, Artificial Sequence
  Synthetic oligonucleotide; TGG chr11 5376275 5376294 5376291 +
acacaacataccagaatctc

SEQ ID NO: 26197 - DNA, 20 bp, Artificial Sequence
  Synthetic oligonucleotide; GGG chr11 5376276 5376295 5376292 +
cacaacataccagaatctct

SEQ ID NO: 26198 - DNA, 20 bp, Artificial Sequence
  Synthetic oligonucleotide; CAG chr11 5376291 5376310 5376307 +
tctctgggacacattcgaat

SEQ ID NO: 26199 - DNA, 20 bp, Artificial Sequence
  Synthetic oligonucleotide; TAG chr11 5376298 5376317 5376314 +
gacacattcgaatcagtgtg

SEQ ID NO: 26200 - DNA, 20 bp, Artificial Sequence
  Synthetic oligonucleotide; AGG chr11 5376299 5376318 5376315 +
acacattcgaatcagtgtgt

SEQ ID NO: 26201 - DNA, 20 bp, Artificial Sequence
  Synthetic oligonucleotide; GGG chr11 5376300 5376319 5376316 +
cacattcgaatcagtgtgta

SEQ ID NO: 26202 - DNA, 20 bp, Artificial Sequence
  Synthetic oligonucleotide; GGG chr11 5376301 5376320 5376317 +
acattcgaatcagtgtgtag

SEQ ID NO: 26203 - DNA, 20 bp, Artificial Sequence
  Synthetic oligonucleotide; GGG chr11 5376302 5376321 5376318 +
cattcgaatcagtgtgtagg

SEQ ID NO: 26204 - DNA, 20 bp, Artificial Sequence
  Synthetic oligonucleotide; TAG chr11 5376312 5376331 5376328 +
agtgtgtagggggaaattta

SEQ ID NO: 26205 - DNA, 20 bp, Artificial Sequence
  Synthetic oligonucleotide; AAG chr11 5376329 5376348 5376345 +
ttatagcactaaacgcccac

SEQ ID NO: 26206 - DNA, 20 bp, Artificial Sequence
  Synthetic oligonucleotide; GAG chr11 5376331 5376350 5376347 +
atagcactaaacgcccacaa

SEQ ID NO: 26207 - DNA, 20 bp, Artificial Sequence
  Synthetic oligonucleotide; AAG chr11 5376335 5376354 5376351 +
cactaaacgcccacaagaga

SEQ ID NO: 26208 - DNA, 20 bp, Artificial Sequence
  Synthetic oligonucleotide; AAG chr11 5376339 5376358 5376355 +
aaacgcccacaagagaaagc

SEQ ID NO: 26209 - DNA, 20 bp, Artificial Sequence
  Synthetic oligonucleotide; AAG chr11 5376343 5376362 5376359 +
gcccacaagagaaagcaaga

SEQ ID NO: 26210 - DNA, 20 bp, Artificial Sequence
  Synthetic oligonucleotide; AAG chr11 5376378 5376397 5376394 +
caccctaacatcacaattaa

SEQ ID NO: 26211 - DNA, 20 bp, Artificial Sequence
  Synthetic oligonucleotide; TAG chr11 5376384 5376403 5376400 +
aacatcacaattaaaagaac

SEQ ID NO: 26212 - DNA, 20 bp, Artificial Sequence
  Synthetic oligonucleotide; AAG chr11 5376389 5376408 5376405 +
cacaattaaaagaactagat

SEQ ID NO: 26213 - DNA, 20 bp, Artificial Sequence
  Synthetic oligonucleotide; AAG chr11 5376393 5376412 5376409 +
attaaaagaactagataagc

SEQ ID NO: 26214 - DNA, 20 bp, Artificial Sequence
  Synthetic oligonucleotide; GAG chr11 5376395 5376414 5376411 +
taaaagaactagataagcaa

SEQ ID NO: 26215 - DNA, 20 bp, Artificial Sequence
  Synthetic oligonucleotide; AAG chr11 5376411 5376430 5376427 +
gcaagagcaaacacattcaa

SEQ ID NO: 26216 - DNA, 20 bp, Artificial Sequence
  Synthetic oligonucleotide; TAG chr11 5376415 5376434 5376431 +
gagcaaacacattcaaaagc

SEQ ID NO: 26217 - DNA, 20 bp, Artificial Sequence
  Synthetic oligonucleotide; CAG chr11 5376418 5376437 5376434 +
caaacacattcaaaagctag

SEQ ID NO: 26218 - DNA, 20 bp, Artificial Sequence
  Synthetic oligonucleotide; AAG chr11 5376421 5376440 5376437 +
acacattcaaaagctagcag

SEQ ID NO: 26219 - DNA, 20 bp, Artificial Sequence
  Synthetic oligonucleotide; AAG chr11 5376426 5376445 5376442 +
ttcaaaagctagcagaagtc

SEQ ID NO: 26220 - DNA, 20 bp, Artificial Sequence
  Synthetic oligonucleotide; CAG chr11 5376442 5376461 5376458 +
agtcaagaaataactaaaat

SEQ ID NO: 26221 - DNA, 20 bp, Artificial Sequence
  Synthetic oligonucleotide; GAG chr11 5376444 5376463 5376460 +
tcaagaaataactaaaatca

SEQ ID NO: 26222 - DNA, 20 bp, Artificial Sequence
  Synthetic oligonucleotide; CAG chr11 5376447 5376466 5376463 +
agaaataactaaaatcagag

SEQ ID NO: 26223 - DNA, 20 bp, Artificial Sequence
  Synthetic oligonucleotide; AAG chr11 5376455 5376474 5376471 +
ctaaaatcagagcagaactg

SEQ ID NO: 26224 - DNA, 20 bp, Artificial Sequence
  Synthetic oligonucleotide; AGG chr11 5376456 5376475 5376472 +
taaaatcagagcagaactga

SEQ ID NO: 26225 - DNA, 20 bp, Artificial Sequence
  Synthetic oligonucleotide; CAG chr11 5376462 5376481 5376478 +
cagagcagaactgaaggaaa

SEQ ID NO: 26226 - DNA, 20 bp, Artificial Sequence
  Synthetic oligonucleotide; GAG chr11 5376464 5376483 5376480 +
gagcagaactgaaggaaaca

SEQ ID NO: 26227 - DNA, 20 bp, Artificial Sequence
  Synthetic oligonucleotide; TGG chr11 5376499 5376518 5376515 +
cttcaaaaaattaatgaatc

SEQ ID NO: 26228 - DNA, 20 bp, Artificial Sequence
  Synthetic oligonucleotide; GGG chr11 5376500 5376519 5376516 +
ttcaaaaaattaatgaatct

SEQ ID NO: 26229 - DNA, 20 bp, Artificial Sequence
  Synthetic oligonucleotide; GAG chr11 5376502 5376521 5376518 +
caaaaaattaatgaatctgg

SEQ ID NO: 26230 - DNA, 20 bp, Artificial Sequence
  Synthetic oligonucleotide; TGG chr11 5376506 5376525 5376522 +
aaattaatgaatctgggagc

SEQ ID NO: 26231 - DNA, 20 bp, Artificial Sequence
  Synthetic oligonucleotide; AAG chr11 5376517 5376536 5376533 +
tctgggagctggttttttga

SEQ ID NO: 26232 - DNA, 20 bp, Artificial Sequence
  Synthetic oligonucleotide; AGG chr11 5376518 5376537 5376534 +
ctgggagctggttttttgaa

SEQ ID NO: 26233 - DNA, 20 bp, Artificial Sequence
  Synthetic oligonucleotide; TAG chr11 5376535 5376554 5376551 +
gaaaggatcaacaaaactga

SEQ ID NO: 26234 - DNA, 20 bp, Artificial Sequence
  Synthetic oligonucleotide; TAG chr11 5376543 5376562 5376559 +
caacaaaactgatagaccgc

SEQ ID NO: 26235 - DNA, 20 bp, Artificial Sequence
  Synthetic oligonucleotide; AAG chr11 5376547 5376566 5376563 +
aaaactgatagaccgctagc

SEQ ID NO: 26236 - DNA, 20 bp, Artificial Sequence
  Synthetic oligonucleotide; AAG chr11 5376556 5376575 5376572 +
agaccgctagcaagactaat

SEQ ID NO: 26237 - DNA, 20 bp, Artificial Sequence
  Synthetic oligonucleotide; AAG chr11 5376561 5376580 5376577 +
gctagcaagactaataagaa

SEQ ID NO: 26238 - DNA, 20 bp, Artificial Sequence
  Synthetic oligonucleotide; GAG chr11 5376563 5376582 5376579 +
tagcaagactaataagaaaa

SEQ ID NO: 26239 - DNA, 20 bp, Artificial Sequence
  Synthetic oligonucleotide; GAG chr11 5376565 5376584 5376581 +
gcaagactaataagaaaaga

SEQ ID NO: 26240 - DNA, 20 bp, Artificial Sequence
  Synthetic oligonucleotide; AAG chr11 5376568 5376587 5376584 +
agactaataagaaaagagag

SEQ ID NO: 26241 - DNA, 20 bp, Artificial Sequence
  Synthetic oligonucleotide; TAG chr11 5376578 5376597 5376594 +
gaaaagagagaagaatcaaa

SEQ ID NO: 26242 - DNA, 20 bp, Artificial Sequence
  Synthetic oligonucleotide; AAG chr11 5376600 5376619 5376616 +
gacacaataaaaaaatgata

SEQ ID NO: 26243 - DNA, 20 bp, Artificial Sequence
  Synthetic oligonucleotide; AGG chr11 5376601 5376620 5376617 +
acacaataaaaaaatgataa

SEQ ID NO: 26244 - DNA, 20 bp, Artificial Sequence
  Synthetic oligonucleotide; GGG chr11 5376602 5376621 5376618 +
cacaataaaaaaatgataaa

SEQ ID NO: 26245 - DNA, 20 bp, Artificial Sequence
  Synthetic oligonucleotide; GGG chr11 5376603 5376622 5376619 +
acaataaaaaaatgataaag

SEQ ID NO: 26246 - DNA, 20 bp, Artificial Sequence
  Synthetic oligonucleotide; CAG chr11 5376624 5376643 5376640 +
ggatatcaccaccgatccca

SEQ ID NO: 26247 - DNA, 20 bp, Artificial Sequence
  Synthetic oligonucleotide; CAG chr11 5376643 5376662 5376659 +
acagaaatacaaactgccat

SEQ ID NO: 26248 - DNA, 20 bp, Artificial Sequence
  Synthetic oligonucleotide; GAG chr11 5376645 5376664 5376661 +
agaaatacaaactgccatca

SEQ ID NO: 26249 - DNA, 20 bp, Artificial Sequence
  Synthetic oligonucleotide; TAG chr11 5376678 5376697 5376694 +
acacctctacgcaaataaac

SEQ ID NO: 26250 - DNA, 20 bp, Artificial Sequence
  Synthetic oligonucleotide; TAG chr11 5376687 5376706 5376703 +
cgcaaataaactagaaaatc

SEQ ID NO: 26251 - DNA, 20 bp, Artificial Sequence
  Synthetic oligonucleotide; AAG chr11 5376690 5376709 5376706 +
aaataaactagaaaatctag

SEQ ID NO: 26252 - DNA, 20 bp, Artificial Sequence
  Synthetic oligonucleotide; TGG chr11 5376696 5376715 5376712 +
actagaaaatctagaagaaa

SEQ ID NO: 26253 - DNA, 20 bp, Artificial Sequence
  Synthetic oligonucleotide; TGG chr11 5376708 5376727 5376724 +
agaagaaatggataaattcc

SEQ ID NO: 26254 - DNA, 20 bp, Artificial Sequence
  Synthetic oligonucleotide; AAG chr11 5376727 5376746 5376743 +
ctggacacatacactatccc

SEQ ID NO: 26255 - DNA, 20 bp, Artificial Sequence
  Synthetic oligonucleotide; CAG chr11 5376737 5376756 5376753 +
acactatcccaagactaaac

SEQ ID NO: 26256 - DNA, 20 bp, Artificial Sequence
  Synthetic oligonucleotide; AGG chr11 5376738 5376757 5376754 +
cactatcccaagactaaacc

SEQ ID NO: 26257 - DNA, 20 bp, Artificial Sequence
  Synthetic oligonucleotide; AAG chr11 5376741 5376760 5376757 +
tatcccaagactaaaccagg

SEQ ID NO: 26258 - DNA, 20 bp, Artificial Sequence
  Synthetic oligonucleotide; AAG chr11 5376744 5376763 5376760 +
cccaagactaaaccaggaag

SEQ ID NO: 26259 - DNA, 20 bp, Artificial Sequence
  Synthetic oligonucleotide; TAG chr11 5376760 5376779 5376776 +
gaagaagttgaatctctgaa

SEQ ID NO: 26260 - DNA, 20 bp, Artificial Sequence
  Synthetic oligonucleotide; CAG chr11 5376771 5376790 5376787 +
atctctgaatagaccaataa

SEQ ID NO: 26261 - DNA, 20 bp, Artificial Sequence
  Synthetic oligonucleotide; AGG chr11 5376772 5376791 5376788 +
tctctgaatagaccaataac

SEQ ID NO: 26262 - DNA, 20 bp, Artificial Sequence
  Synthetic oligonucleotide; TGG chr11 5376786 5376805 5376802 +
aataacaggatctgaaattg

SEQ ID NO: 26263 - DNA, 20 bp, Artificial Sequence
  Synthetic oligonucleotide; TAG chr11 5376799 5376818 5376815 +
gaaattgtggcaataatcaa

SEQ ID NO: 26264 - DNA, 20 bp, Artificial Sequence
  Synthetic oligonucleotide; AAG chr11 5376815 5376834 5376831 +
tcaatagcttaccaaccaaa

SEQ ID NO: 26265 - DNA, 20 bp, Artificial Sequence
  Synthetic oligonucleotide; GAG chr11 5376817 5376836 5376833 +
aatagcttaccaaccaaaaa

SEQ ID NO: 26266 - DNA, 20 bp, Artificial Sequence
  Synthetic oligonucleotide; CAG chr11 5376822 5376841 5376838 +
cttaccaaccaaaaagagtc

SEQ ID NO: 26267 - DNA, 20 bp, Artificial Sequence
  Synthetic oligonucleotide; AGG chr11 5376823 5376842 5376839 +
ttaccaaccaaaaagagtcc

SEQ ID NO: 26268 - DNA, 20 bp, Artificial Sequence
  Synthetic oligonucleotide; CAG chr11 5376828 5376847 5376844 +
aaccaaaaagagtccaggac

SEQ ID NO: 26269 - DNA, 20 bp, Artificial Sequence
  Synthetic oligonucleotide; TGG chr11 5376832 5376851 5376848 +
aaaaagagtccaggaccaga

SEQ ID NO: 26270 - DNA, 20 bp, Artificial Sequence
  Synthetic oligonucleotide; CAG chr11 5376840 5376859 5376856 +
tccaggaccagatggattca

SEQ ID NO: 26271 - DNA, 20 bp, Artificial Sequence
  Synthetic oligonucleotide; CAG chr11 5376854 5376873 5376870 +
gattcacagccaaattctaa

SEQ ID NO: 26272 - DNA, 20 bp, Artificial Sequence
  Synthetic oligonucleotide; GAG chr11 5376856 5376875 5376872 +
ttcacagccaaattctaaca

SEQ ID NO: 26273 - DNA, 20 bp, Artificial Sequence
  Synthetic oligonucleotide; AGG chr11 5376857 5376876 5376873 +
tcacagccaaattctaacag

SEQ ID NO: 26274 - DNA, 20 bp, Artificial Sequence
  Synthetic oligonucleotide; AAG chr11 5376863 5376882 5376879 +
ccaaattctaacagaggtac

SEQ ID NO: 26275 - DNA, 20 bp, Artificial Sequence
  Synthetic oligonucleotide; AGG chr11 5376864 5376883 5376880 +
caaattctaacagaggtaca

SEQ ID NO: 26276 - DNA, 20 bp, Artificial Sequence
  Synthetic oligonucleotide; GAG chr11 5376866 5376885 5376882 +
aattctaacagaggtacaag

SEQ ID NO: 26277 - DNA, 20 bp, Artificial Sequence
  Synthetic oligonucleotide; AGG chr11 5376867 5376886 5376883 +
attctaacagaggtacaagg

SEQ ID NO: 26278 - DNA, 20 bp, Artificial Sequence
  Synthetic oligonucleotide; TGG chr11 5376873 5376892 5376889 +
acagaggtacaaggaggaat

SEQ ID NO: 26279 - DNA, 20 bp, Artificial Sequence
  Synthetic oligonucleotide; CAG chr11 5376906 5376925 5376922 +
tctgaaactattccaatcaa

SEQ ID NO: 26280 - DNA, 20 bp, Artificial Sequence
  Synthetic oligonucleotide; AAG chr11 5376912 5376931 5376928 +
actattccaatcaacagaaa

SEQ ID NO: 26281 - DNA, 20 bp, Artificial Sequence
  Synthetic oligonucleotide; AAG chr11 5376915 5376934 5376931 +
attccaatcaacagaaaaag

SEQ ID NO: 26282 - DNA, 20 bp, Artificial Sequence
  Synthetic oligonucleotide; AGG chr11 5376916 5376935 5376932 +
ttccaatcaacagaaaaaga

SEQ ID NO: 26283 - DNA, 20 bp, Artificial Sequence
  Synthetic oligonucleotide; GAG chr11 5376941 5376960 5376957 +
tcctccctaactcattttat

SEQ ID NO: 26284 - DNA, 20 bp, Artificial Sequence
  Synthetic oligonucleotide; AGG chr11 5376942 5376961 5376958 +
cctccctaactcattttatg

SEQ ID NO: 26285 - DNA, 20 bp, Artificial Sequence
  Synthetic oligonucleotide; CAG chr11 5376946 5376965 5376962 +
cctaactcattttatgaggc

SEQ ID NO: 26286 - DNA, 20 bp, Artificial Sequence
  Synthetic oligonucleotide; AAG chr11 5376965 5376984 5376981 +
ccagcatcatcctaatacca

SEQ ID NO: 26287 - DNA, 20 bp, Artificial Sequence
  Synthetic oligonucleotide; CAG chr11 5376969 5376988 5376985 +
catcatcctaataccaaagc

SEQ ID NO: 26288 - DNA, 20 bp, Artificial Sequence
  Synthetic oligonucleotide; AAG chr11 5376973 5376992 5376989 +
atcctaataccaaagccaga

SEQ ID NO: 26289 - DNA, 20 bp, Artificial Sequence
  Synthetic oligonucleotide; GAG chr11 5376975 5376994 5376991 +
cctaataccaaagccagaaa

SEQ ID NO: 26290 - DNA, 20 bp, Artificial Sequence
  Synthetic oligonucleotide; AAG chr11 5376990 5377009 5377006 +
agaaagagacacaaccaaaa

SEQ ID NO: 26291 - DNA, 20 bp, Artificial Sequence
  Synthetic oligonucleotide; GAG chr11 5376992 5377011 5377008 +
aaagagacacaaccaaaaaa

SEQ ID NO: 26292 - DNA, 20 bp, Artificial Sequence
  Synthetic oligonucleotide; TAG chr11 5377000 5377019 5377016 +
acaaccaaaaaagagaattt

SEQ ID NO: 26293 - DNA, 20 bp, Artificial Sequence
  Synthetic oligonucleotide; TGG chr11 5377050 5377069 5377066 +
aaaaatcctcaataaaatac

SEQ ID NO: 26294 - DNA, 20 bp, Artificial Sequence
  Synthetic oligonucleotide; CAG chr11 5377064 5377083 5377080 +
aaatactggcaaaccgaatc

SEQ ID NO: 26295 - DNA, 20 bp, Artificial Sequence
  Synthetic oligonucleotide; CAG chr11 5377067 5377086 5377083 +
tactggcaaaccgaatccag

SEQ ID NO: 26296 - DNA, 20 bp, Artificial Sequence
  Synthetic oligonucleotide; AAG chr11 5377079 5377098 5377095 +
gaatccagcagcacatcaaa

SEQ ID NO: 26297 - DNA, 20 bp, Artificial Sequence
  Synthetic oligonucleotide; AAG chr11 5377098 5377117 5377114 +
aaagcttatccacgatgatc

SEQ ID NO: 26298 - DNA, 20 bp, Artificial Sequence
  Synthetic oligonucleotide; TGG chr11 5377101 5377120 5377117 +
gcttatccacgatgatcaag

SEQ ID NO: 26299 - DNA, 20 bp, Artificial Sequence
  Synthetic oligonucleotide; TGG chr11 5377114 5377133 5377130 +
gatcaagtggacttcatccc

SEQ ID NO: 26300 - DNA, 20 bp, Artificial Sequence
  Synthetic oligonucleotide; GGG chr11 5377115 5377134 5377131 +
atcaagtggacttcatccct

SEQ ID NO: 26301 - DNA, 20 bp, Artificial Sequence
  Synthetic oligonucleotide; AAG chr11 5377122 5377141 5377138 +
ggacttcatccctgggatgc

SEQ ID NO: 26302 - DNA, 20 bp, Artificial Sequence
  Synthetic oligonucleotide; AGG chr11 5377123 5377142 5377139 +
gacttcatccctgggatgca

SEQ ID NO: 26303 - DNA, 20 bp, Artificial Sequence
  Synthetic oligonucleotide; TGG chr11 5377127 5377146 5377143 +
tcatccctgggatgcaaggc

SEQ ID NO: 26304 - DNA, 20 bp, Artificial Sequence
  Synthetic oligonucleotide; CAG chr11 5377160 5377179 5377176 +
gcaaatcaataaatgtaatc

SEQ ID NO: 26305 - DNA, 20 bp, Artificial Sequence
  Synthetic oligonucleotide; CAG chr11 5377171 5377190 5377187 +
aatgtaatccagcatataaa

SEQ ID NO: 26306 - DNA, 20 bp, Artificial Sequence
  Synthetic oligonucleotide; AAG chr11 5377179 5377198 5377195 +
ccagcatataaacagaacca

SEQ ID NO: 26307 - DNA, 20 bp, Artificial Sequence
  Synthetic oligonucleotide; TAG chr11 5377206 5377225 5377222 +
aaaccacatgattatctcaa

SEQ ID NO: 26308 - DNA, 20 bp, Artificial Sequence
  Synthetic oligonucleotide; CAG chr11 5377212 5377231 5377228 +
catgattatctcaatagatg

SEQ ID NO: 26309 - DNA, 20 bp, Artificial Sequence
  Synthetic oligonucleotide; AAG chr11 5377217 5377236 5377233 +
ttatctcaatagatgcagaa

SEQ ID NO: 26310 - DNA, 20 bp, Artificial Sequence
  Synthetic oligonucleotide; AGG chr11 5377218 5377237 5377234 +
tatctcaatagatgcagaaa

SEQ ID NO: 26311 - DNA, 20 bp, Artificial Sequence
  Synthetic oligonucleotide; TAG chr11 5377269 5377288 5377285 +
gctaaaaactttcaataaat

SEQ ID NO: 26312 - DNA, 20 bp, Artificial Sequence
  Synthetic oligonucleotide; AGG chr11 5377270 5377289 5377286 +
ctaaaaactttcaataaatt

SEQ ID NO: 26313 - DNA, 20 bp, Artificial Sequence
  Synthetic oligonucleotide; TGG chr11 5377279 5377298 5377295 +
ttcaataaattaggtattga

SEQ ID NO: 26314 - DNA, 20 bp, Artificial Sequence
  Synthetic oligonucleotide; GGG chr11 5377280 5377299 5377296 +
tcaataaattaggtattgat

SEQ ID NO: 26315 - DNA, 20 bp, Artificial Sequence
  Synthetic oligonucleotide; AAG chr11 5377300 5377319 5377316 +
gggacatatctcaaaataat

SEQ ID NO: 26316 - DNA, 20 bp, Artificial Sequence
  Synthetic oligonucleotide; GAG chr11 5377302 5377321 5377318 +
gacatatctcaaaataataa

SEQ ID NO: 26317 - DNA, 20 bp, Artificial Sequence
  Synthetic oligonucleotide; CAG chr11 5377323 5377342 5377339 +
agctatctatgacaaaccca

SEQ ID NO: 26318 - DNA, 20 bp, Artificial Sequence
  Synthetic oligonucleotide; TGG chr11 5377342 5377361 5377358 +
acagccaatatcatactgaa

SEQ ID NO: 26319 - DNA, 20 bp, Artificial Sequence
  Synthetic oligonucleotide; GGG chr11 5377343 5377362 5377359 +
cagccaatatcatactgaat

SEQ ID NO: 26320 - DNA, 20 bp, Artificial Sequence
  Synthetic oligonucleotide; TGG chr11 5377353 5377372 5377369 +
catactgaatgggcaaaaac

SEQ ID NO: 26321 - DNA, 20 bp, Artificial Sequence
  Synthetic oligonucleotide; AAG chr11 5377356 5377375 5377372 +
actgaatgggcaaaaactgg

SEQ ID NO: 26322 - DNA, 20 bp, Artificial Sequence
  Synthetic oligonucleotide; TGG chr11 5377375 5377394 5377391 +
gaagcattccctttgtaaac

SEQ ID NO: 26323 - DNA, 20 bp, Artificial Sequence
  Synthetic oligonucleotide; AAG chr11 5377381 5377400 5377397 +
ttccctttgtaaactggcac

SEQ ID NO: 26324 - DNA, 20 bp, Artificial Sequence
  Synthetic oligonucleotide; CAG chr11 5377385 5377404 5377401 +
ctttgtaaactggcacaaga

SEQ ID NO: 26325 - DNA, 20 bp, Artificial Sequence
  Synthetic oligonucleotide; AGG chr11 5377386 5377405 5377402 +
tttgtaaactggcacaagac

SEQ ID NO: 26326 - DNA, 20 bp, Artificial Sequence
  Synthetic oligonucleotide; GGG chr11 5377387 5377406 5377403 +
ttgtaaactggcacaagaca

SEQ ID NO: 26327 - DNA, 20 bp, Artificial Sequence
  Synthetic oligonucleotide; TAG chr11 5377419 5377438 5377435 +
ctcactactcctattcaaca

SEQ ID NO: 26328 - DNA, 20 bp, Artificial Sequence
  Synthetic oligonucleotide; TGG chr11 5377425 5377444 5377441 +
actcctattcaacatagtgt

SEQ ID NO: 26329 - DNA, 20 bp, Artificial Sequence
  Synthetic oligonucleotide; AAG chr11 5377428 5377447 5377444 +
cctattcaacatagtgttgg

SEQ ID NO: 26330 - DNA, 20 bp, Artificial Sequence
  Synthetic oligonucleotide; TGG chr11 5377434 5377453 5377450 +
caacatagtgttggaagttc

SEQ ID NO: 26331 - DNA, 20 bp, Artificial Sequence
  Synthetic oligonucleotide; CAG chr11 5377438 5377457 5377454 +
atagtgttggaagttctggc

SEQ ID NO: 26332 - DNA, 20 bp, Artificial Sequence
  Synthetic oligonucleotide; AGG chr11 5377439 5377458 5377455 +
tagtgttggaagttctggcc

SEQ ID NO: 26333 - DNA, 20 bp, Artificial Sequence
  Synthetic oligonucleotide; GGG chr11 5377440 5377459 5377456 +
agtgttggaagttctggcca

SEQ ID NO: 26334 - DNA, 20 bp, Artificial Sequence
  Synthetic oligonucleotide; TAG chr11 5377447 5377466 5377463 +
gaagttctggccagggcaat

SEQ ID NO: 26335 - DNA, 20 bp, Artificial Sequence
  Synthetic oligonucleotide; AGG chr11 5377448 5377467 5377464 +
aagttctggccagggcaatt

SEQ ID NO: 26336 - DNA, 20 bp, Artificial Sequence
  Synthetic oligonucleotide; CAG chr11 5377451 5377470 5377467 +
ttctggccagggcaattagg

SEQ ID NO: 26337 - DNA, 20 bp, Artificial Sequence
  Synthetic oligonucleotide; AAG chr11 5377454 5377473 5377470 +
tggccagggcaattaggcag

SEQ ID NO: 26338 - DNA, 20 bp, Artificial Sequence
  Synthetic oligonucleotide; CAG chr11 5377458 5377477 5377474 +
cagggcaattaggcagaaga

SEQ ID NO: 26339 - DNA, 20 bp, Artificial Sequence
  Synthetic oligonucleotide; AGG chr11 5377459 5377478 5377475 +
agggcaattaggcagaagac

SEQ ID NO: 26340 - DNA, 20 bp, Artificial Sequence
  Synthetic oligonucleotide; AAG chr11 5377466 5377485 5377482 +
ttaggcagaagacaggaaaa

SEQ ID NO: 26341 - DNA, 20 bp, Artificial Sequence
  Synthetic oligonucleotide; AGG chr11 5377467 5377486 5377483 +
taggcagaagacaggaaaaa

SEQ ID NO: 26342 - DNA, 20 bp, Artificial Sequence
  Synthetic oligonucleotide; GGG chr11 5377468 5377487 5377484 +
aggcagaagacaggaaaaaa

SEQ ID NO: 26343 - DNA, 20 bp, Artificial Sequence
  Synthetic oligonucleotide; AAG chr11 5377480 5377499 5377496 +
ggaaaaaagggtattcaatt

SEQ ID NO: 26344 - DNA, 20 bp, Artificial Sequence
  Synthetic oligonucleotide; AAG chr11 5377485 5377504 5377501 +
aaagggtattcaattaagaa

SEQ ID NO: 26345 - DNA, 20 bp, Artificial Sequence
  Synthetic oligonucleotide; GAG chr11 5377487 5377506 5377503 +
agggtattcaattaagaaaa

SEQ ID NO: 26346 - DNA, 20 bp, Artificial Sequence
  Synthetic oligonucleotide; AGG chr11 5377488 5377507 5377504 +
gggtattcaattaagaaaag

SEQ ID NO: 26347 - DNA, 20 bp, Artificial Sequence
  Synthetic oligonucleotide; AAG chr11 5377491 5377510 5377507 +
tattcaattaagaaaagagg

SEQ ID NO: 26348 - DNA, 20 bp, Artificial Sequence
  Synthetic oligonucleotide; CAG chr11 5377512 5377531 5377528 +
agtcaaattgtccctgtttg

SEQ ID NO: 26349 - DNA, 20 bp, Artificial Sequence
  Synthetic oligonucleotide; TAG chr11 5377533 5377552 5377549 +
agacgacatgattgtatatc

SEQ ID NO: 26350 - DNA, 20 bp, Artificial Sequence
  Synthetic oligonucleotide; CAG chr11 5377551 5377570 5377567 +
tctagaaaacccccttgtct

SEQ ID NO: 26351 - DNA, 20 bp, Artificial Sequence
  Synthetic oligonucleotide; AAG chr11 5377568 5377587 5377584 +
tctcagcccaaaatctcctt

SEQ ID NO: 26352 - DNA, 20 bp, Artificial Sequence
  Synthetic oligonucleotide; AAG chr11 5377576 5377595 5377592 +
caaaatctccttaagctgat

SEQ ID NO: 26353 - DNA, 20 bp, Artificial Sequence
  Synthetic oligonucleotide; CAG chr11 5377585 5377604 5377601 +
cttaagctgataagcaactt

SEQ ID NO: 26354 - DNA, 20 bp, Artificial Sequence
  Synthetic oligonucleotide; AAG chr11 5377590 5377609 5377606 +
gctgataagcaacttcagca

SEQ ID NO: 26355 - DNA, 20 bp, Artificial Sequence
  Synthetic oligonucleotide; CAG chr11 5377596 5377615 5377612 +
aagcaacttcagcaaagcct

SEQ ID NO: 26356 - DNA, 20 bp, Artificial Sequence
  Synthetic oligonucleotide; AGG chr11 5377597 5377616 5377613 +
agcaacttcagcaaagcctc

SEQ ID NO: 26357 - DNA, 20 bp, Artificial Sequence
  Synthetic oligonucleotide; AAG chr11 5377626 5377645 5377642 +
aaccaatgtgcaaaaatcac

SEQ ID NO: 26358 - DNA, 20 bp, Artificial Sequence
  Synthetic oligonucleotide; CAG chr11 5377648 5377667 5377664 +
gcattcttatacaccaataa

SEQ ID NO: 26359 - DNA, 20 bp, Artificial Sequence
  Synthetic oligonucleotide; CAG chr11 5377656 5377675 5377672 +
atacaccaataacagacaaa

SEQ ID NO: 26360 - DNA, 20 bp, Artificial Sequence
  Synthetic oligonucleotide; GAG chr11 5377658 5377677 5377674 +
acaccaataacagacaaaca

SEQ ID NO: 26361 - DNA, 20 bp, Artificial Sequence
  Synthetic oligonucleotide; GAG chr11 5377660 5377679 5377676 +
accaataacagacaaacaga

SEQ ID NO: 26362 - DNA, 20 bp, Artificial Sequence
  Synthetic oligonucleotide; GAG chr11 5377672 5377691 5377688 +
caaacagagagccaaatcat

SEQ ID NO: 26363 - DNA, 20 bp, Artificial Sequence
  Synthetic oligonucleotide; AGG chr11 5377673 5377692 5377689 +
aaacagagagccaaatcatg

SEQ ID NO: 26364 - DNA, 20 bp, Artificial Sequence
  Synthetic oligonucleotide; GGG chr11 5377674 5377693 5377690 +
aacagagagccaaatcatga

SEQ ID NO: 26365 - DNA, 20 bp, Artificial Sequence
  Synthetic oligonucleotide; AAG chr11 5377700 5377719 5377716 +
tcccattcacaattgcttca

SEQ ID NO: 26366 - DNA, 20 bp, Artificial Sequence
  Synthetic oligonucleotide; GAG chr11 5377702 5377721 5377718 +
ccattcacaattgcttcaaa

SEQ ID NO: 26367 - DNA, 20 bp, Artificial Sequence
  Synthetic oligonucleotide; TAG chr11 5377716 5377735 5377732 +
ttcaaagagaataaaatacc

SEQ ID NO: 26368 - DNA, 20 bp, Artificial Sequence
  Synthetic oligonucleotide; AGG chr11 5377717 5377736 5377733 +
tcaaagagaataaaatacct

SEQ ID NO: 26369 - DNA, 20 bp, Artificial Sequence
  Synthetic oligonucleotide; AAG chr11 5377732 5377751 5377748 +
tacctaggaatccaacttac

SEQ ID NO: 26370 - DNA, 20 bp, Artificial Sequence
  Synthetic oligonucleotide; AGG chr11 5377733 5377752 5377749 +
acctaggaatccaacttaca

SEQ ID NO: 26371 - DNA, 20 bp, Artificial Sequence
  Synthetic oligonucleotide; GGG chr11 5377734 5377753 5377750 +
cctaggaatccaacttacaa

SEQ ID NO: 26372 - DNA, 20 bp, Artificial Sequence
  Synthetic oligonucleotide; AAG chr11 5377742 5377761 5377758 +
tccaacttacaagggatgtg

SEQ ID NO: 26373 - DNA, 20 bp, Artificial Sequence
  Synthetic oligonucleotide; AGG chr11 5377743 5377762 5377759 +
ccaacttacaagggatgtga

SEQ ID NO: 26374 - DNA, 20 bp, Artificial Sequence
  Synthetic oligonucleotide; AAG chr11 5377754 5377773 5377770 +
gggatgtgaaggacctcttc

SEQ ID NO: 26375 - DNA, 20 bp, Artificial Sequence
  Synthetic oligonucleotide; AGG chr11 5377755 5377774 5377771 +
ggatgtgaaggacctcttca

SEQ ID NO: 26376 - DNA, 20 bp, Artificial Sequence
  Synthetic oligonucleotide; GAG chr11 5377757 5377776 5377773 +
atgtgaaggacctcttcaag

SEQ ID NO: 26377 - DNA, 20 bp, Artificial Sequence
  Synthetic oligonucleotide; AAG chr11 5377788 5377807 5377804 +
accactgctcaatgaaataa

SEQ ID NO: 26378 - DNA, 20 bp, Artificial Sequence
  Synthetic oligonucleotide; AAG chr11 5377791 5377810 5377807 +
actgctcaatgaaataaaag

SEQ ID NO: 26379 - DNA, 20 bp, Artificial Sequence
  Synthetic oligonucleotide; TGG chr11 5377805 5377824 5377821 +
taaaagaagatacaaacaaa

SEQ ID NO: 26380 - DNA, 20 bp, Artificial Sequence
  Synthetic oligonucleotide; AAG chr11 5377808 5377827 5377824 +
aagaagatacaaacaaatgg

SEQ ID NO: 26381 - DNA, 20 bp, Artificial Sequence
  Synthetic oligonucleotide; TGG chr11 5377826 5377845 5377842 +
ggaagaacattccatgctta

SEQ ID NO: 26382 - DNA, 20 bp, Artificial Sequence
  Synthetic oligonucleotide; GGG chr11 5377827 5377846 5377843 +
gaagaacattccatgcttat

SEQ ID NO: 26383 - DNA, 20 bp, Artificial Sequence
  Synthetic oligonucleotide; TAG chr11 5377830 5377849 5377846 +
gaacattccatgcttatggg

SEQ ID NO: 26384 - DNA, 20 bp, Artificial Sequence
  Synthetic oligonucleotide; AGG chr11 5377831 5377850 5377847 +
aacattccatgcttatgggt

SEQ ID NO: 26385 - DNA, 20 bp, Artificial Sequence
  Synthetic oligonucleotide; AAG chr11 5377834 5377853 5377850 +
attccatgcttatgggtagg

SEQ ID NO: 26386 - DNA, 20 bp, Artificial Sequence
  Synthetic oligonucleotide; TGG chr11 5377854 5377873 5377870 +
aagaatcaatatcatcaaaa

SEQ ID NO: 26387 - DNA, 20 bp, Artificial Sequence
  Synthetic oligonucleotide; AAG chr11 5377868 5377887 5377884 +
tcaaaatggccataatgccc

SEQ ID NO: 26388 - DNA, 20 bp, Artificial Sequence
  Synthetic oligonucleotide; AGG chr11 5377869 5377888 5377885 +
caaaatggccataatgccca

SEQ ID NO: 26389 - DNA, 20 bp, Artificial Sequence
  Synthetic oligonucleotide; TAG chr11 5377879 5377898 5377895 +
ataatgcccaaggtaattta

SEQ ID NO: 26390 - DNA, 20 bp, Artificial Sequence
  Synthetic oligonucleotide; AAG chr11 5377901 5377920 5377917 +
gattcaatgccatccccatc

SEQ ID NO: 26391 - DNA, 20 bp, Artificial Sequence
  Synthetic oligonucleotide; CAG chr11 5377923 5377942 5377939 +
gctaccaatgattttcttca

SEQ ID NO: 26392 - DNA, 20 bp, Artificial Sequence
  Synthetic oligonucleotide; TGG chr11 5377929 5377948 5377945 +
aatgattttcttcacagaat

SEQ ID NO: 26393 - DNA, 20 bp, Artificial Sequence
  Synthetic oligonucleotide; AAG chr11 5377945 5377964 5377961 +
gaattggaaaaacgacttta

SEQ ID NO: 26394 - DNA, 20 bp, Artificial Sequence
  Synthetic oligonucleotide; TGG chr11 5377954 5377973 5377970 +
aaacgactttaaagttcata

SEQ ID NO: 26395 - DNA, 20 bp, Artificial Sequence
  Synthetic oligonucleotide; AAG chr11 5377965 5377984 5377981 +
aagttcatatggaaccaaaa

SEQ ID NO: 26396 - DNA, 20 bp, Artificial Sequence
  Synthetic oligonucleotide; GAG chr11 5377967 5377986 5377983 +
gttcatatggaaccaaaaaa

SEQ ID NO: 26397 - DNA, 20 bp, Artificial Sequence
  Synthetic oligonucleotide; AAG chr11 5377981 5378000 5377997 +
aaaaaagagcctgcattgcc

SEQ ID NO: 26398 - DNA, 20 bp, Artificial Sequence
  Synthetic oligonucleotide; AAG chr11 5377992 5378011 5378008 +
tgcattgccaagtcaatcct

SEQ ID NO: 26399 - DNA, 20 bp, Artificial Sequence
  Synthetic oligonucleotide; AAG chr11 5377999 5378018 5378015 +
ccaagtcaatcctaagccaa

SEQ ID NO: 26400 - DNA, 20 bp, Artificial Sequence
  Synthetic oligonucleotide; AAG chr11 5378006 5378025 5378022 +
aatcctaagccaaaagaaca

SEQ ID NO: 26401 - DNA, 20 bp, Artificial Sequence
  Synthetic oligonucleotide; TGG chr11 5378010 5378029 5378026 +
ctaagccaaaagaacaaagc

SEQ ID NO: 26402 - DNA, 20 bp, Artificial Sequence
  Synthetic oligonucleotide; GAG chr11 5378012 5378031 5378028 +
aagccaaaagaacaaagctg

SEQ ID NO: 26403 - DNA, 20 bp, Artificial Sequence
  Synthetic oligonucleotide; AGG chr11 5378013 5378032 5378029 +
agccaaaagaacaaagctgg

SEQ ID NO: 26404 - DNA, 20 bp, Artificial Sequence
  Synthetic oligonucleotide; CAG chr11 5378019 5378038 5378035 +
aagaacaaagctggaggcat

SEQ ID NO: 26405 - DNA, 20 bp, Artificial Sequence
  Synthetic oligonucleotide; AGG chr11 5378020 5378039 5378036 +
agaacaaagctggaggcatc

SEQ ID NO: 26406 - DNA, 20 bp, Artificial Sequence
  Synthetic oligonucleotide; AAG chr11 5378047 5378066 5378063 +
ctcacttcaaactatactac

SEQ ID NO: 26407 - DNA, 20 bp, Artificial Sequence
  Synthetic oligonucleotide; AGG chr11 5378048 5378067 5378064 +
tcacttcaaactatactaca

SEQ ID NO: 26408 - DNA, 20 bp, Artificial Sequence
  Synthetic oligonucleotide; CAG chr11 5378054 5378073 5378070 +
caaactatactacaaggcta

SEQ ID NO: 26409 - DNA, 20 bp, Artificial Sequence
  Synthetic oligonucleotide; CAG chr11 5378066 5378085 5378082 +
caaggctacagtaaccaaaa

SEQ ID NO: 26410 - DNA, 20 bp, Artificial Sequence
  Synthetic oligonucleotide; TGG chr11 5378077 5378096 5378093 +
taaccaaaacagcatgttac

SEQ ID NO: 26411 - DNA, 20 bp, Artificial Sequence
  Synthetic oligonucleotide; CAG chr11 5378090 5378109 5378106 +
atgttactggtaccaaaaca

SEQ ID NO: 26412 - DNA, 20 bp, Artificial Sequence
  Synthetic oligonucleotide; TAG chr11 5378096 5378115 5378112 +
ctggtaccaaaacacagata

SEQ ID NO: 26413 - DNA, 20 bp, Artificial Sequence
  Synthetic oligonucleotide; TGG chr11 5378104 5378123 5378120 +
aaaacacagatatagatcaa

SEQ ID NO: 26414 - DNA, 20 bp, Artificial Sequence
  Synthetic oligonucleotide; CAG chr11 5378109 5378128 5378125 +
acagatatagatcaatggaa

SEQ ID NO: 26415 - DNA, 20 bp, Artificial Sequence
  Synthetic oligonucleotide; CAG chr11 5378114 5378133 5378130 +
tatagatcaatggaacagaa

SEQ ID NO: 26416 - DNA, 20 bp, Artificial Sequence
  Synthetic oligonucleotide; GAG chr11 5378116 5378135 5378132 +
tagatcaatggaacagaaca

SEQ ID NO: 26417 - DNA, 20 bp, Artificial Sequence
  Synthetic oligonucleotide; CAG chr11 5378123 5378142 5378139 +
atggaacagaacagagccct

SEQ ID NO: 26418 - DNA, 20 bp, Artificial Sequence
  Synthetic oligonucleotide; GAG chr11 5378170 5378189 5378186 +
atctgatctttgaaaaacct

SEQ ID NO: 26419 - DNA, 20 bp, Artificial Sequence
  Synthetic oligonucleotide; AAG chr11 5378179 5378198 5378195 +
ttgaaaaacctgagaaaaac

SEQ ID NO: 26420 - DNA, 20 bp, Artificial Sequence
  Synthetic oligonucleotide; TGG chr11 5378185 5378204 5378201 +
aacctgagaaaaacaagaaa

SEQ ID NO: 26421 - DNA, 20 bp, Artificial Sequence
  Synthetic oligonucleotide; GGG chr11 5378186 5378205 5378202 +
acctgagaaaaacaagaaat

SEQ ID NO: 26422 - DNA, 20 bp, Artificial Sequence
  Synthetic oligonucleotide; GGG chr11 5378187 5378206 5378203 +
cctgagaaaaacaagaaatg

SEQ ID NO: 26423 - DNA, 20 bp, Artificial Sequence
  Synthetic oligonucleotide; AAG chr11 5378191 5378210 5378207 +
agaaaaacaagaaatgggga

SEQ ID NO: 26424 - DNA, 20 bp, Artificial Sequence
  Synthetic oligonucleotide; AGG chr11 5378192 5378211 5378208 +
gaaaaacaagaaatggggaa

SEQ ID NO: 26425 - DNA, 20 bp, Artificial Sequence
  Synthetic oligonucleotide; TGG chr11 5378212 5378231 5378228 +
aggattccctatttaataaa

SEQ ID NO: 26426 - DNA, 20 bp, Artificial Sequence
  Synthetic oligonucleotide; TGG chr11 5378218 5378237 5378234 +
ccctatttaataaatggtgc

SEQ ID NO: 26427 - DNA, 20 bp, Artificial Sequence
  Synthetic oligonucleotide; GGG chr11 5378219 5378238 5378235 +
cctatttaataaatggtgct

SEQ ID NO: 26428 - DNA, 20 bp, Artificial Sequence
  Synthetic oligonucleotide; GAG chr11 5378221 5378240 5378237 +
tatttaataaatggtgctgg

SEQ ID NO: 26429 - DNA, 20 bp, Artificial Sequence
  Synthetic oligonucleotide; TGG chr11 5378227 5378246 5378243 +
ataaatggtgctgggagaac

SEQ ID NO: 26430 - DNA, 20 bp, Artificial Sequence
  Synthetic oligonucleotide; TAG chr11 5378231 5378250 5378247 +
atggtgctgggagaactggc

SEQ ID NO: 26431 - DNA, 20 bp, Artificial Sequence
  Synthetic oligonucleotide; TAG chr11 5378241 5378260 5378257 +
gagaactggctagccatatg

SEQ ID NO: 26432 - DNA, 20 bp, Artificial Sequence
  Synthetic oligonucleotide; TGG chr11 5378255 5378274 5378271 +
catatgtagaatgctgaaac

SEQ ID NO: 26433 - DNA, 20 bp, Artificial Sequence
  Synthetic oligonucleotide; AAG chr11 5378292 5378311 5378308 +
ccttatacaaaaattaattc

SEQ ID NO: 26434 - DNA, 20 bp, Artificial Sequence
  Synthetic oligonucleotide; TGG chr11 5378296 5378315 5378312 +
atacaaaaattaattcaaga

SEQ ID NO: 26435 - DNA, 20 bp, Artificial Sequence
  Synthetic oligonucleotide; AAG chr11 5378303 5378322 5378319 +
aattaattcaagatggatta

SEQ ID NO: 26436 - DNA, 20 bp, Artificial Sequence
  Synthetic oligonucleotide; TAG chr11 5378316 5378335 5378332 +
tggattaaagacttaaacat

SEQ ID NO: 26437 - DNA, 20 bp, Artificial Sequence
  Synthetic oligonucleotide; TAG chr11 5378339 5378358 5378355 +
acctaaaaccataaaaaccc

SEQ ID NO: 26438 - DNA, 20 bp, Artificial Sequence
  Synthetic oligonucleotide; AAG chr11 5378342 5378361 5378358 +
taaaaccataaaaaccctag

SEQ ID NO: 26439 - DNA, 20 bp, Artificial Sequence
  Synthetic oligonucleotide; CAG chr11 5378351 5378370 5378367 +
aaaaaccctagaagaaaacg

SEQ ID NO: 26440 - DNA, 20 bp, Artificial Sequence
  Synthetic oligonucleotide; AGG chr11 5378352 5378371 5378368 +
aaaaccctagaagaaaacgc

SEQ ID NO: 26441 - DNA, 20 bp, Artificial Sequence
  Synthetic oligonucleotide; CAG chr11 5378365 5378384 5378381 +
aaaacgcaggcattaccatt

SEQ ID NO: 26442 - DNA, 20 bp, Artificial Sequence
  Synthetic oligonucleotide; AGG chr11 5378366 5378385 5378382 +
aaacgcaggcattaccattc

SEQ ID NO: 26443 - DNA, 20 bp, Artificial Sequence
  Synthetic oligonucleotide; TAG chr11 5378372 5378391 5378388 +
aggcattaccattcaggaca

SEQ ID NO: 26444 - DNA, 20 bp, Artificial Sequence
  Synthetic oligonucleotide; AGG chr11 5378373 5378392 5378389 +
ggcattaccattcaggacat

SEQ ID NO: 26445 - DNA, 20 bp, Artificial Sequence
  Synthetic oligonucleotide; TGG chr11 5378378 5378397 5378394 +
taccattcaggacataggca

SEQ ID NO: 26446 - DNA, 20 bp, Artificial Sequence
  Synthetic oligonucleotide; GGG chr11 5378379 5378398 5378395 +
accattcaggacataggcat

SEQ ID NO: 26447 - DNA, 20 bp, Artificial Sequence
  Synthetic oligonucleotide; AAG chr11 5378383 5378402 5378399 +
ttcaggacataggcatgggc

SEQ ID NO: 26448 - DNA, 20 bp, Artificial Sequence
  Synthetic oligonucleotide; AGG chr11 5378384 5378403 5378400 +
tcaggacataggcatgggca

SEQ ID NO: 26449 - DNA, 20 bp, Artificial Sequence
  Synthetic oligonucleotide; AAG chr11 5378408 5378427 5378424 +
cttcatgtctaaaacaccaa

SEQ ID NO: 26450 - DNA, 20 bp, Artificial Sequence
  Synthetic oligonucleotide; TGG chr11 5378414 5378433 5378430 +
gtctaaaacaccaaaagcga

SEQ ID NO: 26451 - DNA, 20 bp, Artificial Sequence
  Synthetic oligonucleotide; AAG chr11 5378423 5378442 5378439 +
accaaaagcgatggcaacaa

SEQ ID NO: 26452 - DNA, 20 bp, Artificial Sequence
  Synthetic oligonucleotide; TGG chr11 5378440 5378459 5378456 +
caaaagccaaaattcactaa

SEQ ID NO: 26453 - DNA, 20 bp, Artificial Sequence
  Synthetic oligonucleotide; GGG chr11 5378441 5378460 5378457 +
aaaagccaaaattcactaat

SEQ ID NO: 26454 - DNA, 20 bp, Artificial Sequence
  Synthetic oligonucleotide; AAG chr11 5378458 5378477 5378474 +
aatgggatctaatgaaacta

SEQ ID NO: 26455 - DNA, 20 bp, Artificial Sequence
  Synthetic oligonucleotide; GAG chr11 5378460 5378479 5378476 +
tgggatctaatgaaactaaa

SEQ ID NO: 26456 - DNA, 20 bp, Artificial Sequence
  Synthetic oligonucleotide; CAG chr11 5378471 5378490 5378487 +
gaaactaaagagcttctgca

SEQ ID NO: 26457 - DNA, 20 bp, Artificial Sequence
  Synthetic oligonucleotide; AAG chr11 5378477 5378496 5378493 +
aaagagcttctgcacagcta

SEQ ID NO: 26458 - DNA, 20 bp, Artificial Sequence
  Synthetic oligonucleotide; CAG chr11 5378490 5378509 5378506 +
acagctaaagaaactaccat

SEQ ID NO: 26459 - DNA, 20 bp, Artificial Sequence
  Synthetic oligonucleotide; GAG chr11 5378492 5378511 5378508 +
agctaaagaaactaccatca

SEQ ID NO: 26460 - DNA, 20 bp, Artificial Sequence
  Synthetic oligonucleotide; CAG chr11 5378499 5378518 5378515 +
gaaactaccatcagagtgaa

SEQ ID NO: 26461 - DNA, 20 bp, Artificial Sequence
  Synthetic oligonucleotide; AGG chr11 5378500 5378519 5378516 +
aaactaccatcagagtgaac

SEQ ID NO: 26462 - DNA, 20 bp, Artificial Sequence
  Synthetic oligonucleotide; TGG chr11 5378515 5378534 5378531 +
tgaacaggcaacctacacaa

SEQ ID NO: 26463 - DNA, 20 bp, Artificial Sequence
  Synthetic oligonucleotide; GGG chr11 5378516 5378535 5378532 +
gaacaggcaacctacacaat

SEQ ID NO: 26464 - DNA, 20 bp, Artificial Sequence
  Synthetic oligonucleotide; GAG chr11 5378518 5378537 5378534 +
acaggcaacctacacaatgg

SEQ ID NO: 26465 - DNA, 20 bp, Artificial Sequence
  Synthetic oligonucleotide; AAG chr11 5378549 5378568 5378565 +
cacaacctactcatctgaca

SEQ ID NO: 26466 - DNA, 20 bp, Artificial Sequence
  Synthetic oligonucleotide; AGG chr11 5378550 5378569 5378566 +
acaacctactcatctgacaa

SEQ ID NO: 26467 - DNA, 20 bp, Artificial Sequence
  Synthetic oligonucleotide; GGG chr11 5378551 5378570 5378567 +
caacctactcatctgacaaa

SEQ ID NO: 26468 - DNA, 20 bp, Artificial Sequence
  Synthetic oligonucleotide; CAG chr11 5378562 5378581 5378578 +
tctgacaaagggctaatatc

SEQ ID NO: 26469 - DNA, 20 bp, Artificial Sequence
  Synthetic oligonucleotide; AAG chr11 5378593 5378612 5378609 +
atgaactcaaacaaatttac

SEQ ID NO: 26470 - DNA, 20 bp, Artificial Sequence
  Synthetic oligonucleotide; CAG chr11 5378607 5378626 5378623 +
atttacaagaaaaaaacaaa

SEQ ID NO: 26471 - DNA, 20 bp, Artificial Sequence
  Synthetic oligonucleotide; AAG chr11 5378620 5378639 5378636 +
aaacaaacagccccatcaac

SEQ ID NO: 26472 - DNA, 20 bp, Artificial Sequence
  Synthetic oligonucleotide; TGG chr11 5378623 5378642 5378639 +
caaacagccccatcaacaag

SEQ ID NO: 26473 - DNA, 20 bp, Artificial Sequence
  Synthetic oligonucleotide; GGG chr11 5378624 5378643 5378640 +
aaacagccccatcaacaagt

SEQ ID NO: 26474 - DNA, 20 bp, Artificial Sequence
  Synthetic oligonucleotide; AAG chr11 5378629 5378648 5378645 +
gccccatcaacaagtgggca

SEQ ID NO: 26475 - DNA, 20 bp, Artificial Sequence
  Synthetic oligonucleotide; AGG chr11 5378630 5378649 5378646 +
ccccatcaacaagtgggcaa

SEQ ID NO: 26476 - DNA, 20 bp, Artificial Sequence
  Synthetic oligonucleotide; CAG chr11 5378640 5378659 5378656 +
aagtgggcaaaggatatgaa

SEQ ID NO: 26477 - DNA, 20 bp, Artificial Sequence
  Synthetic oligonucleotide; AAG chr11 5378654 5378673 5378670 +
tatgaacagacacttctcaa

SEQ ID NO: 26478 - DNA, 20 bp, Artificial Sequence
  Synthetic oligonucleotide; AAG chr11 5378676 5378695 5378692 +
gaaaacatttatgcaaccaa

SEQ ID NO: 26479 - DNA, 20 bp, Artificial Sequence
  Synthetic oligonucleotide; TGG chr11 5378705 5378724 5378721 +
gaaaaaatgctcatcatcac

SEQ ID NO: 26480 - DNA, 20 bp, Artificial Sequence
  Synthetic oligonucleotide; CAG chr11 5378712 5378731 5378728 +
tgctcatcatcactggccat

SEQ ID NO: 26481 - DNA, 20 bp, Artificial Sequence
  Synthetic oligonucleotide; GAG chr11 5378714 5378733 5378730 +
ctcatcatcactggccatca

SEQ ID NO: 26482 - DNA, 20 bp, Artificial Sequence
  Synthetic oligonucleotide; GAG chr11 5378739 5378758 5378755 +
atgcaaatcaaaaccacaat

SEQ ID NO: 26483 - DNA, 20 bp, Artificial Sequence
  Synthetic oligonucleotide; CAG chr11 5378756 5378775 5378772 +
aatgagataccatctcatac

SEQ ID NO: 26484 - DNA, 20 bp, Artificial Sequence
  Synthetic oligonucleotide; TAG chr11 5378760 5378779 5378776 +
agataccatctcataccagt

SEQ ID NO: 26485 - DNA, 20 bp, Artificial Sequence
  Synthetic oligonucleotide; TGG chr11 5378765 5378784 5378781 +
ccatctcataccagttagaa

SEQ ID NO: 26486 - DNA, 20 bp, Artificial Sequence
  Synthetic oligonucleotide; AAG chr11 5378779 5378798 5378795 +
ttagaatggcaatcattaaa

SEQ ID NO: 26487 - DNA, 20 bp, Artificial Sequence
  Synthetic oligonucleotide; CAG chr11 5378783 5378802 5378799 +
aatggcaatcattaaaaagt

SEQ ID NO: 26488 - DNA, 20 bp, Artificial Sequence
  Synthetic oligonucleotide; AGG chr11 5378784 5378803 5378800 +
atggcaatcattaaaaagtc

SEQ ID NO: 26489 - DNA, 20 bp, Artificial Sequence
  Synthetic oligonucleotide; CAG chr11 5378793 5378812 5378809 +
attaaaaagtcaggaaacaa

SEQ ID NO: 26490 - DNA, 20 bp, Artificial Sequence
  Synthetic oligonucleotide; AGG chr11 5378794 5378813 5378810 +
ttaaaaagtcaggaaacaac

SEQ ID NO: 26491 - DNA, 20 bp, Artificial Sequence
  Synthetic oligonucleotide; TGG chr11 5378800 5378819 5378816 +
agtcaggaaacaacaggtgc

SEQ ID NO: 26492 - DNA, 20 bp, Artificial Sequence
  Synthetic oligonucleotide; GAG chr11 5378802 5378821 5378818 +
tcaggaaacaacaggtgctg

SEQ ID NO: 26493 - DNA, 20 bp, Artificial Sequence
  Synthetic oligonucleotide; GAG chr11 5378804 5378823 5378820 +
aggaaacaacaggtgctgga

SEQ ID NO: 26494 - DNA, 20 bp, Artificial Sequence
  Synthetic oligonucleotide; AGG chr11 5378805 5378824 5378821 +
ggaaacaacaggtgctggag

SEQ ID NO: 26495 - DNA, 20 bp, Artificial Sequence
  Synthetic oligonucleotide; TGG chr11 5378811 5378830 5378827 +
aacaggtgctggagaggatg

SEQ ID NO: 26496 - DNA, 20 bp, Artificial Sequence
  Synthetic oligonucleotide; GAG chr11 5378813 5378832 5378829 +
caggtgctggagaggatgtg

SEQ ID NO: 26497 - DNA, 20 bp, Artificial Sequence
  Synthetic oligonucleotide; TAG chr11 5378819 5378838 5378835 +
ctggagaggatgtggagaaa

SEQ ID NO: 26498 - DNA, 20 bp, Artificial Sequence
  Synthetic oligonucleotide; AGG chr11 5378820 5378839 5378836 +
tggagaggatgtggagaaat

SEQ ID NO: 26499 - DNA, 20 bp, Artificial Sequence
  Synthetic oligonucleotide; TGG chr11 5378839 5378858 5378855 +
taggaacacttttacactct

SEQ ID NO: 26500 - DNA, 20 bp, Artificial Sequence
  Synthetic oligonucleotide; TGG chr11 5378842 5378861 5378858 +
gaacacttttacactcttgg

SEQ ID NO: 26501 - DNA, 20 bp, Artificial Sequence
  Synthetic oligonucleotide; GGG chr11 5378843 5378862 5378859 +
aacacttttacactcttggt

SEQ ID NO: 26502 - DNA, 20 bp, Artificial Sequence
  Synthetic oligonucleotide; TAG chr11 5378855 5378874 5378871 +
ctcttggtgggactgtaaac

SEQ ID NO: 26503 - DNA, 20 bp, Artificial Sequence
  Synthetic oligonucleotide; TGG chr11 5378869 5378888 5378885 +
gtaaactagttcaaccattg

SEQ ID NO: 26504 - DNA, 20 bp, Artificial Sequence
  Synthetic oligonucleotide; AAG chr11 5378872 5378891 5378888 +
aactagttcaaccattgtgg

SEQ ID NO: 26505 - DNA, 20 bp, Artificial Sequence
  Synthetic oligonucleotide; CAG chr11 5378876 5378895 5378892 +
agttcaaccattgtggaagt

SEQ ID NO: 26506 - DNA, 20 bp, Artificial Sequence
  Synthetic oligonucleotide; TGG chr11 5378881 5378900 5378897 +
aaccattgtggaagtcagtg

SEQ ID NO: 26507 - DNA, 20 bp, Artificial Sequence
  Synthetic oligonucleotide; CAG chr11 5378892 5378911 5378908 +
aagtcagtgtggcgattcct

SEQ ID NO: 26508 - DNA, 20 bp, Artificial Sequence
  Synthetic oligonucleotide; AGG chr11 5378893 5378912 5378909 +
agtcagtgtggcgattcctc

SEQ ID NO: 26509 - DNA, 20 bp, Artificial Sequence
  Synthetic oligonucleotide; GGG chr11 5378894 5378913 5378910 +
gtcagtgtggcgattcctca

SEQ ID NO: 26510 - DNA, 20 bp, Artificial Sequence
  Synthetic oligonucleotide; TAG chr11 5378900 5378919 5378916 +
gtggcgattcctcagggatc

SEQ ID NO: 26511 - DNA, 20 bp, Artificial Sequence
  Synthetic oligonucleotide; TAG chr11 5378906 5378925 5378922 +
attcctcagggatctagaac

SEQ ID NO: 26512 - DNA, 20 bp, Artificial Sequence
  Synthetic oligonucleotide; CAG chr11 5378924 5378943 5378940 +
actagaaataccatttgacc

SEQ ID NO: 26513 - DNA, 20 bp, Artificial Sequence
  Synthetic oligonucleotide; TGG chr11 5378939 5378958 5378955 +
tgacccagccatcccattac

SEQ ID NO: 26514 - DNA, 20 bp, Artificial Sequence
  Synthetic oligonucleotide; GGG chr11 5378940 5378959 5378956 +
gacccagccatcccattact

SEQ ID NO: 26515 - DNA, 20 bp, Artificial Sequence
  Synthetic oligonucleotide; AAG chr11 5378953 5378972 5378969 +
cattactgggtatataccca

SEQ ID NO: 26516 - DNA, 20 bp, Artificial Sequence
  Synthetic oligonucleotide; AGG chr11 5378954 5378973 5378970 +
attactgggtatatacccaa

SEQ ID NO: 26517 - DNA, 20 bp, Artificial Sequence
  Synthetic oligonucleotide; AAG chr11 5378978 5378997 5378994 +
atataaatcatgctgctata

SEQ ID NO: 26518 - DNA, 20 bp, Artificial Sequence
  Synthetic oligonucleotide; CGG chr11 5379005 5379024 5379021 +
atgcacacgtatgtttattg

SEQ ID NO: 26519 - DNA, 20 bp, Artificial Sequence
  Synthetic oligonucleotide; TAG chr11 5379020 5379039 5379036 +
tattgcggtactattcacaa

SEQ ID NO: 26520 - DNA, 20 bp, Artificial Sequence
  Synthetic oligonucleotide; AAG chr11 5379025 5379044 5379041 +
cggtactattcacaatagca

SEQ ID NO: 26521 - DNA, 20 bp, Artificial Sequence
  Synthetic oligonucleotide; TGG chr11 5379031 5379050 5379047 +
tattcacaatagcaaagact

SEQ ID NO: 26522 - DNA, 20 bp, Artificial Sequence
  Synthetic oligonucleotide; TAG chr11 5379059 5379078 5379075 +
acccaaatgtccaacaatga

SEQ ID NO: 26523 - DNA, 20 bp, Artificial Sequence
  Synthetic oligonucleotide; TGG chr11 5379064 5379083 5379080 +
aatgtccaacaatgatagac

SEQ ID NO: 26524 - DNA, 20 bp, Artificial Sequence
  Synthetic oligonucleotide; AAG chr11 5379070 5379089 5379086 +
caacaatgatagactggatt

SEQ ID NO: 26525 - DNA, 20 bp, Artificial Sequence
  Synthetic oligonucleotide; TGG chr11 5379079 5379098 5379095 +
tagactggattaagaaaatg

SEQ ID NO: 26526 - DNA, 20 bp, Artificial Sequence
  Synthetic oligonucleotide; TGG chr11 5379095 5379114 5379111 +
aatgtggcacatatacacca

SEQ ID NO: 26527 - DNA, 20 bp, Artificial Sequence
  Synthetic oligonucleotide; CAG chr11 5379107 5379126 5379123 +
atacaccatggaatactatg

SEQ ID NO: 26528 - DNA, 20 bp, Artificial Sequence
  Synthetic oligonucleotide; GAG chr11 5379123 5379142 5379139 +
tatgcagccataaaaatgat

SEQ ID NO: 26529 - DNA, 20 bp, Artificial Sequence
  Synthetic oligonucleotide; TAG chr11 5379139 5379158 5379155 +
tgatgagttcatgtcctttg

SEQ ID NO: 26530 - DNA, 20 bp, Artificial Sequence
  Synthetic oligonucleotide; AGG chr11 5379140 5379159 5379156 +
gatgagttcatgtcctttgt

SEQ ID NO: 26531 - DNA, 20 bp, Artificial Sequence
  Synthetic oligonucleotide; GGG chr11 5379141 5379160 5379157 +
atgagttcatgtcctttgta

SEQ ID NO: 26532 - DNA, 20 bp, Artificial Sequence
  Synthetic oligonucleotide; TGG chr11 5379147 5379166 5379163 +
tcatgtcctttgtagggaca

SEQ ID NO: 26533 - DNA, 20 bp, Artificial Sequence
  Synthetic oligonucleotide; TGG chr11 5379157 5379176 5379173 +
tgtagggacatggatgaaat

SEQ ID NO: 26534 - DNA, 20 bp, Artificial Sequence
  Synthetic oligonucleotide; CAG chr11 5379173 5379192 5379189 +
aaattggaaatcatcattct

SEQ ID NO: 26535 - DNA, 20 bp, Artificial Sequence
  Synthetic oligonucleotide; AAG chr11 5379187 5379206 5379203 +
cattctcagtaaactatcgc

SEQ ID NO: 26536 - DNA, 20 bp, Artificial Sequence
  Synthetic oligonucleotide; AGG chr11 5379188 5379207 5379204 +
attctcagtaaactatcgca

SEQ ID NO: 26537 - DNA, 20 bp, Artificial Sequence
  Synthetic oligonucleotide; TAG chr11 5379223 5379242 5379239 +
acaccacatattctcactca

SEQ ID NO: 26538 - DNA, 20 bp, Artificial Sequence
  Synthetic oligonucleotide; TGG chr11 5379227 5379246 5379243 +
cacatattctcactcataga

SEQ ID NO: 26539 - DNA, 20 bp, Artificial Sequence
  Synthetic oligonucleotide; GGG chr11 5379228 5379247 5379244 +
acatattctcactcatagat

SEQ ID NO: 26540 - DNA, 20 bp, Artificial Sequence
  Synthetic oligonucleotide; GAG chr11 5379242 5379261 5379258 +
atagatgggaactgaacaat

SEQ ID NO: 26541 - DNA, 20 bp, Artificial Sequence
  Synthetic oligonucleotide; TGG chr11 5379251 5379270 5379267 +
aactgaacaatgagaacaca

SEQ ID NO: 26542 - DNA, 20 bp, Artificial Sequence
  Synthetic oligonucleotide; CAG chr11 5379257 5379276 5379273 +
acaatgagaacacatggaca

SEQ ID NO: 26543 - DNA, 20 bp, Artificial Sequence
  Synthetic oligonucleotide; AGG chr11 5379258 5379277 5379274 +
caatgagaacacatggacac

SEQ ID NO: 26544 - DNA, 20 bp, Artificial Sequence
  Synthetic oligonucleotide; AAG chr11 5379261 5379280 5379277 +
tgagaacacatggacacagg

SEQ ID NO: 26545 - DNA, 20 bp, Artificial Sequence
  Synthetic oligonucleotide; AGG chr11 5379262 5379281 5379278 +
gagaacacatggacacagga

SEQ ID NO: 26546 - DNA, 20 bp, Artificial Sequence
  Synthetic oligonucleotide; GGG chr11 5379263 5379282 5379279 +
agaacacatggacacaggaa

SEQ ID NO: 26547 - DNA, 20 bp, Artificial Sequence
  Synthetic oligonucleotide; GGG chr11 5379264 5379283 5379280 +
gaacacatggacacaggaag

SEQ ID NO: 26548 - DNA, 20 bp, Artificial Sequence
  Synthetic oligonucleotide; TGG chr11 5379279 5379298 5379295 +
ggaaggggaacatcacactc

SEQ ID NO: 26549 - DNA, 20 bp, Artificial Sequence
  Synthetic oligonucleotide; GGG chr11 5379280 5379299 5379296 +
gaaggggaacatcacactct

SEQ ID NO: 26550 - DNA, 20 bp, Artificial Sequence
  Synthetic oligonucleotide; GGG chr11 5379281 5379300 5379297 +
aaggggaacatcacactctg

SEQ ID NO: 26551 - DNA, 20 bp, Artificial Sequence
  Synthetic oligonucleotide; TGG chr11 5379291 5379310 5379307 +
tcacactctggggactgttg

SEQ ID NO: 26552 - DNA, 20 bp, Artificial Sequence
  Synthetic oligonucleotide; GGG chr11 5379292 5379311 5379308 +
cacactctggggactgttgt

SEQ ID NO: 26553 - DNA, 20 bp, Artificial Sequence
  Synthetic oligonucleotide; GGG chr11 5379293 5379312 5379309 +
acactctggggactgttgtg

SEQ ID NO: 26554 - DNA, 20 bp, Artificial Sequence
  Synthetic oligonucleotide; TGG chr11 5379296 5379315 5379312 +
ctctggggactgttgtgggg

SEQ ID NO: 26555 - DNA, 20 bp, Artificial Sequence
  Synthetic oligonucleotide; GGG chr11 5379297 5379316 5379313 +
tctggggactgttgtggggt

SEQ ID NO: 26556 - DNA, 20 bp, Artificial Sequence
  Synthetic oligonucleotide; GGG chr11 5379298 5379317 5379314 +
ctggggactgttgtggggtg

SEQ ID NO: 26557 - DNA, 20 bp, Artificial Sequence
  Synthetic oligonucleotide; GGG chr11 5379299 5379318 5379315 +
tggggactgttgtggggtgg

SEQ ID NO: 26558 - DNA, 20 bp, Artificial Sequence
  Synthetic oligonucleotide; CAG chr11 5379304 5379323 5379320 +
actgttgtggggtgggggtg

SEQ ID NO: 26559 - DNA, 20 bp, Artificial Sequence
  Synthetic oligonucleotide; AGG chr11 5379305 5379324 5379321 +
ctgttgtggggtgggggtgc

SEQ ID NO: 26560 - DNA, 20 bp, Artificial Sequence
  Synthetic oligonucleotide; GGG chr11 5379306 5379325 5379322 +
tgttgtggggtgggggtgca

SEQ ID NO: 26561 - DNA, 20 bp, Artificial Sequence
  Synthetic oligonucleotide; GAG chr11 5379308 5379327 5379324 +
ttgtggggtgggggtgcagg

SEQ ID NO: 26562 - DNA, 20 bp, Artificial Sequence
  Synthetic oligonucleotide; AGG chr11 5379309 5379328 5379325 +
tgtggggtgggggtgcaggg

SEQ ID NO: 26563 - DNA, 20 bp, Artificial Sequence
  Synthetic oligonucleotide; GGG chr11 5379310 5379329 5379326 +
gtggggtgggggtgcaggga

SEQ ID NO: 26564 - DNA, 20 bp, Artificial Sequence
  Synthetic oligonucleotide; TGG chr11 5379314 5379333 5379330 +
ggtgggggtgcagggaggga

SEQ ID NO: 26565 - DNA, 20 bp, Artificial Sequence
  Synthetic oligonucleotide; TAG chr11 5379320 5379339 5379336 +
ggtgcagggagggatggcat

SEQ ID NO: 26566 - DNA, 20 bp, Artificial Sequence
  Synthetic oligonucleotide; AGG chr11 5379321 5379340 5379337 +
gtgcagggagggatggcatt

SEQ ID NO: 26567 - DNA, 20 bp, Artificial Sequence
  Synthetic oligonucleotide; GAG chr11 5379323 5379342 5379339 +
gcagggagggatggcattag

SEQ ID NO: 26568 - DNA, 20 bp, Artificial Sequence
  Synthetic oligonucleotide; GAG chr11 5379347 5379366 5379363 +
tatacctaatgctaaattac

SEQ ID NO: 26569 - DNA, 20 bp, Artificial Sequence
  Synthetic oligonucleotide; TGG chr11 5379354 5379373 5379370 +
aatgctaaattacgagttaa

SEQ ID NO: 26570 - DNA, 20 bp, Artificial Sequence
  Synthetic oligonucleotide; GGG chr11 5379355 5379374 5379371 +
atgctaaattacgagttaat

SEQ ID NO: 26571 - DNA, 20 bp, Artificial Sequence
  Synthetic oligonucleotide; CAG chr11 5379360 5379379 5379376 +
aaattacgagttaatgggtg

SEQ ID NO: 26572 - DNA, 20 bp, Artificial Sequence
  Synthetic oligonucleotide; TGG chr11 5379373 5379392 5379389 +
atgggtgcagcacaccaaca

SEQ ID NO: 26573 - DNA, 20 bp, Artificial Sequence
  Synthetic oligonucleotide; CGG chr11 5379400 5379419 5379416 +
tgtatacatatgtaactaac

SEQ ID NO: 26574 - DNA, 20 bp, Artificial Sequence
  Synthetic oligonucleotide; AAG chr11 5379432 5379451 5379448 +
cacatgtaccctaaatctta

SEQ ID NO: 26575 - DNA, 20 bp, Artificial Sequence
  Synthetic oligonucleotide; AAG chr11 5379479 5379498 5379495 +
aaataaaaaaataaaaaata

SEQ ID NO: 26576 - DNA, 20 bp, Artificial Sequence
  Synthetic oligonucleotide; CAG chr11 5379485 5379504 5379501 +
aaaaataaaaaataaagttc

SEQ ID NO: 26577 - DNA, 20 bp, Artificial Sequence
  Synthetic oligonucleotide; CAG chr11 5379498 5379517 5379514 +
aaagttccagtttatttttt

SEQ ID NO: 26578 - DNA, 20 bp, Artificial Sequence
  Synthetic oligonucleotide; AGG chr11 5379499 5379518 5379515 +
aagttccagtttattttttc

SEQ ID NO: 26579 - DNA, 20 bp, Artificial Sequence
  Synthetic oligonucleotide; AAG chr11 5379564 5379583 5379580 +
ctttttctatgtctgctttt

SEQ ID NO: 26580 - DNA, 20 bp, Artificial Sequence
  Synthetic oligonucleotide; TGG chr11 5379569 5379588 5379585 +
tctatgtctgcttttaagat

SEQ ID NO: 26581 - DNA, 20 bp, Artificial Sequence
  Synthetic oligonucleotide; AAG chr11 5379599 5379618 5379615 +
ttgttgtttatgccatttgt

SEQ ID NO: 26582 - DNA, 20 bp, Artificial Sequence
  Synthetic oligonucleotide; TAG chr11 5379611 5379630 5379627 +
ccatttgtaagatatgcatt

SEQ ID NO: 26583 - DNA, 20 bp, Artificial Sequence
  Synthetic oligonucleotide; AAG chr11 5379644 5379663 5379660 +
ttttttaattgacattgctc

SEQ ID NO: 26584 - DNA, 20 bp, Artificial Sequence
  Synthetic oligonucleotide; AGG chr11 5379645 5379664 5379661 +
tttttaattgacattgctca

SEQ ID NO: 26585 - DNA, 20 bp, Artificial Sequence
  Synthetic oligonucleotide; TAG chr11 5379649 5379668 5379665 +
taattgacattgctcaaggt

SEQ ID NO: 26586 - DNA, 20 bp, Artificial Sequence
  Synthetic oligonucleotide; AAG chr11 5379655 5379674 5379671 +
acattgctcaaggttagcta

SEQ ID NO: 26587 - DNA, 20 bp, Artificial Sequence
  Synthetic oligonucleotide; TAG chr11 5379669 5379688 5379685 +
tagctaaagatatgaattaa

SEQ ID NO: 26588 - DNA, 20 bp, Artificial Sequence
  Synthetic oligonucleotide; CAG chr11 5379682 5379701 5379698 +
gaattaatagattttatgtc

SEQ ID NO: 26589 - DNA, 20 bp, Artificial Sequence
  Synthetic oligonucleotide; CAG chr11 5379698 5379717 5379714 +
tgtccagatgttgaaacatt

SEQ ID NO: 26590 - DNA, 20 bp, Artificial Sequence
  Synthetic oligonucleotide; TAG chr11 5379746 5379765 5379762 +
atccattttttgtttccttt

SEQ ID NO: 26591 - DNA, 20 bp, Artificial Sequence
  Synthetic oligonucleotide; TGG chr11 5379766 5379785 5379782 +
tagaattctaatttcacata

SEQ ID NO: 26592 - DNA, 20 bp, Artificial Sequence
  Synthetic oligonucleotide; TGG chr11 5379769 5379788 5379785 +
aattctaatttcacatatgg

SEQ ID NO: 26593 - DNA, 20 bp, Artificial Sequence
  Synthetic oligonucleotide; CAG chr11 5379773 5379792 5379789 +
ctaatttcacatatggtgga

SEQ ID NO: 26594 - DNA, 20 bp, Artificial Sequence
  Synthetic oligonucleotide; GAG chr11 5379792 5379811 5379808 +
acagcttgatactttcccat

SEQ ID NO: 26595 - DNA, 20 bp, Artificial Sequence
  Synthetic oligonucleotide; TGG chr11 5379797 5379816 5379813 +
ttgatactttcccatgagtc

SEQ ID NO: 26596 - DNA, 20 bp, Artificial Sequence
  Synthetic oligonucleotide; TGG chr11 5379805 5379824 5379821 +
ttcccatgagtctggctttc

SEQ ID NO: 26597 - DNA, 20 bp, Artificial Sequence
  Synthetic oligonucleotide; GGG chr11 5379806 5379825 5379822 +
tcccatgagtctggctttct

SEQ ID NO: 26598 - DNA, 20 bp, Artificial Sequence
  Synthetic oligonucleotide; TGG chr11 5379819 5379838 5379835 +
gctttctgggtttctctccc

SEQ ID NO: 26599 - DNA, 20 bp, Artificial Sequence
  Synthetic oligonucleotide; TGG chr11 5379885 5379904 5379901 +
tgtctgctttctgccatgtt

SEQ ID NO: 26600 - DNA, 20 bp, Artificial Sequence
  Synthetic oligonucleotide; CAG chr11 5379891 5379910 5379907 +
ctttctgccatgtttggaac

SEQ ID NO: 26601 - DNA, 20 bp, Artificial Sequence
  Synthetic oligonucleotide; GAG chr11 5379897 5379916 5379913 +
gccatgtttggaaccagcat

SEQ ID NO: 26602 - DNA, 20 bp, Artificial Sequence
  Synthetic oligonucleotide; CAG chr11 5379908 5379927 5379924 +
aaccagcatgagacctttat

SEQ ID NO: 26603 - DNA, 20 bp, Artificial Sequence
  Synthetic oligonucleotide; TGG chr11 5379928 5379947 5379944 +
cagatgcaaccgcccgatct

SEQ ID NO: 26604 - DNA, 20 bp, Artificial Sequence
  Synthetic oligonucleotide; AAG chr11 5379937 5379956 5379953 +
ccgcccgatcttggactttt

SEQ ID NO: 26605 - DNA, 20 bp, Artificial Sequence
  Synthetic oligonucleotide; CAG chr11 5379944 5379963 5379960 +
atcttggacttttaagtcac

SEQ ID NO: 26606 - DNA, 20 bp, Artificial Sequence
  Synthetic oligonucleotide; AAG chr11 5379983 5380002 5379999 +
aaactttaaaaaaaaaaaat

SEQ ID NO: 26607 - DNA, 20 bp, Artificial Sequence
  Synthetic oligonucleotide; CAG chr11 5379991 5380010 5380007 +
aaaaaaaaaaataagctacc

SEQ ID NO: 26608 - DNA, 20 bp, Artificial Sequence
  Synthetic oligonucleotide; CAG chr11 5379997 5380016 5380013 +
aaaaataagctacccagact

SEQ ID NO: 26609 - DNA, 20 bp, Artificial Sequence
  Synthetic oligonucleotide; AGG chr11 5379998 5380017 5380014 +
aaaataagctacccagactc

SEQ ID NO: 26610 - DNA, 20 bp, Artificial Sequence
  Synthetic oligonucleotide; TAG chr11 5380011 5380030 5380027 +
cagactcaggtactctgtta

SEQ ID NO: 26611 - DNA, 20 bp, Artificial Sequence
  Synthetic oligonucleotide; TAG chr11 5380046 5380065 5380062 +
tgcaaaatacactaaaactt

SEQ ID NO: 26612 - DNA, 20 bp, Artificial Sequence
  Synthetic oligonucleotide; TGG chr11 5380056 5380075 5380072 +
actaaaactttagcccaact

SEQ ID NO: 26613 - DNA, 20 bp, Artificial Sequence
  Synthetic oligonucleotide; GAG chr11 5380058 5380077 5380074 +
taaaactttagcccaacttg

SEQ ID NO: 26614 - DNA, 20 bp, Artificial Sequence
  Synthetic oligonucleotide; TGG chr11 5380061 5380080 5380077 +
aactttagcccaacttggag

SEQ ID NO: 26615 - DNA, 20 bp, Artificial Sequence
  Synthetic oligonucleotide; GGG chr11 5380062 5380081 5380078 +
actttagcccaacttggagt

SEQ ID NO: 26616 - DNA, 20 bp, Artificial Sequence
  Synthetic oligonucleotide; GGG chr11 5380063 5380082 5380079 +
ctttagcccaacttggagtg

SEQ ID NO: 26617 - DNA, 20 bp, Artificial Sequence
  Synthetic oligonucleotide; GAG chr11 5380065 5380084 5380081 +
ttagcccaacttggagtggg

SEQ ID NO: 26618 - DNA, 20 bp, Artificial Sequence
  Synthetic oligonucleotide; AAG chr11 5380068 5380087 5380084 +
gcccaacttggagtggggag

SEQ ID NO: 26619 - DNA, 20 bp, Artificial Sequence
  Synthetic oligonucleotide; GAG chr11 5380070 5380089 5380086 +
ccaacttggagtggggagaa

SEQ ID NO: 26620 - DNA, 20 bp, Artificial Sequence
  Synthetic oligonucleotide; TGG chr11 5380074 5380093 5380090 +
cttggagtggggagaagaga

SEQ ID NO: 26621 - DNA, 20 bp, Artificial Sequence
  Synthetic oligonucleotide; AAG chr11 5380085 5380104 5380101 +
gagaagagatggtttcccaa

SEQ ID NO: 26622 - DNA, 20 bp, Artificial Sequence
  Synthetic oligonucleotide; AGG chr11 5380086 5380105 5380102 +
agaagagatggtttcccaaa

SEQ ID NO: 26623 - DNA, 20 bp, Artificial Sequence
  Synthetic oligonucleotide; GGG chr11 5380087 5380106 5380103 +
gaagagatggtttcccaaaa

SEQ ID NO: 26624 - DNA, 20 bp, Artificial Sequence
  Synthetic oligonucleotide; GGG chr11 5380088 5380107 5380104 +
aagagatggtttcccaaaag

SEQ ID NO: 26625 - DNA, 20 bp, Artificial Sequence
  Synthetic oligonucleotide; AAG chr11 5380101 5380120 5380117 +
ccaaaaggggtctctctgaa

SEQ ID NO: 26626 - DNA, 20 bp, Artificial Sequence
  Synthetic oligonucleotide; CGG chr11 5380126 5380145 5380142 +
ttcacaatgaaaatgaaaat

SEQ ID NO: 26627 - DNA, 20 bp, Artificial Sequence
  Synthetic oligonucleotide; AAG chr11 5380148 5380167 5380164 +
gttccctttcataatgactg

SEQ ID NO: 26628 - DNA, 20 bp, Artificial Sequence
  Synthetic oligonucleotide; GAG chr11 5380150 5380169 5380166 +
tccctttcataatgactgaa

SEQ ID NO: 26629 - DNA, 20 bp, Artificial Sequence
  Synthetic oligonucleotide; GAG chr11 5380152 5380171 5380168 +
cctttcataatgactgaaga

SEQ ID NO: 26630 - DNA, 20 bp, Artificial Sequence
  Synthetic oligonucleotide; AGG chr11 5380153 5380172 5380169 +
ctttcataatgactgaagag

SEQ ID NO: 26631 - DNA, 20 bp, Artificial Sequence
  Synthetic oligonucleotide; TAG chr11 5380156 5380175 5380172 +
tcataatgactgaagagagg

SEQ ID NO: 26632 - DNA, 20 bp, Artificial Sequence
  Synthetic oligonucleotide; AGG chr11 5380157 5380176 5380173 +
cataatgactgaagagaggt

SEQ ID NO: 26633 - DNA, 20 bp, Artificial Sequence
  Synthetic oligonucleotide; AAG chr11 5380169 5380188 5380185 +
agagaggtaggatgttacga

SEQ ID NO: 26634 - DNA, 20 bp, Artificial Sequence
  Synthetic oligonucleotide; AAG chr11 5380172 5380191 5380188 +
gaggtaggatgttacgaaag

SEQ ID NO: 26635 - DNA, 20 bp, Artificial Sequence
  Synthetic oligonucleotide; AGG chr11 5380173 5380192 5380189 +
aggtaggatgttacgaaaga

SEQ ID NO: 26636 - DNA, 20 bp, Artificial Sequence
  Synthetic oligonucleotide; AAG chr11 5380185 5380204 5380201 +
acgaaagaaggcgtttctga

SEQ ID NO: 26637 - DNA, 20 bp, Artificial Sequence
  Synthetic oligonucleotide; GAG chr11 5380187 5380206 5380203 +
gaaagaaggcgtttctgaaa

SEQ ID NO: 26638 - DNA, 20 bp, Artificial Sequence
  Synthetic oligonucleotide; TGG chr11 5380196 5380215 5380212 +
cgtttctgaaagagttgctg

SEQ ID NO: 26639 - DNA, 20 bp, Artificial Sequence
  Synthetic oligonucleotide; GGG chr11 5380197 5380216 5380213 +
gtttctgaaagagttgctgt

SEQ ID NO: 26640 - DNA, 20 bp, Artificial Sequence
  Synthetic oligonucleotide; AAG chr11 5380200 5380219 5380216 +
tctgaaagagttgctgtggg

SEQ ID NO: 26641 - DNA, 20 bp, Artificial Sequence
  Synthetic oligonucleotide; TGG chr11 5380206 5380225 5380222 +
agagttgctgtgggaagatg

SEQ ID NO: 26642 - DNA, 20 bp, Artificial Sequence
  Synthetic oligonucleotide; GAG chr11 5380208 5380227 5380224 +
agttgctgtgggaagatgtg

SEQ ID NO: 26643 - DNA, 20 bp, Artificial Sequence
  Synthetic oligonucleotide; CAG chr11 5380229 5380248 5380245 +
agacttctctgtaaaccttc

SEQ ID NO: 26644 - DNA, 20 bp, Artificial Sequence
  Synthetic oligonucleotide; CAG chr11 5380248 5380267 5380264 +
ccagactctctgtgcacaca

SEQ ID NO: 26645 - DNA, 20 bp, Artificial Sequence
  Synthetic oligonucleotide; CAG chr11 5380254 5380273 5380270 +
tctctgtgcacacacagatg

SEQ ID NO: 26646 - DNA, 20 bp, Artificial Sequence
  Synthetic oligonucleotide; AGG chr11 5380255 5380274 5380271 +
ctctgtgcacacacagatgc

SEQ ID NO: 26647 - DNA, 20 bp, Artificial Sequence
  Synthetic oligonucleotide; CAG chr11 5380262 5380281 5380278 +
cacacacagatgcaggtgtc

SEQ ID NO: 26648 - DNA, 20 bp, Artificial Sequence
  Synthetic oligonucleotide; AGG chr11 5380263 5380282 5380279 +
acacacagatgcaggtgtcc

SEQ ID NO: 26649 - DNA, 20 bp, Artificial Sequence
  Synthetic oligonucleotide; GGG chr11 5380264 5380283 5380280 +
cacacagatgcaggtgtcca

SEQ ID NO: 26650 - DNA, 20 bp, Artificial Sequence
  Synthetic oligonucleotide; GAG chr11 5380266 5380285 5380282 +
cacagatgcaggtgtccagg

SEQ ID NO: 26651 - DNA, 20 bp, Artificial Sequence
  Synthetic oligonucleotide; AGG chr11 5380267 5380286 5380283 +
acagatgcaggtgtccaggg

SEQ ID NO: 26652 - DNA, 20 bp, Artificial Sequence
  Synthetic oligonucleotide; CAG chr11 5380270 5380289 5380286 +
gatgcaggtgtccagggagg

SEQ ID NO: 26653 - DNA, 20 bp, Artificial Sequence
  Synthetic oligonucleotide; AGG chr11 5380271 5380290 5380287 +
atgcaggtgtccagggaggc

SEQ ID NO: 26654 - DNA, 20 bp, Artificial Sequence
  Synthetic oligonucleotide; GGG chr11 5380272 5380291 5380288 +
tgcaggtgtccagggaggca

SEQ ID NO: 26655 - DNA, 20 bp, Artificial Sequence
  Synthetic oligonucleotide; GGG chr11 5380273 5380292 5380289 +
gcaggtgtccagggaggcag

SEQ ID NO: 26656 - DNA, 20 bp, Artificial Sequence
  Synthetic oligonucleotide; GGG chr11 5380274 5380293 5380290 +
caggtgtccagggaggcagg

SEQ ID NO: 26657 - DNA, 20 bp, Artificial Sequence
  Synthetic oligonucleotide; TGG chr11 5380278 5380297 5380294 +
tgtccagggaggcaggggga

SEQ ID NO: 26658 - DNA, 20 bp, Artificial Sequence
  Synthetic oligonucleotide; TAG chr11 5380310 5380329 5380326 +
attgcaacatgaaaatttct

SEQ ID NO: 26659 - DNA, 20 bp, Artificial Sequence
  Synthetic oligonucleotide; AGG chr11 5380311 5380330 5380327 +
ttgcaacatgaaaatttctt

SEQ ID NO: 26660 - DNA, 20 bp, Artificial Sequence
  Synthetic oligonucleotide; GGG chr11 5380312 5380331 5380328 +
tgcaacatgaaaatttctta

SEQ ID NO: 26661 - DNA, 20 bp, Artificial Sequence
  Synthetic oligonucleotide; GGG chr11 5380313 5380332 5380329 +
gcaacatgaaaatttcttag

SEQ ID NO: 26662 - DNA, 20 bp, Artificial Sequence
  Synthetic oligonucleotide; TGG chr11 5380319 5380338 5380335 +
tgaaaatttcttaggggctg

SEQ ID NO: 26663 - DNA, 20 bp, Artificial Sequence
  Synthetic oligonucleotide; CAG chr11 5380324 5380343 5380340 +
atttcttaggggctgtggac

SEQ ID NO: 26664 - DNA, 20 bp, Artificial Sequence
  Synthetic oligonucleotide; CAG chr11 5380329 5380348 5380345 +
ttaggggctgtggaccagtc

SEQ ID NO: 26665 - DNA, 20 bp, Artificial Sequence
  Synthetic oligonucleotide; AAG chr11 5380332 5380351 5380348 +
ggggctgtggaccagtccag

SEQ ID NO: 26666 - DNA, 20 bp, Artificial Sequence
  Synthetic oligonucleotide; TGG chr11 5380342 5380361 5380358 +
accagtccagaagacccttt

SEQ ID NO: 26667 - DNA, 20 bp, Artificial Sequence
  Synthetic oligonucleotide; TGG chr11 5380360 5380379 5380376 +
tttggcaatcctaacttctg

SEQ ID NO: 26668 - DNA, 20 bp, Artificial Sequence
  Synthetic oligonucleotide; GGG chr11 5380361 5380380 5380377 +
ttggcaatcctaacttctgt

SEQ ID NO: 26669 - DNA, 20 bp, Artificial Sequence
  Synthetic oligonucleotide; CAG chr11 5380370 5380389 5380386 +
ctaacttctgtgggtctctc

SEQ ID NO: 26670 - DNA, 20 bp, Artificial Sequence
  Synthetic oligonucleotide; AAG chr11 5380378 5380397 5380394 +
tgtgggtctctccagtctga

SEQ ID NO: 26671 - DNA, 20 bp, Artificial Sequence
  Synthetic oligonucleotide; TGG chr11 5380407 5380426 5380423 +
atcgatctcacaccacaaaa

SEQ ID NO: 26672 - DNA, 20 bp, Artificial Sequence
  Synthetic oligonucleotide; GAG chr11 5380409 5380428 5380425 +
cgatctcacaccacaaaatg

SEQ ID NO: 26673 - DNA, 20 bp, Artificial Sequence
  Synthetic oligonucleotide; TGG chr11 5380418 5380437 5380434 +
accacaaaatggagttcttc

SEQ ID NO: 26674 - DNA, 20 bp, Artificial Sequence
  Synthetic oligonucleotide; GGG chr11 5380419 5380438 5380435 +
ccacaaaatggagttcttct

SEQ ID NO: 26675 - DNA, 20 bp, Artificial Sequence
  Synthetic oligonucleotide; AAG chr11 5380422 5380441 5380438 +
caaaatggagttcttctggg

SEQ ID NO: 26676 - DNA, 20 bp, Artificial Sequence
  Synthetic oligonucleotide; AGG chr11 5380423 5380442 5380439 +
aaaatggagttcttctggga

SEQ ID NO: 26677 - DNA, 20 bp, Artificial Sequence
  Synthetic oligonucleotide; CAG chr11 5380437 5380456 5380453 +
ctgggaaggacttgttctaa

SEQ ID NO: 26678 - DNA, 20 bp, Artificial Sequence
  Synthetic oligonucleotide; AGG chr11 5380438 5380457 5380454 +
tgggaaggacttgttctaac

SEQ ID NO: 26679 - DNA, 20 bp, Artificial Sequence
  Synthetic oligonucleotide; GAG chr11 5380444 5380463 5380460 +
ggacttgttctaacaggcct

SEQ ID NO: 26680 - DNA, 20 bp, Artificial Sequence
  Synthetic oligonucleotide; GAG chr11 5380446 5380465 5380462 +
acttgttctaacaggcctga

SEQ ID NO: 26681 - DNA, 20 bp, Artificial Sequence
  Synthetic oligonucleotide; GAG chr11 5380450 5380469 5380466 +
gttctaacaggcctgagagt

SEQ ID NO: 26682 - DNA, 20 bp, Artificial Sequence
  Synthetic oligonucleotide; AGG chr11 5380451 5380470 5380467 +
ttctaacaggcctgagagtg

SEQ ID NO: 26683 - DNA, 20 bp, Artificial Sequence
  Synthetic oligonucleotide; TGG chr11 5380462 5380481 5380478 +
ctgagagtgaggtgaccttg

SEQ ID NO: 26684 - DNA, 20 bp, Artificial Sequence
  Synthetic oligonucleotide; CAG chr11 5380478 5380497 5380494 +
cttgtggccattttctgtga

SEQ ID NO: 26685 - DNA, 20 bp, Artificial Sequence
  Synthetic oligonucleotide; GAG chr11 5380480 5380499 5380496 +
tgtggccattttctgtgaca

SEQ ID NO: 26686 - DNA, 20 bp, Artificial Sequence
  Synthetic oligonucleotide; AAG chr11 5380492 5380511 5380508 +
ctgtgacagagacacctaaa

SEQ ID NO: 26687 - DNA, 20 bp, Artificial Sequence
  Synthetic oligonucleotide; GAG chr11 5380494 5380513 5380510 +
gtgacagagacacctaaaaa

SEQ ID NO: 26688 - DNA, 20 bp, Artificial Sequence
  Synthetic oligonucleotide; GAG chr11 5380505 5380524 5380521 +
acctaaaaagagtctgttgt

SEQ ID NO: 26689 - DNA, 20 bp, Artificial Sequence
  Synthetic oligonucleotide; TGG chr11 5380510 5380529 5380526 +
aaaagagtctgttgtgagtc

SEQ ID NO: 26690 - DNA, 20 bp, Artificial Sequence
  Synthetic oligonucleotide; GAG chr11 5380512 5380531 5380528 +
aagagtctgttgtgagtctg

SEQ ID NO: 26691 - DNA, 20 bp, Artificial Sequence
  Synthetic oligonucleotide; GAG chr11 5380520 5380539 5380536 +
gttgtgagtctggagacatt

SEQ ID NO: 26692 - DNA, 20 bp, Artificial Sequence
  Synthetic oligonucleotide; GAG chr11 5380531 5380550 5380547 +
ggagacattgagaaccctgt

SEQ ID NO: 26693 - DNA, 20 bp, Artificial Sequence
  Synthetic oligonucleotide; AAG chr11 5380535 5380554 5380551 +
acattgagaaccctgtgagt

SEQ ID NO: 26694 - DNA, 20 bp, Artificial Sequence
  Synthetic oligonucleotide; AGG chr11 5380536 5380555 5380552 +
cattgagaaccctgtgagta

SEQ ID NO: 26695 - DNA, 20 bp, Artificial Sequence
  Synthetic oligonucleotide; TAG chr11 5380547 5380566 5380563 +
ctgtgagtaaggattttatt

SEQ ID NO: 26696 - DNA, 20 bp, Artificial Sequence
  Synthetic oligonucleotide; AGG chr11 5380548 5380567 5380564 +
tgtgagtaaggattttattt

SEQ ID NO: 26697 - DNA, 20 bp, Artificial Sequence
  Synthetic oligonucleotide; TGG chr11 5380559 5380578 5380575 +
attttatttaggtctgtttc

SEQ ID NO: 26698 - DNA, 20 bp, Artificial Sequence
  Synthetic oligonucleotide; CAG chr11 5380563 5380582 5380579 +
tatttaggtctgtttctggt

SEQ ID NO: 26699 - DNA, 20 bp, Artificial Sequence
  Synthetic oligonucleotide; GAG chr11 5380565 5380584 5380581 +
tttaggtctgtttctggtca

SEQ ID NO: 26700 - DNA, 20 bp, Artificial Sequence
  Synthetic oligonucleotide; TGG chr11 5380568 5380587 5380584 +
aggtctgtttctggtcagag

SEQ ID NO: 26701 - DNA, 20 bp, Artificial Sequence
  Synthetic oligonucleotide; GGG chr11 5380569 5380588 5380585 +
ggtctgtttctggtcagagt

SEQ ID NO: 26702 - DNA, 20 bp, Artificial Sequence
  Synthetic oligonucleotide; GGG chr11 5380570 5380589 5380586 +
gtctgtttctggtcagagtg

SEQ ID NO: 26703 - DNA, 20 bp, Artificial Sequence
  Synthetic oligonucleotide; AAG chr11 5380577 5380596 5380593 +
tctggtcagagtggggattt

SEQ ID NO: 26704 - DNA, 20 bp, Artificial Sequence
  Synthetic oligonucleotide; AGG chr11 5380578 5380597 5380594 +
ctggtcagagtggggattta

SEQ ID NO: 26705 - DNA, 20 bp, Artificial Sequence
  Synthetic oligonucleotide; TGG chr11 5380583 5380602 5380599 +
cagagtggggatttaaggct

SEQ ID NO: 26706 - DNA, 20 bp, Artificial Sequence
  Synthetic oligonucleotide; AAG chr11 5380597 5380616 5380613 +
aaggcttggtcaatatgatt

SEQ ID NO: 26707 - DNA, 20 bp, Artificial Sequence
  Synthetic oligonucleotide; AAG chr11 5380604 5380623 5380620 +
ggtcaatatgattaagacta

SEQ ID NO: 26708 - DNA, 20 bp, Artificial Sequence
  Synthetic oligonucleotide; AGG chr11 5380605 5380624 5380621 +
gtcaatatgattaagactaa

SEQ ID NO: 26709 - DNA, 20 bp, Artificial Sequence
  Synthetic oligonucleotide; TAG chr11 5380617 5380636 5380633 +
aagactaaaggccacacaca

SEQ ID NO: 26710 - DNA, 20 bp, Artificial Sequence
  Synthetic oligonucleotide; GAG chr11 5380628 5380647 5380644 +
ccacacacatagatttgtgt

SEQ ID NO: 26711 - DNA, 20 bp, Artificial Sequence
  Synthetic oligonucleotide; AAG chr11 5380655 5380674 5380671 +
ccatctgtaaaaatctgaaa

SEQ ID NO: 26712 - DNA, 20 bp, Artificial Sequence
  Synthetic oligonucleotide; AAG chr11 5380660 5380679 5380676 +
tgtaaaaatctgaaaaagct

SEQ ID NO: 26713 - DNA, 20 bp, Artificial Sequence
  Synthetic oligonucleotide; TAG chr11 5380688 5380707 5380704 +
ctatctctctccatcaattt

SEQ ID NO: 26714 - DNA, 20 bp, Artificial Sequence
  Synthetic oligonucleotide; AAG chr11 5380706 5380725 5380722 +
tttagtttttatgtgtttgt

SEQ ID NO: 26715 - DNA, 20 bp, Artificial Sequence
  Synthetic oligonucleotide; TAG chr11 5380712 5380731 5380728 +
ttttatgtgtttgtaagatg

SEQ ID NO: 26716 - DNA, 20 bp, Artificial Sequence
  Synthetic oligonucleotide; GAG chr11 5380734 5380753 5380750 +
gatatgtctattttgtgcat

SEQ ID NO: 26717 - DNA, 20 bp, Artificial Sequence
  Synthetic oligonucleotide; GAG chr11 5380736 5380755 5380752 +
tatgtctattttgtgcatga

SEQ ID NO: 26718 - DNA, 20 bp, Artificial Sequence
  Synthetic oligonucleotide; GAG chr11 5380738 5380757 5380754 +
tgtctattttgtgcatgaga

SEQ ID NO: 26719 - DNA, 20 bp, Artificial Sequence
  Synthetic oligonucleotide; GAG chr11 5380740 5380759 5380756 +
tctattttgtgcatgagaga

SEQ ID NO: 26720 - DNA, 20 bp, Artificial Sequence
  Synthetic oligonucleotide; AGG chr11 5380741 5380760 5380757 +
ctattttgtgcatgagagag

SEQ ID NO: 26721 - DNA, 20 bp, Artificial Sequence
  Synthetic oligonucleotide; AAG chr11 5380744 5380763 5380760 +
ttttgtgcatgagagagagg

SEQ ID NO: 26722 - DNA, 20 bp, Artificial Sequence
  Synthetic oligonucleotide; AAG chr11 5380757 5380776 5380773 +
agagaggaagatcatcctca

SEQ ID NO: 26723 - DNA, 20 bp, Artificial Sequence
  Synthetic oligonucleotide; AGG chr11 5380758 5380777 5380774 +
gagaggaagatcatcctcaa

SEQ ID NO: 26724 - DNA, 20 bp, Artificial Sequence
  Synthetic oligonucleotide; AAG chr11 5380761 5380780 5380777 +
aggaagatcatcctcaaagg

SEQ ID NO: 26725 - DNA, 20 bp, Artificial Sequence
  Synthetic oligonucleotide; TGG chr11 5380771 5380790 5380787 +
tcctcaaaggaagaatgaac

SEQ ID NO: 26726 - DNA, 20 bp, Artificial Sequence
  Synthetic oligonucleotide; TGG chr11 5380775 5380794 5380791 +
caaaggaagaatgaactggt

SEQ ID NO: 26727 - DNA, 20 bp, Artificial Sequence
  Synthetic oligonucleotide; CAG chr11 5380778 5380797 5380794 +
aggaagaatgaactggttgg

SEQ ID NO: 26728 - DNA, 20 bp, Artificial Sequence
  Synthetic oligonucleotide; CAG chr11 5380785 5380804 5380801 +
atgaactggttggcagcttt

SEQ ID NO: 26729 - DNA, 20 bp, Artificial Sequence
  Synthetic oligonucleotide; TAG chr11 5380793 5380812 5380809 +
gttggcagctttcagctgtg

SEQ ID NO: 26730 - DNA, 20 bp, Artificial Sequence
  Synthetic oligonucleotide; TGG chr11 5380796 5380815 5380812 +
ggcagctttcagctgtgtag

SEQ ID NO: 26731 - DNA, 20 bp, Artificial Sequence
  Synthetic oligonucleotide; GGG chr11 5380797 5380816 5380813 +
gcagctttcagctgtgtagt

SEQ ID NO: 26732 - DNA, 20 bp, Artificial Sequence
  Synthetic oligonucleotide; GAG chr11 5380804 5380823 5380820 +
tcagctgtgtagtgggtatt

SEQ ID NO: 26733 - DNA, 20 bp, Artificial Sequence
  Synthetic oligonucleotide; AGG chr11 5380805 5380824 5380821 +
cagctgtgtagtgggtattg

SEQ ID NO: 26734 - DNA, 20 bp, Artificial Sequence
  Synthetic oligonucleotide; CGG chr11 5380811 5380830 5380827 +
tgtagtgggtattgaggaca

SEQ ID NO: 26735 - DNA, 20 bp, Artificial Sequence
  Synthetic oligonucleotide; GGG chr11 5380812 5380831 5380828 +
gtagtgggtattgaggacac

SEQ ID NO: 26736 - DNA, 20 bp, Artificial Sequence
  Synthetic oligonucleotide; AAG chr11 5380815 5380834 5380831 +
gtgggtattgaggacacggg

SEQ ID NO: 26737 - DNA, 20 bp, Artificial Sequence
  Synthetic oligonucleotide; AGG chr11 5380816 5380835 5380832 +
tgggtattgaggacacggga

SEQ ID NO: 26738 - DNA, 20 bp, Artificial Sequence
  Synthetic oligonucleotide; TGG chr11 5380819 5380838 5380835 +
gtattgaggacacgggaagg

SEQ ID NO: 26739 - DNA, 20 bp, Artificial Sequence
  Synthetic oligonucleotide; TGG chr11 5380825 5380844 5380841 +
aggacacgggaaggtggtgc

SEQ ID NO: 26740 - DNA, 20 bp, Artificial Sequence
  Synthetic oligonucleotide; AAG chr11 5380828 5380847 5380844 +
acacgggaaggtggtgctgg

SEQ ID NO: 26741 - DNA, 20 bp, Artificial Sequence
  Synthetic oligonucleotide; AAG chr11 5380833 5380852 5380849 +
ggaaggtggtgctggaagaa

SEQ ID NO: 26742 - DNA, 20 bp, Artificial Sequence
  Synthetic oligonucleotide; TGG chr11 5380854 5380873 5380870 +
agccacattttcttgtgccc

SEQ ID NO: 26743 - DNA, 20 bp, Artificial Sequence
  Synthetic oligonucleotide; GGG chr11 5380855 5380874 5380871 +
gccacattttcttgtgccct

SEQ ID NO: 26744 - DNA, 20 bp, Artificial Sequence
  Synthetic oligonucleotide; GGG chr11 5380856 5380875 5380872 +
ccacattttcttgtgccctg

SEQ ID NO: 26745 - DNA, 20 bp, Artificial Sequence
  Synthetic oligonucleotide; TAG chr11 5380860 5380879 5380876 +
attttcttgtgccctgggga

SEQ ID NO: 26746 - DNA, 20 bp, Artificial Sequence
  Synthetic oligonucleotide; TAG chr11 5380863 5380882 5380879 +
ttcttgtgccctggggatag

SEQ ID NO: 26747 - DNA, 20 bp, Artificial Sequence
  Synthetic oligonucleotide; AGG chr11 5380864 5380883 5380880 +
tcttgtgccctggggatagt

SEQ ID NO: 26748 - DNA, 20 bp, Artificial Sequence
  Synthetic oligonucleotide; GGG chr11 5380865 5380884 5380881 +
cttgtgccctggggatagta

SEQ ID NO: 26749 - DNA, 20 bp, Artificial Sequence
  Synthetic oligonucleotide; TGG chr11 5380871 5380890 5380887 +
ccctggggatagtagggcct

SEQ ID NO: 26750 - DNA, 20 bp, Artificial Sequence
  Synthetic oligonucleotide; TGG chr11 5380877 5380896 5380893 +
ggatagtagggccttggtgc

SEQ ID NO: 26751 - DNA, 20 bp, Artificial Sequence
  Synthetic oligonucleotide; CAG chr11 5380881 5380900 5380897 +
agtagggccttggtgctggt

SEQ ID NO: 26752 - DNA, 20 bp, Artificial Sequence
  Synthetic oligonucleotide; AAG chr11 5380889 5380908 5380905 +
cttggtgctggtcagaattt

SEQ ID NO: 26753 - DNA, 20 bp, Artificial Sequence
  Synthetic oligonucleotide; TGG chr11 5380900 5380919 5380916 +
tcagaatttaagcctatcct

SEQ ID NO: 26754 - DNA, 20 bp, Artificial Sequence
  Synthetic oligonucleotide; GGG chr11 5380901 5380920 5380917 +
cagaatttaagcctatcctt

SEQ ID NO: 26755 - DNA, 20 bp, Artificial Sequence
  Synthetic oligonucleotide; TGG chr11 5380918 5380937 5380934 +
cttgggctgaatgctccccc

SEQ ID NO: 26756 - DNA, 20 bp, Artificial Sequence
  Synthetic oligonucleotide; TGG chr11 5380921 5380940 5380937 +
gggctgaatgctccccctgg

SEQ ID NO: 26757 - DNA, 20 bp, Artificial Sequence
  Synthetic oligonucleotide; TGG chr11 5380930 5380949 5380946 +
gctccccctggtggctacat

SEQ ID NO: 26758 - DNA, 20 bp, Artificial Sequence
  Synthetic oligonucleotide; CAG chr11 5380940 5380959 5380956 +
gtggctacattggaaaacca

SEQ ID NO: 26759 - DNA, 20 bp, Artificial Sequence
  Synthetic oligonucleotide; CAG chr11 5380951 5380970 5380967 +
ggaaaaccacagcatgtgta

SEQ ID NO: 26760 - DNA, 20 bp, Artificial Sequence
  Synthetic oligonucleotide; TGG chr11 5380958 5380977 5380974 +
cacagcatgtgtacagacct

SEQ ID NO: 26761 - DNA, 20 bp, Artificial Sequence
  Synthetic oligonucleotide; GGG chr11 5380959 5380978 5380975 +
acagcatgtgtacagacctt

SEQ ID NO: 26762 - DNA, 20 bp, Artificial Sequence
  Synthetic oligonucleotide; GGG chr11 5380960 5380979 5380976 +
cagcatgtgtacagaccttg

SEQ ID NO: 26763 - DNA, 20 bp, Artificial Sequence
  Synthetic oligonucleotide; CAG chr11 5380966 5380985 5380982 +
gtgtacagaccttggggatt

SEQ ID NO: 26764 - DNA, 20 bp, Artificial Sequence
  Synthetic oligonucleotide; AAG chr11 5380977 5380996 5380993 +
ttggggattcagttctcctg

SEQ ID NO: 26765 - DNA, 20 bp, Artificial Sequence
  Synthetic oligonucleotide; AGG chr11 5380978 5380997 5380994 +
tggggattcagttctcctga

SEQ ID NO: 26766 - DNA, 20 bp, Artificial Sequence
  Synthetic oligonucleotide; AAG chr11 5380997 5381016 5381013 +
aaggaatctcctacttcacc

SEQ ID NO: 26767 - DNA, 20 bp, Artificial Sequence
  Synthetic oligonucleotide; TGG chr11 5381002 5381021 5381018 +
atctcctacttcaccaagcc

SEQ ID NO: 26768 - DNA, 20 bp, Artificial Sequence
  Synthetic oligonucleotide; CAG chr11 5381007 5381026 5381023 +
ctacttcaccaagcctggct

SEQ ID NO: 26769 - DNA, 20 bp, Artificial Sequence
  Synthetic oligonucleotide; TGG chr11 5381010 5381029 5381026 +
cttcaccaagcctggctcag

SEQ ID NO: 26770 - DNA, 20 bp, Artificial Sequence
  Synthetic oligonucleotide; GGG chr11 5381011 5381030 5381027 +
ttcaccaagcctggctcagt

SEQ ID NO: 26771 - DNA, 20 bp, Artificial Sequence
  Synthetic oligonucleotide; TGG chr11 5381015 5381034 5381031 +
ccaagcctggctcagtgggc

SEQ ID NO: 26772 - DNA, 20 bp, Artificial Sequence
  Synthetic oligonucleotide; TAG chr11 5381019 5381038 5381035 +
gcctggctcagtgggctggc

SEQ ID NO: 26773 - DNA, 20 bp, Artificial Sequence
  Synthetic oligonucleotide; AGG chr11 5381020 5381039 5381036 +
cctggctcagtgggctggct

SEQ ID NO: 26774 - DNA, 20 bp, Artificial Sequence
  Synthetic oligonucleotide; TGG chr11 5381032 5381051 5381048 +
ggctggctaggtatcaattc

SEQ ID NO: 26775 - DNA, 20 bp, Artificial Sequence
  Synthetic oligonucleotide; TAG chr11 5381036 5381055 5381052 +
ggctaggtatcaattctgga

SEQ ID NO: 26776 - DNA, 20 bp, Artificial Sequence
  Synthetic oligonucleotide; GAG chr11 5381038 5381057 5381054 +
ctaggtatcaattctggata

SEQ ID NO: 26777 - DNA, 20 bp, Artificial Sequence
  Synthetic oligonucleotide; AGG chr11 5381039 5381058 5381055 +
taggtatcaattctggatag

SEQ ID NO: 26778 - DNA, 20 bp, Artificial Sequence
  Synthetic oligonucleotide; TGG chr11 5381063 5381082 5381079 +
tccttaaataaaacttatac

SEQ ID NO: 26779 - DNA, 20 bp, Artificial Sequence
  Synthetic oligonucleotide; AAG chr11 5381074 5381093 5381090 +
aacttatactggccccttga

SEQ ID NO: 26780 - DNA, 20 bp, Artificial Sequence
  Synthetic oligonucleotide; CAG chr11 5381078 5381097 5381094 +
tatactggccccttgaaagc

SEQ ID NO: 26781 - DNA, 20 bp, Artificial Sequence
  Synthetic oligonucleotide; AGG chr11 5381079 5381098 5381095 +
atactggccccttgaaagcc

SEQ ID NO: 26782 - DNA, 20 bp, Artificial Sequence
  Synthetic oligonucleotide; TAG chr11 5381209 5381228 5381225 +
accatttgcacattaacaaa

SEQ ID NO: 26783 - DNA, 20 bp, Artificial Sequence
  Synthetic oligonucleotide; AGG chr11 5381210 5381229 5381226 +
ccatttgcacattaacaaat

SEQ ID NO: 26784 - DNA, 20 bp, Artificial Sequence
  Synthetic oligonucleotide; CAG chr11 5381223 5381242 5381239 +
aacaaataggtacactgtta

SEQ ID NO: 26785 - DNA, 20 bp, Artificial Sequence
  Synthetic oligonucleotide; TAG chr11 5381242 5381261 5381258 +
acagtgacacttttcacttt

SEQ ID NO: 26786 - DNA, 20 bp, Artificial Sequence
  Synthetic oligonucleotide; TGG chr11 5381248 5381267 5381264 +
acacttttcacttttagtaa

SEQ ID NO: 26787 - DNA, 20 bp, Artificial Sequence
  Synthetic oligonucleotide; TAG chr11 5381254 5381273 5381270 +
ttcacttttagtaatggatt

SEQ ID NO: 26788 - DNA, 20 bp, Artificial Sequence
  Synthetic oligonucleotide; AAG chr11 5381286 5381305 5381302 +
taatgaattctaatacctta

SEQ ID NO: 26789 - DNA, 20 bp, Artificial Sequence
  Synthetic oligonucleotide; AGG chr11 5381287 5381306 5381303 +
aatgaattctaataccttaa

SEQ ID NO: 26790 - DNA, 20 bp, Artificial Sequence
  Synthetic oligonucleotide; AAG chr11 5381292 5381311 5381308 +
attctaataccttaaaggtt

SEQ ID NO: 26791 - DNA, 20 bp, Artificial Sequence
  Synthetic oligonucleotide; AGG chr11 5381293 5381312 5381309 +
ttctaataccttaaaggtta

SEQ ID NO: 26792 - DNA, 20 bp, Artificial Sequence
  Synthetic oligonucleotide; CAG chr11 5381388 5381407 5381404 +
aatattcgcatgattaccca

SEQ ID NO: 26793 - DNA, 20 bp, Artificial Sequence
  Synthetic oligonucleotide; TAG chr11 5381394 5381413 5381410 +
cgcatgattacccacagtga

SEQ ID NO: 26794 - DNA, 20 bp, Artificial Sequence
  Synthetic oligonucleotide; GAG chr11 5381396 5381415 5381412 +
catgattacccacagtgata

SEQ ID NO: 26795 - DNA, 20 bp, Artificial Sequence
  Synthetic oligonucleotide; TAG chr11 5381400 5381419 5381416 +
attacccacagtgatagaga

SEQ ID NO: 26796 - DNA, 20 bp, Artificial Sequence
  Synthetic oligonucleotide; AGG chr11 5381401 5381420 5381417 +
ttacccacagtgatagagat

SEQ ID NO: 26797 - DNA, 20 bp, Artificial Sequence
  Synthetic oligonucleotide; GAG chr11 5381407 5381426 5381423 +
acagtgatagagataggtcc

SEQ ID NO: 26798 - DNA, 20 bp, Artificial Sequence
  Synthetic oligonucleotide; AGG chr11 5381408 5381427 5381424 +
cagtgatagagataggtccg

SEQ ID NO: 26799 - DNA, 20 bp, Artificial Sequence
  Synthetic oligonucleotide; TGG chr11 5381445 5381464 5381461 +
tgtccccatcatcctcctct

SEQ ID NO: 26800 - DNA, 20 bp, Artificial Sequence
  Synthetic oligonucleotide; CAG chr11 5381452 5381471 5381468 +
atcatcctcctcttggcctc

SEQ ID NO: 26801 - DNA, 20 bp, Artificial Sequence
  Synthetic oligonucleotide; AGG chr11 5381453 5381472 5381469 +
tcatcctcctcttggcctcc

SEQ ID NO: 26802 - DNA, 20 bp, Artificial Sequence
  Synthetic oligonucleotide; CAG chr11 5381459 5381478 5381475 +
tcctcttggcctccaggctt

SEQ ID NO: 26803 - DNA, 20 bp, Artificial Sequence
  Synthetic oligonucleotide; TAG chr11 5381480 5381499 5381496 +
agaaactacctctgccttcc

SEQ ID NO: 26804 - DNA, 20 bp, Artificial Sequence
  Synthetic oligonucleotide; TGG chr11 5381485 5381504 5381501 +
ctacctctgccttcctagcc

SEQ ID NO: 26805 - DNA, 20 bp, Artificial Sequence
  Synthetic oligonucleotide; GGG chr11 5381486 5381505 5381502 +
tacctctgccttcctagcct

SEQ ID NO: 26806 - DNA, 20 bp, Artificial Sequence
  Synthetic oligonucleotide; TAG chr11 5381490 5381509 5381506 +
tctgccttcctagcctgggc

SEQ ID NO: 26807 - DNA, 20 bp, Artificial Sequence
  Synthetic oligonucleotide; TGG chr11 5381504 5381523 5381520 +
ctgggctagtgaccctattt

SEQ ID NO: 26808 - DNA, 20 bp, Artificial Sequence
  Synthetic oligonucleotide; GAG chr11 5381544 5381563 5381560 +
ctaacatctttactcaatgt

SEQ ID NO: 26809 - DNA, 20 bp, Artificial Sequence
  Synthetic oligonucleotide; AAG chr11 5381554 5381573 5381570 +
tactcaatgtgagcttcata

SEQ ID NO: 26810 - DNA, 20 bp, Artificial Sequence
  Synthetic oligonucleotide; AGG chr11 5381555 5381574 5381571 +
actcaatgtgagcttcataa

SEQ ID NO: 26811 - DNA, 20 bp, Artificial Sequence
  Synthetic oligonucleotide; AAG chr11 5381559 5381578 5381575 +
aatgtgagcttcataaaggc

SEQ ID NO: 26812 - DNA, 20 bp, Artificial Sequence
  Synthetic oligonucleotide; AAG chr11 5381590 5381609 5381606 +
atgttaatctgtctatcttc

SEQ ID NO: 26813 - DNA, 20 bp, Artificial Sequence
  Synthetic oligonucleotide; CAG chr11 5381601 5381620 5381617 +
tctatcttcaagttcttgat

SEQ ID NO: 26814 - DNA, 20 bp, Artificial Sequence
  Synthetic oligonucleotide; GAG chr11 5381603 5381622 5381619 +
tatcttcaagttcttgatca

SEQ ID NO: 26815 - DNA, 20 bp, Artificial Sequence
  Synthetic oligonucleotide; CAG chr11 5381613 5381632 5381629 +
ttcttgatcagagtttctca

SEQ ID NO: 26816 - DNA, 20 bp, Artificial Sequence
  Synthetic oligonucleotide; AGG chr11 5381614 5381633 5381630 +
tcttgatcagagtttctcac

SEQ ID NO: 26817 - DNA, 20 bp, Artificial Sequence
  Synthetic oligonucleotide; GAG chr11 5381648 5381667 5381664 +
gcacgtcaatgaaaattgat

SEQ ID NO: 26818 - DNA, 20 bp, Artificial Sequence
  Synthetic oligonucleotide; CAG chr11 5381668 5381687 5381684 +
gagaatgtttaatgtaattt

SEQ ID NO: 26819 - DNA, 20 bp, Artificial Sequence
  Synthetic oligonucleotide; AAG chr11 5381681 5381700 5381697 +
gtaatttcagtcacacttca

SEQ ID NO: 26820 - DNA, 20 bp, Artificial Sequence
  Synthetic oligonucleotide; GAG chr11 5381683 5381702 5381699 +
aatttcagtcacacttcaaa

SEQ ID NO: 26821 - DNA, 20 bp, Artificial Sequence
  Synthetic oligonucleotide; AGG chr11 5381684 5381703 5381700 +
atttcagtcacacttcaaag

SEQ ID NO: 26822 - DNA, 20 bp, Artificial Sequence
  Synthetic oligonucleotide; AAG chr11 5381717 5381736 5381733 +
gatatgataaaacaaatcta

SEQ ID NO: 26823 - DNA, 20 bp, Artificial Sequence
  Synthetic oligonucleotide; AGG chr11 5381718 5381737 5381734 +
atatgataaaacaaatctaa

SEQ ID NO: 26824 - DNA, 20 bp, Artificial Sequence
  Synthetic oligonucleotide; TAG chr11 5381726 5381745 5381742 +
aaacaaatctaaaggtcatt

SEQ ID NO: 26825 - DNA, 20 bp, Artificial Sequence
  Synthetic oligonucleotide; GAG chr11 5381728 5381747 5381744 +
acaaatctaaaggtcattta

SEQ ID NO: 26826 - DNA, 20 bp, Artificial Sequence
  Synthetic oligonucleotide; AAG chr11 5381736 5381755 5381752 +
aaaggtcatttagagcaata

SEQ ID NO: 26827 - DNA, 20 bp, Artificial Sequence
  Synthetic oligonucleotide; GAG chr11 5381752 5381771 5381768 +
aataaagaatcaaaaatgct

SEQ ID NO: 26828 - DNA, 20 bp, Artificial Sequence
  Synthetic oligonucleotide; TGG chr11 5381765 5381784 5381781 +
aaatgctgagttctttcatt

SEQ ID NO: 26829 - DNA, 20 bp, Artificial Sequence
  Synthetic oligonucleotide; TGG chr11 5381789 5381808 5381805 +
tttcaaataaatctattgct

SEQ ID NO: 26830 - DNA, 20 bp, Artificial Sequence
  Synthetic oligonucleotide; TGG chr11 5381796 5381815 5381812 +
taaatctattgcttggaaac

SEQ ID NO: 26831 - DNA, 20 bp, Artificial Sequence
  Synthetic oligonucleotide; CAG chr11 5381817 5381836 5381833 +
ggtccttcaattatataatt

SEQ ID NO: 26832 - DNA, 20 bp, Artificial Sequence
  Synthetic oligonucleotide; GAG chr11 5381819 5381838 5381835 +
tccttcaattatataattca

SEQ ID NO: 26833 - DNA, 20 bp, Artificial Sequence
  Synthetic oligonucleotide; TAG chr11 5381825 5381844 5381841 +
aattatataattcagagaaa

SEQ ID NO: 26834 - DNA, 20 bp, Artificial Sequence
  Synthetic oligonucleotide; AAG chr11 5381834 5381853 5381850 +
attcagagaaatagaatata

SEQ ID NO: 26835 - DNA, 20 bp, Artificial Sequence
  Synthetic oligonucleotide; CAG chr11 5381845 5381864 5381861 +
tagaatataaagctattata

SEQ ID NO: 26836 - DNA, 20 bp, Artificial Sequence
  Synthetic oligonucleotide; TAG chr11 5381852 5381871 5381868 +
taaagctattatacagatgt

SEQ ID NO: 26837 - DNA, 20 bp, Artificial Sequence
  Synthetic oligonucleotide; AAG chr11 5381862 5381881 5381878 +
atacagatgttagtttaaaa

SEQ ID NO: 26838 - DNA, 20 bp, Artificial Sequence
  Synthetic oligonucleotide; AAG chr11 5381866 5381885 5381882 +
agatgttagtttaaaaaagt

SEQ ID NO: 26839 - DNA, 20 bp, Artificial Sequence
  Synthetic oligonucleotide; TAG chr11 5381876 5381895 5381892 +
ttaaaaaagtaagcaaatat

SEQ ID NO: 26840 - DNA, 20 bp, Artificial Sequence
  Synthetic oligonucleotide; GAG chr11 5381878 5381897 5381894 +
aaaaaagtaagcaaatatta

SEQ ID NO: 26841 - DNA, 20 bp, Artificial Sequence
  Synthetic oligonucleotide; TGG chr11 5381890 5381909 5381906 +
aaatattagagatctctaaa

SEQ ID NO: 26842 - DNA, 20 bp, Artificial Sequence
  Synthetic oligonucleotide; TAG chr11 5381893 5381912 5381909 +
tattagagatctctaaatgg

SEQ ID NO: 26843 - DNA, 20 bp, Artificial Sequence
  Synthetic oligonucleotide; AGG chr11 5381894 5381913 5381910 +
attagagatctctaaatggt

SEQ ID NO: 26844 - DNA, 20 bp, Artificial Sequence
  Synthetic oligonucleotide; CAG chr11 5381909 5381928 5381925 +
atggtaggttatccactaaa

SEQ ID NO: 26845 - DNA, 20 bp, Artificial Sequence
  Synthetic oligonucleotide; AAG chr11 5381931 5381950 5381947 +
gtattgtttatctacgtaaa

SEQ ID NO: 26846 - DNA, 20 bp, Artificial Sequence
  Synthetic oligonucleotide; CAG chr11 5381956 5381975 5381972 +
gtcaattacatatctgcatc

SEQ ID NO: 26847 - DNA, 20 bp, Artificial Sequence
  Synthetic oligonucleotide; CAG chr11 5381987 5382006 5382003 +
accaaaataacatctgtttc

SEQ ID NO: 26848 - DNA, 20 bp, Artificial Sequence
  Synthetic oligonucleotide; CAG chr11 5381992 5382011 5382008 +
aataacatctgtttccagtg

SEQ ID NO: 26849 - DNA, 20 bp, Artificial Sequence
  Synthetic oligonucleotide; TGG chr11 5382033 5382052 5382049 +
atattgttaacaatgtactc

SEQ ID NO: 26850 - DNA, 20 bp, Artificial Sequence
  Synthetic oligonucleotide; CAG chr11 5382117 5382136 5382133 +
acatgtcatataaactcatt

SEQ ID NO: 26851 - DNA, 20 bp, Artificial Sequence
  Synthetic oligonucleotide; AGG chr11 5382118 5382137 5382134 +
catgtcatataaactcattc

SEQ ID NO: 26852 - DNA, 20 bp, Artificial Sequence
  Synthetic oligonucleotide; GGG chr11 5382119 5382138 5382135 +
atgtcatataaactcattca

SEQ ID NO: 26853 - DNA, 20 bp, Artificial Sequence
  Synthetic oligonucleotide; AAG chr11 5382155 5382174 5382171 +
tacctctactgttttattcc

SEQ ID NO: 26854 - DNA, 20 bp, Artificial Sequence
  Synthetic oligonucleotide; AGG chr11 5382156 5382175 5382172 +
acctctactgttttattcca

SEQ ID NO: 26855 - DNA, 20 bp, Artificial Sequence
  Synthetic oligonucleotide; CGG chr11 5382191 5382210 5382207 +
taaatgttatatttgatcac

SEQ ID NO: 26856 - DNA, 20 bp, Artificial Sequence
  Synthetic oligonucleotide; TAG chr11 5382203 5382222 5382219 +
ttgatcaccggaaaatctta

SEQ ID NO: 26857 - DNA, 20 bp, Artificial Sequence
  Synthetic oligonucleotide; TGG chr11 5382270 5382289 5382286 +
cttacactacccctcctttt

SEQ ID NO: 26858 - DNA, 20 bp, Artificial Sequence
  Synthetic oligonucleotide; AAG chr11 5382288 5382307 5382304 +
tttggaaatacctttctata

SEQ ID NO: 26859 - DNA, 20 bp, Artificial Sequence
  Synthetic oligonucleotide; TGG chr11 5382300 5382319 5382316 +
tttctataaagccctatctg

SEQ ID NO: 26860 - DNA, 20 bp, Artificial Sequence
  Synthetic oligonucleotide; TAG chr11 5382315 5382334 5382331 +
atctgtggttgattcttaat

SEQ ID NO: 26861 - DNA, 20 bp, Artificial Sequence
  Synthetic oligonucleotide; TAG chr11 5382324 5382343 5382340 +
tgattcttaattagtcttca

SEQ ID NO: 26862 - DNA, 20 bp, Artificial Sequence
  Synthetic oligonucleotide; CAG chr11 5382329 5382348 5382345 +
cttaattagtcttcatagct

SEQ ID NO: 26863 - DNA, 20 bp, Artificial Sequence
  Synthetic oligonucleotide; AGG chr11 5382330 5382349 5382346 +
ttaattagtcttcatagctc

SEQ ID NO: 26864 - DNA, 20 bp, Artificial Sequence
  Synthetic oligonucleotide; TGG chr11 5382334 5382353 5382350 +
ttagtcttcatagctcaggt

SEQ ID NO: 26865 - DNA, 20 bp, Artificial Sequence
  Synthetic oligonucleotide; GGG chr11 5382335 5382354 5382351 +
tagtcttcatagctcaggtt

SEQ ID NO: 26866 - DNA, 20 bp, Artificial Sequence
  Synthetic oligonucleotide; GGG chr11 5382336 5382355 5382352 +
agtcttcatagctcaggttg

SEQ ID NO: 26867 - DNA, 20 bp, Artificial Sequence
  Synthetic oligonucleotide; TGG chr11 5382346 5382365 5382362 +
gctcaggttggggccttccc

SEQ ID NO: 26868 - DNA, 20 bp, Artificial Sequence
  Synthetic oligonucleotide; TGG chr11 5382359 5382378 5382375 +
ccttccctggccctcacctg

SEQ ID NO: 26869 - DNA, 20 bp, Artificial Sequence
  Synthetic oligonucleotide; GGG chr11 5382360 5382379 5382376 +
cttccctggccctcacctgt

SEQ ID NO: 26870 - DNA, 20 bp, Artificial Sequence
  Synthetic oligonucleotide; CAG chr11 5382364 5382383 5382380 +
cctggccctcacctgtgggc

SEQ ID NO: 26871 - DNA, 20 bp, Artificial Sequence
  Synthetic oligonucleotide; AGG chr11 5382365 5382384 5382381 +
ctggccctcacctgtgggcc

SEQ ID NO: 26872 - DNA, 20 bp, Artificial Sequence
  Synthetic oligonucleotide; AAG chr11 5382420 5382439 5382436 +
tccatctcttacattgcgct

SEQ ID NO: 26873 - DNA, 20 bp, Artificial Sequence
  Synthetic oligonucleotide; TAG chr11 5382424 5382443 5382440 +
tctcttacattgcgctaaga

SEQ ID NO: 26874 - DNA, 20 bp, Artificial Sequence
  Synthetic oligonucleotide; TAG chr11 5382450 5382469 5382466 +
ttttcctatcttatgtgtga

SEQ ID NO: 26875 - DNA, 20 bp, Artificial Sequence
  Synthetic oligonucleotide; TAG chr11 5382467 5382486 5382483 +
tgatagatgcccctgaataa

SEQ ID NO: 26876 - DNA, 20 bp, Artificial Sequence
  Synthetic oligonucleotide; TGG chr11 5382486 5382505 5382502 +
atagcaatatttgctgttgc

SEQ ID NO: 26877 - DNA, 20 bp, Artificial Sequence
  Synthetic oligonucleotide; TAG chr11 5382495 5382514 5382511 +
tttgctgttgctggtaataa

SEQ ID NO: 26878 - DNA, 20 bp, Artificial Sequence
  Synthetic oligonucleotide; CAG chr11 5382498 5382517 5382514 +
gctgttgctggtaataatag

SEQ ID NO: 26879 - DNA, 20 bp, Artificial Sequence
  Synthetic oligonucleotide; TGG chr11 5382524 5382543 5382540 +
tgttgctgttatactgtcct

SEQ ID NO: 26880 - DNA, 20 bp, Artificial Sequence
  Synthetic oligonucleotide; TAG chr11 5382528 5382547 5382544 +
gctgttatactgtccttggc

SEQ ID NO: 26881 - DNA, 20 bp, Artificial Sequence
  Synthetic oligonucleotide; AGG chr11 5382529 5382548 5382545 +
ctgttatactgtccttggct

SEQ ID NO: 26882 - DNA, 20 bp, Artificial Sequence
  Synthetic oligonucleotide; CAG chr11 5382536 5382555 5382552 +
actgtccttggctaggatcc

SEQ ID NO: 26883 - DNA, 20 bp, Artificial Sequence
  Synthetic oligonucleotide; TAG chr11 5382544 5382563 5382560 +
tggctaggatcccagtgaaa

SEQ ID NO: 26884 - DNA, 20 bp, Artificial Sequence
  Synthetic oligonucleotide; AGG chr11 5382545 5382564 5382561 +
ggctaggatcccagtgaaat

SEQ ID NO: 26885 - DNA, 20 bp, Artificial Sequence
  Synthetic oligonucleotide; CAG chr11 5382572 5382591 5382588 +
aatcatgttcttaataaatg

SEQ ID NO: 26886 - DNA, 20 bp, Artificial Sequence
  Synthetic oligonucleotide; AGG chr11 5382573 5382592 5382589 +
atcatgttcttaataaatgc

SEQ ID NO: 26887 - DNA, 20 bp, Artificial Sequence
  Synthetic oligonucleotide; TGG chr11 5382593 5382612 5382609 +
aggattttctgaaatttttc

SEQ ID NO: 26888 - DNA, 20 bp, Artificial Sequence
  Synthetic oligonucleotide; TAG chr11 5382596 5382615 5382612 +
attttctgaaatttttctgg

SEQ ID NO: 26889 - DNA, 20 bp, Artificial Sequence
  Synthetic oligonucleotide; TGG chr11 5382599 5382618 5382615 +
ttctgaaatttttctggtag

SEQ ID NO: 26890 - DNA, 20 bp, Artificial Sequence
  Synthetic oligonucleotide; AAG chr11 5382615 5382634 5382631 +
gtagtggtgccctctcctac

SEQ ID NO: 26891 - DNA, 20 bp, Artificial Sequence
  Synthetic oligonucleotide; AAG chr11 5382626 5382645 5382642 +
ctctcctacaagcctaaatg

SEQ ID NO: 26892 - DNA, 20 bp, Artificial Sequence
  Synthetic oligonucleotide; CAG chr11 5382634 5382653 5382650 +
caagcctaaatgaagatgct

SEQ ID NO: 26893 - DNA, 20 bp, Artificial Sequence
  Synthetic oligonucleotide; AAG chr11 5382655 5382674 5382671 +
agctccttcctattgtaccg

SEQ ID NO: 26894 - DNA, 20 bp, Artificial Sequence
  Synthetic oligonucleotide; CAG chr11 5382659 5382678 5382675 +
ccttcctattgtaccgaagc

SEQ ID NO: 26895 - DNA, 20 bp, Artificial Sequence
  Synthetic oligonucleotide; AAG chr11 5382688 5382707 5382704 +
cctcataactacaatttaat

SEQ ID NO: 26896 - DNA, 20 bp, Artificial Sequence
  Synthetic oligonucleotide; TGG chr11 5382740 5382759 5382756 +
accctgactctcctacactc

SEQ ID NO: 26897 - DNA, 20 bp, Artificial Sequence
  Synthetic oligonucleotide; CAG chr11 5382753 5382772 5382769 +
tacactctggccctaacaac

SEQ ID NO: 26898 - DNA, 20 bp, Artificial Sequence
  Synthetic oligonucleotide; CGG chr11 5382765 5382784 5382781 +
ctaacaaccagttacttacc

SEQ ID NO: 26899 - DNA, 20 bp, Artificial Sequence
  Synthetic oligonucleotide; AAG chr11 5382771 5382790 5382787 +
accagttacttacccggtgt

SEQ ID NO: 26900 - DNA, 20 bp, Artificial Sequence
  Synthetic oligonucleotide; AGG chr11 5382772 5382791 5382788 +
ccagttacttacccggtgta

SEQ ID NO: 26901 - DNA, 20 bp, Artificial Sequence
  Synthetic oligonucleotide; TGG chr11 5382775 5382794 5382791 +
gttacttacccggtgtaagg

SEQ ID NO: 26902 - DNA, 20 bp, Artificial Sequence
  Synthetic oligonucleotide; TGG chr11 5382791 5382810 5382807 +
aaggtggtgccacttctgtc

SEQ ID NO: 26903 - DNA, 20 bp, Artificial Sequence
  Synthetic oligonucleotide; GGG chr11 5382792 5382811 5382808 +
aggtggtgccacttctgtct

SEQ ID NO: 26904 - DNA, 20 bp, Artificial Sequence
  Synthetic oligonucleotide; TGG chr11 5382797 5382816 5382813 +
gtgccacttctgtctgggtg

SEQ ID NO: 26905 - DNA, 20 bp, Artificial Sequence
  Synthetic oligonucleotide; TGG chr11 5382811 5382830 5382827 +
tgggtgtggtctgatcacaa

SEQ ID NO: 26906 - DNA, 20 bp, Artificial Sequence
  Synthetic oligonucleotide; TGG chr11 5382830 5382849 5382846 +
atggcatgtcataaacttca

SEQ ID NO: 26907 - DNA, 20 bp, Artificial Sequence
  Synthetic oligonucleotide; GGG chr11 5382831 5382850 5382847 +
tggcatgtcataaacttcat

SEQ ID NO: 26908 - DNA, 20 bp, Artificial Sequence
  Synthetic oligonucleotide; TGG chr11 5382843 5382862 5382859 +
aacttcatgggtctctgtcc

SEQ ID NO: 26909 - DNA, 20 bp, Artificial Sequence
  Synthetic oligonucleotide; TAG chr11 5382849 5382868 5382865 +
atgggtctctgtcctggttt

SEQ ID NO: 26910 - DNA, 20 bp, Artificial Sequence
  Synthetic oligonucleotide; TGG chr11 5382869 5382888 5382885 +
tagatctgtatgccccgttt

SEQ ID NO: 26911 - DNA, 20 bp, Artificial Sequence
  Synthetic oligonucleotide; GAG chr11 5382871 5382890 5382887 +
gatctgtatgccccgttttg

SEQ ID NO: 26912 - DNA, 20 bp, Artificial Sequence
  Synthetic oligonucleotide; AAG chr11 5382913 5382932 5382929 +
aatcaaccatgccctattta

SEQ ID NO: 26913 - DNA, 20 bp, Artificial Sequence
  Synthetic oligonucleotide; AGG chr11 5382914 5382933 5382930 +
atcaaccatgccctatttaa

SEQ ID NO: 26914 - DNA, 20 bp, Artificial Sequence
  Synthetic oligonucleotide; CAG chr11 5382938 5382957 5382954 +
tgtaataccttgcttcatgc

SEQ ID NO: 26915 - DNA, 20 bp, Artificial Sequence
  Synthetic oligonucleotide; AAG chr11 5382946 5382965 5382962 +
cttgcttcatgccagtctcc

SEQ ID NO: 26916 - DNA, 20 bp, Artificial Sequence
  Synthetic oligonucleotide; GAG chr11 5382948 5382967 5382964 +
tgcttcatgccagtctccaa

SEQ ID NO: 26917 - DNA, 20 bp, Artificial Sequence
  Synthetic oligonucleotide; TGG chr11 5382965 5382984 5382981 +
caagagtgtgtgtgtgtttg

SEQ ID NO: 26918 - DNA, 20 bp, Artificial Sequence
  Synthetic oligonucleotide; TGG chr11 5382968 5382987 5382984 +
gagtgtgtgtgtgtttgtgg

SEQ ID NO: 26919 - DNA, 20 bp, Artificial Sequence
  Synthetic oligonucleotide; GAG chr11 5382970 5382989 5382986 +
gtgtgtgtgtgtttgtggtg

SEQ ID NO: 26920 - DNA, 20 bp, Artificial Sequence
  Synthetic oligonucleotide; GAG chr11 5382972 5382991 5382988 +
gtgtgtgtgtttgtggtgga

SEQ ID NO: 26921 - DNA, 20 bp, Artificial Sequence
  Synthetic oligonucleotide; AGG chr11 5382973 5382992 5382989 +
tgtgtgtgtttgtggtggag

SEQ ID NO: 26922 - DNA, 20 bp, Artificial Sequence
  Synthetic oligonucleotide; GAG chr11 5382984 5383003 5383000 +
gtggtggagaggttgtgtgt

SEQ ID NO: 26923 - DNA, 20 bp, Artificial Sequence
  Synthetic oligonucleotide; AAG chr11 5382993 5383012 5383009 +
aggttgtgtgtgagttttga

SEQ ID NO: 26924 - DNA, 20 bp, Artificial Sequence
  Synthetic oligonucleotide; AAG chr11 5382998 5383017 5383014 +
gtgtgtgagttttgaaagaa

SEQ ID NO: 26925 - DNA, 20 bp, Artificial Sequence
  Synthetic oligonucleotide; GAG chr11 5383000 5383019 5383016 +
gtgtgagttttgaaagaaaa

SEQ ID NO: 26926 - DNA, 20 bp, Artificial Sequence
  Synthetic oligonucleotide; CAG chr11 5383033 5383052 5383049 +
atgacctgatcacattaact

SEQ ID NO: 26927 - DNA, 20 bp, Artificial Sequence
  Synthetic oligonucleotide; AGG chr11 5383034 5383053 5383050 +
tgacctgatcacattaactc

SEQ ID NO: 26928 - DNA, 20 bp, Artificial Sequence
  Synthetic oligonucleotide; TAG chr11 5383042 5383061 5383058 +
tcacattaactcaggttctg

SEQ ID NO: 26929 - DNA, 20 bp, Artificial Sequence
  Synthetic oligonucleotide; TAG chr11 5383047 5383066 5383063 +
ttaactcaggttctgtagca

SEQ ID NO: 26930 - DNA, 20 bp, Artificial Sequence
  Synthetic oligonucleotide; TGG chr11 5383052 5383071 5383068 +
tcaggttctgtagcatagtc

SEQ ID NO: 26931 - DNA, 20 bp, Artificial Sequence
  Synthetic oligonucleotide; GGG chr11 5383053 5383072 5383069 +
caggttctgtagcatagtct

SEQ ID NO: 26932 - DNA, 20 bp, Artificial Sequence
  Synthetic oligonucleotide; GGG chr11 5383054 5383073 5383070 +
aggttctgtagcatagtctg

SEQ ID NO: 26933 - DNA, 20 bp, Artificial Sequence
  Synthetic oligonucleotide; AAG chr11 5383057 5383076 5383073 +
ttctgtagcatagtctgggg

SEQ ID NO: 26934 - DNA, 20 bp, Artificial Sequence
  Synthetic oligonucleotide; AAG chr11 5383060 5383079 5383076 +
tgtagcatagtctggggaag

SEQ ID NO: 26935 - DNA, 20 bp, Artificial Sequence
  Synthetic oligonucleotide; AAG chr11 5383066 5383085 5383082 +
atagtctggggaagaagtac

SEQ ID NO: 26936 - DNA, 20 bp, Artificial Sequence
  Synthetic oligonucleotide; TGG chr11 5383095 5383114 5383111 +
tttttttttctaaatgttga

SEQ ID NO: 26937 - DNA, 20 bp, Artificial Sequence
  Synthetic oligonucleotide; CAG chr11 5383108 5383127 5383124 +
atgttgatggcatttgctac

SEQ ID NO: 26938 - DNA, 20 bp, Artificial Sequence
  Synthetic oligonucleotide; AAG chr11 5383113 5383132 5383129 +
gatggcatttgctaccagaa

SEQ ID NO: 26939 - DNA, 20 bp, Artificial Sequence
  Synthetic oligonucleotide; AAG chr11 5383116 5383135 5383132 +
ggcatttgctaccagaaaag

SEQ ID NO: 26940 - DNA, 20 bp, Artificial Sequence
  Synthetic oligonucleotide; AGG chr11 5383117 5383136 5383133 +
gcatttgctaccagaaaaga

SEQ ID NO: 26941 - DNA, 20 bp, Artificial Sequence
  Synthetic oligonucleotide; AAG chr11 5383124 5383143 5383140 +
ctaccagaaaagaaggaaaa

SEQ ID NO: 26942 - DNA, 20 bp, Artificial Sequence
  Synthetic oligonucleotide; AAG chr11 5383134 5383153 5383150 +
agaaggaaaaaagttttgta

SEQ ID NO: 26943 - DNA, 20 bp, Artificial Sequence
  Synthetic oligonucleotide; AGG chr11 5383135 5383154 5383151 +
gaaggaaaaaagttttgtaa

SEQ ID NO: 26944 - DNA, 20 bp, Artificial Sequence
  Synthetic oligonucleotide; TAG chr11 5383148 5383167 5383164 +
tttgtaaaggctacttgttg

SEQ ID NO: 26945 - DNA, 20 bp, Artificial Sequence
  Synthetic oligonucleotide; AGG chr11 5383149 5383168 5383165 +
ttgtaaaggctacttgttgt

SEQ ID NO: 26946 - DNA, 20 bp, Artificial Sequence
  Synthetic oligonucleotide; GGG chr11 5383150 5383169 5383166 +
tgtaaaggctacttgttgta

SEQ ID NO: 26947 - DNA, 20 bp, Artificial Sequence
  Synthetic oligonucleotide; AAG chr11 5383160 5383179 5383176 +
acttgttgtagggctcattg

SEQ ID NO: 26948 - DNA, 20 bp, Artificial Sequence
  Synthetic oligonucleotide; AGG chr11 5383161 5383180 5383177 +
cttgttgtagggctcattga

SEQ ID NO: 26949 - DNA, 20 bp, Artificial Sequence
  Synthetic oligonucleotide; AAG chr11 5383165 5383184 5383181 +
ttgtagggctcattgaagga

SEQ ID NO: 26950 - DNA, 20 bp, Artificial Sequence
  Synthetic oligonucleotide; CAG chr11 5383170 5383189 5383186 +
gggctcattgaaggaaagtc

SEQ ID NO: 26951 - DNA, 20 bp, Artificial Sequence
  Synthetic oligonucleotide; AAG chr11 5383181 5383200 5383197 +
aggaaagtccagtgcattca

SEQ ID NO: 26952 - DNA, 20 bp, Artificial Sequence
  Synthetic oligonucleotide; AAG chr11 5383187 5383206 5383203 +
gtccagtgcattcaaagatg

SEQ ID NO: 26953 - DNA, 20 bp, Artificial Sequence
  Synthetic oligonucleotide; TAG chr11 5383190 5383209 5383206 +
cagtgcattcaaagatgaag

SEQ ID NO: 26954 - DNA, 20 bp, Artificial Sequence
  Synthetic oligonucleotide; GAG chr11 5383192 5383211 5383208 +
gtgcattcaaagatgaagta

SEQ ID NO: 26955 - DNA, 20 bp, Artificial Sequence
  Synthetic oligonucleotide; GAG chr11 5383194 5383213 5383210 +
gcattcaaagatgaagtaga

SEQ ID NO: 26956 - DNA, 20 bp, Artificial Sequence
  Synthetic oligonucleotide; TGG chr11 5383200 5383219 5383216 +
aaagatgaagtagagagctt

SEQ ID NO: 26957 - DNA, 20 bp, Artificial Sequence
  Synthetic oligonucleotide; GGG chr11 5383201 5383220 5383217 +
aagatgaagtagagagcttt

SEQ ID NO: 26958 - DNA, 20 bp, Artificial Sequence
  Synthetic oligonucleotide; AAG chr11 5383205 5383224 5383221 +
tgaagtagagagctttggga

SEQ ID NO: 26959 - DNA, 20 bp, Artificial Sequence
  Synthetic oligonucleotide; GAG chr11 5383211 5383230 5383227 +
agagagctttgggaaagcct

SEQ ID NO: 26960 - DNA, 20 bp, Artificial Sequence
  Synthetic oligonucleotide; TGG chr11 5383223 5383242 5383239 +
gaaagcctgagacactgacc

SEQ ID NO: 26961 - DNA, 20 bp, Artificial Sequence
  Synthetic oligonucleotide; TGG chr11 5383235 5383254 5383251 +
cactgacctggacatttgtt

SEQ ID NO: 26962 - DNA, 20 bp, Artificial Sequence
  Synthetic oligonucleotide; GGG chr11 5383236 5383255 5383252 +
actgacctggacatttgttt

SEQ ID NO: 26963 - DNA, 20 bp, Artificial Sequence
  Synthetic oligonucleotide; GGG chr11 5383237 5383256 5383253 +
ctgacctggacatttgtttg

SEQ ID NO: 26964 - DNA, 20 bp, Artificial Sequence
  Synthetic oligonucleotide; TAG chr11 5383240 5383259 5383256 +
acctggacatttgtttgggg

SEQ ID NO: 26965 - DNA, 20 bp, Artificial Sequence
  Synthetic oligonucleotide; AGG chr11 5383241 5383260 5383257 +
cctggacatttgtttggggt

SEQ ID NO: 26966 - DNA, 20 bp, Artificial Sequence
  Synthetic oligonucleotide; AAG chr11 5383255 5383274 5383271 +
tggggtaggattgaatatgc

SEQ ID NO: 26967 - DNA, 20 bp, Artificial Sequence
  Synthetic oligonucleotide; TAG chr11 5383267 5383286 5383283 +
gaatatgcaagattgacttc

SEQ ID NO: 26968 - DNA, 20 bp, Artificial Sequence
  Synthetic oligonucleotide; AGG chr11 5383268 5383287 5383284 +
aatatgcaagattgacttct

SEQ ID NO: 26969 - DNA, 20 bp, Artificial Sequence
  Synthetic oligonucleotide; AAG chr11 5383275 5383294 5383291 +
aagattgacttctaggtcca

SEQ ID NO: 26970 - DNA, 20 bp, Artificial Sequence
  Synthetic oligonucleotide; TAG chr11 5383281 5383300 5383297 +
gacttctaggtccaaagata

SEQ ID NO: 26971 - DNA, 20 bp, Artificial Sequence
  Synthetic oligonucleotide; GAG chr11 5383283 5383302 5383299 +
cttctaggtccaaagatata

SEQ ID NO: 26972 - DNA, 20 bp, Artificial Sequence
  Synthetic oligonucleotide; AGG chr11 5383284 5383303 5383300 +
ttctaggtccaaagatatag

SEQ ID NO: 26973 - DNA, 20 bp, Artificial Sequence
  Synthetic oligonucleotide; TGG chr11 5383288 5383307 5383304 +
aggtccaaagatatagaggc

SEQ ID NO: 26974 - DNA, 20 bp, Artificial Sequence
  Synthetic oligonucleotide; CAG chr11 5383291 5383310 5383307 +
tccaaagatatagaggctgg

SEQ ID NO: 26975 - DNA, 20 bp, Artificial Sequence
  Synthetic oligonucleotide; GAG chr11 5383293 5383312 5383309 +
caaagatatagaggctggca

SEQ ID NO: 26976 - DNA, 20 bp, Artificial Sequence
  Synthetic oligonucleotide; TGG chr11 5383297 5383316 5383313 +
gatatagaggctggcagaga

SEQ ID NO: 26977 - DNA, 20 bp, Artificial Sequence
  Synthetic oligonucleotide; GAG chr11 5383299 5383318 5383315 +
tatagaggctggcagagatg

SEQ ID NO: 26978 - DNA, 20 bp, Artificial Sequence
  Synthetic oligonucleotide; AGG chr11 5383300 5383319 5383316 +
atagaggctggcagagatgg

SEQ ID NO: 26979 - DNA, 20 bp, Artificial Sequence
  Synthetic oligonucleotide; GGG chr11 5383301 5383320 5383317 +
tagaggctggcagagatgga

SEQ ID NO: 26980 - DNA, 20 bp, Artificial Sequence
  Synthetic oligonucleotide; CAG chr11 5383319 5383338 5383335 +
gagggcaatttaattatctg

SEQ ID NO: 26981 - DNA, 20 bp, Artificial Sequence
  Synthetic oligonucleotide; TGG chr11 5383326 5383345 5383342 +
atttaattatctgcagtaaa

SEQ ID NO: 26982 - DNA, 20 bp, Artificial Sequence
  Synthetic oligonucleotide; TAG chr11 5383340 5383359 5383356 +
agtaaatggaaatataaaaa

SEQ ID NO: 26983 - DNA, 20 bp, Artificial Sequence
  Synthetic oligonucleotide; CAG chr11 5383344 5383363 5383360 +
aatggaaatataaaaataga

SEQ ID NO: 26984 - DNA, 20 bp, Artificial Sequence
  Synthetic oligonucleotide; AGG chr11 5383345 5383364 5383361 +
atggaaatataaaaatagac

SEQ ID NO: 26985 - DNA, 20 bp, Artificial Sequence
  Synthetic oligonucleotide; GAG chr11 5383353 5383372 5383369 +
ataaaaatagacaggaaaat

SEQ ID NO: 26986 - DNA, 20 bp, Artificial Sequence
  Synthetic oligonucleotide; CAG chr11 5383358 5383377 5383374 +
aatagacaggaaaatgagtg

SEQ ID NO: 26987 - DNA, 20 bp, Artificial Sequence
  Synthetic oligonucleotide; AGG chr11 5383359 5383378 5383375 +
atagacaggaaaatgagtgc

SEQ ID NO: 26988 - DNA, 20 bp, Artificial Sequence
  Synthetic oligonucleotide; GAG chr11 5383361 5383380 5383377 +
agacaggaaaatgagtgcag

SEQ ID NO: 26989 - DNA, 20 bp, Artificial Sequence
  Synthetic oligonucleotide; GAG chr11 5383365 5383384 5383381 +
aggaaaatgagtgcaggagt

SEQ ID NO: 26990 - DNA, 20 bp, Artificial Sequence
  Synthetic oligonucleotide; GAG chr11 5383367 5383386 5383383 +
gaaaatgagtgcaggagtga

SEQ ID NO: 26991 - DNA, 20 bp, Artificial Sequence
  Synthetic oligonucleotide; AAG chr11 5383377 5383396 5383393 +
gcaggagtgagagaatcttg

SEQ ID NO: 26992 - DNA, 20 bp, Artificial Sequence
  Synthetic oligonucleotide; TAG chr11 5383380 5383399 5383396 +
ggagtgagagaatcttgaag

SEQ ID NO: 26993 - DNA, 20 bp, Artificial Sequence
  Synthetic oligonucleotide; TGG chr11 5383383 5383402 5383399 +
gtgagagaatcttgaagtag

SEQ ID NO: 26994 - DNA, 20 bp, Artificial Sequence
  Synthetic oligonucleotide; TGG chr11 5383392 5383411 5383408 +
tcttgaagtagtggtgattg

SEQ ID NO: 26995 - DNA, 20 bp, Artificial Sequence
  Synthetic oligonucleotide; AAG chr11 5383401 5383420 5383417 +
agtggtgattgtggtgcttc

SEQ ID NO: 26996 - DNA, 20 bp, Artificial Sequence
  Synthetic oligonucleotide; AGG chr11 5383402 5383421 5383418 +
gtggtgattgtggtgcttca

SEQ ID NO: 26997 - DNA, 20 bp, Artificial Sequence
  Synthetic oligonucleotide; CAG chr11 5383405 5383424 5383421 +
gtgattgtggtgcttcaagg

SEQ ID NO: 26998 - DNA, 20 bp, Artificial Sequence
  Synthetic oligonucleotide; AAG chr11 5383421 5383440 5383437 +
aaggcagatgtgcaatttaa

SEQ ID NO: 26999 - DNA, 20 bp, Artificial Sequence
  Synthetic oligonucleotide; TGG chr11 5383441 5383460 5383457 +
aagccactgtgaacatcaca

SEQ ID NO: 27000 - DNA, 20 bp, Artificial Sequence
  Synthetic oligonucleotide; TGG chr11 5383477 5383496 5383493 +
tatactacatccgacctctc

SEQ ID NO: 27001 - DNA, 20 bp, Artificial Sequence
  Synthetic oligonucleotide; CGG chr11 5383487 5383506 5383503 +
ccgacctctctggaaaacga

SEQ ID NO: 27002 - DNA, 20 bp, Artificial Sequence
  Synthetic oligonucleotide; GGG chr11 5383488 5383507 5383504 +
cgacctctctggaaaacgac

SEQ ID NO: 27003 - DNA, 20 bp, Artificial Sequence
  Synthetic oligonucleotide; TAG chr11 5383499 5383518 5383515 +
gaaaacgacgggtccattac

SEQ ID NO: 27004 - DNA, 20 bp, Artificial Sequence
  Synthetic oligonucleotide; TGG chr11 5383502 5383521 5383518 +
aacgacgggtccattactag

SEQ ID NO: 27005 - DNA, 20 bp, Artificial Sequence
  Synthetic oligonucleotide; CAG chr11 5383509 5383528 5383525 +
ggtccattactagtggataa

SEQ ID NO: 27006 - DNA, 20 bp, Artificial Sequence
  Synthetic oligonucleotide; AAG chr11 5383512 5383531 5383528 +
ccattactagtggataacag

SEQ ID NO: 27007 - DNA, 20 bp, Artificial Sequence
  Synthetic oligonucleotide; CAG chr11 5383516 5383535 5383532 +
tactagtggataacagaaga

SEQ ID NO: 27008 - DNA, 20 bp, Artificial Sequence
  Synthetic oligonucleotide; AAG chr11 5383532 5383551 5383548 +
aagacagtaaataaaatgat

SEQ ID NO: 27009 - DNA, 20 bp, Artificial Sequence
  Synthetic oligonucleotide; CAG chr11 5383572 5383591 5383588 +
tttatgaaattaaaaataaa

SEQ ID NO: 27010 - DNA, 20 bp, Artificial Sequence
  Synthetic oligonucleotide; AAG chr11 5383577 5383596 5383593 +
gaaattaaaaataaacagat

SEQ ID NO: 27011 - DNA, 20 bp, Artificial Sequence
  Synthetic oligonucleotide; AGG chr11 5383578 5383597 5383594 +
aaattaaaaataaacagata

SEQ ID NO: 27012 - DNA, 20 bp, Artificial Sequence
  Synthetic oligonucleotide; CAG chr11 5383581 5383600 5383597 +
ttaaaaataaacagataagg

SEQ ID NO: 27013 - DNA, 20 bp, Artificial Sequence
  Synthetic oligonucleotide; TAG chr11 5383584 5383603 5383600 +
aaaataaacagataaggcag

SEQ ID NO: 27014 - DNA, 20 bp, Artificial Sequence
  Synthetic oligonucleotide; CAG chr11 5383598 5383617 5383614 +
aggcagtagtacttttgttg

SEQ ID NO: 27015 - DNA, 20 bp, Artificial Sequence
  Synthetic oligonucleotide; CAG chr11 5383601 5383620 5383617 +
cagtagtacttttgttgcag

SEQ ID NO: 27016 - DNA, 20 bp, Artificial Sequence
  Synthetic oligonucleotide; TAG chr11 5383613 5383632 5383629 +
tgttgcagcagatgtctgtg

SEQ ID NO: 27017 - DNA, 20 bp, Artificial Sequence
  Synthetic oligonucleotide; TGG chr11 5383624 5383643 5383640 +
atgtctgtgtagccaaaacc

SEQ ID NO: 27018 - DNA, 20 bp, Artificial Sequence
  Synthetic oligonucleotide; GGG chr11 5383625 5383644 5383641 +
tgtctgtgtagccaaaacct

SEQ ID NO: 27019 - DNA, 20 bp, Artificial Sequence
  Synthetic oligonucleotide; GGG chr11 5383626 5383645 5383642 +
gtctgtgtagccaaaacctg

SEQ ID NO: 27020 - DNA, 20 bp, Artificial Sequence
  Synthetic oligonucleotide; AAG chr11 5383642 5383661 5383658 +
cctggggactgaatgctaaa

SEQ ID NO: 27021 - DNA, 20 bp, Artificial Sequence
  Synthetic oligonucleotide; TAG chr11 5383646 5383665 5383662 +
gggactgaatgctaaaaagt

SEQ ID NO: 27022 - DNA, 20 bp, Artificial Sequence
  Synthetic oligonucleotide; AGG chr11 5383647 5383666 5383663 +
ggactgaatgctaaaaagtt

SEQ ID NO: 27023 - DNA, 20 bp, Artificial Sequence
  Synthetic oligonucleotide; GGG chr11 5383648 5383667 5383664 +
gactgaatgctaaaaagtta

SEQ ID NO: 27024 - DNA, 20 bp, Artificial Sequence
  Synthetic oligonucleotide; CAG chr11 5383656 5383675 5383672 +
gctaaaaagttagggctctt

SEQ ID NO: 27025 - DNA, 20 bp, Artificial Sequence
  Synthetic oligonucleotide; CAG chr11 5383662 5383681 5383678 +
aagttagggctcttcagctt

SEQ ID NO: 27026 - DNA, 20 bp, Artificial Sequence
  Synthetic oligonucleotide; AGG chr11 5383663 5383682 5383679 +
agttagggctcttcagcttc

SEQ ID NO: 27027 - DNA, 20 bp, Artificial Sequence
  Synthetic oligonucleotide; GAG chr11 5383665 5383684 5383681 +
ttagggctcttcagcttcag

SEQ ID NO: 27028 - DNA, 20 bp, Artificial Sequence
  Synthetic oligonucleotide; CAG chr11 5383669 5383688 5383685 +
ggctcttcagcttcaggaga

SEQ ID NO: 27029 - DNA, 20 bp, Artificial Sequence
  Synthetic oligonucleotide; AGG chr11 5383670 5383689 5383686 +
gctcttcagcttcaggagac

SEQ ID NO: 27030 - DNA, 20 bp, Artificial Sequence
  Synthetic oligonucleotide; GGG chr11 5383671 5383690 5383687 +
ctcttcagcttcaggagaca

SEQ ID NO: 27031 - DNA, 20 bp, Artificial Sequence
  Synthetic oligonucleotide; GGG chr11 5383672 5383691 5383688 +
tcttcagcttcaggagacag

SEQ ID NO: 27032 - DNA, 20 bp, Artificial Sequence
  Synthetic oligonucleotide; TGG chr11 5383675 5383694 5383691 +
tcagcttcaggagacagggg

SEQ ID NO: 27033 - DNA, 20 bp, Artificial Sequence
  Synthetic oligonucleotide; GAG chr11 5383677 5383696 5383693 +
agcttcaggagacaggggtg

SEQ ID NO: 27034 - DNA, 20 bp, Artificial Sequence
  Synthetic oligonucleotide; AAG chr11 5383683 5383702 5383699 +
aggagacaggggtggagata

SEQ ID NO: 27035 - DNA, 20 bp, Artificial Sequence
  Synthetic oligonucleotide; AAG chr11 5383687 5383706 5383703 +
gacaggggtggagataaaga

SEQ ID NO: 27036 - DNA, 20 bp, Artificial Sequence
  Synthetic oligonucleotide; TAG chr11 5383701 5383720 5383717 +
taaagaaagtttcctgccca

SEQ ID NO: 27037 - DNA, 20 bp, Artificial Sequence
  Synthetic oligonucleotide; AGG chr11 5383702 5383721 5383718 +
aaagaaagtttcctgcccat

SEQ ID NO: 27038 - DNA, 20 bp, Artificial Sequence
  Synthetic oligonucleotide; CAG chr11 5383710 5383729 5383726 +
tttcctgcccataggattcc

SEQ ID NO: 27039 - DNA, 20 bp, Artificial Sequence
  Synthetic oligonucleotide; TGG chr11 5383716 5383735 5383732 +
gcccataggattcccagccc

SEQ ID NO: 27040 - DNA, 20 bp, Artificial Sequence
  Synthetic oligonucleotide; GGG chr11 5383717 5383736 5383733 +
cccataggattcccagccct

SEQ ID NO: 27041 - DNA, 20 bp, Artificial Sequence
  Synthetic oligonucleotide; GGG chr11 5383718 5383737 5383734 +
ccataggattcccagccctg

SEQ ID NO: 27042 - DNA, 20 bp, Artificial Sequence
  Synthetic oligonucleotide; AAG chr11 5383738 5383757 5383754 +
gggaccctttgtttaccatt

SEQ ID NO: 27043 - DNA, 20 bp, Artificial Sequence
  Synthetic oligonucleotide; CAG chr11 5383747 5383766 5383763 +
tgtttaccattaagttctcc

SEQ ID NO: 27044 - DNA, 20 bp, Artificial Sequence
  Synthetic oligonucleotide; TGG chr11 5383751 5383770 5383767 +
taccattaagttctcccagc

SEQ ID NO: 27045 - DNA, 20 bp, Artificial Sequence
  Synthetic oligonucleotide; GAG chr11 5383753 5383772 5383769 +
ccattaagttctcccagctg

SEQ ID NO: 27046 - DNA, 20 bp, Artificial Sequence
  Synthetic oligonucleotide; TGG chr11 5383759 5383778 5383775 +
agttctcccagctggagcca

SEQ ID NO: 27047 - DNA, 20 bp, Artificial Sequence
  Synthetic oligonucleotide; TAG chr11 5383766 5383785 5383782 +
ccagctggagccatggtctt

SEQ ID NO: 27048 - DNA, 20 bp, Artificial Sequence
  Synthetic oligonucleotide; AGG chr11 5383767 5383786 5383783 +
cagctggagccatggtcttt

SEQ ID NO: 27049 - DNA, 20 bp, Artificial Sequence
  Synthetic oligonucleotide; GAG chr11 5383769 5383788 5383785 +
gctggagccatggtctttag

SEQ ID NO: 27050 - DNA, 20 bp, Artificial Sequence
  Synthetic oligonucleotide; AGG chr11 5383770 5383789 5383786 +
ctggagccatggtctttagg

SEQ ID NO: 27051 - DNA, 20 bp, Artificial Sequence
  Synthetic oligonucleotide; CAG chr11 5383789 5383808 5383805 +
gaggataaatccttctgtga

SEQ ID NO: 27052 - DNA, 20 bp, Artificial Sequence
  Synthetic oligonucleotide; CAG chr11 5383795 5383814 5383811 +
aaatccttctgtgacagcca

SEQ ID NO: 27053 - DNA, 20 bp, Artificial Sequence
  Synthetic oligonucleotide; CAG chr11 5383810 5383829 5383826 +
agccacagccttgtgcctct

SEQ ID NO: 27054 - DNA, 20 bp, Artificial Sequence
  Synthetic oligonucleotide; TGG chr11 5383855 5383874 5383871 +
tatactcttctttcttcctt

SEQ ID NO: 27055 - DNA, 20 bp, Artificial Sequence
  Synthetic oligonucleotide; TGG chr11 5383869 5383888 5383885 +
ttcctttggaacctactcat

SEQ ID NO: 27056 - DNA, 20 bp, Artificial Sequence
  Synthetic oligonucleotide; TGG chr11 5383896 5383915 5383912 +
acatttttgttattacctgc

SEQ ID NO: 27057 - DNA, 20 bp, Artificial Sequence
  Synthetic oligonucleotide; GAG chr11 5383900 5383919 5383916 +
ttttgttattacctgctggt

SEQ ID NO: 27058 - DNA, 20 bp, Artificial Sequence
  Synthetic oligonucleotide; CGG chr11 5383922 5383941 5383938 +
gtctcactactgtcttgtgc

SEQ ID NO: 27059 - DNA, 20 bp, Artificial Sequence
  Synthetic oligonucleotide; GGG chr11 5383923 5383942 5383939 +
tctcactactgtcttgtgcc

SEQ ID NO: 27060 - DNA, 20 bp, Artificial Sequence
  Synthetic oligonucleotide; GGG chr11 5383924 5383943 5383940 +
ctcactactgtcttgtgccg

SEQ ID NO: 27061 - DNA, 20 bp, Artificial Sequence
  Synthetic oligonucleotide; CAG chr11 5383930 5383949 5383946 +
actgtcttgtgccggggttt

SEQ ID NO: 27062 - DNA, 20 bp, Artificial Sequence
  Synthetic oligonucleotide; AGG chr11 5383931 5383950 5383947 +
ctgtcttgtgccggggtttc

SEQ ID NO: 27063 - DNA, 20 bp, Artificial Sequence
  Synthetic oligonucleotide; GAG chr11 5383933 5383952 5383949 +
gtcttgtgccggggtttcag

SEQ ID NO: 27064 - DNA, 20 bp, Artificial Sequence
  Synthetic oligonucleotide; TGG chr11 5383936 5383955 5383952 +
ttgtgccggggtttcaggag

SEQ ID NO: 27065 - DNA, 20 bp, Artificial Sequence
  Synthetic oligonucleotide; GGG chr11 5383937 5383956 5383953 +
tgtgccggggtttcaggagt

SEQ ID NO: 27066 - DNA, 20 bp, Artificial Sequence
  Synthetic oligonucleotide; TAG chr11 5383944 5383963 5383960 +
gggtttcaggagtgggtaat

SEQ ID NO: 27067 - DNA, 20 bp, Artificial Sequence
  Synthetic oligonucleotide; AGG chr11 5383945 5383964 5383961 +
ggtttcaggagtgggtaatt

SEQ ID NO: 27068 - DNA, 20 bp, Artificial Sequence
  Synthetic oligonucleotide; GGG chr11 5383946 5383965 5383962 +
gtttcaggagtgggtaatta

SEQ ID NO: 27069 - DNA, 20 bp, Artificial Sequence
  Synthetic oligonucleotide; GGG chr11 5383947 5383966 5383963 +
tttcaggagtgggtaattag

SEQ ID NO: 27070 - DNA, 20 bp, Artificial Sequence
  Synthetic oligonucleotide; GGG chr11 5383948 5383967 5383964 +
ttcaggagtgggtaattagg

SEQ ID NO: 27071 - DNA, 20 bp, Artificial Sequence
  Synthetic oligonucleotide; TGG chr11 5383954 5383973 5383970 +
agtgggtaattagggggaca

SEQ ID NO: 27072 - DNA, 20 bp, Artificial Sequence
  Synthetic oligonucleotide; GGG chr11 5383955 5383974 5383971 +
gtgggtaattagggggacat

SEQ ID NO: 27073 - DNA, 20 bp, Artificial Sequence
  Synthetic oligonucleotide; GAG chr11 5383957 5383976 5383973 +
gggtaattagggggacatgg

SEQ ID NO: 27074 - DNA, 20 bp, Artificial Sequence
  Synthetic oligonucleotide; GAG chr11 5383959 5383978 5383975 +
gtaattagggggacatggga

SEQ ID NO: 27075 - DNA, 20 bp, Artificial Sequence
  Synthetic oligonucleotide; GAG chr11 5383961 5383980 5383977 +
aattagggggacatgggaga

SEQ ID NO: 27076 - DNA, 20 bp, Artificial Sequence
  Synthetic oligonucleotide; AGG chr11 5383962 5383981 5383978 +
attagggggacatgggagag

SEQ ID NO: 27077 - DNA, 20 bp, Artificial Sequence
  Synthetic oligonucleotide; GAG chr11 5383964 5383983 5383980 +
tagggggacatgggagagag

SEQ ID NO: 27078 - DNA, 20 bp, Artificial Sequence
  Synthetic oligonucleotide; AGG chr11 5383965 5383984 5383981 +
agggggacatgggagagagg

SEQ ID NO: 27079 - DNA, 20 bp, Artificial Sequence
  Synthetic oligonucleotide; GGG chr11 5383966 5383985 5383982 +
gggggacatgggagagagga

SEQ ID NO: 27080 - DNA, 20 bp, Artificial Sequence
  Synthetic oligonucleotide; GAG chr11 5383968 5383987 5383984 +
gggacatgggagagaggagg

SEQ ID NO: 27081 - DNA, 20 bp, Artificial Sequence
  Synthetic oligonucleotide; GAG chr11 5383976 5383995 5383992 +
ggagagaggagggagaaaat

SEQ ID NO: 27082 - DNA, 20 bp, Artificial Sequence
  Synthetic oligonucleotide; AGG chr11 5383977 5383996 5383993 +
gagagaggagggagaaaatg

SEQ ID NO: 27083 - DNA, 20 bp, Artificial Sequence
  Synthetic oligonucleotide; GGG chr11 5383978 5383997 5383994 +
agagaggagggagaaaatga

SEQ ID NO: 27084 - DNA, 20 bp, Artificial Sequence
  Synthetic oligonucleotide; TGG chr11 5383985 5384004 5384001 +
agggagaaaatgagggaaaa

SEQ ID NO: 27085 - DNA, 20 bp, Artificial Sequence
  Synthetic oligonucleotide; GGG chr11 5383986 5384005 5384002 +
gggagaaaatgagggaaaat

SEQ ID NO: 27086 - DNA, 20 bp, Artificial Sequence
  Synthetic oligonucleotide; TAG chr11 5383995 5384014 5384011 +
tgagggaaaatgggaatgca

SEQ ID NO: 27087 - DNA, 20 bp, Artificial Sequence
  Synthetic oligonucleotide; AGG chr11 5383996 5384015 5384012 +
gagggaaaatgggaatgcat

SEQ ID NO: 27088 - DNA, 20 bp, Artificial Sequence
  Synthetic oligonucleotide; AAG chr11 5384007 5384026 5384023 +
ggaatgcataggtatcacaa

SEQ ID NO: 27089 - DNA, 20 bp, Artificial Sequence
  Synthetic oligonucleotide; CAG chr11 5384010 5384029 5384026 +
atgcataggtatcacaaaag

SEQ ID NO: 27090 - DNA, 20 bp, Artificial Sequence
  Synthetic oligonucleotide; GAG chr11 5384014 5384033 5384030 +
ataggtatcacaaaagcagt

SEQ ID NO: 27091 - DNA, 20 bp, Artificial Sequence
  Synthetic oligonucleotide; AAG chr11 5384023 5384042 5384039 +
acaaaagcagtgagcccaaa

SEQ ID NO: 27092 - DNA, 20 bp, Artificial Sequence
  Synthetic oligonucleotide; TGG chr11 5384029 5384048 5384045 +
gcagtgagcccaaaaagaca

SEQ ID NO: 27093 - DNA, 20 bp, Artificial Sequence
  Synthetic oligonucleotide; CAG chr11 5384035 5384054 5384051 +
agcccaaaaagacatggtct

SEQ ID NO: 27094 - DNA, 20 bp, Artificial Sequence
  Synthetic oligonucleotide; AAG chr11 5384046 5384065 5384062 +
acatggtctcagttacaatt

SEQ ID NO: 27095 - DNA, 20 bp, Artificial Sequence
  Synthetic oligonucleotide; AGG chr11 5384047 5384066 5384063 +
catggtctcagttacaatta

SEQ ID NO: 27096 - DNA, 20 bp, Artificial Sequence
  Synthetic oligonucleotide; TAG chr11 5384077 5384096 5384093 +
cccaaatgtttgaatgtcct

SEQ ID NO: 27097 - DNA, 20 bp, Artificial Sequence
  Synthetic oligonucleotide; TGG chr11 5384085 5384104 5384101 +
tttgaatgtccttagccaaa

SEQ ID NO: 27098 - DNA, 20 bp, Artificial Sequence
  Synthetic oligonucleotide; AAG chr11 5384109 5384128 5384125 +
ttccccacattccctgcact

SEQ ID NO: 27099 - DNA, 20 bp, Artificial Sequence
  Synthetic oligonucleotide; TGG chr11 5384117 5384136 5384133 +
attccctgcactaagcctaa

SEQ ID NO: 27100 - DNA, 20 bp, Artificial Sequence
  Synthetic oligonucleotide; GGG chr11 5384118 5384137 5384134 +
ttccctgcactaagcctaat

SEQ ID NO: 27101 - DNA, 20 bp, Artificial Sequence
  Synthetic oligonucleotide; TAG chr11 5384171 5384190 5384187 +
gtttctttgtttgttgtttt

SEQ ID NO: 27102 - DNA, 20 bp, Artificial Sequence
  Synthetic oligonucleotide; GAG chr11 5384178 5384197 5384194 +
tgtttgttgtttttagaaat

SEQ ID NO: 27103 - DNA, 20 bp, Artificial Sequence
  Synthetic oligonucleotide; AGG chr11 5384179 5384198 5384195 +
gtttgttgtttttagaaatg

SEQ ID NO: 27104 - DNA, 20 bp, Artificial Sequence
  Synthetic oligonucleotide; TAG chr11 5384184 5384203 5384200 +
ttgtttttagaaatgaggtc

SEQ ID NO: 27105 - DNA, 20 bp, Artificial Sequence
  Synthetic oligonucleotide; CAG chr11 5384197 5384216 5384213 +
tgaggtctagctctgttacc

SEQ ID NO: 27106 - DNA, 20 bp, Artificial Sequence
  Synthetic oligonucleotide; AGG chr11 5384198 5384217 5384214 +
gaggtctagctctgttaccc

SEQ ID NO: 27107 - DNA, 20 bp, Artificial Sequence
  Synthetic oligonucleotide; CAG chr11 5384204 5384223 5384220 +
tagctctgttacccaggcta

SEQ ID NO: 27108 - DNA, 20 bp, Artificial Sequence
  Synthetic oligonucleotide; CAG chr11 5384209 5384228 5384225 +
ctgttacccaggctacagtg

SEQ ID NO: 27109 - DNA, 20 bp, Artificial Sequence
  Synthetic oligonucleotide; TGG chr11 5384212 5384231 5384228 +
ttacccaggctacagtgcag

SEQ ID NO: 27110 - DNA, 20 bp, Artificial Sequence
  Synthetic oligonucleotide; TAG chr11 5384223 5384242 5384239 +
acagtgcagtggtgtaatca

SEQ ID NO: 27111 - DNA, 20 bp, Artificial Sequence
  Synthetic oligonucleotide; CGG chr11 5384244 5384263 5384260 +
agctcactgtaaactcaaac

SEQ ID NO: 27112 - DNA, 20 bp, Artificial Sequence
  Synthetic oligonucleotide; AAG chr11 5384251 5384270 5384267 +
tgtaaactcaaaccggattc

SEQ ID NO: 27113 - DNA, 20 bp, Artificial Sequence
  Synthetic oligonucleotide; AAG chr11 5384277 5384296 5384293 +
tcctcccaccttattcttcc

SEQ ID NO: 27114 - DNA, 20 bp, Artificial Sequence
  Synthetic oligonucleotide; CAG chr11 5384284 5384303 5384300 +
accttattcttccaagttgc

SEQ ID NO: 27115 - DNA, 20 bp, Artificial Sequence
  Synthetic oligonucleotide; AGG chr11 5384285 5384304 5384301 +
ccttattcttccaagttgcc

SEQ ID NO: 27116 - DNA, 20 bp, Artificial Sequence
  Synthetic oligonucleotide; AAG chr11 5384293 5384312 5384309 +
ttccaagttgccaggattat

SEQ ID NO: 27117 - DNA, 20 bp, Artificial Sequence
  Synthetic oligonucleotide; CAG chr11 5384312 5384331 5384328 +
taagtgtgaaccaccatata

SEQ ID NO: 27118 - DNA, 20 bp, Artificial Sequence
  Synthetic oligonucleotide; CAG chr11 5384315 5384334 5384331 +
gtgtgaaccaccatatacag

SEQ ID NO: 27119 - DNA, 20 bp, Artificial Sequence
  Synthetic oligonucleotide; TGG chr11 5384320 5384339 5384336 +
aaccaccatatacagcagtc

SEQ ID NO: 27120 - DNA, 20 bp, Artificial Sequence
  Synthetic oligonucleotide; GGG chr11 5384321 5384340 5384337 +
accaccatatacagcagtct

SEQ ID NO: 27121 - DNA, 20 bp, Artificial Sequence
  Synthetic oligonucleotide; TAG chr11 5384327 5384346 5384343 +
atatacagcagtctgggcct

SEQ ID NO: 27122 - DNA, 20 bp, Artificial Sequence
  Synthetic oligonucleotide; TGG chr11 5384340 5384359 5384356 +
tgggccttagatttttcact

SEQ ID NO: 27123 - DNA, 20 bp, Artificial Sequence
  Synthetic oligonucleotide; AAG chr11 5384349 5384368 5384365 +
gatttttcacttggaaaatg

SEQ ID NO: 27124 - DNA, 20 bp, Artificial Sequence
  Synthetic oligonucleotide; TAG chr11 5384355 5384374 5384371 +
tcacttggaaaatgaagtct

SEQ ID NO: 27125 - DNA, 20 bp, Artificial Sequence
  Synthetic oligonucleotide; CAG chr11 5384362 5384381 5384378 +
gaaaatgaagtcttagaaac

SEQ ID NO: 27126 - DNA, 20 bp, Artificial Sequence
  Synthetic oligonucleotide; AGG chr11 5384363 5384382 5384379 +
aaaatgaagtcttagaaacc

SEQ ID NO: 27127 - DNA, 20 bp, Artificial Sequence
  Synthetic oligonucleotide; GGG chr11 5384364 5384383 5384380 +
aaatgaagtcttagaaacca

SEQ ID NO: 27128 - DNA, 20 bp, Artificial Sequence
  Synthetic oligonucleotide; CAG chr11 5384373 5384392 5384389 +
cttagaaaccagggttctca

SEQ ID NO: 27129 - DNA, 20 bp, Artificial Sequence
  Synthetic oligonucleotide; CAG chr11 5384394 5384413 5384410 +
agaatctcttctgatattct

SEQ ID NO: 27130 - DNA, 20 bp, Artificial Sequence
  Synthetic oligonucleotide; GAG chr11 5384396 5384415 5384412 +
aatctcttctgatattctca

SEQ ID NO: 27131 - DNA, 20 bp, Artificial Sequence
  Synthetic oligonucleotide; CAG chr11 5384407 5384426 5384423 +
atattctcagagtctatgca

SEQ ID NO: 27132 - DNA, 20 bp, Artificial Sequence
  Synthetic oligonucleotide; CAG chr11 5384413 5384432 5384429 +
tcagagtctatgcacagaac

SEQ ID NO: 27133 - DNA, 20 bp, Artificial Sequence
  Synthetic oligonucleotide; GAG chr11 5384415 5384434 5384431 +
agagtctatgcacagaacca

SEQ ID NO: 27134 - DNA, 20 bp, Artificial Sequence
  Synthetic oligonucleotide; CAG chr11 5384419 5384438 5384435 +
tctatgcacagaaccagagc

SEQ ID NO: 27135 - DNA, 20 bp, Artificial Sequence
  Synthetic oligonucleotide; GAG chr11 5384421 5384440 5384437 +
tatgcacagaaccagagcca

SEQ ID NO: 27136 - DNA, 20 bp, Artificial Sequence
  Synthetic oligonucleotide; AAG chr11 5384425 5384444 5384441 +
cacagaaccagagccagaga

SEQ ID NO: 27137 - DNA, 20 bp, Artificial Sequence
  Synthetic oligonucleotide; CAG chr11 5384430 5384449 5384446 +
aaccagagccagagaaagaa

SEQ ID NO: 27138 - DNA, 20 bp, Artificial Sequence
  Synthetic oligonucleotide; CAG chr11 5384437 5384456 5384453 +
gccagagaaagaacagaaaa

SEQ ID NO: 27139 - DNA, 20 bp, Artificial Sequence
  Synthetic oligonucleotide; AGG chr11 5384438 5384457 5384454 +
ccagagaaagaacagaaaac

SEQ ID NO: 27140 - DNA, 20 bp, Artificial Sequence
  Synthetic oligonucleotide; TGG chr11 5384453 5384472 5384469 +
aaaacaggaccttctcttgc

SEQ ID NO: 27141 - DNA, 20 bp, Artificial Sequence
  Synthetic oligonucleotide; AAG chr11 5384458 5384477 5384474 +
aggaccttctcttgctggaa

SEQ ID NO: 27142 - DNA, 20 bp, Artificial Sequence
  Synthetic oligonucleotide; GAG chr11 5384460 5384479 5384476 +
gaccttctcttgctggaaaa

SEQ ID NO: 27143 - DNA, 20 bp, Artificial Sequence
  Synthetic oligonucleotide; AGG chr11 5384461 5384480 5384477 +
accttctcttgctggaaaag

SEQ ID NO: 27144 - DNA, 20 bp, Artificial Sequence
  Synthetic oligonucleotide; GAG chr11 5384465 5384484 5384481 +
tctcttgctggaaaagaggc

SEQ ID NO: 27145 - DNA, 20 bp, Artificial Sequence
  Synthetic oligonucleotide; CAG chr11 5384476 5384495 5384492 +
aaaagaggcgagctcatctg

SEQ ID NO: 27146 - DNA, 20 bp, Artificial Sequence
  Synthetic oligonucleotide; TAG chr11 5384487 5384506 5384503 +
gctcatctgcagtattctgt

SEQ ID NO: 27147 - DNA, 20 bp, Artificial Sequence
  Synthetic oligonucleotide; AGG chr11 5384488 5384507 5384504 +
ctcatctgcagtattctgtt

SEQ ID NO: 27148 - DNA, 20 bp, Artificial Sequence
  Synthetic oligonucleotide; AAG chr11 5384491 5384510 5384507 +
atctgcagtattctgttagg

SEQ ID NO: 27149 - DNA, 20 bp, Artificial Sequence
  Synthetic oligonucleotide; AGG chr11 5384492 5384511 5384508 +
tctgcagtattctgttagga

SEQ ID NO: 27150 - DNA, 20 bp, Artificial Sequence
  Synthetic oligonucleotide; CAG chr11 5384496 5384515 5384512 +
cagtattctgttaggaaggc

SEQ ID NO: 27151 - DNA, 20 bp, Artificial Sequence
  Synthetic oligonucleotide; AGG chr11 5384497 5384516 5384513 +
agtattctgttaggaaggcc

SEQ ID NO: 27152 - DNA, 20 bp, Artificial Sequence
  Synthetic oligonucleotide; GAG chr11 5384499 5384518 5384515 +
tattctgttaggaaggccag

SEQ ID NO: 27153 - DNA, 20 bp, Artificial Sequence
  Synthetic oligonucleotide; AGG chr11 5384500 5384519 5384516 +
attctgttaggaaggccagg

SEQ ID NO: 27154 - DNA, 20 bp, Artificial Sequence
  Synthetic oligonucleotide; CAG chr11 5384503 5384522 5384519 +
ctgttaggaaggccaggagg

SEQ ID NO: 27155 - DNA, 20 bp, Artificial Sequence
  Synthetic oligonucleotide; AGG chr11 5384504 5384523 5384520 +
tgttaggaaggccaggaggc

SEQ ID NO: 27156 - DNA, 20 bp, Artificial Sequence
  Synthetic oligonucleotide; GGG chr11 5384505 5384524 5384521 +
gttaggaaggccaggaggca

SEQ ID NO: 27157 - DNA, 20 bp, Artificial Sequence
  Synthetic oligonucleotide; GAG chr11 5384526 5384545 5384542 +
ggctgcctcactcccctgat

SEQ ID NO: 27158 - DNA, 20 bp, Artificial Sequence
  Synthetic oligonucleotide; TGG chr11 5384537 5384556 5384553 +
tcccctgatgagtgcctgca

SEQ ID NO: 27159 - DNA, 20 bp, Artificial Sequence
  Synthetic oligonucleotide; CAG chr11 5384541 5384560 5384557 +
ctgatgagtgcctgcatggc

SEQ ID NO: 27160 - DNA, 20 bp, Artificial Sequence
  Synthetic oligonucleotide; AGG chr11 5384542 5384561 5384558 +
tgatgagtgcctgcatggcc

SEQ ID NO: 27161 - DNA, 20 bp, Artificial Sequence
  Synthetic oligonucleotide; CAG chr11 5384546 5384565 5384562 +
gagtgcctgcatggccaggc

SEQ ID NO: 27162 - DNA, 20 bp, Artificial Sequence
  Synthetic oligonucleotide; TGG chr11 5384557 5384576 5384573 +
tggccaggccagcccctccc

SEQ ID NO: 27163 - DNA, 20 bp, Artificial Sequence
  Synthetic oligonucleotide; TAG chr11 5384568 5384587 5384584 +
gcccctccctggatcatgtc

SEQ ID NO: 27164 - DNA, 20 bp, Artificial Sequence
  Synthetic oligonucleotide; AAG chr11 5384571 5384590 5384587 +
cctccctggatcatgtctag

SEQ ID NO: 27165 - DNA, 20 bp, Artificial Sequence
  Synthetic oligonucleotide; CAG chr11 5384575 5384594 5384591 +
cctggatcatgtctagaagt

SEQ ID NO: 27166 - DNA, 20 bp, Artificial Sequence
  Synthetic oligonucleotide; AGG chr11 5384576 5384595 5384592 +
ctggatcatgtctagaagtc

SEQ ID NO: 27167 - DNA, 20 bp, Artificial Sequence
  Synthetic oligonucleotide; TGG chr11 5384580 5384599 5384596 +
atcatgtctagaagtcagga

SEQ ID NO: 27168 - DNA, 20 bp, Artificial Sequence
  Synthetic oligonucleotide; CAG chr11 5384583 5384602 5384599 +
atgtctagaagtcaggatgg

SEQ ID NO: 27169 - DNA, 20 bp, Artificial Sequence
  Synthetic oligonucleotide; AAG chr11 5384586 5384605 5384602 +
tctagaagtcaggatggcag

SEQ ID NO: 27170 - DNA, 20 bp, Artificial Sequence
  Synthetic oligonucleotide; TGG chr11 5384594 5384613 5384610 +
tcaggatggcagaagccctc

SEQ ID NO: 27171 - DNA, 20 bp, Artificial Sequence
  Synthetic oligonucleotide; GAG chr11 5384617 5384636 5384633 +
tctctatactctttcctgcc

SEQ ID NO: 27172 - DNA, 20 bp, Artificial Sequence
  Synthetic oligonucleotide; TGG chr11 5384625 5384644 5384641 +
ctctttcctgccgagccatc

SEQ ID NO: 27173 - DNA, 20 bp, Artificial Sequence
  Synthetic oligonucleotide; CAG chr11 5384654 5384673 5384670 +
caccctctccttactctcat

SEQ ID NO: 27174 - DNA, 20 bp, Artificial Sequence
  Synthetic oligonucleotide; CAG chr11 5384662 5384681 5384678 +
ccttactctcatcagaaaaa

SEQ ID NO: 27175 - DNA, 20 bp, Artificial Sequence
  Synthetic oligonucleotide; TGG chr11 5384707 5384726 5384723 +
attaaatgcattttatatgc

SEQ ID NO: 27176 - DNA, 20 bp, Artificial Sequence
  Synthetic oligonucleotide; CAG chr11 5384712 5384731 5384728 +
atgcattttatatgctggtc

SEQ ID NO: 27177 - DNA, 20 bp, Artificial Sequence
  Synthetic oligonucleotide; TAG chr11 5384721 5384740 5384737 +
atatgctggtccagttaaca

SEQ ID NO: 27178 - DNA, 20 bp, Artificial Sequence
  Synthetic oligonucleotide; AAG chr11 5384726 5384745 5384742 +
ctggtccagttaacatagaa

SEQ ID NO: 27179 - DNA, 20 bp, Artificial Sequence
  Synthetic oligonucleotide; CAG chr11 5384781 5384800 5384797 +
acaacaccttgtaacttccc

SEQ ID NO: 27180 - DNA, 20 bp, Artificial Sequence
  Synthetic oligonucleotide; CAG chr11 5384788 5384807 5384804 +
cttgtaacttccccagtatc

SEQ ID NO: 27181 - DNA, 20 bp, Artificial Sequence
  Synthetic oligonucleotide; AGG chr11 5384789 5384808 5384805 +
ttgtaacttccccagtatcc

SEQ ID NO: 27182 - DNA, 20 bp, Artificial Sequence
  Synthetic oligonucleotide; TGG chr11 5384795 5384814 5384811 +
cttccccagtatccaggata

SEQ ID NO: 27183 - DNA, 20 bp, Artificial Sequence
  Synthetic oligonucleotide; CAG chr11 5384836 5384855 5384852 +
ctcctctatcctactaaaaa

SEQ ID NO: 27184 - DNA, 20 bp, Artificial Sequence
  Synthetic oligonucleotide; AGG chr11 5384837 5384856 5384853 +
tcctctatcctactaaaaac

SEQ ID NO: 27185 - DNA, 20 bp, Artificial Sequence
  Synthetic oligonucleotide; CAG chr11 5384848 5384867 5384864 +
actaaaaacaggcatgttta

SEQ ID NO: 27186 - DNA, 20 bp, Artificial Sequence
  Synthetic oligonucleotide; GAG chr11 5384853 5384872 5384869 +
aaacaggcatgtttacagat

SEQ ID NO: 27187 - DNA, 20 bp, Artificial Sequence
  Synthetic oligonucleotide; TGG chr11 5384867 5384886 5384883 +
acagatgagtttgaccactg

SEQ ID NO: 27188 - DNA, 20 bp, Artificial Sequence
  Synthetic oligonucleotide; TAG chr11 5384880 5384899 5384896 +
accactgtggaaatgttctc

SEQ ID NO: 27189 - DNA, 20 bp, Artificial Sequence
  Synthetic oligonucleotide; AGG chr11 5384881 5384900 5384897 +
ccactgtggaaatgttctct

SEQ ID NO: 27190 - DNA, 20 bp, Artificial Sequence
  Synthetic oligonucleotide; GGG chr11 5384882 5384901 5384898 +
cactgtggaaatgttctcta

SEQ ID NO: 27191 - DNA, 20 bp, Artificial Sequence
  Synthetic oligonucleotide; GGG chr11 5384883 5384902 5384899 +
actgtggaaatgttctctag

SEQ ID NO: 27192 - DNA, 20 bp, Artificial Sequence
  Synthetic oligonucleotide; TGG chr11 5384903 5384922 5384919 +
gggttcaaaaatgaataatc

SEQ ID NO: 27193 - DNA, 20 bp, Artificial Sequence
  Synthetic oligonucleotide; AAG chr11 5384909 5384928 5384925 +
aaaaatgaataatctggttc

SEQ ID NO: 27194 - DNA, 20 bp, Artificial Sequence
  Synthetic oligonucleotide; TAG chr11 5384922 5384941 5384938 +
ctggttcaagtccttgtgtt

SEQ ID NO: 27195 - DNA, 20 bp, Artificial Sequence
  Synthetic oligonucleotide; AGG chr11 5384923 5384942 5384939 +
tggttcaagtccttgtgttt

SEQ ID NO: 27196 - DNA, 20 bp, Artificial Sequence
  Synthetic oligonucleotide; CAG chr11 5384928 5384947 5384944 +
caagtccttgtgtttaggtg

SEQ ID NO: 27197 - DNA, 20 bp, Artificial Sequence
  Synthetic oligonucleotide; AAG chr11 5384957 5384976 5384973 +
ttgcatattctcctatttac

SEQ ID NO: 27198 - DNA, 20 bp, Artificial Sequence
  Synthetic oligonucleotide; CAG chr11 5384963 5384982 5384979 +
attctcctatttacaagaaa

SEQ ID NO: 27199 - DNA, 20 bp, Artificial Sequence
  Synthetic oligonucleotide; TAG chr11 5384981 5385000 5384997 +
aacagtatcctccaccaatg

SEQ ID NO: 27200 - DNA, 20 bp, Artificial Sequence
  Synthetic oligonucleotide; AAG chr11 5385019 5385038 5385035 +
ctaatattaaattcaaacaa

SEQ ID NO: 27201 - DNA, 20 bp, Artificial Sequence
  Synthetic oligonucleotide; TAG chr11 5385028 5385047 5385044 +
aattcaaacaaaagaatatt

SEQ ID NO: 27202 - DNA, 20 bp, Artificial Sequence
  Synthetic oligonucleotide; CAG chr11 5385034 5385053 5385050 +
aacaaaagaatatttagaca

SEQ ID NO: 27203 - DNA, 20 bp, Artificial Sequence
  Synthetic oligonucleotide; AGG chr11 5385035 5385054 5385051 +
acaaaagaatatttagacac

SEQ ID NO: 27204 - DNA, 20 bp, Artificial Sequence
  Synthetic oligonucleotide; GAG chr11 5385039 5385058 5385055 +
aagaatatttagacacaggt

SEQ ID NO: 27205 - DNA, 20 bp, Artificial Sequence
  Synthetic oligonucleotide; AGG chr11 5385040 5385059 5385056 +
agaatatttagacacaggtg

SEQ ID NO: 27206 - DNA, 20 bp, Artificial Sequence
  Synthetic oligonucleotide; TAG chr11 5385043 5385062 5385059 +
atatttagacacaggtgagg

SEQ ID NO: 27207 - DNA, 20 bp, Artificial Sequence
  Synthetic oligonucleotide; GAG chr11 5385045 5385064 5385061 +
atttagacacaggtgaggta

SEQ ID NO: 27208 - DNA, 20 bp, Artificial Sequence
  Synthetic oligonucleotide; GAG chr11 5385047 5385066 5385063 +
ttagacacaggtgaggtaga

SEQ ID NO: 27209 - DNA, 20 bp, Artificial Sequence
  Synthetic oligonucleotide; CAG chr11 5385083 5385102 5385099 +
gtatactgaaaatctctttt

SEQ ID NO: 27210 - DNA, 20 bp, Artificial Sequence
  Synthetic oligonucleotide; AGG chr11 5385084 5385103 5385100 +
tatactgaaaatctcttttc

SEQ ID NO: 27211 - DNA, 20 bp, Artificial Sequence
  Synthetic oligonucleotide; AAG chr11 5385105 5385124 5385121 +
ggaattttctcctgtgatct

SEQ ID NO: 27212 - DNA, 20 bp, Artificial Sequence
  Synthetic oligonucleotide; TAG chr11 5385149 5385168 5385165 +
tattttaattatgttgtaat

SEQ ID NO: 27213 - DNA, 20 bp, Artificial Sequence
  Synthetic oligonucleotide; GAG chr11 5385169 5385188 5385185 +
tagatgtaactgactgctct

SEQ ID NO: 27214 - DNA, 20 bp, Artificial Sequence
  Synthetic oligonucleotide; TGG chr11 5385172 5385191 5385188 +
atgtaactgactgctctgag

SEQ ID NO: 27215 - DNA, 20 bp, Artificial Sequence
  Synthetic oligonucleotide; TAG chr11 5385189 5385208 5385205 +
gagtggactcctccattgct

SEQ ID NO: 27216 - DNA, 20 bp, Artificial Sequence
  Synthetic oligonucleotide; TAG chr11 5385192 5385211 5385208 +
tggactcctccattgcttag

SEQ ID NO: 27217 - DNA, 20 bp, Artificial Sequence
  Synthetic oligonucleotide; TGG chr11 5385226 5385245 5385242 +
tgactgttgctctcctatca

SEQ ID NO: 27218 - DNA, 20 bp, Artificial Sequence
  Synthetic oligonucleotide; TAG chr11 5385246 5385265 5385262 +
tggataattatctctcttgc

SEQ ID NO: 27219 - DNA, 20 bp, Artificial Sequence
  Synthetic oligonucleotide; AGG chr11 5385247 5385266 5385263 +
ggataattatctctcttgct

SEQ ID NO: 27220 - DNA, 20 bp, Artificial Sequence
  Synthetic oligonucleotide; GAG chr11 5385249 5385268 5385265 +
ataattatctctcttgctag

SEQ ID NO: 27221 - DNA, 20 bp, Artificial Sequence
  Synthetic oligonucleotide; AAG chr11 5385262 5385281 5385278 +
ttgctaggagaaatccccta

SEQ ID NO: 27222 - DNA, 20 bp, Artificial Sequence
  Synthetic oligonucleotide; AAG chr11 5385275 5385294 5385291 +
tcccctaaagctttcttccc

SEQ ID NO: 27223 - DNA, 20 bp, Artificial Sequence
  Synthetic oligonucleotide; GAG chr11 5385277 5385296 5385293 +
ccctaaagctttcttcccaa

SEQ ID NO: 27224 - DNA, 20 bp, Artificial Sequence
  Synthetic oligonucleotide; AGG chr11 5385278 5385297 5385294 +
cctaaagctttcttcccaag

SEQ ID NO: 27225 - DNA, 20 bp, Artificial Sequence
  Synthetic oligonucleotide; AAG chr11 5385281 5385300 5385297 +
aaagctttcttcccaagagg

SEQ ID NO: 27226 - DNA, 20 bp, Artificial Sequence
  Synthetic oligonucleotide; AAG chr11 5385294 5385313 5385310 +
caagaggaagtatactttcc

SEQ ID NO: 27227 - DNA, 20 bp, Artificial Sequence
  Synthetic oligonucleotide; GAG chr11 5385296 5385315 5385312 +
agaggaagtatactttccaa

SEQ ID NO: 27228 - DNA, 20 bp, Artificial Sequence
  Synthetic oligonucleotide; CAG chr11 5385308 5385327 5385324 +
ctttccaagagaaataatcc

SEQ ID NO: 27229 - DNA, 20 bp, Artificial Sequence
  Synthetic oligonucleotide; TAG chr11 5385330 5385349 5385346 +
gccctgtcattgtctctgta

SEQ ID NO: 27230 - DNA, 20 bp, Artificial Sequence
  Synthetic oligonucleotide; CAG chr11 5385348 5385367 5385364 +
tatagacatcttgtttctac

SEQ ID NO: 27231 - DNA, 20 bp, Artificial Sequence
  Synthetic oligonucleotide; AAG chr11 5385381 5385400 5385397 +
ctgtccatctcatcactctg

SEQ ID NO: 27232 - DNA, 20 bp, Artificial Sequence
  Synthetic oligonucleotide; TGG chr11 5385385 5385404 5385401 +
ccatctcatcactctgaagt

SEQ ID NO: 27233 - DNA, 20 bp, Artificial Sequence
  Synthetic oligonucleotide; CAG chr11 5385394 5385413 5385410 +
cactctgaagttggtgaaca

SEQ ID NO: 27234 - DNA, 20 bp, Artificial Sequence
  Synthetic oligonucleotide; GAG chr11 5385396 5385415 5385412 +
ctctgaagttggtgaacaca

SEQ ID NO: 27235 - DNA, 20 bp, Artificial Sequence
  Synthetic oligonucleotide; CAG chr11 5385406 5385425 5385422 +
ggtgaacacagagctgacaa

SEQ ID NO: 27236 - DNA, 20 bp, Artificial Sequence
  Synthetic oligonucleotide; CAG chr11 5385414 5385433 5385430 +
cagagctgacaacagaaccc

SEQ ID NO: 27237 - DNA, 20 bp, Artificial Sequence
  Synthetic oligonucleotide; AGG chr11 5385415 5385434 5385431 +
agagctgacaacagaacccc

SEQ ID NO: 27238 - DNA, 20 bp, Artificial Sequence
  Synthetic oligonucleotide; AAG chr11 5385422 5385441 5385438 +
acaacagaaccccaggcaca

SEQ ID NO: 27239 - DNA, 20 bp, Artificial Sequence
  Synthetic oligonucleotide; CAG chr11 5385428 5385447 5385444 +
gaaccccaggcacaaagaat

SEQ ID NO: 27240 - DNA, 20 bp, Artificial Sequence
  Synthetic oligonucleotide; AGG chr11 5385429 5385448 5385445 +
aaccccaggcacaaagaatc

SEQ ID NO: 27241 - DNA, 20 bp, Artificial Sequence
  Synthetic oligonucleotide; AAG chr11 5385434 5385453 5385450 +
caggcacaaagaatcaggat

SEQ ID NO: 27242 - DNA, 20 bp, Artificial Sequence
  Synthetic oligonucleotide; GAG chr11 5385436 5385455 5385452 +
ggcacaaagaatcaggataa

SEQ ID NO: 27243 - DNA, 20 bp, Artificial Sequence
  Synthetic oligonucleotide; AGG chr11 5385437 5385456 5385453 +
gcacaaagaatcaggataag

SEQ ID NO: 27244 - DNA, 20 bp, Artificial Sequence
  Synthetic oligonucleotide; GAG chr11 5385441 5385460 5385457 +
aaagaatcaggataagaggt

SEQ ID NO: 27245 - DNA, 20 bp, Artificial Sequence
  Synthetic oligonucleotide; TAG chr11 5385465 5385484 5385481 +
actttatttattcacccatt

SEQ ID NO: 27246 - DNA, 20 bp, Artificial Sequence
  Synthetic oligonucleotide; TAG chr11 5385493 5385512 5385509 +
catgcaaaaaaatatatata

SEQ ID NO: 27247 - DNA, 20 bp, Artificial Sequence
  Synthetic oligonucleotide; TGG chr11 5385496 5385515 5385512 +
gcaaaaaaatatatatatag

SEQ ID NO: 27248 - DNA, 20 bp, Artificial Sequence
  Synthetic oligonucleotide; TAG chr11 5385513 5385532 5385529 +
tagtggtacctaccacatct

SEQ ID NO: 27249 - DNA, 20 bp, Artificial Sequence
  Synthetic oligonucleotide; CAG chr11 5385523 5385542 5385539 +
taccacatcttagacactgt

SEQ ID NO: 27250 - DNA, 20 bp, Artificial Sequence
  Synthetic oligonucleotide; AGG chr11 5385524 5385543 5385540 +
accacatcttagacactgtc

SEQ ID NO: 27251 - DNA, 20 bp, Artificial Sequence
  Synthetic oligonucleotide; CAG chr11 5385530 5385549 5385546 +
tcttagacactgtcaggctc

SEQ ID NO: 27252 - DNA, 20 bp, Artificial Sequence
  Synthetic oligonucleotide; AGG chr11 5385531 5385550 5385547 +
cttagacactgtcaggctcc

SEQ ID NO: 27253 - DNA, 20 bp, Artificial Sequence
  Synthetic oligonucleotide; GGG chr11 5385532 5385551 5385548 +
ttagacactgtcaggctcca

SEQ ID NO: 27254 - DNA, 20 bp, Artificial Sequence
  Synthetic oligonucleotide; GGG chr11 5385533 5385552 5385549 +
tagacactgtcaggctccag

SEQ ID NO: 27255 - DNA, 20 bp, Artificial Sequence
  Synthetic oligonucleotide; TAG chr11 5385540 5385559 5385556 +
tgtcaggctccaggggcctt

SEQ ID NO: 27256 - DNA, 20 bp, Artificial Sequence
  Synthetic oligonucleotide; GAG chr11 5385542 5385561 5385558 +
tcaggctccaggggccttta

SEQ ID NO: 27257 - DNA, 20 bp, Artificial Sequence
  Synthetic oligonucleotide; CAG chr11 5385550 5385569 5385566 +
caggggcctttagagaattc

SEQ ID NO: 27258 - DNA, 20 bp, Artificial Sequence
  Synthetic oligonucleotide; TAG chr11 5385579 5385598 5385595 +
caacttaaaaaatgaattat

SEQ ID NO: 27259 - DNA, 20 bp, Artificial Sequence
  Synthetic oligonucleotide; AGG chr11 5385580 5385599 5385596 +
aacttaaaaaatgaattatt

SEQ ID NO: 27260 - DNA, 20 bp, Artificial Sequence
  Synthetic oligonucleotide; TGG chr11 5385584 5385603 5385600 +
taaaaaatgaattattaggt

SEQ ID NO: 27261 - DNA, 20 bp, Artificial Sequence
  Synthetic oligonucleotide; TGG chr11 5385598 5385617 5385614 +
ttaggttggtgaaaaattaa

SEQ ID NO: 27262 - DNA, 20 bp, Artificial Sequence
  Synthetic oligonucleotide; CAG chr11 5385601 5385620 5385617 +
ggttggtgaaaaattaatgg

SEQ ID NO: 27263 - DNA, 20 bp, Artificial Sequence
  Synthetic oligonucleotide; AAG chr11 5385644 5385663 5385660 +
tgttctaaacatgtataata

SEQ ID NO: 27264 - DNA, 20 bp, Artificial Sequence
  Synthetic oligonucleotide; AAG chr11 5385686 5385705 5385702 +
tataatatatatgttgtaca

SEQ ID NO: 27265 - DNA, 20 bp, Artificial Sequence
  Synthetic oligonucleotide; CAG chr11 5385748 5385767 5385764 +
tgtttacatatataaatata

SEQ ID NO: 27266 - DNA, 20 bp, Artificial Sequence
  Synthetic oligonucleotide; AAG chr11 5385794 5385813 5385810 +
ttatatataaaaaatctata

SEQ ID NO: 27267 - DNA, 20 bp, Artificial Sequence
  Synthetic oligonucleotide; AAG chr11 5385803 5385822 5385819 +
aaaaatctataaagtatata

SEQ ID NO: 27268 - DNA, 20 bp, Artificial Sequence
  Synthetic oligonucleotide; AAG chr11 5385842 5385861 5385858 +
actaaaatgtatattctata

SEQ ID NO: 27269 - DNA, 20 bp, Artificial Sequence
  Synthetic oligonucleotide; GAG chr11 5385852 5385871 5385868 +
atattctataaagtatttat

SEQ ID NO: 27270 - DNA, 20 bp, Artificial Sequence
  Synthetic oligonucleotide; TGG chr11 5385906 5385925 5385922 +
tatacatatgtgtacttata

SEQ ID NO: 27271 - DNA, 20 bp, Artificial Sequence
  Synthetic oligonucleotide; AAG chr11 5385915 5385934 5385931 +
gtgtacttatatggatgtat

SEQ ID NO: 27272 - DNA, 20 bp, Artificial Sequence
  Synthetic oligonucleotide; AAG chr11 5385940 5385959 5385956 +
tgttctatatatatatcaat

SEQ ID NO: 27273 - DNA, 20 bp, Artificial Sequence
  Synthetic oligonucleotide; AAG chr11 5385965 5385984 5385981 +
tatataaatataaaaatata

SEQ ID NO: 27274 - DNA, 20 bp, Artificial Sequence
  Synthetic oligonucleotide; TAG chr11 5385994 5386013 5386010 +
tgtgtgtatttacaccttaa

SEQ ID NO: 27275 - DNA, 20 bp, Artificial Sequence
  Synthetic oligonucleotide; CAG chr11 5386004 5386023 5386020 +
tacaccttaatagtacatta

SEQ ID NO: 27276 - DNA, 20 bp, Artificial Sequence
  Synthetic oligonucleotide; AGG chr11 5386005 5386024 5386021 +
acaccttaatagtacattac

SEQ ID NO: 27277 - DNA, 20 bp, Artificial Sequence
  Synthetic oligonucleotide; GAG chr11 5386016 5386035 5386032 +
gtacattacaggtactacgt

SEQ ID NO: 27278 - DNA, 20 bp, Artificial Sequence
  Synthetic oligonucleotide; CAG chr11 5386021 5386040 5386037 +
ttacaggtactacgtgagaa

SEQ ID NO: 27279 - DNA, 20 bp, Artificial Sequence
  Synthetic oligonucleotide; GAG chr11 5386023 5386042 5386039 +
acaggtactacgtgagaaca

SEQ ID NO: 27280 - DNA, 20 bp, Artificial Sequence
  Synthetic oligonucleotide; AAG chr11 5386027 5386046 5386043 +
gtactacgtgagaacagaga

SEQ ID NO: 27281 - DNA, 20 bp, Artificial Sequence
  Synthetic oligonucleotide; CAG chr11 5386045 5386064 5386061 +
gaaagatgtacctaatgcta

SEQ ID NO: 27282 - DNA, 20 bp, Artificial Sequence
  Synthetic oligonucleotide; AAG chr11 5386048 5386067 5386064 +
agatgtacctaatgctacag

SEQ ID NO: 27283 - DNA, 20 bp, Artificial Sequence
  Synthetic oligonucleotide; AGG chr11 5386049 5386068 5386065 +
gatgtacctaatgctacaga

SEQ ID NO: 27284 - DNA, 20 bp, Artificial Sequence
  Synthetic oligonucleotide; AAG chr11 5386052 5386071 5386068 +
gtacctaatgctacagaagg

SEQ ID NO: 27285 - DNA, 20 bp, Artificial Sequence
  Synthetic oligonucleotide; CAG chr11 5386056 5386075 5386072 +
ctaatgctacagaaggaagt

SEQ ID NO: 27286 - DNA, 20 bp, Artificial Sequence
  Synthetic oligonucleotide; AGG chr11 5386057 5386076 5386073 +
taatgctacagaaggaagtc

SEQ ID NO: 27287 - DNA, 20 bp, Artificial Sequence
  Synthetic oligonucleotide; GAG chr11 5386059 5386078 5386075 +
atgctacagaaggaagtcag

SEQ ID NO: 27288 - DNA, 20 bp, Artificial Sequence
  Synthetic oligonucleotide; GAG chr11 5386061 5386080 5386077 +
gctacagaaggaagtcagga

SEQ ID NO: 27289 - DNA, 20 bp, Artificial Sequence
  Synthetic oligonucleotide; CAG chr11 5386070 5386089 5386086 +
ggaagtcaggagagatttga

SEQ ID NO: 27290 - DNA, 20 bp, Artificial Sequence
  Synthetic oligonucleotide; AAG chr11 5386073 5386092 5386089 +
agtcaggagagatttgacag

SEQ ID NO: 27291 - DNA, 20 bp, Artificial Sequence
  Synthetic oligonucleotide; AAG chr11 5386076 5386095 5386092 +
caggagagatttgacagaag

SEQ ID NO: 27292 - DNA, 20 bp, Artificial Sequence
  Synthetic oligonucleotide; AAG chr11 5386092 5386111 5386108 +
gaagaagtgatatttgtact

SEQ ID NO: 27293 - DNA, 20 bp, Artificial Sequence
  Synthetic oligonucleotide; AAG chr11 5386100 5386119 5386116 +
gatatttgtactaagtctta

SEQ ID NO: 27294 - DNA, 20 bp, Artificial Sequence
  Synthetic oligonucleotide; AGG chr11 5386101 5386120 5386117 +
atatttgtactaagtcttaa

SEQ ID NO: 27295 - DNA, 20 bp, Artificial Sequence
  Synthetic oligonucleotide; AAG chr11 5386110 5386129 5386126 +
ctaagtcttaaaggatccgc

SEQ ID NO: 27296 - DNA, 20 bp, Artificial Sequence
  Synthetic oligonucleotide; TGG chr11 5386120 5386139 5386136 +
aaggatccgcaagtgtttac

SEQ ID NO: 27297 - DNA, 20 bp, Artificial Sequence
  Synthetic oligonucleotide; TGG chr11 5386124 5386143 5386140 +
atccgcaagtgtttactggt

SEQ ID NO: 27298 - DNA, 20 bp, Artificial Sequence
  Synthetic oligonucleotide; CAG chr11 5386132 5386151 5386148 +
gtgtttactggttggaaaaa

SEQ ID NO: 27299 - DNA, 20 bp, Artificial Sequence
  Synthetic oligonucleotide; AGG chr11 5386133 5386152 5386149 +
tgtttactggttggaaaaac

SEQ ID NO: 27300 - DNA, 20 bp, Artificial Sequence
  Synthetic oligonucleotide; GGG chr11 5386134 5386153 5386150 +
gtttactggttggaaaaaca

SEQ ID NO: 27301 - DNA, 20 bp, Artificial Sequence
  Synthetic oligonucleotide; GGG chr11 5386135 5386154 5386151 +
tttactggttggaaaaacag

SEQ ID NO: 27302 - DNA, 20 bp, Artificial Sequence
  Synthetic oligonucleotide; TGG chr11 5386138 5386157 5386154 +
actggttggaaaaacagggg

SEQ ID NO: 27303 - DNA, 20 bp, Artificial Sequence
  Synthetic oligonucleotide; AAG chr11 5386149 5386168 5386165 +
aaacaggggtggtttttgcc

SEQ ID NO: 27304 - DNA, 20 bp, Artificial Sequence
  Synthetic oligonucleotide; AAG chr11 5386153 5386172 5386169 +
aggggtggtttttgccaaga

SEQ ID NO: 27305 - DNA, 20 bp, Artificial Sequence
  Synthetic oligonucleotide; TAG chr11 5386165 5386184 5386181 +
tgccaagaaagcaataaata

SEQ ID NO: 27306 - DNA, 20 bp, Artificial Sequence
  Synthetic oligonucleotide; AAG chr11 5386168 5386187 5386184 +
caagaaagcaataaatatag

SEQ ID NO: 27307 - DNA, 20 bp, Artificial Sequence
  Synthetic oligonucleotide; AAG chr11 5386180 5386199 5386196 +
aaatatagaagaataaaaac

SEQ ID NO: 27308 - DNA, 20 bp, Artificial Sequence
  Synthetic oligonucleotide; AAG chr11 5386185 5386204 5386201 +
tagaagaataaaaacaagaa

SEQ ID NO: 27309 - DNA, 20 bp, Artificial Sequence
  Synthetic oligonucleotide; TAG chr11 5386194 5386213 5386210 +
aaaaacaagaaaagtatgtg

SEQ ID NO: 27310 - DNA, 20 bp, Artificial Sequence
  Synthetic oligonucleotide; AGG chr11 5386195 5386214 5386211 +
aaaacaagaaaagtatgtgt

SEQ ID NO: 27311 - DNA, 20 bp, Artificial Sequence
  Synthetic oligonucleotide; GGG chr11 5386196 5386215 5386212 +
aaacaagaaaagtatgtgta

SEQ ID NO: 27312 - DNA, 20 bp, Artificial Sequence
  Synthetic oligonucleotide; AAG chr11 5386204 5386223 5386220 +
aaagtatgtgtagggaattg

SEQ ID NO: 27313 - DNA, 20 bp, Artificial Sequence
  Synthetic oligonucleotide; TGG chr11 5386219 5386238 5386235 +
aattgaagaaaaaaatgata

SEQ ID NO: 27314 - DNA, 20 bp, Artificial Sequence
  Synthetic oligonucleotide; GGG chr11 5386220 5386239 5386236 +
attgaagaaaaaaatgatat

SEQ ID NO: 27315 - DNA, 20 bp, Artificial Sequence
  Synthetic oligonucleotide; TGG chr11 5386232 5386251 5386248 +
aatgatatgggtgtgttgac

SEQ ID NO: 27316 - DNA, 20 bp, Artificial Sequence
  Synthetic oligonucleotide; GGG chr11 5386233 5386252 5386249 +
atgatatgggtgtgttgact

SEQ ID NO: 27317 - DNA, 20 bp, Artificial Sequence
  Synthetic oligonucleotide; AAG chr11 5386238 5386257 5386254 +
atgggtgtgttgactgggaa

SEQ ID NO: 27318 - DNA, 20 bp, Artificial Sequence
  Synthetic oligonucleotide; TGG chr11 5386242 5386261 5386258 +
gtgtgttgactgggaaaaga

SEQ ID NO: 27319 - DNA, 20 bp, Artificial Sequence
  Synthetic oligonucleotide; GGG chr11 5386243 5386262 5386259 +
tgtgttgactgggaaaagat

SEQ ID NO: 27320 - DNA, 20 bp, Artificial Sequence
  Synthetic oligonucleotide; TGG chr11 5386248 5386267 5386264 +
tgactgggaaaagatgggtt

SEQ ID NO: 27321 - DNA, 20 bp, Artificial Sequence
  Synthetic oligonucleotide; AAG chr11 5386252 5386271 5386268 +
tgggaaaagatgggtttgga

SEQ ID NO: 27322 - DNA, 20 bp, Artificial Sequence
  Synthetic oligonucleotide; AGG chr11 5386253 5386272 5386269 +
gggaaaagatgggtttggaa

SEQ ID NO: 27323 - DNA, 20 bp, Artificial Sequence
  Synthetic oligonucleotide; AAG chr11 5386265 5386284 5386281 +
gtttggaaaggtgccaaaac

SEQ ID NO: 27324 - DNA, 20 bp, Artificial Sequence
  Synthetic oligonucleotide; AAG chr11 5386268 5386287 5386284 +
tggaaaggtgccaaaacaag

SEQ ID NO: 27325 - DNA, 20 bp, Artificial Sequence
  Synthetic oligonucleotide; AGG chr11 5386269 5386288 5386285 +
ggaaaggtgccaaaacaaga

SEQ ID NO: 27326 - DNA, 20 bp, Artificial Sequence
  Synthetic oligonucleotide; CGG chr11 5386274 5386293 5386290 +
ggtgccaaaacaagaaggac

SEQ ID NO: 27327 - DNA, 20 bp, Artificial Sequence
  Synthetic oligonucleotide; GGG chr11 5386275 5386294 5386291 +
gtgccaaaacaagaaggacc

SEQ ID NO: 27328 - DNA, 20 bp, Artificial Sequence
  Synthetic oligonucleotide; AAG chr11 5386281 5386300 5386297 +
aaacaagaaggaccgggcta

SEQ ID NO: 27329 - DNA, 20 bp, Artificial Sequence
  Synthetic oligonucleotide; TGG chr11 5386285 5386304 5386301 +
aagaaggaccgggctaaaga

SEQ ID NO: 27330 - DNA, 20 bp, Artificial Sequence
  Synthetic oligonucleotide; CAG chr11 5386293 5386312 5386309 +
ccgggctaaagatggtgtta

SEQ ID NO: 27331 - DNA, 20 bp, Artificial Sequence
  Synthetic oligonucleotide; AGG chr11 5386294 5386313 5386310 +
cgggctaaagatggtgttac

SEQ ID NO: 27332 - DNA, 20 bp, Artificial Sequence
  Synthetic oligonucleotide; GGG chr11 5386295 5386314 5386311 +
gggctaaagatggtgttaca

SEQ ID NO: 27333 - DNA, 20 bp, Artificial Sequence
  Synthetic oligonucleotide; GAG chr11 5386303 5386322 5386319 +
gatggtgttacagggtgttt

SEQ ID NO: 27334 - DNA, 20 bp, Artificial Sequence
  Synthetic oligonucleotide; AGG chr11 5386304 5386323 5386320 +
atggtgttacagggtgtttg

SEQ ID NO: 27335 - DNA, 20 bp, Artificial Sequence
  Synthetic oligonucleotide; CAG chr11 5386311 5386330 5386327 +
tacagggtgtttgaggctac

SEQ ID NO: 27336 - DNA, 20 bp, Artificial Sequence
  Synthetic oligonucleotide; AGG chr11 5386312 5386331 5386328 +
acagggtgtttgaggctacc

SEQ ID NO: 27337 - DNA, 20 bp, Artificial Sequence
  Synthetic oligonucleotide; GGG chr11 5386313 5386332 5386329 +
cagggtgtttgaggctacca

SEQ ID NO: 27338 - DNA, 20 bp, Artificial Sequence
  Synthetic oligonucleotide; TAG chr11 5386323 5386342 5386339 +
gaggctaccagggccatgca

SEQ ID NO: 27339 - DNA, 20 bp, Artificial Sequence
  Synthetic oligonucleotide; GAG chr11 5386325 5386344 5386341 +
ggctaccagggccatgcata

SEQ ID NO: 27340 - DNA, 20 bp, Artificial Sequence
  Synthetic oligonucleotide; GAG chr11 5386327 5386346 5386343 +
ctaccagggccatgcataga

SEQ ID NO: 27341 - DNA, 20 bp, Artificial Sequence
  Synthetic oligonucleotide; AAG chr11 5386333 5386352 5386349 +
gggccatgcatagagagaca

SEQ ID NO: 27342 - DNA, 20 bp, Artificial Sequence
  Synthetic oligonucleotide; AGG chr11 5386334 5386353 5386350 +
ggccatgcatagagagacaa

SEQ ID NO: 27343 - DNA, 20 bp, Artificial Sequence
  Synthetic oligonucleotide; CAG chr11 5386368 5386387 5386384 +
tcctgattttcgctcactac

SEQ ID NO: 27344 - DNA, 20 bp, Artificial Sequence
  Synthetic oligonucleotide; AGG chr11 5386369 5386388 5386385 +
cctgattttcgctcactacc

SEQ ID NO: 27345 - DNA, 20 bp, Artificial Sequence
  Synthetic oligonucleotide; TGG chr11 5386375 5386394 5386391 +
tttcgctcactaccaggcct

SEQ ID NO: 27346 - DNA, 20 bp, Artificial Sequence
  Synthetic oligonucleotide; GGG chr11 5386376 5386395 5386392 +
ttcgctcactaccaggcctt

SEQ ID NO: 27347 - DNA, 20 bp, Artificial Sequence
  Synthetic oligonucleotide; TAG chr11 5386398 5386417 5386414 +
gatgattgtttacctttttg

SEQ ID NO: 27348 - DNA, 20 bp, Artificial Sequence
  Synthetic oligonucleotide; AAG chr11 5386414 5386433 5386430 +
tttgtagttttctccttgtg

SEQ ID NO: 27349 - DNA, 20 bp, Artificial Sequence
  Synthetic oligonucleotide; TAG chr11 5386417 5386436 5386433 +
gtagttttctccttgtgaag

SEQ ID NO: 27350 - DNA, 20 bp, Artificial Sequence
  Synthetic oligonucleotide; TAG chr11 5386435 5386454 5386451 +
agtagtaataaaatgtttca

SEQ ID NO: 27351 - DNA, 20 bp, Artificial Sequence
  Synthetic oligonucleotide; AAG chr11 5386464 5386483 5386480 +
gaaatattcatgattatgtc

SEQ ID NO: 27352 - DNA, 20 bp, Artificial Sequence
  Synthetic oligonucleotide; CAG chr11 5386474 5386493 5386490 +
tgattatgtcaagcttttca

SEQ ID NO: 27353 - DNA, 20 bp, Artificial Sequence
  Synthetic oligonucleotide; TGG chr11 5386492 5386511 5386508 +
cacagcatctaaatcatgta

SEQ ID NO: 27354 - DNA, 20 bp, Artificial Sequence
  Synthetic oligonucleotide; TGG chr11 5386506 5386525 5386522 +
catgtatggcctcaataaat

SEQ ID NO: 27355 - DNA, 20 bp, Artificial Sequence
  Synthetic oligonucleotide; CAG chr11 5386519 5386538 5386535 +
aataaattggactatcacca

SEQ ID NO: 27356 - DNA, 20 bp, Artificial Sequence
  Synthetic oligonucleotide; AAG chr11 5386531 5386550 5386547 +
tatcaccacagatcttttac

SEQ ID NO: 27357 - DNA, 20 bp, Artificial Sequence
  Synthetic oligonucleotide; TAG chr11 5386554 5386573 5386570 +
tttgaactttattctaatga

SEQ ID NO: 27358 - DNA, 20 bp, Artificial Sequence
  Synthetic oligonucleotide; AGG chr11 5386555 5386574 5386571 +
ttgaactttattctaatgat

SEQ ID NO: 27359 - DNA, 20 bp, Artificial Sequence
  Synthetic oligonucleotide; GAG chr11 5386557 5386576 5386573 +
gaactttattctaatgatag

SEQ ID NO: 27360 - DNA, 20 bp, Artificial Sequence
  Synthetic oligonucleotide; AAG chr11 5386566 5386585 5386582 +
tctaatgataggagctactg

SEQ ID NO: 27361 - DNA, 20 bp, Artificial Sequence
  Synthetic oligonucleotide; CAG chr11 5386578 5386597 5386594 +
agctactgaagtactgaaaa

SEQ ID NO: 27362 - DNA, 20 bp, Artificial Sequence
  Synthetic oligonucleotide; CAG chr11 5386583 5386602 5386599 +
ctgaagtactgaaaacagtg

SEQ ID NO: 27363 - DNA, 20 bp, Artificial Sequence
  Synthetic oligonucleotide; TAG chr11 5386593 5386612 5386609 +
gaaaacagtgcagtgattca

SEQ ID NO: 27364 - DNA, 20 bp, Artificial Sequence
  Synthetic oligonucleotide; GAG chr11 5386595 5386614 5386611 +
aaacagtgcagtgattcata

SEQ ID NO: 27365 - DNA, 20 bp, Artificial Sequence
  Synthetic oligonucleotide; TAG chr11 5386599 5386618 5386615 +
agtgcagtgattcatagagt

SEQ ID NO: 27366 - DNA, 20 bp, Artificial Sequence
  Synthetic oligonucleotide; CGG chr11 5386619 5386638 5386635 +
tagtactttctgcataatct

SEQ ID NO: 27367 - DNA, 20 bp, Artificial Sequence
  Synthetic oligonucleotide; TGG chr11 5386622 5386641 5386638 +
tactttctgcataatctcgg

SEQ ID NO: 27368 - DNA, 20 bp, Artificial Sequence
  Synthetic oligonucleotide; CAG chr11 5386628 5386647 5386644 +
ctgcataatctcggtggctg

SEQ ID NO: 27369 - DNA, 20 bp, Artificial Sequence
  Synthetic oligonucleotide; TAG chr11 5386631 5386650 5386647 +
cataatctcggtggctgcag

SEQ ID NO: 27370 - DNA, 20 bp, Artificial Sequence
  Synthetic oligonucleotide; GAG chr11 5386633 5386652 5386649 +
taatctcggtggctgcagta

SEQ ID NO: 27371 - DNA, 20 bp, Artificial Sequence
  Synthetic oligonucleotide; AGG chr11 5386634 5386653 5386650 +
aatctcggtggctgcagtag

SEQ ID NO: 27372 - DNA, 20 bp, Artificial Sequence
  Synthetic oligonucleotide; TGG chr11 5386638 5386657 5386654 +
tcggtggctgcagtagagga

SEQ ID NO: 27373 - DNA, 20 bp, Artificial Sequence
  Synthetic oligonucleotide; AAG chr11 5386644 5386663 5386660 +
gctgcagtagaggatggacc

SEQ ID NO: 27374 - DNA, 20 bp, Artificial Sequence
  Synthetic oligonucleotide; AGG chr11 5386645 5386664 5386661 +
ctgcagtagaggatggacca

SEQ ID NO: 27375 - DNA, 20 bp, Artificial Sequence
  Synthetic oligonucleotide; GGG chr11 5386646 5386665 5386662 +
tgcagtagaggatggaccaa

SEQ ID NO: 27376 - DNA, 20 bp, Artificial Sequence
  Synthetic oligonucleotide; AAG chr11 5386649 5386668 5386665 +
agtagaggatggaccaaggg

SEQ ID NO: 27377 - DNA, 20 bp, Artificial Sequence
  Synthetic oligonucleotide; AGG chr11 5386650 5386669 5386666 +
gtagaggatggaccaaggga

SEQ ID NO: 27378 - DNA, 20 bp, Artificial Sequence
  Synthetic oligonucleotide; GAG chr11 5386652 5386671 5386668 +
agaggatggaccaagggaag

SEQ ID NO: 27379 - DNA, 20 bp, Artificial Sequence
  Synthetic oligonucleotide; AGG chr11 5386653 5386672 5386669 +
gaggatggaccaagggaagg

SEQ ID NO: 27380 - DNA, 20 bp, Artificial Sequence
  Synthetic oligonucleotide; GAG chr11 5386655 5386674 5386671 +
ggatggaccaagggaaggag

SEQ ID NO: 27381 - DNA, 20 bp, Artificial Sequence
  Synthetic oligonucleotide; TGG chr11 5386660 5386679 5386676 +
gaccaagggaaggaggagcc

SEQ ID NO: 27382 - DNA, 20 bp, Artificial Sequence
  Synthetic oligonucleotide; CAG chr11 5386680 5386699 5386696 +
tggctttgcatgttgaatga

SEQ ID NO: 27383 - DNA, 20 bp, Artificial Sequence
  Synthetic oligonucleotide; AGG chr11 5386681 5386700 5386697 +
ggctttgcatgttgaatgac

SEQ ID NO: 27384 - DNA, 20 bp, Artificial Sequence
  Synthetic oligonucleotide; CAG chr11 5386685 5386704 5386701 +
ttgcatgttgaatgacaggt

SEQ ID NO: 27385 - DNA, 20 bp, Artificial Sequence
  Synthetic oligonucleotide; AGG chr11 5386686 5386705 5386702 +
tgcatgttgaatgacaggtc

SEQ ID NO: 27386 - DNA, 20 bp, Artificial Sequence
  Synthetic oligonucleotide; AAG chr11 5386690 5386709 5386706 +
tgttgaatgacaggtcaggc

SEQ ID NO: 27387 - DNA, 20 bp, Artificial Sequence
  Synthetic oligonucleotide; CAG chr11 5386693 5386712 5386709 +
tgaatgacaggtcaggcaag

SEQ ID NO: 27388 - DNA, 20 bp, Artificial Sequence
  Synthetic oligonucleotide; AGG chr11 5386694 5386713 5386710 +
gaatgacaggtcaggcaagc

SEQ ID NO: 27389 - DNA, 20 bp, Artificial Sequence
  Synthetic oligonucleotide; TGG chr11 5386699 5386718 5386715 +
acaggtcaggcaagcaggtg

SEQ ID NO: 27390 - DNA, 20 bp, Artificial Sequence
  Synthetic oligonucleotide; AAG chr11 5386704 5386723 5386720 +
tcaggcaagcaggtgtggaa

SEQ ID NO: 27391 - DNA, 20 bp, Artificial Sequence
  Synthetic oligonucleotide; AAG chr11 5386709 5386728 5386725 +
caagcaggtgtggaaaagct

SEQ ID NO: 27392 - DNA, 20 bp, Artificial Sequence
  Synthetic oligonucleotide; AAG chr11 5386715 5386734 5386731 +
ggtgtggaaaagctaagaac

SEQ ID NO: 27393 - DNA, 20 bp, Artificial Sequence
  Synthetic oligonucleotide; AGG chr11 5386716 5386735 5386732 +
gtgtggaaaagctaagaaca

SEQ ID NO: 27394 - DNA, 20 bp, Artificial Sequence
  Synthetic oligonucleotide; TGG chr11 5386723 5386742 5386739 +
aaagctaagaacaaggacat

SEQ ID NO: 27395 - DNA, 20 bp, Artificial Sequence
  Synthetic oligonucleotide; CAG chr11 5386729 5386748 5386745 +
aagaacaaggacattggcta

SEQ ID NO: 27396 - DNA, 20 bp, Artificial Sequence
  Synthetic oligonucleotide; GAG chr11 5386731 5386750 5386747 +
gaacaaggacattggctaca

SEQ ID NO: 27397 - DNA, 20 bp, Artificial Sequence
  Synthetic oligonucleotide; AAG chr11 5386737 5386756 5386753 +
ggacattggctacagagatg

SEQ ID NO: 27398 - DNA, 20 bp, Artificial Sequence
  Synthetic oligonucleotide; TAG chr11 5386745 5386764 5386761 +
gctacagagatgaagatgaa

SEQ ID NO: 27399 - DNA, 20 bp, Artificial Sequence
  Synthetic oligonucleotide; CAG chr11 5386752 5386771 5386768 +
agatgaagatgaatagatta

SEQ ID NO: 27400 - DNA, 20 bp, Artificial Sequence
  Synthetic oligonucleotide; AGG chr11 5386753 5386772 5386769 +
gatgaagatgaatagattac

SEQ ID NO: 27401 - DNA, 20 bp, Artificial Sequence
  Synthetic oligonucleotide; GGG chr11 5386754 5386773 5386770 +
atgaagatgaatagattaca

SEQ ID NO: 27402 - DNA, 20 bp, Artificial Sequence
  Synthetic oligonucleotide; TAG chr11 5386758 5386777 5386774 +
agatgaatagattacaggga

SEQ ID NO: 27403 - DNA, 20 bp, Artificial Sequence
  Synthetic oligonucleotide; AAG chr11 5386766 5386785 5386782 +
agattacagggatagattaa

SEQ ID NO: 27404 - DNA, 20 bp, Artificial Sequence
  Synthetic oligonucleotide; TAG chr11 5386773 5386792 5386789 +
agggatagattaaaagaact

SEQ ID NO: 27405 - DNA, 20 bp, Artificial Sequence
  Synthetic oligonucleotide; TAG chr11 5386784 5386803 5386800 +
aaaagaacttagttaaaaat

SEQ ID NO: 27406 - DNA, 20 bp, Artificial Sequence
  Synthetic oligonucleotide; CAG chr11 5386790 5386809 5386806 +
acttagttaaaaattagata

SEQ ID NO: 27407 - DNA, 20 bp, Artificial Sequence
  Synthetic oligonucleotide; AAG chr11 5386794 5386813 5386810 +
agttaaaaattagatacaga

SEQ ID NO: 27408 - DNA, 20 bp, Artificial Sequence
  Synthetic oligonucleotide; GAG chr11 5386796 5386815 5386812 +
ttaaaaattagatacagaaa

SEQ ID NO: 27409 - DNA, 20 bp, Artificial Sequence
  Synthetic oligonucleotide; AGG chr11 5386797 5386816 5386813 +
taaaaattagatacagaaag

SEQ ID NO: 27410 - DNA, 20 bp, Artificial Sequence
  Synthetic oligonucleotide; GGG chr11 5386798 5386817 5386814 +
aaaaattagatacagaaaga

SEQ ID NO: 27411 - DNA, 20 bp, Artificial Sequence
  Synthetic oligonucleotide; GAG chr11 5386800 5386819 5386816 +
aaattagatacagaaagagg

SEQ ID NO: 27412 - DNA, 20 bp, Artificial Sequence
  Synthetic oligonucleotide; GAG chr11 5386802 5386821 5386818 +
attagatacagaaagaggga

SEQ ID NO: 27413 - DNA, 20 bp, Artificial Sequence
  Synthetic oligonucleotide; AGG chr11 5386803 5386822 5386819 +
ttagatacagaaagagggag

SEQ ID NO: 27414 - DNA, 20 bp, Artificial Sequence
  Synthetic oligonucleotide; GGG chr11 5386804 5386823 5386820 +
tagatacagaaagagggaga

SEQ ID NO: 27415 - DNA, 20 bp, Artificial Sequence
  Synthetic oligonucleotide; GAG chr11 5386809 5386828 5386825 +
acagaaagagggagagggtt

SEQ ID NO: 27416 - DNA, 20 bp, Artificial Sequence
  Synthetic oligonucleotide; TAG chr11 5386812 5386831 5386828 +
gaaagagggagagggttgag

SEQ ID NO: 27417 - DNA, 20 bp, Artificial Sequence
  Synthetic oligonucleotide; GAG chr11 5386814 5386833 5386830 +
aagagggagagggttgagta

SEQ ID NO: 27418 - DNA, 20 bp, Artificial Sequence
  Synthetic oligonucleotide; CAG chr11 5386820 5386839 5386836 +
gagagggttgagtagagcat

SEQ ID NO: 27419 - DNA, 20 bp, Artificial Sequence
  Synthetic oligonucleotide; TGG chr11 5386843 5386862 5386859 +
ctcaaaaatgttgtcttgaa

SEQ ID NO: 27420 - DNA, 20 bp, Artificial Sequence
  Synthetic oligonucleotide; CAG chr11 5386846 5386865 5386862 +
aaaaatgttgtcttgaatgg

SEQ ID NO: 27421 - DNA, 20 bp, Artificial Sequence
  Synthetic oligonucleotide; AGG chr11 5386847 5386866 5386863 +
aaaatgttgtcttgaatggc

SEQ ID NO: 27422 - DNA, 20 bp, Artificial Sequence
  Synthetic oligonucleotide; TGG chr11 5386853 5386872 5386869 +
ttgtcttgaatggcaggaaa

SEQ ID NO: 27423 - DNA, 20 bp, Artificial Sequence
  Synthetic oligonucleotide; GAG chr11 5386886 5386905 5386902 +
tataaaaaatgcataaatat

SEQ ID NO: 27424 - DNA, 20 bp, Artificial Sequence
  Synthetic oligonucleotide; AAG chr11 5386889 5386908 5386905 +
aaaaaatgcataaatatgag

SEQ ID NO: 27425 - DNA, 20 bp, Artificial Sequence
  Synthetic oligonucleotide; CAG chr11 5386895 5386914 5386911 +
tgcataaatatgagaagaat

SEQ ID NO: 27426 - DNA, 20 bp, Artificial Sequence
  Synthetic oligonucleotide; AGG chr11 5386896 5386915 5386912 +
gcataaatatgagaagaatc

SEQ ID NO: 27427 - DNA, 20 bp, Artificial Sequence
  Synthetic oligonucleotide; AAG chr11 5386905 5386924 5386921 +
tgagaagaatcaggtgtgaa

SEQ ID NO: 27428 - DNA, 20 bp, Artificial Sequence
  Synthetic oligonucleotide; TGG chr11 5386909 5386928 5386925 +
aagaatcaggtgtgaaaaga

SEQ ID NO: 27429 - DNA, 20 bp, Artificial Sequence
  Synthetic oligonucleotide; TGG chr11 5386916 5386935 5386932 +
aggtgtgaaaagatggatgc

SEQ ID NO: 27430 - DNA, 20 bp, Artificial Sequence
  Synthetic oligonucleotide; GGG chr11 5386917 5386936 5386933 +
ggtgtgaaaagatggatgct

SEQ ID NO: 27431 - DNA, 20 bp, Artificial Sequence
  Synthetic oligonucleotide; TAG chr11 5386928 5386947 5386944 +
atggatgctgggctcaatat

SEQ ID NO: 27432 - DNA, 20 bp, Artificial Sequence
  Synthetic oligonucleotide; GAG chr11 5386938 5386957 5386954 +
ggctcaatattagacgtgtt

SEQ ID NO: 27433 - DNA, 20 bp, Artificial Sequence
  Synthetic oligonucleotide; CAG chr11 5386947 5386966 5386963 +
ttagacgtgttgagtttcat

SEQ ID NO: 27434 - DNA, 20 bp, Artificial Sequence
  Synthetic oligonucleotide; TGG chr11 5386958 5386977 5386974 +
gagtttcatcagtatccttt

SEQ ID NO: 27435 - DNA, 20 bp, Artificial Sequence
  Synthetic oligonucleotide; TAG chr11 5386968 5386987 5386984 +
agtatccttttggaaacacc

SEQ ID NO: 27436 - DNA, 20 bp, Artificial Sequence
  Synthetic oligonucleotide; GAG chr11 5386972 5386991 5386988 +
tccttttggaaacacctagt

SEQ ID NO: 27437 - DNA, 20 bp, Artificial Sequence
  Synthetic oligonucleotide; AAG chr11 5386975 5386994 5386991 +
ttttggaaacacctagtgag

SEQ ID NO: 27438 - DNA, 20 bp, Artificial Sequence
  Synthetic oligonucleotide; AGG chr11 5386976 5386995 5386992 +
tttggaaacacctagtgaga

SEQ ID NO: 27439 - DNA, 20 bp, Artificial Sequence
  Synthetic oligonucleotide; CAG chr11 5386979 5386998 5386995 +
ggaaacacctagtgagaagg

SEQ ID NO: 27440 - DNA, 20 bp, Artificial Sequence
  Synthetic oligonucleotide; CAG chr11 5386987 5387006 5387003 +
ctagtgagaaggcagaaact

SEQ ID NO: 27441 - DNA, 20 bp, Artificial Sequence
  Synthetic oligonucleotide; AGG chr11 5386988 5387007 5387004 +
tagtgagaaggcagaaactc

SEQ ID NO: 27442 - DNA, 20 bp, Artificial Sequence
  Synthetic oligonucleotide; CGG chr11 5387003 5387022 5387019 +
aactcaggcctgatatgtaa

SEQ ID NO: 27443 - DNA, 20 bp, Artificial Sequence
  Synthetic oligonucleotide; GAG chr11 5387005 5387024 5387021 +
ctcaggcctgatatgtaacg

SEQ ID NO: 27444 - DNA, 20 bp, Artificial Sequence
  Synthetic oligonucleotide; TGG chr11 5387013 5387032 5387029 +
tgatatgtaacggagttatc

SEQ ID NO: 27445 - DNA, 20 bp, Artificial Sequence
  Synthetic oligonucleotide; TAG chr11 5387018 5387037 5387034 +
tgtaacggagttatctggac

SEQ ID NO: 27446 - DNA, 20 bp, Artificial Sequence
  Synthetic oligonucleotide; GAG chr11 5387020 5387039 5387036 +
taacggagttatctggacta

SEQ ID NO: 27447 - DNA, 20 bp, Artificial Sequence
  Synthetic oligonucleotide; AAG chr11 5387033 5387052 5387049 +
tggactagagattaatgtct

SEQ ID NO: 27448 - DNA, 20 bp, Artificial Sequence
  Synthetic oligonucleotide; GAG chr11 5387035 5387054 5387051 +
gactagagattaatgtctaa

SEQ ID NO: 27449 - DNA, 20 bp, Artificial Sequence
  Synthetic oligonucleotide; AAG chr11 5387050 5387069 5387066 +
tctaagagccaccactgtat

SEQ ID NO: 27450 - DNA, 20 bp, Artificial Sequence
  Synthetic oligonucleotide; TAG chr11 5387065 5387084 5387081 +
tgtataagtaataataataa

SEQ ID NO: 27451 - DNA, 20 bp, Artificial Sequence
  Synthetic oligonucleotide; GAG chr11 5387082 5387101 5387098 +
taatagataatataatgaat

SEQ ID NO: 27452 - DNA, 20 bp, Artificial Sequence
  Synthetic oligonucleotide; AAG chr11 5387085 5387104 5387101 +
tagataatataatgaatgag

SEQ ID NO: 27453 - DNA, 20 bp, Artificial Sequence
  Synthetic oligonucleotide; AAG chr11 5387090 5387109 5387106 +
aatataatgaatgagaagtt

SEQ ID NO: 27454 - DNA, 20 bp, Artificial Sequence
  Synthetic oligonucleotide; AGG chr11 5387091 5387110 5387107 +
atataatgaatgagaagtta

SEQ ID NO: 27455 - DNA, 20 bp, Artificial Sequence
  Synthetic oligonucleotide; AAG chr11 5387099 5387118 5387115 +
aatgagaagttaaggtgttc

SEQ ID NO: 27456 - DNA, 20 bp, Artificial Sequence
  Synthetic oligonucleotide; AGG chr11 5387100 5387119 5387116 +
atgagaagttaaggtgttca

SEQ ID NO: 27457 - DNA, 20 bp, Artificial Sequence
  Synthetic oligonucleotide; CAG chr11 5387104 5387123 5387120 +
gaagttaaggtgttcaagga

SEQ ID NO: 27458 - DNA, 20 bp, Artificial Sequence
  Synthetic oligonucleotide; GAG chr11 5387130 5387149 5387146 +
actgaataacataaatattt

SEQ ID NO: 27459 - DNA, 20 bp, Artificial Sequence
  Synthetic oligonucleotide; TGG chr11 5387136 5387155 5387152 +
taacataaatatttgagcaa

SEQ ID NO: 27460 - DNA, 20 bp, Artificial Sequence
  Synthetic oligonucleotide; AAG chr11 5387143 5387162 5387159 +
aatatttgagcaatggaaat

SEQ ID NO: 27461 - DNA, 20 bp, Artificial Sequence
  Synthetic oligonucleotide; GAG chr11 5387145 5387164 5387161 +
tatttgagcaatggaaataa

SEQ ID NO: 27462 - DNA, 20 bp, Artificial Sequence
  Synthetic oligonucleotide; GAG chr11 5387147 5387166 5387163 +
tttgagcaatggaaataaga

SEQ ID NO: 27463 - DNA, 20 bp, Artificial Sequence
  Synthetic oligonucleotide; TAG chr11 5387154 5387173 5387170 +
aatggaaataagagagtgca

SEQ ID NO: 27464 - DNA, 20 bp, Artificial Sequence
  Synthetic oligonucleotide; AAG chr11 5387157 5387176 5387173 +
ggaaataagagagtgcatag

SEQ ID NO: 27465 - DNA, 20 bp, Artificial Sequence
  Synthetic oligonucleotide; CAG chr11 5387173 5387192 5387189 +
atagaagctatcacaaaaat

SEQ ID NO: 27466 - DNA, 20 bp, Artificial Sequence
  Synthetic oligonucleotide; AAG chr11 5387176 5387195 5387192 +
gaagctatcacaaaaatcag

SEQ ID NO: 27467 - DNA, 20 bp, Artificial Sequence
  Synthetic oligonucleotide; GAG chr11 5387178 5387197 5387194 +
agctatcacaaaaatcagaa

SEQ ID NO: 27468 - DNA, 20 bp, Artificial Sequence
  Synthetic oligonucleotide; CAG chr11 5387184 5387203 5387200 +
cacaaaaatcagaagagaac

SEQ ID NO: 27469 - DNA, 20 bp, Artificial Sequence
  Synthetic oligonucleotide; CAG chr11 5387187 5387206 5387203 +
aaaaatcagaagagaaccag

SEQ ID NO: 27470 - DNA, 20 bp, Artificial Sequence
  Synthetic oligonucleotide; TGG chr11 5387194 5387213 5387210 +
agaagagaaccagcagatct

SEQ ID NO: 27471 - DNA, 20 bp, Artificial Sequence
  Synthetic oligonucleotide; AAG chr11 5387201 5387220 5387217 +
aaccagcagatcttggcatt

SEQ ID NO: 27472 - DNA, 20 bp, Artificial Sequence
  Synthetic oligonucleotide; TAG chr11 5387210 5387229 5387226 +
atcttggcattaagaatttc

SEQ ID NO: 27473 - DNA, 20 bp, Artificial Sequence
  Synthetic oligonucleotide; GAG chr11 5387212 5387231 5387228 +
cttggcattaagaatttcta

SEQ ID NO: 27474 - DNA, 20 bp, Artificial Sequence
  Synthetic oligonucleotide; GAG chr11 5387214 5387233 5387230 +
tggcattaagaatttctaga

SEQ ID NO: 27475 - DNA, 20 bp, Artificial Sequence
  Synthetic oligonucleotide; GAG chr11 5387216 5387235 5387232 +
gcattaagaatttctagaga

SEQ ID NO: 27476 - DNA, 20 bp, Artificial Sequence
  Synthetic oligonucleotide; AAG chr11 5387226 5387245 5387242 +
tttctagagagagctctaaa

SEQ ID NO: 27477 - DNA, 20 bp, Artificial Sequence
  Synthetic oligonucleotide; AGG chr11 5387227 5387246 5387243 +
ttctagagagagctctaaaa

SEQ ID NO: 27478 - DNA, 20 bp, Artificial Sequence
  Synthetic oligonucleotide; AAG chr11 5387230 5387249 5387246 +
tagagagagctctaaaaagg

SEQ ID NO: 27479 - DNA, 20 bp, Artificial Sequence
  Synthetic oligonucleotide; AGG chr11 5387231 5387250 5387247 +
agagagagctctaaaaagga

SEQ ID NO: 27480 - DNA, 20 bp, Artificial Sequence
  Synthetic oligonucleotide; TGG chr11 5387236 5387255 5387252 +
gagctctaaaaaggaaggca

SEQ ID NO: 27481 - DNA, 20 bp, Artificial Sequence
  Synthetic oligonucleotide; CAG chr11 5387240 5387259 5387256 +
tctaaaaaggaaggcatggc

SEQ ID NO: 27482 - DNA, 20 bp, Artificial Sequence
  Synthetic oligonucleotide; GAG chr11 5387242 5387261 5387258 +
taaaaaggaaggcatggcca

SEQ ID NO: 27483 - DNA, 20 bp, Artificial Sequence
  Synthetic oligonucleotide; AAG chr11 5387275 5387294 5387291 +
ttgcacaaaaaaatcaataa

SEQ ID NO: 27484 - DNA, 20 bp, Artificial Sequence
  Synthetic oligonucleotide; CAG chr11 5387278 5387297 5387294 +
cacaaaaaaatcaataaaag

SEQ ID NO: 27485 - DNA, 20 bp, Artificial Sequence
  Synthetic oligonucleotide; AGG chr11 5387279 5387298 5387295 +
acaaaaaaatcaataaaagc

SEQ ID NO: 27486 - DNA, 20 bp, Artificial Sequence
  Synthetic oligonucleotide; AAG chr11 5387289 5387308 5387305 +
caataaaagcaggtatgatt

SEQ ID NO: 27487 - DNA, 20 bp, Artificial Sequence
  Synthetic oligonucleotide; TGG chr11 5387307 5387326 5387323 +
ttaagactctccattgcatt

SEQ ID NO: 27488 - DNA, 20 bp, Artificial Sequence
  Synthetic oligonucleotide; TAG chr11 5387314 5387333 5387330 +
tctccattgcatttggcccc

SEQ ID NO: 27489 - DNA, 20 bp, Artificial Sequence
  Synthetic oligonucleotide; AAG chr11 5387317 5387336 5387333 +
ccattgcatttggcccctag

SEQ ID NO: 27490 - DNA, 20 bp, Artificial Sequence
  Synthetic oligonucleotide; TGG chr11 5387324 5387343 5387340 +
atttggcccctagaagtcac

SEQ ID NO: 27491 - DNA, 20 bp, Artificial Sequence
  Synthetic oligonucleotide; AAG chr11 5387334 5387353 5387350 +
tagaagtcactggtgaattt

SEQ ID NO: 27492 - DNA, 20 bp, Artificial Sequence
  Synthetic oligonucleotide; AGG chr11 5387335 5387354 5387351 +
agaagtcactggtgaattta

SEQ ID NO: 27493 - DNA, 20 bp, Artificial Sequence
  Synthetic oligonucleotide; GAG chr11 5387337 5387356 5387353 +
aagtcactggtgaatttaag

SEQ ID NO: 27494 - DNA, 20 bp, Artificial Sequence
  Synthetic oligonucleotide; TAG chr11 5387348 5387367 5387364 +
gaatttaaggagcattgctt

SEQ ID NO: 27495 - DNA, 20 bp, Artificial Sequence
  Synthetic oligonucleotide; AAG chr11 5387353 5387372 5387369 +
taaggagcattgctttagct

SEQ ID NO: 27496 - DNA, 20 bp, Artificial Sequence
  Synthetic oligonucleotide; TGG chr11 5387356 5387375 5387372 +
ggagcattgctttagctaag

SEQ ID NO: 27497 - DNA, 20 bp, Artificial Sequence
  Synthetic oligonucleotide; GGG chr11 5387357 5387376 5387373 +
gagcattgctttagctaagt

SEQ ID NO: 27498 - DNA, 20 bp, Artificial Sequence
  Synthetic oligonucleotide; TAG chr11 5387377 5387396 5387393 +
gggttttaaaaaaaacatta

SEQ ID NO: 27499 - DNA, 20 bp, Artificial Sequence
  Synthetic oligonucleotide; AGG chr11 5387378 5387397 5387394 +
ggttttaaaaaaaacattat

SEQ ID NO: 27500 - DNA, 20 bp, Artificial Sequence
  Synthetic oligonucleotide; GGG chr11 5387379 5387398 5387395 +
gttttaaaaaaaacattata

SEQ ID NO: 27501 - DNA, 20 bp, Artificial Sequence
  Synthetic oligonucleotide; TGG chr11 5387382 5387401 5387398 +
ttaaaaaaaacattataggg

SEQ ID NO: 27502 - DNA, 20 bp, Artificial Sequence
  Synthetic oligonucleotide; TGG chr11 5387386 5387405 5387402 +
aaaaaacattatagggtggt

SEQ ID NO: 27503 - DNA, 20 bp, Artificial Sequence
  Synthetic oligonucleotide; GAG chr11 5387391 5387410 5387407 +
acattatagggtggttggtt

SEQ ID NO: 27504 - DNA, 20 bp, Artificial Sequence
  Synthetic oligonucleotide; TAG chr11 5387394 5387413 5387410 +
ttatagggtggttggttgag

SEQ ID NO: 27505 - DNA, 20 bp, Artificial Sequence
  Synthetic oligonucleotide; GAG chr11 5387403 5387422 5387419 +
ggttggttgagtagtaaact

SEQ ID NO: 27506 - DNA, 20 bp, Artificial Sequence
  Synthetic oligonucleotide; AAG chr11 5387406 5387425 5387422 +
tggttgagtagtaaactgag

SEQ ID NO: 27507 - DNA, 20 bp, Artificial Sequence
  Synthetic oligonucleotide; AAG chr11 5387411 5387430 5387427 +
gagtagtaaactgagaagta

SEQ ID NO: 27508 - DNA, 20 bp, Artificial Sequence
  Synthetic oligonucleotide; TGG chr11 5387417 5387436 5387433 +
taaactgagaagtaaagaaa

SEQ ID NO: 27509 - DNA, 20 bp, Artificial Sequence
  Synthetic oligonucleotide; AAG chr11 5387422 5387441 5387438 +
tgagaagtaaagaaatggaa

SEQ ID NO: 27510 - DNA, 20 bp, Artificial Sequence
  Synthetic oligonucleotide; TGG chr11 5387432 5387451 5387448 +
agaaatggaaaagataaatg

SEQ ID NO: 27511 - DNA, 20 bp, Artificial Sequence
  Synthetic oligonucleotide; AAG chr11 5387456 5387475 5387472 +
ctattttttaccccttgcca

SEQ ID NO: 27512 - DNA, 20 bp, Artificial Sequence
  Synthetic oligonucleotide; AAG chr11 5387465 5387484 5387481 +
accccttgccaaagtgatgt

SEQ ID NO: 27513 - DNA, 20 bp, Artificial Sequence
  Synthetic oligonucleotide; CAG chr11 5387481 5387500 5387497 +
atgtaagccttatatccatg

SEQ ID NO: 27514 - DNA, 20 bp, Artificial Sequence
  Synthetic oligonucleotide; AAG chr11 5387503 5387522 5387519 +
gcacctctgctctcaactcg

SEQ ID NO: 27515 - DNA, 20 bp, Artificial Sequence
  Synthetic oligonucleotide; AAG chr11 5387511 5387530 5387527 +
gctctcaactcgaagctcac

SEQ ID NO: 27516 - DNA, 20 bp, Artificial Sequence
  Synthetic oligonucleotide; AAG chr11 5387528 5387547 5387544 +
cacaagtataataaaattca

SEQ ID NO: 27517 - DNA, 20 bp, Artificial Sequence
  Synthetic oligonucleotide; TAG chr11 5387531 5387550 5387547 +
aagtataataaaattcaaag

SEQ ID NO: 27518 - DNA, 20 bp, Artificial Sequence
  Synthetic oligonucleotide; AAG chr11 5387548 5387567 5387564 +
aagtagcttgcgtgacctgc

SEQ ID NO: 27519 - DNA, 20 bp, Artificial Sequence
  Synthetic oligonucleotide; TAG chr11 5387564 5387583 5387580 +
ctgcaagatcatacatgacg

SEQ ID NO: 27520 - DNA, 20 bp, Artificial Sequence
  Synthetic oligonucleotide; TAG chr11 5387571 5387590 5387587 +
atcatacatgacgtagcatt

SEQ ID NO: 27521 - DNA, 20 bp, Artificial Sequence
  Synthetic oligonucleotide; AAG chr11 5387584 5387603 5387600 +
tagcatttagctgctacttc

SEQ ID NO: 27522 - DNA, 20 bp, Artificial Sequence
  Synthetic oligonucleotide; TGG chr11 5387587 5387606 5387603 +
catttagctgctacttcaag

SEQ ID NO: 27523 - DNA, 20 bp, Artificial Sequence
  Synthetic oligonucleotide; TGG chr11 5387634 5387653 5387650 +
ttcctccattgaatatacat

SEQ ID NO: 27524 - DNA, 20 bp, Artificial Sequence
  Synthetic oligonucleotide; AAG chr11 5387662 5387681 5387678 +
ttttgtcttttaaacttgtc

SEQ ID NO: 27525 - DNA, 20 bp, Artificial Sequence
  Synthetic oligonucleotide; CAG chr11 5387678 5387697 5387694 +
tgtcaagctgctctctgctt

SEQ ID NO: 27526 - DNA, 20 bp, Artificial Sequence
  Synthetic oligonucleotide; AGG chr11 5387679 5387698 5387695 +
gtcaagctgctctctgcttc

SEQ ID NO: 27527 - DNA, 20 bp, Artificial Sequence
  Synthetic oligonucleotide; AAG chr11 5387724 5387743 5387740 +
ttccttgaatgtttttccct

SEQ ID NO: 27528 - DNA, 20 bp, Artificial Sequence
  Synthetic oligonucleotide; TAG chr11 5387728 5387747 5387744 +
ttgaatgtttttccctaaga

SEQ ID NO: 27529 - DNA, 20 bp, Artificial Sequence
  Synthetic oligonucleotide; CAG chr11 5387779 5387798 5387795 +
cttctctaaaattacctact

SEQ ID NO: 27530 - DNA, 20 bp, Artificial Sequence
  Synthetic oligonucleotide; GAG chr11 5387781 5387800 5387797 +
tctctaaaattacctactca

SEQ ID NO: 27531 - DNA, 20 bp, Artificial Sequence
  Synthetic oligonucleotide; GAG chr11 5387783 5387802 5387799 +
tctaaaattacctactcaga

SEQ ID NO: 27532 - DNA, 20 bp, Artificial Sequence
  Synthetic oligonucleotide; AGG chr11 5387784 5387803 5387800 +
ctaaaattacctactcagag

SEQ ID NO: 27533 - DNA, 20 bp, Artificial Sequence
  Synthetic oligonucleotide; CAG chr11 5387876 5387895 5387892 +
cattacattaccttgcattg

SEQ ID NO: 27534 - DNA, 20 bp, Artificial Sequence
  Synthetic oligonucleotide; CAG chr11 5387933 5387952 5387949 +
gtttctgttcattgtatttt

SEQ ID NO: 27535 - DNA, 20 bp, Artificial Sequence
  Synthetic oligonucleotide; TAG chr11 5387940 5387959 5387956 +
ttcattgtattttcagtacc

SEQ ID NO: 27536 - DNA, 20 bp, Artificial Sequence
  Synthetic oligonucleotide; AGG chr11 5387941 5387960 5387957 +
tcattgtattttcagtacct

SEQ ID NO: 27537 - DNA, 20 bp, Artificial Sequence
  Synthetic oligonucleotide; AAG chr11 5387949 5387968 5387965 +
ttttcagtacctaggtgtaa

SEQ ID NO: 27538 - DNA, 20 bp, Artificial Sequence
  Synthetic oligonucleotide; CAG chr11 5387958 5387977 5387974 +
cctaggtgtaaaagtaattg

SEQ ID NO: 27539 - DNA, 20 bp, Artificial Sequence
  Synthetic oligonucleotide; AAG chr11 5387974 5387993 5387990 +
attgcagttcttgccattga

SEQ ID NO: 27540 - DNA, 20 bp, Artificial Sequence
  Synthetic oligonucleotide; TGG chr11 5387980 5387999 5387996 +
gttcttgccattgaaagtaa

SEQ ID NO: 27541 - DNA, 20 bp, Artificial Sequence
  Synthetic oligonucleotide; TAG chr11 5388015 5388034 5388031 +
ttacttttgcaccaacctaa

SEQ ID NO: 27542 - DNA, 20 bp, Artificial Sequence
  Synthetic oligonucleotide; AAG chr11 5388116 5388135 5388132 +
attgaaataattattgaaat

SEQ ID NO: 27543 - DNA, 20 bp, Artificial Sequence
  Synthetic oligonucleotide; TGG chr11 5388124 5388143 5388140 +
aattattgaaataagattaa

SEQ ID NO: 27544 - DNA, 20 bp, Artificial Sequence
  Synthetic oligonucleotide; AAG chr11 5388166 5388185 5388182 +
atttattcaaataatattta

SEQ ID NO: 27545 - DNA, 20 bp, Artificial Sequence
  Synthetic oligonucleotide; AGG chr11 5388167 5388186 5388183 +
tttattcaaataatatttaa

SEQ ID NO: 27546 - DNA, 20 bp, Artificial Sequence
  Synthetic oligonucleotide; TGG chr11 5388182 5388201 5388198 +
tttaaaggattccaatgata

SEQ ID NO: 27547 - DNA, 20 bp, Artificial Sequence
  Synthetic oligonucleotide; TGG chr11 5388185 5388204 5388201 +
aaaggattccaatgatatgg

SEQ ID NO: 27548 - DNA, 20 bp, Artificial Sequence
  Synthetic oligonucleotide; AAG chr11 5388194 5388213 5388210 +
caatgatatggtggctaaaa

SEQ ID NO: 27549 - DNA, 20 bp, Artificial Sequence
  Synthetic oligonucleotide; TAG chr11 5388205 5388224 5388221 +
tggctaaaaaagtcaatccc

SEQ ID NO: 27550 - DNA, 20 bp, Artificial Sequence
  Synthetic oligonucleotide; GAG chr11 5388207 5388226 5388223 +
gctaaaaaagtcaatcccta

SEQ ID NO: 27551 - DNA, 20 bp, Artificial Sequence
  Synthetic oligonucleotide; AAG chr11 5388228 5388247 5388244 +
agctaatattaaaattaaaa

SEQ ID NO: 27552 - DNA, 20 bp, Artificial Sequence
  Synthetic oligonucleotide; GAG chr11 5388230 5388249 5388246 +
ctaatattaaaattaaaaaa

SEQ ID NO: 27553 - DNA, 20 bp, Artificial Sequence
  Synthetic oligonucleotide; CAG chr11 5388234 5388253 5388250 +
tattaaaattaaaaaagaga

SEQ ID NO: 27554 - DNA, 20 bp, Artificial Sequence
  Synthetic oligonucleotide; TGG chr11 5388240 5388259 5388256 +
aattaaaaaagagacagtca

SEQ ID NO: 27555 - DNA, 20 bp, Artificial Sequence
  Synthetic oligonucleotide; AAG chr11 5388254 5388273 5388270 +
cagtcatggtttatgtccac

SEQ ID NO: 27556 - DNA, 20 bp, Artificial Sequence
  Synthetic oligonucleotide; AGG chr11 5388255 5388274 5388271 +
agtcatggtttatgtccaca

SEQ ID NO: 27557 - DNA, 20 bp, Artificial Sequence
  Synthetic oligonucleotide; TAG chr11 5388269 5388288 5388285 +
tccacaaggaattcacatta

SEQ ID NO: 27558 - DNA, 20 bp, Artificial Sequence
  Synthetic oligonucleotide; AAG chr11 5388272 5388291 5388288 +
acaaggaattcacattatag

SEQ ID NO: 27559 - DNA, 20 bp, Artificial Sequence
  Synthetic oligonucleotide; CAG chr11 5388280 5388299 5388296 +
ttcacattatagaagcaata

SEQ ID NO: 27560 - DNA, 20 bp, Artificial Sequence
  Synthetic oligonucleotide; CAG chr11 5388298 5388317 5388314 +
tacagaaattgacaatgctg

SEQ ID NO: 27561 - DNA, 20 bp, Artificial Sequence
  Synthetic oligonucleotide; AGG chr11 5388299 5388318 5388315 +
acagaaattgacaatgctgc

SEQ ID NO: 27562 - DNA, 20 bp, Artificial Sequence
  Synthetic oligonucleotide; GGG chr11 5388300 5388319 5388316 +
cagaaattgacaatgctgca

SEQ ID NO: 27563 - DNA, 20 bp, Artificial Sequence
  Synthetic oligonucleotide; TGG chr11 5388312 5388331 5388328 +
atgctgcagggaaaatatca

SEQ ID NO: 27564 - DNA, 20 bp, Artificial Sequence
  Synthetic oligonucleotide; TAG chr11 5388319 5388338 5388335 +
agggaaaatatcatggtaat

SEQ ID NO: 27565 - DNA, 20 bp, Artificial Sequence
  Synthetic oligonucleotide; TAG chr11 5388326 5388345 5388342 +
atatcatggtaattagtgca

SEQ ID NO: 27566 - DNA, 20 bp, Artificial Sequence
  Synthetic oligonucleotide; CAG chr11 5388336 5388355 5388352 +
aattagtgcatagtgaacta

SEQ ID NO: 27567 - DNA, 20 bp, Artificial Sequence
  Synthetic oligonucleotide; AGG chr11 5388337 5388356 5388353 +
attagtgcatagtgaactac

SEQ ID NO: 27568 - DNA, 20 bp, Artificial Sequence
  Synthetic oligonucleotide; TAG chr11 5388346 5388365 5388362 +
tagtgaactacaggaacaca

SEQ ID NO: 27569 - DNA, 20 bp, Artificial Sequence
  Synthetic oligonucleotide; AGG chr11 5388347 5388366 5388363 +
agtgaactacaggaacacat

SEQ ID NO: 27570 - DNA, 20 bp, Artificial Sequence
  Synthetic oligonucleotide; GAG chr11 5388349 5388368 5388365 +
tgaactacaggaacacatag

SEQ ID NO: 27571 - DNA, 20 bp, Artificial Sequence
  Synthetic oligonucleotide; GAG chr11 5388351 5388370 5388367 +
aactacaggaacacatagga

SEQ ID NO: 27572 - DNA, 20 bp, Artificial Sequence
  Synthetic oligonucleotide; AGG chr11 5388352 5388371 5388368 +
actacaggaacacataggag

SEQ ID NO: 27573 - DNA, 20 bp, Artificial Sequence
  Synthetic oligonucleotide; GGG chr11 5388353 5388372 5388369 +
ctacaggaacacataggaga

SEQ ID NO: 27574 - DNA, 20 bp, Artificial Sequence
  Synthetic oligonucleotide; TGG chr11 5388371 5388390 5388387 +
gagggtattcaaactaaact

SEQ ID NO: 27575 - DNA, 20 bp, Artificial Sequence
  Synthetic oligonucleotide; GGG chr11 5388372 5388391 5388388 +
agggtattcaaactaaactt

SEQ ID NO: 27576 - DNA, 20 bp, Artificial Sequence
  Synthetic oligonucleotide; GGG chr11 5388373 5388392 5388389 +
gggtattcaaactaaacttg

SEQ ID NO: 27577 - DNA, 20 bp, Artificial Sequence
  Synthetic oligonucleotide; AAG chr11 5388381 5388400 5388397 +
aaactaaacttggggaattt

SEQ ID NO: 27578 - DNA, 20 bp, Artificial Sequence
  Synthetic oligonucleotide; AAG chr11 5388384 5388403 5388400 +
ctaaacttggggaatttaag

SEQ ID NO: 27579 - DNA, 20 bp, Artificial Sequence
  Synthetic oligonucleotide; AGG chr11 5388385 5388404 5388401 +
taaacttggggaatttaaga

SEQ ID NO: 27580 - DNA, 20 bp, Artificial Sequence
  Synthetic oligonucleotide; AAG chr11 5388395 5388414 5388411 +
gaatttaagaaggccttctg

SEQ ID NO: 27581 - DNA, 20 bp, Artificial Sequence
  Synthetic oligonucleotide; AGG chr11 5388396 5388415 5388412 +
aatttaagaaggccttctga

SEQ ID NO: 27582 - DNA, 20 bp, Artificial Sequence
  Synthetic oligonucleotide; AAG chr11 5388410 5388429 5388426 +
ttctgaaggacatcatatct

SEQ ID NO: 27583 - DNA, 20 bp, Artificial Sequence
  Synthetic oligonucleotide; AAG chr11 5388415 5388434 5388431 +
aaggacatcatatctaagct

SEQ ID NO: 27584 - DNA, 20 bp, Artificial Sequence
  Synthetic oligonucleotide; AGG chr11 5388416 5388435 5388432 +
aggacatcatatctaagcta

SEQ ID NO: 27585 - DNA, 20 bp, Artificial Sequence
  Synthetic oligonucleotide; TGG chr11 5388419 5388438 5388435 +
acatcatatctaagctaagg

SEQ ID NO: 27586 - DNA, 20 bp, Artificial Sequence
  Synthetic oligonucleotide; GGG chr11 5388420 5388439 5388436 +
catcatatctaagctaaggt

SEQ ID NO: 27587 - DNA, 20 bp, Artificial Sequence
  Synthetic oligonucleotide; TAG chr11 5388429 5388448 5388445 +
taagctaaggtgggttatat

SEQ ID NO: 27588 - DNA, 20 bp, Artificial Sequence
  Synthetic oligonucleotide; TAG chr11 5388432 5388451 5388448 +
gctaaggtgggttatattag

SEQ ID NO: 27589 - DNA, 20 bp, Artificial Sequence
  Synthetic oligonucleotide; AAG chr11 5388435 5388454 5388451 +
aaggtgggttatattagtag

SEQ ID NO: 27590 - DNA, 20 bp, Artificial Sequence
  Synthetic oligonucleotide; TAG chr11 5388443 5388462 5388459 +
ttatattagtagaagttaac

SEQ ID NO: 27591 - DNA, 20 bp, Artificial Sequence
  Synthetic oligonucleotide; AAG chr11 5388449 5388468 5388465 +
tagtagaagttaactagaca

SEQ ID NO: 27592 - DNA, 20 bp, Artificial Sequence
  Synthetic oligonucleotide; AAG chr11 5388455 5388474 5388471 +
aagttaactagacaaagatt

SEQ ID NO: 27593 - DNA, 20 bp, Artificial Sequence
  Synthetic oligonucleotide; AGG chr11 5388456 5388475 5388472 +
agttaactagacaaagatta

SEQ ID NO: 27594 - DNA, 20 bp, Artificial Sequence
  Synthetic oligonucleotide; GGG chr11 5388457 5388476 5388473 +
gttaactagacaaagattaa

SEQ ID NO: 27595 - DNA, 20 bp, Artificial Sequence
  Synthetic oligonucleotide; AAG chr11 5388461 5388480 5388477 +
actagacaaagattaaggga

SEQ ID NO: 27596 - DNA, 20 bp, Artificial Sequence
  Synthetic oligonucleotide; CAG chr11 5388470 5388489 5388486 +
agattaagggaaagctattt

SEQ ID NO: 27597 - DNA, 20 bp, Artificial Sequence
  Synthetic oligonucleotide; AGG chr11 5388471 5388490 5388487 +
gattaagggaaagctatttc

SEQ ID NO: 27598 - DNA, 20 bp, Artificial Sequence
  Synthetic oligonucleotide; CAG chr11 5388491 5388510 5388507 +
aggaaaaaatgtttttattc

SEQ ID NO: 27599 - DNA, 20 bp, Artificial Sequence
  Synthetic oligonucleotide; AGG chr11 5388492 5388511 5388508 +
ggaaaaaatgtttttattcc

SEQ ID NO: 27600 - DNA, 20 bp, Artificial Sequence
  Synthetic oligonucleotide; AAG chr11 5388495 5388514 5388511 +
aaaaatgtttttattccagg

SEQ ID NO: 27601 - DNA, 20 bp, Artificial Sequence
  Synthetic oligonucleotide; GAG chr11 5388523 5388542 5388539 +
aaatacaaatgtttacctat

SEQ ID NO: 27602 - DNA, 20 bp, Artificial Sequence
  Synthetic oligonucleotide; AAG chr11 5388527 5388546 5388543 +
acaaatgtttacctatgagc

SEQ ID NO: 27603 - DNA, 20 bp, Artificial Sequence
  Synthetic oligonucleotide; TAG chr11 5388535 5388554 5388551 +
ttacctatgagcaagcatac

SEQ ID NO: 27604 - DNA, 20 bp, Artificial Sequence
  Synthetic oligonucleotide; TGG chr11 5388544 5388563 5388560 +
agcaagcatactagataaac

SEQ ID NO: 27605 - DNA, 20 bp, Artificial Sequence
  Synthetic oligonucleotide; AAG chr11 5388547 5388566 5388563 +
aagcatactagataaactgg

SEQ ID NO: 27606 - DNA, 20 bp, Artificial Sequence
  Synthetic oligonucleotide; TAG chr11 5388557 5388576 5388573 +
gataaactggaagaattgtt

SEQ ID NO: 27607 - DNA, 20 bp, Artificial Sequence
  Synthetic oligonucleotide; CAG chr11 5388582 5388601 5388598 +
tcattaacaccgtgaatata

SEQ ID NO: 27608 - DNA, 20 bp, Artificial Sequence
  Synthetic oligonucleotide; GAG chr11 5388584 5388603 5388600 +
attaacaccgtgaatataca

SEQ ID NO: 27609 - DNA, 20 bp, Artificial Sequence
  Synthetic oligonucleotide; AGG chr11 5388585 5388604 5388601 +
ttaacaccgtgaatatacag

SEQ ID NO: 27610 - DNA, 20 bp, Artificial Sequence
  Synthetic oligonucleotide; TAG chr11 5388592 5388611 5388608 +
cgtgaatatacagaggaaat

SEQ ID NO: 27611 - DNA, 20 bp, Artificial Sequence
  Synthetic oligonucleotide; AGG chr11 5388593 5388612 5388609 +
gtgaatatacagaggaaatt

SEQ ID NO: 27612 - DNA, 20 bp, Artificial Sequence
  Synthetic oligonucleotide; TAG chr11 5388597 5388616 5388613 +
atatacagaggaaattagga

SEQ ID NO: 27613 - DNA, 20 bp, Artificial Sequence
  Synthetic oligonucleotide; AAG chr11 5388602 5388621 5388618 +
cagaggaaattaggatagat

SEQ ID NO: 27614 - DNA, 20 bp, Artificial Sequence
  Synthetic oligonucleotide; TAG chr11 5388609 5388628 5388625 +
aattaggatagataagaaaa

SEQ ID NO: 27615 - DNA, 20 bp, Artificial Sequence
  Synthetic oligonucleotide; AGG chr11 5388610 5388629 5388626 +
attaggatagataagaaaat

SEQ ID NO: 27616 - DNA, 20 bp, Artificial Sequence
  Synthetic oligonucleotide; CGG chr11 5388620 5388639 5388636 +
ataagaaaataggatataca

SEQ ID NO: 27617 - DNA, 20 bp, Artificial Sequence
  Synthetic oligonucleotide; GAG chr11 5388622 5388641 5388638 +
aagaaaataggatatacacg

SEQ ID NO: 27618 - DNA, 20 bp, Artificial Sequence
  Synthetic oligonucleotide; GAG chr11 5388624 5388643 5388640 +
gaaaataggatatacacgga

SEQ ID NO: 27619 - DNA, 20 bp, Artificial Sequence
  Synthetic oligonucleotide; AAG chr11 5388632 5388651 5388648 +
gatatacacggagagaaaat

SEQ ID NO: 27620 - DNA, 20 bp, Artificial Sequence
  Synthetic oligonucleotide; AGG chr11 5388633 5388652 5388649 +
atatacacggagagaaaata

SEQ ID NO: 27621 - DNA, 20 bp, Artificial Sequence
  Synthetic oligonucleotide; TAG chr11 5388636 5388655 5388652 +
tacacggagagaaaataagg

SEQ ID NO: 27622 - DNA, 20 bp, Artificial Sequence
  Synthetic oligonucleotide; AGG chr11 5388637 5388656 5388653 +
acacggagagaaaataaggt

SEQ ID NO: 27623 - DNA, 20 bp, Artificial Sequence
  Synthetic oligonucleotide; GGG chr11 5388638 5388657 5388654 +
cacggagagaaaataaggta

SEQ ID NO: 27624 - DNA, 20 bp, Artificial Sequence
  Synthetic oligonucleotide; TAG chr11 5388711 5388730 5388727 +
tatacgtctctcttgctata

SEQ ID NO: 27625 - DNA, 20 bp, Artificial Sequence
  Synthetic oligonucleotide; TAG chr11 5388714 5388733 5388730 +
acgtctctcttgctatatag

SEQ ID NO: 27626 - DNA, 20 bp, Artificial Sequence
  Synthetic oligonucleotide; CAG chr11 5388728 5388747 5388744 +
atatagtagtcaactgaata

SEQ ID NO: 27627 - DNA, 20 bp, Artificial Sequence
  Synthetic oligonucleotide; TAG chr11 5388731 5388750 5388747 +
tagtagtcaactgaatacag

SEQ ID NO: 27628 - DNA, 20 bp, Artificial Sequence
  Synthetic oligonucleotide; AAG chr11 5388739 5388758 5388755 +
aactgaatacagtagtacaa

SEQ ID NO: 27629 - DNA, 20 bp, Artificial Sequence
  Synthetic oligonucleotide; GAG chr11 5388744 5388763 5388760 +
aatacagtagtacaaaagat

SEQ ID NO: 27630 - DNA, 20 bp, Artificial Sequence
  Synthetic oligonucleotide; TGG chr11 5388751 5388770 5388767 +
tagtacaaaagatgagtcac

SEQ ID NO: 27631 - DNA, 20 bp, Artificial Sequence
  Synthetic oligonucleotide; TAG chr11 5388756 5388775 5388772 +
caaaagatgagtcactggaa

SEQ ID NO: 27632 - DNA, 20 bp, Artificial Sequence
  Synthetic oligonucleotide; AAG chr11 5388765 5388784 5388781 +
agtcactggaatagtcctga

SEQ ID NO: 27633 - DNA, 20 bp, Artificial Sequence
  Synthetic oligonucleotide; GAG chr11 5388767 5388786 5388783 +
tcactggaatagtcctgaaa

SEQ ID NO: 27634 - DNA, 20 bp, Artificial Sequence
  Synthetic oligonucleotide; TAG chr11 5388780 5388799 5388796 +
cctgaaagagtgatctgaat

SEQ ID NO: 27635 - DNA, 20 bp, Artificial Sequence
  Synthetic oligonucleotide; TAG chr11 5388785 5388804 5388801 +
aagagtgatctgaattagaa

SEQ ID NO: 27636 - DNA, 20 bp, Artificial Sequence
  Synthetic oligonucleotide; AAG chr11 5388796 5388815 5388812 +
gaattagaatagcatcaatg

SEQ ID NO: 27637 - DNA, 20 bp, Artificial Sequence
  Synthetic oligonucleotide; AGG chr11 5388797 5388816 5388813 +
aattagaatagcatcaatga

SEQ ID NO: 27638 - DNA, 20 bp, Artificial Sequence
  Synthetic oligonucleotide; CGG chr11 5388803 5388822 5388819 +
aatagcatcaatgaaggtga

SEQ ID NO: 27639 - DNA, 20 bp, Artificial Sequence
  Synthetic oligonucleotide; GAG chr11 5388807 5388826 5388823 +
gcatcaatgaaggtgacggt

SEQ ID NO: 27640 - DNA, 20 bp, Artificial Sequence
  Synthetic oligonucleotide; CAG chr11 5388814 5388833 5388830 +
tgaaggtgacggtgagtaaa

SEQ ID NO: 27641 - DNA, 20 bp, Artificial Sequence
  Synthetic oligonucleotide; GAG chr11 5388821 5388840 5388837 +
gacggtgagtaaacagactt

SEQ ID NO: 27642 - DNA, 20 bp, Artificial Sequence
  Synthetic oligonucleotide; AGG chr11 5388822 5388841 5388838 +
acggtgagtaaacagacttg

SEQ ID NO: 27643 - DNA, 20 bp, Artificial Sequence
  Synthetic oligonucleotide; CAG chr11 5388829 5388848 5388845 +
gtaaacagacttgaggtatt

SEQ ID NO: 27644 - DNA, 20 bp, Artificial Sequence
  Synthetic oligonucleotide; CAG chr11 5388836 5388855 5388852 +
gacttgaggtattcagtaaa

SEQ ID NO: 27645 - DNA, 20 bp, Artificial Sequence
  Synthetic oligonucleotide; TAG chr11 5388845 5388864 5388861 +
tattcagtaaacagaaaccc

SEQ ID NO: 27646 - DNA, 20 bp, Artificial Sequence
  Synthetic oligonucleotide; AGG chr11 5388846 5388865 5388862 +
attcagtaaacagaaaccct

SEQ ID NO: 27647 - DNA, 20 bp, Artificial Sequence
  Synthetic oligonucleotide; TGG chr11 5388852 5388871 5388868 +
taaacagaaaccctaggact

SEQ ID NO: 27648 - DNA, 20 bp, Artificial Sequence
  Synthetic oligonucleotide; TGG chr11 5388859 5388878 5388875 +
aaaccctaggacttggtgat

SEQ ID NO: 27649 - DNA, 20 bp, Artificial Sequence
  Synthetic oligonucleotide; TAG chr11 5388867 5388886 5388883 +
ggacttggtgattggttgat

SEQ ID NO: 27650 - DNA, 20 bp, Artificial Sequence
  Synthetic oligonucleotide; TGG chr11 5388876 5388895 5388892 +
gattggttgattagatacta

SEQ ID NO: 27651 - DNA, 20 bp, Artificial Sequence
  Synthetic oligonucleotide; GAG chr11 5388878 5388897 5388894 +
ttggttgattagatactatg

SEQ ID NO: 27652 - DNA, 20 bp, Artificial Sequence
  Synthetic oligonucleotide; GAG chr11 5388880 5388899 5388896 +
ggttgattagatactatgga

SEQ ID NO: 27653 - DNA, 20 bp, Artificial Sequence
  Synthetic oligonucleotide; TGG chr11 5388891 5388910 5388907 +
tactatggagagatgtgata

SEQ ID NO: 27654 - DNA, 20 bp, Artificial Sequence
  Synthetic oligonucleotide; GAG chr11 5388893 5388912 5388909 +
ctatggagagatgtgatatg

SEQ ID NO: 27655 - DNA, 20 bp, Artificial Sequence
  Synthetic oligonucleotide; AAG chr11 5388896 5388915 5388912 +
tggagagatgtgatatggag

SEQ ID NO: 27656 - DNA, 20 bp, Artificial Sequence
  Synthetic oligonucleotide; GAG chr11 5388926 5388945 5388942 +
taaaacatgacatttgactt

SEQ ID NO: 27657 - DNA, 20 bp, Artificial Sequence
  Synthetic oligonucleotide; GAG chr11 5388934 5388953 5388950 +
gacatttgacttgagccact

SEQ ID NO: 27658 - DNA, 20 bp, Artificial Sequence
  Synthetic oligonucleotide; AAG chr11 5388945 5388964 5388961 +
tgagccactgagataatgaa

SEQ ID NO: 27659 - DNA, 20 bp, Artificial Sequence
  Synthetic oligonucleotide; CAG chr11 5388950 5388969 5388966 +
cactgagataatgaaaagta

SEQ ID NO: 27660 - DNA, 20 bp, Artificial Sequence
  Synthetic oligonucleotide; TAG chr11 5388960 5388979 5388976 +
atgaaaagtacagatgttgc

SEQ ID NO: 27661 - DNA, 20 bp, Artificial Sequence
  Synthetic oligonucleotide; GAG chr11 5388962 5388981 5388978 +
gaaaagtacagatgttgcta

SEQ ID NO: 27662 - DNA, 20 bp, Artificial Sequence
  Synthetic oligonucleotide; TGG chr11 5388967 5388986 5388983 +
gtacagatgttgctagagtc

SEQ ID NO: 27663 - DNA, 20 bp, Artificial Sequence
  Synthetic oligonucleotide; AAG chr11 5388977 5388996 5388993 +
tgctagagtctggaaatcaa

SEQ ID NO: 27664 - DNA, 20 bp, Artificial Sequence
  Synthetic oligonucleotide; GAG chr11 5388979 5388998 5388995 +
ctagagtctggaaatcaaaa

SEQ ID NO: 27665 - DNA, 20 bp, Artificial Sequence
  Synthetic oligonucleotide; GAG chr11 5388981 5389000 5388997 +
agagtctggaaatcaaaaga

SEQ ID NO: 27666 - DNA, 20 bp, Artificial Sequence
  Synthetic oligonucleotide; AAG chr11 5388985 5389004 5389001 +
tctggaaatcaaaagagaga

SEQ ID NO: 27667 - DNA, 20 bp, Artificial Sequence
  Synthetic oligonucleotide; AAG chr11 5388990 5389009 5389006 +
aaatcaaaagagagaaagac

SEQ ID NO: 27668 - DNA, 20 bp, Artificial Sequence
  Synthetic oligonucleotide; TGG chr11 5388996 5389015 5389012 +
aaagagagaaagacaagttc

SEQ ID NO: 27669 - DNA, 20 bp, Artificial Sequence
  Synthetic oligonucleotide; TGG chr11 5389027 5389046 5389043 +
atttgttatttatcaatata

SEQ ID NO: 27670 - DNA, 20 bp, Artificial Sequence
  Synthetic oligonucleotide; TGG chr11 5389031 5389050 5389047 +
gttatttatcaatatatgga

SEQ ID NO: 27671 - DNA, 20 bp, Artificial Sequence
  Synthetic oligonucleotide; TGG chr11 5389046 5389065 5389062 +
atggatggtaaatgaaatca

SEQ ID NO: 27672 - DNA, 20 bp, Artificial Sequence
  Synthetic oligonucleotide; TAG chr11 5389049 5389068 5389065 +
gatggtaaatgaaatcatgg

SEQ ID NO: 27673 - DNA, 20 bp, Artificial Sequence
  Synthetic oligonucleotide; TGG chr11 5389052 5389071 5389068 +
ggtaaatgaaatcatggtag

SEQ ID NO: 27674 - DNA, 20 bp, Artificial Sequence
  Synthetic oligonucleotide; AAG chr11 5389063 5389082 5389079 +
tcatggtagtggatgacatt

SEQ ID NO: 27675 - DNA, 20 bp, Artificial Sequence
  Synthetic oligonucleotide; AAG chr11 5389066 5389085 5389082 +
tggtagtggatgacattaag

SEQ ID NO: 27676 - DNA, 20 bp, Artificial Sequence
  Synthetic oligonucleotide; TAG chr11 5389075 5389094 5389091 +
atgacattaagaagaaataa

SEQ ID NO: 27677 - DNA, 20 bp, Artificial Sequence
  Synthetic oligonucleotide; TGG chr11 5389082 5389101 5389098 +
taagaagaaataatagaata

SEQ ID NO: 27678 - DNA, 20 bp, Artificial Sequence
  Synthetic oligonucleotide; CAG chr11 5389086 5389105 5389102 +
aagaaataatagaatatggc

SEQ ID NO: 27679 - DNA, 20 bp, Artificial Sequence
  Synthetic oligonucleotide; AGG chr11 5389087 5389106 5389103 +
agaaataatagaatatggcc

SEQ ID NO: 27680 - DNA, 20 bp, Artificial Sequence
  Synthetic oligonucleotide; AAG chr11 5389098 5389117 5389114 +
aatatggccaggaaattgcc

SEQ ID NO: 27681 - DNA, 20 bp, Artificial Sequence
  Synthetic oligonucleotide; AGG chr11 5389099 5389118 5389115 +
atatggccaggaaattgcca

SEQ ID NO: 27682 - DNA, 20 bp, Artificial Sequence
  Synthetic oligonucleotide; TGG chr11 5389103 5389122 5389119 +
ggccaggaaattgccaagga

SEQ ID NO: 27683 - DNA, 20 bp, Artificial Sequence
  Synthetic oligonucleotide; GGG chr11 5389104 5389123 5389120 +
gccaggaaattgccaaggat

SEQ ID NO: 27684 - DNA, 20 bp, Artificial Sequence
  Synthetic oligonucleotide; AAG chr11 5389107 5389126 5389123 +
aggaaattgccaaggatggg

SEQ ID NO: 27685 - DNA, 20 bp, Artificial Sequence
  Synthetic oligonucleotide; AAG chr11 5389120 5389139 5389136 +
ggatgggaagaactatactt

SEQ ID NO: 27686 - DNA, 20 bp, Artificial Sequence
  Synthetic oligonucleotide; AGG chr11 5389121 5389140 5389137 +
gatgggaagaactatactta

SEQ ID NO: 27687 - DNA, 20 bp, Artificial Sequence
  Synthetic oligonucleotide; GGG chr11 5389122 5389141 5389138 +
atgggaagaactatacttaa

SEQ ID NO: 27688 - DNA, 20 bp, Artificial Sequence
  Synthetic oligonucleotide; GAG chr11 5389127 5389146 5389143 +
aagaactatacttaagggtt

SEQ ID NO: 27689 - DNA, 20 bp, Artificial Sequence
  Synthetic oligonucleotide; AAG chr11 5389135 5389154 5389151 +
tacttaagggttgagcaata

SEQ ID NO: 27690 - DNA, 20 bp, Artificial Sequence
  Synthetic oligonucleotide; AGG chr11 5389136 5389155 5389152 +
acttaagggttgagcaataa

SEQ ID NO: 27691 - DNA, 20 bp, Artificial Sequence
  Synthetic oligonucleotide; CAG chr11 5389144 5389163 5389160 +
gttgagcaataaaggcacac

SEQ ID NO: 27692 - DNA, 20 bp, Artificial Sequence
  Synthetic oligonucleotide; AAG chr11 5389149 5389168 5389165 +
gcaataaaggcacaccagca

SEQ ID NO: 27693 - DNA, 20 bp, Artificial Sequence
  Synthetic oligonucleotide; GAG chr11 5389151 5389170 5389167 +
aataaaggcacaccagcaaa

SEQ ID NO: 27694 - DNA, 20 bp, Artificial Sequence
  Synthetic oligonucleotide; AGG chr11 5389152 5389171 5389168 +
ataaaggcacaccagcaaag

SEQ ID NO: 27695 - DNA, 20 bp, Artificial Sequence
  Synthetic oligonucleotide; CAG chr11 5389155 5389174 5389171 +
aaggcacaccagcaaagagg

SEQ ID NO: 27696 - DNA, 20 bp, Artificial Sequence
  Synthetic oligonucleotide; GAG chr11 5389157 5389176 5389173 +
ggcacaccagcaaagaggca

SEQ ID NO: 27697 - DNA, 20 bp, Artificial Sequence
  Synthetic oligonucleotide; GAG chr11 5389159 5389178 5389175 +
cacaccagcaaagaggcaga

SEQ ID NO: 27698 - DNA, 20 bp, Artificial Sequence
  Synthetic oligonucleotide; AGG chr11 5389160 5389179 5389176 +
acaccagcaaagaggcagag

SEQ ID NO: 27699 - DNA, 20 bp, Artificial Sequence
  Synthetic oligonucleotide; CAG chr11 5389182 5389201 5389198 +
gaactgaaataattgaaata

SEQ ID NO: 27700 - DNA, 20 bp, Artificial Sequence
  Synthetic oligonucleotide; GAG chr11 5389184 5389203 5389200 +
actgaaataattgaaataca

SEQ ID NO: 27701 - DNA, 20 bp, Artificial Sequence
  Synthetic oligonucleotide; AGG chr11 5389185 5389204 5389201 +
ctgaaataattgaaatacag

SEQ ID NO: 27702 - DNA, 20 bp, Artificial Sequence
  Synthetic oligonucleotide; TGG chr11 5389193 5389212 5389209 +
attgaaatacagaggaaaac

SEQ ID NO: 27703 - DNA, 20 bp, Artificial Sequence
  Synthetic oligonucleotide; GAG chr11 5389197 5389216 5389213 +
aaatacagaggaaaactggt

SEQ ID NO: 27704 - DNA, 20 bp, Artificial Sequence
  Synthetic oligonucleotide; AGG chr11 5389198 5389217 5389214 +
aatacagaggaaaactggtg

SEQ ID NO: 27705 - DNA, 20 bp, Artificial Sequence
  Synthetic oligonucleotide; GGG chr11 5389199 5389218 5389215 +
atacagaggaaaactggtga

SEQ ID NO: 27706 - DNA, 20 bp, Artificial Sequence
  Synthetic oligonucleotide; GAG chr11 5389203 5389222 5389219 +
agaggaaaactggtgagggc

SEQ ID NO: 27707 - DNA, 20 bp, Artificial Sequence
  Synthetic oligonucleotide; AGG chr11 5389204 5389223 5389220 +
gaggaaaactggtgagggcg

SEQ ID NO: 27708 - DNA, 20 bp, Artificial Sequence
  Synthetic oligonucleotide; AAG chr11 5389213 5389232 5389229 +
tggtgagggcgaggttatca

SEQ ID NO: 27709 - DNA, 20 bp, Artificial Sequence
  Synthetic oligonucleotide; AAG chr11 5389217 5389236 5389233 +
gagggcgaggttatcaaaga

SEQ ID NO: 27710 - DNA, 20 bp, Artificial Sequence
  Synthetic oligonucleotide; AAG chr11 5389227 5389246 5389243 +
ttatcaaagaaagttcaata

SEQ ID NO: 27711 - DNA, 20 bp, Artificial Sequence
  Synthetic oligonucleotide; TAG chr11 5389230 5389249 5389246 +
tcaaagaaagttcaataaag

SEQ ID NO: 27712 - DNA, 20 bp, Artificial Sequence
  Synthetic oligonucleotide; GAG chr11 5389234 5389253 5389250 +
agaaagttcaataaagtagt

SEQ ID NO: 27713 - DNA, 20 bp, Artificial Sequence
  Synthetic oligonucleotide; TGG chr11 5389239 5389258 5389255 +
gttcaataaagtagtgagat

SEQ ID NO: 27714 - DNA, 20 bp, Artificial Sequence
  Synthetic oligonucleotide; CAG chr11 5389242 5389261 5389258 +
caataaagtagtgagattgg

SEQ ID NO: 27715 - DNA, 20 bp, Artificial Sequence
  Synthetic oligonucleotide; AAG chr11 5389252 5389271 5389268 +
gtgagattggcagaattcat

SEQ ID NO: 27716 - DNA, 20 bp, Artificial Sequence
  Synthetic oligonucleotide; AGG chr11 5389253 5389272 5389269 +
tgagattggcagaattcata

SEQ ID NO: 27717 - DNA, 20 bp, Artificial Sequence
  Synthetic oligonucleotide; GGG chr11 5389254 5389273 5389270 +
gagattggcagaattcataa

SEQ ID NO: 27718 - DNA, 20 bp, Artificial Sequence
  Synthetic oligonucleotide; TGG chr11 5389257 5389276 5389273 +
attggcagaattcataaggg

SEQ ID NO: 27719 - DNA, 20 bp, Artificial Sequence
  Synthetic oligonucleotide; GAG chr11 5389259 5389278 5389275 +
tggcagaattcataagggtg

SEQ ID NO: 27720 - DNA, 20 bp, Artificial Sequence
  Synthetic oligonucleotide; TAG chr11 5389262 5389281 5389278 +
cagaattcataagggtggag

SEQ ID NO: 27721 - DNA, 20 bp, Artificial Sequence
  Synthetic oligonucleotide; AAG chr11 5389274 5389293 5389290 +
gggtggagtagataatacta

SEQ ID NO: 27722 - DNA, 20 bp, Artificial Sequence
  Synthetic oligonucleotide; AGG chr11 5389275 5389294 5389291 +
ggtggagtagataatactaa

SEQ ID NO: 27723 - DNA, 20 bp, Artificial Sequence
  Synthetic oligonucleotide; TGG chr11 5389290 5389309 5389306 +
actaaaggtgatgatgacca

SEQ ID NO: 27724 - DNA, 20 bp, Artificial Sequence
  Synthetic oligonucleotide; TAG chr11 5389317 5389336 5389333 +
gcttgtgatgttgtgaatgt

SEQ ID NO: 27725 - DNA, 20 bp, Artificial Sequence
  Synthetic oligonucleotide; AAG chr11 5389322 5389341 5389338 +
tgatgttgtgaatgttagtg

SEQ ID NO: 27726 - DNA, 20 bp, Artificial Sequence
  Synthetic oligonucleotide; AAG chr11 5389328 5389347 5389344 +
tgtgaatgttagtgaagctg

SEQ ID NO: 27727 - DNA, 20 bp, Artificial Sequence
  Synthetic oligonucleotide; CAG chr11 5389341 5389360 5389357 +
gaagctgaagaattaataac

SEQ ID NO: 27728 - DNA, 20 bp, Artificial Sequence
  Synthetic oligonucleotide; CAG chr11 5389361 5389380 5389377 +
cagaaatatccatttatttt

SEQ ID NO: 27729 - DNA, 20 bp, Artificial Sequence
  Synthetic oligonucleotide; GAG chr11 5389374 5389393 5389390 +
ttattttcagctcaatcccc

SEQ ID NO: 27730 - DNA, 20 bp, Artificial Sequence
  Synthetic oligonucleotide; AGG chr11 5389375 5389394 5389391 +
tattttcagctcaatccccg

SEQ ID NO: 27731 - DNA, 20 bp, Artificial Sequence
  Synthetic oligonucleotide; CAG chr11 5389383 5389402 5389399 +
gctcaatccccgaggaatgt

SEQ ID NO: 27732 - DNA, 20 bp, Artificial Sequence
  Synthetic oligonucleotide; CAG chr11 5389399 5389418 5389415 +
atgtcagtccaatattcgct

SEQ ID NO: 27733 - DNA, 20 bp, Artificial Sequence
  Synthetic oligonucleotide; CAG chr11 5389433 5389452 5389449 +
tgctgctatccaacattact

SEQ ID NO: 27734 - DNA, 20 bp, Artificial Sequence
  Synthetic oligonucleotide; TAG chr11 5389438 5389457 5389454 +
ctatccaacattactcagtt

SEQ ID NO: 27735 - DNA, 20 bp, Artificial Sequence
  Synthetic oligonucleotide; CAG chr11 5389459 5389478 5389475 +
agccccatattctatctcac

SEQ ID NO: 27736 - DNA, 20 bp, Artificial Sequence
  Synthetic oligonucleotide; TGG chr11 5389468 5389487 5389484 +
ttctatctcaccagctttcc

SEQ ID NO: 27737 - DNA, 20 bp, Artificial Sequence
  Synthetic oligonucleotide; TGG chr11 5389473 5389492 5389489 +
tctcaccagctttcctggat

SEQ ID NO: 27738 - DNA, 20 bp, Artificial Sequence
  Synthetic oligonucleotide; AAG chr11 5389476 5389495 5389492 +
caccagctttcctggattgg

SEQ ID NO: 27739 - DNA, 20 bp, Artificial Sequence
  Synthetic oligonucleotide; AGG chr11 5389477 5389496 5389493 +
accagctttcctggattgga

SEQ ID NO: 27740 - DNA, 20 bp, Artificial Sequence
  Synthetic oligonucleotide; TGG chr11 5389490 5389509 5389506 +
gattggaaggcatcaaacac

SEQ ID NO: 27741 - DNA, 20 bp, Artificial Sequence
  Synthetic oligonucleotide; TGG chr11 5389521 5389540 5389537 +
cccctttttctttatgtaca

SEQ ID NO: 27742 - DNA, 20 bp, Artificial Sequence
  Synthetic oligonucleotide; CAG chr11 5389533 5389552 5389549 +
tatgtacatggttgccatct

SEQ ID NO: 27743 - DNA, 20 bp, Artificial Sequence
  Synthetic oligonucleotide; AGG chr11 5389534 5389553 5389550 +
atgtacatggttgccatctc

SEQ ID NO: 27744 - DNA, 20 bp, Artificial Sequence
  Synthetic oligonucleotide; AAG chr11 5389562 5389581 5389578 +
gtttcattctgatcattatt

SEQ ID NO: 27745 - DNA, 20 bp, Artificial Sequence
  Synthetic oligonucleotide; TGG chr11 5389611 5389630 5389627 +
gtactatctactatccttgc

SEQ ID NO: 27746 - DNA, 20 bp, Artificial Sequence
  Synthetic oligonucleotide; TGG chr11 5389626 5389645 5389642 +
cttgctggccctcactgacc

SEQ ID NO: 27747 - DNA, 20 bp, Artificial Sequence
  Synthetic oligonucleotide; GGG chr11 5389627 5389646 5389643 +
ttgctggccctcactgacct

SEQ ID NO: 27748 - DNA, 20 bp, Artificial Sequence
  Synthetic oligonucleotide; GGG chr11 5389628 5389647 5389644 +
tgctggccctcactgacctg

SEQ ID NO: 27749 - DNA, 20 bp, Artificial Sequence
  Synthetic oligonucleotide; TGG chr11 5389659 5389678 5389675 +
gtccacgttgcccaccacta

SEQ ID NO: 27750 - DNA, 20 bp, Artificial Sequence
  Synthetic oligonucleotide; GGG chr11 5389660 5389679 5389676 +
tccacgttgcccaccactat

SEQ ID NO: 27751 - DNA, 20 bp, Artificial Sequence
  Synthetic oligonucleotide; GGG chr11 5389661 5389680 5389677 +
ccacgttgcccaccactatg

SEQ ID NO: 27752 - DNA, 20 bp, Artificial Sequence
  Synthetic oligonucleotide; TGG chr11 5389670 5389689 5389686 +
ccaccactatggggatcttc

SEQ ID NO: 27753 - DNA, 20 bp, Artificial Sequence
  Synthetic oligonucleotide; TAG chr11 5389684 5389703 5389700 +
atcttctggtttaactccca

SEQ ID NO: 27754 - DNA, 20 bp, Artificial Sequence
  Synthetic oligonucleotide; TGG chr11 5389696 5389715 5389712 +
aactcccatagtatctactt

SEQ ID NO: 27755 - DNA, 20 bp, Artificial Sequence
  Synthetic oligonucleotide; GAG chr11 5389698 5389717 5389714 +
ctcccatagtatctactttg

SEQ ID NO: 27756 - DNA, 20 bp, Artificial Sequence
  Synthetic oligonucleotide; CAG chr11 5389712 5389731 5389728 +
actttggagcgtgtcaaatc

SEQ ID NO: 27757 - DNA, 20 bp, Artificial Sequence
  Synthetic oligonucleotide; TGG chr11 5389743 5389762 5389759 +
catccactctttttccttca

SEQ ID NO: 27758 - DNA, 20 bp, Artificial Sequence
  Synthetic oligonucleotide; GAG chr11 5389745 5389764 5389761 +
tccactctttttccttcatg

SEQ ID NO: 27759 - DNA, 20 bp, Artificial Sequence
  Synthetic oligonucleotide; CAG chr11 5389752 5389771 5389768 +
tttttccttcatggagtcct

SEQ ID NO: 27760 - DNA, 20 bp, Artificial Sequence
  Synthetic oligonucleotide; TGG chr11 5389785 5389804 5389801 +
gatgtcctttgaccgccttg

SEQ ID NO: 27761 - DNA, 20 bp, Artificial Sequence
  Synthetic oligonucleotide; GAG chr11 5389804 5389823 5389820 +
gtggccatctgccaccctct

SEQ ID NO: 27762 - DNA, 20 bp, Artificial Sequence
  Synthetic oligonucleotide; AGG chr11 5389805 5389824 5389821 +
tggccatctgccaccctctg

SEQ ID NO: 27763 - DNA, 20 bp, Artificial Sequence
  Synthetic oligonucleotide; CGG chr11 5389812 5389831 5389828 +
ctgccaccctctgaggtatt

SEQ ID NO: 27764 - DNA, 20 bp, Artificial Sequence
  Synthetic oligonucleotide; TGG chr11 5389825 5389844 5389841 +
aggtattcggtcattatcac

SEQ ID NO: 27765 - DNA, 20 bp, Artificial Sequence
  Synthetic oligonucleotide; CAG chr11 5389829 5389848 5389845 +
attcggtcattatcactggc

SEQ ID NO: 27766 - DNA, 20 bp, Artificial Sequence
  Synthetic oligonucleotide; AAG chr11 5389833 5389852 5389849 +
ggtcattatcactggccagc

SEQ ID NO: 27767 - DNA, 20 bp, Artificial Sequence
  Synthetic oligonucleotide; TGG chr11 5389836 5389855 5389852 +
cattatcactggccagcaag

SEQ ID NO: 27768 - DNA, 20 bp, Artificial Sequence
  Synthetic oligonucleotide; CAG chr11 5389840 5389859 5389856 +
atcactggccagcaagtggt

SEQ ID NO: 27769 - DNA, 20 bp, Artificial Sequence
  Synthetic oligonucleotide; GAG chr11 5389842 5389861 5389858 +
cactggccagcaagtggtca

SEQ ID NO: 27770 - DNA, 20 bp, Artificial Sequence
  Synthetic oligonucleotide; CAG chr11 5389845 5389864 5389861 +
tggccagcaagtggtcagag

SEQ ID NO: 27771 - DNA, 20 bp, Artificial Sequence
  Synthetic oligonucleotide; AGG chr11 5389846 5389865 5389862 +
ggccagcaagtggtcagagc

SEQ ID NO: 27772 - DNA, 20 bp, Artificial Sequence
  Synthetic oligonucleotide; CGG chr11 5389865 5389884 5389881 +
caggcctaattgtcatcttc

SEQ ID NO: 27773 - DNA, 20 bp, Artificial Sequence
  Synthetic oligonucleotide; GGG chr11 5389866 5389885 5389882 +
aggcctaattgtcatcttcc

SEQ ID NO: 27774 - DNA, 20 bp, Artificial Sequence
  Synthetic oligonucleotide; GGG chr11 5389867 5389886 5389883 +
ggcctaattgtcatcttccg

SEQ ID NO: 27775 - DNA, 20 bp, Artificial Sequence
  Synthetic oligonucleotide; TGG chr11 5389875 5389894 5389891 +
tgtcatcttccggggacctg

SEQ ID NO: 27776 - DNA, 20 bp, Artificial Sequence
  Synthetic oligonucleotide; AAG chr11 5389904 5389923 5389920 +
tccctattgtcctcctcctg

SEQ ID NO: 27777 - DNA, 20 bp, Artificial Sequence
  Synthetic oligonucleotide; AGG chr11 5389905 5389924 5389921 +
ccctattgtcctcctcctga

SEQ ID NO: 27778 - DNA, 20 bp, Artificial Sequence
  Synthetic oligonucleotide; TGG chr11 5389921 5389940 5389937 +
ctgaaggcttttccctactg

SEQ ID NO: 27779 - DNA, 20 bp, Artificial Sequence
  Synthetic oligonucleotide; TGG chr11 5389929 5389948 5389945 +
ttttccctactgtggatctg

SEQ ID NO: 27780 - DNA, 20 bp, Artificial Sequence
  Synthetic oligonucleotide; CAG chr11 5389958 5389977 5389974 +
cccactcattttgcctgcac

SEQ ID NO: 27781 - DNA, 20 bp, Artificial Sequence
  Synthetic oligonucleotide; AGG chr11 5389959 5389978 5389975 +
ccactcattttgcctgcacc

SEQ ID NO: 27782 - DNA, 20 bp, Artificial Sequence
  Synthetic oligonucleotide; AAG chr11 5389962 5389981 5389978 +
ctcattttgcctgcaccagg

SEQ ID NO: 27783 - DNA, 20 bp, Artificial Sequence
  Synthetic oligonucleotide; CAG chr11 5389970 5389989 5389986 +
gcctgcaccaggaagtgata

SEQ ID NO: 27784 - DNA, 20 bp, Artificial Sequence
  Synthetic oligonucleotide; TGG chr11 5389974 5389993 5389990 +
gcaccaggaagtgatacagc

SEQ ID NO: 27785 - DNA, 20 bp, Artificial Sequence
  Synthetic oligonucleotide; CAG chr11 5389983 5390002 5389999 +
agtgatacagctggcctgca

SEQ ID NO: 27786 - DNA, 20 bp, Artificial Sequence
  Synthetic oligonucleotide; TGG chr11 5390008 5390027 5390024 +
atcaccttcaataatctgta

SEQ ID NO: 27787 - DNA, 20 bp, Artificial Sequence
  Synthetic oligonucleotide; TGG chr11 5390016 5390035 5390032 +
caataatctgtatggactga

SEQ ID NO: 27788 - DNA, 20 bp, Artificial Sequence
  Synthetic oligonucleotide; TGG chr11 5390019 5390038 5390035 +
taatctgtatggactgatgg

SEQ ID NO: 27789 - DNA, 20 bp, Artificial Sequence
  Synthetic oligonucleotide; TAG chr11 5390022 5390041 5390038 +
tctgtatggactgatggtgg

SEQ ID NO: 27790 - DNA, 20 bp, Artificial Sequence
  Synthetic oligonucleotide; TGG chr11 5390040 5390059 5390056 +
ggtagttttcactgtgatgc

SEQ ID NO: 27791 - DNA, 20 bp, Artificial Sequence
  Synthetic oligonucleotide; TGG chr11 5390046 5390065 5390062 +
tttcactgtgatgctggacc

SEQ ID NO: 27792 - DNA, 20 bp, Artificial Sequence
  Synthetic oligonucleotide; TGG chr11 5390068 5390087 5390084 +
gtgctcatcgcactgtccta

SEQ ID NO: 27793 - DNA, 20 bp, Artificial Sequence
  Synthetic oligonucleotide; CAG chr11 5390085 5390104 5390101 +
ctatggactcatcctgcaca

SEQ ID NO: 27794 - DNA, 20 bp, Artificial Sequence
  Synthetic oligonucleotide; TAG chr11 5390088 5390107 5390104 +
tggactcatcctgcacacag

SEQ ID NO: 27795 - DNA, 20 bp, Artificial Sequence
  Synthetic oligonucleotide; CAG chr11 5390091 5390110 5390107 +
actcatcctgcacacagtag

SEQ ID NO: 27796 - DNA, 20 bp, Artificial Sequence
  Synthetic oligonucleotide; AGG chr11 5390092 5390111 5390108 +
ctcatcctgcacacagtagc

SEQ ID NO: 27797 - DNA, 20 bp, Artificial Sequence
  Synthetic oligonucleotide; TGG chr11 5390097 5390116 5390113 +
cctgcacacagtagcaggcc

SEQ ID NO: 27798 - DNA, 20 bp, Artificial Sequence
  Synthetic oligonucleotide; AAG chr11 5390106 5390125 5390122 +
agtagcaggcctggcctccc

SEQ ID NO: 27799 - DNA, 20 bp, Artificial Sequence
  Synthetic oligonucleotide; GAG chr11 5390108 5390127 5390124 +
tagcaggcctggcctcccaa

SEQ ID NO: 27800 - DNA, 20 bp, Artificial Sequence
  Synthetic oligonucleotide; AGG chr11 5390109 5390128 5390125 +
agcaggcctggcctcccaag

SEQ ID NO: 27801 - DNA, 20 bp, Artificial Sequence
  Synthetic oligonucleotide; GAG chr11 5390111 5390130 5390127 +
caggcctggcctcccaagag

SEQ ID NO: 27802 - DNA, 20 bp, Artificial Sequence
  Synthetic oligonucleotide; CAG chr11 5390114 5390133 5390130 +
gcctggcctcccaagaggag

SEQ ID NO: 27803 - DNA, 20 bp, Artificial Sequence
  Synthetic oligonucleotide; CAG chr11 5390129 5390148 5390145 +
aggagcagcgccgtgccttt

SEQ ID NO: 27804 - DNA, 20 bp, Artificial Sequence
  Synthetic oligonucleotide; TAG chr11 5390160 5390179 5390176 +
cgctcctctctgtgctgtgc

SEQ ID NO: 27805 - DNA, 20 bp, Artificial Sequence
  Synthetic oligonucleotide; TGG chr11 5390181 5390200 5390197 +
agtattctttgtgcccatga

SEQ ID NO: 27806 - DNA, 20 bp, Artificial Sequence
  Synthetic oligonucleotide; GGG chr11 5390182 5390201 5390198 +
gtattctttgtgcccatgat

SEQ ID NO: 27807 - DNA, 20 bp, Artificial Sequence
  Synthetic oligonucleotide; GGG chr11 5390183 5390202 5390199 +
tattctttgtgcccatgatg

SEQ ID NO: 27808 - DNA, 20 bp, Artificial Sequence
  Synthetic oligonucleotide; TGG chr11 5390193 5390212 5390209 +
gcccatgatggggctgtccc

SEQ ID NO: 27809 - DNA, 20 bp, Artificial Sequence
  Synthetic oligonucleotide; TGG chr11 5390206 5390225 5390222 +
ctgtccctggtgcaccgttt

SEQ ID NO: 27810 - DNA, 20 bp, Artificial Sequence
  Synthetic oligonucleotide; GGG chr11 5390207 5390226 5390223 +
tgtccctggtgcaccgtttt

SEQ ID NO: 27811 - DNA, 20 bp, Artificial Sequence
  Synthetic oligonucleotide; AAG chr11 5390210 5390229 5390226 +
ccctggtgcaccgttttggg

SEQ ID NO: 27812 - DNA, 20 bp, Artificial Sequence
  Synthetic oligonucleotide; TGG chr11 5390241 5390260 5390257 +
acctgctattcatcttctta

SEQ ID NO: 27813 - DNA, 20 bp, Artificial Sequence
  Synthetic oligonucleotide; CAG chr11 5390290 5390309 5390306 +
atgcttaacccaatcatata

SEQ ID NO: 27814 - DNA, 20 bp, Artificial Sequence
  Synthetic oligonucleotide; AAG chr11 5390297 5390316 5390313 +
acccaatcatatacagcatt

SEQ ID NO: 27815 - DNA, 20 bp, Artificial Sequence
  Synthetic oligonucleotide; AAG chr11 5390303 5390322 5390319 +
tcatatacagcattaagacc

SEQ ID NO: 27816 - DNA, 20 bp, Artificial Sequence
  Synthetic oligonucleotide; AGG chr11 5390304 5390323 5390320 +
catatacagcattaagacca

SEQ ID NO: 27817 - DNA, 20 bp, Artificial Sequence
  Synthetic oligonucleotide; GAG chr11 5390306 5390325 5390322 +
tatacagcattaagaccaag

SEQ ID NO: 27818 - DNA, 20 bp, Artificial Sequence
  Synthetic oligonucleotide; AAG chr11 5390327 5390346 5390343 +
agatccaccgtgccattatc

SEQ ID NO: 27819 - DNA, 20 bp, Artificial Sequence
  Synthetic oligonucleotide; TAG chr11 5390334 5390353 5390350 +
ccgtgccattatcaagttcc

SEQ ID NO: 27820 - DNA, 20 bp, Artificial Sequence
  Synthetic oligonucleotide; AGG chr11 5390335 5390354 5390351 +
cgtgccattatcaagttcct

SEQ ID NO: 27821 - DNA, 20 bp, Artificial Sequence
  Synthetic oligonucleotide; AAG chr11 5390345 5390364 5390361 +
tcaagttcctaggtcttaaa

SEQ ID NO: 27822 - DNA, 20 bp, Artificial Sequence
  Synthetic oligonucleotide; AGG chr11 5390346 5390365 5390362 +
caagttcctaggtcttaaaa

SEQ ID NO: 27823 - DNA, 20 bp, Artificial Sequence
  Synthetic oligonucleotide; CAG chr11 5390350 5390369 5390366 +
ttcctaggtcttaaaaaggc

SEQ ID NO: 27824 - DNA, 20 bp, Artificial Sequence
  Synthetic oligonucleotide; GAG chr11 5390358 5390377 5390374 +
tcttaaaaaggccagtaaat

SEQ ID NO: 27825 - DNA, 20 bp, Artificial Sequence
  Synthetic oligonucleotide; TGG chr11 5390364 5390383 5390380 +
aaaggccagtaaatgagtcc

SEQ ID NO: 27826 - DNA, 20 bp, Artificial Sequence
  Synthetic oligonucleotide; GGG chr11 5390365 5390384 5390381 +
aaggccagtaaatgagtcct

SEQ ID NO: 27827 - DNA, 20 bp, Artificial Sequence
  Synthetic oligonucleotide; GGG chr11 5390366 5390385 5390382 +
aggccagtaaatgagtcctg

SEQ ID NO: 27828 - DNA, 20 bp, Artificial Sequence
  Synthetic oligonucleotide; TAG chr11 5390382 5390401 5390398 +
cctggggctaaaactccccc

SEQ ID NO: 27829 - DNA, 20 bp, Artificial Sequence
  Synthetic oligonucleotide; GAG chr11 5390384 5390403 5390400 +
tggggctaaaactcccccta

SEQ ID NO: 27830 - DNA, 20 bp, Artificial Sequence
  Synthetic oligonucleotide; AGG chr11 5390385 5390404 5390401 +
ggggctaaaactccccctag

SEQ ID NO: 27831 - DNA, 20 bp, Artificial Sequence
  Synthetic oligonucleotide; AAG chr11 5390393 5390412 5390409 +
aactccccctagaggcctat

SEQ ID NO: 27832 - DNA, 20 bp, Artificial Sequence
  Synthetic oligonucleotide; AAG chr11 5390396 5390415 5390412 +
tccccctagaggcctataag

SEQ ID NO: 27833 - DNA, 20 bp, Artificial Sequence
  Synthetic oligonucleotide; AGG chr11 5390397 5390416 5390413 +
ccccctagaggcctataaga

SEQ ID NO: 27834 - DNA, 20 bp, Artificial Sequence
  Synthetic oligonucleotide; TGG chr11 5390408 5390427 5390424 +
cctataagaaggccccaaat

SEQ ID NO: 27835 - DNA, 20 bp, Artificial Sequence
  Synthetic oligonucleotide; TGG chr11 5390421 5390440 5390437 +
cccaaattggactgaaaatt

SEQ ID NO: 27836 - DNA, 20 bp, Artificial Sequence
  Synthetic oligonucleotide; GAG chr11 5390423 5390442 5390439 +
caaattggactgaaaatttg

SEQ ID NO: 27837 - DNA, 20 bp, Artificial Sequence
  Synthetic oligonucleotide; GAG chr11 5390430 5390449 5390446 +
gactgaaaatttggagtatt

SEQ ID NO: 27838 - DNA, 20 bp, Artificial Sequence
  Synthetic oligonucleotide; TAG chr11 5390437 5390456 5390453 +
aatttggagtattgagtata

SEQ ID NO: 27839 - DNA, 20 bp, Artificial Sequence
  Synthetic oligonucleotide; AAG chr11 5390450 5390469 5390466 +
gagtatatagcatgctctta

SEQ ID NO: 27840 - DNA, 20 bp, Artificial Sequence
  Synthetic oligonucleotide; TGG chr11 5390481 5390500 5390497 +
cccctgtcctaaataaaata

SEQ ID NO: 27841 - DNA, 20 bp, Artificial Sequence
  Synthetic oligonucleotide; GGG chr11 5390482 5390501 5390498 +
ccctgtcctaaataaaatat

SEQ ID NO: 27842 - DNA, 20 bp, Artificial Sequence
  Synthetic oligonucleotide; TGG chr11 5390497 5390516 5390513 +
aatatgggcaaatttatgtc

SEQ ID NO: 27843 - DNA, 20 bp, Artificial Sequence
  Synthetic oligonucleotide; GAG chr11 5390499 5390518 5390515 +
tatgggcaaatttatgtctg

SEQ ID NO: 27844 - DNA, 20 bp, Artificial Sequence
  Synthetic oligonucleotide; TGG chr11 5390505 5390524 5390521 +
caaatttatgtctggagttg

SEQ ID NO: 27845 - DNA, 20 bp, Artificial Sequence
  Synthetic oligonucleotide; TAG chr11 5390534 5390553 5390550 +
aaaactgaacttctcttgct

SEQ ID NO: 27846 - DNA, 20 bp, Artificial Sequence
  Synthetic oligonucleotide; TGG chr11 5390544 5390563 5390560 +
ttctcttgcttagattttaa

SEQ ID NO: 27847 - DNA, 20 bp, Artificial Sequence
  Synthetic oligonucleotide; CAG chr11 5390556 5390575 5390572 +
gattttaatggctcctccta

SEQ ID NO: 27848 - DNA, 20 bp, Artificial Sequence
  Synthetic oligonucleotide; GAG chr11 5390561 5390580 5390577 +
taatggctcctcctacagct

SEQ ID NO: 27849 - DNA, 20 bp, Artificial Sequence
  Synthetic oligonucleotide; TGG chr11 5390567 5390586 5390583 +
ctcctcctacagctgagaac

SEQ ID NO: 27850 - DNA, 20 bp, Artificial Sequence
  Synthetic oligonucleotide; TGG chr11 5390576 5390595 5390592 +
cagctgagaactggcatttt

SEQ ID NO: 27851 - DNA, 20 bp, Artificial Sequence
  Synthetic oligonucleotide; TAG chr11 5390579 5390598 5390595 +
ctgagaactggcatttttgg

SEQ ID NO: 27852 - DNA, 20 bp, Artificial Sequence
  Synthetic oligonucleotide; AAG chr11 5390587 5390606 5390603 +
tggcatttttggtagcatca

SEQ ID NO: 27853 - DNA, 20 bp, Artificial Sequence
  Synthetic oligonucleotide; CAG chr11 5390595 5390614 5390611 +
ttggtagcatcaaagctatc

SEQ ID NO: 27854 - DNA, 20 bp, Artificial Sequence
  Synthetic oligonucleotide; AAG chr11 5390598 5390617 5390614 +
gtagcatcaaagctatccag

SEQ ID NO: 27855 - DNA, 20 bp, Artificial Sequence
  Synthetic oligonucleotide; AGG chr11 5390599 5390618 5390615 +
tagcatcaaagctatccaga

SEQ ID NO: 27856 - DNA, 20 bp, Artificial Sequence
  Synthetic oligonucleotide; AAG chr11 5390613 5390632 5390629 +
tccagaaggcaactttattg

SEQ ID NO: 27857 - DNA, 20 bp, Artificial Sequence
  Synthetic oligonucleotide; AGG chr11 5390614 5390633 5390630 +
ccagaaggcaactttattga

SEQ ID NO: 27858 - DNA, 20 bp, Artificial Sequence
  Synthetic oligonucleotide; AAG chr11 5390665 5390684 5390681 +
gaaactaaataaaaactaaa

SEQ ID NO: 27859 - DNA, 20 bp, Artificial Sequence
  Synthetic oligonucleotide; CAG chr11 5390680 5390699 5390696 +
ctaaaaagaacaataaatac

SEQ ID NO: 27860 - DNA, 20 bp, Artificial Sequence
  Synthetic oligonucleotide; GAG chr11 5390682 5390701 5390698 +
aaaaagaacaataaatacca

SEQ ID NO: 27861 - DNA, 20 bp, Artificial Sequence
  Synthetic oligonucleotide; CAG chr11 5390689 5390708 5390705 +
acaataaataccagagcacc

SEQ ID NO: 27862 - DNA, 20 bp, Artificial Sequence
  Synthetic oligonucleotide; GAG chr11 5390691 5390710 5390707 +
aataaataccagagcaccca

SEQ ID NO: 27863 - DNA, 20 bp, Artificial Sequence
  Synthetic oligonucleotide; AGG chr11 5390692 5390711 5390708 +
ataaataccagagcacccag

SEQ ID NO: 27864 - DNA, 20 bp, Artificial Sequence
  Synthetic oligonucleotide; GAG chr11 5390694 5390713 5390710 +
aaataccagagcacccagag

SEQ ID NO: 27865 - DNA, 20 bp, Artificial Sequence
  Synthetic oligonucleotide; GAG chr11 5390696 5390715 5390712 +
ataccagagcacccagagga

SEQ ID NO: 27866 - DNA, 20 bp, Artificial Sequence
  Synthetic oligonucleotide; TGG chr11 5390701 5390720 5390717 +
agagcacccagaggagagcc

SEQ ID NO: 27867 - DNA, 20 bp, Artificial Sequence
  Synthetic oligonucleotide; CAG chr11 5390704 5390723 5390720 +
gcacccagaggagagcctgg

SEQ ID NO: 27868 - DNA, 20 bp, Artificial Sequence
  Synthetic oligonucleotide; GAG chr11 5390706 5390725 5390722 +
acccagaggagagcctggca

SEQ ID NO: 27869 - DNA, 20 bp, Artificial Sequence
  Synthetic oligonucleotide; CAG chr11 5390711 5390730 5390727 +
gaggagagcctggcagagac

SEQ ID NO: 27870 - DNA, 20 bp, Artificial Sequence
  Synthetic oligonucleotide; AGG chr11 5390712 5390731 5390728 +
aggagagcctggcagagacc

SEQ ID NO: 27871 - DNA, 20 bp, Artificial Sequence
  Synthetic oligonucleotide; CGG chr11 5390742 5390761 5390758 +
catttgctctaactcacctc

SEQ ID NO: 27872 - DNA, 20 bp, Artificial Sequence
  Synthetic oligonucleotide; TGG chr11 5390762 5390781 5390778 +
cggaaatacacctccttcca

SEQ ID NO: 27873 - DNA, 20 bp, Artificial Sequence
  Synthetic oligonucleotide; TGG chr11 5390770 5390789 5390786 +
cacctccttccatggttcct

SEQ ID NO: 27874 - DNA, 20 bp, Artificial Sequence
  Synthetic oligonucleotide; GGG chr11 5390771 5390790 5390787 +
acctccttccatggttcctt

SEQ ID NO: 27875 - DNA, 20 bp, Artificial Sequence
  Synthetic oligonucleotide; TGG chr11 5390795 5390814 5390811 +
ctgcttccatcttatctacc

SEQ ID NO: 27876 - DNA, 20 bp, Artificial Sequence
  Synthetic oligonucleotide; AAG chr11 5390800 5390819 5390816 +
tccatcttatctacctggcc

SEQ ID NO: 27877 - DNA, 20 bp, Artificial Sequence
  Synthetic oligonucleotide; TGG chr11 5390826 5390845 5390842 +
cttctcatctttttctatcc

SEQ ID NO: 27878 - DNA, 20 bp, Artificial Sequence
  Synthetic oligonucleotide; CAG chr11 5390830 5390849 5390846 +
tcatctttttctatcctggt

SEQ ID NO: 27879 - DNA, 20 bp, Artificial Sequence
  Synthetic oligonucleotide; CAG chr11 5390833 5390852 5390849 +
tctttttctatcctggtcag

SEQ ID NO: 27880 - DNA, 20 bp, Artificial Sequence
  Synthetic oligonucleotide; CAG chr11 5390843 5390862 5390859 +
tcctggtcagcagtaacttt

SEQ ID NO: 27881 - DNA, 20 bp, Artificial Sequence
  Synthetic oligonucleotide; AAG chr11 5390852 5390871 5390868 +
gcagtaactttcagaccccc

SEQ ID NO: 27882 - DNA, 20 bp, Artificial Sequence
  Synthetic oligonucleotide; CAG chr11 5390861 5390880 5390877 +
ttcagacccccaagtcacat

SEQ ID NO: 27883 - DNA, 20 bp, Artificial Sequence
  Synthetic oligonucleotide; CAG chr11 5390870 5390889 5390886 +
ccaagtcacatcagaaacct

SEQ ID NO: 27884 - DNA, 20 bp, Artificial Sequence
  Synthetic oligonucleotide; AAG chr11 5390904 5390923 5390920 +
tcttcctcaacacctgtttc

SEQ ID NO: 27885 - DNA, 20 bp, Artificial Sequence
  Synthetic oligonucleotide; AAG chr11 5390927 5390946 5390943 +
caacacccccccaaatttct

SEQ ID NO: 27886 - DNA, 20 bp, Artificial Sequence
  Synthetic oligonucleotide; AGG chr11 5390928 5390947 5390944 +
aacacccccccaaatttcta

SEQ ID NO: 27887 - DNA, 20 bp, Artificial Sequence
  Synthetic oligonucleotide; TAG chr11 5390958 5390977 5390974 +
ctctcctgaccatattcctc

SEQ ID NO: 27888 - DNA, 20 bp, Artificial Sequence
  Synthetic oligonucleotide; AAG chr11 5390961 5390980 5390977 +
tcctgaccatattcctctag

SEQ ID NO: 27889 - DNA, 20 bp, Artificial Sequence
  Synthetic oligonucleotide; AAG chr11 5390964 5390983 5390980 +
tgaccatattcctctagaag

SEQ ID NO: 27890 - DNA, 20 bp, Artificial Sequence
  Synthetic oligonucleotide; GAG chr11 5390966 5390985 5390982 +
accatattcctctagaagaa

SEQ ID NO: 27891 - DNA, 20 bp, Artificial Sequence
  Synthetic oligonucleotide; AAG chr11 5391021 5391040 5391037 +
tgattttaccttacaacctc

SEQ ID NO: 27892 - DNA, 20 bp, Artificial Sequence
  Synthetic oligonucleotide; AAG chr11 5391033 5391052 5391049 +
acaacctcaagtctgacatt

SEQ ID NO: 27893 - DNA, 20 bp, Artificial Sequence
  Synthetic oligonucleotide; CAG chr11 5391039 5391058 5391055 +
tcaagtctgacattaagcta

SEQ ID NO: 27894 - DNA, 20 bp, Artificial Sequence
  Synthetic oligonucleotide; CAG chr11 5391043 5391062 5391059 +
gtctgacattaagctacagt

SEQ ID NO: 27895 - DNA, 20 bp, Artificial Sequence
  Synthetic oligonucleotide; TAG chr11 5391056 5391075 5391072 +
ctacagtcagtatttacttg

SEQ ID NO: 27896 - DNA, 20 bp, Artificial Sequence
  Synthetic oligonucleotide; AGG chr11 5391057 5391076 5391073 +
tacagtcagtatttacttgt

SEQ ID NO: 27897 - DNA, 20 bp, Artificial Sequence
  Synthetic oligonucleotide; TAG chr11 5391065 5391084 5391081 +
gtatttacttgtaggtgttt

SEQ ID NO: 27898 - DNA, 20 bp, Artificial Sequence
  Synthetic oligonucleotide; GAG chr11 5391099 5391118 5391115 +
tgaacaatgacatgtaacgt

SEQ ID NO: 27899 - DNA, 20 bp, Artificial Sequence
  Synthetic oligonucleotide; AAG chr11 5391103 5391122 5391119 +
caatgacatgtaacgtgaga

SEQ ID NO: 27900 - DNA, 20 bp, Artificial Sequence
  Synthetic oligonucleotide; CAG chr11 5391109 5391128 5391125 +
catgtaacgtgagaaagctt

SEQ ID NO: 27901 - DNA, 20 bp, Artificial Sequence
  Synthetic oligonucleotide; AAG chr11 5391114 5391133 5391130 +
aacgtgagaaagcttcagcc

SEQ ID NO: 27902 - DNA, 20 bp, Artificial Sequence
  Synthetic oligonucleotide; AGG chr11 5391115 5391134 5391131 +
acgtgagaaagcttcagcca

SEQ ID NO: 27903 - DNA, 20 bp, Artificial Sequence
  Synthetic oligonucleotide; AAG chr11 5391138 5391157 5391154 +
aaactcacacaaacatattg

SEQ ID NO: 27904 - DNA, 20 bp, Artificial Sequence
  Synthetic oligonucleotide; CAG chr11 5391157 5391176 5391173 +
gaagtcacaatcccattgct

SEQ ID NO: 27905 - DNA, 20 bp, Artificial Sequence
  Synthetic oligonucleotide; AGG chr11 5391158 5391177 5391174 +
aagtcacaatcccattgctc

SEQ ID NO: 27906 - DNA, 20 bp, Artificial Sequence
  Synthetic oligonucleotide; GAG chr11 5391160 5391179 5391176 +
gtcacaatcccattgctcag

SEQ ID NO: 27907 - DNA, 20 bp, Artificial Sequence
  Synthetic oligonucleotide; AGG chr11 5391161 5391180 5391177 +
tcacaatcccattgctcagg

SEQ ID NO: 27908 - DNA, 20 bp, Artificial Sequence
  Synthetic oligonucleotide; TGG chr11 5391179 5391198 5391195 +
ggaggaaataaactttacat

SEQ ID NO: 27909 - DNA, 20 bp, Artificial Sequence
  Synthetic oligonucleotide; CAG chr11 5391187 5391206 5391203 +
taaactttacattggctgat

SEQ ID NO: 27910 - DNA, 20 bp, Artificial Sequence
  Synthetic oligonucleotide; GAG chr11 5391201 5391220 5391217 +
gctgatcagcctgtccctac

SEQ ID NO: 27911 - DNA, 20 bp, Artificial Sequence
  Synthetic oligonucleotide; CAG chr11 5391223 5391242 5391239 +
gtgactaaatgcaatccttg

SEQ ID NO: 27912 - DNA, 20 bp, Artificial Sequence
  Synthetic oligonucleotide; AGG chr11 5391224 5391243 5391240 +
tgactaaatgcaatccttgc

SEQ ID NO: 27913 - DNA, 20 bp, Artificial Sequence
  Synthetic oligonucleotide; GGG chr11 5391225 5391244 5391241 +
gactaaatgcaatccttgca

SEQ ID NO: 27914 - DNA, 20 bp, Artificial Sequence
  Synthetic oligonucleotide; GGG chr11 5391226 5391245 5391242 +
actaaatgcaatccttgcag

SEQ ID NO: 27915 - DNA, 20 bp, Artificial Sequence
  Synthetic oligonucleotide; CAG chr11 5391232 5391251 5391248 +
tgcaatccttgcaggggtct

SEQ ID NO: 27916 - DNA, 20 bp, Artificial Sequence
  Synthetic oligonucleotide; AAG chr11 5391253 5391272 5391269 +
agctttgaaattgcttcctc

SEQ ID NO: 27917 - DNA, 20 bp, Artificial Sequence
  Synthetic oligonucleotide; AGG chr11 5391254 5391273 5391270 +
gctttgaaattgcttcctca

SEQ ID NO: 27918 - DNA, 20 bp, Artificial Sequence
  Synthetic oligonucleotide; CAG chr11 5391266 5391285 5391282 +
cttcctcaaggacattttca

SEQ ID NO: 27919 - DNA, 20 bp, Artificial Sequence
  Synthetic oligonucleotide; TAG chr11 5391270 5391289 5391286 +
ctcaaggacattttcacaga

SEQ ID NO: 27920 - DNA, 20 bp, Artificial Sequence
  Synthetic oligonucleotide; TGG chr11 5391288 5391307 5391304 +
gatagctcctccctttccaa

SEQ ID NO: 27921 - DNA, 20 bp, Artificial Sequence
  Synthetic oligonucleotide; AAG chr11 5391293 5391312 5391309 +
ctcctccctttccaatggta

SEQ ID NO: 27922 - DNA, 20 bp, Artificial Sequence
  Synthetic oligonucleotide; CGG chr11 5391311 5391330 5391327 +
taaagcaccaaatgctccat

SEQ ID NO: 27923 - DNA, 20 bp, Artificial Sequence
  Synthetic oligonucleotide; CAG chr11 5391324 5391343 5391340 +
gctccatcggtttccttcca

SEQ ID NO: 27924 - DNA, 20 bp, Artificial Sequence
  Synthetic oligonucleotide; CAG chr11 5391360 5391379 5391376 +
ccgttgtaacatttgtcaca

SEQ ID NO: 27925 - DNA, 20 bp, Artificial Sequence
  Synthetic oligonucleotide; AAG chr11 5391379 5391398 5391395 +
acagtaatgtcctgtttatg

SEQ ID NO: 27926 - DNA, 20 bp, Artificial Sequence
  Synthetic oligonucleotide; AGG chr11 5391380 5391399 5391396 +
cagtaatgtcctgtttatga

SEQ ID NO: 27927 - DNA, 20 bp, Artificial Sequence
  Synthetic oligonucleotide; TAG chr11 5391400 5391419 5391416 +
aggtgtgtgcatgtgtccat

SEQ ID NO: 27928 - DNA, 20 bp, Artificial Sequence
  Synthetic oligonucleotide; AAG chr11 5391415 5391434 5391431 +
tccattagaatgactaaatc

SEQ ID NO: 27929 - DNA, 20 bp, Artificial Sequence
  Synthetic oligonucleotide; TGG chr11 5391423 5391442 5391439 +
aatgactaaatcaagatccc

SEQ ID NO: 27930 - DNA, 20 bp, Artificial Sequence
  Synthetic oligonucleotide; GAG chr11 5391425 5391444 5391441 +
tgactaaatcaagatccctg

SEQ ID NO: 27931 - DNA, 20 bp, Artificial Sequence
  Synthetic oligonucleotide; AGG chr11 5391426 5391445 5391442 +
gactaaatcaagatccctgg

SEQ ID NO: 27932 - DNA, 20 bp, Artificial Sequence
  Synthetic oligonucleotide; TAG chr11 5391432 5391451 5391448 +
atcaagatccctggaggaat

SEQ ID NO: 27933 - DNA, 20 bp, Artificial Sequence
  Synthetic oligonucleotide; AGG chr11 5391433 5391452 5391449 +
tcaagatccctggaggaatt

SEQ ID NO: 27934 - DNA, 20 bp, Artificial Sequence
  Synthetic oligonucleotide; CAG chr11 5391450 5391469 5391466 +
attaggcatgtcttgctcgc

SEQ ID NO: 27935 - DNA, 20 bp, Artificial Sequence
  Synthetic oligonucleotide; TAG chr11 5391476 5391495 5391492 +
atgtatataaatacaatgcc

SEQ ID NO: 27936 - DNA, 20 bp, Artificial Sequence
  Synthetic oligonucleotide; TGG chr11 5391516 5391535 5391532 +
ataaatattaaatgtatgcg

SEQ ID NO: 27937 - DNA, 20 bp, Artificial Sequence
  Synthetic oligonucleotide; TAG chr11 5391524 5391543 5391540 +
taaatgtatgcgtggacata

SEQ ID NO: 27938 - DNA, 20 bp, Artificial Sequence
  Synthetic oligonucleotide; AAG chr11 5391534 5391553 5391550 +
cgtggacatatagatacata

SEQ ID NO: 27939 - DNA, 20 bp, Artificial Sequence
  Synthetic oligonucleotide; GAG chr11 5391536 5391555 5391552 +
tggacatatagatacataaa

SEQ ID NO: 27940 - DNA, 20 bp, Artificial Sequence
  Synthetic oligonucleotide; AGG chr11 5391537 5391556 5391553 +
ggacatatagatacataaag

SEQ ID NO: 27941 - DNA, 20 bp, Artificial Sequence
  Synthetic oligonucleotide; GGG chr11 5391538 5391557 5391554 +
gacatatagatacataaaga

SEQ ID NO: 27942 - DNA, 20 bp, Artificial Sequence
  Synthetic oligonucleotide; CAG chr11 5391544 5391563 5391560 +
tagatacataaagagggatc

SEQ ID NO: 27943 - DNA, 20 bp, Artificial Sequence
  Synthetic oligonucleotide; GAG chr11 5391546 5391565 5391562 +
gatacataaagagggatcca

SEQ ID NO: 27944 - DNA, 20 bp, Artificial Sequence
  Synthetic oligonucleotide; CAG chr11 5391553 5391572 5391569 +
aaagagggatccagagctaa

SEQ ID NO: 27945 - DNA, 20 bp, Artificial Sequence
  Synthetic oligonucleotide; AAG chr11 5391556 5391575 5391572 +
gagggatccagagctaacag

SEQ ID NO: 27946 - DNA, 20 bp, Artificial Sequence
  Synthetic oligonucleotide; GAG chr11 5391574 5391593 5391590 +
agaagttctcttcttgtctc

SEQ ID NO: 27947 - DNA, 20 bp, Artificial Sequence
  Synthetic oligonucleotide; AGG chr11 5391575 5391594 5391591 +
gaagttctcttcttgtctcg

SEQ ID NO: 27948 - DNA, 20 bp, Artificial Sequence
  Synthetic oligonucleotide; CAG chr11 5391597 5391616 5391613 +
gaactcctcctcttcacatt

SEQ ID NO: 27949 - DNA, 20 bp, Artificial Sequence
  Synthetic oligonucleotide; AAG chr11 5391600 5391619 5391616 +
ctcctcctcttcacattcag

SEQ ID NO: 27950 - DNA, 20 bp, Artificial Sequence
  Synthetic oligonucleotide; AAG chr11 5391606 5391625 5391622 +
ctcttcacattcagaagccc

SEQ ID NO: 27951 - DNA, 20 bp, Artificial Sequence
  Synthetic oligonucleotide; AAG chr11 5391609 5391628 5391625 +
ttcacattcagaagcccaag

SEQ ID NO: 27952 - DNA, 20 bp, Artificial Sequence
  Synthetic oligonucleotide; TGG chr11 5391624 5391643 5391640 +
ccaagaagacacctttctgc

SEQ ID NO: 27953 - DNA, 20 bp, Artificial Sequence
  Synthetic oligonucleotide; AAG chr11 5391635 5391654 5391651 +
cctttctgctggcatccatc

SEQ ID NO: 27954 - DNA, 20 bp, Artificial Sequence
  Synthetic oligonucleotide; AGG chr11 5391636 5391655 5391652 +
ctttctgctggcatccatca

SEQ ID NO: 27955 - DNA, 20 bp, Artificial Sequence
  Synthetic oligonucleotide; TGG chr11 5391639 5391658 5391655 +
tctgctggcatccatcaagg

SEQ ID NO: 27956 - DNA, 20 bp, Artificial Sequence
  Synthetic oligonucleotide; CAG chr11 5391658 5391677 5391674 +
gtggtatatcttcattgtcc

SEQ ID NO: 27957 - DNA, 20 bp, Artificial Sequence
  Synthetic oligonucleotide; CAG chr11 5391673 5391692 5391689 +
tgtcccagttctactttact

SEQ ID NO: 27958 - DNA, 20 bp, Artificial Sequence
  Synthetic oligonucleotide; AGG chr11 5391674 5391693 5391690 +
gtcccagttctactttactc

SEQ ID NO: 27959 - DNA, 20 bp, Artificial Sequence
  Synthetic oligonucleotide; TGG chr11 5391682 5391701 5391698 +
tctactttactcaggccctc

SEQ ID NO: 27960 - DNA, 20 bp, Artificial Sequence
  Synthetic oligonucleotide; CAG chr11 5391706 5391725 5391722 +
tcctcccacccattctccta

SEQ ID NO: 27961 - DNA, 20 bp, Artificial Sequence
  Synthetic oligonucleotide; AGG chr11 5391707 5391726 5391723 +
cctcccacccattctcctac

SEQ ID NO: 27962 - DNA, 20 bp, Artificial Sequence
  Synthetic oligonucleotide; GAG chr11 5391723 5391742 5391739 +
ctacaggttaaaattaccat

SEQ ID NO: 27963 - DNA, 20 bp, Artificial Sequence
  Synthetic oligonucleotide; AGG chr11 5391724 5391743 5391740 +
tacaggttaaaattaccatg

SEQ ID NO: 27964 - DNA, 20 bp, Artificial Sequence
  Synthetic oligonucleotide; CAG chr11 5391728 5391747 5391744 +
ggttaaaattaccatgaggc

SEQ ID NO: 27965 - DNA, 20 bp, Artificial Sequence
  Synthetic oligonucleotide; AGG chr11 5391729 5391748 5391745 +
gttaaaattaccatgaggcc

SEQ ID NO: 27966 - DNA, 20 bp, Artificial Sequence
  Synthetic oligonucleotide; CGG chr11 5391734 5391753 5391750 +
aattaccatgaggccaggca

SEQ ID NO: 27967 - DNA, 20 bp, Artificial Sequence
  Synthetic oligonucleotide; TGG chr11 5391737 5391756 5391753 +
taccatgaggccaggcacgg

SEQ ID NO: 27968 - DNA, 20 bp, Artificial Sequence
  Synthetic oligonucleotide; CAG chr11 5391755 5391774 5391771 +
ggtggcttatgctataatcc

SEQ ID NO: 27969 - DNA, 20 bp, Artificial Sequence
  Synthetic oligonucleotide; TGG chr11 5391763 5391782 5391779 +
atgctataatcccagcactt

SEQ ID NO: 27970 - DNA, 20 bp, Artificial Sequence
  Synthetic oligonucleotide; GGG chr11 5391764 5391783 5391780 +
tgctataatcccagcacttt

SEQ ID NO: 27971 - DNA, 20 bp, Artificial Sequence
  Synthetic oligonucleotide; GAG chr11 5391766 5391785 5391782 +
ctataatcccagcactttgg

SEQ ID NO: 27972 - DNA, 20 bp, Artificial Sequence
  Synthetic oligonucleotide; AAG chr11 5391772 5391791 5391788 +
tcccagcactttgggagacc

SEQ ID NO: 27973 - DNA, 20 bp, Artificial Sequence
  Synthetic oligonucleotide; AGG chr11 5391773 5391792 5391789 +
cccagcactttgggagacca

SEQ ID NO: 27974 - DNA, 20 bp, Artificial Sequence
  Synthetic oligonucleotide; TGG chr11 5391776 5391795 5391792 +
agcactttgggagaccaagg

SEQ ID NO: 27975 - DNA, 20 bp, Artificial Sequence
  Synthetic oligonucleotide; GGG chr11 5391777 5391796 5391793 +
gcactttgggagaccaaggt

SEQ ID NO: 27976 - DNA, 20 bp, Artificial Sequence
  Synthetic oligonucleotide; GAG chr11 5391779 5391798 5391795 +
actttgggagaccaaggtgg

SEQ ID NO: 27977 - DNA, 20 bp, Artificial Sequence
  Synthetic oligonucleotide; AGG chr11 5391780 5391799 5391796 +
ctttgggagaccaaggtggg

SEQ ID NO: 27978 - DNA, 20 bp, Artificial Sequence
  Synthetic oligonucleotide; AAG chr11 5391790 5391809 5391806 +
ccaaggtgggaggattgctg

SEQ ID NO: 27979 - DNA, 20 bp, Artificial Sequence
  Synthetic oligonucleotide; AGG chr11 5391791 5391810 5391807 +
caaggtgggaggattgctga

SEQ ID NO: 27980 - DNA, 20 bp, Artificial Sequence
  Synthetic oligonucleotide; CAG chr11 5391795 5391814 5391811 +
gtgggaggattgctgaaggc

SEQ ID NO: 27981 - DNA, 20 bp, Artificial Sequence
  Synthetic oligonucleotide; AGG chr11 5391796 5391815 5391812 +
tgggaggattgctgaaggcc

SEQ ID NO: 27982 - DNA, 20 bp, Artificial Sequence
  Synthetic oligonucleotide; GAG chr11 5391798 5391817 5391814 +
ggaggattgctgaaggccag

SEQ ID NO: 27983 - DNA, 20 bp, Artificial Sequence
  Synthetic oligonucleotide; GAG chr11 5391804 5391823 5391820 +
ttgctgaaggccaggagttt

SEQ ID NO: 27984 - DNA, 20 bp, Artificial Sequence
  Synthetic oligonucleotide; CAG chr11 5391815 5391834 5391831 +
caggagtttgagaccaactt

SEQ ID NO: 27985 - DNA, 20 bp, Artificial Sequence
  Synthetic oligonucleotide; AGG chr11 5391816 5391835 5391832 +
aggagtttgagaccaacttc

SEQ ID NO: 27986 - DNA, 20 bp, Artificial Sequence
  Synthetic oligonucleotide; AAG chr11 5391820 5391839 5391836 +
gtttgagaccaacttcaggc

SEQ ID NO: 27987 - DNA, 20 bp, Artificial Sequence
  Synthetic oligonucleotide; AAG chr11 5391823 5391842 5391839 +
tgagaccaacttcaggcaag

SEQ ID NO: 27988 - DNA, 20 bp, Artificial Sequence
  Synthetic oligonucleotide; GAG chr11 5391833 5391852 5391849 +
ttcaggcaagaagattactt

SEQ ID NO: 27989 - DNA, 20 bp, Artificial Sequence
  Synthetic oligonucleotide; CAG chr11 5391838 5391857 5391854 +
gcaagaagattacttgagtc

SEQ ID NO: 27990 - DNA, 20 bp, Artificial Sequence
  Synthetic oligonucleotide; AGG chr11 5391839 5391858 5391855 +
caagaagattacttgagtcc

SEQ ID NO: 27991 - DNA, 20 bp, Artificial Sequence
  Synthetic oligonucleotide; GAG chr11 5391841 5391860 5391857 +
agaagattacttgagtccag

SEQ ID NO: 27992 - DNA, 20 bp, Artificial Sequence
  Synthetic oligonucleotide; GAG chr11 5391847 5391866 5391863 +
ttacttgagtccaggagttt

SEQ ID NO: 27993 - DNA, 20 bp, Artificial Sequence
  Synthetic oligonucleotide; CAG chr11 5391852 5391871 5391868 +
tgagtccaggagtttgagac

SEQ ID NO: 27994 - DNA, 20 bp, Artificial Sequence
  Synthetic oligonucleotide; CAG chr11 5391866 5391885 5391882 +
tgagaccagcctgaacaata

SEQ ID NO: 27995 - DNA, 20 bp, Artificial Sequence
  Synthetic oligonucleotide; AAG chr11 5391870 5391889 5391886 +
accagcctgaacaatacagc

SEQ ID NO: 27996 - DNA, 20 bp, Artificial Sequence
  Synthetic oligonucleotide; TAG chr11 5391901 5391920 5391917 +
tctacaaaaaaaattaaaat

SEQ ID NO: 27997 - DNA, 20 bp, Artificial Sequence
  Synthetic oligonucleotide; TGG chr11 5391911 5391930 5391927 +
aaattaaaattagccatgtg

SEQ ID NO: 27998 - DNA, 20 bp, Artificial Sequence
  Synthetic oligonucleotide; CGG chr11 5391914 5391933 5391930 +
ttaaaattagccatgtgtgg

SEQ ID NO: 27999 - DNA, 20 bp, Artificial Sequence
  Synthetic oligonucleotide; TAG chr11 5391927 5391946 5391943 +
tgtgtggcggtgcacgtctg

SEQ ID NO: 28000 - DNA, 20 bp, Artificial Sequence
  Synthetic oligonucleotide; CAG chr11 5391933 5391952 5391949 +
gcggtgcacgtctgtagtct

SEQ ID NO: 28001 - DNA, 20 bp, Artificial Sequence
  Synthetic oligonucleotide; TGG chr11 5391941 5391960 5391957 +
cgtctgtagtctcagctacc

SEQ ID NO: 28002 - DNA, 20 bp, Artificial Sequence
  Synthetic oligonucleotide; GGG chr11 5391942 5391961 5391958 +
gtctgtagtctcagctacct

SEQ ID NO: 28003 - DNA, 20 bp, Artificial Sequence
  Synthetic oligonucleotide; GAG chr11 5391944 5391963 5391960 +
ctgtagtctcagctacctgg

SEQ ID NO: 28004 - DNA, 20 bp, Artificial Sequence
  Synthetic oligonucleotide; AGG chr11 5391945 5391964 5391961 +
tgtagtctcagctacctggg

SEQ ID NO: 28005 - DNA, 20 bp, Artificial Sequence
  Synthetic oligonucleotide; GAG chr11 5391950 5391969 5391966 +
tctcagctacctgggaggct

SEQ ID NO: 28006 - DNA, 20 bp, Artificial Sequence
  Synthetic oligonucleotide; AGG chr11 5391951 5391970 5391967 +
ctcagctacctgggaggctg

SEQ ID NO: 28007 - DNA, 20 bp, Artificial Sequence
  Synthetic oligonucleotide; TGG chr11 5391954 5391973 5391970 +
agctacctgggaggctgagg

SEQ ID NO: 28008 - DNA, 20 bp, Artificial Sequence
  Synthetic oligonucleotide; GGG chr11 5391955 5391974 5391971 +
gctacctgggaggctgaggt

SEQ ID NO: 28009 - DNA, 20 bp, Artificial Sequence
  Synthetic oligonucleotide; AAG chr11 5391958 5391977 5391974 +
acctgggaggctgaggtggg

SEQ ID NO: 28010 - DNA, 20 bp, Artificial Sequence
  Synthetic oligonucleotide; GAG chr11 5391968 5391987 5391984 +
ctgaggtgggaagaatgctt

SEQ ID NO: 28011 - DNA, 20 bp, Artificial Sequence
  Synthetic oligonucleotide; CAG chr11 5391973 5391992 5391989 +
gtgggaagaatgcttgagcc

SEQ ID NO: 28012 - DNA, 20 bp, Artificial Sequence
  Synthetic oligonucleotide; AGG chr11 5391974 5391993 5391990 +
tgggaagaatgcttgagccc

SEQ ID NO: 28013 - DNA, 20 bp, Artificial Sequence
  Synthetic oligonucleotide; GAG chr11 5391976 5391995 5391992 +
ggaagaatgcttgagcccag

SEQ ID NO: 28014 - DNA, 20 bp, Artificial Sequence
  Synthetic oligonucleotide; AGG chr11 5391977 5391996 5391993 +
gaagaatgcttgagcccagg

SEQ ID NO: 28015 - DNA, 20 bp, Artificial Sequence
  Synthetic oligonucleotide; GAG chr11 5391982 5392001 5391998 +
atgcttgagcccaggaggtt

SEQ ID NO: 28016 - DNA, 20 bp, Artificial Sequence
  Synthetic oligonucleotide; AGG chr11 5391983 5392002 5391999 +
tgcttgagcccaggaggttg

SEQ ID NO: 28017 - DNA, 20 bp, Artificial Sequence
  Synthetic oligonucleotide; CAG chr11 5391989 5392008 5392005 +
agcccaggaggttgaggctg

SEQ ID NO: 28018 - DNA, 20 bp, Artificial Sequence
  Synthetic oligonucleotide; GAG chr11 5391993 5392012 5392009 +
caggaggttgaggctgcagt

SEQ ID NO: 28019 - DNA, 20 bp, Artificial Sequence
  Synthetic oligonucleotide; TGG chr11 5392015 5392034 5392031 +
gccataatcacactactgcc

SEQ ID NO: 28020 - DNA, 20 bp, Artificial Sequence
  Synthetic oligonucleotide; GGG chr11 5392016 5392035 5392032 +
ccataatcacactactgcct

SEQ ID NO: 28021 - DNA, 20 bp, Artificial Sequence
  Synthetic oligonucleotide; AAG chr11 5392024 5392043 5392040 +
acactactgcctgggtgacc

SEQ ID NO: 28022 - DNA, 20 bp, Artificial Sequence
  Synthetic oligonucleotide; GAG chr11 5392028 5392047 5392044 +
tactgcctgggtgaccaagt

SEQ ID NO: 28023 - DNA, 20 bp, Artificial Sequence
  Synthetic oligonucleotide; AAG chr11 5392050 5392069 5392066 +
gaccccgattcaaaaataaa

SEQ ID NO: 28024 - DNA, 20 bp, Artificial Sequence
  Synthetic oligonucleotide; AGG chr11 5392051 5392070 5392067 +
accccgattcaaaaataaaa

SEQ ID NO: 28025 - DNA, 20 bp, Artificial Sequence
  Synthetic oligonucleotide; AAG chr11 5392072 5392091 5392088 +
ggaaaacaaacaaaattaca

SEQ ID NO: 28026 - DNA, 20 bp, Artificial Sequence
  Synthetic oligonucleotide; AAG chr11 5392087 5392106 5392103 +
ttacaaagcgaaatttaaaa

SEQ ID NO: 28027 - DNA, 20 bp, Artificial Sequence
  Synthetic oligonucleotide; CGG chr11 5392124 5392143 5392140 +
aatatgtatgtatgtttgtg

SEQ ID NO: 28028 - DNA, 20 bp, Artificial Sequence
  Synthetic oligonucleotide; TGG chr11 5392146 5392165 5392162 +
gtttcttgtgtatgtttgtg

SEQ ID NO: 28029 - DNA, 20 bp, Artificial Sequence
  Synthetic oligonucleotide; TGG chr11 5392168 5392187 5392184 +
gtatctcatgtttgtatgtg

SEQ ID NO: 28030 - DNA, 20 bp, Artificial Sequence
  Synthetic oligonucleotide; GGG chr11 5392169 5392188 5392185 +
tatctcatgtttgtatgtgt

SEQ ID NO: 28031 - DNA, 20 bp, Artificial Sequence
  Synthetic oligonucleotide; CAG chr11 5392178 5392197 5392194 +
tttgtatgtgtgggtgttat

SEQ ID NO: 28032 - DNA, 20 bp, Artificial Sequence
  Synthetic oligonucleotide; CAG chr11 5392186 5392205 5392202 +
tgtgggtgttatcagactct

SEQ ID NO: 28033 - DNA, 20 bp, Artificial Sequence
  Synthetic oligonucleotide; AGG chr11 5392187 5392206 5392203 +
gtgggtgttatcagactctc

SEQ ID NO: 28034 - DNA, 20 bp, Artificial Sequence
  Synthetic oligonucleotide; TGG chr11 5392192 5392211 5392208 +
tgttatcagactctcaggct

SEQ ID NO: 28035 - DNA, 20 bp, Artificial Sequence
  Synthetic oligonucleotide; GGG chr11 5392193 5392212 5392209 +
gttatcagactctcaggctt

SEQ ID NO: 28036 - DNA, 20 bp, Artificial Sequence
  Synthetic oligonucleotide; GAG chr11 5392195 5392214 5392211 +
tatcagactctcaggcttgg

SEQ ID NO: 28037 - DNA, 20 bp, Artificial Sequence
  Synthetic oligonucleotide; TGG chr11 5392204 5392223 5392220 +
ctcaggcttgggagcccctc

SEQ ID NO: 28038 - DNA, 20 bp, Artificial Sequence
  Synthetic oligonucleotide; CAG chr11 5392211 5392230 5392227 +
ttgggagcccctctggaacc

SEQ ID NO: 28039 - DNA, 20 bp, Artificial Sequence
  Synthetic oligonucleotide; CAG chr11 5392214 5392233 5392230 +
ggagcccctctggaacccag

SEQ ID NO: 28040 - DNA, 20 bp, Artificial Sequence
  Synthetic oligonucleotide; CAG chr11 5392223 5392242 5392239 +
ctggaacccagcagtttctg

SEQ ID NO: 28041 - DNA, 20 bp, Artificial Sequence
  Synthetic oligonucleotide; CAG chr11 5392231 5392250 5392247 +
cagcagtttctgcagcctta

SEQ ID NO: 28042 - DNA, 20 bp, Artificial Sequence
  Synthetic oligonucleotide; AGG chr11 5392232 5392251 5392248 +
agcagtttctgcagccttac

SEQ ID NO: 28043 - DNA, 20 bp, Artificial Sequence
  Synthetic oligonucleotide; TGG chr11 5392236 5392255 5392252 +
gtttctgcagccttacaggc

SEQ ID NO: 28044 - DNA, 20 bp, Artificial Sequence
  Synthetic oligonucleotide; TAG chr11 5392252 5392271 5392268 +
aggctggcactccttaaaca

SEQ ID NO: 28045 - DNA, 20 bp, Artificial Sequence
  Synthetic oligonucleotide; AGG chr11 5392253 5392272 5392269 +
ggctggcactccttaaacat

SEQ ID NO: 28046 - DNA, 20 bp, Artificial Sequence
  Synthetic oligonucleotide; TAG chr11 5392286 5392305 5392302 +
aactttaatttacatccaca

SEQ ID NO: 28047 - DNA, 20 bp, Artificial Sequence
  Synthetic oligonucleotide; TAG chr11 5392289 5392308 5392305 +
tttaatttacatccacatag

SEQ ID NO: 28048 - DNA, 20 bp, Artificial Sequence
  Synthetic oligonucleotide; AGG chr11 5392290 5392309 5392306 +
ttaatttacatccacatagt

SEQ ID NO: 28049 - DNA, 20 bp, Artificial Sequence
  Synthetic oligonucleotide; TAG chr11 5392306 5392325 5392322 +
tagtaggccacattactcaa

SEQ ID NO: 28050 - DNA, 20 bp, Artificial Sequence
  Synthetic oligonucleotide; CAG chr11 5392309 5392328 5392325 +
taggccacattactcaatag

SEQ ID NO: 28051 - DNA, 20 bp, Artificial Sequence
  Synthetic oligonucleotide; GAG chr11 5392316 5392335 5392332 +
cattactcaatagcagttcc

SEQ ID NO: 28052 - DNA, 20 bp, Artificial Sequence
  Synthetic oligonucleotide; TAG chr11 5392322 5392341 5392338 +
tcaatagcagttccgagact

SEQ ID NO: 28053 - DNA, 20 bp, Artificial Sequence
  Synthetic oligonucleotide; GAG chr11 5392343 5392362 5392359 +
agaatattcttctccatgtt

SEQ ID NO: 28054 - DNA, 20 bp, Artificial Sequence
  Synthetic oligonucleotide; GAG chr11 5392345 5392364 5392361 +
aatattcttctccatgttga

SEQ ID NO: 28055 - DNA, 20 bp, Artificial Sequence
  Synthetic oligonucleotide; AGG chr11 5392346 5392365 5392362 +
atattcttctccatgttgag

SEQ ID NO: 28056 - DNA, 20 bp, Artificial Sequence
  Synthetic oligonucleotide; TAG chr11 5392363 5392382 5392379 +
gagaggaaattcctattcta

SEQ ID NO: 28057 - DNA, 20 bp, Artificial Sequence
  Synthetic oligonucleotide; TGG chr11 5392374 5392393 5392390 +
cctattctatagatctcatt

SEQ ID NO: 28058 - DNA, 20 bp, Artificial Sequence
  Synthetic oligonucleotide; TAG chr11 5392377 5392396 5392393 +
attctatagatctcatttgg

SEQ ID NO: 28059 - DNA, 20 bp, Artificial Sequence
  Synthetic oligonucleotide; TGG chr11 5392382 5392401 5392398 +
atagatctcatttggtagaa

SEQ ID NO: 28060 - DNA, 20 bp, Artificial Sequence
  Synthetic oligonucleotide; GGG chr11 5392383 5392402 5392399 +
tagatctcatttggtagaat

SEQ ID NO: 28061 - DNA, 20 bp, Artificial Sequence
  Synthetic oligonucleotide; GGG chr11 5392384 5392403 5392400 +
agatctcatttggtagaatg

SEQ ID NO: 28062 - DNA, 20 bp, Artificial Sequence
  Synthetic oligonucleotide; TAG chr11 5392398 5392417 5392414 +
agaatggggtacaaaaaatt

SEQ ID NO: 28063 - DNA, 20 bp, Artificial Sequence
  Synthetic oligonucleotide; AGG chr11 5392399 5392418 5392415 +
gaatggggtacaaaaaattt

SEQ ID NO: 28064 - DNA, 20 bp, Artificial Sequence
  Synthetic oligonucleotide; TGG chr11 5392405 5392424 5392421 +
ggtacaaaaaatttaggatt

SEQ ID NO: 28065 - DNA, 20 bp, Artificial Sequence
  Synthetic oligonucleotide; TAG chr11 5392411 5392430 5392427 +
aaaaatttaggatttggatt

SEQ ID NO: 28066 - DNA, 20 bp, Artificial Sequence
  Synthetic oligonucleotide; TAG chr11 5392416 5392435 5392432 +
tttaggatttggatttagat

SEQ ID NO: 28067 - DNA, 20 bp, Artificial Sequence
  Synthetic oligonucleotide; AAG chr11 5392424 5392443 5392440 +
ttggatttagattagcactg

SEQ ID NO: 28068 - DNA, 20 bp, Artificial Sequence
  Synthetic oligonucleotide; TAG chr11 5392452 5392471 5392468 +
ttttgcctcttattaacaaa

SEQ ID NO: 28069 - DNA, 20 bp, Artificial Sequence
  Synthetic oligonucleotide; TAG chr11 5392485 5392504 5392501 +
tctaaatttcattttcaaat

SEQ ID NO: 28070 - DNA, 20 bp, Artificial Sequence
  Synthetic oligonucleotide; AGG chr11 5392486 5392505 5392502 +
ctaaatttcattttcaaatt

SEQ ID NO: 28071 - DNA, 20 bp, Artificial Sequence
  Synthetic oligonucleotide; CAG chr11 5392498 5392517 5392514 +
ttcaaattaggaaatacgta

SEQ ID NO: 28072 - DNA, 20 bp, Artificial Sequence
  Synthetic oligonucleotide; AGG chr11 5392499 5392518 5392515 +
tcaaattaggaaatacgtac

SEQ ID NO: 28073 - DNA, 20 bp, Artificial Sequence
  Synthetic oligonucleotide; AAG chr11 5392585 5392604 5392601 +
ttgttactaaacgaatattg

SEQ ID NO: 28074 - DNA, 20 bp, Artificial Sequence
  Synthetic oligonucleotide; TAG chr11 5392590 5392609 5392606 +
actaaacgaatattgaagaa

SEQ ID NO: 28075 - DNA, 20 bp, Artificial Sequence
  Synthetic oligonucleotide; GAG chr11 5392592 5392611 5392608 +
taaacgaatattgaagaata

SEQ ID NO: 28076 - DNA, 20 bp, Artificial Sequence
  Synthetic oligonucleotide; TGG chr11 5392610 5392629 5392626 +
tagagttaacaatcaatatc

SEQ ID NO: 28077 - DNA, 20 bp, Artificial Sequence
  Synthetic oligonucleotide; TGG chr11 5392614 5392633 5392630 +
gttaacaatcaatatctggc

SEQ ID NO: 28078 - DNA, 20 bp, Artificial Sequence
  Synthetic oligonucleotide; GGG chr11 5392615 5392634 5392631 +
ttaacaatcaatatctggct

SEQ ID NO: 28079 - DNA, 20 bp, Artificial Sequence
  Synthetic oligonucleotide; CGG chr11 5392620 5392639 5392636 +
aatcaatatctggctgggcg

SEQ ID NO: 28080 - DNA, 20 bp, Artificial Sequence
  Synthetic oligonucleotide; TGG chr11 5392623 5392642 5392639 +
caatatctggctgggcgcgg

SEQ ID NO: 28081 - DNA, 20 bp, Artificial Sequence
  Synthetic oligonucleotide; CAG chr11 5392642 5392661 5392658 +
gtggctcacgcctgtaatcc

SEQ ID NO: 28082 - DNA, 20 bp, Artificial Sequence
  Synthetic oligonucleotide; TGG chr11 5392650 5392669 5392666 +
cgcctgtaatcccagcactc

SEQ ID NO: 28083 - DNA, 20 bp, Artificial Sequence
  Synthetic oligonucleotide; GGG chr11 5392651 5392670 5392667 +
gcctgtaatcccagcactct

SEQ ID NO: 28084 - DNA, 20 bp, Artificial Sequence
  Synthetic oligonucleotide; GAG chr11 5392653 5392672 5392669 +
ctgtaatcccagcactctgg

SEQ ID NO: 28085 - DNA, 20 bp, Artificial Sequence
  Synthetic oligonucleotide; AGG chr11 5392654 5392673 5392670 +
tgtaatcccagcactctggg

SEQ ID NO: 28086 - DNA, 20 bp, Artificial Sequence
  Synthetic oligonucleotide; GAG chr11 5392659 5392678 5392675 +
tcccagcactctgggaggcc

SEQ ID NO: 28087 - DNA, 20 bp, Artificial Sequence
  Synthetic oligonucleotide; AGG chr11 5392660 5392679 5392676 +
cccagcactctgggaggccg

SEQ ID NO: 28088 - DNA, 20 bp, Artificial Sequence
  Synthetic oligonucleotide; CGG chr11 5392663 5392682 5392679 +
agcactctgggaggccgagg

SEQ ID NO: 28089 - DNA, 20 bp, Artificial Sequence
  Synthetic oligonucleotide; GGG chr11 5392664 5392683 5392680 +
gcactctgggaggccgaggc

SEQ ID NO: 28090 - DNA, 20 bp, Artificial Sequence
  Synthetic oligonucleotide; TGG chr11 5392667 5392686 5392683 +
ctctgggaggccgaggcggg

SEQ ID NO: 28091 - DNA, 20 bp, Artificial Sequence
  Synthetic oligonucleotide; GAG chr11 5392675 5392694 5392691 +
ggccgaggcgggtggatcac

SEQ ID NO: 28092 - DNA, 20 bp, Artificial Sequence
  Synthetic oligonucleotide; AGG chr11 5392676 5392695 5392692 +
gccgaggcgggtggatcacg

SEQ ID NO: 28093 - DNA, 20 bp, Artificial Sequence
  Synthetic oligonucleotide; CAG chr11 5392680 5392699 5392696 +
aggcgggtggatcacgaggt

SEQ ID NO: 28094 - DNA, 20 bp, Artificial Sequence
  Synthetic oligonucleotide; AGG chr11 5392681 5392700 5392697 +
ggcgggtggatcacgaggtc

SEQ ID NO: 28095 - DNA, 20 bp, Artificial Sequence
  Synthetic oligonucleotide; GAG chr11 5392683 5392702 5392699 +
cgggtggatcacgaggtcag

SEQ ID NO: 28096 - DNA, 20 bp, Artificial Sequence
  Synthetic oligonucleotide; GAG chr11 5392689 5392708 5392705 +
gatcacgaggtcaggagatc

SEQ ID NO: 28097 - DNA, 20 bp, Artificial Sequence
  Synthetic oligonucleotide; TGG chr11 5392699 5392718 5392715 +
tcaggagatcgagaccatcc

SEQ ID NO: 28098 - DNA, 20 bp, Artificial Sequence
  Synthetic oligonucleotide; CGG chr11 5392708 5392727 5392724 +
cgagaccatcctggctaaca

SEQ ID NO: 28099 - DNA, 20 bp, Artificial Sequence
  Synthetic oligonucleotide; TGG chr11 5392711 5392730 5392727 +
gaccatcctggctaacacgg

SEQ ID NO: 28100 - DNA, 20 bp, Artificial Sequence
  Synthetic oligonucleotide; CAG chr11 5392718 5392737 5392734 +
ctggctaacacggtggaacc

SEQ ID NO: 28101 - DNA, 20 bp, Artificial Sequence
  Synthetic oligonucleotide; AAG chr11 5392740 5392759 5392756 +
gtctctactaaaaatacaaa

SEQ ID NO: 28102 - DNA, 20 bp, Artificial Sequence
  Synthetic oligonucleotide; TAG chr11 5392744 5392763 5392760 +
ctactaaaaatacaaaaagt

SEQ ID NO: 28103 - DNA, 20 bp, Artificial Sequence
  Synthetic oligonucleotide; CGG chr11 5392748 5392767 5392764 +
taaaaatacaaaaagttagc

SEQ ID NO: 28104 - DNA, 20 bp, Artificial Sequence
  Synthetic oligonucleotide; GGG chr11 5392749 5392768 5392765 +
aaaaatacaaaaagttagcc

SEQ ID NO: 28105 - DNA, 20 bp, Artificial Sequence
  Synthetic oligonucleotide; TGG chr11 5392754 5392773 5392770 +
tacaaaaagttagccgggca

SEQ ID NO: 28106 - DNA, 20 bp, Artificial Sequence
  Synthetic oligonucleotide; TGG chr11 5392757 5392776 5392773 +
aaaaagttagccgggcatgg

SEQ ID NO: 28107 - DNA, 20 bp, Artificial Sequence
  Synthetic oligonucleotide; TGG chr11 5392760 5392779 5392776 +
aagttagccgggcatggtgg

SEQ ID NO: 28108 - DNA, 20 bp, Artificial Sequence
  Synthetic oligonucleotide; GGG chr11 5392761 5392780 5392777 +
agttagccgggcatggtggt

SEQ ID NO: 28109 - DNA, 20 bp, Artificial Sequence
  Synthetic oligonucleotide; TAG chr11 5392770 5392789 5392786 +
ggcatggtggtgggcacctg

SEQ ID NO: 28110 - DNA, 20 bp, Artificial Sequence
  Synthetic oligonucleotide; CAG chr11 5392776 5392795 5392792 +
gtggtgggcacctgtagtcc

SEQ ID NO: 28111 - DNA, 20 bp, Artificial Sequence
  Synthetic oligonucleotide; CAG chr11 5392784 5392803 5392800 +
cacctgtagtcccagctact

SEQ ID NO: 28112 - DNA, 20 bp, Artificial Sequence
  Synthetic oligonucleotide; AGG chr11 5392785 5392804 5392801 +
acctgtagtcccagctactc

SEQ ID NO: 28113 - DNA, 20 bp, Artificial Sequence
  Synthetic oligonucleotide; GAG chr11 5392787 5392806 5392803 +
ctgtagtcccagctactcag

SEQ ID NO: 28114 - DNA, 20 bp, Artificial Sequence
  Synthetic oligonucleotide; AGG chr11 5392788 5392807 5392804 +
tgtagtcccagctactcagg

SEQ ID NO: 28115 - DNA, 20 bp, Artificial Sequence
  Synthetic oligonucleotide; TGG chr11 5392792 5392811 5392808 +
gtcccagctactcaggaggc

SEQ ID NO: 28116 - DNA, 20 bp, Artificial Sequence
  Synthetic oligonucleotide; GGG chr11 5392793 5392812 5392809 +
tcccagctactcaggaggct

SEQ ID NO: 28117 - DNA, 20 bp, Artificial Sequence
  Synthetic oligonucleotide; GGG chr11 5392794 5392813 5392810 +
cccagctactcaggaggctg

SEQ ID NO: 28118 - DNA, 20 bp, Artificial Sequence
  Synthetic oligonucleotide; CAG chr11 5392797 5392816 5392813 +
agctactcaggaggctgggg

SEQ ID NO: 28119 - DNA, 20 bp, Artificial Sequence
  Synthetic oligonucleotide; CAG chr11 5392800 5392819 5392816 +
tactcaggaggctggggcag

SEQ ID NO: 28120 - DNA, 20 bp, Artificial Sequence
  Synthetic oligonucleotide; TGG chr11 5392805 5392824 5392821 +
aggaggctggggcagcagaa

SEQ ID NO: 28121 - DNA, 20 bp, Artificial Sequence
  Synthetic oligonucleotide; CAG chr11 5392816 5392835 5392832 +
gcagcagaatggcgtgaacc

SEQ ID NO: 28122 - DNA, 20 bp, Artificial Sequence
  Synthetic oligonucleotide; AGG chr11 5392817 5392836 5392833 +
cagcagaatggcgtgaaccc

SEQ ID NO: 28123 - DNA, 20 bp, Artificial Sequence
  Synthetic oligonucleotide; GAG chr11 5392819 5392838 5392835 +
gcagaatggcgtgaacccag

SEQ ID NO: 28124 - DNA, 20 bp, Artificial Sequence
  Synthetic oligonucleotide; AGG chr11 5392820 5392839 5392836 +
cagaatggcgtgaacccagg

SEQ ID NO: 28125 - DNA, 20 bp, Artificial Sequence
  Synthetic oligonucleotide; TGG chr11 5392823 5392842 5392839 +
aatggcgtgaacccaggagg

SEQ ID NO: 28126 - DNA, 20 bp, Artificial Sequence
  Synthetic oligonucleotide; GAG chr11 5392825 5392844 5392841 +
tggcgtgaacccaggaggtg

SEQ ID NO: 28127 - DNA, 20 bp, Artificial Sequence
  Synthetic oligonucleotide; CAG chr11 5392832 5392851 5392848 +
aacccaggaggtggagcttg

SEQ ID NO: 28128 - DNA, 20 bp, Artificial Sequence
  Synthetic oligonucleotide; GAG chr11 5392836 5392855 5392852 +
caggaggtggagcttgcagt

SEQ ID NO: 28129 - DNA, 20 bp, Artificial Sequence
  Synthetic oligonucleotide; GAG chr11 5392841 5392860 5392857 +
ggtggagcttgcagtgagcc

SEQ ID NO: 28130 - DNA, 20 bp, Artificial Sequence
  Synthetic oligonucleotide; CAG chr11 5392861 5392880 5392877 +
gagatcgtgccactgcactc

SEQ ID NO: 28131 - DNA, 20 bp, Artificial Sequence
  Synthetic oligonucleotide; TGG chr11 5392866 5392885 5392882 +
cgtgccactgcactccagcc

SEQ ID NO: 28132 - DNA, 20 bp, Artificial Sequence
  Synthetic oligonucleotide; GGG chr11 5392867 5392886 5392883 +
gtgccactgcactccagcct

SEQ ID NO: 28133 - DNA, 20 bp, Artificial Sequence
  Synthetic oligonucleotide; CAG chr11 5392873 5392892 5392889 +
ctgcactccagcctgggcaa

SEQ ID NO: 28134 - DNA, 20 bp, Artificial Sequence
  Synthetic oligonucleotide; GAG chr11 5392875 5392894 5392891 +
gcactccagcctgggcaaca

SEQ ID NO: 28135 - DNA, 20 bp, Artificial Sequence
  Synthetic oligonucleotide; AAG chr11 5392879 5392898 5392895 +
tccagcctgggcaacagagc

SEQ ID NO: 28136 - DNA, 20 bp, Artificial Sequence
  Synthetic oligonucleotide; AAG chr11 5392905 5392924 5392921 +
ccttctcaaaaacaaaaaaa

SEQ ID NO: 28137 - DNA, 20 bp, Artificial Sequence
  Synthetic oligonucleotide; AAG chr11 5392934 5392953 5392950 +
aaataaatatctgtgctgtt

SEQ ID NO: 28138 - DNA, 20 bp, Artificial Sequence
  Synthetic oligonucleotide; TGG chr11 5392941 5392960 5392957 +
tatctgtgctgttaagtatg

SEQ ID NO: 28139 - DNA, 20 bp, Artificial Sequence
  Synthetic oligonucleotide; AAG chr11 5392947 5392966 5392963 +
tgctgttaagtatgtggtaa

SEQ ID NO: 28140 - DNA, 20 bp, Artificial Sequence
  Synthetic oligonucleotide; GAG chr11 5392949 5392968 5392965 +
ctgttaagtatgtggtaaaa

SEQ ID NO: 28141 - DNA, 20 bp, Artificial Sequence
  Synthetic oligonucleotide; AGG chr11 5392950 5392969 5392966 +
tgttaagtatgtggtaaaag

SEQ ID NO: 28142 - DNA, 20 bp, Artificial Sequence
  Synthetic oligonucleotide; CAG chr11 5392966 5392985 5392982 +
aaagaggtattttcacatac

SEQ ID NO: 28143 - DNA, 20 bp, Artificial Sequence
  Synthetic oligonucleotide; AAG chr11 5393018 5393037 5393034 +
taaaaaacaaaatacatcaa

SEQ ID NO: 28144 - DNA, 20 bp, Artificial Sequence
  Synthetic oligonucleotide; CAG chr11 5393048 5393067 5393064 +
aatattcatgctctgtgtct

SEQ ID NO: 28145 - DNA, 20 bp, Artificial Sequence
  Synthetic oligonucleotide; TAG chr11 5393100 5393119 5393116 +
taaatgataaattaaaaatt

SEQ ID NO: 28146 - DNA, 20 bp, Artificial Sequence
  Synthetic oligonucleotide; AGG chr11 5393101 5393120 5393117 +
aaatgataaattaaaaattt

SEQ ID NO: 28147 - DNA, 20 bp, Artificial Sequence
  Synthetic oligonucleotide; AAG chr11 5393108 5393127 5393124 +
aaattaaaaatttaggatgt

SEQ ID NO: 28148 - DNA, 20 bp, Artificial Sequence
  Synthetic oligonucleotide; TGG chr11 5393118 5393137 5393134 +
tttaggatgtaagctgtttg

SEQ ID NO: 28149 - DNA, 20 bp, Artificial Sequence
  Synthetic oligonucleotide; CAG chr11 5393145 5393164 5393161 +
atttttttcctgtttgctca

SEQ ID NO: 28150 - DNA, 20 bp, Artificial Sequence
  Synthetic oligonucleotide; TAG chr11 5393164 5393183 5393180 +
acagttctaaatccatctcc

SEQ ID NO: 28151 - DNA, 20 bp, Artificial Sequence
  Synthetic oligonucleotide; AGG chr11 5393165 5393184 5393181 +
cagttctaaatccatctcct

SEQ ID NO: 28152 - DNA, 20 bp, Artificial Sequence
  Synthetic oligonucleotide; CAG chr11 5393169 5393188 5393185 +
tctaaatccatctcctaggt

SEQ ID NO: 28153 - DNA, 20 bp, Artificial Sequence
  Synthetic oligonucleotide; AAG chr11 5393203 5393222 5393219 +
tatgtgttgaactatttaat

SEQ ID NO: 28154 - DNA, 20 bp, Artificial Sequence
  Synthetic oligonucleotide; AAG chr11 5393241 5393260 5393257 +
gtgttattgttcataatttt

SEQ ID NO: 28155 - DNA, 20 bp, Artificial Sequence
  Synthetic oligonucleotide; AAG chr11 5393249 5393268 5393265 +
gttcataattttaagaatgt

SEQ ID NO: 28156 - DNA, 20 bp, Artificial Sequence
  Synthetic oligonucleotide; TAG chr11 5393265 5393284 5393281 +
atgtaagcatacaaaatgtc

SEQ ID NO: 28157 - DNA, 20 bp, Artificial Sequence
  Synthetic oligonucleotide; AAG chr11 5393290 5393309 5393306 +
taaaaatattacataaatca

SEQ ID NO: 28158 - DNA, 20 bp, Artificial Sequence
  Synthetic oligonucleotide; TAG chr11 5393337 5393356 5393353 +
taaaatgacatttaaatgct

SEQ ID NO: 28159 - DNA, 20 bp, Artificial Sequence
  Synthetic oligonucleotide; AGG chr11 5393338 5393357 5393354 +
aaaatgacatttaaatgctt

SEQ ID NO: 28160 - DNA, 20 bp, Artificial Sequence
  Synthetic oligonucleotide; TGG chr11 5393348 5393367 5393364 +
ttaaatgcttaggaaactgt

SEQ ID NO: 28161 - DNA, 20 bp, Artificial Sequence
  Synthetic oligonucleotide; AAG chr11 5393370 5393389 5393386 +
gcaaaatattaaataaaaat

SEQ ID NO: 28162 - DNA, 20 bp, Artificial Sequence
  Synthetic oligonucleotide; TAG chr11 5393379 5393398 5393395 +
taaataaaaataagcaaaat

SEQ ID NO: 28163 - DNA, 20 bp, Artificial Sequence
  Synthetic oligonucleotide; AGG chr11 5393380 5393399 5393396 +
aaataaaaataagcaaaatt

SEQ ID NO: 28164 - DNA, 20 bp, Artificial Sequence
  Synthetic oligonucleotide; CAG chr11 5393385 5393404 5393401 +
aaaataagcaaaattaggta

SEQ ID NO: 28165 - DNA, 20 bp, Artificial Sequence
  Synthetic oligonucleotide; AAG chr11 5393404 5393423 5393420 +
acagaacaatcactatgtaa

SEQ ID NO: 28166 - DNA, 20 bp, Artificial Sequence
  Synthetic oligonucleotide; AGG chr11 5393405 5393424 5393421 +
cagaacaatcactatgtaaa

SEQ ID NO: 28167 - DNA, 20 bp, Artificial Sequence
  Synthetic oligonucleotide; AAG chr11 5393427 5393446 5393443 +
gctataaatatttgtatcaa

SEQ ID NO: 28168 - DNA, 20 bp, Artificial Sequence
  Synthetic oligonucleotide; CAG chr11 5393435 5393454 5393451 +
tatttgtatcaaaagaaaaa

SEQ ID NO: 28169 - DNA, 20 bp, Artificial Sequence
  Synthetic oligonucleotide; TAG chr11 5393465 5393484 5393481 +
atataatcttattttctata

SEQ ID NO: 28170 - DNA, 20 bp, Artificial Sequence
  Synthetic oligonucleotide; AAG chr11 5393501 5393520 5393517 +
tgccgtatacaaattttctg

SEQ ID NO: 28171 - DNA, 20 bp, Artificial Sequence
  Synthetic oligonucleotide; AAG chr11 5393504 5393523 5393520 +
cgtatacaaattttctgaag

SEQ ID NO: 28172 - DNA, 20 bp, Artificial Sequence
  Synthetic oligonucleotide; CGG chr11 5393513 5393532 5393529 +
attttctgaagaagacattt

SEQ ID NO: 28173 - DNA, 20 bp, Artificial Sequence
  Synthetic oligonucleotide; AAG chr11 5393530 5393549 5393546 +
tttcggttttataatctaaa

SEQ ID NO: 28174 - DNA, 20 bp, Artificial Sequence
  Synthetic oligonucleotide; GAG chr11 5393532 5393551 5393548 +
tcggttttataatctaaaaa

SEQ ID NO: 28175 - DNA, 20 bp, Artificial Sequence
  Synthetic oligonucleotide; AAG chr11 5393555 5393574 5393571 +
cattttacaatgactataaa

SEQ ID NO: 28176 - DNA, 20 bp, Artificial Sequence
  Synthetic oligonucleotide; AAG chr11 5393576 5393595 5393592 +
agttatatacgattatgctg

SEQ ID NO: 28177 - DNA, 20 bp, Artificial Sequence
  Synthetic oligonucleotide; AAG chr11 5393588 5393607 5393604 +
ttatgctgaagatgacaatg

SEQ ID NO: 28178 - DNA, 20 bp, Artificial Sequence
  Synthetic oligonucleotide; AAG chr11 5393628 5393647 5393644 +
gataaatgctaatgtttatt

SEQ ID NO: 28179 - DNA, 20 bp, Artificial Sequence
  Synthetic oligonucleotide; CGG chr11 5393642 5393661 5393658 +
tttattaagcatttaactca

SEQ ID NO: 28180 - DNA, 20 bp, Artificial Sequence
  Synthetic oligonucleotide; TAG chr11 5393645 5393664 5393661 +
attaagcatttaactcacgg

SEQ ID NO: 28181 - DNA, 20 bp, Artificial Sequence
  Synthetic oligonucleotide; GAG chr11 5393647 5393666 5393663 +
taagcatttaactcacggta

SEQ ID NO: 28182 - DNA, 20 bp, Artificial Sequence
  Synthetic oligonucleotide; GAG chr11 5393649 5393668 5393665 +
agcatttaactcacggtaga

SEQ ID NO: 28183 - DNA, 20 bp, Artificial Sequence
  Synthetic oligonucleotide; AGG chr11 5393650 5393669 5393666 +
gcatttaactcacggtagag

SEQ ID NO: 28184 - DNA, 20 bp, Artificial Sequence
  Synthetic oligonucleotide; GGG chr11 5393651 5393670 5393667 +
catttaactcacggtagaga

SEQ ID NO: 28185 - DNA, 20 bp, Artificial Sequence
  Synthetic oligonucleotide; GAG chr11 5393656 5393675 5393672 +
aactcacggtagagagggct

SEQ ID NO: 28186 - DNA, 20 bp, Artificial Sequence
  Synthetic oligonucleotide; AAG chr11 5393716 5393735 5393732 +
attttctcaccaaacctgtg

SEQ ID NO: 28187 - DNA, 20 bp, Artificial Sequence
  Synthetic oligonucleotide; TAG chr11 5393719 5393738 5393735 +
ttctcaccaaacctgtgaag

SEQ ID NO: 28188 - DNA, 20 bp, Artificial Sequence
  Synthetic oligonucleotide; AGG chr11 5393720 5393739 5393736 +
tctcaccaaacctgtgaagt

SEQ ID NO: 28189 - DNA, 20 bp, Artificial Sequence
  Synthetic oligonucleotide; GGG chr11 5393721 5393740 5393737 +
ctcaccaaacctgtgaagta

SEQ ID NO: 28190 - DNA, 20 bp, Artificial Sequence
  Synthetic oligonucleotide; GAG chr11 5393723 5393742 5393739 +
caccaaacctgtgaagtagg

SEQ ID NO: 28191 - DNA, 20 bp, Artificial Sequence
  Synthetic oligonucleotide; AGG chr11 5393724 5393743 5393740 +
accaaacctgtgaagtaggg

SEQ ID NO: 28192 - DNA, 20 bp, Artificial Sequence
  Synthetic oligonucleotide; TAG chr11 5393753 5393772 5393769 +
tattttcaatgttttaaaat

SEQ ID NO: 28193 - DNA, 20 bp, Artificial Sequence
  Synthetic oligonucleotide; AGG chr11 5393754 5393773 5393770 +
attttcaatgttttaaaatt

SEQ ID NO: 28194 - DNA, 20 bp, Artificial Sequence
  Synthetic oligonucleotide; GAG chr11 5393762 5393781 5393778 +
tgttttaaaattaggaaact

SEQ ID NO: 28195 - DNA, 20 bp, Artificial Sequence
  Synthetic oligonucleotide; AGG chr11 5393763 5393782 5393779 +
gttttaaaattaggaaactg

SEQ ID NO: 28196 - DNA, 20 bp, Artificial Sequence
  Synthetic oligonucleotide; CAG chr11 5393770 5393789 5393786 +
aattaggaaactgaggctca

SEQ ID NO: 28197 - DNA, 20 bp, Artificial Sequence
  Synthetic oligonucleotide; GAG chr11 5393772 5393791 5393788 +
ttaggaaactgaggctcaca

SEQ ID NO: 28198 - DNA, 20 bp, Artificial Sequence
  Synthetic oligonucleotide; AGG chr11 5393773 5393792 5393789 +
taggaaactgaggctcacag

SEQ ID NO: 28199 - DNA, 20 bp, Artificial Sequence
  Synthetic oligonucleotide; AAG chr11 5393777 5393796 5393793 +
aaactgaggctcacagagga

SEQ ID NO: 28200 - DNA, 20 bp, Artificial Sequence
  Synthetic oligonucleotide; TAG chr11 5393790 5393809 5393806 +
cagaggaaagcaactttcct

SEQ ID NO: 28201 - DNA, 20 bp, Artificial Sequence
  Synthetic oligonucleotide; AAG chr11 5393808 5393827 5393824 +
cttagttaaatcattaatgt

SEQ ID NO: 28202 - DNA, 20 bp, Artificial Sequence
  Synthetic oligonucleotide; CAG chr11 5393812 5393831 5393828 +
gttaaatcattaatgtaagt

SEQ ID NO: 28203 - DNA, 20 bp, Artificial Sequence
  Synthetic oligonucleotide; AAG chr11 5393832 5393851 5393848 +
cagaactgaaattcaatatc

SEQ ID NO: 28204 - DNA, 20 bp, Artificial Sequence
  Synthetic oligonucleotide; TGG chr11 5393863 5393882 5393879 +
attttcttaaaccattatgc

SEQ ID NO: 28205 - DNA, 20 bp, Artificial Sequence
  Synthetic oligonucleotide; CAG chr11 5393879 5393898 5393895 +
atgctggactcctctccaaa

SEQ ID NO: 28206 - DNA, 20 bp, Artificial Sequence
  Synthetic oligonucleotide; AGG chr11 5393880 5393899 5393896 +
tgctggactcctctccaaac

SEQ ID NO: 28207 - DNA, 20 bp, Artificial Sequence
  Synthetic oligonucleotide; CAG chr11 5393894 5393913 5393910 +
ccaaacaggaccactcgttt

SEQ ID NO: 28208 - DNA, 20 bp, Artificial Sequence
  Synthetic oligonucleotide; AGG chr11 5393895 5393914 5393911 +
caaacaggaccactcgtttc

SEQ ID NO: 28209 - DNA, 20 bp, Artificial Sequence
  Synthetic oligonucleotide; GGG chr11 5393896 5393915 5393912 +
aaacaggaccactcgtttca

SEQ ID NO: 28210 - DNA, 20 bp, Artificial Sequence
  Synthetic oligonucleotide; AAG chr11 5393921 5393940 5393937 +
atgttttccatgttatactg

SEQ ID NO: 28211 - DNA, 20 bp, Artificial Sequence
  Synthetic oligonucleotide; AGG chr11 5393922 5393941 5393938 +
tgttttccatgttatactga

SEQ ID NO: 28212 - DNA, 20 bp, Artificial Sequence
  Synthetic oligonucleotide; AAG chr11 5393925 5393944 5393941 +
tttccatgttatactgaagg

SEQ ID NO: 28213 - DNA, 20 bp, Artificial Sequence
  Synthetic oligonucleotide; TGG chr11 5393937 5393956 5393953 +
actgaaggaagtcccatcat

SEQ ID NO: 28214 - DNA, 20 bp, Artificial Sequence
  Synthetic oligonucleotide; TAG chr11 5393968 5393987 5393984 +
taactttttgttccctttcc

SEQ ID NO: 28215 - DNA, 20 bp, Artificial Sequence
  Synthetic oligonucleotide; TAG chr11 5393994 5394013 5394010 +
atgttatctatttttccatt

SEQ ID NO: 28216 - DNA, 20 bp, Artificial Sequence
  Synthetic oligonucleotide; CAG chr11 5394000 5394019 5394016 +
tctatttttccatttagtat

SEQ ID NO: 28217 - DNA, 20 bp, Artificial Sequence
  Synthetic oligonucleotide; AGG chr11 5394001 5394020 5394017 +
ctatttttccatttagtatc

SEQ ID NO: 28218 - DNA, 20 bp, Artificial Sequence
  Synthetic oligonucleotide; AAG chr11 5394006 5394025 5394022 +
tttccatttagtatcaggaa

SEQ ID NO: 28219 - DNA, 20 bp, Artificial Sequence
  Synthetic oligonucleotide; TAG chr11 5394010 5394029 5394026 +
catttagtatcaggaaaaga

SEQ ID NO: 28220 - DNA, 20 bp, Artificial Sequence
  Synthetic oligonucleotide; CAG chr11 5394016 5394035 5394032 +
gtatcaggaaaagatagcaa

SEQ ID NO: 28221 - DNA, 20 bp, Artificial Sequence
  Synthetic oligonucleotide; CAG chr11 5394023 5394042 5394039 +
gaaaagatagcaacagaaaa

SEQ ID NO: 28222 - DNA, 20 bp, Artificial Sequence
  Synthetic oligonucleotide; TAG chr11 5394059 5394078 5394075 +
ttgtattaaatactttttaa

SEQ ID NO: 28223 - DNA, 20 bp, Artificial Sequence
  Synthetic oligonucleotide; AAG chr11 5394072 5394091 5394088 +
tttttaatagacttgatttt

SEQ ID NO: 28224 - DNA, 20 bp, Artificial Sequence
  Synthetic oligonucleotide; GAG chr11 5394074 5394093 5394090 +
tttaatagacttgattttaa

SEQ ID NO: 28225 - DNA, 20 bp, Artificial Sequence
  Synthetic oligonucleotide; TAG chr11 5394080 5394099 5394096 +
agacttgattttaagagtta

SEQ ID NO: 28226 - DNA, 20 bp, Artificial Sequence
  Synthetic oligonucleotide; CAG chr11 5394088 5394107 5394104 +
ttttaagagttatagattca

SEQ ID NO: 28227 - DNA, 20 bp, Artificial Sequence
  Synthetic oligonucleotide; CAG chr11 5394098 5394117 5394114 +
tatagattcacagaaaaact

SEQ ID NO: 28228 - DNA, 20 bp, Artificial Sequence
  Synthetic oligonucleotide; TAG chr11 5394101 5394120 5394117 +
agattcacagaaaaactcag

SEQ ID NO: 28229 - DNA, 20 bp, Artificial Sequence
  Synthetic oligonucleotide; AAG chr11 5394104 5394123 5394120 +
ttcacagaaaaactcagtag

SEQ ID NO: 28230 - DNA, 20 bp, Artificial Sequence
  Synthetic oligonucleotide; AGG chr11 5394105 5394124 5394121 +
tcacagaaaaactcagtaga

SEQ ID NO: 28231 - DNA, 20 bp, Artificial Sequence
  Synthetic oligonucleotide; GAG chr11 5394112 5394131 5394128 +
aaaactcagtagaaggtact

SEQ ID NO: 28232 - DNA, 20 bp, Artificial Sequence
  Synthetic oligonucleotide; TGG chr11 5394136 5394155 5394152 +
accttctattttgcatatca

SEQ ID NO: 28233 - DNA, 20 bp, Artificial Sequence
  Synthetic oligonucleotide; AAG chr11 5394145 5394164 5394161 +
tttgcatatcatggtttttt

SEQ ID NO: 28234 - DNA, 20 bp, Artificial Sequence
  Synthetic oligonucleotide; TAG chr11 5394162 5394181 5394178 +
tttaagcacatattataacc

SEQ ID NO: 28235 - DNA, 20 bp, Artificial Sequence
  Synthetic oligonucleotide; AGG chr11 5394163 5394182 5394179 +
ttaagcacatattataacct

SEQ ID NO: 28236 - DNA, 20 bp, Artificial Sequence
  Synthetic oligonucleotide; AAG chr11 5394175 5394194 5394191 +
tataacctaggtattattct

SEQ ID NO: 28237 - DNA, 20 bp, Artificial Sequence
  Synthetic oligonucleotide; AGG chr11 5394176 5394195 5394192 +
ataacctaggtattattcta

SEQ ID NO: 28238 - DNA, 20 bp, Artificial Sequence
  Synthetic oligonucleotide; GGG chr11 5394177 5394196 5394193 +
taacctaggtattattctaa

SEQ ID NO: 28239 - DNA, 20 bp, Artificial Sequence
  Synthetic oligonucleotide; AAG chr11 5394193 5394212 5394209 +
ctaagggcataatacactat

SEQ ID NO: 28240 - DNA, 20 bp, Artificial Sequence
  Synthetic oligonucleotide; GAG chr11 5394222 5394241 5394238 +
tatcttgacaataaccttat

SEQ ID NO: 28241 - DNA, 20 bp, Artificial Sequence
  Synthetic oligonucleotide; TGG chr11 5394226 5394245 5394242 +
ttgacaataaccttatgaga

SEQ ID NO: 28242 - DNA, 20 bp, Artificial Sequence
  Synthetic oligonucleotide; TAG chr11 5394236 5394255 5394252 +
ccttatgagatggatactac

SEQ ID NO: 28243 - DNA, 20 bp, Artificial Sequence
  Synthetic oligonucleotide; CAG chr11 5394252 5394271 5394268 +
ctactagattacccatttta

SEQ ID NO: 28244 - DNA, 20 bp, Artificial Sequence
  Synthetic oligonucleotide; AAG chr11 5394257 5394276 5394273 +
agattacccattttacagat

SEQ ID NO: 28245 - DNA, 20 bp, Artificial Sequence
  Synthetic oligonucleotide; GAG chr11 5394266 5394285 5394282 +
attttacagataagtacact

SEQ ID NO: 28246 - DNA, 20 bp, Artificial Sequence
  Synthetic oligonucleotide; AGG chr11 5394267 5394286 5394283 +
ttttacagataagtacactg

SEQ ID NO: 28247 - DNA, 20 bp, Artificial Sequence
  Synthetic oligonucleotide; CAG chr11 5394272 5394291 5394288 +
cagataagtacactgaggct

SEQ ID NO: 28248 - DNA, 20 bp, Artificial Sequence
  Synthetic oligonucleotide; GAG chr11 5394274 5394293 5394290 +
gataagtacactgaggctca

SEQ ID NO: 28249 - DNA, 20 bp, Artificial Sequence
  Synthetic oligonucleotide; AAG chr11 5394304 5394323 5394320 +
atcttgcccaatattatacc

SEQ ID NO: 28250 - DNA, 20 bp, Artificial Sequence
  Synthetic oligonucleotide; CAG chr11 5394312 5394331 5394328 +
caatattataccaagtttga

SEQ ID NO: 28251 - DNA, 20 bp, Artificial Sequence
  Synthetic oligonucleotide; TGG chr11 5394324 5394343 5394340 +
aagtttgacagttctgactg

SEQ ID NO: 28252 - DNA, 20 bp, Artificial Sequence
  Synthetic oligonucleotide; TAG chr11 5394333 5394352 5394349 +
agttctgactgtggtgcttg

SEQ ID NO: 28253 - DNA, 20 bp, Artificial Sequence
  Synthetic oligonucleotide; CAG chr11 5394392 5394411 5394408 +
aaccaaaaaaaacataaaat

SEQ ID NO: 28254 - DNA, 20 bp, Artificial Sequence
  Synthetic oligonucleotide; AAG chr11 5394398 5394417 5394414 +
aaaaaacataaaatcagcca

SEQ ID NO: 28255 - DNA, 20 bp, Artificial Sequence
  Synthetic oligonucleotide; CAG chr11 5394423 5394442 5394439 +
gtacatattcctgctaatga

SEQ ID NO: 28256 - DNA, 20 bp, Artificial Sequence
  Synthetic oligonucleotide; TGG chr11 5394444 5394463 5394460 +
agtatctgctttaaatcatc

SEQ ID NO: 28257 - DNA, 20 bp, Artificial Sequence
  Synthetic oligonucleotide; CAG chr11 5394456 5394475 5394472 +
aaatcatctggcccattcct

SEQ ID NO: 28258 - DNA, 20 bp, Artificial Sequence
  Synthetic oligonucleotide; AAG chr11 5394462 5394481 5394478 +
tctggcccattcctcagcac

SEQ ID NO: 28259 - DNA, 20 bp, Artificial Sequence
  Synthetic oligonucleotide; CAG chr11 5394477 5394496 5394493 +
agcacaagcctatattcctg

SEQ ID NO: 28260 - DNA, 20 bp, Artificial Sequence
  Synthetic oligonucleotide; AGG chr11 5394478 5394497 5394494 +
gcacaagcctatattcctgc

SEQ ID NO: 28261 - DNA, 20 bp, Artificial Sequence
  Synthetic oligonucleotide; AAG chr11 5394519 5394538 5394535 +
tcccgttatttaatatccac

SEQ ID NO: 28262 - DNA, 20 bp, Artificial Sequence
  Synthetic oligonucleotide; AAG chr11 5394529 5394548 5394545 +
taatatccacaagcctctct

SEQ ID NO: 28263 - DNA, 20 bp, Artificial Sequence
  Synthetic oligonucleotide; CAG chr11 5394563 5394582 5394579 +
gatactgtatttgtaaaaca

SEQ ID NO: 28264 - DNA, 20 bp, Artificial Sequence
  Synthetic oligonucleotide; TGG chr11 5394567 5394586 5394583 +
ctgtatttgtaaaacacaga

SEQ ID NO: 28265 - DNA, 20 bp, Artificial Sequence
  Synthetic oligonucleotide; AAG chr11 5394582 5394601 5394598 +
acagatggctcatgtaattg

SEQ ID NO: 28266 - DNA, 20 bp, Artificial Sequence
  Synthetic oligonucleotide; CAG chr11 5394589 5394608 5394605 +
gctcatgtaattgaagttca

SEQ ID NO: 28267 - DNA, 20 bp, Artificial Sequence
  Synthetic oligonucleotide; GAG chr11 5394621 5394640 5394637 +
ttttgctttgtgacaactct

SEQ ID NO: 28268 - DNA, 20 bp, Artificial Sequence
  Synthetic oligonucleotide; TAG chr11 5394674 5394693 5394690 +
atgttacctattttgaatga

SEQ ID NO: 28269 - DNA, 20 bp, Artificial Sequence
  Synthetic oligonucleotide; CAG chr11 5394679 5394698 5394695 +
acctattttgaatgatagtg

SEQ ID NO: 28270 - DNA, 20 bp, Artificial Sequence
  Synthetic oligonucleotide; TAG chr11 5394686 5394705 5394702 +
ttgaatgatagtgcagacat

SEQ ID NO: 28271 - DNA, 20 bp, Artificial Sequence
  Synthetic oligonucleotide; AAG chr11 5394690 5394709 5394706 +
atgatagtgcagacattagt

SEQ ID NO: 28272 - DNA, 20 bp, Artificial Sequence
  Synthetic oligonucleotide; AGG chr11 5394691 5394710 5394707 +
tgatagtgcagacattagta

SEQ ID NO: 28273 - DNA, 20 bp, Artificial Sequence
  Synthetic oligonucleotide; AAG chr11 5394695 5394714 5394711 +
agtgcagacattagtaagga

SEQ ID NO: 28274 - DNA, 20 bp, Artificial Sequence
  Synthetic oligonucleotide; TGG chr11 5394720 5394739 5394736 +
tgctaaatatttgtatcacc

SEQ ID NO: 28275 - DNA, 20 bp, Artificial Sequence
  Synthetic oligonucleotide; GGG chr11 5394721 5394740 5394737 +
gctaaatatttgtatcacct

SEQ ID NO: 28276 - DNA, 20 bp, Artificial Sequence
  Synthetic oligonucleotide; AAG chr11 5394724 5394743 5394740 +
aaatatttgtatcacctggg

SEQ ID NO: 28277 - DNA, 20 bp, Artificial Sequence
  Synthetic oligonucleotide; CAG chr11 5394743 5394762 5394759 +
gaagcctgtttttgcttcat

SEQ ID NO: 28278 - DNA, 20 bp, Artificial Sequence
  Synthetic oligonucleotide; AGG chr11 5394744 5394763 5394760 +
aagcctgtttttgcttcatc

SEQ ID NO: 28279 - DNA, 20 bp, Artificial Sequence
  Synthetic oligonucleotide; GGG chr11 5394745 5394764 5394761 +
agcctgtttttgcttcatca

SEQ ID NO: 28280 - DNA, 20 bp, Artificial Sequence
  Synthetic oligonucleotide; GGG chr11 5394746 5394765 5394762 +
gcctgtttttgcttcatcag

SEQ ID NO: 28281 - DNA, 20 bp, Artificial Sequence
  Synthetic oligonucleotide; TAG chr11 5394753 5394772 5394769 +
tttgcttcatcaggggacgt

SEQ ID NO: 28282 - DNA, 20 bp, Artificial Sequence
  Synthetic oligonucleotide; CAG chr11 5394778 5394797 5394794 +
tttttcacatcaacctcctg

SEQ ID NO: 28283 - DNA, 20 bp, Artificial Sequence
  Synthetic oligonucleotide; AAG chr11 5394781 5394800 5394797 +
ttcacatcaacctcctgcag

SEQ ID NO: 28284 - DNA, 20 bp, Artificial Sequence
  Synthetic oligonucleotide; AAG chr11 5394798 5394817 5394814 +
cagaagacaatgctttctga

SEQ ID NO: 28285 - DNA, 20 bp, Artificial Sequence
  Synthetic oligonucleotide; CAG chr11 5394802 5394821 5394818 +
agacaatgctttctgaaaga

SEQ ID NO: 28286 - DNA, 20 bp, Artificial Sequence
  Synthetic oligonucleotide; GAG chr11 5394804 5394823 5394820 +
acaatgctttctgaaagaca

SEQ ID NO: 28287 - DNA, 20 bp, Artificial Sequence
  Synthetic oligonucleotide; AAG chr11 5394847 5394866 5394863 +
gcattcaaatatctgaccca

SEQ ID NO: 28288 - DNA, 20 bp, Artificial Sequence
  Synthetic oligonucleotide; CAG chr11 5394873 5394892 5394889 +
gtgatctttacatacttgct

SEQ ID NO: 28289 - DNA, 20 bp, Artificial Sequence
  Synthetic oligonucleotide; CAG chr11 5394883 5394902 5394899 +
catacttgctcagtgaatga

SEQ ID NO: 28290 - DNA, 20 bp, Artificial Sequence
  Synthetic oligonucleotide; TGG chr11 5394898 5394917 5394914 +
aatgacagtgaataactacc

SEQ ID NO: 28291 - DNA, 20 bp, Artificial Sequence
  Synthetic oligonucleotide; AAG chr11 5394906 5394925 5394922 +
tgaataactacctggttgta

SEQ ID NO: 28292 - DNA, 20 bp, Artificial Sequence
  Synthetic oligonucleotide; AAG chr11 5394917 5394936 5394933 +
ctggttgtaaagactgtctc

SEQ ID NO: 28293 - DNA, 20 bp, Artificial Sequence
  Synthetic oligonucleotide; AGG chr11 5394918 5394937 5394934 +
tggttgtaaagactgtctca

SEQ ID NO: 28294 - DNA, 20 bp, Artificial Sequence
  Synthetic oligonucleotide; GGG chr11 5394919 5394938 5394935 +
ggttgtaaagactgtctcaa

SEQ ID NO: 28295 - DNA, 20 bp, Artificial Sequence
  Synthetic oligonucleotide; GGG chr11 5394920 5394939 5394936 +
gttgtaaagactgtctcaag

SEQ ID NO: 28296 - DNA, 20 bp, Artificial Sequence
  Synthetic oligonucleotide; TGG chr11 5394932 5394951 5394948 +
gtctcaaggggacttttgtc

SEQ ID NO: 28297 - DNA, 20 bp, Artificial Sequence
  Synthetic oligonucleotide; GGG chr11 5394933 5394952 5394949 +
tctcaaggggacttttgtct

SEQ ID NO: 28298 - DNA, 20 bp, Artificial Sequence
  Synthetic oligonucleotide; AAG chr11 5394938 5394957 5394954 +
aggggacttttgtctgggaa

SEQ ID NO: 28299 - DNA, 20 bp, Artificial Sequence
  Synthetic oligonucleotide; AAG chr11 5394943 5394962 5394959 +
acttttgtctgggaaaagaa

SEQ ID NO: 28300 - DNA, 20 bp, Artificial Sequence
  Synthetic oligonucleotide; AAG chr11 5394947 5394966 5394963 +
ttgtctgggaaaagaaaaga

SEQ ID NO: 28301 - DNA, 20 bp, Artificial Sequence
  Synthetic oligonucleotide; AAG chr11 5394956 5394975 5394972 +
aaaagaaaagaaagacaaaa

SEQ ID NO: 28302 - DNA, 20 bp, Artificial Sequence
  Synthetic oligonucleotide; GAG chr11 5394958 5394977 5394974 +
aagaaaagaaagacaaaaaa

SEQ ID NO: 28303 - DNA, 20 bp, Artificial Sequence
  Synthetic oligonucleotide; AGG chr11 5394959 5394978 5394975 +
agaaaagaaagacaaaaaag

SEQ ID NO: 28304 - DNA, 20 bp, Artificial Sequence
  Synthetic oligonucleotide; GAG chr11 5394965 5394984 5394981 +
gaaagacaaaaaagaggatt

SEQ ID NO: 28305 - DNA, 20 bp, Artificial Sequence
  Synthetic oligonucleotide; AAG chr11 5394968 5394987 5394984 +
agacaaaaaagaggattgag

SEQ ID NO: 28306 - DNA, 20 bp, Artificial Sequence
  Synthetic oligonucleotide; AAG chr11 5394992 5395011 5395008 +
acccaataaattttcttatg

SEQ ID NO: 28307 - DNA, 20 bp, Artificial Sequence
  Synthetic oligonucleotide; TGG chr11 5394996 5395015 5395012 +
aataaattttcttatgaagt

SEQ ID NO: 28308 - DNA, 20 bp, Artificial Sequence
  Synthetic oligonucleotide; CAG chr11 5394999 5395018 5395015 +
aaattttcttatgaagttgg

SEQ ID NO: 28309 - DNA, 20 bp, Artificial Sequence
  Synthetic oligonucleotide; TGG chr11 5395003 5395022 5395019 +
tttcttatgaagttggcagc

SEQ ID NO: 28310 - DNA, 20 bp, Artificial Sequence
  Synthetic oligonucleotide; GGG chr11 5395004 5395023 5395020 +
ttcttatgaagttggcagct

SEQ ID NO: 28311 - DNA, 20 bp, Artificial Sequence
  Synthetic oligonucleotide; GGG chr11 5395005 5395024 5395021 +
tcttatgaagttggcagctg

SEQ ID NO: 28312 - DNA, 20 bp, Artificial Sequence
  Synthetic oligonucleotide; GAG chr11 5395007 5395026 5395023 +
ttatgaagttggcagctggg

SEQ ID NO: 28313 - DNA, 20 bp, Artificial Sequence
  Synthetic oligonucleotide; GAG chr11 5395009 5395028 5395025 +
atgaagttggcagctgggga

SEQ ID NO: 28314 - DNA, 20 bp, Artificial Sequence
  Synthetic oligonucleotide; AAG chr11 5395012 5395031 5395028 +
aagttggcagctggggagag

SEQ ID NO: 28315 - DNA, 20 bp, Artificial Sequence
  Synthetic oligonucleotide; CAG chr11 5395016 5395035 5395032 +
tggcagctggggagagaaga

SEQ ID NO: 28316 - DNA, 20 bp, Artificial Sequence
  Synthetic oligonucleotide; AAG chr11 5395021 5395040 5395037 +
gctggggagagaagacagtc

SEQ ID NO: 28317 - DNA, 20 bp, Artificial Sequence
  Synthetic oligonucleotide; AGG chr11 5395022 5395041 5395038 +
ctggggagagaagacagtca

SEQ ID NO: 28318 - DNA, 20 bp, Artificial Sequence
  Synthetic oligonucleotide; TGG chr11 5395031 5395050 5395047 +
gaagacagtcaaggatcctc

SEQ ID NO: 28319 - DNA, 20 bp, Artificial Sequence
  Synthetic oligonucleotide; TAG chr11 5395051 5395070 5395067 +
tggctcactgaaatacctcc

SEQ ID NO: 28320 - DNA, 20 bp, Artificial Sequence
  Synthetic oligonucleotide; GAG chr11 5395053 5395072 5395069 +
gctcactgaaatacctccta

SEQ ID NO: 28321 - DNA, 20 bp, Artificial Sequence
  Synthetic oligonucleotide; AGG chr11 5395054 5395073 5395070 +
ctcactgaaatacctcctag

SEQ ID NO: 28322 - DNA, 20 bp, Artificial Sequence
  Synthetic oligonucleotide; TGG chr11 5395063 5395082 5395079 +
atacctcctagaggtactca

SEQ ID NO: 28323 - DNA, 20 bp, Artificial Sequence
  Synthetic oligonucleotide; AAG chr11 5395084 5395103 5395100 +
ggttcactaaatttccattt

SEQ ID NO: 28324 - DNA, 20 bp, Artificial Sequence
  Synthetic oligonucleotide; TGG chr11 5395092 5395111 5395108 +
aaatttccatttaagataac

SEQ ID NO: 28325 - DNA, 20 bp, Artificial Sequence
  Synthetic oligonucleotide; GGG chr11 5395093 5395112 5395109 +
aatttccatttaagataact

SEQ ID NO: 28326 - DNA, 20 bp, Artificial Sequence
  Synthetic oligonucleotide; TGG chr11 5395110 5395129 5395126 +
actgggcatctcaaatgctt

SEQ ID NO: 28327 - DNA, 20 bp, Artificial Sequence
  Synthetic oligonucleotide; TAG chr11 5395115 5395134 5395131 +
gcatctcaaatgctttggtc

SEQ ID NO: 28328 - DNA, 20 bp, Artificial Sequence
  Synthetic oligonucleotide; AGG chr11 5395116 5395135 5395132 +
catctcaaatgctttggtct

SEQ ID NO: 28329 - DNA, 20 bp, Artificial Sequence
  Synthetic oligonucleotide; GAG chr11 5395118 5395137 5395134 +
tctcaaatgctttggtctag

SEQ ID NO: 28330 - DNA, 20 bp, Artificial Sequence
  Synthetic oligonucleotide; AGG chr11 5395119 5395138 5395135 +
ctcaaatgctttggtctagg

SEQ ID NO: 28331 - DNA, 20 bp, Artificial Sequence
  Synthetic oligonucleotide; AAG chr11 5395148 5395167 5395164 +
atccctctttgacattcatc

SEQ ID NO: 28332 - DNA, 20 bp, Artificial Sequence
  Synthetic oligonucleotide; TAG chr11 5395163 5395182 5395179 +
tcatcaagtctgcgtccatc

SEQ ID NO: 28333 - DNA, 20 bp, Artificial Sequence
  Synthetic oligonucleotide; AGG chr11 5395164 5395183 5395180 +
catcaagtctgcgtccatct

SEQ ID NO: 28334 - DNA, 20 bp, Artificial Sequence
  Synthetic oligonucleotide; GGG chr11 5395165 5395184 5395181 +
atcaagtctgcgtccatcta

SEQ ID NO: 28335 - DNA, 20 bp, Artificial Sequence
  Synthetic oligonucleotide; GAG chr11 5395167 5395186 5395183 +
caagtctgcgtccatctagg

SEQ ID NO: 28336 - DNA, 20 bp, Artificial Sequence
  Synthetic oligonucleotide; GAG chr11 5395178 5395197 5395194 +
ccatctagggagattccttt

SEQ ID NO: 28337 - DNA, 20 bp, Artificial Sequence
  Synthetic oligonucleotide; AGG chr11 5395179 5395198 5395195 +
catctagggagattcctttg

SEQ ID NO: 28338 - DNA, 20 bp, Artificial Sequence
  Synthetic oligonucleotide; GGG chr11 5395180 5395199 5395196 +
atctagggagattcctttga

SEQ ID NO: 28339 - DNA, 20 bp, Artificial Sequence
  Synthetic oligonucleotide; AAG chr11 5395186 5395205 5395202 +
ggagattcctttgagggcca

SEQ ID NO: 28340 - DNA, 20 bp, Artificial Sequence
  Synthetic oligonucleotide; AAG chr11 5395193 5395212 5395209 +
cctttgagggccaaagaccc

SEQ ID NO: 28341 - DNA, 20 bp, Artificial Sequence
  Synthetic oligonucleotide; AGG chr11 5395194 5395213 5395210 +
ctttgagggccaaagaccca

SEQ ID NO: 28342 - DNA, 20 bp, Artificial Sequence
  Synthetic oligonucleotide; AAG chr11 5395197 5395216 5395213 +
tgagggccaaagacccaagg

SEQ ID NO: 28343 - DNA, 20 bp, Artificial Sequence
  Synthetic oligonucleotide; GAG chr11 5395199 5395218 5395215 +
agggccaaagacccaaggaa

SEQ ID NO: 28344 - DNA, 20 bp, Artificial Sequence
  Synthetic oligonucleotide; GAG chr11 5395201 5395220 5395217 +
ggccaaagacccaaggaaga

SEQ ID NO: 28345 - DNA, 20 bp, Artificial Sequence
  Synthetic oligonucleotide; CAG chr11 5395205 5395224 5395221 +
aaagacccaaggaagagaga

SEQ ID NO: 28346 - DNA, 20 bp, Artificial Sequence
  Synthetic oligonucleotide; AAG chr11 5395214 5395233 5395230 +
aggaagagagacagctttat

SEQ ID NO: 28347 - DNA, 20 bp, Artificial Sequence
  Synthetic oligonucleotide; CAG chr11 5395220 5395239 5395236 +
agagacagctttataagtgc

SEQ ID NO: 28348 - DNA, 20 bp, Artificial Sequence
  Synthetic oligonucleotide; CAG chr11 5395225 5395244 5395241 +
cagctttataagtgccagtg

SEQ ID NO: 28349 - DNA, 20 bp, Artificial Sequence
  Synthetic oligonucleotide; TAG chr11 5395234 5395253 5395250 +
aagtgccagtgcagcccacg

SEQ ID NO: 28350 - DNA, 20 bp, Artificial Sequence
  Synthetic oligonucleotide; CAG chr11 5395239 5395258 5395255 +
ccagtgcagcccacgtagaa

SEQ ID NO: 28351 - DNA, 20 bp, Artificial Sequence
  Synthetic oligonucleotide; GAG chr11 5395248 5395267 5395264 +
cccacgtagaacagcatcct

SEQ ID NO: 28352 - DNA, 20 bp, Artificial Sequence
  Synthetic oligonucleotide; TGG chr11 5395256 5395275 5395272 +
gaacagcatcctgagtcaaa

SEQ ID NO: 28353 - DNA, 20 bp, Artificial Sequence
  Synthetic oligonucleotide; AAG chr11 5395259 5395278 5395275 +
cagcatcctgagtcaaatgg

SEQ ID NO: 28354 - DNA, 20 bp, Artificial Sequence
  Synthetic oligonucleotide; TGG chr11 5395266 5395285 5395282 +
ctgagtcaaatggaagatgc

SEQ ID NO: 28355 - DNA, 20 bp, Artificial Sequence
  Synthetic oligonucleotide; TGG chr11 5395271 5395290 5395287 +
tcaaatggaagatgctggca

SEQ ID NO: 28356 - DNA, 20 bp, Artificial Sequence
  Synthetic oligonucleotide; GAG chr11 5395273 5395292 5395289 +
aaatggaagatgctggcatg

SEQ ID NO: 28357 - DNA, 20 bp, Artificial Sequence
  Synthetic oligonucleotide; TGG chr11 5395276 5395295 5395292 +
tggaagatgctggcatggag

SEQ ID NO: 28358 - DNA, 20 bp, Artificial Sequence
  Synthetic oligonucleotide; AAG chr11 5395279 5395298 5395295 +
aagatgctggcatggagtgg

SEQ ID NO: 28359 - DNA, 20 bp, Artificial Sequence
  Synthetic oligonucleotide; AGG chr11 5395280 5395299 5395296 +
agatgctggcatggagtgga

SEQ ID NO: 28360 - DNA, 20 bp, Artificial Sequence
  Synthetic oligonucleotide; GGG chr11 5395281 5395300 5395297 +
gatgctggcatggagtggaa

SEQ ID NO: 28361 - DNA, 20 bp, Artificial Sequence
  Synthetic oligonucleotide; GAG chr11 5395290 5395309 5395306 +
atggagtggaagggctgcat

SEQ ID NO: 28362 - DNA, 20 bp, Artificial Sequence
  Synthetic oligonucleotide; AAG chr11 5395294 5395313 5395310 +
agtggaagggctgcatgaga

SEQ ID NO: 28363 - DNA, 20 bp, Artificial Sequence
  Synthetic oligonucleotide; AAG chr11 5395297 5395316 5395313 +
ggaagggctgcatgagaaag

SEQ ID NO: 28364 - DNA, 20 bp, Artificial Sequence
  Synthetic oligonucleotide; CAG chr11 5395303 5395322 5395319 +
gctgcatgagaaagaagcta

SEQ ID NO: 28365 - DNA, 20 bp, Artificial Sequence
  Synthetic oligonucleotide; GAG chr11 5395305 5395324 5395321 +
tgcatgagaaagaagctaca

SEQ ID NO: 28366 - DNA, 20 bp, Artificial Sequence
  Synthetic oligonucleotide; AAG chr11 5395308 5395327 5395324 +
atgagaaagaagctacagag

SEQ ID NO: 28367 - DNA, 20 bp, Artificial Sequence
  Synthetic oligonucleotide; AAG chr11 5395312 5395331 5395328 +
gaaagaagctacagagaaga

SEQ ID NO: 28368 - DNA, 20 bp, Artificial Sequence
  Synthetic oligonucleotide; AGG chr11 5395313 5395332 5395329 +
aaagaagctacagagaagaa

SEQ ID NO: 28369 - DNA, 20 bp, Artificial Sequence
  Synthetic oligonucleotide; CAG chr11 5395318 5395337 5395334 +
agctacagagaagaaaggac

SEQ ID NO: 28370 - DNA, 20 bp, Artificial Sequence
  Synthetic oligonucleotide; AAG chr11 5395322 5395341 5395338 +
acagagaagaaaggaccagt

SEQ ID NO: 28371 - DNA, 20 bp, Artificial Sequence
  Synthetic oligonucleotide; AAG chr11 5395331 5395350 5395347 +
aaaggaccagtaagttgctg

SEQ ID NO: 28372 - DNA, 20 bp, Artificial Sequence
  Synthetic oligonucleotide; AGG chr11 5395332 5395351 5395348 +
aaggaccagtaagttgctga

SEQ ID NO: 28373 - DNA, 20 bp, Artificial Sequence
  Synthetic oligonucleotide; TGG chr11 5395347 5395366 5395363 +
gctgaaggtcctttgttttg

SEQ ID NO: 28374 - DNA, 20 bp, Artificial Sequence
  Synthetic oligonucleotide; AAG chr11 5395353 5395372 5395369 +
ggtcctttgttttgtggata

SEQ ID NO: 28375 - DNA, 20 bp, Artificial Sequence
  Synthetic oligonucleotide; AGG chr11 5395354 5395373 5395370 +
gtcctttgttttgtggataa

SEQ ID NO: 28376 - DNA, 20 bp, Artificial Sequence
  Synthetic oligonucleotide; AAG chr11 5395357 5395376 5395373 +
ctttgttttgtggataaagg

SEQ ID NO: 28377 - DNA, 20 bp, Artificial Sequence
  Synthetic oligonucleotide; TGG chr11 5395364 5395383 5395380 +
ttgtggataaaggaagtcat

SEQ ID NO: 28378 - DNA, 20 bp, Artificial Sequence
  Synthetic oligonucleotide; GAG chr11 5395366 5395385 5395382 +
gtggataaaggaagtcattg

SEQ ID NO: 28379 - DNA, 20 bp, Artificial Sequence
  Synthetic oligonucleotide; TAG chr11 5395392 5395411 5395408 +
cctctctaatatcccttatc

SEQ ID NO: 28380 - DNA, 20 bp, Artificial Sequence
  Synthetic oligonucleotide; CAG chr11 5395407 5395426 5395423 +
ttatctagcatgactatatg

SEQ ID NO: 28381 - DNA, 20 bp, Artificial Sequence
  Synthetic oligonucleotide; AGG chr11 5395408 5395427 5395424 +
tatctagcatgactatatgc

SEQ ID NO: 28382 - DNA, 20 bp, Artificial Sequence
  Synthetic oligonucleotide; GGG chr11 5395409 5395428 5395425 +
atctagcatgactatatgca

SEQ ID NO: 28383 - DNA, 20 bp, Artificial Sequence
  Synthetic oligonucleotide; TGG chr11 5395415 5395434 5395431 +
catgactatatgcagggtta

SEQ ID NO: 28384 - DNA, 20 bp, Artificial Sequence
  Synthetic oligonucleotide; TAG chr11 5395420 5395439 5395436 +
ctatatgcagggttatggaa

SEQ ID NO: 28385 - DNA, 20 bp, Artificial Sequence
  Synthetic oligonucleotide; AGG chr11 5395421 5395440 5395437 +
tatatgcagggttatggaat

SEQ ID NO: 28386 - DNA, 20 bp, Artificial Sequence
  Synthetic oligonucleotide; GGG chr11 5395422 5395441 5395438 +
atatgcagggttatggaata

SEQ ID NO: 28387 - DNA, 20 bp, Artificial Sequence
  Synthetic oligonucleotide; CAG chr11 5395425 5395444 5395441 +
tgcagggttatggaataggg

SEQ ID NO: 28388 - DNA, 20 bp, Artificial Sequence
  Synthetic oligonucleotide; CAG chr11 5395432 5395451 5395448 +
ttatggaatagggcagcttc

SEQ ID NO: 28389 - DNA, 20 bp, Artificial Sequence
  Synthetic oligonucleotide; AGG chr11 5395433 5395452 5395449 +
tatggaatagggcagcttcc

SEQ ID NO: 28390 - DNA, 20 bp, Artificial Sequence
  Synthetic oligonucleotide; AAG chr11 5395436 5395455 5395452 +
ggaatagggcagcttccagg

SEQ ID NO: 28391 - DNA, 20 bp, Artificial Sequence
  Synthetic oligonucleotide; TGG chr11 5395440 5395459 5395456 +
tagggcagcttccaggaaga

SEQ ID NO: 28392 - DNA, 20 bp, Artificial Sequence
  Synthetic oligonucleotide; TAG chr11 5395455 5395474 5395471 +
gaagatggccaatctgttgt

SEQ ID NO: 28393 - DNA, 20 bp, Artificial Sequence
  Synthetic oligonucleotide; AGG chr11 5395456 5395475 5395472 +
aagatggccaatctgttgtt

SEQ ID NO: 28394 - DNA, 20 bp, Artificial Sequence
  Synthetic oligonucleotide; GGG chr11 5395457 5395476 5395473 +
agatggccaatctgttgtta

SEQ ID NO: 28395 - DNA, 20 bp, Artificial Sequence
  Synthetic oligonucleotide; TGG chr11 5395495 5395514 5395511 +
atctcccgtgatgtttttga

SEQ ID NO: 28396 - DNA, 20 bp, Artificial Sequence
  Synthetic oligonucleotide; GGG chr11 5395496 5395515 5395512 +
tctcccgtgatgtttttgat

SEQ ID NO: 28397 - DNA, 20 bp, Artificial Sequence
  Synthetic oligonucleotide; GGG chr11 5395497 5395516 5395513 +
ctcccgtgatgtttttgatg

SEQ ID NO: 28398 - DNA, 20 bp, Artificial Sequence
  Synthetic oligonucleotide; AAG chr11 5395500 5395519 5395516 +
ccgtgatgtttttgatgggg

SEQ ID NO: 28399 - DNA, 20 bp, Artificial Sequence
  Synthetic oligonucleotide; CAG chr11 5395504 5395523 5395520 +
gatgtttttgatggggaaga

SEQ ID NO: 28400 - DNA, 20 bp, Artificial Sequence
  Synthetic oligonucleotide; TGG chr11 5395510 5395529 5395526 +
tttgatggggaagacagatc

SEQ ID NO: 28401 - DNA, 20 bp, Artificial Sequence
  Synthetic oligonucleotide; TGG chr11 5395522 5395541 5395538 +
gacagatctggacttgttac

SEQ ID NO: 28402 - DNA, 20 bp, Artificial Sequence
  Synthetic oligonucleotide; GGG chr11 5395523 5395542 5395539 +
acagatctggacttgttact

SEQ ID NO: 28403 - DNA, 20 bp, Artificial Sequence
  Synthetic oligonucleotide; TAG chr11 5395536 5395555 5395552 +
tgttactgggctatgccttg

SEQ ID NO: 28404 - DNA, 20 bp, Artificial Sequence
  Synthetic oligonucleotide; GAG chr11 5395538 5395557 5395554 +
ttactgggctatgccttgta

SEQ ID NO: 28405 - DNA, 20 bp, Artificial Sequence
  Synthetic oligonucleotide; CAG chr11 5395548 5395567 5395564 +
atgccttgtagagaatgata

SEQ ID NO: 28406 - DNA, 20 bp, Artificial Sequence
  Synthetic oligonucleotide; AGG chr11 5395549 5395568 5395565 +
tgccttgtagagaatgatac

SEQ ID NO: 28407 - DNA, 20 bp, Artificial Sequence
  Synthetic oligonucleotide; GGG chr11 5395550 5395569 5395566 +
gccttgtagagaatgataca

SEQ ID NO: 28408 - DNA, 20 bp, Artificial Sequence
  Synthetic oligonucleotide; TGG chr11 5395556 5395575 5395572 +
tagagaatgatacagggttg

SEQ ID NO: 28409 - DNA, 20 bp, Artificial Sequence
  Synthetic oligonucleotide; CAG chr11 5395559 5395578 5395575 +
agaatgatacagggttgtgg

SEQ ID NO: 28410 - DNA, 20 bp, Artificial Sequence
  Synthetic oligonucleotide; AGG chr11 5395560 5395579 5395576 +
gaatgatacagggttgtggc

SEQ ID NO: 28411 - DNA, 20 bp, Artificial Sequence
  Synthetic oligonucleotide; AAG chr11 5395564 5395583 5395580 +
gatacagggttgtggcaggc

SEQ ID NO: 28412 - DNA, 20 bp, Artificial Sequence
  Synthetic oligonucleotide; AGG chr11 5395565 5395584 5395581 +
atacagggttgtggcaggca

SEQ ID NO: 28413 - DNA, 20 bp, Artificial Sequence
  Synthetic oligonucleotide; CAG chr11 5395579 5395598 5395595 +
caggcaaggaaacataatct

SEQ ID NO: 28414 - DNA, 20 bp, Artificial Sequence
  Synthetic oligonucleotide; AAG chr11 5395600 5395619 5395616 +
agcaattgctccaattgatg

SEQ ID NO: 28415 - DNA, 20 bp, Artificial Sequence
  Synthetic oligonucleotide; CAG chr11 5395615 5395634 5395631 +
tgatgaagcttctaacattt

SEQ ID NO: 28416 - DNA, 20 bp, Artificial Sequence
  Synthetic oligonucleotide; GAG chr11 5395617 5395636 5395633 +
atgaagcttctaacatttca

SEQ ID NO: 28417 - DNA, 20 bp, Artificial Sequence
  Synthetic oligonucleotide; CAG chr11 5395632 5395651 5395648 +
tttcagagtgctttcctcca

SEQ ID NO: 28418 - DNA, 20 bp, Artificial Sequence
  Synthetic oligonucleotide; AAG chr11 5395664 5395683 5395680 +
acctaatcatttctctcgaa

SEQ ID NO: 28419 - DNA, 20 bp, Artificial Sequence
  Synthetic oligonucleotide; GAG chr11 5395666 5395685 5395682 +
ctaatcatttctctcgaaaa

SEQ ID NO: 28420 - DNA, 20 bp, Artificial Sequence
  Synthetic oligonucleotide; AGG chr11 5395667 5395686 5395683 +
taatcatttctctcgaaaag

SEQ ID NO: 28421 - DNA, 20 bp, Artificial Sequence
  Synthetic oligonucleotide; CAG chr11 5395670 5395689 5395686 +
tcatttctctcgaaaagagg

SEQ ID NO: 28422 - DNA, 20 bp, Artificial Sequence
  Synthetic oligonucleotide; AGG chr11 5395671 5395690 5395687 +
catttctctcgaaaagaggc

SEQ ID NO: 28423 - DNA, 20 bp, Artificial Sequence
  Synthetic oligonucleotide; GGG chr11 5395672 5395691 5395688 +
atttctctcgaaaagaggca

SEQ ID NO: 28424 - DNA, 20 bp, Artificial Sequence
  Synthetic oligonucleotide; TGG chr11 5395681 5395700 5395697 +
gaaaagaggcagggcccatg

SEQ ID NO: 28425 - DNA, 20 bp, Artificial Sequence
  Synthetic oligonucleotide; TAG chr11 5395697 5395716 5395713 +
catgtggaaatctttcaaca

SEQ ID NO: 28426 - DNA, 20 bp, Artificial Sequence
  Synthetic oligonucleotide; AAG chr11 5395705 5395724 5395721 +
aatctttcaacatagtaaaa

SEQ ID NO: 28427 - DNA, 20 bp, Artificial Sequence
  Synthetic oligonucleotide; AAG chr11 5395710 5395729 5395726 +
ttcaacatagtaaaaaagct

SEQ ID NO: 28428 - DNA, 20 bp, Artificial Sequence
  Synthetic oligonucleotide; AGG chr11 5395711 5395730 5395727 +
tcaacatagtaaaaaagcta

SEQ ID NO: 28429 - DNA, 20 bp, Artificial Sequence
  Synthetic oligonucleotide; TAG chr11 5395716 5395735 5395732 +
atagtaaaaaagctaaggtt

SEQ ID NO: 28430 - DNA, 20 bp, Artificial Sequence
  Synthetic oligonucleotide; AAG chr11 5395720 5395739 5395736 +
taaaaaagctaaggtttaga

SEQ ID NO: 28431 - DNA, 20 bp, Artificial Sequence
  Synthetic oligonucleotide; CAG chr11 5395726 5395745 5395742 +
agctaaggtttagaaagatt

SEQ ID NO: 28432 - DNA, 20 bp, Artificial Sequence
  Synthetic oligonucleotide; AAG chr11 5395740 5395759 5395756 +
aagattcagtaactttgcca

SEQ ID NO: 28433 - DNA, 20 bp, Artificial Sequence
  Synthetic oligonucleotide; TGG chr11 5395748 5395767 5395764 +
gtaactttgccaaagccata

SEQ ID NO: 28434 - DNA, 20 bp, Artificial Sequence
  Synthetic oligonucleotide; AAG chr11 5395751 5395770 5395767 +
actttgccaaagccatatgg

SEQ ID NO: 28435 - DNA, 20 bp, Artificial Sequence
  Synthetic oligonucleotide; AGG chr11 5395752 5395771 5395768 +
ctttgccaaagccatatgga

SEQ ID NO: 28436 - DNA, 20 bp, Artificial Sequence
  Synthetic oligonucleotide; AAG chr11 5395774 5395793 5395790 +
gattgtccaaaaacctgtgc

SEQ ID NO: 28437 - DNA, 20 bp, Artificial Sequence
  Synthetic oligonucleotide; GAG chr11 5395776 5395795 5395792 +
ttgtccaaaaacctgtgcaa

SEQ ID NO: 28438 - DNA, 20 bp, Artificial Sequence
  Synthetic oligonucleotide; TGG chr11 5395783 5395802 5395799 +
aaaacctgtgcaagagctca

SEQ ID NO: 28439 - DNA, 20 bp, Artificial Sequence
  Synthetic oligonucleotide; CAG chr11 5395821 5395840 5395837 +
accttacgcttcattgttgt

SEQ ID NO: 28440 - DNA, 20 bp, Artificial Sequence
  Synthetic oligonucleotide; TAG chr11 5395844 5395863 5395860 +
attatttttcaatcttttct

SEQ ID NO: 28441 - DNA, 20 bp, Artificial Sequence
  Synthetic oligonucleotide; GAG chr11 5395846 5395865 5395862 +
tatttttcaatcttttctta

SEQ ID NO: 28442 - DNA, 20 bp, Artificial Sequence
  Synthetic oligonucleotide; TGG chr11 5395869 5395888 5395885 +
ctcactgcaacattgctcac

SEQ ID NO: 28443 - DNA, 20 bp, Artificial Sequence
  Synthetic oligonucleotide; TGG chr11 5395877 5395896 5395893 +
aacattgctcactggaatgc

SEQ ID NO: 28444 - DNA, 20 bp, Artificial Sequence
  Synthetic oligonucleotide; AAG chr11 5395881 5395900 5395897 +
ttgctcactggaatgctgga

SEQ ID NO: 28445 - DNA, 20 bp, Artificial Sequence
  Synthetic oligonucleotide; GAG chr11 5395908 5395927 5395924 +
actaataaaatgtgtctatt

SEQ ID NO: 28446 - DNA, 20 bp, Artificial Sequence
  Synthetic oligonucleotide; TGG chr11 5395952 5395971 5395968 +
catttaaaattgcatatgaa

SEQ ID NO: 28447 - DNA, 20 bp, Artificial Sequence
  Synthetic oligonucleotide; TGG chr11 5395967 5395986 5395983 +
atgaatggctctctaatcta

SEQ ID NO: 28448 - DNA, 20 bp, Artificial Sequence
  Synthetic oligonucleotide; GAG chr11 5395969 5395988 5395985 +
gaatggctctctaatctatg

SEQ ID NO: 28449 - DNA, 20 bp, Artificial Sequence
  Synthetic oligonucleotide; TAG chr11 5395972 5395991 5395988 +
tggctctctaatctatggag

SEQ ID NO: 28450 - DNA, 20 bp, Artificial Sequence
  Synthetic oligonucleotide; AGG chr11 5395973 5395992 5395989 +
ggctctctaatctatggagt

SEQ ID NO: 28451 - DNA, 20 bp, Artificial Sequence
  Synthetic oligonucleotide; TAG chr11 5395976 5395995 5395992 +
tctctaatctatggagtagg

SEQ ID NO: 28452 - DNA, 20 bp, Artificial Sequence
  Synthetic oligonucleotide; CAG chr11 5395995 5396014 5396011 +
gtagaattgtctcaattttt

SEQ ID NO: 28453 - DNA, 20 bp, Artificial Sequence
  Synthetic oligonucleotide; AAG chr11 5396001 5396020 5396017 +
ttgtctcaatttttcagatg

SEQ ID NO: 28454 - DNA, 20 bp, Artificial Sequence
  Synthetic oligonucleotide; AAG chr11 5396009 5396028 5396025 +
atttttcagatgaagaaact

SEQ ID NO: 28455 - DNA, 20 bp, Artificial Sequence
  Synthetic oligonucleotide; CAG chr11 5396018 5396037 5396034 +
atgaagaaactaagattaat

SEQ ID NO: 28456 - DNA, 20 bp, Artificial Sequence
  Synthetic oligonucleotide; TAG chr11 5396037 5396056 5396053 +
tcagatactttgcacaatca

SEQ ID NO: 28457 - DNA, 20 bp, Artificial Sequence
  Synthetic oligonucleotide; GAG chr11 5396039 5396058 5396055 +
agatactttgcacaatcata

SEQ ID NO: 28458 - DNA, 20 bp, Artificial Sequence
  Synthetic oligonucleotide; AAG chr11 5396044 5396063 5396060 +
ctttgcacaatcatagagtg

SEQ ID NO: 28459 - DNA, 20 bp, Artificial Sequence
  Synthetic oligonucleotide; GAG chr11 5396046 5396065 5396062 +
ttgcacaatcatagagtgaa

SEQ ID NO: 28460 - DNA, 20 bp, Artificial Sequence
  Synthetic oligonucleotide; AAG chr11 5396055 5396074 5396071 +
catagagtgaagagctattg

SEQ ID NO: 28461 - DNA, 20 bp, Artificial Sequence
  Synthetic oligonucleotide; CAG chr11 5396072 5396091 5396088 +
ttgaagttatgattgtaata

SEQ ID NO: 28462 - DNA, 20 bp, Artificial Sequence
  Synthetic oligonucleotide; TGG chr11 5396078 5396097 5396094 +
ttatgattgtaatacagatc

SEQ ID NO: 28463 - DNA, 20 bp, Artificial Sequence
  Synthetic oligonucleotide; CAG chr11 5396084 5396103 5396100 +
ttgtaatacagatctggtcc

SEQ ID NO: 28464 - DNA, 20 bp, Artificial Sequence
  Synthetic oligonucleotide; GAG chr11 5396086 5396105 5396102 +
gtaatacagatctggtccca

SEQ ID NO: 28465 - DNA, 20 bp, Artificial Sequence
  Synthetic oligonucleotide; TAG chr11 5396132 5396151 5396148 +
ctgcctaatgaaaatgtgcc

SEQ ID NO: 28466 - DNA, 20 bp, Artificial Sequence
  Synthetic oligonucleotide; AGG chr11 5396133 5396152 5396149 +
tgcctaatgaaaatgtgcct

SEQ ID NO: 28467 - DNA, 20 bp, Artificial Sequence
  Synthetic oligonucleotide; AAG chr11 5396140 5396159 5396156 +
tgaaaatgtgcctaggctgc

SEQ ID NO: 28468 - DNA, 20 bp, Artificial Sequence
  Synthetic oligonucleotide; CAG chr11 5396144 5396163 5396160 +
aatgtgcctaggctgcaaga

SEQ ID NO: 28469 - DNA, 20 bp, Artificial Sequence
  Synthetic oligonucleotide; AGG chr11 5396145 5396164 5396161 +
atgtgcctaggctgcaagac

SEQ ID NO: 28470 - DNA, 20 bp, Artificial Sequence
  Synthetic oligonucleotide; GGG chr11 5396146 5396165 5396162 +
tgtgcctaggctgcaagaca

SEQ ID NO: 28471 - DNA, 20 bp, Artificial Sequence
  Synthetic oligonucleotide; TAG chr11 5396178 5396197 5396194 +
ctcaccactcctattcaaca

SEQ ID NO: 28472 - DNA, 20 bp, Artificial Sequence
  Synthetic oligonucleotide; TGG chr11 5396184 5396203 5396200 +
actcctattcaacatagtgt

SEQ ID NO: 28473 - DNA, 20 bp, Artificial Sequence
  Synthetic oligonucleotide; AAG chr11 5396187 5396206 5396203 +
cctattcaacatagtgttgg

SEQ ID NO: 28474 - DNA, 20 bp, Artificial Sequence
  Synthetic oligonucleotide; TGG chr11 5396193 5396212 5396209 +
caacatagtgttggaagttc

SEQ ID NO: 28475 - DNA, 20 bp, Artificial Sequence
  Synthetic oligonucleotide; CGG chr11 5396198 5396217 5396214 +
tagtgttggaagttctggcc

SEQ ID NO: 28476 - DNA, 20 bp, Artificial Sequence
  Synthetic oligonucleotide; GGG chr11 5396199 5396218 5396215 +
agtgttggaagttctggccc

SEQ ID NO: 28477 - DNA, 20 bp, Artificial Sequence
  Synthetic oligonucleotide; CGG chr11 5396206 5396225 5396222 +
gaagttctggcccgggcaat

SEQ ID NO: 28478 - DNA, 20 bp, Artificial Sequence
  Synthetic oligonucleotide; GGG chr11 5396207 5396226 5396223 +
aagttctggcccgggcaatc

SEQ ID NO: 28479 - DNA, 20 bp, Artificial Sequence
  Synthetic oligonucleotide; CAG chr11 5396210 5396229 5396226 +
ttctggcccgggcaatcggg

SEQ ID NO: 28480 - DNA, 20 bp, Artificial Sequence
  Synthetic oligonucleotide; AGG chr11 5396211 5396230 5396227 +
tctggcccgggcaatcgggc

SEQ ID NO: 28481 - DNA, 20 bp, Artificial Sequence
  Synthetic oligonucleotide; GAG chr11 5396213 5396232 5396229 +
tggcccgggcaatcgggcag

SEQ ID NO: 28482 - DNA, 20 bp, Artificial Sequence
  Synthetic oligonucleotide; AAG chr11 5396216 5396235 5396232 +
cccgggcaatcgggcaggag

SEQ ID NO: 28483 - DNA, 20 bp, Artificial Sequence
  Synthetic oligonucleotide; AGG chr11 5396217 5396236 5396233 +
ccgggcaatcgggcaggaga

SEQ ID NO: 28484 - DNA, 20 bp, Artificial Sequence
  Synthetic oligonucleotide; AAG chr11 5396226 5396245 5396242 +
cgggcaggagaaggaaataa

SEQ ID NO: 28485 - DNA, 20 bp, Artificial Sequence
  Synthetic oligonucleotide; AGG chr11 5396227 5396246 5396243 +
gggcaggagaaggaaataaa

SEQ ID NO: 28486 - DNA, 20 bp, Artificial Sequence
  Synthetic oligonucleotide; AAG chr11 5396244 5396263 5396260 +
aaaaggcattcaattatgta

SEQ ID NO: 28487 - DNA, 20 bp, Artificial Sequence
  Synthetic oligonucleotide; GAG chr11 5396246 5396265 5396262 +
aaggcattcaattatgtaaa

SEQ ID NO: 28488 - DNA, 20 bp, Artificial Sequence
  Synthetic oligonucleotide; AAG chr11 5396250 5396269 5396266 +
cattcaattatgtaaagaga

SEQ ID NO: 28489 - DNA, 20 bp, Artificial Sequence
  Synthetic oligonucleotide; CAG chr11 5396271 5396290 5396287 +
agtcaaattgtccctgtttg

SEQ ID NO: 28490 - DNA, 20 bp, Artificial Sequence
  Synthetic oligonucleotide; TAG chr11 5396292 5396311 5396308 +
agatgacgtgattgcatatc

SEQ ID NO: 28491 - DNA, 20 bp, Artificial Sequence
  Synthetic oligonucleotide; CAG chr11 5396310 5396329 5396326 +
tctagaaaaccccattgtct

SEQ ID NO: 28492 - DNA, 20 bp, Artificial Sequence
  Synthetic oligonucleotide; AAG chr11 5396327 5396346 5396343 +
tctcagcccaaaatcccctt

SEQ ID NO: 28493 - DNA, 20 bp, Artificial Sequence
  Synthetic oligonucleotide; AAG chr11 5396335 5396354 5396351 +
caaaatccccttaagctgat

SEQ ID NO: 28494 - DNA, 20 bp, Artificial Sequence
  Synthetic oligonucleotide; CAG chr11 5396344 5396363 5396360 +
cttaagctgataagcaactt

SEQ ID NO: 28495 - DNA, 20 bp, Artificial Sequence
  Synthetic oligonucleotide; AAG chr11 5396349 5396368 5396365 +
gctgataagcaacttcagca

SEQ ID NO: 28496 - DNA, 20 bp, Artificial Sequence
  Synthetic oligonucleotide; CAG chr11 5396355 5396374 5396371 +
aagcaacttcagcaaagtct

SEQ ID NO: 28497 - DNA, 20 bp, Artificial Sequence
  Synthetic oligonucleotide; AGG chr11 5396356 5396375 5396372 +
agcaacttcagcaaagtctc

SEQ ID NO: 28498 - DNA, 20 bp, Artificial Sequence
  Synthetic oligonucleotide; AAG chr11 5396385 5396404 5396401 +
aatcaatgtgcaaaaatcac

SEQ ID NO: 28499 - DNA, 20 bp, Artificial Sequence
  Synthetic oligonucleotide; CAG chr11 5396407 5396426 5396423 +
gcattcttatacaccaataa

SEQ ID NO: 28500 - DNA, 20 bp, Artificial Sequence
  Synthetic oligonucleotide; CAG chr11 5396415 5396434 5396431 +
atacaccaataacagacaaa

SEQ ID NO: 28501 - DNA, 20 bp, Artificial Sequence
  Synthetic oligonucleotide; GAG chr11 5396419 5396438 5396435 +
accaataacagacaaacagt

SEQ ID NO: 28502 - DNA, 20 bp, Artificial Sequence
  Synthetic oligonucleotide; CAG chr11 5396445 5396464 5396461 +
actcccattcacaattgctt

SEQ ID NO: 28503 - DNA, 20 bp, Artificial Sequence
  Synthetic oligonucleotide; GAG chr11 5396447 5396466 5396463 +
tcccattcacaattgcttca

SEQ ID NO: 28504 - DNA, 20 bp, Artificial Sequence
  Synthetic oligonucleotide; GAG chr11 5396449 5396468 5396465 +
ccattcacaattgcttcaga

SEQ ID NO: 28505 - DNA, 20 bp, Artificial Sequence
  Synthetic oligonucleotide; TAG chr11 5396463 5396482 5396479 +
ttcagagagaatataatacc

SEQ ID NO: 28506 - DNA, 20 bp, Artificial Sequence
  Synthetic oligonucleotide; AGG chr11 5396464 5396483 5396480 +
tcagagagaatataatacct

SEQ ID NO: 28507 - DNA, 20 bp, Artificial Sequence
  Synthetic oligonucleotide; AAG chr11 5396479 5396498 5396495 +
tacctaggaatccaacttac

SEQ ID NO: 28508 - DNA, 20 bp, Artificial Sequence
  Synthetic oligonucleotide; AGG chr11 5396480 5396499 5396496 +
acctaggaatccaacttaca

SEQ ID NO: 28509 - DNA, 20 bp, Artificial Sequence
  Synthetic oligonucleotide; GGG chr11 5396481 5396500 5396497 +
cctaggaatccaacttacaa

SEQ ID NO: 28510 - DNA, 20 bp, Artificial Sequence
  Synthetic oligonucleotide; AAG chr11 5396489 5396508 5396505 +
tccaacttacaagggatgtg

SEQ ID NO: 28511 - DNA, 20 bp, Artificial Sequence
  Synthetic oligonucleotide; AGG chr11 5396490 5396509 5396506 +
ccaacttacaagggatgtga

SEQ ID NO: 28512 - DNA, 20 bp, Artificial Sequence
  Synthetic oligonucleotide; AAG chr11 5396501 5396520 5396517 +
gggatgtgaaggacctcttc

SEQ ID NO: 28513 - DNA, 20 bp, Artificial Sequence
  Synthetic oligonucleotide; AGG chr11 5396502 5396521 5396518 +
ggatgtgaaggacctcttca

SEQ ID NO: 28514 - DNA, 20 bp, Artificial Sequence
  Synthetic oligonucleotide; GAG chr11 5396504 5396523 5396520 +
atgtgaaggacctcttcaag

SEQ ID NO: 28515 - DNA, 20 bp, Artificial Sequence
  Synthetic oligonucleotide; AAG chr11 5396525 5396544 5396541 +
agaactacaaaccactgctc

SEQ ID NO: 28516 - DNA, 20 bp, Artificial Sequence
  Synthetic oligonucleotide; AGG chr11 5396526 5396545 5396542 +
gaactacaaaccactgctca

SEQ ID NO: 28517 - DNA, 20 bp, Artificial Sequence
  Synthetic oligonucleotide; AAG chr11 5396533 5396552 5396549 +
aaaccactgctcaaggaaat

SEQ ID NO: 28518 - DNA, 20 bp, Artificial Sequence
  Synthetic oligonucleotide; TGG chr11 5396547 5396566 5396563 +
ggaaataagatacaaacaaa

SEQ ID NO: 28519 - DNA, 20 bp, Artificial Sequence
  Synthetic oligonucleotide; AAG chr11 5396550 5396569 5396566 +
aataagatacaaacaaatgg

SEQ ID NO: 28520 - DNA, 20 bp, Artificial Sequence
  Synthetic oligonucleotide; TGG chr11 5396568 5396587 5396584 +
ggaagaacattccatgctca

SEQ ID NO: 28521 - DNA, 20 bp, Artificial Sequence
  Synthetic oligonucleotide; TAG chr11 5396572 5396591 5396588 +
gaacattccatgctcatgga

SEQ ID NO: 28522 - DNA, 20 bp, Artificial Sequence
  Synthetic oligonucleotide; AGG chr11 5396573 5396592 5396589 +
aacattccatgctcatggat

SEQ ID NO: 28523 - DNA, 20 bp, Artificial Sequence
  Synthetic oligonucleotide; AAG chr11 5396576 5396595 5396592 +
attccatgctcatggatagg

SEQ ID NO: 28524 - DNA, 20 bp, Artificial Sequence
  Synthetic oligonucleotide; TGG chr11 5396596 5396615 5396612 +
aagaaacaatatcgtgaaaa

SEQ ID NO: 28525 - DNA, 20 bp, Artificial Sequence
  Synthetic oligonucleotide; AAG chr11 5396610 5396629 5396626 +
tgaaaatggccatactgccc

SEQ ID NO: 28526 - DNA, 20 bp, Artificial Sequence
  Synthetic oligonucleotide; AGG chr11 5396611 5396630 5396627 +
gaaaatggccatactgccca

SEQ ID NO: 28527 - DNA, 20 bp, Artificial Sequence
  Synthetic oligonucleotide; TAG chr11 5396621 5396640 5396637 +
atactgcccaaggtaattta

SEQ ID NO: 28528 - DNA, 20 bp, Artificial Sequence
  Synthetic oligonucleotide; AAG chr11 5396643 5396662 5396659 +
gattcaatgccatccccatc

SEQ ID NO: 28529 - DNA, 20 bp, Artificial Sequence
  Synthetic oligonucleotide; CAG chr11 5396665 5396684 5396681 +
gctaccaatgactttcttca

SEQ ID NO: 28530 - DNA, 20 bp, Artificial Sequence
  Synthetic oligonucleotide; TGG chr11 5396671 5396690 5396687 +
aatgactttcttcacagaat

SEQ ID NO: 28531 - DNA, 20 bp, Artificial Sequence
  Synthetic oligonucleotide; AAG chr11 5396688 5396707 5396704 +
aattggaaaaaactacttta

SEQ ID NO: 28532 - DNA, 20 bp, Artificial Sequence
  Synthetic oligonucleotide; TGG chr11 5396697 5396716 5396713 +
aaactactttaaagttcata

SEQ ID NO: 28533 - DNA, 20 bp, Artificial Sequence
  Synthetic oligonucleotide; AAG chr11 5396708 5396727 5396724 +
aagttcatatggaaccaaaa

SEQ ID NO: 28534 - DNA, 20 bp, Artificial Sequence
  Synthetic oligonucleotide; GAG chr11 5396710 5396729 5396726 +
gttcatatggaaccaaaaaa

SEQ ID NO: 28535 - DNA, 20 bp, Artificial Sequence
  Synthetic oligonucleotide; AAG chr11 5396724 5396743 5396740 +
aaaaaagagcccgcatcgcc

SEQ ID NO: 28536 - DNA, 20 bp, Artificial Sequence
  Synthetic oligonucleotide; AAG chr11 5396735 5396754 5396751 +
cgcatcgccaagtcaatcct

SEQ ID NO: 28537 - DNA, 20 bp, Artificial Sequence
  Synthetic oligonucleotide; AAG chr11 5396742 5396761 5396758 +
ccaagtcaatcctaagccaa

SEQ ID NO: 28538 - DNA, 20 bp, Artificial Sequence
  Synthetic oligonucleotide; AAG chr11 5396749 5396768 5396765 +
aatcctaagccaaaagaaca

SEQ ID NO: 28539 - DNA, 20 bp, Artificial Sequence
  Synthetic oligonucleotide; TGG chr11 5396753 5396772 5396769 +
ctaagccaaaagaacaaagc

SEQ ID NO: 28540 - DNA, 20 bp, Artificial Sequence
  Synthetic oligonucleotide; GAG chr11 5396755 5396774 5396771 +
aagccaaaagaacaaagctg

SEQ ID NO: 28541 - DNA, 20 bp, Artificial Sequence
  Synthetic oligonucleotide; AGG chr11 5396756 5396775 5396772 +
agccaaaagaacaaagctgg

SEQ ID NO: 28542 - DNA, 20 bp, Artificial Sequence
  Synthetic oligonucleotide; AAG chr11 5396790 5396809 5396806 +
ctgatttcaaactatactac

SEQ ID NO: 28543 - DNA, 20 bp, Artificial Sequence
  Synthetic oligonucleotide; AGG chr11 5396791 5396810 5396807 +
tgatttcaaactatactaca

SEQ ID NO: 28544 - DNA, 20 bp, Artificial Sequence
  Synthetic oligonucleotide; CAG chr11 5396797 5396816 5396813 +
caaactatactacaaggcta

SEQ ID NO: 28545 - DNA, 20 bp, Artificial Sequence
  Synthetic oligonucleotide; CAG chr11 5396809 5396828 5396825 +
caaggctacagtaaccaaaa

SEQ ID NO: 28546 - DNA, 20 bp, Artificial Sequence
  Synthetic oligonucleotide; TAG chr11 5396814 5396833 5396830 +
ctacagtaaccaaaacagca

SEQ ID NO: 28547 - DNA, 20 bp, Artificial Sequence
  Synthetic oligonucleotide; TGG chr11 5396820 5396839 5396836 +
taaccaaaacagcatagtac

SEQ ID NO: 28548 - DNA, 20 bp, Artificial Sequence
  Synthetic oligonucleotide; CAG chr11 5396831 5396850 5396847 +
gcatagtactggtaccaaaa

SEQ ID NO: 28549 - DNA, 20 bp, Artificial Sequence
  Synthetic oligonucleotide; GAG chr11 5396833 5396852 5396849 +
atagtactggtaccaaaaca

SEQ ID NO: 28550 - DNA, 20 bp, Artificial Sequence
  Synthetic oligonucleotide; TAG chr11 5396839 5396858 5396855 +
ctggtaccaaaacagagata

SEQ ID NO: 28551 - DNA, 20 bp, Artificial Sequence
  Synthetic oligonucleotide; TGG chr11 5396847 5396866 5396863 +
aaaacagagatatagaccaa

SEQ ID NO: 28552 - DNA, 20 bp, Artificial Sequence
  Synthetic oligonucleotide; CAG chr11 5396857 5396876 5396873 +
tatagaccaatggaacaaaa

SEQ ID NO: 28553 - DNA, 20 bp, Artificial Sequence
  Synthetic oligonucleotide; GAG chr11 5396859 5396878 5396875 +
tagaccaatggaacaaaaca

SEQ ID NO: 28554 - DNA, 20 bp, Artificial Sequence
  Synthetic oligonucleotide; CAG chr11 5396866 5396885 5396882 +
atggaacaaaacagagccct

SEQ ID NO: 28555 - DNA, 20 bp, Artificial Sequence
  Synthetic oligonucleotide; GAG chr11 5396913 5396932 5396929 +
atctgatctttgacaaacct

SEQ ID NO: 28556 - DNA, 20 bp, Artificial Sequence
  Synthetic oligonucleotide; AAG chr11 5396922 5396941 5396938 +
ttgacaaacctgagaaaaac

SEQ ID NO: 28557 - DNA, 20 bp, Artificial Sequence
  Synthetic oligonucleotide; TGG chr11 5396928 5396947 5396944 +
aacctgagaaaaacaagaaa

SEQ ID NO: 28558 - DNA, 20 bp, Artificial Sequence
  Synthetic oligonucleotide; GGG chr11 5396929 5396948 5396945 +
acctgagaaaaacaagaaat

SEQ ID NO: 28559 - DNA, 20 bp, Artificial Sequence
  Synthetic oligonucleotide; GGG chr11 5396930 5396949 5396946 +
cctgagaaaaacaagaaatg

SEQ ID NO: 28560 - DNA, 20 bp, Artificial Sequence
  Synthetic oligonucleotide; AAG chr11 5396934 5396953 5396950 +
agaaaaacaagaaatgggga

SEQ ID NO: 28561 - DNA, 20 bp, Artificial Sequence
  Synthetic oligonucleotide; AGG chr11 5396935 5396954 5396951 +
gaaaaacaagaaatggggaa

SEQ ID NO: 28562 - DNA, 20 bp, Artificial Sequence
  Synthetic oligonucleotide; TGG chr11 5396955 5396974 5396971 +
aggattccctgtttaataaa

SEQ ID NO: 28563 - DNA, 20 bp, Artificial Sequence
  Synthetic oligonucleotide; TGG chr11 5396961 5396980 5396977 +
ccctgtttaataaatggtgc

SEQ ID NO: 28564 - DNA, 20 bp, Artificial Sequence
  Synthetic oligonucleotide; GGG chr11 5396962 5396981 5396978 +
cctgtttaataaatggtgct

SEQ ID NO: 28565 - DNA, 20 bp, Artificial Sequence
  Synthetic oligonucleotide; TGG chr11 5396970 5396989 5396986 +
ataaatggtgctgggaaaac

SEQ ID NO: 28566 - DNA, 20 bp, Artificial Sequence
  Synthetic oligonucleotide; TAG chr11 5396974 5396993 5396990 +
atggtgctgggaaaactggc

SEQ ID NO: 28567 - DNA, 20 bp, Artificial Sequence
  Synthetic oligonucleotide; TAG chr11 5396984 5397003 5397000 +
gaaaactggctagccaaatg

SEQ ID NO: 28568 - DNA, 20 bp, Artificial Sequence
  Synthetic oligonucleotide; AGG chr11 5396985 5397004 5397001 +
aaaactggctagccaaatgt

SEQ ID NO: 28569 - DNA, 20 bp, Artificial Sequence
  Synthetic oligonucleotide; AAG chr11 5396988 5397007 5397004 +
actggctagccaaatgtagg

SEQ ID NO: 28570 - DNA, 20 bp, Artificial Sequence
  Synthetic oligonucleotide; TGG chr11 5396998 5397017 5397014 +
caaatgtaggaagctgaaac

SEQ ID NO: 28571 - DNA, 20 bp, Artificial Sequence
  Synthetic oligonucleotide; AAG chr11 5397035 5397054 5397051 +
ccttatacaaaaattaactc

SEQ ID NO: 28572 - DNA, 20 bp, Artificial Sequence
  Synthetic oligonucleotide; TGG chr11 5397039 5397058 5397055 +
atacaaaaattaactcaaga

SEQ ID NO: 28573 - DNA, 20 bp, Artificial Sequence
  Synthetic oligonucleotide; AAG chr11 5397046 5397065 5397062 +
aattaactcaagatggatta

SEQ ID NO: 28574 - DNA, 20 bp, Artificial Sequence
  Synthetic oligonucleotide; TAG chr11 5397059 5397078 5397075 +
tggattaaagacttaaatgt

SEQ ID NO: 28575 - DNA, 20 bp, Artificial Sequence
  Synthetic oligonucleotide; TAG chr11 5397082 5397101 5397098 +
acctaaaaccataaaaactc

SEQ ID NO: 28576 - DNA, 20 bp, Artificial Sequence
  Synthetic oligonucleotide; AAG chr11 5397085 5397104 5397101 +
taaaaccataaaaactctag

SEQ ID NO: 28577 - DNA, 20 bp, Artificial Sequence
  Synthetic oligonucleotide; AAG chr11 5397095 5397114 5397111 +
aaaactctagaagaaaacct

SEQ ID NO: 28578 - DNA, 20 bp, Artificial Sequence
  Synthetic oligonucleotide; CAG chr11 5397108 5397127 5397124 +
aaaacctaagcaataccatt

SEQ ID NO: 28579 - DNA, 20 bp, Artificial Sequence
  Synthetic oligonucleotide; AGG chr11 5397109 5397128 5397125 +
aaacctaagcaataccattc

SEQ ID NO: 28580 - DNA, 20 bp, Artificial Sequence
  Synthetic oligonucleotide; TAG chr11 5397115 5397134 5397131 +
aagcaataccattcaggaca

SEQ ID NO: 28581 - DNA, 20 bp, Artificial Sequence
  Synthetic oligonucleotide; AGG chr11 5397116 5397135 5397132 +
agcaataccattcaggacat

SEQ ID NO: 28582 - DNA, 20 bp, Artificial Sequence
  Synthetic oligonucleotide; TGG chr11 5397121 5397140 5397137 +
taccattcaggacataggca

SEQ ID NO: 28583 - DNA, 20 bp, Artificial Sequence
  Synthetic oligonucleotide; GGG chr11 5397122 5397141 5397138 +
accattcaggacataggcat

SEQ ID NO: 28584 - DNA, 20 bp, Artificial Sequence
  Synthetic oligonucleotide; TGG chr11 5397127 5397146 5397143 +
tcaggacataggcatgggca

SEQ ID NO: 28585 - DNA, 20 bp, Artificial Sequence
  Synthetic oligonucleotide; AAG chr11 5397151 5397170 5397167 +
cttcatgtctaaaacaccaa

SEQ ID NO: 28586 - DNA, 20 bp, Artificial Sequence
  Synthetic oligonucleotide; TGG chr11 5397157 5397176 5397173 +
gtctaaaacaccaaaagcaa

SEQ ID NO: 28587 - DNA, 20 bp, Artificial Sequence
  Synthetic oligonucleotide; AAG chr11 5397166 5397185 5397182 +
accaaaagcaatggcaacaa

SEQ ID NO: 28588 - DNA, 20 bp, Artificial Sequence
  Synthetic oligonucleotide; TGG chr11 5397183 5397202 5397199 +
caaaagccaaaattcactaa

SEQ ID NO: 28589 - DNA, 20 bp, Artificial Sequence
  Synthetic oligonucleotide; GGG chr11 5397184 5397203 5397200 +
aaaagccaaaattcactaat

SEQ ID NO: 28590 - DNA, 20 bp, Artificial Sequence
  Synthetic oligonucleotide; AAG chr11 5397201 5397220 5397217 +
aatgggatctaattaaacta

SEQ ID NO: 28591 - DNA, 20 bp, Artificial Sequence
  Synthetic oligonucleotide; CAG chr11 5397214 5397233 5397230 +
taaactaaagatcttctgca

SEQ ID NO: 28592 - DNA, 20 bp, Artificial Sequence
  Synthetic oligonucleotide; AAG chr11 5397220 5397239 5397236 +
aaagatcttctgcacagcaa

SEQ ID NO: 28593 - DNA, 20 bp, Artificial Sequence
  Synthetic oligonucleotide; CAG chr11 5397233 5397252 5397249 +
acagcaaaagaaactaccat

SEQ ID NO: 28594 - DNA, 20 bp, Artificial Sequence
  Synthetic oligonucleotide; GAG chr11 5397235 5397254 5397251 +
agcaaaagaaactaccatca

SEQ ID NO: 28595 - DNA, 20 bp, Artificial Sequence
  Synthetic oligonucleotide; CAG chr11 5397242 5397261 5397258 +
gaaactaccatcagagtgaa

SEQ ID NO: 28596 - DNA, 20 bp, Artificial Sequence
  Synthetic oligonucleotide; AGG chr11 5397243 5397262 5397259 +
aaactaccatcagagtgaac

SEQ ID NO: 28597 - DNA, 20 bp, Artificial Sequence
  Synthetic oligonucleotide; TGG chr11 5397258 5397277 5397274 +
tgaacaggcaacctacacaa

SEQ ID NO: 28598 - DNA, 20 bp, Artificial Sequence
  Synthetic oligonucleotide; GGG chr11 5397259 5397278 5397275 +
gaacaggcaacctacacaat

SEQ ID NO: 28599 - DNA, 20 bp, Artificial Sequence
  Synthetic oligonucleotide; GAG chr11 5397261 5397280 5397277 +
acaggcaacctacacaatgg

SEQ ID NO: 28600 - DNA, 20 bp, Artificial Sequence
  Synthetic oligonucleotide; AAG chr11 5397292 5397311 5397308 +
tgcaatctactcatctgaca

SEQ ID NO: 28601 - DNA, 20 bp, Artificial Sequence
  Synthetic oligonucleotide; AGG chr11 5397293 5397312 5397309 +
gcaatctactcatctgacaa

SEQ ID NO: 28602 - DNA, 20 bp, Artificial Sequence
  Synthetic oligonucleotide; GGG chr11 5397294 5397313 5397310 +
caatctactcatctgacaaa

SEQ ID NO: 28603 - DNA, 20 bp, Artificial Sequence
  Synthetic oligonucleotide; CAG chr11 5397305 5397324 5397321 +
tctgacaaagggctaatatc

SEQ ID NO: 28604 - DNA, 20 bp, Artificial Sequence
  Synthetic oligonucleotide; AAG chr11 5397336 5397355 5397352 +
atgaactcaaacaaatttac

SEQ ID NO: 28605 - DNA, 20 bp, Artificial Sequence
  Synthetic oligonucleotide; GAG chr11 5397338 5397357 5397354 +
gaactcaaacaaatttacaa

SEQ ID NO: 28606 - DNA, 20 bp, Artificial Sequence
  Synthetic oligonucleotide; AAG chr11 5397359 5397378 5397375 +
agaaaaaaaaccccatcaaa

SEQ ID NO: 28607 - DNA, 20 bp, Artificial Sequence
  Synthetic oligonucleotide; TGG chr11 5397362 5397381 5397378 +
aaaaaaaccccatcaaaaag

SEQ ID NO: 28608 - DNA, 20 bp, Artificial Sequence
  Synthetic oligonucleotide; GGG chr11 5397363 5397382 5397379 +
aaaaaaccccatcaaaaagt

SEQ ID NO: 28609 - DNA, 20 bp, Artificial Sequence
  Synthetic oligonucleotide; AAG chr11 5397368 5397387 5397384 +
accccatcaaaaagtgggca

SEQ ID NO: 28610 - DNA, 20 bp, Artificial Sequence
  Synthetic oligonucleotide; AGG chr11 5397369 5397388 5397385 +
ccccatcaaaaagtgggcaa

SEQ ID NO: 28611 - DNA, 20 bp, Artificial Sequence
  Synthetic oligonucleotide; CAG chr11 5397379 5397398 5397395 +
aagtgggcaaaggatatgaa

SEQ ID NO: 28612 - DNA, 20 bp, Artificial Sequence
  Synthetic oligonucleotide; AAG chr11 5397393 5397412 5397409 +
tatgaacagacacttctcaa

SEQ ID NO: 28613 - DNA, 20 bp, Artificial Sequence
  Synthetic oligonucleotide; AAG chr11 5397396 5397415 5397412 +
gaacagacacttctcaaaag

SEQ ID NO: 28614 - DNA, 20 bp, Artificial Sequence
  Synthetic oligonucleotide; CAG chr11 5397408 5397427 5397424 +
ctcaaaagaagacatttatg

SEQ ID NO: 28615 - DNA, 20 bp, Artificial Sequence
  Synthetic oligonucleotide; AAG chr11 5397415 5397434 5397431 +
gaagacatttatgcagccaa

SEQ ID NO: 28616 - DNA, 20 bp, Artificial Sequence
  Synthetic oligonucleotide; TGG chr11 5397444 5397463 5397460 +
gaaaaaatgctcatcatcac

SEQ ID NO: 28617 - DNA, 20 bp, Artificial Sequence
  Synthetic oligonucleotide; CAG chr11 5397451 5397470 5397467 +
tgctcatcatcactggccat

SEQ ID NO: 28618 - DNA, 20 bp, Artificial Sequence
  Synthetic oligonucleotide; GAG chr11 5397453 5397472 5397469 +
ctcatcatcactggccatca

SEQ ID NO: 28619 - DNA, 20 bp, Artificial Sequence
  Synthetic oligonucleotide; GAG chr11 5397478 5397497 5397494 +
atgcaaatcaaaaccacaat

SEQ ID NO: 28620 - DNA, 20 bp, Artificial Sequence
  Synthetic oligonucleotide; CAG chr11 5397495 5397514 5397511 +
aatgagataccatctcacac

SEQ ID NO: 28621 - DNA, 20 bp, Artificial Sequence
  Synthetic oligonucleotide; TAG chr11 5397499 5397518 5397515 +
agataccatctcacaccagt

SEQ ID NO: 28622 - DNA, 20 bp, Artificial Sequence
  Synthetic oligonucleotide; TGG chr11 5397504 5397523 5397520 +
ccatctcacaccagttagaa

SEQ ID NO: 28623 - DNA, 20 bp, Artificial Sequence
  Synthetic oligonucleotide; AAG chr11 5397518 5397537 5397534 +
ttagaatggcaatcattaaa

SEQ ID NO: 28624 - DNA, 20 bp, Artificial Sequence
  Synthetic oligonucleotide; CAG chr11 5397522 5397541 5397538 +
aatggcaatcattaaaaagt

SEQ ID NO: 28625 - DNA, 20 bp, Artificial Sequence
  Synthetic oligonucleotide; AGG chr11 5397523 5397542 5397539 +
atggcaatcattaaaaagtc

SEQ ID NO: 28626 - DNA, 20 bp, Artificial Sequence
  Synthetic oligonucleotide; CAG chr11 5397532 5397551 5397548 +
attaaaaagtcaggaaacaa

SEQ ID NO: 28627 - DNA, 20 bp, Artificial Sequence
  Synthetic oligonucleotide; AGG chr11 5397533 5397552 5397549 +
ttaaaaagtcaggaaacaac

SEQ ID NO: 28628 - DNA, 20 bp, Artificial Sequence
  Synthetic oligonucleotide; TGG chr11 5397539 5397558 5397555 +
agtcaggaaacaacaggtgc

SEQ ID NO: 28629 - DNA, 20 bp, Artificial Sequence
  Synthetic oligonucleotide; GAG chr11 5397541 5397560 5397557 +
tcaggaaacaacaggtgctg

SEQ ID NO: 28630 - DNA, 20 bp, Artificial Sequence
  Synthetic oligonucleotide; GAG chr11 5397543 5397562 5397559 +
aggaaacaacaggtgctgga

SEQ ID NO: 28631 - DNA, 20 bp, Artificial Sequence
  Synthetic oligonucleotide; AGG chr11 5397544 5397563 5397560 +
ggaaacaacaggtgctggag

SEQ ID NO: 28632 - DNA, 20 bp, Artificial Sequence
  Synthetic oligonucleotide; TGG chr11 5397550 5397569 5397566 +
aacaggtgctggagaggatg

SEQ ID NO: 28633 - DNA, 20 bp, Artificial Sequence
  Synthetic oligonucleotide; GAG chr11 5397552 5397571 5397568 +
caggtgctggagaggatgtg

SEQ ID NO: 28634 - DNA, 20 bp, Artificial Sequence
  Synthetic oligonucleotide; TAG chr11 5397558 5397577 5397574 +
ctggagaggatgtggagaaa

SEQ ID NO: 28635 - DNA, 20 bp, Artificial Sequence
  Synthetic oligonucleotide; AGG chr11 5397559 5397578 5397575 +
tggagaggatgtggagaaat

SEQ ID NO: 28636 - DNA, 20 bp, Artificial Sequence
  Synthetic oligonucleotide; TGG chr11 5397578 5397597 5397594 +
taggaacacttttacactgt

SEQ ID NO: 28637 - DNA, 20 bp, Artificial Sequence
  Synthetic oligonucleotide; TGG chr11 5397581 5397600 5397597 +
gaacacttttacactgttgg

SEQ ID NO: 28638 - DNA, 20 bp, Artificial Sequence
  Synthetic oligonucleotide; GGG chr11 5397582 5397601 5397598 +
aacacttttacactgttggt

SEQ ID NO: 28639 - DNA, 20 bp, Artificial Sequence
  Synthetic oligonucleotide; TAG chr11 5397594 5397613 5397610 +
ctgttggtgggactgtaaac

SEQ ID NO: 28640 - DNA, 20 bp, Artificial Sequence
  Synthetic oligonucleotide; TGG chr11 5397608 5397627 5397624 +
gtaaactagttcaaacattg

SEQ ID NO: 28641 - DNA, 20 bp, Artificial Sequence
  Synthetic oligonucleotide; AAG chr11 5397611 5397630 5397627 +
aactagttcaaacattgtgg

SEQ ID NO: 28642 - DNA, 20 bp, Artificial Sequence
  Synthetic oligonucleotide; CAG chr11 5397615 5397634 5397631 +
agttcaaacattgtggaagt

SEQ ID NO: 28643 - DNA, 20 bp, Artificial Sequence
  Synthetic oligonucleotide; TGG chr11 5397620 5397639 5397636 +
aaacattgtggaagtcagtg

SEQ ID NO: 28644 - DNA, 20 bp, Artificial Sequence
  Synthetic oligonucleotide; CAG chr11 5397631 5397650 5397647 +
aagtcagtgtggtgattcct

SEQ ID NO: 28645 - DNA, 20 bp, Artificial Sequence
  Synthetic oligonucleotide; AGG chr11 5397632 5397651 5397648 +
agtcagtgtggtgattcctc

SEQ ID NO: 28646 - DNA, 20 bp, Artificial Sequence
  Synthetic oligonucleotide; GGG chr11 5397633 5397652 5397649 +
gtcagtgtggtgattcctca

SEQ ID NO: 28647 - DNA, 20 bp, Artificial Sequence
  Synthetic oligonucleotide; TAG chr11 5397639 5397658 5397655 +
gtggtgattcctcagggatc

SEQ ID NO: 28648 - DNA, 20 bp, Artificial Sequence
  Synthetic oligonucleotide; TAG chr11 5397645 5397664 5397661 +
attcctcagggatctagaac

SEQ ID NO: 28649 - DNA, 20 bp, Artificial Sequence
  Synthetic oligonucleotide; CAG chr11 5397663 5397682 5397679 +
actagaaataccatttgacc

SEQ ID NO: 28650 - DNA, 20 bp, Artificial Sequence
  Synthetic oligonucleotide; TGG chr11 5397678 5397697 5397694 +
tgacccagccatcccattac

SEQ ID NO: 28651 - DNA, 20 bp, Artificial Sequence
  Synthetic oligonucleotide; GGG chr11 5397679 5397698 5397695 +
gacccagccatcccattact

SEQ ID NO: 28652 - DNA, 20 bp, Artificial Sequence
  Synthetic oligonucleotide; AAG chr11 5397692 5397711 5397708 +
cattactgggtatacaccca

SEQ ID NO: 28653 - DNA, 20 bp, Artificial Sequence
  Synthetic oligonucleotide; AGG chr11 5397693 5397712 5397709 +
attactgggtatacacccaa

SEQ ID NO: 28654 - DNA, 20 bp, Artificial Sequence
  Synthetic oligonucleotide; AAG chr11 5397717 5397736 5397733 +
ttataaatcatgctgctata

SEQ ID NO: 28655 - DNA, 20 bp, Artificial Sequence
  Synthetic oligonucleotide; CGG chr11 5397744 5397763 5397760 +
atgcacacgtatgtttattg

SEQ ID NO: 28656 - DNA, 20 bp, Artificial Sequence
  Synthetic oligonucleotide; TAG chr11 5397759 5397778 5397775 +
tattgcggcactattcacaa

SEQ ID NO: 28657 - DNA, 20 bp, Artificial Sequence
  Synthetic oligonucleotide; AAG chr11 5397764 5397783 5397780 +
cggcactattcacaatagca

SEQ ID NO: 28658 - DNA, 20 bp, Artificial Sequence
  Synthetic oligonucleotide; TGG chr11 5397770 5397789 5397786 +
tattcacaatagcaaagact

SEQ ID NO: 28659 - DNA, 20 bp, Artificial Sequence
  Synthetic oligonucleotide; TAG chr11 5397798 5397817 5397814 +
acccaaatgtccaacaatga

SEQ ID NO: 28660 - DNA, 20 bp, Artificial Sequence
  Synthetic oligonucleotide; TGG chr11 5397803 5397822 5397819 +
aatgtccaacaatgatagac

SEQ ID NO: 28661 - DNA, 20 bp, Artificial Sequence
  Synthetic oligonucleotide; AAG chr11 5397809 5397828 5397825 +
caacaatgatagactggatt

SEQ ID NO: 28662 - DNA, 20 bp, Artificial Sequence
  Synthetic oligonucleotide; TGG chr11 5397818 5397837 5397834 +
tagactggattaagaaaatg

SEQ ID NO: 28663 - DNA, 20 bp, Artificial Sequence
  Synthetic oligonucleotide; TGG chr11 5397834 5397853 5397850 +
aatgtggcacatatacacca

SEQ ID NO: 28664 - DNA, 20 bp, Artificial Sequence
  Synthetic oligonucleotide; CAG chr11 5397846 5397865 5397862 +
atacaccatggaatactatg

SEQ ID NO: 28665 - DNA, 20 bp, Artificial Sequence
  Synthetic oligonucleotide; GAG chr11 5397863 5397882 5397879 +
atgcagccataaaaaatgat

SEQ ID NO: 28666 - DNA, 20 bp, Artificial Sequence
  Synthetic oligonucleotide; TAG chr11 5397879 5397898 5397895 +
tgatgagttcatgtcctttg

SEQ ID NO: 28667 - DNA, 20 bp, Artificial Sequence
  Synthetic oligonucleotide; AGG chr11 5397880 5397899 5397896 +
gatgagttcatgtcctttgt

SEQ ID NO: 28668 - DNA, 20 bp, Artificial Sequence
  Synthetic oligonucleotide; GGG chr11 5397881 5397900 5397897 +
atgagttcatgtcctttgta

SEQ ID NO: 28669 - DNA, 20 bp, Artificial Sequence
  Synthetic oligonucleotide; TGG chr11 5397887 5397906 5397903 +
tcatgtcctttgtagggaca

SEQ ID NO: 28670 - DNA, 20 bp, Artificial Sequence
  Synthetic oligonucleotide; AAG chr11 5397893 5397912 5397909 +
cctttgtagggacatggatg

SEQ ID NO: 28671 - DNA, 20 bp, Artificial Sequence
  Synthetic oligonucleotide; TGG chr11 5397897 5397916 5397913 +
tgtagggacatggatgaagc

SEQ ID NO: 28672 - DNA, 20 bp, Artificial Sequence
  Synthetic oligonucleotide; CAG chr11 5397913 5397932 5397929 +
aagctggaaaccatcattct

SEQ ID NO: 28673 - DNA, 20 bp, Artificial Sequence
  Synthetic oligonucleotide; AAG chr11 5397927 5397946 5397943 +
cattctcagcaaactatcac

SEQ ID NO: 28674 - DNA, 20 bp, Artificial Sequence
  Synthetic oligonucleotide; AGG chr11 5397928 5397947 5397944 +
attctcagcaaactatcaca

SEQ ID NO: 28675 - DNA, 20 bp, Artificial Sequence
  Synthetic oligonucleotide; AAG chr11 5397936 5397955 5397952 +
caaactatcacaaggacaaa

SEQ ID NO: 28676 - DNA, 20 bp, Artificial Sequence
  Synthetic oligonucleotide; TAG chr11 5397963 5397982 5397979 +
acaccacatgttctcactca

SEQ ID NO: 28677 - DNA, 20 bp, Artificial Sequence
  Synthetic oligonucleotide; AGG chr11 5397964 5397983 5397980 +
caccacatgttctcactcat

SEQ ID NO: 28678 - DNA, 20 bp, Artificial Sequence
  Synthetic oligonucleotide; TGG chr11 5397967 5397986 5397983 +
cacatgttctcactcatagg

SEQ ID NO: 28679 - DNA, 20 bp, Artificial Sequence
  Synthetic oligonucleotide; GGG chr11 5397968 5397987 5397984 +
acatgttctcactcataggt

SEQ ID NO: 28680 - DNA, 20 bp, Artificial Sequence
  Synthetic oligonucleotide; GAG chr11 5397982 5398001 5397998 +
ataggtgggaactgaacaat

SEQ ID NO: 28681 - DNA, 20 bp, Artificial Sequence
  Synthetic oligonucleotide; TGG chr11 5397991 5398010 5398007 +
aactgaacaatgagaacaca

SEQ ID NO: 28682 - DNA, 20 bp, Artificial Sequence
  Synthetic oligonucleotide; CAG chr11 5397997 5398016 5398013 +
acaatgagaacacatggaca

SEQ ID NO: 28683 - DNA, 20 bp, Artificial Sequence
  Synthetic oligonucleotide; AGG chr11 5397998 5398017 5398014 +
caatgagaacacatggacac

SEQ ID NO: 28684 - DNA, 20 bp, Artificial Sequence
  Synthetic oligonucleotide; AAG chr11 5398001 5398020 5398017 +
tgagaacacatggacacagg

SEQ ID NO: 28685 - DNA, 20 bp, Artificial Sequence
  Synthetic oligonucleotide; AGG chr11 5398002 5398021 5398018 +
gagaacacatggacacagga

SEQ ID NO: 28686 - DNA, 20 bp, Artificial Sequence
  Synthetic oligonucleotide; GGG chr11 5398003 5398022 5398019 +
agaacacatggacacaggaa

SEQ ID NO: 28687 - DNA, 20 bp, Artificial Sequence
  Synthetic oligonucleotide; GGG chr11 5398004 5398023 5398020 +
gaacacatggacacaggaag

SEQ ID NO: 28688 - DNA, 20 bp, Artificial Sequence
  Synthetic oligonucleotide; CGG chr11 5398019 5398038 5398035 +
ggaaggggaacatcacacac

SEQ ID NO: 28689 - DNA, 20 bp, Artificial Sequence
  Synthetic oligonucleotide; GGG chr11 5398020 5398039 5398036 +
gaaggggaacatcacacacc

SEQ ID NO: 28690 - DNA, 20 bp, Artificial Sequence
  Synthetic oligonucleotide; GGG chr11 5398021 5398040 5398037 +
aaggggaacatcacacaccg

SEQ ID NO: 28691 - DNA, 20 bp, Artificial Sequence
  Synthetic oligonucleotide; TGG chr11 5398031 5398050 5398047 +
tcacacaccggggcctgttg

SEQ ID NO: 28692 - DNA, 20 bp, Artificial Sequence
  Synthetic oligonucleotide; GGG chr11 5398032 5398051 5398048 +
cacacaccggggcctgttgt

SEQ ID NO: 28693 - DNA, 20 bp, Artificial Sequence
  Synthetic oligonucleotide; GGG chr11 5398033 5398052 5398049 +
acacaccggggcctgttgtg

SEQ ID NO: 28694 - DNA, 20 bp, Artificial Sequence
  Synthetic oligonucleotide; TGG chr11 5398036 5398055 5398052 +
caccggggcctgttgtgggg

SEQ ID NO: 28695 - DNA, 20 bp, Artificial Sequence
  Synthetic oligonucleotide; GGG chr11 5398037 5398056 5398053 +
accggggcctgttgtggggt

SEQ ID NO: 28696 - DNA, 20 bp, Artificial Sequence
  Synthetic oligonucleotide; GAG chr11 5398039 5398058 5398055 +
cggggcctgttgtggggtgg

SEQ ID NO: 28697 - DNA, 20 bp, Artificial Sequence
  Synthetic oligonucleotide; AGG chr11 5398040 5398059 5398056 +
ggggcctgttgtggggtggg

SEQ ID NO: 28698 - DNA, 20 bp, Artificial Sequence
  Synthetic oligonucleotide; GAG chr11 5398042 5398061 5398058 +
ggcctgttgtggggtgggag

SEQ ID NO: 28699 - DNA, 20 bp, Artificial Sequence
  Synthetic oligonucleotide; AGG chr11 5398043 5398062 5398059 +
gcctgttgtggggtgggagg

SEQ ID NO: 28700 - DNA, 20 bp, Artificial Sequence
  Synthetic oligonucleotide; GGG chr11 5398044 5398063 5398060 +
cctgttgtggggtgggagga

SEQ ID NO: 28701 - DNA, 20 bp, Artificial Sequence
  Synthetic oligonucleotide; GGG chr11 5398045 5398064 5398061 +
ctgttgtggggtgggaggag

SEQ ID NO: 28702 - DNA, 20 bp, Artificial Sequence
  Synthetic oligonucleotide; GGG chr11 5398046 5398065 5398062 +
tgttgtggggtgggaggagg

SEQ ID NO: 28703 - DNA, 20 bp, Artificial Sequence
  Synthetic oligonucleotide; CAG chr11 5398049 5398068 5398065 +
tgtggggtgggaggaggggg

SEQ ID NO: 28704 - DNA, 20 bp, Artificial Sequence
  Synthetic oligonucleotide; AGG chr11 5398050 5398069 5398066 +
gtggggtgggaggagggggc

SEQ ID NO: 28705 - DNA, 20 bp, Artificial Sequence
  Synthetic oligonucleotide; GGG chr11 5398051 5398070 5398067 +
tggggtgggaggagggggca

SEQ ID NO: 28706 - DNA, 20 bp, Artificial Sequence
  Synthetic oligonucleotide; TAG chr11 5398055 5398074 5398071 +
gtgggaggagggggcaggga

SEQ ID NO: 28707 - DNA, 20 bp, Artificial Sequence
  Synthetic oligonucleotide; TAG chr11 5398061 5398080 5398077 +
ggagggggcagggatagcat

SEQ ID NO: 28708 - DNA, 20 bp, Artificial Sequence
  Synthetic oligonucleotide; AGG chr11 5398062 5398081 5398078 +
gagggggcagggatagcatt

SEQ ID NO: 28709 - DNA, 20 bp, Artificial Sequence
  Synthetic oligonucleotide; GAG chr11 5398064 5398083 5398080 +
gggggcagggatagcattag

SEQ ID NO: 28710 - DNA, 20 bp, Artificial Sequence
  Synthetic oligonucleotide; TGG chr11 5398084 5398103 5398100 +
gagatatacctaatgttaaa

SEQ ID NO: 28711 - DNA, 20 bp, Artificial Sequence
  Synthetic oligonucleotide; GAG chr11 5398088 5398107 5398104 +
tatacctaatgttaaatggt

SEQ ID NO: 28712 - DNA, 20 bp, Artificial Sequence
  Synthetic oligonucleotide; TGG chr11 5398095 5398114 5398111 +
aatgttaaatggtgagttaa

SEQ ID NO: 28713 - DNA, 20 bp, Artificial Sequence
  Synthetic oligonucleotide; GGG chr11 5398096 5398115 5398112 +
atgttaaatggtgagttaat

SEQ ID NO: 28714 - DNA, 20 bp, Artificial Sequence
  Synthetic oligonucleotide; CAG chr11 5398101 5398120 5398117 +
aaatggtgagttaatgggtg

SEQ ID NO: 28715 - DNA, 20 bp, Artificial Sequence
  Synthetic oligonucleotide; TGG chr11 5398114 5398133 5398130 +
atgggtgcagcacaccaaca

SEQ ID NO: 28716 - DNA, 20 bp, Artificial Sequence
  Synthetic oligonucleotide; AAG chr11 5398174 5398193 5398190 +
acatgtaccctaaaacttaa

SEQ ID NO: 28717 - DNA, 20 bp, Artificial Sequence
  Synthetic oligonucleotide; AAG chr11 5398190 5398209 5398206 +
ttaaaagtataacaaaaaat

SEQ ID NO: 28718 - DNA, 20 bp, Artificial Sequence
  Synthetic oligonucleotide; TAG chr11 5398194 5398213 5398210 +
aagtataacaaaaaataagt

SEQ ID NO: 28719 - DNA, 20 bp, Artificial Sequence
  Synthetic oligonucleotide; AAG chr11 5398201 5398220 5398217 +
acaaaaaataagttagaaaa

SEQ ID NO: 28720 - DNA, 20 bp, Artificial Sequence
  Synthetic oligonucleotide; TAG chr11 5398218 5398237 5398234 +
aaaaagaaatttacatatat

SEQ ID NO: 28721 - DNA, 20 bp, Artificial Sequence
  Synthetic oligonucleotide; TGG chr11 5398235 5398254 5398251 +
tattagttatttaaatatgc

SEQ ID NO: 28722 - DNA, 20 bp, Artificial Sequence
  Synthetic oligonucleotide; AAG chr11 5398264 5398283 5398280 +
actattacactcatttcaca

SEQ ID NO: 28723 - DNA, 20 bp, Artificial Sequence
  Synthetic oligonucleotide; TAG chr11 5398298 5398317 5398314 +
atatctttgcttgtttccct

SEQ ID NO: 28724 - DNA, 20 bp, Artificial Sequence
  Synthetic oligonucleotide; AGG chr11 5398299 5398318 5398315 +
tatctttgcttgtttccctt

SEQ ID NO: 28725 - DNA, 20 bp, Artificial Sequence
  Synthetic oligonucleotide; TGG chr11 5398307 5398326 5398323 +
cttgtttcccttaggttctc

SEQ ID NO: 28726 - DNA, 20 bp, Artificial Sequence
  Synthetic oligonucleotide; GAG chr11 5398315 5398334 5398331 +
ccttaggttctctggatatt

SEQ ID NO: 28727 - DNA, 20 bp, Artificial Sequence
  Synthetic oligonucleotide; GAG chr11 5398317 5398336 5398333 +
ttaggttctctggatattga

SEQ ID NO: 28728 - DNA, 20 bp, Artificial Sequence
  Synthetic oligonucleotide; GAG chr11 5398319 5398338 5398335 +
aggttctctggatattgaga

SEQ ID NO: 28729 - DNA, 20 bp, Artificial Sequence
  Synthetic oligonucleotide; AGG chr11 5398320 5398339 5398336 +
ggttctctggatattgagag

SEQ ID NO: 28730 - DNA, 20 bp, Artificial Sequence
  Synthetic oligonucleotide; TGG chr11 5398337 5398356 5398353 +
gagaggctaatgtaattacc

SEQ ID NO: 28731 - DNA, 20 bp, Artificial Sequence
  Synthetic oligonucleotide; GGG chr11 5398338 5398357 5398354 +
agaggctaatgtaattacct

SEQ ID NO: 28732 - DNA, 20 bp, Artificial Sequence
  Synthetic oligonucleotide; CAG chr11 5398352 5398371 5398368 +
ttacctgggtaattgctcct

SEQ ID NO: 28733 - DNA, 20 bp, Artificial Sequence
  Synthetic oligonucleotide; AGG chr11 5398353 5398372 5398369 +
tacctgggtaattgctcctc

SEQ ID NO: 28734 - DNA, 20 bp, Artificial Sequence
  Synthetic oligonucleotide; GGG chr11 5398354 5398373 5398370 +
acctgggtaattgctcctca

SEQ ID NO: 28735 - DNA, 20 bp, Artificial Sequence
  Synthetic oligonucleotide; TAG chr11 5398387 5398406 5398403 +
tctccccattactctactcc

SEQ ID NO: 28736 - DNA, 20 bp, Artificial Sequence
  Synthetic oligonucleotide; GAG chr11 5398389 5398408 5398405 +
tccccattactctactccta

SEQ ID NO: 28737 - DNA, 20 bp, Artificial Sequence
  Synthetic oligonucleotide; CAG chr11 5398400 5398419 5398416 +
ctactcctagagactctgat

SEQ ID NO: 28738 - DNA, 20 bp, Artificial Sequence
  Synthetic oligonucleotide; TGG chr11 5398416 5398435 5398432 +
tgatcagctttttcaaaaaa

SEQ ID NO: 28739 - DNA, 20 bp, Artificial Sequence
  Synthetic oligonucleotide; GGG chr11 5398417 5398436 5398433 +
gatcagctttttcaaaaaat

SEQ ID NO: 28740 - DNA, 20 bp, Artificial Sequence
  Synthetic oligonucleotide; CAG chr11 5398420 5398439 5398436 +
cagctttttcaaaaaatggg

SEQ ID NO: 28741 - DNA, 20 bp, Artificial Sequence
  Synthetic oligonucleotide; CAG chr11 5398428 5398447 5398444 +
tcaaaaaatgggcagcattc

SEQ ID NO: 28742 - DNA, 20 bp, Artificial Sequence
  Synthetic oligonucleotide; CAG chr11 5398434 5398453 5398450 +
aatgggcagcattccagccc

SEQ ID NO: 28743 - DNA, 20 bp, Artificial Sequence
  Synthetic oligonucleotide; AGG chr11 5398435 5398454 5398451 +
atgggcagcattccagcccc

SEQ ID NO: 28744 - DNA, 20 bp, Artificial Sequence
  Synthetic oligonucleotide; AAG chr11 5398441 5398460 5398457 +
agcattccagccccaggact

SEQ ID NO: 28745 - DNA, 20 bp, Artificial Sequence
  Synthetic oligonucleotide; AAG chr11 5398444 5398463 5398460 +
attccagccccaggactaag

SEQ ID NO: 28746 - DNA, 20 bp, Artificial Sequence
  Synthetic oligonucleotide; CAG chr11 5398459 5398478 5398475 +
ctaagaagatatgaatgcca

SEQ ID NO: 28747 - DNA, 20 bp, Artificial Sequence
  Synthetic oligonucleotide; TGG chr11 5398462 5398481 5398478 +
agaagatatgaatgccacag

SEQ ID NO: 28748 - DNA, 20 bp, Artificial Sequence
  Synthetic oligonucleotide; CAG chr11 5398465 5398484 5398481 +
agatatgaatgccacagtgg

SEQ ID NO: 28749 - DNA, 20 bp, Artificial Sequence
  Synthetic oligonucleotide; AGG chr11 5398466 5398485 5398482 +
gatatgaatgccacagtggc

SEQ ID NO: 28750 - DNA, 20 bp, Artificial Sequence
  Synthetic oligonucleotide; GGG chr11 5398467 5398486 5398483 +
atatgaatgccacagtggca

SEQ ID NO: 28751 - DNA, 20 bp, Artificial Sequence
  Synthetic oligonucleotide; AAG chr11 5398478 5398497 5398494 +
acagtggcagggacttgctg

SEQ ID NO: 28752 - DNA, 20 bp, Artificial Sequence
  Synthetic oligonucleotide; GAG chr11 5398482 5398501 5398498 +
tggcagggacttgctgaagt

SEQ ID NO: 28753 - DNA, 20 bp, Artificial Sequence
  Synthetic oligonucleotide; GAG chr11 5398501 5398520 5398517 +
tgagcttccccatcccacct

SEQ ID NO: 28754 - DNA, 20 bp, Artificial Sequence
  Synthetic oligonucleotide; AGG chr11 5398502 5398521 5398518 +
gagcttccccatcccacctg

SEQ ID NO: 28755 - DNA, 20 bp, Artificial Sequence
  Synthetic oligonucleotide; CAG chr11 5398507 5398526 5398523 +
tccccatcccacctgaggct

SEQ ID NO: 28756 - DNA, 20 bp, Artificial Sequence
  Synthetic oligonucleotide; GAG chr11 5398509 5398528 5398525 +
cccatcccacctgaggctca

SEQ ID NO: 28757 - DNA, 20 bp, Artificial Sequence
  Synthetic oligonucleotide; AGG chr11 5398510 5398529 5398526 +
ccatcccacctgaggctcag

SEQ ID NO: 28758 - DNA, 20 bp, Artificial Sequence
  Synthetic oligonucleotide; CAG chr11 5398514 5398533 5398530 +
cccacctgaggctcagaggc

SEQ ID NO: 28759 - DNA, 20 bp, Artificial Sequence
  Synthetic oligonucleotide; TGG chr11 5398526 5398545 5398542 +
tcagaggccagtttcacttg

SEQ ID NO: 28760 - DNA, 20 bp, Artificial Sequence
  Synthetic oligonucleotide; GAG chr11 5398530 5398549 5398546 +
aggccagtttcacttgtggt

SEQ ID NO: 28761 - DNA, 20 bp, Artificial Sequence
  Synthetic oligonucleotide; AAG chr11 5398538 5398557 5398554 +
ttcacttgtggtgagtgcac

SEQ ID NO: 28762 - DNA, 20 bp, Artificial Sequence
  Synthetic oligonucleotide; TGG chr11 5398557 5398576 5398573 +
caagcccatgatccctgata

SEQ ID NO: 28763 - DNA, 20 bp, Artificial Sequence
  Synthetic oligonucleotide; TGG chr11 5398562 5398581 5398578 +
ccatgatccctgatatggct

SEQ ID NO: 28764 - DNA, 20 bp, Artificial Sequence
  Synthetic oligonucleotide; CGG chr11 5398622 5398641 5398638 +
tccccataatccctatatgt

SEQ ID NO: 28765 - DNA, 20 bp, Artificial Sequence
  Synthetic oligonucleotide; GGG chr11 5398623 5398642 5398639 +
ccccataatccctatatgtc

SEQ ID NO: 28766 - DNA, 20 bp, Artificial Sequence
  Synthetic oligonucleotide; GGG chr11 5398624 5398643 5398640 +
cccataatccctatatgtcg

SEQ ID NO: 28767 - DNA, 20 bp, Artificial Sequence
  Synthetic oligonucleotide; GGG chr11 5398625 5398644 5398641 +
ccataatccctatatgtcgg

SEQ ID NO: 28768 - DNA, 20 bp, Artificial Sequence
  Synthetic oligonucleotide; GAG chr11 5398627 5398646 5398643 +
ataatccctatatgtcgggg

SEQ ID NO: 28769 - DNA, 20 bp, Artificial Sequence
  Synthetic oligonucleotide; AGG chr11 5398628 5398647 5398644 +
taatccctatatgtcggggg

SEQ ID NO: 28770 - DNA, 20 bp, Artificial Sequence
  Synthetic oligonucleotide; GGG chr11 5398629 5398648 5398645 +
aatccctatatgtcggggga

SEQ ID NO: 28771 - DNA, 20 bp, Artificial Sequence
  Synthetic oligonucleotide; CAG chr11 5398634 5398653 5398650 +
ctatatgtcgggggagggac

SEQ ID NO: 28772 - DNA, 20 bp, Artificial Sequence
  Synthetic oligonucleotide; AGG chr11 5398635 5398654 5398651 +
tatatgtcgggggagggacc

SEQ ID NO: 28773 - DNA, 20 bp, Artificial Sequence
  Synthetic oligonucleotide; TGG chr11 5398638 5398657 5398654 +
atgtcgggggagggaccagg

SEQ ID NO: 28774 - DNA, 20 bp, Artificial Sequence
  Synthetic oligonucleotide; GGG chr11 5398639 5398658 5398655 +
tgtcgggggagggaccaggt

SEQ ID NO: 28775 - DNA, 20 bp, Artificial Sequence
  Synthetic oligonucleotide; GAG chr11 5398641 5398660 5398657 +
tcgggggagggaccaggtgg

SEQ ID NO: 28776 - DNA, 20 bp, Artificial Sequence
  Synthetic oligonucleotide; TGG chr11 5398649 5398668 5398665 +
gggaccaggtgggagattat

SEQ ID NO: 28777 - DNA, 20 bp, Artificial Sequence
  Synthetic oligonucleotide; TGG chr11 5398656 5398675 5398672 +
ggtgggagattattggatca

SEQ ID NO: 28778 - DNA, 20 bp, Artificial Sequence
  Synthetic oligonucleotide; GGG chr11 5398657 5398676 5398673 +
gtgggagattattggatcat

SEQ ID NO: 28779 - DNA, 20 bp, Artificial Sequence
  Synthetic oligonucleotide; GAG chr11 5398659 5398678 5398675 +
gggagattattggatcatgg

SEQ ID NO: 28780 - DNA, 20 bp, Artificial Sequence
  Synthetic oligonucleotide; CAG chr11 5398662 5398681 5398678 +
agattattggatcatgggag

SEQ ID NO: 28781 - DNA, 20 bp, Artificial Sequence
  Synthetic oligonucleotide; CAG chr11 5398676 5398695 5398692 +
tgggagcagtttcccccatg

SEQ ID NO: 28782 - DNA, 20 bp, Artificial Sequence
  Synthetic oligonucleotide; GAG chr11 5398692 5398711 5398708 +
catgcagttctcgtgatact

SEQ ID NO: 28783 - DNA, 20 bp, Artificial Sequence
  Synthetic oligonucleotide; GAG chr11 5398696 5398715 5398712 +
cagttctcgtgatactgagt

SEQ ID NO: 28784 - DNA, 20 bp, Artificial Sequence
  Synthetic oligonucleotide; GAG chr11 5398706 5398725 5398722 +
gatactgagtgagttttcat

SEQ ID NO: 28785 - DNA, 20 bp, Artificial Sequence
  Synthetic oligonucleotide; TGG chr11 5398715 5398734 5398731 +
tgagttttcatgagatctga

SEQ ID NO: 28786 - DNA, 20 bp, Artificial Sequence
  Synthetic oligonucleotide; AAG chr11 5398724 5398743 5398740 +
atgagatctgatggttttat

SEQ ID NO: 28787 - DNA, 20 bp, Artificial Sequence
  Synthetic oligonucleotide; AGG chr11 5398725 5398744 5398741 +
tgagatctgatggttttata

SEQ ID NO: 28788 - DNA, 20 bp, Artificial Sequence
  Synthetic oligonucleotide; CAG chr11 5398728 5398747 5398744 +
gatctgatggttttataagg

SEQ ID NO: 28789 - DNA, 20 bp, Artificial Sequence
  Synthetic oligonucleotide; AAG chr11 5398769 5398788 5398785 +
actctctcttgcctgccacc

SEQ ID NO: 28790 - DNA, 20 bp, Artificial Sequence
  Synthetic oligonucleotide; AAG chr11 5398773 5398792 5398789 +
tctcttgcctgccaccaagt

SEQ ID NO: 28791 - DNA, 20 bp, Artificial Sequence
  Synthetic oligonucleotide; AAG chr11 5398807 5398826 5398823 +
tctccttctgccataattgt

SEQ ID NO: 28792 - DNA, 20 bp, Artificial Sequence
  Synthetic oligonucleotide; GAG chr11 5398816 5398835 5398832 +
gccataattgtaagtttcct

SEQ ID NO: 28793 - DNA, 20 bp, Artificial Sequence
  Synthetic oligonucleotide; AGG chr11 5398817 5398836 5398833 +
ccataattgtaagtttcctg

SEQ ID NO: 28794 - DNA, 20 bp, Artificial Sequence
  Synthetic oligonucleotide; CAG chr11 5398826 5398845 5398842 +
taagtttcctgaggcctccc

SEQ ID NO: 28795 - DNA, 20 bp, Artificial Sequence
  Synthetic oligonucleotide; TGG chr11 5398834 5398853 5398850 +
ctgaggcctccccagctatg

SEQ ID NO: 28796 - DNA, 20 bp, Artificial Sequence
  Synthetic oligonucleotide; GAG chr11 5398843 5398862 5398859 +
ccccagctatgtggaaatgt

SEQ ID NO: 28797 - DNA, 20 bp, Artificial Sequence
  Synthetic oligonucleotide; CAG chr11 5398877 5398896 5398893 +
tcctttgttaataaattacc

SEQ ID NO: 28798 - DNA, 20 bp, Artificial Sequence
  Synthetic oligonucleotide; CAG chr11 5398883 5398902 5398899 +
gttaataaattacccagtct

SEQ ID NO: 28799 - DNA, 20 bp, Artificial Sequence
  Synthetic oligonucleotide; AGG chr11 5398884 5398903 5398900 +
ttaataaattacccagtctc

SEQ ID NO: 28800 - DNA, 20 bp, Artificial Sequence
  Synthetic oligonucleotide; TAG chr11 5398887 5398906 5398903 +
ataaattacccagtctcagg

SEQ ID NO: 28801 - DNA, 20 bp, Artificial Sequence
  Synthetic oligonucleotide; TAG chr11 5398896 5398915 5398912 +
ccagtctcaggtagtatctt

SEQ ID NO: 28802 - DNA, 20 bp, Artificial Sequence
  Synthetic oligonucleotide; GAG chr11 5398898 5398917 5398914 +
agtctcaggtagtatcttta

SEQ ID NO: 28803 - DNA, 20 bp, Artificial Sequence
  Synthetic oligonucleotide; CAG chr11 5398901 5398920 5398917 +
ctcaggtagtatctttagag

SEQ ID NO: 28804 - DNA, 20 bp, Artificial Sequence
  Synthetic oligonucleotide; GAG chr11 5398907 5398926 5398923 +
tagtatctttagagcagtgt

SEQ ID NO: 28805 - DNA, 20 bp, Artificial Sequence
  Synthetic oligonucleotide; AAG chr11 5398930 5398949 5398946 +
aatgaactaatacaatcccc

SEQ ID NO: 28806 - DNA, 20 bp, Artificial Sequence
  Synthetic oligonucleotide; AAG chr11 5398945 5398964 5398961 +
tccccaagccctgccttctg

SEQ ID NO: 28807 - DNA, 20 bp, Artificial Sequence
  Synthetic oligonucleotide; CAG chr11 5398948 5398967 5398964 +
ccaagccctgccttctgaag

SEQ ID NO: 28808 - DNA, 20 bp, Artificial Sequence
  Synthetic oligonucleotide; CAG chr11 5398955 5398974 5398971 +
ctgccttctgaagcagcatt

SEQ ID NO: 28809 - DNA, 20 bp, Artificial Sequence
  Synthetic oligonucleotide; AGG chr11 5398956 5398975 5398972 +
tgccttctgaagcagcattc

SEQ ID NO: 28810 - DNA, 20 bp, Artificial Sequence
  Synthetic oligonucleotide; CAG chr11 5398977 5398996 5398993 +
ggactcccaaccccatgtca

SEQ ID NO: 28811 - DNA, 20 bp, Artificial Sequence
  Synthetic oligonucleotide; AAG chr11 5398984 5399003 5399000 +
caaccccatgtcacagtgtg

SEQ ID NO: 28812 - DNA, 20 bp, Artificial Sequence
  Synthetic oligonucleotide; TAG chr11 5398991 5399010 5399007 +
atgtcacagtgtgaagccct

SEQ ID NO: 28813 - DNA, 20 bp, Artificial Sequence
  Synthetic oligonucleotide; AAG chr11 5399004 5399023 5399020 +
aagcccttagcatttttcct

SEQ ID NO: 28814 - DNA, 20 bp, Artificial Sequence
  Synthetic oligonucleotide; CAG chr11 5399008 5399027 5399024 +
ccttagcatttttcctaaga

SEQ ID NO: 28815 - DNA, 20 bp, Artificial Sequence
  Synthetic oligonucleotide; TAG chr11 5399011 5399030 5399027 +
tagcatttttcctaagacag

SEQ ID NO: 28816 - DNA, 20 bp, Artificial Sequence
  Synthetic oligonucleotide; TAG chr11 5399023 5399042 5399039 +
taagacagtagtcacctccc

SEQ ID NO: 28817 - DNA, 20 bp, Artificial Sequence
  Synthetic oligonucleotide; TGG chr11 5399041 5399060 5399057 +
cctagcttcttgaacctgtc

SEQ ID NO: 28818 - DNA, 20 bp, Artificial Sequence
  Synthetic oligonucleotide; CAG chr11 5399044 5399063 5399060 +
agcttcttgaacctgtctgg

SEQ ID NO: 28819 - DNA, 20 bp, Artificial Sequence
  Synthetic oligonucleotide; AAG chr11 5399047 5399066 5399063 +
ttcttgaacctgtctggcag

SEQ ID NO: 28820 - DNA, 20 bp, Artificial Sequence
  Synthetic oligonucleotide; AGG chr11 5399048 5399067 5399064 +
tcttgaacctgtctggcaga

SEQ ID NO: 28821 - DNA, 20 bp, Artificial Sequence
  Synthetic oligonucleotide; GAG chr11 5399050 5399069 5399066 +
ttgaacctgtctggcagaag

SEQ ID NO: 28822 - DNA, 20 bp, Artificial Sequence
  Synthetic oligonucleotide; GAG chr11 5399052 5399071 5399068 +
gaacctgtctggcagaagga

SEQ ID NO: 28823 - DNA, 20 bp, Artificial Sequence
  Synthetic oligonucleotide; AGG chr11 5399053 5399072 5399069 +
aacctgtctggcagaaggag

SEQ ID NO: 28824 - DNA, 20 bp, Artificial Sequence
  Synthetic oligonucleotide; TGG chr11 5399071 5399090 5399087 +
agaggaatcacatcctaaat

SEQ ID NO: 28825 - DNA, 20 bp, Artificial Sequence
  Synthetic oligonucleotide; TGG chr11 5399074 5399093 5399090 +
ggaatcacatcctaaattgg

SEQ ID NO: 28826 - DNA, 20 bp, Artificial Sequence
  Synthetic oligonucleotide; CAG chr11 5399077 5399096 5399093 +
atcacatcctaaattggtgg

SEQ ID NO: 28827 - DNA, 20 bp, Artificial Sequence
  Synthetic oligonucleotide; TGG chr11 5399081 5399100 5399097 +
catcctaaattggtggcaga

SEQ ID NO: 28828 - DNA, 20 bp, Artificial Sequence
  Synthetic oligonucleotide; CAG chr11 5399102 5399121 5399118 +
ggaaaacaaaacaaaaacac

SEQ ID NO: 28829 - DNA, 20 bp, Artificial Sequence
  Synthetic oligonucleotide; GAG chr11 5399104 5399123 5399120 +
aaaacaaaacaaaaacacca

SEQ ID NO: 28830 - DNA, 20 bp, Artificial Sequence
  Synthetic oligonucleotide; TAG chr11 5399127 5399146 5399143 +
cacatcatgaattcttgaaa

SEQ ID NO: 28831 - DNA, 20 bp, Artificial Sequence
  Synthetic oligonucleotide; TGG chr11 5399149 5399168 5399165 +
gttttgccatcatattatct

SEQ ID NO: 28832 - DNA, 20 bp, Artificial Sequence
  Synthetic oligonucleotide; GGG chr11 5399150 5399169 5399166 +
ttttgccatcatattatctt

SEQ ID NO: 28833 - DNA, 20 bp, Artificial Sequence
  Synthetic oligonucleotide; TGG chr11 5399175 5399194 5399191 +
actcacaaaatgcttatgtc

SEQ ID NO: 28834 - DNA, 20 bp, Artificial Sequence
  Synthetic oligonucleotide; AAG chr11 5399196 5399215 5399212 +
ggtttatatgctcatctatt

SEQ ID NO: 28835 - DNA, 20 bp, Artificial Sequence
  Synthetic oligonucleotide; TGG chr11 5399199 5399218 5399215 +
ttatatgctcatctattaag

SEQ ID NO: 28836 - DNA, 20 bp, Artificial Sequence
  Synthetic oligonucleotide; GGG chr11 5399200 5399219 5399216 +
tatatgctcatctattaagt

SEQ ID NO: 28837 - DNA, 20 bp, Artificial Sequence
  Synthetic oligonucleotide; CAG chr11 5399229 5399248 5399245 +
ttgtctccttgtttacctca

SEQ ID NO: 28838 - DNA, 20 bp, Artificial Sequence
  Synthetic oligonucleotide; TGG chr11 5399235 5399254 5399251 +
ccttgtttacctcacagatg

SEQ ID NO: 28839 - DNA, 20 bp, Artificial Sequence
  Synthetic oligonucleotide; GAG chr11 5399241 5399260 5399257 +
ttacctcacagatgtggtct

SEQ ID NO: 28840 - DNA, 20 bp, Artificial Sequence
  Synthetic oligonucleotide; CAG chr11 5399247 5399266 5399263 +
cacagatgtggtctgagtat

SEQ ID NO: 28841 - DNA, 20 bp, Artificial Sequence
  Synthetic oligonucleotide; GAG chr11 5399251 5399270 5399267 +
gatgtggtctgagtatcagt

SEQ ID NO: 28842 - DNA, 20 bp, Artificial Sequence
  Synthetic oligonucleotide; AAG chr11 5399262 5399281 5399278 +
agtatcagtgagccaataac

SEQ ID NO: 28843 - DNA, 20 bp, Artificial Sequence
  Synthetic oligonucleotide; AGG chr11 5399263 5399282 5399279 +
gtatcagtgagccaataaca

SEQ ID NO: 28844 - DNA, 20 bp, Artificial Sequence
  Synthetic oligonucleotide; AAG chr11 5399267 5399286 5399283 +
cagtgagccaataacaagga

SEQ ID NO: 28845 - DNA, 20 bp, Artificial Sequence
  Synthetic oligonucleotide; AAG chr11 5399285 5399304 5399301 +
gaaagacaattattaataaa

SEQ ID NO: 28846 - DNA, 20 bp, Artificial Sequence
  Synthetic oligonucleotide; TGG chr11 5399289 5399308 5399305 +
gacaattattaataaaaagt

SEQ ID NO: 28847 - DNA, 20 bp, Artificial Sequence
  Synthetic oligonucleotide; AAG chr11 5399296 5399315 5399312 +
attaataaaaagttggaaat

SEQ ID NO: 28848 - DNA, 20 bp, Artificial Sequence
  Synthetic oligonucleotide; GAG chr11 5399318 5399337 5399334 +
gctgactgtgattgactcct

SEQ ID NO: 28849 - DNA, 20 bp, Artificial Sequence
  Synthetic oligonucleotide; AAG chr11 5399330 5399349 5399346 +
tgactcctgagaattcctga

SEQ ID NO: 28850 - DNA, 20 bp, Artificial Sequence
  Synthetic oligonucleotide; GAG chr11 5399332 5399351 5399348 +
actcctgagaattcctgaaa

SEQ ID NO: 28851 - DNA, 20 bp, Artificial Sequence
  Synthetic oligonucleotide; TAG chr11 5399338 5399357 5399354 +
gagaattcctgaaagagata

SEQ ID NO: 28852 - DNA, 20 bp, Artificial Sequence
  Synthetic oligonucleotide; GAG chr11 5399340 5399359 5399356 +
gaattcctgaaagagatata

SEQ ID NO: 28853 - DNA, 20 bp, Artificial Sequence
  Synthetic oligonucleotide; TGG chr11 5399343 5399362 5399359 +
ttcctgaaagagatatagag

SEQ ID NO: 28854 - DNA, 20 bp, Artificial Sequence
  Synthetic oligonucleotide; GAG chr11 5399345 5399364 5399361 +
cctgaaagagatatagagtg

SEQ ID NO: 28855 - DNA, 20 bp, Artificial Sequence
  Synthetic oligonucleotide; GAG chr11 5399347 5399366 5399363 +
tgaaagagatatagagtgga

SEQ ID NO: 28856 - DNA, 20 bp, Artificial Sequence
  Synthetic oligonucleotide; TGG chr11 5399365 5399384 5399381 +
gagagaatattaacattcac

SEQ ID NO: 28857 - DNA, 20 bp, Artificial Sequence
  Synthetic oligonucleotide; AAG chr11 5399374 5399393 5399390 +
ttaacattcactggttgcta

SEQ ID NO: 28858 - DNA, 20 bp, Artificial Sequence
  Synthetic oligonucleotide; AGG chr11 5399375 5399394 5399391 +
taacattcactggttgctaa

SEQ ID NO: 28859 - DNA, 20 bp, Artificial Sequence
  Synthetic oligonucleotide; TAG chr11 5399393 5399412 5399409 +
aaaggctcacattaaatatt

SEQ ID NO: 28860 - DNA, 20 bp, Artificial Sequence
  Synthetic oligonucleotide; GAG chr11 5399395 5399414 5399411 +
aggctcacattaaatattta

SEQ ID NO: 28861 - DNA, 20 bp, Artificial Sequence
  Synthetic oligonucleotide; CAG chr11 5399399 5399418 5399415 +
tcacattaaatatttagagc

SEQ ID NO: 28862 - DNA, 20 bp, Artificial Sequence
  Synthetic oligonucleotide; GAG chr11 5399407 5399426 5399423 +
aatatttagagccagtccct

SEQ ID NO: 28863 - DNA, 20 bp, Artificial Sequence
  Synthetic oligonucleotide; AGG chr11 5399408 5399427 5399424 +
atatttagagccagtccctg

SEQ ID NO: 28864 - DNA, 20 bp, Artificial Sequence
  Synthetic oligonucleotide; AAG chr11 5399412 5399431 5399428 +
ttagagccagtccctgaggt

SEQ ID NO: 28865 - DNA, 20 bp, Artificial Sequence
  Synthetic oligonucleotide; AAG chr11 5399441 5399460 5399457 +
catctttatctttaaaaaca

SEQ ID NO: 28866 - DNA, 20 bp, Artificial Sequence
  Synthetic oligonucleotide; AAG chr11 5399459 5399478 5399475 +
caaagatactaatgtgcaca

SEQ ID NO: 28867 - DNA, 20 bp, Artificial Sequence
  Synthetic oligonucleotide; AGG chr11 5399460 5399479 5399476 +
aaagatactaatgtgcacaa

SEQ ID NO: 28868 - DNA, 20 bp, Artificial Sequence
  Synthetic oligonucleotide; AAG chr11 5399465 5399484 5399481 +
tactaatgtgcacaaaggta

SEQ ID NO: 28869 - DNA, 20 bp, Artificial Sequence
  Synthetic oligonucleotide; AAG chr11 5399474 5399493 5399490 +
gcacaaaggtaaagtacgta

SEQ ID NO: 28870 - DNA, 20 bp, Artificial Sequence
  Synthetic oligonucleotide; AAG chr11 5399490 5399509 5399506 +
cgtaaagttataccgaacat

SEQ ID NO: 28871 - DNA, 20 bp, Artificial Sequence
  Synthetic oligonucleotide; CAG chr11 5399512 5399531 5399528 +
gattcacctccaattctgtc

SEQ ID NO: 28872 - DNA, 20 bp, Artificial Sequence
  Synthetic oligonucleotide; CAG chr11 5399518 5399537 5399534 +
cctccaattctgtccagctc

SEQ ID NO: 28873 - DNA, 20 bp, Artificial Sequence
  Synthetic oligonucleotide; AGG chr11 5399519 5399538 5399535 +
ctccaattctgtccagctcc

SEQ ID NO: 28874 - DNA, 20 bp, Artificial Sequence
  Synthetic oligonucleotide; GGG chr11 5399520 5399539 5399536 +
tccaattctgtccagctcca

SEQ ID NO: 28875 - DNA, 20 bp, Artificial Sequence
  Synthetic oligonucleotide; GGG chr11 5399521 5399540 5399537 +
ccaattctgtccagctccag

SEQ ID NO: 28876 - DNA, 20 bp, Artificial Sequence
  Synthetic oligonucleotide; CAG chr11 5399526 5399545 5399542 +
tctgtccagctccaggggta

SEQ ID NO: 28877 - DNA, 20 bp, Artificial Sequence
  Synthetic oligonucleotide; TGG chr11 5399582 5399601 5399598 +
tttgttgtgtcctattatac

SEQ ID NO: 28878 - DNA, 20 bp, Artificial Sequence
  Synthetic oligonucleotide; GGG chr11 5399583 5399602 5399599 +
ttgttgtgtcctattatact

SEQ ID NO: 28879 - DNA, 20 bp, Artificial Sequence
  Synthetic oligonucleotide; TAG chr11 5399589 5399608 5399605 +
tgtcctattatactgggcta

SEQ ID NO: 28880 - DNA, 20 bp, Artificial Sequence
  Synthetic oligonucleotide; AAG chr11 5399619 5399638 5399635 +
gatcccttttgtaacctttc

SEQ ID NO: 28881 - DNA, 20 bp, Artificial Sequence
  Synthetic oligonucleotide; CAG chr11 5399654 5399673 5399670 +
tgtcaaacaaatcctaaact

SEQ ID NO: 28882 - DNA, 20 bp, Artificial Sequence
  Synthetic oligonucleotide; AGG chr11 5399655 5399674 5399671 +
gtcaaacaaatcctaaactc

SEQ ID NO: 28883 - DNA, 20 bp, Artificial Sequence
  Synthetic oligonucleotide; GAG chr11 5399657 5399676 5399673 +
caaacaaatcctaaactcag

SEQ ID NO: 28884 - DNA, 20 bp, Artificial Sequence
  Synthetic oligonucleotide; AAG chr11 5399674 5399693 5399690 +
caggagaatgattgtgtttt

SEQ ID NO: 28885 - DNA, 20 bp, Artificial Sequence
  Synthetic oligonucleotide; AAG chr11 5399686 5399705 5399702 +
tgtgttttaagatctctttc

SEQ ID NO: 28886 - DNA, 20 bp, Artificial Sequence
  Synthetic oligonucleotide; AGG chr11 5399687 5399706 5399703 +
gtgttttaagatctctttca

SEQ ID NO: 28887 - DNA, 20 bp, Artificial Sequence
  Synthetic oligonucleotide; GAG chr11 5399689 5399708 5399705 +
gttttaagatctctttcaag

SEQ ID NO: 28888 - DNA, 20 bp, Artificial Sequence
  Synthetic oligonucleotide; TGG chr11 5399706 5399725 5399722 +
aaggagatctgacccttatc

SEQ ID NO: 28889 - DNA, 20 bp, Artificial Sequence
  Synthetic oligonucleotide; CGG chr11 5399709 5399728 5399725 +
gagatctgacccttatctgg

SEQ ID NO: 28890 - DNA, 20 bp, Artificial Sequence
  Synthetic oligonucleotide; TAG chr11 5399712 5399731 5399728 +
atctgacccttatctggcgg

SEQ ID NO: 28891 - DNA, 20 bp, Artificial Sequence
  Synthetic oligonucleotide; GAG chr11 5399714 5399733 5399730 +
ctgacccttatctggcggta

SEQ ID NO: 28892 - DNA, 20 bp, Artificial Sequence
  Synthetic oligonucleotide; TGG chr11 5399721 5399740 5399737 +
ttatctggcggtagagactc

SEQ ID NO: 28893 - DNA, 20 bp, Artificial Sequence
  Synthetic oligonucleotide; GAG chr11 5399723 5399742 5399739 +
atctggcggtagagactctg

SEQ ID NO: 28894 - DNA, 20 bp, Artificial Sequence
  Synthetic oligonucleotide; TGG chr11 5399727 5399746 5399743 +
ggcggtagagactctggaga

SEQ ID NO: 28895 - DNA, 20 bp, Artificial Sequence
  Synthetic oligonucleotide; GAG chr11 5399735 5399754 5399751 +
agactctggagatggaaact

SEQ ID NO: 28896 - DNA, 20 bp, Artificial Sequence
  Synthetic oligonucleotide; AAG chr11 5399738 5399757 5399754 +
ctctggagatggaaactgag

SEQ ID NO: 28897 - DNA, 20 bp, Artificial Sequence
  Synthetic oligonucleotide; AGG chr11 5399739 5399758 5399755 +
tctggagatggaaactgaga

SEQ ID NO: 28898 - DNA, 20 bp, Artificial Sequence
  Synthetic oligonucleotide; AAG chr11 5399762 5399781 5399778 +
atgcaaaaaaaaaaaaatgc

SEQ ID NO: 28899 - DNA, 20 bp, Artificial Sequence
  Synthetic oligonucleotide; AAG chr11 5399766 5399785 5399782 +
aaaaaaaaaaaaatgcaaga

SEQ ID NO: 28900 - DNA, 20 bp, Artificial Sequence
  Synthetic oligonucleotide; AAG chr11 5399776 5399795 5399792 +
aaatgcaagaaagaaaaaaa

SEQ ID NO: 28901 - DNA, 20 bp, Artificial Sequence
  Synthetic oligonucleotide; AGG chr11 5399777 5399796 5399793 +
aatgcaagaaagaaaaaaaa

SEQ ID NO: 28902 - DNA, 20 bp, Artificial Sequence
  Synthetic oligonucleotide; AAG chr11 5399780 5399799 5399796 +
gcaagaaagaaaaaaaaagg

SEQ ID NO: 28903 - DNA, 20 bp, Artificial Sequence
  Synthetic oligonucleotide; AAG chr11 5399790 5399809 5399806 +
aaaaaaaaggaagaaaacaa

SEQ ID NO: 28904 - DNA, 20 bp, Artificial Sequence
  Synthetic oligonucleotide; GAG chr11 5399792 5399811 5399808 +
aaaaaaggaagaaaacaaaa

SEQ ID NO: 28905 - DNA, 20 bp, Artificial Sequence
  Synthetic oligonucleotide; CAG chr11 5399799 5399818 5399815 +
gaagaaaacaaaagagacca

SEQ ID NO: 28906 - DNA, 20 bp, Artificial Sequence
  Synthetic oligonucleotide; CAG chr11 5399803 5399822 5399819 +
aaaacaaaagagaccacaga

SEQ ID NO: 28907 - DNA, 20 bp, Artificial Sequence
  Synthetic oligonucleotide; AGG chr11 5399804 5399823 5399820 +
aaacaaaagagaccacagac

SEQ ID NO: 28908 - DNA, 20 bp, Artificial Sequence
  Synthetic oligonucleotide; CAG chr11 5399807 5399826 5399823 +
caaaagagaccacagacagg

SEQ ID NO: 28909 - DNA, 20 bp, Artificial Sequence
  Synthetic oligonucleotide; GAG chr11 5399809 5399828 5399825 +
aaagagaccacagacaggca

SEQ ID NO: 28910 - DNA, 20 bp, Artificial Sequence
  Synthetic oligonucleotide; AAG chr11 5399812 5399831 5399828 +
gagaccacagacaggcagag

SEQ ID NO: 28911 - DNA, 20 bp, Artificial Sequence
  Synthetic oligonucleotide; AGG chr11 5399813 5399832 5399829 +
agaccacagacaggcagaga

SEQ ID NO: 28912 - DNA, 20 bp, Artificial Sequence
  Synthetic oligonucleotide; CAG chr11 5399816 5399835 5399832 +
ccacagacaggcagagaagg

SEQ ID NO: 28913 - DNA, 20 bp, Artificial Sequence
  Synthetic oligonucleotide; GAG chr11 5399818 5399837 5399834 +
acagacaggcagagaaggca

SEQ ID NO: 28914 - DNA, 20 bp, Artificial Sequence
  Synthetic oligonucleotide; AGG chr11 5399819 5399838 5399835 +
cagacaggcagagaaggcag

SEQ ID NO: 28915 - DNA, 20 bp, Artificial Sequence
  Synthetic oligonucleotide; GAG chr11 5399821 5399840 5399837 +
gacaggcagagaaggcagag

SEQ ID NO: 28916 - DNA, 20 bp, Artificial Sequence
  Synthetic oligonucleotide; AGG chr11 5399822 5399841 5399838 +
acaggcagagaaggcagagg

SEQ ID NO: 28917 - DNA, 20 bp, Artificial Sequence
  Synthetic oligonucleotide; GAG chr11 5399824 5399843 5399840 +
aggcagagaaggcagaggag

SEQ ID NO: 28918 - DNA, 20 bp, Artificial Sequence
  Synthetic oligonucleotide; GAG chr11 5399826 5399845 5399842 +
gcagagaaggcagaggagga

SEQ ID NO: 28919 - DNA, 20 bp, Artificial Sequence
  Synthetic oligonucleotide; TAG chr11 5399833 5399852 5399849 +
aggcagaggaggagagactc

SEQ ID NO: 28920 - DNA, 20 bp, Artificial Sequence
  Synthetic oligonucleotide; AAG chr11 5399840 5399859 5399856 +
ggaggagagactctagtttc

SEQ ID NO: 28921 - DNA, 20 bp, Artificial Sequence
  Synthetic oligonucleotide; CAG chr11 5399846 5399865 5399862 +
gagactctagtttcaagtat

SEQ ID NO: 28922 - DNA, 20 bp, Artificial Sequence
  Synthetic oligonucleotide; AAG chr11 5399851 5399870 5399867 +
tctagtttcaagtatcagtc

SEQ ID NO: 28923 - DNA, 20 bp, Artificial Sequence
  Synthetic oligonucleotide; CGG chr11 5399873 5399892 5399889 +
gatttgtttcttccaatatc

SEQ ID NO: 28924 - DNA, 20 bp, Artificial Sequence
  Synthetic oligonucleotide; GAG chr11 5399882 5399901 5399898 +
cttccaatatccggttattt

SEQ ID NO: 28925 - DNA, 20 bp, Artificial Sequence
  Synthetic oligonucleotide; AGG chr11 5399883 5399902 5399899 +
ttccaatatccggttatttg

SEQ ID NO: 28926 - DNA, 20 bp, Artificial Sequence
  Synthetic oligonucleotide; TGG chr11 5399888 5399907 5399904 +
atatccggttatttgaggtg

SEQ ID NO: 28927 - DNA, 20 bp, Artificial Sequence
  Synthetic oligonucleotide; CAG chr11 5399891 5399910 5399907 +
tccggttatttgaggtgtgg

SEQ ID NO: 28928 - DNA, 20 bp, Artificial Sequence
  Synthetic oligonucleotide; AGG chr11 5399892 5399911 5399908 +
ccggttatttgaggtgtggc

SEQ ID NO: 28929 - DNA, 20 bp, Artificial Sequence
  Synthetic oligonucleotide; AAG chr11 5399896 5399915 5399912 +
ttatttgaggtgtggcaggc

SEQ ID NO: 28930 - DNA, 20 bp, Artificial Sequence
  Synthetic oligonucleotide; CAG chr11 5399902 5399921 5399918 +
gaggtgtggcaggcaagata

SEQ ID NO: 28931 - DNA, 20 bp, Artificial Sequence
  Synthetic oligonucleotide; AGG chr11 5399903 5399922 5399919 +
aggtgtggcaggcaagatac

SEQ ID NO: 28932 - DNA, 20 bp, Artificial Sequence
  Synthetic oligonucleotide; GGG chr11 5399904 5399923 5399920 +
ggtgtggcaggcaagataca

SEQ ID NO: 28933 - DNA, 20 bp, Artificial Sequence
  Synthetic oligonucleotide; CAG chr11 5399909 5399928 5399925 +
ggcaggcaagatacagggtg

SEQ ID NO: 28934 - DNA, 20 bp, Artificial Sequence
  Synthetic oligonucleotide; TGG chr11 5399912 5399931 5399928 +
aggcaagatacagggtgcag

SEQ ID NO: 28935 - DNA, 20 bp, Artificial Sequence
  Synthetic oligonucleotide; GGG chr11 5399913 5399932 5399929 +
ggcaagatacagggtgcagt

SEQ ID NO: 28936 - DNA, 20 bp, Artificial Sequence
  Synthetic oligonucleotide; AAG chr11 5399919 5399938 5399935 +
atacagggtgcagtgggatc

SEQ ID NO: 28937 - DNA, 20 bp, Artificial Sequence
  Synthetic oligonucleotide; AGG chr11 5399920 5399939 5399936 +
tacagggtgcagtgggatca

SEQ ID NO: 28938 - DNA, 20 bp, Artificial Sequence
  Synthetic oligonucleotide; CAG chr11 5399926 5399945 5399942 +
gtgcagtgggatcaaggatt

SEQ ID NO: 28939 - DNA, 20 bp, Artificial Sequence
  Synthetic oligonucleotide; AAG chr11 5399930 5399949 5399946 +
agtgggatcaaggattcagt

SEQ ID NO: 28940 - DNA, 20 bp, Artificial Sequence
  Synthetic oligonucleotide; AGG chr11 5399931 5399950 5399947 +
gtgggatcaaggattcagta

SEQ ID NO: 28941 - DNA, 20 bp, Artificial Sequence
  Synthetic oligonucleotide; CAG chr11 5399934 5399953 5399950 +
ggatcaaggattcagtaagg

SEQ ID NO: 28942 - DNA, 20 bp, Artificial Sequence
  Synthetic oligonucleotide; CGG chr11 5399941 5399960 5399957 +
ggattcagtaaggcagcaca

SEQ ID NO: 28943 - DNA, 20 bp, Artificial Sequence
  Synthetic oligonucleotide; GGG chr11 5399942 5399961 5399958 +
gattcagtaaggcagcacac

SEQ ID NO: 28944 - DNA, 20 bp, Artificial Sequence
  Synthetic oligonucleotide; AAG chr11 5399945 5399964 5399961 +
tcagtaaggcagcacacggg

SEQ ID NO: 28945 - DNA, 20 bp, Artificial Sequence
  Synthetic oligonucleotide; CAG chr11 5399950 5399969 5399966 +
aaggcagcacacgggaagaa

SEQ ID NO: 28946 - DNA, 20 bp, Artificial Sequence
  Synthetic oligonucleotide; CAG chr11 5399963 5399982 5399979 +
ggaagaacagctgctcaatc

SEQ ID NO: 28947 - DNA, 20 bp, Artificial Sequence
  Synthetic oligonucleotide; GAG chr11 5399965 5399984 5399981 +
aagaacagctgctcaatcca

SEQ ID NO: 28948 - DNA, 20 bp, Artificial Sequence
  Synthetic oligonucleotide; AGG chr11 5399966 5399985 5399982 +
agaacagctgctcaatccag

SEQ ID NO: 28949 - DNA, 20 bp, Artificial Sequence
  Synthetic oligonucleotide; CAG chr11 5399969 5399988 5399985 +
acagctgctcaatccagagg

SEQ ID NO: 28950 - DNA, 20 bp, Artificial Sequence
  Synthetic oligonucleotide; GAG chr11 5399979 5399998 5399982 -
tattgatctgcctctggatt

SEQ ID NO: 28951 - DNA, 20 bp, Artificial Sequence
  Synthetic oligonucleotide; CAG chr11 5399976 5399995 5399979 -
tgatctgcctctggattgag

SEQ ID NO: 28952 - DNA, 20 bp, Artificial Sequence
  Synthetic oligonucleotide; CGG chr11 5399895 5399914 5399898 -
cctgccacacctcaaataac

SEQ ID NO: 28953 - DNA, 20 bp, Artificial Sequence
  Synthetic oligonucleotide; TGG chr11 5399888 5399907 5399891 -
cacctcaaataaccggatat

SEQ ID NO: 28954 - DNA, 20 bp, Artificial Sequence
  Synthetic oligonucleotide; AAG chr11 5399885 5399904 5399888 -
ctcaaataaccggatattgg

SEQ ID NO: 28955 - DNA, 20 bp, Artificial Sequence
  Synthetic oligonucleotide; TAG chr11 5399855 5399874 5399858 -
tcttgactgatacttgaaac

SEQ ID NO: 28956 - DNA, 20 bp, Artificial Sequence
  Synthetic oligonucleotide; GAG chr11 5399853 5399872 5399856 -
ttgactgatacttgaaacta

SEQ ID NO: 28957 - DNA, 20 bp, Artificial Sequence
  Synthetic oligonucleotide; TGG chr11 5399819 5399838 5399822 -
ctgccttctctgcctgtctg

SEQ ID NO: 28958 - DNA, 20 bp, Artificial Sequence
  Synthetic oligonucleotide; CAG chr11 5399756 5399775 5399759 -
ttttttttttgcatccttct

SEQ ID NO: 28959 - DNA, 20 bp, Artificial Sequence
  Synthetic oligonucleotide; CAG chr11 5399743 5399762 5399746 -
tccttctcagtttccatctc

SEQ ID NO: 28960 - DNA, 20 bp, Artificial Sequence
  Synthetic oligonucleotide; GAG chr11 5399741 5399760 5399744 -
cttctcagtttccatctcca

SEQ ID NO: 28961 - DNA, 20 bp, Artificial Sequence
  Synthetic oligonucleotide; CAG chr11 5399728 5399747 5399731 -
atctccagagtctctaccgc

SEQ ID NO: 28962 - DNA, 20 bp, Artificial Sequence
  Synthetic oligonucleotide; AAG chr11 5399723 5399742 5399726 -
cagagtctctaccgccagat

SEQ ID NO: 28963 - DNA, 20 bp, Artificial Sequence
  Synthetic oligonucleotide; AGG chr11 5399722 5399741 5399725 -
agagtctctaccgccagata

SEQ ID NO: 28964 - DNA, 20 bp, Artificial Sequence
  Synthetic oligonucleotide; GGG chr11 5399721 5399740 5399724 -
gagtctctaccgccagataa

SEQ ID NO: 28965 - DNA, 20 bp, Artificial Sequence
  Synthetic oligonucleotide; CAG chr11 5399717 5399736 5399720 -
ctctaccgccagataagggt

SEQ ID NO: 28966 - DNA, 20 bp, Artificial Sequence
  Synthetic oligonucleotide; AAG chr11 5399704 5399723 5399707 -
taagggtcagatctccttga

SEQ ID NO: 28967 - DNA, 20 bp, Artificial Sequence
  Synthetic oligonucleotide; GAG chr11 5399702 5399721 5399705 -
agggtcagatctccttgaaa

SEQ ID NO: 28968 - DNA, 20 bp, Artificial Sequence
  Synthetic oligonucleotide; GAG chr11 5399675 5399694 5399678 -
taaaacacaatcattctcct

SEQ ID NO: 28969 - DNA, 20 bp, Artificial Sequence
  Synthetic oligonucleotide; TAG chr11 5399670 5399689 5399673 -
cacaatcattctcctgagtt

SEQ ID NO: 28970 - DNA, 20 bp, Artificial Sequence
  Synthetic oligonucleotide; AGG chr11 5399669 5399688 5399672 -
acaatcattctcctgagttt

SEQ ID NO: 28971 - DNA, 20 bp, Artificial Sequence
  Synthetic oligonucleotide; AAG chr11 5399655 5399674 5399658 -
gagtttaggatttgtttgac

SEQ ID NO: 28972 - DNA, 20 bp, Artificial Sequence
  Synthetic oligonucleotide; GAG chr11 5399653 5399672 5399656 -
gtttaggatttgtttgacaa

SEQ ID NO: 28973 - DNA, 20 bp, Artificial Sequence
  Synthetic oligonucleotide; TAG chr11 5399645 5399664 5399648 -
tttgtttgacaagagcattt

SEQ ID NO: 28974 - DNA, 20 bp, Artificial Sequence
  Synthetic oligonucleotide; AAG chr11 5399637 5399656 5399640 -
acaagagcattttagcttga

SEQ ID NO: 28975 - DNA, 20 bp, Artificial Sequence
  Synthetic oligonucleotide; AGG chr11 5399636 5399655 5399639 -
caagagcattttagcttgaa

SEQ ID NO: 28976 - DNA, 20 bp, Artificial Sequence
  Synthetic oligonucleotide; AAG chr11 5399627 5399646 5399630 -
tttagcttgaaaggttacaa

SEQ ID NO: 28977 - DNA, 20 bp, Artificial Sequence
  Synthetic oligonucleotide; AGG chr11 5399626 5399645 5399629 -
ttagcttgaaaggttacaaa

SEQ ID NO: 28978 - DNA, 20 bp, Artificial Sequence
  Synthetic oligonucleotide; GGG chr11 5399625 5399644 5399628 -
tagcttgaaaggttacaaaa

SEQ ID NO: 28979 - DNA, 20 bp, Artificial Sequence
  Synthetic oligonucleotide; TAG chr11 5399616 5399635 5399619 -
aggttacaaaagggatcatg

SEQ ID NO: 28980 - DNA, 20 bp, Artificial Sequence
  Synthetic oligonucleotide; TAG chr11 5399609 5399628 5399612 -
aaaagggatcatgtagtcta

SEQ ID NO: 28981 - DNA, 20 bp, Artificial Sequence
  Synthetic oligonucleotide; CAG chr11 5399604 5399623 5399607 -
ggatcatgtagtctatagcc

SEQ ID NO: 28982 - DNA, 20 bp, Artificial Sequence
  Synthetic oligonucleotide; TAG chr11 5399596 5399615 5399599 -
tagtctatagcccagtataa

SEQ ID NO: 28983 - DNA, 20 bp, Artificial Sequence
  Synthetic oligonucleotide; AGG chr11 5399595 5399614 5399598 -
agtctatagcccagtataat

SEQ ID NO: 28984 - DNA, 20 bp, Artificial Sequence
  Synthetic oligonucleotide; CAG chr11 5399581 5399600 5399584 -
tataataggacacaacaaat

SEQ ID NO: 28985 - DNA, 20 bp, Artificial Sequence
  Synthetic oligonucleotide; AAG chr11 5399573 5399592 5399576 -
gacacaacaaatcagaaaaa

SEQ ID NO: 28986 - DNA, 20 bp, Artificial Sequence
  Synthetic oligonucleotide; TAG chr11 5399570 5399589 5399573 -
acaacaaatcagaaaaaaag

SEQ ID NO: 28987 - DNA, 20 bp, Artificial Sequence
  Synthetic oligonucleotide; TGG chr11 5399563 5399582 5399566 -
atcagaaaaaaagtagaatg

SEQ ID NO: 28988 - DNA, 20 bp, Artificial Sequence
  Synthetic oligonucleotide; GGG chr11 5399562 5399581 5399565 -
tcagaaaaaaagtagaatgt

SEQ ID NO: 28989 - DNA, 20 bp, Artificial Sequence
  Synthetic oligonucleotide; CAG chr11 5399558 5399577 5399561 -
aaaaaaagtagaatgtggga

SEQ ID NO: 28990 - DNA, 20 bp, Artificial Sequence
  Synthetic oligonucleotide; TGG chr11 5399540 5399559 5399543 -
gacagtgatgactgtacccc

SEQ ID NO: 28991 - DNA, 20 bp, Artificial Sequence
  Synthetic oligonucleotide; GAG chr11 5399538 5399557 5399541 -
cagtgatgactgtacccctg

SEQ ID NO: 28992 - DNA, 20 bp, Artificial Sequence
  Synthetic oligonucleotide; TGG chr11 5399534 5399553 5399537 -
gatgactgtacccctggagc

SEQ ID NO: 28993 - DNA, 20 bp, Artificial Sequence
  Synthetic oligonucleotide; CAG chr11 5399530 5399549 5399533 -
actgtacccctggagctgga

SEQ ID NO: 28994 - DNA, 20 bp, Artificial Sequence
  Synthetic oligonucleotide; TGG chr11 5399524 5399543 5399527 -
cccctggagctggacagaat

SEQ ID NO: 28995 - DNA, 20 bp, Artificial Sequence
  Synthetic oligonucleotide; GAG chr11 5399522 5399541 5399525 -
cctggagctggacagaattg

SEQ ID NO: 28996 - DNA, 20 bp, Artificial Sequence
  Synthetic oligonucleotide; AGG chr11 5399521 5399540 5399524 -
ctggagctggacagaattgg

SEQ ID NO: 28997 - DNA, 20 bp, Artificial Sequence
  Synthetic oligonucleotide; CGG chr11 5399505 5399524 5399508 -
ttggaggtgaatcttatgtt

SEQ ID NO: 28998 - DNA, 20 bp, Artificial Sequence
  Synthetic oligonucleotide; TAG chr11 5399470 5399489 5399473 -
tactttacctttgtgcacat

SEQ ID NO: 28999 - DNA, 20 bp, Artificial Sequence
  Synthetic oligonucleotide; AAG chr11 5399453 5399472 5399456 -
cattagtatctttgttttta

SEQ ID NO: 29000 - DNA, 20 bp, Artificial Sequence
  Synthetic oligonucleotide; AAG chr11 5399447 5399466 5399450 -
tatctttgtttttaaagata

SEQ ID NO: 29001 - DNA, 20 bp, Artificial Sequence
  Synthetic oligonucleotide; CAG chr11 5399428 5399447 5399431 -
aaagatgttaatacttacct

SEQ ID NO: 29002 - DNA, 20 bp, Artificial Sequence
  Synthetic oligonucleotide; AGG chr11 5399427 5399446 5399430 -
aagatgttaatacttacctc

SEQ ID NO: 29003 - DNA, 20 bp, Artificial Sequence
  Synthetic oligonucleotide; GGG chr11 5399426 5399445 5399429 -
agatgttaatacttacctca

SEQ ID NO: 29004 - DNA, 20 bp, Artificial Sequence
  Synthetic oligonucleotide; TGG chr11 5399421 5399440 5399424 -
ttaatacttacctcagggac

SEQ ID NO: 29005 - DNA, 20 bp, Artificial Sequence
  Synthetic oligonucleotide; GAG chr11 5399401 5399420 5399404 -
tggctctaaatatttaatgt

SEQ ID NO: 29006 - DNA, 20 bp, Artificial Sequence
  Synthetic oligonucleotide; TAG chr11 5399394 5399413 5399397 -
aaatatttaatgtgagcctt

SEQ ID NO: 29007 - DNA, 20 bp, Artificial Sequence
  Synthetic oligonucleotide; CAG chr11 5399387 5399406 5399390 -
taatgtgagcctttagcaac

SEQ ID NO: 29008 - DNA, 20 bp, Artificial Sequence
  Synthetic oligonucleotide; CAG chr11 5399349 5399368 5399352 -
tctccactctatatctcttt

SEQ ID NO: 29009 - DNA, 20 bp, Artificial Sequence
  Synthetic oligonucleotide; AGG chr11 5399348 5399367 5399351 -
ctccactctatatctctttc

SEQ ID NO: 29010 - DNA, 20 bp, Artificial Sequence
  Synthetic oligonucleotide; CAG chr11 5399339 5399358 5399342 -
atatctctttcaggaattct

SEQ ID NO: 29011 - DNA, 20 bp, Artificial Sequence
  Synthetic oligonucleotide; AGG chr11 5399338 5399357 5399341 -
tatctctttcaggaattctc

SEQ ID NO: 29012 - DNA, 20 bp, Artificial Sequence
  Synthetic oligonucleotide; GAG chr11 5399336 5399355 5399339 -
tctctttcaggaattctcag

SEQ ID NO: 29013 - DNA, 20 bp, Artificial Sequence
  Synthetic oligonucleotide; CAG chr11 5399326 5399345 5399329 -
gaattctcaggagtcaatca

SEQ ID NO: 29014 - DNA, 20 bp, Artificial Sequence
  Synthetic oligonucleotide; CAG chr11 5399322 5399341 5399325 -
tctcaggagtcaatcacagt

SEQ ID NO: 29015 - DNA, 20 bp, Artificial Sequence
  Synthetic oligonucleotide; TGG chr11 5399277 5399296 5399280 -
taattgtctttccttgttat

SEQ ID NO: 29016 - DNA, 20 bp, Artificial Sequence
  Synthetic oligonucleotide; CAG chr11 5399262 5399281 5399265 -
gttattggctcactgatact

SEQ ID NO: 29017 - DNA, 20 bp, Artificial Sequence
  Synthetic oligonucleotide; GAG chr11 5399248 5399267 5399251 -
gatactcagaccacatctgt

SEQ ID NO: 29018 - DNA, 20 bp, Artificial Sequence
  Synthetic oligonucleotide; AGG chr11 5399247 5399266 5399250 -
atactcagaccacatctgtg

SEQ ID NO: 29019 - DNA, 20 bp, Artificial Sequence
  Synthetic oligonucleotide; AAG chr11 5399239 5399258 5399242 -
accacatctgtgaggtaaac

SEQ ID NO: 29020 - DNA, 20 bp, Artificial Sequence
  Synthetic oligonucleotide; AGG chr11 5399238 5399257 5399241 -
ccacatctgtgaggtaaaca

SEQ ID NO: 29021 - DNA, 20 bp, Artificial Sequence
  Synthetic oligonucleotide; GAG chr11 5399236 5399255 5399239 -
acatctgtgaggtaaacaag

SEQ ID NO: 29022 - DNA, 20 bp, Artificial Sequence
  Synthetic oligonucleotide; AAG chr11 5399231 5399250 5399234 -
tgtgaggtaaacaaggagac

SEQ ID NO: 29023 - DNA, 20 bp, Artificial Sequence
  Synthetic oligonucleotide; TAG chr11 5399214 5399233 5399217 -
gacaagaatttcccacttaa

SEQ ID NO: 29024 - DNA, 20 bp, Artificial Sequence
  Synthetic oligonucleotide; GAG chr11 5399209 5399228 5399212 -
gaatttcccacttaatagat

SEQ ID NO: 29025 - DNA, 20 bp, Artificial Sequence
  Synthetic oligonucleotide; CAG chr11 5399197 5399216 5399200 -
taatagatgagcatataaac

SEQ ID NO: 29026 - DNA, 20 bp, Artificial Sequence
  Synthetic oligonucleotide; AAG chr11 5399190 5399209 5399193 -
tgagcatataaaccagacat

SEQ ID NO: 29027 - DNA, 20 bp, Artificial Sequence
  Synthetic oligonucleotide; GAG chr11 5399179 5399198 5399182 -
accagacataagcattttgt

SEQ ID NO: 29028 - DNA, 20 bp, Artificial Sequence
  Synthetic oligonucleotide; AAG chr11 5399170 5399189 5399173 -
aagcattttgtgagtaaccc

SEQ ID NO: 29029 - DNA, 20 bp, Artificial Sequence
  Synthetic oligonucleotide; TGG chr11 5399158 5399177 5399161 -
agtaacccaagataatatga

SEQ ID NO: 29030 - DNA, 20 bp, Artificial Sequence
  Synthetic oligonucleotide; AAG chr11 5399143 5399162 5399146 -
tatgatggcaaaactatttc

SEQ ID NO: 29031 - DNA, 20 bp, Artificial Sequence
  Synthetic oligonucleotide; TGG chr11 5399124 5399143 5399127 -
caagaattcatgatgtgctc

SEQ ID NO: 29032 - DNA, 20 bp, Artificial Sequence
  Synthetic oligonucleotide; TAG chr11 5399088 5399107 5399091 -
ttttccatctgccaccaatt

SEQ ID NO: 29033 - DNA, 20 bp, Artificial Sequence
  Synthetic oligonucleotide; AGG chr11 5399087 5399106 5399090 -
tttccatctgccaccaattt

SEQ ID NO: 29034 - DNA, 20 bp, Artificial Sequence
  Synthetic oligonucleotide; CAG chr11 5399063 5399082 5399066 -
tgtgattcctctccttctgc

SEQ ID NO: 29035 - DNA, 20 bp, Artificial Sequence
  Synthetic oligonucleotide; CAG chr11 5399059 5399078 5399062 -
attcctctccttctgccaga

SEQ ID NO: 29036 - DNA, 20 bp, Artificial Sequence
  Synthetic oligonucleotide; AGG chr11 5399058 5399077 5399061 -
ttcctctccttctgccagac

SEQ ID NO: 29037 - DNA, 20 bp, Artificial Sequence
  Synthetic oligonucleotide; AAG chr11 5399052 5399071 5399055 -
tccttctgccagacaggttc

SEQ ID NO: 29038 - DNA, 20 bp, Artificial Sequence
  Synthetic oligonucleotide; AAG chr11 5399049 5399068 5399052 -
ttctgccagacaggttcaag

SEQ ID NO: 29039 - DNA, 20 bp, Artificial Sequence
  Synthetic oligonucleotide; TAG chr11 5399045 5399064 5399048 -
gccagacaggttcaagaagc

SEQ ID NO: 29040 - DNA, 20 bp, Artificial Sequence
  Synthetic oligonucleotide; AGG chr11 5399044 5399063 5399047 -
ccagacaggttcaagaagct

SEQ ID NO: 29041 - DNA, 20 bp, Artificial Sequence
  Synthetic oligonucleotide; GGG chr11 5399043 5399062 5399046 -
cagacaggttcaagaagcta

SEQ ID NO: 29042 - DNA, 20 bp, Artificial Sequence
  Synthetic oligonucleotide; GAG chr11 5399041 5399060 5399044 -
gacaggttcaagaagctagg

SEQ ID NO: 29043 - DNA, 20 bp, Artificial Sequence
  Synthetic oligonucleotide; AGG chr11 5399040 5399059 5399043 -
acaggttcaagaagctaggg

SEQ ID NO: 29044 - DNA, 20 bp, Artificial Sequence
  Synthetic oligonucleotide; TAG chr11 5399025 5399044 5399028 -
tagggaggtgactactgtct

SEQ ID NO: 29045 - DNA, 20 bp, Artificial Sequence
  Synthetic oligonucleotide; AGG chr11 5399024 5399043 5399027 -
agggaggtgactactgtctt

SEQ ID NO: 29046 - DNA, 20 bp, Artificial Sequence
  Synthetic oligonucleotide; AAG chr11 5399012 5399031 5399015 -
actgtcttaggaaaaatgct

SEQ ID NO: 29047 - DNA, 20 bp, Artificial Sequence
  Synthetic oligonucleotide; AGG chr11 5399011 5399030 5399014 -
ctgtcttaggaaaaatgcta

SEQ ID NO: 29048 - DNA, 20 bp, Artificial Sequence
  Synthetic oligonucleotide; GGG chr11 5399010 5399029 5399013 -
tgtcttaggaaaaatgctaa

SEQ ID NO: 29049 - DNA, 20 bp, Artificial Sequence
  Synthetic oligonucleotide; TGG chr11 5398992 5399011 5398995 -
aagggcttcacactgtgaca

SEQ ID NO: 29050 - DNA, 20 bp, Artificial Sequence
  Synthetic oligonucleotide; GGG chr11 5398991 5399010 5398994 -
agggcttcacactgtgacat

SEQ ID NO: 29051 - DNA, 20 bp, Artificial Sequence
  Synthetic oligonucleotide; GGG chr11 5398990 5399009 5398993 -
gggcttcacactgtgacatg

SEQ ID NO: 29052 - DNA, 20 bp, Artificial Sequence
  Synthetic oligonucleotide; TGG chr11 5398986 5399005 5398989 -
ttcacactgtgacatggggt

SEQ ID NO: 29053 - DNA, 20 bp, Artificial Sequence
  Synthetic oligonucleotide; GGG chr11 5398985 5399004 5398988 -
tcacactgtgacatggggtt

SEQ ID NO: 29054 - DNA, 20 bp, Artificial Sequence
  Synthetic oligonucleotide; GAG chr11 5398983 5399002 5398986 -
acactgtgacatggggttgg

SEQ ID NO: 29055 - DNA, 20 bp, Artificial Sequence
  Synthetic oligonucleotide; CAG chr11 5398965 5398984 5398968 -
gggagtcctgaatgctgctt

SEQ ID NO: 29056 - DNA, 20 bp, Artificial Sequence
  Synthetic oligonucleotide; AAG chr11 5398962 5398981 5398965 -
agtcctgaatgctgcttcag

SEQ ID NO: 29057 - DNA, 20 bp, Artificial Sequence
  Synthetic oligonucleotide; AGG chr11 5398961 5398980 5398964 -
gtcctgaatgctgcttcaga

SEQ ID NO: 29058 - DNA, 20 bp, Artificial Sequence
  Synthetic oligonucleotide; CAG chr11 5398958 5398977 5398961 -
ctgaatgctgcttcagaagg

SEQ ID NO: 29059 - DNA, 20 bp, Artificial Sequence
  Synthetic oligonucleotide; AGG chr11 5398957 5398976 5398960 -
tgaatgctgcttcagaaggc

SEQ ID NO: 29060 - DNA, 20 bp, Artificial Sequence
  Synthetic oligonucleotide; GGG chr11 5398956 5398975 5398959 -
gaatgctgcttcagaaggca

SEQ ID NO: 29061 - DNA, 20 bp, Artificial Sequence
  Synthetic oligonucleotide; TGG chr11 5398951 5398970 5398954 -
ctgcttcagaaggcagggct

SEQ ID NO: 29062 - DNA, 20 bp, Artificial Sequence
  Synthetic oligonucleotide; GGG chr11 5398950 5398969 5398953 -
tgcttcagaaggcagggctt

SEQ ID NO: 29063 - DNA, 20 bp, Artificial Sequence
  Synthetic oligonucleotide; GGG chr11 5398949 5398968 5398952 -
gcttcagaaggcagggcttg

SEQ ID NO: 29064 - DNA, 20 bp, Artificial Sequence
  Synthetic oligonucleotide; TAG chr11 5398939 5398958 5398942 -
gcagggcttggggattgtat

SEQ ID NO: 29065 - DNA, 20 bp, Artificial Sequence
  Synthetic oligonucleotide; AAG chr11 5398916 5398935 5398919 -
ttcattctcacactgctcta

SEQ ID NO: 29066 - DNA, 20 bp, Artificial Sequence
  Synthetic oligonucleotide; GAG chr11 5398904 5398923 5398907 -
ctgctctaaagatactacct

SEQ ID NO: 29067 - DNA, 20 bp, Artificial Sequence
  Synthetic oligonucleotide; TGG chr11 5398899 5398918 5398902 -
ctaaagatactacctgagac

SEQ ID NO: 29068 - DNA, 20 bp, Artificial Sequence
  Synthetic oligonucleotide; GGG chr11 5398898 5398917 5398901 -
taaagatactacctgagact

SEQ ID NO: 29069 - DNA, 20 bp, Artificial Sequence
  Synthetic oligonucleotide; AAG chr11 5398882 5398901 5398885 -
gactgggtaatttattaaca

SEQ ID NO: 29070 - DNA, 20 bp, Artificial Sequence
  Synthetic oligonucleotide; AGG chr11 5398881 5398900 5398884 -
actgggtaatttattaacaa

SEQ ID NO: 29071 - DNA, 20 bp, Artificial Sequence
  Synthetic oligonucleotide; GAG chr11 5398879 5398898 5398882 -
tgggtaatttattaacaaag

SEQ ID NO: 29072 - DNA, 20 bp, Artificial Sequence
  Synthetic oligonucleotide; AGG chr11 5398878 5398897 5398881 -
gggtaatttattaacaaagg

SEQ ID NO: 29073 - DNA, 20 bp, Artificial Sequence
  Synthetic oligonucleotide; TAG chr11 5398852 5398871 5398855 -
aattgactcacatttccaca

SEQ ID NO: 29074 - DNA, 20 bp, Artificial Sequence
  Synthetic oligonucleotide; TGG chr11 5398848 5398867 5398851 -
gactcacatttccacatagc

SEQ ID NO: 29075 - DNA, 20 bp, Artificial Sequence
  Synthetic oligonucleotide; GGG chr11 5398847 5398866 5398850 -
actcacatttccacatagct

SEQ ID NO: 29076 - DNA, 20 bp, Artificial Sequence
  Synthetic oligonucleotide; GGG chr11 5398846 5398865 5398849 -
ctcacatttccacatagctg

SEQ ID NO: 29077 - DNA, 20 bp, Artificial Sequence
  Synthetic oligonucleotide; GAG chr11 5398844 5398863 5398847 -
cacatttccacatagctggg

SEQ ID NO: 29078 - DNA, 20 bp, Artificial Sequence
  Synthetic oligonucleotide; AGG chr11 5398843 5398862 5398846 -
acatttccacatagctgggg

SEQ ID NO: 29079 - DNA, 20 bp, Artificial Sequence
  Synthetic oligonucleotide; CAG chr11 5398837 5398856 5398840 -
ccacatagctggggaggcct

SEQ ID NO: 29080 - DNA, 20 bp, Artificial Sequence
  Synthetic oligonucleotide; AGG chr11 5398836 5398855 5398839 -
cacatagctggggaggcctc

SEQ ID NO: 29081 - DNA, 20 bp, Artificial Sequence
  Synthetic oligonucleotide; TGG chr11 5398820 5398839 5398823 -
cctcaggaaacttacaatta

SEQ ID NO: 29082 - DNA, 20 bp, Artificial Sequence
  Synthetic oligonucleotide; CAG chr11 5398817 5398836 5398820 -
caggaaacttacaattatgg

SEQ ID NO: 29083 - DNA, 20 bp, Artificial Sequence
  Synthetic oligonucleotide; AAG chr11 5398814 5398833 5398817 -
gaaacttacaattatggcag

SEQ ID NO: 29084 - DNA, 20 bp, Artificial Sequence
  Synthetic oligonucleotide; AGG chr11 5398813 5398832 5398816 -
aaacttacaattatggcaga

SEQ ID NO: 29085 - DNA, 20 bp, Artificial Sequence
  Synthetic oligonucleotide; GAG chr11 5398811 5398830 5398814 -
acttacaattatggcagaag

SEQ ID NO: 29086 - DNA, 20 bp, Artificial Sequence
  Synthetic oligonucleotide; AAG chr11 5398808 5398827 5398811 -
tacaattatggcagaaggag

SEQ ID NO: 29087 - DNA, 20 bp, Artificial Sequence
  Synthetic oligonucleotide; CAG chr11 5398805 5398824 5398808 -
aattatggcagaaggagaag

SEQ ID NO: 29088 - DNA, 20 bp, Artificial Sequence
  Synthetic oligonucleotide; AGG chr11 5398804 5398823 5398807 -
attatggcagaaggagaagc

SEQ ID NO: 29089 - DNA, 20 bp, Artificial Sequence
  Synthetic oligonucleotide; TGG chr11 5398790 5398809 5398793 -
agaagcaggcacatcttact

SEQ ID NO: 29090 - DNA, 20 bp, Artificial Sequence
  Synthetic oligonucleotide; TGG chr11 5398787 5398806 5398790 -
agcaggcacatcttacttgg

SEQ ID NO: 29091 - DNA, 20 bp, Artificial Sequence
  Synthetic oligonucleotide; CAG chr11 5398784 5398803 5398787 -
aggcacatcttacttggtgg

SEQ ID NO: 29092 - DNA, 20 bp, Artificial Sequence
  Synthetic oligonucleotide; AGG chr11 5398783 5398802 5398786 -
ggcacatcttacttggtggc

SEQ ID NO: 29093 - DNA, 20 bp, Artificial Sequence
  Synthetic oligonucleotide; AAG chr11 5398779 5398798 5398782 -
catcttacttggtggcaggc

SEQ ID NO: 29094 - DNA, 20 bp, Artificial Sequence
  Synthetic oligonucleotide; GAG chr11 5398777 5398796 5398780 -
tcttacttggtggcaggcaa

SEQ ID NO: 29095 - DNA, 20 bp, Artificial Sequence
  Synthetic oligonucleotide; GAG chr11 5398775 5398794 5398778 -
ttacttggtggcaggcaaga

SEQ ID NO: 29096 - DNA, 20 bp, Artificial Sequence
  Synthetic oligonucleotide; GAG chr11 5398773 5398792 5398776 -
acttggtggcaggcaagaga

SEQ ID NO: 29097 - DNA, 20 bp, Artificial Sequence
  Synthetic oligonucleotide; GAG chr11 5398769 5398788 5398772 -
ggtggcaggcaagagagagt

SEQ ID NO: 29098 - DNA, 20 bp, Artificial Sequence
  Synthetic oligonucleotide; AAG chr11 5398765 5398784 5398768 -
gcaggcaagagagagtgagc

SEQ ID NO: 29099 - DNA, 20 bp, Artificial Sequence
  Synthetic oligonucleotide; AAG chr11 5398762 5398781 5398765 -
ggcaagagagagtgagcaag

SEQ ID NO: 29100 - DNA, 20 bp, Artificial Sequence
  Synthetic oligonucleotide; GAG chr11 5398760 5398779 5398763 -
caagagagagtgagcaagaa

SEQ ID NO: 29101 - DNA, 20 bp, Artificial Sequence
  Synthetic oligonucleotide; AGG chr11 5398759 5398778 5398762 -
aagagagagtgagcaagaag

SEQ ID NO: 29102 - DNA, 20 bp, Artificial Sequence
  Synthetic oligonucleotide; GGG chr11 5398758 5398777 5398761 -
agagagagtgagcaagaaga

SEQ ID NO: 29103 - DNA, 20 bp, Artificial Sequence
  Synthetic oligonucleotide; CAG chr11 5398734 5398753 5398737 -
aaactgccttataaaaccat

SEQ ID NO: 29104 - DNA, 20 bp, Artificial Sequence
  Synthetic oligonucleotide; CAG chr11 5398713 5398732 5398716 -
agatctcatgaaaactcact

SEQ ID NO: 29105 - DNA, 20 bp, Artificial Sequence
  Synthetic oligonucleotide; GAG chr11 5398704 5398723 5398707 -
gaaaactcactcagtatcac

SEQ ID NO: 29106 - DNA, 20 bp, Artificial Sequence
  Synthetic oligonucleotide; TGG chr11 5398694 5398713 5398697 -
tcagtatcacgagaactgca

SEQ ID NO: 29107 - DNA, 20 bp, Artificial Sequence
  Synthetic oligonucleotide; GGG chr11 5398693 5398712 5398696 -
cagtatcacgagaactgcat

SEQ ID NO: 29108 - DNA, 20 bp, Artificial Sequence
  Synthetic oligonucleotide; GGG chr11 5398692 5398711 5398695 -
agtatcacgagaactgcatg

SEQ ID NO: 29109 - DNA, 20 bp, Artificial Sequence
  Synthetic oligonucleotide; GGG chr11 5398691 5398710 5398694 -
gtatcacgagaactgcatgg

SEQ ID NO: 29110 - DNA, 20 bp, Artificial Sequence
  Synthetic oligonucleotide; TGG chr11 5398656 5398675 5398659 -
tgatccaataatctcccacc

SEQ ID NO: 29111 - DNA, 20 bp, Artificial Sequence
  Synthetic oligonucleotide; TAG chr11 5398637 5398656 5398640 -
ctggtccctcccccgacata

SEQ ID NO: 29112 - DNA, 20 bp, Artificial Sequence
  Synthetic oligonucleotide; AGG chr11 5398636 5398655 5398639 -
tggtccctcccccgacatat

SEQ ID NO: 29113 - DNA, 20 bp, Artificial Sequence
  Synthetic oligonucleotide; GGG chr11 5398635 5398654 5398638 -
ggtccctcccccgacatata

SEQ ID NO: 29114 - DNA, 20 bp, Artificial Sequence
  Synthetic oligonucleotide; TGG chr11 5398628 5398647 5398631 -
cccccgacatatagggatta

SEQ ID NO: 29115 - DNA, 20 bp, Artificial Sequence
  Synthetic oligonucleotide; GGG chr11 5398627 5398646 5398630 -
ccccgacatatagggattat

SEQ ID NO: 29116 - DNA, 20 bp, Artificial Sequence
  Synthetic oligonucleotide; GGG chr11 5398626 5398645 5398629 -
cccgacatatagggattatg

SEQ ID NO: 29117 - DNA, 20 bp, Artificial Sequence
  Synthetic oligonucleotide; TGG chr11 5398602 5398621 5398605 -
ttacaattcaatatgaaatt

SEQ ID NO: 29118 - DNA, 20 bp, Artificial Sequence
  Synthetic oligonucleotide; GGG chr11 5398601 5398620 5398604 -
tacaattcaatatgaaattt

SEQ ID NO: 29119 - DNA, 20 bp, Artificial Sequence
  Synthetic oligonucleotide; TGG chr11 5398598 5398617 5398601 -
aattcaatatgaaatttggg

SEQ ID NO: 29120 - DNA, 20 bp, Artificial Sequence
  Synthetic oligonucleotide; GAG chr11 5398596 5398615 5398599 -
ttcaatatgaaatttgggtg

SEQ ID NO: 29121 - DNA, 20 bp, Artificial Sequence
  Synthetic oligonucleotide; CAG chr11 5398590 5398609 5398593 -
atgaaatttgggtggagaca

SEQ ID NO: 29122 - DNA, 20 bp, Artificial Sequence
  Synthetic oligonucleotide; GAG chr11 5398588 5398607 5398591 -
gaaatttgggtggagacaca

SEQ ID NO: 29123 - DNA, 20 bp, Artificial Sequence
  Synthetic oligonucleotide; AAG chr11 5398583 5398602 5398586 -
ttgggtggagacacagagcc

SEQ ID NO: 29124 - DNA, 20 bp, Artificial Sequence
  Synthetic oligonucleotide; CAG chr11 5398574 5398593 5398577 -
gacacagagccaagccatat

SEQ ID NO: 29125 - DNA, 20 bp, Artificial Sequence
  Synthetic oligonucleotide; AGG chr11 5398573 5398592 5398576 -
acacagagccaagccatatc

SEQ ID NO: 29126 - DNA, 20 bp, Artificial Sequence
  Synthetic oligonucleotide; GGG chr11 5398572 5398591 5398575 -
cacagagccaagccatatca

SEQ ID NO: 29127 - DNA, 20 bp, Artificial Sequence
  Synthetic oligonucleotide; TGG chr11 5398565 5398584 5398568 -
ccaagccatatcagggatca

SEQ ID NO: 29128 - DNA, 20 bp, Artificial Sequence
  Synthetic oligonucleotide; GGG chr11 5398564 5398583 5398567 -
caagccatatcagggatcat

SEQ ID NO: 29129 - DNA, 20 bp, Artificial Sequence
  Synthetic oligonucleotide; AAG chr11 5398545 5398564 5398548 -
tgggcttgtgcactcaccac

SEQ ID NO: 29130 - DNA, 20 bp, Artificial Sequence
  Synthetic oligonucleotide; TGG chr11 5398536 5398555 5398539 -
gcactcaccacaagtgaaac

SEQ ID NO: 29131 - DNA, 20 bp, Artificial Sequence
  Synthetic oligonucleotide; GAG chr11 5398528 5398547 5398531 -
cacaagtgaaactggcctct

SEQ ID NO: 29132 - DNA, 20 bp, Artificial Sequence
  Synthetic oligonucleotide; CAG chr11 5398522 5398541 5398525 -
tgaaactggcctctgagcct

SEQ ID NO: 29133 - DNA, 20 bp, Artificial Sequence
  Synthetic oligonucleotide; AGG chr11 5398521 5398540 5398524 -
gaaactggcctctgagcctc

SEQ ID NO: 29134 - DNA, 20 bp, Artificial Sequence
  Synthetic oligonucleotide; TGG chr11 5398518 5398537 5398521 -
actggcctctgagcctcagg

SEQ ID NO: 29135 - DNA, 20 bp, Artificial Sequence
  Synthetic oligonucleotide; GGG chr11 5398517 5398536 5398520 -
ctggcctctgagcctcaggt

SEQ ID NO: 29136 - DNA, 20 bp, Artificial Sequence
  Synthetic oligonucleotide; TGG chr11 5398513 5398532 5398516 -
cctctgagcctcaggtggga

SEQ ID NO: 29137 - DNA, 20 bp, Artificial Sequence
  Synthetic oligonucleotide; GGG chr11 5398512 5398531 5398515 -
ctctgagcctcaggtgggat

SEQ ID NO: 29138 - DNA, 20 bp, Artificial Sequence
  Synthetic oligonucleotide; GGG chr11 5398511 5398530 5398514 -
tctgagcctcaggtgggatg

SEQ ID NO: 29139 - DNA, 20 bp, Artificial Sequence
  Synthetic oligonucleotide; AAG chr11 5398508 5398527 5398511 -
gagcctcaggtgggatgggg

SEQ ID NO: 29140 - DNA, 20 bp, Artificial Sequence
  Synthetic oligonucleotide; CAG chr11 5398498 5398517 5398501 -
tgggatggggaagctcactt

SEQ ID NO: 29141 - DNA, 20 bp, Artificial Sequence
  Synthetic oligonucleotide; AAG chr11 5398494 5398513 5398497 -
atggggaagctcacttcagc

SEQ ID NO: 29142 - DNA, 20 bp, Artificial Sequence
  Synthetic oligonucleotide; TGG chr11 5398479 5398498 5398482 -
tcagcaagtccctgccactg

SEQ ID NO: 29143 - DNA, 20 bp, Artificial Sequence
  Synthetic oligonucleotide; TAG chr11 5398462 5398481 5398465 -
ctgtggcattcatatcttct

SEQ ID NO: 29144 - DNA, 20 bp, Artificial Sequence
  Synthetic oligonucleotide; TGG chr11 5398456 5398475 5398459 -
cattcatatcttcttagtcc

SEQ ID NO: 29145 - DNA, 20 bp, Artificial Sequence
  Synthetic oligonucleotide; GGG chr11 5398455 5398474 5398458 -
attcatatcttcttagtcct

SEQ ID NO: 29146 - DNA, 20 bp, Artificial Sequence
  Synthetic oligonucleotide; GGG chr11 5398454 5398473 5398457 -
ttcatatcttcttagtcctg

SEQ ID NO: 29147 - DNA, 20 bp, Artificial Sequence
  Synthetic oligonucleotide; TGG chr11 5398450 5398469 5398453 -
tatcttcttagtcctggggc

SEQ ID NO: 29148 - DNA, 20 bp, Artificial Sequence
  Synthetic oligonucleotide; AAG chr11 5398426 5398445 5398429 -
atgctgcccattttttgaaa

SEQ ID NO: 29149 - DNA, 20 bp, Artificial Sequence
  Synthetic oligonucleotide; CAG chr11 5398418 5398437 5398421 -
cattttttgaaaaagctgat

SEQ ID NO: 29150 - DNA, 20 bp, Artificial Sequence
  Synthetic oligonucleotide; GAG chr11 5398416 5398435 5398419 -
ttttttgaaaaagctgatca

SEQ ID NO: 29151 - DNA, 20 bp, Artificial Sequence
  Synthetic oligonucleotide; TAG chr11 5398409 5398428 5398412 -
aaaaagctgatcagagtctc

SEQ ID NO: 29152 - DNA, 20 bp, Artificial Sequence
  Synthetic oligonucleotide; AGG chr11 5398408 5398427 5398411 -
aaaagctgatcagagtctct

SEQ ID NO: 29153 - DNA, 20 bp, Artificial Sequence
  Synthetic oligonucleotide; GAG chr11 5398406 5398425 5398409 -
aagctgatcagagtctctag

SEQ ID NO: 29154 - DNA, 20 bp, Artificial Sequence
  Synthetic oligonucleotide; TAG chr11 5398403 5398422 5398406 -
ctgatcagagtctctaggag

SEQ ID NO: 29155 - DNA, 20 bp, Artificial Sequence
  Synthetic oligonucleotide; GAG chr11 5398401 5398420 5398404 -
gatcagagtctctaggagta

SEQ ID NO: 29156 - DNA, 20 bp, Artificial Sequence
  Synthetic oligonucleotide; TGG chr11 5398395 5398414 5398398 -
agtctctaggagtagagtaa

SEQ ID NO: 29157 - DNA, 20 bp, Artificial Sequence
  Synthetic oligonucleotide; GGG chr11 5398394 5398413 5398397 -
gtctctaggagtagagtaat

SEQ ID NO: 29158 - DNA, 20 bp, Artificial Sequence
  Synthetic oligonucleotide; GGG chr11 5398393 5398412 5398396 -
tctctaggagtagagtaatg

SEQ ID NO: 29159 - DNA, 20 bp, Artificial Sequence
  Synthetic oligonucleotide; GAG chr11 5398391 5398410 5398394 -
tctaggagtagagtaatggg

SEQ ID NO: 29160 - DNA, 20 bp, Artificial Sequence
  Synthetic oligonucleotide; AAG chr11 5398387 5398406 5398390 -
ggagtagagtaatggggaga

SEQ ID NO: 29161 - DNA, 20 bp, Artificial Sequence
  Synthetic oligonucleotide; TAG chr11 5398383 5398402 5398386 -
tagagtaatggggagaaagt

SEQ ID NO: 29162 - DNA, 20 bp, Artificial Sequence
  Synthetic oligonucleotide; AGG chr11 5398382 5398401 5398385 -
agagtaatggggagaaagtt

SEQ ID NO: 29163 - DNA, 20 bp, Artificial Sequence
  Synthetic oligonucleotide; GAG chr11 5398373 5398392 5398376 -
gggagaaagttaggttccct

SEQ ID NO: 29164 - DNA, 20 bp, Artificial Sequence
  Synthetic oligonucleotide; AGG chr11 5398372 5398391 5398375 -
ggagaaagttaggttccctg

SEQ ID NO: 29165 - DNA, 20 bp, Artificial Sequence
  Synthetic oligonucleotide; GAG chr11 5398370 5398389 5398373 -
agaaagttaggttccctgag

SEQ ID NO: 29166 - DNA, 20 bp, Artificial Sequence
  Synthetic oligonucleotide; CAG chr11 5398359 5398378 5398362 -
ttccctgaggagcaattacc

SEQ ID NO: 29167 - DNA, 20 bp, Artificial Sequence
  Synthetic oligonucleotide; AGG chr11 5398358 5398377 5398361 -
tccctgaggagcaattaccc

SEQ ID NO: 29168 - DNA, 20 bp, Artificial Sequence
  Synthetic oligonucleotide; TAG chr11 5398346 5398365 5398349 -
aattacccaggtaattacat

SEQ ID NO: 29169 - DNA, 20 bp, Artificial Sequence
  Synthetic oligonucleotide; CAG chr11 5398329 5398348 5398332 -
cattagcctctctcaatatc

SEQ ID NO: 29170 - DNA, 20 bp, Artificial Sequence
  Synthetic oligonucleotide; GAG chr11 5398327 5398346 5398330 -
ttagcctctctcaatatcca

SEQ ID NO: 29171 - DNA, 20 bp, Artificial Sequence
  Synthetic oligonucleotide; AAG chr11 5398319 5398338 5398322 -
tctcaatatccagagaacct

SEQ ID NO: 29172 - DNA, 20 bp, Artificial Sequence
  Synthetic oligonucleotide; AGG chr11 5398318 5398337 5398321 -
ctcaatatccagagaaccta

SEQ ID NO: 29173 - DNA, 20 bp, Artificial Sequence
  Synthetic oligonucleotide; GGG chr11 5398317 5398336 5398320 -
tcaatatccagagaacctaa

SEQ ID NO: 29174 - DNA, 20 bp, Artificial Sequence
  Synthetic oligonucleotide; AAG chr11 5398310 5398329 5398313 -
ccagagaacctaagggaaac

SEQ ID NO: 29175 - DNA, 20 bp, Artificial Sequence
  Synthetic oligonucleotide; AAG chr11 5398305 5398324 5398308 -
gaacctaagggaaacaagca

SEQ ID NO: 29176 - DNA, 20 bp, Artificial Sequence
  Synthetic oligonucleotide; TAG chr11 5398299 5398318 5398302 -
aagggaaacaagcaaagata

SEQ ID NO: 29177 - DNA, 20 bp, Artificial Sequence
  Synthetic oligonucleotide; GAG chr11 5398297 5398316 5398300 -
gggaaacaagcaaagatata

SEQ ID NO: 29178 - DNA, 20 bp, Artificial Sequence
  Synthetic oligonucleotide; CAG chr11 5398293 5398312 5398296 -
aacaagcaaagatatagagt

SEQ ID NO: 29179 - DNA, 20 bp, Artificial Sequence
  Synthetic oligonucleotide; GAG chr11 5398276 5398295 5398279 -
agtcagtatctttgtgaaat

SEQ ID NO: 29180 - DNA, 20 bp, Artificial Sequence
  Synthetic oligonucleotide; TAG chr11 5398268 5398287 5398271 -
tctttgtgaaatgagtgtaa

SEQ ID NO: 29181 - DNA, 20 bp, Artificial Sequence
  Synthetic oligonucleotide; CAG chr11 5398257 5398276 5398260 -
tgagtgtaatagtatttatc

SEQ ID NO: 29182 - DNA, 20 bp, Artificial Sequence
  Synthetic oligonucleotide; AAG chr11 5398192 5398211 5398195 -
ttattttttgttatactttt

SEQ ID NO: 29183 - DNA, 20 bp, Artificial Sequence
  Synthetic oligonucleotide; TAG chr11 5398186 5398205 5398189 -
tttgttatacttttaagttt

SEQ ID NO: 29184 - DNA, 20 bp, Artificial Sequence
  Synthetic oligonucleotide; AGG chr11 5398185 5398204 5398188 -
ttgttatacttttaagtttt

SEQ ID NO: 29185 - DNA, 20 bp, Artificial Sequence
  Synthetic oligonucleotide; GGG chr11 5398184 5398203 5398187 -
tgttatacttttaagtttta

SEQ ID NO: 29186 - DNA, 20 bp, Artificial Sequence
  Synthetic oligonucleotide; AAG chr11 5398170 5398189 5398173 -
gttttagggtacatgtgcac

SEQ ID NO: 29187 - DNA, 20 bp, Artificial Sequence
  Synthetic oligonucleotide; AGG chr11 5398169 5398188 5398172 -
ttttagggtacatgtgcaca

SEQ ID NO: 29188 - DNA, 20 bp, Artificial Sequence
  Synthetic oligonucleotide; CAG chr11 5398164 5398183 5398167 -
gggtacatgtgcacaaggtg

SEQ ID NO: 29189 - DNA, 20 bp, Artificial Sequence
  Synthetic oligonucleotide; AGG chr11 5398163 5398182 5398166 -
ggtacatgtgcacaaggtgc

SEQ ID NO: 29190 - DNA, 20 bp, Artificial Sequence
  Synthetic oligonucleotide; TAG chr11 5398159 5398178 5398162 -
catgtgcacaaggtgcaggt

SEQ ID NO: 29191 - DNA, 20 bp, Artificial Sequence
  Synthetic oligonucleotide; TGG chr11 5398131 5398150 5398134 -
tatgtatacatgtgccatgt

SEQ ID NO: 29192 - DNA, 20 bp, Artificial Sequence
  Synthetic oligonucleotide; TAG chr11 5398096 5398115 5398099 -
attaactcaccatttaacat

SEQ ID NO: 29193 - DNA, 20 bp, Artificial Sequence
  Synthetic oligonucleotide; AGG chr11 5398095 5398114 5398098 -
ttaactcaccatttaacatt

SEQ ID NO: 29194 - DNA, 20 bp, Artificial Sequence
  Synthetic oligonucleotide; CAG chr11 5398048 5398067 5398051 -
cccctcctcccaccccacaa

SEQ ID NO: 29195 - DNA, 20 bp, Artificial Sequence
  Synthetic oligonucleotide; AGG chr11 5398047 5398066 5398050 -
ccctcctcccaccccacaac

SEQ ID NO: 29196 - DNA, 20 bp, Artificial Sequence
  Synthetic oligonucleotide; CGG chr11 5398041 5398060 5398044 -
tcccaccccacaacaggccc

SEQ ID NO: 29197 - DNA, 20 bp, Artificial Sequence
  Synthetic oligonucleotide; CAG chr11 5397996 5398015 5397999 -
gtccatgtgttctcattgtt

SEQ ID NO: 29198 - DNA, 20 bp, Artificial Sequence
  Synthetic oligonucleotide; GAG chr11 5397982 5398001 5397985 -
attgttcagttcccacctat

SEQ ID NO: 29199 - DNA, 20 bp, Artificial Sequence
  Synthetic oligonucleotide; GAG chr11 5397978 5397997 5397981 -
ttcagttcccacctatgagt

SEQ ID NO: 29200 - DNA, 20 bp, Artificial Sequence
  Synthetic oligonucleotide; TGG chr11 5397969 5397988 5397972 -
cacctatgagtgagaacatg

SEQ ID NO: 29201 - DNA, 20 bp, Artificial Sequence
  Synthetic oligonucleotide; TGG chr11 5397962 5397981 5397965 -
gagtgagaacatgtggtgtt

SEQ ID NO: 29202 - DNA, 20 bp, Artificial Sequence
  Synthetic oligonucleotide; TAG chr11 5397943 5397962 5397946 -
ttggctttttgtccttgtga

SEQ ID NO: 29203 - DNA, 20 bp, Artificial Sequence
  Synthetic oligonucleotide; GAG chr11 5397934 5397953 5397937 -
tgtccttgtgatagtttgct

SEQ ID NO: 29204 - DNA, 20 bp, Artificial Sequence
  Synthetic oligonucleotide; TGG chr11 5397926 5397945 5397929 -
tgatagtttgctgagaatga

SEQ ID NO: 29205 - DNA, 20 bp, Artificial Sequence
  Synthetic oligonucleotide; CAG chr11 5397919 5397938 5397922 -
ttgctgagaatgatggtttc

SEQ ID NO: 29206 - DNA, 20 bp, Artificial Sequence
  Synthetic oligonucleotide; AAG chr11 5397897 5397916 5397900 -
gcttcatccatgtccctaca

SEQ ID NO: 29207 - DNA, 20 bp, Artificial Sequence
  Synthetic oligonucleotide; AGG chr11 5397896 5397915 5397899 -
cttcatccatgtccctacaa

SEQ ID NO: 29208 - DNA, 20 bp, Artificial Sequence
  Synthetic oligonucleotide; TGG chr11 5397872 5397891 5397875 -
catgaactcatcatttttta

SEQ ID NO: 29209 - DNA, 20 bp, Artificial Sequence
  Synthetic oligonucleotide; TAG chr11 5397864 5397883 5397867 -
catcattttttatggctgca

SEQ ID NO: 29210 - DNA, 20 bp, Artificial Sequence
  Synthetic oligonucleotide; TGG chr11 5397854 5397873 5397857 -
tatggctgcatagtattcca

SEQ ID NO: 29211 - DNA, 20 bp, Artificial Sequence
  Synthetic oligonucleotide; CAG chr11 5397825 5397844 5397828 -
tgtgccacattttcttaatc

SEQ ID NO: 29212 - DNA, 20 bp, Artificial Sequence
  Synthetic oligonucleotide; TGG chr11 5397811 5397830 5397814 -
ttaatccagtctatcattgt

SEQ ID NO: 29213 - DNA, 20 bp, Artificial Sequence
  Synthetic oligonucleotide; TGG chr11 5397803 5397822 5397806 -
gtctatcattgttggacatt

SEQ ID NO: 29214 - DNA, 20 bp, Artificial Sequence
  Synthetic oligonucleotide; GGG chr11 5397802 5397821 5397805 -
tctatcattgttggacattt

SEQ ID NO: 29215 - DNA, 20 bp, Artificial Sequence
  Synthetic oligonucleotide; TGG chr11 5397798 5397817 5397801 -
tcattgttggacatttgggt

SEQ ID NO: 29216 - DNA, 20 bp, Artificial Sequence
  Synthetic oligonucleotide; AAG chr11 5397791 5397810 5397794 -
tggacatttgggttggttcc

SEQ ID NO: 29217 - DNA, 20 bp, Artificial Sequence
  Synthetic oligonucleotide; TAG chr11 5397772 5397791 5397775 -
caagtctttgctattgtgaa

SEQ ID NO: 29218 - DNA, 20 bp, Artificial Sequence
  Synthetic oligonucleotide; TAG chr11 5397735 5397754 5397738 -
tacgtgtgcatgtgtcttta

SEQ ID NO: 29219 - DNA, 20 bp, Artificial Sequence
  Synthetic oligonucleotide; CAG chr11 5397732 5397751 5397735 -
gtgtgcatgtgtctttatag

SEQ ID NO: 29220 - DNA, 20 bp, Artificial Sequence
  Synthetic oligonucleotide; TGG chr11 5397712 5397731 5397715 -
cagcatgatttataatcctt

SEQ ID NO: 29221 - DNA, 20 bp, Artificial Sequence
  Synthetic oligonucleotide; GGG chr11 5397711 5397730 5397714 -
agcatgatttataatccttt

SEQ ID NO: 29222 - DNA, 20 bp, Artificial Sequence
  Synthetic oligonucleotide; CAG chr11 5397700 5397719 5397703 -
taatcctttgggtgtatacc

SEQ ID NO: 29223 - DNA, 20 bp, Artificial Sequence
  Synthetic oligonucleotide; TGG chr11 5397694 5397713 5397697 -
tttgggtgtatacccagtaa

SEQ ID NO: 29224 - DNA, 20 bp, Artificial Sequence
  Synthetic oligonucleotide; GGG chr11 5397693 5397712 5397696 -
ttgggtgtatacccagtaat

SEQ ID NO: 29225 - DNA, 20 bp, Artificial Sequence
  Synthetic oligonucleotide; TGG chr11 5397689 5397708 5397692 -
gtgtatacccagtaatggga

SEQ ID NO: 29226 - DNA, 20 bp, Artificial Sequence
  Synthetic oligonucleotide; TGG chr11 5397685 5397704 5397688 -
atacccagtaatgggatggc

SEQ ID NO: 29227 - DNA, 20 bp, Artificial Sequence
  Synthetic oligonucleotide; GGG chr11 5397684 5397703 5397687 -
tacccagtaatgggatggct

SEQ ID NO: 29228 - DNA, 20 bp, Artificial Sequence
  Synthetic oligonucleotide; TGG chr11 5397676 5397695 5397679 -
aatgggatggctgggtcaaa

SEQ ID NO: 29229 - DNA, 20 bp, Artificial Sequence
  Synthetic oligonucleotide; TAG chr11 5397667 5397686 5397670 -
gctgggtcaaatggtatttc

SEQ ID NO: 29230 - DNA, 20 bp, Artificial Sequence
  Synthetic oligonucleotide; TAG chr11 5397661 5397680 5397664 -
tcaaatggtatttctagttc

SEQ ID NO: 29231 - DNA, 20 bp, Artificial Sequence
  Synthetic oligonucleotide; GAG chr11 5397652 5397671 5397655 -
atttctagttctagatccct

SEQ ID NO: 29232 - DNA, 20 bp, Artificial Sequence
  Synthetic oligonucleotide; AGG chr11 5397651 5397670 5397654 -
tttctagttctagatccctg

SEQ ID NO: 29233 - DNA, 20 bp, Artificial Sequence
  Synthetic oligonucleotide; TAG chr11 5397616 5397635 5397619 -
gacttccacaatgtttgaac

SEQ ID NO: 29234 - DNA, 20 bp, Artificial Sequence
  Synthetic oligonucleotide; CAG chr11 5397609 5397628 5397612 -
acaatgtttgaactagttta

SEQ ID NO: 29235 - DNA, 20 bp, Artificial Sequence
  Synthetic oligonucleotide; CAG chr11 5397597 5397616 5397600 -
ctagtttacagtcccaccaa

SEQ ID NO: 29236 - DNA, 20 bp, Artificial Sequence
  Synthetic oligonucleotide; AAG chr11 5397589 5397608 5397592 -
cagtcccaccaacagtgtaa

SEQ ID NO: 29237 - DNA, 20 bp, Artificial Sequence
  Synthetic oligonucleotide; CAG chr11 5397561 5397580 5397564 -
ctatttctccacatcctctc

SEQ ID NO: 29238 - DNA, 20 bp, Artificial Sequence
  Synthetic oligonucleotide; TGG chr11 5397517 5397536 5397520 -
ttaatgattgccattctaac

SEQ ID NO: 29239 - DNA, 20 bp, Artificial Sequence
  Synthetic oligonucleotide; GAG chr11 5397511 5397530 5397514 -
attgccattctaactggtgt

SEQ ID NO: 29240 - DNA, 20 bp, Artificial Sequence
  Synthetic oligonucleotide; TGG chr11 5397507 5397526 5397510 -
ccattctaactggtgtgaga

SEQ ID NO: 29241 - DNA, 20 bp, Artificial Sequence
  Synthetic oligonucleotide; TGG chr11 5397494 5397513 5397497 -
tgtgagatggtatctcattg

SEQ ID NO: 29242 - DNA, 20 bp, Artificial Sequence
  Synthetic oligonucleotide; TGG chr11 5397470 5397489 5397473 -
tttgatttgcatttctctga

SEQ ID NO: 29243 - DNA, 20 bp, Artificial Sequence
  Synthetic oligonucleotide; CAG chr11 5397466 5397485 5397469 -
atttgcatttctctgatggc

SEQ ID NO: 29244 - DNA, 20 bp, Artificial Sequence
  Synthetic oligonucleotide; GAG chr11 5397456 5397475 5397459 -
ctctgatggccagtgatgat

SEQ ID NO: 29245 - DNA, 20 bp, Artificial Sequence
  Synthetic oligonucleotide; TGG chr11 5397434 5397453 5397437 -
gcattttttcatgtgtcttt

SEQ ID NO: 29246 - DNA, 20 bp, Artificial Sequence
  Synthetic oligonucleotide; GAG chr11 5397411 5397430 5397414 -
ctgcataaatgtcttctttt

SEQ ID NO: 29247 - DNA, 20 bp, Artificial Sequence
  Synthetic oligonucleotide; AAG chr11 5397408 5397427 5397411 -
cataaatgtcttcttttgag

SEQ ID NO: 29248 - DNA, 20 bp, Artificial Sequence
  Synthetic oligonucleotide; TGG chr11 5397374 5397393 5397377 -
atcctttgcccactttttga

SEQ ID NO: 29249 - DNA, 20 bp, Artificial Sequence
  Synthetic oligonucleotide; GGG chr11 5397373 5397392 5397376 -
tcctttgcccactttttgat

SEQ ID NO: 29250 - DNA, 20 bp, Artificial Sequence
  Synthetic oligonucleotide; GGG chr11 5397372 5397391 5397375 -
cctttgcccactttttgatg

SEQ ID NO: 29251 - DNA, 20 bp, Artificial Sequence
  Synthetic oligonucleotide; GAG chr11 5397344 5397363 5397347 -
tttctcttgtaaatttgttt

SEQ ID NO: 29252 - DNA, 20 bp, Artificial Sequence
  Synthetic oligonucleotide; TAG chr11 5397334 5397353 5397337 -
aaatttgtttgagttcattg

SEQ ID NO: 29253 - DNA, 20 bp, Artificial Sequence
  Synthetic oligonucleotide; TGG chr11 5397327 5397346 5397330 -
tttgagttcattgtagattc

SEQ ID NO: 29254 - DNA, 20 bp, Artificial Sequence
  Synthetic oligonucleotide; TAG chr11 5397320 5397339 5397323 -
tcattgtagattctggatat

SEQ ID NO: 29255 - DNA, 20 bp, Artificial Sequence
  Synthetic oligonucleotide; CAG chr11 5397309 5397328 5397312 -
tctggatattagccctttgt

SEQ ID NO: 29256 - DNA, 20 bp, Artificial Sequence
  Synthetic oligonucleotide; GAG chr11 5397304 5397323 5397307 -
atattagccctttgtcagat

SEQ ID NO: 29257 - DNA, 20 bp, Artificial Sequence
  Synthetic oligonucleotide; TAG chr11 5397301 5397320 5397304 -
ttagccctttgtcagatgag

SEQ ID NO: 29258 - DNA, 20 bp, Artificial Sequence
  Synthetic oligonucleotide; TAG chr11 5397273 5397292 5397276 -
aaaaattttctcccattgtg

SEQ ID NO: 29259 - DNA, 20 bp, Artificial Sequence
  Synthetic oligonucleotide; AGG chr11 5397272 5397291 5397275 -
aaaattttctcccattgtgt

SEQ ID NO: 29260 - DNA, 20 bp, Artificial Sequence
  Synthetic oligonucleotide; TGG chr11 5397252 5397271 5397255 -
aggttgcctgttcactctga

SEQ ID NO: 29261 - DNA, 20 bp, Artificial Sequence
  Synthetic oligonucleotide; TAG chr11 5397249 5397268 5397252 -
ttgcctgttcactctgatgg

SEQ ID NO: 29262 - DNA, 20 bp, Artificial Sequence
  Synthetic oligonucleotide; CAG chr11 5397232 5397251 5397235 -
tggtagtttcttttgctgtg

SEQ ID NO: 29263 - DNA, 20 bp, Artificial Sequence
  Synthetic oligonucleotide; AAG chr11 5397229 5397248 5397232 -
tagtttcttttgctgtgcag

SEQ ID NO: 29264 - DNA, 20 bp, Artificial Sequence
  Synthetic oligonucleotide; TAG chr11 5397221 5397240 5397224 -
tttgctgtgcagaagatctt

SEQ ID NO: 29265 - DNA, 20 bp, Artificial Sequence
  Synthetic oligonucleotide; TAG chr11 5397212 5397231 5397215 -
cagaagatctttagtttaat

SEQ ID NO: 29266 - DNA, 20 bp, Artificial Sequence
  Synthetic oligonucleotide; TAG chr11 5397202 5397221 5397205 -
ttagtttaattagatcccat

SEQ ID NO: 29267 - DNA, 20 bp, Artificial Sequence
  Synthetic oligonucleotide; TGG chr11 5397192 5397211 5397195 -
tagatcccattagtgaattt

SEQ ID NO: 29268 - DNA, 20 bp, Artificial Sequence
  Synthetic oligonucleotide; TGG chr11 5397170 5397189 5397173 -
gcttttgttgccattgcttt

SEQ ID NO: 29269 - DNA, 20 bp, Artificial Sequence
  Synthetic oligonucleotide; TAG chr11 5397162 5397181 5397165 -
tgccattgcttttggtgttt

SEQ ID NO: 29270 - DNA, 20 bp, Artificial Sequence
  Synthetic oligonucleotide; AAG chr11 5397154 5397173 5397157 -
cttttggtgttttagacatg

SEQ ID NO: 29271 - DNA, 20 bp, Artificial Sequence
  Synthetic oligonucleotide; TGG chr11 5397126 5397145 5397129 -
gcccatgcctatgtcctgaa

SEQ ID NO: 29272 - DNA, 20 bp, Artificial Sequence
  Synthetic oligonucleotide; TAG chr11 5397116 5397135 5397119 -
atgtcctgaatggtattgct

SEQ ID NO: 29273 - DNA, 20 bp, Artificial Sequence
  Synthetic oligonucleotide; AGG chr11 5397115 5397134 5397118 -
tgtcctgaatggtattgctt

SEQ ID NO: 29274 - DNA, 20 bp, Artificial Sequence
  Synthetic oligonucleotide; TAG chr11 5397104 5397123 5397107 -
gtattgcttaggttttcttc

SEQ ID NO: 29275 - DNA, 20 bp, Artificial Sequence
  Synthetic oligonucleotide; GAG chr11 5397102 5397121 5397105 -
attgcttaggttttcttcta

SEQ ID NO: 29276 - DNA, 20 bp, Artificial Sequence
  Synthetic oligonucleotide; TGG chr11 5397093 5397112 5397096 -
gttttcttctagagttttta

SEQ ID NO: 29277 - DNA, 20 bp, Artificial Sequence
  Synthetic oligonucleotide; TAG chr11 5397087 5397106 5397090 -
ttctagagtttttatggttt

SEQ ID NO: 29278 - DNA, 20 bp, Artificial Sequence
  Synthetic oligonucleotide; AGG chr11 5397086 5397105 5397089 -
tctagagtttttatggtttt

SEQ ID NO: 29279 - DNA, 20 bp, Artificial Sequence
  Synthetic oligonucleotide; AAG chr11 5397073 5397092 5397076 -
tggttttaggtctaacattt

SEQ ID NO: 29280 - DNA, 20 bp, Artificial Sequence
  Synthetic oligonucleotide; GAG chr11 5397055 5397074 5397058 -
ttaagtctttaatccatctt

SEQ ID NO: 29281 - DNA, 20 bp, Artificial Sequence
  Synthetic oligonucleotide; AAG chr11 5397039 5397058 5397042 -
tcttgagttaatttttgtat

SEQ ID NO: 29282 - DNA, 20 bp, Artificial Sequence
  Synthetic oligonucleotide; AGG chr11 5397038 5397057 5397041 -
cttgagttaatttttgtata

SEQ ID NO: 29283 - DNA, 20 bp, Artificial Sequence
  Synthetic oligonucleotide; AAG chr11 5397032 5397051 5397035 -
ttaatttttgtataaggtgt

SEQ ID NO: 29284 - DNA, 20 bp, Artificial Sequence
  Synthetic oligonucleotide; AGG chr11 5397031 5397050 5397034 -
taatttttgtataaggtgta

SEQ ID NO: 29285 - DNA, 20 bp, Artificial Sequence
  Synthetic oligonucleotide; AAG chr11 5397028 5397047 5397031 -
tttttgtataaggtgtaagg

SEQ ID NO: 29286 - DNA, 20 bp, Artificial Sequence
  Synthetic oligonucleotide; AGG chr11 5397027 5397046 5397030 -
ttttgtataaggtgtaagga

SEQ ID NO: 29287 - DNA, 20 bp, Artificial Sequence
  Synthetic oligonucleotide; GGG chr11 5397026 5397045 5397029 -
tttgtataaggtgtaaggaa

SEQ ID NO: 29288 - DNA, 20 bp, Artificial Sequence
  Synthetic oligonucleotide; CAG chr11 5397020 5397039 5397023 -
taaggtgtaaggaagggatc

SEQ ID NO: 29289 - DNA, 20 bp, Artificial Sequence
  Synthetic oligonucleotide; CAG chr11 5397014 5397033 5397017 -
gtaaggaagggatccagttt

SEQ ID NO: 29290 - DNA, 20 bp, Artificial Sequence
  Synthetic oligonucleotide; TGG chr11 5397000 5397019 5397003 -
cagtttcagcttcctacatt

SEQ ID NO: 29291 - DNA, 20 bp, Artificial Sequence
  Synthetic oligonucleotide; TAG chr11 5396996 5397015 5396999 -
ttcagcttcctacatttggc

SEQ ID NO: 29292 - DNA, 20 bp, Artificial Sequence
  Synthetic oligonucleotide; CAG chr11 5396992 5397011 5396995 -
gcttcctacatttggctagc

SEQ ID NO: 29293 - DNA, 20 bp, Artificial Sequence
  Synthetic oligonucleotide; CAG chr11 5396983 5397002 5396986 -
atttggctagccagttttcc

SEQ ID NO: 29294 - DNA, 20 bp, Artificial Sequence
  Synthetic oligonucleotide; CAG chr11 5396966 5396985 5396969 -
tcccagcaccatttattaaa

SEQ ID NO: 29295 - DNA, 20 bp, Artificial Sequence
  Synthetic oligonucleotide; AGG chr11 5396965 5396984 5396968 -
cccagcaccatttattaaac

SEQ ID NO: 29296 - DNA, 20 bp, Artificial Sequence
  Synthetic oligonucleotide; GGG chr11 5396964 5396983 5396967 -
ccagcaccatttattaaaca

SEQ ID NO: 29297 - DNA, 20 bp, Artificial Sequence
  Synthetic oligonucleotide; CAG chr11 5396934 5396953 5396937 -
tccccatttcttgtttttct

SEQ ID NO: 29298 - DNA, 20 bp, Artificial Sequence
  Synthetic oligonucleotide; AGG chr11 5396933 5396952 5396936 -
ccccatttcttgtttttctc

SEQ ID NO: 29299 - DNA, 20 bp, Artificial Sequence
  Synthetic oligonucleotide; AAG chr11 5396923 5396942 5396926 -
tgtttttctcaggtttgtca

SEQ ID NO: 29300 - DNA, 20 bp, Artificial Sequence
  Synthetic oligonucleotide; CAG chr11 5396918 5396937 5396921 -
ttctcaggtttgtcaaagat

SEQ ID NO: 29301 - DNA, 20 bp, Artificial Sequence
  Synthetic oligonucleotide; TAG chr11 5396914 5396933 5396917 -
caggtttgtcaaagatcaga

SEQ ID NO: 29302 - DNA, 20 bp, Artificial Sequence
  Synthetic oligonucleotide; TAG chr11 5396908 5396927 5396911 -
tgtcaaagatcagatagttg

SEQ ID NO: 29303 - DNA, 20 bp, Artificial Sequence
  Synthetic oligonucleotide; TAG chr11 5396904 5396923 5396907 -
aaagatcagatagttgtaga

SEQ ID NO: 29304 - DNA, 20 bp, Artificial Sequence
  Synthetic oligonucleotide; CAG chr11 5396900 5396919 5396903 -
atcagatagttgtagataga

SEQ ID NO: 29305 - DNA, 20 bp, Artificial Sequence
  Synthetic oligonucleotide; GAG chr11 5396887 5396906 5396890 -
agatagacagcattatttct

SEQ ID NO: 29306 - DNA, 20 bp, Artificial Sequence
  Synthetic oligonucleotide; AGG chr11 5396886 5396905 5396889 -
gatagacagcattatttctg

SEQ ID NO: 29307 - DNA, 20 bp, Artificial Sequence
  Synthetic oligonucleotide; GGG chr11 5396885 5396904 5396888 -
atagacagcattatttctga

SEQ ID NO: 29308 - DNA, 20 bp, Artificial Sequence
  Synthetic oligonucleotide; TGG chr11 5396866 5396885 5396869 -
agggctctgttttgttccat

SEQ ID NO: 29309 - DNA, 20 bp, Artificial Sequence
  Synthetic oligonucleotide; TGG chr11 5396848 5396867 5396851 -
attggtctatatctctgttt

SEQ ID NO: 29310 - DNA, 20 bp, Artificial Sequence
  Synthetic oligonucleotide; CAG chr11 5396842 5396861 5396845 -
ctatatctctgttttggtac

SEQ ID NO: 29311 - DNA, 20 bp, Artificial Sequence
  Synthetic oligonucleotide; TGG chr11 5396826 5396845 5396829 -
gtaccagtactatgctgttt

SEQ ID NO: 29312 - DNA, 20 bp, Artificial Sequence
  Synthetic oligonucleotide; TAG chr11 5396817 5396836 5396820 -
ctatgctgttttggttactg

SEQ ID NO: 29313 - DNA, 20 bp, Artificial Sequence
  Synthetic oligonucleotide; TAG chr11 5396809 5396828 5396812 -
ttttggttactgtagccttg

SEQ ID NO: 29314 - DNA, 20 bp, Artificial Sequence
  Synthetic oligonucleotide; TAG chr11 5396804 5396823 5396807 -
gttactgtagccttgtagta

SEQ ID NO: 29315 - DNA, 20 bp, Artificial Sequence
  Synthetic oligonucleotide; CAG chr11 5396793 5396812 5396796 -
cttgtagtatagtttgaaat

SEQ ID NO: 29316 - DNA, 20 bp, Artificial Sequence
  Synthetic oligonucleotide; AGG chr11 5396792 5396811 5396795 -
ttgtagtatagtttgaaatc

SEQ ID NO: 29317 - DNA, 20 bp, Artificial Sequence
  Synthetic oligonucleotide; TAG chr11 5396789 5396808 5396792 -
tagtatagtttgaaatcagg

SEQ ID NO: 29318 - DNA, 20 bp, Artificial Sequence
  Synthetic oligonucleotide; CAG chr11 5396775 5396794 5396778 -
atcaggtagtgtgatgcctc

SEQ ID NO: 29319 - DNA, 20 bp, Artificial Sequence
  Synthetic oligonucleotide; TGG chr11 5396761 5396780 5396764 -
tgcctccagctttgttcttt

SEQ ID NO: 29320 - DNA, 20 bp, Artificial Sequence
  Synthetic oligonucleotide; TAG chr11 5396756 5396775 5396759 -
ccagctttgttcttttggct

SEQ ID NO: 29321 - DNA, 20 bp, Artificial Sequence
  Synthetic oligonucleotide; AGG chr11 5396755 5396774 5396758 -
cagctttgttcttttggctt

SEQ ID NO: 29322 - DNA, 20 bp, Artificial Sequence
  Synthetic oligonucleotide; TGG chr11 5396745 5396764 5396748 -
cttttggcttaggattgact

SEQ ID NO: 29323 - DNA, 20 bp, Artificial Sequence
  Synthetic oligonucleotide; CGG chr11 5396737 5396756 5396740 -
ttaggattgacttggcgatg

SEQ ID NO: 29324 - DNA, 20 bp, Artificial Sequence
  Synthetic oligonucleotide; GGG chr11 5396736 5396755 5396739 -
taggattgacttggcgatgc

SEQ ID NO: 29325 - DNA, 20 bp, Artificial Sequence
  Synthetic oligonucleotide; TGG chr11 5396725 5396744 5396728 -
tggcgatgcgggctcttttt

SEQ ID NO: 29326 - DNA, 20 bp, Artificial Sequence
  Synthetic oligonucleotide; AAG chr11 5396706 5396725 5396709 -
ttggttccatatgaacttta

SEQ ID NO: 29327 - DNA, 20 bp, Artificial Sequence
  Synthetic oligonucleotide; TAG chr11 5396703 5396722 5396706 -
gttccatatgaactttaaag

SEQ ID NO: 29328 - DNA, 20 bp, Artificial Sequence
  Synthetic oligonucleotide; AAG chr11 5396683 5396702 5396686 -
tagttttttccaattctgtg

SEQ ID NO: 29329 - DNA, 20 bp, Artificial Sequence
  Synthetic oligonucleotide; AAG chr11 5396679 5396698 5396682 -
tttttccaattctgtgaaga

SEQ ID NO: 29330 - DNA, 20 bp, Artificial Sequence
  Synthetic oligonucleotide; TGG chr11 5396672 5396691 5396675 -
aattctgtgaagaaagtcat

SEQ ID NO: 29331 - DNA, 20 bp, Artificial Sequence
  Synthetic oligonucleotide; TAG chr11 5396669 5396688 5396672 -
tctgtgaagaaagtcattgg

SEQ ID NO: 29332 - DNA, 20 bp, Artificial Sequence
  Synthetic oligonucleotide; TGG chr11 5396661 5396680 5396664 -
gaaagtcattggtagcttga

SEQ ID NO: 29333 - DNA, 20 bp, Artificial Sequence
  Synthetic oligonucleotide; GGG chr11 5396660 5396679 5396663 -
aaagtcattggtagcttgat

SEQ ID NO: 29334 - DNA, 20 bp, Artificial Sequence
  Synthetic oligonucleotide; GGG chr11 5396659 5396678 5396662 -
aagtcattggtagcttgatg

SEQ ID NO: 29335 - DNA, 20 bp, Artificial Sequence
  Synthetic oligonucleotide; TGG chr11 5396655 5396674 5396658 -
cattggtagcttgatgggga

SEQ ID NO: 29336 - DNA, 20 bp, Artificial Sequence
  Synthetic oligonucleotide; TGG chr11 5396631 5396650 5396634 -
attgaatctataaattacct

SEQ ID NO: 29337 - DNA, 20 bp, Artificial Sequence
  Synthetic oligonucleotide; GGG chr11 5396630 5396649 5396633 -
ttgaatctataaattacctt

SEQ ID NO: 29338 - DNA, 20 bp, Artificial Sequence
  Synthetic oligonucleotide; CAG chr11 5396627 5396646 5396630 -
aatctataaattaccttggg

SEQ ID NO: 29339 - DNA, 20 bp, Artificial Sequence
  Synthetic oligonucleotide; TGG chr11 5396622 5396641 5396625 -
ataaattaccttgggcagta

SEQ ID NO: 29340 - DNA, 20 bp, Artificial Sequence
  Synthetic oligonucleotide; GAG chr11 5396587 5396606 5396590 -
tattgtttcttcctatccat

SEQ ID NO: 29341 - DNA, 20 bp, Artificial Sequence
  Synthetic oligonucleotide; TGG chr11 5396582 5396601 5396585 -
tttcttcctatccatgagca

SEQ ID NO: 29342 - DNA, 20 bp, Artificial Sequence
  Synthetic oligonucleotide; GAG chr11 5396545 5396564 5396548 -
tgtttgtatcttatttcctt

SEQ ID NO: 29343 - DNA, 20 bp, Artificial Sequence
  Synthetic oligonucleotide; CAG chr11 5396542 5396561 5396545 -
ttgtatcttatttccttgag

SEQ ID NO: 29344 - DNA, 20 bp, Artificial Sequence
  Synthetic oligonucleotide; TGG chr11 5396539 5396558 5396542 -
tatcttatttccttgagcag

SEQ ID NO: 29345 - DNA, 20 bp, Artificial Sequence
  Synthetic oligonucleotide; TAG chr11 5396532 5396551 5396535 -
tttccttgagcagtggtttg

SEQ ID NO: 29346 - DNA, 20 bp, Artificial Sequence
  Synthetic oligonucleotide; AAG chr11 5396520 5396539 5396523 -
gtggtttgtagttctccttg

SEQ ID NO: 29347 - DNA, 20 bp, Artificial Sequence
  Synthetic oligonucleotide; GAG chr11 5396518 5396537 5396521 -
ggtttgtagttctccttgaa

SEQ ID NO: 29348 - DNA, 20 bp, Artificial Sequence
  Synthetic oligonucleotide; AGG chr11 5396517 5396536 5396520 -
gtttgtagttctccttgaag

SEQ ID NO: 29349 - DNA, 20 bp, Artificial Sequence
  Synthetic oligonucleotide; AAG chr11 5396497 5396516 5396500 -
aggtccttcacatcccttgt

SEQ ID NO: 29350 - DNA, 20 bp, Artificial Sequence
  Synthetic oligonucleotide; TGG chr11 5396493 5396512 5396496 -
ccttcacatcccttgtaagt

SEQ ID NO: 29351 - DNA, 20 bp, Artificial Sequence
  Synthetic oligonucleotide; TAG chr11 5396485 5396504 5396488 -
tcccttgtaagttggattcc

SEQ ID NO: 29352 - DNA, 20 bp, Artificial Sequence
  Synthetic oligonucleotide; AGG chr11 5396484 5396503 5396487 -
cccttgtaagttggattcct

SEQ ID NO: 29353 - DNA, 20 bp, Artificial Sequence
  Synthetic oligonucleotide; AAG chr11 5396465 5396484 5396468 -
taggtattatattctctctg

SEQ ID NO: 29354 - DNA, 20 bp, Artificial Sequence
  Synthetic oligonucleotide; TGG chr11 5396452 5396471 5396455 -
ctctctgaagcaattgtgaa

SEQ ID NO: 29355 - DNA, 20 bp, Artificial Sequence
  Synthetic oligonucleotide; GGG chr11 5396451 5396470 5396454 -
tctctgaagcaattgtgaat

SEQ ID NO: 29356 - DNA, 20 bp, Artificial Sequence
  Synthetic oligonucleotide; GAG chr11 5396449 5396468 5396452 -
tctgaagcaattgtgaatgg

SEQ ID NO: 29357 - DNA, 20 bp, Artificial Sequence
  Synthetic oligonucleotide; TGG chr11 5396423 5396442 5396426 -
actcactgtttgtctgttat

SEQ ID NO: 29358 - DNA, 20 bp, Artificial Sequence
  Synthetic oligonucleotide; AAG chr11 5396415 5396434 5396418 -
tttgtctgttattggtgtat

SEQ ID NO: 29359 - DNA, 20 bp, Artificial Sequence
  Synthetic oligonucleotide; GAG chr11 5396376 5396395 5396379 -
gcacattgattttgtatcct

SEQ ID NO: 29360 - DNA, 20 bp, Artificial Sequence
  Synthetic oligonucleotide; AAG chr11 5396364 5396383 5396367 -
tgtatcctgagactttgctg

SEQ ID NO: 29361 - DNA, 20 bp, Artificial Sequence
  Synthetic oligonucleotide; CAG chr11 5396353 5396372 5396356 -
actttgctgaagttgcttat

SEQ ID NO: 29362 - DNA, 20 bp, Artificial Sequence
  Synthetic oligonucleotide; AAG chr11 5396347 5396366 5396350 -
ctgaagttgcttatcagctt

SEQ ID NO: 29363 - DNA, 20 bp, Artificial Sequence
  Synthetic oligonucleotide; AGG chr11 5396346 5396365 5396349 -
tgaagttgcttatcagctta

SEQ ID NO: 29364 - DNA, 20 bp, Artificial Sequence
  Synthetic oligonucleotide; GGG chr11 5396345 5396364 5396348 -
gaagttgcttatcagcttaa

SEQ ID NO: 29365 - DNA, 20 bp, Artificial Sequence
  Synthetic oligonucleotide; GGG chr11 5396344 5396363 5396347 -
aagttgcttatcagcttaag

SEQ ID NO: 29366 - DNA, 20 bp, Artificial Sequence
  Synthetic oligonucleotide; TGG chr11 5396337 5396356 5396340 -
ttatcagcttaaggggattt

SEQ ID NO: 29367 - DNA, 20 bp, Artificial Sequence
  Synthetic oligonucleotide; GGG chr11 5396336 5396355 5396339 -
tatcagcttaaggggatttt

SEQ ID NO: 29368 - DNA, 20 bp, Artificial Sequence
  Synthetic oligonucleotide; GAG chr11 5396331 5396350 5396334 -
gcttaaggggattttgggct

SEQ ID NO: 29369 - DNA, 20 bp, Artificial Sequence
  Synthetic oligonucleotide; TGG chr11 5396324 5396343 5396327 -
gggattttgggctgagacaa

SEQ ID NO: 29370 - DNA, 20 bp, Artificial Sequence
  Synthetic oligonucleotide; GGG chr11 5396323 5396342 5396326 -
ggattttgggctgagacaat

SEQ ID NO: 29371 - DNA, 20 bp, Artificial Sequence
  Synthetic oligonucleotide; GGG chr11 5396322 5396341 5396325 -
gattttgggctgagacaatg

SEQ ID NO: 29372 - DNA, 20 bp, Artificial Sequence
  Synthetic oligonucleotide; TAG chr11 5396314 5396333 5396317 -
gctgagacaatggggttttc

SEQ ID NO: 29373 - DNA, 20 bp, Artificial Sequence
  Synthetic oligonucleotide; CAG chr11 5396287 5396306 5396290 -
gcaatcacgtcatctgcaaa

SEQ ID NO: 29374 - DNA, 20 bp, Artificial Sequence
  Synthetic oligonucleotide; AGG chr11 5396286 5396305 5396289 -
caatcacgtcatctgcaaac

SEQ ID NO: 29375 - DNA, 20 bp, Artificial Sequence
  Synthetic oligonucleotide; GGG chr11 5396285 5396304 5396288 -
aatcacgtcatctgcaaaca

SEQ ID NO: 29376 - DNA, 20 bp, Artificial Sequence
  Synthetic oligonucleotide; CGG chr11 5396220 5396239 5396223 -
ccttctcctgcccgattgcc

SEQ ID NO: 29377 - DNA, 20 bp, Artificial Sequence
  Synthetic oligonucleotide; GGG chr11 5396219 5396238 5396222 -
cttctcctgcccgattgccc

SEQ ID NO: 29378 - DNA, 20 bp, Artificial Sequence
  Synthetic oligonucleotide; CAG chr11 5396215 5396234 5396218 -
tcctgcccgattgcccgggc

SEQ ID NO: 29379 - DNA, 20 bp, Artificial Sequence
  Synthetic oligonucleotide; TAG chr11 5396191 5396210 5396194 -
acttccaacactatgttgaa

SEQ ID NO: 29380 - DNA, 20 bp, Artificial Sequence
  Synthetic oligonucleotide; AGG chr11 5396190 5396209 5396193 -
cttccaacactatgttgaat

SEQ ID NO: 29381 - DNA, 20 bp, Artificial Sequence
  Synthetic oligonucleotide; GAG chr11 5396188 5396207 5396191 -
tccaacactatgttgaatag

SEQ ID NO: 29382 - DNA, 20 bp, Artificial Sequence
  Synthetic oligonucleotide; TGG chr11 5396185 5396204 5396188 -
aacactatgttgaataggag

SEQ ID NO: 29383 - DNA, 20 bp, Artificial Sequence
  Synthetic oligonucleotide; GAG chr11 5396181 5396200 5396184 -
ctatgttgaataggagtggt

SEQ ID NO: 29384 - DNA, 20 bp, Artificial Sequence
  Synthetic oligonucleotide; GAG chr11 5396179 5396198 5396182 -
atgttgaataggagtggtga

SEQ ID NO: 29385 - DNA, 20 bp, Artificial Sequence
  Synthetic oligonucleotide; GAG chr11 5396177 5396196 5396180 -
gttgaataggagtggtgaga

SEQ ID NO: 29386 - DNA, 20 bp, Artificial Sequence
  Synthetic oligonucleotide; AGG chr11 5396176 5396195 5396179 -
ttgaataggagtggtgagag

SEQ ID NO: 29387 - DNA, 20 bp, Artificial Sequence
  Synthetic oligonucleotide; GGG chr11 5396175 5396194 5396178 -
tgaataggagtggtgagaga

SEQ ID NO: 29388 - DNA, 20 bp, Artificial Sequence
  Synthetic oligonucleotide; CAG chr11 5396159 5396178 5396162 -
gagagggcatccctgtcttg

SEQ ID NO: 29389 - DNA, 20 bp, Artificial Sequence
  Synthetic oligonucleotide; TAG chr11 5396154 5396173 5396157 -
ggcatccctgtcttgcagcc

SEQ ID NO: 29390 - DNA, 20 bp, Artificial Sequence
  Synthetic oligonucleotide; AGG chr11 5396153 5396172 5396156 -
gcatccctgtcttgcagcct

SEQ ID NO: 29391 - DNA, 20 bp, Artificial Sequence
  Synthetic oligonucleotide; TAG chr11 5396139 5396158 5396142 -
cagcctaggcacattttcat

SEQ ID NO: 29392 - DNA, 20 bp, Artificial Sequence
  Synthetic oligonucleotide; AGG chr11 5396138 5396157 5396141 -
agcctaggcacattttcatt

SEQ ID NO: 29393 - DNA, 20 bp, Artificial Sequence
  Synthetic oligonucleotide; CAG chr11 5396135 5396154 5396138 -
ctaggcacattttcattagg

SEQ ID NO: 29394 - DNA, 20 bp, Artificial Sequence
  Synthetic oligonucleotide; CAG chr11 5396130 5396149 5396133 -
cacattttcattaggcagtg

SEQ ID NO: 29395 - DNA, 20 bp, Artificial Sequence
  Synthetic oligonucleotide; TGG chr11 5396125 5396144 5396128 -
tttcattaggcagtgcagtg

SEQ ID NO: 29396 - DNA, 20 bp, Artificial Sequence
  Synthetic oligonucleotide; AAG chr11 5396120 5396139 5396123 -
ttaggcagtgcagtgtggtt

SEQ ID NO: 29397 - DNA, 20 bp, Artificial Sequence
  Synthetic oligonucleotide; GAG chr11 5396118 5396137 5396121 -
aggcagtgcagtgtggttaa

SEQ ID NO: 29398 - DNA, 20 bp, Artificial Sequence
  Synthetic oligonucleotide; CAG chr11 5396115 5396134 5396118 -
cagtgcagtgtggttaagag

SEQ ID NO: 29399 - DNA, 20 bp, Artificial Sequence
  Synthetic oligonucleotide; TGG chr11 5396106 5396125 5396109 -
gtggttaagagcagtgtctc

SEQ ID NO: 29400 - DNA, 20 bp, Artificial Sequence
  Synthetic oligonucleotide; GGG chr11 5396105 5396124 5396108 -
tggttaagagcagtgtctct

SEQ ID NO: 29401 - DNA, 20 bp, Artificial Sequence
  Synthetic oligonucleotide; CAG chr11 5396100 5396119 5396103 -
aagagcagtgtctctgggac

SEQ ID NO: 29402 - DNA, 20 bp, Artificial Sequence
  Synthetic oligonucleotide; TAG chr11 5396072 5396091 5396075 -
tattacaatcataacttcaa

SEQ ID NO: 29403 - DNA, 20 bp, Artificial Sequence
  Synthetic oligonucleotide; AAG chr11 5396047 5396066 5396050 -
cttcactctatgattgtgca

SEQ ID NO: 29404 - DNA, 20 bp, Artificial Sequence
  Synthetic oligonucleotide; TAG chr11 5396030 5396049 5396033 -
gcaaagtatctgattaatct

SEQ ID NO: 29405 - DNA, 20 bp, Artificial Sequence
  Synthetic oligonucleotide; GAG chr11 5396008 5396027 5396011 -
gtttcttcatctgaaaaatt

SEQ ID NO: 29406 - DNA, 20 bp, Artificial Sequence
  Synthetic oligonucleotide; TAG chr11 5395987 5396006 5395990 -
agacaattctacctactcca

SEQ ID NO: 29407 - DNA, 20 bp, Artificial Sequence
  Synthetic oligonucleotide; TAG chr11 5395982 5396001 5395985 -
attctacctactccatagat

SEQ ID NO: 29408 - DNA, 20 bp, Artificial Sequence
  Synthetic oligonucleotide; GAG chr11 5395980 5395999 5395983 -
tctacctactccatagatta

SEQ ID NO: 29409 - DNA, 20 bp, Artificial Sequence
  Synthetic oligonucleotide; GAG chr11 5395978 5395997 5395981 -
tacctactccatagattaga

SEQ ID NO: 29410 - DNA, 20 bp, Artificial Sequence
  Synthetic oligonucleotide; TGG chr11 5395954 5395973 5395957 -
cattcatatgcaattttaaa

SEQ ID NO: 29411 - DNA, 20 bp, Artificial Sequence
  Synthetic oligonucleotide; GAG chr11 5395952 5395971 5395955 -
ttcatatgcaattttaaatg

SEQ ID NO: 29412 - DNA, 20 bp, Artificial Sequence
  Synthetic oligonucleotide; CAG chr11 5395947 5395966 5395950 -
atgcaattttaaatggagta

SEQ ID NO: 29413 - DNA, 20 bp, Artificial Sequence
  Synthetic oligonucleotide; TAG chr11 5395943 5395962 5395946 -
aattttaaatggagtacagt

SEQ ID NO: 29414 - DNA, 20 bp, Artificial Sequence
  Synthetic oligonucleotide; AAG chr11 5395940 5395959 5395943 -
tttaaatggagtacagttag

SEQ ID NO: 29415 - DNA, 20 bp, Artificial Sequence
  Synthetic oligonucleotide; TAG chr11 5395926 5395945 5395929 -
agttagaagcaaatactcaa

SEQ ID NO: 29416 - DNA, 20 bp, Artificial Sequence
  Synthetic oligonucleotide; TAG chr11 5395912 5395931 5395915 -
actcaatagacacattttat

SEQ ID NO: 29417 - DNA, 20 bp, Artificial Sequence
  Synthetic oligonucleotide; CAG chr11 5395899 5395918 5395902 -
attttattagttgtactttc

SEQ ID NO: 29418 - DNA, 20 bp, Artificial Sequence
  Synthetic oligonucleotide; CAG chr11 5395891 5395910 5395894 -
agttgtactttccagcattc

SEQ ID NO: 29419 - DNA, 20 bp, Artificial Sequence
  Synthetic oligonucleotide; GAG chr11 5395887 5395906 5395890 -
gtactttccagcattccagt

SEQ ID NO: 29420 - DNA, 20 bp, Artificial Sequence
  Synthetic oligonucleotide; CAG chr11 5395876 5395895 5395879 -
cattccagtgagcaatgttg

SEQ ID NO: 29421 - DNA, 20 bp, Artificial Sequence
  Synthetic oligonucleotide; GAG chr11 5395872 5395891 5395875 -
ccagtgagcaatgttgcagt

SEQ ID NO: 29422 - DNA, 20 bp, Artificial Sequence
  Synthetic oligonucleotide; AAG chr11 5395865 5395884 5395868 -
gcaatgttgcagtgagctct

SEQ ID NO: 29423 - DNA, 20 bp, Artificial Sequence
  Synthetic oligonucleotide; AAG chr11 5395860 5395879 5395863 -
gttgcagtgagctctaagaa

SEQ ID NO: 29424 - DNA, 20 bp, Artificial Sequence
  Synthetic oligonucleotide; AAG chr11 5395832 5395851 5395835 -
aaaataatctgacaacaatg

SEQ ID NO: 29425 - DNA, 20 bp, Artificial Sequence
  Synthetic oligonucleotide; AAG chr11 5395826 5395845 5395829 -
atctgacaacaatgaagcgt

SEQ ID NO: 29426 - DNA, 20 bp, Artificial Sequence
  Synthetic oligonucleotide; AGG chr11 5395825 5395844 5395828 -
tctgacaacaatgaagcgta

SEQ ID NO: 29427 - DNA, 20 bp, Artificial Sequence
  Synthetic oligonucleotide; TGG chr11 5395818 5395837 5395821 -
acaatgaagcgtaaggtatt

SEQ ID NO: 29428 - DNA, 20 bp, Artificial Sequence
  Synthetic oligonucleotide; GAG chr11 5395816 5395835 5395819 -
aatgaagcgtaaggtatttg

SEQ ID NO: 29429 - DNA, 20 bp, Artificial Sequence
  Synthetic oligonucleotide; TGG chr11 5395813 5395832 5395816 -
gaagcgtaaggtatttggag

SEQ ID NO: 29430 - DNA, 20 bp, Artificial Sequence
  Synthetic oligonucleotide; GGG chr11 5395812 5395831 5395815 -
aagcgtaaggtatttggagt

SEQ ID NO: 29431 - DNA, 20 bp, Artificial Sequence
  Synthetic oligonucleotide; AAG chr11 5395809 5395828 5395812 -
cgtaaggtatttggagtggg

SEQ ID NO: 29432 - DNA, 20 bp, Artificial Sequence
  Synthetic oligonucleotide; GAG chr11 5395802 5395821 5395805 -
tatttggagtgggaagccat

SEQ ID NO: 29433 - DNA, 20 bp, Artificial Sequence
  Synthetic oligonucleotide; CAG chr11 5395791 5395810 5395794 -
ggaagccatgagctcttgca

SEQ ID NO: 29434 - DNA, 20 bp, Artificial Sequence
  Synthetic oligonucleotide; AGG chr11 5395790 5395809 5395793 -
gaagccatgagctcttgcac

SEQ ID NO: 29435 - DNA, 20 bp, Artificial Sequence
  Synthetic oligonucleotide; TGG chr11 5395783 5395802 5395786 -
tgagctcttgcacaggtttt

SEQ ID NO: 29436 - DNA, 20 bp, Artificial Sequence
  Synthetic oligonucleotide; TGG chr11 5395766 5395785 5395769 -
ttttggacaatccttccata

SEQ ID NO: 29437 - DNA, 20 bp, Artificial Sequence
  Synthetic oligonucleotide; TGG chr11 5395760 5395779 5395763 -
acaatccttccatatggctt

SEQ ID NO: 29438 - DNA, 20 bp, Artificial Sequence
  Synthetic oligonucleotide; AAG chr11 5395755 5395774 5395758 -
ccttccatatggctttggca

SEQ ID NO: 29439 - DNA, 20 bp, Artificial Sequence
  Synthetic oligonucleotide; TAG chr11 5395731 5395750 5395734 -
tactgaatctttctaaacct

SEQ ID NO: 29440 - DNA, 20 bp, Artificial Sequence
  Synthetic oligonucleotide; AAG chr11 5395711 5395730 5395714 -
tagcttttttactatgttga

SEQ ID NO: 29441 - DNA, 20 bp, Artificial Sequence
  Synthetic oligonucleotide; TGG chr11 5395699 5395718 5395702 -
tatgttgaaagatttccaca

SEQ ID NO: 29442 - DNA, 20 bp, Artificial Sequence
  Synthetic oligonucleotide; GGG chr11 5395698 5395717 5395701 -
atgttgaaagatttccacat

SEQ ID NO: 29443 - DNA, 20 bp, Artificial Sequence
  Synthetic oligonucleotide; GAG chr11 5395681 5395700 5395684 -
catgggccctgcctcttttc

SEQ ID NO: 29444 - DNA, 20 bp, Artificial Sequence
  Synthetic oligonucleotide; GAG chr11 5395679 5395698 5395682 -
tgggccctgcctcttttcga

SEQ ID NO: 29445 - DNA, 20 bp, Artificial Sequence
  Synthetic oligonucleotide; TAG chr11 5395669 5395688 5395672 -
ctcttttcgagagaaatgat

SEQ ID NO: 29446 - DNA, 20 bp, Artificial Sequence
  Synthetic oligonucleotide; AGG chr11 5395668 5395687 5395671 -
tcttttcgagagaaatgatt

SEQ ID NO: 29447 - DNA, 20 bp, Artificial Sequence
  Synthetic oligonucleotide; TGG chr11 5395660 5395679 5395663 -
agagaaatgattaggtttaa

SEQ ID NO: 29448 - DNA, 20 bp, Artificial Sequence
  Synthetic oligonucleotide; GGG chr11 5395659 5395678 5395662 -
gagaaatgattaggtttaat

SEQ ID NO: 29449 - DNA, 20 bp, Artificial Sequence
  Synthetic oligonucleotide; GGG chr11 5395658 5395677 5395661 -
agaaatgattaggtttaatg

SEQ ID NO: 29450 - DNA, 20 bp, Artificial Sequence
  Synthetic oligonucleotide; TGG chr11 5395652 5395671 5395655 -
gattaggtttaatggggctg

SEQ ID NO: 29451 - DNA, 20 bp, Artificial Sequence
  Synthetic oligonucleotide; GAG chr11 5395650 5395669 5395653 -
ttaggtttaatggggctgtg

SEQ ID NO: 29452 - DNA, 20 bp, Artificial Sequence
  Synthetic oligonucleotide; AGG chr11 5395649 5395668 5395652 -
taggtttaatggggctgtgg

SEQ ID NO: 29453 - DNA, 20 bp, Artificial Sequence
  Synthetic oligonucleotide; AAG chr11 5395645 5395664 5395648 -
tttaatggggctgtggagga

SEQ ID NO: 29454 - DNA, 20 bp, Artificial Sequence
  Synthetic oligonucleotide; TAG chr11 5395629 5395648 5395632 -
aggaaagcactctgaaatgt

SEQ ID NO: 29455 - DNA, 20 bp, Artificial Sequence
  Synthetic oligonucleotide; AAG chr11 5395626 5395645 5395629 -
aaagcactctgaaatgttag

SEQ ID NO: 29456 - DNA, 20 bp, Artificial Sequence
  Synthetic oligonucleotide; TGG chr11 5395613 5395632 5395616 -
atgttagaagcttcatcaat

SEQ ID NO: 29457 - DNA, 20 bp, Artificial Sequence
  Synthetic oligonucleotide; GAG chr11 5395611 5395630 5395614 -
gttagaagcttcatcaattg

SEQ ID NO: 29458 - DNA, 20 bp, Artificial Sequence
  Synthetic oligonucleotide; GAG chr11 5395600 5395619 5395603 -
catcaattggagcaattgct

SEQ ID NO: 29459 - DNA, 20 bp, Artificial Sequence
  Synthetic oligonucleotide; AAG chr11 5395555 5395574 5395558 -
aaccctgtatcattctctac

SEQ ID NO: 29460 - DNA, 20 bp, Artificial Sequence
  Synthetic oligonucleotide; AGG chr11 5395554 5395573 5395557 -
accctgtatcattctctaca

SEQ ID NO: 29461 - DNA, 20 bp, Artificial Sequence
  Synthetic oligonucleotide; TAG chr11 5395549 5395568 5395552 -
gtatcattctctacaaggca

SEQ ID NO: 29462 - DNA, 20 bp, Artificial Sequence
  Synthetic oligonucleotide; CAG chr11 5395544 5395563 5395547 -
attctctacaaggcatagcc

SEQ ID NO: 29463 - DNA, 20 bp, Artificial Sequence
  Synthetic oligonucleotide; AAG chr11 5395537 5395556 5395540 -
acaaggcatagcccagtaac

SEQ ID NO: 29464 - DNA, 20 bp, Artificial Sequence
  Synthetic oligonucleotide; CAG chr11 5395532 5395551 5395535 -
gcatagcccagtaacaagtc

SEQ ID NO: 29465 - DNA, 20 bp, Artificial Sequence
  Synthetic oligonucleotide; CGG chr11 5395503 5395522 5395506 -
cttccccatcaaaaacatca

SEQ ID NO: 29466 - DNA, 20 bp, Artificial Sequence
  Synthetic oligonucleotide; GGG chr11 5395502 5395521 5395505 -
ttccccatcaaaaacatcac

SEQ ID NO: 29467 - DNA, 20 bp, Artificial Sequence
  Synthetic oligonucleotide; GAG chr11 5395500 5395519 5395503 -
ccccatcaaaaacatcacgg

SEQ ID NO: 29468 - DNA, 20 bp, Artificial Sequence
  Synthetic oligonucleotide; TAG chr11 5395491 5395510 5395494 -
aaacatcacgggagatatga

SEQ ID NO: 29469 - DNA, 20 bp, Artificial Sequence
  Synthetic oligonucleotide; CAG chr11 5395486 5395505 5395489 -
tcacgggagatatgatagaa

SEQ ID NO: 29470 - DNA, 20 bp, Artificial Sequence
  Synthetic oligonucleotide; CAG chr11 5395483 5395502 5395486 -
cgggagatatgatagaacag

SEQ ID NO: 29471 - DNA, 20 bp, Artificial Sequence
  Synthetic oligonucleotide; CAG chr11 5395471 5395490 5395474 -
tagaacagcagccctaacaa

SEQ ID NO: 29472 - DNA, 20 bp, Artificial Sequence
  Synthetic oligonucleotide; TGG chr11 5395466 5395485 5395469 -
cagcagccctaacaacagat

SEQ ID NO: 29473 - DNA, 20 bp, Artificial Sequence
  Synthetic oligonucleotide; TGG chr11 5395454 5395473 5395457 -
caacagattggccatcttcc

SEQ ID NO: 29474 - DNA, 20 bp, Artificial Sequence
  Synthetic oligonucleotide; AAG chr11 5395451 5395470 5395454 -
cagattggccatcttcctgg

SEQ ID NO: 29475 - DNA, 20 bp, Artificial Sequence
  Synthetic oligonucleotide; TAG chr11 5395423 5395442 5395426 -
ctattccataaccctgcata

SEQ ID NO: 29476 - DNA, 20 bp, Artificial Sequence
  Synthetic oligonucleotide; TAG chr11 5395414 5395433 5395417 -
aaccctgcatatagtcatgc

SEQ ID NO: 29477 - DNA, 20 bp, Artificial Sequence
  Synthetic oligonucleotide; AAG chr11 5395409 5395428 5395412 -
tgcatatagtcatgctagat

SEQ ID NO: 29478 - DNA, 20 bp, Artificial Sequence
  Synthetic oligonucleotide; AGG chr11 5395408 5395427 5395411 -
gcatatagtcatgctagata

SEQ ID NO: 29479 - DNA, 20 bp, Artificial Sequence
  Synthetic oligonucleotide; GGG chr11 5395407 5395426 5395410 -
catatagtcatgctagataa

SEQ ID NO: 29480 - DNA, 20 bp, Artificial Sequence
  Synthetic oligonucleotide; TAG chr11 5395400 5395419 5395403 -
tcatgctagataagggatat

SEQ ID NO: 29481 - DNA, 20 bp, Artificial Sequence
  Synthetic oligonucleotide; GAG chr11 5395398 5395417 5395401 -
atgctagataagggatatta

SEQ ID NO: 29482 - DNA, 20 bp, Artificial Sequence
  Synthetic oligonucleotide; GAG chr11 5395396 5395415 5395399 -
gctagataagggatattaga

SEQ ID NO: 29483 - DNA, 20 bp, Artificial Sequence
  Synthetic oligonucleotide; AGG chr11 5395395 5395414 5395398 -
ctagataagggatattagag

SEQ ID NO: 29484 - DNA, 20 bp, Artificial Sequence
  Synthetic oligonucleotide; AAG chr11 5395360 5395379 5395363 -
cttcctttatccacaaaaca

SEQ ID NO: 29485 - DNA, 20 bp, Artificial Sequence
  Synthetic oligonucleotide; AGG chr11 5395359 5395378 5395362 -
ttcctttatccacaaaacaa

SEQ ID NO: 29486 - DNA, 20 bp, Artificial Sequence
  Synthetic oligonucleotide; CAG chr11 5395351 5395370 5395354 -
tccacaaaacaaaggacctt

SEQ ID NO: 29487 - DNA, 20 bp, Artificial Sequence
  Synthetic oligonucleotide; TGG chr11 5395340 5395359 5395343 -
aaggaccttcagcaacttac

SEQ ID NO: 29488 - DNA, 20 bp, Artificial Sequence
  Synthetic oligonucleotide; TAG chr11 5395323 5395342 5395326 -
tactggtcctttcttctctg

SEQ ID NO: 29489 - DNA, 20 bp, Artificial Sequence
  Synthetic oligonucleotide; CAG chr11 5395307 5395326 5395310 -
tctgtagcttctttctcatg

SEQ ID NO: 29490 - DNA, 20 bp, Artificial Sequence
  Synthetic oligonucleotide; CAG chr11 5395288 5395307 5395291 -
gcagcccttccactccatgc

SEQ ID NO: 29491 - DNA, 20 bp, Artificial Sequence
  Synthetic oligonucleotide; CAG chr11 5395269 5395288 5395272 -
ccagcatcttccatttgact

SEQ ID NO: 29492 - DNA, 20 bp, Artificial Sequence
  Synthetic oligonucleotide; AGG chr11 5395268 5395287 5395271 -
cagcatcttccatttgactc

SEQ ID NO: 29493 - DNA, 20 bp, Artificial Sequence
  Synthetic oligonucleotide; TGG chr11 5395252 5395271 5395255 -
actcaggatgctgttctacg

SEQ ID NO: 29494 - DNA, 20 bp, Artificial Sequence
  Synthetic oligonucleotide; GGG chr11 5395251 5395270 5395254 -
ctcaggatgctgttctacgt

SEQ ID NO: 29495 - DNA, 20 bp, Artificial Sequence
  Synthetic oligonucleotide; TGG chr11 5395242 5395261 5395245 -
ctgttctacgtgggctgcac

SEQ ID NO: 29496 - DNA, 20 bp, Artificial Sequence
  Synthetic oligonucleotide; AAG chr11 5395231 5395250 5395234 -
gggctgcactggcacttata

SEQ ID NO: 29497 - DNA, 20 bp, Artificial Sequence
  Synthetic oligonucleotide; TGG chr11 5395214 5395233 5395217 -
ataaagctgtctctcttcct

SEQ ID NO: 29498 - DNA, 20 bp, Artificial Sequence
  Synthetic oligonucleotide; GGG chr11 5395213 5395232 5395216 -
taaagctgtctctcttcctt

SEQ ID NO: 29499 - DNA, 20 bp, Artificial Sequence
  Synthetic oligonucleotide; TGG chr11 5395206 5395225 5395209 -
gtctctcttccttgggtctt

SEQ ID NO: 29500 - DNA, 20 bp, Artificial Sequence
  Synthetic oligonucleotide; AAG chr11 5395197 5395216 5395200 -
ccttgggtctttggccctca

SEQ ID NO: 29501 - DNA, 20 bp, Artificial Sequence
  Synthetic oligonucleotide; AGG chr11 5395196 5395215 5395199 -
cttgggtctttggccctcaa

SEQ ID NO: 29502 - DNA, 20 bp, Artificial Sequence
  Synthetic oligonucleotide; TAG chr11 5395185 5395204 5395188 -
ggccctcaaaggaatctccc

SEQ ID NO: 29503 - DNA, 20 bp, Artificial Sequence
  Synthetic oligonucleotide; TGG chr11 5395181 5395200 5395184 -
ctcaaaggaatctccctaga

SEQ ID NO: 29504 - DNA, 20 bp, Artificial Sequence
  Synthetic oligonucleotide; CAG chr11 5395175 5395194 5395178 -
ggaatctccctagatggacg

SEQ ID NO: 29505 - DNA, 20 bp, Artificial Sequence
  Synthetic oligonucleotide; AAG chr11 5395157 5395176 5395160 -
cgcagacttgatgaatgtca

SEQ ID NO: 29506 - DNA, 20 bp, Artificial Sequence
  Synthetic oligonucleotide; GAG chr11 5395155 5395174 5395158 -
cagacttgatgaatgtcaaa

SEQ ID NO: 29507 - DNA, 20 bp, Artificial Sequence
  Synthetic oligonucleotide; AGG chr11 5395154 5395173 5395157 -
agacttgatgaatgtcaaag

SEQ ID NO: 29508 - DNA, 20 bp, Artificial Sequence
  Synthetic oligonucleotide; GGG chr11 5395153 5395172 5395156 -
gacttgatgaatgtcaaaga

SEQ ID NO: 29509 - DNA, 20 bp, Artificial Sequence
  Synthetic oligonucleotide; TAG chr11 5395148 5395167 5395151 -
gatgaatgtcaaagagggat

SEQ ID NO: 29510 - DNA, 20 bp, Artificial Sequence
  Synthetic oligonucleotide; TAG chr11 5395137 5395156 5395140 -
aagagggattagcatcctcc

SEQ ID NO: 29511 - DNA, 20 bp, Artificial Sequence
  Synthetic oligonucleotide; AAG chr11 5395130 5395149 5395133 -
attagcatcctcctagacca

SEQ ID NO: 29512 - DNA, 20 bp, Artificial Sequence
  Synthetic oligonucleotide; GAG chr11 5395122 5395141 5395125 -
cctcctagaccaaagcattt

SEQ ID NO: 29513 - DNA, 20 bp, Artificial Sequence
  Synthetic oligonucleotide; CAG chr11 5395114 5395133 5395117 -
accaaagcatttgagatgcc

SEQ ID NO: 29514 - DNA, 20 bp, Artificial Sequence
  Synthetic oligonucleotide; TGG chr11 5395101 5395120 5395104 -
agatgcccagttatcttaaa

SEQ ID NO: 29515 - DNA, 20 bp, Artificial Sequence
  Synthetic oligonucleotide; TAG chr11 5395093 5395112 5395096 -
agttatcttaaatggaaatt

SEQ ID NO: 29516 - DNA, 20 bp, Artificial Sequence
  Synthetic oligonucleotide; GAG chr11 5395082 5395101 5395085 -
atggaaatttagtgaaccat

SEQ ID NO: 29517 - DNA, 20 bp, Artificial Sequence
  Synthetic oligonucleotide; TAG chr11 5395073 5395092 5395076 -
tagtgaaccatgagtacctc

SEQ ID NO: 29518 - DNA, 20 bp, Artificial Sequence
  Synthetic oligonucleotide; AGG chr11 5395072 5395091 5395075 -
agtgaaccatgagtacctct

SEQ ID NO: 29519 - DNA, 20 bp, Artificial Sequence
  Synthetic oligonucleotide; GAG chr11 5395070 5395089 5395073 -
tgaaccatgagtacctctag

SEQ ID NO: 29520 - DNA, 20 bp, Artificial Sequence
  Synthetic oligonucleotide; AGG chr11 5395069 5395088 5395072 -
gaaccatgagtacctctagg

SEQ ID NO: 29521 - DNA, 20 bp, Artificial Sequence
  Synthetic oligonucleotide; CAG chr11 5395061 5395080 5395064 -
agtacctctaggaggtattt

SEQ ID NO: 29522 - DNA, 20 bp, Artificial Sequence
  Synthetic oligonucleotide; GAG chr11 5395057 5395076 5395060 -
cctctaggaggtatttcagt

SEQ ID NO: 29523 - DNA, 20 bp, Artificial Sequence
  Synthetic oligonucleotide; CAG chr11 5395053 5395072 5395056 -
taggaggtatttcagtgagc

SEQ ID NO: 29524 - DNA, 20 bp, Artificial Sequence
  Synthetic oligonucleotide; GAG chr11 5395051 5395070 5395054 -
ggaggtatttcagtgagcca

SEQ ID NO: 29525 - DNA, 20 bp, Artificial Sequence
  Synthetic oligonucleotide; AGG chr11 5395050 5395069 5395053 -
gaggtatttcagtgagccag

SEQ ID NO: 29526 - DNA, 20 bp, Artificial Sequence
  Synthetic oligonucleotide; CAG chr11 5395025 5395044 5395028 -
ccttgactgtcttctctccc

SEQ ID NO: 29527 - DNA, 20 bp, Artificial Sequence
  Synthetic oligonucleotide; AAG chr11 5395009 5395028 5395012 -
tccccagctgccaacttcat

SEQ ID NO: 29528 - DNA, 20 bp, Artificial Sequence
  Synthetic oligonucleotide; TGG chr11 5394997 5395016 5395000 -
aacttcataagaaaatttat

SEQ ID NO: 29529 - DNA, 20 bp, Artificial Sequence
  Synthetic oligonucleotide; GGG chr11 5394996 5395015 5394999 -
acttcataagaaaatttatt

SEQ ID NO: 29530 - DNA, 20 bp, Artificial Sequence
  Synthetic oligonucleotide; CAG chr11 5394954 5394973 5394957 -
ttgtctttcttttcttttcc

SEQ ID NO: 29531 - DNA, 20 bp, Artificial Sequence
  Synthetic oligonucleotide; AAG chr11 5394947 5394966 5394950 -
tcttttcttttcccagacaa

SEQ ID NO: 29532 - DNA, 20 bp, Artificial Sequence
  Synthetic oligonucleotide; GAG chr11 5394937 5394956 5394940 -
tcccagacaaaagtcccctt

SEQ ID NO: 29533 - DNA, 20 bp, Artificial Sequence
  Synthetic oligonucleotide; CAG chr11 5394933 5394952 5394936 -
agacaaaagtccccttgaga

SEQ ID NO: 29534 - DNA, 20 bp, Artificial Sequence
  Synthetic oligonucleotide; CAG chr11 5394920 5394939 5394923 -
cttgagacagtctttacaac

SEQ ID NO: 29535 - DNA, 20 bp, Artificial Sequence
  Synthetic oligonucleotide; AGG chr11 5394919 5394938 5394922 -
ttgagacagtctttacaacc

SEQ ID NO: 29536 - DNA, 20 bp, Artificial Sequence
  Synthetic oligonucleotide; TAG chr11 5394916 5394935 5394919 -
agacagtctttacaaccagg

SEQ ID NO: 29537 - DNA, 20 bp, Artificial Sequence
  Synthetic oligonucleotide; GAG chr11 5394894 5394913 5394897 -
gttattcactgtcattcact

SEQ ID NO: 29538 - DNA, 20 bp, Artificial Sequence
  Synthetic oligonucleotide; AAG chr11 5394890 5394909 5394893 -
ttcactgtcattcactgagc

SEQ ID NO: 29539 - DNA, 20 bp, Artificial Sequence
  Synthetic oligonucleotide; AAG chr11 5394881 5394900 5394884 -
attcactgagcaagtatgta

SEQ ID NO: 29540 - DNA, 20 bp, Artificial Sequence
  Synthetic oligonucleotide; AAG chr11 5394873 5394892 5394876 -
agcaagtatgtaaagatcac

SEQ ID NO: 29541 - DNA, 20 bp, Artificial Sequence
  Synthetic oligonucleotide; TGG chr11 5394867 5394886 5394870 -
tatgtaaagatcacaagctt

SEQ ID NO: 29542 - DNA, 20 bp, Artificial Sequence
  Synthetic oligonucleotide; GGG chr11 5394866 5394885 5394869 -
atgtaaagatcacaagcttt

SEQ ID NO: 29543 - DNA, 20 bp, Artificial Sequence
  Synthetic oligonucleotide; CAG chr11 5394862 5394881 5394865 -
aaagatcacaagctttgggt

SEQ ID NO: 29544 - DNA, 20 bp, Artificial Sequence
  Synthetic oligonucleotide; AAG chr11 5394847 5394866 5394850 -
tgggtcagatatttgaatgc

SEQ ID NO: 29545 - DNA, 20 bp, Artificial Sequence
  Synthetic oligonucleotide; AAG chr11 5394837 5394856 5394840 -
atttgaatgcaagcattaat

SEQ ID NO: 29546 - DNA, 20 bp, Artificial Sequence
  Synthetic oligonucleotide; CAG chr11 5394817 5394836 5394820 -
aagacacaaactctgtcttt

SEQ ID NO: 29547 - DNA, 20 bp, Artificial Sequence
  Synthetic oligonucleotide; AAG chr11 5394813 5394832 5394816 -
cacaaactctgtctttcaga

SEQ ID NO: 29548 - DNA, 20 bp, Artificial Sequence
  Synthetic oligonucleotide; CAG chr11 5394798 5394817 5394801 -
tcagaaagcattgtcttctg

SEQ ID NO: 29549 - DNA, 20 bp, Artificial Sequence
  Synthetic oligonucleotide; AGG chr11 5394797 5394816 5394800 -
cagaaagcattgtcttctgc

SEQ ID NO: 29550 - DNA, 20 bp, Artificial Sequence
  Synthetic oligonucleotide; GAG chr11 5394795 5394814 5394798 -
gaaagcattgtcttctgcag

SEQ ID NO: 29551 - DNA, 20 bp, Artificial Sequence
  Synthetic oligonucleotide; AGG chr11 5394794 5394813 5394797 -
aaagcattgtcttctgcagg

SEQ ID NO: 29552 - DNA, 20 bp, Artificial Sequence
  Synthetic oligonucleotide; AAG chr11 5394760 5394779 5394763 -
aaaactaacgtcccctgatg

SEQ ID NO: 29553 - DNA, 20 bp, Artificial Sequence
  Synthetic oligonucleotide; CAG chr11 5394751 5394770 5394754 -
gtcccctgatgaagcaaaaa

SEQ ID NO: 29554 - DNA, 20 bp, Artificial Sequence
  Synthetic oligonucleotide; AGG chr11 5394750 5394769 5394753 -
tcccctgatgaagcaaaaac

SEQ ID NO: 29555 - DNA, 20 bp, Artificial Sequence
  Synthetic oligonucleotide; CAG chr11 5394742 5394761 5394745 -
tgaagcaaaaacaggcttcc

SEQ ID NO: 29556 - DNA, 20 bp, Artificial Sequence
  Synthetic oligonucleotide; AGG chr11 5394741 5394760 5394744 -
gaagcaaaaacaggcttccc

SEQ ID NO: 29557 - DNA, 20 bp, Artificial Sequence
  Synthetic oligonucleotide; TAG chr11 5394725 5394744 5394728 -
tcccaggtgatacaaatatt

SEQ ID NO: 29558 - DNA, 20 bp, Artificial Sequence
  Synthetic oligonucleotide; AAG chr11 5394721 5394740 5394724 -
aggtgatacaaatatttagc

SEQ ID NO: 29559 - DNA, 20 bp, Artificial Sequence
  Synthetic oligonucleotide; TAG chr11 5394684 5394703 5394687 -
gtctgcactatcattcaaaa

SEQ ID NO: 29560 - DNA, 20 bp, Artificial Sequence
  Synthetic oligonucleotide; AGG chr11 5394683 5394702 5394686 -
tctgcactatcattcaaaat

SEQ ID NO: 29561 - DNA, 20 bp, Artificial Sequence
  Synthetic oligonucleotide; TAG chr11 5394672 5394691 5394675 -
attcaaaataggtaacattt

SEQ ID NO: 29562 - DNA, 20 bp, Artificial Sequence
  Synthetic oligonucleotide; TAG chr11 5394668 5394687 5394671 -
aaaataggtaacattttaga

SEQ ID NO: 29563 - DNA, 20 bp, Artificial Sequence
  Synthetic oligonucleotide; GAG chr11 5394666 5394685 5394669 -
aataggtaacattttagata

SEQ ID NO: 29564 - DNA, 20 bp, Artificial Sequence
  Synthetic oligonucleotide; AGG chr11 5394665 5394684 5394668 -
ataggtaacattttagatag

SEQ ID NO: 29565 - DNA, 20 bp, Artificial Sequence
  Synthetic oligonucleotide; GGG chr11 5394664 5394683 5394667 -
taggtaacattttagataga

SEQ ID NO: 29566 - DNA, 20 bp, Artificial Sequence
  Synthetic oligonucleotide; GGG chr11 5394663 5394682 5394666 -
aggtaacattttagatagag

SEQ ID NO: 29567 - DNA, 20 bp, Artificial Sequence
  Synthetic oligonucleotide; AAG chr11 5394648 5394667 5394651 -
tagaggggaaaacatgtaca

SEQ ID NO: 29568 - DNA, 20 bp, Artificial Sequence
  Synthetic oligonucleotide; AGG chr11 5394647 5394666 5394650 -
agaggggaaaacatgtacaa

SEQ ID NO: 29569 - DNA, 20 bp, Artificial Sequence
  Synthetic oligonucleotide; CAG chr11 5394642 5394661 5394645 -
ggaaaacatgtacaaaggct

SEQ ID NO: 29570 - DNA, 20 bp, Artificial Sequence
  Synthetic oligonucleotide; GAG chr11 5394640 5394659 5394643 -
aaaacatgtacaaaggctca

SEQ ID NO: 29571 - DNA, 20 bp, Artificial Sequence
  Synthetic oligonucleotide; AAG chr11 5394629 5394648 5394632 -
aaaggctcagagttgtcaca

SEQ ID NO: 29572 - DNA, 20 bp, Artificial Sequence
  Synthetic oligonucleotide; GAG chr11 5394593 5394612 5394596 -
tctgtgaacttcaattacat

SEQ ID NO: 29573 - DNA, 20 bp, Artificial Sequence
  Synthetic oligonucleotide; CAG chr11 5394570 5394589 5394573 -
ccatctgtgttttacaaata

SEQ ID NO: 29574 - DNA, 20 bp, Artificial Sequence
  Synthetic oligonucleotide; AAG chr11 5394556 5394575 5394559 -
caaatacagtatcaatttca

SEQ ID NO: 29575 - DNA, 20 bp, Artificial Sequence
  Synthetic oligonucleotide; AGG chr11 5394555 5394574 5394558 -
aaatacagtatcaatttcaa

SEQ ID NO: 29576 - DNA, 20 bp, Artificial Sequence
  Synthetic oligonucleotide; TAG chr11 5394550 5394569 5394553 -
cagtatcaatttcaaaggct

SEQ ID NO: 29577 - DNA, 20 bp, Artificial Sequence
  Synthetic oligonucleotide; GAG chr11 5394548 5394567 5394551 -
gtatcaatttcaaaggctta

SEQ ID NO: 29578 - DNA, 20 bp, Artificial Sequence
  Synthetic oligonucleotide; GAG chr11 5394546 5394565 5394549 -
atcaatttcaaaggcttaga

SEQ ID NO: 29579 - DNA, 20 bp, Artificial Sequence
  Synthetic oligonucleotide; AGG chr11 5394545 5394564 5394548 -
tcaatttcaaaggcttagag

SEQ ID NO: 29580 - DNA, 20 bp, Artificial Sequence
  Synthetic oligonucleotide; TGG chr11 5394538 5394557 5394541 -
caaaggcttagagaggcttg

SEQ ID NO: 29581 - DNA, 20 bp, Artificial Sequence
  Synthetic oligonucleotide; CGG chr11 5394524 5394543 5394527 -
ggcttgtggatattaaataa

SEQ ID NO: 29582 - DNA, 20 bp, Artificial Sequence
  Synthetic oligonucleotide; GGG chr11 5394523 5394542 5394526 -
gcttgtggatattaaataac

SEQ ID NO: 29583 - DNA, 20 bp, Artificial Sequence
  Synthetic oligonucleotide; TAG chr11 5394519 5394538 5394522 -
gtggatattaaataacggga

SEQ ID NO: 29584 - DNA, 20 bp, Artificial Sequence
  Synthetic oligonucleotide; AAG chr11 5394511 5394530 5394514 -
taaataacgggatagttgta

SEQ ID NO: 29585 - DNA, 20 bp, Artificial Sequence
  Synthetic oligonucleotide; CAG chr11 5394497 5394516 5394500 -
gttgtaaagatttttgcctg

SEQ ID NO: 29586 - DNA, 20 bp, Artificial Sequence
  Synthetic oligonucleotide; AGG chr11 5394496 5394515 5394499 -
ttgtaaagatttttgcctgc

SEQ ID NO: 29587 - DNA, 20 bp, Artificial Sequence
  Synthetic oligonucleotide; TAG chr11 5394489 5394508 5394492 -
gatttttgcctgcaggaata

SEQ ID NO: 29588 - DNA, 20 bp, Artificial Sequence
  Synthetic oligonucleotide; AGG chr11 5394488 5394507 5394491 -
atttttgcctgcaggaatat

SEQ ID NO: 29589 - DNA, 20 bp, Artificial Sequence
  Synthetic oligonucleotide; GAG chr11 5394477 5394496 5394480 -
caggaatataggcttgtgct

SEQ ID NO: 29590 - DNA, 20 bp, Artificial Sequence
  Synthetic oligonucleotide; AGG chr11 5394476 5394495 5394479 -
aggaatataggcttgtgctg

SEQ ID NO: 29591 - DNA, 20 bp, Artificial Sequence
  Synthetic oligonucleotide; TGG chr11 5394471 5394490 5394474 -
tataggcttgtgctgaggaa

SEQ ID NO: 29592 - DNA, 20 bp, Artificial Sequence
  Synthetic oligonucleotide; GGG chr11 5394470 5394489 5394473 -
ataggcttgtgctgaggaat

SEQ ID NO: 29593 - DNA, 20 bp, Artificial Sequence
  Synthetic oligonucleotide; CAG chr11 5394466 5394485 5394469 -
gcttgtgctgaggaatgggc

SEQ ID NO: 29594 - DNA, 20 bp, Artificial Sequence
  Synthetic oligonucleotide; AAG chr11 5394455 5394474 5394458 -
ggaatgggccagatgattta

SEQ ID NO: 29595 - DNA, 20 bp, Artificial Sequence
  Synthetic oligonucleotide; CAG chr11 5394452 5394471 5394455 -
atgggccagatgatttaaag

SEQ ID NO: 29596 - DNA, 20 bp, Artificial Sequence
  Synthetic oligonucleotide; TAG chr11 5394439 5394458 5394442 -
tttaaagcagatactgtcat

SEQ ID NO: 29597 - DNA, 20 bp, Artificial Sequence
  Synthetic oligonucleotide; CAG chr11 5394436 5394455 5394439 -
aaagcagatactgtcattag

SEQ ID NO: 29598 - DNA, 20 bp, Artificial Sequence
  Synthetic oligonucleotide; AGG chr11 5394435 5394454 5394438 -
aagcagatactgtcattagc

SEQ ID NO: 29599 - DNA, 20 bp, Artificial Sequence
  Synthetic oligonucleotide; CAG chr11 5394424 5394443 5394427 -
gtcattagcaggaatatgta

SEQ ID NO: 29600 - DNA, 20 bp, Artificial Sequence
  Synthetic oligonucleotide; TGG chr11 5394418 5394437 5394421 -
agcaggaatatgtacagctt

SEQ ID NO: 29601 - DNA, 20 bp, Artificial Sequence
  Synthetic oligonucleotide; TGG chr11 5394397 5394416 5394400 -
ggctgattttatgttttttt

SEQ ID NO: 29602 - DNA, 20 bp, Artificial Sequence
  Synthetic oligonucleotide; CAG chr11 5394375 5394394 5394378 -
gtttgttgttgttgttgaat

SEQ ID NO: 29603 - DNA, 20 bp, Artificial Sequence
  Synthetic oligonucleotide; TGG chr11 5394372 5394391 5394375 -
tgttgttgttgttgaatcag

SEQ ID NO: 29604 - DNA, 20 bp, Artificial Sequence
  Synthetic oligonucleotide; GAG chr11 5394370 5394389 5394373 -
ttgttgttgttgaatcagtg

SEQ ID NO: 29605 - DNA, 20 bp, Artificial Sequence
  Synthetic oligonucleotide; TAG chr11 5394365 5394384 5394368 -
gttgttgaatcagtggagca

SEQ ID NO: 29606 - DNA, 20 bp, Artificial Sequence
  Synthetic oligonucleotide; AAG chr11 5394352 5394371 5394355 -
tggagcatagttaaaactac

SEQ ID NO: 29607 - DNA, 20 bp, Artificial Sequence
  Synthetic oligonucleotide; CAG chr11 5394344 5394363 5394347 -
agttaaaactacaagcacca

SEQ ID NO: 29608 - DNA, 20 bp, Artificial Sequence
  Synthetic oligonucleotide; CAG chr11 5394340 5394359 5394343 -
aaaactacaagcaccacagt

SEQ ID NO: 29609 - DNA, 20 bp, Artificial Sequence
  Synthetic oligonucleotide; TGG chr11 5394325 5394344 5394328 -
acagtcagaactgtcaaact

SEQ ID NO: 29610 - DNA, 20 bp, Artificial Sequence
  Synthetic oligonucleotide; TGG chr11 5394314 5394333 5394317 -
tgtcaaacttggtataatat

SEQ ID NO: 29611 - DNA, 20 bp, Artificial Sequence
  Synthetic oligonucleotide; GGG chr11 5394313 5394332 5394316 -
gtcaaacttggtataatatt

SEQ ID NO: 29612 - DNA, 20 bp, Artificial Sequence
  Synthetic oligonucleotide; AAG chr11 5394309 5394328 5394312 -
aacttggtataatattgggc

SEQ ID NO: 29613 - DNA, 20 bp, Artificial Sequence
  Synthetic oligonucleotide; GAG chr11 5394293 5394312 5394296 -
gggcaagatattttgtctct

SEQ ID NO: 29614 - DNA, 20 bp, Artificial Sequence
  Synthetic oligonucleotide; CAG chr11 5394287 5394306 5394290 -
gatattttgtctctgagcct

SEQ ID NO: 29615 - DNA, 20 bp, Artificial Sequence
  Synthetic oligonucleotide; TGG chr11 5394267 5394286 5394270 -
cagtgtacttatctgtaaaa

SEQ ID NO: 29616 - DNA, 20 bp, Artificial Sequence
  Synthetic oligonucleotide; GGG chr11 5394266 5394285 5394269 -
agtgtacttatctgtaaaat

SEQ ID NO: 29617 - DNA, 20 bp, Artificial Sequence
  Synthetic oligonucleotide; TAG chr11 5394258 5394277 5394261 -
tatctgtaaaatgggtaatc

SEQ ID NO: 29618 - DNA, 20 bp, Artificial Sequence
  Synthetic oligonucleotide; TAG chr11 5394255 5394274 5394258 -
ctgtaaaatgggtaatctag

SEQ ID NO: 29619 - DNA, 20 bp, Artificial Sequence
  Synthetic oligonucleotide; AAG chr11 5394240 5394259 5394243 -
tctagtagtatccatctcat

SEQ ID NO: 29620 - DNA, 20 bp, Artificial Sequence
  Synthetic oligonucleotide; AGG chr11 5394239 5394258 5394242 -
ctagtagtatccatctcata

SEQ ID NO: 29621 - DNA, 20 bp, Artificial Sequence
  Synthetic oligonucleotide; AAG chr11 5394228 5394247 5394231 -
catctcataaggttattgtc

SEQ ID NO: 29622 - DNA, 20 bp, Artificial Sequence
  Synthetic oligonucleotide; AAG chr11 5394222 5394241 5394225 -
ataaggttattgtcaagata

SEQ ID NO: 29623 - DNA, 20 bp, Artificial Sequence
  Synthetic oligonucleotide; TAG chr11 5394212 5394231 5394215 -
tgtcaagataaagtgactta

SEQ ID NO: 29624 - DNA, 20 bp, Artificial Sequence
  Synthetic oligonucleotide; TAG chr11 5394196 5394215 5394199 -
cttatagtgtattatgccct

SEQ ID NO: 29625 - DNA, 20 bp, Artificial Sequence
  Synthetic oligonucleotide; TAG chr11 5394184 5394203 5394187 -
tatgcccttagaataatacc

SEQ ID NO: 29626 - DNA, 20 bp, Artificial Sequence
  Synthetic oligonucleotide; AGG chr11 5394183 5394202 5394186 -
atgcccttagaataatacct

SEQ ID NO: 29627 - DNA, 20 bp, Artificial Sequence
  Synthetic oligonucleotide; TAG chr11 5394144 5394163 5394147 -
aaaaaccatgatatgcaaaa

SEQ ID NO: 29628 - DNA, 20 bp, Artificial Sequence
  Synthetic oligonucleotide; AAG chr11 5394141 5394160 5394144 -
aaccatgatatgcaaaatag

SEQ ID NO: 29629 - DNA, 20 bp, Artificial Sequence
  Synthetic oligonucleotide; AGG chr11 5394140 5394159 5394143 -
accatgatatgcaaaataga

SEQ ID NO: 29630 - DNA, 20 bp, Artificial Sequence
  Synthetic oligonucleotide; CAG chr11 5394133 5394152 5394136 -
tatgcaaaatagaaggtact

SEQ ID NO: 29631 - DNA, 20 bp, Artificial Sequence
  Synthetic oligonucleotide; GAG chr11 5394119 5394138 5394122 -
ggtactcagtaccttctact

SEQ ID NO: 29632 - DNA, 20 bp, Artificial Sequence
  Synthetic oligonucleotide; AAG chr11 5394086 5394105 5394089 -
aatctataactcttaaaatc

SEQ ID NO: 29633 - DNA, 20 bp, Artificial Sequence
  Synthetic oligonucleotide; AAG chr11 5394074 5394093 5394077 -
ttaaaatcaagtctattaaa

SEQ ID NO: 29634 - DNA, 20 bp, Artificial Sequence
  Synthetic oligonucleotide; TGG chr11 5394012 5394031 5394015 -
tatcttttcctgatactaaa

SEQ ID NO: 29635 - DNA, 20 bp, Artificial Sequence
  Synthetic oligonucleotide; TAG chr11 5394004 5394023 5394007 -
cctgatactaaatggaaaaa

SEQ ID NO: 29636 - DNA, 20 bp, Artificial Sequence
  Synthetic oligonucleotide; TAG chr11 5393990 5394009 5393993 -
gaaaaatagataacatattc

SEQ ID NO: 29637 - DNA, 20 bp, Artificial Sequence
  Synthetic oligonucleotide; AGG chr11 5393989 5394008 5393992 -
aaaaatagataacatattct

SEQ ID NO: 29638 - DNA, 20 bp, Artificial Sequence
  Synthetic oligonucleotide; AAG chr11 5393985 5394004 5393988 -
atagataacatattctagga

SEQ ID NO: 29639 - DNA, 20 bp, Artificial Sequence
  Synthetic oligonucleotide; AGG chr11 5393984 5394003 5393987 -
tagataacatattctaggaa

SEQ ID NO: 29640 - DNA, 20 bp, Artificial Sequence
  Synthetic oligonucleotide; GGG chr11 5393983 5394002 5393986 -
agataacatattctaggaaa

SEQ ID NO: 29641 - DNA, 20 bp, Artificial Sequence
  Synthetic oligonucleotide; AAG chr11 5393974 5393993 5393977 -
attctaggaaagggaacaaa

SEQ ID NO: 29642 - DNA, 20 bp, Artificial Sequence
  Synthetic oligonucleotide; TAG chr11 5393970 5393989 5393973 -
taggaaagggaacaaaaagt

SEQ ID NO: 29643 - DNA, 20 bp, Artificial Sequence
  Synthetic oligonucleotide; AGG chr11 5393969 5393988 5393972 -
aggaaagggaacaaaaagtt

SEQ ID NO: 29644 - DNA, 20 bp, Artificial Sequence
  Synthetic oligonucleotide; GGG chr11 5393968 5393987 5393971 -
ggaaagggaacaaaaagtta

SEQ ID NO: 29645 - DNA, 20 bp, Artificial Sequence
  Synthetic oligonucleotide; GAG chr11 5393966 5393985 5393969 -
aaagggaacaaaaagttagg

SEQ ID NO: 29646 - DNA, 20 bp, Artificial Sequence
  Synthetic oligonucleotide; AAG chr11 5393963 5393982 5393966 -
gggaacaaaaagttagggag

SEQ ID NO: 29647 - DNA, 20 bp, Artificial Sequence
  Synthetic oligonucleotide; TGG chr11 5393953 5393972 5393956 -
agttagggagaagccaatga

SEQ ID NO: 29648 - DNA, 20 bp, Artificial Sequence
  Synthetic oligonucleotide; GGG chr11 5393952 5393971 5393955 -
gttagggagaagccaatgat

SEQ ID NO: 29649 - DNA, 20 bp, Artificial Sequence
  Synthetic oligonucleotide; CAG chr11 5393941 5393960 5393944 -
gccaatgatgggacttcctt

SEQ ID NO: 29650 - DNA, 20 bp, Artificial Sequence
  Synthetic oligonucleotide; TGG chr11 5393931 5393950 5393934 -
ggacttccttcagtataaca

SEQ ID NO: 29651 - DNA, 20 bp, Artificial Sequence
  Synthetic oligonucleotide; TGG chr11 5393922 5393941 5393925 -
tcagtataacatggaaaaca

SEQ ID NO: 29652 - DNA, 20 bp, Artificial Sequence
  Synthetic oligonucleotide; GAG chr11 5393910 5393929 5393913 -
ggaaaacatggccctgaaac

SEQ ID NO: 29653 - DNA, 20 bp, Artificial Sequence
  Synthetic oligonucleotide; TGG chr11 5393907 5393926 5393910 -
aaacatggccctgaaacgag

SEQ ID NO: 29654 - DNA, 20 bp, Artificial Sequence
  Synthetic oligonucleotide; TGG chr11 5393897 5393916 5393900 -
ctgaaacgagtggtcctgtt

SEQ ID NO: 29655 - DNA, 20 bp, Artificial Sequence
  Synthetic oligonucleotide; GAG chr11 5393895 5393914 5393898 -
gaaacgagtggtcctgtttg

SEQ ID NO: 29656 - DNA, 20 bp, Artificial Sequence
  Synthetic oligonucleotide; GAG chr11 5393893 5393912 5393896 -
aacgagtggtcctgtttgga

SEQ ID NO: 29657 - DNA, 20 bp, Artificial Sequence
  Synthetic oligonucleotide; AGG chr11 5393892 5393911 5393895 -
acgagtggtcctgtttggag

SEQ ID NO: 29658 - DNA, 20 bp, Artificial Sequence
  Synthetic oligonucleotide; GAG chr11 5393890 5393909 5393893 -
gagtggtcctgtttggagag

SEQ ID NO: 29659 - DNA, 20 bp, Artificial Sequence
  Synthetic oligonucleotide; CAG chr11 5393885 5393904 5393888 -
gtcctgtttggagaggagtc

SEQ ID NO: 29660 - DNA, 20 bp, Artificial Sequence
  Synthetic oligonucleotide; TGG chr11 5393877 5393896 5393880 -
tggagaggagtccagcataa

SEQ ID NO: 29661 - DNA, 20 bp, Artificial Sequence
  Synthetic oligonucleotide; AAG chr11 5393871 5393890 5393874 -
ggagtccagcataatggttt

SEQ ID NO: 29662 - DNA, 20 bp, Artificial Sequence
  Synthetic oligonucleotide; CAG chr11 5393863 5393882 5393866 -
gcataatggtttaagaaaat

SEQ ID NO: 29663 - DNA, 20 bp, Artificial Sequence
  Synthetic oligonucleotide; CAG chr11 5393840 5393859 5393843 -
atgcgcttgatattgaattt

SEQ ID NO: 29664 - DNA, 20 bp, Artificial Sequence
  Synthetic oligonucleotide; AAG chr11 5393811 5393830 5393814 -
cttacattaatgatttaact

SEQ ID NO: 29665 - DNA, 20 bp, Artificial Sequence
  Synthetic oligonucleotide; AGG chr11 5393810 5393829 5393813 -
ttacattaatgatttaacta

SEQ ID NO: 29666 - DNA, 20 bp, Artificial Sequence
  Synthetic oligonucleotide; AAG chr11 5393806 5393825 5393809 -
attaatgatttaactaagga

SEQ ID NO: 29667 - DNA, 20 bp, Artificial Sequence
  Synthetic oligonucleotide; GAG chr11 5393789 5393808 5393792 -
ggaaagttgctttcctctgt

SEQ ID NO: 29668 - DNA, 20 bp, Artificial Sequence
  Synthetic oligonucleotide; CAG chr11 5393783 5393802 5393786 -
ttgctttcctctgtgagcct

SEQ ID NO: 29669 - DNA, 20 bp, Artificial Sequence
  Synthetic oligonucleotide; CAG chr11 5393734 5393753 5393737 -
aataatacctccctacttca

SEQ ID NO: 29670 - DNA, 20 bp, Artificial Sequence
  Synthetic oligonucleotide; AGG chr11 5393733 5393752 5393736 -
ataatacctccctacttcac

SEQ ID NO: 29671 - DNA, 20 bp, Artificial Sequence
  Synthetic oligonucleotide; TGG chr11 5393728 5393747 5393731 -
acctccctacttcacaggtt

SEQ ID NO: 29672 - DNA, 20 bp, Artificial Sequence
  Synthetic oligonucleotide; GAG chr11 5393724 5393743 5393727 -
ccctacttcacaggtttggt

SEQ ID NO: 29673 - DNA, 20 bp, Artificial Sequence
  Synthetic oligonucleotide; AAG chr11 5393684 5393703 5393687 -
tgtaaaataatgaaaataaa

SEQ ID NO: 29674 - DNA, 20 bp, Artificial Sequence
  Synthetic oligonucleotide; CAG chr11 5393677 5393696 5393680 -
taatgaaaataaaaagtact

SEQ ID NO: 29675 - DNA, 20 bp, Artificial Sequence
  Synthetic oligonucleotide; GAG chr11 5393661 5393680 5393664 -
tactcagccctctctaccgt

SEQ ID NO: 29676 - DNA, 20 bp, Artificial Sequence
  Synthetic oligonucleotide; TAG chr11 5393639 5393658 5393642 -
gttaaatgcttaataaacat

SEQ ID NO: 29677 - DNA, 20 bp, Artificial Sequence
  Synthetic oligonucleotide; CAG chr11 5393596 5393615 5393599 -
atcatcttcattgtcatctt

SEQ ID NO: 29678 - DNA, 20 bp, Artificial Sequence
  Synthetic oligonucleotide; TAG chr11 5393571 5393590 5393574 -
taatcgtatataacttttta

SEQ ID NO: 29679 - DNA, 20 bp, Artificial Sequence
  Synthetic oligonucleotide; TAG chr11 5393548 5393567 5393551 -
tcattgtaaaatgctctttt

SEQ ID NO: 29680 - DNA, 20 bp, Artificial Sequence
  Synthetic oligonucleotide; CAG chr11 5393521 5393540 5393524 -
taaaaccgaaatgtcttctt

SEQ ID NO: 29681 - DNA, 20 bp, Artificial Sequence
  Synthetic oligonucleotide; CGG chr11 5393506 5393525 5393509 -
ttcttcagaaaatttgtata

SEQ ID NO: 29682 - DNA, 20 bp, Artificial Sequence
  Synthetic oligonucleotide; AAG chr11 5393501 5393520 5393504 -
cagaaaatttgtatacggca

SEQ ID NO: 29683 - DNA, 20 bp, Artificial Sequence
  Synthetic oligonucleotide; TAG chr11 5393497 5393516 5393500 -
aaatttgtatacggcaaaga

SEQ ID NO: 29684 - DNA, 20 bp, Artificial Sequence
  Synthetic oligonucleotide; GAG chr11 5393495 5393514 5393498 -
atttgtatacggcaaagata

SEQ ID NO: 29685 - DNA, 20 bp, Artificial Sequence
  Synthetic oligonucleotide; TAG chr11 5393483 5393502 5393486 -
caaagatagagaaatctata

SEQ ID NO: 29686 - DNA, 20 bp, Artificial Sequence
  Synthetic oligonucleotide; AAG chr11 5393475 5393494 5393478 -
gagaaatctatatagaaaat

SEQ ID NO: 29687 - DNA, 20 bp, Artificial Sequence
  Synthetic oligonucleotide; CAG chr11 5393461 5393480 5393464 -
gaaaataagattatatataa

SEQ ID NO: 29688 - DNA, 20 bp, Artificial Sequence
  Synthetic oligonucleotide; TAG chr11 5393431 5393450 5393434 -
tcttttgatacaaatattta

SEQ ID NO: 29689 - DNA, 20 bp, Artificial Sequence
  Synthetic oligonucleotide; TAG chr11 5393419 5393438 5393422 -
aatatttatagccttttaca

SEQ ID NO: 29690 - DNA, 20 bp, Artificial Sequence
  Synthetic oligonucleotide; CAG chr11 5393367 5393386 5393370 -
tttatttaatattttgccaa

SEQ ID NO: 29691 - DNA, 20 bp, Artificial Sequence
  Synthetic oligonucleotide; AAG chr11 5393358 5393377 5393361 -
tattttgccaacagtttcct

SEQ ID NO: 29692 - DNA, 20 bp, Artificial Sequence
  Synthetic oligonucleotide; TAG chr11 5393333 5393352 5393336 -
tttaaatgtcattttaataa

SEQ ID NO: 29693 - DNA, 20 bp, Artificial Sequence
  Synthetic oligonucleotide; TAG chr11 5393287 5393306 5393290 -
tttatgtaatatttttattc

SEQ ID NO: 29694 - DNA, 20 bp, Artificial Sequence
  Synthetic oligonucleotide; TAG chr11 5393217 5393236 5393220 -
tataatattcacttattaaa

SEQ ID NO: 29695 - DNA, 20 bp, Artificial Sequence
  Synthetic oligonucleotide; TAG chr11 5393186 5393205 5393189 -
atatttattgatcactgacc

SEQ ID NO: 29696 - DNA, 20 bp, Artificial Sequence
  Synthetic oligonucleotide; AGG chr11 5393185 5393204 5393188 -
tatttattgatcactgacct

SEQ ID NO: 29697 - DNA, 20 bp, Artificial Sequence
  Synthetic oligonucleotide; GAG chr11 5393183 5393202 5393186 -
tttattgatcactgacctag

SEQ ID NO: 29698 - DNA, 20 bp, Artificial Sequence
  Synthetic oligonucleotide; TGG chr11 5393179 5393198 5393182 -
ttgatcactgacctaggaga

SEQ ID NO: 29699 - DNA, 20 bp, Artificial Sequence
  Synthetic oligonucleotide; TAG chr11 5393173 5393192 5393176 -
actgacctaggagatggatt

SEQ ID NO: 29700 - DNA, 20 bp, Artificial Sequence
  Synthetic oligonucleotide; GAG chr11 5393164 5393183 5393167 -
ggagatggatttagaactgt

SEQ ID NO: 29701 - DNA, 20 bp, Artificial Sequence
  Synthetic oligonucleotide; CAG chr11 5393157 5393176 5393160 -
gatttagaactgtgagcaaa

SEQ ID NO: 29702 - DNA, 20 bp, Artificial Sequence
  Synthetic oligonucleotide; AGG chr11 5393156 5393175 5393159 -
atttagaactgtgagcaaac

SEQ ID NO: 29703 - DNA, 20 bp, Artificial Sequence
  Synthetic oligonucleotide; CAG chr11 5393134 5393153 5393137 -
gaaaaaaattttgccacaaa

SEQ ID NO: 29704 - DNA, 20 bp, Artificial Sequence
  Synthetic oligonucleotide; TAG chr11 5393098 5393117 5393101 -
tttttaatttatcatttatt

SEQ ID NO: 29705 - DNA, 20 bp, Artificial Sequence
  Synthetic oligonucleotide; AGG chr11 5393097 5393116 5393100 -
ttttaatttatcatttattt

SEQ ID NO: 29706 - DNA, 20 bp, Artificial Sequence
  Synthetic oligonucleotide; CAG chr11 5393093 5393112 5393096 -
aatttatcatttatttagga

SEQ ID NO: 29707 - DNA, 20 bp, Artificial Sequence
  Synthetic oligonucleotide; TAG chr11 5393085 5393104 5393088 -
atttatttaggacagatttt

SEQ ID NO: 29708 - DNA, 20 bp, Artificial Sequence
  Synthetic oligonucleotide; AAG chr11 5393082 5393101 5393085 -
tatttaggacagatttttag

SEQ ID NO: 29709 - DNA, 20 bp, Artificial Sequence
  Synthetic oligonucleotide; TGG chr11 5393079 5393098 5393082 -
ttaggacagatttttagaag

SEQ ID NO: 29710 - DNA, 20 bp, Artificial Sequence
  Synthetic oligonucleotide; GAG chr11 5393069 5393088 5393072 -
tttttagaagtggcatttct

SEQ ID NO: 29711 - DNA, 20 bp, Artificial Sequence
  Synthetic oligonucleotide; CAG chr11 5393063 5393082 5393066 -
gaagtggcatttctgagaca

SEQ ID NO: 29712 - DNA, 20 bp, Artificial Sequence
  Synthetic oligonucleotide; GAG chr11 5393061 5393080 5393064 -
agtggcatttctgagacaca

SEQ ID NO: 29713 - DNA, 20 bp, Artificial Sequence
  Synthetic oligonucleotide; AAG chr11 5393045 5393064 5393048 -
cacagagcatgaatattttc

SEQ ID NO: 29714 - DNA, 20 bp, Artificial Sequence
  Synthetic oligonucleotide; AAG chr11 5393015 5393034 5393018 -
atgtattttgttttttataa

SEQ ID NO: 29715 - DNA, 20 bp, Artificial Sequence
  Synthetic oligonucleotide; AGG chr11 5393014 5393033 5393017 -
tgtattttgttttttataaa

SEQ ID NO: 29716 - DNA, 20 bp, Artificial Sequence
  Synthetic oligonucleotide; TGG chr11 5392988 5393007 5392991 -
attaaattatgttttcattc

SEQ ID NO: 29717 - DNA, 20 bp, Artificial Sequence
  Synthetic oligonucleotide; CAG chr11 5392952 5392971 5392955 -
ctcttttaccacatacttaa

SEQ ID NO: 29718 - DNA, 20 bp, Artificial Sequence
  Synthetic oligonucleotide; CAG chr11 5392947 5392966 5392950 -
ttaccacatacttaacagca

SEQ ID NO: 29719 - DNA, 20 bp, Artificial Sequence
  Synthetic oligonucleotide; GAG chr11 5392912 5392931 5392915 -
ttttctttttttttgttttt

SEQ ID NO: 29720 - DNA, 20 bp, Artificial Sequence
  Synthetic oligonucleotide; AAG chr11 5392909 5392928 5392912 -
tctttttttttgtttttgag

SEQ ID NO: 29721 - DNA, 20 bp, Artificial Sequence
  Synthetic oligonucleotide; AGG chr11 5392908 5392927 5392911 -
ctttttttttgtttttgaga

SEQ ID NO: 29722 - DNA, 20 bp, Artificial Sequence
  Synthetic oligonucleotide; GAG chr11 5392906 5392925 5392909 -
ttttttttgtttttgagaag

SEQ ID NO: 29723 - DNA, 20 bp, Artificial Sequence
  Synthetic oligonucleotide; CAG chr11 5392888 5392907 5392891 -
aggagtcttgctctgttgcc

SEQ ID NO: 29724 - DNA, 20 bp, Artificial Sequence
  Synthetic oligonucleotide; AGG chr11 5392887 5392906 5392890 -
ggagtcttgctctgttgccc

SEQ ID NO: 29725 - DNA, 20 bp, Artificial Sequence
  Synthetic oligonucleotide; TGG chr11 5392883 5392902 5392886 -
tcttgctctgttgcccaggc

SEQ ID NO: 29726 - DNA, 20 bp, Artificial Sequence
  Synthetic oligonucleotide; GAG chr11 5392881 5392900 5392884 -
ttgctctgttgcccaggctg

SEQ ID NO: 29727 - DNA, 20 bp, Artificial Sequence
  Synthetic oligonucleotide; CAG chr11 5392876 5392895 5392879 -
ctgttgcccaggctggagtg

SEQ ID NO: 29728 - DNA, 20 bp, Artificial Sequence
  Synthetic oligonucleotide; TGG chr11 5392873 5392892 5392876 -
ttgcccaggctggagtgcag

SEQ ID NO: 29729 - DNA, 20 bp, Artificial Sequence
  Synthetic oligonucleotide; CGG chr11 5392862 5392881 5392865 -
ggagtgcagtggcacgatct

SEQ ID NO: 29730 - DNA, 20 bp, Artificial Sequence
  Synthetic oligonucleotide; AAG chr11 5392851 5392870 5392854 -
gcacgatctcggctcactgc

SEQ ID NO: 29731 - DNA, 20 bp, Artificial Sequence
  Synthetic oligonucleotide; TGG chr11 5392838 5392857 5392841 -
tcactgcaagctccacctcc

SEQ ID NO: 29732 - DNA, 20 bp, Artificial Sequence
  Synthetic oligonucleotide; GGG chr11 5392837 5392856 5392840 -
cactgcaagctccacctcct

SEQ ID NO: 29733 - DNA, 20 bp, Artificial Sequence
  Synthetic oligonucleotide; CAG chr11 5392814 5392833 5392817 -
ttcacgccattctgctgccc

SEQ ID NO: 29734 - DNA, 20 bp, Artificial Sequence
  Synthetic oligonucleotide; GAG chr11 5392805 5392824 5392808 -
ttctgctgccccagcctcct

SEQ ID NO: 29735 - DNA, 20 bp, Artificial Sequence
  Synthetic oligonucleotide; TAG chr11 5392802 5392821 5392805 -
tgctgccccagcctcctgag

SEQ ID NO: 29736 - DNA, 20 bp, Artificial Sequence
  Synthetic oligonucleotide; TGG chr11 5392798 5392817 5392801 -
gccccagcctcctgagtagc

SEQ ID NO: 29737 - DNA, 20 bp, Artificial Sequence
  Synthetic oligonucleotide; GGG chr11 5392797 5392816 5392800 -
ccccagcctcctgagtagct

SEQ ID NO: 29738 - DNA, 20 bp, Artificial Sequence
  Synthetic oligonucleotide; CAG chr11 5392790 5392809 5392793 -
ctcctgagtagctgggacta

SEQ ID NO: 29739 - DNA, 20 bp, Artificial Sequence
  Synthetic oligonucleotide; AGG chr11 5392789 5392808 5392792 -
tcctgagtagctgggactac

SEQ ID NO: 29740 - DNA, 20 bp, Artificial Sequence
  Synthetic oligonucleotide; CGG chr11 5392770 5392789 5392773 -
caggtgcccaccaccatgcc

SEQ ID NO: 29741 - DNA, 20 bp, Artificial Sequence
  Synthetic oligonucleotide; TAG chr11 5392750 5392769 5392753 -
cggctaactttttgtatttt

SEQ ID NO: 29742 - DNA, 20 bp, Artificial Sequence
  Synthetic oligonucleotide; TAG chr11 5392747 5392766 5392750 -
ctaactttttgtatttttag

SEQ ID NO: 29743 - DNA, 20 bp, Artificial Sequence
  Synthetic oligonucleotide; GAG chr11 5392745 5392764 5392748 -
aactttttgtatttttagta

SEQ ID NO: 29744 - DNA, 20 bp, Artificial Sequence
  Synthetic oligonucleotide; TGG chr11 5392740 5392759 5392743 -
tttgtatttttagtagagac

SEQ ID NO: 29745 - DNA, 20 bp, Artificial Sequence
  Synthetic oligonucleotide; GGG chr11 5392739 5392758 5392742 -
ttgtatttttagtagagact

SEQ ID NO: 29746 - DNA, 20 bp, Artificial Sequence
  Synthetic oligonucleotide; TAG chr11 5392725 5392744 5392728 -
gagactgggttccaccgtgt

SEQ ID NO: 29747 - DNA, 20 bp, Artificial Sequence
  Synthetic oligonucleotide; CAG chr11 5392721 5392740 5392724 -
ctgggttccaccgtgttagc

SEQ ID NO: 29748 - DNA, 20 bp, Artificial Sequence
  Synthetic oligonucleotide; AGG chr11 5392720 5392739 5392723 -
tgggttccaccgtgttagcc

SEQ ID NO: 29749 - DNA, 20 bp, Artificial Sequence
  Synthetic oligonucleotide; TGG chr11 5392716 5392735 5392719 -
ttccaccgtgttagccagga

SEQ ID NO: 29750 - DNA, 20 bp, Artificial Sequence
  Synthetic oligonucleotide; CGG chr11 5392680 5392699 5392683 -
acctcgtgatccacccgcct

SEQ ID NO: 29751 - DNA, 20 bp, Artificial Sequence
  Synthetic oligonucleotide; CAG chr11 5392672 5392691 5392675 -
atccacccgcctcggcctcc

SEQ ID NO: 29752 - DNA, 20 bp, Artificial Sequence
  Synthetic oligonucleotide; GAG chr11 5392670 5392689 5392673 -
ccacccgcctcggcctccca

SEQ ID NO: 29753 - DNA, 20 bp, Artificial Sequence
  Synthetic oligonucleotide; TGG chr11 5392664 5392683 5392667 -
gcctcggcctcccagagtgc

SEQ ID NO: 29754 - DNA, 20 bp, Artificial Sequence
  Synthetic oligonucleotide; GGG chr11 5392663 5392682 5392666 -
cctcggcctcccagagtgct

SEQ ID NO: 29755 - DNA, 20 bp, Artificial Sequence
  Synthetic oligonucleotide; CAG chr11 5392656 5392675 5392659 -
ctcccagagtgctgggatta

SEQ ID NO: 29756 - DNA, 20 bp, Artificial Sequence
  Synthetic oligonucleotide; AGG chr11 5392655 5392674 5392658 -
tcccagagtgctgggattac

SEQ ID NO: 29757 - DNA, 20 bp, Artificial Sequence
  Synthetic oligonucleotide; GAG chr11 5392649 5392668 5392652 -
agtgctgggattacaggcgt

SEQ ID NO: 29758 - DNA, 20 bp, Artificial Sequence
  Synthetic oligonucleotide; CAG chr11 5392636 5392655 5392639 -
caggcgtgagccaccgcgcc

SEQ ID NO: 29759 - DNA, 20 bp, Artificial Sequence
  Synthetic oligonucleotide; CAG chr11 5392632 5392651 5392635 -
cgtgagccaccgcgcccagc

SEQ ID NO: 29760 - DNA, 20 bp, Artificial Sequence
  Synthetic oligonucleotide; TAG chr11 5392594 5392613 5392597 -
tctattcttcaatattcgtt

SEQ ID NO: 29761 - DNA, 20 bp, Artificial Sequence
  Synthetic oligonucleotide; AAG chr11 5392582 5392601 5392585 -
tattcgtttagtaacaaatt

SEQ ID NO: 29762 - DNA, 20 bp, Artificial Sequence
  Synthetic oligonucleotide; GAG chr11 5392554 5392573 5392557 -
ttaatttgcattttaaattt

SEQ ID NO: 29763 - DNA, 20 bp, Artificial Sequence
  Synthetic oligonucleotide; AAG chr11 5392550 5392569 5392553 -
tttgcattttaaatttgagt

SEQ ID NO: 29764 - DNA, 20 bp, Artificial Sequence
  Synthetic oligonucleotide; AGG chr11 5392549 5392568 5392552 -
ttgcattttaaatttgagta

SEQ ID NO: 29765 - DNA, 20 bp, Artificial Sequence
  Synthetic oligonucleotide; TAG chr11 5392546 5392565 5392549 -
cattttaaatttgagtaagg

SEQ ID NO: 29766 - DNA, 20 bp, Artificial Sequence
  Synthetic oligonucleotide; AAG chr11 5392543 5392562 5392546 -
tttaaatttgagtaaggtag

SEQ ID NO: 29767 - DNA, 20 bp, Artificial Sequence
  Synthetic oligonucleotide; TAG chr11 5392489 5392508 5392492 -
cctaatttgaaaatgaaatt

SEQ ID NO: 29768 - DNA, 20 bp, Artificial Sequence
  Synthetic oligonucleotide; CAG chr11 5392482 5392501 5392485 -
tgaaaatgaaatttagatgt

SEQ ID NO: 29769 - DNA, 20 bp, Artificial Sequence
  Synthetic oligonucleotide; TGG chr11 5392479 5392498 5392482 -
aaatgaaatttagatgtcag

SEQ ID NO: 29770 - DNA, 20 bp, Artificial Sequence
  Synthetic oligonucleotide; AAG chr11 5392463 5392482 5392466 -
tcagtggtctatttgttaat

SEQ ID NO: 29771 - DNA, 20 bp, Artificial Sequence
  Synthetic oligonucleotide; GAG chr11 5392461 5392480 5392464 -
agtggtctatttgttaataa

SEQ ID NO: 29772 - DNA, 20 bp, Artificial Sequence
  Synthetic oligonucleotide; AGG chr11 5392460 5392479 5392463 -
gtggtctatttgttaataag

SEQ ID NO: 29773 - DNA, 20 bp, Artificial Sequence
  Synthetic oligonucleotide; TGG chr11 5392452 5392471 5392455 -
tttgttaataagaggcaaaa

SEQ ID NO: 29774 - DNA, 20 bp, Artificial Sequence
  Synthetic oligonucleotide; GGG chr11 5392451 5392470 5392454 -
ttgttaataagaggcaaaat

SEQ ID NO: 29775 - DNA, 20 bp, Artificial Sequence
  Synthetic oligonucleotide; CAG chr11 5392444 5392463 5392447 -
taagaggcaaaatgggactt

SEQ ID NO: 29776 - DNA, 20 bp, Artificial Sequence
  Synthetic oligonucleotide; GAG chr11 5392391 5392410 5392394 -
tgtaccccattctaccaaat

SEQ ID NO: 29777 - DNA, 20 bp, Artificial Sequence
  Synthetic oligonucleotide; TAG chr11 5392383 5392402 5392386 -
attctaccaaatgagatcta

SEQ ID NO: 29778 - DNA, 20 bp, Artificial Sequence
  Synthetic oligonucleotide; TAG chr11 5392378 5392397 5392381 -
accaaatgagatctatagaa

SEQ ID NO: 29779 - DNA, 20 bp, Artificial Sequence
  Synthetic oligonucleotide; AGG chr11 5392377 5392396 5392380 -
ccaaatgagatctatagaat

SEQ ID NO: 29780 - DNA, 20 bp, Artificial Sequence
  Synthetic oligonucleotide; TGG chr11 5392359 5392378 5392362 -
ataggaatttcctctcaaca

SEQ ID NO: 29781 - DNA, 20 bp, Artificial Sequence
  Synthetic oligonucleotide; GAG chr11 5392357 5392376 5392360 -
aggaatttcctctcaacatg

SEQ ID NO: 29782 - DNA, 20 bp, Artificial Sequence
  Synthetic oligonucleotide; AAG chr11 5392354 5392373 5392357 -
aatttcctctcaacatggag

SEQ ID NO: 29783 - DNA, 20 bp, Artificial Sequence
  Synthetic oligonucleotide; AAG chr11 5392343 5392362 5392346 -
aacatggagaagaatattct

SEQ ID NO: 29784 - DNA, 20 bp, Artificial Sequence
  Synthetic oligonucleotide; CGG chr11 5392337 5392356 5392340 -
gagaagaatattctaagtct

SEQ ID NO: 29785 - DNA, 20 bp, Artificial Sequence
  Synthetic oligonucleotide; GAG chr11 5392324 5392343 5392327 -
taagtctcggaactgctatt

SEQ ID NO: 29786 - DNA, 20 bp, Artificial Sequence
  Synthetic oligonucleotide; TGG chr11 5392316 5392335 5392319 -
ggaactgctattgagtaatg

SEQ ID NO: 29787 - DNA, 20 bp, Artificial Sequence
  Synthetic oligonucleotide; TGG chr11 5392304 5392323 5392307 -
gagtaatgtggcctactatg

SEQ ID NO: 29788 - DNA, 20 bp, Artificial Sequence
  Synthetic oligonucleotide; AAG chr11 5392291 5392310 5392294 -
tactatgtggatgtaaatta

SEQ ID NO: 29789 - DNA, 20 bp, Artificial Sequence
  Synthetic oligonucleotide; TAG chr11 5392286 5392305 5392289 -
tgtggatgtaaattaaagtt

SEQ ID NO: 29790 - DNA, 20 bp, Artificial Sequence
  Synthetic oligonucleotide; TGG chr11 5392281 5392300 5392284 -
atgtaaattaaagtttagaa

SEQ ID NO: 29791 - DNA, 20 bp, Artificial Sequence
  Synthetic oligonucleotide; AAG chr11 5392267 5392286 5392270 -
ttagaatggaacctatgttt

SEQ ID NO: 29792 - DNA, 20 bp, Artificial Sequence
  Synthetic oligonucleotide; AGG chr11 5392266 5392285 5392269 -
tagaatggaacctatgttta

SEQ ID NO: 29793 - DNA, 20 bp, Artificial Sequence
  Synthetic oligonucleotide; GAG chr11 5392264 5392283 5392267 -
gaatggaacctatgtttaag

SEQ ID NO: 29794 - DNA, 20 bp, Artificial Sequence
  Synthetic oligonucleotide; CAG chr11 5392258 5392277 5392261 -
aacctatgtttaaggagtgc

SEQ ID NO: 29795 - DNA, 20 bp, Artificial Sequence
  Synthetic oligonucleotide; AAG chr11 5392250 5392269 5392253 -
tttaaggagtgccagcctgt

SEQ ID NO: 29796 - DNA, 20 bp, Artificial Sequence
  Synthetic oligonucleotide; AGG chr11 5392249 5392268 5392252 -
ttaaggagtgccagcctgta

SEQ ID NO: 29797 - DNA, 20 bp, Artificial Sequence
  Synthetic oligonucleotide; CAG chr11 5392243 5392262 5392246 -
agtgccagcctgtaaggctg

SEQ ID NO: 29798 - DNA, 20 bp, Artificial Sequence
  Synthetic oligonucleotide; TGG chr11 5392233 5392252 5392236 -
tgtaaggctgcagaaactgc

SEQ ID NO: 29799 - DNA, 20 bp, Artificial Sequence
  Synthetic oligonucleotide; GGG chr11 5392232 5392251 5392235 -
gtaaggctgcagaaactgct

SEQ ID NO: 29800 - DNA, 20 bp, Artificial Sequence
  Synthetic oligonucleotide; CAG chr11 5392226 5392245 5392229 -
ctgcagaaactgctgggttc

SEQ ID NO: 29801 - DNA, 20 bp, Artificial Sequence
  Synthetic oligonucleotide; GAG chr11 5392224 5392243 5392227 -
gcagaaactgctgggttcca

SEQ ID NO: 29802 - DNA, 20 bp, Artificial Sequence
  Synthetic oligonucleotide; AGG chr11 5392223 5392242 5392226 -
cagaaactgctgggttccag

SEQ ID NO: 29803 - DNA, 20 bp, Artificial Sequence
  Synthetic oligonucleotide; GGG chr11 5392222 5392241 5392225 -
agaaactgctgggttccaga

SEQ ID NO: 29804 - DNA, 20 bp, Artificial Sequence
  Synthetic oligonucleotide; GGG chr11 5392221 5392240 5392224 -
gaaactgctgggttccagag

SEQ ID NO: 29805 - DNA, 20 bp, Artificial Sequence
  Synthetic oligonucleotide; AAG chr11 5392213 5392232 5392216 -
tgggttccagaggggctccc

SEQ ID NO: 29806 - DNA, 20 bp, Artificial Sequence
  Synthetic oligonucleotide; GAG chr11 5392207 5392226 5392210 -
ccagaggggctcccaagcct

SEQ ID NO: 29807 - DNA, 20 bp, Artificial Sequence
  Synthetic oligonucleotide; GAG chr11 5392205 5392224 5392208 -
agaggggctcccaagcctga

SEQ ID NO: 29808 - DNA, 20 bp, Artificial Sequence
  Synthetic oligonucleotide; GAG chr11 5392175 5392194 5392178 -
acacccacacatacaaacat

SEQ ID NO: 29809 - DNA, 20 bp, Artificial Sequence
  Synthetic oligonucleotide; AAG chr11 5392153 5392172 5392156 -
gataccacacaaacatacac

SEQ ID NO: 29810 - DNA, 20 bp, Artificial Sequence
  Synthetic oligonucleotide; TAG chr11 5392122 5392141 5392125 -
caaacatacatacatatttt

SEQ ID NO: 29811 - DNA, 20 bp, Artificial Sequence
  Synthetic oligonucleotide; GAG chr11 5392120 5392139 5392123 -
aacatacatacatattttta

SEQ ID NO: 29812 - DNA, 20 bp, Artificial Sequence
  Synthetic oligonucleotide; TGG chr11 5392115 5392134 5392118 -
acatacatatttttagagtt

SEQ ID NO: 29813 - DNA, 20 bp, Artificial Sequence
  Synthetic oligonucleotide; CGG chr11 5392057 5392076 5392060 -
tttcctttttatttttgaat

SEQ ID NO: 29814 - DNA, 20 bp, Artificial Sequence
  Synthetic oligonucleotide; GGG chr11 5392056 5392075 5392059 -
ttcctttttatttttgaatc

SEQ ID NO: 29815 - DNA, 20 bp, Artificial Sequence
  Synthetic oligonucleotide; GGG chr11 5392055 5392074 5392058 -
tcctttttatttttgaatcg

SEQ ID NO: 29816 - DNA, 20 bp, Artificial Sequence
  Synthetic oligonucleotide; TGG chr11 5392045 5392064 5392048 -
ttttgaatcggggtctcact

SEQ ID NO: 29817 - DNA, 20 bp, Artificial Sequence
  Synthetic oligonucleotide; CAG chr11 5392037 5392056 5392040 -
cggggtctcacttggtcacc

SEQ ID NO: 29818 - DNA, 20 bp, Artificial Sequence
  Synthetic oligonucleotide; AGG chr11 5392036 5392055 5392039 -
ggggtctcacttggtcaccc

SEQ ID NO: 29819 - DNA, 20 bp, Artificial Sequence
  Synthetic oligonucleotide; CAG chr11 5392033 5392052 5392036 -
gtctcacttggtcacccagg

SEQ ID NO: 29820 - DNA, 20 bp, Artificial Sequence
  Synthetic oligonucleotide; TAG chr11 5392030 5392049 5392033 -
tcacttggtcacccaggcag

SEQ ID NO: 29821 - DNA, 20 bp, Artificial Sequence
  Synthetic oligonucleotide; TGG chr11 5392019 5392038 5392022 -
cccaggcagtagtgtgatta

SEQ ID NO: 29822 - DNA, 20 bp, Artificial Sequence
  Synthetic oligonucleotide; CAG chr11 5392009 5392028 5392012 -
agtgtgattatggctcactg

SEQ ID NO: 29823 - DNA, 20 bp, Artificial Sequence
  Synthetic oligonucleotide; TGG chr11 5391995 5392014 5391998 -
tcactgcagcctcaacctcc

SEQ ID NO: 29824 - DNA, 20 bp, Artificial Sequence
  Synthetic oligonucleotide; GGG chr11 5391994 5392013 5391997 -
cactgcagcctcaacctcct

SEQ ID NO: 29825 - DNA, 20 bp, Artificial Sequence
  Synthetic oligonucleotide; AAG chr11 5391988 5392007 5391991 -
agcctcaacctcctgggctc

SEQ ID NO: 29826 - DNA, 20 bp, Artificial Sequence
  Synthetic oligonucleotide; CAG chr11 5391971 5391990 5391974 -
ctcaagcattcttcccacct

SEQ ID NO: 29827 - DNA, 20 bp, Artificial Sequence
  Synthetic oligonucleotide; CAG chr11 5391963 5391982 5391966 -
ttcttcccacctcagcctcc

SEQ ID NO: 29828 - DNA, 20 bp, Artificial Sequence
  Synthetic oligonucleotide; AGG chr11 5391962 5391981 5391965 -
tcttcccacctcagcctccc

SEQ ID NO: 29829 - DNA, 20 bp, Artificial Sequence
  Synthetic oligonucleotide; TAG chr11 5391959 5391978 5391962 -
tcccacctcagcctcccagg

SEQ ID NO: 29830 - DNA, 20 bp, Artificial Sequence
  Synthetic oligonucleotide; GAG chr11 5391954 5391973 5391957 -
cctcagcctcccaggtagct

SEQ ID NO: 29831 - DNA, 20 bp, Artificial Sequence
  Synthetic oligonucleotide; CAG chr11 5391947 5391966 5391950 -
ctcccaggtagctgagacta

SEQ ID NO: 29832 - DNA, 20 bp, Artificial Sequence
  Synthetic oligonucleotide; TGG chr11 5391927 5391946 5391930 -
cagacgtgcaccgccacaca

SEQ ID NO: 29833 - DNA, 20 bp, Artificial Sequence
  Synthetic oligonucleotide; TAG chr11 5391905 5391924 5391908 -
gctaattttaattttttttg

SEQ ID NO: 29834 - DNA, 20 bp, Artificial Sequence
  Synthetic oligonucleotide; GAG chr11 5391903 5391922 5391906 -
taattttaattttttttgta

SEQ ID NO: 29835 - DNA, 20 bp, Artificial Sequence
  Synthetic oligonucleotide; TAG chr11 5391899 5391918 5391902 -
tttaattttttttgtagaga

SEQ ID NO: 29836 - DNA, 20 bp, Artificial Sequence
  Synthetic oligonucleotide; AGG chr11 5391898 5391917 5391901 -
ttaattttttttgtagagat

SEQ ID NO: 29837 - DNA, 20 bp, Artificial Sequence
  Synthetic oligonucleotide; GGG chr11 5391897 5391916 5391900 -
taattttttttgtagagata

SEQ ID NO: 29838 - DNA, 20 bp, Artificial Sequence
  Synthetic oligonucleotide; CAG chr11 5391879 5391898 5391882 -
tagggtcttgctgtattgtt

SEQ ID NO: 29839 - DNA, 20 bp, Artificial Sequence
  Synthetic oligonucleotide; AGG chr11 5391878 5391897 5391881 -
agggtcttgctgtattgttc

SEQ ID NO: 29840 - DNA, 20 bp, Artificial Sequence
  Synthetic oligonucleotide; TGG chr11 5391874 5391893 5391877 -
tcttgctgtattgttcaggc

SEQ ID NO: 29841 - DNA, 20 bp, Artificial Sequence
  Synthetic oligonucleotide; TGG chr11 5391860 5391879 5391863 -
tcaggctggtctcaaactcc

SEQ ID NO: 29842 - DNA, 20 bp, Artificial Sequence
  Synthetic oligonucleotide; AAG chr11 5391853 5391872 5391856 -
ggtctcaaactcctggactc

SEQ ID NO: 29843 - DNA, 20 bp, Artificial Sequence
  Synthetic oligonucleotide; AAG chr11 5391835 5391854 5391838 -
tcaagtaatcttcttgcctg

SEQ ID NO: 29844 - DNA, 20 bp, Artificial Sequence
  Synthetic oligonucleotide; TGG chr11 5391831 5391850 5391834 -
gtaatcttcttgcctgaagt

SEQ ID NO: 29845 - DNA, 20 bp, Artificial Sequence
  Synthetic oligonucleotide; TGG chr11 5391817 5391836 5391820 -
tgaagttggtctcaaactcc

SEQ ID NO: 29846 - DNA, 20 bp, Artificial Sequence
  Synthetic oligonucleotide; CAG chr11 5391810 5391829 5391813 -
ggtctcaaactcctggcctt

SEQ ID NO: 29847 - DNA, 20 bp, Artificial Sequence
  Synthetic oligonucleotide; TGG chr11 5391793 5391812 5391796 -
cttcagcaatcctcccacct

SEQ ID NO: 29848 - DNA, 20 bp, Artificial Sequence
  Synthetic oligonucleotide; AAG chr11 5391783 5391802 5391786 -
cctcccaccttggtctccca

SEQ ID NO: 29849 - DNA, 20 bp, Artificial Sequence
  Synthetic oligonucleotide; TGG chr11 5391777 5391796 5391780 -
accttggtctcccaaagtgc

SEQ ID NO: 29850 - DNA, 20 bp, Artificial Sequence
  Synthetic oligonucleotide; GGG chr11 5391776 5391795 5391779 -
ccttggtctcccaaagtgct

SEQ ID NO: 29851 - DNA, 20 bp, Artificial Sequence
  Synthetic oligonucleotide; TAG chr11 5391769 5391788 5391772 -
ctcccaaagtgctgggatta

SEQ ID NO: 29852 - DNA, 20 bp, Artificial Sequence
  Synthetic oligonucleotide; AAG chr11 5391763 5391782 5391766 -
aagtgctgggattatagcat

SEQ ID NO: 29853 - DNA, 20 bp, Artificial Sequence
  Synthetic oligonucleotide; TGG chr11 5391750 5391769 5391753 -
atagcataagccaccgtgcc

SEQ ID NO: 29854 - DNA, 20 bp, Artificial Sequence
  Synthetic oligonucleotide; TGG chr11 5391742 5391761 5391745 -
agccaccgtgcctggcctca

SEQ ID NO: 29855 - DNA, 20 bp, Artificial Sequence
  Synthetic oligonucleotide; TAG chr11 5391726 5391745 5391729 -
ctcatggtaattttaacctg

SEQ ID NO: 29856 - DNA, 20 bp, Artificial Sequence
  Synthetic oligonucleotide; AGG chr11 5391725 5391744 5391728 -
tcatggtaattttaacctgt

SEQ ID NO: 29857 - DNA, 20 bp, Artificial Sequence
  Synthetic oligonucleotide; GAG chr11 5391723 5391742 5391726 -
atggtaattttaacctgtag

SEQ ID NO: 29858 - DNA, 20 bp, Artificial Sequence
  Synthetic oligonucleotide; TGG chr11 5391718 5391737 5391721 -
aattttaacctgtaggagaa

SEQ ID NO: 29859 - DNA, 20 bp, Artificial Sequence
  Synthetic oligonucleotide; GGG chr11 5391717 5391736 5391720 -
attttaacctgtaggagaat

SEQ ID NO: 29860 - DNA, 20 bp, Artificial Sequence
  Synthetic oligonucleotide; TGG chr11 5391714 5391733 5391717 -
ttaacctgtaggagaatggg

SEQ ID NO: 29861 - DNA, 20 bp, Artificial Sequence
  Synthetic oligonucleotide; GGG chr11 5391713 5391732 5391716 -
taacctgtaggagaatgggt

SEQ ID NO: 29862 - DNA, 20 bp, Artificial Sequence
  Synthetic oligonucleotide; GAG chr11 5391711 5391730 5391714 -
acctgtaggagaatgggtgg

SEQ ID NO: 29863 - DNA, 20 bp, Artificial Sequence
  Synthetic oligonucleotide; AGG chr11 5391710 5391729 5391713 -
cctgtaggagaatgggtggg

SEQ ID NO: 29864 - DNA, 20 bp, Artificial Sequence
  Synthetic oligonucleotide; CAG chr11 5391704 5391723 5391707 -
ggagaatgggtgggaggatc

SEQ ID NO: 29865 - DNA, 20 bp, Artificial Sequence
  Synthetic oligonucleotide; GAG chr11 5391702 5391721 5391705 -
agaatgggtgggaggatcca

SEQ ID NO: 29866 - DNA, 20 bp, Artificial Sequence
  Synthetic oligonucleotide; AGG chr11 5391701 5391720 5391704 -
gaatgggtgggaggatccag

SEQ ID NO: 29867 - DNA, 20 bp, Artificial Sequence
  Synthetic oligonucleotide; GGG chr11 5391700 5391719 5391703 -
aatgggtgggaggatccaga

SEQ ID NO: 29868 - DNA, 20 bp, Artificial Sequence
  Synthetic oligonucleotide; GAG chr11 5391694 5391713 5391697 -
tgggaggatccagagggcct

SEQ ID NO: 29869 - DNA, 20 bp, Artificial Sequence
  Synthetic oligonucleotide; AAG chr11 5391689 5391708 5391692 -
ggatccagagggcctgagta

SEQ ID NO: 29870 - DNA, 20 bp, Artificial Sequence
  Synthetic oligonucleotide; TAG chr11 5391686 5391705 5391689 -
tccagagggcctgagtaaag

SEQ ID NO: 29871 - DNA, 20 bp, Artificial Sequence
  Synthetic oligonucleotide; TGG chr11 5391680 5391699 5391683 -
gggcctgagtaaagtagaac

SEQ ID NO: 29872 - DNA, 20 bp, Artificial Sequence
  Synthetic oligonucleotide; GGG chr11 5391679 5391698 5391682 -
ggcctgagtaaagtagaact

SEQ ID NO: 29873 - DNA, 20 bp, Artificial Sequence
  Synthetic oligonucleotide; AAG chr11 5391670 5391689 5391673 -
aaagtagaactgggacaatg

SEQ ID NO: 29874 - DNA, 20 bp, Artificial Sequence
  Synthetic oligonucleotide; TGG chr11 5391653 5391672 5391656 -
atgaagatataccaccttga

SEQ ID NO: 29875 - DNA, 20 bp, Artificial Sequence
  Synthetic oligonucleotide; CAG chr11 5391646 5391665 5391649 -
tataccaccttgatggatgc

SEQ ID NO: 29876 - DNA, 20 bp, Artificial Sequence
  Synthetic oligonucleotide; CAG chr11 5391643 5391662 5391646 -
accaccttgatggatgccag

SEQ ID NO: 29877 - DNA, 20 bp, Artificial Sequence
  Synthetic oligonucleotide; AAG chr11 5391639 5391658 5391642 -
ccttgatggatgccagcaga

SEQ ID NO: 29878 - DNA, 20 bp, Artificial Sequence
  Synthetic oligonucleotide; AGG chr11 5391638 5391657 5391641 -
cttgatggatgccagcagaa

SEQ ID NO: 29879 - DNA, 20 bp, Artificial Sequence
  Synthetic oligonucleotide; TGG chr11 5391627 5391646 5391630 -
ccagcagaaaggtgtcttct

SEQ ID NO: 29880 - DNA, 20 bp, Artificial Sequence
  Synthetic oligonucleotide; GGG chr11 5391626 5391645 5391629 -
cagcagaaaggtgtcttctt

SEQ ID NO: 29881 - DNA, 20 bp, Artificial Sequence
  Synthetic oligonucleotide; AAG chr11 5391611 5391630 5391614 -
ttcttgggcttctgaatgtg

SEQ ID NO: 29882 - DNA, 20 bp, Artificial Sequence
  Synthetic oligonucleotide; GAG chr11 5391609 5391628 5391612 -
cttgggcttctgaatgtgaa

SEQ ID NO: 29883 - DNA, 20 bp, Artificial Sequence
  Synthetic oligonucleotide; AGG chr11 5391608 5391627 5391611 -
ttgggcttctgaatgtgaag

SEQ ID NO: 29884 - DNA, 20 bp, Artificial Sequence
  Synthetic oligonucleotide; GAG chr11 5391606 5391625 5391609 -
gggcttctgaatgtgaagag

SEQ ID NO: 29885 - DNA, 20 bp, Artificial Sequence
  Synthetic oligonucleotide; AGG chr11 5391605 5391624 5391608 -
ggcttctgaatgtgaagagg

SEQ ID NO: 29886 - DNA, 20 bp, Artificial Sequence
  Synthetic oligonucleotide; GAG chr11 5391603 5391622 5391606 -
cttctgaatgtgaagaggag

SEQ ID NO: 29887 - DNA, 20 bp, Artificial Sequence
  Synthetic oligonucleotide; GAG chr11 5391594 5391613 5391597 -
gtgaagaggaggagttcctc

SEQ ID NO: 29888 - DNA, 20 bp, Artificial Sequence
  Synthetic oligonucleotide; AAG chr11 5391589 5391608 5391592 -
gaggaggagttcctcgagac

SEQ ID NO: 29889 - DNA, 20 bp, Artificial Sequence
  Synthetic oligonucleotide; AAG chr11 5391586 5391605 5391589 -
gaggagttcctcgagacaag

SEQ ID NO: 29890 - DNA, 20 bp, Artificial Sequence
  Synthetic oligonucleotide; GAG chr11 5391584 5391603 5391587 -
ggagttcctcgagacaagaa

SEQ ID NO: 29891 - DNA, 20 bp, Artificial Sequence
  Synthetic oligonucleotide; TAG chr11 5391572 5391591 5391575 -
gacaagaagagaacttctgt

SEQ ID NO: 29892 - DNA, 20 bp, Artificial Sequence
  Synthetic oligonucleotide; TGG chr11 5391566 5391585 5391569 -
aagagaacttctgttagctc

SEQ ID NO: 29893 - DNA, 20 bp, Artificial Sequence
  Synthetic oligonucleotide; GAG chr11 5391515 5391534 5391518 -
gcatacatttaatatttatt

SEQ ID NO: 29894 - DNA, 20 bp, Artificial Sequence
  Synthetic oligonucleotide; TGG chr11 5391508 5391527 5391511 -
tttaatatttattgagtata

SEQ ID NO: 29895 - DNA, 20 bp, Artificial Sequence
  Synthetic oligonucleotide; TAG chr11 5391498 5391517 5391501 -
attgagtatatggcatgtgc

SEQ ID NO: 29896 - DNA, 20 bp, Artificial Sequence
  Synthetic oligonucleotide; AGG chr11 5391497 5391516 5391500 -
ttgagtatatggcatgtgct

SEQ ID NO: 29897 - DNA, 20 bp, Artificial Sequence
  Synthetic oligonucleotide; TGG chr11 5391472 5391491 5391475 -
ttgtatttatatacatttac

SEQ ID NO: 29898 - DNA, 20 bp, Artificial Sequence
  Synthetic oligonucleotide; GAG chr11 5391468 5391487 5391471 -
atttatatacatttactggc

SEQ ID NO: 29899 - DNA, 20 bp, Artificial Sequence
  Synthetic oligonucleotide; AAG chr11 5391464 5391483 5391467 -
atatacatttactggcgagc

SEQ ID NO: 29900 - DNA, 20 bp, Artificial Sequence
  Synthetic oligonucleotide; CAG chr11 5391445 5391464 5391448 -
caagacatgcctaattcctc

SEQ ID NO: 29901 - DNA, 20 bp, Artificial Sequence
  Synthetic oligonucleotide; AGG chr11 5391444 5391463 5391447 -
aagacatgcctaattcctcc

SEQ ID NO: 29902 - DNA, 20 bp, Artificial Sequence
  Synthetic oligonucleotide; GGG chr11 5391443 5391462 5391446 -
agacatgcctaattcctcca

SEQ ID NO: 29903 - DNA, 20 bp, Artificial Sequence
  Synthetic oligonucleotide; TAG chr11 5391431 5391450 5391434 -
ttcctccagggatcttgatt

SEQ ID NO: 29904 - DNA, 20 bp, Artificial Sequence
  Synthetic oligonucleotide; TGG chr11 5391419 5391438 5391422 -
tcttgatttagtcattctaa

SEQ ID NO: 29905 - DNA, 20 bp, Artificial Sequence
  Synthetic oligonucleotide; CAG chr11 5391393 5391412 5391396 -
catgcacacaccttcataaa

SEQ ID NO: 29906 - DNA, 20 bp, Artificial Sequence
  Synthetic oligonucleotide; AGG chr11 5391392 5391411 5391395 -
atgcacacaccttcataaac

SEQ ID NO: 29907 - DNA, 20 bp, Artificial Sequence
  Synthetic oligonucleotide; CGG chr11 5391363 5391382 5391366 -
ctgtgtgacaaatgttacaa

SEQ ID NO: 29908 - DNA, 20 bp, Artificial Sequence
  Synthetic oligonucleotide; GGG chr11 5391362 5391381 5391365 -
tgtgtgacaaatgttacaac

SEQ ID NO: 29909 - DNA, 20 bp, Artificial Sequence
  Synthetic oligonucleotide; CAG chr11 5391354 5391373 5391357 -
aaatgttacaacgggaaatg

SEQ ID NO: 29910 - DNA, 20 bp, Artificial Sequence
  Synthetic oligonucleotide; AGG chr11 5391353 5391372 5391356 -
aatgttacaacgggaaatgc

SEQ ID NO: 29911 - DNA, 20 bp, Artificial Sequence
  Synthetic oligonucleotide; GGG chr11 5391352 5391371 5391355 -
atgttacaacgggaaatgca

SEQ ID NO: 29912 - DNA, 20 bp, Artificial Sequence
  Synthetic oligonucleotide; TGG chr11 5391344 5391363 5391347 -
acgggaaatgcagggcactg

SEQ ID NO: 29913 - DNA, 20 bp, Artificial Sequence
  Synthetic oligonucleotide; AAG chr11 5391341 5391360 5391344 -
ggaaatgcagggcactgtgg

SEQ ID NO: 29914 - DNA, 20 bp, Artificial Sequence
  Synthetic oligonucleotide; AGG chr11 5391340 5391359 5391343 -
gaaatgcagggcactgtgga

SEQ ID NO: 29915 - DNA, 20 bp, Artificial Sequence
  Synthetic oligonucleotide; TGG chr11 5391330 5391349 5391333 -
gcactgtggaaggaaaccga

SEQ ID NO: 29916 - DNA, 20 bp, Artificial Sequence
  Synthetic oligonucleotide; GAG chr11 5391328 5391347 5391331 -
actgtggaaggaaaccgatg

SEQ ID NO: 29917 - DNA, 20 bp, Artificial Sequence
  Synthetic oligonucleotide; TGG chr11 5391321 5391340 5391324 -
aaggaaaccgatggagcatt

SEQ ID NO: 29918 - DNA, 20 bp, Artificial Sequence
  Synthetic oligonucleotide; TGG chr11 5391307 5391326 5391310 -
agcatttggtgctttaccat

SEQ ID NO: 29919 - DNA, 20 bp, Artificial Sequence
  Synthetic oligonucleotide; AAG chr11 5391303 5391322 5391306 -
tttggtgctttaccattgga

SEQ ID NO: 29920 - DNA, 20 bp, Artificial Sequence
  Synthetic oligonucleotide; AGG chr11 5391302 5391321 5391305 -
ttggtgctttaccattggaa

SEQ ID NO: 29921 - DNA, 20 bp, Artificial Sequence
  Synthetic oligonucleotide; GGG chr11 5391301 5391320 5391304 -
tggtgctttaccattggaaa

SEQ ID NO: 29922 - DNA, 20 bp, Artificial Sequence
  Synthetic oligonucleotide; GAG chr11 5391299 5391318 5391302 -
gtgctttaccattggaaagg

SEQ ID NO: 29923 - DNA, 20 bp, Artificial Sequence
  Synthetic oligonucleotide; AGG chr11 5391298 5391317 5391301 -
tgctttaccattggaaaggg

SEQ ID NO: 29924 - DNA, 20 bp, Artificial Sequence
  Synthetic oligonucleotide; GAG chr11 5391296 5391315 5391299 -
ctttaccattggaaagggag

SEQ ID NO: 29925 - DNA, 20 bp, Artificial Sequence
  Synthetic oligonucleotide; GAG chr11 5391273 5391292 5391276 -
ctatctgtgaaaatgtcctt

SEQ ID NO: 29926 - DNA, 20 bp, Artificial Sequence
  Synthetic oligonucleotide; AGG chr11 5391272 5391291 5391275 -
tatctgtgaaaatgtccttg

SEQ ID NO: 29927 - DNA, 20 bp, Artificial Sequence
  Synthetic oligonucleotide; AAG chr11 5391269 5391288 5391272 -
ctgtgaaaatgtccttgagg

SEQ ID NO: 29928 - DNA, 20 bp, Artificial Sequence
  Synthetic oligonucleotide; AAG chr11 5391258 5391277 5391261 -
tccttgaggaagcaatttca

SEQ ID NO: 29929 - DNA, 20 bp, Artificial Sequence
  Synthetic oligonucleotide; GAG chr11 5391253 5391272 5391256 -
gaggaagcaatttcaaagct

SEQ ID NO: 29930 - DNA, 20 bp, Artificial Sequence
  Synthetic oligonucleotide; AAG chr11 5391242 5391261 5391245 -
ttcaaagctgagacccctgc

SEQ ID NO: 29931 - DNA, 20 bp, Artificial Sequence
  Synthetic oligonucleotide; AGG chr11 5391241 5391260 5391244 -
tcaaagctgagacccctgca

SEQ ID NO: 29932 - DNA, 20 bp, Artificial Sequence
  Synthetic oligonucleotide; TAG chr11 5391230 5391249 5391233 -
acccctgcaaggattgcatt

SEQ ID NO: 29933 - DNA, 20 bp, Artificial Sequence
  Synthetic oligonucleotide; TAG chr11 5391220 5391239 5391223 -
ggattgcatttagtcactcg

SEQ ID NO: 29934 - DNA, 20 bp, Artificial Sequence
  Synthetic oligonucleotide; AGG chr11 5391219 5391238 5391222 -
gattgcatttagtcactcgt

SEQ ID NO: 29935 - DNA, 20 bp, Artificial Sequence
  Synthetic oligonucleotide; GGG chr11 5391218 5391237 5391221 -
attgcatttagtcactcgta

SEQ ID NO: 29936 - DNA, 20 bp, Artificial Sequence
  Synthetic oligonucleotide; CAG chr11 5391214 5391233 5391217 -
catttagtcactcgtaggga

SEQ ID NO: 29937 - DNA, 20 bp, Artificial Sequence
  Synthetic oligonucleotide; AGG chr11 5391213 5391232 5391216 -
atttagtcactcgtagggac

SEQ ID NO: 29938 - DNA, 20 bp, Artificial Sequence
  Synthetic oligonucleotide; CAG chr11 5391205 5391224 5391208 -
actcgtagggacaggctgat

SEQ ID NO: 29939 - DNA, 20 bp, Artificial Sequence
  Synthetic oligonucleotide; AAG chr11 5391194 5391213 5391197 -
caggctgatcagccaatgta

SEQ ID NO: 29940 - DNA, 20 bp, Artificial Sequence
  Synthetic oligonucleotide; GAG chr11 5391178 5391197 5391181 -
tgtaaagtttatttcctcct

SEQ ID NO: 29941 - DNA, 20 bp, Artificial Sequence
  Synthetic oligonucleotide; TGG chr11 5391172 5391191 5391175 -
gtttatttcctcctgagcaa

SEQ ID NO: 29942 - DNA, 20 bp, Artificial Sequence
  Synthetic oligonucleotide; GGG chr11 5391171 5391190 5391174 -
tttatttcctcctgagcaat

SEQ ID NO: 29943 - DNA, 20 bp, Artificial Sequence
  Synthetic oligonucleotide; GAG chr11 5391144 5391163 5391147 -
tgacttcaatatgtttgtgt

SEQ ID NO: 29944 - DNA, 20 bp, Artificial Sequence
  Synthetic oligonucleotide; TGG chr11 5391135 5391154 5391138 -
tatgtttgtgtgagtttcct

SEQ ID NO: 29945 - DNA, 20 bp, Artificial Sequence
  Synthetic oligonucleotide; AAG chr11 5391129 5391148 5391132 -
tgtgtgagtttccttggctg

SEQ ID NO: 29946 - DNA, 20 bp, Artificial Sequence
  Synthetic oligonucleotide; AAG chr11 5391075 5391094 5391078 -
cacacaactaaaacacctac

SEQ ID NO: 29947 - DNA, 20 bp, Artificial Sequence
  Synthetic oligonucleotide; TAG chr11 5391059 5391078 5391062 -
ctacaagtaaatactgactg

SEQ ID NO: 29948 - DNA, 20 bp, Artificial Sequence
  Synthetic oligonucleotide; CAG chr11 5391048 5391067 5391051 -
tactgactgtagcttaatgt

SEQ ID NO: 29949 - DNA, 20 bp, Artificial Sequence
  Synthetic oligonucleotide; GAG chr11 5391041 5391060 5391044 -
tgtagcttaatgtcagactt

SEQ ID NO: 29950 - DNA, 20 bp, Artificial Sequence
  Synthetic oligonucleotide; AGG chr11 5391040 5391059 5391043 -
gtagcttaatgtcagacttg

SEQ ID NO: 29951 - DNA, 20 bp, Artificial Sequence
  Synthetic oligonucleotide; AAG chr11 5391033 5391052 5391036 -
aatgtcagacttgaggttgt

SEQ ID NO: 29952 - DNA, 20 bp, Artificial Sequence
  Synthetic oligonucleotide; AGG chr11 5391032 5391051 5391035 -
atgtcagacttgaggttgta

SEQ ID NO: 29953 - DNA, 20 bp, Artificial Sequence
  Synthetic oligonucleotide; CAG chr11 5391023 5391042 5391026 -
ttgaggttgtaaggtaaaat

SEQ ID NO: 29954 - DNA, 20 bp, Artificial Sequence
  Synthetic oligonucleotide; GAG chr11 5391021 5391040 5391024 -
gaggttgtaaggtaaaatca

SEQ ID NO: 29955 - DNA, 20 bp, Artificial Sequence
  Synthetic oligonucleotide; GAG chr11 5391016 5391035 5391019 -
tgtaaggtaaaatcagagat

SEQ ID NO: 29956 - DNA, 20 bp, Artificial Sequence
  Synthetic oligonucleotide; GAG chr11 5391014 5391033 5391017 -
taaggtaaaatcagagatga

SEQ ID NO: 29957 - DNA, 20 bp, Artificial Sequence
  Synthetic oligonucleotide; AGG chr11 5391013 5391032 5391016 -
aaggtaaaatcagagatgag

SEQ ID NO: 29958 - DNA, 20 bp, Artificial Sequence
  Synthetic oligonucleotide; GAG chr11 5391011 5391030 5391014 -
ggtaaaatcagagatgagag

SEQ ID NO: 29959 - DNA, 20 bp, Artificial Sequence
  Synthetic oligonucleotide; AAG chr11 5391006 5391025 5391009 -
aatcagagatgagaggagtc

SEQ ID NO: 29960 - DNA, 20 bp, Artificial Sequence
  Synthetic oligonucleotide; AGG chr11 5391005 5391024 5391008 -
atcagagatgagaggagtca

SEQ ID NO: 29961 - DNA, 20 bp, Artificial Sequence
  Synthetic oligonucleotide; TAG chr11 5391001 5391020 5391004 -
gagatgagaggagtcaagga

SEQ ID NO: 29962 - DNA, 20 bp, Artificial Sequence
  Synthetic oligonucleotide; AGG chr11 5391000 5391019 5391003 -
agatgagaggagtcaaggat

SEQ ID NO: 29963 - DNA, 20 bp, Artificial Sequence
  Synthetic oligonucleotide; AAG chr11 5390993 5391012 5390996 -
aggagtcaaggataggatca

SEQ ID NO: 29964 - DNA, 20 bp, Artificial Sequence
  Synthetic oligonucleotide; TAG chr11 5390980 5390999 5390983 -
aggatcaaagtctcttcttc

SEQ ID NO: 29965 - DNA, 20 bp, Artificial Sequence
  Synthetic oligonucleotide; GAG chr11 5390978 5390997 5390981 -
gatcaaagtctcttcttcta

SEQ ID NO: 29966 - DNA, 20 bp, Artificial Sequence
  Synthetic oligonucleotide; AGG chr11 5390977 5390996 5390980 -
atcaaagtctcttcttctag

SEQ ID NO: 29967 - DNA, 20 bp, Artificial Sequence
  Synthetic oligonucleotide; TGG chr11 5390970 5390989 5390973 -
tctcttcttctagaggaata

SEQ ID NO: 29968 - DNA, 20 bp, Artificial Sequence
  Synthetic oligonucleotide; CAG chr11 5390966 5390985 5390969 -
ttcttctagaggaatatggt

SEQ ID NO: 29969 - DNA, 20 bp, Artificial Sequence
  Synthetic oligonucleotide; AGG chr11 5390965 5390984 5390968 -
tcttctagaggaatatggtc

SEQ ID NO: 29970 - DNA, 20 bp, Artificial Sequence
  Synthetic oligonucleotide; GAG chr11 5390963 5390982 5390966 -
ttctagaggaatatggtcag

SEQ ID NO: 29971 - DNA, 20 bp, Artificial Sequence
  Synthetic oligonucleotide; GAG chr11 5390961 5390980 5390964 -
ctagaggaatatggtcagga

SEQ ID NO: 29972 - DNA, 20 bp, Artificial Sequence
  Synthetic oligonucleotide; GAG chr11 5390959 5390978 5390962 -
agaggaatatggtcaggaga

SEQ ID NO: 29973 - DNA, 20 bp, Artificial Sequence
  Synthetic oligonucleotide; TAG chr11 5390948 5390967 5390951 -
gtcaggagagagcacaacct

SEQ ID NO: 29974 - DNA, 20 bp, Artificial Sequence
  Synthetic oligonucleotide; TGG chr11 5390940 5390959 5390943 -
agagcacaaccttagaaatt

SEQ ID NO: 29975 - DNA, 20 bp, Artificial Sequence
  Synthetic oligonucleotide; GGG chr11 5390939 5390958 5390942 -
gagcacaaccttagaaattt

SEQ ID NO: 29976 - DNA, 20 bp, Artificial Sequence
  Synthetic oligonucleotide; GGG chr11 5390938 5390957 5390941 -
agcacaaccttagaaatttg

SEQ ID NO: 29977 - DNA, 20 bp, Artificial Sequence
  Synthetic oligonucleotide; GGG chr11 5390937 5390956 5390940 -
gcacaaccttagaaatttgg

SEQ ID NO: 29978 - DNA, 20 bp, Artificial Sequence
  Synthetic oligonucleotide; GGG chr11 5390936 5390955 5390939 -
cacaaccttagaaatttggg

SEQ ID NO: 29979 - DNA, 20 bp, Artificial Sequence
  Synthetic oligonucleotide; GGG chr11 5390935 5390954 5390938 -
acaaccttagaaatttgggg

SEQ ID NO: 29980 - DNA, 20 bp, Artificial Sequence
  Synthetic oligonucleotide; CAG chr11 5390920 5390939 5390923 -
tgggggggtgttgcttgaaa

SEQ ID NO: 29981 - DNA, 20 bp, Artificial Sequence
  Synthetic oligonucleotide; AGG chr11 5390919 5390938 5390922 -
gggggggtgttgcttgaaac

SEQ ID NO: 29982 - DNA, 20 bp, Artificial Sequence
  Synthetic oligonucleotide; GAG chr11 5390912 5390931 5390915 -
tgttgcttgaaacaggtgtt

SEQ ID NO: 29983 - DNA, 20 bp, Artificial Sequence
  Synthetic oligonucleotide; AGG chr11 5390911 5390930 5390914 -
gttgcttgaaacaggtgttg

SEQ ID NO: 29984 - DNA, 20 bp, Artificial Sequence
  Synthetic oligonucleotide; AAG chr11 5390908 5390927 5390911 -
gcttgaaacaggtgttgagg

SEQ ID NO: 29985 - DNA, 20 bp, Artificial Sequence
  Synthetic oligonucleotide; CAG chr11 5390901 5390920 5390904 -
acaggtgttgaggaagaatg

SEQ ID NO: 29986 - DNA, 20 bp, Artificial Sequence
  Synthetic oligonucleotide; AGG chr11 5390900 5390919 5390903 -
caggtgttgaggaagaatgc

SEQ ID NO: 29987 - DNA, 20 bp, Artificial Sequence
  Synthetic oligonucleotide; GAG chr11 5390898 5390917 5390901 -
ggtgttgaggaagaatgcag

SEQ ID NO: 29988 - DNA, 20 bp, Artificial Sequence
  Synthetic oligonucleotide; GAG chr11 5390891 5390910 5390894 -
aggaagaatgcaggagttct

SEQ ID NO: 29989 - DNA, 20 bp, Artificial Sequence
  Synthetic oligonucleotide; AGG chr11 5390890 5390909 5390893 -
ggaagaatgcaggagttctg

SEQ ID NO: 29990 - DNA, 20 bp, Artificial Sequence
  Synthetic oligonucleotide; TGG chr11 5390873 5390892 5390876 -
ctgaggtttctgatgtgact

SEQ ID NO: 29991 - DNA, 20 bp, Artificial Sequence
  Synthetic oligonucleotide; GGG chr11 5390872 5390891 5390875 -
tgaggtttctgatgtgactt

SEQ ID NO: 29992 - DNA, 20 bp, Artificial Sequence
  Synthetic oligonucleotide; GGG chr11 5390871 5390890 5390874 -
gaggtttctgatgtgacttg

SEQ ID NO: 29993 - DNA, 20 bp, Artificial Sequence
  Synthetic oligonucleotide; GGG chr11 5390870 5390889 5390873 -
aggtttctgatgtgacttgg

SEQ ID NO: 29994 - DNA, 20 bp, Artificial Sequence
  Synthetic oligonucleotide; AAG chr11 5390862 5390881 5390865 -
gatgtgacttgggggtctga

SEQ ID NO: 29995 - DNA, 20 bp, Artificial Sequence
  Synthetic oligonucleotide; CAG chr11 5390848 5390867 5390851 -
gtctgaaagttactgctgac

SEQ ID NO: 29996 - DNA, 20 bp, Artificial Sequence
  Synthetic oligonucleotide; AGG chr11 5390847 5390866 5390850 -
tctgaaagttactgctgacc

SEQ ID NO: 29997 - DNA, 20 bp, Artificial Sequence
  Synthetic oligonucleotide; TAG chr11 5390843 5390862 5390846 -
aaagttactgctgaccagga

SEQ ID NO: 29998 - DNA, 20 bp, Artificial Sequence
  Synthetic oligonucleotide; AAG chr11 5390837 5390856 5390840 -
actgctgaccaggatagaaa

SEQ ID NO: 29999 - DNA, 20 bp, Artificial Sequence
  Synthetic oligonucleotide; GAG chr11 5390832 5390851 5390835 -
tgaccaggatagaaaaagat

SEQ ID NO: 30000 - DNA, 20 bp, Artificial Sequence
  Synthetic oligonucleotide; AAG chr11 5390829 5390848 5390832 -
ccaggatagaaaaagatgag

SEQ ID NO: 30001 - DNA, 20 bp, Artificial Sequence
  Synthetic oligonucleotide; TGG chr11 5390821 5390840 5390824 -
gaaaaagatgagaagaaact

SEQ ID NO: 30002 - DNA, 20 bp, Artificial Sequence
  Synthetic oligonucleotide; CAG chr11 5390817 5390836 5390820 -
aagatgagaagaaacttggc

SEQ ID NO: 30003 - DNA, 20 bp, Artificial Sequence
  Synthetic oligonucleotide; AGG chr11 5390816 5390835 5390819 -
agatgagaagaaacttggcc

SEQ ID NO: 30004 - DNA, 20 bp, Artificial Sequence
  Synthetic oligonucleotide; TAG chr11 5390813 5390832 5390816 -
tgagaagaaacttggccagg

SEQ ID NO: 30005 - DNA, 20 bp, Artificial Sequence
  Synthetic oligonucleotide; AAG chr11 5390808 5390827 5390811 -
agaaacttggccaggtagat

SEQ ID NO: 30006 - DNA, 20 bp, Artificial Sequence
  Synthetic oligonucleotide; TGG chr11 5390804 5390823 5390807 -
acttggccaggtagataaga

SEQ ID NO: 30007 - DNA, 20 bp, Artificial Sequence
  Synthetic oligonucleotide; AAG chr11 5390801 5390820 5390804 -
tggccaggtagataagatgg

SEQ ID NO: 30008 - DNA, 20 bp, Artificial Sequence
  Synthetic oligonucleotide; CAG chr11 5390798 5390817 5390801 -
ccaggtagataagatggaag

SEQ ID NO: 30009 - DNA, 20 bp, Artificial Sequence
  Synthetic oligonucleotide; AAG chr11 5390791 5390810 5390794 -
gataagatggaagcagtccc

SEQ ID NO: 30010 - DNA, 20 bp, Artificial Sequence
  Synthetic oligonucleotide; AGG chr11 5390790 5390809 5390793 -
ataagatggaagcagtccca

SEQ ID NO: 30011 - DNA, 20 bp, Artificial Sequence
  Synthetic oligonucleotide; TGG chr11 5390782 5390801 5390785 -
gaagcagtcccaaggaacca

SEQ ID NO: 30012 - DNA, 20 bp, Artificial Sequence
  Synthetic oligonucleotide; AAG chr11 5390779 5390798 5390782 -
gcagtcccaaggaaccatgg

SEQ ID NO: 30013 - DNA, 20 bp, Artificial Sequence
  Synthetic oligonucleotide; AGG chr11 5390778 5390797 5390781 -
cagtcccaaggaaccatgga

SEQ ID NO: 30014 - DNA, 20 bp, Artificial Sequence
  Synthetic oligonucleotide; GAG chr11 5390776 5390795 5390779 -
gtcccaaggaaccatggaag

SEQ ID NO: 30015 - DNA, 20 bp, Artificial Sequence
  Synthetic oligonucleotide; AGG chr11 5390775 5390794 5390778 -
tcccaaggaaccatggaagg

SEQ ID NO: 30016 - DNA, 20 bp, Artificial Sequence
  Synthetic oligonucleotide; CGG chr11 5390764 5390783 5390767 -
catggaaggaggtgtatttc

SEQ ID NO: 30017 - DNA, 20 bp, Artificial Sequence
  Synthetic oligonucleotide; GAG chr11 5390762 5390781 5390765 -
tggaaggaggtgtatttccg

SEQ ID NO: 30018 - DNA, 20 bp, Artificial Sequence
  Synthetic oligonucleotide; AGG chr11 5390761 5390780 5390764 -
ggaaggaggtgtatttccgg

SEQ ID NO: 30019 - DNA, 20 bp, Artificial Sequence
  Synthetic oligonucleotide; GAG chr11 5390757 5390776 5390760 -
ggaggtgtatttccggaggt

SEQ ID NO: 30020 - DNA, 20 bp, Artificial Sequence
  Synthetic oligonucleotide; TAG chr11 5390753 5390772 5390756 -
gtgtatttccggaggtgagt

SEQ ID NO: 30021 - DNA, 20 bp, Artificial Sequence
  Synthetic oligonucleotide; GAG chr11 5390751 5390770 5390754 -
gtatttccggaggtgagtta

SEQ ID NO: 30022 - DNA, 20 bp, Artificial Sequence
  Synthetic oligonucleotide; TGG chr11 5390744 5390763 5390747 -
cggaggtgagttagagcaaa

SEQ ID NO: 30023 - DNA, 20 bp, Artificial Sequence
  Synthetic oligonucleotide; TGG chr11 5390733 5390752 5390736 -
tagagcaaatggcatttacc

SEQ ID NO: 30024 - DNA, 20 bp, Artificial Sequence
  Synthetic oligonucleotide; CAG chr11 5390723 5390742 5390726 -
ggcatttacctggtctctgc

SEQ ID NO: 30025 - DNA, 20 bp, Artificial Sequence
  Synthetic oligonucleotide; AGG chr11 5390722 5390741 5390725 -
gcatttacctggtctctgcc

SEQ ID NO: 30026 - DNA, 20 bp, Artificial Sequence
  Synthetic oligonucleotide; TGG chr11 5390711 5390730 5390714 -
gtctctgccaggctctcctc

SEQ ID NO: 30027 - DNA, 20 bp, Artificial Sequence
  Synthetic oligonucleotide; GGG chr11 5390710 5390729 5390713 -
tctctgccaggctctcctct

SEQ ID NO: 30028 - DNA, 20 bp, Artificial Sequence
  Synthetic oligonucleotide; TGG chr11 5390702 5390721 5390705 -
aggctctcctctgggtgctc

SEQ ID NO: 30029 - DNA, 20 bp, Artificial Sequence
  Synthetic oligonucleotide; TAG chr11 5390683 5390702 5390686 -
ctggtatttattgttctttt

SEQ ID NO: 30030 - DNA, 20 bp, Artificial Sequence
  Synthetic oligonucleotide; TAG chr11 5390672 5390691 5390675 -
tgttctttttagtttttatt

SEQ ID NO: 30031 - DNA, 20 bp, Artificial Sequence
  Synthetic oligonucleotide; TAG chr11 5390661 5390680 5390664 -
gtttttatttagtttcattt

SEQ ID NO: 30032 - DNA, 20 bp, Artificial Sequence
  Synthetic oligonucleotide; TAG chr11 5390655 5390674 5390658 -
atttagtttcattttagttt

SEQ ID NO: 30033 - DNA, 20 bp, Artificial Sequence
  Synthetic oligonucleotide; AAG chr11 5390628 5390647 5390631 -
attgatgatgaccttcaata

SEQ ID NO: 30034 - DNA, 20 bp, Artificial Sequence
  Synthetic oligonucleotide; TGG chr11 5390617 5390636 5390620 -
ccttcaataaagttgccttc

SEQ ID NO: 30035 - DNA, 20 bp, Artificial Sequence
  Synthetic oligonucleotide; TAG chr11 5390613 5390632 5390616 -
caataaagttgccttctgga

SEQ ID NO: 30036 - DNA, 20 bp, Artificial Sequence
  Synthetic oligonucleotide; CAG chr11 5390589 5390608 5390592 -
tttgatgctaccaaaaatgc

SEQ ID NO: 30037 - DNA, 20 bp, Artificial Sequence
  Synthetic oligonucleotide; CAG chr11 5390582 5390601 5390585 -
ctaccaaaaatgccagttct

SEQ ID NO: 30038 - DNA, 20 bp, Artificial Sequence
  Synthetic oligonucleotide; TAG chr11 5390576 5390595 5390579 -
aaaatgccagttctcagctg

SEQ ID NO: 30039 - DNA, 20 bp, Artificial Sequence
  Synthetic oligonucleotide; AGG chr11 5390575 5390594 5390578 -
aaatgccagttctcagctgt

SEQ ID NO: 30040 - DNA, 20 bp, Artificial Sequence
  Synthetic oligonucleotide; GAG chr11 5390573 5390592 5390576 -
atgccagttctcagctgtag

SEQ ID NO: 30041 - DNA, 20 bp, Artificial Sequence
  Synthetic oligonucleotide; AGG chr11 5390572 5390591 5390575 -
tgccagttctcagctgtagg

SEQ ID NO: 30042 - DNA, 20 bp, Artificial Sequence
  Synthetic oligonucleotide; GAG chr11 5390570 5390589 5390573 -
ccagttctcagctgtaggag

SEQ ID NO: 30043 - DNA, 20 bp, Artificial Sequence
  Synthetic oligonucleotide; AAG chr11 5390555 5390574 5390558 -
aggaggagccattaaaatct

SEQ ID NO: 30044 - DNA, 20 bp, Artificial Sequence
  Synthetic oligonucleotide; AAG chr11 5390551 5390570 5390554 -
ggagccattaaaatctaagc

SEQ ID NO: 30045 - DNA, 20 bp, Artificial Sequence
  Synthetic oligonucleotide; GAG chr11 5390549 5390568 5390552 -
agccattaaaatctaagcaa

SEQ ID NO: 30046 - DNA, 20 bp, Artificial Sequence
  Synthetic oligonucleotide; AAG chr11 5390546 5390565 5390549 -
cattaaaatctaagcaagag

SEQ ID NO: 30047 - DNA, 20 bp, Artificial Sequence
  Synthetic oligonucleotide; CAG chr11 5390541 5390560 5390544 -
aaatctaagcaagagaagtt

SEQ ID NO: 30048 - DNA, 20 bp, Artificial Sequence
  Synthetic oligonucleotide; AAG chr11 5390531 5390550 5390534 -
aagagaagttcagtttttta

SEQ ID NO: 30049 - DNA, 20 bp, Artificial Sequence
  Synthetic oligonucleotide; CAG chr11 5390519 5390538 5390522 -
gttttttaaagccacaactc

SEQ ID NO: 30050 - DNA, 20 bp, Artificial Sequence
  Synthetic oligonucleotide; TAG chr11 5390492 5390511 5390495 -
aaatttgcccatattttatt

SEQ ID NO: 30051 - DNA, 20 bp, Artificial Sequence
  Synthetic oligonucleotide; AGG chr11 5390491 5390510 5390494 -
aatttgcccatattttattt

SEQ ID NO: 30052 - DNA, 20 bp, Artificial Sequence
  Synthetic oligonucleotide; CAG chr11 5390487 5390506 5390490 -
tgcccatattttatttagga

SEQ ID NO: 30053 - DNA, 20 bp, Artificial Sequence
  Synthetic oligonucleotide; AGG chr11 5390486 5390505 5390489 -
gcccatattttatttaggac

SEQ ID NO: 30054 - DNA, 20 bp, Artificial Sequence
  Synthetic oligonucleotide; GGG chr11 5390485 5390504 5390488 -
cccatattttatttaggaca

SEQ ID NO: 30055 - DNA, 20 bp, Artificial Sequence
  Synthetic oligonucleotide; GGG chr11 5390484 5390503 5390487 -
ccatattttatttaggacag

SEQ ID NO: 30056 - DNA, 20 bp, Artificial Sequence
  Synthetic oligonucleotide; AAG chr11 5390469 5390488 5390472 -
gacaggggcaaaaaatcttt

SEQ ID NO: 30057 - DNA, 20 bp, Artificial Sequence
  Synthetic oligonucleotide; GAG chr11 5390467 5390486 5390470 -
caggggcaaaaaatctttaa

SEQ ID NO: 30058 - DNA, 20 bp, Artificial Sequence
  Synthetic oligonucleotide; CAG chr11 5390435 5390454 5390438 -
tactcaatactccaaatttt

SEQ ID NO: 30059 - DNA, 20 bp, Artificial Sequence
  Synthetic oligonucleotide; TGG chr11 5390425 5390444 5390428 -
tccaaattttcagtccaatt

SEQ ID NO: 30060 - DNA, 20 bp, Artificial Sequence
  Synthetic oligonucleotide; GGG chr11 5390424 5390443 5390427 -
ccaaattttcagtccaattt

SEQ ID NO: 30061 - DNA, 20 bp, Artificial Sequence
  Synthetic oligonucleotide; GGG chr11 5390423 5390442 5390426 -
caaattttcagtccaatttg

SEQ ID NO: 30062 - DNA, 20 bp, Artificial Sequence
  Synthetic oligonucleotide; TAG chr11 5390412 5390431 5390415 -
tccaatttggggccttctta

SEQ ID NO: 30063 - DNA, 20 bp, Artificial Sequence
  Synthetic oligonucleotide; AGG chr11 5390411 5390430 5390414 -
ccaatttggggccttcttat

SEQ ID NO: 30064 - DNA, 20 bp, Artificial Sequence
  Synthetic oligonucleotide; TAG chr11 5390404 5390423 5390407 -
ggggccttcttataggcctc

SEQ ID NO: 30065 - DNA, 20 bp, Artificial Sequence
  Synthetic oligonucleotide; AGG chr11 5390403 5390422 5390406 -
gggccttcttataggcctct

SEQ ID NO: 30066 - DNA, 20 bp, Artificial Sequence
  Synthetic oligonucleotide; GGG chr11 5390402 5390421 5390405 -
ggccttcttataggcctcta

SEQ ID NO: 30067 - DNA, 20 bp, Artificial Sequence
  Synthetic oligonucleotide; GGG chr11 5390401 5390420 5390404 -
gccttcttataggcctctag

SEQ ID NO: 30068 - DNA, 20 bp, Artificial Sequence
  Synthetic oligonucleotide; GGG chr11 5390400 5390419 5390403 -
ccttcttataggcctctagg

SEQ ID NO: 30069 - DNA, 20 bp, Artificial Sequence
  Synthetic oligonucleotide; GAG chr11 5390398 5390417 5390401 -
ttcttataggcctctagggg

SEQ ID NO: 30070 - DNA, 20 bp, Artificial Sequence
  Synthetic oligonucleotide; TAG chr11 5390392 5390411 5390395 -
taggcctctagggggagttt

SEQ ID NO: 30071 - DNA, 20 bp, Artificial Sequence
  Synthetic oligonucleotide; CAG chr11 5390386 5390405 5390389 -
tctagggggagttttagccc

SEQ ID NO: 30072 - DNA, 20 bp, Artificial Sequence
  Synthetic oligonucleotide; AGG chr11 5390385 5390404 5390388 -
ctagggggagttttagcccc

SEQ ID NO: 30073 - DNA, 20 bp, Artificial Sequence
  Synthetic oligonucleotide; TGG chr11 5390372 5390391 5390375 -
tagccccaggactcatttac

SEQ ID NO: 30074 - DNA, 20 bp, Artificial Sequence
  Synthetic oligonucleotide; AAG chr11 5390362 5390381 5390365 -
actcatttactggccttttt

SEQ ID NO: 30075 - DNA, 20 bp, Artificial Sequence
  Synthetic oligonucleotide; TAG chr11 5390356 5390375 5390359 -
ttactggcctttttaagacc

SEQ ID NO: 30076 - DNA, 20 bp, Artificial Sequence
  Synthetic oligonucleotide; AGG chr11 5390355 5390374 5390358 -
tactggcctttttaagacct

SEQ ID NO: 30077 - DNA, 20 bp, Artificial Sequence
  Synthetic oligonucleotide; TGG chr11 5390342 5390361 5390345 -
aagacctaggaacttgataa

SEQ ID NO: 30078 - DNA, 20 bp, Artificial Sequence
  Synthetic oligonucleotide; CGG chr11 5390337 5390356 5390340 -
ctaggaacttgataatggca

SEQ ID NO: 30079 - DNA, 20 bp, Artificial Sequence
  Synthetic oligonucleotide; TGG chr11 5390334 5390353 5390337 -
ggaacttgataatggcacgg

SEQ ID NO: 30080 - DNA, 20 bp, Artificial Sequence
  Synthetic oligonucleotide; TGG chr11 5390324 5390343 5390327 -
aatggcacggtggatctcct

SEQ ID NO: 30081 - DNA, 20 bp, Artificial Sequence
  Synthetic oligonucleotide; TGG chr11 5390302 5390321 5390305 -
gtcttaatgctgtatatgat

SEQ ID NO: 30082 - DNA, 20 bp, Artificial Sequence
  Synthetic oligonucleotide; GGG chr11 5390301 5390320 5390304 -
tcttaatgctgtatatgatt

SEQ ID NO: 30083 - DNA, 20 bp, Artificial Sequence
  Synthetic oligonucleotide; AAG chr11 5390296 5390315 5390299 -
atgctgtatatgattgggtt

SEQ ID NO: 30084 - DNA, 20 bp, Artificial Sequence
  Synthetic oligonucleotide; TGG chr11 5390291 5390310 5390294 -
gtatatgattgggttaagca

SEQ ID NO: 30085 - DNA, 20 bp, Artificial Sequence
  Synthetic oligonucleotide; GGG chr11 5390290 5390309 5390293 -
tatatgattgggttaagcat

SEQ ID NO: 30086 - DNA, 20 bp, Artificial Sequence
  Synthetic oligonucleotide; GAG chr11 5390288 5390307 5390291 -
tatgattgggttaagcatgg

SEQ ID NO: 30087 - DNA, 20 bp, Artificial Sequence
  Synthetic oligonucleotide; AGG chr11 5390287 5390306 5390290 -
atgattgggttaagcatggg

SEQ ID NO: 30088 - DNA, 20 bp, Artificial Sequence
  Synthetic oligonucleotide; AAG chr11 5390278 5390297 5390281 -
ttaagcatgggaggcacaaa

SEQ ID NO: 30089 - DNA, 20 bp, Artificial Sequence
  Synthetic oligonucleotide; AGG chr11 5390277 5390296 5390280 -
taagcatgggaggcacaaaa

SEQ ID NO: 30090 - DNA, 20 bp, Artificial Sequence
  Synthetic oligonucleotide; TAG chr11 5390274 5390293 5390277 -
gcatgggaggcacaaaaagg

SEQ ID NO: 30091 - DNA, 20 bp, Artificial Sequence
  Synthetic oligonucleotide; TGG chr11 5390267 5390286 5390270 -
aggcacaaaaaggtagacat

SEQ ID NO: 30092 - DNA, 20 bp, Artificial Sequence
  Synthetic oligonucleotide; AAG chr11 5390260 5390279 5390263 -
aaaaggtagacattggccat

SEQ ID NO: 30093 - DNA, 20 bp, Artificial Sequence
  Synthetic oligonucleotide; AAG chr11 5390257 5390276 5390260 -
aggtagacattggccataag

SEQ ID NO: 30094 - DNA, 20 bp, Artificial Sequence
  Synthetic oligonucleotide; TAG chr11 5390249 5390268 5390252 -
attggccataagaagatgaa

SEQ ID NO: 30095 - DNA, 20 bp, Artificial Sequence
  Synthetic oligonucleotide; CAG chr11 5390246 5390265 5390249 -
ggccataagaagatgaatag

SEQ ID NO: 30096 - DNA, 20 bp, Artificial Sequence
  Synthetic oligonucleotide; AGG chr11 5390245 5390264 5390248 -
gccataagaagatgaatagc

SEQ ID NO: 30097 - DNA, 20 bp, Artificial Sequence
  Synthetic oligonucleotide; TGG chr11 5390242 5390261 5390245 -
ataagaagatgaatagcagg

SEQ ID NO: 30098 - DNA, 20 bp, Artificial Sequence
  Synthetic oligonucleotide; GGG chr11 5390241 5390260 5390244 -
taagaagatgaatagcaggt

SEQ ID NO: 30099 - DNA, 20 bp, Artificial Sequence
  Synthetic oligonucleotide; GGG chr11 5390240 5390259 5390243 -
aagaagatgaatagcaggtg

SEQ ID NO: 30100 - DNA, 20 bp, Artificial Sequence
  Synthetic oligonucleotide; CGG chr11 5390223 5390242 5390226 -
gtggggcatgcttcccaaaa

SEQ ID NO: 30101 - DNA, 20 bp, Artificial Sequence
  Synthetic oligonucleotide; CAG chr11 5390215 5390234 5390218 -
tgcttcccaaaacggtgcac

SEQ ID NO: 30102 - DNA, 20 bp, Artificial Sequence
  Synthetic oligonucleotide; AGG chr11 5390214 5390233 5390217 -
gcttcccaaaacggtgcacc

SEQ ID NO: 30103 - DNA, 20 bp, Artificial Sequence
  Synthetic oligonucleotide; GGG chr11 5390213 5390232 5390216 -
cttcccaaaacggtgcacca

SEQ ID NO: 30104 - DNA, 20 bp, Artificial Sequence
  Synthetic oligonucleotide; CAG chr11 5390209 5390228 5390212 -
ccaaaacggtgcaccaggga

SEQ ID NO: 30105 - DNA, 20 bp, Artificial Sequence
  Synthetic oligonucleotide; TGG chr11 5390198 5390217 5390201 -
caccagggacagccccatca

SEQ ID NO: 30106 - DNA, 20 bp, Artificial Sequence
  Synthetic oligonucleotide; GGG chr11 5390197 5390216 5390200 -
accagggacagccccatcat

SEQ ID NO: 30107 - DNA, 20 bp, Artificial Sequence
  Synthetic oligonucleotide; AAG chr11 5390190 5390209 5390193 -
acagccccatcatgggcaca

SEQ ID NO: 30108 - DNA, 20 bp, Artificial Sequence
  Synthetic oligonucleotide; TAG chr11 5390182 5390201 5390185 -
atcatgggcacaaagaatac

SEQ ID NO: 30109 - DNA, 20 bp, Artificial Sequence
  Synthetic oligonucleotide; CAG chr11 5390177 5390196 5390180 -
gggcacaaagaatactagca

SEQ ID NO: 30110 - DNA, 20 bp, Artificial Sequence
  Synthetic oligonucleotide; CAG chr11 5390172 5390191 5390175 -
caaagaatactagcacagca

SEQ ID NO: 30111 - DNA, 20 bp, Artificial Sequence
  Synthetic oligonucleotide; GAG chr11 5390170 5390189 5390173 -
aagaatactagcacagcaca

SEQ ID NO: 30112 - DNA, 20 bp, Artificial Sequence
  Synthetic oligonucleotide; GAG chr11 5390168 5390187 5390171 -
gaatactagcacagcacaga

SEQ ID NO: 30113 - DNA, 20 bp, Artificial Sequence
  Synthetic oligonucleotide; AGG chr11 5390167 5390186 5390170 -
aatactagcacagcacagag

SEQ ID NO: 30114 - DNA, 20 bp, Artificial Sequence
  Synthetic oligonucleotide; GAG chr11 5390165 5390184 5390168 -
tactagcacagcacagagag

SEQ ID NO: 30115 - DNA, 20 bp, Artificial Sequence
  Synthetic oligonucleotide; CGG chr11 5390162 5390181 5390165 -
tagcacagcacagagaggag

SEQ ID NO: 30116 - DNA, 20 bp, Artificial Sequence
  Synthetic oligonucleotide; AAG chr11 5390148 5390167 5390151 -
gaggagcggtgcatgtctga

SEQ ID NO: 30117 - DNA, 20 bp, Artificial Sequence
  Synthetic oligonucleotide; AGG chr11 5390147 5390166 5390150 -
aggagcggtgcatgtctgaa

SEQ ID NO: 30118 - DNA, 20 bp, Artificial Sequence
  Synthetic oligonucleotide; CGG chr11 5390142 5390161 5390145 -
cggtgcatgtctgaaaggca

SEQ ID NO: 30119 - DNA, 20 bp, Artificial Sequence
  Synthetic oligonucleotide; TGG chr11 5390127 5390146 5390130 -
aggcacggcgctgctcctct

SEQ ID NO: 30120 - DNA, 20 bp, Artificial Sequence
  Synthetic oligonucleotide; GGG chr11 5390126 5390145 5390129 -
ggcacggcgctgctcctctt

SEQ ID NO: 30121 - DNA, 20 bp, Artificial Sequence
  Synthetic oligonucleotide; GAG chr11 5390124 5390143 5390127 -
cacggcgctgctcctcttgg

SEQ ID NO: 30122 - DNA, 20 bp, Artificial Sequence
  Synthetic oligonucleotide; AGG chr11 5390123 5390142 5390126 -
acggcgctgctcctcttggg

SEQ ID NO: 30123 - DNA, 20 bp, Artificial Sequence
  Synthetic oligonucleotide; CAG chr11 5390119 5390138 5390122 -
cgctgctcctcttgggaggc

SEQ ID NO: 30124 - DNA, 20 bp, Artificial Sequence
  Synthetic oligonucleotide; AGG chr11 5390118 5390137 5390121 -
gctgctcctcttgggaggcc

SEQ ID NO: 30125 - DNA, 20 bp, Artificial Sequence
  Synthetic oligonucleotide; CAG chr11 5390101 5390120 5390104 -
gccaggcctgctactgtgtg

SEQ ID NO: 30126 - DNA, 20 bp, Artificial Sequence
  Synthetic oligonucleotide; AGG chr11 5390100 5390119 5390103 -
ccaggcctgctactgtgtgc

SEQ ID NO: 30127 - DNA, 20 bp, Artificial Sequence
  Synthetic oligonucleotide; GAG chr11 5390095 5390114 5390098 -
cctgctactgtgtgcaggat

SEQ ID NO: 30128 - DNA, 20 bp, Artificial Sequence
  Synthetic oligonucleotide; TAG chr11 5390088 5390107 5390091 -
ctgtgtgcaggatgagtcca

SEQ ID NO: 30129 - DNA, 20 bp, Artificial Sequence
  Synthetic oligonucleotide; AGG chr11 5390087 5390106 5390090 -
tgtgtgcaggatgagtccat

SEQ ID NO: 30130 - DNA, 20 bp, Artificial Sequence
  Synthetic oligonucleotide; CAG chr11 5390083 5390102 5390086 -
tgcaggatgagtccatagga

SEQ ID NO: 30131 - DNA, 20 bp, Artificial Sequence
  Synthetic oligonucleotide; GAG chr11 5390074 5390093 5390077 -
agtccataggacagtgcgat

SEQ ID NO: 30132 - DNA, 20 bp, Artificial Sequence
  Synthetic oligonucleotide; CAG chr11 5390068 5390087 5390071 -
taggacagtgcgatgagcac

SEQ ID NO: 30133 - DNA, 20 bp, Artificial Sequence
  Synthetic oligonucleotide; AGG chr11 5390067 5390086 5390070 -
aggacagtgcgatgagcacc

SEQ ID NO: 30134 - DNA, 20 bp, Artificial Sequence
  Synthetic oligonucleotide; CAG chr11 5390062 5390081 5390065 -
agtgcgatgagcaccaggtc

SEQ ID NO: 30135 - DNA, 20 bp, Artificial Sequence
  Synthetic oligonucleotide; CAG chr11 5390054 5390073 5390057 -
gagcaccaggtccagcatca

SEQ ID NO: 30136 - DNA, 20 bp, Artificial Sequence
  Synthetic oligonucleotide; CAG chr11 5390035 5390054 5390038 -
acagtgaaaactaccaccat

SEQ ID NO: 30137 - DNA, 20 bp, Artificial Sequence
  Synthetic oligonucleotide; CAG chr11 5390026 5390045 5390029 -
actaccaccatcagtccata

SEQ ID NO: 30138 - DNA, 20 bp, Artificial Sequence
  Synthetic oligonucleotide; AAG chr11 5390016 5390035 5390019 -
tcagtccatacagattattg

SEQ ID NO: 30139 - DNA, 20 bp, Artificial Sequence
  Synthetic oligonucleotide; AGG chr11 5390015 5390034 5390018 -
cagtccatacagattattga

SEQ ID NO: 30140 - DNA, 20 bp, Artificial Sequence
  Synthetic oligonucleotide; CAG chr11 5390001 5390020 5390004 -
tattgaaggtgatatctgtg

SEQ ID NO: 30141 - DNA, 20 bp, Artificial Sequence
  Synthetic oligonucleotide; AGG chr11 5390000 5390019 5390003 -
attgaaggtgatatctgtgc

SEQ ID NO: 30142 - DNA, 20 bp, Artificial Sequence
  Synthetic oligonucleotide; CAG chr11 5389996 5390015 5389999 -
aaggtgatatctgtgcaggc

SEQ ID NO: 30143 - DNA, 20 bp, Artificial Sequence
  Synthetic oligonucleotide; TGG chr11 5389980 5389999 5389983 -
aggccagctgtatcacttcc

SEQ ID NO: 30144 - DNA, 20 bp, Artificial Sequence
  Synthetic oligonucleotide; CAG chr11 5389975 5389994 5389978 -
agctgtatcacttcctggtg

SEQ ID NO: 30145 - DNA, 20 bp, Artificial Sequence
  Synthetic oligonucleotide; AGG chr11 5389974 5389993 5389977 -
gctgtatcacttcctggtgc

SEQ ID NO: 30146 - DNA, 20 bp, Artificial Sequence
  Synthetic oligonucleotide; GAG chr11 5389965 5389984 5389968 -
cttcctggtgcaggcaaaat

SEQ ID NO: 30147 - DNA, 20 bp, Artificial Sequence
  Synthetic oligonucleotide; TGG chr11 5389962 5389981 5389965 -
cctggtgcaggcaaaatgag

SEQ ID NO: 30148 - DNA, 20 bp, Artificial Sequence
  Synthetic oligonucleotide; GGG chr11 5389961 5389980 5389964 -
ctggtgcaggcaaaatgagt

SEQ ID NO: 30149 - DNA, 20 bp, Artificial Sequence
  Synthetic oligonucleotide; GAG chr11 5389959 5389978 5389962 -
ggtgcaggcaaaatgagtgg

SEQ ID NO: 30150 - DNA, 20 bp, Artificial Sequence
  Synthetic oligonucleotide; GAG chr11 5389957 5389976 5389960 -
tgcaggcaaaatgagtggga

SEQ ID NO: 30151 - DNA, 20 bp, Artificial Sequence
  Synthetic oligonucleotide; AGG chr11 5389956 5389975 5389959 -
gcaggcaaaatgagtgggag

SEQ ID NO: 30152 - DNA, 20 bp, Artificial Sequence
  Synthetic oligonucleotide; CAG chr11 5389949 5389968 5389952 -
aaatgagtgggagaggacca

SEQ ID NO: 30153 - DNA, 20 bp, Artificial Sequence
  Synthetic oligonucleotide; CAG chr11 5389941 5389960 5389944 -
gggagaggaccacagatcca

SEQ ID NO: 30154 - DNA, 20 bp, Artificial Sequence
  Synthetic oligonucleotide; TAG chr11 5389938 5389957 5389941 -
agaggaccacagatccacag

SEQ ID NO: 30155 - DNA, 20 bp, Artificial Sequence
  Synthetic oligonucleotide; AGG chr11 5389937 5389956 5389940 -
gaggaccacagatccacagt

SEQ ID NO: 30156 - DNA, 20 bp, Artificial Sequence
  Synthetic oligonucleotide; GGG chr11 5389936 5389955 5389939 -
aggaccacagatccacagta

SEQ ID NO: 30157 - DNA, 20 bp, Artificial Sequence
  Synthetic oligonucleotide; AAG chr11 5389931 5389950 5389934 -
cacagatccacagtagggaa

SEQ ID NO: 30158 - DNA, 20 bp, Artificial Sequence
  Synthetic oligonucleotide; CAG chr11 5389924 5389943 5389927 -
ccacagtagggaaaagcctt

SEQ ID NO: 30159 - DNA, 20 bp, Artificial Sequence
  Synthetic oligonucleotide; AGG chr11 5389923 5389942 5389926 -
cacagtagggaaaagccttc

SEQ ID NO: 30160 - DNA, 20 bp, Artificial Sequence
  Synthetic oligonucleotide; GAG chr11 5389921 5389940 5389924 -
cagtagggaaaagccttcag

SEQ ID NO: 30161 - DNA, 20 bp, Artificial Sequence
  Synthetic oligonucleotide; AGG chr11 5389920 5389939 5389923 -
agtagggaaaagccttcagg

SEQ ID NO: 30162 - DNA, 20 bp, Artificial Sequence
  Synthetic oligonucleotide; GAG chr11 5389918 5389937 5389921 -
tagggaaaagccttcaggag

SEQ ID NO: 30163 - DNA, 20 bp, Artificial Sequence
  Synthetic oligonucleotide; AGG chr11 5389917 5389936 5389920 -
agggaaaagccttcaggagg

SEQ ID NO: 30164 - DNA, 20 bp, Artificial Sequence
  Synthetic oligonucleotide; TAG chr11 5389910 5389929 5389913 -
agccttcaggaggaggacaa

SEQ ID NO: 30165 - DNA, 20 bp, Artificial Sequence
  Synthetic oligonucleotide; AGG chr11 5389909 5389928 5389912 -
gccttcaggaggaggacaat

SEQ ID NO: 30166 - DNA, 20 bp, Artificial Sequence
  Synthetic oligonucleotide; GGG chr11 5389908 5389927 5389911 -
ccttcaggaggaggacaata

SEQ ID NO: 30167 - DNA, 20 bp, Artificial Sequence
  Synthetic oligonucleotide; TAG chr11 5389904 5389923 5389907 -
caggaggaggacaataggga

SEQ ID NO: 30168 - DNA, 20 bp, Artificial Sequence
  Synthetic oligonucleotide; TGG chr11 5389901 5389920 5389904 -
gaggaggacaatagggatag

SEQ ID NO: 30169 - DNA, 20 bp, Artificial Sequence
  Synthetic oligonucleotide; CAG chr11 5389895 5389914 5389898 -
gacaatagggatagtggcca

SEQ ID NO: 30170 - DNA, 20 bp, Artificial Sequence
  Synthetic oligonucleotide; AGG chr11 5389894 5389913 5389897 -
acaatagggatagtggccac

SEQ ID NO: 30171 - DNA, 20 bp, Artificial Sequence
  Synthetic oligonucleotide; CGG chr11 5389887 5389906 5389890 -
ggatagtggccacaggtccc

SEQ ID NO: 30172 - DNA, 20 bp, Artificial Sequence
  Synthetic oligonucleotide; AAG chr11 5389884 5389903 5389887 -
tagtggccacaggtccccgg

SEQ ID NO: 30173 - DNA, 20 bp, Artificial Sequence
  Synthetic oligonucleotide; TAG chr11 5389873 5389892 5389876 -
ggtccccggaagatgacaat

SEQ ID NO: 30174 - DNA, 20 bp, Artificial Sequence
  Synthetic oligonucleotide; AGG chr11 5389872 5389891 5389875 -
gtccccggaagatgacaatt

SEQ ID NO: 30175 - DNA, 20 bp, Artificial Sequence
  Synthetic oligonucleotide; TGG chr11 5389851 5389870 5389854 -
ggcctgctctgaccacttgc

SEQ ID NO: 30176 - DNA, 20 bp, Artificial Sequence
  Synthetic oligonucleotide; CAG chr11 5389847 5389866 5389850 -
tgctctgaccacttgctggc

SEQ ID NO: 30177 - DNA, 20 bp, Artificial Sequence
  Synthetic oligonucleotide; CAG chr11 5389825 5389844 5389828 -
gtgataatgaccgaatacct

SEQ ID NO: 30178 - DNA, 20 bp, Artificial Sequence
  Synthetic oligonucleotide; GAG chr11 5389823 5389842 5389826 -
gataatgaccgaatacctca

SEQ ID NO: 30179 - DNA, 20 bp, Artificial Sequence
  Synthetic oligonucleotide; AGG chr11 5389822 5389841 5389825 -
ataatgaccgaatacctcag

SEQ ID NO: 30180 - DNA, 20 bp, Artificial Sequence
  Synthetic oligonucleotide; GGG chr11 5389821 5389840 5389824 -
taatgaccgaatacctcaga

SEQ ID NO: 30181 - DNA, 20 bp, Artificial Sequence
  Synthetic oligonucleotide; TGG chr11 5389818 5389837 5389821 -
tgaccgaatacctcagaggg

SEQ ID NO: 30182 - DNA, 20 bp, Artificial Sequence
  Synthetic oligonucleotide; CAG chr11 5389815 5389834 5389818 -
ccgaatacctcagagggtgg

SEQ ID NO: 30183 - DNA, 20 bp, Artificial Sequence
  Synthetic oligonucleotide; TGG chr11 5389811 5389830 5389814 -
atacctcagagggtggcaga

SEQ ID NO: 30184 - DNA, 20 bp, Artificial Sequence
  Synthetic oligonucleotide; AAG chr11 5389804 5389823 5389807 -
agagggtggcagatggccac

SEQ ID NO: 30185 - DNA, 20 bp, Artificial Sequence
  Synthetic oligonucleotide; AGG chr11 5389803 5389822 5389806 -
gagggtggcagatggccaca

SEQ ID NO: 30186 - DNA, 20 bp, Artificial Sequence
  Synthetic oligonucleotide; CGG chr11 5389800 5389819 5389803 -
ggtggcagatggccacaagg

SEQ ID NO: 30187 - DNA, 20 bp, Artificial Sequence
  Synthetic oligonucleotide; AAG chr11 5389794 5389813 5389797 -
agatggccacaaggcggtca

SEQ ID NO: 30188 - DNA, 20 bp, Artificial Sequence
  Synthetic oligonucleotide; AGG chr11 5389793 5389812 5389796 -
gatggccacaaggcggtcaa

SEQ ID NO: 30189 - DNA, 20 bp, Artificial Sequence
  Synthetic oligonucleotide; GAG chr11 5389783 5389802 5389786 -
aggcggtcaaaggacatcat

SEQ ID NO: 30190 - DNA, 20 bp, Artificial Sequence
  Synthetic oligonucleotide; AGG chr11 5389782 5389801 5389785 -
ggcggtcaaaggacatcatg

SEQ ID NO: 30191 - DNA, 20 bp, Artificial Sequence
  Synthetic oligonucleotide; GAG chr11 5389780 5389799 5389783 -
cggtcaaaggacatcatgag

SEQ ID NO: 30192 - DNA, 20 bp, Artificial Sequence
  Synthetic oligonucleotide; GAG chr11 5389773 5389792 5389776 -
aggacatcatgaggagcact

SEQ ID NO: 30193 - DNA, 20 bp, Artificial Sequence
  Synthetic oligonucleotide; AGG chr11 5389772 5389791 5389775 -
ggacatcatgaggagcactg

SEQ ID NO: 30194 - DNA, 20 bp, Artificial Sequence
  Synthetic oligonucleotide; AAG chr11 5389761 5389780 5389764 -
ggagcactgaggactccatg

SEQ ID NO: 30195 - DNA, 20 bp, Artificial Sequence
  Synthetic oligonucleotide; AGG chr11 5389760 5389779 5389763 -
gagcactgaggactccatga

SEQ ID NO: 30196 - DNA, 20 bp, Artificial Sequence
  Synthetic oligonucleotide; AAG chr11 5389754 5389773 5389757 -
tgaggactccatgaaggaaa

SEQ ID NO: 30197 - DNA, 20 bp, Artificial Sequence
  Synthetic oligonucleotide; GAG chr11 5389752 5389771 5389755 -
aggactccatgaaggaaaaa

SEQ ID NO: 30198 - DNA, 20 bp, Artificial Sequence
  Synthetic oligonucleotide; TGG chr11 5389749 5389768 5389752 -
actccatgaaggaaaaagag

SEQ ID NO: 30199 - DNA, 20 bp, Artificial Sequence
  Synthetic oligonucleotide; CAG chr11 5389743 5389762 5389746 -
tgaaggaaaaagagtggatg

SEQ ID NO: 30200 - DNA, 20 bp, Artificial Sequence
  Synthetic oligonucleotide; TGG chr11 5389734 5389753 5389737 -
aagagtggatgcagaacatc

SEQ ID NO: 30201 - DNA, 20 bp, Artificial Sequence
  Synthetic oligonucleotide; AAG chr11 5389716 5389735 5389719 -
tctggatttgacacgctcca

SEQ ID NO: 30202 - DNA, 20 bp, Artificial Sequence
  Synthetic oligonucleotide; TAG chr11 5389713 5389732 5389716 -
ggatttgacacgctccaaag

SEQ ID NO: 30203 - DNA, 20 bp, Artificial Sequence
  Synthetic oligonucleotide; TGG chr11 5389704 5389723 5389707 -
acgctccaaagtagatacta

SEQ ID NO: 30204 - DNA, 20 bp, Artificial Sequence
  Synthetic oligonucleotide; GGG chr11 5389703 5389722 5389706 -
cgctccaaagtagatactat

SEQ ID NO: 30205 - DNA, 20 bp, Artificial Sequence
  Synthetic oligonucleotide; GAG chr11 5389701 5389720 5389704 -
ctccaaagtagatactatgg

SEQ ID NO: 30206 - DNA, 20 bp, Artificial Sequence
  Synthetic oligonucleotide; CAG chr11 5389692 5389711 5389695 -
agatactatgggagttaaac

SEQ ID NO: 30207 - DNA, 20 bp, Artificial Sequence
  Synthetic oligonucleotide; AAG chr11 5389689 5389708 5389692 -
tactatgggagttaaaccag

SEQ ID NO: 30208 - DNA, 20 bp, Artificial Sequence
  Synthetic oligonucleotide; TAG chr11 5389679 5389698 5389682 -
gttaaaccagaagatcccca

SEQ ID NO: 30209 - DNA, 20 bp, Artificial Sequence
  Synthetic oligonucleotide; TGG chr11 5389676 5389695 5389679 -
aaaccagaagatccccatag

SEQ ID NO: 30210 - DNA, 20 bp, Artificial Sequence
  Synthetic oligonucleotide; TGG chr11 5389673 5389692 5389676 -
ccagaagatccccatagtgg

SEQ ID NO: 30211 - DNA, 20 bp, Artificial Sequence
  Synthetic oligonucleotide; GGG chr11 5389672 5389691 5389675 -
cagaagatccccatagtggt

SEQ ID NO: 30212 - DNA, 20 bp, Artificial Sequence
  Synthetic oligonucleotide; TGG chr11 5389664 5389683 5389667 -
ccccatagtggtgggcaacg

SEQ ID NO: 30213 - DNA, 20 bp, Artificial Sequence
  Synthetic oligonucleotide; CAG chr11 5389654 5389673 5389657 -
gtgggcaacgtggacacaca

SEQ ID NO: 30214 - DNA, 20 bp, Artificial Sequence
  Synthetic oligonucleotide; CAG chr11 5389648 5389667 5389651 -
aacgtggacacacacagccc

SEQ ID NO: 30215 - DNA, 20 bp, Artificial Sequence
  Synthetic oligonucleotide; AGG chr11 5389647 5389666 5389650 -
acgtggacacacacagcccc

SEQ ID NO: 30216 - DNA, 20 bp, Artificial Sequence
  Synthetic oligonucleotide; CAG chr11 5389643 5389662 5389646 -
ggacacacacagccccaggt

SEQ ID NO: 30217 - DNA, 20 bp, Artificial Sequence
  Synthetic oligonucleotide; GAG chr11 5389639 5389658 5389642 -
acacacagccccaggtcagt

SEQ ID NO: 30218 - DNA, 20 bp, Artificial Sequence
  Synthetic oligonucleotide; AGG chr11 5389638 5389657 5389641 -
cacacagccccaggtcagtg

SEQ ID NO: 30219 - DNA, 20 bp, Artificial Sequence
  Synthetic oligonucleotide; GGG chr11 5389637 5389656 5389640 -
acacagccccaggtcagtga

SEQ ID NO: 30220 - DNA, 20 bp, Artificial Sequence
  Synthetic oligonucleotide; CAG chr11 5389633 5389652 5389636 -
agccccaggtcagtgagggc

SEQ ID NO: 30221 - DNA, 20 bp, Artificial Sequence
  Synthetic oligonucleotide; AAG chr11 5389629 5389648 5389632 -
ccaggtcagtgagggccagc

SEQ ID NO: 30222 - DNA, 20 bp, Artificial Sequence
  Synthetic oligonucleotide; AGG chr11 5389628 5389647 5389631 -
caggtcagtgagggccagca

SEQ ID NO: 30223 - DNA, 20 bp, Artificial Sequence
  Synthetic oligonucleotide; TAG chr11 5389624 5389643 5389627 -
tcagtgagggccagcaagga

SEQ ID NO: 30224 - DNA, 20 bp, Artificial Sequence
  Synthetic oligonucleotide; TAG chr11 5389621 5389640 5389624 -
gtgagggccagcaaggatag

SEQ ID NO: 30225 - DNA, 20 bp, Artificial Sequence
  Synthetic oligonucleotide; TAG chr11 5389617 5389636 5389620 -
gggccagcaaggatagtaga

SEQ ID NO: 30226 - DNA, 20 bp, Artificial Sequence
  Synthetic oligonucleotide; TGG chr11 5389610 5389629 5389613 -
caaggatagtagatagtaca

SEQ ID NO: 30227 - DNA, 20 bp, Artificial Sequence
  Synthetic oligonucleotide; GGG chr11 5389609 5389628 5389612 -
aaggatagtagatagtacat

SEQ ID NO: 30228 - DNA, 20 bp, Artificial Sequence
  Synthetic oligonucleotide; CAG chr11 5389600 5389619 5389603 -
agatagtacatgggtgtgtg

SEQ ID NO: 30229 - DNA, 20 bp, Artificial Sequence
  Synthetic oligonucleotide; GAG chr11 5389595 5389614 5389598 -
gtacatgggtgtgtgcagac

SEQ ID NO: 30230 - DNA, 20 bp, Artificial Sequence
  Synthetic oligonucleotide; AGG chr11 5389594 5389613 5389597 -
tacatgggtgtgtgcagacg

SEQ ID NO: 30231 - DNA, 20 bp, Artificial Sequence
  Synthetic oligonucleotide; GGG chr11 5389593 5389612 5389596 -
acatgggtgtgtgcagacga

SEQ ID NO: 30232 - DNA, 20 bp, Artificial Sequence
  Synthetic oligonucleotide; TGG chr11 5389589 5389608 5389592 -
gggtgtgtgcagacgagggt

SEQ ID NO: 30233 - DNA, 20 bp, Artificial Sequence
  Synthetic oligonucleotide; CAG chr11 5389573 5389592 5389576 -
gggttggtcttaataatgat

SEQ ID NO: 30234 - DNA, 20 bp, Artificial Sequence
  Synthetic oligonucleotide; GAG chr11 5389554 5389573 5389557 -
tcagaatgaaacaattgcct

SEQ ID NO: 30235 - DNA, 20 bp, Artificial Sequence
  Synthetic oligonucleotide; TGG chr11 5389550 5389569 5389553 -
aatgaaacaattgcctgaga

SEQ ID NO: 30236 - DNA, 20 bp, Artificial Sequence
  Synthetic oligonucleotide; AAG chr11 5389533 5389552 5389536 -
agatggcaaccatgtacata

SEQ ID NO: 30237 - DNA, 20 bp, Artificial Sequence
  Synthetic oligonucleotide; AAG chr11 5389527 5389546 5389530 -
caaccatgtacataaagaaa

SEQ ID NO: 30238 - DNA, 20 bp, Artificial Sequence
  Synthetic oligonucleotide; AGG chr11 5389526 5389545 5389529 -
aaccatgtacataaagaaaa

SEQ ID NO: 30239 - DNA, 20 bp, Artificial Sequence
  Synthetic oligonucleotide; GGG chr11 5389525 5389544 5389528 -
accatgtacataaagaaaaa

SEQ ID NO: 30240 - DNA, 20 bp, Artificial Sequence
  Synthetic oligonucleotide; GGG chr11 5389524 5389543 5389527 -
ccatgtacataaagaaaaag

SEQ ID NO: 30241 - DNA, 20 bp, Artificial Sequence
  Synthetic oligonucleotide; CAG chr11 5389512 5389531 5389515 -
agaaaaaggggatgaaaatc

SEQ ID NO: 30242 - DNA, 20 bp, Artificial Sequence
  Synthetic oligonucleotide; CAG chr11 5389490 5389509 5389493 -
gtgtttgatgccttccaatc

SEQ ID NO: 30243 - DNA, 20 bp, Artificial Sequence
  Synthetic oligonucleotide; AGG chr11 5389489 5389508 5389492 -
tgtttgatgccttccaatcc

SEQ ID NO: 30244 - DNA, 20 bp, Artificial Sequence
  Synthetic oligonucleotide; AAG chr11 5389485 5389504 5389488 -
tgatgccttccaatccagga

SEQ ID NO: 30245 - DNA, 20 bp, Artificial Sequence
  Synthetic oligonucleotide; TGG chr11 5389481 5389500 5389484 -
gccttccaatccaggaaagc

SEQ ID NO: 30246 - DNA, 20 bp, Artificial Sequence
  Synthetic oligonucleotide; GAG chr11 5389477 5389496 5389480 -
tccaatccaggaaagctggt

SEQ ID NO: 30247 - DNA, 20 bp, Artificial Sequence
  Synthetic oligonucleotide; TAG chr11 5389473 5389492 5389476 -
atccaggaaagctggtgaga

SEQ ID NO: 30248 - DNA, 20 bp, Artificial Sequence
  Synthetic oligonucleotide; TGG chr11 5389466 5389485 5389469 -
aaagctggtgagatagaata

SEQ ID NO: 30249 - DNA, 20 bp, Artificial Sequence
  Synthetic oligonucleotide; GGG chr11 5389465 5389484 5389468 -
aagctggtgagatagaatat

SEQ ID NO: 30250 - DNA, 20 bp, Artificial Sequence
  Synthetic oligonucleotide; GGG chr11 5389464 5389483 5389467 -
agctggtgagatagaatatg

SEQ ID NO: 30251 - DNA, 20 bp, Artificial Sequence
  Synthetic oligonucleotide; GAG chr11 5389454 5389473 5389457 -
atagaatatggggctaaact

SEQ ID NO: 30252 - DNA, 20 bp, Artificial Sequence
  Synthetic oligonucleotide; TGG chr11 5389445 5389464 5389448 -
ggggctaaactgagtaatgt

SEQ ID NO: 30253 - DNA, 20 bp, Artificial Sequence
  Synthetic oligonucleotide; TAG chr11 5389441 5389460 5389444 -
ctaaactgagtaatgttgga

SEQ ID NO: 30254 - DNA, 20 bp, Artificial Sequence
  Synthetic oligonucleotide; CAG chr11 5389438 5389457 5389441 -
aactgagtaatgttggatag

SEQ ID NO: 30255 - DNA, 20 bp, Artificial Sequence
  Synthetic oligonucleotide; GAG chr11 5389427 5389446 5389430 -
gttggatagcagcatgaatt

SEQ ID NO: 30256 - DNA, 20 bp, Artificial Sequence
  Synthetic oligonucleotide; AGG chr11 5389426 5389445 5389429 -
ttggatagcagcatgaattg

SEQ ID NO: 30257 - DNA, 20 bp, Artificial Sequence
  Synthetic oligonucleotide; GAG chr11 5389420 5389439 5389423 -
agcagcatgaattgaggact

SEQ ID NO: 30258 - DNA, 20 bp, Artificial Sequence
  Synthetic oligonucleotide; TGG chr11 5389410 5389429 5389413 -
attgaggactgagcgaatat

SEQ ID NO: 30259 - DNA, 20 bp, Artificial Sequence
  Synthetic oligonucleotide; CGG chr11 5389395 5389414 5389398 -
aatattggactgacattcct

SEQ ID NO: 30260 - DNA, 20 bp, Artificial Sequence
  Synthetic oligonucleotide; GGG chr11 5389394 5389413 5389397 -
atattggactgacattcctc

SEQ ID NO: 30261 - DNA, 20 bp, Artificial Sequence
  Synthetic oligonucleotide; GGG chr11 5389393 5389412 5389396 -
tattggactgacattcctcg

SEQ ID NO: 30262 - DNA, 20 bp, Artificial Sequence
  Synthetic oligonucleotide; GAG chr11 5389387 5389406 5389390 -
actgacattcctcggggatt

SEQ ID NO: 30263 - DNA, 20 bp, Artificial Sequence
  Synthetic oligonucleotide; TGG chr11 5389373 5389392 5389376 -
gggattgagctgaaaataaa

SEQ ID NO: 30264 - DNA, 20 bp, Artificial Sequence
  Synthetic oligonucleotide; TGG chr11 5389363 5389382 5389366 -
tgaaaataaatggatatttc

SEQ ID NO: 30265 - DNA, 20 bp, Artificial Sequence
  Synthetic oligonucleotide; CAG chr11 5389348 5389367 5389351 -
atttctggttattaattctt

SEQ ID NO: 30266 - DNA, 20 bp, Artificial Sequence
  Synthetic oligonucleotide; AAG chr11 5389321 5389340 5389324 -
actaacattcacaacatcac

SEQ ID NO: 30267 - DNA, 20 bp, Artificial Sequence
  Synthetic oligonucleotide; CAG chr11 5389318 5389337 5389321 -
aacattcacaacatcacaag

SEQ ID NO: 30268 - DNA, 20 bp, Artificial Sequence
  Synthetic oligonucleotide; TGG chr11 5389310 5389329 5389313 -
caacatcacaagcagtacca

SEQ ID NO: 30269 - DNA, 20 bp, Artificial Sequence
  Synthetic oligonucleotide; TAG chr11 5389294 5389313 5389297 -
accatggtcatcatcacctt

SEQ ID NO: 30270 - DNA, 20 bp, Artificial Sequence
  Synthetic oligonucleotide; CAG chr11 5389215 5389234 5389218 -
tttgataacctcgccctcac

SEQ ID NO: 30271 - DNA, 20 bp, Artificial Sequence
  Synthetic oligonucleotide; CAG chr11 5389188 5389207 5389191 -
cctctgtatttcaattattt

SEQ ID NO: 30272 - DNA, 20 bp, Artificial Sequence
  Synthetic oligonucleotide; TGG chr11 5389166 5389185 5389169 -
gttcctctctgcctctttgc

SEQ ID NO: 30273 - DNA, 20 bp, Artificial Sequence
  Synthetic oligonucleotide; AAG chr11 5389140 5389159 5389143 -
gcctttattgctcaaccctt

SEQ ID NO: 30274 - DNA, 20 bp, Artificial Sequence
  Synthetic oligonucleotide; TAG chr11 5389135 5389154 5389138 -
tattgctcaacccttaagta

SEQ ID NO: 30275 - DNA, 20 bp, Artificial Sequence
  Synthetic oligonucleotide; TGG chr11 5389119 5389138 5389122 -
agtatagttcttcccatcct

SEQ ID NO: 30276 - DNA, 20 bp, Artificial Sequence
  Synthetic oligonucleotide; TGG chr11 5389108 5389127 5389111 -
tcccatccttggcaatttcc

SEQ ID NO: 30277 - DNA, 20 bp, Artificial Sequence
  Synthetic oligonucleotide; CAG chr11 5389018 5389037 5389021 -
aaataacaaatatataattc

SEQ ID NO: 30278 - DNA, 20 bp, Artificial Sequence
  Synthetic oligonucleotide; CAG chr11 5388989 5389008 5388992 -
tctttctctcttttgatttc

SEQ ID NO: 30279 - DNA, 20 bp, Artificial Sequence
  Synthetic oligonucleotide; TAG chr11 5388982 5389001 5388985 -
ctcttttgatttccagactc

SEQ ID NO: 30280 - DNA, 20 bp, Artificial Sequence
  Synthetic oligonucleotide; CAG chr11 5388955 5388974 5388958 -
atctgtacttttcattatct

SEQ ID NO: 30281 - DNA, 20 bp, Artificial Sequence
  Synthetic oligonucleotide; TGG chr11 5388952 5388971 5388955 -
tgtacttttcattatctcag

SEQ ID NO: 30282 - DNA, 20 bp, Artificial Sequence
  Synthetic oligonucleotide; AAG chr11 5388946 5388965 5388949 -
tttcattatctcagtggctc

SEQ ID NO: 30283 - DNA, 20 bp, Artificial Sequence
  Synthetic oligonucleotide; TAG chr11 5388923 5388942 5388926 -
tcaaatgtcatgttttatgt

SEQ ID NO: 30284 - DNA, 20 bp, Artificial Sequence
  Synthetic oligonucleotide; TAG chr11 5388896 5388915 5388899 -
ctccatatcacatctctcca

SEQ ID NO: 30285 - DNA, 20 bp, Artificial Sequence
  Synthetic oligonucleotide; AAG chr11 5388873 5388892 5388876 -
tatctaatcaaccaatcacc

SEQ ID NO: 30286 - DNA, 20 bp, Artificial Sequence
  Synthetic oligonucleotide; TAG chr11 5388867 5388886 5388870 -
atcaaccaatcaccaagtcc

SEQ ID NO: 30287 - DNA, 20 bp, Artificial Sequence
  Synthetic oligonucleotide; AGG chr11 5388866 5388885 5388869 -
tcaaccaatcaccaagtcct

SEQ ID NO: 30288 - DNA, 20 bp, Artificial Sequence
  Synthetic oligonucleotide; GGG chr11 5388865 5388884 5388868 -
caaccaatcaccaagtccta

SEQ ID NO: 30289 - DNA, 20 bp, Artificial Sequence
  Synthetic oligonucleotide; AAG chr11 5388841 5388860 5388844 -
ttctgtttactgaatacctc

SEQ ID NO: 30290 - DNA, 20 bp, Artificial Sequence
  Synthetic oligonucleotide; CAG chr11 5388797 5388816 5388800 -
tcattgatgctattctaatt

SEQ ID NO: 30291 - DNA, 20 bp, Artificial Sequence
  Synthetic oligonucleotide; CAG chr11 5388784 5388803 5388787 -
tctaattcagatcactcttt

SEQ ID NO: 30292 - DNA, 20 bp, Artificial Sequence
  Synthetic oligonucleotide; AGG chr11 5388783 5388802 5388786 -
ctaattcagatcactctttc

SEQ ID NO: 30293 - DNA, 20 bp, Artificial Sequence
  Synthetic oligonucleotide; CAG chr11 5388773 5388792 5388776 -
tcactctttcaggactattc

SEQ ID NO: 30294 - DNA, 20 bp, Artificial Sequence
  Synthetic oligonucleotide; CAG chr11 5388744 5388763 5388747 -
atcttttgtactactgtatt

SEQ ID NO: 30295 - DNA, 20 bp, Artificial Sequence
  Synthetic oligonucleotide; TAG chr11 5388729 5388748 5388732 -
gtattcagttgactactata

SEQ ID NO: 30296 - DNA, 20 bp, Artificial Sequence
  Synthetic oligonucleotide; AAG chr11 5388725 5388744 5388728 -
tcagttgactactatatagc

SEQ ID NO: 30297 - DNA, 20 bp, Artificial Sequence
  Synthetic oligonucleotide; GAG chr11 5388723 5388742 5388726 -
agttgactactatatagcaa

SEQ ID NO: 30298 - DNA, 20 bp, Artificial Sequence
  Synthetic oligonucleotide; GAG chr11 5388721 5388740 5388724 -
ttgactactatatagcaaga

SEQ ID NO: 30299 - DNA, 20 bp, Artificial Sequence
  Synthetic oligonucleotide; AAG chr11 5388704 5388723 5388707 -
agagagacgtatacataaac

SEQ ID NO: 30300 - DNA, 20 bp, Artificial Sequence
  Synthetic oligonucleotide; AAG chr11 5388692 5388711 5388695 -
acataaacaagtttttaatg

SEQ ID NO: 30301 - DNA, 20 bp, Artificial Sequence
  Synthetic oligonucleotide; AAG chr11 5388684 5388703 5388687 -
aagtttttaatgaagtaaaa

SEQ ID NO: 30302 - DNA, 20 bp, Artificial Sequence
  Synthetic oligonucleotide; AGG chr11 5388683 5388702 5388686 -
agtttttaatgaagtaaaaa

SEQ ID NO: 30303 - DNA, 20 bp, Artificial Sequence
  Synthetic oligonucleotide; AAG chr11 5388665 5388684 5388668 -
aaaggtttaaaatgacattc

SEQ ID NO: 30304 - DNA, 20 bp, Artificial Sequence
  Synthetic oligonucleotide; CGG chr11 5388594 5388613 5388597 -
taatttcctctgtatattca

SEQ ID NO: 30305 - DNA, 20 bp, Artificial Sequence
  Synthetic oligonucleotide; CAG chr11 5388566 5388585 5388569 -
atgacactaaacaattcttc

SEQ ID NO: 30306 - DNA, 20 bp, Artificial Sequence
  Synthetic oligonucleotide; TAG chr11 5388557 5388576 5388560 -
aacaattcttccagtttatc

SEQ ID NO: 30307 - DNA, 20 bp, Artificial Sequence
  Synthetic oligonucleotide; TAG chr11 5388542 5388561 5388545 -
ttatctagtatgcttgctca

SEQ ID NO: 30308 - DNA, 20 bp, Artificial Sequence
  Synthetic oligonucleotide; AGG chr11 5388541 5388560 5388544 -
tatctagtatgcttgctcat

SEQ ID NO: 30309 - DNA, 20 bp, Artificial Sequence
  Synthetic oligonucleotide; TGG chr11 5388513 5388532 5388516 -
atttgtattttcattcttcc

SEQ ID NO: 30310 - DNA, 20 bp, Artificial Sequence
  Synthetic oligonucleotide; TAG chr11 5388487 5388506 5388490 -
aaaaacattttttcctgaaa

SEQ ID NO: 30311 - DNA, 20 bp, Artificial Sequence
  Synthetic oligonucleotide; TAG chr11 5388465 5388484 5388468 -
gctttcccttaatctttgtc

SEQ ID NO: 30312 - DNA, 20 bp, Artificial Sequence
  Synthetic oligonucleotide; TAG chr11 5388436 5388455 5388439 -
tctactaatataacccacct

SEQ ID NO: 30313 - DNA, 20 bp, Artificial Sequence
  Synthetic oligonucleotide; TAG chr11 5388431 5388450 5388434 -
taatataacccaccttagct

SEQ ID NO: 30314 - DNA, 20 bp, Artificial Sequence
  Synthetic oligonucleotide; CAG chr11 5388415 5388434 5388418 -
agcttagatatgatgtcctt

SEQ ID NO: 30315 - DNA, 20 bp, Artificial Sequence
  Synthetic oligonucleotide; AAG chr11 5388412 5388431 5388415 -
ttagatatgatgtccttcag

SEQ ID NO: 30316 - DNA, 20 bp, Artificial Sequence
  Synthetic oligonucleotide; AGG chr11 5388411 5388430 5388414 -
tagatatgatgtccttcaga

SEQ ID NO: 30317 - DNA, 20 bp, Artificial Sequence
  Synthetic oligonucleotide; AAG chr11 5388392 5388411 5388395 -
aaggccttcttaaattcccc

SEQ ID NO: 30318 - DNA, 20 bp, Artificial Sequence
  Synthetic oligonucleotide; TAG chr11 5388387 5388406 5388390 -
cttcttaaattccccaagtt

SEQ ID NO: 30319 - DNA, 20 bp, Artificial Sequence
  Synthetic oligonucleotide; TAG chr11 5388356 5388375 5388359 -
ccctctcctatgtgttcctg

SEQ ID NO: 30320 - DNA, 20 bp, Artificial Sequence
  Synthetic oligonucleotide; CAG chr11 5388318 5388337 5388321 -
ttaccatgatattttccctg

SEQ ID NO: 30321 - DNA, 20 bp, Artificial Sequence
  Synthetic oligonucleotide; TGG chr11 5388273 5388292 5388276 -
tctataatgtgaattccttg

SEQ ID NO: 30322 - DNA, 20 bp, Artificial Sequence
  Synthetic oligonucleotide; TAG chr11 5388233 5388252 5388236 -
ctcttttttaattttaatat

SEQ ID NO: 30323 - DNA, 20 bp, Artificial Sequence
  Synthetic oligonucleotide; TAG chr11 5388227 5388246 5388230 -
tttaattttaatattagctc

SEQ ID NO: 30324 - DNA, 20 bp, Artificial Sequence
  Synthetic oligonucleotide; AGG chr11 5388226 5388245 5388229 -
ttaattttaatattagctct

SEQ ID NO: 30325 - DNA, 20 bp, Artificial Sequence
  Synthetic oligonucleotide; GGG chr11 5388225 5388244 5388228 -
taattttaatattagctcta

SEQ ID NO: 30326 - DNA, 20 bp, Artificial Sequence
  Synthetic oligonucleotide; TAG chr11 5388211 5388230 5388214 -
gctctagggattgacttttt

SEQ ID NO: 30327 - DNA, 20 bp, Artificial Sequence
  Synthetic oligonucleotide; TGG chr11 5388196 5388215 5388199 -
ttttttagccaccatatcat

SEQ ID NO: 30328 - DNA, 20 bp, Artificial Sequence
  Synthetic oligonucleotide; TGG chr11 5388052 5388071 5388055 -
catattgaaattgtattaca

SEQ ID NO: 30329 - DNA, 20 bp, Artificial Sequence
  Synthetic oligonucleotide; CAG chr11 5388049 5388068 5388052 -
attgaaattgtattacatgg

SEQ ID NO: 30330 - DNA, 20 bp, Artificial Sequence
  Synthetic oligonucleotide; TAG chr11 5388034 5388053 5388037 -
catggcagacataattctat

SEQ ID NO: 30331 - DNA, 20 bp, Artificial Sequence
  Synthetic oligonucleotide; AGG chr11 5388033 5388052 5388036 -
atggcagacataattctatt

SEQ ID NO: 30332 - DNA, 20 bp, Artificial Sequence
  Synthetic oligonucleotide; TGG chr11 5388029 5388048 5388032 -
cagacataattctattaggt

SEQ ID NO: 30333 - DNA, 20 bp, Artificial Sequence
  Synthetic oligonucleotide; AAG chr11 5388021 5388040 5388024 -
attctattaggttggtgcaa

SEQ ID NO: 30334 - DNA, 20 bp, Artificial Sequence
  Synthetic oligonucleotide; TGG chr11 5388012 5388031 5388015 -
ggttggtgcaaaagtaattg

SEQ ID NO: 30335 - DNA, 20 bp, Artificial Sequence
  Synthetic oligonucleotide; TGG chr11 5387990 5388009 5387993 -
gtttttaccattactttcaa

SEQ ID NO: 30336 - DNA, 20 bp, Artificial Sequence
  Synthetic oligonucleotide; AAG chr11 5387986 5388005 5387989 -
ttaccattactttcaatggc

SEQ ID NO: 30337 - DNA, 20 bp, Artificial Sequence
  Synthetic oligonucleotide; TAG chr11 5387962 5387981 5387965 -
actgcaattacttttacacc

SEQ ID NO: 30338 - DNA, 20 bp, Artificial Sequence
  Synthetic oligonucleotide; AGG chr11 5387961 5387980 5387964 -
ctgcaattacttttacacct

SEQ ID NO: 30339 - DNA, 20 bp, Artificial Sequence
  Synthetic oligonucleotide; CAG chr11 5387940 5387959 5387943 -
ggtactgaaaatacaatgaa

SEQ ID NO: 30340 - DNA, 20 bp, Artificial Sequence
  Synthetic oligonucleotide; CAG chr11 5387934 5387953 5387937 -
gaaaatacaatgaacagaaa

SEQ ID NO: 30341 - DNA, 20 bp, Artificial Sequence
  Synthetic oligonucleotide; CAG chr11 5387929 5387948 5387932 -
tacaatgaacagaaacagaa

SEQ ID NO: 30342 - DNA, 20 bp, Artificial Sequence
  Synthetic oligonucleotide; GAG chr11 5387927 5387946 5387930 -
caatgaacagaaacagaaca

SEQ ID NO: 30343 - DNA, 20 bp, Artificial Sequence
  Synthetic oligonucleotide; AAG chr11 5387890 5387909 5387893 -
atacatacatactgcaatgc

SEQ ID NO: 30344 - DNA, 20 bp, Artificial Sequence
  Synthetic oligonucleotide; AGG chr11 5387889 5387908 5387892 -
tacatacatactgcaatgca

SEQ ID NO: 30345 - DNA, 20 bp, Artificial Sequence
  Synthetic oligonucleotide; AAG chr11 5387871 5387890 5387874 -
caaggtaatgtaatgcaata

SEQ ID NO: 30346 - DNA, 20 bp, Artificial Sequence
  Synthetic oligonucleotide; AAG chr11 5387868 5387887 5387871 -
ggtaatgtaatgcaataaag

SEQ ID NO: 30347 - DNA, 20 bp, Artificial Sequence
  Synthetic oligonucleotide; TAG chr11 5387865 5387884 5387868 -
aatgtaatgcaataaagaag

SEQ ID NO: 30348 - DNA, 20 bp, Artificial Sequence
  Synthetic oligonucleotide; AGG chr11 5387864 5387883 5387867 -
atgtaatgcaataaagaagt

SEQ ID NO: 30349 - DNA, 20 bp, Artificial Sequence
  Synthetic oligonucleotide; GGG chr11 5387863 5387882 5387866 -
tgtaatgcaataaagaagta

SEQ ID NO: 30350 - DNA, 20 bp, Artificial Sequence
  Synthetic oligonucleotide; GAG chr11 5387861 5387880 5387864 -
taatgcaataaagaagtagg

SEQ ID NO: 30351 - DNA, 20 bp, Artificial Sequence
  Synthetic oligonucleotide; AAG chr11 5387856 5387875 5387859 -
caataaagaagtagggagca

SEQ ID NO: 30352 - DNA, 20 bp, Artificial Sequence
  Synthetic oligonucleotide; AGG chr11 5387855 5387874 5387858 -
aataaagaagtagggagcaa

SEQ ID NO: 30353 - DNA, 20 bp, Artificial Sequence
  Synthetic oligonucleotide; GAG chr11 5387853 5387872 5387856 -
taaagaagtagggagcaaag

SEQ ID NO: 30354 - DNA, 20 bp, Artificial Sequence
  Synthetic oligonucleotide; AGG chr11 5387852 5387871 5387855 -
aaagaagtagggagcaaagg

SEQ ID NO: 30355 - DNA, 20 bp, Artificial Sequence
  Synthetic oligonucleotide; AAG chr11 5387849 5387868 5387852 -
gaagtagggagcaaaggagg

SEQ ID NO: 30356 - DNA, 20 bp, Artificial Sequence
  Synthetic oligonucleotide; AGG chr11 5387848 5387867 5387851 -
aagtagggagcaaaggagga

SEQ ID NO: 30357 - DNA, 20 bp, Artificial Sequence
  Synthetic oligonucleotide; AAG chr11 5387844 5387863 5387847 -
agggagcaaaggaggaaggt

SEQ ID NO: 30358 - DNA, 20 bp, Artificial Sequence
  Synthetic oligonucleotide; GAG chr11 5387842 5387861 5387845 -
ggagcaaaggaggaaggtaa

SEQ ID NO: 30359 - DNA, 20 bp, Artificial Sequence
  Synthetic oligonucleotide; TAG chr11 5387825 5387844 5387828 -
taagagtgatgcattttata

SEQ ID NO: 30360 - DNA, 20 bp, Artificial Sequence
  Synthetic oligonucleotide; AGG chr11 5387824 5387843 5387827 -
aagagtgatgcattttatat

SEQ ID NO: 30361 - DNA, 20 bp, Artificial Sequence
  Synthetic oligonucleotide; GGG chr11 5387823 5387842 5387826 -
agagtgatgcattttatata

SEQ ID NO: 30362 - DNA, 20 bp, Artificial Sequence
  Synthetic oligonucleotide; TAG chr11 5387820 5387839 5387823 -
gtgatgcattttatataggg

SEQ ID NO: 30363 - DNA, 20 bp, Artificial Sequence
  Synthetic oligonucleotide; CAG chr11 5387816 5387835 5387819 -
tgcattttatatagggtagt

SEQ ID NO: 30364 - DNA, 20 bp, Artificial Sequence
  Synthetic oligonucleotide; GAG chr11 5387814 5387833 5387817 -
cattttatatagggtagtca

SEQ ID NO: 30365 - DNA, 20 bp, Artificial Sequence
  Synthetic oligonucleotide; AAG chr11 5387811 5387830 5387814 -
tttatatagggtagtcagag

SEQ ID NO: 30366 - DNA, 20 bp, Artificial Sequence
  Synthetic oligonucleotide; GAG chr11 5387800 5387819 5387803 -
tagtcagagaagacctctct

SEQ ID NO: 30367 - DNA, 20 bp, Artificial Sequence
  Synthetic oligonucleotide; TAG chr11 5387797 5387816 5387800 -
tcagagaagacctctctgag

SEQ ID NO: 30368 - DNA, 20 bp, Artificial Sequence
  Synthetic oligonucleotide; AGG chr11 5387796 5387815 5387799 -
cagagaagacctctctgagt

SEQ ID NO: 30369 - DNA, 20 bp, Artificial Sequence
  Synthetic oligonucleotide; TAG chr11 5387787 5387806 5387790 -
cctctctgagtaggtaattt

SEQ ID NO: 30370 - DNA, 20 bp, Artificial Sequence
  Synthetic oligonucleotide; GAG chr11 5387785 5387804 5387788 -
tctctgagtaggtaatttta

SEQ ID NO: 30371 - DNA, 20 bp, Artificial Sequence
  Synthetic oligonucleotide; AAG chr11 5387782 5387801 5387785 -
ctgagtaggtaattttagag

SEQ ID NO: 30372 - DNA, 20 bp, Artificial Sequence
  Synthetic oligonucleotide; CAG chr11 5387769 5387788 5387772 -
tttagagaagaaatcaaaat

SEQ ID NO: 30373 - DNA, 20 bp, Artificial Sequence
  Synthetic oligonucleotide; GAG chr11 5387767 5387786 5387770 -
tagagaagaaatcaaaatca

SEQ ID NO: 30374 - DNA, 20 bp, Artificial Sequence
  Synthetic oligonucleotide; AGG chr11 5387766 5387785 5387769 -
agagaagaaatcaaaatcag

SEQ ID NO: 30375 - DNA, 20 bp, Artificial Sequence
  Synthetic oligonucleotide; GGG chr11 5387765 5387784 5387768 -
gagaagaaatcaaaatcaga

SEQ ID NO: 30376 - DNA, 20 bp, Artificial Sequence
  Synthetic oligonucleotide; AAG chr11 5387761 5387780 5387764 -
agaaatcaaaatcagagggc

SEQ ID NO: 30377 - DNA, 20 bp, Artificial Sequence
  Synthetic oligonucleotide; TGG chr11 5387754 5387773 5387757 -
aaaatcagagggcaagtgtg

SEQ ID NO: 30378 - DNA, 20 bp, Artificial Sequence
  Synthetic oligonucleotide; TAG chr11 5387745 5387764 5387748 -
gggcaagtgtgtggctatct

SEQ ID NO: 30379 - DNA, 20 bp, Artificial Sequence
  Synthetic oligonucleotide; AGG chr11 5387744 5387763 5387747 -
ggcaagtgtgtggctatctt

SEQ ID NO: 30380 - DNA, 20 bp, Artificial Sequence
  Synthetic oligonucleotide; GGG chr11 5387743 5387762 5387746 -
gcaagtgtgtggctatctta

SEQ ID NO: 30381 - DNA, 20 bp, Artificial Sequence
  Synthetic oligonucleotide; AAG chr11 5387730 5387749 5387733 -
tatcttagggaaaaacattc

SEQ ID NO: 30382 - DNA, 20 bp, Artificial Sequence
  Synthetic oligonucleotide; AGG chr11 5387729 5387748 5387732 -
atcttagggaaaaacattca

SEQ ID NO: 30383 - DNA, 20 bp, Artificial Sequence
  Synthetic oligonucleotide; AAG chr11 5387726 5387745 5387729 -
ttagggaaaaacattcaagg

SEQ ID NO: 30384 - DNA, 20 bp, Artificial Sequence
  Synthetic oligonucleotide; AGG chr11 5387725 5387744 5387728 -
tagggaaaaacattcaagga

SEQ ID NO: 30385 - DNA, 20 bp, Artificial Sequence
  Synthetic oligonucleotide; GAG chr11 5387723 5387742 5387726 -
gggaaaaacattcaaggaag

SEQ ID NO: 30386 - DNA, 20 bp, Artificial Sequence
  Synthetic oligonucleotide; AGG chr11 5387722 5387741 5387725 -
ggaaaaacattcaaggaagg

SEQ ID NO: 30387 - DNA, 20 bp, Artificial Sequence
  Synthetic oligonucleotide; AAG chr11 5387719 5387738 5387722 -
aaaacattcaaggaaggagg

SEQ ID NO: 30388 - DNA, 20 bp, Artificial Sequence
  Synthetic oligonucleotide; AAG chr11 5387713 5387732 5387716 -
ttcaaggaaggaggaagaac

SEQ ID NO: 30389 - DNA, 20 bp, Artificial Sequence
  Synthetic oligonucleotide; AAG chr11 5387707 5387726 5387710 -
gaaggaggaagaacaagtga

SEQ ID NO: 30390 - DNA, 20 bp, Artificial Sequence
  Synthetic oligonucleotide; AAG chr11 5387698 5387717 5387701 -
agaacaagtgaaagttcctg

SEQ ID NO: 30391 - DNA, 20 bp, Artificial Sequence
  Synthetic oligonucleotide; CAG chr11 5387695 5387714 5387698 -
acaagtgaaagttcctgaag

SEQ ID NO: 30392 - DNA, 20 bp, Artificial Sequence
  Synthetic oligonucleotide; GAG chr11 5387693 5387712 5387696 -
aagtgaaagttcctgaagca

SEQ ID NO: 30393 - DNA, 20 bp, Artificial Sequence
  Synthetic oligonucleotide; GAG chr11 5387691 5387710 5387694 -
gtgaaagttcctgaagcaga

SEQ ID NO: 30394 - DNA, 20 bp, Artificial Sequence
  Synthetic oligonucleotide; CAG chr11 5387688 5387707 5387691 -
aaagttcctgaagcagagag

SEQ ID NO: 30395 - DNA, 20 bp, Artificial Sequence
  Synthetic oligonucleotide; AAG chr11 5387679 5387698 5387682 -
gaagcagagagcagcttgac

SEQ ID NO: 30396 - DNA, 20 bp, Artificial Sequence
  Synthetic oligonucleotide; AAG chr11 5387671 5387690 5387674 -
gagcagcttgacaagtttaa

SEQ ID NO: 30397 - DNA, 20 bp, Artificial Sequence
  Synthetic oligonucleotide; AAG chr11 5387664 5387683 5387667 -
ttgacaagtttaaaagacaa

SEQ ID NO: 30398 - DNA, 20 bp, Artificial Sequence
  Synthetic oligonucleotide; AAG chr11 5387661 5387680 5387664 -
acaagtttaaaagacaaaag

SEQ ID NO: 30399 - DNA, 20 bp, Artificial Sequence
  Synthetic oligonucleotide; AGG chr11 5387660 5387679 5387663 -
caagtttaaaagacaaaaga

SEQ ID NO: 30400 - DNA, 20 bp, Artificial Sequence
  Synthetic oligonucleotide; TGG chr11 5387642 5387661 5387645 -
gaaggccaatgtatattcaa

SEQ ID NO: 30401 - DNA, 20 bp, Artificial Sequence
  Synthetic oligonucleotide; GAG chr11 5387640 5387659 5387643 -
aggccaatgtatattcaatg

SEQ ID NO: 30402 - DNA, 20 bp, Artificial Sequence
  Synthetic oligonucleotide; AGG chr11 5387639 5387658 5387642 -
ggccaatgtatattcaatgg

SEQ ID NO: 30403 - DNA, 20 bp, Artificial Sequence
  Synthetic oligonucleotide; AAG chr11 5387636 5387655 5387639 -
caatgtatattcaatggagg

SEQ ID NO: 30404 - DNA, 20 bp, Artificial Sequence
  Synthetic oligonucleotide; AAG chr11 5387632 5387651 5387635 -
gtatattcaatggaggaagc

SEQ ID NO: 30405 - DNA, 20 bp, Artificial Sequence
  Synthetic oligonucleotide; AGG chr11 5387631 5387650 5387634 -
tatattcaatggaggaagca

SEQ ID NO: 30406 - DNA, 20 bp, Artificial Sequence
  Synthetic oligonucleotide; TGG chr11 5387628 5387647 5387631 -
attcaatggaggaagcaagg

SEQ ID NO: 30407 - DNA, 20 bp, Artificial Sequence
  Synthetic oligonucleotide; GGG chr11 5387627 5387646 5387630 -
ttcaatggaggaagcaaggt

SEQ ID NO: 30408 - DNA, 20 bp, Artificial Sequence
  Synthetic oligonucleotide; GGG chr11 5387626 5387645 5387629 -
tcaatggaggaagcaaggtg

SEQ ID NO: 30409 - DNA, 20 bp, Artificial Sequence
  Synthetic oligonucleotide; TGG chr11 5387621 5387640 5387624 -
ggaggaagcaaggtggggaa

SEQ ID NO: 30410 - DNA, 20 bp, Artificial Sequence
  Synthetic oligonucleotide; TGG chr11 5387618 5387637 5387621 -
ggaagcaaggtggggaatgg

SEQ ID NO: 30411 - DNA, 20 bp, Artificial Sequence
  Synthetic oligonucleotide; AAG chr11 5387603 5387622 5387606 -
aatggtggcaaatccacttg

SEQ ID NO: 30412 - DNA, 20 bp, Artificial Sequence
  Synthetic oligonucleotide; TAG chr11 5387600 5387619 5387603 -
ggtggcaaatccacttgaag

SEQ ID NO: 30413 - DNA, 20 bp, Artificial Sequence
  Synthetic oligonucleotide; CAG chr11 5387597 5387616 5387600 -
ggcaaatccacttgaagtag

SEQ ID NO: 30414 - DNA, 20 bp, Artificial Sequence
  Synthetic oligonucleotide; CAG chr11 5387567 5387586 5387570 -
ctacgtcatgtatgatcttg

SEQ ID NO: 30415 - DNA, 20 bp, Artificial Sequence
  Synthetic oligonucleotide; AGG chr11 5387566 5387585 5387569 -
tacgtcatgtatgatcttgc

SEQ ID NO: 30416 - DNA, 20 bp, Artificial Sequence
  Synthetic oligonucleotide; AAG chr11 5387557 5387576 5387560 -
tatgatcttgcaggtcacgc

SEQ ID NO: 30417 - DNA, 20 bp, Artificial Sequence
  Synthetic oligonucleotide; GAG chr11 5387529 5387548 5387532 -
ttgaattttattatacttgt

SEQ ID NO: 30418 - DNA, 20 bp, Artificial Sequence
  Synthetic oligonucleotide; GAG chr11 5387522 5387541 5387525 -
ttattatacttgtgagcttc

SEQ ID NO: 30419 - DNA, 20 bp, Artificial Sequence
  Synthetic oligonucleotide; GAG chr11 5387517 5387536 5387520 -
atacttgtgagcttcgagtt

SEQ ID NO: 30420 - DNA, 20 bp, Artificial Sequence
  Synthetic oligonucleotide; GAG chr11 5387515 5387534 5387518 -
acttgtgagcttcgagttga

SEQ ID NO: 30421 - DNA, 20 bp, Artificial Sequence
  Synthetic oligonucleotide; CAG chr11 5387512 5387531 5387515 -
tgtgagcttcgagttgagag

SEQ ID NO: 30422 - DNA, 20 bp, Artificial Sequence
  Synthetic oligonucleotide; GAG chr11 5387510 5387529 5387513 -
tgagcttcgagttgagagca

SEQ ID NO: 30423 - DNA, 20 bp, Artificial Sequence
  Synthetic oligonucleotide; AGG chr11 5387509 5387528 5387512 -
gagcttcgagttgagagcag

SEQ ID NO: 30424 - DNA, 20 bp, Artificial Sequence
  Synthetic oligonucleotide; TGG chr11 5387499 5387518 5387502 -
ttgagagcagaggtgctgca

SEQ ID NO: 30425 - DNA, 20 bp, Artificial Sequence
  Synthetic oligonucleotide; AAG chr11 5387492 5387511 5387495 -
cagaggtgctgcatggatat

SEQ ID NO: 30426 - DNA, 20 bp, Artificial Sequence
  Synthetic oligonucleotide; AGG chr11 5387491 5387510 5387494 -
agaggtgctgcatggatata

SEQ ID NO: 30427 - DNA, 20 bp, Artificial Sequence
  Synthetic oligonucleotide; TGG chr11 5387476 5387495 5387479 -
atataaggcttacatcactt

SEQ ID NO: 30428 - DNA, 20 bp, Artificial Sequence
  Synthetic oligonucleotide; AAG chr11 5387472 5387491 5387475 -
aaggcttacatcactttggc

SEQ ID NO: 30429 - DNA, 20 bp, Artificial Sequence
  Synthetic oligonucleotide; AGG chr11 5387471 5387490 5387474 -
aggcttacatcactttggca

SEQ ID NO: 30430 - DNA, 20 bp, Artificial Sequence
  Synthetic oligonucleotide; GGG chr11 5387470 5387489 5387473 -
ggcttacatcactttggcaa

SEQ ID NO: 30431 - DNA, 20 bp, Artificial Sequence
  Synthetic oligonucleotide; GGG chr11 5387469 5387488 5387472 -
gcttacatcactttggcaag

SEQ ID NO: 30432 - DNA, 20 bp, Artificial Sequence
  Synthetic oligonucleotide; TAG chr11 5387459 5387478 5387462 -
ctttggcaaggggtaaaaaa

SEQ ID NO: 30433 - DNA, 20 bp, Artificial Sequence
  Synthetic oligonucleotide; CAG chr11 5387424 5387443 5387427 -
ttttccatttctttacttct

SEQ ID NO: 30434 - DNA, 20 bp, Artificial Sequence
  Synthetic oligonucleotide; TAG chr11 5387374 5387393 5387377 -
tgttttttttaaaacccact

SEQ ID NO: 30435 - DNA, 20 bp, Artificial Sequence
  Synthetic oligonucleotide; AAG chr11 5387368 5387387 5387371 -
ttttaaaacccacttagcta

SEQ ID NO: 30436 - DNA, 20 bp, Artificial Sequence
  Synthetic oligonucleotide; CAG chr11 5387346 5387365 5387349 -
gcaatgctccttaaattcac

SEQ ID NO: 30437 - DNA, 20 bp, Artificial Sequence
  Synthetic oligonucleotide; TAG chr11 5387336 5387355 5387339 -
ttaaattcaccagtgacttc

SEQ ID NO: 30438 - DNA, 20 bp, Artificial Sequence
  Synthetic oligonucleotide; AGG chr11 5387335 5387354 5387338 -
taaattcaccagtgacttct

SEQ ID NO: 30439 - DNA, 20 bp, Artificial Sequence
  Synthetic oligonucleotide; GGG chr11 5387334 5387353 5387337 -
aaattcaccagtgacttcta

SEQ ID NO: 30440 - DNA, 20 bp, Artificial Sequence
  Synthetic oligonucleotide; GGG chr11 5387333 5387352 5387336 -
aattcaccagtgacttctag

SEQ ID NO: 30441 - DNA, 20 bp, Artificial Sequence
  Synthetic oligonucleotide; TGG chr11 5387320 5387339 5387323 -
cttctaggggccaaatgcaa

SEQ ID NO: 30442 - DNA, 20 bp, Artificial Sequence
  Synthetic oligonucleotide; GAG chr11 5387318 5387337 5387321 -
tctaggggccaaatgcaatg

SEQ ID NO: 30443 - DNA, 20 bp, Artificial Sequence
  Synthetic oligonucleotide; GAG chr11 5387316 5387335 5387319 -
taggggccaaatgcaatgga

SEQ ID NO: 30444 - DNA, 20 bp, Artificial Sequence
  Synthetic oligonucleotide; TAG chr11 5387275 5387294 5387278 -
ttattgatttttttgtgcaa

SEQ ID NO: 30445 - DNA, 20 bp, Artificial Sequence
  Synthetic oligonucleotide; TGG chr11 5387262 5387281 5387265 -
tgtgcaatagttgtgtgctc

SEQ ID NO: 30446 - DNA, 20 bp, Artificial Sequence
  Synthetic oligonucleotide; TAG chr11 5387244 5387263 5387247 -
tctggccatgccttcctttt

SEQ ID NO: 30447 - DNA, 20 bp, Artificial Sequence
  Synthetic oligonucleotide; GAG chr11 5387242 5387261 5387245 -
tggccatgccttccttttta

SEQ ID NO: 30448 - DNA, 20 bp, Artificial Sequence
  Synthetic oligonucleotide; TAG chr11 5387232 5387251 5387235 -
ttcctttttagagctctctc

SEQ ID NO: 30449 - DNA, 20 bp, Artificial Sequence
  Synthetic oligonucleotide; AAG chr11 5387215 5387234 5387218 -
ctctagaaattcttaatgcc

SEQ ID NO: 30450 - DNA, 20 bp, Artificial Sequence
  Synthetic oligonucleotide; TGG chr11 5387206 5387225 5387209 -
ttcttaatgccaagatctgc

SEQ ID NO: 30451 - DNA, 20 bp, Artificial Sequence
  Synthetic oligonucleotide; TAG chr11 5387183 5387202 5387186 -
ttctcttctgatttttgtga

SEQ ID NO: 30452 - DNA, 20 bp, Artificial Sequence
  Synthetic oligonucleotide; CAG chr11 5387134 5387153 5387137 -
gctcaaatatttatgttatt

SEQ ID NO: 30453 - DNA, 20 bp, Artificial Sequence
  Synthetic oligonucleotide; CAG chr11 5387067 5387086 5387070 -
tattattattattacttata

SEQ ID NO: 30454 - DNA, 20 bp, Artificial Sequence
  Synthetic oligonucleotide; TGG chr11 5387064 5387083 5387067 -
tattattattacttatacag

SEQ ID NO: 30455 - DNA, 20 bp, Artificial Sequence
  Synthetic oligonucleotide; TGG chr11 5387061 5387080 5387064 -
tattattacttatacagtgg

SEQ ID NO: 30456 - DNA, 20 bp, Artificial Sequence
  Synthetic oligonucleotide; TAG chr11 5387054 5387073 5387057 -
acttatacagtggtggctct

SEQ ID NO: 30457 - DNA, 20 bp, Artificial Sequence
  Synthetic oligonucleotide; TAG chr11 5387040 5387059 5387043 -
ggctcttagacattaatctc

SEQ ID NO: 30458 - DNA, 20 bp, Artificial Sequence
  Synthetic oligonucleotide; CAG chr11 5387035 5387054 5387038 -
ttagacattaatctctagtc

SEQ ID NO: 30459 - DNA, 20 bp, Artificial Sequence
  Synthetic oligonucleotide; CAG chr11 5387015 5387034 5387018 -
cagataactccgttacatat

SEQ ID NO: 30460 - DNA, 20 bp, Artificial Sequence
  Synthetic oligonucleotide; AGG chr11 5387014 5387033 5387017 -
agataactccgttacatatc

SEQ ID NO: 30461 - DNA, 20 bp, Artificial Sequence
  Synthetic oligonucleotide; GAG chr11 5387008 5387027 5387011 -
ctccgttacatatcaggcct

SEQ ID NO: 30462 - DNA, 20 bp, Artificial Sequence
  Synthetic oligonucleotide; TAG chr11 5386990 5387009 5386993 -
ctgagtttctgccttctcac

SEQ ID NO: 30463 - DNA, 20 bp, Artificial Sequence
  Synthetic oligonucleotide; AGG chr11 5386989 5387008 5386992 -
tgagtttctgccttctcact

SEQ ID NO: 30464 - DNA, 20 bp, Artificial Sequence
  Synthetic oligonucleotide; AAG chr11 5386977 5386996 5386980 -
ttctcactaggtgtttccaa

SEQ ID NO: 30465 - DNA, 20 bp, Artificial Sequence
  Synthetic oligonucleotide; AGG chr11 5386976 5386995 5386979 -
tctcactaggtgtttccaaa

SEQ ID NO: 30466 - DNA, 20 bp, Artificial Sequence
  Synthetic oligonucleotide; GAG chr11 5386943 5386962 5386946 -
aactcaacacgtctaatatt

SEQ ID NO: 30467 - DNA, 20 bp, Artificial Sequence
  Synthetic oligonucleotide; CAG chr11 5386938 5386957 5386941 -
aacacgtctaatattgagcc

SEQ ID NO: 30468 - DNA, 20 bp, Artificial Sequence
  Synthetic oligonucleotide; AAG chr11 5386860 5386879 5386863 -
ttcaccatttcctgccattc

SEQ ID NO: 30469 - DNA, 20 bp, Artificial Sequence
  Synthetic oligonucleotide; GAG chr11 5386846 5386865 5386849 -
ccattcaagacaacattttt

SEQ ID NO: 30470 - DNA, 20 bp, Artificial Sequence
  Synthetic oligonucleotide; AAG chr11 5386794 5386813 5386797 -
tctgtatctaatttttaact

SEQ ID NO: 30471 - DNA, 20 bp, Artificial Sequence
  Synthetic oligonucleotide; TAG chr11 5386749 5386768 5386752 -
tctattcatcttcatctctg

SEQ ID NO: 30472 - DNA, 20 bp, Artificial Sequence
  Synthetic oligonucleotide; TAG chr11 5386730 5386749 5386733 -
gtagccaatgtccttgttct

SEQ ID NO: 30473 - DNA, 20 bp, Artificial Sequence
  Synthetic oligonucleotide; AAG chr11 5386686 5386705 5386689 -
gacctgtcattcaacatgca

SEQ ID NO: 30474 - DNA, 20 bp, Artificial Sequence
  Synthetic oligonucleotide; CAG chr11 5386682 5386701 5386685 -
tgtcattcaacatgcaaagc

SEQ ID NO: 30475 - DNA, 20 bp, Artificial Sequence
  Synthetic oligonucleotide; AGG chr11 5386681 5386700 5386684 -
gtcattcaacatgcaaagcc

SEQ ID NO: 30476 - DNA, 20 bp, Artificial Sequence
  Synthetic oligonucleotide; TGG chr11 5386665 5386684 5386668 -
agccaggctcctccttccct

SEQ ID NO: 30477 - DNA, 20 bp, Artificial Sequence
  Synthetic oligonucleotide; CAG chr11 5386648 5386667 5386651 -
ccttggtccatcctctactg

SEQ ID NO: 30478 - DNA, 20 bp, Artificial Sequence
  Synthetic oligonucleotide; GAG chr11 5386640 5386659 5386643 -
catcctctactgcagccacc

SEQ ID NO: 30479 - DNA, 20 bp, Artificial Sequence
  Synthetic oligonucleotide; CAG chr11 5386631 5386650 5386634 -
ctgcagccaccgagattatg

SEQ ID NO: 30480 - DNA, 20 bp, Artificial Sequence
  Synthetic oligonucleotide; AAG chr11 5386627 5386646 5386630 -
agccaccgagattatgcaga

SEQ ID NO: 30481 - DNA, 20 bp, Artificial Sequence
  Synthetic oligonucleotide; CAG chr11 5386594 5386613 5386597 -
atgaatcactgcactgtttt

SEQ ID NO: 30482 - DNA, 20 bp, Artificial Sequence
  Synthetic oligonucleotide; CAG chr11 5386586 5386605 5386589 -
ctgcactgttttcagtactt

SEQ ID NO: 30483 - DNA, 20 bp, Artificial Sequence
  Synthetic oligonucleotide; TAG chr11 5386583 5386602 5386586 -
cactgttttcagtacttcag

SEQ ID NO: 30484 - DNA, 20 bp, Artificial Sequence
  Synthetic oligonucleotide; TAG chr11 5386570 5386589 5386573 -
acttcagtagctcctatcat

SEQ ID NO: 30485 - DNA, 20 bp, Artificial Sequence
  Synthetic oligonucleotide; AAG chr11 5386563 5386582 5386566 -
tagctcctatcattagaata

SEQ ID NO: 30486 - DNA, 20 bp, Artificial Sequence
  Synthetic oligonucleotide; AAG chr11 5386547 5386566 5386550 -
aataaagttcaaacttgtaa

SEQ ID NO: 30487 - DNA, 20 bp, Artificial Sequence
  Synthetic oligonucleotide; TGG chr11 5386539 5386558 5386542 -
tcaaacttgtaaaagatctg

SEQ ID NO: 30488 - DNA, 20 bp, Artificial Sequence
  Synthetic oligonucleotide; TAG chr11 5386533 5386552 5386536 -
ttgtaaaagatctgtggtga

SEQ ID NO: 30489 - DNA, 20 bp, Artificial Sequence
  Synthetic oligonucleotide; GAG chr11 5386519 5386538 5386522 -
tggtgatagtccaatttatt

SEQ ID NO: 30490 - DNA, 20 bp, Artificial Sequence
  Synthetic oligonucleotide; AGG chr11 5386518 5386537 5386521 -
ggtgatagtccaatttattg

SEQ ID NO: 30491 - DNA, 20 bp, Artificial Sequence
  Synthetic oligonucleotide; TAG chr11 5386503 5386522 5386506 -
tattgaggccatacatgatt

SEQ ID NO: 30492 - DNA, 20 bp, Artificial Sequence
  Synthetic oligonucleotide; AAG chr11 5386490 5386509 5386493 -
catgatttagatgctgtgaa

SEQ ID NO: 30493 - DNA, 20 bp, Artificial Sequence
  Synthetic oligonucleotide; AAG chr11 5386431 5386450 5386434 -
acattttattactacttcac

SEQ ID NO: 30494 - DNA, 20 bp, Artificial Sequence
  Synthetic oligonucleotide; AGG chr11 5386430 5386449 5386433 -
cattttattactacttcaca

SEQ ID NO: 30495 - DNA, 20 bp, Artificial Sequence
  Synthetic oligonucleotide; GAG chr11 5386428 5386447 5386431 -
ttttattactacttcacaag

SEQ ID NO: 30496 - DNA, 20 bp, Artificial Sequence
  Synthetic oligonucleotide; AAG chr11 5386414 5386433 5386417 -
cacaaggagaaaactacaaa

SEQ ID NO: 30497 - DNA, 20 bp, Artificial Sequence
  Synthetic oligonucleotide; AGG chr11 5386413 5386432 5386416 -
acaaggagaaaactacaaaa

SEQ ID NO: 30498 - DNA, 20 bp, Artificial Sequence
  Synthetic oligonucleotide; AAG chr11 5386396 5386415 5386399 -
aaaaggtaaacaatcatccc

SEQ ID NO: 30499 - DNA, 20 bp, Artificial Sequence
  Synthetic oligonucleotide; AGG chr11 5386395 5386414 5386398 -
aaaggtaaacaatcatccca

SEQ ID NO: 30500 - DNA, 20 bp, Artificial Sequence
  Synthetic oligonucleotide; TGG chr11 5386390 5386409 5386393 -
taaacaatcatcccaaggcc

SEQ ID NO: 30501 - DNA, 20 bp, Artificial Sequence
  Synthetic oligonucleotide; TAG chr11 5386387 5386406 5386390 -
acaatcatcccaaggcctgg

SEQ ID NO: 30502 - DNA, 20 bp, Artificial Sequence
  Synthetic oligonucleotide; GAG chr11 5386383 5386402 5386386 -
tcatcccaaggcctggtagt

SEQ ID NO: 30503 - DNA, 20 bp, Artificial Sequence
  Synthetic oligonucleotide; CAG chr11 5386373 5386392 5386376 -
gcctggtagtgagcgaaaat

SEQ ID NO: 30504 - DNA, 20 bp, Artificial Sequence
  Synthetic oligonucleotide; AGG chr11 5386372 5386391 5386375 -
cctggtagtgagcgaaaatc

SEQ ID NO: 30505 - DNA, 20 bp, Artificial Sequence
  Synthetic oligonucleotide; AAG chr11 5386367 5386386 5386370 -
tagtgagcgaaaatcaggat

SEQ ID NO: 30506 - DNA, 20 bp, Artificial Sequence
  Synthetic oligonucleotide; TGG chr11 5386339 5386358 5386342 -
aacctttgtctctctatgca

SEQ ID NO: 30507 - DNA, 20 bp, Artificial Sequence
  Synthetic oligonucleotide; TGG chr11 5386333 5386352 5386336 -
tgtctctctatgcatggccc

SEQ ID NO: 30508 - DNA, 20 bp, Artificial Sequence
  Synthetic oligonucleotide; TAG chr11 5386330 5386349 5386333 -
ctctctatgcatggccctgg

SEQ ID NO: 30509 - DNA, 20 bp, Artificial Sequence
  Synthetic oligonucleotide; TAG chr11 5386301 5386320 5386304 -
acaccctgtaacaccatctt

SEQ ID NO: 30510 - DNA, 20 bp, Artificial Sequence
  Synthetic oligonucleotide; CGG chr11 5386296 5386315 5386299 -
ctgtaacaccatctttagcc

SEQ ID NO: 30511 - DNA, 20 bp, Artificial Sequence
  Synthetic oligonucleotide; TGG chr11 5386281 5386300 5386284 -
tagcccggtccttcttgttt

SEQ ID NO: 30512 - DNA, 20 bp, Artificial Sequence
  Synthetic oligonucleotide; CAG chr11 5386254 5386273 5386257 -
tttccaaacccatcttttcc

SEQ ID NO: 30513 - DNA, 20 bp, Artificial Sequence
  Synthetic oligonucleotide; TGG chr11 5386170 5386189 5386173 -
ttctatatttattgctttct

SEQ ID NO: 30514 - DNA, 20 bp, Artificial Sequence
  Synthetic oligonucleotide; CAG chr11 5386142 5386161 5386145 -
accacccctgtttttccaac

SEQ ID NO: 30515 - DNA, 20 bp, Artificial Sequence
  Synthetic oligonucleotide; CGG chr11 5386129 5386148 5386132 -
ttccaaccagtaaacacttg

SEQ ID NO: 30516 - DNA, 20 bp, Artificial Sequence
  Synthetic oligonucleotide; AAG chr11 5386119 5386138 5386122 -
taaacacttgcggatccttt

SEQ ID NO: 30517 - DNA, 20 bp, Artificial Sequence
  Synthetic oligonucleotide; TAG chr11 5386113 5386132 5386116 -
cttgcggatcctttaagact

SEQ ID NO: 30518 - DNA, 20 bp, Artificial Sequence
  Synthetic oligonucleotide; TAG chr11 5386065 5386084 5386068 -
tctctcctgacttccttctg

SEQ ID NO: 30519 - DNA, 20 bp, Artificial Sequence
  Synthetic oligonucleotide; TAG chr11 5386059 5386078 5386062 -
ctgacttccttctgtagcat

SEQ ID NO: 30520 - DNA, 20 bp, Artificial Sequence
  Synthetic oligonucleotide; AGG chr11 5386058 5386077 5386061 -
tgacttccttctgtagcatt

SEQ ID NO: 30521 - DNA, 20 bp, Artificial Sequence
  Synthetic oligonucleotide; TAG chr11 5386033 5386052 5386036 -
catctttctctgttctcacg

SEQ ID NO: 30522 - DNA, 20 bp, Artificial Sequence
  Synthetic oligonucleotide; AAG chr11 5386012 5386031 5386015 -
agtacctgtaatgtactatt

SEQ ID NO: 30523 - DNA, 20 bp, Artificial Sequence
  Synthetic oligonucleotide; AGG chr11 5386011 5386030 5386014 -
gtacctgtaatgtactatta

SEQ ID NO: 30524 - DNA, 20 bp, Artificial Sequence
  Synthetic oligonucleotide; TAG chr11 5385947 5385966 5385950 -
tatacttattgatatatata

SEQ ID NO: 30525 - DNA, 20 bp, Artificial Sequence
  Synthetic oligonucleotide; AAG chr11 5385923 5385942 5385926 -
acatacttatacatccatat

SEQ ID NO: 30526 - DNA, 20 bp, Artificial Sequence
  Synthetic oligonucleotide; AAG chr11 5385907 5385926 5385910 -
atataagtacacatatgtat

SEQ ID NO: 30527 - DNA, 20 bp, Artificial Sequence
  Synthetic oligonucleotide; AAG chr11 5385890 5385909 5385893 -
tataagtttaaataacatat

SEQ ID NO: 30528 - DNA, 20 bp, Artificial Sequence
  Synthetic oligonucleotide; TAG chr11 5385883 5385902 5385886 -
ttaaataacatataagtgta

SEQ ID NO: 30529 - DNA, 20 bp, Artificial Sequence
  Synthetic oligonucleotide; TAG chr11 5385860 5385879 5385863 -
atttactcataaatacttta

SEQ ID NO: 30530 - DNA, 20 bp, Artificial Sequence
  Synthetic oligonucleotide; TAG chr11 5385846 5385865 5385849 -
actttatagaatatacattt

SEQ ID NO: 30531 - DNA, 20 bp, Artificial Sequence
  Synthetic oligonucleotide; TAG chr11 5385812 5385831 5385815 -
tatattctttatatacttta

SEQ ID NO: 30532 - DNA, 20 bp, Artificial Sequence
  Synthetic oligonucleotide; AAG chr11 5385796 5385815 5385799 -
tttatagattttttatatat

SEQ ID NO: 30533 - DNA, 20 bp, Artificial Sequence
  Synthetic oligonucleotide; TAG chr11 5385791 5385810 5385794 -
agattttttatatataagta

SEQ ID NO: 30534 - DNA, 20 bp, Artificial Sequence
  Synthetic oligonucleotide; AGG chr11 5385790 5385809 5385793 -
gattttttatatataagtat

SEQ ID NO: 30535 - DNA, 20 bp, Artificial Sequence
  Synthetic oligonucleotide; GGG chr11 5385789 5385808 5385792 -
attttttatatataagtata

SEQ ID NO: 30536 - DNA, 20 bp, Artificial Sequence
  Synthetic oligonucleotide; TAG chr11 5385733 5385752 5385736 -
aaacaaatatacaaaaatat

SEQ ID NO: 30537 - DNA, 20 bp, Artificial Sequence
  Synthetic oligonucleotide; TAG chr11 5385688 5385707 5385691 -
tttgtacaacatatatatta

SEQ ID NO: 30538 - DNA, 20 bp, Artificial Sequence
  Synthetic oligonucleotide; AGG chr11 5385687 5385706 5385690 -
ttgtacaacatatatattat

SEQ ID NO: 30539 - DNA, 20 bp, Artificial Sequence
  Synthetic oligonucleotide; TAG chr11 5385684 5385703 5385687 -
tacaacatatatattatagg

SEQ ID NO: 30540 - DNA, 20 bp, Artificial Sequence
  Synthetic oligonucleotide; TAG chr11 5385651 5385670 5385654 -
tattctttattatacatgtt

SEQ ID NO: 30541 - DNA, 20 bp, Artificial Sequence
  Synthetic oligonucleotide; TGG chr11 5385633 5385652 5385636 -
tttagaacataaatttatat

SEQ ID NO: 30542 - DNA, 20 bp, Artificial Sequence
  Synthetic oligonucleotide; AAG chr11 5385585 5385604 5385588 -
aacctaataattcatttttt

SEQ ID NO: 30543 - DNA, 20 bp, Artificial Sequence
  Synthetic oligonucleotide; TAG chr11 5385577 5385596 5385580 -
aattcattttttaagttgat

SEQ ID NO: 30544 - DNA, 20 bp, Artificial Sequence
  Synthetic oligonucleotide; TGG chr11 5385572 5385591 5385575 -
attttttaagttgattagac

SEQ ID NO: 30545 - DNA, 20 bp, Artificial Sequence
  Synthetic oligonucleotide; AAG chr11 5385560 5385579 5385563 -
gattagactggaattctcta

SEQ ID NO: 30546 - DNA, 20 bp, Artificial Sequence
  Synthetic oligonucleotide; AGG chr11 5385559 5385578 5385562 -
attagactggaattctctaa

SEQ ID NO: 30547 - DNA, 20 bp, Artificial Sequence
  Synthetic oligonucleotide; TGG chr11 5385552 5385571 5385555 -
tggaattctctaaaggcccc

SEQ ID NO: 30548 - DNA, 20 bp, Artificial Sequence
  Synthetic oligonucleotide; GAG chr11 5385550 5385569 5385553 -
gaattctctaaaggcccctg

SEQ ID NO: 30549 - DNA, 20 bp, Artificial Sequence
  Synthetic oligonucleotide; CAG chr11 5385542 5385561 5385545 -
taaaggcccctggagcctga

SEQ ID NO: 30550 - DNA, 20 bp, Artificial Sequence
  Synthetic oligonucleotide; AAG chr11 5385534 5385553 5385537 -
cctggagcctgacagtgtct

SEQ ID NO: 30551 - DNA, 20 bp, Artificial Sequence
  Synthetic oligonucleotide; TGG chr11 5385528 5385547 5385531 -
gcctgacagtgtctaagatg

SEQ ID NO: 30552 - DNA, 20 bp, Artificial Sequence
  Synthetic oligonucleotide; TAG chr11 5385525 5385544 5385528 -
tgacagtgtctaagatgtgg

SEQ ID NO: 30553 - DNA, 20 bp, Artificial Sequence
  Synthetic oligonucleotide; AGG chr11 5385524 5385543 5385527 -
gacagtgtctaagatgtggt

SEQ ID NO: 30554 - DNA, 20 bp, Artificial Sequence
  Synthetic oligonucleotide; TGG chr11 5385483 5385502 5385486 -
tttttgcatgaaaaactaaa

SEQ ID NO: 30555 - DNA, 20 bp, Artificial Sequence
  Synthetic oligonucleotide; GGG chr11 5385482 5385501 5385485 -
ttttgcatgaaaaactaaat

SEQ ID NO: 30556 - DNA, 20 bp, Artificial Sequence
  Synthetic oligonucleotide; AAG chr11 5385469 5385488 5385472 -
actaaatgggtgaataaata

SEQ ID NO: 30557 - DNA, 20 bp, Artificial Sequence
  Synthetic oligonucleotide; TGG chr11 5385436 5385455 5385439 -
ttatcctgattctttgtgcc

SEQ ID NO: 30558 - DNA, 20 bp, Artificial Sequence
  Synthetic oligonucleotide; GGG chr11 5385435 5385454 5385438 -
tatcctgattctttgtgcct

SEQ ID NO: 30559 - DNA, 20 bp, Artificial Sequence
  Synthetic oligonucleotide; GGG chr11 5385434 5385453 5385437 -
atcctgattctttgtgcctg

SEQ ID NO: 30560 - DNA, 20 bp, Artificial Sequence
  Synthetic oligonucleotide; CAG chr11 5385422 5385441 5385425 -
tgtgcctggggttctgttgt

SEQ ID NO: 30561 - DNA, 20 bp, Artificial Sequence
  Synthetic oligonucleotide; CAG chr11 5385401 5385420 5385404 -
agctctgtgttcaccaactt

SEQ ID NO: 30562 - DNA, 20 bp, Artificial Sequence
  Synthetic oligonucleotide; GAG chr11 5385399 5385418 5385402 -
ctctgtgttcaccaacttca

SEQ ID NO: 30563 - DNA, 20 bp, Artificial Sequence
  Synthetic oligonucleotide; GAG chr11 5385392 5385411 5385395 -
ttcaccaacttcagagtgat

SEQ ID NO: 30564 - DNA, 20 bp, Artificial Sequence
  Synthetic oligonucleotide; TGG chr11 5385388 5385407 5385391 -
ccaacttcagagtgatgaga

SEQ ID NO: 30565 - DNA, 20 bp, Artificial Sequence
  Synthetic oligonucleotide; CAG chr11 5385384 5385403 5385387 -
cttcagagtgatgagatgga

SEQ ID NO: 30566 - DNA, 20 bp, Artificial Sequence
  Synthetic oligonucleotide; AGG chr11 5385383 5385402 5385386 -
ttcagagtgatgagatggac

SEQ ID NO: 30567 - DNA, 20 bp, Artificial Sequence
  Synthetic oligonucleotide; GGG chr11 5385382 5385401 5385385 -
tcagagtgatgagatggaca

SEQ ID NO: 30568 - DNA, 20 bp, Artificial Sequence
  Synthetic oligonucleotide; GAG chr11 5385380 5385399 5385383 -
agagtgatgagatggacagg

SEQ ID NO: 30569 - DNA, 20 bp, Artificial Sequence
  Synthetic oligonucleotide; AAG chr11 5385377 5385396 5385380 -
gtgatgagatggacagggag

SEQ ID NO: 30570 - DNA, 20 bp, Artificial Sequence
  Synthetic oligonucleotide; AGG chr11 5385376 5385395 5385379 -
tgatgagatggacagggaga

SEQ ID NO: 30571 - DNA, 20 bp, Artificial Sequence
  Synthetic oligonucleotide; TGG chr11 5385370 5385389 5385373 -
gatggacagggagaaggatc

SEQ ID NO: 30572 - DNA, 20 bp, Artificial Sequence
  Synthetic oligonucleotide; TAG chr11 5385367 5385386 5385370 -
ggacagggagaaggatctgg

SEQ ID NO: 30573 - DNA, 20 bp, Artificial Sequence
  Synthetic oligonucleotide; AAG chr11 5385360 5385379 5385363 -
gagaaggatctggtagaaac

SEQ ID NO: 30574 - DNA, 20 bp, Artificial Sequence
  Synthetic oligonucleotide; CAG chr11 5385348 5385367 5385351 -
gtagaaacaagatgtctata

SEQ ID NO: 30575 - DNA, 20 bp, Artificial Sequence
  Synthetic oligonucleotide; GAG chr11 5385346 5385365 5385349 -
agaaacaagatgtctataca

SEQ ID NO: 30576 - DNA, 20 bp, Artificial Sequence
  Synthetic oligonucleotide; CAG chr11 5385336 5385355 5385339 -
tgtctatacagagacaatga

SEQ ID NO: 30577 - DNA, 20 bp, Artificial Sequence
  Synthetic oligonucleotide; AGG chr11 5385335 5385354 5385338 -
gtctatacagagacaatgac

SEQ ID NO: 30578 - DNA, 20 bp, Artificial Sequence
  Synthetic oligonucleotide; GGG chr11 5385334 5385353 5385337 -
tctatacagagacaatgaca

SEQ ID NO: 30579 - DNA, 20 bp, Artificial Sequence
  Synthetic oligonucleotide; TGG chr11 5385330 5385349 5385333 -
tacagagacaatgacagggc

SEQ ID NO: 30580 - DNA, 20 bp, Artificial Sequence
  Synthetic oligonucleotide; GGG chr11 5385329 5385348 5385332 -
acagagacaatgacagggct

SEQ ID NO: 30581 - DNA, 20 bp, Artificial Sequence
  Synthetic oligonucleotide; TGG chr11 5385315 5385334 5385318 -
agggctgggattatttctct

SEQ ID NO: 30582 - DNA, 20 bp, Artificial Sequence
  Synthetic oligonucleotide; AAG chr11 5385311 5385330 5385314 -
ctgggattatttctcttgga

SEQ ID NO: 30583 - DNA, 20 bp, Artificial Sequence
  Synthetic oligonucleotide; TGG chr11 5385296 5385315 5385299 -
ttggaaagtatacttcctct

SEQ ID NO: 30584 - DNA, 20 bp, Artificial Sequence
  Synthetic oligonucleotide; GGG chr11 5385295 5385314 5385298 -
tggaaagtatacttcctctt

SEQ ID NO: 30585 - DNA, 20 bp, Artificial Sequence
  Synthetic oligonucleotide; AAG chr11 5385292 5385311 5385295 -
aaagtatacttcctcttggg

SEQ ID NO: 30586 - DNA, 20 bp, Artificial Sequence
  Synthetic oligonucleotide; AAG chr11 5385288 5385307 5385291 -
tatacttcctcttgggaaga

SEQ ID NO: 30587 - DNA, 20 bp, Artificial Sequence
  Synthetic oligonucleotide; TAG chr11 5385282 5385301 5385285 -
tcctcttgggaagaaagctt

SEQ ID NO: 30588 - DNA, 20 bp, Artificial Sequence
  Synthetic oligonucleotide; AGG chr11 5385281 5385300 5385284 -
cctcttgggaagaaagcttt

SEQ ID NO: 30589 - DNA, 20 bp, Artificial Sequence
  Synthetic oligonucleotide; GGG chr11 5385280 5385299 5385283 -
ctcttgggaagaaagcttta

SEQ ID NO: 30590 - DNA, 20 bp, Artificial Sequence
  Synthetic oligonucleotide; GGG chr11 5385279 5385298 5385282 -
tcttgggaagaaagctttag

SEQ ID NO: 30591 - DNA, 20 bp, Artificial Sequence
  Synthetic oligonucleotide; TAG chr11 5385268 5385287 5385271 -
aagctttaggggatttctcc

SEQ ID NO: 30592 - DNA, 20 bp, Artificial Sequence
  Synthetic oligonucleotide; AAG chr11 5385264 5385283 5385267 -
tttaggggatttctcctagc

SEQ ID NO: 30593 - DNA, 20 bp, Artificial Sequence
  Synthetic oligonucleotide; GAG chr11 5385262 5385281 5385265 -
taggggatttctcctagcaa

SEQ ID NO: 30594 - DNA, 20 bp, Artificial Sequence
  Synthetic oligonucleotide; GAG chr11 5385260 5385279 5385263 -
ggggatttctcctagcaaga

SEQ ID NO: 30595 - DNA, 20 bp, Artificial Sequence
  Synthetic oligonucleotide; TAG chr11 5385243 5385262 5385246 -
agagagataattatccatga

SEQ ID NO: 30596 - DNA, 20 bp, Artificial Sequence
  Synthetic oligonucleotide; AGG chr11 5385242 5385261 5385245 -
gagagataattatccatgat

SEQ ID NO: 30597 - DNA, 20 bp, Artificial Sequence
  Synthetic oligonucleotide; GAG chr11 5385240 5385259 5385243 -
gagataattatccatgatag

SEQ ID NO: 30598 - DNA, 20 bp, Artificial Sequence
  Synthetic oligonucleotide; GAG chr11 5385238 5385257 5385241 -
gataattatccatgatagga

SEQ ID NO: 30599 - DNA, 20 bp, Artificial Sequence
  Synthetic oligonucleotide; CAG chr11 5385232 5385251 5385235 -
tatccatgataggagagcaa

SEQ ID NO: 30600 - DNA, 20 bp, Artificial Sequence
  Synthetic oligonucleotide; AAG chr11 5385210 5385229 5385213 -
gtcattttttcatgtctact

SEQ ID NO: 30601 - DNA, 20 bp, Artificial Sequence
  Synthetic oligonucleotide; TGG chr11 5385204 5385223 5385207 -
ttttcatgtctactaagcaa

SEQ ID NO: 30602 - DNA, 20 bp, Artificial Sequence
  Synthetic oligonucleotide; GAG chr11 5385202 5385221 5385205 -
ttcatgtctactaagcaatg

SEQ ID NO: 30603 - DNA, 20 bp, Artificial Sequence
  Synthetic oligonucleotide; AGG chr11 5385201 5385220 5385204 -
tcatgtctactaagcaatgg

SEQ ID NO: 30604 - DNA, 20 bp, Artificial Sequence
  Synthetic oligonucleotide; GAG chr11 5385199 5385218 5385202 -
atgtctactaagcaatggag

SEQ ID NO: 30605 - DNA, 20 bp, Artificial Sequence
  Synthetic oligonucleotide; CAG chr11 5385190 5385209 5385193 -
aagcaatggaggagtccact

SEQ ID NO: 30606 - DNA, 20 bp, Artificial Sequence
  Synthetic oligonucleotide; GAG chr11 5385188 5385207 5385191 -
gcaatggaggagtccactca

SEQ ID NO: 30607 - DNA, 20 bp, Artificial Sequence
  Synthetic oligonucleotide; CAG chr11 5385185 5385204 5385188 -
atggaggagtccactcagag

SEQ ID NO: 30608 - DNA, 20 bp, Artificial Sequence
  Synthetic oligonucleotide; CAG chr11 5385181 5385200 5385184 -
aggagtccactcagagcagt

SEQ ID NO: 30609 - DNA, 20 bp, Artificial Sequence
  Synthetic oligonucleotide; AAG chr11 5385146 5385165 5385149 -
acaacataattaaaatattc

SEQ ID NO: 30610 - DNA, 20 bp, Artificial Sequence
  Synthetic oligonucleotide; AGG chr11 5385145 5385164 5385148 -
caacataattaaaatattca

SEQ ID NO: 30611 - DNA, 20 bp, Artificial Sequence
  Synthetic oligonucleotide; CAG chr11 5385142 5385161 5385145 -
cataattaaaatattcaagg

SEQ ID NO: 30612 - DNA, 20 bp, Artificial Sequence
  Synthetic oligonucleotide; GAG chr11 5385140 5385159 5385143 -
taattaaaatattcaaggca

SEQ ID NO: 30613 - DNA, 20 bp, Artificial Sequence
  Synthetic oligonucleotide; TAG chr11 5385137 5385156 5385140 -
ttaaaatattcaaggcagag

SEQ ID NO: 30614 - DNA, 20 bp, Artificial Sequence
  Synthetic oligonucleotide; TAG chr11 5385126 5385145 5385129 -
aaggcagagtagattcatct

SEQ ID NO: 30615 - DNA, 20 bp, Artificial Sequence
  Synthetic oligonucleotide; CAG chr11 5385119 5385138 5385122 -
agtagattcatcttagatca

SEQ ID NO: 30616 - DNA, 20 bp, Artificial Sequence
  Synthetic oligonucleotide; AGG chr11 5385118 5385137 5385121 -
gtagattcatcttagatcac

SEQ ID NO: 30617 - DNA, 20 bp, Artificial Sequence
  Synthetic oligonucleotide; GAG chr11 5385116 5385135 5385119 -
agattcatcttagatcacag

SEQ ID NO: 30618 - DNA, 20 bp, Artificial Sequence
  Synthetic oligonucleotide; AAG chr11 5385101 5385120 5385104 -
cacaggagaaaattcctgaa

SEQ ID NO: 30619 - DNA, 20 bp, Artificial Sequence
  Synthetic oligonucleotide; GAG chr11 5385099 5385118 5385102 -
caggagaaaattcctgaaaa

SEQ ID NO: 30620 - DNA, 20 bp, Artificial Sequence
  Synthetic oligonucleotide; CAG chr11 5385091 5385110 5385094 -
aattcctgaaaagagatttt

SEQ ID NO: 30621 - DNA, 20 bp, Artificial Sequence
  Synthetic oligonucleotide; GAG chr11 5385080 5385099 5385083 -
agagattttcagtatacaat

SEQ ID NO: 30622 - DNA, 20 bp, Artificial Sequence
  Synthetic oligonucleotide; TGG chr11 5385073 5385092 5385076 -
ttcagtatacaatgagtaat

SEQ ID NO: 30623 - DNA, 20 bp, Artificial Sequence
  Synthetic oligonucleotide; TAG chr11 5385022 5385041 5385025 -
cttttgtttgaatttaatat

SEQ ID NO: 30624 - DNA, 20 bp, Artificial Sequence
  Synthetic oligonucleotide; TGG chr11 5384998 5385017 5385001 -
tattttttaatgaactacat

SEQ ID NO: 30625 - DNA, 20 bp, Artificial Sequence
  Synthetic oligonucleotide; TGG chr11 5384995 5385014 5384998 -
tttttaatgaactacattgg

SEQ ID NO: 30626 - DNA, 20 bp, Artificial Sequence
  Synthetic oligonucleotide; GAG chr11 5384993 5385012 5384996 -
tttaatgaactacattggtg

SEQ ID NO: 30627 - DNA, 20 bp, Artificial Sequence
  Synthetic oligonucleotide; AGG chr11 5384992 5385011 5384995 -
ttaatgaactacattggtgg

SEQ ID NO: 30628 - DNA, 20 bp, Artificial Sequence
  Synthetic oligonucleotide; TAG chr11 5384972 5384991 5384975 -
aggatactgtttcttgtaaa

SEQ ID NO: 30629 - DNA, 20 bp, Artificial Sequence
  Synthetic oligonucleotide; AGG chr11 5384971 5384990 5384974 -
ggatactgtttcttgtaaat

SEQ ID NO: 30630 - DNA, 20 bp, Artificial Sequence
  Synthetic oligonucleotide; GAG chr11 5384969 5384988 5384972 -
atactgtttcttgtaaatag

SEQ ID NO: 30631 - DNA, 20 bp, Artificial Sequence
  Synthetic oligonucleotide; AAG chr11 5384957 5384976 5384960 -
gtaaataggagaatatgcaa

SEQ ID NO: 30632 - DNA, 20 bp, Artificial Sequence
  Synthetic oligonucleotide; AAG chr11 5384937 5384956 5384940 -
aagacgctgcacctaaacac

SEQ ID NO: 30633 - DNA, 20 bp, Artificial Sequence
  Synthetic oligonucleotide; AGG chr11 5384936 5384955 5384939 -
agacgctgcacctaaacaca

SEQ ID NO: 30634 - DNA, 20 bp, Artificial Sequence
  Synthetic oligonucleotide; CAG chr11 5384925 5384944 5384928 -
ctaaacacaaggacttgaac

SEQ ID NO: 30635 - DNA, 20 bp, Artificial Sequence
  Synthetic oligonucleotide; TAG chr11 5384902 5384921 5384905 -
attattcatttttgaacccc

SEQ ID NO: 30636 - DNA, 20 bp, Artificial Sequence
  Synthetic oligonucleotide; GAG chr11 5384900 5384919 5384903 -
tattcatttttgaaccccta

SEQ ID NO: 30637 - DNA, 20 bp, Artificial Sequence
  Synthetic oligonucleotide; CAG chr11 5384887 5384906 5384890 -
acccctagagaacatttcca

SEQ ID NO: 30638 - DNA, 20 bp, Artificial Sequence
  Synthetic oligonucleotide; TGG chr11 5384884 5384903 5384887 -
cctagagaacatttccacag

SEQ ID NO: 30639 - DNA, 20 bp, Artificial Sequence
  Synthetic oligonucleotide; TAG chr11 5384852 5384871 5384855 -
tctgtaaacatgcctgtttt

SEQ ID NO: 30640 - DNA, 20 bp, Artificial Sequence
  Synthetic oligonucleotide; TAG chr11 5384849 5384868 5384852 -
gtaaacatgcctgtttttag

SEQ ID NO: 30641 - DNA, 20 bp, Artificial Sequence
  Synthetic oligonucleotide; AGG chr11 5384848 5384867 5384851 -
taaacatgcctgtttttagt

SEQ ID NO: 30642 - DNA, 20 bp, Artificial Sequence
  Synthetic oligonucleotide; TAG chr11 5384844 5384863 5384847 -
catgcctgtttttagtagga

SEQ ID NO: 30643 - DNA, 20 bp, Artificial Sequence
  Synthetic oligonucleotide; GAG chr11 5384842 5384861 5384845 -
tgcctgtttttagtaggata

SEQ ID NO: 30644 - DNA, 20 bp, Artificial Sequence
  Synthetic oligonucleotide; AGG chr11 5384841 5384860 5384844 -
gcctgtttttagtaggatag

SEQ ID NO: 30645 - DNA, 20 bp, Artificial Sequence
  Synthetic oligonucleotide; GAG chr11 5384839 5384858 5384842 -
ctgtttttagtaggatagag

SEQ ID NO: 30646 - DNA, 20 bp, Artificial Sequence
  Synthetic oligonucleotide; AGG chr11 5384838 5384857 5384841 -
tgtttttagtaggatagagg

SEQ ID NO: 30647 - DNA, 20 bp, Artificial Sequence
  Synthetic oligonucleotide; TGG chr11 5384831 5384850 5384834 -
agtaggatagaggaggattt

SEQ ID NO: 30648 - DNA, 20 bp, Artificial Sequence
  Synthetic oligonucleotide; AAG chr11 5384828 5384847 5384831 -
aggatagaggaggattttgg

SEQ ID NO: 30649 - DNA, 20 bp, Artificial Sequence
  Synthetic oligonucleotide; AGG chr11 5384827 5384846 5384830 -
ggatagaggaggattttgga

SEQ ID NO: 30650 - DNA, 20 bp, Artificial Sequence
  Synthetic oligonucleotide; AAG chr11 5384822 5384841 5384825 -
gaggaggattttggaaggcg

SEQ ID NO: 30651 - DNA, 20 bp, Artificial Sequence
  Synthetic oligonucleotide; AGG chr11 5384821 5384840 5384824 -
aggaggattttggaaggcga

SEQ ID NO: 30652 - DNA, 20 bp, Artificial Sequence
  Synthetic oligonucleotide; TGG chr11 5384810 5384829 5384813 -
ggaaggcgaaggccatatcc

SEQ ID NO: 30653 - DNA, 20 bp, Artificial Sequence
  Synthetic oligonucleotide; TGG chr11 5384803 5384822 5384806 -
gaaggccatatcctggatac

SEQ ID NO: 30654 - DNA, 20 bp, Artificial Sequence
  Synthetic oligonucleotide; GGG chr11 5384802 5384821 5384805 -
aaggccatatcctggatact

SEQ ID NO: 30655 - DNA, 20 bp, Artificial Sequence
  Synthetic oligonucleotide; GGG chr11 5384801 5384820 5384804 -
aggccatatcctggatactg

SEQ ID NO: 30656 - DNA, 20 bp, Artificial Sequence
  Synthetic oligonucleotide; AAG chr11 5384798 5384817 5384801 -
ccatatcctggatactgggg

SEQ ID NO: 30657 - DNA, 20 bp, Artificial Sequence
  Synthetic oligonucleotide; AAG chr11 5384791 5384810 5384794 -
ctggatactggggaagttac

SEQ ID NO: 30658 - DNA, 20 bp, Artificial Sequence
  Synthetic oligonucleotide; AGG chr11 5384790 5384809 5384793 -
tggatactggggaagttaca

SEQ ID NO: 30659 - DNA, 20 bp, Artificial Sequence
  Synthetic oligonucleotide; TGG chr11 5384780 5384799 5384783 -
ggaagttacaaggtgttgtt

SEQ ID NO: 30660 - DNA, 20 bp, Artificial Sequence
  Synthetic oligonucleotide; AAG chr11 5384769 5384788 5384772 -
ggtgttgtttggattaaaat

SEQ ID NO: 30661 - DNA, 20 bp, Artificial Sequence
  Synthetic oligonucleotide; CAG chr11 5384766 5384785 5384769 -
gttgtttggattaaaataag

SEQ ID NO: 30662 - DNA, 20 bp, Artificial Sequence
  Synthetic oligonucleotide; GAG chr11 5384760 5384779 5384763 -
tggattaaaataagcagatt

SEQ ID NO: 30663 - DNA, 20 bp, Artificial Sequence
  Synthetic oligonucleotide; AGG chr11 5384759 5384778 5384762 -
ggattaaaataagcagattg

SEQ ID NO: 30664 - DNA, 20 bp, Artificial Sequence
  Synthetic oligonucleotide; TGG chr11 5384755 5384774 5384758 -
taaaataagcagattgagga

SEQ ID NO: 30665 - DNA, 20 bp, Artificial Sequence
  Synthetic oligonucleotide; GGG chr11 5384754 5384773 5384757 -
aaaataagcagattgaggat

SEQ ID NO: 30666 - DNA, 20 bp, Artificial Sequence
  Synthetic oligonucleotide; GGG chr11 5384753 5384772 5384756 -
aaataagcagattgaggatg

SEQ ID NO: 30667 - DNA, 20 bp, Artificial Sequence
  Synthetic oligonucleotide; TGG chr11 5384734 5384753 5384737 -
ggggtcttttctatgttaac

SEQ ID NO: 30668 - DNA, 20 bp, Artificial Sequence
  Synthetic oligonucleotide; CAG chr11 5384729 5384748 5384732 -
cttttctatgttaactggac

SEQ ID NO: 30669 - DNA, 20 bp, Artificial Sequence
  Synthetic oligonucleotide; AAG chr11 5384695 5384714 5384698 -
catttaataatttgttgaat

SEQ ID NO: 30670 - DNA, 20 bp, Artificial Sequence
  Synthetic oligonucleotide; GAG chr11 5384672 5384691 5384675 -
tgaatgactgtttttctgat

SEQ ID NO: 30671 - DNA, 20 bp, Artificial Sequence
  Synthetic oligonucleotide; GAG chr11 5384670 5384689 5384673 -
aatgactgtttttctgatga

SEQ ID NO: 30672 - DNA, 20 bp, Artificial Sequence
  Synthetic oligonucleotide; AAG chr11 5384666 5384685 5384669 -
actgtttttctgatgagagt

SEQ ID NO: 30673 - DNA, 20 bp, Artificial Sequence
  Synthetic oligonucleotide; AGG chr11 5384665 5384684 5384668 -
ctgtttttctgatgagagta

SEQ ID NO: 30674 - DNA, 20 bp, Artificial Sequence
  Synthetic oligonucleotide; GAG chr11 5384663 5384682 5384666 -
gtttttctgatgagagtaag

SEQ ID NO: 30675 - DNA, 20 bp, Artificial Sequence
  Synthetic oligonucleotide; GAG chr11 5384661 5384680 5384664 -
ttttctgatgagagtaagga

SEQ ID NO: 30676 - DNA, 20 bp, Artificial Sequence
  Synthetic oligonucleotide; AGG chr11 5384660 5384679 5384663 -
tttctgatgagagtaaggag

SEQ ID NO: 30677 - DNA, 20 bp, Artificial Sequence
  Synthetic oligonucleotide; GGG chr11 5384659 5384678 5384662 -
ttctgatgagagtaaggaga

SEQ ID NO: 30678 - DNA, 20 bp, Artificial Sequence
  Synthetic oligonucleotide; CAG chr11 5384647 5384666 5384650 -
taaggagagggtgtgtatac

SEQ ID NO: 30679 - DNA, 20 bp, Artificial Sequence
  Synthetic oligonucleotide; TGG chr11 5384643 5384662 5384646 -
gagagggtgtgtataccaga

SEQ ID NO: 30680 - DNA, 20 bp, Artificial Sequence
  Synthetic oligonucleotide; CGG chr11 5384638 5384657 5384641 -
ggtgtgtataccagatggct

SEQ ID NO: 30681 - DNA, 20 bp, Artificial Sequence
  Synthetic oligonucleotide; CAG chr11 5384635 5384654 5384638 -
gtgtataccagatggctcgg

SEQ ID NO: 30682 - DNA, 20 bp, Artificial Sequence
  Synthetic oligonucleotide; AGG chr11 5384634 5384653 5384637 -
tgtataccagatggctcggc

SEQ ID NO: 30683 - DNA, 20 bp, Artificial Sequence
  Synthetic oligonucleotide; AAG chr11 5384630 5384649 5384633 -
taccagatggctcggcagga

SEQ ID NO: 30684 - DNA, 20 bp, Artificial Sequence
  Synthetic oligonucleotide; GAG chr11 5384628 5384647 5384631 -
ccagatggctcggcaggaaa

SEQ ID NO: 30685 - DNA, 20 bp, Artificial Sequence
  Synthetic oligonucleotide; TAG chr11 5384623 5384642 5384626 -
tggctcggcaggaaagagta

SEQ ID NO: 30686 - DNA, 20 bp, Artificial Sequence
  Synthetic oligonucleotide; GAG chr11 5384621 5384640 5384624 -
gctcggcaggaaagagtata

SEQ ID NO: 30687 - DNA, 20 bp, Artificial Sequence
  Synthetic oligonucleotide; CAG chr11 5384616 5384635 5384619 -
gcaggaaagagtatagagac

SEQ ID NO: 30688 - DNA, 20 bp, Artificial Sequence
  Synthetic oligonucleotide; GAG chr11 5384614 5384633 5384617 -
aggaaagagtatagagacca

SEQ ID NO: 30689 - DNA, 20 bp, Artificial Sequence
  Synthetic oligonucleotide; AGG chr11 5384613 5384632 5384616 -
ggaaagagtatagagaccag

SEQ ID NO: 30690 - DNA, 20 bp, Artificial Sequence
  Synthetic oligonucleotide; GGG chr11 5384612 5384631 5384615 -
gaaagagtatagagaccaga

SEQ ID NO: 30691 - DNA, 20 bp, Artificial Sequence
  Synthetic oligonucleotide; TAG chr11 5384590 5384609 5384593 -
gcttctgccatcctgacttc

SEQ ID NO: 30692 - DNA, 20 bp, Artificial Sequence
  Synthetic oligonucleotide; CAG chr11 5384579 5384598 5384582 -
cctgacttctagacatgatc

SEQ ID NO: 30693 - DNA, 20 bp, Artificial Sequence
  Synthetic oligonucleotide; AGG chr11 5384578 5384597 5384581 -
ctgacttctagacatgatcc

SEQ ID NO: 30694 - DNA, 20 bp, Artificial Sequence
  Synthetic oligonucleotide; GGG chr11 5384577 5384596 5384580 -
tgacttctagacatgatcca

SEQ ID NO: 30695 - DNA, 20 bp, Artificial Sequence
  Synthetic oligonucleotide; GAG chr11 5384575 5384594 5384578 -
acttctagacatgatccagg

SEQ ID NO: 30696 - DNA, 20 bp, Artificial Sequence
  Synthetic oligonucleotide; AGG chr11 5384574 5384593 5384577 -
cttctagacatgatccaggg

SEQ ID NO: 30697 - DNA, 20 bp, Artificial Sequence
  Synthetic oligonucleotide; GGG chr11 5384573 5384592 5384576 -
ttctagacatgatccaggga

SEQ ID NO: 30698 - DNA, 20 bp, Artificial Sequence
  Synthetic oligonucleotide; GGG chr11 5384572 5384591 5384575 -
tctagacatgatccagggag

SEQ ID NO: 30699 - DNA, 20 bp, Artificial Sequence
  Synthetic oligonucleotide; TGG chr11 5384568 5384587 5384571 -
gacatgatccagggaggggc

SEQ ID NO: 30700 - DNA, 20 bp, Artificial Sequence
  Synthetic oligonucleotide; TGG chr11 5384563 5384582 5384566 -
gatccagggaggggctggcc

SEQ ID NO: 30701 - DNA, 20 bp, Artificial Sequence
  Synthetic oligonucleotide; CAG chr11 5384555 5384574 5384558 -
gaggggctggcctggccatg

SEQ ID NO: 30702 - DNA, 20 bp, Artificial Sequence
  Synthetic oligonucleotide; AGG chr11 5384554 5384573 5384557 -
aggggctggcctggccatgc

SEQ ID NO: 30703 - DNA, 20 bp, Artificial Sequence
  Synthetic oligonucleotide; CAG chr11 5384544 5384563 5384547 -
ctggccatgcaggcactcat

SEQ ID NO: 30704 - DNA, 20 bp, Artificial Sequence
  Synthetic oligonucleotide; AGG chr11 5384543 5384562 5384546 -
tggccatgcaggcactcatc

SEQ ID NO: 30705 - DNA, 20 bp, Artificial Sequence
  Synthetic oligonucleotide; GGG chr11 5384542 5384561 5384545 -
ggccatgcaggcactcatca

SEQ ID NO: 30706 - DNA, 20 bp, Artificial Sequence
  Synthetic oligonucleotide; GGG chr11 5384541 5384560 5384544 -
gccatgcaggcactcatcag

SEQ ID NO: 30707 - DNA, 20 bp, Artificial Sequence
  Synthetic oligonucleotide; GAG chr11 5384539 5384558 5384542 -
catgcaggcactcatcaggg

SEQ ID NO: 30708 - DNA, 20 bp, Artificial Sequence
  Synthetic oligonucleotide; GAG chr11 5384535 5384554 5384538 -
caggcactcatcaggggagt

SEQ ID NO: 30709 - DNA, 20 bp, Artificial Sequence
  Synthetic oligonucleotide; AGG chr11 5384534 5384553 5384537 -
aggcactcatcaggggagtg

SEQ ID NO: 30710 - DNA, 20 bp, Artificial Sequence
  Synthetic oligonucleotide; CAG chr11 5384531 5384550 5384534 -
cactcatcaggggagtgagg

SEQ ID NO: 30711 - DNA, 20 bp, Artificial Sequence
  Synthetic oligonucleotide; TGG chr11 5384518 5384537 5384521 -
agtgaggcagccctgcctcc

SEQ ID NO: 30712 - DNA, 20 bp, Artificial Sequence
  Synthetic oligonucleotide; CAG chr11 5384506 5384525 5384509 -
ctgcctcctggccttcctaa

SEQ ID NO: 30713 - DNA, 20 bp, Artificial Sequence
  Synthetic oligonucleotide; CAG chr11 5384496 5384515 5384499 -
gccttcctaacagaatactg

SEQ ID NO: 30714 - DNA, 20 bp, Artificial Sequence
  Synthetic oligonucleotide; GAG chr11 5384491 5384510 5384494 -
cctaacagaatactgcagat

SEQ ID NO: 30715 - DNA, 20 bp, Artificial Sequence
  Synthetic oligonucleotide; CAG chr11 5384475 5384494 5384478 -
agatgagctcgcctcttttc

SEQ ID NO: 30716 - DNA, 20 bp, Artificial Sequence
  Synthetic oligonucleotide; AAG chr11 5384471 5384490 5384474 -
gagctcgcctcttttccagc

SEQ ID NO: 30717 - DNA, 20 bp, Artificial Sequence
  Synthetic oligonucleotide; GAG chr11 5384469 5384488 5384472 -
gctcgcctcttttccagcaa

SEQ ID NO: 30718 - DNA, 20 bp, Artificial Sequence
  Synthetic oligonucleotide; AAG chr11 5384466 5384485 5384469 -
cgcctcttttccagcaagag

SEQ ID NO: 30719 - DNA, 20 bp, Artificial Sequence
  Synthetic oligonucleotide; AGG chr11 5384465 5384484 5384468 -
gcctcttttccagcaagaga

SEQ ID NO: 30720 - DNA, 20 bp, Artificial Sequence
  Synthetic oligonucleotide; TGG chr11 5384441 5384460 5384444 -
cctgttttctgttctttctc

SEQ ID NO: 30721 - DNA, 20 bp, Artificial Sequence
  Synthetic oligonucleotide; TGG chr11 5384435 5384454 5384438 -
ttctgttctttctctggctc

SEQ ID NO: 30722 - DNA, 20 bp, Artificial Sequence
  Synthetic oligonucleotide; TAG chr11 5384423 5384442 5384426 -
tctggctctggttctgtgca

SEQ ID NO: 30723 - DNA, 20 bp, Artificial Sequence
  Synthetic oligonucleotide; GAG chr11 5384415 5384434 5384418 -
tggttctgtgcatagactct

SEQ ID NO: 30724 - DNA, 20 bp, Artificial Sequence
  Synthetic oligonucleotide; CAG chr11 5384407 5384426 5384410 -
tgcatagactctgagaatat

SEQ ID NO: 30725 - DNA, 20 bp, Artificial Sequence
  Synthetic oligonucleotide; AAG chr11 5384404 5384423 5384407 -
atagactctgagaatatcag

SEQ ID NO: 30726 - DNA, 20 bp, Artificial Sequence
  Synthetic oligonucleotide; GAG chr11 5384402 5384421 5384405 -
agactctgagaatatcagaa

SEQ ID NO: 30727 - DNA, 20 bp, Artificial Sequence
  Synthetic oligonucleotide; GAG chr11 5384392 5384411 5384395 -
aatatcagaagagattctgt

SEQ ID NO: 30728 - DNA, 20 bp, Artificial Sequence
  Synthetic oligonucleotide; TGG chr11 5384384 5384403 5384387 -
aagagattctgtgagaaccc

SEQ ID NO: 30729 - DNA, 20 bp, Artificial Sequence
  Synthetic oligonucleotide; AAG chr11 5384376 5384395 5384379 -
ctgtgagaaccctggtttct

SEQ ID NO: 30730 - DNA, 20 bp, Artificial Sequence
  Synthetic oligonucleotide; AAG chr11 5384361 5384380 5384364 -
tttctaagacttcattttcc

SEQ ID NO: 30731 - DNA, 20 bp, Artificial Sequence
  Synthetic oligonucleotide; AAG chr11 5384348 5384367 5384351 -
attttccaagtgaaaaatct

SEQ ID NO: 30732 - DNA, 20 bp, Artificial Sequence
  Synthetic oligonucleotide; AGG chr11 5384347 5384366 5384350 -
ttttccaagtgaaaaatcta

SEQ ID NO: 30733 - DNA, 20 bp, Artificial Sequence
  Synthetic oligonucleotide; CAG chr11 5384342 5384361 5384345 -
caagtgaaaaatctaaggcc

SEQ ID NO: 30734 - DNA, 20 bp, Artificial Sequence
  Synthetic oligonucleotide; TGG chr11 5384328 5384347 5384331 -
aaggcccagactgctgtata

SEQ ID NO: 30735 - DNA, 20 bp, Artificial Sequence
  Synthetic oligonucleotide; TGG chr11 5384325 5384344 5384328 -
gcccagactgctgtatatgg

SEQ ID NO: 30736 - DNA, 20 bp, Artificial Sequence
  Synthetic oligonucleotide; TGG chr11 5384306 5384325 5384309 -
gtggttcacacttataatcc

SEQ ID NO: 30737 - DNA, 20 bp, Artificial Sequence
  Synthetic oligonucleotide; TGG chr11 5384298 5384317 5384301 -
cacttataatcctggcaact

SEQ ID NO: 30738 - DNA, 20 bp, Artificial Sequence
  Synthetic oligonucleotide; AAG chr11 5384295 5384314 5384298 -
ttataatcctggcaacttgg

SEQ ID NO: 30739 - DNA, 20 bp, Artificial Sequence
  Synthetic oligonucleotide; AAG chr11 5384289 5384308 5384292 -
tcctggcaacttggaagaat

SEQ ID NO: 30740 - DNA, 20 bp, Artificial Sequence
  Synthetic oligonucleotide; AGG chr11 5384288 5384307 5384291 -
cctggcaacttggaagaata

SEQ ID NO: 30741 - DNA, 20 bp, Artificial Sequence
  Synthetic oligonucleotide; TGG chr11 5384285 5384304 5384288 -
ggcaacttggaagaataagg

SEQ ID NO: 30742 - DNA, 20 bp, Artificial Sequence
  Synthetic oligonucleotide; GGG chr11 5384284 5384303 5384287 -
gcaacttggaagaataaggt

SEQ ID NO: 30743 - DNA, 20 bp, Artificial Sequence
  Synthetic oligonucleotide; GAG chr11 5384282 5384301 5384285 -
aacttggaagaataaggtgg

SEQ ID NO: 30744 - DNA, 20 bp, Artificial Sequence
  Synthetic oligonucleotide; AGG chr11 5384281 5384300 5384284 -
acttggaagaataaggtggg

SEQ ID NO: 30745 - DNA, 20 bp, Artificial Sequence
  Synthetic oligonucleotide; CGG chr11 5384266 5384285 5384269 -
gtgggaggattgcttgaatc

SEQ ID NO: 30746 - DNA, 20 bp, Artificial Sequence
  Synthetic oligonucleotide; GAG chr11 5384260 5384279 5384263 -
ggattgcttgaatccggttt

SEQ ID NO: 30747 - DNA, 20 bp, Artificial Sequence
  Synthetic oligonucleotide; CAG chr11 5384253 5384272 5384256 -
ttgaatccggtttgagttta

SEQ ID NO: 30748 - DNA, 20 bp, Artificial Sequence
  Synthetic oligonucleotide; GAG chr11 5384249 5384268 5384252 -
atccggtttgagtttacagt

SEQ ID NO: 30749 - DNA, 20 bp, Artificial Sequence
  Synthetic oligonucleotide; TAG chr11 5384224 5384243 5384227 -
atgattacaccactgcactg

SEQ ID NO: 30750 - DNA, 20 bp, Artificial Sequence
  Synthetic oligonucleotide; TGG chr11 5384219 5384238 5384222 -
tacaccactgcactgtagcc

SEQ ID NO: 30751 - DNA, 20 bp, Artificial Sequence
  Synthetic oligonucleotide; GGG chr11 5384218 5384237 5384221 -
acaccactgcactgtagcct

SEQ ID NO: 30752 - DNA, 20 bp, Artificial Sequence
  Synthetic oligonucleotide; CAG chr11 5384212 5384231 5384215 -
ctgcactgtagcctgggtaa

SEQ ID NO: 30753 - DNA, 20 bp, Artificial Sequence
  Synthetic oligonucleotide; GAG chr11 5384210 5384229 5384213 -
gcactgtagcctgggtaaca

SEQ ID NO: 30754 - DNA, 20 bp, Artificial Sequence
  Synthetic oligonucleotide; TAG chr11 5384206 5384225 5384209 -
tgtagcctgggtaacagagc

SEQ ID NO: 30755 - DNA, 20 bp, Artificial Sequence
  Synthetic oligonucleotide; AAG chr11 5384178 5384197 5384181 -
atttctaaaaacaacaaaca

SEQ ID NO: 30756 - DNA, 20 bp, Artificial Sequence
  Synthetic oligonucleotide; AAG chr11 5384163 5384182 5384166 -
aaacaaagaaacaacaacaa

SEQ ID NO: 30757 - DNA, 20 bp, Artificial Sequence
  Synthetic oligonucleotide; AAG chr11 5384154 5384173 5384157 -
aacaacaacaaaagaaaaca

SEQ ID NO: 30758 - DNA, 20 bp, Artificial Sequence
  Synthetic oligonucleotide; TAG chr11 5384136 5384155 5384139 -
caaagaaaaaaaaatcccat

SEQ ID NO: 30759 - DNA, 20 bp, Artificial Sequence
  Synthetic oligonucleotide; AGG chr11 5384135 5384154 5384138 -
aaagaaaaaaaaatcccatt

SEQ ID NO: 30760 - DNA, 20 bp, Artificial Sequence
  Synthetic oligonucleotide; TAG chr11 5384130 5384149 5384133 -
aaaaaaaatcccattaggct

SEQ ID NO: 30761 - DNA, 20 bp, Artificial Sequence
  Synthetic oligonucleotide; CAG chr11 5384125 5384144 5384128 -
aaatcccattaggcttagtg

SEQ ID NO: 30762 - DNA, 20 bp, Artificial Sequence
  Synthetic oligonucleotide; AGG chr11 5384124 5384143 5384127 -
aatcccattaggcttagtgc

SEQ ID NO: 30763 - DNA, 20 bp, Artificial Sequence
  Synthetic oligonucleotide; GGG chr11 5384123 5384142 5384126 -
atcccattaggcttagtgca

SEQ ID NO: 30764 - DNA, 20 bp, Artificial Sequence
  Synthetic oligonucleotide; TGG chr11 5384116 5384135 5384119 -
taggcttagtgcagggaatg

SEQ ID NO: 30765 - DNA, 20 bp, Artificial Sequence
  Synthetic oligonucleotide; GGG chr11 5384115 5384134 5384118 -
aggcttagtgcagggaatgt

SEQ ID NO: 30766 - DNA, 20 bp, Artificial Sequence
  Synthetic oligonucleotide; GGG chr11 5384114 5384133 5384117 -
ggcttagtgcagggaatgtg

SEQ ID NO: 30767 - DNA, 20 bp, Artificial Sequence
  Synthetic oligonucleotide; TGG chr11 5384103 5384122 5384106 -
gggaatgtggggaatccatt

SEQ ID NO: 30768 - DNA, 20 bp, Artificial Sequence
  Synthetic oligonucleotide; AAG chr11 5384098 5384117 5384101 -
tgtggggaatccatttggct

SEQ ID NO: 30769 - DNA, 20 bp, Artificial Sequence
  Synthetic oligonucleotide; AGG chr11 5384097 5384116 5384100 -
gtggggaatccatttggcta

SEQ ID NO: 30770 - DNA, 20 bp, Artificial Sequence
  Synthetic oligonucleotide; TGG chr11 5384081 5384100 5384084 -
gctaaggacattcaaacatt

SEQ ID NO: 30771 - DNA, 20 bp, Artificial Sequence
  Synthetic oligonucleotide; GGG chr11 5384080 5384099 5384083 -
ctaaggacattcaaacattt

SEQ ID NO: 30772 - DNA, 20 bp, Artificial Sequence
  Synthetic oligonucleotide; GGG chr11 5384079 5384098 5384082 -
taaggacattcaaacatttg

SEQ ID NO: 30773 - DNA, 20 bp, Artificial Sequence
  Synthetic oligonucleotide; GGG chr11 5384078 5384097 5384081 -
aaggacattcaaacatttgg

SEQ ID NO: 30774 - DNA, 20 bp, Artificial Sequence
  Synthetic oligonucleotide; AAG chr11 5384073 5384092 5384076 -
cattcaaacatttgggggaa

SEQ ID NO: 30775 - DNA, 20 bp, Artificial Sequence
  Synthetic oligonucleotide; GAG chr11 5384056 5384075 5384059 -
gaaaagccttaattgtaact

SEQ ID NO: 30776 - DNA, 20 bp, Artificial Sequence
  Synthetic oligonucleotide; TGG chr11 5384041 5384060 5384044 -
taactgagaccatgtctttt

SEQ ID NO: 30777 - DNA, 20 bp, Artificial Sequence
  Synthetic oligonucleotide; GGG chr11 5384040 5384059 5384043 -
aactgagaccatgtcttttt

SEQ ID NO: 30778 - DNA, 20 bp, Artificial Sequence
  Synthetic oligonucleotide; CGG chr11 5383944 5383963 5383947 -
attacccactcctgaaaccc

SEQ ID NO: 30779 - DNA, 20 bp, Artificial Sequence
  Synthetic oligonucleotide; AAG chr11 5383938 5383957 5383941 -
cactcctgaaaccccggcac

SEQ ID NO: 30780 - DNA, 20 bp, Artificial Sequence
  Synthetic oligonucleotide; CAG chr11 5383934 5383953 5383937 -
cctgaaaccccggcacaaga

SEQ ID NO: 30781 - DNA, 20 bp, Artificial Sequence
  Synthetic oligonucleotide; TAG chr11 5383931 5383950 5383934 -
gaaaccccggcacaagacag

SEQ ID NO: 30782 - DNA, 20 bp, Artificial Sequence
  Synthetic oligonucleotide; GAG chr11 5383927 5383946 5383930 -
ccccggcacaagacagtagt

SEQ ID NO: 30783 - DNA, 20 bp, Artificial Sequence
  Synthetic oligonucleotide; CAG chr11 5383918 5383937 5383921 -
aagacagtagtgagactcac

SEQ ID NO: 30784 - DNA, 20 bp, Artificial Sequence
  Synthetic oligonucleotide; CAG chr11 5383915 5383934 5383918 -
acagtagtgagactcaccag

SEQ ID NO: 30785 - DNA, 20 bp, Artificial Sequence
  Synthetic oligonucleotide; AGG chr11 5383914 5383933 5383917 -
cagtagtgagactcaccagc

SEQ ID NO: 30786 - DNA, 20 bp, Artificial Sequence
  Synthetic oligonucleotide; AAG chr11 5383895 5383914 5383898 -
caggtaataacaaaaatgtg

SEQ ID NO: 30787 - DNA, 20 bp, Artificial Sequence
  Synthetic oligonucleotide; GAG chr11 5383887 5383906 5383890 -
aacaaaaatgtgaagccaat

SEQ ID NO: 30788 - DNA, 20 bp, Artificial Sequence
  Synthetic oligonucleotide; TAG chr11 5383884 5383903 5383887 -
aaaaatgtgaagccaatgag

SEQ ID NO: 30789 - DNA, 20 bp, Artificial Sequence
  Synthetic oligonucleotide; AGG chr11 5383883 5383902 5383886 -
aaaatgtgaagccaatgagt

SEQ ID NO: 30790 - DNA, 20 bp, Artificial Sequence
  Synthetic oligonucleotide; AAG chr11 5383875 5383894 5383878 -
aagccaatgagtaggttcca

SEQ ID NO: 30791 - DNA, 20 bp, Artificial Sequence
  Synthetic oligonucleotide; AGG chr11 5383874 5383893 5383877 -
agccaatgagtaggttccaa

SEQ ID NO: 30792 - DNA, 20 bp, Artificial Sequence
  Synthetic oligonucleotide; AAG chr11 5383871 5383890 5383874 -
caatgagtaggttccaaagg

SEQ ID NO: 30793 - DNA, 20 bp, Artificial Sequence
  Synthetic oligonucleotide; AAG chr11 5383867 5383886 5383870 -
gagtaggttccaaaggaaga

SEQ ID NO: 30794 - DNA, 20 bp, Artificial Sequence
  Synthetic oligonucleotide; AAG chr11 5383864 5383883 5383867 -
taggttccaaaggaagaaag

SEQ ID NO: 30795 - DNA, 20 bp, Artificial Sequence
  Synthetic oligonucleotide; GAG chr11 5383862 5383881 5383865 -
ggttccaaaggaagaaagaa

SEQ ID NO: 30796 - DNA, 20 bp, Artificial Sequence
  Synthetic oligonucleotide; TAG chr11 5383857 5383876 5383860 -
caaaggaagaaagaagagta

SEQ ID NO: 30797 - DNA, 20 bp, Artificial Sequence
  Synthetic oligonucleotide; AAG chr11 5383852 5383871 5383855 -
gaagaaagaagagtatagat

SEQ ID NO: 30798 - DNA, 20 bp, Artificial Sequence
  Synthetic oligonucleotide; AGG chr11 5383851 5383870 5383854 -
aagaaagaagagtatagata

SEQ ID NO: 30799 - DNA, 20 bp, Artificial Sequence
  Synthetic oligonucleotide; AAG chr11 5383841 5383860 5383844 -
agtatagataaggatgacac

SEQ ID NO: 30800 - DNA, 20 bp, Artificial Sequence
  Synthetic oligonucleotide; AGG chr11 5383840 5383859 5383843 -
gtatagataaggatgacaca

SEQ ID NO: 30801 - DNA, 20 bp, Artificial Sequence
  Synthetic oligonucleotide; GGG chr11 5383839 5383858 5383842 -
tatagataaggatgacacaa

SEQ ID NO: 30802 - DNA, 20 bp, Artificial Sequence
  Synthetic oligonucleotide; GAG chr11 5383831 5383850 5383834 -
aggatgacacaagggtcact

SEQ ID NO: 30803 - DNA, 20 bp, Artificial Sequence
  Synthetic oligonucleotide; GAG chr11 5383829 5383848 5383832 -
gatgacacaagggtcactga

SEQ ID NO: 30804 - DNA, 20 bp, Artificial Sequence
  Synthetic oligonucleotide; AGG chr11 5383828 5383847 5383831 -
atgacacaagggtcactgag

SEQ ID NO: 30805 - DNA, 20 bp, Artificial Sequence
  Synthetic oligonucleotide; AAG chr11 5383822 5383841 5383825 -
caagggtcactgagaggcac

SEQ ID NO: 30806 - DNA, 20 bp, Artificial Sequence
  Synthetic oligonucleotide; AGG chr11 5383821 5383840 5383824 -
aagggtcactgagaggcaca

SEQ ID NO: 30807 - DNA, 20 bp, Artificial Sequence
  Synthetic oligonucleotide; TGG chr11 5383815 5383834 5383818 -
cactgagaggcacaaggctg

SEQ ID NO: 30808 - DNA, 20 bp, Artificial Sequence
  Synthetic oligonucleotide; CAG chr11 5383806 5383825 5383809 -
gcacaaggctgtggctgtca

SEQ ID NO: 30809 - DNA, 20 bp, Artificial Sequence
  Synthetic oligonucleotide; AAG chr11 5383803 5383822 5383806 -
caaggctgtggctgtcacag

SEQ ID NO: 30810 - DNA, 20 bp, Artificial Sequence
  Synthetic oligonucleotide; AGG chr11 5383802 5383821 5383805 -
aaggctgtggctgtcacaga

SEQ ID NO: 30811 - DNA, 20 bp, Artificial Sequence
  Synthetic oligonucleotide; AAG chr11 5383786 5383805 5383789 -
cagaaggatttatcctccta

SEQ ID NO: 30812 - DNA, 20 bp, Artificial Sequence
  Synthetic oligonucleotide; TGG chr11 5383779 5383798 5383782 -
atttatcctcctaaagacca

SEQ ID NO: 30813 - DNA, 20 bp, Artificial Sequence
  Synthetic oligonucleotide; CAG chr11 5383773 5383792 5383776 -
cctcctaaagaccatggctc

SEQ ID NO: 30814 - DNA, 20 bp, Artificial Sequence
  Synthetic oligonucleotide; TGG chr11 5383769 5383788 5383772 -
ctaaagaccatggctccagc

SEQ ID NO: 30815 - DNA, 20 bp, Artificial Sequence
  Synthetic oligonucleotide; GGG chr11 5383768 5383787 5383771 -
taaagaccatggctccagct

SEQ ID NO: 30816 - DNA, 20 bp, Artificial Sequence
  Synthetic oligonucleotide; GAG chr11 5383766 5383785 5383769 -
aagaccatggctccagctgg

SEQ ID NO: 30817 - DNA, 20 bp, Artificial Sequence
  Synthetic oligonucleotide; TGG chr11 5383756 5383775 5383759 -
ctccagctgggagaacttaa

SEQ ID NO: 30818 - DNA, 20 bp, Artificial Sequence
  Synthetic oligonucleotide; AAG chr11 5383747 5383766 5383750 -
ggagaacttaatggtaaaca

SEQ ID NO: 30819 - DNA, 20 bp, Artificial Sequence
  Synthetic oligonucleotide; AGG chr11 5383746 5383765 5383749 -
gagaacttaatggtaaacaa

SEQ ID NO: 30820 - DNA, 20 bp, Artificial Sequence
  Synthetic oligonucleotide; GGG chr11 5383745 5383764 5383748 -
agaacttaatggtaaacaaa

SEQ ID NO: 30821 - DNA, 20 bp, Artificial Sequence
  Synthetic oligonucleotide; CAG chr11 5383738 5383757 5383741 -
aatggtaaacaaagggtccc

SEQ ID NO: 30822 - DNA, 20 bp, Artificial Sequence
  Synthetic oligonucleotide; AGG chr11 5383737 5383756 5383740 -
atggtaaacaaagggtcccc

SEQ ID NO: 30823 - DNA, 20 bp, Artificial Sequence
  Synthetic oligonucleotide; GGG chr11 5383736 5383755 5383739 -
tggtaaacaaagggtcccca

SEQ ID NO: 30824 - DNA, 20 bp, Artificial Sequence
  Synthetic oligonucleotide; TGG chr11 5383732 5383751 5383735 -
aaacaaagggtccccagggc

SEQ ID NO: 30825 - DNA, 20 bp, Artificial Sequence
  Synthetic oligonucleotide; GGG chr11 5383731 5383750 5383734 -
aacaaagggtccccagggct

SEQ ID NO: 30826 - DNA, 20 bp, Artificial Sequence
  Synthetic oligonucleotide; TGG chr11 5383721 5383740 5383724 -
ccccagggctgggaatccta

SEQ ID NO: 30827 - DNA, 20 bp, Artificial Sequence
  Synthetic oligonucleotide; GGG chr11 5383720 5383739 5383723 -
cccagggctgggaatcctat

SEQ ID NO: 30828 - DNA, 20 bp, Artificial Sequence
  Synthetic oligonucleotide; CAG chr11 5383717 5383736 5383720 -
agggctgggaatcctatggg

SEQ ID NO: 30829 - DNA, 20 bp, Artificial Sequence
  Synthetic oligonucleotide; AGG chr11 5383716 5383735 5383719 -
gggctgggaatcctatgggc

SEQ ID NO: 30830 - DNA, 20 bp, Artificial Sequence
  Synthetic oligonucleotide; AAG chr11 5383682 5383701 5383685 -
atctccacccctgtctcctg

SEQ ID NO: 30831 - DNA, 20 bp, Artificial Sequence
  Synthetic oligonucleotide; AAG chr11 5383676 5383695 5383679 -
acccctgtctcctgaagctg

SEQ ID NO: 30832 - DNA, 20 bp, Artificial Sequence
  Synthetic oligonucleotide; GAG chr11 5383674 5383693 5383677 -
ccctgtctcctgaagctgaa

SEQ ID NO: 30833 - DNA, 20 bp, Artificial Sequence
  Synthetic oligonucleotide; TAG chr11 5383660 5383679 5383663 -
gctgaagagccctaactttt

SEQ ID NO: 30834 - DNA, 20 bp, Artificial Sequence
  Synthetic oligonucleotide; CAG chr11 5383653 5383672 5383656 -
agccctaactttttagcatt

SEQ ID NO: 30835 - DNA, 20 bp, Artificial Sequence
  Synthetic oligonucleotide; CAG chr11 5383646 5383665 5383649 -
actttttagcattcagtccc

SEQ ID NO: 30836 - DNA, 20 bp, Artificial Sequence
  Synthetic oligonucleotide; AGG chr11 5383645 5383664 5383648 -
ctttttagcattcagtcccc

SEQ ID NO: 30837 - DNA, 20 bp, Artificial Sequence
  Synthetic oligonucleotide; TGG chr11 5383639 5383658 5383642 -
agcattcagtccccaggttt

SEQ ID NO: 30838 - DNA, 20 bp, Artificial Sequence
  Synthetic oligonucleotide; CAG chr11 5383631 5383650 5383634 -
gtccccaggttttggctaca

SEQ ID NO: 30839 - DNA, 20 bp, Artificial Sequence
  Synthetic oligonucleotide; AAG chr11 5383612 5383631 5383615 -
acagacatctgctgcaacaa

SEQ ID NO: 30840 - DNA, 20 bp, Artificial Sequence
  Synthetic oligonucleotide; AAG chr11 5383574 5383593 5383577 -
tgtttatttttaatttcata

SEQ ID NO: 30841 - DNA, 20 bp, Artificial Sequence
  Synthetic oligonucleotide; AAG chr11 5383571 5383590 5383574 -
ttatttttaatttcataaag

SEQ ID NO: 30842 - DNA, 20 bp, Artificial Sequence
  Synthetic oligonucleotide; TAG chr11 5383521 5383540 5383524 -
tactgtcttctgttatccac

SEQ ID NO: 30843 - DNA, 20 bp, Artificial Sequence
  Synthetic oligonucleotide; TGG chr11 5383515 5383534 5383518 -
cttctgttatccactagtaa

SEQ ID NO: 30844 - DNA, 20 bp, Artificial Sequence
  Synthetic oligonucleotide; CAG chr11 5383499 5383518 5383502 -
gtaatggacccgtcgttttc

SEQ ID NO: 30845 - DNA, 20 bp, Artificial Sequence
  Synthetic oligonucleotide; GAG chr11 5383497 5383516 5383500 -
aatggacccgtcgttttcca

SEQ ID NO: 30846 - DNA, 20 bp, Artificial Sequence
  Synthetic oligonucleotide; GAG chr11 5383495 5383514 5383498 -
tggacccgtcgttttccaga

SEQ ID NO: 30847 - DNA, 20 bp, Artificial Sequence
  Synthetic oligonucleotide; AGG chr11 5383494 5383513 5383497 -
ggacccgtcgttttccagag

SEQ ID NO: 30848 - DNA, 20 bp, Artificial Sequence
  Synthetic oligonucleotide; CGG chr11 5383490 5383509 5383493 -
ccgtcgttttccagagaggt

SEQ ID NO: 30849 - DNA, 20 bp, Artificial Sequence
  Synthetic oligonucleotide; TAG chr11 5383484 5383503 5383487 -
ttttccagagaggtcggatg

SEQ ID NO: 30850 - DNA, 20 bp, Artificial Sequence
  Synthetic oligonucleotide; AAG chr11 5383475 5383494 5383478 -
gaggtcggatgtagtatatg

SEQ ID NO: 30851 - DNA, 20 bp, Artificial Sequence
  Synthetic oligonucleotide; GAG chr11 5383473 5383492 5383476 -
ggtcggatgtagtatatgaa

SEQ ID NO: 30852 - DNA, 20 bp, Artificial Sequence
  Synthetic oligonucleotide; AGG chr11 5383472 5383491 5383475 -
gtcggatgtagtatatgaag

SEQ ID NO: 30853 - DNA, 20 bp, Artificial Sequence
  Synthetic oligonucleotide; CAG chr11 5383450 5383469 5383453 -
gattatccatgtgatgttca

SEQ ID NO: 30854 - DNA, 20 bp, Artificial Sequence
  Synthetic oligonucleotide; TGG chr11 5383447 5383466 5383450 -
tatccatgtgatgttcacag

SEQ ID NO: 30855 - DNA, 20 bp, Artificial Sequence
  Synthetic oligonucleotide; AAG chr11 5383420 5383439 5383423 -
taaattgcacatctgccttg

SEQ ID NO: 30856 - DNA, 20 bp, Artificial Sequence
  Synthetic oligonucleotide; AAG chr11 5383396 5383415 5383399 -
accacaatcaccactacttc

SEQ ID NO: 30857 - DNA, 20 bp, Artificial Sequence
  Synthetic oligonucleotide; CAG chr11 5383339 5383358 5383342 -
ttttatatttccatttactg

SEQ ID NO: 30858 - DNA, 20 bp, Artificial Sequence
  Synthetic oligonucleotide; CAG chr11 5383310 5383329 5383313 -
aaattgccctccatctctgc

SEQ ID NO: 30859 - DNA, 20 bp, Artificial Sequence
  Synthetic oligonucleotide; TGG chr11 5383295 5383314 5383298 -
tctgccagcctctatatctt

SEQ ID NO: 30860 - DNA, 20 bp, Artificial Sequence
  Synthetic oligonucleotide; TAG chr11 5383289 5383308 5383292 -
agcctctatatctttggacc

SEQ ID NO: 30861 - DNA, 20 bp, Artificial Sequence
  Synthetic oligonucleotide; AAG chr11 5383286 5383305 5383289 -
ctctatatctttggacctag

SEQ ID NO: 30862 - DNA, 20 bp, Artificial Sequence
  Synthetic oligonucleotide; CAG chr11 5383245 5383264 5383248 -
tcctaccccaaacaaatgtc

SEQ ID NO: 30863 - DNA, 20 bp, Artificial Sequence
  Synthetic oligonucleotide; AGG chr11 5383244 5383263 5383247 -
cctaccccaaacaaatgtcc

SEQ ID NO: 30864 - DNA, 20 bp, Artificial Sequence
  Synthetic oligonucleotide; CAG chr11 5383240 5383259 5383243 -
ccccaaacaaatgtccaggt

SEQ ID NO: 30865 - DNA, 20 bp, Artificial Sequence
  Synthetic oligonucleotide; CAG chr11 5383232 5383251 5383235 -
aaatgtccaggtcagtgtct

SEQ ID NO: 30866 - DNA, 20 bp, Artificial Sequence
  Synthetic oligonucleotide; AGG chr11 5383231 5383250 5383234 -
aatgtccaggtcagtgtctc

SEQ ID NO: 30867 - DNA, 20 bp, Artificial Sequence
  Synthetic oligonucleotide; AAG chr11 5383220 5383239 5383223 -
cagtgtctcaggctttccca

SEQ ID NO: 30868 - DNA, 20 bp, Artificial Sequence
  Synthetic oligonucleotide; TGG chr11 5383192 5383211 5383195 -
tacttcatctttgaatgcac

SEQ ID NO: 30869 - DNA, 20 bp, Artificial Sequence
  Synthetic oligonucleotide; GAG chr11 5383176 5383195 5383179 -
gcactggactttccttcaat

SEQ ID NO: 30870 - DNA, 20 bp, Artificial Sequence
  Synthetic oligonucleotide; AAG chr11 5383164 5383183 5383167 -
ccttcaatgagccctacaac

SEQ ID NO: 30871 - DNA, 20 bp, Artificial Sequence
  Synthetic oligonucleotide; TAG chr11 5383161 5383180 5383164 -
tcaatgagccctacaacaag

SEQ ID NO: 30872 - DNA, 20 bp, Artificial Sequence
  Synthetic oligonucleotide; TGG chr11 5383130 5383149 5383133 -
aaacttttttccttcttttc

SEQ ID NO: 30873 - DNA, 20 bp, Artificial Sequence
  Synthetic oligonucleotide; TAG chr11 5383127 5383146 5383130 -
cttttttccttcttttctgg

SEQ ID NO: 30874 - DNA, 20 bp, Artificial Sequence
  Synthetic oligonucleotide; TAG chr11 5383107 5383126 5383110 -
tagcaaatgccatcaacatt

SEQ ID NO: 30875 - DNA, 20 bp, Artificial Sequence
  Synthetic oligonucleotide; TAG chr11 5383093 5383112 5383096 -
aacatttagaaaaaaaaaaa

SEQ ID NO: 30876 - DNA, 20 bp, Artificial Sequence
  Synthetic oligonucleotide; CAG chr11 5383074 5383093 5383077 -
atagtcttgtacttcttccc

SEQ ID NO: 30877 - DNA, 20 bp, Artificial Sequence
  Synthetic oligonucleotide; CAG chr11 5383062 5383081 5383065 -
ttcttccccagactatgcta

SEQ ID NO: 30878 - DNA, 20 bp, Artificial Sequence
  Synthetic oligonucleotide; GAG chr11 5383054 5383073 5383057 -
cagactatgctacagaacct

SEQ ID NO: 30879 - DNA, 20 bp, Artificial Sequence
  Synthetic oligonucleotide; CAG chr11 5383041 5383060 5383044 -
agaacctgagttaatgtgat

SEQ ID NO: 30880 - DNA, 20 bp, Artificial Sequence
  Synthetic oligonucleotide; AGG chr11 5383040 5383059 5383043 -
gaacctgagttaatgtgatc

SEQ ID NO: 30881 - DNA, 20 bp, Artificial Sequence
  Synthetic oligonucleotide; TGG chr11 5382967 5382986 5382970 -
cacaaacacacacacactct

SEQ ID NO: 30882 - DNA, 20 bp, Artificial Sequence
  Synthetic oligonucleotide; GAG chr11 5382965 5382984 5382968 -
caaacacacacacactcttg

SEQ ID NO: 30883 - DNA, 20 bp, Artificial Sequence
  Synthetic oligonucleotide; TGG chr11 5382960 5382979 5382963 -
acacacacactcttggagac

SEQ ID NO: 30884 - DNA, 20 bp, Artificial Sequence
  Synthetic oligonucleotide; AAG chr11 5382953 5382972 5382956 -
cactcttggagactggcatg

SEQ ID NO: 30885 - DNA, 20 bp, Artificial Sequence
  Synthetic oligonucleotide; AAG chr11 5382949 5382968 5382952 -
cttggagactggcatgaagc

SEQ ID NO: 30886 - DNA, 20 bp, Artificial Sequence
  Synthetic oligonucleotide; AGG chr11 5382948 5382967 5382951 -
ttggagactggcatgaagca

SEQ ID NO: 30887 - DNA, 20 bp, Artificial Sequence
  Synthetic oligonucleotide; TAG chr11 5382929 5382948 5382932 -
aaggtattacatcctttaaa

SEQ ID NO: 30888 - DNA, 20 bp, Artificial Sequence
  Synthetic oligonucleotide; AGG chr11 5382928 5382947 5382931 -
aggtattacatcctttaaat

SEQ ID NO: 30889 - DNA, 20 bp, Artificial Sequence
  Synthetic oligonucleotide; GGG chr11 5382927 5382946 5382930 -
ggtattacatcctttaaata

SEQ ID NO: 30890 - DNA, 20 bp, Artificial Sequence
  Synthetic oligonucleotide; TGG chr11 5382922 5382941 5382925 -
tacatcctttaaatagggca

SEQ ID NO: 30891 - DNA, 20 bp, Artificial Sequence
  Synthetic oligonucleotide; TAG chr11 5382914 5382933 5382917 -
ttaaatagggcatggttgat

SEQ ID NO: 30892 - DNA, 20 bp, Artificial Sequence
  Synthetic oligonucleotide; GAG chr11 5382912 5382931 5382915 -
aaatagggcatggttgatta

SEQ ID NO: 30893 - DNA, 20 bp, Artificial Sequence
  Synthetic oligonucleotide; TGG chr11 5382904 5382923 5382907 -
catggttgattagagttgtg

SEQ ID NO: 30894 - DNA, 20 bp, Artificial Sequence
  Synthetic oligonucleotide; GGG chr11 5382903 5382922 5382906 -
atggttgattagagttgtgt

SEQ ID NO: 30895 - DNA, 20 bp, Artificial Sequence
  Synthetic oligonucleotide; GGG chr11 5382902 5382921 5382905 -
tggttgattagagttgtgtg

SEQ ID NO: 30896 - DNA, 20 bp, Artificial Sequence
  Synthetic oligonucleotide; GAG chr11 5382897 5382916 5382900 -
gattagagttgtgtggggat

SEQ ID NO: 30897 - DNA, 20 bp, Artificial Sequence
  Synthetic oligonucleotide; CGG chr11 5382886 5382905 5382889 -
tgtggggatgagctccaaaa

SEQ ID NO: 30898 - DNA, 20 bp, Artificial Sequence
  Synthetic oligonucleotide; GGG chr11 5382885 5382904 5382888 -
gtggggatgagctccaaaac

SEQ ID NO: 30899 - DNA, 20 bp, Artificial Sequence
  Synthetic oligonucleotide; GGG chr11 5382884 5382903 5382887 -
tggggatgagctccaaaacg

SEQ ID NO: 30900 - DNA, 20 bp, Artificial Sequence
  Synthetic oligonucleotide; CAG chr11 5382877 5382896 5382880 -
gagctccaaaacggggcata

SEQ ID NO: 30901 - DNA, 20 bp, Artificial Sequence
  Synthetic oligonucleotide; CAG chr11 5382865 5382884 5382868 -
ggggcatacagatctaaaac

SEQ ID NO: 30902 - DNA, 20 bp, Artificial Sequence
  Synthetic oligonucleotide; AGG chr11 5382864 5382883 5382867 -
gggcatacagatctaaaacc

SEQ ID NO: 30903 - DNA, 20 bp, Artificial Sequence
  Synthetic oligonucleotide; CAG chr11 5382860 5382879 5382863 -
atacagatctaaaaccagga

SEQ ID NO: 30904 - DNA, 20 bp, Artificial Sequence
  Synthetic oligonucleotide; GAG chr11 5382858 5382877 5382861 -
acagatctaaaaccaggaca

SEQ ID NO: 30905 - DNA, 20 bp, Artificial Sequence
  Synthetic oligonucleotide; AAG chr11 5382848 5382867 5382851 -
aaccaggacagagacccatg

SEQ ID NO: 30906 - DNA, 20 bp, Artificial Sequence
  Synthetic oligonucleotide; CAG chr11 5382824 5382843 5382827 -
ttatgacatgccattgtgat

SEQ ID NO: 30907 - DNA, 20 bp, Artificial Sequence
  Synthetic oligonucleotide; CAG chr11 5382813 5382832 5382816 -
cattgtgatcagaccacacc

SEQ ID NO: 30908 - DNA, 20 bp, Artificial Sequence
  Synthetic oligonucleotide; CAG chr11 5382809 5382828 5382812 -
gtgatcagaccacacccaga

SEQ ID NO: 30909 - DNA, 20 bp, Artificial Sequence
  Synthetic oligonucleotide; AAG chr11 5382806 5382825 5382809 -
atcagaccacacccagacag

SEQ ID NO: 30910 - DNA, 20 bp, Artificial Sequence
  Synthetic oligonucleotide; TGG chr11 5382803 5382822 5382806 -
agaccacacccagacagaag

SEQ ID NO: 30911 - DNA, 20 bp, Artificial Sequence
  Synthetic oligonucleotide; CGG chr11 5382787 5382806 5382790 -
gaagtggcaccaccttacac

SEQ ID NO: 30912 - DNA, 20 bp, Artificial Sequence
  Synthetic oligonucleotide; GGG chr11 5382786 5382805 5382789 -
aagtggcaccaccttacacc

SEQ ID NO: 30913 - DNA, 20 bp, Artificial Sequence
  Synthetic oligonucleotide; AAG chr11 5382782 5382801 5382785 -
ggcaccaccttacaccgggt

SEQ ID NO: 30914 - DNA, 20 bp, Artificial Sequence
  Synthetic oligonucleotide; TGG chr11 5382775 5382794 5382778 -
ccttacaccgggtaagtaac

SEQ ID NO: 30915 - DNA, 20 bp, Artificial Sequence
  Synthetic oligonucleotide; TAG chr11 5382768 5382787 5382771 -
ccgggtaagtaactggttgt

SEQ ID NO: 30916 - DNA, 20 bp, Artificial Sequence
  Synthetic oligonucleotide; AGG chr11 5382767 5382786 5382770 -
cgggtaagtaactggttgtt

SEQ ID NO: 30917 - DNA, 20 bp, Artificial Sequence
  Synthetic oligonucleotide; GGG chr11 5382766 5382785 5382769 -
gggtaagtaactggttgtta

SEQ ID NO: 30918 - DNA, 20 bp, Artificial Sequence
  Synthetic oligonucleotide; CAG chr11 5382762 5382781 5382765 -
aagtaactggttgttagggc

SEQ ID NO: 30919 - DNA, 20 bp, Artificial Sequence
  Synthetic oligonucleotide; GAG chr11 5382760 5382779 5382763 -
gtaactggttgttagggcca

SEQ ID NO: 30920 - DNA, 20 bp, Artificial Sequence
  Synthetic oligonucleotide; TAG chr11 5382755 5382774 5382758 -
tggttgttagggccagagtg

SEQ ID NO: 30921 - DNA, 20 bp, Artificial Sequence
  Synthetic oligonucleotide; AGG chr11 5382754 5382773 5382757 -
ggttgttagggccagagtgt

SEQ ID NO: 30922 - DNA, 20 bp, Artificial Sequence
  Synthetic oligonucleotide; GAG chr11 5382752 5382771 5382755 -
ttgttagggccagagtgtag

SEQ ID NO: 30923 - DNA, 20 bp, Artificial Sequence
  Synthetic oligonucleotide; GAG chr11 5382750 5382769 5382753 -
gttagggccagagtgtagga

SEQ ID NO: 30924 - DNA, 20 bp, Artificial Sequence
  Synthetic oligonucleotide; CAG chr11 5382746 5382765 5382749 -
gggccagagtgtaggagagt

SEQ ID NO: 30925 - DNA, 20 bp, Artificial Sequence
  Synthetic oligonucleotide; AGG chr11 5382745 5382764 5382748 -
ggccagagtgtaggagagtc

SEQ ID NO: 30926 - DNA, 20 bp, Artificial Sequence
  Synthetic oligonucleotide; GGG chr11 5382744 5382763 5382747 -
gccagagtgtaggagagtca

SEQ ID NO: 30927 - DNA, 20 bp, Artificial Sequence
  Synthetic oligonucleotide; TAG chr11 5382738 5382757 5382741 -
gtgtaggagagtcagggtga

SEQ ID NO: 30928 - DNA, 20 bp, Artificial Sequence
  Synthetic oligonucleotide; AGG chr11 5382737 5382756 5382740 -
tgtaggagagtcagggtgat

SEQ ID NO: 30929 - DNA, 20 bp, Artificial Sequence
  Synthetic oligonucleotide; AAG chr11 5382732 5382751 5382735 -
gagagtcagggtgataggac

SEQ ID NO: 30930 - DNA, 20 bp, Artificial Sequence
  Synthetic oligonucleotide; CAG chr11 5382726 5382745 5382729 -
cagggtgataggacaagatg

SEQ ID NO: 30931 - DNA, 20 bp, Artificial Sequence
  Synthetic oligonucleotide; GAG chr11 5382724 5382743 5382727 -
gggtgataggacaagatgca

SEQ ID NO: 30932 - DNA, 20 bp, Artificial Sequence
  Synthetic oligonucleotide; GAG chr11 5382722 5382741 5382725 -
gtgataggacaagatgcaga

SEQ ID NO: 30933 - DNA, 20 bp, Artificial Sequence
  Synthetic oligonucleotide; CAG chr11 5382719 5382738 5382722 -
ataggacaagatgcagagag

SEQ ID NO: 30934 - DNA, 20 bp, Artificial Sequence
  Synthetic oligonucleotide; AGG chr11 5382718 5382737 5382721 -
taggacaagatgcagagagc

SEQ ID NO: 30935 - DNA, 20 bp, Artificial Sequence
  Synthetic oligonucleotide; TAG chr11 5382699 5382718 5382702 -
caggatgtcttattaaattg

SEQ ID NO: 30936 - DNA, 20 bp, Artificial Sequence
  Synthetic oligonucleotide; GAG chr11 5382692 5382711 5382695 -
tcttattaaattgtagttat

SEQ ID NO: 30937 - DNA, 20 bp, Artificial Sequence
  Synthetic oligonucleotide; AGG chr11 5382691 5382710 5382694 -
cttattaaattgtagttatg

SEQ ID NO: 30938 - DNA, 20 bp, Artificial Sequence
  Synthetic oligonucleotide; AAG chr11 5382688 5382707 5382691 -
attaaattgtagttatgagg

SEQ ID NO: 30939 - DNA, 20 bp, Artificial Sequence
  Synthetic oligonucleotide; AGG chr11 5382687 5382706 5382690 -
ttaaattgtagttatgagga

SEQ ID NO: 30940 - DNA, 20 bp, Artificial Sequence
  Synthetic oligonucleotide; TGG chr11 5382681 5382700 5382684 -
tgtagttatgaggaaggttc

SEQ ID NO: 30941 - DNA, 20 bp, Artificial Sequence
  Synthetic oligonucleotide; CGG chr11 5382675 5382694 5382678 -
tatgaggaaggttctggctt

SEQ ID NO: 30942 - DNA, 20 bp, Artificial Sequence
  Synthetic oligonucleotide; TAG chr11 5382667 5382686 5382670 -
aggttctggcttcggtacaa

SEQ ID NO: 30943 - DNA, 20 bp, Artificial Sequence
  Synthetic oligonucleotide; AGG chr11 5382666 5382685 5382669 -
ggttctggcttcggtacaat

SEQ ID NO: 30944 - DNA, 20 bp, Artificial Sequence
  Synthetic oligonucleotide; AAG chr11 5382663 5382682 5382666 -
tctggcttcggtacaatagg

SEQ ID NO: 30945 - DNA, 20 bp, Artificial Sequence
  Synthetic oligonucleotide; AGG chr11 5382662 5382681 5382665 -
ctggcttcggtacaatagga

SEQ ID NO: 30946 - DNA, 20 bp, Artificial Sequence
  Synthetic oligonucleotide; GAG chr11 5382660 5382679 5382663 -
ggcttcggtacaataggaag

SEQ ID NO: 30947 - DNA, 20 bp, Artificial Sequence
  Synthetic oligonucleotide; GAG chr11 5382655 5382674 5382658 -
cggtacaataggaaggagct

SEQ ID NO: 30948 - DNA, 20 bp, Artificial Sequence
  Synthetic oligonucleotide; TAG chr11 5382642 5382661 5382645 -
aggagctgagcatcttcatt

SEQ ID NO: 30949 - DNA, 20 bp, Artificial Sequence
  Synthetic oligonucleotide; AGG chr11 5382641 5382660 5382644 -
ggagctgagcatcttcattt

SEQ ID NO: 30950 - DNA, 20 bp, Artificial Sequence
  Synthetic oligonucleotide; TAG chr11 5382634 5382653 5382637 -
agcatcttcatttaggcttg

SEQ ID NO: 30951 - DNA, 20 bp, Artificial Sequence
  Synthetic oligonucleotide; AGG chr11 5382633 5382652 5382636 -
gcatcttcatttaggcttgt

SEQ ID NO: 30952 - DNA, 20 bp, Artificial Sequence
  Synthetic oligonucleotide; GAG chr11 5382631 5382650 5382634 -
atcttcatttaggcttgtag

SEQ ID NO: 30953 - DNA, 20 bp, Artificial Sequence
  Synthetic oligonucleotide; GAG chr11 5382629 5382648 5382632 -
cttcatttaggcttgtagga

SEQ ID NO: 30954 - DNA, 20 bp, Artificial Sequence
  Synthetic oligonucleotide; AGG chr11 5382628 5382647 5382631 -
ttcatttaggcttgtaggag

SEQ ID NO: 30955 - DNA, 20 bp, Artificial Sequence
  Synthetic oligonucleotide; GGG chr11 5382627 5382646 5382630 -
tcatttaggcttgtaggaga

SEQ ID NO: 30956 - DNA, 20 bp, Artificial Sequence
  Synthetic oligonucleotide; CAG chr11 5382615 5382634 5382618 -
gtaggagagggcaccactac

SEQ ID NO: 30957 - DNA, 20 bp, Artificial Sequence
  Synthetic oligonucleotide; CAG chr11 5382604 5382623 5382607 -
caccactaccagaaaaattt

SEQ ID NO: 30958 - DNA, 20 bp, Artificial Sequence
  Synthetic oligonucleotide; AAG chr11 5382584 5382603 5382587 -
cagaaaatcctgcatttatt

SEQ ID NO: 30959 - DNA, 20 bp, Artificial Sequence
  Synthetic oligonucleotide; TAG chr11 5382571 5382590 5382574 -
atttattaagaacatgattt

SEQ ID NO: 30960 - DNA, 20 bp, Artificial Sequence
  Synthetic oligonucleotide; TGG chr11 5382558 5382577 5382561 -
atgattttagcctatttcac

SEQ ID NO: 30961 - DNA, 20 bp, Artificial Sequence
  Synthetic oligonucleotide; GGG chr11 5382557 5382576 5382560 -
tgattttagcctatttcact

SEQ ID NO: 30962 - DNA, 20 bp, Artificial Sequence
  Synthetic oligonucleotide; TAG chr11 5382550 5382569 5382553 -
agcctatttcactgggatcc

SEQ ID NO: 30963 - DNA, 20 bp, Artificial Sequence
  Synthetic oligonucleotide; AAG chr11 5382545 5382564 5382548 -
atttcactgggatcctagcc

SEQ ID NO: 30964 - DNA, 20 bp, Artificial Sequence
  Synthetic oligonucleotide; AGG chr11 5382544 5382563 5382547 -
tttcactgggatcctagcca

SEQ ID NO: 30965 - DNA, 20 bp, Artificial Sequence
  Synthetic oligonucleotide; CAG chr11 5382540 5382559 5382543 -
actgggatcctagccaagga

SEQ ID NO: 30966 - DNA, 20 bp, Artificial Sequence
  Synthetic oligonucleotide; CAG chr11 5382532 5382551 5382535 -
cctagccaaggacagtataa

SEQ ID NO: 30967 - DNA, 20 bp, Artificial Sequence
  Synthetic oligonucleotide; CAG chr11 5382508 5382527 5382511 -
aacaatgctgctattattac

SEQ ID NO: 30968 - DNA, 20 bp, Artificial Sequence
  Synthetic oligonucleotide; CAG chr11 5382502 5382521 5382505 -
gctgctattattaccagcaa

SEQ ID NO: 30969 - DNA, 20 bp, Artificial Sequence
  Synthetic oligonucleotide; CAG chr11 5382482 5382501 5382485 -
cagcaaatattgctattatt

SEQ ID NO: 30970 - DNA, 20 bp, Artificial Sequence
  Synthetic oligonucleotide; AGG chr11 5382481 5382500 5382484 -
agcaaatattgctattattc

SEQ ID NO: 30971 - DNA, 20 bp, Artificial Sequence
  Synthetic oligonucleotide; GGG chr11 5382480 5382499 5382483 -
gcaaatattgctattattca

SEQ ID NO: 30972 - DNA, 20 bp, Artificial Sequence
  Synthetic oligonucleotide; GGG chr11 5382479 5382498 5382482 -
caaatattgctattattcag

SEQ ID NO: 30973 - DNA, 20 bp, Artificial Sequence
  Synthetic oligonucleotide; AAG chr11 5382462 5382481 5382465 -
caggggcatctatcacacat

SEQ ID NO: 30974 - DNA, 20 bp, Artificial Sequence
  Synthetic oligonucleotide; TAG chr11 5382458 5382477 5382461 -
ggcatctatcacacataaga

SEQ ID NO: 30975 - DNA, 20 bp, Artificial Sequence
  Synthetic oligonucleotide; AGG chr11 5382457 5382476 5382460 -
gcatctatcacacataagat

SEQ ID NO: 30976 - DNA, 20 bp, Artificial Sequence
  Synthetic oligonucleotide; TAG chr11 5382441 5382460 5382444 -
agataggaaaacaactatct

SEQ ID NO: 30977 - DNA, 20 bp, Artificial Sequence
  Synthetic oligonucleotide; AAG chr11 5382430 5382449 5382433 -
caactatcttagcgcaatgt

SEQ ID NO: 30978 - DNA, 20 bp, Artificial Sequence
  Synthetic oligonucleotide; GAG chr11 5382428 5382447 5382431 -
actatcttagcgcaatgtaa

SEQ ID NO: 30979 - DNA, 20 bp, Artificial Sequence
  Synthetic oligonucleotide; TGG chr11 5382424 5382443 5382427 -
tcttagcgcaatgtaagaga

SEQ ID NO: 30980 - DNA, 20 bp, Artificial Sequence
  Synthetic oligonucleotide; TGG chr11 5382418 5382437 5382421 -
cgcaatgtaagagatggaca

SEQ ID NO: 30981 - DNA, 20 bp, Artificial Sequence
  Synthetic oligonucleotide; TGG chr11 5382397 5382416 5382400 -
ggcaattatattaatatttg

SEQ ID NO: 30982 - DNA, 20 bp, Artificial Sequence
  Synthetic oligonucleotide; GGG chr11 5382396 5382415 5382399 -
gcaattatattaatatttgt

SEQ ID NO: 30983 - DNA, 20 bp, Artificial Sequence
  Synthetic oligonucleotide; TAG chr11 5382393 5382412 5382396 -
attatattaatatttgtggg

SEQ ID NO: 30984 - DNA, 20 bp, Artificial Sequence
  Synthetic oligonucleotide; TGG chr11 5382386 5382405 5382389 -
taatatttgtgggtagcacc

SEQ ID NO: 30985 - DNA, 20 bp, Artificial Sequence
  Synthetic oligonucleotide; CAG chr11 5382379 5382398 5382382 -
tgtgggtagcacctggccca

SEQ ID NO: 30986 - DNA, 20 bp, Artificial Sequence
  Synthetic oligonucleotide; AGG chr11 5382378 5382397 5382381 -
gtgggtagcacctggcccac

SEQ ID NO: 30987 - DNA, 20 bp, Artificial Sequence
  Synthetic oligonucleotide; GAG chr11 5382374 5382393 5382377 -
gtagcacctggcccacaggt

SEQ ID NO: 30988 - DNA, 20 bp, Artificial Sequence
  Synthetic oligonucleotide; AGG chr11 5382373 5382392 5382376 -
tagcacctggcccacaggtg

SEQ ID NO: 30989 - DNA, 20 bp, Artificial Sequence
  Synthetic oligonucleotide; GGG chr11 5382372 5382391 5382375 -
agcacctggcccacaggtga

SEQ ID NO: 30990 - DNA, 20 bp, Artificial Sequence
  Synthetic oligonucleotide; CAG chr11 5382368 5382387 5382371 -
cctggcccacaggtgagggc

SEQ ID NO: 30991 - DNA, 20 bp, Artificial Sequence
  Synthetic oligonucleotide; AGG chr11 5382367 5382386 5382370 -
ctggcccacaggtgagggcc

SEQ ID NO: 30992 - DNA, 20 bp, Artificial Sequence
  Synthetic oligonucleotide; GGG chr11 5382366 5382385 5382369 -
tggcccacaggtgagggcca

SEQ ID NO: 30993 - DNA, 20 bp, Artificial Sequence
  Synthetic oligonucleotide; AAG chr11 5382363 5382382 5382366 -
cccacaggtgagggccaggg

SEQ ID NO: 30994 - DNA, 20 bp, Artificial Sequence
  Synthetic oligonucleotide; AGG chr11 5382362 5382381 5382365 -
ccacaggtgagggccaggga

SEQ ID NO: 30995 - DNA, 20 bp, Artificial Sequence
  Synthetic oligonucleotide; GAG chr11 5382350 5382369 5382353 -
gccagggaaggccccaacct

SEQ ID NO: 30996 - DNA, 20 bp, Artificial Sequence
  Synthetic oligonucleotide; AAG chr11 5382342 5382361 5382345 -
aggccccaacctgagctatg

SEQ ID NO: 30997 - DNA, 20 bp, Artificial Sequence
  Synthetic oligonucleotide; AAG chr11 5382332 5382351 5382335 -
ctgagctatgaagactaatt

SEQ ID NO: 30998 - DNA, 20 bp, Artificial Sequence
  Synthetic oligonucleotide; CAG chr11 5382320 5382339 5382323 -
gactaattaagaatcaacca

SEQ ID NO: 30999 - DNA, 20 bp, Artificial Sequence
  Synthetic oligonucleotide; TAG chr11 5382316 5382335 5382319 -
aattaagaatcaaccacaga

SEQ ID NO: 31000 - DNA, 20 bp, Artificial Sequence
  Synthetic oligonucleotide; AGG chr11 5382315 5382334 5382318 -
attaagaatcaaccacagat

SEQ ID NO: 31001 - DNA, 20 bp, Artificial Sequence
  Synthetic oligonucleotide; GGG chr11 5382314 5382333 5382317 -
ttaagaatcaaccacagata

SEQ ID NO: 31002 - DNA, 20 bp, Artificial Sequence
  Synthetic oligonucleotide; TAG chr11 5382306 5382325 5382309 -
caaccacagatagggcttta

SEQ ID NO: 31003 - DNA, 20 bp, Artificial Sequence
  Synthetic oligonucleotide; AAG chr11 5382302 5382321 5382305 -
cacagatagggctttataga

SEQ ID NO: 31004 - DNA, 20 bp, Artificial Sequence
  Synthetic oligonucleotide; AGG chr11 5382301 5382320 5382304 -
acagatagggctttatagaa

SEQ ID NO: 31005 - DNA, 20 bp, Artificial Sequence
  Synthetic oligonucleotide; AAG chr11 5382288 5382307 5382291 -
tatagaaaggtatttccaaa

SEQ ID NO: 31006 - DNA, 20 bp, Artificial Sequence
  Synthetic oligonucleotide; AGG chr11 5382287 5382306 5382290 -
atagaaaggtatttccaaaa

SEQ ID NO: 31007 - DNA, 20 bp, Artificial Sequence
  Synthetic oligonucleotide; GAG chr11 5382285 5382304 5382288 -
agaaaggtatttccaaaaag

SEQ ID NO: 31008 - DNA, 20 bp, Artificial Sequence
  Synthetic oligonucleotide; AGG chr11 5382284 5382303 5382287 -
gaaaggtatttccaaaaagg

SEQ ID NO: 31009 - DNA, 20 bp, Artificial Sequence
  Synthetic oligonucleotide; GGG chr11 5382283 5382302 5382286 -
aaaggtatttccaaaaagga

SEQ ID NO: 31010 - DNA, 20 bp, Artificial Sequence
  Synthetic oligonucleotide; GGG chr11 5382282 5382301 5382285 -
aaggtatttccaaaaaggag

SEQ ID NO: 31011 - DNA, 20 bp, Artificial Sequence
  Synthetic oligonucleotide; TAG chr11 5382279 5382298 5382282 -
gtatttccaaaaaggagggg

SEQ ID NO: 31012 - DNA, 20 bp, Artificial Sequence
  Synthetic oligonucleotide; AAG chr11 5382273 5382292 5382276 -
ccaaaaaggaggggtagtgt

SEQ ID NO: 31013 - DNA, 20 bp, Artificial Sequence
  Synthetic oligonucleotide; AAG chr11 5382269 5382288 5382272 -
aaaggaggggtagtgtaagc

SEQ ID NO: 31014 - DNA, 20 bp, Artificial Sequence
  Synthetic oligonucleotide; AGG chr11 5382268 5382287 5382271 -
aaggaggggtagtgtaagca

SEQ ID NO: 31015 - DNA, 20 bp, Artificial Sequence
  Synthetic oligonucleotide; GGG chr11 5382267 5382286 5382270 -
aggaggggtagtgtaagcaa

SEQ ID NO: 31016 - DNA, 20 bp, Artificial Sequence
  Synthetic oligonucleotide; TGG chr11 5382262 5382281 5382265 -
gggtagtgtaagcaagggca

SEQ ID NO: 31017 - DNA, 20 bp, Artificial Sequence
  Synthetic oligonucleotide; GAG chr11 5382260 5382279 5382263 -
gtagtgtaagcaagggcatg

SEQ ID NO: 31018 - DNA, 20 bp, Artificial Sequence
  Synthetic oligonucleotide; AGG chr11 5382259 5382278 5382262 -
tagtgtaagcaagggcatgg

SEQ ID NO: 31019 - DNA, 20 bp, Artificial Sequence
  Synthetic oligonucleotide; GAG chr11 5382255 5382274 5382258 -
gtaagcaagggcatggaggt

SEQ ID NO: 31020 - DNA, 20 bp, Artificial Sequence
  Synthetic oligonucleotide; AGG chr11 5382254 5382273 5382257 -
taagcaagggcatggaggtg

SEQ ID NO: 31021 - DNA, 20 bp, Artificial Sequence
  Synthetic oligonucleotide; AAG chr11 5382249 5382268 5382252 -
aagggcatggaggtgaggaa

SEQ ID NO: 31022 - DNA, 20 bp, Artificial Sequence
  Synthetic oligonucleotide; GAG chr11 5382231 5382250 5382234 -
aaaagttgtttatgtgtttt

SEQ ID NO: 31023 - DNA, 20 bp, Artificial Sequence
  Synthetic oligonucleotide; AAG chr11 5382222 5382241 5382225 -
ttatgtgttttgagaactat

SEQ ID NO: 31024 - DNA, 20 bp, Artificial Sequence
  Synthetic oligonucleotide; CGG chr11 5382213 5382232 5382216 -
ttgagaactataagattttc

SEQ ID NO: 31025 - DNA, 20 bp, Artificial Sequence
  Synthetic oligonucleotide; AAG chr11 5382192 5382211 5382195 -
ggtgatcaaatataacattt

SEQ ID NO: 31026 - DNA, 20 bp, Artificial Sequence
  Synthetic oligonucleotide; GAG chr11 5382190 5382209 5382193 -
tgatcaaatataacatttaa

SEQ ID NO: 31027 - DNA, 20 bp, Artificial Sequence
  Synthetic oligonucleotide; GAG chr11 5382188 5382207 5382191 -
atcaaatataacatttaaga

SEQ ID NO: 31028 - DNA, 20 bp, Artificial Sequence
  Synthetic oligonucleotide; TGG chr11 5382176 5382195 5382179 -
atttaagagagttaatacct

SEQ ID NO: 31029 - DNA, 20 bp, Artificial Sequence
  Synthetic oligonucleotide; CAG chr11 5382166 5382185 5382169 -
gttaataccttggaataaaa

SEQ ID NO: 31030 - DNA, 20 bp, Artificial Sequence
  Synthetic oligonucleotide; TAG chr11 5382163 5382182 5382166 -
aataccttggaataaaacag

SEQ ID NO: 31031 - DNA, 20 bp, Artificial Sequence
  Synthetic oligonucleotide; GAG chr11 5382161 5382180 5382164 -
taccttggaataaaacagta

SEQ ID NO: 31032 - DNA, 20 bp, Artificial Sequence
  Synthetic oligonucleotide; AGG chr11 5382160 5382179 5382163 -
accttggaataaaacagtag

SEQ ID NO: 31033 - DNA, 20 bp, Artificial Sequence
  Synthetic oligonucleotide; TAG chr11 5382157 5382176 5382160 -
ttggaataaaacagtagagg

SEQ ID NO: 31034 - DNA, 20 bp, Artificial Sequence
  Synthetic oligonucleotide; AGG chr11 5382156 5382175 5382159 -
tggaataaaacagtagaggt

SEQ ID NO: 31035 - DNA, 20 bp, Artificial Sequence
  Synthetic oligonucleotide; CAG chr11 5382153 5382172 5382156 -
aataaaacagtagaggtagg

SEQ ID NO: 31036 - DNA, 20 bp, Artificial Sequence
  Synthetic oligonucleotide; AGG chr11 5382152 5382171 5382155 -
ataaaacagtagaggtaggc

SEQ ID NO: 31037 - DNA, 20 bp, Artificial Sequence
  Synthetic oligonucleotide; GGG chr11 5382151 5382170 5382154 -
taaaacagtagaggtaggca

SEQ ID NO: 31038 - DNA, 20 bp, Artificial Sequence
  Synthetic oligonucleotide; GGG chr11 5382150 5382169 5382153 -
aaaacagtagaggtaggcag

SEQ ID NO: 31039 - DNA, 20 bp, Artificial Sequence
  Synthetic oligonucleotide; AAG chr11 5382146 5382165 5382149 -
cagtagaggtaggcaggggc

SEQ ID NO: 31040 - DNA, 20 bp, Artificial Sequence
  Synthetic oligonucleotide; GAG chr11 5382134 5382153 5382137 -
gcaggggcaagaccctgaat

SEQ ID NO: 31041 - DNA, 20 bp, Artificial Sequence
  Synthetic oligonucleotide; TGG chr11 5382111 5382130 5382114 -
tttatatgacatgtcaaaca

SEQ ID NO: 31042 - DNA, 20 bp, Artificial Sequence
  Synthetic oligonucleotide; TGG chr11 5382096 5382115 5382099 -
aaacatggtacacattttga

SEQ ID NO: 31043 - DNA, 20 bp, Artificial Sequence
  Synthetic oligonucleotide; TGG chr11 5382092 5382111 5382095 -
atggtacacattttgatggt

SEQ ID NO: 31044 - DNA, 20 bp, Artificial Sequence
  Synthetic oligonucleotide; GGG chr11 5382091 5382110 5382094 -
tggtacacattttgatggtt

SEQ ID NO: 31045 - DNA, 20 bp, Artificial Sequence
  Synthetic oligonucleotide; AAG chr11 5382082 5382101 5382085 -
ttttgatggttgggtttaaa

SEQ ID NO: 31046 - DNA, 20 bp, Artificial Sequence
  Synthetic oligonucleotide; AGG chr11 5382081 5382100 5382084 -
tttgatggttgggtttaaaa

SEQ ID NO: 31047 - DNA, 20 bp, Artificial Sequence
  Synthetic oligonucleotide; CAG chr11 5382078 5382097 5382081 -
gatggttgggtttaaaaagg

SEQ ID NO: 31048 - DNA, 20 bp, Artificial Sequence
  Synthetic oligonucleotide; AGG chr11 5382077 5382096 5382080 -
atggttgggtttaaaaaggc

SEQ ID NO: 31049 - DNA, 20 bp, Artificial Sequence
  Synthetic oligonucleotide; GAG chr11 5382075 5382094 5382078 -
ggttgggtttaaaaaggcag

SEQ ID NO: 31050 - DNA, 20 bp, Artificial Sequence
  Synthetic oligonucleotide; CAG chr11 5382055 5382074 5382058 -
gagataacaatcatattttc

SEQ ID NO: 31051 - DNA, 20 bp, Artificial Sequence
  Synthetic oligonucleotide; GAG chr11 5382053 5382072 5382056 -
gataacaatcatattttcca

SEQ ID NO: 31052 - DNA, 20 bp, Artificial Sequence
  Synthetic oligonucleotide; CAG chr11 5382032 5382051 5382035 -
agtacattgttaacaatatg

SEQ ID NO: 31053 - DNA, 20 bp, Artificial Sequence
  Synthetic oligonucleotide; AGG chr11 5382031 5382050 5382034 -
gtacattgttaacaatatgc

SEQ ID NO: 31054 - DNA, 20 bp, Artificial Sequence
  Synthetic oligonucleotide; AAG chr11 5382028 5382047 5382031 -
cattgttaacaatatgcagg

SEQ ID NO: 31055 - DNA, 20 bp, Artificial Sequence
  Synthetic oligonucleotide; AGG chr11 5382027 5382046 5382030 -
attgttaacaatatgcagga

SEQ ID NO: 31056 - DNA, 20 bp, Artificial Sequence
  Synthetic oligonucleotide; AAG chr11 5382019 5382038 5382022 -
caatatgcaggaaggattta

SEQ ID NO: 31057 - DNA, 20 bp, Artificial Sequence
  Synthetic oligonucleotide; TGG chr11 5382009 5382028 5382012 -
gaaggatttaaagtctgcac

SEQ ID NO: 31058 - DNA, 20 bp, Artificial Sequence
  Synthetic oligonucleotide; CAG chr11 5382003 5382022 5382006 -
tttaaagtctgcactggaaa

SEQ ID NO: 31059 - DNA, 20 bp, Artificial Sequence
  Synthetic oligonucleotide; TGG chr11 5381991 5382010 5381994 -
actggaaacagatgttattt

SEQ ID NO: 31060 - DNA, 20 bp, Artificial Sequence
  Synthetic oligonucleotide; TGG chr11 5381984 5382003 5381987 -
acagatgttattttggtgta

SEQ ID NO: 31061 - DNA, 20 bp, Artificial Sequence
  Synthetic oligonucleotide; GAG chr11 5381982 5382001 5381985 -
agatgttattttggtgtatg

SEQ ID NO: 31062 - DNA, 20 bp, Artificial Sequence
  Synthetic oligonucleotide; TGG chr11 5381978 5381997 5381981 -
gttattttggtgtatggagc

SEQ ID NO: 31063 - DNA, 20 bp, Artificial Sequence
  Synthetic oligonucleotide; CAG chr11 5381972 5381991 5381975 -
ttggtgtatggagctggatg

SEQ ID NO: 31064 - DNA, 20 bp, Artificial Sequence
  Synthetic oligonucleotide; CAG chr11 5381957 5381976 5381960 -
ggatgcagatatgtaattga

SEQ ID NO: 31065 - DNA, 20 bp, Artificial Sequence
  Synthetic oligonucleotide; TAG chr11 5381945 5381964 5381948 -
gtaattgacagctttttacg

SEQ ID NO: 31066 - DNA, 20 bp, Artificial Sequence
  Synthetic oligonucleotide; TAG chr11 5381927 5381946 5381930 -
cgtagataaacaatactgtt

SEQ ID NO: 31067 - DNA, 20 bp, Artificial Sequence
  Synthetic oligonucleotide; TGG chr11 5381924 5381943 5381927 -
agataaacaatactgtttag

SEQ ID NO: 31068 - DNA, 20 bp, Artificial Sequence
  Synthetic oligonucleotide; TAG chr11 5381908 5381927 5381911 -
ttagtggataacctaccatt

SEQ ID NO: 31069 - DNA, 20 bp, Artificial Sequence
  Synthetic oligonucleotide; GAG chr11 5381906 5381925 5381909 -
agtggataacctaccattta

SEQ ID NO: 31070 - DNA, 20 bp, Artificial Sequence
  Synthetic oligonucleotide; TAG chr11 5381860 5381879 5381863 -
ttaaactaacatctgtataa

SEQ ID NO: 31071 - DNA, 20 bp, Artificial Sequence
  Synthetic oligonucleotide; AAG chr11 5381824 5381843 5381827 -
ttctctgaattatataattg

SEQ ID NO: 31072 - DNA, 20 bp, Artificial Sequence
  Synthetic oligonucleotide; AGG chr11 5381823 5381842 5381826 -
tctctgaattatataattga

SEQ ID NO: 31073 - DNA, 20 bp, Artificial Sequence
  Synthetic oligonucleotide; CAG chr11 5381818 5381837 5381821 -
gaattatataattgaaggac

SEQ ID NO: 31074 - DNA, 20 bp, Artificial Sequence
  Synthetic oligonucleotide; AAG chr11 5381810 5381829 5381813 -
taattgaaggaccagtttcc

SEQ ID NO: 31075 - DNA, 20 bp, Artificial Sequence
  Synthetic oligonucleotide; TAG chr11 5381804 5381823 5381807 -
aaggaccagtttccaagcaa

SEQ ID NO: 31076 - DNA, 20 bp, Artificial Sequence
  Synthetic oligonucleotide; AAG chr11 5381780 5381799 5381783 -
tttatttgaaaaccaaatga

SEQ ID NO: 31077 - DNA, 20 bp, Artificial Sequence
  Synthetic oligonucleotide; CAG chr11 5381773 5381792 5381776 -
gaaaaccaaatgaaagaact

SEQ ID NO: 31078 - DNA, 20 bp, Artificial Sequence
  Synthetic oligonucleotide; TAG chr11 5381737 5381756 5381740 -
ttattgctctaaatgacctt

SEQ ID NO: 31079 - DNA, 20 bp, Artificial Sequence
  Synthetic oligonucleotide; TAG chr11 5381711 5381730 5381714 -
tgttttatcatatcacaaaa

SEQ ID NO: 31080 - DNA, 20 bp, Artificial Sequence
  Synthetic oligonucleotide; AAG chr11 5381699 5381718 5381702 -
tcacaaaatagtcctctttg

SEQ ID NO: 31081 - DNA, 20 bp, Artificial Sequence
  Synthetic oligonucleotide; AAG chr11 5381645 5381664 5381648 -
aattttcattgacgtgcatt

SEQ ID NO: 31082 - DNA, 20 bp, Artificial Sequence
  Synthetic oligonucleotide; GAG chr11 5381632 5381651 5381635 -
gtgcattaagtgcgtcctgt

SEQ ID NO: 31083 - DNA, 20 bp, Artificial Sequence
  Synthetic oligonucleotide; AAG chr11 5381618 5381637 5381621 -
tcctgtgagaaactctgatc

SEQ ID NO: 31084 - DNA, 20 bp, Artificial Sequence
  Synthetic oligonucleotide; AAG chr11 5381609 5381628 5381612 -
aaactctgatcaagaacttg

SEQ ID NO: 31085 - DNA, 20 bp, Artificial Sequence
  Synthetic oligonucleotide; TAG chr11 5381605 5381624 5381608 -
tctgatcaagaacttgaaga

SEQ ID NO: 31086 - DNA, 20 bp, Artificial Sequence
  Synthetic oligonucleotide; CAG chr11 5381601 5381620 5381604 -
atcaagaacttgaagataga

SEQ ID NO: 31087 - DNA, 20 bp, Artificial Sequence
  Synthetic oligonucleotide; TGG chr11 5381586 5381605 5381589 -
atagacagattaacatgtca

SEQ ID NO: 31088 - DNA, 20 bp, Artificial Sequence
  Synthetic oligonucleotide; AAG chr11 5381570 5381589 5381573 -
gtcatggtcttgcctttatg

SEQ ID NO: 31089 - DNA, 20 bp, Artificial Sequence
  Synthetic oligonucleotide; GAG chr11 5381559 5381578 5381562 -
gcctttatgaagctcacatt

SEQ ID NO: 31090 - DNA, 20 bp, Artificial Sequence
  Synthetic oligonucleotide; AAG chr11 5381554 5381573 5381557 -
tatgaagctcacattgagta

SEQ ID NO: 31091 - DNA, 20 bp, Artificial Sequence
  Synthetic oligonucleotide; TAG chr11 5381547 5381566 5381550 -
ctcacattgagtaaagatgt

SEQ ID NO: 31092 - DNA, 20 bp, Artificial Sequence
  Synthetic oligonucleotide; AAG chr11 5381533 5381552 5381536 -
agatgttagattgttcaacg

SEQ ID NO: 31093 - DNA, 20 bp, Artificial Sequence
  Synthetic oligonucleotide; TAG chr11 5381521 5381540 5381524 -
gttcaacgaagtttccaaaa

SEQ ID NO: 31094 - DNA, 20 bp, Artificial Sequence
  Synthetic oligonucleotide; AGG chr11 5381520 5381539 5381523 -
ttcaacgaagtttccaaaat

SEQ ID NO: 31095 - DNA, 20 bp, Artificial Sequence
  Synthetic oligonucleotide; GGG chr11 5381519 5381538 5381522 -
tcaacgaagtttccaaaata

SEQ ID NO: 31096 - DNA, 20 bp, Artificial Sequence
  Synthetic oligonucleotide; TAG chr11 5381512 5381531 5381515 -
agtttccaaaatagggtcac

SEQ ID NO: 31097 - DNA, 20 bp, Artificial Sequence
  Synthetic oligonucleotide; CAG chr11 5381507 5381526 5381510 -
ccaaaatagggtcactagcc

SEQ ID NO: 31098 - DNA, 20 bp, Artificial Sequence
  Synthetic oligonucleotide; AGG chr11 5381506 5381525 5381509 -
caaaatagggtcactagccc

SEQ ID NO: 31099 - DNA, 20 bp, Artificial Sequence
  Synthetic oligonucleotide; TAG chr11 5381502 5381521 5381505 -
atagggtcactagcccaggc

SEQ ID NO: 31100 - DNA, 20 bp, Artificial Sequence
  Synthetic oligonucleotide; AGG chr11 5381501 5381520 5381504 -
tagggtcactagcccaggct

SEQ ID NO: 31101 - DNA, 20 bp, Artificial Sequence
  Synthetic oligonucleotide; AAG chr11 5381498 5381517 5381501 -
ggtcactagcccaggctagg

SEQ ID NO: 31102 - DNA, 20 bp, Artificial Sequence
  Synthetic oligonucleotide; AGG chr11 5381497 5381516 5381500 -
gtcactagcccaggctagga

SEQ ID NO: 31103 - DNA, 20 bp, Artificial Sequence
  Synthetic oligonucleotide; CAG chr11 5381494 5381513 5381497 -
actagcccaggctaggaagg

SEQ ID NO: 31104 - DNA, 20 bp, Artificial Sequence
  Synthetic oligonucleotide; GAG chr11 5381492 5381511 5381495 -
tagcccaggctaggaaggca

SEQ ID NO: 31105 - DNA, 20 bp, Artificial Sequence
  Synthetic oligonucleotide; AGG chr11 5381491 5381510 5381494 -
agcccaggctaggaaggcag

SEQ ID NO: 31106 - DNA, 20 bp, Artificial Sequence
  Synthetic oligonucleotide; TAG chr11 5381488 5381507 5381491 -
ccaggctaggaaggcagagg

SEQ ID NO: 31107 - DNA, 20 bp, Artificial Sequence
  Synthetic oligonucleotide; AAG chr11 5381479 5381498 5381482 -
gaaggcagaggtagtttctg

SEQ ID NO: 31108 - DNA, 20 bp, Artificial Sequence
  Synthetic oligonucleotide; TGG chr11 5381474 5381493 5381477 -
cagaggtagtttctgaagcc

SEQ ID NO: 31109 - DNA, 20 bp, Artificial Sequence
  Synthetic oligonucleotide; GAG chr11 5381472 5381491 5381475 -
gaggtagtttctgaagcctg

SEQ ID NO: 31110 - DNA, 20 bp, Artificial Sequence
  Synthetic oligonucleotide; AGG chr11 5381471 5381490 5381474 -
aggtagtttctgaagcctgg

SEQ ID NO: 31111 - DNA, 20 bp, Artificial Sequence
  Synthetic oligonucleotide; AAG chr11 5381466 5381485 5381469 -
gtttctgaagcctggaggcc

SEQ ID NO: 31112 - DNA, 20 bp, Artificial Sequence
  Synthetic oligonucleotide; GAG chr11 5381464 5381483 5381467 -
ttctgaagcctggaggccaa

SEQ ID NO: 31113 - DNA, 20 bp, Artificial Sequence
  Synthetic oligonucleotide; AGG chr11 5381463 5381482 5381466 -
tctgaagcctggaggccaag

SEQ ID NO: 31114 - DNA, 20 bp, Artificial Sequence
  Synthetic oligonucleotide; GAG chr11 5381461 5381480 5381464 -
tgaagcctggaggccaagag

SEQ ID NO: 31115 - DNA, 20 bp, Artificial Sequence
  Synthetic oligonucleotide; AGG chr11 5381460 5381479 5381463 -
gaagcctggaggccaagagg

SEQ ID NO: 31116 - DNA, 20 bp, Artificial Sequence
  Synthetic oligonucleotide; TGG chr11 5381453 5381472 5381456 -
ggaggccaagaggaggatga

SEQ ID NO: 31117 - DNA, 20 bp, Artificial Sequence
  Synthetic oligonucleotide; GGG chr11 5381452 5381471 5381455 -
gaggccaagaggaggatgat

SEQ ID NO: 31118 - DNA, 20 bp, Artificial Sequence
  Synthetic oligonucleotide; GGG chr11 5381451 5381470 5381454 -
aggccaagaggaggatgatg

SEQ ID NO: 31119 - DNA, 20 bp, Artificial Sequence
  Synthetic oligonucleotide; AAG chr11 5381442 5381461 5381445 -
ggaggatgatggggacaatg

SEQ ID NO: 31120 - DNA, 20 bp, Artificial Sequence
  Synthetic oligonucleotide; AGG chr11 5381441 5381460 5381444 -
gaggatgatggggacaatga

SEQ ID NO: 31121 - DNA, 20 bp, Artificial Sequence
  Synthetic oligonucleotide; GAG chr11 5381439 5381458 5381442 -
ggatgatggggacaatgaag

SEQ ID NO: 31122 - DNA, 20 bp, Artificial Sequence
  Synthetic oligonucleotide; AAG chr11 5381435 5381454 5381438 -
gatggggacaatgaaggagc

SEQ ID NO: 31123 - DNA, 20 bp, Artificial Sequence
  Synthetic oligonucleotide; CGG chr11 5381428 5381447 5381431 -
acaatgaaggagcaagtcct

SEQ ID NO: 31124 - DNA, 20 bp, Artificial Sequence
  Synthetic oligonucleotide; TGG chr11 5381408 5381427 5381411 -
cggacctatctctatcactg

SEQ ID NO: 31125 - DNA, 20 bp, Artificial Sequence
  Synthetic oligonucleotide; GGG chr11 5381407 5381426 5381410 -
ggacctatctctatcactgt

SEQ ID NO: 31126 - DNA, 20 bp, Artificial Sequence
  Synthetic oligonucleotide; TAG chr11 5381389 5381408 5381392 -
gtgggtaatcatgcgaatat

SEQ ID NO: 31127 - DNA, 20 bp, Artificial Sequence
  Synthetic oligonucleotide; AGG chr11 5381388 5381407 5381391 -
tgggtaatcatgcgaatatt

SEQ ID NO: 31128 - DNA, 20 bp, Artificial Sequence
  Synthetic oligonucleotide; AAG chr11 5381383 5381402 5381386 -
aatcatgcgaatattaggtg

SEQ ID NO: 31129 - DNA, 20 bp, Artificial Sequence
  Synthetic oligonucleotide; TGG chr11 5381374 5381393 5381377 -
aatattaggtgaagtgaatg

SEQ ID NO: 31130 - DNA, 20 bp, Artificial Sequence
  Synthetic oligonucleotide; GGG chr11 5381373 5381392 5381376 -
atattaggtgaagtgaatgt

SEQ ID NO: 31131 - DNA, 20 bp, Artificial Sequence
  Synthetic oligonucleotide; TGG chr11 5381363 5381382 5381366 -
aagtgaatgtgggtgcatga

SEQ ID NO: 31132 - DNA, 20 bp, Artificial Sequence
  Synthetic oligonucleotide; TGG chr11 5381359 5381378 5381362 -
gaatgtgggtgcatgatggt

SEQ ID NO: 31133 - DNA, 20 bp, Artificial Sequence
  Synthetic oligonucleotide; GGG chr11 5381358 5381377 5381361 -
aatgtgggtgcatgatggtt

SEQ ID NO: 31134 - DNA, 20 bp, Artificial Sequence
  Synthetic oligonucleotide; GGG chr11 5381357 5381376 5381360 -
atgtgggtgcatgatggttg

SEQ ID NO: 31135 - DNA, 20 bp, Artificial Sequence
  Synthetic oligonucleotide; AAG chr11 5381354 5381373 5381357 -
tgggtgcatgatggttgggg

SEQ ID NO: 31136 - DNA, 20 bp, Artificial Sequence
  Synthetic oligonucleotide; AGG chr11 5381353 5381372 5381356 -
gggtgcatgatggttgggga

SEQ ID NO: 31137 - DNA, 20 bp, Artificial Sequence
  Synthetic oligonucleotide; AAG chr11 5381348 5381367 5381351 -
catgatggttggggaaggtg

SEQ ID NO: 31138 - DNA, 20 bp, Artificial Sequence
  Synthetic oligonucleotide; TAG chr11 5381334 5381353 5381337 -
aaggtgaagtatcaacacat

SEQ ID NO: 31139 - DNA, 20 bp, Artificial Sequence
  Synthetic oligonucleotide; GAG chr11 5381328 5381347 5381331 -
aagtatcaacacattagtgt

SEQ ID NO: 31140 - DNA, 20 bp, Artificial Sequence
  Synthetic oligonucleotide; AGG chr11 5381327 5381346 5381330 -
agtatcaacacattagtgtg

SEQ ID NO: 31141 - DNA, 20 bp, Artificial Sequence
  Synthetic oligonucleotide; CAG chr11 5381320 5381339 5381323 -
acacattagtgtgaggcatt

SEQ ID NO: 31142 - DNA, 20 bp, Artificial Sequence
  Synthetic oligonucleotide; AGG chr11 5381319 5381338 5381322 -
cacattagtgtgaggcattc

SEQ ID NO: 31143 - DNA, 20 bp, Artificial Sequence
  Synthetic oligonucleotide; AAG chr11 5381305 5381324 5381308 -
gcattcaggccttaaccttt

SEQ ID NO: 31144 - DNA, 20 bp, Artificial Sequence
  Synthetic oligonucleotide; AGG chr11 5381304 5381323 5381307 -
cattcaggccttaaccttta

SEQ ID NO: 31145 - DNA, 20 bp, Artificial Sequence
  Synthetic oligonucleotide; TAG chr11 5381298 5381317 5381301 -
ggccttaacctttaaggtat

SEQ ID NO: 31146 - DNA, 20 bp, Artificial Sequence
  Synthetic oligonucleotide; AAG chr11 5381283 5381302 5381286 -
ggtattagaattcattatta

SEQ ID NO: 31147 - DNA, 20 bp, Artificial Sequence
  Synthetic oligonucleotide; AAG chr11 5381261 5381280 5381264 -
gaatctaaatccattactaa

SEQ ID NO: 31148 - DNA, 20 bp, Artificial Sequence
  Synthetic oligonucleotide; AAG chr11 5381254 5381273 5381257 -
aatccattactaaaagtgaa

SEQ ID NO: 31149 - DNA, 20 bp, Artificial Sequence
  Synthetic oligonucleotide; CAG chr11 5381240 5381259 5381243 -
agtgaaaagtgtcactgtaa

SEQ ID NO: 31150 - DNA, 20 bp, Artificial Sequence
  Synthetic oligonucleotide; TGG chr11 5381213 5381232 5381216 -
cctatttgttaatgtgcaaa

SEQ ID NO: 31151 - DNA, 20 bp, Artificial Sequence
  Synthetic oligonucleotide; GAG chr11 5381176 5381195 5381179 -
aatattgtttgtgtgtgtgt

SEQ ID NO: 31152 - DNA, 20 bp, Artificial Sequence
  Synthetic oligonucleotide; GAG chr11 5381174 5381193 5381177 -
tattgtttgtgtgtgtgtga

SEQ ID NO: 31153 - DNA, 20 bp, Artificial Sequence
  Synthetic oligonucleotide; GAG chr11 5381172 5381191 5381175 -
ttgtttgtgtgtgtgtgaga

SEQ ID NO: 31154 - DNA, 20 bp, Artificial Sequence
  Synthetic oligonucleotide; GAG chr11 5381170 5381189 5381173 -
gtttgtgtgtgtgtgagaga

SEQ ID NO: 31155 - DNA, 20 bp, Artificial Sequence
  Synthetic oligonucleotide; GAG chr11 5381168 5381187 5381171 -
ttgtgtgtgtgtgagagaga

SEQ ID NO: 31156 - DNA, 20 bp, Artificial Sequence
  Synthetic oligonucleotide; GAG chr11 5381166 5381185 5381169 -
gtgtgtgtgtgagagagaga

SEQ ID NO: 31157 - DNA, 20 bp, Artificial Sequence
  Synthetic oligonucleotide; GAG chr11 5381164 5381183 5381167 -
gtgtgtgtgagagagagaga

SEQ ID NO: 31158 - DNA, 20 bp, Artificial Sequence
  Synthetic oligonucleotide; CAG chr11 5381158 5381177 5381161 -
gtgagagagagagagagaaa

SEQ ID NO: 31159 - DNA, 20 bp, Artificial Sequence
  Synthetic oligonucleotide; GAG chr11 5381154 5381173 5381157 -
gagagagagagagaaacagc

SEQ ID NO: 31160 - DNA, 20 bp, Artificial Sequence
  Synthetic oligonucleotide; GAG chr11 5381150 5381169 5381153 -
gagagagagaaacagcgagc

SEQ ID NO: 31161 - DNA, 20 bp, Artificial Sequence
  Synthetic oligonucleotide; CAG chr11 5381144 5381163 5381147 -
gagaaacagcgagcgagcga

SEQ ID NO: 31162 - DNA, 20 bp, Artificial Sequence
  Synthetic oligonucleotide; GAG chr11 5381142 5381161 5381145 -
gaaacagcgagcgagcgaca

SEQ ID NO: 31163 - DNA, 20 bp, Artificial Sequence
  Synthetic oligonucleotide; GAG chr11 5381140 5381159 5381143 -
aacagcgagcgagcgacaga

SEQ ID NO: 31164 - DNA, 20 bp, Artificial Sequence
  Synthetic oligonucleotide; GAG chr11 5381138 5381157 5381141 -
cagcgagcgagcgacagaga

SEQ ID NO: 31165 - DNA, 20 bp, Artificial Sequence
  Synthetic oligonucleotide; GAG chr11 5381136 5381155 5381139 -
gcgagcgagcgacagagaga

SEQ ID NO: 31166 - DNA, 20 bp, Artificial Sequence
  Synthetic oligonucleotide; GAG chr11 5381134 5381153 5381137 -
gagcgagcgacagagagaga

SEQ ID NO: 31167 - DNA, 20 bp, Artificial Sequence
  Synthetic oligonucleotide; AGG chr11 5381133 5381152 5381136 -
agcgagcgacagagagagag

SEQ ID NO: 31168 - DNA, 20 bp, Artificial Sequence
  Synthetic oligonucleotide; TGG chr11 5381130 5381149 5381133 -
gagcgacagagagagagagg

SEQ ID NO: 31169 - DNA, 20 bp, Artificial Sequence
  Synthetic oligonucleotide; GGG chr11 5381129 5381148 5381132 -
agcgacagagagagagaggt

SEQ ID NO: 31170 - DNA, 20 bp, Artificial Sequence
  Synthetic oligonucleotide; GGG chr11 5381128 5381147 5381131 -
gcgacagagagagagaggtg

SEQ ID NO: 31171 - DNA, 20 bp, Artificial Sequence
  Synthetic oligonucleotide; TGG chr11 5381125 5381144 5381128 -
acagagagagagaggtgggg

SEQ ID NO: 31172 - DNA, 20 bp, Artificial Sequence
  Synthetic oligonucleotide; GGG chr11 5381124 5381143 5381127 -
cagagagagagaggtggggt

SEQ ID NO: 31173 - DNA, 20 bp, Artificial Sequence
  Synthetic oligonucleotide; GGG chr11 5381123 5381142 5381126 -
agagagagagaggtggggtg

SEQ ID NO: 31174 - DNA, 20 bp, Artificial Sequence
  Synthetic oligonucleotide; GGG chr11 5381122 5381141 5381125 -
gagagagagaggtggggtgg

SEQ ID NO: 31175 - DNA, 20 bp, Artificial Sequence
  Synthetic oligonucleotide; TGG chr11 5381117 5381136 5381120 -
agagaggtggggtgggggta

SEQ ID NO: 31176 - DNA, 20 bp, Artificial Sequence
  Synthetic oligonucleotide; TGG chr11 5381114 5381133 5381117 -
gaggtggggtgggggtatgg

SEQ ID NO: 31177 - DNA, 20 bp, Artificial Sequence
  Synthetic oligonucleotide; GGG chr11 5381113 5381132 5381116 -
aggtggggtgggggtatggt

SEQ ID NO: 31178 - DNA, 20 bp, Artificial Sequence
  Synthetic oligonucleotide; GGG chr11 5381112 5381131 5381115 -
ggtggggtgggggtatggtg

SEQ ID NO: 31179 - DNA, 20 bp, Artificial Sequence
  Synthetic oligonucleotide; TGG chr11 5381109 5381128 5381112 -
ggggtgggggtatggtgggg

SEQ ID NO: 31180 - DNA, 20 bp, Artificial Sequence
  Synthetic oligonucleotide; AAG chr11 5381105 5381124 5381108 -
tgggggtatggtggggtgga

SEQ ID NO: 31181 - DNA, 20 bp, Artificial Sequence
  Synthetic oligonucleotide; TGG chr11 5381100 5381119 5381103 -
gtatggtggggtggaaagcc

SEQ ID NO: 31182 - DNA, 20 bp, Artificial Sequence
  Synthetic oligonucleotide; AAG chr11 5381092 5381111 5381095 -
gggtggaaagcctggctttc

SEQ ID NO: 31183 - DNA, 20 bp, Artificial Sequence
  Synthetic oligonucleotide; AGG chr11 5381091 5381110 5381094 -
ggtggaaagcctggctttca

SEQ ID NO: 31184 - DNA, 20 bp, Artificial Sequence
  Synthetic oligonucleotide; GGG chr11 5381090 5381109 5381093 -
gtggaaagcctggctttcaa

SEQ ID NO: 31185 - DNA, 20 bp, Artificial Sequence
  Synthetic oligonucleotide; GGG chr11 5381089 5381108 5381092 -
tggaaagcctggctttcaag

SEQ ID NO: 31186 - DNA, 20 bp, Artificial Sequence
  Synthetic oligonucleotide; CAG chr11 5381085 5381104 5381088 -
aagcctggctttcaaggggc

SEQ ID NO: 31187 - DNA, 20 bp, Artificial Sequence
  Synthetic oligonucleotide; AAG chr11 5381079 5381098 5381082 -
ggctttcaaggggccagtat

SEQ ID NO: 31188 - DNA, 20 bp, Artificial Sequence
  Synthetic oligonucleotide; AAG chr11 5381068 5381087 5381071 -
ggccagtataagttttattt

SEQ ID NO: 31189 - DNA, 20 bp, Artificial Sequence
  Synthetic oligonucleotide; AGG chr11 5381067 5381086 5381070 -
gccagtataagttttattta

SEQ ID NO: 31190 - DNA, 20 bp, Artificial Sequence
  Synthetic oligonucleotide; CAG chr11 5381054 5381073 5381057 -
ttatttaaggaacctctatc

SEQ ID NO: 31191 - DNA, 20 bp, Artificial Sequence
  Synthetic oligonucleotide; TAG chr11 5381041 5381060 5381044 -
ctctatccagaattgatacc

SEQ ID NO: 31192 - DNA, 20 bp, Artificial Sequence
  Synthetic oligonucleotide; CAG chr11 5381037 5381056 5381040 -
atccagaattgatacctagc

SEQ ID NO: 31193 - DNA, 20 bp, Artificial Sequence
  Synthetic oligonucleotide; GAG chr11 5381028 5381047 5381031 -
tgatacctagccagcccact

SEQ ID NO: 31194 - DNA, 20 bp, Artificial Sequence
  Synthetic oligonucleotide; CAG chr11 5381024 5381043 5381027 -
acctagccagcccactgagc

SEQ ID NO: 31195 - DNA, 20 bp, Artificial Sequence
  Synthetic oligonucleotide; AGG chr11 5381023 5381042 5381026 -
cctagccagcccactgagcc

SEQ ID NO: 31196 - DNA, 20 bp, Artificial Sequence
  Synthetic oligonucleotide; TGG chr11 5381018 5381037 5381021 -
ccagcccactgagccaggct

SEQ ID NO: 31197 - DNA, 20 bp, Artificial Sequence
  Synthetic oligonucleotide; AAG chr11 5381013 5381032 5381016 -
ccactgagccaggcttggtg

SEQ ID NO: 31198 - DNA, 20 bp, Artificial Sequence
  Synthetic oligonucleotide; TAG chr11 5381010 5381029 5381013 -
ctgagccaggcttggtgaag

SEQ ID NO: 31199 - DNA, 20 bp, Artificial Sequence
  Synthetic oligonucleotide; AGG chr11 5381009 5381028 5381012 -
tgagccaggcttggtgaagt

SEQ ID NO: 31200 - DNA, 20 bp, Artificial Sequence
  Synthetic oligonucleotide; GAG chr11 5381007 5381026 5381010 -
agccaggcttggtgaagtag

SEQ ID NO: 31201 - DNA, 20 bp, Artificial Sequence
  Synthetic oligonucleotide; CAG chr11 5380997 5381016 5381000 -
ggtgaagtaggagattcctt

SEQ ID NO: 31202 - DNA, 20 bp, Artificial Sequence
  Synthetic oligonucleotide; AGG chr11 5380996 5381015 5380999 -
gtgaagtaggagattccttc

SEQ ID NO: 31203 - DNA, 20 bp, Artificial Sequence
  Synthetic oligonucleotide; GAG chr11 5380994 5381013 5380997 -
gaagtaggagattccttcag

SEQ ID NO: 31204 - DNA, 20 bp, Artificial Sequence
  Synthetic oligonucleotide; AAG chr11 5380979 5380998 5380982 -
ttcaggagaactgaatcccc

SEQ ID NO: 31205 - DNA, 20 bp, Artificial Sequence
  Synthetic oligonucleotide; AGG chr11 5380978 5380997 5380981 -
tcaggagaactgaatcccca

SEQ ID NO: 31206 - DNA, 20 bp, Artificial Sequence
  Synthetic oligonucleotide; TGG chr11 5380960 5380979 5380963 -
caaggtctgtacacatgctg

SEQ ID NO: 31207 - DNA, 20 bp, Artificial Sequence
  Synthetic oligonucleotide; TAG chr11 5380947 5380966 5380950 -
catgctgtggttttccaatg

SEQ ID NO: 31208 - DNA, 20 bp, Artificial Sequence
  Synthetic oligonucleotide; CAG chr11 5380940 5380959 5380943 -
tggttttccaatgtagccac

SEQ ID NO: 31209 - DNA, 20 bp, Artificial Sequence
  Synthetic oligonucleotide; AGG chr11 5380939 5380958 5380942 -
ggttttccaatgtagccacc

SEQ ID NO: 31210 - DNA, 20 bp, Artificial Sequence
  Synthetic oligonucleotide; GGG chr11 5380938 5380957 5380941 -
gttttccaatgtagccacca

SEQ ID NO: 31211 - DNA, 20 bp, Artificial Sequence
  Synthetic oligonucleotide; GGG chr11 5380937 5380956 5380940 -
ttttccaatgtagccaccag

SEQ ID NO: 31212 - DNA, 20 bp, Artificial Sequence
  Synthetic oligonucleotide; GGG chr11 5380936 5380955 5380939 -
tttccaatgtagccaccagg

SEQ ID NO: 31213 - DNA, 20 bp, Artificial Sequence
  Synthetic oligonucleotide; GAG chr11 5380934 5380953 5380937 -
tccaatgtagccaccagggg

SEQ ID NO: 31214 - DNA, 20 bp, Artificial Sequence
  Synthetic oligonucleotide; CAG chr11 5380927 5380946 5380930 -
tagccaccagggggagcatt

SEQ ID NO: 31215 - DNA, 20 bp, Artificial Sequence
  Synthetic oligonucleotide; AAG chr11 5380921 5380940 5380924 -
ccagggggagcattcagccc

SEQ ID NO: 31216 - DNA, 20 bp, Artificial Sequence
  Synthetic oligonucleotide; AGG chr11 5380920 5380939 5380923 -
cagggggagcattcagccca

SEQ ID NO: 31217 - DNA, 20 bp, Artificial Sequence
  Synthetic oligonucleotide; TAG chr11 5380916 5380935 5380919 -
gggagcattcagcccaagga

SEQ ID NO: 31218 - DNA, 20 bp, Artificial Sequence
  Synthetic oligonucleotide; AGG chr11 5380915 5380934 5380918 -
ggagcattcagcccaaggat

SEQ ID NO: 31219 - DNA, 20 bp, Artificial Sequence
  Synthetic oligonucleotide; CAG chr11 5380899 5380918 5380902 -
ggataggcttaaattctgac

SEQ ID NO: 31220 - DNA, 20 bp, Artificial Sequence
  Synthetic oligonucleotide; AAG chr11 5380892 5380911 5380895 -
cttaaattctgaccagcacc

SEQ ID NO: 31221 - DNA, 20 bp, Artificial Sequence
  Synthetic oligonucleotide; AGG chr11 5380891 5380910 5380894 -
ttaaattctgaccagcacca

SEQ ID NO: 31222 - DNA, 20 bp, Artificial Sequence
  Synthetic oligonucleotide; CAG chr11 5380876 5380895 5380879 -
caccaaggccctactatccc

SEQ ID NO: 31223 - DNA, 20 bp, Artificial Sequence
  Synthetic oligonucleotide; AGG chr11 5380875 5380894 5380878 -
accaaggccctactatcccc

SEQ ID NO: 31224 - DNA, 20 bp, Artificial Sequence
  Synthetic oligonucleotide; GGG chr11 5380874 5380893 5380877 -
ccaaggccctactatcccca

SEQ ID NO: 31225 - DNA, 20 bp, Artificial Sequence
  Synthetic oligonucleotide; AAG chr11 5380868 5380887 5380871 -
ccctactatccccagggcac

SEQ ID NO: 31226 - DNA, 20 bp, Artificial Sequence
  Synthetic oligonucleotide; TGG chr11 5380859 5380878 5380862 -
ccccagggcacaagaaaatg

SEQ ID NO: 31227 - DNA, 20 bp, Artificial Sequence
  Synthetic oligonucleotide; CAG chr11 5380847 5380866 5380850 -
agaaaatgtggcttttcttc

SEQ ID NO: 31228 - DNA, 20 bp, Artificial Sequence
  Synthetic oligonucleotide; CAG chr11 5380811 5380830 5380814 -
tgtcctcaatacccactaca

SEQ ID NO: 31229 - DNA, 20 bp, Artificial Sequence
  Synthetic oligonucleotide; AAG chr11 5380804 5380823 5380807 -
aatacccactacacagctga

SEQ ID NO: 31230 - DNA, 20 bp, Artificial Sequence
  Synthetic oligonucleotide; CAG chr11 5380793 5380812 5380796 -
cacagctgaaagctgccaac

SEQ ID NO: 31231 - DNA, 20 bp, Artificial Sequence
  Synthetic oligonucleotide; GAG chr11 5380776 5380795 5380779 -
aaccagttcattcttccttt

SEQ ID NO: 31232 - DNA, 20 bp, Artificial Sequence
  Synthetic oligonucleotide; AGG chr11 5380775 5380794 5380778 -
accagttcattcttcctttg

SEQ ID NO: 31233 - DNA, 20 bp, Artificial Sequence
  Synthetic oligonucleotide; TAG chr11 5380744 5380763 5380747 -
cctctctctcatgcacaaaa

SEQ ID NO: 31234 - DNA, 20 bp, Artificial Sequence
  Synthetic oligonucleotide; TGG chr11 5380701 5380720 5380704 -
cacataaaaactaaaattga

SEQ ID NO: 31235 - DNA, 20 bp, Artificial Sequence
  Synthetic oligonucleotide; GAG chr11 5380699 5380718 5380702 -
cataaaaactaaaattgatg

SEQ ID NO: 31236 - DNA, 20 bp, Artificial Sequence
  Synthetic oligonucleotide; GAG chr11 5380697 5380716 5380700 -
taaaaactaaaattgatgga

SEQ ID NO: 31237 - DNA, 20 bp, Artificial Sequence
  Synthetic oligonucleotide; GAG chr11 5380695 5380714 5380698 -
aaaactaaaattgatggaga

SEQ ID NO: 31238 - DNA, 20 bp, Artificial Sequence
  Synthetic oligonucleotide; TAG chr11 5380691 5380710 5380694 -
ctaaaattgatggagagaga

SEQ ID NO: 31239 - DNA, 20 bp, Artificial Sequence
  Synthetic oligonucleotide; AGG chr11 5380690 5380709 5380693 -
taaaattgatggagagagat

SEQ ID NO: 31240 - DNA, 20 bp, Artificial Sequence
  Synthetic oligonucleotide; TAG chr11 5380681 5380700 5380684 -
tggagagagataggttttct

SEQ ID NO: 31241 - DNA, 20 bp, Artificial Sequence
  Synthetic oligonucleotide; CAG chr11 5380672 5380691 5380675 -
ataggttttcttagcttttt

SEQ ID NO: 31242 - DNA, 20 bp, Artificial Sequence
  Synthetic oligonucleotide; CAG chr11 5380662 5380681 5380665 -
ttagctttttcagattttta

SEQ ID NO: 31243 - DNA, 20 bp, Artificial Sequence
  Synthetic oligonucleotide; TGG chr11 5380658 5380677 5380661 -
ctttttcagatttttacaga

SEQ ID NO: 31244 - DNA, 20 bp, Artificial Sequence
  Synthetic oligonucleotide; TGG chr11 5380631 5380650 5380634 -
ctcacacaaatctatgtgtg

SEQ ID NO: 31245 - DNA, 20 bp, Artificial Sequence
  Synthetic oligonucleotide; TAG chr11 5380624 5380643 5380627 -
aaatctatgtgtgtggcctt

SEQ ID NO: 31246 - DNA, 20 bp, Artificial Sequence
  Synthetic oligonucleotide; AAG chr11 5380604 5380623 5380607 -
tagtcttaatcatattgacc

SEQ ID NO: 31247 - DNA, 20 bp, Artificial Sequence
  Synthetic oligonucleotide; CAG chr11 5380581 5380600 5380584 -
ccttaaatccccactctgac

SEQ ID NO: 31248 - DNA, 20 bp, Artificial Sequence
  Synthetic oligonucleotide; CAG chr11 5380575 5380594 5380578 -
atccccactctgaccagaaa

SEQ ID NO: 31249 - DNA, 20 bp, Artificial Sequence
  Synthetic oligonucleotide; CAG chr11 5380550 5380569 5380553 -
ctaaataaaatccttactca

SEQ ID NO: 31250 - DNA, 20 bp, Artificial Sequence
  Synthetic oligonucleotide; AGG chr11 5380549 5380568 5380552 -
taaataaaatccttactcac

SEQ ID NO: 31251 - DNA, 20 bp, Artificial Sequence
  Synthetic oligonucleotide; GGG chr11 5380548 5380567 5380551 -
aaataaaatccttactcaca

SEQ ID NO: 31252 - DNA, 20 bp, Artificial Sequence
  Synthetic oligonucleotide; CAG chr11 5380532 5380551 5380535 -
cacagggttctcaatgtctc

SEQ ID NO: 31253 - DNA, 20 bp, Artificial Sequence
  Synthetic oligonucleotide; CAG chr11 5380521 5380540 5380524 -
caatgtctccagactcacaa

SEQ ID NO: 31254 - DNA, 20 bp, Artificial Sequence
  Synthetic oligonucleotide; TAG chr11 5380510 5380529 5380513 -
gactcacaacagactctttt

SEQ ID NO: 31255 - DNA, 20 bp, Artificial Sequence
  Synthetic oligonucleotide; AGG chr11 5380509 5380528 5380512 -
actcacaacagactcttttt

SEQ ID NO: 31256 - DNA, 20 bp, Artificial Sequence
  Synthetic oligonucleotide; CAG chr11 5380495 5380514 5380498 -
ctttttaggtgtctctgtca

SEQ ID NO: 31257 - DNA, 20 bp, Artificial Sequence
  Synthetic oligonucleotide; TGG chr11 5380488 5380507 5380491 -
ggtgtctctgtcacagaaaa

SEQ ID NO: 31258 - DNA, 20 bp, Artificial Sequence
  Synthetic oligonucleotide; AAG chr11 5380481 5380500 5380484 -
ctgtcacagaaaatggccac

SEQ ID NO: 31259 - DNA, 20 bp, Artificial Sequence
  Synthetic oligonucleotide; AGG chr11 5380480 5380499 5380483 -
tgtcacagaaaatggccaca

SEQ ID NO: 31260 - DNA, 20 bp, Artificial Sequence
  Synthetic oligonucleotide; CAG chr11 5380465 5380484 5380468 -
ccacaaggtcacctcactct

SEQ ID NO: 31261 - DNA, 20 bp, Artificial Sequence
  Synthetic oligonucleotide; AGG chr11 5380464 5380483 5380467 -
cacaaggtcacctcactctc

SEQ ID NO: 31262 - DNA, 20 bp, Artificial Sequence
  Synthetic oligonucleotide; TAG chr11 5380456 5380475 5380459 -
cacctcactctcaggcctgt

SEQ ID NO: 31263 - DNA, 20 bp, Artificial Sequence
  Synthetic oligonucleotide; AAG chr11 5380450 5380469 5380453 -
actctcaggcctgttagaac

SEQ ID NO: 31264 - DNA, 20 bp, Artificial Sequence
  Synthetic oligonucleotide; CAG chr11 5380440 5380459 5380443 -
ctgttagaacaagtccttcc

SEQ ID NO: 31265 - DNA, 20 bp, Artificial Sequence
  Synthetic oligonucleotide; AAG chr11 5380437 5380456 5380440 -
ttagaacaagtccttcccag

SEQ ID NO: 31266 - DNA, 20 bp, Artificial Sequence
  Synthetic oligonucleotide; TGG chr11 5380422 5380441 5380425 -
cccagaagaactccattttg

SEQ ID NO: 31267 - DNA, 20 bp, Artificial Sequence
  Synthetic oligonucleotide; GAG chr11 5380416 5380435 5380419 -
agaactccattttgtggtgt

SEQ ID NO: 31268 - DNA, 20 bp, Artificial Sequence
  Synthetic oligonucleotide; CGG chr11 5380406 5380425 5380409 -
tttgtggtgtgagatcgatg

SEQ ID NO: 31269 - DNA, 20 bp, Artificial Sequence
  Synthetic oligonucleotide; GGG chr11 5380405 5380424 5380408 -
ttgtggtgtgagatcgatgc

SEQ ID NO: 31270 - DNA, 20 bp, Artificial Sequence
  Synthetic oligonucleotide; CAG chr11 5380397 5380416 5380400 -
tgagatcgatgcgggtcttt

SEQ ID NO: 31271 - DNA, 20 bp, Artificial Sequence
  Synthetic oligonucleotide; TGG chr11 5380392 5380411 5380395 -
tcgatgcgggtctttcagac

SEQ ID NO: 31272 - DNA, 20 bp, Artificial Sequence
  Synthetic oligonucleotide; GAG chr11 5380390 5380409 5380393 -
gatgcgggtctttcagactg

SEQ ID NO: 31273 - DNA, 20 bp, Artificial Sequence
  Synthetic oligonucleotide; GAG chr11 5380388 5380407 5380391 -
tgcgggtctttcagactgga

SEQ ID NO: 31274 - DNA, 20 bp, Artificial Sequence
  Synthetic oligonucleotide; CAG chr11 5380380 5380399 5380383 -
tttcagactggagagaccca

SEQ ID NO: 31275 - DNA, 20 bp, Artificial Sequence
  Synthetic oligonucleotide; AAG chr11 5380377 5380396 5380380 -
cagactggagagacccacag

SEQ ID NO: 31276 - DNA, 20 bp, Artificial Sequence
  Synthetic oligonucleotide; TAG chr11 5380373 5380392 5380376 -
ctggagagacccacagaagt

SEQ ID NO: 31277 - DNA, 20 bp, Artificial Sequence
  Synthetic oligonucleotide; AGG chr11 5380372 5380391 5380375 -
tggagagacccacagaagtt

SEQ ID NO: 31278 - DNA, 20 bp, Artificial Sequence
  Synthetic oligonucleotide; AAG chr11 5380361 5380380 5380364 -
acagaagttaggattgccaa

SEQ ID NO: 31279 - DNA, 20 bp, Artificial Sequence
  Synthetic oligonucleotide; AGG chr11 5380360 5380379 5380363 -
cagaagttaggattgccaaa

SEQ ID NO: 31280 - DNA, 20 bp, Artificial Sequence
  Synthetic oligonucleotide; GGG chr11 5380359 5380378 5380362 -
agaagttaggattgccaaaa

SEQ ID NO: 31281 - DNA, 20 bp, Artificial Sequence
  Synthetic oligonucleotide; TGG chr11 5380351 5380370 5380354 -
ggattgccaaaagggtcttc

SEQ ID NO: 31282 - DNA, 20 bp, Artificial Sequence
  Synthetic oligonucleotide; TGG chr11 5380346 5380365 5380349 -
gccaaaagggtcttctggac

SEQ ID NO: 31283 - DNA, 20 bp, Artificial Sequence
  Synthetic oligonucleotide; CAG chr11 5380339 5380358 5380342 -
gggtcttctggactggtcca

SEQ ID NO: 31284 - DNA, 20 bp, Artificial Sequence
  Synthetic oligonucleotide; AAG chr11 5380331 5380350 5380334 -
tggactggtccacagcccct

SEQ ID NO: 31285 - DNA, 20 bp, Artificial Sequence
  Synthetic oligonucleotide; TGG chr11 5380284 5380303 5380287 -
tgtccatccccctgcctccc

SEQ ID NO: 31286 - DNA, 20 bp, Artificial Sequence
  Synthetic oligonucleotide; CAG chr11 5380260 5380279 5380263 -
cacctgcatctgtgtgtgca

SEQ ID NO: 31287 - DNA, 20 bp, Artificial Sequence
  Synthetic oligonucleotide; GAG chr11 5380258 5380277 5380261 -
cctgcatctgtgtgtgcaca

SEQ ID NO: 31288 - DNA, 20 bp, Artificial Sequence
  Synthetic oligonucleotide; GAG chr11 5380256 5380275 5380259 -
tgcatctgtgtgtgcacaga

SEQ ID NO: 31289 - DNA, 20 bp, Artificial Sequence
  Synthetic oligonucleotide; TGG chr11 5380251 5380270 5380254 -
ctgtgtgtgcacagagagtc

SEQ ID NO: 31290 - DNA, 20 bp, Artificial Sequence
  Synthetic oligonucleotide; AAG chr11 5380248 5380267 5380251 -
tgtgtgcacagagagtctgg

SEQ ID NO: 31291 - DNA, 20 bp, Artificial Sequence
  Synthetic oligonucleotide; AGG chr11 5380247 5380266 5380250 -
gtgtgcacagagagtctgga

SEQ ID NO: 31292 - DNA, 20 bp, Artificial Sequence
  Synthetic oligonucleotide; CAG chr11 5380240 5380259 5380243 -
cagagagtctggaaggttta

SEQ ID NO: 31293 - DNA, 20 bp, Artificial Sequence
  Synthetic oligonucleotide; GAG chr11 5380238 5380257 5380241 -
gagagtctggaaggtttaca

SEQ ID NO: 31294 - DNA, 20 bp, Artificial Sequence
  Synthetic oligonucleotide; AAG chr11 5380235 5380254 5380238 -
agtctggaaggtttacagag

SEQ ID NO: 31295 - DNA, 20 bp, Artificial Sequence
  Synthetic oligonucleotide; CAG chr11 5380216 5380235 5380219 -
gaagtctccacatcttccca

SEQ ID NO: 31296 - DNA, 20 bp, Artificial Sequence
  Synthetic oligonucleotide; CAG chr11 5380204 5380223 5380207 -
tcttcccacagcaactcttt

SEQ ID NO: 31297 - DNA, 20 bp, Artificial Sequence
  Synthetic oligonucleotide; CAG chr11 5380168 5380187 5380171 -
cgtaacatcctacctctctt

SEQ ID NO: 31298 - DNA, 20 bp, Artificial Sequence
  Synthetic oligonucleotide; AAG chr11 5380156 5380175 5380159 -
cctctcttcagtcattatga

SEQ ID NO: 31299 - DNA, 20 bp, Artificial Sequence
  Synthetic oligonucleotide; AGG chr11 5380155 5380174 5380158 -
ctctcttcagtcattatgaa

SEQ ID NO: 31300 - DNA, 20 bp, Artificial Sequence
  Synthetic oligonucleotide; GGG chr11 5380154 5380173 5380157 -
tctcttcagtcattatgaaa

SEQ ID NO: 31301 - DNA, 20 bp, Artificial Sequence
  Synthetic oligonucleotide; CAG chr11 5380119 5380138 5380122 -
ttttcattgtgaaaactttt

SEQ ID NO: 31302 - DNA, 20 bp, Artificial Sequence
  Synthetic oligonucleotide; GAG chr11 5380117 5380136 5380120 -
ttcattgtgaaaacttttca

SEQ ID NO: 31303 - DNA, 20 bp, Artificial Sequence
  Synthetic oligonucleotide; GAG chr11 5380115 5380134 5380118 -
cattgtgaaaacttttcaga

SEQ ID NO: 31304 - DNA, 20 bp, Artificial Sequence
  Synthetic oligonucleotide; TGG chr11 5380104 5380123 5380107 -
cttttcagagagaccccttt

SEQ ID NO: 31305 - DNA, 20 bp, Artificial Sequence
  Synthetic oligonucleotide; GGG chr11 5380103 5380122 5380106 -
ttttcagagagacccctttt

SEQ ID NO: 31306 - DNA, 20 bp, Artificial Sequence
  Synthetic oligonucleotide; AAG chr11 5380077 5380096 5380080 -
ccatctcttctccccactcc

SEQ ID NO: 31307 - DNA, 20 bp, Artificial Sequence
  Synthetic oligonucleotide; TGG chr11 5380073 5380092 5380076 -
ctcttctccccactccaagt

SEQ ID NO: 31308 - DNA, 20 bp, Artificial Sequence
  Synthetic oligonucleotide; GGG chr11 5380072 5380091 5380075 -
tcttctccccactccaagtt

SEQ ID NO: 31309 - DNA, 20 bp, Artificial Sequence
  Synthetic oligonucleotide; AAG chr11 5380066 5380085 5380069 -
ccccactccaagttgggcta

SEQ ID NO: 31310 - DNA, 20 bp, Artificial Sequence
  Synthetic oligonucleotide; TAG chr11 5380060 5380079 5380063 -
tccaagttgggctaaagttt

SEQ ID NO: 31311 - DNA, 20 bp, Artificial Sequence
  Synthetic oligonucleotide; CAG chr11 5380028 5380047 5380031 -
catattttgatttgctataa

SEQ ID NO: 31312 - DNA, 20 bp, Artificial Sequence
  Synthetic oligonucleotide; GAG chr11 5380026 5380045 5380029 -
tattttgatttgctataaca

SEQ ID NO: 31313 - DNA, 20 bp, Artificial Sequence
  Synthetic oligonucleotide; GAG chr11 5380018 5380037 5380021 -
tttgctataacagagtacct

SEQ ID NO: 31314 - DNA, 20 bp, Artificial Sequence
  Synthetic oligonucleotide; TGG chr11 5380013 5380032 5380016 -
tataacagagtacctgagtc

SEQ ID NO: 31315 - DNA, 20 bp, Artificial Sequence
  Synthetic oligonucleotide; GGG chr11 5380012 5380031 5380015 -
ataacagagtacctgagtct

SEQ ID NO: 31316 - DNA, 20 bp, Artificial Sequence
  Synthetic oligonucleotide; TAG chr11 5380009 5380028 5380012 -
acagagtacctgagtctggg

SEQ ID NO: 31317 - DNA, 20 bp, Artificial Sequence
  Synthetic oligonucleotide; AAG chr11 5379989 5380008 5379992 -
tagcttatttttttttttta

SEQ ID NO: 31318 - DNA, 20 bp, Artificial Sequence
  Synthetic oligonucleotide; TGG chr11 5379979 5379998 5379982 -
tttttttttaaagttttgtt

SEQ ID NO: 31319 - DNA, 20 bp, Artificial Sequence
  Synthetic oligonucleotide; TGG chr11 5379966 5379985 5379969 -
ttttgtttggttcatgattc

SEQ ID NO: 31320 - DNA, 20 bp, Artificial Sequence
  Synthetic oligonucleotide; AAG chr11 5379955 5379974 5379958 -
tcatgattctggtgacttaa

SEQ ID NO: 31321 - DNA, 20 bp, Artificial Sequence
  Synthetic oligonucleotide; AAG chr11 5379949 5379968 5379952 -
ttctggtgacttaaaagtcc

SEQ ID NO: 31322 - DNA, 20 bp, Artificial Sequence
  Synthetic oligonucleotide; CGG chr11 5379944 5379963 5379947 -
gtgacttaaaagtccaagat

SEQ ID NO: 31323 - DNA, 20 bp, Artificial Sequence
  Synthetic oligonucleotide; GGG chr11 5379943 5379962 5379946 -
tgacttaaaagtccaagatc

SEQ ID NO: 31324 - DNA, 20 bp, Artificial Sequence
  Synthetic oligonucleotide; CGG chr11 5379940 5379959 5379943 -
cttaaaagtccaagatcggg

SEQ ID NO: 31325 - DNA, 20 bp, Artificial Sequence
  Synthetic oligonucleotide; AAG chr11 5379925 5379944 5379928 -
tcgggcggttgcatctgata

SEQ ID NO: 31326 - DNA, 20 bp, Artificial Sequence
  Synthetic oligonucleotide; AGG chr11 5379924 5379943 5379927 -
cgggcggttgcatctgataa

SEQ ID NO: 31327 - DNA, 20 bp, Artificial Sequence
  Synthetic oligonucleotide; TGG chr11 5379913 5379932 5379916 -
atctgataaaggtctcatgc

SEQ ID NO: 31328 - DNA, 20 bp, Artificial Sequence
  Synthetic oligonucleotide; TGG chr11 5379901 5379920 5379904 -
tctcatgctggttccaaaca

SEQ ID NO: 31329 - DNA, 20 bp, Artificial Sequence
  Synthetic oligonucleotide; CAG chr11 5379898 5379917 5379901 -
catgctggttccaaacatgg

SEQ ID NO: 31330 - DNA, 20 bp, Artificial Sequence
  Synthetic oligonucleotide; AAG chr11 5379894 5379913 5379897 -
ctggttccaaacatggcaga

SEQ ID NO: 31331 - DNA, 20 bp, Artificial Sequence
  Synthetic oligonucleotide; CAG chr11 5379891 5379910 5379894 -
gttccaaacatggcagaaag

SEQ ID NO: 31332 - DNA, 20 bp, Artificial Sequence
  Synthetic oligonucleotide; AAG chr11 5379885 5379904 5379888 -
aacatggcagaaagcagaca

SEQ ID NO: 31333 - DNA, 20 bp, Artificial Sequence
  Synthetic oligonucleotide; GAG chr11 5379883 5379902 5379886 -
catggcagaaagcagacaaa

SEQ ID NO: 31334 - DNA, 20 bp, Artificial Sequence
  Synthetic oligonucleotide; AAG chr11 5379879 5379898 5379882 -
gcagaaagcagacaaagagc

SEQ ID NO: 31335 - DNA, 20 bp, Artificial Sequence
  Synthetic oligonucleotide; AAG chr11 5379869 5379888 5379872 -
gacaaagagcaagtgcatgc

SEQ ID NO: 31336 - DNA, 20 bp, Artificial Sequence
  Synthetic oligonucleotide; AGG chr11 5379868 5379887 5379871 -
acaaagagcaagtgcatgca

SEQ ID NO: 31337 - DNA, 20 bp, Artificial Sequence
  Synthetic oligonucleotide; GAG chr11 5379866 5379885 5379869 -
aaagagcaagtgcatgcaag

SEQ ID NO: 31338 - DNA, 20 bp, Artificial Sequence
  Synthetic oligonucleotide; GAG chr11 5379853 5379872 5379856 -
atgcaaggagatcacatgat

SEQ ID NO: 31339 - DNA, 20 bp, Artificial Sequence
  Synthetic oligonucleotide; GAG chr11 5379851 5379870 5379854 -
gcaaggagatcacatgatga

SEQ ID NO: 31340 - DNA, 20 bp, Artificial Sequence
  Synthetic oligonucleotide; GAG chr11 5379849 5379868 5379852 -
aaggagatcacatgatgaga

SEQ ID NO: 31341 - DNA, 20 bp, Artificial Sequence
  Synthetic oligonucleotide; AGG chr11 5379848 5379867 5379851 -
aggagatcacatgatgagag

SEQ ID NO: 31342 - DNA, 20 bp, Artificial Sequence
  Synthetic oligonucleotide; CAG chr11 5379841 5379860 5379844 -
cacatgatgagagaggacgc

SEQ ID NO: 31343 - DNA, 20 bp, Artificial Sequence
  Synthetic oligonucleotide; AGG chr11 5379840 5379859 5379843 -
acatgatgagagaggacgcc

SEQ ID NO: 31344 - DNA, 20 bp, Artificial Sequence
  Synthetic oligonucleotide; GGG chr11 5379839 5379858 5379842 -
catgatgagagaggacgcca

SEQ ID NO: 31345 - DNA, 20 bp, Artificial Sequence
  Synthetic oligonucleotide; GAG chr11 5379837 5379856 5379840 -
tgatgagagaggacgccagg

SEQ ID NO: 31346 - DNA, 20 bp, Artificial Sequence
  Synthetic oligonucleotide; GAG chr11 5379835 5379854 5379838 -
atgagagaggacgccaggga

SEQ ID NO: 31347 - DNA, 20 bp, Artificial Sequence
  Synthetic oligonucleotide; CAG chr11 5379827 5379846 5379830 -
ggacgccagggagagaaacc

SEQ ID NO: 31348 - DNA, 20 bp, Artificial Sequence
  Synthetic oligonucleotide; AAG chr11 5379823 5379842 5379826 -
gccagggagagaaacccaga

SEQ ID NO: 31349 - DNA, 20 bp, Artificial Sequence
  Synthetic oligonucleotide; CAG chr11 5379819 5379838 5379822 -
gggagagaaacccagaaagc

SEQ ID NO: 31350 - DNA, 20 bp, Artificial Sequence
  Synthetic oligonucleotide; TGG chr11 5379811 5379830 5379814 -
aacccagaaagccagactca

SEQ ID NO: 31351 - DNA, 20 bp, Artificial Sequence
  Synthetic oligonucleotide; GGG chr11 5379810 5379829 5379813 -
acccagaaagccagactcat

SEQ ID NO: 31352 - DNA, 20 bp, Artificial Sequence
  Synthetic oligonucleotide; AAG chr11 5379806 5379825 5379809 -
agaaagccagactcatggga

SEQ ID NO: 31353 - DNA, 20 bp, Artificial Sequence
  Synthetic oligonucleotide; AAG chr11 5379799 5379818 5379802 -
cagactcatgggaaagtatc

SEQ ID NO: 31354 - DNA, 20 bp, Artificial Sequence
  Synthetic oligonucleotide; TAG chr11 5379776 5379795 5379779 -
ctgtccaccatatgtgaaat

SEQ ID NO: 31355 - DNA, 20 bp, Artificial Sequence
  Synthetic oligonucleotide; AAG chr11 5379765 5379784 5379768 -
atgtgaaattagaattctaa

SEQ ID NO: 31356 - DNA, 20 bp, Artificial Sequence
  Synthetic oligonucleotide; AGG chr11 5379764 5379783 5379767 -
tgtgaaattagaattctaaa

SEQ ID NO: 31357 - DNA, 20 bp, Artificial Sequence
  Synthetic oligonucleotide; TGG chr11 5379751 5379770 5379754 -
ttctaaaaggaaacaaaaaa

SEQ ID NO: 31358 - DNA, 20 bp, Artificial Sequence
  Synthetic oligonucleotide; GAG chr11 5379734 5379753 5379737 -
aaatggattaaacgtttttt

SEQ ID NO: 31359 - DNA, 20 bp, Artificial Sequence
  Synthetic oligonucleotide; AGG chr11 5379733 5379752 5379736 -
aatggattaaacgttttttg

SEQ ID NO: 31360 - DNA, 20 bp, Artificial Sequence
  Synthetic oligonucleotide; TGG chr11 5379704 5379723 5379707 -
tgactgaatgtttcaacatc

SEQ ID NO: 31361 - DNA, 20 bp, Artificial Sequence
  Synthetic oligonucleotide; TAG chr11 5379675 5379694 5379678 -
aatctattaattcatatctt

SEQ ID NO: 31362 - DNA, 20 bp, Artificial Sequence
  Synthetic oligonucleotide; GAG chr11 5379664 5379683 5379667 -
tcatatctttagctaacctt

SEQ ID NO: 31363 - DNA, 20 bp, Artificial Sequence
  Synthetic oligonucleotide; TGG chr11 5379614 5379633 5379617 -
ctaaatgcatatcttacaaa

SEQ ID NO: 31364 - DNA, 20 bp, Artificial Sequence
  Synthetic oligonucleotide; AAG chr11 5379582 5379601 5379585 -
caaatgtatgccaatcttaa

SEQ ID NO: 31365 - DNA, 20 bp, Artificial Sequence
  Synthetic oligonucleotide; CAG chr11 5379579 5379598 5379582 -
atgtatgccaatcttaaaag

SEQ ID NO: 31366 - DNA, 20 bp, Artificial Sequence
  Synthetic oligonucleotide; TAG chr11 5379573 5379592 5379576 -
gccaatcttaaaagcagaca

SEQ ID NO: 31367 - DNA, 20 bp, Artificial Sequence
  Synthetic oligonucleotide; AAG chr11 5379567 5379586 5379570 -
cttaaaagcagacatagaaa

SEQ ID NO: 31368 - DNA, 20 bp, Artificial Sequence
  Synthetic oligonucleotide; AAG chr11 5379551 5379570 5379554 -
gaaaaagacacattgcatac

SEQ ID NO: 31369 - DNA, 20 bp, Artificial Sequence
  Synthetic oligonucleotide; TAG chr11 5379540 5379559 5379543 -
attgcatacaagaaaattat

SEQ ID NO: 31370 - DNA, 20 bp, Artificial Sequence
  Synthetic oligonucleotide; GAG chr11 5379538 5379557 5379541 -
tgcatacaagaaaattatta

SEQ ID NO: 31371 - DNA, 20 bp, Artificial Sequence
  Synthetic oligonucleotide; AGG chr11 5379537 5379556 5379540 -
gcatacaagaaaattattag

SEQ ID NO: 31372 - DNA, 20 bp, Artificial Sequence
  Synthetic oligonucleotide; CGG chr11 5379528 5379547 5379531 -
aaaattattagaggaaacaa

SEQ ID NO: 31373 - DNA, 20 bp, Artificial Sequence
  Synthetic oligonucleotide; TGG chr11 5379507 5379526 5379510 -
ggaaacctgaaaaaataaac

SEQ ID NO: 31374 - DNA, 20 bp, Artificial Sequence
  Synthetic oligonucleotide; AAG chr11 5379451 5379470 5379454 -
tattattattattatacttt

SEQ ID NO: 31375 - DNA, 20 bp, Artificial Sequence
  Synthetic oligonucleotide; TAG chr11 5379445 5379464 5379448 -
tattattatactttaagatt

SEQ ID NO: 31376 - DNA, 20 bp, Artificial Sequence
  Synthetic oligonucleotide; AGG chr11 5379444 5379463 5379447 -
attattatactttaagattt

SEQ ID NO: 31377 - DNA, 20 bp, Artificial Sequence
  Synthetic oligonucleotide; GGG chr11 5379443 5379462 5379446 -
ttattatactttaagattta

SEQ ID NO: 31378 - DNA, 20 bp, Artificial Sequence
  Synthetic oligonucleotide; CGG chr11 5379422 5379441 5379425 -
ggtacatgtgcataatgtgc

SEQ ID NO: 31379 - DNA, 20 bp, Artificial Sequence
  Synthetic oligonucleotide; TAG chr11 5379418 5379437 5379421 -
catgtgcataatgtgccggt

SEQ ID NO: 31380 - DNA, 20 bp, Artificial Sequence
  Synthetic oligonucleotide; TGG chr11 5379390 5379409 5379393 -
tatgtatacatgtgccatgt

SEQ ID NO: 31381 - DNA, 20 bp, Artificial Sequence
  Synthetic oligonucleotide; TAG chr11 5379361 5379380 5379364 -
gcacccattaactcgtaatt

SEQ ID NO: 31382 - DNA, 20 bp, Artificial Sequence
  Synthetic oligonucleotide; TAG chr11 5379355 5379374 5379358 -
attaactcgtaatttagcat

SEQ ID NO: 31383 - DNA, 20 bp, Artificial Sequence
  Synthetic oligonucleotide; AGG chr11 5379354 5379373 5379357 -
ttaactcgtaatttagcatt

SEQ ID NO: 31384 - DNA, 20 bp, Artificial Sequence
  Synthetic oligonucleotide; CAG chr11 5379308 5379327 5379311 -
cctgcacccccaccccacaa

SEQ ID NO: 31385 - DNA, 20 bp, Artificial Sequence
  Synthetic oligonucleotide; CAG chr11 5379301 5379320 5379304 -
ccccaccccacaacagtccc

SEQ ID NO: 31386 - DNA, 20 bp, Artificial Sequence
  Synthetic oligonucleotide; GAG chr11 5379299 5379318 5379302 -
ccaccccacaacagtcccca

SEQ ID NO: 31387 - DNA, 20 bp, Artificial Sequence
  Synthetic oligonucleotide; CAG chr11 5379256 5379275 5379259 -
gtccatgtgttctcattgtt

SEQ ID NO: 31388 - DNA, 20 bp, Artificial Sequence
  Synthetic oligonucleotide; GAG chr11 5379242 5379261 5379245 -
attgttcagttcccatctat

SEQ ID NO: 31389 - DNA, 20 bp, Artificial Sequence
  Synthetic oligonucleotide; GAG chr11 5379238 5379257 5379241 -
ttcagttcccatctatgagt

SEQ ID NO: 31390 - DNA, 20 bp, Artificial Sequence
  Synthetic oligonucleotide; TGG chr11 5379229 5379248 5379232 -
catctatgagtgagaatatg

SEQ ID NO: 31391 - DNA, 20 bp, Artificial Sequence
  Synthetic oligonucleotide; TGG chr11 5379222 5379241 5379225 -
gagtgagaatatgtggtgtt

SEQ ID NO: 31392 - DNA, 20 bp, Artificial Sequence
  Synthetic oligonucleotide; TAG chr11 5379203 5379222 5379206 -
ttggttttttgtccttgcga

SEQ ID NO: 31393 - DNA, 20 bp, Artificial Sequence
  Synthetic oligonucleotide; GAG chr11 5379194 5379213 5379197 -
tgtccttgcgatagtttact

SEQ ID NO: 31394 - DNA, 20 bp, Artificial Sequence
  Synthetic oligonucleotide; AAG chr11 5379157 5379176 5379160 -
atttcatccatgtccctaca

SEQ ID NO: 31395 - DNA, 20 bp, Artificial Sequence
  Synthetic oligonucleotide; AGG chr11 5379156 5379175 5379159 -
tttcatccatgtccctacaa

SEQ ID NO: 31396 - DNA, 20 bp, Artificial Sequence
  Synthetic oligonucleotide; TGG chr11 5379133 5379152 5379136 -
acatgaactcatcattttta

SEQ ID NO: 31397 - DNA, 20 bp, Artificial Sequence
  Synthetic oligonucleotide; TAG chr11 5379125 5379144 5379128 -
tcatcatttttatggctgca

SEQ ID NO: 31398 - DNA, 20 bp, Artificial Sequence
  Synthetic oligonucleotide; TGG chr11 5379115 5379134 5379118 -
tatggctgcatagtattcca

SEQ ID NO: 31399 - DNA, 20 bp, Artificial Sequence
  Synthetic oligonucleotide; CAG chr11 5379086 5379105 5379089 -
tgtgccacattttcttaatc

SEQ ID NO: 31400 - DNA, 20 bp, Artificial Sequence
  Synthetic oligonucleotide; TGG chr11 5379072 5379091 5379075 -
ttaatccagtctatcattgt

SEQ ID NO: 31401 - DNA, 20 bp, Artificial Sequence
  Synthetic oligonucleotide; TGG chr11 5379064 5379083 5379067 -
gtctatcattgttggacatt

SEQ ID NO: 31402 - DNA, 20 bp, Artificial Sequence
  Synthetic oligonucleotide; GGG chr11 5379063 5379082 5379066 -
tctatcattgttggacattt

SEQ ID NO: 31403 - DNA, 20 bp, Artificial Sequence
  Synthetic oligonucleotide; TGG chr11 5379059 5379078 5379062 -
tcattgttggacatttgggt

SEQ ID NO: 31404 - DNA, 20 bp, Artificial Sequence
  Synthetic oligonucleotide; AAG chr11 5379052 5379071 5379055 -
tggacatttgggttggttcc

SEQ ID NO: 31405 - DNA, 20 bp, Artificial Sequence
  Synthetic oligonucleotide; TAG chr11 5379033 5379052 5379036 -
caagtctttgctattgtgaa

SEQ ID NO: 31406 - DNA, 20 bp, Artificial Sequence
  Synthetic oligonucleotide; TAG chr11 5378996 5379015 5378999 -
tacgtgtgcatgtgtcttta

SEQ ID NO: 31407 - DNA, 20 bp, Artificial Sequence
  Synthetic oligonucleotide; CAG chr11 5378993 5379012 5378996 -
gtgtgcatgtgtctttatag

SEQ ID NO: 31408 - DNA, 20 bp, Artificial Sequence
  Synthetic oligonucleotide; TGG chr11 5378973 5378992 5378976 -
cagcatgatttatattcctt

SEQ ID NO: 31409 - DNA, 20 bp, Artificial Sequence
  Synthetic oligonucleotide; GGG chr11 5378972 5378991 5378975 -
agcatgatttatattccttt

SEQ ID NO: 31410 - DNA, 20 bp, Artificial Sequence
  Synthetic oligonucleotide; CAG chr11 5378961 5378980 5378964 -
tattcctttgggtatatacc

SEQ ID NO: 31411 - DNA, 20 bp, Artificial Sequence
  Synthetic oligonucleotide; TGG chr11 5378955 5378974 5378958 -
tttgggtatatacccagtaa

SEQ ID NO: 31412 - DNA, 20 bp, Artificial Sequence
  Synthetic oligonucleotide; GGG chr11 5378954 5378973 5378957 -
ttgggtatatacccagtaat

SEQ ID NO: 31413 - DNA, 20 bp, Artificial Sequence
  Synthetic oligonucleotide; TGG chr11 5378950 5378969 5378953 -
gtatatacccagtaatggga

SEQ ID NO: 31414 - DNA, 20 bp, Artificial Sequence
  Synthetic oligonucleotide; TGG chr11 5378946 5378965 5378949 -
atacccagtaatgggatggc

SEQ ID NO: 31415 - DNA, 20 bp, Artificial Sequence
  Synthetic oligonucleotide; GGG chr11 5378945 5378964 5378948 -
tacccagtaatgggatggct

SEQ ID NO: 31416 - DNA, 20 bp, Artificial Sequence
  Synthetic oligonucleotide; TGG chr11 5378937 5378956 5378940 -
aatgggatggctgggtcaaa

SEQ ID NO: 31417 - DNA, 20 bp, Artificial Sequence
  Synthetic oligonucleotide; TAG chr11 5378928 5378947 5378931 -
gctgggtcaaatggtatttc

SEQ ID NO: 31418 - DNA, 20 bp, Artificial Sequence
  Synthetic oligonucleotide; TAG chr11 5378922 5378941 5378925 -
tcaaatggtatttctagttc

SEQ ID NO: 31419 - DNA, 20 bp, Artificial Sequence
  Synthetic oligonucleotide; GAG chr11 5378913 5378932 5378916 -
atttctagttctagatccct

SEQ ID NO: 31420 - DNA, 20 bp, Artificial Sequence
  Synthetic oligonucleotide; AGG chr11 5378912 5378931 5378915 -
tttctagttctagatccctg

SEQ ID NO: 31421 - DNA, 20 bp, Artificial Sequence
  Synthetic oligonucleotide; TGG chr11 5378886 5378905 5378889 -
cgccacactgacttccacaa

SEQ ID NO: 31422 - DNA, 20 bp, Artificial Sequence
  Synthetic oligonucleotide; TAG chr11 5378877 5378896 5378880 -
gacttccacaatggttgaac

SEQ ID NO: 31423 - DNA, 20 bp, Artificial Sequence
  Synthetic oligonucleotide; CAG chr11 5378870 5378889 5378873 -
acaatggttgaactagttta

SEQ ID NO: 31424 - DNA, 20 bp, Artificial Sequence
  Synthetic oligonucleotide; AAG chr11 5378860 5378879 5378863 -
aactagtttacagtcccacc

SEQ ID NO: 31425 - DNA, 20 bp, Artificial Sequence
  Synthetic oligonucleotide; GAG chr11 5378858 5378877 5378861 -
ctagtttacagtcccaccaa

SEQ ID NO: 31426 - DNA, 20 bp, Artificial Sequence
  Synthetic oligonucleotide; AAG chr11 5378850 5378869 5378853 -
cagtcccaccaagagtgtaa

SEQ ID NO: 31427 - DNA, 20 bp, Artificial Sequence
  Synthetic oligonucleotide; CAG chr11 5378822 5378841 5378825 -
ctatttctccacatcctctc

SEQ ID NO: 31428 - DNA, 20 bp, Artificial Sequence
  Synthetic oligonucleotide; TGG chr11 5378778 5378797 5378781 -
ttaatgattgccattctaac

SEQ ID NO: 31429 - DNA, 20 bp, Artificial Sequence
  Synthetic oligonucleotide; GAG chr11 5378772 5378791 5378775 -
attgccattctaactggtat

SEQ ID NO: 31430 - DNA, 20 bp, Artificial Sequence
  Synthetic oligonucleotide; TGG chr11 5378768 5378787 5378771 -
ccattctaactggtatgaga

SEQ ID NO: 31431 - DNA, 20 bp, Artificial Sequence
  Synthetic oligonucleotide; TGG chr11 5378755 5378774 5378758 -
tatgagatggtatctcattg

SEQ ID NO: 31432 - DNA, 20 bp, Artificial Sequence
  Synthetic oligonucleotide; TGG chr11 5378731 5378750 5378734 -
tttgatttgcatttctctga

SEQ ID NO: 31433 - DNA, 20 bp, Artificial Sequence
  Synthetic oligonucleotide; CAG chr11 5378727 5378746 5378730 -
atttgcatttctctgatggc

SEQ ID NO: 31434 - DNA, 20 bp, Artificial Sequence
  Synthetic oligonucleotide; GAG chr11 5378717 5378736 5378720 -
ctctgatggccagtgatgat

SEQ ID NO: 31435 - DNA, 20 bp, Artificial Sequence
  Synthetic oligonucleotide; TGG chr11 5378695 5378714 5378698 -
gcattttttcatgtgtcttt

SEQ ID NO: 31436 - DNA, 20 bp, Artificial Sequence
  Synthetic oligonucleotide; GAG chr11 5378672 5378691 5378675 -
ttgcataaatgttttctttt

SEQ ID NO: 31437 - DNA, 20 bp, Artificial Sequence
  Synthetic oligonucleotide; AAG chr11 5378669 5378688 5378672 -
cataaatgttttcttttgag

SEQ ID NO: 31438 - DNA, 20 bp, Artificial Sequence
  Synthetic oligonucleotide; TGG chr11 5378635 5378654 5378638 -
atcctttgcccacttgttga

SEQ ID NO: 31439 - DNA, 20 bp, Artificial Sequence
  Synthetic oligonucleotide; GGG chr11 5378634 5378653 5378637 -
tcctttgcccacttgttgat

SEQ ID NO: 31440 - DNA, 20 bp, Artificial Sequence
  Synthetic oligonucleotide; GGG chr11 5378633 5378652 5378636 -
cctttgcccacttgttgatg

SEQ ID NO: 31441 - DNA, 20 bp, Artificial Sequence
  Synthetic oligonucleotide; GAG chr11 5378601 5378620 5378604 -
tttttcttgtaaatttgttt

SEQ ID NO: 31442 - DNA, 20 bp, Artificial Sequence
  Synthetic oligonucleotide; TAG chr11 5378591 5378610 5378594 -
aaatttgtttgagttcatta

SEQ ID NO: 31443 - DNA, 20 bp, Artificial Sequence
  Synthetic oligonucleotide; TGG chr11 5378584 5378603 5378587 -
tttgagttcattatagattc

SEQ ID NO: 31444 - DNA, 20 bp, Artificial Sequence
  Synthetic oligonucleotide; TAG chr11 5378577 5378596 5378580 -
tcattatagattctggatat

SEQ ID NO: 31445 - DNA, 20 bp, Artificial Sequence
  Synthetic oligonucleotide; CAG chr11 5378566 5378585 5378569 -
tctggatattagccctttgt

SEQ ID NO: 31446 - DNA, 20 bp, Artificial Sequence
  Synthetic oligonucleotide; GAG chr11 5378561 5378580 5378564 -
atattagccctttgtcagat

SEQ ID NO: 31447 - DNA, 20 bp, Artificial Sequence
  Synthetic oligonucleotide; TAG chr11 5378558 5378577 5378561 -
ttagccctttgtcagatgag

SEQ ID NO: 31448 - DNA, 20 bp, Artificial Sequence
  Synthetic oligonucleotide; AGG chr11 5378557 5378576 5378560 -
tagccctttgtcagatgagt

SEQ ID NO: 31449 - DNA, 20 bp, Artificial Sequence
  Synthetic oligonucleotide; TAG chr11 5378530 5378549 5378533 -
gaaaattttctcccattgtg

SEQ ID NO: 31450 - DNA, 20 bp, Artificial Sequence
  Synthetic oligonucleotide; AGG chr11 5378529 5378548 5378532 -
aaaattttctcccattgtgt

SEQ ID NO: 31451 - DNA, 20 bp, Artificial Sequence
  Synthetic oligonucleotide; TGG chr11 5378509 5378528 5378512 -
aggttgcctgttcactctga

SEQ ID NO: 31452 - DNA, 20 bp, Artificial Sequence
  Synthetic oligonucleotide; TAG chr11 5378506 5378525 5378509 -
ttgcctgttcactctgatgg

SEQ ID NO: 31453 - DNA, 20 bp, Artificial Sequence
  Synthetic oligonucleotide; TAG chr11 5378497 5378516 5378500 -
cactctgatggtagtttctt

SEQ ID NO: 31454 - DNA, 20 bp, Artificial Sequence
  Synthetic oligonucleotide; CAG chr11 5378489 5378508 5378492 -
tggtagtttctttagctgtg

SEQ ID NO: 31455 - DNA, 20 bp, Artificial Sequence
  Synthetic oligonucleotide; AAG chr11 5378486 5378505 5378489 -
tagtttctttagctgtgcag

SEQ ID NO: 31456 - DNA, 20 bp, Artificial Sequence
  Synthetic oligonucleotide; TAG chr11 5378478 5378497 5378481 -
ttagctgtgcagaagctctt

SEQ ID NO: 31457 - DNA, 20 bp, Artificial Sequence
  Synthetic oligonucleotide; TAG chr11 5378469 5378488 5378472 -
cagaagctctttagtttcat

SEQ ID NO: 31458 - DNA, 20 bp, Artificial Sequence
  Synthetic oligonucleotide; TAG chr11 5378459 5378478 5378462 -
ttagtttcattagatcccat

SEQ ID NO: 31459 - DNA, 20 bp, Artificial Sequence
  Synthetic oligonucleotide; TGG chr11 5378449 5378468 5378452 -
tagatcccattagtgaattt

SEQ ID NO: 31460 - DNA, 20 bp, Artificial Sequence
  Synthetic oligonucleotide; TGG chr11 5378427 5378446 5378430 -
gcttttgttgccatcgcttt

SEQ ID NO: 31461 - DNA, 20 bp, Artificial Sequence
  Synthetic oligonucleotide; TAG chr11 5378419 5378438 5378422 -
tgccatcgcttttggtgttt

SEQ ID NO: 31462 - DNA, 20 bp, Artificial Sequence
  Synthetic oligonucleotide; AAG chr11 5378411 5378430 5378414 -
cttttggtgttttagacatg

SEQ ID NO: 31463 - DNA, 20 bp, Artificial Sequence
  Synthetic oligonucleotide; TGG chr11 5378383 5378402 5378386 -
gcccatgcctatgtcctgaa

SEQ ID NO: 31464 - DNA, 20 bp, Artificial Sequence
  Synthetic oligonucleotide; TAG chr11 5378361 5378380 5378364 -
gtaatgcctgcgttttcttc

SEQ ID NO: 31465 - DNA, 20 bp, Artificial Sequence
  Synthetic oligonucleotide; AGG chr11 5378360 5378379 5378363 -
taatgcctgcgttttcttct

SEQ ID NO: 31466 - DNA, 20 bp, Artificial Sequence
  Synthetic oligonucleotide; GGG chr11 5378359 5378378 5378362 -
aatgcctgcgttttcttcta

SEQ ID NO: 31467 - DNA, 20 bp, Artificial Sequence
  Synthetic oligonucleotide; TGG chr11 5378350 5378369 5378353 -
gttttcttctagggttttta

SEQ ID NO: 31468 - DNA, 20 bp, Artificial Sequence
  Synthetic oligonucleotide; TAG chr11 5378344 5378363 5378347 -
ttctagggtttttatggttt

SEQ ID NO: 31469 - DNA, 20 bp, Artificial Sequence
  Synthetic oligonucleotide; AGG chr11 5378343 5378362 5378346 -
tctagggtttttatggtttt

SEQ ID NO: 31470 - DNA, 20 bp, Artificial Sequence
  Synthetic oligonucleotide; AAG chr11 5378330 5378349 5378333 -
tggttttaggtctaatgttt

SEQ ID NO: 31471 - DNA, 20 bp, Artificial Sequence
  Synthetic oligonucleotide; AAG chr11 5378296 5378315 5378299 -
tcttgaattaatttttgtat

SEQ ID NO: 31472 - DNA, 20 bp, Artificial Sequence
  Synthetic oligonucleotide; AGG chr11 5378295 5378314 5378298 -
cttgaattaatttttgtata

SEQ ID NO: 31473 - DNA, 20 bp, Artificial Sequence
  Synthetic oligonucleotide; AAG chr11 5378289 5378308 5378292 -
ttaatttttgtataaggtgt

SEQ ID NO: 31474 - DNA, 20 bp, Artificial Sequence
  Synthetic oligonucleotide; AGG chr11 5378288 5378307 5378291 -
taatttttgtataaggtgta

SEQ ID NO: 31475 - DNA, 20 bp, Artificial Sequence
  Synthetic oligonucleotide; AAG chr11 5378285 5378304 5378288 -
tttttgtataaggtgtaagg

SEQ ID NO: 31476 - DNA, 20 bp, Artificial Sequence
  Synthetic oligonucleotide; AGG chr11 5378284 5378303 5378287 -
ttttgtataaggtgtaagga

SEQ ID NO: 31477 - DNA, 20 bp, Artificial Sequence
  Synthetic oligonucleotide; GGG chr11 5378283 5378302 5378286 -
tttgtataaggtgtaaggaa

SEQ ID NO: 31478 - DNA, 20 bp, Artificial Sequence
  Synthetic oligonucleotide; CAG chr11 5378277 5378296 5378280 -
taaggtgtaaggaagggatc

SEQ ID NO: 31479 - DNA, 20 bp, Artificial Sequence
  Synthetic oligonucleotide; CAG chr11 5378271 5378290 5378274 -
gtaaggaagggatccagttt

SEQ ID NO: 31480 - DNA, 20 bp, Artificial Sequence
  Synthetic oligonucleotide; TGG chr11 5378257 5378276 5378260 -
cagtttcagcattctacata

SEQ ID NO: 31481 - DNA, 20 bp, Artificial Sequence
  Synthetic oligonucleotide; TAG chr11 5378253 5378272 5378256 -
ttcagcattctacatatggc

SEQ ID NO: 31482 - DNA, 20 bp, Artificial Sequence
  Synthetic oligonucleotide; CAG chr11 5378249 5378268 5378252 -
gcattctacatatggctagc

SEQ ID NO: 31483 - DNA, 20 bp, Artificial Sequence
  Synthetic oligonucleotide; CAG chr11 5378240 5378259 5378243 -
atatggctagccagttctcc

SEQ ID NO: 31484 - DNA, 20 bp, Artificial Sequence
  Synthetic oligonucleotide; TAG chr11 5378223 5378242 5378226 -
tcccagcaccatttattaaa

SEQ ID NO: 31485 - DNA, 20 bp, Artificial Sequence
  Synthetic oligonucleotide; AGG chr11 5378222 5378241 5378225 -
cccagcaccatttattaaat

SEQ ID NO: 31486 - DNA, 20 bp, Artificial Sequence
  Synthetic oligonucleotide; GGG chr11 5378221 5378240 5378224 -
ccagcaccatttattaaata

SEQ ID NO: 31487 - DNA, 20 bp, Artificial Sequence
  Synthetic oligonucleotide; CAG chr11 5378191 5378210 5378194 -
tccccatttcttgtttttct

SEQ ID NO: 31488 - DNA, 20 bp, Artificial Sequence
  Synthetic oligonucleotide; AGG chr11 5378190 5378209 5378193 -
ccccatttcttgtttttctc

SEQ ID NO: 31489 - DNA, 20 bp, Artificial Sequence
  Synthetic oligonucleotide; AAG chr11 5378180 5378199 5378183 -
tgtttttctcaggtttttca

SEQ ID NO: 31490 - DNA, 20 bp, Artificial Sequence
  Synthetic oligonucleotide; CAG chr11 5378175 5378194 5378178 -
ttctcaggtttttcaaagat

SEQ ID NO: 31491 - DNA, 20 bp, Artificial Sequence
  Synthetic oligonucleotide; TAG chr11 5378171 5378190 5378174 -
caggtttttcaaagatcaga

SEQ ID NO: 31492 - DNA, 20 bp, Artificial Sequence
  Synthetic oligonucleotide; TAG chr11 5378165 5378184 5378168 -
tttcaaagatcagatagttg

SEQ ID NO: 31493 - DNA, 20 bp, Artificial Sequence
  Synthetic oligonucleotide; GAG chr11 5378144 5378163 5378147 -
agatatgcgtcgttatttct

SEQ ID NO: 31494 - DNA, 20 bp, Artificial Sequence
  Synthetic oligonucleotide; AGG chr11 5378143 5378162 5378146 -
gatatgcgtcgttatttctg

SEQ ID NO: 31495 - DNA, 20 bp, Artificial Sequence
  Synthetic oligonucleotide; GGG chr11 5378142 5378161 5378145 -
atatgcgtcgttatttctga

SEQ ID NO: 31496 - DNA, 20 bp, Artificial Sequence
  Synthetic oligonucleotide; TGG chr11 5378105 5378124 5378108 -
attgatctatatctgtgttt

SEQ ID NO: 31497 - DNA, 20 bp, Artificial Sequence
  Synthetic oligonucleotide; CAG chr11 5378099 5378118 5378102 -
ctatatctgtgttttggtac

SEQ ID NO: 31498 - DNA, 20 bp, Artificial Sequence
  Synthetic oligonucleotide; TGG chr11 5378083 5378102 5378086 -
gtaccagtaacatgctgttt

SEQ ID NO: 31499 - DNA, 20 bp, Artificial Sequence
  Synthetic oligonucleotide; TAG chr11 5378074 5378093 5378077 -
acatgctgttttggttactg

SEQ ID NO: 31500 - DNA, 20 bp, Artificial Sequence
  Synthetic oligonucleotide; TAG chr11 5378066 5378085 5378069 -
ttttggttactgtagccttg

SEQ ID NO: 31501 - DNA, 20 bp, Artificial Sequence
  Synthetic oligonucleotide; TAG chr11 5378061 5378080 5378064 -
gttactgtagccttgtagta

SEQ ID NO: 31502 - DNA, 20 bp, Artificial Sequence
  Synthetic oligonucleotide; AAG chr11 5378054 5378073 5378057 -
tagccttgtagtatagtttg

SEQ ID NO: 31503 - DNA, 20 bp, Artificial Sequence
  Synthetic oligonucleotide; GAG chr11 5378050 5378069 5378053 -
cttgtagtatagtttgaagt

SEQ ID NO: 31504 - DNA, 20 bp, Artificial Sequence
  Synthetic oligonucleotide; AGG chr11 5378049 5378068 5378052 -
ttgtagtatagtttgaagtg

SEQ ID NO: 31505 - DNA, 20 bp, Artificial Sequence
  Synthetic oligonucleotide; TAG chr11 5378046 5378065 5378049 -
tagtatagtttgaagtgagg

SEQ ID NO: 31506 - DNA, 20 bp, Artificial Sequence
  Synthetic oligonucleotide; CAG chr11 5378032 5378051 5378035 -
gtgaggtagcctgatgcctc

SEQ ID NO: 31507 - DNA, 20 bp, Artificial Sequence
  Synthetic oligonucleotide; TGG chr11 5378018 5378037 5378021 -
tgcctccagctttgttcttt

SEQ ID NO: 31508 - DNA, 20 bp, Artificial Sequence
  Synthetic oligonucleotide; TAG chr11 5378013 5378032 5378016 -
ccagctttgttcttttggct

SEQ ID NO: 31509 - DNA, 20 bp, Artificial Sequence
  Synthetic oligonucleotide; AGG chr11 5378012 5378031 5378015 -
cagctttgttcttttggctt

SEQ ID NO: 31510 - DNA, 20 bp, Artificial Sequence
  Synthetic oligonucleotide; TGG chr11 5378002 5378021 5378005 -
cttttggcttaggattgact

SEQ ID NO: 31511 - DNA, 20 bp, Artificial Sequence
  Synthetic oligonucleotide; CAG chr11 5377994 5378013 5377997 -
ttaggattgacttggcaatg

SEQ ID NO: 31512 - DNA, 20 bp, Artificial Sequence
  Synthetic oligonucleotide; AGG chr11 5377993 5378012 5377996 -
taggattgacttggcaatgc

SEQ ID NO: 31513 - DNA, 20 bp, Artificial Sequence
  Synthetic oligonucleotide; TGG chr11 5377982 5378001 5377985 -
tggcaatgcaggctcttttt

SEQ ID NO: 31514 - DNA, 20 bp, Artificial Sequence
  Synthetic oligonucleotide; AAG chr11 5377963 5377982 5377966 -
ttggttccatatgaacttta

SEQ ID NO: 31515 - DNA, 20 bp, Artificial Sequence
  Synthetic oligonucleotide; AAG chr11 5377941 5377960 5377944 -
gtcgtttttccaattctgtg

SEQ ID NO: 31516 - DNA, 20 bp, Artificial Sequence
  Synthetic oligonucleotide; TGG chr11 5377930 5377949 5377933 -
aattctgtgaagaaaatcat

SEQ ID NO: 31517 - DNA, 20 bp, Artificial Sequence
  Synthetic oligonucleotide; TAG chr11 5377927 5377946 5377930 -
tctgtgaagaaaatcattgg

SEQ ID NO: 31518 - DNA, 20 bp, Artificial Sequence
  Synthetic oligonucleotide; TGG chr11 5377919 5377938 5377922 -
gaaaatcattggtagcttga

SEQ ID NO: 31519 - DNA, 20 bp, Artificial Sequence
  Synthetic oligonucleotide; GGG chr11 5377918 5377937 5377921 -
aaaatcattggtagcttgat

SEQ ID NO: 31520 - DNA, 20 bp, Artificial Sequence
  Synthetic oligonucleotide; GGG chr11 5377917 5377936 5377920 -
aaatcattggtagcttgatg

SEQ ID NO: 31521 - DNA, 20 bp, Artificial Sequence
  Synthetic oligonucleotide; TGG chr11 5377913 5377932 5377916 -
cattggtagcttgatgggga

SEQ ID NO: 31522 - DNA, 20 bp, Artificial Sequence
  Synthetic oligonucleotide; TGG chr11 5377889 5377908 5377892 -
attgaatctataaattacct

SEQ ID NO: 31523 - DNA, 20 bp, Artificial Sequence
  Synthetic oligonucleotide; GGG chr11 5377888 5377907 5377891 -
ttgaatctataaattacctt

SEQ ID NO: 31524 - DNA, 20 bp, Artificial Sequence
  Synthetic oligonucleotide; TGG chr11 5377880 5377899 5377883 -
ataaattaccttgggcatta

SEQ ID NO: 31525 - DNA, 20 bp, Artificial Sequence
  Synthetic oligonucleotide; AAG chr11 5377845 5377864 5377848 -
tattgattcttcctacccat

SEQ ID NO: 31526 - DNA, 20 bp, Artificial Sequence
  Synthetic oligonucleotide; TGG chr11 5377840 5377859 5377843 -
attcttcctacccataagca

SEQ ID NO: 31527 - DNA, 20 bp, Artificial Sequence
  Synthetic oligonucleotide; GAG chr11 5377798 5377817 5377801 -
gtatcttcttttatttcatt

SEQ ID NO: 31528 - DNA, 20 bp, Artificial Sequence
  Synthetic oligonucleotide; CAG chr11 5377795 5377814 5377798 -
tcttcttttatttcattgag

SEQ ID NO: 31529 - DNA, 20 bp, Artificial Sequence
  Synthetic oligonucleotide; TGG chr11 5377792 5377811 5377795 -
tcttttatttcattgagcag

SEQ ID NO: 31530 - DNA, 20 bp, Artificial Sequence
  Synthetic oligonucleotide; TAG chr11 5377785 5377804 5377788 -
tttcattgagcagtggtttg

SEQ ID NO: 31531 - DNA, 20 bp, Artificial Sequence
  Synthetic oligonucleotide; AAG chr11 5377773 5377792 5377776 -
gtggtttgtagttctccttg

SEQ ID NO: 31532 - DNA, 20 bp, Artificial Sequence
  Synthetic oligonucleotide; GAG chr11 5377771 5377790 5377774 -
ggtttgtagttctccttgaa

SEQ ID NO: 31533 - DNA, 20 bp, Artificial Sequence
  Synthetic oligonucleotide; AGG chr11 5377770 5377789 5377773 -
gtttgtagttctccttgaag

SEQ ID NO: 31534 - DNA, 20 bp, Artificial Sequence
  Synthetic oligonucleotide; AAG chr11 5377750 5377769 5377753 -
aggtccttcacatcccttgt

SEQ ID NO: 31535 - DNA, 20 bp, Artificial Sequence
  Synthetic oligonucleotide; TGG chr11 5377746 5377765 5377749 -
ccttcacatcccttgtaagt

SEQ ID NO: 31536 - DNA, 20 bp, Artificial Sequence
  Synthetic oligonucleotide; TAG chr11 5377738 5377757 5377741 -
tcccttgtaagttggattcc

SEQ ID NO: 31537 - DNA, 20 bp, Artificial Sequence
  Synthetic oligonucleotide; AGG chr11 5377737 5377756 5377740 -
cccttgtaagttggattcct

SEQ ID NO: 31538 - DNA, 20 bp, Artificial Sequence
  Synthetic oligonucleotide; AAG chr11 5377718 5377737 5377721 -
taggtattttattctctttg

SEQ ID NO: 31539 - DNA, 20 bp, Artificial Sequence
  Synthetic oligonucleotide; TGG chr11 5377705 5377724 5377708 -
ctctttgaagcaattgtgaa

SEQ ID NO: 31540 - DNA, 20 bp, Artificial Sequence
  Synthetic oligonucleotide; GGG chr11 5377704 5377723 5377707 -
tctttgaagcaattgtgaat

SEQ ID NO: 31541 - DNA, 20 bp, Artificial Sequence
  Synthetic oligonucleotide; GAG chr11 5377702 5377721 5377705 -
tttgaagcaattgtgaatgg

SEQ ID NO: 31542 - DNA, 20 bp, Artificial Sequence
  Synthetic oligonucleotide; TGG chr11 5377686 5377705 5377689 -
atgggagttccctcatgatt

SEQ ID NO: 31543 - DNA, 20 bp, Artificial Sequence
  Synthetic oligonucleotide; TGG chr11 5377664 5377683 5377667 -
gctctctgtttgtctgttat

SEQ ID NO: 31544 - DNA, 20 bp, Artificial Sequence
  Synthetic oligonucleotide; AAG chr11 5377656 5377675 5377659 -
tttgtctgttattggtgtat

SEQ ID NO: 31545 - DNA, 20 bp, Artificial Sequence
  Synthetic oligonucleotide; TGG chr11 5377631 5377650 5377634 -
tgcttgtgatttttgcacat

SEQ ID NO: 31546 - DNA, 20 bp, Artificial Sequence
  Synthetic oligonucleotide; GAG chr11 5377617 5377636 5377620 -
gcacattggttttgtatcct

SEQ ID NO: 31547 - DNA, 20 bp, Artificial Sequence
  Synthetic oligonucleotide; AGG chr11 5377616 5377635 5377619 -
cacattggttttgtatcctg

SEQ ID NO: 31548 - DNA, 20 bp, Artificial Sequence
  Synthetic oligonucleotide; AAG chr11 5377605 5377624 5377608 -
tgtatcctgaggctttgctg

SEQ ID NO: 31549 - DNA, 20 bp, Artificial Sequence
  Synthetic oligonucleotide; CAG chr11 5377594 5377613 5377597 -
gctttgctgaagttgcttat

SEQ ID NO: 31550 - DNA, 20 bp, Artificial Sequence
  Synthetic oligonucleotide; AAG chr11 5377588 5377607 5377591 -
ctgaagttgcttatcagctt

SEQ ID NO: 31551 - DNA, 20 bp, Artificial Sequence
  Synthetic oligonucleotide; AGG chr11 5377587 5377606 5377590 -
tgaagttgcttatcagctta

SEQ ID NO: 31552 - DNA, 20 bp, Artificial Sequence
  Synthetic oligonucleotide; GAG chr11 5377585 5377604 5377588 -
aagttgcttatcagcttaag

SEQ ID NO: 31553 - DNA, 20 bp, Artificial Sequence
  Synthetic oligonucleotide; TGG chr11 5377578 5377597 5377581 -
ttatcagcttaaggagattt

SEQ ID NO: 31554 - DNA, 20 bp, Artificial Sequence
  Synthetic oligonucleotide; GGG chr11 5377577 5377596 5377580 -
tatcagcttaaggagatttt

SEQ ID NO: 31555 - DNA, 20 bp, Artificial Sequence
  Synthetic oligonucleotide; GAG chr11 5377572 5377591 5377575 -
gcttaaggagattttgggct

SEQ ID NO: 31556 - DNA, 20 bp, Artificial Sequence
  Synthetic oligonucleotide; AAG chr11 5377567 5377586 5377570 -
aggagattttgggctgagac

SEQ ID NO: 31557 - DNA, 20 bp, Artificial Sequence
  Synthetic oligonucleotide; AGG chr11 5377566 5377585 5377569 -
ggagattttgggctgagaca

SEQ ID NO: 31558 - DNA, 20 bp, Artificial Sequence
  Synthetic oligonucleotide; GGG chr11 5377565 5377584 5377568 -
gagattttgggctgagacaa

SEQ ID NO: 31559 - DNA, 20 bp, Artificial Sequence
  Synthetic oligonucleotide; GGG chr11 5377564 5377583 5377567 -
agattttgggctgagacaag

SEQ ID NO: 31560 - DNA, 20 bp, Artificial Sequence
  Synthetic oligonucleotide; GGG chr11 5377563 5377582 5377566 -
gattttgggctgagacaagg

SEQ ID NO: 31561 - DNA, 20 bp, Artificial Sequence
  Synthetic oligonucleotide; TAG chr11 5377555 5377574 5377558 -
gctgagacaagggggttttc

SEQ ID NO: 31562 - DNA, 20 bp, Artificial Sequence
  Synthetic oligonucleotide; CAG chr11 5377528 5377547 5377531 -
acaatcatgtcgtctgcaaa

SEQ ID NO: 31563 - DNA, 20 bp, Artificial Sequence
  Synthetic oligonucleotide; AGG chr11 5377527 5377546 5377530 -
caatcatgtcgtctgcaaac

SEQ ID NO: 31564 - DNA, 20 bp, Artificial Sequence
  Synthetic oligonucleotide; GGG chr11 5377526 5377545 5377529 -
aatcatgtcgtctgcaaaca

SEQ ID NO: 31565 - DNA, 20 bp, Artificial Sequence
  Synthetic oligonucleotide; TGG chr11 5377460 5377479 5377463 -
tgtcttctgcctaattgccc

SEQ ID NO: 31566 - DNA, 20 bp, Artificial Sequence
  Synthetic oligonucleotide; CAG chr11 5377456 5377475 5377459 -
ttctgcctaattgccctggc

SEQ ID NO: 31567 - DNA, 20 bp, Artificial Sequence
  Synthetic oligonucleotide; TAG chr11 5377432 5377451 5377435 -
acttccaacactatgttgaa

SEQ ID NO: 31568 - DNA, 20 bp, Artificial Sequence
  Synthetic oligonucleotide; AGG chr11 5377431 5377450 5377434 -
cttccaacactatgttgaat

SEQ ID NO: 31569 - DNA, 20 bp, Artificial Sequence
  Synthetic oligonucleotide; GAG chr11 5377429 5377448 5377432 -
tccaacactatgttgaatag

SEQ ID NO: 31570 - DNA, 20 bp, Artificial Sequence
  Synthetic oligonucleotide; TAG chr11 5377426 5377445 5377429 -
aacactatgttgaataggag

SEQ ID NO: 31571 - DNA, 20 bp, Artificial Sequence
  Synthetic oligonucleotide; GAG chr11 5377422 5377441 5377425 -
ctatgttgaataggagtagt

SEQ ID NO: 31572 - DNA, 20 bp, Artificial Sequence
  Synthetic oligonucleotide; GAG chr11 5377420 5377439 5377423 -
atgttgaataggagtagtga

SEQ ID NO: 31573 - DNA, 20 bp, Artificial Sequence
  Synthetic oligonucleotide; GAG chr11 5377418 5377437 5377421 -
gttgaataggagtagtgaga

SEQ ID NO: 31574 - DNA, 20 bp, Artificial Sequence
  Synthetic oligonucleotide; AGG chr11 5377417 5377436 5377420 -
ttgaataggagtagtgagag

SEQ ID NO: 31575 - DNA, 20 bp, Artificial Sequence
  Synthetic oligonucleotide; GGG chr11 5377416 5377435 5377419 -
tgaataggagtagtgagaga

SEQ ID NO: 31576 - DNA, 20 bp, Artificial Sequence
  Synthetic oligonucleotide; CAG chr11 5377397 5377416 5377400 -
agggcatccctgtcttgtgc

SEQ ID NO: 31577 - DNA, 20 bp, Artificial Sequence
  Synthetic oligonucleotide; AAG chr11 5377388 5377407 5377391 -
ctgtcttgtgccagtttaca

SEQ ID NO: 31578 - DNA, 20 bp, Artificial Sequence
  Synthetic oligonucleotide; AGG chr11 5377387 5377406 5377390 -
tgtcttgtgccagtttacaa

SEQ ID NO: 31579 - DNA, 20 bp, Artificial Sequence
  Synthetic oligonucleotide; GGG chr11 5377386 5377405 5377389 -
gtcttgtgccagtttacaaa

SEQ ID NO: 31580 - DNA, 20 bp, Artificial Sequence
  Synthetic oligonucleotide; CAG chr11 5377375 5377394 5377378 -
gtttacaaagggaatgcttc

SEQ ID NO: 31581 - DNA, 20 bp, Artificial Sequence
  Synthetic oligonucleotide; CAG chr11 5377360 5377379 5377363 -
gcttccagtttttgcccatt

SEQ ID NO: 31582 - DNA, 20 bp, Artificial Sequence
  Synthetic oligonucleotide; TGG chr11 5377349 5377368 5377352 -
ttgcccattcagtatgatat

SEQ ID NO: 31583 - DNA, 20 bp, Artificial Sequence
  Synthetic oligonucleotide; TGG chr11 5377343 5377362 5377346 -
attcagtatgatattggctg

SEQ ID NO: 31584 - DNA, 20 bp, Artificial Sequence
  Synthetic oligonucleotide; GGG chr11 5377342 5377361 5377345 -
ttcagtatgatattggctgt

SEQ ID NO: 31585 - DNA, 20 bp, Artificial Sequence
  Synthetic oligonucleotide; TAG chr11 5377332 5377351 5377335 -
tattggctgtgggtttgtca

SEQ ID NO: 31586 - DNA, 20 bp, Artificial Sequence
  Synthetic oligonucleotide; TAG chr11 5377328 5377347 5377331 -
ggctgtgggtttgtcataga

SEQ ID NO: 31587 - DNA, 20 bp, Artificial Sequence
  Synthetic oligonucleotide; GAG chr11 5377312 5377331 5377315 -
tagatagctcttattatttt

SEQ ID NO: 31588 - DNA, 20 bp, Artificial Sequence
  Synthetic oligonucleotide; AAG chr11 5377280 5377299 5377283 -
atcaatacctaatttattga

SEQ ID NO: 31589 - DNA, 20 bp, Artificial Sequence
  Synthetic oligonucleotide; TAG chr11 5377273 5377292 5377276 -
cctaatttattgaaagtttt

SEQ ID NO: 31590 - DNA, 20 bp, Artificial Sequence
  Synthetic oligonucleotide; AAG chr11 5377266 5377285 5377269 -
tattgaaagtttttagcatg

SEQ ID NO: 31591 - DNA, 20 bp, Artificial Sequence
  Synthetic oligonucleotide; AGG chr11 5377265 5377284 5377268 -
attgaaagtttttagcatga

SEQ ID NO: 31592 - DNA, 20 bp, Artificial Sequence
  Synthetic oligonucleotide; GGG chr11 5377264 5377283 5377267 -
ttgaaagtttttagcatgaa

SEQ ID NO: 31593 - DNA, 20 bp, Artificial Sequence
  Synthetic oligonucleotide; AAG chr11 5377245 5377264 5377248 -
agggttgttgaattttgtca

SEQ ID NO: 31594 - DNA, 20 bp, Artificial Sequence
  Synthetic oligonucleotide; AGG chr11 5377244 5377263 5377247 -
gggttgttgaattttgtcaa

SEQ ID NO: 31595 - DNA, 20 bp, Artificial Sequence
  Synthetic oligonucleotide; GAG chr11 5377224 5377243 5377227 -
aggccttttctgcatctatt

SEQ ID NO: 31596 - DNA, 20 bp, Artificial Sequence
  Synthetic oligonucleotide; TGG chr11 5377212 5377231 5377215 -
catctattgagataatcatg

SEQ ID NO: 31597 - DNA, 20 bp, Artificial Sequence
  Synthetic oligonucleotide; TGG chr11 5377199 5377218 5377202 -
aatcatgtggtttttgtctt

SEQ ID NO: 31598 - DNA, 20 bp, Artificial Sequence
  Synthetic oligonucleotide; TGG chr11 5377182 5377201 5377185 -
ctttggttctgtttatatgc

SEQ ID NO: 31599 - DNA, 20 bp, Artificial Sequence
  Synthetic oligonucleotide; CAG chr11 5377149 5377168 5377152 -
ttgatttgcatatattgaac

SEQ ID NO: 31600 - DNA, 20 bp, Artificial Sequence
  Synthetic oligonucleotide; CAG chr11 5377136 5377155 5377139 -
attgaaccagccttgcatcc

SEQ ID NO: 31601 - DNA, 20 bp, Artificial Sequence
  Synthetic oligonucleotide; AGG chr11 5377135 5377154 5377138 -
ttgaaccagccttgcatccc

SEQ ID NO: 31602 - DNA, 20 bp, Artificial Sequence
  Synthetic oligonucleotide; GGG chr11 5377134 5377153 5377137 -
tgaaccagccttgcatccca

SEQ ID NO: 31603 - DNA, 20 bp, Artificial Sequence
  Synthetic oligonucleotide; AAG chr11 5377128 5377147 5377131 -
agccttgcatcccagggatg

SEQ ID NO: 31604 - DNA, 20 bp, Artificial Sequence
  Synthetic oligonucleotide; TGG chr11 5377110 5377129 5377113 -
tgaagtccacttgatcatcg

SEQ ID NO: 31605 - DNA, 20 bp, Artificial Sequence
  Synthetic oligonucleotide; AAG chr11 5377105 5377124 5377108 -
tccacttgatcatcgtggat

SEQ ID NO: 31606 - DNA, 20 bp, Artificial Sequence
  Synthetic oligonucleotide; TGG chr11 5377086 5377105 5377089 -
taagctttttgatgtgctgc

SEQ ID NO: 31607 - DNA, 20 bp, Artificial Sequence
  Synthetic oligonucleotide; CGG chr11 5377080 5377099 5377083 -
ttttgatgtgctgctggatt

SEQ ID NO: 31608 - DNA, 20 bp, Artificial Sequence
  Synthetic oligonucleotide; CAG chr11 5377072 5377091 5377075 -
tgctgctggattcggtttgc

SEQ ID NO: 31609 - DNA, 20 bp, Artificial Sequence
  Synthetic oligonucleotide; GAG chr11 5377060 5377079 5377063 -
cggtttgccagtattttatt

SEQ ID NO: 31610 - DNA, 20 bp, Artificial Sequence
  Synthetic oligonucleotide; AGG chr11 5377059 5377078 5377062 -
ggtttgccagtattttattg

SEQ ID NO: 31611 - DNA, 20 bp, Artificial Sequence
  Synthetic oligonucleotide; CAG chr11 5377036 5377055 5377039 -
atttttgcatcgatgttcat

SEQ ID NO: 31612 - DNA, 20 bp, Artificial Sequence
  Synthetic oligonucleotide; AGG chr11 5377035 5377054 5377038 -
tttttgcatcgatgttcatc

SEQ ID NO: 31613 - DNA, 20 bp, Artificial Sequence
  Synthetic oligonucleotide; GGG chr11 5377034 5377053 5377037 -
ttttgcatcgatgttcatca

SEQ ID NO: 31614 - DNA, 20 bp, Artificial Sequence
  Synthetic oligonucleotide; TGG chr11 5377007 5377026 5377010 -
tcatctaaaattctcttttt

SEQ ID NO: 31615 - DNA, 20 bp, Artificial Sequence
  Synthetic oligonucleotide; TGG chr11 5376991 5377010 5376994 -
tttttggttgtgtctctttc

SEQ ID NO: 31616 - DNA, 20 bp, Artificial Sequence
  Synthetic oligonucleotide; TGG chr11 5376985 5377004 5376988 -
gttgtgtctctttctggctt

SEQ ID NO: 31617 - DNA, 20 bp, Artificial Sequence
  Synthetic oligonucleotide; TAG chr11 5376979 5376998 5376982 -
tctctttctggctttggtat

SEQ ID NO: 31618 - DNA, 20 bp, Artificial Sequence
  Synthetic oligonucleotide; AGG chr11 5376978 5376997 5376981 -
ctctttctggctttggtatt

SEQ ID NO: 31619 - DNA, 20 bp, Artificial Sequence
  Synthetic oligonucleotide; TGG chr11 5376968 5376987 5376971 -
ctttggtattaggatgatgc

SEQ ID NO: 31620 - DNA, 20 bp, Artificial Sequence
  Synthetic oligonucleotide; GAG chr11 5376954 5376973 5376957 -
tgatgctggcctcataaaat

SEQ ID NO: 31621 - DNA, 20 bp, Artificial Sequence
  Synthetic oligonucleotide; TAG chr11 5376950 5376969 5376953 -
gctggcctcataaaatgagt

SEQ ID NO: 31622 - DNA, 20 bp, Artificial Sequence
  Synthetic oligonucleotide; AGG chr11 5376949 5376968 5376952 -
ctggcctcataaaatgagtt

SEQ ID NO: 31623 - DNA, 20 bp, Artificial Sequence
  Synthetic oligonucleotide; GGG chr11 5376948 5376967 5376951 -
tggcctcataaaatgagtta

SEQ ID NO: 31624 - DNA, 20 bp, Artificial Sequence
  Synthetic oligonucleotide; GAG chr11 5376946 5376965 5376949 -
gcctcataaaatgagttagg

SEQ ID NO: 31625 - DNA, 20 bp, Artificial Sequence
  Synthetic oligonucleotide; AGG chr11 5376945 5376964 5376948 -
cctcataaaatgagttaggg

SEQ ID NO: 31626 - DNA, 20 bp, Artificial Sequence
  Synthetic oligonucleotide; TGG chr11 5376921 5376940 5376924 -
ttccttctttttctgttgat

SEQ ID NO: 31627 - DNA, 20 bp, Artificial Sequence
  Synthetic oligonucleotide; TAG chr11 5376916 5376935 5376919 -
tctttttctgttgattggaa

SEQ ID NO: 31628 - DNA, 20 bp, Artificial Sequence
  Synthetic oligonucleotide; CAG chr11 5376910 5376929 5376913 -
tctgttgattggaatagttt

SEQ ID NO: 31629 - DNA, 20 bp, Artificial Sequence
  Synthetic oligonucleotide; AAG chr11 5376907 5376926 5376910 -
gttgattggaatagtttcag

SEQ ID NO: 31630 - DNA, 20 bp, Artificial Sequence
  Synthetic oligonucleotide; AGG chr11 5376906 5376925 5376909 -
ttgattggaatagtttcaga

SEQ ID NO: 31631 - DNA, 20 bp, Artificial Sequence
  Synthetic oligonucleotide; TGG chr11 5376901 5376920 5376904 -
tggaatagtttcagaaggaa

SEQ ID NO: 31632 - DNA, 20 bp, Artificial Sequence
  Synthetic oligonucleotide; TAG chr11 5376873 5376892 5376876 -
attcctccttgtacctctgt

SEQ ID NO: 31633 - DNA, 20 bp, Artificial Sequence
  Synthetic oligonucleotide; TGG chr11 5376866 5376885 5376869 -
cttgtacctctgttagaatt

SEQ ID NO: 31634 - DNA, 20 bp, Artificial Sequence
  Synthetic oligonucleotide; TGG chr11 5376850 5376869 5376853 -
aatttggctgtgaatccatc

SEQ ID NO: 31635 - DNA, 20 bp, Artificial Sequence
  Synthetic oligonucleotide; TGG chr11 5376844 5376863 5376847 -
gctgtgaatccatctggtcc

SEQ ID NO: 31636 - DNA, 20 bp, Artificial Sequence
  Synthetic oligonucleotide; TGG chr11 5376833 5376852 5376836 -
atctggtcctggactctttt

SEQ ID NO: 31637 - DNA, 20 bp, Artificial Sequence
  Synthetic oligonucleotide; TGG chr11 5376829 5376848 5376832 -
ggtcctggactctttttggt

SEQ ID NO: 31638 - DNA, 20 bp, Artificial Sequence
  Synthetic oligonucleotide; AAG chr11 5376825 5376844 5376828 -
ctggactctttttggttggt

SEQ ID NO: 31639 - DNA, 20 bp, Artificial Sequence
  Synthetic oligonucleotide; CAG chr11 5376800 5376819 5376803 -
attgattattgccacaattt

SEQ ID NO: 31640 - DNA, 20 bp, Artificial Sequence
  Synthetic oligonucleotide; TGG chr11 5376787 5376806 5376790 -
acaatttcagatcctgttat

SEQ ID NO: 31641 - DNA, 20 bp, Artificial Sequence
  Synthetic oligonucleotide; CAG chr11 5376778 5376797 5376781 -
gatcctgttattggtctatt

SEQ ID NO: 31642 - DNA, 20 bp, Artificial Sequence
  Synthetic oligonucleotide; GAG chr11 5376776 5376795 5376779 -
tcctgttattggtctattca

SEQ ID NO: 31643 - DNA, 20 bp, Artificial Sequence
  Synthetic oligonucleotide; TGG chr11 5376759 5376778 5376762 -
tcagagattcaacttcttcc

SEQ ID NO: 31644 - DNA, 20 bp, Artificial Sequence
  Synthetic oligonucleotide; TAG chr11 5376754 5376773 5376757 -
gattcaacttcttcctggtt

SEQ ID NO: 31645 - DNA, 20 bp, Artificial Sequence
  Synthetic oligonucleotide; TGG chr11 5376748 5376767 5376751 -
acttcttcctggtttagtct

SEQ ID NO: 31646 - DNA, 20 bp, Artificial Sequence
  Synthetic oligonucleotide; GGG chr11 5376747 5376766 5376750 -
cttcttcctggtttagtctt

SEQ ID NO: 31647 - DNA, 20 bp, Artificial Sequence
  Synthetic oligonucleotide; TAG chr11 5376743 5376762 5376746 -
ttcctggtttagtcttggga

SEQ ID NO: 31648 - DNA, 20 bp, Artificial Sequence
  Synthetic oligonucleotide; CAG chr11 5376730 5376749 5376733 -
cttgggatagtgtatgtgtc

SEQ ID NO: 31649 - DNA, 20 bp, Artificial Sequence
  Synthetic oligonucleotide; AGG chr11 5376729 5376748 5376732 -
ttgggatagtgtatgtgtcc

SEQ ID NO: 31650 - DNA, 20 bp, Artificial Sequence
  Synthetic oligonucleotide; TAG chr11 5376709 5376728 5376712 -
aggaatttatccatttcttc

SEQ ID NO: 31651 - DNA, 20 bp, Artificial Sequence
  Synthetic oligonucleotide; TAG chr11 5376700 5376719 5376703 -
tccatttcttctagattttc

SEQ ID NO: 31652 - DNA, 20 bp, Artificial Sequence
  Synthetic oligonucleotide; TAG chr11 5376687 5376706 5376690 -
gattttctagtttatttgcg

SEQ ID NO: 31653 - DNA, 20 bp, Artificial Sequence
  Synthetic oligonucleotide; GAG chr11 5376685 5376704 5376688 -
ttttctagtttatttgcgta

SEQ ID NO: 31654 - DNA, 20 bp, Artificial Sequence
  Synthetic oligonucleotide; AGG chr11 5376684 5376703 5376687 -
tttctagtttatttgcgtag

SEQ ID NO: 31655 - DNA, 20 bp, Artificial Sequence
  Synthetic oligonucleotide; TAG chr11 5376675 5376694 5376678 -
tatttgcgtagaggtgtttg

SEQ ID NO: 31656 - DNA, 20 bp, Artificial Sequence
  Synthetic oligonucleotide; TGG chr11 5376662 5376681 5376665 -
gtgtttgtagtattctctga

SEQ ID NO: 31657 - DNA, 20 bp, Artificial Sequence
  Synthetic oligonucleotide; CAG chr11 5376659 5376678 5376662 -
tttgtagtattctctgatgg

SEQ ID NO: 31658 - DNA, 20 bp, Artificial Sequence
  Synthetic oligonucleotide; TGG chr11 5376644 5376663 5376647 -
gatggcagtttgtatttctg

SEQ ID NO: 31659 - DNA, 20 bp, Artificial Sequence
  Synthetic oligonucleotide; GGG chr11 5376643 5376662 5376646 -
atggcagtttgtatttctgt

SEQ ID NO: 31660 - DNA, 20 bp, Artificial Sequence
  Synthetic oligonucleotide; CGG chr11 5376638 5376657 5376641 -
agtttgtatttctgtgggat

SEQ ID NO: 31661 - DNA, 20 bp, Artificial Sequence
  Synthetic oligonucleotide; TGG chr11 5376635 5376654 5376638 -
ttgtatttctgtgggatcgg

SEQ ID NO: 31662 - DNA, 20 bp, Artificial Sequence
  Synthetic oligonucleotide; TAG chr11 5376574 5376593 5376577 -
attcttctctcttttcttat

SEQ ID NO: 31663 - DNA, 20 bp, Artificial Sequence
  Synthetic oligonucleotide; TAG chr11 5376565 5376584 5376568 -
tcttttcttattagtcttgc

SEQ ID NO: 31664 - DNA, 20 bp, Artificial Sequence
  Synthetic oligonucleotide; CGG chr11 5376562 5376581 5376565 -
tttcttattagtcttgctag

SEQ ID NO: 31665 - DNA, 20 bp, Artificial Sequence
  Synthetic oligonucleotide; CAG chr11 5376554 5376573 5376557 -
tagtcttgctagcggtctat

SEQ ID NO: 31666 - DNA, 20 bp, Artificial Sequence
  Synthetic oligonucleotide; CAG chr11 5376528 5376547 5376531 -
tgttgatcctttcaaaaaac

SEQ ID NO: 31667 - DNA, 20 bp, Artificial Sequence
  Synthetic oligonucleotide; CAG chr11 5376521 5376540 5376524 -
cctttcaaaaaaccagctcc

SEQ ID NO: 31668 - DNA, 20 bp, Artificial Sequence
  Synthetic oligonucleotide; AAG chr11 5376502 5376521 5376505 -
ccagattcattaattttttg

SEQ ID NO: 31669 - DNA, 20 bp, Artificial Sequence
  Synthetic oligonucleotide; AGG chr11 5376501 5376520 5376504 -
cagattcattaattttttga

SEQ ID NO: 31670 - DNA, 20 bp, Artificial Sequence
  Synthetic oligonucleotide; GGG chr11 5376500 5376519 5376503 -
agattcattaattttttgaa

SEQ ID NO: 31671 - DNA, 20 bp, Artificial Sequence
  Synthetic oligonucleotide; CAG chr11 5376475 5376494 5376478 -
ttttgtgtctctgtttcctt

SEQ ID NO: 31672 - DNA, 20 bp, Artificial Sequence
  Synthetic oligonucleotide; TAG chr11 5376458 5376477 5376461 -
cttcagttctgctctgattt

SEQ ID NO: 31673 - DNA, 20 bp, Artificial Sequence
  Synthetic oligonucleotide; TAG chr11 5376437 5376456 5376440 -
agttatttcttgacttctgc

SEQ ID NO: 31674 - DNA, 20 bp, Artificial Sequence
  Synthetic oligonucleotide; TAG chr11 5376406 5376425 5376409 -
tgtgtttgctcttgcttatc

SEQ ID NO: 31675 - DNA, 20 bp, Artificial Sequence
  Synthetic oligonucleotide; TAG chr11 5376385 5376404 5376388 -
agttcttttaattgtgatgt

SEQ ID NO: 31676 - DNA, 20 bp, Artificial Sequence
  Synthetic oligonucleotide; AGG chr11 5376384 5376403 5376387 -
gttcttttaattgtgatgtt

SEQ ID NO: 31677 - DNA, 20 bp, Artificial Sequence
  Synthetic oligonucleotide; GGG chr11 5376383 5376402 5376386 -
ttcttttaattgtgatgtta

SEQ ID NO: 31678 - DNA, 20 bp, Artificial Sequence
  Synthetic oligonucleotide; TGG chr11 5376371 5376390 5376374 -
tgatgttagggtgtcaattt

SEQ ID NO: 31679 - DNA, 20 bp, Artificial Sequence
  Synthetic oligonucleotide; TGG chr11 5376348 5376367 5376351 -
atctttcttgctttctcttg

SEQ ID NO: 31680 - DNA, 20 bp, Artificial Sequence
  Synthetic oligonucleotide; GGG chr11 5376347 5376366 5376350 -
tctttcttgctttctcttgt

SEQ ID NO: 31681 - DNA, 20 bp, Artificial Sequence
  Synthetic oligonucleotide; TAG chr11 5376340 5376359 5376343 -
tgctttctcttgtgggcgtt

SEQ ID NO: 31682 - DNA, 20 bp, Artificial Sequence
  Synthetic oligonucleotide; CAG chr11 5376297 5376316 5376300 -
acactgattcgaatgtgtcc

SEQ ID NO: 31683 - DNA, 20 bp, Artificial Sequence
  Synthetic oligonucleotide; GAG chr11 5376295 5376314 5376298 -
actgattcgaatgtgtccca

SEQ ID NO: 31684 - DNA, 20 bp, Artificial Sequence
  Synthetic oligonucleotide; TGG chr11 5376288 5376307 5376291 -
cgaatgtgtcccagagattc

SEQ ID NO: 31685 - DNA, 20 bp, Artificial Sequence
  Synthetic oligonucleotide; TGG chr11 5376263 5376282 5376266 -
tgttgtgtctttgttctcat

SEQ ID NO: 31686 - DNA, 20 bp, Artificial Sequence
  Synthetic oligonucleotide; AAG chr11 5376255 5376274 5376258 -
ctttgttctcattggtttca

SEQ ID NO: 31687 - DNA, 20 bp, Artificial Sequence
  Synthetic oligonucleotide; CAG chr11 5376216 5376235 5376219 -
ccttcatttcgttatgtacc

SEQ ID NO: 31688 - DNA, 20 bp, Artificial Sequence
  Synthetic oligonucleotide; TAG chr11 5376213 5376232 5376216 -
tcatttcgttatgtacccag

SEQ ID NO: 31689 - DNA, 20 bp, Artificial Sequence
  Synthetic oligonucleotide; CAG chr11 5376205 5376224 5376208 -
ttatgtacccagtagtcatt

SEQ ID NO: 31690 - DNA, 20 bp, Artificial Sequence
  Synthetic oligonucleotide; AGG chr11 5376204 5376223 5376207 -
tatgtacccagtagtcattc

SEQ ID NO: 31691 - DNA, 20 bp, Artificial Sequence
  Synthetic oligonucleotide; GAG chr11 5376202 5376221 5376205 -
tgtacccagtagtcattcag

SEQ ID NO: 31692 - DNA, 20 bp, Artificial Sequence
  Synthetic oligonucleotide; CAG chr11 5376199 5376218 5376202 -
acccagtagtcattcaggag

SEQ ID NO: 31693 - DNA, 20 bp, Artificial Sequence
  Synthetic oligonucleotide; AGG chr11 5376198 5376217 5376201 -
cccagtagtcattcaggagc

SEQ ID NO: 31694 - DNA, 20 bp, Artificial Sequence
  Synthetic oligonucleotide; CAG chr11 5376190 5376209 5376193 -
tcattcaggagcaggttgtt

SEQ ID NO: 31695 - DNA, 20 bp, Artificial Sequence
  Synthetic oligonucleotide; TAG chr11 5376179 5376198 5376182 -
caggttgttcagtttccatg

SEQ ID NO: 31696 - DNA, 20 bp, Artificial Sequence
  Synthetic oligonucleotide; GAG chr11 5376174 5376193 5376177 -
tgttcagtttccatgtagtt

SEQ ID NO: 31697 - DNA, 20 bp, Artificial Sequence
  Synthetic oligonucleotide; TGG chr11 5376171 5376190 5376174 -
tcagtttccatgtagttgag

SEQ ID NO: 31698 - DNA, 20 bp, Artificial Sequence
  Synthetic oligonucleotide; GAG chr11 5376164 5376183 5376167 -
ccatgtagttgagtggtttt

SEQ ID NO: 31699 - DNA, 20 bp, Artificial Sequence
  Synthetic oligonucleotide; GAG chr11 5376160 5376179 5376163 -
gtagttgagtggttttgagt

SEQ ID NO: 31700 - DNA, 20 bp, Artificial Sequence
  Synthetic oligonucleotide; GAG chr11 5376145 5376164 5376148 -
tgagtgagtttcttaatcct

SEQ ID NO: 31701 - DNA, 20 bp, Artificial Sequence
  Synthetic oligonucleotide; TAG chr11 5376139 5376158 5376142 -
agtttcttaatcctgagttc

SEQ ID NO: 31702 - DNA, 20 bp, Artificial Sequence
  Synthetic oligonucleotide; TGG chr11 5376123 5376142 5376126 -
gttctagtttgattgcactg

SEQ ID NO: 31703 - DNA, 20 bp, Artificial Sequence
  Synthetic oligonucleotide; GAG chr11 5376117 5376136 5376120 -
gtttgattgcactgtggtct

SEQ ID NO: 31704 - DNA, 20 bp, Artificial Sequence
  Synthetic oligonucleotide; GAG chr11 5376115 5376134 5376118 -
ttgattgcactgtggtctga

SEQ ID NO: 31705 - DNA, 20 bp, Artificial Sequence
  Synthetic oligonucleotide; CAG chr11 5376111 5376130 5376114 -
ttgcactgtggtctgagaga

SEQ ID NO: 31706 - DNA, 20 bp, Artificial Sequence
  Synthetic oligonucleotide; GAG chr11 5376076 5376095 5376079 -
tctgttcttttatatttgct

SEQ ID NO: 31707 - DNA, 20 bp, Artificial Sequence
  Synthetic oligonucleotide; AGG chr11 5376075 5376094 5376078 -
ctgttcttttatatttgctg

SEQ ID NO: 31708 - DNA, 20 bp, Artificial Sequence
  Synthetic oligonucleotide; GAG chr11 5376073 5376092 5376076 -
gttcttttatatttgctgag

SEQ ID NO: 31709 - DNA, 20 bp, Artificial Sequence
  Synthetic oligonucleotide; GAG chr11 5376071 5376090 5376074 -
tcttttatatttgctgagga

SEQ ID NO: 31710 - DNA, 20 bp, Artificial Sequence
  Synthetic oligonucleotide; AAG chr11 5376058 5376077 5376061 -
ctgaggagagctttacttcc

SEQ ID NO: 31711 - DNA, 20 bp, Artificial Sequence
  Synthetic oligonucleotide; TGG chr11 5376051 5376070 5376054 -
gagctttacttccaagtatg

SEQ ID NO: 31712 - DNA, 20 bp, Artificial Sequence
  Synthetic oligonucleotide; TGG chr11 5376041 5376060 5376044 -
tccaagtatgtggtcaattt

SEQ ID NO: 31713 - DNA, 20 bp, Artificial Sequence
  Synthetic oligonucleotide; TAG chr11 5376036 5376055 5376039 -
gtatgtggtcaattttggaa

SEQ ID NO: 31714 - DNA, 20 bp, Artificial Sequence
  Synthetic oligonucleotide; AGG chr11 5376035 5376054 5376038 -
tatgtggtcaattttggaat

SEQ ID NO: 31715 - DNA, 20 bp, Artificial Sequence
  Synthetic oligonucleotide; TGG chr11 5376025 5376044 5376028 -
attttggaataggtgttgtg

SEQ ID NO: 31716 - DNA, 20 bp, Artificial Sequence
  Synthetic oligonucleotide; TGG chr11 5375992 5376011 5375995 -
aaatgtatattctgttgatt

SEQ ID NO: 31717 - DNA, 20 bp, Artificial Sequence
  Synthetic oligonucleotide; GGG chr11 5375991 5376010 5375994 -
aatgtatattctgttgattt

SEQ ID NO: 31718 - DNA, 20 bp, Artificial Sequence
  Synthetic oligonucleotide; GGG chr11 5375990 5376009 5375993 -
atgtatattctgttgatttg

SEQ ID NO: 31719 - DNA, 20 bp, Artificial Sequence
  Synthetic oligonucleotide; TGG chr11 5375987 5376006 5375990 -
tatattctgttgatttgggg

SEQ ID NO: 31720 - DNA, 20 bp, Artificial Sequence
  Synthetic oligonucleotide; GAG chr11 5375985 5376004 5375988 -
tattctgttgatttggggtg

SEQ ID NO: 31721 - DNA, 20 bp, Artificial Sequence
  Synthetic oligonucleotide; GAG chr11 5375983 5376002 5375986 -
ttctgttgatttggggtgga

SEQ ID NO: 31722 - DNA, 20 bp, Artificial Sequence
  Synthetic oligonucleotide; TAG chr11 5375975 5375994 5375978 -
atttggggtggagagttctg

SEQ ID NO: 31723 - DNA, 20 bp, Artificial Sequence
  Synthetic oligonucleotide; TAG chr11 5375964 5375983 5375967 -
agagttctgtagatgtctat

SEQ ID NO: 31724 - DNA, 20 bp, Artificial Sequence
  Synthetic oligonucleotide; AGG chr11 5375963 5375982 5375966 -
gagttctgtagatgtctatt

SEQ ID NO: 31725 - DNA, 20 bp, Artificial Sequence
  Synthetic oligonucleotide; TGG chr11 5375954 5375973 5375957 -
agatgtctattaggtctgct

SEQ ID NO: 31726 - DNA, 20 bp, Artificial Sequence
  Synthetic oligonucleotide; CAG chr11 5375949 5375968 5375952 -
tctattaggtctgcttggtg

SEQ ID NO: 31727 - DNA, 20 bp, Artificial Sequence
  Synthetic oligonucleotide; GAG chr11 5375947 5375966 5375950 -
tattaggtctgcttggtgca

SEQ ID NO: 31728 - DNA, 20 bp, Artificial Sequence
  Synthetic oligonucleotide; TGG chr11 5375930 5375949 5375933 -
gcagagctgtgttcaattcc

SEQ ID NO: 31729 - DNA, 20 bp, Artificial Sequence
  Synthetic oligonucleotide; CAG chr11 5375883 5375902 5375886 -
gttgatctgtctaatgttga

SEQ ID NO: 31730 - DNA, 20 bp, Artificial Sequence
  Synthetic oligonucleotide; TGG chr11 5375880 5375899 5375883 -
gatctgtctaatgttgacag

SEQ ID NO: 31731 - DNA, 20 bp, Artificial Sequence
  Synthetic oligonucleotide; GGG chr11 5375879 5375898 5375882 -
atctgtctaatgttgacagt

SEQ ID NO: 31732 - DNA, 20 bp, Artificial Sequence
  Synthetic oligonucleotide; GGG chr11 5375878 5375897 5375881 -
tctgtctaatgttgacagtg

SEQ ID NO: 31733 - DNA, 20 bp, Artificial Sequence
  Synthetic oligonucleotide; AAG chr11 5375870 5375889 5375873 -
atgttgacagtggggtatta

SEQ ID NO: 31734 - DNA, 20 bp, Artificial Sequence
  Synthetic oligonucleotide; AAG chr11 5375854 5375873 5375857 -
attaaagtctcccattatta

SEQ ID NO: 31735 - DNA, 20 bp, Artificial Sequence
  Synthetic oligonucleotide; TGG chr11 5375849 5375868 5375852 -
agtctcccattattaaagtg

SEQ ID NO: 31736 - DNA, 20 bp, Artificial Sequence
  Synthetic oligonucleotide; GGG chr11 5375848 5375867 5375851 -
gtctcccattattaaagtgt

SEQ ID NO: 31737 - DNA, 20 bp, Artificial Sequence
  Synthetic oligonucleotide; GAG chr11 5375846 5375865 5375849 -
ctcccattattaaagtgtgg

SEQ ID NO: 31738 - DNA, 20 bp, Artificial Sequence
  Synthetic oligonucleotide; AAG chr11 5375840 5375859 5375843 -
ttattaaagtgtgggagtct

SEQ ID NO: 31739 - DNA, 20 bp, Artificial Sequence
  Synthetic oligonucleotide; TAG chr11 5375829 5375848 5375832 -
tgggagtctaagtctctttg

SEQ ID NO: 31740 - DNA, 20 bp, Artificial Sequence
  Synthetic oligonucleotide; AGG chr11 5375828 5375847 5375831 -
gggagtctaagtctctttgt

SEQ ID NO: 31741 - DNA, 20 bp, Artificial Sequence
  Synthetic oligonucleotide; AAG chr11 5375820 5375839 5375823 -
aagtctctttgtaggtctct

SEQ ID NO: 31742 - DNA, 20 bp, Artificial Sequence
  Synthetic oligonucleotide; AGG chr11 5375819 5375838 5375822 -
agtctctttgtaggtctcta

SEQ ID NO: 31743 - DNA, 20 bp, Artificial Sequence
  Synthetic oligonucleotide; TGG chr11 5375800 5375819 5375803 -
aaggacttgctttatgaatc

SEQ ID NO: 31744 - DNA, 20 bp, Artificial Sequence
  Synthetic oligonucleotide; GGG chr11 5375799 5375818 5375802 -
aggacttgctttatgaatct

SEQ ID NO: 31745 - DNA, 20 bp, Artificial Sequence
  Synthetic oligonucleotide; TGG chr11 5375785 5375804 5375788 -
gaatctgggtgctcctgtat

SEQ ID NO: 31746 - DNA, 20 bp, Artificial Sequence
  Synthetic oligonucleotide; GGG chr11 5375784 5375803 5375787 -
aatctgggtgctcctgtatt

SEQ ID NO: 31747 - DNA, 20 bp, Artificial Sequence
  Synthetic oligonucleotide; TAG chr11 5375769 5375788 5375772 -
gtattgggtgcatatatatt

SEQ ID NO: 31748 - DNA, 20 bp, Artificial Sequence
  Synthetic oligonucleotide; AGG chr11 5375768 5375787 5375771 -
tattgggtgcatatatattt

SEQ ID NO: 31749 - DNA, 20 bp, Artificial Sequence
  Synthetic oligonucleotide; TAG chr11 5375764 5375783 5375767 -
gggtgcatatatatttagga

SEQ ID NO: 31750 - DNA, 20 bp, Artificial Sequence
  Synthetic oligonucleotide; TAG chr11 5375760 5375779 5375763 -
gcatatatatttaggatagt

SEQ ID NO: 31751 - DNA, 20 bp, Artificial Sequence
  Synthetic oligonucleotide; TGG chr11 5375720 5375739 5375723 -
atccctttaccattatgtaa

SEQ ID NO: 31752 - DNA, 20 bp, Artificial Sequence
  Synthetic oligonucleotide; TGG chr11 5375691 5375710 5375694 -
ttgtctcttttgatctttgt

SEQ ID NO: 31753 - DNA, 20 bp, Artificial Sequence
  Synthetic oligonucleotide; AAG chr11 5375684 5375703 5375687 -
ttttgatctttgttggttta

SEQ ID NO: 31754 - DNA, 20 bp, Artificial Sequence
  Synthetic oligonucleotide; CAG chr11 5375671 5375690 5375674 -
tggtttaaagcctgttttat

SEQ ID NO: 31755 - DNA, 20 bp, Artificial Sequence
  Synthetic oligonucleotide; GAG chr11 5375669 5375688 5375672 -
gtttaaagcctgttttatca

SEQ ID NO: 31756 - DNA, 20 bp, Artificial Sequence
  Synthetic oligonucleotide; TAG chr11 5375664 5375683 5375667 -
aagcctgttttatcagagac

SEQ ID NO: 31757 - DNA, 20 bp, Artificial Sequence
  Synthetic oligonucleotide; AGG chr11 5375663 5375682 5375666 -
agcctgttttatcagagact

SEQ ID NO: 31758 - DNA, 20 bp, Artificial Sequence
  Synthetic oligonucleotide; TGG chr11 5375624 5375643 5375627 -
ttttttgttttccatttgct

SEQ ID NO: 31759 - DNA, 20 bp, Artificial Sequence
  Synthetic oligonucleotide; TAG chr11 5375621 5375640 5375624 -
tttgttttccatttgcttgg

SEQ ID NO: 31760 - DNA, 20 bp, Artificial Sequence
  Synthetic oligonucleotide; GAG chr11 5375595 5375614 5375598 -
ttcctccatccttttatttt

SEQ ID NO: 31761 - DNA, 20 bp, Artificial Sequence
  Synthetic oligonucleotide; GAG chr11 5375571 5375590 5375574 -
ctatgtgtgtgtgtgcacat

SEQ ID NO: 31762 - DNA, 20 bp, Artificial Sequence
  Synthetic oligonucleotide; TGG chr11 5375567 5375586 5375570 -
gtgtgtgtgtgcacatgaga

SEQ ID NO: 31763 - DNA, 20 bp, Artificial Sequence
  Synthetic oligonucleotide; GGG chr11 5375566 5375585 5375569 -
tgtgtgtgtgcacatgagat

SEQ ID NO: 31764 - DNA, 20 bp, Artificial Sequence
  Synthetic oligonucleotide; CAG chr11 5375533 5375552 5375536 -
acactctttatccaatttgc

SEQ ID NO: 31765 - DNA, 20 bp, Artificial Sequence
  Synthetic oligonucleotide; TGG chr11 5375515 5375534 5375518 -
gccagtctgtgtctttcaat

SEQ ID NO: 31766 - DNA, 20 bp, Artificial Sequence
  Synthetic oligonucleotide; GAG chr11 5375513 5375532 5375516 -
cagtctgtgtctttcaattg

SEQ ID NO: 31767 - DNA, 20 bp, Artificial Sequence
  Synthetic oligonucleotide; TAG chr11 5375506 5375525 5375509 -
tgtctttcaattggagcact

SEQ ID NO: 31768 - DNA, 20 bp, Artificial Sequence
  Synthetic oligonucleotide; AAG chr11 5375489 5375508 5375492 -
acttagtccatttacattta

SEQ ID NO: 31769 - DNA, 20 bp, Artificial Sequence
  Synthetic oligonucleotide; TAG chr11 5375448 5375467 5375451 -
atttgatcctgtcattatga

SEQ ID NO: 31770 - DNA, 20 bp, Artificial Sequence
  Synthetic oligonucleotide; TGG chr11 5375444 5375463 5375447 -
gatcctgtcattatgatagc

SEQ ID NO: 31771 - DNA, 20 bp, Artificial Sequence
  Synthetic oligonucleotide; TAG chr11 5375428 5375447 5375431 -
tagctggttattttgctcgt

SEQ ID NO: 31772 - DNA, 20 bp, Artificial Sequence
  Synthetic oligonucleotide; CAG chr11 5375419 5375438 5375422 -
attttgctcgttagttgatg

SEQ ID NO: 31773 - DNA, 20 bp, Artificial Sequence
  Synthetic oligonucleotide; TAG chr11 5375408 5375427 5375411 -
tagttgatgcagtttcttcc

SEQ ID NO: 31774 - DNA, 20 bp, Artificial Sequence
  Synthetic oligonucleotide; TGG chr11 5375399 5375418 5375402 -
cagtttcttcctagtcttga

SEQ ID NO: 31775 - DNA, 20 bp, Artificial Sequence
  Synthetic oligonucleotide; TGG chr11 5375385 5375404 5375388 -
tcttgatggtcttcacattt

SEQ ID NO: 31776 - DNA, 20 bp, Artificial Sequence
  Synthetic oligonucleotide; CAG chr11 5375372 5375391 5375375 -
cacattttggcctgattttg

SEQ ID NO: 31777 - DNA, 20 bp, Artificial Sequence
  Synthetic oligonucleotide; TGG chr11 5375369 5375388 5375372 -
attttggcctgattttgcag

SEQ ID NO: 31778 - DNA, 20 bp, Artificial Sequence
  Synthetic oligonucleotide; TGG chr11 5375365 5375384 5375368 -
tggcctgattttgcagtggc

SEQ ID NO: 31779 - DNA, 20 bp, Artificial Sequence
  Synthetic oligonucleotide; CGG chr11 5375359 5375378 5375362 -
gattttgcagtggctggtac

SEQ ID NO: 31780 - DNA, 20 bp, Artificial Sequence
  Synthetic oligonucleotide; TAG chr11 5375339 5375358 5375342 -
cggttgtgcctttccatgtt

SEQ ID NO: 31781 - DNA, 20 bp, Artificial Sequence
  Synthetic oligonucleotide; CAG chr11 5375327 5375346 5375330 -
tccatgtttagtgcttcctt

SEQ ID NO: 31782 - DNA, 20 bp, Artificial Sequence
  Synthetic oligonucleotide; AGG chr11 5375326 5375345 5375329 -
ccatgtttagtgcttccttc

SEQ ID NO: 31783 - DNA, 20 bp, Artificial Sequence
  Synthetic oligonucleotide; GAG chr11 5375324 5375343 5375327 -
atgtttagtgcttccttcag

SEQ ID NO: 31784 - DNA, 20 bp, Artificial Sequence
  Synthetic oligonucleotide; TAG chr11 5375315 5375334 5375318 -
gcttccttcaggagctcttt

SEQ ID NO: 31785 - DNA, 20 bp, Artificial Sequence
  Synthetic oligonucleotide; AGG chr11 5375314 5375333 5375317 -
cttccttcaggagctctttt

SEQ ID NO: 31786 - DNA, 20 bp, Artificial Sequence
  Synthetic oligonucleotide; CAG chr11 5375310 5375329 5375313 -
cttcaggagctcttttaggt

SEQ ID NO: 31787 - DNA, 20 bp, Artificial Sequence
  Synthetic oligonucleotide; AGG chr11 5375309 5375328 5375312 -
ttcaggagctcttttaggtc

SEQ ID NO: 31788 - DNA, 20 bp, Artificial Sequence
  Synthetic oligonucleotide; TGG chr11 5375304 5375323 5375307 -
gagctcttttaggtcaggcc

SEQ ID NO: 31789 - DNA, 20 bp, Artificial Sequence
  Synthetic oligonucleotide; CAG chr11 5375285 5375304 5375288 -
ctggtgatgacaaaatctct

SEQ ID NO: 31790 - DNA, 20 bp, Artificial Sequence
  Synthetic oligonucleotide; AAG chr11 5375266 5375285 5375269 -
tcagcatttgcttgtctgta

SEQ ID NO: 31791 - DNA, 20 bp, Artificial Sequence
  Synthetic oligonucleotide; AAG chr11 5375239 5375258 5375242 -
ttatttctccttcacttatg

SEQ ID NO: 31792 - DNA, 20 bp, Artificial Sequence
  Synthetic oligonucleotide; TAG chr11 5375234 5375253 5375237 -
tctccttcacttatgaagct

SEQ ID NO: 31793 - DNA, 20 bp, Artificial Sequence
  Synthetic oligonucleotide; TGG chr11 5375229 5375248 5375232 -
ttcacttatgaagcttagtt

SEQ ID NO: 31794 - DNA, 20 bp, Artificial Sequence
  Synthetic oligonucleotide; TGG chr11 5375225 5375244 5375228 -
cttatgaagcttagtttggc

SEQ ID NO: 31795 - DNA, 20 bp, Artificial Sequence
  Synthetic oligonucleotide; AAG chr11 5375189 5375208 5375192 -
tgttgaaaattctttccttt

SEQ ID NO: 31796 - DNA, 20 bp, Artificial Sequence
  Synthetic oligonucleotide; AGG chr11 5375188 5375207 5375191 -
gttgaaaattctttccttta

SEQ ID NO: 31797 - DNA, 20 bp, Artificial Sequence
  Synthetic oligonucleotide; TGG chr11 5375174 5375193 5375177 -
cctttaaggatgttgaatat

SEQ ID NO: 31798 - DNA, 20 bp, Artificial Sequence
  Synthetic oligonucleotide; TGG chr11 5375157 5375176 5375160 -
tattggcccccactctcttc

SEQ ID NO: 31799 - DNA, 20 bp, Artificial Sequence
  Synthetic oligonucleotide; TAG chr11 5375150 5375169 5375153 -
ccccactctcttctggcttg

SEQ ID NO: 31800 - DNA, 20 bp, Artificial Sequence
  Synthetic oligonucleotide; GAG chr11 5375148 5375167 5375151 -
ccactctcttctggcttgta

SEQ ID NO: 31801 - DNA, 20 bp, Artificial Sequence
  Synthetic oligonucleotide; AAG chr11 5375137 5375156 5375140 -
tggcttgtagagtttctgcc

SEQ ID NO: 31802 - DNA, 20 bp, Artificial Sequence
  Synthetic oligonucleotide; GAG chr11 5375135 5375154 5375138 -
gcttgtagagtttctgccaa

SEQ ID NO: 31803 - DNA, 20 bp, Artificial Sequence
  Synthetic oligonucleotide; GAG chr11 5375133 5375152 5375136 -
ttgtagagtttctgccaaga

SEQ ID NO: 31804 - DNA, 20 bp, Artificial Sequence
  Synthetic oligonucleotide; TAG chr11 5375123 5375142 5375126 -
tctgccaagagagctgctgt

SEQ ID NO: 31805 - DNA, 20 bp, Artificial Sequence
  Synthetic oligonucleotide; TGG chr11 5375115 5375134 5375118 -
gagagctgctgttagtctga

SEQ ID NO: 31806 - DNA, 20 bp, Artificial Sequence
  Synthetic oligonucleotide; GGG chr11 5375114 5375133 5375117 -
agagctgctgttagtctgat

SEQ ID NO: 31807 - DNA, 20 bp, Artificial Sequence
  Synthetic oligonucleotide; TGG chr11 5375101 5375120 5375104 -
gtctgatgggcttccctttg

SEQ ID NO: 31808 - DNA, 20 bp, Artificial Sequence
  Synthetic oligonucleotide; GGG chr11 5375100 5375119 5375103 -
tctgatgggcttccctttgt

SEQ ID NO: 31809 - DNA, 20 bp, Artificial Sequence
  Synthetic oligonucleotide; TGG chr11 5375079 5375098 5375082 -
ggtaacccgacctttctctc

SEQ ID NO: 31810 - DNA, 20 bp, Artificial Sequence
  Synthetic oligonucleotide; TGG chr11 5375043 5375062 5375046 -
tttttccttcatttcaactt

SEQ ID NO: 31811 - DNA, 20 bp, Artificial Sequence
  Synthetic oligonucleotide; TGG chr11 5375018 5375037 5375021 -
aatctgacaattatgtgtct

SEQ ID NO: 31812 - DNA, 20 bp, Artificial Sequence
  Synthetic oligonucleotide; GAG chr11 5375016 5375035 5375019 -
tctgacaattatgtgtcttg

SEQ ID NO: 31813 - DNA, 20 bp, Artificial Sequence
  Synthetic oligonucleotide; GAG chr11 5375002 5375021 5375005 -
gtcttggagttgctcttctc

SEQ ID NO: 31814 - DNA, 20 bp, Artificial Sequence
  Synthetic oligonucleotide; AGG chr11 5375001 5375020 5375004 -
tcttggagttgctcttctcg

SEQ ID NO: 31815 - DNA, 20 bp, Artificial Sequence
  Synthetic oligonucleotide; GAG chr11 5374999 5375018 5375002 -
ttggagttgctcttctcgag

SEQ ID NO: 31816 - DNA, 20 bp, Artificial Sequence
  Synthetic oligonucleotide; TGG chr11 5374988 5375007 5374991 -
cttctcgaggagtatgtttg

SEQ ID NO: 31817 - DNA, 20 bp, Artificial Sequence
  Synthetic oligonucleotide; TGG chr11 5374956 5374975 5374959 -
tatttcctgaatctgaatgt

SEQ ID NO: 31818 - DNA, 20 bp, Artificial Sequence
  Synthetic oligonucleotide; TAG chr11 5374943 5374962 5374946 -
tgaatgttggcctgccttgc

SEQ ID NO: 31819 - DNA, 20 bp, Artificial Sequence
  Synthetic oligonucleotide; TGG chr11 5374938 5374957 5374941 -
gttggcctgccttgctagat

SEQ ID NO: 31820 - DNA, 20 bp, Artificial Sequence
  Synthetic oligonucleotide; GGG chr11 5374937 5374956 5374940 -
ttggcctgccttgctagatt

SEQ ID NO: 31821 - DNA, 20 bp, Artificial Sequence
  Synthetic oligonucleotide; GGG chr11 5374936 5374955 5374939 -
tggcctgccttgctagattg

SEQ ID NO: 31822 - DNA, 20 bp, Artificial Sequence
  Synthetic oligonucleotide; AAG chr11 5374933 5374952 5374936 -
cctgccttgctagattgggg

SEQ ID NO: 31823 - DNA, 20 bp, Artificial Sequence
  Synthetic oligonucleotide; TGG chr11 5374924 5374943 5374927 -
ctagattggggaagttctcc

SEQ ID NO: 31824 - DNA, 20 bp, Artificial Sequence
  Synthetic oligonucleotide; CAG chr11 5374910 5374929 5374913 -
ttctcctggataatatcctg

SEQ ID NO: 31825 - DNA, 20 bp, Artificial Sequence
  Synthetic oligonucleotide; GAG chr11 5374908 5374927 5374911 -
ctcctggataatatcctgca

SEQ ID NO: 31826 - DNA, 20 bp, Artificial Sequence
  Synthetic oligonucleotide; TGG chr11 5374893 5374912 5374896 -
ctgcagagtgttttccaact

SEQ ID NO: 31827 - DNA, 20 bp, Artificial Sequence
  Synthetic oligonucleotide; CAG chr11 5374869 5374888 5374872 -
tcgattctccccgtcacttt

SEQ ID NO: 31828 - DNA, 20 bp, Artificial Sequence
  Synthetic oligonucleotide; AGG chr11 5374868 5374887 5374871 -
cgattctccccgtcactttc

SEQ ID NO: 31829 - DNA, 20 bp, Artificial Sequence
  Synthetic oligonucleotide; CAG chr11 5374856 5374875 5374859 -
tcactttcaggtacaccaat

SEQ ID NO: 31830 - DNA, 20 bp, Artificial Sequence
  Synthetic oligonucleotide; TAG chr11 5374850 5374869 5374853 -
tcaggtacaccaatcagacc

SEQ ID NO: 31831 - DNA, 20 bp, Artificial Sequence
  Synthetic oligonucleotide; TAG chr11 5374831 5374850 5374834 -
ctagatttgatcttttcaca

SEQ ID NO: 31832 - DNA, 20 bp, Artificial Sequence
  Synthetic oligonucleotide; TGG chr11 5374816 5374835 5374819 -
tcacatagtcccatatttct

SEQ ID NO: 31833 - DNA, 20 bp, Artificial Sequence
  Synthetic oligonucleotide; GAG chr11 5374814 5374833 5374817 -
acatagtcccatatttcttg

SEQ ID NO: 31834 - DNA, 20 bp, Artificial Sequence
  Synthetic oligonucleotide; AGG chr11 5374813 5374832 5374816 -
catagtcccatatttcttgg

SEQ ID NO: 31835 - DNA, 20 bp, Artificial Sequence
  Synthetic oligonucleotide; CAG chr11 5374718 5374737 5374721 -
atcactgataccctttcttc

SEQ ID NO: 31836 - DNA, 20 bp, Artificial Sequence
  Synthetic oligonucleotide; CAG chr11 5374705 5374724 5374708 -
tttcttccagttgatcgcat

SEQ ID NO: 31837 - DNA, 20 bp, Artificial Sequence
  Synthetic oligonucleotide; GAG chr11 5374697 5374716 5374700 -
agttgatcgcatcagctcct

SEQ ID NO: 31838 - DNA, 20 bp, Artificial Sequence
  Synthetic oligonucleotide; AGG chr11 5374696 5374715 5374699 -
gttgatcgcatcagctcctg

SEQ ID NO: 31839 - DNA, 20 bp, Artificial Sequence
  Synthetic oligonucleotide; GAG chr11 5374668 5374687 5374671 -
ccattcttcacgtcattctc

SEQ ID NO: 31840 - DNA, 20 bp, Artificial Sequence
  Synthetic oligonucleotide; TGG chr11 5374662 5374681 5374665 -
ttcacgtcattctcgagcct

SEQ ID NO: 31841 - DNA, 20 bp, Artificial Sequence
  Synthetic oligonucleotide; CAG chr11 5374655 5374674 5374658 -
cattctcgagccttggcttt

SEQ ID NO: 31842 - DNA, 20 bp, Artificial Sequence
  Synthetic oligonucleotide; CAG chr11 5374646 5374665 5374649 -
gccttggctttcagctccat

SEQ ID NO: 31843 - DNA, 20 bp, Artificial Sequence
  Synthetic oligonucleotide; AAG chr11 5374636 5374655 5374639 -
tcagctccatcagctccttt

SEQ ID NO: 31844 - DNA, 20 bp, Artificial Sequence
  Synthetic oligonucleotide; TGG chr11 5374620 5374639 5374623 -
ctttaagcacttctctgtat

SEQ ID NO: 31845 - DNA, 20 bp, Artificial Sequence
  Synthetic oligonucleotide; TAG chr11 5374611 5374630 5374614 -
cttctctgtattggttattc

SEQ ID NO: 31846 - DNA, 20 bp, Artificial Sequence
  Synthetic oligonucleotide; AAG chr11 5374581 5374600 5374584 -
ttcatctaaattttttttca

SEQ ID NO: 31847 - DNA, 20 bp, Artificial Sequence
  Synthetic oligonucleotide; TGG chr11 5374559 5374578 5374562 -
gtttttatcttctttgcctt

SEQ ID NO: 31848 - DNA, 20 bp, Artificial Sequence
  Synthetic oligonucleotide; TAG chr11 5374540 5374559 5374543 -
ttggtttgaatttcctcctg

SEQ ID NO: 31849 - DNA, 20 bp, Artificial Sequence
  Synthetic oligonucleotide; CGG chr11 5374535 5374554 5374538 -
ttgaatttcctcctgtagct

SEQ ID NO: 31850 - DNA, 20 bp, Artificial Sequence
  Synthetic oligonucleotide; GAG chr11 5374533 5374552 5374536 -
gaatttcctcctgtagctcg

SEQ ID NO: 31851 - DNA, 20 bp, Artificial Sequence
  Synthetic oligonucleotide; TAG chr11 5374530 5374549 5374533 -
tttcctcctgtagctcggag

SEQ ID NO: 31852 - DNA, 20 bp, Artificial Sequence
  Synthetic oligonucleotide; AAG chr11 5374515 5374534 5374518 -
cggagtagtttcatcgtctg

SEQ ID NO: 31853 - DNA, 20 bp, Artificial Sequence
  Synthetic oligonucleotide; CAG chr11 5374501 5374520 5374504 -
cgtctgaagtcttcttctct

SEQ ID NO: 31854 - DNA, 20 bp, Artificial Sequence
  Synthetic oligonucleotide; AAG chr11 5374491 5374510 5374494 -
cttcttctctcagctcgtca

SEQ ID NO: 31855 - DNA, 20 bp, Artificial Sequence
  Synthetic oligonucleotide; CAG chr11 5374476 5374495 5374479 -
cgtcaaagtcattctccatc

SEQ ID NO: 31856 - DNA, 20 bp, Artificial Sequence
  Synthetic oligonucleotide; TGG chr11 5374459 5374478 5374462 -
atccagctttgttccgttgc

SEQ ID NO: 31857 - DNA, 20 bp, Artificial Sequence
  Synthetic oligonucleotide; GAG chr11 5374455 5374474 5374458 -
agctttgttccgttgctggt

SEQ ID NO: 31858 - DNA, 20 bp, Artificial Sequence
  Synthetic oligonucleotide; AGG chr11 5374454 5374473 5374457 -
gctttgttccgttgctggtg

SEQ ID NO: 31859 - DNA, 20 bp, Artificial Sequence
  Synthetic oligonucleotide; TGG chr11 5374438 5374457 5374441 -
ggtgaggaactgctttcctt

SEQ ID NO: 31860 - DNA, 20 bp, Artificial Sequence
  Synthetic oligonucleotide; GAG chr11 5374436 5374455 5374439 -
tgaggaactgctttcctttg

SEQ ID NO: 31861 - DNA, 20 bp, Artificial Sequence
  Synthetic oligonucleotide; AGG chr11 5374435 5374454 5374438 -
gaggaactgctttcctttgg

SEQ ID NO: 31862 - DNA, 20 bp, Artificial Sequence
  Synthetic oligonucleotide; GAG chr11 5374433 5374452 5374436 -
ggaactgctttcctttggag

SEQ ID NO: 31863 - DNA, 20 bp, Artificial Sequence
  Synthetic oligonucleotide; AGG chr11 5374432 5374451 5374435 -
gaactgctttcctttggagg

SEQ ID NO: 31864 - DNA, 20 bp, Artificial Sequence
  Synthetic oligonucleotide; AAG chr11 5374428 5374447 5374431 -
tgctttcctttggaggagga

SEQ ID NO: 31865 - DNA, 20 bp, Artificial Sequence
  Synthetic oligonucleotide; AGG chr11 5374427 5374446 5374430 -
gctttcctttggaggaggaa

SEQ ID NO: 31866 - DNA, 20 bp, Artificial Sequence
  Synthetic oligonucleotide; TAG chr11 5374412 5374431 5374415 -
aggaaaggtgctctgctttt

SEQ ID NO: 31867 - DNA, 20 bp, Artificial Sequence
  Synthetic oligonucleotide; GAG chr11 5374410 5374429 5374413 -
gaaaggtgctctgcttttta

SEQ ID NO: 31868 - DNA, 20 bp, Artificial Sequence
  Synthetic oligonucleotide; CAG chr11 5374403 5374422 5374406 -
gctctgctttttagagtttc

SEQ ID NO: 31869 - DNA, 20 bp, Artificial Sequence
  Synthetic oligonucleotide; TGG chr11 5374370 5374389 5374373 -
ctgttttttccccaactttg

SEQ ID NO: 31870 - DNA, 20 bp, Artificial Sequence
  Synthetic oligonucleotide; TGG chr11 5374354 5374373 5374357 -
tttgtggttgtatctacttt

SEQ ID NO: 31871 - DNA, 20 bp, Artificial Sequence
  Synthetic oligonucleotide; TAG chr11 5374341 5374360 5374344 -
ctacttttggtctttgatga

SEQ ID NO: 31872 - DNA, 20 bp, Artificial Sequence
  Synthetic oligonucleotide; TGG chr11 5374327 5374346 5374330 -
tgatgatagtgatgtaccga

SEQ ID NO: 31873 - DNA, 20 bp, Artificial Sequence
  Synthetic oligonucleotide; GGG chr11 5374326 5374345 5374329 -
gatgatagtgatgtaccgat

SEQ ID NO: 31874 - DNA, 20 bp, Artificial Sequence
  Synthetic oligonucleotide; TGG chr11 5374319 5374338 5374322 -
gtgatgtaccgatgggtttt

SEQ ID NO: 31875 - DNA, 20 bp, Artificial Sequence
  Synthetic oligonucleotide; TGG chr11 5374314 5374333 5374317 -
gtaccgatgggtttttggtg

SEQ ID NO: 31876 - DNA, 20 bp, Artificial Sequence
  Synthetic oligonucleotide; TAG chr11 5374294 5374313 5374297 -
tggatgtcctttctgtttgt

SEQ ID NO: 31877 - DNA, 20 bp, Artificial Sequence
  Synthetic oligonucleotide; CAG chr11 5374279 5374298 5374282 -
tttgttagttttccttctaa

SEQ ID NO: 31878 - DNA, 20 bp, Artificial Sequence
  Synthetic oligonucleotide; CAG chr11 5374275 5374294 5374278 -
ttagttttccttctaacaga

SEQ ID NO: 31879 - DNA, 20 bp, Artificial Sequence
  Synthetic oligonucleotide; AGG chr11 5374274 5374293 5374277 -
tagttttccttctaacagac

SEQ ID NO: 31880 - DNA, 20 bp, Artificial Sequence
  Synthetic oligonucleotide; CAG chr11 5374266 5374285 5374269 -
cttctaacagacaggaccct

SEQ ID NO: 31881 - DNA, 20 bp, Artificial Sequence
  Synthetic oligonucleotide; CAG chr11 5374260 5374279 5374263 -
acagacaggaccctcagctg

SEQ ID NO: 31882 - DNA, 20 bp, Artificial Sequence
  Synthetic oligonucleotide; AGG chr11 5374259 5374278 5374262 -
cagacaggaccctcagctgc

SEQ ID NO: 31883 - DNA, 20 bp, Artificial Sequence
  Synthetic oligonucleotide; TGG chr11 5374251 5374270 5374254 -
accctcagctgcaggtctgt

SEQ ID NO: 31884 - DNA, 20 bp, Artificial Sequence
  Synthetic oligonucleotide; GAG chr11 5374249 5374268 5374252 -
cctcagctgcaggtctgttg

SEQ ID NO: 31885 - DNA, 20 bp, Artificial Sequence
  Synthetic oligonucleotide; TAG chr11 5374241 5374260 5374244 -
gcaggtctgttggagtttgc

SEQ ID NO: 31886 - DNA, 20 bp, Artificial Sequence
  Synthetic oligonucleotide; GAG chr11 5374239 5374258 5374242 -
aggtctgttggagtttgcta

SEQ ID NO: 31887 - DNA, 20 bp, Artificial Sequence
  Synthetic oligonucleotide; AGG chr11 5374238 5374257 5374241 -
ggtctgttggagtttgctag

SEQ ID NO: 31888 - DNA, 20 bp, Artificial Sequence
  Synthetic oligonucleotide; CAG chr11 5374228 5374247 5374231 -
agtttgctagaggtccactc

SEQ ID NO: 31889 - DNA, 20 bp, Artificial Sequence
  Synthetic oligonucleotide; TGG chr11 5374213 5374232 5374216 -
cactccagaccctgtttgcc

SEQ ID NO: 31890 - DNA, 20 bp, Artificial Sequence
  Synthetic oligonucleotide; GGG chr11 5374212 5374231 5374215 -
actccagaccctgtttgcct

SEQ ID NO: 31891 - DNA, 20 bp, Artificial Sequence
  Synthetic oligonucleotide; CAG chr11 5374206 5374225 5374209 -
gaccctgtttgcctgggtat

SEQ ID NO: 31892 - DNA, 20 bp, Artificial Sequence
  Synthetic oligonucleotide; CAG chr11 5374203 5374222 5374206 -
cctgtttgcctgggtatcag

SEQ ID NO: 31893 - DNA, 20 bp, Artificial Sequence
  Synthetic oligonucleotide; CGG chr11 5374200 5374219 5374203 -
gtttgcctgggtatcagcag

SEQ ID NO: 31894 - DNA, 20 bp, Artificial Sequence
  Synthetic oligonucleotide; CAG chr11 5374191 5374210 5374194 -
ggtatcagcagcggtgtctg

SEQ ID NO: 31895 - DNA, 20 bp, Artificial Sequence
  Synthetic oligonucleotide; CAG chr11 5374183 5374202 5374186 -
cagcggtgtctgcagaaccg

SEQ ID NO: 31896 - DNA, 20 bp, Artificial Sequence
  Synthetic oligonucleotide; TGG chr11 5374140 5374159 5374143 -
ctgctgtctgatcgttcctc

SEQ ID NO: 31897 - DNA, 20 bp, Artificial Sequence
  Synthetic oligonucleotide; AAG chr11 5374137 5374156 5374140 -
ctgtctgatcgttcctctgg

SEQ ID NO: 31898 - DNA, 20 bp, Artificial Sequence
  Synthetic oligonucleotide; CAG chr11 5374126 5374145 5374129 -
ttcctctggaagttttgtct

SEQ ID NO: 31899 - DNA, 20 bp, Artificial Sequence
  Synthetic oligonucleotide; GAG chr11 5374124 5374143 5374127 -
cctctggaagttttgtctca

SEQ ID NO: 31900 - DNA, 20 bp, Artificial Sequence
  Synthetic oligonucleotide; AGG chr11 5374123 5374142 5374126 -
ctctggaagttttgtctcag

SEQ ID NO: 31901 - DNA, 20 bp, Artificial Sequence
  Synthetic oligonucleotide; GAG chr11 5374121 5374140 5374124 -
ctggaagttttgtctcagag

SEQ ID NO: 31902 - DNA, 20 bp, Artificial Sequence
  Synthetic oligonucleotide; TGG chr11 5374114 5374133 5374117 -
ttttgtctcagaggagtacc

SEQ ID NO: 31903 - DNA, 20 bp, Artificial Sequence
  Synthetic oligonucleotide; GAG chr11 5374105 5374124 5374108 -
agaggagtacctggccgtgt

SEQ ID NO: 31904 - DNA, 20 bp, Artificial Sequence
  Synthetic oligonucleotide; AGG chr11 5374104 5374123 5374107 -
gaggagtacctggccgtgtg

SEQ ID NO: 31905 - DNA, 20 bp, Artificial Sequence
  Synthetic oligonucleotide; CAG chr11 5374098 5374117 5374101 -
tacctggccgtgtgaggtgt

SEQ ID NO: 31906 - DNA, 20 bp, Artificial Sequence
  Synthetic oligonucleotide; TGG chr11 5374083 5374102 5374086 -
ggtgtcagtctgcccttact

SEQ ID NO: 31907 - DNA, 20 bp, Artificial Sequence
  Synthetic oligonucleotide; GGG chr11 5374082 5374101 5374085 -
gtgtcagtctgcccttactt

SEQ ID NO: 31908 - DNA, 20 bp, Artificial Sequence
  Synthetic oligonucleotide; GGG chr11 5374081 5374100 5374084 -
tgtcagtctgcccttacttg

SEQ ID NO: 31909 - DNA, 20 bp, Artificial Sequence
  Synthetic oligonucleotide; GGG chr11 5374080 5374099 5374083 -
gtcagtctgcccttacttgg

SEQ ID NO: 31910 - DNA, 20 bp, Artificial Sequence
  Synthetic oligonucleotide; CAG chr11 5374070 5374089 5374073 -
ccttacttgggggtgcctcc

SEQ ID NO: 31911 - DNA, 20 bp, Artificial Sequence
  Synthetic oligonucleotide; TAG chr11 5374066 5374085 5374069 -
acttgggggtgcctcccagt

SEQ ID NO: 31912 - DNA, 20 bp, Artificial Sequence
  Synthetic oligonucleotide; AGG chr11 5374065 5374084 5374068 -
cttgggggtgcctcccagtt

SEQ ID NO: 31913 - DNA, 20 bp, Artificial Sequence
  Synthetic oligonucleotide; CGG chr11 5374057 5374076 5374060 -
tgcctcccagttaggctgct

SEQ ID NO: 31914 - DNA, 20 bp, Artificial Sequence
  Synthetic oligonucleotide; GGG chr11 5374056 5374075 5374059 -
gcctcccagttaggctgctc

SEQ ID NO: 31915 - DNA, 20 bp, Artificial Sequence
  Synthetic oligonucleotide; GGG chr11 5374055 5374074 5374058 -
cctcccagttaggctgctcg

SEQ ID NO: 31916 - DNA, 20 bp, Artificial Sequence
  Synthetic oligonucleotide; GGG chr11 5374054 5374073 5374057 -
ctcccagttaggctgctcgg

SEQ ID NO: 31917 - DNA, 20 bp, Artificial Sequence
  Synthetic oligonucleotide; CAG chr11 5374050 5374069 5374053 -
cagttaggctgctcgggggt

SEQ ID NO: 31918 - DNA, 20 bp, Artificial Sequence
  Synthetic oligonucleotide; AGG chr11 5374049 5374068 5374052 -
agttaggctgctcgggggtc

SEQ ID NO: 31919 - DNA, 20 bp, Artificial Sequence
  Synthetic oligonucleotide; GGG chr11 5374048 5374067 5374051 -
gttaggctgctcgggggtca

SEQ ID NO: 31920 - DNA, 20 bp, Artificial Sequence
  Synthetic oligonucleotide; GGG chr11 5374047 5374066 5374050 -
ttaggctgctcgggggtcag

SEQ ID NO: 31921 - DNA, 20 bp, Artificial Sequence
  Synthetic oligonucleotide; CAG chr11 5374043 5374062 5374046 -
gctgctcgggggtcaggggt

SEQ ID NO: 31922 - DNA, 20 bp, Artificial Sequence
  Synthetic oligonucleotide; AGG chr11 5374042 5374061 5374045 -
ctgctcgggggtcaggggtc

SEQ ID NO: 31923 - DNA, 20 bp, Artificial Sequence
  Synthetic oligonucleotide; GGG chr11 5374041 5374060 5374044 -
tgctcgggggtcaggggtca

SEQ ID NO: 31924 - DNA, 20 bp, Artificial Sequence
  Synthetic oligonucleotide; GAG chr11 5374030 5374049 5374033 -
caggggtcagggacccactt

SEQ ID NO: 31925 - DNA, 20 bp, Artificial Sequence
  Synthetic oligonucleotide; AGG chr11 5374029 5374048 5374032 -
aggggtcagggacccacttg

SEQ ID NO: 31926 - DNA, 20 bp, Artificial Sequence
  Synthetic oligonucleotide; GAG chr11 5374027 5374046 5374030 -
gggtcagggacccacttgag

SEQ ID NO: 31927 - DNA, 20 bp, Artificial Sequence
  Synthetic oligonucleotide; AGG chr11 5374026 5374045 5374029 -
ggtcagggacccacttgagg

SEQ ID NO: 31928 - DNA, 20 bp, Artificial Sequence
  Synthetic oligonucleotide; CAG chr11 5374023 5374042 5374026 -
cagggacccacttgaggagg

SEQ ID NO: 31929 - DNA, 20 bp, Artificial Sequence
  Synthetic oligonucleotide; CAG chr11 5374008 5374027 5374011 -
ggaggcagtctgcccgttct

SEQ ID NO: 31930 - DNA, 20 bp, Artificial Sequence
  Synthetic oligonucleotide; CAG chr11 5374000 5374019 5374003 -
tctgcccgttctcagatctc

SEQ ID NO: 31931 - DNA, 20 bp, Artificial Sequence
  Synthetic oligonucleotide; TGG chr11 5373989 5374008 5373992 -
tcagatctccagctgtgtgc

SEQ ID NO: 31932 - DNA, 20 bp, Artificial Sequence
  Synthetic oligonucleotide; GGG chr11 5373988 5374007 5373991 -
cagatctccagctgtgtgct

SEQ ID NO: 31933 - DNA, 20 bp, Artificial Sequence
  Synthetic oligonucleotide; GAG chr11 5373986 5374005 5373989 -
gatctccagctgtgtgctgg

SEQ ID NO: 31934 - DNA, 20 bp, Artificial Sequence
  Synthetic oligonucleotide; AAG chr11 5373966 5373985 5373969 -
gagaaccactgctctcctca

SEQ ID NO: 31935 - DNA, 20 bp, Artificial Sequence
  Synthetic oligonucleotide; CAG chr11 5373959 5373978 5373962 -
actgctctcctcaaagctgt

SEQ ID NO: 31936 - DNA, 20 bp, Artificial Sequence
  Synthetic oligonucleotide; CAG chr11 5373955 5373974 5373958 -
ctctcctcaaagctgtcaga

SEQ ID NO: 31937 - DNA, 20 bp, Artificial Sequence
  Synthetic oligonucleotide; AGG chr11 5373954 5373973 5373957 -
tctcctcaaagctgtcagac

SEQ ID NO: 31938 - DNA, 20 bp, Artificial Sequence
  Synthetic oligonucleotide; GGG chr11 5373953 5373972 5373956 -
ctcctcaaagctgtcagaca

SEQ ID NO: 31939 - DNA, 20 bp, Artificial Sequence
  Synthetic oligonucleotide; AAG chr11 5373944 5373963 5373947 -
gctgtcagacagggacattt

SEQ ID NO: 31940 - DNA, 20 bp, Artificial Sequence
  Synthetic oligonucleotide; CAG chr11 5373937 5373956 5373940 -
gacagggacatttaagtctg

SEQ ID NO: 31941 - DNA, 20 bp, Artificial Sequence
  Synthetic oligonucleotide; GAG chr11 5373935 5373954 5373938 -
cagggacatttaagtctgca

SEQ ID NO: 31942 - DNA, 20 bp, Artificial Sequence
  Synthetic oligonucleotide; AGG chr11 5373934 5373953 5373937 -
agggacatttaagtctgcag

SEQ ID NO: 31943 - DNA, 20 bp, Artificial Sequence
  Synthetic oligonucleotide; AAG chr11 5373893 5373912 5373896 -
ttgtctgtgccctgccccca

SEQ ID NO: 31944 - DNA, 20 bp, Artificial Sequence
  Synthetic oligonucleotide; AGG chr11 5373892 5373911 5373895 -
tgtctgtgccctgcccccaa

SEQ ID NO: 31945 - DNA, 20 bp, Artificial Sequence
  Synthetic oligonucleotide; TGG chr11 5373889 5373908 5373892 -
ctgtgccctgcccccaaagg

SEQ ID NO: 31946 - DNA, 20 bp, Artificial Sequence
  Synthetic oligonucleotide; GAG chr11 5373887 5373906 5373890 -
gtgccctgcccccaaaggtg

SEQ ID NO: 31947 - DNA, 20 bp, Artificial Sequence
  Synthetic oligonucleotide; CAG chr11 5373880 5373899 5373883 -
gcccccaaaggtggagccta

SEQ ID NO: 31948 - DNA, 20 bp, Artificial Sequence
  Synthetic oligonucleotide; GAG chr11 5373878 5373897 5373881 -
ccccaaaggtggagcctaca

SEQ ID NO: 31949 - DNA, 20 bp, Artificial Sequence
  Synthetic oligonucleotide; AGG chr11 5373877 5373896 5373880 -
cccaaaggtggagcctacag

SEQ ID NO: 31950 - DNA, 20 bp, Artificial Sequence
  Synthetic oligonucleotide; CAG chr11 5373874 5373893 5373877 -
aaaggtggagcctacagagg

SEQ ID NO: 31951 - DNA, 20 bp, Artificial Sequence
  Synthetic oligonucleotide; AGG chr11 5373873 5373892 5373876 -
aaggtggagcctacagaggc

SEQ ID NO: 31952 - DNA, 20 bp, Artificial Sequence
  Synthetic oligonucleotide; CAG chr11 5373870 5373889 5373873 -
gtggagcctacagaggcagg

SEQ ID NO: 31953 - DNA, 20 bp, Artificial Sequence
  Synthetic oligonucleotide; AGG chr11 5373869 5373888 5373872 -
tggagcctacagaggcaggc

SEQ ID NO: 31954 - DNA, 20 bp, Artificial Sequence
  Synthetic oligonucleotide; GAG chr11 5373859 5373878 5373862 -
agaggcaggcaggcctcctt

SEQ ID NO: 31955 - DNA, 20 bp, Artificial Sequence
  Synthetic oligonucleotide; TGG chr11 5373853 5373872 5373856 -
aggcaggcctccttgagctg

SEQ ID NO: 31956 - DNA, 20 bp, Artificial Sequence
  Synthetic oligonucleotide; TGG chr11 5373850 5373869 5373853 -
caggcctccttgagctgtgg

SEQ ID NO: 31957 - DNA, 20 bp, Artificial Sequence
  Synthetic oligonucleotide; GGG chr11 5373849 5373868 5373852 -
aggcctccttgagctgtggt

SEQ ID NO: 31958 - DNA, 20 bp, Artificial Sequence
  Synthetic oligonucleotide; GGG chr11 5373848 5373867 5373851 -
ggcctccttgagctgtggtg

SEQ ID NO: 31959 - DNA, 20 bp, Artificial Sequence
  Synthetic oligonucleotide; CAG chr11 5373839 5373858 5373842 -
gagctgtggtggggtccacc

SEQ ID NO: 31960 - DNA, 20 bp, Artificial Sequence
  Synthetic oligonucleotide; GAG chr11 5373833 5373852 5373836 -
tggtggggtccacccagttt

SEQ ID NO: 31961 - DNA, 20 bp, Artificial Sequence
  Synthetic oligonucleotide; TGG chr11 5373825 5373844 5373828 -
tccacccagtttgagcttcc

SEQ ID NO: 31962 - DNA, 20 bp, Artificial Sequence
  Synthetic oligonucleotide; AAG chr11 5373807 5373826 5373810 -
cctggctgctttgtttacct

SEQ ID NO: 31963 - DNA, 20 bp, Artificial Sequence
  Synthetic oligonucleotide; AAG chr11 5373803 5373822 5373806 -
gctgctttgtttacctaagc

SEQ ID NO: 31964 - DNA, 20 bp, Artificial Sequence
  Synthetic oligonucleotide; TGG chr11 5373798 5373817 5373801 -
tttgtttacctaagcaagcc

SEQ ID NO: 31965 - DNA, 20 bp, Artificial Sequence
  Synthetic oligonucleotide; GGG chr11 5373797 5373816 5373800 -
ttgtttacctaagcaagcct

SEQ ID NO: 31966 - DNA, 20 bp, Artificial Sequence
  Synthetic oligonucleotide; TGG chr11 5373791 5373810 5373794 -
acctaagcaagcctgggcaa

SEQ ID NO: 31967 - DNA, 20 bp, Artificial Sequence
  Synthetic oligonucleotide; CGG chr11 5373788 5373807 5373791 -
taagcaagcctgggcaatgg

SEQ ID NO: 31968 - DNA, 20 bp, Artificial Sequence
  Synthetic oligonucleotide; CAG chr11 5373773 5373792 5373776 -
aatggcggctgcccctcccc

SEQ ID NO: 31969 - DNA, 20 bp, Artificial Sequence
  Synthetic oligonucleotide; CAG chr11 5373754 5373773 5373757 -
ccagcctcgctgccaccttg

SEQ ID NO: 31970 - DNA, 20 bp, Artificial Sequence
  Synthetic oligonucleotide; CAG chr11 5373743 5373762 5373746 -
gccaccttgcagtttgatct

SEQ ID NO: 31971 - DNA, 20 bp, Artificial Sequence
  Synthetic oligonucleotide; TAG chr11 5373730 5373749 5373733 -
ttgatctcagactgctgtgc

SEQ ID NO: 31972 - DNA, 20 bp, Artificial Sequence
  Synthetic oligonucleotide; CAG chr11 5373723 5373742 5373726 -
cagactgctgtgctagcaat

SEQ ID NO: 31973 - DNA, 20 bp, Artificial Sequence
  Synthetic oligonucleotide; AGG chr11 5373722 5373741 5373725 -
agactgctgtgctagcaatc

SEQ ID NO: 31974 - DNA, 20 bp, Artificial Sequence
  Synthetic oligonucleotide; GGG chr11 5373721 5373740 5373724 -
gactgctgtgctagcaatca

SEQ ID NO: 31975 - DNA, 20 bp, Artificial Sequence
  Synthetic oligonucleotide; GAG chr11 5373719 5373738 5373722 -
ctgctgtgctagcaatcagg

SEQ ID NO: 31976 - DNA, 20 bp, Artificial Sequence
  Synthetic oligonucleotide; TGG chr11 5373710 5373729 5373713 -
tagcaatcagggagactccg

SEQ ID NO: 31977 - DNA, 20 bp, Artificial Sequence
  Synthetic oligonucleotide; GGG chr11 5373709 5373728 5373712 -
agcaatcagggagactccgt

SEQ ID NO: 31978 - DNA, 20 bp, Artificial Sequence
  Synthetic oligonucleotide; TAG chr11 5373704 5373723 5373707 -
tcagggagactccgtgggcg

SEQ ID NO: 31979 - DNA, 20 bp, Artificial Sequence
  Synthetic oligonucleotide; AGG chr11 5373703 5373722 5373706 -
cagggagactccgtgggcgt

SEQ ID NO: 31980 - DNA, 20 bp, Artificial Sequence
  Synthetic oligonucleotide; CGG chr11 5373695 5373714 5373698 -
ctccgtgggcgtaggaccct

SEQ ID NO: 31981 - DNA, 20 bp, Artificial Sequence
  Synthetic oligonucleotide; GAG chr11 5373693 5373712 5373696 -
ccgtgggcgtaggaccctcg

SEQ ID NO: 31982 - DNA, 20 bp, Artificial Sequence
  Synthetic oligonucleotide; CAG chr11 5373683 5373702 5373686 -
aggaccctcggagccatgtg

SEQ ID NO: 31983 - DNA, 20 bp, Artificial Sequence
  Synthetic oligonucleotide; AGG chr11 5373682 5373701 5373685 -
ggaccctcggagccatgtgc

SEQ ID NO: 31984 - DNA, 20 bp, Artificial Sequence
  Synthetic oligonucleotide; TGG chr11 5373668 5373687 5373671 -
atgtgcaggatataatctcc

SEQ ID NO: 31985 - DNA, 20 bp, Artificial Sequence
  Synthetic oligonucleotide; AAG chr11 5373652 5373671 5373655 -
ctcctggtgcgccatttcct

SEQ ID NO: 31986 - DNA, 20 bp, Artificial Sequence
  Synthetic oligonucleotide; CAG chr11 5373644 5373663 5373647 -
gcgccatttcctaagcctgt

SEQ ID NO: 31987 - DNA, 20 bp, Artificial Sequence
  Synthetic oligonucleotide; AAG chr11 5373639 5373658 5373642 -
atttcctaagcctgtcagaa

SEQ ID NO: 31988 - DNA, 20 bp, Artificial Sequence
  Synthetic oligonucleotide; CAG chr11 5373634 5373653 5373637 -
ctaagcctgtcagaaaagca

SEQ ID NO: 31989 - DNA, 20 bp, Artificial Sequence
  Synthetic oligonucleotide; CGG chr11 5373627 5373646 5373630 -
tgtcagaaaagcacagtatt

SEQ ID NO: 31990 - DNA, 20 bp, Artificial Sequence
  Synthetic oligonucleotide; GGG chr11 5373626 5373645 5373629 -
gtcagaaaagcacagtattc

SEQ ID NO: 31991 - DNA, 20 bp, Artificial Sequence
  Synthetic oligonucleotide; TGG chr11 5373623 5373642 5373626 -
agaaaagcacagtattcggg

SEQ ID NO: 31992 - DNA, 20 bp, Artificial Sequence
  Synthetic oligonucleotide; GGG chr11 5373622 5373641 5373625 -
gaaaagcacagtattcgggt

SEQ ID NO: 31993 - DNA, 20 bp, Artificial Sequence
  Synthetic oligonucleotide; GAG chr11 5373620 5373639 5373623 -
aaagcacagtattcgggtgg

SEQ ID NO: 31994 - DNA, 20 bp, Artificial Sequence
  Synthetic oligonucleotide; TGG chr11 5373617 5373636 5373620 -
gcacagtattcgggtgggag

SEQ ID NO: 31995 - DNA, 20 bp, Artificial Sequence
  Synthetic oligonucleotide; CAG chr11 5373604 5373623 5373607 -
gtgggagtggcccaattttc

SEQ ID NO: 31996 - DNA, 20 bp, Artificial Sequence
  Synthetic oligonucleotide; AGG chr11 5373603 5373622 5373606 -
tgggagtggcccaattttcc

SEQ ID NO: 31997 - DNA, 20 bp, Artificial Sequence
  Synthetic oligonucleotide; CAG chr11 5373574 5373593 5373577 -
atgtcacccctttccttgac

SEQ ID NO: 31998 - DNA, 20 bp, Artificial Sequence
  Synthetic oligonucleotide; AGG chr11 5373573 5373592 5373576 -
tgtcacccctttccttgacc

SEQ ID NO: 31999 - DNA, 20 bp, Artificial Sequence
  Synthetic oligonucleotide; AAG chr11 5373569 5373588 5373572 -
acccctttccttgaccagga

SEQ ID NO: 32000 - DNA, 20 bp, Artificial Sequence
  Synthetic oligonucleotide; AGG chr11 5373568 5373587 5373571 -
cccctttccttgaccaggaa

SEQ ID NO: 32001 - DNA, 20 bp, Artificial Sequence
  Synthetic oligonucleotide; GGG chr11 5373567 5373586 5373570 -
ccctttccttgaccaggaaa

SEQ ID NO: 32002 - DNA, 20 bp, Artificial Sequence
  Synthetic oligonucleotide; AAG chr11 5373539 5373558 5373542 -
catgaccccttgtgcttccc

SEQ ID NO: 32003 - DNA, 20 bp, Artificial Sequence
  Synthetic oligonucleotide; GAG chr11 5373535 5373554 5373538 -
accccttgtgcttcccaagt

SEQ ID NO: 32004 - DNA, 20 bp, Artificial Sequence
  Synthetic oligonucleotide; AGG chr11 5373534 5373553 5373537 -
ccccttgtgcttcccaagtg

SEQ ID NO: 32005 - DNA, 20 bp, Artificial Sequence
  Synthetic oligonucleotide; CGG chr11 5373513 5373532 5373516 -
ggcaatgcctcaccctgctt

SEQ ID NO: 32006 - DNA, 20 bp, Artificial Sequence
  Synthetic oligonucleotide; TGG chr11 5373509 5373528 5373512 -
atgcctcaccctgcttcggc

SEQ ID NO: 32007 - DNA, 20 bp, Artificial Sequence
  Synthetic oligonucleotide; TGG chr11 5373502 5373521 5373505 -
accctgcttcggctggtgca

SEQ ID NO: 32008 - DNA, 20 bp, Artificial Sequence
  Synthetic oligonucleotide; TGG chr11 5373467 5373486 5373470 -
actgacctgtgcccactgtc

SEQ ID NO: 32009 - DNA, 20 bp, Artificial Sequence
  Synthetic oligonucleotide; TAG chr11 5373457 5373476 5373460 -
gcccactgtctggcactccc

SEQ ID NO: 32010 - DNA, 20 bp, Artificial Sequence
  Synthetic oligonucleotide; GAG chr11 5373453 5373472 5373456 -
actgtctggcactccctagc

SEQ ID NO: 32011 - DNA, 20 bp, Artificial Sequence
  Synthetic oligonucleotide; CAG chr11 5373435 5373454 5373438 -
gcgagatgaaccccatacct

SEQ ID NO: 32012 - DNA, 20 bp, Artificial Sequence
  Synthetic oligonucleotide; TGG chr11 5373431 5373450 5373434 -
gatgaaccccatacctcaga

SEQ ID NO: 32013 - DNA, 20 bp, Artificial Sequence
  Synthetic oligonucleotide; CAG chr11 5373423 5373442 5373426 -
ccatacctcagatggaaatg

SEQ ID NO: 32014 - DNA, 20 bp, Artificial Sequence
  Synthetic oligonucleotide; TGG chr11 5373391 5373410 5373394 -
gtcttctgtgttgttcacgc

SEQ ID NO: 32015 - DNA, 20 bp, Artificial Sequence
  Synthetic oligonucleotide; GGG chr11 5373390 5373409 5373393 -
tcttctgtgttgttcacgct

SEQ ID NO: 32016 - DNA, 20 bp, Artificial Sequence
  Synthetic oligonucleotide; GAG chr11 5373388 5373407 5373391 -
ttctgtgttgttcacgctgg

SEQ ID NO: 32017 - DNA, 20 bp, Artificial Sequence
  Synthetic oligonucleotide; TAG chr11 5373382 5373401 5373385 -
gttgttcacgctgggagctg

SEQ ID NO: 32018 - DNA, 20 bp, Artificial Sequence
  Synthetic oligonucleotide; CAG chr11 5373377 5373396 5373380 -
tcacgctgggagctgtagac

SEQ ID NO: 32019 - DNA, 20 bp, Artificial Sequence
  Synthetic oligonucleotide; GAG chr11 5373375 5373394 5373378 -
acgctgggagctgtagacca

SEQ ID NO: 32020 - DNA, 20 bp, Artificial Sequence
  Synthetic oligonucleotide; TGG chr11 5373361 5373380 5373364 -
agaccagagctgttcctatt

SEQ ID NO: 32021 - DNA, 20 bp, Artificial Sequence
  Synthetic oligonucleotide; TGG chr11 5373352 5373371 5373355 -
ctgttcctatttggccatct

SEQ ID NO: 32022 - DNA, 20 bp, Artificial Sequence
  Synthetic oligonucleotide; TGG chr11 5373340 5373359 5373343 -
ggccatcttggctcaaaaac

SEQ ID NO: 32023 - DNA, 20 bp, Artificial Sequence
  Synthetic oligonucleotide; AAG chr11 5373323 5373342 5373326 -
aactggaactttatttgtga

SEQ ID NO: 32024 - DNA, 20 bp, Artificial Sequence
  Synthetic oligonucleotide; TAG chr11 5373304 5373323 5373307 -
aaagaaaaaatcgatcaata

SEQ ID NO: 32025 - DNA, 20 bp, Artificial Sequence
  Synthetic oligonucleotide; CAG chr11 5373296 5373315 5373299 -
aatcgatcaatatagacttc

SEQ ID NO: 32026 - DNA, 20 bp, Artificial Sequence
  Synthetic oligonucleotide; AAG chr11 5373274 5373293 5373277 -
gtgaaaattttcttcaaatc

SEQ ID NO: 32027 - DNA, 20 bp, Artificial Sequence
  Synthetic oligonucleotide; GAG chr11 5373251 5373270 5373254 -
acaatatctaaaaaattgcc

SEQ ID NO: 32028 - DNA, 20 bp, Artificial Sequence
  Synthetic oligonucleotide; AAG chr11 5373239 5373258 5373242 -
aaattgccgagactgatatc

SEQ ID NO: 32029 - DNA, 20 bp, Artificial Sequence
  Synthetic oligonucleotide; CAG chr11 5373236 5373255 5373239 -
ttgccgagactgatatcaag

SEQ ID NO: 32030 - DNA, 20 bp, Artificial Sequence
  Synthetic oligonucleotide; CAG chr11 5373212 5373231 5373215 -
tatctctatacatgttcttc

SEQ ID NO: 32031 - DNA, 20 bp, Artificial Sequence
  Synthetic oligonucleotide; AGG chr11 5373211 5373230 5373214 -
atctctatacatgttcttcc

SEQ ID NO: 32032 - DNA, 20 bp, Artificial Sequence
  Synthetic oligonucleotide; GAG chr11 5373209 5373228 5373212 -
ctctatacatgttcttccag

SEQ ID NO: 32033 - DNA, 20 bp, Artificial Sequence
  Synthetic oligonucleotide; CAG chr11 5373195 5373214 5373198 -
ttccaggagttttgtgattt

SEQ ID NO: 32034 - DNA, 20 bp, Artificial Sequence
  Synthetic oligonucleotide; AGG chr11 5373194 5373213 5373197 -
tccaggagttttgtgatttc

SEQ ID NO: 32035 - DNA, 20 bp, Artificial Sequence
  Synthetic oligonucleotide; GAG chr11 5373163 5373182 5373166 -
ttatgtctttaatctatttt

SEQ ID NO: 32036 - DNA, 20 bp, Artificial Sequence
  Synthetic oligonucleotide; TGG chr11 5373152 5373171 5373155 -
atctattttgagttgactta

SEQ ID NO: 32037 - DNA, 20 bp, Artificial Sequence
  Synthetic oligonucleotide; AAG chr11 5373146 5373165 5373149 -
tttgagttgacttatggctt

SEQ ID NO: 32038 - DNA, 20 bp, Artificial Sequence
  Synthetic oligonucleotide; AGG chr11 5373145 5373164 5373148 -
ttgagttgacttatggctta

SEQ ID NO: 32039 - DNA, 20 bp, Artificial Sequence
  Synthetic oligonucleotide; AAG chr11 5373140 5373159 5373143 -
ttgacttatggcttaaggta

SEQ ID NO: 32040 - DNA, 20 bp, Artificial Sequence
  Synthetic oligonucleotide; AGG chr11 5373139 5373158 5373142 -
tgacttatggcttaaggtaa

SEQ ID NO: 32041 - DNA, 20 bp, Artificial Sequence
  Synthetic oligonucleotide; TGG chr11 5373114 5373133 5373117 -
caattttattcttttgcatt

SEQ ID NO: 32042 - DNA, 20 bp, Artificial Sequence
  Synthetic oligonucleotide; CAG chr11 5373106 5373125 5373109 -
ttcttttgcatttggatatc

SEQ ID NO: 32043 - DNA, 20 bp, Artificial Sequence
  Synthetic oligonucleotide; GAG chr11 5373083 5373102 5373086 -
ttttcccaacactatttgtt

SEQ ID NO: 32044 - DNA, 20 bp, Artificial Sequence
  Synthetic oligonucleotide; AGG chr11 5373082 5373101 5373085 -
tttcccaacactatttgttg

SEQ ID NO: 32045 - DNA, 20 bp, Artificial Sequence
  Synthetic oligonucleotide; GAG chr11 5373080 5373099 5373083 -
tcccaacactatttgttgag

SEQ ID NO: 32046 - DNA, 20 bp, Artificial Sequence
  Synthetic oligonucleotide; TGG chr11 5373056 5373075 5373059 -
ctatccttcccctattgtgt

SEQ ID NO: 32047 - DNA, 20 bp, Artificial Sequence
  Synthetic oligonucleotide; TGG chr11 5373053 5373072 5373056 -
tccttcccctattgtgttgg

SEQ ID NO: 32048 - DNA, 20 bp, Artificial Sequence
  Synthetic oligonucleotide; GAG chr11 5373043 5373062 5373046 -
attgtgttggtggccttgtt

SEQ ID NO: 32049 - DNA, 20 bp, Artificial Sequence
  Synthetic oligonucleotide; TGG chr11 5373034 5373053 5373037 -
gtggccttgttgagaattac

SEQ ID NO: 32050 - DNA, 20 bp, Artificial Sequence
  Synthetic oligonucleotide; TGG chr11 5373007 5373026 5373010 -
tatatacgtaaatttatttc

SEQ ID NO: 32051 - DNA, 20 bp, Artificial Sequence
  Synthetic oligonucleotide; GGG chr11 5373006 5373025 5373009 -
atatacgtaaatttatttct

SEQ ID NO: 32052 - DNA, 20 bp, Artificial Sequence
  Synthetic oligonucleotide; TGG chr11 5372984 5373003 5372987 -
gctctttattctgttcaatt

SEQ ID NO: 32053 - DNA, 20 bp, Artificial Sequence
  Synthetic oligonucleotide; TAG chr11 5372960 5372979 5372963 -
ctatgtgtctatttatgtga

SEQ ID NO: 32054 - DNA, 20 bp, Artificial Sequence
  Synthetic oligonucleotide; TGG chr11 5372944 5372963 5372947 -
gtgatagtaccatacttttt

SEQ ID NO: 32055 - DNA, 20 bp, Artificial Sequence
  Synthetic oligonucleotide; TAG chr11 5372935 5372954 5372938 -
ccatacttttttggttacta

SEQ ID NO: 32056 - DNA, 20 bp, Artificial Sequence
  Synthetic oligonucleotide; CAG chr11 5372911 5372930 5372914 -
tttgtaatataatttgaaat

SEQ ID NO: 32057 - DNA, 20 bp, Artificial Sequence
  Synthetic oligonucleotide; AAG chr11 5372892 5372911 5372895 -
tcagaacgtgtgctgccatc

SEQ ID NO: 32058 - DNA, 20 bp, Artificial Sequence
  Synthetic oligonucleotide; TGG chr11 5372888 5372907 5372891 -
aacgtgtgctgccatcaagt

SEQ ID NO: 32059 - DNA, 20 bp, Artificial Sequence
  Synthetic oligonucleotide; AAG chr11 5372873 5372892 5372876 -
caagttggtttttctttctc

SEQ ID NO: 32060 - DNA, 20 bp, Artificial Sequence
  Synthetic oligonucleotide; TGG chr11 5372863 5372882 5372866 -
tttctttctcaagattgttt

SEQ ID NO: 32061 - DNA, 20 bp, Artificial Sequence
  Synthetic oligonucleotide; TGG chr11 5372855 5372874 5372858 -
tcaagattgttttggccatt

SEQ ID NO: 32062 - DNA, 20 bp, Artificial Sequence
  Synthetic oligonucleotide; GGG chr11 5372854 5372873 5372857 -
caagattgttttggccattt

SEQ ID NO: 32063 - DNA, 20 bp, Artificial Sequence
  Synthetic oligonucleotide; GGG chr11 5372853 5372872 5372856 -
aagattgttttggccatttg

SEQ ID NO: 32064 - DNA, 20 bp, Artificial Sequence
  Synthetic oligonucleotide; GGG chr11 5372852 5372871 5372855 -
agattgttttggccatttgg

SEQ ID NO: 32065 - DNA, 20 bp, Artificial Sequence
  Synthetic oligonucleotide; TGG chr11 5372842 5372861 5372845 -
ggccatttgggggtgttctg

SEQ ID NO: 32066 - DNA, 20 bp, Artificial Sequence
  Synthetic oligonucleotide; CAG chr11 5372800 5372819 5372803 -
ttgttttctgtaaaatgtgc

SEQ ID NO: 32067 - DNA, 20 bp, Artificial Sequence
  Synthetic oligonucleotide; GAG chr11 5372798 5372817 5372801 -
gttttctgtaaaatgtgcca

SEQ ID NO: 32068 - DNA, 20 bp, Artificial Sequence
  Synthetic oligonucleotide; CAG chr11 5372793 5372812 5372796 -
ctgtaaaatgtgccagagct

SEQ ID NO: 32069 - DNA, 20 bp, Artificial Sequence
  Synthetic oligonucleotide; AGG chr11 5372792 5372811 5372795 -
tgtaaaatgtgccagagctc

SEQ ID NO: 32070 - DNA, 20 bp, Artificial Sequence
  Synthetic oligonucleotide; AAG chr11 5372783 5372802 5372786 -
tgccagagctcaggtaacaa

SEQ ID NO: 32071 - DNA, 20 bp, Artificial Sequence
  Synthetic oligonucleotide; AAG chr11 5372769 5372788 5372772 -
taacaaaagcaaaaataaac

SEQ ID NO: 32072 - DNA, 20 bp, Artificial Sequence
  Synthetic oligonucleotide; TGG chr11 5372766 5372785 5372769 -
caaaagcaaaaataaacaag

SEQ ID NO: 32073 - DNA, 20 bp, Artificial Sequence
  Synthetic oligonucleotide; GAG chr11 5372764 5372783 5372767 -
aaagcaaaaataaacaagtg

SEQ ID NO: 32074 - DNA, 20 bp, Artificial Sequence
  Synthetic oligonucleotide; CAG chr11 5372735 5372754 5372738 -
caaactaaatattttctgca

SEQ ID NO: 32075 - DNA, 20 bp, Artificial Sequence
  Synthetic oligonucleotide; AAG chr11 5372730 5372749 5372733 -
taaatattttctgcacagca

SEQ ID NO: 32076 - DNA, 20 bp, Artificial Sequence
  Synthetic oligonucleotide; AAG chr11 5372713 5372732 5372716 -
gcaaagaaaacaatcatcaa

SEQ ID NO: 32077 - DNA, 20 bp, Artificial Sequence
  Synthetic oligonucleotide; AGG chr11 5372712 5372731 5372715 -
caaagaaaacaatcatcaaa

SEQ ID NO: 32078 - DNA, 20 bp, Artificial Sequence
  Synthetic oligonucleotide; CAG chr11 5372707 5372726 5372710 -
aaaacaatcatcaaaaggaa

SEQ ID NO: 32079 - DNA, 20 bp, Artificial Sequence
  Synthetic oligonucleotide; TGG chr11 5372702 5372721 5372705 -
aatcatcaaaaggaacagtt

SEQ ID NO: 32080 - DNA, 20 bp, Artificial Sequence
  Synthetic oligonucleotide; GGG chr11 5372701 5372720 5372704 -
atcatcaaaaggaacagttt

SEQ ID NO: 32081 - DNA, 20 bp, Artificial Sequence
  Synthetic oligonucleotide; GAG chr11 5372699 5372718 5372702 -
catcaaaaggaacagtttgg

SEQ ID NO: 32082 - DNA, 20 bp, Artificial Sequence
  Synthetic oligonucleotide; CAG chr11 5372686 5372705 5372689 -
agtttgggagaaaatattta

SEQ ID NO: 32083 - DNA, 20 bp, Artificial Sequence
  Synthetic oligonucleotide; AAG chr11 5372667 5372686 5372670 -
acagatcatatatctgatac

SEQ ID NO: 32084 - DNA, 20 bp, Artificial Sequence
  Synthetic oligonucleotide; AAG chr11 5372645 5372664 5372648 -
gtctaatacccaaaatatat

SEQ ID NO: 32085 - DNA, 20 bp, Artificial Sequence
  Synthetic oligonucleotide; AGG chr11 5372644 5372663 5372647 -
tctaatacccaaaatatata

SEQ ID NO: 32086 - DNA, 20 bp, Artificial Sequence
  Synthetic oligonucleotide; TAG chr11 5372610 5372629 5372613 -
ctaaatatgaaaaaatataa

SEQ ID NO: 32087 - DNA, 20 bp, Artificial Sequence
  Synthetic oligonucleotide; AAG chr11 5372601 5372620 5372604 -
aaaaaatataatagtaacct

SEQ ID NO: 32088 - DNA, 20 bp, Artificial Sequence
  Synthetic oligonucleotide; TGG chr11 5372592 5372611 5372595 -
aatagtaacctaagtaaaaa

SEQ ID NO: 32089 - DNA, 20 bp, Artificial Sequence
  Synthetic oligonucleotide; GGG chr11 5372591 5372610 5372594 -
atagtaacctaagtaaaaat

SEQ ID NO: 32090 - DNA, 20 bp, Artificial Sequence
  Synthetic oligonucleotide; AAG chr11 5372586 5372605 5372589 -
aacctaagtaaaaatgggca

SEQ ID NO: 32091 - DNA, 20 bp, Artificial Sequence
  Synthetic oligonucleotide; AGG chr11 5372585 5372604 5372588 -
acctaagtaaaaatgggcaa

SEQ ID NO: 32092 - DNA, 20 bp, Artificial Sequence
  Synthetic oligonucleotide; AAG chr11 5372561 5372580 5372564 -
tctgaatatacatttctctg

SEQ ID NO: 32093 - DNA, 20 bp, Artificial Sequence
  Synthetic oligonucleotide; TGG chr11 5372549 5372568 5372552 -
tttctctgaagacatgcaaa

SEQ ID NO: 32094 - DNA, 20 bp, Artificial Sequence
  Synthetic oligonucleotide; CAG chr11 5372545 5372564 5372548 -
tctgaagacatgcaaatggt

SEQ ID NO: 32095 - DNA, 20 bp, Artificial Sequence
  Synthetic oligonucleotide; CAG chr11 5372542 5372561 5372545 -
gaagacatgcaaatggtcag

SEQ ID NO: 32096 - DNA, 20 bp, Artificial Sequence
  Synthetic oligonucleotide; AGG chr11 5372541 5372560 5372544 -
aagacatgcaaatggtcagc

SEQ ID NO: 32097 - DNA, 20 bp, Artificial Sequence
  Synthetic oligonucleotide; AAG chr11 5372530 5372549 5372533 -
atggtcagcaggcatatgaa

SEQ ID NO: 32098 - DNA, 20 bp, Artificial Sequence
  Synthetic oligonucleotide; AGG chr11 5372529 5372548 5372532 -
tggtcagcaggcatatgaaa

SEQ ID NO: 32099 - DNA, 20 bp, Artificial Sequence
  Synthetic oligonucleotide; CAG chr11 5372506 5372525 5372509 -
tgcactacatcaccaatcat

SEQ ID NO: 32100 - DNA, 20 bp, Artificial Sequence
  Synthetic oligonucleotide; AGG chr11 5372505 5372524 5372508 -
gcactacatcaccaatcatc

SEQ ID NO: 32101 - DNA, 20 bp, Artificial Sequence
  Synthetic oligonucleotide; AAG chr11 5372482 5372501 5372485 -
aaaatgcaaatcaaaaccac

SEQ ID NO: 32102 - DNA, 20 bp, Artificial Sequence
  Synthetic oligonucleotide; GAG chr11 5372462 5372481 5372465 -
aagtatcactcacacctgtt

SEQ ID NO: 32103 - DNA, 20 bp, Artificial Sequence
  Synthetic oligonucleotide; TGG chr11 5372458 5372477 5372461 -
atcactcacacctgttgaga

SEQ ID NO: 32104 - DNA, 20 bp, Artificial Sequence
  Synthetic oligonucleotide; AAG chr11 5372443 5372462 5372446 -
tgagatggctattatcaaaa

SEQ ID NO: 32105 - DNA, 20 bp, Artificial Sequence
  Synthetic oligonucleotide; AAG chr11 5372438 5372457 5372441 -
tggctattatcaaaaaagac

SEQ ID NO: 32106 - DNA, 20 bp, Artificial Sequence
  Synthetic oligonucleotide; GAG chr11 5372436 5372455 5372439 -
gctattatcaaaaaagacaa

SEQ ID NO: 32107 - DNA, 20 bp, Artificial Sequence
  Synthetic oligonucleotide; TAG chr11 5372432 5372451 5372435 -
ttatcaaaaaagacaagaga

SEQ ID NO: 32108 - DNA, 20 bp, Artificial Sequence
  Synthetic oligonucleotide; AGG chr11 5372431 5372450 5372434 -
tatcaaaaaagacaagagat

SEQ ID NO: 32109 - DNA, 20 bp, Artificial Sequence
  Synthetic oligonucleotide; GGG chr11 5372430 5372449 5372433 -
atcaaaaaagacaagagata

SEQ ID NO: 32110 - DNA, 20 bp, Artificial Sequence
  Synthetic oligonucleotide; GGG chr11 5372429 5372448 5372432 -
tcaaaaaagacaagagatag

SEQ ID NO: 32111 - DNA, 20 bp, Artificial Sequence
  Synthetic oligonucleotide; TGG chr11 5372425 5372444 5372428 -
aaaagacaagagataggggt

SEQ ID NO: 32112 - DNA, 20 bp, Artificial Sequence
  Synthetic oligonucleotide; GAG chr11 5372423 5372442 5372426 -
aagacaagagataggggttg

SEQ ID NO: 32113 - DNA, 20 bp, Artificial Sequence
  Synthetic oligonucleotide; GAG chr11 5372421 5372440 5372424 -
gacaagagataggggttgga

SEQ ID NO: 32114 - DNA, 20 bp, Artificial Sequence
  Synthetic oligonucleotide; AGG chr11 5372420 5372439 5372423 -
acaagagataggggttggag

SEQ ID NO: 32115 - DNA, 20 bp, Artificial Sequence
  Synthetic oligonucleotide; TGG chr11 5372414 5372433 5372417 -
gataggggttggagaggctg

SEQ ID NO: 32116 - DNA, 20 bp, Artificial Sequence
  Synthetic oligonucleotide; GAG chr11 5372412 5372431 5372415 -
taggggttggagaggctgtg

SEQ ID NO: 32117 - DNA, 20 bp, Artificial Sequence
  Synthetic oligonucleotide; AAG chr11 5372408 5372427 5372411 -
ggttggagaggctgtggaga

SEQ ID NO: 32118 - DNA, 20 bp, Artificial Sequence
  Synthetic oligonucleotide; AGG chr11 5372407 5372426 5372410 -
gttggagaggctgtggagaa

SEQ ID NO: 32119 - DNA, 20 bp, Artificial Sequence
  Synthetic oligonucleotide; GAG chr11 5372405 5372424 5372408 -
tggagaggctgtggagaaag

SEQ ID NO: 32120 - DNA, 20 bp, Artificial Sequence
  Synthetic oligonucleotide; TAG chr11 5372390 5372409 5372393 -
gaaaggagaactcttgtgca

SEQ ID NO: 32121 - DNA, 20 bp, Artificial Sequence
  Synthetic oligonucleotide; TGG chr11 5372386 5372405 5372389 -
ggagaactcttgtgcatagc

SEQ ID NO: 32122 - DNA, 20 bp, Artificial Sequence
  Synthetic oligonucleotide; TGG chr11 5372383 5372402 5372386 -
gaactcttgtgcatagctgg

SEQ ID NO: 32123 - DNA, 20 bp, Artificial Sequence
  Synthetic oligonucleotide; GGG chr11 5372382 5372401 5372385 -
aactcttgtgcatagctggt

SEQ ID NO: 32124 - DNA, 20 bp, Artificial Sequence
  Synthetic oligonucleotide; AAG chr11 5372374 5372393 5372377 -
tgcatagctggtgggaatgt

SEQ ID NO: 32125 - DNA, 20 bp, Artificial Sequence
  Synthetic oligonucleotide; TAG chr11 5372365 5372384 5372368 -
ggtgggaatgtaagttaaca

SEQ ID NO: 32126 - DNA, 20 bp, Artificial Sequence
  Synthetic oligonucleotide; TAG chr11 5372356 5372375 5372359 -
gtaagttaacatagccatta

SEQ ID NO: 32127 - DNA, 20 bp, Artificial Sequence
  Synthetic oligonucleotide; TGG chr11 5372345 5372364 5372348 -
tagccattatagaaaacgta

SEQ ID NO: 32128 - DNA, 20 bp, Artificial Sequence
  Synthetic oligonucleotide; AAG chr11 5372342 5372361 5372345 -
ccattatagaaaacgtatgg

SEQ ID NO: 32129 - DNA, 20 bp, Artificial Sequence
  Synthetic oligonucleotide; TAG chr11 5372320 5372339 5372323 -
gtttctcaaacaactaaaaa

SEQ ID NO: 32130 - DNA, 20 bp, Artificial Sequence
  Synthetic oligonucleotide; GAG chr11 5372318 5372337 5372321 -
ttctcaaacaactaaaaata

SEQ ID NO: 32131 - DNA, 20 bp, Artificial Sequence
  Synthetic oligonucleotide; AAG chr11 5372302 5372321 5372305 -
aatagagttattgtatgatg

SEQ ID NO: 32132 - DNA, 20 bp, Artificial Sequence
  Synthetic oligonucleotide; TAG chr11 5372250 5372269 5372253 -
taaataaaatccgcattttc

SEQ ID NO: 32133 - DNA, 20 bp, Artificial Sequence
  Synthetic oligonucleotide; GAG chr11 5372248 5372267 5372251 -
aataaaatccgcattttcta

SEQ ID NO: 32134 - DNA, 20 bp, Artificial Sequence
  Synthetic oligonucleotide; CAG chr11 5372221 5372240 5372224 -
ctgcactctcatgttaattg

SEQ ID NO: 32135 - DNA, 20 bp, Artificial Sequence
  Synthetic oligonucleotide; TAG chr11 5372206 5372225 5372209 -
aattgcagcattattcacaa

SEQ ID NO: 32136 - DNA, 20 bp, Artificial Sequence
  Synthetic oligonucleotide; AAG chr11 5372201 5372220 5372204 -
cagcattattcacaatagcc

SEQ ID NO: 32137 - DNA, 20 bp, Artificial Sequence
  Synthetic oligonucleotide; TGG chr11 5372195 5372214 5372198 -
tattcacaatagccaagaca

SEQ ID NO: 32138 - DNA, 20 bp, Artificial Sequence
  Synthetic oligonucleotide; AAG chr11 5372183 5372202 5372186 -
ccaagacatggaaacaatct

SEQ ID NO: 32139 - DNA, 20 bp, Artificial Sequence
  Synthetic oligonucleotide; TGG chr11 5372180 5372199 5372183 -
agacatggaaacaatctaag

SEQ ID NO: 32140 - DNA, 20 bp, Artificial Sequence
  Synthetic oligonucleotide; TAG chr11 5372167 5372186 5372170 -
atctaagtggtatctatata

SEQ ID NO: 32141 - DNA, 20 bp, Artificial Sequence
  Synthetic oligonucleotide; CAG chr11 5372159 5372178 5372162 -
ggtatctatatatagatgaa

SEQ ID NO: 32142 - DNA, 20 bp, Artificial Sequence
  Synthetic oligonucleotide; AAG chr11 5372153 5372172 5372156 -
tatatatagatgaacagata

SEQ ID NO: 32143 - DNA, 20 bp, Artificial Sequence
  Synthetic oligonucleotide; CAG chr11 5372141 5372160 5372144 -
aacagataaagacattgtga

SEQ ID NO: 32144 - DNA, 20 bp, Artificial Sequence
  Synthetic oligonucleotide; AGG chr11 5372140 5372159 5372143 -
acagataaagacattgtgac

SEQ ID NO: 32145 - DNA, 20 bp, Artificial Sequence
  Synthetic oligonucleotide; CAG chr11 5372081 5372100 5372084 -
tatgatatcacaatattatt

SEQ ID NO: 32146 - DNA, 20 bp, Artificial Sequence
  Synthetic oligonucleotide; AAG chr11 5372070 5372089 5372073 -
aatattattcagccttaaaa

SEQ ID NO: 32147 - DNA, 20 bp, Artificial Sequence
  Synthetic oligonucleotide; AGG chr11 5372069 5372088 5372072 -
atattattcagccttaaaaa

SEQ ID NO: 32148 - DNA, 20 bp, Artificial Sequence
  Synthetic oligonucleotide; GAG chr11 5372067 5372086 5372070 -
attattcagccttaaaaaag

SEQ ID NO: 32149 - DNA, 20 bp, Artificial Sequence
  Synthetic oligonucleotide; TGG chr11 5372063 5372082 5372066 -
ttcagccttaaaaaaggaga

SEQ ID NO: 32150 - DNA, 20 bp, Artificial Sequence
  Synthetic oligonucleotide; GGG chr11 5372062 5372081 5372065 -
tcagccttaaaaaaggagat

SEQ ID NO: 32151 - DNA, 20 bp, Artificial Sequence
  Synthetic oligonucleotide; GGG chr11 5372061 5372080 5372064 -
cagccttaaaaaaggagatg

SEQ ID NO: 32152 - DNA, 20 bp, Artificial Sequence
  Synthetic oligonucleotide; GGG chr11 5372060 5372079 5372063 -
agccttaaaaaaggagatgg

SEQ ID NO: 32153 - DNA, 20 bp, Artificial Sequence
  Synthetic oligonucleotide; GGG chr11 5372059 5372078 5372062 -
gccttaaaaaaggagatggg

SEQ ID NO: 32154 - DNA, 20 bp, Artificial Sequence
  Synthetic oligonucleotide; TAG chr11 5372044 5372063 5372047 -
atggggggaatgtataaacc

SEQ ID NO: 32155 - DNA, 20 bp, Artificial Sequence
  Synthetic oligonucleotide; GAG chr11 5372042 5372061 5372045 -
ggggggaatgtataaaccta

SEQ ID NO: 32156 - DNA, 20 bp, Artificial Sequence
  Synthetic oligonucleotide; AAG chr11 5372028 5372047 5372031 -
aacctagagtacattttgct

SEQ ID NO: 32157 - DNA, 20 bp, Artificial Sequence
  Synthetic oligonucleotide; CAG chr11 5372015 5372034 5372018 -
ttttgctaagtgaaataaac

SEQ ID NO: 32158 - DNA, 20 bp, Artificial Sequence
  Synthetic oligonucleotide; CAG chr11 5372009 5372028 5372012 -
taagtgaaataaaccagaca

SEQ ID NO: 32159 - DNA, 20 bp, Artificial Sequence
  Synthetic oligonucleotide; AAG chr11 5371997 5372016 5372000 -
accagacacagaaacaaata

SEQ ID NO: 32160 - DNA, 20 bp, Artificial Sequence
  Synthetic oligonucleotide; AGG chr11 5371996 5372015 5371999 -
ccagacacagaaacaaataa

SEQ ID NO: 32161 - DNA, 20 bp, Artificial Sequence
  Synthetic oligonucleotide; TGG chr11 5371975 5371994 5371978 -
ggcatgatattacttatatg

SEQ ID NO: 32162 - DNA, 20 bp, Artificial Sequence
  Synthetic oligonucleotide; AAG chr11 5371964 5371983 5371967 -
acttatatgtggaatctcaa

SEQ ID NO: 32163 - DNA, 20 bp, Artificial Sequence
  Synthetic oligonucleotide; AAG chr11 5371955 5371974 5371958 -
tggaatctcaaaagaaaaat

SEQ ID NO: 32164 - DNA, 20 bp, Artificial Sequence
  Synthetic oligonucleotide; AGG chr11 5371954 5371973 5371957 -
ggaatctcaaaagaaaaata

SEQ ID NO: 32165 - DNA, 20 bp, Artificial Sequence
  Synthetic oligonucleotide; TAG chr11 5371942 5371961 5371945 -
gaaaaataaggtcaaatgca

SEQ ID NO: 32166 - DNA, 20 bp, Artificial Sequence
  Synthetic oligonucleotide; CAG chr11 5371936 5371955 5371939 -
taaggtcaaatgcatagaaa

SEQ ID NO: 32167 - DNA, 20 bp, Artificial Sequence
  Synthetic oligonucleotide; AAG chr11 5371927 5371946 5371930 -
atgcatagaaacagtgtaaa

SEQ ID NO: 32168 - DNA, 20 bp, Artificial Sequence
  Synthetic oligonucleotide; AGG chr11 5371926 5371945 5371929 -
tgcatagaaacagtgtaaaa

SEQ ID NO: 32169 - DNA, 20 bp, Artificial Sequence
  Synthetic oligonucleotide; GGG chr11 5371925 5371944 5371928 -
gcatagaaacagtgtaaaaa

SEQ ID NO: 32170 - DNA, 20 bp, Artificial Sequence
  Synthetic oligonucleotide; GGG chr11 5371924 5371943 5371927 -
catagaaacagtgtaaaaag

SEQ ID NO: 32171 - DNA, 20 bp, Artificial Sequence
  Synthetic oligonucleotide; AAG chr11 5371921 5371940 5371924 -
agaaacagtgtaaaaagggg

SEQ ID NO: 32172 - DNA, 20 bp, Artificial Sequence
  Synthetic oligonucleotide; AAG chr11 5371917 5371936 5371920 -
acagtgtaaaaaggggaaga

SEQ ID NO: 32173 - DNA, 20 bp, Artificial Sequence
  Synthetic oligonucleotide; AAG chr11 5371913 5371932 5371916 -
tgtaaaaaggggaagaaaga

SEQ ID NO: 32174 - DNA, 20 bp, Artificial Sequence
  Synthetic oligonucleotide; GAG chr11 5371911 5371930 5371914 -
taaaaaggggaagaaagaaa

SEQ ID NO: 32175 - DNA, 20 bp, Artificial Sequence
  Synthetic oligonucleotide; TAG chr11 5371904 5371923 5371907 -
gggaagaaagaaagagaaaa

SEQ ID NO: 32176 - DNA, 20 bp, Artificial Sequence
  Synthetic oligonucleotide; AGG chr11 5371903 5371922 5371906 -
ggaagaaagaaagagaaaat

SEQ ID NO: 32177 - DNA, 20 bp, Artificial Sequence
  Synthetic oligonucleotide; GGG chr11 5371902 5371921 5371905 -
gaagaaagaaagagaaaata

SEQ ID NO: 32178 - DNA, 20 bp, Artificial Sequence
  Synthetic oligonucleotide; GAG chr11 5371900 5371919 5371903 -
agaaagaaagagaaaatagg

SEQ ID NO: 32179 - DNA, 20 bp, Artificial Sequence
  Synthetic oligonucleotide; AAG chr11 5371897 5371916 5371900 -
aagaaagagaaaatagggag

SEQ ID NO: 32180 - DNA, 20 bp, Artificial Sequence
  Synthetic oligonucleotide; TAG chr11 5371894 5371913 5371897 -
aaagagaaaatagggagaag

SEQ ID NO: 32181 - DNA, 20 bp, Artificial Sequence
  Synthetic oligonucleotide; AGG chr11 5371893 5371912 5371896 -
aagagaaaatagggagaagt

SEQ ID NO: 32182 - DNA, 20 bp, Artificial Sequence
  Synthetic oligonucleotide; AAG chr11 5371887 5371906 5371890 -
aaatagggagaagtaggtca

SEQ ID NO: 32183 - DNA, 20 bp, Artificial Sequence
  Synthetic oligonucleotide; AGG chr11 5371886 5371905 5371889 -
aatagggagaagtaggtcaa

SEQ ID NO: 32184 - DNA, 20 bp, Artificial Sequence
  Synthetic oligonucleotide; CAG chr11 5371872 5371891 5371875 -
ggtcaaaggttataaacttg

SEQ ID NO: 32185 - DNA, 20 bp, Artificial Sequence
  Synthetic oligonucleotide; TAG chr11 5371864 5371883 5371867 -
gttataaacttgcagctgta

SEQ ID NO: 32186 - DNA, 20 bp, Artificial Sequence
  Synthetic oligonucleotide; AGG chr11 5371863 5371882 5371866 -
ttataaacttgcagctgtat

SEQ ID NO: 32187 - DNA, 20 bp, Artificial Sequence
  Synthetic oligonucleotide; AAG chr11 5371854 5371873 5371857 -
tgcagctgtataggataaat

SEQ ID NO: 32188 - DNA, 20 bp, Artificial Sequence
  Synthetic oligonucleotide; TAG chr11 5371849 5371868 5371852 -
ctgtataggataaataagtt

SEQ ID NO: 32189 - DNA, 20 bp, Artificial Sequence
  Synthetic oligonucleotide; GAG chr11 5371847 5371866 5371850 -
gtataggataaataagttta

SEQ ID NO: 32190 - DNA, 20 bp, Artificial Sequence
  Synthetic oligonucleotide; TAG chr11 5371841 5371860 5371844 -
gataaataagtttagagatc

SEQ ID NO: 32191 - DNA, 20 bp, Artificial Sequence
  Synthetic oligonucleotide; TGG chr11 5371834 5371853 5371837 -
aagtttagagatctagtgta

SEQ ID NO: 32192 - DNA, 20 bp, Artificial Sequence
  Synthetic oligonucleotide; AAG chr11 5371827 5371846 5371830 -
gagatctagtgtatggcatg

SEQ ID NO: 32193 - DNA, 20 bp, Artificial Sequence
  Synthetic oligonucleotide; CAG chr11 5371787 5371806 5371790 -
aaactaaacatttgttatga

SEQ ID NO: 32194 - DNA, 20 bp, Artificial Sequence
  Synthetic oligonucleotide; TAG chr11 5371784 5371803 5371787 -
ctaaacatttgttatgacag

SEQ ID NO: 32195 - DNA, 20 bp, Artificial Sequence
  Synthetic oligonucleotide; TAG chr11 5371777 5371796 5371780 -
tttgttatgacagtagatgt

SEQ ID NO: 32196 - DNA, 20 bp, Artificial Sequence
  Synthetic oligonucleotide; AAG chr11 5371761 5371780 5371764 -
atgttagatgcccttacaca

SEQ ID NO: 32197 - DNA, 20 bp, Artificial Sequence
  Synthetic oligonucleotide; AAG chr11 5371755 5371774 5371758 -
gatgcccttacacaaagaaa

SEQ ID NO: 32198 - DNA, 20 bp, Artificial Sequence
  Synthetic oligonucleotide; AAG chr11 5371749 5371768 5371752 -
cttacacaaagaaaaagcaa

SEQ ID NO: 32199 - DNA, 20 bp, Artificial Sequence
  Synthetic oligonucleotide; AGG chr11 5371748 5371767 5371751 -
ttacacaaagaaaaagcaaa

SEQ ID NO: 32200 - DNA, 20 bp, Artificial Sequence
  Synthetic oligonucleotide; TGG chr11 5371739 5371758 5371742 -
gaaaaagcaaaaggtatcta

SEQ ID NO: 32201 - DNA, 20 bp, Artificial Sequence
  Synthetic oligonucleotide; AAG chr11 5371736 5371755 5371739 -
aaagcaaaaggtatctatgg

SEQ ID NO: 32202 - DNA, 20 bp, Artificial Sequence
  Synthetic oligonucleotide; AGG chr11 5371735 5371754 5371738 -
aagcaaaaggtatctatgga

SEQ ID NO: 32203 - DNA, 20 bp, Artificial Sequence
  Synthetic oligonucleotide; TGG chr11 5371721 5371740 5371724 -
tatggaaggtgttgtattga

SEQ ID NO: 32204 - DNA, 20 bp, Artificial Sequence
  Synthetic oligonucleotide; TAG chr11 5371717 5371736 5371720 -
gaaggtgttgtattgatgga

SEQ ID NO: 32205 - DNA, 20 bp, Artificial Sequence
  Synthetic oligonucleotide; AGG chr11 5371716 5371735 5371719 -
aaggtgttgtattgatggat

SEQ ID NO: 32206 - DNA, 20 bp, Artificial Sequence
  Synthetic oligonucleotide; AAG chr11 5371697 5371716 5371700 -
taggttaatttgcttgattg

SEQ ID NO: 32207 - DNA, 20 bp, Artificial Sequence
  Synthetic oligonucleotide; AAG chr11 5371651 5371670 5371654 -
atatcctatattttttgaac

SEQ ID NO: 32208 - DNA, 20 bp, Artificial Sequence
  Synthetic oligonucleotide; CAG chr11 5371637 5371656 5371640 -
ttgaacaagcttacttgttt

SEQ ID NO: 32209 - DNA, 20 bp, Artificial Sequence
  Synthetic oligonucleotide; AAG chr11 5371620 5371639 5371623 -
tttcagataaaatattttaa

SEQ ID NO: 32210 - DNA, 20 bp, Artificial Sequence
  Synthetic oligonucleotide; AAG chr11 5371607 5371626 5371610 -
attttaaaagcttttatctg

SEQ ID NO: 32211 - DNA, 20 bp, Artificial Sequence
  Synthetic oligonucleotide; AAG chr11 5371603 5371622 5371606 -
taaaagcttttatctgaagc

SEQ ID NO: 32212 - DNA, 20 bp, Artificial Sequence
  Synthetic oligonucleotide; TAG chr11 5371576 5371595 5371579 -
atttctgtttcctaattgtt

SEQ ID NO: 32213 - DNA, 20 bp, Artificial Sequence
  Synthetic oligonucleotide; AGG chr11 5371575 5371594 5371578 -
tttctgtttcctaattgttt

SEQ ID NO: 32214 - DNA, 20 bp, Artificial Sequence
  Synthetic oligonucleotide; GGG chr11 5371574 5371593 5371577 -
ttctgtttcctaattgttta

SEQ ID NO: 32215 - DNA, 20 bp, Artificial Sequence
  Synthetic oligonucleotide; TGG chr11 5371530 5371549 5371533 -
ttaaaacttatgtaaccctt

SEQ ID NO: 32216 - DNA, 20 bp, Artificial Sequence
  Synthetic oligonucleotide; GAG chr11 5371520 5371539 5371523 -
tgtaaccctttggatataat

SEQ ID NO: 32217 - DNA, 20 bp, Artificial Sequence
  Synthetic oligonucleotide; CAG chr11 5371490 5371509 5371493 -
tttttctctatttttaatat

SEQ ID NO: 32218 - DNA, 20 bp, Artificial Sequence
  Synthetic oligonucleotide; TAG chr11 5371480 5371499 5371483 -
tttttaatatcagtactctt

SEQ ID NO: 32219 - DNA, 20 bp, Artificial Sequence
  Synthetic oligonucleotide; CAG chr11 5371474 5371493 5371477 -
atatcagtactctttagata

SEQ ID NO: 32220 - DNA, 20 bp, Artificial Sequence
  Synthetic oligonucleotide; CAG chr11 5371457 5371476 5371460 -
atacagctatcactgtctct

SEQ ID NO: 32221 - DNA, 20 bp, Artificial Sequence
  Synthetic oligonucleotide; AGG chr11 5371456 5371475 5371459 -
tacagctatcactgtctctc

SEQ ID NO: 32222 - DNA, 20 bp, Artificial Sequence
  Synthetic oligonucleotide; GGG chr11 5371455 5371474 5371458 -
acagctatcactgtctctca

SEQ ID NO: 32223 - DNA, 20 bp, Artificial Sequence
  Synthetic oligonucleotide; TGG chr11 5371440 5371459 5371443 -
tctcagggtacctctgcctc

SEQ ID NO: 32224 - DNA, 20 bp, Artificial Sequence
  Synthetic oligonucleotide; CGG chr11 5371399 5371418 5371402 -
atgttgaaattttatatctc

SEQ ID NO: 32225 - DNA, 20 bp, Artificial Sequence
  Synthetic oligonucleotide; CAG chr11 5371387 5371406 5371390 -
tatatctccggcctacaact

SEQ ID NO: 32226 - DNA, 20 bp, Artificial Sequence
  Synthetic oligonucleotide; AGG chr11 5371386 5371405 5371389 -
atatctccggcctacaactc

SEQ ID NO: 32227 - DNA, 20 bp, Artificial Sequence
  Synthetic oligonucleotide; GGG chr11 5371385 5371404 5371388 -
tatctccggcctacaactca

SEQ ID NO: 32228 - DNA, 20 bp, Artificial Sequence
  Synthetic oligonucleotide; CAG chr11 5371377 5371396 5371380 -
gcctacaactcagggtttta

SEQ ID NO: 32229 - DNA, 20 bp, Artificial Sequence
  Synthetic oligonucleotide; GAG chr11 5371345 5371364 5371348 -
tgtctctattaaatgtttat

SEQ ID NO: 32230 - DNA, 20 bp, Artificial Sequence
  Synthetic oligonucleotide; CAG chr11 5371339 5371358 5371342 -
tattaaatgtttatgagcca

SEQ ID NO: 32231 - DNA, 20 bp, Artificial Sequence
  Synthetic oligonucleotide; GAG chr11 5371337 5371356 5371340 -
ttaaatgtttatgagccaca

SEQ ID NO: 32232 - DNA, 20 bp, Artificial Sequence
  Synthetic oligonucleotide; GAG chr11 5371331 5371350 5371334 -
gtttatgagccacagagaat

SEQ ID NO: 32233 - DNA, 20 bp, Artificial Sequence
  Synthetic oligonucleotide; GAG chr11 5371293 5371312 5371296 -
ttttttgaacttctgtgttt

SEQ ID NO: 32234 - DNA, 20 bp, Artificial Sequence
  Synthetic oligonucleotide; AAG chr11 5371265 5371284 5371268 -
aaaaaattaacctaatgtga

SEQ ID NO: 32235 - DNA, 20 bp, Artificial Sequence
  Synthetic oligonucleotide; TAG chr11 5371258 5371277 5371261 -
taacctaatgtgaaagaccc

SEQ ID NO: 32236 - DNA, 20 bp, Artificial Sequence
  Synthetic oligonucleotide; CGG chr11 5371252 5371271 5371255 -
aatgtgaaagaccctagatc

SEQ ID NO: 32237 - DNA, 20 bp, Artificial Sequence
  Synthetic oligonucleotide; GGG chr11 5371251 5371270 5371254 -
atgtgaaagaccctagatcc

SEQ ID NO: 32238 - DNA, 20 bp, Artificial Sequence
  Synthetic oligonucleotide; GGG chr11 5371250 5371269 5371253 -
tgtgaaagaccctagatccg

SEQ ID NO: 32239 - DNA, 20 bp, Artificial Sequence
  Synthetic oligonucleotide; AAG chr11 5371246 5371265 5371249 -
aaagaccctagatccgggga

SEQ ID NO: 32240 - DNA, 20 bp, Artificial Sequence
  Synthetic oligonucleotide; AGG chr11 5371245 5371264 5371248 -
aagaccctagatccggggaa

SEQ ID NO: 32241 - DNA, 20 bp, Artificial Sequence
  Synthetic oligonucleotide; TGG chr11 5371235 5371254 5371238 -
atccggggaaaggtgctgtg

SEQ ID NO: 32242 - DNA, 20 bp, Artificial Sequence
  Synthetic oligonucleotide; TAG chr11 5371230 5371249 5371233 -
gggaaaggtgctgtgtggct

SEQ ID NO: 32243 - DNA, 20 bp, Artificial Sequence
  Synthetic oligonucleotide; GAG chr11 5371228 5371247 5371231 -
gaaaggtgctgtgtggctta

SEQ ID NO: 32244 - DNA, 20 bp, Artificial Sequence
  Synthetic oligonucleotide; CAG chr11 5371216 5371235 5371219 -
gtggcttagagtataaacat

SEQ ID NO: 32245 - DNA, 20 bp, Artificial Sequence
  Synthetic oligonucleotide; TGG chr11 5371204 5371223 5371207 -
ataaacatcagaatgtgcta

SEQ ID NO: 32246 - DNA, 20 bp, Artificial Sequence
  Synthetic oligonucleotide; TAG chr11 5371195 5371214 5371198 -
agaatgtgctatggactttc

SEQ ID NO: 32247 - DNA, 20 bp, Artificial Sequence
  Synthetic oligonucleotide; CAG chr11 5371185 5371204 5371188 -
atggactttctagaatattt

SEQ ID NO: 32248 - DNA, 20 bp, Artificial Sequence
  Synthetic oligonucleotide; CAG chr11 5371166 5371185 5371169 -
tcagtgcccttgtatatcct

SEQ ID NO: 32249 - DNA, 20 bp, Artificial Sequence
  Synthetic oligonucleotide; TGG chr11 5371157 5371176 5371160 -
ttgtatatcctcagaatgtg

SEQ ID NO: 32250 - DNA, 20 bp, Artificial Sequence
  Synthetic oligonucleotide; GAG chr11 5371155 5371174 5371158 -
gtatatcctcagaatgtgtg

SEQ ID NO: 32251 - DNA, 20 bp, Artificial Sequence
  Synthetic oligonucleotide; GAG chr11 5371153 5371172 5371156 -
atatcctcagaatgtgtgga

SEQ ID NO: 32252 - DNA, 20 bp, Artificial Sequence
  Synthetic oligonucleotide; AAG chr11 5371137 5371156 5371140 -
tggagagtaattccaaaaca

SEQ ID NO: 32253 - DNA, 20 bp, Artificial Sequence
  Synthetic oligonucleotide; TGG chr11 5371116 5371135 5371119 -
agcccttacttcaatatcca

SEQ ID NO: 32254 - DNA, 20 bp, Artificial Sequence
  Synthetic oligonucleotide; TGG chr11 5371113 5371132 5371116 -
ccttacttcaatatccatgg

SEQ ID NO: 32255 - DNA, 20 bp, Artificial Sequence
  Synthetic oligonucleotide; TAG chr11 5371106 5371125 5371109 -
tcaatatccatggtggtcca

SEQ ID NO: 32256 - DNA, 20 bp, Artificial Sequence
  Synthetic oligonucleotide; TAG chr11 5371102 5371121 5371105 -
tatccatggtggtccatagc

SEQ ID NO: 32257 - DNA, 20 bp, Artificial Sequence
  Synthetic oligonucleotide; AGG chr11 5371101 5371120 5371104 -
atccatggtggtccatagct

SEQ ID NO: 32258 - DNA, 20 bp, Artificial Sequence
  Synthetic oligonucleotide; GGG chr11 5371100 5371119 5371103 -
tccatggtggtccatagcta

SEQ ID NO: 32259 - DNA, 20 bp, Artificial Sequence
  Synthetic oligonucleotide; TAG chr11 5371096 5371115 5371099 -
tggtggtccatagctagggc

SEQ ID NO: 32260 - DNA, 20 bp, Artificial Sequence
  Synthetic oligonucleotide; CAG chr11 5371093 5371112 5371096 -
tggtccatagctagggctag

SEQ ID NO: 32261 - DNA, 20 bp, Artificial Sequence
  Synthetic oligonucleotide; AAG chr11 5371090 5371109 5371093 -
tccatagctagggctagcag

SEQ ID NO: 32262 - DNA, 20 bp, Artificial Sequence
  Synthetic oligonucleotide; AGG chr11 5371089 5371108 5371092 -
ccatagctagggctagcaga

SEQ ID NO: 32263 - DNA, 20 bp, Artificial Sequence
  Synthetic oligonucleotide; AAG chr11 5371086 5371105 5371089 -
tagctagggctagcagaagg

SEQ ID NO: 32264 - DNA, 20 bp, Artificial Sequence
  Synthetic oligonucleotide; AGG chr11 5371085 5371104 5371088 -
agctagggctagcagaagga

SEQ ID NO: 32265 - DNA, 20 bp, Artificial Sequence
  Synthetic oligonucleotide; GGG chr11 5371084 5371103 5371087 -
gctagggctagcagaaggaa

SEQ ID NO: 32266 - DNA, 20 bp, Artificial Sequence
  Synthetic oligonucleotide; TGG chr11 5371042 5371061 5371045 -
tcactcaaattatctgctct

SEQ ID NO: 32267 - DNA, 20 bp, Artificial Sequence
  Synthetic oligonucleotide; CAG chr11 5371033 5371052 5371036 -
ttatctgctcttggaaaaac

SEQ ID NO: 32268 - DNA, 20 bp, Artificial Sequence
  Synthetic oligonucleotide; TGG chr11 5371024 5371043 5371027 -
cttggaaaaaccagtccctt

SEQ ID NO: 32269 - DNA, 20 bp, Artificial Sequence
  Synthetic oligonucleotide; GGG chr11 5371023 5371042 5371026 -
ttggaaaaaccagtcccttt

SEQ ID NO: 32270 - DNA, 20 bp, Artificial Sequence
  Synthetic oligonucleotide; TAG chr11 5371020 5371039 5371023 -
gaaaaaccagtccctttggg

SEQ ID NO: 32271 - DNA, 20 bp, Artificial Sequence
  Synthetic oligonucleotide; AAG chr11 5371003 5371022 5371006 -
gggtagccccaatcatgtgt

SEQ ID NO: 32272 - DNA, 20 bp, Artificial Sequence
  Synthetic oligonucleotide; AAG chr11 5370989 5371008 5370992 -
atgtgtaagtctttttcctg

SEQ ID NO: 32273 - DNA, 20 bp, Artificial Sequence
  Synthetic oligonucleotide; TGG chr11 5370976 5370995 5370979 -
tttcctgaagtatgatcata

SEQ ID NO: 32274 - DNA, 20 bp, Artificial Sequence
  Synthetic oligonucleotide; CAG chr11 5370945 5370964 5370948 -
cttctgtctgctcattgaac

SEQ ID NO: 32275 - DNA, 20 bp, Artificial Sequence
  Synthetic oligonucleotide; GAG chr11 5370943 5370962 5370946 -
tctgtctgctcattgaacca

SEQ ID NO: 32276 - DNA, 20 bp, Artificial Sequence
  Synthetic oligonucleotide; CAG chr11 5370937 5370956 5370940 -
tgctcattgaaccagagctc

SEQ ID NO: 32277 - DNA, 20 bp, Artificial Sequence
  Synthetic oligonucleotide; AGG chr11 5370936 5370955 5370939 -
gctcattgaaccagagctcc

SEQ ID NO: 32278 - DNA, 20 bp, Artificial Sequence
  Synthetic oligonucleotide; TGG chr11 5370920 5370939 5370923 -
ctccaggaccaataccacta

SEQ ID NO: 32279 - DNA, 20 bp, Artificial Sequence
  Synthetic oligonucleotide; CAG chr11 5370890 5370909 5370893 -
tcttttgcctctacaactct

SEQ ID NO: 32280 - DNA, 20 bp, Artificial Sequence
  Synthetic oligonucleotide; AGG chr11 5370889 5370908 5370892 -
cttttgcctctacaactctc

SEQ ID NO: 32281 - DNA, 20 bp, Artificial Sequence
  Synthetic oligonucleotide; CAG chr11 5370883 5370902 5370886 -
cctctacaactctcaggtca

SEQ ID NO: 32282 - DNA, 20 bp, Artificial Sequence
  Synthetic oligonucleotide; CAG chr11 5370861 5370880 5370864 -
gctgaaatattacctcctct

SEQ ID NO: 32283 - DNA, 20 bp, Artificial Sequence
  Synthetic oligonucleotide; TAG chr11 5370840 5370859 5370843 -
agaacccgcatttgtcacac

SEQ ID NO: 32284 - DNA, 20 bp, Artificial Sequence
  Synthetic oligonucleotide; TAG chr11 5370786 5370805 5370789 -
caaattttttctttctttca

SEQ ID NO: 32285 - DNA, 20 bp, Artificial Sequence
  Synthetic oligonucleotide; CAG chr11 5370783 5370802 5370786 -
attttttctttctttcatag

SEQ ID NO: 32286 - DNA, 20 bp, Artificial Sequence
  Synthetic oligonucleotide; GAG chr11 5370774 5370793 5370777 -
ttctttcatagcagctatat

SEQ ID NO: 32287 - DNA, 20 bp, Artificial Sequence
  Synthetic oligonucleotide; AGG chr11 5370773 5370792 5370776 -
tctttcatagcagctatatg

SEQ ID NO: 32288 - DNA, 20 bp, Artificial Sequence
  Synthetic oligonucleotide; AAG chr11 5370721 5370740 5370724 -
tttcctttccgttaaaatac

SEQ ID NO: 32289 - DNA, 20 bp, Artificial Sequence
  Synthetic oligonucleotide; TAG chr11 5370713 5370732 5370716 -
ccgttaaaatacaagcttca

SEQ ID NO: 32290 - DNA, 20 bp, Artificial Sequence
  Synthetic oligonucleotide; AGG chr11 5370712 5370731 5370715 -
cgttaaaatacaagcttcat

SEQ ID NO: 32291 - DNA, 20 bp, Artificial Sequence
  Synthetic oligonucleotide; CAG chr11 5370707 5370726 5370710 -
aaatacaagcttcataggaa

SEQ ID NO: 32292 - DNA, 20 bp, Artificial Sequence
  Synthetic oligonucleotide; GAG chr11 5370705 5370724 5370708 -
atacaagcttcataggaaca

SEQ ID NO: 32293 - DNA, 20 bp, Artificial Sequence
  Synthetic oligonucleotide; CAG chr11 5370674 5370693 5370677 -
caccaatgtatttttgtacc

SEQ ID NO: 32294 - DNA, 20 bp, Artificial Sequence
  Synthetic oligonucleotide; TAG chr11 5370671 5370690 5370674 -
caatgtatttttgtacccag

SEQ ID NO: 32295 - DNA, 20 bp, Artificial Sequence
  Synthetic oligonucleotide; TAG chr11 5370659 5370678 5370662 -
gtacccagtagttgctaaaa

SEQ ID NO: 32296 - DNA, 20 bp, Artificial Sequence
  Synthetic oligonucleotide; GAG chr11 5370657 5370676 5370660 -
acccagtagttgctaaaata

SEQ ID NO: 32297 - DNA, 20 bp, Artificial Sequence
  Synthetic oligonucleotide; AAG chr11 5370654 5370673 5370657 -
cagtagttgctaaaatagag

SEQ ID NO: 32298 - DNA, 20 bp, Artificial Sequence
  Synthetic oligonucleotide; TAG chr11 5370643 5370662 5370646 -
aaaatagagaagcctctcat

SEQ ID NO: 32299 - DNA, 20 bp, Artificial Sequence
  Synthetic oligonucleotide; TAG chr11 5370595 5370614 5370598 -
gcttgttaaataaatgtatt

SEQ ID NO: 32300 - DNA, 20 bp, Artificial Sequence
  Synthetic oligonucleotide; CAG chr11 5370567 5370586 5370570 -
ctattattcatttctaaaca

SEQ ID NO: 32301 - DNA, 20 bp, Artificial Sequence
  Synthetic oligonucleotide; AAG chr11 5370563 5370582 5370566 -
tattcatttctaaacacaga

SEQ ID NO: 32302 - DNA, 20 bp, Artificial Sequence
  Synthetic oligonucleotide; GAG chr11 5370561 5370580 5370564 -
ttcatttctaaacacagaaa

SEQ ID NO: 32303 - DNA, 20 bp, Artificial Sequence
  Synthetic oligonucleotide; GAG chr11 5370557 5370576 5370560 -
tttctaaacacagaaagagt

SEQ ID NO: 32304 - DNA, 20 bp, Artificial Sequence
  Synthetic oligonucleotide; AAG chr11 5370553 5370572 5370556 -
taaacacagaaagagtgaga

SEQ ID NO: 32305 - DNA, 20 bp, Artificial Sequence
  Synthetic oligonucleotide; AGG chr11 5370552 5370571 5370555 -
aaacacagaaagagtgagaa

SEQ ID NO: 32306 - DNA, 20 bp, Artificial Sequence
  Synthetic oligonucleotide; GGG chr11 5370551 5370570 5370554 -
aacacagaaagagtgagaaa

SEQ ID NO: 32307 - DNA, 20 bp, Artificial Sequence
  Synthetic oligonucleotide; GAG chr11 5370549 5370568 5370552 -
cacagaaagagtgagaaagg

SEQ ID NO: 32308 - DNA, 20 bp, Artificial Sequence
  Synthetic oligonucleotide; AAG chr11 5370545 5370564 5370548 -
gaaagagtgagaaagggaga

SEQ ID NO: 32309 - DNA, 20 bp, Artificial Sequence
  Synthetic oligonucleotide; CAG chr11 5370541 5370560 5370544 -
gagtgagaaagggagaaaga

SEQ ID NO: 32310 - DNA, 20 bp, Artificial Sequence
  Synthetic oligonucleotide; AAG chr11 5370537 5370556 5370540 -
gagaaagggagaaagacaga

SEQ ID NO: 32311 - DNA, 20 bp, Artificial Sequence
  Synthetic oligonucleotide; AAG chr11 5370533 5370552 5370536 -
aagggagaaagacagaaagt

SEQ ID NO: 32312 - DNA, 20 bp, Artificial Sequence
  Synthetic oligonucleotide; AAG chr11 5370525 5370544 5370528 -
aagacagaaagtaagaatga

SEQ ID NO: 32313 - DNA, 20 bp, Artificial Sequence
  Synthetic oligonucleotide; AAG chr11 5370521 5370540 5370524 -
cagaaagtaagaatgaaaga

SEQ ID NO: 32314 - DNA, 20 bp, Artificial Sequence
  Synthetic oligonucleotide; GAG chr11 5370519 5370538 5370522 -
gaaagtaagaatgaaagaaa

SEQ ID NO: 32315 - DNA, 20 bp, Artificial Sequence
  Synthetic oligonucleotide; GAG chr11 5370517 5370536 5370520 -
aagtaagaatgaaagaaaga

SEQ ID NO: 32316 - DNA, 20 bp, Artificial Sequence
  Synthetic oligonucleotide; GAG chr11 5370513 5370532 5370516 -
aagaatgaaagaaagagagt

SEQ ID NO: 32317 - DNA, 20 bp, Artificial Sequence
  Synthetic oligonucleotide; AAG chr11 5370507 5370526 5370510 -
gaaagaaagagagtgagata

SEQ ID NO: 32318 - DNA, 20 bp, Artificial Sequence
  Synthetic oligonucleotide; TAG chr11 5370502 5370521 5370505 -
aaagagagtgagataaagaa

SEQ ID NO: 32319 - DNA, 20 bp, Artificial Sequence
  Synthetic oligonucleotide; TGG chr11 5370491 5370510 5370494 -
gataaagaatagatattttc

SEQ ID NO: 32320 - DNA, 20 bp, Artificial Sequence
  Synthetic oligonucleotide; TGG chr11 5370466 5370485 5370469 -
ttaaattattgccctcaaat

SEQ ID NO: 32321 - DNA, 20 bp, Artificial Sequence
  Synthetic oligonucleotide; CAG chr11 5370462 5370481 5370465 -
attattgccctcaaattgga

SEQ ID NO: 32322 - DNA, 20 bp, Artificial Sequence
  Synthetic oligonucleotide; GAG chr11 5370460 5370479 5370463 -
tattgccctcaaattggaca

SEQ ID NO: 32323 - DNA, 20 bp, Artificial Sequence
  Synthetic oligonucleotide; AAG chr11 5370434 5370453 5370437 -
taccaacaaatgatcctctg

SEQ ID NO: 32324 - DNA, 20 bp, Artificial Sequence
  Synthetic oligonucleotide; CAG chr11 5370387 5370406 5370390 -
attgctctgacctgacaacc

SEQ ID NO: 32325 - DNA, 20 bp, Artificial Sequence
  Synthetic oligonucleotide; TAG chr11 5370378 5370397 5370381 -
acctgacaacccagctattt

SEQ ID NO: 32326 - DNA, 20 bp, Artificial Sequence
  Synthetic oligonucleotide; TAG chr11 5370373 5370392 5370376 -
acaacccagctattttagtt

SEQ ID NO: 32327 - DNA, 20 bp, Artificial Sequence
  Synthetic oligonucleotide; CAG chr11 5370364 5370383 5370367 -
ctattttagtttagtctttg

SEQ ID NO: 32328 - DNA, 20 bp, Artificial Sequence
  Synthetic oligonucleotide; TAG chr11 5370327 5370346 5370330 -
atgcctatctcactttgctg

SEQ ID NO: 32329 - DNA, 20 bp, Artificial Sequence
  Synthetic oligonucleotide; TGG chr11 5370312 5370331 5370315 -
tgctgtagcatttccaatcc

SEQ ID NO: 32330 - DNA, 20 bp, Artificial Sequence
  Synthetic oligonucleotide; CAG chr11 5370308 5370327 5370311 -
gtagcatttccaatcctgga

SEQ ID NO: 32331 - DNA, 20 bp, Artificial Sequence
  Synthetic oligonucleotide; CAG chr11 5370304 5370323 5370307 -
catttccaatcctggacagt

SEQ ID NO: 32332 - DNA, 20 bp, Artificial Sequence
  Synthetic oligonucleotide; AAG chr11 5370296 5370315 5370299 -
atcctggacagtcagcataa

SEQ ID NO: 32333 - DNA, 20 bp, Artificial Sequence
  Synthetic oligonucleotide; TAG chr11 5370265 5370284 5370268 -
gtcacttatttaatatttca

SEQ ID NO: 32334 - DNA, 20 bp, Artificial Sequence
  Synthetic oligonucleotide; TAG chr11 5370237 5370256 5370240 -
aacattcaaaccttcaactt

SEQ ID NO: 32335 - DNA, 20 bp, Artificial Sequence
  Synthetic oligonucleotide; AGG chr11 5370236 5370255 5370239 -
acattcaaaccttcaacttt

SEQ ID NO: 32336 - DNA, 20 bp, Artificial Sequence
  Synthetic oligonucleotide; AAG chr11 5370222 5370241 5370225 -
aactttaggatttactataa

SEQ ID NO: 32337 - DNA, 20 bp, Artificial Sequence
  Synthetic oligonucleotide; GAG chr11 5370177 5370196 5370180 -
ataaatacattgatgattat

SEQ ID NO: 32338 - DNA, 20 bp, Artificial Sequence
  Synthetic oligonucleotide; TGG chr11 5370153 5370172 5370156 -
attatttttaaattacaact

SEQ ID NO: 32339 - DNA, 20 bp, Artificial Sequence
  Synthetic oligonucleotide; TAG chr11 5370150 5370169 5370153 -
atttttaaattacaacttgg

SEQ ID NO: 32340 - DNA, 20 bp, Artificial Sequence
  Synthetic oligonucleotide; TAG chr11 5370143 5370162 5370146 -
aattacaacttggtagcctc

SEQ ID NO: 32341 - DNA, 20 bp, Artificial Sequence
  Synthetic oligonucleotide; TAG chr11 5370105 5370124 5370108 -
attttctatatgcatttcta

SEQ ID NO: 32342 - DNA, 20 bp, Artificial Sequence
  Synthetic oligonucleotide; AAG chr11 5370102 5370121 5370105 -
ttctatatgcatttctatag

SEQ ID NO: 32343 - DNA, 20 bp, Artificial Sequence
  Synthetic oligonucleotide; CAG chr11 5370099 5370118 5370102 -
tatatgcatttctatagaag

SEQ ID NO: 32344 - DNA, 20 bp, Artificial Sequence
  Synthetic oligonucleotide; AAG chr11 5370073 5370092 5370076 -
gcacatgctgtacaaaccat

SEQ ID NO: 32345 - DNA, 20 bp, Artificial Sequence
  Synthetic oligonucleotide; TGG chr11 5370069 5370088 5370072 -
atgctgtacaaaccataaga

SEQ ID NO: 32346 - DNA, 20 bp, Artificial Sequence
  Synthetic oligonucleotide; CAG chr11 5370066 5370085 5370069 -
ctgtacaaaccataagatgg

SEQ ID NO: 32347 - DNA, 20 bp, Artificial Sequence
  Synthetic oligonucleotide; AGG chr11 5370065 5370084 5370068 -
tgtacaaaccataagatggc

SEQ ID NO: 32348 - DNA, 20 bp, Artificial Sequence
  Synthetic oligonucleotide; GAG chr11 5370063 5370082 5370066 -
tacaaaccataagatggcag

SEQ ID NO: 32349 - DNA, 20 bp, Artificial Sequence
  Synthetic oligonucleotide; GAG chr11 5370061 5370080 5370064 -
caaaccataagatggcagga

SEQ ID NO: 32350 - DNA, 20 bp, Artificial Sequence
  Synthetic oligonucleotide; AGG chr11 5370060 5370079 5370063 -
aaaccataagatggcaggag

SEQ ID NO: 32351 - DNA, 20 bp, Artificial Sequence
  Synthetic oligonucleotide; TGG chr11 5370053 5370072 5370056 -
aagatggcaggagaggtttg

SEQ ID NO: 32352 - DNA, 20 bp, Artificial Sequence
  Synthetic oligonucleotide; TGG chr11 5370036 5370055 5370039 -
ttgtggaacactgactctcc

SEQ ID NO: 32353 - DNA, 20 bp, Artificial Sequence
  Synthetic oligonucleotide; GGG chr11 5370035 5370054 5370038 -
tgtggaacactgactctcct

SEQ ID NO: 32354 - DNA, 20 bp, Artificial Sequence
  Synthetic oligonucleotide; GGG chr11 5370034 5370053 5370037 -
gtggaacactgactctcctg

SEQ ID NO: 32355 - DNA, 20 bp, Artificial Sequence
  Synthetic oligonucleotide; CAG chr11 5370026 5370045 5370029 -
ctgactctcctggggccatg

SEQ ID NO: 32356 - DNA, 20 bp, Artificial Sequence
  Synthetic oligonucleotide; GAG chr11 5370024 5370043 5370027 -
gactctcctggggccatgca

SEQ ID NO: 32357 - DNA, 20 bp, Artificial Sequence
  Synthetic oligonucleotide; AGG chr11 5370023 5370042 5370026 -
actctcctggggccatgcag

SEQ ID NO: 32358 - DNA, 20 bp, Artificial Sequence
  Synthetic oligonucleotide; GGG chr11 5370022 5370041 5370025 -
ctctcctggggccatgcaga

SEQ ID NO: 32359 - DNA, 20 bp, Artificial Sequence
  Synthetic oligonucleotide; GAG chr11 5370020 5370039 5370023 -
ctcctggggccatgcagagg

SEQ ID NO: 32360 - DNA, 20 bp, Artificial Sequence
  Synthetic oligonucleotide; AGG chr11 5370019 5370038 5370022 -
tcctggggccatgcagaggg

SEQ ID NO: 32361 - DNA, 20 bp, Artificial Sequence
  Synthetic oligonucleotide; AAG chr11 5370012 5370031 5370015 -
gccatgcagagggaggtttg

SEQ ID NO: 32362 - DNA, 20 bp, Artificial Sequence
  Synthetic oligonucleotide; CAG chr11 5369997 5370016 5370000 -
gtttgaagatcttgttgata

SEQ ID NO: 32363 - DNA, 20 bp, Artificial Sequence
  Synthetic oligonucleotide; CAG chr11 5369987 5370006 5369990 -
cttgttgatacagattgaca

SEQ ID NO: 32364 - DNA, 20 bp, Artificial Sequence
  Synthetic oligonucleotide; AAG chr11 5369977 5369996 5369980 -
cagattgacacagaatacca

SEQ ID NO: 32365 - DNA, 20 bp, Artificial Sequence
  Synthetic oligonucleotide; GAG chr11 5369950 5369969 5369953 -
tttccccactgcctttcctt

SEQ ID NO: 32366 - DNA, 20 bp, Artificial Sequence
  Synthetic oligonucleotide; GAG chr11 5369937 5369956 5369940 -
tttccttgagtaaaaatcct

SEQ ID NO: 32367 - DNA, 20 bp, Artificial Sequence
  Synthetic oligonucleotide; TAG chr11 5369905 5369924 5369908 -
tccctttctttctatgttga

SEQ ID NO: 32368 - DNA, 20 bp, Artificial Sequence
  Synthetic oligonucleotide; GAG chr11 5369892 5369911 5369895 -
atgttgatagcaaaaccaat

SEQ ID NO: 32369 - DNA, 20 bp, Artificial Sequence
  Synthetic oligonucleotide; AGG chr11 5369891 5369910 5369894 -
tgttgatagcaaaaccaatg

SEQ ID NO: 32370 - DNA, 20 bp, Artificial Sequence
  Synthetic oligonucleotide; TGG chr11 5369858 5369877 5369861 -
taacaactgttgacttattt

SEQ ID NO: 32371 - DNA, 20 bp, Artificial Sequence
  Synthetic oligonucleotide; TAG chr11 5369851 5369870 5369854 -
tgttgacttattttggattt

SEQ ID NO: 32372 - DNA, 20 bp, Artificial Sequence
  Synthetic oligonucleotide; CAG chr11 5369822 5369841 5369825 -
ttcactgtaacacaaaaatg

SEQ ID NO: 32373 - DNA, 20 bp, Artificial Sequence
  Synthetic oligonucleotide; AAG chr11 5369817 5369836 5369820 -
tgtaacacaaaaatgcagac

SEQ ID NO: 32374 - DNA, 20 bp, Artificial Sequence
  Synthetic oligonucleotide; CAG chr11 5369814 5369833 5369817 -
aacacaaaaatgcagacaag

SEQ ID NO: 32375 - DNA, 20 bp, Artificial Sequence
  Synthetic oligonucleotide; TAG chr11 5369802 5369821 5369805 -
cagacaagcagcactgattt

SEQ ID NO: 32376 - DNA, 20 bp, Artificial Sequence
  Synthetic oligonucleotide; TGG chr11 5369797 5369816 5369800 -
aagcagcactgattttagtg

SEQ ID NO: 32377 - DNA, 20 bp, Artificial Sequence
  Synthetic oligonucleotide; TGG chr11 5369789 5369808 5369792 -
ctgattttagtgtggcatca

SEQ ID NO: 32378 - DNA, 20 bp, Artificial Sequence
  Synthetic oligonucleotide; CAG chr11 5369780 5369799 5369783 -
gtgtggcatcatggaaataa

SEQ ID NO: 32379 - DNA, 20 bp, Artificial Sequence
  Synthetic oligonucleotide; TAG chr11 5369768 5369787 5369771 -
ggaaataacagtgctacaca

SEQ ID NO: 32380 - DNA, 20 bp, Artificial Sequence
  Synthetic oligonucleotide; CAG chr11 5369755 5369774 5369758 -
ctacacatagcccttgctac

SEQ ID NO: 32381 - DNA, 20 bp, Artificial Sequence
  Synthetic oligonucleotide; TAG chr11 5369748 5369767 5369751 -
tagcccttgctaccagccaa

SEQ ID NO: 32382 - DNA, 20 bp, Artificial Sequence
  Synthetic oligonucleotide; AGG chr11 5369747 5369766 5369750 -
agcccttgctaccagccaat

SEQ ID NO: 32383 - DNA, 20 bp, Artificial Sequence
  Synthetic oligonucleotide; GAG chr11 5369733 5369752 5369736 -
gccaataggactatttattt

SEQ ID NO: 32384 - DNA, 20 bp, Artificial Sequence
  Synthetic oligonucleotide; TAG chr11 5369702 5369721 5369705 -
tatatgtatatataaatgtg

SEQ ID NO: 32385 - DNA, 20 bp, Artificial Sequence
  Synthetic oligonucleotide; AAG chr11 5369697 5369716 5369700 -
gtatatataaatgtgtagaa

SEQ ID NO: 32386 - DNA, 20 bp, Artificial Sequence
  Synthetic oligonucleotide; CAG chr11 5369691 5369710 5369694 -
ataaatgtgtagaaaagttg

SEQ ID NO: 32387 - DNA, 20 bp, Artificial Sequence
  Synthetic oligonucleotide; GAG chr11 5369689 5369708 5369692 -
aaatgtgtagaaaagttgca

SEQ ID NO: 32388 - DNA, 20 bp, Artificial Sequence
  Synthetic oligonucleotide; TGG chr11 5369679 5369698 5369682 -
aaaagttgcagagaaatgta

SEQ ID NO: 32389 - DNA, 20 bp, Artificial Sequence
  Synthetic oligonucleotide; CAG chr11 5369676 5369695 5369679 -
agttgcagagaaatgtatgg

SEQ ID NO: 32390 - DNA, 20 bp, Artificial Sequence
  Synthetic oligonucleotide; AAG chr11 5369667 5369686 5369670 -
gaaatgtatggcagattata

SEQ ID NO: 32391 - DNA, 20 bp, Artificial Sequence
  Synthetic oligonucleotide; AGG chr11 5369666 5369685 5369669 -
aaatgtatggcagattataa

SEQ ID NO: 32392 - DNA, 20 bp, Artificial Sequence
  Synthetic oligonucleotide; GGG chr11 5369665 5369684 5369668 -
aatgtatggcagattataaa

SEQ ID NO: 32393 - DNA, 20 bp, Artificial Sequence
  Synthetic oligonucleotide; CAG chr11 5369652 5369671 5369655 -
ttataaagggaaattatctc

SEQ ID NO: 32394 - DNA, 20 bp, Artificial Sequence
  Synthetic oligonucleotide; AGG chr11 5369651 5369670 5369654 -
tataaagggaaattatctcc

SEQ ID NO: 32395 - DNA, 20 bp, Artificial Sequence
  Synthetic oligonucleotide; GGG chr11 5369650 5369669 5369653 -
ataaagggaaattatctcca

SEQ ID NO: 32396 - DNA, 20 bp, Artificial Sequence
  Synthetic oligonucleotide; GAG chr11 5369648 5369667 5369651 -
aaagggaaattatctccagg

SEQ ID NO: 32397 - DNA, 20 bp, Artificial Sequence
  Synthetic oligonucleotide; AGG chr11 5369647 5369666 5369650 -
aagggaaattatctccaggg

SEQ ID NO: 32398 - DNA, 20 bp, Artificial Sequence
  Synthetic oligonucleotide; TAG chr11 5369643 5369662 5369646 -
gaaattatctccagggagga

SEQ ID NO: 32399 - DNA, 20 bp, Artificial Sequence
  Synthetic oligonucleotide; AAG chr11 5369639 5369658 5369642 -
ttatctccagggaggataga

SEQ ID NO: 32400 - DNA, 20 bp, Artificial Sequence
  Synthetic oligonucleotide; AGG chr11 5369638 5369657 5369641 -
tatctccagggaggatagaa

SEQ ID NO: 32401 - DNA, 20 bp, Artificial Sequence
  Synthetic oligonucleotide; AAG chr11 5369634 5369653 5369637 -
tccagggaggatagaaaggt

SEQ ID NO: 32402 - DNA, 20 bp, Artificial Sequence
  Synthetic oligonucleotide; AGG chr11 5369633 5369652 5369636 -
ccagggaggatagaaaggta

SEQ ID NO: 32403 - DNA, 20 bp, Artificial Sequence
  Synthetic oligonucleotide; AAG chr11 5369626 5369645 5369629 -
ggatagaaaggtaaggataa

SEQ ID NO: 32404 - DNA, 20 bp, Artificial Sequence
  Synthetic oligonucleotide; AGG chr11 5369625 5369644 5369628 -
gatagaaaggtaaggataaa

SEQ ID NO: 32405 - DNA, 20 bp, Artificial Sequence
  Synthetic oligonucleotide; TGG chr11 5369598 5369617 5369601 -
tactttatatttaatataca

SEQ ID NO: 32406 - DNA, 20 bp, Artificial Sequence
  Synthetic oligonucleotide; GAG chr11 5369596 5369615 5369599 -
ctttatatttaatatacatg

SEQ ID NO: 32407 - DNA, 20 bp, Artificial Sequence
  Synthetic oligonucleotide; TAG chr11 5369567 5369586 5369570 -
taattttttaaattatatca

SEQ ID NO: 32408 - DNA, 20 bp, Artificial Sequence
  Synthetic oligonucleotide; TAG chr11 5369557 5369576 5369560 -
aattatatcatagacatatt

SEQ ID NO: 32409 - DNA, 20 bp, Artificial Sequence
  Synthetic oligonucleotide; AGG chr11 5369556 5369575 5369559 -
attatatcatagacatattt

SEQ ID NO: 32410 - DNA, 20 bp, Artificial Sequence
  Synthetic oligonucleotide; TAG chr11 5369552 5369571 5369555 -
tatcatagacatatttagga

SEQ ID NO: 32411 - DNA, 20 bp, Artificial Sequence
  Synthetic oligonucleotide; TGG chr11 5369545 5369564 5369548 -
gacatatttaggatagtgaa

SEQ ID NO: 32412 - DNA, 20 bp, Artificial Sequence
  Synthetic oligonucleotide; TAG chr11 5369516 5369535 5369519 -
ttaaaaatacaactacttac

SEQ ID NO: 32413 - DNA, 20 bp, Artificial Sequence
  Synthetic oligonucleotide; CAG chr11 5369483 5369502 5369486 -
ttttaaatgtctcaaattat

SEQ ID NO: 32414 - DNA, 20 bp, Artificial Sequence
  Synthetic oligonucleotide; CAG chr11 5369465 5369484 5369468 -
atcagattttattttttatc

SEQ ID NO: 32415 - DNA, 20 bp, Artificial Sequence
  Synthetic oligonucleotide; AAG chr11 5369448 5369467 5369451 -
atccagaaaaaatatataaa

SEQ ID NO: 32416 - DNA, 20 bp, Artificial Sequence
  Synthetic oligonucleotide; TAG chr11 5369436 5369455 5369439 -
tatataaaaagtctgtttca

SEQ ID NO: 32417 - DNA, 20 bp, Artificial Sequence
  Synthetic oligonucleotide; GAG chr11 5369434 5369453 5369437 -
tataaaaagtctgtttcata

SEQ ID NO: 32418 - DNA, 20 bp, Artificial Sequence
  Synthetic oligonucleotide; GAG chr11 5369424 5369443 5369427 -
ctgtttcatagagttttact

SEQ ID NO: 32419 - DNA, 20 bp, Artificial Sequence
  Synthetic oligonucleotide; AGG chr11 5369423 5369442 5369426 -
tgtttcatagagttttactg

SEQ ID NO: 32420 - DNA, 20 bp, Artificial Sequence
  Synthetic oligonucleotide; TAG chr11 5369415 5369434 5369418 -
agagttttactgaggtataa

SEQ ID NO: 32421 - DNA, 20 bp, Artificial Sequence
  Synthetic oligonucleotide; AAG chr11 5369397 5369416 5369400 -
aatagatgtaattctcctaa

SEQ ID NO: 32422 - DNA, 20 bp, Artificial Sequence
  Synthetic oligonucleotide; TAG chr11 5369378 5369397 5369381 -
aaagtgttatattttgcaaa

SEQ ID NO: 32423 - DNA, 20 bp, Artificial Sequence
  Synthetic oligonucleotide; TGG chr11 5369375 5369394 5369378 -
gtgttatattttgcaaatag

SEQ ID NO: 32424 - DNA, 20 bp, Artificial Sequence
  Synthetic oligonucleotide; TAG chr11 5369351 5369370 5369354 -
tgctaaaatattattgttaa

SEQ ID NO: 32425 - DNA, 20 bp, Artificial Sequence
  Synthetic oligonucleotide; TAG chr11 5369336 5369355 5369339 -
gttaatagtattccactaac

SEQ ID NO: 32426 - DNA, 20 bp, Artificial Sequence
  Synthetic oligonucleotide; AAG chr11 5369306 5369325 5369309 -
aactttaattaatatttgtt

SEQ ID NO: 32427 - DNA, 20 bp, Artificial Sequence
  Synthetic oligonucleotide; TGG chr11 5369272 5369291 5369275 -
tttctactaccccacacaca

SEQ ID NO: 32428 - DNA, 20 bp, Artificial Sequence
  Synthetic oligonucleotide; GGG chr11 5369271 5369290 5369274 -
ttctactaccccacacacat

SEQ ID NO: 32429 - DNA, 20 bp, Artificial Sequence
  Synthetic oligonucleotide; TGG chr11 5369244 5369263 5369247 -
catatcttcttctatcatgt

SEQ ID NO: 32430 - DNA, 20 bp, Artificial Sequence
  Synthetic oligonucleotide; CAG chr11 5369234 5369253 5369237 -
tctatcatgttggcctcatt

SEQ ID NO: 32431 - DNA, 20 bp, Artificial Sequence
  Synthetic oligonucleotide; CAG chr11 5369229 5369248 5369232 -
catgttggcctcattcagta

SEQ ID NO: 32432 - DNA, 20 bp, Artificial Sequence
  Synthetic oligonucleotide; TAG chr11 5369223 5369242 5369226 -
ggcctcattcagtacagtac

SEQ ID NO: 32433 - DNA, 20 bp, Artificial Sequence
  Synthetic oligonucleotide; CAG chr11 5369215 5369234 5369218 -
tcagtacagtactagaaaat

SEQ ID NO: 32434 - DNA, 20 bp, Artificial Sequence
  Synthetic oligonucleotide; TAG chr11 5369212 5369231 5369215 -
gtacagtactagaaaatcag

SEQ ID NO: 32435 - DNA, 20 bp, Artificial Sequence
  Synthetic oligonucleotide; AGG chr11 5369211 5369230 5369214 -
tacagtactagaaaatcagt

SEQ ID NO: 32436 - DNA, 20 bp, Artificial Sequence
  Synthetic oligonucleotide; GGG chr11 5369210 5369229 5369213 -
acagtactagaaaatcagta

SEQ ID NO: 32437 - DNA, 20 bp, Artificial Sequence
  Synthetic oligonucleotide; CAG chr11 5369204 5369223 5369207 -
ctagaaaatcagtagggact

SEQ ID NO: 32438 - DNA, 20 bp, Artificial Sequence
  Synthetic oligonucleotide; AGG chr11 5369203 5369222 5369206 -
tagaaaatcagtagggactc

SEQ ID NO: 32439 - DNA, 20 bp, Artificial Sequence
  Synthetic oligonucleotide; TGG chr11 5369187 5369206 5369190 -
actcaggttatatgtgtgaa

SEQ ID NO: 32440 - DNA, 20 bp, Artificial Sequence
  Synthetic oligonucleotide; AAG chr11 5369155 5369174 5369158 -
tgaatgaatgcctattttta

SEQ ID NO: 32441 - DNA, 20 bp, Artificial Sequence
  Synthetic oligonucleotide; TAG chr11 5369125 5369144 5369128 -
cctttctgtatgtctaacct

SEQ ID NO: 32442 - DNA, 20 bp, Artificial Sequence
  Synthetic oligonucleotide; TAG chr11 5369118 5369137 5369121 -
gtatgtctaaccttagattc

SEQ ID NO: 32443 - DNA, 20 bp, Artificial Sequence
  Synthetic oligonucleotide; TGG chr11 5369112 5369131 5369115 -
ctaaccttagattctagtca

SEQ ID NO: 32444 - DNA, 20 bp, Artificial Sequence
  Synthetic oligonucleotide; TAG chr11 5369098 5369117 5369101 -
tagtcatggccatatgtctc

SEQ ID NO: 32445 - DNA, 20 bp, Artificial Sequence
  Synthetic oligonucleotide; AGG chr11 5369097 5369116 5369100 -
agtcatggccatatgtctct

SEQ ID NO: 32446 - DNA, 20 bp, Artificial Sequence
  Synthetic oligonucleotide; TGG chr11 5369094 5369113 5369097 -
catggccatatgtctctagg

SEQ ID NO: 32447 - DNA, 20 bp, Artificial Sequence
  Synthetic oligonucleotide; CAG chr11 5369075 5369094 5369078 -
gtggcccaaccaccctatca

SEQ ID NO: 32448 - DNA, 20 bp, Artificial Sequence
  Synthetic oligonucleotide; AAG chr11 5369061 5369080 5369064 -
ctatcacagattctgcttca

SEQ ID NO: 32449 - DNA, 20 bp, Artificial Sequence
  Synthetic oligonucleotide; AGG chr11 5369060 5369079 5369063 -
tatcacagattctgcttcaa

SEQ ID NO: 32450 - DNA, 20 bp, Artificial Sequence
  Synthetic oligonucleotide; TGG chr11 5369048 5369067 5369051 -
tgcttcaaaggcactcatct

SEQ ID NO: 32451 - DNA, 20 bp, Artificial Sequence
  Synthetic oligonucleotide; TAG chr11 5369033 5369052 5369036 -
catcttggtgaatgaatatc

SEQ ID NO: 32452 - DNA, 20 bp, Artificial Sequence
  Synthetic oligonucleotide; CAG chr11 5369027 5369046 5369030 -
ggtgaatgaatatctagtcc

SEQ ID NO: 32453 - DNA, 20 bp, Artificial Sequence
  Synthetic oligonucleotide; AAG chr11 5369024 5369043 5369027 -
gaatgaatatctagtcccag

SEQ ID NO: 32454 - DNA, 20 bp, Artificial Sequence
  Synthetic oligonucleotide; AGG chr11 5369023 5369042 5369026 -
aatgaatatctagtcccaga

SEQ ID NO: 32455 - DNA, 20 bp, Artificial Sequence
  Synthetic oligonucleotide; GAG chr11 5369021 5369040 5369024 -
tgaatatctagtcccagaag

SEQ ID NO: 32456 - DNA, 20 bp, Artificial Sequence
  Synthetic oligonucleotide; AGG chr11 5369020 5369039 5369023 -
gaatatctagtcccagaagg

SEQ ID NO: 32457 - DNA, 20 bp, Artificial Sequence
  Synthetic oligonucleotide; TAG chr11 5368994 5369013 5368997 -
aaaactatcttgtccacatc

SEQ ID NO: 32458 - DNA, 20 bp, Artificial Sequence
  Synthetic oligonucleotide; TGG chr11 5368990 5369009 5368993 -
ctatcttgtccacatctagt

SEQ ID NO: 32459 - DNA, 20 bp, Artificial Sequence
  Synthetic oligonucleotide; TAG chr11 5368974 5368993 5368977 -
tagttggctgacacacaatt

SEQ ID NO: 32460 - DNA, 20 bp, Artificial Sequence
  Synthetic oligonucleotide; AGG chr11 5368973 5368992 5368976 -
agttggctgacacacaattt

SEQ ID NO: 32461 - DNA, 20 bp, Artificial Sequence
  Synthetic oligonucleotide; TGG chr11 5368965 5368984 5368968 -
gacacacaatttaggcttct

SEQ ID NO: 32462 - DNA, 20 bp, Artificial Sequence
  Synthetic oligonucleotide; GGG chr11 5368964 5368983 5368967 -
acacacaatttaggcttctt

SEQ ID NO: 32463 - DNA, 20 bp, Artificial Sequence
  Synthetic oligonucleotide; CAG chr11 5368955 5368974 5368958 -
ttaggcttcttgggtgtaat

SEQ ID NO: 32464 - DNA, 20 bp, Artificial Sequence
  Synthetic oligonucleotide; AAG chr11 5368946 5368965 5368949 -
ttgggtgtaatcagatctgt

SEQ ID NO: 32465 - DNA, 20 bp, Artificial Sequence
  Synthetic oligonucleotide; CGG chr11 5368936 5368955 5368939 -
tcagatctgtaagcatgatc

SEQ ID NO: 32466 - DNA, 20 bp, Artificial Sequence
  Synthetic oligonucleotide; AAG chr11 5368932 5368951 5368935 -
atctgtaagcatgatccgga

SEQ ID NO: 32467 - DNA, 20 bp, Artificial Sequence
  Synthetic oligonucleotide; AAG chr11 5368926 5368945 5368929 -
aagcatgatccggaaagaaa

SEQ ID NO: 32468 - DNA, 20 bp, Artificial Sequence
  Synthetic oligonucleotide; CAG chr11 5368915 5368934 5368918 -
ggaaagaaaaagttcctgaa

SEQ ID NO: 32469 - DNA, 20 bp, Artificial Sequence
  Synthetic oligonucleotide; GAG chr11 5368913 5368932 5368916 -
aaagaaaaagttcctgaaca

SEQ ID NO: 32470 - DNA, 20 bp, Artificial Sequence
  Synthetic oligonucleotide; AGG chr11 5368912 5368931 5368915 -
aagaaaaagttcctgaacag

SEQ ID NO: 32471 - DNA, 20 bp, Artificial Sequence
  Synthetic oligonucleotide; CAG chr11 5368896 5368915 5368899 -
acagaggcttccaacatcct

SEQ ID NO: 32472 - DNA, 20 bp, Artificial Sequence
  Synthetic oligonucleotide; AAG chr11 5368893 5368912 5368896 -
gaggcttccaacatcctcag

SEQ ID NO: 32473 - DNA, 20 bp, Artificial Sequence
  Synthetic oligonucleotide; AGG chr11 5368892 5368911 5368895 -
aggcttccaacatcctcaga

SEQ ID NO: 32474 - DNA, 20 bp, Artificial Sequence
  Synthetic oligonucleotide; AAG chr11 5368869 5368888 5368872 -
aaacctctcttaatccacat

SEQ ID NO: 32475 - DNA, 20 bp, Artificial Sequence
  Synthetic oligonucleotide; TGG chr11 5368864 5368883 5368867 -
tctcttaatccacataagaa

SEQ ID NO: 32476 - DNA, 20 bp, Artificial Sequence
  Synthetic oligonucleotide; AAG chr11 5368837 5368856 5368840 -
aattccaacatcttgctcct

SEQ ID NO: 32477 - DNA, 20 bp, Artificial Sequence
  Synthetic oligonucleotide; TGG chr11 5368822 5368841 5368825 -
ctcctaagaacactttgccc

SEQ ID NO: 32478 - DNA, 20 bp, Artificial Sequence
  Synthetic oligonucleotide; GGG chr11 5368821 5368840 5368824 -
tcctaagaacactttgccct

SEQ ID NO: 32479 - DNA, 20 bp, Artificial Sequence
  Synthetic oligonucleotide; GGG chr11 5368820 5368839 5368823 -
cctaagaacactttgccctg

SEQ ID NO: 32480 - DNA, 20 bp, Artificial Sequence
  Synthetic oligonucleotide; GGG chr11 5368819 5368838 5368822 -
ctaagaacactttgccctgg

SEQ ID NO: 32481 - DNA, 20 bp, Artificial Sequence
  Synthetic oligonucleotide; AAG chr11 5368811 5368830 5368814 -
actttgccctgggggaaaaa

SEQ ID NO: 32482 - DNA, 20 bp, Artificial Sequence
  Synthetic oligonucleotide; AAG chr11 5368806 5368825 5368809 -
gccctgggggaaaaaaagaa

SEQ ID NO: 32483 - DNA, 20 bp, Artificial Sequence
  Synthetic oligonucleotide; AAG chr11 5368796 5368815 5368799 -
aaaaaaagaaaagccatcgt

SEQ ID NO: 32484 - DNA, 20 bp, Artificial Sequence
  Synthetic oligonucleotide; CAG chr11 5368789 5368808 5368792 -
gaaaagccatcgtaagcttt

SEQ ID NO: 32485 - DNA, 20 bp, Artificial Sequence
  Synthetic oligonucleotide; AAG chr11 5368786 5368805 5368789 -
aagccatcgtaagctttcag

SEQ ID NO: 32486 - DNA, 20 bp, Artificial Sequence
  Synthetic oligonucleotide; AGG chr11 5368785 5368804 5368788 -
agccatcgtaagctttcaga

SEQ ID NO: 32487 - DNA, 20 bp, Artificial Sequence
  Synthetic oligonucleotide; GAG chr11 5368774 5368793 5368777 -
gctttcagaaggcctatgct

SEQ ID NO: 32488 - DNA, 20 bp, Artificial Sequence
  Synthetic oligonucleotide; AGG chr11 5368773 5368792 5368776 -
ctttcagaaggcctatgctg

SEQ ID NO: 32489 - DNA, 20 bp, Artificial Sequence
  Synthetic oligonucleotide; CAG chr11 5368758 5368777 5368761 -
tgctgaggttttgcttcctt

SEQ ID NO: 32490 - DNA, 20 bp, Artificial Sequence
  Synthetic oligonucleotide; AAG chr11 5368750 5368769 5368753 -
ttttgcttccttcagtttta

SEQ ID NO: 32491 - DNA, 20 bp, Artificial Sequence
  Synthetic oligonucleotide; GAG chr11 5368736 5368755 5368739 -
gttttaaagcataatatttt

SEQ ID NO: 32492 - DNA, 20 bp, Artificial Sequence
  Synthetic oligonucleotide; TAG chr11 5368721 5368740 5368724 -
attttgagtaactcaatgtt

SEQ ID NO: 32493 - DNA, 20 bp, Artificial Sequence
  Synthetic oligonucleotide; CAG chr11 5368696 5368715 5368699 -
acctcaaattttgctcttga

SEQ ID NO: 32494 - DNA, 20 bp, Artificial Sequence
  Synthetic oligonucleotide; CAG chr11 5368657 5368676 5368660 -
tactatgctctgctttctca

SEQ ID NO: 32495 - DNA, 20 bp, Artificial Sequence
  Synthetic oligonucleotide; AGG chr11 5368656 5368675 5368659 -
actatgctctgctttctcac

SEQ ID NO: 32496 - DNA, 20 bp, Artificial Sequence
  Synthetic oligonucleotide; GAG chr11 5368645 5368664 5368648 -
ctttctcacaggatgcatgt

SEQ ID NO: 32497 - DNA, 20 bp, Artificial Sequence
  Synthetic oligonucleotide; AAG chr11 5368631 5368650 5368634 -
gcatgtgagaataaaacaca

SEQ ID NO: 32498 - DNA, 20 bp, Artificial Sequence
  Synthetic oligonucleotide; TAG chr11 5368619 5368638 5368622 -
aaaacacaaagtctttatgt

SEQ ID NO: 32499 - DNA, 20 bp, Artificial Sequence
  Synthetic oligonucleotide; AAG chr11 5368598 5368617 5368601 -
agaatatcttgtgtaacttc

SEQ ID NO: 32500 - DNA, 20 bp, Artificial Sequence
  Synthetic oligonucleotide; GAG chr11 5368583 5368602 5368586 -
acttcaagtattacgattgt

SEQ ID NO: 32501 - DNA, 20 bp, Artificial Sequence
  Synthetic oligonucleotide; GAG chr11 5368581 5368600 5368584 -
ttcaagtattacgattgtga

SEQ ID NO: 32502 - DNA, 20 bp, Artificial Sequence
  Synthetic oligonucleotide; GAG chr11 5368579 5368598 5368582 -
caagtattacgattgtgaga

SEQ ID NO: 32503 - DNA, 20 bp, Artificial Sequence
  Synthetic oligonucleotide; AAG chr11 5368569 5368588 5368572 -
gattgtgagagagcttttta

SEQ ID NO: 32504 - DNA, 20 bp, Artificial Sequence
  Synthetic oligonucleotide; AGG chr11 5368568 5368587 5368571 -
attgtgagagagctttttaa

SEQ ID NO: 32505 - DNA, 20 bp, Artificial Sequence
  Synthetic oligonucleotide; CAG chr11 5368549 5368568 5368552 -
aaggtttttattttctttgt

SEQ ID NO: 32506 - DNA, 20 bp, Artificial Sequence
  Synthetic oligonucleotide; GAG chr11 5368547 5368566 5368550 -
ggtttttattttctttgtca

SEQ ID NO: 32507 - DNA, 20 bp, Artificial Sequence
  Synthetic oligonucleotide; TAG chr11 5368543 5368562 5368546 -
tttattttctttgtcagagc

SEQ ID NO: 32508 - DNA, 20 bp, Artificial Sequence
  Synthetic oligonucleotide; CAG chr11 5368539 5368558 5368542 -
ttttctttgtcagagctaga

SEQ ID NO: 32509 - DNA, 20 bp, Artificial Sequence
  Synthetic oligonucleotide; GAG chr11 5368537 5368556 5368540 -
ttctttgtcagagctagaca

SEQ ID NO: 32510 - DNA, 20 bp, Artificial Sequence
  Synthetic oligonucleotide; CAG chr11 5368526 5368545 5368529 -
agctagacagagtatcttct

SEQ ID NO: 32511 - DNA, 20 bp, Artificial Sequence
  Synthetic oligonucleotide; AAG chr11 5368519 5368538 5368522 -
cagagtatcttctcagccca

SEQ ID NO: 32512 - DNA, 20 bp, Artificial Sequence
  Synthetic oligonucleotide; AGG chr11 5368518 5368537 5368521 -
agagtatcttctcagcccaa

SEQ ID NO: 32513 - DNA, 20 bp, Artificial Sequence
  Synthetic oligonucleotide; TAG chr11 5368475 5368494 5368478 -
aaaattttcaatgatgatta

SEQ ID NO: 32514 - DNA, 20 bp, Artificial Sequence
  Synthetic oligonucleotide; TAG chr11 5368466 5368485 5368469 -
aatgatgattatagtaataa

SEQ ID NO: 32515 - DNA, 20 bp, Artificial Sequence
  Synthetic oligonucleotide; TGG chr11 5368439 5368458 5368442 -
gatttctataatacttacaa

SEQ ID NO: 32516 - DNA, 20 bp, Artificial Sequence
  Synthetic oligonucleotide; CAG chr11 5368434 5368453 5368437 -
ctataatacttacaatggac

SEQ ID NO: 32517 - DNA, 20 bp, Artificial Sequence
  Synthetic oligonucleotide; AGG chr11 5368433 5368452 5368436 -
tataatacttacaatggacc

SEQ ID NO: 32518 - DNA, 20 bp, Artificial Sequence
  Synthetic oligonucleotide; TAG chr11 5368415 5368434 5368418 -
ccaggcactattgaacacgt

SEQ ID NO: 32519 - DNA, 20 bp, Artificial Sequence
  Synthetic oligonucleotide; TGG chr11 5368372 5368391 5368375 -
attaaaataattcaaccatg

SEQ ID NO: 32520 - DNA, 20 bp, Artificial Sequence
  Synthetic oligonucleotide; GGG chr11 5368371 5368390 5368374 -
ttaaaataattcaaccatgt

SEQ ID NO: 32521 - DNA, 20 bp, Artificial Sequence
  Synthetic oligonucleotide; TGG chr11 5368362 5368381 5368365 -
ttcaaccatgtgggtactat

SEQ ID NO: 32522 - DNA, 20 bp, Artificial Sequence
  Synthetic oligonucleotide; AAG chr11 5368347 5368366 5368350 -
actattggtatccccactta

SEQ ID NO: 32523 - DNA, 20 bp, Artificial Sequence
  Synthetic oligonucleotide; GAG chr11 5368342 5368361 5368345 -
tggtatccccacttaaagat

SEQ ID NO: 32524 - DNA, 20 bp, Artificial Sequence
  Synthetic oligonucleotide; TGG chr11 5368339 5368358 5368342 -
tatccccacttaaagatgag

SEQ ID NO: 32525 - DNA, 20 bp, Artificial Sequence
  Synthetic oligonucleotide; CAG chr11 5368327 5368346 5368330 -
aagatgagtggaccaaaaca

SEQ ID NO: 32526 - DNA, 20 bp, Artificial Sequence
  Synthetic oligonucleotide; AAG chr11 5368323 5368342 5368326 -
tgagtggaccaaaacacaga

SEQ ID NO: 32527 - DNA, 20 bp, Artificial Sequence
  Synthetic oligonucleotide; TAG chr11 5368304 5368323 5368307 -
aaagataaattgctttgcta

SEQ ID NO: 32528 - DNA, 20 bp, Artificial Sequence
  Synthetic oligonucleotide; AGG chr11 5368303 5368322 5368306 -
aagataaattgctttgctat

SEQ ID NO: 32529 - DNA, 20 bp, Artificial Sequence
  Synthetic oligonucleotide; GGG chr11 5368302 5368321 5368305 -
agataaattgctttgctata

SEQ ID NO: 32530 - DNA, 20 bp, Artificial Sequence
  Synthetic oligonucleotide; CAG chr11 5368295 5368314 5368298 -
ttgctttgctatagggtacg

SEQ ID NO: 32531 - DNA, 20 bp, Artificial Sequence
  Synthetic oligonucleotide; AAG chr11 5368287 5368306 5368290 -
ctatagggtacgcagccaat

SEQ ID NO: 32532 - DNA, 20 bp, Artificial Sequence
  Synthetic oligonucleotide; TGG chr11 5368284 5368303 5368287 -
tagggtacgcagccaataag

SEQ ID NO: 32533 - DNA, 20 bp, Artificial Sequence
  Synthetic oligonucleotide; AAG chr11 5368281 5368300 5368284 -
ggtacgcagccaataagtgg

SEQ ID NO: 32534 - DNA, 20 bp, Artificial Sequence
  Synthetic oligonucleotide; AGG chr11 5368280 5368299 5368283 -
gtacgcagccaataagtgga

SEQ ID NO: 32535 - DNA, 20 bp, Artificial Sequence
  Synthetic oligonucleotide; TGG chr11 5368277 5368296 5368280 -
cgcagccaataagtggaagg

SEQ ID NO: 32536 - DNA, 20 bp, Artificial Sequence
  Synthetic oligonucleotide; GGG chr11 5368276 5368295 5368279 -
gcagccaataagtggaaggt

SEQ ID NO: 32537 - DNA, 20 bp, Artificial Sequence
  Synthetic oligonucleotide; AAG chr11 5368234 5368253 5368237 -
aattcccaaaactactgcat

SEQ ID NO: 32538 - DNA, 20 bp, Artificial Sequence
  Synthetic oligonucleotide; AAG chr11 5368223 5368242 5368226 -
ctactgcataagactgtatg

SEQ ID NO: 32539 - DNA, 20 bp, Artificial Sequence
  Synthetic oligonucleotide; AAG chr11 5368220 5368239 5368223 -
ctgcataagactgtatgaag

SEQ ID NO: 32540 - DNA, 20 bp, Artificial Sequence
  Synthetic oligonucleotide; TAG chr11 5368207 5368226 5368210 -
tatgaagaagcatgaaacaa

SEQ ID NO: 32541 - DNA, 20 bp, Artificial Sequence
  Synthetic oligonucleotide; AGG chr11 5368206 5368225 5368209 -
atgaagaagcatgaaacaat

SEQ ID NO: 32542 - DNA, 20 bp, Artificial Sequence
  Synthetic oligonucleotide; AAG chr11 5368199 5368218 5368202 -
agcatgaaacaataggtttc

SEQ ID NO: 32543 - DNA, 20 bp, Artificial Sequence
  Synthetic oligonucleotide; AAG chr11 5368196 5368215 5368199 -
atgaaacaataggtttcaag

SEQ ID NO: 32544 - DNA, 20 bp, Artificial Sequence
  Synthetic oligonucleotide; CAG chr11 5368189 5368208 5368192 -
aataggtttcaagaagccta

SEQ ID NO: 32545 - DNA, 20 bp, Artificial Sequence
  Synthetic oligonucleotide; CAG chr11 5368177 5368196 5368180 -
gaagcctacagaacacttaa

SEQ ID NO: 32546 - DNA, 20 bp, Artificial Sequence
  Synthetic oligonucleotide; AGG chr11 5368176 5368195 5368179 -
aagcctacagaacacttaac

SEQ ID NO: 32547 - DNA, 20 bp, Artificial Sequence
  Synthetic oligonucleotide; TGG chr11 5368162 5368181 5368165 -
cttaacaggatttttcatgc

SEQ ID NO: 32548 - DNA, 20 bp, Artificial Sequence
  Synthetic oligonucleotide; TAG chr11 5368155 5368174 5368158 -
ggatttttcatgctggttca

SEQ ID NO: 32549 - DNA, 20 bp, Artificial Sequence
  Synthetic oligonucleotide; AAG chr11 5368150 5368169 5368153 -
tttcatgctggttcatagtt

SEQ ID NO: 32550 - DNA, 20 bp, Artificial Sequence
  Synthetic oligonucleotide; TGG chr11 5368143 5368162 5368146 -
ctggttcatagttaagttat

SEQ ID NO: 32551 - DNA, 20 bp, Artificial Sequence
  Synthetic oligonucleotide; AAG chr11 5368137 5368156 5368140 -
catagttaagttattggttg

SEQ ID NO: 32552 - DNA, 20 bp, Artificial Sequence
  Synthetic oligonucleotide; TGG chr11 5368118 5368137 5368121 -
gaagatgcaacaaatctgaa

SEQ ID NO: 32553 - DNA, 20 bp, Artificial Sequence
  Synthetic oligonucleotide; CAG chr11 5368115 5368134 5368118 -
gatgcaacaaatctgaatgg

SEQ ID NO: 32554 - DNA, 20 bp, Artificial Sequence
  Synthetic oligonucleotide; GAG chr11 5368113 5368132 5368116 -
tgcaacaaatctgaatggca

SEQ ID NO: 32555 - DNA, 20 bp, Artificial Sequence
  Synthetic oligonucleotide; AGG chr11 5368112 5368131 5368115 -
gcaacaaatctgaatggcag

SEQ ID NO: 32556 - DNA, 20 bp, Artificial Sequence
  Synthetic oligonucleotide; AAG chr11 5368101 5368120 5368104 -
gaatggcagaggaaaaaaca

SEQ ID NO: 32557 - DNA, 20 bp, Artificial Sequence
  Synthetic oligonucleotide; AAG chr11 5368097 5368116 5368100 -
ggcagaggaaaaaacaaaga

SEQ ID NO: 32558 - DNA, 20 bp, Artificial Sequence
  Synthetic oligonucleotide; GAG chr11 5368095 5368114 5368098 -
cagaggaaaaaacaaagaaa

SEQ ID NO: 32559 - DNA, 20 bp, Artificial Sequence
  Synthetic oligonucleotide; GAG chr11 5368093 5368112 5368096 -
gaggaaaaaacaaagaaaga

SEQ ID NO: 32560 - DNA, 20 bp, Artificial Sequence
  Synthetic oligonucleotide; GAG chr11 5368086 5368105 5368089 -
aaacaaagaaagagagttct

SEQ ID NO: 32561 - DNA, 20 bp, Artificial Sequence
  Synthetic oligonucleotide; GAG chr11 5368082 5368101 5368085 -
aaagaaagagagttctgagt

SEQ ID NO: 32562 - DNA, 20 bp, Artificial Sequence
  Synthetic oligonucleotide; TGG chr11 5368077 5368096 5368080 -
aagagagttctgagtgagcc

SEQ ID NO: 32563 - DNA, 20 bp, Artificial Sequence
  Synthetic oligonucleotide; GGG chr11 5368076 5368095 5368079 -
agagagttctgagtgagcct

SEQ ID NO: 32564 - DNA, 20 bp, Artificial Sequence
  Synthetic oligonucleotide; TAG chr11 5368067 5368086 5368070 -
tgagtgagcctgggtctcca

SEQ ID NO: 32565 - DNA, 20 bp, Artificial Sequence
  Synthetic oligonucleotide; AGG chr11 5368066 5368085 5368069 -
gagtgagcctgggtctccat

SEQ ID NO: 32566 - DNA, 20 bp, Artificial Sequence
  Synthetic oligonucleotide; GAG chr11 5368064 5368083 5368067 -
gtgagcctgggtctccatag

SEQ ID NO: 32567 - DNA, 20 bp, Artificial Sequence
  Synthetic oligonucleotide; AAG chr11 5368059 5368078 5368062 -
cctgggtctccataggagca

SEQ ID NO: 32568 - DNA, 20 bp, Artificial Sequence
  Synthetic oligonucleotide; AAG chr11 5368052 5368071 5368055 -
ctccataggagcaaagaacc

SEQ ID NO: 32569 - DNA, 20 bp, Artificial Sequence
  Synthetic oligonucleotide; AAG chr11 5368047 5368066 5368050 -
taggagcaaagaaccaagtg

SEQ ID NO: 32570 - DNA, 20 bp, Artificial Sequence
  Synthetic oligonucleotide; TGG chr11 5368042 5368061 5368045 -
gcaaagaaccaagtgaagct

SEQ ID NO: 32571 - DNA, 20 bp, Artificial Sequence
  Synthetic oligonucleotide; GGG chr11 5368041 5368060 5368044 -
caaagaaccaagtgaagctt

SEQ ID NO: 32572 - DNA, 20 bp, Artificial Sequence
  Synthetic oligonucleotide; TAG chr11 5368037 5368056 5368040 -
gaaccaagtgaagcttgggt

SEQ ID NO: 32573 - DNA, 20 bp, Artificial Sequence
  Synthetic oligonucleotide; TGG chr11 5368031 5368050 5368034 -
agtgaagcttgggttagttg

SEQ ID NO: 32574 - DNA, 20 bp, Artificial Sequence
  Synthetic oligonucleotide; GGG chr11 5368030 5368049 5368033 -
gtgaagcttgggttagttgt

SEQ ID NO: 32575 - DNA, 20 bp, Artificial Sequence
  Synthetic oligonucleotide; GGG chr11 5368029 5368048 5368032 -
tgaagcttgggttagttgtg

SEQ ID NO: 32576 - DNA, 20 bp, Artificial Sequence
  Synthetic oligonucleotide; AAG chr11 5368023 5368042 5368026 -
ttgggttagttgtggggtgt

SEQ ID NO: 32577 - DNA, 20 bp, Artificial Sequence
  Synthetic oligonucleotide; TAG chr11 5368013 5368032 5368016 -
tgtggggtgtaagatataat

SEQ ID NO: 32578 - DNA, 20 bp, Artificial Sequence
  Synthetic oligonucleotide; AAG chr11 5368010 5368029 5368013 -
ggggtgtaagatataattag

SEQ ID NO: 32579 - DNA, 20 bp, Artificial Sequence
  Synthetic oligonucleotide; GAG chr11 5368008 5368027 5368011 -
ggtgtaagatataattagaa

SEQ ID NO: 32580 - DNA, 20 bp, Artificial Sequence
  Synthetic oligonucleotide; AAG chr11 5368005 5368024 5368008 -
gtaagatataattagaagag

SEQ ID NO: 32581 - DNA, 20 bp, Artificial Sequence
  Synthetic oligonucleotide; TAG chr11 5368002 5368021 5368005 -
agatataattagaagagaag

SEQ ID NO: 32582 - DNA, 20 bp, Artificial Sequence
  Synthetic oligonucleotide; TGG chr11 5367991 5368010 5367994 -
gaagagaagtagctctactc

SEQ ID NO: 32583 - DNA, 20 bp, Artificial Sequence
  Synthetic oligonucleotide; TAG chr11 5367988 5368007 5367991 -
gagaagtagctctactctgg

SEQ ID NO: 32584 - DNA, 20 bp, Artificial Sequence
  Synthetic oligonucleotide; AAG chr11 5367985 5368004 5367988 -
aagtagctctactctggtag

SEQ ID NO: 32585 - DNA, 20 bp, Artificial Sequence
  Synthetic oligonucleotide; AAG chr11 5367972 5367991 5367975 -
ctggtagaagtgaaactttg

SEQ ID NO: 32586 - DNA, 20 bp, Artificial Sequence
  Synthetic oligonucleotide; GAG chr11 5367944 5367963 5367947 -
ctgattcctcacaaactgct

SEQ ID NO: 32587 - DNA, 20 bp, Artificial Sequence
  Synthetic oligonucleotide; AAG chr11 5367940 5367959 5367943 -
ttcctcacaaactgctgagt

SEQ ID NO: 32588 - DNA, 20 bp, Artificial Sequence
  Synthetic oligonucleotide; AGG chr11 5367939 5367958 5367942 -
tcctcacaaactgctgagta

SEQ ID NO: 32589 - DNA, 20 bp, Artificial Sequence
  Synthetic oligonucleotide; TAG chr11 5367935 5367954 5367938 -
cacaaactgctgagtaagga

SEQ ID NO: 32590 - DNA, 20 bp, Artificial Sequence
  Synthetic oligonucleotide; AGG chr11 5367934 5367953 5367937 -
acaaactgctgagtaaggat

SEQ ID NO: 32591 - DNA, 20 bp, Artificial Sequence
  Synthetic oligonucleotide; TAG chr11 5367923 5367942 5367926 -
agtaaggataggaaaatgca

SEQ ID NO: 32592 - DNA, 20 bp, Artificial Sequence
  Synthetic oligonucleotide; TGG chr11 5367917 5367936 5367920 -
gataggaaaatgcatagcct

SEQ ID NO: 32593 - DNA, 20 bp, Artificial Sequence
  Synthetic oligonucleotide; AAG chr11 5367912 5367931 5367915 -
gaaaatgcatagccttggtc

SEQ ID NO: 32594 - DNA, 20 bp, Artificial Sequence
  Synthetic oligonucleotide; AAG chr11 5367905 5367924 5367908 -
catagccttggtcaagattt

SEQ ID NO: 32595 - DNA, 20 bp, Artificial Sequence
  Synthetic oligonucleotide; GAG chr11 5367899 5367918 5367902 -
cttggtcaagatttaagcat

SEQ ID NO: 32596 - DNA, 20 bp, Artificial Sequence
  Synthetic oligonucleotide; AGG chr11 5367898 5367917 5367901 -
ttggtcaagatttaagcatg

SEQ ID NO: 32597 - DNA, 20 bp, Artificial Sequence
  Synthetic oligonucleotide; TAG chr11 5367886 5367905 5367889 -
taagcatgaggacataaaaa

SEQ ID NO: 32598 - DNA, 20 bp, Artificial Sequence
  Synthetic oligonucleotide; TAG chr11 5367880 5367899 5367883 -
tgaggacataaaaatagata

SEQ ID NO: 32599 - DNA, 20 bp, Artificial Sequence
  Synthetic oligonucleotide; AGG chr11 5367879 5367898 5367882 -
gaggacataaaaatagatat

SEQ ID NO: 32600 - DNA, 20 bp, Artificial Sequence
  Synthetic oligonucleotide; CAG chr11 5367876 5367895 5367879 -
gacataaaaatagatatagg

SEQ ID NO: 32601 - DNA, 20 bp, Artificial Sequence
  Synthetic oligonucleotide; AAG chr11 5367872 5367891 5367875 -
taaaaatagatataggcaga

SEQ ID NO: 32602 - DNA, 20 bp, Artificial Sequence
  Synthetic oligonucleotide; AAG chr11 5367866 5367885 5367869 -
tagatataggcagaaagcac

SEQ ID NO: 32603 - DNA, 20 bp, Artificial Sequence
  Synthetic oligonucleotide; AAG chr11 5367827 5367846 5367830 -
tttgaatgcatatattgtgc

SEQ ID NO: 32604 - DNA, 20 bp, Artificial Sequence
  Synthetic oligonucleotide; TGG chr11 5367813 5367832 5367816 -
ttgtgcaagtgcctctattc

SEQ ID NO: 32605 - DNA, 20 bp, Artificial Sequence
  Synthetic oligonucleotide; GGG chr11 5367812 5367831 5367815 -
tgtgcaagtgcctctattct

SEQ ID NO: 32606 - DNA, 20 bp, Artificial Sequence
  Synthetic oligonucleotide; TAG chr11 5367806 5367825 5367809 -
agtgcctctattctgggtgc

SEQ ID NO: 32607 - DNA, 20 bp, Artificial Sequence
  Synthetic oligonucleotide; CAG chr11 5367798 5367817 5367801 -
tattctgggtgctagcatac

SEQ ID NO: 32608 - DNA, 20 bp, Artificial Sequence
  Synthetic oligonucleotide; CAG chr11 5367771 5367790 5367774 -
aacatttttgttccttttgt

SEQ ID NO: 32609 - DNA, 20 bp, Artificial Sequence
  Synthetic oligonucleotide; GAG chr11 5367769 5367788 5367772 -
catttttgttccttttgtca

SEQ ID NO: 32610 - DNA, 20 bp, Artificial Sequence
  Synthetic oligonucleotide; AGG chr11 5367768 5367787 5367771 -
atttttgttccttttgtcag

SEQ ID NO: 32611 - DNA, 20 bp, Artificial Sequence
  Synthetic oligonucleotide; CAG chr11 5367756 5367775 5367759 -
tttgtcagaggcatttgaac

SEQ ID NO: 32612 - DNA, 20 bp, Artificial Sequence
  Synthetic oligonucleotide; GAG chr11 5367754 5367773 5367757 -
tgtcagaggcatttgaacca

SEQ ID NO: 32613 - DNA, 20 bp, Artificial Sequence
  Synthetic oligonucleotide; TAG chr11 5367736 5367755 5367739 -
cagagcaactccatcttaaa

SEQ ID NO: 32614 - DNA, 20 bp, Artificial Sequence
  Synthetic oligonucleotide; AGG chr11 5367735 5367754 5367738 -
agagcaactccatcttaaat

SEQ ID NO: 32615 - DNA, 20 bp, Artificial Sequence
  Synthetic oligonucleotide; GAG chr11 5367733 5367752 5367736 -
agcaactccatcttaaatag

SEQ ID NO: 32616 - DNA, 20 bp, Artificial Sequence
  Synthetic oligonucleotide; TGG chr11 5367729 5367748 5367732 -
actccatcttaaataggagc

SEQ ID NO: 32617 - DNA, 20 bp, Artificial Sequence
  Synthetic oligonucleotide; GGG chr11 5367728 5367747 5367731 -
ctccatcttaaataggagct

SEQ ID NO: 32618 - DNA, 20 bp, Artificial Sequence
  Synthetic oligonucleotide; AAG chr11 5367719 5367738 5367722 -
aaataggagctgggtacaat

SEQ ID NO: 32619 - DNA, 20 bp, Artificial Sequence
  Synthetic oligonucleotide; AGG chr11 5367718 5367737 5367721 -
aataggagctgggtacaata

SEQ ID NO: 32620 - DNA, 20 bp, Artificial Sequence
  Synthetic oligonucleotide; GAG chr11 5367713 5367732 5367716 -
gagctgggtacaataaggct

SEQ ID NO: 32621 - DNA, 20 bp, Artificial Sequence
  Synthetic oligonucleotide; TGG chr11 5367704 5367723 5367707 -
acaataaggctgagacctac

SEQ ID NO: 32622 - DNA, 20 bp, Artificial Sequence
  Synthetic oligonucleotide; GGG chr11 5367703 5367722 5367706 -
caataaggctgagacctact

SEQ ID NO: 32623 - DNA, 20 bp, Artificial Sequence
  Synthetic oligonucleotide; CAG chr11 5367691 5367710 5367694 -
gacctactgggctgtattcc

SEQ ID NO: 32624 - DNA, 20 bp, Artificial Sequence
  Synthetic oligonucleotide; AAG chr11 5367687 5367706 5367690 -
tactgggctgtattcccaga

SEQ ID NO: 32625 - DNA, 20 bp, Artificial Sequence
  Synthetic oligonucleotide; TAG chr11 5367683 5367702 5367686 -
gggctgtattcccagaaagt

SEQ ID NO: 32626 - DNA, 20 bp, Artificial Sequence
  Synthetic oligonucleotide; AGG chr11 5367682 5367701 5367685 -
ggctgtattcccagaaagtt

SEQ ID NO: 32627 - DNA, 20 bp, Artificial Sequence
  Synthetic oligonucleotide; CAG chr11 5367673 5367692 5367676 -
cccagaaagttaggcattct

SEQ ID NO: 32628 - DNA, 20 bp, Artificial Sequence
  Synthetic oligonucleotide; CAG chr11 5367667 5367686 5367670 -
aagttaggcattctcagtca

SEQ ID NO: 32629 - DNA, 20 bp, Artificial Sequence
  Synthetic oligonucleotide; AGG chr11 5367666 5367685 5367669 -
agttaggcattctcagtcac

SEQ ID NO: 32630 - DNA, 20 bp, Artificial Sequence
  Synthetic oligonucleotide; GAG chr11 5367661 5367680 5367664 -
ggcattctcagtcacaggat

SEQ ID NO: 32631 - DNA, 20 bp, Artificial Sequence
  Synthetic oligonucleotide; AAG chr11 5367656 5367675 5367659 -
tctcagtcacaggatgagat

SEQ ID NO: 32632 - DNA, 20 bp, Artificial Sequence
  Synthetic oligonucleotide; GAG chr11 5367654 5367673 5367657 -
tcagtcacaggatgagataa

SEQ ID NO: 32633 - DNA, 20 bp, Artificial Sequence
  Synthetic oligonucleotide; AGG chr11 5367653 5367672 5367656 -
cagtcacaggatgagataag

SEQ ID NO: 32634 - DNA, 20 bp, Artificial Sequence
  Synthetic oligonucleotide; TGG chr11 5367649 5367668 5367652 -
cacaggatgagataagaggt

SEQ ID NO: 32635 - DNA, 20 bp, Artificial Sequence
  Synthetic oligonucleotide; AAG chr11 5367643 5367662 5367646 -
atgagataagaggttggcac

SEQ ID NO: 32636 - DNA, 20 bp, Artificial Sequence
  Synthetic oligonucleotide; CAG chr11 5367637 5367656 5367640 -
taagaggttggcacaagata

SEQ ID NO: 32637 - DNA, 20 bp, Artificial Sequence
  Synthetic oligonucleotide; AGG chr11 5367636 5367655 5367639 -
aagaggttggcacaagatac

SEQ ID NO: 32638 - DNA, 20 bp, Artificial Sequence
  Synthetic oligonucleotide; AAG chr11 5367628 5367647 5367631 -
ggcacaagatacaggtcata

SEQ ID NO: 32639 - DNA, 20 bp, Artificial Sequence
  Synthetic oligonucleotide; CAG chr11 5367610 5367629 5367613 -
taaagaccttgctgaaaaaa

SEQ ID NO: 32640 - DNA, 20 bp, Artificial Sequence
  Synthetic oligonucleotide; CAG chr11 5367603 5367622 5367606 -
cttgctgaaaaaacagtttg

SEQ ID NO: 32641 - DNA, 20 bp, Artificial Sequence
  Synthetic oligonucleotide; AAG chr11 5367598 5367617 5367601 -
tgaaaaaacagtttgcagta

SEQ ID NO: 32642 - DNA, 20 bp, Artificial Sequence
  Synthetic oligonucleotide; AAG chr11 5367595 5367614 5367598 -
aaaaacagtttgcagtaaag

SEQ ID NO: 32643 - DNA, 20 bp, Artificial Sequence
  Synthetic oligonucleotide; TGG chr11 5367591 5367610 5367594 -
acagtttgcagtaaagaagc

SEQ ID NO: 32644 - DNA, 20 bp, Artificial Sequence
  Synthetic oligonucleotide; AAG chr11 5367571 5367590 5367574 -
tggctgaaacccaccaaacc

SEQ ID NO: 32645 - DNA, 20 bp, Artificial Sequence
  Synthetic oligonucleotide; GAG chr11 5367560 5367579 5367563 -
caccaaaccaagattgtgat

SEQ ID NO: 32646 - DNA, 20 bp, Artificial Sequence
  Synthetic oligonucleotide; GAG chr11 5367558 5367577 5367561 -
ccaaaccaagattgtgatga

SEQ ID NO: 32647 - DNA, 20 bp, Artificial Sequence
  Synthetic oligonucleotide; TGG chr11 5367548 5367567 5367551 -
attgtgatgagagtgacctc

SEQ ID NO: 32648 - DNA, 20 bp, Artificial Sequence
  Synthetic oligonucleotide; TAG chr11 5367545 5367564 5367548 -
gtgatgagagtgacctctgg

SEQ ID NO: 32649 - DNA, 20 bp, Artificial Sequence
  Synthetic oligonucleotide; CAG chr11 5367521 5367540 5367524 -
cctcactgctactctcccac

SEQ ID NO: 32650 - DNA, 20 bp, Artificial Sequence
  Synthetic oligonucleotide; TAG chr11 5367505 5367524 5367508 -
ccaccagcactatgactgtt

SEQ ID NO: 32651 - DNA, 20 bp, Artificial Sequence
  Synthetic oligonucleotide; TGG chr11 5367494 5367513 5367497 -
atgactgtttagaaatgcca

SEQ ID NO: 32652 - DNA, 20 bp, Artificial Sequence
  Synthetic oligonucleotide; CAG chr11 5367485 5367504 5367488 -
tagaaatgccatggcaacat

SEQ ID NO: 32653 - DNA, 20 bp, Artificial Sequence
  Synthetic oligonucleotide; AGG chr11 5367484 5367503 5367487 -
agaaatgccatggcaacatc

SEQ ID NO: 32654 - DNA, 20 bp, Artificial Sequence
  Synthetic oligonucleotide; AAG chr11 5367481 5367500 5367484 -
aatgccatggcaacatcagg

SEQ ID NO: 32655 - DNA, 20 bp, Artificial Sequence
  Synthetic oligonucleotide; AAG chr11 5367471 5367490 5367474 -
caacatcaggaagttacgct

SEQ ID NO: 32656 - DNA, 20 bp, Artificial Sequence
  Synthetic oligonucleotide; CGG chr11 5367468 5367487 5367471 -
catcaggaagttacgctaag

SEQ ID NO: 32657 - DNA, 20 bp, Artificial Sequence
  Synthetic oligonucleotide; AAG chr11 5367459 5367478 5367462 -
gttacgctaagcggtctgaa

SEQ ID NO: 32658 - DNA, 20 bp, Artificial Sequence
  Synthetic oligonucleotide; AGG chr11 5367458 5367477 5367461 -
ttacgctaagcggtctgaaa

SEQ ID NO: 32659 - DNA, 20 bp, Artificial Sequence
  Synthetic oligonucleotide; GGG chr11 5367457 5367476 5367460 -
tacgctaagcggtctgaaaa

SEQ ID NO: 32660 - DNA, 20 bp, Artificial Sequence
  Synthetic oligonucleotide; GGG chr11 5367456 5367475 5367459 -
acgctaagcggtctgaaaag

SEQ ID NO: 32661 - DNA, 20 bp, Artificial Sequence
  Synthetic oligonucleotide; GAG chr11 5367454 5367473 5367457 -
gctaagcggtctgaaaaggg

SEQ ID NO: 32662 - DNA, 20 bp, Artificial Sequence
  Synthetic oligonucleotide; AGG chr11 5367453 5367472 5367456 -
ctaagcggtctgaaaagggg

SEQ ID NO: 32663 - DNA, 20 bp, Artificial Sequence
  Synthetic oligonucleotide; TAG chr11 5367428 5367447 5367431 -
tgaataatccaccccttgtt

SEQ ID NO: 32664 - DNA, 20 bp, Artificial Sequence
  Synthetic oligonucleotide; TGG chr11 5367398 5367417 5367401 -
tcaataaataaccataaaaa

SEQ ID NO: 32665 - DNA, 20 bp, Artificial Sequence
  Synthetic oligonucleotide; GGG chr11 5367397 5367416 5367400 -
caataaataaccataaaaat

SEQ ID NO: 32666 - DNA, 20 bp, Artificial Sequence
  Synthetic oligonucleotide; CAG chr11 5367390 5367409 5367393 -
taaccataaaaatgggcaac

SEQ ID NO: 32667 - DNA, 20 bp, Artificial Sequence
  Synthetic oligonucleotide; CAG chr11 5367387 5367406 5367390 -
ccataaaaatgggcaaccag

SEQ ID NO: 32668 - DNA, 20 bp, Artificial Sequence
  Synthetic oligonucleotide; CAG chr11 5367380 5367399 5367383 -
aatgggcaaccagcagtcct

SEQ ID NO: 32669 - DNA, 20 bp, Artificial Sequence
  Synthetic oligonucleotide; AGG chr11 5367379 5367398 5367382 -
atgggcaaccagcagtcctc

SEQ ID NO: 32670 - DNA, 20 bp, Artificial Sequence
  Synthetic oligonucleotide; TAG chr11 5367363 5367382 5367366 -
cctcaggactgttctgccta

SEQ ID NO: 32671 - DNA, 20 bp, Artificial Sequence
  Synthetic oligonucleotide; AGG chr11 5367362 5367381 5367365 -
ctcaggactgttctgcctat

SEQ ID NO: 32672 - DNA, 20 bp, Artificial Sequence
  Synthetic oligonucleotide; GGG chr11 5367361 5367380 5367364 -
tcaggactgttctgcctata

SEQ ID NO: 32673 - DNA, 20 bp, Artificial Sequence
  Synthetic oligonucleotide; TAG chr11 5367358 5367377 5367361 -
ggactgttctgcctataggg

SEQ ID NO: 32674 - DNA, 20 bp, Artificial Sequence
  Synthetic oligonucleotide; TGG chr11 5367303 5367322 5367306 -
cttgctttcacttttctgta

SEQ ID NO: 32675 - DNA, 20 bp, Artificial Sequence
  Synthetic oligonucleotide; TGG chr11 5367280 5367299 5367283 -
atttgccccaaattctttct

SEQ ID NO: 32676 - DNA, 20 bp, Artificial Sequence
  Synthetic oligonucleotide; GGG chr11 5367279 5367298 5367282 -
tttgccccaaattctttctt

SEQ ID NO: 32677 - DNA, 20 bp, Artificial Sequence
  Synthetic oligonucleotide; AAG chr11 5367266 5367285 5367269 -
ctttcttgggcacgaaatcc

SEQ ID NO: 32678 - DNA, 20 bp, Artificial Sequence
  Synthetic oligonucleotide; TAG chr11 5367253 5367272 5367256 -
gaaatccaagaaccctctct

SEQ ID NO: 32679 - DNA, 20 bp, Artificial Sequence
  Synthetic oligonucleotide; AGG chr11 5367252 5367271 5367255 -
aaatccaagaaccctctctt

SEQ ID NO: 32680 - DNA, 20 bp, Artificial Sequence
  Synthetic oligonucleotide; GGG chr11 5367251 5367270 5367254 -
aatccaagaaccctctctta

SEQ ID NO: 32681 - DNA, 20 bp, Artificial Sequence
  Synthetic oligonucleotide; TGG chr11 5367246 5367265 5367249 -
aagaaccctctcttagggtc

SEQ ID NO: 32682 - DNA, 20 bp, Artificial Sequence
  Synthetic oligonucleotide; TGG chr11 5367228 5367247 5367231 -
tctggattgtgactcctttc

SEQ ID NO: 32683 - DNA, 20 bp, Artificial Sequence
  Synthetic oligonucleotide; CAG chr11 5367180 5367199 5367183 -
ctttcaaaatgattttattc

SEQ ID NO: 32684 - DNA, 20 bp, Artificial Sequence
  Synthetic oligonucleotide; AAG chr11 5367144 5367163 5367147 -
aactaaaactctgtgtcact

SEQ ID NO: 32685 - DNA, 20 bp, Artificial Sequence
  Synthetic oligonucleotide; TGG chr11 5367141 5367160 5367144 -
taaaactctgtgtcactaag

SEQ ID NO: 32686 - DNA, 20 bp, Artificial Sequence
  Synthetic oligonucleotide; AAG chr11 5367132 5367151 5367135 -
gtgtcactaagtggctttgc

SEQ ID NO: 32687 - DNA, 20 bp, Artificial Sequence
  Synthetic oligonucleotide; AGG chr11 5367131 5367150 5367134 -
tgtcactaagtggctttgca

SEQ ID NO: 32688 - DNA, 20 bp, Artificial Sequence
  Synthetic oligonucleotide; TGG chr11 5367128 5367147 5367131 -
cactaagtggctttgcaagg

SEQ ID NO: 32689 - DNA, 20 bp, Artificial Sequence
  Synthetic oligonucleotide; TGG chr11 5367113 5367132 5367116 -
caaggtggcatgtgtatgtg

SEQ ID NO: 32690 - DNA, 20 bp, Artificial Sequence
  Synthetic oligonucleotide; CAG chr11 5367110 5367129 5367113 -
ggtggcatgtgtatgtgtgg

SEQ ID NO: 32691 - DNA, 20 bp, Artificial Sequence
  Synthetic oligonucleotide; GAG chr11 5367108 5367127 5367111 -
tggcatgtgtatgtgtggca

SEQ ID NO: 32692 - DNA, 20 bp, Artificial Sequence
  Synthetic oligonucleotide; CAG chr11 5367093 5367112 5367096 -
tggcagagcttctcttcctt

SEQ ID NO: 32693 - DNA, 20 bp, Artificial Sequence
  Synthetic oligonucleotide; GAG chr11 5367078 5367097 5367081 -
tccttcagaaccacattcct

SEQ ID NO: 32694 - DNA, 20 bp, Artificial Sequence
  Synthetic oligonucleotide; GAG chr11 5367071 5367090 5367074 -
gaaccacattcctgagactt

SEQ ID NO: 32695 - DNA, 20 bp, Artificial Sequence
  Synthetic oligonucleotide; GAG chr11 5367069 5367088 5367072 -
accacattcctgagacttga

SEQ ID NO: 32696 - DNA, 20 bp, Artificial Sequence
  Synthetic oligonucleotide; TGG chr11 5367058 5367077 5367061 -
gagacttgagagaatgtctt

SEQ ID NO: 32697 - DNA, 20 bp, Artificial Sequence
  Synthetic oligonucleotide; TAG chr11 5367045 5367064 5367048 -
atgtctttggtctctgctgc

SEQ ID NO: 32698 - DNA, 20 bp, Artificial Sequence
  Synthetic oligonucleotide; GAG chr11 5367043 5367062 5367046 -
gtctttggtctctgctgcta

SEQ ID NO: 32699 - DNA, 20 bp, Artificial Sequence
  Synthetic oligonucleotide; TGG chr11 5367030 5367049 5367033 -
gctgctagagaattttatcc

SEQ ID NO: 32700 - DNA, 20 bp, Artificial Sequence
  Synthetic oligonucleotide; TGG chr11 5367023 5367042 5367026 -
gagaattttatcctggttca

SEQ ID NO: 32701 - DNA, 20 bp, Artificial Sequence
  Synthetic oligonucleotide; CAG chr11 5367016 5367035 5367019 -
ttatcctggttcatggactg

SEQ ID NO: 32702 - DNA, 20 bp, Artificial Sequence
  Synthetic oligonucleotide; CGG chr11 5367013 5367032 5367016 -
tcctggttcatggactgcag

SEQ ID NO: 32703 - DNA, 20 bp, Artificial Sequence
  Synthetic oligonucleotide; GGG chr11 5367012 5367031 5367015 -
cctggttcatggactgcagc

SEQ ID NO: 32704 - DNA, 20 bp, Artificial Sequence
  Synthetic oligonucleotide; GAG chr11 5367010 5367029 5367013 -
tggttcatggactgcagcgg

SEQ ID NO: 32705 - DNA, 20 bp, Artificial Sequence
  Synthetic oligonucleotide; AGG chr11 5367009 5367028 5367012 -
ggttcatggactgcagcggg

SEQ ID NO: 32706 - DNA, 20 bp, Artificial Sequence
  Synthetic oligonucleotide; TGG chr11 5367006 5367025 5367009 -
tcatggactgcagcgggagg

SEQ ID NO: 32707 - DNA, 20 bp, Artificial Sequence
  Synthetic oligonucleotide; AAG chr11 5367003 5367022 5367006 -
tggactgcagcgggaggtgg

SEQ ID NO: 32708 - DNA, 20 bp, Artificial Sequence
  Synthetic oligonucleotide; TGG chr11 5366987 5367006 5366990 -
gtggaagcattttcaaactt

SEQ ID NO: 32709 - DNA, 20 bp, Artificial Sequence
  Synthetic oligonucleotide; GGG chr11 5366986 5367005 5366989 -
tggaagcattttcaaacttt

SEQ ID NO: 32710 - DNA, 20 bp, Artificial Sequence
  Synthetic oligonucleotide; GAG chr11 5366984 5367003 5366987 -
gaagcattttcaaactttgg

SEQ ID NO: 32711 - DNA, 20 bp, Artificial Sequence
  Synthetic oligonucleotide; AGG chr11 5366983 5367002 5366986 -
aagcattttcaaactttggg

SEQ ID NO: 32712 - DNA, 20 bp, Artificial Sequence
  Synthetic oligonucleotide; GGG chr11 5366982 5367001 5366985 -
agcattttcaaactttggga

SEQ ID NO: 32713 - DNA, 20 bp, Artificial Sequence
  Synthetic oligonucleotide; GGG chr11 5366981 5367000 5366984 -
gcattttcaaactttgggag

SEQ ID NO: 32714 - DNA, 20 bp, Artificial Sequence
  Synthetic oligonucleotide; TAG chr11 5366973 5366992 5366976 -
aaactttgggaggggaatgt

SEQ ID NO: 32715 - DNA, 20 bp, Artificial Sequence
  Synthetic oligonucleotide; AGG chr11 5366972 5366991 5366975 -
aactttgggaggggaatgtt

SEQ ID NO: 32716 - DNA, 20 bp, Artificial Sequence
  Synthetic oligonucleotide; GAG chr11 5366970 5366989 5366973 -
ctttgggaggggaatgttag

SEQ ID NO: 32717 - DNA, 20 bp, Artificial Sequence
  Synthetic oligonucleotide; TAG chr11 5366962 5366981 5366965 -
ggggaatgttaggagaccat

SEQ ID NO: 32718 - DNA, 20 bp, Artificial Sequence
  Synthetic oligonucleotide; AGG chr11 5366961 5366980 5366964 -
gggaatgttaggagaccatt

SEQ ID NO: 32719 - DNA, 20 bp, Artificial Sequence
  Synthetic oligonucleotide; AAG chr11 5366949 5366968 5366952 -
agaccattaggcatgtgctc

SEQ ID NO: 32720 - DNA, 20 bp, Artificial Sequence
  Synthetic oligonucleotide; GAG chr11 5366947 5366966 5366950 -
accattaggcatgtgctcaa

SEQ ID NO: 32721 - DNA, 20 bp, Artificial Sequence
  Synthetic oligonucleotide; AAG chr11 5366936 5366955 5366939 -
tgtgctcaagagatgacacc

SEQ ID NO: 32722 - DNA, 20 bp, Artificial Sequence
  Synthetic oligonucleotide; CAG chr11 5366931 5366950 5366934 -
tcaagagatgacaccaagtc

SEQ ID NO: 32723 - DNA, 20 bp, Artificial Sequence
  Synthetic oligonucleotide; AGG chr11 5366930 5366949 5366933 -
caagagatgacaccaagtcc

SEQ ID NO: 32724 - DNA, 20 bp, Artificial Sequence
  Synthetic oligonucleotide; CAG chr11 5366927 5366946 5366930 -
gagatgacaccaagtccagg

SEQ ID NO: 32725 - DNA, 20 bp, Artificial Sequence
  Synthetic oligonucleotide; AGG chr11 5366926 5366945 5366929 -
agatgacaccaagtccaggc

SEQ ID NO: 32726 - DNA, 20 bp, Artificial Sequence
  Synthetic oligonucleotide; GGG chr11 5366925 5366944 5366928 -
gatgacaccaagtccaggca

SEQ ID NO: 32727 - DNA, 20 bp, Artificial Sequence
  Synthetic oligonucleotide; CAG chr11 5366891 5366910 5366894 -
gtgcctgttgtctcatgaat

SEQ ID NO: 32728 - DNA, 20 bp, Artificial Sequence
  Synthetic oligonucleotide; TAG chr11 5366887 5366906 5366890 -
ctgttgtctcatgaatcaga

SEQ ID NO: 32729 - DNA, 20 bp, Artificial Sequence
  Synthetic oligonucleotide; CAG chr11 5366864 5366883 5366867 -
cacccctgcctaaaccttcc

SEQ ID NO: 32730 - DNA, 20 bp, Artificial Sequence
  Synthetic oligonucleotide; CAG chr11 5366849 5366868 5366852 -
cttcccagtcctgcattgca

SEQ ID NO: 32731 - DNA, 20 bp, Artificial Sequence
  Synthetic oligonucleotide; GAG chr11 5366847 5366866 5366850 -
tcccagtcctgcattgcaca

SEQ ID NO: 32732 - DNA, 20 bp, Artificial Sequence
  Synthetic oligonucleotide; TGG chr11 5366835 5366854 5366838 -
attgcacagagacccgtgct

SEQ ID NO: 32733 - DNA, 20 bp, Artificial Sequence
  Synthetic oligonucleotide; GGG chr11 5366834 5366853 5366837 -
ttgcacagagacccgtgctt

SEQ ID NO: 32734 - DNA, 20 bp, Artificial Sequence
  Synthetic oligonucleotide; TGG chr11 5366829 5366848 5366832 -
cagagacccgtgcttgggat

SEQ ID NO: 32735 - DNA, 20 bp, Artificial Sequence
  Synthetic oligonucleotide; TAG chr11 5366823 5366842 5366826 -
cccgtgcttgggattggaat

SEQ ID NO: 32736 - DNA, 20 bp, Artificial Sequence
  Synthetic oligonucleotide; AAG chr11 5366776 5366795 5366779 -
aaattttaatttttattcta

SEQ ID NO: 32737 - DNA, 20 bp, Artificial Sequence
  Synthetic oligonucleotide; AAG chr11 5366761 5366780 5366764 -
ttctaaagactttgaatctc

SEQ ID NO: 32738 - DNA, 20 bp, Artificial Sequence
  Synthetic oligonucleotide; CAG chr11 5366588 5366607 5366591 -
ctcatcttgcttttgccttc

SEQ ID NO: 32739 - DNA, 20 bp, Artificial Sequence
  Synthetic oligonucleotide; AGG chr11 5366587 5366606 5366590 -
tcatcttgcttttgccttcc

SEQ ID NO: 32740 - DNA, 20 bp, Artificial Sequence
  Synthetic oligonucleotide; TGG chr11 5366580 5366599 5366583 -
gcttttgccttccaggctgc

SEQ ID NO: 32741 - DNA, 20 bp, Artificial Sequence
  Synthetic oligonucleotide; GAG chr11 5366578 5366597 5366581 -
ttttgccttccaggctgctg

SEQ ID NO: 32742 - DNA, 20 bp, Artificial Sequence
  Synthetic oligonucleotide; TGG chr11 5366570 5366589 5366573 -
tccaggctgctggagtgcaa

SEQ ID NO: 32743 - DNA, 20 bp, Artificial Sequence
  Synthetic oligonucleotide; CGG chr11 5366559 5366578 5366562 -
ggagtgcaatggcgcgatct

SEQ ID NO: 32744 - DNA, 20 bp, Artificial Sequence
  Synthetic oligonucleotide; CAG chr11 5366535 5366554 5366538 -
tcactgcaacctccgcctcc

SEQ ID NO: 32745 - DNA, 20 bp, Artificial Sequence
  Synthetic oligonucleotide; AGG chr11 5366534 5366553 5366537 -
cactgcaacctccgcctccc

SEQ ID NO: 32746 - DNA, 20 bp, Artificial Sequence
  Synthetic oligonucleotide; AAG chr11 5366528 5366547 5366531 -
aacctccgcctcccaggttc

SEQ ID NO: 32747 - DNA, 20 bp, Artificial Sequence
  Synthetic oligonucleotide; CAG chr11 5366511 5366530 5366514 -
ttcaagcgattctcctacct

SEQ ID NO: 32748 - DNA, 20 bp, Artificial Sequence
  Synthetic oligonucleotide; TAG chr11 5366499 5366518 5366502 -
tcctacctcagcctcctgtg

SEQ ID NO: 32749 - DNA, 20 bp, Artificial Sequence
  Synthetic oligonucleotide; CAG chr11 5366487 5366506 5366490 -
ctcctgtgtagctgcaatta

SEQ ID NO: 32750 - DNA, 20 bp, Artificial Sequence
  Synthetic oligonucleotide; AGG chr11 5366486 5366505 5366489 -
tcctgtgtagctgcaattac

SEQ ID NO: 32751 - DNA, 20 bp, Artificial Sequence
  Synthetic oligonucleotide; CAG chr11 5366473 5366492 5366476 -
caattacaggcatctgccac

SEQ ID NO: 32752 - DNA, 20 bp, Artificial Sequence
  Synthetic oligonucleotide; AGG chr11 5366472 5366491 5366475 -
aattacaggcatctgccacc

SEQ ID NO: 32753 - DNA, 20 bp, Artificial Sequence
  Synthetic oligonucleotide; TAG chr11 5366443 5366462 5366446 -
taatttttttgtatttttat

SEQ ID NO: 32754 - DNA, 20 bp, Artificial Sequence
  Synthetic oligonucleotide; GAG chr11 5366441 5366460 5366444 -
atttttttgtatttttatta

SEQ ID NO: 32755 - DNA, 20 bp, Artificial Sequence
  Synthetic oligonucleotide; CAG chr11 5366437 5366456 5366440 -
ttttgtatttttattagaga

SEQ ID NO: 32756 - DNA, 20 bp, Artificial Sequence
  Synthetic oligonucleotide; AGG chr11 5366436 5366455 5366439 -
tttgtatttttattagagac

SEQ ID NO: 32757 - DNA, 20 bp, Artificial Sequence
  Synthetic oligonucleotide; GGG chr11 5366435 5366454 5366438 -
ttgtatttttattagagaca

SEQ ID NO: 32758 - DNA, 20 bp, Artificial Sequence
  Synthetic oligonucleotide; TGG chr11 5366421 5366440 5366424 -
gagacagggtttcaccatgt

SEQ ID NO: 32759 - DNA, 20 bp, Artificial Sequence
  Synthetic oligonucleotide; CAG chr11 5366417 5366436 5366420 -
cagggtttcaccatgttggt

SEQ ID NO: 32760 - DNA, 20 bp, Artificial Sequence
  Synthetic oligonucleotide; AGG chr11 5366416 5366435 5366419 -
agggtttcaccatgttggtc

SEQ ID NO: 32761 - DNA, 20 bp, Artificial Sequence
  Synthetic oligonucleotide; TGG chr11 5366412 5366431 5366415 -
tttcaccatgttggtcaggc

SEQ ID NO: 32762 - DNA, 20 bp, Artificial Sequence
  Synthetic oligonucleotide; CAG chr11 5366392 5366411 5366395 -
tggtctcgaactcttgccct

SEQ ID NO: 32763 - DNA, 20 bp, Artificial Sequence
  Synthetic oligonucleotide; AGG chr11 5366391 5366410 5366394 -
ggtctcgaactcttgccctc

SEQ ID NO: 32764 - DNA, 20 bp, Artificial Sequence
  Synthetic oligonucleotide; CAG chr11 5366374 5366393 5366377 -
ctcaggtgatcctcctgcct

SEQ ID NO: 32765 - DNA, 20 bp, Artificial Sequence
  Synthetic oligonucleotide; AAG chr11 5366364 5366383 5366367 -
cctcctgcctcagccaccca

SEQ ID NO: 32766 - DNA, 20 bp, Artificial Sequence
  Synthetic oligonucleotide; TGG chr11 5366358 5366377 5366361 -
gcctcagccacccaaagtgc

SEQ ID NO: 32767 - DNA, 20 bp, Artificial Sequence
  Synthetic oligonucleotide; GGG chr11 5366357 5366376 5366360 -
cctcagccacccaaagtgct

SEQ ID NO: 32768 - DNA, 20 bp, Artificial Sequence
  Synthetic oligonucleotide; CAG chr11 5366350 5366369 5366353 -
cacccaaagtgctgggatta

SEQ ID NO: 32769 - DNA, 20 bp, Artificial Sequence
  Synthetic oligonucleotide; AGG chr11 5366349 5366368 5366352 -
acccaaagtgctgggattac

SEQ ID NO: 32770 - DNA, 20 bp, Artificial Sequence
  Synthetic oligonucleotide; GAG chr11 5366343 5366362 5366346 -
agtgctgggattacaggcat

SEQ ID NO: 32771 - DNA, 20 bp, Artificial Sequence
  Synthetic oligonucleotide; TAG chr11 5366331 5366350 5366334 -
acaggcatgagtctgtaatg

SEQ ID NO: 32772 - DNA, 20 bp, Artificial Sequence
  Synthetic oligonucleotide; CAG chr11 5366316 5366335 5366319 -
taatgtagccttttctttaa

SEQ ID NO: 32773 - DNA, 20 bp, Artificial Sequence
  Synthetic oligonucleotide; AGG chr11 5366315 5366334 5366318 -
aatgtagccttttctttaac

SEQ ID NO: 32774 - DNA, 20 bp, Artificial Sequence
  Synthetic oligonucleotide; CAG chr11 5366305 5366324 5366308 -
tttctttaacaggctaccca

SEQ ID NO: 32775 - DNA, 20 bp, Artificial Sequence
  Synthetic oligonucleotide; GAG chr11 5366303 5366322 5366306 -
tctttaacaggctacccaca

SEQ ID NO: 32776 - DNA, 20 bp, Artificial Sequence
  Synthetic oligonucleotide; AGG chr11 5366302 5366321 5366305 -
ctttaacaggctacccacag

SEQ ID NO: 32777 - DNA, 20 bp, Artificial Sequence
  Synthetic oligonucleotide; GAG chr11 5366288 5366307 5366291 -
ccacagaggaaccttccctt

SEQ ID NO: 32778 - DNA, 20 bp, Artificial Sequence
  Synthetic oligonucleotide; CAG chr11 5366277 5366296 5366280 -
ccttcccttgagctcctttt

SEQ ID NO: 32779 - DNA, 20 bp, Artificial Sequence
  Synthetic oligonucleotide; TGG chr11 5366255 5366274 5366258 -
gattcttccttctgtttctc

SEQ ID NO: 32780 - DNA, 20 bp, Artificial Sequence
  Synthetic oligonucleotide; AAG chr11 5366179 5366198 5366182 -
tcatccttaacttcctactt

SEQ ID NO: 32781 - DNA, 20 bp, Artificial Sequence
  Synthetic oligonucleotide; AGG chr11 5366178 5366197 5366181 -
catccttaacttcctactta

SEQ ID NO: 32782 - DNA, 20 bp, Artificial Sequence
  Synthetic oligonucleotide; TGG chr11 5366133 5366152 5366136 -
ctgtttcttattttgcccac

SEQ ID NO: 32783 - DNA, 20 bp, Artificial Sequence
  Synthetic oligonucleotide; GGG chr11 5366132 5366151 5366135 -
tgtttcttattttgcccact

SEQ ID NO: 32784 - DNA, 20 bp, Artificial Sequence
  Synthetic oligonucleotide; AAG chr11 5366120 5366139 5366123 -
tgcccactgggttcacctct

SEQ ID NO: 32785 - DNA, 20 bp, Artificial Sequence
  Synthetic oligonucleotide; TGG chr11 5366106 5366125 5366109 -
acctctaagtcacacacaac

SEQ ID NO: 32786 - DNA, 20 bp, Artificial Sequence
  Synthetic oligonucleotide; AAG chr11 5366101 5366120 5366104 -
taagtcacacacaactggac

SEQ ID NO: 32787 - DNA, 20 bp, Artificial Sequence
  Synthetic oligonucleotide; AAG chr11 5366097 5366116 5366100 -
tcacacacaactggacaagt

SEQ ID NO: 32788 - DNA, 20 bp, Artificial Sequence
  Synthetic oligonucleotide; CAG chr11 5366085 5366104 5366088 -
ggacaagtaagcatacccct

SEQ ID NO: 32789 - DNA, 20 bp, Artificial Sequence
  Synthetic oligonucleotide; CAG chr11 5366067 5366086 5366070 -
ctcagcaactcttccattaa

SEQ ID NO: 32790 - DNA, 20 bp, Artificial Sequence
  Synthetic oligonucleotide; TGG chr11 5366043 5366062 5366046 -
ccccaaacatgctgattacc

SEQ ID NO: 32791 - DNA, 20 bp, Artificial Sequence
  Synthetic oligonucleotide; TAG chr11 5366032 5366051 5366035 -
ctgattacctggctgctcca

SEQ ID NO: 32792 - DNA, 20 bp, Artificial Sequence
  Synthetic oligonucleotide; AGG chr11 5366031 5366050 5366034 -
tgattacctggctgctccat

SEQ ID NO: 32793 - DNA, 20 bp, Artificial Sequence
  Synthetic oligonucleotide; GGG chr11 5366030 5366049 5366033 -
gattacctggctgctccata

SEQ ID NO: 32794 - DNA, 20 bp, Artificial Sequence
  Synthetic oligonucleotide; TGG chr11 5366027 5366046 5366030 -
tacctggctgctccataggg

SEQ ID NO: 32795 - DNA, 20 bp, Artificial Sequence
  Synthetic oligonucleotide; TGG chr11 5366023 5366042 5366026 -
tggctgctccatagggtggt

SEQ ID NO: 32796 - DNA, 20 bp, Artificial Sequence
  Synthetic oligonucleotide; TGG chr11 5366019 5366038 5366022 -
tgctccatagggtggttggt

SEQ ID NO: 32797 - DNA, 20 bp, Artificial Sequence
  Synthetic oligonucleotide; AAG chr11 5366012 5366031 5366015 -
tagggtggttggttggtctt

SEQ ID NO: 32798 - DNA, 20 bp, Artificial Sequence
  Synthetic oligonucleotide; TAG chr11 5366001 5366020 5366004 -
gttggtcttaagtctcccac

SEQ ID NO: 32799 - DNA, 20 bp, Artificial Sequence
  Synthetic oligonucleotide; CAG chr11 5365997 5366016 5366000 -
gtcttaagtctcccactagc

SEQ ID NO: 32800 - DNA, 20 bp, Artificial Sequence
  Synthetic oligonucleotide; TAG chr11 5365990 5366009 5365993 -
gtctcccactagccagcacc

SEQ ID NO: 32801 - DNA, 20 bp, Artificial Sequence
  Synthetic oligonucleotide; CAG chr11 5365987 5366006 5365990 -
tcccactagccagcacctag

SEQ ID NO: 32802 - DNA, 20 bp, Artificial Sequence
  Synthetic oligonucleotide; CAG chr11 5365979 5365998 5365982 -
gccagcacctagcagttctt

SEQ ID NO: 32803 - DNA, 20 bp, Artificial Sequence
  Synthetic oligonucleotide; TGG chr11 5365970 5365989 5365973 -
tagcagttcttcagtttgtg

SEQ ID NO: 32804 - DNA, 20 bp, Artificial Sequence
  Synthetic oligonucleotide; CAG chr11 5365963 5365982 5365966 -
tcttcagtttgtgtggttct

SEQ ID NO: 32805 - DNA, 20 bp, Artificial Sequence
  Synthetic oligonucleotide; TGG chr11 5365957 5365976 5365960 -
gtttgtgtggttctcagtgc

SEQ ID NO: 32806 - DNA, 20 bp, Artificial Sequence
  Synthetic oligonucleotide; GAG chr11 5365944 5365963 5365947 -
tcagtgctggtgatcatgct

SEQ ID NO: 32807 - DNA, 20 bp, Artificial Sequence
  Synthetic oligonucleotide; TGG chr11 5365920 5365939 5365923 -
ctgcccccttcatgcctctc

SEQ ID NO: 32808 - DNA, 20 bp, Artificial Sequence
  Synthetic oligonucleotide; CAG chr11 5365916 5365935 5365919 -
ccccttcatgcctctctggt

SEQ ID NO: 32809 - DNA, 20 bp, Artificial Sequence
  Synthetic oligonucleotide; CAG chr11 5365912 5365931 5365915 -
ttcatgcctctctggtcagt

SEQ ID NO: 32810 - DNA, 20 bp, Artificial Sequence
  Synthetic oligonucleotide; CAG chr11 5365903 5365922 5365906 -
ctctggtcagtcagaccctt

SEQ ID NO: 32811 - DNA, 20 bp, Artificial Sequence
  Synthetic oligonucleotide; AAG chr11 5365895 5365914 5365898 -
agtcagacccttcagaaccc

SEQ ID NO: 32812 - DNA, 20 bp, Artificial Sequence
  Synthetic oligonucleotide; GAG chr11 5365893 5365912 5365896 -
tcagacccttcagaacccaa

SEQ ID NO: 32813 - DNA, 20 bp, Artificial Sequence
  Synthetic oligonucleotide; AGG chr11 5365892 5365911 5365895 -
cagacccttcagaacccaag

SEQ ID NO: 32814 - DNA, 20 bp, Artificial Sequence
  Synthetic oligonucleotide; AAG chr11 5365888 5365907 5365891 -
cccttcagaacccaagaggt

SEQ ID NO: 32815 - DNA, 20 bp, Artificial Sequence
  Synthetic oligonucleotide; CAG chr11 5365885 5365904 5365888 -
ttcagaacccaagaggtaag

SEQ ID NO: 32816 - DNA, 20 bp, Artificial Sequence
  Synthetic oligonucleotide; GAG chr11 5365883 5365902 5365886 -
cagaacccaagaggtaagca

SEQ ID NO: 32817 - DNA, 20 bp, Artificial Sequence
  Synthetic oligonucleotide; AAG chr11 5365873 5365892 5365876 -
gaggtaagcagagttcctct

SEQ ID NO: 32818 - DNA, 20 bp, Artificial Sequence
  Synthetic oligonucleotide; TGG chr11 5365868 5365887 5365871 -
aagcagagttcctctaagaa

SEQ ID NO: 32819 - DNA, 20 bp, Artificial Sequence
  Synthetic oligonucleotide; TAG chr11 5365864 5365883 5365867 -
agagttcctctaagaatggt

SEQ ID NO: 32820 - DNA, 20 bp, Artificial Sequence
  Synthetic oligonucleotide; AAG chr11 5365837 5365856 5365840 -
ttaaacttcatcctgtcatc

SEQ ID NO: 32821 - DNA, 20 bp, Artificial Sequence
  Synthetic oligonucleotide; CAG chr11 5365833 5365852 5365836 -
acttcatcctgtcatcaagc

SEQ ID NO: 32822 - DNA, 20 bp, Artificial Sequence
  Synthetic oligonucleotide; AAG chr11 5365822 5365841 5365825 -
tcatcaagccagcacatact

SEQ ID NO: 32823 - DNA, 20 bp, Artificial Sequence
  Synthetic oligonucleotide; TAG chr11 5365805 5365824 5365808 -
actaagcatctataatgtgc

SEQ ID NO: 32824 - DNA, 20 bp, Artificial Sequence
  Synthetic oligonucleotide; TGG chr11 5365796 5365815 5365799 -
ctataatgtgctagacaatg

SEQ ID NO: 32825 - DNA, 20 bp, Artificial Sequence
  Synthetic oligonucleotide; GGG chr11 5365795 5365814 5365798 -
tataatgtgctagacaatgt

SEQ ID NO: 32826 - DNA, 20 bp, Artificial Sequence
  Synthetic oligonucleotide; TGG chr11 5365789 5365808 5365792 -
gtgctagacaatgtgggtaa

SEQ ID NO: 32827 - DNA, 20 bp, Artificial Sequence
  Synthetic oligonucleotide; GAG chr11 5365787 5365806 5365790 -
gctagacaatgtgggtaatg

SEQ ID NO: 32828 - DNA, 20 bp, Artificial Sequence
  Synthetic oligonucleotide; AGG chr11 5365786 5365805 5365789 -
ctagacaatgtgggtaatgg

SEQ ID NO: 32829 - DNA, 20 bp, Artificial Sequence
  Synthetic oligonucleotide; TGG chr11 5365776 5365795 5365779 -
tgggtaatggaggtgatgcc

SEQ ID NO: 32830 - DNA, 20 bp, Artificial Sequence
  Synthetic oligonucleotide; AAG chr11 5365753 5365772 5365756 -
attataatatctgccctcaa

SEQ ID NO: 32831 - DNA, 20 bp, Artificial Sequence
  Synthetic oligonucleotide; CAG chr11 5365725 5365744 5365728 -
atctattttttaaataatta

SEQ ID NO: 32832 - DNA, 20 bp, Artificial Sequence
  Synthetic oligonucleotide; AGG chr11 5365724 5365743 5365727 -
tctattttttaaataattac

SEQ ID NO: 32833 - DNA, 20 bp, Artificial Sequence
  Synthetic oligonucleotide; CAG chr11 5365706 5365725 5365709 -
acaggacaatttaaatgtat

SEQ ID NO: 32834 - DNA, 20 bp, Artificial Sequence
  Synthetic oligonucleotide; TGG chr11 5365701 5365720 5365704 -
acaatttaaatgtatcagtt

SEQ ID NO: 32835 - DNA, 20 bp, Artificial Sequence
  Synthetic oligonucleotide; GGG chr11 5365700 5365719 5365703 -
caatttaaatgtatcagttt

SEQ ID NO: 32836 - DNA, 20 bp, Artificial Sequence
  Synthetic oligonucleotide; CAG chr11 5365686 5365705 5365689 -
cagtttgggttgaataaaat

SEQ ID NO: 32837 - DNA, 20 bp, Artificial Sequence
  Synthetic oligonucleotide; AGG chr11 5365685 5365704 5365688 -
agtttgggttgaataaaatc

SEQ ID NO: 32838 - DNA, 20 bp, Artificial Sequence
  Synthetic oligonucleotide; GGG chr11 5365684 5365703 5365687 -
gtttgggttgaataaaatca

SEQ ID NO: 32839 - DNA, 20 bp, Artificial Sequence
  Synthetic oligonucleotide; TAG chr11 5365670 5365689 5365673 -
aaatcagggatgtttctcat

SEQ ID NO: 32840 - DNA, 20 bp, Artificial Sequence
  Synthetic oligonucleotide; AGG chr11 5365669 5365688 5365672 -
aatcagggatgtttctcatt

SEQ ID NO: 32841 - DNA, 20 bp, Artificial Sequence
  Synthetic oligonucleotide; GGG chr11 5365668 5365687 5365671 -
atcagggatgtttctcatta

SEQ ID NO: 32842 - DNA, 20 bp, Artificial Sequence
  Synthetic oligonucleotide; TGG chr11 5365653 5365672 5365656 -
cattagggcctcaacacatt

SEQ ID NO: 32843 - DNA, 20 bp, Artificial Sequence
  Synthetic oligonucleotide; GAG chr11 5365651 5365670 5365654 -
ttagggcctcaacacatttg

SEQ ID NO: 32844 - DNA, 20 bp, Artificial Sequence
  Synthetic oligonucleotide; AGG chr11 5365650 5365669 5365653 -
tagggcctcaacacatttgg

SEQ ID NO: 32845 - DNA, 20 bp, Artificial Sequence
  Synthetic oligonucleotide; AAG chr11 5365641 5365660 5365644 -
aacacatttggaggtgtgtt

SEQ ID NO: 32846 - DNA, 20 bp, Artificial Sequence
  Synthetic oligonucleotide; CAG chr11 5365637 5365656 5365640 -
catttggaggtgtgttaaga

SEQ ID NO: 32847 - DNA, 20 bp, Artificial Sequence
  Synthetic oligonucleotide; TAG chr11 5365634 5365653 5365637 -
ttggaggtgtgttaagacag

SEQ ID NO: 32848 - DNA, 20 bp, Artificial Sequence
  Synthetic oligonucleotide; CAG chr11 5365630 5365649 5365633 -
aggtgtgttaagacagtagt

SEQ ID NO: 32849 - DNA, 20 bp, Artificial Sequence
  Synthetic oligonucleotide; AAG chr11 5365618 5365637 5365621 -
acagtagtcagattcacacc

SEQ ID NO: 32850 - DNA, 20 bp, Artificial Sequence
  Synthetic oligonucleotide; GAG chr11 5365616 5365635 5365619 -
agtagtcagattcacaccaa

SEQ ID NO: 32851 - DNA, 20 bp, Artificial Sequence
  Synthetic oligonucleotide; TGG chr11 5365605 5365624 5365608 -
tcacaccaagagccctgtca

SEQ ID NO: 32852 - DNA, 20 bp, Artificial Sequence
  Synthetic oligonucleotide; GAG chr11 5365537 5365556 5365540 -
atgctttgtgaaaaaacttc

SEQ ID NO: 32853 - DNA, 20 bp, Artificial Sequence
  Synthetic oligonucleotide; AGG chr11 5365536 5365555 5365539 -
tgctttgtgaaaaaacttcg

SEQ ID NO: 32854 - DNA, 20 bp, Artificial Sequence
  Synthetic oligonucleotide; TAG chr11 5365533 5365552 5365536 -
tttgtgaaaaaacttcgagg

SEQ ID NO: 32855 - DNA, 20 bp, Artificial Sequence
  Synthetic oligonucleotide; CAG chr11 5365528 5365547 5365531 -
gaaaaaacttcgaggtagta

SEQ ID NO: 32856 - DNA, 20 bp, Artificial Sequence
  Synthetic oligonucleotide; TAG chr11 5365506 5365525 5365509 -
gccatatcctatcctgtgca

SEQ ID NO: 32857 - DNA, 20 bp, Artificial Sequence
  Synthetic oligonucleotide; CAG chr11 5365502 5365521 5365505 -
tatcctatcctgtgcataga

SEQ ID NO: 32858 - DNA, 20 bp, Artificial Sequence
  Synthetic oligonucleotide; AGG chr11 5365501 5365520 5365504 -
atcctatcctgtgcatagac

SEQ ID NO: 32859 - DNA, 20 bp, Artificial Sequence
  Synthetic oligonucleotide; TGG chr11 5365494 5365513 5365497 -
cctgtgcatagacaggaaaa

SEQ ID NO: 32860 - DNA, 20 bp, Artificial Sequence
  Synthetic oligonucleotide; TGG chr11 5365483 5365502 5365486 -
acaggaaaatggttgctgac

SEQ ID NO: 32861 - DNA, 20 bp, Artificial Sequence
  Synthetic oligonucleotide; CAG chr11 5365480 5365499 5365483 -
ggaaaatggttgctgactgg

SEQ ID NO: 32862 - DNA, 20 bp, Artificial Sequence
  Synthetic oligonucleotide; CAG chr11 5365475 5365494 5365478 -
atggttgctgactggcagac

SEQ ID NO: 32863 - DNA, 20 bp, Artificial Sequence
  Synthetic oligonucleotide; TGG chr11 5365469 5365488 5365472 -
gctgactggcagaccagaat

SEQ ID NO: 32864 - DNA, 20 bp, Artificial Sequence
  Synthetic oligonucleotide; GGG chr11 5365468 5365487 5365471 -
ctgactggcagaccagaatt

SEQ ID NO: 32865 - DNA, 20 bp, Artificial Sequence
  Synthetic oligonucleotide; CAG chr11 5365436 5365455 5365439 -
catctaaatgcatctctcca

SEQ ID NO: 32866 - DNA, 20 bp, Artificial Sequence
  Synthetic oligonucleotide; CAG chr11 5365424 5365443 5365427 -
tctctccacagcgatttcta

SEQ ID NO: 32867 - DNA, 20 bp, Artificial Sequence
  Synthetic oligonucleotide; TGG chr11 5365391 5365410 5365394 -
cttgtctctcatcccatatt

SEQ ID NO: 32868 - DNA, 20 bp, Artificial Sequence
  Synthetic oligonucleotide; CGG chr11 5365372 5365391 5365375 -
ttggttacttgttgccatgc

SEQ ID NO: 32869 - DNA, 20 bp, Artificial Sequence
  Synthetic oligonucleotide; GGG chr11 5365371 5365390 5365374 -
tggttacttgttgccatgcc

SEQ ID NO: 32870 - DNA, 20 bp, Artificial Sequence
  Synthetic oligonucleotide; CAG chr11 5365366 5365385 5365369 -
acttgttgccatgccgggac

SEQ ID NO: 32871 - DNA, 20 bp, Artificial Sequence
  Synthetic oligonucleotide; TGG chr11 5365355 5365374 5365358 -
tgccgggaccagccatgcat

SEQ ID NO: 32872 - DNA, 20 bp, Artificial Sequence
  Synthetic oligonucleotide; TGG chr11 5365344 5365363 5365347 -
gccatgcattggtttgcctt

SEQ ID NO: 32873 - DNA, 20 bp, Artificial Sequence
  Synthetic oligonucleotide; CAG chr11 5365338 5365357 5365341 -
cattggtttgcctttggcat

SEQ ID NO: 32874 - DNA, 20 bp, Artificial Sequence
  Synthetic oligonucleotide; CAG chr11 5365309 5365328 5365312 -
ctctatacccatgttttcca

SEQ ID NO: 32875 - DNA, 20 bp, Artificial Sequence
  Synthetic oligonucleotide; TGG chr11 5365305 5365324 5365308 -
atacccatgttttccacagc

SEQ ID NO: 32876 - DNA, 20 bp, Artificial Sequence
  Synthetic oligonucleotide; CAG chr11 5365295 5365314 5365298 -
tttccacagctggcaaacac

SEQ ID NO: 32877 - DNA, 20 bp, Artificial Sequence
  Synthetic oligonucleotide; TGG chr11 5365292 5365311 5365295 -
ccacagctggcaaacaccag

SEQ ID NO: 32878 - DNA, 20 bp, Artificial Sequence
  Synthetic oligonucleotide; CAG chr11 5365263 5365282 5365266 -
aataacactgttctcaccac

SEQ ID NO: 32879 - DNA, 20 bp, Artificial Sequence
  Synthetic oligonucleotide; TGG chr11 5365254 5365273 5365257 -
gttctcaccaccagcccttc

SEQ ID NO: 32880 - DNA, 20 bp, Artificial Sequence
  Synthetic oligonucleotide; TAG chr11 5365246 5365265 5365249 -
caccagcccttctggttcac

SEQ ID NO: 32881 - DNA, 20 bp, Artificial Sequence
  Synthetic oligonucleotide; TGG chr11 5365234 5365253 5365237 -
tggttcactagatgtttcca

SEQ ID NO: 32882 - DNA, 20 bp, Artificial Sequence
  Synthetic oligonucleotide; GAG chr11 5365232 5365251 5365235 -
gttcactagatgtttccatg

SEQ ID NO: 32883 - DNA, 20 bp, Artificial Sequence
  Synthetic oligonucleotide; TAG chr11 5365218 5365237 5365221 -
tccatggagtcctgatataa

SEQ ID NO: 32884 - DNA, 20 bp, Artificial Sequence
  Synthetic oligonucleotide; CAG chr11 5365198 5365217 5365201 -
tagacaacttattttaaaca

SEQ ID NO: 32885 - DNA, 20 bp, Artificial Sequence
  Synthetic oligonucleotide; CAG chr11 5365191 5365210 5365194 -
cttattttaaacacagttgc

SEQ ID NO: 32886 - DNA, 20 bp, Artificial Sequence
  Synthetic oligonucleotide; CAG chr11 5365168 5365187 5365171 -
ccctacactctaaatgtcta

SEQ ID NO: 32887 - DNA, 20 bp, Artificial Sequence
  Synthetic oligonucleotide; CAG chr11 5365158 5365177 5365161 -
taaatgtctacagaactcac

SEQ ID NO: 32888 - DNA, 20 bp, Artificial Sequence
  Synthetic oligonucleotide; AAG chr11 5365152 5365171 5365155 -
tctacagaactcaccagaca

SEQ ID NO: 32889 - DNA, 20 bp, Artificial Sequence
  Synthetic oligonucleotide; AAG chr11 5365149 5365168 5365152 -
acagaactcaccagacaaag

SEQ ID NO: 32890 - DNA, 20 bp, Artificial Sequence
  Synthetic oligonucleotide; AAG chr11 5365144 5365163 5365147 -
actcaccagacaaagaagaa

SEQ ID NO: 32891 - DNA, 20 bp, Artificial Sequence
  Synthetic oligonucleotide; TAG chr11 5365136 5365155 5365139 -
gacaaagaagaaaagttatt

SEQ ID NO: 32892 - DNA, 20 bp, Artificial Sequence
  Synthetic oligonucleotide; CAG chr11 5365133 5365152 5365136 -
aaagaagaaaagttatttag

SEQ ID NO: 32893 - DNA, 20 bp, Artificial Sequence
  Synthetic oligonucleotide; AAG chr11 5365123 5365142 5365126 -
agttatttagcagttgtgat

SEQ ID NO: 32894 - DNA, 20 bp, Artificial Sequence
  Synthetic oligonucleotide; AAG chr11 5365105 5365124 5365108 -
ataagctaccacttgaattc

SEQ ID NO: 32895 - DNA, 20 bp, Artificial Sequence
  Synthetic oligonucleotide; AGG chr11 5365104 5365123 5365107 -
taagctaccacttgaattca

SEQ ID NO: 32896 - DNA, 20 bp, Artificial Sequence
  Synthetic oligonucleotide; AAG chr11 5365094 5365113 5365097 -
cttgaattcaaggttattac

SEQ ID NO: 32897 - DNA, 20 bp, Artificial Sequence
  Synthetic oligonucleotide; TGG chr11 5365073 5365092 5365076 -
agcatgattattgacacatt

SEQ ID NO: 32898 - DNA, 20 bp, Artificial Sequence
  Synthetic oligonucleotide; GAG chr11 5365063 5365082 5365066 -
ttgacacatttggttttatt

SEQ ID NO: 32899 - DNA, 20 bp, Artificial Sequence
  Synthetic oligonucleotide; AAG chr11 5365044 5365063 5365047 -
tgagtgtcccttatttgccc

SEQ ID NO: 32900 - DNA, 20 bp, Artificial Sequence
  Synthetic oligonucleotide; AAG chr11 5365026 5365045 5365029 -
ccaagattcattgctgtgac

SEQ ID NO: 32901 - DNA, 20 bp, Artificial Sequence
  Synthetic oligonucleotide; AAG chr11 5365017 5365036 5365020 -
attgctgtgacaagaatgac

SEQ ID NO: 32902 - DNA, 20 bp, Artificial Sequence
  Synthetic oligonucleotide; AAG chr11 5365014 5365033 5365017 -
gctgtgacaagaatgacaag

SEQ ID NO: 32903 - DNA, 20 bp, Artificial Sequence
  Synthetic oligonucleotide; AAG chr11 5365011 5365030 5365014 -
gtgacaagaatgacaagaag

SEQ ID NO: 32904 - DNA, 20 bp, Artificial Sequence
  Synthetic oligonucleotide; CAG chr11 5365008 5365027 5365011 -
acaagaatgacaagaagaag

SEQ ID NO: 32905 - DNA, 20 bp, Artificial Sequence
  Synthetic oligonucleotide; GAG chr11 5364999 5365018 5365002 -
acaagaagaagcagttactt

SEQ ID NO: 32906 - DNA, 20 bp, Artificial Sequence
  Synthetic oligonucleotide; TAG chr11 5364985 5365004 5364988 -
ttacttgagaaatccccttg

SEQ ID NO: 32907 - DNA, 20 bp, Artificial Sequence
  Synthetic oligonucleotide; TAG chr11 5364926 5364945 5364929 -
ttctccttgtgtatccacca

SEQ ID NO: 32908 - DNA, 20 bp, Artificial Sequence
  Synthetic oligonucleotide; AAG chr11 5364923 5364942 5364926 -
tccttgtgtatccaccatag

SEQ ID NO: 32909 - DNA, 20 bp, Artificial Sequence
  Synthetic oligonucleotide; TGG chr11 5364868 5364887 5364871 -
tttaataaaactatattaaa

SEQ ID NO: 32910 - DNA, 20 bp, Artificial Sequence
  Synthetic oligonucleotide; TAG chr11 5364854 5364873 5364857 -
attaaatggaaattcaccaa

SEQ ID NO: 32911 - DNA, 20 bp, Artificial Sequence
  Synthetic oligonucleotide; TAG chr11 5364846 5364865 5364849 -
gaaattcaccaatagaaact

SEQ ID NO: 32912 - DNA, 20 bp, Artificial Sequence
  Synthetic oligonucleotide; AGG chr11 5364845 5364864 5364848 -
aaattcaccaatagaaactt

SEQ ID NO: 32913 - DNA, 20 bp, Artificial Sequence
  Synthetic oligonucleotide; AAG chr11 5364841 5364860 5364844 -
tcaccaatagaaacttagga

SEQ ID NO: 32914 - DNA, 20 bp, Artificial Sequence
  Synthetic oligonucleotide; AGG chr11 5364840 5364859 5364843 -
caccaatagaaacttaggaa

SEQ ID NO: 32915 - DNA, 20 bp, Artificial Sequence
  Synthetic oligonucleotide; AAG chr11 5364832 5364851 5364835 -
gaaacttaggaaaggtaaca

SEQ ID NO: 32916 - DNA, 20 bp, Artificial Sequence
  Synthetic oligonucleotide; GAG chr11 5364823 5364842 5364826 -
gaaaggtaacaaagtcctgt

SEQ ID NO: 32917 - DNA, 20 bp, Artificial Sequence
  Synthetic oligonucleotide; AGG chr11 5364822 5364841 5364825 -
aaaggtaacaaagtcctgtg

SEQ ID NO: 32918 - DNA, 20 bp, Artificial Sequence
  Synthetic oligonucleotide; TGG chr11 5364818 5364837 5364821 -
gtaacaaagtcctgtgaggt

SEQ ID NO: 32919 - DNA, 20 bp, Artificial Sequence
  Synthetic oligonucleotide; CAG chr11 5364812 5364831 5364815 -
aagtcctgtgaggttggctt

SEQ ID NO: 32920 - DNA, 20 bp, Artificial Sequence
  Synthetic oligonucleotide; CAG chr11 5364803 5364822 5364806 -
gaggttggcttcagcatatc

SEQ ID NO: 32921 - DNA, 20 bp, Artificial Sequence
  Synthetic oligonucleotide; CAG chr11 5364790 5364809 5364793 -
gcatatccagaacacatgct

SEQ ID NO: 32922 - DNA, 20 bp, Artificial Sequence
  Synthetic oligonucleotide; AGG chr11 5364789 5364808 5364792 -
catatccagaacacatgctc

SEQ ID NO: 32923 - DNA, 20 bp, Artificial Sequence
  Synthetic oligonucleotide; AAG chr11 5364786 5364805 5364789 -
atccagaacacatgctcagg

SEQ ID NO: 32924 - DNA, 20 bp, Artificial Sequence
  Synthetic oligonucleotide; AGG chr11 5364785 5364804 5364788 -
tccagaacacatgctcagga

SEQ ID NO: 32925 - DNA, 20 bp, Artificial Sequence
  Synthetic oligonucleotide; AAG chr11 5364782 5364801 5364785 -
agaacacatgctcaggaagg

SEQ ID NO: 32926 - DNA, 20 bp, Artificial Sequence
  Synthetic oligonucleotide; GAG chr11 5364780 5364799 5364783 -
aacacatgctcaggaaggaa

SEQ ID NO: 32927 - DNA, 20 bp, Artificial Sequence
  Synthetic oligonucleotide; AGG chr11 5364779 5364798 5364782 -
acacatgctcaggaaggaag

SEQ ID NO: 32928 - DNA, 20 bp, Artificial Sequence
  Synthetic oligonucleotide; GGG chr11 5364778 5364797 5364781 -
cacatgctcaggaaggaaga

SEQ ID NO: 32929 - DNA, 20 bp, Artificial Sequence
  Synthetic oligonucleotide; TGG chr11 5364775 5364794 5364778 -
atgctcaggaaggaagaggg

SEQ ID NO: 32930 - DNA, 20 bp, Artificial Sequence
  Synthetic oligonucleotide; GGG chr11 5364774 5364793 5364777 -
tgctcaggaaggaagagggt

SEQ ID NO: 32931 - DNA, 20 bp, Artificial Sequence
  Synthetic oligonucleotide; GGG chr11 5364773 5364792 5364776 -
gctcaggaaggaagagggtg

SEQ ID NO: 32932 - DNA, 20 bp, Artificial Sequence
  Synthetic oligonucleotide; GGG chr11 5364772 5364791 5364775 -
ctcaggaaggaagagggtgg

SEQ ID NO: 32933 - DNA, 20 bp, Artificial Sequence
  Synthetic oligonucleotide; GGG chr11 5364771 5364790 5364774 -
tcaggaaggaagagggtggg

SEQ ID NO: 32934 - DNA, 20 bp, Artificial Sequence
  Synthetic oligonucleotide; AAG chr11 5364757 5364776 5364760 -
ggtggggggaccctgtaaac

SEQ ID NO: 32935 - DNA, 20 bp, Artificial Sequence
  Synthetic oligonucleotide; AGG chr11 5364756 5364775 5364759 -
gtggggggaccctgtaaaca

SEQ ID NO: 32936 - DNA, 20 bp, Artificial Sequence
  Synthetic oligonucleotide; GGG chr11 5364755 5364774 5364758 -
tggggggaccctgtaaacaa

SEQ ID NO: 32937 - DNA, 20 bp, Artificial Sequence
  Synthetic oligonucleotide; AAG chr11 5364733 5364752 5364736 -
gactttgatcattcactttg

SEQ ID NO: 32938 - DNA, 20 bp, Artificial Sequence
  Synthetic oligonucleotide; GAG chr11 5364731 5364750 5364734 -
ctttgatcattcactttgaa

SEQ ID NO: 32939 - DNA, 20 bp, Artificial Sequence
  Synthetic oligonucleotide; TGG chr11 5364713 5364732 5364716 -
aagagtcttctgtcatatgc

SEQ ID NO: 32940 - DNA, 20 bp, Artificial Sequence
  Synthetic oligonucleotide; TGG chr11 5364709 5364728 5364712 -
gtcttctgtcatatgctgga

SEQ ID NO: 32941 - DNA, 20 bp, Artificial Sequence
  Synthetic oligonucleotide; GGG chr11 5364708 5364727 5364711 -
tcttctgtcatatgctggat

SEQ ID NO: 32942 - DNA, 20 bp, Artificial Sequence
  Synthetic oligonucleotide; CAG chr11 5364701 5364720 5364704 -
tcatatgctggatgggcaaa

SEQ ID NO: 32943 - DNA, 20 bp, Artificial Sequence
  Synthetic oligonucleotide; TAG chr11 5364696 5364715 5364699 -
tgctggatgggcaaacagct

SEQ ID NO: 32944 - DNA, 20 bp, Artificial Sequence
  Synthetic oligonucleotide; GAG chr11 5364694 5364713 5364697 -
ctggatgggcaaacagctta

SEQ ID NO: 32945 - DNA, 20 bp, Artificial Sequence
  Synthetic oligonucleotide; AGG chr11 5364693 5364712 5364696 -
tggatgggcaaacagcttag

SEQ ID NO: 32946 - DNA, 20 bp, Artificial Sequence
  Synthetic oligonucleotide; GGG chr11 5364692 5364711 5364695 -
ggatgggcaaacagcttaga

SEQ ID NO: 32947 - DNA, 20 bp, Artificial Sequence
  Synthetic oligonucleotide; TAG chr11 5364683 5364702 5364686 -
aacagcttagagggctgcct

SEQ ID NO: 32948 - DNA, 20 bp, Artificial Sequence
  Synthetic oligonucleotide; GAG chr11 5364681 5364700 5364684 -
cagcttagagggctgcctta

SEQ ID NO: 32949 - DNA, 20 bp, Artificial Sequence
  Synthetic oligonucleotide; CAG chr11 5364668 5364687 5364671 -
tgccttagagtgcacaaaat

SEQ ID NO: 32950 - DNA, 20 bp, Artificial Sequence
  Synthetic oligonucleotide; GAG chr11 5364666 5364685 5364669 -
ccttagagtgcacaaaatca

SEQ ID NO: 32951 - DNA, 20 bp, Artificial Sequence
  Synthetic oligonucleotide; CAG chr11 5364658 5364677 5364661 -
tgcacaaaatcagagatatt

SEQ ID NO: 32952 - DNA, 20 bp, Artificial Sequence
  Synthetic oligonucleotide; GAG chr11 5364656 5364675 5364659 -
cacaaaatcagagatattca

SEQ ID NO: 32953 - DNA, 20 bp, Artificial Sequence
  Synthetic oligonucleotide; GAG chr11 5364645 5364664 5364648 -
agatattcagagatgcacat

SEQ ID NO: 32954 - DNA, 20 bp, Artificial Sequence
  Synthetic oligonucleotide; AGG chr11 5364644 5364663 5364647 -
gatattcagagatgcacatg

SEQ ID NO: 32955 - DNA, 20 bp, Artificial Sequence
  Synthetic oligonucleotide; TGG chr11 5364640 5364659 5364643 -
ttcagagatgcacatgagga

SEQ ID NO: 32956 - DNA, 20 bp, Artificial Sequence
  Synthetic oligonucleotide; GAG chr11 5364638 5364657 5364641 -
cagagatgcacatgaggatg

SEQ ID NO: 32957 - DNA, 20 bp, Artificial Sequence
  Synthetic oligonucleotide; GAG chr11 5364634 5364653 5364637 -
gatgcacatgaggatggagt

SEQ ID NO: 32958 - DNA, 20 bp, Artificial Sequence
  Synthetic oligonucleotide; AAG chr11 5364631 5364650 5364634 -
gcacatgaggatggagtgag

SEQ ID NO: 32959 - DNA, 20 bp, Artificial Sequence
  Synthetic oligonucleotide; GAG chr11 5364629 5364648 5364632 -
acatgaggatggagtgagaa

SEQ ID NO: 32960 - DNA, 20 bp, Artificial Sequence
  Synthetic oligonucleotide; AGG chr11 5364628 5364647 5364631 -
catgaggatggagtgagaag

SEQ ID NO: 32961 - DNA, 20 bp, Artificial Sequence
  Synthetic oligonucleotide; AAG chr11 5364625 5364644 5364628 -
gaggatggagtgagaagagg

SEQ ID NO: 32962 - DNA, 20 bp, Artificial Sequence
  Synthetic oligonucleotide; GAG chr11 5364623 5364642 5364626 -
ggatggagtgagaagaggaa

SEQ ID NO: 32963 - DNA, 20 bp, Artificial Sequence
  Synthetic oligonucleotide; GAG chr11 5364621 5364640 5364624 -
atggagtgagaagaggaaga

SEQ ID NO: 32964 - DNA, 20 bp, Artificial Sequence
  Synthetic oligonucleotide; GAG chr11 5364619 5364638 5364622 -
ggagtgagaagaggaagaga

SEQ ID NO: 32965 - DNA, 20 bp, Artificial Sequence
  Synthetic oligonucleotide; TAG chr11 5364594 5364613 5364597 -
acataaatacctctcacgct

SEQ ID NO: 32966 - DNA, 20 bp, Artificial Sequence
  Synthetic oligonucleotide; CAG chr11 5364572 5364591 5364575 -
gtttattttttcatttaata

SEQ ID NO: 32967 - DNA, 20 bp, Artificial Sequence
  Synthetic oligonucleotide; AAG chr11 5364559 5364578 5364562 -
tttaatacagaatatttttt

SEQ ID NO: 32968 - DNA, 20 bp, Artificial Sequence
  Synthetic oligonucleotide; AAG chr11 5364541 5364560 5364544 -
ttaagctcctactctcttca

SEQ ID NO: 32969 - DNA, 20 bp, Artificial Sequence
  Synthetic oligonucleotide; AAG chr11 5364527 5364546 5364530 -
tcttcaaagcactgtgctta

SEQ ID NO: 32970 - DNA, 20 bp, Artificial Sequence
  Synthetic oligonucleotide; TGG chr11 5364523 5364542 5364526 -
caaagcactgtgcttaaagc

SEQ ID NO: 32971 - DNA, 20 bp, Artificial Sequence
  Synthetic oligonucleotide; TAG chr11 5364516 5364535 5364519 -
ctgtgcttaaagctggcatg

SEQ ID NO: 32972 - DNA, 20 bp, Artificial Sequence
  Synthetic oligonucleotide; TAG chr11 5364504 5364523 5364507 -
ctggcatgtagttgaattta

SEQ ID NO: 32973 - DNA, 20 bp, Artificial Sequence
  Synthetic oligonucleotide; CAG chr11 5364499 5364518 5364502 -
atgtagttgaatttatagtc

SEQ ID NO: 32974 - DNA, 20 bp, Artificial Sequence
  Synthetic oligonucleotide; AAG chr11 5364495 5364514 5364498 -
agttgaatttatagtccagc

SEQ ID NO: 32975 - DNA, 20 bp, Artificial Sequence
  Synthetic oligonucleotide; AGG chr11 5364494 5364513 5364497 -
gttgaatttatagtccagca

SEQ ID NO: 32976 - DNA, 20 bp, Artificial Sequence
  Synthetic oligonucleotide; GAG chr11 5364492 5364511 5364495 -
tgaatttatagtccagcaag

SEQ ID NO: 32977 - DNA, 20 bp, Artificial Sequence
  Synthetic oligonucleotide; GAG chr11 5364479 5364498 5364482 -
cagcaaggagactgaccatt

SEQ ID NO: 32978 - DNA, 20 bp, Artificial Sequence
  Synthetic oligonucleotide; TGG chr11 5364465 5364484 5364468 -
accattgagaattacaaata

SEQ ID NO: 32979 - DNA, 20 bp, Artificial Sequence
  Synthetic oligonucleotide; CAG chr11 5364462 5364481 5364465 -
attgagaattacaaatatgg

SEQ ID NO: 32980 - DNA, 20 bp, Artificial Sequence
  Synthetic oligonucleotide; AGG chr11 5364461 5364480 5364464 -
ttgagaattacaaatatggc

SEQ ID NO: 32981 - DNA, 20 bp, Artificial Sequence
  Synthetic oligonucleotide; CAG chr11 5364448 5364467 5364451 -
atatggcaggaatttctaaa

SEQ ID NO: 32982 - DNA, 20 bp, Artificial Sequence
  Synthetic oligonucleotide; AAG chr11 5364444 5364463 5364447 -
ggcaggaatttctaaacaga

SEQ ID NO: 32983 - DNA, 20 bp, Artificial Sequence
  Synthetic oligonucleotide; CAG chr11 5364436 5364455 5364439 -
tttctaaacagaaagatgtg

SEQ ID NO: 32984 - DNA, 20 bp, Artificial Sequence
  Synthetic oligonucleotide; CAG chr11 5364417 5364436 5364420 -
gcagctctcatatcctgtca

SEQ ID NO: 32985 - DNA, 20 bp, Artificial Sequence
  Synthetic oligonucleotide; TAG chr11 5364399 5364418 5364402 -
cacagaaatgacacatcaca

SEQ ID NO: 32986 - DNA, 20 bp, Artificial Sequence
  Synthetic oligonucleotide; TAG chr11 5364380 5364399 5364383 -
atagctcctaaactgcatca

SEQ ID NO: 32987 - DNA, 20 bp, Artificial Sequence
  Synthetic oligonucleotide; TGG chr11 5364349 5364368 5364352 -
tgacctcctgtttctgcatt

SEQ ID NO: 32988 - DNA, 20 bp, Artificial Sequence
  Synthetic oligonucleotide; TGG chr11 5364318 5364337 5364321 -
catatcaccccaaattccaa

SEQ ID NO: 32989 - DNA, 20 bp, Artificial Sequence
  Synthetic oligonucleotide; AAG chr11 5364308 5364327 5364311 -
caaattccaatggttttgtg

SEQ ID NO: 32990 - DNA, 20 bp, Artificial Sequence
  Synthetic oligonucleotide; AAG chr11 5364303 5364322 5364306 -
tccaatggttttgtgaagtc

SEQ ID NO: 32991 - DNA, 20 bp, Artificial Sequence
  Synthetic oligonucleotide; TGG chr11 5364298 5364317 5364301 -
tggttttgtgaagtcaagat

SEQ ID NO: 32992 - DNA, 20 bp, Artificial Sequence
  Synthetic oligonucleotide; TGG chr11 5364295 5364314 5364298 -
ttttgtgaagtcaagattgg

SEQ ID NO: 32993 - DNA, 20 bp, Artificial Sequence
  Synthetic oligonucleotide; AAG chr11 5364290 5364309 5364293 -
tgaagtcaagattggtggtc

SEQ ID NO: 32994 - DNA, 20 bp, Artificial Sequence
  Synthetic oligonucleotide; AGG chr11 5364289 5364308 5364292 -
gaagtcaagattggtggtca

SEQ ID NO: 32995 - DNA, 20 bp, Artificial Sequence
  Synthetic oligonucleotide; GAG chr11 5364284 5364303 5364287 -
caagattggtggtcaaggtc

SEQ ID NO: 32996 - DNA, 20 bp, Artificial Sequence
  Synthetic oligonucleotide; AGG chr11 5364283 5364302 5364286 -
aagattggtggtcaaggtcg

SEQ ID NO: 32997 - DNA, 20 bp, Artificial Sequence
  Synthetic oligonucleotide; GGG chr11 5364282 5364301 5364285 -
agattggtggtcaaggtcga

SEQ ID NO: 32998 - DNA, 20 bp, Artificial Sequence
  Synthetic oligonucleotide; AAG chr11 5364278 5364297 5364281 -
tggtggtcaaggtcgaggga

SEQ ID NO: 32999 - DNA, 20 bp, Artificial Sequence
  Synthetic oligonucleotide; CAG chr11 5364271 5364290 5364274 -
caaggtcgagggaaagtgca

SEQ ID NO: 33000 - DNA, 20 bp, Artificial Sequence
  Synthetic oligonucleotide; AAG chr11 5364263 5364282 5364266 -
agggaaagtgcacagatcaa

SEQ ID NO: 33001 - DNA, 20 bp, Artificial Sequence
  Synthetic oligonucleotide; TAG chr11 5364233 5364252 5364236 -
aactatgtcaaactttgtca

SEQ ID NO: 33002 - DNA, 20 bp, Artificial Sequence
  Synthetic oligonucleotide; TAG chr11 5364229 5364248 5364232 -
atgtcaaactttgtcatagc

SEQ ID NO: 33003 - DNA, 20 bp, Artificial Sequence
  Synthetic oligonucleotide; GAG chr11 5364224 5364243 5364227 -
aaactttgtcatagctagat

SEQ ID NO: 33004 - DNA, 20 bp, Artificial Sequence
  Synthetic oligonucleotide; AAG chr11 5364208 5364227 5364211 -
agatgagctttttgaactta

SEQ ID NO: 33005 - DNA, 20 bp, Artificial Sequence
  Synthetic oligonucleotide; TAG chr11 5364193 5364212 5364196 -
acttaaagtttgtcaaaatt

SEQ ID NO: 33006 - DNA, 20 bp, Artificial Sequence
  Synthetic oligonucleotide; AGG chr11 5364192 5364211 5364195 -
cttaaagtttgtcaaaattt

SEQ ID NO: 33007 - DNA, 20 bp, Artificial Sequence
  Synthetic oligonucleotide; TAG chr11 5364174 5364193 5364177 -
ttaggaaaatattttgccct

SEQ ID NO: 33008 - DNA, 20 bp, Artificial Sequence
  Synthetic oligonucleotide; AGG chr11 5364173 5364192 5364176 -
taggaaaatattttgccctt

SEQ ID NO: 33009 - DNA, 20 bp, Artificial Sequence
  Synthetic oligonucleotide; TGG chr11 5364170 5364189 5364173 -
gaaaatattttgcccttagg

SEQ ID NO: 33010 - DNA, 20 bp, Artificial Sequence
  Synthetic oligonucleotide; TAG chr11 5364132 5364151 5364135 -
tgaaaattttactctttctt

SEQ ID NO: 33011 - DNA, 20 bp, Artificial Sequence
  Synthetic oligonucleotide; GAG chr11 5364125 5364144 5364128 -
tttactctttctttagtgtt

SEQ ID NO: 33012 - DNA, 20 bp, Artificial Sequence
  Synthetic oligonucleotide; TGG chr11 5364077 5364096 5364080 -
aatcgaccttattgcaacca

SEQ ID NO: 33013 - DNA, 20 bp, Artificial Sequence
  Synthetic oligonucleotide; GAG chr11 5364075 5364094 5364078 -
tcgaccttattgcaaccatg

SEQ ID NO: 33014 - DNA, 20 bp, Artificial Sequence
  Synthetic oligonucleotide; GAG chr11 5364069 5364088 5364072 -
ttattgcaaccatggagaat

SEQ ID NO: 33015 - DNA, 20 bp, Artificial Sequence
  Synthetic oligonucleotide; TAG chr11 5364065 5364084 5364068 -
tgcaaccatggagaatgaga

SEQ ID NO: 33016 - DNA, 20 bp, Artificial Sequence
  Synthetic oligonucleotide; TGG chr11 5364058 5364077 5364061 -
atggagaatgagatagtacc

SEQ ID NO: 33017 - DNA, 20 bp, Artificial Sequence
  Synthetic oligonucleotide; CAG chr11 5364053 5364072 5364056 -
gaatgagatagtacctggct

SEQ ID NO: 33018 - DNA, 20 bp, Artificial Sequence
  Synthetic oligonucleotide; GAG chr11 5364051 5364070 5364054 -
atgagatagtacctggctca

SEQ ID NO: 33019 - DNA, 20 bp, Artificial Sequence
  Synthetic oligonucleotide; AGG chr11 5364050 5364069 5364053 -
tgagatagtacctggctcag

SEQ ID NO: 33020 - DNA, 20 bp, Artificial Sequence
  Synthetic oligonucleotide; TGG chr11 5364029 5364048 5364032 -
ggtccacatcacataatatg

SEQ ID NO: 33021 - DNA, 20 bp, Artificial Sequence
  Synthetic oligonucleotide; GGG chr11 5364028 5364047 5364031 -
gtccacatcacataatatgt

SEQ ID NO: 33022 - DNA, 20 bp, Artificial Sequence
  Synthetic oligonucleotide; AAG chr11 5364001 5364020 5364004 -
tctatcactacactgttgtg

SEQ ID NO: 33023 - DNA, 20 bp, Artificial Sequence
  Synthetic oligonucleotide; CAG chr11 5363988 5364007 5363991 -
tgttgtgaagccctgttctc

SEQ ID NO: 33024 - DNA, 20 bp, Artificial Sequence
  Synthetic oligonucleotide; CAG chr11 5363983 5364002 5363986 -
tgaagccctgttctccagcc

SEQ ID NO: 33025 - DNA, 20 bp, Artificial Sequence
  Synthetic oligonucleotide; AGG chr11 5363982 5364001 5363985 -
gaagccctgttctccagccc

SEQ ID NO: 33026 - DNA, 20 bp, Artificial Sequence
  Synthetic oligonucleotide; AAG chr11 5363959 5363978 5363962 -
cattcttccattcctaacac

SEQ ID NO: 33027 - DNA, 20 bp, Artificial Sequence
  Synthetic oligonucleotide; CAG chr11 5363942 5363961 5363945 -
cacaagcttctcctccttta

SEQ ID NO: 33028 - DNA, 20 bp, Artificial Sequence
  Synthetic oligonucleotide; TGG chr11 5363936 5363955 5363939 -
cttctcctcctttacagaaa

SEQ ID NO: 33029 - DNA, 20 bp, Artificial Sequence
  Synthetic oligonucleotide; GGG chr11 5363935 5363954 5363938 -
ttctcctcctttacagaaat

SEQ ID NO: 33030 - DNA, 20 bp, Artificial Sequence
  Synthetic oligonucleotide; GAG chr11 5363929 5363948 5363932 -
tcctttacagaaatgggtct

SEQ ID NO: 33031 - DNA, 20 bp, Artificial Sequence
  Synthetic oligonucleotide; GAG chr11 5363895 5363914 5363898 -
tatacctgccatgtcatgct

SEQ ID NO: 33032 - DNA, 20 bp, Artificial Sequence
  Synthetic oligonucleotide; TGG chr11 5363892 5363911 5363895 -
acctgccatgtcatgctgag

SEQ ID NO: 33033 - DNA, 20 bp, Artificial Sequence
  Synthetic oligonucleotide; GGG chr11 5363891 5363910 5363894 -
cctgccatgtcatgctgagt

SEQ ID NO: 33034 - DNA, 20 bp, Artificial Sequence
  Synthetic oligonucleotide; GGG chr11 5363890 5363909 5363893 -
ctgccatgtcatgctgagtg

SEQ ID NO: 33035 - DNA, 20 bp, Artificial Sequence
  Synthetic oligonucleotide; GGG chr11 5363889 5363908 5363892 -
tgccatgtcatgctgagtgg

SEQ ID NO: 33036 - DNA, 20 bp, Artificial Sequence
  Synthetic oligonucleotide; TGG chr11 5363885 5363904 5363888 -
atgtcatgctgagtgggggc

SEQ ID NO: 33037 - DNA, 20 bp, Artificial Sequence
  Synthetic oligonucleotide; GGG chr11 5363884 5363903 5363887 -
tgtcatgctgagtgggggct

SEQ ID NO: 33038 - DNA, 20 bp, Artificial Sequence
  Synthetic oligonucleotide; GGG chr11 5363883 5363902 5363886 -
gtcatgctgagtgggggctg

SEQ ID NO: 33039 - DNA, 20 bp, Artificial Sequence
  Synthetic oligonucleotide; AAG chr11 5363874 5363893 5363877 -
agtgggggctggggtttgca

SEQ ID NO: 33040 - DNA, 20 bp, Artificial Sequence
  Synthetic oligonucleotide; GAG chr11 5363872 5363891 5363875 -
tgggggctggggtttgcaaa

SEQ ID NO: 33041 - DNA, 20 bp, Artificial Sequence
  Synthetic oligonucleotide; GAG chr11 5363870 5363889 5363873 -
ggggctggggtttgcaaaga

SEQ ID NO: 33042 - DNA, 20 bp, Artificial Sequence
  Synthetic oligonucleotide; AAG chr11 5363867 5363886 5363870 -
gctggggtttgcaaagagag

SEQ ID NO: 33043 - DNA, 20 bp, Artificial Sequence
  Synthetic oligonucleotide; CAG chr11 5363863 5363882 5363866 -
gggtttgcaaagagagaaga

SEQ ID NO: 33044 - DNA, 20 bp, Artificial Sequence
  Synthetic oligonucleotide; TAG chr11 5363859 5363878 5363862 -
ttgcaaagagagaagacagc

SEQ ID NO: 33045 - DNA, 20 bp, Artificial Sequence
  Synthetic oligonucleotide; AGG chr11 5363858 5363877 5363861 -
tgcaaagagagaagacagct

SEQ ID NO: 33046 - DNA, 20 bp, Artificial Sequence
  Synthetic oligonucleotide; GGG chr11 5363857 5363876 5363860 -
gcaaagagagaagacagcta

SEQ ID NO: 33047 - DNA, 20 bp, Artificial Sequence
  Synthetic oligonucleotide; TGG chr11 5363841 5363860 5363844 -
gctagggaacataattgcta

SEQ ID NO: 33048 - DNA, 20 bp, Artificial Sequence
  Synthetic oligonucleotide; TAG chr11 5363811 5363830 5363814 -
tttctattgtacactaaata

SEQ ID NO: 33049 - DNA, 20 bp, Artificial Sequence
  Synthetic oligonucleotide; TGG chr11 5363806 5363825 5363809 -
attgtacactaaatatagtc

SEQ ID NO: 33050 - DNA, 20 bp, Artificial Sequence
  Synthetic oligonucleotide; TGG chr11 5363791 5363810 5363794 -
tagtctggatgtattgcata

SEQ ID NO: 33051 - DNA, 20 bp, Artificial Sequence
  Synthetic oligonucleotide; TAG chr11 5363784 5363803 5363787 -
gatgtattgcatatggtccc

SEQ ID NO: 33052 - DNA, 20 bp, Artificial Sequence
  Synthetic oligonucleotide; TAG chr11 5363774 5363793 5363777 -
atatggtccctagtttttaa

SEQ ID NO: 33053 - DNA, 20 bp, Artificial Sequence
  Synthetic oligonucleotide; CAG chr11 5363733 5363752 5363736 -
actttcccgctttccaataa

SEQ ID NO: 33054 - DNA, 20 bp, Artificial Sequence
  Synthetic oligonucleotide; TGG chr11 5363725 5363744 5363728 -
gctttccaataacagaatga

SEQ ID NO: 33055 - DNA, 20 bp, Artificial Sequence
  Synthetic oligonucleotide; AAG chr11 5363721 5363740 5363724 -
tccaataacagaatgatgga

SEQ ID NO: 33056 - DNA, 20 bp, Artificial Sequence
  Synthetic oligonucleotide; AAG chr11 5363710 5363729 5363713 -
aatgatggaaagaccttcac

SEQ ID NO: 33057 - DNA, 20 bp, Artificial Sequence
  Synthetic oligonucleotide; AAG chr11 5363698 5363717 5363701 -
accttcacaagtccaaacac

SEQ ID NO: 33058 - DNA, 20 bp, Artificial Sequence
  Synthetic oligonucleotide; TGG chr11 5363691 5363710 5363694 -
caagtccaaacacaagcaaa

SEQ ID NO: 33059 - DNA, 20 bp, Artificial Sequence
  Synthetic oligonucleotide; TGG chr11 5363683 5363702 5363686 -
aacacaagcaaatggccaaa

SEQ ID NO: 33060 - DNA, 20 bp, Artificial Sequence
  Synthetic oligonucleotide; CAG chr11 5363680 5363699 5363683 -
acaagcaaatggccaaatgg

SEQ ID NO: 33061 - DNA, 20 bp, Artificial Sequence
  Synthetic oligonucleotide; GAG chr11 5363678 5363697 5363681 -
aagcaaatggccaaatggca

SEQ ID NO: 33062 - DNA, 20 bp, Artificial Sequence
  Synthetic oligonucleotide; AAG chr11 5363653 5363672 5363656 -
gttctttttctgtgtcacat

SEQ ID NO: 33063 - DNA, 20 bp, Artificial Sequence
  Synthetic oligonucleotide; CAG chr11 5363646 5363665 5363649 -
ttctgtgtcacataagattc

SEQ ID NO: 33064 - DNA, 20 bp, Artificial Sequence
  Synthetic oligonucleotide; TAG chr11 5363631 5363650 5363634 -
gattccagacaatataatct

SEQ ID NO: 33065 - DNA, 20 bp, Artificial Sequence
  Synthetic oligonucleotide; TAG chr11 5363628 5363647 5363631 -
tccagacaatataatcttag

SEQ ID NO: 33066 - DNA, 20 bp, Artificial Sequence
  Synthetic oligonucleotide; GAG chr11 5363618 5363637 5363621 -
ataatcttagtagtatctat

SEQ ID NO: 33067 - DNA, 20 bp, Artificial Sequence
  Synthetic oligonucleotide; TGG chr11 5363567 5363586 5363570 -
tgcattcacactcaaaaact

SEQ ID NO: 33068 - DNA, 20 bp, Artificial Sequence
  Synthetic oligonucleotide; TGG chr11 5363554 5363573 5363557 -
aaaaacttggtatctgtgct

SEQ ID NO: 33069 - DNA, 20 bp, Artificial Sequence
  Synthetic oligonucleotide; AAG chr11 5363543 5363562 5363546 -
atctgtgcttggtttaataa

SEQ ID NO: 33070 - DNA, 20 bp, Artificial Sequence
  Synthetic oligonucleotide; TAG chr11 5363540 5363559 5363543 -
tgtgcttggtttaataaaag

SEQ ID NO: 33071 - DNA, 20 bp, Artificial Sequence
  Synthetic oligonucleotide; GAG chr11 5363536 5363555 5363539 -
cttggtttaataaaagtagt

SEQ ID NO: 33072 - DNA, 20 bp, Artificial Sequence
  Synthetic oligonucleotide; TGG chr11 5363524 5363543 5363527 -
aaagtagtgagtgtacctca

SEQ ID NO: 33073 - DNA, 20 bp, Artificial Sequence
  Synthetic oligonucleotide; GAG chr11 5363522 5363541 5363525 -
agtagtgagtgtacctcatg

SEQ ID NO: 33074 - DNA, 20 bp, Artificial Sequence
  Synthetic oligonucleotide; GAG chr11 5363517 5363536 5363520 -
tgagtgtacctcatggagct

SEQ ID NO: 33075 - DNA, 20 bp, Artificial Sequence
  Synthetic oligonucleotide; TGG chr11 5363514 5363533 5363517 -
gtgtacctcatggagctgag

SEQ ID NO: 33076 - DNA, 20 bp, Artificial Sequence
  Synthetic oligonucleotide; TGG chr11 5363511 5363530 5363514 -
tacctcatggagctgagtgg

SEQ ID NO: 33077 - DNA, 20 bp, Artificial Sequence
  Synthetic oligonucleotide; TGG chr11 5363483 5363502 5363486 -
tgtgtttatgattgtgtgtg

SEQ ID NO: 33078 - DNA, 20 bp, Artificial Sequence
  Synthetic oligonucleotide; GAG chr11 5363469 5363488 5363472 -
tgtgtgtggcgcttttgtgt

SEQ ID NO: 33079 - DNA, 20 bp, Artificial Sequence
  Synthetic oligonucleotide; GAG chr11 5363467 5363486 5363470 -
tgtgtggcgcttttgtgtga

SEQ ID NO: 33080 - DNA, 20 bp, Artificial Sequence
  Synthetic oligonucleotide; GAG chr11 5363465 5363484 5363468 -
tgtggcgcttttgtgtgaga

SEQ ID NO: 33081 - DNA, 20 bp, Artificial Sequence
  Synthetic oligonucleotide; GAG chr11 5363463 5363482 5363466 -
tggcgcttttgtgtgagaga

SEQ ID NO: 33082 - DNA, 20 bp, Artificial Sequence
  Synthetic oligonucleotide; GAG chr11 5363461 5363480 5363464 -
gcgcttttgtgtgagagaga

SEQ ID NO: 33083 - DNA, 20 bp, Artificial Sequence
  Synthetic oligonucleotide; AAG chr11 5363440 5363459 5363443 -
agtgtgtgtgtatgtgtgtc

SEQ ID NO: 33084 - DNA, 20 bp, Artificial Sequence
  Synthetic oligonucleotide; GAG chr11 5363438 5363457 5363441 -
tgtgtgtgtatgtgtgtcaa

SEQ ID NO: 33085 - DNA, 20 bp, Artificial Sequence
  Synthetic oligonucleotide; AGG chr11 5363437 5363456 5363440 -
gtgtgtgtatgtgtgtcaag

SEQ ID NO: 33086 - DNA, 20 bp, Artificial Sequence
  Synthetic oligonucleotide; AAG chr11 5363432 5363451 5363435 -
tgtatgtgtgtcaagaggtt

SEQ ID NO: 33087 - DNA, 20 bp, Artificial Sequence
  Synthetic oligonucleotide; AGG chr11 5363431 5363450 5363434 -
gtatgtgtgtcaagaggtta

SEQ ID NO: 33088 - DNA, 20 bp, Artificial Sequence
  Synthetic oligonucleotide; GGG chr11 5363430 5363449 5363433 -
tatgtgtgtcaagaggttaa

SEQ ID NO: 33089 - DNA, 20 bp, Artificial Sequence
  Synthetic oligonucleotide; AAG chr11 5363423 5363442 5363426 -
gtcaagaggttaagggctta

SEQ ID NO: 33090 - DNA, 20 bp, Artificial Sequence
  Synthetic oligonucleotide; AGG chr11 5363422 5363441 5363425 -
tcaagaggttaagggcttaa

SEQ ID NO: 33091 - DNA, 20 bp, Artificial Sequence
  Synthetic oligonucleotide; TGG chr11 5363409 5363428 5363412 -
ggcttaaaggaacaattaat

SEQ ID NO: 33092 - DNA, 20 bp, Artificial Sequence
  Synthetic oligonucleotide; TAG chr11 5363402 5363421 5363405 -
aggaacaattaattggtgat

SEQ ID NO: 33093 - DNA, 20 bp, Artificial Sequence
  Synthetic oligonucleotide; AGG chr11 5363401 5363420 5363404 -
ggaacaattaattggtgatt

SEQ ID NO: 33094 - DNA, 20 bp, Artificial Sequence
  Synthetic oligonucleotide; TAG chr11 5363380 5363399 5363383 -
ggatcatgtactcaacacca

SEQ ID NO: 33095 - DNA, 20 bp, Artificial Sequence
  Synthetic oligonucleotide; AAG chr11 5363373 5363392 5363376 -
gtactcaacaccatagcttg

SEQ ID NO: 33096 - DNA, 20 bp, Artificial Sequence
  Synthetic oligonucleotide; CGG chr11 5363289 5363308 5363292 -
aacgatgtctgtccactcac

SEQ ID NO: 33097 - DNA, 20 bp, Artificial Sequence
  Synthetic oligonucleotide; GAG chr11 5363239 5363258 5363242 -
gtgtgtgtgtgtgtgtgtgt

SEQ ID NO: 33098 - DNA, 20 bp, Artificial Sequence
  Synthetic oligonucleotide; AGG chr11 5363238 5363257 5363241 -
tgtgtgtgtgtgtgtgtgtg

SEQ ID NO: 33099 - DNA, 20 bp, Artificial Sequence
  Synthetic oligonucleotide; GGG chr11 5363237 5363256 5363240 -
gtgtgtgtgtgtgtgtgtga

SEQ ID NO: 33100 - DNA, 20 bp, Artificial Sequence
  Synthetic oligonucleotide; GGG chr11 5363236 5363255 5363239 -
tgtgtgtgtgtgtgtgtgag

SEQ ID NO: 33101 - DNA, 20 bp, Artificial Sequence
  Synthetic oligonucleotide; TGG chr11 5363232 5363251 5363235 -
tgtgtgtgtgtgtgaggggt

SEQ ID NO: 33102 - DNA, 20 bp, Artificial Sequence
  Synthetic oligonucleotide; GGG chr11 5363231 5363250 5363234 -
gtgtgtgtgtgtgaggggtt

SEQ ID NO: 33103 - DNA, 20 bp, Artificial Sequence
  Synthetic oligonucleotide; TGG chr11 5363221 5363240 5363224 -
gtgaggggttgggttcgttg

SEQ ID NO: 33104 - DNA, 20 bp, Artificial Sequence
  Synthetic oligonucleotide; GGG chr11 5363220 5363239 5363223 -
tgaggggttgggttcgttgt

SEQ ID NO: 33105 - DNA, 20 bp, Artificial Sequence
  Synthetic oligonucleotide; GGG chr11 5363219 5363238 5363222 -
gaggggttgggttcgttgtg

SEQ ID NO: 33106 - DNA, 20 bp, Artificial Sequence
  Synthetic oligonucleotide; GAG chr11 5363208 5363227 5363211 -
ttcgttgtggggaaacactt

SEQ ID NO: 33107 - DNA, 20 bp, Artificial Sequence
  Synthetic oligonucleotide; CAG chr11 5363177 5363196 5363180 -
ttgatgaaaaatgatttctc

SEQ ID NO: 33108 - DNA, 20 bp, Artificial Sequence
  Synthetic oligonucleotide; GAG chr11 5363148 5363167 5363151 -
cattctgttcgtaaaacttt

SEQ ID NO: 33109 - DNA, 20 bp, Artificial Sequence
  Synthetic oligonucleotide; AAG chr11 5363140 5363159 5363143 -
tcgtaaaactttgagttttg

SEQ ID NO: 33110 - DNA, 20 bp, Artificial Sequence
  Synthetic oligonucleotide; CAG chr11 5363132 5363151 5363135 -
ctttgagttttgaagacact

SEQ ID NO: 33111 - DNA, 20 bp, Artificial Sequence
  Synthetic oligonucleotide; AGG chr11 5363131 5363150 5363134 -
tttgagttttgaagacactc

SEQ ID NO: 33112 - DNA, 20 bp, Artificial Sequence
  Synthetic oligonucleotide; GGG chr11 5363130 5363149 5363133 -
ttgagttttgaagacactca

SEQ ID NO: 33113 - DNA, 20 bp, Artificial Sequence
  Synthetic oligonucleotide; AAG chr11 5363112 5363131 5363115 -
cagggtctctttcttccctt

SEQ ID NO: 33114 - DNA, 20 bp, Artificial Sequence
  Synthetic oligonucleotide; TGG chr11 5363099 5363118 5363102 -
ttcccttaagctttctctca

SEQ ID NO: 33115 - DNA, 20 bp, Artificial Sequence
  Synthetic oligonucleotide; GAG chr11 5363097 5363116 5363100 -
cccttaagctttctctcatg

SEQ ID NO: 33116 - DNA, 20 bp, Artificial Sequence
  Synthetic oligonucleotide; AGG chr11 5363096 5363115 5363099 -
ccttaagctttctctcatgg

SEQ ID NO: 33117 - DNA, 20 bp, Artificial Sequence
  Synthetic oligonucleotide; CAG chr11 5363084 5363103 5363087 -
tctcatggaggaatgccact

SEQ ID NO: 33118 - DNA, 20 bp, Artificial Sequence
  Synthetic oligonucleotide; TAG chr11 5363072 5363091 5363075 -
atgccactcagacatctact

SEQ ID NO: 33119 - DNA, 20 bp, Artificial Sequence
  Synthetic oligonucleotide; TGG chr11 5363043 5363062 5363046 -
ttacaacacttgcatttcct

SEQ ID NO: 33120 - DNA, 20 bp, Artificial Sequence
  Synthetic oligonucleotide; GGG chr11 5363042 5363061 5363045 -
tacaacacttgcatttcctt

SEQ ID NO: 33121 - DNA, 20 bp, Artificial Sequence
  Synthetic oligonucleotide; AAG chr11 5362944 5362963 5362947 -
catacatctgcatttattat

SEQ ID NO: 33122 - DNA, 20 bp, Artificial Sequence
  Synthetic oligonucleotide; CAG chr11 5362938 5362957 5362941 -
tctgcatttattataagcaa

SEQ ID NO: 33123 - DNA, 20 bp, Artificial Sequence
  Synthetic oligonucleotide; AGG chr11 5362937 5362956 5362940 -
ctgcatttattataagcaac

SEQ ID NO: 33124 - DNA, 20 bp, Artificial Sequence
  Synthetic oligonucleotide; CGG chr11 5362934 5362953 5362937 -
catttattataagcaacagg

SEQ ID NO: 33125 - DNA, 20 bp, Artificial Sequence
  Synthetic oligonucleotide; GGG chr11 5362933 5362952 5362936 -
atttattataagcaacaggc

SEQ ID NO: 33126 - DNA, 20 bp, Artificial Sequence
  Synthetic oligonucleotide; CAG chr11 5362923 5362942 5362926 -
agcaacaggcgggacacttc

SEQ ID NO: 33127 - DNA, 20 bp, Artificial Sequence
  Synthetic oligonucleotide; TAG chr11 5362917 5362936 5362920 -
aggcgggacacttccagcaa

SEQ ID NO: 33128 - DNA, 20 bp, Artificial Sequence
  Synthetic oligonucleotide; AAG chr11 5362913 5362932 5362916 -
gggacacttccagcaataga

SEQ ID NO: 33129 - DNA, 20 bp, Artificial Sequence
  Synthetic oligonucleotide; AAG chr11 5362894 5362913 5362897 -
aaagaaaacttaatttacaa

SEQ ID NO: 33130 - DNA, 20 bp, Artificial Sequence
  Synthetic oligonucleotide; CAG chr11 5362891 5362910 5362894 -
gaaaacttaatttacaaaag

SEQ ID NO: 33131 - DNA, 20 bp, Artificial Sequence
  Synthetic oligonucleotide; AGG chr11 5362890 5362909 5362893 -
aaaacttaatttacaaaagc

SEQ ID NO: 33132 - DNA, 20 bp, Artificial Sequence
  Synthetic oligonucleotide; GGG chr11 5362889 5362908 5362892 -
aaacttaatttacaaaagca

SEQ ID NO: 33133 - DNA, 20 bp, Artificial Sequence
  Synthetic oligonucleotide; CAG chr11 5362883 5362902 5362886 -
aatttacaaaagcagggatt

SEQ ID NO: 33134 - DNA, 20 bp, Artificial Sequence
  Synthetic oligonucleotide; AAG chr11 5362878 5362897 5362881 -
acaaaagcagggattcagtg

SEQ ID NO: 33135 - DNA, 20 bp, Artificial Sequence
  Synthetic oligonucleotide; TGG chr11 5362870 5362889 5362873 -
agggattcagtgaagccacc

SEQ ID NO: 33136 - DNA, 20 bp, Artificial Sequence
  Synthetic oligonucleotide; TGG chr11 5362857 5362876 5362860 -
agccacctggttgttactct

SEQ ID NO: 33137 - DNA, 20 bp, Artificial Sequence
  Synthetic oligonucleotide; GGG chr11 5362856 5362875 5362859 -
gccacctggttgttactctt

SEQ ID NO: 33138 - DNA, 20 bp, Artificial Sequence
  Synthetic oligonucleotide; TAG chr11 5362843 5362862 5362846 -
tactcttgggcactcacatg

SEQ ID NO: 33139 - DNA, 20 bp, Artificial Sequence
  Synthetic oligonucleotide; CAG chr11 5362831 5362850 5362834 -
ctcacatgtagatgccaacc

SEQ ID NO: 33140 - DNA, 20 bp, Artificial Sequence
  Synthetic oligonucleotide; GAG chr11 5362829 5362848 5362832 -
cacatgtagatgccaaccca

SEQ ID NO: 33141 - DNA, 20 bp, Artificial Sequence
  Synthetic oligonucleotide; CAG chr11 5362823 5362842 5362826 -
tagatgccaacccagagcat

SEQ ID NO: 33142 - DNA, 20 bp, Artificial Sequence
  Synthetic oligonucleotide; AGG chr11 5362822 5362841 5362825 -
agatgccaacccagagcatc

SEQ ID NO: 33143 - DNA, 20 bp, Artificial Sequence
  Synthetic oligonucleotide; AAG chr11 5362819 5362838 5362822 -
tgccaacccagagcatcagg

SEQ ID NO: 33144 - DNA, 20 bp, Artificial Sequence
  Synthetic oligonucleotide; GAG chr11 5362817 5362836 5362820 -
ccaacccagagcatcaggaa

SEQ ID NO: 33145 - DNA, 20 bp, Artificial Sequence
  Synthetic oligonucleotide; AGG chr11 5362816 5362835 5362819 -
caacccagagcatcaggaag

SEQ ID NO: 33146 - DNA, 20 bp, Artificial Sequence
  Synthetic oligonucleotide; AAG chr11 5362807 5362826 5362810 -
gcatcaggaagaggacttca

SEQ ID NO: 33147 - DNA, 20 bp, Artificial Sequence
  Synthetic oligonucleotide; AAG chr11 5362798 5362817 5362801 -
agaggacttcaaagcccatg

SEQ ID NO: 33148 - DNA, 20 bp, Artificial Sequence
  Synthetic oligonucleotide; GAG chr11 5362796 5362815 5362799 -
aggacttcaaagcccatgaa

SEQ ID NO: 33149 - DNA, 20 bp, Artificial Sequence
  Synthetic oligonucleotide; GAG chr11 5362792 5362811 5362795 -
cttcaaagcccatgaagagt

SEQ ID NO: 33150 - DNA, 20 bp, Artificial Sequence
  Synthetic oligonucleotide; AGG chr11 5362791 5362810 5362794 -
ttcaaagcccatgaagagtg

SEQ ID NO: 33151 - DNA, 20 bp, Artificial Sequence
  Synthetic oligonucleotide; AAG chr11 5362783 5362802 5362786 -
ccatgaagagtgaggccacc

SEQ ID NO: 33152 - DNA, 20 bp, Artificial Sequence
  Synthetic oligonucleotide; AGG chr11 5362782 5362801 5362785 -
catgaagagtgaggccacca

SEQ ID NO: 33153 - DNA, 20 bp, Artificial Sequence
  Synthetic oligonucleotide; GAG chr11 5362780 5362799 5362783 -
tgaagagtgaggccaccaag

SEQ ID NO: 33154 - DNA, 20 bp, Artificial Sequence
  Synthetic oligonucleotide; TAG chr11 5362767 5362786 5362770 -
caccaaggagatactcttta

SEQ ID NO: 33155 - DNA, 20 bp, Artificial Sequence
  Synthetic oligonucleotide; AAG chr11 5362757 5362776 5362760 -
atactctttatagatatcac

SEQ ID NO: 33156 - DNA, 20 bp, Artificial Sequence
  Synthetic oligonucleotide; TGG chr11 5362748 5362767 5362751 -
atagatatcacaagtgtact

SEQ ID NO: 33157 - DNA, 20 bp, Artificial Sequence
  Synthetic oligonucleotide; TAG chr11 5362745 5362764 5362748 -
gatatcacaagtgtacttgg

SEQ ID NO: 33158 - DNA, 20 bp, Artificial Sequence
  Synthetic oligonucleotide; GAG chr11 5362743 5362762 5362746 -
tatcacaagtgtacttggta

SEQ ID NO: 33159 - DNA, 20 bp, Artificial Sequence
  Synthetic oligonucleotide; AGG chr11 5362742 5362761 5362745 -
atcacaagtgtacttggtag

SEQ ID NO: 33160 - DNA, 20 bp, Artificial Sequence
  Synthetic oligonucleotide; AAG chr11 5362725 5362744 5362728 -
tagaggtgacctcgtaaaca

SEQ ID NO: 33161 - DNA, 20 bp, Artificial Sequence
  Synthetic oligonucleotide; CAG chr11 5362719 5362738 5362722 -
tgacctcgtaaacaaagaac

SEQ ID NO: 33162 - DNA, 20 bp, Artificial Sequence
  Synthetic oligonucleotide; AGG chr11 5362718 5362737 5362721 -
gacctcgtaaacaaagaacc

SEQ ID NO: 33163 - DNA, 20 bp, Artificial Sequence
  Synthetic oligonucleotide; TGG chr11 5362715 5362734 5362718 -
ctcgtaaacaaagaaccagg

SEQ ID NO: 33164 - DNA, 20 bp, Artificial Sequence
  Synthetic oligonucleotide; AAG chr11 5362710 5362729 5362713 -
aaacaaagaaccaggtggtg

SEQ ID NO: 33165 - DNA, 20 bp, Artificial Sequence
  Synthetic oligonucleotide; TGG chr11 5362697 5362716 5362700 -
ggtggtgaagaacatgtcga

SEQ ID NO: 33166 - DNA, 20 bp, Artificial Sequence
  Synthetic oligonucleotide; AAG chr11 5362690 5362709 5362693 -
aagaacatgtcgatggccaa

SEQ ID NO: 33167 - DNA, 20 bp, Artificial Sequence
  Synthetic oligonucleotide; CAG chr11 5362678 5362697 5362681 -
atggccaaaagctctacaat

SEQ ID NO: 33168 - DNA, 20 bp, Artificial Sequence
  Synthetic oligonucleotide; TGG chr11 5362674 5362693 5362677 -
ccaaaagctctacaatcaga

SEQ ID NO: 33169 - DNA, 20 bp, Artificial Sequence
  Synthetic oligonucleotide; GGG chr11 5362673 5362692 5362676 -
caaaagctctacaatcagat

SEQ ID NO: 33170 - DNA, 20 bp, Artificial Sequence
  Synthetic oligonucleotide; GGG chr11 5362672 5362691 5362675 -
aaaagctctacaatcagatg

SEQ ID NO: 33171 - DNA, 20 bp, Artificial Sequence
  Synthetic oligonucleotide; GGG chr11 5362671 5362690 5362674 -
aaagctctacaatcagatgg

SEQ ID NO: 33172 - DNA, 20 bp, Artificial Sequence
  Synthetic oligonucleotide; AAG chr11 5362668 5362687 5362671 -
gctctacaatcagatggggg

SEQ ID NO: 33173 - DNA, 20 bp, Artificial Sequence
  Synthetic oligonucleotide; CAG chr11 5362664 5362683 5362667 -
tacaatcagatgggggaaga

SEQ ID NO: 33174 - DNA, 20 bp, Artificial Sequence
  Synthetic oligonucleotide; TGG chr11 5362660 5362679 5362663 -
atcagatgggggaagacagc

SEQ ID NO: 33175 - DNA, 20 bp, Artificial Sequence
  Synthetic oligonucleotide; GGG chr11 5362659 5362678 5362662 -
tcagatgggggaagacagct

SEQ ID NO: 33176 - DNA, 20 bp, Artificial Sequence
  Synthetic oligonucleotide; CGG chr11 5362651 5362670 5362654 -
gggaagacagctgggttgac

SEQ ID NO: 33177 - DNA, 20 bp, Artificial Sequence
  Synthetic oligonucleotide; GGG chr11 5362650 5362669 5362653 -
ggaagacagctgggttgacc

SEQ ID NO: 33178 - DNA, 20 bp, Artificial Sequence
  Synthetic oligonucleotide; TGG chr11 5362631 5362650 5362634 -
cgggctgttgtatctgctca

SEQ ID NO: 33179 - DNA, 20 bp, Artificial Sequence
  Synthetic oligonucleotide; GAG chr11 5362624 5362643 5362627 -
ttgtatctgctcatggcctt

SEQ ID NO: 33180 - DNA, 20 bp, Artificial Sequence
  Synthetic oligonucleotide; CAG chr11 5362608 5362627 5362611 -
ccttgagctccattttgccc

SEQ ID NO: 33181 - DNA, 20 bp, Artificial Sequence
  Synthetic oligonucleotide; CAG chr11 5362605 5362624 5362608 -
tgagctccattttgccccag

SEQ ID NO: 33182 - DNA, 20 bp, Artificial Sequence
  Synthetic oligonucleotide; AGG chr11 5362604 5362623 5362607 -
gagctccattttgccccagc

SEQ ID NO: 33183 - DNA, 20 bp, Artificial Sequence
  Synthetic oligonucleotide; AAG chr11 5362599 5362618 5362602 -
ccattttgccccagcaggct

SEQ ID NO: 33184 - DNA, 20 bp, Artificial Sequence
  Synthetic oligonucleotide; CAG chr11 5362581 5362600 5362584 -
ctaagccaccactctgccac

SEQ ID NO: 33185 - DNA, 20 bp, Artificial Sequence
  Synthetic oligonucleotide; AAG chr11 5362578 5362597 5362581 -
agccaccactctgccaccag

SEQ ID NO: 33186 - DNA, 20 bp, Artificial Sequence
  Synthetic oligonucleotide; TAG chr11 5362522 5362541 5362525 -
cttcatctctgctctctgac

SEQ ID NO: 33187 - DNA, 20 bp, Artificial Sequence
  Synthetic oligonucleotide; AGG chr11 5362521 5362540 5362524 -
ttcatctctgctctctgact

SEQ ID NO: 33188 - DNA, 20 bp, Artificial Sequence
  Synthetic oligonucleotide; TAG chr11 5362483 5362502 5362486 -
atgttatctattctgattca

SEQ ID NO: 33189 - DNA, 20 bp, Artificial Sequence
  Synthetic oligonucleotide; CAG chr11 5362476 5362495 5362479 -
ctattctgattcatagtatc

SEQ ID NO: 33190 - DNA, 20 bp, Artificial Sequence
  Synthetic oligonucleotide; TAG chr11 5362473 5362492 5362476 -
ttctgattcatagtatccag

SEQ ID NO: 33191 - DNA, 20 bp, Artificial Sequence
  Synthetic oligonucleotide; AAG chr11 5362441 5362460 5362444 -
aatcatcacattctcattat

SEQ ID NO: 33192 - DNA, 20 bp, Artificial Sequence
  Synthetic oligonucleotide; AGG chr11 5362440 5362459 5362443 -
atcatcacattctcattata

SEQ ID NO: 33193 - DNA, 20 bp, Artificial Sequence
  Synthetic oligonucleotide; AAG chr11 5362409 5362428 5362412 -
ctaatgttcacaattttcca

SEQ ID NO: 33194 - DNA, 20 bp, Artificial Sequence
  Synthetic oligonucleotide; TAG chr11 5362403 5362422 5362406 -
ttcacaattttccaaagcca

SEQ ID NO: 33195 - DNA, 20 bp, Artificial Sequence
  Synthetic oligonucleotide; TAG chr11 5362354 5362373 5362357 -
taaattcctgaccatcttcg

SEQ ID NO: 33196 - DNA, 20 bp, Artificial Sequence
  Synthetic oligonucleotide; TGG chr11 5362344 5362363 5362347 -
accatcttcgtagttgatta

SEQ ID NO: 33197 - DNA, 20 bp, Artificial Sequence
  Synthetic oligonucleotide; TGG chr11 5362334 5362353 5362337 -
tagttgattatggctctgaa

SEQ ID NO: 33198 - DNA, 20 bp, Artificial Sequence
  Synthetic oligonucleotide; AAG chr11 5362320 5362339 5362323 -
tctgaatggctttttgccca

SEQ ID NO: 33199 - DNA, 20 bp, Artificial Sequence
  Synthetic oligonucleotide; CAG chr11 5362313 5362332 5362316 -
ggctttttgcccaaagcatc

SEQ ID NO: 33200 - DNA, 20 bp, Artificial Sequence
  Synthetic oligonucleotide; TGG chr11 5362297 5362316 5362300 -
catccagcaccattttcatc

SEQ ID NO: 33201 - DNA, 20 bp, Artificial Sequence
  Synthetic oligonucleotide; GGG chr11 5362296 5362315 5362299 -
atccagcaccattttcatct

SEQ ID NO: 33202 - DNA, 20 bp, Artificial Sequence
  Synthetic oligonucleotide; TAG chr11 5362293 5362312 5362296 -
cagcaccattttcatctggg

SEQ ID NO: 33203 - DNA, 20 bp, Artificial Sequence
  Synthetic oligonucleotide; TGG chr11 5362280 5362299 5362283 -
atctgggtagtttcccctgc

SEQ ID NO: 33204 - DNA, 20 bp, Artificial Sequence
  Synthetic oligonucleotide; TAG chr11 5362271 5362290 5362274 -
gtttcccctgctggtaaaaa

SEQ ID NO: 33205 - DNA, 20 bp, Artificial Sequence
  Synthetic oligonucleotide; CAG chr11 5362234 5362253 5362237 -
tatctactcccatcccccga

SEQ ID NO: 33206 - DNA, 20 bp, Artificial Sequence
  Synthetic oligonucleotide; CGG chr11 5362226 5362245 5362229 -
cccatcccccgacagaaaca

SEQ ID NO: 33207 - DNA, 20 bp, Artificial Sequence
  Synthetic oligonucleotide; GGG chr11 5362225 5362244 5362228 -
ccatcccccgacagaaacac

SEQ ID NO: 33208 - DNA, 20 bp, Artificial Sequence
  Synthetic oligonucleotide; TGG chr11 5362202 5362221 5362205 -
atccactatcactctctatc

SEQ ID NO: 33209 - DNA, 20 bp, Artificial Sequence
  Synthetic oligonucleotide; GGG chr11 5362201 5362220 5362204 -
tccactatcactctctatct

SEQ ID NO: 33210 - DNA, 20 bp, Artificial Sequence
  Synthetic oligonucleotide; TGG chr11 5362196 5362215 5362199 -
tatcactctctatctgggtg

SEQ ID NO: 33211 - DNA, 20 bp, Artificial Sequence
  Synthetic oligonucleotide; GAG chr11 5362191 5362210 5362194 -
ctctctatctgggtgtggtt

SEQ ID NO: 33212 - DNA, 20 bp, Artificial Sequence
  Synthetic oligonucleotide; CAG chr11 5362174 5362193 5362177 -
gttgagatcttcaaaatctg

SEQ ID NO: 33213 - DNA, 20 bp, Artificial Sequence
  Synthetic oligonucleotide; TAG chr11 5362165 5362184 5362168 -
ttcaaaatctgcagtgctga

SEQ ID NO: 33214 - DNA, 20 bp, Artificial Sequence
  Synthetic oligonucleotide; CAG chr11 5362160 5362179 5362163 -
aatctgcagtgctgatagct

SEQ ID NO: 33215 - DNA, 20 bp, Artificial Sequence
  Synthetic oligonucleotide; TGG chr11 5362155 5362174 5362158 -
gcagtgctgatagctcagca

SEQ ID NO: 33216 - DNA, 20 bp, Artificial Sequence
  Synthetic oligonucleotide; AAG chr11 5362148 5362167 5362151 -
tgatagctcagcatggaatg

SEQ ID NO: 33217 - DNA, 20 bp, Artificial Sequence
  Synthetic oligonucleotide; AAG chr11 5362136 5362155 5362139 -
atggaatgaagtgaaccaac

SEQ ID NO: 33218 - DNA, 20 bp, Artificial Sequence
  Synthetic oligonucleotide; TGG chr11 5362120 5362139 5362123 -
caacaagctctctctgactt

SEQ ID NO: 33219 - DNA, 20 bp, Artificial Sequence
  Synthetic oligonucleotide; AAG chr11 5362112 5362131 5362115 -
tctctctgactttggtttat

SEQ ID NO: 33220 - DNA, 20 bp, Artificial Sequence
  Synthetic oligonucleotide; AGG chr11 5362111 5362130 5362114 -
ctctctgactttggtttata

SEQ ID NO: 33221 - DNA, 20 bp, Artificial Sequence
  Synthetic oligonucleotide; TGG chr11 5362089 5362108 5362092 -
gatttgcatacattttctga

SEQ ID NO: 33222 - DNA, 20 bp, Artificial Sequence
  Synthetic oligonucleotide; TAG chr11 5362082 5362101 5362085 -
atacattttctgatggatac

SEQ ID NO: 33223 - DNA, 20 bp, Artificial Sequence
  Synthetic oligonucleotide; AGG chr11 5362081 5362100 5362084 -
tacattttctgatggatact

SEQ ID NO: 33224 - DNA, 20 bp, Artificial Sequence
  Synthetic oligonucleotide; TGG chr11 5362070 5362089 5362073 -
atggatactaggctcatttc

SEQ ID NO: 33225 - DNA, 20 bp, Artificial Sequence
  Synthetic oligonucleotide; GGG chr11 5362069 5362088 5362072 -
tggatactaggctcatttct

SEQ ID NO: 33226 - DNA, 20 bp, Artificial Sequence
  Synthetic oligonucleotide; CAG chr11 5362060 5362079 5362063 -
ggctcatttctgggaatatg

SEQ ID NO: 33227 - DNA, 20 bp, Artificial Sequence
  Synthetic oligonucleotide; AAG chr11 5362050 5362069 5362053 -
tgggaatatgcagcaattta

SEQ ID NO: 33228 - DNA, 20 bp, Artificial Sequence
  Synthetic oligonucleotide; AAG chr11 5362030 5362049 5362033 -
aagcattgtgcctcatgtca

SEQ ID NO: 33229 - DNA, 20 bp, Artificial Sequence
  Synthetic oligonucleotide; TGG chr11 5361996 5362015 5361999 -
caatctgacactaatctatt

SEQ ID NO: 33230 - DNA, 20 bp, Artificial Sequence
  Synthetic oligonucleotide; AAG chr11 5361992 5362011 5361995 -
ctgacactaatctatttggt

SEQ ID NO: 33231 - DNA, 20 bp, Artificial Sequence
  Synthetic oligonucleotide; TAG chr11 5361976 5361995 5361979 -
tggtaagtttttctttctgt

SEQ ID NO: 33232 - DNA, 20 bp, Artificial Sequence
  Synthetic oligonucleotide; CAG chr11 5361955 5361974 5361958 -
agtctatacccttgtcatta

SEQ ID NO: 33233 - DNA, 20 bp, Artificial Sequence
  Synthetic oligonucleotide; TGG chr11 5361919 5361938 5361922 -
cactctaacttcatcttttt

SEQ ID NO: 33234 - DNA, 20 bp, Artificial Sequence
  Synthetic oligonucleotide; GGG chr11 5361918 5361937 5361921 -
actctaacttcatctttttt

SEQ ID NO: 33235 - DNA, 20 bp, Artificial Sequence
  Synthetic oligonucleotide; GAG chr11 5361916 5361935 5361919 -
tctaacttcatcttttttgg

SEQ ID NO: 33236 - DNA, 20 bp, Artificial Sequence
  Synthetic oligonucleotide; AAG chr11 5361912 5361931 5361915 -
acttcatcttttttgggagt

SEQ ID NO: 33237 - DNA, 20 bp, Artificial Sequence
  Synthetic oligonucleotide; TGG chr11 5361905 5361924 5361908 -
cttttttgggagtaagtact

SEQ ID NO: 33238 - DNA, 20 bp, Artificial Sequence
  Synthetic oligonucleotide; TAG chr11 5361902 5361921 5361905 -
ttttgggagtaagtacttgg

SEQ ID NO: 33239 - DNA, 20 bp, Artificial Sequence
  Synthetic oligonucleotide; TAG chr11 5361893 5361912 5361896 -
taagtacttggtagaacaca

SEQ ID NO: 33240 - DNA, 20 bp, Artificial Sequence
  Synthetic oligonucleotide; GAG chr11 5361891 5361910 5361894 -
agtacttggtagaacacata

SEQ ID NO: 33241 - DNA, 20 bp, Artificial Sequence
  Synthetic oligonucleotide; AGG chr11 5361890 5361909 5361893 -
gtacttggtagaacacatag

SEQ ID NO: 33242 - DNA, 20 bp, Artificial Sequence
  Synthetic oligonucleotide; AAG chr11 5361885 5361904 5361888 -
tggtagaacacatagaggca

SEQ ID NO: 33243 - DNA, 20 bp, Artificial Sequence
  Synthetic oligonucleotide; GAG chr11 5361883 5361902 5361886 -
gtagaacacatagaggcaaa

SEQ ID NO: 33244 - DNA, 20 bp, Artificial Sequence
  Synthetic oligonucleotide; AGG chr11 5361882 5361901 5361885 -
tagaacacatagaggcaaag

SEQ ID NO: 33245 - DNA, 20 bp, Artificial Sequence
  Synthetic oligonucleotide; AAG chr11 5361879 5361898 5361882 -
aacacatagaggcaaagagg

SEQ ID NO: 33246 - DNA, 20 bp, Artificial Sequence
  Synthetic oligonucleotide; TGG chr11 5361875 5361894 5361878 -
catagaggcaaagaggaagc

SEQ ID NO: 33247 - DNA, 20 bp, Artificial Sequence
  Synthetic oligonucleotide; CAG chr11 5361866 5361885 5361869 -
aaagaggaagctggtttatg

SEQ ID NO: 33248 - DNA, 20 bp, Artificial Sequence
  Synthetic oligonucleotide; AAG chr11 5361859 5361878 5361862 -
aagctggtttatgcagcccg

SEQ ID NO: 33249 - DNA, 20 bp, Artificial Sequence
  Synthetic oligonucleotide; GAG chr11 5361857 5361876 5361860 -
gctggtttatgcagcccgaa

SEQ ID NO: 33250 - DNA, 20 bp, Artificial Sequence
  Synthetic oligonucleotide; GAG chr11 5361855 5361874 5361858 -
tggtttatgcagcccgaaga

SEQ ID NO: 33251 - DNA, 20 bp, Artificial Sequence
  Synthetic oligonucleotide; AAG chr11 5361847 5361866 5361850 -
gcagcccgaagagagcaaca

SEQ ID NO: 33252 - DNA, 20 bp, Artificial Sequence
  Synthetic oligonucleotide; AGG chr11 5361846 5361865 5361849 -
cagcccgaagagagcaacaa

SEQ ID NO: 33253 - DNA, 20 bp, Artificial Sequence
  Synthetic oligonucleotide; TAG chr11 5361840 5361859 5361843 -
gaagagagcaacaaaggaaa

SEQ ID NO: 33254 - DNA, 20 bp, Artificial Sequence
  Synthetic oligonucleotide; CAG chr11 5361826 5361845 5361829 -
aggaaatagataatccaaac

SEQ ID NO: 33255 - DNA, 20 bp, Artificial Sequence
  Synthetic oligonucleotide; GAG chr11 5361824 5361843 5361827 -
gaaatagataatccaaacca

SEQ ID NO: 33256 - DNA, 20 bp, Artificial Sequence
  Synthetic oligonucleotide; TGG chr11 5361819 5361838 5361822 -
agataatccaaaccagagtc

SEQ ID NO: 33257 - DNA, 20 bp, Artificial Sequence
  Synthetic oligonucleotide; CAG chr11 5361808 5361827 5361811 -
accagagtctggaactacac

SEQ ID NO: 33258 - DNA, 20 bp, Artificial Sequence
  Synthetic oligonucleotide; GAG chr11 5361806 5361825 5361809 -
cagagtctggaactacacca

SEQ ID NO: 33259 - DNA, 20 bp, Artificial Sequence
  Synthetic oligonucleotide; TGG chr11 5361784 5361803 5361787 -
gatatcattctgtattcccg

SEQ ID NO: 33260 - DNA, 20 bp, Artificial Sequence
  Synthetic oligonucleotide; TAG chr11 5361756 5361775 5361759 -
caacttgattttttcctaac

SEQ ID NO: 33261 - DNA, 20 bp, Artificial Sequence
  Synthetic oligonucleotide; TAG chr11 5361743 5361762 5361746 -
tcctaactagatcactctgc

SEQ ID NO: 33262 - DNA, 20 bp, Artificial Sequence
  Synthetic oligonucleotide; AGG chr11 5361742 5361761 5361745 -
cctaactagatcactctgct

SEQ ID NO: 33263 - DNA, 20 bp, Artificial Sequence
  Synthetic oligonucleotide; GGG chr11 5361741 5361760 5361744 -
ctaactagatcactctgcta

SEQ ID NO: 33264 - DNA, 20 bp, Artificial Sequence
  Synthetic oligonucleotide; AAG chr11 5361731 5361750 5361734 -
cactctgctagggaatgaaa

SEQ ID NO: 33265 - DNA, 20 bp, Artificial Sequence
  Synthetic oligonucleotide; AGG chr11 5361730 5361749 5361733 -
actctgctagggaatgaaaa

SEQ ID NO: 33266 - DNA, 20 bp, Artificial Sequence
  Synthetic oligonucleotide; GAG chr11 5361728 5361747 5361731 -
tctgctagggaatgaaaaag

SEQ ID NO: 33267 - DNA, 20 bp, Artificial Sequence
  Synthetic oligonucleotide; TAG chr11 5361722 5361741 5361725 -
agggaatgaaaaaggagatc

SEQ ID NO: 33268 - DNA, 20 bp, Artificial Sequence
  Synthetic oligonucleotide; AGG chr11 5361721 5361740 5361724 -
gggaatgaaaaaggagatct

SEQ ID NO: 33269 - DNA, 20 bp, Artificial Sequence
  Synthetic oligonucleotide; TAG chr11 5361705 5361724 5361708 -
atctaggattttccctcttc

SEQ ID NO: 33270 - DNA, 20 bp, Artificial Sequence
  Synthetic oligonucleotide; AGG chr11 5361704 5361723 5361707 -
tctaggattttccctcttct

SEQ ID NO: 33271 - DNA, 20 bp, Artificial Sequence
  Synthetic oligonucleotide; AAG chr11 5361692 5361711 5361695 -
cctcttctaggaatttgcaa

SEQ ID NO: 33272 - DNA, 20 bp, Artificial Sequence
  Synthetic oligonucleotide; GAG chr11 5361690 5361709 5361693 -
tcttctaggaatttgcaaaa

SEQ ID NO: 33273 - DNA, 20 bp, Artificial Sequence
  Synthetic oligonucleotide; CAG chr11 5361681 5361700 5361684 -
aatttgcaaaagagattatt

SEQ ID NO: 33274 - DNA, 20 bp, Artificial Sequence
  Synthetic oligonucleotide; AAG chr11 5361678 5361697 5361681 -
ttgcaaaagagattattcag

SEQ ID NO: 33275 - DNA, 20 bp, Artificial Sequence
  Synthetic oligonucleotide; AAG chr11 5361673 5361692 5361676 -
aaagagattattcagaagcc

SEQ ID NO: 33276 - DNA, 20 bp, Artificial Sequence
  Synthetic oligonucleotide; AAG chr11 5361665 5361684 5361668 -
tattcagaagccaagttcta

SEQ ID NO: 33277 - DNA, 20 bp, Artificial Sequence
  Synthetic oligonucleotide; TAG chr11 5361658 5361677 5361661 -
aagccaagttctaaagattt

SEQ ID NO: 33278 - DNA, 20 bp, Artificial Sequence
  Synthetic oligonucleotide; AGG chr11 5361657 5361676 5361660 -
agccaagttctaaagatttt

SEQ ID NO: 33279 - DNA, 20 bp, Artificial Sequence
  Synthetic oligonucleotide; GGG chr11 5361656 5361675 5361659 -
gccaagttctaaagatttta

SEQ ID NO: 33280 - DNA, 20 bp, Artificial Sequence
  Synthetic oligonucleotide; GAG chr11 5361654 5361673 5361657 -
caagttctaaagattttagg

SEQ ID NO: 33281 - DNA, 20 bp, Artificial Sequence
  Synthetic oligonucleotide; TGG chr11 5361647 5361666 5361650 -
taaagattttagggagtctt

SEQ ID NO: 33282 - DNA, 20 bp, Artificial Sequence
  Synthetic oligonucleotide; GGG chr11 5361646 5361665 5361649 -
aaagattttagggagtcttt

SEQ ID NO: 33283 - DNA, 20 bp, Artificial Sequence
  Synthetic oligonucleotide; TAG chr11 5361639 5361658 5361642 -
ttagggagtctttgggatga

SEQ ID NO: 33284 - DNA, 20 bp, Artificial Sequence
  Synthetic oligonucleotide; AAG chr11 5361572 5361591 5361575 -
ccctctctgcaatctctgat

SEQ ID NO: 33285 - DNA, 20 bp, Artificial Sequence
  Synthetic oligonucleotide; CGG chr11 5361543 5361562 5361546 -
gtctactgctcattcctatg

SEQ ID NO: 33286 - DNA, 20 bp, Artificial Sequence
  Synthetic oligonucleotide; GAG chr11 5361541 5361560 5361544 -
ctactgctcattcctatgcg

SEQ ID NO: 33287 - DNA, 20 bp, Artificial Sequence
  Synthetic oligonucleotide; TAG chr11 5361534 5361553 5361537 -
tcattcctatgcggagcctc

SEQ ID NO: 33288 - DNA, 20 bp, Artificial Sequence
  Synthetic oligonucleotide; AGG chr11 5361533 5361552 5361536 -
cattcctatgcggagcctct

SEQ ID NO: 33289 - DNA, 20 bp, Artificial Sequence
  Synthetic oligonucleotide; AAG chr11 5361528 5361547 5361531 -
ctatgcggagcctctaggcc

SEQ ID NO: 33290 - DNA, 20 bp, Artificial Sequence
  Synthetic oligonucleotide; TGG chr11 5361519 5361538 5361522 -
gcctctaggccaagacacac

SEQ ID NO: 33291 - DNA, 20 bp, Artificial Sequence
  Synthetic oligonucleotide; GAG chr11 5361517 5361536 5361520 -
ctctaggccaagacacactg

SEQ ID NO: 33292 - DNA, 20 bp, Artificial Sequence
  Synthetic oligonucleotide; AAG chr11 5361494 5361513 5361497 -
ttctttaccgacctgttcat

SEQ ID NO: 33293 - DNA, 20 bp, Artificial Sequence
  Synthetic oligonucleotide; CAG chr11 5361474 5361493 5361477 -
aagtctgttcattgttgcca

SEQ ID NO: 33294 - DNA, 20 bp, Artificial Sequence
  Synthetic oligonucleotide; AAG chr11 5361453 5361472 5361456 -
agatgtgactatgaacccct

SEQ ID NO: 33295 - DNA, 20 bp, Artificial Sequence
  Synthetic oligonucleotide; TGG chr11 5361448 5361467 5361451 -
tgactatgaacccctaagcc

SEQ ID NO: 33296 - DNA, 20 bp, Artificial Sequence
  Synthetic oligonucleotide; AAG chr11 5361443 5361462 5361446 -
atgaacccctaagcctggtc

SEQ ID NO: 33297 - DNA, 20 bp, Artificial Sequence
  Synthetic oligonucleotide; TGG chr11 5361436 5361455 5361439 -
cctaagcctggtcaagatat

SEQ ID NO: 33298 - DNA, 20 bp, Artificial Sequence
  Synthetic oligonucleotide; TAG chr11 5361416 5361435 5361419 -
tggatccaacaccaactttt

SEQ ID NO: 33299 - DNA, 20 bp, Artificial Sequence
  Synthetic oligonucleotide; CAG chr11 5361405 5361424 5361408 -
ccaactttttagactatact

SEQ ID NO: 33300 - DNA, 20 bp, Artificial Sequence
  Synthetic oligonucleotide; AAG chr11 5361402 5361421 5361405 -
actttttagactatactcag

SEQ ID NO: 33301 - DNA, 20 bp, Artificial Sequence
  Synthetic oligonucleotide; AAG chr11 5361397 5361416 5361400 -
ttagactatactcagaagcc

SEQ ID NO: 33302 - DNA, 20 bp, Artificial Sequence
  Synthetic oligonucleotide; AAG chr11 5361389 5361408 5361392 -
tactcagaagccaagctgca

SEQ ID NO: 33303 - DNA, 20 bp, Artificial Sequence
  Synthetic oligonucleotide; TAG chr11 5361381 5361400 5361384 -
agccaagctgcaaagaaaat

SEQ ID NO: 33304 - DNA, 20 bp, Artificial Sequence
  Synthetic oligonucleotide; CAG chr11 5361375 5361394 5361378 -
gctgcaaagaaaattagttt

SEQ ID NO: 33305 - DNA, 20 bp, Artificial Sequence
  Synthetic oligonucleotide; CGG chr11 5361359 5361378 5361362 -
gtttcagaaactcctcccta

SEQ ID NO: 33306 - DNA, 20 bp, Artificial Sequence
  Synthetic oligonucleotide; CAG chr11 5361321 5361340 5361324 -
tccctccttctttattctcc

SEQ ID NO: 33307 - DNA, 20 bp, Artificial Sequence
  Synthetic oligonucleotide; GAG chr11 5361315 5361334 5361318 -
cttctttattctcccagcct

SEQ ID NO: 33308 - DNA, 20 bp, Artificial Sequence
  Synthetic oligonucleotide; AGG chr11 5361314 5361333 5361317 -
ttctttattctcccagcctg

SEQ ID NO: 33309 - DNA, 20 bp, Artificial Sequence
  Synthetic oligonucleotide; GGG chr11 5361313 5361332 5361316 -
tctttattctcccagcctga

SEQ ID NO: 33310 - DNA, 20 bp, Artificial Sequence
  Synthetic oligonucleotide; TAG chr11 5361307 5361326 5361310 -
ttctcccagcctgagggatt

SEQ ID NO: 33311 - DNA, 20 bp, Artificial Sequence
  Synthetic oligonucleotide; TGG chr11 5361299 5361318 5361302 -
gcctgagggatttagaactt

SEQ ID NO: 33312 - DNA, 20 bp, Artificial Sequence
  Synthetic oligonucleotide; CAG chr11 5361294 5361313 5361297 -
agggatttagaactttggaa

SEQ ID NO: 33313 - DNA, 20 bp, Artificial Sequence
  Synthetic oligonucleotide; AGG chr11 5361293 5361312 5361296 -
gggatttagaactttggaac

SEQ ID NO: 33314 - DNA, 20 bp, Artificial Sequence
  Synthetic oligonucleotide; GAG chr11 5361291 5361310 5361294 -
gatttagaactttggaacag

SEQ ID NO: 33315 - DNA, 20 bp, Artificial Sequence
  Synthetic oligonucleotide; AAG chr11 5361283 5361302 5361286 -
actttggaacaggagtcgct

SEQ ID NO: 33316 - DNA, 20 bp, Artificial Sequence
  Synthetic oligonucleotide; AGG chr11 5361282 5361301 5361285 -
ctttggaacaggagtcgcta

SEQ ID NO: 33317 - DNA, 20 bp, Artificial Sequence
  Synthetic oligonucleotide; TAG chr11 5361265 5361284 5361268 -
ctaaggtttcttcctgcatc

SEQ ID NO: 33318 - DNA, 20 bp, Artificial Sequence
  Synthetic oligonucleotide; AGG chr11 5361264 5361283 5361267 -
taaggtttcttcctgcatct

SEQ ID NO: 33319 - DNA, 20 bp, Artificial Sequence
  Synthetic oligonucleotide; TAG chr11 5361260 5361279 5361263 -
gtttcttcctgcatctaggt

SEQ ID NO: 33320 - DNA, 20 bp, Artificial Sequence
  Synthetic oligonucleotide; AGG chr11 5361259 5361278 5361262 -
tttcttcctgcatctaggtt

SEQ ID NO: 33321 - DNA, 20 bp, Artificial Sequence
  Synthetic oligonucleotide; GGG chr11 5361258 5361277 5361261 -
ttcttcctgcatctaggtta

SEQ ID NO: 33322 - DNA, 20 bp, Artificial Sequence
  Synthetic oligonucleotide; TAG chr11 5361252 5361271 5361255 -
ctgcatctaggttagggaat

SEQ ID NO: 33323 - DNA, 20 bp, Artificial Sequence
  Synthetic oligonucleotide; CAG chr11 5361240 5361259 5361243 -
tagggaattagccacatctc

SEQ ID NO: 33324 - DNA, 20 bp, Artificial Sequence
  Synthetic oligonucleotide; AAG chr11 5361233 5361252 5361236 -
ttagccacatctccagaaat

SEQ ID NO: 33325 - DNA, 20 bp, Artificial Sequence
  Synthetic oligonucleotide; AAG chr11 5361221 5361240 5361224 -
ccagaaataagatttatttt

SEQ ID NO: 33326 - DNA, 20 bp, Artificial Sequence
  Synthetic oligonucleotide; TAG chr11 5361211 5361230 5361214 -
gatttattttaagcatcaca

SEQ ID NO: 33327 - DNA, 20 bp, Artificial Sequence
  Synthetic oligonucleotide; AGG chr11 5361210 5361229 5361213 -
atttattttaagcatcacat

SEQ ID NO: 33328 - DNA, 20 bp, Artificial Sequence
  Synthetic oligonucleotide; GGG chr11 5361209 5361228 5361212 -
tttattttaagcatcacata

SEQ ID NO: 33329 - DNA, 20 bp, Artificial Sequence
  Synthetic oligonucleotide; GGG chr11 5361208 5361227 5361211 -
ttattttaagcatcacatag

SEQ ID NO: 33330 - DNA, 20 bp, Artificial Sequence
  Synthetic oligonucleotide; TAG chr11 5361205 5361224 5361208 -
ttttaagcatcacatagggg

SEQ ID NO: 33331 - DNA, 20 bp, Artificial Sequence
  Synthetic oligonucleotide; AAG chr11 5361200 5361219 5361203 -
agcatcacataggggtagaa

SEQ ID NO: 33332 - DNA, 20 bp, Artificial Sequence
  Synthetic oligonucleotide; TAG chr11 5361191 5361210 5361194 -
taggggtagaaaagaaaatg

SEQ ID NO: 33333 - DNA, 20 bp, Artificial Sequence
  Synthetic oligonucleotide; AGG chr11 5361190 5361209 5361193 -
aggggtagaaaagaaaatgt

SEQ ID NO: 33334 - DNA, 20 bp, Artificial Sequence
  Synthetic oligonucleotide; GGG chr11 5361189 5361208 5361192 -
ggggtagaaaagaaaatgta

SEQ ID NO: 33335 - DNA, 20 bp, Artificial Sequence
  Synthetic oligonucleotide; GAG chr11 5361187 5361206 5361190 -
ggtagaaaagaaaatgtagg

SEQ ID NO: 33336 - DNA, 20 bp, Artificial Sequence
  Synthetic oligonucleotide; AGG chr11 5361186 5361205 5361189 -
gtagaaaagaaaatgtaggg

SEQ ID NO: 33337 - DNA, 20 bp, Artificial Sequence
  Synthetic oligonucleotide; TGG chr11 5361182 5361201 5361185 -
aaaagaaaatgtagggagga

SEQ ID NO: 33338 - DNA, 20 bp, Artificial Sequence
  Synthetic oligonucleotide; CAG chr11 5361171 5361190 5361174 -
tagggaggatggcctttttg

SEQ ID NO: 33339 - DNA, 20 bp, Artificial Sequence
  Synthetic oligonucleotide; CAG chr11 5361168 5361187 5361171 -
ggaggatggcctttttgcag

SEQ ID NO: 33340 - DNA, 20 bp, Artificial Sequence
  Synthetic oligonucleotide; AAG chr11 5361131 5361150 5361134 -
ttcttttattattatacttt

SEQ ID NO: 33341 - DNA, 20 bp, Artificial Sequence
  Synthetic oligonucleotide; TAG chr11 5361125 5361144 5361128 -
tattattatactttaagttt

SEQ ID NO: 33342 - DNA, 20 bp, Artificial Sequence
  Synthetic oligonucleotide; AGG chr11 5361124 5361143 5361127 -
attattatactttaagtttt

SEQ ID NO: 33343 - DNA, 20 bp, Artificial Sequence
  Synthetic oligonucleotide; GGG chr11 5361123 5361142 5361126 -
ttattatactttaagtttta

SEQ ID NO: 33344 - DNA, 20 bp, Artificial Sequence
  Synthetic oligonucleotide; CAG chr11 5361103 5361122 5361106 -
gggtacatttgcacaacgtg

SEQ ID NO: 33345 - DNA, 20 bp, Artificial Sequence
  Synthetic oligonucleotide; AGG chr11 5361102 5361121 5361105 -
ggtacatttgcacaacgtgc

SEQ ID NO: 33346 - DNA, 20 bp, Artificial Sequence
  Synthetic oligonucleotide; TGG chr11 5361070 5361089 5361073 -
tatgtatacatgtgccatgt

SEQ ID NO: 33347 - DNA, 20 bp, Artificial Sequence
  Synthetic oligonucleotide; TAG chr11 5361041 5361060 5361044 -
gcacccattaactcgtcact

SEQ ID NO: 33348 - DNA, 20 bp, Artificial Sequence
  Synthetic oligonucleotide; TAG chr11 5361035 5361054 5361038 -
attaactcgtcacttagcat

SEQ ID NO: 33349 - DNA, 20 bp, Artificial Sequence
  Synthetic oligonucleotide; AGG chr11 5361034 5361053 5361037 -
ttaactcgtcacttagcatt

SEQ ID NO: 33350 - DNA, 20 bp, Artificial Sequence
  Synthetic oligonucleotide; CAG chr11 5360987 5361006 5360990 -
ccccgacccccaccccactg

SEQ ID NO: 33351 - DNA, 20 bp, Artificial Sequence
  Synthetic oligonucleotide; AGG chr11 5360986 5361005 5360989 -
cccgacccccaccccactgc

SEQ ID NO: 33352 - DNA, 20 bp, Artificial Sequence
  Synthetic oligonucleotide; TGG chr11 5360980 5360999 5360983 -
ccccaccccactgcaggccc

SEQ ID NO: 33353 - DNA, 20 bp, Artificial Sequence
  Synthetic oligonucleotide; GAG chr11 5360921 5360940 5360924 -
attgttcaattcccacctat

SEQ ID NO: 33354 - DNA, 20 bp, Artificial Sequence
  Synthetic oligonucleotide; GAG chr11 5360917 5360936 5360920 -
ttcaattcccacctatgagt

SEQ ID NO: 33355 - DNA, 20 bp, Artificial Sequence
  Synthetic oligonucleotide; CAG chr11 5360908 5360927 5360911 -
cacctatgagtgagaacatg

SEQ ID NO: 33356 - DNA, 20 bp, Artificial Sequence
  Synthetic oligonucleotide; TGG chr11 5360901 5360920 5360904 -
gagtgagaacatgcagtgtt

SEQ ID NO: 33357 - DNA, 20 bp, Artificial Sequence
  Synthetic oligonucleotide; TAG chr11 5360883 5360902 5360886 -
tttggtttttgtccttgcga

SEQ ID NO: 33358 - DNA, 20 bp, Artificial Sequence
  Synthetic oligonucleotide; GAG chr11 5360874 5360893 5360877 -
tgtccttgcgatagtttgct

SEQ ID NO: 33359 - DNA, 20 bp, Artificial Sequence
  Synthetic oligonucleotide; TGG chr11 5360866 5360885 5360869 -
cgatagtttgctgagaatga

SEQ ID NO: 33360 - DNA, 20 bp, Artificial Sequence
  Synthetic oligonucleotide; CAG chr11 5360859 5360878 5360862 -
ttgctgagaatgatggtttc

SEQ ID NO: 33361 - DNA, 20 bp, Artificial Sequence
  Synthetic oligonucleotide; AAG chr11 5360837 5360856 5360840 -
gcttcatccatgtccctaca

SEQ ID NO: 33362 - DNA, 20 bp, Artificial Sequence
  Synthetic oligonucleotide; AGG chr11 5360836 5360855 5360839 -
cttcatccatgtccctacaa

SEQ ID NO: 33363 - DNA, 20 bp, Artificial Sequence
  Synthetic oligonucleotide; TGG chr11 5360812 5360831 5360815 -
catgaactcttcatttttta

SEQ ID NO: 33364 - DNA, 20 bp, Artificial Sequence
  Synthetic oligonucleotide; TAG chr11 5360804 5360823 5360807 -
cttcattttttatggctgca

SEQ ID NO: 33365 - DNA, 20 bp, Artificial Sequence
  Synthetic oligonucleotide; TGG chr11 5360794 5360813 5360797 -
tatggctgcatagtattcca

SEQ ID NO: 33366 - DNA, 20 bp, Artificial Sequence
  Synthetic oligonucleotide; CAG chr11 5360765 5360784 5360768 -
tgtgccacgttttcttaatc

SEQ ID NO: 33367 - DNA, 20 bp, Artificial Sequence
  Synthetic oligonucleotide; TGG chr11 5360751 5360770 5360754 -
ttaatccagtctatcattgt

SEQ ID NO: 33368 - DNA, 20 bp, Artificial Sequence
  Synthetic oligonucleotide; TGG chr11 5360743 5360762 5360746 -
gtctatcattgttggacatt

SEQ ID NO: 33369 - DNA, 20 bp, Artificial Sequence
  Synthetic oligonucleotide; GGG chr11 5360742 5360761 5360745 -
tctatcattgttggacattt

SEQ ID NO: 33370 - DNA, 20 bp, Artificial Sequence
  Synthetic oligonucleotide; TGG chr11 5360738 5360757 5360741 -
tcattgttggacatttgggt

SEQ ID NO: 33371 - DNA, 20 bp, Artificial Sequence
  Synthetic oligonucleotide; AAG chr11 5360731 5360750 5360734 -
tggacatttgggttggttcc

SEQ ID NO: 33372 - DNA, 20 bp, Artificial Sequence
  Synthetic oligonucleotide; TAG chr11 5360712 5360731 5360715 -
caagtctttgctattgtgaa

SEQ ID NO: 33373 - DNA, 20 bp, Artificial Sequence
  Synthetic oligonucleotide; TAG chr11 5360675 5360694 5360678 -
tacatgtgcatgtgtcttta

SEQ ID NO: 33374 - DNA, 20 bp, Artificial Sequence
  Synthetic oligonucleotide; CAG chr11 5360672 5360691 5360675 -
atgtgcatgtgtctttatag

SEQ ID NO: 33375 - DNA, 20 bp, Artificial Sequence
  Synthetic oligonucleotide; GAG chr11 5360651 5360670 5360654 -
agcatgatttataatccttt

SEQ ID NO: 33376 - DNA, 20 bp, Artificial Sequence
  Synthetic oligonucleotide; CAG chr11 5360640 5360659 5360643 -
taatcctttgagtatgtacc

SEQ ID NO: 33377 - DNA, 20 bp, Artificial Sequence
  Synthetic oligonucleotide; TGG chr11 5360634 5360653 5360637 -
tttgagtatgtacccagtaa

SEQ ID NO: 33378 - DNA, 20 bp, Artificial Sequence
  Synthetic oligonucleotide; GGG chr11 5360633 5360652 5360636 -
ttgagtatgtacccagtaat

SEQ ID NO: 33379 - DNA, 20 bp, Artificial Sequence
  Synthetic oligonucleotide; TGG chr11 5360629 5360648 5360632 -
gtatgtacccagtaatggga

SEQ ID NO: 33380 - DNA, 20 bp, Artificial Sequence
  Synthetic oligonucleotide; TGG chr11 5360625 5360644 5360628 -
gtacccagtaatgggatggc

SEQ ID NO: 33381 - DNA, 20 bp, Artificial Sequence
  Synthetic oligonucleotide; GGG chr11 5360624 5360643 5360627 -
tacccagtaatgggatggct

SEQ ID NO: 33382 - DNA, 20 bp, Artificial Sequence
  Synthetic oligonucleotide; TGG chr11 5360616 5360635 5360619 -
aatgggatggctgggtcaaa

SEQ ID NO: 33383 - DNA, 20 bp, Artificial Sequence
  Synthetic oligonucleotide; TAG chr11 5360607 5360626 5360610 -
gctgggtcaaatggtatttc

SEQ ID NO: 33384 - DNA, 20 bp, Artificial Sequence
  Synthetic oligonucleotide; TAG chr11 5360601 5360620 5360604 -
tcaaatggtatttctagttc

SEQ ID NO: 33385 - DNA, 20 bp, Artificial Sequence
  Synthetic oligonucleotide; GAG chr11 5360592 5360611 5360595 -
atttctagttctagatccct

SEQ ID NO: 33386 - DNA, 20 bp, Artificial Sequence
  Synthetic oligonucleotide; AGG chr11 5360591 5360610 5360594 -
tttctagttctagatccctg

SEQ ID NO: 33387 - DNA, 20 bp, Artificial Sequence
  Synthetic oligonucleotide; TGG chr11 5360565 5360584 5360568 -
cgccacactgacttccacaa

SEQ ID NO: 33388 - DNA, 20 bp, Artificial Sequence
  Synthetic oligonucleotide; TAG chr11 5360556 5360575 5360559 -
gacttccacaatggttgaac

SEQ ID NO: 33389 - DNA, 20 bp, Artificial Sequence
  Synthetic oligonucleotide; CAG chr11 5360549 5360568 5360552 -
acaatggttgaactagttta

SEQ ID NO: 33390 - DNA, 20 bp, Artificial Sequence
  Synthetic oligonucleotide; CAG chr11 5360537 5360556 5360540 -
ctagtttacagtctcaccaa

SEQ ID NO: 33391 - DNA, 20 bp, Artificial Sequence
  Synthetic oligonucleotide; AAG chr11 5360529 5360548 5360532 -
cagtctcaccaacagtgtaa

SEQ ID NO: 33392 - DNA, 20 bp, Artificial Sequence
  Synthetic oligonucleotide; CAG chr11 5360501 5360520 5360504 -
ctacttcttcacatcctctc

SEQ ID NO: 33393 - DNA, 20 bp, Artificial Sequence
  Synthetic oligonucleotide; TGG chr11 5360457 5360476 5360460 -
ttaatgatcgccattctaac

SEQ ID NO: 33394 - DNA, 20 bp, Artificial Sequence
  Synthetic oligonucleotide; GAG chr11 5360451 5360470 5360454 -
atcgccattctaactggtgt

SEQ ID NO: 33395 - DNA, 20 bp, Artificial Sequence
  Synthetic oligonucleotide; TGG chr11 5360447 5360466 5360450 -
ccattctaactggtgtgaga

SEQ ID NO: 33396 - DNA, 20 bp, Artificial Sequence
  Synthetic oligonucleotide; TGG chr11 5360434 5360453 5360437 -
tgtgagatggtatctcactg

SEQ ID NO: 33397 - DNA, 20 bp, Artificial Sequence
  Synthetic oligonucleotide; TGG chr11 5360410 5360429 5360413 -
tttgatttgtatttctctga

SEQ ID NO: 33398 - DNA, 20 bp, Artificial Sequence
  Synthetic oligonucleotide; CAG chr11 5360406 5360425 5360409 -
atttgtatttctctgatggc

SEQ ID NO: 33399 - DNA, 20 bp, Artificial Sequence
  Synthetic oligonucleotide; GAG chr11 5360396 5360415 5360399 -
ctctgatggccagtgatgat

SEQ ID NO: 33400 - DNA, 20 bp, Artificial Sequence
  Synthetic oligonucleotide; GAG chr11 5360351 5360370 5360354 -
ctgcataaatgtcttctttt

SEQ ID NO: 33401 - DNA, 20 bp, Artificial Sequence
  Synthetic oligonucleotide; AAG chr11 5360348 5360367 5360351 -
cataaatgtcttcttttgag

SEQ ID NO: 33402 - DNA, 20 bp, Artificial Sequence
  Synthetic oligonucleotide; TGG chr11 5360314 5360333 5360317 -
atcctttgcccactttttga

SEQ ID NO: 33403 - DNA, 20 bp, Artificial Sequence
  Synthetic oligonucleotide; GGG chr11 5360313 5360332 5360316 -
tcctttgcccactttttgat

SEQ ID NO: 33404 - DNA, 20 bp, Artificial Sequence
  Synthetic oligonucleotide; GGG chr11 5360312 5360331 5360315 -
cctttgcccactttttgatg

SEQ ID NO: 33405 - DNA, 20 bp, Artificial Sequence
  Synthetic oligonucleotide; GAG chr11 5360284 5360303 5360287 -
tttttcttgtaaatttgttt

SEQ ID NO: 33406 - DNA, 20 bp, Artificial Sequence
  Synthetic oligonucleotide; TAG chr11 5360274 5360293 5360277 -
aaatttgtttgagttcatca

SEQ ID NO: 33407 - DNA, 20 bp, Artificial Sequence
  Synthetic oligonucleotide; TGG chr11 5360267 5360286 5360270 -
tttgagttcatcatagattc

SEQ ID NO: 33408 - DNA, 20 bp, Artificial Sequence
  Synthetic oligonucleotide; TAG chr11 5360260 5360279 5360263 -
tcatcatagattctggatat

SEQ ID NO: 33409 - DNA, 20 bp, Artificial Sequence
  Synthetic oligonucleotide; CGG chr11 5360249 5360268 5360252 -
tctggatattagccctttgt

SEQ ID NO: 33410 - DNA, 20 bp, Artificial Sequence
  Synthetic oligonucleotide; GAG chr11 5360244 5360263 5360247 -
atattagccctttgtcggat

SEQ ID NO: 33411 - DNA, 20 bp, Artificial Sequence
  Synthetic oligonucleotide; TAG chr11 5360241 5360260 5360244 -
ttagccctttgtcggatgag

SEQ ID NO: 33412 - DNA, 20 bp, Artificial Sequence
  Synthetic oligonucleotide; TGG chr11 5360192 5360211 5360195 -
atgttgcctgttcactctga

SEQ ID NO: 33413 - DNA, 20 bp, Artificial Sequence
  Synthetic oligonucleotide; TAG chr11 5360189 5360208 5360192 -
ttgcctgttcactctgatgg

SEQ ID NO: 33414 - DNA, 20 bp, Artificial Sequence
  Synthetic oligonucleotide; CAG chr11 5360172 5360191 5360175 -
tggtagtttcttttgctgtg

SEQ ID NO: 33415 - DNA, 20 bp, Artificial Sequence
  Synthetic oligonucleotide; AAG chr11 5360169 5360188 5360172 -
tagtttcttttgctgtgcag

SEQ ID NO: 33416 - DNA, 20 bp, Artificial Sequence
  Synthetic oligonucleotide; TAG chr11 5360161 5360180 5360164 -
tttgctgtgcagaagctctt

SEQ ID NO: 33417 - DNA, 20 bp, Artificial Sequence
  Synthetic oligonucleotide; TAG chr11 5360152 5360171 5360155 -
cagaagctctttagtttaat

SEQ ID NO: 33418 - DNA, 20 bp, Artificial Sequence
  Synthetic oligonucleotide; TGG chr11 5360132 5360151 5360135 -
tagatcccatttgtccattt

SEQ ID NO: 33419 - DNA, 20 bp, Artificial Sequence
  Synthetic oligonucleotide; TGG chr11 5360110 5360129 5360113 -
gcttttgttgccattgcttt

SEQ ID NO: 33420 - DNA, 20 bp, Artificial Sequence
  Synthetic oligonucleotide; TAG chr11 5360102 5360121 5360105 -
tgccattgcttttggtgttt

SEQ ID NO: 33421 - DNA, 20 bp, Artificial Sequence
  Synthetic oligonucleotide; AAG chr11 5360094 5360113 5360097 -
cttttggtgttttagacatg

SEQ ID NO: 33422 - DNA, 20 bp, Artificial Sequence
  Synthetic oligonucleotide; TGG chr11 5360066 5360085 5360069 -
gcccatgcctatgtcctgaa

SEQ ID NO: 33423 - DNA, 20 bp, Artificial Sequence
  Synthetic oligonucleotide; TAG chr11 5360056 5360075 5360059 -
atgtcctgaatggtattgcc

SEQ ID NO: 33424 - DNA, 20 bp, Artificial Sequence
  Synthetic oligonucleotide; AGG chr11 5360055 5360074 5360058 -
tgtcctgaatggtattgcct

SEQ ID NO: 33425 - DNA, 20 bp, Artificial Sequence
  Synthetic oligonucleotide; CAG chr11 5360044 5360063 5360047 -
gtattgcctaggttttcttc

SEQ ID NO: 33426 - DNA, 20 bp, Artificial Sequence
  Synthetic oligonucleotide; GAG chr11 5360042 5360061 5360045 -
attgcctaggttttcttcca

SEQ ID NO: 33427 - DNA, 20 bp, Artificial Sequence
  Synthetic oligonucleotide; TGG chr11 5360033 5360052 5360036 -
gttttcttccagagttttta

SEQ ID NO: 33428 - DNA, 20 bp, Artificial Sequence
  Synthetic oligonucleotide; CAG chr11 5360026 5360045 5360029 -
tccagagtttttatggtttt

SEQ ID NO: 33429 - DNA, 20 bp, Artificial Sequence
  Synthetic oligonucleotide; AAG chr11 5360013 5360032 5360016 -
tggttttcagtctaacattt

SEQ ID NO: 33430 - DNA, 20 bp, Artificial Sequence
  Synthetic oligonucleotide; AAG chr11 5359979 5359998 5359982 -
tcttgaattaatttttgtat

SEQ ID NO: 33431 - DNA, 20 bp, Artificial Sequence
  Synthetic oligonucleotide; AGG chr11 5359978 5359997 5359981 -
cttgaattaatttttgtata

SEQ ID NO: 33432 - DNA, 20 bp, Artificial Sequence
  Synthetic oligonucleotide; AAG chr11 5359972 5359991 5359975 -
ttaatttttgtataaggtgt

SEQ ID NO: 33433 - DNA, 20 bp, Artificial Sequence
  Synthetic oligonucleotide; AAG chr11 5359968 5359987 5359971 -
tttttgtataaggtgtaaga

SEQ ID NO: 33434 - DNA, 20 bp, Artificial Sequence
  Synthetic oligonucleotide; AGG chr11 5359967 5359986 5359970 -
ttttgtataaggtgtaagaa

SEQ ID NO: 33435 - DNA, 20 bp, Artificial Sequence
  Synthetic oligonucleotide; GGG chr11 5359966 5359985 5359969 -
tttgtataaggtgtaagaaa

SEQ ID NO: 33436 - DNA, 20 bp, Artificial Sequence
  Synthetic oligonucleotide; CAG chr11 5359960 5359979 5359963 -
taaggtgtaagaaagggatc

SEQ ID NO: 33437 - DNA, 20 bp, Artificial Sequence
  Synthetic oligonucleotide; CAG chr11 5359954 5359973 5359957 -
gtaagaaagggatccagttt

SEQ ID NO: 33438 - DNA, 20 bp, Artificial Sequence
  Synthetic oligonucleotide; TGG chr11 5359940 5359959 5359943 -
cagtttcagctttctgcgta

SEQ ID NO: 33439 - DNA, 20 bp, Artificial Sequence
  Synthetic oligonucleotide; TAG chr11 5359936 5359955 5359939 -
ttcagctttctgcgtatggt

SEQ ID NO: 33440 - DNA, 20 bp, Artificial Sequence
  Synthetic oligonucleotide; CAG chr11 5359932 5359951 5359935 -
gctttctgcgtatggttagc

SEQ ID NO: 33441 - DNA, 20 bp, Artificial Sequence
  Synthetic oligonucleotide; CAG chr11 5359923 5359942 5359926 -
gtatggttagccagttttcc

SEQ ID NO: 33442 - DNA, 20 bp, Artificial Sequence
  Synthetic oligonucleotide; TAG chr11 5359906 5359925 5359909 -
tcccagcaccatttattaaa

SEQ ID NO: 33443 - DNA, 20 bp, Artificial Sequence
  Synthetic oligonucleotide; AGG chr11 5359905 5359924 5359908 -
cccagcaccatttattaaat

SEQ ID NO: 33444 - DNA, 20 bp, Artificial Sequence
  Synthetic oligonucleotide; GGG chr11 5359904 5359923 5359907 -
ccagcaccatttattaaata

SEQ ID NO: 33445 - DNA, 20 bp, Artificial Sequence
  Synthetic oligonucleotide; CAG chr11 5359874 5359893 5359877 -
tccccatttgttttttttgt

SEQ ID NO: 33446 - DNA, 20 bp, Artificial Sequence
  Synthetic oligonucleotide; AGG chr11 5359873 5359892 5359876 -
ccccatttgttttttttgtc

SEQ ID NO: 33447 - DNA, 20 bp, Artificial Sequence
  Synthetic oligonucleotide; AAG chr11 5359863 5359882 5359866 -
tttttttgtcaggtttgtca

SEQ ID NO: 33448 - DNA, 20 bp, Artificial Sequence
  Synthetic oligonucleotide; CAG chr11 5359858 5359877 5359861 -
ttgtcaggtttgtcaaagat

SEQ ID NO: 33449 - DNA, 20 bp, Artificial Sequence
  Synthetic oligonucleotide; TGG chr11 5359854 5359873 5359857 -
caggtttgtcaaagatcaga

SEQ ID NO: 33450 - DNA, 20 bp, Artificial Sequence
  Synthetic oligonucleotide; TAG chr11 5359848 5359867 5359851 -
tgtcaaagatcagatggttg

SEQ ID NO: 33451 - DNA, 20 bp, Artificial Sequence
  Synthetic oligonucleotide; CGG chr11 5359840 5359859 5359843 -
atcagatggttgtagacatg

SEQ ID NO: 33452 - DNA, 20 bp, Artificial Sequence
  Synthetic oligonucleotide; GAG chr11 5359827 5359846 5359830 -
agacatgcggcattatttct

SEQ ID NO: 33453 - DNA, 20 bp, Artificial Sequence
  Synthetic oligonucleotide; AGG chr11 5359826 5359845 5359829 -
gacatgcggcattatttctg

SEQ ID NO: 33454 - DNA, 20 bp, Artificial Sequence
  Synthetic oligonucleotide; TGG chr11 5359806 5359825 5359809 -
aggcctctgttctgttccat

SEQ ID NO: 33455 - DNA, 20 bp, Artificial Sequence
  Synthetic oligonucleotide; TGG chr11 5359788 5359807 5359791 -
attggtctatatctctgttt

SEQ ID NO: 33456 - DNA, 20 bp, Artificial Sequence
  Synthetic oligonucleotide; CAG chr11 5359782 5359801 5359785 -
ctatatctctgttttggtac

SEQ ID NO: 33457 - DNA, 20 bp, Artificial Sequence
  Synthetic oligonucleotide; TGG chr11 5359766 5359785 5359769 -
gtaccagtaccatgctgttt

SEQ ID NO: 33458 - DNA, 20 bp, Artificial Sequence
  Synthetic oligonucleotide; TAG chr11 5359757 5359776 5359760 -
ccatgctgttttggttactg

SEQ ID NO: 33459 - DNA, 20 bp, Artificial Sequence
  Synthetic oligonucleotide; TAG chr11 5359749 5359768 5359752 -
ttttggttactgtagccttg

SEQ ID NO: 33460 - DNA, 20 bp, Artificial Sequence
  Synthetic oligonucleotide; TAG chr11 5359744 5359763 5359747 -
gttactgtagccttgtagta

SEQ ID NO: 33461 - DNA, 20 bp, Artificial Sequence
  Synthetic oligonucleotide; AAG chr11 5359737 5359756 5359740 -
tagccttgtagtatagtttg

SEQ ID NO: 33462 - DNA, 20 bp, Artificial Sequence
  Synthetic oligonucleotide; CAG chr11 5359733 5359752 5359736 -
cttgtagtatagtttgaagt

SEQ ID NO: 33463 - DNA, 20 bp, Artificial Sequence
  Synthetic oligonucleotide; AGG chr11 5359732 5359751 5359735 -
ttgtagtatagtttgaagtc

SEQ ID NO: 33464 - DNA, 20 bp, Artificial Sequence
  Synthetic oligonucleotide; TAG chr11 5359729 5359748 5359732 -
tagtatagtttgaagtcagg

SEQ ID NO: 33465 - DNA, 20 bp, Artificial Sequence
  Synthetic oligonucleotide; CAG chr11 5359715 5359734 5359718 -
gtcaggtagcgtgatgcctc

SEQ ID NO: 33466 - DNA, 20 bp, Artificial Sequence
  Synthetic oligonucleotide; TGG chr11 5359701 5359720 5359704 -
tgcctccagctttgttcttt

SEQ ID NO: 33467 - DNA, 20 bp, Artificial Sequence
  Synthetic oligonucleotide; TAG chr11 5359696 5359715 5359699 -
ccagctttgttcttttggct

SEQ ID NO: 33468 - DNA, 20 bp, Artificial Sequence
  Synthetic oligonucleotide; AGG chr11 5359695 5359714 5359698 -
cagctttgttcttttggctt

SEQ ID NO: 33469 - DNA, 20 bp, Artificial Sequence
  Synthetic oligonucleotide; TGG chr11 5359690 5359709 5359693 -
ttgttcttttggcttaggat

SEQ ID NO: 33470 - DNA, 20 bp, Artificial Sequence
  Synthetic oligonucleotide; TGG chr11 5359677 5359696 5359680 -
ttaggattggcatgtcaatg

SEQ ID NO: 33471 - DNA, 20 bp, Artificial Sequence
  Synthetic oligonucleotide; GGG chr11 5359676 5359695 5359679 -
taggattggcatgtcaatgt

SEQ ID NO: 33472 - DNA, 20 bp, Artificial Sequence
  Synthetic oligonucleotide; TGG chr11 5359665 5359684 5359668 -
tgtcaatgtgggctcttttt

SEQ ID NO: 33473 - DNA, 20 bp, Artificial Sequence
  Synthetic oligonucleotide; AAG chr11 5359646 5359665 5359649 -
ttggttccatatgaacttta

SEQ ID NO: 33474 - DNA, 20 bp, Artificial Sequence
  Synthetic oligonucleotide; TAG chr11 5359643 5359662 5359646 -
gttccatatgaactttaaag

SEQ ID NO: 33475 - DNA, 20 bp, Artificial Sequence
  Synthetic oligonucleotide; AAG chr11 5359623 5359642 5359626 -
tagttttttccaattctgtg

SEQ ID NO: 33476 - DNA, 20 bp, Artificial Sequence
  Synthetic oligonucleotide; AAG chr11 5359619 5359638 5359622 -
tttttccaattctgtgaaga

SEQ ID NO: 33477 - DNA, 20 bp, Artificial Sequence
  Synthetic oligonucleotide; TGG chr11 5359612 5359631 5359615 -
aattctgtgaagaaagtcat

SEQ ID NO: 33478 - DNA, 20 bp, Artificial Sequence
  Synthetic oligonucleotide; TAG chr11 5359609 5359628 5359612 -
tctgtgaagaaagtcattgg

SEQ ID NO: 33479 - DNA, 20 bp, Artificial Sequence
  Synthetic oligonucleotide; TGG chr11 5359601 5359620 5359604 -
gaaagtcattggtagcttga

SEQ ID NO: 33480 - DNA, 20 bp, Artificial Sequence
  Synthetic oligonucleotide; GGG chr11 5359600 5359619 5359603 -
aaagtcattggtagcttgat

SEQ ID NO: 33481 - DNA, 20 bp, Artificial Sequence
  Synthetic oligonucleotide; GGG chr11 5359599 5359618 5359602 -
aagtcattggtagcttgatg

SEQ ID NO: 33482 - DNA, 20 bp, Artificial Sequence
  Synthetic oligonucleotide; TGG chr11 5359595 5359614 5359598 -
cattggtagcttgatgggga

SEQ ID NO: 33483 - DNA, 20 bp, Artificial Sequence
  Synthetic oligonucleotide; TGG chr11 5359571 5359590 5359574 -
attgaatctataaattacct

SEQ ID NO: 33484 - DNA, 20 bp, Artificial Sequence
  Synthetic oligonucleotide; GGG chr11 5359570 5359589 5359573 -
ttgaatctataaattacctt

SEQ ID NO: 33485 - DNA, 20 bp, Artificial Sequence
  Synthetic oligonucleotide; TGG chr11 5359562 5359581 5359565 -
ataaattaccttgggctgta

SEQ ID NO: 33486 - DNA, 20 bp, Artificial Sequence
  Synthetic oligonucleotide; GAG chr11 5359527 5359546 5359530 -
tattgattcttcctacccat

SEQ ID NO: 33487 - DNA, 20 bp, Artificial Sequence
  Synthetic oligonucleotide; TGG chr11 5359522 5359541 5359525 -
attcttcctacccatgagca

SEQ ID NO: 33488 - DNA, 20 bp, Artificial Sequence
  Synthetic oligonucleotide; CAG chr11 5359480 5359499 5359483 -
gtatcttcttttatttcatt

SEQ ID NO: 33489 - DNA, 20 bp, Artificial Sequence
  Synthetic oligonucleotide; CAG chr11 5359477 5359496 5359480 -
tcttcttttatttcattcag

SEQ ID NO: 33490 - DNA, 20 bp, Artificial Sequence
  Synthetic oligonucleotide; TGG chr11 5359474 5359493 5359477 -
tcttttatttcattcagcag

SEQ ID NO: 33491 - DNA, 20 bp, Artificial Sequence
  Synthetic oligonucleotide; TAG chr11 5359467 5359486 5359470 -
tttcattcagcagtggtttg

SEQ ID NO: 33492 - DNA, 20 bp, Artificial Sequence
  Synthetic oligonucleotide; AAG chr11 5359455 5359474 5359458 -
gtggtttgtagttctccttg

SEQ ID NO: 33493 - DNA, 20 bp, Artificial Sequence
  Synthetic oligonucleotide; GAG chr11 5359453 5359472 5359456 -
ggtttgtagttctccttgaa

SEQ ID NO: 33494 - DNA, 20 bp, Artificial Sequence
  Synthetic oligonucleotide; AGG chr11 5359452 5359471 5359455 -
gtttgtagttctccttgaag

SEQ ID NO: 33495 - DNA, 20 bp, Artificial Sequence
  Synthetic oligonucleotide; AAG chr11 5359432 5359451 5359435 -
aggtccttcacctctcttgt

SEQ ID NO: 33496 - DNA, 20 bp, Artificial Sequence
  Synthetic oligonucleotide; TGG chr11 5359428 5359447 5359431 -
ccttcacctctcttgtaagt

SEQ ID NO: 33497 - DNA, 20 bp, Artificial Sequence
  Synthetic oligonucleotide; TAG chr11 5359420 5359439 5359423 -
tctcttgtaagttggattcc

SEQ ID NO: 33498 - DNA, 20 bp, Artificial Sequence
  Synthetic oligonucleotide; AGG chr11 5359419 5359438 5359422 -
ctcttgtaagttggattcct

SEQ ID NO: 33499 - DNA, 20 bp, Artificial Sequence
  Synthetic oligonucleotide; AAG chr11 5359400 5359419 5359403 -
taggtattttattctctttg

SEQ ID NO: 33500 - DNA, 20 bp, Artificial Sequence
  Synthetic oligonucleotide; TGG chr11 5359387 5359406 5359390 -
ctctttgaagcaattgtgaa

SEQ ID NO: 33501 - DNA, 20 bp, Artificial Sequence
  Synthetic oligonucleotide; GGG chr11 5359386 5359405 5359389 -
tctttgaagcaattgtgaat

SEQ ID NO: 33502 - DNA, 20 bp, Artificial Sequence
  Synthetic oligonucleotide; GAG chr11 5359384 5359403 5359387 -
tttgaagcaattgtgaatgg

SEQ ID NO: 33503 - DNA, 20 bp, Artificial Sequence
  Synthetic oligonucleotide; TGG chr11 5359368 5359387 5359371 -
atgggagttccctcatgatt

SEQ ID NO: 33504 - DNA, 20 bp, Artificial Sequence
  Synthetic oligonucleotide; TGG chr11 5359346 5359365 5359349 -
gctctctgtttgtctgttat

SEQ ID NO: 33505 - DNA, 20 bp, Artificial Sequence
  Synthetic oligonucleotide; AAG chr11 5359338 5359357 5359341 -
tttgtctgttattggtgtat

SEQ ID NO: 33506 - DNA, 20 bp, Artificial Sequence
  Synthetic oligonucleotide; GAG chr11 5359299 5359318 5359302 -
gcacattgattttgtatcct

SEQ ID NO: 33507 - DNA, 20 bp, Artificial Sequence
  Synthetic oligonucleotide; AAG chr11 5359287 5359306 5359290 -
tgtatcctgagactttgctg

SEQ ID NO: 33508 - DNA, 20 bp, Artificial Sequence
  Synthetic oligonucleotide; CAG chr11 5359276 5359295 5359279 -
actttgctgaagttgcctat

SEQ ID NO: 33509 - DNA, 20 bp, Artificial Sequence
  Synthetic oligonucleotide; AAG chr11 5359270 5359289 5359273 -
ctgaagttgcctatcagttt

SEQ ID NO: 33510 - DNA, 20 bp, Artificial Sequence
  Synthetic oligonucleotide; AGG chr11 5359269 5359288 5359272 -
tgaagttgcctatcagttta

SEQ ID NO: 33511 - DNA, 20 bp, Artificial Sequence
  Synthetic oligonucleotide; TGG chr11 5359260 5359279 5359263 -
ctatcagtttaaggacattt

SEQ ID NO: 33512 - DNA, 20 bp, Artificial Sequence
  Synthetic oligonucleotide; GGG chr11 5359259 5359278 5359262 -
tatcagtttaaggacatttt

SEQ ID NO: 33513 - DNA, 20 bp, Artificial Sequence
  Synthetic oligonucleotide; GAG chr11 5359254 5359273 5359257 -
gtttaaggacattttgggct

SEQ ID NO: 33514 - DNA, 20 bp, Artificial Sequence
  Synthetic oligonucleotide; CAG chr11 5359250 5359269 5359253 -
aaggacattttgggctgaga

SEQ ID NO: 33515 - DNA, 20 bp, Artificial Sequence
  Synthetic oligonucleotide; TGG chr11 5359247 5359266 5359250 -
gacattttgggctgagacag

SEQ ID NO: 33516 - DNA, 20 bp, Artificial Sequence
  Synthetic oligonucleotide; GGG chr11 5359246 5359265 5359249 -
acattttgggctgagacagt

SEQ ID NO: 33517 - DNA, 20 bp, Artificial Sequence
  Synthetic oligonucleotide; GGG chr11 5359245 5359264 5359248 -
cattttgggctgagacagtg

SEQ ID NO: 33518 - DNA, 20 bp, Artificial Sequence
  Synthetic oligonucleotide; TAG chr11 5359237 5359256 5359240 -
gctgagacagtggggttttc

SEQ ID NO: 33519 - DNA, 20 bp, Artificial Sequence
  Synthetic oligonucleotide; CAG chr11 5359210 5359229 5359213 -
acaatcgtgtcatctgcaaa

SEQ ID NO: 33520 - DNA, 20 bp, Artificial Sequence
  Synthetic oligonucleotide; AGG chr11 5359209 5359228 5359212 -
caatcgtgtcatctgcaaac

SEQ ID NO: 33521 - DNA, 20 bp, Artificial Sequence
  Synthetic oligonucleotide; GGG chr11 5359208 5359227 5359211 -
aatcgtgtcatctgcaaaca

SEQ ID NO: 33522 - DNA, 20 bp, Artificial Sequence
  Synthetic oligonucleotide; TGG chr11 5359143 5359162 5359146 -
cttctcctgcctaattgccc

SEQ ID NO: 33523 - DNA, 20 bp, Artificial Sequence
  Synthetic oligonucleotide; CAG chr11 5359139 5359158 5359142 -
tcctgcctaattgccctggc

SEQ ID NO: 33524 - DNA, 20 bp, Artificial Sequence
  Synthetic oligonucleotide; TAG chr11 5359115 5359134 5359118 -
aattccaacactatgttgaa

SEQ ID NO: 33525 - DNA, 20 bp, Artificial Sequence
  Synthetic oligonucleotide; AGG chr11 5359114 5359133 5359117 -
attccaacactatgttgaat

SEQ ID NO: 33526 - DNA, 20 bp, Artificial Sequence
  Synthetic oligonucleotide; GAG chr11 5359112 5359131 5359115 -
tccaacactatgttgaatag

SEQ ID NO: 33527 - DNA, 20 bp, Artificial Sequence
  Synthetic oligonucleotide; TAG chr11 5359109 5359128 5359112 -
aacactatgttgaataggag

SEQ ID NO: 33528 - DNA, 20 bp, Artificial Sequence
  Synthetic oligonucleotide; GAG chr11 5359105 5359124 5359108 -
ctatgttgaataggagtagt

SEQ ID NO: 33529 - DNA, 20 bp, Artificial Sequence
  Synthetic oligonucleotide; GAG chr11 5359103 5359122 5359106 -
atgttgaataggagtagtga

SEQ ID NO: 33530 - DNA, 20 bp, Artificial Sequence
  Synthetic oligonucleotide; GAG chr11 5359101 5359120 5359104 -
gttgaataggagtagtgaga

SEQ ID NO: 33531 - DNA, 20 bp, Artificial Sequence
  Synthetic oligonucleotide; AGG chr11 5359100 5359119 5359103 -
ttgaataggagtagtgagag

SEQ ID NO: 33532 - DNA, 20 bp, Artificial Sequence
  Synthetic oligonucleotide; GGG chr11 5359099 5359118 5359102 -
tgaataggagtagtgagaga

SEQ ID NO: 33533 - DNA, 20 bp, Artificial Sequence
  Synthetic oligonucleotide; CAG chr11 5359080 5359099 5359083 -
agggcatccctgtcttgtgc

SEQ ID NO: 33534 - DNA, 20 bp, Artificial Sequence
  Synthetic oligonucleotide; AAG chr11 5359071 5359090 5359074 -
ctgtcttgtgccagttttca

SEQ ID NO: 33535 - DNA, 20 bp, Artificial Sequence
  Synthetic oligonucleotide; AGG chr11 5359070 5359089 5359073 -
tgtcttgtgccagttttcaa

SEQ ID NO: 33536 - DNA, 20 bp, Artificial Sequence
  Synthetic oligonucleotide; GGG chr11 5359069 5359088 5359072 -
gtcttgtgccagttttcaaa

SEQ ID NO: 33537 - DNA, 20 bp, Artificial Sequence
  Synthetic oligonucleotide; CAG chr11 5359058 5359077 5359061 -
gttttcaaagggaatgcttc

SEQ ID NO: 33538 - DNA, 20 bp, Artificial Sequence
  Synthetic oligonucleotide; CAG chr11 5359043 5359062 5359046 -
gcttccagtttttgtccatt

SEQ ID NO: 33539 - DNA, 20 bp, Artificial Sequence
  Synthetic oligonucleotide; TGG chr11 5359032 5359051 5359035 -
ttgtccattcagtatgatat

SEQ ID NO: 33540 - DNA, 20 bp, Artificial Sequence
  Synthetic oligonucleotide; TGG chr11 5359026 5359045 5359029 -
attcagtatgatattggctg

SEQ ID NO: 33541 - DNA, 20 bp, Artificial Sequence
  Synthetic oligonucleotide; GGG chr11 5359025 5359044 5359028 -
ttcagtatgatattggctgt

SEQ ID NO: 33542 - DNA, 20 bp, Artificial Sequence
  Synthetic oligonucleotide; TAG chr11 5359015 5359034 5359018 -
tattggctgtgggtttgtca

SEQ ID NO: 33543 - DNA, 20 bp, Artificial Sequence
  Synthetic oligonucleotide; TGG chr11 5359011 5359030 5359014 -
ggctgtgggtttgtcataga

SEQ ID NO: 33544 - DNA, 20 bp, Artificial Sequence
  Synthetic oligonucleotide; GAG chr11 5358995 5359014 5358998 -
tagatggctcttattatttt

SEQ ID NO: 33545 - DNA, 20 bp, Artificial Sequence
  Synthetic oligonucleotide; GAG chr11 5358965 5358984 5358968 -
ccatcaatacctaatttatt

SEQ ID NO: 33546 - DNA, 20 bp, Artificial Sequence
  Synthetic oligonucleotide; GAG chr11 5358963 5358982 5358966 -
atcaatacctaatttattga

SEQ ID NO: 33547 - DNA, 20 bp, Artificial Sequence
  Synthetic oligonucleotide; TAG chr11 5358956 5358975 5358959 -
cctaatttattgagagtttt

SEQ ID NO: 33548 - DNA, 20 bp, Artificial Sequence
  Synthetic oligonucleotide; AAG chr11 5358949 5358968 5358952 -
tattgagagtttttagcatg

SEQ ID NO: 33549 - DNA, 20 bp, Artificial Sequence
  Synthetic oligonucleotide; AGG chr11 5358948 5358967 5358951 -
attgagagtttttagcatga

SEQ ID NO: 33550 - DNA, 20 bp, Artificial Sequence
  Synthetic oligonucleotide; GGG chr11 5358947 5358966 5358950 -
ttgagagtttttagcatgaa

SEQ ID NO: 33551 - DNA, 20 bp, Artificial Sequence
  Synthetic oligonucleotide; AAG chr11 5358928 5358947 5358931 -
agggttgttgaattttgtca

SEQ ID NO: 33552 - DNA, 20 bp, Artificial Sequence
  Synthetic oligonucleotide; AGG chr11 5358927 5358946 5358930 -
gggttgttgaattttgtcaa

SEQ ID NO: 33553 - DNA, 20 bp, Artificial Sequence
  Synthetic oligonucleotide; GAG chr11 5358907 5358926 5358910 -
aggccttttctgcatctatt

SEQ ID NO: 33554 - DNA, 20 bp, Artificial Sequence
  Synthetic oligonucleotide; TGG chr11 5358895 5358914 5358898 -
catctattgagataatcatg

SEQ ID NO: 33555 - DNA, 20 bp, Artificial Sequence
  Synthetic oligonucleotide; TGG chr11 5358882 5358901 5358885 -
aatcatgtggtttttgtctt

SEQ ID NO: 33556 - DNA, 20 bp, Artificial Sequence
  Synthetic oligonucleotide; TGG chr11 5358865 5358884 5358868 -
ctttggttctgtttatatgc

SEQ ID NO: 33557 - DNA, 20 bp, Artificial Sequence
  Synthetic oligonucleotide; CAG chr11 5358832 5358851 5358835 -
ttgatttgcatatgttgaac

SEQ ID NO: 33558 - DNA, 20 bp, Artificial Sequence
  Synthetic oligonucleotide; CAG chr11 5358819 5358838 5358822 -
gttgaaccagccttgcatcc

SEQ ID NO: 33559 - DNA, 20 bp, Artificial Sequence
  Synthetic oligonucleotide; AGG chr11 5358818 5358837 5358821 -
ttgaaccagccttgcatccc

SEQ ID NO: 33560 - DNA, 20 bp, Artificial Sequence
  Synthetic oligonucleotide; GGG chr11 5358817 5358836 5358820 -
tgaaccagccttgcatccca

SEQ ID NO: 33561 - DNA, 20 bp, Artificial Sequence
  Synthetic oligonucleotide; AAG chr11 5358811 5358830 5358814 -
agccttgcatcccagggatg

SEQ ID NO: 33562 - DNA, 20 bp, Artificial Sequence
  Synthetic oligonucleotide; TGG chr11 5358796 5358815 5358799 -
ggatgaagcccacttgatca

SEQ ID NO: 33563 - DNA, 20 bp, Artificial Sequence
  Synthetic oligonucleotide; TGG chr11 5358793 5358812 5358796 -
tgaagcccacttgatcatgg

SEQ ID NO: 33564 - DNA, 20 bp, Artificial Sequence
  Synthetic oligonucleotide; AAG chr11 5358788 5358807 5358791 -
cccacttgatcatggtggat

SEQ ID NO: 33565 - DNA, 20 bp, Artificial Sequence
  Synthetic oligonucleotide; TGG chr11 5358781 5358800 5358784 -
gatcatggtggataagcttt

SEQ ID NO: 33566 - DNA, 20 bp, Artificial Sequence
  Synthetic oligonucleotide; TGG chr11 5358769 5358788 5358772 -
taagcttttggatgtgctgc

SEQ ID NO: 33567 - DNA, 20 bp, Artificial Sequence
  Synthetic oligonucleotide; CAG chr11 5358755 5358774 5358758 -
tgctgctggatttgctttgc

SEQ ID NO: 33568 - DNA, 20 bp, Artificial Sequence
  Synthetic oligonucleotide; GAG chr11 5358743 5358762 5358746 -
tgctttgccagtattttatt

SEQ ID NO: 33569 - DNA, 20 bp, Artificial Sequence
  Synthetic oligonucleotide; AGG chr11 5358742 5358761 5358745 -
gctttgccagtattttattg

SEQ ID NO: 33570 - DNA, 20 bp, Artificial Sequence
  Synthetic oligonucleotide; CAG chr11 5358719 5358738 5358722 -
ttttttgcatcgatgtccat

SEQ ID NO: 33571 - DNA, 20 bp, Artificial Sequence
  Synthetic oligonucleotide; AGG chr11 5358718 5358737 5358721 -
tttttgcatcgatgtccatc

SEQ ID NO: 33572 - DNA, 20 bp, Artificial Sequence
  Synthetic oligonucleotide; GGG chr11 5358717 5358736 5358720 -
ttttgcatcgatgtccatca

SEQ ID NO: 33573 - DNA, 20 bp, Artificial Sequence
  Synthetic oligonucleotide; TGG chr11 5358710 5358729 5358713 -
tcgatgtccatcagggatat

SEQ ID NO: 33574 - DNA, 20 bp, Artificial Sequence
  Synthetic oligonucleotide; CGG chr11 5358674 5358693 5358677 -
ttttttgttgtgtctctgcc

SEQ ID NO: 33575 - DNA, 20 bp, Artificial Sequence
  Synthetic oligonucleotide; TGG chr11 5358668 5358687 5358671 -
gttgtgtctctgcccggctt

SEQ ID NO: 33576 - DNA, 20 bp, Artificial Sequence
  Synthetic oligonucleotide; CAG chr11 5358662 5358681 5358665 -
tctctgcccggctttggtat

SEQ ID NO: 33577 - DNA, 20 bp, Artificial Sequence
  Synthetic oligonucleotide; AGG chr11 5358661 5358680 5358664 -
ctctgcccggctttggtatc

SEQ ID NO: 33578 - DNA, 20 bp, Artificial Sequence
  Synthetic oligonucleotide; TGG chr11 5358651 5358670 5358654 -
ctttggtatcaggatgatgc

SEQ ID NO: 33579 - DNA, 20 bp, Artificial Sequence
  Synthetic oligonucleotide; GAG chr11 5358637 5358656 5358640 -
tgatgctggcctcataaaat

SEQ ID NO: 33580 - DNA, 20 bp, Artificial Sequence
  Synthetic oligonucleotide; TAG chr11 5358633 5358652 5358636 -
gctggcctcataaaatgagt

SEQ ID NO: 33581 - DNA, 20 bp, Artificial Sequence
  Synthetic oligonucleotide; AGG chr11 5358632 5358651 5358635 -
ctggcctcataaaatgagtt

SEQ ID NO: 33582 - DNA, 20 bp, Artificial Sequence
  Synthetic oligonucleotide; GGG chr11 5358631 5358650 5358634 -
tggcctcataaaatgagtta

SEQ ID NO: 33583 - DNA, 20 bp, Artificial Sequence
  Synthetic oligonucleotide; GAG chr11 5358629 5358648 5358632 -
gcctcataaaatgagttagg

SEQ ID NO: 33584 - DNA, 20 bp, Artificial Sequence
  Synthetic oligonucleotide; AGG chr11 5358628 5358647 5358631 -
cctcataaaatgagttaggg

SEQ ID NO: 33585 - DNA, 20 bp, Artificial Sequence
  Synthetic oligonucleotide; TAG chr11 5358599 5358618 5358602 -
tcttttactattgattcgaa

SEQ ID NO: 33586 - DNA, 20 bp, Artificial Sequence
  Synthetic oligonucleotide; CAG chr11 5358593 5358612 5358596 -
actattgattcgaatagttt

SEQ ID NO: 33587 - DNA, 20 bp, Artificial Sequence
  Synthetic oligonucleotide; GAG chr11 5358591 5358610 5358594 -
tattgattcgaatagtttca

SEQ ID NO: 33588 - DNA, 20 bp, Artificial Sequence
  Synthetic oligonucleotide; AGG chr11 5358590 5358609 5358593 -
attgattcgaatagtttcag

SEQ ID NO: 33589 - DNA, 20 bp, Artificial Sequence
  Synthetic oligonucleotide; GGG chr11 5358589 5358608 5358592 -
ttgattcgaatagtttcaga

SEQ ID NO: 33590 - DNA, 20 bp, Artificial Sequence
  Synthetic oligonucleotide; TGG chr11 5358584 5358603 5358587 -
tcgaatagtttcagagggaa

SEQ ID NO: 33591 - DNA, 20 bp, Artificial Sequence
  Synthetic oligonucleotide; CAG chr11 5358578 5358597 5358581 -
agtttcagagggaatggtac

SEQ ID NO: 33592 - DNA, 20 bp, Artificial Sequence
  Synthetic oligonucleotide; TGG chr11 5358559 5358578 5358562 -
ccagctcctccttgtacctc

SEQ ID NO: 33593 - DNA, 20 bp, Artificial Sequence
  Synthetic oligonucleotide; TAG chr11 5358556 5358575 5358559 -
gctcctccttgtacctctgg

SEQ ID NO: 33594 - DNA, 20 bp, Artificial Sequence
  Synthetic oligonucleotide; TGG chr11 5358549 5358568 5358552 -
cttgtacctctggtagaatt

SEQ ID NO: 33595 - DNA, 20 bp, Artificial Sequence
  Synthetic oligonucleotide; TGG chr11 5358533 5358552 5358536 -
aatttggctgtgactccatc

SEQ ID NO: 33596 - DNA, 20 bp, Artificial Sequence
  Synthetic oligonucleotide; TGG chr11 5358527 5358546 5358530 -
gctgtgactccatctggtcc

SEQ ID NO: 33597 - DNA, 20 bp, Artificial Sequence
  Synthetic oligonucleotide; TGG chr11 5358516 5358535 5358519 -
atctggtcctggactgtttt

SEQ ID NO: 33598 - DNA, 20 bp, Artificial Sequence
  Synthetic oligonucleotide; TGG chr11 5358512 5358531 5358515 -
ggtcctggactgtttttggt

SEQ ID NO: 33599 - DNA, 20 bp, Artificial Sequence
  Synthetic oligonucleotide; AAG chr11 5358508 5358527 5358511 -
ctggactgtttttggttggt

SEQ ID NO: 33600 - DNA, 20 bp, Artificial Sequence
  Synthetic oligonucleotide; CAG chr11 5358483 5358502 5358486 -
attaattattgcctcaattt

SEQ ID NO: 33601 - DNA, 20 bp, Artificial Sequence
  Synthetic oligonucleotide; TGG chr11 5358470 5358489 5358473 -
tcaatttcagatcctgttat

SEQ ID NO: 33602 - DNA, 20 bp, Artificial Sequence
  Synthetic oligonucleotide; CAG chr11 5358461 5358480 5358464 -
gatcctgttattggtctatt

SEQ ID NO: 33603 - DNA, 20 bp, Artificial Sequence
  Synthetic oligonucleotide; GAG chr11 5358459 5358478 5358462 -
tcctgttattggtctattca

SEQ ID NO: 33604 - DNA, 20 bp, Artificial Sequence
  Synthetic oligonucleotide; TGG chr11 5358442 5358461 5358445 -
tcagagattcaacttcttcc

SEQ ID NO: 33605 - DNA, 20 bp, Artificial Sequence
  Synthetic oligonucleotide; TAG chr11 5358437 5358456 5358440 -
gattcaacttcttcctggtt

SEQ ID NO: 33606 - DNA, 20 bp, Artificial Sequence
  Synthetic oligonucleotide; TGG chr11 5358431 5358450 5358434 -
acttcttcctggtttagtct

SEQ ID NO: 33607 - DNA, 20 bp, Artificial Sequence
  Synthetic oligonucleotide; GGG chr11 5358430 5358449 5358433 -
cttcttcctggtttagtctt

SEQ ID NO: 33608 - DNA, 20 bp, Artificial Sequence
  Synthetic oligonucleotide; GAG chr11 5358428 5358447 5358431 -
tcttcctggtttagtcttgg

SEQ ID NO: 33609 - DNA, 20 bp, Artificial Sequence
  Synthetic oligonucleotide; AGG chr11 5358427 5358446 5358430 -
cttcctggtttagtcttggg

SEQ ID NO: 33610 - DNA, 20 bp, Artificial Sequence
  Synthetic oligonucleotide; GGG chr11 5358426 5358445 5358429 -
ttcctggtttagtcttggga

SEQ ID NO: 33611 - DNA, 20 bp, Artificial Sequence
  Synthetic oligonucleotide; AAG chr11 5358413 5358432 5358416 -
cttgggagggtgtatgtgtc

SEQ ID NO: 33612 - DNA, 20 bp, Artificial Sequence
  Synthetic oligonucleotide; AGG chr11 5358412 5358431 5358415 -
ttgggagggtgtatgtgtca

SEQ ID NO: 33613 - DNA, 20 bp, Artificial Sequence
  Synthetic oligonucleotide; TAG chr11 5358392 5358411 5358395 -
aggaatttatccatttcttc

SEQ ID NO: 33614 - DNA, 20 bp, Artificial Sequence
  Synthetic oligonucleotide; TAG chr11 5358383 5358402 5358386 -
tccatttcttctagattttc

SEQ ID NO: 33615 - DNA, 20 bp, Artificial Sequence
  Synthetic oligonucleotide; TAG chr11 5358370 5358389 5358373 -
gattttctagtttatttgtg

SEQ ID NO: 33616 - DNA, 20 bp, Artificial Sequence
  Synthetic oligonucleotide; GAG chr11 5358368 5358387 5358371 -
ttttctagtttatttgtgta

SEQ ID NO: 33617 - DNA, 20 bp, Artificial Sequence
  Synthetic oligonucleotide; AGG chr11 5358367 5358386 5358370 -
tttctagtttatttgtgtag

SEQ ID NO: 33618 - DNA, 20 bp, Artificial Sequence
  Synthetic oligonucleotide; TAG chr11 5358358 5358377 5358361 -
tatttgtgtagaggtgttta

SEQ ID NO: 33619 - DNA, 20 bp, Artificial Sequence
  Synthetic oligonucleotide; TGG chr11 5358345 5358364 5358348 -
gtgtttatagtattctctga

SEQ ID NO: 33620 - DNA, 20 bp, Artificial Sequence
  Synthetic oligonucleotide; TGG chr11 5358342 5358361 5358345 -
tttatagtattctctgatgg

SEQ ID NO: 33621 - DNA, 20 bp, Artificial Sequence
  Synthetic oligonucleotide; TGG chr11 5358327 5358346 5358330 -
gatggtggtttgtatttctg

SEQ ID NO: 33622 - DNA, 20 bp, Artificial Sequence
  Synthetic oligonucleotide; GGG chr11 5358326 5358345 5358329 -
atggtggtttgtatttctgt

SEQ ID NO: 33623 - DNA, 20 bp, Artificial Sequence
  Synthetic oligonucleotide; CGG chr11 5358321 5358340 5358324 -
ggtttgtatttctgtgggat

SEQ ID NO: 33624 - DNA, 20 bp, Artificial Sequence
  Synthetic oligonucleotide; TGG chr11 5358318 5358337 5358321 -
ttgtatttctgtgggatcgg

SEQ ID NO: 33625 - DNA, 20 bp, Artificial Sequence
  Synthetic oligonucleotide; TAG chr11 5358254 5358273 5358257 -
ttctctcttttcttctttat

SEQ ID NO: 33626 - DNA, 20 bp, Artificial Sequence
  Synthetic oligonucleotide; TAG chr11 5358245 5358264 5358248 -
ttcttctttattagtcttgc

SEQ ID NO: 33627 - DNA, 20 bp, Artificial Sequence
  Synthetic oligonucleotide; CAG chr11 5358242 5358261 5358245 -
ttctttattagtcttgctag

SEQ ID NO: 33628 - DNA, 20 bp, Artificial Sequence
  Synthetic oligonucleotide; CAG chr11 5358208 5358227 5358211 -
tgttgatctttttgaaaaac

SEQ ID NO: 33629 - DNA, 20 bp, Artificial Sequence
  Synthetic oligonucleotide; TGG chr11 5358201 5358220 5358204 -
ctttttgaaaaaccagcttc

SEQ ID NO: 33630 - DNA, 20 bp, Artificial Sequence
  Synthetic oligonucleotide; AAG chr11 5358182 5358201 5358185 -
ctggattcattgattttttg

SEQ ID NO: 33631 - DNA, 20 bp, Artificial Sequence
  Synthetic oligonucleotide; AGG chr11 5358181 5358200 5358184 -
tggattcattgattttttga

SEQ ID NO: 33632 - DNA, 20 bp, Artificial Sequence
  Synthetic oligonucleotide; GGG chr11 5358180 5358199 5358183 -
ggattcattgattttttgaa

SEQ ID NO: 33633 - DNA, 20 bp, Artificial Sequence
  Synthetic oligonucleotide; CAG chr11 5358154 5358173 5358157 -
ttttgtgtctctatttcctt

SEQ ID NO: 33634 - DNA, 20 bp, Artificial Sequence
  Synthetic oligonucleotide; TAG chr11 5358137 5358156 5358140 -
cttcagttctgctctgattt

SEQ ID NO: 33635 - DNA, 20 bp, Artificial Sequence
  Synthetic oligonucleotide; TAG chr11 5358116 5358135 5358119 -
agttatttcttgccttctgc

SEQ ID NO: 33636 - DNA, 20 bp, Artificial Sequence
  Synthetic oligonucleotide; TAG chr11 5358085 5358104 5358088 -
tgtgtttgctcttgcttctc

SEQ ID NO: 33637 - DNA, 20 bp, Artificial Sequence
  Synthetic oligonucleotide; TAG chr11 5358064 5358083 5358067 -
agttcttttaattgtgatgt

SEQ ID NO: 33638 - DNA, 20 bp, Artificial Sequence
  Synthetic oligonucleotide; AGG chr11 5358063 5358082 5358066 -
gttcttttaattgtgatgtt

SEQ ID NO: 33639 - DNA, 20 bp, Artificial Sequence
  Synthetic oligonucleotide; GGG chr11 5358062 5358081 5358065 -
ttcttttaattgtgatgtta

SEQ ID NO: 33640 - DNA, 20 bp, Artificial Sequence
  Synthetic oligonucleotide; TAG chr11 5358050 5358069 5358053 -
tgatgttagggtgtcaattt

SEQ ID NO: 33641 - DNA, 20 bp, Artificial Sequence
  Synthetic oligonucleotide; TGG chr11 5358027 5358046 5358030 -
atctttcctgctttctcttc

SEQ ID NO: 33642 - DNA, 20 bp, Artificial Sequence
  Synthetic oligonucleotide; GGG chr11 5358026 5358045 5358029 -
tctttcctgctttctcttct

SEQ ID NO: 33643 - DNA, 20 bp, Artificial Sequence
  Synthetic oligonucleotide; TAG chr11 5358019 5358038 5358022 -
tgctttctcttctgggcgtt

SEQ ID NO: 33644 - DNA, 20 bp, Artificial Sequence
  Synthetic oligonucleotide; CAG chr11 5357976 5357995 5357979 -
acactgctttgaatgtgtcc

SEQ ID NO: 33645 - DNA, 20 bp, Artificial Sequence
  Synthetic oligonucleotide; GAG chr11 5357974 5357993 5357977 -
actgctttgaatgtgtccca

SEQ ID NO: 33646 - DNA, 20 bp, Artificial Sequence
  Synthetic oligonucleotide; TGG chr11 5357967 5357986 5357970 -
tgaatgtgtcccagagattc

SEQ ID NO: 33647 - DNA, 20 bp, Artificial Sequence
  Synthetic oligonucleotide; TGG chr11 5357942 5357961 5357945 -
tgttgtgtctttgttctctt

SEQ ID NO: 33648 - DNA, 20 bp, Artificial Sequence
  Synthetic oligonucleotide; AAG chr11 5357934 5357953 5357937 -
ctttgttctctttggttcca

SEQ ID NO: 33649 - DNA, 20 bp, Artificial Sequence
  Synthetic oligonucleotide; CAG chr11 5357895 5357914 5357898 -
ccttcattttgttatgaacc

SEQ ID NO: 33650 - DNA, 20 bp, Artificial Sequence
  Synthetic oligonucleotide; TAG chr11 5357892 5357911 5357895 -
tcattttgttatgaacccag

SEQ ID NO: 33651 - DNA, 20 bp, Artificial Sequence
  Synthetic oligonucleotide; CAG chr11 5357884 5357903 5357887 -
ttatgaacccagtagtcatt

SEQ ID NO: 33652 - DNA, 20 bp, Artificial Sequence
  Synthetic oligonucleotide; AGG chr11 5357883 5357902 5357886 -
tatgaacccagtagtcattc

SEQ ID NO: 33653 - DNA, 20 bp, Artificial Sequence
  Synthetic oligonucleotide; GAG chr11 5357881 5357900 5357884 -
tgaacccagtagtcattcag

SEQ ID NO: 33654 - DNA, 20 bp, Artificial Sequence
  Synthetic oligonucleotide; CGG chr11 5357869 5357888 5357872 -
tcattcaggagcaatttgtt

SEQ ID NO: 33655 - DNA, 20 bp, Artificial Sequence
  Synthetic oligonucleotide; TAG chr11 5357858 5357877 5357861 -
caatttgttcggtttccatg

SEQ ID NO: 33656 - DNA, 20 bp, Artificial Sequence
  Synthetic oligonucleotide; GAG chr11 5357853 5357872 5357856 -
tgttcggtttccatgtagtt

SEQ ID NO: 33657 - DNA, 20 bp, Artificial Sequence
  Synthetic oligonucleotide; CGG chr11 5357850 5357869 5357853 -
tcggtttccatgtagttgag

SEQ ID NO: 33658 - DNA, 20 bp, Artificial Sequence
  Synthetic oligonucleotide; GAG chr11 5357843 5357862 5357846 -
ccatgtagttgagcggtttt

SEQ ID NO: 33659 - DNA, 20 bp, Artificial Sequence
  Synthetic oligonucleotide; GAG chr11 5357839 5357858 5357842 -
gtagttgagcggttttgagt

SEQ ID NO: 33660 - DNA, 20 bp, Artificial Sequence
  Synthetic oligonucleotide; GAG chr11 5357824 5357843 5357827 -
tgagtgagtttcttaatcct

SEQ ID NO: 33661 - DNA, 20 bp, Artificial Sequence
  Synthetic oligonucleotide; TAG chr11 5357818 5357837 5357821 -
agtttcttaatcctgagttc

SEQ ID NO: 33662 - DNA, 20 bp, Artificial Sequence
  Synthetic oligonucleotide; TGG chr11 5357802 5357821 5357805 -
gttctagtttgattgcactg

SEQ ID NO: 33663 - DNA, 20 bp, Artificial Sequence
  Synthetic oligonucleotide; GAG chr11 5357796 5357815 5357799 -
gtttgattgcactgtggtct

SEQ ID NO: 33664 - DNA, 20 bp, Artificial Sequence
  Synthetic oligonucleotide; GAG chr11 5357794 5357813 5357797 -
ttgattgcactgtggtctga

SEQ ID NO: 33665 - DNA, 20 bp, Artificial Sequence
  Synthetic oligonucleotide; CAG chr11 5357790 5357809 5357793 -
ttgcactgtggtctgagaga

SEQ ID NO: 33666 - DNA, 20 bp, Artificial Sequence
  Synthetic oligonucleotide; GAG chr11 5357755 5357774 5357758 -
tctgttcttttacatttgct

SEQ ID NO: 33667 - DNA, 20 bp, Artificial Sequence
  Synthetic oligonucleotide; AGG chr11 5357754 5357773 5357757 -
ctgttcttttacatttgctg

SEQ ID NO: 33668 - DNA, 20 bp, Artificial Sequence
  Synthetic oligonucleotide; GAG chr11 5357752 5357771 5357755 -
gttcttttacatttgctgag

SEQ ID NO: 33669 - DNA, 20 bp, Artificial Sequence
  Synthetic oligonucleotide; TGG chr11 5357730 5357749 5357733 -
gtgctttacttccaactatg

SEQ ID NO: 33670 - DNA, 20 bp, Artificial Sequence
  Synthetic oligonucleotide; TGG chr11 5357720 5357739 5357723 -
tccaactatgtggtcaattt

SEQ ID NO: 33671 - DNA, 20 bp, Artificial Sequence
  Synthetic oligonucleotide; TAG chr11 5357715 5357734 5357718 -
ctatgtggtcaattttggaa

SEQ ID NO: 33672 - DNA, 20 bp, Artificial Sequence
  Synthetic oligonucleotide; AGG chr11 5357714 5357733 5357717 -
tatgtggtcaattttggaat

SEQ ID NO: 33673 - DNA, 20 bp, Artificial Sequence
  Synthetic oligonucleotide; TGG chr11 5357709 5357728 5357712 -
ggtcaattttggaataggtg

SEQ ID NO: 33674 - DNA, 20 bp, Artificial Sequence
  Synthetic oligonucleotide; TGG chr11 5357704 5357723 5357707 -
attttggaataggtgtggtg

SEQ ID NO: 33675 - DNA, 20 bp, Artificial Sequence
  Synthetic oligonucleotide; AAG chr11 5357694 5357713 5357697 -
aggtgtggtgtggtgctgaa

SEQ ID NO: 33676 - DNA, 20 bp, Artificial Sequence
  Synthetic oligonucleotide; TGG chr11 5357672 5357691 5357675 -
gaatgtatattctgttgatt

SEQ ID NO: 33677 - DNA, 20 bp, Artificial Sequence
  Synthetic oligonucleotide; GGG chr11 5357671 5357690 5357674 -
aatgtatattctgttgattt

SEQ ID NO: 33678 - DNA, 20 bp, Artificial Sequence
  Synthetic oligonucleotide; GGG chr11 5357670 5357689 5357673 -
atgtatattctgttgatttg

SEQ ID NO: 33679 - DNA, 20 bp, Artificial Sequence
  Synthetic oligonucleotide; TGG chr11 5357667 5357686 5357670 -
tatattctgttgatttgggg

SEQ ID NO: 33680 - DNA, 20 bp, Artificial Sequence
  Synthetic oligonucleotide; GAG chr11 5357665 5357684 5357668 -
tattctgttgatttggggtg

SEQ ID NO: 33681 - DNA, 20 bp, Artificial Sequence
  Synthetic oligonucleotide; GAG chr11 5357663 5357682 5357666 -
ttctgttgatttggggtgga

SEQ ID NO: 33682 - DNA, 20 bp, Artificial Sequence
  Synthetic oligonucleotide; TAG chr11 5357655 5357674 5357658 -
atttggggtggagagttctg

SEQ ID NO: 33683 - DNA, 20 bp, Artificial Sequence
  Synthetic oligonucleotide; TAG chr11 5357644 5357663 5357647 -
agagttctgtagatgtctat

SEQ ID NO: 33684 - DNA, 20 bp, Artificial Sequence
  Synthetic oligonucleotide; AGG chr11 5357643 5357662 5357646 -
gagttctgtagatgtctatt

SEQ ID NO: 33685 - DNA, 20 bp, Artificial Sequence
  Synthetic oligonucleotide; TGG chr11 5357634 5357653 5357637 -
agatgtctattaggtccgct

SEQ ID NO: 33686 - DNA, 20 bp, Artificial Sequence
  Synthetic oligonucleotide; CAG chr11 5357629 5357648 5357632 -
tctattaggtccgcttggtg

SEQ ID NO: 33687 - DNA, 20 bp, Artificial Sequence
  Synthetic oligonucleotide; GAG chr11 5357627 5357646 5357630 -
tattaggtccgcttggtgca

SEQ ID NO: 33688 - DNA, 20 bp, Artificial Sequence
  Synthetic oligonucleotide; GAG chr11 5357622 5357641 5357625 -
ggtccgcttggtgcagagct

SEQ ID NO: 33689 - DNA, 20 bp, Artificial Sequence
  Synthetic oligonucleotide; TGG chr11 5357610 5357629 5357613 -
gcagagctgagttcaattcc

SEQ ID NO: 33690 - DNA, 20 bp, Artificial Sequence
  Synthetic oligonucleotide; CAG chr11 5357548 5357567 5357551 -
gttgatctgtctaatgttga

SEQ ID NO: 33691 - DNA, 20 bp, Artificial Sequence
  Synthetic oligonucleotide; TGG chr11 5357545 5357564 5357548 -
gatctgtctaatgttgacag

SEQ ID NO: 33692 - DNA, 20 bp, Artificial Sequence
  Synthetic oligonucleotide; GGG chr11 5357544 5357563 5357547 -
atctgtctaatgttgacagt

SEQ ID NO: 33693 - DNA, 20 bp, Artificial Sequence
  Synthetic oligonucleotide; GGG chr11 5357543 5357562 5357546 -
tctgtctaatgttgacagtg

SEQ ID NO: 33694 - DNA, 20 bp, Artificial Sequence
  Synthetic oligonucleotide; AAG chr11 5357535 5357554 5357538 -
atgttgacagtggggtgtta

SEQ ID NO: 33695 - DNA, 20 bp, Artificial Sequence
  Synthetic oligonucleotide; GAG chr11 5357513 5357532 5357516 -
gtctcccattgttattgtgt

SEQ ID NO: 33696 - DNA, 20 bp, Artificial Sequence
  Synthetic oligonucleotide; GAG chr11 5357511 5357530 5357514 -
ctcccattgttattgtgtga

SEQ ID NO: 33697 - DNA, 20 bp, Artificial Sequence
  Synthetic oligonucleotide; AAG chr11 5357505 5357524 5357508 -
ttgttattgtgtgagagtct

SEQ ID NO: 33698 - DNA, 20 bp, Artificial Sequence
  Synthetic oligonucleotide; TAG chr11 5357494 5357513 5357497 -
tgagagtctaagtctctttg

SEQ ID NO: 33699 - DNA, 20 bp, Artificial Sequence
  Synthetic oligonucleotide; AGG chr11 5357493 5357512 5357496 -
gagagtctaagtctctttgt

SEQ ID NO: 33700 - DNA, 20 bp, Artificial Sequence
  Synthetic oligonucleotide; AAG chr11 5357485 5357504 5357488 -
aagtctctttgtaggtctct

SEQ ID NO: 33701 - DNA, 20 bp, Artificial Sequence
  Synthetic oligonucleotide; AGG chr11 5357484 5357503 5357487 -
agtctctttgtaggtctcta

SEQ ID NO: 33702 - DNA, 20 bp, Artificial Sequence
  Synthetic oligonucleotide; TGG chr11 5357465 5357484 5357468 -
aaggacttgctttatgaacc

SEQ ID NO: 33703 - DNA, 20 bp, Artificial Sequence
  Synthetic oligonucleotide; GGG chr11 5357464 5357483 5357467 -
aggacttgctttatgaacct

SEQ ID NO: 33704 - DNA, 20 bp, Artificial Sequence
  Synthetic oligonucleotide; TGG chr11 5357450 5357469 5357453 -
gaacctgggtgttcctgtat

SEQ ID NO: 33705 - DNA, 20 bp, Artificial Sequence
  Synthetic oligonucleotide; GGG chr11 5357449 5357468 5357452 -
aacctgggtgttcctgtatt

SEQ ID NO: 33706 - DNA, 20 bp, Artificial Sequence
  Synthetic oligonucleotide; TAG chr11 5357434 5357453 5357437 -
gtattgggtgcatatatgtt

SEQ ID NO: 33707 - DNA, 20 bp, Artificial Sequence
  Synthetic oligonucleotide; AGG chr11 5357433 5357452 5357436 -
tattgggtgcatatatgttt

SEQ ID NO: 33708 - DNA, 20 bp, Artificial Sequence
  Synthetic oligonucleotide; TAG chr11 5357429 5357448 5357432 -
gggtgcatatatgtttagga

SEQ ID NO: 33709 - DNA, 20 bp, Artificial Sequence
  Synthetic oligonucleotide; TAG chr11 5357425 5357444 5357428 -
gcatatatgtttaggatagt

SEQ ID NO: 33710 - DNA, 20 bp, Artificial Sequence
  Synthetic oligonucleotide; TGG chr11 5357385 5357404 5357388 -
atccctttaccattatgtaa

SEQ ID NO: 33711 - DNA, 20 bp, Artificial Sequence
  Synthetic oligonucleotide; TGG chr11 5357356 5357375 5357359 -
ttgtctcttttgatctttgt

SEQ ID NO: 33712 - DNA, 20 bp, Artificial Sequence
  Synthetic oligonucleotide; AAG chr11 5357349 5357368 5357352 -
ttttgatctttgttggttta

SEQ ID NO: 33713 - DNA, 20 bp, Artificial Sequence
  Synthetic oligonucleotide; CAG chr11 5357336 5357355 5357339 -
tggtttaaagcctgttttat

SEQ ID NO: 33714 - DNA, 20 bp, Artificial Sequence
  Synthetic oligonucleotide; GAG chr11 5357334 5357353 5357337 -
gtttaaagcctgttttatca

SEQ ID NO: 33715 - DNA, 20 bp, Artificial Sequence
  Synthetic oligonucleotide; GAG chr11 5357329 5357348 5357332 -
aagcctgttttatcagagat

SEQ ID NO: 33716 - DNA, 20 bp, Artificial Sequence
  Synthetic oligonucleotide; AGG chr11 5357328 5357347 5357331 -
agcctgttttatcagagatg

SEQ ID NO: 33717 - DNA, 20 bp, Artificial Sequence
  Synthetic oligonucleotide; TGG chr11 5357289 5357308 5357292 -
ttttttgttttccattttct

SEQ ID NO: 33718 - DNA, 20 bp, Artificial Sequence
  Synthetic oligonucleotide; TAG chr11 5357286 5357305 5357289 -
tttgttttccattttcttgg

SEQ ID NO: 33719 - DNA, 20 bp, Artificial Sequence
  Synthetic oligonucleotide; GAG chr11 5357260 5357279 5357263 -
ttcctccatccctttatttt

SEQ ID NO: 33720 - DNA, 20 bp, Artificial Sequence
  Synthetic oligonucleotide; GAG chr11 5357236 5357255 5357239 -
ctatgtgtgtgtgtgcacat

SEQ ID NO: 33721 - DNA, 20 bp, Artificial Sequence
  Synthetic oligonucleotide; TGG chr11 5357232 5357251 5357235 -
gtgtgtgtgtgcacatgaga

SEQ ID NO: 33722 - DNA, 20 bp, Artificial Sequence
  Synthetic oligonucleotide; GGG chr11 5357231 5357250 5357234 -
tgtgtgtgtgcacatgagat

SEQ ID NO: 33723 - DNA, 20 bp, Artificial Sequence
  Synthetic oligonucleotide; CAG chr11 5357217 5357236 5357220 -
tgagatgggtttcctgaata

SEQ ID NO: 33724 - DNA, 20 bp, Artificial Sequence
  Synthetic oligonucleotide; TGG chr11 5357206 5357225 5357209 -
tcctgaatacagcacactga

SEQ ID NO: 33725 - DNA, 20 bp, Artificial Sequence
  Synthetic oligonucleotide; GGG chr11 5357205 5357224 5357208 -
cctgaatacagcacactgat

SEQ ID NO: 33726 - DNA, 20 bp, Artificial Sequence
  Synthetic oligonucleotide; TGG chr11 5357161 5357180 5357164 -
gcccgtctgtgtctttttac

SEQ ID NO: 33727 - DNA, 20 bp, Artificial Sequence
  Synthetic oligonucleotide; GAG chr11 5357159 5357178 5357162 -
ccgtctgtgtctttttactg

SEQ ID NO: 33728 - DNA, 20 bp, Artificial Sequence
  Synthetic oligonucleotide; TAG chr11 5357152 5357171 5357155 -
tgtctttttactggagcatt

SEQ ID NO: 33729 - DNA, 20 bp, Artificial Sequence
  Synthetic oligonucleotide; AAG chr11 5357137 5357156 5357140 -
gcatttagcccatttacatt

SEQ ID NO: 33730 - DNA, 20 bp, Artificial Sequence
  Synthetic oligonucleotide; AGG chr11 5357136 5357155 5357139 -
catttagcccatttacatta

SEQ ID NO: 33731 - DNA, 20 bp, Artificial Sequence
  Synthetic oligonucleotide; TAG chr11 5357091 5357110 5357094 -
tgatcctgtcattatgatgt

SEQ ID NO: 33732 - DNA, 20 bp, Artificial Sequence
  Synthetic oligonucleotide; TGG chr11 5357087 5357106 5357090 -
cctgtcattatgatgttagc

SEQ ID NO: 33733 - DNA, 20 bp, Artificial Sequence
  Synthetic oligonucleotide; TAG chr11 5357071 5357090 5357074 -
tagctggttattttgctcat

SEQ ID NO: 33734 - DNA, 20 bp, Artificial Sequence
  Synthetic oligonucleotide; CAG chr11 5357062 5357081 5357065 -
attttgctcattagttgatg

SEQ ID NO: 33735 - DNA, 20 bp, Artificial Sequence
  Synthetic oligonucleotide; TAG chr11 5357051 5357070 5357054 -
tagttgatgcagtttcttcc

SEQ ID NO: 33736 - DNA, 20 bp, Artificial Sequence
  Synthetic oligonucleotide; TGG chr11 5357042 5357061 5357045 -
cagtttcttcctagcctcaa

SEQ ID NO: 33737 - DNA, 20 bp, Artificial Sequence
  Synthetic oligonucleotide; TGG chr11 5357028 5357047 5357031 -
cctcaatggtctttacaatt

SEQ ID NO: 33738 - DNA, 20 bp, Artificial Sequence
  Synthetic oligonucleotide; CAG chr11 5357015 5357034 5357018 -
tacaatttggcatgtttttg

SEQ ID NO: 33739 - DNA, 20 bp, Artificial Sequence
  Synthetic oligonucleotide; TGG chr11 5357012 5357031 5357015 -
aatttggcatgtttttgcag

SEQ ID NO: 33740 - DNA, 20 bp, Artificial Sequence
  Synthetic oligonucleotide; TGG chr11 5357008 5357027 5357011 -
tggcatgtttttgcagtggc

SEQ ID NO: 33741 - DNA, 20 bp, Artificial Sequence
  Synthetic oligonucleotide; CGG chr11 5357002 5357021 5357005 -
gtttttgcagtggctggtac

SEQ ID NO: 33742 - DNA, 20 bp, Artificial Sequence
  Synthetic oligonucleotide; TAG chr11 5356982 5357001 5356985 -
cggttgtgcctttccatatt

SEQ ID NO: 33743 - DNA, 20 bp, Artificial Sequence
  Synthetic oligonucleotide; CAG chr11 5356970 5356989 5356973 -
tccatatttagtgcttcctt

SEQ ID NO: 33744 - DNA, 20 bp, Artificial Sequence
  Synthetic oligonucleotide; AGG chr11 5356969 5356988 5356972 -
ccatatttagtgcttccttc

SEQ ID NO: 33745 - DNA, 20 bp, Artificial Sequence
  Synthetic oligonucleotide; GAG chr11 5356967 5356986 5356970 -
atatttagtgcttccttcag

SEQ ID NO: 33746 - DNA, 20 bp, Artificial Sequence
  Synthetic oligonucleotide; TAG chr11 5356958 5356977 5356961 -
gcttccttcaggagctcttt

SEQ ID NO: 33747 - DNA, 20 bp, Artificial Sequence
  Synthetic oligonucleotide; AGG chr11 5356957 5356976 5356960 -
cttccttcaggagctctttt

SEQ ID NO: 33748 - DNA, 20 bp, Artificial Sequence
  Synthetic oligonucleotide; CAG chr11 5356953 5356972 5356956 -
cttcaggagctcttttaggt

SEQ ID NO: 33749 - DNA, 20 bp, Artificial Sequence
  Synthetic oligonucleotide; AGG chr11 5356952 5356971 5356955 -
ttcaggagctcttttaggtc

SEQ ID NO: 33750 - DNA, 20 bp, Artificial Sequence
  Synthetic oligonucleotide; TGG chr11 5356947 5356966 5356950 -
gagctcttttaggtcaggcc

SEQ ID NO: 33751 - DNA, 20 bp, Artificial Sequence
  Synthetic oligonucleotide; CAG chr11 5356928 5356947 5356931 -
ctggtgatgacaaaatctct

SEQ ID NO: 33752 - DNA, 20 bp, Artificial Sequence
  Synthetic oligonucleotide; AAG chr11 5356909 5356928 5356912 -
tcagcatttgcttgtctgta

SEQ ID NO: 33753 - DNA, 20 bp, Artificial Sequence
  Synthetic oligonucleotide; AAG chr11 5356882 5356901 5356885 -
ttatttctccttcacttatg

SEQ ID NO: 33754 - DNA, 20 bp, Artificial Sequence
  Synthetic oligonucleotide; TAG chr11 5356877 5356896 5356880 -
tctccttcacttatgaagct

SEQ ID NO: 33755 - DNA, 20 bp, Artificial Sequence
  Synthetic oligonucleotide; TGG chr11 5356872 5356891 5356875 -
ttcacttatgaagcttagtt

SEQ ID NO: 33756 - DNA, 20 bp, Artificial Sequence
  Synthetic oligonucleotide; TGG chr11 5356868 5356887 5356871 -
cttatgaagcttagtttggc

SEQ ID NO: 33757 - DNA, 20 bp, Artificial Sequence
  Synthetic oligonucleotide; AAG chr11 5356832 5356851 5356835 -
tgttgaaaattctttccttt

SEQ ID NO: 33758 - DNA, 20 bp, Artificial Sequence
  Synthetic oligonucleotide; AGG chr11 5356831 5356850 5356834 -
gttgaaaattctttccttta

SEQ ID NO: 33759 - DNA, 20 bp, Artificial Sequence
  Synthetic oligonucleotide; TGG chr11 5356817 5356836 5356820 -
cctttaaggatgttgaatat

SEQ ID NO: 33760 - DNA, 20 bp, Artificial Sequence
  Synthetic oligonucleotide; TGG chr11 5356800 5356819 5356803 -
tattggcccccactctcttc

SEQ ID NO: 33761 - DNA, 20 bp, Artificial Sequence
  Synthetic oligonucleotide; TAG chr11 5356793 5356812 5356796 -
ccccactctcttctggcttg

SEQ ID NO: 33762 - DNA, 20 bp, Artificial Sequence
  Synthetic oligonucleotide; GAG chr11 5356791 5356810 5356794 -
ccactctcttctggcttgta

SEQ ID NO: 33763 - DNA, 20 bp, Artificial Sequence
  Synthetic oligonucleotide; GAG chr11 5356780 5356799 5356783 -
tggcttgtagagtttctgct

SEQ ID NO: 33764 - DNA, 20 bp, Artificial Sequence
  Synthetic oligonucleotide; GAG chr11 5356778 5356797 5356781 -
gcttgtagagtttctgctga

SEQ ID NO: 33765 - DNA, 20 bp, Artificial Sequence
  Synthetic oligonucleotide; TGG chr11 5356758 5356777 5356761 -
gagatctgctgttattctga

SEQ ID NO: 33766 - DNA, 20 bp, Artificial Sequence
  Synthetic oligonucleotide; GGG chr11 5356757 5356776 5356760 -
agatctgctgttattctgat

SEQ ID NO: 33767 - DNA, 20 bp, Artificial Sequence
  Synthetic oligonucleotide; TGG chr11 5356744 5356763 5356747 -
ttctgatgggcttccctttg

SEQ ID NO: 33768 - DNA, 20 bp, Artificial Sequence
  Synthetic oligonucleotide; GGG chr11 5356743 5356762 5356746 -
tctgatgggcttccctttgt

SEQ ID NO: 33769 - DNA, 20 bp, Artificial Sequence
  Synthetic oligonucleotide; TGG chr11 5356722 5356741 5356725 -
ggtaacccgacctttctctc

SEQ ID NO: 33770 - DNA, 20 bp, Artificial Sequence
  Synthetic oligonucleotide; TGG chr11 5356686 5356705 5356689 -
ttttcccttcatttcaactt

SEQ ID NO: 33771 - DNA, 20 bp, Artificial Sequence
  Synthetic oligonucleotide; TAG chr11 5356659 5356678 5356662 -
tctgacaattatgtgccttg

SEQ ID NO: 33772 - DNA, 20 bp, Artificial Sequence
  Synthetic oligonucleotide; AAG chr11 5356645 5356664 5356648 -
gccttgtagttgctcttctc

SEQ ID NO: 33773 - DNA, 20 bp, Artificial Sequence
  Synthetic oligonucleotide; AGG chr11 5356644 5356663 5356647 -
ccttgtagttgctcttctca

SEQ ID NO: 33774 - DNA, 20 bp, Artificial Sequence
  Synthetic oligonucleotide; GAG chr11 5356642 5356661 5356645 -
ttgtagttgctcttctcaag

SEQ ID NO: 33775 - DNA, 20 bp, Artificial Sequence
  Synthetic oligonucleotide; TGG chr11 5356631 5356650 5356634 -
cttctcaaggagtatctttg

SEQ ID NO: 33776 - DNA, 20 bp, Artificial Sequence
  Synthetic oligonucleotide; TAG chr11 5356586 5356605 5356589 -
tgaatgttgacctgccttgc

SEQ ID NO: 33777 - DNA, 20 bp, Artificial Sequence
  Synthetic oligonucleotide; TGG chr11 5356581 5356600 5356584 -
gttgacctgccttgctagat

SEQ ID NO: 33778 - DNA, 20 bp, Artificial Sequence
  Synthetic oligonucleotide; GGG chr11 5356580 5356599 5356583 -
ttgacctgccttgctagatt

SEQ ID NO: 33779 - DNA, 20 bp, Artificial Sequence
  Synthetic oligonucleotide; GGG chr11 5356579 5356598 5356582 -
tgacctgccttgctagattg

SEQ ID NO: 33780 - DNA, 20 bp, Artificial Sequence
  Synthetic oligonucleotide; AAG chr11 5356576 5356595 5356579 -
cctgccttgctagattgggg

SEQ ID NO: 33781 - DNA, 20 bp, Artificial Sequence
  Synthetic oligonucleotide; TGG chr11 5356567 5356586 5356570 -
ctagattggggaagttctcc

SEQ ID NO: 33782 - DNA, 20 bp, Artificial Sequence
  Synthetic oligonucleotide; CAG chr11 5356553 5356572 5356556 -
ttctcctggataatatcctg

SEQ ID NO: 33783 - DNA, 20 bp, Artificial Sequence
  Synthetic oligonucleotide; GAG chr11 5356551 5356570 5356554 -
ctcctggataatatcctgca

SEQ ID NO: 33784 - DNA, 20 bp, Artificial Sequence
  Synthetic oligonucleotide; TGG chr11 5356536 5356555 5356539 -
ctgcagagtgttttccaact

SEQ ID NO: 33785 - DNA, 20 bp, Artificial Sequence
  Synthetic oligonucleotide; CAG chr11 5356512 5356531 5356515 -
tccattctgcccgtcacttt

SEQ ID NO: 33786 - DNA, 20 bp, Artificial Sequence
  Synthetic oligonucleotide; AGG chr11 5356511 5356530 5356514 -
ccattctgcccgtcactttc

SEQ ID NO: 33787 - DNA, 20 bp, Artificial Sequence
  Synthetic oligonucleotide; CAG chr11 5356499 5356518 5356502 -
tcactttcaggtacaccaat

SEQ ID NO: 33788 - DNA, 20 bp, Artificial Sequence
  Synthetic oligonucleotide; TAG chr11 5356493 5356512 5356496 -
tcaggtacaccaatcagata

SEQ ID NO: 33789 - DNA, 20 bp, Artificial Sequence
  Synthetic oligonucleotide; TGG chr11 5356487 5356506 5356490 -
acaccaatcagatatagatt

SEQ ID NO: 33790 - DNA, 20 bp, Artificial Sequence
  Synthetic oligonucleotide; TAG chr11 5356474 5356493 5356477 -
atagatttggtcttttcaca

SEQ ID NO: 33791 - DNA, 20 bp, Artificial Sequence
  Synthetic oligonucleotide; TGG chr11 5356459 5356478 5356462 -
tcacatagtcccatatttct

SEQ ID NO: 33792 - DNA, 20 bp, Artificial Sequence
  Synthetic oligonucleotide; GAG chr11 5356457 5356476 5356460 -
acatagtcccatatttcttg

SEQ ID NO: 33793 - DNA, 20 bp, Artificial Sequence
  Synthetic oligonucleotide; AGG chr11 5356456 5356475 5356459 -
catagtcccatatttcttgg

SEQ ID NO: 33794 - DNA, 20 bp, Artificial Sequence
  Synthetic oligonucleotide; CAG chr11 5356361 5356380 5356364 -
atcactgataccctttcttc

SEQ ID NO: 33795 - DNA, 20 bp, Artificial Sequence
  Synthetic oligonucleotide; CAG chr11 5356348 5356367 5356351 -
tttcttccagttgatcgaat

SEQ ID NO: 33796 - DNA, 20 bp, Artificial Sequence
  Synthetic oligonucleotide; GAG chr11 5356340 5356359 5356343 -
agttgatcgaatcagctact

SEQ ID NO: 33797 - DNA, 20 bp, Artificial Sequence
  Synthetic oligonucleotide; TAG chr11 5356319 5356338 5356322 -
agtcttgtgcattcatcatg

SEQ ID NO: 33798 - DNA, 20 bp, Artificial Sequence
  Synthetic oligonucleotide; TGG chr11 5356305 5356324 5356308 -
atcatgtagttctcatgcct

SEQ ID NO: 33799 - DNA, 20 bp, Artificial Sequence
  Synthetic oligonucleotide; CAG chr11 5356298 5356317 5356301 -
agttctcatgccttggtttt

SEQ ID NO: 33800 - DNA, 20 bp, Artificial Sequence
  Synthetic oligonucleotide; CAG chr11 5356289 5356308 5356292 -
gccttggttttcagctccat

SEQ ID NO: 33801 - DNA, 20 bp, Artificial Sequence
  Synthetic oligonucleotide; AGG chr11 5356288 5356307 5356291 -
ccttggttttcagctccatc

SEQ ID NO: 33802 - DNA, 20 bp, Artificial Sequence
  Synthetic oligonucleotide; AAG chr11 5356279 5356298 5356282 -
tcagctccatcaggtccttt

SEQ ID NO: 33803 - DNA, 20 bp, Artificial Sequence
  Synthetic oligonucleotide; AGG chr11 5356278 5356297 5356281 -
cagctccatcaggtccttta

SEQ ID NO: 33804 - DNA, 20 bp, Artificial Sequence
  Synthetic oligonucleotide; TGG chr11 5356263 5356282 5356266 -
ctttaaggacttctctgtat

SEQ ID NO: 33805 - DNA, 20 bp, Artificial Sequence
  Synthetic oligonucleotide; TAG chr11 5356254 5356273 5356257 -
cttctctgtattggttattc

SEQ ID NO: 33806 - DNA, 20 bp, Artificial Sequence
  Synthetic oligonucleotide; TAG chr11 5356250 5356269 5356253 -
tctgtattggttattctagt

SEQ ID NO: 33807 - DNA, 20 bp, Artificial Sequence
  Synthetic oligonucleotide; TAG chr11 5356243 5356262 5356246 -
tggttattctagttagccat

SEQ ID NO: 33808 - DNA, 20 bp, Artificial Sequence
  Synthetic oligonucleotide; AAG chr11 5356226 5356245 5356229 -
cattagtctaatttattttc

SEQ ID NO: 33809 - DNA, 20 bp, Artificial Sequence
  Synthetic oligonucleotide; AGG chr11 5356225 5356244 5356228 -
attagtctaatttattttca

SEQ ID NO: 33810 - DNA, 20 bp, Artificial Sequence
  Synthetic oligonucleotide; TGG chr11 5356204 5356223 5356207 -
ggtttttaacttttttgcca

SEQ ID NO: 33811 - DNA, 20 bp, Artificial Sequence
  Synthetic oligonucleotide; GGG chr11 5356203 5356222 5356206 -
gtttttaacttttttgccat

SEQ ID NO: 33812 - DNA, 20 bp, Artificial Sequence
  Synthetic oligonucleotide; GAG chr11 5356197 5356216 5356200 -
aacttttttgccatgggttc

SEQ ID NO: 33813 - DNA, 20 bp, Artificial Sequence
  Synthetic oligonucleotide; TAG chr11 5356184 5356203 5356187 -
tgggttcgagcttcctcctt

SEQ ID NO: 33814 - DNA, 20 bp, Artificial Sequence
  Synthetic oligonucleotide; CGG chr11 5356179 5356198 5356182 -
tcgagcttcctcctttagct

SEQ ID NO: 33815 - DNA, 20 bp, Artificial Sequence
  Synthetic oligonucleotide; GAG chr11 5356177 5356196 5356180 -
gagcttcctcctttagctcg

SEQ ID NO: 33816 - DNA, 20 bp, Artificial Sequence
  Synthetic oligonucleotide; TAG chr11 5356174 5356193 5356177 -
cttcctcctttagctcggag

SEQ ID NO: 33817 - DNA, 20 bp, Artificial Sequence
  Synthetic oligonucleotide; AAG chr11 5356159 5356178 5356162 -
cggagtagtttgatcgtctg

SEQ ID NO: 33818 - DNA, 20 bp, Artificial Sequence
  Synthetic oligonucleotide; AAG chr11 5356135 5356154 5356138 -
cttcttctctcaacttgtca

SEQ ID NO: 33819 - DNA, 20 bp, Artificial Sequence
  Synthetic oligonucleotide; CAG chr11 5356120 5356139 5356123 -
tgtcaaagtcattctctgtc

SEQ ID NO: 33820 - DNA, 20 bp, Artificial Sequence
  Synthetic oligonucleotide; TGG chr11 5356103 5356122 5356106 -
gtccagctttgtaccgttgc

SEQ ID NO: 33821 - DNA, 20 bp, Artificial Sequence
  Synthetic oligonucleotide; GAG chr11 5356099 5356118 5356102 -
agctttgtaccgttgctggt

SEQ ID NO: 33822 - DNA, 20 bp, Artificial Sequence
  Synthetic oligonucleotide; AGG chr11 5356098 5356117 5356101 -
gctttgtaccgttgctggtg

SEQ ID NO: 33823 - DNA, 20 bp, Artificial Sequence
  Synthetic oligonucleotide; GAG chr11 5356096 5356115 5356099 -
tttgtaccgttgctggtgag

SEQ ID NO: 33824 - DNA, 20 bp, Artificial Sequence
  Synthetic oligonucleotide; TGG chr11 5356082 5356101 5356085 -
ggtgaggagctgcattcctt

SEQ ID NO: 33825 - DNA, 20 bp, Artificial Sequence
  Synthetic oligonucleotide; GAG chr11 5356080 5356099 5356083 -
tgaggagctgcattcctttg

SEQ ID NO: 33826 - DNA, 20 bp, Artificial Sequence
  Synthetic oligonucleotide; AGG chr11 5356079 5356098 5356082 -
gaggagctgcattcctttgg

SEQ ID NO: 33827 - DNA, 20 bp, Artificial Sequence
  Synthetic oligonucleotide; GAG chr11 5356077 5356096 5356080 -
ggagctgcattcctttggag

SEQ ID NO: 33828 - DNA, 20 bp, Artificial Sequence
  Synthetic oligonucleotide; AGG chr11 5356076 5356095 5356079 -
gagctgcattcctttggagg

SEQ ID NO: 33829 - DNA, 20 bp, Artificial Sequence
  Synthetic oligonucleotide; GAG chr11 5356074 5356093 5356077 -
gctgcattcctttggaggag

SEQ ID NO: 33830 - DNA, 20 bp, Artificial Sequence
  Synthetic oligonucleotide; GAG chr11 5356072 5356091 5356075 -
tgcattcctttggaggagga

SEQ ID NO: 33831 - DNA, 20 bp, Artificial Sequence
  Synthetic oligonucleotide; AGG chr11 5356071 5356090 5356074 -
gcattcctttggaggaggag

SEQ ID NO: 33832 - DNA, 20 bp, Artificial Sequence
  Synthetic oligonucleotide; TAG chr11 5356056 5356075 5356059 -
aggagaggcactctgatttt

SEQ ID NO: 33833 - DNA, 20 bp, Artificial Sequence
  Synthetic oligonucleotide; GAG chr11 5356054 5356073 5356057 -
gagaggcactctgattttta

SEQ ID NO: 33834 - DNA, 20 bp, Artificial Sequence
  Synthetic oligonucleotide; CAG chr11 5356047 5356066 5356050 -
actctgatttttagagtttc

SEQ ID NO: 33835 - DNA, 20 bp, Artificial Sequence
  Synthetic oligonucleotide; TGG chr11 5356015 5356034 5356018 -
tctgtttttccccatctttg

SEQ ID NO: 33836 - DNA, 20 bp, Artificial Sequence
  Synthetic oligonucleotide; TGG chr11 5355999 5356018 5356002 -
tttgtggttttatctacctt

SEQ ID NO: 33837 - DNA, 20 bp, Artificial Sequence
  Synthetic oligonucleotide; TGG chr11 5355986 5356005 5355989 -
ctacctttggtctttgatga

SEQ ID NO: 33838 - DNA, 20 bp, Artificial Sequence
  Synthetic oligonucleotide; CAG chr11 5355976 5355995 5355979 -
tctttgatgatggtgacgta

SEQ ID NO: 33839 - DNA, 20 bp, Artificial Sequence
  Synthetic oligonucleotide; TGG chr11 5355972 5355991 5355975 -
tgatgatggtgacgtacaga

SEQ ID NO: 33840 - DNA, 20 bp, Artificial Sequence
  Synthetic oligonucleotide; GGG chr11 5355971 5355990 5355974 -
gatgatggtgacgtacagat

SEQ ID NO: 33841 - DNA, 20 bp, Artificial Sequence
  Synthetic oligonucleotide; TGG chr11 5355964 5355983 5355967 -
gtgacgtacagatgggtttt

SEQ ID NO: 33842 - DNA, 20 bp, Artificial Sequence
  Synthetic oligonucleotide; TGG chr11 5355959 5355978 5355962 -
gtacagatgggtttttggtg

SEQ ID NO: 33843 - DNA, 20 bp, Artificial Sequence
  Synthetic oligonucleotide; TAG chr11 5355939 5355958 5355942 -
tggatgtcctttctgtttgt

SEQ ID NO: 33844 - DNA, 20 bp, Artificial Sequence
  Synthetic oligonucleotide; CAG chr11 5355924 5355943 5355927 -
tttgttagttttccttctaa

SEQ ID NO: 33845 - DNA, 20 bp, Artificial Sequence
  Synthetic oligonucleotide; AGG chr11 5355923 5355942 5355926 -
ttgttagttttccttctaac

SEQ ID NO: 33846 - DNA, 20 bp, Artificial Sequence
  Synthetic oligonucleotide; CAG chr11 5355915 5355934 5355918 -
tttccttctaacaggaccct

SEQ ID NO: 33847 - DNA, 20 bp, Artificial Sequence
  Synthetic oligonucleotide; CAG chr11 5355908 5355927 5355911 -
ctaacaggaccctcagcttg

SEQ ID NO: 33848 - DNA, 20 bp, Artificial Sequence
  Synthetic oligonucleotide; CAG chr11 5355905 5355924 5355908 -
acaggaccctcagcttgcag

SEQ ID NO: 33849 - DNA, 20 bp, Artificial Sequence
  Synthetic oligonucleotide; AAG chr11 5355894 5355913 5355897 -
agcttgcagcagatttttaa

SEQ ID NO: 33850 - DNA, 20 bp, Artificial Sequence
  Synthetic oligonucleotide; CAG chr11 5355885 5355904 5355888 -
cagatttttaaaagaacttc

SEQ ID NO: 33851 - DNA, 20 bp, Artificial Sequence
  Synthetic oligonucleotide; AGG chr11 5355884 5355903 5355887 -
agatttttaaaagaacttcc

SEQ ID NO: 33852 - DNA, 20 bp, Artificial Sequence
  Synthetic oligonucleotide; CAG chr11 5355849 5355868 5355852 -
tattgacgcctatgtcacta

SEQ ID NO: 33853 - DNA, 20 bp, Artificial Sequence
  Synthetic oligonucleotide; AGG chr11 5355848 5355867 5355851 -
attgacgcctatgtcactac

SEQ ID NO: 33854 - DNA, 20 bp, Artificial Sequence
  Synthetic oligonucleotide; CAG chr11 5355842 5355861 5355845 -
gcctatgtcactacaggaat

SEQ ID NO: 33855 - DNA, 20 bp, Artificial Sequence
  Synthetic oligonucleotide; GAG chr11 5355840 5355859 5355843 -
ctatgtcactacaggaatca

SEQ ID NO: 33856 - DNA, 20 bp, Artificial Sequence
  Synthetic oligonucleotide; CAG chr11 5355837 5355856 5355840 -
tgtcactacaggaatcagag

SEQ ID NO: 33857 - DNA, 20 bp, Artificial Sequence
  Synthetic oligonucleotide; AGG chr11 5355836 5355855 5355839 -
gtcactacaggaatcagagc

SEQ ID NO: 33858 - DNA, 20 bp, Artificial Sequence
  Synthetic oligonucleotide; GGG chr11 5355835 5355854 5355838 -
tcactacaggaatcagagca

SEQ ID NO: 33859 - DNA, 20 bp, Artificial Sequence
  Synthetic oligonucleotide; AAG chr11 5355815 5355834 5355818 -
gggcattacattgatccttt

SEQ ID NO: 33860 - DNA, 20 bp, Artificial Sequence
  Synthetic oligonucleotide; AAG chr11 5355755 5355774 5355758 -
ttttttttttttaattttta

SEQ ID NO: 33861 - DNA, 20 bp, Artificial Sequence
  Synthetic oligonucleotide; AGG chr11 5355754 5355773 5355757 -
tttttttttttaatttttaa

SEQ ID NO: 33862 - DNA, 20 bp, Artificial Sequence
  Synthetic oligonucleotide; TAG chr11 5355744 5355763 5355747 -
taatttttaaaggtaattgt

SEQ ID NO: 33863 - DNA, 20 bp, Artificial Sequence
  Synthetic oligonucleotide; AAG chr11 5355732 5355751 5355735 -
gtaattgttagaaatttccc

SEQ ID NO: 33864 - DNA, 20 bp, Artificial Sequence
  Synthetic oligonucleotide; AGG chr11 5355731 5355750 5355734 -
taattgttagaaatttccca

SEQ ID NO: 33865 - DNA, 20 bp, Artificial Sequence
  Synthetic oligonucleotide; CAG chr11 5355689 5355708 5355692 -
cactgaaaacataactttta

SEQ ID NO: 33866 - DNA, 20 bp, Artificial Sequence
  Synthetic oligonucleotide; TGG chr11 5355678 5355697 5355681 -
taacttttacagatgatttg

SEQ ID NO: 33867 - DNA, 20 bp, Artificial Sequence
  Synthetic oligonucleotide; CAG chr11 5355672 5355691 5355675 -
ttacagatgatttgtggata

SEQ ID NO: 33868 - DNA, 20 bp, Artificial Sequence
  Synthetic oligonucleotide; TAG chr11 5355648 5355667 5355651 -
acacatcacctatcttactt

SEQ ID NO: 33869 - DNA, 20 bp, Artificial Sequence
  Synthetic oligonucleotide; AGG chr11 5355647 5355666 5355650 -
cacatcacctatcttacttt

SEQ ID NO: 33870 - DNA, 20 bp, Artificial Sequence
  Synthetic oligonucleotide; CAG chr11 5355643 5355662 5355646 -
tcacctatcttactttagga

SEQ ID NO: 33871 - DNA, 20 bp, Artificial Sequence
  Synthetic oligonucleotide; AAG chr11 5355634 5355653 5355637 -
ttactttaggacagtctgtg

SEQ ID NO: 33872 - DNA, 20 bp, Artificial Sequence
  Synthetic oligonucleotide; CAG chr11 5355613 5355632 5355616 -
agatgatatttttcctgctg

SEQ ID NO: 33873 - DNA, 20 bp, Artificial Sequence
  Synthetic oligonucleotide; AAG chr11 5355600 5355619 5355603 -
cctgctgcagttcctttgtc

SEQ ID NO: 33874 - DNA, 20 bp, Artificial Sequence
  Synthetic oligonucleotide; TAG chr11 5355591 5355610 5355594 -
gttcctttgtcaagtgactt

SEQ ID NO: 33875 - DNA, 20 bp, Artificial Sequence
  Synthetic oligonucleotide; CAG chr11 5355587 5355606 5355590 -
ctttgtcaagtgactttaga

SEQ ID NO: 33876 - DNA, 20 bp, Artificial Sequence
  Synthetic oligonucleotide; CAG chr11 5355581 5355600 5355584 -
caagtgactttagacagata

SEQ ID NO: 33877 - DNA, 20 bp, Artificial Sequence
  Synthetic oligonucleotide; AGG chr11 5355580 5355599 5355583 -
aagtgactttagacagatac

SEQ ID NO: 33878 - DNA, 20 bp, Artificial Sequence
  Synthetic oligonucleotide; AAG chr11 5355572 5355591 5355575 -
ttagacagatacaggactgc

SEQ ID NO: 33879 - DNA, 20 bp, Artificial Sequence
  Synthetic oligonucleotide; GAG chr11 5355570 5355589 5355573 -
agacagatacaggactgcaa

SEQ ID NO: 33880 - DNA, 20 bp, Artificial Sequence
  Synthetic oligonucleotide; CAG chr11 5355562 5355581 5355565 -
acaggactgcaagagtgact

SEQ ID NO: 33881 - DNA, 20 bp, Artificial Sequence
  Synthetic oligonucleotide; AGG chr11 5355561 5355580 5355564 -
caggactgcaagagtgactc

SEQ ID NO: 33882 - DNA, 20 bp, Artificial Sequence
  Synthetic oligonucleotide; TGG chr11 5355552 5355571 5355555 -
aagagtgactcaggtcatgc

SEQ ID NO: 33883 - DNA, 20 bp, Artificial Sequence
  Synthetic oligonucleotide; TAG chr11 5355547 5355566 5355550 -
tgactcaggtcatgctggca

SEQ ID NO: 33884 - DNA, 20 bp, Artificial Sequence
  Synthetic oligonucleotide; AGG chr11 5355546 5355565 5355549 -
gactcaggtcatgctggcat

SEQ ID NO: 33885 - DNA, 20 bp, Artificial Sequence
  Synthetic oligonucleotide; GAG chr11 5355544 5355563 5355547 -
ctcaggtcatgctggcatag

SEQ ID NO: 33886 - DNA, 20 bp, Artificial Sequence
  Synthetic oligonucleotide; AAG chr11 5355541 5355560 5355544 -
aggtcatgctggcataggag

SEQ ID NO: 33887 - DNA, 20 bp, Artificial Sequence
  Synthetic oligonucleotide; CAG chr11 5355538 5355557 5355541 -
tcatgctggcataggagaag

SEQ ID NO: 33888 - DNA, 20 bp, Artificial Sequence
  Synthetic oligonucleotide; AGG chr11 5355537 5355556 5355540 -
catgctggcataggagaagc

SEQ ID NO: 33889 - DNA, 20 bp, Artificial Sequence
  Synthetic oligonucleotide; TAG chr11 5355531 5355550 5355534 -
ggcataggagaagcaggtgc

SEQ ID NO: 33890 - DNA, 20 bp, Artificial Sequence
  Synthetic oligonucleotide; TAG chr11 5355514 5355533 5355517 -
tgctagtgtttcacttgaac

SEQ ID NO: 33891 - DNA, 20 bp, Artificial Sequence
  Synthetic oligonucleotide; TGG chr11 5355507 5355526 5355510 -
gtttcacttgaactagttgt

SEQ ID NO: 33892 - DNA, 20 bp, Artificial Sequence
  Synthetic oligonucleotide; GGG chr11 5355506 5355525 5355509 -
tttcacttgaactagttgtt

SEQ ID NO: 33893 - DNA, 20 bp, Artificial Sequence
  Synthetic oligonucleotide; TGG chr11 5355502 5355521 5355505 -
acttgaactagttgttgggc

SEQ ID NO: 33894 - DNA, 20 bp, Artificial Sequence
  Synthetic oligonucleotide; GGG chr11 5355501 5355520 5355504 -
cttgaactagttgttgggct

SEQ ID NO: 33895 - DNA, 20 bp, Artificial Sequence
  Synthetic oligonucleotide; GGG chr11 5355500 5355519 5355503 -
ttgaactagttgttgggctg

SEQ ID NO: 33896 - DNA, 20 bp, Artificial Sequence
  Synthetic oligonucleotide; TGG chr11 5355497 5355516 5355500 -
aactagttgttgggctgggg

SEQ ID NO: 33897 - DNA, 20 bp, Artificial Sequence
  Synthetic oligonucleotide; AAG chr11 5355489 5355508 5355492 -
gttgggctggggtggaatga

SEQ ID NO: 33898 - DNA, 20 bp, Artificial Sequence
  Synthetic oligonucleotide; TAG chr11 5355481 5355500 5355484 -
ggggtggaatgaaagctccc

SEQ ID NO: 33899 - DNA, 20 bp, Artificial Sequence
  Synthetic oligonucleotide; AGG chr11 5355480 5355499 5355483 -
gggtggaatgaaagctccct

SEQ ID NO: 33900 - DNA, 20 bp, Artificial Sequence
  Synthetic oligonucleotide; GAG chr11 5355473 5355492 5355476 -
atgaaagctccctaggccat

SEQ ID NO: 33901 - DNA, 20 bp, Artificial Sequence
  Synthetic oligonucleotide; AGG chr11 5355472 5355491 5355475 -
tgaaagctccctaggccatg

SEQ ID NO: 33902 - DNA, 20 bp, Artificial Sequence
  Synthetic oligonucleotide; TGG chr11 5355455 5355474 5355458 -
atgaggacatctttgcaatg

SEQ ID NO: 33903 - DNA, 20 bp, Artificial Sequence
  Synthetic oligonucleotide; GAG chr11 5355453 5355472 5355456 -
gaggacatctttgcaatgtg

SEQ ID NO: 33904 - DNA, 20 bp, Artificial Sequence
  Synthetic oligonucleotide; GAG chr11 5355451 5355470 5355454 -
ggacatctttgcaatgtgga

SEQ ID NO: 33905 - DNA, 20 bp, Artificial Sequence
  Synthetic oligonucleotide; AGG chr11 5355450 5355469 5355453 -
gacatctttgcaatgtggag

SEQ ID NO: 33906 - DNA, 20 bp, Artificial Sequence
  Synthetic oligonucleotide; CAG chr11 5355439 5355458 5355442 -
aatgtggagaggacccaaat

SEQ ID NO: 33907 - DNA, 20 bp, Artificial Sequence
  Synthetic oligonucleotide; TGG chr11 5355436 5355455 5355439 -
gtggagaggacccaaatcag

SEQ ID NO: 33908 - DNA, 20 bp, Artificial Sequence
  Synthetic oligonucleotide; GGG chr11 5355435 5355454 5355438 -
tggagaggacccaaatcagt

SEQ ID NO: 33909 - DNA, 20 bp, Artificial Sequence
  Synthetic oligonucleotide; AAG chr11 5355413 5355432 5355416 -
gtgttgctctttgaatgttg

SEQ ID NO: 33910 - DNA, 20 bp, Artificial Sequence
  Synthetic oligonucleotide; AGG chr11 5355412 5355431 5355415 -
tgttgctctttgaatgttga

SEQ ID NO: 33911 - DNA, 20 bp, Artificial Sequence
  Synthetic oligonucleotide; CAG chr11 5355403 5355422 5355406 -
ttgaatgttgaaggccttgt

SEQ ID NO: 33912 - DNA, 20 bp, Artificial Sequence
  Synthetic oligonucleotide; TGG chr11 5355395 5355414 5355398 -
tgaaggccttgtcagcatac

SEQ ID NO: 33913 - DNA, 20 bp, Artificial Sequence
  Synthetic oligonucleotide; CAG chr11 5355387 5355406 5355390 -
ttgtcagcatactggtcacc

SEQ ID NO: 33914 - DNA, 20 bp, Artificial Sequence
  Synthetic oligonucleotide; AAG chr11 5355354 5355373 5355357 -
acttcatactgtttgtacca

SEQ ID NO: 33915 - DNA, 20 bp, Artificial Sequence
  Synthetic oligonucleotide; CAG chr11 5355346 5355365 5355349 -
ctgtttgtaccaaagcacca

SEQ ID NO: 33916 - DNA, 20 bp, Artificial Sequence
  Synthetic oligonucleotide; TAG chr11 5355328 5355347 5355331 -
cacagtttccttatgaaact

SEQ ID NO: 33917 - DNA, 20 bp, Artificial Sequence
  Synthetic oligonucleotide; AAG chr11 5355321 5355340 5355324 -
tccttatgaaacttagcttc

SEQ ID NO: 33918 - DNA, 20 bp, Artificial Sequence
  Synthetic oligonucleotide; AGG chr11 5355320 5355339 5355323 -
ccttatgaaacttagcttca

SEQ ID NO: 33919 - DNA, 20 bp, Artificial Sequence
  Synthetic oligonucleotide; TGG chr11 5355316 5355335 5355319 -
atgaaacttagcttcaaggc

SEQ ID NO: 33920 - DNA, 20 bp, Artificial Sequence
  Synthetic oligonucleotide; GAG chr11 5355314 5355333 5355317 -
gaaacttagcttcaaggctg

SEQ ID NO: 33921 - DNA, 20 bp, Artificial Sequence
  Synthetic oligonucleotide; AAG chr11 5355301 5355320 5355304 -
aaggctggagatgtttttga

SEQ ID NO: 33922 - DNA, 20 bp, Artificial Sequence
  Synthetic oligonucleotide; TGG chr11 5355261 5355280 5355264 -
attcgtcttgactataataa

SEQ ID NO: 33923 - DNA, 20 bp, Artificial Sequence
  Synthetic oligonucleotide; AAG chr11 5355245 5355264 5355248 -
ataatggtaacttttcttgt

SEQ ID NO: 33924 - DNA, 20 bp, Artificial Sequence
  Synthetic oligonucleotide; TAG chr11 5355187 5355206 5355190 -
ctgaaattctacttctgcct

SEQ ID NO: 33925 - DNA, 20 bp, Artificial Sequence
  Synthetic oligonucleotide; CAG chr11 5355183 5355202 5355186 -
aattctacttctgccttaga

SEQ ID NO: 33926 - DNA, 20 bp, Artificial Sequence
  Synthetic oligonucleotide; GAG chr11 5355181 5355200 5355184 -
ttctacttctgccttagaca

SEQ ID NO: 33927 - DNA, 20 bp, Artificial Sequence
  Synthetic oligonucleotide; AGG chr11 5355180 5355199 5355183 -
tctacttctgccttagacag

SEQ ID NO: 33928 - DNA, 20 bp, Artificial Sequence
  Synthetic oligonucleotide; AAG chr11 5355159 5355178 5355162 -
ggctcctatccttcctcctg

SEQ ID NO: 33929 - DNA, 20 bp, Artificial Sequence
  Synthetic oligonucleotide; GAG chr11 5355149 5355168 5355152 -
cttcctcctgaagctctgtt

SEQ ID NO: 33930 - DNA, 20 bp, Artificial Sequence
  Synthetic oligonucleotide; TGG chr11 5355141 5355160 5355144 -
tgaagctctgttgagcccga

SEQ ID NO: 33931 - DNA, 20 bp, Artificial Sequence
  Synthetic oligonucleotide; GAG chr11 5355139 5355158 5355142 -
aagctctgttgagcccgatg

SEQ ID NO: 33932 - DNA, 20 bp, Artificial Sequence
  Synthetic oligonucleotide; AGG chr11 5355138 5355157 5355141 -
agctctgttgagcccgatgg

SEQ ID NO: 33933 - DNA, 20 bp, Artificial Sequence
  Synthetic oligonucleotide; TGG chr11 5355135 5355154 5355138 -
tctgttgagcccgatggagg

SEQ ID NO: 33934 - DNA, 20 bp, Artificial Sequence
  Synthetic oligonucleotide; GGG chr11 5355134 5355153 5355137 -
ctgttgagcccgatggaggt

SEQ ID NO: 33935 - DNA, 20 bp, Artificial Sequence
  Synthetic oligonucleotide; CAG chr11 5355131 5355150 5355134 -
ttgagcccgatggaggtggg

SEQ ID NO: 33936 - DNA, 20 bp, Artificial Sequence
  Synthetic oligonucleotide; AGG chr11 5355130 5355149 5355133 -
tgagcccgatggaggtgggc

SEQ ID NO: 33937 - DNA, 20 bp, Artificial Sequence
  Synthetic oligonucleotide; TAG chr11 5355119 5355138 5355122 -
gaggtgggcaggcactgtca

SEQ ID NO: 33938 - DNA, 20 bp, Artificial Sequence
  Synthetic oligonucleotide; AAG chr11 5355111 5355130 5355114 -
caggcactgtcatagtccgt

SEQ ID NO: 33939 - DNA, 20 bp, Artificial Sequence
  Synthetic oligonucleotide; TGG chr11 5355094 5355113 5355097 -
cgtaagcttcctgctgcact

SEQ ID NO: 33940 - DNA, 20 bp, Artificial Sequence
  Synthetic oligonucleotide; AAG chr11 5355077 5355096 5355080 -
acttggtgatgtgattcttc

SEQ ID NO: 33941 - DNA, 20 bp, Artificial Sequence
  Synthetic oligonucleotide; CAG chr11 5355073 5355092 5355076 -
ggtgatgtgattcttcaagt

SEQ ID NO: 33942 - DNA, 20 bp, Artificial Sequence
  Synthetic oligonucleotide; AGG chr11 5355072 5355091 5355075 -
gtgatgtgattcttcaagtc

SEQ ID NO: 33943 - DNA, 20 bp, Artificial Sequence
  Synthetic oligonucleotide; TGG chr11 5355065 5355084 5355068 -
gattcttcaagtcaggaaat

SEQ ID NO: 33944 - DNA, 20 bp, Artificial Sequence
  Synthetic oligonucleotide; CAG chr11 5355060 5355079 5355063 -
ttcaagtcaggaaattggtc

SEQ ID NO: 33945 - DNA, 20 bp, Artificial Sequence
  Synthetic oligonucleotide; AGG chr11 5355059 5355078 5355062 -
tcaagtcaggaaattggtcc

SEQ ID NO: 33946 - DNA, 20 bp, Artificial Sequence
  Synthetic oligonucleotide; TAG chr11 5355056 5355075 5355059 -
agtcaggaaattggtccagg

SEQ ID NO: 33947 - DNA, 20 bp, Artificial Sequence
  Synthetic oligonucleotide; CAG chr11 5355048 5355067 5355051 -
aattggtccaggtagttttc

SEQ ID NO: 33948 - DNA, 20 bp, Artificial Sequence
  Synthetic oligonucleotide; TAG chr11 5355042 5355061 5355045 -
tccaggtagttttccagtgt

SEQ ID NO: 33949 - DNA, 20 bp, Artificial Sequence
  Synthetic oligonucleotide; AAG chr11 5355038 5355057 5355041 -
ggtagttttccagtgttagc

SEQ ID NO: 33950 - DNA, 20 bp, Artificial Sequence
  Synthetic oligonucleotide; AGG chr11 5355037 5355056 5355040 -
gtagttttccagtgttagca

SEQ ID NO: 33951 - DNA, 20 bp, Artificial Sequence
  Synthetic oligonucleotide; GAG chr11 5355024 5355043 5355027 -
gttagcaaggatgcatccat

SEQ ID NO: 33952 - DNA, 20 bp, Artificial Sequence
  Synthetic oligonucleotide; TGG chr11 5355014 5355033 5355017 -
atgcatccatgagttttttg

SEQ ID NO: 33953 - DNA, 20 bp, Artificial Sequence
  Synthetic oligonucleotide; CAG chr11 5355002 5355021 5355005 -
gttttttgtggatatcctcc

SEQ ID NO: 33954 - DNA, 20 bp, Artificial Sequence
  Synthetic oligonucleotide; GAG chr11 5355000 5355019 5355003 -
tttttgtggatatcctccca

SEQ ID NO: 33955 - DNA, 20 bp, Artificial Sequence
  Synthetic oligonucleotide; CAG chr11 5354956 5354975 5354959 -
cattttcacaccttcctgcc

SEQ ID NO: 33956 - DNA, 20 bp, Artificial Sequence
  Synthetic oligonucleotide; CAG chr11 5354946 5354965 5354949 -
ccttcctgcccagaccaatc

SEQ ID NO: 33957 - DNA, 20 bp, Artificial Sequence
  Synthetic oligonucleotide; CAG chr11 5354939 5354958 5354942 -
gcccagaccaatccagcgca

SEQ ID NO: 33958 - DNA, 20 bp, Artificial Sequence
  Synthetic oligonucleotide; CAG chr11 5354928 5354947 5354931 -
tccagcgcacagacttcaca

SEQ ID NO: 33959 - DNA, 20 bp, Artificial Sequence
  Synthetic oligonucleotide; CAG chr11 5354920 5354939 5354923 -
acagacttcacacagtgact

SEQ ID NO: 33960 - DNA, 20 bp, Artificial Sequence
  Synthetic oligonucleotide; AAG chr11 5354910 5354929 5354913 -
cacagtgactcagcttcgtc

SEQ ID NO: 33961 - DNA, 20 bp, Artificial Sequence
  Synthetic oligonucleotide; AGG chr11 5354909 5354928 5354912 -
acagtgactcagcttcgtca

SEQ ID NO: 33962 - DNA, 20 bp, Artificial Sequence
  Synthetic oligonucleotide; CAG chr11 5354871 5354890 5354874 -
tgattgcttctaaacatcct

SEQ ID NO: 33963 - DNA, 20 bp, Artificial Sequence
  Synthetic oligonucleotide; GAG chr11 5354869 5354888 5354872 -
attgcttctaaacatcctca

SEQ ID NO: 33964 - DNA, 20 bp, Artificial Sequence
  Synthetic oligonucleotide; CAG chr11 5354860 5354879 5354863 -
aaacatcctcagagttctct

SEQ ID NO: 33965 - DNA, 20 bp, Artificial Sequence
  Synthetic oligonucleotide; AGG chr11 5354859 5354878 5354862 -
aacatcctcagagttctctc

SEQ ID NO: 33966 - DNA, 20 bp, Artificial Sequence
  Synthetic oligonucleotide; TGG chr11 5354854 5354873 5354857 -
cctcagagttctctcaggtc

SEQ ID NO: 33967 - DNA, 20 bp, Artificial Sequence
  Synthetic oligonucleotide; TGG chr11 5354835 5354854 5354838 -
ctggtaccctctgcttcttg

SEQ ID NO: 33968 - DNA, 20 bp, Artificial Sequence
  Synthetic oligonucleotide; AAG chr11 5354828 5354847 5354831 -
cctctgcttcttgtggcttg

SEQ ID NO: 33969 - DNA, 20 bp, Artificial Sequence
  Synthetic oligonucleotide; TGG chr11 5354822 5354841 5354825 -
cttcttgtggcttgaagttc

SEQ ID NO: 33970 - DNA, 20 bp, Artificial Sequence
  Synthetic oligonucleotide; CAG chr11 5354788 5354807 5354791 -
aaactgtttgtcttttgtct

SEQ ID NO: 33971 - DNA, 20 bp, Artificial Sequence
  Synthetic oligonucleotide; CAG chr11 5354785 5354804 5354788 -
ctgtttgtcttttgtctcag

SEQ ID NO: 33972 - DNA, 20 bp, Artificial Sequence
  Synthetic oligonucleotide; TGG chr11 5354775 5354794 5354778 -
tttgtctcagcagctttccc

SEQ ID NO: 33973 - DNA, 20 bp, Artificial Sequence
  Synthetic oligonucleotide; TGG chr11 5354768 5354787 5354771 -
cagcagctttccctggcttc

SEQ ID NO: 33974 - DNA, 20 bp, Artificial Sequence
  Synthetic oligonucleotide; GAG chr11 5354766 5354785 5354769 -
gcagctttccctggcttctg

SEQ ID NO: 33975 - DNA, 20 bp, Artificial Sequence
  Synthetic oligonucleotide; AGG chr11 5354765 5354784 5354768 -
cagctttccctggcttctgg

SEQ ID NO: 33976 - DNA, 20 bp, Artificial Sequence
  Synthetic oligonucleotide; GAG chr11 5354750 5354769 5354753 -
tctggaggacgttttcctgt

SEQ ID NO: 33977 - DNA, 20 bp, Artificial Sequence
  Synthetic oligonucleotide; TGG chr11 5354747 5354766 5354750 -
ggaggacgttttcctgtgag

SEQ ID NO: 33978 - DNA, 20 bp, Artificial Sequence
  Synthetic oligonucleotide; GAG chr11 5354742 5354761 5354745 -
acgttttcctgtgagtggct

SEQ ID NO: 33979 - DNA, 20 bp, Artificial Sequence
  Synthetic oligonucleotide; CAG chr11 5354732 5354751 5354735 -
gtgagtggctgagtctcttc

SEQ ID NO: 33980 - DNA, 20 bp, Artificial Sequence
  Synthetic oligonucleotide; AGG chr11 5354731 5354750 5354734 -
tgagtggctgagtctcttcc

SEQ ID NO: 33981 - DNA, 20 bp, Artificial Sequence
  Synthetic oligonucleotide; TGG chr11 5354722 5354741 5354725 -
gagtctcttccaggcattct

SEQ ID NO: 33982 - DNA, 20 bp, Artificial Sequence
  Synthetic oligonucleotide; AAG chr11 5354717 5354736 5354720 -
tcttccaggcattcttggca

SEQ ID NO: 33983 - DNA, 20 bp, Artificial Sequence
  Synthetic oligonucleotide; TGG chr11 5354699 5354718 5354702 -
caaagatgccctcttgatgt

SEQ ID NO: 33984 - DNA, 20 bp, Artificial Sequence
  Synthetic oligonucleotide; CAG chr11 5354695 5354714 5354698 -
gatgccctcttgatgttggc

SEQ ID NO: 33985 - DNA, 20 bp, Artificial Sequence
  Synthetic oligonucleotide; AGG chr11 5354694 5354713 5354697 -
atgccctcttgatgttggcc

SEQ ID NO: 33986 - DNA, 20 bp, Artificial Sequence
  Synthetic oligonucleotide; GGG chr11 5354693 5354712 5354696 -
tgccctcttgatgttggcca

SEQ ID NO: 33987 - DNA, 20 bp, Artificial Sequence
  Synthetic oligonucleotide; CAG chr11 5354687 5354706 5354690 -
cttgatgttggccagggctg

SEQ ID NO: 33988 - DNA, 20 bp, Artificial Sequence
  Synthetic oligonucleotide; AGG chr11 5354686 5354705 5354689 -
ttgatgttggccagggctgc

SEQ ID NO: 33989 - DNA, 20 bp, Artificial Sequence
  Synthetic oligonucleotide; CAG chr11 5354681 5354700 5354684 -
gttggccagggctgcaggtc

SEQ ID NO: 33990 - DNA, 20 bp, Artificial Sequence
  Synthetic oligonucleotide; AGG chr11 5354680 5354699 5354683 -
ttggccagggctgcaggtcc

SEQ ID NO: 33991 - DNA, 20 bp, Artificial Sequence
  Synthetic oligonucleotide; TGG chr11 5354674 5354693 5354677 -
agggctgcaggtccaggacc

SEQ ID NO: 33992 - DNA, 20 bp, Artificial Sequence
  Synthetic oligonucleotide; GGG chr11 5354673 5354692 5354676 -
gggctgcaggtccaggacct

SEQ ID NO: 33993 - DNA, 20 bp, Artificial Sequence
  Synthetic oligonucleotide; GAG chr11 5354671 5354690 5354674 -
gctgcaggtccaggacctgg

SEQ ID NO: 33994 - DNA, 20 bp, Artificial Sequence
  Synthetic oligonucleotide; AGG chr11 5354670 5354689 5354673 -
ctgcaggtccaggacctggg

SEQ ID NO: 33995 - DNA, 20 bp, Artificial Sequence
  Synthetic oligonucleotide; GAG chr11 5354668 5354687 5354671 -
gcaggtccaggacctgggag

SEQ ID NO: 33996 - DNA, 20 bp, Artificial Sequence
  Synthetic oligonucleotide; GAG chr11 5354663 5354682 5354666 -
tccaggacctgggaggagct

SEQ ID NO: 33997 - DNA, 20 bp, Artificial Sequence
  Synthetic oligonucleotide; CAG chr11 5354656 5354675 5354659 -
cctgggaggagctgagcgct

SEQ ID NO: 33998 - DNA, 20 bp, Artificial Sequence
  Synthetic oligonucleotide; TGG chr11 5354651 5354670 5354654 -
gaggagctgagcgctcagtg

SEQ ID NO: 33999 - DNA, 20 bp, Artificial Sequence
  Synthetic oligonucleotide; TGG chr11 5354647 5354666 5354650 -
agctgagcgctcagtgtggc

SEQ ID NO: 34000 - DNA, 20 bp, Artificial Sequence
  Synthetic oligonucleotide; TGG chr11 5354644 5354663 5354647 -
tgagcgctcagtgtggctgg

SEQ ID NO: 34001 - DNA, 20 bp, Artificial Sequence
  Synthetic oligonucleotide; TGG chr11 5354639 5354658 5354642 -
gctcagtgtggctggtggcg

SEQ ID NO: 34002 - DNA, 20 bp, Artificial Sequence
  Synthetic oligonucleotide; GAG chr11 5354637 5354656 5354640 -
tcagtgtggctggtggcgtg

SEQ ID NO: 34003 - DNA, 20 bp, Artificial Sequence
  Synthetic oligonucleotide; AGG chr11 5354636 5354655 5354639 -
cagtgtggctggtggcgtgg

SEQ ID NO: 34004 - DNA, 20 bp, Artificial Sequence
  Synthetic oligonucleotide; GGG chr11 5354635 5354654 5354638 -
agtgtggctggtggcgtgga

SEQ ID NO: 34005 - DNA, 20 bp, Artificial Sequence
  Synthetic oligonucleotide; GGG chr11 5354634 5354653 5354637 -
gtgtggctggtggcgtggag

SEQ ID NO: 34006 - DNA, 20 bp, Artificial Sequence
  Synthetic oligonucleotide; CGG chr11 5354631 5354650 5354634 -
tggctggtggcgtggagggg

SEQ ID NO: 34007 - DNA, 20 bp, Artificial Sequence
  Synthetic oligonucleotide; GGG chr11 5354630 5354649 5354633 -
ggctggtggcgtggaggggc

SEQ ID NO: 34008 - DNA, 20 bp, Artificial Sequence
  Synthetic oligonucleotide; GAG chr11 5354628 5354647 5354631 -
ctggtggcgtggaggggcgg

SEQ ID NO: 34009 - DNA, 20 bp, Artificial Sequence
  Synthetic oligonucleotide; AGG chr11 5354627 5354646 5354630 -
tggtggcgtggaggggcggg

SEQ ID NO: 34010 - DNA, 20 bp, Artificial Sequence
  Synthetic oligonucleotide; AAG chr11 5354624 5354643 5354627 -
tggcgtggaggggcgggagg

SEQ ID NO: 34011 - DNA, 20 bp, Artificial Sequence
  Synthetic oligonucleotide; TGG chr11 5354621 5354640 5354624 -
cgtggaggggcgggaggaag

SEQ ID NO: 34012 - DNA, 20 bp, Artificial Sequence
  Synthetic oligonucleotide; GGG chr11 5354620 5354639 5354623 -
gtggaggggcgggaggaagt

SEQ ID NO: 34013 - DNA, 20 bp, Artificial Sequence
  Synthetic oligonucleotide; GGG chr11 5354619 5354638 5354622 -
tggaggggcgggaggaagtg

SEQ ID NO: 34014 - DNA, 20 bp, Artificial Sequence
  Synthetic oligonucleotide; GAG chr11 5354617 5354636 5354620 -
gaggggcgggaggaagtggg

SEQ ID NO: 34015 - DNA, 20 bp, Artificial Sequence
  Synthetic oligonucleotide; AGG chr11 5354616 5354635 5354619 -
aggggcgggaggaagtgggg

SEQ ID NO: 34016 - DNA, 20 bp, Artificial Sequence
  Synthetic oligonucleotide; GAG chr11 5354608 5354627 5354611 -
gaggaagtggggaggatcat

SEQ ID NO: 34017 - DNA, 20 bp, Artificial Sequence
  Synthetic oligonucleotide; AGG chr11 5354607 5354626 5354610 -
aggaagtggggaggatcatg

SEQ ID NO: 34018 - DNA, 20 bp, Artificial Sequence
  Synthetic oligonucleotide; GAG chr11 5354605 5354624 5354608 -
gaagtggggaggatcatgag

SEQ ID NO: 34019 - DNA, 20 bp, Artificial Sequence
  Synthetic oligonucleotide; AGG chr11 5354604 5354623 5354607 -
aagtggggaggatcatgagg

SEQ ID NO: 34020 - DNA, 20 bp, Artificial Sequence
  Synthetic oligonucleotide; GGG chr11 5354603 5354622 5354606 -
agtggggaggatcatgagga

SEQ ID NO: 34021 - DNA, 20 bp, Artificial Sequence
  Synthetic oligonucleotide; GGG chr11 5354602 5354621 5354605 -
gtggggaggatcatgaggag

SEQ ID NO: 34022 - DNA, 20 bp, Artificial Sequence
  Synthetic oligonucleotide; GAG chr11 5354598 5354617 5354601 -
ggaggatcatgaggaggggt

SEQ ID NO: 34023 - DNA, 20 bp, Artificial Sequence
  Synthetic oligonucleotide; AGG chr11 5354597 5354616 5354600 -
gaggatcatgaggaggggtg

SEQ ID NO: 34024 - DNA, 20 bp, Artificial Sequence
  Synthetic oligonucleotide; CAG chr11 5354566 5354585 5354569 -
cctactgttgatatgttgtt

SEQ ID NO: 34025 - DNA, 20 bp, Artificial Sequence
  Synthetic oligonucleotide; AGG chr11 5354565 5354584 5354568 -
ctactgttgatatgttgttc

SEQ ID NO: 34026 - DNA, 20 bp, Artificial Sequence
  Synthetic oligonucleotide; GGG chr11 5354564 5354583 5354567 -
tactgttgatatgttgttca

SEQ ID NO: 34027 - DNA, 20 bp, Artificial Sequence
  Synthetic oligonucleotide; CGG chr11 5354556 5354575 5354559 -
atatgttgttcagggaccat

SEQ ID NO: 34028 - DNA, 20 bp, Artificial Sequence
  Synthetic oligonucleotide; GGG chr11 5354555 5354574 5354558 -
tatgttgttcagggaccatc

SEQ ID NO: 34029 - DNA, 20 bp, Artificial Sequence
  Synthetic oligonucleotide; GAG chr11 5354553 5354572 5354556 -
tgttgttcagggaccatcgg

SEQ ID NO: 34030 - DNA, 20 bp, Artificial Sequence
  Synthetic oligonucleotide; CAG chr11 5354548 5354567 5354551 -
ttcagggaccatcgggagcc

SEQ ID NO: 34031 - DNA, 20 bp, Artificial Sequence
  Synthetic oligonucleotide; GAG chr11 5354546 5354565 5354549 -
cagggaccatcgggagccca

SEQ ID NO: 34032 - DNA, 20 bp, Artificial Sequence
  Synthetic oligonucleotide; CGG chr11 5354528 5354547 5354531 -
cagagctctgctctgtttca

SEQ ID NO: 34033 - DNA, 20 bp, Artificial Sequence
  Synthetic oligonucleotide; GGG chr11 5354527 5354546 5354530 -
agagctctgctctgtttcac

SEQ ID NO: 34034 - DNA, 20 bp, Artificial Sequence
  Synthetic oligonucleotide; AAG chr11 5354516 5354535 5354519 -
ctgtttcacgggactccaca

SEQ ID NO: 34035 - DNA, 20 bp, Artificial Sequence
  Synthetic oligonucleotide; GAG chr11 5354514 5354533 5354517 -
gtttcacgggactccacaaa

SEQ ID NO: 34036 - DNA, 20 bp, Artificial Sequence
  Synthetic oligonucleotide; AAG chr11 5354505 5354524 5354508 -
gactccacaaagagaactgc

SEQ ID NO: 34037 - DNA, 20 bp, Artificial Sequence
  Synthetic oligonucleotide; CAG chr11 5354499 5354518 5354502 -
acaaagagaactgcaagtcc

SEQ ID NO: 34038 - DNA, 20 bp, Artificial Sequence
  Synthetic oligonucleotide; TGG chr11 5354482 5354501 5354485 -
tcccagtctttcacctctct

SEQ ID NO: 34039 - DNA, 20 bp, Artificial Sequence
  Synthetic oligonucleotide; CAG chr11 5354447 5354466 5354450 -
gtctcttcatcacatctctt

SEQ ID NO: 34040 - DNA, 20 bp, Artificial Sequence
  Synthetic oligonucleotide; AAG chr11 5354441 5354460 5354444 -
tcatcacatctcttcagtat

SEQ ID NO: 34041 - DNA, 20 bp, Artificial Sequence
  Synthetic oligonucleotide; AGG chr11 5354440 5354459 5354443 -
catcacatctcttcagtata

SEQ ID NO: 34042 - DNA, 20 bp, Artificial Sequence
  Synthetic oligonucleotide; AAG chr11 5354437 5354456 5354440 -
cacatctcttcagtataagg

SEQ ID NO: 34043 - DNA, 20 bp, Artificial Sequence
  Synthetic oligonucleotide; CAG chr11 5354432 5354451 5354435 -
ctcttcagtataaggaagaa

SEQ ID NO: 34044 - DNA, 20 bp, Artificial Sequence
  Synthetic oligonucleotide; AAG chr11 5354428 5354447 5354431 -
tcagtataaggaagaacaga

SEQ ID NO: 34045 - DNA, 20 bp, Artificial Sequence
  Synthetic oligonucleotide; AGG chr11 5354427 5354446 5354430 -
cagtataaggaagaacagaa

SEQ ID NO: 34046 - DNA, 20 bp, Artificial Sequence
  Synthetic oligonucleotide; GGG chr11 5354426 5354445 5354429 -
agtataaggaagaacagaaa

SEQ ID NO: 34047 - DNA, 20 bp, Artificial Sequence
  Synthetic oligonucleotide; GAG chr11 5354424 5354443 5354427 -
tataaggaagaacagaaagg

SEQ ID NO: 34048 - DNA, 20 bp, Artificial Sequence
  Synthetic oligonucleotide; AGG chr11 5354423 5354442 5354426 -
ataaggaagaacagaaaggg

SEQ ID NO: 34049 - DNA, 20 bp, Artificial Sequence
  Synthetic oligonucleotide; GAG chr11 5354421 5354440 5354424 -
aaggaagaacagaaagggag

SEQ ID NO: 34050 - DNA, 20 bp, Artificial Sequence
  Synthetic oligonucleotide; GAG chr11 5354419 5354438 5354422 -
ggaagaacagaaagggagga

SEQ ID NO: 34051 - DNA, 20 bp, Artificial Sequence
  Synthetic oligonucleotide; CAG chr11 5354411 5354430 5354414 -
agaaagggaggagagaaact

SEQ ID NO: 34052 - DNA, 20 bp, Artificial Sequence
  Synthetic oligonucleotide; AGG chr11 5354410 5354429 5354413 -
gaaagggaggagagaaactc

SEQ ID NO: 34053 - DNA, 20 bp, Artificial Sequence
  Synthetic oligonucleotide; GGG chr11 5354409 5354428 5354412 -
aaagggaggagagaaactca

SEQ ID NO: 34054 - DNA, 20 bp, Artificial Sequence
  Synthetic oligonucleotide; CAG chr11 5354402 5354421 5354405 -
ggagagaaactcagggttgt

SEQ ID NO: 34055 - DNA, 20 bp, Artificial Sequence
  Synthetic oligonucleotide; CAG chr11 5354382 5354401 5354385 -
cagtcaaatgtgtccattta

SEQ ID NO: 34056 - DNA, 20 bp, Artificial Sequence
  Synthetic oligonucleotide; TAG chr11 5354355 5354374 5354358 -
tataaaatgtattgttatcc

SEQ ID NO: 34057 - DNA, 20 bp, Artificial Sequence
  Synthetic oligonucleotide; TAG chr11 5354340 5354359 5354343 -
tatcctagttatctttatac

SEQ ID NO: 34058 - DNA, 20 bp, Artificial Sequence
  Synthetic oligonucleotide; TGG chr11 5354330 5354349 5354333 -
atctttatactagcctgcta

SEQ ID NO: 34059 - DNA, 20 bp, Artificial Sequence
  Synthetic oligonucleotide; CAG chr11 5354327 5354346 5354330 -
tttatactagcctgctatgg

SEQ ID NO: 34060 - DNA, 20 bp, Artificial Sequence
  Synthetic oligonucleotide; AGG chr11 5354326 5354345 5354329 -
ttatactagcctgctatggc

SEQ ID NO: 34061 - DNA, 20 bp, Artificial Sequence
  Synthetic oligonucleotide; CAG chr11 5354320 5354339 5354323 -
tagcctgctatggcaggttt

SEQ ID NO: 34062 - DNA, 20 bp, Artificial Sequence
  Synthetic oligonucleotide; AGG chr11 5354319 5354338 5354322 -
agcctgctatggcaggtttc

SEQ ID NO: 34063 - DNA, 20 bp, Artificial Sequence
  Synthetic oligonucleotide; TGG chr11 5354311 5354330 5354314 -
atggcaggtttcaggatcac

SEQ ID NO: 34064 - DNA, 20 bp, Artificial Sequence
  Synthetic oligonucleotide; TAG chr11 5354305 5354324 5354308 -
ggtttcaggatcactggacc

SEQ ID NO: 34065 - DNA, 20 bp, Artificial Sequence
  Synthetic oligonucleotide; GAG chr11 5354303 5354322 5354306 -
tttcaggatcactggaccta

SEQ ID NO: 34066 - DNA, 20 bp, Artificial Sequence
  Synthetic oligonucleotide; AGG chr11 5354302 5354321 5354305 -
ttcaggatcactggacctag

SEQ ID NO: 34067 - DNA, 20 bp, Artificial Sequence
  Synthetic oligonucleotide; GGG chr11 5354301 5354320 5354304 -
tcaggatcactggacctaga

SEQ ID NO: 34068 - DNA, 20 bp, Artificial Sequence
  Synthetic oligonucleotide; GAG chr11 5354297 5354316 5354300 -
gatcactggacctagagggt

SEQ ID NO: 34069 - DNA, 20 bp, Artificial Sequence
  Synthetic oligonucleotide; AAG chr11 5354292 5354311 5354295 -
ctggacctagagggtgagtc

SEQ ID NO: 34070 - DNA, 20 bp, Artificial Sequence
  Synthetic oligonucleotide; AAG chr11 5354288 5354307 5354291 -
acctagagggtgagtcaaga

SEQ ID NO: 34071 - DNA, 20 bp, Artificial Sequence
  Synthetic oligonucleotide; TGG chr11 5354272 5354291 5354275 -
aagaaagattttctttgatg

SEQ ID NO: 34072 - DNA, 20 bp, Artificial Sequence
  Synthetic oligonucleotide; TAG chr11 5354267 5354286 5354270 -
agattttctttgatgtggct

SEQ ID NO: 34073 - DNA, 20 bp, Artificial Sequence
  Synthetic oligonucleotide; AAG chr11 5354242 5354261 5354245 -
ccccctgaattcattcccaa

SEQ ID NO: 34074 - DNA, 20 bp, Artificial Sequence
  Synthetic oligonucleotide; AAG chr11 5354236 5354255 5354239 -
gaattcattcccaaaagccc

SEQ ID NO: 34075 - DNA, 20 bp, Artificial Sequence
  Synthetic oligonucleotide; AGG chr11 5354235 5354254 5354238 -
aattcattcccaaaagccca

SEQ ID NO: 34076 - DNA, 20 bp, Artificial Sequence
  Synthetic oligonucleotide; GGG chr11 5354234 5354253 5354237 -
attcattcccaaaagcccaa

SEQ ID NO: 34077 - DNA, 20 bp, Artificial Sequence
  Synthetic oligonucleotide; AAG chr11 5354231 5354250 5354234 -
cattcccaaaagcccaaggg

SEQ ID NO: 34078 - DNA, 20 bp, Artificial Sequence
  Synthetic oligonucleotide; AAG chr11 5354227 5354246 5354230 -
cccaaaagcccaagggaaga

SEQ ID NO: 34079 - DNA, 20 bp, Artificial Sequence
  Synthetic oligonucleotide; CAG chr11 5354222 5354241 5354225 -
aagcccaagggaagaaagaa

SEQ ID NO: 34080 - DNA, 20 bp, Artificial Sequence
  Synthetic oligonucleotide; AGG chr11 5354221 5354240 5354224 -
agcccaagggaagaaagaac

SEQ ID NO: 34081 - DNA, 20 bp, Artificial Sequence
  Synthetic oligonucleotide; AAG chr11 5354215 5354234 5354218 -
agggaagaaagaacaggatt

SEQ ID NO: 34082 - DNA, 20 bp, Artificial Sequence
  Synthetic oligonucleotide; TGG chr11 5354194 5354213 5354197 -
agtatacattgcccatatct

SEQ ID NO: 34083 - DNA, 20 bp, Artificial Sequence
  Synthetic oligonucleotide; AAG chr11 5354191 5354210 5354194 -
atacattgcccatatcttgg

SEQ ID NO: 34084 - DNA, 20 bp, Artificial Sequence
  Synthetic oligonucleotide; CAG chr11 5354182 5354201 5354185 -
ccatatcttggaagacaata

SEQ ID NO: 34085 - DNA, 20 bp, Artificial Sequence
  Synthetic oligonucleotide; GAG chr11 5354180 5354199 5354183 -
atatcttggaagacaataca

SEQ ID NO: 34086 - DNA, 20 bp, Artificial Sequence
  Synthetic oligonucleotide; GAG chr11 5354178 5354197 5354181 -
atcttggaagacaatacaga

SEQ ID NO: 34087 - DNA, 20 bp, Artificial Sequence
  Synthetic oligonucleotide; CAG chr11 5354175 5354194 5354178 -
ttggaagacaatacagagag

SEQ ID NO: 34088 - DNA, 20 bp, Artificial Sequence
  Synthetic oligonucleotide; CAG chr11 5354169 5354188 5354172 -
gacaatacagagagcagtaa

SEQ ID NO: 34089 - DNA, 20 bp, Artificial Sequence
  Synthetic oligonucleotide; CAG chr11 5354165 5354184 5354168 -
atacagagagcagtaacaga

SEQ ID NO: 34090 - DNA, 20 bp, Artificial Sequence
  Synthetic oligonucleotide; AAG chr11 5354162 5354181 5354165 -
cagagagcagtaacagacag

SEQ ID NO: 34091 - DNA, 20 bp, Artificial Sequence
  Synthetic oligonucleotide; TAG chr11 5354156 5354175 5354159 -
gcagtaacagacagaagaac

SEQ ID NO: 34092 - DNA, 20 bp, Artificial Sequence
  Synthetic oligonucleotide; CAG chr11 5354153 5354172 5354156 -
gtaacagacagaagaactag

SEQ ID NO: 34093 - DNA, 20 bp, Artificial Sequence
  Synthetic oligonucleotide; CAG chr11 5354145 5354164 5354148 -
cagaagaactagcagacaca

SEQ ID NO: 34094 - DNA, 20 bp, Artificial Sequence
  Synthetic oligonucleotide; AAG chr11 5354141 5354160 5354144 -
agaactagcagacacacaga

SEQ ID NO: 34095 - DNA, 20 bp, Artificial Sequence
  Synthetic oligonucleotide; TGG chr11 5354135 5354154 5354138 -
agcagacacacagaaagaca

SEQ ID NO: 34096 - DNA, 20 bp, Artificial Sequence
  Synthetic oligonucleotide; GGG chr11 5354134 5354153 5354137 -
gcagacacacagaaagacat

SEQ ID NO: 34097 - DNA, 20 bp, Artificial Sequence
  Synthetic oligonucleotide; TGG chr11 5354078 5354097 5354081 -
aaattatattttgttaaaaa

SEQ ID NO: 34098 - DNA, 20 bp, Artificial Sequence
  Synthetic oligonucleotide; GAG chr11 5354068 5354087 5354071 -
ttgttaaaaatggtctatgt

SEQ ID NO: 34099 - DNA, 20 bp, Artificial Sequence
  Synthetic oligonucleotide; AAG chr11 5354065 5354084 5354068 -
ttaaaaatggtctatgtgag

SEQ ID NO: 34100 - DNA, 20 bp, Artificial Sequence
  Synthetic oligonucleotide; CAG chr11 5354052 5354071 5354055 -
atgtgagaagttctgtaata

SEQ ID NO: 34101 - DNA, 20 bp, Artificial Sequence
  Synthetic oligonucleotide; TAG chr11 5354049 5354068 5354052 -
tgagaagttctgtaatacag

SEQ ID NO: 34102 - DNA, 20 bp, Artificial Sequence
  Synthetic oligonucleotide; AGG chr11 5354048 5354067 5354051 -
gagaagttctgtaatacagt

SEQ ID NO: 34103 - DNA, 20 bp, Artificial Sequence
  Synthetic oligonucleotide; GGG chr11 5354047 5354066 5354050 -
agaagttctgtaatacagta

SEQ ID NO: 34104 - DNA, 20 bp, Artificial Sequence
  Synthetic oligonucleotide; AAG chr11 5354041 5354060 5354044 -
tctgtaatacagtagggaat

SEQ ID NO: 34105 - DNA, 20 bp, Artificial Sequence
  Synthetic oligonucleotide; GAG chr11 5354014 5354033 5354017 -
atgttatatttaccatcctc

SEQ ID NO: 34106 - DNA, 20 bp, Artificial Sequence
  Synthetic oligonucleotide; CAG chr11 5354007 5354026 5354010 -
atttaccatcctcgagcaca

SEQ ID NO: 34107 - DNA, 20 bp, Artificial Sequence
  Synthetic oligonucleotide; AAG chr11 5354002 5354021 5354005 -
ccatcctcgagcacacagtc

SEQ ID NO: 34108 - DNA, 20 bp, Artificial Sequence
  Synthetic oligonucleotide; AAG chr11 5353999 5354018 5354002 -
tcctcgagcacacagtcaag

SEQ ID NO: 34109 - DNA, 20 bp, Artificial Sequence
  Synthetic oligonucleotide; AAG chr11 5353990 5354009 5353993 -
acacagtcaagaagctacaa

SEQ ID NO: 34110 - DNA, 20 bp, Artificial Sequence
  Synthetic oligonucleotide; GAG chr11 5353988 5354007 5353991 -
acagtcaagaagctacaaaa

SEQ ID NO: 34111 - DNA, 20 bp, Artificial Sequence
  Synthetic oligonucleotide; AAG chr11 5353984 5354003 5353987 -
tcaagaagctacaaaagaga

SEQ ID NO: 34112 - DNA, 20 bp, Artificial Sequence
  Synthetic oligonucleotide; AGG chr11 5353983 5354002 5353986 -
caagaagctacaaaagagaa

SEQ ID NO: 34113 - DNA, 20 bp, Artificial Sequence
  Synthetic oligonucleotide; CAG chr11 5353967 5353986 5353970 -
agaaaggcaaatttcacaca

SEQ ID NO: 34114 - DNA, 20 bp, Artificial Sequence
  Synthetic oligonucleotide; AAG chr11 5353962 5353981 5353965 -
ggcaaatttcacacacagcc

SEQ ID NO: 34115 - DNA, 20 bp, Artificial Sequence
  Synthetic oligonucleotide; GAG chr11 5353957 5353976 5353960 -
atttcacacacagccaagtt

SEQ ID NO: 34116 - DNA, 20 bp, Artificial Sequence
  Synthetic oligonucleotide; TGG chr11 5353935 5353954 5353938 -
gtaaaacaaacaaaatcttt

SEQ ID NO: 34117 - DNA, 20 bp, Artificial Sequence
  Synthetic oligonucleotide; CAG chr11 5353926 5353945 5353929 -
acaaaatcttttggtctaat

SEQ ID NO: 34118 - DNA, 20 bp, Artificial Sequence
  Synthetic oligonucleotide; AAG chr11 5353920 5353939 5353923 -
tcttttggtctaatcagata

SEQ ID NO: 34119 - DNA, 20 bp, Artificial Sequence
  Synthetic oligonucleotide; TAG chr11 5353908 5353927 5353911 -
atcagataaagatcatttac

SEQ ID NO: 34120 - DNA, 20 bp, Artificial Sequence
  Synthetic oligonucleotide; TGG chr11 5353903 5353922 5353906 -
ataaagatcatttactagcc

SEQ ID NO: 34121 - DNA, 20 bp, Artificial Sequence
  Synthetic oligonucleotide; AAG chr11 5353889 5353908 5353892 -
ctagcctggaaactattgtg

SEQ ID NO: 34122 - DNA, 20 bp, Artificial Sequence
  Synthetic oligonucleotide; AGG chr11 5353888 5353907 5353891 -
tagcctggaaactattgtga

SEQ ID NO: 34123 - DNA, 20 bp, Artificial Sequence
  Synthetic oligonucleotide; AAG chr11 5353843 5353862 5353846 -
ctgtgttatttatacatccc

SEQ ID NO: 34124 - DNA, 20 bp, Artificial Sequence
  Synthetic oligonucleotide; AAG chr11 5353809 5353828 5353812 -
atccccacctttctgtgatg

SEQ ID NO: 34125 - DNA, 20 bp, Artificial Sequence
  Synthetic oligonucleotide; GAG chr11 5353807 5353826 5353810 -
ccccacctttctgtgatgaa

SEQ ID NO: 34126 - DNA, 20 bp, Artificial Sequence
  Synthetic oligonucleotide; TAG chr11 5353804 5353823 5353807 -
cacctttctgtgatgaagag

SEQ ID NO: 34127 - DNA, 20 bp, Artificial Sequence
  Synthetic oligonucleotide; AGG chr11 5353803 5353822 5353806 -
acctttctgtgatgaagagt

SEQ ID NO: 34128 - DNA, 20 bp, Artificial Sequence
  Synthetic oligonucleotide; TGG chr11 5353800 5353819 5353803 -
tttctgtgatgaagagtagg

SEQ ID NO: 34129 - DNA, 20 bp, Artificial Sequence
  Synthetic oligonucleotide; GGG chr11 5353799 5353818 5353802 -
ttctgtgatgaagagtaggt

SEQ ID NO: 34130 - DNA, 20 bp, Artificial Sequence
  Synthetic oligonucleotide; CAG chr11 5353796 5353815 5353799 -
tgtgatgaagagtaggtggg

SEQ ID NO: 34131 - DNA, 20 bp, Artificial Sequence
  Synthetic oligonucleotide; TAG chr11 5353790 5353809 5353793 -
gaagagtaggtgggcagcca

SEQ ID NO: 34132 - DNA, 20 bp, Artificial Sequence
  Synthetic oligonucleotide; GAG chr11 5353781 5353800 5353784 -
gtgggcagccatagatcact

SEQ ID NO: 34133 - DNA, 20 bp, Artificial Sequence
  Synthetic oligonucleotide; CAG chr11 5353775 5353794 5353778 -
agccatagatcactgagtgt

SEQ ID NO: 34134 - DNA, 20 bp, Artificial Sequence
  Synthetic oligonucleotide; CAG chr11 5353767 5353786 5353770 -
atcactgagtgtcagtatga

SEQ ID NO: 34135 - DNA, 20 bp, Artificial Sequence
  Synthetic oligonucleotide; GAG chr11 5353765 5353784 5353768 -
cactgagtgtcagtatgaca

SEQ ID NO: 34136 - DNA, 20 bp, Artificial Sequence
  Synthetic oligonucleotide; AGG chr11 5353764 5353783 5353767 -
actgagtgtcagtatgacag

SEQ ID NO: 34137 - DNA, 20 bp, Artificial Sequence
  Synthetic oligonucleotide; CAG chr11 5353760 5353779 5353763 -
agtgtcagtatgacagaggc

SEQ ID NO: 34138 - DNA, 20 bp, Artificial Sequence
  Synthetic oligonucleotide; GAG chr11 5353758 5353777 5353761 -
tgtcagtatgacagaggcca

SEQ ID NO: 34139 - DNA, 20 bp, Artificial Sequence
  Synthetic oligonucleotide; GAG chr11 5353753 5353772 5353756 -
gtatgacagaggccagagat

SEQ ID NO: 34140 - DNA, 20 bp, Artificial Sequence
  Synthetic oligonucleotide; AGG chr11 5353752 5353771 5353755 -
tatgacagaggccagagatg

SEQ ID NO: 34141 - DNA, 20 bp, Artificial Sequence
  Synthetic oligonucleotide; GGG chr11 5353751 5353770 5353754 -
atgacagaggccagagatga

SEQ ID NO: 34142 - DNA, 20 bp, Artificial Sequence
  Synthetic oligonucleotide; GGG chr11 5353750 5353769 5353753 -
tgacagaggccagagatgag

SEQ ID NO: 34143 - DNA, 20 bp, Artificial Sequence
  Synthetic oligonucleotide; CAG chr11 5353743 5353762 5353746 -
ggccagagatgaggggcatc

SEQ ID NO: 34144 - DNA, 20 bp, Artificial Sequence
  Synthetic oligonucleotide; TGG chr11 5353735 5353754 5353738 -
atgaggggcatccagctgac

SEQ ID NO: 34145 - DNA, 20 bp, Artificial Sequence
  Synthetic oligonucleotide; TGG chr11 5353728 5353747 5353731 -
gcatccagctgactggtcac

SEQ ID NO: 34146 - DNA, 20 bp, Artificial Sequence
  Synthetic oligonucleotide; GGG chr11 5353727 5353746 5353730 -
catccagctgactggtcact

SEQ ID NO: 34147 - DNA, 20 bp, Artificial Sequence
  Synthetic oligonucleotide; TGG chr11 5353724 5353743 5353727 -
ccagctgactggtcactggg

SEQ ID NO: 34148 - DNA, 20 bp, Artificial Sequence
  Synthetic oligonucleotide; TAG chr11 5353712 5353731 5353715 -
tcactgggtggccccttgtg

SEQ ID NO: 34149 - DNA, 20 bp, Artificial Sequence
  Synthetic oligonucleotide; AAG chr11 5353706 5353725 5353709 -
ggtggccccttgtgtagtcc

SEQ ID NO: 34150 - DNA, 20 bp, Artificial Sequence
  Synthetic oligonucleotide; TGG chr11 5353684 5353703 5353687 -
gcacatcataccctgtattt

SEQ ID NO: 34151 - DNA, 20 bp, Artificial Sequence
  Synthetic oligonucleotide; AAG chr11 5353677 5353696 5353680 -
ataccctgtattttggtcaa

SEQ ID NO: 34152 - DNA, 20 bp, Artificial Sequence
  Synthetic oligonucleotide; GAG chr11 5353635 5353654 5353638 -
taatttaaaacttatcattt

SEQ ID NO: 34153 - DNA, 20 bp, Artificial Sequence
  Synthetic oligonucleotide; TGG chr11 5353629 5353648 5353632 -
aaaacttatcatttgagtca

SEQ ID NO: 34154 - DNA, 20 bp, Artificial Sequence
  Synthetic oligonucleotide; TGG chr11 5353622 5353641 5353625 -
atcatttgagtcatggatac

SEQ ID NO: 34155 - DNA, 20 bp, Artificial Sequence
  Synthetic oligonucleotide; TGG chr11 5353610 5353629 5353613 -
atggatactggctcttcacc

SEQ ID NO: 34156 - DNA, 20 bp, Artificial Sequence
  Synthetic oligonucleotide; TAG chr11 5353604 5353623 5353607 -
actggctcttcacctggcca

SEQ ID NO: 34157 - DNA, 20 bp, Artificial Sequence
  Synthetic oligonucleotide; AGG chr11 5353603 5353622 5353606 -
ctggctcttcacctggccat

SEQ ID NO: 34158 - DNA, 20 bp, Artificial Sequence
  Synthetic oligonucleotide; TAG chr11 5353575 5353594 5353578 -
aaaccccctcttctcatgcc

SEQ ID NO: 34159 - DNA, 20 bp, Artificial Sequence
  Synthetic oligonucleotide; AAG chr11 5353564 5353583 5353567 -
tctcatgcctagactctgaa

SEQ ID NO: 34160 - DNA, 20 bp, Artificial Sequence
  Synthetic oligonucleotide; AAG chr11 5353555 5353574 5353558 -
tagactctgaaaagaatcaa

SEQ ID NO: 34161 - DNA, 20 bp, Artificial Sequence
  Synthetic oligonucleotide; TGG chr11 5353548 5353567 5353551 -
tgaaaagaatcaaaagtatt

SEQ ID NO: 34162 - DNA, 20 bp, Artificial Sequence
  Synthetic oligonucleotide; GAG chr11 5353546 5353565 5353549 -
aaaagaatcaaaagtatttg

SEQ ID NO: 34163 - DNA, 20 bp, Artificial Sequence
  Synthetic oligonucleotide; CAG chr11 5353542 5353561 5353545 -
gaatcaaaagtatttggagc

SEQ ID NO: 34164 - DNA, 20 bp, Artificial Sequence
  Synthetic oligonucleotide; AAG chr11 5353537 5353556 5353540 -
aaaagtatttggagccagaa

SEQ ID NO: 34165 - DNA, 20 bp, Artificial Sequence
  Synthetic oligonucleotide; AGG chr11 5353536 5353555 5353539 -
aaagtatttggagccagaaa

SEQ ID NO: 34166 - DNA, 20 bp, Artificial Sequence
  Synthetic oligonucleotide; TAG chr11 5353520 5353539 5353523 -
gaaaaggccattttatcttc

SEQ ID NO: 34167 - DNA, 20 bp, Artificial Sequence
  Synthetic oligonucleotide; GAG chr11 5353513 5353532 5353516 -
ccattttatcttctagttat

SEQ ID NO: 34168 - DNA, 20 bp, Artificial Sequence
  Synthetic oligonucleotide; CAG chr11 5353427 5353446 5353430 -
ctctgctattttgcacatgc

SEQ ID NO: 34169 - DNA, 20 bp, Artificial Sequence
  Synthetic oligonucleotide; TAG chr11 5353413 5353432 5353416 -
acatgccagacacccctatc

SEQ ID NO: 34170 - DNA, 20 bp, Artificial Sequence
  Synthetic oligonucleotide; CAG chr11 5353385 5353404 5353388 -
tctctgatgttcccctaaac

SEQ ID NO: 34171 - DNA, 20 bp, Artificial Sequence
  Synthetic oligonucleotide; CAG chr11 5353344 5353363 5353347 -
tgaaaatgcatctctctgtt

SEQ ID NO: 34172 - DNA, 20 bp, Artificial Sequence
  Synthetic oligonucleotide; TAG chr11 5353341 5353360 5353344 -
aaatgcatctctctgttcag

SEQ ID NO: 34173 - DNA, 20 bp, Artificial Sequence
  Synthetic oligonucleotide; TGG chr11 5353334 5353353 5353337 -
tctctctgttcagtagtaac

SEQ ID NO: 34174 - DNA, 20 bp, Artificial Sequence
  Synthetic oligonucleotide; AAG chr11 5353320 5353339 5353323 -
agtaactggaattaactatc

SEQ ID NO: 34175 - DNA, 20 bp, Artificial Sequence
  Synthetic oligonucleotide; TGG chr11 5353313 5353332 5353316 -
ggaattaactatcaagacaa

SEQ ID NO: 34176 - DNA, 20 bp, Artificial Sequence
  Synthetic oligonucleotide; TAG chr11 5353300 5353319 5353303 -
aagacaatggtcatctgaat

SEQ ID NO: 34177 - DNA, 20 bp, Artificial Sequence
  Synthetic oligonucleotide; AAG chr11 5353242 5353261 5353245 -
tatttgataaatgttaacca

SEQ ID NO: 34178 - DNA, 20 bp, Artificial Sequence
  Synthetic oligonucleotide; TAG chr11 5353217 5353236 5353220 -
ttaactgaacacatttctca

SEQ ID NO: 34179 - DNA, 20 bp, Artificial Sequence
  Synthetic oligonucleotide; GAG chr11 5353215 5353234 5353218 -
aactgaacacatttctcata

SEQ ID NO: 34180 - DNA, 20 bp, Artificial Sequence
  Synthetic oligonucleotide; TAG chr11 5353202 5353221 5353205 -
tctcatagagatactttccc

SEQ ID NO: 34181 - DNA, 20 bp, Artificial Sequence
  Synthetic oligonucleotide; GAG chr11 5353182 5353201 5353185 -
tagactcatcattttgaatt

SEQ ID NO: 34182 - DNA, 20 bp, Artificial Sequence
  Synthetic oligonucleotide; AGG chr11 5353181 5353200 5353184 -
agactcatcattttgaattg

SEQ ID NO: 34183 - DNA, 20 bp, Artificial Sequence
  Synthetic oligonucleotide; GGG chr11 5353180 5353199 5353183 -
gactcatcattttgaattga

SEQ ID NO: 34184 - DNA, 20 bp, Artificial Sequence
  Synthetic oligonucleotide; TGG chr11 5353174 5353193 5353177 -
tcattttgaattgagggaaa

SEQ ID NO: 34185 - DNA, 20 bp, Artificial Sequence
  Synthetic oligonucleotide; AAG chr11 5353158 5353177 5353161 -
gaaatggtttaccctcattg

SEQ ID NO: 34186 - DNA, 20 bp, Artificial Sequence
  Synthetic oligonucleotide; AAG chr11 5353154 5353173 5353157 -
tggtttaccctcattgaaga

SEQ ID NO: 34187 - DNA, 20 bp, Artificial Sequence
  Synthetic oligonucleotide; GAG chr11 5353146 5353165 5353149 -
cctcattgaagaaagtaatt

SEQ ID NO: 34188 - DNA, 20 bp, Artificial Sequence
  Synthetic oligonucleotide; AGG chr11 5353145 5353164 5353148 -
ctcattgaagaaagtaattg

SEQ ID NO: 34189 - DNA, 20 bp, Artificial Sequence
  Synthetic oligonucleotide; GGG chr11 5353144 5353163 5353147 -
tcattgaagaaagtaattga

SEQ ID NO: 34190 - DNA, 20 bp, Artificial Sequence
  Synthetic oligonucleotide; TGG chr11 5353138 5353157 5353141 -
aagaaagtaattgagggaaa

SEQ ID NO: 34191 - DNA, 20 bp, Artificial Sequence
  Synthetic oligonucleotide; AAG chr11 5353122 5353141 5353125 -
gaaatggcttactctcattg

SEQ ID NO: 34192 - DNA, 20 bp, Artificial Sequence
  Synthetic oligonucleotide; AAG chr11 5353118 5353137 5353121 -
tggcttactctcattgaaga

SEQ ID NO: 34193 - DNA, 20 bp, Artificial Sequence
  Synthetic oligonucleotide; TAG chr11 5353090 5353109 5353093 -
tttcttcacgtgcaattttc

SEQ ID NO: 34194 - DNA, 20 bp, Artificial Sequence
  Synthetic oligonucleotide; CAG chr11 5353084 5353103 5353087 -
cacgtgcaattttctagaaa

SEQ ID NO: 34195 - DNA, 20 bp, Artificial Sequence
  Synthetic oligonucleotide; CAG chr11 5353081 5353100 5353084 -
gtgcaattttctagaaacag

SEQ ID NO: 34196 - DNA, 20 bp, Artificial Sequence
  Synthetic oligonucleotide; CAG chr11 5353077 5353096 5353080 -
aattttctagaaacagcagc

SEQ ID NO: 34197 - DNA, 20 bp, Artificial Sequence
  Synthetic oligonucleotide; AAG chr11 5353062 5353081 5353065 -
gcagccagctccatatatgc

SEQ ID NO: 34198 - DNA, 20 bp, Artificial Sequence
  Synthetic oligonucleotide; GAG chr11 5353060 5353079 5353063 -
agccagctccatatatgcaa

SEQ ID NO: 34199 - DNA, 20 bp, Artificial Sequence
  Synthetic oligonucleotide; TGG chr11 5353054 5353073 5353057 -
ctccatatatgcaagagaac

SEQ ID NO: 34200 - DNA, 20 bp, Artificial Sequence
  Synthetic oligonucleotide; AAG chr11 5353040 5353059 5353043 -
gagaactggatgtatgtctg

SEQ ID NO: 34201 - DNA, 20 bp, Artificial Sequence
  Synthetic oligonucleotide; CAG chr11 5353010 5353029 5353013 -
tgccttattcctatgtataa

SEQ ID NO: 34202 - DNA, 20 bp, Artificial Sequence
  Synthetic oligonucleotide; AGG chr11 5353009 5353028 5353012 -
gccttattcctatgtataac

SEQ ID NO: 34203 - DNA, 20 bp, Artificial Sequence
  Synthetic oligonucleotide; AAG chr11 5352994 5353013 5352997 -
ataacaggactaatatatgc

SEQ ID NO: 34204 - DNA, 20 bp, Artificial Sequence
  Synthetic oligonucleotide; TGG chr11 5352986 5353005 5352989 -
actaatatatgcaagccata

SEQ ID NO: 34205 - DNA, 20 bp, Artificial Sequence
  Synthetic oligonucleotide; GAG chr11 5352984 5353003 5352987 -
taatatatgcaagccatatg

SEQ ID NO: 34206 - DNA, 20 bp, Artificial Sequence
  Synthetic oligonucleotide; GAG chr11 5352982 5353001 5352985 -
atatatgcaagccatatgga

SEQ ID NO: 34207 - DNA, 20 bp, Artificial Sequence
  Synthetic oligonucleotide; TGG chr11 5352976 5352995 5352979 -
gcaagccatatggagagcaa

SEQ ID NO: 34208 - DNA, 20 bp, Artificial Sequence
  Synthetic oligonucleotide; GGG chr11 5352975 5352994 5352978 -
caagccatatggagagcaat

SEQ ID NO: 34209 - DNA, 20 bp, Artificial Sequence
  Synthetic oligonucleotide; CGG chr11 5352957 5352976 5352960 -
atgggcattgactgaaatgc

SEQ ID NO: 34210 - DNA, 20 bp, Artificial Sequence
  Synthetic oligonucleotide; TAG chr11 5352942 5352961 5352945 -
aatgccggtgacccaaatca

SEQ ID NO: 34211 - DNA, 20 bp, Artificial Sequence
  Synthetic oligonucleotide; AAG chr11 5352935 5352954 5352938 -
gtgacccaaatcatagaccc

SEQ ID NO: 34212 - DNA, 20 bp, Artificial Sequence
  Synthetic oligonucleotide; TGG chr11 5352917 5352936 5352920 -
ccaagaattatatatataat

SEQ ID NO: 34213 - DNA, 20 bp, Artificial Sequence
  Synthetic oligonucleotide; CAG chr11 5352872 5352891 5352875 -
ataatatatataaacacaca

SEQ ID NO: 34214 - DNA, 20 bp, Artificial Sequence
  Synthetic oligonucleotide; AAG chr11 5352844 5352863 5352847 -
tacacacactattatatatt

SEQ ID NO: 34215 - DNA, 20 bp, Artificial Sequence
  Synthetic oligonucleotide; TAG chr11 5352832 5352851 5352835 -
tatatattaagtatatataa

SEQ ID NO: 34216 - DNA, 20 bp, Artificial Sequence
  Synthetic oligonucleotide; TAG chr11 5352800 5352819 5352803 -
tatatattaaatatatataa

SEQ ID NO: 34217 - DNA, 20 bp, Artificial Sequence
  Synthetic oligonucleotide; TGG chr11 5352793 5352812 5352796 -
taaatatatataatagtgta

SEQ ID NO: 34218 - DNA, 20 bp, Artificial Sequence
  Synthetic oligonucleotide; GGG chr11 5352792 5352811 5352795 -
aaatatatataatagtgtat

SEQ ID NO: 34219 - DNA, 20 bp, Artificial Sequence
  Synthetic oligonucleotide; AAG chr11 5352758 5352777 5352761 -
gtgtgtatatgtatgtgtgt

SEQ ID NO: 34220 - DNA, 20 bp, Artificial Sequence
  Synthetic oligonucleotide; TGG chr11 5352739 5352758 5352742 -
taagtatgtatgtatgtgta

SEQ ID NO: 34221 - DNA, 20 bp, Artificial Sequence
  Synthetic oligonucleotide; CAG chr11 5352733 5352752 5352736 -
tgtatgtatgtgtatggtgc

SEQ ID NO: 34222 - DNA, 20 bp, Artificial Sequence
  Synthetic oligonucleotide; AAG chr11 5352726 5352745 5352729 -
atgtgtatggtgccagccat

SEQ ID NO: 34223 - DNA, 20 bp, Artificial Sequence
  Synthetic oligonucleotide; GAG chr11 5352708 5352727 5352711 -
ataagctaatcaaacaatgt

SEQ ID NO: 34224 - DNA, 20 bp, Artificial Sequence
  Synthetic oligonucleotide; GAG chr11 5352694 5352713 5352697 -
caatgtgagttaaattacct

SEQ ID NO: 34225 - DNA, 20 bp, Artificial Sequence
  Synthetic oligonucleotide; CAG chr11 5352681 5352700 5352684 -
attacctgagaaaacaatat

SEQ ID NO: 34226 - DNA, 20 bp, Artificial Sequence
  Synthetic oligonucleotide; GAG chr11 5352676 5352695 5352679 -
ctgagaaaacaatatcagtt

SEQ ID NO: 34227 - DNA, 20 bp, Artificial Sequence
  Synthetic oligonucleotide; GAG chr11 5352669 5352688 5352672 -
aacaatatcagttgagcact

SEQ ID NO: 34228 - DNA, 20 bp, Artificial Sequence
  Synthetic oligonucleotide; TAG chr11 5352657 5352676 5352660 -
tgagcactgagatatgtact

SEQ ID NO: 34229 - DNA, 20 bp, Artificial Sequence
  Synthetic oligonucleotide; CAG chr11 5352629 5352648 5352632 -
tacatatatcttatacaaat

SEQ ID NO: 34230 - DNA, 20 bp, Artificial Sequence
  Synthetic oligonucleotide; TAG chr11 5352623 5352642 5352626 -
tatcttatacaaatcagcaa

SEQ ID NO: 34231 - DNA, 20 bp, Artificial Sequence
  Synthetic oligonucleotide; CAG chr11 5352619 5352638 5352622 -
ttatacaaatcagcaataga

SEQ ID NO: 34232 - DNA, 20 bp, Artificial Sequence
  Synthetic oligonucleotide; AGG chr11 5352618 5352637 5352621 -
tatacaaatcagcaatagac

SEQ ID NO: 34233 - DNA, 20 bp, Artificial Sequence
  Synthetic oligonucleotide; CAG chr11 5352615 5352634 5352618 -
acaaatcagcaatagacagg

SEQ ID NO: 34234 - DNA, 20 bp, Artificial Sequence
  Synthetic oligonucleotide; AGG chr11 5352614 5352633 5352617 -
caaatcagcaatagacaggc

SEQ ID NO: 34235 - DNA, 20 bp, Artificial Sequence
  Synthetic oligonucleotide; GGG chr11 5352613 5352632 5352616 -
aaatcagcaatagacaggca

SEQ ID NO: 34236 - DNA, 20 bp, Artificial Sequence
  Synthetic oligonucleotide; AAG chr11 5352596 5352615 5352599 -
gcagggtaaaataatgttct

SEQ ID NO: 34237 - DNA, 20 bp, Artificial Sequence
  Synthetic oligonucleotide; TAG chr11 5352593 5352612 5352596 -
gggtaaaataatgttctaag

SEQ ID NO: 34238 - DNA, 20 bp, Artificial Sequence
  Synthetic oligonucleotide; CAG chr11 5352590 5352609 5352593 -
taaaataatgttctaagtag

SEQ ID NO: 34239 - DNA, 20 bp, Artificial Sequence
  Synthetic oligonucleotide; GAG chr11 5352588 5352607 5352591 -
aaataatgttctaagtagca

SEQ ID NO: 34240 - DNA, 20 bp, Artificial Sequence
  Synthetic oligonucleotide; AGG chr11 5352587 5352606 5352590 -
aataatgttctaagtagcag

SEQ ID NO: 34241 - DNA, 20 bp, Artificial Sequence
  Synthetic oligonucleotide; GGG chr11 5352586 5352605 5352589 -
ataatgttctaagtagcaga

SEQ ID NO: 34242 - DNA, 20 bp, Artificial Sequence
  Synthetic oligonucleotide; CAG chr11 5352558 5352577 5352561 -
ctgatttccactgaaatgct

SEQ ID NO: 34243 - DNA, 20 bp, Artificial Sequence
  Synthetic oligonucleotide; AGG chr11 5352557 5352576 5352560 -
tgatttccactgaaatgctc

SEQ ID NO: 34244 - DNA, 20 bp, Artificial Sequence
  Synthetic oligonucleotide; GGG chr11 5352556 5352575 5352559 -
gatttccactgaaatgctca

SEQ ID NO: 34245 - DNA, 20 bp, Artificial Sequence
  Synthetic oligonucleotide; TAG chr11 5352547 5352566 5352550 -
tgaaatgctcagggattgat

SEQ ID NO: 34246 - DNA, 20 bp, Artificial Sequence
  Synthetic oligonucleotide; TAG chr11 5352522 5352541 5352525 -
ctcattgaaatgactttccc

SEQ ID NO: 34247 - DNA, 20 bp, Artificial Sequence
  Synthetic oligonucleotide; TGG chr11 5352509 5352528 5352512 -
ctttccctagttacttatgc

SEQ ID NO: 34248 - DNA, 20 bp, Artificial Sequence
  Synthetic oligonucleotide; CAG chr11 5352488 5352507 5352491 -
ggcaacattgtcatcctgtc

SEQ ID NO: 34249 - DNA, 20 bp, Artificial Sequence
  Synthetic oligonucleotide; AGG chr11 5352487 5352506 5352490 -
gcaacattgtcatcctgtcc

SEQ ID NO: 34250 - DNA, 20 bp, Artificial Sequence
  Synthetic oligonucleotide; CAG chr11 5352467 5352486 5352470 -
aggtcccctgaattattcct

SEQ ID NO: 34251 - DNA, 20 bp, Artificial Sequence
  Synthetic oligonucleotide; GAG chr11 5352465 5352484 5352468 -
gtcccctgaattattcctca

SEQ ID NO: 34252 - DNA, 20 bp, Artificial Sequence
  Synthetic oligonucleotide; CAG chr11 5352460 5352479 5352463 -
ctgaattattcctcagagac

SEQ ID NO: 34253 - DNA, 20 bp, Artificial Sequence
  Synthetic oligonucleotide; TAG chr11 5352439 5352458 5352442 -
agtgaaacaatgtcatgctc

SEQ ID NO: 34254 - DNA, 20 bp, Artificial Sequence
  Synthetic oligonucleotide; GAG chr11 5352437 5352456 5352440 -
tgaaacaatgtcatgctcta

SEQ ID NO: 34255 - DNA, 20 bp, Artificial Sequence
  Synthetic oligonucleotide; GAG chr11 5352433 5352452 5352436 -
acaatgtcatgctctagagt

SEQ ID NO: 34256 - DNA, 20 bp, Artificial Sequence
  Synthetic oligonucleotide; AGG chr11 5352432 5352451 5352435 -
caatgtcatgctctagagtg

SEQ ID NO: 34257 - DNA, 20 bp, Artificial Sequence
  Synthetic oligonucleotide; CAG chr11 5352429 5352448 5352432 -
tgtcatgctctagagtgagg

SEQ ID NO: 34258 - DNA, 20 bp, Artificial Sequence
  Synthetic oligonucleotide; GAG chr11 5352427 5352446 5352430 -
tcatgctctagagtgaggca

SEQ ID NO: 34259 - DNA, 20 bp, Artificial Sequence
  Synthetic oligonucleotide; GAG chr11 5352425 5352444 5352428 -
atgctctagagtgaggcaga

SEQ ID NO: 34260 - DNA, 20 bp, Artificial Sequence
  Synthetic oligonucleotide; AAG chr11 5352414 5352433 5352417 -
tgaggcagagagaataaacg

SEQ ID NO: 34261 - DNA, 20 bp, Artificial Sequence
  Synthetic oligonucleotide; TAG chr11 5352391 5352410 5352394 -
tatgccactctgaatctgct

SEQ ID NO: 34262 - DNA, 20 bp, Artificial Sequence
  Synthetic oligonucleotide; TAG chr11 5352377 5352396 5352380 -
tctgcttagttttaatgcta

SEQ ID NO: 34263 - DNA, 20 bp, Artificial Sequence
  Synthetic oligonucleotide; TGG chr11 5352369 5352388 5352372 -
gttttaatgctatagataaa

SEQ ID NO: 34264 - DNA, 20 bp, Artificial Sequence
  Synthetic oligonucleotide; GGG chr11 5352368 5352387 5352371 -
ttttaatgctatagataaat

SEQ ID NO: 34265 - DNA, 20 bp, Artificial Sequence
  Synthetic oligonucleotide; AAG chr11 5352358 5352377 5352361 -
atagataaatgggttcataa

SEQ ID NO: 34266 - DNA, 20 bp, Artificial Sequence
  Synthetic oligonucleotide; AGG chr11 5352357 5352376 5352360 -
tagataaatgggttcataaa

SEQ ID NO: 34267 - DNA, 20 bp, Artificial Sequence
  Synthetic oligonucleotide; TGG chr11 5352354 5352373 5352357 -
ataaatgggttcataaaagg

SEQ ID NO: 34268 - DNA, 20 bp, Artificial Sequence
  Synthetic oligonucleotide; GGG chr11 5352353 5352372 5352356 -
taaatgggttcataaaaggt

SEQ ID NO: 34269 - DNA, 20 bp, Artificial Sequence
  Synthetic oligonucleotide; AAG chr11 5352348 5352367 5352351 -
gggttcataaaaggtgggaa

SEQ ID NO: 34270 - DNA, 20 bp, Artificial Sequence
  Synthetic oligonucleotide; AGG chr11 5352347 5352366 5352350 -
ggttcataaaaggtgggaaa

SEQ ID NO: 34271 - DNA, 20 bp, Artificial Sequence
  Synthetic oligonucleotide; AAG chr11 5352344 5352363 5352347 -
tcataaaaggtgggaaaagg

SEQ ID NO: 34272 - DNA, 20 bp, Artificial Sequence
  Synthetic oligonucleotide; TGG chr11 5352341 5352360 5352344 -
taaaaggtgggaaaaggaag

SEQ ID NO: 34273 - DNA, 20 bp, Artificial Sequence
  Synthetic oligonucleotide; TAG chr11 5352335 5352354 5352338 -
gtgggaaaaggaagtggatg

SEQ ID NO: 34274 - DNA, 20 bp, Artificial Sequence
  Synthetic oligonucleotide; GAG chr11 5352310 5352329 5352313 -
cattgtgatgtgaacgacat

SEQ ID NO: 34275 - DNA, 20 bp, Artificial Sequence
  Synthetic oligonucleotide; AGG chr11 5352309 5352328 5352312 -
attgtgatgtgaacgacatg

SEQ ID NO: 34276 - DNA, 20 bp, Artificial Sequence
  Synthetic oligonucleotide; CAG chr11 5352276 5352295 5352279 -
ccaaacctatgaataaatgt

SEQ ID NO: 34277 - DNA, 20 bp, Artificial Sequence
  Synthetic oligonucleotide; CAG chr11 5352265 5352284 5352268 -
aataaatgtcagacaaacta

SEQ ID NO: 34278 - DNA, 20 bp, Artificial Sequence
  Synthetic oligonucleotide; TAG chr11 5352257 5352276 5352260 -
tcagacaaactacagtgaca

SEQ ID NO: 34279 - DNA, 20 bp, Artificial Sequence
  Synthetic oligonucleotide; AAG chr11 5352254 5352273 5352257 -
gacaaactacagtgacatag

SEQ ID NO: 34280 - DNA, 20 bp, Artificial Sequence
  Synthetic oligonucleotide; CAG chr11 5352249 5352268 5352252 -
actacagtgacatagaagac

SEQ ID NO: 34281 - DNA, 20 bp, Artificial Sequence
  Synthetic oligonucleotide; AGG chr11 5352248 5352267 5352251 -
ctacagtgacatagaagacc

SEQ ID NO: 34282 - DNA, 20 bp, Artificial Sequence
  Synthetic oligonucleotide; CAG chr11 5352242 5352261 5352245 -
tgacatagaagaccaggatg

SEQ ID NO: 34283 - DNA, 20 bp, Artificial Sequence
  Synthetic oligonucleotide; CAG chr11 5352239 5352258 5352242 -
catagaagaccaggatgcag

SEQ ID NO: 34284 - DNA, 20 bp, Artificial Sequence
  Synthetic oligonucleotide; GAG chr11 5352232 5352251 5352235 -
gaccaggatgcagcagatat

SEQ ID NO: 34285 - DNA, 20 bp, Artificial Sequence
  Synthetic oligonucleotide; GAG chr11 5352230 5352249 5352233 -
ccaggatgcagcagatatga

SEQ ID NO: 34286 - DNA, 20 bp, Artificial Sequence
  Synthetic oligonucleotide; GAG chr11 5352216 5352235 5352219 -
atatgagagacacatgtgtt

SEQ ID NO: 34287 - DNA, 20 bp, Artificial Sequence
  Synthetic oligonucleotide; AGG chr11 5352215 5352234 5352218 -
tatgagagacacatgtgttg

SEQ ID NO: 34288 - DNA, 20 bp, Artificial Sequence
  Synthetic oligonucleotide; GGG chr11 5352214 5352233 5352217 -
atgagagacacatgtgttga

SEQ ID NO: 34289 - DNA, 20 bp, Artificial Sequence
  Synthetic oligonucleotide; TGG chr11 5352208 5352227 5352211 -
gacacatgtgttgagggcct

SEQ ID NO: 34290 - DNA, 20 bp, Artificial Sequence
  Synthetic oligonucleotide; CAG chr11 5352193 5352212 5352196 -
ggccttggccctttctcctc

SEQ ID NO: 34291 - DNA, 20 bp, Artificial Sequence
  Synthetic oligonucleotide; CAG chr11 5352175 5352194 5352178 -
tccagaaccaatgcccatga

SEQ ID NO: 34292 - DNA, 20 bp, Artificial Sequence
  Synthetic oligonucleotide; GAG chr11 5352168 5352187 5352171 -
ccaatgcccatgacagtctt

SEQ ID NO: 34293 - DNA, 20 bp, Artificial Sequence
  Synthetic oligonucleotide; TAG chr11 5352155 5352174 5352158 -
cagtcttgagaatcaaaatg

SEQ ID NO: 34294 - DNA, 20 bp, Artificial Sequence
  Synthetic oligonucleotide; AGG chr11 5352154 5352173 5352157 -
agtcttgagaatcaaaatgt

SEQ ID NO: 34295 - DNA, 20 bp, Artificial Sequence
  Synthetic oligonucleotide; GAG chr11 5352152 5352171 5352155 -
tcttgagaatcaaaatgtag

SEQ ID NO: 34296 - DNA, 20 bp, Artificial Sequence
  Synthetic oligonucleotide; AAG chr11 5352146 5352165 5352149 -
gaatcaaaatgtaggagaaa

SEQ ID NO: 34297 - DNA, 20 bp, Artificial Sequence
  Synthetic oligonucleotide; GAG chr11 5352138 5352157 5352141 -
atgtaggagaaaaagatgat

SEQ ID NO: 34298 - DNA, 20 bp, Artificial Sequence
  Synthetic oligonucleotide; AAG chr11 5352134 5352153 5352137 -
aggagaaaaagatgatgaga

SEQ ID NO: 34299 - DNA, 20 bp, Artificial Sequence
  Synthetic oligonucleotide; AAG chr11 5352125 5352144 5352128 -
agatgatgagaaagtccaac

SEQ ID NO: 34300 - DNA, 20 bp, Artificial Sequence
  Synthetic oligonucleotide; TGG chr11 5352099 5352118 5352102 -
attgcaaataaaactacaac

SEQ ID NO: 34301 - DNA, 20 bp, Artificial Sequence
  Synthetic oligonucleotide; TAG chr11 5352095 5352114 5352098 -
caaataaaactacaactgga

SEQ ID NO: 34302 - DNA, 20 bp, Artificial Sequence
  Synthetic oligonucleotide; GAG chr11 5352093 5352112 5352096 -
aataaaactacaactggata

SEQ ID NO: 34303 - DNA, 20 bp, Artificial Sequence
  Synthetic oligonucleotide; CGG chr11 5352089 5352108 5352092 -
aaactacaactggatagaga

SEQ ID NO: 34304 - DNA, 20 bp, Artificial Sequence
  Synthetic oligonucleotide; AAG chr11 5352083 5352102 5352086 -
caactggatagagacggttg

SEQ ID NO: 34305 - DNA, 20 bp, Artificial Sequence
  Synthetic oligonucleotide; AGG chr11 5352082 5352101 5352085 -
aactggatagagacggttga

SEQ ID NO: 34306 - DNA, 20 bp, Artificial Sequence
  Synthetic oligonucleotide; CAG chr11 5352073 5352092 5352076 -
gagacggttgaaggtgatgt

SEQ ID NO: 34307 - DNA, 20 bp, Artificial Sequence
  Synthetic oligonucleotide; CAG chr11 5352068 5352087 5352071 -
ggttgaaggtgatgtcagca

SEQ ID NO: 34308 - DNA, 20 bp, Artificial Sequence
  Synthetic oligonucleotide; AGG chr11 5352067 5352086 5352070 -
gttgaaggtgatgtcagcac

SEQ ID NO: 34309 - DNA, 20 bp, Artificial Sequence
  Synthetic oligonucleotide; TAG chr11 5352063 5352082 5352066 -
aaggtgatgtcagcacaggc

SEQ ID NO: 34310 - DNA, 20 bp, Artificial Sequence
  Synthetic oligonucleotide; TGG chr11 5352047 5352066 5352050 -
aggctagcttgatgacatct

SEQ ID NO: 34311 - DNA, 20 bp, Artificial Sequence
  Synthetic oligonucleotide; TAG chr11 5352042 5352061 5352045 -
agcttgatgacatcttggtg

SEQ ID NO: 34312 - DNA, 20 bp, Artificial Sequence
  Synthetic oligonucleotide; CAG chr11 5352038 5352057 5352041 -
tgatgacatcttggtgtaga

SEQ ID NO: 34313 - DNA, 20 bp, Artificial Sequence
  Synthetic oligonucleotide; AAG chr11 5352034 5352053 5352037 -
gacatcttggtgtagacaga

SEQ ID NO: 34314 - DNA, 20 bp, Artificial Sequence
  Synthetic oligonucleotide; TGG chr11 5352029 5352048 5352032 -
cttggtgtagacagaaagca

SEQ ID NO: 34315 - DNA, 20 bp, Artificial Sequence
  Synthetic oligonucleotide; GGG chr11 5352028 5352047 5352031 -
ttggtgtagacagaaagcat

SEQ ID NO: 34316 - DNA, 20 bp, Artificial Sequence
  Synthetic oligonucleotide; GAG chr11 5352026 5352045 5352029 -
ggtgtagacagaaagcatgg

SEQ ID NO: 34317 - DNA, 20 bp, Artificial Sequence
  Synthetic oligonucleotide; GAG chr11 5352024 5352043 5352027 -
tgtagacagaaagcatggga

SEQ ID NO: 34318 - DNA, 20 bp, Artificial Sequence
  Synthetic oligonucleotide; TGG chr11 5352017 5352036 5352020 -
agaaagcatgggagagtaca

SEQ ID NO: 34319 - DNA, 20 bp, Artificial Sequence
  Synthetic oligonucleotide; GGG chr11 5352016 5352035 5352019 -
gaaagcatgggagagtacat

SEQ ID NO: 34320 - DNA, 20 bp, Artificial Sequence
  Synthetic oligonucleotide; CAG chr11 5352008 5352027 5352011 -
gggagagtacatgggatcga

SEQ ID NO: 34321 - DNA, 20 bp, Artificial Sequence
  Synthetic oligonucleotide; TAG chr11 5352005 5352024 5352008 -
agagtacatgggatcgacag

SEQ ID NO: 34322 - DNA, 20 bp, Artificial Sequence
  Synthetic oligonucleotide; AGG chr11 5352004 5352023 5352007 -
gagtacatgggatcgacagt

SEQ ID NO: 34323 - DNA, 20 bp, Artificial Sequence
  Synthetic oligonucleotide; GGG chr11 5352003 5352022 5352006 -
agtacatgggatcgacagta

SEQ ID NO: 34324 - DNA, 20 bp, Artificial Sequence
  Synthetic oligonucleotide; CAG chr11 5351996 5352015 5351999 -
gggatcgacagtagggaaac

SEQ ID NO: 34325 - DNA, 20 bp, Artificial Sequence
  Synthetic oligonucleotide; TAG chr11 5351991 5352010 5351994 -
cgacagtagggaaaccagtg

SEQ ID NO: 34326 - DNA, 20 bp, Artificial Sequence
  Synthetic oligonucleotide; AGG chr11 5351990 5352009 5351993 -
gacagtagggaaaccagtgt

SEQ ID NO: 34327 - DNA, 20 bp, Artificial Sequence
  Synthetic oligonucleotide; TGG chr11 5351976 5351995 5351979 -
cagtgtaggcgaacaactat

SEQ ID NO: 34328 - DNA, 20 bp, Artificial Sequence
  Synthetic oligonucleotide; TGG chr11 5351968 5351987 5351971 -
gcgaacaactattggcataa

SEQ ID NO: 34329 - DNA, 20 bp, Artificial Sequence
  Synthetic oligonucleotide; CAG chr11 5351964 5351983 5351967 -
acaactattggcataatgga

SEQ ID NO: 34330 - DNA, 20 bp, Artificial Sequence
  Synthetic oligonucleotide; CAG chr11 5351959 5351978 5351962 -
tattggcataatggacagac

SEQ ID NO: 34331 - DNA, 20 bp, Artificial Sequence
  Synthetic oligonucleotide; TGG chr11 5351921 5351940 5351924 -
gcacaccaatcttcattacc

SEQ ID NO: 34332 - DNA, 20 bp, Artificial Sequence
  Synthetic oligonucleotide; GGG chr11 5351920 5351939 5351923 -
cacaccaatcttcattacct

SEQ ID NO: 34333 - DNA, 20 bp, Artificial Sequence
  Synthetic oligonucleotide; TGG chr11 5351914 5351933 5351917 -
aatcttcattacctgggtgt

SEQ ID NO: 34334 - DNA, 20 bp, Artificial Sequence
  Synthetic oligonucleotide; CAG chr11 5351910 5351929 5351913 -
ttcattacctgggtgttggt

SEQ ID NO: 34335 - DNA, 20 bp, Artificial Sequence
  Synthetic oligonucleotide; AGG chr11 5351909 5351928 5351912 -
tcattacctgggtgttggtc

SEQ ID NO: 34336 - DNA, 20 bp, Artificial Sequence
  Synthetic oligonucleotide; TAG chr11 5351905 5351924 5351908 -
tacctgggtgttggtcagga

SEQ ID NO: 34337 - DNA, 20 bp, Artificial Sequence
  Synthetic oligonucleotide; GAG chr11 5351903 5351922 5351906 -
cctgggtgttggtcaggata

SEQ ID NO: 34338 - DNA, 20 bp, Artificial Sequence
  Synthetic oligonucleotide; AGG chr11 5351902 5351921 5351905 -
ctgggtgttggtcaggatag

SEQ ID NO: 34339 - DNA, 20 bp, Artificial Sequence
  Synthetic oligonucleotide; AAG chr11 5351891 5351910 5351894 -
tcaggatagaggtatatctt

SEQ ID NO: 34340 - DNA, 20 bp, Artificial Sequence
  Synthetic oligonucleotide; AGG chr11 5351890 5351909 5351893 -
caggatagaggtatatctta

SEQ ID NO: 34341 - DNA, 20 bp, Artificial Sequence
  Synthetic oligonucleotide; GGG chr11 5351889 5351908 5351892 -
aggatagaggtatatcttaa

SEQ ID NO: 34342 - DNA, 20 bp, Artificial Sequence
  Synthetic oligonucleotide; GGG chr11 5351888 5351907 5351891 -
ggatagaggtatatcttaag

SEQ ID NO: 34343 - DNA, 20 bp, Artificial Sequence
  Synthetic oligonucleotide; CGG chr11 5351882 5351901 5351885 -
aggtatatcttaaggggctg

SEQ ID NO: 34344 - DNA, 20 bp, Artificial Sequence
  Synthetic oligonucleotide; TGG chr11 5351878 5351897 5351881 -
atatcttaaggggctgcgga

SEQ ID NO: 34345 - DNA, 20 bp, Artificial Sequence
  Synthetic oligonucleotide; CAG chr11 5351867 5351886 5351870 -
ggctgcggatggtaatgaaa

SEQ ID NO: 34346 - DNA, 20 bp, Artificial Sequence
  Synthetic oligonucleotide; AAG chr11 5351860 5351879 5351863 -
gatggtaatgaaacagtcat

SEQ ID NO: 34347 - DNA, 20 bp, Artificial Sequence
  Synthetic oligonucleotide; TGG chr11 5351854 5351873 5351857 -
aatgaaacagtcataagcca

SEQ ID NO: 34348 - DNA, 20 bp, Artificial Sequence
  Synthetic oligonucleotide; AAG chr11 5351850 5351869 5351853 -
aaacagtcataagccatggc

SEQ ID NO: 34349 - DNA, 20 bp, Artificial Sequence
  Synthetic oligonucleotide; AAG chr11 5351846 5351865 5351849 -
agtcataagccatggcaagc

SEQ ID NO: 34350 - DNA, 20 bp, Artificial Sequence
  Synthetic oligonucleotide; CAG chr11 5351827 5351846 5351830 -
caagacacctgactccatga

SEQ ID NO: 34351 - DNA, 20 bp, Artificial Sequence
  Synthetic oligonucleotide; AAG chr11 5351823 5351842 5351826 -
acacctgactccatgacaga

SEQ ID NO: 34352 - DNA, 20 bp, Artificial Sequence
  Synthetic oligonucleotide; GAG chr11 5351821 5351840 5351824 -
acctgactccatgacagaaa

SEQ ID NO: 34353 - DNA, 20 bp, Artificial Sequence
  Synthetic oligonucleotide; TGG chr11 5351816 5351835 5351819 -
actccatgacagaaagagta

SEQ ID NO: 34354 - DNA, 20 bp, Artificial Sequence
  Synthetic oligonucleotide; TAG chr11 5351807 5351826 5351810 -
cagaaagagtatggataaaa

SEQ ID NO: 34355 - DNA, 20 bp, Artificial Sequence
  Synthetic oligonucleotide; AGG chr11 5351806 5351825 5351809 -
agaaagagtatggataaaat

SEQ ID NO: 34356 - DNA, 20 bp, Artificial Sequence
  Synthetic oligonucleotide; GAG chr11 5351800 5351819 5351803 -
agtatggataaaataggcct

SEQ ID NO: 34357 - DNA, 20 bp, Artificial Sequence
  Synthetic oligonucleotide; GAG chr11 5351798 5351817 5351801 -
tatggataaaataggcctga

SEQ ID NO: 34358 - DNA, 20 bp, Artificial Sequence
  Synthetic oligonucleotide; AAG chr11 5351795 5351814 5351798 -
ggataaaataggcctgagag

SEQ ID NO: 34359 - DNA, 20 bp, Artificial Sequence
  Synthetic oligonucleotide; CAG chr11 5351792 5351811 5351795 -
taaaataggcctgagagaag

SEQ ID NO: 34360 - DNA, 20 bp, Artificial Sequence
  Synthetic oligonucleotide; AGG chr11 5351791 5351810 5351794 -
aaaataggcctgagagaagc

SEQ ID NO: 34361 - DNA, 20 bp, Artificial Sequence
  Synthetic oligonucleotide; TGG chr11 5351783 5351802 5351786 -
cctgagagaagcaggctcca

SEQ ID NO: 34362 - DNA, 20 bp, Artificial Sequence
  Synthetic oligonucleotide; CAG chr11 5351757 5351776 5351760 -
atctccctgtgatctaacca

SEQ ID NO: 34363 - DNA, 20 bp, Artificial Sequence
  Synthetic oligonucleotide; TAG chr11 5351748 5351767 5351751 -
tgatctaaccacagaacacc

SEQ ID NO: 34364 - DNA, 20 bp, Artificial Sequence
  Synthetic oligonucleotide; TGG chr11 5351740 5351759 5351743 -
ccacagaacacctagcactg

SEQ ID NO: 34365 - DNA, 20 bp, Artificial Sequence
  Synthetic oligonucleotide; GGG chr11 5351739 5351758 5351742 -
cacagaacacctagcactgt

SEQ ID NO: 34366 - DNA, 20 bp, Artificial Sequence
  Synthetic oligonucleotide; TGG chr11 5351731 5351750 5351734 -
acctagcactgtgggcattg

SEQ ID NO: 34367 - DNA, 20 bp, Artificial Sequence
  Synthetic oligonucleotide; GAG chr11 5351715 5351734 5351718 -
attgtggtcaatgtcactcc

SEQ ID NO: 34368 - DNA, 20 bp, Artificial Sequence
  Synthetic oligonucleotide; AGG chr11 5351714 5351733 5351717 -
ttgtggtcaatgtcactccg

SEQ ID NO: 34369 - DNA, 20 bp, Artificial Sequence
  Synthetic oligonucleotide; TAG chr11 5351707 5351726 5351710 -
caatgtcactccgaggtctg

SEQ ID NO: 34370 - DNA, 20 bp, Artificial Sequence
  Synthetic oligonucleotide; TAG chr11 5351695 5351714 5351698 -
gaggtctgtagctgccaaca

SEQ ID NO: 34371 - DNA, 20 bp, Artificial Sequence
  Synthetic oligonucleotide; AAG chr11 5351690 5351709 5351693 -
ctgtagctgccaacatagct

SEQ ID NO: 34372 - DNA, 20 bp, Artificial Sequence
  Synthetic oligonucleotide; TAG chr11 5351684 5351703 5351687 -
ctgccaacatagctaagaaa

SEQ ID NO: 34373 - DNA, 20 bp, Artificial Sequence
  Synthetic oligonucleotide; TGG chr11 5351677 5351696 5351680 -
catagctaagaaatagtaca

SEQ ID NO: 34374 - DNA, 20 bp, Artificial Sequence
  Synthetic oligonucleotide; GGG chr11 5351676 5351695 5351679 -
atagctaagaaatagtacat

SEQ ID NO: 34375 - DNA, 20 bp, Artificial Sequence
  Synthetic oligonucleotide; TGG chr11 5351669 5351688 5351672 -
agaaatagtacatgggctca

SEQ ID NO: 34376 - DNA, 20 bp, Artificial Sequence
  Synthetic oligonucleotide; GAG chr11 5351667 5351686 5351670 -
aaatagtacatgggctcatg

SEQ ID NO: 34377 - DNA, 20 bp, Artificial Sequence
  Synthetic oligonucleotide; AGG chr11 5351666 5351685 5351669 -
aatagtacatgggctcatgg

SEQ ID NO: 34378 - DNA, 20 bp, Artificial Sequence
  Synthetic oligonucleotide; GAG chr11 5351646 5351665 5351649 -
aggttatgatcattcctgat

SEQ ID NO: 34379 - DNA, 20 bp, Artificial Sequence
  Synthetic oligonucleotide; AAG chr11 5351642 5351661 5351645 -
tatgatcattcctgatgaga

SEQ ID NO: 34380 - DNA, 20 bp, Artificial Sequence
  Synthetic oligonucleotide; GAG chr11 5351640 5351659 5351643 -
tgatcattcctgatgagaaa

SEQ ID NO: 34381 - DNA, 20 bp, Artificial Sequence
  Synthetic oligonucleotide; AAG chr11 5351637 5351656 5351640 -
tcattcctgatgagaaagag

SEQ ID NO: 34382 - DNA, 20 bp, Artificial Sequence
  Synthetic oligonucleotide; GAG chr11 5351635 5351654 5351638 -
attcctgatgagaaagagaa

SEQ ID NO: 34383 - DNA, 20 bp, Artificial Sequence
  Synthetic oligonucleotide; AAG chr11 5351622 5351641 5351625 -
aagagaagagtgccattgcc

SEQ ID NO: 34384 - DNA, 20 bp, Artificial Sequence
  Synthetic oligonucleotide; AAG chr11 5351619 5351638 5351622 -
agaagagtgccattgccaag

SEQ ID NO: 34385 - DNA, 20 bp, Artificial Sequence
  Synthetic oligonucleotide; TGG chr11 5351614 5351633 5351617 -
agtgccattgccaagaagta

SEQ ID NO: 34386 - DNA, 20 bp, Artificial Sequence
  Synthetic oligonucleotide; GAG chr11 5351612 5351631 5351615 -
tgccattgccaagaagtatg

SEQ ID NO: 34387 - DNA, 20 bp, Artificial Sequence
  Synthetic oligonucleotide; TAG chr11 5351606 5351625 5351609 -
tgccaagaagtatggagatg

SEQ ID NO: 34388 - DNA, 20 bp, Artificial Sequence
  Synthetic oligonucleotide; AGG chr11 5351605 5351624 5351608 -
gccaagaagtatggagatgt

SEQ ID NO: 34389 - DNA, 20 bp, Artificial Sequence
  Synthetic oligonucleotide; TGG chr11 5351592 5351611 5351595 -
gagatgtaggctgccaataa

SEQ ID NO: 34390 - DNA, 20 bp, Artificial Sequence
  Synthetic oligonucleotide; GGG chr11 5351591 5351610 5351594 -
agatgtaggctgccaataat

SEQ ID NO: 34391 - DNA, 20 bp, Artificial Sequence
  Synthetic oligonucleotide; CAG chr11 5351579 5351598 5351582 -
ccaataatgggatgaatatc

SEQ ID NO: 34392 - DNA, 20 bp, Artificial Sequence
  Synthetic oligonucleotide; TGG chr11 5351556 5351575 5351559 -
tgatgtgccttctccatgcc

SEQ ID NO: 34393 - DNA, 20 bp, Artificial Sequence
  Synthetic oligonucleotide; GGG chr11 5351555 5351574 5351558 -
gatgtgccttctccatgcct

SEQ ID NO: 34394 - DNA, 20 bp, Artificial Sequence
  Synthetic oligonucleotide; AAG chr11 5351552 5351571 5351555 -
gtgccttctccatgcctggg

SEQ ID NO: 34395 - DNA, 20 bp, Artificial Sequence
  Synthetic oligonucleotide; CAG chr11 5351548 5351567 5351551 -
cttctccatgcctgggaagc

SEQ ID NO: 34396 - DNA, 20 bp, Artificial Sequence
  Synthetic oligonucleotide; AAG chr11 5351544 5351563 5351547 -
tccatgcctgggaagccagt

SEQ ID NO: 34397 - DNA, 20 bp, Artificial Sequence
  Synthetic oligonucleotide; TGG chr11 5351540 5351559 5351543 -
tgcctgggaagccagtaagc

SEQ ID NO: 34398 - DNA, 20 bp, Artificial Sequence
  Synthetic oligonucleotide; AAG chr11 5351537 5351556 5351540 -
ctgggaagccagtaagctgg

SEQ ID NO: 34399 - DNA, 20 bp, Artificial Sequence
  Synthetic oligonucleotide; AGG chr11 5351536 5351555 5351539 -
tgggaagccagtaagctgga

SEQ ID NO: 34400 - DNA, 20 bp, Artificial Sequence
  Synthetic oligonucleotide; TGG chr11 5351533 5351552 5351536 -
gaagccagtaagctggaagg

SEQ ID NO: 34401 - DNA, 20 bp, Artificial Sequence
  Synthetic oligonucleotide; AAG chr11 5351530 5351549 5351533 -
gccagtaagctggaaggtgg

SEQ ID NO: 34402 - DNA, 20 bp, Artificial Sequence
  Synthetic oligonucleotide; CAG chr11 5351527 5351546 5351530 -
agtaagctggaaggtggaag

SEQ ID NO: 34403 - DNA, 20 bp, Artificial Sequence
  Synthetic oligonucleotide; GAG chr11 5351517 5351536 5351520 -
aaggtggaagcagacttatt

SEQ ID NO: 34404 - DNA, 20 bp, Artificial Sequence
  Synthetic oligonucleotide; CAG chr11 5351505 5351524 5351508 -
gacttattgagccccattgc

SEQ ID NO: 34405 - DNA, 20 bp, Artificial Sequence
  Synthetic oligonucleotide; AAG chr11 5351495 5351514 5351498 -
gccccattgccagctttgca

SEQ ID NO: 34406 - DNA, 20 bp, Artificial Sequence
  Synthetic oligonucleotide; GAG chr11 5351493 5351512 5351496 -
cccattgccagctttgcaaa

SEQ ID NO: 34407 - DNA, 20 bp, Artificial Sequence
  Synthetic oligonucleotide; AGG chr11 5351492 5351511 5351495 -
ccattgccagctttgcaaag

SEQ ID NO: 34408 - DNA, 20 bp, Artificial Sequence
  Synthetic oligonucleotide; CAG chr11 5351476 5351495 5351479 -
aaagaggcaaatatttactc

SEQ ID NO: 34409 - DNA, 20 bp, Artificial Sequence
  Synthetic oligonucleotide; AGG chr11 5351475 5351494 5351478 -
aagaggcaaatatttactcc

SEQ ID NO: 34410 - DNA, 20 bp, Artificial Sequence
  Synthetic oligonucleotide; AAG chr11 5351470 5351489 5351473 -
gcaaatatttactccaggta

SEQ ID NO: 34411 - DNA, 20 bp, Artificial Sequence
  Synthetic oligonucleotide; TAG chr11 5351464 5351483 5351467 -
atttactccaggtaaagcaa

SEQ ID NO: 34412 - DNA, 20 bp, Artificial Sequence
  Synthetic oligonucleotide; CAG chr11 5351457 5351476 5351460 -
ccaggtaaagcaatagtaat

SEQ ID NO: 34413 - DNA, 20 bp, Artificial Sequence
  Synthetic oligonucleotide; AAG chr11 5351446 5351465 5351449 -
aatagtaatcagttgtataa

SEQ ID NO: 34414 - DNA, 20 bp, Artificial Sequence
  Synthetic oligonucleotide; GAG chr11 5351434 5351453 5351437 -
ttgtataaaagttgctcctt

SEQ ID NO: 34415 - DNA, 20 bp, Artificial Sequence
  Synthetic oligonucleotide; AAG chr11 5351415 5351434 5351418 -
tgagaattctacctgttcat

SEQ ID NO: 34416 - DNA, 20 bp, Artificial Sequence
  Synthetic oligonucleotide; CAG chr11 5351404 5351423 5351407 -
cctgttcataagatgttcac

SEQ ID NO: 34417 - DNA, 20 bp, Artificial Sequence
  Synthetic oligonucleotide; CAG chr11 5351391 5351410 5351394 -
tgttcaccagtcctgacttt

SEQ ID NO: 34418 - DNA, 20 bp, Artificial Sequence
  Synthetic oligonucleotide; CAG chr11 5351385 5351404 5351388 -
ccagtcctgactttcagtga

SEQ ID NO: 34419 - DNA, 20 bp, Artificial Sequence
  Synthetic oligonucleotide; AAG chr11 5351381 5351400 5351384 -
tcctgactttcagtgacagc

SEQ ID NO: 34420 - DNA, 20 bp, Artificial Sequence
  Synthetic oligonucleotide; AGG chr11 5351380 5351399 5351383 -
cctgactttcagtgacagca

SEQ ID NO: 34421 - DNA, 20 bp, Artificial Sequence
  Synthetic oligonucleotide; TAG chr11 5351368 5351387 5351371 -
tgacagcaaggatgataatt

SEQ ID NO: 34422 - DNA, 20 bp, Artificial Sequence
  Synthetic oligonucleotide; TGG chr11 5351358 5351377 5351361 -
gatgataatttagtcattcc

SEQ ID NO: 34423 - DNA, 20 bp, Artificial Sequence
  Synthetic oligonucleotide; GGG chr11 5351357 5351376 5351360 -
atgataatttagtcattcct

SEQ ID NO: 34424 - DNA, 20 bp, Artificial Sequence
  Synthetic oligonucleotide; GAG chr11 5351355 5351374 5351358 -
gataatttagtcattcctgg

SEQ ID NO: 34425 - DNA, 20 bp, Artificial Sequence
  Synthetic oligonucleotide; TAG chr11 5351348 5351367 5351351 -
tagtcattcctgggagatcc

SEQ ID NO: 34426 - DNA, 20 bp, Artificial Sequence
  Synthetic oligonucleotide; AGG chr11 5351347 5351366 5351350 -
agtcattcctgggagatcct

SEQ ID NO: 34427 - DNA, 20 bp, Artificial Sequence
  Synthetic oligonucleotide; TGG chr11 5351342 5351361 5351345 -
ttcctgggagatcctaggta

SEQ ID NO: 34428 - DNA, 20 bp, Artificial Sequence
  Synthetic oligonucleotide; GGG chr11 5351341 5351360 5351344 -
tcctgggagatcctaggtat

SEQ ID NO: 34429 - DNA, 20 bp, Artificial Sequence
  Synthetic oligonucleotide; TAG chr11 5351334 5351353 5351337 -
agatcctaggtatgggaaaa

SEQ ID NO: 34430 - DNA, 20 bp, Artificial Sequence
  Synthetic oligonucleotide; AAG chr11 5351323 5351342 5351326 -
atgggaaaatagaatgtata

SEQ ID NO: 34431 - DNA, 20 bp, Artificial Sequence
  Synthetic oligonucleotide; AAG chr11 5351320 5351339 5351323 -
ggaaaatagaatgtataaag

SEQ ID NO: 34432 - DNA, 20 bp, Artificial Sequence
  Synthetic oligonucleotide; TAG chr11 5351309 5351328 5351312 -
tgtataaagaagatattatt

SEQ ID NO: 34433 - DNA, 20 bp, Artificial Sequence
  Synthetic oligonucleotide; AGG chr11 5351308 5351327 5351311 -
gtataaagaagatattattt

SEQ ID NO: 34434 - DNA, 20 bp, Artificial Sequence
  Synthetic oligonucleotide; GGG chr11 5351307 5351326 5351310 -
tataaagaagatattattta

SEQ ID NO: 34435 - DNA, 20 bp, Artificial Sequence
  Synthetic oligonucleotide; AAG chr11 5351292 5351311 5351295 -
atttagggtttactctatgt

SEQ ID NO: 34436 - DNA, 20 bp, Artificial Sequence
  Synthetic oligonucleotide; TGG chr11 5351284 5351303 5351287 -
tttactctatgtaagattat

SEQ ID NO: 34437 - DNA, 20 bp, Artificial Sequence
  Synthetic oligonucleotide; TGG chr11 5351272 5351291 5351275 -
aagattattggatactacgt

SEQ ID NO: 34438 - DNA, 20 bp, Artificial Sequence
  Synthetic oligonucleotide; GGG chr11 5351271 5351290 5351274 -
agattattggatactacgtt

SEQ ID NO: 34439 - DNA, 20 bp, Artificial Sequence
  Synthetic oligonucleotide; GGG chr11 5351270 5351289 5351273 -
gattattggatactacgttg

SEQ ID NO: 34440 - DNA, 20 bp, Artificial Sequence
  Synthetic oligonucleotide; CAG chr11 5351264 5351283 5351267 -
tggatactacgttggggata

SEQ ID NO: 34441 - DNA, 20 bp, Artificial Sequence
  Synthetic oligonucleotide; CAG chr11 5351252 5351271 5351255 -
tggggatacagctattcatg

SEQ ID NO: 34442 - DNA, 20 bp, Artificial Sequence
  Synthetic oligonucleotide; CAG chr11 5351212 5351231 5351215 -
tcattgtaaatcatataacc

SEQ ID NO: 34443 - DNA, 20 bp, Artificial Sequence
  Synthetic oligonucleotide; AAG chr11 5351191 5351210 5351194 -
agaaaataaaaacaaaatga

SEQ ID NO: 34444 - DNA, 20 bp, Artificial Sequence
  Synthetic oligonucleotide; AAG chr11 5351188 5351207 5351191 -
aaataaaaacaaaatgaaag

SEQ ID NO: 34445 - DNA, 20 bp, Artificial Sequence
  Synthetic oligonucleotide; TAG chr11 5351168 5351187 5351171 -
aagaaatcactatatttgaa

SEQ ID NO: 34446 - DNA, 20 bp, Artificial Sequence
  Synthetic oligonucleotide; TGG chr11 5351157 5351176 5351160 -
atatttgaatagtgctgtaa

SEQ ID NO: 34447 - DNA, 20 bp, Artificial Sequence
  Synthetic oligonucleotide; TAG chr11 5351143 5351162 5351146 -
ctgtaatggcctgaaactta

SEQ ID NO: 34448 - DNA, 20 bp, Artificial Sequence
  Synthetic oligonucleotide; AGG chr11 5351142 5351161 5351145 -
tgtaatggcctgaaacttat

SEQ ID NO: 34449 - DNA, 20 bp, Artificial Sequence
  Synthetic oligonucleotide; TGG chr11 5351129 5351148 5351132 -
aacttataggtcacttttca

SEQ ID NO: 34450 - DNA, 20 bp, Artificial Sequence
  Synthetic oligonucleotide; TGG chr11 5351110 5351129 5351113 -
atggtgctcttcatcctgac

SEQ ID NO: 34451 - DNA, 20 bp, Artificial Sequence
  Synthetic oligonucleotide; TGG chr11 5351107 5351126 5351110 -
gtgctcttcatcctgactgg

SEQ ID NO: 34452 - DNA, 20 bp, Artificial Sequence
  Synthetic oligonucleotide; TAG chr11 5351099 5351118 5351102 -
catcctgactggtggtatta

SEQ ID NO: 34453 - DNA, 20 bp, Artificial Sequence
  Synthetic oligonucleotide; AGG chr11 5351098 5351117 5351101 -
atcctgactggtggtattat

SEQ ID NO: 34454 - DNA, 20 bp, Artificial Sequence
  Synthetic oligonucleotide; GGG chr11 5351097 5351116 5351100 -
tcctgactggtggtattata

SEQ ID NO: 34455 - DNA, 20 bp, Artificial Sequence
  Synthetic oligonucleotide; TGG chr11 5351094 5351113 5351097 -
tgactggtggtattataggg

SEQ ID NO: 34456 - DNA, 20 bp, Artificial Sequence
  Synthetic oligonucleotide; AAG chr11 5351086 5351105 5351089 -
ggtattatagggtggatgta

SEQ ID NO: 34457 - DNA, 20 bp, Artificial Sequence
  Synthetic oligonucleotide; AGG chr11 5351085 5351104 5351088 -
gtattatagggtggatgtaa

SEQ ID NO: 34458 - DNA, 20 bp, Artificial Sequence
  Synthetic oligonucleotide; CAG chr11 5351077 5351096 5351080 -
gggtggatgtaaaggtttcc

SEQ ID NO: 34459 - DNA, 20 bp, Artificial Sequence
  Synthetic oligonucleotide; AGG chr11 5351076 5351095 5351079 -
ggtggatgtaaaggtttccc

SEQ ID NO: 34460 - DNA, 20 bp, Artificial Sequence
  Synthetic oligonucleotide; GAG chr11 5351067 5351086 5351070 -
aaaggtttcccaggctatgt

SEQ ID NO: 34461 - DNA, 20 bp, Artificial Sequence
  Synthetic oligonucleotide; AAG chr11 5351058 5351077 5351061 -
ccaggctatgtgagacctaa

SEQ ID NO: 34462 - DNA, 20 bp, Artificial Sequence
  Synthetic oligonucleotide; CAG chr11 5351053 5351072 5351056 -
ctatgtgagacctaaaagat

SEQ ID NO: 34463 - DNA, 20 bp, Artificial Sequence
  Synthetic oligonucleotide; TAG chr11 5351050 5351069 5351053 -
tgtgagacctaaaagatcag

SEQ ID NO: 34464 - DNA, 20 bp, Artificial Sequence
  Synthetic oligonucleotide; TGG chr11 5351042 5351061 5351045 -
ctaaaagatcagtagaaaaa

SEQ ID NO: 34465 - DNA, 20 bp, Artificial Sequence
  Synthetic oligonucleotide; AAG chr11 5351035 5351054 5351038 -
atcagtagaaaaatggttct

SEQ ID NO: 34466 - DNA, 20 bp, Artificial Sequence
  Synthetic oligonucleotide; TGG chr11 5351026 5351045 5351029 -
aaaatggttctaagcactat

SEQ ID NO: 34467 - DNA, 20 bp, Artificial Sequence
  Synthetic oligonucleotide; AAG chr11 5351021 5351040 5351024 -
ggttctaagcactattggaa

SEQ ID NO: 34468 - DNA, 20 bp, Artificial Sequence
  Synthetic oligonucleotide; CAG chr11 5351018 5351037 5351021 -
tctaagcactattggaaaag

SEQ ID NO: 34469 - DNA, 20 bp, Artificial Sequence
  Synthetic oligonucleotide; AAG chr11 5351010 5351029 5351013 -
ctattggaaaagcagatata

SEQ ID NO: 34470 - DNA, 20 bp, Artificial Sequence
  Synthetic oligonucleotide; TGG chr11 5351001 5351020 5351004 -
aagcagatataaagattata

SEQ ID NO: 34471 - DNA, 20 bp, Artificial Sequence
  Synthetic oligonucleotide; AAG chr11 5350984 5351003 5350987 -
atatggaaaaacaaatacac

SEQ ID NO: 34472 - DNA, 20 bp, Artificial Sequence
  Synthetic oligonucleotide; AAG chr11 5350980 5350999 5350983 -
ggaaaaacaaatacacaagt

SEQ ID NO: 34473 - DNA, 20 bp, Artificial Sequence
  Synthetic oligonucleotide; GAG chr11 5350969 5350988 5350972 -
tacacaagtaagaaatatat

SEQ ID NO: 34474 - DNA, 20 bp, Artificial Sequence
  Synthetic oligonucleotide; TAG chr11 5350952 5350971 5350955 -
tatgagcaaatacaataaaa

SEQ ID NO: 34475 - DNA, 20 bp, Artificial Sequence
  Synthetic oligonucleotide; CAG chr11 5350942 5350961 5350945 -
tacaataaaatagtaaattt

SEQ ID NO: 34476 - DNA, 20 bp, Artificial Sequence
  Synthetic oligonucleotide; GAG chr11 5350940 5350959 5350943 -
caataaaatagtaaatttca

SEQ ID NO: 34477 - DNA, 20 bp, Artificial Sequence
  Synthetic oligonucleotide; TGG chr11 5350915 5350934 5350918 -
tgacttttcttcaatattcc

SEQ ID NO: 34478 - DNA, 20 bp, Artificial Sequence
  Synthetic oligonucleotide; GAG chr11 5350913 5350932 5350916 -
acttttcttcaatattcctg

SEQ ID NO: 34479 - DNA, 20 bp, Artificial Sequence
  Synthetic oligonucleotide; AGG chr11 5350912 5350931 5350915 -
cttttcttcaatattcctgg

SEQ ID NO: 34480 - DNA, 20 bp, Artificial Sequence
  Synthetic oligonucleotide; GGG chr11 5350911 5350930 5350914 -
ttttcttcaatattcctgga

SEQ ID NO: 34481 - DNA, 20 bp, Artificial Sequence
  Synthetic oligonucleotide; AAG chr11 5350893 5350912 5350896 -
gagggaaaattcaattgatg

SEQ ID NO: 34482 - DNA, 20 bp, Artificial Sequence
  Synthetic oligonucleotide; CAG chr11 5350887 5350906 5350890 -
aaattcaattgatgaagctc

SEQ ID NO: 34483 - DNA, 20 bp, Artificial Sequence
  Synthetic oligonucleotide; GAG chr11 5350885 5350904 5350888 -
attcaattgatgaagctcca

SEQ ID NO: 34484 - DNA, 20 bp, Artificial Sequence
  Synthetic oligonucleotide; TGG chr11 5350877 5350896 5350880 -
gatgaagctccagagacttt

SEQ ID NO: 34485 - DNA, 20 bp, Artificial Sequence
  Synthetic oligonucleotide; GGG chr11 5350876 5350895 5350879 -
atgaagctccagagactttt

SEQ ID NO: 34486 - DNA, 20 bp, Artificial Sequence
  Synthetic oligonucleotide; TAG chr11 5350873 5350892 5350876 -
aagctccagagacttttggg

SEQ ID NO: 34487 - DNA, 20 bp, Artificial Sequence
  Synthetic oligonucleotide; TAG chr11 5350869 5350888 5350872 -
tccagagacttttgggtagt

SEQ ID NO: 34488 - DNA, 20 bp, Artificial Sequence
  Synthetic oligonucleotide; AAG chr11 5350856 5350875 5350859 -
gggtagttagaaaatgacgt

SEQ ID NO: 34489 - DNA, 20 bp, Artificial Sequence
  Synthetic oligonucleotide; GAG chr11 5350854 5350873 5350857 -
gtagttagaaaatgacgtaa

SEQ ID NO: 34490 - DNA, 20 bp, Artificial Sequence
  Synthetic oligonucleotide; AAG chr11 5350828 5350847 5350831 -
cttacctgtgtgtgtttcca

SEQ ID NO: 34491 - DNA, 20 bp, Artificial Sequence
  Synthetic oligonucleotide; TAG chr11 5350821 5350840 5350824 -
gtgtgtgtttccaaagcaca

SEQ ID NO: 34492 - DNA, 20 bp, Artificial Sequence
  Synthetic oligonucleotide; AAG chr11 5350812 5350831 5350815 -
tccaaagcacatagaactct

SEQ ID NO: 34493 - DNA, 20 bp, Artificial Sequence
  Synthetic oligonucleotide; CAG chr11 5350804 5350823 5350807 -
acatagaactctaagttgcc

SEQ ID NO: 34494 - DNA, 20 bp, Artificial Sequence
  Synthetic oligonucleotide; TAG chr11 5350790 5350809 5350793 -
gttgcccagctttataaccc

SEQ ID NO: 34495 - DNA, 20 bp, Artificial Sequence
  Synthetic oligonucleotide; AAG chr11 5350768 5350787 5350771 -
gttattgatacactgcttca

SEQ ID NO: 34496 - DNA, 20 bp, Artificial Sequence
  Synthetic oligonucleotide; AAG chr11 5350739 5350758 5350742 -
aattttcataatataaattg

SEQ ID NO: 34497 - DNA, 20 bp, Artificial Sequence
  Synthetic oligonucleotide; CAG chr11 5350730 5350749 5350733 -
aatataaattgaagaataaa

SEQ ID NO: 34498 - DNA, 20 bp, Artificial Sequence
  Synthetic oligonucleotide; TGG chr11 5350720 5350739 5350723 -
gaagaataaacagtaaaatg

SEQ ID NO: 34499 - DNA, 20 bp, Artificial Sequence
  Synthetic oligonucleotide; AAG chr11 5350707 5350726 5350710 -
taaaatgtggatttgatgat

SEQ ID NO: 34500 - DNA, 20 bp, Artificial Sequence
  Synthetic oligonucleotide; AAG chr11 5350698 5350717 5350701 -
gatttgatgataagcttttg

SEQ ID NO: 34501 - DNA, 20 bp, Artificial Sequence
  Synthetic oligonucleotide; AGG chr11 5350697 5350716 5350700 -
atttgatgataagcttttga

SEQ ID NO: 34502 - DNA, 20 bp, Artificial Sequence
  Synthetic oligonucleotide; TAG chr11 5350681 5350700 5350684 -
ttgaaggcactaattgataa

SEQ ID NO: 34503 - DNA, 20 bp, Artificial Sequence
  Synthetic oligonucleotide; TGG chr11 5350649 5350668 5350652 -
actgttgcatatcacctact

SEQ ID NO: 34504 - DNA, 20 bp, Artificial Sequence
  Synthetic oligonucleotide; TGG chr11 5350628 5350647 5350631 -
ggtgatgcaaaaataaaaat

SEQ ID NO: 34505 - DNA, 20 bp, Artificial Sequence
  Synthetic oligonucleotide; TAG chr11 5350620 5350639 5350623 -
aaaaataaaaattggtaatt

SEQ ID NO: 34506 - DNA, 20 bp, Artificial Sequence
  Synthetic oligonucleotide; AGG chr11 5350619 5350638 5350622 -
aaaataaaaattggtaattt

SEQ ID NO: 34507 - DNA, 20 bp, Artificial Sequence
  Synthetic oligonucleotide; AAG chr11 5350615 5350634 5350618 -
taaaaattggtaatttaggc

SEQ ID NO: 34508 - DNA, 20 bp, Artificial Sequence
  Synthetic oligonucleotide; AAG chr11 5350609 5350628 5350612 -
ttggtaatttaggcaagatc

SEQ ID NO: 34509 - DNA, 20 bp, Artificial Sequence
  Synthetic oligonucleotide; AGG chr11 5350608 5350627 5350611 -
tggtaatttaggcaagatca

SEQ ID NO: 34510 - DNA, 20 bp, Artificial Sequence
  Synthetic oligonucleotide; GAG chr11 5350606 5350625 5350609 -
gtaatttaggcaagatcaag

SEQ ID NO: 34511 - DNA, 20 bp, Artificial Sequence
  Synthetic oligonucleotide; TGG chr11 5350584 5350603 5350587 -
gaattttttttttaaaacta

SEQ ID NO: 34512 - DNA, 20 bp, Artificial Sequence
  Synthetic oligonucleotide; TGG chr11 5350574 5350593 5350577 -
tttaaaactatggaatctga

SEQ ID NO: 34513 - DNA, 20 bp, Artificial Sequence
  Synthetic oligonucleotide; GGG chr11 5350573 5350592 5350576 -
ttaaaactatggaatctgat

SEQ ID NO: 34514 - DNA, 20 bp, Artificial Sequence
  Synthetic oligonucleotide; AAG chr11 5350561 5350580 5350564 -
aatctgatgggatttgacaa

SEQ ID NO: 34515 - DNA, 20 bp, Artificial Sequence
  Synthetic oligonucleotide; GAG chr11 5350557 5350576 5350560 -
tgatgggatttgacaaaagt

SEQ ID NO: 34516 - DNA, 20 bp, Artificial Sequence
  Synthetic oligonucleotide; AAG chr11 5350554 5350573 5350557 -
tgggatttgacaaaagtgag

SEQ ID NO: 34517 - DNA, 20 bp, Artificial Sequence
  Synthetic oligonucleotide; AGG chr11 5350553 5350572 5350556 -
gggatttgacaaaagtgaga

SEQ ID NO: 34518 - DNA, 20 bp, Artificial Sequence
  Synthetic oligonucleotide; TAG chr11 5350537 5350556 5350540 -
gagaaggctctgtgactcat

SEQ ID NO: 34519 - DNA, 20 bp, Artificial Sequence
  Synthetic oligonucleotide; AAG chr11 5350528 5350547 5350531 -
ctgtgactcattagaattct

SEQ ID NO: 34520 - DNA, 20 bp, Artificial Sequence
  Synthetic oligonucleotide; CAG chr11 5350521 5350540 5350524 -
tcattagaattctaagattt

SEQ ID NO: 34521 - DNA, 20 bp, Artificial Sequence
  Synthetic oligonucleotide; TGG chr11 5350517 5350536 5350520 -
tagaattctaagatttcagc

SEQ ID NO: 34522 - DNA, 20 bp, Artificial Sequence
  Synthetic oligonucleotide; CAG chr11 5350512 5350531 5350515 -
ttctaagatttcagctggtg

SEQ ID NO: 34523 - DNA, 20 bp, Artificial Sequence
  Synthetic oligonucleotide; AGG chr11 5350511 5350530 5350514 -
tctaagatttcagctggtgc

SEQ ID NO: 34524 - DNA, 20 bp, Artificial Sequence
  Synthetic oligonucleotide; CAG chr11 5350508 5350527 5350511 -
aagatttcagctggtgcagg

SEQ ID NO: 34525 - DNA, 20 bp, Artificial Sequence
  Synthetic oligonucleotide; GAG chr11 5350496 5350515 5350499 -
ggtgcaggcagccaacctct

SEQ ID NO: 34526 - DNA, 20 bp, Artificial Sequence
  Synthetic oligonucleotide; TGG chr11 5350475 5350494 5350478 -
agaatacataaattgtgtgt

SEQ ID NO: 34527 - DNA, 20 bp, Artificial Sequence
  Synthetic oligonucleotide; TGG chr11 5350472 5350491 5350475 -
atacataaattgtgtgttgg

SEQ ID NO: 34528 - DNA, 20 bp, Artificial Sequence
  Synthetic oligonucleotide; GAG chr11 5350466 5350485 5350469 -
aaattgtgtgttggtggcat

SEQ ID NO: 34529 - DNA, 20 bp, Artificial Sequence
  Synthetic oligonucleotide; CAG chr11 5350462 5350481 5350465 -
tgtgtgttggtggcatgagc

SEQ ID NO: 34530 - DNA, 20 bp, Artificial Sequence
  Synthetic oligonucleotide; GAG chr11 5350460 5350479 5350463 -
tgtgttggtggcatgagcca

SEQ ID NO: 34531 - DNA, 20 bp, Artificial Sequence
  Synthetic oligonucleotide; TAG chr11 5350453 5350472 5350456 -
gtggcatgagccagagaaaa

SEQ ID NO: 34532 - DNA, 20 bp, Artificial Sequence
  Synthetic oligonucleotide; AGG chr11 5350452 5350471 5350455 -
tggcatgagccagagaaaat

SEQ ID NO: 34533 - DNA, 20 bp, Artificial Sequence
  Synthetic oligonucleotide; TGG chr11 5350435 5350454 5350438 -
aataggcccaccttctctta

SEQ ID NO: 34534 - DNA, 20 bp, Artificial Sequence
  Synthetic oligonucleotide; TGG chr11 5350431 5350450 5350434 -
ggcccaccttctcttatggt

SEQ ID NO: 34535 - DNA, 20 bp, Artificial Sequence
  Synthetic oligonucleotide; TGG chr11 5350426 5350445 5350429 -
accttctcttatggttggtt

SEQ ID NO: 34536 - DNA, 20 bp, Artificial Sequence
  Synthetic oligonucleotide; AAG chr11 5350399 5350418 5350402 -
tacatctcatatactattga

SEQ ID NO: 34537 - DNA, 20 bp, Artificial Sequence
  Synthetic oligonucleotide; GAG chr11 5350397 5350416 5350400 -
catctcatatactattgaaa

SEQ ID NO: 34538 - DNA, 20 bp, Artificial Sequence
  Synthetic oligonucleotide; AAG chr11 5350364 5350383 5350367 -
taaatttatgcacgatttac

SEQ ID NO: 34539 - DNA, 20 bp, Artificial Sequence
  Synthetic oligonucleotide; AAG chr11 5350342 5350361 5350345 -
gacctctttctgtccatgaa

SEQ ID NO: 34540 - DNA, 20 bp, Artificial Sequence
  Synthetic oligonucleotide; AAG chr11 5350330 5350349 5350333 -
tccatgaaaagaatgcatcc

SEQ ID NO: 34541 - DNA, 20 bp, Artificial Sequence
  Synthetic oligonucleotide; TGG chr11 5350322 5350341 5350325 -
aagaatgcatccaagattac

SEQ ID NO: 34542 - DNA, 20 bp, Artificial Sequence
  Synthetic oligonucleotide; CAG chr11 5350308 5350327 5350311 -
gattactggactttcatttt

SEQ ID NO: 34543 - DNA, 20 bp, Artificial Sequence
  Synthetic oligonucleotide; AAG chr11 5350305 5350324 5350308 -
tactggactttcattttcag

SEQ ID NO: 34544 - DNA, 20 bp, Artificial Sequence
  Synthetic oligonucleotide; AAG chr11 5350293 5350312 5350296 -
attttcagaagaatttgttg

SEQ ID NO: 34545 - DNA, 20 bp, Artificial Sequence
  Synthetic oligonucleotide; CAG chr11 5350287 5350306 5350290 -
agaagaatttgttgaagttt

SEQ ID NO: 34546 - DNA, 20 bp, Artificial Sequence
  Synthetic oligonucleotide; TGG chr11 5350257 5350276 5350260 -
ctttctaacaataatgatct

SEQ ID NO: 34547 - DNA, 20 bp, Artificial Sequence
  Synthetic oligonucleotide; GGG chr11 5350256 5350275 5350259 -
tttctaacaataatgatctt

SEQ ID NO: 34548 - DNA, 20 bp, Artificial Sequence
  Synthetic oligonucleotide; AAG chr11 5350252 5350271 5350255 -
taacaataatgatcttggga

SEQ ID NO: 34549 - DNA, 20 bp, Artificial Sequence
  Synthetic oligonucleotide; GAG chr11 5350237 5350256 5350240 -
tgggaaagtaatttaatctt

SEQ ID NO: 34550 - DNA, 20 bp, Artificial Sequence
  Synthetic oligonucleotide; TGG chr11 5350231 5350250 5350234 -
agtaatttaatcttgagatt

SEQ ID NO: 34551 - DNA, 20 bp, Artificial Sequence
  Synthetic oligonucleotide; AAG chr11 5350214 5350233 5350217 -
atttggttacataacctgta

SEQ ID NO: 34552 - DNA, 20 bp, Artificial Sequence
  Synthetic oligonucleotide; TAG chr11 5350206 5350225 5350209 -
acataacctgtaaagactac

SEQ ID NO: 34553 - DNA, 20 bp, Artificial Sequence
  Synthetic oligonucleotide; CAG chr11 5350188 5350207 5350191 -
actagtgatttctgtcttct

SEQ ID NO: 34554 - DNA, 20 bp, Artificial Sequence
  Synthetic oligonucleotide; AAG chr11 5350169 5350188 5350172 -
tcagtcattctcttgacaca

SEQ ID NO: 34555 - DNA, 20 bp, Artificial Sequence
  Synthetic oligonucleotide; AAG chr11 5350165 5350184 5350168 -
tcattctcttgacacaaagt

SEQ ID NO: 34556 - DNA, 20 bp, Artificial Sequence
  Synthetic oligonucleotide; AGG chr11 5350164 5350183 5350167 -
cattctcttgacacaaagta

SEQ ID NO: 34557 - DNA, 20 bp, Artificial Sequence
  Synthetic oligonucleotide; GGG chr11 5350163 5350182 5350166 -
attctcttgacacaaagtaa

SEQ ID NO: 34558 - DNA, 20 bp, Artificial Sequence
  Synthetic oligonucleotide; GGG chr11 5350162 5350181 5350165 -
ttctcttgacacaaagtaag

SEQ ID NO: 34559 - DNA, 20 bp, Artificial Sequence
  Synthetic oligonucleotide; AAG chr11 5350147 5350166 5350150 -
gtaaggggaaatgttttgta

SEQ ID NO: 34560 - DNA, 20 bp, Artificial Sequence
  Synthetic oligonucleotide; GAG chr11 5350145 5350164 5350148 -
aaggggaaatgttttgtaaa

SEQ ID NO: 34561 - DNA, 20 bp, Artificial Sequence
  Synthetic oligonucleotide; TGG chr11 5350142 5350161 5350145 -
gggaaatgttttgtaaagag

SEQ ID NO: 34562 - DNA, 20 bp, Artificial Sequence
  Synthetic oligonucleotide; CAG chr11 5350104 5350123 5350107 -
ttgtgtttttgttattgttt

SEQ ID NO: 34563 - DNA, 20 bp, Artificial Sequence
  Synthetic oligonucleotide; GAG chr11 5350102 5350121 5350105 -
gtgtttttgttattgtttca

SEQ ID NO: 34564 - DNA, 20 bp, Artificial Sequence
  Synthetic oligonucleotide; AAG chr11 5350099 5350118 5350102 -
tttttgttattgtttcagag

SEQ ID NO: 34565 - DNA, 20 bp, Artificial Sequence
  Synthetic oligonucleotide; TAG chr11 5350077 5350096 5350080 -
gtacctcctttctctttctc

SEQ ID NO: 34566 - DNA, 20 bp, Artificial Sequence
  Synthetic oligonucleotide; GAG chr11 5350073 5350092 5350076 -
ctcctttctctttctctagt

SEQ ID NO: 34567 - DNA, 20 bp, Artificial Sequence
  Synthetic oligonucleotide; CAG chr11 5350063 5350082 5350066 -
tttctctagtgagtacatgt

SEQ ID NO: 34568 - DNA, 20 bp, Artificial Sequence
  Synthetic oligonucleotide; AGG chr11 5350062 5350081 5350065 -
ttctctagtgagtacatgtc

SEQ ID NO: 34569 - DNA, 20 bp, Artificial Sequence
  Synthetic oligonucleotide; CAG chr11 5350049 5350068 5350052 -
acatgtcaggattattcacc

SEQ ID NO: 34570 - DNA, 20 bp, Artificial Sequence
  Synthetic oligonucleotide; GAG chr11 5350047 5350066 5350050 -
atgtcaggattattcaccca

SEQ ID NO: 34571 - DNA, 20 bp, Artificial Sequence
  Synthetic oligonucleotide; AGG chr11 5350046 5350065 5350049 -
tgtcaggattattcacccag

SEQ ID NO: 34572 - DNA, 20 bp, Artificial Sequence
  Synthetic oligonucleotide; TGG chr11 5350016 5350035 5350019 -
aatgatttcctttttttctg

SEQ ID NO: 34573 - DNA, 20 bp, Artificial Sequence
  Synthetic oligonucleotide; AAG chr11 5350013 5350032 5350016 -
gatttcctttttttctgtgg

SEQ ID NO: 34574 - DNA, 20 bp, Artificial Sequence
  Synthetic oligonucleotide; TGG chr11 5350007 5350026 5350010 -
ctttttttctgtggaagcct

SEQ ID NO: 34575 - DNA, 20 bp, Artificial Sequence
  Synthetic oligonucleotide; GGG chr11 5350006 5350025 5350009 -
tttttttctgtggaagcctt

SEQ ID NO: 34576 - DNA, 20 bp, Artificial Sequence
  Synthetic oligonucleotide; CAG chr11 5350001 5350020 5350004 -
ttctgtggaagccttgggaa

SEQ ID NO: 34577 - DNA, 20 bp, Artificial Sequence
  Synthetic oligonucleotide; AAG chr11 5349994 5350013 5349997 -
gaagccttgggaacagatat

SEQ ID NO: 34578 - DNA, 20 bp, Artificial Sequence
  Synthetic oligonucleotide; TGG chr11 5349984 5350003 5349987 -
gaacagatataagatgatga

SEQ ID NO: 34579 - DNA, 20 bp, Artificial Sequence
  Synthetic oligonucleotide; GGG chr11 5349983 5350002 5349986 -
aacagatataagatgatgat

SEQ ID NO: 34580 - DNA, 20 bp, Artificial Sequence
  Synthetic oligonucleotide; GGG chr11 5349982 5350001 5349985 -
acagatataagatgatgatg

SEQ ID NO: 34581 - DNA, 20 bp, Artificial Sequence
  Synthetic oligonucleotide; TAG chr11 5349975 5349994 5349978 -
taagatgatgatggggtttt

SEQ ID NO: 34582 - DNA, 20 bp, Artificial Sequence
  Synthetic oligonucleotide; AGG chr11 5349974 5349993 5349977 -
aagatgatgatggggttttt

SEQ ID NO: 34583 - DNA, 20 bp, Artificial Sequence
  Synthetic oligonucleotide; GAG chr11 5349972 5349991 5349975 -
gatgatgatggggtttttag

SEQ ID NO: 34584 - DNA, 20 bp, Artificial Sequence
  Synthetic oligonucleotide; AAG chr11 5349949 5349968 5349952 -
cctgtgtttgactttaaata

SEQ ID NO: 34585 - DNA, 20 bp, Artificial Sequence
  Synthetic oligonucleotide; TAG chr11 5349935 5349954 5349938 -
taaataaagatattaaacta

SEQ ID NO: 34586 - DNA, 20 bp, Artificial Sequence
  Synthetic oligonucleotide; CAG chr11 5349922 5349941 5349925 -
taaactatagtttctctaat

SEQ ID NO: 34587 - DNA, 20 bp, Artificial Sequence
  Synthetic oligonucleotide; CAG chr11 5349919 5349938 5349922 -
actatagtttctctaatcag

SEQ ID NO: 34588 - DNA, 20 bp, Artificial Sequence
  Synthetic oligonucleotide; TGG chr11 5349899 5349918 5349902 -
cagataaaatgtgatatgtc

SEQ ID NO: 34589 - DNA, 20 bp, Artificial Sequence
  Synthetic oligonucleotide; GGG chr11 5349898 5349917 5349901 -
agataaaatgtgatatgtct

SEQ ID NO: 34590 - DNA, 20 bp, Artificial Sequence
  Synthetic oligonucleotide; TGG chr11 5349895 5349914 5349898 -
taaaatgtgatatgtctggg

SEQ ID NO: 34591 - DNA, 20 bp, Artificial Sequence
  Synthetic oligonucleotide; GGG chr11 5349894 5349913 5349897 -
aaaatgtgatatgtctgggt

SEQ ID NO: 34592 - DNA, 20 bp, Artificial Sequence
  Synthetic oligonucleotide; AAG chr11 5349890 5349909 5349893 -
tgtgatatgtctgggtggga

SEQ ID NO: 34593 - DNA, 20 bp, Artificial Sequence
  Synthetic oligonucleotide; AGG chr11 5349889 5349908 5349892 -
gtgatatgtctgggtgggaa

SEQ ID NO: 34594 - DNA, 20 bp, Artificial Sequence
  Synthetic oligonucleotide; GGG chr11 5349888 5349907 5349891 -
tgatatgtctgggtgggaaa

SEQ ID NO: 34595 - DNA, 20 bp, Artificial Sequence
  Synthetic oligonucleotide; AAG chr11 5349884 5349903 5349887 -
atgtctgggtgggaaaggga

SEQ ID NO: 34596 - DNA, 20 bp, Artificial Sequence
  Synthetic oligonucleotide; AGG chr11 5349883 5349902 5349886 -
tgtctgggtgggaaagggaa

SEQ ID NO: 34597 - DNA, 20 bp, Artificial Sequence
  Synthetic oligonucleotide; GAG chr11 5349881 5349900 5349884 -
tctgggtgggaaagggaaag

SEQ ID NO: 34598 - DNA, 20 bp, Artificial Sequence
  Synthetic oligonucleotide; AAG chr11 5349876 5349895 5349879 -
gtgggaaagggaaaggagaa

SEQ ID NO: 34599 - DNA, 20 bp, Artificial Sequence
  Synthetic oligonucleotide; GAG chr11 5349867 5349886 5349870 -
ggaaaggagaaaagattgat

SEQ ID NO: 34600 - DNA, 20 bp, Artificial Sequence
  Synthetic oligonucleotide; TGG chr11 5349858 5349877 5349861 -
aaaagattgatgagccaatg

SEQ ID NO: 34601 - DNA, 20 bp, Artificial Sequence
  Synthetic oligonucleotide; GGG chr11 5349857 5349876 5349860 -
aaagattgatgagccaatgt

SEQ ID NO: 34602 - DNA, 20 bp, Artificial Sequence
  Synthetic oligonucleotide; TAG chr11 5349843 5349862 5349846 -
caatgtgggaacttctgaca

SEQ ID NO: 34603 - DNA, 20 bp, Artificial Sequence
  Synthetic oligonucleotide; AAG chr11 5349836 5349855 5349839 -
ggaacttctgacatagctaa

SEQ ID NO: 34604 - DNA, 20 bp, Artificial Sequence
  Synthetic oligonucleotide; GAG chr11 5349826 5349845 5349829 -
acatagctaaaagtaacgtt

SEQ ID NO: 34605 - DNA, 20 bp, Artificial Sequence
  Synthetic oligonucleotide; TGG chr11 5349821 5349840 5349824 -
gctaaaagtaacgttgagcc

SEQ ID NO: 34606 - DNA, 20 bp, Artificial Sequence
  Synthetic oligonucleotide; GGG chr11 5349820 5349839 5349823 -
ctaaaagtaacgttgagcct

SEQ ID NO: 34607 - DNA, 20 bp, Artificial Sequence
  Synthetic oligonucleotide; GGG chr11 5349819 5349838 5349822 -
taaaagtaacgttgagcctg

SEQ ID NO: 34608 - DNA, 20 bp, Artificial Sequence
  Synthetic oligonucleotide; TGG chr11 5349813 5349832 5349816 -
taacgttgagcctggggcat

SEQ ID NO: 34609 - DNA, 20 bp, Artificial Sequence
  Synthetic oligonucleotide; GGG chr11 5349812 5349831 5349815 -
aacgttgagcctggggcatt

SEQ ID NO: 34610 - DNA, 20 bp, Artificial Sequence
  Synthetic oligonucleotide; GAG chr11 5349806 5349825 5349809 -
gagcctggggcattgggact

SEQ ID NO: 34611 - DNA, 20 bp, Artificial Sequence
  Synthetic oligonucleotide; AGG chr11 5349805 5349824 5349808 -
agcctggggcattgggactg

SEQ ID NO: 34612 - DNA, 20 bp, Artificial Sequence
  Synthetic oligonucleotide; GGG chr11 5349804 5349823 5349807 -
gcctggggcattgggactga

SEQ ID NO: 34613 - DNA, 20 bp, Artificial Sequence
  Synthetic oligonucleotide; AAG chr11 5349801 5349820 5349804 -
tggggcattgggactgaggg

SEQ ID NO: 34614 - DNA, 20 bp, Artificial Sequence
  Synthetic oligonucleotide; TAG chr11 5349798 5349817 5349801 -
ggcattgggactgagggaag

SEQ ID NO: 34615 - DNA, 20 bp, Artificial Sequence
  Synthetic oligonucleotide; GAG chr11 5349796 5349815 5349799 -
cattgggactgagggaagta

SEQ ID NO: 34616 - DNA, 20 bp, Artificial Sequence
  Synthetic oligonucleotide; AGG chr11 5349795 5349814 5349798 -
attgggactgagggaagtag

SEQ ID NO: 34617 - DNA, 20 bp, Artificial Sequence
  Synthetic oligonucleotide; GGG chr11 5349794 5349813 5349797 -
ttgggactgagggaagtaga

SEQ ID NO: 34618 - DNA, 20 bp, Artificial Sequence
  Synthetic oligonucleotide; GGG chr11 5349793 5349812 5349796 -
tgggactgagggaagtagag

SEQ ID NO: 34619 - DNA, 20 bp, Artificial Sequence
  Synthetic oligonucleotide; AAG chr11 5349789 5349808 5349792 -
actgagggaagtagagggga

SEQ ID NO: 34620 - DNA, 20 bp, Artificial Sequence
  Synthetic oligonucleotide; AAG chr11 5349770 5349789 5349773 -
aaagcaactctgtcctcaaa

SEQ ID NO: 34621 - DNA, 20 bp, Artificial Sequence
  Synthetic oligonucleotide; GAG chr11 5349766 5349785 5349769 -
caactctgtcctcaaaaagt

SEQ ID NO: 34622 - DNA, 20 bp, Artificial Sequence
  Synthetic oligonucleotide; AAG chr11 5349761 5349780 5349764 -
ctgtcctcaaaaagtgagaa

SEQ ID NO: 34623 - DNA, 20 bp, Artificial Sequence
  Synthetic oligonucleotide; AGG chr11 5349760 5349779 5349763 -
tgtcctcaaaaagtgagaaa

SEQ ID NO: 34624 - DNA, 20 bp, Artificial Sequence
  Synthetic oligonucleotide; GAG chr11 5349758 5349777 5349761 -
tcctcaaaaagtgagaaaag

SEQ ID NO: 34625 - DNA, 20 bp, Artificial Sequence
  Synthetic oligonucleotide; AGG chr11 5349757 5349776 5349760 -
cctcaaaaagtgagaaaagg

SEQ ID NO: 34626 - DNA, 20 bp, Artificial Sequence
  Synthetic oligonucleotide; CAG chr11 5349732 5349751 5349735 -
ttattgctcaatctgcctgc

SEQ ID NO: 34627 - DNA, 20 bp, Artificial Sequence
  Synthetic oligonucleotide; GAG chr11 5349728 5349747 5349731 -
tgctcaatctgcctgccagt

SEQ ID NO: 34628 - DNA, 20 bp, Artificial Sequence
  Synthetic oligonucleotide; GAG chr11 5349726 5349745 5349729 -
ctcaatctgcctgccagtga

SEQ ID NO: 34629 - DNA, 20 bp, Artificial Sequence
  Synthetic oligonucleotide; AGG chr11 5349725 5349744 5349728 -
tcaatctgcctgccagtgag

SEQ ID NO: 34630 - DNA, 20 bp, Artificial Sequence
  Synthetic oligonucleotide; CAG chr11 5349720 5349739 5349723 -
ctgcctgccagtgagaggtt

SEQ ID NO: 34631 - DNA, 20 bp, Artificial Sequence
  Synthetic oligonucleotide; CAG chr11 5349709 5349728 5349712 -
tgagaggttcagacaatact

SEQ ID NO: 34632 - DNA, 20 bp, Artificial Sequence
  Synthetic oligonucleotide; CAG chr11 5349700 5349719 5349703 -
cagacaatactcagcttatg

SEQ ID NO: 34633 - DNA, 20 bp, Artificial Sequence
  Synthetic oligonucleotide; AGG chr11 5349699 5349718 5349702 -
agacaatactcagcttatgc

SEQ ID NO: 34634 - DNA, 20 bp, Artificial Sequence
  Synthetic oligonucleotide; AAG chr11 5349692 5349711 5349695 -
actcagcttatgcaggatta

SEQ ID NO: 34635 - DNA, 20 bp, Artificial Sequence
  Synthetic oligonucleotide; AAG chr11 5349689 5349708 5349692 -
cagcttatgcaggattaaag

SEQ ID NO: 34636 - DNA, 20 bp, Artificial Sequence
  Synthetic oligonucleotide; CAG chr11 5349686 5349705 5349689 -
cttatgcaggattaaagaag

SEQ ID NO: 34637 - DNA, 20 bp, Artificial Sequence
  Synthetic oligonucleotide; TGG chr11 5349681 5349700 5349684 -
gcaggattaaagaagcagta

SEQ ID NO: 34638 - DNA, 20 bp, Artificial Sequence
  Synthetic oligonucleotide; TAG chr11 5349661 5349680 5349664 -
tggcaaataaaaattgtaca

SEQ ID NO: 34639 - DNA, 20 bp, Artificial Sequence
  Synthetic oligonucleotide; AGG chr11 5349660 5349679 5349663 -
ggcaaataaaaattgtacat

SEQ ID NO: 34640 - DNA, 20 bp, Artificial Sequence
  Synthetic oligonucleotide; TAG chr11 5349635 5349654 5349638 -
tataacttattgttttatta

SEQ ID NO: 34641 - DNA, 20 bp, Artificial Sequence
  Synthetic oligonucleotide; AGG chr11 5349634 5349653 5349637 -
ataacttattgttttattat

SEQ ID NO: 34642 - DNA, 20 bp, Artificial Sequence
  Synthetic oligonucleotide; TGG chr11 5349556 5349575 5349559 -
cataataactttaatttttt

SEQ ID NO: 34643 - DNA, 20 bp, Artificial Sequence
  Synthetic oligonucleotide; TAG chr11 5349553 5349572 5349556 -
aataactttaatttttttgg

SEQ ID NO: 34644 - DNA, 20 bp, Artificial Sequence
  Synthetic oligonucleotide; GAG chr11 5349539 5349558 5349542 -
ttttggtagtaaaaatatgt

SEQ ID NO: 34645 - DNA, 20 bp, Artificial Sequence
  Synthetic oligonucleotide; AGG chr11 5349538 5349557 5349541 -
tttggtagtaaaaatatgtg

SEQ ID NO: 34646 - DNA, 20 bp, Artificial Sequence
  Synthetic oligonucleotide; TAG chr11 5349525 5349544 5349528 -
atatgtgaggtctgctttct

SEQ ID NO: 34647 - DNA, 20 bp, Artificial Sequence
  Synthetic oligonucleotide; AAG chr11 5349499 5349518 5349502 -
attttaaatatacctaaata

SEQ ID NO: 34648 - DNA, 20 bp, Artificial Sequence
  Synthetic oligonucleotide; TGG chr11 5349495 5349514 5349498 -
taaatatacctaaataaagc

SEQ ID NO: 34649 - DNA, 20 bp, Artificial Sequence
  Synthetic oligonucleotide; GGG chr11 5349494 5349513 5349497 -
aaatatacctaaataaagct

SEQ ID NO: 34650 - DNA, 20 bp, Artificial Sequence
  Synthetic oligonucleotide; GAG chr11 5349492 5349511 5349495 -
atatacctaaataaagctgg

SEQ ID NO: 34651 - DNA, 20 bp, Artificial Sequence
  Synthetic oligonucleotide; AGG chr11 5349491 5349510 5349494 -
tatacctaaataaagctggg

SEQ ID NO: 34652 - DNA, 20 bp, Artificial Sequence
  Synthetic oligonucleotide; GGG chr11 5349490 5349509 5349493 -
atacctaaataaagctggga

SEQ ID NO: 34653 - DNA, 20 bp, Artificial Sequence
  Synthetic oligonucleotide; AAG chr11 5349485 5349504 5349488 -
taaataaagctgggagggaa

SEQ ID NO: 34654 - DNA, 20 bp, Artificial Sequence
  Synthetic oligonucleotide; CAG chr11 5349476 5349495 5349479 -
ctgggagggaaaagataata

SEQ ID NO: 34655 - DNA, 20 bp, Artificial Sequence
  Synthetic oligonucleotide; TAG chr11 5349463 5349482 5349466 -
gataatacagaacattaatc

SEQ ID NO: 34656 - DNA, 20 bp, Artificial Sequence
  Synthetic oligonucleotide; CAG chr11 5349405 5349424 5349408 -
attgataaattaaaaaaaaa

SEQ ID NO: 34657 - DNA, 20 bp, Artificial Sequence
  Synthetic oligonucleotide; AGG chr11 5349404 5349423 5349407 -
ttgataaattaaaaaaaaac

SEQ ID NO: 34658 - DNA, 20 bp, Artificial Sequence
  Synthetic oligonucleotide; GAG chr11 5349402 5349421 5349405 -
gataaattaaaaaaaaacag

SEQ ID NO: 34659 - DNA, 20 bp, Artificial Sequence
  Synthetic oligonucleotide; TAG chr11 5349399 5349418 5349402 -
aaattaaaaaaaaacaggag

SEQ ID NO: 34660 - DNA, 20 bp, Artificial Sequence
  Synthetic oligonucleotide; AGG chr11 5349398 5349417 5349401 -
aattaaaaaaaaacaggagt

SEQ ID NO: 34661 - DNA, 20 bp, Artificial Sequence
  Synthetic oligonucleotide; CAG chr11 5349390 5349409 5349393 -
aaaaacaggagtaggaatac

SEQ ID NO: 34662 - DNA, 20 bp, Artificial Sequence
  Synthetic oligonucleotide; TAG chr11 5349386 5349405 5349389 -
acaggagtaggaataccaga

SEQ ID NO: 34663 - DNA, 20 bp, Artificial Sequence
  Synthetic oligonucleotide; AGG chr11 5349385 5349404 5349388 -
caggagtaggaataccagat

SEQ ID NO: 34664 - DNA, 20 bp, Artificial Sequence
  Synthetic oligonucleotide; GGG chr11 5349384 5349403 5349387 -
aggagtaggaataccagata

SEQ ID NO: 34665 - DNA, 20 bp, Artificial Sequence
  Synthetic oligonucleotide; AAG chr11 5349375 5349394 5349378 -
aataccagatagggaaaata

SEQ ID NO: 34666 - DNA, 20 bp, Artificial Sequence
  Synthetic oligonucleotide; GAG chr11 5349370 5349389 5349373 -
cagatagggaaaataaagct

SEQ ID NO: 34667 - DNA, 20 bp, Artificial Sequence
  Synthetic oligonucleotide; TGG chr11 5349356 5349375 5349359 -
aaagctgagaaacaaatgta

SEQ ID NO: 34668 - DNA, 20 bp, Artificial Sequence
  Synthetic oligonucleotide; AAG chr11 5349321 5349340 5349324 -
ttgaatttctaccgtgtgtc

SEQ ID NO: 34669 - DNA, 20 bp, Artificial Sequence
  Synthetic oligonucleotide; TGG chr11 5349315 5349334 5349318 -
ttctaccgtgtgtcaagtat

SEQ ID NO: 34670 - DNA, 20 bp, Artificial Sequence
  Synthetic oligonucleotide; TGG chr11 5349310 5349329 5349313 -
ccgtgtgtcaagtattggac

SEQ ID NO: 34671 - DNA, 20 bp, Artificial Sequence
  Synthetic oligonucleotide; GGG chr11 5349309 5349328 5349312 -
cgtgtgtcaagtattggact

SEQ ID NO: 34672 - DNA, 20 bp, Artificial Sequence
  Synthetic oligonucleotide; GGG chr11 5349308 5349327 5349311 -
gtgtgtcaagtattggactg

SEQ ID NO: 34673 - DNA, 20 bp, Artificial Sequence
  Synthetic oligonucleotide; TGG chr11 5349284 5349303 5349287 -
attatatacacctcattttt

SEQ ID NO: 34674 - DNA, 20 bp, Artificial Sequence
  Synthetic oligonucleotide; GGG chr11 5349283 5349302 5349286 -
ttatatacacctcatttttt

SEQ ID NO: 34675 - DNA, 20 bp, Artificial Sequence
  Synthetic oligonucleotide; AAG chr11 5349280 5349299 5349283 -
tatacacctcattttttggg

SEQ ID NO: 34676 - DNA, 20 bp, Artificial Sequence
  Synthetic oligonucleotide; TAG chr11 5349266 5349285 5349269 -
tttgggaagaatccttaaaa

SEQ ID NO: 34677 - DNA, 20 bp, Artificial Sequence
  Synthetic oligonucleotide; GAG chr11 5349230 5349249 5349233 -
ctgttttcatattgaaaact

SEQ ID NO: 34678 - DNA, 20 bp, Artificial Sequence
  Synthetic oligonucleotide; CAG chr11 5349208 5349227 5349211 -
gtgctttcacttgattcact

SEQ ID NO: 34679 - DNA, 20 bp, Artificial Sequence
  Synthetic oligonucleotide; TGG chr11 5349196 5349215 5349199 -
gattcactcagttgcttttg

SEQ ID NO: 34680 - DNA, 20 bp, Artificial Sequence
  Synthetic oligonucleotide; GAG chr11 5349188 5349207 5349191 -
cagttgcttttgtggtatat

SEQ ID NO: 34681 - DNA, 20 bp, Artificial Sequence
  Synthetic oligonucleotide; GAG chr11 5349176 5349195 5349179 -
tggtatatgagatgatctgt

SEQ ID NO: 34682 - DNA, 20 bp, Artificial Sequence
  Synthetic oligonucleotide; CAG chr11 5349170 5349189 5349173 -
atgagatgatctgtgagttt

SEQ ID NO: 34683 - DNA, 20 bp, Artificial Sequence
  Synthetic oligonucleotide; GAG chr11 5349168 5349187 5349171 -
gagatgatctgtgagtttca

SEQ ID NO: 34684 - DNA, 20 bp, Artificial Sequence
  Synthetic oligonucleotide; AGG chr11 5349167 5349186 5349170 -
agatgatctgtgagtttcag

SEQ ID NO: 34685 - DNA, 20 bp, Artificial Sequence
  Synthetic oligonucleotide; GGG chr11 5349166 5349185 5349169 -
gatgatctgtgagtttcaga

SEQ ID NO: 34686 - DNA, 20 bp, Artificial Sequence
  Synthetic oligonucleotide; GGG chr11 5349165 5349184 5349168 -
atgatctgtgagtttcagag

SEQ ID NO: 34687 - DNA, 20 bp, Artificial Sequence
  Synthetic oligonucleotide; CAG chr11 5349131 5349150 5349134 -
aaacctttgcctcatccctg

SEQ ID NO: 34688 - DNA, 20 bp, Artificial Sequence
  Synthetic oligonucleotide; CAG chr11 5349113 5349132 5349116 -
tgcagccattcaccctcttc

SEQ ID NO: 34689 - DNA, 20 bp, Artificial Sequence
  Synthetic oligonucleotide; AGG chr11 5349112 5349131 5349115 -
gcagccattcaccctcttcc

SEQ ID NO: 34690 - DNA, 20 bp, Artificial Sequence
  Synthetic oligonucleotide; GGG chr11 5349111 5349130 5349114 -
cagccattcaccctcttcca

SEQ ID NO: 34691 - DNA, 20 bp, Artificial Sequence
  Synthetic oligonucleotide; TAG chr11 5349099 5349118 5349102 -
ctcttccagggtctctgtca

SEQ ID NO: 34692 - DNA, 20 bp, Artificial Sequence
  Synthetic oligonucleotide; TAG chr11 5349094 5349113 5349097 -
ccagggtctctgtcatagaa

SEQ ID NO: 34693 - DNA, 20 bp, Artificial Sequence
  Synthetic oligonucleotide; GAG chr11 5349087 5349106 5349090 -
ctctgtcatagaatagactt

SEQ ID NO: 34694 - DNA, 20 bp, Artificial Sequence
  Synthetic oligonucleotide; GAG chr11 5349073 5349092 5349076 -
agacttgagtttttattaat

SEQ ID NO: 34695 - DNA, 20 bp, Artificial Sequence
  Synthetic oligonucleotide; AAG chr11 5349057 5349076 5349060 -
taatgagaaactaattctca

SEQ ID NO: 34696 - DNA, 20 bp, Artificial Sequence
  Synthetic oligonucleotide; TGG chr11 5349029 5349048 5349032 -
aactctgccgcataaactga

SEQ ID NO: 34697 - DNA, 20 bp, Artificial Sequence
  Synthetic oligonucleotide; CAG chr11 5349019 5349038 5349022 -
cataaactgatggctctatg

SEQ ID NO: 34698 - DNA, 20 bp, Artificial Sequence
  Synthetic oligonucleotide; CAG chr11 5349010 5349029 5349013 -
atggctctatgcagacacct

SEQ ID NO: 34699 - DNA, 20 bp, Artificial Sequence
  Synthetic oligonucleotide; CAG chr11 5349007 5349026 5349010 -
gctctatgcagacacctcag

SEQ ID NO: 34700 - DNA, 20 bp, Artificial Sequence
  Synthetic oligonucleotide; AGG chr11 5349006 5349025 5349009 -
ctctatgcagacacctcagc

SEQ ID NO: 34701 - DNA, 20 bp, Artificial Sequence
  Synthetic oligonucleotide; GAG chr11 5349004 5349023 5349007 -
ctatgcagacacctcagcag

SEQ ID NO: 34702 - DNA, 20 bp, Artificial Sequence
  Synthetic oligonucleotide; CAG chr11 5348995 5349014 5348998 -
cacctcagcaggagcccatt

SEQ ID NO: 34703 - DNA, 20 bp, Artificial Sequence
  Synthetic oligonucleotide; TGG chr11 5348958 5348977 5348961 -
atattctctcaccttccctt

SEQ ID NO: 34704 - DNA, 20 bp, Artificial Sequence
  Synthetic oligonucleotide; AAG chr11 5348916 5348935 5348919 -
ctgacactcttttctgtctc

SEQ ID NO: 34705 - DNA, 20 bp, Artificial Sequence
  Synthetic oligonucleotide; TAG chr11 5348909 5348928 5348912 -
tcttttctgtctcaagcact

SEQ ID NO: 34706 - DNA, 20 bp, Artificial Sequence
  Synthetic oligonucleotide; TGG chr11 5348875 5348894 5348878 -
tttttttacccccttacctt

SEQ ID NO: 34707 - DNA, 20 bp, Artificial Sequence
  Synthetic oligonucleotide; TGG chr11 5348854 5348873 5348857 -
ggctattatcctttctgtga

SEQ ID NO: 34708 - DNA, 20 bp, Artificial Sequence
  Synthetic oligonucleotide; GAG chr11 5348843 5348862 5348846 -
tttctgtgatggttaatatt

SEQ ID NO: 34709 - DNA, 20 bp, Artificial Sequence
  Synthetic oligonucleotide; TGG chr11 5348828 5348847 5348831 -
atattgagtgcaaacttgat

SEQ ID NO: 34710 - DNA, 20 bp, Artificial Sequence
  Synthetic oligonucleotide; AAG chr11 5348821 5348840 5348824 -
gtgcaaacttgattggattg

SEQ ID NO: 34711 - DNA, 20 bp, Artificial Sequence
  Synthetic oligonucleotide; AGG chr11 5348820 5348839 5348823 -
tgcaaacttgattggattga

SEQ ID NO: 34712 - DNA, 20 bp, Artificial Sequence
  Synthetic oligonucleotide; AAG chr11 5348812 5348831 5348815 -
tgattggattgaaggatgca

SEQ ID NO: 34713 - DNA, 20 bp, Artificial Sequence
  Synthetic oligonucleotide; TGG chr11 5348800 5348819 5348803 -
aggatgcaaagtattgttcc

SEQ ID NO: 34714 - DNA, 20 bp, Artificial Sequence
  Synthetic oligonucleotide; GGG chr11 5348799 5348818 5348802 -
ggatgcaaagtattgttcct

SEQ ID NO: 34715 - DNA, 20 bp, Artificial Sequence
  Synthetic oligonucleotide; AAG chr11 5348788 5348807 5348791 -
attgttcctgggtgtgctgt

SEQ ID NO: 34716 - DNA, 20 bp, Artificial Sequence
  Synthetic oligonucleotide; AGG chr11 5348787 5348806 5348790 -
ttgttcctgggtgtgctgta

SEQ ID NO: 34717 - DNA, 20 bp, Artificial Sequence
  Synthetic oligonucleotide; GGG chr11 5348786 5348805 5348789 -
tgttcctgggtgtgctgtaa

SEQ ID NO: 34718 - DNA, 20 bp, Artificial Sequence
  Synthetic oligonucleotide; AAG chr11 5348775 5348794 5348778 -
gtgctgtaagggtgttgcca

SEQ ID NO: 34719 - DNA, 20 bp, Artificial Sequence
  Synthetic oligonucleotide; AGG chr11 5348774 5348793 5348777 -
tgctgtaagggtgttgccaa

SEQ ID NO: 34720 - DNA, 20 bp, Artificial Sequence
  Synthetic oligonucleotide; GAG chr11 5348772 5348791 5348775 -
ctgtaagggtgttgccaaag

SEQ ID NO: 34721 - DNA, 20 bp, Artificial Sequence
  Synthetic oligonucleotide; GAG chr11 5348759 5348778 5348762 -
gccaaaggagattaacattt

SEQ ID NO: 34722 - DNA, 20 bp, Artificial Sequence
  Synthetic oligonucleotide; CAG chr11 5348755 5348774 5348758 -
aaggagattaacatttgagt

SEQ ID NO: 34723 - DNA, 20 bp, Artificial Sequence
  Synthetic oligonucleotide; TAG chr11 5348752 5348771 5348755 -
gagattaacatttgagtcag

SEQ ID NO: 34724 - DNA, 20 bp, Artificial Sequence
  Synthetic oligonucleotide; TGG chr11 5348747 5348766 5348750 -
taacatttgagtcagtagac

SEQ ID NO: 34725 - DNA, 20 bp, Artificial Sequence
  Synthetic oligonucleotide; GGG chr11 5348746 5348765 5348749 -
aacatttgagtcagtagact

SEQ ID NO: 34726 - DNA, 20 bp, Artificial Sequence
  Synthetic oligonucleotide; GAG chr11 5348744 5348763 5348747 -
catttgagtcagtagactgg

SEQ ID NO: 34727 - DNA, 20 bp, Artificial Sequence
  Synthetic oligonucleotide; GAG chr11 5348742 5348761 5348745 -
tttgagtcagtagactggga

SEQ ID NO: 34728 - DNA, 20 bp, Artificial Sequence
  Synthetic oligonucleotide; AGG chr11 5348741 5348760 5348744 -
ttgagtcagtagactgggag

SEQ ID NO: 34729 - DNA, 20 bp, Artificial Sequence
  Synthetic oligonucleotide; CAG chr11 5348738 5348757 5348741 -
agtcagtagactgggagagg

SEQ ID NO: 34730 - DNA, 20 bp, Artificial Sequence
  Synthetic oligonucleotide; TGG chr11 5348717 5348736 5348720 -
agacccacccaccctccgtc

SEQ ID NO: 34731 - DNA, 20 bp, Artificial Sequence
  Synthetic oligonucleotide; GGG chr11 5348716 5348735 5348719 -
gacccacccaccctccgtct

SEQ ID NO: 34732 - DNA, 20 bp, Artificial Sequence
  Synthetic oligonucleotide; TGG chr11 5348713 5348732 5348716 -
ccacccaccctccgtctggg

SEQ ID NO: 34733 - DNA, 20 bp, Artificial Sequence
  Synthetic oligonucleotide; GGG chr11 5348712 5348731 5348715 -
cacccaccctccgtctgggt

SEQ ID NO: 34734 - DNA, 20 bp, Artificial Sequence
  Synthetic oligonucleotide; CAG chr11 5348698 5348717 5348701 -
ctgggtgggtactatctaat

SEQ ID NO: 34735 - DNA, 20 bp, Artificial Sequence
  Synthetic oligonucleotide; CAG chr11 5348691 5348710 5348694 -
ggtactatctaatcagctgc

SEQ ID NO: 34736 - DNA, 20 bp, Artificial Sequence
  Synthetic oligonucleotide; AGG chr11 5348690 5348709 5348693 -
gtactatctaatcagctgcc

SEQ ID NO: 34737 - DNA, 20 bp, Artificial Sequence
  Synthetic oligonucleotide; GGG chr11 5348689 5348708 5348692 -
tactatctaatcagctgcca

SEQ ID NO: 34738 - DNA, 20 bp, Artificial Sequence
  Synthetic oligonucleotide; CGG chr11 5348686 5348705 5348689 -
tatctaatcagctgccaggg

SEQ ID NO: 34739 - DNA, 20 bp, Artificial Sequence
  Synthetic oligonucleotide; TAG chr11 5348682 5348701 5348685 -
taatcagctgccagggcggc

SEQ ID NO: 34740 - DNA, 20 bp, Artificial Sequence
  Synthetic oligonucleotide; AAG chr11 5348679 5348698 5348682 -
tcagctgccagggcggctag

SEQ ID NO: 34741 - DNA, 20 bp, Artificial Sequence
  Synthetic oligonucleotide; AAG chr11 5348675 5348694 5348678 -
ctgccagggcggctagaaga

SEQ ID NO: 34742 - DNA, 20 bp, Artificial Sequence
  Synthetic oligonucleotide; CAG chr11 5348672 5348691 5348675 -
ccagggcggctagaagaaag

SEQ ID NO: 34743 - DNA, 20 bp, Artificial Sequence
  Synthetic oligonucleotide; AGG chr11 5348671 5348690 5348674 -
cagggcggctagaagaaagc

SEQ ID NO: 34744 - DNA, 20 bp, Artificial Sequence
  Synthetic oligonucleotide; AAG chr11 5348665 5348684 5348668 -
ggctagaagaaagcaggcaa

SEQ ID NO: 34745 - DNA, 20 bp, Artificial Sequence
  Synthetic oligonucleotide; AAG chr11 5348662 5348681 5348665 -
tagaagaaagcaggcaaaag

SEQ ID NO: 34746 - DNA, 20 bp, Artificial Sequence
  Synthetic oligonucleotide; TGG chr11 5348658 5348677 5348661 -
agaaagcaggcaaaagaaga

SEQ ID NO: 34747 - DNA, 20 bp, Artificial Sequence
  Synthetic oligonucleotide; AAG chr11 5348655 5348674 5348658 -
aagcaggcaaaagaagatgg

SEQ ID NO: 34748 - DNA, 20 bp, Artificial Sequence
  Synthetic oligonucleotide; GAG chr11 5348653 5348672 5348656 -
gcaggcaaaagaagatggaa

SEQ ID NO: 34749 - DNA, 20 bp, Artificial Sequence
  Synthetic oligonucleotide; TAG chr11 5348650 5348669 5348653 -
ggcaaaagaagatggaagag

SEQ ID NO: 34750 - DNA, 20 bp, Artificial Sequence
  Synthetic oligonucleotide; TGG chr11 5348647 5348666 5348650 -
aaaagaagatggaagagtag

SEQ ID NO: 34751 - DNA, 20 bp, Artificial Sequence
  Synthetic oligonucleotide; CAG chr11 5348617 5348636 5348620 -
ttacacaatataaacctttc

SEQ ID NO: 34752 - DNA, 20 bp, Artificial Sequence
  Synthetic oligonucleotide; AGG chr11 5348616 5348635 5348619 -
tacacaatataaacctttcc

SEQ ID NO: 34753 - DNA, 20 bp, Artificial Sequence
  Synthetic oligonucleotide; AAG chr11 5348608 5348627 5348611 -
ataaacctttccaggtgcta

SEQ ID NO: 34754 - DNA, 20 bp, Artificial Sequence
  Synthetic oligonucleotide; CAG chr11 5348600 5348619 5348603 -
ttccaggtgctaaagtcaca

SEQ ID NO: 34755 - DNA, 20 bp, Artificial Sequence
  Synthetic oligonucleotide; AGG chr11 5348599 5348618 5348602 -
tccaggtgctaaagtcacac

SEQ ID NO: 34756 - DNA, 20 bp, Artificial Sequence
  Synthetic oligonucleotide; CAG chr11 5348572 5348591 5348575 -
gtgaatctgtacccctgatc

SEQ ID NO: 34757 - DNA, 20 bp, Artificial Sequence
  Synthetic oligonucleotide; GAG chr11 5348570 5348589 5348573 -
gaatctgtacccctgatcca

SEQ ID NO: 34758 - DNA, 20 bp, Artificial Sequence
  Synthetic oligonucleotide; AGG chr11 5348569 5348588 5348572 -
aatctgtacccctgatccag

SEQ ID NO: 34759 - DNA, 20 bp, Artificial Sequence
  Synthetic oligonucleotide; AAG chr11 5348554 5348573 5348557 -
tccagaggcacacataaccc

SEQ ID NO: 34760 - DNA, 20 bp, Artificial Sequence
  Synthetic oligonucleotide; AAG chr11 5348543 5348562 5348546 -
acataacccaagctccgtcc

SEQ ID NO: 34761 - DNA, 20 bp, Artificial Sequence
  Synthetic oligonucleotide; TGG chr11 5348527 5348546 5348530 -
gtccaagcttaattttgaat

SEQ ID NO: 34762 - DNA, 20 bp, Artificial Sequence
  Synthetic oligonucleotide; TAG chr11 5348519 5348538 5348522 -
ttaattttgaattggtttat

SEQ ID NO: 34763 - DNA, 20 bp, Artificial Sequence
  Synthetic oligonucleotide; TGG chr11 5348511 5348530 5348514 -
gaattggtttattagtcata

SEQ ID NO: 34764 - DNA, 20 bp, Artificial Sequence
  Synthetic oligonucleotide; CAG chr11 5348507 5348526 5348510 -
tggtttattagtcatatggt

SEQ ID NO: 34765 - DNA, 20 bp, Artificial Sequence
  Synthetic oligonucleotide; TAG chr11 5348503 5348522 5348506 -
ttattagtcatatggtcaga

SEQ ID NO: 34766 - DNA, 20 bp, Artificial Sequence
  Synthetic oligonucleotide; TAG chr11 5348488 5348507 5348491 -
tcagatagtgactttttttc

SEQ ID NO: 34767 - DNA, 20 bp, Artificial Sequence
  Synthetic oligonucleotide; AAG chr11 5348484 5348503 5348487 -
atagtgactttttttctaga

SEQ ID NO: 34768 - DNA, 20 bp, Artificial Sequence
  Synthetic oligonucleotide; CAG chr11 5348460 5348479 5348463 -
atttgaacctctgatgatta

SEQ ID NO: 34769 - DNA, 20 bp, Artificial Sequence
  Synthetic oligonucleotide; GAG chr11 5348458 5348477 5348461 -
ttgaacctctgatgattaca

SEQ ID NO: 34770 - DNA, 20 bp, Artificial Sequence
  Synthetic oligonucleotide; AGG chr11 5348457 5348476 5348460 -
tgaacctctgatgattacag

SEQ ID NO: 34771 - DNA, 20 bp, Artificial Sequence
  Synthetic oligonucleotide; AAG chr11 5348443 5348462 5348446 -
ttacagaggtatacctcctc

SEQ ID NO: 34772 - DNA, 20 bp, Artificial Sequence
  Synthetic oligonucleotide; TGG chr11 5348436 5348455 5348439 -
ggtatacctcctcaagaatt

SEQ ID NO: 34773 - DNA, 20 bp, Artificial Sequence
  Synthetic oligonucleotide; AAG chr11 5348433 5348452 5348436 -
atacctcctcaagaatttgg

SEQ ID NO: 34774 - DNA, 20 bp, Artificial Sequence
  Synthetic oligonucleotide; GAG chr11 5348431 5348450 5348434 -
acctcctcaagaatttggaa

SEQ ID NO: 34775 - DNA, 20 bp, Artificial Sequence
  Synthetic oligonucleotide; TGG chr11 5348415 5348434 5348418 -
ggaagagttgattctatatt

SEQ ID NO: 34776 - DNA, 20 bp, Artificial Sequence
  Synthetic oligonucleotide; TGG chr11 5348404 5348423 5348407 -
ttctatatttggcacttatc

SEQ ID NO: 34777 - DNA, 20 bp, Artificial Sequence
  Synthetic oligonucleotide; AAG chr11 5348395 5348414 5348398 -
tggcacttatctggacttct

SEQ ID NO: 34778 - DNA, 20 bp, Artificial Sequence
  Synthetic oligonucleotide; AGG chr11 5348394 5348413 5348397 -
ggcacttatctggacttcta

SEQ ID NO: 34779 - DNA, 20 bp, Artificial Sequence
  Synthetic oligonucleotide; AAG chr11 5348388 5348407 5348391 -
tatctggacttctaaggtaa

SEQ ID NO: 34780 - DNA, 20 bp, Artificial Sequence
  Synthetic oligonucleotide; TGG chr11 5348382 5348401 5348385 -
gacttctaaggtaaaagaca

SEQ ID NO: 34781 - DNA, 20 bp, Artificial Sequence
  Synthetic oligonucleotide; GGG chr11 5348381 5348400 5348384 -
acttctaaggtaaaagacat

SEQ ID NO: 34782 - DNA, 20 bp, Artificial Sequence
  Synthetic oligonucleotide; GGG chr11 5348380 5348399 5348383 -
cttctaaggtaaaagacatg

SEQ ID NO: 34783 - DNA, 20 bp, Artificial Sequence
  Synthetic oligonucleotide; TGG chr11 5348376 5348395 5348379 -
taaggtaaaagacatggggt

SEQ ID NO: 34784 - DNA, 20 bp, Artificial Sequence
  Synthetic oligonucleotide; GGG chr11 5348375 5348394 5348378 -
aaggtaaaagacatggggtt

SEQ ID NO: 34785 - DNA, 20 bp, Artificial Sequence
  Synthetic oligonucleotide; GGG chr11 5348374 5348393 5348377 -
aggtaaaagacatggggttg

SEQ ID NO: 34786 - DNA, 20 bp, Artificial Sequence
  Synthetic oligonucleotide; GGG chr11 5348373 5348392 5348376 -
ggtaaaagacatggggttgg

SEQ ID NO: 34787 - DNA, 20 bp, Artificial Sequence
  Synthetic oligonucleotide; CAG chr11 5348370 5348389 5348373 -
aaaagacatggggttggggg

SEQ ID NO: 34788 - DNA, 20 bp, Artificial Sequence
  Synthetic oligonucleotide; AGG chr11 5348369 5348388 5348372 -
aaagacatggggttgggggc

SEQ ID NO: 34789 - DNA, 20 bp, Artificial Sequence
  Synthetic oligonucleotide; GGG chr11 5348368 5348387 5348371 -
aagacatggggttgggggca

SEQ ID NO: 34790 - DNA, 20 bp, Artificial Sequence
  Synthetic oligonucleotide; GGG chr11 5348367 5348386 5348370 -
agacatggggttgggggcag

SEQ ID NO: 34791 - DNA, 20 bp, Artificial Sequence
  Synthetic oligonucleotide; GGG chr11 5348366 5348385 5348369 -
gacatggggttgggggcagg

SEQ ID NO: 34792 - DNA, 20 bp, Artificial Sequence
  Synthetic oligonucleotide; CAG chr11 5348358 5348377 5348361 -
gttgggggcagggggactct

SEQ ID NO: 34793 - DNA, 20 bp, Artificial Sequence
  Synthetic oligonucleotide; AGG chr11 5348357 5348376 5348360 -
ttgggggcagggggactctc

SEQ ID NO: 34794 - DNA, 20 bp, Artificial Sequence
  Synthetic oligonucleotide; GGG chr11 5348356 5348375 5348359 -
tgggggcagggggactctca

SEQ ID NO: 34795 - DNA, 20 bp, Artificial Sequence
  Synthetic oligonucleotide; TAG chr11 5348352 5348371 5348355 -
ggcagggggactctcagggt

SEQ ID NO: 34796 - DNA, 20 bp, Artificial Sequence
  Synthetic oligonucleotide; TGG chr11 5348347 5348366 5348350 -
ggggactctcagggttagaa

SEQ ID NO: 34797 - DNA, 20 bp, Artificial Sequence
  Synthetic oligonucleotide; AAG chr11 5348344 5348363 5348347 -
gactctcagggttagaatgg

SEQ ID NO: 34798 - DNA, 20 bp, Artificial Sequence
  Synthetic oligonucleotide; CAG chr11 5348340 5348359 5348343 -
ctcagggttagaatggaagc

SEQ ID NO: 34799 - DNA, 20 bp, Artificial Sequence
  Synthetic oligonucleotide; GAG chr11 5348338 5348357 5348341 -
cagggttagaatggaagcca

SEQ ID NO: 34800 - DNA, 20 bp, Artificial Sequence
  Synthetic oligonucleotide; GAG chr11 5348336 5348355 5348339 -
gggttagaatggaagccaga

SEQ ID NO: 34801 - DNA, 20 bp, Artificial Sequence
  Synthetic oligonucleotide; AAG chr11 5348329 5348348 5348332 -
aatggaagccagagagatta

SEQ ID NO: 34802 - DNA, 20 bp, Artificial Sequence
  Synthetic oligonucleotide; CAG chr11 5348323 5348342 5348326 -
agccagagagattaaagaat

SEQ ID NO: 34803 - DNA, 20 bp, Artificial Sequence
  Synthetic oligonucleotide; CAG chr11 5348319 5348338 5348322 -
agagagattaaagaatcagt

SEQ ID NO: 34804 - DNA, 20 bp, Artificial Sequence
  Synthetic oligonucleotide; AGG chr11 5348318 5348337 5348321 -
gagagattaaagaatcagtc

SEQ ID NO: 34805 - DNA, 20 bp, Artificial Sequence
  Synthetic oligonucleotide; TGG chr11 5348315 5348334 5348318 -
agattaaagaatcagtcagg

SEQ ID NO: 34806 - DNA, 20 bp, Artificial Sequence
  Synthetic oligonucleotide; GAG chr11 5348313 5348332 5348316 -
attaaagaatcagtcaggtg

SEQ ID NO: 34807 - DNA, 20 bp, Artificial Sequence
  Synthetic oligonucleotide; GAG chr11 5348311 5348330 5348314 -
taaagaatcagtcaggtgga

SEQ ID NO: 34808 - DNA, 20 bp, Artificial Sequence
  Synthetic oligonucleotide; GAG chr11 5348279 5348298 5348282 -
caaccccataattcatgcct

SEQ ID NO: 34809 - DNA, 20 bp, Artificial Sequence
  Synthetic oligonucleotide; TGG chr11 5348261 5348280 5348264 -
ctgagtcaacacccatgctc

SEQ ID NO: 34810 - DNA, 20 bp, Artificial Sequence
  Synthetic oligonucleotide; TAG chr11 5348250 5348269 5348253 -
cccatgctctggtttgttcg

SEQ ID NO: 34811 - DNA, 20 bp, Artificial Sequence
  Synthetic oligonucleotide; CAG chr11 5348226 5348245 5348229 -
attgtttgccttatgtgttc

SEQ ID NO: 34812 - DNA, 20 bp, Artificial Sequence
  Synthetic oligonucleotide; AAG chr11 5348196 5348215 5348199 -
ccttcacttttttatatttg

SEQ ID NO: 34813 - DNA, 20 bp, Artificial Sequence
  Synthetic oligonucleotide; GAG chr11 5348194 5348213 5348197 -
ttcacttttttatatttgaa

SEQ ID NO: 34814 - DNA, 20 bp, Artificial Sequence
  Synthetic oligonucleotide; AGG chr11 5348193 5348212 5348196 -
tcacttttttatatttgaag

SEQ ID NO: 34815 - DNA, 20 bp, Artificial Sequence
  Synthetic oligonucleotide; AAG chr11 5348181 5348200 5348184 -
atttgaagaggtaactctca

SEQ ID NO: 34816 - DNA, 20 bp, Artificial Sequence
  Synthetic oligonucleotide; AAG chr11 5348173 5348192 5348176 -
aggtaactctcaaagaaacc

SEQ ID NO: 34817 - DNA, 20 bp, Artificial Sequence
  Synthetic oligonucleotide; TAG chr11 5348167 5348186 5348170 -
ctctcaaagaaaccaagttt

SEQ ID NO: 34818 - DNA, 20 bp, Artificial Sequence
  Synthetic oligonucleotide; GAG chr11 5348165 5348184 5348168 -
ctcaaagaaaccaagtttta

SEQ ID NO: 34819 - DNA, 20 bp, Artificial Sequence
  Synthetic oligonucleotide; CAG chr11 5348158 5348177 5348161 -
aaaccaagttttagagatgt

SEQ ID NO: 34820 - DNA, 20 bp, Artificial Sequence
  Synthetic oligonucleotide; AGG chr11 5348157 5348176 5348160 -
aaccaagttttagagatgtc

SEQ ID NO: 34821 - DNA, 20 bp, Artificial Sequence
  Synthetic oligonucleotide; GGG chr11 5348156 5348175 5348159 -
accaagttttagagatgtca

SEQ ID NO: 34822 - DNA, 20 bp, Artificial Sequence
  Synthetic oligonucleotide; GAG chr11 5348154 5348173 5348157 -
caagttttagagatgtcagg

SEQ ID NO: 34823 - DNA, 20 bp, Artificial Sequence
  Synthetic oligonucleotide; TAG chr11 5348147 5348166 5348150 -
tagagatgtcagggagtctt

SEQ ID NO: 34824 - DNA, 20 bp, Artificial Sequence
  Synthetic oligonucleotide; AGG chr11 5348146 5348165 5348149 -
agagatgtcagggagtcttt

SEQ ID NO: 34825 - DNA, 20 bp, Artificial Sequence
  Synthetic oligonucleotide; TAG chr11 5348115 5348134 5348118 -
ctactacatatatctactct

SEQ ID NO: 34826 - DNA, 20 bp, Artificial Sequence
  Synthetic oligonucleotide; CAG chr11 5348112 5348131 5348115 -
ctacatatatctactcttag

SEQ ID NO: 34827 - DNA, 20 bp, Artificial Sequence
  Synthetic oligonucleotide; AAG chr11 5348084 5348103 5348087 -
actattacttttctcttgct

SEQ ID NO: 34828 - DNA, 20 bp, Artificial Sequence
  Synthetic oligonucleotide; CAG chr11 5348077 5348096 5348080 -
cttttctcttgctaagaaat

SEQ ID NO: 34829 - DNA, 20 bp, Artificial Sequence
  Synthetic oligonucleotide; TGG chr11 5348046 5348065 5348049 -
tctctgttttttttttgcct

SEQ ID NO: 34830 - DNA, 20 bp, Artificial Sequence
  Synthetic oligonucleotide; GAG chr11 5348033 5348052 5348036 -
tttgccttggttcctgcaat

SEQ ID NO: 34831 - DNA, 20 bp, Artificial Sequence
  Synthetic oligonucleotide; CAG chr11 5348024 5348043 5348027 -
gttcctgcaatgagatctta

SEQ ID NO: 34832 - DNA, 20 bp, Artificial Sequence
  Synthetic oligonucleotide; GAG chr11 5348022 5348041 5348025 -
tcctgcaatgagatcttaca

SEQ ID NO: 34833 - DNA, 20 bp, Artificial Sequence
  Synthetic oligonucleotide; AGG chr11 5348021 5348040 5348024 -
cctgcaatgagatcttacag

SEQ ID NO: 34834 - DNA, 20 bp, Artificial Sequence
  Synthetic oligonucleotide; GAG chr11 5348019 5348038 5348022 -
tgcaatgagatcttacagag

SEQ ID NO: 34835 - DNA, 20 bp, Artificial Sequence
  Synthetic oligonucleotide; CAG chr11 5347967 5347986 5347970 -
ctttgttcccttccattctt

SEQ ID NO: 34836 - DNA, 20 bp, Artificial Sequence
  Synthetic oligonucleotide; TAG chr11 5347959 5347978 5347962 -
ccttccattcttcagttcca

SEQ ID NO: 34837 - DNA, 20 bp, Artificial Sequence
  Synthetic oligonucleotide; TAG chr11 5347938 5347957 5347941 -
agtcatgtatctcacatctt

SEQ ID NO: 34838 - DNA, 20 bp, Artificial Sequence
  Synthetic oligonucleotide; AAG chr11 5347927 5347946 5347930 -
tcacatctttagccgtatga

SEQ ID NO: 34839 - DNA, 20 bp, Artificial Sequence
  Synthetic oligonucleotide; TGG chr11 5347921 5347940 5347924 -
ctttagccgtatgaaagatt

SEQ ID NO: 34840 - DNA, 20 bp, Artificial Sequence
  Synthetic oligonucleotide; GGG chr11 5347920 5347939 5347923 -
tttagccgtatgaaagattt

SEQ ID NO: 34841 - DNA, 20 bp, Artificial Sequence
  Synthetic oligonucleotide; CAG chr11 5347906 5347925 5347909 -
agatttgggcatcatctttt

SEQ ID NO: 34842 - DNA, 20 bp, Artificial Sequence
  Synthetic oligonucleotide; GAG chr11 5347892 5347911 5347895 -
tcttttcagaatctgcacat

SEQ ID NO: 34843 - DNA, 20 bp, Artificial Sequence
  Synthetic oligonucleotide; TGG chr11 5347887 5347906 5347890 -
tcagaatctgcacatgagcc

SEQ ID NO: 34844 - DNA, 20 bp, Artificial Sequence
  Synthetic oligonucleotide; TGG chr11 5347883 5347902 5347886 -
aatctgcacatgagcctggc

SEQ ID NO: 34845 - DNA, 20 bp, Artificial Sequence
  Synthetic oligonucleotide; TAG chr11 5347880 5347899 5347883 -
ctgcacatgagcctggctgg

SEQ ID NO: 34846 - DNA, 20 bp, Artificial Sequence
  Synthetic oligonucleotide; AGG chr11 5347879 5347898 5347882 -
tgcacatgagcctggctggt

SEQ ID NO: 34847 - DNA, 20 bp, Artificial Sequence
  Synthetic oligonucleotide; TAG chr11 5347865 5347884 5347868 -
gctggtaggaacatttattt

SEQ ID NO: 34848 - DNA, 20 bp, Artificial Sequence
  Synthetic oligonucleotide; AAG chr11 5347862 5347881 5347865 -
ggtaggaacatttattttag

SEQ ID NO: 34849 - DNA, 20 bp, Artificial Sequence
  Synthetic oligonucleotide; CAG chr11 5347851 5347870 5347854 -
ttattttagaagctcctccc

SEQ ID NO: 34850 - DNA, 20 bp, Artificial Sequence
  Synthetic oligonucleotide; GAG chr11 5347849 5347868 5347852 -
attttagaagctcctcccca

SEQ ID NO: 34851 - DNA, 20 bp, Artificial Sequence
  Synthetic oligonucleotide; TAG chr11 5347833 5347852 5347836 -
cccagagaccattcctgatt

SEQ ID NO: 34852 - DNA, 20 bp, Artificial Sequence
  Synthetic oligonucleotide; CAG chr11 5347731 5347750 5347734 -
ttctctattatttgtgccct

SEQ ID NO: 34853 - DNA, 20 bp, Artificial Sequence
  Synthetic oligonucleotide; TGG chr11 5347723 5347742 5347726 -
tatttgtgccctcagccttg

SEQ ID NO: 34854 - DNA, 20 bp, Artificial Sequence
  Synthetic oligonucleotide; GGG chr11 5347722 5347741 5347725 -
atttgtgccctcagccttgt

SEQ ID NO: 34855 - DNA, 20 bp, Artificial Sequence
  Synthetic oligonucleotide; TGG chr11 5347716 5347735 5347719 -
gccctcagccttgtgggtat

SEQ ID NO: 34856 - DNA, 20 bp, Artificial Sequence
  Synthetic oligonucleotide; GGG chr11 5347715 5347734 5347718 -
ccctcagccttgtgggtatt

SEQ ID NO: 34857 - DNA, 20 bp, Artificial Sequence
  Synthetic oligonucleotide; CAG chr11 5347705 5347724 5347708 -
tgtgggtattgggctttgaa

SEQ ID NO: 34858 - DNA, 20 bp, Artificial Sequence
  Synthetic oligonucleotide; AAG chr11 5347694 5347713 5347697 -
ggctttgaacagcacaactc

SEQ ID NO: 34859 - DNA, 20 bp, Artificial Sequence
  Synthetic oligonucleotide; TGG chr11 5347675 5347694 5347678 -
caagatctctgtctctgtcc

SEQ ID NO: 34860 - DNA, 20 bp, Artificial Sequence
  Synthetic oligonucleotide; TGG chr11 5347665 5347684 5347668 -
gtctctgtcctggcttttac

SEQ ID NO: 34861 - DNA, 20 bp, Artificial Sequence
  Synthetic oligonucleotide; GAG chr11 5347663 5347682 5347666 -
ctctgtcctggcttttactg

SEQ ID NO: 34862 - DNA, 20 bp, Artificial Sequence
  Synthetic oligonucleotide; AGG chr11 5347662 5347681 5347665 -
tctgtcctggcttttactgg

SEQ ID NO: 34863 - DNA, 20 bp, Artificial Sequence
  Synthetic oligonucleotide; TGG chr11 5347648 5347667 5347651 -
tactggaggttttcctctgt

SEQ ID NO: 34864 - DNA, 20 bp, Artificial Sequence
  Synthetic oligonucleotide; GAG chr11 5347646 5347665 5347649 -
ctggaggttttcctctgttg

SEQ ID NO: 34865 - DNA, 20 bp, Artificial Sequence
  Synthetic oligonucleotide; AGG chr11 5347645 5347664 5347648 -
tggaggttttcctctgttgg

SEQ ID NO: 34866 - DNA, 20 bp, Artificial Sequence
  Synthetic oligonucleotide; TGG chr11 5347621 5347640 5347624 -
tgaatattttgtctacattg

SEQ ID NO: 34867 - DNA, 20 bp, Artificial Sequence
  Synthetic oligonucleotide; TGG chr11 5347615 5347634 5347618 -
ttttgtctacattgtggctt

SEQ ID NO: 34868 - DNA, 20 bp, Artificial Sequence
  Synthetic oligonucleotide; TGG chr11 5347595 5347614 5347598 -
tggctcttgctgtgctactt

SEQ ID NO: 34869 - DNA, 20 bp, Artificial Sequence
  Synthetic oligonucleotide; TAG chr11 5347567 5347586 5347570 -
ttttatctcattgcatttca

SEQ ID NO: 34870 - DNA, 20 bp, Artificial Sequence
  Synthetic oligonucleotide; AAG chr11 5347527 5347546 5347530 -
atataataattgccatcaca

SEQ ID NO: 34871 - DNA, 20 bp, Artificial Sequence
  Synthetic oligonucleotide; TGG chr11 5347519 5347538 5347522 -
attgccatcacaaagtgatg

SEQ ID NO: 34872 - DNA, 20 bp, Artificial Sequence
  Synthetic oligonucleotide; TGG chr11 5347510 5347529 5347513 -
acaaagtgatgtggtgtgct

SEQ ID NO: 34873 - DNA, 20 bp, Artificial Sequence
  Synthetic oligonucleotide; AAG chr11 5347504 5347523 5347507 -
tgatgtggtgtgcttggctg

SEQ ID NO: 34874 - DNA, 20 bp, Artificial Sequence
  Synthetic oligonucleotide; GAG chr11 5347490 5347509 5347493 -
tggctgaagcaccatgtgat

SEQ ID NO: 34875 - DNA, 20 bp, Artificial Sequence
  Synthetic oligonucleotide; TGG chr11 5347469 5347488 5347472 -
agtatgcctgctgcatcccc

SEQ ID NO: 34876 - DNA, 20 bp, Artificial Sequence
  Synthetic oligonucleotide; AAG chr11 5347464 5347483 5347467 -
gcctgctgcatcccctggaa

SEQ ID NO: 34877 - DNA, 20 bp, Artificial Sequence
  Synthetic oligonucleotide; GAG chr11 5347462 5347481 5347465 -
ctgctgcatcccctggaaaa

SEQ ID NO: 34878 - DNA, 20 bp, Artificial Sequence
  Synthetic oligonucleotide; TGG chr11 5347451 5347470 5347454 -
cctggaaaagagaaaacttc

SEQ ID NO: 34879 - DNA, 20 bp, Artificial Sequence
  Synthetic oligonucleotide; TAG chr11 5347448 5347467 5347451 -
ggaaaagagaaaacttctgg

SEQ ID NO: 34880 - DNA, 20 bp, Artificial Sequence
  Synthetic oligonucleotide; AGG chr11 5347447 5347466 5347450 -
gaaaagagaaaacttctggt

SEQ ID NO: 34881 - DNA, 20 bp, Artificial Sequence
  Synthetic oligonucleotide; AAG chr11 5347436 5347455 5347439 -
acttctggtaggctaaactc

SEQ ID NO: 34882 - DNA, 20 bp, Artificial Sequence
  Synthetic oligonucleotide; AAG chr11 5347433 5347452 5347436 -
tctggtaggctaaactcaag

SEQ ID NO: 34883 - DNA, 20 bp, Artificial Sequence
  Synthetic oligonucleotide; AGG chr11 5347432 5347451 5347435 -
ctggtaggctaaactcaaga

SEQ ID NO: 34884 - DNA, 20 bp, Artificial Sequence
  Synthetic oligonucleotide; GGG chr11 5347431 5347450 5347434 -
tggtaggctaaactcaagaa

SEQ ID NO: 34885 - DNA, 20 bp, Artificial Sequence
  Synthetic oligonucleotide; TAG chr11 5347426 5347445 5347429 -
ggctaaactcaagaagggaa

SEQ ID NO: 34886 - DNA, 20 bp, Artificial Sequence
  Synthetic oligonucleotide; TAG chr11 5347422 5347441 5347425 -
aaactcaagaagggaatagt

SEQ ID NO: 34887 - DNA, 20 bp, Artificial Sequence
  Synthetic oligonucleotide; CAG chr11 5347410 5347429 5347413 -
ggaatagttagtgataactg

SEQ ID NO: 34888 - DNA, 20 bp, Artificial Sequence
  Synthetic oligonucleotide; TGG chr11 5347392 5347411 5347395 -
tgcagaatgtgcgttcacgt

SEQ ID NO: 34889 - DNA, 20 bp, Artificial Sequence
  Synthetic oligonucleotide; GGG chr11 5347391 5347410 5347394 -
gcagaatgtgcgttcacgtt

SEQ ID NO: 34890 - DNA, 20 bp, Artificial Sequence
  Synthetic oligonucleotide; TAG chr11 5347385 5347404 5347388 -
tgtgcgttcacgttgggtac

SEQ ID NO: 34891 - DNA, 20 bp, Artificial Sequence
  Synthetic oligonucleotide; GAG chr11 5347383 5347402 5347386 -
tgcgttcacgttgggtacta

SEQ ID NO: 34892 - DNA, 20 bp, Artificial Sequence
  Synthetic oligonucleotide; AAG chr11 5347380 5347399 5347383 -
gttcacgttgggtactagag

SEQ ID NO: 34893 - DNA, 20 bp, Artificial Sequence
  Synthetic oligonucleotide; AGG chr11 5347379 5347398 5347382 -
ttcacgttgggtactagaga

SEQ ID NO: 34894 - DNA, 20 bp, Artificial Sequence
  Synthetic oligonucleotide; TAG chr11 5347350 5347369 5347353 -
gaattttattatattgactc

SEQ ID NO: 34895 - DNA, 20 bp, Artificial Sequence
  Synthetic oligonucleotide; TAG chr11 5347341 5347360 5347344 -
tatattgactctagtctatc

SEQ ID NO: 34896 - DNA, 20 bp, Artificial Sequence
  Synthetic oligonucleotide; AAG chr11 5347326 5347345 5347329 -
ctatctagctctctgctttc

SEQ ID NO: 34897 - DNA, 20 bp, Artificial Sequence
  Synthetic oligonucleotide; AAG chr11 5347305 5347324 5347308 -
agctttctctgatctaaacc

SEQ ID NO: 34898 - DNA, 20 bp, Artificial Sequence
  Synthetic oligonucleotide; CAG chr11 5347302 5347321 5347305 -
tttctctgatctaaaccaag

SEQ ID NO: 34899 - DNA, 20 bp, Artificial Sequence
  Synthetic oligonucleotide; AGG chr11 5347301 5347320 5347304 -
ttctctgatctaaaccaagc

SEQ ID NO: 34900 - DNA, 20 bp, Artificial Sequence
  Synthetic oligonucleotide; TAG chr11 5347293 5347312 5347296 -
tctaaaccaagcaggaaata

SEQ ID NO: 34901 - DNA, 20 bp, Artificial Sequence
  Synthetic oligonucleotide; TAG chr11 5347290 5347309 5347293 -
aaaccaagcaggaaatatag

SEQ ID NO: 34902 - DNA, 20 bp, Artificial Sequence
  Synthetic oligonucleotide; CAG chr11 5347282 5347301 5347285 -
caggaaatatagtagaaatt

SEQ ID NO: 34903 - DNA, 20 bp, Artificial Sequence
  Synthetic oligonucleotide; AGG chr11 5347281 5347300 5347284 -
aggaaatatagtagaaattc

SEQ ID NO: 34904 - DNA, 20 bp, Artificial Sequence
  Synthetic oligonucleotide; TAG chr11 5347273 5347292 5347276 -
tagtagaaattcaggttaca

SEQ ID NO: 34905 - DNA, 20 bp, Artificial Sequence
  Synthetic oligonucleotide; AGG chr11 5347272 5347291 5347275 -
agtagaaattcaggttacat

SEQ ID NO: 34906 - DNA, 20 bp, Artificial Sequence
  Synthetic oligonucleotide; AAG chr11 5347267 5347286 5347270 -
aaattcaggttacataggcc

SEQ ID NO: 34907 - DNA, 20 bp, Artificial Sequence
  Synthetic oligonucleotide; AAG chr11 5347264 5347283 5347267 -
ttcaggttacataggccaag

SEQ ID NO: 34908 - DNA, 20 bp, Artificial Sequence
  Synthetic oligonucleotide; TAG chr11 5347256 5347275 5347259 -
acataggccaagaagatata

SEQ ID NO: 34909 - DNA, 20 bp, Artificial Sequence
  Synthetic oligonucleotide; AGG chr11 5347255 5347274 5347258 -
cataggccaagaagatatat

SEQ ID NO: 34910 - DNA, 20 bp, Artificial Sequence
  Synthetic oligonucleotide; GAG chr11 5347243 5347262 5347246 -
agatatataggctttctctt

SEQ ID NO: 34911 - DNA, 20 bp, Artificial Sequence
  Synthetic oligonucleotide; TGG chr11 5347234 5347253 5347237 -
ggctttctcttgagataaac

SEQ ID NO: 34912 - DNA, 20 bp, Artificial Sequence
  Synthetic oligonucleotide; GGG chr11 5347233 5347252 5347236 -
gctttctcttgagataaact

SEQ ID NO: 34913 - DNA, 20 bp, Artificial Sequence
  Synthetic oligonucleotide; AAG chr11 5347229 5347248 5347232 -
tctcttgagataaactggga

SEQ ID NO: 34914 - DNA, 20 bp, Artificial Sequence
  Synthetic oligonucleotide; AAG chr11 5347214 5347233 5347217 -
tgggaaagatttgactgttg

SEQ ID NO: 34915 - DNA, 20 bp, Artificial Sequence
  Synthetic oligonucleotide; TAG chr11 5347205 5347224 5347208 -
tttgactgttgaagtaaatg

SEQ ID NO: 34916 - DNA, 20 bp, Artificial Sequence
  Synthetic oligonucleotide; AGG chr11 5347204 5347223 5347207 -
ttgactgttgaagtaaatgt

SEQ ID NO: 34917 - DNA, 20 bp, Artificial Sequence
  Synthetic oligonucleotide; GGG chr11 5347203 5347222 5347206 -
tgactgttgaagtaaatgta

SEQ ID NO: 34918 - DNA, 20 bp, Artificial Sequence
  Synthetic oligonucleotide; CAG chr11 5347186 5347205 5347189 -
gtagggaataaattacctcc

SEQ ID NO: 34919 - DNA, 20 bp, Artificial Sequence
  Synthetic oligonucleotide; GAG chr11 5347184 5347203 5347187 -
agggaataaattacctccca

SEQ ID NO: 34920 - DNA, 20 bp, Artificial Sequence
  Synthetic oligonucleotide; AGG chr11 5347183 5347202 5347186 -
gggaataaattacctcccag

SEQ ID NO: 34921 - DNA, 20 bp, Artificial Sequence
  Synthetic oligonucleotide; CAG chr11 5347174 5347193 5347177 -
ttacctcccagaggtgatac

SEQ ID NO: 34922 - DNA, 20 bp, Artificial Sequence
  Synthetic oligonucleotide; GAG chr11 5347172 5347191 5347175 -
acctcccagaggtgatacca

SEQ ID NO: 34923 - DNA, 20 bp, Artificial Sequence
  Synthetic oligonucleotide; TGG chr11 5347164 5347183 5347167 -
gaggtgataccagagtctgc

SEQ ID NO: 34924 - DNA, 20 bp, Artificial Sequence
  Synthetic oligonucleotide; GGG chr11 5347163 5347182 5347166 -
aggtgataccagagtctgct

SEQ ID NO: 34925 - DNA, 20 bp, Artificial Sequence
  Synthetic oligonucleotide; GGG chr11 5347162 5347181 5347165 -
ggtgataccagagtctgctg

SEQ ID NO: 34926 - DNA, 20 bp, Artificial Sequence
  Synthetic oligonucleotide; AAG chr11 5347154 5347173 5347157 -
cagagtctgctggggctatg

SEQ ID NO: 34927 - DNA, 20 bp, Artificial Sequence
  Synthetic oligonucleotide; CAG chr11 5347150 5347169 5347153 -
gtctgctggggctatgaaga

SEQ ID NO: 34928 - DNA, 20 bp, Artificial Sequence
  Synthetic oligonucleotide; AGG chr11 5347149 5347168 5347152 -
tctgctggggctatgaagac

SEQ ID NO: 34929 - DNA, 20 bp, Artificial Sequence
  Synthetic oligonucleotide; AAG chr11 5347125 5347144 5347128 -
tgtctgattccccacacata

SEQ ID NO: 34930 - DNA, 20 bp, Artificial Sequence
  Synthetic oligonucleotide; AGG chr11 5347124 5347143 5347127 -
gtctgattccccacacataa

SEQ ID NO: 34931 - DNA, 20 bp, Artificial Sequence
  Synthetic oligonucleotide; CAG chr11 5347115 5347134 5347118 -
cccacacataaaggtcctac

SEQ ID NO: 34932 - DNA, 20 bp, Artificial Sequence
  Synthetic oligonucleotide; TGG chr11 5347112 5347131 5347115 -
acacataaaggtcctaccag

SEQ ID NO: 34933 - DNA, 20 bp, Artificial Sequence
  Synthetic oligonucleotide; CAG chr11 5347102 5347121 5347105 -
gtcctaccagtggcttgatt

SEQ ID NO: 34934 - DNA, 20 bp, Artificial Sequence
  Synthetic oligonucleotide; CAG chr11 5347098 5347117 5347101 -
taccagtggcttgattcagc

SEQ ID NO: 34935 - DNA, 20 bp, Artificial Sequence
  Synthetic oligonucleotide; AAG chr11 5347080 5347099 5347083 -
gccagtaacttatttgaaaa

SEQ ID NO: 34936 - DNA, 20 bp, Artificial Sequence
  Synthetic oligonucleotide; AAG chr11 5347076 5347095 5347079 -
gtaacttatttgaaaaaaga

SEQ ID NO: 34937 - DNA, 20 bp, Artificial Sequence
  Synthetic oligonucleotide; AAG chr11 5347064 5347083 5347067 -
aaaaaagaaagattatttaa

SEQ ID NO: 34938 - DNA, 20 bp, Artificial Sequence
  Synthetic oligonucleotide; TGG chr11 5347059 5347078 5347062 -
agaaagattatttaaaagct

SEQ ID NO: 34939 - DNA, 20 bp, Artificial Sequence
  Synthetic oligonucleotide; GGG chr11 5347058 5347077 5347061 -
gaaagattatttaaaagctt

SEQ ID NO: 34940 - DNA, 20 bp, Artificial Sequence
  Synthetic oligonucleotide; GGG chr11 5347057 5347076 5347060 -
aaagattatttaaaagcttg

SEQ ID NO: 34941 - DNA, 20 bp, Artificial Sequence
  Synthetic oligonucleotide; GGG chr11 5347056 5347075 5347059 -
aagattatttaaaagcttgg

SEQ ID NO: 34942 - DNA, 20 bp, Artificial Sequence
  Synthetic oligonucleotide; GGG chr11 5347055 5347074 5347058 -
agattatttaaaagcttggg

SEQ ID NO: 34943 - DNA, 20 bp, Artificial Sequence
  Synthetic oligonucleotide; AAG chr11 5347045 5347064 5347048 -
aaagcttggggggactaatt

SEQ ID NO: 34944 - DNA, 20 bp, Artificial Sequence
  Synthetic oligonucleotide; CAG chr11 5347037 5347056 5347040 -
gggggactaattaagtgttc

SEQ ID NO: 34945 - DNA, 20 bp, Artificial Sequence
  Synthetic oligonucleotide; AAG chr11 5347026 5347045 5347029 -
taagtgttccagctccctct

SEQ ID NO: 34946 - DNA, 20 bp, Artificial Sequence
  Synthetic oligonucleotide; AGG chr11 5347025 5347044 5347028 -
aagtgttccagctccctcta

SEQ ID NO: 34947 - DNA, 20 bp, Artificial Sequence
  Synthetic oligonucleotide; GAG chr11 5347023 5347042 5347026 -
gtgttccagctccctctaag

SEQ ID NO: 34948 - DNA, 20 bp, Artificial Sequence
  Synthetic oligonucleotide; AGG chr11 5347022 5347041 5347025 -
tgttccagctccctctaagg

SEQ ID NO: 34949 - DNA, 20 bp, Artificial Sequence
  Synthetic oligonucleotide; GAG chr11 5347020 5347039 5347023 -
ttccagctccctctaaggag

SEQ ID NO: 34950 - DNA, 20 bp, Artificial Sequence
  Synthetic oligonucleotide; CAG chr11 5347011 5347030 5347014 -
cctctaaggaggagttaata

SEQ ID NO: 34951 - DNA, 20 bp, Artificial Sequence
  Synthetic oligonucleotide; GAG chr11 5347009 5347028 5347012 -
tctaaggaggagttaataca

SEQ ID NO: 34952 - DNA, 20 bp, Artificial Sequence
  Synthetic oligonucleotide; AAG chr11 5346994 5347013 5346997 -
atacagagtaaatatttctt

SEQ ID NO: 34953 - DNA, 20 bp, Artificial Sequence
  Synthetic oligonucleotide; AAG chr11 5346987 5347006 5346990 -
gtaaatatttcttaagatcc

SEQ ID NO: 34954 - DNA, 20 bp, Artificial Sequence
  Synthetic oligonucleotide; TGG chr11 5346983 5347002 5346986 -
atatttcttaagatccaagt

SEQ ID NO: 34955 - DNA, 20 bp, Artificial Sequence
  Synthetic oligonucleotide; AAG chr11 5346974 5346993 5346977 -
aagatccaagttggctataa

SEQ ID NO: 34956 - DNA, 20 bp, Artificial Sequence
  Synthetic oligonucleotide; AGG chr11 5346973 5346992 5346976 -
agatccaagttggctataaa

SEQ ID NO: 34957 - DNA, 20 bp, Artificial Sequence
  Synthetic oligonucleotide; GGG chr11 5346972 5346991 5346975 -
gatccaagttggctataaaa

SEQ ID NO: 34958 - DNA, 20 bp, Artificial Sequence
  Synthetic oligonucleotide; GAG chr11 5346970 5346989 5346973 -
tccaagttggctataaaagg

SEQ ID NO: 34959 - DNA, 20 bp, Artificial Sequence
  Synthetic oligonucleotide; TGG chr11 5346962 5346981 5346965 -
ggctataaaagggagacatc

SEQ ID NO: 34960 - DNA, 20 bp, Artificial Sequence
  Synthetic oligonucleotide; GGG chr11 5346961 5346980 5346964 -
gctataaaagggagacatct

SEQ ID NO: 34961 - DNA, 20 bp, Artificial Sequence
  Synthetic oligonucleotide; AAG chr11 5346958 5346977 5346961 -
ataaaagggagacatctggg

SEQ ID NO: 34962 - DNA, 20 bp, Artificial Sequence
  Synthetic oligonucleotide; AGG chr11 5346957 5346976 5346960 -
taaaagggagacatctggga

SEQ ID NO: 34963 - DNA, 20 bp, Artificial Sequence
  Synthetic oligonucleotide; CAG chr11 5346933 5346952 5346936 -
gctatctttattaataacca

SEQ ID NO: 34964 - DNA, 20 bp, Artificial Sequence
  Synthetic oligonucleotide; CAG chr11 5346914 5346933 5346917 -
acagtgactgcttctcttca

SEQ ID NO: 34965 - DNA, 20 bp, Artificial Sequence
  Synthetic oligonucleotide; GAG chr11 5346906 5346925 5346909 -
tgcttctcttcacagatgtt

SEQ ID NO: 34966 - DNA, 20 bp, Artificial Sequence
  Synthetic oligonucleotide; AAG chr11 5346903 5346922 5346906 -
ttctcttcacagatgttgag

SEQ ID NO: 34967 - DNA, 20 bp, Artificial Sequence
  Synthetic oligonucleotide; AGG chr11 5346902 5346921 5346905 -
tctcttcacagatgttgaga

SEQ ID NO: 34968 - DNA, 20 bp, Artificial Sequence
  Synthetic oligonucleotide; AAG chr11 5346886 5346905 5346889 -
gagaaggaacaacatgatct

SEQ ID NO: 34969 - DNA, 20 bp, Artificial Sequence
  Synthetic oligonucleotide; TAG chr11 5346879 5346898 5346882 -
aacaacatgatctaagtctt

SEQ ID NO: 34970 - DNA, 20 bp, Artificial Sequence
  Synthetic oligonucleotide; AGG chr11 5346878 5346897 5346881 -
acaacatgatctaagtcttt

SEQ ID NO: 34971 - DNA, 20 bp, Artificial Sequence
  Synthetic oligonucleotide; AAG chr11 5346874 5346893 5346877 -
catgatctaagtctttaggt

SEQ ID NO: 34972 - DNA, 20 bp, Artificial Sequence
  Synthetic oligonucleotide; AAG chr11 5346867 5346886 5346870 -
taagtctttaggtaagacac

SEQ ID NO: 34973 - DNA, 20 bp, Artificial Sequence
  Synthetic oligonucleotide; AAG chr11 5346838 5346857 5346841 -
gctcttcctcaccatcaaac

SEQ ID NO: 34974 - DNA, 20 bp, Artificial Sequence
  Synthetic oligonucleotide; TGG chr11 5346832 5346851 5346835 -
cctcaccatcaaacaagtta

SEQ ID NO: 34975 - DNA, 20 bp, Artificial Sequence
  Synthetic oligonucleotide; TGG chr11 5346825 5346844 5346828 -
atcaaacaagttatggtacc

SEQ ID NO: 34976 - DNA, 20 bp, Artificial Sequence
  Synthetic oligonucleotide; GGG chr11 5346824 5346843 5346827 -
tcaaacaagttatggtacct

SEQ ID NO: 34977 - DNA, 20 bp, Artificial Sequence
  Synthetic oligonucleotide; GAG chr11 5346822 5346841 5346825 -
aaacaagttatggtacctgg

SEQ ID NO: 34978 - DNA, 20 bp, Artificial Sequence
  Synthetic oligonucleotide; TGG chr11 5346817 5346836 5346820 -
agttatggtacctgggagta

SEQ ID NO: 34979 - DNA, 20 bp, Artificial Sequence
  Synthetic oligonucleotide; TAG chr11 5346803 5346822 5346806 -
ggagtatggtgaaatactcc

SEQ ID NO: 34980 - DNA, 20 bp, Artificial Sequence
  Synthetic oligonucleotide; AAG chr11 5346793 5346812 5346796 -
gaaatactcctagatatata

SEQ ID NO: 34981 - DNA, 20 bp, Artificial Sequence
  Synthetic oligonucleotide; GAG chr11 5346791 5346810 5346794 -
aatactcctagatatataaa

SEQ ID NO: 34982 - DNA, 20 bp, Artificial Sequence
  Synthetic oligonucleotide; TAG chr11 5346783 5346802 5346786 -
tagatatataaagagtgtac

SEQ ID NO: 34983 - DNA, 20 bp, Artificial Sequence
  Synthetic oligonucleotide; AGG chr11 5346782 5346801 5346785 -
agatatataaagagtgtact

SEQ ID NO: 34984 - DNA, 20 bp, Artificial Sequence
  Synthetic oligonucleotide; GAG chr11 5346780 5346799 5346783 -
atatataaagagtgtactag

SEQ ID NO: 34985 - DNA, 20 bp, Artificial Sequence
  Synthetic oligonucleotide; AAG chr11 5346767 5346786 5346770 -
gtactaggagactcctctat

SEQ ID NO: 34986 - DNA, 20 bp, Artificial Sequence
  Synthetic oligonucleotide; CAG chr11 5346759 5346778 5346762 -
agactcctctataagctctc

SEQ ID NO: 34987 - DNA, 20 bp, Artificial Sequence
  Synthetic oligonucleotide; GAG chr11 5346757 5346776 5346760 -
actcctctataagctctcca

SEQ ID NO: 34988 - DNA, 20 bp, Artificial Sequence
  Synthetic oligonucleotide; AAG chr11 5346753 5346772 5346756 -
ctctataagctctccagaga

SEQ ID NO: 34989 - DNA, 20 bp, Artificial Sequence
  Synthetic oligonucleotide; CGG chr11 5346747 5346766 5346750 -
aagctctccagagaaagata

SEQ ID NO: 34990 - DNA, 20 bp, Artificial Sequence
  Synthetic oligonucleotide; GAG chr11 5346745 5346764 5346748 -
gctctccagagaaagatacg

SEQ ID NO: 34991 - DNA, 20 bp, Artificial Sequence
  Synthetic oligonucleotide; AAG chr11 5346742 5346761 5346745 -
ctccagagaaagatacggag

SEQ ID NO: 34992 - DNA, 20 bp, Artificial Sequence
  Synthetic oligonucleotide; AAG chr11 5346739 5346758 5346742 -
cagagaaagatacggagaag

SEQ ID NO: 34993 - DNA, 20 bp, Artificial Sequence
  Synthetic oligonucleotide; AAG chr11 5346734 5346753 5346737 -
aaagatacggagaagaagtg

SEQ ID NO: 34994 - DNA, 20 bp, Artificial Sequence
  Synthetic oligonucleotide; AGG chr11 5346733 5346752 5346736 -
aagatacggagaagaagtga

SEQ ID NO: 34995 - DNA, 20 bp, Artificial Sequence
  Synthetic oligonucleotide; TAG chr11 5346723 5346742 5346726 -
gaagaagtgaaggatctcaa

SEQ ID NO: 34996 - DNA, 20 bp, Artificial Sequence
  Synthetic oligonucleotide; CAG chr11 5346716 5346735 5346719 -
tgaaggatctcaatagtcca

SEQ ID NO: 34997 - DNA, 20 bp, Artificial Sequence
  Synthetic oligonucleotide; TGG chr11 5346710 5346729 5346713 -
atctcaatagtccacagctt

SEQ ID NO: 34998 - DNA, 20 bp, Artificial Sequence
  Synthetic oligonucleotide; CAG chr11 5346698 5346717 5346701 -
cacagctttggatgtgtgca

SEQ ID NO: 34999 - DNA, 20 bp, Artificial Sequence
  Synthetic oligonucleotide; CAG chr11 5346691 5346710 5346694 -
ttggatgtgtgcacagattt

SEQ ID NO: 35000 - DNA, 20 bp, Artificial Sequence
  Synthetic oligonucleotide; AAG chr11 5346684 5346703 5346687 -
tgtgcacagatttcagtctg

SEQ ID NO: 35001 - DNA, 20 bp, Artificial Sequence
  Synthetic oligonucleotide; TAG chr11 5346677 5346696 5346680 -
agatttcagtctgaagttga

SEQ ID NO: 35002 - DNA, 20 bp, Artificial Sequence
  Synthetic oligonucleotide; AAG chr11 5346666 5346685 5346669 -
tgaagttgatagaacttcaa

SEQ ID NO: 35003 - DNA, 20 bp, Artificial Sequence
  Synthetic oligonucleotide; AAG chr11 5346656 5346675 5346659 -
agaacttcaaaagcaattcc

SEQ ID NO: 35004 - DNA, 20 bp, Artificial Sequence
  Synthetic oligonucleotide; AAG chr11 5346634 5346653 5346637 -
gtgctaccaaccaactacct

SEQ ID NO: 35005 - DNA, 20 bp, Artificial Sequence
  Synthetic oligonucleotide; CAG chr11 5346619 5346638 5346622 -
tacctaagaccttctgtact

SEQ ID NO: 35006 - DNA, 20 bp, Artificial Sequence
  Synthetic oligonucleotide; AAG chr11 5346569 5346588 5346572 -
atgtcttctttcctttctaa

SEQ ID NO: 35007 - DNA, 20 bp, Artificial Sequence
  Synthetic oligonucleotide; CAG chr11 5346561 5346580 5346564 -
tttcctttctaaaagatgaa

SEQ ID NO: 35008 - DNA, 20 bp, Artificial Sequence
  Synthetic oligonucleotide; AGG chr11 5346560 5346579 5346563 -
ttcctttctaaaagatgaac

SEQ ID NO: 35009 - DNA, 20 bp, Artificial Sequence
  Synthetic oligonucleotide; AAG chr11 5346557 5346576 5346560 -
ctttctaaaagatgaacagg

SEQ ID NO: 35010 - DNA, 20 bp, Artificial Sequence
  Synthetic oligonucleotide; AGG chr11 5346556 5346575 5346559 -
tttctaaaagatgaacagga

SEQ ID NO: 35011 - DNA, 20 bp, Artificial Sequence
  Synthetic oligonucleotide; AAG chr11 5346518 5346537 5346521 -
tacattttactttttaaaca

SEQ ID NO: 35012 - DNA, 20 bp, Artificial Sequence
  Synthetic oligonucleotide; CAG chr11 5346515 5346534 5346518 -
attttactttttaaacaaag

SEQ ID NO: 35013 - DNA, 20 bp, Artificial Sequence
  Synthetic oligonucleotide; GAG chr11 5346513 5346532 5346516 -
tttactttttaaacaaagca

SEQ ID NO: 35014 - DNA, 20 bp, Artificial Sequence
  Synthetic oligonucleotide; TGG chr11 5346502 5346521 5346505 -
aacaaagcagagaaaaatta

SEQ ID NO: 35015 - DNA, 20 bp, Artificial Sequence
  Synthetic oligonucleotide; TAG chr11 5346489 5346508 5346492 -
aaaattatggctgtaaatgt

SEQ ID NO: 35016 - DNA, 20 bp, Artificial Sequence
  Synthetic oligonucleotide; AAG chr11 5346486 5346505 5346489 -
attatggctgtaaatgttag

SEQ ID NO: 35017 - DNA, 20 bp, Artificial Sequence
  Synthetic oligonucleotide; TAG chr11 5346469 5346488 5346472 -
tagaagtttatctgattttc

SEQ ID NO: 35018 - DNA, 20 bp, Artificial Sequence
  Synthetic oligonucleotide; AGG chr11 5346468 5346487 5346471 -
agaagtttatctgattttct

SEQ ID NO: 35019 - DNA, 20 bp, Artificial Sequence
  Synthetic oligonucleotide; TAG chr11 5346455 5346474 5346458 -
attttctaggtgttccatta

SEQ ID NO: 35020 - DNA, 20 bp, Artificial Sequence
  Synthetic oligonucleotide; CAG chr11 5346432 5346451 5346435 -
aatcttcttgcttctatcct

SEQ ID NO: 35021 - DNA, 20 bp, Artificial Sequence
  Synthetic oligonucleotide; CAG chr11 5346391 5346410 5346394 -
ttccctatattttttttcct

SEQ ID NO: 35022 - DNA, 20 bp, Artificial Sequence
  Synthetic oligonucleotide; CAG chr11 5346357 5346376 5346360 -
tctctcattgtctttcttct

SEQ ID NO: 35023 - DNA, 20 bp, Artificial Sequence
  Synthetic oligonucleotide; AAG chr11 5346349 5346368 5346352 -
tgtctttcttctcagaaacc

SEQ ID NO: 35024 - DNA, 20 bp, Artificial Sequence
  Synthetic oligonucleotide; GAG chr11 5346347 5346366 5346350 -
tctttcttctcagaaaccaa

SEQ ID NO: 35025 - DNA, 20 bp, Artificial Sequence
  Synthetic oligonucleotide; TAG chr11 5346337 5346356 5346340 -
cagaaaccaagagccacgac

SEQ ID NO: 35026 - DNA, 20 bp, Artificial Sequence
  Synthetic oligonucleotide; GAG chr11 5346332 5346351 5346335 -
accaagagccacgactagct

SEQ ID NO: 35027 - DNA, 20 bp, Artificial Sequence
  Synthetic oligonucleotide; AGG chr11 5346331 5346350 5346334 -
ccaagagccacgactagctg

SEQ ID NO: 35028 - DNA, 20 bp, Artificial Sequence
  Synthetic oligonucleotide; AAG chr11 5346324 5346343 5346327 -
ccacgactagctgaggacac

SEQ ID NO: 35029 - DNA, 20 bp, Artificial Sequence
  Synthetic oligonucleotide; AAG chr11 5346306 5346325 5346309 -
acaagaattttcacaaaaca

SEQ ID NO: 35030 - DNA, 20 bp, Artificial Sequence
  Synthetic oligonucleotide; TAG chr11 5346303 5346322 5346306 -
agaattttcacaaaacaaag

SEQ ID NO: 35031 - DNA, 20 bp, Artificial Sequence
  Synthetic oligonucleotide; GAG chr11 5346301 5346320 5346304 -
aattttcacaaaacaaagta

SEQ ID NO: 35032 - DNA, 20 bp, Artificial Sequence
  Synthetic oligonucleotide; TAG chr11 5346290 5346309 5346293 -
aacaaagtagagtgattcca

SEQ ID NO: 35033 - DNA, 20 bp, Artificial Sequence
  Synthetic oligonucleotide; TAG chr11 5346277 5346296 5346280 -
gattccatagatcactatta

SEQ ID NO: 35034 - DNA, 20 bp, Artificial Sequence
  Synthetic oligonucleotide; CAG chr11 5346265 5346284 5346268 -
cactattatagctgcattac

SEQ ID NO: 35035 - DNA, 20 bp, Artificial Sequence
  Synthetic oligonucleotide; AGG chr11 5346264 5346283 5346267 -
actattatagctgcattacc

SEQ ID NO: 35036 - DNA, 20 bp, Artificial Sequence
  Synthetic oligonucleotide; TGG chr11 5346251 5346270 5346254 -
cattaccaggtatgtctgca

SEQ ID NO: 35037 - DNA, 20 bp, Artificial Sequence
  Synthetic oligonucleotide; TGG chr11 5346242 5346261 5346245 -
gtatgtctgcatggaattct

SEQ ID NO: 35038 - DNA, 20 bp, Artificial Sequence
  Synthetic oligonucleotide; GGG chr11 5346241 5346260 5346244 -
tatgtctgcatggaattctt

SEQ ID NO: 35039 - DNA, 20 bp, Artificial Sequence
  Synthetic oligonucleotide; TGG chr11 5346236 5346255 5346239 -
ctgcatggaattcttgggaa

SEQ ID NO: 35040 - DNA, 20 bp, Artificial Sequence
  Synthetic oligonucleotide; GAG chr11 5346234 5346253 5346237 -
gcatggaattcttgggaatg

SEQ ID NO: 35041 - DNA, 20 bp, Artificial Sequence
  Synthetic oligonucleotide; AAG chr11 5346231 5346250 5346234 -
tggaattcttgggaatggag

SEQ ID NO: 35042 - DNA, 20 bp, Artificial Sequence
  Synthetic oligonucleotide; AGG chr11 5346230 5346249 5346233 -
ggaattcttgggaatggaga

SEQ ID NO: 35043 - DNA, 20 bp, Artificial Sequence
  Synthetic oligonucleotide; GAG chr11 5346228 5346247 5346231 -
aattcttgggaatggagaag

SEQ ID NO: 35044 - DNA, 20 bp, Artificial Sequence
  Synthetic oligonucleotide; AGG chr11 5346227 5346246 5346230 -
attcttgggaatggagaagg

SEQ ID NO: 35045 - DNA, 20 bp, Artificial Sequence
  Synthetic oligonucleotide; AAG chr11 5346217 5346236 5346220 -
atggagaaggaggaaacttt

SEQ ID NO: 35046 - DNA, 20 bp, Artificial Sequence
  Synthetic oligonucleotide; CAG chr11 5346211 5346230 5346214 -
aaggaggaaactttaagttg

SEQ ID NO: 35047 - DNA, 20 bp, Artificial Sequence
  Synthetic oligonucleotide; AGG chr11 5346210 5346229 5346213 -
aggaggaaactttaagttgc

SEQ ID NO: 35048 - DNA, 20 bp, Artificial Sequence
  Synthetic oligonucleotide; TGG chr11 5346200 5346219 5346203 -
tttaagttgcaggttattat

SEQ ID NO: 35049 - DNA, 20 bp, Artificial Sequence
  Synthetic oligonucleotide; CAG chr11 5346176 5346195 5346179 -
aaaatacaatcattgcctta

SEQ ID NO: 35050 - DNA, 20 bp, Artificial Sequence
  Synthetic oligonucleotide; TGG chr11 5346171 5346190 5346174 -
acaatcattgccttacagtt

SEQ ID NO: 35051 - DNA, 20 bp, Artificial Sequence
  Synthetic oligonucleotide; TAG chr11 5346167 5346186 5346170 -
tcattgccttacagtttggt

SEQ ID NO: 35052 - DNA, 20 bp, Artificial Sequence
  Synthetic oligonucleotide; TAG chr11 5346155 5346174 5346158 -
agtttggttagctttccctg

SEQ ID NO: 35053 - DNA, 20 bp, Artificial Sequence
  Synthetic oligonucleotide; AAG chr11 5346120 5346139 5346123 -
tgtgctgcatattctctgat

SEQ ID NO: 35054 - DNA, 20 bp, Artificial Sequence
  Synthetic oligonucleotide; AAG chr11 5346117 5346136 5346120 -
gctgcatattctctgataag

SEQ ID NO: 35055 - DNA, 20 bp, Artificial Sequence
  Synthetic oligonucleotide; AGG chr11 5346116 5346135 5346119 -
ctgcatattctctgataaga

SEQ ID NO: 35056 - DNA, 20 bp, Artificial Sequence
  Synthetic oligonucleotide; AAG chr11 5346102 5346121 5346105 -
ataagaaggaatttttcaca

SEQ ID NO: 35057 - DNA, 20 bp, Artificial Sequence
  Synthetic oligonucleotide; GAG chr11 5346097 5346116 5346100 -
aaggaatttttcacaaagtt

SEQ ID NO: 35058 - DNA, 20 bp, Artificial Sequence
  Synthetic oligonucleotide; CAG chr11 5346091 5346110 5346094 -
tttttcacaaagttgagata

SEQ ID NO: 35059 - DNA, 20 bp, Artificial Sequence
  Synthetic oligonucleotide; AAG chr11 5346085 5346104 5346088 -
acaaagttgagatacagtga

SEQ ID NO: 35060 - DNA, 20 bp, Artificial Sequence
  Synthetic oligonucleotide; TAG chr11 5346080 5346099 5346083 -
gttgagatacagtgaaagat

SEQ ID NO: 35061 - DNA, 20 bp, Artificial Sequence
  Synthetic oligonucleotide; AGG chr11 5346079 5346098 5346082 -
ttgagatacagtgaaagatt

SEQ ID NO: 35062 - DNA, 20 bp, Artificial Sequence
  Synthetic oligonucleotide; AAG chr11 5346073 5346092 5346076 -
tacagtgaaagattaggtta

SEQ ID NO: 35063 - DNA, 20 bp, Artificial Sequence
  Synthetic oligonucleotide; AGG chr11 5346072 5346091 5346075 -
acagtgaaagattaggttaa

SEQ ID NO: 35064 - DNA, 20 bp, Artificial Sequence
  Synthetic oligonucleotide; GAG chr11 5346070 5346089 5346073 -
agtgaaagattaggttaaag

SEQ ID NO: 35065 - DNA, 20 bp, Artificial Sequence
  Synthetic oligonucleotide; CAG chr11 5346051 5346070 5346054 -
ggagattattgctgaaacgt

SEQ ID NO: 35066 - DNA, 20 bp, Artificial Sequence
  Synthetic oligonucleotide; GAG chr11 5346049 5346068 5346052 -
agattattgctgaaacgtca

SEQ ID NO: 35067 - DNA, 20 bp, Artificial Sequence
  Synthetic oligonucleotide; AAG chr11 5346046 5346065 5346049 -
ttattgctgaaacgtcagag

SEQ ID NO: 35068 - DNA, 20 bp, Artificial Sequence
  Synthetic oligonucleotide; AAG chr11 5346042 5346061 5346045 -
tgctgaaacgtcagagaagt

SEQ ID NO: 35069 - DNA, 20 bp, Artificial Sequence
  Synthetic oligonucleotide; GAG chr11 5346040 5346059 5346043 -
ctgaaacgtcagagaagtaa

SEQ ID NO: 35070 - DNA, 20 bp, Artificial Sequence
  Synthetic oligonucleotide; CAG chr11 5346031 5346050 5346034 -
cagagaagtaagagtgttga

SEQ ID NO: 35071 - DNA, 20 bp, Artificial Sequence
  Synthetic oligonucleotide; GAG chr11 5346029 5346048 5346032 -
gagaagtaagagtgttgaca

SEQ ID NO: 35072 - DNA, 20 bp, Artificial Sequence
  Synthetic oligonucleotide; AAG chr11 5346021 5346040 5346024 -
agagtgttgacagagaaatg

SEQ ID NO: 35073 - DNA, 20 bp, Artificial Sequence
  Synthetic oligonucleotide; TAG chr11 5346014 5346033 5346017 -
tgacagagaaatgaagtaca

SEQ ID NO: 35074 - DNA, 20 bp, Artificial Sequence
  Synthetic oligonucleotide; CAG chr11 5346007 5346026 5346010 -
gaaatgaagtacatagaaca

SEQ ID NO: 35075 - DNA, 20 bp, Artificial Sequence
  Synthetic oligonucleotide; AAG chr11 5346004 5346023 5346007 -
atgaagtacatagaacacag

SEQ ID NO: 35076 - DNA, 20 bp, Artificial Sequence
  Synthetic oligonucleotide; AGG chr11 5346003 5346022 5346006 -
tgaagtacatagaacacaga

SEQ ID NO: 35077 - DNA, 20 bp, Artificial Sequence
  Synthetic oligonucleotide; GGG chr11 5346002 5346021 5346005 -
gaagtacatagaacacagaa

SEQ ID NO: 35078 - DNA, 20 bp, Artificial Sequence
  Synthetic oligonucleotide; GGG chr11 5346001 5346020 5346004 -
aagtacatagaacacagaag

SEQ ID NO: 35079 - DNA, 20 bp, Artificial Sequence
  Synthetic oligonucleotide; GAG chr11 5345999 5346018 5346002 -
gtacatagaacacagaaggg

SEQ ID NO: 35080 - DNA, 20 bp, Artificial Sequence
  Synthetic oligonucleotide; AGG chr11 5345998 5346017 5346001 -
tacatagaacacagaagggg

SEQ ID NO: 35081 - DNA, 20 bp, Artificial Sequence
  Synthetic oligonucleotide; GAG chr11 5345996 5346015 5345999 -
catagaacacagaaggggag

SEQ ID NO: 35082 - DNA, 20 bp, Artificial Sequence
  Synthetic oligonucleotide; AAG chr11 5345991 5346010 5345994 -
aacacagaaggggaggagct

SEQ ID NO: 35083 - DNA, 20 bp, Artificial Sequence
  Synthetic oligonucleotide; TGG chr11 5345987 5346006 5345990 -
cagaaggggaggagctaagc

SEQ ID NO: 35084 - DNA, 20 bp, Artificial Sequence
  Synthetic oligonucleotide; TAG chr11 5345970 5345989 5345973 -
agctggattatctttgcgtc

SEQ ID NO: 35085 - DNA, 20 bp, Artificial Sequence
  Synthetic oligonucleotide; AAG chr11 5345961 5345980 5345964 -
atctttgcgtctagtaactg

SEQ ID NO: 35086 - DNA, 20 bp, Artificial Sequence
  Synthetic oligonucleotide; CAG chr11 5345934 5345953 5345937 -
tacatcactcattgtatgtt

SEQ ID NO: 35087 - DNA, 20 bp, Artificial Sequence
  Synthetic oligonucleotide; TAG chr11 5345931 5345950 5345934 -
atcactcattgtatgttcag

SEQ ID NO: 35088 - DNA, 20 bp, Artificial Sequence
  Synthetic oligonucleotide; AGG chr11 5345930 5345949 5345933 -
tcactcattgtatgttcagt

SEQ ID NO: 35089 - DNA, 20 bp, Artificial Sequence
  Synthetic oligonucleotide; TGG chr11 5345917 5345936 5345920 -
gttcagtaggcactgaattc

SEQ ID NO: 35090 - DNA, 20 bp, Artificial Sequence
  Synthetic oligonucleotide; CAG chr11 5345903 5345922 5345906 -
gaattctggtttatgtctct

SEQ ID NO: 35091 - DNA, 20 bp, Artificial Sequence
  Synthetic oligonucleotide; TAG chr11 5345897 5345916 5345900 -
tggtttatgtctctcagtcc

SEQ ID NO: 35092 - DNA, 20 bp, Artificial Sequence
  Synthetic oligonucleotide; AGG chr11 5345896 5345915 5345899 -
ggtttatgtctctcagtcct

SEQ ID NO: 35093 - DNA, 20 bp, Artificial Sequence
  Synthetic oligonucleotide; CAG chr11 5345892 5345911 5345895 -
tatgtctctcagtcctagga

SEQ ID NO: 35094 - DNA, 20 bp, Artificial Sequence
  Synthetic oligonucleotide; TGG chr11 5345885 5345904 5345888 -
ctcagtcctaggacagaata

SEQ ID NO: 35095 - DNA, 20 bp, Artificial Sequence
  Synthetic oligonucleotide; AAG chr11 5345860 5345879 5345863 -
gctgaaaaatgattctttca

SEQ ID NO: 35096 - DNA, 20 bp, Artificial Sequence
  Synthetic oligonucleotide; GAG chr11 5345853 5345872 5345856 -
aatgattctttcaaagtgct

SEQ ID NO: 35097 - DNA, 20 bp, Artificial Sequence
  Synthetic oligonucleotide; CAG chr11 5345835 5345854 5345838 -
ctgagttgttgcctcacgcc

SEQ ID NO: 35098 - DNA, 20 bp, Artificial Sequence
  Synthetic oligonucleotide; TGG chr11 5345827 5345846 5345830 -
ttgcctcacgcccagttgtc

SEQ ID NO: 35099 - DNA, 20 bp, Artificial Sequence
  Synthetic oligonucleotide; CAG chr11 5345802 5345821 5345805 -
tctcttcactgaaactatta

SEQ ID NO: 35100 - DNA, 20 bp, Artificial Sequence
  Synthetic oligonucleotide; TAG chr11 5345798 5345817 5345801 -
ttcactgaaactattacagt

SEQ ID NO: 35101 - DNA, 20 bp, Artificial Sequence
  Synthetic oligonucleotide; TGG chr11 5345783 5345802 5345786 -
acagttagatctcatctcta

SEQ ID NO: 35102 - DNA, 20 bp, Artificial Sequence
  Synthetic oligonucleotide; GGG chr11 5345782 5345801 5345785 -
cagttagatctcatctctat

SEQ ID NO: 35103 - DNA, 20 bp, Artificial Sequence
  Synthetic oligonucleotide; TGG chr11 5345779 5345798 5345782 -
ttagatctcatctctatggg

SEQ ID NO: 35104 - DNA, 20 bp, Artificial Sequence
  Synthetic oligonucleotide; AAG chr11 5345776 5345795 5345779 -
gatctcatctctatgggtgg

SEQ ID NO: 35105 - DNA, 20 bp, Artificial Sequence
  Synthetic oligonucleotide; AGG chr11 5345775 5345794 5345778 -
atctcatctctatgggtgga

SEQ ID NO: 35106 - DNA, 20 bp, Artificial Sequence
  Synthetic oligonucleotide; AAG chr11 5345771 5345790 5345774 -
catctctatgggtggaaggt

SEQ ID NO: 35107 - DNA, 20 bp, Artificial Sequence
  Synthetic oligonucleotide; GAG chr11 5345769 5345788 5345772 -
tctctatgggtggaaggtaa

SEQ ID NO: 35108 - DNA, 20 bp, Artificial Sequence
  Synthetic oligonucleotide; AGG chr11 5345768 5345787 5345771 -
ctctatgggtggaaggtaag

SEQ ID NO: 35109 - DNA, 20 bp, Artificial Sequence
  Synthetic oligonucleotide; TGG chr11 5345754 5345773 5345757 -
ggtaagaggatcgtttcctt

SEQ ID NO: 35110 - DNA, 20 bp, Artificial Sequence
  Synthetic oligonucleotide; TGG chr11 5345751 5345770 5345754 -
aagaggatcgtttcctttgg

SEQ ID NO: 35111 - DNA, 20 bp, Artificial Sequence
  Synthetic oligonucleotide; TAG chr11 5345742 5345761 5345745 -
gtttcctttggtggcatctt

SEQ ID NO: 35112 - DNA, 20 bp, Artificial Sequence
  Synthetic oligonucleotide; AGG chr11 5345741 5345760 5345744 -
tttcctttggtggcatcttt

SEQ ID NO: 35113 - DNA, 20 bp, Artificial Sequence
  Synthetic oligonucleotide; GGG chr11 5345740 5345759 5345743 -
ttcctttggtggcatcttta

SEQ ID NO: 35114 - DNA, 20 bp, Artificial Sequence
  Synthetic oligonucleotide; TAG chr11 5345737 5345756 5345740 -
ctttggtggcatctttaggg

SEQ ID NO: 35115 - DNA, 20 bp, Artificial Sequence
  Synthetic oligonucleotide; AAG chr11 5345719 5345738 5345722 -
ggtagtgccttacactgaca

SEQ ID NO: 35116 - DNA, 20 bp, Artificial Sequence
  Synthetic oligonucleotide; AAG chr11 5345708 5345727 5345711 -
acactgacaaagtaactctg

SEQ ID NO: 35117 - DNA, 20 bp, Artificial Sequence
  Synthetic oligonucleotide; AGG chr11 5345707 5345726 5345710 -
cactgacaaagtaactctga

SEQ ID NO: 35118 - DNA, 20 bp, Artificial Sequence
  Synthetic oligonucleotide; GGG chr11 5345706 5345725 5345709 -
actgacaaagtaactctgaa

SEQ ID NO: 35119 - DNA, 20 bp, Artificial Sequence
  Synthetic oligonucleotide; GGG chr11 5345705 5345724 5345708 -
ctgacaaagtaactctgaag

SEQ ID NO: 35120 - DNA, 20 bp, Artificial Sequence
  Synthetic oligonucleotide; TGG chr11 5345696 5345715 5345699 -
taactctgaaggggtatatt

SEQ ID NO: 35121 - DNA, 20 bp, Artificial Sequence
  Synthetic oligonucleotide; TAG chr11 5345673 5345692 5345676 -
atacgaccatctttttaact

SEQ ID NO: 35122 - DNA, 20 bp, Artificial Sequence
  Synthetic oligonucleotide; AGG chr11 5345672 5345691 5345675 -
tacgaccatctttttaactt

SEQ ID NO: 35123 - DNA, 20 bp, Artificial Sequence
  Synthetic oligonucleotide; AAG chr11 5345655 5345674 5345658 -
cttaggataaaaacaacttc

SEQ ID NO: 35124 - DNA, 20 bp, Artificial Sequence
  Synthetic oligonucleotide; AAG chr11 5345652 5345671 5345655 -
aggataaaaacaacttcaag

SEQ ID NO: 35125 - DNA, 20 bp, Artificial Sequence
  Synthetic oligonucleotide; TGG chr11 5345643 5345662 5345646 -
acaacttcaagaagttgttc

SEQ ID NO: 35126 - DNA, 20 bp, Artificial Sequence
  Synthetic oligonucleotide; AAG chr11 5345632 5345651 5345635 -
aagttgttctggcatgtgac

SEQ ID NO: 35127 - DNA, 20 bp, Artificial Sequence
  Synthetic oligonucleotide; AAG chr11 5345623 5345642 5345626 -
tggcatgtgacaagaaaaaa

SEQ ID NO: 35128 - DNA, 20 bp, Artificial Sequence
  Synthetic oligonucleotide; AAG chr11 5345619 5345638 5345622 -
atgtgacaagaaaaaaaagc

SEQ ID NO: 35129 - DNA, 20 bp, Artificial Sequence
  Synthetic oligonucleotide; AGG chr11 5345618 5345637 5345621 -
tgtgacaagaaaaaaaagca

SEQ ID NO: 35130 - DNA, 20 bp, Artificial Sequence
  Synthetic oligonucleotide; GGG chr11 5345617 5345636 5345620 -
gtgacaagaaaaaaaagcaa

SEQ ID NO: 35131 - DNA, 20 bp, Artificial Sequence
  Synthetic oligonucleotide; CAG chr11 5345597 5345616 5345600 -
gggatgcatttgctctaatt

SEQ ID NO: 35132 - DNA, 20 bp, Artificial Sequence
  Synthetic oligonucleotide; AAG chr11 5345562 5345581 5345565 -
atgactcttgatttcctcac

SEQ ID NO: 35133 - DNA, 20 bp, Artificial Sequence
  Synthetic oligonucleotide; CAG chr11 5345542 5345561 5345545 -
aagtgaatatgtatccccct

SEQ ID NO: 35134 - DNA, 20 bp, Artificial Sequence
  Synthetic oligonucleotide; GAG chr11 5345528 5345547 5345531 -
ccccctcagacttccatttt

SEQ ID NO: 35135 - DNA, 20 bp, Artificial Sequence
  Synthetic oligonucleotide; TGG chr11 5345521 5345540 5345524 -
agacttccattttgagtaaa

SEQ ID NO: 35136 - DNA, 20 bp, Artificial Sequence
  Synthetic oligonucleotide; CAG chr11 5345492 5345511 5345495 -
cattctttcatttgttcaaa

SEQ ID NO: 35137 - DNA, 20 bp, Artificial Sequence
  Synthetic oligonucleotide; TAG chr11 5345484 5345503 5345487 -
catttgttcaaacagaaatc

SEQ ID NO: 35138 - DNA, 20 bp, Artificial Sequence
  Synthetic oligonucleotide; AGG chr11 5345483 5345502 5345486 -
atttgttcaaacagaaatct

SEQ ID NO: 35139 - DNA, 20 bp, Artificial Sequence
  Synthetic oligonucleotide; GGG chr11 5345482 5345501 5345485 -
tttgttcaaacagaaatcta

SEQ ID NO: 35140 - DNA, 20 bp, Artificial Sequence
  Synthetic oligonucleotide; GGG chr11 5345481 5345500 5345484 -
ttgttcaaacagaaatctag

SEQ ID NO: 35141 - DNA, 20 bp, Artificial Sequence
  Synthetic oligonucleotide; CAG chr11 5345436 5345455 5345439 -
cactcccatttttaatatat

SEQ ID NO: 35142 - DNA, 20 bp, Artificial Sequence
  Synthetic oligonucleotide; TGG chr11 5345426 5345445 5345429 -
tttaatatatcagcaaatct

SEQ ID NO: 35143 - DNA, 20 bp, Artificial Sequence
  Synthetic oligonucleotide; AAG chr11 5345392 5345411 5345395 -
aaatgcatctgtctctgttt

SEQ ID NO: 35144 - DNA, 20 bp, Artificial Sequence
  Synthetic oligonucleotide; TAG chr11 5345346 5345365 5345349 -
catttcccctgcttctctcc

SEQ ID NO: 35145 - DNA, 20 bp, Artificial Sequence
  Synthetic oligonucleotide; AAG chr11 5345341 5345360 5345344 -
cccctgcttctctcctagtc

SEQ ID NO: 35146 - DNA, 20 bp, Artificial Sequence
  Synthetic oligonucleotide; AGG chr11 5345340 5345359 5345343 -
ccctgcttctctcctagtca

SEQ ID NO: 35147 - DNA, 20 bp, Artificial Sequence
  Synthetic oligonucleotide; TGG chr11 5345319 5345338 5345322 -
ggtcaccatgactcttcata

SEQ ID NO: 35148 - DNA, 20 bp, Artificial Sequence
  Synthetic oligonucleotide; TAG chr11 5345306 5345325 5345309 -
cttcatatggatttttaaaa

SEQ ID NO: 35149 - DNA, 20 bp, Artificial Sequence
  Synthetic oligonucleotide; TAG chr11 5345270 5345289 5345273 -
ctcttttcttgtctcttgct

SEQ ID NO: 35150 - DNA, 20 bp, Artificial Sequence
  Synthetic oligonucleotide; TAG chr11 5345256 5345275 5345259 -
cttgcttagtcttcttcaca

SEQ ID NO: 35151 - DNA, 20 bp, Artificial Sequence
  Synthetic oligonucleotide; CAG chr11 5345253 5345272 5345256 -
gcttagtcttcttcacatag

SEQ ID NO: 35152 - DNA, 20 bp, Artificial Sequence
  Synthetic oligonucleotide; AAG chr11 5345247 5345266 5345250 -
tcttcttcacatagcagtct

SEQ ID NO: 35153 - DNA, 20 bp, Artificial Sequence
  Synthetic oligonucleotide; GAG chr11 5345243 5345262 5345246 -
cttcacatagcagtctaagt

SEQ ID NO: 35154 - DNA, 20 bp, Artificial Sequence
  Synthetic oligonucleotide; CAG chr11 5345222 5345241 5345225 -
agtaatttaaaaatacaaat

SEQ ID NO: 35155 - DNA, 20 bp, Artificial Sequence
  Synthetic oligonucleotide; AAG chr11 5345183 5345202 5345186 -
attttccattgtgattttca

SEQ ID NO: 35156 - DNA, 20 bp, Artificial Sequence
  Synthetic oligonucleotide; TAG chr11 5345155 5345174 5345158 -
taatgtctttactacattta

SEQ ID NO: 35157 - DNA, 20 bp, Artificial Sequence
  Synthetic oligonucleotide; AAG chr11 5345151 5345170 5345154 -
gtctttactacatttatagt

SEQ ID NO: 35158 - DNA, 20 bp, Artificial Sequence
  Synthetic oligonucleotide; AAG chr11 5345148 5345167 5345151 -
tttactacatttatagtaag

SEQ ID NO: 35159 - DNA, 20 bp, Artificial Sequence
  Synthetic oligonucleotide; TGG chr11 5345120 5345139 5345123 -
aaaacaaaacaaaaattccg

SEQ ID NO: 35160 - DNA, 20 bp, Artificial Sequence
  Synthetic oligonucleotide; TGG chr11 5345117 5345136 5345120 -
acaaaacaaaaattccgtgg

SEQ ID NO: 35161 - DNA, 20 bp, Artificial Sequence
  Synthetic oligonucleotide; AAG chr11 5345109 5345128 5345112 -
aaaattccgtggtggtctgt

SEQ ID NO: 35162 - DNA, 20 bp, Artificial Sequence
  Synthetic oligonucleotide; AGG chr11 5345108 5345127 5345111 -
aaattccgtggtggtctgta

SEQ ID NO: 35163 - DNA, 20 bp, Artificial Sequence
  Synthetic oligonucleotide; CAG chr11 5345032 5345051 5345035 -
cctgttttcttatcaaatgc

SEQ ID NO: 35164 - DNA, 20 bp, Artificial Sequence
  Synthetic oligonucleotide; TGG chr11 5345011 5345030 5345014 -
agtcatgctgattttccctc

SEQ ID NO: 35165 - DNA, 20 bp, Artificial Sequence
  Synthetic oligonucleotide; CAG chr11 5345006 5345025 5345009 -
tgctgattttccctctggaa

SEQ ID NO: 35166 - DNA, 20 bp, Artificial Sequence
  Synthetic oligonucleotide; TAG chr11 5344995 5345014 5344998 -
cctctggaacagttttcctc

SEQ ID NO: 35167 - DNA, 20 bp, Artificial Sequence
  Synthetic oligonucleotide; AGG chr11 5344994 5345013 5344997 -
ctctggaacagttttcctct

SEQ ID NO: 35168 - DNA, 20 bp, Artificial Sequence
  Synthetic oligonucleotide; CGG chr11 5344983 5345002 5344986 -
ttttcctctaggtctgtata

SEQ ID NO: 35169 - DNA, 20 bp, Artificial Sequence
  Synthetic oligonucleotide; CAG chr11 5344979 5344998 5344982 -
cctctaggtctgtatacggt

SEQ ID NO: 35170 - DNA, 20 bp, Artificial Sequence
  Synthetic oligonucleotide; AGG chr11 5344978 5344997 5344981 -
ctctaggtctgtatacggtc

SEQ ID NO: 35171 - DNA, 20 bp, Artificial Sequence
  Synthetic oligonucleotide; GAG chr11 5344961 5344980 5344964 -
gtcaggttttcttttgtatt

SEQ ID NO: 35172 - DNA, 20 bp, Artificial Sequence
  Synthetic oligonucleotide; AGG chr11 5344960 5344979 5344963 -
tcaggttttcttttgtattg

SEQ ID NO: 35173 - DNA, 20 bp, Artificial Sequence
  Synthetic oligonucleotide; CAG chr11 5344954 5344973 5344957 -
tttcttttgtattgaggtct

SEQ ID NO: 35174 - DNA, 20 bp, Artificial Sequence
  Synthetic oligonucleotide; TGG chr11 5344945 5344964 5344948 -
tattgaggtctcagttcaaa

SEQ ID NO: 35175 - DNA, 20 bp, Artificial Sequence
  Synthetic oligonucleotide; GGG chr11 5344944 5344963 5344947 -
attgaggtctcagttcaaat

SEQ ID NO: 35176 - DNA, 20 bp, Artificial Sequence
  Synthetic oligonucleotide; TAG chr11 5344932 5344951 5344935 -
gttcaaatgggacctcctca

SEQ ID NO: 35177 - DNA, 20 bp, Artificial Sequence
  Synthetic oligonucleotide; AGG chr11 5344931 5344950 5344934 -
ttcaaatgggacctcctcat

SEQ ID NO: 35178 - DNA, 20 bp, Artificial Sequence
  Synthetic oligonucleotide; CAG chr11 5344926 5344945 5344929 -
atgggacctcctcataggtg

SEQ ID NO: 35179 - DNA, 20 bp, Artificial Sequence
  Synthetic oligonucleotide; TAG chr11 5344920 5344939 5344923 -
cctcctcataggtgcagttc

SEQ ID NO: 35180 - DNA, 20 bp, Artificial Sequence
  Synthetic oligonucleotide; AGG chr11 5344919 5344938 5344922 -
ctcctcataggtgcagttct

SEQ ID NO: 35181 - DNA, 20 bp, Artificial Sequence
  Synthetic oligonucleotide; AAG chr11 5344862 5344881 5344865 -
ccatccaattaatctacatc

SEQ ID NO: 35182 - DNA, 20 bp, Artificial Sequence
  Synthetic oligonucleotide; TAG chr11 5344859 5344878 5344862 -
tccaattaatctacatcaag

SEQ ID NO: 35183 - DNA, 20 bp, Artificial Sequence
  Synthetic oligonucleotide; TGG chr11 5344787 5344806 5344790 -
ttatttttcaacttaattta

SEQ ID NO: 35184 - DNA, 20 bp, Artificial Sequence
  Synthetic oligonucleotide; AAG chr11 5344779 5344798 5344782 -
caacttaatttatggtttat

SEQ ID NO: 35185 - DNA, 20 bp, Artificial Sequence
  Synthetic oligonucleotide; TAG chr11 5344774 5344793 5344777 -
taatttatggtttataagat

SEQ ID NO: 35186 - DNA, 20 bp, Artificial Sequence
  Synthetic oligonucleotide; AGG chr11 5344773 5344792 5344776 -
aatttatggtttataagatt

SEQ ID NO: 35187 - DNA, 20 bp, Artificial Sequence
  Synthetic oligonucleotide; GGG chr11 5344772 5344791 5344775 -
atttatggtttataagatta

SEQ ID NO: 35188 - DNA, 20 bp, Artificial Sequence
  Synthetic oligonucleotide; CAG chr11 5344744 5344763 5344747 -
gtcttattaccatttaattc

SEQ ID NO: 35189 - DNA, 20 bp, Artificial Sequence
  Synthetic oligonucleotide; GAG chr11 5344742 5344761 5344745 -
cttattaccatttaattcca

SEQ ID NO: 35190 - DNA, 20 bp, Artificial Sequence
  Synthetic oligonucleotide; GAG chr11 5344740 5344759 5344743 -
tattaccatttaattccaga

SEQ ID NO: 35191 - DNA, 20 bp, Artificial Sequence
  Synthetic oligonucleotide; TGG chr11 5344725 5344744 5344728 -
ccagagagctttaaatatca

SEQ ID NO: 35192 - DNA, 20 bp, Artificial Sequence
  Synthetic oligonucleotide; TAG chr11 5344694 5344713 5344697 -
tgatgcgtgttcacaaatat

SEQ ID NO: 35193 - DNA, 20 bp, Artificial Sequence
  Synthetic oligonucleotide; AGG chr11 5344693 5344712 5344696 -
gatgcgtgttcacaaatatt

SEQ ID NO: 35194 - DNA, 20 bp, Artificial Sequence
  Synthetic oligonucleotide; AAG chr11 5344684 5344703 5344687 -
tcacaaatattaggtgaact

SEQ ID NO: 35195 - DNA, 20 bp, Artificial Sequence
  Synthetic oligonucleotide; CAG chr11 5344671 5344690 5344674 -
gtgaactaagaaatgtttat

SEQ ID NO: 35196 - DNA, 20 bp, Artificial Sequence
  Synthetic oligonucleotide; TAG chr11 5344660 5344679 5344663 -
aatgtttatcagtcacatgt

SEQ ID NO: 35197 - DNA, 20 bp, Artificial Sequence
  Synthetic oligonucleotide; AAG chr11 5344648 5344667 5344651 -
tcacatgttagatactttgc

SEQ ID NO: 35198 - DNA, 20 bp, Artificial Sequence
  Synthetic oligonucleotide; AGG chr11 5344647 5344666 5344650 -
cacatgttagatactttgca

SEQ ID NO: 35199 - DNA, 20 bp, Artificial Sequence
  Synthetic oligonucleotide; GAG chr11 5344640 5344659 5344643 -
tagatactttgcaaggtgtt

SEQ ID NO: 35200 - DNA, 20 bp, Artificial Sequence
  Synthetic oligonucleotide; AAG chr11 5344635 5344654 5344638 -
actttgcaaggtgttgagca

SEQ ID NO: 35201 - DNA, 20 bp, Artificial Sequence
  Synthetic oligonucleotide; AAG chr11 5344608 5344627 5344611 -
taaacaccatgtctatatgc

SEQ ID NO: 35202 - DNA, 20 bp, Artificial Sequence
  Synthetic oligonucleotide; AAG chr11 5344605 5344624 5344608 -
acaccatgtctatatgcaag

SEQ ID NO: 35203 - DNA, 20 bp, Artificial Sequence
  Synthetic oligonucleotide; TAG chr11 5344598 5344617 5344601 -
gtctatatgcaagaagcccc

SEQ ID NO: 35204 - DNA, 20 bp, Artificial Sequence
  Synthetic oligonucleotide; TAG chr11 5344593 5344612 5344596 -
tatgcaagaagcccctagtc

SEQ ID NO: 35205 - DNA, 20 bp, Artificial Sequence
  Synthetic oligonucleotide; TGG chr11 5344590 5344609 5344593 -
gcaagaagcccctagtctag

SEQ ID NO: 35206 - DNA, 20 bp, Artificial Sequence
  Synthetic oligonucleotide; CAG chr11 5344587 5344606 5344590 -
agaagcccctagtctagtgg

SEQ ID NO: 35207 - DNA, 20 bp, Artificial Sequence
  Synthetic oligonucleotide; AAG chr11 5344584 5344603 5344587 -
agcccctagtctagtggcag

SEQ ID NO: 35208 - DNA, 20 bp, Artificial Sequence
  Synthetic oligonucleotide; AGG chr11 5344583 5344602 5344586 -
gcccctagtctagtggcaga

SEQ ID NO: 35209 - DNA, 20 bp, Artificial Sequence
  Synthetic oligonucleotide; AAG chr11 5344562 5344581 5344565 -
ggaatattaaaaccttctca

SEQ ID NO: 35210 - DNA, 20 bp, Artificial Sequence
  Synthetic oligonucleotide; AGG chr11 5344561 5344580 5344564 -
gaatattaaaaccttctcaa

SEQ ID NO: 35211 - DNA, 20 bp, Artificial Sequence
  Synthetic oligonucleotide; CAG chr11 5344542 5344561 5344545 -
aaggactaatctcttctctt

SEQ ID NO: 35212 - DNA, 20 bp, Artificial Sequence
  Synthetic oligonucleotide; AAG chr11 5344536 5344555 5344539 -
taatctcttctcttcagtaa

SEQ ID NO: 35213 - DNA, 20 bp, Artificial Sequence
  Synthetic oligonucleotide; CAG chr11 5344532 5344551 5344535 -
ctcttctcttcagtaaaaga

SEQ ID NO: 35214 - DNA, 20 bp, Artificial Sequence
  Synthetic oligonucleotide; AAG chr11 5344519 5344538 5344522 -
taaaagacagcaccacgttt

SEQ ID NO: 35215 - DNA, 20 bp, Artificial Sequence
  Synthetic oligonucleotide; CAG chr11 5344516 5344535 5344519 -
aagacagcaccacgtttaag

SEQ ID NO: 35216 - DNA, 20 bp, Artificial Sequence
  Synthetic oligonucleotide; AGG chr11 5344515 5344534 5344518 -
agacagcaccacgtttaagc

SEQ ID NO: 35217 - DNA, 20 bp, Artificial Sequence
  Synthetic oligonucleotide; GGG chr11 5344514 5344533 5344517 -
gacagcaccacgtttaagca

SEQ ID NO: 35218 - DNA, 20 bp, Artificial Sequence
  Synthetic oligonucleotide; TAG chr11 5344508 5344527 5344511 -
accacgtttaagcagggaaa

SEQ ID NO: 35219 - DNA, 20 bp, Artificial Sequence
  Synthetic oligonucleotide; CAG chr11 5344497 5344516 5344500 -
gcagggaaatagctctcact

SEQ ID NO: 35220 - DNA, 20 bp, Artificial Sequence
  Synthetic oligonucleotide; TGG chr11 5344491 5344510 5344494 -
aaatagctctcactcagtat

SEQ ID NO: 35221 - DNA, 20 bp, Artificial Sequence
  Synthetic oligonucleotide; GGG chr11 5344490 5344509 5344493 -
aatagctctcactcagtatt

SEQ ID NO: 35222 - DNA, 20 bp, Artificial Sequence
  Synthetic oligonucleotide; GGG chr11 5344489 5344508 5344492 -
atagctctcactcagtattg

SEQ ID NO: 35223 - DNA, 20 bp, Artificial Sequence
  Synthetic oligonucleotide; GAG chr11 5344487 5344506 5344490 -
agctctcactcagtattggg

SEQ ID NO: 35224 - DNA, 20 bp, Artificial Sequence
  Synthetic oligonucleotide; CAG chr11 5344482 5344501 5344485 -
tcactcagtattggggagaa

SEQ ID NO: 35225 - DNA, 20 bp, Artificial Sequence
  Synthetic oligonucleotide; CAG chr11 5344476 5344495 5344479 -
agtattggggagaacagatt

SEQ ID NO: 35226 - DNA, 20 bp, Artificial Sequence
  Synthetic oligonucleotide; AAG chr11 5344473 5344492 5344476 -
attggggagaacagattcag

SEQ ID NO: 35227 - DNA, 20 bp, Artificial Sequence
  Synthetic oligonucleotide; TGG chr11 5344466 5344485 5344469 -
agaacagattcagaagccta

SEQ ID NO: 35228 - DNA, 20 bp, Artificial Sequence
  Synthetic oligonucleotide; TGG chr11 5344462 5344481 5344465 -
cagattcagaagcctatggc

SEQ ID NO: 35229 - DNA, 20 bp, Artificial Sequence
  Synthetic oligonucleotide; GGG chr11 5344461 5344480 5344464 -
agattcagaagcctatggct

SEQ ID NO: 35230 - DNA, 20 bp, Artificial Sequence
  Synthetic oligonucleotide; GGG chr11 5344460 5344479 5344463 -
gattcagaagcctatggctg

SEQ ID NO: 35231 - DNA, 20 bp, Artificial Sequence
  Synthetic oligonucleotide; AAG chr11 5344454 5344473 5344457 -
gaagcctatggctggggata

SEQ ID NO: 35232 - DNA, 20 bp, Artificial Sequence
  Synthetic oligonucleotide; AGG chr11 5344453 5344472 5344456 -
aagcctatggctggggataa

SEQ ID NO: 35233 - DNA, 20 bp, Artificial Sequence
  Synthetic oligonucleotide; GGG chr11 5344452 5344471 5344455 -
agcctatggctggggataaa

SEQ ID NO: 35234 - DNA, 20 bp, Artificial Sequence
  Synthetic oligonucleotide; AAG chr11 5344449 5344468 5344452 -
ctatggctggggataaaggg

SEQ ID NO: 35235 - DNA, 20 bp, Artificial Sequence
  Synthetic oligonucleotide; AGG chr11 5344448 5344467 5344451 -
tatggctggggataaaggga

SEQ ID NO: 35236 - DNA, 20 bp, Artificial Sequence
  Synthetic oligonucleotide; CAG chr11 5344441 5344460 5344444 -
ggggataaagggaaggaaac

SEQ ID NO: 35237 - DNA, 20 bp, Artificial Sequence
  Synthetic oligonucleotide; AGG chr11 5344440 5344459 5344443 -
gggataaagggaaggaaacc

SEQ ID NO: 35238 - DNA, 20 bp, Artificial Sequence
  Synthetic oligonucleotide; AAG chr11 5344437 5344456 5344440 -
ataaagggaaggaaaccagg

SEQ ID NO: 35239 - DNA, 20 bp, Artificial Sequence
  Synthetic oligonucleotide; TGG chr11 5344433 5344452 5344436 -
agggaaggaaaccaggaaga

SEQ ID NO: 35240 - DNA, 20 bp, Artificial Sequence
  Synthetic oligonucleotide; TGG chr11 5344415 5344434 5344418 -
gatggatgtttaaatataaa

SEQ ID NO: 35241 - DNA, 20 bp, Artificial Sequence
  Synthetic oligonucleotide; GAG chr11 5344413 5344432 5344416 -
tggatgtttaaatataaatg

SEQ ID NO: 35242 - DNA, 20 bp, Artificial Sequence
  Synthetic oligonucleotide; GAG chr11 5344400 5344419 5344403 -
ataaatggagaacttgaaat

SEQ ID NO: 35243 - DNA, 20 bp, Artificial Sequence
  Synthetic oligonucleotide; GAG chr11 5344398 5344417 5344401 -
aaatggagaacttgaaatga

SEQ ID NO: 35244 - DNA, 20 bp, Artificial Sequence
  Synthetic oligonucleotide; GAG chr11 5344396 5344415 5344399 -
atggagaacttgaaatgaga

SEQ ID NO: 35245 - DNA, 20 bp, Artificial Sequence
  Synthetic oligonucleotide; AGG chr11 5344395 5344414 5344398 -
tggagaacttgaaatgagag

SEQ ID NO: 35246 - DNA, 20 bp, Artificial Sequence
  Synthetic oligonucleotide; CAG chr11 5344391 5344410 5344394 -
gaacttgaaatgagagaggt

SEQ ID NO: 35247 - DNA, 20 bp, Artificial Sequence
  Synthetic oligonucleotide; TAG chr11 5344384 5344403 5344387 -
aaatgagagaggtcagattc

SEQ ID NO: 35248 - DNA, 20 bp, Artificial Sequence
  Synthetic oligonucleotide; AGG chr11 5344383 5344402 5344386 -
aatgagagaggtcagattct

SEQ ID NO: 35249 - DNA, 20 bp, Artificial Sequence
  Synthetic oligonucleotide; GGG chr11 5344382 5344401 5344385 -
atgagagaggtcagattcta

SEQ ID NO: 35250 - DNA, 20 bp, Artificial Sequence
  Synthetic oligonucleotide; CAG chr11 5344371 5344390 5344374 -
cagattctagggaattactt

SEQ ID NO: 35251 - DNA, 20 bp, Artificial Sequence
  Synthetic oligonucleotide; TAG chr11 5344368 5344387 5344371 -
attctagggaattacttcag

SEQ ID NO: 35252 - DNA, 20 bp, Artificial Sequence
  Synthetic oligonucleotide; AGG chr11 5344367 5344386 5344370 -
ttctagggaattacttcagt

SEQ ID NO: 35253 - DNA, 20 bp, Artificial Sequence
  Synthetic oligonucleotide; TAG chr11 5344360 5344379 5344363 -
gaattacttcagtaggccta

SEQ ID NO: 35254 - DNA, 20 bp, Artificial Sequence
  Synthetic oligonucleotide; AAG chr11 5344343 5344362 5344346 -
ctatagaaaaataatttaaa

SEQ ID NO: 35255 - DNA, 20 bp, Artificial Sequence
  Synthetic oligonucleotide; AAG chr11 5344337 5344356 5344340 -
aaaaataatttaaaaagaaa

SEQ ID NO: 35256 - DNA, 20 bp, Artificial Sequence
  Synthetic oligonucleotide; AAG chr11 5344319 5344338 5344322 -
aaaagacactacttgtaaat

SEQ ID NO: 35257 - DNA, 20 bp, Artificial Sequence
  Synthetic oligonucleotide; CAG chr11 5344313 5344332 5344316 -
cactacttgtaaataagaaa

SEQ ID NO: 35258 - DNA, 20 bp, Artificial Sequence
  Synthetic oligonucleotide; AAG chr11 5344309 5344328 5344312 -
acttgtaaataagaaacagt

SEQ ID NO: 35259 - DNA, 20 bp, Artificial Sequence
  Synthetic oligonucleotide; AAG chr11 5344294 5344313 5344297 -
acagtaagatgtttaaactg

SEQ ID NO: 35260 - DNA, 20 bp, Artificial Sequence
  Synthetic oligonucleotide; AGG chr11 5344293 5344312 5344296 -
cagtaagatgtttaaactga

SEQ ID NO: 35261 - DNA, 20 bp, Artificial Sequence
  Synthetic oligonucleotide; GAG chr11 5344291 5344310 5344294 -
gtaagatgtttaaactgaag

SEQ ID NO: 35262 - DNA, 20 bp, Artificial Sequence
  Synthetic oligonucleotide; AAG chr11 5344276 5344295 5344279 -
tgaaggagatacactattat

SEQ ID NO: 35263 - DNA, 20 bp, Artificial Sequence
  Synthetic oligonucleotide; TGG chr11 5344264 5344283 5344267 -
actattataagtgatgtctt

SEQ ID NO: 35264 - DNA, 20 bp, Artificial Sequence
  Synthetic oligonucleotide; TGG chr11 5344260 5344279 5344263 -
ttataagtgatgtctttggc

SEQ ID NO: 35265 - DNA, 20 bp, Artificial Sequence
  Synthetic oligonucleotide; CAG chr11 5344242 5344261 5344245 -
gctggcctaatcatttattc

SEQ ID NO: 35266 - DNA, 20 bp, Artificial Sequence
  Synthetic oligonucleotide; AAG chr11 5344234 5344253 5344237 -
aatcatttattccagcccca

SEQ ID NO: 35267 - DNA, 20 bp, Artificial Sequence
  Synthetic oligonucleotide; TAG chr11 5344218 5344237 5344221 -
cccaaagtctaacttataat

SEQ ID NO: 35268 - DNA, 20 bp, Artificial Sequence
  Synthetic oligonucleotide; GAG chr11 5344212 5344231 5344215 -
gtctaacttataattagact

SEQ ID NO: 35269 - DNA, 20 bp, Artificial Sequence
  Synthetic oligonucleotide; AAG chr11 5344199 5344218 5344202 -
ttagactgagctattgtcac

SEQ ID NO: 35270 - DNA, 20 bp, Artificial Sequence
  Synthetic oligonucleotide; TAG chr11 5344196 5344215 5344199 -
gactgagctattgtcacaag

SEQ ID NO: 35271 - DNA, 20 bp, Artificial Sequence
  Synthetic oligonucleotide; GAG chr11 5344192 5344211 5344195 -
gagctattgtcacaagtagt

SEQ ID NO: 35272 - DNA, 20 bp, Artificial Sequence
  Synthetic oligonucleotide; TAG chr11 5344189 5344208 5344192 -
ctattgtcacaagtagtgag

SEQ ID NO: 35273 - DNA, 20 bp, Artificial Sequence
  Synthetic oligonucleotide; AAG chr11 5344181 5344200 5344184 -
acaagtagtgagtagtactg

SEQ ID NO: 35274 - DNA, 20 bp, Artificial Sequence
  Synthetic oligonucleotide; AGG chr11 5344180 5344199 5344183 -
caagtagtgagtagtactga

SEQ ID NO: 35275 - DNA, 20 bp, Artificial Sequence
  Synthetic oligonucleotide; AAG chr11 5344170 5344189 5344173 -
gtagtactgaaggattctac

SEQ ID NO: 35276 - DNA, 20 bp, Artificial Sequence
  Synthetic oligonucleotide; GAG chr11 5344168 5344187 5344171 -
agtactgaaggattctacaa

SEQ ID NO: 35277 - DNA, 20 bp, Artificial Sequence
  Synthetic oligonucleotide; AGG chr11 5344167 5344186 5344170 -
gtactgaaggattctacaag

SEQ ID NO: 35278 - DNA, 20 bp, Artificial Sequence
  Synthetic oligonucleotide; GGG chr11 5344166 5344185 5344169 -
tactgaaggattctacaaga

SEQ ID NO: 35279 - DNA, 20 bp, Artificial Sequence
  Synthetic oligonucleotide; TAG chr11 5344126 5344145 5344129 -
gaatgtctgttccccatcac

SEQ ID NO: 35280 - DNA, 20 bp, Artificial Sequence
  Synthetic oligonucleotide; TGG chr11 5344112 5344131 5344115 -
catcactagtccatgaaatc

SEQ ID NO: 35281 - DNA, 20 bp, Artificial Sequence
  Synthetic oligonucleotide; GAG chr11 5344110 5344129 5344113 -
tcactagtccatgaaatctg

SEQ ID NO: 35282 - DNA, 20 bp, Artificial Sequence
  Synthetic oligonucleotide; AGG chr11 5344109 5344128 5344112 -
cactagtccatgaaatctgg

SEQ ID NO: 35283 - DNA, 20 bp, Artificial Sequence
  Synthetic oligonucleotide; AAG chr11 5344104 5344123 5344107 -
gtccatgaaatctggaggcc

SEQ ID NO: 35284 - DNA, 20 bp, Artificial Sequence
  Synthetic oligonucleotide; TAG chr11 5344074 5344093 5344077 -
ttctcaatctgactgctcct

SEQ ID NO: 35285 - DNA, 20 bp, Artificial Sequence
  Synthetic oligonucleotide; CAG chr11 5344068 5344087 5344071 -
atctgactgctccttagcta

SEQ ID NO: 35286 - DNA, 20 bp, Artificial Sequence
  Synthetic oligonucleotide; TGG chr11 5344065 5344084 5344068 -
tgactgctccttagctacag

SEQ ID NO: 35287 - DNA, 20 bp, Artificial Sequence
  Synthetic oligonucleotide; TAG chr11 5344062 5344081 5344065 -
ctgctccttagctacagtgg

SEQ ID NO: 35288 - DNA, 20 bp, Artificial Sequence
  Synthetic oligonucleotide; TGG chr11 5344059 5344078 5344062 -
ctccttagctacagtggtag

SEQ ID NO: 35289 - DNA, 20 bp, Artificial Sequence
  Synthetic oligonucleotide; CAG chr11 5344056 5344075 5344059 -
cttagctacagtggtagtgg

SEQ ID NO: 35290 - DNA, 20 bp, Artificial Sequence
  Synthetic oligonucleotide; GAG chr11 5344054 5344073 5344057 -
tagctacagtggtagtggca

SEQ ID NO: 35291 - DNA, 20 bp, Artificial Sequence
  Synthetic oligonucleotide; TAG chr11 5344026 5344045 5344029 -
cttcccacacttttctttct

SEQ ID NO: 35292 - DNA, 20 bp, Artificial Sequence
  Synthetic oligonucleotide; AGG chr11 5344025 5344044 5344028 -
ttcccacacttttctttctt

SEQ ID NO: 35293 - DNA, 20 bp, Artificial Sequence
  Synthetic oligonucleotide; GAG chr11 5344017 5344036 5344020 -
cttttctttcttaggctgtt

SEQ ID NO: 35294 - DNA, 20 bp, Artificial Sequence
  Synthetic oligonucleotide; TAG chr11 5344010 5344029 5344013 -
ttcttaggctgttgagactt

SEQ ID NO: 35295 - DNA, 20 bp, Artificial Sequence
  Synthetic oligonucleotide; CAG chr11 5343998 5344017 5344001 -
tgagactttagctgataatt

SEQ ID NO: 35296 - DNA, 20 bp, Artificial Sequence
  Synthetic oligonucleotide; AGG chr11 5343997 5344016 5344000 -
gagactttagctgataattc

SEQ ID NO: 35297 - DNA, 20 bp, Artificial Sequence
  Synthetic oligonucleotide; AAG chr11 5343993 5344012 5343996 -
ctttagctgataattcaggt

SEQ ID NO: 35298 - DNA, 20 bp, Artificial Sequence
  Synthetic oligonucleotide; CAG chr11 5343980 5343999 5343983 -
ttcaggtaagtctttacatg

SEQ ID NO: 35299 - DNA, 20 bp, Artificial Sequence
  Synthetic oligonucleotide; AGG chr11 5343979 5343998 5343982 -
tcaggtaagtctttacatgc

SEQ ID NO: 35300 - DNA, 20 bp, Artificial Sequence
  Synthetic oligonucleotide; TGG chr11 5343970 5343989 5343973 -
tctttacatgcaggaaaatg

SEQ ID NO: 35301 - DNA, 20 bp, Artificial Sequence
  Synthetic oligonucleotide; TAG chr11 5343965 5343984 5343968 -
acatgcaggaaaatgtggat

SEQ ID NO: 35302 - DNA, 20 bp, Artificial Sequence
  Synthetic oligonucleotide; AGG chr11 5343964 5343983 5343967 -
catgcaggaaaatgtggatt

SEQ ID NO: 35303 - DNA, 20 bp, Artificial Sequence
  Synthetic oligonucleotide; GGG chr11 5343963 5343982 5343966 -
atgcaggaaaatgtggatta

SEQ ID NO: 35304 - DNA, 20 bp, Artificial Sequence
  Synthetic oligonucleotide; AAG chr11 5343948 5343967 5343951 -
gattagggatcactactgtg

SEQ ID NO: 35305 - DNA, 20 bp, Artificial Sequence
  Synthetic oligonucleotide; AGG chr11 5343947 5343966 5343950 -
attagggatcactactgtga

SEQ ID NO: 35306 - DNA, 20 bp, Artificial Sequence
  Synthetic oligonucleotide; CAG chr11 5343938 5343957 5343941 -
cactactgtgaaggcaatta

SEQ ID NO: 35307 - DNA, 20 bp, Artificial Sequence
  Synthetic oligonucleotide; AGG chr11 5343937 5343956 5343940 -
actactgtgaaggcaattac

SEQ ID NO: 35308 - DNA, 20 bp, Artificial Sequence
  Synthetic oligonucleotide; TAG chr11 5343932 5343951 5343935 -
tgtgaaggcaattacaggtt

SEQ ID NO: 35309 - DNA, 20 bp, Artificial Sequence
  Synthetic oligonucleotide; AGG chr11 5343931 5343950 5343934 -
gtgaaggcaattacaggttt

SEQ ID NO: 35310 - DNA, 20 bp, Artificial Sequence
  Synthetic oligonucleotide; TGG chr11 5343928 5343947 5343931 -
aaggcaattacaggtttagg

SEQ ID NO: 35311 - DNA, 20 bp, Artificial Sequence
  Synthetic oligonucleotide; TAG chr11 5343925 5343944 5343928 -
gcaattacaggtttaggtgg

SEQ ID NO: 35312 - DNA, 20 bp, Artificial Sequence
  Synthetic oligonucleotide; CAG chr11 5343920 5343939 5343923 -
tacaggtttaggtggtagac

SEQ ID NO: 35313 - DNA, 20 bp, Artificial Sequence
  Synthetic oligonucleotide; TAG chr11 5343909 5343928 5343912 -
gtggtagaccagaaaaaaat

SEQ ID NO: 35314 - DNA, 20 bp, Artificial Sequence
  Synthetic oligonucleotide; TAG chr11 5343903 5343922 5343906 -
gaccagaaaaaaattagtgt

SEQ ID NO: 35315 - DNA, 20 bp, Artificial Sequence
  Synthetic oligonucleotide; TGG chr11 5343895 5343914 5343898 -
aaaaattagtgttagctttc

SEQ ID NO: 35316 - DNA, 20 bp, Artificial Sequence
  Synthetic oligonucleotide; TAG chr11 5343872 5343891 5343875 -
aaatccccttgaatgcccca

SEQ ID NO: 35317 - DNA, 20 bp, Artificial Sequence
  Synthetic oligonucleotide; TAG chr11 5343845 5343864 5343848 -
cgaattctttaaaatctgca

SEQ ID NO: 35318 - DNA, 20 bp, Artificial Sequence
  Synthetic oligonucleotide; AAG chr11 5343840 5343859 5343843 -
tctttaaaatctgcatagtt

SEQ ID NO: 35319 - DNA, 20 bp, Artificial Sequence
  Synthetic oligonucleotide; AGG chr11 5343839 5343858 5343842 -
ctttaaaatctgcatagtta

SEQ ID NO: 35320 - DNA, 20 bp, Artificial Sequence
  Synthetic oligonucleotide; GGG chr11 5343838 5343857 5343841 -
tttaaaatctgcatagttaa

SEQ ID NO: 35321 - DNA, 20 bp, Artificial Sequence
  Synthetic oligonucleotide; CAG chr11 5343832 5343851 5343835 -
atctgcatagttaagggtaa

SEQ ID NO: 35322 - DNA, 20 bp, Artificial Sequence
  Synthetic oligonucleotide; TAG chr11 5343827 5343846 5343830 -
catagttaagggtaacagtt

SEQ ID NO: 35323 - DNA, 20 bp, Artificial Sequence
  Synthetic oligonucleotide; AAG chr11 5343824 5343843 5343827 -
agttaagggtaacagtttag

SEQ ID NO: 35324 - DNA, 20 bp, Artificial Sequence
  Synthetic oligonucleotide; TAG chr11 5343818 5343837 5343821 -
gggtaacagtttagaagttg

SEQ ID NO: 35325 - DNA, 20 bp, Artificial Sequence
  Synthetic oligonucleotide; AAG chr11 5343795 5343814 5343798 -
tttacataattttttttctg

SEQ ID NO: 35326 - DNA, 20 bp, Artificial Sequence
  Synthetic oligonucleotide; GAG chr11 5343793 5343812 5343796 -
tacataattttttttctgaa

SEQ ID NO: 35327 - DNA, 20 bp, Artificial Sequence
  Synthetic oligonucleotide; CAG chr11 5343770 5343789 5343773 -
aatgcttaaatgcatataaa

SEQ ID NO: 35328 - DNA, 20 bp, Artificial Sequence
  Synthetic oligonucleotide; AAG chr11 5343757 5343776 5343760 -
atataaacagttgaaactcc

SEQ ID NO: 35329 - DNA, 20 bp, Artificial Sequence
  Synthetic oligonucleotide; TAG chr11 5343742 5343761 5343745 -
actccaagaatttgattacg

SEQ ID NO: 35330 - DNA, 20 bp, Artificial Sequence
  Synthetic oligonucleotide; AGG chr11 5343741 5343760 5343744 -
ctccaagaatttgattacgt

SEQ ID NO: 35331 - DNA, 20 bp, Artificial Sequence
  Synthetic oligonucleotide; TAG chr11 5343738 5343757 5343741 -
caagaatttgattacgtagg

SEQ ID NO: 35332 - DNA, 20 bp, Artificial Sequence
  Synthetic oligonucleotide; AGG chr11 5343737 5343756 5343740 -
aagaatttgattacgtaggt

SEQ ID NO: 35333 - DNA, 20 bp, Artificial Sequence
  Synthetic oligonucleotide; GAG chr11 5343735 5343754 5343738 -
gaatttgattacgtaggtag

SEQ ID NO: 35334 - DNA, 20 bp, Artificial Sequence
  Synthetic oligonucleotide; TAG chr11 5343731 5343750 5343734 -
ttgattacgtaggtaggaga

SEQ ID NO: 35335 - DNA, 20 bp, Artificial Sequence
  Synthetic oligonucleotide; TGG chr11 5343724 5343743 5343727 -
cgtaggtaggagatagatcc

SEQ ID NO: 35336 - DNA, 20 bp, Artificial Sequence
  Synthetic oligonucleotide; CAG chr11 5343715 5343734 5343718 -
gagatagatcctggaatgtg

SEQ ID NO: 35337 - DNA, 20 bp, Artificial Sequence
  Synthetic oligonucleotide; AAG chr11 5343710 5343729 5343713 -
agatcctggaatgtgcagtt

SEQ ID NO: 35338 - DNA, 20 bp, Artificial Sequence
  Synthetic oligonucleotide; TAG chr11 5343699 5343718 5343702 -
tgtgcagttaagaatacaaa

SEQ ID NO: 35339 - DNA, 20 bp, Artificial Sequence
  Synthetic oligonucleotide; GAG chr11 5343693 5343712 5343696 -
gttaagaatacaaatagtat

SEQ ID NO: 35340 - DNA, 20 bp, Artificial Sequence
  Synthetic oligonucleotide; GAG chr11 5343683 5343702 5343686 -
caaatagtatgagtaaccct

SEQ ID NO: 35341 - DNA, 20 bp, Artificial Sequence
  Synthetic oligonucleotide; GAG chr11 5343670 5343689 5343673 -
taaccctgagaatgtatttt

SEQ ID NO: 35342 - DNA, 20 bp, Artificial Sequence
  Synthetic oligonucleotide; TAG chr11 5343633 5343652 5343636 -
attgatgtcattattatctt

SEQ ID NO: 35343 - DNA, 20 bp, Artificial Sequence
  Synthetic oligonucleotide; AGG chr11 5343632 5343651 5343635 -
ttgatgtcattattatcttt

SEQ ID NO: 35344 - DNA, 20 bp, Artificial Sequence
  Synthetic oligonucleotide; GAG chr11 5343619 5343638 5343622 -
tatctttaggaaaaaattct

SEQ ID NO: 35345 - DNA, 20 bp, Artificial Sequence
  Synthetic oligonucleotide; TAG chr11 5343609 5343628 5343612 -
aaaaaattctgagaatgata

SEQ ID NO: 35346 - DNA, 20 bp, Artificial Sequence
  Synthetic oligonucleotide; AAG chr11 5343603 5343622 5343606 -
ttctgagaatgatatagtcg

SEQ ID NO: 35347 - DNA, 20 bp, Artificial Sequence
  Synthetic oligonucleotide; AAG chr11 5343590 5343609 5343593 -
atagtcgaagtgataccttg

SEQ ID NO: 35348 - DNA, 20 bp, Artificial Sequence
  Synthetic oligonucleotide; AGG chr11 5343589 5343608 5343592 -
tagtcgaagtgataccttga

SEQ ID NO: 35349 - DNA, 20 bp, Artificial Sequence
  Synthetic oligonucleotide; TAG chr11 5343586 5343605 5343589 -
tcgaagtgataccttgaagg

SEQ ID NO: 35350 - DNA, 20 bp, Artificial Sequence
  Synthetic oligonucleotide; TGG chr11 5343571 5343590 5343574 -
gaaggtagaactgtgcactg

SEQ ID NO: 35351 - DNA, 20 bp, Artificial Sequence
  Synthetic oligonucleotide; CAG chr11 5343562 5343581 5343565 -
actgtgcactgtggtaataa

SEQ ID NO: 35352 - DNA, 20 bp, Artificial Sequence
  Synthetic oligonucleotide; CAG chr11 5343556 5343575 5343559 -
cactgtggtaataacagaaa

SEQ ID NO: 35353 - DNA, 20 bp, Artificial Sequence
  Synthetic oligonucleotide; AAG chr11 5343552 5343571 5343555 -
gtggtaataacagaaacaga

SEQ ID NO: 35354 - DNA, 20 bp, Artificial Sequence
  Synthetic oligonucleotide; CAG chr11 5343529 5343548 5343532 -
acatttcttctatataaacc

SEQ ID NO: 35355 - DNA, 20 bp, Artificial Sequence
  Synthetic oligonucleotide; AGG chr11 5343528 5343547 5343531 -
catttcttctatataaaccc

SEQ ID NO: 35356 - DNA, 20 bp, Artificial Sequence
  Synthetic oligonucleotide; CAG chr11 5343517 5343536 5343520 -
tataaacccaggatgtcgtc

SEQ ID NO: 35357 - DNA, 20 bp, Artificial Sequence
  Synthetic oligonucleotide; CGG chr11 5343514 5343533 5343517 -
aaacccaggatgtcgtccag

SEQ ID NO: 35358 - DNA, 20 bp, Artificial Sequence
  Synthetic oligonucleotide; CAG chr11 5343511 5343530 5343514 -
cccaggatgtcgtccagcgg

SEQ ID NO: 35359 - DNA, 20 bp, Artificial Sequence
  Synthetic oligonucleotide; TGG chr11 5343487 5343506 5343490 -
tcccatcccttcctattgac

SEQ ID NO: 35360 - DNA, 20 bp, Artificial Sequence
  Synthetic oligonucleotide; CAG chr11 5343479 5343498 5343482 -
cttcctattgactggttttc

SEQ ID NO: 35361 - DNA, 20 bp, Artificial Sequence
  Synthetic oligonucleotide; AGG chr11 5343478 5343497 5343481 -
ttcctattgactggttttcc

SEQ ID NO: 35362 - DNA, 20 bp, Artificial Sequence
  Synthetic oligonucleotide; TGG chr11 5343473 5343492 5343476 -
attgactggttttccaggct

SEQ ID NO: 35363 - DNA, 20 bp, Artificial Sequence
  Synthetic oligonucleotide; GAG chr11 5343471 5343490 5343474 -
tgactggttttccaggcttg

SEQ ID NO: 35364 - DNA, 20 bp, Artificial Sequence
  Synthetic oligonucleotide; AGG chr11 5343470 5343489 5343473 -
gactggttttccaggcttgg

SEQ ID NO: 35365 - DNA, 20 bp, Artificial Sequence
  Synthetic oligonucleotide; AAG chr11 5343467 5343486 5343470 -
tggttttccaggcttggagg

SEQ ID NO: 35366 - DNA, 20 bp, Artificial Sequence
  Synthetic oligonucleotide; TGG chr11 5343456 5343475 5343459 -
gcttggaggaagctcatcac

SEQ ID NO: 35367 - DNA, 20 bp, Artificial Sequence
  Synthetic oligonucleotide; TGG chr11 5343412 5343431 5343415 -
atgtatatatccatcctttt

SEQ ID NO: 35368 - DNA, 20 bp, Artificial Sequence
  Synthetic oligonucleotide; TGG chr11 5343406 5343425 5343409 -
atatccatcctttttggcaa

SEQ ID NO: 35369 - DNA, 20 bp, Artificial Sequence
  Synthetic oligonucleotide; AAG chr11 5343384 5343403 5343387 -
gcaccctccttcttctcatt

SEQ ID NO: 35370 - DNA, 20 bp, Artificial Sequence
  Synthetic oligonucleotide; AGG chr11 5343383 5343402 5343386 -
caccctccttcttctcatta

SEQ ID NO: 35371 - DNA, 20 bp, Artificial Sequence
  Synthetic oligonucleotide; AAG chr11 5343380 5343399 5343383 -
cctccttcttctcattaagg

SEQ ID NO: 35372 - DNA, 20 bp, Artificial Sequence
  Synthetic oligonucleotide; GAG chr11 5343363 5343382 5343366 -
aggaagatcacaatcttcat

SEQ ID NO: 35373 - DNA, 20 bp, Artificial Sequence
  Synthetic oligonucleotide; TGG chr11 5343344 5343363 5343347 -
tgagcccatgtacttctttc

SEQ ID NO: 35374 - DNA, 20 bp, Artificial Sequence
  Synthetic oligonucleotide; TGG chr11 5343335 5343354 5343338 -
gtacttctttctggccatgc

SEQ ID NO: 35375 - DNA, 20 bp, Artificial Sequence
  Synthetic oligonucleotide; CAG chr11 5343326 5343345 5343329 -
tctggccatgctggctgcca

SEQ ID NO: 35376 - DNA, 20 bp, Artificial Sequence
  Synthetic oligonucleotide; TGG chr11 5343320 5343339 5343323 -
catgctggctgccacagacc

SEQ ID NO: 35377 - DNA, 20 bp, Artificial Sequence
  Synthetic oligonucleotide; GGG chr11 5343319 5343338 5343322 -
atgctggctgccacagacct

SEQ ID NO: 35378 - DNA, 20 bp, Artificial Sequence
  Synthetic oligonucleotide; GGG chr11 5343318 5343337 5343321 -
tgctggctgccacagacctg

SEQ ID NO: 35379 - DNA, 20 bp, Artificial Sequence
  Synthetic oligonucleotide; TGG chr11 5343314 5343333 5343317 -
ggctgccacagacctggggc

SEQ ID NO: 35380 - DNA, 20 bp, Artificial Sequence
  Synthetic oligonucleotide; CGG chr11 5343293 5343312 5343296 -
ggccctgaccacaatgccca

SEQ ID NO: 35381 - DNA, 20 bp, Artificial Sequence
  Synthetic oligonucleotide; TGG chr11 5343287 5343306 5343290 -
gaccacaatgcccacggtgc

SEQ ID NO: 35382 - DNA, 20 bp, Artificial Sequence
  Synthetic oligonucleotide; GGG chr11 5343286 5343305 5343289 -
accacaatgcccacggtgct

SEQ ID NO: 35383 - DNA, 20 bp, Artificial Sequence
  Synthetic oligonucleotide; GAG chr11 5343284 5343303 5343287 -
cacaatgcccacggtgctgg

SEQ ID NO: 35384 - DNA, 20 bp, Artificial Sequence
  Synthetic oligonucleotide; TGG chr11 5343276 5343295 5343279 -
ccacggtgctgggagtcctc

SEQ ID NO: 35385 - DNA, 20 bp, Artificial Sequence
  Synthetic oligonucleotide; TGG chr11 5343272 5343291 5343275 -
ggtgctgggagtcctctggc

SEQ ID NO: 35386 - DNA, 20 bp, Artificial Sequence
  Synthetic oligonucleotide; CAG chr11 5343265 5343284 5343268 -
ggagtcctctggctggatca

SEQ ID NO: 35387 - DNA, 20 bp, Artificial Sequence
  Synthetic oligonucleotide; AGG chr11 5343264 5343283 5343267 -
gagtcctctggctggatcac

SEQ ID NO: 35388 - DNA, 20 bp, Artificial Sequence
  Synthetic oligonucleotide; GGG chr11 5343263 5343282 5343266 -
agtcctctggctggatcaca

SEQ ID NO: 35389 - DNA, 20 bp, Artificial Sequence
  Synthetic oligonucleotide; GAG chr11 5343261 5343280 5343264 -
tcctctggctggatcacagg

SEQ ID NO: 35390 - DNA, 20 bp, Artificial Sequence
  Synthetic oligonucleotide; TGG chr11 5343256 5343275 5343259 -
tggctggatcacagggagat

SEQ ID NO: 35391 - DNA, 20 bp, Artificial Sequence
  Synthetic oligonucleotide; AAG chr11 5343253 5343272 5343256 -
ctggatcacagggagattgg

SEQ ID NO: 35392 - DNA, 20 bp, Artificial Sequence
  Synthetic oligonucleotide; CGG chr11 5343248 5343267 5343251 -
tcacagggagattggaagtg

SEQ ID NO: 35393 - DNA, 20 bp, Artificial Sequence
  Synthetic oligonucleotide; CAG chr11 5343234 5343253 5343237 -
gaagtgcggcctgcttttcc

SEQ ID NO: 35394 - DNA, 20 bp, Artificial Sequence
  Synthetic oligonucleotide; AGG chr11 5343233 5343252 5343236 -
aagtgcggcctgcttttccc

SEQ ID NO: 35395 - DNA, 20 bp, Artificial Sequence
  Synthetic oligonucleotide; GAG chr11 5343201 5343220 5343204 -
tacactcactttcctttctc

SEQ ID NO: 35396 - DNA, 20 bp, Artificial Sequence
  Synthetic oligonucleotide; TGG chr11 5343196 5343215 5343199 -
tcactttcctttctcgagtc

SEQ ID NO: 35397 - DNA, 20 bp, Artificial Sequence
  Synthetic oligonucleotide; TGG chr11 5343179 5343198 5343182 -
gtctggcattctgcttgcca

SEQ ID NO: 35398 - DNA, 20 bp, Artificial Sequence
  Synthetic oligonucleotide; TAG chr11 5343142 5343161 5343145 -
attgccatctgcaaccctct

SEQ ID NO: 35399 - DNA, 20 bp, Artificial Sequence
  Synthetic oligonucleotide; GAG chr11 5343113 5343132 5343116 -
ctctgtacttactaatactc

SEQ ID NO: 35400 - DNA, 20 bp, Artificial Sequence
  Synthetic oligonucleotide; TAG chr11 5343110 5343129 5343113 -
tgtacttactaatactcgag

SEQ ID NO: 35401 - DNA, 20 bp, Artificial Sequence
  Synthetic oligonucleotide; AAG chr11 5343105 5343124 5343108 -
ttactaatactcgagtagtg

SEQ ID NO: 35402 - DNA, 20 bp, Artificial Sequence
  Synthetic oligonucleotide; TGG chr11 5343100 5343119 5343103 -
aatactcgagtagtgaagat

SEQ ID NO: 35403 - DNA, 20 bp, Artificial Sequence
  Synthetic oligonucleotide; GGG chr11 5343099 5343118 5343102 -
atactcgagtagtgaagatt

SEQ ID NO: 35404 - DNA, 20 bp, Artificial Sequence
  Synthetic oligonucleotide; TGG chr11 5343095 5343114 5343098 -
tcgagtagtgaagattgggc

SEQ ID NO: 35405 - DNA, 20 bp, Artificial Sequence
  Synthetic oligonucleotide; GGG chr11 5343094 5343113 5343097 -
cgagtagtgaagattgggct

SEQ ID NO: 35406 - DNA, 20 bp, Artificial Sequence
  Synthetic oligonucleotide; GAG chr11 5343092 5343111 5343095 -
agtagtgaagattgggctgg

SEQ ID NO: 35407 - DNA, 20 bp, Artificial Sequence
  Synthetic oligonucleotide; GAG chr11 5343082 5343101 5343085 -
attgggctgggagttctgat

SEQ ID NO: 35408 - DNA, 20 bp, Artificial Sequence
  Synthetic oligonucleotide; AGG chr11 5343081 5343100 5343084 -
ttgggctgggagttctgatg

SEQ ID NO: 35409 - DNA, 20 bp, Artificial Sequence
  Synthetic oligonucleotide; GGG chr11 5343080 5343099 5343083 -
tgggctgggagttctgatga

SEQ ID NO: 35410 - DNA, 20 bp, Artificial Sequence
  Synthetic oligonucleotide; GGG chr11 5343079 5343098 5343082 -
gggctgggagttctgatgag

SEQ ID NO: 35411 - DNA, 20 bp, Artificial Sequence
  Synthetic oligonucleotide; CAG chr11 5343052 5343071 5343055 -
gtatccgttgttcccccaat

SEQ ID NO: 35412 - DNA, 20 bp, Artificial Sequence
  Synthetic oligonucleotide; AGG chr11 5343051 5343070 5343054 -
tatccgttgttcccccaatc

SEQ ID NO: 35413 - DNA, 20 bp, Artificial Sequence
  Synthetic oligonucleotide; CAG chr11 5342988 5343007 5342991 -
cacatgcattctgccttcac

SEQ ID NO: 35414 - DNA, 20 bp, Artificial Sequence
  Synthetic oligonucleotide; AGG chr11 5342987 5343006 5342990 -
acatgcattctgccttcacc

SEQ ID NO: 35415 - DNA, 20 bp, Artificial Sequence
  Synthetic oligonucleotide; CAG chr11 5342936 5342955 5342939 -
caccttcaaccgactgtacc

SEQ ID NO: 35416 - DNA, 20 bp, Artificial Sequence
  Synthetic oligonucleotide; TAG chr11 5342924 5342943 5342927 -
actgtacccagctgtgcttg

SEQ ID NO: 35417 - DNA, 20 bp, Artificial Sequence
  Synthetic oligonucleotide; TGG chr11 5342906 5342925 5342909 -
tgtagtctttatatttgtgc

SEQ ID NO: 35418 - DNA, 20 bp, Artificial Sequence
  Synthetic oligonucleotide; AAG chr11 5342865 5342884 5342868 -
tctcctatgtgttgatactc

SEQ ID NO: 35419 - DNA, 20 bp, Artificial Sequence
  Synthetic oligonucleotide; GAG chr11 5342854 5342873 5342857 -
ttgatactcaagactgtcct

SEQ ID NO: 35420 - DNA, 20 bp, Artificial Sequence
  Synthetic oligonucleotide; CAG chr11 5342842 5342861 5342845 -
actgtcctgagcattgcctc

SEQ ID NO: 35421 - DNA, 20 bp, Artificial Sequence
  Synthetic oligonucleotide; GAG chr11 5342840 5342859 5342843 -
tgtcctgagcattgcctcca

SEQ ID NO: 35422 - DNA, 20 bp, Artificial Sequence
  Synthetic oligonucleotide; GAG chr11 5342838 5342857 5342841 -
tcctgagcattgcctccaga

SEQ ID NO: 35423 - DNA, 20 bp, Artificial Sequence
  Synthetic oligonucleotide; AGG chr11 5342837 5342856 5342840 -
cctgagcattgcctccagag

SEQ ID NO: 35424 - DNA, 20 bp, Artificial Sequence
  Synthetic oligonucleotide; GAG chr11 5342835 5342854 5342838 -
tgagcattgcctccagagag

SEQ ID NO: 35425 - DNA, 20 bp, Artificial Sequence
  Synthetic oligonucleotide; GAG chr11 5342833 5342852 5342836 -
agcattgcctccagagagga

SEQ ID NO: 35426 - DNA, 20 bp, Artificial Sequence
  Synthetic oligonucleotide; AGG chr11 5342832 5342851 5342835 -
gcattgcctccagagaggag

SEQ ID NO: 35427 - DNA, 20 bp, Artificial Sequence
  Synthetic oligonucleotide; GGG chr11 5342831 5342850 5342834 -
cattgcctccagagaggaga

SEQ ID NO: 35428 - DNA, 20 bp, Artificial Sequence
  Synthetic oligonucleotide; AAG chr11 5342826 5342845 5342829 -
cctccagagaggagagggcc

SEQ ID NO: 35429 - DNA, 20 bp, Artificial Sequence
  Synthetic oligonucleotide; AGG chr11 5342825 5342844 5342828 -
ctccagagaggagagggcca

SEQ ID NO: 35430 - DNA, 20 bp, Artificial Sequence
  Synthetic oligonucleotide; TGG chr11 5342786 5342805 5342789 -
ctcccatatctgctgtgtcc

SEQ ID NO: 35431 - DNA, 20 bp, Artificial Sequence
  Synthetic oligonucleotide; CAG chr11 5342771 5342790 5342774 -
tgtcctggttttttatgtca

SEQ ID NO: 35432 - DNA, 20 bp, Artificial Sequence
  Synthetic oligonucleotide; TGG chr11 5342764 5342783 5342767 -
gttttttatgtcacagtgat

SEQ ID NO: 35433 - DNA, 20 bp, Artificial Sequence
  Synthetic oligonucleotide; TGG chr11 5342740 5342759 5342743 -
ttgtctctgattcatcgttt

SEQ ID NO: 35434 - DNA, 20 bp, Artificial Sequence
  Synthetic oligonucleotide; AAG chr11 5342736 5342755 5342739 -
ctctgattcatcgttttgga

SEQ ID NO: 35435 - DNA, 20 bp, Artificial Sequence
  Synthetic oligonucleotide; CAG chr11 5342733 5342752 5342736 -
tgattcatcgttttggaaag

SEQ ID NO: 35436 - DNA, 20 bp, Artificial Sequence
  Synthetic oligonucleotide; AGG chr11 5342732 5342751 5342735 -
gattcatcgttttggaaagc

SEQ ID NO: 35437 - DNA, 20 bp, Artificial Sequence
  Synthetic oligonucleotide; GAG chr11 5342704 5342723 5342707 -
catattgttcacctcattat

SEQ ID NO: 35438 - DNA, 20 bp, Artificial Sequence
  Synthetic oligonucleotide; TAG chr11 5342656 5342675 5342659 -
ctaatgaatcctataacata

SEQ ID NO: 35439 - DNA, 20 bp, Artificial Sequence
  Synthetic oligonucleotide; AAG chr11 5342649 5342668 5342652 -
atcctataacatatagtgtc

SEQ ID NO: 35440 - DNA, 20 bp, Artificial Sequence
  Synthetic oligonucleotide; AAG chr11 5342643 5342662 5342646 -
taacatatagtgtcaagacc

SEQ ID NO: 35441 - DNA, 20 bp, Artificial Sequence
  Synthetic oligonucleotide; CAG chr11 5342640 5342659 5342643 -
catatagtgtcaagaccaag

SEQ ID NO: 35442 - DNA, 20 bp, Artificial Sequence
  Synthetic oligonucleotide; CAG chr11 5342634 5342653 5342637 -
gtgtcaagaccaagcagatt

SEQ ID NO: 35443 - DNA, 20 bp, Artificial Sequence
  Synthetic oligonucleotide; TAG chr11 5342602 5342621 5342605 -
cttcacctttttactaccca

SEQ ID NO: 35444 - DNA, 20 bp, Artificial Sequence
  Synthetic oligonucleotide; TGG chr11 5342596 5342615 5342599 -
ctttttactacccatagaat

SEQ ID NO: 35445 - DNA, 20 bp, Artificial Sequence
  Synthetic oligonucleotide; CAG chr11 5342573 5342592 5342576 -
aacctgatctccaatcatca

SEQ ID NO: 35446 - DNA, 20 bp, Artificial Sequence
  Synthetic oligonucleotide; CAG chr11 5342561 5342580 5342564 -
aatcatcacagtcactctca

SEQ ID NO: 35447 - DNA, 20 bp, Artificial Sequence
  Synthetic oligonucleotide; TAG chr11 5342538 5342557 5342541 -
aatgtaaaaactctaatatt

SEQ ID NO: 35448 - DNA, 20 bp, Artificial Sequence
  Synthetic oligonucleotide; CAG chr11 5342535 5342554 5342538 -
gtaaaaactctaatatttag

SEQ ID NO: 35449 - DNA, 20 bp, Artificial Sequence
  Synthetic oligonucleotide; AGG chr11 5342534 5342553 5342537 -
taaaaactctaatatttagc

SEQ ID NO: 35450 - DNA, 20 bp, Artificial Sequence
  Synthetic oligonucleotide; GAG chr11 5342532 5342551 5342535 -
aaaactctaatatttagcag

SEQ ID NO: 35451 - DNA, 20 bp, Artificial Sequence
  Synthetic oligonucleotide; GAG chr11 5342530 5342549 5342533 -
aactctaatatttagcagga

SEQ ID NO: 35452 - DNA, 20 bp, Artificial Sequence
  Synthetic oligonucleotide; AAG chr11 5342525 5342544 5342528 -
taatatttagcaggagagca

SEQ ID NO: 35453 - DNA, 20 bp, Artificial Sequence
  Synthetic oligonucleotide; AAG chr11 5342522 5342541 5342525 -
tatttagcaggagagcaaag

SEQ ID NO: 35454 - DNA, 20 bp, Artificial Sequence
  Synthetic oligonucleotide; TAG chr11 5342510 5342529 5342513 -
gagcaaagaagtctcatatc

SEQ ID NO: 35455 - DNA, 20 bp, Artificial Sequence
  Synthetic oligonucleotide; TGG chr11 5342488 5342507 5342491 -
gcatgcatgctcatatgact

SEQ ID NO: 35456 - DNA, 20 bp, Artificial Sequence
  Synthetic oligonucleotide; TAG chr11 5342480 5342499 5342483 -
gctcatatgacttggtaaaa

SEQ ID NO: 35457 - DNA, 20 bp, Artificial Sequence
  Synthetic oligonucleotide; AGG chr11 5342479 5342498 5342482 -
ctcatatgacttggtaaaat

SEQ ID NO: 35458 - DNA, 20 bp, Artificial Sequence
  Synthetic oligonucleotide; CAG chr11 5342466 5342485 5342469 -
gtaaaataggtgttaaaata

SEQ ID NO: 35459 - DNA, 20 bp, Artificial Sequence
  Synthetic oligonucleotide; AAG chr11 5342459 5342478 5342462 -
aggtgttaaaatacagcttc

SEQ ID NO: 35460 - DNA, 20 bp, Artificial Sequence
  Synthetic oligonucleotide; AAG chr11 5342449 5342468 5342452 -
atacagcttcaagtttccct

SEQ ID NO: 35461 - DNA, 20 bp, Artificial Sequence
  Synthetic oligonucleotide; AGG chr11 5342448 5342467 5342451 -
tacagcttcaagtttcccta

SEQ ID NO: 35462 - DNA, 20 bp, Artificial Sequence
  Synthetic oligonucleotide; AAG chr11 5342436 5342455 5342439 -
tttccctaaggtatctcttt

SEQ ID NO: 35463 - DNA, 20 bp, Artificial Sequence
  Synthetic oligonucleotide; TAG chr11 5342423 5342442 5342426 -
tctctttaagcccaactctt

SEQ ID NO: 35464 - DNA, 20 bp, Artificial Sequence
  Synthetic oligonucleotide; TAG chr11 5342413 5342432 5342416 -
cccaactctttagctaaatg

SEQ ID NO: 35465 - DNA, 20 bp, Artificial Sequence
  Synthetic oligonucleotide; CGG chr11 5342379 5342398 5342382 -
ttttgttgcattcctgtaaa

SEQ ID NO: 35466 - DNA, 20 bp, Artificial Sequence
  Synthetic oligonucleotide; AAG chr11 5342365 5342384 5342368 -
tgtaaacggaatatttctct

SEQ ID NO: 35467 - DNA, 20 bp, Artificial Sequence
  Synthetic oligonucleotide; TAG chr11 5342330 5342349 5342333 -
ttattgtgataacaatacct

SEQ ID NO: 35468 - DNA, 20 bp, Artificial Sequence
  Synthetic oligonucleotide; AGG chr11 5342329 5342348 5342332 -
tattgtgataacaatacctt

SEQ ID NO: 35469 - DNA, 20 bp, Artificial Sequence
  Synthetic oligonucleotide; TGG chr11 5342319 5342338 5342322 -
acaataccttaggcatctat

SEQ ID NO: 35470 - DNA, 20 bp, Artificial Sequence
  Synthetic oligonucleotide; TGG chr11 5342281 5342300 5342284 -
actaacatatgtttatttca

SEQ ID NO: 35471 - DNA, 20 bp, Artificial Sequence
  Synthetic oligonucleotide; AAG chr11 5342274 5342293 5342277 -
tatgtttatttcatggtata

SEQ ID NO: 35472 - DNA, 20 bp, Artificial Sequence
  Synthetic oligonucleotide; TAG chr11 5342270 5342289 5342273 -
tttatttcatggtataaagt

SEQ ID NO: 35473 - DNA, 20 bp, Artificial Sequence
  Synthetic oligonucleotide; CAG chr11 5342267 5342286 5342270 -
atttcatggtataaagttag

SEQ ID NO: 35474 - DNA, 20 bp, Artificial Sequence
  Synthetic oligonucleotide; TAG chr11 5342263 5342282 5342266 -
catggtataaagttagcaga

SEQ ID NO: 35475 - DNA, 20 bp, Artificial Sequence
  Synthetic oligonucleotide; AGG chr11 5342262 5342281 5342265 -
atggtataaagttagcagat

SEQ ID NO: 35476 - DNA, 20 bp, Artificial Sequence
  Synthetic oligonucleotide; CAG chr11 5342257 5342276 5342260 -
ataaagttagcagataggaa

SEQ ID NO: 35477 - DNA, 20 bp, Artificial Sequence
  Synthetic oligonucleotide; TAG chr11 5342232 5342251 5342235 -
tcataaaaatataaaattat

SEQ ID NO: 35478 - DNA, 20 bp, Artificial Sequence
  Synthetic oligonucleotide; TGG chr11 5342228 5342247 5342231 -
aaaaatataaaattattagt

SEQ ID NO: 35479 - DNA, 20 bp, Artificial Sequence
  Synthetic oligonucleotide; GAG chr11 5342222 5342241 5342225 -
ataaaattattagttggttc

SEQ ID NO: 35480 - DNA, 20 bp, Artificial Sequence
  Synthetic oligonucleotide; TGG chr11 5342214 5342233 5342217 -
attagttggttcgagtgaaa

SEQ ID NO: 35481 - DNA, 20 bp, Artificial Sequence
  Synthetic oligonucleotide; TAG chr11 5342209 5342228 5342212 -
ttggttcgagtgaaatggaa

SEQ ID NO: 35482 - DNA, 20 bp, Artificial Sequence
  Synthetic oligonucleotide; GAG chr11 5342207 5342226 5342210 -
ggttcgagtgaaatggaata

SEQ ID NO: 35483 - DNA, 20 bp, Artificial Sequence
  Synthetic oligonucleotide; TGG chr11 5342202 5342221 5342205 -
gagtgaaatggaatagagtt

SEQ ID NO: 35484 - DNA, 20 bp, Artificial Sequence
  Synthetic oligonucleotide; CAG chr11 5342155 5342174 5342158 -
aactcttatgaatttctctg

SEQ ID NO: 35485 - DNA, 20 bp, Artificial Sequence
  Synthetic oligonucleotide; AGG chr11 5342154 5342173 5342157 -
actcttatgaatttctctgc

SEQ ID NO: 35486 - DNA, 20 bp, Artificial Sequence
  Synthetic oligonucleotide; TGG chr11 5342136 5342155 5342139 -
gcaggtgtccatacaaacaa

SEQ ID NO: 35487 - DNA, 20 bp, Artificial Sequence
  Synthetic oligonucleotide; GGG chr11 5342135 5342154 5342138 -
caggtgtccatacaaacaat

SEQ ID NO: 35488 - DNA, 20 bp, Artificial Sequence
  Synthetic oligonucleotide; TGG chr11 5342120 5342139 5342123 -
acaatgggaacctataaatt

SEQ ID NO: 35489 - DNA, 20 bp, Artificial Sequence
  Synthetic oligonucleotide; AAG chr11 5342111 5342130 5342114 -
acctataaatttggtcactg

SEQ ID NO: 35490 - DNA, 20 bp, Artificial Sequence
  Synthetic oligonucleotide; CAG chr11 5342106 5342125 5342109 -
taaatttggtcactgaagtc

SEQ ID NO: 35491 - DNA, 20 bp, Artificial Sequence
  Synthetic oligonucleotide; AGG chr11 5342105 5342124 5342108 -
aaatttggtcactgaagtcc

SEQ ID NO: 35492 - DNA, 20 bp, Artificial Sequence
  Synthetic oligonucleotide; AAG chr11 5342087 5342106 5342090 -
ccaggaattttcctgcaaaa

SEQ ID NO: 35493 - DNA, 20 bp, Artificial Sequence
  Synthetic oligonucleotide; CAG chr11 5342066 5342085 5342069 -
agaatataatcttctttgat

SEQ ID NO: 35494 - DNA, 20 bp, Artificial Sequence
  Synthetic oligonucleotide; CAG chr11 5342039 5342058 5342042 -
ctaattacttatcatctcaa

SEQ ID NO: 35495 - DNA, 20 bp, Artificial Sequence
  Synthetic oligonucleotide; TAG chr11 5342034 5342053 5342037 -
tacttatcatctcaacagtc

SEQ ID NO: 35496 - DNA, 20 bp, Artificial Sequence
  Synthetic oligonucleotide; TGG chr11 5342030 5342049 5342033 -
tatcatctcaacagtctagt

SEQ ID NO: 35497 - DNA, 20 bp, Artificial Sequence
  Synthetic oligonucleotide; AAG chr11 5341961 5341980 5341964 -
taaactcatatttattcccc

SEQ ID NO: 35498 - DNA, 20 bp, Artificial Sequence
  Synthetic oligonucleotide; AGG chr11 5341960 5341979 5341963 -
aaactcatatttattcccca

SEQ ID NO: 35499 - DNA, 20 bp, Artificial Sequence
  Synthetic oligonucleotide; CAG chr11 5341957 5341976 5341960 -
ctcatatttattccccaagg

SEQ ID NO: 35500 - DNA, 20 bp, Artificial Sequence
  Synthetic oligonucleotide; GAG chr11 5341922 5341941 5341925 -
aacttgtaacaaaaaaatgt

SEQ ID NO: 35501 - DNA, 20 bp, Artificial Sequence
  Synthetic oligonucleotide; AAG chr11 5341919 5341938 5341922 -
ttgtaacaaaaaaatgtgag

SEQ ID NO: 35502 - DNA, 20 bp, Artificial Sequence
  Synthetic oligonucleotide; GAG chr11 5341917 5341936 5341920 -
gtaacaaaaaaatgtgagaa

SEQ ID NO: 35503 - DNA, 20 bp, Artificial Sequence
  Synthetic oligonucleotide; AGG chr11 5341916 5341935 5341919 -
taacaaaaaaatgtgagaag

SEQ ID NO: 35504 - DNA, 20 bp, Artificial Sequence
  Synthetic oligonucleotide; CGG chr11 5341908 5341927 5341911 -
aaatgtgagaagaggaatca

SEQ ID NO: 35505 - DNA, 20 bp, Artificial Sequence
  Synthetic oligonucleotide; GAG chr11 5341899 5341918 5341902 -
aagaggaatcacggataaat

SEQ ID NO: 35506 - DNA, 20 bp, Artificial Sequence
  Synthetic oligonucleotide; GAG chr11 5341897 5341916 5341900 -
gaggaatcacggataaatga

SEQ ID NO: 35507 - DNA, 20 bp, Artificial Sequence
  Synthetic oligonucleotide; AGG chr11 5341896 5341915 5341899 -
aggaatcacggataaatgag

SEQ ID NO: 35508 - DNA, 20 bp, Artificial Sequence
  Synthetic oligonucleotide; TAG chr11 5341890 5341909 5341893 -
cacggataaatgagaggacg

SEQ ID NO: 35509 - DNA, 20 bp, Artificial Sequence
  Synthetic oligonucleotide; CAG chr11 5341884 5341903 5341887 -
taaatgagaggacgtagaca

SEQ ID NO: 35510 - DNA, 20 bp, Artificial Sequence
  Synthetic oligonucleotide; CAG chr11 5341880 5341899 5341883 -
tgagaggacgtagacacagt

SEQ ID NO: 35511 - DNA, 20 bp, Artificial Sequence
  Synthetic oligonucleotide; TAG chr11 5341837 5341856 5341840 -
tcattcttattctactaccc

SEQ ID NO: 35512 - DNA, 20 bp, Artificial Sequence
  Synthetic oligonucleotide; TAG chr11 5341830 5341849 5341833 -
tattctactaccctagttgc

SEQ ID NO: 35513 - DNA, 20 bp, Artificial Sequence
  Synthetic oligonucleotide; GAG chr11 5341817 5341836 5341820 -
tagttgctagctccaatgtt

SEQ ID NO: 35514 - DNA, 20 bp, Artificial Sequence
  Synthetic oligonucleotide; AGG chr11 5341816 5341835 5341819 -
agttgctagctccaatgttg

SEQ ID NO: 35515 - DNA, 20 bp, Artificial Sequence
  Synthetic oligonucleotide; CAG chr11 5341806 5341825 5341809 -
tccaatgttgaggccatcct

SEQ ID NO: 35516 - DNA, 20 bp, Artificial Sequence
  Synthetic oligonucleotide; TGG chr11 5341793 5341812 5341796 -
ccatcctcagatatctacgc

SEQ ID NO: 35517 - DNA, 20 bp, Artificial Sequence
  Synthetic oligonucleotide; TAG chr11 5341785 5341804 5341788 -
agatatctacgctggctgac

SEQ ID NO: 35518 - DNA, 20 bp, Artificial Sequence
  Synthetic oligonucleotide; TAG chr11 5341775 5341794 5341778 -
gctggctgactagtccaaat

SEQ ID NO: 35519 - DNA, 20 bp, Artificial Sequence
  Synthetic oligonucleotide; TGG chr11 5341772 5341791 5341775 -
ggctgactagtccaaattag

SEQ ID NO: 35520 - DNA, 20 bp, Artificial Sequence
  Synthetic oligonucleotide; AAG chr11 5341769 5341788 5341772 -
tgactagtccaaattagtgg

SEQ ID NO: 35521 - DNA, 20 bp, Artificial Sequence
  Synthetic oligonucleotide; GAG chr11 5341767 5341786 5341770 -
actagtccaaattagtggaa

SEQ ID NO: 35522 - DNA, 20 bp, Artificial Sequence
  Synthetic oligonucleotide; CAG chr11 5341763 5341782 5341766 -
gtccaaattagtggaagaga

SEQ ID NO: 35523 - DNA, 20 bp, Artificial Sequence
  Synthetic oligonucleotide; AAG chr11 5341733 5341752 5341736 -
accctccttttgctatgaaa

SEQ ID NO: 35524 - DNA, 20 bp, Artificial Sequence
  Synthetic oligonucleotide; AGG chr11 5341732 5341751 5341735 -
ccctccttttgctatgaaaa

SEQ ID NO: 35525 - DNA, 20 bp, Artificial Sequence
  Synthetic oligonucleotide; AAG chr11 5341725 5341744 5341728 -
tttgctatgaaaaaggtctg

SEQ ID NO: 35526 - DNA, 20 bp, Artificial Sequence
  Synthetic oligonucleotide; AGG chr11 5341724 5341743 5341727 -
ttgctatgaaaaaggtctga

SEQ ID NO: 35527 - DNA, 20 bp, Artificial Sequence
  Synthetic oligonucleotide; TAG chr11 5341709 5341728 5341712 -
tctgaaggaacaaaaaaaaa

SEQ ID NO: 35528 - DNA, 20 bp, Artificial Sequence
  Synthetic oligonucleotide; AGG chr11 5341708 5341727 5341711 -
ctgaaggaacaaaaaaaaat

SEQ ID NO: 35529 - DNA, 20 bp, Artificial Sequence
  Synthetic oligonucleotide; AAG chr11 5341689 5341708 5341692 -
taggtttctgcatttttttg

SEQ ID NO: 35530 - DNA, 20 bp, Artificial Sequence
  Synthetic oligonucleotide; AAG chr11 5341646 5341665 5341649 -
acattctgattccatgtaat

SEQ ID NO: 35531 - DNA, 20 bp, Artificial Sequence
  Synthetic oligonucleotide; AAG chr11 5341630 5341649 5341633 -
taataagtgtaaatttccca

SEQ ID NO: 35532 - DNA, 20 bp, Artificial Sequence
  Synthetic oligonucleotide; GAG chr11 5341586 5341605 5341589 -
tttgattaaaattgtctgat

SEQ ID NO: 35533 - DNA, 20 bp, Artificial Sequence
  Synthetic oligonucleotide; TAG chr11 5341582 5341601 5341585 -
attaaaattgtctgatgagt

SEQ ID NO: 35534 - DNA, 20 bp, Artificial Sequence
  Synthetic oligonucleotide; AGG chr11 5341581 5341600 5341584 -
ttaaaattgtctgatgagtt

SEQ ID NO: 35535 - DNA, 20 bp, Artificial Sequence
  Synthetic oligonucleotide; AAG chr11 5341578 5341597 5341581 -
aaattgtctgatgagttagg

SEQ ID NO: 35536 - DNA, 20 bp, Artificial Sequence
  Synthetic oligonucleotide; AGG chr11 5341577 5341596 5341580 -
aattgtctgatgagttagga

SEQ ID NO: 35537 - DNA, 20 bp, Artificial Sequence
  Synthetic oligonucleotide; GGG chr11 5341576 5341595 5341579 -
attgtctgatgagttaggaa

SEQ ID NO: 35538 - DNA, 20 bp, Artificial Sequence
  Synthetic oligonucleotide; AAG chr11 5341544 5341563 5341547 -
tcaatttaaaatatcctaaa

SEQ ID NO: 35539 - DNA, 20 bp, Artificial Sequence
  Synthetic oligonucleotide; GAG chr11 5341542 5341561 5341545 -
aatttaaaatatcctaaaaa

SEQ ID NO: 35540 - DNA, 20 bp, Artificial Sequence
  Synthetic oligonucleotide; AGG chr11 5341541 5341560 5341544 -
atttaaaatatcctaaaaag

SEQ ID NO: 35541 - DNA, 20 bp, Artificial Sequence
  Synthetic oligonucleotide; GGG chr11 5341540 5341559 5341543 -
tttaaaatatcctaaaaaga

SEQ ID NO: 35542 - DNA, 20 bp, Artificial Sequence
  Synthetic oligonucleotide; GAG chr11 5341538 5341557 5341541 -
taaaatatcctaaaaagagg

SEQ ID NO: 35543 - DNA, 20 bp, Artificial Sequence
  Synthetic oligonucleotide; AGG chr11 5341537 5341556 5341540 -
aaaatatcctaaaaagaggg

SEQ ID NO: 35544 - DNA, 20 bp, Artificial Sequence
  Synthetic oligonucleotide; CAG chr11 5341511 5341530 5341514 -
tgtcttaattatactttaat

SEQ ID NO: 35545 - DNA, 20 bp, Artificial Sequence
  Synthetic oligonucleotide; GAG chr11 5341509 5341528 5341512 -
tcttaattatactttaatca

SEQ ID NO: 35546 - DNA, 20 bp, Artificial Sequence
  Synthetic oligonucleotide; CAG chr11 5341492 5341511 5341495 -
tcagagcaaaaataatactt

SEQ ID NO: 35547 - DNA, 20 bp, Artificial Sequence
  Synthetic oligonucleotide; GAG chr11 5341488 5341507 5341491 -
agcaaaaataatacttcagt

SEQ ID NO: 35548 - DNA, 20 bp, Artificial Sequence
  Synthetic oligonucleotide; AAG chr11 5341483 5341502 5341486 -
aaataatacttcagtgagac

SEQ ID NO: 35549 - DNA, 20 bp, Artificial Sequence
  Synthetic oligonucleotide; GAG chr11 5341481 5341500 5341484 -
ataatacttcagtgagacaa

SEQ ID NO: 35550 - DNA, 20 bp, Artificial Sequence
  Synthetic oligonucleotide; GAG chr11 5341479 5341498 5341482 -
aatacttcagtgagacaaga

SEQ ID NO: 35551 - DNA, 20 bp, Artificial Sequence
  Synthetic oligonucleotide; AGG chr11 5341478 5341497 5341481 -
atacttcagtgagacaagag

SEQ ID NO: 35552 - DNA, 20 bp, Artificial Sequence
  Synthetic oligonucleotide; GGG chr11 5341477 5341496 5341480 -
tacttcagtgagacaagaga

SEQ ID NO: 35553 - DNA, 20 bp, Artificial Sequence
  Synthetic oligonucleotide; GGG chr11 5341476 5341495 5341479 -
acttcagtgagacaagagag

SEQ ID NO: 35554 - DNA, 20 bp, Artificial Sequence
  Synthetic oligonucleotide; TAG chr11 5341467 5341486 5341470 -
agacaagagaggggactata

SEQ ID NO: 35555 - DNA, 20 bp, Artificial Sequence
  Synthetic oligonucleotide; AAG chr11 5341464 5341483 5341467 -
caagagaggggactatatag

SEQ ID NO: 35556 - DNA, 20 bp, Artificial Sequence
  Synthetic oligonucleotide; TGG chr11 5341445 5341464 5341448 -
gaagatattgtttatgtctt

SEQ ID NO: 35557 - DNA, 20 bp, Artificial Sequence
  Synthetic oligonucleotide; CAG chr11 5341421 5341440 5341424 -
gttttaccccgatcatttta

SEQ ID NO: 35558 - DNA, 20 bp, Artificial Sequence
  Synthetic oligonucleotide; TGG chr11 5341398 5341417 5341401 -
aattgtgcacctgtgaatgt

SEQ ID NO: 35559 - DNA, 20 bp, Artificial Sequence
  Synthetic oligonucleotide; CAG chr11 5341366 5341385 5341369 -
gttcatgtttctgctttctg

SEQ ID NO: 35560 - DNA, 20 bp, Artificial Sequence
  Synthetic oligonucleotide; AGG chr11 5341365 5341384 5341368 -
ttcatgtttctgctttctgc

SEQ ID NO: 35561 - DNA, 20 bp, Artificial Sequence
  Synthetic oligonucleotide; CAG chr11 5341347 5341366 5341350 -
gcaggttgttgttctcaact

SEQ ID NO: 35562 - DNA, 20 bp, Artificial Sequence
  Synthetic oligonucleotide; CAG chr11 5341344 5341363 5341347 -
ggttgttgttctcaactcag

SEQ ID NO: 35563 - DNA, 20 bp, Artificial Sequence
  Synthetic oligonucleotide; AGG chr11 5341343 5341362 5341346 -
gttgttgttctcaactcagc

SEQ ID NO: 35564 - DNA, 20 bp, Artificial Sequence
  Synthetic oligonucleotide; AAG chr11 5341328 5341347 5341331 -
tcagcaggaaatgtcttatg

SEQ ID NO: 35565 - DNA, 20 bp, Artificial Sequence
  Synthetic oligonucleotide; TGG chr11 5341321 5341340 5341324 -
gaaatgtcttatgaagaaaa

SEQ ID NO: 35566 - DNA, 20 bp, Artificial Sequence
  Synthetic oligonucleotide; TAG chr11 5341307 5341326 5341310 -
agaaaatggcccctgctcct

SEQ ID NO: 35567 - DNA, 20 bp, Artificial Sequence
  Synthetic oligonucleotide; AGG chr11 5341306 5341325 5341309 -
gaaaatggcccctgctcctt

SEQ ID NO: 35568 - DNA, 20 bp, Artificial Sequence
  Synthetic oligonucleotide; TAG chr11 5341303 5341322 5341306 -
aatggcccctgctccttagg

SEQ ID NO: 35569 - DNA, 20 bp, Artificial Sequence
  Synthetic oligonucleotide; CAG chr11 5341300 5341319 5341303 -
ggcccctgctccttaggtag

SEQ ID NO: 35570 - DNA, 20 bp, Artificial Sequence
  Synthetic oligonucleotide; AGG chr11 5341299 5341318 5341302 -
gcccctgctccttaggtagc

SEQ ID NO: 35571 - DNA, 20 bp, Artificial Sequence
  Synthetic oligonucleotide; TAG chr11 5341293 5341312 5341296 -
gctccttaggtagcaggcca

SEQ ID NO: 35572 - DNA, 20 bp, Artificial Sequence
  Synthetic oligonucleotide; AGG chr11 5341292 5341311 5341295 -
ctccttaggtagcaggccat

SEQ ID NO: 35573 - DNA, 20 bp, Artificial Sequence
  Synthetic oligonucleotide; AAG chr11 5341264 5341283 5341267 -
actgaccctcttgccttctg

SEQ ID NO: 35574 - DNA, 20 bp, Artificial Sequence
  Synthetic oligonucleotide; AAG chr11 5341259 5341278 5341262 -
ccctcttgccttctgaagct

SEQ ID NO: 35575 - DNA, 20 bp, Artificial Sequence
  Synthetic oligonucleotide; CAG chr11 5341253 5341272 5341256 -
tgccttctgaagctaagctc

SEQ ID NO: 35576 - DNA, 20 bp, Artificial Sequence
  Synthetic oligonucleotide; CAG chr11 5341247 5341266 5341250 -
ctgaagctaagctccagctt

SEQ ID NO: 35577 - DNA, 20 bp, Artificial Sequence
  Synthetic oligonucleotide; GAG chr11 5341185 5341204 5341188 -
ttacttgctccctgtctcct

SEQ ID NO: 35578 - DNA, 20 bp, Artificial Sequence
  Synthetic oligonucleotide; GAG chr11 5341183 5341202 5341186 -
acttgctccctgtctcctga

SEQ ID NO: 35579 - DNA, 20 bp, Artificial Sequence
  Synthetic oligonucleotide; CAG chr11 5341142 5341161 5341145 -
acacatttgaatccctatct

SEQ ID NO: 35580 - DNA, 20 bp, Artificial Sequence
  Synthetic oligonucleotide; AGG chr11 5341141 5341160 5341144 -
cacatttgaatccctatctc

SEQ ID NO: 35581 - DNA, 20 bp, Artificial Sequence
  Synthetic oligonucleotide; TAG chr11 5341129 5341148 5341132 -
cctatctcaggtattgctca

SEQ ID NO: 35582 - DNA, 20 bp, Artificial Sequence
  Synthetic oligonucleotide; GAG chr11 5341127 5341146 5341130 -
tatctcaggtattgctcata

SEQ ID NO: 35583 - DNA, 20 bp, Artificial Sequence
  Synthetic oligonucleotide; GAG chr11 5341125 5341144 5341128 -
tctcaggtattgctcataga

SEQ ID NO: 35584 - DNA, 20 bp, Artificial Sequence
  Synthetic oligonucleotide; AAG chr11 5341114 5341133 5341117 -
gctcatagagagtccaactt

SEQ ID NO: 35585 - DNA, 20 bp, Artificial Sequence
  Synthetic oligonucleotide; AAG chr11 5341076 5341095 5341079 -
tatttatattctgtttcatt

SEQ ID NO: 35586 - DNA, 20 bp, Artificial Sequence
  Synthetic oligonucleotide; GAG chr11 5341074 5341093 5341077 -
tttatattctgtttcattaa

SEQ ID NO: 35587 - DNA, 20 bp, Artificial Sequence
  Synthetic oligonucleotide; AAG chr11 5341059 5341078 5341062 -
attaagagatgtaattgtga

SEQ ID NO: 35588 - DNA, 20 bp, Artificial Sequence
  Synthetic oligonucleotide; CAG chr11 5341036 5341055 5341039 -
aactgaacatataaaaaaat

SEQ ID NO: 35589 - DNA, 20 bp, Artificial Sequence
  Synthetic oligonucleotide; GAG chr11 5340994 5341013 5340997 -
cttgtcacgccatgtcacct

SEQ ID NO: 35590 - DNA, 20 bp, Artificial Sequence
  Synthetic oligonucleotide; CAG chr11 5340986 5341005 5340989 -
gccatgtcacctgagcaaca

SEQ ID NO: 35591 - DNA, 20 bp, Artificial Sequence
  Synthetic oligonucleotide; GAG chr11 5340966 5340985 5340969 -
cagtctgaatactaaattgt

SEQ ID NO: 35592 - DNA, 20 bp, Artificial Sequence
  Synthetic oligonucleotide; GAG chr11 5340960 5340979 5340963 -
gaatactaaattgtgagtgt

SEQ ID NO: 35593 - DNA, 20 bp, Artificial Sequence
  Synthetic oligonucleotide; TGG chr11 5340944 5340963 5340947 -
gtgtgagtgcatatatgtga

SEQ ID NO: 35594 - DNA, 20 bp, Artificial Sequence
  Synthetic oligonucleotide; TAG chr11 5340941 5340960 5340944 -
tgagtgcatatatgtgatgg

SEQ ID NO: 35595 - DNA, 20 bp, Artificial Sequence
  Synthetic oligonucleotide; AGG chr11 5340940 5340959 5340943 -
gagtgcatatatgtgatggt

SEQ ID NO: 35596 - DNA, 20 bp, Artificial Sequence
  Synthetic oligonucleotide; TGG chr11 5340842 5340861 5340845 -
ttttattcataaaaatattg

SEQ ID NO: 35597 - DNA, 20 bp, Artificial Sequence
  Synthetic oligonucleotide; GGG chr11 5340841 5340860 5340844 -
tttattcataaaaatattgt

SEQ ID NO: 35598 - DNA, 20 bp, Artificial Sequence
  Synthetic oligonucleotide; GGG chr11 5340840 5340859 5340843 -
ttattcataaaaatattgtg

SEQ ID NO: 35599 - DNA, 20 bp, Artificial Sequence
  Synthetic oligonucleotide; TAG chr11 5340837 5340856 5340840 -
ttcataaaaatattgtgggg

SEQ ID NO: 35600 - DNA, 20 bp, Artificial Sequence
  Synthetic oligonucleotide; TGG chr11 5340813 5340832 5340816 -
tattatcactgttttcttga

SEQ ID NO: 35601 - DNA, 20 bp, Artificial Sequence
  Synthetic oligonucleotide; GGG chr11 5340812 5340831 5340815 -
attatcactgttttcttgat

SEQ ID NO: 35602 - DNA, 20 bp, Artificial Sequence
  Synthetic oligonucleotide; GGG chr11 5340811 5340830 5340814 -
ttatcactgttttcttgatg

SEQ ID NO: 35603 - DNA, 20 bp, Artificial Sequence
  Synthetic oligonucleotide; AAG chr11 5340793 5340812 5340796 -
tggggaaatttaatataaaa

SEQ ID NO: 35604 - DNA, 20 bp, Artificial Sequence
  Synthetic oligonucleotide; AAG chr11 5340775 5340794 5340778 -
aaaagttaaatattccctcc

SEQ ID NO: 35605 - DNA, 20 bp, Artificial Sequence
  Synthetic oligonucleotide; AGG chr11 5340774 5340793 5340777 -
aaagttaaatattccctcca

SEQ ID NO: 35606 - DNA, 20 bp, Artificial Sequence
  Synthetic oligonucleotide; GGG chr11 5340773 5340792 5340776 -
aagttaaatattccctccaa

SEQ ID NO: 35607 - DNA, 20 bp, Artificial Sequence
  Synthetic oligonucleotide; TGG chr11 5340755 5340774 5340758 -
aagggcataacatttttaat

SEQ ID NO: 35608 - DNA, 20 bp, Artificial Sequence
  Synthetic oligonucleotide; TAG chr11 5340750 5340769 5340753 -
cataacatttttaattggta

SEQ ID NO: 35609 - DNA, 20 bp, Artificial Sequence
  Synthetic oligonucleotide; AAG chr11 5340717 5340736 5340720 -
aatttatatcttctaactat

SEQ ID NO: 35610 - DNA, 20 bp, Artificial Sequence
  Synthetic oligonucleotide; AGG chr11 5340716 5340735 5340719 -
atttatatcttctaactata

SEQ ID NO: 35611 - DNA, 20 bp, Artificial Sequence
  Synthetic oligonucleotide; CAG chr11 5340712 5340731 5340715 -
atatcttctaactataaggc

SEQ ID NO: 35612 - DNA, 20 bp, Artificial Sequence
  Synthetic oligonucleotide; TGG chr11 5340703 5340722 5340706 -
aactataaggccagtgtgaa

SEQ ID NO: 35613 - DNA, 20 bp, Artificial Sequence
  Synthetic oligonucleotide; CAG chr11 5340690 5340709 5340693 -
gtgtgaatggtactccacta

SEQ ID NO: 35614 - DNA, 20 bp, Artificial Sequence
  Synthetic oligonucleotide; TAG chr11 5340687 5340706 5340690 -
tgaatggtactccactacag

SEQ ID NO: 35615 - DNA, 20 bp, Artificial Sequence
  Synthetic oligonucleotide; TAG chr11 5340676 5340695 5340679 -
ccactacagtagactatcct

SEQ ID NO: 35616 - DNA, 20 bp, Artificial Sequence
  Synthetic oligonucleotide; TGG chr11 5340673 5340692 5340676 -
ctacagtagactatccttag

SEQ ID NO: 35617 - DNA, 20 bp, Artificial Sequence
  Synthetic oligonucleotide; TAG chr11 5340636 5340655 5340639 -
cttgtattccgtcatgcttg

SEQ ID NO: 35618 - DNA, 20 bp, Artificial Sequence
  Synthetic oligonucleotide; CAG chr11 5340532 5340551 5340535 -
tatctccaaactcctaaccg

SEQ ID NO: 35619 - DNA, 20 bp, Artificial Sequence
  Synthetic oligonucleotide; TAG chr11 5340529 5340548 5340532 -
ctccaaactcctaaccgcag

SEQ ID NO: 35620 - DNA, 20 bp, Artificial Sequence
  Synthetic oligonucleotide; AAG chr11 5340526 5340545 5340529 -
caaactcctaaccgcagtag

SEQ ID NO: 35621 - DNA, 20 bp, Artificial Sequence
  Synthetic oligonucleotide; AAG chr11 5340511 5340530 5340514 -
agtagaagaacttttttaaa

SEQ ID NO: 35622 - DNA, 20 bp, Artificial Sequence
  Synthetic oligonucleotide; AAG chr11 5340478 5340497 5340481 -
tatgacattgcaaaaaaaaa

SEQ ID NO: 35623 - DNA, 20 bp, Artificial Sequence
  Synthetic oligonucleotide; GAG chr11 5340476 5340495 5340479 -
tgacattgcaaaaaaaaaaa

SEQ ID NO: 35624 - DNA, 20 bp, Artificial Sequence
  Synthetic oligonucleotide; TAG chr11 5340459 5340478 5340462 -
aaagagtaatgcttttgttg

SEQ ID NO: 35625 - DNA, 20 bp, Artificial Sequence
  Synthetic oligonucleotide; TAG chr11 5340436 5340455 5340439 -
aattactaaaatgcaatgct

SEQ ID NO: 35626 - DNA, 20 bp, Artificial Sequence
  Synthetic oligonucleotide; CAG chr11 5340408 5340427 5340411 -
ttaatgacaatgtttttcat

SEQ ID NO: 35627 - DNA, 20 bp, Artificial Sequence
  Synthetic oligonucleotide; AGG chr11 5340407 5340426 5340410 -
taatgacaatgtttttcatc

SEQ ID NO: 35628 - DNA, 20 bp, Artificial Sequence
  Synthetic oligonucleotide; AAG chr11 5340403 5340422 5340406 -
gacaatgtttttcatcaggc

SEQ ID NO: 35629 - DNA, 20 bp, Artificial Sequence
  Synthetic oligonucleotide; TAG chr11 5340376 5340395 5340379 -
ttcaaactataataaatatt

SEQ ID NO: 35630 - DNA, 20 bp, Artificial Sequence
  Synthetic oligonucleotide; GAG chr11 5340374 5340393 5340377 -
caaactataataaatattta

SEQ ID NO: 35631 - DNA, 20 bp, Artificial Sequence
  Synthetic oligonucleotide; TAG chr11 5340364 5340383 5340367 -
taaatatttagagtaaatta

SEQ ID NO: 35632 - DNA, 20 bp, Artificial Sequence
  Synthetic oligonucleotide; AAG chr11 5340358 5340377 5340361 -
tttagagtaaattatagata

SEQ ID NO: 35633 - DNA, 20 bp, Artificial Sequence
  Synthetic oligonucleotide; AAG chr11 5340338 5340357 5340341 -
aagaaatgataataaataaa

SEQ ID NO: 35634 - DNA, 20 bp, Artificial Sequence
  Synthetic oligonucleotide; GAG chr11 5340304 5340323 5340307 -
ctctgattccatgttttcct

SEQ ID NO: 35635 - DNA, 20 bp, Artificial Sequence
  Synthetic oligonucleotide; CAG chr11 5340298 5340317 5340301 -
ttccatgttttcctgagact

SEQ ID NO: 35636 - DNA, 20 bp, Artificial Sequence
  Synthetic oligonucleotide; AAG chr11 5340291 5340310 5340294 -
ttttcctgagactcagtgac

SEQ ID NO: 35637 - DNA, 20 bp, Artificial Sequence
  Synthetic oligonucleotide; AGG chr11 5340290 5340309 5340293 -
tttcctgagactcagtgaca

SEQ ID NO: 35638 - DNA, 20 bp, Artificial Sequence
  Synthetic oligonucleotide; GAG chr11 5340288 5340307 5340291 -
tcctgagactcagtgacaag

SEQ ID NO: 35639 - DNA, 20 bp, Artificial Sequence
  Synthetic oligonucleotide; AGG chr11 5340287 5340306 5340290 -
cctgagactcagtgacaagg

SEQ ID NO: 35640 - DNA, 20 bp, Artificial Sequence
  Synthetic oligonucleotide; CAG chr11 5340283 5340302 5340286 -
agactcagtgacaaggagga

SEQ ID NO: 35641 - DNA, 20 bp, Artificial Sequence
  Synthetic oligonucleotide; CAG chr11 5340257 5340276 5340260 -
gaatcttttttttgattcca

SEQ ID NO: 35642 - DNA, 20 bp, Artificial Sequence
  Synthetic oligonucleotide; CAG chr11 5340219 5340238 5340222 -
ttcttgtaatttgttttgtt

SEQ ID NO: 35643 - DNA, 20 bp, Artificial Sequence
  Synthetic oligonucleotide; TAG chr11 5340214 5340233 5340217 -
gtaatttgttttgttcagcc

SEQ ID NO: 35644 - DNA, 20 bp, Artificial Sequence
  Synthetic oligonucleotide; CAG chr11 5340208 5340227 5340211 -
tgttttgttcagcctagttt

SEQ ID NO: 35645 - DNA, 20 bp, Artificial Sequence
  Synthetic oligonucleotide; GAG chr11 5340203 5340222 5340206 -
tgttcagcctagtttcagtt

SEQ ID NO: 35646 - DNA, 20 bp, Artificial Sequence
  Synthetic oligonucleotide; AAG chr11 5340185 5340204 5340188 -
ttgagtttcacttataacca

SEQ ID NO: 35647 - DNA, 20 bp, Artificial Sequence
  Synthetic oligonucleotide; AGG chr11 5340184 5340203 5340187 -
tgagtttcacttataaccaa

SEQ ID NO: 35648 - DNA, 20 bp, Artificial Sequence
  Synthetic oligonucleotide; CAG chr11 5340160 5340179 5340163 -
tattaataattatatcatct

SEQ ID NO: 35649 - DNA, 20 bp, Artificial Sequence
  Synthetic oligonucleotide; TAG chr11 5340154 5340173 5340157 -
taattatatcatctcagtta

SEQ ID NO: 35650 - DNA, 20 bp, Artificial Sequence
  Synthetic oligonucleotide; TGG chr11 5340118 5340137 5340121 -
ctctaactaatatttaaaac

SEQ ID NO: 35651 - DNA, 20 bp, Artificial Sequence
  Synthetic oligonucleotide; TAG chr11 5340105 5340124 5340108 -
ttaaaactggaaaatactgt

SEQ ID NO: 35652 - DNA, 20 bp, Artificial Sequence
  Synthetic oligonucleotide; AGG chr11 5340104 5340123 5340107 -
taaaactggaaaatactgtt

SEQ ID NO: 35653 - DNA, 20 bp, Artificial Sequence
  Synthetic oligonucleotide; TAG chr11 5340101 5340120 5340104 -
aactggaaaatactgttagg

SEQ ID NO: 35654 - DNA, 20 bp, Artificial Sequence
  Synthetic oligonucleotide; AAG chr11 5340098 5340117 5340101 -
tggaaaatactgttaggtag

SEQ ID NO: 35655 - DNA, 20 bp, Artificial Sequence
  Synthetic oligonucleotide; GAG chr11 5340096 5340115 5340099 -
gaaaatactgttaggtagaa

SEQ ID NO: 35656 - DNA, 20 bp, Artificial Sequence
  Synthetic oligonucleotide; CAG chr11 5340073 5340092 5340076 -
ctgcctctttttctaaaata

SEQ ID NO: 35657 - DNA, 20 bp, Artificial Sequence
  Synthetic oligonucleotide; AGG chr11 5340072 5340091 5340075 -
tgcctctttttctaaaatac

SEQ ID NO: 35658 - DNA, 20 bp, Artificial Sequence
  Synthetic oligonucleotide; TGG chr11 5340066 5340085 5340069 -
tttttctaaaatacaggaaa

SEQ ID NO: 35659 - DNA, 20 bp, Artificial Sequence
  Synthetic oligonucleotide; TGG chr11 5340053 5340072 5340056 -
caggaaatggaacctaaaaa

SEQ ID NO: 35660 - DNA, 20 bp, Artificial Sequence
  Synthetic oligonucleotide; CAG chr11 5340050 5340069 5340053 -
gaaatggaacctaaaaatgg

SEQ ID NO: 35661 - DNA, 20 bp, Artificial Sequence
  Synthetic oligonucleotide; AGG chr11 5340049 5340068 5340052 -
aaatggaacctaaaaatggc

SEQ ID NO: 35662 - DNA, 20 bp, Artificial Sequence
  Synthetic oligonucleotide; AAG chr11 5340045 5340064 5340048 -
ggaacctaaaaatggcagga

SEQ ID NO: 35663 - DNA, 20 bp, Artificial Sequence
  Synthetic oligonucleotide; TGG chr11 5340033 5340052 5340036 -
tggcaggaaagttgaccatt

SEQ ID NO: 35664 - DNA, 20 bp, Artificial Sequence
  Synthetic oligonucleotide; AAG chr11 5340017 5340036 5340020 -
catttggtgaatgatttatg

SEQ ID NO: 35665 - DNA, 20 bp, Artificial Sequence
  Synthetic oligonucleotide; AAG chr11 5339999 5340018 5340002 -
tgaagttatttcccttgttt

SEQ ID NO: 35666 - DNA, 20 bp, Artificial Sequence
  Synthetic oligonucleotide; AAG chr11 5339996 5340015 5339999 -
agttatttcccttgtttaag

SEQ ID NO: 35667 - DNA, 20 bp, Artificial Sequence
  Synthetic oligonucleotide; AAG chr11 5339977 5339996 5339980 -
gaagttcatttctgacttga

SEQ ID NO: 35668 - DNA, 20 bp, Artificial Sequence
  Synthetic oligonucleotide; AAG chr11 5339973 5339992 5339976 -
ttcatttctgacttgaaagt

SEQ ID NO: 35669 - DNA, 20 bp, Artificial Sequence
  Synthetic oligonucleotide; GAG chr11 5339952 5339971 5339955 -
agtgtgaaactaaattcact

SEQ ID NO: 35670 - DNA, 20 bp, Artificial Sequence
  Synthetic oligonucleotide; AAG chr11 5339949 5339968 5339952 -
gtgaaactaaattcactgag

SEQ ID NO: 35671 - DNA, 20 bp, Artificial Sequence
  Synthetic oligonucleotide; TAG chr11 5339940 5339959 5339943 -
aattcactgagaagatgctg

SEQ ID NO: 35672 - DNA, 20 bp, Artificial Sequence
  Synthetic oligonucleotide; AGG chr11 5339939 5339958 5339942 -
attcactgagaagatgctgt

SEQ ID NO: 35673 - DNA, 20 bp, Artificial Sequence
  Synthetic oligonucleotide; CAG chr11 5339929 5339948 5339932 -
aagatgctgtaggatgaata

SEQ ID NO: 35674 - DNA, 20 bp, Artificial Sequence
  Synthetic oligonucleotide; CAG chr11 5339923 5339942 5339926 -
ctgtaggatgaatacagaca

SEQ ID NO: 35675 - DNA, 20 bp, Artificial Sequence
  Synthetic oligonucleotide; AGG chr11 5339922 5339941 5339925 -
tgtaggatgaatacagacac

SEQ ID NO: 35676 - DNA, 20 bp, Artificial Sequence
  Synthetic oligonucleotide; CGG chr11 5339915 5339934 5339918 -
tgaatacagacacaggacat

SEQ ID NO: 35677 - DNA, 20 bp, Artificial Sequence
  Synthetic oligonucleotide; GAG chr11 5339913 5339932 5339916 -
aatacagacacaggacatcg

SEQ ID NO: 35678 - DNA, 20 bp, Artificial Sequence
  Synthetic oligonucleotide; AGG chr11 5339912 5339931 5339915 -
atacagacacaggacatcgg

SEQ ID NO: 35679 - DNA, 20 bp, Artificial Sequence
  Synthetic oligonucleotide; TGG chr11 5339909 5339928 5339912 -
cagacacaggacatcggagg

SEQ ID NO: 35680 - DNA, 20 bp, Artificial Sequence
  Synthetic oligonucleotide; GGG chr11 5339908 5339927 5339911 -
agacacaggacatcggaggt

SEQ ID NO: 35681 - DNA, 20 bp, Artificial Sequence
  Synthetic oligonucleotide; GGG chr11 5339907 5339926 5339910 -
gacacaggacatcggaggtg

SEQ ID NO: 35682 - DNA, 20 bp, Artificial Sequence
  Synthetic oligonucleotide; GGG chr11 5339906 5339925 5339909 -
acacaggacatcggaggtgg

SEQ ID NO: 35683 - DNA, 20 bp, Artificial Sequence
  Synthetic oligonucleotide; GGG chr11 5339905 5339924 5339908 -
cacaggacatcggaggtggg

SEQ ID NO: 35684 - DNA, 20 bp, Artificial Sequence
  Synthetic oligonucleotide; AAG chr11 5339902 5339921 5339905 -
aggacatcggaggtgggggg

SEQ ID NO: 35685 - DNA, 20 bp, Artificial Sequence
  Synthetic oligonucleotide; TAG chr11 5339878 5339897 5339881 -
ctaaataattatctcaaact

SEQ ID NO: 35686 - DNA, 20 bp, Artificial Sequence
  Synthetic oligonucleotide; CAG chr11 5339870 5339889 5339873 -
ttatctcaaacttagttata

SEQ ID NO: 35687 - DNA, 20 bp, Artificial Sequence
  Synthetic oligonucleotide; AAG chr11 5339867 5339886 5339870 -
tctcaaacttagttatacag

SEQ ID NO: 35688 - DNA, 20 bp, Artificial Sequence
  Synthetic oligonucleotide; AGG chr11 5339866 5339885 5339869 -
ctcaaacttagttatacaga

SEQ ID NO: 35689 - DNA, 20 bp, Artificial Sequence
  Synthetic oligonucleotide; TGG chr11 5339858 5339877 5339861 -
tagttatacagaaggctaca

SEQ ID NO: 35690 - DNA, 20 bp, Artificial Sequence
  Synthetic oligonucleotide; TGG chr11 5339855 5339874 5339858 -
ttatacagaaggctacatgg

SEQ ID NO: 35691 - DNA, 20 bp, Artificial Sequence
  Synthetic oligonucleotide; CAG chr11 5339843 5339862 5339846 -
ctacatggtggaaatccact

SEQ ID NO: 35692 - DNA, 20 bp, Artificial Sequence
  Synthetic oligonucleotide; CAG chr11 5339795 5339814 5339798 -
tgtaacaatcaacataaaca

SEQ ID NO: 35693 - DNA, 20 bp, Artificial Sequence
  Synthetic oligonucleotide; TAG chr11 5339787 5339806 5339790 -
tcaacataaacacagtatgt

SEQ ID NO: 35694 - DNA, 20 bp, Artificial Sequence
  Synthetic oligonucleotide; TAG chr11 5339769 5339788 5339772 -
gttagtattatcataaaatt

SEQ ID NO: 35695 - DNA, 20 bp, Artificial Sequence
  Synthetic oligonucleotide; AAG chr11 5339746 5339765 5339749 -
aactttctgtgatctcctac

SEQ ID NO: 35696 - DNA, 20 bp, Artificial Sequence
  Synthetic oligonucleotide; TGG chr11 5339735 5339754 5339738 -
atctcctacaagtcttcctg

SEQ ID NO: 35697 - DNA, 20 bp, Artificial Sequence
  Synthetic oligonucleotide; TAG chr11 5339714 5339733 5339717 -
ggtaaaatgctatgtactat

SEQ ID NO: 35698 - DNA, 20 bp, Artificial Sequence
  Synthetic oligonucleotide; AAG chr11 5339711 5339730 5339714 -
aaaatgctatgtactattag

SEQ ID NO: 35699 - DNA, 20 bp, Artificial Sequence
  Synthetic oligonucleotide; TAG chr11 5339705 5339724 5339708 -
ctatgtactattagaagcct

SEQ ID NO: 35700 - DNA, 20 bp, Artificial Sequence
  Synthetic oligonucleotide; CAG chr11 5339692 5339711 5339695 -
gaagccttagcaaattaata

SEQ ID NO: 35701 - DNA, 20 bp, Artificial Sequence
  Synthetic oligonucleotide; AGG chr11 5339691 5339710 5339694 -
aagccttagcaaattaatac

SEQ ID NO: 35702 - DNA, 20 bp, Artificial Sequence
  Synthetic oligonucleotide; CAG chr11 5339686 5339705 5339689 -
ttagcaaattaatacaggaa

SEQ ID NO: 35703 - DNA, 20 bp, Artificial Sequence
  Synthetic oligonucleotide; GAG chr11 5339654 5339673 5339657 -
taccacgtgttctcacttat

SEQ ID NO: 35704 - DNA, 20 bp, Artificial Sequence
  Synthetic oligonucleotide; TGG chr11 5339651 5339670 5339654 -
cacgtgttctcacttatgag

SEQ ID NO: 35705 - DNA, 20 bp, Artificial Sequence
  Synthetic oligonucleotide; GGG chr11 5339650 5339669 5339653 -
acgtgttctcacttatgagt

SEQ ID NO: 35706 - DNA, 20 bp, Artificial Sequence
  Synthetic oligonucleotide; GAG chr11 5339648 5339667 5339651 -
gtgttctcacttatgagtgg

SEQ ID NO: 35707 - DNA, 20 bp, Artificial Sequence
  Synthetic oligonucleotide; GAG chr11 5339636 5339655 5339639 -
atgagtgggagctaaatgat

SEQ ID NO: 35708 - DNA, 20 bp, Artificial Sequence
  Synthetic oligonucleotide; TGG chr11 5339627 5339646 5339630 -
agctaaatgatgagaacaca

SEQ ID NO: 35709 - DNA, 20 bp, Artificial Sequence
  Synthetic oligonucleotide; TGG chr11 5339619 5339638 5339622 -
gatgagaacacatggacaca

SEQ ID NO: 35710 - DNA, 20 bp, Artificial Sequence
  Synthetic oligonucleotide; GAG chr11 5339617 5339636 5339620 -
tgagaacacatggacacatg

SEQ ID NO: 35711 - DNA, 20 bp, Artificial Sequence
  Synthetic oligonucleotide; AGG chr11 5339616 5339635 5339619 -
gagaacacatggacacatgg

SEQ ID NO: 35712 - DNA, 20 bp, Artificial Sequence
  Synthetic oligonucleotide; GGG chr11 5339615 5339634 5339618 -
agaacacatggacacatgga

SEQ ID NO: 35713 - DNA, 20 bp, Artificial Sequence
  Synthetic oligonucleotide; GGG chr11 5339614 5339633 5339617 -
gaacacatggacacatggag

SEQ ID NO: 35714 - DNA, 20 bp, Artificial Sequence
  Synthetic oligonucleotide; TGG chr11 5339599 5339618 5339602 -
tggaggggaacatcacacac

SEQ ID NO: 35715 - DNA, 20 bp, Artificial Sequence
  Synthetic oligonucleotide; GGG chr11 5339598 5339617 5339601 -
ggaggggaacatcacacact

SEQ ID NO: 35716 - DNA, 20 bp, Artificial Sequence
  Synthetic oligonucleotide; GGG chr11 5339597 5339616 5339600 -
gaggggaacatcacacactg

SEQ ID NO: 35717 - DNA, 20 bp, Artificial Sequence
  Synthetic oligonucleotide; TGG chr11 5339589 5339608 5339592 -
catcacacactggggcctat

SEQ ID NO: 35718 - DNA, 20 bp, Artificial Sequence
  Synthetic oligonucleotide; GAG chr11 5339587 5339606 5339590 -
tcacacactggggcctattg

SEQ ID NO: 35719 - DNA, 20 bp, Artificial Sequence
  Synthetic oligonucleotide; AGG chr11 5339586 5339605 5339589 -
cacacactggggcctattgg

SEQ ID NO: 35720 - DNA, 20 bp, Artificial Sequence
  Synthetic oligonucleotide; TGG chr11 5339582 5339601 5339585 -
cactggggcctattggagga

SEQ ID NO: 35721 - DNA, 20 bp, Artificial Sequence
  Synthetic oligonucleotide; GAG chr11 5339580 5339599 5339583 -
ctggggcctattggaggatg

SEQ ID NO: 35722 - DNA, 20 bp, Artificial Sequence
  Synthetic oligonucleotide; AGG chr11 5339579 5339598 5339582 -
tggggcctattggaggatgg

SEQ ID NO: 35723 - DNA, 20 bp, Artificial Sequence
  Synthetic oligonucleotide; GGG chr11 5339578 5339597 5339581 -
ggggcctattggaggatgga

SEQ ID NO: 35724 - DNA, 20 bp, Artificial Sequence
  Synthetic oligonucleotide; AAG chr11 5339572 5339591 5339575 -
tattggaggatggagggtga

SEQ ID NO: 35725 - DNA, 20 bp, Artificial Sequence
  Synthetic oligonucleotide; AGG chr11 5339571 5339590 5339574 -
attggaggatggagggtgaa

SEQ ID NO: 35726 - DNA, 20 bp, Artificial Sequence
  Synthetic oligonucleotide; GAG chr11 5339569 5339588 5339572 -
tggaggatggagggtgaaag

SEQ ID NO: 35727 - DNA, 20 bp, Artificial Sequence
  Synthetic oligonucleotide; AGG chr11 5339568 5339587 5339571 -
ggaggatggagggtgaaagg

SEQ ID NO: 35728 - DNA, 20 bp, Artificial Sequence
  Synthetic oligonucleotide; GGG chr11 5339567 5339586 5339570 -
gaggatggagggtgaaagga

SEQ ID NO: 35729 - DNA, 20 bp, Artificial Sequence
  Synthetic oligonucleotide; GAG chr11 5339565 5339584 5339568 -
ggatggagggtgaaaggagg

SEQ ID NO: 35730 - DNA, 20 bp, Artificial Sequence
  Synthetic oligonucleotide; GAG chr11 5339563 5339582 5339566 -
atggagggtgaaaggaggga

SEQ ID NO: 35731 - DNA, 20 bp, Artificial Sequence
  Synthetic oligonucleotide; AGG chr11 5339562 5339581 5339565 -
tggagggtgaaaggagggag

SEQ ID NO: 35732 - DNA, 20 bp, Artificial Sequence
  Synthetic oligonucleotide; CAG chr11 5339557 5339576 5339560 -
ggtgaaaggagggagaggat

SEQ ID NO: 35733 - DNA, 20 bp, Artificial Sequence
  Synthetic oligonucleotide; AGG chr11 5339556 5339575 5339559 -
gtgaaaggagggagaggatc

SEQ ID NO: 35734 - DNA, 20 bp, Artificial Sequence
  Synthetic oligonucleotide; AAG chr11 5339551 5339570 5339554 -
aggagggagaggatcaggaa

SEQ ID NO: 35735 - DNA, 20 bp, Artificial Sequence
  Synthetic oligonucleotide; AAG chr11 5339542 5339561 5339545 -
aggatcaggaaaagtaacaa

SEQ ID NO: 35736 - DNA, 20 bp, Artificial Sequence
  Synthetic oligonucleotide; AGG chr11 5339541 5339560 5339544 -
ggatcaggaaaagtaacaaa

SEQ ID NO: 35737 - DNA, 20 bp, Artificial Sequence
  Synthetic oligonucleotide; GGG chr11 5339540 5339559 5339543 -
gatcaggaaaagtaacaaaa

SEQ ID NO: 35738 - DNA, 20 bp, Artificial Sequence
  Synthetic oligonucleotide; TAG chr11 5339534 5339553 5339537 -
gaaaagtaacaaaagggtac

SEQ ID NO: 35739 - DNA, 20 bp, Artificial Sequence
  Synthetic oligonucleotide; AGG chr11 5339533 5339552 5339536 -
aaaagtaacaaaagggtact

SEQ ID NO: 35740 - DNA, 20 bp, Artificial Sequence
  Synthetic oligonucleotide; GAG chr11 5339520 5339539 5339523 -
gggtactaggcttaatacct

SEQ ID NO: 35741 - DNA, 20 bp, Artificial Sequence
  Synthetic oligonucleotide; GAG chr11 5339516 5339535 5339519 -
actaggcttaatacctgagt

SEQ ID NO: 35742 - DNA, 20 bp, Artificial Sequence
  Synthetic oligonucleotide; AAG chr11 5339477 5339496 5339480 -
acaacaaaccctcgtgacac

SEQ ID NO: 35743 - DNA, 20 bp, Artificial Sequence
  Synthetic oligonucleotide; CAG chr11 5339461 5339480 5339464 -
acacaagtttaaatatgtaa

SEQ ID NO: 35744 - DNA, 20 bp, Artificial Sequence
  Synthetic oligonucleotide; AAG chr11 5339427 5339446 5339430 -
tactcctgaacctaaaataa

SEQ ID NO: 35745 - DNA, 20 bp, Artificial Sequence
  Synthetic oligonucleotide; TAG chr11 5339423 5339442 5339426 -
cctgaacctaaaataaaagt

SEQ ID NO: 35746 - DNA, 20 bp, Artificial Sequence
  Synthetic oligonucleotide; TAG chr11 5339419 5339438 5339422 -
aacctaaaataaaagttagt

SEQ ID NO: 35747 - DNA, 20 bp, Artificial Sequence
  Synthetic oligonucleotide; AGG chr11 5339418 5339437 5339421 -
acctaaaataaaagttagtt

SEQ ID NO: 35748 - DNA, 20 bp, Artificial Sequence
  Synthetic oligonucleotide; AAG chr11 5339413 5339432 5339416 -
aaataaaagttagttaggaa

SEQ ID NO: 35749 - DNA, 20 bp, Artificial Sequence
  Synthetic oligonucleotide; AAG chr11 5339410 5339429 5339413 -
taaaagttagttaggaaaag

SEQ ID NO: 35750 - DNA, 20 bp, Artificial Sequence
  Synthetic oligonucleotide; TAG chr11 5339386 5339405 5339389 -
ctatttataacactatctcc

SEQ ID NO: 35751 - DNA, 20 bp, Artificial Sequence
  Synthetic oligonucleotide; AGG chr11 5339385 5339404 5339388 -
tatttataacactatctcct

SEQ ID NO: 35752 - DNA, 20 bp, Artificial Sequence
  Synthetic oligonucleotide; AAG chr11 5339355 5339374 5339358 -
gcacatgaatttgtattcat

SEQ ID NO: 35753 - DNA, 20 bp, Artificial Sequence
  Synthetic oligonucleotide; AAG chr11 5339352 5339371 5339355 -
catgaatttgtattcataag

SEQ ID NO: 35754 - DNA, 20 bp, Artificial Sequence
  Synthetic oligonucleotide; GAG chr11 5339350 5339369 5339353 -
tgaatttgtattcataagaa

SEQ ID NO: 35755 - DNA, 20 bp, Artificial Sequence
  Synthetic oligonucleotide; TAG chr11 5339347 5339366 5339350 -
atttgtattcataagaagag

SEQ ID NO: 35756 - DNA, 20 bp, Artificial Sequence
  Synthetic oligonucleotide; CAG chr11 5339340 5339359 5339343 -
ttcataagaagagtagaatt

SEQ ID NO: 35757 - DNA, 20 bp, Artificial Sequence
  Synthetic oligonucleotide; GAG chr11 5339338 5339357 5339341 -
cataagaagagtagaattca

SEQ ID NO: 35758 - DNA, 20 bp, Artificial Sequence
  Synthetic oligonucleotide; TGG chr11 5339335 5339354 5339338 -
aagaagagtagaattcagag

SEQ ID NO: 35759 - DNA, 20 bp, Artificial Sequence
  Synthetic oligonucleotide; CAG chr11 5339330 5339349 5339333 -
gagtagaattcagagtggtc

SEQ ID NO: 35760 - DNA, 20 bp, Artificial Sequence
  Synthetic oligonucleotide; TGG chr11 5339327 5339346 5339330 -
tagaattcagagtggtccag

SEQ ID NO: 35761 - DNA, 20 bp, Artificial Sequence
  Synthetic oligonucleotide; TGG chr11 5339314 5339333 5339317 -
ggtccagtggactaacaaac

SEQ ID NO: 35762 - DNA, 20 bp, Artificial Sequence
  Synthetic oligonucleotide; CAG chr11 5339296 5339315 5339299 -
actggtgaaccaccttctta

SEQ ID NO: 35763 - DNA, 20 bp, Artificial Sequence
  Synthetic oligonucleotide; CAG chr11 5339293 5339312 5339296 -
ggtgaaccaccttcttacag

SEQ ID NO: 35764 - DNA, 20 bp, Artificial Sequence
  Synthetic oligonucleotide; AGG chr11 5339292 5339311 5339295 -
gtgaaccaccttcttacagc

SEQ ID NO: 35765 - DNA, 20 bp, Artificial Sequence
  Synthetic oligonucleotide; AAG chr11 5339287 5339306 5339290 -
ccaccttcttacagcaggtg

SEQ ID NO: 35766 - DNA, 20 bp, Artificial Sequence
  Synthetic oligonucleotide; CAG chr11 5339275 5339294 5339278 -
agcaggtgaagcctgtaatt

SEQ ID NO: 35767 - DNA, 20 bp, Artificial Sequence
  Synthetic oligonucleotide; AAG chr11 5339259 5339278 5339262 -
aattcagcttttcatcattc

SEQ ID NO: 35768 - DNA, 20 bp, Artificial Sequence
  Synthetic oligonucleotide; AAG chr11 5339251 5339270 5339254 -
ttttcatcattcaagactga

SEQ ID NO: 35769 - DNA, 20 bp, Artificial Sequence
  Synthetic oligonucleotide; AAG chr11 5339248 5339267 5339251 -
tcatcattcaagactgaaag

SEQ ID NO: 35770 - DNA, 20 bp, Artificial Sequence
  Synthetic oligonucleotide; TAG chr11 5339232 5339251 5339235 -
aaagaagaatataacttata

SEQ ID NO: 35771 - DNA, 20 bp, Artificial Sequence
  Synthetic oligonucleotide; GAG chr11 5339230 5339249 5339233 -
agaagaatataacttatata

SEQ ID NO: 35772 - DNA, 20 bp, Artificial Sequence
  Synthetic oligonucleotide; AAG chr11 5339227 5339246 5339230 -
agaatataacttatatagag

SEQ ID NO: 35773 - DNA, 20 bp, Artificial Sequence
  Synthetic oligonucleotide; AGG chr11 5339226 5339245 5339229 -
gaatataacttatatagaga

SEQ ID NO: 35774 - DNA, 20 bp, Artificial Sequence
  Synthetic oligonucleotide; GAG chr11 5339216 5339235 5339219 -
tatatagagaaggacctcat

SEQ ID NO: 35775 - DNA, 20 bp, Artificial Sequence
  Synthetic oligonucleotide; AGG chr11 5339215 5339234 5339218 -
atatagagaaggacctcatg

SEQ ID NO: 35776 - DNA, 20 bp, Artificial Sequence
  Synthetic oligonucleotide; TGG chr11 5339201 5339220 5339204 -
ctcatgaggaataaatttca

SEQ ID NO: 35777 - DNA, 20 bp, Artificial Sequence
  Synthetic oligonucleotide; AAG chr11 5339190 5339209 5339193 -
taaatttcatggtgcctatt

SEQ ID NO: 35778 - DNA, 20 bp, Artificial Sequence
  Synthetic oligonucleotide; AAG chr11 5339181 5339200 5339184 -
tggtgcctattaagataaat

SEQ ID NO: 35779 - DNA, 20 bp, Artificial Sequence
  Synthetic oligonucleotide; TAG chr11 5339171 5339190 5339174 -
taagataaataagtaccatg

SEQ ID NO: 35780 - DNA, 20 bp, Artificial Sequence
  Synthetic oligonucleotide; TGG chr11 5339165 5339184 5339168 -
aaataagtaccatgtagtta

SEQ ID NO: 35781 - DNA, 20 bp, Artificial Sequence
  Synthetic oligonucleotide; GGG chr11 5339164 5339183 5339167 -
aataagtaccatgtagttat

SEQ ID NO: 35782 - DNA, 20 bp, Artificial Sequence
  Synthetic oligonucleotide; AAG chr11 5339155 5339174 5339158 -
catgtagttatgggaaatct

SEQ ID NO: 35783 - DNA, 20 bp, Artificial Sequence
  Synthetic oligonucleotide; AGG chr11 5339154 5339173 5339157 -
atgtagttatgggaaatcta

SEQ ID NO: 35784 - DNA, 20 bp, Artificial Sequence
  Synthetic oligonucleotide; AAG chr11 5339146 5339165 5339149 -
atgggaaatctaaggtgtaa

SEQ ID NO: 35785 - DNA, 20 bp, Artificial Sequence
  Synthetic oligonucleotide; AAG chr11 5339128 5339147 5339131 -
aaaagaatatacattaaaaa

SEQ ID NO: 35786 - DNA, 20 bp, Artificial Sequence
  Synthetic oligonucleotide; TAG chr11 5339077 5339096 5339080 -
caaataataatatacttgtg

SEQ ID NO: 35787 - DNA, 20 bp, Artificial Sequence
  Synthetic oligonucleotide; TGG chr11 5339072 5339091 5339075 -
aataatatacttgtgtagta

SEQ ID NO: 35788 - DNA, 20 bp, Artificial Sequence
  Synthetic oligonucleotide; GGG chr11 5339071 5339090 5339074 -
ataatatacttgtgtagtat

SEQ ID NO: 35789 - DNA, 20 bp, Artificial Sequence
  Synthetic oligonucleotide; AAG chr11 5339064 5339083 5339067 -
acttgtgtagtatgggcttg

SEQ ID NO: 35790 - DNA, 20 bp, Artificial Sequence
  Synthetic oligonucleotide; AGG chr11 5339063 5339082 5339066 -
cttgtgtagtatgggcttga

SEQ ID NO: 35791 - DNA, 20 bp, Artificial Sequence
  Synthetic oligonucleotide; GGG chr11 5339062 5339081 5339065 -
ttgtgtagtatgggcttgaa

SEQ ID NO: 35792 - DNA, 20 bp, Artificial Sequence
  Synthetic oligonucleotide; AAG chr11 5339047 5339066 5339050 -
ttgaagggataacataccat

SEQ ID NO: 35793 - DNA, 20 bp, Artificial Sequence
  Synthetic oligonucleotide; GAG chr11 5339032 5339051 5339035 -
accataagaatatttaattt

SEQ ID NO: 35794 - DNA, 20 bp, Artificial Sequence
  Synthetic oligonucleotide; CAG chr11 5339028 5339047 5339031 -
taagaatatttaatttgagt

SEQ ID NO: 35795 - DNA, 20 bp, Artificial Sequence
  Synthetic oligonucleotide; AGG chr11 5339027 5339046 5339030 -
aagaatatttaatttgagtc

SEQ ID NO: 35796 - DNA, 20 bp, Artificial Sequence
  Synthetic oligonucleotide; AAG chr11 5339018 5339037 5339021 -
taatttgagtcaggaaatga

SEQ ID NO: 35797 - DNA, 20 bp, Artificial Sequence
  Synthetic oligonucleotide; AGG chr11 5339017 5339036 5339020 -
aatttgagtcaggaaatgaa

SEQ ID NO: 35798 - DNA, 20 bp, Artificial Sequence
  Synthetic oligonucleotide; AAG chr11 5339012 5339031 5339015 -
gagtcaggaaatgaaaggct

SEQ ID NO: 35799 - DNA, 20 bp, Artificial Sequence
  Synthetic oligonucleotide; TAG chr11 5338997 5339016 5339000 -
aggctaagtgtgcatttctg

SEQ ID NO: 35800 - DNA, 20 bp, Artificial Sequence
  Synthetic oligonucleotide; AAG chr11 5338991 5339010 5338994 -
agtgtgcatttctgtagact

SEQ ID NO: 35801 - DNA, 20 bp, Artificial Sequence
  Synthetic oligonucleotide; TAG chr11 5338981 5339000 5338984 -
tctgtagactaagccaatct

SEQ ID NO: 35802 - DNA, 20 bp, Artificial Sequence
  Synthetic oligonucleotide; AAG chr11 5338970 5338989 5338973 -
agccaatcttagaaatgatt

SEQ ID NO: 35803 - DNA, 20 bp, Artificial Sequence
  Synthetic oligonucleotide; AAG chr11 5338967 5338986 5338970 -
caatcttagaaatgattaag

SEQ ID NO: 35804 - DNA, 20 bp, Artificial Sequence
  Synthetic oligonucleotide; TGG chr11 5338961 5338980 5338964 -
tagaaatgattaagaagacg

SEQ ID NO: 35805 - DNA, 20 bp, Artificial Sequence
  Synthetic oligonucleotide; AAG chr11 5338958 5338977 5338961 -
aaatgattaagaagacgtgg

SEQ ID NO: 35806 - DNA, 20 bp, Artificial Sequence
  Synthetic oligonucleotide; TAG chr11 5338950 5338969 5338953 -
aagaagacgtggaagaatct

SEQ ID NO: 35807 - DNA, 20 bp, Artificial Sequence
  Synthetic oligonucleotide; GAG chr11 5338948 5338967 5338951 -
gaagacgtggaagaatctta

SEQ ID NO: 35808 - DNA, 20 bp, Artificial Sequence
  Synthetic oligonucleotide; TGG chr11 5338925 5338944 5338928 -
acacactgaaaaaatatgta

SEQ ID NO: 35809 - DNA, 20 bp, Artificial Sequence
  Synthetic oligonucleotide; GAG chr11 5338916 5338935 5338919 -
aaaaatatgtatggtctaat

SEQ ID NO: 35810 - DNA, 20 bp, Artificial Sequence
  Synthetic oligonucleotide; CAG chr11 5338909 5338928 5338912 -
tgtatggtctaatgagttta

SEQ ID NO: 35811 - DNA, 20 bp, Artificial Sequence
  Synthetic oligonucleotide; TAG chr11 5338872 5338891 5338875 -
catataaaatgaatttatac

SEQ ID NO: 35812 - DNA, 20 bp, Artificial Sequence
  Synthetic oligonucleotide; AAG chr11 5338867 5338886 5338870 -
aaaatgaatttatactagat

SEQ ID NO: 35813 - DNA, 20 bp, Artificial Sequence
  Synthetic oligonucleotide; AGG chr11 5338866 5338885 5338869 -
aaatgaatttatactagata

SEQ ID NO: 35814 - DNA, 20 bp, Artificial Sequence
  Synthetic oligonucleotide; GGG chr11 5338865 5338884 5338868 -
aatgaatttatactagataa

SEQ ID NO: 35815 - DNA, 20 bp, Artificial Sequence
  Synthetic oligonucleotide; GGG chr11 5338864 5338883 5338867 -
atgaatttatactagataag

SEQ ID NO: 35816 - DNA, 20 bp, Artificial Sequence
  Synthetic oligonucleotide; AAG chr11 5338861 5338880 5338864 -
aatttatactagataagggg

SEQ ID NO: 35817 - DNA, 20 bp, Artificial Sequence
  Synthetic oligonucleotide; TGG chr11 5338824 5338843 5338827 -
tctcattaacaaataattgc

SEQ ID NO: 35818 - DNA, 20 bp, Artificial Sequence
  Synthetic oligonucleotide; GGG chr11 5338823 5338842 5338826 -
ctcattaacaaataattgct

SEQ ID NO: 35819 - DNA, 20 bp, Artificial Sequence
  Synthetic oligonucleotide; CAG chr11 5338811 5338830 5338814 -
taattgctgggttccttcac

SEQ ID NO: 35820 - DNA, 20 bp, Artificial Sequence
  Synthetic oligonucleotide; GAG chr11 5338809 5338828 5338812 -
attgctgggttccttcacca

SEQ ID NO: 35821 - DNA, 20 bp, Artificial Sequence
  Synthetic oligonucleotide; CAG chr11 5338803 5338822 5338806 -
gggttccttcaccagagatg

SEQ ID NO: 35822 - DNA, 20 bp, Artificial Sequence
  Synthetic oligonucleotide; TAG chr11 5338793 5338812 5338796 -
accagagatgcagattttta

SEQ ID NO: 35823 - DNA, 20 bp, Artificial Sequence
  Synthetic oligonucleotide; AGG chr11 5338792 5338811 5338795 -
ccagagatgcagatttttat

SEQ ID NO: 35824 - DNA, 20 bp, Artificial Sequence
  Synthetic oligonucleotide; GGG chr11 5338791 5338810 5338794 -
cagagatgcagatttttata

SEQ ID NO: 35825 - DNA, 20 bp, Artificial Sequence
  Synthetic oligonucleotide; AAG chr11 5338781 5338800 5338784 -
gatttttatagggtaaatga

SEQ ID NO: 35826 - DNA, 20 bp, Artificial Sequence
  Synthetic oligonucleotide; AGG chr11 5338780 5338799 5338783 -
atttttatagggtaaatgaa

SEQ ID NO: 35827 - DNA, 20 bp, Artificial Sequence
  Synthetic oligonucleotide; AAG chr11 5338766 5338785 5338769 -
aatgaaaggtgatatattta

SEQ ID NO: 35828 - DNA, 20 bp, Artificial Sequence
  Synthetic oligonucleotide; TAG chr11 5338755 5338774 5338758 -
atatatttaaagatacttac

SEQ ID NO: 35829 - DNA, 20 bp, Artificial Sequence
  Synthetic oligonucleotide; GAG chr11 5338745 5338764 5338748 -
agatacttactagattatat

SEQ ID NO: 35830 - DNA, 20 bp, Artificial Sequence
  Synthetic oligonucleotide; TGG chr11 5338734 5338753 5338737 -
agattatatgagtattaaat

SEQ ID NO: 35831 - DNA, 20 bp, Artificial Sequence
  Synthetic oligonucleotide; GGG chr11 5338733 5338752 5338736 -
gattatatgagtattaaatt

SEQ ID NO: 35832 - DNA, 20 bp, Artificial Sequence
  Synthetic oligonucleotide; CAG chr11 5338730 5338749 5338733 -
tatatgagtattaaattggg

SEQ ID NO: 35833 - DNA, 20 bp, Artificial Sequence
  Synthetic oligonucleotide; AAG chr11 5338726 5338745 5338729 -
tgagtattaaattgggcagc

SEQ ID NO: 35834 - DNA, 20 bp, Artificial Sequence
  Synthetic oligonucleotide; AGG chr11 5338725 5338744 5338728 -
gagtattaaattgggcagca

SEQ ID NO: 35835 - DNA, 20 bp, Artificial Sequence
  Synthetic oligonucleotide; TAG chr11 5338717 5338736 5338720 -
aattgggcagcaaggatgat

SEQ ID NO: 35836 - DNA, 20 bp, Artificial Sequence
  Synthetic oligonucleotide; AAG chr11 5338706 5338725 5338709 -
aaggatgattagaaatgatt

SEQ ID NO: 35837 - DNA, 20 bp, Artificial Sequence
  Synthetic oligonucleotide; AGG chr11 5338705 5338724 5338708 -
aggatgattagaaatgatta

SEQ ID NO: 35838 - DNA, 20 bp, Artificial Sequence
  Synthetic oligonucleotide; CAG chr11 5338699 5338718 5338702 -
attagaaatgattaaggacc

SEQ ID NO: 35839 - DNA, 20 bp, Artificial Sequence
  Synthetic oligonucleotide; GAG chr11 5338697 5338716 5338700 -
tagaaatgattaaggaccca

SEQ ID NO: 35840 - DNA, 20 bp, Artificial Sequence
  Synthetic oligonucleotide; AGG chr11 5338696 5338715 5338699 -
agaaatgattaaggacccag

SEQ ID NO: 35841 - DNA, 20 bp, Artificial Sequence
  Synthetic oligonucleotide; AAG chr11 5338677 5338696 5338680 -
gaggtctccatgtccaatta

SEQ ID NO: 35842 - DNA, 20 bp, Artificial Sequence
  Synthetic oligonucleotide; TAG chr11 5338650 5338669 5338653 -
taaatctgtttttgatttta

SEQ ID NO: 35843 - DNA, 20 bp, Artificial Sequence
  Synthetic oligonucleotide; TAG chr11 5338637 5338656 5338640 -
gattttatagcctaaatcct

SEQ ID NO: 35844 - DNA, 20 bp, Artificial Sequence
  Synthetic oligonucleotide; CAG chr11 5338631 5338650 5338634 -
atagcctaaatccttagaca

SEQ ID NO: 35845 - DNA, 20 bp, Artificial Sequence
  Synthetic oligonucleotide; TAG chr11 5338607 5338626 5338610 -
cattgttattaataaactca

SEQ ID NO: 35846 - DNA, 20 bp, Artificial Sequence
  Synthetic oligonucleotide; TGG chr11 5338589 5338608 5338592 -
catagacaaaatttatttta

SEQ ID NO: 35847 - DNA, 20 bp, Artificial Sequence
  Synthetic oligonucleotide; GGG chr11 5338588 5338607 5338591 -
atagacaaaatttattttat

SEQ ID NO: 35848 - DNA, 20 bp, Artificial Sequence
  Synthetic oligonucleotide; TAG chr11 5338580 5338599 5338583 -
aatttattttatgggaaatt

SEQ ID NO: 35849 - DNA, 20 bp, Artificial Sequence
  Synthetic oligonucleotide; AGG chr11 5338579 5338598 5338582 -
atttattttatgggaaattt

SEQ ID NO: 35850 - DNA, 20 bp, Artificial Sequence
  Synthetic oligonucleotide; GAG chr11 5338577 5338596 5338580 -
ttattttatgggaaatttag

SEQ ID NO: 35851 - DNA, 20 bp, Artificial Sequence
  Synthetic oligonucleotide; TAG chr11 5338564 5338583 5338567 -
aatttaggagtttatgtccc

SEQ ID NO: 35852 - DNA, 20 bp, Artificial Sequence
  Synthetic oligonucleotide; AAG chr11 5338556 5338575 5338559 -
agtttatgtccctagatttc

SEQ ID NO: 35853 - DNA, 20 bp, Artificial Sequence
  Synthetic oligonucleotide; CAG chr11 5338535 5338554 5338538 -
agtacatgccaccaaactga

SEQ ID NO: 35854 - DNA, 20 bp, Artificial Sequence
  Synthetic oligonucleotide; CAG chr11 5338528 5338547 5338531 -
gccaccaaactgacagatga

SEQ ID NO: 35855 - DNA, 20 bp, Artificial Sequence
  Synthetic oligonucleotide; TAG chr11 5338521 5338540 5338524 -
aactgacagatgacagtgat

SEQ ID NO: 35856 - DNA, 20 bp, Artificial Sequence
  Synthetic oligonucleotide; AAG chr11 5338513 5338532 5338516 -
gatgacagtgattagtcaca

SEQ ID NO: 35857 - DNA, 20 bp, Artificial Sequence
  Synthetic oligonucleotide; TAG chr11 5338499 5338518 5338502 -
gtcacaaagtgcctcaaaaa

SEQ ID NO: 35858 - DNA, 20 bp, Artificial Sequence
  Synthetic oligonucleotide; TGG chr11 5338495 5338514 5338498 -
caaagtgcctcaaaaataga

SEQ ID NO: 35859 - DNA, 20 bp, Artificial Sequence
  Synthetic oligonucleotide; TAG chr11 5338484 5338503 5338487 -
aaaaatagatggccctatgt

SEQ ID NO: 35860 - DNA, 20 bp, Artificial Sequence
  Synthetic oligonucleotide; TGG chr11 5338478 5338497 5338481 -
agatggccctatgttagtca

SEQ ID NO: 35861 - DNA, 20 bp, Artificial Sequence
  Synthetic oligonucleotide; CAG chr11 5338470 5338489 5338473 -
ctatgttagtcatggttctc

SEQ ID NO: 35862 - DNA, 20 bp, Artificial Sequence
  Synthetic oligonucleotide; TAG chr11 5338462 5338481 5338465 -
gtcatggttctccagaaaaa

SEQ ID NO: 35863 - DNA, 20 bp, Artificial Sequence
  Synthetic oligonucleotide; CAG chr11 5338453 5338472 5338456 -
ctccagaaaaatagaatcaa

SEQ ID NO: 35864 - DNA, 20 bp, Artificial Sequence
  Synthetic oligonucleotide; AGG chr11 5338452 5338471 5338455 -
tccagaaaaatagaatcaac

SEQ ID NO: 35865 - DNA, 20 bp, Artificial Sequence
  Synthetic oligonucleotide; AAG chr11 5338423 5338442 5338426 -
ccaacttcaaattatactac

SEQ ID NO: 35866 - DNA, 20 bp, Artificial Sequence
  Synthetic oligonucleotide; AGG chr11 5338422 5338441 5338425 -
caacttcaaattatactaca

SEQ ID NO: 35867 - DNA, 20 bp, Artificial Sequence
  Synthetic oligonucleotide; CAG chr11 5338416 5338435 5338419 -
caaattatactacaaggtga

SEQ ID NO: 35868 - DNA, 20 bp, Artificial Sequence
  Synthetic oligonucleotide; CAG chr11 5338400 5338419 5338403 -
gtgacagtaactaactgaaa

SEQ ID NO: 35869 - DNA, 20 bp, Artificial Sequence
  Synthetic oligonucleotide; TGG chr11 5338395 5338414 5338398 -
agtaactaactgaaacagca

SEQ ID NO: 35870 - DNA, 20 bp, Artificial Sequence
  Synthetic oligonucleotide; CAG chr11 5338379 5338398 5338382 -
agcatggtactgataccaaa

SEQ ID NO: 35871 - DNA, 20 bp, Artificial Sequence
  Synthetic oligonucleotide; TGG chr11 5338363 5338382 5338366 -
caaacagacacactgactaa

SEQ ID NO: 35872 - DNA, 20 bp, Artificial Sequence
  Synthetic oligonucleotide; CAG chr11 5338358 5338377 5338361 -
agacacactgactaatggaa

SEQ ID NO: 35873 - DNA, 20 bp, Artificial Sequence
  Synthetic oligonucleotide; TGG chr11 5338353 5338372 5338356 -
cactgactaatggaacagaa

SEQ ID NO: 35874 - DNA, 20 bp, Artificial Sequence
  Synthetic oligonucleotide; GAG chr11 5338351 5338370 5338354 -
ctgactaatggaacagaatg

SEQ ID NO: 35875 - DNA, 20 bp, Artificial Sequence
  Synthetic oligonucleotide; CAG chr11 5338344 5338363 5338347 -
atggaacagaatggagaact

SEQ ID NO: 35876 - DNA, 20 bp, Artificial Sequence
  Synthetic oligonucleotide; AAG chr11 5338341 5338360 5338344 -
gaacagaatggagaactcag

SEQ ID NO: 35877 - DNA, 20 bp, Artificial Sequence
  Synthetic oligonucleotide; AAG chr11 5338337 5338356 5338340 -
agaatggagaactcagaagt

SEQ ID NO: 35878 - DNA, 20 bp, Artificial Sequence
  Synthetic oligonucleotide; TGG chr11 5338298 5338317 5338301 -
aatctgatcttcaacaaacc

SEQ ID NO: 35879 - DNA, 20 bp, Artificial Sequence
  Synthetic oligonucleotide; AAG chr11 5338288 5338307 5338291 -
tcaacaaacctggtaaaaac

SEQ ID NO: 35880 - DNA, 20 bp, Artificial Sequence
  Synthetic oligonucleotide; TGG chr11 5338282 5338301 5338285 -
aacctggtaaaaacaagtaa

SEQ ID NO: 35881 - DNA, 20 bp, Artificial Sequence
  Synthetic oligonucleotide; GGG chr11 5338281 5338300 5338284 -
acctggtaaaaacaagtaat

SEQ ID NO: 35882 - DNA, 20 bp, Artificial Sequence
  Synthetic oligonucleotide; GGG chr11 5338280 5338299 5338283 -
cctggtaaaaacaagtaatg

SEQ ID NO: 35883 - DNA, 20 bp, Artificial Sequence
  Synthetic oligonucleotide; AAG chr11 5338277 5338296 5338280 -
ggtaaaaacaagtaatgggg

SEQ ID NO: 35884 - DNA, 20 bp, Artificial Sequence
  Synthetic oligonucleotide; AGG chr11 5338276 5338295 5338279 -
gtaaaaacaagtaatgggga

SEQ ID NO: 35885 - DNA, 20 bp, Artificial Sequence
  Synthetic oligonucleotide; GGG chr11 5338275 5338294 5338278 -
taaaaacaagtaatggggaa

SEQ ID NO: 35886 - DNA, 20 bp, Artificial Sequence
  Synthetic oligonucleotide; TGG chr11 5338249 5338268 5338252 -
ccctattttataaattgtgc

SEQ ID NO: 35887 - DNA, 20 bp, Artificial Sequence
  Synthetic oligonucleotide; GGG chr11 5338248 5338267 5338251 -
cctattttataaattgtgct

SEQ ID NO: 35888 - DNA, 20 bp, Artificial Sequence
  Synthetic oligonucleotide; GAG chr11 5338246 5338265 5338249 -
tattttataaattgtgctgg

SEQ ID NO: 35889 - DNA, 20 bp, Artificial Sequence
  Synthetic oligonucleotide; TGG chr11 5338240 5338259 5338243 -
ataaattgtgctgggagaac

SEQ ID NO: 35890 - DNA, 20 bp, Artificial Sequence
  Synthetic oligonucleotide; TAG chr11 5338236 5338255 5338239 -
attgtgctgggagaactggc

SEQ ID NO: 35891 - DNA, 20 bp, Artificial Sequence
  Synthetic oligonucleotide; CAG chr11 5338226 5338245 5338229 -
gagaactggctagccatatg

SEQ ID NO: 35892 - DNA, 20 bp, Artificial Sequence
  Synthetic oligonucleotide; TGG chr11 5338212 5338231 5338215 -
catatgcagaaaattgaaac

SEQ ID NO: 35893 - DNA, 20 bp, Artificial Sequence
  Synthetic oligonucleotide; AAG chr11 5338175 5338194 5338178 -
tcttatacataaattaactc

SEQ ID NO: 35894 - DNA, 20 bp, Artificial Sequence
  Synthetic oligonucleotide; AAG chr11 5338164 5338183 5338167 -
aattaactcaagatgcatta

SEQ ID NO: 35895 - DNA, 20 bp, Artificial Sequence
  Synthetic oligonucleotide; AAG chr11 5338157 5338176 5338160 -
tcaagatgcattaaagactt

SEQ ID NO: 35896 - DNA, 20 bp, Artificial Sequence
  Synthetic oligonucleotide; TAG chr11 5338128 5338147 5338131 -
acccaaaactataaaaactt

SEQ ID NO: 35897 - DNA, 20 bp, Artificial Sequence
  Synthetic oligonucleotide; AAG chr11 5338125 5338144 5338128 -
caaaactataaaaactttag

SEQ ID NO: 35898 - DNA, 20 bp, Artificial Sequence
  Synthetic oligonucleotide; TAG chr11 5338116 5338135 5338119 -
aaaaactttagaagaaaacc

SEQ ID NO: 35899 - DNA, 20 bp, Artificial Sequence
  Synthetic oligonucleotide; AGG chr11 5338115 5338134 5338118 -
aaaactttagaagaaaacct

SEQ ID NO: 35900 - DNA, 20 bp, Artificial Sequence
  Synthetic oligonucleotide; CGG chr11 5338101 5338120 5338104 -
aaacctaggcaataccattc

SEQ ID NO: 35901 - DNA, 20 bp, Artificial Sequence
  Synthetic oligonucleotide; TAG chr11 5338095 5338114 5338098 -
aggcaataccattccggaca

SEQ ID NO: 35902 - DNA, 20 bp, Artificial Sequence
  Synthetic oligonucleotide; CAG chr11 5338089 5338108 5338092 -
taccattccggacatagaca

SEQ ID NO: 35903 - DNA, 20 bp, Artificial Sequence
  Synthetic oligonucleotide; AGG chr11 5338088 5338107 5338091 -
accattccggacatagacac

SEQ ID NO: 35904 - DNA, 20 bp, Artificial Sequence
  Synthetic oligonucleotide; AAG chr11 5338083 5338102 5338086 -
tccggacatagacacaggca

SEQ ID NO: 35905 - DNA, 20 bp, Artificial Sequence
  Synthetic oligonucleotide; AAG chr11 5338044 5338063 5338047 -
gtcaaaaacaattgcaacaa

SEQ ID NO: 35906 - DNA, 20 bp, Artificial Sequence
  Synthetic oligonucleotide; GAG chr11 5338026 5338045 5338029 -
aaaagcaaacactgtcaaat

SEQ ID NO: 35907 - DNA, 20 bp, Artificial Sequence
  Synthetic oligonucleotide; AAG chr11 5338009 5338028 5338012 -
aatgagatctaattaaacta

SEQ ID NO: 35908 - DNA, 20 bp, Artificial Sequence
  Synthetic oligonucleotide; GAG chr11 5338007 5338026 5338010 -
tgagatctaattaaactaaa

SEQ ID NO: 35909 - DNA, 20 bp, Artificial Sequence
  Synthetic oligonucleotide; CGG chr11 5338002 5338021 5338005 -
tctaattaaactaaagagat

SEQ ID NO: 35910 - DNA, 20 bp, Artificial Sequence
  Synthetic oligonucleotide; GGG chr11 5338001 5338020 5338004 -
ctaattaaactaaagagatc

SEQ ID NO: 35911 - DNA, 20 bp, Artificial Sequence
  Synthetic oligonucleotide; TGG chr11 5337996 5338015 5337999 -
taaactaaagagatcgggca

SEQ ID NO: 35912 - DNA, 20 bp, Artificial Sequence
  Synthetic oligonucleotide; TGG chr11 5337993 5338012 5337996 -
actaaagagatcgggcatgg

SEQ ID NO: 35913 - DNA, 20 bp, Artificial Sequence
  Synthetic oligonucleotide; CAG chr11 5337974 5337993 5337977 -
gtggctcacgcctgtaatcc

SEQ ID NO: 35914 - DNA, 20 bp, Artificial Sequence
  Synthetic oligonucleotide; TGG chr11 5337966 5337985 5337969 -
cgcctgtaatcccagcactt

SEQ ID NO: 35915 - DNA, 20 bp, Artificial Sequence
  Synthetic oligonucleotide; GGG chr11 5337965 5337984 5337968 -
gcctgtaatcccagcacttt

SEQ ID NO: 35916 - DNA, 20 bp, Artificial Sequence
  Synthetic oligonucleotide; GAG chr11 5337963 5337982 5337966 -
ctgtaatcccagcactttgg

SEQ ID NO: 35917 - DNA, 20 bp, Artificial Sequence
  Synthetic oligonucleotide; AGG chr11 5337962 5337981 5337965 -
tgtaatcccagcactttggg

SEQ ID NO: 35918 - DNA, 20 bp, Artificial Sequence
  Synthetic oligonucleotide; AAG chr11 5337957 5337976 5337960 -
tcccagcactttgggaggcc

SEQ ID NO: 35919 - DNA, 20 bp, Artificial Sequence
  Synthetic oligonucleotide; AGG chr11 5337956 5337975 5337959 -
cccagcactttgggaggcca

SEQ ID NO: 35920 - DNA, 20 bp, Artificial Sequence
  Synthetic oligonucleotide; TGG chr11 5337953 5337972 5337956 -
agcactttgggaggccaagg

SEQ ID NO: 35921 - DNA, 20 bp, Artificial Sequence
  Synthetic oligonucleotide; GGG chr11 5337952 5337971 5337955 -
gcactttgggaggccaaggt

SEQ ID NO: 35922 - DNA, 20 bp, Artificial Sequence
  Synthetic oligonucleotide; TGG chr11 5337949 5337968 5337952 -
ctttgggaggccaaggtggg

SEQ ID NO: 35923 - DNA, 20 bp, Artificial Sequence
  Synthetic oligonucleotide; GAG chr11 5337939 5337958 5337942 -
ccaaggtgggtggatcactt

SEQ ID NO: 35924 - DNA, 20 bp, Artificial Sequence
  Synthetic oligonucleotide; AGG chr11 5337938 5337957 5337941 -
caaggtgggtggatcacttg

SEQ ID NO: 35925 - DNA, 20 bp, Artificial Sequence
  Synthetic oligonucleotide; TGG chr11 5337935 5337954 5337938 -
ggtgggtggatcacttgagg

SEQ ID NO: 35926 - DNA, 20 bp, Artificial Sequence
  Synthetic oligonucleotide; GGG chr11 5337934 5337953 5337937 -
gtgggtggatcacttgaggt

SEQ ID NO: 35927 - DNA, 20 bp, Artificial Sequence
  Synthetic oligonucleotide; GGG chr11 5337933 5337952 5337936 -
tgggtggatcacttgaggtg

SEQ ID NO: 35928 - DNA, 20 bp, Artificial Sequence
  Synthetic oligonucleotide; GAG chr11 5337931 5337950 5337934 -
ggtggatcacttgaggtggg

SEQ ID NO: 35929 - DNA, 20 bp, Artificial Sequence
  Synthetic oligonucleotide; AAG chr11 5337925 5337944 5337928 -
tcacttgaggtggggagtat

SEQ ID NO: 35930 - DNA, 20 bp, Artificial Sequence
  Synthetic oligonucleotide; GAG chr11 5337923 5337942 5337926 -
acttgaggtggggagtataa

SEQ ID NO: 35931 - DNA, 20 bp, Artificial Sequence
  Synthetic oligonucleotide; CAG chr11 5337920 5337939 5337923 -
tgaggtggggagtataagag

SEQ ID NO: 35932 - DNA, 20 bp, Artificial Sequence
  Synthetic oligonucleotide; TGG chr11 5337915 5337934 5337918 -
tggggagtataagagcagcc

SEQ ID NO: 35933 - DNA, 20 bp, Artificial Sequence
  Synthetic oligonucleotide; TGG chr11 5337906 5337925 5337909 -
taagagcagcctggccaaca

SEQ ID NO: 35934 - DNA, 20 bp, Artificial Sequence
  Synthetic oligonucleotide; TGG chr11 5337866 5337885 5337869 -
taaaaatacaaaaaatgtgc

SEQ ID NO: 35935 - DNA, 20 bp, Artificial Sequence
  Synthetic oligonucleotide; GGG chr11 5337865 5337884 5337868 -
aaaaatacaaaaaatgtgct

SEQ ID NO: 35936 - DNA, 20 bp, Artificial Sequence
  Synthetic oligonucleotide; TGG chr11 5337860 5337879 5337863 -
tacaaaaaatgtgctgggta

SEQ ID NO: 35937 - DNA, 20 bp, Artificial Sequence
  Synthetic oligonucleotide; TGG chr11 5337857 5337876 5337860 -
aaaaaatgtgctgggtatgg

SEQ ID NO: 35938 - DNA, 20 bp, Artificial Sequence
  Synthetic oligonucleotide; CAG chr11 5337838 5337857 5337841 -
gtggtgcgtacctgtaatct

SEQ ID NO: 35939 - DNA, 20 bp, Artificial Sequence
  Synthetic oligonucleotide; CAG chr11 5337830 5337849 5337833 -
tacctgtaatctcagctact

SEQ ID NO: 35940 - DNA, 20 bp, Artificial Sequence
  Synthetic oligonucleotide; AGG chr11 5337829 5337848 5337832 -
acctgtaatctcagctactc

SEQ ID NO: 35941 - DNA, 20 bp, Artificial Sequence
  Synthetic oligonucleotide; GAG chr11 5337827 5337846 5337830 -
ctgtaatctcagctactcag

SEQ ID NO: 35942 - DNA, 20 bp, Artificial Sequence
  Synthetic oligonucleotide; AGG chr11 5337826 5337845 5337829 -
tgtaatctcagctactcagg

SEQ ID NO: 35943 - DNA, 20 bp, Artificial Sequence
  Synthetic oligonucleotide; GAG chr11 5337821 5337840 5337824 -
tctcagctactcaggaggct

SEQ ID NO: 35944 - DNA, 20 bp, Artificial Sequence
  Synthetic oligonucleotide; AGG chr11 5337820 5337839 5337823 -
ctcagctactcaggaggctg

SEQ ID NO: 35945 - DNA, 20 bp, Artificial Sequence
  Synthetic oligonucleotide; CAG chr11 5337817 5337836 5337820 -
agctactcaggaggctgagg

SEQ ID NO: 35946 - DNA, 20 bp, Artificial Sequence
  Synthetic oligonucleotide; AGG chr11 5337816 5337835 5337819 -
gctactcaggaggctgaggc

SEQ ID NO: 35947 - DNA, 20 bp, Artificial Sequence
  Synthetic oligonucleotide; GAG chr11 5337814 5337833 5337817 -
tactcaggaggctgaggcag

SEQ ID NO: 35948 - DNA, 20 bp, Artificial Sequence
  Synthetic oligonucleotide; CAG chr11 5337798 5337817 5337801 -
gcaggagaattgcttgaacc

SEQ ID NO: 35949 - DNA, 20 bp, Artificial Sequence
  Synthetic oligonucleotide; AGG chr11 5337797 5337816 5337800 -
caggagaattgcttgaaccc

SEQ ID NO: 35950 - DNA, 20 bp, Artificial Sequence
  Synthetic oligonucleotide; GAG chr11 5337795 5337814 5337798 -
ggagaattgcttgaacccag

SEQ ID NO: 35951 - DNA, 20 bp, Artificial Sequence
  Synthetic oligonucleotide; AGG chr11 5337794 5337813 5337797 -
gagaattgcttgaacccagg

SEQ ID NO: 35952 - DNA, 20 bp, Artificial Sequence
  Synthetic oligonucleotide; CAG chr11 5337791 5337810 5337794 -
aattgcttgaacccaggagg

SEQ ID NO: 35953 - DNA, 20 bp, Artificial Sequence
  Synthetic oligonucleotide; GAG chr11 5337789 5337808 5337792 -
ttgcttgaacccaggaggca

SEQ ID NO: 35954 - DNA, 20 bp, Artificial Sequence
  Synthetic oligonucleotide; AGG chr11 5337788 5337807 5337791 -
tgcttgaacccaggaggcag

SEQ ID NO: 35955 - DNA, 20 bp, Artificial Sequence
  Synthetic oligonucleotide; CAG chr11 5337782 5337801 5337785 -
aacccaggaggcagaggttg

SEQ ID NO: 35956 - DNA, 20 bp, Artificial Sequence
  Synthetic oligonucleotide; GAG chr11 5337778 5337797 5337781 -
caggaggcagaggttgcagt

SEQ ID NO: 35957 - DNA, 20 bp, Artificial Sequence
  Synthetic oligonucleotide; GAG chr11 5337773 5337792 5337776 -
ggcagaggttgcagtgagct

SEQ ID NO: 35958 - DNA, 20 bp, Artificial Sequence
  Synthetic oligonucleotide; TAG chr11 5337753 5337772 5337756 -
gagatcgcaccactgcactc

SEQ ID NO: 35959 - DNA, 20 bp, Artificial Sequence
  Synthetic oligonucleotide; TGG chr11 5337748 5337767 5337751 -
cgcaccactgcactctagca

SEQ ID NO: 35960 - DNA, 20 bp, Artificial Sequence
  Synthetic oligonucleotide; GGG chr11 5337747 5337766 5337750 -
gcaccactgcactctagcat

SEQ ID NO: 35961 - DNA, 20 bp, Artificial Sequence
  Synthetic oligonucleotide; AAG chr11 5337741 5337760 5337744 -
ctgcactctagcatgggtga

SEQ ID NO: 35962 - DNA, 20 bp, Artificial Sequence
  Synthetic oligonucleotide; GAG chr11 5337739 5337758 5337742 -
gcactctagcatgggtgaaa

SEQ ID NO: 35963 - DNA, 20 bp, Artificial Sequence
  Synthetic oligonucleotide; GAG chr11 5337735 5337754 5337738 -
tctagcatgggtgaaagagt

SEQ ID NO: 35964 - DNA, 20 bp, Artificial Sequence
  Synthetic oligonucleotide; AAG chr11 5337716 5337735 5337719 -
tgagacttcatctcaaaata

SEQ ID NO: 35965 - DNA, 20 bp, Artificial Sequence
  Synthetic oligonucleotide; CAG chr11 5337696 5337715 5337699 -
aagaaaaatacaattaaata

SEQ ID NO: 35966 - DNA, 20 bp, Artificial Sequence
  Synthetic oligonucleotide; GAG chr11 5337694 5337713 5337697 -
gaaaaatacaattaaataca

SEQ ID NO: 35967 - DNA, 20 bp, Artificial Sequence
  Synthetic oligonucleotide; CAG chr11 5337683 5337702 5337686 -
ttaaatacagagcttctaaa

SEQ ID NO: 35968 - DNA, 20 bp, Artificial Sequence
  Synthetic oligonucleotide; CAG chr11 5337664 5337683 5337667 -
acagcaaaataaactatcat

SEQ ID NO: 35969 - DNA, 20 bp, Artificial Sequence
  Synthetic oligonucleotide; GAG chr11 5337662 5337681 5337665 -
agcaaaataaactatcatca

SEQ ID NO: 35970 - DNA, 20 bp, Artificial Sequence
  Synthetic oligonucleotide; CAG chr11 5337655 5337674 5337658 -
taaactatcatcagagcgaa

SEQ ID NO: 35971 - DNA, 20 bp, Artificial Sequence
  Synthetic oligonucleotide; AGG chr11 5337654 5337673 5337657 -
aaactatcatcagagcgaac

SEQ ID NO: 35972 - DNA, 20 bp, Artificial Sequence
  Synthetic oligonucleotide; CAG chr11 5337644 5337663 5337647 -
cagagcgaacaggcaaccta

SEQ ID NO: 35973 - DNA, 20 bp, Artificial Sequence
  Synthetic oligonucleotide; TGG chr11 5337639 5337658 5337642 -
cgaacaggcaacctacagaa

SEQ ID NO: 35974 - DNA, 20 bp, Artificial Sequence
  Synthetic oligonucleotide; GGG chr11 5337638 5337657 5337641 -
gaacaggcaacctacagaat

SEQ ID NO: 35975 - DNA, 20 bp, Artificial Sequence
  Synthetic oligonucleotide; GAG chr11 5337636 5337655 5337639 -
acaggcaacctacagaatgg

SEQ ID NO: 35976 - DNA, 20 bp, Artificial Sequence
  Synthetic oligonucleotide; AAG chr11 5337605 5337624 5337608 -
tgcaatctacccatctgaca

SEQ ID NO: 35977 - DNA, 20 bp, Artificial Sequence
  Synthetic oligonucleotide; AGG chr11 5337604 5337623 5337607 -
gcaatctacccatctgacaa

SEQ ID NO: 35978 - DNA, 20 bp, Artificial Sequence
  Synthetic oligonucleotide; CAG chr11 5337592 5337611 5337595 -
tctgacaaaggtctaatatc

SEQ ID NO: 35979 - DNA, 20 bp, Artificial Sequence
  Synthetic oligonucleotide; GAG chr11 5337582 5337601 5337585 -
gtctaatatccagaatctat

SEQ ID NO: 35980 - DNA, 20 bp, Artificial Sequence
  Synthetic oligonucleotide; AGG chr11 5337581 5337600 5337584 -
tctaatatccagaatctatg

SEQ ID NO: 35981 - DNA, 20 bp, Artificial Sequence
  Synthetic oligonucleotide; TAG chr11 5337574 5337593 5337577 -
tccagaatctatgaggaact

SEQ ID NO: 35982 - DNA, 20 bp, Artificial Sequence
  Synthetic oligonucleotide; AAG chr11 5337559 5337578 5337562 -
gaacttagacatatttacaa

SEQ ID NO: 35983 - DNA, 20 bp, Artificial Sequence
  Synthetic oligonucleotide; AAG chr11 5337532 5337551 5337535 -
acacaaacaaccccattaaa

SEQ ID NO: 35984 - DNA, 20 bp, Artificial Sequence
  Synthetic oligonucleotide; TGG chr11 5337529 5337548 5337532 -
caaacaaccccattaaaaag

SEQ ID NO: 35985 - DNA, 20 bp, Artificial Sequence
  Synthetic oligonucleotide; GGG chr11 5337528 5337547 5337531 -
aaacaaccccattaaaaagt

SEQ ID NO: 35986 - DNA, 20 bp, Artificial Sequence
  Synthetic oligonucleotide; AAG chr11 5337523 5337542 5337526 -
accccattaaaaagtgggca

SEQ ID NO: 35987 - DNA, 20 bp, Artificial Sequence
  Synthetic oligonucleotide; AGG chr11 5337522 5337541 5337525 -
ccccattaaaaagtgggcaa

SEQ ID NO: 35988 - DNA, 20 bp, Artificial Sequence
  Synthetic oligonucleotide; CAG chr11 5337512 5337531 5337515 -
aagtgggcaaaggacatgaa

SEQ ID NO: 35989 - DNA, 20 bp, Artificial Sequence
  Synthetic oligonucleotide; AAG chr11 5337498 5337517 5337501 -
catgaacagacacttctcaa

SEQ ID NO: 35990 - DNA, 20 bp, Artificial Sequence
  Synthetic oligonucleotide; AAG chr11 5337495 5337514 5337498 -
gaacagacacttctcaaaag

SEQ ID NO: 35991 - DNA, 20 bp, Artificial Sequence
  Synthetic oligonucleotide; TGG chr11 5337483 5337502 5337486 -
ctcaaaagaagacatttatg

SEQ ID NO: 35992 - DNA, 20 bp, Artificial Sequence
  Synthetic oligonucleotide; AAG chr11 5337478 5337497 5337481 -
aagaagacatttatgtggct

SEQ ID NO: 35993 - DNA, 20 bp, Artificial Sequence
  Synthetic oligonucleotide; AAG chr11 5337462 5337481 5337465 -
ggctaagaaacatacgaaaa

SEQ ID NO: 35994 - DNA, 20 bp, Artificial Sequence
  Synthetic oligonucleotide; TAG chr11 5337440 5337459 5337443 -
gtctcaatgtcactgatcat

SEQ ID NO: 35995 - DNA, 20 bp, Artificial Sequence
  Synthetic oligonucleotide; GAG chr11 5337438 5337457 5337441 -
ctcaatgtcactgatcatta

SEQ ID NO: 35996 - DNA, 20 bp, Artificial Sequence
  Synthetic oligonucleotide; CAG chr11 5337396 5337415 5337399 -
aatgaaataccatctgacac

SEQ ID NO: 35997 - DNA, 20 bp, Artificial Sequence
  Synthetic oligonucleotide; CAG chr11 5337392 5337411 5337395 -
aaataccatctgacaccagt

SEQ ID NO: 35998 - DNA, 20 bp, Artificial Sequence
  Synthetic oligonucleotide; TGG chr11 5337387 5337406 5337390 -
ccatctgacaccagtcagaa

SEQ ID NO: 35999 - DNA, 20 bp, Artificial Sequence
  Synthetic oligonucleotide; TGG chr11 5337384 5337403 5337387 -
tctgacaccagtcagaatgg

SEQ ID NO: 36000 - DNA, 20 bp, Artificial Sequence
  Synthetic oligonucleotide; AAG chr11 5337375 5337394 5337378 -
agtcagaatggtggttttta

SEQ ID NO: 36001 - DNA, 20 bp, Artificial Sequence
  Synthetic oligonucleotide; AAG chr11 5337370 5337389 5337373 -
gaatggtggtttttaaagtc

SEQ ID NO: 36002 - DNA, 20 bp, Artificial Sequence
  Synthetic oligonucleotide; CAG chr11 5337361 5337380 5337364 -
tttttaaagtcaagaaacaa

SEQ ID NO: 36003 - DNA, 20 bp, Artificial Sequence
  Synthetic oligonucleotide; TAG chr11 5337354 5337373 5337357 -
agtcaagaaacaacagatgc

SEQ ID NO: 36004 - DNA, 20 bp, Artificial Sequence
  Synthetic oligonucleotide; AAG chr11 5337350 5337369 5337353 -
aagaaacaacagatgctagc

SEQ ID NO: 36005 - DNA, 20 bp, Artificial Sequence
  Synthetic oligonucleotide; AGG chr11 5337349 5337368 5337352 -
agaaacaacagatgctagca

SEQ ID NO: 36006 - DNA, 20 bp, Artificial Sequence
  Synthetic oligonucleotide; CAG chr11 5337343 5337362 5337346 -
aacagatgctagcaaggttg

SEQ ID NO: 36007 - DNA, 20 bp, Artificial Sequence
  Synthetic oligonucleotide; GAG chr11 5337341 5337360 5337344 -
cagatgctagcaaggttgca

SEQ ID NO: 36008 - DNA, 20 bp, Artificial Sequence
  Synthetic oligonucleotide; TAG chr11 5337335 5337354 5337338 -
ctagcaaggttgcagagaaa

SEQ ID NO: 36009 - DNA, 20 bp, Artificial Sequence
  Synthetic oligonucleotide; AGG chr11 5337334 5337353 5337337 -
tagcaaggttgcagagaaat

SEQ ID NO: 36010 - DNA, 20 bp, Artificial Sequence
  Synthetic oligonucleotide; TGG chr11 5337315 5337334 5337318 -
taggaacacttttacactgt

SEQ ID NO: 36011 - DNA, 20 bp, Artificial Sequence
  Synthetic oligonucleotide; TGG chr11 5337312 5337331 5337315 -
gaacacttttacactgttgg

SEQ ID NO: 36012 - DNA, 20 bp, Artificial Sequence
  Synthetic oligonucleotide; GGG chr11 5337311 5337330 5337314 -
aacacttttacactgttggt

SEQ ID NO: 36013 - DNA, 20 bp, Artificial Sequence
  Synthetic oligonucleotide; TGG chr11 5337285 5337304 5337288 -
gtaaactaattcaaccattg

SEQ ID NO: 36014 - DNA, 20 bp, Artificial Sequence
  Synthetic oligonucleotide; AAG chr11 5337282 5337301 5337285 -
aactaattcaaccattgtgg

SEQ ID NO: 36015 - DNA, 20 bp, Artificial Sequence
  Synthetic oligonucleotide; CAG chr11 5337278 5337297 5337281 -
aattcaaccattgtggaaga

SEQ ID NO: 36016 - DNA, 20 bp, Artificial Sequence
  Synthetic oligonucleotide; TGG chr11 5337273 5337292 5337276 -
aaccattgtggaagacagtg

SEQ ID NO: 36017 - DNA, 20 bp, Artificial Sequence
  Synthetic oligonucleotide; AAG chr11 5337260 5337279 5337263 -
gacagtgtggcaattcctca

SEQ ID NO: 36018 - DNA, 20 bp, Artificial Sequence
  Synthetic oligonucleotide; TAG chr11 5337254 5337273 5337257 -
gtggcaattcctcaaagatt

SEQ ID NO: 36019 - DNA, 20 bp, Artificial Sequence
  Synthetic oligonucleotide; CAG chr11 5337248 5337267 5337251 -
attcctcaaagatttagaac

SEQ ID NO: 36020 - DNA, 20 bp, Artificial Sequence
  Synthetic oligonucleotide; TGG chr11 5337215 5337234 5337218 -
tgacctcacaatcccattac

SEQ ID NO: 36021 - DNA, 20 bp, Artificial Sequence
  Synthetic oligonucleotide; GGG chr11 5337214 5337233 5337217 -
gacctcacaatcccattact

SEQ ID NO: 36022 - DNA, 20 bp, Artificial Sequence
  Synthetic oligonucleotide; AAG chr11 5337201 5337220 5337204 -
cattactgggtatataccta

SEQ ID NO: 36023 - DNA, 20 bp, Artificial Sequence
  Synthetic oligonucleotide; AGG chr11 5337200 5337219 5337203 -
attactgggtatatacctaa

SEQ ID NO: 36024 - DNA, 20 bp, Artificial Sequence
  Synthetic oligonucleotide; GAG chr11 5337198 5337217 5337201 -
tactgggtatatacctaaag

SEQ ID NO: 36025 - DNA, 20 bp, Artificial Sequence
  Synthetic oligonucleotide; AAG chr11 5337176 5337195 5337179 -
gtataaatcattctattact

SEQ ID NO: 36026 - DNA, 20 bp, Artificial Sequence
  Synthetic oligonucleotide; TAG chr11 5337149 5337168 5337152 -
atgcacatgtatgttcattg

SEQ ID NO: 36027 - DNA, 20 bp, Artificial Sequence
  Synthetic oligonucleotide; TAG chr11 5337134 5337153 5337137 -
cattgtagcactattcacaa

SEQ ID NO: 36028 - DNA, 20 bp, Artificial Sequence
  Synthetic oligonucleotide; AAG chr11 5337129 5337148 5337132 -
tagcactattcacaatagca

SEQ ID NO: 36029 - DNA, 20 bp, Artificial Sequence
  Synthetic oligonucleotide; TAG chr11 5337123 5337142 5337126 -
tattcacaatagcaaagaca

SEQ ID NO: 36030 - DNA, 20 bp, Artificial Sequence
  Synthetic oligonucleotide; TGG chr11 5337108 5337127 5337111 -
agacatagaatcaacccaaa

SEQ ID NO: 36031 - DNA, 20 bp, Artificial Sequence
  Synthetic oligonucleotide; TAG chr11 5337095 5337114 5337098 -
acccaaatggccatcaatga

SEQ ID NO: 36032 - DNA, 20 bp, Artificial Sequence
  Synthetic oligonucleotide; TGG chr11 5337077 5337096 5337080 -
gatagacaatttaaaaaatg

SEQ ID NO: 36033 - DNA, 20 bp, Artificial Sequence
  Synthetic oligonucleotide; AAG chr11 5337039 5337058 5337042 -
aaatactatctaaccataaa

SEQ ID NO: 36034 - DNA, 20 bp, Artificial Sequence
  Synthetic oligonucleotide; AGG chr11 5337038 5337057 5337041 -
aatactatctaaccataaaa

SEQ ID NO: 36035 - DNA, 20 bp, Artificial Sequence
  Synthetic oligonucleotide; GGG chr11 5337037 5337056 5337040 -
atactatctaaccataaaaa

SEQ ID NO: 36036 - DNA, 20 bp, Artificial Sequence
  Synthetic oligonucleotide; GAG chr11 5337032 5337051 5337035 -
atctaaccataaaaagggat

SEQ ID NO: 36037 - DNA, 20 bp, Artificial Sequence
  Synthetic oligonucleotide; TGG chr11 5337015 5337034 5337018 -
gatgagatcatgccctttgc

SEQ ID NO: 36038 - DNA, 20 bp, Artificial Sequence
  Synthetic oligonucleotide; GGG chr11 5337014 5337033 5337017 -
atgagatcatgccctttgct

SEQ ID NO: 36039 - DNA, 20 bp, Artificial Sequence
  Synthetic oligonucleotide; TGG chr11 5337008 5337027 5337011 -
tcatgccctttgctgggaca

SEQ ID NO: 36040 - DNA, 20 bp, Artificial Sequence
  Synthetic oligonucleotide; TGG chr11 5337004 5337023 5337007 -
gccctttgctgggacatgga

SEQ ID NO: 36041 - DNA, 20 bp, Artificial Sequence
  Synthetic oligonucleotide; GAG chr11 5337002 5337021 5337005 -
cctttgctgggacatggatg

SEQ ID NO: 36042 - DNA, 20 bp, Artificial Sequence
  Synthetic oligonucleotide; AAG chr11 5336995 5337014 5336998 -
tgggacatggatggagccga

SEQ ID NO: 36043 - DNA, 20 bp, Artificial Sequence
  Synthetic oligonucleotide; CAG chr11 5336982 5337001 5336985 -
gagccgaaagccattatctt

SEQ ID NO: 36044 - DNA, 20 bp, Artificial Sequence
  Synthetic oligonucleotide; CAG chr11 5336969 5336988 5336972 -
ttatcttcagtaaactaatg

SEQ ID NO: 36045 - DNA, 20 bp, Artificial Sequence
  Synthetic oligonucleotide; AGG chr11 5336968 5336987 5336971 -
tatcttcagtaaactaatgc

SEQ ID NO: 36046 - DNA, 20 bp, Artificial Sequence
  Synthetic oligonucleotide; CAG chr11 5336963 5336982 5336966 -
tcagtaaactaatgcaggaa

SEQ ID NO: 36047 - DNA, 20 bp, Artificial Sequence
  Synthetic oligonucleotide; TAG chr11 5336934 5336953 5336937 -
aaacaccacatgttctcact

SEQ ID NO: 36048 - DNA, 20 bp, Artificial Sequence
  Synthetic oligonucleotide; AAG chr11 5336931 5336950 5336934 -
caccacatgttctcacttag

SEQ ID NO: 36049 - DNA, 20 bp, Artificial Sequence
  Synthetic oligonucleotide; TGG chr11 5336928 5336947 5336931 -
cacatgttctcacttagaag

SEQ ID NO: 36050 - DNA, 20 bp, Artificial Sequence
  Synthetic oligonucleotide; GGG chr11 5336927 5336946 5336930 -
acatgttctcacttagaagt

SEQ ID NO: 36051 - DNA, 20 bp, Artificial Sequence
  Synthetic oligonucleotide; GAG chr11 5336925 5336944 5336928 -
atgttctcacttagaagtgg

SEQ ID NO: 36052 - DNA, 20 bp, Artificial Sequence
  Synthetic oligonucleotide; GAG chr11 5336913 5336932 5336916 -
agaagtgggagctgaacaat

SEQ ID NO: 36053 - DNA, 20 bp, Artificial Sequence
  Synthetic oligonucleotide; GAG chr11 5336907 5336926 5336910 -
gggagctgaacaatgagaat

SEQ ID NO: 36054 - DNA, 20 bp, Artificial Sequence
  Synthetic oligonucleotide; TGG chr11 5336898 5336917 5336901 -
acaatgagaatgagaacaca

SEQ ID NO: 36055 - DNA, 20 bp, Artificial Sequence
  Synthetic oligonucleotide; CAG chr11 5336892 5336911 5336895 -
agaatgagaacacatggaaa

SEQ ID NO: 36056 - DNA, 20 bp, Artificial Sequence
  Synthetic oligonucleotide; GAG chr11 5336888 5336907 5336891 -
tgagaacacatggaaacagt

SEQ ID NO: 36057 - DNA, 20 bp, Artificial Sequence
  Synthetic oligonucleotide; AGG chr11 5336887 5336906 5336890 -
gagaacacatggaaacagtg

SEQ ID NO: 36058 - DNA, 20 bp, Artificial Sequence
  Synthetic oligonucleotide; GGG chr11 5336886 5336905 5336889 -
agaacacatggaaacagtga

SEQ ID NO: 36059 - DNA, 20 bp, Artificial Sequence
  Synthetic oligonucleotide; GGG chr11 5336885 5336904 5336888 -
gaacacatggaaacagtgag

SEQ ID NO: 36060 - DNA, 20 bp, Artificial Sequence
  Synthetic oligonucleotide; AAG chr11 5336882 5336901 5336885 -
cacatggaaacagtgagggg

SEQ ID NO: 36061 - DNA, 20 bp, Artificial Sequence
  Synthetic oligonucleotide; TGG chr11 5336870 5336889 5336873 -
gtgaggggaagaacacacac

SEQ ID NO: 36062 - DNA, 20 bp, Artificial Sequence
  Synthetic oligonucleotide; GAG chr11 5336868 5336887 5336871 -
gaggggaagaacacacactg

SEQ ID NO: 36063 - DNA, 20 bp, Artificial Sequence
  Synthetic oligonucleotide; CAG chr11 5336860 5336879 5336863 -
gaacacacactggagcctgt

SEQ ID NO: 36064 - DNA, 20 bp, Artificial Sequence
  Synthetic oligonucleotide; AGG chr11 5336859 5336878 5336862 -
aacacacactggagcctgtc

SEQ ID NO: 36065 - DNA, 20 bp, Artificial Sequence
  Synthetic oligonucleotide; GGG chr11 5336858 5336877 5336861 -
acacacactggagcctgtca

SEQ ID NO: 36066 - DNA, 20 bp, Artificial Sequence
  Synthetic oligonucleotide; TGG chr11 5336853 5336872 5336856 -
cactggagcctgtcagggca

SEQ ID NO: 36067 - DNA, 20 bp, Artificial Sequence
  Synthetic oligonucleotide; GGG chr11 5336852 5336871 5336855 -
actggagcctgtcagggcat

SEQ ID NO: 36068 - DNA, 20 bp, Artificial Sequence
  Synthetic oligonucleotide; GGG chr11 5336851 5336870 5336854 -
ctggagcctgtcagggcatg

SEQ ID NO: 36069 - DNA, 20 bp, Artificial Sequence
  Synthetic oligonucleotide; TGG chr11 5336846 5336865 5336849 -
gcctgtcagggcatggggtg

SEQ ID NO: 36070 - DNA, 20 bp, Artificial Sequence
  Synthetic oligonucleotide; AAG chr11 5336841 5336860 5336844 -
tcagggcatggggtgtggtg

SEQ ID NO: 36071 - DNA, 20 bp, Artificial Sequence
  Synthetic oligonucleotide; AGG chr11 5336840 5336859 5336843 -
cagggcatggggtgtggtga

SEQ ID NO: 36072 - DNA, 20 bp, Artificial Sequence
  Synthetic oligonucleotide; GGG chr11 5336839 5336858 5336842 -
agggcatggggtgtggtgaa

SEQ ID NO: 36073 - DNA, 20 bp, Artificial Sequence
  Synthetic oligonucleotide; GGG chr11 5336838 5336857 5336841 -
gggcatggggtgtggtgaag

SEQ ID NO: 36074 - DNA, 20 bp, Artificial Sequence
  Synthetic oligonucleotide; GAG chr11 5336836 5336855 5336839 -
gcatggggtgtggtgaaggg

SEQ ID NO: 36075 - DNA, 20 bp, Artificial Sequence
  Synthetic oligonucleotide; TAG chr11 5336830 5336849 5336833 -
ggtgtggtgaaggggagcat

SEQ ID NO: 36076 - DNA, 20 bp, Artificial Sequence
  Synthetic oligonucleotide; TAG chr11 5336821 5336840 5336824 -
aaggggagcattagaaaaaa

SEQ ID NO: 36077 - DNA, 20 bp, Artificial Sequence
  Synthetic oligonucleotide; TGG chr11 5336807 5336826 5336810 -
aaaaaatagctaatgcatgc

SEQ ID NO: 36078 - DNA, 20 bp, Artificial Sequence
  Synthetic oligonucleotide; GGG chr11 5336806 5336825 5336809 -
aaaaatagctaatgcatgct

SEQ ID NO: 36079 - DNA, 20 bp, Artificial Sequence
  Synthetic oligonucleotide; TAG chr11 5336794 5336813 5336797 -
tgcatgctgggcttaacacc

SEQ ID NO: 36080 - DNA, 20 bp, Artificial Sequence
  Synthetic oligonucleotide; AGG chr11 5336793 5336812 5336796 -
gcatgctgggcttaacacct

SEQ ID NO: 36081 - DNA, 20 bp, Artificial Sequence
  Synthetic oligonucleotide; TGG chr11 5336787 5336806 5336790 -
tgggcttaacacctaggtga

SEQ ID NO: 36082 - DNA, 20 bp, Artificial Sequence
  Synthetic oligonucleotide; GGG chr11 5336786 5336805 5336789 -
gggcttaacacctaggtgat

SEQ ID NO: 36083 - DNA, 20 bp, Artificial Sequence
  Synthetic oligonucleotide; TAG chr11 5336779 5336798 5336782 -
acacctaggtgatgggttga

SEQ ID NO: 36084 - DNA, 20 bp, Artificial Sequence
  Synthetic oligonucleotide; AGG chr11 5336778 5336797 5336781 -
cacctaggtgatgggttgat

SEQ ID NO: 36085 - DNA, 20 bp, Artificial Sequence
  Synthetic oligonucleotide; CAG chr11 5336773 5336792 5336776 -
aggtgatgggttgataggta

SEQ ID NO: 36086 - DNA, 20 bp, Artificial Sequence
  Synthetic oligonucleotide; CAG chr11 5336710 5336729 5336713 -
cacatcctgcacatgtacct

SEQ ID NO: 36087 - DNA, 20 bp, Artificial Sequence
  Synthetic oligonucleotide; TGG chr11 5336669 5336688 5336672 -
attgaatgtacataaaaata

SEQ ID NO: 36088 - DNA, 20 bp, Artificial Sequence
  Synthetic oligonucleotide; TGG chr11 5336627 5336646 5336630 -
actgcattaaaaaaaaataa

SEQ ID NO: 36089 - DNA, 20 bp, Artificial Sequence
  Synthetic oligonucleotide; AAG chr11 5336589 5336608 5336592 -
ctgttgcaccaacctaatat

SEQ ID NO: 36090 - DNA, 20 bp, Artificial Sequence
  Synthetic oligonucleotide; AGG chr11 5336588 5336607 5336591 -
tgttgcaccaacctaatata

SEQ ID NO: 36091 - DNA, 20 bp, Artificial Sequence
  Synthetic oligonucleotide; TAG chr11 5336582 5336601 5336585 -
accaacctaatataaggaaa

SEQ ID NO: 36092 - DNA, 20 bp, Artificial Sequence
  Synthetic oligonucleotide; CAG chr11 5336579 5336598 5336582 -
aacctaatataaggaaatag

SEQ ID NO: 36093 - DNA, 20 bp, Artificial Sequence
  Synthetic oligonucleotide; TGG chr11 5336567 5336586 5336570 -
ggaaatagcagatgtgatta

SEQ ID NO: 36094 - DNA, 20 bp, Artificial Sequence
  Synthetic oligonucleotide; GAG chr11 5336565 5336584 5336568 -
aaatagcagatgtgattatg

SEQ ID NO: 36095 - DNA, 20 bp, Artificial Sequence
  Synthetic oligonucleotide; AGG chr11 5336564 5336583 5336567 -
aatagcagatgtgattatgg

SEQ ID NO: 36096 - DNA, 20 bp, Artificial Sequence
  Synthetic oligonucleotide; AAG chr11 5336561 5336580 5336564 -
agcagatgtgattatggagg

SEQ ID NO: 36097 - DNA, 20 bp, Artificial Sequence
  Synthetic oligonucleotide; AGG chr11 5336560 5336579 5336563 -
gcagatgtgattatggagga

SEQ ID NO: 36098 - DNA, 20 bp, Artificial Sequence
  Synthetic oligonucleotide; AAG chr11 5336556 5336575 5336559 -
atgtgattatggaggaaggc

SEQ ID NO: 36099 - DNA, 20 bp, Artificial Sequence
  Synthetic oligonucleotide; AAG chr11 5336549 5336568 5336552 -
tatggaggaaggcaagtccc

SEQ ID NO: 36100 - DNA, 20 bp, Artificial Sequence
  Synthetic oligonucleotide; CAG chr11 5336541 5336560 5336544 -
aaggcaagtcccaagatatg

SEQ ID NO: 36101 - DNA, 20 bp, Artificial Sequence
  Synthetic oligonucleotide; GAG chr11 5336539 5336558 5336542 -
ggcaagtcccaagatatgca

SEQ ID NO: 36102 - DNA, 20 bp, Artificial Sequence
  Synthetic oligonucleotide; GAG chr11 5336535 5336554 5336538 -
agtcccaagatatgcagagt

SEQ ID NO: 36103 - DNA, 20 bp, Artificial Sequence
  Synthetic oligonucleotide; AAG chr11 5336527 5336546 5336530 -
gatatgcagagtgagtcatc

SEQ ID NO: 36104 - DNA, 20 bp, Artificial Sequence
  Synthetic oligonucleotide; AAG chr11 5336514 5336533 5336517 -
agtcatcaagttgaaaactc

SEQ ID NO: 36105 - DNA, 20 bp, Artificial Sequence
  Synthetic oligonucleotide; GAG chr11 5336512 5336531 5336515 -
tcatcaagttgaaaactcaa

SEQ ID NO: 36106 - DNA, 20 bp, Artificial Sequence
  Synthetic oligonucleotide; GAG chr11 5336510 5336529 5336513 -
atcaagttgaaaactcaaga

SEQ ID NO: 36107 - DNA, 20 bp, Artificial Sequence
  Synthetic oligonucleotide; TGG chr11 5336505 5336524 5336508 -
gttgaaaactcaagagagcc

SEQ ID NO: 36108 - DNA, 20 bp, Artificial Sequence
  Synthetic oligonucleotide; TAG chr11 5336502 5336521 5336505 -
gaaaactcaagagagcctgg

SEQ ID NO: 36109 - DNA, 20 bp, Artificial Sequence
  Synthetic oligonucleotide; TAG chr11 5336497 5336516 5336500 -
ctcaagagagcctggtagtt

SEQ ID NO: 36110 - DNA, 20 bp, Artificial Sequence
  Synthetic oligonucleotide; CAG chr11 5336491 5336510 5336494 -
agagcctggtagtttagtcc

SEQ ID NO: 36111 - DNA, 20 bp, Artificial Sequence
  Synthetic oligonucleotide; AAG chr11 5336485 5336504 5336488 -
tggtagtttagtcccagtcc

SEQ ID NO: 36112 - DNA, 20 bp, Artificial Sequence
  Synthetic oligonucleotide; AAG chr11 5336478 5336497 5336481 -
ttagtcccagtccaagtctg

SEQ ID NO: 36113 - DNA, 20 bp, Artificial Sequence
  Synthetic oligonucleotide; AGG chr11 5336477 5336496 5336480 -
tagtcccagtccaagtctga

SEQ ID NO: 36114 - DNA, 20 bp, Artificial Sequence
  Synthetic oligonucleotide; TGG chr11 5336472 5336491 5336475 -
ccagtccaagtctgaaggcc

SEQ ID NO: 36115 - DNA, 20 bp, Artificial Sequence
  Synthetic oligonucleotide; GGG chr11 5336471 5336490 5336474 -
cagtccaagtctgaaggcct

SEQ ID NO: 36116 - DNA, 20 bp, Artificial Sequence
  Synthetic oligonucleotide; CAG chr11 5336465 5336484 5336468 -
aagtctgaaggcctgggaaa

SEQ ID NO: 36117 - DNA, 20 bp, Artificial Sequence
  Synthetic oligonucleotide; AGG chr11 5336464 5336483 5336467 -
agtctgaaggcctgggaaac

SEQ ID NO: 36118 - DNA, 20 bp, Artificial Sequence
  Synthetic oligonucleotide; GAG chr11 5336462 5336481 5336465 -
tctgaaggcctgggaaacag

SEQ ID NO: 36119 - DNA, 20 bp, Artificial Sequence
  Synthetic oligonucleotide; AGG chr11 5336461 5336480 5336464 -
ctgaaggcctgggaaacagg

SEQ ID NO: 36120 - DNA, 20 bp, Artificial Sequence
  Synthetic oligonucleotide; TGG chr11 5336453 5336472 5336456 -
ctgggaaacaggaggattga

SEQ ID NO: 36121 - DNA, 20 bp, Artificial Sequence
  Synthetic oligonucleotide; AAG chr11 5336434 5336453 5336437 -
atggtgtacttgcaacccaa

SEQ ID NO: 36122 - DNA, 20 bp, Artificial Sequence
  Synthetic oligonucleotide; CAG chr11 5336427 5336446 5336430 -
acttgcaacccaaaagccat

SEQ ID NO: 36123 - DNA, 20 bp, Artificial Sequence
  Synthetic oligonucleotide; AGG chr11 5336426 5336445 5336429 -
cttgcaacccaaaagccatc

SEQ ID NO: 36124 - DNA, 20 bp, Artificial Sequence
  Synthetic oligonucleotide; CAG chr11 5336420 5336439 5336423 -
acccaaaagccatcaggctt

SEQ ID NO: 36125 - DNA, 20 bp, Artificial Sequence
  Synthetic oligonucleotide; CAG chr11 5336414 5336433 5336417 -
aagccatcaggcttcagacc

SEQ ID NO: 36126 - DNA, 20 bp, Artificial Sequence
  Synthetic oligonucleotide; AGG chr11 5336413 5336432 5336416 -
agccatcaggcttcagaccc

SEQ ID NO: 36127 - DNA, 20 bp, Artificial Sequence
  Synthetic oligonucleotide; AAG chr11 5336410 5336429 5336413 -
catcaggcttcagacccagg

SEQ ID NO: 36128 - DNA, 20 bp, Artificial Sequence
  Synthetic oligonucleotide; CAG chr11 5336396 5336415 5336399 -
cccaggaagttttgatgttt

SEQ ID NO: 36129 - DNA, 20 bp, Artificial Sequence
  Synthetic oligonucleotide; AAG chr11 5336384 5336403 5336387 -
tgatgtttcagttcaatcta

SEQ ID NO: 36130 - DNA, 20 bp, Artificial Sequence
  Synthetic oligonucleotide; AGG chr11 5336383 5336402 5336386 -
gatgtttcagttcaatctaa

SEQ ID NO: 36131 - DNA, 20 bp, Artificial Sequence
  Synthetic oligonucleotide; CAG chr11 5336380 5336399 5336383 -
gtttcagttcaatctaaagg

SEQ ID NO: 36132 - DNA, 20 bp, Artificial Sequence
  Synthetic oligonucleotide; AAG chr11 5336372 5336391 5336375 -
tcaatctaaaggcagaaaaa

SEQ ID NO: 36133 - DNA, 20 bp, Artificial Sequence
  Synthetic oligonucleotide; AGG chr11 5336371 5336390 5336374 -
caatctaaaggcagaaaaaa

SEQ ID NO: 36134 - DNA, 20 bp, Artificial Sequence
  Synthetic oligonucleotide; TAG chr11 5336366 5336385 5336369 -
taaaggcagaaaaaaaggtc

SEQ ID NO: 36135 - DNA, 20 bp, Artificial Sequence
  Synthetic oligonucleotide; CAG chr11 5336359 5336378 5336362 -
agaaaaaaaggtctagattc

SEQ ID NO: 36136 - DNA, 20 bp, Artificial Sequence
  Synthetic oligonucleotide; AAG chr11 5336352 5336371 5336355 -
aaggtctagattccagtttg

SEQ ID NO: 36137 - DNA, 20 bp, Artificial Sequence
  Synthetic oligonucleotide; AGG chr11 5336351 5336370 5336354 -
aggtctagattccagtttga

SEQ ID NO: 36138 - DNA, 20 bp, Artificial Sequence
  Synthetic oligonucleotide; AAG chr11 5336340 5336359 5336343 -
ccagtttgaaggccatcaat

SEQ ID NO: 36139 - DNA, 20 bp, Artificial Sequence
  Synthetic oligonucleotide; AGG chr11 5336339 5336358 5336342 -
cagtttgaaggccatcaata

SEQ ID NO: 36140 - DNA, 20 bp, Artificial Sequence
  Synthetic oligonucleotide; TGG chr11 5336319 5336338 5336322 -
aggaataattctctctgatt

SEQ ID NO: 36141 - DNA, 20 bp, Artificial Sequence
  Synthetic oligonucleotide; GGG chr11 5336318 5336337 5336321 -
ggaataattctctctgattt

SEQ ID NO: 36142 - DNA, 20 bp, Artificial Sequence
  Synthetic oligonucleotide; GGG chr11 5336317 5336336 5336320 -
gaataattctctctgatttg

SEQ ID NO: 36143 - DNA, 20 bp, Artificial Sequence
  Synthetic oligonucleotide; AAG chr11 5336314 5336333 5336317 -
taattctctctgatttgggg

SEQ ID NO: 36144 - DNA, 20 bp, Artificial Sequence
  Synthetic oligonucleotide; AGG chr11 5336313 5336332 5336316 -
aattctctctgatttgggga

SEQ ID NO: 36145 - DNA, 20 bp, Artificial Sequence
  Synthetic oligonucleotide; GGG chr11 5336312 5336331 5336315 -
attctctctgatttggggaa

SEQ ID NO: 36146 - DNA, 20 bp, Artificial Sequence
  Synthetic oligonucleotide; CAG chr11 5336308 5336327 5336311 -
tctctgatttggggaagggt

SEQ ID NO: 36147 - DNA, 20 bp, Artificial Sequence
  Synthetic oligonucleotide; CAG chr11 5336290 5336309 5336293 -
gtcagactttttgttctatt

SEQ ID NO: 36148 - DNA, 20 bp, Artificial Sequence
  Synthetic oligonucleotide; AGG chr11 5336289 5336308 5336292 -
tcagactttttgttctattc

SEQ ID NO: 36149 - DNA, 20 bp, Artificial Sequence
  Synthetic oligonucleotide; TGG chr11 5336274 5336293 5336277 -
tattcaggttttcaactgat

SEQ ID NO: 36150 - DNA, 20 bp, Artificial Sequence
  Synthetic oligonucleotide; GAG chr11 5336272 5336291 5336275 -
ttcaggttttcaactgattg

SEQ ID NO: 36151 - DNA, 20 bp, Artificial Sequence
  Synthetic oligonucleotide; AGG chr11 5336271 5336290 5336274 -
tcaggttttcaactgattgg

SEQ ID NO: 36152 - DNA, 20 bp, Artificial Sequence
  Synthetic oligonucleotide; AAG chr11 5336268 5336287 5336271 -
ggttttcaactgattggagg

SEQ ID NO: 36153 - DNA, 20 bp, Artificial Sequence
  Synthetic oligonucleotide; TAG chr11 5336255 5336274 5336258 -
ttggaggaagccgcctgcaa

SEQ ID NO: 36154 - DNA, 20 bp, Artificial Sequence
  Synthetic oligonucleotide; AGG chr11 5336254 5336273 5336257 -
tggaggaagccgcctgcaat

SEQ ID NO: 36155 - DNA, 20 bp, Artificial Sequence
  Synthetic oligonucleotide; AAG chr11 5336251 5336270 5336254 -
aggaagccgcctgcaatagg

SEQ ID NO: 36156 - DNA, 20 bp, Artificial Sequence
  Synthetic oligonucleotide; AGG chr11 5336250 5336269 5336253 -
ggaagccgcctgcaatagga

SEQ ID NO: 36157 - DNA, 20 bp, Artificial Sequence
  Synthetic oligonucleotide; TGG chr11 5336232 5336251 5336235 -
gaaggaccatctgctctact

SEQ ID NO: 36158 - DNA, 20 bp, Artificial Sequence
  Synthetic oligonucleotide; TAG chr11 5336178 5336197 5336181 -
aacaccctcacaaaaacatc

SEQ ID NO: 36159 - DNA, 20 bp, Artificial Sequence
  Synthetic oligonucleotide; TGG chr11 5336155 5336174 5336158 -
aataatgtttgacaaatatt

SEQ ID NO: 36160 - DNA, 20 bp, Artificial Sequence
  Synthetic oligonucleotide; GGG chr11 5336154 5336173 5336157 -
ataatgtttgacaaatattt

SEQ ID NO: 36161 - DNA, 20 bp, Artificial Sequence
  Synthetic oligonucleotide; TGG chr11 5336144 5336163 5336147 -
acaaatatttgggcacccca

SEQ ID NO: 36162 - DNA, 20 bp, Artificial Sequence
  Synthetic oligonucleotide; CAG chr11 5336139 5336158 5336142 -
tatttgggcaccccatggcc

SEQ ID NO: 36163 - DNA, 20 bp, Artificial Sequence
  Synthetic oligonucleotide; TGG chr11 5336130 5336149 5336133 -
accccatggcccagtcaaat

SEQ ID NO: 36164 - DNA, 20 bp, Artificial Sequence
  Synthetic oligonucleotide; CAG chr11 5336110 5336129 5336113 -
tggcatataaaattaaccat

SEQ ID NO: 36165 - DNA, 20 bp, Artificial Sequence
  Synthetic oligonucleotide; GAG chr11 5336108 5336127 5336111 -
gcatataaaattaaccatca

SEQ ID NO: 36166 - DNA, 20 bp, Artificial Sequence
  Synthetic oligonucleotide; TAG chr11 5336101 5336120 5336104 -
aaattaaccatcagagcctg

SEQ ID NO: 36167 - DNA, 20 bp, Artificial Sequence
  Synthetic oligonucleotide; GAG chr11 5336099 5336118 5336102 -
attaaccatcagagcctgta

SEQ ID NO: 36168 - DNA, 20 bp, Artificial Sequence
  Synthetic oligonucleotide; AGG chr11 5336098 5336117 5336101 -
ttaaccatcagagcctgtag

SEQ ID NO: 36169 - DNA, 20 bp, Artificial Sequence
  Synthetic oligonucleotide; GAG chr11 5336093 5336112 5336096 -
catcagagcctgtagaggat

SEQ ID NO: 36170 - DNA, 20 bp, Artificial Sequence
  Synthetic oligonucleotide; AAG chr11 5336087 5336106 5336090 -
agcctgtagaggatgagtta

SEQ ID NO: 36171 - DNA, 20 bp, Artificial Sequence
  Synthetic oligonucleotide; AGG chr11 5336086 5336105 5336089 -
gcctgtagaggatgagttaa

SEQ ID NO: 36172 - DNA, 20 bp, Artificial Sequence
  Synthetic oligonucleotide; TGG chr11 5336082 5336101 5336085 -
gtagaggatgagttaaagga

SEQ ID NO: 36173 - DNA, 20 bp, Artificial Sequence
  Synthetic oligonucleotide; CGG chr11 5336073 5336092 5336076 -
gagttaaaggatggaatctt

SEQ ID NO: 36174 - DNA, 20 bp, Artificial Sequence
  Synthetic oligonucleotide; GAG chr11 5336071 5336090 5336074 -
gttaaaggatggaatcttcg

SEQ ID NO: 36175 - DNA, 20 bp, Artificial Sequence
  Synthetic oligonucleotide; TGG chr11 5336061 5336080 5336064 -
ggaatcttcggagataattg

SEQ ID NO: 36176 - DNA, 20 bp, Artificial Sequence
  Synthetic oligonucleotide; CAG chr11 5336054 5336073 5336057 -
tcggagataattgtggaatc

SEQ ID NO: 36177 - DNA, 20 bp, Artificial Sequence
  Synthetic oligonucleotide; AAG chr11 5336051 5336070 5336054 -
gagataattgtggaatccag

SEQ ID NO: 36178 - DNA, 20 bp, Artificial Sequence
  Synthetic oligonucleotide; AGG chr11 5336050 5336069 5336053 -
agataattgtggaatccaga

SEQ ID NO: 36179 - DNA, 20 bp, Artificial Sequence
  Synthetic oligonucleotide; CAG chr11 5336043 5336062 5336046 -
tgtggaatccagaaggctga

SEQ ID NO: 36180 - DNA, 20 bp, Artificial Sequence
  Synthetic oligonucleotide; TAG chr11 5336036 5336055 5336039 -
tccagaaggctgacagataa

SEQ ID NO: 36181 - DNA, 20 bp, Artificial Sequence
  Synthetic oligonucleotide; CAG chr11 5336021 5336040 5336024 -
gataatagaatcaaactaca

SEQ ID NO: 36182 - DNA, 20 bp, Artificial Sequence
  Synthetic oligonucleotide; AAG chr11 5336006 5336025 5336009 -
ctacacagaaaaaaaaaaaa

SEQ ID NO: 36183 - DNA, 20 bp, Artificial Sequence
  Synthetic oligonucleotide; AAG chr11 5336003 5336022 5336006 -
cacagaaaaaaaaaaaaaag

SEQ ID NO: 36184 - DNA, 20 bp, Artificial Sequence
  Synthetic oligonucleotide; TGG chr11 5335999 5336018 5336002 -
gaaaaaaaaaaaaaagaagc

SEQ ID NO: 36185 - DNA, 20 bp, Artificial Sequence
  Synthetic oligonucleotide; CAG chr11 5335990 5336009 5335993 -
aaaaaagaagctggtattgt

SEQ ID NO: 36186 - DNA, 20 bp, Artificial Sequence
  Synthetic oligonucleotide; CAG chr11 5335985 5336004 5335988 -
agaagctggtattgtcagca

SEQ ID NO: 36187 - DNA, 20 bp, Artificial Sequence
  Synthetic oligonucleotide; CAG chr11 5335968 5335987 5335971 -
gcacagacttactcaacaaa

SEQ ID NO: 36188 - DNA, 20 bp, Artificial Sequence
  Synthetic oligonucleotide; TAG chr11 5335956 5335975 5335959 -
tcaacaaacagcaaaaatcc

SEQ ID NO: 36189 - DNA, 20 bp, Artificial Sequence
  Synthetic oligonucleotide; AGG chr11 5335955 5335974 5335958 -
caacaaacagcaaaaatcct

SEQ ID NO: 36190 - DNA, 20 bp, Artificial Sequence
  Synthetic oligonucleotide; TAG chr11 5335951 5335970 5335954 -
aaacagcaaaaatcctagga

SEQ ID NO: 36191 - DNA, 20 bp, Artificial Sequence
  Synthetic oligonucleotide; GAG chr11 5335949 5335968 5335952 -
acagcaaaaatcctaggata

SEQ ID NO: 36192 - DNA, 20 bp, Artificial Sequence
  Synthetic oligonucleotide; TAG chr11 5335931 5335950 5335934 -
tagagaccttcctgaatcgt

SEQ ID NO: 36193 - DNA, 20 bp, Artificial Sequence
  Synthetic oligonucleotide; AAG chr11 5335922 5335941 5335925 -
tcctgaatcgttagcgatat

SEQ ID NO: 36194 - DNA, 20 bp, Artificial Sequence
  Synthetic oligonucleotide; AAG chr11 5335874 5335893 5335877 -
ctatatgccatatgtaatat

SEQ ID NO: 36195 - DNA, 20 bp, Artificial Sequence
  Synthetic oligonucleotide; AGG chr11 5335873 5335892 5335876 -
tatatgccatatgtaatata

SEQ ID NO: 36196 - DNA, 20 bp, Artificial Sequence
  Synthetic oligonucleotide; CAG chr11 5335870 5335889 5335873 -
atgccatatgtaatataagg

SEQ ID NO: 36197 - DNA, 20 bp, Artificial Sequence
  Synthetic oligonucleotide; CAG chr11 5335867 5335886 5335870 -
ccatatgtaatataaggcag

SEQ ID NO: 36198 - DNA, 20 bp, Artificial Sequence
  Synthetic oligonucleotide; TAG chr11 5335863 5335882 5335866 -
atgtaatataaggcagcagt

SEQ ID NO: 36199 - DNA, 20 bp, Artificial Sequence
  Synthetic oligonucleotide; TAG chr11 5335857 5335876 5335860 -
tataaggcagcagttagata

SEQ ID NO: 36200 - DNA, 20 bp, Artificial Sequence
  Synthetic oligonucleotide; CAG chr11 5335844 5335863 5335847 -
ttagatatagactgtgatgc

SEQ ID NO: 36201 - DNA, 20 bp, Artificial Sequence
  Synthetic oligonucleotide; GAG chr11 5335842 5335861 5335845 -
agatatagactgtgatgcca

SEQ ID NO: 36202 - DNA, 20 bp, Artificial Sequence
  Synthetic oligonucleotide; CAG chr11 5335837 5335856 5335840 -
tagactgtgatgccagagct

SEQ ID NO: 36203 - DNA, 20 bp, Artificial Sequence
  Synthetic oligonucleotide; AAG chr11 5335831 5335850 5335834 -
gtgatgccagagctcagacc

SEQ ID NO: 36204 - DNA, 20 bp, Artificial Sequence
  Synthetic oligonucleotide; GAG chr11 5335829 5335848 5335832 -
gatgccagagctcagaccaa

SEQ ID NO: 36205 - DNA, 20 bp, Artificial Sequence
  Synthetic oligonucleotide; AAG chr11 5335824 5335843 5335827 -
cagagctcagaccaagagcc

SEQ ID NO: 36206 - DNA, 20 bp, Artificial Sequence
  Synthetic oligonucleotide; AGG chr11 5335823 5335842 5335826 -
agagctcagaccaagagcca

SEQ ID NO: 36207 - DNA, 20 bp, Artificial Sequence
  Synthetic oligonucleotide; TAG chr11 5335818 5335837 5335821 -
tcagaccaagagccaaggaa

SEQ ID NO: 36208 - DNA, 20 bp, Artificial Sequence
  Synthetic oligonucleotide; AGG chr11 5335817 5335836 5335820 -
cagaccaagagccaaggaat

SEQ ID NO: 36209 - DNA, 20 bp, Artificial Sequence
  Synthetic oligonucleotide; AAG chr11 5335814 5335833 5335817 -
accaagagccaaggaatagg

SEQ ID NO: 36210 - DNA, 20 bp, Artificial Sequence
  Synthetic oligonucleotide; CAG chr11 5335809 5335828 5335812 -
gagccaaggaataggaagac

SEQ ID NO: 36211 - DNA, 20 bp, Artificial Sequence
  Synthetic oligonucleotide; AAG chr11 5335786 5335805 5335789 -
aaaaatattttcattttaaa

SEQ ID NO: 36212 - DNA, 20 bp, Artificial Sequence
  Synthetic oligonucleotide; TAG chr11 5335782 5335801 5335785 -
atattttcattttaaaaagt

SEQ ID NO: 36213 - DNA, 20 bp, Artificial Sequence
  Synthetic oligonucleotide; AGG chr11 5335781 5335800 5335784 -
tattttcattttaaaaagtt

SEQ ID NO: 36214 - DNA, 20 bp, Artificial Sequence
  Synthetic oligonucleotide; TGG chr11 5335763 5335782 5335766 -
ttaggtaatttctaataatg

SEQ ID NO: 36215 - DNA, 20 bp, Artificial Sequence
  Synthetic oligonucleotide; GAG chr11 5335754 5335773 5335757 -
ttctaataatgtggctgcct

SEQ ID NO: 36216 - DNA, 20 bp, Artificial Sequence
  Synthetic oligonucleotide; CAG chr11 5335745 5335764 5335748 -
tgtggctgcctgagtatttt

SEQ ID NO: 36217 - DNA, 20 bp, Artificial Sequence
  Synthetic oligonucleotide; CAG chr11 5335740 5335759 5335743 -
ctgcctgagtattttcagca

SEQ ID NO: 36218 - DNA, 20 bp, Artificial Sequence
  Synthetic oligonucleotide; TAG chr11 5335707 5335726 5335710 -
aaatattgtgttatgtgatt

SEQ ID NO: 36219 - DNA, 20 bp, Artificial Sequence
  Synthetic oligonucleotide; AAG chr11 5335703 5335722 5335706 -
attgtgttatgtgatttaga

SEQ ID NO: 36220 - DNA, 20 bp, Artificial Sequence
  Synthetic oligonucleotide; GAG chr11 5335701 5335720 5335704 -
tgtgttatgtgatttagaaa

SEQ ID NO: 36221 - DNA, 20 bp, Artificial Sequence
  Synthetic oligonucleotide; CAG chr11 5335697 5335716 5335700 -
ttatgtgatttagaaagaga

SEQ ID NO: 36222 - DNA, 20 bp, Artificial Sequence
  Synthetic oligonucleotide; AGG chr11 5335696 5335715 5335699 -
tatgtgatttagaaagagac

SEQ ID NO: 36223 - DNA, 20 bp, Artificial Sequence
  Synthetic oligonucleotide; CAG chr11 5335689 5335708 5335692 -
tttagaaagagacaggcact

SEQ ID NO: 36224 - DNA, 20 bp, Artificial Sequence
  Synthetic oligonucleotide; CGG chr11 5335686 5335705 5335689 -
agaaagagacaggcactcag

SEQ ID NO: 36225 - DNA, 20 bp, Artificial Sequence
  Synthetic oligonucleotide; CAG chr11 5335672 5335691 5335675 -
actcagcggatgacccttgt

SEQ ID NO: 36226 - DNA, 20 bp, Artificial Sequence
  Synthetic oligonucleotide; AGG chr11 5335671 5335690 5335674 -
ctcagcggatgacccttgtc

SEQ ID NO: 36227 - DNA, 20 bp, Artificial Sequence
  Synthetic oligonucleotide; AAG chr11 5335655 5335674 5335658 -
tgtcaggaaacactgcatca

SEQ ID NO: 36228 - DNA, 20 bp, Artificial Sequence
  Synthetic oligonucleotide; AAG chr11 5335652 5335671 5335655 -
caggaaacactgcatcaaag

SEQ ID NO: 36229 - DNA, 20 bp, Artificial Sequence
  Synthetic oligonucleotide; AGG chr11 5335651 5335670 5335654 -
aggaaacactgcatcaaaga

SEQ ID NO: 36230 - DNA, 20 bp, Artificial Sequence
  Synthetic oligonucleotide; CAG chr11 5335639 5335658 5335642 -
atcaaagaaggcttttatta

SEQ ID NO: 36231 - DNA, 20 bp, Artificial Sequence
  Synthetic oligonucleotide; AGG chr11 5335638 5335657 5335641 -
tcaaagaaggcttttattac

SEQ ID NO: 36232 - DNA, 20 bp, Artificial Sequence
  Synthetic oligonucleotide; GAG chr11 5335636 5335655 5335639 -
aaagaaggcttttattacag

SEQ ID NO: 36233 - DNA, 20 bp, Artificial Sequence
  Synthetic oligonucleotide; TGG chr11 5335632 5335651 5335635 -
aaggcttttattacaggaga

SEQ ID NO: 36234 - DNA, 20 bp, Artificial Sequence
  Synthetic oligonucleotide; GAG chr11 5335630 5335649 5335633 -
ggcttttattacaggagatg

SEQ ID NO: 36235 - DNA, 20 bp, Artificial Sequence
  Synthetic oligonucleotide; AGG chr11 5335629 5335648 5335632 -
gcttttattacaggagatgg

SEQ ID NO: 36236 - DNA, 20 bp, Artificial Sequence
  Synthetic oligonucleotide; GAG chr11 5335613 5335632 5335616 -
atggaggtccttcccaatct

SEQ ID NO: 36237 - DNA, 20 bp, Artificial Sequence
  Synthetic oligonucleotide; CAG chr11 5335578 5335597 5335581 -
tgacatgatactttacttca

SEQ ID NO: 36238 - DNA, 20 bp, Artificial Sequence
  Synthetic oligonucleotide; AGG chr11 5335577 5335596 5335580 -
gacatgatactttacttcac

SEQ ID NO: 36239 - DNA, 20 bp, Artificial Sequence
  Synthetic oligonucleotide; CAG chr11 5335569 5335588 5335572 -
actttacttcacaggcaata

SEQ ID NO: 36240 - DNA, 20 bp, Artificial Sequence
  Synthetic oligonucleotide; CAG chr11 5335566 5335585 5335569 -
ttacttcacaggcaatacag

SEQ ID NO: 36241 - DNA, 20 bp, Artificial Sequence
  Synthetic oligonucleotide; AGG chr11 5335565 5335584 5335568 -
tacttcacaggcaatacagc

SEQ ID NO: 36242 - DNA, 20 bp, Artificial Sequence
  Synthetic oligonucleotide; AAG chr11 5335553 5335572 5335556 -
aatacagcaggaaatatgaa

SEQ ID NO: 36243 - DNA, 20 bp, Artificial Sequence
  Synthetic oligonucleotide; AAG chr11 5335543 5335562 5335546 -
gaaatatgaaaagaatgaac

SEQ ID NO: 36244 - DNA, 20 bp, Artificial Sequence
  Synthetic oligonucleotide; AGG chr11 5335542 5335561 5335545 -
aaatatgaaaagaatgaaca

SEQ ID NO: 36245 - DNA, 20 bp, Artificial Sequence
  Synthetic oligonucleotide; TAG chr11 5335536 5335555 5335539 -
gaaaagaatgaacaaggtct

SEQ ID NO: 36246 - DNA, 20 bp, Artificial Sequence
  Synthetic oligonucleotide; GAG chr11 5335520 5335539 5335523 -
gtcttagaaaatacatgaat

SEQ ID NO: 36247 - DNA, 20 bp, Artificial Sequence
  Synthetic oligonucleotide; GAG chr11 5335518 5335537 5335521 -
cttagaaaatacatgaatga

SEQ ID NO: 36248 - DNA, 20 bp, Artificial Sequence
  Synthetic oligonucleotide; TGG chr11 5335506 5335525 5335509 -
atgaatgagagacacatcaa

SEQ ID NO: 36249 - DNA, 20 bp, Artificial Sequence
  Synthetic oligonucleotide; AAG chr11 5335497 5335516 5335500 -
agacacatcaatggctattt

SEQ ID NO: 36250 - DNA, 20 bp, Artificial Sequence
  Synthetic oligonucleotide; AGG chr11 5335496 5335515 5335499 -
gacacatcaatggctattta

SEQ ID NO: 36251 - DNA, 20 bp, Artificial Sequence
  Synthetic oligonucleotide; TAG chr11 5335490 5335509 5335493 -
tcaatggctatttaaggaaa

SEQ ID NO: 36252 - DNA, 20 bp, Artificial Sequence
  Synthetic oligonucleotide; AAG chr11 5335487 5335506 5335490 -
atggctatttaaggaaatag

SEQ ID NO: 36253 - DNA, 20 bp, Artificial Sequence
  Synthetic oligonucleotide; TGG chr11 5335478 5335497 5335481 -
taaggaaatagaagatattt

SEQ ID NO: 36254 - DNA, 20 bp, Artificial Sequence
  Synthetic oligonucleotide; GGG chr11 5335477 5335496 5335480 -
aaggaaatagaagatatttt

SEQ ID NO: 36255 - DNA, 20 bp, Artificial Sequence
  Synthetic oligonucleotide; CAG chr11 5335455 5335474 5335458 -
gtgccctgcctacttcctcc

SEQ ID NO: 36256 - DNA, 20 bp, Artificial Sequence
  Synthetic oligonucleotide; AAG chr11 5335445 5335464 5335448 -
tacttcctcccagtgcccct

SEQ ID NO: 36257 - DNA, 20 bp, Artificial Sequence
  Synthetic oligonucleotide; TGG chr11 5335440 5335459 5335443 -
cctcccagtgcccctaagct

SEQ ID NO: 36258 - DNA, 20 bp, Artificial Sequence
  Synthetic oligonucleotide; GAG chr11 5335430 5335449 5335433 -
cccctaagcttggtgacttt

SEQ ID NO: 36259 - DNA, 20 bp, Artificial Sequence
  Synthetic oligonucleotide; TGG chr11 5335424 5335443 5335427 -
agcttggtgactttgagtgt

SEQ ID NO: 36260 - DNA, 20 bp, Artificial Sequence
  Synthetic oligonucleotide; TAG chr11 5335414 5335433 5335417 -
ctttgagtgttggctgataa

SEQ ID NO: 36261 - DNA, 20 bp, Artificial Sequence
  Synthetic oligonucleotide; TGG chr11 5335397 5335416 5335400 -
taatagttgttcccattctc

SEQ ID NO: 36262 - DNA, 20 bp, Artificial Sequence
  Synthetic oligonucleotide; GAG chr11 5335395 5335414 5335398 -
atagttgttcccattctctg

SEQ ID NO: 36263 - DNA, 20 bp, Artificial Sequence
  Synthetic oligonucleotide; AGG chr11 5335394 5335413 5335397 -
tagttgttcccattctctgg

SEQ ID NO: 36264 - DNA, 20 bp, Artificial Sequence
  Synthetic oligonucleotide; CAG chr11 5335376 5335395 5335379 -
ggaggcttatcctccaccaa

SEQ ID NO: 36265 - DNA, 20 bp, Artificial Sequence
  Synthetic oligonucleotide; GAG chr11 5335360 5335379 5335363 -
ccaacagtgtcacttcacat

SEQ ID NO: 36266 - DNA, 20 bp, Artificial Sequence
  Synthetic oligonucleotide; TGG chr11 5335342 5335361 5335345 -
atgagattttatcccaactc

SEQ ID NO: 36267 - DNA, 20 bp, Artificial Sequence
  Synthetic oligonucleotide; GGG chr11 5335341 5335360 5335344 -
tgagattttatcccaactct

SEQ ID NO: 36268 - DNA, 20 bp, Artificial Sequence
  Synthetic oligonucleotide; GGG chr11 5335340 5335359 5335343 -
gagattttatcccaactctg

SEQ ID NO: 36269 - DNA, 20 bp, Artificial Sequence
  Synthetic oligonucleotide; CAG chr11 5335337 5335356 5335340 -
attttatcccaactctgggg

SEQ ID NO: 36270 - DNA, 20 bp, Artificial Sequence
  Synthetic oligonucleotide; CAG chr11 5335330 5335349 5335333 -
cccaactctggggcagtctg

SEQ ID NO: 36271 - DNA, 20 bp, Artificial Sequence
  Synthetic oligonucleotide; AGG chr11 5335329 5335348 5335332 -
ccaactctggggcagtctgc

SEQ ID NO: 36272 - DNA, 20 bp, Artificial Sequence
  Synthetic oligonucleotide; AAG chr11 5335305 5335324 5335308 -
aattactttatatctgttct

SEQ ID NO: 36273 - DNA, 20 bp, Artificial Sequence
  Synthetic oligonucleotide; AAG chr11 5335300 5335319 5335303 -
ctttatatctgttctaagat

SEQ ID NO: 36274 - DNA, 20 bp, Artificial Sequence
  Synthetic oligonucleotide; CAG chr11 5335288 5335307 5335291 -
tctaagataagtgatgtttc

SEQ ID NO: 36275 - DNA, 20 bp, Artificial Sequence
  Synthetic oligonucleotide; AGG chr11 5335287 5335306 5335290 -
ctaagataagtgatgtttcc

SEQ ID NO: 36276 - DNA, 20 bp, Artificial Sequence
  Synthetic oligonucleotide; TAG chr11 5335282 5335301 5335285 -
ataagtgatgtttccaggaa

SEQ ID NO: 36277 - DNA, 20 bp, Artificial Sequence
  Synthetic oligonucleotide; GAG chr11 5335280 5335299 5335283 -
aagtgatgtttccaggaata

SEQ ID NO: 36278 - DNA, 20 bp, Artificial Sequence
  Synthetic oligonucleotide; TGG chr11 5335268 5335287 5335271 -
caggaatagagtcatattta

SEQ ID NO: 36279 - DNA, 20 bp, Artificial Sequence
  Synthetic oligonucleotide; GGG chr11 5335267 5335286 5335270 -
aggaatagagtcatatttat

SEQ ID NO: 36280 - DNA, 20 bp, Artificial Sequence
  Synthetic oligonucleotide; GGG chr11 5335266 5335285 5335269 -
ggaatagagtcatatttatg

SEQ ID NO: 36281 - DNA, 20 bp, Artificial Sequence
  Synthetic oligonucleotide; CAG chr11 5335263 5335282 5335266 -
atagagtcatatttatgggg

SEQ ID NO: 36282 - DNA, 20 bp, Artificial Sequence
  Synthetic oligonucleotide; AAG chr11 5335260 5335279 5335263 -
gagtcatatttatggggcag

SEQ ID NO: 36283 - DNA, 20 bp, Artificial Sequence
  Synthetic oligonucleotide; CAG chr11 5335244 5335263 5335247 -
gcagaagattcgtgtactgc

SEQ ID NO: 36284 - DNA, 20 bp, Artificial Sequence
  Synthetic oligonucleotide; GAG chr11 5335240 5335259 5335243 -
aagattcgtgtactgccagt

SEQ ID NO: 36285 - DNA, 20 bp, Artificial Sequence
  Synthetic oligonucleotide; GAG chr11 5335238 5335257 5335241 -
gattcgtgtactgccagtga

SEQ ID NO: 36286 - DNA, 20 bp, Artificial Sequence
  Synthetic oligonucleotide; AGG chr11 5335237 5335256 5335240 -
attcgtgtactgccagtgag

SEQ ID NO: 36287 - DNA, 20 bp, Artificial Sequence
  Synthetic oligonucleotide; GGG chr11 5335236 5335255 5335239 -
ttcgtgtactgccagtgaga

SEQ ID NO: 36288 - DNA, 20 bp, Artificial Sequence
  Synthetic oligonucleotide; TGG chr11 5335212 5335231 5335215 -
caatatacctactaatgaaa

SEQ ID NO: 36289 - DNA, 20 bp, Artificial Sequence
  Synthetic oligonucleotide; GGG chr11 5335211 5335230 5335214 -
aatatacctactaatgaaat

SEQ ID NO: 36290 - DNA, 20 bp, Artificial Sequence
  Synthetic oligonucleotide; GAG chr11 5335209 5335228 5335212 -
tatacctactaatgaaatgg

SEQ ID NO: 36291 - DNA, 20 bp, Artificial Sequence
  Synthetic oligonucleotide; AGG chr11 5335208 5335227 5335211 -
atacctactaatgaaatggg

SEQ ID NO: 36292 - DNA, 20 bp, Artificial Sequence
  Synthetic oligonucleotide; GGG chr11 5335207 5335226 5335210 -
tacctactaatgaaatggga

SEQ ID NO: 36293 - DNA, 20 bp, Artificial Sequence
  Synthetic oligonucleotide; CAG chr11 5335204 5335223 5335207 -
ctactaatgaaatgggaggg

SEQ ID NO: 36294 - DNA, 20 bp, Artificial Sequence
  Synthetic oligonucleotide; CAG chr11 5335188 5335207 5335191 -
agggcagcctgaaattaaat

SEQ ID NO: 36295 - DNA, 20 bp, Artificial Sequence
  Synthetic oligonucleotide; CAG chr11 5335179 5335198 5335182 -
tgaaattaaatcagttatct

SEQ ID NO: 36296 - DNA, 20 bp, Artificial Sequence
  Synthetic oligonucleotide; AGG chr11 5335178 5335197 5335181 -
gaaattaaatcagttatctc

SEQ ID NO: 36297 - DNA, 20 bp, Artificial Sequence
  Synthetic oligonucleotide; GGG chr11 5335177 5335196 5335180 -
aaattaaatcagttatctca

SEQ ID NO: 36298 - DNA, 20 bp, Artificial Sequence
  Synthetic oligonucleotide; AAG chr11 5335152 5335171 5335155 -
ttactacctcacctcatttt

SEQ ID NO: 36299 - DNA, 20 bp, Artificial Sequence
  Synthetic oligonucleotide; AAG chr11 5335145 5335164 5335148 -
ctcacctcattttaagttca

SEQ ID NO: 36300 - DNA, 20 bp, Artificial Sequence
  Synthetic oligonucleotide; TGG chr11 5335140 5335159 5335143 -
ctcattttaagttcaaagca

SEQ ID NO: 36301 - DNA, 20 bp, Artificial Sequence
  Synthetic oligonucleotide; CAG chr11 5335121 5335140 5335124 -
atggctcccctaaatcaatc

SEQ ID NO: 36302 - DNA, 20 bp, Artificial Sequence
  Synthetic oligonucleotide; TAG chr11 5335103 5335122 5335106 -
tccagacctaaattttaact

SEQ ID NO: 36303 - DNA, 20 bp, Artificial Sequence
  Synthetic oligonucleotide; AAG chr11 5335096 5335115 5335099 -
ctaaattttaacttagtaca

SEQ ID NO: 36304 - DNA, 20 bp, Artificial Sequence
  Synthetic oligonucleotide; GAG chr11 5335094 5335113 5335097 -
aaattttaacttagtacaaa

SEQ ID NO: 36305 - DNA, 20 bp, Artificial Sequence
  Synthetic oligonucleotide; AGG chr11 5335093 5335112 5335096 -
aattttaacttagtacaaag

SEQ ID NO: 36306 - DNA, 20 bp, Artificial Sequence
  Synthetic oligonucleotide; CAG chr11 5335077 5335096 5335080 -
aaagaggacacacaaatttt

SEQ ID NO: 36307 - DNA, 20 bp, Artificial Sequence
  Synthetic oligonucleotide; AAG chr11 5335070 5335089 5335073 -
acacacaaattttcagactt

SEQ ID NO: 36308 - DNA, 20 bp, Artificial Sequence
  Synthetic oligonucleotide; CAG chr11 5335060 5335079 5335063 -
tttcagacttaagccatttc

SEQ ID NO: 36309 - DNA, 20 bp, Artificial Sequence
  Synthetic oligonucleotide; GAG chr11 5335058 5335077 5335061 -
tcagacttaagccatttcca

SEQ ID NO: 36310 - DNA, 20 bp, Artificial Sequence
  Synthetic oligonucleotide; TAG chr11 5335011 5335030 5335014 -
actactattctgcttacatt

SEQ ID NO: 36311 - DNA, 20 bp, Artificial Sequence
  Synthetic oligonucleotide; AGG chr11 5335010 5335029 5335013 -
ctactattctgcttacattt

SEQ ID NO: 36312 - DNA, 20 bp, Artificial Sequence
  Synthetic oligonucleotide; AAG chr11 5335007 5335026 5335010 -
ctattctgcttacatttagg

SEQ ID NO: 36313 - DNA, 20 bp, Artificial Sequence
  Synthetic oligonucleotide; GAG chr11 5334998 5335017 5335001 -
ttacatttaggaagacctat

SEQ ID NO: 36314 - DNA, 20 bp, Artificial Sequence
  Synthetic oligonucleotide; CAG chr11 5334995 5335014 5334998 -
catttaggaagacctatgag

SEQ ID NO: 36315 - DNA, 20 bp, Artificial Sequence
  Synthetic oligonucleotide; CAG chr11 5334988 5335007 5334991 -
gaagacctatgagcagaatg

SEQ ID NO: 36316 - DNA, 20 bp, Artificial Sequence
  Synthetic oligonucleotide; CAG chr11 5334983 5335002 5334986 -
cctatgagcagaatgcagtt

SEQ ID NO: 36317 - DNA, 20 bp, Artificial Sequence
  Synthetic oligonucleotide; AGG chr11 5334982 5335001 5334985 -
ctatgagcagaatgcagttc

SEQ ID NO: 36318 - DNA, 20 bp, Artificial Sequence
  Synthetic oligonucleotide; GAG chr11 5334980 5334999 5334983 -
atgagcagaatgcagttcag

SEQ ID NO: 36319 - DNA, 20 bp, Artificial Sequence
  Synthetic oligonucleotide; AGG chr11 5334979 5334998 5334982 -
tgagcagaatgcagttcagg

SEQ ID NO: 36320 - DNA, 20 bp, Artificial Sequence
  Synthetic oligonucleotide; CAG chr11 5334955 5334974 5334958 -
acttaactgatgtgaaatgt

SEQ ID NO: 36321 - DNA, 20 bp, Artificial Sequence
  Synthetic oligonucleotide; AGG chr11 5334954 5334973 5334957 -
cttaactgatgtgaaatgtc

SEQ ID NO: 36322 - DNA, 20 bp, Artificial Sequence
  Synthetic oligonucleotide; TGG chr11 5334932 5334951 5334935 -
gcaccaaaatgtgaccctca

SEQ ID NO: 36323 - DNA, 20 bp, Artificial Sequence
  Synthetic oligonucleotide; TAG chr11 5334892 5334911 5334895 -
atactcattttaaaatctca

SEQ ID NO: 36324 - DNA, 20 bp, Artificial Sequence
  Synthetic oligonucleotide; TGG chr11 5334888 5334907 5334891 -
tcattttaaaatctcatagt

SEQ ID NO: 36325 - DNA, 20 bp, Artificial Sequence
  Synthetic oligonucleotide; GGG chr11 5334887 5334906 5334890 -
cattttaaaatctcatagtt

SEQ ID NO: 36326 - DNA, 20 bp, Artificial Sequence
  Synthetic oligonucleotide; AAG chr11 5334882 5334901 5334885 -
taaaatctcatagttgggct

SEQ ID NO: 36327 - DNA, 20 bp, Artificial Sequence
  Synthetic oligonucleotide; CAG chr11 5334876 5334895 5334879 -
ctcatagttgggctaagttc

SEQ ID NO: 36328 - DNA, 20 bp, Artificial Sequence
  Synthetic oligonucleotide; AGG chr11 5334875 5334894 5334878 -
tcatagttgggctaagttcc

SEQ ID NO: 36329 - DNA, 20 bp, Artificial Sequence
  Synthetic oligonucleotide; TAG chr11 5334865 5334884 5334868 -
gctaagttccaggataaatt

SEQ ID NO: 36330 - DNA, 20 bp, Artificial Sequence
  Synthetic oligonucleotide; AGG chr11 5334864 5334883 5334867 -
ctaagttccaggataaattt

SEQ ID NO: 36331 - DNA, 20 bp, Artificial Sequence
  Synthetic oligonucleotide; AAG chr11 5334857 5334876 5334860 -
ccaggataaatttaggattt

SEQ ID NO: 36332 - DNA, 20 bp, Artificial Sequence
  Synthetic oligonucleotide; GAG chr11 5334848 5334867 5334851 -
atttaggatttaagactgat

SEQ ID NO: 36333 - DNA, 20 bp, Artificial Sequence
  Synthetic oligonucleotide; TAG chr11 5334841 5334860 5334844 -
atttaagactgatgagacaa

SEQ ID NO: 36334 - DNA, 20 bp, Artificial Sequence
  Synthetic oligonucleotide; CAG chr11 5334831 5334850 5334834 -
gatgagacaatagaaattct

SEQ ID NO: 36335 - DNA, 20 bp, Artificial Sequence
  Synthetic oligonucleotide; CAG chr11 5334812 5334831 5334815 -
tcagatccttatttctctga

SEQ ID NO: 36336 - DNA, 20 bp, Artificial Sequence
  Synthetic oligonucleotide; GAG chr11 5334804 5334823 5334807 -
ttatttctctgacagactat

SEQ ID NO: 36337 - DNA, 20 bp, Artificial Sequence
  Synthetic oligonucleotide; AAG chr11 5334789 5334808 5334792 -
actatgagatgattgtattc

SEQ ID NO: 36338 - DNA, 20 bp, Artificial Sequence
  Synthetic oligonucleotide; CAG chr11 5334776 5334795 5334779 -
tgtattcaagtacaaattgt

SEQ ID NO: 36339 - DNA, 20 bp, Artificial Sequence
  Synthetic oligonucleotide; AAG chr11 5334770 5334789 5334773 -
caagtacaaattgtcagaca

SEQ ID NO: 36340 - DNA, 20 bp, Artificial Sequence
  Synthetic oligonucleotide; CAG chr11 5334766 5334785 5334769 -
tacaaattgtcagacaaagc

SEQ ID NO: 36341 - DNA, 20 bp, Artificial Sequence
  Synthetic oligonucleotide; AGG chr11 5334765 5334784 5334768 -
acaaattgtcagacaaagcc

SEQ ID NO: 36342 - DNA, 20 bp, Artificial Sequence
  Synthetic oligonucleotide; GGG chr11 5334764 5334783 5334767 -
caaattgtcagacaaagcca

SEQ ID NO: 36343 - DNA, 20 bp, Artificial Sequence
  Synthetic oligonucleotide; AAG chr11 5334757 5334776 5334760 -
tcagacaaagccagggatta

SEQ ID NO: 36344 - DNA, 20 bp, Artificial Sequence
  Synthetic oligonucleotide; CAG chr11 5334719 5334738 5334722 -
tcccctttttaacattacta

SEQ ID NO: 36345 - DNA, 20 bp, Artificial Sequence
  Synthetic oligonucleotide; AGG chr11 5334718 5334737 5334721 -
cccctttttaacattactac

SEQ ID NO: 36346 - DNA, 20 bp, Artificial Sequence
  Synthetic oligonucleotide; CAG chr11 5334675 5334694 5334678 -
aaacttgatttatattgctc

SEQ ID NO: 36347 - DNA, 20 bp, Artificial Sequence
  Synthetic oligonucleotide; AAG chr11 5334672 5334691 5334675 -
cttgatttatattgctccag

SEQ ID NO: 36348 - DNA, 20 bp, Artificial Sequence
  Synthetic oligonucleotide; CAG chr11 5334669 5334688 5334672 -
gatttatattgctccagaag

SEQ ID NO: 36349 - DNA, 20 bp, Artificial Sequence
  Synthetic oligonucleotide; TGG chr11 5334653 5334672 5334656 -
gaagcagtaactctgattct

SEQ ID NO: 36350 - DNA, 20 bp, Artificial Sequence
  Synthetic oligonucleotide; GGG chr11 5334652 5334671 5334655 -
aagcagtaactctgattctt

SEQ ID NO: 36351 - DNA, 20 bp, Artificial Sequence
  Synthetic oligonucleotide; AAG chr11 5334648 5334667 5334651 -
agtaactctgattcttgggc

SEQ ID NO: 36352 - DNA, 20 bp, Artificial Sequence
  Synthetic oligonucleotide; AAG chr11 5334638 5334657 5334641 -
attcttgggcaagacttacc

SEQ ID NO: 36353 - DNA, 20 bp, Artificial Sequence
  Synthetic oligonucleotide; GAG chr11 5334636 5334655 5334639 -
tcttgggcaagacttaccaa

SEQ ID NO: 36354 - DNA, 20 bp, Artificial Sequence
  Synthetic oligonucleotide; CAG chr11 5334632 5334651 5334635 -
gggcaagacttaccaagaga

SEQ ID NO: 36355 - DNA, 20 bp, Artificial Sequence
  Synthetic oligonucleotide; AAG chr11 5334624 5334643 5334627 -
cttaccaagagacagaaaac

SEQ ID NO: 36356 - DNA, 20 bp, Artificial Sequence
  Synthetic oligonucleotide; AAG chr11 5334609 5334628 5334612 -
aaaacaagcttactgtttga

SEQ ID NO: 36357 - DNA, 20 bp, Artificial Sequence
  Synthetic oligonucleotide; CAG chr11 5334599 5334618 5334602 -
tactgtttgaaagaacttat

SEQ ID NO: 36358 - DNA, 20 bp, Artificial Sequence
  Synthetic oligonucleotide; CAG chr11 5334596 5334615 5334599 -
tgtttgaaagaacttatcag

SEQ ID NO: 36359 - DNA, 20 bp, Artificial Sequence
  Synthetic oligonucleotide; GAG chr11 5334582 5334601 5334585 -
tatcagcagcactcatttgt

SEQ ID NO: 36360 - DNA, 20 bp, Artificial Sequence
  Synthetic oligonucleotide; AAG chr11 5334549 5334568 5334552 -
aaacaatcttatttgaaacc

SEQ ID NO: 36361 - DNA, 20 bp, Artificial Sequence
  Synthetic oligonucleotide; AAG chr11 5334544 5334563 5334547 -
atcttatttgaaaccaagaa

SEQ ID NO: 36362 - DNA, 20 bp, Artificial Sequence
  Synthetic oligonucleotide; AAG chr11 5334538 5334557 5334541 -
tttgaaaccaagaaaagatt

SEQ ID NO: 36363 - DNA, 20 bp, Artificial Sequence
  Synthetic oligonucleotide; GAG chr11 5334532 5334551 5334535 -
accaagaaaagattaagtgt

SEQ ID NO: 36364 - DNA, 20 bp, Artificial Sequence
  Synthetic oligonucleotide; AGG chr11 5334531 5334550 5334534 -
ccaagaaaagattaagtgtg

SEQ ID NO: 36365 - DNA, 20 bp, Artificial Sequence
  Synthetic oligonucleotide; GGG chr11 5334530 5334549 5334533 -
caagaaaagattaagtgtga

SEQ ID NO: 36366 - DNA, 20 bp, Artificial Sequence
  Synthetic oligonucleotide; AAG chr11 5334521 5334540 5334524 -
attaagtgtgagggattatt

SEQ ID NO: 36367 - DNA, 20 bp, Artificial Sequence
  Synthetic oligonucleotide; AAG chr11 5334510 5334529 5334513 -
gggattattaagctttgtct

SEQ ID NO: 36368 - DNA, 20 bp, Artificial Sequence
  Synthetic oligonucleotide; GAG chr11 5334505 5334524 5334508 -
tattaagctttgtctaagtt

SEQ ID NO: 36369 - DNA, 20 bp, Artificial Sequence
  Synthetic oligonucleotide; GAG chr11 5334501 5334520 5334504 -
aagctttgtctaagttgagt

SEQ ID NO: 36370 - DNA, 20 bp, Artificial Sequence
  Synthetic oligonucleotide; TGG chr11 5334493 5334512 5334496 -
tctaagttgagtgagcttat

SEQ ID NO: 36371 - DNA, 20 bp, Artificial Sequence
  Synthetic oligonucleotide; CAG chr11 5334487 5334506 5334490 -
ttgagtgagcttattggcta

SEQ ID NO: 36372 - DNA, 20 bp, Artificial Sequence
  Synthetic oligonucleotide; AGG chr11 5334486 5334505 5334489 -
tgagtgagcttattggctac

SEQ ID NO: 36373 - DNA, 20 bp, Artificial Sequence
  Synthetic oligonucleotide; GGG chr11 5334485 5334504 5334488 -
gagtgagcttattggctaca

SEQ ID NO: 36374 - DNA, 20 bp, Artificial Sequence
  Synthetic oligonucleotide; AAG chr11 5334480 5334499 5334483 -
agcttattggctacagggtt

SEQ ID NO: 36375 - DNA, 20 bp, Artificial Sequence
  Synthetic oligonucleotide; AGG chr11 5334479 5334498 5334482 -
gcttattggctacagggtta

SEQ ID NO: 36376 - DNA, 20 bp, Artificial Sequence
  Synthetic oligonucleotide; AAG chr11 5334468 5334487 5334471 -
acagggttaaggaataacaa

SEQ ID NO: 36377 - DNA, 20 bp, Artificial Sequence
  Synthetic oligonucleotide; TAG chr11 5334465 5334484 5334468 -
gggttaaggaataacaaaag

SEQ ID NO: 36378 - DNA, 20 bp, Artificial Sequence
  Synthetic oligonucleotide; AGG chr11 5334464 5334483 5334467 -
ggttaaggaataacaaaagt

SEQ ID NO: 36379 - DNA, 20 bp, Artificial Sequence
  Synthetic oligonucleotide; CGG chr11 5334456 5334475 5334459 -
aataacaaaagtaggcttca

SEQ ID NO: 36380 - DNA, 20 bp, Artificial Sequence
  Synthetic oligonucleotide; GAG chr11 5334441 5334460 5334444 -
cttcacggtatcttcttttt

SEQ ID NO: 36381 - DNA, 20 bp, Artificial Sequence
  Synthetic oligonucleotide; AGG chr11 5334440 5334459 5334443 -
ttcacggtatcttctttttg

SEQ ID NO: 36382 - DNA, 20 bp, Artificial Sequence
  Synthetic oligonucleotide; TGG chr11 5334437 5334456 5334440 -
acggtatcttctttttgagg

SEQ ID NO: 36383 - DNA, 20 bp, Artificial Sequence
  Synthetic oligonucleotide; GGG chr11 5334436 5334455 5334439 -
cggtatcttctttttgaggt

SEQ ID NO: 36384 - DNA, 20 bp, Artificial Sequence
  Synthetic oligonucleotide; GGG chr11 5334435 5334454 5334438 -
ggtatcttctttttgaggtg

SEQ ID NO: 36385 - DNA, 20 bp, Artificial Sequence
  Synthetic oligonucleotide; AAG chr11 5334424 5334443 5334427 -
tttgaggtggggaatcatac

SEQ ID NO: 36386 - DNA, 20 bp, Artificial Sequence
  Synthetic oligonucleotide; AGG chr11 5334423 5334442 5334426 -
ttgaggtggggaatcataca

SEQ ID NO: 36387 - DNA, 20 bp, Artificial Sequence
  Synthetic oligonucleotide; AAG chr11 5334418 5334437 5334421 -
gtggggaatcatacaaggca

SEQ ID NO: 36388 - DNA, 20 bp, Artificial Sequence
  Synthetic oligonucleotide; AGG chr11 5334417 5334436 5334420 -
tggggaatcatacaaggcaa

SEQ ID NO: 36389 - DNA, 20 bp, Artificial Sequence
  Synthetic oligonucleotide; TAG chr11 5334414 5334433 5334417 -
ggaatcatacaaggcaaagg

SEQ ID NO: 36390 - DNA, 20 bp, Artificial Sequence
  Synthetic oligonucleotide; TAG chr11 5334410 5334429 5334413 -
tcatacaaggcaaaggtagt

SEQ ID NO: 36391 - DNA, 20 bp, Artificial Sequence
  Synthetic oligonucleotide; TAG chr11 5334406 5334425 5334409 -
acaaggcaaaggtagttaga

SEQ ID NO: 36392 - DNA, 20 bp, Artificial Sequence
  Synthetic oligonucleotide; TGG chr11 5334387 5334406 5334390 -
atagcatgacttccatgtgc

SEQ ID NO: 36393 - DNA, 20 bp, Artificial Sequence
  Synthetic oligonucleotide; AAG chr11 5334381 5334400 5334384 -
tgacttccatgtgctggatg

SEQ ID NO: 36394 - DNA, 20 bp, Artificial Sequence
  Synthetic oligonucleotide; AAG chr11 5334354 5334373 5334357 -
aattctgttttctttttgca

SEQ ID NO: 36395 - DNA, 20 bp, Artificial Sequence
  Synthetic oligonucleotide; TGG chr11 5334345 5334364 5334348 -
ttctttttgcaaagaaaata

SEQ ID NO: 36396 - DNA, 20 bp, Artificial Sequence
  Synthetic oligonucleotide; GGG chr11 5334344 5334363 5334347 -
tctttttgcaaagaaaatat

SEQ ID NO: 36397 - DNA, 20 bp, Artificial Sequence
  Synthetic oligonucleotide; GGG chr11 5334343 5334362 5334346 -
ctttttgcaaagaaaatatg

SEQ ID NO: 36398 - DNA, 20 bp, Artificial Sequence
  Synthetic oligonucleotide; AAG chr11 5334336 5334355 5334339 -
caaagaaaatatggggcttt

SEQ ID NO: 36399 - DNA, 20 bp, Artificial Sequence
  Synthetic oligonucleotide; CAG chr11 5334329 5334348 5334332 -
aatatggggctttaagaaca

SEQ ID NO: 36400 - DNA, 20 bp, Artificial Sequence
  Synthetic oligonucleotide; TGG chr11 5334323 5334342 5334326 -
gggctttaagaacacagttc

SEQ ID NO: 36401 - DNA, 20 bp, Artificial Sequence
  Synthetic oligonucleotide; GAG chr11 5334321 5334340 5334324 -
gctttaagaacacagttctg

SEQ ID NO: 36402 - DNA, 20 bp, Artificial Sequence
  Synthetic oligonucleotide; AAG chr11 5334302 5334321 5334305 -
ggagcccacttccttctcca

SEQ ID NO: 36403 - DNA, 20 bp, Artificial Sequence
  Synthetic oligonucleotide; AGG chr11 5334301 5334320 5334304 -
gagcccacttccttctccaa

SEQ ID NO: 36404 - DNA, 20 bp, Artificial Sequence
  Synthetic oligonucleotide; GAG chr11 5334299 5334318 5334302 -
gcccacttccttctccaaag

SEQ ID NO: 36405 - DNA, 20 bp, Artificial Sequence
  Synthetic oligonucleotide; AGG chr11 5334298 5334317 5334301 -
cccacttccttctccaaagg

SEQ ID NO: 36406 - DNA, 20 bp, Artificial Sequence
  Synthetic oligonucleotide; CAG chr11 5334278 5334297 5334281 -
aggcttgaaaaaaaatatcc

SEQ ID NO: 36407 - DNA, 20 bp, Artificial Sequence
  Synthetic oligonucleotide; TAG chr11 5334275 5334294 5334278 -
cttgaaaaaaaatatcccag

SEQ ID NO: 36408 - DNA, 20 bp, Artificial Sequence
  Synthetic oligonucleotide; CAG chr11 5334262 5334281 5334265 -
atcccagtagcctaattatc

SEQ ID NO: 36409 - DNA, 20 bp, Artificial Sequence
  Synthetic oligonucleotide; AAG chr11 5334255 5334274 5334258 -
tagcctaattatccagcatc

SEQ ID NO: 36410 - DNA, 20 bp, Artificial Sequence
  Synthetic oligonucleotide; CAG chr11 5334251 5334270 5334254 -
ctaattatccagcatcaaga

SEQ ID NO: 36411 - DNA, 20 bp, Artificial Sequence
  Synthetic oligonucleotide; TGG chr11 5334244 5334263 5334247 -
tccagcatcaagacagatac

SEQ ID NO: 36412 - DNA, 20 bp, Artificial Sequence
  Synthetic oligonucleotide; GGG chr11 5334243 5334262 5334246 -
ccagcatcaagacagatact

SEQ ID NO: 36413 - DNA, 20 bp, Artificial Sequence
  Synthetic oligonucleotide; GGG chr11 5334242 5334261 5334245 -
cagcatcaagacagatactg

SEQ ID NO: 36414 - DNA, 20 bp, Artificial Sequence
  Synthetic oligonucleotide; TAG chr11 5334199 5334218 5334202 -
acctcacaaattaaccctgt

SEQ ID NO: 36415 - DNA, 20 bp, Artificial Sequence
  Synthetic oligonucleotide; CAG chr11 5334196 5334215 5334199 -
tcacaaattaaccctgttag

SEQ ID NO: 36416 - DNA, 20 bp, Artificial Sequence
  Synthetic oligonucleotide; CAG chr11 5334189 5334208 5334192 -
ttaaccctgttagcagtctt

SEQ ID NO: 36417 - DNA, 20 bp, Artificial Sequence
  Synthetic oligonucleotide; GAG chr11 5334187 5334206 5334190 -
aaccctgttagcagtcttca

SEQ ID NO: 36418 - DNA, 20 bp, Artificial Sequence
  Synthetic oligonucleotide; CAG chr11 5334159 5334178 5334162 -
atttaaaccaatttctacac

SEQ ID NO: 36419 - DNA, 20 bp, Artificial Sequence
  Synthetic oligonucleotide; AGG chr11 5334158 5334177 5334161 -
tttaaaccaatttctacacc

SEQ ID NO: 36420 - DNA, 20 bp, Artificial Sequence
  Synthetic oligonucleotide; CAG chr11 5334152 5334171 5334155 -
ccaatttctacaccaggact

SEQ ID NO: 36421 - DNA, 20 bp, Artificial Sequence
  Synthetic oligonucleotide; CAG chr11 5334118 5334137 5334121 -
ccccttaatttctgataccc

SEQ ID NO: 36422 - DNA, 20 bp, Artificial Sequence
  Synthetic oligonucleotide; AGG chr11 5334117 5334136 5334120 -
cccttaatttctgatacccc

SEQ ID NO: 36423 - DNA, 20 bp, Artificial Sequence
  Synthetic oligonucleotide; CAG chr11 5334113 5334132 5334116 -
taatttctgataccccaggt

SEQ ID NO: 36424 - DNA, 20 bp, Artificial Sequence
  Synthetic oligonucleotide; AGG chr11 5334112 5334131 5334115 -
aatttctgataccccaggtc

SEQ ID NO: 36425 - DNA, 20 bp, Artificial Sequence
  Synthetic oligonucleotide; TAG chr11 5334106 5334125 5334109 -
tgataccccaggtcaggctc

SEQ ID NO: 36426 - DNA, 20 bp, Artificial Sequence
  Synthetic oligonucleotide; TGG chr11 5334097 5334116 5334100 -
aggtcaggctctagtgacta

SEQ ID NO: 36427 - DNA, 20 bp, Artificial Sequence
  Synthetic oligonucleotide; GGG chr11 5334096 5334115 5334099 -
ggtcaggctctagtgactat

SEQ ID NO: 36428 - DNA, 20 bp, Artificial Sequence
  Synthetic oligonucleotide; GAG chr11 5334094 5334113 5334097 -
tcaggctctagtgactatgg

SEQ ID NO: 36429 - DNA, 20 bp, Artificial Sequence
  Synthetic oligonucleotide; TGG chr11 5334089 5334108 5334092 -
ctctagtgactatgggagaa

SEQ ID NO: 36430 - DNA, 20 bp, Artificial Sequence
  Synthetic oligonucleotide; AAG chr11 5334082 5334101 5334085 -
gactatgggagaatggaatg

SEQ ID NO: 36431 - DNA, 20 bp, Artificial Sequence
  Synthetic oligonucleotide; AGG chr11 5334081 5334100 5334084 -
actatgggagaatggaatga

SEQ ID NO: 36432 - DNA, 20 bp, Artificial Sequence
  Synthetic oligonucleotide; GAG chr11 5334073 5334092 5334076 -
agaatggaatgaaggtaatt

SEQ ID NO: 36433 - DNA, 20 bp, Artificial Sequence
  Synthetic oligonucleotide; GAG chr11 5334071 5334090 5334074 -
aatggaatgaaggtaattga

SEQ ID NO: 36434 - DNA, 20 bp, Artificial Sequence
  Synthetic oligonucleotide; AGG chr11 5334070 5334089 5334073 -
atggaatgaaggtaattgag

SEQ ID NO: 36435 - DNA, 20 bp, Artificial Sequence
  Synthetic oligonucleotide; AAG chr11 5334061 5334080 5334064 -
aggtaattgagaggaaaata

SEQ ID NO: 36436 - DNA, 20 bp, Artificial Sequence
  Synthetic oligonucleotide; TGG chr11 5334047 5334066 5334050 -
aaaataaagactaatcttct

SEQ ID NO: 36437 - DNA, 20 bp, Artificial Sequence
  Synthetic oligonucleotide; TAG chr11 5334028 5334047 5334031 -
ttggattctcttccaccaca

SEQ ID NO: 36438 - DNA, 20 bp, Artificial Sequence
  Synthetic oligonucleotide; AAG chr11 5334018 5334037 5334021 -
ttccaccacatagttgttgc

SEQ ID NO: 36439 - DNA, 20 bp, Artificial Sequence
  Synthetic oligonucleotide; GAG chr11 5334016 5334035 5334019 -
ccaccacatagttgttgcaa

SEQ ID NO: 36440 - DNA, 20 bp, Artificial Sequence
  Synthetic oligonucleotide; AGG chr11 5334015 5334034 5334018 -
caccacatagttgttgcaag

SEQ ID NO: 36441 - DNA, 20 bp, Artificial Sequence
  Synthetic oligonucleotide; GGG chr11 5334014 5334033 5334017 -
accacatagttgttgcaaga

SEQ ID NO: 36442 - DNA, 20 bp, Artificial Sequence
  Synthetic oligonucleotide; TAG chr11 5334007 5334026 5334010 -
agttgttgcaagagggtaaa

SEQ ID NO: 36443 - DNA, 20 bp, Artificial Sequence
  Synthetic oligonucleotide; GAG chr11 5334005 5334024 5334008 -
ttgttgcaagagggtaaata

SEQ ID NO: 36444 - DNA, 20 bp, Artificial Sequence
  Synthetic oligonucleotide; AAG chr11 5334000 5334019 5334003 -
gcaagagggtaaatagagaa

SEQ ID NO: 36445 - DNA, 20 bp, Artificial Sequence
  Synthetic oligonucleotide; GAG chr11 5333998 5334017 5334001 -
aagagggtaaatagagaaaa

SEQ ID NO: 36446 - DNA, 20 bp, Artificial Sequence
  Synthetic oligonucleotide; AGG chr11 5333997 5334016 5334000 -
agagggtaaatagagaaaag

SEQ ID NO: 36447 - DNA, 20 bp, Artificial Sequence
  Synthetic oligonucleotide; AAG chr11 5333993 5334012 5333996 -
ggtaaatagagaaaagaggc

SEQ ID NO: 36448 - DNA, 20 bp, Artificial Sequence
  Synthetic oligonucleotide; CAG chr11 5333977 5333996 5333980 -
aggcaagatatctgtatcta

SEQ ID NO: 36449 - DNA, 20 bp, Artificial Sequence
  Synthetic oligonucleotide; CGG chr11 5333967 5333986 5333970 -
tctgtatctacagattctgc

SEQ ID NO: 36450 - DNA, 20 bp, Artificial Sequence
  Synthetic oligonucleotide; GGG chr11 5333966 5333985 5333969 -
ctgtatctacagattctgcc

SEQ ID NO: 36451 - DNA, 20 bp, Artificial Sequence
  Synthetic oligonucleotide; AAG chr11 5333943 5333962 5333946 -
tgtatcaacctccaacataa

SEQ ID NO: 36452 - DNA, 20 bp, Artificial Sequence
  Synthetic oligonucleotide; TAG chr11 5333930 5333949 5333933 -
aacataaaagttcaacttcc

SEQ ID NO: 36453 - DNA, 20 bp, Artificial Sequence
  Synthetic oligonucleotide; CAG chr11 5333903 5333922 5333906 -
tgttaactctgaaataaaaa

SEQ ID NO: 36454 - DNA, 20 bp, Artificial Sequence
  Synthetic oligonucleotide; TAG chr11 5333900 5333919 5333903 -
taactctgaaataaaaacag

SEQ ID NO: 36455 - DNA, 20 bp, Artificial Sequence
  Synthetic oligonucleotide; TGG chr11 5333887 5333906 5333890 -
aaaacagtagttttatgtga

SEQ ID NO: 36456 - DNA, 20 bp, Artificial Sequence
  Synthetic oligonucleotide; GGG chr11 5333886 5333905 5333889 -
aaacagtagttttatgtgat

SEQ ID NO: 36457 - DNA, 20 bp, Artificial Sequence
  Synthetic oligonucleotide; AAG chr11 5333866 5333885 5333869 -
gggtgcttacatgaataatt

SEQ ID NO: 36458 - DNA, 20 bp, Artificial Sequence
  Synthetic oligonucleotide; GAG chr11 5333864 5333883 5333867 -
gtgcttacatgaataattaa

SEQ ID NO: 36459 - DNA, 20 bp, Artificial Sequence
  Synthetic oligonucleotide; GAG chr11 5333857 5333876 5333860 -
catgaataattaagagttct

SEQ ID NO: 36460 - DNA, 20 bp, Artificial Sequence
  Synthetic oligonucleotide; TAG chr11 5333846 5333865 5333849 -
aagagttctgagttgatatc

SEQ ID NO: 36461 - DNA, 20 bp, Artificial Sequence
  Synthetic oligonucleotide; AAG chr11 5333843 5333862 5333846 -
agttctgagttgatatctag

SEQ ID NO: 36462 - DNA, 20 bp, Artificial Sequence
  Synthetic oligonucleotide; TAG chr11 5333833 5333852 5333836 -
tgatatctagaagttcttgt

SEQ ID NO: 36463 - DNA, 20 bp, Artificial Sequence
  Synthetic oligonucleotide; CAG chr11 5333828 5333847 5333831 -
tctagaagttcttgttagct

SEQ ID NO: 36464 - DNA, 20 bp, Artificial Sequence
  Synthetic oligonucleotide; AAG chr11 5333818 5333837 5333821 -
cttgttagctcagcgctatt

SEQ ID NO: 36465 - DNA, 20 bp, Artificial Sequence
  Synthetic oligonucleotide; TAG chr11 5333799 5333818 5333802 -
taagaacacttttcctacaa

SEQ ID NO: 36466 - DNA, 20 bp, Artificial Sequence
  Synthetic oligonucleotide; TGG chr11 5333786 5333805 5333789 -
cctacaatagaaattttctt

SEQ ID NO: 36467 - DNA, 20 bp, Artificial Sequence
  Synthetic oligonucleotide; AAG chr11 5333783 5333802 5333786 -
acaatagaaattttctttgg

SEQ ID NO: 36468 - DNA, 20 bp, Artificial Sequence
  Synthetic oligonucleotide; GAG chr11 5333781 5333800 5333784 -
aatagaaattttctttggaa

SEQ ID NO: 36469 - DNA, 20 bp, Artificial Sequence
  Synthetic oligonucleotide; AGG chr11 5333780 5333799 5333783 -
atagaaattttctttggaag

SEQ ID NO: 36470 - DNA, 20 bp, Artificial Sequence
  Synthetic oligonucleotide; CAG chr11 5333777 5333796 5333780 -
gaaattttctttggaagagg

SEQ ID NO: 36471 - DNA, 20 bp, Artificial Sequence
  Synthetic oligonucleotide; AGG chr11 5333776 5333795 5333779 -
aaattttctttggaagaggc

SEQ ID NO: 36472 - DNA, 20 bp, Artificial Sequence
  Synthetic oligonucleotide; GAG chr11 5333774 5333793 5333777 -
attttctttggaagaggcag

SEQ ID NO: 36473 - DNA, 20 bp, Artificial Sequence
  Synthetic oligonucleotide; GAG chr11 5333772 5333791 5333775 -
tttctttggaagaggcagga

SEQ ID NO: 36474 - DNA, 20 bp, Artificial Sequence
  Synthetic oligonucleotide; AGG chr11 5333771 5333790 5333774 -
ttctttggaagaggcaggag

SEQ ID NO: 36475 - DNA, 20 bp, Artificial Sequence
  Synthetic oligonucleotide; AAG chr11 5333767 5333786 5333770 -
ttggaagaggcaggagagga

SEQ ID NO: 36476 - DNA, 20 bp, Artificial Sequence
  Synthetic oligonucleotide; GAG chr11 5333765 5333784 5333768 -
ggaagaggcaggagaggaaa

SEQ ID NO: 36477 - DNA, 20 bp, Artificial Sequence
  Synthetic oligonucleotide; TGG chr11 5333754 5333773 5333757 -
gagaggaaagagactgactc

SEQ ID NO: 36478 - DNA, 20 bp, Artificial Sequence
  Synthetic oligonucleotide; GGG chr11 5333753 5333772 5333756 -
agaggaaagagactgactct

SEQ ID NO: 36479 - DNA, 20 bp, Artificial Sequence
  Synthetic oligonucleotide; GAG chr11 5333751 5333770 5333754 -
aggaaagagactgactctgg

SEQ ID NO: 36480 - DNA, 20 bp, Artificial Sequence
  Synthetic oligonucleotide; CAG chr11 5333740 5333759 5333743 -
tgactctgggagtgaatgtg

SEQ ID NO: 36481 - DNA, 20 bp, Artificial Sequence
  Synthetic oligonucleotide; AGG chr11 5333739 5333758 5333742 -
gactctgggagtgaatgtgc

SEQ ID NO: 36482 - DNA, 20 bp, Artificial Sequence
  Synthetic oligonucleotide; GGG chr11 5333738 5333757 5333741 -
actctgggagtgaatgtgca

SEQ ID NO: 36483 - DNA, 20 bp, Artificial Sequence
  Synthetic oligonucleotide; TGG chr11 5333735 5333754 5333738 -
ctgggagtgaatgtgcaggg

SEQ ID NO: 36484 - DNA, 20 bp, Artificial Sequence
  Synthetic oligonucleotide; GGG chr11 5333734 5333753 5333737 -
tgggagtgaatgtgcagggt

SEQ ID NO: 36485 - DNA, 20 bp, Artificial Sequence
  Synthetic oligonucleotide; GGG chr11 5333733 5333752 5333736 -
gggagtgaatgtgcagggtg

SEQ ID NO: 36486 - DNA, 20 bp, Artificial Sequence
  Synthetic oligonucleotide; TAG chr11 5333715 5333734 5333718 -
tggggtcaccatgacacctg

SEQ ID NO: 36487 - DNA, 20 bp, Artificial Sequence
  Synthetic oligonucleotide; AGG chr11 5333714 5333733 5333717 -
ggggtcaccatgacacctgt

SEQ ID NO: 36488 - DNA, 20 bp, Artificial Sequence
  Synthetic oligonucleotide; CAG chr11 5333679 5333698 5333682 -
ctctcctcctcctcttgatg

SEQ ID NO: 36489 - DNA, 20 bp, Artificial Sequence
  Synthetic oligonucleotide; TAG chr11 5333671 5333690 5333674 -
ctcctcttgatgcagttctc

SEQ ID NO: 36490 - DNA, 20 bp, Artificial Sequence
  Synthetic oligonucleotide; AGG chr11 5333670 5333689 5333673 -
tcctcttgatgcagttctct

SEQ ID NO: 36491 - DNA, 20 bp, Artificial Sequence
  Synthetic oligonucleotide; CAG chr11 5333665 5333684 5333668 -
ttgatgcagttctctaggct

SEQ ID NO: 36492 - DNA, 20 bp, Artificial Sequence
  Synthetic oligonucleotide; TAG chr11 5333604 5333623 5333607 -
cttcttcctcctctactttg

SEQ ID NO: 36493 - DNA, 20 bp, Artificial Sequence
  Synthetic oligonucleotide; CAG chr11 5333589 5333608 5333592 -
ctttgtagctcccacatttt

SEQ ID NO: 36494 - DNA, 20 bp, Artificial Sequence
  Synthetic oligonucleotide; TAG chr11 5333577 5333596 5333580 -
cacattttcagcttatatat

SEQ ID NO: 36495 - DNA, 20 bp, Artificial Sequence
  Synthetic oligonucleotide; TAG chr11 5333569 5333588 5333572 -
cagcttatatattagccaat

SEQ ID NO: 36496 - DNA, 20 bp, Artificial Sequence
  Synthetic oligonucleotide; TAG chr11 5333561 5333580 5333564 -
atattagccaattagtatat

SEQ ID NO: 36497 - DNA, 20 bp, Artificial Sequence
  Synthetic oligonucleotide; AAG chr11 5333548 5333567 5333551 -
agtatattagtaatattttg

SEQ ID NO: 36498 - DNA, 20 bp, Artificial Sequence
  Synthetic oligonucleotide; AAG chr11 5333530 5333549 5333533 -
tgaagtcactgttcttacct

SEQ ID NO: 36499 - DNA, 20 bp, Artificial Sequence
  Synthetic oligonucleotide; CAG chr11 5333526 5333545 5333529 -
gtcactgttcttacctaagt

SEQ ID NO: 36500 - DNA, 20 bp, Artificial Sequence
  Synthetic oligonucleotide; CAG chr11 5333514 5333533 5333517 -
acctaagtcagtttaacaat

SEQ ID NO: 36501 - DNA, 20 bp, Artificial Sequence
  Synthetic oligonucleotide; CAG chr11 5333506 5333525 5333509 -
cagtttaacaatcagcatac

SEQ ID NO: 36502 - DNA, 20 bp, Artificial Sequence
  Synthetic oligonucleotide; CAG chr11 5333502 5333521 5333505 -
ttaacaatcagcataccagt

SEQ ID NO: 36503 - DNA, 20 bp, Artificial Sequence
  Synthetic oligonucleotide; TAG chr11 5333498 5333517 5333501 -
caatcagcataccagtcagt

SEQ ID NO: 36504 - DNA, 20 bp, Artificial Sequence
  Synthetic oligonucleotide; AAG chr11 5333475 5333494 5333478 -
tgatcaatgtgttaatcata

SEQ ID NO: 36505 - DNA, 20 bp, Artificial Sequence
  Synthetic oligonucleotide; CAG chr11 5333415 5333434 5333418 -
tcaaactctgtcattgcttc

SEQ ID NO: 36506 - DNA, 20 bp, Artificial Sequence
  Synthetic oligonucleotide; AGG chr11 5333414 5333433 5333417 -
caaactctgtcattgcttcc

SEQ ID NO: 36507 - DNA, 20 bp, Artificial Sequence
  Synthetic oligonucleotide; GGG chr11 5333413 5333432 5333416 -
aaactctgtcattgcttcca

SEQ ID NO: 36508 - DNA, 20 bp, Artificial Sequence
  Synthetic oligonucleotide; TGG chr11 5333406 5333425 5333409 -
gtcattgcttccagggccat

SEQ ID NO: 36509 - DNA, 20 bp, Artificial Sequence
  Synthetic oligonucleotide; TAG chr11 5333386 5333405 5333389 -
tggtgtgttaatacaacact

SEQ ID NO: 36510 - DNA, 20 bp, Artificial Sequence
  Synthetic oligonucleotide; AAG chr11 5333381 5333400 5333384 -
tgttaatacaacacttagta

SEQ ID NO: 36511 - DNA, 20 bp, Artificial Sequence
  Synthetic oligonucleotide; AAG chr11 5333377 5333396 5333380 -
aatacaacacttagtaaagt

SEQ ID NO: 36512 - DNA, 20 bp, Artificial Sequence
  Synthetic oligonucleotide; TAG chr11 5333368 5333387 5333371 -
cttagtaaagtaagcaatgt

SEQ ID NO: 36513 - DNA, 20 bp, Artificial Sequence
  Synthetic oligonucleotide; TGG chr11 5333362 5333381 5333365 -
aaagtaagcaatgttagtgt

SEQ ID NO: 36514 - DNA, 20 bp, Artificial Sequence
  Synthetic oligonucleotide; GAG chr11 5333360 5333379 5333363 -
agtaagcaatgttagtgttg

SEQ ID NO: 36515 - DNA, 20 bp, Artificial Sequence
  Synthetic oligonucleotide; TGG chr11 5333357 5333376 5333360 -
aagcaatgttagtgttggag

SEQ ID NO: 36516 - DNA, 20 bp, Artificial Sequence
  Synthetic oligonucleotide; GGG chr11 5333356 5333375 5333359 -
agcaatgttagtgttggagt

SEQ ID NO: 36517 - DNA, 20 bp, Artificial Sequence
  Synthetic oligonucleotide; GAG chr11 5333354 5333373 5333357 -
caatgttagtgttggagtgg

SEQ ID NO: 36518 - DNA, 20 bp, Artificial Sequence
  Synthetic oligonucleotide; TAG chr11 5333351 5333370 5333354 -
tgttagtgttggagtgggag

SEQ ID NO: 36519 - DNA, 20 bp, Artificial Sequence
  Synthetic oligonucleotide; GAG chr11 5333327 5333346 5333330 -
accgtgttttttactacaat

SEQ ID NO: 36520 - DNA, 20 bp, Artificial Sequence
  Synthetic oligonucleotide; TAG chr11 5333323 5333342 5333326 -
tgttttttactacaatgagt

SEQ ID NO: 36521 - DNA, 20 bp, Artificial Sequence
  Synthetic oligonucleotide; GAG chr11 5333321 5333340 5333324 -
ttttttactacaatgagtta

SEQ ID NO: 36522 - DNA, 20 bp, Artificial Sequence
  Synthetic oligonucleotide; TAG chr11 5333314 5333333 5333317 -
ctacaatgagttagagccac

SEQ ID NO: 36523 - DNA, 20 bp, Artificial Sequence
  Synthetic oligonucleotide; AGG chr11 5333313 5333332 5333316 -
tacaatgagttagagccact

SEQ ID NO: 36524 - DNA, 20 bp, Artificial Sequence
  Synthetic oligonucleotide; GAG chr11 5333307 5333326 5333310 -
gagttagagccactaggtct

SEQ ID NO: 36525 - DNA, 20 bp, Artificial Sequence
  Synthetic oligonucleotide; GAG chr11 5333305 5333324 5333308 -
gttagagccactaggtctga

SEQ ID NO: 36526 - DNA, 20 bp, Artificial Sequence
  Synthetic oligonucleotide; TAG chr11 5333300 5333319 5333303 -
agccactaggtctgagagac

SEQ ID NO: 36527 - DNA, 20 bp, Artificial Sequence
  Synthetic oligonucleotide; AAG chr11 5333294 5333313 5333297 -
taggtctgagagactagtaa

SEQ ID NO: 36528 - DNA, 20 bp, Artificial Sequence
  Synthetic oligonucleotide; CAG chr11 5333283 5333302 5333286 -
gactagtaaaagaatgtaaa

SEQ ID NO: 36529 - DNA, 20 bp, Artificial Sequence
  Synthetic oligonucleotide; AAG chr11 5333265 5333284 5333268 -
aacagtaaaaattttgtgct

SEQ ID NO: 36530 - DNA, 20 bp, Artificial Sequence
  Synthetic oligonucleotide; AAG chr11 5333252 5333271 5333255 -
ttgtgctaagttttatgcta

SEQ ID NO: 36531 - DNA, 20 bp, Artificial Sequence
  Synthetic oligonucleotide; TGG chr11 5333247 5333266 5333250 -
ctaagttttatgctaaagtc

SEQ ID NO: 36532 - DNA, 20 bp, Artificial Sequence
  Synthetic oligonucleotide; GGG chr11 5333246 5333265 5333249 -
taagttttatgctaaagtct

SEQ ID NO: 36533 - DNA, 20 bp, Artificial Sequence
  Synthetic oligonucleotide; AAG chr11 5333235 5333254 5333238 -
ctaaagtctgggtgatgcaa

SEQ ID NO: 36534 - DNA, 20 bp, Artificial Sequence
  Synthetic oligonucleotide; GAG chr11 5333233 5333252 5333236 -
aaagtctgggtgatgcaaaa

SEQ ID NO: 36535 - DNA, 20 bp, Artificial Sequence
  Synthetic oligonucleotide; TGG chr11 5333225 5333244 5333228 -
ggtgatgcaaaagagacatc

SEQ ID NO: 36536 - DNA, 20 bp, Artificial Sequence
  Synthetic oligonucleotide; GGG chr11 5333224 5333243 5333227 -
gtgatgcaaaagagacatct

SEQ ID NO: 36537 - DNA, 20 bp, Artificial Sequence
  Synthetic oligonucleotide; GGG chr11 5333223 5333242 5333226 -
tgatgcaaaagagacatctg

SEQ ID NO: 36538 - DNA, 20 bp, Artificial Sequence
  Synthetic oligonucleotide; TAG chr11 5333218 5333237 5333221 -
caaaagagacatctggggtt

SEQ ID NO: 36539 - DNA, 20 bp, Artificial Sequence
  Synthetic oligonucleotide; TAG chr11 5333214 5333233 5333217 -
agagacatctggggtttagt

SEQ ID NO: 36540 - DNA, 20 bp, Artificial Sequence
  Synthetic oligonucleotide; GAG chr11 5333212 5333231 5333215 -
agacatctggggtttagtta

SEQ ID NO: 36541 - DNA, 20 bp, Artificial Sequence
  Synthetic oligonucleotide; GAG chr11 5333210 5333229 5333213 -
acatctggggtttagttaga

SEQ ID NO: 36542 - DNA, 20 bp, Artificial Sequence
  Synthetic oligonucleotide; AGG chr11 5333209 5333228 5333212 -
catctggggtttagttagag

SEQ ID NO: 36543 - DNA, 20 bp, Artificial Sequence
  Synthetic oligonucleotide; GGG chr11 5333208 5333227 5333211 -
atctggggtttagttagaga

SEQ ID NO: 36544 - DNA, 20 bp, Artificial Sequence
  Synthetic oligonucleotide; AAG chr11 5333199 5333218 5333202 -
ttagttagagagggcaaaat

SEQ ID NO: 36545 - DNA, 20 bp, Artificial Sequence
  Synthetic oligonucleotide; GAG chr11 5333197 5333216 5333200 -
agttagagagggcaaaataa

SEQ ID NO: 36546 - DNA, 20 bp, Artificial Sequence
  Synthetic oligonucleotide; TAG chr11 5333188 5333207 5333191 -
gggcaaaataagagacaata

SEQ ID NO: 36547 - DNA, 20 bp, Artificial Sequence
  Synthetic oligonucleotide; TAG chr11 5333182 5333201 5333185 -
aataagagacaatatagaaa

SEQ ID NO: 36548 - DNA, 20 bp, Artificial Sequence
  Synthetic oligonucleotide; AAG chr11 5333170 5333189 5333173 -
tatagaaatagatacaacaa

SEQ ID NO: 36549 - DNA, 20 bp, Artificial Sequence
  Synthetic oligonucleotide; AGG chr11 5333169 5333188 5333172 -
atagaaatagatacaacaaa

SEQ ID NO: 36550 - DNA, 20 bp, Artificial Sequence
  Synthetic oligonucleotide; GGG chr11 5333168 5333187 5333171 -
tagaaatagatacaacaaaa

SEQ ID NO: 36551 - DNA, 20 bp, Artificial Sequence
  Synthetic oligonucleotide; TGG chr11 5333162 5333181 5333165 -
tagatacaacaaaagggtga

SEQ ID NO: 36552 - DNA, 20 bp, Artificial Sequence
  Synthetic oligonucleotide; TAG chr11 5333156 5333175 5333159 -
caacaaaagggtgatggata

SEQ ID NO: 36553 - DNA, 20 bp, Artificial Sequence
  Synthetic oligonucleotide; AGG chr11 5333155 5333174 5333158 -
aacaaaagggtgatggatat

SEQ ID NO: 36554 - DNA, 20 bp, Artificial Sequence
  Synthetic oligonucleotide; AAG chr11 5333152 5333171 5333155 -
aaaagggtgatggatatagg

SEQ ID NO: 36555 - DNA, 20 bp, Artificial Sequence
  Synthetic oligonucleotide; CAG chr11 5333142 5333161 5333145 -
tggatataggaagaacgaca

SEQ ID NO: 36556 - DNA, 20 bp, Artificial Sequence
  Synthetic oligonucleotide; AGG chr11 5333141 5333160 5333144 -
ggatataggaagaacgacac

SEQ ID NO: 36557 - DNA, 20 bp, Artificial Sequence
  Synthetic oligonucleotide; TAG chr11 5333131 5333150 5333134 -
agaacgacacaggaaaacaa

SEQ ID NO: 36558 - DNA, 20 bp, Artificial Sequence
  Synthetic oligonucleotide; AGG chr11 5333130 5333149 5333133 -
gaacgacacaggaaaacaat

SEQ ID NO: 36559 - DNA, 20 bp, Artificial Sequence
  Synthetic oligonucleotide; TAG chr11 5333126 5333145 5333129 -
gacacaggaaaacaatagga

SEQ ID NO: 36560 - DNA, 20 bp, Artificial Sequence
  Synthetic oligonucleotide; AGG chr11 5333125 5333144 5333128 -
acacaggaaaacaataggat

SEQ ID NO: 36561 - DNA, 20 bp, Artificial Sequence
  Synthetic oligonucleotide; GGG chr11 5333124 5333143 5333127 -
cacaggaaaacaataggata

SEQ ID NO: 36562 - DNA, 20 bp, Artificial Sequence
  Synthetic oligonucleotide; CAG chr11 5333113 5333132 5333116 -
aataggatagggatgacgta

SEQ ID NO: 36563 - DNA, 20 bp, Artificial Sequence
  Synthetic oligonucleotide; GAG chr11 5333093 5333112 5333096 -
cagctgcaccctatgtacct

SEQ ID NO: 36564 - DNA, 20 bp, Artificial Sequence
  Synthetic oligonucleotide; CAG chr11 5333090 5333109 5333093 -
ctgcaccctatgtacctgag

SEQ ID NO: 36565 - DNA, 20 bp, Artificial Sequence
  Synthetic oligonucleotide; TGG chr11 5333086 5333105 5333089 -
accctatgtacctgagcaga

SEQ ID NO: 36566 - DNA, 20 bp, Artificial Sequence
  Synthetic oligonucleotide; CAG chr11 5333081 5333100 5333084 -
atgtacctgagcagatggtg

SEQ ID NO: 36567 - DNA, 20 bp, Artificial Sequence
  Synthetic oligonucleotide; CAG chr11 5333071 5333090 5333074 -
gcagatggtgcagaaatgat

SEQ ID NO: 36568 - DNA, 20 bp, Artificial Sequence
  Synthetic oligonucleotide; CAG chr11 5333061 5333080 5333064 -
cagaaatgatcagtgctgcc

SEQ ID NO: 36569 - DNA, 20 bp, Artificial Sequence
  Synthetic oligonucleotide; AAG chr11 5333056 5333075 5333059 -
atgatcagtgctgcccagcc

SEQ ID NO: 36570 - DNA, 20 bp, Artificial Sequence
  Synthetic oligonucleotide; CAG chr11 5333051 5333070 5333054 -
cagtgctgcccagccaagcc

SEQ ID NO: 36571 - DNA, 20 bp, Artificial Sequence
  Synthetic oligonucleotide; AAG chr11 5333041 5333060 5333044 -
cagccaagcccagcctaaat

SEQ ID NO: 36572 - DNA, 20 bp, Artificial Sequence
  Synthetic oligonucleotide; TAG chr11 5333025 5333044 5333028 -
aaataagttgaaccatgcat

SEQ ID NO: 36573 - DNA, 20 bp, Artificial Sequence
  Synthetic oligonucleotide; GAG chr11 5333023 5333042 5333026 -
ataagttgaaccatgcatta

SEQ ID NO: 36574 - DNA, 20 bp, Artificial Sequence
  Synthetic oligonucleotide; CAG chr11 5332996 5333015 5332999 -
aaataaatgtttaatgttgt

SEQ ID NO: 36575 - DNA, 20 bp, Artificial Sequence
  Synthetic oligonucleotide; CAG chr11 5332979 5332998 5332982 -
tgtcagccactgatgctata

SEQ ID NO: 36576 - DNA, 20 bp, Artificial Sequence
  Synthetic oligonucleotide; AGG chr11 5332978 5332997 5332981 -
gtcagccactgatgctatac

SEQ ID NO: 36577 - DNA, 20 bp, Artificial Sequence
  Synthetic oligonucleotide; GGG chr11 5332977 5332996 5332980 -
tcagccactgatgctataca

SEQ ID NO: 36578 - DNA, 20 bp, Artificial Sequence
  Synthetic oligonucleotide; TAG chr11 5332947 5332966 5332950 -
atgtgacaattctgtgataa

SEQ ID NO: 36579 - DNA, 20 bp, Artificial Sequence
  Synthetic oligonucleotide; TAG chr11 5332906 5332925 5332909 -
tacataaaccctgtaaatat

SEQ ID NO: 36580 - DNA, 20 bp, Artificial Sequence
  Synthetic oligonucleotide; TAG chr11 5332896 5332915 5332899 -
ctgtaaatattagtttatta

SEQ ID NO: 36581 - DNA, 20 bp, Artificial Sequence
  Synthetic oligonucleotide; TGG chr11 5332868 5332887 5332871 -
tataaactcttaataaaata

SEQ ID NO: 36582 - DNA, 20 bp, Artificial Sequence
  Synthetic oligonucleotide; TAG chr11 5332861 5332880 5332864 -
tcttaataaaatatggataa

SEQ ID NO: 36583 - DNA, 20 bp, Artificial Sequence
  Synthetic oligonucleotide; TAG chr11 5332845 5332864 5332848 -
ataatagtaatactttgcat

SEQ ID NO: 36584 - DNA, 20 bp, Artificial Sequence
  Synthetic oligonucleotide; GAG chr11 5332809 5332828 5332812 -
tacataaattactgcaactt

SEQ ID NO: 36585 - DNA, 20 bp, Artificial Sequence
  Synthetic oligonucleotide; TAG chr11 5332790 5332809 5332793 -
tgagctgcttcaaacattat

SEQ ID NO: 36586 - DNA, 20 bp, Artificial Sequence
  Synthetic oligonucleotide; TAG chr11 5332767 5332786 5332770 -
tttattatatcacatttcta

SEQ ID NO: 36587 - DNA, 20 bp, Artificial Sequence
  Synthetic oligonucleotide; AGG chr11 5332766 5332785 5332769 -
ttattatatcacatttctat

SEQ ID NO: 36588 - DNA, 20 bp, Artificial Sequence
  Synthetic oligonucleotide; TAG chr11 5332751 5332770 5332754 -
tctataggtctgcactctca

SEQ ID NO: 36589 - DNA, 20 bp, Artificial Sequence
  Synthetic oligonucleotide; AGG chr11 5332750 5332769 5332753 -
ctataggtctgcactctcat

SEQ ID NO: 36590 - DNA, 20 bp, Artificial Sequence
  Synthetic oligonucleotide; GAG chr11 5332740 5332759 5332743 -
gcactctcataggcttaact

SEQ ID NO: 36591 - DNA, 20 bp, Artificial Sequence
  Synthetic oligonucleotide; TAG chr11 5332728 5332747 5332731 -
gcttaactgagttctctgct

SEQ ID NO: 36592 - DNA, 20 bp, Artificial Sequence
  Synthetic oligonucleotide; AGG chr11 5332727 5332746 5332730 -
cttaactgagttctctgctt

SEQ ID NO: 36593 - DNA, 20 bp, Artificial Sequence
  Synthetic oligonucleotide; GGG chr11 5332726 5332745 5332729 -
ttaactgagttctctgctta

SEQ ID NO: 36594 - DNA, 20 bp, Artificial Sequence
  Synthetic oligonucleotide; AAG chr11 5332717 5332736 5332720 -
ttctctgcttagggtatcat

SEQ ID NO: 36595 - DNA, 20 bp, Artificial Sequence
  Synthetic oligonucleotide; AGG chr11 5332716 5332735 5332719 -
tctctgcttagggtatcata

SEQ ID NO: 36596 - DNA, 20 bp, Artificial Sequence
  Synthetic oligonucleotide; CGG chr11 5332698 5332717 5332701 -
taaggtcaaattcaaaatat

SEQ ID NO: 36597 - DNA, 20 bp, Artificial Sequence
  Synthetic oligonucleotide; GGG chr11 5332697 5332716 5332700 -
aaggtcaaattcaaaatatc

SEQ ID NO: 36598 - DNA, 20 bp, Artificial Sequence
  Synthetic oligonucleotide; GAG chr11 5332695 5332714 5332698 -
ggtcaaattcaaaatatcgg

SEQ ID NO: 36599 - DNA, 20 bp, Artificial Sequence
  Synthetic oligonucleotide; AGG chr11 5332694 5332713 5332697 -
gtcaaattcaaaatatcggg

SEQ ID NO: 36600 - DNA, 20 bp, Artificial Sequence
  Synthetic oligonucleotide; GGG chr11 5332693 5332712 5332696 -
tcaaattcaaaatatcggga

SEQ ID NO: 36601 - DNA, 20 bp, Artificial Sequence
  Synthetic oligonucleotide; TGG chr11 5332689 5332708 5332692 -
attcaaaatatcgggagggc

SEQ ID NO: 36602 - DNA, 20 bp, Artificial Sequence
  Synthetic oligonucleotide; GGG chr11 5332688 5332707 5332691 -
ttcaaaatatcgggagggct

SEQ ID NO: 36603 - DNA, 20 bp, Artificial Sequence
  Synthetic oligonucleotide; AAG chr11 5332675 5332694 5332678 -
gagggctgggctcttatcca

SEQ ID NO: 36604 - DNA, 20 bp, Artificial Sequence
  Synthetic oligonucleotide; AGG chr11 5332674 5332693 5332677 -
agggctgggctcttatccaa

SEQ ID NO: 36605 - DNA, 20 bp, Artificial Sequence
  Synthetic oligonucleotide; TGG chr11 5332668 5332687 5332671 -
gggctcttatccaaaggctc

SEQ ID NO: 36606 - DNA, 20 bp, Artificial Sequence
  Synthetic oligonucleotide; GGG chr11 5332667 5332686 5332670 -
ggctcttatccaaaggctct

SEQ ID NO: 36607 - DNA, 20 bp, Artificial Sequence
  Synthetic oligonucleotide; GGG chr11 5332666 5332685 5332669 -
gctcttatccaaaggctctg

SEQ ID NO: 36608 - DNA, 20 bp, Artificial Sequence
  Synthetic oligonucleotide; AAG chr11 5332663 5332682 5332666 -
cttatccaaaggctctgggg

SEQ ID NO: 36609 - DNA, 20 bp, Artificial Sequence
  Synthetic oligonucleotide; CAG chr11 5332640 5332659 5332643 -
aattcgcttccacgttcatt

SEQ ID NO: 36610 - DNA, 20 bp, Artificial Sequence
  Synthetic oligonucleotide; TAG chr11 5332633 5332652 5332636 -
ttccacgttcattcagattg

SEQ ID NO: 36611 - DNA, 20 bp, Artificial Sequence
  Synthetic oligonucleotide; CAG chr11 5332629 5332648 5332632 -
acgttcattcagattgtagt

SEQ ID NO: 36612 - DNA, 20 bp, Artificial Sequence
  Synthetic oligonucleotide; GAG chr11 5332627 5332646 5332630 -
gttcattcagattgtagtca

SEQ ID NO: 36613 - DNA, 20 bp, Artificial Sequence
  Synthetic oligonucleotide; CAG chr11 5332622 5332641 5332625 -
ttcagattgtagtcagagct

SEQ ID NO: 36614 - DNA, 20 bp, Artificial Sequence
  Synthetic oligonucleotide; GAG chr11 5332585 5332604 5332588 -
tttttttttttttttttttt

SEQ ID NO: 36615 - DNA, 20 bp, Artificial Sequence
  Synthetic oligonucleotide; TGG chr11 5332581 5332600 5332584 -
ttttttttttttttttgaga

SEQ ID NO: 36616 - DNA, 20 bp, Artificial Sequence
  Synthetic oligonucleotide; GAG chr11 5332579 5332598 5332582 -
ttttttttttttttgagatg

SEQ ID NO: 36617 - DNA, 20 bp, Artificial Sequence
  Synthetic oligonucleotide; CAG chr11 5332561 5332580 5332564 -
tggagtctcgctctgtcacc

SEQ ID NO: 36618 - DNA, 20 bp, Artificial Sequence
  Synthetic oligonucleotide; TGG chr11 5332556 5332575 5332559 -
tctcgctctgtcacccagcc

SEQ ID NO: 36619 - DNA, 20 bp, Artificial Sequence
  Synthetic oligonucleotide; GAG chr11 5332554 5332573 5332557 -
tcgctctgtcacccagcctg

SEQ ID NO: 36620 - DNA, 20 bp, Artificial Sequence
  Synthetic oligonucleotide; CAG chr11 5332549 5332568 5332552 -
ctgtcacccagcctggagtg

SEQ ID NO: 36621 - DNA, 20 bp, Artificial Sequence
  Synthetic oligonucleotide; TGG chr11 5332546 5332565 5332549 -
tcacccagcctggagtgcag

SEQ ID NO: 36622 - DNA, 20 bp, Artificial Sequence
  Synthetic oligonucleotide; CGG chr11 5332510 5332529 5332513 -
tccctgcaacctgtgcctcc

SEQ ID NO: 36623 - DNA, 20 bp, Artificial Sequence
  Synthetic oligonucleotide; GGG chr11 5332509 5332528 5332512 -
ccctgcaacctgtgcctccc

SEQ ID NO: 36624 - DNA, 20 bp, Artificial Sequence
  Synthetic oligonucleotide; AAG chr11 5332503 5332522 5332506 -
aacctgtgcctcccgggttc

SEQ ID NO: 36625 - DNA, 20 bp, Artificial Sequence
  Synthetic oligonucleotide; CAG chr11 5332486 5332505 5332489 -
ttcaagcaattctcctgcct

SEQ ID NO: 36626 - DNA, 20 bp, Artificial Sequence
  Synthetic oligonucleotide; AAG chr11 5332477 5332496 5332480 -
ttctcctgcctcagtttccc

SEQ ID NO: 36627 - DNA, 20 bp, Artificial Sequence
  Synthetic oligonucleotide; TAG chr11 5332474 5332493 5332477 -
tcctgcctcagtttcccaag

SEQ ID NO: 36628 - DNA, 20 bp, Artificial Sequence
  Synthetic oligonucleotide; TGG chr11 5332470 5332489 5332473 -
gcctcagtttcccaagtagc

SEQ ID NO: 36629 - DNA, 20 bp, Artificial Sequence
  Synthetic oligonucleotide; CAG chr11 5332462 5332481 5332465 -
ttcccaagtagctggaacta

SEQ ID NO: 36630 - DNA, 20 bp, Artificial Sequence
  Synthetic oligonucleotide; AGG chr11 5332461 5332480 5332464 -
tcccaagtagctggaactac

SEQ ID NO: 36631 - DNA, 20 bp, Artificial Sequence
  Synthetic oligonucleotide; TGG chr11 5332442 5332461 5332445 -
caggcaactgcaaccacacc

SEQ ID NO: 36632 - DNA, 20 bp, Artificial Sequence
  Synthetic oligonucleotide; TGG chr11 5332422 5332441 5332425 -
tggctaatttttatattttt

SEQ ID NO: 36633 - DNA, 20 bp, Artificial Sequence
  Synthetic oligonucleotide; TAG chr11 5332419 5332438 5332422 -
ctaatttttatattttttgg

SEQ ID NO: 36634 - DNA, 20 bp, Artificial Sequence
  Synthetic oligonucleotide; AGG chr11 5332418 5332437 5332421 -
taatttttatattttttggt

SEQ ID NO: 36635 - DNA, 20 bp, Artificial Sequence
  Synthetic oligonucleotide; GGG chr11 5332417 5332436 5332420 -
aatttttatattttttggta

SEQ ID NO: 36636 - DNA, 20 bp, Artificial Sequence
  Synthetic oligonucleotide; TGG chr11 5332413 5332432 5332416 -
tttatattttttggtaggga

SEQ ID NO: 36637 - DNA, 20 bp, Artificial Sequence
  Synthetic oligonucleotide; TGG chr11 5332397 5332416 5332400 -
gggatggaatttcaccatgt

SEQ ID NO: 36638 - DNA, 20 bp, Artificial Sequence
  Synthetic oligonucleotide; CAG chr11 5332393 5332412 5332396 -
tggaatttcaccatgttggc

SEQ ID NO: 36639 - DNA, 20 bp, Artificial Sequence
  Synthetic oligonucleotide; AGG chr11 5332392 5332411 5332395 -
ggaatttcaccatgttggcc

SEQ ID NO: 36640 - DNA, 20 bp, Artificial Sequence
  Synthetic oligonucleotide; TGG chr11 5332388 5332407 5332391 -
tttcaccatgttggccaggc

SEQ ID NO: 36641 - DNA, 20 bp, Artificial Sequence
  Synthetic oligonucleotide; TGG chr11 5332383 5332402 5332386 -
ccatgttggccaggctggtc

SEQ ID NO: 36642 - DNA, 20 bp, Artificial Sequence
  Synthetic oligonucleotide; CAG chr11 5332368 5332387 5332371 -
tggtctggaactcctgacct

SEQ ID NO: 36643 - DNA, 20 bp, Artificial Sequence
  Synthetic oligonucleotide; AGG chr11 5332367 5332386 5332370 -
ggtctggaactcctgacctc

SEQ ID NO: 36644 - DNA, 20 bp, Artificial Sequence
  Synthetic oligonucleotide; TGG chr11 5332350 5332369 5332353 -
ctcaggtgatccgcccgcct

SEQ ID NO: 36645 - DNA, 20 bp, Artificial Sequence
  Synthetic oligonucleotide; AAG chr11 5332340 5332359 5332343 -
ccgcccgccttggcctccca

SEQ ID NO: 36646 - DNA, 20 bp, Artificial Sequence
  Synthetic oligonucleotide; TGG chr11 5332334 5332353 5332337 -
gccttggcctcccaaagtgc

SEQ ID NO: 36647 - DNA, 20 bp, Artificial Sequence
  Synthetic oligonucleotide; GGG chr11 5332333 5332352 5332336 -
ccttggcctcccaaagtgct

SEQ ID NO: 36648 - DNA, 20 bp, Artificial Sequence
  Synthetic oligonucleotide; CAG chr11 5332326 5332345 5332329 -
ctcccaaagtgctgggatta

SEQ ID NO: 36649 - DNA, 20 bp, Artificial Sequence
  Synthetic oligonucleotide; AGG chr11 5332325 5332344 5332328 -
tcccaaagtgctgggattac

SEQ ID NO: 36650 - DNA, 20 bp, Artificial Sequence
  Synthetic oligonucleotide; GAG chr11 5332315 5332334 5332318 -
ctgggattacaggcttgaat

SEQ ID NO: 36651 - DNA, 20 bp, Artificial Sequence
  Synthetic oligonucleotide; CGG chr11 5332302 5332321 5332305 -
cttgaatgagccattgcacc

SEQ ID NO: 36652 - DNA, 20 bp, Artificial Sequence
  Synthetic oligonucleotide; CAG chr11 5332295 5332314 5332298 -
gagccattgcacccggctgt

SEQ ID NO: 36653 - DNA, 20 bp, Artificial Sequence
  Synthetic oligonucleotide; GAG chr11 5332293 5332312 5332296 -
gccattgcacccggctgtca

SEQ ID NO: 36654 - DNA, 20 bp, Artificial Sequence
  Synthetic oligonucleotide; CAG chr11 5332288 5332307 5332291 -
tgcacccggctgtcagagtt

SEQ ID NO: 36655 - DNA, 20 bp, Artificial Sequence
  Synthetic oligonucleotide; AAG chr11 5332265 5332284 5332268 -
tttcctactgctgaactctg

SEQ ID NO: 36656 - DNA, 20 bp, Artificial Sequence
  Synthetic oligonucleotide; CAG chr11 5332221 5332240 5332224 -
gttttttgtttgtttgtttg

SEQ ID NO: 36657 - DNA, 20 bp, Artificial Sequence
  Synthetic oligonucleotide; AGG chr11 5332220 5332239 5332223 -
ttttttgtttgtttgtttgc

SEQ ID NO: 36658 - DNA, 20 bp, Artificial Sequence
  Synthetic oligonucleotide; TAG chr11 5332213 5332232 5332216 -
tttgtttgtttgcaggctgt

SEQ ID NO: 36659 - DNA, 20 bp, Artificial Sequence
  Synthetic oligonucleotide; TAG chr11 5332209 5332228 5332212 -
tttgtttgcaggctgttagc

SEQ ID NO: 36660 - DNA, 20 bp, Artificial Sequence
  Synthetic oligonucleotide; AGG chr11 5332208 5332227 5332211 -
ttgtttgcaggctgttagct

SEQ ID NO: 36661 - DNA, 20 bp, Artificial Sequence
  Synthetic oligonucleotide; TAG chr11 5332189 5332208 5332192 -
taggatgcccgttctgtacc

SEQ ID NO: 36662 - DNA, 20 bp, Artificial Sequence
  Synthetic oligonucleotide; AGG chr11 5332188 5332207 5332191 -
aggatgcccgttctgtacct

SEQ ID NO: 36663 - DNA, 20 bp, Artificial Sequence
  Synthetic oligonucleotide; GGG chr11 5332187 5332206 5332190 -
ggatgcccgttctgtaccta

SEQ ID NO: 36664 - DNA, 20 bp, Artificial Sequence
  Synthetic oligonucleotide; GGG chr11 5332186 5332205 5332189 -
gatgcccgttctgtacctag

SEQ ID NO: 36665 - DNA, 20 bp, Artificial Sequence
  Synthetic oligonucleotide; CAG chr11 5332141 5332160 5332144 -
gacctccttatatttcaaac

SEQ ID NO: 36666 - DNA, 20 bp, Artificial Sequence
  Synthetic oligonucleotide; TGG chr11 5332099 5332118 5332102 -
tctcaaattttgaatatgtc

SEQ ID NO: 36667 - DNA, 20 bp, Artificial Sequence
  Synthetic oligonucleotide; TGG chr11 5332076 5332095 5332079 -
cttcctattctcctactact

SEQ ID NO: 36668 - DNA, 20 bp, Artificial Sequence
  Synthetic oligonucleotide; TAG chr11 5332058 5332077 5332061 -
cttggtgaaaactctgcttt

SEQ ID NO: 36669 - DNA, 20 bp, Artificial Sequence
  Synthetic oligonucleotide; AGG chr11 5332057 5332076 5332060 -
ttggtgaaaactctgctttt

SEQ ID NO: 36670 - DNA, 20 bp, Artificial Sequence
  Synthetic oligonucleotide; GGG chr11 5332056 5332075 5332059 -
tggtgaaaactctgctttta

SEQ ID NO: 36671 - DNA, 20 bp, Artificial Sequence
  Synthetic oligonucleotide; GGG chr11 5332055 5332074 5332058 -
ggtgaaaactctgcttttag

SEQ ID NO: 36672 - DNA, 20 bp, Artificial Sequence
  Synthetic oligonucleotide; TGG chr11 5332048 5332067 5332051 -
actctgcttttaggggctca

SEQ ID NO: 36673 - DNA, 20 bp, Artificial Sequence
  Synthetic oligonucleotide; TAG chr11 5332042 5332061 5332045 -
cttttaggggctcatggaat

SEQ ID NO: 36674 - DNA, 20 bp, Artificial Sequence
  Synthetic oligonucleotide; TAG chr11 5332037 5332056 5332040 -
aggggctcatggaattagac

SEQ ID NO: 36675 - DNA, 20 bp, Artificial Sequence
  Synthetic oligonucleotide; AGG chr11 5332036 5332055 5332039 -
ggggctcatggaattagact

SEQ ID NO: 36676 - DNA, 20 bp, Artificial Sequence
  Synthetic oligonucleotide; GAG chr11 5332026 5332045 5332029 -
gaattagactaggttcccct

SEQ ID NO: 36677 - DNA, 20 bp, Artificial Sequence
  Synthetic oligonucleotide; AAG chr11 5332000 5332019 5332003 -
tttccttttcaattaactca

SEQ ID NO: 36678 - DNA, 20 bp, Artificial Sequence
  Synthetic oligonucleotide; TAG chr11 5331993 5332012 5331996 -
ttcaattaactcaaagtcaa

SEQ ID NO: 36679 - DNA, 20 bp, Artificial Sequence
  Synthetic oligonucleotide; CAG chr11 5331988 5332007 5331991 -
ttaactcaaagtcaatagat

SEQ ID NO: 36680 - DNA, 20 bp, Artificial Sequence
  Synthetic oligonucleotide; AAG chr11 5331958 5331977 5331961 -
aattacatctgtataacccc

SEQ ID NO: 36681 - DNA, 20 bp, Artificial Sequence
  Synthetic oligonucleotide; CAG chr11 5331934 5331953 5331937 -
atgatattgtatcatattca

SEQ ID NO: 36682 - DNA, 20 bp, Artificial Sequence
  Synthetic oligonucleotide; TAG chr11 5331928 5331947 5331931 -
ttgtatcatattcacagtcc

SEQ ID NO: 36683 - DNA, 20 bp, Artificial Sequence
  Synthetic oligonucleotide; TAG chr11 5331921 5331940 5331924 -
atattcacagtcctagaaat

SEQ ID NO: 36684 - DNA, 20 bp, Artificial Sequence
  Synthetic oligonucleotide; AGG chr11 5331920 5331939 5331923 -
tattcacagtcctagaaatt

SEQ ID NO: 36685 - DNA, 20 bp, Artificial Sequence
  Synthetic oligonucleotide; TAG chr11 5331916 5331935 5331919 -
cacagtcctagaaattagga

SEQ ID NO: 36686 - DNA, 20 bp, Artificial Sequence
  Synthetic oligonucleotide; AGG chr11 5331915 5331934 5331918 -
acagtcctagaaattaggat

SEQ ID NO: 36687 - DNA, 20 bp, Artificial Sequence
  Synthetic oligonucleotide; TGG chr11 5331904 5331923 5331907 -
aattaggataggaaatcttg

SEQ ID NO: 36688 - DNA, 20 bp, Artificial Sequence
  Synthetic oligonucleotide; TAG chr11 5331901 5331920 5331904 -
taggataggaaatcttgtgg

SEQ ID NO: 36689 - DNA, 20 bp, Artificial Sequence
  Synthetic oligonucleotide; AAG chr11 5331897 5331916 5331900 -
ataggaaatcttgtggtaga

SEQ ID NO: 36690 - DNA, 20 bp, Artificial Sequence
  Synthetic oligonucleotide; AGG chr11 5331896 5331915 5331899 -
taggaaatcttgtggtagaa

SEQ ID NO: 36691 - DNA, 20 bp, Artificial Sequence
  Synthetic oligonucleotide; TAG chr11 5331858 5331877 5331861 -
ctatcacaccatttaaaaaa

SEQ ID NO: 36692 - DNA, 20 bp, Artificial Sequence
  Synthetic oligonucleotide; TAG chr11 5331854 5331873 5331857 -
cacaccatttaaaaaatagc

SEQ ID NO: 36693 - DNA, 20 bp, Artificial Sequence
  Synthetic oligonucleotide; GAG chr11 5331850 5331869 5331853 -
ccatttaaaaaatagctagt

SEQ ID NO: 36694 - DNA, 20 bp, Artificial Sequence
  Synthetic oligonucleotide; GAG chr11 5331848 5331867 5331851 -
atttaaaaaatagctagtga

SEQ ID NO: 36695 - DNA, 20 bp, Artificial Sequence
  Synthetic oligonucleotide; GAG chr11 5331846 5331865 5331849 -
ttaaaaaatagctagtgaga

SEQ ID NO: 36696 - DNA, 20 bp, Artificial Sequence
  Synthetic oligonucleotide; AGG chr11 5331845 5331864 5331848 -
taaaaaatagctagtgagag

SEQ ID NO: 36697 - DNA, 20 bp, Artificial Sequence
  Synthetic oligonucleotide; GAG chr11 5331843 5331862 5331846 -
aaaaatagctagtgagagag

SEQ ID NO: 36698 - DNA, 20 bp, Artificial Sequence
  Synthetic oligonucleotide; TAG chr11 5331817 5331836 5331820 -
ttcttttccaatatatgtgt

SEQ ID NO: 36699 - DNA, 20 bp, Artificial Sequence
  Synthetic oligonucleotide; AAG chr11 5331809 5331828 5331812 -
caatatatgtgttagtttta

SEQ ID NO: 36700 - DNA, 20 bp, Artificial Sequence
  Synthetic oligonucleotide; AAG chr11 5331766 5331785 5331769 -
ttcttaacatttttttgatg

SEQ ID NO: 36701 - DNA, 20 bp, Artificial Sequence
  Synthetic oligonucleotide; AAG chr11 5331751 5331770 5331754 -
tgatgaagcacaatgtctga

SEQ ID NO: 36702 - DNA, 20 bp, Artificial Sequence
  Synthetic oligonucleotide; AGG chr11 5331750 5331769 5331753 -
gatgaagcacaatgtctgaa

SEQ ID NO: 36703 - DNA, 20 bp, Artificial Sequence
  Synthetic oligonucleotide; GGG chr11 5331749 5331768 5331752 -
atgaagcacaatgtctgaaa

SEQ ID NO: 36704 - DNA, 20 bp, Artificial Sequence
  Synthetic oligonucleotide; TGG chr11 5331746 5331765 5331749 -
aagcacaatgtctgaaaggg

SEQ ID NO: 36705 - DNA, 20 bp, Artificial Sequence
  Synthetic oligonucleotide; TAG chr11 5331743 5331762 5331746 -
cacaatgtctgaaagggtgg

SEQ ID NO: 36706 - DNA, 20 bp, Artificial Sequence
  Synthetic oligonucleotide; AAG chr11 5331739 5331758 5331742 -
atgtctgaaagggtggtaga

SEQ ID NO: 36707 - DNA, 20 bp, Artificial Sequence
  Synthetic oligonucleotide; CAG chr11 5331736 5331755 5331739 -
tctgaaagggtggtagaaag

SEQ ID NO: 36708 - DNA, 20 bp, Artificial Sequence
  Synthetic oligonucleotide; TGG chr11 5331732 5331751 5331735 -
aaagggtggtagaaagcagc

SEQ ID NO: 36709 - DNA, 20 bp, Artificial Sequence
  Synthetic oligonucleotide; GAG chr11 5331730 5331749 5331733 -
agggtggtagaaagcagctg

SEQ ID NO: 36710 - DNA, 20 bp, Artificial Sequence
  Synthetic oligonucleotide; GAG chr11 5331719 5331738 5331722 -
aagcagctggagtcgaaact

SEQ ID NO: 36711 - DNA, 20 bp, Artificial Sequence
  Synthetic oligonucleotide; AGG chr11 5331718 5331737 5331721 -
agcagctggagtcgaaactg

SEQ ID NO: 36712 - DNA, 20 bp, Artificial Sequence
  Synthetic oligonucleotide; AAG chr11 5331712 5331731 5331715 -
tggagtcgaaactgaggatg

SEQ ID NO: 36713 - DNA, 20 bp, Artificial Sequence
  Synthetic oligonucleotide; TAG chr11 5331704 5331723 5331707 -
aaactgaggatgaagtcgta

SEQ ID NO: 36714 - DNA, 20 bp, Artificial Sequence
  Synthetic oligonucleotide; TAG chr11 5331699 5331718 5331702 -
gaggatgaagtcgtatagtc

SEQ ID NO: 36715 - DNA, 20 bp, Artificial Sequence
  Synthetic oligonucleotide; GAG chr11 5331697 5331716 5331700 -
ggatgaagtcgtatagtcta

SEQ ID NO: 36716 - DNA, 20 bp, Artificial Sequence
  Synthetic oligonucleotide; CAG chr11 5331679 5331698 5331682 -
tagagctgtgctgtccaaaa

SEQ ID NO: 36717 - DNA, 20 bp, Artificial Sequence
  Synthetic oligonucleotide; TAG chr11 5331676 5331695 5331679 -
agctgtgctgtccaaaacag

SEQ ID NO: 36718 - DNA, 20 bp, Artificial Sequence
  Synthetic oligonucleotide; TGG chr11 5331669 5331688 5331672 -
ctgtccaaaacagtagcatc

SEQ ID NO: 36719 - DNA, 20 bp, Artificial Sequence
  Synthetic oligonucleotide; TAG chr11 5331665 5331684 5331668 -
ccaaaacagtagcatctggt

SEQ ID NO: 36720 - DNA, 20 bp, Artificial Sequence
  Synthetic oligonucleotide; GAG chr11 5331659 5331678 5331662 -
cagtagcatctggttagctt

SEQ ID NO: 36721 - DNA, 20 bp, Artificial Sequence
  Synthetic oligonucleotide; CAG chr11 5331655 5331674 5331658 -
agcatctggttagcttgagt

SEQ ID NO: 36722 - DNA, 20 bp, Artificial Sequence
  Synthetic oligonucleotide; AAG chr11 5331642 5331661 5331645 -
cttgagtcagaattttctgt

SEQ ID NO: 36723 - DNA, 20 bp, Artificial Sequence
  Synthetic oligonucleotide; AAG chr11 5331621 5331640 5331624 -
agtgtaaacactcgattttg

SEQ ID NO: 36724 - DNA, 20 bp, Artificial Sequence
  Synthetic oligonucleotide; TGG chr11 5331596 5331615 5331599 -
tttgtaccaaaaaaaaatcg

SEQ ID NO: 36725 - DNA, 20 bp, Artificial Sequence
  Synthetic oligonucleotide; GGG chr11 5331595 5331614 5331598 -
ttgtaccaaaaaaaaatcgt

SEQ ID NO: 36726 - DNA, 20 bp, Artificial Sequence
  Synthetic oligonucleotide; TAG chr11 5331533 5331552 5331536 -
aaatgataatatttttgata

SEQ ID NO: 36727 - DNA, 20 bp, Artificial Sequence
  Synthetic oligonucleotide; TAG chr11 5331530 5331549 5331533 -
tgataatatttttgatatag

SEQ ID NO: 36728 - DNA, 20 bp, Artificial Sequence
  Synthetic oligonucleotide; AAG chr11 5331520 5331539 5331523 -
tttgatatagtagcttaaat

SEQ ID NO: 36729 - DNA, 20 bp, Artificial Sequence
  Synthetic oligonucleotide; CAG chr11 5331463 5331482 5331466 -
actccttttaatgtgactac

SEQ ID NO: 36730 - DNA, 20 bp, Artificial Sequence
  Synthetic oligonucleotide; TAG chr11 5331440 5331459 5331443 -
aacatttaacatcacatatt

SEQ ID NO: 36731 - DNA, 20 bp, Artificial Sequence
  Synthetic oligonucleotide; TAG chr11 5331415 5331434 5331418 -
ctaattatatttccaccaca

SEQ ID NO: 36732 - DNA, 20 bp, Artificial Sequence
  Synthetic oligonucleotide; TGG chr11 5331409 5331428 5331412 -
atatttccaccacatagtgc

SEQ ID NO: 36733 - DNA, 20 bp, Artificial Sequence
  Synthetic oligonucleotide; TAG chr11 5331404 5331423 5331407 -
tccaccacatagtgctggtc

SEQ ID NO: 36734 - DNA, 20 bp, Artificial Sequence
  Synthetic oligonucleotide; GAG chr11 5331402 5331421 5331405 -
caccacatagtgctggtcta

SEQ ID NO: 36735 - DNA, 20 bp, Artificial Sequence
  Synthetic oligonucleotide; GAG chr11 5331400 5331419 5331403 -
ccacatagtgctggtctaga

SEQ ID NO: 36736 - DNA, 20 bp, Artificial Sequence
  Synthetic oligonucleotide; CAG chr11 5331373 5331392 5331376 -
tttgtttgtttgtttctcct

SEQ ID NO: 36737 - DNA, 20 bp, Artificial Sequence
  Synthetic oligonucleotide; AGG chr11 5331372 5331391 5331375 -
ttgtttgtttgtttctcctc

SEQ ID NO: 36738 - DNA, 20 bp, Artificial Sequence
  Synthetic oligonucleotide; TGG chr11 5331323 5331342 5331326 -
gctgccccttttctcctcac

SEQ ID NO: 36739 - DNA, 20 bp, Artificial Sequence
  Synthetic oligonucleotide; CAG chr11 5331315 5331334 5331318 -
ttttctcctcactggctttc

SEQ ID NO: 36740 - DNA, 20 bp, Artificial Sequence
  Synthetic oligonucleotide; AGG chr11 5331314 5331333 5331317 -
tttctcctcactggctttcc

SEQ ID NO: 36741 - DNA, 20 bp, Artificial Sequence
  Synthetic oligonucleotide; TGG chr11 5331309 5331328 5331312 -
cctcactggctttccaggtc

SEQ ID NO: 36742 - DNA, 20 bp, Artificial Sequence
  Synthetic oligonucleotide; GAG chr11 5331307 5331326 5331310 -
tcactggctttccaggtctg

SEQ ID NO: 36743 - DNA, 20 bp, Artificial Sequence
  Synthetic oligonucleotide; GAG chr11 5331305 5331324 5331308 -
actggctttccaggtctgga

SEQ ID NO: 36744 - DNA, 20 bp, Artificial Sequence
  Synthetic oligonucleotide; TGG chr11 5331292 5331311 5331295 -
gtctggagagatttcatcct

SEQ ID NO: 36745 - DNA, 20 bp, Artificial Sequence
  Synthetic oligonucleotide; GAG chr11 5331290 5331309 5331293 -
ctggagagatttcatccttg

SEQ ID NO: 36746 - DNA, 20 bp, Artificial Sequence
  Synthetic oligonucleotide; CAG chr11 5331255 5331274 5331258 -
ctttatcatctatgtctcta

SEQ ID NO: 36747 - DNA, 20 bp, Artificial Sequence
  Synthetic oligonucleotide; TGG chr11 5331248 5331267 5331251 -
atctatgtctctacagtcct

SEQ ID NO: 36748 - DNA, 20 bp, Artificial Sequence
  Synthetic oligonucleotide; TGG chr11 5331242 5331261 5331245 -
gtctctacagtccttggcaa

SEQ ID NO: 36749 - DNA, 20 bp, Artificial Sequence
  Synthetic oligonucleotide; CAG chr11 5331239 5331258 5331242 -
tctacagtccttggcaatgg

SEQ ID NO: 36750 - DNA, 20 bp, Artificial Sequence
  Synthetic oligonucleotide; CAG chr11 5331221 5331240 5331224 -
ggcagcctcctcctctttat

SEQ ID NO: 36751 - DNA, 20 bp, Artificial Sequence
  Synthetic oligonucleotide; GAG chr11 5331219 5331238 5331222 -
cagcctcctcctctttatca

SEQ ID NO: 36752 - DNA, 20 bp, Artificial Sequence
  Synthetic oligonucleotide; AAG chr11 5331216 5331235 5331219 -
cctcctcctctttatcagag

SEQ ID NO: 36753 - DNA, 20 bp, Artificial Sequence
  Synthetic oligonucleotide; GAG chr11 5331199 5331218 5331202 -
gagaagactgcactcttcat

SEQ ID NO: 36754 - DNA, 20 bp, Artificial Sequence
  Synthetic oligonucleotide; TGG chr11 5331171 5331190 5331174 -
gtactactctctgactatac

SEQ ID NO: 36755 - DNA, 20 bp, Artificial Sequence
  Synthetic oligonucleotide; CAG chr11 5331168 5331187 5331171 -
ctactctctgactatactgg

SEQ ID NO: 36756 - DNA, 20 bp, Artificial Sequence
  Synthetic oligonucleotide; TAG chr11 5331162 5331181 5331165 -
tctgactatactggcagcca

SEQ ID NO: 36757 - DNA, 20 bp, Artificial Sequence
  Synthetic oligonucleotide; TGG chr11 5331155 5331174 5331158 -
atactggcagccatagacct

SEQ ID NO: 36758 - DNA, 20 bp, Artificial Sequence
  Synthetic oligonucleotide; TGG chr11 5331122 5331141 5331125 -
acaacaatgtccactgtcct

SEQ ID NO: 36759 - DNA, 20 bp, Artificial Sequence
  Synthetic oligonucleotide; TGG chr11 5331112 5331131 5331115 -
ccactgtccttggtgttctc

SEQ ID NO: 36760 - DNA, 20 bp, Artificial Sequence
  Synthetic oligonucleotide; TAG chr11 5331108 5331127 5331111 -
tgtccttggtgttctctggc

SEQ ID NO: 36761 - DNA, 20 bp, Artificial Sequence
  Synthetic oligonucleotide; CAG chr11 5331101 5331120 5331104 -
ggtgttctctggctagatca

SEQ ID NO: 36762 - DNA, 20 bp, Artificial Sequence
  Synthetic oligonucleotide; AGG chr11 5331100 5331119 5331103 -
gtgttctctggctagatcac

SEQ ID NO: 36763 - DNA, 20 bp, Artificial Sequence
  Synthetic oligonucleotide; GAG chr11 5331092 5331111 5331095 -
tggctagatcacaggaaaat

SEQ ID NO: 36764 - DNA, 20 bp, Artificial Sequence
  Synthetic oligonucleotide; TGG chr11 5331086 5331105 5331089 -
gatcacaggaaaatgagcca

SEQ ID NO: 36765 - DNA, 20 bp, Artificial Sequence
  Synthetic oligonucleotide; GAG chr11 5331084 5331103 5331087 -
tcacaggaaaatgagccatg

SEQ ID NO: 36766 - DNA, 20 bp, Artificial Sequence
  Synthetic oligonucleotide; CAG chr11 5331070 5331089 5331073 -
gccatggagcctgcttcctc

SEQ ID NO: 36767 - DNA, 20 bp, Artificial Sequence
  Synthetic oligonucleotide; AGG chr11 5331069 5331088 5331072 -
ccatggagcctgcttcctcc

SEQ ID NO: 36768 - DNA, 20 bp, Artificial Sequence
  Synthetic oligonucleotide; TGG chr11 5331039 5331058 5331042 -
aatccactccctctctatcg

SEQ ID NO: 36769 - DNA, 20 bp, Artificial Sequence
  Synthetic oligonucleotide; GAG chr11 5331037 5331056 5331040 -
tccactccctctctatcgtg

SEQ ID NO: 36770 - DNA, 20 bp, Artificial Sequence
  Synthetic oligonucleotide; CAG chr11 5331032 5331051 5331035 -
tccctctctatcgtggagtc

SEQ ID NO: 36771 - DNA, 20 bp, Artificial Sequence
  Synthetic oligonucleotide; GAG chr11 5331030 5331049 5331033 -
cctctctatcgtggagtcca

SEQ ID NO: 36772 - DNA, 20 bp, Artificial Sequence
  Synthetic oligonucleotide; TGG chr11 5331015 5331034 5331018 -
gtccagagtgttgctcatca

SEQ ID NO: 36773 - DNA, 20 bp, Artificial Sequence
  Synthetic oligonucleotide; TGG chr11 5330996 5331015 5330999 -
atggcccatgactgttttat

SEQ ID NO: 36774 - DNA, 20 bp, Artificial Sequence
  Synthetic oligonucleotide; GAG chr11 5330978 5330997 5330981 -
attggcatccataatcccct

SEQ ID NO: 36775 - DNA, 20 bp, Artificial Sequence
  Synthetic oligonucleotide; AAG chr11 5330950 5330969 5330953 -
cctccattctcaccaatgct

SEQ ID NO: 36776 - DNA, 20 bp, Artificial Sequence
  Synthetic oligonucleotide; AGG chr11 5330949 5330968 5330952 -
ctccattctcaccaatgcta

SEQ ID NO: 36777 - DNA, 20 bp, Artificial Sequence
  Synthetic oligonucleotide; TGG chr11 5330946 5330965 5330949 -
cattctcaccaatgctaagg

SEQ ID NO: 36778 - DNA, 20 bp, Artificial Sequence
  Synthetic oligonucleotide; AAG chr11 5330941 5330960 5330944 -
tcaccaatgctaaggtggtg

SEQ ID NO: 36779 - DNA, 20 bp, Artificial Sequence
  Synthetic oligonucleotide; TAG chr11 5330937 5330956 5330940 -
caatgctaaggtggtgaaga

SEQ ID NO: 36780 - DNA, 20 bp, Artificial Sequence
  Synthetic oligonucleotide; TGG chr11 5330931 5330950 5330934 -
taaggtggtgaagatagatc

SEQ ID NO: 36781 - DNA, 20 bp, Artificial Sequence
  Synthetic oligonucleotide; GGG chr11 5330930 5330949 5330933 -
aaggtggtgaagatagatct

SEQ ID NO: 36782 - DNA, 20 bp, Artificial Sequence
  Synthetic oligonucleotide; GGG chr11 5330929 5330948 5330932 -
aggtggtgaagatagatctg

SEQ ID NO: 36783 - DNA, 20 bp, Artificial Sequence
  Synthetic oligonucleotide; GGG chr11 5330928 5330947 5330931 -
ggtggtgaagatagatctgg

SEQ ID NO: 36784 - DNA, 20 bp, Artificial Sequence
  Synthetic oligonucleotide; GAG chr11 5330918 5330937 5330921 -
atagatctgggggttcaaat

SEQ ID NO: 36785 - DNA, 20 bp, Artificial Sequence
  Synthetic oligonucleotide; AGG chr11 5330917 5330936 5330920 -
tagatctgggggttcaaatg

SEQ ID NO: 36786 - DNA, 20 bp, Artificial Sequence
  Synthetic oligonucleotide; GGG chr11 5330916 5330935 5330919 -
agatctgggggttcaaatga

SEQ ID NO: 36787 - DNA, 20 bp, Artificial Sequence
  Synthetic oligonucleotide; GGG chr11 5330915 5330934 5330918 -
gatctgggggttcaaatgag

SEQ ID NO: 36788 - DNA, 20 bp, Artificial Sequence
  Synthetic oligonucleotide; TGG chr11 5330873 5330892 5330876 -
cccataatcatcaccctctc

SEQ ID NO: 36789 - DNA, 20 bp, Artificial Sequence
  Synthetic oligonucleotide; CAG chr11 5330821 5330840 5330824 -
cccatgctttctgcctgcac

SEQ ID NO: 36790 - DNA, 20 bp, Artificial Sequence
  Synthetic oligonucleotide; TGG chr11 5330806 5330825 5330809 -
tgcaccagatgtgatcaaac

SEQ ID NO: 36791 - DNA, 20 bp, Artificial Sequence
  Synthetic oligonucleotide; CAG chr11 5330797 5330816 5330800 -
tgtgatcaaactggcctgtg

SEQ ID NO: 36792 - DNA, 20 bp, Artificial Sequence
  Synthetic oligonucleotide; TAG chr11 5330781 5330800 5330784 -
tgtgcagacatcacctttaa

SEQ ID NO: 36793 - DNA, 20 bp, Artificial Sequence
  Synthetic oligonucleotide; TAG chr11 5330767 5330786 5330770 -
ctttaatagactttatccta

SEQ ID NO: 36794 - DNA, 20 bp, Artificial Sequence
  Synthetic oligonucleotide; TGG chr11 5330761 5330780 5330764 -
tagactttatcctatagtcc

SEQ ID NO: 36795 - DNA, 20 bp, Artificial Sequence
  Synthetic oligonucleotide; TGG chr11 5330748 5330767 5330751 -
atagtcctggtctcatcaac

SEQ ID NO: 36796 - DNA, 20 bp, Artificial Sequence
  Synthetic oligonucleotide; TGG chr11 5330740 5330759 5330743 -
ggtctcatcaactggtttct

SEQ ID NO: 36797 - DNA, 20 bp, Artificial Sequence
  Synthetic oligonucleotide; AAG chr11 5330699 5330718 5330702 -
tctcttacattctgatcctt

SEQ ID NO: 36798 - DNA, 20 bp, Artificial Sequence
  Synthetic oligonucleotide; AAG chr11 5330696 5330715 5330699 -
cttacattctgatccttaag

SEQ ID NO: 36799 - DNA, 20 bp, Artificial Sequence
  Synthetic oligonucleotide; AGG chr11 5330695 5330714 5330698 -
ttacattctgatccttaaga

SEQ ID NO: 36800 - DNA, 20 bp, Artificial Sequence
  Synthetic oligonucleotide; TGG chr11 5330689 5330708 5330692 -
tctgatccttaagaaggtca

SEQ ID NO: 36801 - DNA, 20 bp, Artificial Sequence
  Synthetic oligonucleotide; GGG chr11 5330688 5330707 5330691 -
ctgatccttaagaaggtcat

SEQ ID NO: 36802 - DNA, 20 bp, Artificial Sequence
  Synthetic oligonucleotide; CAG chr11 5330677 5330696 5330680 -
gaaggtcatgggaattgcct

SEQ ID NO: 36803 - DNA, 20 bp, Artificial Sequence
  Synthetic oligonucleotide; AAG chr11 5330672 5330691 5330675 -
tcatgggaattgcctcagac

SEQ ID NO: 36804 - DNA, 20 bp, Artificial Sequence
  Synthetic oligonucleotide; AGG chr11 5330671 5330690 5330674 -
catgggaattgcctcagaca

SEQ ID NO: 36805 - DNA, 20 bp, Artificial Sequence
  Synthetic oligonucleotide; GAG chr11 5330669 5330688 5330672 -
tgggaattgcctcagacaag

SEQ ID NO: 36806 - DNA, 20 bp, Artificial Sequence
  Synthetic oligonucleotide; CAG chr11 5330666 5330685 5330669 -
gaattgcctcagacaaggag

SEQ ID NO: 36807 - DNA, 20 bp, Artificial Sequence
  Synthetic oligonucleotide; AAG chr11 5330660 5330679 5330663 -
cctcagacaaggagcagact

SEQ ID NO: 36808 - DNA, 20 bp, Artificial Sequence
  Synthetic oligonucleotide; AGG chr11 5330659 5330678 5330662 -
ctcagacaaggagcagacta

SEQ ID NO: 36809 - DNA, 20 bp, Artificial Sequence
  Synthetic oligonucleotide; TAG chr11 5330631 5330650 5330634 -
aatacttgtatttctcacat

SEQ ID NO: 36810 - DNA, 20 bp, Artificial Sequence
  Synthetic oligonucleotide; TGG chr11 5330620 5330639 5330623 -
ttctcacattagctgtgttc

SEQ ID NO: 36811 - DNA, 20 bp, Artificial Sequence
  Synthetic oligonucleotide; TGG chr11 5330599 5330618 5330602 -
ggtttttaatgtcacttgat

SEQ ID NO: 36812 - DNA, 20 bp, Artificial Sequence
  Synthetic oligonucleotide; GGG chr11 5330598 5330617 5330601 -
gtttttaatgtcacttgatt

SEQ ID NO: 36813 - DNA, 20 bp, Artificial Sequence
  Synthetic oligonucleotide; CAG chr11 5330583 5330602 5330586 -
tgattgggctaccacccttt

SEQ ID NO: 36814 - DNA, 20 bp, Artificial Sequence
  Synthetic oligonucleotide; AAG chr11 5330554 5330573 5330557 -
tgcttcatcaaaaaaatgtt

SEQ ID NO: 36815 - DNA, 20 bp, Artificial Sequence
  Synthetic oligonucleotide; AAG chr11 5330490 5330509 5330493 -
caatgcaaatcaaaaccaca

SEQ ID NO: 36816 - DNA, 20 bp, Artificial Sequence
  Synthetic oligonucleotide; GAG chr11 5330488 5330507 5330491 -
atgcaaatcaaaaccacaaa

SEQ ID NO: 36817 - DNA, 20 bp, Artificial Sequence
  Synthetic oligonucleotide; CAG chr11 5330471 5330490 5330474 -
aaagagataccatctcacac

SEQ ID NO: 36818 - DNA, 20 bp, Artificial Sequence
  Synthetic oligonucleotide; TAG chr11 5330467 5330486 5330470 -
agataccatctcacaccagt

SEQ ID NO: 36819 - DNA, 20 bp, Artificial Sequence
  Synthetic oligonucleotide; TGG chr11 5330462 5330481 5330465 -
ccatctcacaccagttagaa

SEQ ID NO: 36820 - DNA, 20 bp, Artificial Sequence
  Synthetic oligonucleotide; AAG chr11 5330448 5330467 5330451 -
ttagaatggcaatcattaaa

SEQ ID NO: 36821 - DNA, 20 bp, Artificial Sequence
  Synthetic oligonucleotide; CAG chr11 5330444 5330463 5330447 -
aatggcaatcattaaaaagt

SEQ ID NO: 36822 - DNA, 20 bp, Artificial Sequence
  Synthetic oligonucleotide; AGG chr11 5330443 5330462 5330446 -
atggcaatcattaaaaagtc

SEQ ID NO: 36823 - DNA, 20 bp, Artificial Sequence
  Synthetic oligonucleotide; GGG chr11 5330442 5330461 5330445 -
tggcaatcattaaaaagtca

SEQ ID NO: 36824 - DNA, 20 bp, Artificial Sequence
  Synthetic oligonucleotide; CAG chr11 5330434 5330453 5330437 -
attaaaaagtcagggaacaa

SEQ ID NO: 36825 - DNA, 20 bp, Artificial Sequence
  Synthetic oligonucleotide; AGG chr11 5330433 5330452 5330436 -
ttaaaaagtcagggaacaac

SEQ ID NO: 36826 - DNA, 20 bp, Artificial Sequence
  Synthetic oligonucleotide; TGG chr11 5330427 5330446 5330430 -
agtcagggaacaacaggtgc

SEQ ID NO: 36827 - DNA, 20 bp, Artificial Sequence
  Synthetic oligonucleotide; GAG chr11 5330425 5330444 5330428 -
tcagggaacaacaggtgctg

SEQ ID NO: 36828 - DNA, 20 bp, Artificial Sequence
  Synthetic oligonucleotide; GAG chr11 5330423 5330442 5330426 -
agggaacaacaggtgctgga

SEQ ID NO: 36829 - DNA, 20 bp, Artificial Sequence
  Synthetic oligonucleotide; AGG chr11 5330422 5330441 5330425 -
gggaacaacaggtgctggag

SEQ ID NO: 36830 - DNA, 20 bp, Artificial Sequence
  Synthetic oligonucleotide; TGG chr11 5330416 5330435 5330419 -
aacaggtgctggagaggatg

SEQ ID NO: 36831 - DNA, 20 bp, Artificial Sequence
  Synthetic oligonucleotide; GAG chr11 5330414 5330433 5330417 -
caggtgctggagaggatgtg

SEQ ID NO: 36832 - DNA, 20 bp, Artificial Sequence
  Synthetic oligonucleotide; TAG chr11 5330408 5330427 5330411 -
ctggagaggatgtggagaaa

SEQ ID NO: 36833 - DNA, 20 bp, Artificial Sequence
  Synthetic oligonucleotide; AGG chr11 5330407 5330426 5330410 -
tggagaggatgtggagaaat

SEQ ID NO: 36834 - DNA, 20 bp, Artificial Sequence
  Synthetic oligonucleotide; TGG chr11 5330388 5330407 5330391 -
taggaacacttttacactct

SEQ ID NO: 36835 - DNA, 20 bp, Artificial Sequence
  Synthetic oligonucleotide; TGG chr11 5330385 5330404 5330388 -
gaacacttttacactcttgg

SEQ ID NO: 36836 - DNA, 20 bp, Artificial Sequence
  Synthetic oligonucleotide; GGG chr11 5330384 5330403 5330387 -
aacacttttacactcttggt

SEQ ID NO: 36837 - DNA, 20 bp, Artificial Sequence
  Synthetic oligonucleotide; TAG chr11 5330372 5330391 5330375 -
ctcttggtgggactgtaaac

SEQ ID NO: 36838 - DNA, 20 bp, Artificial Sequence
  Synthetic oligonucleotide; TGG chr11 5330358 5330377 5330361 -
gtaaactagttcaaccattg

SEQ ID NO: 36839 - DNA, 20 bp, Artificial Sequence
  Synthetic oligonucleotide; AAG chr11 5330355 5330374 5330358 -
aactagttcaaccattgtgg

SEQ ID NO: 36840 - DNA, 20 bp, Artificial Sequence
  Synthetic oligonucleotide; CAG chr11 5330351 5330370 5330354 -
agttcaaccattgtggaagt

SEQ ID NO: 36841 - DNA, 20 bp, Artificial Sequence
  Synthetic oligonucleotide; TGG chr11 5330346 5330365 5330349 -
aaccattgtggaagtcagtg

SEQ ID NO: 36842 - DNA, 20 bp, Artificial Sequence
  Synthetic oligonucleotide; CAG chr11 5330335 5330354 5330338 -
aagtcagtgtggcgattcct

SEQ ID NO: 36843 - DNA, 20 bp, Artificial Sequence
  Synthetic oligonucleotide; AGG chr11 5330334 5330353 5330337 -
agtcagtgtggcgattcctc

SEQ ID NO: 36844 - DNA, 20 bp, Artificial Sequence
  Synthetic oligonucleotide; GGG chr11 5330333 5330352 5330336 -
gtcagtgtggcgattcctca

SEQ ID NO: 36845 - DNA, 20 bp, Artificial Sequence
  Synthetic oligonucleotide; TAG chr11 5330327 5330346 5330330 -
gtggcgattcctcagggatc

SEQ ID NO: 36846 - DNA, 20 bp, Artificial Sequence
  Synthetic oligonucleotide; TAG chr11 5330321 5330340 5330324 -
attcctcagggatctagaac

SEQ ID NO: 36847 - DNA, 20 bp, Artificial Sequence
  Synthetic oligonucleotide; CAG chr11 5330303 5330322 5330306 -
actagaaataccatttgacc

SEQ ID NO: 36848 - DNA, 20 bp, Artificial Sequence
  Synthetic oligonucleotide; TGG chr11 5330288 5330307 5330291 -
tgacccagccatcccattac

SEQ ID NO: 36849 - DNA, 20 bp, Artificial Sequence
  Synthetic oligonucleotide; GGG chr11 5330287 5330306 5330290 -
gacccagccatcccattact

SEQ ID NO: 36850 - DNA, 20 bp, Artificial Sequence
  Synthetic oligonucleotide; CGG chr11 5330273 5330292 5330276 -
attactgggtatatacccaa

SEQ ID NO: 36851 - DNA, 20 bp, Artificial Sequence
  Synthetic oligonucleotide; AAG chr11 5330249 5330268 5330252 -
ttataaatcatgctgctata

SEQ ID NO: 36852 - DNA, 20 bp, Artificial Sequence
  Synthetic oligonucleotide; TGG chr11 5330222 5330241 5330225 -
atgcacacgtatgtttactg

SEQ ID NO: 36853 - DNA, 20 bp, Artificial Sequence
  Synthetic oligonucleotide; TAG chr11 5330207 5330226 5330210 -
tactgtggcactattcacaa

SEQ ID NO: 36854 - DNA, 20 bp, Artificial Sequence
  Synthetic oligonucleotide; AAG chr11 5330202 5330221 5330205 -
tggcactattcacaatagca

SEQ ID NO: 36855 - DNA, 20 bp, Artificial Sequence
  Synthetic oligonucleotide; TGG chr11 5330196 5330215 5330199 -
tattcacaatagcaaagact

SEQ ID NO: 36856 - DNA, 20 bp, Artificial Sequence
  Synthetic oligonucleotide; TAG chr11 5330168 5330187 5330171 -
acccaaatgtccaacaatga

SEQ ID NO: 36857 - DNA, 20 bp, Artificial Sequence
  Synthetic oligonucleotide; AAG chr11 5330157 5330176 5330160 -
caacaatgatagactgaatt

SEQ ID NO: 36858 - DNA, 20 bp, Artificial Sequence
  Synthetic oligonucleotide; TGG chr11 5330148 5330167 5330151 -
tagactgaattaagaaaatg

SEQ ID NO: 36859 - DNA, 20 bp, Artificial Sequence
  Synthetic oligonucleotide; TGG chr11 5330132 5330151 5330135 -
aatgtggcacatatacacca

SEQ ID NO: 36860 - DNA, 20 bp, Artificial Sequence
  Synthetic oligonucleotide; CAG chr11 5330120 5330139 5330123 -
atacaccatggaatactatg

SEQ ID NO: 36861 - DNA, 20 bp, Artificial Sequence
  Synthetic oligonucleotide; AAG chr11 5330105 5330124 5330108 -
ctatgcagccataaaaaatg

SEQ ID NO: 36862 - DNA, 20 bp, Artificial Sequence
  Synthetic oligonucleotide; GAG chr11 5330103 5330122 5330106 -
atgcagccataaaaaatgaa

SEQ ID NO: 36863 - DNA, 20 bp, Artificial Sequence
  Synthetic oligonucleotide; TAG chr11 5330087 5330106 5330090 -
tgaagagttcatgtcatttg

SEQ ID NO: 36864 - DNA, 20 bp, Artificial Sequence
  Synthetic oligonucleotide; AGG chr11 5330086 5330105 5330089 -
gaagagttcatgtcatttgt

SEQ ID NO: 36865 - DNA, 20 bp, Artificial Sequence
  Synthetic oligonucleotide; GGG chr11 5330085 5330104 5330088 -
aagagttcatgtcatttgta

SEQ ID NO: 36866 - DNA, 20 bp, Artificial Sequence
  Synthetic oligonucleotide; TGG chr11 5330079 5330098 5330082 -
tcatgtcatttgtagggaca

SEQ ID NO: 36867 - DNA, 20 bp, Artificial Sequence
  Synthetic oligonucleotide; TGG chr11 5330069 5330088 5330072 -
tgtagggacatggatgaaac

SEQ ID NO: 36868 - DNA, 20 bp, Artificial Sequence
  Synthetic oligonucleotide; CAG chr11 5330053 5330072 5330056 -
aaactggaaaccatcattct

SEQ ID NO: 36869 - DNA, 20 bp, Artificial Sequence
  Synthetic oligonucleotide; AAG chr11 5330039 5330058 5330042 -
cattctcagcaaactatcgc

SEQ ID NO: 36870 - DNA, 20 bp, Artificial Sequence
  Synthetic oligonucleotide; AGG chr11 5330038 5330057 5330041 -
attctcagcaaactatcgca

SEQ ID NO: 36871 - DNA, 20 bp, Artificial Sequence
  Synthetic oligonucleotide; AAG chr11 5330025 5330044 5330028 -
tatcgcaaggacaaaaaacc

SEQ ID NO: 36872 - DNA, 20 bp, Artificial Sequence
  Synthetic oligonucleotide; TAG chr11 5330003 5330022 5330006 -
gcactgcatgttctcactca

SEQ ID NO: 36873 - DNA, 20 bp, Artificial Sequence
  Synthetic oligonucleotide; AGG chr11 5330002 5330021 5330005 -
cactgcatgttctcactcat

SEQ ID NO: 36874 - DNA, 20 bp, Artificial Sequence
  Synthetic oligonucleotide; TGG chr11 5329999 5330018 5330002 -
tgcatgttctcactcatagg

SEQ ID NO: 36875 - DNA, 20 bp, Artificial Sequence
  Synthetic oligonucleotide; GGG chr11 5329998 5330017 5330001 -
gcatgttctcactcataggt

SEQ ID NO: 36876 - DNA, 20 bp, Artificial Sequence
  Synthetic oligonucleotide; GAG chr11 5329984 5330003 5329987 -
ataggtgggaattgaacaat

SEQ ID NO: 36877 - DNA, 20 bp, Artificial Sequence
  Synthetic oligonucleotide; TGG chr11 5329975 5329994 5329978 -
aattgaacaatgagaacaca

SEQ ID NO: 36878 - DNA, 20 bp, Artificial Sequence
  Synthetic oligonucleotide; CAG chr11 5329969 5329988 5329972 -
acaatgagaacacatggaca

SEQ ID NO: 36879 - DNA, 20 bp, Artificial Sequence
  Synthetic oligonucleotide; AGG chr11 5329968 5329987 5329971 -
caatgagaacacatggacac

SEQ ID NO: 36880 - DNA, 20 bp, Artificial Sequence
  Synthetic oligonucleotide; AAG chr11 5329965 5329984 5329968 -
tgagaacacatggacacagg

SEQ ID NO: 36881 - DNA, 20 bp, Artificial Sequence
  Synthetic oligonucleotide; AGG chr11 5329964 5329983 5329967 -
gagaacacatggacacagga

SEQ ID NO: 36882 - DNA, 20 bp, Artificial Sequence
  Synthetic oligonucleotide; GGG chr11 5329963 5329982 5329966 -
agaacacatggacacaggaa

SEQ ID NO: 36883 - DNA, 20 bp, Artificial Sequence
  Synthetic oligonucleotide; GGG chr11 5329962 5329981 5329965 -
gaacacatggacacaggaag

SEQ ID NO: 36884 - DNA, 20 bp, Artificial Sequence
  Synthetic oligonucleotide; CGG chr11 5329947 5329966 5329950 -
ggaaggggaacaacacactc

SEQ ID NO: 36885 - DNA, 20 bp, Artificial Sequence
  Synthetic oligonucleotide; GGG chr11 5329946 5329965 5329949 -
gaaggggaacaacacactcc

SEQ ID NO: 36886 - DNA, 20 bp, Artificial Sequence
  Synthetic oligonucleotide; GGG chr11 5329945 5329964 5329948 -
aaggggaacaacacactccg

SEQ ID NO: 36887 - DNA, 20 bp, Artificial Sequence
  Synthetic oligonucleotide; GAG chr11 5329934 5329953 5329937 -
cacactccggggactgttgt

SEQ ID NO: 36888 - DNA, 20 bp, Artificial Sequence
  Synthetic oligonucleotide; AGG chr11 5329933 5329952 5329936 -
acactccggggactgttgtg

SEQ ID NO: 36889 - DNA, 20 bp, Artificial Sequence
  Synthetic oligonucleotide; TGG chr11 5329930 5329949 5329933 -
ctccggggactgttgtgagg

SEQ ID NO: 36890 - DNA, 20 bp, Artificial Sequence
  Synthetic oligonucleotide; GGG chr11 5329929 5329948 5329932 -
tccggggactgttgtgaggt

SEQ ID NO: 36891 - DNA, 20 bp, Artificial Sequence
  Synthetic oligonucleotide; GGG chr11 5329928 5329947 5329931 -
ccggggactgttgtgaggtg

SEQ ID NO: 36892 - DNA, 20 bp, Artificial Sequence
  Synthetic oligonucleotide; GGG chr11 5329927 5329946 5329930 -
cggggactgttgtgaggtgg

SEQ ID NO: 36893 - DNA, 20 bp, Artificial Sequence
  Synthetic oligonucleotide; GGG chr11 5329926 5329945 5329929 -
ggggactgttgtgaggtggg

SEQ ID NO: 36894 - DNA, 20 bp, Artificial Sequence
  Synthetic oligonucleotide; AAG chr11 5329923 5329942 5329926 -
gactgttgtgaggtgggggg

SEQ ID NO: 36895 - DNA, 20 bp, Artificial Sequence
  Synthetic oligonucleotide; AGG chr11 5329922 5329941 5329925 -
actgttgtgaggtgggggga

SEQ ID NO: 36896 - DNA, 20 bp, Artificial Sequence
  Synthetic oligonucleotide; GGG chr11 5329921 5329940 5329924 -
ctgttgtgaggtggggggaa

SEQ ID NO: 36897 - DNA, 20 bp, Artificial Sequence
  Synthetic oligonucleotide; GGG chr11 5329920 5329939 5329923 -
tgttgtgaggtggggggaag

SEQ ID NO: 36898 - DNA, 20 bp, Artificial Sequence
  Synthetic oligonucleotide; GGG chr11 5329919 5329938 5329922 -
gttgtgaggtggggggaagg

SEQ ID NO: 36899 - DNA, 20 bp, Artificial Sequence
  Synthetic oligonucleotide; GAG chr11 5329917 5329936 5329920 -
tgtgaggtggggggaagggg

SEQ ID NO: 36900 - DNA, 20 bp, Artificial Sequence
  Synthetic oligonucleotide; GAG chr11 5329915 5329934 5329918 -
tgaggtggggggaaggggga

SEQ ID NO: 36901 - DNA, 20 bp, Artificial Sequence
  Synthetic oligonucleotide; GAG chr11 5329913 5329932 5329916 -
aggtggggggaagggggaga

SEQ ID NO: 36902 - DNA, 20 bp, Artificial Sequence
  Synthetic oligonucleotide; GAG chr11 5329911 5329930 5329914 -
gtggggggaagggggagaga

SEQ ID NO: 36903 - DNA, 20 bp, Artificial Sequence
  Synthetic oligonucleotide; TAG chr11 5329905 5329924 5329908 -
ggaagggggagagagagcat

SEQ ID NO: 36904 - DNA, 20 bp, Artificial Sequence
  Synthetic oligonucleotide; AGG chr11 5329904 5329923 5329907 -
gaagggggagagagagcatt

SEQ ID NO: 36905 - DNA, 20 bp, Artificial Sequence
  Synthetic oligonucleotide; GAG chr11 5329902 5329921 5329905 -
agggggagagagagcattag

SEQ ID NO: 36906 - DNA, 20 bp, Artificial Sequence
  Synthetic oligonucleotide; AAG chr11 5329885 5329904 5329888 -
taggagatatacctaatgct

SEQ ID NO: 36907 - DNA, 20 bp, Artificial Sequence
  Synthetic oligonucleotide; AAG chr11 5329878 5329897 5329881 -
tatacctaatgctaagtgac

SEQ ID NO: 36908 - DNA, 20 bp, Artificial Sequence
  Synthetic oligonucleotide; TGG chr11 5329871 5329890 5329874 -
aatgctaagtgacaagttaa

SEQ ID NO: 36909 - DNA, 20 bp, Artificial Sequence
  Synthetic oligonucleotide; GGG chr11 5329870 5329889 5329873 -
atgctaagtgacaagttaat

SEQ ID NO: 36910 - DNA, 20 bp, Artificial Sequence
  Synthetic oligonucleotide; CAG chr11 5329865 5329884 5329868 -
aagtgacaagttaatgggtg

SEQ ID NO: 36911 - DNA, 20 bp, Artificial Sequence
  Synthetic oligonucleotide; TGG chr11 5329852 5329871 5329855 -
atgggtgcagcacaccaaca

SEQ ID NO: 36912 - DNA, 20 bp, Artificial Sequence
  Synthetic oligonucleotide; AAG chr11 5329793 5329812 5329796 -
cacatgtaccctaaaactta

SEQ ID NO: 36913 - DNA, 20 bp, Artificial Sequence
  Synthetic oligonucleotide; TGG chr11 5329757 5329776 5329760 -
ataataaaaatacattattt

SEQ ID NO: 36914 - DNA, 20 bp, Artificial Sequence
  Synthetic oligonucleotide; CAG chr11 5329739 5329758 5329742 -
tttggattaacaaaaaccaa

SEQ ID NO: 36915 - DNA, 20 bp, Artificial Sequence
  Synthetic oligonucleotide; AGG chr11 5329738 5329757 5329741 -
ttggattaacaaaaaccaac

SEQ ID NO: 36916 - DNA, 20 bp, Artificial Sequence
  Synthetic oligonucleotide; CAG chr11 5329729 5329748 5329732 -
caaaaaccaacaggctacca

SEQ ID NO: 36917 - DNA, 20 bp, Artificial Sequence
  Synthetic oligonucleotide; TGG chr11 5329686 5329705 5329689 -
tctcacatgttttgttattc

SEQ ID NO: 36918 - DNA, 20 bp, Artificial Sequence
  Synthetic oligonucleotide; TAG chr11 5329677 5329696 5329680 -
ttttgttattctggctctgc

SEQ ID NO: 36919 - DNA, 20 bp, Artificial Sequence
  Synthetic oligonucleotide; GAG chr11 5329660 5329679 5329663 -
tgctagaattctcttgattt

SEQ ID NO: 36920 - DNA, 20 bp, Artificial Sequence
  Synthetic oligonucleotide; TAG chr11 5329633 5329652 5329636 -
tcatattttctctttcccca

SEQ ID NO: 36921 - DNA, 20 bp, Artificial Sequence
  Synthetic oligonucleotide; TAG chr11 5329548 5329567 5329551 -
cttccttgtttttcaattat

SEQ ID NO: 36922 - DNA, 20 bp, Artificial Sequence
  Synthetic oligonucleotide; GAG chr11 5329526 5329545 5329529 -
gcttaaataatatttctttt

SEQ ID NO: 36923 - DNA, 20 bp, Artificial Sequence
  Synthetic oligonucleotide; AAG chr11 5329505 5329524 5329508 -
agaaattttcccctgcccca

SEQ ID NO: 36924 - DNA, 20 bp, Artificial Sequence
  Synthetic oligonucleotide; TGG chr11 5329492 5329511 5329495 -
tgccccaaagatgctttctg

SEQ ID NO: 36925 - DNA, 20 bp, Artificial Sequence
  Synthetic oligonucleotide; GGG chr11 5329491 5329510 5329494 -
gccccaaagatgctttctgt

SEQ ID NO: 36926 - DNA, 20 bp, Artificial Sequence
  Synthetic oligonucleotide; TAG chr11 5329481 5329500 5329484 -
tgctttctgtgggctccctt

SEQ ID NO: 36927 - DNA, 20 bp, Artificial Sequence
  Synthetic oligonucleotide; CAG chr11 5329462 5329481 5329465 -
ttagcatgctaccatctatg

SEQ ID NO: 36928 - DNA, 20 bp, Artificial Sequence
  Synthetic oligonucleotide; TAG chr11 5329453 5329472 5329456 -
taccatctatgcagtaatga

SEQ ID NO: 36929 - DNA, 20 bp, Artificial Sequence
  Synthetic oligonucleotide; TGG chr11 5329435 5329454 5329438 -
gatagtgctatgaaaatttg

SEQ ID NO: 36930 - DNA, 20 bp, Artificial Sequence
  Synthetic oligonucleotide; AAG chr11 5329388 5329407 5329391 -
ctatttacattctgtgaata

SEQ ID NO: 36931 - DNA, 20 bp, Artificial Sequence
  Synthetic oligonucleotide; TGG chr11 5329363 5329382 5329366 -
tatgctcctcattgtgtatc

SEQ ID NO: 36932 - DNA, 20 bp, Artificial Sequence
  Synthetic oligonucleotide; AAG chr11 5329346 5329365 5329349 -
atctggcaaaaaaaaaaaaa

SEQ ID NO: 36933 - DNA, 20 bp, Artificial Sequence
  Synthetic oligonucleotide; AGG chr11 5329345 5329364 5329348 -
tctggcaaaaaaaaaaaaaa

SEQ ID NO: 36934 - DNA, 20 bp, Artificial Sequence
  Synthetic oligonucleotide; GGG chr11 5329344 5329363 5329347 -
ctggcaaaaaaaaaaaaaaa

SEQ ID NO: 36935 - DNA, 20 bp, Artificial Sequence
  Synthetic oligonucleotide; GAG chr11 5329337 5329356 5329340 -
aaaaaaaaaaaaagggcaat

SEQ ID NO: 36936 - DNA, 20 bp, Artificial Sequence
  Synthetic oligonucleotide; AAG chr11 5329330 5329349 5329333 -
aaaaaagggcaatgagctac

SEQ ID NO: 36937 - DNA, 20 bp, Artificial Sequence
  Synthetic oligonucleotide; AAG chr11 5329315 5329334 5329318 -
gctacaagtaatataatttt

SEQ ID NO: 36938 - DNA, 20 bp, Artificial Sequence
  Synthetic oligonucleotide; AAG chr11 5329307 5329326 5329310 -
taatataattttaagataaa

SEQ ID NO: 36939 - DNA, 20 bp, Artificial Sequence
  Synthetic oligonucleotide; CAG chr11 5329296 5329315 5329299 -
taagataaaaagctgaatgt

SEQ ID NO: 36940 - DNA, 20 bp, Artificial Sequence
  Synthetic oligonucleotide; CGG chr11 5329292 5329311 5329295 -
ataaaaagctgaatgtcagc

SEQ ID NO: 36941 - DNA, 20 bp, Artificial Sequence
  Synthetic oligonucleotide; GGG chr11 5329291 5329310 5329294 -
taaaaagctgaatgtcagcc

SEQ ID NO: 36942 - DNA, 20 bp, Artificial Sequence
  Synthetic oligonucleotide; CAG chr11 5329286 5329305 5329289 -
agctgaatgtcagccgggcg

SEQ ID NO: 36943 - DNA, 20 bp, Artificial Sequence
  Synthetic oligonucleotide; CAG chr11 5329264 5329283 5329267 -
gtgactcacacctgcaatcc

SEQ ID NO: 36944 - DNA, 20 bp, Artificial Sequence
  Synthetic oligonucleotide; TGG chr11 5329256 5329275 5329259 -
cacctgcaatcccagcactt

SEQ ID NO: 36945 - DNA, 20 bp, Artificial Sequence
  Synthetic oligonucleotide; GGG chr11 5329255 5329274 5329258 -
acctgcaatcccagcacttt

SEQ ID NO: 36946 - DNA, 20 bp, Artificial Sequence
  Synthetic oligonucleotide; GAG chr11 5329253 5329272 5329256 -
ctgcaatcccagcactttgg

SEQ ID NO: 36947 - DNA, 20 bp, Artificial Sequence
  Synthetic oligonucleotide; AGG chr11 5329252 5329271 5329255 -
tgcaatcccagcactttggg

SEQ ID NO: 36948 - DNA, 20 bp, Artificial Sequence
  Synthetic oligonucleotide; AAG chr11 5329247 5329266 5329250 -
tcccagcactttgggaggcc

SEQ ID NO: 36949 - DNA, 20 bp, Artificial Sequence
  Synthetic oligonucleotide; AGG chr11 5329246 5329265 5329249 -
cccagcactttgggaggcca

SEQ ID NO: 36950 - DNA, 20 bp, Artificial Sequence
  Synthetic oligonucleotide; GAG chr11 5329244 5329263 5329247 -
cagcactttgggaggccaag

SEQ ID NO: 36951 - DNA, 20 bp, Artificial Sequence
  Synthetic oligonucleotide; AGG chr11 5329243 5329262 5329246 -
agcactttgggaggccaagg

SEQ ID NO: 36952 - DNA, 20 bp, Artificial Sequence
  Synthetic oligonucleotide; GGG chr11 5329242 5329261 5329245 -
gcactttgggaggccaagga

SEQ ID NO: 36953 - DNA, 20 bp, Artificial Sequence
  Synthetic oligonucleotide; TGG chr11 5329239 5329258 5329242 -
ctttgggaggccaaggaggg

SEQ ID NO: 36954 - DNA, 20 bp, Artificial Sequence
  Synthetic oligonucleotide; GAG chr11 5329231 5329250 5329234 -
ggccaaggagggtggatcac

SEQ ID NO: 36955 - DNA, 20 bp, Artificial Sequence
  Synthetic oligonucleotide; AGG chr11 5329230 5329249 5329233 -
gccaaggagggtggatcacg

SEQ ID NO: 36956 - DNA, 20 bp, Artificial Sequence
  Synthetic oligonucleotide; AAG chr11 5329225 5329244 5329228 -
ggagggtggatcacgaggtc

SEQ ID NO: 36957 - DNA, 20 bp, Artificial Sequence
  Synthetic oligonucleotide; GAG chr11 5329223 5329242 5329226 -
agggtggatcacgaggtcaa

SEQ ID NO: 36958 - DNA, 20 bp, Artificial Sequence
  Synthetic oligonucleotide; GAG chr11 5329217 5329236 5329220 -
gatcacgaggtcaagagatc

SEQ ID NO: 36959 - DNA, 20 bp, Artificial Sequence
  Synthetic oligonucleotide; TGG chr11 5329207 5329226 5329210 -
tcaagagatcgagaccatcc

SEQ ID NO: 36960 - DNA, 20 bp, Artificial Sequence
  Synthetic oligonucleotide; TGG chr11 5329198 5329217 5329201 -
cgagaccatcctggccaata

SEQ ID NO: 36961 - DNA, 20 bp, Artificial Sequence
  Synthetic oligonucleotide; TAG chr11 5329163 5329182 5329166 -
tctactaaaaatacaaaaat

SEQ ID NO: 36962 - DNA, 20 bp, Artificial Sequence
  Synthetic oligonucleotide; TGG chr11 5329159 5329178 5329162 -
ctaaaaatacaaaaattagc

SEQ ID NO: 36963 - DNA, 20 bp, Artificial Sequence
  Synthetic oligonucleotide; GGG chr11 5329158 5329177 5329161 -
taaaaatacaaaaattagct

SEQ ID NO: 36964 - DNA, 20 bp, Artificial Sequence
  Synthetic oligonucleotide; TGG chr11 5329153 5329172 5329156 -
atacaaaaattagctgggtg

SEQ ID NO: 36965 - DNA, 20 bp, Artificial Sequence
  Synthetic oligonucleotide; TAG chr11 5329137 5329156 5329140 -
ggtgtggtgacgcgctactg

SEQ ID NO: 36966 - DNA, 20 bp, Artificial Sequence
  Synthetic oligonucleotide; CAG chr11 5329131 5329150 5329134 -
gtgacgcgctactgtagtcc

SEQ ID NO: 36967 - DNA, 20 bp, Artificial Sequence
  Synthetic oligonucleotide; CAG chr11 5329123 5329142 5329126 -
ctactgtagtcccagcttct

SEQ ID NO: 36968 - DNA, 20 bp, Artificial Sequence
  Synthetic oligonucleotide; AGG chr11 5329122 5329141 5329125 -
tactgtagtcccagcttctc

SEQ ID NO: 36969 - DNA, 20 bp, Artificial Sequence
  Synthetic oligonucleotide; GAG chr11 5329120 5329139 5329123 -
ctgtagtcccagcttctcag

SEQ ID NO: 36970 - DNA, 20 bp, Artificial Sequence
  Synthetic oligonucleotide; AGG chr11 5329119 5329138 5329122 -
tgtagtcccagcttctcagg

SEQ ID NO: 36971 - DNA, 20 bp, Artificial Sequence
  Synthetic oligonucleotide; TGG chr11 5329113 5329132 5329116 -
cccagcttctcaggaggctg

SEQ ID NO: 36972 - DNA, 20 bp, Artificial Sequence
  Synthetic oligonucleotide; CAG chr11 5329110 5329129 5329113 -
agcttctcaggaggctgtgg

SEQ ID NO: 36973 - DNA, 20 bp, Artificial Sequence
  Synthetic oligonucleotide; AGG chr11 5329109 5329128 5329112 -
gcttctcaggaggctgtggc

SEQ ID NO: 36974 - DNA, 20 bp, Artificial Sequence
  Synthetic oligonucleotide; GAG chr11 5329107 5329126 5329110 -
ttctcaggaggctgtggcag

SEQ ID NO: 36975 - DNA, 20 bp, Artificial Sequence
  Synthetic oligonucleotide; TGG chr11 5329091 5329110 5329094 -
gcaggagaatcacttgaacc

SEQ ID NO: 36976 - DNA, 20 bp, Artificial Sequence
  Synthetic oligonucleotide; GGG chr11 5329090 5329109 5329093 -
caggagaatcacttgaacct

SEQ ID NO: 36977 - DNA, 20 bp, Artificial Sequence
  Synthetic oligonucleotide; GAG chr11 5329088 5329107 5329091 -
ggagaatcacttgaacctgg

SEQ ID NO: 36978 - DNA, 20 bp, Artificial Sequence
  Synthetic oligonucleotide; AGG chr11 5329087 5329106 5329090 -
gagaatcacttgaacctggg

SEQ ID NO: 36979 - DNA, 20 bp, Artificial Sequence
  Synthetic oligonucleotide; TGG chr11 5329084 5329103 5329087 -
aatcacttgaacctgggagg

SEQ ID NO: 36980 - DNA, 20 bp, Artificial Sequence
  Synthetic oligonucleotide; GAG chr11 5329082 5329101 5329085 -
tcacttgaacctgggaggtg

SEQ ID NO: 36981 - DNA, 20 bp, Artificial Sequence
  Synthetic oligonucleotide; CAG chr11 5329075 5329094 5329078 -
aacctgggaggtggagtttg

SEQ ID NO: 36982 - DNA, 20 bp, Artificial Sequence
  Synthetic oligonucleotide; GAG chr11 5329071 5329090 5329074 -
tgggaggtggagtttgcagt

SEQ ID NO: 36983 - DNA, 20 bp, Artificial Sequence
  Synthetic oligonucleotide; GAG chr11 5329066 5329085 5329069 -
ggtggagtttgcagtgagct

SEQ ID NO: 36984 - DNA, 20 bp, Artificial Sequence
  Synthetic oligonucleotide; CAG chr11 5329046 5329065 5329049 -
gagattgtgctactgcactc

SEQ ID NO: 36985 - DNA, 20 bp, Artificial Sequence
  Synthetic oligonucleotide; TGG chr11 5329041 5329060 5329044 -
tgtgctactgcactccagcc

SEQ ID NO: 36986 - DNA, 20 bp, Artificial Sequence
  Synthetic oligonucleotide; CAG chr11 5329035 5329054 5329038 -
actgcactccagcctggcga

SEQ ID NO: 36987 - DNA, 20 bp, Artificial Sequence
  Synthetic oligonucleotide; GAG chr11 5329033 5329052 5329036 -
tgcactccagcctggcgaca

SEQ ID NO: 36988 - DNA, 20 bp, Artificial Sequence
  Synthetic oligonucleotide; GAG chr11 5329029 5329048 5329032 -
ctccagcctggcgacagagt

SEQ ID NO: 36989 - DNA, 20 bp, Artificial Sequence
  Synthetic oligonucleotide; AAG chr11 5328991 5329010 5328994 -
aaaaaaaaaaaaaaaaaaaa

SEQ ID NO: 36990 - DNA, 20 bp, Artificial Sequence
  Synthetic oligonucleotide; CAG chr11 5328958 5328977 5328961 -
tgaatctgcatgactattaa

SEQ ID NO: 36991 - DNA, 20 bp, Artificial Sequence
  Synthetic oligonucleotide; AAG chr11 5328947 5328966 5328950 -
gactattaacagatccattg

SEQ ID NO: 36992 - DNA, 20 bp, Artificial Sequence
  Synthetic oligonucleotide; CAG chr11 5328941 5328960 5328944 -
taacagatccattgaagttc

SEQ ID NO: 36993 - DNA, 20 bp, Artificial Sequence
  Synthetic oligonucleotide; TAG chr11 5328938 5328957 5328941 -
cagatccattgaagttccag

SEQ ID NO: 36994 - DNA, 20 bp, Artificial Sequence
  Synthetic oligonucleotide; AAG chr11 5328933 5328952 5328936 -
ccattgaagttccagtagat

SEQ ID NO: 36995 - DNA, 20 bp, Artificial Sequence
  Synthetic oligonucleotide; AAG chr11 5328916 5328935 5328919 -
gataagaacaaattttacca

SEQ ID NO: 36996 - DNA, 20 bp, Artificial Sequence
  Synthetic oligonucleotide; CAG chr11 5328910 5328929 5328913 -
aacaaattttaccaaagtaa

SEQ ID NO: 36997 - DNA, 20 bp, Artificial Sequence
  Synthetic oligonucleotide; AGG chr11 5328909 5328928 5328912 -
acaaattttaccaaagtaac

SEQ ID NO: 36998 - DNA, 20 bp, Artificial Sequence
  Synthetic oligonucleotide; AAG chr11 5328905 5328924 5328908 -
attttaccaaagtaacagga

SEQ ID NO: 36999 - DNA, 20 bp, Artificial Sequence
  Synthetic oligonucleotide; TGG chr11 5328889 5328908 5328892 -
aggaaagacaaaaacgcaat

SEQ ID NO: 37000 - DNA, 20 bp, Artificial Sequence
  Synthetic oligonucleotide; AAG chr11 5328879 5328898 5328882 -
aaaacgcaattggaattcat

SEQ ID NO: 37001 - DNA, 20 bp, Artificial Sequence
  Synthetic oligonucleotide; TAG chr11 5328873 5328892 5328876 -
caattggaattcataagctc

SEQ ID NO: 37002 - DNA, 20 bp, Artificial Sequence
  Synthetic oligonucleotide; AGG chr11 5328872 5328891 5328875 -
aattggaattcataagctct

SEQ ID NO: 37003 - DNA, 20 bp, Artificial Sequence
  Synthetic oligonucleotide; TAG chr11 5328864 5328883 5328867 -
ttcataagctctaggacccg

SEQ ID NO: 37004 - DNA, 20 bp, Artificial Sequence
  Synthetic oligonucleotide; GAG chr11 5328862 5328881 5328865 -
cataagctctaggacccgta

SEQ ID NO: 37005 - DNA, 20 bp, Artificial Sequence
  Synthetic oligonucleotide; AGG chr11 5328861 5328880 5328864 -
ataagctctaggacccgtag

SEQ ID NO: 37006 - DNA, 20 bp, Artificial Sequence
  Synthetic oligonucleotide; AAG chr11 5328843 5328862 5328846 -
agaggtacatatgatccctg

SEQ ID NO: 37007 - DNA, 20 bp, Artificial Sequence
  Synthetic oligonucleotide; AAG chr11 5328806 5328825 5328809 -
ctaaccctttcaaataaact

SEQ ID NO: 37008 - DNA, 20 bp, Artificial Sequence
  Synthetic oligonucleotide; GAG chr11 5328793 5328812 5328796 -
ataaactaagttatgatgct

SEQ ID NO: 37009 - DNA, 20 bp, Artificial Sequence
  Synthetic oligonucleotide; TGG chr11 5328784 5328803 5328787 -
gttatgatgctgagcctcct

SEQ ID NO: 37010 - DNA, 20 bp, Artificial Sequence
  Synthetic oligonucleotide; GGG chr11 5328783 5328802 5328786 -
ttatgatgctgagcctcctt

SEQ ID NO: 37011 - DNA, 20 bp, Artificial Sequence
  Synthetic oligonucleotide; AAG chr11 5328770 5328789 5328773 -
cctccttgggtcacataacc

SEQ ID NO: 37012 - DNA, 20 bp, Artificial Sequence
  Synthetic oligonucleotide; TGG chr11 5328764 5328783 5328767 -
tgggtcacataaccaagccc

SEQ ID NO: 37013 - DNA, 20 bp, Artificial Sequence
  Synthetic oligonucleotide; CAG chr11 5328745 5328764 5328748 -
ctggtatccctatcttacat

SEQ ID NO: 37014 - DNA, 20 bp, Artificial Sequence
  Synthetic oligonucleotide; TGG chr11 5328741 5328760 5328744 -
tatccctatcttacatcagc

SEQ ID NO: 37015 - DNA, 20 bp, Artificial Sequence
  Synthetic oligonucleotide; CAG chr11 5328704 5328723 5328707 -
attttcctcaccccattctt

SEQ ID NO: 37016 - DNA, 20 bp, Artificial Sequence
  Synthetic oligonucleotide; AGG chr11 5328703 5328722 5328706 -
ttttcctcaccccattcttc

SEQ ID NO: 37017 - DNA, 20 bp, Artificial Sequence
  Synthetic oligonucleotide; GAG chr11 5328683 5328702 5328686 -
aggaaacacctgaaaatccc

SEQ ID NO: 37018 - DNA, 20 bp, Artificial Sequence
  Synthetic oligonucleotide; AGG chr11 5328682 5328701 5328685 -
ggaaacacctgaaaatcccg

SEQ ID NO: 37019 - DNA, 20 bp, Artificial Sequence
  Synthetic oligonucleotide; CAG chr11 5328675 5328694 5328678 -
cctgaaaatcccgaggacat

SEQ ID NO: 37020 - DNA, 20 bp, Artificial Sequence
  Synthetic oligonucleotide; TGG chr11 5328669 5328688 5328672 -
aatcccgaggacatcagttg

SEQ ID NO: 37021 - DNA, 20 bp, Artificial Sequence
  Synthetic oligonucleotide; GGG chr11 5328668 5328687 5328671 -
atcccgaggacatcagttgt

SEQ ID NO: 37022 - DNA, 20 bp, Artificial Sequence
  Synthetic oligonucleotide; GGG chr11 5328667 5328686 5328670 -
tcccgaggacatcagttgtg

SEQ ID NO: 37023 - DNA, 20 bp, Artificial Sequence
  Synthetic oligonucleotide; CAG chr11 5328648 5328667 5328651 -
ggggccctgttcctcccgaa

SEQ ID NO: 37024 - DNA, 20 bp, Artificial Sequence
  Synthetic oligonucleotide; GAG chr11 5328646 5328665 5328649 -
ggccctgttcctcccgaaca

SEQ ID NO: 37025 - DNA, 20 bp, Artificial Sequence
  Synthetic oligonucleotide; AAG chr11 5328643 5328662 5328646 -
cctgttcctcccgaacagag

SEQ ID NO: 37026 - DNA, 20 bp, Artificial Sequence
  Synthetic oligonucleotide; GAG chr11 5328641 5328660 5328644 -
tgttcctcccgaacagagaa

SEQ ID NO: 37027 - DNA, 20 bp, Artificial Sequence
  Synthetic oligonucleotide; GAG chr11 5328639 5328658 5328642 -
ttcctcccgaacagagaaga

SEQ ID NO: 37028 - DNA, 20 bp, Artificial Sequence
  Synthetic oligonucleotide; AGG chr11 5328638 5328657 5328641 -
tcctcccgaacagagaagag

SEQ ID NO: 37029 - DNA, 20 bp, Artificial Sequence
  Synthetic oligonucleotide; GGG chr11 5328637 5328656 5328640 -
cctcccgaacagagaagaga

SEQ ID NO: 37030 - DNA, 20 bp, Artificial Sequence
  Synthetic oligonucleotide; AAG chr11 5328634 5328653 5328637 -
cccgaacagagaagagaggg

SEQ ID NO: 37031 - DNA, 20 bp, Artificial Sequence
  Synthetic oligonucleotide; AGG chr11 5328633 5328652 5328636 -
ccgaacagagaagagaggga

SEQ ID NO: 37032 - DNA, 20 bp, Artificial Sequence
  Synthetic oligonucleotide; GGG chr11 5328632 5328651 5328635 -
cgaacagagaagagagggaa

SEQ ID NO: 37033 - DNA, 20 bp, Artificial Sequence
  Synthetic oligonucleotide; GAG chr11 5328630 5328649 5328633 -
aacagagaagagagggaagg

SEQ ID NO: 37034 - DNA, 20 bp, Artificial Sequence
  Synthetic oligonucleotide; AAG chr11 5328624 5328643 5328627 -
gaagagagggaagggagatc

SEQ ID NO: 37035 - DNA, 20 bp, Artificial Sequence
  Synthetic oligonucleotide; AGG chr11 5328623 5328642 5328626 -
aagagagggaagggagatca

SEQ ID NO: 37036 - DNA, 20 bp, Artificial Sequence
  Synthetic oligonucleotide; GGG chr11 5328622 5328641 5328625 -
agagagggaagggagatcaa

SEQ ID NO: 37037 - DNA, 20 bp, Artificial Sequence
  Synthetic oligonucleotide; GGG chr11 5328621 5328640 5328624 -
gagagggaagggagatcaag

SEQ ID NO: 37038 - DNA, 20 bp, Artificial Sequence
  Synthetic oligonucleotide; GAG chr11 5328612 5328631 5328615 -
gggagatcaaggggtctcct

SEQ ID NO: 37039 - DNA, 20 bp, Artificial Sequence
  Synthetic oligonucleotide; TAG chr11 5328605 5328624 5328608 -
caaggggtctcctgagatgc

SEQ ID NO: 37040 - DNA, 20 bp, Artificial Sequence
  Synthetic oligonucleotide; AAG chr11 5328601 5328620 5328604 -
gggtctcctgagatgctaga

SEQ ID NO: 37041 - DNA, 20 bp, Artificial Sequence
  Synthetic oligonucleotide; CAG chr11 5328590 5328609 5328593 -
gatgctagaaagatgaaact

SEQ ID NO: 37042 - DNA, 20 bp, Artificial Sequence
  Synthetic oligonucleotide; AGG chr11 5328589 5328608 5328592 -
atgctagaaagatgaaactc

SEQ ID NO: 37043 - DNA, 20 bp, Artificial Sequence
  Synthetic oligonucleotide; GGG chr11 5328588 5328607 5328591 -
tgctagaaagatgaaactca

SEQ ID NO: 37044 - DNA, 20 bp, Artificial Sequence
  Synthetic oligonucleotide; GGG chr11 5328587 5328606 5328590 -
gctagaaagatgaaactcag

SEQ ID NO: 37045 - DNA, 20 bp, Artificial Sequence
  Synthetic oligonucleotide; GAG chr11 5328585 5328604 5328588 -
tagaaagatgaaactcaggg

SEQ ID NO: 37046 - DNA, 20 bp, Artificial Sequence
  Synthetic oligonucleotide; AGG chr11 5328584 5328603 5328587 -
agaaagatgaaactcagggg

SEQ ID NO: 37047 - DNA, 20 bp, Artificial Sequence
  Synthetic oligonucleotide; AAG chr11 5328565 5328584 5328568 -
gaggtgatttccacatgcat

SEQ ID NO: 37048 - DNA, 20 bp, Artificial Sequence
  Synthetic oligonucleotide; GAG chr11 5328553 5328572 5328556 -
acatgcataagctttaaaat

SEQ ID NO: 37049 - DNA, 20 bp, Artificial Sequence
  Synthetic oligonucleotide; AGG chr11 5328552 5328571 5328555 -
catgcataagctttaaaatg

SEQ ID NO: 37050 - DNA, 20 bp, Artificial Sequence
  Synthetic oligonucleotide; GAG chr11 5328543 5328562 5328546 -
gctttaaaatgaggcctcat

SEQ ID NO: 37051 - DNA, 20 bp, Artificial Sequence
  Synthetic oligonucleotide; GAG chr11 5328541 5328560 5328544 -
tttaaaatgaggcctcatga

SEQ ID NO: 37052 - DNA, 20 bp, Artificial Sequence
  Synthetic oligonucleotide; AGG chr11 5328540 5328559 5328543 -
ttaaaatgaggcctcatgag

SEQ ID NO: 37053 - DNA, 20 bp, Artificial Sequence
  Synthetic oligonucleotide; GAG chr11 5328532 5328551 5328535 -
aggcctcatgagaggtctgt

SEQ ID NO: 37054 - DNA, 20 bp, Artificial Sequence
  Synthetic oligonucleotide; GAG chr11 5328514 5328533 5328517 -
gtgagtgaatgatctgaact

SEQ ID NO: 37055 - DNA, 20 bp, Artificial Sequence
  Synthetic oligonucleotide; AAG chr11 5328505 5328524 5328508 -
tgatctgaactgagtcctca

SEQ ID NO: 37056 - DNA, 20 bp, Artificial Sequence
  Synthetic oligonucleotide; GAG chr11 5328503 5328522 5328506 -
atctgaactgagtcctcaaa

SEQ ID NO: 37057 - DNA, 20 bp, Artificial Sequence
  Synthetic oligonucleotide; AGG chr11 5328502 5328521 5328505 -
tctgaactgagtcctcaaag

SEQ ID NO: 37058 - DNA, 20 bp, Artificial Sequence
  Synthetic oligonucleotide; CAG chr11 5328498 5328517 5328501 -
aactgagtcctcaaagagga

SEQ ID NO: 37059 - DNA, 20 bp, Artificial Sequence
  Synthetic oligonucleotide; AGG chr11 5328497 5328516 5328500 -
actgagtcctcaaagaggac

SEQ ID NO: 37060 - DNA, 20 bp, Artificial Sequence
  Synthetic oligonucleotide; TAG chr11 5328492 5328511 5328495 -
gtcctcaaagaggacaggaa

SEQ ID NO: 37061 - DNA, 20 bp, Artificial Sequence
  Synthetic oligonucleotide; AGG chr11 5328491 5328510 5328494 -
tcctcaaagaggacaggaat

SEQ ID NO: 37062 - DNA, 20 bp, Artificial Sequence
  Synthetic oligonucleotide; TAG chr11 5328479 5328498 5328482 -
acaggaataggttcctattt

SEQ ID NO: 37063 - DNA, 20 bp, Artificial Sequence
  Synthetic oligonucleotide; GAG chr11 5328464 5328483 5328467 -
tattttagccacaatactgt

SEQ ID NO: 37064 - DNA, 20 bp, Artificial Sequence
  Synthetic oligonucleotide; TGG chr11 5328461 5328480 5328464 -
tttagccacaatactgtgag

SEQ ID NO: 37065 - DNA, 20 bp, Artificial Sequence
  Synthetic oligonucleotide; GGG chr11 5328460 5328479 5328463 -
ttagccacaatactgtgagt

SEQ ID NO: 37066 - DNA, 20 bp, Artificial Sequence
  Synthetic oligonucleotide; GAG chr11 5328456 5328475 5328459 -
ccacaatactgtgagtgggt

SEQ ID NO: 37067 - DNA, 20 bp, Artificial Sequence
  Synthetic oligonucleotide; CAG chr11 5328450 5328469 5328453 -
tactgtgagtgggtgagtgc

SEQ ID NO: 37068 - DNA, 20 bp, Artificial Sequence
  Synthetic oligonucleotide; AGG chr11 5328449 5328468 5328452 -
actgtgagtgggtgagtgcc

SEQ ID NO: 37069 - DNA, 20 bp, Artificial Sequence
  Synthetic oligonucleotide; TGG chr11 5328436 5328455 5328439 -
gagtgccaggaacttgaata

SEQ ID NO: 37070 - DNA, 20 bp, Artificial Sequence
  Synthetic oligonucleotide; GAG chr11 5328409 5328428 5328412 -
attcctctctcttctgatgt

SEQ ID NO: 37071 - DNA, 20 bp, Artificial Sequence
  Synthetic oligonucleotide; AAG chr11 5328398 5328417 5328401 -
ttctgatgtgagatgcactc

SEQ ID NO: 37072 - DNA, 20 bp, Artificial Sequence
  Synthetic oligonucleotide; AGG chr11 5328397 5328416 5328400 -
tctgatgtgagatgcactca

SEQ ID NO: 37073 - DNA, 20 bp, Artificial Sequence
  Synthetic oligonucleotide; AAG chr11 5328393 5328412 5328396 -
atgtgagatgcactcaagga

SEQ ID NO: 37074 - DNA, 20 bp, Artificial Sequence
  Synthetic oligonucleotide; AAG chr11 5328385 5328404 5328388 -
tgcactcaaggaaagcatat

SEQ ID NO: 37075 - DNA, 20 bp, Artificial Sequence
  Synthetic oligonucleotide; AAG chr11 5328382 5328401 5328385 -
actcaaggaaagcatataag

SEQ ID NO: 37076 - DNA, 20 bp, Artificial Sequence
  Synthetic oligonucleotide; AGG chr11 5328381 5328400 5328384 -
ctcaaggaaagcatataaga

SEQ ID NO: 37077 - DNA, 20 bp, Artificial Sequence
  Synthetic oligonucleotide; CAG chr11 5328373 5328392 5328376 -
aagcatataagaaggttttc

SEQ ID NO: 37078 - DNA, 20 bp, Artificial Sequence
  Synthetic oligonucleotide; GAG chr11 5328371 5328390 5328374 -
gcatataagaaggttttcca

SEQ ID NO: 37079 - DNA, 20 bp, Artificial Sequence
  Synthetic oligonucleotide; AGG chr11 5328370 5328389 5328373 -
catataagaaggttttccag

SEQ ID NO: 37080 - DNA, 20 bp, Artificial Sequence
  Synthetic oligonucleotide; TAG chr11 5328361 5328380 5328364 -
aggttttccagaggtctgcc

SEQ ID NO: 37081 - DNA, 20 bp, Artificial Sequence
  Synthetic oligonucleotide; GAG chr11 5328359 5328378 5328362 -
gttttccagaggtctgccta

SEQ ID NO: 37082 - DNA, 20 bp, Artificial Sequence
  Synthetic oligonucleotide; AGG chr11 5328358 5328377 5328361 -
ttttccagaggtctgcctag

SEQ ID NO: 37083 - DNA, 20 bp, Artificial Sequence
  Synthetic oligonucleotide; AAG chr11 5328353 5328372 5328356 -
cagaggtctgcctagaggta

SEQ ID NO: 37084 - DNA, 20 bp, Artificial Sequence
  Synthetic oligonucleotide; CAG chr11 5328346 5328365 5328349 -
ctgcctagaggtaaagatca

SEQ ID NO: 37085 - DNA, 20 bp, Artificial Sequence
  Synthetic oligonucleotide; GAG chr11 5328341 5328360 5328344 -
tagaggtaaagatcacagct

SEQ ID NO: 37086 - DNA, 20 bp, Artificial Sequence
  Synthetic oligonucleotide; AGG chr11 5328340 5328359 5328343 -
agaggtaaagatcacagctg

SEQ ID NO: 37087 - DNA, 20 bp, Artificial Sequence
  Synthetic oligonucleotide; TGG chr11 5328337 5328356 5328340 -
ggtaaagatcacagctgagg

SEQ ID NO: 37088 - DNA, 20 bp, Artificial Sequence
  Synthetic oligonucleotide; GGG chr11 5328336 5328355 5328339 -
gtaaagatcacagctgaggt

SEQ ID NO: 37089 - DNA, 20 bp, Artificial Sequence
  Synthetic oligonucleotide; CAG chr11 5328325 5328344 5328328 -
agctgaggtgggatatccta

SEQ ID NO: 37090 - DNA, 20 bp, Artificial Sequence
  Synthetic oligonucleotide; CAG chr11 5328320 5328339 5328323 -
aggtgggatatcctacagca

SEQ ID NO: 37091 - DNA, 20 bp, Artificial Sequence
  Synthetic oligonucleotide; AAG chr11 5328296 5328315 5328299 -
tttttttttttcttttttga

SEQ ID NO: 37092 - DNA, 20 bp, Artificial Sequence
  Synthetic oligonucleotide; GAG chr11 5328294 5328313 5328297 -
tttttttttcttttttgaaa

SEQ ID NO: 37093 - DNA, 20 bp, Artificial Sequence
  Synthetic oligonucleotide; AAG chr11 5328286 5328305 5328289 -
tcttttttgaaagagtattt

SEQ ID NO: 37094 - DNA, 20 bp, Artificial Sequence
  Synthetic oligonucleotide; AGG chr11 5328285 5328304 5328288 -
cttttttgaaagagtattta

SEQ ID NO: 37095 - DNA, 20 bp, Artificial Sequence
  Synthetic oligonucleotide; TAG chr11 5328274 5328293 5328277 -
gagtatttaaggaactgtga

SEQ ID NO: 37096 - DNA, 20 bp, Artificial Sequence
  Synthetic oligonucleotide; TAG chr11 5328268 5328287 5328271 -
ttaaggaactgtgatagatt

SEQ ID NO: 37097 - DNA, 20 bp, Artificial Sequence
  Synthetic oligonucleotide; AGG chr11 5328267 5328286 5328270 -
taaggaactgtgatagattt

SEQ ID NO: 37098 - DNA, 20 bp, Artificial Sequence
  Synthetic oligonucleotide; TGG chr11 5328254 5328273 5328257 -
tagatttaggttttctaatc

SEQ ID NO: 37099 - DNA, 20 bp, Artificial Sequence
  Synthetic oligonucleotide; GGG chr11 5328253 5328272 5328256 -
agatttaggttttctaatct

SEQ ID NO: 37100 - DNA, 20 bp, Artificial Sequence
  Synthetic oligonucleotide; TGG chr11 5328245 5328264 5328248 -
gttttctaatctgggaccct

SEQ ID NO: 37101 - DNA, 20 bp, Artificial Sequence
  Synthetic oligonucleotide; TGG chr11 5328240 5328259 5328243 -
ctaatctgggacccttggat

SEQ ID NO: 37102 - DNA, 20 bp, Artificial Sequence
  Synthetic oligonucleotide; AAG chr11 5328234 5328253 5328237 -
tgggacccttggattggcat

SEQ ID NO: 37103 - DNA, 20 bp, Artificial Sequence
  Synthetic oligonucleotide; CAG chr11 5328215 5328234 5328218 -
taagtataattgttaatgct

SEQ ID NO: 37104 - DNA, 20 bp, Artificial Sequence
  Synthetic oligonucleotide; TAG chr11 5328171 5328190 5328174 -
ttcttactcatttttctatg

SEQ ID NO: 37105 - DNA, 20 bp, Artificial Sequence
  Synthetic oligonucleotide; TAG chr11 5328161 5328180 5328164 -
tttttctatgtagatgttta

SEQ ID NO: 37106 - DNA, 20 bp, Artificial Sequence
  Synthetic oligonucleotide; CAG chr11 5328149 5328168 5328152 -
gatgtttatagctttttttt

SEQ ID NO: 37107 - DNA, 20 bp, Artificial Sequence
  Synthetic oligonucleotide; GAG chr11 5328147 5328166 5328150 -
tgtttatagcttttttttca

SEQ ID NO: 37108 - DNA, 20 bp, Artificial Sequence
  Synthetic oligonucleotide; CAG chr11 5328124 5328143 5328127 -
aatatttcttcattccaaaa

SEQ ID NO: 37109 - DNA, 20 bp, Artificial Sequence
  Synthetic oligonucleotide; CAG chr11 5328095 5328114 5328098 -
tatcactcacctcctttgtt

SEQ ID NO: 37110 - DNA, 20 bp, Artificial Sequence
  Synthetic oligonucleotide; TGG chr11 5328088 5328107 5328091 -
cacctcctttgttcagttat

SEQ ID NO: 37111 - DNA, 20 bp, Artificial Sequence
  Synthetic oligonucleotide; TAG chr11 5328059 5328078 5328062 -
tattacatttatatttgtaa

SEQ ID NO: 37112 - DNA, 20 bp, Artificial Sequence
  Synthetic oligonucleotide; CAG chr11 5328053 5328072 5328056 -
atttatatttgtaatagttc

SEQ ID NO: 37113 - DNA, 20 bp, Artificial Sequence
  Synthetic oligonucleotide; AAG chr11 5328005 5328024 5328008 -
atacattcatttttgaaaat

SEQ ID NO: 37114 - DNA, 20 bp, Artificial Sequence
  Synthetic oligonucleotide; AAG chr11 5328002 5328021 5328005 -
cattcatttttgaaaataag

SEQ ID NO: 37115 - DNA, 20 bp, Artificial Sequence
  Synthetic oligonucleotide; CAG chr11 5327999 5328018 5328002 -
tcatttttgaaaataagaag

SEQ ID NO: 37116 - DNA, 20 bp, Artificial Sequence
  Synthetic oligonucleotide; AAG chr11 5327995 5328014 5327998 -
ttttgaaaataagaagcaga

SEQ ID NO: 37117 - DNA, 20 bp, Artificial Sequence
  Synthetic oligonucleotide; AGG chr11 5327994 5328013 5327997 -
tttgaaaataagaagcagaa

SEQ ID NO: 37118 - DNA, 20 bp, Artificial Sequence
  Synthetic oligonucleotide; TGG chr11 5327946 5327965 5327949 -
aatgacatgactatctttac

SEQ ID NO: 37119 - DNA, 20 bp, Artificial Sequence
  Synthetic oligonucleotide; TAG chr11 5327925 5327944 5327928 -
ggtgcttttgtcattttatg

SEQ ID NO: 37120 - DNA, 20 bp, Artificial Sequence
  Synthetic oligonucleotide; TGG chr11 5327905 5327924 5327908 -
tagattcaaatgatcatctt

SEQ ID NO: 37121 - DNA, 20 bp, Artificial Sequence
  Synthetic oligonucleotide; TGG chr11 5327897 5327916 5327900 -
aatgatcatctttggtcatt

SEQ ID NO: 37122 - DNA, 20 bp, Artificial Sequence
  Synthetic oligonucleotide; TAG chr11 5327886 5327905 5327889 -
ttggtcatttggtttcaact

SEQ ID NO: 37123 - DNA, 20 bp, Artificial Sequence
  Synthetic oligonucleotide; CAG chr11 5327871 5327890 5327874 -
caacttagttgaaatcaact

SEQ ID NO: 37124 - DNA, 20 bp, Artificial Sequence
  Synthetic oligonucleotide; CAG chr11 5327856 5327875 5327859 -
caactcagtttttgtttatc

SEQ ID NO: 37125 - DNA, 20 bp, Artificial Sequence
  Synthetic oligonucleotide; AAG chr11 5327852 5327871 5327855 -
tcagtttttgtttatccaga

SEQ ID NO: 37126 - DNA, 20 bp, Artificial Sequence
  Synthetic oligonucleotide; AGG chr11 5327851 5327870 5327854 -
cagtttttgtttatccagaa

SEQ ID NO: 37127 - DNA, 20 bp, Artificial Sequence
  Synthetic oligonucleotide; GGG chr11 5327850 5327869 5327853 -
agtttttgtttatccagaaa

SEQ ID NO: 37128 - DNA, 20 bp, Artificial Sequence
  Synthetic oligonucleotide; CAG chr11 5327808 5327827 5327811 -
ttattgataactttcctgtt

SEQ ID NO: 37129 - DNA, 20 bp, Artificial Sequence
  Synthetic oligonucleotide; GAG chr11 5327806 5327825 5327809 -
attgataactttcctgttca

SEQ ID NO: 37130 - DNA, 20 bp, Artificial Sequence
  Synthetic oligonucleotide; AGG chr11 5327805 5327824 5327808 -
ttgataactttcctgttcag

SEQ ID NO: 37131 - DNA, 20 bp, Artificial Sequence
  Synthetic oligonucleotide; TAG chr11 5327790 5327809 5327793 -
ttcagaggattttttgttga

SEQ ID NO: 37132 - DNA, 20 bp, Artificial Sequence
  Synthetic oligonucleotide; AAG chr11 5327777 5327796 5327780 -
ttgttgatagtttttctctg

SEQ ID NO: 37133 - DNA, 20 bp, Artificial Sequence
  Synthetic oligonucleotide; GAG chr11 5327775 5327794 5327778 -
gttgatagtttttctctgaa

SEQ ID NO: 37134 - DNA, 20 bp, Artificial Sequence
  Synthetic oligonucleotide; TAG chr11 5327772 5327791 5327775 -
gatagtttttctctgaagag

SEQ ID NO: 37135 - DNA, 20 bp, Artificial Sequence
  Synthetic oligonucleotide; GAG chr11 5327752 5327771 5327755 -
tagacaaaaaattctgaatc

SEQ ID NO: 37136 - DNA, 20 bp, Artificial Sequence
  Synthetic oligonucleotide; AAG chr11 5327745 5327764 5327748 -
aaaattctgaatcgagttga

SEQ ID NO: 37137 - DNA, 20 bp, Artificial Sequence
  Synthetic oligonucleotide; AGG chr11 5327744 5327763 5327747 -
aaattctgaatcgagttgaa

SEQ ID NO: 37138 - DNA, 20 bp, Artificial Sequence
  Synthetic oligonucleotide; TAG chr11 5327739 5327758 5327742 -
ctgaatcgagttgaaaggct

SEQ ID NO: 37139 - DNA, 20 bp, Artificial Sequence
  Synthetic oligonucleotide; AAG chr11 5327734 5327753 5327737 -
tcgagttgaaaggcttagaa

SEQ ID NO: 37140 - DNA, 20 bp, Artificial Sequence
  Synthetic oligonucleotide; AGG chr11 5327733 5327752 5327736 -
cgagttgaaaggcttagaaa

SEQ ID NO: 37141 - DNA, 20 bp, Artificial Sequence
  Synthetic oligonucleotide; GGG chr11 5327732 5327751 5327735 -
gagttgaaaggcttagaaaa

SEQ ID NO: 37142 - DNA, 20 bp, Artificial Sequence
  Synthetic oligonucleotide; CAG chr11 5327729 5327748 5327732 -
ttgaaaggcttagaaaaggg

SEQ ID NO: 37143 - DNA, 20 bp, Artificial Sequence
  Synthetic oligonucleotide; AAG chr11 5327719 5327738 5327722 -
tagaaaagggcagccaaatt

SEQ ID NO: 37144 - DNA, 20 bp, Artificial Sequence
  Synthetic oligonucleotide; AAG chr11 5327712 5327731 5327715 -
gggcagccaaattaagatct

SEQ ID NO: 37145 - DNA, 20 bp, Artificial Sequence
  Synthetic oligonucleotide; AAG chr11 5327708 5327727 5327711 -
agccaaattaagatctaaga

SEQ ID NO: 37146 - DNA, 20 bp, Artificial Sequence
  Synthetic oligonucleotide; TGG chr11 5327700 5327719 5327703 -
taagatctaagaaagcaaat

SEQ ID NO: 37147 - DNA, 20 bp, Artificial Sequence
  Synthetic oligonucleotide; TGG chr11 5327675 5327694 5327678 -
tgaaaatgaaatcatattga

SEQ ID NO: 37148 - DNA, 20 bp, Artificial Sequence
  Synthetic oligonucleotide; CAG chr11 5327672 5327691 5327675 -
aaatgaaatcatattgatgg

SEQ ID NO: 37149 - DNA, 20 bp, Artificial Sequence
  Synthetic oligonucleotide; TGG chr11 5327657 5327676 5327660 -
gatggcagatgataatatat

SEQ ID NO: 37150 - DNA, 20 bp, Artificial Sequence
  Synthetic oligonucleotide; TGG chr11 5327652 5327671 5327655 -
cagatgataatatattggac

SEQ ID NO: 37151 - DNA, 20 bp, Artificial Sequence
  Synthetic oligonucleotide; GGG chr11 5327651 5327670 5327654 -
agatgataatatattggact

SEQ ID NO: 37152 - DNA, 20 bp, Artificial Sequence
  Synthetic oligonucleotide; TGG chr11 5327647 5327666 5327650 -
gataatatattggactgggt

SEQ ID NO: 37153 - DNA, 20 bp, Artificial Sequence
  Synthetic oligonucleotide; GAG chr11 5327645 5327664 5327648 -
taatatattggactgggttg

SEQ ID NO: 37154 - DNA, 20 bp, Artificial Sequence
  Synthetic oligonucleotide; AAG chr11 5327642 5327661 5327645 -
tatattggactgggttggag

SEQ ID NO: 37155 - DNA, 20 bp, Artificial Sequence
  Synthetic oligonucleotide; AGG chr11 5327641 5327660 5327644 -
atattggactgggttggaga

SEQ ID NO: 37156 - DNA, 20 bp, Artificial Sequence
  Synthetic oligonucleotide; CAG chr11 5327638 5327657 5327641 -
ttggactgggttggagaagg

SEQ ID NO: 37157 - DNA, 20 bp, Artificial Sequence
  Synthetic oligonucleotide; AGG chr11 5327637 5327656 5327640 -
tggactgggttggagaaggc

SEQ ID NO: 37158 - DNA, 20 bp, Artificial Sequence
  Synthetic oligonucleotide; GAG chr11 5327635 5327654 5327638 -
gactgggttggagaaggcag

SEQ ID NO: 37159 - DNA, 20 bp, Artificial Sequence
  Synthetic oligonucleotide; AGG chr11 5327634 5327653 5327637 -
actgggttggagaaggcagg

SEQ ID NO: 37160 - DNA, 20 bp, Artificial Sequence
  Synthetic oligonucleotide; TGG chr11 5327620 5327639 5327623 -
ggcaggaggaatttaacttg

SEQ ID NO: 37161 - DNA, 20 bp, Artificial Sequence
  Synthetic oligonucleotide; TAG chr11 5327613 5327632 5327616 -
ggaatttaacttgtggacaa

SEQ ID NO: 37162 - DNA, 20 bp, Artificial Sequence
  Synthetic oligonucleotide; GAG chr11 5327604 5327623 5327607 -
cttgtggacaatagaaatct

SEQ ID NO: 37163 - DNA, 20 bp, Artificial Sequence
  Synthetic oligonucleotide; GAG chr11 5327602 5327621 5327605 -
tgtggacaatagaaatctga

SEQ ID NO: 37164 - DNA, 20 bp, Artificial Sequence
  Synthetic oligonucleotide; TGG chr11 5327598 5327617 5327601 -
gacaatagaaatctgagagt

SEQ ID NO: 37165 - DNA, 20 bp, Artificial Sequence
  Synthetic oligonucleotide; GGG chr11 5327597 5327616 5327600 -
acaatagaaatctgagagtt

SEQ ID NO: 37166 - DNA, 20 bp, Artificial Sequence
  Synthetic oligonucleotide; TAG chr11 5327594 5327613 5327597 -
atagaaatctgagagttggg

SEQ ID NO: 37167 - DNA, 20 bp, Artificial Sequence
  Synthetic oligonucleotide; CAG chr11 5327581 5327600 5327584 -
agttgggtagtcccaactgt

SEQ ID NO: 37168 - DNA, 20 bp, Artificial Sequence
  Synthetic oligonucleotide; AGG chr11 5327580 5327599 5327583 -
gttgggtagtcccaactgtc

SEQ ID NO: 37169 - DNA, 20 bp, Artificial Sequence
  Synthetic oligonucleotide; CAG chr11 5327573 5327592 5327576 -
agtcccaactgtcaggccct

SEQ ID NO: 37170 - DNA, 20 bp, Artificial Sequence
  Synthetic oligonucleotide; AGG chr11 5327572 5327591 5327575 -
gtcccaactgtcaggccctc

SEQ ID NO: 37171 - DNA, 20 bp, Artificial Sequence
  Synthetic oligonucleotide; TGG chr11 5327567 5327586 5327570 -
aactgtcaggccctcaggac

SEQ ID NO: 37172 - DNA, 20 bp, Artificial Sequence
  Synthetic oligonucleotide; GGG chr11 5327566 5327585 5327569 -
actgtcaggccctcaggact

SEQ ID NO: 37173 - DNA, 20 bp, Artificial Sequence
  Synthetic oligonucleotide; GGG chr11 5327565 5327584 5327568 -
ctgtcaggccctcaggactg

SEQ ID NO: 37174 - DNA, 20 bp, Artificial Sequence
  Synthetic oligonucleotide; TGG chr11 5327557 5327576 5327560 -
ccctcaggactggggccaaa

SEQ ID NO: 37175 - DNA, 20 bp, Artificial Sequence
  Synthetic oligonucleotide; GAG chr11 5327555 5327574 5327558 -
ctcaggactggggccaaatg

SEQ ID NO: 37176 - DNA, 20 bp, Artificial Sequence
  Synthetic oligonucleotide; AGG chr11 5327554 5327573 5327557 -
tcaggactggggccaaatgg

SEQ ID NO: 37177 - DNA, 20 bp, Artificial Sequence
  Synthetic oligonucleotide; AAG chr11 5327538 5327557 5327541 -
atggaggactcacttttttg

SEQ ID NO: 37178 - DNA, 20 bp, Artificial Sequence
  Synthetic oligonucleotide; AAG chr11 5327531 5327550 5327534 -
actcacttttttgaagatta

SEQ ID NO: 37179 - DNA, 20 bp, Artificial Sequence
  Synthetic oligonucleotide; GAG chr11 5327519 5327538 5327522 -
gaagattaaagacaatgcgt

SEQ ID NO: 37180 - DNA, 20 bp, Artificial Sequence
  Synthetic oligonucleotide; GAG chr11 5327517 5327536 5327520 -
agattaaagacaatgcgtga

SEQ ID NO: 37181 - DNA, 20 bp, Artificial Sequence
  Synthetic oligonucleotide; CGG chr11 5327512 5327531 5327515 -
aaagacaatgcgtgagagca

SEQ ID NO: 37182 - DNA, 20 bp, Artificial Sequence
  Synthetic oligonucleotide; GAG chr11 5327510 5327529 5327513 -
agacaatgcgtgagagcacg

SEQ ID NO: 37183 - DNA, 20 bp, Artificial Sequence
  Synthetic oligonucleotide; CAG chr11 5327494 5327513 5327497 -
cacggagttctgaacctaaa

SEQ ID NO: 37184 - DNA, 20 bp, Artificial Sequence
  Synthetic oligonucleotide; AGG chr11 5327493 5327512 5327496 -
acggagttctgaacctaaac

SEQ ID NO: 37185 - DNA, 20 bp, Artificial Sequence
  Synthetic oligonucleotide; GAG chr11 5327488 5327507 5327491 -
gttctgaacctaaacaggct

SEQ ID NO: 37186 - DNA, 20 bp, Artificial Sequence
  Synthetic oligonucleotide; AAG chr11 5327470 5327489 5327473 -
ctgagcttctgcactctgct

SEQ ID NO: 37187 - DNA, 20 bp, Artificial Sequence
  Synthetic oligonucleotide; TAG chr11 5327454 5327473 5327457 -
tgctaagatcctgaaattta

SEQ ID NO: 37188 - DNA, 20 bp, Artificial Sequence
  Synthetic oligonucleotide; AAG chr11 5327450 5327469 5327453 -
aagatcctgaaatttataga

SEQ ID NO: 37189 - DNA, 20 bp, Artificial Sequence
  Synthetic oligonucleotide; AAG chr11 5327445 5327464 5327448 -
cctgaaatttatagaaagaa

SEQ ID NO: 37190 - DNA, 20 bp, Artificial Sequence
  Synthetic oligonucleotide; AAG chr11 5327410 5327429 5327413 -
catataacaatttaatttat

SEQ ID NO: 37191 - DNA, 20 bp, Artificial Sequence
  Synthetic oligonucleotide; AAG chr11 5327351 5327370 5327354 -
tgtgtctgtgtgtttgtttg

SEQ ID NO: 37192 - DNA, 20 bp, Artificial Sequence
  Synthetic oligonucleotide; AAG chr11 5327339 5327358 5327342 -
tttgtttgaagaactgctct

SEQ ID NO: 37193 - DNA, 20 bp, Artificial Sequence
  Synthetic oligonucleotide; GAG chr11 5327337 5327356 5327340 -
tgtttgaagaactgctctaa

SEQ ID NO: 37194 - DNA, 20 bp, Artificial Sequence
  Synthetic oligonucleotide; TGG chr11 5327333 5327352 5327336 -
tgaagaactgctctaagaga

SEQ ID NO: 37195 - DNA, 20 bp, Artificial Sequence
  Synthetic oligonucleotide; GAG chr11 5327327 5327346 5327330 -
actgctctaagagatggcat

SEQ ID NO: 37196 - DNA, 20 bp, Artificial Sequence
  Synthetic oligonucleotide; TAG chr11 5327324 5327343 5327327 -
gctctaagagatggcatgag

SEQ ID NO: 37197 - DNA, 20 bp, Artificial Sequence
  Synthetic oligonucleotide; CAG chr11 5327320 5327339 5327323 -
taagagatggcatgagtagt

SEQ ID NO: 37198 - DNA, 20 bp, Artificial Sequence
  Synthetic oligonucleotide; TGG chr11 5327317 5327336 5327320 -
gagatggcatgagtagtcag

SEQ ID NO: 37199 - DNA, 20 bp, Artificial Sequence
  Synthetic oligonucleotide; GGG chr11 5327316 5327335 5327319 -
agatggcatgagtagtcagt

SEQ ID NO: 37200 - DNA, 20 bp, Artificial Sequence
  Synthetic oligonucleotide; TAG chr11 5327307 5327326 5327310 -
gagtagtcagtgggactcac

SEQ ID NO: 37201 - DNA, 20 bp, Artificial Sequence
  Synthetic oligonucleotide; TAG chr11 5327296 5327315 5327299 -
gggactcactagaaaaattc

SEQ ID NO: 37202 - DNA, 20 bp, Artificial Sequence
  Synthetic oligonucleotide; GAG chr11 5327294 5327313 5327297 -
gactcactagaaaaattcta

SEQ ID NO: 37203 - DNA, 20 bp, Artificial Sequence
  Synthetic oligonucleotide; CAG chr11 5327290 5327309 5327293 -
cactagaaaaattctagaga

SEQ ID NO: 37204 - DNA, 20 bp, Artificial Sequence
  Synthetic oligonucleotide; AGG chr11 5327289 5327308 5327292 -
actagaaaaattctagagac

SEQ ID NO: 37205 - DNA, 20 bp, Artificial Sequence
  Synthetic oligonucleotide; GGG chr11 5327288 5327307 5327291 -
ctagaaaaattctagagaca

SEQ ID NO: 37206 - DNA, 20 bp, Artificial Sequence
  Synthetic oligonucleotide; TAG chr11 5327275 5327294 5327278 -
agagacagggcccatctcct

SEQ ID NO: 37207 - DNA, 20 bp, Artificial Sequence
  Synthetic oligonucleotide; AGG chr11 5327274 5327293 5327277 -
gagacagggcccatctcctt

SEQ ID NO: 37208 - DNA, 20 bp, Artificial Sequence
  Synthetic oligonucleotide; AAG chr11 5327271 5327290 5327274 -
acagggcccatctccttagg

SEQ ID NO: 37209 - DNA, 20 bp, Artificial Sequence
  Synthetic oligonucleotide; AGG chr11 5327270 5327289 5327273 -
cagggcccatctccttagga

SEQ ID NO: 37210 - DNA, 20 bp, Artificial Sequence
  Synthetic oligonucleotide; CGG chr11 5327265 5327284 5327268 -
cccatctccttaggaaggtg

SEQ ID NO: 37211 - DNA, 20 bp, Artificial Sequence
  Synthetic oligonucleotide; GGG chr11 5327264 5327283 5327267 -
ccatctccttaggaaggtgc

SEQ ID NO: 37212 - DNA, 20 bp, Artificial Sequence
  Synthetic oligonucleotide; GGG chr11 5327263 5327282 5327266 -
catctccttaggaaggtgcg

SEQ ID NO: 37213 - DNA, 20 bp, Artificial Sequence
  Synthetic oligonucleotide; CAG chr11 5327241 5327260 5327244 -
gacacatcttccatccaact

SEQ ID NO: 37214 - DNA, 20 bp, Artificial Sequence
  Synthetic oligonucleotide; AAG chr11 5327238 5327257 5327241 -
acatcttccatccaactcag

SEQ ID NO: 37215 - DNA, 20 bp, Artificial Sequence
  Synthetic oligonucleotide; AGG chr11 5327237 5327256 5327240 -
catcttccatccaactcaga

SEQ ID NO: 37216 - DNA, 20 bp, Artificial Sequence
  Synthetic oligonucleotide; GAG chr11 5327235 5327254 5327238 -
tcttccatccaactcagaag

SEQ ID NO: 37217 - DNA, 20 bp, Artificial Sequence
  Synthetic oligonucleotide; AGG chr11 5327234 5327253 5327237 -
cttccatccaactcagaagg

SEQ ID NO: 37218 - DNA, 20 bp, Artificial Sequence
  Synthetic oligonucleotide; GGG chr11 5327233 5327252 5327236 -
ttccatccaactcagaagga

SEQ ID NO: 37219 - DNA, 20 bp, Artificial Sequence
  Synthetic oligonucleotide; CAG chr11 5327230 5327249 5327233 -
catccaactcagaaggaggg

SEQ ID NO: 37220 - DNA, 20 bp, Artificial Sequence
  Synthetic oligonucleotide; GAG chr11 5327228 5327247 5327231 -
tccaactcagaaggagggca

SEQ ID NO: 37221 - DNA, 20 bp, Artificial Sequence
  Synthetic oligonucleotide; TAG chr11 5327225 5327244 5327228 -
aactcagaaggagggcagag

SEQ ID NO: 37222 - DNA, 20 bp, Artificial Sequence
  Synthetic oligonucleotide; AGG chr11 5327224 5327243 5327227 -
actcagaaggagggcagagt

SEQ ID NO: 37223 - DNA, 20 bp, Artificial Sequence
  Synthetic oligonucleotide; GAG chr11 5327217 5327236 5327220 -
aggagggcagagtaggaaat

SEQ ID NO: 37224 - DNA, 20 bp, Artificial Sequence
  Synthetic oligonucleotide; AAG chr11 5327214 5327233 5327217 -
agggcagagtaggaaatgag

SEQ ID NO: 37225 - DNA, 20 bp, Artificial Sequence
  Synthetic oligonucleotide; GAG chr11 5327209 5327228 5327212 -
agagtaggaaatgagaagat

SEQ ID NO: 37226 - DNA, 20 bp, Artificial Sequence
  Synthetic oligonucleotide; AGG chr11 5327208 5327227 5327211 -
gagtaggaaatgagaagatg

SEQ ID NO: 37227 - DNA, 20 bp, Artificial Sequence
  Synthetic oligonucleotide; GGG chr11 5327207 5327226 5327210 -
agtaggaaatgagaagatga

SEQ ID NO: 37228 - DNA, 20 bp, Artificial Sequence
  Synthetic oligonucleotide; AAG chr11 5327203 5327222 5327206 -
ggaaatgagaagatgaggga

SEQ ID NO: 37229 - DNA, 20 bp, Artificial Sequence
  Synthetic oligonucleotide; AGG chr11 5327202 5327221 5327205 -
gaaatgagaagatgagggaa

SEQ ID NO: 37230 - DNA, 20 bp, Artificial Sequence
  Synthetic oligonucleotide; GAG chr11 5327200 5327219 5327203 -
aatgagaagatgagggaaag

SEQ ID NO: 37231 - DNA, 20 bp, Artificial Sequence
  Synthetic oligonucleotide; AGG chr11 5327199 5327218 5327202 -
atgagaagatgagggaaagg

SEQ ID NO: 37232 - DNA, 20 bp, Artificial Sequence
  Synthetic oligonucleotide; TAG chr11 5327164 5327183 5327167 -
tcctctttcacttgtttatg

SEQ ID NO: 37233 - DNA, 20 bp, Artificial Sequence
  Synthetic oligonucleotide; TAG chr11 5327152 5327171 5327155 -
tgtttatgtagactgtataa

SEQ ID NO: 37234 - DNA, 20 bp, Artificial Sequence
  Synthetic oligonucleotide; GAG chr11 5327125 5327144 5327128 -
actatttactacattttctt

SEQ ID NO: 37235 - DNA, 20 bp, Artificial Sequence
  Synthetic oligonucleotide; AGG chr11 5327124 5327143 5327127 -
ctatttactacattttcttg

SEQ ID NO: 37236 - DNA, 20 bp, Artificial Sequence
  Synthetic oligonucleotide; CAG chr11 5327117 5327136 5327120 -
ctacattttcttgaggctaa

SEQ ID NO: 37237 - DNA, 20 bp, Artificial Sequence
  Synthetic oligonucleotide; AAG chr11 5327082 5327101 5327085 -
tgttccttcttcatactaca

SEQ ID NO: 37238 - DNA, 20 bp, Artificial Sequence
  Synthetic oligonucleotide; TGG chr11 5327049 5327068 5327052 -
ctcctttactcccttgtatc

SEQ ID NO: 37239 - DNA, 20 bp, Artificial Sequence
  Synthetic oligonucleotide; AAG chr11 5327024 5327043 5327027 -
acattcaaattatgttctca

SEQ ID NO: 37240 - DNA, 20 bp, Artificial Sequence
  Synthetic oligonucleotide; GAG chr11 5327020 5327039 5327023 -
tcaaattatgttctcaaagt

SEQ ID NO: 37241 - DNA, 20 bp, Artificial Sequence
  Synthetic oligonucleotide; TGG chr11 5326999 5327018 5327002 -
agcatgacaacttttttcca

SEQ ID NO: 37242 - DNA, 20 bp, Artificial Sequence
  Synthetic oligonucleotide; TGG chr11 5326974 5326993 5326977 -
ctgtatgtatttatgcatct

SEQ ID NO: 37243 - DNA, 20 bp, Artificial Sequence
  Synthetic oligonucleotide; GAG chr11 5326970 5326989 5326973 -
atgtatttatgcatcttggt

SEQ ID NO: 37244 - DNA, 20 bp, Artificial Sequence
  Synthetic oligonucleotide; GAG chr11 5326968 5326987 5326971 -
gtatttatgcatcttggtga

SEQ ID NO: 37245 - DNA, 20 bp, Artificial Sequence
  Synthetic oligonucleotide; AAG chr11 5326956 5326975 5326959 -
cttggtgagagtgttgctac

SEQ ID NO: 37246 - DNA, 20 bp, Artificial Sequence
  Synthetic oligonucleotide; TAG chr11 5326951 5326970 5326954 -
tgagagtgttgctacaagta

SEQ ID NO: 37247 - DNA, 20 bp, Artificial Sequence
  Synthetic oligonucleotide; AGG chr11 5326950 5326969 5326953 -
gagagtgttgctacaagtat

SEQ ID NO: 37248 - DNA, 20 bp, Artificial Sequence
  Synthetic oligonucleotide; TAG chr11 5326934 5326953 5326937 -
gtataggaatcttattcatc

SEQ ID NO: 37249 - DNA, 20 bp, Artificial Sequence
  Synthetic oligonucleotide; CAG chr11 5326909 5326928 5326912 -
atatatcatcatgtgaaatt

SEQ ID NO: 37250 - DNA, 20 bp, Artificial Sequence
  Synthetic oligonucleotide; AGG chr11 5326908 5326927 5326911 -
tatatcatcatgtgaaattc

SEQ ID NO: 37251 - DNA, 20 bp, Artificial Sequence
  Synthetic oligonucleotide; TAG chr11 5326901 5326920 5326904 -
tcatgtgaaattcaggtcaa

SEQ ID NO: 37252 - DNA, 20 bp, Artificial Sequence
  Synthetic oligonucleotide; TAG chr11 5326892 5326911 5326895 -
attcaggtcaatagaacatc

SEQ ID NO: 37253 - DNA, 20 bp, Artificial Sequence
  Synthetic oligonucleotide; AAG chr11 5326885 5326904 5326888 -
tcaatagaacatctagaatg

SEQ ID NO: 37254 - DNA, 20 bp, Artificial Sequence
  Synthetic oligonucleotide; TAG chr11 5326881 5326900 5326884 -
tagaacatctagaatgaagc

SEQ ID NO: 37255 - DNA, 20 bp, Artificial Sequence
  Synthetic oligonucleotide; AAG chr11 5326874 5326893 5326877 -
tctagaatgaagctagaatg

SEQ ID NO: 37256 - DNA, 20 bp, Artificial Sequence
  Synthetic oligonucleotide; CAG chr11 5326871 5326890 5326874 -
agaatgaagctagaatgaag

SEQ ID NO: 37257 - DNA, 20 bp, Artificial Sequence
  Synthetic oligonucleotide; AGG chr11 5326870 5326889 5326873 -
gaatgaagctagaatgaagc

SEQ ID NO: 37258 - DNA, 20 bp, Artificial Sequence
  Synthetic oligonucleotide; GGG chr11 5326869 5326888 5326872 -
aatgaagctagaatgaagca

SEQ ID NO: 37259 - DNA, 20 bp, Artificial Sequence
  Synthetic oligonucleotide; TAG chr11 5326864 5326883 5326867 -
agctagaatgaagcagggct

SEQ ID NO: 37260 - DNA, 20 bp, Artificial Sequence
  Synthetic oligonucleotide; AAG chr11 5326845 5326864 5326848 -
ttagatctatgatttttctc

SEQ ID NO: 37261 - DNA, 20 bp, Artificial Sequence
  Synthetic oligonucleotide; CAG chr11 5326838 5326857 5326841 -
tatgatttttctcaagtttt

SEQ ID NO: 37262 - DNA, 20 bp, Artificial Sequence
  Synthetic oligonucleotide; TGG chr11 5326830 5326849 5326833 -
ttctcaagttttcagcatta

SEQ ID NO: 37263 - DNA, 20 bp, Artificial Sequence
  Synthetic oligonucleotide; GAG chr11 5326819 5326838 5326822 -
tcagcattatggatcctgtt

SEQ ID NO: 37264 - DNA, 20 bp, Artificial Sequence
  Synthetic oligonucleotide; AAG chr11 5326810 5326829 5326813 -
tggatcctgttgagacattc

SEQ ID NO: 37265 - DNA, 20 bp, Artificial Sequence
  Synthetic oligonucleotide; AGG chr11 5326809 5326828 5326812 -
ggatcctgttgagacattca

SEQ ID NO: 37266 - DNA, 20 bp, Artificial Sequence
  Synthetic oligonucleotide; GGG chr11 5326808 5326827 5326811 -
gatcctgttgagacattcaa

SEQ ID NO: 37267 - DNA, 20 bp, Artificial Sequence
  Synthetic oligonucleotide; AAG chr11 5326785 5326804 5326788 -
caatattctgcataaaattg

SEQ ID NO: 37268 - DNA, 20 bp, Artificial Sequence
  Synthetic oligonucleotide; AGG chr11 5326784 5326803 5326787 -
aatattctgcataaaattga

SEQ ID NO: 37269 - DNA, 20 bp, Artificial Sequence
  Synthetic oligonucleotide; GGG chr11 5326783 5326802 5326786 -
atattctgcataaaattgaa

SEQ ID NO: 37270 - DNA, 20 bp, Artificial Sequence
  Synthetic oligonucleotide; GAG chr11 5326781 5326800 5326784 -
attctgcataaaattgaagg

SEQ ID NO: 37271 - DNA, 20 bp, Artificial Sequence
  Synthetic oligonucleotide; AAG chr11 5326772 5326791 5326775 -
aaaattgaagggagaatatt

SEQ ID NO: 37272 - DNA, 20 bp, Artificial Sequence
  Synthetic oligonucleotide; TAG chr11 5326753 5326772 5326756 -
taagcactattataaactca

SEQ ID NO: 37273 - DNA, 20 bp, Artificial Sequence
  Synthetic oligonucleotide; AGG chr11 5326752 5326771 5326755 -
aagcactattataaactcat

SEQ ID NO: 37274 - DNA, 20 bp, Artificial Sequence
  Synthetic oligonucleotide; GAG chr11 5326742 5326761 5326745 -
ataaactcataggccatatt

SEQ ID NO: 37275 - DNA, 20 bp, Artificial Sequence
  Synthetic oligonucleotide; GAG chr11 5326740 5326759 5326743 -
aaactcataggccatattga

SEQ ID NO: 37276 - DNA, 20 bp, Artificial Sequence
  Synthetic oligonucleotide; AAG chr11 5326731 5326750 5326734 -
ggccatattgagagcttctt

SEQ ID NO: 37277 - DNA, 20 bp, Artificial Sequence
  Synthetic oligonucleotide; GAG chr11 5326729 5326748 5326732 -
ccatattgagagcttcttaa

SEQ ID NO: 37278 - DNA, 20 bp, Artificial Sequence
  Synthetic oligonucleotide; CAG chr11 5326726 5326745 5326729 -
tattgagagcttcttaagag

SEQ ID NO: 37279 - DNA, 20 bp, Artificial Sequence
  Synthetic oligonucleotide; TGG chr11 5326708 5326727 5326711 -
agcagactgtgcttattaca

SEQ ID NO: 37280 - DNA, 20 bp, Artificial Sequence
  Synthetic oligonucleotide; TAG chr11 5326700 5326719 5326703 -
gtgcttattacatggttatt

SEQ ID NO: 37281 - DNA, 20 bp, Artificial Sequence
  Synthetic oligonucleotide; CAG chr11 5326688 5326707 5326691 -
tggttatttagaactaaaca

SEQ ID NO: 37282 - DNA, 20 bp, Artificial Sequence
  Synthetic oligonucleotide; CAG chr11 5326683 5326702 5326686 -
atttagaactaaacacagtg

SEQ ID NO: 37283 - DNA, 20 bp, Artificial Sequence
  Synthetic oligonucleotide; TGG chr11 5326675 5326694 5326678 -
ctaaacacagtgcagttgtg

SEQ ID NO: 37284 - DNA, 20 bp, Artificial Sequence
  Synthetic oligonucleotide; TAG chr11 5326640 5326659 5326643 -
aattctgtgctgactcaaaa

SEQ ID NO: 37285 - DNA, 20 bp, Artificial Sequence
  Synthetic oligonucleotide; CAG chr11 5326619 5326638 5326622 -
agtcattttccaacttgtcc

SEQ ID NO: 37286 - DNA, 20 bp, Artificial Sequence
  Synthetic oligonucleotide; TGG chr11 5326615 5326634 5326618 -
attttccaacttgtcccaga

SEQ ID NO: 37287 - DNA, 20 bp, Artificial Sequence
  Synthetic oligonucleotide; TGG chr11 5326609 5326628 5326612 -
caacttgtcccagatggtat

SEQ ID NO: 37288 - DNA, 20 bp, Artificial Sequence
  Synthetic oligonucleotide; TGG chr11 5326602 5326621 5326605 -
tcccagatggtattggtgaa

SEQ ID NO: 37289 - DNA, 20 bp, Artificial Sequence
  Synthetic oligonucleotide; GAG chr11 5326600 5326619 5326603 -
ccagatggtattggtgaatg

SEQ ID NO: 37290 - DNA, 20 bp, Artificial Sequence
  Synthetic oligonucleotide; CAG chr11 5326591 5326610 5326594 -
attggtgaatggagctccta

SEQ ID NO: 37291 - DNA, 20 bp, Artificial Sequence
  Synthetic oligonucleotide; AGG chr11 5326590 5326609 5326593 -
ttggtgaatggagctcctac

SEQ ID NO: 37292 - DNA, 20 bp, Artificial Sequence
  Synthetic oligonucleotide; CAG chr11 5326560 5326579 5326563 -
tatcttcatatatgatatat

SEQ ID NO: 37293 - DNA, 20 bp, Artificial Sequence
  Synthetic oligonucleotide; AAG chr11 5326554 5326573 5326557 -
catatatgatatatcagttc

SEQ ID NO: 37294 - DNA, 20 bp, Artificial Sequence
  Synthetic oligonucleotide; AGG chr11 5326553 5326572 5326556 -
atatatgatatatcagttca

SEQ ID NO: 37295 - DNA, 20 bp, Artificial Sequence
  Synthetic oligonucleotide; AAG chr11 5326533 5326552 5326536 -
aggaaaaatcatcacacatc

SEQ ID NO: 37296 - DNA, 20 bp, Artificial Sequence
  Synthetic oligonucleotide; CAG chr11 5326529 5326548 5326532 -
aaaatcatcacacatcaagt

SEQ ID NO: 37297 - DNA, 20 bp, Artificial Sequence
  Synthetic oligonucleotide; AGG chr11 5326528 5326547 5326531 -
aaatcatcacacatcaagtc

SEQ ID NO: 37298 - DNA, 20 bp, Artificial Sequence
  Synthetic oligonucleotide; CAG chr11 5326521 5326540 5326524 -
cacacatcaagtcaggaccc

SEQ ID NO: 37299 - DNA, 20 bp, Artificial Sequence
  Synthetic oligonucleotide; TAG chr11 5326513 5326532 5326516 -
aagtcaggaccccagatcct

SEQ ID NO: 37300 - DNA, 20 bp, Artificial Sequence
  Synthetic oligonucleotide; AGG chr11 5326512 5326531 5326515 -
agtcaggaccccagatcctt

SEQ ID NO: 37301 - DNA, 20 bp, Artificial Sequence
  Synthetic oligonucleotide; GAG chr11 5326486 5326505 5326489 -
tcactaaacatttatgttct

SEQ ID NO: 37302 - DNA, 20 bp, Artificial Sequence
  Synthetic oligonucleotide; GAG chr11 5326481 5326500 5326484 -
aaacatttatgttctgagtt

SEQ ID NO: 37303 - DNA, 20 bp, Artificial Sequence
  Synthetic oligonucleotide; GAG chr11 5326479 5326498 5326482 -
acatttatgttctgagttga

SEQ ID NO: 37304 - DNA, 20 bp, Artificial Sequence
  Synthetic oligonucleotide; CAG chr11 5326460 5326479 5326463 -
agagctgcctatcaatttca

SEQ ID NO: 37305 - DNA, 20 bp, Artificial Sequence
  Synthetic oligonucleotide; TAG chr11 5326454 5326473 5326457 -
gcctatcaatttcacagcca

SEQ ID NO: 37306 - DNA, 20 bp, Artificial Sequence
  Synthetic oligonucleotide; CAG chr11 5326435 5326454 5326438 -
atagctgctccacctttatc

SEQ ID NO: 37307 - DNA, 20 bp, Artificial Sequence
  Synthetic oligonucleotide; TAG chr11 5326426 5326445 5326429 -
ccacctttatccagaaaaac

SEQ ID NO: 37308 - DNA, 20 bp, Artificial Sequence
  Synthetic oligonucleotide; TAG chr11 5326411 5326430 5326414 -
aaaactagttcttgtgcttc

SEQ ID NO: 37309 - DNA, 20 bp, Artificial Sequence
  Synthetic oligonucleotide; TAG chr11 5326384 5326403 5326387 -
attttcttaacacttgttaa

SEQ ID NO: 37310 - DNA, 20 bp, Artificial Sequence
  Synthetic oligonucleotide; AAG chr11 5326379 5326398 5326382 -
cttaacacttgttaatagct

SEQ ID NO: 37311 - DNA, 20 bp, Artificial Sequence
  Synthetic oligonucleotide; TGG chr11 5326367 5326386 5326370 -
taatagctaagccatctgaa

SEQ ID NO: 37312 - DNA, 20 bp, Artificial Sequence
  Synthetic oligonucleotide; TAG chr11 5326352 5326371 5326355 -
ctgaatggaattttgccaca

SEQ ID NO: 37313 - DNA, 20 bp, Artificial Sequence
  Synthetic oligonucleotide; CAG chr11 5326347 5326366 5326350 -
tggaattttgccacatagtg

SEQ ID NO: 37314 - DNA, 20 bp, Artificial Sequence
  Synthetic oligonucleotide; TGG chr11 5326341 5326360 5326344 -
tttgccacatagtgcagcct

SEQ ID NO: 37315 - DNA, 20 bp, Artificial Sequence
  Synthetic oligonucleotide; GGG chr11 5326340 5326359 5326343 -
ttgccacatagtgcagcctt

SEQ ID NO: 37316 - DNA, 20 bp, Artificial Sequence
  Synthetic oligonucleotide; GAG chr11 5326338 5326357 5326341 -
gccacatagtgcagccttgg

SEQ ID NO: 37317 - DNA, 20 bp, Artificial Sequence
  Synthetic oligonucleotide; CAG chr11 5326327 5326346 5326330 -
cagccttgggagcatgcata

SEQ ID NO: 37318 - DNA, 20 bp, Artificial Sequence
  Synthetic oligonucleotide; TGG chr11 5326322 5326341 5326325 -
ttgggagcatgcatacagta

SEQ ID NO: 37319 - DNA, 20 bp, Artificial Sequence
  Synthetic oligonucleotide; TGG chr11 5326310 5326329 5326313 -
atacagtatggcttcatctc

SEQ ID NO: 37320 - DNA, 20 bp, Artificial Sequence
  Synthetic oligonucleotide; TAG chr11 5326295 5326314 5326298 -
atctctggtgacactgctta

SEQ ID NO: 37321 - DNA, 20 bp, Artificial Sequence
  Synthetic oligonucleotide; TGG chr11 5326292 5326311 5326295 -
tctggtgacactgcttatag

SEQ ID NO: 37322 - DNA, 20 bp, Artificial Sequence
  Synthetic oligonucleotide; GGG chr11 5326291 5326310 5326294 -
ctggtgacactgcttatagt

SEQ ID NO: 37323 - DNA, 20 bp, Artificial Sequence
  Synthetic oligonucleotide; CAG chr11 5326285 5326304 5326288 -
acactgcttatagtgggcct

SEQ ID NO: 37324 - DNA, 20 bp, Artificial Sequence
  Synthetic oligonucleotide; CAG chr11 5326274 5326293 5326277 -
agtgggcctcagtttgatga

SEQ ID NO: 37325 - DNA, 20 bp, Artificial Sequence
  Synthetic oligonucleotide; TAG chr11 5326267 5326286 5326270 -
ctcagtttgatgacagtatc

SEQ ID NO: 37326 - DNA, 20 bp, Artificial Sequence
  Synthetic oligonucleotide; TAG chr11 5326258 5326277 5326261 -
atgacagtatctagctctcc

SEQ ID NO: 37327 - DNA, 20 bp, Artificial Sequence
  Synthetic oligonucleotide; TGG chr11 5326235 5326254 5326238 -
aatccccacacgcctgcctc

SEQ ID NO: 37328 - DNA, 20 bp, Artificial Sequence
  Synthetic oligonucleotide; GGG chr11 5326234 5326253 5326237 -
atccccacacgcctgcctct

SEQ ID NO: 37329 - DNA, 20 bp, Artificial Sequence
  Synthetic oligonucleotide; CGG chr11 5326221 5326240 5326224 -
tgcctctgggtaaatatcaa

SEQ ID NO: 37330 - DNA, 20 bp, Artificial Sequence
  Synthetic oligonucleotide; CAG chr11 5326213 5326232 5326216 -
ggtaaatatcaacggcttcc

SEQ ID NO: 37331 - DNA, 20 bp, Artificial Sequence
  Synthetic oligonucleotide; TGG chr11 5326207 5326226 5326210 -
tatcaacggcttcccagtgt

SEQ ID NO: 37332 - DNA, 20 bp, Artificial Sequence
  Synthetic oligonucleotide; GGG chr11 5326206 5326225 5326209 -
atcaacggcttcccagtgtt

SEQ ID NO: 37333 - DNA, 20 bp, Artificial Sequence
  Synthetic oligonucleotide; CAG chr11 5326203 5326222 5326206 -
aacggcttcccagtgttggg

SEQ ID NO: 37334 - DNA, 20 bp, Artificial Sequence
  Synthetic oligonucleotide; AGG chr11 5326202 5326221 5326205 -
acggcttcccagtgttgggc

SEQ ID NO: 37335 - DNA, 20 bp, Artificial Sequence
  Synthetic oligonucleotide; CAG chr11 5326166 5326185 5326169 -
tctttttattcccaaaatct

SEQ ID NO: 37336 - DNA, 20 bp, Artificial Sequence
  Synthetic oligonucleotide; GAG chr11 5326138 5326157 5326141 -
atttacctttcattttcttt

SEQ ID NO: 37337 - DNA, 20 bp, Artificial Sequence
  Synthetic oligonucleotide; AGG chr11 5326137 5326156 5326140 -
tttacctttcattttctttg

SEQ ID NO: 37338 - DNA, 20 bp, Artificial Sequence
  Synthetic oligonucleotide; AAG chr11 5326099 5326118 5326102 -
tgtcttacttttaatgaccc

SEQ ID NO: 37339 - DNA, 20 bp, Artificial Sequence
  Synthetic oligonucleotide; TAG chr11 5326094 5326113 5326097 -
tacttttaatgacccaagct

SEQ ID NO: 37340 - DNA, 20 bp, Artificial Sequence
  Synthetic oligonucleotide; GAG chr11 5326092 5326111 5326095 -
cttttaatgacccaagctta

SEQ ID NO: 37341 - DNA, 20 bp, Artificial Sequence
  Synthetic oligonucleotide; TGG chr11 5326088 5326107 5326091 -
taatgacccaagcttagaga

SEQ ID NO: 37342 - DNA, 20 bp, Artificial Sequence
  Synthetic oligonucleotide; GAG chr11 5326086 5326105 5326089 -
atgacccaagcttagagatg

SEQ ID NO: 37343 - DNA, 20 bp, Artificial Sequence
  Synthetic oligonucleotide; AGG chr11 5326085 5326104 5326088 -
tgacccaagcttagagatgg

SEQ ID NO: 37344 - DNA, 20 bp, Artificial Sequence
  Synthetic oligonucleotide; GGG chr11 5326084 5326103 5326087 -
gacccaagcttagagatgga

SEQ ID NO: 37345 - DNA, 20 bp, Artificial Sequence
  Synthetic oligonucleotide; GAG chr11 5326082 5326101 5326085 -
cccaagcttagagatggagg

SEQ ID NO: 37346 - DNA, 20 bp, Artificial Sequence
  Synthetic oligonucleotide; TGG chr11 5326024 5326043 5326027 -
taataaaaaactttcttttt

SEQ ID NO: 37347 - DNA, 20 bp, Artificial Sequence
  Synthetic oligonucleotide; AAG chr11 5326017 5326036 5326020 -
aaactttcttttttggtttc

SEQ ID NO: 37348 - DNA, 20 bp, Artificial Sequence
  Synthetic oligonucleotide; TGG chr11 5326007 5326026 5326010 -
ttttggtttcaagtgtttta

SEQ ID NO: 37349 - DNA, 20 bp, Artificial Sequence
  Synthetic oligonucleotide; AAG chr11 5325992 5326011 5325995 -
ttttatggccaatttctcta

SEQ ID NO: 37350 - DNA, 20 bp, Artificial Sequence
  Synthetic oligonucleotide; AAG chr11 5325974 5325993 5325977 -
taaagacgttattgtttttt

SEQ ID NO: 37351 - DNA, 20 bp, Artificial Sequence
  Synthetic oligonucleotide; AGG chr11 5325973 5325992 5325976 -
aaagacgttattgtttttta

SEQ ID NO: 37352 - DNA, 20 bp, Artificial Sequence
  Synthetic oligonucleotide; AAG chr11 5325968 5325987 5325971 -
cgttattgttttttaaggaa

SEQ ID NO: 37353 - DNA, 20 bp, Artificial Sequence
  Synthetic oligonucleotide; AAG chr11 5325948 5325967 5325951 -
aagctcacaaacattttaaa

SEQ ID NO: 37354 - DNA, 20 bp, Artificial Sequence
  Synthetic oligonucleotide; TGG chr11 5325934 5325953 5325937 -
tttaaaaagtacttgtgctc

SEQ ID NO: 37355 - DNA, 20 bp, Artificial Sequence
  Synthetic oligonucleotide; TAG chr11 5325926 5325945 5325929 -
gtacttgtgctctggaaatc

SEQ ID NO: 37356 - DNA, 20 bp, Artificial Sequence
  Synthetic oligonucleotide; AAG chr11 5325898 5325917 5325901 -
tccttacacaatttttttta

SEQ ID NO: 37357 - DNA, 20 bp, Artificial Sequence
  Synthetic oligonucleotide; AGG chr11 5325897 5325916 5325900 -
ccttacacaattttttttaa

SEQ ID NO: 37358 - DNA, 20 bp, Artificial Sequence
  Synthetic oligonucleotide; CAG chr11 5325889 5325908 5325892 -
aattttttttaaaggaatcc

SEQ ID NO: 37359 - DNA, 20 bp, Artificial Sequence
  Synthetic oligonucleotide; TGG chr11 5325880 5325899 5325883 -
taaaggaatcccagatttta

SEQ ID NO: 37360 - DNA, 20 bp, Artificial Sequence
  Synthetic oligonucleotide; CAG chr11 5325788 5325807 5325791 -
tttcttctatgtttaccctt

SEQ ID NO: 37361 - DNA, 20 bp, Artificial Sequence
  Synthetic oligonucleotide; AAG chr11 5325690 5325709 5325693 -
attcctcaatctgtgttttt

SEQ ID NO: 37362 - DNA, 20 bp, Artificial Sequence
  Synthetic oligonucleotide; AAG chr11 5325683 5325702 5325686 -
aatctgtgtttttaagcatg

SEQ ID NO: 37363 - DNA, 20 bp, Artificial Sequence
  Synthetic oligonucleotide; AGG chr11 5325682 5325701 5325685 -
atctgtgtttttaagcatga

SEQ ID NO: 37364 - DNA, 20 bp, Artificial Sequence
  Synthetic oligonucleotide; AAG chr11 5325671 5325690 5325674 -
taagcatgaaggatctttcg

SEQ ID NO: 37365 - DNA, 20 bp, Artificial Sequence
  Synthetic oligonucleotide; AGG chr11 5325670 5325689 5325673 -
aagcatgaaggatctttcga

SEQ ID NO: 37366 - DNA, 20 bp, Artificial Sequence
  Synthetic oligonucleotide; TAG chr11 5325667 5325686 5325670 -
catgaaggatctttcgaagg

SEQ ID NO: 37367 - DNA, 20 bp, Artificial Sequence
  Synthetic oligonucleotide; CAG chr11 5325637 5325656 5325640 -
tttgtgtaataattataatt

SEQ ID NO: 37368 - DNA, 20 bp, Artificial Sequence
  Synthetic oligonucleotide; TAG chr11 5325603 5325622 5325606 -
aattcaatgtgatttaattt

SEQ ID NO: 37369 - DNA, 20 bp, Artificial Sequence
  Synthetic oligonucleotide; AGG chr11 5325602 5325621 5325605 -
attcaatgtgatttaatttt

SEQ ID NO: 37370 - DNA, 20 bp, Artificial Sequence
  Synthetic oligonucleotide; GGG chr11 5325601 5325620 5325604 -
ttcaatgtgatttaatttta

SEQ ID NO: 37371 - DNA, 20 bp, Artificial Sequence
  Synthetic oligonucleotide; TAG chr11 5325592 5325611 5325595 -
atttaattttagggattccc

SEQ ID NO: 37372 - DNA, 20 bp, Artificial Sequence
  Synthetic oligonucleotide; TGG chr11 5325586 5325605 5325589 -
ttttagggattccctagtgt

SEQ ID NO: 37373 - DNA, 20 bp, Artificial Sequence
  Synthetic oligonucleotide; CAG chr11 5325571 5325590 5325574 -
agtgttggtgatttcaatct

SEQ ID NO: 37374 - DNA, 20 bp, Artificial Sequence
  Synthetic oligonucleotide; AAG chr11 5325567 5325586 5325570 -
ttggtgatttcaatctcagt

SEQ ID NO: 37375 - DNA, 20 bp, Artificial Sequence
  Synthetic oligonucleotide; TAG chr11 5325563 5325582 5325566 -
tgatttcaatctcagtaagt

SEQ ID NO: 37376 - DNA, 20 bp, Artificial Sequence
  Synthetic oligonucleotide; CAG chr11 5325547 5325566 5325550 -
aagttagtaatcctgactca

SEQ ID NO: 37377 - DNA, 20 bp, Artificial Sequence
  Synthetic oligonucleotide; AGG chr11 5325546 5325565 5325549 -
agttagtaatcctgactcac

SEQ ID NO: 37378 - DNA, 20 bp, Artificial Sequence
  Synthetic oligonucleotide; GAG chr11 5325544 5325563 5325547 -
ttagtaatcctgactcacag

SEQ ID NO: 37379 - DNA, 20 bp, Artificial Sequence
  Synthetic oligonucleotide; CAG chr11 5325535 5325554 5325538 -
ctgactcacaggagctgata

SEQ ID NO: 37380 - DNA, 20 bp, Artificial Sequence
  Synthetic oligonucleotide; GAG chr11 5325533 5325552 5325536 -
gactcacaggagctgataca

SEQ ID NO: 37381 - DNA, 20 bp, Artificial Sequence
  Synthetic oligonucleotide; AGG chr11 5325532 5325551 5325535 -
actcacaggagctgatacag

SEQ ID NO: 37382 - DNA, 20 bp, Artificial Sequence
  Synthetic oligonucleotide; TAG chr11 5325529 5325548 5325532 -
cacaggagctgatacagagg

SEQ ID NO: 37383 - DNA, 20 bp, Artificial Sequence
  Synthetic oligonucleotide; CAG chr11 5325523 5325542 5325526 -
agctgatacagaggtagcat

SEQ ID NO: 37384 - DNA, 20 bp, Artificial Sequence
  Synthetic oligonucleotide; GAG chr11 5325455 5325474 5325458 -
tctgatttatttttgatact

SEQ ID NO: 37385 - DNA, 20 bp, Artificial Sequence
  Synthetic oligonucleotide; AGG chr11 5325454 5325473 5325457 -
ctgatttatttttgatactg

SEQ ID NO: 37386 - DNA, 20 bp, Artificial Sequence
  Synthetic oligonucleotide; AAG chr11 5325441 5325460 5325444 -
gatactgaggccattttatg

SEQ ID NO: 37387 - DNA, 20 bp, Artificial Sequence
  Synthetic oligonucleotide; TAG chr11 5325430 5325449 5325433 -
cattttatgaagaaaactgc

SEQ ID NO: 37388 - DNA, 20 bp, Artificial Sequence
  Synthetic oligonucleotide; AGG chr11 5325429 5325448 5325432 -
attttatgaagaaaactgct

SEQ ID NO: 37389 - DNA, 20 bp, Artificial Sequence
  Synthetic oligonucleotide; AAG chr11 5325421 5325440 5325424 -
aagaaaactgctaggtgcta

SEQ ID NO: 37390 - DNA, 20 bp, Artificial Sequence
  Synthetic oligonucleotide; CAG chr11 5325409 5325428 5325412 -
aggtgctaaagacttgcctc

SEQ ID NO: 37391 - DNA, 20 bp, Artificial Sequence
  Synthetic oligonucleotide; AGG chr11 5325408 5325427 5325411 -
ggtgctaaagacttgcctcc

SEQ ID NO: 37392 - DNA, 20 bp, Artificial Sequence
  Synthetic oligonucleotide; AAG chr11 5325384 5325403 5325387 -
ttctgaatttctcgttaaat

SEQ ID NO: 37393 - DNA, 20 bp, Artificial Sequence
  Synthetic oligonucleotide; CAG chr11 5325377 5325396 5325380 -
tttctcgttaaataagactg

SEQ ID NO: 37394 - DNA, 20 bp, Artificial Sequence
  Synthetic oligonucleotide; CAG chr11 5325374 5325393 5325377 -
ctcgttaaataagactgcag

SEQ ID NO: 37395 - DNA, 20 bp, Artificial Sequence
  Synthetic oligonucleotide; GAG chr11 5325372 5325391 5325375 -
cgttaaataagactgcagca

SEQ ID NO: 37396 - DNA, 20 bp, Artificial Sequence
  Synthetic oligonucleotide; TGG chr11 5325368 5325387 5325371 -
aaataagactgcagcagagc

SEQ ID NO: 37397 - DNA, 20 bp, Artificial Sequence
  Synthetic oligonucleotide; AAG chr11 5325361 5325380 5325364 -
actgcagcagagctggtaat

SEQ ID NO: 37398 - DNA, 20 bp, Artificial Sequence
  Synthetic oligonucleotide; TGG chr11 5325333 5325352 5325336 -
tctttctcccatacccctct

SEQ ID NO: 37399 - DNA, 20 bp, Artificial Sequence
  Synthetic oligonucleotide; TGG chr11 5325326 5325345 5325329 -
cccatacccctcttggatcg

SEQ ID NO: 37400 - DNA, 20 bp, Artificial Sequence
  Synthetic oligonucleotide; AAG chr11 5325318 5325337 5325321 -
cctcttggatcgtggcaacc

SEQ ID NO: 37401 - DNA, 20 bp, Artificial Sequence
  Synthetic oligonucleotide; CAG chr11 5325311 5325330 5325314 -
gatcgtggcaaccaagaaaa

SEQ ID NO: 37402 - DNA, 20 bp, Artificial Sequence
  Synthetic oligonucleotide; CAG chr11 5325305 5325324 5325308 -
ggcaaccaagaaaacagaaa

SEQ ID NO: 37403 - DNA, 20 bp, Artificial Sequence
  Synthetic oligonucleotide; TAG chr11 5325302 5325321 5325305 -
aaccaagaaaacagaaacag

SEQ ID NO: 37404 - DNA, 20 bp, Artificial Sequence
  Synthetic oligonucleotide; TGG chr11 5325296 5325315 5325299 -
gaaaacagaaacagtagtga

SEQ ID NO: 37405 - DNA, 20 bp, Artificial Sequence
  Synthetic oligonucleotide; TGG chr11 5325292 5325311 5325295 -
acagaaacagtagtgatggc

SEQ ID NO: 37406 - DNA, 20 bp, Artificial Sequence
  Synthetic oligonucleotide; TAG chr11 5325283 5325302 5325286 -
gtagtgatggctggcatcct

SEQ ID NO: 37407 - DNA, 20 bp, Artificial Sequence
  Synthetic oligonucleotide; AGG chr11 5325282 5325301 5325285 -
tagtgatggctggcatcctt

SEQ ID NO: 37408 - DNA, 20 bp, Artificial Sequence
  Synthetic oligonucleotide; TGG chr11 5325276 5325295 5325279 -
tggctggcatccttaggctg

SEQ ID NO: 37409 - DNA, 20 bp, Artificial Sequence
  Synthetic oligonucleotide; CAG chr11 5325250 5325269 5325253 -
cattataattttacctgtta

SEQ ID NO: 37410 - DNA, 20 bp, Artificial Sequence
  Synthetic oligonucleotide; CAG chr11 5325239 5325258 5325242 -
tacctgttacagaactgcaa

SEQ ID NO: 37411 - DNA, 20 bp, Artificial Sequence
  Synthetic oligonucleotide; CAG chr11 5325231 5325250 5325234 -
acagaactgcaacagttcct

SEQ ID NO: 37412 - DNA, 20 bp, Artificial Sequence
  Synthetic oligonucleotide; AGG chr11 5325230 5325249 5325233 -
cagaactgcaacagttcctc

SEQ ID NO: 37413 - DNA, 20 bp, Artificial Sequence
  Synthetic oligonucleotide; GAG chr11 5325228 5325247 5325231 -
gaactgcaacagttcctcag

SEQ ID NO: 37414 - DNA, 20 bp, Artificial Sequence
  Synthetic oligonucleotide; TGG chr11 5325223 5325242 5325226 -
gcaacagttcctcaggagtt

SEQ ID NO: 37415 - DNA, 20 bp, Artificial Sequence
  Synthetic oligonucleotide; GAG chr11 5325221 5325240 5325224 -
aacagttcctcaggagtttg

SEQ ID NO: 37416 - DNA, 20 bp, Artificial Sequence
  Synthetic oligonucleotide; TGG chr11 5325214 5325233 5325217 -
cctcaggagtttggagttga

SEQ ID NO: 37417 - DNA, 20 bp, Artificial Sequence
  Synthetic oligonucleotide; AAG chr11 5325209 5325228 5325212 -
ggagtttggagttgatggaa

SEQ ID NO: 37418 - DNA, 20 bp, Artificial Sequence
  Synthetic oligonucleotide; CAG chr11 5325206 5325225 5325209 -
gtttggagttgatggaaaag

SEQ ID NO: 37419 - DNA, 20 bp, Artificial Sequence
  Synthetic oligonucleotide; GAG chr11 5325204 5325223 5325207 -
ttggagttgatggaaaagca

SEQ ID NO: 37420 - DNA, 20 bp, Artificial Sequence
  Synthetic oligonucleotide; GAG chr11 5325202 5325221 5325205 -
ggagttgatggaaaagcaga

SEQ ID NO: 37421 - DNA, 20 bp, Artificial Sequence
  Synthetic oligonucleotide; GAG chr11 5325200 5325219 5325203 -
agttgatggaaaagcagaga

SEQ ID NO: 37422 - DNA, 20 bp, Artificial Sequence
  Synthetic oligonucleotide; AGG chr11 5325199 5325218 5325202 -
gttgatggaaaagcagagag

SEQ ID NO: 37423 - DNA, 20 bp, Artificial Sequence
  Synthetic oligonucleotide; AAG chr11 5325195 5325214 5325198 -
atggaaaagcagagagaggt

SEQ ID NO: 37424 - DNA, 20 bp, Artificial Sequence
  Synthetic oligonucleotide; AAG chr11 5325192 5325211 5325195 -
gaaaagcagagagaggtaag

SEQ ID NO: 37425 - DNA, 20 bp, Artificial Sequence
  Synthetic oligonucleotide; AGG chr11 5325191 5325210 5325194 -
aaaagcagagagaggtaaga

SEQ ID NO: 37426 - DNA, 20 bp, Artificial Sequence
  Synthetic oligonucleotide; CAG chr11 5325187 5325206 5325190 -
gcagagagaggtaagaagga

SEQ ID NO: 37427 - DNA, 20 bp, Artificial Sequence
  Synthetic oligonucleotide; CAG chr11 5325179 5325198 5325182 -
aggtaagaaggacagaaaac

SEQ ID NO: 37428 - DNA, 20 bp, Artificial Sequence
  Synthetic oligonucleotide; AAG chr11 5325174 5325193 5325177 -
agaaggacagaaaaccagct

SEQ ID NO: 37429 - DNA, 20 bp, Artificial Sequence
  Synthetic oligonucleotide; TGG chr11 5325161 5325180 5325164 -
accagctaagtatttaatta

SEQ ID NO: 37430 - DNA, 20 bp, Artificial Sequence
  Synthetic oligonucleotide; GGG chr11 5325160 5325179 5325163 -
ccagctaagtatttaattat

SEQ ID NO: 37431 - DNA, 20 bp, Artificial Sequence
  Synthetic oligonucleotide; TGG chr11 5325148 5325167 5325151 -
ttaattatgggaaataatgt

SEQ ID NO: 37432 - DNA, 20 bp, Artificial Sequence
  Synthetic oligonucleotide; AAG chr11 5325144 5325163 5325147 -
ttatgggaaataatgttgga

SEQ ID NO: 37433 - DNA, 20 bp, Artificial Sequence
  Synthetic oligonucleotide; AGG chr11 5325143 5325162 5325146 -
tatgggaaataatgttggaa

SEQ ID NO: 37434 - DNA, 20 bp, Artificial Sequence
  Synthetic oligonucleotide; GGG chr11 5325142 5325161 5325145 -
atgggaaataatgttggaaa

SEQ ID NO: 37435 - DNA, 20 bp, Artificial Sequence
  Synthetic oligonucleotide; AAG chr11 5325138 5325157 5325141 -
gaaataatgttggaaagggc

SEQ ID NO: 37436 - DNA, 20 bp, Artificial Sequence
  Synthetic oligonucleotide; TGG chr11 5325135 5325154 5325138 -
ataatgttggaaagggcaag

SEQ ID NO: 37437 - DNA, 20 bp, Artificial Sequence
  Synthetic oligonucleotide; CAG chr11 5325132 5325151 5325135 -
atgttggaaagggcaagtgg

SEQ ID NO: 37438 - DNA, 20 bp, Artificial Sequence
  Synthetic oligonucleotide; AAG chr11 5325128 5325147 5325131 -
tggaaagggcaagtggcaga

SEQ ID NO: 37439 - DNA, 20 bp, Artificial Sequence
  Synthetic oligonucleotide; AAG chr11 5325124 5325143 5325127 -
aagggcaagtggcagaaaga

SEQ ID NO: 37440 - DNA, 20 bp, Artificial Sequence
  Synthetic oligonucleotide; CAG chr11 5325120 5325139 5325123 -
gcaagtggcagaaagaaagc

SEQ ID NO: 37441 - DNA, 20 bp, Artificial Sequence
  Synthetic oligonucleotide; TGG chr11 5325113 5325132 5325116 -
gcagaaagaaagccagtaaa

SEQ ID NO: 37442 - DNA, 20 bp, Artificial Sequence
  Synthetic oligonucleotide; AAG chr11 5325107 5325126 5325110 -
agaaagccagtaaatggtga

SEQ ID NO: 37443 - DNA, 20 bp, Artificial Sequence
  Synthetic oligonucleotide; AAG chr11 5325094 5325113 5325097 -
atggtgaaagaaacataaaa

SEQ ID NO: 37444 - DNA, 20 bp, Artificial Sequence
  Synthetic oligonucleotide; AAG chr11 5325080 5325099 5325083 -
ataaaaaagataattgtatg

SEQ ID NO: 37445 - DNA, 20 bp, Artificial Sequence
  Synthetic oligonucleotide; TGG chr11 5325072 5325091 5325075 -
gataattgtatgaagatatt

SEQ ID NO: 37446 - DNA, 20 bp, Artificial Sequence
  Synthetic oligonucleotide; GAG chr11 5325070 5325089 5325073 -
taattgtatgaagatatttg

SEQ ID NO: 37447 - DNA, 20 bp, Artificial Sequence
  Synthetic oligonucleotide; GAG chr11 5325062 5325081 5325065 -
tgaagatatttggagaaaat

SEQ ID NO: 37448 - DNA, 20 bp, Artificial Sequence
  Synthetic oligonucleotide; TGG chr11 5325050 5325069 5325053 -
gagaaaatgagaaaatcaac

SEQ ID NO: 37449 - DNA, 20 bp, Artificial Sequence
  Synthetic oligonucleotide; TGG chr11 5325046 5325065 5325049 -
aaatgagaaaatcaactgga

SEQ ID NO: 37450 - DNA, 20 bp, Artificial Sequence
  Synthetic oligonucleotide; AAG chr11 5325043 5325062 5325046 -
tgagaaaatcaactggatgg

SEQ ID NO: 37451 - DNA, 20 bp, Artificial Sequence
  Synthetic oligonucleotide; AAG chr11 5325034 5325053 5325037 -
caactggatggaagcattaa

SEQ ID NO: 37452 - DNA, 20 bp, Artificial Sequence
  Synthetic oligonucleotide; AGG chr11 5325033 5325052 5325036 -
aactggatggaagcattaaa

SEQ ID NO: 37453 - DNA, 20 bp, Artificial Sequence
  Synthetic oligonucleotide; AAG chr11 5325018 5325037 5325021 -
ttaaaaggtttctatctcga

SEQ ID NO: 37454 - DNA, 20 bp, Artificial Sequence
  Synthetic oligonucleotide; TGG chr11 5325014 5325033 5325017 -
aaggtttctatctcgaaaga

SEQ ID NO: 37455 - DNA, 20 bp, Artificial Sequence
  Synthetic oligonucleotide; TAG chr11 5325009 5325028 5325012 -
ttctatctcgaaagatggat

SEQ ID NO: 37456 - DNA, 20 bp, Artificial Sequence
  Synthetic oligonucleotide; AGG chr11 5325008 5325027 5325011 -
tctatctcgaaagatggatt

SEQ ID NO: 37457 - DNA, 20 bp, Artificial Sequence
  Synthetic oligonucleotide; TAG chr11 5324992 5325011 5324995 -
gattaggtatgaaatgctta

SEQ ID NO: 37458 - DNA, 20 bp, Artificial Sequence
  Synthetic oligonucleotide; CAG chr11 5324989 5325008 5324992 -
taggtatgaaatgcttatag

SEQ ID NO: 37459 - DNA, 20 bp, Artificial Sequence
  Synthetic oligonucleotide; CAG chr11 5324979 5324998 5324982 -
atgcttatagcagtgatgcc

SEQ ID NO: 37460 - DNA, 20 bp, Artificial Sequence
  Synthetic oligonucleotide; TGG chr11 5324962 5324981 5324965 -
gcccagacattgttttgcac

SEQ ID NO: 37461 - DNA, 20 bp, Artificial Sequence
  Synthetic oligonucleotide; GAG chr11 5324951 5324970 5324954 -
gttttgcactggaatcacct

SEQ ID NO: 37462 - DNA, 20 bp, Artificial Sequence
  Synthetic oligonucleotide; AGG chr11 5324950 5324969 5324953 -
ttttgcactggaatcacctg

SEQ ID NO: 37463 - DNA, 20 bp, Artificial Sequence
  Synthetic oligonucleotide; AAG chr11 5324938 5324957 5324941 -
atcacctgaggacctgaaaa

SEQ ID NO: 37464 - DNA, 20 bp, Artificial Sequence
  Synthetic oligonucleotide; CAG chr11 5324924 5324943 5324927 -
tgaaaaaagcgaatttgatt

SEQ ID NO: 37465 - DNA, 20 bp, Artificial Sequence
  Synthetic oligonucleotide; TGG chr11 5324916 5324935 5324919 -
gcgaatttgattcagaatgt

SEQ ID NO: 37466 - DNA, 20 bp, Artificial Sequence
  Synthetic oligonucleotide; AAG chr11 5324913 5324932 5324916 -
aatttgattcagaatgttgg

SEQ ID NO: 37467 - DNA, 20 bp, Artificial Sequence
  Synthetic oligonucleotide; AGG chr11 5324912 5324931 5324915 -
atttgattcagaatgttgga

SEQ ID NO: 37468 - DNA, 20 bp, Artificial Sequence
  Synthetic oligonucleotide; GGG chr11 5324911 5324930 5324914 -
tttgattcagaatgttggaa

SEQ ID NO: 37469 - DNA, 20 bp, Artificial Sequence
  Synthetic oligonucleotide; GGG chr11 5324910 5324929 5324913 -
ttgattcagaatgttggaag

SEQ ID NO: 37470 - DNA, 20 bp, Artificial Sequence
  Synthetic oligonucleotide; CAG chr11 5324907 5324926 5324910 -
attcagaatgttggaagggg

SEQ ID NO: 37471 - DNA, 20 bp, Artificial Sequence
  Synthetic oligonucleotide; GAG chr11 5324899 5324918 5324902 -
tgttggaaggggcagaatct

SEQ ID NO: 37472 - DNA, 20 bp, Artificial Sequence
  Synthetic oligonucleotide; AGG chr11 5324898 5324917 5324901 -
gttggaaggggcagaatctg

SEQ ID NO: 37473 - DNA, 20 bp, Artificial Sequence
  Synthetic oligonucleotide; AAG chr11 5324882 5324901 5324885 -
tctgaggctgcatgcctaac

SEQ ID NO: 37474 - DNA, 20 bp, Artificial Sequence
  Synthetic oligonucleotide; TAG chr11 5324867 5324886 5324870 -
ctaacaagcccgctgcttgt

SEQ ID NO: 37475 - DNA, 20 bp, Artificial Sequence
  Synthetic oligonucleotide; TAG chr11 5324857 5324876 5324860 -
cgctgcttgttagctgcgtc

SEQ ID NO: 37476 - DNA, 20 bp, Artificial Sequence
  Synthetic oligonucleotide; TGG chr11 5324837 5324856 5324840 -
tagtctgtgatccacaactc

SEQ ID NO: 37477 - DNA, 20 bp, Artificial Sequence
  Synthetic oligonucleotide; TGG chr11 5324834 5324853 5324837 -
tctgtgatccacaactctgg

SEQ ID NO: 37478 - DNA, 20 bp, Artificial Sequence
  Synthetic oligonucleotide; AAG chr11 5324829 5324848 5324832 -
gatccacaactctggtggcc

SEQ ID NO: 37479 - DNA, 20 bp, Artificial Sequence
  Synthetic oligonucleotide; AAG chr11 5324823 5324842 5324826 -
caactctggtggccaagctc

SEQ ID NO: 37480 - DNA, 20 bp, Artificial Sequence
  Synthetic oligonucleotide; TAG chr11 5324813 5324832 5324816 -
ggccaagctcaagtaactgt

SEQ ID NO: 37481 - DNA, 20 bp, Artificial Sequence
  Synthetic oligonucleotide; GAG chr11 5324811 5324830 5324814 -
ccaagctcaagtaactgtta

SEQ ID NO: 37482 - DNA, 20 bp, Artificial Sequence
  Synthetic oligonucleotide; AAG chr11 5324803 5324822 5324806 -
aagtaactgttagagtgaca

SEQ ID NO: 37483 - DNA, 20 bp, Artificial Sequence
  Synthetic oligonucleotide; TGG chr11 5324792 5324811 5324795 -
agagtgacaaagccgttcat

SEQ ID NO: 37484 - DNA, 20 bp, Artificial Sequence
  Synthetic oligonucleotide; TAG chr11 5324789 5324808 5324792 -
gtgacaaagccgttcattgg

SEQ ID NO: 37485 - DNA, 20 bp, Artificial Sequence
  Synthetic oligonucleotide; TGG chr11 5324783 5324802 5324786 -
aagccgttcattggtagtga

SEQ ID NO: 37486 - DNA, 20 bp, Artificial Sequence
  Synthetic oligonucleotide; TAG chr11 5324768 5324787 5324771 -
agtgatggtgatgcacgcta

SEQ ID NO: 37487 - DNA, 20 bp, Artificial Sequence
  Synthetic oligonucleotide; GAG chr11 5324729 5324748 5324732 -
attcaatttccaaaaaaaat

SEQ ID NO: 37488 - DNA, 20 bp, Artificial Sequence
  Synthetic oligonucleotide; TGG chr11 5324653 5324672 5324656 -
ttacaacaatcatttccaaa

SEQ ID NO: 37489 - DNA, 20 bp, Artificial Sequence
  Synthetic oligonucleotide; CAG chr11 5324649 5324668 5324652 -
aacaatcatttccaaatggt

SEQ ID NO: 37490 - DNA, 20 bp, Artificial Sequence
  Synthetic oligonucleotide; CAG chr11 5324640 5324659 5324643 -
ttccaaatggtcagtaatca

SEQ ID NO: 37491 - DNA, 20 bp, Artificial Sequence
  Synthetic oligonucleotide; AAG chr11 5324636 5324655 5324639 -
aaatggtcagtaatcacagc

SEQ ID NO: 37492 - DNA, 20 bp, Artificial Sequence
  Synthetic oligonucleotide; AAG chr11 5324633 5324652 5324636 -
tggtcagtaatcacagcaag

SEQ ID NO: 37493 - DNA, 20 bp, Artificial Sequence
  Synthetic oligonucleotide; AAG chr11 5324624 5324643 5324627 -
atcacagcaagaagacaact

SEQ ID NO: 37494 - DNA, 20 bp, Artificial Sequence
  Synthetic oligonucleotide; CAG chr11 5324620 5324639 5324623 -
cagcaagaagacaactaagc

SEQ ID NO: 37495 - DNA, 20 bp, Artificial Sequence
  Synthetic oligonucleotide; AAG chr11 5324551 5324570 5324554 -
ctgttgttgcaaatatttat

SEQ ID NO: 37496 - DNA, 20 bp, Artificial Sequence
  Synthetic oligonucleotide; TAG chr11 5324537 5324556 5324540 -
atttataagtaccctcaaaa

SEQ ID NO: 37497 - DNA, 20 bp, Artificial Sequence
  Synthetic oligonucleotide; CGG chr11 5324531 5324550 5324534 -
aagtaccctcaaaatagttg

SEQ ID NO: 37498 - DNA, 20 bp, Artificial Sequence
  Synthetic oligonucleotide; GAG chr11 5324491 5324510 5324494 -
aatgaaaaatttttgaattt

SEQ ID NO: 37499 - DNA, 20 bp, Artificial Sequence
  Synthetic oligonucleotide; CAG chr11 5324469 5324488 5324472 -
gaaaaatcgaaccattaact

SEQ ID NO: 37500 - DNA, 20 bp, Artificial Sequence
  Synthetic oligonucleotide; TAG chr11 5324453 5324472 5324456 -
aactcagtattttttctaat

SEQ ID NO: 37501 - DNA, 20 bp, Artificial Sequence
  Synthetic oligonucleotide; AGG chr11 5324452 5324471 5324455 -
actcagtattttttctaatt

SEQ ID NO: 37502 - DNA, 20 bp, Artificial Sequence
  Synthetic oligonucleotide; GGG chr11 5324451 5324470 5324454 -
ctcagtattttttctaatta

SEQ ID NO: 37503 - DNA, 20 bp, Artificial Sequence
  Synthetic oligonucleotide; TAG chr11 5324439 5324458 5324442 -
tctaattagggaaaaaacca

SEQ ID NO: 37504 - DNA, 20 bp, Artificial Sequence
  Synthetic oligonucleotide; CAG chr11 5324415 5324434 5324418 -
ctgtacatgctattcttctt

SEQ ID NO: 37505 - DNA, 20 bp, Artificial Sequence
  Synthetic oligonucleotide; AGG chr11 5324414 5324433 5324417 -
tgtacatgctattcttcttc

SEQ ID NO: 37506 - DNA, 20 bp, Artificial Sequence
  Synthetic oligonucleotide; TAG chr11 5324407 5324426 5324410 -
gctattcttcttcaggaaaa

SEQ ID NO: 37507 - DNA, 20 bp, Artificial Sequence
  Synthetic oligonucleotide; CAG chr11 5324401 5324420 5324404 -
cttcttcaggaaaatagttg

SEQ ID NO: 37508 - DNA, 20 bp, Artificial Sequence
  Synthetic oligonucleotide; GAG chr11 5324399 5324418 5324402 -
tcttcaggaaaatagttgca

SEQ ID NO: 37509 - DNA, 20 bp, Artificial Sequence
  Synthetic oligonucleotide; CAG chr11 5324381 5324400 5324384 -
cagagtcaaatttatcacac

SEQ ID NO: 37510 - DNA, 20 bp, Artificial Sequence
  Synthetic oligonucleotide; AAG chr11 5324366 5324385 5324369 -
cacaccagttaatcatctcc

SEQ ID NO: 37511 - DNA, 20 bp, Artificial Sequence
  Synthetic oligonucleotide; CAG chr11 5324363 5324382 5324366 -
accagttaatcatctccaag

SEQ ID NO: 37512 - DNA, 20 bp, Artificial Sequence
  Synthetic oligonucleotide; AGG chr11 5324362 5324381 5324365 -
ccagttaatcatctccaagc

SEQ ID NO: 37513 - DNA, 20 bp, Artificial Sequence
  Synthetic oligonucleotide; AAG chr11 5324359 5324378 5324362 -
gttaatcatctccaagcagg

SEQ ID NO: 37514 - DNA, 20 bp, Artificial Sequence
  Synthetic oligonucleotide; TGG chr11 5324354 5324373 5324357 -
tcatctccaagcaggaagat

SEQ ID NO: 37515 - DNA, 20 bp, Artificial Sequence
  Synthetic oligonucleotide; GAG chr11 5324352 5324371 5324355 -
atctccaagcaggaagattg

SEQ ID NO: 37516 - DNA, 20 bp, Artificial Sequence
  Synthetic oligonucleotide; AGG chr11 5324351 5324370 5324354 -
tctccaagcaggaagattgg

SEQ ID NO: 37517 - DNA, 20 bp, Artificial Sequence
  Synthetic oligonucleotide; TGG chr11 5324344 5324363 5324347 -
gcaggaagattggaggctcc

SEQ ID NO: 37518 - DNA, 20 bp, Artificial Sequence
  Synthetic oligonucleotide; AAG chr11 5324337 5324356 5324340 -
gattggaggctcctggtttc

SEQ ID NO: 37519 - DNA, 20 bp, Artificial Sequence
  Synthetic oligonucleotide; AGG chr11 5324336 5324355 5324339 -
attggaggctcctggtttca

SEQ ID NO: 37520 - DNA, 20 bp, Artificial Sequence
  Synthetic oligonucleotide; AAG chr11 5324329 5324348 5324332 -
gctcctggtttcaaggtttc

SEQ ID NO: 37521 - DNA, 20 bp, Artificial Sequence
  Synthetic oligonucleotide; CGG chr11 5324311 5324330 5324314 -
tcaagaaatctgatctttac

SEQ ID NO: 37522 - DNA, 20 bp, Artificial Sequence
  Synthetic oligonucleotide; TGG chr11 5324308 5324327 5324311 -
agaaatctgatctttaccgg

SEQ ID NO: 37523 - DNA, 20 bp, Artificial Sequence
  Synthetic oligonucleotide; TGG chr11 5324295 5324314 5324298 -
ttaccggtggatacactatg

SEQ ID NO: 37524 - DNA, 20 bp, Artificial Sequence
  Synthetic oligonucleotide; CAG chr11 5324279 5324298 5324282 -
tatgtggcccaatattactg

SEQ ID NO: 37525 - DNA, 20 bp, Artificial Sequence
  Synthetic oligonucleotide; TGG chr11 5324260 5324279 5324263 -
gcagccccttttttgctgac

SEQ ID NO: 37526 - DNA, 20 bp, Artificial Sequence
  Synthetic oligonucleotide; CAG chr11 5324252 5324271 5324255 -
ttttttgctgactggctttc

SEQ ID NO: 37527 - DNA, 20 bp, Artificial Sequence
  Synthetic oligonucleotide; AGG chr11 5324251 5324270 5324254 -
tttttgctgactggctttcc

SEQ ID NO: 37528 - DNA, 20 bp, Artificial Sequence
  Synthetic oligonucleotide; GGG chr11 5324250 5324269 5324253 -
ttttgctgactggctttcca

SEQ ID NO: 37529 - DNA, 20 bp, Artificial Sequence
  Synthetic oligonucleotide; TGG chr11 5324246 5324265 5324249 -
gctgactggctttccagggc

SEQ ID NO: 37530 - DNA, 20 bp, Artificial Sequence
  Synthetic oligonucleotide; GAG chr11 5324244 5324263 5324247 -
tgactggctttccagggctg

SEQ ID NO: 37531 - DNA, 20 bp, Artificial Sequence
  Synthetic oligonucleotide; AGG chr11 5324243 5324262 5324246 -
gactggctttccagggctgg

SEQ ID NO: 37532 - DNA, 20 bp, Artificial Sequence
  Synthetic oligonucleotide; CAG chr11 5324240 5324259 5324243 -
tggctttccagggctggagg

SEQ ID NO: 37533 - DNA, 20 bp, Artificial Sequence
  Synthetic oligonucleotide; TGG chr11 5324229 5324248 5324232 -
ggctggaggcagctcatcac

SEQ ID NO: 37534 - DNA, 20 bp, Artificial Sequence
  Synthetic oligonucleotide; TGG chr11 5324186 5324205 5324189 -
tgtttatgtgtgcatccttc

SEQ ID NO: 37535 - DNA, 20 bp, Artificial Sequence
  Synthetic oligonucleotide; GGG chr11 5324185 5324204 5324188 -
gtttatgtgtgcatccttct

SEQ ID NO: 37536 - DNA, 20 bp, Artificial Sequence
  Synthetic oligonucleotide; TGG chr11 5324179 5324198 5324182 -
gtgtgcatccttctgggcaa

SEQ ID NO: 37537 - DNA, 20 bp, Artificial Sequence
  Synthetic oligonucleotide; AAG chr11 5324157 5324176 5324160 -
gcatgctcctctacctcatc

SEQ ID NO: 37538 - DNA, 20 bp, Artificial Sequence
  Synthetic oligonucleotide; CAG chr11 5324146 5324165 5324149 -
tacctcatcaagcatgacca

SEQ ID NO: 37539 - DNA, 20 bp, Artificial Sequence
  Synthetic oligonucleotide; GAG chr11 5324136 5324155 5324139 -
agcatgaccacagtcttcat

SEQ ID NO: 37540 - DNA, 20 bp, Artificial Sequence
  Synthetic oligonucleotide; TGG chr11 5324108 5324127 5324111 -
gtactacttcctcaccatgc

SEQ ID NO: 37541 - DNA, 20 bp, Artificial Sequence
  Synthetic oligonucleotide; CAG chr11 5324105 5324124 5324108 -
ctacttcctcaccatgctgg

SEQ ID NO: 37542 - DNA, 20 bp, Artificial Sequence
  Synthetic oligonucleotide; AGG chr11 5324104 5324123 5324107 -
tacttcctcaccatgctggc

SEQ ID NO: 37543 - DNA, 20 bp, Artificial Sequence
  Synthetic oligonucleotide; CAG chr11 5324099 5324118 5324102 -
cctcaccatgctggcaggca

SEQ ID NO: 37544 - DNA, 20 bp, Artificial Sequence
  Synthetic oligonucleotide; TGG chr11 5324090 5324109 5324093 -
gctggcaggcacagacctca

SEQ ID NO: 37545 - DNA, 20 bp, Artificial Sequence
  Synthetic oligonucleotide; TGG chr11 5324060 5324079 5324063 -
gaccacgatgcctactgtaa

SEQ ID NO: 37546 - DNA, 20 bp, Artificial Sequence
  Synthetic oligonucleotide; GGG chr11 5324059 5324078 5324062 -
accacgatgcctactgtaat

SEQ ID NO: 37547 - DNA, 20 bp, Artificial Sequence
  Synthetic oligonucleotide; TGG chr11 5324049 5324068 5324052 -
ctactgtaatgggcatccta

SEQ ID NO: 37548 - DNA, 20 bp, Artificial Sequence
  Synthetic oligonucleotide; GGG chr11 5324048 5324067 5324051 -
tactgtaatgggcatcctat

SEQ ID NO: 37549 - DNA, 20 bp, Artificial Sequence
  Synthetic oligonucleotide; CAG chr11 5324038 5324057 5324041 -
ggcatcctatgggtgaatca

SEQ ID NO: 37550 - DNA, 20 bp, Artificial Sequence
  Synthetic oligonucleotide; AGG chr11 5324037 5324056 5324040 -
gcatcctatgggtgaatcac

SEQ ID NO: 37551 - DNA, 20 bp, Artificial Sequence
  Synthetic oligonucleotide; GGG chr11 5324036 5324055 5324039 -
catcctatgggtgaatcaca

SEQ ID NO: 37552 - DNA, 20 bp, Artificial Sequence
  Synthetic oligonucleotide; GAG chr11 5324034 5324053 5324037 -
tcctatgggtgaatcacagg

SEQ ID NO: 37553 - DNA, 20 bp, Artificial Sequence
  Synthetic oligonucleotide; TAG chr11 5324029 5324048 5324032 -
tgggtgaatcacagggagat

SEQ ID NO: 37554 - DNA, 20 bp, Artificial Sequence
  Synthetic oligonucleotide; CAG chr11 5324026 5324045 5324029 -
gtgaatcacagggagattag

SEQ ID NO: 37555 - DNA, 20 bp, Artificial Sequence
  Synthetic oligonucleotide; TGG chr11 5324021 5324040 5324024 -
tcacagggagattagcagtg

SEQ ID NO: 37556 - DNA, 20 bp, Artificial Sequence
  Synthetic oligonucleotide; GGG chr11 5324020 5324039 5324023 -
cacagggagattagcagtgt

SEQ ID NO: 37557 - DNA, 20 bp, Artificial Sequence
  Synthetic oligonucleotide; CAG chr11 5324007 5324026 5324010 -
gcagtgtgggctgcttccta

SEQ ID NO: 37558 - DNA, 20 bp, Artificial Sequence
  Synthetic oligonucleotide; AGG chr11 5324006 5324025 5324009 -
cagtgtgggctgcttcctac

SEQ ID NO: 37559 - DNA, 20 bp, Artificial Sequence
  Synthetic oligonucleotide; TGG chr11 5323976 5323995 5323979 -
tattcactccctttctgttg

SEQ ID NO: 37560 - DNA, 20 bp, Artificial Sequence
  Synthetic oligonucleotide; CAG chr11 5323970 5323989 5323973 -
ctccctttctgttgtggaat

SEQ ID NO: 37561 - DNA, 20 bp, Artificial Sequence
  Synthetic oligonucleotide; AGG chr11 5323969 5323988 5323972 -
tccctttctgttgtggaatc

SEQ ID NO: 37562 - DNA, 20 bp, Artificial Sequence
  Synthetic oligonucleotide; TGG chr11 5323958 5323977 5323961 -
tgtggaatcaggttccctcc

SEQ ID NO: 37563 - DNA, 20 bp, Artificial Sequence
  Synthetic oligonucleotide; TGG chr11 5323952 5323971 5323955 -
atcaggttccctcctggcaa

SEQ ID NO: 37564 - DNA, 20 bp, Artificial Sequence
  Synthetic oligonucleotide; GAG chr11 5323915 5323934 5323918 -
attgccatccgcaatccttt

SEQ ID NO: 37565 - DNA, 20 bp, Artificial Sequence
  Synthetic oligonucleotide; TAG chr11 5323888 5323907 5323891 -
gcttccattctcaccaatac

SEQ ID NO: 37566 - DNA, 20 bp, Artificial Sequence
  Synthetic oligonucleotide; GAG chr11 5323886 5323905 5323889 -
ttccattctcaccaatacta

SEQ ID NO: 37567 - DNA, 20 bp, Artificial Sequence
  Synthetic oligonucleotide; TAG chr11 5323880 5323899 5323883 -
tctcaccaatactagagtca

SEQ ID NO: 37568 - DNA, 20 bp, Artificial Sequence
  Synthetic oligonucleotide; TAG chr11 5323874 5323893 5323877 -
caatactagagtcatagcgt

SEQ ID NO: 37569 - DNA, 20 bp, Artificial Sequence
  Synthetic oligonucleotide; AGG chr11 5323873 5323892 5323876 -
aatactagagtcatagcgtt

SEQ ID NO: 37570 - DNA, 20 bp, Artificial Sequence
  Synthetic oligonucleotide; GAG chr11 5323871 5323890 5323874 -
tactagagtcatagcgttag

SEQ ID NO: 37571 - DNA, 20 bp, Artificial Sequence
  Synthetic oligonucleotide; TGG chr11 5323868 5323887 5323871 -
tagagtcatagcgttaggag

SEQ ID NO: 37572 - DNA, 20 bp, Artificial Sequence
  Synthetic oligonucleotide; GGG chr11 5323867 5323886 5323870 -
agagtcatagcgttaggagt

SEQ ID NO: 37573 - DNA, 20 bp, Artificial Sequence
  Synthetic oligonucleotide; GAG chr11 5323865 5323884 5323868 -
agtcatagcgttaggagtgg

SEQ ID NO: 37574 - DNA, 20 bp, Artificial Sequence
  Synthetic oligonucleotide; AAG chr11 5323855 5323874 5323858 -
ttaggagtgggagtgtttct

SEQ ID NO: 37575 - DNA, 20 bp, Artificial Sequence
  Synthetic oligonucleotide; AGG chr11 5323854 5323873 5323857 -
taggagtgggagtgtttcta

SEQ ID NO: 37576 - DNA, 20 bp, Artificial Sequence
  Synthetic oligonucleotide; GGG chr11 5323853 5323872 5323856 -
aggagtgggagtgtttctaa

SEQ ID NO: 37577 - DNA, 20 bp, Artificial Sequence
  Synthetic oligonucleotide; GGG chr11 5323852 5323871 5323855 -
ggagtgggagtgtttctaag

SEQ ID NO: 37578 - DNA, 20 bp, Artificial Sequence
  Synthetic oligonucleotide; AAG chr11 5323760 5323779 5323763 -
acgtgctttctgcctccacc

SEQ ID NO: 37579 - DNA, 20 bp, Artificial Sequence
  Synthetic oligonucleotide; GAG chr11 5323750 5323769 5323753 -
tgcctccaccaagaaatcat

SEQ ID NO: 37580 - DNA, 20 bp, Artificial Sequence
  Synthetic oligonucleotide; TGG chr11 5323745 5323764 5323748 -
ccaccaagaaatcatgagac

SEQ ID NO: 37581 - DNA, 20 bp, Artificial Sequence
  Synthetic oligonucleotide; TAG chr11 5323720 5323739 5323723 -
tgtgctgacataactttcaa

SEQ ID NO: 37582 - DNA, 20 bp, Artificial Sequence
  Synthetic oligonucleotide; TAG chr11 5323679 5323698 5323682 -
gatctctttaacaatcttcc

SEQ ID NO: 37583 - DNA, 20 bp, Artificial Sequence
  Synthetic oligonucleotide; TAG chr11 5323628 5323647 5323631 -
tctaattcttaatactgtca

SEQ ID NO: 37584 - DNA, 20 bp, Artificial Sequence
  Synthetic oligonucleotide; AGG chr11 5323627 5323646 5323630 -
ctaattcttaatactgtcat

SEQ ID NO: 37585 - DNA, 20 bp, Artificial Sequence
  Synthetic oligonucleotide; TGG chr11 5323615 5323634 5323618 -
actgtcataggcattgcttc

SEQ ID NO: 37586 - DNA, 20 bp, Artificial Sequence
  Synthetic oligonucleotide; AAG chr11 5323610 5323629 5323613 -
cataggcattgcttctggtg

SEQ ID NO: 37587 - DNA, 20 bp, Artificial Sequence
  Synthetic oligonucleotide; GAG chr11 5323608 5323627 5323611 -
taggcattgcttctggtgaa

SEQ ID NO: 37588 - DNA, 20 bp, Artificial Sequence
  Synthetic oligonucleotide; GAG chr11 5323606 5323625 5323609 -
ggcattgcttctggtgaaga

SEQ ID NO: 37589 - DNA, 20 bp, Artificial Sequence
  Synthetic oligonucleotide; GAG chr11 5323604 5323623 5323607 -
cattgcttctggtgaagaga

SEQ ID NO: 37590 - DNA, 20 bp, Artificial Sequence
  Synthetic oligonucleotide; AAG chr11 5323598 5323617 5323601 -
ttctggtgaagagagagcca

SEQ ID NO: 37591 - DNA, 20 bp, Artificial Sequence
  Synthetic oligonucleotide; TAG chr11 5323570 5323589 5323573 -
aatacctgtatctcccacat

SEQ ID NO: 37592 - DNA, 20 bp, Artificial Sequence
  Synthetic oligonucleotide; CAG chr11 5323544 5323563 5323547 -
tgttcttatcttctatgtta

SEQ ID NO: 37593 - DNA, 20 bp, Artificial Sequence
  Synthetic oligonucleotide; TGG chr11 5323538 5323557 5323541 -
tatcttctatgttacagtga

SEQ ID NO: 37594 - DNA, 20 bp, Artificial Sequence
  Synthetic oligonucleotide; GGG chr11 5323537 5323556 5323540 -
atcttctatgttacagtgat

SEQ ID NO: 37595 - DNA, 20 bp, Artificial Sequence
  Synthetic oligonucleotide; CAG chr11 5323519 5323538 5323522 -
atgggtttgacattcattta

SEQ ID NO: 37596 - DNA, 20 bp, Artificial Sequence
  Synthetic oligonucleotide; TGG chr11 5323513 5323532 5323516 -
ttgacattcatttacagatt

SEQ ID NO: 37597 - DNA, 20 bp, Artificial Sequence
  Synthetic oligonucleotide; GGG chr11 5323512 5323531 5323515 -
tgacattcatttacagattt

SEQ ID NO: 37598 - DNA, 20 bp, Artificial Sequence
  Synthetic oligonucleotide; AAG chr11 5323509 5323528 5323512 -
cattcatttacagatttggg

SEQ ID NO: 37599 - DNA, 20 bp, Artificial Sequence
  Synthetic oligonucleotide; CAG chr11 5323499 5323518 5323502 -
cagatttgggaagaatgtgc

SEQ ID NO: 37600 - DNA, 20 bp, Artificial Sequence
  Synthetic oligonucleotide; GAG chr11 5323497 5323516 5323500 -
gatttgggaagaatgtgcca

SEQ ID NO: 37601 - DNA, 20 bp, Artificial Sequence
  Synthetic oligonucleotide; AGG chr11 5323496 5323515 5323499 -
atttgggaagaatgtgccag

SEQ ID NO: 37602 - DNA, 20 bp, Artificial Sequence
  Synthetic oligonucleotide; GAG chr11 5323477 5323496 5323480 -
gaggttgtccacattatcat

SEQ ID NO: 37603 - DNA, 20 bp, Artificial Sequence
  Synthetic oligonucleotide; CAG chr11 5323429 5323448 5323432 -
ttaatgaaccctgtcatcta

SEQ ID NO: 37604 - DNA, 20 bp, Artificial Sequence
  Synthetic oligonucleotide; AAG chr11 5323416 5323435 5323419 -
tcatctacagcatcaaaacc

SEQ ID NO: 37605 - DNA, 20 bp, Artificial Sequence
  Synthetic oligonucleotide; TGG chr11 5323402 5323421 5323405 -
aaaaccaagcaaatacaata

SEQ ID NO: 37606 - DNA, 20 bp, Artificial Sequence
  Synthetic oligonucleotide; TAG chr11 5323375 5323394 5323378 -
atccgccttttatctaaaca

SEQ ID NO: 37607 - DNA, 20 bp, Artificial Sequence
  Synthetic oligonucleotide; AGG chr11 5323374 5323393 5323377 -
tccgccttttatctaaacat

SEQ ID NO: 37608 - DNA, 20 bp, Artificial Sequence
  Synthetic oligonucleotide; TAG chr11 5323369 5323388 5323372 -
cttttatctaaacataggtt

SEQ ID NO: 37609 - DNA, 20 bp, Artificial Sequence
  Synthetic oligonucleotide; TAG chr11 5323366 5323385 5323369 -
ttatctaaacataggtttag

SEQ ID NO: 37610 - DNA, 20 bp, Artificial Sequence
  Synthetic oligonucleotide; CGG chr11 5323356 5323375 5323359 -
ataggtttagtagttaaact

SEQ ID NO: 37611 - DNA, 20 bp, Artificial Sequence
  Synthetic oligonucleotide; TGG chr11 5323350 5323369 5323353 -
ttagtagttaaactcggatc

SEQ ID NO: 37612 - DNA, 20 bp, Artificial Sequence
  Synthetic oligonucleotide; GAG chr11 5323348 5323367 5323351 -
agtagttaaactcggatctg

SEQ ID NO: 37613 - DNA, 20 bp, Artificial Sequence
  Synthetic oligonucleotide; CAG chr11 5323342 5323361 5323345 -
taaactcggatctggagaat

SEQ ID NO: 37614 - DNA, 20 bp, Artificial Sequence
  Synthetic oligonucleotide; CAG chr11 5323336 5323355 5323339 -
cggatctggagaatcagaca

SEQ ID NO: 37615 - DNA, 20 bp, Artificial Sequence
  Synthetic oligonucleotide; AAG chr11 5323322 5323341 5323325 -
cagacacagacataaaaatg

SEQ ID NO: 37616 - DNA, 20 bp, Artificial Sequence
  Synthetic oligonucleotide; CAG chr11 5323318 5323337 5323321 -
cacagacataaaaatgaagc

SEQ ID NO: 37617 - DNA, 20 bp, Artificial Sequence
  Synthetic oligonucleotide; AAG chr11 5323303 5323322 5323306 -
gaagccagaatgaaaaatga

SEQ ID NO: 37618 - DNA, 20 bp, Artificial Sequence
  Synthetic oligonucleotide; TGG chr11 5323298 5323317 5323301 -
cagaatgaaaaatgaaagcc

SEQ ID NO: 37619 - DNA, 20 bp, Artificial Sequence
  Synthetic oligonucleotide; GAG chr11 5323296 5323315 5323299 -
gaatgaaaaatgaaagcctg

SEQ ID NO: 37620 - DNA, 20 bp, Artificial Sequence
  Synthetic oligonucleotide; TAG chr11 5323285 5323304 5323288 -
gaaagcctggagttctttct

SEQ ID NO: 37621 - DNA, 20 bp, Artificial Sequence
  Synthetic oligonucleotide; AAG chr11 5323280 5323299 5323283 -
cctggagttctttcttagca

SEQ ID NO: 37622 - DNA, 20 bp, Artificial Sequence
  Synthetic oligonucleotide; GAG chr11 5323278 5323297 5323281 -
tggagttctttcttagcaaa

SEQ ID NO: 37623 - DNA, 20 bp, Artificial Sequence
  Synthetic oligonucleotide; AAG chr11 5323274 5323293 5323277 -
gttctttcttagcaaagagc

SEQ ID NO: 37624 - DNA, 20 bp, Artificial Sequence
  Synthetic oligonucleotide; AGG chr11 5323273 5323292 5323276 -
ttctttcttagcaaagagca

SEQ ID NO: 37625 - DNA, 20 bp, Artificial Sequence
  Synthetic oligonucleotide; GGG chr11 5323272 5323291 5323275 -
tctttcttagcaaagagcaa

SEQ ID NO: 37626 - DNA, 20 bp, Artificial Sequence
  Synthetic oligonucleotide; TGG chr11 5323264 5323283 5323267 -
agcaaagagcaagggtatac

SEQ ID NO: 37627 - DNA, 20 bp, Artificial Sequence
  Synthetic oligonucleotide; AAG chr11 5323261 5323280 5323264 -
aaagagcaagggtatactgg

SEQ ID NO: 37628 - DNA, 20 bp, Artificial Sequence
  Synthetic oligonucleotide; AAG chr11 5323241 5323260 5323244 -
aagacaatgttgtcactcac

SEQ ID NO: 37629 - DNA, 20 bp, Artificial Sequence
  Synthetic oligonucleotide; AGG chr11 5323240 5323259 5323243 -
agacaatgttgtcactcaca

SEQ ID NO: 37630 - DNA, 20 bp, Artificial Sequence
  Synthetic oligonucleotide; AAG chr11 5323233 5323252 5323236 -
gttgtcactcacaaggactt

SEQ ID NO: 37631 - DNA, 20 bp, Artificial Sequence
  Synthetic oligonucleotide; TAG chr11 5323220 5323239 5323223 -
aggacttaagtactttacca

SEQ ID NO: 37632 - DNA, 20 bp, Artificial Sequence
  Synthetic oligonucleotide; AGG chr11 5323219 5323238 5323222 -
ggacttaagtactttaccat

SEQ ID NO: 37633 - DNA, 20 bp, Artificial Sequence
  Synthetic oligonucleotide; GGG chr11 5323218 5323237 5323221 -
gacttaagtactttaccata

SEQ ID NO: 37634 - DNA, 20 bp, Artificial Sequence
  Synthetic oligonucleotide; TGG chr11 5323214 5323233 5323217 -
taagtactttaccatagggt

SEQ ID NO: 37635 - DNA, 20 bp, Artificial Sequence
  Synthetic oligonucleotide; GGG chr11 5323213 5323232 5323216 -
aagtactttaccatagggtt

SEQ ID NO: 37636 - DNA, 20 bp, Artificial Sequence
  Synthetic oligonucleotide; GGG chr11 5323212 5323231 5323215 -
agtactttaccatagggttg

SEQ ID NO: 37637 - DNA, 20 bp, Artificial Sequence
  Synthetic oligonucleotide; GGG chr11 5323211 5323230 5323214 -
gtactttaccatagggttgg

SEQ ID NO: 37638 - DNA, 20 bp, Artificial Sequence
  Synthetic oligonucleotide; TAG chr11 5323201 5323220 5323204 -
atagggttgggggcatatct

SEQ ID NO: 37639 - DNA, 20 bp, Artificial Sequence
  Synthetic oligonucleotide; AGG chr11 5323200 5323219 5323203 -
tagggttgggggcatatctt

SEQ ID NO: 37640 - DNA, 20 bp, Artificial Sequence
  Synthetic oligonucleotide; GAG chr11 5323198 5323217 5323201 -
gggttgggggcatatcttag

SEQ ID NO: 37641 - DNA, 20 bp, Artificial Sequence
  Synthetic oligonucleotide; AAG chr11 5323195 5323214 5323198 -
ttgggggcatatcttaggag

SEQ ID NO: 37642 - DNA, 20 bp, Artificial Sequence
  Synthetic oligonucleotide; TGG chr11 5323190 5323209 5323193 -
ggcatatcttaggagaagtc

SEQ ID NO: 37643 - DNA, 20 bp, Artificial Sequence
  Synthetic oligonucleotide; CAG chr11 5323184 5323203 5323187 -
tcttaggagaagtctggtga

SEQ ID NO: 37644 - DNA, 20 bp, Artificial Sequence
  Synthetic oligonucleotide; TAG chr11 5323172 5323191 5323175 -
tctggtgacagaacactgaa

SEQ ID NO: 37645 - DNA, 20 bp, Artificial Sequence
  Synthetic oligonucleotide; TGG chr11 5323163 5323182 5323166 -
agaacactgaatagaccata

SEQ ID NO: 37646 - DNA, 20 bp, Artificial Sequence
  Synthetic oligonucleotide; AAG chr11 5323152 5323171 5323155 -
tagaccatatggaactgaaa

SEQ ID NO: 37647 - DNA, 20 bp, Artificial Sequence
  Synthetic oligonucleotide; TAG chr11 5323112 5323131 5323115 -
ctttcaaatgcacctgaaat

SEQ ID NO: 37648 - DNA, 20 bp, Artificial Sequence
  Synthetic oligonucleotide; CAG chr11 5323103 5323122 5323106 -
gcacctgaaattagccacct

SEQ ID NO: 37649 - DNA, 20 bp, Artificial Sequence
  Synthetic oligonucleotide; GAG chr11 5323092 5323111 5323095 -
tagccacctcagtgaaattt

SEQ ID NO: 37650 - DNA, 20 bp, Artificial Sequence
  Synthetic oligonucleotide; AGG chr11 5323091 5323110 5323094 -
agccacctcagtgaaatttg

SEQ ID NO: 37651 - DNA, 20 bp, Artificial Sequence
  Synthetic oligonucleotide; AAG chr11 5323086 5323105 5323089 -
cctcagtgaaatttgaggaa

SEQ ID NO: 37652 - DNA, 20 bp, Artificial Sequence
  Synthetic oligonucleotide; AGG chr11 5323085 5323104 5323088 -
ctcagtgaaatttgaggaaa

SEQ ID NO: 37653 - DNA, 20 bp, Artificial Sequence
  Synthetic oligonucleotide; CAG chr11 5323082 5323101 5323085 -
agtgaaatttgaggaaaagg

SEQ ID NO: 37654 - DNA, 20 bp, Artificial Sequence
  Synthetic oligonucleotide; CAG chr11 5323048 5323067 5323051 -
tctatgaaaaacttttgcct

SEQ ID NO: 37655 - DNA, 20 bp, Artificial Sequence
  Synthetic oligonucleotide; TAG chr11 5323009 5323028 5323012 -
tacatgtttatgtgtttgca

SEQ ID NO: 37656 - DNA, 20 bp, Artificial Sequence
  Synthetic oligonucleotide; AGG chr11 5323008 5323027 5323011 -
acatgtttatgtgtttgcat

SEQ ID NO: 37657 - DNA, 20 bp, Artificial Sequence
  Synthetic oligonucleotide; AAG chr11 5322994 5323013 5322997 -
ttgcataggctaatgcacac

SEQ ID NO: 37658 - DNA, 20 bp, Artificial Sequence
  Synthetic oligonucleotide; AAG chr11 5322980 5322999 5322983 -
gcacacaagtgtaaaaaaaa

SEQ ID NO: 37659 - DNA, 20 bp, Artificial Sequence
  Synthetic oligonucleotide; TAG chr11 5322962 5322981 5322965 -
aaaagttgatcatcattctc

SEQ ID NO: 37660 - DNA, 20 bp, Artificial Sequence
  Synthetic oligonucleotide; TGG chr11 5322924 5322943 5322927 -
taaaattttcattattctca

SEQ ID NO: 37661 - DNA, 20 bp, Artificial Sequence
  Synthetic oligonucleotide; TAG chr11 5322915 5322934 5322918 -
cattattctcatggcaaata

SEQ ID NO: 37662 - DNA, 20 bp, Artificial Sequence
  Synthetic oligonucleotide; AAG chr11 5322908 5322927 5322911 -
ctcatggcaaatatagtgat

SEQ ID NO: 37663 - DNA, 20 bp, Artificial Sequence
  Synthetic oligonucleotide; AAG chr11 5322876 5322895 5322879 -
ttttaaatttacttttaaat

SEQ ID NO: 37664 - DNA, 20 bp, Artificial Sequence
  Synthetic oligonucleotide; AAG chr11 5322872 5322891 5322875 -
aaatttacttttaaataagt

SEQ ID NO: 37665 - DNA, 20 bp, Artificial Sequence
  Synthetic oligonucleotide; TGG chr11 5322866 5322885 5322869 -
acttttaaataagtaagtgt

SEQ ID NO: 37666 - DNA, 20 bp, Artificial Sequence
  Synthetic oligonucleotide; GAG chr11 5322838 5322857 5322841 -
ttttaactgtcctctaccct

SEQ ID NO: 37667 - DNA, 20 bp, Artificial Sequence
  Synthetic oligonucleotide; TAG chr11 5322834 5322853 5322837 -
aactgtcctctaccctgagt

SEQ ID NO: 37668 - DNA, 20 bp, Artificial Sequence
  Synthetic oligonucleotide; AGG chr11 5322833 5322852 5322836 -
actgtcctctaccctgagtt

SEQ ID NO: 37669 - DNA, 20 bp, Artificial Sequence
  Synthetic oligonucleotide; GGG chr11 5322832 5322851 5322835 -
ctgtcctctaccctgagtta

SEQ ID NO: 37670 - DNA, 20 bp, Artificial Sequence
  Synthetic oligonucleotide; TAG chr11 5322822 5322841 5322825 -
ccctgagttagggtactctc

SEQ ID NO: 37671 - DNA, 20 bp, Artificial Sequence
  Synthetic oligonucleotide; AGG chr11 5322821 5322840 5322824 -
cctgagttagggtactctct

SEQ ID NO: 37672 - DNA, 20 bp, Artificial Sequence
  Synthetic oligonucleotide; GGG chr11 5322820 5322839 5322823 -
ctgagttagggtactctcta

SEQ ID NO: 37673 - DNA, 20 bp, Artificial Sequence
  Synthetic oligonucleotide; CAG chr11 5322787 5322806 5322790 -
catttaatattttctaaata

SEQ ID NO: 37674 - DNA, 20 bp, Artificial Sequence
  Synthetic oligonucleotide; AAG chr11 5322780 5322799 5322783 -
tattttctaaatacagtcgt

SEQ ID NO: 37675 - DNA, 20 bp, Artificial Sequence
  Synthetic oligonucleotide; CAG chr11 5322770 5322789 5322773 -
atacagtcgtaagtcactta

SEQ ID NO: 37676 - DNA, 20 bp, Artificial Sequence
  Synthetic oligonucleotide; GAG chr11 5322768 5322787 5322771 -
acagtcgtaagtcacttaca

SEQ ID NO: 37677 - DNA, 20 bp, Artificial Sequence
  Synthetic oligonucleotide; AAG chr11 5322756 5322775 5322759 -
cacttacagagtatttcaat

SEQ ID NO: 37678 - DNA, 20 bp, Artificial Sequence
  Synthetic oligonucleotide; GAG chr11 5322754 5322773 5322757 -
cttacagagtatttcaataa

SEQ ID NO: 37679 - DNA, 20 bp, Artificial Sequence
  Synthetic oligonucleotide; CAG chr11 5322725 5322744 5322728 -
aattttcaatacattccttg

SEQ ID NO: 37680 - DNA, 20 bp, Artificial Sequence
  Synthetic oligonucleotide; AGG chr11 5322724 5322743 5322727 -
attttcaatacattccttgc

SEQ ID NO: 37681 - DNA, 20 bp, Artificial Sequence
  Synthetic oligonucleotide; TGG chr11 5322716 5322735 5322719 -
tacattccttgcaggatgtc

SEQ ID NO: 37682 - DNA, 20 bp, Artificial Sequence
  Synthetic oligonucleotide; AAG chr11 5322704 5322723 5322707 -
aggatgtctggattttataa

SEQ ID NO: 37683 - DNA, 20 bp, Artificial Sequence
  Synthetic oligonucleotide; TAG chr11 5322649 5322668 5322652 -
tcttttgcccaaaaaaatct

SEQ ID NO: 37684 - DNA, 20 bp, Artificial Sequence
  Synthetic oligonucleotide; AAG chr11 5322646 5322665 5322649 -
tttgcccaaaaaaatcttag

SEQ ID NO: 37685 - DNA, 20 bp, Artificial Sequence
  Synthetic oligonucleotide; AGG chr11 5322645 5322664 5322648 -
ttgcccaaaaaaatcttaga

SEQ ID NO: 37686 - DNA, 20 bp, Artificial Sequence
  Synthetic oligonucleotide; TAG chr11 5322635 5322654 5322638 -
aaatcttagaaggaaaaacc

SEQ ID NO: 37687 - DNA, 20 bp, Artificial Sequence
  Synthetic oligonucleotide; AAG chr11 5322630 5322649 5322633 -
ttagaaggaaaaacctagac

SEQ ID NO: 37688 - DNA, 20 bp, Artificial Sequence
  Synthetic oligonucleotide; CAG chr11 5322619 5322638 5322622 -
aacctagacaagcttcttgt

SEQ ID NO: 37689 - DNA, 20 bp, Artificial Sequence
  Synthetic oligonucleotide; AAG chr11 5322607 5322626 5322610 -
cttcttgtcagctcgtaaaa

SEQ ID NO: 37690 - DNA, 20 bp, Artificial Sequence
  Synthetic oligonucleotide; AAG chr11 5322600 5322619 5322603 -
tcagctcgtaaaaaagtaaa

SEQ ID NO: 37691 - DNA, 20 bp, Artificial Sequence
  Synthetic oligonucleotide; GAG chr11 5322596 5322615 5322599 -
ctcgtaaaaaagtaaaaagt

SEQ ID NO: 37692 - DNA, 20 bp, Artificial Sequence
  Synthetic oligonucleotide; AAG chr11 5322588 5322607 5322591 -
aaagtaaaaagtgagttttt

SEQ ID NO: 37693 - DNA, 20 bp, Artificial Sequence
  Synthetic oligonucleotide; GAG chr11 5322586 5322605 5322589 -
agtaaaaagtgagtttttaa

SEQ ID NO: 37694 - DNA, 20 bp, Artificial Sequence
  Synthetic oligonucleotide; CAG chr11 5322570 5322589 5322573 -
ttaagagtatgtttgctctt

SEQ ID NO: 37695 - DNA, 20 bp, Artificial Sequence
  Synthetic oligonucleotide; TGG chr11 5322544 5322563 5322547 -
attttaacatacttttccct

SEQ ID NO: 37696 - DNA, 20 bp, Artificial Sequence
  Synthetic oligonucleotide; TAG chr11 5322533 5322552 5322536 -
cttttcccttggcctaataa

SEQ ID NO: 37697 - DNA, 20 bp, Artificial Sequence
  Synthetic oligonucleotide; AGG chr11 5322532 5322551 5322535 -
ttttcccttggcctaataat

SEQ ID NO: 37698 - DNA, 20 bp, Artificial Sequence
  Synthetic oligonucleotide; AAG chr11 5322529 5322548 5322532 -
tcccttggcctaataatagg

SEQ ID NO: 37699 - DNA, 20 bp, Artificial Sequence
  Synthetic oligonucleotide; AGG chr11 5322528 5322547 5322531 -
cccttggcctaataatagga

SEQ ID NO: 37700 - DNA, 20 bp, Artificial Sequence
  Synthetic oligonucleotide; GGG chr11 5322527 5322546 5322530 -
ccttggcctaataataggaa

SEQ ID NO: 37701 - DNA, 20 bp, Artificial Sequence
  Synthetic oligonucleotide; AAG chr11 5322522 5322541 5322525 -
gcctaataataggaagggtc

SEQ ID NO: 37702 - DNA, 20 bp, Artificial Sequence
  Synthetic oligonucleotide; AGG chr11 5322521 5322540 5322524 -
cctaataataggaagggtca

SEQ ID NO: 37703 - DNA, 20 bp, Artificial Sequence
  Synthetic oligonucleotide; TAG chr11 5322505 5322524 5322508 -
gtcaaggctctattcaaaaa

SEQ ID NO: 37704 - DNA, 20 bp, Artificial Sequence
  Synthetic oligonucleotide; TAG chr11 5322496 5322515 5322499 -
ctattcaaaaatagaaaata

SEQ ID NO: 37705 - DNA, 20 bp, Artificial Sequence
  Synthetic oligonucleotide; TAG chr11 5322487 5322506 5322490 -
aatagaaaatatagccattc

SEQ ID NO: 37706 - DNA, 20 bp, Artificial Sequence
  Synthetic oligonucleotide; GAG chr11 5322472 5322491 5322475 -
cattctagaatgaaaaatat

SEQ ID NO: 37707 - DNA, 20 bp, Artificial Sequence
  Synthetic oligonucleotide; AAG chr11 5322454 5322473 5322457 -
atgagacatcattacttcac

SEQ ID NO: 37708 - DNA, 20 bp, Artificial Sequence
  Synthetic oligonucleotide; CAG chr11 5322429 5322448 5322432 -
atatatactttatatatgtt

SEQ ID NO: 37709 - DNA, 20 bp, Artificial Sequence
  Synthetic oligonucleotide; GAG chr11 5322427 5322446 5322430 -
atatactttatatatgttca

SEQ ID NO: 37710 - DNA, 20 bp, Artificial Sequence
  Synthetic oligonucleotide; AGG chr11 5322426 5322445 5322429 -
tatactttatatatgttcag

SEQ ID NO: 37711 - DNA, 20 bp, Artificial Sequence
  Synthetic oligonucleotide; GGG chr11 5322425 5322444 5322428 -
atactttatatatgttcaga

SEQ ID NO: 37712 - DNA, 20 bp, Artificial Sequence
  Synthetic oligonucleotide; TAG chr11 5322416 5322435 5322419 -
atatgttcagagggaaaaat

SEQ ID NO: 37713 - DNA, 20 bp, Artificial Sequence
  Synthetic oligonucleotide; TGG chr11 5322410 5322429 5322413 -
tcagagggaaaaattagaaa

SEQ ID NO: 37714 - DNA, 20 bp, Artificial Sequence
  Synthetic oligonucleotide; TAG chr11 5322354 5322373 5322357 -
ctactgtaaactctctatat

SEQ ID NO: 37715 - DNA, 20 bp, Artificial Sequence
  Synthetic oligonucleotide; AGG chr11 5322353 5322372 5322356 -
tactgtaaactctctatatt

SEQ ID NO: 37716 - DNA, 20 bp, Artificial Sequence
  Synthetic oligonucleotide; AAG chr11 5322350 5322369 5322353 -
tgtaaactctctatattagg

SEQ ID NO: 37717 - DNA, 20 bp, Artificial Sequence
  Synthetic oligonucleotide; GAG chr11 5322335 5322354 5322338 -
ttaggaagaccaacaatgtt

SEQ ID NO: 37718 - DNA, 20 bp, Artificial Sequence
  Synthetic oligonucleotide; GAG chr11 5322333 5322352 5322336 -
aggaagaccaacaatgttga

SEQ ID NO: 37719 - DNA, 20 bp, Artificial Sequence
  Synthetic oligonucleotide; TGG chr11 5322327 5322346 5322330 -
accaacaatgttgagagaaa

SEQ ID NO: 37720 - DNA, 20 bp, Artificial Sequence
  Synthetic oligonucleotide; TGG chr11 5322294 5322313 5322297 -
atccaatgactaaaaaattg

SEQ ID NO: 37721 - DNA, 20 bp, Artificial Sequence
  Synthetic oligonucleotide; TGG chr11 5322291 5322310 5322294 -
caatgactaaaaaattgtgg

SEQ ID NO: 37722 - DNA, 20 bp, Artificial Sequence
  Synthetic oligonucleotide; GGG chr11 5322290 5322309 5322293 -
aatgactaaaaaattgtggt

SEQ ID NO: 37723 - DNA, 20 bp, Artificial Sequence
  Synthetic oligonucleotide; GAG chr11 5322288 5322307 5322291 -
tgactaaaaaattgtggtgg

SEQ ID NO: 37724 - DNA, 20 bp, Artificial Sequence
  Synthetic oligonucleotide; AGG chr11 5322287 5322306 5322290 -
gactaaaaaattgtggtggg

SEQ ID NO: 37725 - DNA, 20 bp, Artificial Sequence
  Synthetic oligonucleotide; GAG chr11 5322285 5322304 5322288 -
ctaaaaaattgtggtgggag

SEQ ID NO: 37726 - DNA, 20 bp, Artificial Sequence
  Synthetic oligonucleotide; AAG chr11 5322260 5322279 5322263 -
tttgtgtgactgtgtactaa

SEQ ID NO: 37727 - DNA, 20 bp, Artificial Sequence
  Synthetic oligonucleotide; TAG chr11 5322250 5322269 5322253 -
tgtgtactaaaagcttcttt

SEQ ID NO: 37728 - DNA, 20 bp, Artificial Sequence
  Synthetic oligonucleotide; CAG chr11 5322229 5322248 5322232 -
agactgatttaattgtgaaa

SEQ ID NO: 37729 - DNA, 20 bp, Artificial Sequence
  Synthetic oligonucleotide; AGG chr11 5322228 5322247 5322231 -
gactgatttaattgtgaaac

SEQ ID NO: 37730 - DNA, 20 bp, Artificial Sequence
  Synthetic oligonucleotide; AAG chr11 5322204 5322223 5322207 -
ttttcatccacaaatttcaa

SEQ ID NO: 37731 - DNA, 20 bp, Artificial Sequence
  Synthetic oligonucleotide; AGG chr11 5322203 5322222 5322206 -
tttcatccacaaatttcaaa

SEQ ID NO: 37732 - DNA, 20 bp, Artificial Sequence
  Synthetic oligonucleotide; GGG chr11 5322202 5322221 5322205 -
ttcatccacaaatttcaaaa

SEQ ID NO: 37733 - DNA, 20 bp, Artificial Sequence
  Synthetic oligonucleotide; GGG chr11 5322201 5322220 5322204 -
tcatccacaaatttcaaaag

SEQ ID NO: 37734 - DNA, 20 bp, Artificial Sequence
  Synthetic oligonucleotide; CAG chr11 5322187 5322206 5322190 -
caaaaggggaaaacctatct

SEQ ID NO: 37735 - DNA, 20 bp, Artificial Sequence
  Synthetic oligonucleotide; GAG chr11 5322185 5322204 5322188 -
aaaggggaaaacctatctca

SEQ ID NO: 37736 - DNA, 20 bp, Artificial Sequence
  Synthetic oligonucleotide; AAG chr11 5322172 5322191 5322175 -
tatctcagagtataatgttc

SEQ ID NO: 37737 - DNA, 20 bp, Artificial Sequence
  Synthetic oligonucleotide; AAG chr11 5322137 5322156 5322140 -
aatataaactcaaatcctaa

SEQ ID NO: 37738 - DNA, 20 bp, Artificial Sequence
  Synthetic oligonucleotide; CAG chr11 5322133 5322152 5322136 -
taaactcaaatcctaaaagt

SEQ ID NO: 37739 - DNA, 20 bp, Artificial Sequence
  Synthetic oligonucleotide; AAG chr11 5322120 5322139 5322123 -
taaaagtcagttatctacca

SEQ ID NO: 37740 - DNA, 20 bp, Artificial Sequence
  Synthetic oligonucleotide; GAG chr11 5322089 5322108 5322092 -
tgttccttatatgtgaccat

SEQ ID NO: 37741 - DNA, 20 bp, Artificial Sequence
  Synthetic oligonucleotide; AGG chr11 5322088 5322107 5322091 -
gttccttatatgtgaccatg

SEQ ID NO: 37742 - DNA, 20 bp, Artificial Sequence
  Synthetic oligonucleotide; TAG chr11 5322072 5322091 5322075 -
catgaggtctataatacatc

SEQ ID NO: 37743 - DNA, 20 bp, Artificial Sequence
  Synthetic oligonucleotide; AGG chr11 5322071 5322090 5322074 -
atgaggtctataatacatct

SEQ ID NO: 37744 - DNA, 20 bp, Artificial Sequence
  Synthetic oligonucleotide; TGG chr11 5322060 5322079 5322063 -
aatacatctaggcatcttaa

SEQ ID NO: 37745 - DNA, 20 bp, Artificial Sequence
  Synthetic oligonucleotide; CGG chr11 5322044 5322063 5322047 -
ttaatggaaaaatctcattt

SEQ ID NO: 37746 - DNA, 20 bp, Artificial Sequence
  Synthetic oligonucleotide; CAG chr11 5322010 5322029 5322013 -
cttgatttgctatcttgatg

SEQ ID NO: 37747 - DNA, 20 bp, Artificial Sequence
  Synthetic oligonucleotide; TAG chr11 5321998 5322017 5322001 -
tcttgatgcagaacctcttg

SEQ ID NO: 37748 - DNA, 20 bp, Artificial Sequence
  Synthetic oligonucleotide; GAG chr11 5321993 5322012 5321996 -
atgcagaacctcttgtagct

SEQ ID NO: 37749 - DNA, 20 bp, Artificial Sequence
  Synthetic oligonucleotide; AGG chr11 5321992 5322011 5321995 -
tgcagaacctcttgtagctg

SEQ ID NO: 37750 - DNA, 20 bp, Artificial Sequence
  Synthetic oligonucleotide; AAG chr11 5321988 5322007 5321991 -
gaacctcttgtagctgagga

SEQ ID NO: 37751 - DNA, 20 bp, Artificial Sequence
  Synthetic oligonucleotide; TAG chr11 5321962 5321981 5321965 -
gcctttgtttcccatctttg

SEQ ID NO: 37752 - DNA, 20 bp, Artificial Sequence
  Synthetic oligonucleotide; CAG chr11 5321957 5321976 5321960 -
tgtttcccatctttgtagaa

SEQ ID NO: 37753 - DNA, 20 bp, Artificial Sequence
  Synthetic oligonucleotide; AAG chr11 5321954 5321973 5321957 -
ttcccatctttgtagaacag

SEQ ID NO: 37754 - DNA, 20 bp, Artificial Sequence
  Synthetic oligonucleotide; TGG chr11 5321948 5321967 5321951 -
tctttgtagaacagaagctg

SEQ ID NO: 37755 - DNA, 20 bp, Artificial Sequence
  Synthetic oligonucleotide; GGG chr11 5321947 5321966 5321950 -
ctttgtagaacagaagctgt

SEQ ID NO: 37756 - DNA, 20 bp, Artificial Sequence
  Synthetic oligonucleotide; AAG chr11 5321937 5321956 5321940 -
cagaagctgtgggacatcac

SEQ ID NO: 37757 - DNA, 20 bp, Artificial Sequence
  Synthetic oligonucleotide; TGG chr11 5321928 5321947 5321931 -
tgggacatcacaagttgctg

SEQ ID NO: 37758 - DNA, 20 bp, Artificial Sequence
  Synthetic oligonucleotide; AAG chr11 5321918 5321937 5321921 -
caagttgctgtggtaatcac

SEQ ID NO: 37759 - DNA, 20 bp, Artificial Sequence
  Synthetic oligonucleotide; GAG chr11 5321876 5321895 5321879 -
ccatctgatatctaaatttt

SEQ ID NO: 37760 - DNA, 20 bp, Artificial Sequence
  Synthetic oligonucleotide; AGG chr11 5321875 5321894 5321878 -
catctgatatctaaattttg

SEQ ID NO: 37761 - DNA, 20 bp, Artificial Sequence
  Synthetic oligonucleotide; TAG chr11 5321871 5321890 5321874 -
tgatatctaaattttgagga

SEQ ID NO: 37762 - DNA, 20 bp, Artificial Sequence
  Synthetic oligonucleotide; AGG chr11 5321870 5321889 5321873 -
gatatctaaattttgaggat

SEQ ID NO: 37763 - DNA, 20 bp, Artificial Sequence
  Synthetic oligonucleotide; CAG chr11 5321855 5321874 5321858 -
aggataggctatctgtttta

SEQ ID NO: 37764 - DNA, 20 bp, Artificial Sequence
  Synthetic oligonucleotide; TGG chr11 5321840 5321859 5321843 -
ttttacagtgatacatttga

SEQ ID NO: 37765 - DNA, 20 bp, Artificial Sequence
  Synthetic oligonucleotide; AAG chr11 5321837 5321856 5321840 -
tacagtgatacatttgatgg

SEQ ID NO: 37766 - DNA, 20 bp, Artificial Sequence
  Synthetic oligonucleotide; AGG chr11 5321836 5321855 5321839 -
acagtgatacatttgatgga

SEQ ID NO: 37767 - DNA, 20 bp, Artificial Sequence
  Synthetic oligonucleotide; TAG chr11 5321828 5321847 5321831 -
acatttgatggaaggactct

SEQ ID NO: 37768 - DNA, 20 bp, Artificial Sequence
  Synthetic oligonucleotide; TGG chr11 5321819 5321838 5321822 -
ggaaggactcttagtttaac

SEQ ID NO: 37769 - DNA, 20 bp, Artificial Sequence
  Synthetic oligonucleotide; AAG chr11 5321814 5321833 5321817 -
gactcttagtttaactggcc

SEQ ID NO: 37770 - DNA, 20 bp, Artificial Sequence
  Synthetic oligonucleotide; AGG chr11 5321813 5321832 5321816 -
actcttagtttaactggcca

SEQ ID NO: 37771 - DNA, 20 bp, Artificial Sequence
  Synthetic oligonucleotide; CAG chr11 5321809 5321828 5321812 -
ttagtttaactggccaaggc

SEQ ID NO: 37772 - DNA, 20 bp, Artificial Sequence
  Synthetic oligonucleotide; AGG chr11 5321808 5321827 5321811 -
tagtttaactggccaaggcc

SEQ ID NO: 37773 - DNA, 20 bp, Artificial Sequence
  Synthetic oligonucleotide; AAG chr11 5321800 5321819 5321803 -
ctggccaaggccaggacttc

SEQ ID NO: 37774 - DNA, 20 bp, Artificial Sequence
  Synthetic oligonucleotide; TAG chr11 5321794 5321813 5321797 -
aaggccaggacttcaagcca

SEQ ID NO: 37775 - DNA, 20 bp, Artificial Sequence
  Synthetic oligonucleotide; GAG chr11 5321769 5321788 5321772 -
taattacctgccacatgtgt

SEQ ID NO: 37776 - DNA, 20 bp, Artificial Sequence
  Synthetic oligonucleotide; AAG chr11 5321762 5321781 5321765 -
ctgccacatgtgtgagaaat

SEQ ID NO: 37777 - DNA, 20 bp, Artificial Sequence
  Synthetic oligonucleotide; AGG chr11 5321761 5321780 5321764 -
tgccacatgtgtgagaaata

SEQ ID NO: 37778 - DNA, 20 bp, Artificial Sequence
  Synthetic oligonucleotide; AAG chr11 5321758 5321777 5321761 -
cacatgtgtgagaaataagg

SEQ ID NO: 37779 - DNA, 20 bp, Artificial Sequence
  Synthetic oligonucleotide; TGG chr11 5321742 5321761 5321745 -
aaggaagtttcaaaccatga

SEQ ID NO: 37780 - DNA, 20 bp, Artificial Sequence
  Synthetic oligonucleotide; GAG chr11 5321740 5321759 5321743 -
ggaagtttcaaaccatgatg

SEQ ID NO: 37781 - DNA, 20 bp, Artificial Sequence
  Synthetic oligonucleotide; CAG chr11 5321737 5321756 5321740 -
agtttcaaaccatgatggag

SEQ ID NO: 37782 - DNA, 20 bp, Artificial Sequence
  Synthetic oligonucleotide; TGG chr11 5321728 5321747 5321731 -
ccatgatggagcagcatcac

SEQ ID NO: 37783 - DNA, 20 bp, Artificial Sequence
  Synthetic oligonucleotide; TGG chr11 5321708 5321727 5321711 -
tggcatgccttttgtgtata

SEQ ID NO: 37784 - DNA, 20 bp, Artificial Sequence
  Synthetic oligonucleotide; TGG chr11 5321705 5321724 5321708 -
catgccttttgtgtatatgg

SEQ ID NO: 37785 - DNA, 20 bp, Artificial Sequence
  Synthetic oligonucleotide; GGG chr11 5321704 5321723 5321707 -
atgccttttgtgtatatggt

SEQ ID NO: 37786 - DNA, 20 bp, Artificial Sequence
  Synthetic oligonucleotide; GAG chr11 5321699 5321718 5321702 -
ttttgtgtatatggtgggtt

SEQ ID NO: 37787 - DNA, 20 bp, Artificial Sequence
  Synthetic oligonucleotide; AGG chr11 5321698 5321717 5321701 -
tttgtgtatatggtgggttg

SEQ ID NO: 37788 - DNA, 20 bp, Artificial Sequence
  Synthetic oligonucleotide; TGG chr11 5321692 5321711 5321695 -
tatatggtgggttgaggata

SEQ ID NO: 37789 - DNA, 20 bp, Artificial Sequence
  Synthetic oligonucleotide; CAG chr11 5321681 5321700 5321684 -
ttgaggatatggcaatattg

SEQ ID NO: 37790 - DNA, 20 bp, Artificial Sequence
  Synthetic oligonucleotide; TAG chr11 5321668 5321687 5321671 -
aatattgcagcctcactgaa

SEQ ID NO: 37791 - DNA, 20 bp, Artificial Sequence
  Synthetic oligonucleotide; AGG chr11 5321667 5321686 5321670 -
atattgcagcctcactgaat

SEQ ID NO: 37792 - DNA, 20 bp, Artificial Sequence
  Synthetic oligonucleotide; AAG chr11 5321661 5321680 5321664 -
cagcctcactgaataggtat

SEQ ID NO: 37793 - DNA, 20 bp, Artificial Sequence
  Synthetic oligonucleotide; AGG chr11 5321660 5321679 5321663 -
agcctcactgaataggtata

SEQ ID NO: 37794 - DNA, 20 bp, Artificial Sequence
  Synthetic oligonucleotide; GAG chr11 5321658 5321677 5321661 -
cctcactgaataggtataag

SEQ ID NO: 37795 - DNA, 20 bp, Artificial Sequence
  Synthetic oligonucleotide; AGG chr11 5321657 5321676 5321660 -
ctcactgaataggtataagg

SEQ ID NO: 37796 - DNA, 20 bp, Artificial Sequence
  Synthetic oligonucleotide; TGG chr11 5321645 5321664 5321648 -
gtataaggaggtgcttactt

SEQ ID NO: 37797 - DNA, 20 bp, Artificial Sequence
  Synthetic oligonucleotide; AAG chr11 5321640 5321659 5321643 -
aggaggtgcttactttggat

SEQ ID NO: 37798 - DNA, 20 bp, Artificial Sequence
  Synthetic oligonucleotide; CAG chr11 5321637 5321656 5321640 -
aggtgcttactttggataag

SEQ ID NO: 37799 - DNA, 20 bp, Artificial Sequence
  Synthetic oligonucleotide; AAG chr11 5321624 5321643 5321627 -
ggataagcagtgttgtttcc

SEQ ID NO: 37800 - DNA, 20 bp, Artificial Sequence
  Synthetic oligonucleotide; AAG chr11 5321617 5321636 5321620 -
cagtgttgtttccaagatga

SEQ ID NO: 37801 - DNA, 20 bp, Artificial Sequence
  Synthetic oligonucleotide; AAG chr11 5321614 5321633 5321617 -
tgttgtttccaagatgaaag

SEQ ID NO: 37802 - DNA, 20 bp, Artificial Sequence
  Synthetic oligonucleotide; TGG chr11 5321601 5321620 5321604 -
atgaaagaagcccaaattat

SEQ ID NO: 37803 - DNA, 20 bp, Artificial Sequence
  Synthetic oligonucleotide; GGG chr11 5321600 5321619 5321603 -
tgaaagaagcccaaattatt

SEQ ID NO: 37804 - DNA, 20 bp, Artificial Sequence
  Synthetic oligonucleotide; TGG chr11 5321562 5321581 5321565 -
taatgacgttgtccttaaac

SEQ ID NO: 37805 - DNA, 20 bp, Artificial Sequence
  Synthetic oligonucleotide; TAG chr11 5321557 5321576 5321560 -
acgttgtccttaaactggtt

SEQ ID NO: 37806 - DNA, 20 bp, Artificial Sequence
  Synthetic oligonucleotide; TGG chr11 5321535 5321554 5321538 -
gacgttgaattctctgttct

SEQ ID NO: 37807 - DNA, 20 bp, Artificial Sequence
  Synthetic oligonucleotide; TGG chr11 5321524 5321543 5321527 -
ctctgttcttggtgccttca

SEQ ID NO: 37808 - DNA, 20 bp, Artificial Sequence
  Synthetic oligonucleotide; AAG chr11 5321514 5321533 5321517 -
ggtgccttcatggttgttta

SEQ ID NO: 37809 - DNA, 20 bp, Artificial Sequence
  Synthetic oligonucleotide; AAG chr11 5321488 5321507 5321491 -
atatttttcaaattgattct

SEQ ID NO: 37810 - DNA, 20 bp, Artificial Sequence
  Synthetic oligonucleotide; GAG chr11 5321486 5321505 5321489 -
atttttcaaattgattctaa

SEQ ID NO: 37811 - DNA, 20 bp, Artificial Sequence
  Synthetic oligonucleotide; AGG chr11 5321485 5321504 5321488 -
tttttcaaattgattctaag

SEQ ID NO: 37812 - DNA, 20 bp, Artificial Sequence
  Synthetic oligonucleotide; GGG chr11 5321484 5321503 5321487 -
ttttcaaattgattctaaga

SEQ ID NO: 37813 - DNA, 20 bp, Artificial Sequence
  Synthetic oligonucleotide; TAG chr11 5321467 5321486 5321470 -
agagggtgatctgaatccac

SEQ ID NO: 37814 - DNA, 20 bp, Artificial Sequence
  Synthetic oligonucleotide; GAG chr11 5321450 5321469 5321453 -
cactagcattttatttcatt

SEQ ID NO: 37815 - DNA, 20 bp, Artificial Sequence
  Synthetic oligonucleotide; TAG chr11 5321430 5321449 5321433 -
gagacttttcatcttttaca

SEQ ID NO: 37816 - DNA, 20 bp, Artificial Sequence
  Synthetic oligonucleotide; AAG chr11 5321427 5321446 5321430 -
acttttcatcttttacatag

SEQ ID NO: 37817 - DNA, 20 bp, Artificial Sequence
  Synthetic oligonucleotide; AGG chr11 5321426 5321445 5321429 -
cttttcatcttttacataga

SEQ ID NO: 37818 - DNA, 20 bp, Artificial Sequence
  Synthetic oligonucleotide; AAG chr11 5321418 5321437 5321421 -
cttttacatagaaggaaact

SEQ ID NO: 37819 - DNA, 20 bp, Artificial Sequence
  Synthetic oligonucleotide; TAG chr11 5321411 5321430 5321414 -
atagaaggaaactaagttat

SEQ ID NO: 37820 - DNA, 20 bp, Artificial Sequence
  Synthetic oligonucleotide; AAG chr11 5321380 5321399 5321383 -
aatatcaactttcatgataa

SEQ ID NO: 37821 - DNA, 20 bp, Artificial Sequence
  Synthetic oligonucleotide; CAG chr11 5321372 5321391 5321375 -
ctttcatgataaaagataca

SEQ ID NO: 37822 - DNA, 20 bp, Artificial Sequence
  Synthetic oligonucleotide; GAG chr11 5321361 5321380 5321364 -
aaagatacacagtcccttct

SEQ ID NO: 37823 - DNA, 20 bp, Artificial Sequence
  Synthetic oligonucleotide; AGG chr11 5321360 5321379 5321363 -
aagatacacagtcccttctg

SEQ ID NO: 37824 - DNA, 20 bp, Artificial Sequence
  Synthetic oligonucleotide; GGG chr11 5321359 5321378 5321362 -
agatacacagtcccttctga

SEQ ID NO: 37825 - DNA, 20 bp, Artificial Sequence
  Synthetic oligonucleotide; AAG chr11 5321353 5321372 5321356 -
acagtcccttctgagggcac

SEQ ID NO: 37826 - DNA, 20 bp, Artificial Sequence
  Synthetic oligonucleotide; CAG chr11 5321328 5321347 5321331 -
aatacttcattaaaccaaac

SEQ ID NO: 37827 - DNA, 20 bp, Artificial Sequence
  Synthetic oligonucleotide; AAG chr11 5321298 5321317 5321301 -
tcttctgtcatatttttaat

SEQ ID NO: 37828 - DNA, 20 bp, Artificial Sequence
  Synthetic oligonucleotide; AGG chr11 5321297 5321316 5321300 -
cttctgtcatatttttaata

SEQ ID NO: 37829 - DNA, 20 bp, Artificial Sequence
  Synthetic oligonucleotide; GAG chr11 5321295 5321314 5321298 -
tctgtcatatttttaataag

SEQ ID NO: 37830 - DNA, 20 bp, Artificial Sequence
  Synthetic oligonucleotide; AGG chr11 5321294 5321313 5321297 -
ctgtcatatttttaataagg

SEQ ID NO: 37831 - DNA, 20 bp, Artificial Sequence
  Synthetic oligonucleotide; CAG chr11 5321290 5321309 5321293 -
catatttttaataaggagga

SEQ ID NO: 37832 - DNA, 20 bp, Artificial Sequence
  Synthetic oligonucleotide; CAG chr11 5321247 5321266 5321250 -
aacaaaataatatccttatt

SEQ ID NO: 37833 - DNA, 20 bp, Artificial Sequence
  Synthetic oligonucleotide; TAG chr11 5321147 5321166 5321150 -
ctatatgttaatgaaactgt

SEQ ID NO: 37834 - DNA, 20 bp, Artificial Sequence
  Synthetic oligonucleotide; AAG chr11 5321142 5321161 5321145 -
tgttaatgaaactgttagaa

SEQ ID NO: 37835 - DNA, 20 bp, Artificial Sequence
  Synthetic oligonucleotide; GAG chr11 5321129 5321148 5321132 -
gttagaaaagaaaatgatat

SEQ ID NO: 37836 - DNA, 20 bp, Artificial Sequence
  Synthetic oligonucleotide; CAG chr11 5321116 5321135 5321119 -
atgatatgagtaattttctc

SEQ ID NO: 37837 - DNA, 20 bp, Artificial Sequence
  Synthetic oligonucleotide; AGG chr11 5321115 5321134 5321118 -
tgatatgagtaattttctcc

SEQ ID NO: 37838 - DNA, 20 bp, Artificial Sequence
  Synthetic oligonucleotide; GGG chr11 5321114 5321133 5321117 -
gatatgagtaattttctcca

SEQ ID NO: 37839 - DNA, 20 bp, Artificial Sequence
  Synthetic oligonucleotide; AAG chr11 5321098 5321117 5321101 -
tccagggtatcctttgtgca

SEQ ID NO: 37840 - DNA, 20 bp, Artificial Sequence
  Synthetic oligonucleotide; AAG chr11 5321058 5321077 5321061 -
ttctcttcatcttttctaca

SEQ ID NO: 37841 - DNA, 20 bp, Artificial Sequence
  Synthetic oligonucleotide; CAG chr11 5321054 5321073 5321057 -
cttcatcttttctacaaagt

SEQ ID NO: 37842 - DNA, 20 bp, Artificial Sequence
  Synthetic oligonucleotide; TAG chr11 5320999 5321018 5321002 -
atcaataaataactgttgat

SEQ ID NO: 37843 - DNA, 20 bp, Artificial Sequence
  Synthetic oligonucleotide; AAG chr11 5320990 5321009 5320993 -
taactgttgattagtgaata

SEQ ID NO: 37844 - DNA, 20 bp, Artificial Sequence
  Synthetic oligonucleotide; TGG chr11 5320964 5320983 5320967 -
ttatcttcttgtgataacta

SEQ ID NO: 37845 - DNA, 20 bp, Artificial Sequence
  Synthetic oligonucleotide; AAG chr11 5320961 5320980 5320964 -
tcttcttgtgataactatgg

SEQ ID NO: 37846 - DNA, 20 bp, Artificial Sequence
  Synthetic oligonucleotide; TGG chr11 5320954 5320973 5320957 -
gtgataactatggaagtcaa

SEQ ID NO: 37847 - DNA, 20 bp, Artificial Sequence
  Synthetic oligonucleotide; CAG chr11 5320937 5320956 5320940 -
caatggaactactctccatt

SEQ ID NO: 37848 - DNA, 20 bp, Artificial Sequence
  Synthetic oligonucleotide; CAG chr11 5320927 5320946 5320930 -
actctccattcagcaaaact

SEQ ID NO: 37849 - DNA, 20 bp, Artificial Sequence
  Synthetic oligonucleotide; CAG chr11 5320919 5320938 5320922 -
ttcagcaaaactcagaaatt

SEQ ID NO: 37850 - DNA, 20 bp, Artificial Sequence
  Synthetic oligonucleotide; AGG chr11 5320918 5320937 5320921 -
tcagcaaaactcagaaattc

SEQ ID NO: 37851 - DNA, 20 bp, Artificial Sequence
  Synthetic oligonucleotide; TGG chr11 5320915 5320934 5320918 -
gcaaaactcagaaattcagg

SEQ ID NO: 37852 - DNA, 20 bp, Artificial Sequence
  Synthetic oligonucleotide; CAG chr11 5320867 5320886 5320870 -
atctactaccttcaatcact

SEQ ID NO: 37853 - DNA, 20 bp, Artificial Sequence
  Synthetic oligonucleotide; AAG chr11 5320855 5320874 5320858 -
caatcactcagttctattct

SEQ ID NO: 37854 - DNA, 20 bp, Artificial Sequence
  Synthetic oligonucleotide; TAG chr11 5320849 5320868 5320852 -
ctcagttctattctaagtca

SEQ ID NO: 37855 - DNA, 20 bp, Artificial Sequence
  Synthetic oligonucleotide; AAG chr11 5320830 5320849 5320833 -
atagaatctctcttctattc

SEQ ID NO: 37856 - DNA, 20 bp, Artificial Sequence
  Synthetic oligonucleotide; TAG chr11 5320802 5320821 5320805 -
ctaatgctactgataacaac

SEQ ID NO: 37857 - DNA, 20 bp, Artificial Sequence
  Synthetic oligonucleotide; TAG chr11 5320704 5320723 5320707 -
ccaacatgtttctcatactg

SEQ ID NO: 37858 - DNA, 20 bp, Artificial Sequence
  Synthetic oligonucleotide; TAG chr11 5320698 5320717 5320701 -
tgtttctcatactgtagcca

SEQ ID NO: 37859 - DNA, 20 bp, Artificial Sequence
  Synthetic oligonucleotide; AAG chr11 5320667 5320686 5320670 -
aacaataactacttgattat

SEQ ID NO: 37860 - DNA, 20 bp, Artificial Sequence
  Synthetic oligonucleotide; TGG chr11 5320627 5320646 5320630 -
gttttatattcattccctta

SEQ ID NO: 37861 - DNA, 20 bp, Artificial Sequence
  Synthetic oligonucleotide; AAG chr11 5320596 5320615 5320599 -
aaatgttttacatgatttgc

SEQ ID NO: 37862 - DNA, 20 bp, Artificial Sequence
  Synthetic oligonucleotide; CAG chr11 5320581 5320600 5320584 -
tttgcaagatatattgtgat

SEQ ID NO: 37863 - DNA, 20 bp, Artificial Sequence
  Synthetic oligonucleotide; CAG chr11 5320563 5320582 5320566 -
atcagaacctgctactacta

SEQ ID NO: 37864 - DNA, 20 bp, Artificial Sequence
  Synthetic oligonucleotide; AAG chr11 5320546 5320565 5320549 -
ctacagattcattttctctc

SEQ ID NO: 37865 - DNA, 20 bp, Artificial Sequence
  Synthetic oligonucleotide; AAG chr11 5320520 5320539 5320523 -
tttttcatgtattgttgttc

SEQ ID NO: 37866 - DNA, 20 bp, Artificial Sequence
  Synthetic oligonucleotide; GAG chr11 5320518 5320537 5320521 -
tttcatgtattgttgttcaa

SEQ ID NO: 37867 - DNA, 20 bp, Artificial Sequence
  Synthetic oligonucleotide; TAG chr11 5320461 5320480 5320464 -
attatttttatttgaattta

SEQ ID NO: 37868 - DNA, 20 bp, Artificial Sequence
  Synthetic oligonucleotide; TAG chr11 5320325 5320344 5320328 -
atactactacactactaata

SEQ ID NO: 37869 - DNA, 20 bp, Artificial Sequence
  Synthetic oligonucleotide; TAG chr11 5320322 5320341 5320325 -
ctactacactactaatatag

SEQ ID NO: 37870 - DNA, 20 bp, Artificial Sequence
  Synthetic oligonucleotide; CAG chr11 5320308 5320327 5320311 -
atatagtagcatttaattct

SEQ ID NO: 37871 - DNA, 20 bp, Artificial Sequence
  Synthetic oligonucleotide; AAG chr11 5320302 5320321 5320305 -
tagcatttaattctcagctt

SEQ ID NO: 37872 - DNA, 20 bp, Artificial Sequence
  Synthetic oligonucleotide; TAG chr11 5320299 5320318 5320302 -
catttaattctcagcttaag

SEQ ID NO: 37873 - DNA, 20 bp, Artificial Sequence
  Synthetic oligonucleotide; TGG chr11 5320287 5320306 5320290 -
agcttaagtagcatttcttc

SEQ ID NO: 37874 - DNA, 20 bp, Artificial Sequence
  Synthetic oligonucleotide; CAG chr11 5320267 5320286 5320270 -
tggaaaatgttccctgatcc

SEQ ID NO: 37875 - DNA, 20 bp, Artificial Sequence
  Synthetic oligonucleotide; TAG chr11 5320241 5320260 5320244 -
tttatttgatgtgtctctca

SEQ ID NO: 37876 - DNA, 20 bp, Artificial Sequence
  Synthetic oligonucleotide; TAG chr11 5320222 5320241 5320225 -
atagcacactaatattcacg

SEQ ID NO: 37877 - DNA, 20 bp, Artificial Sequence
  Synthetic oligonucleotide; TAG chr11 5320213 5320232 5320216 -
taatattcacgtagtaatga

SEQ ID NO: 37878 - DNA, 20 bp, Artificial Sequence
  Synthetic oligonucleotide; TGG chr11 5320195 5320214 5320198 -
gatagtgttgtatgaattca

SEQ ID NO: 37879 - DNA, 20 bp, Artificial Sequence
  Synthetic oligonucleotide; TAG chr11 5320177 5320196 5320180 -
catggtaaatattttctttc

SEQ ID NO: 37880 - DNA, 20 bp, Artificial Sequence
  Synthetic oligonucleotide; TGG chr11 5320166 5320185 5320169 -
ttttctttctagtgcctgct

SEQ ID NO: 37881 - DNA, 20 bp, Artificial Sequence
  Synthetic oligonucleotide; GGG chr11 5320165 5320184 5320168 -
tttctttctagtgcctgctt

SEQ ID NO: 37882 - DNA, 20 bp, Artificial Sequence
  Synthetic oligonucleotide; AAG chr11 5320145 5320164 5320148 -
gggttttaaatttcaataaa

SEQ ID NO: 37883 - DNA, 20 bp, Artificial Sequence
  Synthetic oligonucleotide; AAG chr11 5320139 5320158 5320142 -
taaatttcaataaaaagaac

SEQ ID NO: 37884 - DNA, 20 bp, Artificial Sequence
  Synthetic oligonucleotide; TAG chr11 5320133 5320152 5320136 -
tcaataaaaagaacaagtcc

SEQ ID NO: 37885 - DNA, 20 bp, Artificial Sequence
  Synthetic oligonucleotide; AGG chr11 5320132 5320151 5320135 -
caataaaaagaacaagtcct

SEQ ID NO: 37886 - DNA, 20 bp, Artificial Sequence
  Synthetic oligonucleotide; TGG chr11 5320113 5320132 5320116 -
taggtatttcattttctttg

SEQ ID NO: 37887 - DNA, 20 bp, Artificial Sequence
  Synthetic oligonucleotide; TGG chr11 5320100 5320119 5320103 -
ttctttgtggctgttcttaa

SEQ ID NO: 37888 - DNA, 20 bp, Artificial Sequence
  Synthetic oligonucleotide; GGG chr11 5320099 5320118 5320102 -
tctttgtggctgttcttaat

SEQ ID NO: 37889 - DNA, 20 bp, Artificial Sequence
  Synthetic oligonucleotide; CAG chr11 5320074 5320093 5320077 -
tgtgttctcgatttgactct

SEQ ID NO: 37890 - DNA, 20 bp, Artificial Sequence
  Synthetic oligonucleotide; TGG chr11 5320069 5320088 5320072 -
tctcgatttgactctcagcc

SEQ ID NO: 37891 - DNA, 20 bp, Artificial Sequence
  Synthetic oligonucleotide; GGG chr11 5320068 5320087 5320071 -
ctcgatttgactctcagcct

SEQ ID NO: 37892 - DNA, 20 bp, Artificial Sequence
  Synthetic oligonucleotide; TGG chr11 5320059 5320078 5320062 -
actctcagcctgggccttat

SEQ ID NO: 37893 - DNA, 20 bp, Artificial Sequence
  Synthetic oligonucleotide; TGG chr11 5320052 5320071 5320055 -
gcctgggccttattggtgta

SEQ ID NO: 37894 - DNA, 20 bp, Artificial Sequence
  Synthetic oligonucleotide; CAG chr11 5319990 5320009 5319993 -
accttgctaaaattgtttat

SEQ ID NO: 37895 - DNA, 20 bp, Artificial Sequence
  Synthetic oligonucleotide; TAG chr11 5319984 5320003 5319987 -
ctaaaattgtttatcagttc

SEQ ID NO: 37896 - DNA, 20 bp, Artificial Sequence
  Synthetic oligonucleotide; CAG chr11 5319981 5320000 5319984 -
aaattgtttatcagttctag

SEQ ID NO: 37897 - DNA, 20 bp, Artificial Sequence
  Synthetic oligonucleotide; TGG chr11 5319973 5319992 5319976 -
tatcagttctagcagccttt

SEQ ID NO: 37898 - DNA, 20 bp, Artificial Sequence
  Synthetic oligonucleotide; AAG chr11 5319970 5319989 5319973 -
cagttctagcagccttttgg

SEQ ID NO: 37899 - DNA, 20 bp, Artificial Sequence
  Synthetic oligonucleotide; TAG chr11 5319961 5319980 5319964 -
cagccttttggaagaatctg

SEQ ID NO: 37900 - DNA, 20 bp, Artificial Sequence
  Synthetic oligonucleotide; AGG chr11 5319960 5319979 5319963 -
agccttttggaagaatctgt

SEQ ID NO: 37901 - DNA, 20 bp, Artificial Sequence
  Synthetic oligonucleotide; AAG chr11 5319950 5319969 5319953 -
aagaatctgtaggattttct

SEQ ID NO: 37902 - DNA, 20 bp, Artificial Sequence
  Synthetic oligonucleotide; TAG chr11 5319945 5319964 5319948 -
tctgtaggattttctaagta

SEQ ID NO: 37903 - DNA, 20 bp, Artificial Sequence
  Synthetic oligonucleotide; GAG chr11 5319943 5319962 5319946 -
tgtaggattttctaagtata

SEQ ID NO: 37904 - DNA, 20 bp, Artificial Sequence
  Synthetic oligonucleotide; CAG chr11 5319931 5319950 5319934 -
taagtatagagtcatatcat

SEQ ID NO: 37905 - DNA, 20 bp, Artificial Sequence
  Synthetic oligonucleotide; AAG chr11 5319926 5319945 5319929 -
atagagtcatatcatcagca

SEQ ID NO: 37906 - DNA, 20 bp, Artificial Sequence
  Synthetic oligonucleotide; GAG chr11 5319924 5319943 5319927 -
agagtcatatcatcagcaaa

SEQ ID NO: 37907 - DNA, 20 bp, Artificial Sequence
  Synthetic oligonucleotide; GAG chr11 5319922 5319941 5319925 -
agtcatatcatcagcaaaga

SEQ ID NO: 37908 - DNA, 20 bp, Artificial Sequence
  Synthetic oligonucleotide; TAG chr11 5319918 5319937 5319921 -
atatcatcagcaaagagaga

SEQ ID NO: 37909 - DNA, 20 bp, Artificial Sequence
  Synthetic oligonucleotide; TGG chr11 5319913 5319932 5319916 -
atcagcaaagagagatagtt

SEQ ID NO: 37910 - DNA, 20 bp, Artificial Sequence
  Synthetic oligonucleotide; TGG chr11 5319859 5319878 5319862 -
tttctctcgcctgattgccc

SEQ ID NO: 37911 - DNA, 20 bp, Artificial Sequence
  Synthetic oligonucleotide; TAG chr11 5319855 5319874 5319858 -
tctcgcctgattgccctggt

SEQ ID NO: 37912 - DNA, 20 bp, Artificial Sequence
  Synthetic oligonucleotide; AGG chr11 5319854 5319873 5319857 -
ctcgcctgattgccctggtt

SEQ ID NO: 37913 - DNA, 20 bp, Artificial Sequence
  Synthetic oligonucleotide; TAG chr11 5319831 5319850 5319834 -
acttccaattttatgttcac

SEQ ID NO: 37914 - DNA, 20 bp, Artificial Sequence
  Synthetic oligonucleotide; AGG chr11 5319830 5319849 5319833 -
cttccaattttatgttcact

SEQ ID NO: 37915 - DNA, 20 bp, Artificial Sequence
  Synthetic oligonucleotide; GAG chr11 5319828 5319847 5319831 -
tccaattttatgttcactag

SEQ ID NO: 37916 - DNA, 20 bp, Artificial Sequence
  Synthetic oligonucleotide; TGG chr11 5319825 5319844 5319828 -
aattttatgttcactaggag

SEQ ID NO: 37917 - DNA, 20 bp, Artificial Sequence
  Synthetic oligonucleotide; GAG chr11 5319821 5319840 5319824 -
ttatgttcactaggagtggt

SEQ ID NO: 37918 - DNA, 20 bp, Artificial Sequence
  Synthetic oligonucleotide; TGG chr11 5319816 5319835 5319819 -
ttcactaggagtggtgagaa

SEQ ID NO: 37919 - DNA, 20 bp, Artificial Sequence
  Synthetic oligonucleotide; GGG chr11 5319815 5319834 5319818 -
tcactaggagtggtgagaat

SEQ ID NO: 37920 - DNA, 20 bp, Artificial Sequence
  Synthetic oligonucleotide; CAG chr11 5319796 5319815 5319799 -
tgggaatccttgtcttgttg

SEQ ID NO: 37921 - DNA, 20 bp, Artificial Sequence
  Synthetic oligonucleotide; GAG chr11 5319788 5319807 5319791 -
cttgtcttgttgcagttttc

SEQ ID NO: 37922 - DNA, 20 bp, Artificial Sequence
  Synthetic oligonucleotide; AGG chr11 5319787 5319806 5319790 -
ttgtcttgttgcagttttcg

SEQ ID NO: 37923 - DNA, 20 bp, Artificial Sequence
  Synthetic oligonucleotide; GAG chr11 5319785 5319804 5319788 -
gtcttgttgcagttttcgag

SEQ ID NO: 37924 - DNA, 20 bp, Artificial Sequence
  Synthetic oligonucleotide; TAG chr11 5319780 5319799 5319783 -
gttgcagttttcgaggagaa

SEQ ID NO: 37925 - DNA, 20 bp, Artificial Sequence
  Synthetic oligonucleotide; CAG chr11 5319774 5319793 5319777 -
gttttcgaggagaatagttc

SEQ ID NO: 37926 - DNA, 20 bp, Artificial Sequence
  Synthetic oligonucleotide; CAG chr11 5319759 5319778 5319762 -
agttccagcttttgcccatt

SEQ ID NO: 37927 - DNA, 20 bp, Artificial Sequence
  Synthetic oligonucleotide; TGG chr11 5319754 5319773 5319757 -
cagcttttgcccattcagta

SEQ ID NO: 37928 - DNA, 20 bp, Artificial Sequence
  Synthetic oligonucleotide; TGG chr11 5319748 5319767 5319751 -
ttgcccattcagtatggttt

SEQ ID NO: 37929 - DNA, 20 bp, Artificial Sequence
  Synthetic oligonucleotide; TGG chr11 5319742 5319761 5319745 -
attcagtatggttttggtta

SEQ ID NO: 37930 - DNA, 20 bp, Artificial Sequence
  Synthetic oligonucleotide; GGG chr11 5319741 5319760 5319744 -
ttcagtatggttttggttat

SEQ ID NO: 37931 - DNA, 20 bp, Artificial Sequence
  Synthetic oligonucleotide; TGG chr11 5319727 5319746 5319730 -
ggttatgggtttttcatacg

SEQ ID NO: 37932 - DNA, 20 bp, Artificial Sequence
  Synthetic oligonucleotide; GAG chr11 5319711 5319730 5319714 -
tacgtggcttttattctttt

SEQ ID NO: 37933 - DNA, 20 bp, Artificial Sequence
  Synthetic oligonucleotide; AGG chr11 5319710 5319729 5319713 -
acgtggcttttattcttttg

SEQ ID NO: 37934 - DNA, 20 bp, Artificial Sequence
  Synthetic oligonucleotide; TAG chr11 5319690 5319709 5319693 -
aggtatgttcctttgatgcc

SEQ ID NO: 37935 - DNA, 20 bp, Artificial Sequence
  Synthetic oligonucleotide; TGG chr11 5319682 5319701 5319685 -
tcctttgatgcctagtctgt

SEQ ID NO: 37936 - DNA, 20 bp, Artificial Sequence
  Synthetic oligonucleotide; GAG chr11 5319680 5319699 5319683 -
ctttgatgcctagtctgttg

SEQ ID NO: 37937 - DNA, 20 bp, Artificial Sequence
  Synthetic oligonucleotide; AGG chr11 5319679 5319698 5319682 -
tttgatgcctagtctgttgg

SEQ ID NO: 37938 - DNA, 20 bp, Artificial Sequence
  Synthetic oligonucleotide; AAG chr11 5319665 5319684 5319668 -
tgttggaggtttttatcatg

SEQ ID NO: 37939 - DNA, 20 bp, Artificial Sequence
  Synthetic oligonucleotide; AGG chr11 5319664 5319683 5319667 -
gttggaggtttttatcatga

SEQ ID NO: 37940 - DNA, 20 bp, Artificial Sequence
  Synthetic oligonucleotide; GGG chr11 5319663 5319682 5319666 -
ttggaggtttttatcatgaa

SEQ ID NO: 37941 - DNA, 20 bp, Artificial Sequence
  Synthetic oligonucleotide; AAG chr11 5319643 5319662 5319646 -
gggatgttgaattttattga

SEQ ID NO: 37942 - DNA, 20 bp, Artificial Sequence
  Synthetic oligonucleotide; AGG chr11 5319642 5319661 5319645 -
ggatgttgaattttattgaa

SEQ ID NO: 37943 - DNA, 20 bp, Artificial Sequence
  Synthetic oligonucleotide; CAG chr11 5319632 5319651 5319635 -
ttttattgaaaggtttttct

SEQ ID NO: 37944 - DNA, 20 bp, Artificial Sequence
  Synthetic oligonucleotide; GAG chr11 5319623 5319642 5319626 -
aaggtttttctcagtctatt

SEQ ID NO: 37945 - DNA, 20 bp, Artificial Sequence
  Synthetic oligonucleotide; TGG chr11 5319611 5319630 5319614 -
agtctattgagatgatcata

SEQ ID NO: 37946 - DNA, 20 bp, Artificial Sequence
  Synthetic oligonucleotide; TGG chr11 5319604 5319623 5319607 -
tgagatgatcatatggtttg

SEQ ID NO: 37947 - DNA, 20 bp, Artificial Sequence
  Synthetic oligonucleotide; GGG chr11 5319603 5319622 5319606 -
gagatgatcatatggtttgt

SEQ ID NO: 37948 - DNA, 20 bp, Artificial Sequence
  Synthetic oligonucleotide; GAG chr11 5319601 5319620 5319604 -
gatgatcatatggtttgtgg

SEQ ID NO: 37949 - DNA, 20 bp, Artificial Sequence
  Synthetic oligonucleotide; AGG chr11 5319600 5319619 5319603 -
atgatcatatggtttgtggg

SEQ ID NO: 37950 - DNA, 20 bp, Artificial Sequence
  Synthetic oligonucleotide; AAG chr11 5319594 5319613 5319597 -
atatggtttgtgggaggtga

SEQ ID NO: 37951 - DNA, 20 bp, Artificial Sequence
  Synthetic oligonucleotide; AAG chr11 5319583 5319602 5319586 -
gggaggtgaaagatctctac

SEQ ID NO: 37952 - DNA, 20 bp, Artificial Sequence
  Synthetic oligonucleotide; AGG chr11 5319582 5319601 5319585 -
ggaggtgaaagatctctaca

SEQ ID NO: 37953 - DNA, 20 bp, Artificial Sequence
  Synthetic oligonucleotide; GAG chr11 5319580 5319599 5319583 -
aggtgaaagatctctacaag

SEQ ID NO: 37954 - DNA, 20 bp, Artificial Sequence
  Synthetic oligonucleotide; AAG chr11 5319558 5319577 5319561 -
gaactacaaaacactgctga

SEQ ID NO: 37955 - DNA, 20 bp, Artificial Sequence
  Synthetic oligonucleotide; CAG chr11 5319551 5319570 5319554 -
aaaacactgctgaaagaaat

SEQ ID NO: 37956 - DNA, 20 bp, Artificial Sequence
  Synthetic oligonucleotide; AAG chr11 5319525 5319544 5319528 -
caacacaaataaataaataa

SEQ ID NO: 37957 - DNA, 20 bp, Artificial Sequence
  Synthetic oligonucleotide; CAG chr11 5319517 5319536 5319520 -
ataaataaataaaagctttc

SEQ ID NO: 37958 - DNA, 20 bp, Artificial Sequence
  Synthetic oligonucleotide; AGG chr11 5319516 5319535 5319519 -
taaataaataaaagctttcc

SEQ ID NO: 37959 - DNA, 20 bp, Artificial Sequence
  Synthetic oligonucleotide; TGG chr11 5319509 5319528 5319512 -
ataaaagctttccaggctca

SEQ ID NO: 37960 - DNA, 20 bp, Artificial Sequence
  Synthetic oligonucleotide; TGG chr11 5319504 5319523 5319507 -
agctttccaggctcatggat

SEQ ID NO: 37961 - DNA, 20 bp, Artificial Sequence
  Synthetic oligonucleotide; AAG chr11 5319501 5319520 5319504 -
tttccaggctcatggattgg

SEQ ID NO: 37962 - DNA, 20 bp, Artificial Sequence
  Synthetic oligonucleotide; TGG chr11 5319480 5319499 5319483 -
agaatcaatatgaatttaaa

SEQ ID NO: 37963 - DNA, 20 bp, Artificial Sequence
  Synthetic oligonucleotide; AAG chr11 5319465 5319484 5319468 -
ttaaatggccatactgctca

SEQ ID NO: 37964 - DNA, 20 bp, Artificial Sequence
  Synthetic oligonucleotide; TAG chr11 5319457 5319476 5319460 -
ccatactgctcaaagcaatt

SEQ ID NO: 37965 - DNA, 20 bp, Artificial Sequence
  Synthetic oligonucleotide; CAG chr11 5319411 5319430 5319414 -
attaccaatgtcattcttca

SEQ ID NO: 37966 - DNA, 20 bp, Artificial Sequence
  Synthetic oligonucleotide; TAG chr11 5319405 5319424 5319408 -
aatgtcattcttcacagtat

SEQ ID NO: 37967 - DNA, 20 bp, Artificial Sequence
  Synthetic oligonucleotide; TAG chr11 5319396 5319415 5319399 -
cttcacagtattagaaaaac

SEQ ID NO: 37968 - DNA, 20 bp, Artificial Sequence
  Synthetic oligonucleotide; TGG chr11 5319380 5319399 5319383 -
aaactagtttaaaattcata

SEQ ID NO: 37969 - DNA, 20 bp, Artificial Sequence
  Synthetic oligonucleotide; AAG chr11 5319370 5319389 5319373 -
aaaattcatatggaaccaaa

SEQ ID NO: 37970 - DNA, 20 bp, Artificial Sequence
  Synthetic oligonucleotide; GAG chr11 5319368 5319387 5319371 -
aattcatatggaaccaaaaa

SEQ ID NO: 37971 - DNA, 20 bp, Artificial Sequence
  Synthetic oligonucleotide; CAG chr11 5319359 5319378 5319362 -
ggaaccaaaaagagcctgaa

SEQ ID NO: 37972 - DNA, 20 bp, Artificial Sequence
  Synthetic oligonucleotide; AGG chr11 5319358 5319377 5319361 -
gaaccaaaaagagcctgaac

SEQ ID NO: 37973 - DNA, 20 bp, Artificial Sequence
  Synthetic oligonucleotide; AAG chr11 5319353 5319372 5319356 -
aaaaagagcctgaacaggca

SEQ ID NO: 37974 - DNA, 20 bp, Artificial Sequence
  Synthetic oligonucleotide; AAG chr11 5319343 5319362 5319346 -
tgaacaggcaaagcaatctt

SEQ ID NO: 37975 - DNA, 20 bp, Artificial Sequence
  Synthetic oligonucleotide; CAG chr11 5319340 5319359 5319343 -
acaggcaaagcaatcttaag

SEQ ID NO: 37976 - DNA, 20 bp, Artificial Sequence
  Synthetic oligonucleotide; AAG chr11 5319336 5319355 5319339 -
gcaaagcaatcttaagcaga

SEQ ID NO: 37977 - DNA, 20 bp, Artificial Sequence
  Synthetic oligonucleotide; TGG chr11 5319325 5319344 5319328 -
ttaagcagaaagaacaaaat

SEQ ID NO: 37978 - DNA, 20 bp, Artificial Sequence
  Synthetic oligonucleotide; AAG chr11 5319322 5319341 5319325 -
agcagaaagaacaaaattgg

SEQ ID NO: 37979 - DNA, 20 bp, Artificial Sequence
  Synthetic oligonucleotide; CAG chr11 5319294 5319313 5319297 -
caccacctgacttgaaacta

SEQ ID NO: 37980 - DNA, 20 bp, Artificial Sequence
  Synthetic oligonucleotide; AGG chr11 5319293 5319312 5319296 -
accacctgacttgaaactac

SEQ ID NO: 37981 - DNA, 20 bp, Artificial Sequence
  Synthetic oligonucleotide; CAG chr11 5319289 5319308 5319292 -
cctgacttgaaactacaggc

SEQ ID NO: 37982 - DNA, 20 bp, Artificial Sequence
  Synthetic oligonucleotide; AGG chr11 5319288 5319307 5319291 -
ctgacttgaaactacaggcc

SEQ ID NO: 37983 - DNA, 20 bp, Artificial Sequence
  Synthetic oligonucleotide; CGG chr11 5319283 5319302 5319286 -
ttgaaactacaggccaggca

SEQ ID NO: 37984 - DNA, 20 bp, Artificial Sequence
  Synthetic oligonucleotide; TGG chr11 5319280 5319299 5319283 -
aaactacaggccaggcacgg

SEQ ID NO: 37985 - DNA, 20 bp, Artificial Sequence
  Synthetic oligonucleotide; TAG chr11 5319261 5319280 5319264 -
gtggctcacgcctgtaactc

SEQ ID NO: 37986 - DNA, 20 bp, Artificial Sequence
  Synthetic oligonucleotide; TAG chr11 5319253 5319272 5319256 -
cgcctgtaactctagcactt

SEQ ID NO: 37987 - DNA, 20 bp, Artificial Sequence
  Synthetic oligonucleotide; AGG chr11 5319252 5319271 5319255 -
gcctgtaactctagcacttt

SEQ ID NO: 37988 - DNA, 20 bp, Artificial Sequence
  Synthetic oligonucleotide; GGG chr11 5319251 5319270 5319254 -
cctgtaactctagcacttta

SEQ ID NO: 37989 - DNA, 20 bp, Artificial Sequence
  Synthetic oligonucleotide; GGG chr11 5319250 5319269 5319253 -
ctgtaactctagcactttag

SEQ ID NO: 37990 - DNA, 20 bp, Artificial Sequence
  Synthetic oligonucleotide; GGG chr11 5319249 5319268 5319252 -
tgtaactctagcactttagg

SEQ ID NO: 37991 - DNA, 20 bp, Artificial Sequence
  Synthetic oligonucleotide; GAG chr11 5319244 5319263 5319247 -
ctctagcactttagggggct

SEQ ID NO: 37992 - DNA, 20 bp, Artificial Sequence
  Synthetic oligonucleotide; AGG chr11 5319243 5319262 5319246 -
tctagcactttagggggctg

SEQ ID NO: 37993 - DNA, 20 bp, Artificial Sequence
  Synthetic oligonucleotide; TGG chr11 5319240 5319259 5319243 -
agcactttagggggctgagg

SEQ ID NO: 37994 - DNA, 20 bp, Artificial Sequence
  Synthetic oligonucleotide; GGG chr11 5319239 5319258 5319242 -
gcactttagggggctgaggt

SEQ ID NO: 37995 - DNA, 20 bp, Artificial Sequence
  Synthetic oligonucleotide; GAG chr11 5319226 5319245 5319229 -
ctgaggtgggtgtatcacct

SEQ ID NO: 37996 - DNA, 20 bp, Artificial Sequence
  Synthetic oligonucleotide; AGG chr11 5319225 5319244 5319228 -
tgaggtgggtgtatcacctg

SEQ ID NO: 37997 - DNA, 20 bp, Artificial Sequence
  Synthetic oligonucleotide; CAG chr11 5319221 5319240 5319224 -
gtgggtgtatcacctgaggt

SEQ ID NO: 37998 - DNA, 20 bp, Artificial Sequence
  Synthetic oligonucleotide; AGG chr11 5319220 5319239 5319223 -
tgggtgtatcacctgaggtc

SEQ ID NO: 37999 - DNA, 20 bp, Artificial Sequence
  Synthetic oligonucleotide; GAG chr11 5319218 5319237 5319221 -
ggtgtatcacctgaggtcag

SEQ ID NO: 38000 - DNA, 20 bp, Artificial Sequence
  Synthetic oligonucleotide; AAG chr11 5319212 5319231 5319215 -
tcacctgaggtcaggagttc

SEQ ID NO: 38001 - DNA, 20 bp, Artificial Sequence
  Synthetic oligonucleotide; CAG chr11 5319207 5319226 5319210 -
tgaggtcaggagttcaagac

SEQ ID NO: 38002 - DNA, 20 bp, Artificial Sequence
  Synthetic oligonucleotide; TGG chr11 5319202 5319221 5319205 -
tcaggagttcaagaccagcc

SEQ ID NO: 38003 - DNA, 20 bp, Artificial Sequence
  Synthetic oligonucleotide; TGG chr11 5319193 5319212 5319196 -
caagaccagcctggtcaaca

SEQ ID NO: 38004 - DNA, 20 bp, Artificial Sequence
  Synthetic oligonucleotide; TAG chr11 5319159 5319178 5319162 -
ctctactaaaaatacaaaat

SEQ ID NO: 38005 - DNA, 20 bp, Artificial Sequence
  Synthetic oligonucleotide; CGG chr11 5319155 5319174 5319158 -
actaaaaatacaaaattagc

SEQ ID NO: 38006 - DNA, 20 bp, Artificial Sequence
  Synthetic oligonucleotide; TGG chr11 5319149 5319168 5319152 -
aatacaaaattagccggctg

SEQ ID NO: 38007 - DNA, 20 bp, Artificial Sequence
  Synthetic oligonucleotide; TGG chr11 5319146 5319165 5319149 -
acaaaattagccggctgtgg

SEQ ID NO: 38008 - DNA, 20 bp, Artificial Sequence
  Synthetic oligonucleotide; TGG chr11 5319143 5319162 5319146 -
aaattagccggctgtggtgg

SEQ ID NO: 38009 - DNA, 20 bp, Artificial Sequence
  Synthetic oligonucleotide; GGG chr11 5319142 5319161 5319145 -
aattagccggctgtggtggt

SEQ ID NO: 38010 - DNA, 20 bp, Artificial Sequence
  Synthetic oligonucleotide; GGG chr11 5319141 5319160 5319144 -
attagccggctgtggtggtg

SEQ ID NO: 38011 - DNA, 20 bp, Artificial Sequence
  Synthetic oligonucleotide; GGG chr11 5319140 5319159 5319143 -
ttagccggctgtggtggtgg

SEQ ID NO: 38012 - DNA, 20 bp, Artificial Sequence
  Synthetic oligonucleotide; CAG chr11 5319128 5319147 5319131 -
ggtggtgggggctgtaatcc

SEQ ID NO: 38013 - DNA, 20 bp, Artificial Sequence
  Synthetic oligonucleotide; CGG chr11 5319120 5319139 5319123 -
gggctgtaatcccagctact

SEQ ID NO: 38014 - DNA, 20 bp, Artificial Sequence
  Synthetic oligonucleotide; AAG chr11 5319117 5319136 5319120 -
ctgtaatcccagctactcgg

SEQ ID NO: 38015 - DNA, 20 bp, Artificial Sequence
  Synthetic oligonucleotide; AGG chr11 5319116 5319135 5319119 -
tgtaatcccagctactcgga

SEQ ID NO: 38016 - DNA, 20 bp, Artificial Sequence
  Synthetic oligonucleotide; GAG chr11 5319111 5319130 5319114 -
tcccagctactcggaaggct

SEQ ID NO: 38017 - DNA, 20 bp, Artificial Sequence
  Synthetic oligonucleotide; AGG chr11 5319110 5319129 5319113 -
cccagctactcggaaggctg

SEQ ID NO: 38018 - DNA, 20 bp, Artificial Sequence
  Synthetic oligonucleotide; CAG chr11 5319107 5319126 5319110 -
agctactcggaaggctgagg

SEQ ID NO: 38019 - DNA, 20 bp, Artificial Sequence
  Synthetic oligonucleotide; AGG chr11 5319106 5319125 5319109 -
gctactcggaaggctgaggc

SEQ ID NO: 38020 - DNA, 20 bp, Artificial Sequence
  Synthetic oligonucleotide; GAG chr11 5319104 5319123 5319107 -
tactcggaaggctgaggcag

SEQ ID NO: 38021 - DNA, 20 bp, Artificial Sequence
  Synthetic oligonucleotide; TGG chr11 5319087 5319106 5319090 -
caggagaattgcttgaactc

SEQ ID NO: 38022 - DNA, 20 bp, Artificial Sequence
  Synthetic oligonucleotide; GAG chr11 5319085 5319104 5319088 -
ggagaattgcttgaactctg

SEQ ID NO: 38023 - DNA, 20 bp, Artificial Sequence
  Synthetic oligonucleotide; AGG chr11 5319084 5319103 5319087 -
gagaattgcttgaactctgg

SEQ ID NO: 38024 - DNA, 20 bp, Artificial Sequence
  Synthetic oligonucleotide; CAG chr11 5319081 5319100 5319084 -
aattgcttgaactctggagg

SEQ ID NO: 38025 - DNA, 20 bp, Artificial Sequence
  Synthetic oligonucleotide; CGG chr11 5319077 5319096 5319080 -
gcttgaactctggaggcaga

SEQ ID NO: 38026 - DNA, 20 bp, Artificial Sequence
  Synthetic oligonucleotide; CAG chr11 5319072 5319091 5319075 -
aactctggaggcagacggtg

SEQ ID NO: 38027 - DNA, 20 bp, Artificial Sequence
  Synthetic oligonucleotide; GAG chr11 5319068 5319087 5319071 -
ctggaggcagacggtgcagt

SEQ ID NO: 38028 - DNA, 20 bp, Artificial Sequence
  Synthetic oligonucleotide; AAG chr11 5319063 5319082 5319066 -
ggcagacggtgcagtgagcc

SEQ ID NO: 38029 - DNA, 20 bp, Artificial Sequence
  Synthetic oligonucleotide; CAG chr11 5319043 5319062 5319046 -
aagatcgcaccactgcactc

SEQ ID NO: 38030 - DNA, 20 bp, Artificial Sequence
  Synthetic oligonucleotide; TGG chr11 5319038 5319057 5319041 -
cgcaccactgcactccagcc

SEQ ID NO: 38031 - DNA, 20 bp, Artificial Sequence
  Synthetic oligonucleotide; GGG chr11 5319037 5319056 5319040 -
gcaccactgcactccagcct

SEQ ID NO: 38032 - DNA, 20 bp, Artificial Sequence
  Synthetic oligonucleotide; CAG chr11 5319031 5319050 5319034 -
ctgcactccagcctgggtga

SEQ ID NO: 38033 - DNA, 20 bp, Artificial Sequence
  Synthetic oligonucleotide; GAG chr11 5319029 5319048 5319032 -
gcactccagcctgggtgaca

SEQ ID NO: 38034 - DNA, 20 bp, Artificial Sequence
  Synthetic oligonucleotide; AAG chr11 5319004 5319023 5319007 -
aaactctgaaaaaataaaaa

SEQ ID NO: 38035 - DNA, 20 bp, Artificial Sequence
  Synthetic oligonucleotide; AAG chr11 5319000 5319019 5319003 -
tctgaaaaaataaaaaaaga

SEQ ID NO: 38036 - DNA, 20 bp, Artificial Sequence
  Synthetic oligonucleotide; AAG chr11 5318995 5319014 5318998 -
aaaaataaaaaaagaaagaa

SEQ ID NO: 38037 - DNA, 20 bp, Artificial Sequence
  Synthetic oligonucleotide; AAG chr11 5318991 5319010 5318994 -
ataaaaaaagaaagaaaaga

SEQ ID NO: 38038 - DNA, 20 bp, Artificial Sequence
  Synthetic oligonucleotide; AAG chr11 5318987 5319006 5318990 -
aaaaagaaagaaaagaaaga

SEQ ID NO: 38039 - DNA, 20 bp, Artificial Sequence
  Synthetic oligonucleotide; GAG chr11 5318985 5319004 5318988 -
aaagaaagaaaagaaagaaa

SEQ ID NO: 38040 - DNA, 20 bp, Artificial Sequence
  Synthetic oligonucleotide; GAG chr11 5318983 5319002 5318986 -
agaaagaaaagaaagaaaga

SEQ ID NO: 38041 - DNA, 20 bp, Artificial Sequence
  Synthetic oligonucleotide; AGG chr11 5318982 5319001 5318985 -
gaaagaaaagaaagaaagag

SEQ ID NO: 38042 - DNA, 20 bp, Artificial Sequence
  Synthetic oligonucleotide; GGG chr11 5318981 5319000 5318984 -
aaagaaaagaaagaaagaga

SEQ ID NO: 38043 - DNA, 20 bp, Artificial Sequence
  Synthetic oligonucleotide; AAG chr11 5318978 5318997 5318981 -
gaaaagaaagaaagagaggg

SEQ ID NO: 38044 - DNA, 20 bp, Artificial Sequence
  Synthetic oligonucleotide; AAG chr11 5318974 5318993 5318977 -
agaaagaaagagagggaaga

SEQ ID NO: 38045 - DNA, 20 bp, Artificial Sequence
  Synthetic oligonucleotide; AGG chr11 5318973 5318992 5318976 -
gaaagaaagagagggaagaa

SEQ ID NO: 38046 - DNA, 20 bp, Artificial Sequence
  Synthetic oligonucleotide; AAG chr11 5318969 5318988 5318972 -
gaaagagagggaagaaagga

SEQ ID NO: 38047 - DNA, 20 bp, Artificial Sequence
  Synthetic oligonucleotide; AAG chr11 5318954 5318973 5318957 -
aaggaaagaaactacattat

SEQ ID NO: 38048 - DNA, 20 bp, Artificial Sequence
  Synthetic oligonucleotide; AGG chr11 5318953 5318972 5318956 -
aggaaagaaactacattata

SEQ ID NO: 38049 - DNA, 20 bp, Artificial Sequence
  Synthetic oligonucleotide; CAG chr11 5318947 5318966 5318950 -
gaaactacattataaggcca

SEQ ID NO: 38050 - DNA, 20 bp, Artificial Sequence
  Synthetic oligonucleotide; CAG chr11 5318935 5318954 5318938 -
taaggccacagtaccccaaa

SEQ ID NO: 38051 - DNA, 20 bp, Artificial Sequence
  Synthetic oligonucleotide; TAG chr11 5318913 5318932 5318916 -
gcatgatattgttacaaaaa

SEQ ID NO: 38052 - DNA, 20 bp, Artificial Sequence
  Synthetic oligonucleotide; AAG chr11 5318899 5318918 5318902 -
caaaaatagacacattgact

SEQ ID NO: 38053 - DNA, 20 bp, Artificial Sequence
  Synthetic oligonucleotide; AGG chr11 5318898 5318917 5318901 -
aaaaatagacacattgacta

SEQ ID NO: 38054 - DNA, 20 bp, Artificial Sequence
  Synthetic oligonucleotide; TAG chr11 5318887 5318906 5318890 -
cattgactaaggaaacacaa

SEQ ID NO: 38055 - DNA, 20 bp, Artificial Sequence
  Synthetic oligonucleotide; AAG chr11 5318870 5318889 5318873 -
caatagaaaactcaaaaata

SEQ ID NO: 38056 - DNA, 20 bp, Artificial Sequence
  Synthetic oligonucleotide; TAG chr11 5318862 5318881 5318865 -
aactcaaaaataaagctaca

SEQ ID NO: 38057 - DNA, 20 bp, Artificial Sequence
  Synthetic oligonucleotide; AAG chr11 5318822 5318841 5318825 -
tcaacaacactgacaaaaac

SEQ ID NO: 38058 - DNA, 20 bp, Artificial Sequence
  Synthetic oligonucleotide; CAG chr11 5318819 5318838 5318822 -
acaacactgacaaaaacaag

SEQ ID NO: 38059 - DNA, 20 bp, Artificial Sequence
  Synthetic oligonucleotide; CGG chr11 5318816 5318835 5318819 -
acactgacaaaaacaagcag

SEQ ID NO: 38060 - DNA, 20 bp, Artificial Sequence
  Synthetic oligonucleotide; GGG chr11 5318815 5318834 5318818 -
cactgacaaaaacaagcagc

SEQ ID NO: 38061 - DNA, 20 bp, Artificial Sequence
  Synthetic oligonucleotide; AAG chr11 5318810 5318829 5318813 -
acaaaaacaagcagcgggaa

SEQ ID NO: 38062 - DNA, 20 bp, Artificial Sequence
  Synthetic oligonucleotide; AGG chr11 5318809 5318828 5318812 -
caaaaacaagcagcgggaaa

SEQ ID NO: 38063 - DNA, 20 bp, Artificial Sequence
  Synthetic oligonucleotide; TGG chr11 5318783 5318802 5318786 -
acctatccaataaactgtgc

SEQ ID NO: 38064 - DNA, 20 bp, Artificial Sequence
  Synthetic oligonucleotide; TGG chr11 5318774 5318793 5318777 -
ataaactgtgctggaatacg

SEQ ID NO: 38065 - DNA, 20 bp, Artificial Sequence
  Synthetic oligonucleotide; TAG chr11 5318770 5318789 5318773 -
actgtgctggaatacgtggc

SEQ ID NO: 38066 - DNA, 20 bp, Artificial Sequence
  Synthetic oligonucleotide; CAG chr11 5318760 5318779 5318763 -
aatacgtggctagccatatg

SEQ ID NO: 38067 - DNA, 20 bp, Artificial Sequence
  Synthetic oligonucleotide; AAG chr11 5318757 5318776 5318760 -
acgtggctagccatatgcag

SEQ ID NO: 38068 - DNA, 20 bp, Artificial Sequence
  Synthetic oligonucleotide; TAG chr11 5318746 5318765 5318749 -
catatgcagaagaatgaaac

SEQ ID NO: 38069 - DNA, 20 bp, Artificial Sequence
  Synthetic oligonucleotide; TAG chr11 5318724 5318743 5318727 -
gacccttaccttacaccatt

SEQ ID NO: 38070 - DNA, 20 bp, Artificial Sequence
  Synthetic oligonucleotide; GAG chr11 5318722 5318741 5318725 -
cccttaccttacaccattta

SEQ ID NO: 38071 - DNA, 20 bp, Artificial Sequence
  Synthetic oligonucleotide; AAG chr11 5318685 5318704 5318688 -
tgaattcaaaacttaaatgt

SEQ ID NO: 38072 - DNA, 20 bp, Artificial Sequence
  Synthetic oligonucleotide; TGG chr11 5318662 5318681 5318665 -
atctcaaatcttacctgcac

SEQ ID NO: 38073 - DNA, 20 bp, Artificial Sequence
  Synthetic oligonucleotide; CAG chr11 5318659 5318678 5318662 -
tcaaatcttacctgcactgg

SEQ ID NO: 38074 - DNA, 20 bp, Artificial Sequence
  Synthetic oligonucleotide; TGG chr11 5318648 5318667 5318651 -
ctgcactggcagtgcatttt

SEQ ID NO: 38075 - DNA, 20 bp, Artificial Sequence
  Synthetic oligonucleotide; AAG chr11 5318643 5318662 5318646 -
ctggcagtgcatttttggct

SEQ ID NO: 38076 - DNA, 20 bp, Artificial Sequence
  Synthetic oligonucleotide; AAG chr11 5318633 5318652 5318636 -
atttttggctaagcccccaa

SEQ ID NO: 38077 - DNA, 20 bp, Artificial Sequence
  Synthetic oligonucleotide; AAG chr11 5318617 5318636 5318620 -
ccaaaagcaattgcaatgca

SEQ ID NO: 38078 - DNA, 20 bp, Artificial Sequence
  Synthetic oligonucleotide; AAG chr11 5318604 5318623 5318607 -
caatgcaaagaaaaattcac

SEQ ID NO: 38079 - DNA, 20 bp, Artificial Sequence
  Synthetic oligonucleotide; TGG chr11 5318601 5318620 5318604 -
tgcaaagaaaaattcacaag

SEQ ID NO: 38080 - DNA, 20 bp, Artificial Sequence
  Synthetic oligonucleotide; AAG chr11 5318583 5318602 5318586 -
agtggaacctaattaaacta

SEQ ID NO: 38081 - DNA, 20 bp, Artificial Sequence
  Synthetic oligonucleotide; GAG chr11 5318581 5318600 5318584 -
tggaacctaattaaactaaa

SEQ ID NO: 38082 - DNA, 20 bp, Artificial Sequence
  Synthetic oligonucleotide; AAG chr11 5318558 5318577 5318561 -
cttcactattcacaataaca

SEQ ID NO: 38083 - DNA, 20 bp, Artificial Sequence
  Synthetic oligonucleotide; TGG chr11 5318552 5318571 5318555 -
tattcacaataacaaagact

SEQ ID NO: 38084 - DNA, 20 bp, Artificial Sequence
  Synthetic oligonucleotide; TAG chr11 5318524 5318543 5318527 -
acccaaatgtccaacaatga

SEQ ID NO: 38085 - DNA, 20 bp, Artificial Sequence
  Synthetic oligonucleotide; TGG chr11 5318519 5318538 5318522 -
aatgtccaacaatgatagaa

SEQ ID NO: 38086 - DNA, 20 bp, Artificial Sequence
  Synthetic oligonucleotide; AAG chr11 5318513 5318532 5318516 -
caacaatgatagaatggatt

SEQ ID NO: 38087 - DNA, 20 bp, Artificial Sequence
  Synthetic oligonucleotide; TGG chr11 5318504 5318523 5318507 -
tagaatggattaagaaaatg

SEQ ID NO: 38088 - DNA, 20 bp, Artificial Sequence
  Synthetic oligonucleotide; TGG chr11 5318488 5318507 5318491 -
aatgtggcacatatacacca

SEQ ID NO: 38089 - DNA, 20 bp, Artificial Sequence
  Synthetic oligonucleotide; CAG chr11 5318476 5318495 5318479 -
atacaccatggaatactatg

SEQ ID NO: 38090 - DNA, 20 bp, Artificial Sequence
  Synthetic oligonucleotide; GAG chr11 5318459 5318478 5318462 -
atgcagccataaaaaatgat

SEQ ID NO: 38091 - DNA, 20 bp, Artificial Sequence
  Synthetic oligonucleotide; TAG chr11 5318443 5318462 5318446 -
tgatgagttcatgtcctttg

SEQ ID NO: 38092 - DNA, 20 bp, Artificial Sequence
  Synthetic oligonucleotide; AGG chr11 5318442 5318461 5318445 -
gatgagttcatgtcctttgt

SEQ ID NO: 38093 - DNA, 20 bp, Artificial Sequence
  Synthetic oligonucleotide; GGG chr11 5318441 5318460 5318444 -
atgagttcatgtcctttgta

SEQ ID NO: 38094 - DNA, 20 bp, Artificial Sequence
  Synthetic oligonucleotide; TGG chr11 5318435 5318454 5318438 -
tcatgtcctttgtagggaca

SEQ ID NO: 38095 - DNA, 20 bp, Artificial Sequence
  Synthetic oligonucleotide; AAG chr11 5318429 5318448 5318432 -
cctttgtagggacatggatg

SEQ ID NO: 38096 - DNA, 20 bp, Artificial Sequence
  Synthetic oligonucleotide; TGG chr11 5318425 5318444 5318428 -
tgtagggacatggatgaagc

SEQ ID NO: 38097 - DNA, 20 bp, Artificial Sequence
  Synthetic oligonucleotide; CAG chr11 5318409 5318428 5318412 -
aagctggaaaccatcattct

SEQ ID NO: 38098 - DNA, 20 bp, Artificial Sequence
  Synthetic oligonucleotide; AAG chr11 5318395 5318414 5318398 -
cattctcagcaaactatcac

SEQ ID NO: 38099 - DNA, 20 bp, Artificial Sequence
  Synthetic oligonucleotide; AGG chr11 5318394 5318413 5318397 -
attctcagcaaactatcaca

SEQ ID NO: 38100 - DNA, 20 bp, Artificial Sequence
  Synthetic oligonucleotide; TAG chr11 5318359 5318378 5318362 -
ataccacatgttctcactta

SEQ ID NO: 38101 - DNA, 20 bp, Artificial Sequence
  Synthetic oligonucleotide; AGG chr11 5318358 5318377 5318361 -
taccacatgttctcacttat

SEQ ID NO: 38102 - DNA, 20 bp, Artificial Sequence
  Synthetic oligonucleotide; TGG chr11 5318355 5318374 5318358 -
cacatgttctcacttatagg

SEQ ID NO: 38103 - DNA, 20 bp, Artificial Sequence
  Synthetic oligonucleotide; GGG chr11 5318354 5318373 5318357 -
acatgttctcacttataggt

SEQ ID NO: 38104 - DNA, 20 bp, Artificial Sequence
  Synthetic oligonucleotide; GAG chr11 5318340 5318359 5318343 -
ataggtgggaattgaacaat

SEQ ID NO: 38105 - DNA, 20 bp, Artificial Sequence
  Synthetic oligonucleotide; TGG chr11 5318331 5318350 5318334 -
aattgaacaatgagaacact

SEQ ID NO: 38106 - DNA, 20 bp, Artificial Sequence
  Synthetic oligonucleotide; CAG chr11 5318327 5318346 5318330 -
gaacaatgagaacacttgga

SEQ ID NO: 38107 - DNA, 20 bp, Artificial Sequence
  Synthetic oligonucleotide; GAG chr11 5318325 5318344 5318328 -
acaatgagaacacttggaca

SEQ ID NO: 38108 - DNA, 20 bp, Artificial Sequence
  Synthetic oligonucleotide; AGG chr11 5318324 5318343 5318327 -
caatgagaacacttggacag

SEQ ID NO: 38109 - DNA, 20 bp, Artificial Sequence
  Synthetic oligonucleotide; AAG chr11 5318321 5318340 5318324 -
tgagaacacttggacagagg

SEQ ID NO: 38110 - DNA, 20 bp, Artificial Sequence
  Synthetic oligonucleotide; AGG chr11 5318320 5318339 5318323 -
gagaacacttggacagagga

SEQ ID NO: 38111 - DNA, 20 bp, Artificial Sequence
  Synthetic oligonucleotide; GGG chr11 5318319 5318338 5318322 -
agaacacttggacagaggaa

SEQ ID NO: 38112 - DNA, 20 bp, Artificial Sequence
  Synthetic oligonucleotide; GGG chr11 5318318 5318337 5318321 -
gaacacttggacagaggaag

SEQ ID NO: 38113 - DNA, 20 bp, Artificial Sequence
  Synthetic oligonucleotide; CAG chr11 5318303 5318322 5318306 -
ggaaggggaacatcacacac

SEQ ID NO: 38114 - DNA, 20 bp, Artificial Sequence
  Synthetic oligonucleotide; AGG chr11 5318302 5318321 5318305 -
gaaggggaacatcacacacc

SEQ ID NO: 38115 - DNA, 20 bp, Artificial Sequence
  Synthetic oligonucleotide; GGG chr11 5318301 5318320 5318304 -
aaggggaacatcacacacca

SEQ ID NO: 38116 - DNA, 20 bp, Artificial Sequence
  Synthetic oligonucleotide; TGG chr11 5318291 5318310 5318294 -
tcacacaccagggcctgttg

SEQ ID NO: 38117 - DNA, 20 bp, Artificial Sequence
  Synthetic oligonucleotide; GGG chr11 5318290 5318309 5318293 -
cacacaccagggcctgttgt

SEQ ID NO: 38118 - DNA, 20 bp, Artificial Sequence
  Synthetic oligonucleotide; GGG chr11 5318289 5318308 5318292 -
acacaccagggcctgttgtg

SEQ ID NO: 38119 - DNA, 20 bp, Artificial Sequence
  Synthetic oligonucleotide; TGG chr11 5318286 5318305 5318289 -
caccagggcctgttgtgggg

SEQ ID NO: 38120 - DNA, 20 bp, Artificial Sequence
  Synthetic oligonucleotide; GGG chr11 5318285 5318304 5318288 -
accagggcctgttgtggggt

SEQ ID NO: 38121 - DNA, 20 bp, Artificial Sequence
  Synthetic oligonucleotide; GGG chr11 5318284 5318303 5318287 -
ccagggcctgttgtggggtg

SEQ ID NO: 38122 - DNA, 20 bp, Artificial Sequence
  Synthetic oligonucleotide; GGG chr11 5318283 5318302 5318286 -
cagggcctgttgtggggtgg

SEQ ID NO: 38123 - DNA, 20 bp, Artificial Sequence
  Synthetic oligonucleotide; TGG chr11 5318280 5318299 5318283 -
ggcctgttgtggggtggggg

SEQ ID NO: 38124 - DNA, 20 bp, Artificial Sequence
  Synthetic oligonucleotide; GGG chr11 5318279 5318298 5318282 -
gcctgttgtggggtgggggt

SEQ ID NO: 38125 - DNA, 20 bp, Artificial Sequence
  Synthetic oligonucleotide; GGG chr11 5318278 5318297 5318281 -
cctgttgtggggtgggggtg

SEQ ID NO: 38126 - DNA, 20 bp, Artificial Sequence
  Synthetic oligonucleotide; GGG chr11 5318277 5318296 5318280 -
ctgttgtggggtgggggtgg

SEQ ID NO: 38127 - DNA, 20 bp, Artificial Sequence
  Synthetic oligonucleotide; GGG chr11 5318276 5318295 5318279 -
tgttgtggggtgggggtggg

SEQ ID NO: 38128 - DNA, 20 bp, Artificial Sequence
  Synthetic oligonucleotide; TGG chr11 5318273 5318292 5318276 -
tgtggggtgggggtgggggg

SEQ ID NO: 38129 - DNA, 20 bp, Artificial Sequence
  Synthetic oligonucleotide; GAG chr11 5318271 5318290 5318274 -
tggggtgggggtggggggtg

SEQ ID NO: 38130 - DNA, 20 bp, Artificial Sequence
  Synthetic oligonucleotide; GAG chr11 5318269 5318288 5318272 -
gggtgggggtggggggtgga

SEQ ID NO: 38131 - DNA, 20 bp, Artificial Sequence
  Synthetic oligonucleotide; AGG chr11 5318268 5318287 5318271 -
ggtgggggtggggggtggag

SEQ ID NO: 38132 - DNA, 20 bp, Artificial Sequence
  Synthetic oligonucleotide; GGG chr11 5318267 5318286 5318270 -
gtgggggtggggggtggaga

SEQ ID NO: 38133 - DNA, 20 bp, Artificial Sequence
  Synthetic oligonucleotide; TAG chr11 5318263 5318282 5318266 -
gggtggggggtggagaggga

SEQ ID NO: 38134 - DNA, 20 bp, Artificial Sequence
  Synthetic oligonucleotide; TAG chr11 5318257 5318276 5318260 -
ggggtggagagggatagcat

SEQ ID NO: 38135 - DNA, 20 bp, Artificial Sequence
  Synthetic oligonucleotide; AGG chr11 5318256 5318275 5318259 -
gggtggagagggatagcatt

SEQ ID NO: 38136 - DNA, 20 bp, Artificial Sequence
  Synthetic oligonucleotide; GAG chr11 5318254 5318273 5318257 -
gtggagagggatagcattag

SEQ ID NO: 38137 - DNA, 20 bp, Artificial Sequence
  Synthetic oligonucleotide; GAG chr11 5318231 5318250 5318234 -
atatacctaatgtaaatgat

SEQ ID NO: 38138 - DNA, 20 bp, Artificial Sequence
  Synthetic oligonucleotide; TGG chr11 5318224 5318243 5318227 -
taatgtaaatgatgagttaa

SEQ ID NO: 38139 - DNA, 20 bp, Artificial Sequence
  Synthetic oligonucleotide; GGG chr11 5318223 5318242 5318226 -
aatgtaaatgatgagttaat

SEQ ID NO: 38140 - DNA, 20 bp, Artificial Sequence
  Synthetic oligonucleotide; CAG chr11 5318218 5318237 5318221 -
aaatgatgagttaatgggtg

SEQ ID NO: 38141 - DNA, 20 bp, Artificial Sequence
  Synthetic oligonucleotide; TGG chr11 5318205 5318224 5318208 -
atgggtgcagcacaccaaca

SEQ ID NO: 38142 - DNA, 20 bp, Artificial Sequence
  Synthetic oligonucleotide; TAG chr11 5318155 5318174 5318158 -
cacgttgcgcacatgtaccc

SEQ ID NO: 38143 - DNA, 20 bp, Artificial Sequence
  Synthetic oligonucleotide; AAG chr11 5318146 5318165 5318149 -
cacatgtaccctagaactta

SEQ ID NO: 38144 - DNA, 20 bp, Artificial Sequence
  Synthetic oligonucleotide; AAG chr11 5318125 5318144 5318128 -
agtataataataataataaa

SEQ ID NO: 38145 - DNA, 20 bp, Artificial Sequence
  Synthetic oligonucleotide; GAG chr11 5318123 5318142 5318126 -
tataataataataataaaaa

SEQ ID NO: 38146 - DNA, 20 bp, Artificial Sequence
  Synthetic oligonucleotide; CAG chr11 5318112 5318131 5318115 -
taataaaaagagcttctgtg

SEQ ID NO: 38147 - DNA, 20 bp, Artificial Sequence
  Synthetic oligonucleotide; CAG chr11 5318109 5318128 5318112 -
taaaaagagcttctgtgcag

SEQ ID NO: 38148 - DNA, 20 bp, Artificial Sequence
  Synthetic oligonucleotide; AAG chr11 5318106 5318125 5318109 -
aaagagcttctgtgcagcag

SEQ ID NO: 38149 - DNA, 20 bp, Artificial Sequence
  Synthetic oligonucleotide; CAG chr11 5318093 5318112 5318096 -
gcagcagaagaaactatcaa

SEQ ID NO: 38150 - DNA, 20 bp, Artificial Sequence
  Synthetic oligonucleotide; GAG chr11 5318091 5318110 5318094 -
agcagaagaaactatcaaca

SEQ ID NO: 38151 - DNA, 20 bp, Artificial Sequence
  Synthetic oligonucleotide; CAG chr11 5318073 5318092 5318076 -
cagagtaaactgacaatcta

SEQ ID NO: 38152 - DNA, 20 bp, Artificial Sequence
  Synthetic oligonucleotide; AGG chr11 5318072 5318091 5318075 -
agagtaaactgacaatctac

SEQ ID NO: 38153 - DNA, 20 bp, Artificial Sequence
  Synthetic oligonucleotide; TAG chr11 5318068 5318087 5318071 -
taaactgacaatctacagga

SEQ ID NO: 38154 - DNA, 20 bp, Artificial Sequence
  Synthetic oligonucleotide; AGG chr11 5318067 5318086 5318070 -
aaactgacaatctacaggat

SEQ ID NO: 38155 - DNA, 20 bp, Artificial Sequence
  Synthetic oligonucleotide; GAG chr11 5318065 5318084 5318068 -
actgacaatctacaggatag

SEQ ID NO: 38156 - DNA, 20 bp, Artificial Sequence
  Synthetic oligonucleotide; TGG chr11 5318039 5318058 5318042 -
ctattcacaaactgtgcatc

SEQ ID NO: 38157 - DNA, 20 bp, Artificial Sequence
  Synthetic oligonucleotide; AAG chr11 5318034 5318053 5318037 -
cacaaactgtgcatctggaa

SEQ ID NO: 38158 - DNA, 20 bp, Artificial Sequence
  Synthetic oligonucleotide; AGG chr11 5318033 5318052 5318036 -
acaaactgtgcatctggaaa

SEQ ID NO: 38159 - DNA, 20 bp, Artificial Sequence
  Synthetic oligonucleotide; CAG chr11 5318021 5318040 5318024 -
tctggaaaaggtctaatatt

SEQ ID NO: 38160 - DNA, 20 bp, Artificial Sequence
  Synthetic oligonucleotide; AAG chr11 5318011 5318030 5318014 -
gtctaatattcagaatctat

SEQ ID NO: 38161 - DNA, 20 bp, Artificial Sequence
  Synthetic oligonucleotide; AGG chr11 5318010 5318029 5318013 -
tctaatattcagaatctata

SEQ ID NO: 38162 - DNA, 20 bp, Artificial Sequence
  Synthetic oligonucleotide; CAG chr11 5317994 5318013 5317997 -
tataaggaattcgaacatat

SEQ ID NO: 38163 - DNA, 20 bp, Artificial Sequence
  Synthetic oligonucleotide; AAG chr11 5317990 5318009 5317993 -
aggaattcgaacatatcagc

SEQ ID NO: 38164 - DNA, 20 bp, Artificial Sequence
  Synthetic oligonucleotide; AAG chr11 5317983 5318002 5317986 -
cgaacatatcagcaagcaaa

SEQ ID NO: 38165 - DNA, 20 bp, Artificial Sequence
  Synthetic oligonucleotide; TGG chr11 5317960 5317979 5317963 -
caaacaattccatttaaaaa

SEQ ID NO: 38166 - DNA, 20 bp, Artificial Sequence
  Synthetic oligonucleotide; GGG chr11 5317959 5317978 5317962 -
aaacaattccatttaaaaat

SEQ ID NO: 38167 - DNA, 20 bp, Artificial Sequence
  Synthetic oligonucleotide; CAG chr11 5317943 5317962 5317946 -
aaatgggcaaaatccacgaa

SEQ ID NO: 38168 - DNA, 20 bp, Artificial Sequence
  Synthetic oligonucleotide; AAG chr11 5317931 5317950 5317934 -
tccacgaacagactcttctc

SEQ ID NO: 38169 - DNA, 20 bp, Artificial Sequence
  Synthetic oligonucleotide; GAG chr11 5317929 5317948 5317932 -
cacgaacagactcttctcaa

SEQ ID NO: 38170 - DNA, 20 bp, Artificial Sequence
  Synthetic oligonucleotide; AAG chr11 5317926 5317945 5317929 -
gaacagactcttctcaagag

SEQ ID NO: 38171 - DNA, 20 bp, Artificial Sequence
  Synthetic oligonucleotide; CAG chr11 5317918 5317937 5317921 -
tcttctcaagagaagacata

SEQ ID NO: 38172 - DNA, 20 bp, Artificial Sequence
  Synthetic oligonucleotide; AGG chr11 5317917 5317936 5317920 -
cttctcaagagaagacatac

SEQ ID NO: 38173 - DNA, 20 bp, Artificial Sequence
  Synthetic oligonucleotide; CAG chr11 5317914 5317933 5317917 -
ctcaagagaagacatacagg

SEQ ID NO: 38174 - DNA, 20 bp, Artificial Sequence
  Synthetic oligonucleotide; GAG chr11 5317874 5317893 5317877 -
aaatgatcatcatcactaat

SEQ ID NO: 38175 - DNA, 20 bp, Artificial Sequence
  Synthetic oligonucleotide; GAG chr11 5317872 5317891 5317875 -
atgatcatcatcactaatga

SEQ ID NO: 38176 - DNA, 20 bp, Artificial Sequence
  Synthetic oligonucleotide; AAG chr11 5317850 5317869 5317853 -
gaaatgcaaatcaaaaccac

SEQ ID NO: 38177 - DNA, 20 bp, Artificial Sequence
  Synthetic oligonucleotide; GAG chr11 5317848 5317867 5317851 -
aatgcaaatcaaaaccacaa

SEQ ID NO: 38178 - DNA, 20 bp, Artificial Sequence
  Synthetic oligonucleotide; CAG chr11 5317831 5317850 5317834 -
caagagatactatctcatac

SEQ ID NO: 38179 - DNA, 20 bp, Artificial Sequence
  Synthetic oligonucleotide; CAG chr11 5317827 5317846 5317830 -
agatactatctcataccagt

SEQ ID NO: 38180 - DNA, 20 bp, Artificial Sequence
  Synthetic oligonucleotide; TAG chr11 5317822 5317841 5317825 -
ctatctcataccagtcagaa

SEQ ID NO: 38181 - DNA, 20 bp, Artificial Sequence
  Synthetic oligonucleotide; AAG chr11 5317808 5317827 5317811 -
tcagaatagctatttttaaa

SEQ ID NO: 38182 - DNA, 20 bp, Artificial Sequence
  Synthetic oligonucleotide; CAG chr11 5317797 5317816 5317800 -
atttttaaaaagccaaaaaa

SEQ ID NO: 38183 - DNA, 20 bp, Artificial Sequence
  Synthetic oligonucleotide; GAG chr11 5317786 5317805 5317789 -
gccaaaaaacagattctcat

SEQ ID NO: 38184 - DNA, 20 bp, Artificial Sequence
  Synthetic oligonucleotide; AGG chr11 5317785 5317804 5317788 -
ccaaaaaacagattctcatg

SEQ ID NO: 38185 - DNA, 20 bp, Artificial Sequence
  Synthetic oligonucleotide; TGG chr11 5317779 5317798 5317782 -
aacagattctcatgaggcta

SEQ ID NO: 38186 - DNA, 20 bp, Artificial Sequence
  Synthetic oligonucleotide; GAG chr11 5317777 5317796 5317780 -
cagattctcatgaggctatg

SEQ ID NO: 38187 - DNA, 20 bp, Artificial Sequence
  Synthetic oligonucleotide; AAG chr11 5317772 5317791 5317775 -
tctcatgaggctatggagaa

SEQ ID NO: 38188 - DNA, 20 bp, Artificial Sequence
  Synthetic oligonucleotide; AGG chr11 5317771 5317790 5317774 -
ctcatgaggctatggagaaa

SEQ ID NO: 38189 - DNA, 20 bp, Artificial Sequence
  Synthetic oligonucleotide; GGG chr11 5317770 5317789 5317773 -
tcatgaggctatggagaaaa

SEQ ID NO: 38190 - DNA, 20 bp, Artificial Sequence
  Synthetic oligonucleotide; TGG chr11 5317748 5317767 5317751 -
gaacacttatacaatgatga

SEQ ID NO: 38191 - DNA, 20 bp, Artificial Sequence
  Synthetic oligonucleotide; GGG chr11 5317747 5317766 5317750 -
aacacttatacaatgatgat

SEQ ID NO: 38192 - DNA, 20 bp, Artificial Sequence
  Synthetic oligonucleotide; GGG chr11 5317746 5317765 5317749 -
acacttatacaatgatgatg

SEQ ID NO: 38193 - DNA, 20 bp, Artificial Sequence
  Synthetic oligonucleotide; TAG chr11 5317735 5317754 5317738 -
atgatgatggggatgtaaat

SEQ ID NO: 38194 - DNA, 20 bp, Artificial Sequence
  Synthetic oligonucleotide; CAG chr11 5317721 5317740 5317724 -
gtaaattagttcaaccactg

SEQ ID NO: 38195 - DNA, 20 bp, Artificial Sequence
  Synthetic oligonucleotide; CAG chr11 5317714 5317733 5317717 -
agttcaaccactgcagaaaa

SEQ ID NO: 38196 - DNA, 20 bp, Artificial Sequence
  Synthetic oligonucleotide; TGG chr11 5317709 5317728 5317712 -
aaccactgcagaaaacagtt

SEQ ID NO: 38197 - DNA, 20 bp, Artificial Sequence
  Synthetic oligonucleotide; GAG chr11 5317707 5317726 5317710 -
ccactgcagaaaacagtttg

SEQ ID NO: 38198 - DNA, 20 bp, Artificial Sequence
  Synthetic oligonucleotide; GAG chr11 5317705 5317724 5317708 -
actgcagaaaacagtttgga

SEQ ID NO: 38199 - DNA, 20 bp, Artificial Sequence
  Synthetic oligonucleotide; AAG chr11 5317696 5317715 5317699 -
aacagtttggagagtcttca

SEQ ID NO: 38200 - DNA, 20 bp, Artificial Sequence
  Synthetic oligonucleotide; AAG chr11 5317687 5317706 5317690 -
gagagtcttcaaagaacttt

SEQ ID NO: 38201 - DNA, 20 bp, Artificial Sequence
  Synthetic oligonucleotide; CAG chr11 5317684 5317703 5317687 -
agtcttcaaagaactttaag

SEQ ID NO: 38202 - DNA, 20 bp, Artificial Sequence
  Synthetic oligonucleotide; GAG chr11 5317682 5317701 5317685 -
tcttcaaagaactttaagca

SEQ ID NO: 38203 - DNA, 20 bp, Artificial Sequence
  Synthetic oligonucleotide; CAG chr11 5317666 5317685 5317669 -
agcagagctacaatttgaca

SEQ ID NO: 38204 - DNA, 20 bp, Artificial Sequence
  Synthetic oligonucleotide; TGG chr11 5317651 5317670 5317654 -
tgacacagcaatcccgctac

SEQ ID NO: 38205 - DNA, 20 bp, Artificial Sequence
  Synthetic oligonucleotide; GGG chr11 5317650 5317669 5317653 -
gacacagcaatcccgctact

SEQ ID NO: 38206 - DNA, 20 bp, Artificial Sequence
  Synthetic oligonucleotide; TAG chr11 5317637 5317656 5317640 -
cgctactgggtatatatcca

SEQ ID NO: 38207 - DNA, 20 bp, Artificial Sequence
  Synthetic oligonucleotide; AGG chr11 5317636 5317655 5317639 -
gctactgggtatatatccat

SEQ ID NO: 38208 - DNA, 20 bp, Artificial Sequence
  Synthetic oligonucleotide; CAG chr11 5317629 5317648 5317632 -
ggtatatatccataggaaaa

SEQ ID NO: 38209 - DNA, 20 bp, Artificial Sequence
  Synthetic oligonucleotide; GAG chr11 5317627 5317646 5317630 -
tatatatccataggaaaaca

SEQ ID NO: 38210 - DNA, 20 bp, Artificial Sequence
  Synthetic oligonucleotide; TAG chr11 5317621 5317640 5317624 -
tccataggaaaacagagcat

SEQ ID NO: 38211 - DNA, 20 bp, Artificial Sequence
  Synthetic oligonucleotide; TAG chr11 5317612 5317631 5317615 -
aaacagagcattagaccaac

SEQ ID NO: 38212 - DNA, 20 bp, Artificial Sequence
  Synthetic oligonucleotide; TAG chr11 5317575 5317594 5317578 -
atgttcactgtaatgctgtt

SEQ ID NO: 38213 - DNA, 20 bp, Artificial Sequence
  Synthetic oligonucleotide; TAG chr11 5317570 5317589 5317573 -
cactgtaatgctgtttagaa

SEQ ID NO: 38214 - DNA, 20 bp, Artificial Sequence
  Synthetic oligonucleotide; TGG chr11 5317553 5317572 5317556 -
gaatagcaaatacaaataac

SEQ ID NO: 38215 - DNA, 20 bp, Artificial Sequence
  Synthetic oligonucleotide; TAG chr11 5317548 5317567 5317551 -
gcaaatacaaataactggcc

SEQ ID NO: 38216 - DNA, 20 bp, Artificial Sequence
  Synthetic oligonucleotide; AGG chr11 5317547 5317566 5317550 -
caaatacaaataactggcct

SEQ ID NO: 38217 - DNA, 20 bp, Artificial Sequence
  Synthetic oligonucleotide; AAG chr11 5317535 5317554 5317538 -
actggcctaggtgtctatca

SEQ ID NO: 38218 - DNA, 20 bp, Artificial Sequence
  Synthetic oligonucleotide; AGG chr11 5317534 5317553 5317537 -
ctggcctaggtgtctatcaa

SEQ ID NO: 38219 - DNA, 20 bp, Artificial Sequence
  Synthetic oligonucleotide; CGG chr11 5317531 5317550 5317534 -
gcctaggtgtctatcaaagg

SEQ ID NO: 38220 - DNA, 20 bp, Artificial Sequence
  Synthetic oligonucleotide; CGG chr11 5317527 5317546 5317530 -
aggtgtctatcaaaggcgga

SEQ ID NO: 38221 - DNA, 20 bp, Artificial Sequence
  Synthetic oligonucleotide; GGG chr11 5317526 5317545 5317529 -
ggtgtctatcaaaggcggac

SEQ ID NO: 38222 - DNA, 20 bp, Artificial Sequence
  Synthetic oligonucleotide; AAG chr11 5317520 5317539 5317523 -
tatcaaaggcggacgggata

SEQ ID NO: 38223 - DNA, 20 bp, Artificial Sequence
  Synthetic oligonucleotide; TGG chr11 5317511 5317530 5317514 -
cggacgggataaagaaactg

SEQ ID NO: 38224 - DNA, 20 bp, Artificial Sequence
  Synthetic oligonucleotide; TGG chr11 5317487 5317506 5317490 -
acatatacaccaccactatg

SEQ ID NO: 38225 - DNA, 20 bp, Artificial Sequence
  Synthetic oligonucleotide; AAG chr11 5317480 5317499 5317483 -
caccaccactatgtggcaat

SEQ ID NO: 38226 - DNA, 20 bp, Artificial Sequence
  Synthetic oligonucleotide; CAG chr11 5317454 5317473 5317457 -
aaatgaaatcatgtcctttt

SEQ ID NO: 38227 - DNA, 20 bp, Artificial Sequence
  Synthetic oligonucleotide; TGG chr11 5317446 5317465 5317449 -
tcatgtccttttcagcaaca

SEQ ID NO: 38228 - DNA, 20 bp, Artificial Sequence
  Synthetic oligonucleotide; GGG chr11 5317445 5317464 5317448 -
catgtccttttcagcaacat

SEQ ID NO: 38229 - DNA, 20 bp, Artificial Sequence
  Synthetic oligonucleotide; TGG chr11 5317442 5317461 5317445 -
gtccttttcagcaacatggg

SEQ ID NO: 38230 - DNA, 20 bp, Artificial Sequence
  Synthetic oligonucleotide; GAG chr11 5317440 5317459 5317443 -
ccttttcagcaacatgggtg

SEQ ID NO: 38231 - DNA, 20 bp, Artificial Sequence
  Synthetic oligonucleotide; TGG chr11 5317436 5317455 5317439 -
ttcagcaacatgggtggagc

SEQ ID NO: 38232 - DNA, 20 bp, Artificial Sequence
  Synthetic oligonucleotide; GAG chr11 5317434 5317453 5317437 -
cagcaacatgggtggagctg

SEQ ID NO: 38233 - DNA, 20 bp, Artificial Sequence
  Synthetic oligonucleotide; AGG chr11 5317433 5317452 5317436 -
agcaacatgggtggagctgg

SEQ ID NO: 38234 - DNA, 20 bp, Artificial Sequence
  Synthetic oligonucleotide; AAG chr11 5317420 5317439 5317423 -
gagctggaggctataatcct

SEQ ID NO: 38235 - DNA, 20 bp, Artificial Sequence
  Synthetic oligonucleotide; AAG chr11 5317406 5317425 5317409 -
aatcctaagcaaattaacgc

SEQ ID NO: 38236 - DNA, 20 bp, Artificial Sequence
  Synthetic oligonucleotide; AAG chr11 5317396 5317415 5317399 -
aaattaacgcaagaacacaa

SEQ ID NO: 38237 - DNA, 20 bp, Artificial Sequence
  Synthetic oligonucleotide; AAG chr11 5317369 5317388 5317372 -
taccatatattctcatttat

SEQ ID NO: 38238 - DNA, 20 bp, Artificial Sequence
  Synthetic oligonucleotide; TGG chr11 5317366 5317385 5317369 -
catatattctcatttataag

SEQ ID NO: 38239 - DNA, 20 bp, Artificial Sequence
  Synthetic oligonucleotide; AAG chr11 5317363 5317382 5317366 -
atattctcatttataagtgg

SEQ ID NO: 38240 - DNA, 20 bp, Artificial Sequence
  Synthetic oligonucleotide; GAG chr11 5317351 5317370 5317354 -
ataagtggaagctaaacatt

SEQ ID NO: 38241 - DNA, 20 bp, Artificial Sequence
  Synthetic oligonucleotide; TGG chr11 5317342 5317361 5317345 -
agctaaacattgagtacacg

SEQ ID NO: 38242 - DNA, 20 bp, Artificial Sequence
  Synthetic oligonucleotide; TGG chr11 5317330 5317349 5317333 -
agtacacgtggatataaaca

SEQ ID NO: 38243 - DNA, 20 bp, Artificial Sequence
  Synthetic oligonucleotide; GGG chr11 5317329 5317348 5317332 -
gtacacgtggatataaacat

SEQ ID NO: 38244 - DNA, 20 bp, Artificial Sequence
  Synthetic oligonucleotide; TAG chr11 5317321 5317340 5317324 -
ggatataaacatgggaacaa

SEQ ID NO: 38245 - DNA, 20 bp, Artificial Sequence
  Synthetic oligonucleotide; AAG chr11 5317301 5317320 5317304 -
tagccacttgaaactactac

SEQ ID NO: 38246 - DNA, 20 bp, Artificial Sequence
  Synthetic oligonucleotide; AGG chr11 5317300 5317319 5317303 -
agccacttgaaactactaca

SEQ ID NO: 38247 - DNA, 20 bp, Artificial Sequence
  Synthetic oligonucleotide; GGG chr11 5317299 5317318 5317302 -
gccacttgaaactactacaa

SEQ ID NO: 38248 - DNA, 20 bp, Artificial Sequence
  Synthetic oligonucleotide; GGG chr11 5317298 5317317 5317301 -
ccacttgaaactactacaag

SEQ ID NO: 38249 - DNA, 20 bp, Artificial Sequence
  Synthetic oligonucleotide; CAG chr11 5317295 5317314 5317298 -
cttgaaactactacaagggg

SEQ ID NO: 38250 - DNA, 20 bp, Artificial Sequence
  Synthetic oligonucleotide; AGG chr11 5317294 5317313 5317297 -
ttgaaactactacaaggggc

SEQ ID NO: 38251 - DNA, 20 bp, Artificial Sequence
  Synthetic oligonucleotide; GGG chr11 5317293 5317312 5317296 -
tgaaactactacaaggggca

SEQ ID NO: 38252 - DNA, 20 bp, Artificial Sequence
  Synthetic oligonucleotide; GAG chr11 5317291 5317310 5317294 -
aaactactacaaggggcagg

SEQ ID NO: 38253 - DNA, 20 bp, Artificial Sequence
  Synthetic oligonucleotide; GAG chr11 5317289 5317308 5317292 -
actactacaaggggcaggga

SEQ ID NO: 38254 - DNA, 20 bp, Artificial Sequence
  Synthetic oligonucleotide; CGG chr11 5317283 5317302 5317286 -
acaaggggcagggagagatg

SEQ ID NO: 38255 - DNA, 20 bp, Artificial Sequence
  Synthetic oligonucleotide; GGG chr11 5317282 5317301 5317285 -
caaggggcagggagagatgc

SEQ ID NO: 38256 - DNA, 20 bp, Artificial Sequence
  Synthetic oligonucleotide; GAG chr11 5317280 5317299 5317283 -
aggggcagggagagatgcgg

SEQ ID NO: 38257 - DNA, 20 bp, Artificial Sequence
  Synthetic oligonucleotide; GAG chr11 5317278 5317297 5317281 -
gggcagggagagatgcggga

SEQ ID NO: 38258 - DNA, 20 bp, Artificial Sequence
  Synthetic oligonucleotide; AGG chr11 5317277 5317296 5317280 -
ggcagggagagatgcgggag

SEQ ID NO: 38259 - DNA, 20 bp, Artificial Sequence
  Synthetic oligonucleotide; GGG chr11 5317276 5317295 5317279 -
gcagggagagatgcgggaga

SEQ ID NO: 38260 - DNA, 20 bp, Artificial Sequence
  Synthetic oligonucleotide; TGG chr11 5317260 5317279 5317263 -
gagagggttaaaaaatctat

SEQ ID NO: 38261 - DNA, 20 bp, Artificial Sequence
  Synthetic oligonucleotide; TAG chr11 5317256 5317275 5317259 -
gggttaaaaaatctattgga

SEQ ID NO: 38262 - DNA, 20 bp, Artificial Sequence
  Synthetic oligonucleotide; AAG chr11 5317208 5317227 5317211 -
tccatgtaaaaaacctgcac

SEQ ID NO: 38263 - DNA, 20 bp, Artificial Sequence
  Synthetic oligonucleotide; AAG chr11 5317190 5317209 5317193 -
acaagtacccactgtatcta

SEQ ID NO: 38264 - DNA, 20 bp, Artificial Sequence
  Synthetic oligonucleotide; AAG chr11 5317169 5317188 5317172 -
agtaaatgttgaaaatttaa

SEQ ID NO: 38265 - DNA, 20 bp, Artificial Sequence
  Synthetic oligonucleotide; AAG chr11 5317145 5317164 5317148 -
aaaaacaaataaataaaaac

SEQ ID NO: 38266 - DNA, 20 bp, Artificial Sequence
  Synthetic oligonucleotide; TGG chr11 5317129 5317148 5317132 -
aaacaagtctatcctgaacc

SEQ ID NO: 38267 - DNA, 20 bp, Artificial Sequence
  Synthetic oligonucleotide; TGG chr11 5317119 5317138 5317122 -
atcctgaacctggtatgaaa

SEQ ID NO: 38268 - DNA, 20 bp, Artificial Sequence
  Synthetic oligonucleotide; GGG chr11 5317118 5317137 5317121 -
tcctgaacctggtatgaaat

SEQ ID NO: 38269 - DNA, 20 bp, Artificial Sequence
  Synthetic oligonucleotide; CAG chr11 5317115 5317134 5317118 -
tgaacctggtatgaaatggg

SEQ ID NO: 38270 - DNA, 20 bp, Artificial Sequence
  Synthetic oligonucleotide; AAG chr11 5317095 5317114 5317098 -
cagtgatttttatataaaca

SEQ ID NO: 38271 - DNA, 20 bp, Artificial Sequence
  Synthetic oligonucleotide; AAG chr11 5317085 5317104 5317088 -
tatataaacaaagttatttt

SEQ ID NO: 38272 - DNA, 20 bp, Artificial Sequence
  Synthetic oligonucleotide; TAG chr11 5317071 5317090 5317074 -
tattttaagacaaaatataa

SEQ ID NO: 38273 - DNA, 20 bp, Artificial Sequence
  Synthetic oligonucleotide; AGG chr11 5317070 5317089 5317073 -
attttaagacaaaatataat

SEQ ID NO: 38274 - DNA, 20 bp, Artificial Sequence
  Synthetic oligonucleotide; TGG chr11 5317054 5317073 5317057 -
taataggcccttcatttact

SEQ ID NO: 38275 - DNA, 20 bp, Artificial Sequence
  Synthetic oligonucleotide; TAG chr11 5317044 5317063 5317047 -
ttcatttacttggctattaa

SEQ ID NO: 38276 - DNA, 20 bp, Artificial Sequence
  Synthetic oligonucleotide; GAG chr11 5317034 5317053 5317037 -
tggctattaatagatccatt

SEQ ID NO: 38277 - DNA, 20 bp, Artificial Sequence
  Synthetic oligonucleotide; AGG chr11 5317033 5317052 5317036 -
ggctattaatagatccattg

SEQ ID NO: 38278 - DNA, 20 bp, Artificial Sequence
  Synthetic oligonucleotide; TGG chr11 5317024 5317043 5317027 -
tagatccattgaggttcctg

SEQ ID NO: 38279 - DNA, 20 bp, Artificial Sequence
  Synthetic oligonucleotide; CAG chr11 5317019 5317038 5317022 -
ccattgaggttcctgtggat

SEQ ID NO: 38280 - DNA, 20 bp, Artificial Sequence
  Synthetic oligonucleotide; AAG chr11 5317002 5317021 5317005 -
gatcagaactgattttccca

SEQ ID NO: 38281 - DNA, 20 bp, Artificial Sequence
  Synthetic oligonucleotide; CAG chr11 5316996 5317015 5316999 -
aactgattttcccaaagtat

SEQ ID NO: 38282 - DNA, 20 bp, Artificial Sequence
  Synthetic oligonucleotide; AAG chr11 5316991 5317010 5316994 -
attttcccaaagtatcagaa

SEQ ID NO: 38283 - DNA, 20 bp, Artificial Sequence
  Synthetic oligonucleotide; CAG chr11 5316959 5316978 5316962 -
caattgaaatgcataaactc

SEQ ID NO: 38284 - DNA, 20 bp, Artificial Sequence
  Synthetic oligonucleotide; AGG chr11 5316958 5316977 5316961 -
aattgaaatgcataaactcc

SEQ ID NO: 38285 - DNA, 20 bp, Artificial Sequence
  Synthetic oligonucleotide; AAG chr11 5316952 5316971 5316955 -
aatgcataaactccaggaca

SEQ ID NO: 38286 - DNA, 20 bp, Artificial Sequence
  Synthetic oligonucleotide; TAG chr11 5316926 5316945 5316929 -
catgtgaccctgcattcaac

SEQ ID NO: 38287 - DNA, 20 bp, Artificial Sequence
  Synthetic oligonucleotide; GAG chr11 5316897 5316916 5316900 -
tcaatactttgcattgtatt

SEQ ID NO: 38288 - DNA, 20 bp, Artificial Sequence
  Synthetic oligonucleotide; CAG chr11 5316893 5316912 5316896 -
tactttgcattgtattgaga

SEQ ID NO: 38289 - DNA, 20 bp, Artificial Sequence
  Synthetic oligonucleotide; AAG chr11 5316882 5316901 5316885 -
gtattgagacagacaatgca

SEQ ID NO: 38290 - DNA, 20 bp, Artificial Sequence
  Synthetic oligonucleotide; TGG chr11 5316871 5316890 5316874 -
gacaatgcaaagtacacaca

SEQ ID NO: 38291 - DNA, 20 bp, Artificial Sequence
  Synthetic oligonucleotide; TAG chr11 5316848 5316867 5316851 -
atatactgtgtactgatgct

SEQ ID NO: 38292 - DNA, 20 bp, Artificial Sequence
  Synthetic oligonucleotide; AGG chr11 5316847 5316866 5316850 -
tatactgtgtactgatgctt

SEQ ID NO: 38293 - DNA, 20 bp, Artificial Sequence
  Synthetic oligonucleotide; GGG chr11 5316846 5316865 5316849 -
atactgtgtactgatgctta

SEQ ID NO: 38294 - DNA, 20 bp, Artificial Sequence
  Synthetic oligonucleotide; AAG chr11 5316838 5316857 5316841 -
tactgatgcttagggtcctg

SEQ ID NO: 38295 - DNA, 20 bp, Artificial Sequence
  Synthetic oligonucleotide; AGG chr11 5316837 5316856 5316840 -
actgatgcttagggtcctga

SEQ ID NO: 38296 - DNA, 20 bp, Artificial Sequence
  Synthetic oligonucleotide; GGG chr11 5316836 5316855 5316839 -
ctgatgcttagggtcctgaa

SEQ ID NO: 38297 - DNA, 20 bp, Artificial Sequence
  Synthetic oligonucleotide; AAG chr11 5316823 5316842 5316826 -
tcctgaagggtcacataatt

SEQ ID NO: 38298 - DNA, 20 bp, Artificial Sequence
  Synthetic oligonucleotide; TGG chr11 5316817 5316836 5316820 -
agggtcacataattaagtcc

SEQ ID NO: 38299 - DNA, 20 bp, Artificial Sequence
  Synthetic oligonucleotide; TAG chr11 5316804 5316823 5316807 -
taagtcctggcatcccaatg

SEQ ID NO: 38300 - DNA, 20 bp, Artificial Sequence
  Synthetic oligonucleotide; GAG chr11 5316802 5316821 5316805 -
agtcctggcatcccaatgta

SEQ ID NO: 38301 - DNA, 20 bp, Artificial Sequence
  Synthetic oligonucleotide; AGG chr11 5316801 5316820 5316804 -
gtcctggcatcccaatgtag

SEQ ID NO: 38302 - DNA, 20 bp, Artificial Sequence
  Synthetic oligonucleotide; TGG chr11 5316798 5316817 5316801 -
ctggcatcccaatgtagagg

SEQ ID NO: 38303 - DNA, 20 bp, Artificial Sequence
  Synthetic oligonucleotide; TGG chr11 5316792 5316811 5316795 -
tcccaatgtagaggtggcat

SEQ ID NO: 38304 - DNA, 20 bp, Artificial Sequence
  Synthetic oligonucleotide; GAG chr11 5316790 5316809 5316793 -
ccaatgtagaggtggcattg

SEQ ID NO: 38305 - DNA, 20 bp, Artificial Sequence
  Synthetic oligonucleotide; CAG chr11 5316783 5316802 5316786 -
agaggtggcattggagtatg

SEQ ID NO: 38306 - DNA, 20 bp, Artificial Sequence
  Synthetic oligonucleotide; TGG chr11 5316763 5316782 5316766 -
cagcttttctcatccatcct

SEQ ID NO: 38307 - DNA, 20 bp, Artificial Sequence
  Synthetic oligonucleotide; GAG chr11 5316761 5316780 5316764 -
gcttttctcatccatccttg

SEQ ID NO: 38308 - DNA, 20 bp, Artificial Sequence
  Synthetic oligonucleotide; AAG chr11 5316748 5316767 5316751 -
atccttggagaaatacctga

SEQ ID NO: 38309 - DNA, 20 bp, Artificial Sequence
  Synthetic oligonucleotide; GAG chr11 5316741 5316760 5316744 -
gagaaatacctgaaagttcc

SEQ ID NO: 38310 - DNA, 20 bp, Artificial Sequence
  Synthetic oligonucleotide; AGG chr11 5316740 5316759 5316743 -
agaaatacctgaaagttccg

SEQ ID NO: 38311 - DNA, 20 bp, Artificial Sequence
  Synthetic oligonucleotide; TGG chr11 5316733 5316752 5316736 -
cctgaaagttccgaggacat

SEQ ID NO: 38312 - DNA, 20 bp, Artificial Sequence
  Synthetic oligonucleotide; GAG chr11 5316728 5316747 5316731 -
aagttccgaggacattggtt

SEQ ID NO: 38313 - DNA, 20 bp, Artificial Sequence
  Synthetic oligonucleotide; CAG chr11 5316710 5316729 5316713 -
ttgagcgtccctgcttctcc

SEQ ID NO: 38314 - DNA, 20 bp, Artificial Sequence
  Synthetic oligonucleotide; CAG chr11 5316706 5316725 5316709 -
gcgtccctgcttctcccaga

SEQ ID NO: 38315 - DNA, 20 bp, Artificial Sequence
  Synthetic oligonucleotide; GAG chr11 5316704 5316723 5316707 -
gtccctgcttctcccagaca

SEQ ID NO: 38316 - DNA, 20 bp, Artificial Sequence
  Synthetic oligonucleotide; AGG chr11 5316703 5316722 5316706 -
tccctgcttctcccagacag

SEQ ID NO: 38317 - DNA, 20 bp, Artificial Sequence
  Synthetic oligonucleotide; GAG chr11 5316701 5316720 5316704 -
cctgcttctcccagacagag

SEQ ID NO: 38318 - DNA, 20 bp, Artificial Sequence
  Synthetic oligonucleotide; AGG chr11 5316700 5316719 5316703 -
ctgcttctcccagacagagg

SEQ ID NO: 38319 - DNA, 20 bp, Artificial Sequence
  Synthetic oligonucleotide; GGG chr11 5316699 5316718 5316702 -
tgcttctcccagacagagga

SEQ ID NO: 38320 - DNA, 20 bp, Artificial Sequence
  Synthetic oligonucleotide; GAG chr11 5316697 5316716 5316700 -
cttctcccagacagaggagg

SEQ ID NO: 38321 - DNA, 20 bp, Artificial Sequence
  Synthetic oligonucleotide; AGG chr11 5316696 5316715 5316699 -
ttctcccagacagaggaggg

SEQ ID NO: 38322 - DNA, 20 bp, Artificial Sequence
  Synthetic oligonucleotide; GGG chr11 5316695 5316714 5316698 -
tctcccagacagaggaggga

SEQ ID NO: 38323 - DNA, 20 bp, Artificial Sequence
  Synthetic oligonucleotide; GGG chr11 5316694 5316713 5316697 -
ctcccagacagaggagggag

SEQ ID NO: 38324 - DNA, 20 bp, Artificial Sequence
  Synthetic oligonucleotide; GAG chr11 5316692 5316711 5316695 -
cccagacagaggagggaggg

SEQ ID NO: 38325 - DNA, 20 bp, Artificial Sequence
  Synthetic oligonucleotide; AAG chr11 5316686 5316705 5316689 -
cagaggagggaggggagatc

SEQ ID NO: 38326 - DNA, 20 bp, Artificial Sequence
  Synthetic oligonucleotide; AGG chr11 5316685 5316704 5316688 -
agaggagggaggggagatca

SEQ ID NO: 38327 - DNA, 20 bp, Artificial Sequence
  Synthetic oligonucleotide; GGG chr11 5316684 5316703 5316687 -
gaggagggaggggagatcaa

SEQ ID NO: 38328 - DNA, 20 bp, Artificial Sequence
  Synthetic oligonucleotide; GAG chr11 5316674 5316693 5316677 -
gggagatcaagggttcttct

SEQ ID NO: 38329 - DNA, 20 bp, Artificial Sequence
  Synthetic oligonucleotide; TGG chr11 5316667 5316686 5316670 -
caagggttcttctgagtatt

SEQ ID NO: 38330 - DNA, 20 bp, Artificial Sequence
  Synthetic oligonucleotide; AAG chr11 5316663 5316682 5316666 -
ggttcttctgagtatttgga

SEQ ID NO: 38331 - DNA, 20 bp, Artificial Sequence
  Synthetic oligonucleotide; GAG chr11 5316661 5316680 5316664 -
ttcttctgagtatttggaaa

SEQ ID NO: 38332 - DNA, 20 bp, Artificial Sequence
  Synthetic oligonucleotide; AGG chr11 5316660 5316679 5316663 -
tcttctgagtatttggaaag

SEQ ID NO: 38333 - DNA, 20 bp, Artificial Sequence
  Synthetic oligonucleotide; TGG chr11 5316651 5316670 5316654 -
tatttggaaagaggaaactc

SEQ ID NO: 38334 - DNA, 20 bp, Artificial Sequence
  Synthetic oligonucleotide; GGG chr11 5316650 5316669 5316653 -
atttggaaagaggaaactct

SEQ ID NO: 38335 - DNA, 20 bp, Artificial Sequence
  Synthetic oligonucleotide; GGG chr11 5316649 5316668 5316652 -
tttggaaagaggaaactctg

SEQ ID NO: 38336 - DNA, 20 bp, Artificial Sequence
  Synthetic oligonucleotide; AAG chr11 5316646 5316665 5316649 -
ggaaagaggaaactctgggg

SEQ ID NO: 38337 - DNA, 20 bp, Artificial Sequence
  Synthetic oligonucleotide; TGG chr11 5316614 5316633 5316617 -
catacataaactctctaatt

SEQ ID NO: 38338 - DNA, 20 bp, Artificial Sequence
  Synthetic oligonucleotide; TAG chr11 5316602 5316621 5316605 -
ctctaatttggcctcttgaa

SEQ ID NO: 38339 - DNA, 20 bp, Artificial Sequence
  Synthetic oligonucleotide; GAG chr11 5316594 5316613 5316597 -
tggcctcttgaatagtcttt

SEQ ID NO: 38340 - DNA, 20 bp, Artificial Sequence
  Synthetic oligonucleotide; AAG chr11 5316591 5316610 5316594 -
cctcttgaatagtctttgag

SEQ ID NO: 38341 - DNA, 20 bp, Artificial Sequence
  Synthetic oligonucleotide; GAG chr11 5316587 5316606 5316590 -
ttgaatagtctttgagaagt

SEQ ID NO: 38342 - DNA, 20 bp, Artificial Sequence
  Synthetic oligonucleotide; GAG chr11 5316574 5316593 5316577 -
gagaagtgagtgtctgaact

SEQ ID NO: 38343 - DNA, 20 bp, Artificial Sequence
  Synthetic oligonucleotide; TAG chr11 5316563 5316582 5316566 -
gtctgaactgagtcttcaaa

SEQ ID NO: 38344 - DNA, 20 bp, Artificial Sequence
  Synthetic oligonucleotide; GAG chr11 5316561 5316580 5316564 -
ctgaactgagtcttcaaata

SEQ ID NO: 38345 - DNA, 20 bp, Artificial Sequence
  Synthetic oligonucleotide; CAG chr11 5316558 5316577 5316561 -
aactgagtcttcaaatagag

SEQ ID NO: 38346 - DNA, 20 bp, Artificial Sequence
  Synthetic oligonucleotide; AGG chr11 5316557 5316576 5316560 -
actgagtcttcaaatagagc

SEQ ID NO: 38347 - DNA, 20 bp, Artificial Sequence
  Synthetic oligonucleotide; TGG chr11 5316552 5316571 5316555 -
gtcttcaaatagagcaggaa

SEQ ID NO: 38348 - DNA, 20 bp, Artificial Sequence
  Synthetic oligonucleotide; GGG chr11 5316551 5316570 5316554 -
tcttcaaatagagcaggaat

SEQ ID NO: 38349 - DNA, 20 bp, Artificial Sequence
  Synthetic oligonucleotide; CAG chr11 5316539 5316558 5316542 -
gcaggaatgggtccttattc

SEQ ID NO: 38350 - DNA, 20 bp, Artificial Sequence
  Synthetic oligonucleotide; AAG chr11 5316535 5316554 5316538 -
gaatgggtccttattccagc

SEQ ID NO: 38351 - DNA, 20 bp, Artificial Sequence
  Synthetic oligonucleotide; CAG chr11 5316525 5316544 5316528 -
ttattccagcaagaaaatga

SEQ ID NO: 38352 - DNA, 20 bp, Artificial Sequence
  Synthetic oligonucleotide; TAG chr11 5316520 5316539 5316523 -
ccagcaagaaaatgacagca

SEQ ID NO: 38353 - DNA, 20 bp, Artificial Sequence
  Synthetic oligonucleotide; AGG chr11 5316519 5316538 5316522 -
cagcaagaaaatgacagcat

SEQ ID NO: 38354 - DNA, 20 bp, Artificial Sequence
  Synthetic oligonucleotide; GAG chr11 5316515 5316534 5316518 -
aagaaaatgacagcataggt

SEQ ID NO: 38355 - DNA, 20 bp, Artificial Sequence
  Synthetic oligonucleotide; CAG chr11 5316509 5316528 5316512 -
atgacagcataggtgagtgc

SEQ ID NO: 38356 - DNA, 20 bp, Artificial Sequence
  Synthetic oligonucleotide; AGG chr11 5316508 5316527 5316511 -
tgacagcataggtgagtgcc

SEQ ID NO: 38357 - DNA, 20 bp, Artificial Sequence
  Synthetic oligonucleotide; CAG chr11 5316503 5316522 5316506 -
gcataggtgagtgccaggaa

SEQ ID NO: 38358 - DNA, 20 bp, Artificial Sequence
  Synthetic oligonucleotide; AGG chr11 5316502 5316521 5316505 -
cataggtgagtgccaggaac

SEQ ID NO: 38359 - DNA, 20 bp, Artificial Sequence
  Synthetic oligonucleotide; AAG chr11 5316496 5316515 5316499 -
tgagtgccaggaacaggaat

SEQ ID NO: 38360 - DNA, 20 bp, Artificial Sequence
  Synthetic oligonucleotide; AGG chr11 5316495 5316514 5316498 -
gagtgccaggaacaggaata

SEQ ID NO: 38361 - DNA, 20 bp, Artificial Sequence
  Synthetic oligonucleotide; TAG chr11 5316468 5316487 5316471 -
attcctcttccttcttatgt

SEQ ID NO: 38362 - DNA, 20 bp, Artificial Sequence
  Synthetic oligonucleotide; CAG chr11 5316462 5316481 5316465 -
cttccttcttatgttagatg

SEQ ID NO: 38363 - DNA, 20 bp, Artificial Sequence
  Synthetic oligonucleotide; AAG chr11 5316457 5316476 5316460 -
ttcttatgttagatgcagcg

SEQ ID NO: 38364 - DNA, 20 bp, Artificial Sequence
  Synthetic oligonucleotide; GAG chr11 5316455 5316474 5316458 -
cttatgttagatgcagcgaa

SEQ ID NO: 38365 - DNA, 20 bp, Artificial Sequence
  Synthetic oligonucleotide; AAG chr11 5316452 5316471 5316455 -
atgttagatgcagcgaagag

SEQ ID NO: 38366 - DNA, 20 bp, Artificial Sequence
  Synthetic oligonucleotide; TAG chr11 5316448 5316467 5316451 -
tagatgcagcgaagagaaga

SEQ ID NO: 38367 - DNA, 20 bp, Artificial Sequence
  Synthetic oligonucleotide; AGG chr11 5316447 5316466 5316450 -
agatgcagcgaagagaagat

SEQ ID NO: 38368 - DNA, 20 bp, Artificial Sequence
  Synthetic oligonucleotide; AAG chr11 5316444 5316463 5316447 -
tgcagcgaagagaagatagg

SEQ ID NO: 38369 - DNA, 20 bp, Artificial Sequence
  Synthetic oligonucleotide; CAG chr11 5316436 5316455 5316439 -
agagaagataggaagatttt

SEQ ID NO: 38370 - DNA, 20 bp, Artificial Sequence
  Synthetic oligonucleotide; GAG chr11 5316434 5316453 5316437 -
agaagataggaagattttca

SEQ ID NO: 38371 - DNA, 20 bp, Artificial Sequence
  Synthetic oligonucleotide; AGG chr11 5316433 5316452 5316436 -
gaagataggaagattttcag

SEQ ID NO: 38372 - DNA, 20 bp, Artificial Sequence
  Synthetic oligonucleotide; TAG chr11 5316424 5316443 5316427 -
aagattttcagaggtctgca

SEQ ID NO: 38373 - DNA, 20 bp, Artificial Sequence
  Synthetic oligonucleotide; AGG chr11 5316423 5316442 5316426 -
agattttcagaggtctgcat

SEQ ID NO: 38374 - DNA, 20 bp, Artificial Sequence
  Synthetic oligonucleotide; GAG chr11 5316421 5316440 5316424 -
attttcagaggtctgcatag

SEQ ID NO: 38375 - DNA, 20 bp, Artificial Sequence
  Synthetic oligonucleotide; TGG chr11 5316405 5316424 5316408 -
ataggagaacatactccatc

SEQ ID NO: 38376 - DNA, 20 bp, Artificial Sequence
  Synthetic oligonucleotide; GGG chr11 5316404 5316423 5316407 -
taggagaacatactccatct

SEQ ID NO: 38377 - DNA, 20 bp, Artificial Sequence
  Synthetic oligonucleotide; AAG chr11 5316387 5316406 5316390 -
tctgggatgaccaacaccta

SEQ ID NO: 38378 - DNA, 20 bp, Artificial Sequence
  Synthetic oligonucleotide; CAG chr11 5316382 5316401 5316385 -
gatgaccaacacctaaagca

SEQ ID NO: 38379 - DNA, 20 bp, Artificial Sequence
  Synthetic oligonucleotide; AAG chr11 5316354 5316373 5316357 -
ttcatctcaacacatgtttc

SEQ ID NO: 38380 - DNA, 20 bp, Artificial Sequence
  Synthetic oligonucleotide; AGG chr11 5316353 5316372 5316356 -
tcatctcaacacatgtttca

SEQ ID NO: 38381 - DNA, 20 bp, Artificial Sequence
  Synthetic oligonucleotide; CAG chr11 5316350 5316369 5316353 -
tctcaacacatgtttcaagg

SEQ ID NO: 38382 - DNA, 20 bp, Artificial Sequence
  Synthetic oligonucleotide; AGG chr11 5316349 5316368 5316352 -
ctcaacacatgtttcaaggc

SEQ ID NO: 38383 - DNA, 20 bp, Artificial Sequence
  Synthetic oligonucleotide; AAG chr11 5316342 5316361 5316345 -
catgtttcaaggcaggcttg

SEQ ID NO: 38384 - DNA, 20 bp, Artificial Sequence
  Synthetic oligonucleotide; TGG chr11 5316330 5316349 5316333 -
caggcttgaagtttcaaatg

SEQ ID NO: 38385 - DNA, 20 bp, Artificial Sequence
  Synthetic oligonucleotide; TGG chr11 5316321 5316340 5316324 -
agtttcaaatgtggtgctca

SEQ ID NO: 38386 - DNA, 20 bp, Artificial Sequence
  Synthetic oligonucleotide; TAG chr11 5316316 5316335 5316319 -
caaatgtggtgctcatggat

SEQ ID NO: 38387 - DNA, 20 bp, Artificial Sequence
  Synthetic oligonucleotide; CAG chr11 5316310 5316329 5316313 -
tggtgctcatggattagctt

SEQ ID NO: 38388 - DNA, 20 bp, Artificial Sequence
  Synthetic oligonucleotide; AGG chr11 5316309 5316328 5316312 -
ggtgctcatggattagcttc

SEQ ID NO: 38389 - DNA, 20 bp, Artificial Sequence
  Synthetic oligonucleotide; TAG chr11 5316288 5316307 5316291 -
ggaaaacgtgtgaatatttt

SEQ ID NO: 38390 - DNA, 20 bp, Artificial Sequence
  Synthetic oligonucleotide; CAG chr11 5316245 5316264 5316248 -
cttttgtccatttttctcca

SEQ ID NO: 38391 - DNA, 20 bp, Artificial Sequence
  Synthetic oligonucleotide; GAG chr11 5316243 5316262 5316246 -
tttgtccatttttctccaca

SEQ ID NO: 38392 - DNA, 20 bp, Artificial Sequence
  Synthetic oligonucleotide; AGG chr11 5316242 5316261 5316245 -
ttgtccatttttctccacag

SEQ ID NO: 38393 - DNA, 20 bp, Artificial Sequence
  Synthetic oligonucleotide; GGG chr11 5316241 5316260 5316244 -
tgtccatttttctccacaga

SEQ ID NO: 38394 - DNA, 20 bp, Artificial Sequence
  Synthetic oligonucleotide; TGG chr11 5316234 5316253 5316237 -
ttttctccacagagggctca

SEQ ID NO: 38395 - DNA, 20 bp, Artificial Sequence
  Synthetic oligonucleotide; TAG chr11 5316224 5316243 5316227 -
agagggctcatggcttttgt

SEQ ID NO: 38396 - DNA, 20 bp, Artificial Sequence
  Synthetic oligonucleotide; AAG chr11 5316181 5316200 5316184 -
ttctatttcaaaactaaaca

SEQ ID NO: 38397 - DNA, 20 bp, Artificial Sequence
  Synthetic oligonucleotide; AAG chr11 5316176 5316195 5316179 -
tttcaaaactaaacaaagaa

SEQ ID NO: 38398 - DNA, 20 bp, Artificial Sequence
  Synthetic oligonucleotide; AAG chr11 5316118 5316137 5316121 -
tgaaacataaaataaaaatc

SEQ ID NO: 38399 - DNA, 20 bp, Artificial Sequence
  Synthetic oligonucleotide; AAG chr11 5316090 5316109 5316093 -
atgtatccaaatatgcaatt

SEQ ID NO: 38400 - DNA, 20 bp, Artificial Sequence
  Synthetic oligonucleotide; AAG chr11 5316085 5316104 5316088 -
tccaaatatgcaattaagct

SEQ ID NO: 38401 - DNA, 20 bp, Artificial Sequence
  Synthetic oligonucleotide; CAG chr11 5316082 5316101 5316085 -
aaatatgcaattaagctaag

SEQ ID NO: 38402 - DNA, 20 bp, Artificial Sequence
  Synthetic oligonucleotide; CAG chr11 5316079 5316098 5316082 -
tatgcaattaagctaagcag

SEQ ID NO: 38403 - DNA, 20 bp, Artificial Sequence
  Synthetic oligonucleotide; AGG chr11 5316078 5316097 5316081 -
atgcaattaagctaagcagc

SEQ ID NO: 38404 - DNA, 20 bp, Artificial Sequence
  Synthetic oligonucleotide; TGG chr11 5316018 5316037 5316021 -
gccttcttttttgttactat

SEQ ID NO: 38405 - DNA, 20 bp, Artificial Sequence
  Synthetic oligonucleotide; CAG chr11 5316002 5316021 5316005 -
ctattggttcaaacattgtg

SEQ ID NO: 38406 - DNA, 20 bp, Artificial Sequence
  Synthetic oligonucleotide; AAG chr11 5315998 5316017 5316001 -
tggttcaaacattgtgcagc

SEQ ID NO: 38407 - DNA, 20 bp, Artificial Sequence
  Synthetic oligonucleotide; CAG chr11 5315988 5316007 5315991 -
attgtgcagcaagcacacca

SEQ ID NO: 38408 - DNA, 20 bp, Artificial Sequence
  Synthetic oligonucleotide; GAG chr11 5315986 5316005 5315989 -
tgtgcagcaagcacaccaca

SEQ ID NO: 38409 - DNA, 20 bp, Artificial Sequence
  Synthetic oligonucleotide; AGG chr11 5315985 5316004 5315988 -
gtgcagcaagcacaccacag

SEQ ID NO: 38410 - DNA, 20 bp, Artificial Sequence
  Synthetic oligonucleotide; GGG chr11 5315984 5316003 5315987 -
tgcagcaagcacaccacaga

SEQ ID NO: 38411 - DNA, 20 bp, Artificial Sequence
  Synthetic oligonucleotide; GGG chr11 5315983 5316002 5315986 -
gcagcaagcacaccacagag

SEQ ID NO: 38412 - DNA, 20 bp, Artificial Sequence
  Synthetic oligonucleotide; TAG chr11 5315952 5315971 5315955 -
attttttaaaatgtgttttt

SEQ ID NO: 38413 - DNA, 20 bp, Artificial Sequence
  Synthetic oligonucleotide; AAG chr11 5315946 5315965 5315949 -
taaaatgtgttttttagatt

SEQ ID NO: 38414 - DNA, 20 bp, Artificial Sequence
  Synthetic oligonucleotide; AAG chr11 5315913 5315932 5315916 -
tacttaattattcataactg

SEQ ID NO: 38415 - DNA, 20 bp, Artificial Sequence
  Synthetic oligonucleotide; TAG chr11 5315887 5315906 5315890 -
tgatcatcattccttatctc

SEQ ID NO: 38416 - DNA, 20 bp, Artificial Sequence
  Synthetic oligonucleotide; CAG chr11 5315882 5315901 5315885 -
atcattccttatctctagca

SEQ ID NO: 38417 - DNA, 20 bp, Artificial Sequence
  Synthetic oligonucleotide; AAG chr11 5315855 5315874 5315858 -
taaatgtattgctcttctat

SEQ ID NO: 38418 - DNA, 20 bp, Artificial Sequence
  Synthetic oligonucleotide; TAG chr11 5315798 5315817 5315801 -
ttattgctaaatatgaatat

SEQ ID NO: 38419 - DNA, 20 bp, Artificial Sequence
  Synthetic oligonucleotide; AGG chr11 5315797 5315816 5315800 -
tattgctaaatatgaatatt

SEQ ID NO: 38420 - DNA, 20 bp, Artificial Sequence
  Synthetic oligonucleotide; GAG chr11 5315791 5315810 5315794 -
taaatatgaatattaggatt

SEQ ID NO: 38421 - DNA, 20 bp, Artificial Sequence
  Synthetic oligonucleotide; AGG chr11 5315790 5315809 5315793 -
aaatatgaatattaggattg

SEQ ID NO: 38422 - DNA, 20 bp, Artificial Sequence
  Synthetic oligonucleotide; CAG chr11 5315784 5315803 5315787 -
gaatattaggattgaggctg

SEQ ID NO: 38423 - DNA, 20 bp, Artificial Sequence
  Synthetic oligonucleotide; CAG chr11 5315776 5315795 5315779 -
ggattgaggctgcagaaata

SEQ ID NO: 38424 - DNA, 20 bp, Artificial Sequence
  Synthetic oligonucleotide; AAG chr11 5315767 5315786 5315770 -
ctgcagaaatacagtttcac

SEQ ID NO: 38425 - DNA, 20 bp, Artificial Sequence
  Synthetic oligonucleotide; AAG chr11 5315764 5315783 5315767 -
cagaaatacagtttcacaag

SEQ ID NO: 38426 - DNA, 20 bp, Artificial Sequence
  Synthetic oligonucleotide; AGG chr11 5315763 5315782 5315766 -
agaaatacagtttcacaaga

SEQ ID NO: 38427 - DNA, 20 bp, Artificial Sequence
  Synthetic oligonucleotide; TAG chr11 5315760 5315779 5315763 -
aatacagtttcacaagaagg

SEQ ID NO: 38428 - DNA, 20 bp, Artificial Sequence
  Synthetic oligonucleotide; AAG chr11 5315746 5315765 5315749 -
agaaggtagtaaaaactgat

SEQ ID NO: 38429 - DNA, 20 bp, Artificial Sequence
  Synthetic oligonucleotide; AGG chr11 5315745 5315764 5315748 -
gaaggtagtaaaaactgata

SEQ ID NO: 38430 - DNA, 20 bp, Artificial Sequence
  Synthetic oligonucleotide; CAG chr11 5315742 5315761 5315745 -
ggtagtaaaaactgataagg

SEQ ID NO: 38431 - DNA, 20 bp, Artificial Sequence
  Synthetic oligonucleotide; AGG chr11 5315741 5315760 5315744 -
gtagtaaaaactgataaggc

SEQ ID NO: 38432 - DNA, 20 bp, Artificial Sequence
  Synthetic oligonucleotide; GGG chr11 5315740 5315759 5315743 -
tagtaaaaactgataaggca

SEQ ID NO: 38433 - DNA, 20 bp, Artificial Sequence
  Synthetic oligonucleotide; CAG chr11 5315733 5315752 5315736 -
aactgataaggcagggattt

SEQ ID NO: 38434 - DNA, 20 bp, Artificial Sequence
  Synthetic oligonucleotide; TAG chr11 5315725 5315744 5315728 -
aggcagggatttcagtgtaa

SEQ ID NO: 38435 - DNA, 20 bp, Artificial Sequence
  Synthetic oligonucleotide; AAG chr11 5315714 5315733 5315717 -
tcagtgtaatagtttctata

SEQ ID NO: 38436 - DNA, 20 bp, Artificial Sequence
  Synthetic oligonucleotide; CGG chr11 5315684 5315703 5315687 -
ccacttgtgaacacacaatg

SEQ ID NO: 38437 - DNA, 20 bp, Artificial Sequence
  Synthetic oligonucleotide; TGG chr11 5315665 5315684 5315668 -
gcggctccttttttgctgcc

SEQ ID NO: 38438 - DNA, 20 bp, Artificial Sequence
  Synthetic oligonucleotide; CAG chr11 5315657 5315676 5315660 -
ttttttgctgcctggctttt

SEQ ID NO: 38439 - DNA, 20 bp, Artificial Sequence
  Synthetic oligonucleotide; TGG chr11 5315651 5315670 5315654 -
gctgcctggcttttcagtac

SEQ ID NO: 38440 - DNA, 20 bp, Artificial Sequence
  Synthetic oligonucleotide; GAG chr11 5315649 5315668 5315652 -
tgcctggcttttcagtactg

SEQ ID NO: 38441 - DNA, 20 bp, Artificial Sequence
  Synthetic oligonucleotide; AGG chr11 5315648 5315667 5315651 -
gcctggcttttcagtactgg

SEQ ID NO: 38442 - DNA, 20 bp, Artificial Sequence
  Synthetic oligonucleotide; TGG chr11 5315590 5315609 5315593 -
gtttatgtgtgcgtccttct

SEQ ID NO: 38443 - DNA, 20 bp, Artificial Sequence
  Synthetic oligonucleotide; TGG chr11 5315584 5315603 5315587 -
gtgtgcgtccttcttggcaa

SEQ ID NO: 38444 - DNA, 20 bp, Artificial Sequence
  Synthetic oligonucleotide; AAG chr11 5315580 5315599 5315583 -
gcgtccttcttggcaatggc

SEQ ID NO: 38445 - DNA, 20 bp, Artificial Sequence
  Synthetic oligonucleotide; AAG chr11 5315562 5315581 5315565 -
gcaagctcctctacctcatc

SEQ ID NO: 38446 - DNA, 20 bp, Artificial Sequence
  Synthetic oligonucleotide; CAG chr11 5315551 5315570 5315554 -
tacctcatcaagcatgacca

SEQ ID NO: 38447 - DNA, 20 bp, Artificial Sequence
  Synthetic oligonucleotide; GAG chr11 5315512 5315531 5315515 -
tactgtttccttgccacact

SEQ ID NO: 38448 - DNA, 20 bp, Artificial Sequence
  Synthetic oligonucleotide; AGG chr11 5315511 5315530 5315514 -
actgtttccttgccacactg

SEQ ID NO: 38449 - DNA, 20 bp, Artificial Sequence
  Synthetic oligonucleotide; AAG chr11 5315507 5315526 5315510 -
tttccttgccacactgaggc

SEQ ID NO: 38450 - DNA, 20 bp, Artificial Sequence
  Synthetic oligonucleotide; TGG chr11 5315498 5315517 5315501 -
cacactgaggcaagacctca

SEQ ID NO: 38451 - DNA, 20 bp, Artificial Sequence
  Synthetic oligonucleotide; TGG chr11 5315468 5315487 5315471 -
gaccatgatgcccactgtaa

SEQ ID NO: 38452 - DNA, 20 bp, Artificial Sequence
  Synthetic oligonucleotide; GGG chr11 5315467 5315486 5315470 -
accatgatgcccactgtaat

SEQ ID NO: 38453 - DNA, 20 bp, Artificial Sequence
  Synthetic oligonucleotide; TGG chr11 5315457 5315476 5315460 -
ccactgtaatgggcgtcttg

SEQ ID NO: 38454 - DNA, 20 bp, Artificial Sequence
  Synthetic oligonucleotide; AAG chr11 5315444 5315463 5315447 -
cgtcttgtggatgaatcaca

SEQ ID NO: 38455 - DNA, 20 bp, Artificial Sequence
  Synthetic oligonucleotide; GAG chr11 5315442 5315461 5315445 -
tcttgtggatgaatcacaaa

SEQ ID NO: 38456 - DNA, 20 bp, Artificial Sequence
  Synthetic oligonucleotide; AGG chr11 5315441 5315460 5315444 -
cttgtggatgaatcacaaag

SEQ ID NO: 38457 - DNA, 20 bp, Artificial Sequence
  Synthetic oligonucleotide; TGG chr11 5315431 5315450 5315434 -
aatcacaaagaggttatcca

SEQ ID NO: 38458 - DNA, 20 bp, Artificial Sequence
  Synthetic oligonucleotide; GGG chr11 5315430 5315449 5315433 -
atcacaaagaggttatccat

SEQ ID NO: 38459 - DNA, 20 bp, Artificial Sequence
  Synthetic oligonucleotide; GGG chr11 5315429 5315448 5315432 -
tcacaaagaggttatccatg

SEQ ID NO: 38460 - DNA, 20 bp, Artificial Sequence
  Synthetic oligonucleotide; CAG chr11 5315415 5315434 5315418 -
tccatggggcctgcttcttg

SEQ ID NO: 38461 - DNA, 20 bp, Artificial Sequence
  Synthetic oligonucleotide; AGG chr11 5315414 5315433 5315417 -
ccatggggcctgcttcttgc

SEQ ID NO: 38462 - DNA, 20 bp, Artificial Sequence
  Synthetic oligonucleotide; CAG chr11 5315381 5315400 5315384 -
ccactcccattatccacttg

SEQ ID NO: 38463 - DNA, 20 bp, Artificial Sequence
  Synthetic oligonucleotide; CAG chr11 5315375 5315394 5315378 -
ccattatccacttgcagaat

SEQ ID NO: 38464 - DNA, 20 bp, Artificial Sequence
  Synthetic oligonucleotide; AGG chr11 5315374 5315393 5315377 -
cattatccacttgcagaatc

SEQ ID NO: 38465 - DNA, 20 bp, Artificial Sequence
  Synthetic oligonucleotide; TGG chr11 5315357 5315376 5315360 -
atcaggtattctcctgtcaa

SEQ ID NO: 38466 - DNA, 20 bp, Artificial Sequence
  Synthetic oligonucleotide; CAG chr11 5315320 5315339 5315323 -
attatcatccacatgcttct

SEQ ID NO: 38467 - DNA, 20 bp, Artificial Sequence
  Synthetic oligonucleotide; AGG chr11 5315319 5315338 5315322 -
ttatcatccacatgcttctc

SEQ ID NO: 38468 - DNA, 20 bp, Artificial Sequence
  Synthetic oligonucleotide; TGG chr11 5315294 5315313 5315297 -
taactatttctactaaatct

SEQ ID NO: 38469 - DNA, 20 bp, Artificial Sequence
  Synthetic oligonucleotide; GGG chr11 5315293 5315312 5315296 -
aactatttctactaaatctt

SEQ ID NO: 38470 - DNA, 20 bp, Artificial Sequence
  Synthetic oligonucleotide; AAG chr11 5315288 5315307 5315291 -
tttctactaaatcttgggtg

SEQ ID NO: 38471 - DNA, 20 bp, Artificial Sequence
  Synthetic oligonucleotide; TAG chr11 5315284 5315303 5315287 -
tactaaatcttgggtgaaga

SEQ ID NO: 38472 - DNA, 20 bp, Artificial Sequence
  Synthetic oligonucleotide; TGG chr11 5315276 5315295 5315279 -
cttgggtgaagatagaactg

SEQ ID NO: 38473 - DNA, 20 bp, Artificial Sequence
  Synthetic oligonucleotide; GAG chr11 5315265 5315284 5315268 -
atagaactgtggctatttat

SEQ ID NO: 38474 - DNA, 20 bp, Artificial Sequence
  Synthetic oligonucleotide; AGG chr11 5315264 5315283 5315267 -
tagaactgtggctatttatg

SEQ ID NO: 38475 - DNA, 20 bp, Artificial Sequence
  Synthetic oligonucleotide; GGG chr11 5315263 5315282 5315266 -
agaactgtggctatttatga

SEQ ID NO: 38476 - DNA, 20 bp, Artificial Sequence
  Synthetic oligonucleotide; AAG chr11 5315170 5315189 5315173 -
ccacaccttttttctccatc

SEQ ID NO: 38477 - DNA, 20 bp, Artificial Sequence
  Synthetic oligonucleotide; CAG chr11 5315119 5315138 5315122 -
tacattcaatcacttatacc

SEQ ID NO: 38478 - DNA, 20 bp, Artificial Sequence
  Synthetic oligonucleotide; TGG chr11 5315110 5315129 5315113 -
tcacttatacccagctattc

SEQ ID NO: 38479 - DNA, 20 bp, Artificial Sequence
  Synthetic oligonucleotide; TAG chr11 5315089 5315108 5315092 -
ggttgctttgattttcttcc

SEQ ID NO: 38480 - DNA, 20 bp, Artificial Sequence
  Synthetic oligonucleotide; CAG chr11 5315044 5315063 5315047 -
ttatatcctgatccttaaaa

SEQ ID NO: 38481 - DNA, 20 bp, Artificial Sequence
  Synthetic oligonucleotide; AAG chr11 5315038 5315057 5315041 -
cctgatccttaaaacagtta

SEQ ID NO: 38482 - DNA, 20 bp, Artificial Sequence
  Synthetic oligonucleotide; AGG chr11 5315037 5315056 5315040 -
ctgatccttaaaacagttaa

SEQ ID NO: 38483 - DNA, 20 bp, Artificial Sequence
  Synthetic oligonucleotide; CAG chr11 5315025 5315044 5315028 -
acagttaaaggtattgcctc

SEQ ID NO: 38484 - DNA, 20 bp, Artificial Sequence
  Synthetic oligonucleotide; AAG chr11 5315020 5315039 5315023 -
taaaggtattgcctccagaa

SEQ ID NO: 38485 - DNA, 20 bp, Artificial Sequence
  Synthetic oligonucleotide; GAG chr11 5315018 5315037 5315021 -
aaggtattgcctccagaaaa

SEQ ID NO: 38486 - DNA, 20 bp, Artificial Sequence
  Synthetic oligonucleotide; AAG chr11 5315014 5315033 5315017 -
tattgcctccagaaaagagc

SEQ ID NO: 38487 - DNA, 20 bp, Artificial Sequence
  Synthetic oligonucleotide; AAG chr11 5315008 5315027 5315011 -
ctccagaaaagagcaagcca

SEQ ID NO: 38488 - DNA, 20 bp, Artificial Sequence
  Synthetic oligonucleotide; CAG chr11 5314980 5314999 5314983 -
aacatgtgtgtctcccatat

SEQ ID NO: 38489 - DNA, 20 bp, Artificial Sequence
  Synthetic oligonucleotide; TGG chr11 5314969 5314988 5314972 -
ctcccatatcagctgtgtct

SEQ ID NO: 38490 - DNA, 20 bp, Artificial Sequence
  Synthetic oligonucleotide; CAG chr11 5314947 5314966 5314950 -
gtatttcacatcaccgtgat

SEQ ID NO: 38491 - DNA, 20 bp, Artificial Sequence
  Synthetic oligonucleotide; GAG chr11 5314943 5314962 5314946 -
ttcacatcaccgtgatcagt

SEQ ID NO: 38492 - DNA, 20 bp, Artificial Sequence
  Synthetic oligonucleotide; CAG chr11 5314929 5314948 5314932 -
atcagtgagactttcattca

SEQ ID NO: 38493 - DNA, 20 bp, Artificial Sequence
  Synthetic oligonucleotide; AGG chr11 5314928 5314947 5314931 -
tcagtgagactttcattcac

SEQ ID NO: 38494 - DNA, 20 bp, Artificial Sequence
  Synthetic oligonucleotide; TGG chr11 5314923 5314942 5314926 -
gagactttcattcacaggtt

SEQ ID NO: 38495 - DNA, 20 bp, Artificial Sequence
  Synthetic oligonucleotide; GGG chr11 5314922 5314941 5314925 -
agactttcattcacaggttt

SEQ ID NO: 38496 - DNA, 20 bp, Artificial Sequence
  Synthetic oligonucleotide; TGG chr11 5314903 5314922 5314906 -
tgggaaacatgcaccacatg

SEQ ID NO: 38497 - DNA, 20 bp, Artificial Sequence
  Synthetic oligonucleotide; GAG chr11 5314887 5314906 5314890 -
catgtggtgcacattaccgt

SEQ ID NO: 38498 - DNA, 20 bp, Artificial Sequence
  Synthetic oligonucleotide; CAG chr11 5314838 5314857 5314841 -
ttcatgaaccctattatata

SEQ ID NO: 38499 - DNA, 20 bp, Artificial Sequence
  Synthetic oligonucleotide; AAG chr11 5314826 5314845 5314829 -
attatatacagcatcaaacc

SEQ ID NO: 38500 - DNA, 20 bp, Artificial Sequence
  Synthetic oligonucleotide; CAG chr11 5314823 5314842 5314826 -
atatacagcatcaaaccaag

SEQ ID NO: 38501 - DNA, 20 bp, Artificial Sequence
  Synthetic oligonucleotide; AAG chr11 5314815 5314834 5314818 -
catcaaaccaagcagatcca

SEQ ID NO: 38502 - DNA, 20 bp, Artificial Sequence
  Synthetic oligonucleotide; AAG chr11 5314812 5314831 5314815 -
caaaccaagcagatccaaag

SEQ ID NO: 38503 - DNA, 20 bp, Artificial Sequence
  Synthetic oligonucleotide; TGG chr11 5314791 5314810 5314794 -
agcattgttcgcctattttc

SEQ ID NO: 38504 - DNA, 20 bp, Artificial Sequence
  Synthetic oligonucleotide; GGG chr11 5314790 5314809 5314793 -
gcattgttcgcctattttct

SEQ ID NO: 38505 - DNA, 20 bp, Artificial Sequence
  Synthetic oligonucleotide; CAG chr11 5314785 5314804 5314788 -
gttcgcctattttctgggca

SEQ ID NO: 38506 - DNA, 20 bp, Artificial Sequence
  Synthetic oligonucleotide; TGG chr11 5314780 5314799 5314783 -
cctattttctgggcacagaa

SEQ ID NO: 38507 - DNA, 20 bp, Artificial Sequence
  Synthetic oligonucleotide; GAG chr11 5314774 5314793 5314777 -
ttctgggcacagaatggctt

SEQ ID NO: 38508 - DNA, 20 bp, Artificial Sequence
  Synthetic oligonucleotide; CAG chr11 5314762 5314781 5314765 -
aatggcttgagccctttttt

SEQ ID NO: 38509 - DNA, 20 bp, Artificial Sequence
  Synthetic oligonucleotide; TGG chr11 5314736 5314755 5314739 -
tttgtgatcttcatgatttc

SEQ ID NO: 38510 - DNA, 20 bp, Artificial Sequence
  Synthetic oligonucleotide; GGG chr11 5314735 5314754 5314738 -
ttgtgatcttcatgatttct

SEQ ID NO: 38511 - DNA, 20 bp, Artificial Sequence
  Synthetic oligonucleotide; GAG chr11 5314726 5314745 5314729 -
tcatgatttctgggcctttt

SEQ ID NO: 38512 - DNA, 20 bp, Artificial Sequence
  Synthetic oligonucleotide; TGG chr11 5314719 5314738 5314722 -
ttctgggccttttgagtaat

SEQ ID NO: 38513 - DNA, 20 bp, Artificial Sequence
  Synthetic oligonucleotide; AAG chr11 5314715 5314734 5314718 -
gggccttttgagtaattgga

SEQ ID NO: 38514 - DNA, 20 bp, Artificial Sequence
  Synthetic oligonucleotide; AGG chr11 5314714 5314733 5314717 -
ggccttttgagtaattggaa

SEQ ID NO: 38515 - DNA, 20 bp, Artificial Sequence
  Synthetic oligonucleotide; GAG chr11 5314712 5314731 5314715 -
ccttttgagtaattggaaag

SEQ ID NO: 38516 - DNA, 20 bp, Artificial Sequence
  Synthetic oligonucleotide; CAG chr11 5314681 5314700 5314684 -
atacccaatatctcttgtat

SEQ ID NO: 38517 - DNA, 20 bp, Artificial Sequence
  Synthetic oligonucleotide; TAG chr11 5314675 5314694 5314678 -
aatatctcttgtatcagtgt

SEQ ID NO: 38518 - DNA, 20 bp, Artificial Sequence
  Synthetic oligonucleotide; TAG chr11 5314671 5314690 5314674 -
tctcttgtatcagtgttaga

SEQ ID NO: 38519 - DNA, 20 bp, Artificial Sequence
  Synthetic oligonucleotide; AGG chr11 5314670 5314689 5314673 -
ctcttgtatcagtgttagat

SEQ ID NO: 38520 - DNA, 20 bp, Artificial Sequence
  Synthetic oligonucleotide; AAG chr11 5314651 5314670 5314654 -
taggctttaactattatcta

SEQ ID NO: 38521 - DNA, 20 bp, Artificial Sequence
  Synthetic oligonucleotide; AAG chr11 5314644 5314663 5314647 -
taactattatctaaagtgaa

SEQ ID NO: 38522 - DNA, 20 bp, Artificial Sequence
  Synthetic oligonucleotide; TGG chr11 5314636 5314655 5314639 -
atctaaagtgaaaagctaca

SEQ ID NO: 38523 - DNA, 20 bp, Artificial Sequence
  Synthetic oligonucleotide; TAG chr11 5314556 5314575 5314559 -
tgtataaatgtattcatatg

SEQ ID NO: 38524 - DNA, 20 bp, Artificial Sequence
  Synthetic oligonucleotide; AAG chr11 5314548 5314567 5314551 -
tgtattcatatgtagatgta

SEQ ID NO: 38525 - DNA, 20 bp, Artificial Sequence
  Synthetic oligonucleotide; GAG chr11 5314538 5314557 5314541 -
tgtagatgtaaagctttatc

SEQ ID NO: 38526 - DNA, 20 bp, Artificial Sequence
  Synthetic oligonucleotide; AGG chr11 5314537 5314556 5314540 -
gtagatgtaaagctttatcg

SEQ ID NO: 38527 - DNA, 20 bp, Artificial Sequence
  Synthetic oligonucleotide; GGG chr11 5314536 5314555 5314539 -
tagatgtaaagctttatcga

SEQ ID NO: 38528 - DNA, 20 bp, Artificial Sequence
  Synthetic oligonucleotide; GAG chr11 5314534 5314553 5314537 -
gatgtaaagctttatcgagg

SEQ ID NO: 38529 - DNA, 20 bp, Artificial Sequence
  Synthetic oligonucleotide; GAG chr11 5314505 5314524 5314508 -
ctataatttacctatctatt

SEQ ID NO: 38530 - DNA, 20 bp, Artificial Sequence
  Synthetic oligonucleotide; GAG chr11 5314503 5314522 5314506 -
ataatttacctatctattga

SEQ ID NO: 38531 - DNA, 20 bp, Artificial Sequence
  Synthetic oligonucleotide; TAG chr11 5314496 5314515 5314499 -
acctatctattgagagatac

SEQ ID NO: 38532 - DNA, 20 bp, Artificial Sequence
  Synthetic oligonucleotide; AGG chr11 5314495 5314514 5314498 -
cctatctattgagagatact

SEQ ID NO: 38533 - DNA, 20 bp, Artificial Sequence
  Synthetic oligonucleotide; AAG chr11 5314491 5314510 5314494 -
tctattgagagatactagga

SEQ ID NO: 38534 - DNA, 20 bp, Artificial Sequence
  Synthetic oligonucleotide; TGG chr11 5314488 5314507 5314491 -
attgagagatactaggaaag

SEQ ID NO: 38535 - DNA, 20 bp, Artificial Sequence
  Synthetic oligonucleotide; TGG chr11 5314471 5314490 5314474 -
aagtggaatactattgaata

SEQ ID NO: 38536 - DNA, 20 bp, Artificial Sequence
  Synthetic oligonucleotide; GAG chr11 5314469 5314488 5314472 -
gtggaatactattgaatatg

SEQ ID NO: 38537 - DNA, 20 bp, Artificial Sequence
  Synthetic oligonucleotide; TAG chr11 5314456 5314475 5314459 -
gaatatggagataaaacatg

SEQ ID NO: 38538 - DNA, 20 bp, Artificial Sequence
  Synthetic oligonucleotide; CAG chr11 5314436 5314455 5314439 -
tagataaataccctaataat

SEQ ID NO: 38539 - DNA, 20 bp, Artificial Sequence
  Synthetic oligonucleotide; AGG chr11 5314435 5314454 5314438 -
agataaataccctaataatc

SEQ ID NO: 38540 - DNA, 20 bp, Artificial Sequence
  Synthetic oligonucleotide; GGG chr11 5314434 5314453 5314437 -
gataaataccctaataatca

SEQ ID NO: 38541 - DNA, 20 bp, Artificial Sequence
  Synthetic oligonucleotide; TGG chr11 5314425 5314444 5314428 -
cctaataatcagggaaaata

SEQ ID NO: 38542 - DNA, 20 bp, Artificial Sequence
  Synthetic oligonucleotide; AAG chr11 5314401 5314420 5314404 -
tattcataacctgtattcat

SEQ ID NO: 38543 - DNA, 20 bp, Artificial Sequence
  Synthetic oligonucleotide; AAG chr11 5314392 5314411 5314395 -
cctgtattcataagaactga

SEQ ID NO: 38544 - DNA, 20 bp, Artificial Sequence
  Synthetic oligonucleotide; TAG chr11 5314381 5314400 5314384 -
aagaactgaaagtaccattt

SEQ ID NO: 38545 - DNA, 20 bp, Artificial Sequence
  Synthetic oligonucleotide; AGG chr11 5314380 5314399 5314383 -
agaactgaaagtaccatttt

SEQ ID NO: 38546 - DNA, 20 bp, Artificial Sequence
  Synthetic oligonucleotide; AAG chr11 5314377 5314396 5314380 -
actgaaagtaccattttagg

SEQ ID NO: 38547 - DNA, 20 bp, Artificial Sequence
  Synthetic oligonucleotide; GAG chr11 5314375 5314394 5314378 -
tgaaagtaccattttaggaa

SEQ ID NO: 38548 - DNA, 20 bp, Artificial Sequence
  Synthetic oligonucleotide; AAG chr11 5314370 5314389 5314373 -
gtaccattttaggaagagtc

SEQ ID NO: 38549 - DNA, 20 bp, Artificial Sequence
  Synthetic oligonucleotide; TGG chr11 5314367 5314386 5314370 -
ccattttaggaagagtcaag

SEQ ID NO: 38550 - DNA, 20 bp, Artificial Sequence
  Synthetic oligonucleotide; CAG chr11 5314363 5314382 5314366 -
tttaggaagagtcaagtggc

SEQ ID NO: 38551 - DNA, 20 bp, Artificial Sequence
  Synthetic oligonucleotide; TAG chr11 5314358 5314377 5314361 -
gaagagtcaagtggccagtc

SEQ ID NO: 38552 - DNA, 20 bp, Artificial Sequence
  Synthetic oligonucleotide; AAG chr11 5314347 5314366 5314350 -
tggccagtctagttcaacca

SEQ ID NO: 38553 - DNA, 20 bp, Artificial Sequence
  Synthetic oligonucleotide; CAG chr11 5314340 5314359 5314343 -
tctagttcaaccaaagccta

SEQ ID NO: 38554 - DNA, 20 bp, Artificial Sequence
  Synthetic oligonucleotide; AAG chr11 5314337 5314356 5314340 -
agttcaaccaaagcctacag

SEQ ID NO: 38555 - DNA, 20 bp, Artificial Sequence
  Synthetic oligonucleotide; AGG chr11 5314336 5314355 5314339 -
gttcaaccaaagcctacaga

SEQ ID NO: 38556 - DNA, 20 bp, Artificial Sequence
  Synthetic oligonucleotide; CAG chr11 5314318 5314337 5314321 -
gaaggaaaaatgtgcaattg

SEQ ID NO: 38557 - DNA, 20 bp, Artificial Sequence
  Synthetic oligonucleotide; TAG chr11 5314312 5314331 5314315 -
aaaatgtgcaattgcagatc

SEQ ID NO: 38558 - DNA, 20 bp, Artificial Sequence
  Synthetic oligonucleotide; TGG chr11 5314306 5314325 5314309 -
tgcaattgcagatctagttt

SEQ ID NO: 38559 - DNA, 20 bp, Artificial Sequence
  Synthetic oligonucleotide; AAG chr11 5314296 5314315 5314299 -
gatctagttttggccatata

SEQ ID NO: 38560 - DNA, 20 bp, Artificial Sequence
  Synthetic oligonucleotide; TAG chr11 5314285 5314304 5314288 -
ggccatataaagatgaatta

SEQ ID NO: 38561 - DNA, 20 bp, Artificial Sequence
  Synthetic oligonucleotide; GAG chr11 5314272 5314291 5314275 -
tgaattatagcatgtgaatt

SEQ ID NO: 38562 - DNA, 20 bp, Artificial Sequence
  Synthetic oligonucleotide; AGG chr11 5314271 5314290 5314274 -
gaattatagcatgtgaattg

SEQ ID NO: 38563 - DNA, 20 bp, Artificial Sequence
  Synthetic oligonucleotide; TGG chr11 5314265 5314284 5314268 -
tagcatgtgaattgaggtca

SEQ ID NO: 38564 - DNA, 20 bp, Artificial Sequence
  Synthetic oligonucleotide; CAG chr11 5314230 5314249 5314233 -
atctcaaaactactctattt

SEQ ID NO: 38565 - DNA, 20 bp, Artificial Sequence
  Synthetic oligonucleotide; AGG chr11 5314229 5314248 5314232 -
tctcaaaactactctatttc

SEQ ID NO: 38566 - DNA, 20 bp, Artificial Sequence
  Synthetic oligonucleotide; GGG chr11 5314228 5314247 5314231 -
ctcaaaactactctatttca

SEQ ID NO: 38567 - DNA, 20 bp, Artificial Sequence
  Synthetic oligonucleotide; TAG chr11 5314225 5314244 5314228 -
aaaactactctatttcaggg

SEQ ID NO: 38568 - DNA, 20 bp, Artificial Sequence
  Synthetic oligonucleotide; TAG chr11 5314193 5314212 5314196 -
ttttttttttttttttaaaa

SEQ ID NO: 38569 - DNA, 20 bp, Artificial Sequence
  Synthetic oligonucleotide; TAG chr11 5314168 5314187 5314171 -
tttattttccttcaacttat

SEQ ID NO: 38570 - DNA, 20 bp, Artificial Sequence
  Synthetic oligonucleotide; AGG chr11 5314167 5314186 5314170 -
ttattttccttcaacttatt

SEQ ID NO: 38571 - DNA, 20 bp, Artificial Sequence
  Synthetic oligonucleotide; TAG chr11 5314164 5314183 5314167 -
ttttccttcaacttattagg

SEQ ID NO: 38572 - DNA, 20 bp, Artificial Sequence
  Synthetic oligonucleotide; AGG chr11 5314163 5314182 5314166 -
tttccttcaacttattaggt

SEQ ID NO: 38573 - DNA, 20 bp, Artificial Sequence
  Synthetic oligonucleotide; AAG chr11 5314156 5314175 5314159 -
caacttattaggtaggtgca

SEQ ID NO: 38574 - DNA, 20 bp, Artificial Sequence
  Synthetic oligonucleotide; AGG chr11 5314155 5314174 5314158 -
aacttattaggtaggtgcaa

SEQ ID NO: 38575 - DNA, 20 bp, Artificial Sequence
  Synthetic oligonucleotide; CAG chr11 5314146 5314165 5314149 -
ggtaggtgcaaaggtaattg

SEQ ID NO: 38576 - DNA, 20 bp, Artificial Sequence
  Synthetic oligonucleotide; CAG chr11 5314139 5314158 5314142 -
gcaaaggtaattgcagttca

SEQ ID NO: 38577 - DNA, 20 bp, Artificial Sequence
  Synthetic oligonucleotide; AAG chr11 5314105 5314124 5314108 -
gtaccaacataatatatttt

SEQ ID NO: 38578 - DNA, 20 bp, Artificial Sequence
  Synthetic oligonucleotide; CAG chr11 5314099 5314118 5314102 -
acataatatattttaagttc

SEQ ID NO: 38579 - DNA, 20 bp, Artificial Sequence
  Synthetic oligonucleotide; AGG chr11 5314098 5314117 5314101 -
cataatatattttaagttcc

SEQ ID NO: 38580 - DNA, 20 bp, Artificial Sequence
  Synthetic oligonucleotide; GGG chr11 5314097 5314116 5314100 -
ataatatattttaagttcca

SEQ ID NO: 38581 - DNA, 20 bp, Artificial Sequence
  Synthetic oligonucleotide; CAG chr11 5314086 5314105 5314089 -
taagttccagggcacatgtg

SEQ ID NO: 38582 - DNA, 20 bp, Artificial Sequence
  Synthetic oligonucleotide; AGG chr11 5314085 5314104 5314088 -
aagttccagggcacatgtgc

SEQ ID NO: 38583 - DNA, 20 bp, Artificial Sequence
  Synthetic oligonucleotide; CAG chr11 5314077 5314096 5314080 -
gggcacatgtgcaggatgtg

SEQ ID NO: 38584 - DNA, 20 bp, Artificial Sequence
  Synthetic oligonucleotide; AGG chr11 5314076 5314095 5314079 -
ggcacatgtgcaggatgtgc

SEQ ID NO: 38585 - DNA, 20 bp, Artificial Sequence
  Synthetic oligonucleotide; TAG chr11 5314064 5314083 5314067 -
ggatgtgcaggtttattaca

SEQ ID NO: 38586 - DNA, 20 bp, Artificial Sequence
  Synthetic oligonucleotide; AGG chr11 5314063 5314082 5314066 -
gatgtgcaggtttattacat

SEQ ID NO: 38587 - DNA, 20 bp, Artificial Sequence
  Synthetic oligonucleotide; CAG chr11 5314045 5314064 5314048 -
ataggtaaatgtgtgccatg

SEQ ID NO: 38588 - DNA, 20 bp, Artificial Sequence
  Synthetic oligonucleotide; AGG chr11 5314044 5314063 5314047 -
taggtaaatgtgtgccatgc

SEQ ID NO: 38589 - DNA, 20 bp, Artificial Sequence
  Synthetic oligonucleotide; TAG chr11 5314027 5314046 5314030 -
tgcaggtttgctgcattcgt

SEQ ID NO: 38590 - DNA, 20 bp, Artificial Sequence
  Synthetic oligonucleotide; TGG chr11 5314014 5314033 5314017 -
cattcgttagctattcttcc

SEQ ID NO: 38591 - DNA, 20 bp, Artificial Sequence
  Synthetic oligonucleotide; CGG chr11 5313983 5314002 5313986 -
ctctcctccccacccactac

SEQ ID NO: 38592 - DNA, 20 bp, Artificial Sequence
  Synthetic oligonucleotide; CAG chr11 5313979 5313998 5313982 -
cctccccacccactaccgga

SEQ ID NO: 38593 - DNA, 20 bp, Artificial Sequence
  Synthetic oligonucleotide; AGG chr11 5313978 5313997 5313981 -
ctccccacccactaccggac

SEQ ID NO: 38594 - DNA, 20 bp, Artificial Sequence
  Synthetic oligonucleotide; AAG chr11 5313952 5313971 5313955 -
ctgtgtgtgttgttccccac

SEQ ID NO: 38595 - DNA, 20 bp, Artificial Sequence
  Synthetic oligonucleotide; CAG chr11 5313928 5313947 5313931 -
gtccatgtgttctcactgtt

SEQ ID NO: 38596 - DNA, 20 bp, Artificial Sequence
  Synthetic oligonucleotide; GAG chr11 5313910 5313929 5313913 -
ttcagctcccatttctgtgt

SEQ ID NO: 38597 - DNA, 20 bp, Artificial Sequence
  Synthetic oligonucleotide; TGG chr11 5313895 5313914 5313898 -
tgtgtgagaacatgtgtgtt

SEQ ID NO: 38598 - DNA, 20 bp, Artificial Sequence
  Synthetic oligonucleotide; TAG chr11 5313876 5313895 5313879 -
ttggttttctgttcctgtgt

SEQ ID NO: 38599 - DNA, 20 bp, Artificial Sequence
  Synthetic oligonucleotide; GAG chr11 5313867 5313886 5313870 -
tgttcctgtgttagtttgat

SEQ ID NO: 38600 - DNA, 20 bp, Artificial Sequence
  Synthetic oligonucleotide; AGG chr11 5313866 5313885 5313869 -
gttcctgtgttagtttgatg

SEQ ID NO: 38601 - DNA, 20 bp, Artificial Sequence
  Synthetic oligonucleotide; TGG chr11 5313859 5313878 5313862 -
tgttagtttgatgaggataa

SEQ ID NO: 38602 - DNA, 20 bp, Artificial Sequence
  Synthetic oligonucleotide; CAG chr11 5313852 5313871 5313855 -
ttgatgaggataatggcttc

SEQ ID NO: 38603 - DNA, 20 bp, Artificial Sequence
  Synthetic oligonucleotide; AAG chr11 5313831 5313850 5313834 -
agctccattcatgtccctgc

SEQ ID NO: 38604 - DNA, 20 bp, Artificial Sequence
  Synthetic oligonucleotide; AGG chr11 5313830 5313849 5313833 -
gctccattcatgtccctgca

SEQ ID NO: 38605 - DNA, 20 bp, Artificial Sequence
  Synthetic oligonucleotide; TGG chr11 5313805 5313824 5313808 -
cacaatccttttccttttta

SEQ ID NO: 38606 - DNA, 20 bp, Artificial Sequence
  Synthetic oligonucleotide; TAG chr11 5313797 5313816 5313800 -
ttttcctttttatggctgta

SEQ ID NO: 38607 - DNA, 20 bp, Artificial Sequence
  Synthetic oligonucleotide; TGG chr11 5313787 5313806 5313790 -
tatggctgtatagtattcca

SEQ ID NO: 38608 - DNA, 20 bp, Artificial Sequence
  Synthetic oligonucleotide; TGG chr11 5313744 5313763 5313747 -
tttatccactctatcattga

SEQ ID NO: 38609 - DNA, 20 bp, Artificial Sequence
  Synthetic oligonucleotide; TGG chr11 5313736 5313755 5313739 -
ctctatcattgatggacatt

SEQ ID NO: 38610 - DNA, 20 bp, Artificial Sequence
  Synthetic oligonucleotide; GGG chr11 5313735 5313754 5313738 -
tctatcattgatggacattt

SEQ ID NO: 38611 - DNA, 20 bp, Artificial Sequence
  Synthetic oligonucleotide; TGG chr11 5313718 5313737 5313721 -
tttgggttgattccacatct

SEQ ID NO: 38612 - DNA, 20 bp, Artificial Sequence
  Synthetic oligonucleotide; AAG chr11 5313687 5313706 5313690 -
aataatgctgcaatgaacat

SEQ ID NO: 38613 - DNA, 20 bp, Artificial Sequence
  Synthetic oligonucleotide; TAG chr11 5313665 5313684 5313668 -
gcatgcctgtatttttataa

SEQ ID NO: 38614 - DNA, 20 bp, Artificial Sequence
  Synthetic oligonucleotide; TGG chr11 5313645 5313664 5313648 -
tagattgatttatattcctt

SEQ ID NO: 38615 - DNA, 20 bp, Artificial Sequence
  Synthetic oligonucleotide; GGG chr11 5313644 5313663 5313647 -
agattgatttatattccttt

SEQ ID NO: 38616 - DNA, 20 bp, Artificial Sequence
  Synthetic oligonucleotide; CAG chr11 5313633 5313652 5313636 -
tattcctttgggtatatacc

SEQ ID NO: 38617 - DNA, 20 bp, Artificial Sequence
  Synthetic oligonucleotide; GAG chr11 5313626 5313645 5313629 -
ttgggtatatacccagtaat

SEQ ID NO: 38618 - DNA, 20 bp, Artificial Sequence
  Synthetic oligonucleotide; GAG chr11 5313617 5313636 5313620 -
tacccagtaatgagattgct

SEQ ID NO: 38619 - DNA, 20 bp, Artificial Sequence
  Synthetic oligonucleotide; AAG chr11 5313612 5313631 5313615 -
agtaatgagattgctgagtc

SEQ ID NO: 38620 - DNA, 20 bp, Artificial Sequence
  Synthetic oligonucleotide; TGG chr11 5313609 5313628 5313612 -
aatgagattgctgagtcaag

SEQ ID NO: 38621 - DNA, 20 bp, Artificial Sequence
  Synthetic oligonucleotide; GAG chr11 5313585 5313604 5313588 -
atttctgcttctacatcttt

SEQ ID NO: 38622 - DNA, 20 bp, Artificial Sequence
  Synthetic oligonucleotide; AGG chr11 5313584 5313603 5313587 -
tttctgcttctacatctttg

SEQ ID NO: 38623 - DNA, 20 bp, Artificial Sequence
  Synthetic oligonucleotide; AAG chr11 5313580 5313599 5313583 -
tgcttctacatctttgagga

SEQ ID NO: 38624 - DNA, 20 bp, Artificial Sequence
  Synthetic oligonucleotide; AGG chr11 5313579 5313598 5313582 -
gcttctacatctttgaggaa

SEQ ID NO: 38625 - DNA, 20 bp, Artificial Sequence
  Synthetic oligonucleotide; CAG chr11 5313530 5313549 5313533 -
ctaatttactctcccgttaa

SEQ ID NO: 38626 - DNA, 20 bp, Artificial Sequence
  Synthetic oligonucleotide; AAG chr11 5313522 5313541 5313525 -
ctctcccgttaacagtgtaa

SEQ ID NO: 38627 - DNA, 20 bp, Artificial Sequence
  Synthetic oligonucleotide; CAG chr11 5313489 5313508 5313492 -
ctttctctctgcaaccttgc

SEQ ID NO: 38628 - DNA, 20 bp, Artificial Sequence
  Synthetic oligonucleotide; TGG chr11 5313445 5313464 5313448 -
ttaataattgccattctgac

SEQ ID NO: 38629 - DNA, 20 bp, Artificial Sequence
  Synthetic oligonucleotide; GAG chr11 5313439 5313458 5313442 -
attgccattctgactggtgt

SEQ ID NO: 38630 - DNA, 20 bp, Artificial Sequence
  Synthetic oligonucleotide; TGG chr11 5313435 5313454 5313438 -
ccattctgactggtgtgaga

SEQ ID NO: 38631 - DNA, 20 bp, Artificial Sequence
  Synthetic oligonucleotide; TGG chr11 5313422 5313441 5313425 -
tgtgagatggtatcccattg

SEQ ID NO: 38632 - DNA, 20 bp, Artificial Sequence
  Synthetic oligonucleotide; CAG chr11 5313394 5313413 5313397 -
atttgcatttttctaatgac

SEQ ID NO: 38633 - DNA, 20 bp, Artificial Sequence
  Synthetic oligonucleotide; AAG chr11 5313390 5313409 5313393 -
gcatttttctaatgaccagt

SEQ ID NO: 38634 - DNA, 20 bp, Artificial Sequence
  Synthetic oligonucleotide; AGG chr11 5313389 5313408 5313392 -
catttttctaatgaccagta

SEQ ID NO: 38635 - DNA, 20 bp, Artificial Sequence
  Synthetic oligonucleotide; GAG chr11 5313384 5313403 5313387 -
ttctaatgaccagtaaggtt

SEQ ID NO: 38636 - DNA, 20 bp, Artificial Sequence
  Synthetic oligonucleotide; TAG chr11 5313358 5313377 5313361 -
tttttttttcatatgtttat

SEQ ID NO: 38637 - DNA, 20 bp, Artificial Sequence
  Synthetic oligonucleotide; AAG chr11 5313355 5313374 5313358 -
ttttttcatatgtttattag

SEQ ID NO: 38638 - DNA, 20 bp, Artificial Sequence
  Synthetic oligonucleotide; TAG chr11 5313337 5313356 5313340 -
agaagcatgaatgtcttctt

SEQ ID NO: 38639 - DNA, 20 bp, Artificial Sequence
  Synthetic oligonucleotide; GAG chr11 5313335 5313354 5313338 -
aagcatgaatgtcttcttta

SEQ ID NO: 38640 - DNA, 20 bp, Artificial Sequence
  Synthetic oligonucleotide; AAG chr11 5313332 5313351 5313335 -
catgaatgtcttctttagag

SEQ ID NO: 38641 - DNA, 20 bp, Artificial Sequence
  Synthetic oligonucleotide; TGG chr11 5313299 5313318 5313302 -
tgtcattccccactttttaa

SEQ ID NO: 38642 - DNA, 20 bp, Artificial Sequence
  Synthetic oligonucleotide; GGG chr11 5313298 5313317 5313301 -
gtcattccccactttttaat

SEQ ID NO: 38643 - DNA, 20 bp, Artificial Sequence
  Synthetic oligonucleotide; GGG chr11 5313297 5313316 5313300 -
tcattccccactttttaatg

SEQ ID NO: 38644 - DNA, 20 bp, Artificial Sequence
  Synthetic oligonucleotide; TAG chr11 5313269 5313288 5313272 -
tttttcttgtaaatttgttt

SEQ ID NO: 38645 - DNA, 20 bp, Artificial Sequence
  Synthetic oligonucleotide; TAG chr11 5313259 5313278 5313262 -
aaatttgttttagttcctca

SEQ ID NO: 38646 - DNA, 20 bp, Artificial Sequence
  Synthetic oligonucleotide; CAG chr11 5313252 5313271 5313255 -
ttttagttcctcatagactc

SEQ ID NO: 38647 - DNA, 20 bp, Artificial Sequence
  Synthetic oligonucleotide; TAG chr11 5313245 5313264 5313248 -
tcctcatagactccagatat

SEQ ID NO: 38648 - DNA, 20 bp, Artificial Sequence
  Synthetic oligonucleotide; CAG chr11 5313234 5313253 5313237 -
tccagatattagacttttgt

SEQ ID NO: 38649 - DNA, 20 bp, Artificial Sequence
  Synthetic oligonucleotide; TGG chr11 5313230 5313249 5313233 -
gatattagacttttgtcaga

SEQ ID NO: 38650 - DNA, 20 bp, Artificial Sequence
  Synthetic oligonucleotide; GAG chr11 5313228 5313247 5313231 -
tattagacttttgtcagatg

SEQ ID NO: 38651 - DNA, 20 bp, Artificial Sequence
  Synthetic oligonucleotide; TAG chr11 5313198 5313217 5313201 -
aaaaattttcttctattctg

SEQ ID NO: 38652 - DNA, 20 bp, Artificial Sequence
  Synthetic oligonucleotide; AGG chr11 5313197 5313216 5313200 -
aaaattttcttctattctgt

SEQ ID NO: 38653 - DNA, 20 bp, Artificial Sequence
  Synthetic oligonucleotide; TAG chr11 5313174 5313193 5313177 -
ttgtctgttatctctgatga

SEQ ID NO: 38654 - DNA, 20 bp, Artificial Sequence
  Synthetic oligonucleotide; CAG chr11 5313157 5313176 5313160 -
tgatagtttcttttgctgtg

SEQ ID NO: 38655 - DNA, 20 bp, Artificial Sequence
  Synthetic oligonucleotide; AAG chr11 5313154 5313173 5313157 -
tagtttcttttgctgtgcag

SEQ ID NO: 38656 - DNA, 20 bp, Artificial Sequence
  Synthetic oligonucleotide; TAG chr11 5313137 5313156 5313140 -
cagaagctctttaatttaat

SEQ ID NO: 38657 - DNA, 20 bp, Artificial Sequence
  Synthetic oligonucleotide; CAG chr11 5313110 5313129 5313113 -
catttgtcaatttttttttg

SEQ ID NO: 38658 - DNA, 20 bp, Artificial Sequence
  Synthetic oligonucleotide; TGG chr11 5313100 5313119 5313103 -
tttttttttgcagttgcttt

SEQ ID NO: 38659 - DNA, 20 bp, Artificial Sequence
  Synthetic oligonucleotide; GAG chr11 5313091 5313110 5313094 -
gcagttgcttttggtgtctt

SEQ ID NO: 38660 - DNA, 20 bp, Artificial Sequence
  Synthetic oligonucleotide; AAG chr11 5313056 5313075 5313059 -
atgatacaatgtcatctata

SEQ ID NO: 38661 - DNA, 20 bp, Artificial Sequence
  Synthetic oligonucleotide; CAG chr11 5313048 5313067 5313051 -
atgtcatctataaagtttta

SEQ ID NO: 38662 - DNA, 20 bp, Artificial Sequence
  Synthetic oligonucleotide; TAG chr11 5313045 5313064 5313048 -
tcatctataaagttttacag

SEQ ID NO: 38663 - DNA, 20 bp, Artificial Sequence
  Synthetic oligonucleotide; GAG chr11 5313043 5313062 5313046 -
atctataaagttttacagta

SEQ ID NO: 38664 - DNA, 20 bp, Artificial Sequence
  Synthetic oligonucleotide; TAG chr11 5313017 5313036 5313020 -
ctctaaattcataaatttcc

SEQ ID NO: 38665 - DNA, 20 bp, Artificial Sequence
  Synthetic oligonucleotide; GAG chr11 5313001 5313020 5313004 -
ttcctagttgctcatttcat

SEQ ID NO: 38666 - DNA, 20 bp, Artificial Sequence
  Synthetic oligonucleotide; TGG chr11 5312959 5312978 5312962 -
cttgtgttctctctaaatgc

SEQ ID NO: 38667 - DNA, 20 bp, Artificial Sequence
  Synthetic oligonucleotide; TAG chr11 5312955 5312974 5312958 -
tgttctctctaaatgctgga

SEQ ID NO: 38668 - DNA, 20 bp, Artificial Sequence
  Synthetic oligonucleotide; TAG chr11 5312931 5312950 5312934 -
aacatttctgatatgtccaa

SEQ ID NO: 38669 - DNA, 20 bp, Artificial Sequence
  Synthetic oligonucleotide; AAG chr11 5312864 5312883 5312867 -
tttttattctaataaatcac

SEQ ID NO: 38670 - DNA, 20 bp, Artificial Sequence
  Synthetic oligonucleotide; CAG chr11 5312845 5312864 5312848 -
caagtgatctcaatttgttg

SEQ ID NO: 38671 - DNA, 20 bp, Artificial Sequence
  Synthetic oligonucleotide; TGG chr11 5312837 5312856 5312840 -
ctcaatttgttgcagcaact

SEQ ID NO: 38672 - DNA, 20 bp, Artificial Sequence
  Synthetic oligonucleotide; TAG chr11 5312825 5312844 5312828 -
cagcaacttggaaatctcac

SEQ ID NO: 38673 - DNA, 20 bp, Artificial Sequence
  Synthetic oligonucleotide; AGG chr11 5312824 5312843 5312827 -
agcaacttggaaatctcact

SEQ ID NO: 38674 - DNA, 20 bp, Artificial Sequence
  Synthetic oligonucleotide; AAG chr11 5312770 5312789 5312773 -
atccttttataattgatttt

SEQ ID NO: 38675 - DNA, 20 bp, Artificial Sequence
  Synthetic oligonucleotide; AAG chr11 5312767 5312786 5312770 -
cttttataattgattttaag

SEQ ID NO: 38676 - DNA, 20 bp, Artificial Sequence
  Synthetic oligonucleotide; TAG chr11 5312746 5312765 5312749 -
agtttattatgtattatctc

SEQ ID NO: 38677 - DNA, 20 bp, Artificial Sequence
  Synthetic oligonucleotide; TAG chr11 5312732 5312751 5312735 -
tatctctagtgttttatttt

SEQ ID NO: 38678 - DNA, 20 bp, Artificial Sequence
  Synthetic oligonucleotide; CAG chr11 5312715 5312734 5312718 -
ttttagtgtacgtattttcc

SEQ ID NO: 38679 - DNA, 20 bp, Artificial Sequence
  Synthetic oligonucleotide; AAG chr11 5312679 5312698 5312682 -
ttgctatatacacaatttaa

SEQ ID NO: 38680 - DNA, 20 bp, Artificial Sequence
  Synthetic oligonucleotide; AAG chr11 5312637 5312656 5312640 -
attatttactttatctactg

SEQ ID NO: 38681 - DNA, 20 bp, Artificial Sequence
  Synthetic oligonucleotide; TGG chr11 5312631 5312650 5312634 -
tactttatctactgaagtat

SEQ ID NO: 38682 - DNA, 20 bp, Artificial Sequence
  Synthetic oligonucleotide; GAG chr11 5312629 5312648 5312632 -
ctttatctactgaagtattg

SEQ ID NO: 38683 - DNA, 20 bp, Artificial Sequence
  Synthetic oligonucleotide; AAG chr11 5312615 5312634 5312618 -
gtattggagccatactatca

SEQ ID NO: 38684 - DNA, 20 bp, Artificial Sequence
  Synthetic oligonucleotide; CAG chr11 5312599 5312618 5312602 -
atcaaagcccttgctgactt

SEQ ID NO: 38685 - DNA, 20 bp, Artificial Sequence
  Synthetic oligonucleotide; AGG chr11 5312598 5312617 5312601 -
tcaaagcccttgctgacttc

SEQ ID NO: 38686 - DNA, 20 bp, Artificial Sequence
  Synthetic oligonucleotide; AAG chr11 5312535 5312554 5312538 -
tgtacatatcctatgtttaa

SEQ ID NO: 38687 - DNA, 20 bp, Artificial Sequence
  Synthetic oligonucleotide; AGG chr11 5312534 5312553 5312537 -
gtacatatcctatgtttaaa

SEQ ID NO: 38688 - DNA, 20 bp, Artificial Sequence
  Synthetic oligonucleotide; GGG chr11 5312533 5312552 5312536 -
tacatatcctatgtttaaaa

SEQ ID NO: 38689 - DNA, 20 bp, Artificial Sequence
  Synthetic oligonucleotide; TGG chr11 5312522 5312541 5312525 -
tgtttaaaagggtttgtgtt

SEQ ID NO: 38690 - DNA, 20 bp, Artificial Sequence
  Synthetic oligonucleotide; GAG chr11 5312520 5312539 5312523 -
tttaaaagggtttgtgtttg

SEQ ID NO: 38691 - DNA, 20 bp, Artificial Sequence
  Synthetic oligonucleotide; AGG chr11 5312519 5312538 5312522 -
ttaaaagggtttgtgtttgg

SEQ ID NO: 38692 - DNA, 20 bp, Artificial Sequence
  Synthetic oligonucleotide; GAG chr11 5312517 5312536 5312520 -
aaaagggtttgtgtttggag

SEQ ID NO: 38693 - DNA, 20 bp, Artificial Sequence
  Synthetic oligonucleotide; GAG chr11 5312515 5312534 5312518 -
aagggtttgtgtttggagga

SEQ ID NO: 38694 - DNA, 20 bp, Artificial Sequence
  Synthetic oligonucleotide; TAG chr11 5312512 5312531 5312515 -
ggtttgtgtttggaggagag

SEQ ID NO: 38695 - DNA, 20 bp, Artificial Sequence
  Synthetic oligonucleotide; AGG chr11 5312511 5312530 5312514 -
gtttgtgtttggaggagagt

SEQ ID NO: 38696 - DNA, 20 bp, Artificial Sequence
  Synthetic oligonucleotide; TGG chr11 5312476 5312495 5312479 -
tcctcatgtgcctattttcg

SEQ ID NO: 38697 - DNA, 20 bp, Artificial Sequence
  Synthetic oligonucleotide; TGG chr11 5312445 5312464 5312448 -
ctaatatttaatcattcctt

SEQ ID NO: 38698 - DNA, 20 bp, Artificial Sequence
  Synthetic oligonucleotide; AAG chr11 5312432 5312451 5312435 -
attcctttggttaatttttt

SEQ ID NO: 38699 - DNA, 20 bp, Artificial Sequence
  Synthetic oligonucleotide; AGG chr11 5312431 5312450 5312434 -
ttcctttggttaatttttta

SEQ ID NO: 38700 - DNA, 20 bp, Artificial Sequence
  Synthetic oligonucleotide; GGG chr11 5312430 5312449 5312433 -
tcctttggttaattttttaa

SEQ ID NO: 38701 - DNA, 20 bp, Artificial Sequence
  Synthetic oligonucleotide; TGG chr11 5312419 5312438 5312422 -
attttttaagggcactatta

SEQ ID NO: 38702 - DNA, 20 bp, Artificial Sequence
  Synthetic oligonucleotide; GGG chr11 5312418 5312437 5312421 -
ttttttaagggcactattat

SEQ ID NO: 38703 - DNA, 20 bp, Artificial Sequence
  Synthetic oligonucleotide; AAG chr11 5312405 5312424 5312408 -
ctattatgggtcaccttgct

SEQ ID NO: 38704 - DNA, 20 bp, Artificial Sequence
  Synthetic oligonucleotide; AAG chr11 5312390 5312409 5312393 -
ttgctaagcaaaaatgatat

SEQ ID NO: 38705 - DNA, 20 bp, Artificial Sequence
  Synthetic oligonucleotide; GAG chr11 5312388 5312407 5312391 -
gctaagcaaaaatgatataa

SEQ ID NO: 38706 - DNA, 20 bp, Artificial Sequence
  Synthetic oligonucleotide; GAG chr11 5312386 5312405 5312389 -
taagcaaaaatgatataaga

SEQ ID NO: 38707 - DNA, 20 bp, Artificial Sequence
  Synthetic oligonucleotide; TAG chr11 5312379 5312398 5312382 -
aaatgatataagagagcaaa

SEQ ID NO: 38708 - DNA, 20 bp, Artificial Sequence
  Synthetic oligonucleotide; AAG chr11 5312359 5312378 5312362 -
tagacaaacttttcttctta

SEQ ID NO: 38709 - DNA, 20 bp, Artificial Sequence
  Synthetic oligonucleotide; AAG chr11 5312347 5312366 5312350 -
tcttcttaaagtcttcaaat

SEQ ID NO: 38710 - DNA, 20 bp, Artificial Sequence
  Synthetic oligonucleotide; TGG chr11 5312344 5312363 5312347 -
tcttaaagtcttcaaataag

SEQ ID NO: 38711 - DNA, 20 bp, Artificial Sequence
  Synthetic oligonucleotide; GGG chr11 5312343 5312362 5312346 -
cttaaagtcttcaaataagt

SEQ ID NO: 38712 - DNA, 20 bp, Artificial Sequence
  Synthetic oligonucleotide; GGG chr11 5312342 5312361 5312345 -
ttaaagtcttcaaataagtg

SEQ ID NO: 38713 - DNA, 20 bp, Artificial Sequence
  Synthetic oligonucleotide; AAG chr11 5312334 5312353 5312337 -
ttcaaataagtggggactca

SEQ ID NO: 38714 - DNA, 20 bp, Artificial Sequence
  Synthetic oligonucleotide; AAG chr11 5312326 5312345 5312329 -
agtggggactcaaagaataa

SEQ ID NO: 38715 - DNA, 20 bp, Artificial Sequence
  Synthetic oligonucleotide; AAG chr11 5312306 5312325 5312309 -
aagaaatccaaatttaaaac

SEQ ID NO: 38716 - DNA, 20 bp, Artificial Sequence
  Synthetic oligonucleotide; AAG chr11 5312286 5312305 5312289 -
aagtgctgtgattaatcata

SEQ ID NO: 38717 - DNA, 20 bp, Artificial Sequence
  Synthetic oligonucleotide; CAG chr11 5312283 5312302 5312286 -
tgctgtgattaatcataaag

SEQ ID NO: 38718 - DNA, 20 bp, Artificial Sequence
  Synthetic oligonucleotide; AAG chr11 5312279 5312298 5312282 -
gtgattaatcataaagcaga

SEQ ID NO: 38719 - DNA, 20 bp, Artificial Sequence
  Synthetic oligonucleotide; AAG chr11 5312276 5312295 5312279 -
attaatcataaagcagaaag

SEQ ID NO: 38720 - DNA, 20 bp, Artificial Sequence
  Synthetic oligonucleotide; TGG chr11 5312265 5312284 5312268 -
agcagaaagaagacactgaa

SEQ ID NO: 38721 - DNA, 20 bp, Artificial Sequence
  Synthetic oligonucleotide; GAG chr11 5312263 5312282 5312266 -
cagaaagaagacactgaatg

SEQ ID NO: 38722 - DNA, 20 bp, Artificial Sequence
  Synthetic oligonucleotide; GAG chr11 5312261 5312280 5312264 -
gaaagaagacactgaatgga

SEQ ID NO: 38723 - DNA, 20 bp, Artificial Sequence
  Synthetic oligonucleotide; TGG chr11 5312256 5312275 5312259 -
aagacactgaatggagagtg

SEQ ID NO: 38724 - DNA, 20 bp, Artificial Sequence
  Synthetic oligonucleotide; GGG chr11 5312255 5312274 5312258 -
agacactgaatggagagtgt

SEQ ID NO: 38725 - DNA, 20 bp, Artificial Sequence
  Synthetic oligonucleotide; AAG chr11 5312244 5312263 5312247 -
ggagagtgtgggtctcaaaa

SEQ ID NO: 38726 - DNA, 20 bp, Artificial Sequence
  Synthetic oligonucleotide; AGG chr11 5312243 5312262 5312246 -
gagagtgtgggtctcaaaaa

SEQ ID NO: 38727 - DNA, 20 bp, Artificial Sequence
  Synthetic oligonucleotide; GAG chr11 5312237 5312256 5312240 -
gtgggtctcaaaaaaggctt

SEQ ID NO: 38728 - DNA, 20 bp, Artificial Sequence
  Synthetic oligonucleotide; AGG chr11 5312236 5312255 5312239 -
tgggtctcaaaaaaggcttg

SEQ ID NO: 38729 - DNA, 20 bp, Artificial Sequence
  Synthetic oligonucleotide; TGG chr11 5312230 5312249 5312233 -
tcaaaaaaggcttgaggtta

SEQ ID NO: 38730 - DNA, 20 bp, Artificial Sequence
  Synthetic oligonucleotide; AAG chr11 5312219 5312238 5312222 -
ttgaggttatggcttgaaat

SEQ ID NO: 38731 - DNA, 20 bp, Artificial Sequence
  Synthetic oligonucleotide; AGG chr11 5312218 5312237 5312221 -
tgaggttatggcttgaaata

SEQ ID NO: 38732 - DNA, 20 bp, Artificial Sequence
  Synthetic oligonucleotide; GGG chr11 5312217 5312236 5312220 -
gaggttatggcttgaaataa

SEQ ID NO: 38733 - DNA, 20 bp, Artificial Sequence
  Synthetic oligonucleotide; AAG chr11 5312213 5312232 5312216 -
ttatggcttgaaataagggt

SEQ ID NO: 38734 - DNA, 20 bp, Artificial Sequence
  Synthetic oligonucleotide; GAG chr11 5312203 5312222 5312206 -
aaataagggtaagattccct

SEQ ID NO: 38735 - DNA, 20 bp, Artificial Sequence
  Synthetic oligonucleotide; AAG chr11 5312199 5312218 5312202 -
aagggtaagattccctgaga

SEQ ID NO: 38736 - DNA, 20 bp, Artificial Sequence
  Synthetic oligonucleotide; CAG chr11 5312188 5312207 5312191 -
tccctgagaaagtgtccctt

SEQ ID NO: 38737 - DNA, 20 bp, Artificial Sequence
  Synthetic oligonucleotide; GAG chr11 5312183 5312202 5312186 -
gagaaagtgtcccttcagct

SEQ ID NO: 38738 - DNA, 20 bp, Artificial Sequence
  Synthetic oligonucleotide; TGG chr11 5312171 5312190 5312174 -
cttcagctgagacctgaaaa

SEQ ID NO: 38739 - DNA, 20 bp, Artificial Sequence
  Synthetic oligonucleotide; TAG chr11 5312166 5312185 5312169 -
gctgagacctgaaaatggat

SEQ ID NO: 38740 - DNA, 20 bp, Artificial Sequence
  Synthetic oligonucleotide; TGG chr11 5312155 5312174 5312158 -
aaaatggattagaaactaac

SEQ ID NO: 38741 - DNA, 20 bp, Artificial Sequence
  Synthetic oligonucleotide; CAG chr11 5312144 5312163 5312147 -
gaaactaactggtgaaaata

SEQ ID NO: 38742 - DNA, 20 bp, Artificial Sequence
  Synthetic oligonucleotide; AAG chr11 5312139 5312158 5312142 -
taactggtgaaaatacagac

SEQ ID NO: 38743 - DNA, 20 bp, Artificial Sequence
  Synthetic oligonucleotide; AAG chr11 5312128 5312147 5312131 -
aatacagacaagaatattct

SEQ ID NO: 38744 - DNA, 20 bp, Artificial Sequence
  Synthetic oligonucleotide; AAG chr11 5312121 5312140 5312124 -
acaagaatattctaagactg

SEQ ID NO: 38745 - DNA, 20 bp, Artificial Sequence
  Synthetic oligonucleotide; AGG chr11 5312120 5312139 5312123 -
caagaatattctaagactga

SEQ ID NO: 38746 - DNA, 20 bp, Artificial Sequence
  Synthetic oligonucleotide; GAG chr11 5312118 5312137 5312121 -
agaatattctaagactgaag

SEQ ID NO: 38747 - DNA, 20 bp, Artificial Sequence
  Synthetic oligonucleotide; TGG chr11 5312109 5312128 5312112 -
taagactgaaggagtgtgtg

SEQ ID NO: 38748 - DNA, 20 bp, Artificial Sequence
  Synthetic oligonucleotide; GAG chr11 5312107 5312126 5312110 -
agactgaaggagtgtgtgtg

SEQ ID NO: 38749 - DNA, 20 bp, Artificial Sequence
  Synthetic oligonucleotide; CAG chr11 5312100 5312119 5312103 -
aggagtgtgtgtggagacct

SEQ ID NO: 38750 - DNA, 20 bp, Artificial Sequence
  Synthetic oligonucleotide; TAG chr11 5312096 5312115 5312099 -
gtgtgtgtggagacctcagc

SEQ ID NO: 38751 - DNA, 20 bp, Artificial Sequence
  Synthetic oligonucleotide; AGG chr11 5312095 5312114 5312098 -
tgtgtgtggagacctcagct

SEQ ID NO: 38752 - DNA, 20 bp, Artificial Sequence
  Synthetic oligonucleotide; TGG chr11 5312091 5312110 5312094 -
tgtggagacctcagctaggt

SEQ ID NO: 38753 - DNA, 20 bp, Artificial Sequence
  Synthetic oligonucleotide; TAG chr11 5312081 5312100 5312084 -
tcagctaggttggtttatat

SEQ ID NO: 38754 - DNA, 20 bp, Artificial Sequence
  Synthetic oligonucleotide; AGG chr11 5312080 5312099 5312083 -
cagctaggttggtttatatt

SEQ ID NO: 38755 - DNA, 20 bp, Artificial Sequence
  Synthetic oligonucleotide; GGG chr11 5312079 5312098 5312082 -
agctaggttggtttatatta

SEQ ID NO: 38756 - DNA, 20 bp, Artificial Sequence
  Synthetic oligonucleotide; AAG chr11 5312076 5312095 5312079 -
taggttggtttatattaggg

SEQ ID NO: 38757 - DNA, 20 bp, Artificial Sequence
  Synthetic oligonucleotide; AGG chr11 5312075 5312094 5312078 -
aggttggtttatattaggga

SEQ ID NO: 38758 - DNA, 20 bp, Artificial Sequence
  Synthetic oligonucleotide; TGG chr11 5312072 5312091 5312075 -
ttggtttatattagggaagg

SEQ ID NO: 38759 - DNA, 20 bp, Artificial Sequence
  Synthetic oligonucleotide; TGG chr11 5312065 5312084 5312068 -
atattagggaaggtggctac

SEQ ID NO: 38760 - DNA, 20 bp, Artificial Sequence
  Synthetic oligonucleotide; AAG chr11 5312062 5312081 5312065 -
ttagggaaggtggctactgg

SEQ ID NO: 38761 - DNA, 20 bp, Artificial Sequence
  Synthetic oligonucleotide; GAG chr11 5312060 5312079 5312063 -
agggaaggtggctactggaa

SEQ ID NO: 38762 - DNA, 20 bp, Artificial Sequence
  Synthetic oligonucleotide; AGG chr11 5312059 5312078 5312062 -
gggaaggtggctactggaag

SEQ ID NO: 38763 - DNA, 20 bp, Artificial Sequence
  Synthetic oligonucleotide; GGG chr11 5312058 5312077 5312061 -
ggaaggtggctactggaaga

SEQ ID NO: 38764 - DNA, 20 bp, Artificial Sequence
  Synthetic oligonucleotide; GAG chr11 5312045 5312064 5312048 -
tggaagagggtgtttgcttt

SEQ ID NO: 38765 - DNA, 20 bp, Artificial Sequence
  Synthetic oligonucleotide; AAG chr11 5312042 5312061 5312045 -
aagagggtgtttgctttgag

SEQ ID NO: 38766 - DNA, 20 bp, Artificial Sequence
  Synthetic oligonucleotide; GAG chr11 5312040 5312059 5312043 -
gagggtgtttgctttgagaa

SEQ ID NO: 38767 - DNA, 20 bp, Artificial Sequence
  Synthetic oligonucleotide; AGG chr11 5312039 5312058 5312042 -
agggtgtttgctttgagaag

SEQ ID NO: 38768 - DNA, 20 bp, Artificial Sequence
  Synthetic oligonucleotide; AAG chr11 5312033 5312052 5312036 -
tttgctttgagaagaggctg

SEQ ID NO: 38769 - DNA, 20 bp, Artificial Sequence
  Synthetic oligonucleotide; GAG chr11 5312031 5312050 5312034 -
tgctttgagaagaggctgaa

SEQ ID NO: 38770 - DNA, 20 bp, Artificial Sequence
  Synthetic oligonucleotide; AGG chr11 5312030 5312049 5312033 -
gctttgagaagaggctgaag

SEQ ID NO: 38771 - DNA, 20 bp, Artificial Sequence
  Synthetic oligonucleotide; GGG chr11 5312029 5312048 5312032 -
ctttgagaagaggctgaaga

SEQ ID NO: 38772 - DNA, 20 bp, Artificial Sequence
  Synthetic oligonucleotide; AAG chr11 5312026 5312045 5312029 -
tgagaagaggctgaagaggg

SEQ ID NO: 38773 - DNA, 20 bp, Artificial Sequence
  Synthetic oligonucleotide; AGG chr11 5312025 5312044 5312028 -
gagaagaggctgaagaggga

SEQ ID NO: 38774 - DNA, 20 bp, Artificial Sequence
  Synthetic oligonucleotide; TGG chr11 5312020 5312039 5312023 -
gaggctgaagagggaaggaa

SEQ ID NO: 38775 - DNA, 20 bp, Artificial Sequence
  Synthetic oligonucleotide; TGG chr11 5312011 5312030 5312014 -
gagggaaggaatggccttat

SEQ ID NO: 38776 - DNA, 20 bp, Artificial Sequence
  Synthetic oligonucleotide; AAG chr11 5312001 5312020 5312004 -
atggccttattggtcatcat

SEQ ID NO: 38777 - DNA, 20 bp, Artificial Sequence
  Synthetic oligonucleotide; GAG chr11 5311999 5312018 5312002 -
ggccttattggtcatcataa

SEQ ID NO: 38778 - DNA, 20 bp, Artificial Sequence
  Synthetic oligonucleotide; GAG chr11 5311993 5312012 5311996 -
attggtcatcataagagttt

SEQ ID NO: 38779 - DNA, 20 bp, Artificial Sequence
  Synthetic oligonucleotide; CGG chr11 5311982 5312001 5311985 -
taagagtttgagtctctact

SEQ ID NO: 38780 - DNA, 20 bp, Artificial Sequence
  Synthetic oligonucleotide; GAG chr11 5311980 5311999 5311983 -
agagtttgagtctctactcg

SEQ ID NO: 38781 - DNA, 20 bp, Artificial Sequence
  Synthetic oligonucleotide; TGG chr11 5311974 5311993 5311977 -
tgagtctctactcggagtca

SEQ ID NO: 38782 - DNA, 20 bp, Artificial Sequence
  Synthetic oligonucleotide; AAG chr11 5311970 5311989 5311973 -
tctctactcggagtcatgga

SEQ ID NO: 38783 - DNA, 20 bp, Artificial Sequence
  Synthetic oligonucleotide; AAG chr11 5311960 5311979 5311963 -
gagtcatggaaagctactga

SEQ ID NO: 38784 - DNA, 20 bp, Artificial Sequence
  Synthetic oligonucleotide; AAG chr11 5311957 5311976 5311960 -
tcatggaaagctactgaaag

SEQ ID NO: 38785 - DNA, 20 bp, Artificial Sequence
  Synthetic oligonucleotide; TGG chr11 5311905 5311924 5311908 -
cttcaatattatttataaaa

SEQ ID NO: 38786 - DNA, 20 bp, Artificial Sequence
  Synthetic oligonucleotide; GAG chr11 5311898 5311917 5311901 -
attatttataaaatggaatt

SEQ ID NO: 38787 - DNA, 20 bp, Artificial Sequence
  Synthetic oligonucleotide; AGG chr11 5311897 5311916 5311900 -
ttatttataaaatggaattg

SEQ ID NO: 38788 - DNA, 20 bp, Artificial Sequence
  Synthetic oligonucleotide; GGG chr11 5311896 5311915 5311899 -
tatttataaaatggaattga

SEQ ID NO: 38789 - DNA, 20 bp, Artificial Sequence
  Synthetic oligonucleotide; GAG chr11 5311894 5311913 5311897 -
tttataaaatggaattgagg

SEQ ID NO: 38790 - DNA, 20 bp, Artificial Sequence
  Synthetic oligonucleotide; AGG chr11 5311893 5311912 5311896 -
ttataaaatggaattgaggg

SEQ ID NO: 38791 - DNA, 20 bp, Artificial Sequence
  Synthetic oligonucleotide; CAG chr11 5311890 5311909 5311893 -
taaaatggaattgagggagg

SEQ ID NO: 38792 - DNA, 20 bp, Artificial Sequence
  Synthetic oligonucleotide; AGG chr11 5311889 5311908 5311892 -
aaaatggaattgagggaggc

SEQ ID NO: 38793 - DNA, 20 bp, Artificial Sequence
  Synthetic oligonucleotide; GGG chr11 5311888 5311907 5311891 -
aaatggaattgagggaggca

SEQ ID NO: 38794 - DNA, 20 bp, Artificial Sequence
  Synthetic oligonucleotide; AAG chr11 5311884 5311903 5311887 -
ggaattgagggaggcaggga

SEQ ID NO: 38795 - DNA, 20 bp, Artificial Sequence
  Synthetic oligonucleotide; AGG chr11 5311883 5311902 5311886 -
gaattgagggaggcagggaa

SEQ ID NO: 38796 - DNA, 20 bp, Artificial Sequence
  Synthetic oligonucleotide; GGG chr11 5311882 5311901 5311885 -
aattgagggaggcagggaaa

SEQ ID NO: 38797 - DNA, 20 bp, Artificial Sequence
  Synthetic oligonucleotide; CAG chr11 5311879 5311898 5311882 -
tgagggaggcagggaaaggg

SEQ ID NO: 38798 - DNA, 20 bp, Artificial Sequence
  Synthetic oligonucleotide; TAG chr11 5311871 5311890 5311874 -
gcagggaaagggcagaatat

SEQ ID NO: 38799 - DNA, 20 bp, Artificial Sequence
  Synthetic oligonucleotide; GAG chr11 5311869 5311888 5311872 -
agggaaagggcagaatatta

SEQ ID NO: 38800 - DNA, 20 bp, Artificial Sequence
  Synthetic oligonucleotide; AAG chr11 5311859 5311878 5311862 -
cagaatattagagtaatttg

SEQ ID NO: 38801 - DNA, 20 bp, Artificial Sequence
  Synthetic oligonucleotide; AAG chr11 5311855 5311874 5311858 -
atattagagtaatttgaaga

SEQ ID NO: 38802 - DNA, 20 bp, Artificial Sequence
  Synthetic oligonucleotide; TAG chr11 5311848 5311867 5311851 -
agtaatttgaagaaagataa

SEQ ID NO: 38803 - DNA, 20 bp, Artificial Sequence
  Synthetic oligonucleotide; TAG chr11 5311835 5311854 5311838 -
aagataatagtaactcaatt

SEQ ID NO: 38804 - DNA, 20 bp, Artificial Sequence
  Synthetic oligonucleotide; AGG chr11 5311834 5311853 5311837 -
agataatagtaactcaattt

SEQ ID NO: 38805 - DNA, 20 bp, Artificial Sequence
  Synthetic oligonucleotide; AAG chr11 5311830 5311849 5311833 -
aatagtaactcaatttagga

SEQ ID NO: 38806 - DNA, 20 bp, Artificial Sequence
  Synthetic oligonucleotide; TGG chr11 5311827 5311846 5311830 -
agtaactcaatttaggaaag

SEQ ID NO: 38807 - DNA, 20 bp, Artificial Sequence
  Synthetic oligonucleotide; TGG chr11 5311821 5311840 5311824 -
tcaatttaggaaagtggaaa

SEQ ID NO: 38808 - DNA, 20 bp, Artificial Sequence
  Synthetic oligonucleotide; TGG chr11 5311815 5311834 5311818 -
taggaaagtggaaatggtaa

SEQ ID NO: 38809 - DNA, 20 bp, Artificial Sequence
  Synthetic oligonucleotide; GAG chr11 5311813 5311832 5311816 -
ggaaagtggaaatggtaatg

SEQ ID NO: 38810 - DNA, 20 bp, Artificial Sequence
  Synthetic oligonucleotide; GAG chr11 5311811 5311830 5311814 -
aaagtggaaatggtaatgga

SEQ ID NO: 38811 - DNA, 20 bp, Artificial Sequence
  Synthetic oligonucleotide; AAG chr11 5311793 5311812 5311796 -
gagagatatgacaaatattt

SEQ ID NO: 38812 - DNA, 20 bp, Artificial Sequence
  Synthetic oligonucleotide; AGG chr11 5311792 5311811 5311795 -
agagatatgacaaatattta

SEQ ID NO: 38813 - DNA, 20 bp, Artificial Sequence
  Synthetic oligonucleotide; AAG chr11 5311777 5311796 5311780 -
atttaaggtctaaatataat

SEQ ID NO: 38814 - DNA, 20 bp, Artificial Sequence
  Synthetic oligonucleotide; AGG chr11 5311776 5311795 5311779 -
tttaaggtctaaatataata

SEQ ID NO: 38815 - DNA, 20 bp, Artificial Sequence
  Synthetic oligonucleotide; CAG chr11 5311769 5311788 5311772 -
tctaaatataataaggttta

SEQ ID NO: 38816 - DNA, 20 bp, Artificial Sequence
  Synthetic oligonucleotide; AGG chr11 5311768 5311787 5311771 -
ctaaatataataaggtttac

SEQ ID NO: 38817 - DNA, 20 bp, Artificial Sequence
  Synthetic oligonucleotide; TAG chr11 5311760 5311779 5311763 -
aataaggtttacaggttatt

SEQ ID NO: 38818 - DNA, 20 bp, Artificial Sequence
  Synthetic oligonucleotide; AAG chr11 5311755 5311774 5311758 -
ggtttacaggttatttagaa

SEQ ID NO: 38819 - DNA, 20 bp, Artificial Sequence
  Synthetic oligonucleotide; CAG chr11 5311752 5311771 5311755 -
ttacaggttatttagaaaag

SEQ ID NO: 38820 - DNA, 20 bp, Artificial Sequence
  Synthetic oligonucleotide; GAG chr11 5311750 5311769 5311753 -
acaggttatttagaaaagca

SEQ ID NO: 38821 - DNA, 20 bp, Artificial Sequence
  Synthetic oligonucleotide; AGG chr11 5311749 5311768 5311752 -
caggttatttagaaaagcag

SEQ ID NO: 38822 - DNA, 20 bp, Artificial Sequence
  Synthetic oligonucleotide; AAG chr11 5311745 5311764 5311748 -
ttatttagaaaagcagagga

SEQ ID NO: 38823 - DNA, 20 bp, Artificial Sequence
  Synthetic oligonucleotide; AAG chr11 5311741 5311760 5311744 -
ttagaaaagcagaggaaaga

SEQ ID NO: 38824 - DNA, 20 bp, Artificial Sequence
  Synthetic oligonucleotide; GAG chr11 5311739 5311758 5311742 -
agaaaagcagaggaaagaaa

SEQ ID NO: 38825 - DNA, 20 bp, Artificial Sequence
  Synthetic oligonucleotide; TGG chr11 5311735 5311754 5311738 -
aagcagaggaaagaaagagt

SEQ ID NO: 38826 - DNA, 20 bp, Artificial Sequence
  Synthetic oligonucleotide; AAG chr11 5311731 5311750 5311734 -
agaggaaagaaagagttgga

SEQ ID NO: 38827 - DNA, 20 bp, Artificial Sequence
  Synthetic oligonucleotide; AGG chr11 5311730 5311749 5311733 -
gaggaaagaaagagttggaa

SEQ ID NO: 38828 - DNA, 20 bp, Artificial Sequence
  Synthetic oligonucleotide; GAG chr11 5311728 5311747 5311731 -
ggaaagaaagagttggaaag

SEQ ID NO: 38829 - DNA, 20 bp, Artificial Sequence
  Synthetic oligonucleotide; TGG chr11 5311694 5311713 5311697 -
atcaatttctgacatgttct

SEQ ID NO: 38830 - DNA, 20 bp, Artificial Sequence
  Synthetic oligonucleotide; AAG chr11 5311691 5311710 5311694 -
aatttctgacatgttcttgg

SEQ ID NO: 38831 - DNA, 20 bp, Artificial Sequence
  Synthetic oligonucleotide; AAG chr11 5311687 5311706 5311690 -
tctgacatgttcttggaaga

SEQ ID NO: 38832 - DNA, 20 bp, Artificial Sequence
  Synthetic oligonucleotide; AGG chr11 5311686 5311705 5311689 -
ctgacatgttcttggaagaa

SEQ ID NO: 38833 - DNA, 20 bp, Artificial Sequence
  Synthetic oligonucleotide; CAG chr11 5311683 5311702 5311686 -
acatgttcttggaagaaagg

SEQ ID NO: 38834 - DNA, 20 bp, Artificial Sequence
  Synthetic oligonucleotide; AAG chr11 5311674 5311693 5311677 -
tggaagaaaggcagtgccaa

SEQ ID NO: 38835 - DNA, 20 bp, Artificial Sequence
  Synthetic oligonucleotide; AAG chr11 5311670 5311689 5311673 -
agaaaggcagtgccaaaaga

SEQ ID NO: 38836 - DNA, 20 bp, Artificial Sequence
  Synthetic oligonucleotide; AGG chr11 5311669 5311688 5311672 -
gaaaggcagtgccaaaagaa

SEQ ID NO: 38837 - DNA, 20 bp, Artificial Sequence
  Synthetic oligonucleotide; CAG chr11 5311666 5311685 5311669 -
aggcagtgccaaaagaaagg

SEQ ID NO: 38838 - DNA, 20 bp, Artificial Sequence
  Synthetic oligonucleotide; AAG chr11 5311637 5311656 5311640 -
attatgtattgtctataaat

SEQ ID NO: 38839 - DNA, 20 bp, Artificial Sequence
  Synthetic oligonucleotide; AAG chr11 5311634 5311653 5311637 -
atgtattgtctataaataag

SEQ ID NO: 38840 - DNA, 20 bp, Artificial Sequence
  Synthetic oligonucleotide; AAG chr11 5311614 5311633 5311617 -
aagaatcattataattttta

SEQ ID NO: 38841 - DNA, 20 bp, Artificial Sequence
  Synthetic oligonucleotide; TGG chr11 5311608 5311627 5311611 -
cattataatttttaaagttg

SEQ ID NO: 38842 - DNA, 20 bp, Artificial Sequence
  Synthetic oligonucleotide; GGG chr11 5311607 5311626 5311610 -
attataatttttaaagttgt

SEQ ID NO: 38843 - DNA, 20 bp, Artificial Sequence
  Synthetic oligonucleotide; GAG chr11 5311599 5311618 5311602 -
ttttaaagttgtgggacact

SEQ ID NO: 38844 - DNA, 20 bp, Artificial Sequence
  Synthetic oligonucleotide; GAG chr11 5311593 5311612 5311596 -
agttgtgggacactgagaat

SEQ ID NO: 38845 - DNA, 20 bp, Artificial Sequence
  Synthetic oligonucleotide; AAG chr11 5311567 5311586 5311570 -
aaataataaacatgtgattt

SEQ ID NO: 38846 - DNA, 20 bp, Artificial Sequence
  Synthetic oligonucleotide; AAG chr11 5311563 5311582 5311566 -
aataaacatgtgatttaaga

SEQ ID NO: 38847 - DNA, 20 bp, Artificial Sequence
  Synthetic oligonucleotide; AAG chr11 5311554 5311573 5311557 -
gtgatttaagaaagcaattg

SEQ ID NO: 38848 - DNA, 20 bp, Artificial Sequence
  Synthetic oligonucleotide; AGG chr11 5311553 5311572 5311556 -
tgatttaagaaagcaattga

SEQ ID NO: 38849 - DNA, 20 bp, Artificial Sequence
  Synthetic oligonucleotide; AAG chr11 5311550 5311569 5311553 -
tttaagaaagcaattgaagg

SEQ ID NO: 38850 - DNA, 20 bp, Artificial Sequence
  Synthetic oligonucleotide; TAG chr11 5311535 5311554 5311538 -
gaaggaagtatttcaaactg

SEQ ID NO: 38851 - DNA, 20 bp, Artificial Sequence
  Synthetic oligonucleotide; TAG chr11 5311529 5311548 5311532 -
agtatttcaaactgtagaac

SEQ ID NO: 38852 - DNA, 20 bp, Artificial Sequence
  Synthetic oligonucleotide; TAG chr11 5311507 5311526 5311510 -
gacttttaaaaacaaaatat

SEQ ID NO: 38853 - DNA, 20 bp, Artificial Sequence
  Synthetic oligonucleotide; CAG chr11 5311468 5311487 5311471 -
atcattcattcaaatcattt

SEQ ID NO: 38854 - DNA, 20 bp, Artificial Sequence
  Synthetic oligonucleotide; AAG chr11 5311439 5311458 5311442 -
tttctttttgcctgatcatg

SEQ ID NO: 38855 - DNA, 20 bp, Artificial Sequence
  Synthetic oligonucleotide; GAG chr11 5311437 5311456 5311440 -
tctttttgcctgatcatgaa

SEQ ID NO: 38856 - DNA, 20 bp, Artificial Sequence
  Synthetic oligonucleotide; TAG chr11 5311431 5311450 5311434 -
tgcctgatcatgaagagtca

SEQ ID NO: 38857 - DNA, 20 bp, Artificial Sequence
  Synthetic oligonucleotide; AAG chr11 5311426 5311445 5311429 -
gatcatgaagagtcatagta

SEQ ID NO: 38858 - DNA, 20 bp, Artificial Sequence
  Synthetic oligonucleotide; AGG chr11 5311425 5311444 5311428 -
atcatgaagagtcatagtaa

SEQ ID NO: 38859 - DNA, 20 bp, Artificial Sequence
  Synthetic oligonucleotide; AAG chr11 5311421 5311440 5311424 -
tgaagagtcatagtaaaggc

SEQ ID NO: 38860 - DNA, 20 bp, Artificial Sequence
  Synthetic oligonucleotide; CAG chr11 5311410 5311429 5311413 -
agtaaaggcaagacatatgt

SEQ ID NO: 38861 - DNA, 20 bp, Artificial Sequence
  Synthetic oligonucleotide; GAG chr11 5311399 5311418 5311402 -
gacatatgtcagaaaatgat

SEQ ID NO: 38862 - DNA, 20 bp, Artificial Sequence
  Synthetic oligonucleotide; CAG chr11 5311390 5311409 5311393 -
cagaaaatgatgagaattta

SEQ ID NO: 38863 - DNA, 20 bp, Artificial Sequence
  Synthetic oligonucleotide; AAG chr11 5311383 5311402 5311386 -
tgatgagaatttacagatgc

SEQ ID NO: 38864 - DNA, 20 bp, Artificial Sequence
  Synthetic oligonucleotide; CAG chr11 5311376 5311395 5311379 -
aatttacagatgcaagacaa

SEQ ID NO: 38865 - DNA, 20 bp, Artificial Sequence
  Synthetic oligonucleotide; AAG chr11 5311363 5311382 5311366 -
aagacaacagaaacaaactg

SEQ ID NO: 38866 - DNA, 20 bp, Artificial Sequence
  Synthetic oligonucleotide; CAG chr11 5311360 5311379 5311363 -
acaacagaaacaaactgaag

SEQ ID NO: 38867 - DNA, 20 bp, Artificial Sequence
  Synthetic oligonucleotide; AAG chr11 5311347 5311366 5311350 -
actgaagcagatgacaccca

SEQ ID NO: 38868 - DNA, 20 bp, Artificial Sequence
  Synthetic oligonucleotide; AAG chr11 5311344 5311363 5311347 -
gaagcagatgacacccaaag

SEQ ID NO: 38869 - DNA, 20 bp, Artificial Sequence
  Synthetic oligonucleotide; AGG chr11 5311343 5311362 5311346 -
aagcagatgacacccaaaga

SEQ ID NO: 38870 - DNA, 20 bp, Artificial Sequence
  Synthetic oligonucleotide; CAG chr11 5311339 5311358 5311342 -
agatgacacccaaagaaggt

SEQ ID NO: 38871 - DNA, 20 bp, Artificial Sequence
  Synthetic oligonucleotide; GAG chr11 5311337 5311356 5311340 -
atgacacccaaagaaggtca

SEQ ID NO: 38872 - DNA, 20 bp, Artificial Sequence
  Synthetic oligonucleotide; AAG chr11 5311331 5311350 5311334 -
cccaaagaaggtcagagaat

SEQ ID NO: 38873 - DNA, 20 bp, Artificial Sequence
  Synthetic oligonucleotide; CAG chr11 5311323 5311342 5311326 -
aggtcagagaataagtgaaa

SEQ ID NO: 38874 - DNA, 20 bp, Artificial Sequence
  Synthetic oligonucleotide; TGG chr11 5311320 5311339 5311323 -
tcagagaataagtgaaacag

SEQ ID NO: 38875 - DNA, 20 bp, Artificial Sequence
  Synthetic oligonucleotide; TAG chr11 5311307 5311326 5311310 -
gaaacagtggctcactatcc

SEQ ID NO: 38876 - DNA, 20 bp, Artificial Sequence
  Synthetic oligonucleotide; AGG chr11 5311306 5311325 5311309 -
aaacagtggctcactatcct

SEQ ID NO: 38877 - DNA, 20 bp, Artificial Sequence
  Synthetic oligonucleotide; GAG chr11 5311304 5311323 5311307 -
acagtggctcactatcctag

SEQ ID NO: 38878 - DNA, 20 bp, Artificial Sequence
  Synthetic oligonucleotide; AAG chr11 5311300 5311319 5311303 -
tggctcactatcctaggaga

SEQ ID NO: 38879 - DNA, 20 bp, Artificial Sequence
  Synthetic oligonucleotide; CAG chr11 5311297 5311316 5311300 -
ctcactatcctaggagaaag

SEQ ID NO: 38880 - DNA, 20 bp, Artificial Sequence
  Synthetic oligonucleotide; AGG chr11 5311296 5311315 5311299 -
tcactatcctaggagaaagc

SEQ ID NO: 38881 - DNA, 20 bp, Artificial Sequence
  Synthetic oligonucleotide; TAG chr11 5311292 5311311 5311295 -
tatcctaggagaaagcagga

SEQ ID NO: 38882 - DNA, 20 bp, Artificial Sequence
  Synthetic oligonucleotide; CGG chr11 5311286 5311305 5311289 -
aggagaaagcaggatagatc

SEQ ID NO: 38883 - DNA, 20 bp, Artificial Sequence
  Synthetic oligonucleotide; GGG chr11 5311285 5311304 5311288 -
ggagaaagcaggatagatcc

SEQ ID NO: 38884 - DNA, 20 bp, Artificial Sequence
  Synthetic oligonucleotide; TGG chr11 5311275 5311294 5311278 -
ggatagatccgggtttttct

SEQ ID NO: 38885 - DNA, 20 bp, Artificial Sequence
  Synthetic oligonucleotide; GGG chr11 5311274 5311293 5311277 -
gatagatccgggtttttctt

SEQ ID NO: 38886 - DNA, 20 bp, Artificial Sequence
  Synthetic oligonucleotide; AAG chr11 5311259 5311278 5311262 -
ttcttgggtgtcattcactg

SEQ ID NO: 38887 - DNA, 20 bp, Artificial Sequence
  Synthetic oligonucleotide; TAG chr11 5311256 5311275 5311259 -
ttgggtgtcattcactgaag

SEQ ID NO: 38888 - DNA, 20 bp, Artificial Sequence
  Synthetic oligonucleotide; CAG chr11 5311250 5311269 5311253 -
gtcattcactgaagtagacc

SEQ ID NO: 38889 - DNA, 20 bp, Artificial Sequence
  Synthetic oligonucleotide; TAG chr11 5311239 5311258 5311242 -
aagtagacccagttttaaaa

SEQ ID NO: 38890 - DNA, 20 bp, Artificial Sequence
  Synthetic oligonucleotide; CAG chr11 5311236 5311255 5311239 -
tagacccagttttaaaatag

SEQ ID NO: 38891 - DNA, 20 bp, Artificial Sequence
  Synthetic oligonucleotide; GAG chr11 5311211 5311230 5311214 -
caaaaaatactgccaaacgt

SEQ ID NO: 38892 - DNA, 20 bp, Artificial Sequence
  Synthetic oligonucleotide; TGG chr11 5311182 5311201 5311185 -
tatcaattatatgatacaac

SEQ ID NO: 38893 - DNA, 20 bp, Artificial Sequence
  Synthetic oligonucleotide; TAG chr11 5311178 5311197 5311181 -
aattatatgatacaactggt

SEQ ID NO: 38894 - DNA, 20 bp, Artificial Sequence
  Synthetic oligonucleotide; GAG chr11 5311176 5311195 5311179 -
ttatatgatacaactggtta

SEQ ID NO: 38895 - DNA, 20 bp, Artificial Sequence
  Synthetic oligonucleotide; CAG chr11 5311172 5311191 5311175 -
atgatacaactggttagagc

SEQ ID NO: 38896 - DNA, 20 bp, Artificial Sequence
  Synthetic oligonucleotide; TAG chr11 5311148 5311167 5311151 -
taatctgatacaaacataaa

SEQ ID NO: 38897 - DNA, 20 bp, Artificial Sequence
  Synthetic oligonucleotide; AGG chr11 5311147 5311166 5311150 -
aatctgatacaaacataaat

SEQ ID NO: 38898 - DNA, 20 bp, Artificial Sequence
  Synthetic oligonucleotide; AAG chr11 5311144 5311163 5311147 -
ctgatacaaacataaatagg

SEQ ID NO: 38899 - DNA, 20 bp, Artificial Sequence
  Synthetic oligonucleotide; TGG chr11 5311140 5311159 5311143 -
tacaaacataaataggaaga

SEQ ID NO: 38900 - DNA, 20 bp, Artificial Sequence
  Synthetic oligonucleotide; CAG chr11 5311116 5311135 5311119 -
ttaactaaattctgaattac

SEQ ID NO: 38901 - DNA, 20 bp, Artificial Sequence
  Synthetic oligonucleotide; GAG chr11 5311111 5311130 5311114 -
taaattctgaattaccagat

SEQ ID NO: 38902 - DNA, 20 bp, Artificial Sequence
  Synthetic oligonucleotide; AAG chr11 5311100 5311119 5311103 -
ttaccagatgagtaaataac

SEQ ID NO: 38903 - DNA, 20 bp, Artificial Sequence
  Synthetic oligonucleotide; AAG chr11 5311081 5311100 5311084 -
caagaatttattgaaaaatg

SEQ ID NO: 38904 - DNA, 20 bp, Artificial Sequence
  Synthetic oligonucleotide; GAG chr11 5311069 5311088 5311072 -
gaaaaatgaagttttttcat

SEQ ID NO: 38905 - DNA, 20 bp, Artificial Sequence
  Synthetic oligonucleotide; TAG chr11 5311057 5311076 5311060 -
tttttcatgagtgcttatgt

SEQ ID NO: 38906 - DNA, 20 bp, Artificial Sequence
  Synthetic oligonucleotide; TAG chr11 5311048 5311067 5311051 -
agtgcttatgttagttaccc

SEQ ID NO: 38907 - DNA, 20 bp, Artificial Sequence
  Synthetic oligonucleotide; CGG chr11 5311040 5311059 5311043 -
tgttagttaccctagatttg

SEQ ID NO: 38908 - DNA, 20 bp, Artificial Sequence
  Synthetic oligonucleotide; CAG chr11 5311027 5311046 5311030 -
agatttgcggcatgccttca

SEQ ID NO: 38909 - DNA, 20 bp, Artificial Sequence
  Synthetic oligonucleotide; TAG chr11 5311013 5311032 5311016 -
ccttcacagatgtccaatca

SEQ ID NO: 38910 - DNA, 20 bp, Artificial Sequence
  Synthetic oligonucleotide; GAG chr11 5311004 5311023 5311007 -
atgtccaatcatagatattt

SEQ ID NO: 38911 - DNA, 20 bp, Artificial Sequence
  Synthetic oligonucleotide; AGG chr11 5311003 5311022 5311006 -
tgtccaatcatagatatttg

SEQ ID NO: 38912 - DNA, 20 bp, Artificial Sequence
  Synthetic oligonucleotide; GAG chr11 5311001 5311020 5311004 -
tccaatcatagatatttgag

SEQ ID NO: 38913 - DNA, 20 bp, Artificial Sequence
  Synthetic oligonucleotide; AGG chr11 5311000 5311019 5311003 -
ccaatcatagatatttgagg

SEQ ID NO: 38914 - DNA, 20 bp, Artificial Sequence
  Synthetic oligonucleotide; TGG chr11 5310991 5311010 5310994 -
gatatttgaggaggaccata

SEQ ID NO: 38915 - DNA, 20 bp, Artificial Sequence
  Synthetic oligonucleotide; AAG chr11 5310954 5310973 5310957 -
tatgcttgattctttctctc

SEQ ID NO: 38916 - DNA, 20 bp, Artificial Sequence
  Synthetic oligonucleotide; GAG chr11 5310941 5310960 5310944 -
ttctctcaagtgaaattgtt

SEQ ID NO: 38917 - DNA, 20 bp, Artificial Sequence
  Synthetic oligonucleotide; TGG chr11 5310902 5310921 5310905 -
atttattaaaatcaaataaa

SEQ ID NO: 38918 - DNA, 20 bp, Artificial Sequence
  Synthetic oligonucleotide; AAG chr11 5310894 5310913 5310897 -
aaatcaaataaatggtcttt

SEQ ID NO: 38919 - DNA, 20 bp, Artificial Sequence
  Synthetic oligonucleotide; AAG chr11 5310887 5310906 5310890 -
ataaatggtctttaagatat

SEQ ID NO: 38920 - DNA, 20 bp, Artificial Sequence
  Synthetic oligonucleotide; GAG chr11 5310885 5310904 5310888 -
aaatggtctttaagatataa

SEQ ID NO: 38921 - DNA, 20 bp, Artificial Sequence
  Synthetic oligonucleotide; TAG chr11 5310873 5310892 5310876 -
agatataagagactttatcc

SEQ ID NO: 38922 - DNA, 20 bp, Artificial Sequence
  Synthetic oligonucleotide; TAG chr11 5310858 5310877 5310861 -
tatcctagtatgtatatata

SEQ ID NO: 38923 - DNA, 20 bp, Artificial Sequence
  Synthetic oligonucleotide; TGG chr11 5310836 5310855 5310839 -
gttgtgtttgcatgtgtgtg

SEQ ID NO: 38924 - DNA, 20 bp, Artificial Sequence
  Synthetic oligonucleotide; TGG chr11 5310820 5310839 5310823 -
tgtgtggacacctgcacatg

SEQ ID NO: 38925 - DNA, 20 bp, Artificial Sequence
  Synthetic oligonucleotide; TAG chr11 5310793 5310812 5310796 -
aatcttttaatattttatct

SEQ ID NO: 38926 - DNA, 20 bp, Artificial Sequence
  Synthetic oligonucleotide; TAG chr11 5310705 5310724 5310708 -
catttattgttttattttta

SEQ ID NO: 38927 - DNA, 20 bp, Artificial Sequence
  Synthetic oligonucleotide; TGG chr11 5310702 5310721 5310705 -
ttattgttttatttttatag

SEQ ID NO: 38928 - DNA, 20 bp, Artificial Sequence
  Synthetic oligonucleotide; TAG chr11 5310677 5310696 5310680 -
atatatacaatttgccactt

SEQ ID NO: 38929 - DNA, 20 bp, Artificial Sequence
  Synthetic oligonucleotide; CAG chr11 5310654 5310673 5310657 -
cctttttataatgtataatg

SEQ ID NO: 38930 - DNA, 20 bp, Artificial Sequence
  Synthetic oligonucleotide; TGG chr11 5310651 5310670 5310654 -
ttttataatgtataatgcag

SEQ ID NO: 38931 - DNA, 20 bp, Artificial Sequence
  Synthetic oligonucleotide; CAG chr11 5310560 5310579 5310563 -
aaaactctatattgattaat

SEQ ID NO: 38932 - DNA, 20 bp, Artificial Sequence
  Synthetic oligonucleotide; TGG chr11 5310526 5310545 5310529 -
tccatgttcttcctacactc

SEQ ID NO: 38933 - DNA, 20 bp, Artificial Sequence
  Synthetic oligonucleotide; TAG chr11 5310481 5310500 5310484 -
ctctatgaatttgcctattc

SEQ ID NO: 38934 - DNA, 20 bp, Artificial Sequence
  Synthetic oligonucleotide; TAG chr11 5310477 5310496 5310480 -
atgaatttgcctattctaga

SEQ ID NO: 38935 - DNA, 20 bp, Artificial Sequence
  Synthetic oligonucleotide; AAG chr11 5310467 5310486 5310470 -
ctattctagatagctcatgt

SEQ ID NO: 38936 - DNA, 20 bp, Artificial Sequence
  Synthetic oligonucleotide; CAG chr11 5310458 5310477 5310461 -
atagctcatgtaagtgaaat

SEQ ID NO: 38937 - DNA, 20 bp, Artificial Sequence
  Synthetic oligonucleotide; TAG chr11 5310423 5310442 5310426 -
tgcgtatgacttattgcact

SEQ ID NO: 38938 - DNA, 20 bp, Artificial Sequence
  Synthetic oligonucleotide; AGG chr11 5310422 5310441 5310425 -
gcgtatgacttattgcactt

SEQ ID NO: 38939 - DNA, 20 bp, Artificial Sequence
  Synthetic oligonucleotide; TAG chr11 5310418 5310437 5310421 -
atgacttattgcacttagga

SEQ ID NO: 38940 - DNA, 20 bp, Artificial Sequence
  Synthetic oligonucleotide; AAG chr11 5310409 5310428 5310412 -
tgcacttaggatagtttttt

SEQ ID NO: 38941 - DNA, 20 bp, Artificial Sequence
  Synthetic oligonucleotide; AGG chr11 5310408 5310427 5310411 -
gcacttaggatagtttttta

SEQ ID NO: 38942 - DNA, 20 bp, Artificial Sequence
  Synthetic oligonucleotide; TAG chr11 5310392 5310411 5310395 -
tttaaggtttattcatgttg

SEQ ID NO: 38943 - DNA, 20 bp, Artificial Sequence
  Synthetic oligonucleotide; CAG chr11 5310382 5310401 5310385 -
attcatgttgtagcatgtgt

SEQ ID NO: 38944 - DNA, 20 bp, Artificial Sequence
  Synthetic oligonucleotide; TAG chr11 5310367 5310386 5310370 -
tgtgtcagacctacttttta

SEQ ID NO: 38945 - DNA, 20 bp, Artificial Sequence
  Synthetic oligonucleotide; AAG chr11 5310339 5310358 5310342 -
taatattctatcacatatat

SEQ ID NO: 38946 - DNA, 20 bp, Artificial Sequence
  Synthetic oligonucleotide; TAG chr11 5310308 5310327 5310311 -
ttgatatacgcatctgttga

SEQ ID NO: 38947 - DNA, 20 bp, Artificial Sequence
  Synthetic oligonucleotide; TGG chr11 5310282 5310301 5310285 -
cttgtattgtttctattcct

SEQ ID NO: 38948 - DNA, 20 bp, Artificial Sequence
  Synthetic oligonucleotide; CAG chr11 5310242 5310261 5310245 -
tgtcttcccttcaatatgcc

SEQ ID NO: 38949 - DNA, 20 bp, Artificial Sequence
  Synthetic oligonucleotide; AAG chr11 5310184 5310203 5310187 -
tctgaatattctgcttttca

SEQ ID NO: 38950 - DNA, 20 bp, Artificial Sequence
  Synthetic oligonucleotide; TGG chr11 5310172 5310191 5310175 -
gcttttcaaagaatattcct

SEQ ID NO: 38951 - DNA, 20 bp, Artificial Sequence
  Synthetic oligonucleotide; TGG chr11 5310160 5310179 5310163 -
atattccttggaatattcca

SEQ ID NO: 38952 - DNA, 20 bp, Artificial Sequence
  Synthetic oligonucleotide; AAG chr11 5310157 5310176 5310160 -
ttccttggaatattccatgg

SEQ ID NO: 38953 - DNA, 20 bp, Artificial Sequence
  Synthetic oligonucleotide; AAG chr11 5310154 5310173 5310157 -
cttggaatattccatggaag

SEQ ID NO: 38954 - DNA, 20 bp, Artificial Sequence
  Synthetic oligonucleotide; GAG chr11 5310146 5310165 5310149 -
attccatggaagaagaaaat

SEQ ID NO: 38955 - DNA, 20 bp, Artificial Sequence
  Synthetic oligonucleotide; AAG chr11 5310141 5310160 5310144 -
atggaagaagaaaatgagac

SEQ ID NO: 38956 - DNA, 20 bp, Artificial Sequence
  Synthetic oligonucleotide; TGG chr11 5310133 5310152 5310136 -
agaaaatgagacaagctttc

SEQ ID NO: 38957 - DNA, 20 bp, Artificial Sequence
  Synthetic oligonucleotide; GAG chr11 5310131 5310150 5310134 -
aaaatgagacaagctttctg

SEQ ID NO: 38958 - DNA, 20 bp, Artificial Sequence
  Synthetic oligonucleotide; AAG chr11 5310127 5310146 5310130 -
tgagacaagctttctggaga

SEQ ID NO: 38959 - DNA, 20 bp, Artificial Sequence
  Synthetic oligonucleotide; AGG chr11 5310126 5310145 5310129 -
gagacaagctttctggagaa

SEQ ID NO: 38960 - DNA, 20 bp, Artificial Sequence
  Synthetic oligonucleotide; AAG chr11 5310123 5310142 5310126 -
acaagctttctggagaaagg

SEQ ID NO: 38961 - DNA, 20 bp, Artificial Sequence
  Synthetic oligonucleotide; CAG chr11 5310116 5310135 5310119 -
ttctggagaaaggaagtttt

SEQ ID NO: 38962 - DNA, 20 bp, Artificial Sequence
  Synthetic oligonucleotide; CGG chr11 5310102 5310121 5310105 -
agttttcagtgccttgatct

SEQ ID NO: 38963 - DNA, 20 bp, Artificial Sequence
  Synthetic oligonucleotide; TGG chr11 5310078 5310097 5310081 -
tgactgcaacctctgcctcc

SEQ ID NO: 38964 - DNA, 20 bp, Artificial Sequence
  Synthetic oligonucleotide; GGG chr11 5310077 5310096 5310080 -
gactgcaacctctgcctcct

SEQ ID NO: 38965 - DNA, 20 bp, Artificial Sequence
  Synthetic oligonucleotide; CAG chr11 5310072 5310091 5310075 -
caacctctgcctcctgggtt

SEQ ID NO: 38966 - DNA, 20 bp, Artificial Sequence
  Synthetic oligonucleotide; CAG chr11 5310065 5310084 5310068 -
tgcctcctgggttcagtttt

SEQ ID NO: 38967 - DNA, 20 bp, Artificial Sequence
  Synthetic oligonucleotide; AAG chr11 5310059 5310078 5310062 -
ctgggttcagttttcagtta

SEQ ID NO: 38968 - DNA, 20 bp, Artificial Sequence
  Synthetic oligonucleotide; TAG chr11 5310027 5310046 5310030 -
aacaaattttttcactcaac

SEQ ID NO: 38969 - DNA, 20 bp, Artificial Sequence
  Synthetic oligonucleotide; GAG chr11 5310025 5310044 5310028 -
caaattttttcactcaacta

SEQ ID NO: 38970 - DNA, 20 bp, Artificial Sequence
  Synthetic oligonucleotide; CAG chr11 5310003 5310022 5310006 -
gattttatgataatgcaata

SEQ ID NO: 38971 - DNA, 20 bp, Artificial Sequence
  Synthetic oligonucleotide; AAG chr11 5309996 5310015 5309999 -
tgataatgcaatacagataa

SEQ ID NO: 38972 - DNA, 20 bp, Artificial Sequence
  Synthetic oligonucleotide; CAG chr11 5309978 5309997 5309981 -
aaaagataatgcaatccttc

SEQ ID NO: 38973 - DNA, 20 bp, Artificial Sequence
  Synthetic oligonucleotide; TGG chr11 5309962 5309981 5309965 -
cttccagacctaaaaatatg

SEQ ID NO: 38974 - DNA, 20 bp, Artificial Sequence
  Synthetic oligonucleotide; CAG chr11 5309946 5309965 5309949 -
tatgtggcatccacatttta

SEQ ID NO: 38975 - DNA, 20 bp, Artificial Sequence
  Synthetic oligonucleotide; AGG chr11 5309945 5309964 5309948 -
atgtggcatccacattttac

SEQ ID NO: 38976 - DNA, 20 bp, Artificial Sequence
  Synthetic oligonucleotide; CGG chr11 5309932 5309951 5309935 -
attttacaggtacattttca

SEQ ID NO: 38977 - DNA, 20 bp, Artificial Sequence
  Synthetic oligonucleotide; GAG chr11 5309930 5309949 5309933 -
tttacaggtacattttcacg

SEQ ID NO: 38978 - DNA, 20 bp, Artificial Sequence
  Synthetic oligonucleotide; AAG chr11 5309926 5309945 5309929 -
caggtacattttcacggaga

SEQ ID NO: 38979 - DNA, 20 bp, Artificial Sequence
  Synthetic oligonucleotide; AAG chr11 5309921 5309940 5309924 -
acattttcacggagaaagat

SEQ ID NO: 38980 - DNA, 20 bp, Artificial Sequence
  Synthetic oligonucleotide; TGG chr11 5309915 5309934 5309918 -
tcacggagaaagataagaac

SEQ ID NO: 38981 - DNA, 20 bp, Artificial Sequence
  Synthetic oligonucleotide; TGG chr11 5309885 5309904 5309888 -
tttgcaacaaatctttgctc

SEQ ID NO: 38982 - DNA, 20 bp, Artificial Sequence
  Synthetic oligonucleotide; GAG chr11 5309874 5309893 5309877 -
tctttgctctggacttcact

SEQ ID NO: 38983 - DNA, 20 bp, Artificial Sequence
  Synthetic oligonucleotide; AAG chr11 5309869 5309888 5309872 -
gctctggacttcactgagta

SEQ ID NO: 38984 - DNA, 20 bp, Artificial Sequence
  Synthetic oligonucleotide; GAG chr11 5309837 5309856 5309840 -
ctttgttttgttttgttttt

SEQ ID NO: 38985 - DNA, 20 bp, Artificial Sequence
  Synthetic oligonucleotide; TGG chr11 5309833 5309852 5309836 -
gttttgttttgtttttgaga

SEQ ID NO: 38986 - DNA, 20 bp, Artificial Sequence
  Synthetic oligonucleotide; GAG chr11 5309831 5309850 5309834 -
tttgttttgtttttgagatg

SEQ ID NO: 38987 - DNA, 20 bp, Artificial Sequence
  Synthetic oligonucleotide; CAG chr11 5309813 5309832 5309816 -
tggagtctcgctctgtcgcc

SEQ ID NO: 38988 - DNA, 20 bp, Artificial Sequence
  Synthetic oligonucleotide; AGG chr11 5309812 5309831 5309815 -
ggagtctcgctctgtcgccc

SEQ ID NO: 38989 - DNA, 20 bp, Artificial Sequence
  Synthetic oligonucleotide; TGG chr11 5309808 5309827 5309811 -
tctcgctctgtcgcccaggc

SEQ ID NO: 38990 - DNA, 20 bp, Artificial Sequence
  Synthetic oligonucleotide; GAG chr11 5309806 5309825 5309809 -
tcgctctgtcgcccaggctg

SEQ ID NO: 38991 - DNA, 20 bp, Artificial Sequence
  Synthetic oligonucleotide; CAG chr11 5309801 5309820 5309804 -
ctgtcgcccaggctggagtg

SEQ ID NO: 38992 - DNA, 20 bp, Artificial Sequence
  Synthetic oligonucleotide; TGG chr11 5309798 5309817 5309801 -
tcgcccaggctggagtgcag

SEQ ID NO: 38993 - DNA, 20 bp, Artificial Sequence
  Synthetic oligonucleotide; CAG chr11 5309787 5309806 5309790 -
ggagtgcagtggcgtgatct

SEQ ID NO: 38994 - DNA, 20 bp, Artificial Sequence
  Synthetic oligonucleotide; AAG chr11 5309776 5309795 5309779 -
gcgtgatctcagctcactgc

SEQ ID NO: 38995 - DNA, 20 bp, Artificial Sequence
  Synthetic oligonucleotide; CGG chr11 5309763 5309782 5309766 -
tcactgcaagctctgcctcc

SEQ ID NO: 38996 - DNA, 20 bp, Artificial Sequence
  Synthetic oligonucleotide; GGG chr11 5309762 5309781 5309765 -
cactgcaagctctgcctccc

SEQ ID NO: 38997 - DNA, 20 bp, Artificial Sequence
  Synthetic oligonucleotide; CAG chr11 5309739 5309758 5309742 -
ttcacgccattctcctgcct

SEQ ID NO: 38998 - DNA, 20 bp, Artificial Sequence
  Synthetic oligonucleotide; GAG chr11 5309730 5309749 5309733 -
ttctcctgcctcagcctccc

SEQ ID NO: 38999 - DNA, 20 bp, Artificial Sequence
  Synthetic oligonucleotide; TAG chr11 5309727 5309746 5309730 -
tcctgcctcagcctcccgag

SEQ ID NO: 39000 - DNA, 20 bp, Artificial Sequence
  Synthetic oligonucleotide; TGG chr11 5309723 5309742 5309726 -
gcctcagcctcccgagtagc

SEQ ID NO: 39001 - DNA, 20 bp, Artificial Sequence
  Synthetic oligonucleotide; GGG chr11 5309722 5309741 5309725 -
cctcagcctcccgagtagct

SEQ ID NO: 39002 - DNA, 20 bp, Artificial Sequence
  Synthetic oligonucleotide; CAG chr11 5309715 5309734 5309718 -
ctcccgagtagctgggacta

SEQ ID NO: 39003 - DNA, 20 bp, Artificial Sequence
  Synthetic oligonucleotide; AGG chr11 5309714 5309733 5309717 -
tcccgagtagctgggactac

SEQ ID NO: 39004 - DNA, 20 bp, Artificial Sequence
  Synthetic oligonucleotide; CAG chr11 5309696 5309715 5309699 -
acaggcgcccgccaccacgc

SEQ ID NO: 39005 - DNA, 20 bp, Artificial Sequence
  Synthetic oligonucleotide; AGG chr11 5309695 5309714 5309698 -
caggcgcccgccaccacgcc

SEQ ID NO: 39006 - DNA, 20 bp, Artificial Sequence
  Synthetic oligonucleotide; TAG chr11 5309674 5309693 5309677 -
ggcaaatttttttgtctttt

SEQ ID NO: 39007 - DNA, 20 bp, Artificial Sequence
  Synthetic oligonucleotide; TAG chr11 5309671 5309690 5309674 -
aaatttttttgtctttttag

SEQ ID NO: 39008 - DNA, 20 bp, Artificial Sequence
  Synthetic oligonucleotide; GAG chr11 5309669 5309688 5309672 -
atttttttgtctttttagta

SEQ ID NO: 39009 - DNA, 20 bp, Artificial Sequence
  Synthetic oligonucleotide; CGG chr11 5309665 5309684 5309668 -
ttttgtctttttagtagaga

SEQ ID NO: 39010 - DNA, 20 bp, Artificial Sequence
  Synthetic oligonucleotide; GGG chr11 5309664 5309683 5309667 -
tttgtctttttagtagagac

SEQ ID NO: 39011 - DNA, 20 bp, Artificial Sequence
  Synthetic oligonucleotide; GGG chr11 5309663 5309682 5309666 -
ttgtctttttagtagagacg

SEQ ID NO: 39012 - DNA, 20 bp, Artificial Sequence
  Synthetic oligonucleotide; TAG chr11 5309649 5309668 5309652 -
gagacggggtttcactgtgt

SEQ ID NO: 39013 - DNA, 20 bp, Artificial Sequence
  Synthetic oligonucleotide; CAG chr11 5309645 5309664 5309648 -
cggggtttcactgtgttagc

SEQ ID NO: 39014 - DNA, 20 bp, Artificial Sequence
  Synthetic oligonucleotide; AGG chr11 5309644 5309663 5309647 -
ggggtttcactgtgttagcc

SEQ ID NO: 39015 - DNA, 20 bp, Artificial Sequence
  Synthetic oligonucleotide; TGG chr11 5309640 5309659 5309643 -
tttcactgtgttagccagga

SEQ ID NO: 39016 - DNA, 20 bp, Artificial Sequence
  Synthetic oligonucleotide; CGG chr11 5309604 5309623 5309607 -
acctcgtgatccacccgcct

SEQ ID NO: 39017 - DNA, 20 bp, Artificial Sequence
  Synthetic oligonucleotide; AAG chr11 5309594 5309613 5309597 -
ccacccgcctcggcctccca

SEQ ID NO: 39018 - DNA, 20 bp, Artificial Sequence
  Synthetic oligonucleotide; TGG chr11 5309588 5309607 5309591 -
gcctcggcctcccaaagtgc

SEQ ID NO: 39019 - DNA, 20 bp, Artificial Sequence
  Synthetic oligonucleotide; GGG chr11 5309587 5309606 5309590 -
cctcggcctcccaaagtgct

SEQ ID NO: 39020 - DNA, 20 bp, Artificial Sequence
  Synthetic oligonucleotide; CAG chr11 5309580 5309599 5309583 -
ctcccaaagtgctgggatta

SEQ ID NO: 39021 - DNA, 20 bp, Artificial Sequence
  Synthetic oligonucleotide; AGG chr11 5309579 5309598 5309582 -
tcccaaagtgctgggattac

SEQ ID NO: 39022 - DNA, 20 bp, Artificial Sequence
  Synthetic oligonucleotide; GAG chr11 5309573 5309592 5309576 -
agtgctgggattacaggcgt

SEQ ID NO: 39023 - DNA, 20 bp, Artificial Sequence
  Synthetic oligonucleotide; CGG chr11 5309560 5309579 5309563 -
caggcgtgagccaccgcgcc

SEQ ID NO: 39024 - DNA, 20 bp, Artificial Sequence
  Synthetic oligonucleotide; GAG chr11 5309554 5309573 5309557 -
tgagccaccgcgcccggcct

SEQ ID NO: 39025 - DNA, 20 bp, Artificial Sequence
  Synthetic oligonucleotide; AAG chr11 5309549 5309568 5309552 -
caccgcgcccggcctgagta

SEQ ID NO: 39026 - DNA, 20 bp, Artificial Sequence
  Synthetic oligonucleotide; TGG chr11 5309538 5309557 5309541 -
gcctgagtaaagttttatat

SEQ ID NO: 39027 - DNA, 20 bp, Artificial Sequence
  Synthetic oligonucleotide; GGG chr11 5309537 5309556 5309540 -
cctgagtaaagttttatatt

SEQ ID NO: 39028 - DNA, 20 bp, Artificial Sequence
  Synthetic oligonucleotide; AAG chr11 5309534 5309553 5309537 -
gagtaaagttttatattggg

SEQ ID NO: 39029 - DNA, 20 bp, Artificial Sequence
  Synthetic oligonucleotide; TGG chr11 5309520 5309539 5309523 -
attgggaagacataaaaatg

SEQ ID NO: 39030 - DNA, 20 bp, Artificial Sequence
  Synthetic oligonucleotide; GAG chr11 5309518 5309537 5309521 -
tgggaagacataaaaatgtg

SEQ ID NO: 39031 - DNA, 20 bp, Artificial Sequence
  Synthetic oligonucleotide; GAG chr11 5309516 5309535 5309519 -
ggaagacataaaaatgtgga

SEQ ID NO: 39032 - DNA, 20 bp, Artificial Sequence
  Synthetic oligonucleotide; GAG chr11 5309509 5309528 5309512 -
ataaaaatgtggagagaaat

SEQ ID NO: 39033 - DNA, 20 bp, Artificial Sequence
  Synthetic oligonucleotide; TGG chr11 5309496 5309515 5309499 -
gagaaatgagatccaatcta

SEQ ID NO: 39034 - DNA, 20 bp, Artificial Sequence
  Synthetic oligonucleotide; TAG chr11 5309479 5309498 5309482 -
ctatggaatgcttaaaaaaa

SEQ ID NO: 39035 - DNA, 20 bp, Artificial Sequence
  Synthetic oligonucleotide; AGG chr11 5309478 5309497 5309481 -
tatggaatgcttaaaaaaat

SEQ ID NO: 39036 - DNA, 20 bp, Artificial Sequence
  Synthetic oligonucleotide; TAG chr11 5309473 5309492 5309476 -
aatgcttaaaaaaataggtg

SEQ ID NO: 39037 - DNA, 20 bp, Artificial Sequence
  Synthetic oligonucleotide; AGG chr11 5309472 5309491 5309475 -
atgcttaaaaaaataggtgt

SEQ ID NO: 39038 - DNA, 20 bp, Artificial Sequence
  Synthetic oligonucleotide; AAG chr11 5309466 5309485 5309469 -
aaaaaaataggtgtaggcgc

SEQ ID NO: 39039 - DNA, 20 bp, Artificial Sequence
  Synthetic oligonucleotide; AAG chr11 5309385 5309404 5309388 -
atttacccaatgcatgctgt

SEQ ID NO: 39040 - DNA, 20 bp, Artificial Sequence
  Synthetic oligonucleotide; GAG chr11 5309365 5309384 5309368 -
aagcaaaattatatgctatt

SEQ ID NO: 39041 - DNA, 20 bp, Artificial Sequence
  Synthetic oligonucleotide; AAG chr11 5309352 5309371 5309355 -
tgctattgagtacaatgttt

SEQ ID NO: 39042 - DNA, 20 bp, Artificial Sequence
  Synthetic oligonucleotide; GAG chr11 5309338 5309357 5309341 -
atgtttaagctattgatact

SEQ ID NO: 39043 - DNA, 20 bp, Artificial Sequence
  Synthetic oligonucleotide; TGG chr11 5309313 5309332 5309316 -
taaacacaaatcttaaaatc

SEQ ID NO: 39044 - DNA, 20 bp, Artificial Sequence
  Synthetic oligonucleotide; AAG chr11 5309300 5309319 5309303 -
taaaatctggttatccccca

SEQ ID NO: 39045 - DNA, 20 bp, Artificial Sequence
  Synthetic oligonucleotide; CAG chr11 5309272 5309291 5309275 -
tctgtttctcataatgtgcc

SEQ ID NO: 39046 - DNA, 20 bp, Artificial Sequence
  Synthetic oligonucleotide; AAG chr11 5309268 5309287 5309271 -
tttctcataatgtgcccagt

SEQ ID NO: 39047 - DNA, 20 bp, Artificial Sequence
  Synthetic oligonucleotide; TAG chr11 5309251 5309270 5309254 -
agtaagttcctaatgtttat

SEQ ID NO: 39048 - DNA, 20 bp, Artificial Sequence
  Synthetic oligonucleotide; TGG chr11 5309243 5309262 5309246 -
cctaatgtttattagtgtgt

SEQ ID NO: 39049 - DNA, 20 bp, Artificial Sequence
  Synthetic oligonucleotide; TAG chr11 5309240 5309259 5309243 -
aatgtttattagtgtgttgg

SEQ ID NO: 39050 - DNA, 20 bp, Artificial Sequence
  Synthetic oligonucleotide; AGG chr11 5309239 5309258 5309242 -
atgtttattagtgtgttggt

SEQ ID NO: 39051 - DNA, 20 bp, Artificial Sequence
  Synthetic oligonucleotide; TGG chr11 5309196 5309215 5309199 -
tccatcttgatttgctgacc

SEQ ID NO: 39052 - DNA, 20 bp, Artificial Sequence
  Synthetic oligonucleotide; GGG chr11 5309195 5309214 5309198 -
ccatcttgatttgctgacct

SEQ ID NO: 39053 - DNA, 20 bp, Artificial Sequence
  Synthetic oligonucleotide; CAG chr11 5309190 5309209 5309193 -
ttgatttgctgacctgggtg

SEQ ID NO: 39054 - DNA, 20 bp, Artificial Sequence
  Synthetic oligonucleotide; AGG chr11 5309189 5309208 5309192 -
tgatttgctgacctgggtgc

SEQ ID NO: 39055 - DNA, 20 bp, Artificial Sequence
  Synthetic oligonucleotide; CAG chr11 5309177 5309196 5309180 -
ctgggtgcaggttcttatga

SEQ ID NO: 39056 - DNA, 20 bp, Artificial Sequence
  Synthetic oligonucleotide; GAG chr11 5309175 5309194 5309178 -
gggtgcaggttcttatgaca

SEQ ID NO: 39057 - DNA, 20 bp, Artificial Sequence
  Synthetic oligonucleotide; AGG chr11 5309174 5309193 5309177 -
ggtgcaggttcttatgacag

SEQ ID NO: 39058 - DNA, 20 bp, Artificial Sequence
  Synthetic oligonucleotide; AAG chr11 5309170 5309189 5309173 -
caggttcttatgacagagga

SEQ ID NO: 39059 - DNA, 20 bp, Artificial Sequence
  Synthetic oligonucleotide; AAG chr11 5309156 5309175 5309159 -
agaggaaagactgtctttgt

SEQ ID NO: 39060 - DNA, 20 bp, Artificial Sequence
  Synthetic oligonucleotide; TGG chr11 5309147 5309166 5309150 -
actgtctttgtaagttattt

SEQ ID NO: 39061 - DNA, 20 bp, Artificial Sequence
  Synthetic oligonucleotide; AAG chr11 5309144 5309163 5309147 -
gtctttgtaagttattttgg

SEQ ID NO: 39062 - DNA, 20 bp, Artificial Sequence
  Synthetic oligonucleotide; TAG chr11 5309139 5309158 5309142 -
tgtaagttattttggaagaa

SEQ ID NO: 39063 - DNA, 20 bp, Artificial Sequence
  Synthetic oligonucleotide; TGG chr11 5309119 5309138 5309122 -
tagaaactgtgaaaaatata

SEQ ID NO: 39064 - DNA, 20 bp, Artificial Sequence
  Synthetic oligonucleotide; TGG chr11 5309110 5309129 5309113 -
tgaaaaatatatggcttctt

SEQ ID NO: 39065 - DNA, 20 bp, Artificial Sequence
  Synthetic oligonucleotide; GAG chr11 5309100 5309119 5309103 -
atggcttctttggtgctcat

SEQ ID NO: 39066 - DNA, 20 bp, Artificial Sequence
  Synthetic oligonucleotide; AGG chr11 5309099 5309118 5309102 -
tggcttctttggtgctcatg

SEQ ID NO: 39067 - DNA, 20 bp, Artificial Sequence
  Synthetic oligonucleotide; CAG chr11 5309040 5309059 5309043 -
atacatctgctcctctttta

SEQ ID NO: 39068 - DNA, 20 bp, Artificial Sequence
  Synthetic oligonucleotide; TAG chr11 5309029 5309048 5309032 -
cctcttttacagctttatct

SEQ ID NO: 39069 - DNA, 20 bp, Artificial Sequence
  Synthetic oligonucleotide; AGG chr11 5309028 5309047 5309031 -
ctcttttacagctttatctt

SEQ ID NO: 39070 - DNA, 20 bp, Artificial Sequence
  Synthetic oligonucleotide; TGG chr11 5309025 5309044 5309028 -
ttttacagctttatcttagg

SEQ ID NO: 39071 - DNA, 20 bp, Artificial Sequence
  Synthetic oligonucleotide; AAG chr11 5309022 5309041 5309025 -
tacagctttatcttaggtgg

SEQ ID NO: 39072 - DNA, 20 bp, Artificial Sequence
  Synthetic oligonucleotide; AGG chr11 5309021 5309040 5309024 -
acagctttatcttaggtgga

SEQ ID NO: 39073 - DNA, 20 bp, Artificial Sequence
  Synthetic oligonucleotide; GGG chr11 5309020 5309039 5309023 -
cagctttatcttaggtggaa

SEQ ID NO: 39074 - DNA, 20 bp, Artificial Sequence
  Synthetic oligonucleotide; CAG chr11 5309013 5309032 5309016 -
atcttaggtggaagggactt

SEQ ID NO: 39075 - DNA, 20 bp, Artificial Sequence
  Synthetic oligonucleotide; AAG chr11 5309008 5309027 5309011 -
aggtggaagggacttcagct

SEQ ID NO: 39076 - DNA, 20 bp, Artificial Sequence
  Synthetic oligonucleotide; TGG chr11 5309004 5309023 5309007 -
ggaagggacttcagctaagt

SEQ ID NO: 39077 - DNA, 20 bp, Artificial Sequence
  Synthetic oligonucleotide; AAG chr11 5308999 5309018 5309002 -
ggacttcagctaagttggct

SEQ ID NO: 39078 - DNA, 20 bp, Artificial Sequence
  Synthetic oligonucleotide; AGG chr11 5308998 5309017 5309001 -
gacttcagctaagttggcta

SEQ ID NO: 39079 - DNA, 20 bp, Artificial Sequence
  Synthetic oligonucleotide; TAG chr11 5308974 5308993 5308977 -
ccttcaaattaaaactctgt

SEQ ID NO: 39080 - DNA, 20 bp, Artificial Sequence
  Synthetic oligonucleotide; TAG chr11 5308958 5308977 5308961 -
ctgttagtttttctcatgct

SEQ ID NO: 39081 - DNA, 20 bp, Artificial Sequence
  Synthetic oligonucleotide; GAG chr11 5308954 5308973 5308957 -
tagtttttctcatgcttagt

SEQ ID NO: 39082 - DNA, 20 bp, Artificial Sequence
  Synthetic oligonucleotide; AAG chr11 5308950 5308969 5308953 -
ttttctcatgcttagtgaga

SEQ ID NO: 39083 - DNA, 20 bp, Artificial Sequence
  Synthetic oligonucleotide; AAG chr11 5308921 5308940 5308924 -
actttctgctatgaaacttc

SEQ ID NO: 39084 - DNA, 20 bp, Artificial Sequence
  Synthetic oligonucleotide; TAG chr11 5308915 5308934 5308918 -
tgctatgaaacttcaagtta

SEQ ID NO: 39085 - DNA, 20 bp, Artificial Sequence
  Synthetic oligonucleotide; AAG chr11 5308884 5308903 5308887 -
ataacctgcaatttacgtcc

SEQ ID NO: 39086 - DNA, 20 bp, Artificial Sequence
  Synthetic oligonucleotide; AAG chr11 5308881 5308900 5308884 -
acctgcaatttacgtccaag

SEQ ID NO: 39087 - DNA, 20 bp, Artificial Sequence
  Synthetic oligonucleotide; AAG chr11 5308877 5308896 5308880 -
gcaatttacgtccaagaaga

SEQ ID NO: 39088 - DNA, 20 bp, Artificial Sequence
  Synthetic oligonucleotide; AGG chr11 5308876 5308895 5308879 -
caatttacgtccaagaagaa

SEQ ID NO: 39089 - DNA, 20 bp, Artificial Sequence
  Synthetic oligonucleotide; AAG chr11 5308873 5308892 5308876 -
tttacgtccaagaagaaagg

SEQ ID NO: 39090 - DNA, 20 bp, Artificial Sequence
  Synthetic oligonucleotide; CAG chr11 5308856 5308875 5308859 -
aggaagattcaatctatctt

SEQ ID NO: 39091 - DNA, 20 bp, Artificial Sequence
  Synthetic oligonucleotide; CAG chr11 5308846 5308865 5308849 -
aatctatcttcagtgatgac

SEQ ID NO: 39092 - DNA, 20 bp, Artificial Sequence
  Synthetic oligonucleotide; CGG chr11 5308833 5308852 5308836 -
tgatgaccagcatcactgaa

SEQ ID NO: 39093 - DNA, 20 bp, Artificial Sequence
  Synthetic oligonucleotide; TGG chr11 5308825 5308844 5308828 -
agcatcactgaacggttatc

SEQ ID NO: 39094 - DNA, 20 bp, Artificial Sequence
  Synthetic oligonucleotide; GGG chr11 5308824 5308843 5308827 -
gcatcactgaacggttatct

SEQ ID NO: 39095 - DNA, 20 bp, Artificial Sequence
  Synthetic oligonucleotide; TGG chr11 5308814 5308833 5308817 -
acggttatctgggcctgttg

SEQ ID NO: 39096 - DNA, 20 bp, Artificial Sequence
  Synthetic oligonucleotide; GAG chr11 5308777 5308796 5308780 -
aatatttgaatctctctgac

SEQ ID NO: 39097 - DNA, 20 bp, Artificial Sequence
  Synthetic oligonucleotide; AGG chr11 5308776 5308795 5308779 -
atatttgaatctctctgacg

SEQ ID NO: 39098 - DNA, 20 bp, Artificial Sequence
  Synthetic oligonucleotide; AAG chr11 5308770 5308789 5308773 -
gaatctctctgacgaggtat

SEQ ID NO: 39099 - DNA, 20 bp, Artificial Sequence
  Synthetic oligonucleotide; GAG chr11 5308768 5308787 5308771 -
atctctctgacgaggtataa

SEQ ID NO: 39100 - DNA, 20 bp, Artificial Sequence
  Synthetic oligonucleotide; GAG chr11 5308766 5308785 5308769 -
ctctctgacgaggtataaga

SEQ ID NO: 39101 - DNA, 20 bp, Artificial Sequence
  Synthetic oligonucleotide; AGG chr11 5308765 5308784 5308768 -
tctctgacgaggtataagag

SEQ ID NO: 39102 - DNA, 20 bp, Artificial Sequence
  Synthetic oligonucleotide; GGG chr11 5308764 5308783 5308767 -
ctctgacgaggtataagaga

SEQ ID NO: 39103 - DNA, 20 bp, Artificial Sequence
  Synthetic oligonucleotide; CAG chr11 5308742 5308761 5308745 -
gacactcacttttgaatatg

SEQ ID NO: 39104 - DNA, 20 bp, Artificial Sequence
  Synthetic oligonucleotide; AGG chr11 5308741 5308760 5308744 -
acactcacttttgaatatgc

SEQ ID NO: 39105 - DNA, 20 bp, Artificial Sequence
  Synthetic oligonucleotide; GGG chr11 5308740 5308759 5308743 -
cactcacttttgaatatgca

SEQ ID NO: 39106 - DNA, 20 bp, Artificial Sequence
  Synthetic oligonucleotide; TGG chr11 5308725 5308744 5308728 -
atgcagggctgtttccatga

SEQ ID NO: 39107 - DNA, 20 bp, Artificial Sequence
  Synthetic oligonucleotide; GAG chr11 5308723 5308742 5308726 -
gcagggctgtttccatgatg

SEQ ID NO: 39108 - DNA, 20 bp, Artificial Sequence
  Synthetic oligonucleotide; AGG chr11 5308722 5308741 5308725 -
cagggctgtttccatgatgg

SEQ ID NO: 39109 - DNA, 20 bp, Artificial Sequence
  Synthetic oligonucleotide; AAG chr11 5308718 5308737 5308721 -
gctgtttccatgatggagga

SEQ ID NO: 39110 - DNA, 20 bp, Artificial Sequence
  Synthetic oligonucleotide; GAG chr11 5308716 5308735 5308719 -
tgtttccatgatggaggaaa

SEQ ID NO: 39111 - DNA, 20 bp, Artificial Sequence
  Synthetic oligonucleotide; TGG chr11 5308711 5308730 5308714 -
ccatgatggaggaaagagat

SEQ ID NO: 39112 - DNA, 20 bp, Artificial Sequence
  Synthetic oligonucleotide; GAG chr11 5308709 5308728 5308712 -
atgatggaggaaagagattg

SEQ ID NO: 39113 - DNA, 20 bp, Artificial Sequence
  Synthetic oligonucleotide; AGG chr11 5308708 5308727 5308711 -
tgatggaggaaagagattgg

SEQ ID NO: 39114 - DNA, 20 bp, Artificial Sequence
  Synthetic oligonucleotide; TAG chr11 5308701 5308720 5308704 -
ggaaagagattggaggaatg

SEQ ID NO: 39115 - DNA, 20 bp, Artificial Sequence
  Synthetic oligonucleotide; TGG chr11 5308693 5308712 5308696 -
attggaggaatgtagattta

SEQ ID NO: 39116 - DNA, 20 bp, Artificial Sequence
  Synthetic oligonucleotide; GGG chr11 5308692 5308711 5308695 -
ttggaggaatgtagatttat

SEQ ID NO: 39117 - DNA, 20 bp, Artificial Sequence
  Synthetic oligonucleotide; AAG chr11 5308687 5308706 5308690 -
ggaatgtagatttatgggtg

SEQ ID NO: 39118 - DNA, 20 bp, Artificial Sequence
  Synthetic oligonucleotide; TGG chr11 5308679 5308698 5308682 -
gatttatgggtgaagttgtt

SEQ ID NO: 39119 - DNA, 20 bp, Artificial Sequence
  Synthetic oligonucleotide; TGG chr11 5308674 5308693 5308677 -
atgggtgaagttgtttggct

SEQ ID NO: 39120 - DNA, 20 bp, Artificial Sequence
  Synthetic oligonucleotide; AAG chr11 5308671 5308690 5308674 -
ggtgaagttgtttggcttgg

SEQ ID NO: 39121 - DNA, 20 bp, Artificial Sequence
  Synthetic oligonucleotide; TGG chr11 5308667 5308686 5308670 -
aagttgtttggcttggaagt

SEQ ID NO: 39122 - DNA, 20 bp, Artificial Sequence
  Synthetic oligonucleotide; TGG chr11 5308663 5308682 5308666 -
tgtttggcttggaagttgga

SEQ ID NO: 39123 - DNA, 20 bp, Artificial Sequence
  Synthetic oligonucleotide; CAG chr11 5308659 5308678 5308662 -
tggcttggaagttggatggt

SEQ ID NO: 39124 - DNA, 20 bp, Artificial Sequence
  Synthetic oligonucleotide; CAG chr11 5308653 5308672 5308656 -
ggaagttggatggtcagttc

SEQ ID NO: 39125 - DNA, 20 bp, Artificial Sequence
  Synthetic oligonucleotide; AGG chr11 5308652 5308671 5308655 -
gaagttggatggtcagttcc

SEQ ID NO: 39126 - DNA, 20 bp, Artificial Sequence
  Synthetic oligonucleotide; TGG chr11 5308640 5308659 5308643 -
tcagttccaggtgctaccat

SEQ ID NO: 39127 - DNA, 20 bp, Artificial Sequence
  Synthetic oligonucleotide; AAG chr11 5308632 5308651 5308635 -
aggtgctaccattggtgctg

SEQ ID NO: 39128 - DNA, 20 bp, Artificial Sequence
  Synthetic oligonucleotide; AGG chr11 5308631 5308650 5308634 -
ggtgctaccattggtgctga

SEQ ID NO: 39129 - DNA, 20 bp, Artificial Sequence
  Synthetic oligonucleotide; GAG chr11 5308629 5308648 5308632 -
tgctaccattggtgctgaag

SEQ ID NO: 39130 - DNA, 20 bp, Artificial Sequence
  Synthetic oligonucleotide; TGG chr11 5308607 5308626 5308610 -
gaacgtttccaaaatgtctt

SEQ ID NO: 39131 - DNA, 20 bp, Artificial Sequence
  Synthetic oligonucleotide; GGG chr11 5308606 5308625 5308609 -
aacgtttccaaaatgtcttt

SEQ ID NO: 39132 - DNA, 20 bp, Artificial Sequence
  Synthetic oligonucleotide; GGG chr11 5308605 5308624 5308608 -
acgtttccaaaatgtctttg

SEQ ID NO: 39133 - DNA, 20 bp, Artificial Sequence
  Synthetic oligonucleotide; TAG chr11 5308577 5308596 5308580 -
caatttcctatcgttttgtt

SEQ ID NO: 39134 - DNA, 20 bp, Artificial Sequence
  Synthetic oligonucleotide; CAG chr11 5308556 5308575 5308559 -
agttgacacaaaatcttact

SEQ ID NO: 39135 - DNA, 20 bp, Artificial Sequence
  Synthetic oligonucleotide; CAG chr11 5308553 5308572 5308556 -
tgacacaaaatcttactcag

SEQ ID NO: 39136 - DNA, 20 bp, Artificial Sequence
  Synthetic oligonucleotide; AGG chr11 5308552 5308571 5308555 -
gacacaaaatcttactcagc

SEQ ID NO: 39137 - DNA, 20 bp, Artificial Sequence
  Synthetic oligonucleotide; GGG chr11 5308551 5308570 5308554 -
acacaaaatcttactcagca

SEQ ID NO: 39138 - DNA, 20 bp, Artificial Sequence
  Synthetic oligonucleotide; GGG chr11 5308550 5308569 5308553 -
cacaaaatcttactcagcag

SEQ ID NO: 39139 - DNA, 20 bp, Artificial Sequence
  Synthetic oligonucleotide; AAG chr11 5308543 5308562 5308546 -
tcttactcagcaggggccca

SEQ ID NO: 39140 - DNA, 20 bp, Artificial Sequence
  Synthetic oligonucleotide; TGG chr11 5308534 5308553 5308537 -
gcaggggcccaaagtgcaat

SEQ ID NO: 39141 - DNA, 20 bp, Artificial Sequence
  Synthetic oligonucleotide; TAG chr11 5308502 5308521 5308505 -
tcaactcctctatacatatt

SEQ ID NO: 39142 - DNA, 20 bp, Artificial Sequence
  Synthetic oligonucleotide; CAG chr11 5308491 5308510 5308494 -
atacatatttagacacttcg

SEQ ID NO: 39143 - DNA, 20 bp, Artificial Sequence
  Synthetic oligonucleotide; AGG chr11 5308490 5308509 5308493 -
tacatatttagacacttcgc

SEQ ID NO: 39144 - DNA, 20 bp, Artificial Sequence
  Synthetic oligonucleotide; AAG chr11 5308483 5308502 5308486 -
ttagacacttcgcaggtatc

SEQ ID NO: 39145 - DNA, 20 bp, Artificial Sequence
  Synthetic oligonucleotide; CAG chr11 5308473 5308492 5308476 -
cgcaggtatcaagtcattac

SEQ ID NO: 39146 - DNA, 20 bp, Artificial Sequence
  Synthetic oligonucleotide; AGG chr11 5308472 5308491 5308475 -
gcaggtatcaagtcattacc

SEQ ID NO: 39147 - DNA, 20 bp, Artificial Sequence
  Synthetic oligonucleotide; GAG chr11 5308470 5308489 5308473 -
aggtatcaagtcattaccag

SEQ ID NO: 39148 - DNA, 20 bp, Artificial Sequence
  Synthetic oligonucleotide; CAG chr11 5308464 5308483 5308467 -
caagtcattaccaggagcac

SEQ ID NO: 39149 - DNA, 20 bp, Artificial Sequence
  Synthetic oligonucleotide; TAG chr11 5308459 5308478 5308462 -
cattaccaggagcaccagct

SEQ ID NO: 39150 - DNA, 20 bp, Artificial Sequence
  Synthetic oligonucleotide; TAG chr11 5308432 5308451 5308435 -
ttcatcttctacaacctcat

SEQ ID NO: 39151 - DNA, 20 bp, Artificial Sequence
  Synthetic oligonucleotide; CAG chr11 5308395 5308414 5308398 -
acttctttcaacgtaatctc

SEQ ID NO: 39152 - DNA, 20 bp, Artificial Sequence
  Synthetic oligonucleotide; AAG chr11 5308387 5308406 5308390 -
caacgtaatctccagaaaac

SEQ ID NO: 39153 - DNA, 20 bp, Artificial Sequence
  Synthetic oligonucleotide; CAG chr11 5308347 5308366 5308350 -
aaccttaaaatgtctccttt

SEQ ID NO: 39154 - DNA, 20 bp, Artificial Sequence
  Synthetic oligonucleotide; TAG chr11 5308327 5308346 5308330 -
cagccttgtccctgtactat

SEQ ID NO: 39155 - DNA, 20 bp, Artificial Sequence
  Synthetic oligonucleotide; TAG chr11 5308308 5308327 5308311 -
ttagtcctatttgccttgca

SEQ ID NO: 39156 - DNA, 20 bp, Artificial Sequence
  Synthetic oligonucleotide; GAG chr11 5308301 5308320 5308304 -
tatttgccttgcatagatgt

SEQ ID NO: 39157 - DNA, 20 bp, Artificial Sequence
  Synthetic oligonucleotide; TGG chr11 5308297 5308316 5308300 -
tgccttgcatagatgtgaga

SEQ ID NO: 39158 - DNA, 20 bp, Artificial Sequence
  Synthetic oligonucleotide; CAG chr11 5308290 5308309 5308293 -
catagatgtgagatggtaca

SEQ ID NO: 39159 - DNA, 20 bp, Artificial Sequence
  Synthetic oligonucleotide; TGG chr11 5308253 5308272 5308256 -
attttctttctcttcctata

SEQ ID NO: 39160 - DNA, 20 bp, Artificial Sequence
  Synthetic oligonucleotide; AAG chr11 5308237 5308256 5308240 -
tatatggtaacataactgat

SEQ ID NO: 39161 - DNA, 20 bp, Artificial Sequence
  Synthetic oligonucleotide; AAG chr11 5308229 5308248 5308232 -
aacataactgataagacaca

SEQ ID NO: 39162 - DNA, 20 bp, Artificial Sequence
  Synthetic oligonucleotide; AAG chr11 5308226 5308245 5308229 -
ataactgataagacacaaag

SEQ ID NO: 39163 - DNA, 20 bp, Artificial Sequence
  Synthetic oligonucleotide; AAG chr11 5308217 5308236 5308220 -
aagacacaaagaagataaaa

SEQ ID NO: 39164 - DNA, 20 bp, Artificial Sequence
  Synthetic oligonucleotide; TGG chr11 5308188 5308207 5308191 -
aatgtctgatatattattgt

SEQ ID NO: 39165 - DNA, 20 bp, Artificial Sequence
  Synthetic oligonucleotide; GGG chr11 5308187 5308206 5308190 -
atgtctgatatattattgtt

SEQ ID NO: 39166 - DNA, 20 bp, Artificial Sequence
  Synthetic oligonucleotide; GGG chr11 5308186 5308205 5308189 -
tgtctgatatattattgttg

SEQ ID NO: 39167 - DNA, 20 bp, Artificial Sequence
  Synthetic oligonucleotide; CAG chr11 5308181 5308200 5308184 -
gatatattattgttggggta

SEQ ID NO: 39168 - DNA, 20 bp, Artificial Sequence
  Synthetic oligonucleotide; GAG chr11 5308169 5308188 5308172 -
ttggggtacagttctttatt

SEQ ID NO: 39169 - DNA, 20 bp, Artificial Sequence
  Synthetic oligonucleotide; AAG chr11 5308163 5308182 5308166 -
tacagttctttattgagaat

SEQ ID NO: 39170 - DNA, 20 bp, Artificial Sequence
  Synthetic oligonucleotide; GAG chr11 5308161 5308180 5308164 -
cagttctttattgagaataa

SEQ ID NO: 39171 - DNA, 20 bp, Artificial Sequence
  Synthetic oligonucleotide; TGG chr11 5308143 5308162 5308146 -
aagagtttcttttcatgtat

SEQ ID NO: 39172 - DNA, 20 bp, Artificial Sequence
  Synthetic oligonucleotide; TAG chr11 5308138 5308157 5308141 -
tttcttttcatgtattggtc

SEQ ID NO: 39173 - DNA, 20 bp, Artificial Sequence
  Synthetic oligonucleotide; TAG chr11 5308130 5308149 5308133 -
catgtattggtctagctatt

SEQ ID NO: 39174 - DNA, 20 bp, Artificial Sequence
  Synthetic oligonucleotide; TAG chr11 5308127 5308146 5308130 -
gtattggtctagctatttag

SEQ ID NO: 39175 - DNA, 20 bp, Artificial Sequence
  Synthetic oligonucleotide; TAG chr11 5308122 5308141 5308125 -
ggtctagctatttagtagta

SEQ ID NO: 39176 - DNA, 20 bp, Artificial Sequence
  Synthetic oligonucleotide; TAG chr11 5308118 5308137 5308121 -
tagctatttagtagtataga

SEQ ID NO: 39177 - DNA, 20 bp, Artificial Sequence
  Synthetic oligonucleotide; CAG chr11 5308111 5308130 5308114 -
ttagtagtatagatagatca

SEQ ID NO: 39178 - DNA, 20 bp, Artificial Sequence
  Synthetic oligonucleotide; AGG chr11 5308110 5308129 5308113 -
tagtagtatagatagatcac

SEQ ID NO: 39179 - DNA, 20 bp, Artificial Sequence
  Synthetic oligonucleotide; TAG chr11 5308101 5308120 5308104 -
agatagatcacaggaaattg

SEQ ID NO: 39180 - DNA, 20 bp, Artificial Sequence
  Synthetic oligonucleotide; TGG chr11 5308095 5308114 5308098 -
atcacaggaaattgtagact

SEQ ID NO: 39181 - DNA, 20 bp, Artificial Sequence
  Synthetic oligonucleotide; TAG chr11 5308086 5308105 5308089 -
aattgtagacttggtgtatt

SEQ ID NO: 39182 - DNA, 20 bp, Artificial Sequence
  Synthetic oligonucleotide; AAG chr11 5308062 5308081 5308065 -
catcaacaaaaacattttca

SEQ ID NO: 39183 - DNA, 20 bp, Artificial Sequence
  Synthetic oligonucleotide; TAG chr11 5308059 5308078 5308062 -
caacaaaaacattttcaaag

SEQ ID NO: 39184 - DNA, 20 bp, Artificial Sequence
  Synthetic oligonucleotide; TGG chr11 5308047 5308066 5308050 -
tttcaaagtagtcttttcat

SEQ ID NO: 39185 - DNA, 20 bp, Artificial Sequence
  Synthetic oligonucleotide; TGG chr11 5308042 5308061 5308045 -
aagtagtcttttcattggaa

SEQ ID NO: 39186 - DNA, 20 bp, Artificial Sequence
  Synthetic oligonucleotide; GGG chr11 5308041 5308060 5308044 -
agtagtcttttcattggaat

SEQ ID NO: 39187 - DNA, 20 bp, Artificial Sequence
  Synthetic oligonucleotide; GAG chr11 5308039 5308058 5308042 -
tagtcttttcattggaatgg

SEQ ID NO: 39188 - DNA, 20 bp, Artificial Sequence
  Synthetic oligonucleotide; AAG chr11 5308031 5308050 5308034 -
tcattggaatgggagaatat

SEQ ID NO: 39189 - DNA, 20 bp, Artificial Sequence
  Synthetic oligonucleotide; AAG chr11 5308022 5308041 5308025 -
tgggagaatataagttccat

SEQ ID NO: 39190 - DNA, 20 bp, Artificial Sequence
  Synthetic oligonucleotide; TGG chr11 5308019 5308038 5308022 -
gagaatataagttccataag

SEQ ID NO: 39191 - DNA, 20 bp, Artificial Sequence
  Synthetic oligonucleotide; GAG chr11 5307999 5308018 5308002 -
tggttaaaacatcttacctt

SEQ ID NO: 39192 - DNA, 20 bp, Artificial Sequence
  Synthetic oligonucleotide; CAG chr11 5307987 5308006 5307990 -
cttaccttgagactcacttg

SEQ ID NO: 39193 - DNA, 20 bp, Artificial Sequence
  Synthetic oligonucleotide; AAG chr11 5307981 5308000 5307984 -
ttgagactcacttgcagcca

SEQ ID NO: 39194 - DNA, 20 bp, Artificial Sequence
  Synthetic oligonucleotide; AAG chr11 5307974 5307993 5307977 -
tcacttgcagccaaagtact

SEQ ID NO: 39195 - DNA, 20 bp, Artificial Sequence
  Synthetic oligonucleotide; AAG chr11 5307971 5307990 5307974 -
cttgcagccaaagtactaag

SEQ ID NO: 39196 - DNA, 20 bp, Artificial Sequence
  Synthetic oligonucleotide; AGG chr11 5307970 5307989 5307973 -
ttgcagccaaagtactaaga

SEQ ID NO: 39197 - DNA, 20 bp, Artificial Sequence
  Synthetic oligonucleotide; TGG chr11 5307938 5307957 5307941 -
cataaatgtctcttctcatg

SEQ ID NO: 39198 - DNA, 20 bp, Artificial Sequence
  Synthetic oligonucleotide; CAG chr11 5307932 5307951 5307935 -
tgtctcttctcatgtggtca

SEQ ID NO: 39199 - DNA, 20 bp, Artificial Sequence
  Synthetic oligonucleotide; TGG chr11 5307924 5307943 5307927 -
ctcatgtggtcacagctatt

SEQ ID NO: 39200 - DNA, 20 bp, Artificial Sequence
  Synthetic oligonucleotide; GGG chr11 5307923 5307942 5307926 -
tcatgtggtcacagctattt

SEQ ID NO: 39201 - DNA, 20 bp, Artificial Sequence
  Synthetic oligonucleotide; GAG chr11 5307921 5307940 5307924 -
atgtggtcacagctatttgg

SEQ ID NO: 39202 - DNA, 20 bp, Artificial Sequence
  Synthetic oligonucleotide; AGG chr11 5307920 5307939 5307923 -
tgtggtcacagctatttggg

SEQ ID NO: 39203 - DNA, 20 bp, Artificial Sequence
  Synthetic oligonucleotide; GAG chr11 5307915 5307934 5307918 -
tcacagctatttgggaggct

SEQ ID NO: 39204 - DNA, 20 bp, Artificial Sequence
  Synthetic oligonucleotide; AGG chr11 5307914 5307933 5307917 -
cacagctatttgggaggctg

SEQ ID NO: 39205 - DNA, 20 bp, Artificial Sequence
  Synthetic oligonucleotide; AAG chr11 5307897 5307916 5307900 -
ctgaggtgtaaaaatcactt

SEQ ID NO: 39206 - DNA, 20 bp, Artificial Sequence
  Synthetic oligonucleotide; AAG chr11 5307889 5307908 5307892 -
taaaaatcacttaagcctaa

SEQ ID NO: 39207 - DNA, 20 bp, Artificial Sequence
  Synthetic oligonucleotide; GAG chr11 5307883 5307902 5307886 -
tcacttaagcctaaaagctt

SEQ ID NO: 39208 - DNA, 20 bp, Artificial Sequence
  Synthetic oligonucleotide; AGG chr11 5307882 5307901 5307885 -
cacttaagcctaaaagcttg

SEQ ID NO: 39209 - DNA, 20 bp, Artificial Sequence
  Synthetic oligonucleotide; CAG chr11 5307876 5307895 5307879 -
agcctaaaagcttgaggctg

SEQ ID NO: 39210 - DNA, 20 bp, Artificial Sequence
  Synthetic oligonucleotide; TGG chr11 5307842 5307861 5307845 -
ctcaccactgcactccctcc

SEQ ID NO: 39211 - DNA, 20 bp, Artificial Sequence
  Synthetic oligonucleotide; GGG chr11 5307841 5307860 5307844 -
tcaccactgcactccctcct

SEQ ID NO: 39212 - DNA, 20 bp, Artificial Sequence
  Synthetic oligonucleotide; CAG chr11 5307835 5307854 5307838 -
ctgcactccctcctgggtga

SEQ ID NO: 39213 - DNA, 20 bp, Artificial Sequence
  Synthetic oligonucleotide; GAG chr11 5307833 5307852 5307836 -
gcactccctcctgggtgaca

SEQ ID NO: 39214 - DNA, 20 bp, Artificial Sequence
  Synthetic oligonucleotide; AAG chr11 5307829 5307848 5307832 -
tccctcctgggtgacagagc

SEQ ID NO: 39215 - DNA, 20 bp, Artificial Sequence
  Synthetic oligonucleotide; AAG chr11 5307814 5307833 5307817 -
agagcaagacactgtctcaa

SEQ ID NO: 39216 - DNA, 20 bp, Artificial Sequence
  Synthetic oligonucleotide; GAG chr11 5307812 5307831 5307815 -
agcaagacactgtctcaaaa

SEQ ID NO: 39217 - DNA, 20 bp, Artificial Sequence
  Synthetic oligonucleotide; GAG chr11 5307810 5307829 5307813 -
caagacactgtctcaaaaga

SEQ ID NO: 39218 - DNA, 20 bp, Artificial Sequence
  Synthetic oligonucleotide; AGG chr11 5307809 5307828 5307812 -
aagacactgtctcaaaagag

SEQ ID NO: 39219 - DNA, 20 bp, Artificial Sequence
  Synthetic oligonucleotide; AAG chr11 5307805 5307824 5307808 -
cactgtctcaaaagagagga

SEQ ID NO: 39220 - DNA, 20 bp, Artificial Sequence
  Synthetic oligonucleotide; AAG chr11 5307800 5307819 5307803 -
tctcaaaagagaggaaagaa

SEQ ID NO: 39221 - DNA, 20 bp, Artificial Sequence
  Synthetic oligonucleotide; AAG chr11 5307795 5307814 5307798 -
aaagagaggaaagaaaagaa

SEQ ID NO: 39222 - DNA, 20 bp, Artificial Sequence
  Synthetic oligonucleotide; GAG chr11 5307793 5307812 5307796 -
agagaggaaagaaaagaaaa

SEQ ID NO: 39223 - DNA, 20 bp, Artificial Sequence
  Synthetic oligonucleotide; AAG chr11 5307785 5307804 5307788 -
aagaaaagaaaagagaataa

SEQ ID NO: 39224 - DNA, 20 bp, Artificial Sequence
  Synthetic oligonucleotide; AGG chr11 5307784 5307803 5307787 -
agaaaagaaaagagaataaa

SEQ ID NO: 39225 - DNA, 20 bp, Artificial Sequence
  Synthetic oligonucleotide; AAG chr11 5307780 5307799 5307783 -
aagaaaagagaataaaagga

SEQ ID NO: 39226 - DNA, 20 bp, Artificial Sequence
  Synthetic oligonucleotide; AGG chr11 5307779 5307798 5307782 -
agaaaagagaataaaaggaa

SEQ ID NO: 39227 - DNA, 20 bp, Artificial Sequence
  Synthetic oligonucleotide; AAG chr11 5307775 5307794 5307778 -
aagagaataaaaggaaagga

SEQ ID NO: 39228 - DNA, 20 bp, Artificial Sequence
  Synthetic oligonucleotide; AGG chr11 5307774 5307793 5307777 -
agagaataaaaggaaaggaa

SEQ ID NO: 39229 - DNA, 20 bp, Artificial Sequence
  Synthetic oligonucleotide; AAG chr11 5307770 5307789 5307773 -
aataaaaggaaaggaaagga

SEQ ID NO: 39230 - DNA, 20 bp, Artificial Sequence
  Synthetic oligonucleotide; AGG chr11 5307769 5307788 5307772 -
ataaaaggaaaggaaaggaa

SEQ ID NO: 39231 - DNA, 20 bp, Artificial Sequence
  Synthetic oligonucleotide; GGG chr11 5307768 5307787 5307771 -
taaaaggaaaggaaaggaaa

SEQ ID NO: 39232 - DNA, 20 bp, Artificial Sequence
  Synthetic oligonucleotide; GAG chr11 5307766 5307785 5307769 -
aaaggaaaggaaaggaaagg

SEQ ID NO: 39233 - DNA, 20 bp, Artificial Sequence
  Synthetic oligonucleotide; AAG chr11 5307762 5307781 5307765 -
gaaaggaaaggaaagggaga

SEQ ID NO: 39234 - DNA, 20 bp, Artificial Sequence
  Synthetic oligonucleotide; AAG chr11 5307758 5307777 5307761 -
ggaaaggaaagggagaaaga

SEQ ID NO: 39235 - DNA, 20 bp, Artificial Sequence
  Synthetic oligonucleotide; AGG chr11 5307757 5307776 5307760 -
gaaaggaaagggagaaagaa

SEQ ID NO: 39236 - DNA, 20 bp, Artificial Sequence
  Synthetic oligonucleotide; AAG chr11 5307754 5307773 5307757 -
aggaaagggagaaagaaagg

SEQ ID NO: 39237 - DNA, 20 bp, Artificial Sequence
  Synthetic oligonucleotide; AGG chr11 5307753 5307772 5307756 -
ggaaagggagaaagaaagga

SEQ ID NO: 39238 - DNA, 20 bp, Artificial Sequence
  Synthetic oligonucleotide; AAG chr11 5307750 5307769 5307753 -
aagggagaaagaaaggaagg

SEQ ID NO: 39239 - DNA, 20 bp, Artificial Sequence
  Synthetic oligonucleotide; AGG chr11 5307749 5307768 5307752 -
agggagaaagaaaggaagga

SEQ ID NO: 39240 - DNA, 20 bp, Artificial Sequence
  Synthetic oligonucleotide; AAG chr11 5307746 5307765 5307749 -
gagaaagaaaggaaggaagg

SEQ ID NO: 39241 - DNA, 20 bp, Artificial Sequence
  Synthetic oligonucleotide; AAG chr11 5307740 5307759 5307743 -
gaaaggaaggaaggaagaaa

SEQ ID NO: 39242 - DNA, 20 bp, Artificial Sequence
  Synthetic oligonucleotide; GAG chr11 5307738 5307757 5307741 -
aaggaaggaaggaagaaaaa

SEQ ID NO: 39243 - DNA, 20 bp, Artificial Sequence
  Synthetic oligonucleotide; GAG chr11 5307736 5307755 5307739 -
ggaaggaaggaagaaaaaga

SEQ ID NO: 39244 - DNA, 20 bp, Artificial Sequence
  Synthetic oligonucleotide; GAG chr11 5307734 5307753 5307737 -
aaggaaggaagaaaaagaga

SEQ ID NO: 39245 - DNA, 20 bp, Artificial Sequence
  Synthetic oligonucleotide; GAG chr11 5307732 5307751 5307735 -
ggaaggaagaaaaagagaga

SEQ ID NO: 39246 - DNA, 20 bp, Artificial Sequence
  Synthetic oligonucleotide; AAG chr11 5307725 5307744 5307728 -
agaaaaagagagagagaaat

SEQ ID NO: 39247 - DNA, 20 bp, Artificial Sequence
  Synthetic oligonucleotide; AGG chr11 5307724 5307743 5307727 -
gaaaaagagagagagaaata

SEQ ID NO: 39248 - DNA, 20 bp, Artificial Sequence
  Synthetic oligonucleotide; AAG chr11 5307720 5307739 5307723 -
aagagagagagaaataagga

SEQ ID NO: 39249 - DNA, 20 bp, Artificial Sequence
  Synthetic oligonucleotide; AAG chr11 5307716 5307735 5307719 -
gagagagaaataaggaaaga

SEQ ID NO: 39250 - DNA, 20 bp, Artificial Sequence
  Synthetic oligonucleotide; AAG chr11 5307709 5307728 5307712 -
aaataaggaaagaaagaaaa

SEQ ID NO: 39251 - DNA, 20 bp, Artificial Sequence
  Synthetic oligonucleotide; AAG chr11 5307705 5307724 5307708 -
aaggaaagaaagaaaaaaga

SEQ ID NO: 39252 - DNA, 20 bp, Artificial Sequence
  Synthetic oligonucleotide; AGG chr11 5307704 5307723 5307707 -
aggaaagaaagaaaaaagaa

SEQ ID NO: 39253 - DNA, 20 bp, Artificial Sequence
  Synthetic oligonucleotide; AAG chr11 5307701 5307720 5307704 -
aaagaaagaaaaaagaaagg

SEQ ID NO: 39254 - DNA, 20 bp, Artificial Sequence
  Synthetic oligonucleotide; AGG chr11 5307700 5307719 5307703 -
aagaaagaaaaaagaaagga

SEQ ID NO: 39255 - DNA, 20 bp, Artificial Sequence
  Synthetic oligonucleotide; GAG chr11 5307694 5307713 5307697 -
gaaaaaagaaaggaaggaat

SEQ ID NO: 39256 - DNA, 20 bp, Artificial Sequence
  Synthetic oligonucleotide; AGG chr11 5307693 5307712 5307696 -
aaaaaagaaaggaaggaatg

SEQ ID NO: 39257 - DNA, 20 bp, Artificial Sequence
  Synthetic oligonucleotide; GGG chr11 5307692 5307711 5307695 -
aaaaagaaaggaaggaatga

SEQ ID NO: 39258 - DNA, 20 bp, Artificial Sequence
  Synthetic oligonucleotide; AAG chr11 5307689 5307708 5307692 -
aagaaaggaaggaatgaggg

SEQ ID NO: 39259 - DNA, 20 bp, Artificial Sequence
  Synthetic oligonucleotide; AGG chr11 5307688 5307707 5307691 -
agaaaggaaggaatgaggga

SEQ ID NO: 39260 - DNA, 20 bp, Artificial Sequence
  Synthetic oligonucleotide; GAG chr11 5307686 5307705 5307689 -
aaaggaaggaatgagggaag

SEQ ID NO: 39261 - DNA, 20 bp, Artificial Sequence
  Synthetic oligonucleotide; AGG chr11 5307685 5307704 5307688 -
aaggaaggaatgagggaagg

SEQ ID NO: 39262 - DNA, 20 bp, Artificial Sequence
  Synthetic oligonucleotide; GGG chr11 5307684 5307703 5307687 -
aggaaggaatgagggaagga

SEQ ID NO: 39263 - DNA, 20 bp, Artificial Sequence
  Synthetic oligonucleotide; AAG chr11 5307681 5307700 5307684 -
aaggaatgagggaaggaggg

SEQ ID NO: 39264 - DNA, 20 bp, Artificial Sequence
  Synthetic oligonucleotide; AGG chr11 5307680 5307699 5307683 -
aggaatgagggaaggaggga

SEQ ID NO: 39265 - DNA, 20 bp, Artificial Sequence
  Synthetic oligonucleotide; GAG chr11 5307678 5307697 5307681 -
gaatgagggaaggagggaag

SEQ ID NO: 39266 - DNA, 20 bp, Artificial Sequence
  Synthetic oligonucleotide; AGG chr11 5307677 5307696 5307680 -
aatgagggaaggagggaagg

SEQ ID NO: 39267 - DNA, 20 bp, Artificial Sequence
  Synthetic oligonucleotide; GGG chr11 5307676 5307695 5307679 -
atgagggaaggagggaagga

SEQ ID NO: 39268 - DNA, 20 bp, Artificial Sequence
  Synthetic oligonucleotide; AAG chr11 5307673 5307692 5307676 -
agggaaggagggaaggaggg

SEQ ID NO: 39269 - DNA, 20 bp, Artificial Sequence
  Synthetic oligonucleotide; AGG chr11 5307672 5307691 5307675 -
gggaaggagggaaggaggga

SEQ ID NO: 39270 - DNA, 20 bp, Artificial Sequence
  Synthetic oligonucleotide; GGG chr11 5307671 5307690 5307674 -
ggaaggagggaaggagggaa

SEQ ID NO: 39271 - DNA, 20 bp, Artificial Sequence
  Synthetic oligonucleotide; GGG chr11 5307670 5307689 5307673 -
gaaggagggaaggagggaag

SEQ ID NO: 39272 - DNA, 20 bp, Artificial Sequence
  Synthetic oligonucleotide; GGG chr11 5307669 5307688 5307672 -
aaggagggaaggagggaagg

SEQ ID NO: 39273 - DNA, 20 bp, Artificial Sequence
  Synthetic oligonucleotide; AAG chr11 5307666 5307685 5307669 -
gagggaaggagggaaggggg

SEQ ID NO: 39274 - DNA, 20 bp, Artificial Sequence
  Synthetic oligonucleotide; AGG chr11 5307665 5307684 5307668 -
agggaaggagggaaggggga

SEQ ID NO: 39275 - DNA, 20 bp, Artificial Sequence
  Synthetic oligonucleotide; GGG chr11 5307664 5307683 5307667 -
gggaaggagggaagggggaa

SEQ ID NO: 39276 - DNA, 20 bp, Artificial Sequence
  Synthetic oligonucleotide; GGG chr11 5307663 5307682 5307666 -
ggaaggagggaagggggaag

SEQ ID NO: 39277 - DNA, 20 bp, Artificial Sequence
  Synthetic oligonucleotide; GGG chr11 5307662 5307681 5307665 -
gaaggagggaagggggaagg

SEQ ID NO: 39278 - DNA, 20 bp, Artificial Sequence
  Synthetic oligonucleotide; AAG chr11 5307659 5307678 5307662 -
ggagggaagggggaaggggg

SEQ ID NO: 39279 - DNA, 20 bp, Artificial Sequence
  Synthetic oligonucleotide; AGG chr11 5307658 5307677 5307661 -
gagggaagggggaaggggga

SEQ ID NO: 39280 - DNA, 20 bp, Artificial Sequence
  Synthetic oligonucleotide; GGG chr11 5307657 5307676 5307660 -
agggaagggggaagggggaa

SEQ ID NO: 39281 - DNA, 20 bp, Artificial Sequence
  Synthetic oligonucleotide; GGG chr11 5307656 5307675 5307659 -
gggaagggggaagggggaag

SEQ ID NO: 39282 - DNA, 20 bp, Artificial Sequence
  Synthetic oligonucleotide; GGG chr11 5307655 5307674 5307658 -
ggaagggggaagggggaagg

SEQ ID NO: 39283 - DNA, 20 bp, Artificial Sequence
  Synthetic oligonucleotide; GAG chr11 5307653 5307672 5307656 -
aagggggaagggggaagggg

SEQ ID NO: 39284 - DNA, 20 bp, Artificial Sequence
  Synthetic oligonucleotide; AGG chr11 5307652 5307671 5307655 -
agggggaagggggaaggggg

SEQ ID NO: 39285 - DNA, 20 bp, Artificial Sequence
  Synthetic oligonucleotide; GGG chr11 5307651 5307670 5307654 -
gggggaagggggaaggggga

SEQ ID NO: 39286 - DNA, 20 bp, Artificial Sequence
  Synthetic oligonucleotide; GAG chr11 5307649 5307668 5307652 -
gggaagggggaagggggagg

SEQ ID NO: 39287 - DNA, 20 bp, Artificial Sequence
  Synthetic oligonucleotide; AGG chr11 5307648 5307667 5307651 -
ggaagggggaagggggaggg

SEQ ID NO: 39288 - DNA, 20 bp, Artificial Sequence
  Synthetic oligonucleotide; GGG chr11 5307647 5307666 5307650 -
gaagggggaagggggaggga

SEQ ID NO: 39289 - DNA, 20 bp, Artificial Sequence
  Synthetic oligonucleotide; GAG chr11 5307645 5307664 5307648 -
agggggaagggggagggagg

SEQ ID NO: 39290 - DNA, 20 bp, Artificial Sequence
  Synthetic oligonucleotide; AGG chr11 5307644 5307663 5307647 -
gggggaagggggagggaggg

SEQ ID NO: 39291 - DNA, 20 bp, Artificial Sequence
  Synthetic oligonucleotide; GGG chr11 5307643 5307662 5307646 -
ggggaagggggagggaggga

SEQ ID NO: 39292 - DNA, 20 bp, Artificial Sequence
  Synthetic oligonucleotide; GAG chr11 5307641 5307660 5307644 -
ggaagggggagggagggagg

SEQ ID NO: 39293 - DNA, 20 bp, Artificial Sequence
  Synthetic oligonucleotide; AGG chr11 5307640 5307659 5307643 -
gaagggggagggagggaggg

SEQ ID NO: 39294 - DNA, 20 bp, Artificial Sequence
  Synthetic oligonucleotide; AAG chr11 5307637 5307656 5307640 -
gggggagggagggagggagg

SEQ ID NO: 39295 - DNA, 20 bp, Artificial Sequence
  Synthetic oligonucleotide; AGG chr11 5307636 5307655 5307639 -
ggggagggagggagggagga

SEQ ID NO: 39296 - DNA, 20 bp, Artificial Sequence
  Synthetic oligonucleotide; AAG chr11 5307633 5307652 5307636 -
gagggagggagggaggaagg

SEQ ID NO: 39297 - DNA, 20 bp, Artificial Sequence
  Synthetic oligonucleotide; AGG chr11 5307632 5307651 5307635 -
agggagggagggaggaagga

SEQ ID NO: 39298 - DNA, 20 bp, Artificial Sequence
  Synthetic oligonucleotide; TGG chr11 5307595 5307614 5307598 -
ctttcttcttgatgttgtta

SEQ ID NO: 39299 - DNA, 20 bp, Artificial Sequence
  Synthetic oligonucleotide; TAG chr11 5307560 5307579 5307563 -
accatgattgatgtaaaaat

SEQ ID NO: 39300 - DNA, 20 bp, Artificial Sequence
  Synthetic oligonucleotide; GAG chr11 5307558 5307577 5307561 -
catgattgatgtaaaaatta

SEQ ID NO: 39301 - DNA, 20 bp, Artificial Sequence
  Synthetic oligonucleotide; AAG chr11 5307549 5307568 5307552 -
tgtaaaaattagagacatcg

SEQ ID NO: 39302 - DNA, 20 bp, Artificial Sequence
  Synthetic oligonucleotide; AAG chr11 5307534 5307553 5307537 -
catcgaagtactaaacaata

SEQ ID NO: 39303 - DNA, 20 bp, Artificial Sequence
  Synthetic oligonucleotide; AAG chr11 5307529 5307548 5307532 -
aagtactaaacaataaagaa

SEQ ID NO: 39304 - DNA, 20 bp, Artificial Sequence
  Synthetic oligonucleotide; AGG chr11 5307528 5307547 5307531 -
agtactaaacaataaagaaa

SEQ ID NO: 39305 - DNA, 20 bp, Artificial Sequence
  Synthetic oligonucleotide; GAG chr11 5307526 5307545 5307529 -
tactaaacaataaagaaaag

SEQ ID NO: 39306 - DNA, 20 bp, Artificial Sequence
  Synthetic oligonucleotide; TAG chr11 5307522 5307541 5307525 -
aaacaataaagaaaaggaga

SEQ ID NO: 39307 - DNA, 20 bp, Artificial Sequence
  Synthetic oligonucleotide; TGG chr11 5307512 5307531 5307515 -
gaaaaggagatagcattgtt

SEQ ID NO: 39308 - DNA, 20 bp, Artificial Sequence
  Synthetic oligonucleotide; TAG chr11 5307498 5307517 5307501 -
attgtttggcatgcttgaac

SEQ ID NO: 39309 - DNA, 20 bp, Artificial Sequence
  Synthetic oligonucleotide; CAG chr11 5307480 5307499 5307483 -
actagtaatcttattacaaa

SEQ ID NO: 39310 - DNA, 20 bp, Artificial Sequence
  Synthetic oligonucleotide; TAG chr11 5307474 5307493 5307477 -
aatcttattacaaacagatg

SEQ ID NO: 39311 - DNA, 20 bp, Artificial Sequence
  Synthetic oligonucleotide; GAG chr11 5307472 5307491 5307475 -
tcttattacaaacagatgta

SEQ ID NO: 39312 - DNA, 20 bp, Artificial Sequence
  Synthetic oligonucleotide; AGG chr11 5307471 5307490 5307474 -
cttattacaaacagatgtag

SEQ ID NO: 39313 - DNA, 20 bp, Artificial Sequence
  Synthetic oligonucleotide; AAG chr11 5307463 5307482 5307466 -
aaacagatgtagaggttgta

SEQ ID NO: 39314 - DNA, 20 bp, Artificial Sequence
  Synthetic oligonucleotide; AGG chr11 5307462 5307481 5307465 -
aacagatgtagaggttgtaa

SEQ ID NO: 39315 - DNA, 20 bp, Artificial Sequence
  Synthetic oligonucleotide; TGG chr11 5307450 5307469 5307453 -
ggttgtaaaggtctacaatt

SEQ ID NO: 39316 - DNA, 20 bp, Artificial Sequence
  Synthetic oligonucleotide; TGG chr11 5307435 5307454 5307438 -
caatttggctacaaaaccaa

SEQ ID NO: 39317 - DNA, 20 bp, Artificial Sequence
  Synthetic oligonucleotide; AAG chr11 5307423 5307442 5307426 -
aaaaccaatggcttgatcac

SEQ ID NO: 39318 - DNA, 20 bp, Artificial Sequence
  Synthetic oligonucleotide; TAG chr11 5307418 5307437 5307421 -
caatggcttgatcacaagaa

SEQ ID NO: 39319 - DNA, 20 bp, Artificial Sequence
  Synthetic oligonucleotide; TAG chr11 5307399 5307418 5307402 -
atagcattcatttgcttaac

SEQ ID NO: 39320 - DNA, 20 bp, Artificial Sequence
  Synthetic oligonucleotide; GAG chr11 5307388 5307407 5307391 -
ttgcttaactagtacttact

SEQ ID NO: 39321 - DNA, 20 bp, Artificial Sequence
  Synthetic oligonucleotide; AAG chr11 5307370 5307389 5307373 -
ctgagcacccactatatgtt

SEQ ID NO: 39322 - DNA, 20 bp, Artificial Sequence
  Synthetic oligonucleotide; AAG chr11 5307358 5307377 5307361 -
tatatgttaagctccatttt

SEQ ID NO: 39323 - DNA, 20 bp, Artificial Sequence
  Synthetic oligonucleotide; CAG chr11 5307325 5307344 5307328 -
gtcactcacttaaaatcttt

SEQ ID NO: 39324 - DNA, 20 bp, Artificial Sequence
  Synthetic oligonucleotide; AAG chr11 5307322 5307341 5307325 -
actcacttaaaatctttcag

SEQ ID NO: 39325 - DNA, 20 bp, Artificial Sequence
  Synthetic oligonucleotide; GAG chr11 5307305 5307324 5307308 -
cagaagttttgttttactgt

SEQ ID NO: 39326 - DNA, 20 bp, Artificial Sequence
  Synthetic oligonucleotide; AAG chr11 5307298 5307317 5307301 -
tttgttttactgtgagtaca

SEQ ID NO: 39327 - DNA, 20 bp, Artificial Sequence
  Synthetic oligonucleotide; GAG chr11 5307296 5307315 5307299 -
tgttttactgtgagtacaaa

SEQ ID NO: 39328 - DNA, 20 bp, Artificial Sequence
  Synthetic oligonucleotide; TGG chr11 5307277 5307296 5307280 -
agagaactgactttatgata

SEQ ID NO: 39329 - DNA, 20 bp, Artificial Sequence
  Synthetic oligonucleotide; AAG chr11 5307265 5307284 5307268 -
ttatgatatggttatttacc

SEQ ID NO: 39330 - DNA, 20 bp, Artificial Sequence
  Synthetic oligonucleotide; TAG chr11 5307251 5307270 5307254 -
tttaccaagccgtcacttct

SEQ ID NO: 39331 - DNA, 20 bp, Artificial Sequence
  Synthetic oligonucleotide; AAG chr11 5307244 5307263 5307247 -
agccgtcacttcttagctac

SEQ ID NO: 39332 - DNA, 20 bp, Artificial Sequence
  Synthetic oligonucleotide; TAG chr11 5307239 5307258 5307242 -
tcacttcttagctacaagtc

SEQ ID NO: 39333 - DNA, 20 bp, Artificial Sequence
  Synthetic oligonucleotide; CAG chr11 5307230 5307249 5307233 -
agctacaagtctagaatcaa

SEQ ID NO: 39334 - DNA, 20 bp, Artificial Sequence
  Synthetic oligonucleotide; AGG chr11 5307229 5307248 5307232 -
gctacaagtctagaatcaac

SEQ ID NO: 39335 - DNA, 20 bp, Artificial Sequence
  Synthetic oligonucleotide; TGG chr11 5307209 5307228 5307212 -
aggttctgcaaaatgaattc

SEQ ID NO: 39336 - DNA, 20 bp, Artificial Sequence
  Synthetic oligonucleotide; TGG chr11 5307170 5307189 5307173 -
tatgacctaaaatcacgttt

SEQ ID NO: 39337 - DNA, 20 bp, Artificial Sequence
  Synthetic oligonucleotide; GAG chr11 5307146 5307165 5307149 -
aaaatcttacctgaatatat

SEQ ID NO: 39338 - DNA, 20 bp, Artificial Sequence
  Synthetic oligonucleotide; GAG chr11 5307144 5307163 5307147 -
aatcttacctgaatatatga

SEQ ID NO: 39339 - DNA, 20 bp, Artificial Sequence
  Synthetic oligonucleotide; AGG chr11 5307143 5307162 5307146 -
atcttacctgaatatatgag

SEQ ID NO: 39340 - DNA, 20 bp, Artificial Sequence
  Synthetic oligonucleotide; TAG chr11 5307135 5307154 5307138 -
tgaatatatgagaggatatt

SEQ ID NO: 39341 - DNA, 20 bp, Artificial Sequence
  Synthetic oligonucleotide; AGG chr11 5307134 5307153 5307137 -
gaatatatgagaggatattt

SEQ ID NO: 39342 - DNA, 20 bp, Artificial Sequence
  Synthetic oligonucleotide; AAG chr11 5307119 5307138 5307122 -
tatttaggtttttttcccct

SEQ ID NO: 39343 - DNA, 20 bp, Artificial Sequence
  Synthetic oligonucleotide; CAG chr11 5307110 5307129 5307113 -
ttttttcccctaagtataaa

SEQ ID NO: 39344 - DNA, 20 bp, Artificial Sequence
  Synthetic oligonucleotide; AGG chr11 5307109 5307128 5307112 -
tttttcccctaagtataaac

SEQ ID NO: 39345 - DNA, 20 bp, Artificial Sequence
  Synthetic oligonucleotide; TAG chr11 5307103 5307122 5307106 -
ccctaagtataaacaggtga

SEQ ID NO: 39346 - DNA, 20 bp, Artificial Sequence
  Synthetic oligonucleotide; TAG chr11 5307096 5307115 5307099 -
tataaacaggtgatagtaaa

SEQ ID NO: 39347 - DNA, 20 bp, Artificial Sequence
  Synthetic oligonucleotide; GAG chr11 5307094 5307113 5307097 -
taaacaggtgatagtaaata

SEQ ID NO: 39348 - DNA, 20 bp, Artificial Sequence
  Synthetic oligonucleotide; GAG chr11 5307080 5307099 5307083 -
taaatagagtaacttgctgc

SEQ ID NO: 39349 - DNA, 20 bp, Artificial Sequence
  Synthetic oligonucleotide; TAG chr11 5307061 5307080 5307064 -
cgagtgtcacatatattatg

SEQ ID NO: 39350 - DNA, 20 bp, Artificial Sequence
  Synthetic oligonucleotide; AAG chr11 5307027 5307046 5307030 -
tatcactattttaaatctga

SEQ ID NO: 39351 - DNA, 20 bp, Artificial Sequence
  Synthetic oligonucleotide; GAG chr11 5307005 5307024 5307008 -
gactgaatttgacatgtttt

SEQ ID NO: 39352 - DNA, 20 bp, Artificial Sequence
  Synthetic oligonucleotide; AAG chr11 5307000 5307019 5307003 -
aatttgacatgttttgagat

SEQ ID NO: 39353 - DNA, 20 bp, Artificial Sequence
  Synthetic oligonucleotide; GAG chr11 5306998 5307017 5307001 -
tttgacatgttttgagataa

SEQ ID NO: 39354 - DNA, 20 bp, Artificial Sequence
  Synthetic oligonucleotide; TAG chr11 5306993 5307012 5306996 -
catgttttgagataagagtt

SEQ ID NO: 39355 - DNA, 20 bp, Artificial Sequence
  Synthetic oligonucleotide; AGG chr11 5306992 5307011 5306995 -
atgttttgagataagagttt

SEQ ID NO: 39356 - DNA, 20 bp, Artificial Sequence
  Synthetic oligonucleotide; GGG chr11 5306991 5307010 5306994 -
tgttttgagataagagttta

SEQ ID NO: 39357 - DNA, 20 bp, Artificial Sequence
  Synthetic oligonucleotide; TAG chr11 5306988 5307007 5306991 -
tttgagataagagtttaggg

SEQ ID NO: 39358 - DNA, 20 bp, Artificial Sequence
  Synthetic oligonucleotide; GAG chr11 5306986 5307005 5306989 -
tgagataagagtttagggta

SEQ ID NO: 39359 - DNA, 20 bp, Artificial Sequence
  Synthetic oligonucleotide; TAG chr11 5306964 5306983 5306967 -
gttgtgtatctgcacgatct

SEQ ID NO: 39360 - DNA, 20 bp, Artificial Sequence
  Synthetic oligonucleotide; TAG chr11 5306951 5306970 5306954 -
acgatcttagactacttaaa

SEQ ID NO: 39361 - DNA, 20 bp, Artificial Sequence
  Synthetic oligonucleotide; CAG chr11 5306943 5306962 5306946 -
agactacttaaatagaaact

SEQ ID NO: 39362 - DNA, 20 bp, Artificial Sequence
  Synthetic oligonucleotide; AAG chr11 5306922 5306941 5306925 -
agcacataatccaatgaaaa

SEQ ID NO: 39363 - DNA, 20 bp, Artificial Sequence
  Synthetic oligonucleotide; GAG chr11 5306920 5306939 5306923 -
cacataatccaatgaaaaaa

SEQ ID NO: 39364 - DNA, 20 bp, Artificial Sequence
  Synthetic oligonucleotide; CAG chr11 5306913 5306932 5306916 -
tccaatgaaaaaagagattt

SEQ ID NO: 39365 - DNA, 20 bp, Artificial Sequence
  Synthetic oligonucleotide; TGG chr11 5306908 5306927 5306911 -
tgaaaaaagagatttcagaa

SEQ ID NO: 39366 - DNA, 20 bp, Artificial Sequence
  Synthetic oligonucleotide; GGG chr11 5306907 5306926 5306910 -
gaaaaaagagatttcagaat

SEQ ID NO: 39367 - DNA, 20 bp, Artificial Sequence
  Synthetic oligonucleotide; TGG chr11 5306887 5306906 5306890 -
gggactaatatgacaacatc

SEQ ID NO: 39368 - DNA, 20 bp, Artificial Sequence
  Synthetic oligonucleotide; AAG chr11 5306869 5306888 5306872 -
tctggattattatgttcaat

SEQ ID NO: 39369 - DNA, 20 bp, Artificial Sequence
  Synthetic oligonucleotide; AGG chr11 5306868 5306887 5306871 -
ctggattattatgttcaata

SEQ ID NO: 39370 - DNA, 20 bp, Artificial Sequence
  Synthetic oligonucleotide; TGG chr11 5306865 5306884 5306868 -
gattattatgttcaataagg

SEQ ID NO: 39371 - DNA, 20 bp, Artificial Sequence
  Synthetic oligonucleotide; GAG chr11 5306863 5306882 5306866 -
ttattatgttcaataaggtg

SEQ ID NO: 39372 - DNA, 20 bp, Artificial Sequence
  Synthetic oligonucleotide; TAG chr11 5306855 5306874 5306858 -
ttcaataaggtggagcatca

SEQ ID NO: 39373 - DNA, 20 bp, Artificial Sequence
  Synthetic oligonucleotide; AGG chr11 5306854 5306873 5306857 -
tcaataaggtggagcatcat

SEQ ID NO: 39374 - DNA, 20 bp, Artificial Sequence
  Synthetic oligonucleotide; CAG chr11 5306843 5306862 5306846 -
gagcatcataggaaataaat

SEQ ID NO: 39375 - DNA, 20 bp, Artificial Sequence
  Synthetic oligonucleotide; AGG chr11 5306842 5306861 5306845 -
agcatcataggaaataaatc

SEQ ID NO: 39376 - DNA, 20 bp, Artificial Sequence
  Synthetic oligonucleotide; TAG chr11 5306837 5306856 5306840 -
cataggaaataaatcaggat

SEQ ID NO: 39377 - DNA, 20 bp, Artificial Sequence
  Synthetic oligonucleotide; AGG chr11 5306836 5306855 5306839 -
ataggaaataaatcaggatt

SEQ ID NO: 39378 - DNA, 20 bp, Artificial Sequence
  Synthetic oligonucleotide; AAG chr11 5306810 5306829 5306813 -
aattacatgataaacattta

SEQ ID NO: 39379 - DNA, 20 bp, Artificial Sequence
  Synthetic oligonucleotide; AGG chr11 5306809 5306828 5306812 -
attacatgataaacatttaa

SEQ ID NO: 39380 - DNA, 20 bp, Artificial Sequence
  Synthetic oligonucleotide; TGG chr11 5306795 5306814 5306798 -
atttaaaggactgttgatat

SEQ ID NO: 39381 - DNA, 20 bp, Artificial Sequence
  Synthetic oligonucleotide; CAG chr11 5306783 5306802 5306786 -
gttgatattggttcacccat

SEQ ID NO: 39382 - DNA, 20 bp, Artificial Sequence
  Synthetic oligonucleotide; AGG chr11 5306782 5306801 5306785 -
ttgatattggttcacccatc

SEQ ID NO: 39383 - DNA, 20 bp, Artificial Sequence
  Synthetic oligonucleotide; AAG chr11 5306778 5306797 5306781 -
tattggttcacccatcagga

SEQ ID NO: 39384 - DNA, 20 bp, Artificial Sequence
  Synthetic oligonucleotide; AAG chr11 5306775 5306794 5306778 -
tggttcacccatcaggaaag

SEQ ID NO: 39385 - DNA, 20 bp, Artificial Sequence
  Synthetic oligonucleotide; TAG chr11 5306769 5306788 5306772 -
acccatcaggaaagaagtct

SEQ ID NO: 39386 - DNA, 20 bp, Artificial Sequence
  Synthetic oligonucleotide; AGG chr11 5306768 5306787 5306771 -
cccatcaggaaagaagtctt

SEQ ID NO: 39387 - DNA, 20 bp, Artificial Sequence
  Synthetic oligonucleotide; GGG chr11 5306767 5306786 5306770 -
ccatcaggaaagaagtctta

SEQ ID NO: 39388 - DNA, 20 bp, Artificial Sequence
  Synthetic oligonucleotide; CAG chr11 5306755 5306774 5306758 -
aagtcttagggtttttaatg

SEQ ID NO: 39389 - DNA, 20 bp, Artificial Sequence
  Synthetic oligonucleotide; TAG chr11 5306737 5306756 5306740 -
tgcagatatctttatacatc

SEQ ID NO: 39390 - DNA, 20 bp, Artificial Sequence
  Synthetic oligonucleotide; TGG chr11 5306711 5306730 5306714 -
aaaattatgtatgaatataa

SEQ ID NO: 39391 - DNA, 20 bp, Artificial Sequence
  Synthetic oligonucleotide; TGG chr11 5306700 5306719 5306703 -
tgaatataatggctaatata

SEQ ID NO: 39392 - DNA, 20 bp, Artificial Sequence
  Synthetic oligonucleotide; TGG chr11 5306686 5306705 5306689 -
aatatatggttattttattc

SEQ ID NO: 39393 - DNA, 20 bp, Artificial Sequence
  Synthetic oligonucleotide; GAG chr11 5306684 5306703 5306687 -
tatatggttattttattctg

SEQ ID NO: 39394 - DNA, 20 bp, Artificial Sequence
  Synthetic oligonucleotide; CAG chr11 5306679 5306698 5306682 -
ggttattttattctggagat

SEQ ID NO: 39395 - DNA, 20 bp, Artificial Sequence
  Synthetic oligonucleotide; AAG chr11 5306666 5306685 5306669 -
tggagatcagacctaaatat

SEQ ID NO: 39396 - DNA, 20 bp, Artificial Sequence
  Synthetic oligonucleotide; AGG chr11 5306665 5306684 5306668 -
ggagatcagacctaaatata

SEQ ID NO: 39397 - DNA, 20 bp, Artificial Sequence
  Synthetic oligonucleotide; GAG chr11 5306663 5306682 5306666 -
agatcagacctaaatataag

SEQ ID NO: 39398 - DNA, 20 bp, Artificial Sequence
  Synthetic oligonucleotide; TAG chr11 5306660 5306679 5306663 -
tcagacctaaatataaggag

SEQ ID NO: 39399 - DNA, 20 bp, Artificial Sequence
  Synthetic oligonucleotide; CAG chr11 5306644 5306663 5306647 -
ggagtagatattatatgttt

SEQ ID NO: 39400 - DNA, 20 bp, Artificial Sequence
  Synthetic oligonucleotide; GAG chr11 5306642 5306661 5306645 -
agtagatattatatgtttca

SEQ ID NO: 39401 - DNA, 20 bp, Artificial Sequence
  Synthetic oligonucleotide; AAG chr11 5306639 5306658 5306642 -
agatattatatgtttcagag

SEQ ID NO: 39402 - DNA, 20 bp, Artificial Sequence
  Synthetic oligonucleotide; TAG chr11 5306550 5306569 5306553 -
cctatgcatacatatattga

SEQ ID NO: 39403 - DNA, 20 bp, Artificial Sequence
  Synthetic oligonucleotide; GAG chr11 5306491 5306510 5306494 -
aaacccacatatatatgaat

SEQ ID NO: 39404 - DNA, 20 bp, Artificial Sequence
  Synthetic oligonucleotide; TAG chr11 5306487 5306506 5306490 -
ccacatatatatgaatgaga

SEQ ID NO: 39405 - DNA, 20 bp, Artificial Sequence
  Synthetic oligonucleotide; CAG chr11 5306482 5306501 5306485 -
tatatatgaatgagatagct

SEQ ID NO: 39406 - DNA, 20 bp, Artificial Sequence
  Synthetic oligonucleotide; AGG chr11 5306481 5306500 5306484 -
atatatgaatgagatagctc

SEQ ID NO: 39407 - DNA, 20 bp, Artificial Sequence
  Synthetic oligonucleotide; GGG chr11 5306480 5306499 5306483 -
tatatgaatgagatagctca

SEQ ID NO: 39408 - DNA, 20 bp, Artificial Sequence
  Synthetic oligonucleotide; TAG chr11 5306477 5306496 5306480 -
atgaatgagatagctcaggg

SEQ ID NO: 39409 - DNA, 20 bp, Artificial Sequence
  Synthetic oligonucleotide; AGG chr11 5306476 5306495 5306479 -
tgaatgagatagctcagggt

SEQ ID NO: 39410 - DNA, 20 bp, Artificial Sequence
  Synthetic oligonucleotide; GGG chr11 5306475 5306494 5306478 -
gaatgagatagctcagggta

SEQ ID NO: 39411 - DNA, 20 bp, Artificial Sequence
  Synthetic oligonucleotide; TAG chr11 5306472 5306491 5306475 -
tgagatagctcagggtaggg

SEQ ID NO: 39412 - DNA, 20 bp, Artificial Sequence
  Synthetic oligonucleotide; GAG chr11 5306468 5306487 5306471 -
atagctcagggtagggtagt

SEQ ID NO: 39413 - DNA, 20 bp, Artificial Sequence
  Synthetic oligonucleotide; TAG chr11 5306454 5306473 5306457 -
ggtagtgagttttgaatcaa

SEQ ID NO: 39414 - DNA, 20 bp, Artificial Sequence
  Synthetic oligonucleotide; AAG chr11 5306450 5306469 5306453 -
gtgagttttgaatcaataga

SEQ ID NO: 39415 - DNA, 20 bp, Artificial Sequence
  Synthetic oligonucleotide; AAG chr11 5306418 5306437 5306421 -
atgtctgatgaataatcatc

SEQ ID NO: 39416 - DNA, 20 bp, Artificial Sequence
  Synthetic oligonucleotide; AAG chr11 5306410 5306429 5306413 -
tgaataatcatcaagacgaa

SEQ ID NO: 39417 - DNA, 20 bp, Artificial Sequence
  Synthetic oligonucleotide; AGG chr11 5306409 5306428 5306412 -
gaataatcatcaagacgaaa

SEQ ID NO: 39418 - DNA, 20 bp, Artificial Sequence
  Synthetic oligonucleotide; TGG chr11 5306404 5306423 5306407 -
atcatcaagacgaaaaggtt

SEQ ID NO: 39419 - DNA, 20 bp, Artificial Sequence
  Synthetic oligonucleotide; TGG chr11 5306401 5306420 5306404 -
atcaagacgaaaaggtttgg

SEQ ID NO: 39420 - DNA, 20 bp, Artificial Sequence
  Synthetic oligonucleotide; TGG chr11 5306398 5306417 5306401 -
aagacgaaaaggtttggtgg

SEQ ID NO: 39421 - DNA, 20 bp, Artificial Sequence
  Synthetic oligonucleotide; AAG chr11 5306392 5306411 5306395 -
aaaaggtttggtggtggctc

SEQ ID NO: 39422 - DNA, 20 bp, Artificial Sequence
  Synthetic oligonucleotide; AGG chr11 5306391 5306410 5306394 -
aaaggtttggtggtggctca

SEQ ID NO: 39423 - DNA, 20 bp, Artificial Sequence
  Synthetic oligonucleotide; AAG chr11 5306380 5306399 5306383 -
ggtggctcaaggattttgta

SEQ ID NO: 39424 - DNA, 20 bp, Artificial Sequence
  Synthetic oligonucleotide; AGG chr11 5306379 5306398 5306382 -
gtggctcaaggattttgtaa

SEQ ID NO: 39425 - DNA, 20 bp, Artificial Sequence
  Synthetic oligonucleotide; GGG chr11 5306378 5306397 5306381 -
tggctcaaggattttgtaaa

SEQ ID NO: 39426 - DNA, 20 bp, Artificial Sequence
  Synthetic oligonucleotide; TAG chr11 5306369 5306388 5306372 -
gattttgtaaagggttgaat

SEQ ID NO: 39427 - DNA, 20 bp, Artificial Sequence
  Synthetic oligonucleotide; GAG chr11 5306367 5306386 5306370 -
ttttgtaaagggttgaatta

SEQ ID NO: 39428 - DNA, 20 bp, Artificial Sequence
  Synthetic oligonucleotide; CAG chr11 5306355 5306374 5306358 -
ttgaattagagaatataata

SEQ ID NO: 39429 - DNA, 20 bp, Artificial Sequence
  Synthetic oligonucleotide; AAG chr11 5306346 5306365 5306349 -
agaatataatacagtttgaa

SEQ ID NO: 39430 - DNA, 20 bp, Artificial Sequence
  Synthetic oligonucleotide; AGG chr11 5306345 5306364 5306348 -
gaatataatacagtttgaaa

SEQ ID NO: 39431 - DNA, 20 bp, Artificial Sequence
  Synthetic oligonucleotide; GGG chr11 5306344 5306363 5306347 -
aatataatacagtttgaaaa

SEQ ID NO: 39432 - DNA, 20 bp, Artificial Sequence
  Synthetic oligonucleotide; GGG chr11 5306343 5306362 5306346 -
atataatacagtttgaaaag

SEQ ID NO: 39433 - DNA, 20 bp, Artificial Sequence
  Synthetic oligonucleotide; AAG chr11 5306312 5306331 5306315 -
ttcaaatgttaacatttaca

SEQ ID NO: 39434 - DNA, 20 bp, Artificial Sequence
  Synthetic oligonucleotide; AAG chr11 5306306 5306325 5306309 -
tgttaacatttacaaagaca

SEQ ID NO: 39435 - DNA, 20 bp, Artificial Sequence
  Synthetic oligonucleotide; TGG chr11 5306299 5306318 5306302 -
atttacaaagacaaagtgac

SEQ ID NO: 39436 - DNA, 20 bp, Artificial Sequence
  Synthetic oligonucleotide; AAG chr11 5306284 5306303 5306287 -
gtgactggtcttcccactct

SEQ ID NO: 39437 - DNA, 20 bp, Artificial Sequence
  Synthetic oligonucleotide; TGG chr11 5306276 5306295 5306279 -
tcttcccactctaagaccaa

SEQ ID NO: 39438 - DNA, 20 bp, Artificial Sequence
  Synthetic oligonucleotide; GAG chr11 5306266 5306285 5306269 -
ctaagaccaatggaacactt

SEQ ID NO: 39439 - DNA, 20 bp, Artificial Sequence
  Synthetic oligonucleotide; GAG chr11 5306264 5306283 5306267 -
aagaccaatggaacacttga

SEQ ID NO: 39440 - DNA, 20 bp, Artificial Sequence
  Synthetic oligonucleotide; CGG chr11 5306251 5306270 5306254 -
cacttgagagtgactcattt

SEQ ID NO: 39441 - DNA, 20 bp, Artificial Sequence
  Synthetic oligonucleotide; TAG chr11 5306230 5306249 5306233 -
ggtcatgcctcatctgatgt

SEQ ID NO: 39442 - DNA, 20 bp, Artificial Sequence
  Synthetic oligonucleotide; GAG chr11 5306228 5306247 5306231 -
tcatgcctcatctgatgtta

SEQ ID NO: 39443 - DNA, 20 bp, Artificial Sequence
  Synthetic oligonucleotide; TAG chr11 5306212 5306231 5306215 -
gttagagacacaacttctct

SEQ ID NO: 39444 - DNA, 20 bp, Artificial Sequence
  Synthetic oligonucleotide; GAG chr11 5306210 5306229 5306213 -
tagagacacaacttctctta

SEQ ID NO: 39445 - DNA, 20 bp, Artificial Sequence
  Synthetic oligonucleotide; AAG chr11 5306195 5306214 5306198 -
tcttagagactctccttcca

SEQ ID NO: 39446 - DNA, 20 bp, Artificial Sequence
  Synthetic oligonucleotide; AAG chr11 5306184 5306203 5306187 -
ctccttccaaagaaaaaata

SEQ ID NO: 39447 - DNA, 20 bp, Artificial Sequence
  Synthetic oligonucleotide; AGG chr11 5306183 5306202 5306186 -
tccttccaaagaaaaaataa

SEQ ID NO: 39448 - DNA, 20 bp, Artificial Sequence
  Synthetic oligonucleotide; TGG chr11 5306177 5306196 5306180 -
caaagaaaaaataaaggcca

SEQ ID NO: 39449 - DNA, 20 bp, Artificial Sequence
  Synthetic oligonucleotide; GGG chr11 5306176 5306195 5306179 -
aaagaaaaaataaaggccat

SEQ ID NO: 39450 - DNA, 20 bp, Artificial Sequence
  Synthetic oligonucleotide; GGG chr11 5306175 5306194 5306178 -
aagaaaaaataaaggccatg

SEQ ID NO: 39451 - DNA, 20 bp, Artificial Sequence
  Synthetic oligonucleotide; CAG chr11 5306170 5306189 5306173 -
aaaataaaggccatggggac

SEQ ID NO: 39452 - DNA, 20 bp, Artificial Sequence
  Synthetic oligonucleotide; TGG chr11 5306161 5306180 5306164 -
gccatggggaccagtttcaa

SEQ ID NO: 39453 - DNA, 20 bp, Artificial Sequence
  Synthetic oligonucleotide; CAG chr11 5306156 5306175 5306159 -
ggggaccagtttcaatggcc

SEQ ID NO: 39454 - DNA, 20 bp, Artificial Sequence
  Synthetic oligonucleotide; CAG chr11 5306145 5306164 5306148 -
tcaatggcccagatctttcc

SEQ ID NO: 39455 - DNA, 20 bp, Artificial Sequence
  Synthetic oligonucleotide; AGG chr11 5306144 5306163 5306147 -
caatggcccagatctttccc

SEQ ID NO: 39456 - DNA, 20 bp, Artificial Sequence
  Synthetic oligonucleotide; TGG chr11 5306140 5306159 5306143 -
ggcccagatctttcccaggt

SEQ ID NO: 39457 - DNA, 20 bp, Artificial Sequence
  Synthetic oligonucleotide; GGG chr11 5306139 5306158 5306142 -
gcccagatctttcccaggtt

SEQ ID NO: 39458 - DNA, 20 bp, Artificial Sequence
  Synthetic oligonucleotide; GGG chr11 5306138 5306157 5306141 -
cccagatctttcccaggttg

SEQ ID NO: 39459 - DNA, 20 bp, Artificial Sequence
  Synthetic oligonucleotide; GAG chr11 5306136 5306155 5306139 -
cagatctttcccaggttggg

SEQ ID NO: 39460 - DNA, 20 bp, Artificial Sequence
  Synthetic oligonucleotide; AGG chr11 5306135 5306154 5306138 -
agatctttcccaggttgggg

SEQ ID NO: 39461 - DNA, 20 bp, Artificial Sequence
  Synthetic oligonucleotide; AAG chr11 5306130 5306149 5306133 -
tttcccaggttggggaggaa

SEQ ID NO: 39462 - DNA, 20 bp, Artificial Sequence
  Synthetic oligonucleotide; GAG chr11 5306128 5306147 5306131 -
tcccaggttggggaggaaaa

SEQ ID NO: 39463 - DNA, 20 bp, Artificial Sequence
  Synthetic oligonucleotide; TGG chr11 5306118 5306137 5306121 -
gggaggaaaagagaattatt

SEQ ID NO: 39464 - DNA, 20 bp, Artificial Sequence
  Synthetic oligonucleotide; TGG chr11 5306091 5306110 5306094 -
ctattcccaaatatcctatg

SEQ ID NO: 39465 - DNA, 20 bp, Artificial Sequence
  Synthetic oligonucleotide; GAG chr11 5306084 5306103 5306087 -
caaatatcctatgtggaaat

SEQ ID NO: 39466 - DNA, 20 bp, Artificial Sequence
  Synthetic oligonucleotide; TAG chr11 5306080 5306099 5306083 -
tatcctatgtggaaatgagc

SEQ ID NO: 39467 - DNA, 20 bp, Artificial Sequence
  Synthetic oligonucleotide; GAG chr11 5306066 5306085 5306069 -
atgagctagaataacccctt

SEQ ID NO: 39468 - DNA, 20 bp, Artificial Sequence
  Synthetic oligonucleotide; GAG chr11 5306064 5306083 5306067 -
gagctagaataaccccttga

SEQ ID NO: 39469 - DNA, 20 bp, Artificial Sequence
  Synthetic oligonucleotide; CAG chr11 5306033 5306052 5306036 -
gtaacaaatatatctctcat

SEQ ID NO: 39470 - DNA, 20 bp, Artificial Sequence
  Synthetic oligonucleotide; AAG chr11 5306026 5306045 5306029 -
atatatctctcatcagaatt

SEQ ID NO: 39471 - DNA, 20 bp, Artificial Sequence
  Synthetic oligonucleotide; GAG chr11 5306024 5306043 5306027 -
atatctctcatcagaattaa

SEQ ID NO: 39472 - DNA, 20 bp, Artificial Sequence
  Synthetic oligonucleotide; GAG chr11 5306013 5306032 5306016 -
cagaattaagagtaaatact

SEQ ID NO: 39473 - DNA, 20 bp, Artificial Sequence
  Synthetic oligonucleotide; AGG chr11 5306012 5306031 5306015 -
agaattaagagtaaatactg

SEQ ID NO: 39474 - DNA, 20 bp, Artificial Sequence
  Synthetic oligonucleotide; TAG chr11 5306006 5306025 5306009 -
aagagtaaatactgaggata

SEQ ID NO: 39475 - DNA, 20 bp, Artificial Sequence
  Synthetic oligonucleotide; CAG chr11 5305988 5306007 5305991 -
tatagcaaacaaccaatatt

SEQ ID NO: 39476 - DNA, 20 bp, Artificial Sequence
  Synthetic oligonucleotide; AGG chr11 5305987 5306006 5305990 -
atagcaaacaaccaatattc

SEQ ID NO: 39477 - DNA, 20 bp, Artificial Sequence
  Synthetic oligonucleotide; CAG chr11 5305977 5305996 5305980 -
accaatattcaggtcatgct

SEQ ID NO: 39478 - DNA, 20 bp, Artificial Sequence
  Synthetic oligonucleotide; AAG chr11 5305966 5305985 5305969 -
ggtcatgctcagaaaccgca

SEQ ID NO: 39479 - DNA, 20 bp, Artificial Sequence
  Synthetic oligonucleotide; GAG chr11 5305964 5305983 5305967 -
tcatgctcagaaaccgcaaa

SEQ ID NO: 39480 - DNA, 20 bp, Artificial Sequence
  Synthetic oligonucleotide; TGG chr11 5305954 5305973 5305957 -
aaaccgcaaagagaaaactg

SEQ ID NO: 39481 - DNA, 20 bp, Artificial Sequence
  Synthetic oligonucleotide; CAG chr11 5305949 5305968 5305952 -
gcaaagagaaaactgtggct

SEQ ID NO: 39482 - DNA, 20 bp, Artificial Sequence
  Synthetic oligonucleotide; AGG chr11 5305948 5305967 5305951 -
caaagagaaaactgtggctc

SEQ ID NO: 39483 - DNA, 20 bp, Artificial Sequence
  Synthetic oligonucleotide; AAG chr11 5305944 5305963 5305947 -
gagaaaactgtggctcaggt

SEQ ID NO: 39484 - DNA, 20 bp, Artificial Sequence
  Synthetic oligonucleotide; AAG chr11 5305939 5305958 5305942 -
aactgtggctcaggtaagaa

SEQ ID NO: 39485 - DNA, 20 bp, Artificial Sequence
  Synthetic oligonucleotide; AAG chr11 5305934 5305953 5305937 -
tggctcaggtaagaaaagcc

SEQ ID NO: 39486 - DNA, 20 bp, Artificial Sequence
  Synthetic oligonucleotide; AGG chr11 5305933 5305952 5305936 -
ggctcaggtaagaaaagcca

SEQ ID NO: 39487 - DNA, 20 bp, Artificial Sequence
  Synthetic oligonucleotide; CGG chr11 5305921 5305940 5305924 -
aaaagccaaggattcaaata

SEQ ID NO: 39488 - DNA, 20 bp, Artificial Sequence
  Synthetic oligonucleotide; GGG chr11 5305920 5305939 5305923 -
aaagccaaggattcaaatac

SEQ ID NO: 39489 - DNA, 20 bp, Artificial Sequence
  Synthetic oligonucleotide; AAG chr11 5305917 5305936 5305920 -
gccaaggattcaaatacggg

SEQ ID NO: 39490 - DNA, 20 bp, Artificial Sequence
  Synthetic oligonucleotide; AAG chr11 5305913 5305932 5305916 -
aggattcaaatacgggaagc

SEQ ID NO: 39491 - DNA, 20 bp, Artificial Sequence
  Synthetic oligonucleotide; TGG chr11 5305891 5305910 5305894 -
gtttaaccatttccatttga

SEQ ID NO: 39492 - DNA, 20 bp, Artificial Sequence
  Synthetic oligonucleotide; TGG chr11 5305884 5305903 5305887 -
catttccatttgatggacat

SEQ ID NO: 39493 - DNA, 20 bp, Artificial Sequence
  Synthetic oligonucleotide; GAG chr11 5305879 5305898 5305882 -
ccatttgatggacattggtt

SEQ ID NO: 39494 - DNA, 20 bp, Artificial Sequence
  Synthetic oligonucleotide; GAG chr11 5305871 5305890 5305874 -
tggacattggttgagaatat

SEQ ID NO: 39495 - DNA, 20 bp, Artificial Sequence
  Synthetic oligonucleotide; TGG chr11 5305866 5305885 5305869 -
attggttgagaatatgagct

SEQ ID NO: 39496 - DNA, 20 bp, Artificial Sequence
  Synthetic oligonucleotide; GGG chr11 5305865 5305884 5305868 -
ttggttgagaatatgagctt

SEQ ID NO: 39497 - DNA, 20 bp, Artificial Sequence
  Synthetic oligonucleotide; TGG chr11 5305859 5305878 5305862 -
gagaatatgagcttgggttt

SEQ ID NO: 39498 - DNA, 20 bp, Artificial Sequence
  Synthetic oligonucleotide; GGG chr11 5305858 5305877 5305861 -
agaatatgagcttgggtttt

SEQ ID NO: 39499 - DNA, 20 bp, Artificial Sequence
  Synthetic oligonucleotide; TAG chr11 5305854 5305873 5305857 -
tatgagcttgggttttgggt

SEQ ID NO: 39500 - DNA, 20 bp, Artificial Sequence
  Synthetic oligonucleotide; TAG chr11 5305816 5305835 5305819 -
aattcctttatgacacatat

SEQ ID NO: 39501 - DNA, 20 bp, Artificial Sequence
  Synthetic oligonucleotide; TAG chr11 5305802 5305821 5305805 -
acatattagttgcgtgatct

SEQ ID NO: 39502 - DNA, 20 bp, Artificial Sequence
  Synthetic oligonucleotide; AGG chr11 5305801 5305820 5305804 -
catattagttgcgtgatctt

SEQ ID NO: 39503 - DNA, 20 bp, Artificial Sequence
  Synthetic oligonucleotide; AAG chr11 5305779 5305798 5305782 -
gctaattgcttaacttgtct

SEQ ID NO: 39504 - DNA, 20 bp, Artificial Sequence
  Synthetic oligonucleotide; AGG chr11 5305778 5305797 5305781 -
ctaattgcttaacttgtcta

SEQ ID NO: 39505 - DNA, 20 bp, Artificial Sequence
  Synthetic oligonucleotide; CAG chr11 5305681 5305700 5305684 -
ttttctctctctctctttaa

SEQ ID NO: 39506 - DNA, 20 bp, Artificial Sequence
  Synthetic oligonucleotide; CAG chr11 5305662 5305681 5305665 -
acagatttttctctgttgcc

SEQ ID NO: 39507 - DNA, 20 bp, Artificial Sequence
  Synthetic oligonucleotide; AGG chr11 5305661 5305680 5305664 -
cagatttttctctgttgccc

SEQ ID NO: 39508 - DNA, 20 bp, Artificial Sequence
  Synthetic oligonucleotide; TAG chr11 5305657 5305676 5305660 -
tttttctctgttgcccaggc

SEQ ID NO: 39509 - DNA, 20 bp, Artificial Sequence
  Synthetic oligonucleotide; GAG chr11 5305655 5305674 5305658 -
tttctctgttgcccaggcta

SEQ ID NO: 39510 - DNA, 20 bp, Artificial Sequence
  Synthetic oligonucleotide; CAG chr11 5305650 5305669 5305653 -
ctgttgcccaggctagagtg

SEQ ID NO: 39511 - DNA, 20 bp, Artificial Sequence
  Synthetic oligonucleotide; TGG chr11 5305647 5305666 5305650 -
ttgcccaggctagagtgcag

SEQ ID NO: 39512 - DNA, 20 bp, Artificial Sequence
  Synthetic oligonucleotide; CAG chr11 5305636 5305655 5305639 -
agagtgcagtggtgcgatct

SEQ ID NO: 39513 - DNA, 20 bp, Artificial Sequence
  Synthetic oligonucleotide; CAG chr11 5305613 5305632 5305616 -
ctcactgcgacctcctccac

SEQ ID NO: 39514 - DNA, 20 bp, Artificial Sequence
  Synthetic oligonucleotide; AGG chr11 5305612 5305631 5305615 -
tcactgcgacctcctccacc

SEQ ID NO: 39515 - DNA, 20 bp, Artificial Sequence
  Synthetic oligonucleotide; GGG chr11 5305611 5305630 5305614 -
cactgcgacctcctccacca

SEQ ID NO: 39516 - DNA, 20 bp, Artificial Sequence
  Synthetic oligonucleotide; CAG chr11 5305606 5305625 5305609 -
cgacctcctccaccagggtt

SEQ ID NO: 39517 - DNA, 20 bp, Artificial Sequence
  Synthetic oligonucleotide; AGG chr11 5305605 5305624 5305608 -
gacctcctccaccagggttc

SEQ ID NO: 39518 - DNA, 20 bp, Artificial Sequence
  Synthetic oligonucleotide; GGG chr11 5305604 5305623 5305607 -
acctcctccaccagggttca

SEQ ID NO: 39519 - DNA, 20 bp, Artificial Sequence
  Synthetic oligonucleotide; GGG chr11 5305603 5305622 5305606 -
cctcctccaccagggttcag

SEQ ID NO: 39520 - DNA, 20 bp, Artificial Sequence
  Synthetic oligonucleotide; CAG chr11 5305588 5305607 5305591 -
ttcaggggattctcatgcct

SEQ ID NO: 39521 - DNA, 20 bp, Artificial Sequence
  Synthetic oligonucleotide; CAG chr11 5305581 5305600 5305584 -
gattctcatgcctcagcctc

SEQ ID NO: 39522 - DNA, 20 bp, Artificial Sequence
  Synthetic oligonucleotide; GAG chr11 5305579 5305598 5305582 -
ttctcatgcctcagcctcca

SEQ ID NO: 39523 - DNA, 20 bp, Artificial Sequence
  Synthetic oligonucleotide; TAG chr11 5305576 5305595 5305579 -
tcatgcctcagcctccagag

SEQ ID NO: 39524 - DNA, 20 bp, Artificial Sequence
  Synthetic oligonucleotide; TGG chr11 5305572 5305591 5305575 -
gcctcagcctccagagtagc

SEQ ID NO: 39525 - DNA, 20 bp, Artificial Sequence
  Synthetic oligonucleotide; GGG chr11 5305571 5305590 5305574 -
cctcagcctccagagtagct

SEQ ID NO: 39526 - DNA, 20 bp, Artificial Sequence
  Synthetic oligonucleotide; TGG chr11 5305544 5305563 5305547 -
tgatcatgtgccaccacacc

SEQ ID NO: 39527 - DNA, 20 bp, Artificial Sequence
  Synthetic oligonucleotide; TAG chr11 5305525 5305544 5305528 -
ctggcttatttttgtaatta

SEQ ID NO: 39528 - DNA, 20 bp, Artificial Sequence
  Synthetic oligonucleotide; TAG chr11 5305522 5305541 5305525 -
gcttatttttgtaattatag

SEQ ID NO: 39529 - DNA, 20 bp, Artificial Sequence
  Synthetic oligonucleotide; TGG chr11 5305516 5305535 5305519 -
ttttgtaattatagtagtga

SEQ ID NO: 39530 - DNA, 20 bp, Artificial Sequence
  Synthetic oligonucleotide; TGG chr11 5305500 5305519 5305503 -
gtgatggtgttttgccatgt

SEQ ID NO: 39531 - DNA, 20 bp, Artificial Sequence
  Synthetic oligonucleotide; CAG chr11 5305495 5305514 5305498 -
ggtgttttgccatgttggcc

SEQ ID NO: 39532 - DNA, 20 bp, Artificial Sequence
  Synthetic oligonucleotide; TGG chr11 5305491 5305510 5305494 -
ttttgccatgttggcccagc

SEQ ID NO: 39533 - DNA, 20 bp, Artificial Sequence
  Synthetic oligonucleotide; AAG chr11 5305470 5305489 5305473 -
ggtctcgaactcctgaactc

SEQ ID NO: 39534 - DNA, 20 bp, Artificial Sequence
  Synthetic oligonucleotide; CGG chr11 5305453 5305472 5305456 -
ctcaagtgatccaccctcct

SEQ ID NO: 39535 - DNA, 20 bp, Artificial Sequence
  Synthetic oligonucleotide; AAG chr11 5305443 5305462 5305446 -
ccaccctcctcggcctccca

SEQ ID NO: 39536 - DNA, 20 bp, Artificial Sequence
  Synthetic oligonucleotide; TGG chr11 5305437 5305456 5305440 -
tcctcggcctcccaaagtgc

SEQ ID NO: 39537 - DNA, 20 bp, Artificial Sequence
  Synthetic oligonucleotide; GGG chr11 5305436 5305455 5305439 -
cctcggcctcccaaagtgct

SEQ ID NO: 39538 - DNA, 20 bp, Artificial Sequence
  Synthetic oligonucleotide; TAG chr11 5305429 5305448 5305432 -
ctcccaaagtgctgggatta

SEQ ID NO: 39539 - DNA, 20 bp, Artificial Sequence
  Synthetic oligonucleotide; AGG chr11 5305428 5305447 5305431 -
tcccaaagtgctgggattat

SEQ ID NO: 39540 - DNA, 20 bp, Artificial Sequence
  Synthetic oligonucleotide; GAG chr11 5305422 5305441 5305425 -
agtgctgggattataggcat

SEQ ID NO: 39541 - DNA, 20 bp, Artificial Sequence
  Synthetic oligonucleotide; CAG chr11 5305409 5305428 5305412 -
taggcatgagccaccgtgcc

SEQ ID NO: 39542 - DNA, 20 bp, Artificial Sequence
  Synthetic oligonucleotide; CAG chr11 5305380 5305399 5305383 -
tttactcactttttgtctca

SEQ ID NO: 39543 - DNA, 20 bp, Artificial Sequence
  Synthetic oligonucleotide; TAG chr11 5305373 5305392 5305376 -
actttttgtctcacagtcat

SEQ ID NO: 39544 - DNA, 20 bp, Artificial Sequence
  Synthetic oligonucleotide; AGG chr11 5305372 5305391 5305375 -
ctttttgtctcacagtcatt

SEQ ID NO: 39545 - DNA, 20 bp, Artificial Sequence
  Synthetic oligonucleotide; AAG chr11 5305328 5305347 5305331 -
tgaaattgtcaatattacca

SEQ ID NO: 39546 - DNA, 20 bp, Artificial Sequence
  Synthetic oligonucleotide; TAG chr11 5305322 5305341 5305325 -
tgtcaatattaccaaagacc

SEQ ID NO: 39547 - DNA, 20 bp, Artificial Sequence
  Synthetic oligonucleotide; TAG chr11 5305247 5305266 5305250 -
ttttcactattaacctacca

SEQ ID NO: 39548 - DNA, 20 bp, Artificial Sequence
  Synthetic oligonucleotide; CAG chr11 5305199 5305218 5305202 -
tcattgtttttttgtaaata

SEQ ID NO: 39549 - DNA, 20 bp, Artificial Sequence
  Synthetic oligonucleotide; GAG chr11 5305143 5305162 5305146 -
cttctttgtctatctccttt

SEQ ID NO: 39550 - DNA, 20 bp, Artificial Sequence
  Synthetic oligonucleotide; GAG chr11 5305125 5305144 5305128 -
ttgagatctttctttttact

SEQ ID NO: 39551 - DNA, 20 bp, Artificial Sequence
  Synthetic oligonucleotide; GAG chr11 5305123 5305142 5305126 -
gagatctttctttttactga

SEQ ID NO: 39552 - DNA, 20 bp, Artificial Sequence
  Synthetic oligonucleotide; TAG chr11 5305108 5305127 5305111 -
actgagagcaaaatttgtcc

SEQ ID NO: 39553 - DNA, 20 bp, Artificial Sequence
  Synthetic oligonucleotide; GAG chr11 5305063 5305082 5305066 -
cctttttttttttttttttt

SEQ ID NO: 39554 - DNA, 20 bp, Artificial Sequence
  Synthetic oligonucleotide; CAG chr11 5305059 5305078 5305062 -
ttttttttttttttttgaga

SEQ ID NO: 39555 - DNA, 20 bp, Artificial Sequence
  Synthetic oligonucleotide; GAG chr11 5305057 5305076 5305060 -
ttttttttttttttgagaca

SEQ ID NO: 39556 - DNA, 20 bp, Artificial Sequence
  Synthetic oligonucleotide; CAG chr11 5305039 5305058 5305042 -
cagagccttgctttgtcgcc

SEQ ID NO: 39557 - DNA, 20 bp, Artificial Sequence
  Synthetic oligonucleotide; AGG chr11 5305038 5305057 5305041 -
agagccttgctttgtcgccc

SEQ ID NO: 39558 - DNA, 20 bp, Artificial Sequence
  Synthetic oligonucleotide; TAG chr11 5305032 5305051 5305035 -
ttgctttgtcgcccaggctg

SEQ ID NO: 39559 - DNA, 20 bp, Artificial Sequence
  Synthetic oligonucleotide; CAG chr11 5305027 5305046 5305030 -
ttgtcgcccaggctgtagtg

SEQ ID NO: 39560 - DNA, 20 bp, Artificial Sequence
  Synthetic oligonucleotide; TGG chr11 5305024 5305043 5305027 -
tcgcccaggctgtagtgcag

SEQ ID NO: 39561 - DNA, 20 bp, Artificial Sequence
  Synthetic oligonucleotide; TGG chr11 5305013 5305032 5305016 -
gtagtgcagtggcacaatct

SEQ ID NO: 39562 - DNA, 20 bp, Artificial Sequence
  Synthetic oligonucleotide; CAG chr11 5304986 5305005 5304989 -
ctgcgacgacctctgctccc

SEQ ID NO: 39563 - DNA, 20 bp, Artificial Sequence
  Synthetic oligonucleotide; AAG chr11 5304975 5304994 5304978 -
tctgctccccagttttttta

SEQ ID NO: 39564 - DNA, 20 bp, Artificial Sequence
  Synthetic oligonucleotide; CAG chr11 5304958 5304977 5304961 -
ttaaagcaattctcctgcct

SEQ ID NO: 39565 - DNA, 20 bp, Artificial Sequence
  Synthetic oligonucleotide; GAG chr11 5304949 5304968 5304952 -
ttctcctgcctcagcctccc

SEQ ID NO: 39566 - DNA, 20 bp, Artificial Sequence
  Synthetic oligonucleotide; TAG chr11 5304946 5304965 5304949 -
tcctgcctcagcctcccgag

SEQ ID NO: 39567 - DNA, 20 bp, Artificial Sequence
  Synthetic oligonucleotide; TGG chr11 5304942 5304961 5304945 -
gcctcagcctcccgagtagc

SEQ ID NO: 39568 - DNA, 20 bp, Artificial Sequence
  Synthetic oligonucleotide; GGG chr11 5304941 5304960 5304944 -
cctcagcctcccgagtagct

SEQ ID NO: 39569 - DNA, 20 bp, Artificial Sequence
  Synthetic oligonucleotide; CAG chr11 5304934 5304953 5304937 -
ctcccgagtagctgggatta

SEQ ID NO: 39570 - DNA, 20 bp, Artificial Sequence
  Synthetic oligonucleotide; AGG chr11 5304933 5304952 5304936 -
tcccgagtagctgggattac

SEQ ID NO: 39571 - DNA, 20 bp, Artificial Sequence
  Synthetic oligonucleotide; CAG chr11 5304914 5304933 5304917 -
caggcgctcaccaccacacc

SEQ ID NO: 39572 - DNA, 20 bp, Artificial Sequence
  Synthetic oligonucleotide; TAG chr11 5304895 5304914 5304898 -
ccagctaatttttgtatttt

SEQ ID NO: 39573 - DNA, 20 bp, Artificial Sequence
  Synthetic oligonucleotide; TAG chr11 5304892 5304911 5304895 -
gctaatttttgtatttttag

SEQ ID NO: 39574 - DNA, 20 bp, Artificial Sequence
  Synthetic oligonucleotide; GAG chr11 5304890 5304909 5304893 -
taatttttgtatttttagta

SEQ ID NO: 39575 - DNA, 20 bp, Artificial Sequence
  Synthetic oligonucleotide; CAG chr11 5304886 5304905 5304889 -
ttttgtatttttagtagaga

SEQ ID NO: 39576 - DNA, 20 bp, Artificial Sequence
  Synthetic oligonucleotide; AGG chr11 5304885 5304904 5304888 -
tttgtatttttagtagagac

SEQ ID NO: 39577 - DNA, 20 bp, Artificial Sequence
  Synthetic oligonucleotide; GGG chr11 5304884 5304903 5304887 -
ttgtatttttagtagagaca

SEQ ID NO: 39578 - DNA, 20 bp, Artificial Sequence
  Synthetic oligonucleotide; TGG chr11 5304870 5304889 5304873 -
gagacagggtttcaccatgt

SEQ ID NO: 39579 - DNA, 20 bp, Artificial Sequence
  Synthetic oligonucleotide; CAG chr11 5304866 5304885 5304869 -
cagggtttcaccatgttggc

SEQ ID NO: 39580 - DNA, 20 bp, Artificial Sequence
  Synthetic oligonucleotide; AGG chr11 5304865 5304884 5304868 -
agggtttcaccatgttggcc

SEQ ID NO: 39581 - DNA, 20 bp, Artificial Sequence
  Synthetic oligonucleotide; TAG chr11 5304861 5304880 5304864 -
tttcaccatgttggccaggc

SEQ ID NO: 39582 - DNA, 20 bp, Artificial Sequence
  Synthetic oligonucleotide; CAG chr11 5304829 5304848 5304832 -
gctgacctcgtgatccacct

SEQ ID NO: 39583 - DNA, 20 bp, Artificial Sequence
  Synthetic oligonucleotide; AAG chr11 5304819 5304838 5304822 -
tgatccacctcagccttcca

SEQ ID NO: 39584 - DNA, 20 bp, Artificial Sequence
  Synthetic oligonucleotide; TAG chr11 5304813 5304832 5304816 -
acctcagccttccaaagtgc

SEQ ID NO: 39585 - DNA, 20 bp, Artificial Sequence
  Synthetic oligonucleotide; AGG chr11 5304812 5304831 5304815 -
cctcagccttccaaagtgct

SEQ ID NO: 39586 - DNA, 20 bp, Artificial Sequence
  Synthetic oligonucleotide; CAG chr11 5304805 5304824 5304808 -
cttccaaagtgctaggatta

SEQ ID NO: 39587 - DNA, 20 bp, Artificial Sequence
  Synthetic oligonucleotide; AGG chr11 5304804 5304823 5304807 -
ttccaaagtgctaggattac

SEQ ID NO: 39588 - DNA, 20 bp, Artificial Sequence
  Synthetic oligonucleotide; GAG chr11 5304798 5304817 5304801 -
agtgctaggattacaggcat

SEQ ID NO: 39589 - DNA, 20 bp, Artificial Sequence
  Synthetic oligonucleotide; TGG chr11 5304785 5304804 5304788 -
caggcatgagcctctgtgcc

SEQ ID NO: 39590 - DNA, 20 bp, Artificial Sequence
  Synthetic oligonucleotide; AAG chr11 5304755 5304774 5304758 -
ttccattttaatttgtactt

SEQ ID NO: 39591 - DNA, 20 bp, Artificial Sequence
  Synthetic oligonucleotide; AGG chr11 5304754 5304773 5304757 -
tccattttaatttgtactta

SEQ ID NO: 39592 - DNA, 20 bp, Artificial Sequence
  Synthetic oligonucleotide; AAG chr11 5304750 5304769 5304753 -
ttttaatttgtacttaaggt

SEQ ID NO: 39593 - DNA, 20 bp, Artificial Sequence
  Synthetic oligonucleotide; AAG chr11 5304739 5304758 5304742 -
acttaaggtaagatataaaa

SEQ ID NO: 39594 - DNA, 20 bp, Artificial Sequence
  Synthetic oligonucleotide; AAG chr11 5304728 5304747 5304731 -
gatataaaaaagtcacttaa

SEQ ID NO: 39595 - DNA, 20 bp, Artificial Sequence
  Synthetic oligonucleotide; GAG chr11 5304723 5304742 5304726 -
aaaaaagtcacttaaaagct

SEQ ID NO: 39596 - DNA, 20 bp, Artificial Sequence
  Synthetic oligonucleotide; CAG chr11 5304714 5304733 5304717 -
acttaaaagctgagattttt

SEQ ID NO: 39597 - DNA, 20 bp, Artificial Sequence
  Synthetic oligonucleotide; TGG chr11 5304692 5304711 5304695 -
gatattttgtcttcatctca

SEQ ID NO: 39598 - DNA, 20 bp, Artificial Sequence
  Synthetic oligonucleotide; CAG chr11 5304678 5304697 5304681 -
atctcatggcttcccattgt

SEQ ID NO: 39599 - DNA, 20 bp, Artificial Sequence
  Synthetic oligonucleotide; TGG chr11 5304655 5304674 5304658 -
ttgactttaaatatttattt

SEQ ID NO: 39600 - DNA, 20 bp, Artificial Sequence
  Synthetic oligonucleotide; TAG chr11 5304631 5304650 5304634 -
atatttattaatttcttcta

SEQ ID NO: 39601 - DNA, 20 bp, Artificial Sequence
  Synthetic oligonucleotide; AGG chr11 5304630 5304649 5304633 -
tatttattaatttcttctat

SEQ ID NO: 39602 - DNA, 20 bp, Artificial Sequence
  Synthetic oligonucleotide; TGG chr11 5304617 5304636 5304620 -
cttctataggaacacaattt

SEQ ID NO: 39603 - DNA, 20 bp, Artificial Sequence
  Synthetic oligonucleotide; GGG chr11 5304616 5304635 5304619 -
ttctataggaacacaatttt

SEQ ID NO: 39604 - DNA, 20 bp, Artificial Sequence
  Synthetic oligonucleotide; GGG chr11 5304615 5304634 5304618 -
tctataggaacacaattttg

SEQ ID NO: 39605 - DNA, 20 bp, Artificial Sequence
  Synthetic oligonucleotide; TGG chr11 5304605 5304624 5304608 -
cacaattttggggcaatatg

SEQ ID NO: 39606 - DNA, 20 bp, Artificial Sequence
  Synthetic oligonucleotide; GAG chr11 5304603 5304622 5304606 -
caattttggggcaatatgtg

SEQ ID NO: 39607 - DNA, 20 bp, Artificial Sequence
  Synthetic oligonucleotide; AAG chr11 5304594 5304613 5304597 -
ggcaatatgtggagatgaaa

SEQ ID NO: 39608 - DNA, 20 bp, Artificial Sequence
  Synthetic oligonucleotide; TGG chr11 5304591 5304610 5304594 -
aatatgtggagatgaaaaag

SEQ ID NO: 39609 - DNA, 20 bp, Artificial Sequence
  Synthetic oligonucleotide; CAG chr11 5304585 5304604 5304588 -
tggagatgaaaaagtggatt

SEQ ID NO: 39610 - DNA, 20 bp, Artificial Sequence
  Synthetic oligonucleotide; AGG chr11 5304584 5304603 5304587 -
ggagatgaaaaagtggattc

SEQ ID NO: 39611 - DNA, 20 bp, Artificial Sequence
  Synthetic oligonucleotide; GGG chr11 5304583 5304602 5304586 -
gagatgaaaaagtggattca

SEQ ID NO: 39612 - DNA, 20 bp, Artificial Sequence
  Synthetic oligonucleotide; GGG chr11 5304582 5304601 5304585 -
agatgaaaaagtggattcag

SEQ ID NO: 39613 - DNA, 20 bp, Artificial Sequence
  Synthetic oligonucleotide; CAG chr11 5304567 5304586 5304570 -
ttcaggggacactgattgta

SEQ ID NO: 39614 - DNA, 20 bp, Artificial Sequence
  Synthetic oligonucleotide; AGG chr11 5304566 5304585 5304569 -
tcaggggacactgattgtac

SEQ ID NO: 39615 - DNA, 20 bp, Artificial Sequence
  Synthetic oligonucleotide; GGG chr11 5304565 5304584 5304568 -
caggggacactgattgtaca

SEQ ID NO: 39616 - DNA, 20 bp, Artificial Sequence
  Synthetic oligonucleotide; CAG chr11 5304556 5304575 5304559 -
ctgattgtacagggcacttg

SEQ ID NO: 39617 - DNA, 20 bp, Artificial Sequence
  Synthetic oligonucleotide; TGG chr11 5304547 5304566 5304550 -
cagggcacttgcagattatc

SEQ ID NO: 39618 - DNA, 20 bp, Artificial Sequence
  Synthetic oligonucleotide; CGG chr11 5304537 5304556 5304540 -
gcagattatctggaactaaa

SEQ ID NO: 39619 - DNA, 20 bp, Artificial Sequence
  Synthetic oligonucleotide; AAG chr11 5304534 5304553 5304537 -
gattatctggaactaaacgg

SEQ ID NO: 39620 - DNA, 20 bp, Artificial Sequence
  Synthetic oligonucleotide; TAG chr11 5304481 5304500 5304484 -
ctctttttgtcttctcattt

SEQ ID NO: 39621 - DNA, 20 bp, Artificial Sequence
  Synthetic oligonucleotide; TGG chr11 5304462 5304481 5304465 -
ttagtttatgtctttataaa

SEQ ID NO: 39622 - DNA, 20 bp, Artificial Sequence
  Synthetic oligonucleotide; CAG chr11 5304450 5304469 5304453 -
tttataaatggtttcctgaa

SEQ ID NO: 39623 - DNA, 20 bp, Artificial Sequence
  Synthetic oligonucleotide; AAG chr11 5304442 5304461 5304445 -
tggtttcctgaacagttcct

SEQ ID NO: 39624 - DNA, 20 bp, Artificial Sequence
  Synthetic oligonucleotide; CAG chr11 5304431 5304450 5304434 -
acagttcctaagctttttgt

SEQ ID NO: 39625 - DNA, 20 bp, Artificial Sequence
  Synthetic oligonucleotide; TGG chr11 5304426 5304445 5304429 -
tcctaagctttttgtcagca

SEQ ID NO: 39626 - DNA, 20 bp, Artificial Sequence
  Synthetic oligonucleotide; AAG chr11 5304422 5304441 5304425 -
aagctttttgtcagcatggc

SEQ ID NO: 39627 - DNA, 20 bp, Artificial Sequence
  Synthetic oligonucleotide; AAG chr11 5304416 5304435 5304419 -
tttgtcagcatggcaagttg

SEQ ID NO: 39628 - DNA, 20 bp, Artificial Sequence
  Synthetic oligonucleotide; AAG chr11 5304413 5304432 5304416 -
gtcagcatggcaagttgaag

SEQ ID NO: 39629 - DNA, 20 bp, Artificial Sequence
  Synthetic oligonucleotide; TGG chr11 5304407 5304426 5304410 -
atggcaagttgaagaagctc

SEQ ID NO: 39630 - DNA, 20 bp, Artificial Sequence
  Synthetic oligonucleotide; TGG chr11 5304400 5304419 5304403 -
gttgaagaagctctggatga

SEQ ID NO: 39631 - DNA, 20 bp, Artificial Sequence
  Synthetic oligonucleotide; CAG chr11 5304383 5304402 5304386 -
tgatggatctatgttacctt

SEQ ID NO: 39632 - DNA, 20 bp, Artificial Sequence
  Synthetic oligonucleotide; GAG chr11 5304372 5304391 5304375 -
tgttaccttcagaaactctt

SEQ ID NO: 39633 - DNA, 20 bp, Artificial Sequence
  Synthetic oligonucleotide; AGG chr11 5304371 5304390 5304374 -
gttaccttcagaaactcttg

SEQ ID NO: 39634 - DNA, 20 bp, Artificial Sequence
  Synthetic oligonucleotide; TGG chr11 5304364 5304383 5304367 -
tcagaaactcttgaggactc

SEQ ID NO: 39635 - DNA, 20 bp, Artificial Sequence
  Synthetic oligonucleotide; GGG chr11 5304363 5304382 5304366 -
cagaaactcttgaggactct

SEQ ID NO: 39636 - DNA, 20 bp, Artificial Sequence
  Synthetic oligonucleotide; TAG chr11 5304359 5304378 5304362 -
aactcttgaggactctggga

SEQ ID NO: 39637 - DNA, 20 bp, Artificial Sequence
  Synthetic oligonucleotide; AAG chr11 5304347 5304366 5304350 -
ctctgggatagttgctgtca

SEQ ID NO: 39638 - DNA, 20 bp, Artificial Sequence
  Synthetic oligonucleotide; CAG chr11 5304341 5304360 5304344 -
gatagttgctgtcaaagaat

SEQ ID NO: 39639 - DNA, 20 bp, Artificial Sequence
  Synthetic oligonucleotide; AAG chr11 5304334 5304353 5304337 -
gctgtcaaagaatcagtcca

SEQ ID NO: 39640 - DNA, 20 bp, Artificial Sequence
  Synthetic oligonucleotide; AGG chr11 5304333 5304352 5304336 -
ctgtcaaagaatcagtccaa

SEQ ID NO: 39641 - DNA, 20 bp, Artificial Sequence
  Synthetic oligonucleotide; CAG chr11 5304326 5304345 5304329 -
agaatcagtccaaaggcact

SEQ ID NO: 39642 - DNA, 20 bp, Artificial Sequence
  Synthetic oligonucleotide; AAG chr11 5304322 5304341 5304325 -
tcagtccaaaggcactcaga

SEQ ID NO: 39643 - DNA, 20 bp, Artificial Sequence
  Synthetic oligonucleotide; AGG chr11 5304321 5304340 5304324 -
cagtccaaaggcactcagaa

SEQ ID NO: 39644 - DNA, 20 bp, Artificial Sequence
  Synthetic oligonucleotide; GGG chr11 5304320 5304339 5304323 -
agtccaaaggcactcagaaa

SEQ ID NO: 39645 - DNA, 20 bp, Artificial Sequence
  Synthetic oligonucleotide; GGG chr11 5304319 5304338 5304322 -
gtccaaaggcactcagaaag

SEQ ID NO: 39646 - DNA, 20 bp, Artificial Sequence
  Synthetic oligonucleotide; AAG chr11 5304315 5304334 5304318 -
aaaggcactcagaaaggggc

SEQ ID NO: 39647 - DNA, 20 bp, Artificial Sequence
  Synthetic oligonucleotide; GAG chr11 5304313 5304332 5304316 -
aggcactcagaaaggggcaa

SEQ ID NO: 39648 - DNA, 20 bp, Artificial Sequence
  Synthetic oligonucleotide; CAG chr11 5304308 5304327 5304311 -
ctcagaaaggggcaagagaa

SEQ ID NO: 39649 - DNA, 20 bp, Artificial Sequence
  Synthetic oligonucleotide; GAG chr11 5304304 5304323 5304307 -
gaaaggggcaagagaacagt

SEQ ID NO: 39650 - DNA, 20 bp, Artificial Sequence
  Synthetic oligonucleotide; CAG chr11 5304300 5304319 5304303 -
ggggcaagagaacagtgagc

SEQ ID NO: 39651 - DNA, 20 bp, Artificial Sequence
  Synthetic oligonucleotide; CAG chr11 5304281 5304300 5304284 -
ccagtcatttttgcatccct

SEQ ID NO: 39652 - DNA, 20 bp, Artificial Sequence
  Synthetic oligonucleotide; AGG chr11 5304280 5304299 5304283 -
cagtcatttttgcatccctc

SEQ ID NO: 39653 - DNA, 20 bp, Artificial Sequence
  Synthetic oligonucleotide; GGG chr11 5304279 5304298 5304282 -
agtcatttttgcatccctca

SEQ ID NO: 39654 - DNA, 20 bp, Artificial Sequence
  Synthetic oligonucleotide; GGG chr11 5304278 5304297 5304281 -
gtcatttttgcatccctcag

SEQ ID NO: 39655 - DNA, 20 bp, Artificial Sequence
  Synthetic oligonucleotide; GGG chr11 5304277 5304296 5304280 -
tcatttttgcatccctcagg

SEQ ID NO: 39656 - DNA, 20 bp, Artificial Sequence
  Synthetic oligonucleotide; GAG chr11 5304259 5304278 5304262 -
gggggcctctatgcttgcct

SEQ ID NO: 39657 - DNA, 20 bp, Artificial Sequence
  Synthetic oligonucleotide; GAG chr11 5304257 5304276 5304260 -
gggcctctatgcttgcctga

SEQ ID NO: 39658 - DNA, 20 bp, Artificial Sequence
  Synthetic oligonucleotide; AAG chr11 5304239 5304258 5304242 -
gagagtgataaattccacta

SEQ ID NO: 39659 - DNA, 20 bp, Artificial Sequence
  Synthetic oligonucleotide; TAG chr11 5304203 5304222 5304206 -
ttttgtcatgtatcacattc

SEQ ID NO: 39660 - DNA, 20 bp, Artificial Sequence
  Synthetic oligonucleotide; AGG chr11 5304202 5304221 5304205 -
tttgtcatgtatcacattct

SEQ ID NO: 39661 - DNA, 20 bp, Artificial Sequence
  Synthetic oligonucleotide; GAG chr11 5304200 5304219 5304203 -
tgtcatgtatcacattctag

SEQ ID NO: 39662 - DNA, 20 bp, Artificial Sequence
  Synthetic oligonucleotide; TAG chr11 5304183 5304202 5304186 -
taggagactccctaaactat

SEQ ID NO: 39663 - DNA, 20 bp, Artificial Sequence
  Synthetic oligonucleotide; AGG chr11 5304182 5304201 5304185 -
aggagactccctaaactatt

SEQ ID NO: 39664 - DNA, 20 bp, Artificial Sequence
  Synthetic oligonucleotide; GGG chr11 5304181 5304200 5304184 -
ggagactccctaaactatta

SEQ ID NO: 39665 - DNA, 20 bp, Artificial Sequence
  Synthetic oligonucleotide; TGG chr11 5304165 5304184 5304168 -
attagggcaactattctccc

SEQ ID NO: 39666 - DNA, 20 bp, Artificial Sequence
  Synthetic oligonucleotide; TGG chr11 5304156 5304175 5304159 -
actattctccctggaatatt

SEQ ID NO: 39667 - DNA, 20 bp, Artificial Sequence
  Synthetic oligonucleotide; GGG chr11 5304155 5304174 5304158 -
ctattctccctggaatattt

SEQ ID NO: 39668 - DNA, 20 bp, Artificial Sequence
  Synthetic oligonucleotide; TGG chr11 5304148 5304167 5304151 -
ccctggaatatttgggtatg

SEQ ID NO: 39669 - DNA, 20 bp, Artificial Sequence
  Synthetic oligonucleotide; CAG chr11 5304144 5304163 5304147 -
ggaatatttgggtatgtgga

SEQ ID NO: 39670 - DNA, 20 bp, Artificial Sequence
  Synthetic oligonucleotide; TGG chr11 5304137 5304156 5304140 -
ttgggtatgtggacagtttc

SEQ ID NO: 39671 - DNA, 20 bp, Artificial Sequence
  Synthetic oligonucleotide; CAG chr11 5304106 5304125 5304109 -
aatttgccacaattaaatgc

SEQ ID NO: 39672 - DNA, 20 bp, Artificial Sequence
  Synthetic oligonucleotide; TAG chr11 5304101 5304120 5304104 -
gccacaattaaatgccagcg

SEQ ID NO: 39673 - DNA, 20 bp, Artificial Sequence
  Synthetic oligonucleotide; TAG chr11 5304089 5304108 5304092 -
tgccagcgtagctgttttgc

SEQ ID NO: 39674 - DNA, 20 bp, Artificial Sequence
  Synthetic oligonucleotide; GAG chr11 5304087 5304106 5304090 -
ccagcgtagctgttttgcta

SEQ ID NO: 39675 - DNA, 20 bp, Artificial Sequence
  Synthetic oligonucleotide; CAG chr11 5304080 5304099 5304083 -
agctgttttgctagagactg

SEQ ID NO: 39676 - DNA, 20 bp, Artificial Sequence
  Synthetic oligonucleotide; TAG chr11 5304069 5304088 5304072 -
tagagactgcagatgttaaa

SEQ ID NO: 39677 - DNA, 20 bp, Artificial Sequence
  Synthetic oligonucleotide; GAG chr11 5304067 5304086 5304070 -
gagactgcagatgttaaata

SEQ ID NO: 39678 - DNA, 20 bp, Artificial Sequence
  Synthetic oligonucleotide; AGG chr11 5304066 5304085 5304069 -
agactgcagatgttaaatag

SEQ ID NO: 39679 - DNA, 20 bp, Artificial Sequence
  Synthetic oligonucleotide; GGG chr11 5304065 5304084 5304068 -
gactgcagatgttaaataga

SEQ ID NO: 39680 - DNA, 20 bp, Artificial Sequence
  Synthetic oligonucleotide; TAG chr11 5304055 5304074 5304058 -
gttaaatagagggctatctt

SEQ ID NO: 39681 - DNA, 20 bp, Artificial Sequence
  Synthetic oligonucleotide; AGG chr11 5304054 5304073 5304057 -
ttaaatagagggctatcttt

SEQ ID NO: 39682 - DNA, 20 bp, Artificial Sequence
  Synthetic oligonucleotide; CAG chr11 5304012 5304031 5304015 -
aattgtattaactatttccc

SEQ ID NO: 39683 - DNA, 20 bp, Artificial Sequence
  Synthetic oligonucleotide; CAG chr11 5303998 5304017 5304001 -
tttccccagtaattaccaca

SEQ ID NO: 39684 - DNA, 20 bp, Artificial Sequence
  Synthetic oligonucleotide; CAG chr11 5303958 5303977 5303961 -
gcatccgcatgtcccaaacg

SEQ ID NO: 39685 - DNA, 20 bp, Artificial Sequence
  Synthetic oligonucleotide; CAG chr11 5303953 5303972 5303956 -
cgcatgtcccaaacgcagct

SEQ ID NO: 39686 - DNA, 20 bp, Artificial Sequence
  Synthetic oligonucleotide; AGG chr11 5303952 5303971 5303955 -
gcatgtcccaaacgcagctc

SEQ ID NO: 39687 - DNA, 20 bp, Artificial Sequence
  Synthetic oligonucleotide; TAG chr11 5303932 5303951 5303935 -
aggttttgaaaacacgacta

SEQ ID NO: 39688 - DNA, 20 bp, Artificial Sequence
  Synthetic oligonucleotide; AAG chr11 5303926 5303945 5303929 -
tgaaaacacgactatagttt

SEQ ID NO: 39689 - DNA, 20 bp, Artificial Sequence
  Synthetic oligonucleotide; CAG chr11 5303917 5303936 5303920 -
gactatagtttaagaataat

SEQ ID NO: 39690 - DNA, 20 bp, Artificial Sequence
  Synthetic oligonucleotide; AGG chr11 5303916 5303935 5303919 -
actatagtttaagaataatc

SEQ ID NO: 39691 - DNA, 20 bp, Artificial Sequence
  Synthetic oligonucleotide; CGG chr11 5303906 5303925 5303909 -
aagaataatcaggcctcctc

SEQ ID NO: 39692 - DNA, 20 bp, Artificial Sequence
  Synthetic oligonucleotide; TGG chr11 5303892 5303911 5303895 -
ctcctccggcttcctccatc

SEQ ID NO: 39693 - DNA, 20 bp, Artificial Sequence
  Synthetic oligonucleotide; TGG chr11 5303880 5303899 5303883 -
cctccatctggtccattatc

SEQ ID NO: 39694 - DNA, 20 bp, Artificial Sequence
  Synthetic oligonucleotide; GGG chr11 5303879 5303898 5303882 -
ctccatctggtccattatct

SEQ ID NO: 39695 - DNA, 20 bp, Artificial Sequence
  Synthetic oligonucleotide; CAG chr11 5303873 5303892 5303876 -
ctggtccattatctgggtga

SEQ ID NO: 39696 - DNA, 20 bp, Artificial Sequence
  Synthetic oligonucleotide; TAG chr11 5303870 5303889 5303873 -
gtccattatctgggtgacag

SEQ ID NO: 39697 - DNA, 20 bp, Artificial Sequence
  Synthetic oligonucleotide; AAG chr11 5303859 5303878 5303862 -
gggtgacagtagatccaaat

SEQ ID NO: 39698 - DNA, 20 bp, Artificial Sequence
  Synthetic oligonucleotide; TGG chr11 5303856 5303875 5303859 -
tgacagtagatccaaataag

SEQ ID NO: 39699 - DNA, 20 bp, Artificial Sequence
  Synthetic oligonucleotide; TAG chr11 5303852 5303871 5303855 -
agtagatccaaataagtggt

SEQ ID NO: 39700 - DNA, 20 bp, Artificial Sequence
  Synthetic oligonucleotide; TGG chr11 5303826 5303845 5303829 -
ttatcctgtacaacaaattt

SEQ ID NO: 39701 - DNA, 20 bp, Artificial Sequence
  Synthetic oligonucleotide; AAG chr11 5303804 5303823 5303807 -
gcattaatccattctcttat

SEQ ID NO: 39702 - DNA, 20 bp, Artificial Sequence
  Synthetic oligonucleotide; AGG chr11 5303803 5303822 5303806 -
cattaatccattctcttata

SEQ ID NO: 39703 - DNA, 20 bp, Artificial Sequence
  Synthetic oligonucleotide; TGG chr11 5303794 5303813 5303797 -
attctcttataaggcaacat

SEQ ID NO: 39704 - DNA, 20 bp, Artificial Sequence
  Synthetic oligonucleotide; AAG chr11 5303791 5303810 5303794 -
ctcttataaggcaacattgg

SEQ ID NO: 39705 - DNA, 20 bp, Artificial Sequence
  Synthetic oligonucleotide; AGG chr11 5303790 5303809 5303793 -
tcttataaggcaacattgga

SEQ ID NO: 39706 - DNA, 20 bp, Artificial Sequence
  Synthetic oligonucleotide; AAG chr11 5303785 5303804 5303788 -
taaggcaacattggaaggtt

SEQ ID NO: 39707 - DNA, 20 bp, Artificial Sequence
  Synthetic oligonucleotide; GAG chr11 5303783 5303802 5303786 -
aggcaacattggaaggttaa

SEQ ID NO: 39708 - DNA, 20 bp, Artificial Sequence
  Synthetic oligonucleotide; TGG chr11 5303751 5303770 5303754 -
tgatatacacatcactcctg

SEQ ID NO: 39709 - DNA, 20 bp, Artificial Sequence
  Synthetic oligonucleotide; CGG chr11 5303748 5303767 5303751 -
tatacacatcactcctgtgg

SEQ ID NO: 39710 - DNA, 20 bp, Artificial Sequence
  Synthetic oligonucleotide; TAG chr11 5303745 5303764 5303748 -
acacatcactcctgtggcgg

SEQ ID NO: 39711 - DNA, 20 bp, Artificial Sequence
  Synthetic oligonucleotide; AAG chr11 5303740 5303759 5303743 -
tcactcctgtggcggtagat

SEQ ID NO: 39712 - DNA, 20 bp, Artificial Sequence
  Synthetic oligonucleotide; AAG chr11 5303725 5303744 5303728 -
tagataagttctgccacatt

SEQ ID NO: 39713 - DNA, 20 bp, Artificial Sequence
  Synthetic oligonucleotide; CAG chr11 5303715 5303734 5303718 -
ctgccacattaagcactatg

SEQ ID NO: 39714 - DNA, 20 bp, Artificial Sequence
  Synthetic oligonucleotide; AGG chr11 5303714 5303733 5303717 -
tgccacattaagcactatgc

SEQ ID NO: 39715 - DNA, 20 bp, Artificial Sequence
  Synthetic oligonucleotide; CAG chr11 5303703 5303722 5303706 -
gcactatgcaggtcataatt

SEQ ID NO: 39716 - DNA, 20 bp, Artificial Sequence
  Synthetic oligonucleotide; TGG chr11 5303700 5303719 5303703 -
ctatgcaggtcataattcag

SEQ ID NO: 39717 - DNA, 20 bp, Artificial Sequence
  Synthetic oligonucleotide; AAG chr11 5303694 5303713 5303697 -
aggtcataattcagtggatc

SEQ ID NO: 39718 - DNA, 20 bp, Artificial Sequence
  Synthetic oligonucleotide; TAG chr11 5303690 5303709 5303693 -
cataattcagtggatcaagt

SEQ ID NO: 39719 - DNA, 20 bp, Artificial Sequence
  Synthetic oligonucleotide; TAG chr11 5303686 5303705 5303689 -
attcagtggatcaagttagt

SEQ ID NO: 39720 - DNA, 20 bp, Artificial Sequence
  Synthetic oligonucleotide; CAG chr11 5303683 5303702 5303686 -
cagtggatcaagttagttag

SEQ ID NO: 39721 - DNA, 20 bp, Artificial Sequence
  Synthetic oligonucleotide; TAG chr11 5303674 5303693 5303677 -
aagttagttagcagtgtttt

SEQ ID NO: 39722 - DNA, 20 bp, Artificial Sequence
  Synthetic oligonucleotide; TAG chr11 5303657 5303676 5303660 -
ttttagtatccatatgaaca

SEQ ID NO: 39723 - DNA, 20 bp, Artificial Sequence
  Synthetic oligonucleotide; CAG chr11 5303642 5303661 5303645 -
gaacatagtctctgctactg

SEQ ID NO: 39724 - DNA, 20 bp, Artificial Sequence
  Synthetic oligonucleotide; TAG chr11 5303635 5303654 5303638 -
gtctctgctactgcagtgcc

SEQ ID NO: 39725 - DNA, 20 bp, Artificial Sequence
  Synthetic oligonucleotide; CAG chr11 5303612 5303631 5303615 -
actgacatttttgttatcaa

SEQ ID NO: 39726 - DNA, 20 bp, Artificial Sequence
  Synthetic oligonucleotide; AAG chr11 5303600 5303619 5303603 -
gttatcaacagtgtcccctg

SEQ ID NO: 39727 - DNA, 20 bp, Artificial Sequence
  Synthetic oligonucleotide; TAG chr11 5303597 5303616 5303600 -
atcaacagtgtcccctgaag

SEQ ID NO: 39728 - DNA, 20 bp, Artificial Sequence
  Synthetic oligonucleotide; CAG chr11 5303594 5303613 5303597 -
aacagtgtcccctgaagtag

SEQ ID NO: 39729 - DNA, 20 bp, Artificial Sequence
  Synthetic oligonucleotide; AAG chr11 5303582 5303601 5303585 -
tgaagtagcagccctttcaa

SEQ ID NO: 39730 - DNA, 20 bp, Artificial Sequence
  Synthetic oligonucleotide; TAG chr11 5303529 5303548 5303532 -
ccaccaataattgcttatat

SEQ ID NO: 39731 - DNA, 20 bp, Artificial Sequence
  Synthetic oligonucleotide; GAG chr11 5303527 5303546 5303530 -
accaataattgcttatatta

SEQ ID NO: 39732 - DNA, 20 bp, Artificial Sequence
  Synthetic oligonucleotide; TAG chr11 5303475 5303494 5303478 -
tataattattattgtttcta

SEQ ID NO: 39733 - DNA, 20 bp, Artificial Sequence
  Synthetic oligonucleotide; AGG chr11 5303474 5303493 5303477 -
ataattattattgtttctat

SEQ ID NO: 39734 - DNA, 20 bp, Artificial Sequence
  Synthetic oligonucleotide; AAG chr11 5303455 5303474 5303458 -
taggtttttataaaataaaa

SEQ ID NO: 39735 - DNA, 20 bp, Artificial Sequence
  Synthetic oligonucleotide; AGG chr11 5303454 5303473 5303457 -
aggtttttataaaataaaaa

SEQ ID NO: 39736 - DNA, 20 bp, Artificial Sequence
  Synthetic oligonucleotide; AAG chr11 5303447 5303466 5303450 -
tataaaataaaaaaggtgca

SEQ ID NO: 39737 - DNA, 20 bp, Artificial Sequence
  Synthetic oligonucleotide; AAG chr11 5303408 5303427 5303411 -
ttttactgaattacacttca

SEQ ID NO: 39738 - DNA, 20 bp, Artificial Sequence
  Synthetic oligonucleotide; AGG chr11 5303407 5303426 5303410 -
tttactgaattacacttcaa

SEQ ID NO: 39739 - DNA, 20 bp, Artificial Sequence
  Synthetic oligonucleotide; CGG chr11 5303401 5303420 5303404 -
gaattacacttcaaaggtgt

SEQ ID NO: 39740 - DNA, 20 bp, Artificial Sequence
  Synthetic oligonucleotide; TAG chr11 5303398 5303417 5303401 -
ttacacttcaaaggtgtcgg

SEQ ID NO: 39741 - DNA, 20 bp, Artificial Sequence
  Synthetic oligonucleotide; AAG chr11 5303365 5303384 5303368 -
aatattgaatgatattttaa

SEQ ID NO: 39742 - DNA, 20 bp, Artificial Sequence
  Synthetic oligonucleotide; TGG chr11 5303358 5303377 5303361 -
aatgatattttaaaagactc

SEQ ID NO: 39743 - DNA, 20 bp, Artificial Sequence
  Synthetic oligonucleotide; CAG chr11 5303348 5303367 5303351 -
taaaagactctggacacata

SEQ ID NO: 39744 - DNA, 20 bp, Artificial Sequence
  Synthetic oligonucleotide; TGG chr11 5303332 5303351 5303335 -
catacagaatcaattgaatt

SEQ ID NO: 39745 - DNA, 20 bp, Artificial Sequence
  Synthetic oligonucleotide; GGG chr11 5303331 5303350 5303334 -
atacagaatcaattgaattt

SEQ ID NO: 39746 - DNA, 20 bp, Artificial Sequence
  Synthetic oligonucleotide; GAG chr11 5303329 5303348 5303332 -
acagaatcaattgaatttgg

SEQ ID NO: 39747 - DNA, 20 bp, Artificial Sequence
  Synthetic oligonucleotide; GAG chr11 5303321 5303340 5303324 -
aattgaatttgggagaaact

SEQ ID NO: 39748 - DNA, 20 bp, Artificial Sequence
  Synthetic oligonucleotide; TAG chr11 5303309 5303328 5303312 -
gagaaactgagtttcccttg

SEQ ID NO: 39749 - DNA, 20 bp, Artificial Sequence
  Synthetic oligonucleotide; TGG chr11 5303267 5303286 5303270 -
aaacctgctacaaaatttct

SEQ ID NO: 39750 - DNA, 20 bp, Artificial Sequence
  Synthetic oligonucleotide; AAG chr11 5303233 5303252 5303236 -
caaaaatcttgactttgtaa

SEQ ID NO: 39751 - DNA, 20 bp, Artificial Sequence
  Synthetic oligonucleotide; TAG chr11 5303195 5303214 5303198 -
aaataaatattaattataaa

SEQ ID NO: 39752 - DNA, 20 bp, Artificial Sequence
  Synthetic oligonucleotide; TAG chr11 5303186 5303205 5303189 -
ttaattataaatagacttca

SEQ ID NO: 39753 - DNA, 20 bp, Artificial Sequence
  Synthetic oligonucleotide; GAG chr11 5303175 5303194 5303178 -
tagacttcatagttccctat

SEQ ID NO: 39754 - DNA, 20 bp, Artificial Sequence
  Synthetic oligonucleotide; AGG chr11 5303174 5303193 5303177 -
agacttcatagttccctatg

SEQ ID NO: 39755 - DNA, 20 bp, Artificial Sequence
  Synthetic oligonucleotide; GAG chr11 5303147 5303166 5303150 -
ttgtgaatttttctcaatac

SEQ ID NO: 39756 - DNA, 20 bp, Artificial Sequence
  Synthetic oligonucleotide; CAG chr11 5303139 5303158 5303142 -
ttttctcaatacgagtctta

SEQ ID NO: 39757 - DNA, 20 bp, Artificial Sequence
  Synthetic oligonucleotide; TAG chr11 5303124 5303143 5303127 -
tcttacagattcataatgat

SEQ ID NO: 39758 - DNA, 20 bp, Artificial Sequence
  Synthetic oligonucleotide; GAG chr11 5303122 5303141 5303125 -
ttacagattcataatgatta

SEQ ID NO: 39759 - DNA, 20 bp, Artificial Sequence
  Synthetic oligonucleotide; AGG chr11 5303121 5303140 5303124 -
tacagattcataatgattag

SEQ ID NO: 39760 - DNA, 20 bp, Artificial Sequence
  Synthetic oligonucleotide; GGG chr11 5303120 5303139 5303123 -
acagattcataatgattaga

SEQ ID NO: 39761 - DNA, 20 bp, Artificial Sequence
  Synthetic oligonucleotide; AAG chr11 5303112 5303131 5303115 -
ataatgattagagggtctgt

SEQ ID NO: 39762 - DNA, 20 bp, Artificial Sequence
  Synthetic oligonucleotide; CAG chr11 5303098 5303117 5303101 -
gtctgtaagattgtctccat

SEQ ID NO: 39763 - DNA, 20 bp, Artificial Sequence
  Synthetic oligonucleotide; TAG chr11 5303090 5303109 5303093 -
gattgtctccatcagcaaca

SEQ ID NO: 39764 - DNA, 20 bp, Artificial Sequence
  Synthetic oligonucleotide; TGG chr11 5303070 5303089 5303073 -
tagttgccgtattttctctc

SEQ ID NO: 39765 - DNA, 20 bp, Artificial Sequence
  Synthetic oligonucleotide; GGG chr11 5303069 5303088 5303072 -
agttgccgtattttctctct

SEQ ID NO: 39766 - DNA, 20 bp, Artificial Sequence
  Synthetic oligonucleotide; GAG chr11 5303067 5303086 5303070 -
ttgccgtattttctctctgg

SEQ ID NO: 39767 - DNA, 20 bp, Artificial Sequence
  Synthetic oligonucleotide; TAG chr11 5303049 5303068 5303052 -
gggagtgcttatcttttccc

SEQ ID NO: 39768 - DNA, 20 bp, Artificial Sequence
  Synthetic oligonucleotide; TGG chr11 5303043 5303062 5303046 -
gcttatcttttccctagaac

SEQ ID NO: 39769 - DNA, 20 bp, Artificial Sequence
  Synthetic oligonucleotide; AAG chr11 5303033 5303052 5303036 -
tccctagaactggttgtgtg

SEQ ID NO: 39770 - DNA, 20 bp, Artificial Sequence
  Synthetic oligonucleotide; CAG chr11 5302987 5303006 5302990 -
ccgatattactattgccctt

SEQ ID NO: 39771 - DNA, 20 bp, Artificial Sequence
  Synthetic oligonucleotide; AAG chr11 5302953 5302972 5302956 -
tacgaatctatgactctaac

SEQ ID NO: 39772 - DNA, 20 bp, Artificial Sequence
  Synthetic oligonucleotide; TAG chr11 5302947 5302966 5302950 -
tctatgactctaacaagtat

SEQ ID NO: 39773 - DNA, 20 bp, Artificial Sequence
  Synthetic oligonucleotide; AGG chr11 5302946 5302965 5302949 -
ctatgactctaacaagtatt

SEQ ID NO: 39774 - DNA, 20 bp, Artificial Sequence
  Synthetic oligonucleotide; TGG chr11 5302937 5302956 5302940 -
taacaagtattaggcttttg

SEQ ID NO: 39775 - DNA, 20 bp, Artificial Sequence
  Synthetic oligonucleotide; GAG chr11 5302935 5302954 5302938 -
acaagtattaggcttttgtg

SEQ ID NO: 39776 - DNA, 20 bp, Artificial Sequence
  Synthetic oligonucleotide; AGG chr11 5302934 5302953 5302937 -
caagtattaggcttttgtgg

SEQ ID NO: 39777 - DNA, 20 bp, Artificial Sequence
  Synthetic oligonucleotide; TAG chr11 5302922 5302941 5302925 -
ttttgtggaggccctcattg

SEQ ID NO: 39778 - DNA, 20 bp, Artificial Sequence
  Synthetic oligonucleotide; AAG chr11 5302919 5302938 5302922 -
tgtggaggccctcattgtag

SEQ ID NO: 39779 - DNA, 20 bp, Artificial Sequence
  Synthetic oligonucleotide; GAG chr11 5302891 5302910 5302894 -
ccttaaaatatttccgttat

SEQ ID NO: 39780 - DNA, 20 bp, Artificial Sequence
  Synthetic oligonucleotide; GAG chr11 5302878 5302897 5302881 -
ccgttatgagcttccaacat

SEQ ID NO: 39781 - DNA, 20 bp, Artificial Sequence
  Synthetic oligonucleotide; CAG chr11 5302837 5302856 5302840 -
gtccctaatgtgccaaaact

SEQ ID NO: 39782 - DNA, 20 bp, Artificial Sequence
  Synthetic oligonucleotide; CAG chr11 5302826 5302845 5302829 -
gccaaaactcagactttttg

SEQ ID NO: 39783 - DNA, 20 bp, Artificial Sequence
  Synthetic oligonucleotide; TAG chr11 5302821 5302840 5302824 -
aactcagactttttgcagca

SEQ ID NO: 39784 - DNA, 20 bp, Artificial Sequence
  Synthetic oligonucleotide; AGG chr11 5302820 5302839 5302823 -
actcagactttttgcagcat

SEQ ID NO: 39785 - DNA, 20 bp, Artificial Sequence
  Synthetic oligonucleotide; GGG chr11 5302819 5302838 5302822 -
ctcagactttttgcagcata

SEQ ID NO: 39786 - DNA, 20 bp, Artificial Sequence
  Synthetic oligonucleotide; GAG chr11 5302808 5302827 5302811 -
tgcagcatagggaacttgct

SEQ ID NO: 39787 - DNA, 20 bp, Artificial Sequence
  Synthetic oligonucleotide; AAG chr11 5302801 5302820 5302804 -
tagggaacttgctgagtccc

SEQ ID NO: 39788 - DNA, 20 bp, Artificial Sequence
  Synthetic oligonucleotide; GAG chr11 5302792 5302811 5302795 -
tgctgagtcccaagtccact

SEQ ID NO: 39789 - DNA, 20 bp, Artificial Sequence
  Synthetic oligonucleotide; GAG chr11 5302769 5302788 5302772 -
taattacacctttctaaaat

SEQ ID NO: 39790 - DNA, 20 bp, Artificial Sequence
  Synthetic oligonucleotide; CAG chr11 5302743 5302762 5302746 -
actaactttacccacttgtt

SEQ ID NO: 39791 - DNA, 20 bp, Artificial Sequence
  Synthetic oligonucleotide; AGG chr11 5302742 5302761 5302745 -
ctaactttacccacttgttc

SEQ ID NO: 39792 - DNA, 20 bp, Artificial Sequence
  Synthetic oligonucleotide; CAG chr11 5302735 5302754 5302738 -
tacccacttgttcaggtgtt

SEQ ID NO: 39793 - DNA, 20 bp, Artificial Sequence
  Synthetic oligonucleotide; TGG chr11 5302725 5302744 5302728 -
ttcaggtgttcagatttctg

SEQ ID NO: 39794 - DNA, 20 bp, Artificial Sequence
  Synthetic oligonucleotide; TAG chr11 5302712 5302731 5302715 -
atttctgtggaaactcacaa

SEQ ID NO: 39795 - DNA, 20 bp, Artificial Sequence
  Synthetic oligonucleotide; GAG chr11 5302707 5302726 5302710 -
tgtggaaactcacaatagat

SEQ ID NO: 39796 - DNA, 20 bp, Artificial Sequence
  Synthetic oligonucleotide; TAG chr11 5302669 5302688 5302672 -
ttattttattttatttttta

SEQ ID NO: 39797 - DNA, 20 bp, Artificial Sequence
  Synthetic oligonucleotide; GAG chr11 5302667 5302686 5302670 -
attttattttattttttata

SEQ ID NO: 39798 - DNA, 20 bp, Artificial Sequence
  Synthetic oligonucleotide; CAG chr11 5302663 5302682 5302666 -
tattttattttttatagaga

SEQ ID NO: 39799 - DNA, 20 bp, Artificial Sequence
  Synthetic oligonucleotide; GAG chr11 5302661 5302680 5302664 -
ttttattttttatagagaca

SEQ ID NO: 39800 - DNA, 20 bp, Artificial Sequence
  Synthetic oligonucleotide; CAG chr11 5302643 5302662 5302646 -
cagagtctgactccgttgcc

SEQ ID NO: 39801 - DNA, 20 bp, Artificial Sequence
  Synthetic oligonucleotide; AGG chr11 5302642 5302661 5302645 -
agagtctgactccgttgccc

SEQ ID NO: 39802 - DNA, 20 bp, Artificial Sequence
  Synthetic oligonucleotide; TGG chr11 5302638 5302657 5302641 -
tctgactccgttgcccaggc

SEQ ID NO: 39803 - DNA, 20 bp, Artificial Sequence
  Synthetic oligonucleotide; GAG chr11 5302636 5302655 5302639 -
tgactccgttgcccaggctg

SEQ ID NO: 39804 - DNA, 20 bp, Artificial Sequence
  Synthetic oligonucleotide; GAG chr11 5302634 5302653 5302637 -
actccgttgcccaggctgga

SEQ ID NO: 39805 - DNA, 20 bp, Artificial Sequence
  Synthetic oligonucleotide; CAG chr11 5302631 5302650 5302634 -
ccgttgcccaggctggagag

SEQ ID NO: 39806 - DNA, 20 bp, Artificial Sequence
  Synthetic oligonucleotide; TAG chr11 5302617 5302636 5302620 -
ggagagcagtgctgcaatca

SEQ ID NO: 39807 - DNA, 20 bp, Artificial Sequence
  Synthetic oligonucleotide; CAG chr11 5302607 5302626 5302610 -
gctgcaatcatagctccctg

SEQ ID NO: 39808 - DNA, 20 bp, Artificial Sequence
  Synthetic oligonucleotide; CAG chr11 5302599 5302618 5302602 -
catagctccctgcagcctca

SEQ ID NO: 39809 - DNA, 20 bp, Artificial Sequence
  Synthetic oligonucleotide; TGG chr11 5302593 5302612 5302596 -
tccctgcagcctcacagtcc

SEQ ID NO: 39810 - DNA, 20 bp, Artificial Sequence
  Synthetic oligonucleotide; GGG chr11 5302592 5302611 5302595 -
ccctgcagcctcacagtcct

SEQ ID NO: 39811 - DNA, 20 bp, Artificial Sequence
  Synthetic oligonucleotide; CAG chr11 5302587 5302606 5302590 -
cagcctcacagtcctgggct

SEQ ID NO: 39812 - DNA, 20 bp, Artificial Sequence
  Synthetic oligonucleotide; AGG chr11 5302586 5302605 5302589 -
agcctcacagtcctgggctc

SEQ ID NO: 39813 - DNA, 20 bp, Artificial Sequence
  Synthetic oligonucleotide; CAG chr11 5302564 5302583 5302567 -
gtgatgtgtgcccctgtgcc

SEQ ID NO: 39814 - DNA, 20 bp, Artificial Sequence
  Synthetic oligonucleotide; TGG chr11 5302535 5302554 5302538 -
tttatcttttcttttttttt

SEQ ID NO: 39815 - DNA, 20 bp, Artificial Sequence
  Synthetic oligonucleotide; TGG chr11 5302532 5302551 5302535 -
atcttttcttttttttttgg

SEQ ID NO: 39816 - DNA, 20 bp, Artificial Sequence
  Synthetic oligonucleotide; GAG chr11 5302530 5302549 5302533 -
cttttcttttttttttggtg

SEQ ID NO: 39817 - DNA, 20 bp, Artificial Sequence
  Synthetic oligonucleotide; AGG chr11 5302529 5302548 5302532 -
ttttcttttttttttggtgg

SEQ ID NO: 39818 - DNA, 20 bp, Artificial Sequence
  Synthetic oligonucleotide; CAG chr11 5302526 5302545 5302529 -
tcttttttttttggtggagg

SEQ ID NO: 39819 - DNA, 20 bp, Artificial Sequence
  Synthetic oligonucleotide; AGG chr11 5302525 5302544 5302528 -
cttttttttttggtggaggc

SEQ ID NO: 39820 - DNA, 20 bp, Artificial Sequence
  Synthetic oligonucleotide; GGG chr11 5302524 5302543 5302527 -
ttttttttttggtggaggca

SEQ ID NO: 39821 - DNA, 20 bp, Artificial Sequence
  Synthetic oligonucleotide; TAG chr11 5302519 5302538 5302522 -
tttttggtggaggcagggtc

SEQ ID NO: 39822 - DNA, 20 bp, Artificial Sequence
  Synthetic oligonucleotide; CAG chr11 5302506 5302525 5302509 -
cagggtctagctatgttgcc

SEQ ID NO: 39823 - DNA, 20 bp, Artificial Sequence
  Synthetic oligonucleotide; AGG chr11 5302505 5302524 5302508 -
agggtctagctatgttgccc

SEQ ID NO: 39824 - DNA, 20 bp, Artificial Sequence
  Synthetic oligonucleotide; TGG chr11 5302501 5302520 5302504 -
tctagctatgttgcccaggc

SEQ ID NO: 39825 - DNA, 20 bp, Artificial Sequence
  Synthetic oligonucleotide; GGG chr11 5302500 5302519 5302503 -
ctagctatgttgcccaggct

SEQ ID NO: 39826 - DNA, 20 bp, Artificial Sequence
  Synthetic oligonucleotide; CAG chr11 5302482 5302501 5302485 -
ctgggttctcttcttattca

SEQ ID NO: 39827 - DNA, 20 bp, Artificial Sequence
  Synthetic oligonucleotide; GAG chr11 5302472 5302491 5302475 -
ttcttattcacagtccactt

SEQ ID NO: 39828 - DNA, 20 bp, Artificial Sequence
  Synthetic oligonucleotide; TAG chr11 5302468 5302487 5302471 -
tattcacagtccacttgaga

SEQ ID NO: 39829 - DNA, 20 bp, Artificial Sequence
  Synthetic oligonucleotide; CAG chr11 5302443 5302462 5302446 -
acattgatcacaatatttct

SEQ ID NO: 39830 - DNA, 20 bp, Artificial Sequence
  Synthetic oligonucleotide; AAG chr11 5302425 5302444 5302428 -
ctcagtcatttctattgaat

SEQ ID NO: 39831 - DNA, 20 bp, Artificial Sequence
  Synthetic oligonucleotide; CAG chr11 5302413 5302432 5302416 -
tattgaataagcattttcct

SEQ ID NO: 39832 - DNA, 20 bp, Artificial Sequence
  Synthetic oligonucleotide; TGG chr11 5302410 5302429 5302413 -
tgaataagcattttcctcag

SEQ ID NO: 39833 - DNA, 20 bp, Artificial Sequence
  Synthetic oligonucleotide; CAG chr11 5302394 5302413 5302397 -
tcagtggttaatcctaaata

SEQ ID NO: 39834 - DNA, 20 bp, Artificial Sequence
  Synthetic oligonucleotide; TAG chr11 5302382 5302401 5302385 -
cctaaatacagctgtcccat

SEQ ID NO: 39835 - DNA, 20 bp, Artificial Sequence
  Synthetic oligonucleotide; AAG chr11 5302375 5302394 5302378 -
acagctgtcccattagtttc

SEQ ID NO: 39836 - DNA, 20 bp, Artificial Sequence
  Synthetic oligonucleotide; GAG chr11 5302373 5302392 5302376 -
agctgtcccattagtttcaa

SEQ ID NO: 39837 - DNA, 20 bp, Artificial Sequence
  Synthetic oligonucleotide; TGG chr11 5302347 5302366 5302350 -
aaatttgaactgactcaact

SEQ ID NO: 39838 - DNA, 20 bp, Artificial Sequence
  Synthetic oligonucleotide; TAG chr11 5302343 5302362 5302346 -
ttgaactgactcaacttgga

SEQ ID NO: 39839 - DNA, 20 bp, Artificial Sequence
  Synthetic oligonucleotide; CAG chr11 5302335 5302354 5302338 -
actcaacttggatagtaaca

SEQ ID NO: 39840 - DNA, 20 bp, Artificial Sequence
  Synthetic oligonucleotide; AAG chr11 5302331 5302350 5302334 -
aacttggatagtaacacagt

SEQ ID NO: 39841 - DNA, 20 bp, Artificial Sequence
  Synthetic oligonucleotide; AGG chr11 5302330 5302349 5302333 -
acttggatagtaacacagta

SEQ ID NO: 39842 - DNA, 20 bp, Artificial Sequence
  Synthetic oligonucleotide; GGG chr11 5302329 5302348 5302332 -
cttggatagtaacacagtaa

SEQ ID NO: 39843 - DNA, 20 bp, Artificial Sequence
  Synthetic oligonucleotide; TAG chr11 5302310 5302329 5302313 -
agggcccatatgataaataa

SEQ ID NO: 39844 - DNA, 20 bp, Artificial Sequence
  Synthetic oligonucleotide; AGG chr11 5302309 5302328 5302312 -
gggcccatatgataaataat

SEQ ID NO: 39845 - DNA, 20 bp, Artificial Sequence
  Synthetic oligonucleotide; GAG chr11 5302307 5302326 5302310 -
gcccatatgataaataatag

SEQ ID NO: 39846 - DNA, 20 bp, Artificial Sequence
  Synthetic oligonucleotide; AGG chr11 5302306 5302325 5302309 -
cccatatgataaataatagg

SEQ ID NO: 39847 - DNA, 20 bp, Artificial Sequence
  Synthetic oligonucleotide; GAG chr11 5302304 5302323 5302307 -
catatgataaataataggag

SEQ ID NO: 39848 - DNA, 20 bp, Artificial Sequence
  Synthetic oligonucleotide; AGG chr11 5302303 5302322 5302306 -
atatgataaataataggagg

SEQ ID NO: 39849 - DNA, 20 bp, Artificial Sequence
  Synthetic oligonucleotide; AAG chr11 5302295 5302314 5302298 -
aataataggaggaggaataa

SEQ ID NO: 39850 - DNA, 20 bp, Artificial Sequence
  Synthetic oligonucleotide; GAG chr11 5302293 5302312 5302296 -
taataggaggaggaataaaa

SEQ ID NO: 39851 - DNA, 20 bp, Artificial Sequence
  Synthetic oligonucleotide; AAG chr11 5302288 5302307 5302291 -
ggaggaggaataaaagagta

SEQ ID NO: 39852 - DNA, 20 bp, Artificial Sequence
  Synthetic oligonucleotide; GAG chr11 5302286 5302305 5302289 -
aggaggaataaaagagtaaa

SEQ ID NO: 39853 - DNA, 20 bp, Artificial Sequence
  Synthetic oligonucleotide; AAG chr11 5302278 5302297 5302281 -
taaaagagtaaagagaataa

SEQ ID NO: 39854 - DNA, 20 bp, Artificial Sequence
  Synthetic oligonucleotide; AGG chr11 5302277 5302296 5302280 -
aaaagagtaaagagaataaa

SEQ ID NO: 39855 - DNA, 20 bp, Artificial Sequence
  Synthetic oligonucleotide; GGG chr11 5302276 5302295 5302279 -
aaagagtaaagagaataaaa

SEQ ID NO: 39856 - DNA, 20 bp, Artificial Sequence
  Synthetic oligonucleotide; AAG chr11 5302269 5302288 5302272 -
aaagagaataaaagggaaca

SEQ ID NO: 39857 - DNA, 20 bp, Artificial Sequence
  Synthetic oligonucleotide; AGG chr11 5302268 5302287 5302271 -
aagagaataaaagggaacaa

SEQ ID NO: 39858 - DNA, 20 bp, Artificial Sequence
  Synthetic oligonucleotide; GAG chr11 5302266 5302285 5302269 -
gagaataaaagggaacaaag

SEQ ID NO: 39859 - DNA, 20 bp, Artificial Sequence
  Synthetic oligonucleotide; TGG chr11 5302256 5302275 5302259 -
gggaacaaaggagtcctatt

SEQ ID NO: 39860 - DNA, 20 bp, Artificial Sequence
  Synthetic oligonucleotide; GGG chr11 5302255 5302274 5302258 -
ggaacaaaggagtcctattt

SEQ ID NO: 39861 - DNA, 20 bp, Artificial Sequence
  Synthetic oligonucleotide; AAG chr11 5302249 5302268 5302252 -
aaggagtcctatttgggacc

SEQ ID NO: 39862 - DNA, 20 bp, Artificial Sequence
  Synthetic oligonucleotide; GAG chr11 5302247 5302266 5302250 -
ggagtcctatttgggaccaa

SEQ ID NO: 39863 - DNA, 20 bp, Artificial Sequence
  Synthetic oligonucleotide; AAG chr11 5302242 5302261 5302245 -
cctatttgggaccaagagtc

SEQ ID NO: 39864 - DNA, 20 bp, Artificial Sequence
  Synthetic oligonucleotide; AGG chr11 5302241 5302260 5302244 -
ctatttgggaccaagagtca

SEQ ID NO: 39865 - DNA, 20 bp, Artificial Sequence
  Synthetic oligonucleotide; GAG chr11 5302234 5302253 5302237 -
ggaccaagagtcaaggctat

SEQ ID NO: 39866 - DNA, 20 bp, Artificial Sequence
  Synthetic oligonucleotide; CAG chr11 5302229 5302248 5302232 -
aagagtcaaggctatgagca

SEQ ID NO: 39867 - DNA, 20 bp, Artificial Sequence
  Synthetic oligonucleotide; AAG chr11 5302222 5302241 5302225 -
aaggctatgagcacagacgt

SEQ ID NO: 39868 - DNA, 20 bp, Artificial Sequence
  Synthetic oligonucleotide; GAG chr11 5302217 5302236 5302220 -
tatgagcacagacgtaagat

SEQ ID NO: 39869 - DNA, 20 bp, Artificial Sequence
  Synthetic oligonucleotide; AAG chr11 5302201 5302220 5302204 -
agatgagtgttgaaaaaata

SEQ ID NO: 39870 - DNA, 20 bp, Artificial Sequence
  Synthetic oligonucleotide; AGG chr11 5302200 5302219 5302203 -
gatgagtgttgaaaaaataa

SEQ ID NO: 39871 - DNA, 20 bp, Artificial Sequence
  Synthetic oligonucleotide; TAG chr11 5302185 5302204 5302188 -
aataaaggttgtatgcttca

SEQ ID NO: 39872 - DNA, 20 bp, Artificial Sequence
  Synthetic oligonucleotide; TGG chr11 5302177 5302196 5302180 -
ttgtatgcttcatagtgaat

SEQ ID NO: 39873 - DNA, 20 bp, Artificial Sequence
  Synthetic oligonucleotide; TAG chr11 5302135 5302154 5302138 -
atttttgttatttgttattc

SEQ ID NO: 39874 - DNA, 20 bp, Artificial Sequence
  Synthetic oligonucleotide; AGG chr11 5302134 5302153 5302137 -
tttttgttatttgttattct

SEQ ID NO: 39875 - DNA, 20 bp, Artificial Sequence
  Synthetic oligonucleotide; GGG chr11 5302133 5302152 5302136 -
ttttgttatttgttattcta

SEQ ID NO: 39876 - DNA, 20 bp, Artificial Sequence
  Synthetic oligonucleotide; AAG chr11 5302129 5302148 5302132 -
gttatttgttattctaggga

SEQ ID NO: 39877 - DNA, 20 bp, Artificial Sequence
  Synthetic oligonucleotide; AGG chr11 5302128 5302147 5302131 -
ttatttgttattctagggaa

SEQ ID NO: 39878 - DNA, 20 bp, Artificial Sequence
  Synthetic oligonucleotide; GAG chr11 5302119 5302138 5302122 -
attctagggaaaggccttgt

SEQ ID NO: 39879 - DNA, 20 bp, Artificial Sequence
  Synthetic oligonucleotide; CAG chr11 5302114 5302133 5302117 -
agggaaaggccttgtgagta

SEQ ID NO: 39880 - DNA, 20 bp, Artificial Sequence
  Synthetic oligonucleotide; AGG chr11 5302113 5302132 5302116 -
gggaaaggccttgtgagtac

SEQ ID NO: 39881 - DNA, 20 bp, Artificial Sequence
  Synthetic oligonucleotide; AAG chr11 5302097 5302116 5302100 -
gtacaggcttacaattaatt

SEQ ID NO: 39882 - DNA, 20 bp, Artificial Sequence
  Synthetic oligonucleotide; GAG chr11 5302091 5302110 5302094 -
gcttacaattaattaagtat

SEQ ID NO: 39883 - DNA, 20 bp, Artificial Sequence
  Synthetic oligonucleotide; CAG chr11 5302082 5302101 5302085 -
taattaagtatgagacaatc

SEQ ID NO: 39884 - DNA, 20 bp, Artificial Sequence
  Synthetic oligonucleotide; AAG chr11 5302069 5302088 5302072 -
gacaatccagaaaaatattt

SEQ ID NO: 39885 - DNA, 20 bp, Artificial Sequence
  Synthetic oligonucleotide; GAG chr11 5302062 5302081 5302065 -
cagaaaaatatttaagtttt

SEQ ID NO: 39886 - DNA, 20 bp, Artificial Sequence
  Synthetic oligonucleotide; AGG chr11 5302061 5302080 5302064 -
agaaaaatatttaagttttg

SEQ ID NO: 39887 - DNA, 20 bp, Artificial Sequence
  Synthetic oligonucleotide; TGG chr11 5302051 5302070 5302054 -
ttaagttttgaggtaaaaaa

SEQ ID NO: 39888 - DNA, 20 bp, Artificial Sequence
  Synthetic oligonucleotide; AAG chr11 5302032 5302051 5302035 -
atggcctgatgatgtgctac

SEQ ID NO: 39889 - DNA, 20 bp, Artificial Sequence
  Synthetic oligonucleotide; AAG chr11 5302029 5302048 5302032 -
gcctgatgatgtgctacaag

SEQ ID NO: 39890 - DNA, 20 bp, Artificial Sequence
  Synthetic oligonucleotide; GAG chr11 5302021 5302040 5302024 -
atgtgctacaagaagattgt

SEQ ID NO: 39891 - DNA, 20 bp, Artificial Sequence
  Synthetic oligonucleotide; GAG chr11 5302019 5302038 5302022 -
gtgctacaagaagattgtga

SEQ ID NO: 39892 - DNA, 20 bp, Artificial Sequence
  Synthetic oligonucleotide; AAG chr11 5302012 5302031 5302015 -
aagaagattgtgagagaaaa

SEQ ID NO: 39893 - DNA, 20 bp, Artificial Sequence
  Synthetic oligonucleotide; TGG chr11 5301996 5302015 5301999 -
aaaaaagaaaactgcatctt

SEQ ID NO: 39894 - DNA, 20 bp, Artificial Sequence
  Synthetic oligonucleotide; GAG chr11 5301994 5302013 5301997 -
aaaagaaaactgcatctttg

SEQ ID NO: 39895 - DNA, 20 bp, Artificial Sequence
  Synthetic oligonucleotide; AGG chr11 5301993 5302012 5301996 -
aaagaaaactgcatctttgg

SEQ ID NO: 39896 - DNA, 20 bp, Artificial Sequence
  Synthetic oligonucleotide; TGG chr11 5301944 5301963 5301947 -
cacctgcaaaacctaccatg

SEQ ID NO: 39897 - DNA, 20 bp, Artificial Sequence
  Synthetic oligonucleotide; CAG chr11 5301933 5301952 5301936 -
cctaccatgtggtataacaa

SEQ ID NO: 39898 - DNA, 20 bp, Artificial Sequence
  Synthetic oligonucleotide; TGG chr11 5301927 5301946 5301930 -
atgtggtataacaacagtgc

SEQ ID NO: 39899 - DNA, 20 bp, Artificial Sequence
  Synthetic oligonucleotide; TGG chr11 5301909 5301928 5301912 -
gctggccccttcttgctgac

SEQ ID NO: 39900 - DNA, 20 bp, Artificial Sequence
  Synthetic oligonucleotide; TGG chr11 5301901 5301920 5301904 -
cttcttgctgactggcttct

SEQ ID NO: 39901 - DNA, 20 bp, Artificial Sequence
  Synthetic oligonucleotide; GGG chr11 5301900 5301919 5301903 -
ttcttgctgactggcttctt

SEQ ID NO: 39902 - DNA, 20 bp, Artificial Sequence
  Synthetic oligonucleotide; CAG chr11 5301895 5301914 5301898 -
gctgactggcttcttgggct

SEQ ID NO: 39903 - DNA, 20 bp, Artificial Sequence
  Synthetic oligonucleotide; GAG chr11 5301893 5301912 5301896 -
tgactggcttcttgggctca

SEQ ID NO: 39904 - DNA, 20 bp, Artificial Sequence
  Synthetic oligonucleotide; AGG chr11 5301892 5301911 5301895 -
gactggcttcttgggctcag

SEQ ID NO: 39905 - DNA, 20 bp, Artificial Sequence
  Synthetic oligonucleotide; CAG chr11 5301889 5301908 5301892 -
tggcttcttgggctcagagg

SEQ ID NO: 39906 - DNA, 20 bp, Artificial Sequence
  Synthetic oligonucleotide; CGG chr11 5301878 5301897 5301881 -
gctcagaggcagttcactac

SEQ ID NO: 39907 - DNA, 20 bp, Artificial Sequence
  Synthetic oligonucleotide; TGG chr11 5301834 5301853 5301837 -
atctacttctccgtcctttt

SEQ ID NO: 39908 - DNA, 20 bp, Artificial Sequence
  Synthetic oligonucleotide; TGG chr11 5301828 5301847 5301831 -
ttctccgtcctttttggaaa

SEQ ID NO: 39909 - DNA, 20 bp, Artificial Sequence
  Synthetic oligonucleotide; TGG chr11 5301806 5301825 5301809 -
gcactcttcttgtcctcatt

SEQ ID NO: 39910 - DNA, 20 bp, Artificial Sequence
  Synthetic oligonucleotide; CAG chr11 5301795 5301814 5301798 -
gtcctcatttggaatgatca

SEQ ID NO: 39911 - DNA, 20 bp, Artificial Sequence
  Synthetic oligonucleotide; GAG chr11 5301785 5301804 5301788 -
ggaatgatcacagcctccat

SEQ ID NO: 39912 - DNA, 20 bp, Artificial Sequence
  Synthetic oligonucleotide; TGG chr11 5301766 5301785 5301769 -
tgagcccatgtactacttcc

SEQ ID NO: 39913 - DNA, 20 bp, Artificial Sequence
  Synthetic oligonucleotide; TGG chr11 5301757 5301776 5301760 -
gtactacttcctggctatgc

SEQ ID NO: 39914 - DNA, 20 bp, Artificial Sequence
  Synthetic oligonucleotide; CAG chr11 5301754 5301773 5301757 -
ctacttcctggctatgctgg

SEQ ID NO: 39915 - DNA, 20 bp, Artificial Sequence
  Synthetic oligonucleotide; CGG chr11 5301748 5301767 5301751 -
cctggctatgctggcagaca

SEQ ID NO: 39916 - DNA, 20 bp, Artificial Sequence
  Synthetic oligonucleotide; TGG chr11 5301741 5301760 5301744 -
atgctggcagacacggacct

SEQ ID NO: 39917 - DNA, 20 bp, Artificial Sequence
  Synthetic oligonucleotide; GGG chr11 5301740 5301759 5301743 -
tgctggcagacacggacctt

SEQ ID NO: 39918 - DNA, 20 bp, Artificial Sequence
  Synthetic oligonucleotide; CAG chr11 5301715 5301734 5301718 -
gacattcactacaatgccca

SEQ ID NO: 39919 - DNA, 20 bp, Artificial Sequence
  Synthetic oligonucleotide; TGG chr11 5301709 5301728 5301712 -
cactacaatgcccacagtcc

SEQ ID NO: 39920 - DNA, 20 bp, Artificial Sequence
  Synthetic oligonucleotide; GGG chr11 5301708 5301727 5301711 -
actacaatgcccacagtcct

SEQ ID NO: 39921 - DNA, 20 bp, Artificial Sequence
  Synthetic oligonucleotide; TAG chr11 5301694 5301713 5301697 -
agtcctgggtgtcctgctgc

SEQ ID NO: 39922 - DNA, 20 bp, Artificial Sequence
  Synthetic oligonucleotide; CAG chr11 5301689 5301708 5301692 -
tgggtgtcctgctgctagac

SEQ ID NO: 39923 - DNA, 20 bp, Artificial Sequence
  Synthetic oligonucleotide; GAG chr11 5301687 5301706 5301690 -
ggtgtcctgctgctagacca

SEQ ID NO: 39924 - DNA, 20 bp, Artificial Sequence
  Synthetic oligonucleotide; AGG chr11 5301686 5301705 5301689 -
gtgtcctgctgctagaccag

SEQ ID NO: 39925 - DNA, 20 bp, Artificial Sequence
  Synthetic oligonucleotide; GGG chr11 5301685 5301704 5301688 -
tgtcctgctgctagaccaga

SEQ ID NO: 39926 - DNA, 20 bp, Artificial Sequence
  Synthetic oligonucleotide; GAG chr11 5301683 5301702 5301686 -
tcctgctgctagaccagagg

SEQ ID NO: 39927 - DNA, 20 bp, Artificial Sequence
  Synthetic oligonucleotide; TGG chr11 5301637 5301656 5301640 -
ccaatccttcattcattcac

SEQ ID NO: 39928 - DNA, 20 bp, Artificial Sequence
  Synthetic oligonucleotide; TAG chr11 5301628 5301647 5301631 -
cattcattcactggccattg

SEQ ID NO: 39929 - DNA, 20 bp, Artificial Sequence
  Synthetic oligonucleotide; CAG chr11 5301622 5301641 5301625 -
ttcactggccattgtagaat

SEQ ID NO: 39930 - DNA, 20 bp, Artificial Sequence
  Synthetic oligonucleotide; AGG chr11 5301621 5301640 5301624 -
tcactggccattgtagaatc

SEQ ID NO: 39931 - DNA, 20 bp, Artificial Sequence
  Synthetic oligonucleotide; TGG chr11 5301604 5301623 5301607 -
atcaggtatcttgcttgttt

SEQ ID NO: 39932 - DNA, 20 bp, Artificial Sequence
  Synthetic oligonucleotide; GAG chr11 5301567 5301586 5301570 -
attgccatccgcacaccact

SEQ ID NO: 39933 - DNA, 20 bp, Artificial Sequence
  Synthetic oligonucleotide; AGG chr11 5301566 5301585 5301569 -
ttgccatccgcacaccactg

SEQ ID NO: 39934 - DNA, 20 bp, Artificial Sequence
  Synthetic oligonucleotide; GAG chr11 5301538 5301557 5301541 -
ctgcattcttaccaattccc

SEQ ID NO: 39935 - DNA, 20 bp, Artificial Sequence
  Synthetic oligonucleotide; TAG chr11 5301526 5301545 5301529 -
caattcccgagtgatgaaca

SEQ ID NO: 39936 - DNA, 20 bp, Artificial Sequence
  Synthetic oligonucleotide; AGG chr11 5301525 5301544 5301528 -
aattcccgagtgatgaacat

SEQ ID NO: 39937 - DNA, 20 bp, Artificial Sequence
  Synthetic oligonucleotide; TGG chr11 5301520 5301539 5301523 -
ccgagtgatgaacataggac

SEQ ID NO: 39938 - DNA, 20 bp, Artificial Sequence
  Synthetic oligonucleotide; GGG chr11 5301519 5301538 5301522 -
cgagtgatgaacataggact

SEQ ID NO: 39939 - DNA, 20 bp, Artificial Sequence
  Synthetic oligonucleotide; GGG chr11 5301518 5301537 5301521 -
gagtgatgaacataggactg

SEQ ID NO: 39940 - DNA, 20 bp, Artificial Sequence
  Synthetic oligonucleotide; GGG chr11 5301517 5301536 5301520 -
agtgatgaacataggactgg

SEQ ID NO: 39941 - DNA, 20 bp, Artificial Sequence
  Synthetic oligonucleotide; GAG chr11 5301507 5301526 5301510 -
ataggactgggggtactgat

SEQ ID NO: 39942 - DNA, 20 bp, Artificial Sequence
  Synthetic oligonucleotide; GAG chr11 5301505 5301524 5301508 -
aggactgggggtactgatga

SEQ ID NO: 39943 - DNA, 20 bp, Artificial Sequence
  Synthetic oligonucleotide; AGG chr11 5301504 5301523 5301507 -
ggactgggggtactgatgag

SEQ ID NO: 39944 - DNA, 20 bp, Artificial Sequence
  Synthetic oligonucleotide; TGG chr11 5301450 5301469 5301453 -
ctctactgctacccatattg

SEQ ID NO: 39945 - DNA, 20 bp, Artificial Sequence
  Synthetic oligonucleotide; AAG chr11 5301412 5301431 5301415 -
gcacacattttgcctccatc

SEQ ID NO: 39946 - DNA, 20 bp, Artificial Sequence
  Synthetic oligonucleotide; CAG chr11 5301353 5301372 5301356 -
atcacatatatccaattatt

SEQ ID NO: 39947 - DNA, 20 bp, Artificial Sequence
  Synthetic oligonucleotide; TAG chr11 5301331 5301350 5301334 -
gacttctttgactgtctttt

SEQ ID NO: 39948 - DNA, 20 bp, Artificial Sequence
  Synthetic oligonucleotide; AAG chr11 5301290 5301309 5301293 -
tttcttatatactaatcctc

SEQ ID NO: 39949 - DNA, 20 bp, Artificial Sequence
  Synthetic oligonucleotide; CAG chr11 5301286 5301305 5301289 -
ttatatactaatcctcaaga

SEQ ID NO: 39950 - DNA, 20 bp, Artificial Sequence
  Synthetic oligonucleotide; TGG chr11 5301280 5301299 5301283 -
actaatcctcaagacagtga

SEQ ID NO: 39951 - DNA, 20 bp, Artificial Sequence
  Synthetic oligonucleotide; GGG chr11 5301279 5301298 5301282 -
ctaatcctcaagacagtgat

SEQ ID NO: 39952 - DNA, 20 bp, Artificial Sequence
  Synthetic oligonucleotide; TGG chr11 5301267 5301286 5301270 -
acagtgatgggcattgcgtc

SEQ ID NO: 39953 - DNA, 20 bp, Artificial Sequence
  Synthetic oligonucleotide; AAG chr11 5301262 5301281 5301265 -
gatgggcattgcgtctggac

SEQ ID NO: 39954 - DNA, 20 bp, Artificial Sequence
  Synthetic oligonucleotide; GAG chr11 5301260 5301279 5301263 -
tgggcattgcgtctggacaa

SEQ ID NO: 39955 - DNA, 20 bp, Artificial Sequence
  Synthetic oligonucleotide; AGG chr11 5301259 5301278 5301262 -
gggcattgcgtctggacaag

SEQ ID NO: 39956 - DNA, 20 bp, Artificial Sequence
  Synthetic oligonucleotide; AAG chr11 5301256 5301275 5301259 -
cattgcgtctggacaagagg

SEQ ID NO: 39957 - DNA, 20 bp, Artificial Sequence
  Synthetic oligonucleotide; TAG chr11 5301222 5301241 5301225 -
aacacttgtgtctcccatat

SEQ ID NO: 39958 - DNA, 20 bp, Artificial Sequence
  Synthetic oligonucleotide; TAG chr11 5301211 5301230 5301214 -
ctcccatattagctgtgtcc

SEQ ID NO: 39959 - DNA, 20 bp, Artificial Sequence
  Synthetic oligonucleotide; TGG chr11 5301190 5301209 5301193 -
agtatttcacatcactgtga

SEQ ID NO: 39960 - DNA, 20 bp, Artificial Sequence
  Synthetic oligonucleotide; GGG chr11 5301189 5301208 5301192 -
gtatttcacatcactgtgat

SEQ ID NO: 39961 - DNA, 20 bp, Artificial Sequence
  Synthetic oligonucleotide; CAG chr11 5301171 5301190 5301174 -
atgggactgtcattcattca

SEQ ID NO: 39962 - DNA, 20 bp, Artificial Sequence
  Synthetic oligonucleotide; AGG chr11 5301170 5301189 5301173 -
tgggactgtcattcattcac

SEQ ID NO: 39963 - DNA, 20 bp, Artificial Sequence
  Synthetic oligonucleotide; TGG chr11 5301165 5301184 5301168 -
ctgtcattcattcacaggtt

SEQ ID NO: 39964 - DNA, 20 bp, Artificial Sequence
  Synthetic oligonucleotide; GGG chr11 5301164 5301183 5301167 -
tgtcattcattcacaggttt

SEQ ID NO: 39965 - DNA, 20 bp, Artificial Sequence
  Synthetic oligonucleotide; TGG chr11 5301145 5301164 5301148 -
tgggaaacatgcacctcatg

SEQ ID NO: 39966 - DNA, 20 bp, Artificial Sequence
  Synthetic oligonucleotide; GAG chr11 5301129 5301148 5301132 -
catgtggtccccattaccat

SEQ ID NO: 39967 - DNA, 20 bp, Artificial Sequence
  Synthetic oligonucleotide; TAG chr11 5301081 5301100 5301084 -
ttcgtgaatcctatcattta

SEQ ID NO: 39968 - DNA, 20 bp, Artificial Sequence
  Synthetic oligonucleotide; AAG chr11 5301074 5301093 5301077 -
atcctatcatttatagcatc

SEQ ID NO: 39969 - DNA, 20 bp, Artificial Sequence
  Synthetic oligonucleotide; AAG chr11 5301068 5301087 5301071 -
tcatttatagcatcaagacc

SEQ ID NO: 39970 - DNA, 20 bp, Artificial Sequence
  Synthetic oligonucleotide; CAG chr11 5301065 5301084 5301068 -
tttatagcatcaagaccaag

SEQ ID NO: 39971 - DNA, 20 bp, Artificial Sequence
  Synthetic oligonucleotide; AAG chr11 5301057 5301076 5301060 -
atcaagaccaagcagattca

SEQ ID NO: 39972 - DNA, 20 bp, Artificial Sequence
  Synthetic oligonucleotide; AAG chr11 5301054 5301073 5301057 -
aagaccaagcagattcaaag

SEQ ID NO: 39973 - DNA, 20 bp, Artificial Sequence
  Synthetic oligonucleotide; TGG chr11 5301033 5301052 5301036 -
agcattattcgcctattttc

SEQ ID NO: 39974 - DNA, 20 bp, Artificial Sequence
  Synthetic oligonucleotide; GGG chr11 5301032 5301051 5301035 -
gcattattcgcctattttct

SEQ ID NO: 39975 - DNA, 20 bp, Artificial Sequence
  Synthetic oligonucleotide; CAG chr11 5301029 5301048 5301032 -
ttattcgcctattttctggg

SEQ ID NO: 39976 - DNA, 20 bp, Artificial Sequence
  Synthetic oligonucleotide; GAG chr11 5301027 5301046 5301030 -
attcgcctattttctgggca

SEQ ID NO: 39977 - DNA, 20 bp, Artificial Sequence
  Synthetic oligonucleotide; TAG chr11 5301024 5301043 5301027 -
cgcctattttctgggcagag

SEQ ID NO: 39978 - DNA, 20 bp, Artificial Sequence
  Synthetic oligonucleotide; AGG chr11 5301023 5301042 5301026 -
gcctattttctgggcagagt

SEQ ID NO: 39979 - DNA, 20 bp, Artificial Sequence
  Synthetic oligonucleotide; GGG chr11 5301022 5301041 5301025 -
cctattttctgggcagagta

SEQ ID NO: 39980 - DNA, 20 bp, Artificial Sequence
  Synthetic oligonucleotide; GAG chr11 5301016 5301035 5301019 -
ttctgggcagagtagggctt

SEQ ID NO: 39981 - DNA, 20 bp, Artificial Sequence
  Synthetic oligonucleotide; CAG chr11 5301004 5301023 5301007 -
tagggcttgagcccttattt

SEQ ID NO: 39982 - DNA, 20 bp, Artificial Sequence
  Synthetic oligonucleotide; AAG chr11 5300995 5301014 5300998 -
agcccttatttcagaatctc

SEQ ID NO: 39983 - DNA, 20 bp, Artificial Sequence
  Synthetic oligonucleotide; TAG chr11 5300987 5301006 5300990 -
tttcagaatctcaagatctc

SEQ ID NO: 39984 - DNA, 20 bp, Artificial Sequence
  Synthetic oligonucleotide; AGG chr11 5300986 5301005 5300989 -
ttcagaatctcaagatctct

SEQ ID NO: 39985 - DNA, 20 bp, Artificial Sequence
  Synthetic oligonucleotide; TGG chr11 5300978 5300997 5300981 -
ctcaagatctctaggatttc

SEQ ID NO: 39986 - DNA, 20 bp, Artificial Sequence
  Synthetic oligonucleotide; GGG chr11 5300977 5300996 5300980 -
tcaagatctctaggatttct

SEQ ID NO: 39987 - DNA, 20 bp, Artificial Sequence
  Synthetic oligonucleotide; AAG chr11 5300957 5300976 5300960 -
gggcctctcccattactgaa

SEQ ID NO: 39988 - DNA, 20 bp, Artificial Sequence
  Synthetic oligonucleotide; AGG chr11 5300956 5300975 5300959 -
ggcctctcccattactgaaa

SEQ ID NO: 39989 - DNA, 20 bp, Artificial Sequence
  Synthetic oligonucleotide; TGG chr11 5300948 5300967 5300951 -
ccattactgaaaaggaaccc

SEQ ID NO: 39990 - DNA, 20 bp, Artificial Sequence
  Synthetic oligonucleotide; CAG chr11 5300920 5300939 5300923 -
tatccacacttttttttcct

SEQ ID NO: 39991 - DNA, 20 bp, Artificial Sequence
  Synthetic oligonucleotide; GAG chr11 5300918 5300937 5300921 -
tccacacttttttttcctca

SEQ ID NO: 39992 - DNA, 20 bp, Artificial Sequence
  Synthetic oligonucleotide; TAG chr11 5300914 5300933 5300917 -
cacttttttttcctcagagt

SEQ ID NO: 39993 - DNA, 20 bp, Artificial Sequence
  Synthetic oligonucleotide; AAG chr11 5300886 5300905 5300889 -
attttaattatcacatgaaa

SEQ ID NO: 39994 - DNA, 20 bp, Artificial Sequence
  Synthetic oligonucleotide; GAG chr11 5300876 5300895 5300879 -
tcacatgaaaaagctgatgt

SEQ ID NO: 39995 - DNA, 20 bp, Artificial Sequence
  Synthetic oligonucleotide; GAG chr11 5300872 5300891 5300875 -
atgaaaaagctgatgtgagc

SEQ ID NO: 39996 - DNA, 20 bp, Artificial Sequence
  Synthetic oligonucleotide; AAG chr11 5300806 5300825 5300809 -
tatatatatatcacctaata

SEQ ID NO: 39997 - DNA, 20 bp, Artificial Sequence
  Synthetic oligonucleotide; GAG chr11 5300804 5300823 5300807 -
tatatatatcacctaataaa

SEQ ID NO: 39998 - DNA, 20 bp, Artificial Sequence
  Synthetic oligonucleotide; AGG chr11 5300803 5300822 5300806 -
atatatatcacctaataaag

SEQ ID NO: 39999 - DNA, 20 bp, Artificial Sequence
  Synthetic oligonucleotide; GGG chr11 5300802 5300821 5300805 -
tatatatcacctaataaaga

SEQ ID NO: 40000 - DNA, 20 bp, Artificial Sequence
  Synthetic oligonucleotide; CAG chr11 5300794 5300813 5300797 -
acctaataaagagggaatgc

SEQ ID NO: 40001 - DNA, 20 bp, Artificial Sequence
  Synthetic oligonucleotide; AAG chr11 5300783 5300802 5300786 -
agggaatgccagtgatgctg

SEQ ID NO: 40002 - DNA, 20 bp, Artificial Sequence
  Synthetic oligonucleotide; AAG chr11 5300777 5300796 5300780 -
tgccagtgatgctgaagaaa

SEQ ID NO: 40003 - DNA, 20 bp, Artificial Sequence
  Synthetic oligonucleotide; CAG chr11 5300770 5300789 5300773 -
gatgctgaagaaaaagaata

SEQ ID NO: 40004 - DNA, 20 bp, Artificial Sequence
  Synthetic oligonucleotide; AGG chr11 5300769 5300788 5300772 -
atgctgaagaaaaagaatac

SEQ ID NO: 40005 - DNA, 20 bp, Artificial Sequence
  Synthetic oligonucleotide; AAG chr11 5300766 5300785 5300769 -
ctgaagaaaaagaatacagg

SEQ ID NO: 40006 - DNA, 20 bp, Artificial Sequence
  Synthetic oligonucleotide; CAG chr11 5300763 5300782 5300766 -
aagaaaaagaatacaggaag

SEQ ID NO: 40007 - DNA, 20 bp, Artificial Sequence
  Synthetic oligonucleotide; GAG chr11 5300761 5300780 5300764 -
gaaaaagaatacaggaagca

SEQ ID NO: 40008 - DNA, 20 bp, Artificial Sequence
  Synthetic oligonucleotide; AGG chr11 5300760 5300779 5300763 -
aaaaagaatacaggaagcag

SEQ ID NO: 40009 - DNA, 20 bp, Artificial Sequence
  Synthetic oligonucleotide; GAG chr11 5300758 5300777 5300761 -
aaagaatacaggaagcagag

SEQ ID NO: 40010 - DNA, 20 bp, Artificial Sequence
  Synthetic oligonucleotide; AAG chr11 5300741 5300760 5300744 -
gaggagatataacaatccaa

SEQ ID NO: 40011 - DNA, 20 bp, Artificial Sequence
  Synthetic oligonucleotide; AAG chr11 5300738 5300757 5300741 -
gagatataacaatccaaaag

SEQ ID NO: 40012 - DNA, 20 bp, Artificial Sequence
  Synthetic oligonucleotide; GAG chr11 5300736 5300755 5300739 -
gatataacaatccaaaagaa

SEQ ID NO: 40013 - DNA, 20 bp, Artificial Sequence
  Synthetic oligonucleotide; CAG chr11 5300721 5300740 5300724 -
aagaagagtaactatgattt

SEQ ID NO: 40014 - DNA, 20 bp, Artificial Sequence
  Synthetic oligonucleotide; TAG chr11 5300715 5300734 5300718 -
agtaactatgatttcagaaa

SEQ ID NO: 40015 - DNA, 20 bp, Artificial Sequence
  Synthetic oligonucleotide; AAG chr11 5300710 5300729 5300713 -
ctatgatttcagaaatagtc

SEQ ID NO: 40016 - DNA, 20 bp, Artificial Sequence
  Synthetic oligonucleotide; AAG chr11 5300705 5300724 5300708 -
atttcagaaatagtcaagat

SEQ ID NO: 40017 - DNA, 20 bp, Artificial Sequence
  Synthetic oligonucleotide; TGG chr11 5300702 5300721 5300705 -
tcagaaatagtcaagataag

SEQ ID NO: 40018 - DNA, 20 bp, Artificial Sequence
  Synthetic oligonucleotide; AAG chr11 5300695 5300714 5300698 -
tagtcaagataagtggacta

SEQ ID NO: 40019 - DNA, 20 bp, Artificial Sequence
  Synthetic oligonucleotide; CAG chr11 5300692 5300711 5300695 -
tcaagataagtggactaaag

SEQ ID NO: 40020 - DNA, 20 bp, Artificial Sequence
  Synthetic oligonucleotide; TGG chr11 5300687 5300706 5300690 -
ataagtggactaaagcagct

SEQ ID NO: 40021 - DNA, 20 bp, Artificial Sequence
  Synthetic oligonucleotide; GGG chr11 5300686 5300705 5300689 -
taagtggactaaagcagctt

SEQ ID NO: 40022 - DNA, 20 bp, Artificial Sequence
  Synthetic oligonucleotide; CAG chr11 5300676 5300695 5300679 -
aaagcagcttgggtcaaata

SEQ ID NO: 40023 - DNA, 20 bp, Artificial Sequence
  Synthetic oligonucleotide; AAG chr11 5300665 5300684 5300668 -
ggtcaaatacagttcatcta

SEQ ID NO: 40024 - DNA, 20 bp, Artificial Sequence
  Synthetic oligonucleotide; CAG chr11 5300653 5300672 5300656 -
ttcatctaaagaaaaatgtg

SEQ ID NO: 40025 - DNA, 20 bp, Artificial Sequence
  Synthetic oligonucleotide; TGG chr11 5300649 5300668 5300652 -
tctaaagaaaaatgtgcagt

SEQ ID NO: 40026 - DNA, 20 bp, Artificial Sequence
  Synthetic oligonucleotide; GAG chr11 5300647 5300666 5300650 -
taaagaaaaatgtgcagttg

SEQ ID NO: 40027 - DNA, 20 bp, Artificial Sequence
  Synthetic oligonucleotide; AGG chr11 5300646 5300665 5300649 -
aaagaaaaatgtgcagttgg

SEQ ID NO: 40028 - DNA, 20 bp, Artificial Sequence
  Synthetic oligonucleotide; AAG chr11 5300623 5300642 5300626 -
tacattttatgtgtcttata

SEQ ID NO: 40029 - DNA, 20 bp, Artificial Sequence
  Synthetic oligonucleotide; AGG chr11 5300622 5300641 5300625 -
acattttatgtgtcttataa

SEQ ID NO: 40030 - DNA, 20 bp, Artificial Sequence
  Synthetic oligonucleotide; TAG chr11 5300571 5300590 5300574 -
tcatctccatactttgaaac

SEQ ID NO: 40031 - DNA, 20 bp, Artificial Sequence
  Synthetic oligonucleotide; AAG chr11 5300558 5300577 5300561 -
ttgaaactagttactctgaa

SEQ ID NO: 40032 - DNA, 20 bp, Artificial Sequence
  Synthetic oligonucleotide; AGG chr11 5300557 5300576 5300560 -
tgaaactagttactctgaaa

SEQ ID NO: 40033 - DNA, 20 bp, Artificial Sequence
  Synthetic oligonucleotide; TAG chr11 5300542 5300561 5300545 -
tgaaaaggatcttgcttgat

SEQ ID NO: 40034 - DNA, 20 bp, Artificial Sequence
  Synthetic oligonucleotide; AAG chr11 5300538 5300557 5300541 -
aaggatcttgcttgattagt

SEQ ID NO: 40035 - DNA, 20 bp, Artificial Sequence
  Synthetic oligonucleotide; GAG chr11 5300524 5300543 5300527 -
attagtaagcaaacttgtgt

SEQ ID NO: 40036 - DNA, 20 bp, Artificial Sequence
  Synthetic oligonucleotide; AGG chr11 5300523 5300542 5300526 -
ttagtaagcaaacttgtgtg

SEQ ID NO: 40037 - DNA, 20 bp, Artificial Sequence
  Synthetic oligonucleotide; CAG chr11 5300515 5300534 5300518 -
caaacttgtgtgaggctaaa

SEQ ID NO: 40038 - DNA, 20 bp, Artificial Sequence
  Synthetic oligonucleotide; TAG chr11 5300504 5300523 5300507 -
gaggctaaacagcaaatatc

SEQ ID NO: 40039 - DNA, 20 bp, Artificial Sequence
  Synthetic oligonucleotide; TAG chr11 5300496 5300515 5300499 -
acagcaaatatctagaactt

SEQ ID NO: 40040 - DNA, 20 bp, Artificial Sequence
  Synthetic oligonucleotide; AGG chr11 5300495 5300514 5300498 -
cagcaaatatctagaacttt

SEQ ID NO: 40041 - DNA, 20 bp, Artificial Sequence
  Synthetic oligonucleotide; AAG chr11 5300492 5300511 5300495 -
caaatatctagaactttagg

SEQ ID NO: 40042 - DNA, 20 bp, Artificial Sequence
  Synthetic oligonucleotide; TAG chr11 5300464 5300483 5300467 -
tcatgaaatgtaatttccct

SEQ ID NO: 40043 - DNA, 20 bp, Artificial Sequence
  Synthetic oligonucleotide; TAG chr11 5300461 5300480 5300464 -
tgaaatgtaatttcccttag

SEQ ID NO: 40044 - DNA, 20 bp, Artificial Sequence
  Synthetic oligonucleotide; TGG chr11 5300456 5300475 5300459 -
tgtaatttcccttagtagac

SEQ ID NO: 40045 - DNA, 20 bp, Artificial Sequence
  Synthetic oligonucleotide; AAG chr11 5300437 5300456 5300440 -
ctggcatattttactactaa

SEQ ID NO: 40046 - DNA, 20 bp, Artificial Sequence
  Synthetic oligonucleotide; AGG chr11 5300436 5300455 5300439 -
tggcatattttactactaaa

SEQ ID NO: 40047 - DNA, 20 bp, Artificial Sequence
  Synthetic oligonucleotide; CAG chr11 5300424 5300443 5300427 -
ctactaaaaggcgtgtgata

SEQ ID NO: 40048 - DNA, 20 bp, Artificial Sequence
  Synthetic oligonucleotide; CAG chr11 5300416 5300435 5300419 -
aggcgtgtgatacagactaa

SEQ ID NO: 40049 - DNA, 20 bp, Artificial Sequence
  Synthetic oligonucleotide; TAG chr11 5300408 5300427 5300411 -
gatacagactaacagctaaa

SEQ ID NO: 40050 - DNA, 20 bp, Artificial Sequence
  Synthetic oligonucleotide; CAG chr11 5300405 5300424 5300408 -
acagactaacagctaaatag

SEQ ID NO: 40051 - DNA, 20 bp, Artificial Sequence
  Synthetic oligonucleotide; TGG chr11 5300379 5300398 5300382 -
acacatttcttatcatctcg

SEQ ID NO: 40052 - DNA, 20 bp, Artificial Sequence
  Synthetic oligonucleotide; AAG chr11 5300376 5300395 5300379 -
catttcttatcatctcgtgg

SEQ ID NO: 40053 - DNA, 20 bp, Artificial Sequence
  Synthetic oligonucleotide; CAG chr11 5300372 5300391 5300375 -
tcttatcatctcgtggaagc

SEQ ID NO: 40054 - DNA, 20 bp, Artificial Sequence
  Synthetic oligonucleotide; CAG chr11 5300363 5300382 5300366 -
ctcgtggaagccagatatcc

SEQ ID NO: 40055 - DNA, 20 bp, Artificial Sequence
  Synthetic oligonucleotide; CAG chr11 5300302 5300321 5300305 -
ttaatactttttcttctttc

SEQ ID NO: 40056 - DNA, 20 bp, Artificial Sequence
  Synthetic oligonucleotide; TAG chr11 5300243 5300262 5300246 -
aaaataaccaactataaatt

SEQ ID NO: 40057 - DNA, 20 bp, Artificial Sequence
  Synthetic oligonucleotide; GAG chr11 5300189 5300208 5300192 -
cttctcacataaaaaatctc

SEQ ID NO: 40058 - DNA, 20 bp, Artificial Sequence
  Synthetic oligonucleotide; TAG chr11 5300167 5300186 5300170 -
gactttttcacttcatgaaa

SEQ ID NO: 40059 - DNA, 20 bp, Artificial Sequence
  Synthetic oligonucleotide; TGG chr11 5300141 5300160 5300144 -
tgataattaatgcaaaaact

SEQ ID NO: 40060 - DNA, 20 bp, Artificial Sequence
  Synthetic oligonucleotide; AAG chr11 5300136 5300155 5300139 -
attaatgcaaaaacttggca

SEQ ID NO: 40061 - DNA, 20 bp, Artificial Sequence
  Synthetic oligonucleotide; AGG chr11 5300135 5300154 5300138 -
ttaatgcaaaaacttggcaa

SEQ ID NO: 40062 - DNA, 20 bp, Artificial Sequence
  Synthetic oligonucleotide; TAG chr11 5300119 5300138 5300122 -
gcaaaggtaatgttatattt

SEQ ID NO: 40063 - DNA, 20 bp, Artificial Sequence
  Synthetic oligonucleotide; TGG chr11 5300102 5300121 5300105 -
ttttagaaatttttcactga

SEQ ID NO: 40064 - DNA, 20 bp, Artificial Sequence
  Synthetic oligonucleotide; TAG chr11 5300097 5300116 5300100 -
gaaatttttcactgatggaa

SEQ ID NO: 40065 - DNA, 20 bp, Artificial Sequence
  Synthetic oligonucleotide; AAG chr11 5300072 5300091 5300075 -
tcttccttcaatcttcttca

SEQ ID NO: 40066 - DNA, 20 bp, Artificial Sequence
  Synthetic oligonucleotide; AAG chr11 5300062 5300081 5300065 -
atcttcttcaaagtgtttgt

SEQ ID NO: 40067 - DNA, 20 bp, Artificial Sequence
  Synthetic oligonucleotide; TGG chr11 5300043 5300062 5300046 -
taagtctttatgctgttcat

SEQ ID NO: 40068 - DNA, 20 bp, Artificial Sequence
  Synthetic oligonucleotide; GGG chr11 5300042 5300061 5300045 -
aagtctttatgctgttcatt

SEQ ID NO: 40069 - DNA, 20 bp, Artificial Sequence
  Synthetic oligonucleotide; CAG chr11 5300030 5300049 5300033 -
tgttcattgggtctgaaccg

SEQ ID NO: 40070 - DNA, 20 bp, Artificial Sequence
  Synthetic oligonucleotide; TAG chr11 5300012 5300031 5300015 -
cgcagtctaccacttgctat

SEQ ID NO: 40071 - DNA, 20 bp, Artificial Sequence
  Synthetic oligonucleotide; CAG chr11 5300004 5300023 5300007 -
accacttgctattagtgtaa

SEQ ID NO: 40072 - DNA, 20 bp, Artificial Sequence
  Synthetic oligonucleotide; AGG chr11 5300003 5300022 5300006 -
ccacttgctattagtgtaac

SEQ ID NO: 40073 - DNA, 20 bp, Artificial Sequence
  Synthetic oligonucleotide; GGG chr11 5300002 5300021 5300005 -
cacttgctattagtgtaaca

SEQ ID NO: 40074 - DNA, 20 bp, Artificial Sequence
  Synthetic oligonucleotide; GGG chr11 5300001 5300020 5300004 -
acttgctattagtgtaacag

SEQ ID NO: 40075 - DNA, 20 bp, Artificial Sequence
  Synthetic oligonucleotide; TAG chr11 5299975 5299994 5299978 -
acaatttcttcatctactgc

SEQ ID NO: 40076 - DNA, 20 bp, Artificial Sequence
  Synthetic oligonucleotide; TAG chr11 5299964 5299983 5299967 -
atctactgctagttctgcgc

SEQ ID NO: 40077 - DNA, 20 bp, Artificial Sequence
  Synthetic oligonucleotide; CAG chr11 5299955 5299974 5299958 -
tagttctgcgctagtatttg

SEQ ID NO: 40078 - DNA, 20 bp, Artificial Sequence
  Synthetic oligonucleotide; TAG chr11 5299940 5299959 5299943 -
atttgcagctgatctcctta

SEQ ID NO: 40079 - DNA, 20 bp, Artificial Sequence
  Synthetic oligonucleotide; AGG chr11 5299939 5299958 5299942 -
tttgcagctgatctccttat

SEQ ID NO: 40080 - DNA, 20 bp, Artificial Sequence
  Synthetic oligonucleotide; AAG chr11 5299923 5299942 5299926 -
ttataggaaactaatctcaa

SEQ ID NO: 40081 - DNA, 20 bp, Artificial Sequence
  Synthetic oligonucleotide; AAG chr11 5299901 5299920 5299904 -
gttgcattcattcctctctg

SEQ ID NO: 40082 - DNA, 20 bp, Artificial Sequence
  Synthetic oligonucleotide; AAG chr11 5299876 5299895 5299879 -
tgctgtttcttccaattttt

SEQ ID NO: 40083 - DNA, 20 bp, Artificial Sequence
  Synthetic oligonucleotide; GAG chr11 5299865 5299884 5299868 -
ccaatttttaagttctcgtt

SEQ ID NO: 40084 - DNA, 20 bp, Artificial Sequence
  Synthetic oligonucleotide; AAG chr11 5299832 5299851 5299835 -
atattttcttttctgattga

SEQ ID NO: 40085 - DNA, 20 bp, Artificial Sequence
  Synthetic oligonucleotide; CAG chr11 5299821 5299840 5299824 -
tctgattgaaagtccatgtt

SEQ ID NO: 40086 - DNA, 20 bp, Artificial Sequence
  Synthetic oligonucleotide; CAG chr11 5299814 5299833 5299817 -
gaaagtccatgttcagaacc

SEQ ID NO: 40087 - DNA, 20 bp, Artificial Sequence
  Synthetic oligonucleotide; AAG chr11 5299772 5299791 5299775 -
aaattctctctgcttcactt

SEQ ID NO: 40088 - DNA, 20 bp, Artificial Sequence
  Synthetic oligonucleotide; TGG chr11 5299744 5299763 5299747 -
tttcatatttattttacatc

SEQ ID NO: 40089 - DNA, 20 bp, Artificial Sequence
  Synthetic oligonucleotide; CAG chr11 5299740 5299759 5299743 -
atatttattttacatctgga

SEQ ID NO: 40090 - DNA, 20 bp, Artificial Sequence
  Synthetic oligonucleotide; GAG chr11 5299736 5299755 5299739 -
ttattttacatctggacagt

SEQ ID NO: 40091 - DNA, 20 bp, Artificial Sequence
  Synthetic oligonucleotide; CAG chr11 5299717 5299736 5299720 -
tgagcactctgaaaatattc

SEQ ID NO: 40092 - DNA, 20 bp, Artificial Sequence
  Synthetic oligonucleotide; GAG chr11 5299715 5299734 5299718 -
agcactctgaaaatattcca

SEQ ID NO: 40093 - DNA, 20 bp, Artificial Sequence
  Synthetic oligonucleotide; AAG chr11 5299705 5299724 5299708 -
aaatattccagagatttgat

SEQ ID NO: 40094 - DNA, 20 bp, Artificial Sequence
  Synthetic oligonucleotide; AAG chr11 5299682 5299701 5299685 -
aaaatacttactgaaaacta

SEQ ID NO: 40095 - DNA, 20 bp, Artificial Sequence
  Synthetic oligonucleotide; CAG chr11 5299669 5299688 5299672 -
aaaactaaagctaaataatg

SEQ ID NO: 40096 - DNA, 20 bp, Artificial Sequence
  Synthetic oligonucleotide; TAG chr11 5299653 5299672 5299656 -
aatgcagtatttctccaaat

SEQ ID NO: 40097 - DNA, 20 bp, Artificial Sequence
  Synthetic oligonucleotide; AAG chr11 5299650 5299669 5299653 -
gcagtatttctccaaattag

SEQ ID NO: 40098 - DNA, 20 bp, Artificial Sequence
  Synthetic oligonucleotide; AGG chr11 5299649 5299668 5299652 -
cagtatttctccaaattaga

SEQ ID NO: 40099 - DNA, 20 bp, Artificial Sequence
  Synthetic oligonucleotide; TGG chr11 5299640 5299659 5299643 -
tccaaattagaaggcccatt

SEQ ID NO: 40100 - DNA, 20 bp, Artificial Sequence
  Synthetic oligonucleotide; CAG chr11 5299634 5299653 5299637 -
ttagaaggcccatttggatg

SEQ ID NO: 40101 - DNA, 20 bp, Artificial Sequence
  Synthetic oligonucleotide; AGG chr11 5299633 5299652 5299636 -
tagaaggcccatttggatgc

SEQ ID NO: 40102 - DNA, 20 bp, Artificial Sequence
  Synthetic oligonucleotide; AAG chr11 5299599 5299618 5299602 -
ctaataaatgactactcctg

SEQ ID NO: 40103 - DNA, 20 bp, Artificial Sequence
  Synthetic oligonucleotide; AGG chr11 5299598 5299617 5299601 -
taataaatgactactcctga

SEQ ID NO: 40104 - DNA, 20 bp, Artificial Sequence
  Synthetic oligonucleotide; CAG chr11 5299592 5299611 5299595 -
atgactactcctgaaggatt

SEQ ID NO: 40105 - DNA, 20 bp, Artificial Sequence
  Synthetic oligonucleotide; GAG chr11 5299569 5299588 5299572 -
ttattgtgcgaattgtttgt

SEQ ID NO: 40106 - DNA, 20 bp, Artificial Sequence
  Synthetic oligonucleotide; GAG chr11 5299567 5299586 5299570 -
attgtgcgaattgtttgtga

SEQ ID NO: 40107 - DNA, 20 bp, Artificial Sequence
  Synthetic oligonucleotide; AAG chr11 5299556 5299575 5299559 -
tgtttgtgagagttctttga

SEQ ID NO: 40108 - DNA, 20 bp, Artificial Sequence
  Synthetic oligonucleotide; TAG chr11 5299553 5299572 5299556 -
ttgtgagagttctttgaaag

SEQ ID NO: 40109 - DNA, 20 bp, Artificial Sequence
  Synthetic oligonucleotide; AGG chr11 5299552 5299571 5299555 -
tgtgagagttctttgaaagt

SEQ ID NO: 40110 - DNA, 20 bp, Artificial Sequence
  Synthetic oligonucleotide; TGG chr11 5299546 5299565 5299549 -
agttctttgaaagtaggacg

SEQ ID NO: 40111 - DNA, 20 bp, Artificial Sequence
  Synthetic oligonucleotide; GGG chr11 5299545 5299564 5299548 -
gttctttgaaagtaggacgt

SEQ ID NO: 40112 - DNA, 20 bp, Artificial Sequence
  Synthetic oligonucleotide; GGG chr11 5299544 5299563 5299547 -
ttctttgaaagtaggacgtg

SEQ ID NO: 40113 - DNA, 20 bp, Artificial Sequence
  Synthetic oligonucleotide; GGG chr11 5299543 5299562 5299546 -
tctttgaaagtaggacgtgg

SEQ ID NO: 40114 - DNA, 20 bp, Artificial Sequence
  Synthetic oligonucleotide; GGG chr11 5299542 5299561 5299545 -
ctttgaaagtaggacgtggg

SEQ ID NO: 40115 - DNA, 20 bp, Artificial Sequence
  Synthetic oligonucleotide; TAG chr11 5299522 5299541 5299525 -
gggtttattcattgtcattt

SEQ ID NO: 40116 - DNA, 20 bp, Artificial Sequence
  Synthetic oligonucleotide; AAG chr11 5299479 5299498 5299482 -
tttatttatttgtttttcca

SEQ ID NO: 40117 - DNA, 20 bp, Artificial Sequence
  Synthetic oligonucleotide; TGG chr11 5299475 5299494 5299478 -
tttatttgtttttccaaagt

SEQ ID NO: 40118 - DNA, 20 bp, Artificial Sequence
  Synthetic oligonucleotide; CAG chr11 5299468 5299487 5299471 -
gtttttccaaagttggcata

SEQ ID NO: 40119 - DNA, 20 bp, Artificial Sequence
  Synthetic oligonucleotide; GAG chr11 5299466 5299485 5299469 -
ttttccaaagttggcataca

SEQ ID NO: 40120 - DNA, 20 bp, Artificial Sequence
  Synthetic oligonucleotide; TAG chr11 5299452 5299471 5299455 -
catacagagtttattctatt

SEQ ID NO: 40121 - DNA, 20 bp, Artificial Sequence
  Synthetic oligonucleotide; TGG chr11 5299436 5299455 5299439 -
tatttagaaacgtcgttttc

SEQ ID NO: 40122 - DNA, 20 bp, Artificial Sequence
  Synthetic oligonucleotide; TGG chr11 5299419 5299438 5299422 -
ttctggttgcctttgttgtt

SEQ ID NO: 40123 - DNA, 20 bp, Artificial Sequence
  Synthetic oligonucleotide; TAG chr11 5299379 5299398 5299382 -
gctaacatacaaactacatt

SEQ ID NO: 40124 - DNA, 20 bp, Artificial Sequence
  Synthetic oligonucleotide; AGG chr11 5299378 5299397 5299381 -
ctaacatacaaactacattt

SEQ ID NO: 40125 - DNA, 20 bp, Artificial Sequence
  Synthetic oligonucleotide; AAG chr11 5299374 5299393 5299377 -
catacaaactacatttagga

SEQ ID NO: 40126 - DNA, 20 bp, Artificial Sequence
  Synthetic oligonucleotide; AAG chr11 5299349 5299368 5299352 -
gcatctctattgaccactga

SEQ ID NO: 40127 - DNA, 20 bp, Artificial Sequence
  Synthetic oligonucleotide; AGG chr11 5299348 5299367 5299351 -
catctctattgaccactgaa

SEQ ID NO: 40128 - DNA, 20 bp, Artificial Sequence
  Synthetic oligonucleotide; AAG chr11 5299337 5299356 5299340 -
accactgaaaggatgtctgt

SEQ ID NO: 40129 - DNA, 20 bp, Artificial Sequence
  Synthetic oligonucleotide; GAG chr11 5299335 5299354 5299338 -
cactgaaaggatgtctgtaa

SEQ ID NO: 40130 - DNA, 20 bp, Artificial Sequence
  Synthetic oligonucleotide; TAG chr11 5299323 5299342 5299326 -
gtctgtaagagtaaaaaaca

SEQ ID NO: 40131 - DNA, 20 bp, Artificial Sequence
  Synthetic oligonucleotide; CGG chr11 5299320 5299339 5299323 -
tgtaagagtaaaaaacatag

SEQ ID NO: 40132 - DNA, 20 bp, Artificial Sequence
  Synthetic oligonucleotide; CAG chr11 5299305 5299324 5299308 -
catagcggtattaaaatttt

SEQ ID NO: 40133 - DNA, 20 bp, Artificial Sequence
  Synthetic oligonucleotide; AGG chr11 5299304 5299323 5299307 -
atagcggtattaaaattttc

SEQ ID NO: 40134 - DNA, 20 bp, Artificial Sequence
  Synthetic oligonucleotide; AAG chr11 5299296 5299315 5299299 -
attaaaattttcaggcgaat

SEQ ID NO: 40135 - DNA, 20 bp, Artificial Sequence
  Synthetic oligonucleotide; AGG chr11 5299295 5299314 5299298 -
ttaaaattttcaggcgaata

SEQ ID NO: 40136 - DNA, 20 bp, Artificial Sequence
  Synthetic oligonucleotide; GGG chr11 5299294 5299313 5299297 -
taaaattttcaggcgaataa

SEQ ID NO: 40137 - DNA, 20 bp, Artificial Sequence
  Synthetic oligonucleotide; TGG chr11 5299278 5299297 5299281 -
ataagggttttttgtaaaaa

SEQ ID NO: 40138 - DNA, 20 bp, Artificial Sequence
  Synthetic oligonucleotide; CAG chr11 5299262 5299281 5299265 -
aaaatggcaaatgtatttgt

SEQ ID NO: 40139 - DNA, 20 bp, Artificial Sequence
  Synthetic oligonucleotide; TAG chr11 5299259 5299278 5299262 -
atggcaaatgtatttgtcag

SEQ ID NO: 40140 - DNA, 20 bp, Artificial Sequence
  Synthetic oligonucleotide; AGG chr11 5299258 5299277 5299261 -
tggcaaatgtatttgtcagt

SEQ ID NO: 40141 - DNA, 20 bp, Artificial Sequence
  Synthetic oligonucleotide; GGG chr11 5299257 5299276 5299260 -
ggcaaatgtatttgtcagta

SEQ ID NO: 40142 - DNA, 20 bp, Artificial Sequence
  Synthetic oligonucleotide; GGG chr11 5299256 5299275 5299259 -
gcaaatgtatttgtcagtag

SEQ ID NO: 40143 - DNA, 20 bp, Artificial Sequence
  Synthetic oligonucleotide; AAG chr11 5299225 5299244 5299228 -
gctgttttcttgattgttat

SEQ ID NO: 40144 - DNA, 20 bp, Artificial Sequence
  Synthetic oligonucleotide; AAG chr11 5299222 5299241 5299225 -
gttttcttgattgttataag

SEQ ID NO: 40145 - DNA, 20 bp, Artificial Sequence
  Synthetic oligonucleotide; CAG chr11 5299218 5299237 5299221 -
tcttgattgttataagaaga

SEQ ID NO: 40146 - DNA, 20 bp, Artificial Sequence
  Synthetic oligonucleotide; TAG chr11 5299182 5299201 5299185 -
gtaaatgtgtaatgcaaact

SEQ ID NO: 40147 - DNA, 20 bp, Artificial Sequence
  Synthetic oligonucleotide; AGG chr11 5299181 5299200 5299184 -
taaatgtgtaatgcaaactt

SEQ ID NO: 40148 - DNA, 20 bp, Artificial Sequence
  Synthetic oligonucleotide; GGG chr11 5299180 5299199 5299183 -
aaatgtgtaatgcaaactta

SEQ ID NO: 40149 - DNA, 20 bp, Artificial Sequence
  Synthetic oligonucleotide; GGG chr11 5299179 5299198 5299182 -
aatgtgtaatgcaaacttag

SEQ ID NO: 40150 - DNA, 20 bp, Artificial Sequence
  Synthetic oligonucleotide; AAG chr11 5299161 5299180 5299164 -
aggggcgatgtgctgaaaat

SEQ ID NO: 40151 - DNA, 20 bp, Artificial Sequence
  Synthetic oligonucleotide; AGG chr11 5299160 5299179 5299163 -
ggggcgatgtgctgaaaata

SEQ ID NO: 40152 - DNA, 20 bp, Artificial Sequence
  Synthetic oligonucleotide; TAG chr11 5299152 5299171 5299155 -
gtgctgaaaataaggtatga

SEQ ID NO: 40153 - DNA, 20 bp, Artificial Sequence
  Synthetic oligonucleotide; AAG chr11 5299147 5299166 5299150 -
gaaaataaggtatgatagcg

SEQ ID NO: 40154 - DNA, 20 bp, Artificial Sequence
  Synthetic oligonucleotide; AAG chr11 5299141 5299160 5299144 -
aaggtatgatagcgaagtct

SEQ ID NO: 40155 - DNA, 20 bp, Artificial Sequence
  Synthetic oligonucleotide; CAG chr11 5299135 5299154 5299138 -
tgatagcgaagtctaagaaa

SEQ ID NO: 40156 - DNA, 20 bp, Artificial Sequence
  Synthetic oligonucleotide; GAG chr11 5299133 5299152 5299136 -
atagcgaagtctaagaaaca

SEQ ID NO: 40157 - DNA, 20 bp, Artificial Sequence
  Synthetic oligonucleotide; AGG chr11 5299132 5299151 5299135 -
tagcgaagtctaagaaacag

SEQ ID NO: 40158 - DNA, 20 bp, Artificial Sequence
  Synthetic oligonucleotide; AAG chr11 5299114 5299133 5299117 -
agaggtatctaattataaat

SEQ ID NO: 40159 - DNA, 20 bp, Artificial Sequence
  Synthetic oligonucleotide; AAG chr11 5299111 5299130 5299114 -
ggtatctaattataaataag

SEQ ID NO: 40160 - DNA, 20 bp, Artificial Sequence
  Synthetic oligonucleotide; AAG chr11 5299108 5299127 5299111 -
atctaattataaataagaag

SEQ ID NO: 40161 - DNA, 20 bp, Artificial Sequence
  Synthetic oligonucleotide; TGG chr11 5299105 5299124 5299108 -
taattataaataagaagaag

SEQ ID NO: 40162 - DNA, 20 bp, Artificial Sequence
  Synthetic oligonucleotide; GGG chr11 5299104 5299123 5299107 -
aattataaataagaagaagt

SEQ ID NO: 40163 - DNA, 20 bp, Artificial Sequence
  Synthetic oligonucleotide; AAG chr11 5299101 5299120 5299104 -
tataaataagaagaagtggg

SEQ ID NO: 40164 - DNA, 20 bp, Artificial Sequence
  Synthetic oligonucleotide; AAG chr11 5299095 5299114 5299098 -
taagaagaagtgggaagatc

SEQ ID NO: 40165 - DNA, 20 bp, Artificial Sequence
  Synthetic oligonucleotide; GAG chr11 5299090 5299109 5299093 -
agaagtgggaagatcaagtt

SEQ ID NO: 40166 - DNA, 20 bp, Artificial Sequence
  Synthetic oligonucleotide; GAG chr11 5299088 5299107 5299091 -
aagtgggaagatcaagttga

SEQ ID NO: 40167 - DNA, 20 bp, Artificial Sequence
  Synthetic oligonucleotide; AAG chr11 5299082 5299101 5299085 -
gaagatcaagttgagagctc

SEQ ID NO: 40168 - DNA, 20 bp, Artificial Sequence
  Synthetic oligonucleotide; TAG chr11 5299066 5299085 5299069 -
gctcaagtttactcatatgt

SEQ ID NO: 40169 - DNA, 20 bp, Artificial Sequence
  Synthetic oligonucleotide; AAG chr11 5299062 5299081 5299065 -
aagtttactcatatgttagc

SEQ ID NO: 40170 - DNA, 20 bp, Artificial Sequence
  Synthetic oligonucleotide; AGG chr11 5299061 5299080 5299064 -
agtttactcatatgttagca

SEQ ID NO: 40171 - DNA, 20 bp, Artificial Sequence
  Synthetic oligonucleotide; GGG chr11 5299060 5299079 5299063 -
gtttactcatatgttagcaa

SEQ ID NO: 40172 - DNA, 20 bp, Artificial Sequence
  Synthetic oligonucleotide; TAG chr11 5299038 5299057 5299041 -
gatgacataatatgatatta

SEQ ID NO: 40173 - DNA, 20 bp, Artificial Sequence
  Synthetic oligonucleotide; CAG chr11 5299019 5299038 5299022 -
atagcctattgatctttaaa

SEQ ID NO: 40174 - DNA, 20 bp, Artificial Sequence
  Synthetic oligonucleotide; TAG chr11 5299006 5299025 5299009 -
ctttaaacagcctgtatcaa

SEQ ID NO: 40175 - DNA, 20 bp, Artificial Sequence
  Synthetic oligonucleotide; AAG chr11 5298987 5299006 5298990 -
atagtcaaaaatcaattaaa

SEQ ID NO: 40176 - DNA, 20 bp, Artificial Sequence
  Synthetic oligonucleotide; AGG chr11 5298986 5299005 5298989 -
tagtcaaaaatcaattaaaa

SEQ ID NO: 40177 - DNA, 20 bp, Artificial Sequence
  Synthetic oligonucleotide; AAG chr11 5298955 5298974 5298958 -
taaaaatcactcattttctt

SEQ ID NO: 40178 - DNA, 20 bp, Artificial Sequence
  Synthetic oligonucleotide; TAG chr11 5298884 5298903 5298887 -
tattatattttacaacttct

SEQ ID NO: 40179 - DNA, 20 bp, Artificial Sequence
  Synthetic oligonucleotide; AAG chr11 5298859 5298878 5298862 -
tgaaaatcctttcaattatt

SEQ ID NO: 40180 - DNA, 20 bp, Artificial Sequence
  Synthetic oligonucleotide; CAG chr11 5298855 5298874 5298858 -
aatcctttcaattattaagt

SEQ ID NO: 40181 - DNA, 20 bp, Artificial Sequence
  Synthetic oligonucleotide; CAG chr11 5298836 5298855 5298839 -
tcagcatccacctgctgatc

SEQ ID NO: 40182 - DNA, 20 bp, Artificial Sequence
  Synthetic oligonucleotide; AAG chr11 5298825 5298844 5298828 -
ctgctgatccagtgatatat

SEQ ID NO: 40183 - DNA, 20 bp, Artificial Sequence
  Synthetic oligonucleotide; AGG chr11 5298824 5298843 5298827 -
tgctgatccagtgatatata

SEQ ID NO: 40184 - DNA, 20 bp, Artificial Sequence
  Synthetic oligonucleotide; AAG chr11 5298803 5298822 5298806 -
ggacatttattgcaccactg

SEQ ID NO: 40185 - DNA, 20 bp, Artificial Sequence
  Synthetic oligonucleotide; CAG chr11 5298794 5298813 5298797 -
ttgcaccactgaagtaaaat

SEQ ID NO: 40186 - DNA, 20 bp, Artificial Sequence
  Synthetic oligonucleotide; AAG chr11 5298778 5298797 5298781 -
aaatcagtgtcctttcaaac

SEQ ID NO: 40187 - DNA, 20 bp, Artificial Sequence
  Synthetic oligonucleotide; CAG chr11 5298773 5298792 5298776 -
agtgtcctttcaaacaagtg

SEQ ID NO: 40188 - DNA, 20 bp, Artificial Sequence
  Synthetic oligonucleotide; CAG chr11 5298766 5298785 5298769 -
tttcaaacaagtgcagcttc

SEQ ID NO: 40189 - DNA, 20 bp, Artificial Sequence
  Synthetic oligonucleotide; AAG chr11 5298761 5298780 5298764 -
aacaagtgcagcttccagac

SEQ ID NO: 40190 - DNA, 20 bp, Artificial Sequence
  Synthetic oligonucleotide; TAG chr11 5298753 5298772 5298756 -
cagcttccagacaagtctct

SEQ ID NO: 40191 - DNA, 20 bp, Artificial Sequence
  Synthetic oligonucleotide; CAG chr11 5298740 5298759 5298743 -
agtctcttagacctcatcct

SEQ ID NO: 40192 - DNA, 20 bp, Artificial Sequence
  Synthetic oligonucleotide; AAG chr11 5298721 5298740 5298724 -
tcagtctcaccctgactgac

SEQ ID NO: 40193 - DNA, 20 bp, Artificial Sequence
  Synthetic oligonucleotide; GAG chr11 5298706 5298725 5298709 -
ctgacaagtttgccatactt

SEQ ID NO: 40194 - DNA, 20 bp, Artificial Sequence
  Synthetic oligonucleotide; AAG chr11 5298694 5298713 5298697 -
ccatacttgagaaccttgtg

SEQ ID NO: 40195 - DNA, 20 bp, Artificial Sequence
  Synthetic oligonucleotide; CAG chr11 5298691 5298710 5298694 -
tacttgagaaccttgtgaag

SEQ ID NO: 40196 - DNA, 20 bp, Artificial Sequence
  Synthetic oligonucleotide; AGG chr11 5298690 5298709 5298693 -
acttgagaaccttgtgaagc

SEQ ID NO: 40197 - DNA, 20 bp, Artificial Sequence
  Synthetic oligonucleotide; AAG chr11 5298675 5298694 5298678 -
gaagcaggcgttgtgtctat

SEQ ID NO: 40198 - DNA, 20 bp, Artificial Sequence
  Synthetic oligonucleotide; TAG chr11 5298666 5298685 5298669 -
gttgtgtctataagctctct

SEQ ID NO: 40199 - DNA, 20 bp, Artificial Sequence
  Synthetic oligonucleotide; GAG chr11 5298664 5298683 5298667 -
tgtgtctataagctctctta

SEQ ID NO: 40200 - DNA, 20 bp, Artificial Sequence
  Synthetic oligonucleotide; GAG chr11 5298652 5298671 5298655 -
ctctcttagagatctgctct

SEQ ID NO: 40201 - DNA, 20 bp, Artificial Sequence
  Synthetic oligonucleotide; AGG chr11 5298651 5298670 5298654 -
tctcttagagatctgctctg

SEQ ID NO: 40202 - DNA, 20 bp, Artificial Sequence
  Synthetic oligonucleotide; AAG chr11 5298641 5298660 5298644 -
atctgctctgaggaattatc

SEQ ID NO: 40203 - DNA, 20 bp, Artificial Sequence
  Synthetic oligonucleotide; CAG chr11 5298637 5298656 5298640 -
gctctgaggaattatcaagt

SEQ ID NO: 40204 - DNA, 20 bp, Artificial Sequence
  Synthetic oligonucleotide; CAG chr11 5298632 5298651 5298635 -
gaggaattatcaagtcagca

SEQ ID NO: 40205 - DNA, 20 bp, Artificial Sequence
  Synthetic oligonucleotide; GAG chr11 5298609 5298628 5298612 -
ttaattctctgtcatactgt

SEQ ID NO: 40206 - DNA, 20 bp, Artificial Sequence
  Synthetic oligonucleotide; TAG chr11 5298604 5298623 5298607 -
tctctgtcatactgtgagtt

SEQ ID NO: 40207 - DNA, 20 bp, Artificial Sequence
  Synthetic oligonucleotide; CAG chr11 5298600 5298619 5298603 -
tgtcatactgtgagtttagt

SEQ ID NO: 40208 - DNA, 20 bp, Artificial Sequence
  Synthetic oligonucleotide; AGG chr11 5298599 5298618 5298602 -
gtcatactgtgagtttagtc

SEQ ID NO: 40209 - DNA, 20 bp, Artificial Sequence
  Synthetic oligonucleotide; GGG chr11 5298598 5298617 5298601 -
tcatactgtgagtttagtca

SEQ ID NO: 40210 - DNA, 20 bp, Artificial Sequence
  Synthetic oligonucleotide; CAG chr11 5298595 5298614 5298598 -
tactgtgagtttagtcaggg

SEQ ID NO: 40211 - DNA, 20 bp, Artificial Sequence
  Synthetic oligonucleotide; CAG chr11 5298575 5298594 5298578 -
cagtaattatatttccccat

SEQ ID NO: 40212 - DNA, 20 bp, Artificial Sequence
  Synthetic oligonucleotide; AAG chr11 5298558 5298577 5298561 -
catcagcatattgtcttccc

SEQ ID NO: 40213 - DNA, 20 bp, Artificial Sequence
  Synthetic oligonucleotide; AGG chr11 5298557 5298576 5298560 -
atcagcatattgtcttccca

SEQ ID NO: 40214 - DNA, 20 bp, Artificial Sequence
  Synthetic oligonucleotide; CAG chr11 5298513 5298532 5298516 -
aacccccaaatttattaatg

SEQ ID NO: 40215 - DNA, 20 bp, Artificial Sequence
  Synthetic oligonucleotide; TGG chr11 5298481 5298500 5298484 -
aatacacaatgttacttgtc

SEQ ID NO: 40216 - DNA, 20 bp, Artificial Sequence
  Synthetic oligonucleotide; TGG chr11 5298476 5298495 5298479 -
acaatgttacttgtctggtg

SEQ ID NO: 40217 - DNA, 20 bp, Artificial Sequence
  Synthetic oligonucleotide; AAG chr11 5298470 5298489 5298473 -
ttacttgtctggtgtggcta

SEQ ID NO: 40218 - DNA, 20 bp, Artificial Sequence
  Synthetic oligonucleotide; TAG chr11 5298437 5298456 5298440 -
tatttatttatttattttta

SEQ ID NO: 40219 - DNA, 20 bp, Artificial Sequence
  Synthetic oligonucleotide; CAG chr11 5298413 5298432 5298416 -
catgatcttgctctgttgcc

SEQ ID NO: 40220 - DNA, 20 bp, Artificial Sequence
  Synthetic oligonucleotide; AGG chr11 5298412 5298431 5298415 -
atgatcttgctctgttgccc

SEQ ID NO: 40221 - DNA, 20 bp, Artificial Sequence
  Synthetic oligonucleotide; TGG chr11 5298408 5298427 5298411 -
tcttgctctgttgcccaggc

SEQ ID NO: 40222 - DNA, 20 bp, Artificial Sequence
  Synthetic oligonucleotide; GAG chr11 5298406 5298425 5298409 -
ttgctctgttgcccaggctg

SEQ ID NO: 40223 - DNA, 20 bp, Artificial Sequence
  Synthetic oligonucleotide; CAG chr11 5298401 5298420 5298404 -
ctgttgcccaggctggagtg

SEQ ID NO: 40224 - DNA, 20 bp, Artificial Sequence
  Synthetic oligonucleotide; TGG chr11 5298398 5298417 5298401 -
ttgcccaggctggagtgcag

SEQ ID NO: 40225 - DNA, 20 bp, Artificial Sequence
  Synthetic oligonucleotide; CAG chr11 5298387 5298406 5298390 -
ggagtgcagtggtgccatca

SEQ ID NO: 40226 - DNA, 20 bp, Artificial Sequence
  Synthetic oligonucleotide; CAG chr11 5298377 5298396 5298380 -
ggtgccatcacagctcactg

SEQ ID NO: 40227 - DNA, 20 bp, Artificial Sequence
  Synthetic oligonucleotide; TGG chr11 5298363 5298382 5298366 -
tcactgcagccttgaaatcc

SEQ ID NO: 40228 - DNA, 20 bp, Artificial Sequence
  Synthetic oligonucleotide; GGG chr11 5298362 5298381 5298365 -
cactgcagccttgaaatcct

SEQ ID NO: 40229 - DNA, 20 bp, Artificial Sequence
  Synthetic oligonucleotide; AAG chr11 5298356 5298375 5298359 -
agccttgaaatcctgggctc

SEQ ID NO: 40230 - DNA, 20 bp, Artificial Sequence
  Synthetic oligonucleotide; CAG chr11 5298339 5298358 5298342 -
ctcaagcaatccttcttcct

SEQ ID NO: 40231 - DNA, 20 bp, Artificial Sequence
  Synthetic oligonucleotide; GAG chr11 5298330 5298349 5298333 -
tccttcttcctcagcttttt

SEQ ID NO: 40232 - DNA, 20 bp, Artificial Sequence
  Synthetic oligonucleotide; TAG chr11 5298323 5298342 5298326 -
tcctcagctttttgagtacc

SEQ ID NO: 40233 - DNA, 20 bp, Artificial Sequence
  Synthetic oligonucleotide; AGG chr11 5298322 5298341 5298325 -
cctcagctttttgagtacct

SEQ ID NO: 40234 - DNA, 20 bp, Artificial Sequence
  Synthetic oligonucleotide; CAG chr11 5298315 5298334 5298318 -
tttttgagtacctaggacta

SEQ ID NO: 40235 - DNA, 20 bp, Artificial Sequence
  Synthetic oligonucleotide; AGG chr11 5298314 5298333 5298317 -
ttttgagtacctaggactac

SEQ ID NO: 40236 - DNA, 20 bp, Artificial Sequence
  Synthetic oligonucleotide; TAG chr11 5298295 5298314 5298298 -
caggtttatgccactgcacc

SEQ ID NO: 40237 - DNA, 20 bp, Artificial Sequence
  Synthetic oligonucleotide; TGG chr11 5298267 5298286 5298270 -
gtttttattttttgtaaata

SEQ ID NO: 40238 - DNA, 20 bp, Artificial Sequence
  Synthetic oligonucleotide; GGG chr11 5298266 5298285 5298269 -
tttttattttttgtaaatat

SEQ ID NO: 40239 - DNA, 20 bp, Artificial Sequence
  Synthetic oligonucleotide; GAG chr11 5298247 5298266 5298250 -
tgggatcatgttatgttgcc

SEQ ID NO: 40240 - DNA, 20 bp, Artificial Sequence
  Synthetic oligonucleotide; AGG chr11 5298246 5298265 5298249 -
gggatcatgttatgttgccg

SEQ ID NO: 40241 - DNA, 20 bp, Artificial Sequence
  Synthetic oligonucleotide; AAG chr11 5298221 5298240 5298224 -
gctctccaattcctaacctc

SEQ ID NO: 40242 - DNA, 20 bp, Artificial Sequence
  Synthetic oligonucleotide; TGG chr11 5298204 5298223 5298207 -
ctcaagcaatcctcccaccc

SEQ ID NO: 40243 - DNA, 20 bp, Artificial Sequence
  Synthetic oligonucleotide; TAG chr11 5298190 5298209 5298193 -
ccaccctggcctcctaatga

SEQ ID NO: 40244 - DNA, 20 bp, Artificial Sequence
  Synthetic oligonucleotide; AGG chr11 5298189 5298208 5298192 -
caccctggcctcctaatgat

SEQ ID NO: 40245 - DNA, 20 bp, Artificial Sequence
  Synthetic oligonucleotide; GGG chr11 5298188 5298207 5298191 -
accctggcctcctaatgata

SEQ ID NO: 40246 - DNA, 20 bp, Artificial Sequence
  Synthetic oligonucleotide; CAG chr11 5298184 5298203 5298187 -
tggcctcctaatgataggga

SEQ ID NO: 40247 - DNA, 20 bp, Artificial Sequence
  Synthetic oligonucleotide; AGG chr11 5298183 5298202 5298186 -
ggcctcctaatgatagggac

SEQ ID NO: 40248 - DNA, 20 bp, Artificial Sequence
  Synthetic oligonucleotide; GAG chr11 5298181 5298200 5298184 -
cctcctaatgatagggacag

SEQ ID NO: 40249 - DNA, 20 bp, Artificial Sequence
  Synthetic oligonucleotide; AGG chr11 5298180 5298199 5298183 -
ctcctaatgatagggacagg

SEQ ID NO: 40250 - DNA, 20 bp, Artificial Sequence
  Synthetic oligonucleotide; CAG chr11 5298177 5298196 5298180 -
ctaatgatagggacaggagg

SEQ ID NO: 40251 - DNA, 20 bp, Artificial Sequence
  Synthetic oligonucleotide; GAG chr11 5298175 5298194 5298178 -
aatgatagggacaggaggca

SEQ ID NO: 40252 - DNA, 20 bp, Artificial Sequence
  Synthetic oligonucleotide; TAG chr11 5298166 5298185 5298169 -
gacaggaggcagagaaattt

SEQ ID NO: 40253 - DNA, 20 bp, Artificial Sequence
  Synthetic oligonucleotide; AGG chr11 5298165 5298184 5298168 -
acaggaggcagagaaatttt

SEQ ID NO: 40254 - DNA, 20 bp, Artificial Sequence
  Synthetic oligonucleotide; CAG chr11 5298162 5298181 5298165 -
ggaggcagagaaattttagg

SEQ ID NO: 40255 - DNA, 20 bp, Artificial Sequence
  Synthetic oligonucleotide; AAG chr11 5298157 5298176 5298160 -
cagagaaattttaggcagaa

SEQ ID NO: 40256 - DNA, 20 bp, Artificial Sequence
  Synthetic oligonucleotide; AGG chr11 5298156 5298175 5298159 -
agagaaattttaggcagaaa

SEQ ID NO: 40257 - DNA, 20 bp, Artificial Sequence
  Synthetic oligonucleotide; GGG chr11 5298155 5298174 5298158 -
gagaaattttaggcagaaaa

SEQ ID NO: 40258 - DNA, 20 bp, Artificial Sequence
  Synthetic oligonucleotide; CGG chr11 5298152 5298171 5298155 -
aaattttaggcagaaaaggg

SEQ ID NO: 40259 - DNA, 20 bp, Artificial Sequence
  Synthetic oligonucleotide; GGG chr11 5298151 5298170 5298154 -
aattttaggcagaaaagggc

SEQ ID NO: 40260 - DNA, 20 bp, Artificial Sequence
  Synthetic oligonucleotide; GGG chr11 5298150 5298169 5298153 -
attttaggcagaaaagggcg

SEQ ID NO: 40261 - DNA, 20 bp, Artificial Sequence
  Synthetic oligonucleotide; TGG chr11 5298143 5298162 5298146 -
gcagaaaagggcggggtccc

SEQ ID NO: 40262 - DNA, 20 bp, Artificial Sequence
  Synthetic oligonucleotide; TGG chr11 5298138 5298157 5298141 -
aaagggcggggtccctggca

SEQ ID NO: 40263 - DNA, 20 bp, Artificial Sequence
  Synthetic oligonucleotide; GGG chr11 5298137 5298156 5298140 -
aagggcggggtccctggcat

SEQ ID NO: 40264 - DNA, 20 bp, Artificial Sequence
  Synthetic oligonucleotide; AAG chr11 5298124 5298143 5298127 -
ctggcatgggtcctaccctg

SEQ ID NO: 40265 - DNA, 20 bp, Artificial Sequence
  Synthetic oligonucleotide; TGG chr11 5298119 5298138 5298122 -
atgggtcctaccctgaagcc

SEQ ID NO: 40266 - DNA, 20 bp, Artificial Sequence
  Synthetic oligonucleotide; TGG chr11 5298112 5298131 5298115 -
ctaccctgaagcctggaaca

SEQ ID NO: 40267 - DNA, 20 bp, Artificial Sequence
  Synthetic oligonucleotide; GAG chr11 5298101 5298120 5298104 -
cctggaacatggccattcct

SEQ ID NO: 40268 - DNA, 20 bp, Artificial Sequence
  Synthetic oligonucleotide; CAG chr11 5298088 5298107 5298091 -
cattcctgagatatttctct

SEQ ID NO: 40269 - DNA, 20 bp, Artificial Sequence
  Synthetic oligonucleotide; CAG chr11 5298084 5298103 5298087 -
cctgagatatttctctcagc

SEQ ID NO: 40270 - DNA, 20 bp, Artificial Sequence
  Synthetic oligonucleotide; AAG chr11 5298059 5298078 5298062 -
ctgtttcacattcacatttt

SEQ ID NO: 40271 - DNA, 20 bp, Artificial Sequence
  Synthetic oligonucleotide; CAG chr11 5298053 5298072 5298056 -
cacattcacattttaagtgc

SEQ ID NO: 40272 - DNA, 20 bp, Artificial Sequence
  Synthetic oligonucleotide; AGG chr11 5298052 5298071 5298055 -
acattcacattttaagtgcc

SEQ ID NO: 40273 - DNA, 20 bp, Artificial Sequence
  Synthetic oligonucleotide; TAG chr11 5298035 5298054 5298038 -
gccaggtctttctatctttc

SEQ ID NO: 40274 - DNA, 20 bp, Artificial Sequence
  Synthetic oligonucleotide; TAG chr11 5298011 5298030 5298014 -
tgtcttattcatgcactttc

SEQ ID NO: 40275 - DNA, 20 bp, Artificial Sequence
  Synthetic oligonucleotide; CAG chr11 5297924 5297943 5297927 -
ttgtctcatgaatattccct

SEQ ID NO: 40276 - DNA, 20 bp, Artificial Sequence
  Synthetic oligonucleotide; AGG chr11 5297923 5297942 5297926 -
tgtctcatgaatattccctc

SEQ ID NO: 40277 - DNA, 20 bp, Artificial Sequence
  Synthetic oligonucleotide; TAG chr11 5297891 5297910 5297894 -
cccacgccgttccctttatc

SEQ ID NO: 40278 - DNA, 20 bp, Artificial Sequence
  Synthetic oligonucleotide; TAG chr11 5297858 5297877 5297861 -
attcctcttgctgtactgat

SEQ ID NO: 40279 - DNA, 20 bp, Artificial Sequence
  Synthetic oligonucleotide; TAG chr11 5297840 5297859 5297843 -
attagccttgactcctctta

SEQ ID NO: 40280 - DNA, 20 bp, Artificial Sequence
  Synthetic oligonucleotide; CAG chr11 5297830 5297849 5297833 -
actcctcttatagctcaccc

SEQ ID NO: 40281 - DNA, 20 bp, Artificial Sequence
  Synthetic oligonucleotide; TGG chr11 5297822 5297841 5297825 -
tatagctcaccccagcctct

SEQ ID NO: 40282 - DNA, 20 bp, Artificial Sequence
  Synthetic oligonucleotide; AAG chr11 5297809 5297828 5297812 -
agcctcttggcattattatc

SEQ ID NO: 40283 - DNA, 20 bp, Artificial Sequence
  Synthetic oligonucleotide; CAG chr11 5297798 5297817 5297801 -
attattatcaagtgttacca

SEQ ID NO: 40284 - DNA, 20 bp, Artificial Sequence
  Synthetic oligonucleotide; CAG chr11 5297790 5297809 5297793 -
caagtgttaccacagttgaa

SEQ ID NO: 40285 - DNA, 20 bp, Artificial Sequence
  Synthetic oligonucleotide; TGG chr11 5297786 5297805 5297789 -
tgttaccacagttgaacagc

SEQ ID NO: 40286 - DNA, 20 bp, Artificial Sequence
  Synthetic oligonucleotide; AAG chr11 5297777 5297796 5297780 -
agttgaacagctggatccaa

SEQ ID NO: 40287 - DNA, 20 bp, Artificial Sequence
  Synthetic oligonucleotide; AAG chr11 5297763 5297782 5297766 -
atccaaaagtattgaccaat

SEQ ID NO: 40288 - DNA, 20 bp, Artificial Sequence
  Synthetic oligonucleotide; AGG chr11 5297762 5297781 5297765 -
tccaaaagtattgaccaata

SEQ ID NO: 40289 - DNA, 20 bp, Artificial Sequence
  Synthetic oligonucleotide; CAG chr11 5297757 5297776 5297760 -
aagtattgaccaataaggaa

SEQ ID NO: 40290 - DNA, 20 bp, Artificial Sequence
  Synthetic oligonucleotide; TGG chr11 5297724 5297743 5297727 -
ttgcaatgtaaattataata

SEQ ID NO: 40291 - DNA, 20 bp, Artificial Sequence
  Synthetic oligonucleotide; AAG chr11 5297719 5297738 5297722 -
atgtaaattataatatggat

SEQ ID NO: 40292 - DNA, 20 bp, Artificial Sequence
  Synthetic oligonucleotide; TGG chr11 5297713 5297732 5297716 -
attataatatggataagcat

SEQ ID NO: 40293 - DNA, 20 bp, Artificial Sequence
  Synthetic oligonucleotide; AAG chr11 5297699 5297718 5297702 -
aagcattggtactaaacctg

SEQ ID NO: 40294 - DNA, 20 bp, Artificial Sequence
  Synthetic oligonucleotide; TAG chr11 5297695 5297714 5297698 -
attggtactaaacctgaagt

SEQ ID NO: 40295 - DNA, 20 bp, Artificial Sequence
  Synthetic oligonucleotide; AAG chr11 5297673 5297692 5297676 -
gtattttactctatacctac

SEQ ID NO: 40296 - DNA, 20 bp, Artificial Sequence
  Synthetic oligonucleotide; AGG chr11 5297672 5297691 5297675 -
tattttactctatacctaca

SEQ ID NO: 40297 - DNA, 20 bp, Artificial Sequence
  Synthetic oligonucleotide; AAG chr11 5297669 5297688 5297672 -
tttactctatacctacaagg

SEQ ID NO: 40298 - DNA, 20 bp, Artificial Sequence
  Synthetic oligonucleotide; AAG chr11 5297660 5297679 5297663 -
tacctacaaggaagatatac

SEQ ID NO: 40299 - DNA, 20 bp, Artificial Sequence
  Synthetic oligonucleotide; AAG chr11 5297648 5297667 5297651 -
agatatacaagtatttctct

SEQ ID NO: 40300 - DNA, 20 bp, Artificial Sequence
  Synthetic oligonucleotide; AGG chr11 5297647 5297666 5297650 -
gatatacaagtatttctcta

SEQ ID NO: 40301 - DNA, 20 bp, Artificial Sequence
  Synthetic oligonucleotide; TAG chr11 5297644 5297663 5297647 -
atacaagtatttctctaagg

SEQ ID NO: 40302 - DNA, 20 bp, Artificial Sequence
  Synthetic oligonucleotide; AAG chr11 5297635 5297654 5297638 -
tttctctaaggtagtttgaa

SEQ ID NO: 40303 - DNA, 20 bp, Artificial Sequence
  Synthetic oligonucleotide; TAG chr11 5297630 5297649 5297633 -
ctaaggtagtttgaaaagcc

SEQ ID NO: 40304 - DNA, 20 bp, Artificial Sequence
  Synthetic oligonucleotide; TAG chr11 5297624 5297643 5297627 -
tagtttgaaaagcctagata

SEQ ID NO: 40305 - DNA, 20 bp, Artificial Sequence
  Synthetic oligonucleotide; TGG chr11 5297617 5297636 5297620 -
aaaagcctagatatagaaac

SEQ ID NO: 40306 - DNA, 20 bp, Artificial Sequence
  Synthetic oligonucleotide; GAG chr11 5297604 5297623 5297607 -
tagaaactggatcctcacat

SEQ ID NO: 40307 - DNA, 20 bp, Artificial Sequence
  Synthetic oligonucleotide; CAG chr11 5297599 5297618 5297602 -
actggatcctcacatgagtt

SEQ ID NO: 40308 - DNA, 20 bp, Artificial Sequence
  Synthetic oligonucleotide; CAG chr11 5297583 5297602 5297586 -
agttcagtatataattgtaa

SEQ ID NO: 40309 - DNA, 20 bp, Artificial Sequence
  Synthetic oligonucleotide; AAG chr11 5297557 5297576 5297560 -
aaaaaatcaattatgtattc

SEQ ID NO: 40310 - DNA, 20 bp, Artificial Sequence
  Synthetic oligonucleotide; TAG chr11 5297550 5297569 5297553 -
caattatgtattcaagttgc

SEQ ID NO: 40311 - DNA, 20 bp, Artificial Sequence
  Synthetic oligonucleotide; AAG chr11 5297541 5297560 5297544 -
attcaagttgctagtgtctt

SEQ ID NO: 40312 - DNA, 20 bp, Artificial Sequence
  Synthetic oligonucleotide; GAG chr11 5297539 5297558 5297542 -
tcaagttgctagtgtcttaa

SEQ ID NO: 40313 - DNA, 20 bp, Artificial Sequence
  Synthetic oligonucleotide; AGG chr11 5297538 5297557 5297541 -
caagttgctagtgtcttaag

SEQ ID NO: 40314 - DNA, 20 bp, Artificial Sequence
  Synthetic oligonucleotide; GAG chr11 5297496 5297515 5297499 -
gattatcacaaaaatacttc

SEQ ID NO: 40315 - DNA, 20 bp, Artificial Sequence
  Synthetic oligonucleotide; AAG chr11 5297461 5297480 5297464 -
ataattcctgactacacatg

SEQ ID NO: 40316 - DNA, 20 bp, Artificial Sequence
  Synthetic oligonucleotide; GAG chr11 5297459 5297478 5297462 -
aattcctgactacacatgaa

SEQ ID NO: 40317 - DNA, 20 bp, Artificial Sequence
  Synthetic oligonucleotide; TAG chr11 5297447 5297466 5297450 -
cacatgaagagactgacacg

SEQ ID NO: 40318 - DNA, 20 bp, Artificial Sequence
  Synthetic oligonucleotide; AGG chr11 5297446 5297465 5297449 -
acatgaagagactgacacgt

SEQ ID NO: 40319 - DNA, 20 bp, Artificial Sequence
  Synthetic oligonucleotide; TAG chr11 5297434 5297453 5297437 -
tgacacgtaggtgccttact

SEQ ID NO: 40320 - DNA, 20 bp, Artificial Sequence
  Synthetic oligonucleotide; AGG chr11 5297433 5297452 5297436 -
gacacgtaggtgccttactt

SEQ ID NO: 40321 - DNA, 20 bp, Artificial Sequence
  Synthetic oligonucleotide; TAG chr11 5297430 5297449 5297433 -
acgtaggtgccttacttagg

SEQ ID NO: 40322 - DNA, 20 bp, Artificial Sequence
  Synthetic oligonucleotide; AGG chr11 5297429 5297448 5297432 -
cgtaggtgccttacttaggt

SEQ ID NO: 40323 - DNA, 20 bp, Artificial Sequence
  Synthetic oligonucleotide; AAG chr11 5297424 5297443 5297427 -
gtgccttacttaggtaggtt

SEQ ID NO: 40324 - DNA, 20 bp, Artificial Sequence
  Synthetic oligonucleotide; TAG chr11 5297397 5297416 5297400 -
ttatccaaaaccacacaatg

SEQ ID NO: 40325 - DNA, 20 bp, Artificial Sequence
  Synthetic oligonucleotide; AAG chr11 5297389 5297408 5297392 -
aaccacacaatgtagaacct

SEQ ID NO: 40326 - DNA, 20 bp, Artificial Sequence
  Synthetic oligonucleotide; CGG chr11 5297380 5297399 5297383 -
atgtagaacctaagctgatt

SEQ ID NO: 40327 - DNA, 20 bp, Artificial Sequence
  Synthetic oligonucleotide; TAG chr11 5297374 5297393 5297377 -
aacctaagctgattcggcca

SEQ ID NO: 40328 - DNA, 20 bp, Artificial Sequence
  Synthetic oligonucleotide; TGG chr11 5297359 5297378 5297362 -
ggccatagaaacacaatatg

SEQ ID NO: 40329 - DNA, 20 bp, Artificial Sequence
  Synthetic oligonucleotide; GAG chr11 5297349 5297368 5297352 -
acacaatatgtggtataaat

SEQ ID NO: 40330 - DNA, 20 bp, Artificial Sequence
  Synthetic oligonucleotide; CAG chr11 5297345 5297364 5297348 -
aatatgtggtataaatgaga

SEQ ID NO: 40331 - DNA, 20 bp, Artificial Sequence
  Synthetic oligonucleotide; GAG chr11 5297343 5297362 5297346 -
tatgtggtataaatgagaca

SEQ ID NO: 40332 - DNA, 20 bp, Artificial Sequence
  Synthetic oligonucleotide; AGG chr11 5297342 5297361 5297345 -
atgtggtataaatgagacag

SEQ ID NO: 40333 - DNA, 20 bp, Artificial Sequence
  Synthetic oligonucleotide; GGG chr11 5297341 5297360 5297344 -
tgtggtataaatgagacaga

SEQ ID NO: 40334 - DNA, 20 bp, Artificial Sequence
  Synthetic oligonucleotide; CAG chr11 5297316 5297335 5297319 -
ttctctccttcctatgctgt

SEQ ID NO: 40335 - DNA, 20 bp, Artificial Sequence
  Synthetic oligonucleotide; GAG chr11 5297304 5297323 5297307 -
tatgctgtcagatgaatact

SEQ ID NO: 40336 - DNA, 20 bp, Artificial Sequence
  Synthetic oligonucleotide; TAG chr11 5297300 5297319 5297303 -
ctgtcagatgaatactgaga

SEQ ID NO: 40337 - DNA, 20 bp, Artificial Sequence
  Synthetic oligonucleotide; TAG chr11 5297291 5297310 5297294 -
gaatactgagatagaatatt

SEQ ID NO: 40338 - DNA, 20 bp, Artificial Sequence
  Synthetic oligonucleotide; CGG chr11 5297268 5297287 5297271 -
ttcatctatcacacattaaa

SEQ ID NO: 40339 - DNA, 20 bp, Artificial Sequence
  Synthetic oligonucleotide; GGG chr11 5297267 5297286 5297270 -
tcatctatcacacattaaac

SEQ ID NO: 40340 - DNA, 20 bp, Artificial Sequence
  Synthetic oligonucleotide; AAG chr11 5297243 5297262 5297246 -
ctttacatttctgtctgttg

SEQ ID NO: 40341 - DNA, 20 bp, Artificial Sequence
  Synthetic oligonucleotide; TGG chr11 5297237 5297256 5297240 -
atttctgtctgttgaagatt

SEQ ID NO: 40342 - DNA, 20 bp, Artificial Sequence
  Synthetic oligonucleotide; GGG chr11 5297236 5297255 5297239 -
tttctgtctgttgaagattt

SEQ ID NO: 40343 - DNA, 20 bp, Artificial Sequence
  Synthetic oligonucleotide; TGG chr11 5297231 5297250 5297234 -
gtctgttgaagatttgggtg

SEQ ID NO: 40344 - DNA, 20 bp, Artificial Sequence
  Synthetic oligonucleotide; GGG chr11 5297230 5297249 5297233 -
tctgttgaagatttgggtgt

SEQ ID NO: 40345 - DNA, 20 bp, Artificial Sequence
  Synthetic oligonucleotide; GGG chr11 5297229 5297248 5297232 -
ctgttgaagatttgggtgtg

SEQ ID NO: 40346 - DNA, 20 bp, Artificial Sequence
  Synthetic oligonucleotide; AAG chr11 5297219 5297238 5297222 -
tttgggtgtggggataactc

SEQ ID NO: 40347 - DNA, 20 bp, Artificial Sequence
  Synthetic oligonucleotide; AGG chr11 5297218 5297237 5297221 -
ttgggtgtggggataactca

SEQ ID NO: 40348 - DNA, 20 bp, Artificial Sequence
  Synthetic oligonucleotide; AAG chr11 5297205 5297224 5297208 -
taactcaaggtatcatatcc

SEQ ID NO: 40349 - DNA, 20 bp, Artificial Sequence
  Synthetic oligonucleotide; AGG chr11 5297204 5297223 5297207 -
aactcaaggtatcatatcca

SEQ ID NO: 40350 - DNA, 20 bp, Artificial Sequence
  Synthetic oligonucleotide; GGG chr11 5297203 5297222 5297206 -
actcaaggtatcatatccaa

SEQ ID NO: 40351 - DNA, 20 bp, Artificial Sequence
  Synthetic oligonucleotide; TGG chr11 5297199 5297218 5297202 -
aaggtatcatatccaaggga

SEQ ID NO: 40352 - DNA, 20 bp, Artificial Sequence
  Synthetic oligonucleotide; AAG chr11 5297193 5297212 5297196 -
tcatatccaagggatggatg

SEQ ID NO: 40353 - DNA, 20 bp, Artificial Sequence
  Synthetic oligonucleotide; AGG chr11 5297192 5297211 5297195 -
catatccaagggatggatga

SEQ ID NO: 40354 - DNA, 20 bp, Artificial Sequence
  Synthetic oligonucleotide; CAG chr11 5297189 5297208 5297192 -
atccaagggatggatgaagg

SEQ ID NO: 40355 - DNA, 20 bp, Artificial Sequence
  Synthetic oligonucleotide; AGG chr11 5297188 5297207 5297191 -
tccaagggatggatgaaggc

SEQ ID NO: 40356 - DNA, 20 bp, Artificial Sequence
  Synthetic oligonucleotide; CAG chr11 5297176 5297195 5297179 -
atgaaggcaggtgactctaa

SEQ ID NO: 40357 - DNA, 20 bp, Artificial Sequence
  Synthetic oligonucleotide; AAG chr11 5297172 5297191 5297175 -
aggcaggtgactctaacaga

SEQ ID NO: 40358 - DNA, 20 bp, Artificial Sequence
  Synthetic oligonucleotide; AGG chr11 5297171 5297190 5297174 -
ggcaggtgactctaacagaa

SEQ ID NO: 40359 - DNA, 20 bp, Artificial Sequence
  Synthetic oligonucleotide; GGG chr11 5297170 5297189 5297173 -
gcaggtgactctaacagaaa

SEQ ID NO: 40360 - DNA, 20 bp, Artificial Sequence
  Synthetic oligonucleotide; AAG chr11 5297166 5297185 5297169 -
gtgactctaacagaaaggga

SEQ ID NO: 40361 - DNA, 20 bp, Artificial Sequence
  Synthetic oligonucleotide; AGG chr11 5297165 5297184 5297168 -
tgactctaacagaaagggaa

SEQ ID NO: 40362 - DNA, 20 bp, Artificial Sequence
  Synthetic oligonucleotide; TGG chr11 5297158 5297177 5297161 -
aacagaaagggaaaggatgt

SEQ ID NO: 40363 - DNA, 20 bp, Artificial Sequence
  Synthetic oligonucleotide; AAG chr11 5297154 5297173 5297157 -
gaaagggaaaggatgttggc

SEQ ID NO: 40364 - DNA, 20 bp, Artificial Sequence
  Synthetic oligonucleotide; AGG chr11 5297153 5297172 5297156 -
aaagggaaaggatgttggca

SEQ ID NO: 40365 - DNA, 20 bp, Artificial Sequence
  Synthetic oligonucleotide; AAG chr11 5297138 5297157 5297141 -
tggcaaggctatgttcatga

SEQ ID NO: 40366 - DNA, 20 bp, Artificial Sequence
  Synthetic oligonucleotide; AAG chr11 5297116 5297135 5297119 -
gtatatgtaaaatccacatt

SEQ ID NO: 40367 - DNA, 20 bp, Artificial Sequence
  Synthetic oligonucleotide; TGG chr11 5297096 5297115 5297099 -
aagcttctttctgcatgcat

SEQ ID NO: 40368 - DNA, 20 bp, Artificial Sequence
  Synthetic oligonucleotide; AAG chr11 5297066 5297085 5297069 -
tatgaataatgtgtatgtaa

SEQ ID NO: 40369 - DNA, 20 bp, Artificial Sequence
  Synthetic oligonucleotide; AAG chr11 5297047 5297066 5297050 -
aaagtgtgctgtatattcaa

SEQ ID NO: 40370 - DNA, 20 bp, Artificial Sequence
  Synthetic oligonucleotide; TAG chr11 5297031 5297050 5297034 -
tcaaaagtgtttcatgtgcc

SEQ ID NO: 40371 - DNA, 20 bp, Artificial Sequence
  Synthetic oligonucleotide; AGG chr11 5297030 5297049 5297033 -
caaaagtgtttcatgtgcct

SEQ ID NO: 40372 - DNA, 20 bp, Artificial Sequence
  Synthetic oligonucleotide; GGG chr11 5297029 5297048 5297032 -
aaaagtgtttcatgtgccta

SEQ ID NO: 40373 - DNA, 20 bp, Artificial Sequence
  Synthetic oligonucleotide; GGG chr11 5297028 5297047 5297031 -
aaagtgtttcatgtgcctag

SEQ ID NO: 40374 - DNA, 20 bp, Artificial Sequence
  Synthetic oligonucleotide; GAG chr11 5297012 5297031 5297015 -
ctaggggtgtcaaatacttt

SEQ ID NO: 40375 - DNA, 20 bp, Artificial Sequence
  Synthetic oligonucleotide; AAG chr11 5297004 5297023 5297007 -
gtcaaatactttgagtttgt

SEQ ID NO: 40376 - DNA, 20 bp, Artificial Sequence
  Synthetic oligonucleotide; AAG chr11 5296949 5296968 5296952 -
ctatttacttgattctcaat

SEQ ID NO: 40377 - DNA, 20 bp, Artificial Sequence
  Synthetic oligonucleotide; TAG chr11 5296946 5296965 5296949 -
tttacttgattctcaataag

SEQ ID NO: 40378 - DNA, 20 bp, Artificial Sequence
  Synthetic oligonucleotide; AGG chr11 5296945 5296964 5296948 -
ttacttgattctcaataagt

SEQ ID NO: 40379 - DNA, 20 bp, Artificial Sequence
  Synthetic oligonucleotide; TAG chr11 5296937 5296956 5296940 -
ttctcaataagtaggtatca

SEQ ID NO: 40380 - DNA, 20 bp, Artificial Sequence
  Synthetic oligonucleotide; GAG chr11 5296914 5296933 5296917 -
tgaacatctgacaaatgttt

SEQ ID NO: 40381 - DNA, 20 bp, Artificial Sequence
  Synthetic oligonucleotide; AGG chr11 5296913 5296932 5296916 -
gaacatctgacaaatgtttg

SEQ ID NO: 40382 - DNA, 20 bp, Artificial Sequence
  Synthetic oligonucleotide; TAG chr11 5296903 5296922 5296906 -
caaatgtttgaggaacaatt

SEQ ID NO: 40383 - DNA, 20 bp, Artificial Sequence
  Synthetic oligonucleotide; CAG chr11 5296857 5296876 5296860 -
attaaatgcctaatctgtat

SEQ ID NO: 40384 - DNA, 20 bp, Artificial Sequence
  Synthetic oligonucleotide; TGG chr11 5296841 5296860 5296844 -
gtatcagatatacaattatc

SEQ ID NO: 40385 - DNA, 20 bp, Artificial Sequence
  Synthetic oligonucleotide; CAG chr11 5296813 5296832 5296816 -
tctgtaattcctaatttaaa

SEQ ID NO: 40386 - DNA, 20 bp, Artificial Sequence
  Synthetic oligonucleotide; TAG chr11 5296805 5296824 5296808 -
tcctaatttaaacagctgtg

SEQ ID NO: 40387 - DNA, 20 bp, Artificial Sequence
  Synthetic oligonucleotide; TAG chr11 5296796 5296815 5296799 -
aaacagctgtgtagcctaat

SEQ ID NO: 40388 - DNA, 20 bp, Artificial Sequence
  Synthetic oligonucleotide; AGG chr11 5296795 5296814 5296798 -
aacagctgtgtagcctaatt

SEQ ID NO: 40389 - DNA, 20 bp, Artificial Sequence
  Synthetic oligonucleotide; GGG chr11 5296794 5296813 5296797 -
acagctgtgtagcctaatta

SEQ ID NO: 40390 - DNA, 20 bp, Artificial Sequence
  Synthetic oligonucleotide; AAG chr11 5296788 5296807 5296791 -
gtgtagcctaattagggata

SEQ ID NO: 40391 - DNA, 20 bp, Artificial Sequence
  Synthetic oligonucleotide; AGG chr11 5296787 5296806 5296790 -
tgtagcctaattagggataa

SEQ ID NO: 40392 - DNA, 20 bp, Artificial Sequence
  Synthetic oligonucleotide; TAG chr11 5296763 5296782 5296766 -
atgcaaacccataatttgtg

SEQ ID NO: 40393 - DNA, 20 bp, Artificial Sequence
  Synthetic oligonucleotide; AGG chr11 5296762 5296781 5296765 -
tgcaaacccataatttgtgt

SEQ ID NO: 40394 - DNA, 20 bp, Artificial Sequence
  Synthetic oligonucleotide; GAG chr11 5296752 5296771 5296755 -
taatttgtgtaggttgaaat

SEQ ID NO: 40395 - DNA, 20 bp, Artificial Sequence
  Synthetic oligonucleotide; TAG chr11 5296746 5296765 5296749 -
gtgtaggttgaaatgagcta

SEQ ID NO: 40396 - DNA, 20 bp, Artificial Sequence
  Synthetic oligonucleotide; CAG chr11 5296736 5296755 5296739 -
aaatgagctatagaaaaatg

SEQ ID NO: 40397 - DNA, 20 bp, Artificial Sequence
  Synthetic oligonucleotide; CAG chr11 5296724 5296743 5296727 -
gaaaaatgcagtatatttat

SEQ ID NO: 40398 - DNA, 20 bp, Artificial Sequence
  Synthetic oligonucleotide; AAG chr11 5296721 5296740 5296724 -
aaatgcagtatatttatcag

SEQ ID NO: 40399 - DNA, 20 bp, Artificial Sequence
  Synthetic oligonucleotide; TAG chr11 5296714 5296733 5296717 -
gtatatttatcagaagtctt

SEQ ID NO: 40400 - DNA, 20 bp, Artificial Sequence
  Synthetic oligonucleotide; AGG chr11 5296713 5296732 5296716 -
tatatttatcagaagtcttt

SEQ ID NO: 40401 - DNA, 20 bp, Artificial Sequence
  Synthetic oligonucleotide; GGG chr11 5296712 5296731 5296715 -
atatttatcagaagtcttta

SEQ ID NO: 40402 - DNA, 20 bp, Artificial Sequence
  Synthetic oligonucleotide; AAG chr11 5296702 5296721 5296705 -
gaagtctttagggtcatgaa

SEQ ID NO: 40403 - DNA, 20 bp, Artificial Sequence
  Synthetic oligonucleotide; AGG chr11 5296701 5296720 5296704 -
aagtctttagggtcatgaaa

SEQ ID NO: 40404 - DNA, 20 bp, Artificial Sequence
  Synthetic oligonucleotide; TGG chr11 5296696 5296715 5296699 -
tttagggtcatgaaaaggaa

SEQ ID NO: 40405 - DNA, 20 bp, Artificial Sequence
  Synthetic oligonucleotide; CAG chr11 5296679 5296698 5296682 -
gaatggtcaactgacactgc

SEQ ID NO: 40406 - DNA, 20 bp, Artificial Sequence
  Synthetic oligonucleotide; AGG chr11 5296678 5296697 5296681 -
aatggtcaactgacactgcc

SEQ ID NO: 40407 - DNA, 20 bp, Artificial Sequence
  Synthetic oligonucleotide; GGG chr11 5296677 5296696 5296680 -
atggtcaactgacactgcca

SEQ ID NO: 40408 - DNA, 20 bp, Artificial Sequence
  Synthetic oligonucleotide; AAG chr11 5296664 5296683 5296667 -
actgccagggactcatatgt

SEQ ID NO: 40409 - DNA, 20 bp, Artificial Sequence
  Synthetic oligonucleotide; GAG chr11 5296662 5296681 5296665 -
tgccagggactcatatgtaa

SEQ ID NO: 40410 - DNA, 20 bp, Artificial Sequence
  Synthetic oligonucleotide; AAG chr11 5296647 5296666 5296650 -
tgtaagagataactaatgtg

SEQ ID NO: 40411 - DNA, 20 bp, Artificial Sequence
  Synthetic oligonucleotide; AAG chr11 5296636 5296655 5296639 -
actaatgtgaagtgacttta

SEQ ID NO: 40412 - DNA, 20 bp, Artificial Sequence
  Synthetic oligonucleotide; AGG chr11 5296635 5296654 5296638 -
ctaatgtgaagtgactttaa

SEQ ID NO: 40413 - DNA, 20 bp, Artificial Sequence
  Synthetic oligonucleotide; GAG chr11 5296633 5296652 5296636 -
aatgtgaagtgactttaaag

SEQ ID NO: 40414 - DNA, 20 bp, Artificial Sequence
  Synthetic oligonucleotide; TAG chr11 5296626 5296645 5296629 -
agtgactttaaaggagaaat

SEQ ID NO: 40415 - DNA, 20 bp, Artificial Sequence
  Synthetic oligonucleotide; CAG chr11 5296623 5296642 5296626 -
gactttaaaggagaaattag

SEQ ID NO: 40416 - DNA, 20 bp, Artificial Sequence
  Synthetic oligonucleotide; AAG chr11 5296620 5296639 5296623 -
tttaaaggagaaattagcag

SEQ ID NO: 40417 - DNA, 20 bp, Artificial Sequence
  Synthetic oligonucleotide; CGG chr11 5296582 5296601 5296585 -
tcctcatcatgttacaataa

SEQ ID NO: 40418 - DNA, 20 bp, Artificial Sequence
  Synthetic oligonucleotide; AAG chr11 5296579 5296598 5296582 -
tcatcatgttacaataacgg

SEQ ID NO: 40419 - DNA, 20 bp, Artificial Sequence
  Synthetic oligonucleotide; GAG chr11 5296577 5296596 5296580 -
atcatgttacaataacggaa

SEQ ID NO: 40420 - DNA, 20 bp, Artificial Sequence
  Synthetic oligonucleotide; TAG chr11 5296554 5296573 5296557 -
attaaaacaacaaatacatt

SEQ ID NO: 40421 - DNA, 20 bp, Artificial Sequence
  Synthetic oligonucleotide; CAG chr11 5296550 5296569 5296553 -
aaacaacaaatacatttaga

SEQ ID NO: 40422 - DNA, 20 bp, Artificial Sequence
  Synthetic oligonucleotide; TGG chr11 5296535 5296554 5296538 -
ttagacagcaatgtttatcc

SEQ ID NO: 40423 - DNA, 20 bp, Artificial Sequence
  Synthetic oligonucleotide; TAG chr11 5296531 5296550 5296534 -
acagcaatgtttatcctggt

SEQ ID NO: 40424 - DNA, 20 bp, Artificial Sequence
  Synthetic oligonucleotide; TGG chr11 5296506 5296525 5296509 -
gttttaatctaaatctatct

SEQ ID NO: 40425 - DNA, 20 bp, Artificial Sequence
  Synthetic oligonucleotide; GAG chr11 5296504 5296523 5296507 -
tttaatctaaatctatcttg

SEQ ID NO: 40426 - DNA, 20 bp, Artificial Sequence
  Synthetic oligonucleotide; AAG chr11 5296461 5296480 5296464 -
cctactttaaaatataaatg

SEQ ID NO: 40427 - DNA, 20 bp, Artificial Sequence
  Synthetic oligonucleotide; AGG chr11 5296460 5296479 5296463 -
ctactttaaaatataaatga

SEQ ID NO: 40428 - DNA, 20 bp, Artificial Sequence
  Synthetic oligonucleotide; TAG chr11 5296457 5296476 5296460 -
ctttaaaatataaatgaagg

SEQ ID NO: 40429 - DNA, 20 bp, Artificial Sequence
  Synthetic oligonucleotide; AGG chr11 5296456 5296475 5296459 -
tttaaaatataaatgaaggt

SEQ ID NO: 40430 - DNA, 20 bp, Artificial Sequence
  Synthetic oligonucleotide; TAG chr11 5296447 5296466 5296450 -
taaatgaaggtaggaacctg

SEQ ID NO: 40431 - DNA, 20 bp, Artificial Sequence
  Synthetic oligonucleotide; AAG chr11 5296437 5296456 5296440 -
taggaacctgtagatacaaa

SEQ ID NO: 40432 - DNA, 20 bp, Artificial Sequence
  Synthetic oligonucleotide; TGG chr11 5296433 5296452 5296436 -
aacctgtagatacaaaaagt

SEQ ID NO: 40433 - DNA, 20 bp, Artificial Sequence
  Synthetic oligonucleotide; GAG chr11 5296431 5296450 5296434 -
cctgtagatacaaaaagttg

SEQ ID NO: 40434 - DNA, 20 bp, Artificial Sequence
  Synthetic oligonucleotide; AAG chr11 5296423 5296442 5296426 -
tacaaaaagttggagaaaaa

SEQ ID NO: 40435 - DNA, 20 bp, Artificial Sequence
  Synthetic oligonucleotide; AAG chr11 5296414 5296433 5296417 -
ttggagaaaaaaagacaata

SEQ ID NO: 40436 - DNA, 20 bp, Artificial Sequence
  Synthetic oligonucleotide; TAG chr11 5296386 5296405 5296389 -
aaaaatctattaatccttga

SEQ ID NO: 40437 - DNA, 20 bp, Artificial Sequence
  Synthetic oligonucleotide; GAG chr11 5296378 5296397 5296381 -
attaatccttgatagaaaat

SEQ ID NO: 40438 - DNA, 20 bp, Artificial Sequence
  Synthetic oligonucleotide; AAG chr11 5296375 5296394 5296378 -
aatccttgatagaaaatgag

SEQ ID NO: 40439 - DNA, 20 bp, Artificial Sequence
  Synthetic oligonucleotide; GAG chr11 5296373 5296392 5296376 -
tccttgatagaaaatgagaa

SEQ ID NO: 40440 - DNA, 20 bp, Artificial Sequence
  Synthetic oligonucleotide; TGG chr11 5296361 5296380 5296364 -
aatgagaagagataaaacac

SEQ ID NO: 40441 - DNA, 20 bp, Artificial Sequence
  Synthetic oligonucleotide; AAG chr11 5296350 5296369 5296353 -
ataaaacactggtttacata

SEQ ID NO: 40442 - DNA, 20 bp, Artificial Sequence
  Synthetic oligonucleotide; AAG chr11 5296342 5296361 5296345 -
ctggtttacataaagaaaat

SEQ ID NO: 40443 - DNA, 20 bp, Artificial Sequence
  Synthetic oligonucleotide; TGG chr11 5296338 5296357 5296341 -
tttacataaagaaaataaga

SEQ ID NO: 40444 - DNA, 20 bp, Artificial Sequence
  Synthetic oligonucleotide; TAG chr11 5296334 5296353 5296337 -
cataaagaaaataagatgga

SEQ ID NO: 40445 - DNA, 20 bp, Artificial Sequence
  Synthetic oligonucleotide; TAG chr11 5296330 5296349 5296333 -
aagaaaataagatggataga

SEQ ID NO: 40446 - DNA, 20 bp, Artificial Sequence
  Synthetic oligonucleotide; CAG chr11 5296327 5296346 5296330 -
aaaataagatggatagatag

SEQ ID NO: 40447 - DNA, 20 bp, Artificial Sequence
  Synthetic oligonucleotide; AAG chr11 5296314 5296333 5296317 -
tagatagcagatccttataa

SEQ ID NO: 40448 - DNA, 20 bp, Artificial Sequence
  Synthetic oligonucleotide; GAG chr11 5296302 5296321 5296305 -
ccttataaaagtgataattt

SEQ ID NO: 40449 - DNA, 20 bp, Artificial Sequence
  Synthetic oligonucleotide; GAG chr11 5296278 5296297 5296281 -
aaaaaaatactccatattct

SEQ ID NO: 40450 - DNA, 20 bp, Artificial Sequence
  Synthetic oligonucleotide; TGG chr11 5296244 5296263 5296247 -
aaaataatacaaatctgctg

SEQ ID NO: 40451 - DNA, 20 bp, Artificial Sequence
  Synthetic oligonucleotide; AAG chr11 5296240 5296259 5296243 -
taatacaaatctgctgtggt

SEQ ID NO: 40452 - DNA, 20 bp, Artificial Sequence
  Synthetic oligonucleotide; AAG chr11 5296232 5296251 5296235 -
atctgctgtggtaagttaca

SEQ ID NO: 40453 - DNA, 20 bp, Artificial Sequence
  Synthetic oligonucleotide; GAG chr11 5296230 5296249 5296233 -
ctgctgtggtaagttacaaa

SEQ ID NO: 40454 - DNA, 20 bp, Artificial Sequence
  Synthetic oligonucleotide; TAG chr11 5296226 5296245 5296229 -
tgtggtaagttacaaagaga

SEQ ID NO: 40455 - DNA, 20 bp, Artificial Sequence
  Synthetic oligonucleotide; AAG chr11 5296204 5296223 5296207 -
gattttttatcattatataa

SEQ ID NO: 40456 - DNA, 20 bp, Artificial Sequence
  Synthetic oligonucleotide; CAG chr11 5296191 5296210 5296194 -
tatataaaagatattttaaa

SEQ ID NO: 40457 - DNA, 20 bp, Artificial Sequence
  Synthetic oligonucleotide; GAG chr11 5296189 5296208 5296192 -
tataaaagatattttaaaca

SEQ ID NO: 40458 - DNA, 20 bp, Artificial Sequence
  Synthetic oligonucleotide; AAG chr11 5296176 5296195 5296179 -
ttaaacagagttatacaaca

SEQ ID NO: 40459 - DNA, 20 bp, Artificial Sequence
  Synthetic oligonucleotide; AGG chr11 5296175 5296194 5296178 -
taaacagagttatacaacaa

SEQ ID NO: 40460 - DNA, 20 bp, Artificial Sequence
  Synthetic oligonucleotide; CAG chr11 5296170 5296189 5296173 -
agagttatacaacaaaggaa

SEQ ID NO: 40461 - DNA, 20 bp, Artificial Sequence
  Synthetic oligonucleotide; CAG chr11 5296129 5296148 5296132 -
acttatcactataaacatct

SEQ ID NO: 40462 - DNA, 20 bp, Artificial Sequence
  Synthetic oligonucleotide; TAG chr11 5296104 5296123 5296107 -
aaatctgcaaaatcatttca

SEQ ID NO: 40463 - DNA, 20 bp, Artificial Sequence
  Synthetic oligonucleotide; TAG chr11 5296092 5296111 5296095 -
tcatttcatagcattttaaa

SEQ ID NO: 40464 - DNA, 20 bp, Artificial Sequence
  Synthetic oligonucleotide; TAG chr11 5296088 5296107 5296091 -
ttcatagcattttaaatagt

SEQ ID NO: 40465 - DNA, 20 bp, Artificial Sequence
  Synthetic oligonucleotide; AGG chr11 5296087 5296106 5296090 -
tcatagcattttaaatagtt

SEQ ID NO: 40466 - DNA, 20 bp, Artificial Sequence
  Synthetic oligonucleotide; TAG chr11 5296077 5296096 5296080 -
ttaaatagttaggaataatg

SEQ ID NO: 40467 - DNA, 20 bp, Artificial Sequence
  Synthetic oligonucleotide; CAG chr11 5296064 5296083 5296067 -
aataatgtagaaaactgaaa

SEQ ID NO: 40468 - DNA, 20 bp, Artificial Sequence
  Synthetic oligonucleotide; AAG chr11 5296057 5296076 5296060 -
tagaaaactgaaacagttct

SEQ ID NO: 40469 - DNA, 20 bp, Artificial Sequence
  Synthetic oligonucleotide; TAG chr11 5296041 5296060 5296044 -
ttctaagtttcccacaaact

SEQ ID NO: 40470 - DNA, 20 bp, Artificial Sequence
  Synthetic oligonucleotide; GAG chr11 5296039 5296058 5296042 -
ctaagtttcccacaaactta

SEQ ID NO: 40471 - DNA, 20 bp, Artificial Sequence
  Synthetic oligonucleotide; TAG chr11 5295973 5295992 5295976 -
caaatttgcacatgctactc

SEQ ID NO: 40472 - DNA, 20 bp, Artificial Sequence
  Synthetic oligonucleotide; TGG chr11 5295950 5295969 5295953 -
tcaaaaatatatgtacatta

SEQ ID NO: 40473 - DNA, 20 bp, Artificial Sequence
  Synthetic oligonucleotide; GGG chr11 5295949 5295968 5295952 -
caaaaatatatgtacattat

SEQ ID NO: 40474 - DNA, 20 bp, Artificial Sequence
  Synthetic oligonucleotide; TGG chr11 5295928 5295947 5295931 -
ggtattttctgtgtgtaact

SEQ ID NO: 40475 - DNA, 20 bp, Artificial Sequence
  Synthetic oligonucleotide; TAG chr11 5295922 5295941 5295925 -
ttctgtgtgtaacttggttc

SEQ ID NO: 40476 - DNA, 20 bp, Artificial Sequence
  Synthetic oligonucleotide; CAG chr11 5295909 5295928 5295912 -
ttggttctagttgcttcttt

SEQ ID NO: 40477 - DNA, 20 bp, Artificial Sequence
  Synthetic oligonucleotide; TAG chr11 5295903 5295922 5295906 -
ctagttgcttctttcagaaa

SEQ ID NO: 40478 - DNA, 20 bp, Artificial Sequence
  Synthetic oligonucleotide; AAG chr11 5295858 5295877 5295861 -
taaaatcacattcctctcca

SEQ ID NO: 40479 - DNA, 20 bp, Artificial Sequence
  Synthetic oligonucleotide; CAG chr11 5295840 5295859 5295843 -
caaagccttctaaatacttc

SEQ ID NO: 40480 - DNA, 20 bp, Artificial Sequence
  Synthetic oligonucleotide; TAG chr11 5295824 5295843 5295827 -
cttccagactaactactttt

SEQ ID NO: 40481 - DNA, 20 bp, Artificial Sequence
  Synthetic oligonucleotide; AAG chr11 5295814 5295833 5295817 -
aactactttttagtacatct

SEQ ID NO: 40482 - DNA, 20 bp, Artificial Sequence
  Synthetic oligonucleotide; AAG chr11 5295811 5295830 5295814 -
tactttttagtacatctaag

SEQ ID NO: 40483 - DNA, 20 bp, Artificial Sequence
  Synthetic oligonucleotide; AAG chr11 5295806 5295825 5295809 -
tttagtacatctaagaagaa

SEQ ID NO: 40484 - DNA, 20 bp, Artificial Sequence
  Synthetic oligonucleotide; GAG chr11 5295804 5295823 5295807 -
tagtacatctaagaagaaaa

SEQ ID NO: 40485 - DNA, 20 bp, Artificial Sequence
  Synthetic oligonucleotide; GAG chr11 5295780 5295799 5295783 -
tttgtctcttatccacctct

SEQ ID NO: 40486 - DNA, 20 bp, Artificial Sequence
  Synthetic oligonucleotide; AAG chr11 5295772 5295791 5295775 -
ttatccacctctgagtcaaa

SEQ ID NO: 40487 - DNA, 20 bp, Artificial Sequence
  Synthetic oligonucleotide; CAG chr11 5295769 5295788 5295772 -
tccacctctgagtcaaaaag

SEQ ID NO: 40488 - DNA, 20 bp, Artificial Sequence
  Synthetic oligonucleotide; TGG chr11 5295753 5295772 5295756 -
aaagcagcatgtccatcaat

SEQ ID NO: 40489 - DNA, 20 bp, Artificial Sequence
  Synthetic oligonucleotide; TAG chr11 5295746 5295765 5295749 -
catgtccatcaattggtaca

SEQ ID NO: 40490 - DNA, 20 bp, Artificial Sequence
  Synthetic oligonucleotide; CAG chr11 5295737 5295756 5295740 -
caattggtacatagttccca

SEQ ID NO: 40491 - DNA, 20 bp, Artificial Sequence
  Synthetic oligonucleotide; TAG chr11 5295727 5295746 5295730 -
atagttcccacagccccact

SEQ ID NO: 40492 - DNA, 20 bp, Artificial Sequence
  Synthetic oligonucleotide; TGG chr11 5295721 5295740 5295724 -
cccacagccccacttagctc

SEQ ID NO: 40493 - DNA, 20 bp, Artificial Sequence
  Synthetic oligonucleotide; TGG chr11 5295716 5295735 5295719 -
agccccacttagctctggat

SEQ ID NO: 40494 - DNA, 20 bp, Artificial Sequence
  Synthetic oligonucleotide; GAG chr11 5295714 5295733 5295717 -
ccccacttagctctggattg

SEQ ID NO: 40495 - DNA, 20 bp, Artificial Sequence
  Synthetic oligonucleotide; TGG chr11 5295704 5295723 5295707 -
ctctggattggagttctact

SEQ ID NO: 40496 - DNA, 20 bp, Artificial Sequence
  Synthetic oligonucleotide; TGG chr11 5295684 5295703 5295687 -
tggcattgtttgcaactaca

SEQ ID NO: 40497 - DNA, 20 bp, Artificial Sequence
  Synthetic oligonucleotide; TGG chr11 5295669 5295688 5295672 -
ctacatggacgtaaaatgca

SEQ ID NO: 40498 - DNA, 20 bp, Artificial Sequence
  Synthetic oligonucleotide; AAG chr11 5295627 5295646 5295630 -
tctgccatgatgttctctga

SEQ ID NO: 40499 - DNA, 20 bp, Artificial Sequence
  Synthetic oligonucleotide; GAG chr11 5295625 5295644 5295628 -
tgccatgatgttctctgaaa

SEQ ID NO: 40500 - DNA, 20 bp, Artificial Sequence
  Synthetic oligonucleotide; CAG chr11 5295602 5295621 5295605 -
actaaccttccctcgctttg

SEQ ID NO: 40501 - DNA, 20 bp, Artificial Sequence
  Synthetic oligonucleotide; GAG chr11 5295600 5295619 5295603 -
taaccttccctcgctttgca

SEQ ID NO: 40502 - DNA, 20 bp, Artificial Sequence
  Synthetic oligonucleotide; AAG chr11 5295596 5295615 5295599 -
cttccctcgctttgcagaga

SEQ ID NO: 40503 - DNA, 20 bp, Artificial Sequence
  Synthetic oligonucleotide; AAG chr11 5295514 5295533 5295517 -
gaccttcatgtctttgctct

SEQ ID NO: 40504 - DNA, 20 bp, Artificial Sequence
  Synthetic oligonucleotide; TAG chr11 5295487 5295506 5295490 -
tacatcctcaatctacacac

SEQ ID NO: 40505 - DNA, 20 bp, Artificial Sequence
  Synthetic oligonucleotide; AGG chr11 5295486 5295505 5295489 -
acatcctcaatctacacact

SEQ ID NO: 40506 - DNA, 20 bp, Artificial Sequence
  Synthetic oligonucleotide; TAG chr11 5295482 5295501 5295485 -
cctcaatctacacactagga

SEQ ID NO: 40507 - DNA, 20 bp, Artificial Sequence
  Synthetic oligonucleotide; AAG chr11 5295474 5295493 5295477 -
tacacactaggatagtataa

SEQ ID NO: 40508 - DNA, 20 bp, Artificial Sequence
  Synthetic oligonucleotide; TAG chr11 5295468 5295487 5295471 -
ctaggatagtataaaagtaa

SEQ ID NO: 40509 - DNA, 20 bp, Artificial Sequence
  Synthetic oligonucleotide; TAG chr11 5295459 5295478 5295462 -
tataaaagtaatagtaataa

SEQ ID NO: 40510 - DNA, 20 bp, Artificial Sequence
  Synthetic oligonucleotide; TAG chr11 5295456 5295475 5295459 -
aaaagtaatagtaataatag

SEQ ID NO: 40511 - DNA, 20 bp, Artificial Sequence
  Synthetic oligonucleotide; TAG chr11 5295450 5295469 5295453 -
aatagtaataatagtagtaa

SEQ ID NO: 40512 - DNA, 20 bp, Artificial Sequence
  Synthetic oligonucleotide; TGG chr11 5295427 5295446 5295430 -
taataacaatacaatgatta

SEQ ID NO: 40513 - DNA, 20 bp, Artificial Sequence
  Synthetic oligonucleotide; AAG chr11 5295410 5295429 5295413 -
ttatggcttatactatacac

SEQ ID NO: 40514 - DNA, 20 bp, Artificial Sequence
  Synthetic oligonucleotide; TAG chr11 5295383 5295402 5295386 -
tgttgatatattatttcatt

SEQ ID NO: 40515 - DNA, 20 bp, Artificial Sequence
  Synthetic oligonucleotide; CAG chr11 5295374 5295393 5295377 -
attatttcatttagtattca

SEQ ID NO: 40516 - DNA, 20 bp, Artificial Sequence
  Synthetic oligonucleotide; AAG chr11 5295357 5295376 5295360 -
tcacagtaactctgtgcctc

SEQ ID NO: 40517 - DNA, 20 bp, Artificial Sequence
  Synthetic oligonucleotide; AAG chr11 5295335 5295354 5295338 -
gtactattgtaatacccttt

SEQ ID NO: 40518 - DNA, 20 bp, Artificial Sequence
  Synthetic oligonucleotide; GAG chr11 5295333 5295352 5295336 -
actattgtaataccctttaa

SEQ ID NO: 40519 - DNA, 20 bp, Artificial Sequence
  Synthetic oligonucleotide; AGG chr11 5295332 5295351 5295335 -
ctattgtaataccctttaag

SEQ ID NO: 40520 - DNA, 20 bp, Artificial Sequence
  Synthetic oligonucleotide; GAG chr11 5295330 5295349 5295333 -
attgtaataccctttaagag

SEQ ID NO: 40521 - DNA, 20 bp, Artificial Sequence
  Synthetic oligonucleotide; AGG chr11 5295329 5295348 5295332 -
ttgtaataccctttaagagg

SEQ ID NO: 40522 - DNA, 20 bp, Artificial Sequence
  Synthetic oligonucleotide; GAG chr11 5295321 5295340 5295324 -
ccctttaagaggaggaaact

SEQ ID NO: 40523 - DNA, 20 bp, Artificial Sequence
  Synthetic oligonucleotide; AGG chr11 5295320 5295339 5295323 -
cctttaagaggaggaaactg

SEQ ID NO: 40524 - DNA, 20 bp, Artificial Sequence
  Synthetic oligonucleotide; CAG chr11 5295315 5295334 5295318 -
aagaggaggaaactgaggca

SEQ ID NO: 40525 - DNA, 20 bp, Artificial Sequence
  Synthetic oligonucleotide; AGG chr11 5295314 5295333 5295317 -
agaggaggaaactgaggcac

SEQ ID NO: 40526 - DNA, 20 bp, Artificial Sequence
  Synthetic oligonucleotide; GGG chr11 5295313 5295332 5295316 -
gaggaggaaactgaggcaca

SEQ ID NO: 40527 - DNA, 20 bp, Artificial Sequence
  Synthetic oligonucleotide; AAG chr11 5295305 5295324 5295308 -
aactgaggcacagggcccta

SEQ ID NO: 40528 - DNA, 20 bp, Artificial Sequence
  Synthetic oligonucleotide; AAG chr11 5295293 5295312 5295296 -
gggccctaaagtaatattcc

SEQ ID NO: 40529 - DNA, 20 bp, Artificial Sequence
  Synthetic oligonucleotide; AAG chr11 5295287 5295306 5295290 -
taaagtaatattccaagatg

SEQ ID NO: 40530 - DNA, 20 bp, Artificial Sequence
  Synthetic oligonucleotide; TGG chr11 5295284 5295303 5295287 -
agtaatattccaagatgaag

SEQ ID NO: 40531 - DNA, 20 bp, Artificial Sequence
  Synthetic oligonucleotide; CAG chr11 5295270 5295289 5295273 -
atgaagtggctactaactga

SEQ ID NO: 40532 - DNA, 20 bp, Artificial Sequence
  Synthetic oligonucleotide; GAG chr11 5295268 5295287 5295271 -
gaagtggctactaactgaca

SEQ ID NO: 40533 - DNA, 20 bp, Artificial Sequence
  Synthetic oligonucleotide; AGG chr11 5295267 5295286 5295270 -
aagtggctactaactgacag

SEQ ID NO: 40534 - DNA, 20 bp, Artificial Sequence
  Synthetic oligonucleotide; GGG chr11 5295266 5295285 5295269 -
agtggctactaactgacaga

SEQ ID NO: 40535 - DNA, 20 bp, Artificial Sequence
  Synthetic oligonucleotide; TGG chr11 5295242 5295261 5295245 -
ataattcaactcatgatatt

SEQ ID NO: 40536 - DNA, 20 bp, Artificial Sequence
  Synthetic oligonucleotide; TAG chr11 5295236 5295255 5295239 -
caactcatgatatttggctc

SEQ ID NO: 40537 - DNA, 20 bp, Artificial Sequence
  Synthetic oligonucleotide; GAG chr11 5295196 5295215 5295199 -
attatacaataataattcat

SEQ ID NO: 40538 - DNA, 20 bp, Artificial Sequence
  Synthetic oligonucleotide; AGG chr11 5295195 5295214 5295198 -
ttatacaataataattcatg

SEQ ID NO: 40539 - DNA, 20 bp, Artificial Sequence
  Synthetic oligonucleotide; AAG chr11 5295180 5295199 5295183 -
tcatgaggaaacatttttta

SEQ ID NO: 40540 - DNA, 20 bp, Artificial Sequence
  Synthetic oligonucleotide; AAG chr11 5295174 5295193 5295177 -
ggaaacattttttaaagcct

SEQ ID NO: 40541 - DNA, 20 bp, Artificial Sequence
  Synthetic oligonucleotide; AAG chr11 5295155 5295174 5295158 -
taagttatttgctctgaaat

SEQ ID NO: 40542 - DNA, 20 bp, Artificial Sequence
  Synthetic oligonucleotide; TGG chr11 5295144 5295163 5295147 -
ctctgaaataagacataatt

SEQ ID NO: 40543 - DNA, 20 bp, Artificial Sequence
  Synthetic oligonucleotide; GGG chr11 5295143 5295162 5295146 -
tctgaaataagacataattt

SEQ ID NO: 40544 - DNA, 20 bp, Artificial Sequence
  Synthetic oligonucleotide; GGG chr11 5295142 5295161 5295145 -
ctgaaataagacataatttg

SEQ ID NO: 40545 - DNA, 20 bp, Artificial Sequence
  Synthetic oligonucleotide; GAG chr11 5295138 5295157 5295141 -
aataagacataatttggggt

SEQ ID NO: 40546 - DNA, 20 bp, Artificial Sequence
  Synthetic oligonucleotide; AAG chr11 5295134 5295153 5295137 -
agacataatttggggtgaga

SEQ ID NO: 40547 - DNA, 20 bp, Artificial Sequence
  Synthetic oligonucleotide; TAG chr11 5295129 5295148 5295132 -
taatttggggtgagaaagct

SEQ ID NO: 40548 - DNA, 20 bp, Artificial Sequence
  Synthetic oligonucleotide; AAG chr11 5295118 5295137 5295121 -
gagaaagcttagattccatg

SEQ ID NO: 40549 - DNA, 20 bp, Artificial Sequence
  Synthetic oligonucleotide; CAG chr11 5295110 5295129 5295113 -
ttagattccatgaagtatta

SEQ ID NO: 40550 - DNA, 20 bp, Artificial Sequence
  Synthetic oligonucleotide; TGG chr11 5295103 5295122 5295106 -
ccatgaagtattacagcatt

SEQ ID NO: 40551 - DNA, 20 bp, Artificial Sequence
  Synthetic oligonucleotide; TAG chr11 5295100 5295119 5295103 -
tgaagtattacagcatttgg

SEQ ID NO: 40552 - DNA, 20 bp, Artificial Sequence
  Synthetic oligonucleotide; CAG chr11 5295084 5295103 5295087 -
ttggtagtctttttgcactc

SEQ ID NO: 40553 - DNA, 20 bp, Artificial Sequence
  Synthetic oligonucleotide; AGG chr11 5295083 5295102 5295086 -
tggtagtctttttgcactcc

SEQ ID NO: 40554 - DNA, 20 bp, Artificial Sequence
  Synthetic oligonucleotide; TGG chr11 5295046 5295065 5295049 -
cttaaacataataaaacata

SEQ ID NO: 40555 - DNA, 20 bp, Artificial Sequence
  Synthetic oligonucleotide; CAG chr11 5295041 5295060 5295044 -
acataataaaacatatggtt

SEQ ID NO: 40556 - DNA, 20 bp, Artificial Sequence
  Synthetic oligonucleotide; TGG chr11 5295001 5295020 5295004 -
aataatattcctgttatttt

SEQ ID NO: 40557 - DNA, 20 bp, Artificial Sequence
  Synthetic oligonucleotide; AAG chr11 5294998 5295017 5295001 -
aatattcctgttatttttgg

SEQ ID NO: 40558 - DNA, 20 bp, Artificial Sequence
  Synthetic oligonucleotide; CAG chr11 5294993 5295012 5294996 -
tcctgttatttttggaagca

SEQ ID NO: 40559 - DNA, 20 bp, Artificial Sequence
  Synthetic oligonucleotide; AGG chr11 5294992 5295011 5294995 -
cctgttatttttggaagcac

SEQ ID NO: 40560 - DNA, 20 bp, Artificial Sequence
  Synthetic oligonucleotide; GGG chr11 5294991 5295010 5294994 -
ctgttatttttggaagcaca

SEQ ID NO: 40561 - DNA, 20 bp, Artificial Sequence
  Synthetic oligonucleotide; TGG chr11 5294986 5295005 5294989 -
atttttggaagcacagggtg

SEQ ID NO: 40562 - DNA, 20 bp, Artificial Sequence
  Synthetic oligonucleotide; GGG chr11 5294985 5295004 5294988 -
tttttggaagcacagggtgt

SEQ ID NO: 40563 - DNA, 20 bp, Artificial Sequence
  Synthetic oligonucleotide; TAG chr11 5294968 5294987 5294971 -
tgtgggataatgctaattac

SEQ ID NO: 40564 - DNA, 20 bp, Artificial Sequence
  Synthetic oligonucleotide; TAG chr11 5294961 5294980 5294964 -
taatgctaattactagtgat

SEQ ID NO: 40565 - DNA, 20 bp, Artificial Sequence
  Synthetic oligonucleotide; GAG chr11 5294954 5294973 5294957 -
aattactagtgattagtatt

SEQ ID NO: 40566 - DNA, 20 bp, Artificial Sequence
  Synthetic oligonucleotide; GAG chr11 5294952 5294971 5294955 -
ttactagtgattagtattga

SEQ ID NO: 40567 - DNA, 20 bp, Artificial Sequence
  Synthetic oligonucleotide; AGG chr11 5294951 5294970 5294954 -
tactagtgattagtattgag

SEQ ID NO: 40568 - DNA, 20 bp, Artificial Sequence
  Synthetic oligonucleotide; CAG chr11 5294945 5294964 5294948 -
tgattagtattgagaggtga

SEQ ID NO: 40569 - DNA, 20 bp, Artificial Sequence
  Synthetic oligonucleotide; TGG chr11 5294937 5294956 5294940 -
attgagaggtgacagcgtgc

SEQ ID NO: 40570 - DNA, 20 bp, Artificial Sequence
  Synthetic oligonucleotide; CAG chr11 5294934 5294953 5294937 -
gagaggtgacagcgtgctgg

SEQ ID NO: 40571 - DNA, 20 bp, Artificial Sequence
  Synthetic oligonucleotide; CAG chr11 5294925 5294944 5294928 -
cagcgtgctggcagtcctca

SEQ ID NO: 40572 - DNA, 20 bp, Artificial Sequence
  Synthetic oligonucleotide; TGG chr11 5294908 5294927 5294911 -
tcacagccctcgctcgctct

SEQ ID NO: 40573 - DNA, 20 bp, Artificial Sequence
  Synthetic oligonucleotide; TGG chr11 5294892 5294911 5294895 -
ctcttggcgcctcctctgcc

SEQ ID NO: 40574 - DNA, 20 bp, Artificial Sequence
  Synthetic oligonucleotide; GGG chr11 5294891 5294910 5294894 -
tcttggcgcctcctctgcct

SEQ ID NO: 40575 - DNA, 20 bp, Artificial Sequence
  Synthetic oligonucleotide; TGG chr11 5294879 5294898 5294882 -
ctctgcctgggctcccacat

SEQ ID NO: 40576 - DNA, 20 bp, Artificial Sequence
  Synthetic oligonucleotide; TGG chr11 5294876 5294895 5294879 -
tgcctgggctcccacattgg

SEQ ID NO: 40577 - DNA, 20 bp, Artificial Sequence
  Synthetic oligonucleotide; GAG chr11 5294868 5294887 5294871 -
ctcccacattggtggcactt

SEQ ID NO: 40578 - DNA, 20 bp, Artificial Sequence
  Synthetic oligonucleotide; AGG chr11 5294867 5294886 5294870 -
tcccacattggtggcacttg

SEQ ID NO: 40579 - DNA, 20 bp, Artificial Sequence
  Synthetic oligonucleotide; GAG chr11 5294865 5294884 5294868 -
ccacattggtggcacttgag

SEQ ID NO: 40580 - DNA, 20 bp, Artificial Sequence
  Synthetic oligonucleotide; CAG chr11 5294857 5294876 5294860 -
gtggcacttgaggagccctt

SEQ ID NO: 40581 - DNA, 20 bp, Artificial Sequence
  Synthetic oligonucleotide; CGG chr11 5294853 5294872 5294856 -
cacttgaggagcccttcagc

SEQ ID NO: 40582 - DNA, 20 bp, Artificial Sequence
  Synthetic oligonucleotide; TGG chr11 5294839 5294858 5294842 -
ttcagccggccgctgcactg

SEQ ID NO: 40583 - DNA, 20 bp, Artificial Sequence
  Synthetic oligonucleotide; GGG chr11 5294838 5294857 5294841 -
tcagccggccgctgcactgt

SEQ ID NO: 40584 - DNA, 20 bp, Artificial Sequence
  Synthetic oligonucleotide; GAG chr11 5294836 5294855 5294839 -
agccggccgctgcactgtgg

SEQ ID NO: 40585 - DNA, 20 bp, Artificial Sequence
  Synthetic oligonucleotide; TGG chr11 5294825 5294844 5294828 -
gcactgtgggagcccttttc

SEQ ID NO: 40586 - DNA, 20 bp, Artificial Sequence
  Synthetic oligonucleotide; GGG chr11 5294824 5294843 5294827 -
cactgtgggagcccttttct

SEQ ID NO: 40587 - DNA, 20 bp, Artificial Sequence
  Synthetic oligonucleotide; TGG chr11 5294820 5294839 5294823 -
gtgggagcccttttctgggc

SEQ ID NO: 40588 - DNA, 20 bp, Artificial Sequence
  Synthetic oligonucleotide; AAG chr11 5294815 5294834 5294818 -
agcccttttctgggctggcc

SEQ ID NO: 40589 - DNA, 20 bp, Artificial Sequence
  Synthetic oligonucleotide; AGG chr11 5294814 5294833 5294817 -
gcccttttctgggctggcca

SEQ ID NO: 40590 - DNA, 20 bp, Artificial Sequence
  Synthetic oligonucleotide; CAG chr11 5294810 5294829 5294813 -
ttttctgggctggccaaggc

SEQ ID NO: 40591 - DNA, 20 bp, Artificial Sequence
  Synthetic oligonucleotide; GAG chr11 5294808 5294827 5294811 -
ttctgggctggccaaggcca

SEQ ID NO: 40592 - DNA, 20 bp, Artificial Sequence
  Synthetic oligonucleotide; CGG chr11 5294804 5294823 5294807 -
gggctggccaaggccagagc

SEQ ID NO: 40593 - DNA, 20 bp, Artificial Sequence
  Synthetic oligonucleotide; CAG chr11 5294795 5294814 5294798 -
aaggccagagccggctccct

SEQ ID NO: 40594 - DNA, 20 bp, Artificial Sequence
  Synthetic oligonucleotide; CAG chr11 5294787 5294806 5294790 -
agccggctccctcagcttgc

SEQ ID NO: 40595 - DNA, 20 bp, Artificial Sequence
  Synthetic oligonucleotide; AGG chr11 5294786 5294805 5294789 -
gccggctccctcagcttgcc

SEQ ID NO: 40596 - DNA, 20 bp, Artificial Sequence
  Synthetic oligonucleotide; GAG chr11 5294784 5294803 5294787 -
cggctccctcagcttgccag

SEQ ID NO: 40597 - DNA, 20 bp, Artificial Sequence
  Synthetic oligonucleotide; AGG chr11 5294783 5294802 5294786 -
ggctccctcagcttgccagg

SEQ ID NO: 40598 - DNA, 20 bp, Artificial Sequence
  Synthetic oligonucleotide; TGG chr11 5294778 5294797 5294781 -
cctcagcttgccaggaggtg

SEQ ID NO: 40599 - DNA, 20 bp, Artificial Sequence
  Synthetic oligonucleotide; GAG chr11 5294776 5294795 5294779 -
tcagcttgccaggaggtgtg

SEQ ID NO: 40600 - DNA, 20 bp, Artificial Sequence
  Synthetic oligonucleotide; AGG chr11 5294775 5294794 5294778 -
cagcttgccaggaggtgtgg

SEQ ID NO: 40601 - DNA, 20 bp, Artificial Sequence
  Synthetic oligonucleotide; GGG chr11 5294774 5294793 5294777 -
agcttgccaggaggtgtgga

SEQ ID NO: 40602 - DNA, 20 bp, Artificial Sequence
  Synthetic oligonucleotide; CAG chr11 5294770 5294789 5294773 -
tgccaggaggtgtggaggga

SEQ ID NO: 40603 - DNA, 20 bp, Artificial Sequence
  Synthetic oligonucleotide; CGG chr11 5294764 5294783 5294767 -
gaggtgtggagggacagacg

SEQ ID NO: 40604 - DNA, 20 bp, Artificial Sequence
  Synthetic oligonucleotide; GGG chr11 5294763 5294782 5294766 -
aggtgtggagggacagacgc

SEQ ID NO: 40605 - DNA, 20 bp, Artificial Sequence
  Synthetic oligonucleotide; CAG chr11 5294760 5294779 5294763 -
tgtggagggacagacgcggg

SEQ ID NO: 40606 - DNA, 20 bp, Artificial Sequence
  Synthetic oligonucleotide; AGG chr11 5294759 5294778 5294762 -
gtggagggacagacgcgggc

SEQ ID NO: 40607 - DNA, 20 bp, Artificial Sequence
  Synthetic oligonucleotide; CGG chr11 5294753 5294772 5294756 -
ggacagacgcgggcaggaac

SEQ ID NO: 40608 - DNA, 20 bp, Artificial Sequence
  Synthetic oligonucleotide; GGG chr11 5294752 5294771 5294755 -
gacagacgcgggcaggaacc

SEQ ID NO: 40609 - DNA, 20 bp, Artificial Sequence
  Synthetic oligonucleotide; GAG chr11 5294734 5294753 5294737 -
ccgggctgtgcgccgtgctt

SEQ ID NO: 40610 - DNA, 20 bp, Artificial Sequence
  Synthetic oligonucleotide; AGG chr11 5294733 5294752 5294736 -
cgggctgtgcgccgtgcttg

SEQ ID NO: 40611 - DNA, 20 bp, Artificial Sequence
  Synthetic oligonucleotide; GGG chr11 5294732 5294751 5294735 -
gggctgtgcgccgtgcttga

SEQ ID NO: 40612 - DNA, 20 bp, Artificial Sequence
  Synthetic oligonucleotide; GAG chr11 5294730 5294749 5294733 -
gctgtgcgccgtgcttgagg

SEQ ID NO: 40613 - DNA, 20 bp, Artificial Sequence
  Synthetic oligonucleotide; CGG chr11 5294724 5294743 5294727 -
cgccgtgcttgagggagttc

SEQ ID NO: 40614 - DNA, 20 bp, Artificial Sequence
  Synthetic oligonucleotide; GGG chr11 5294723 5294742 5294726 -
gccgtgcttgagggagttcc

SEQ ID NO: 40615 - DNA, 20 bp, Artificial Sequence
  Synthetic oligonucleotide; TGG chr11 5294720 5294739 5294723 -
gtgcttgagggagttccggg

SEQ ID NO: 40616 - DNA, 20 bp, Artificial Sequence
  Synthetic oligonucleotide; GGG chr11 5294719 5294738 5294722 -
tgcttgagggagttccgggt

SEQ ID NO: 40617 - DNA, 20 bp, Artificial Sequence
  Synthetic oligonucleotide; TGG chr11 5294714 5294733 5294717 -
gagggagttccgggtgggca

SEQ ID NO: 40618 - DNA, 20 bp, Artificial Sequence
  Synthetic oligonucleotide; GGG chr11 5294713 5294732 5294716 -
agggagttccgggtgggcat

SEQ ID NO: 40619 - DNA, 20 bp, Artificial Sequence
  Synthetic oligonucleotide; GAG chr11 5294706 5294725 5294709 -
tccgggtgggcatgggctcc

SEQ ID NO: 40620 - DNA, 20 bp, Artificial Sequence
  Synthetic oligonucleotide; AGG chr11 5294705 5294724 5294708 -
ccgggtgggcatgggctccg

SEQ ID NO: 40621 - DNA, 20 bp, Artificial Sequence
  Synthetic oligonucleotide; CGG chr11 5294692 5294711 5294695 -
ggctccgaggaccccgcact

SEQ ID NO: 40622 - DNA, 20 bp, Artificial Sequence
  Synthetic oligonucleotide; GAG chr11 5294690 5294709 5294693 -
ctccgaggaccccgcactcg

SEQ ID NO: 40623 - DNA, 20 bp, Artificial Sequence
  Synthetic oligonucleotide; CAG chr11 5294683 5294702 5294686 -
gaccccgcactcggagccgc

SEQ ID NO: 40624 - DNA, 20 bp, Artificial Sequence
  Synthetic oligonucleotide; CGG chr11 5294679 5294698 5294682 -
ccgcactcggagccgccagc

SEQ ID NO: 40625 - DNA, 20 bp, Artificial Sequence
  Synthetic oligonucleotide; CGG chr11 5294670 5294689 5294673 -
gagccgccagccggccccac

SEQ ID NO: 40626 - DNA, 20 bp, Artificial Sequence
  Synthetic oligonucleotide; CGG chr11 5294664 5294683 5294667 -
ccagccggccccaccggccg

SEQ ID NO: 40627 - DNA, 20 bp, Artificial Sequence
  Synthetic oligonucleotide; GGG chr11 5294663 5294682 5294666 -
cagccggccccaccggccgc

SEQ ID NO: 40628 - DNA, 20 bp, Artificial Sequence
  Synthetic oligonucleotide; CAG chr11 5294660 5294679 5294663 -
ccggccccaccggccgcggg

SEQ ID NO: 40629 - DNA, 20 bp, Artificial Sequence
  Synthetic oligonucleotide; GAG chr11 5294656 5294675 5294659 -
ccccaccggccgcgggcagt

SEQ ID NO: 40630 - DNA, 20 bp, Artificial Sequence
  Synthetic oligonucleotide; AGG chr11 5294655 5294674 5294658 -
cccaccggccgcgggcagtg

SEQ ID NO: 40631 - DNA, 20 bp, Artificial Sequence
  Synthetic oligonucleotide; GGG chr11 5294654 5294673 5294657 -
ccaccggccgcgggcagtga

SEQ ID NO: 40632 - DNA, 20 bp, Artificial Sequence
  Synthetic oligonucleotide; GGG chr11 5294653 5294672 5294656 -
caccggccgcgggcagtgag

SEQ ID NO: 40633 - DNA, 20 bp, Artificial Sequence
  Synthetic oligonucleotide; TAG chr11 5294648 5294667 5294651 -
gccgcgggcagtgaggggct

SEQ ID NO: 40634 - DNA, 20 bp, Artificial Sequence
  Synthetic oligonucleotide; TGG chr11 5294641 5294660 5294644 -
gcagtgaggggcttagcacc

SEQ ID NO: 40635 - DNA, 20 bp, Artificial Sequence
  Synthetic oligonucleotide; GGG chr11 5294640 5294659 5294643 -
cagtgaggggcttagcacct

SEQ ID NO: 40636 - DNA, 20 bp, Artificial Sequence
  Synthetic oligonucleotide; CAG chr11 5294636 5294655 5294639 -
gaggggcttagcacctgggc

SEQ ID NO: 40637 - DNA, 20 bp, Artificial Sequence
  Synthetic oligonucleotide; CAG chr11 5294633 5294652 5294636 -
gggcttagcacctgggccag

SEQ ID NO: 40638 - DNA, 20 bp, Artificial Sequence
  Synthetic oligonucleotide; CGG chr11 5294609 5294628 5294612 -
tgctgtgctcaattcctcgc

SEQ ID NO: 40639 - DNA, 20 bp, Artificial Sequence
  Synthetic oligonucleotide; GGG chr11 5294608 5294627 5294611 -
gctgtgctcaattcctcgcc

SEQ ID NO: 40640 - DNA, 20 bp, Artificial Sequence
  Synthetic oligonucleotide; TAG chr11 5294602 5294621 5294605 -
ctcaattcctcgccgggcct

SEQ ID NO: 40641 - DNA, 20 bp, Artificial Sequence
  Synthetic oligonucleotide; CGG chr11 5294588 5294607 5294591 -
gggccttagctgccttcctg

SEQ ID NO: 40642 - DNA, 20 bp, Artificial Sequence
  Synthetic oligonucleotide; GGG chr11 5294587 5294606 5294590 -
ggccttagctgccttcctgc

SEQ ID NO: 40643 - DNA, 20 bp, Artificial Sequence
  Synthetic oligonucleotide; GGG chr11 5294586 5294605 5294589 -
gccttagctgccttcctgcg

SEQ ID NO: 40644 - DNA, 20 bp, Artificial Sequence
  Synthetic oligonucleotide; CAG chr11 5294583 5294602 5294586 -
ttagctgccttcctgcgggg

SEQ ID NO: 40645 - DNA, 20 bp, Artificial Sequence
  Synthetic oligonucleotide; AGG chr11 5294582 5294601 5294585 -
tagctgccttcctgcggggc

SEQ ID NO: 40646 - DNA, 20 bp, Artificial Sequence
  Synthetic oligonucleotide; GGG chr11 5294581 5294600 5294584 -
agctgccttcctgcggggca

SEQ ID NO: 40647 - DNA, 20 bp, Artificial Sequence
  Synthetic oligonucleotide; CGG chr11 5294576 5294595 5294579 -
ccttcctgcggggcagggct

SEQ ID NO: 40648 - DNA, 20 bp, Artificial Sequence
  Synthetic oligonucleotide; GGG chr11 5294575 5294594 5294578 -
cttcctgcggggcagggctc

SEQ ID NO: 40649 - DNA, 20 bp, Artificial Sequence
  Synthetic oligonucleotide; CAG chr11 5294567 5294586 5294570 -
ggggcagggctcgggacctg

SEQ ID NO: 40650 - DNA, 20 bp, Artificial Sequence
  Synthetic oligonucleotide; GAG chr11 5294552 5294571 5294555 -
acctgcagcgcgccatgcct

SEQ ID NO: 40651 - DNA, 20 bp, Artificial Sequence
  Synthetic oligonucleotide; TGG chr11 5294535 5294554 5294538 -
cctgagcctccccaccttca

SEQ ID NO: 40652 - DNA, 20 bp, Artificial Sequence
  Synthetic oligonucleotide; GGG chr11 5294534 5294553 5294537 -
ctgagcctccccaccttcat

SEQ ID NO: 40653 - DNA, 20 bp, Artificial Sequence
  Synthetic oligonucleotide; CGG chr11 5294523 5294542 5294526 -
caccttcatgggctcctgtg

SEQ ID NO: 40654 - DNA, 20 bp, Artificial Sequence
  Synthetic oligonucleotide; GAG chr11 5294517 5294536 5294520 -
catgggctcctgtgcggccc

SEQ ID NO: 40655 - DNA, 20 bp, Artificial Sequence
  Synthetic oligonucleotide; GAG chr11 5294504 5294523 5294507 -
gcggcccgagcctcgccgac

SEQ ID NO: 40656 - DNA, 20 bp, Artificial Sequence
  Synthetic oligonucleotide; CAG chr11 5294486 5294505 5294489 -
acgagcgccgccccctgctc

SEQ ID NO: 40657 - DNA, 20 bp, Artificial Sequence
  Synthetic oligonucleotide; AGG chr11 5294485 5294504 5294488 -
cgagcgccgccccctgctcc

SEQ ID NO: 40658 - DNA, 20 bp, Artificial Sequence
  Synthetic oligonucleotide; GGG chr11 5294484 5294503 5294487 -
gagcgccgccccctgctcca

SEQ ID NO: 40659 - DNA, 20 bp, Artificial Sequence
  Synthetic oligonucleotide; CAG chr11 5294477 5294496 5294480 -
gccccctgctccagggcacc

SEQ ID NO: 40660 - DNA, 20 bp, Artificial Sequence
  Synthetic oligonucleotide; AAG chr11 5294459 5294478 5294462 -
cccagtcccatcgaccaccc

SEQ ID NO: 40661 - DNA, 20 bp, Artificial Sequence
  Synthetic oligonucleotide; AGG chr11 5294458 5294477 5294461 -
ccagtcccatcgaccaccca

SEQ ID NO: 40662 - DNA, 20 bp, Artificial Sequence
  Synthetic oligonucleotide; GGG chr11 5294457 5294476 5294460 -
cagtcccatcgaccacccaa

SEQ ID NO: 40663 - DNA, 20 bp, Artificial Sequence
  Synthetic oligonucleotide; AAG chr11 5294451 5294470 5294454 -
catcgaccacccaagggctg

SEQ ID NO: 40664 - DNA, 20 bp, Artificial Sequence
  Synthetic oligonucleotide; GAG chr11 5294449 5294468 5294452 -
tcgaccacccaagggctgaa

SEQ ID NO: 40665 - DNA, 20 bp, Artificial Sequence
  Synthetic oligonucleotide; CGG chr11 5294444 5294463 5294447 -
cacccaagggctgaagagtg

SEQ ID NO: 40666 - DNA, 20 bp, Artificial Sequence
  Synthetic oligonucleotide; GGG chr11 5294443 5294462 5294446 -
acccaagggctgaagagtgc

SEQ ID NO: 40667 - DNA, 20 bp, Artificial Sequence
  Synthetic oligonucleotide; CGG chr11 5294436 5294455 5294439 -
ggctgaagagtgcgggcgca

SEQ ID NO: 40668 - DNA, 20 bp, Artificial Sequence
  Synthetic oligonucleotide; CAG chr11 5294433 5294452 5294436 -
tgaagagtgcgggcgcacgg

SEQ ID NO: 40669 - DNA, 20 bp, Artificial Sequence
  Synthetic oligonucleotide; AGG chr11 5294432 5294451 5294435 -
gaagagtgcgggcgcacggc

SEQ ID NO: 40670 - DNA, 20 bp, Artificial Sequence
  Synthetic oligonucleotide; GGG chr11 5294431 5294450 5294434 -
aagagtgcgggcgcacggca

SEQ ID NO: 40671 - DNA, 20 bp, Artificial Sequence
  Synthetic oligonucleotide; GGG chr11 5294430 5294449 5294433 -
agagtgcgggcgcacggcag

SEQ ID NO: 40672 - DNA, 20 bp, Artificial Sequence
  Synthetic oligonucleotide; TGG chr11 5294425 5294444 5294428 -
gcgggcgcacggcaggggac

SEQ ID NO: 40673 - DNA, 20 bp, Artificial Sequence
  Synthetic oligonucleotide; CAG chr11 5294422 5294441 5294425 -
ggcgcacggcaggggactgg

SEQ ID NO: 40674 - DNA, 20 bp, Artificial Sequence
  Synthetic oligonucleotide; AGG chr11 5294421 5294440 5294424 -
gcgcacggcaggggactggc

SEQ ID NO: 40675 - DNA, 20 bp, Artificial Sequence
  Synthetic oligonucleotide; CAG chr11 5294418 5294437 5294421 -
cacggcaggggactggcagg

SEQ ID NO: 40676 - DNA, 20 bp, Artificial Sequence
  Synthetic oligonucleotide; CAG chr11 5294406 5294425 5294409 -
ctggcaggcagctccccctg

SEQ ID NO: 40677 - DNA, 20 bp, Artificial Sequence
  Synthetic oligonucleotide; CAG chr11 5294401 5294420 5294404 -
aggcagctccccctgcagcc

SEQ ID NO: 40678 - DNA, 20 bp, Artificial Sequence
  Synthetic oligonucleotide; AGG chr11 5294400 5294419 5294403 -
ggcagctccccctgcagccc

SEQ ID NO: 40679 - DNA, 20 bp, Artificial Sequence
  Synthetic oligonucleotide; CGG chr11 5294395 5294414 5294398 -
ctccccctgcagcccaggtg

SEQ ID NO: 40680 - DNA, 20 bp, Artificial Sequence
  Synthetic oligonucleotide; GGG chr11 5294394 5294413 5294397 -
tccccctgcagcccaggtgc

SEQ ID NO: 40681 - DNA, 20 bp, Artificial Sequence
  Synthetic oligonucleotide; TGG chr11 5294385 5294404 5294388 -
agcccaggtgcgggatccac

SEQ ID NO: 40682 - DNA, 20 bp, Artificial Sequence
  Synthetic oligonucleotide; GGG chr11 5294384 5294403 5294387 -
gcccaggtgcgggatccact

SEQ ID NO: 40683 - DNA, 20 bp, Artificial Sequence
  Synthetic oligonucleotide; AAG chr11 5294379 5294398 5294382 -
ggtgcgggatccactgggtg

SEQ ID NO: 40684 - DNA, 20 bp, Artificial Sequence
  Synthetic oligonucleotide; CGG chr11 5294375 5294394 5294378 -
cgggatccactgggtgaagc

SEQ ID NO: 40685 - DNA, 20 bp, Artificial Sequence
  Synthetic oligonucleotide; TAG chr11 5294371 5294390 5294374 -
atccactgggtgaagccggc

SEQ ID NO: 40686 - DNA, 20 bp, Artificial Sequence
  Synthetic oligonucleotide; AGG chr11 5294370 5294389 5294373 -
tccactgggtgaagccggct

SEQ ID NO: 40687 - DNA, 20 bp, Artificial Sequence
  Synthetic oligonucleotide; GAG chr11 5294362 5294381 5294365 -
gtgaagccggctaggctcct

SEQ ID NO: 40688 - DNA, 20 bp, Artificial Sequence
  Synthetic oligonucleotide; TGG chr11 5294354 5294373 5294357 -
ggctaggctcctgagtttgc

SEQ ID NO: 40689 - DNA, 20 bp, Artificial Sequence
  Synthetic oligonucleotide; GGG chr11 5294353 5294372 5294356 -
gctaggctcctgagtttgct

SEQ ID NO: 40690 - DNA, 20 bp, Artificial Sequence
  Synthetic oligonucleotide; GGG chr11 5294352 5294371 5294355 -
ctaggctcctgagtttgctg

SEQ ID NO: 40691 - DNA, 20 bp, Artificial Sequence
  Synthetic oligonucleotide; AAG chr11 5294344 5294363 5294347 -
ctgagtttgctggggatgcg

SEQ ID NO: 40692 - DNA, 20 bp, Artificial Sequence
  Synthetic oligonucleotide; TAG chr11 5294329 5294348 5294332 -
atgcgaagaacccttatgtc

SEQ ID NO: 40693 - DNA, 20 bp, Artificial Sequence
  Synthetic oligonucleotide; AAG chr11 5294324 5294343 5294327 -
aagaacccttatgtctagat

SEQ ID NO: 40694 - DNA, 20 bp, Artificial Sequence
  Synthetic oligonucleotide; AGG chr11 5294323 5294342 5294326 -
agaacccttatgtctagata

SEQ ID NO: 40695 - DNA, 20 bp, Artificial Sequence
  Synthetic oligonucleotide; GGG chr11 5294322 5294341 5294325 -
gaacccttatgtctagataa

SEQ ID NO: 40696 - DNA, 20 bp, Artificial Sequence
  Synthetic oligonucleotide; TGG chr11 5294302 5294321 5294305 -
gggattgtaaatacaccaat

SEQ ID NO: 40697 - DNA, 20 bp, Artificial Sequence
  Synthetic oligonucleotide; TAG chr11 5294288 5294307 5294291 -
accaattggcactctgtatc

SEQ ID NO: 40698 - DNA, 20 bp, Artificial Sequence
  Synthetic oligonucleotide; AAG chr11 5294282 5294301 5294285 -
tggcactctgtatctagctc

SEQ ID NO: 40699 - DNA, 20 bp, Artificial Sequence
  Synthetic oligonucleotide; AGG chr11 5294281 5294300 5294284 -
ggcactctgtatctagctca

SEQ ID NO: 40700 - DNA, 20 bp, Artificial Sequence
  Synthetic oligonucleotide; CAG chr11 5294261 5294280 5294264 -
aggtttgtaaacacaccaat

SEQ ID NO: 40701 - DNA, 20 bp, Artificial Sequence
  Synthetic oligonucleotide; TAG chr11 5294247 5294266 5294250 -
accaatcagcaccctgtgtc

SEQ ID NO: 40702 - DNA, 20 bp, Artificial Sequence
  Synthetic oligonucleotide; CAG chr11 5294242 5294261 5294245 -
tcagcaccctgtgtctagct

SEQ ID NO: 40703 - DNA, 20 bp, Artificial Sequence
  Synthetic oligonucleotide; AGG chr11 5294241 5294260 5294244 -
cagcaccctgtgtctagctc

SEQ ID NO: 40704 - DNA, 20 bp, Artificial Sequence
  Synthetic oligonucleotide; GGG chr11 5294240 5294259 5294243 -
agcaccctgtgtctagctca

SEQ ID NO: 40705 - DNA, 20 bp, Artificial Sequence
  Synthetic oligonucleotide; TAG chr11 5294208 5294227 5294211 -
gcaccaatcaacactctatc

SEQ ID NO: 40706 - DNA, 20 bp, Artificial Sequence
  Synthetic oligonucleotide; TGG chr11 5294199 5294218 5294202 -
aacactctatctagctactc

SEQ ID NO: 40707 - DNA, 20 bp, Artificial Sequence
  Synthetic oligonucleotide; TGG chr11 5294196 5294215 5294199 -
actctatctagctactctgg

SEQ ID NO: 40708 - DNA, 20 bp, Artificial Sequence
  Synthetic oligonucleotide; GGG chr11 5294195 5294214 5294198 -
ctctatctagctactctggt

SEQ ID NO: 40709 - DNA, 20 bp, Artificial Sequence
  Synthetic oligonucleotide; GGG chr11 5294194 5294213 5294197 -
tctatctagctactctggtg

SEQ ID NO: 40710 - DNA, 20 bp, Artificial Sequence
  Synthetic oligonucleotide; TGG chr11 5294188 5294207 5294191 -
tagctactctggtggggcct

SEQ ID NO: 40711 - DNA, 20 bp, Artificial Sequence
  Synthetic oligonucleotide; GAG chr11 5294186 5294205 5294189 -
gctactctggtggggccttg

SEQ ID NO: 40712 - DNA, 20 bp, Artificial Sequence
  Synthetic oligonucleotide; TAG chr11 5294171 5294190 5294174 -
ccttggagaacctttatgtc

SEQ ID NO: 40713 - DNA, 20 bp, Artificial Sequence
  Synthetic oligonucleotide; CAG chr11 5294166 5294185 5294169 -
gagaacctttatgtctagct

SEQ ID NO: 40714 - DNA, 20 bp, Artificial Sequence
  Synthetic oligonucleotide; AGG chr11 5294165 5294184 5294168 -
agaacctttatgtctagctc

SEQ ID NO: 40715 - DNA, 20 bp, Artificial Sequence
  Synthetic oligonucleotide; GGG chr11 5294164 5294183 5294167 -
gaacctttatgtctagctca

SEQ ID NO: 40716 - DNA, 20 bp, Artificial Sequence
  Synthetic oligonucleotide; CGG chr11 5294144 5294163 5294147 -
gggattgtaaatacaccaat

SEQ ID NO: 40717 - DNA, 20 bp, Artificial Sequence
  Synthetic oligonucleotide; CAG chr11 5294141 5294160 5294144 -
attgtaaatacaccaatcgg

SEQ ID NO: 40718 - DNA, 20 bp, Artificial Sequence
  Synthetic oligonucleotide; TAG chr11 5294130 5294149 5294133 -
accaatcggcagtctgtatc

SEQ ID NO: 40719 - DNA, 20 bp, Artificial Sequence
  Synthetic oligonucleotide; AAG chr11 5294124 5294143 5294127 -
cggcagtctgtatctagctc

SEQ ID NO: 40720 - DNA, 20 bp, Artificial Sequence
  Synthetic oligonucleotide; AGG chr11 5294123 5294142 5294126 -
ggcagtctgtatctagctca

SEQ ID NO: 40721 - DNA, 20 bp, Artificial Sequence
  Synthetic oligonucleotide; CAG chr11 5294103 5294122 5294106 -
aggtttgtaaacacaccaat

SEQ ID NO: 40722 - DNA, 20 bp, Artificial Sequence
  Synthetic oligonucleotide; TAG chr11 5294089 5294108 5294092 -
accaatcagcaccctgtgtc

SEQ ID NO: 40723 - DNA, 20 bp, Artificial Sequence
  Synthetic oligonucleotide; CAG chr11 5294084 5294103 5294087 -
tcagcaccctgtgtctagct

SEQ ID NO: 40724 - DNA, 20 bp, Artificial Sequence
  Synthetic oligonucleotide; AGG chr11 5294083 5294102 5294086 -
cagcaccctgtgtctagctc

SEQ ID NO: 40725 - DNA, 20 bp, Artificial Sequence
  Synthetic oligonucleotide; GGG chr11 5294082 5294101 5294085 -
agcaccctgtgtctagctca

SEQ ID NO: 40726 - DNA, 20 bp, Artificial Sequence
  Synthetic oligonucleotide; TAG chr11 5294048 5294067 5294051 -
accaatcaacactctgtatc

SEQ ID NO: 40727 - DNA, 20 bp, Artificial Sequence
  Synthetic oligonucleotide; TGG chr11 5294039 5294058 5294042 -
cactctgtatctagctactc

SEQ ID NO: 40728 - DNA, 20 bp, Artificial Sequence
  Synthetic oligonucleotide; TGG chr11 5294036 5294055 5294039 -
tctgtatctagctactctgg

SEQ ID NO: 40729 - DNA, 20 bp, Artificial Sequence
  Synthetic oligonucleotide; GGG chr11 5294035 5294054 5294038 -
ctgtatctagctactctggt

SEQ ID NO: 40730 - DNA, 20 bp, Artificial Sequence
  Synthetic oligonucleotide; GGG chr11 5294034 5294053 5294037 -
tgtatctagctactctggtg

SEQ ID NO: 40731 - DNA, 20 bp, Artificial Sequence
  Synthetic oligonucleotide; TGG chr11 5294028 5294047 5294031 -
tagctactctggtggggacg

SEQ ID NO: 40732 - DNA, 20 bp, Artificial Sequence
  Synthetic oligonucleotide; GAG chr11 5294026 5294045 5294029 -
gctactctggtggggacgtg

SEQ ID NO: 40733 - DNA, 20 bp, Artificial Sequence
  Synthetic oligonucleotide; TAG chr11 5294011 5294030 5294014 -
acgtggagaacctttatgtc

SEQ ID NO: 40734 - DNA, 20 bp, Artificial Sequence
  Synthetic oligonucleotide; CAG chr11 5294006 5294025 5294009 -
gagaacctttatgtctagct

SEQ ID NO: 40735 - DNA, 20 bp, Artificial Sequence
  Synthetic oligonucleotide; AGG chr11 5294005 5294024 5294008 -
agaacctttatgtctagctc

SEQ ID NO: 40736 - DNA, 20 bp, Artificial Sequence
  Synthetic oligonucleotide; GGG chr11 5294004 5294023 5294007 -
gaacctttatgtctagctca

SEQ ID NO: 40737 - DNA, 20 bp, Artificial Sequence
  Synthetic oligonucleotide; CGG chr11 5293984 5294003 5293987 -
gggattgtaaatacaccact

SEQ ID NO: 40738 - DNA, 20 bp, Artificial Sequence
  Synthetic oligonucleotide; CAG chr11 5293981 5294000 5293984 -
attgtaaatacaccactcgg

SEQ ID NO: 40739 - DNA, 20 bp, Artificial Sequence
  Synthetic oligonucleotide; TAG chr11 5293970 5293989 5293973 -
accactcggcagtctgtatc

SEQ ID NO: 40740 - DNA, 20 bp, Artificial Sequence
  Synthetic oligonucleotide; AAG chr11 5293964 5293983 5293967 -
cggcagtctgtatctagctc

SEQ ID NO: 40741 - DNA, 20 bp, Artificial Sequence
  Synthetic oligonucleotide; AGG chr11 5293963 5293982 5293966 -
ggcagtctgtatctagctca

SEQ ID NO: 40742 - DNA, 20 bp, Artificial Sequence
  Synthetic oligonucleotide; CAG chr11 5293943 5293962 5293946 -
aggtttgtaaacacaccaat

SEQ ID NO: 40743 - DNA, 20 bp, Artificial Sequence
  Synthetic oligonucleotide; TAG chr11 5293929 5293948 5293932 -
accaatcagcaccctgtgtc

SEQ ID NO: 40744 - DNA, 20 bp, Artificial Sequence
  Synthetic oligonucleotide; CAG chr11 5293924 5293943 5293927 -
tcagcaccctgtgtctagct

SEQ ID NO: 40745 - DNA, 20 bp, Artificial Sequence
  Synthetic oligonucleotide; AGG chr11 5293923 5293942 5293926 -
cagcaccctgtgtctagctc

SEQ ID NO: 40746 - DNA, 20 bp, Artificial Sequence
  Synthetic oligonucleotide; GGG chr11 5293922 5293941 5293925 -
agcaccctgtgtctagctca

SEQ ID NO: 40747 - DNA, 20 bp, Artificial Sequence
  Synthetic oligonucleotide; TAG chr11 5293888 5293907 5293891 -
accaatcaacactctgtatc

SEQ ID NO: 40748 - DNA, 20 bp, Artificial Sequence
  Synthetic oligonucleotide; TGG chr11 5293879 5293898 5293882 -
cactctgtatctagctactc

SEQ ID NO: 40749 - DNA, 20 bp, Artificial Sequence
  Synthetic oligonucleotide; TGG chr11 5293876 5293895 5293879 -
tctgtatctagctactctgg

SEQ ID NO: 40750 - DNA, 20 bp, Artificial Sequence
  Synthetic oligonucleotide; GGG chr11 5293875 5293894 5293878 -
ctgtatctagctactctggt

SEQ ID NO: 40751 - DNA, 20 bp, Artificial Sequence
  Synthetic oligonucleotide; GGG chr11 5293874 5293893 5293877 -
tgtatctagctactctggtg

SEQ ID NO: 40752 - DNA, 20 bp, Artificial Sequence
  Synthetic oligonucleotide; TGG chr11 5293868 5293887 5293871 -
tagctactctggtggggact

SEQ ID NO: 40753 - DNA, 20 bp, Artificial Sequence
  Synthetic oligonucleotide; GAG chr11 5293866 5293885 5293869 -
gctactctggtggggacttg

SEQ ID NO: 40754 - DNA, 20 bp, Artificial Sequence
  Synthetic oligonucleotide; TGG chr11 5293853 5293872 5293856 -
ggacttggagaacctttgtg

SEQ ID NO: 40755 - DNA, 20 bp, Artificial Sequence
  Synthetic oligonucleotide; TAG chr11 5293838 5293857 5293841 -
ttgtgtggacactctgtatc

SEQ ID NO: 40756 - DNA, 20 bp, Artificial Sequence
  Synthetic oligonucleotide; TGG chr11 5293829 5293848 5293832 -
cactctgtatctagctaatc

SEQ ID NO: 40757 - DNA, 20 bp, Artificial Sequence
  Synthetic oligonucleotide; TGG chr11 5293826 5293845 5293829 -
tctgtatctagctaatctgg

SEQ ID NO: 40758 - DNA, 20 bp, Artificial Sequence
  Synthetic oligonucleotide; GGG chr11 5293825 5293844 5293828 -
ctgtatctagctaatctggt

SEQ ID NO: 40759 - DNA, 20 bp, Artificial Sequence
  Synthetic oligonucleotide; GGG chr11 5293824 5293843 5293827 -
tgtatctagctaatctggtg

SEQ ID NO: 40760 - DNA, 20 bp, Artificial Sequence
  Synthetic oligonucleotide; TGG chr11 5293818 5293837 5293821 -
tagctaatctggtggggacg

SEQ ID NO: 40761 - DNA, 20 bp, Artificial Sequence
  Synthetic oligonucleotide; GAG chr11 5293816 5293835 5293819 -
gctaatctggtggggacgtg

SEQ ID NO: 40762 - DNA, 20 bp, Artificial Sequence
  Synthetic oligonucleotide; TAG chr11 5293801 5293820 5293804 -
acgtggagaacctttgtgtc

SEQ ID NO: 40763 - DNA, 20 bp, Artificial Sequence
  Synthetic oligonucleotide; TGG chr11 5293794 5293813 5293797 -
gaacctttgtgtctagctca

SEQ ID NO: 40764 - DNA, 20 bp, Artificial Sequence
  Synthetic oligonucleotide; CAG chr11 5293774 5293793 5293777 -
tggattgtaaatgcaccaat

SEQ ID NO: 40765 - DNA, 20 bp, Artificial Sequence
  Synthetic oligonucleotide; CAG chr11 5293758 5293777 5293761 -
caatcagtgccctgtcaaaa

SEQ ID NO: 40766 - DNA, 20 bp, Artificial Sequence
  Synthetic oligonucleotide; TGG chr11 5293750 5293769 5293753 -
gccctgtcaaaacagaccac

SEQ ID NO: 40767 - DNA, 20 bp, Artificial Sequence
  Synthetic oligonucleotide; GGG chr11 5293749 5293768 5293752 -
ccctgtcaaaacagaccact

SEQ ID NO: 40768 - DNA, 20 bp, Artificial Sequence
  Synthetic oligonucleotide; CAG chr11 5293736 5293755 5293739 -
gaccactgggctctaccaat

SEQ ID NO: 40769 - DNA, 20 bp, Artificial Sequence
  Synthetic oligonucleotide; CAG chr11 5293733 5293752 5293736 -
cactgggctctaccaatcag

SEQ ID NO: 40770 - DNA, 20 bp, Artificial Sequence
  Synthetic oligonucleotide; AGG chr11 5293732 5293751 5293735 -
actgggctctaccaatcagc

SEQ ID NO: 40771 - DNA, 20 bp, Artificial Sequence
  Synthetic oligonucleotide; TGG chr11 5293726 5293745 5293729 -
ctctaccaatcagcaggatg

SEQ ID NO: 40772 - DNA, 20 bp, Artificial Sequence
  Synthetic oligonucleotide; GGG chr11 5293725 5293744 5293728 -
tctaccaatcagcaggatgt

SEQ ID NO: 40773 - DNA, 20 bp, Artificial Sequence
  Synthetic oligonucleotide; TGG chr11 5293722 5293741 5293725 -
accaatcagcaggatgtggg

SEQ ID NO: 40774 - DNA, 20 bp, Artificial Sequence
  Synthetic oligonucleotide; GGG chr11 5293721 5293740 5293724 -
ccaatcagcaggatgtgggt

SEQ ID NO: 40775 - DNA, 20 bp, Artificial Sequence
  Synthetic oligonucleotide; GGG chr11 5293720 5293739 5293723 -
caatcagcaggatgtgggtg

SEQ ID NO: 40776 - DNA, 20 bp, Artificial Sequence
  Synthetic oligonucleotide; CAG chr11 5293716 5293735 5293719 -
cagcaggatgtgggtggggc

SEQ ID NO: 40777 - DNA, 20 bp, Artificial Sequence
  Synthetic oligonucleotide; AAG chr11 5293711 5293730 5293714 -
ggatgtgggtggggccagat

SEQ ID NO: 40778 - DNA, 20 bp, Artificial Sequence
  Synthetic oligonucleotide; GAG chr11 5293709 5293728 5293712 -
atgtgggtggggccagataa

SEQ ID NO: 40779 - DNA, 20 bp, Artificial Sequence
  Synthetic oligonucleotide; AAG chr11 5293701 5293720 5293704 -
ggggccagataagagaataa

SEQ ID NO: 40780 - DNA, 20 bp, Artificial Sequence
  Synthetic oligonucleotide; CAG chr11 5293698 5293717 5293701 -
gccagataagagaataaaag

SEQ ID NO: 40781 - DNA, 20 bp, Artificial Sequence
  Synthetic oligonucleotide; AGG chr11 5293697 5293716 5293700 -
ccagataagagaataaaagc

SEQ ID NO: 40782 - DNA, 20 bp, Artificial Sequence
  Synthetic oligonucleotide; GAG chr11 5293688 5293707 5293691 -
agaataaaagcaggctgccc

SEQ ID NO: 40783 - DNA, 20 bp, Artificial Sequence
  Synthetic oligonucleotide; CAG chr11 5293684 5293703 5293687 -
taaaagcaggctgcccgagc

SEQ ID NO: 40784 - DNA, 20 bp, Artificial Sequence
  Synthetic oligonucleotide; CAG chr11 5293681 5293700 5293684 -
aagcaggctgcccgagccag

SEQ ID NO: 40785 - DNA, 20 bp, Artificial Sequence
  Synthetic oligonucleotide; TGG chr11 5293678 5293697 5293681 -
caggctgcccgagccagcag

SEQ ID NO: 40786 - DNA, 20 bp, Artificial Sequence
  Synthetic oligonucleotide; CGG chr11 5293666 5293685 5293669 -
gccagcagtggcaacccgct

SEQ ID NO: 40787 - DNA, 20 bp, Artificial Sequence
  Synthetic oligonucleotide; GGG chr11 5293665 5293684 5293668 -
ccagcagtggcaacccgctc

SEQ ID NO: 40788 - DNA, 20 bp, Artificial Sequence
  Synthetic oligonucleotide; TGG chr11 5293647 5293666 5293650 -
tcgggtccccttccacactg

SEQ ID NO: 40789 - DNA, 20 bp, Artificial Sequence
  Synthetic oligonucleotide; AAG chr11 5293644 5293663 5293647 -
ggtccccttccacactgtgg

SEQ ID NO: 40790 - DNA, 20 bp, Artificial Sequence
  Synthetic oligonucleotide; TGG chr11 5293594 5293613 5293597 -
tcttgctgctgctcactgtt

SEQ ID NO: 40791 - DNA, 20 bp, Artificial Sequence
  Synthetic oligonucleotide; GGG chr11 5293593 5293612 5293596 -
cttgctgctgctcactgttt

SEQ ID NO: 40792 - DNA, 20 bp, Artificial Sequence
  Synthetic oligonucleotide; GAG chr11 5293574 5293593 5293577 -
tgggtctacactgcctttat

SEQ ID NO: 40793 - DNA, 20 bp, Artificial Sequence
  Synthetic oligonucleotide; AAG chr11 5293554 5293573 5293557 -
gagctgtaacgctcaccgcg

SEQ ID NO: 40794 - DNA, 20 bp, Artificial Sequence
  Synthetic oligonucleotide; AGG chr11 5293553 5293572 5293556 -
agctgtaacgctcaccgcga

SEQ ID NO: 40795 - DNA, 20 bp, Artificial Sequence
  Synthetic oligonucleotide; CAG chr11 5293546 5293565 5293549 -
acgctcaccgcgaaggtctg

SEQ ID NO: 40796 - DNA, 20 bp, Artificial Sequence
  Synthetic oligonucleotide; AAG chr11 5293532 5293551 5293535 -
ggtctgcagcttcactcttg

SEQ ID NO: 40797 - DNA, 20 bp, Artificial Sequence
  Synthetic oligonucleotide; CAG chr11 5293528 5293547 5293531 -
tgcagcttcactcttgaagc

SEQ ID NO: 40798 - DNA, 20 bp, Artificial Sequence
  Synthetic oligonucleotide; GAG chr11 5293524 5293543 5293527 -
gcttcactcttgaagccagc

SEQ ID NO: 40799 - DNA, 20 bp, Artificial Sequence
  Synthetic oligonucleotide; CGG chr11 5293508 5293527 5293511 -
cagcgagaccacgaacccac

SEQ ID NO: 40800 - DNA, 20 bp, Artificial Sequence
  Synthetic oligonucleotide; GGG chr11 5293507 5293526 5293510 -
agcgagaccacgaacccacc

SEQ ID NO: 40801 - DNA, 20 bp, Artificial Sequence
  Synthetic oligonucleotide; GAG chr11 5293505 5293524 5293508 -
cgagaccacgaacccaccgg

SEQ ID NO: 40802 - DNA, 20 bp, Artificial Sequence
  Synthetic oligonucleotide; AGG chr11 5293504 5293523 5293507 -
gagaccacgaacccaccggg

SEQ ID NO: 40803 - DNA, 20 bp, Artificial Sequence
  Synthetic oligonucleotide; CAG chr11 5293489 5293508 5293492 -
ccgggaggaacgaacaactc

SEQ ID NO: 40804 - DNA, 20 bp, Artificial Sequence
  Synthetic oligonucleotide; GAG chr11 5293487 5293506 5293490 -
gggaggaacgaacaactcca

SEQ ID NO: 40805 - DNA, 20 bp, Artificial Sequence
  Synthetic oligonucleotide; AGG chr11 5293486 5293505 5293489 -
ggaggaacgaacaactccag

SEQ ID NO: 40806 - DNA, 20 bp, Artificial Sequence
  Synthetic oligonucleotide; AAG chr11 5293474 5293493 5293477 -
aactccagaggcgccgcctt

SEQ ID NO: 40807 - DNA, 20 bp, Artificial Sequence
  Synthetic oligonucleotide; GAG chr11 5293472 5293491 5293475 -
ctccagaggcgccgccttaa

SEQ ID NO: 40808 - DNA, 20 bp, Artificial Sequence
  Synthetic oligonucleotide; TGG chr11 5293468 5293487 5293471 -
agaggcgccgccttaagagc

SEQ ID NO: 40809 - DNA, 20 bp, Artificial Sequence
  Synthetic oligonucleotide; AAG chr11 5293452 5293471 5293455 -
gagctggaacgttcactgtg

SEQ ID NO: 40810 - DNA, 20 bp, Artificial Sequence
  Synthetic oligonucleotide; AGG chr11 5293451 5293470 5293454 -
agctggaacgttcactgtga

SEQ ID NO: 40811 - DNA, 20 bp, Artificial Sequence
  Synthetic oligonucleotide; CAG chr11 5293444 5293463 5293447 -
acgttcactgtgaaggtctg

SEQ ID NO: 40812 - DNA, 20 bp, Artificial Sequence
  Synthetic oligonucleotide; GAG chr11 5293431 5293450 5293434 -
aggtctgcagcttcactcct

SEQ ID NO: 40813 - DNA, 20 bp, Artificial Sequence
  Synthetic oligonucleotide; CAG chr11 5293427 5293446 5293430 -
ctgcagcttcactcctgagc

SEQ ID NO: 40814 - DNA, 20 bp, Artificial Sequence
  Synthetic oligonucleotide; GAG chr11 5293423 5293442 5293426 -
agcttcactcctgagccagc

SEQ ID NO: 40815 - DNA, 20 bp, Artificial Sequence
  Synthetic oligonucleotide; CAG chr11 5293407 5293426 5293410 -
cagcgagaccacgaacccat

SEQ ID NO: 40816 - DNA, 20 bp, Artificial Sequence
  Synthetic oligonucleotide; AAG chr11 5293404 5293423 5293407 -
cgagaccacgaacccatcag

SEQ ID NO: 40817 - DNA, 20 bp, Artificial Sequence
  Synthetic oligonucleotide; AGG chr11 5293403 5293422 5293406 -
gagaccacgaacccatcaga

SEQ ID NO: 40818 - DNA, 20 bp, Artificial Sequence
  Synthetic oligonucleotide; AAG chr11 5293400 5293419 5293403 -
accacgaacccatcagaagg

SEQ ID NO: 40819 - DNA, 20 bp, Artificial Sequence
  Synthetic oligonucleotide; CAG chr11 5293374 5293393 5293377 -
ctccgaacacatccaaacat

SEQ ID NO: 40820 - DNA, 20 bp, Artificial Sequence
  Synthetic oligonucleotide; CAG chr11 5293350 5293369 5293353 -
acgaacaaactccacacacg

SEQ ID NO: 40821 - DNA, 20 bp, Artificial Sequence
  Synthetic oligonucleotide; AAG chr11 5293342 5293361 5293345 -
actccacacacgcagccttt

SEQ ID NO: 40822 - DNA, 20 bp, Artificial Sequence
  Synthetic oligonucleotide; GAG chr11 5293321 5293340 5293324 -
agaactgtaacactcaccac

SEQ ID NO: 40823 - DNA, 20 bp, Artificial Sequence
  Synthetic oligonucleotide; AGG chr11 5293320 5293339 5293323 -
gaactgtaacactcaccacg

SEQ ID NO: 40824 - DNA, 20 bp, Artificial Sequence
  Synthetic oligonucleotide; GGG chr11 5293319 5293338 5293322 -
aactgtaacactcaccacga

SEQ ID NO: 40825 - DNA, 20 bp, Artificial Sequence
  Synthetic oligonucleotide; CGG chr11 5293312 5293331 5293315 -
acactcaccacgagggtccc

SEQ ID NO: 40826 - DNA, 20 bp, Artificial Sequence
  Synthetic oligonucleotide; AAG chr11 5293298 5293317 5293301 -
ggtccccggcttcattcttg

SEQ ID NO: 40827 - DNA, 20 bp, Artificial Sequence
  Synthetic oligonucleotide; CAG chr11 5293294 5293313 5293297 -
cccggcttcattcttgaagt

SEQ ID NO: 40828 - DNA, 20 bp, Artificial Sequence
  Synthetic oligonucleotide; AAG chr11 5293284 5293303 5293287 -
ttcttgaagtcagtgaaacc

SEQ ID NO: 40829 - DNA, 20 bp, Artificial Sequence
  Synthetic oligonucleotide; CGG chr11 5293268 5293287 5293271 -
aaccaagaacccaccaattc

SEQ ID NO: 40830 - DNA, 20 bp, Artificial Sequence
  Synthetic oligonucleotide; CAG chr11 5293262 5293281 5293265 -
gaacccaccaattccggaca

SEQ ID NO: 40831 - DNA, 20 bp, Artificial Sequence
  Synthetic oligonucleotide; CAG chr11 5293254 5293273 5293257 -
caattccggacacagtatgt

SEQ ID NO: 40832 - DNA, 20 bp, Artificial Sequence
  Synthetic oligonucleotide; GAG chr11 5293242 5293261 5293245 -
cagtatgtcagaaacaatat

SEQ ID NO: 40833 - DNA, 20 bp, Artificial Sequence
  Synthetic oligonucleotide; CAG chr11 5293205 5293224 5293208 -
tacttctcaacaatttccaa

SEQ ID NO: 40834 - DNA, 20 bp, Artificial Sequence
  Synthetic oligonucleotide; TGG chr11 5293187 5293206 5293190 -
aacagcccttgcaattaact

SEQ ID NO: 40835 - DNA, 20 bp, Artificial Sequence
  Synthetic oligonucleotide; TGG chr11 5293175 5293194 5293178 -
aattaacttggccatgtgac

SEQ ID NO: 40836 - DNA, 20 bp, Artificial Sequence
  Synthetic oligonucleotide; TGG chr11 5293155 5293174 5293158 -
tggttgtgactaaaataatg

SEQ ID NO: 40837 - DNA, 20 bp, Artificial Sequence
  Synthetic oligonucleotide; GAG chr11 5293153 5293172 5293156 -
gttgtgactaaaataatgtg

SEQ ID NO: 40838 - DNA, 20 bp, Artificial Sequence
  Synthetic oligonucleotide; AAG chr11 5293130 5293149 5293133 -
ataataatgtgttactccct

SEQ ID NO: 40839 - DNA, 20 bp, Artificial Sequence
  Synthetic oligonucleotide; AGG chr11 5293129 5293148 5293132 -
taataatgtgttactcccta

SEQ ID NO: 40840 - DNA, 20 bp, Artificial Sequence
  Synthetic oligonucleotide; CAG chr11 5293126 5293145 5293129 -
taatgtgttactccctaagg

SEQ ID NO: 40841 - DNA, 20 bp, Artificial Sequence
  Synthetic oligonucleotide; GAG chr11 5293124 5293143 5293127 -
atgtgttactccctaaggca

SEQ ID NO: 40842 - DNA, 20 bp, Artificial Sequence
  Synthetic oligonucleotide; TGG chr11 5293087 5293106 5293090 -
tctctttcccttcctctatg

SEQ ID NO: 40843 - DNA, 20 bp, Artificial Sequence
  Synthetic oligonucleotide; CAG chr11 5293084 5293103 5293087 -
ctttcccttcctctatgtgg

SEQ ID NO: 40844 - DNA, 20 bp, Artificial Sequence
  Synthetic oligonucleotide; AAG chr11 5293080 5293099 5293083 -
cccttcctctatgtggcaga

SEQ ID NO: 40845 - DNA, 20 bp, Artificial Sequence
  Synthetic oligonucleotide; AAG chr11 5293074 5293093 5293077 -
ctctatgtggcagaaagtaa

SEQ ID NO: 40846 - DNA, 20 bp, Artificial Sequence
  Synthetic oligonucleotide; AAG chr11 5293057 5293076 5293060 -
taaaagattctgaaatgata

SEQ ID NO: 40847 - DNA, 20 bp, Artificial Sequence
  Synthetic oligonucleotide; CAG chr11 5293047 5293066 5293050 -
tgaaatgataaagtcaatca

SEQ ID NO: 40848 - DNA, 20 bp, Artificial Sequence
  Synthetic oligonucleotide; AGG chr11 5293046 5293065 5293049 -
gaaatgataaagtcaatcac

SEQ ID NO: 40849 - DNA, 20 bp, Artificial Sequence
  Synthetic oligonucleotide; AAG chr11 5293043 5293062 5293046 -
atgataaagtcaatcacagg

SEQ ID NO: 40850 - DNA, 20 bp, Artificial Sequence
  Synthetic oligonucleotide; AGG chr11 5293042 5293061 5293045 -
tgataaagtcaatcacagga

SEQ ID NO: 40851 - DNA, 20 bp, Artificial Sequence
  Synthetic oligonucleotide; TGG chr11 5293035 5293054 5293038 -
gtcaatcacaggaaggcacc

SEQ ID NO: 40852 - DNA, 20 bp, Artificial Sequence
  Synthetic oligonucleotide; TGG chr11 5293027 5293046 5293030 -
caggaaggcacctggactcc

SEQ ID NO: 40853 - DNA, 20 bp, Artificial Sequence
  Synthetic oligonucleotide; TGG chr11 5293015 5293034 5293018 -
tggactcctggcccactgct

SEQ ID NO: 40854 - DNA, 20 bp, Artificial Sequence
  Synthetic oligonucleotide; GAG chr11 5293013 5293032 5293016 -
gactcctggcccactgcttg

SEQ ID NO: 40855 - DNA, 20 bp, Artificial Sequence
  Synthetic oligonucleotide; AGG chr11 5293012 5293031 5293015 -
actcctggcccactgcttgg

SEQ ID NO: 40856 - DNA, 20 bp, Artificial Sequence
  Synthetic oligonucleotide; GAG chr11 5293010 5293029 5293013 -
tcctggcccactgcttggag

SEQ ID NO: 40857 - DNA, 20 bp, Artificial Sequence
  Synthetic oligonucleotide; GAG chr11 5293008 5293027 5293011 -
ctggcccactgcttggagga

SEQ ID NO: 40858 - DNA, 20 bp, Artificial Sequence
  Synthetic oligonucleotide; CAG chr11 5293001 5293020 5293004 -
actgcttggaggagagcact

SEQ ID NO: 40859 - DNA, 20 bp, Artificial Sequence
  Synthetic oligonucleotide; AGG chr11 5293000 5293019 5293003 -
ctgcttggaggagagcactc

SEQ ID NO: 40860 - DNA, 20 bp, Artificial Sequence
  Synthetic oligonucleotide; TAG chr11 5292974 5292993 5292977 -
atgaacatctgactgtgacg

SEQ ID NO: 40861 - DNA, 20 bp, Artificial Sequence
  Synthetic oligonucleotide; AAG chr11 5292966 5292985 5292969 -
ctgactgtgacgtagcaata

SEQ ID NO: 40862 - DNA, 20 bp, Artificial Sequence
  Synthetic oligonucleotide; TGG chr11 5292928 5292947 5292931 -
atgaaactgcttaaaattaa

SEQ ID NO: 40863 - DNA, 20 bp, Artificial Sequence
  Synthetic oligonucleotide; AAG chr11 5292922 5292941 5292925 -
ctgcttaaaattaatggcac

SEQ ID NO: 40864 - DNA, 20 bp, Artificial Sequence
  Synthetic oligonucleotide; TGG chr11 5292884 5292903 5292887 -
tgcacatttgtctttatttg

SEQ ID NO: 40865 - DNA, 20 bp, Artificial Sequence
  Synthetic oligonucleotide; AAG chr11 5292853 5292872 5292856 -
gcttccacatcaatccactc

SEQ ID NO: 40866 - DNA, 20 bp, Artificial Sequence
  Synthetic oligonucleotide; AGG chr11 5292852 5292871 5292855 -
cttccacatcaatccactca

SEQ ID NO: 40867 - DNA, 20 bp, Artificial Sequence
  Synthetic oligonucleotide; AAG chr11 5292823 5292842 5292826 -
ttctgctataatgcaatttc

SEQ ID NO: 40868 - DNA, 20 bp, Artificial Sequence
  Synthetic oligonucleotide; CAG chr11 5292813 5292832 5292816 -
atgcaatttcaagttcttta

SEQ ID NO: 40869 - DNA, 20 bp, Artificial Sequence
  Synthetic oligonucleotide; AGG chr11 5292812 5292831 5292815 -
tgcaatttcaagttctttac

SEQ ID NO: 40870 - DNA, 20 bp, Artificial Sequence
  Synthetic oligonucleotide; GAG chr11 5292807 5292826 5292810 -
tttcaagttctttacaggcc

SEQ ID NO: 40871 - DNA, 20 bp, Artificial Sequence
  Synthetic oligonucleotide; AAG chr11 5292775 5292794 5292778 -
tctgaattcctgacctccaa

SEQ ID NO: 40872 - DNA, 20 bp, Artificial Sequence
  Synthetic oligonucleotide; AAG chr11 5292767 5292786 5292770 -
cctgacctccaaaagtgatc

SEQ ID NO: 40873 - DNA, 20 bp, Artificial Sequence
  Synthetic oligonucleotide; TAG chr11 5292757 5292776 5292760 -
aaaagtgatcaagatatttt

SEQ ID NO: 40874 - DNA, 20 bp, Artificial Sequence
  Synthetic oligonucleotide; CAG chr11 5292752 5292771 5292755 -
tgatcaagatatttttagtt

SEQ ID NO: 40875 - DNA, 20 bp, Artificial Sequence
  Synthetic oligonucleotide; AGG chr11 5292751 5292770 5292754 -
gatcaagatatttttagttc

SEQ ID NO: 40876 - DNA, 20 bp, Artificial Sequence
  Synthetic oligonucleotide; TAG chr11 5292726 5292745 5292729 -
ccaaaattttctcattttca

SEQ ID NO: 40877 - DNA, 20 bp, Artificial Sequence
  Synthetic oligonucleotide; AGG chr11 5292725 5292744 5292728 -
caaaattttctcattttcat

SEQ ID NO: 40878 - DNA, 20 bp, Artificial Sequence
  Synthetic oligonucleotide; AAG chr11 5292690 5292709 5292693 -
gatcattattcatgatttgc

SEQ ID NO: 40879 - DNA, 20 bp, Artificial Sequence
  Synthetic oligonucleotide; AGG chr11 5292689 5292708 5292692 -
atcattattcatgatttgca

SEQ ID NO: 40880 - DNA, 20 bp, Artificial Sequence
  Synthetic oligonucleotide; CAG chr11 5292622 5292641 5292625 -
atgacattttaactatgttc

SEQ ID NO: 40881 - DNA, 20 bp, Artificial Sequence
  Synthetic oligonucleotide; AAG chr11 5292608 5292627 5292611 -
atgttccagatttttgaatg

SEQ ID NO: 40882 - DNA, 20 bp, Artificial Sequence
  Synthetic oligonucleotide; GAG chr11 5292606 5292625 5292609 -
gttccagatttttgaatgaa

SEQ ID NO: 40883 - DNA, 20 bp, Artificial Sequence
  Synthetic oligonucleotide; AAG chr11 5292571 5292590 5292574 -
atgttttcaccacaaaaaat

SEQ ID NO: 40884 - DNA, 20 bp, Artificial Sequence
  Synthetic oligonucleotide; AAG chr11 5292562 5292581 5292565 -
ccacaaaaaataagtatgtg

SEQ ID NO: 40885 - DNA, 20 bp, Artificial Sequence
  Synthetic oligonucleotide; TGG chr11 5292559 5292578 5292562 -
caaaaaataagtatgtgaag

SEQ ID NO: 40886 - DNA, 20 bp, Artificial Sequence
  Synthetic oligonucleotide; TGG chr11 5292556 5292575 5292559 -
aaaataagtatgtgaagtgg

SEQ ID NO: 40887 - DNA, 20 bp, Artificial Sequence
  Synthetic oligonucleotide; TAG chr11 5292543 5292562 5292546 -
gaagtggtggatttgttaat

SEQ ID NO: 40888 - DNA, 20 bp, Artificial Sequence
  Synthetic oligonucleotide; AAG chr11 5292504 5292523 5292507 -
aatattgtacacgtacacca

SEQ ID NO: 40889 - DNA, 20 bp, Artificial Sequence
  Synthetic oligonucleotide; AAG chr11 5292430 5292449 5292433 -
tgaaataataaaaaataaca

SEQ ID NO: 40890 - DNA, 20 bp, Artificial Sequence
  Synthetic oligonucleotide; AGG chr11 5292429 5292448 5292432 -
gaaataataaaaaataacaa

SEQ ID NO: 40891 - DNA, 20 bp, Artificial Sequence
  Synthetic oligonucleotide; TAG chr11 5292423 5292442 5292426 -
ataaaaaataacaaaggcat

SEQ ID NO: 40892 - DNA, 20 bp, Artificial Sequence
  Synthetic oligonucleotide; CGG chr11 5292402 5292421 5292405 -
agcctctgcattgcctttac

SEQ ID NO: 40893 - DNA, 20 bp, Artificial Sequence
  Synthetic oligonucleotide; CGG chr11 5292390 5292409 5292393 -
gcctttaccggtcatcctca

SEQ ID NO: 40894 - DNA, 20 bp, Artificial Sequence
  Synthetic oligonucleotide; TAG chr11 5292322 5292341 5292325 -
atctttgatgcctctttgtc

SEQ ID NO: 40895 - DNA, 20 bp, Artificial Sequence
  Synthetic oligonucleotide; TGG chr11 5292282 5292301 5292285 -
ttttctctacgttatttata

SEQ ID NO: 40896 - DNA, 20 bp, Artificial Sequence
  Synthetic oligonucleotide; GGG chr11 5292281 5292300 5292284 -
tttctctacgttatttatat

SEQ ID NO: 40897 - DNA, 20 bp, Artificial Sequence
  Synthetic oligonucleotide; TGG chr11 5292264 5292283 5292267 -
tatgggtatcatcaccatcc

SEQ ID NO: 40898 - DNA, 20 bp, Artificial Sequence
  Synthetic oligonucleotide; CAG chr11 5292254 5292273 5292257 -
atcaccatcctggacaacat

SEQ ID NO: 40899 - DNA, 20 bp, Artificial Sequence
  Synthetic oligonucleotide; AGG chr11 5292253 5292272 5292256 -
tcaccatcctggacaacatc

SEQ ID NO: 40900 - DNA, 20 bp, Artificial Sequence
  Synthetic oligonucleotide; CAG chr11 5292249 5292268 5292252 -
catcctggacaacatcagga

SEQ ID NO: 40901 - DNA, 20 bp, Artificial Sequence
  Synthetic oligonucleotide; AAG chr11 5292234 5292253 5292237 -
caggacagatatccctcacc

SEQ ID NO: 40902 - DNA, 20 bp, Artificial Sequence
  Synthetic oligonucleotide; TGG chr11 5292212 5292231 5292215 -
gccaatgttcctctctatgt

SEQ ID NO: 40903 - DNA, 20 bp, Artificial Sequence
  Synthetic oligonucleotide; CAG chr11 5292170 5292189 5292173 -
tcctttcaccaccctttcca

SEQ ID NO: 40904 - DNA, 20 bp, Artificial Sequence
  Synthetic oligonucleotide; AAG chr11 5292163 5292182 5292166 -
accaccctttccacagtcaa

SEQ ID NO: 40905 - DNA, 20 bp, Artificial Sequence
  Synthetic oligonucleotide; AGG chr11 5292162 5292181 5292165 -
ccaccctttccacagtcaaa

SEQ ID NO: 40906 - DNA, 20 bp, Artificial Sequence
  Synthetic oligonucleotide; TAG chr11 5292153 5292172 5292156 -
ccacagtcaaaaggatattg

SEQ ID NO: 40907 - DNA, 20 bp, Artificial Sequence
  Synthetic oligonucleotide; CAG chr11 5292140 5292159 5292143 -
gatattgtagtttaatgcct

SEQ ID NO: 40908 - DNA, 20 bp, Artificial Sequence
  Synthetic oligonucleotide; GAG chr11 5292138 5292157 5292141 -
tattgtagtttaatgcctca

SEQ ID NO: 40909 - DNA, 20 bp, Artificial Sequence
  Synthetic oligonucleotide; CAG chr11 5292133 5292152 5292136 -
tagtttaatgcctcagagtt

SEQ ID NO: 40910 - DNA, 20 bp, Artificial Sequence
  Synthetic oligonucleotide; AAG chr11 5292125 5292144 5292128 -
tgcctcagagttcagctttt

SEQ ID NO: 40911 - DNA, 20 bp, Artificial Sequence
  Synthetic oligonucleotide; TAG chr11 5292097 5292116 5292100 -
gacaaattattcttcctctt

SEQ ID NO: 40912 - DNA, 20 bp, Artificial Sequence
  Synthetic oligonucleotide; AGG chr11 5292096 5292115 5292099 -
acaaattattcttcctcttt

SEQ ID NO: 40913 - DNA, 20 bp, Artificial Sequence
  Synthetic oligonucleotide; TGG chr11 5292083 5292102 5292086 -
cctctttaggttctccttta

SEQ ID NO: 40914 - DNA, 20 bp, Artificial Sequence
  Synthetic oligonucleotide; TGG chr11 5292065 5292084 5292068 -
tatggaatcttctgtactga

SEQ ID NO: 40915 - DNA, 20 bp, Artificial Sequence
  Synthetic oligonucleotide; TAG chr11 5292041 5292060 5292044 -
catgtcctttaactactatg

SEQ ID NO: 40916 - DNA, 20 bp, Artificial Sequence
  Synthetic oligonucleotide; TAG chr11 5292001 5292020 5292004 -
tattatgcctctacctttat

SEQ ID NO: 40917 - DNA, 20 bp, Artificial Sequence
  Synthetic oligonucleotide; CAG chr11 5291998 5292017 5292001 -
tatgcctctacctttattag

SEQ ID NO: 40918 - DNA, 20 bp, Artificial Sequence
  Synthetic oligonucleotide; GAG chr11 5291996 5292015 5291999 -
tgcctctacctttattagca

SEQ ID NO: 40919 - DNA, 20 bp, Artificial Sequence
  Synthetic oligonucleotide; TGG chr11 5291980 5291999 5291983 -
agcagagttatctgtactgt

SEQ ID NO: 40920 - DNA, 20 bp, Artificial Sequence
  Synthetic oligonucleotide; TGG chr11 5291919 5291938 5291922 -
ttctgctattcttgatcaaa

SEQ ID NO: 40921 - DNA, 20 bp, Artificial Sequence
  Synthetic oligonucleotide; TGG chr11 5291877 5291896 5291880 -
tcatttctcctgccttcact

SEQ ID NO: 40922 - DNA, 20 bp, Artificial Sequence
  Synthetic oligonucleotide; TAG chr11 5291862 5291881 5291865 -
tcacttggacgtgcttcacg

SEQ ID NO: 40923 - DNA, 20 bp, Artificial Sequence
  Synthetic oligonucleotide; TGG chr11 5291845 5291864 5291848 -
acgtagtctgtgcttatgac

SEQ ID NO: 40924 - DNA, 20 bp, Artificial Sequence
  Synthetic oligonucleotide; TGG chr11 5291828 5291847 5291831 -
gactggattaaaaattgata

SEQ ID NO: 40925 - DNA, 20 bp, Artificial Sequence
  Synthetic oligonucleotide; TGG chr11 5291797 5291816 5291800 -
taatgttgttcgtcataata

SEQ ID NO: 40926 - DNA, 20 bp, Artificial Sequence
  Synthetic oligonucleotide; GGG chr11 5291796 5291815 5291799 -
aatgttgttcgtcataatat

SEQ ID NO: 40927 - DNA, 20 bp, Artificial Sequence
  Synthetic oligonucleotide; TGG chr11 5291788 5291807 5291791 -
tcgtcataatatgggtttta

SEQ ID NO: 40928 - DNA, 20 bp, Artificial Sequence
  Synthetic oligonucleotide; TGG chr11 5291758 5291777 5291761 -
ttatttcctatgcattgatc

SEQ ID NO: 40929 - DNA, 20 bp, Artificial Sequence
  Synthetic oligonucleotide; GAG chr11 5291756 5291775 5291759 -
atttcctatgcattgatctg

SEQ ID NO: 40930 - DNA, 20 bp, Artificial Sequence
  Synthetic oligonucleotide; AAG chr11 5291753 5291772 5291756 -
tcctatgcattgatctggag

SEQ ID NO: 40931 - DNA, 20 bp, Artificial Sequence
  Synthetic oligonucleotide; AGG chr11 5291752 5291771 5291755 -
cctatgcattgatctggaga

SEQ ID NO: 40932 - DNA, 20 bp, Artificial Sequence
  Synthetic oligonucleotide; TGG chr11 5291728 5291747 5291731 -
ttcaatccttttactctttg

SEQ ID NO: 40933 - DNA, 20 bp, Artificial Sequence
  Synthetic oligonucleotide; TGG chr11 5291706 5291725 5291709 -
gaaaatatctgtaaaccttc

SEQ ID NO: 40934 - DNA, 20 bp, Artificial Sequence
  Synthetic oligonucleotide; TAG chr11 5291691 5291710 5291694 -
ccttctggttcactctgcta

SEQ ID NO: 40935 - DNA, 20 bp, Artificial Sequence
  Synthetic oligonucleotide; CAG chr11 5291682 5291701 5291685 -
tcactctgctatagcaattt

SEQ ID NO: 40936 - DNA, 20 bp, Artificial Sequence
  Synthetic oligonucleotide; TAG chr11 5291677 5291696 5291680 -
ctgctatagcaatttcagtt

SEQ ID NO: 40937 - DNA, 20 bp, Artificial Sequence
  Synthetic oligonucleotide; AGG chr11 5291676 5291695 5291679 -
tgctatagcaatttcagttt

SEQ ID NO: 40938 - DNA, 20 bp, Artificial Sequence
  Synthetic oligonucleotide; TAG chr11 5291672 5291691 5291675 -
atagcaatttcagtttaggc

SEQ ID NO: 40939 - DNA, 20 bp, Artificial Sequence
  Synthetic oligonucleotide; AAG chr11 5291668 5291687 5291671 -
caatttcagtttaggctagt

SEQ ID NO: 40940 - DNA, 20 bp, Artificial Sequence
  Synthetic oligonucleotide; GAG chr11 5291662 5291681 5291665 -
cagtttaggctagtaagcat

SEQ ID NO: 40941 - DNA, 20 bp, Artificial Sequence
  Synthetic oligonucleotide; AGG chr11 5291661 5291680 5291664 -
agtttaggctagtaagcatg

SEQ ID NO: 40942 - DNA, 20 bp, Artificial Sequence
  Synthetic oligonucleotide; CAG chr11 5291633 5291652 5291636 -
tccttctctgatttttccca

SEQ ID NO: 40943 - DNA, 20 bp, Artificial Sequence
  Synthetic oligonucleotide; TGG chr11 5291625 5291644 5291628 -
tgatttttcccacagtctgt

SEQ ID NO: 40944 - DNA, 20 bp, Artificial Sequence
  Synthetic oligonucleotide; CAG chr11 5291619 5291638 5291622 -
ttcccacagtctgttggtca

SEQ ID NO: 40945 - DNA, 20 bp, Artificial Sequence
  Synthetic oligonucleotide; GAG chr11 5291608 5291627 5291611 -
tgttggtcacagaataacct

SEQ ID NO: 40946 - DNA, 20 bp, Artificial Sequence
  Synthetic oligonucleotide; AAG chr11 5291592 5291611 5291595 -
acctgagtgattactgatga

SEQ ID NO: 40947 - DNA, 20 bp, Artificial Sequence
  Synthetic oligonucleotide; GAG chr11 5291590 5291609 5291593 -
ctgagtgattactgatgaaa

SEQ ID NO: 40948 - DNA, 20 bp, Artificial Sequence
  Synthetic oligonucleotide; GAG chr11 5291586 5291605 5291589 -
gtgattactgatgaaagagt

SEQ ID NO: 40949 - DNA, 20 bp, Artificial Sequence
  Synthetic oligonucleotide; TAG chr11 5291572 5291591 5291575 -
aagagtgagaatgttattga

SEQ ID NO: 40950 - DNA, 20 bp, Artificial Sequence
  Synthetic oligonucleotide; CAG chr11 5291543 5291562 5291546 -
tgacaaaaaacaaacaacta

SEQ ID NO: 40951 - DNA, 20 bp, Artificial Sequence
  Synthetic oligonucleotide; TAG chr11 5291519 5291538 5291522 -
caaaatgtttctctttttat

SEQ ID NO: 40952 - DNA, 20 bp, Artificial Sequence
  Synthetic oligonucleotide; TGG chr11 5291516 5291535 5291519 -
aatgtttctctttttattag

SEQ ID NO: 40953 - DNA, 20 bp, Artificial Sequence
  Synthetic oligonucleotide; TGG chr11 5291491 5291510 5291494 -
tatatttcctgacctatatc

SEQ ID NO: 40954 - DNA, 20 bp, Artificial Sequence
  Synthetic oligonucleotide; CAG chr11 5291488 5291507 5291491 -
atttcctgacctatatctgg

SEQ ID NO: 40955 - DNA, 20 bp, Artificial Sequence
  Synthetic oligonucleotide; AGG chr11 5291487 5291506 5291490 -
tttcctgacctatatctggc

SEQ ID NO: 40956 - DNA, 20 bp, Artificial Sequence
  Synthetic oligonucleotide; TAG chr11 5291478 5291497 5291481 -
ctatatctggcaggactctt

SEQ ID NO: 40957 - DNA, 20 bp, Artificial Sequence
  Synthetic oligonucleotide; GAG chr11 5291476 5291495 5291479 -
atatctggcaggactcttta

SEQ ID NO: 40958 - DNA, 20 bp, Artificial Sequence
  Synthetic oligonucleotide; GAG chr11 5291474 5291493 5291477 -
atctggcaggactctttaga

SEQ ID NO: 40959 - DNA, 20 bp, Artificial Sequence
  Synthetic oligonucleotide; AGG chr11 5291473 5291492 5291476 -
tctggcaggactctttagag

SEQ ID NO: 40960 - DNA, 20 bp, Artificial Sequence
  Synthetic oligonucleotide; TAG chr11 5291470 5291489 5291473 -
ggcaggactctttagagagg

SEQ ID NO: 40961 - DNA, 20 bp, Artificial Sequence
  Synthetic oligonucleotide; AAG chr11 5291464 5291483 5291467 -
actctttagagaggtagctg

SEQ ID NO: 40962 - DNA, 20 bp, Artificial Sequence
  Synthetic oligonucleotide; TAG chr11 5291445 5291464 5291448 -
gaagctgctgttatgaccac

SEQ ID NO: 40963 - DNA, 20 bp, Artificial Sequence
  Synthetic oligonucleotide; GAG chr11 5291443 5291462 5291446 -
agctgctgttatgaccacta

SEQ ID NO: 40964 - DNA, 20 bp, Artificial Sequence
  Synthetic oligonucleotide; AGG chr11 5291442 5291461 5291445 -
gctgctgttatgaccactag

SEQ ID NO: 40965 - DNA, 20 bp, Artificial Sequence
  Synthetic oligonucleotide; GGG chr11 5291441 5291460 5291444 -
ctgctgttatgaccactaga

SEQ ID NO: 40966 - DNA, 20 bp, Artificial Sequence
  Synthetic oligonucleotide; AAG chr11 5291438 5291457 5291441 -
ctgttatgaccactagaggg

SEQ ID NO: 40967 - DNA, 20 bp, Artificial Sequence
  Synthetic oligonucleotide; AAG chr11 5291435 5291454 5291438 -
ttatgaccactagagggaag

SEQ ID NO: 40968 - DNA, 20 bp, Artificial Sequence
  Synthetic oligonucleotide; TGG chr11 5291425 5291444 5291428 -
tagagggaagaagatacctg

SEQ ID NO: 40969 - DNA, 20 bp, Artificial Sequence
  Synthetic oligonucleotide; GAG chr11 5291423 5291442 5291426 -
gagggaagaagatacctgtg

SEQ ID NO: 40970 - DNA, 20 bp, Artificial Sequence
  Synthetic oligonucleotide; TGG chr11 5291416 5291435 5291419 -
gaagatacctgtggagctaa

SEQ ID NO: 40971 - DNA, 20 bp, Artificial Sequence
  Synthetic oligonucleotide; AAG chr11 5291410 5291429 5291413 -
acctgtggagctaatggtcc

SEQ ID NO: 40972 - DNA, 20 bp, Artificial Sequence
  Synthetic oligonucleotide; TGG chr11 5291406 5291425 5291409 -
gtggagctaatggtccaaga

SEQ ID NO: 40973 - DNA, 20 bp, Artificial Sequence
  Synthetic oligonucleotide; TGG chr11 5291403 5291422 5291406 -
gagctaatggtccaagatgg

SEQ ID NO: 40974 - DNA, 20 bp, Artificial Sequence
  Synthetic oligonucleotide; GAG chr11 5291401 5291420 5291404 -
gctaatggtccaagatggtg

SEQ ID NO: 40975 - DNA, 20 bp, Artificial Sequence
  Synthetic oligonucleotide; AAG chr11 5291394 5291413 5291397 -
gtccaagatggtggagcccc

SEQ ID NO: 40976 - DNA, 20 bp, Artificial Sequence
  Synthetic oligonucleotide; AAG chr11 5291390 5291409 5291393 -
aagatggtggagccccaagc

SEQ ID NO: 40977 - DNA, 20 bp, Artificial Sequence
  Synthetic oligonucleotide; AGG chr11 5291389 5291408 5291392 -
agatggtggagccccaagca

SEQ ID NO: 40978 - DNA, 20 bp, Artificial Sequence
  Synthetic oligonucleotide; AAG chr11 5291386 5291405 5291389 -
tggtggagccccaagcaagg

SEQ ID NO: 40979 - DNA, 20 bp, Artificial Sequence
  Synthetic oligonucleotide; AAG chr11 5291378 5291397 5291381 -
ccccaagcaaggaagttgtt

SEQ ID NO: 40980 - DNA, 20 bp, Artificial Sequence
  Synthetic oligonucleotide; AGG chr11 5291377 5291396 5291380 -
cccaagcaaggaagttgtta

SEQ ID NO: 40981 - DNA, 20 bp, Artificial Sequence
  Synthetic oligonucleotide; GAG chr11 5291375 5291394 5291378 -
caagcaaggaagttgttaag

SEQ ID NO: 40982 - DNA, 20 bp, Artificial Sequence
  Synthetic oligonucleotide; AAG chr11 5291360 5291379 5291363 -
ttaaggagcccttttgattg

SEQ ID NO: 40983 - DNA, 20 bp, Artificial Sequence
  Synthetic oligonucleotide; AGG chr11 5291359 5291378 5291362 -
taaggagcccttttgattga

SEQ ID NO: 40984 - DNA, 20 bp, Artificial Sequence
  Synthetic oligonucleotide; TGG chr11 5291356 5291375 5291359 -
ggagcccttttgattgaagg

SEQ ID NO: 40985 - DNA, 20 bp, Artificial Sequence
  Synthetic oligonucleotide; GGG chr11 5291355 5291374 5291358 -
gagcccttttgattgaaggt

SEQ ID NO: 40986 - DNA, 20 bp, Artificial Sequence
  Synthetic oligonucleotide; CAG chr11 5291339 5291358 5291342 -
aggtgggtgcccccacctta

SEQ ID NO: 40987 - DNA, 20 bp, Artificial Sequence
  Synthetic oligonucleotide; AGG chr11 5291338 5291357 5291341 -
ggtgggtgcccccaccttac

SEQ ID NO: 40988 - DNA, 20 bp, Artificial Sequence
  Synthetic oligonucleotide; GGG chr11 5291337 5291356 5291340 -
gtgggtgcccccaccttaca

SEQ ID NO: 40989 - DNA, 20 bp, Artificial Sequence
  Synthetic oligonucleotide; CAG chr11 5291333 5291352 5291336 -
gtgcccccaccttacaggga

SEQ ID NO: 40990 - DNA, 20 bp, Artificial Sequence
  Synthetic oligonucleotide; AGG chr11 5291332 5291351 5291335 -
tgcccccaccttacagggac

SEQ ID NO: 40991 - DNA, 20 bp, Artificial Sequence
  Synthetic oligonucleotide; TGG chr11 5291324 5291343 5291327 -
ccttacagggacaggacatc

SEQ ID NO: 40992 - DNA, 20 bp, Artificial Sequence
  Synthetic oligonucleotide; CAG chr11 5291311 5291330 5291314 -
ggacatctggatactcctcc

SEQ ID NO: 40993 - DNA, 20 bp, Artificial Sequence
  Synthetic oligonucleotide; CAG chr11 5291302 5291321 5291305 -
gatactcctcccagtttctc

SEQ ID NO: 40994 - DNA, 20 bp, Artificial Sequence
  Synthetic oligonucleotide; AAG chr11 5291234 5291253 5291237 -
cttccccatttctaataata

SEQ ID NO: 40995 - DNA, 20 bp, Artificial Sequence
  Synthetic oligonucleotide; AAG chr11 5291229 5291248 5291232 -
ccatttctaataataaagca

SEQ ID NO: 40996 - DNA, 20 bp, Artificial Sequence
  Synthetic oligonucleotide; AGG chr11 5291228 5291247 5291231 -
catttctaataataaagcaa

SEQ ID NO: 40997 - DNA, 20 bp, Artificial Sequence
  Synthetic oligonucleotide; TAG chr11 5291224 5291243 5291227 -
tctaataataaagcaaaggc

SEQ ID NO: 40998 - DNA, 20 bp, Artificial Sequence
  Synthetic oligonucleotide; TAG chr11 5291220 5291239 5291223 -
ataataaagcaaaggctagt

SEQ ID NO: 40999 - DNA, 20 bp, Artificial Sequence
  Synthetic oligonucleotide; AAG chr11 5291216 5291235 5291219 -
taaagcaaaggctagttagt

SEQ ID NO: 41000 - DNA, 20 bp, Artificial Sequence
  Synthetic oligonucleotide; TAG chr11 5291186 5291205 5291189 -
cttgcattttgaaaatgcca

SEQ ID NO: 41001 - DNA, 20 bp, Artificial Sequence
  Synthetic oligonucleotide; CGG chr11 5291160 5291179 5291163 -
ttcaaaattatttcatacat

SEQ ID NO: 41002 - DNA, 20 bp, Artificial Sequence
  Synthetic oligonucleotide; AAG chr11 5291143 5291162 5291146 -
catcggtctttctttatttc

SEQ ID NO: 41003 - DNA, 20 bp, Artificial Sequence
  Synthetic oligonucleotide; GAG chr11 5291141 5291160 5291144 -
tcggtctttctttatttcaa

SEQ ID NO: 41004 - DNA, 20 bp, Artificial Sequence
  Synthetic oligonucleotide; CAG chr11 5291136 5291155 5291139 -
ctttctttatttcaagagtc

SEQ ID NO: 41005 - DNA, 20 bp, Artificial Sequence
  Synthetic oligonucleotide; TGG chr11 5291130 5291149 5291133 -
ttatttcaagagtccagaaa

SEQ ID NO: 41006 - DNA, 20 bp, Artificial Sequence
  Synthetic oligonucleotide; TGG chr11 5291102 5291121 5291105 -
ttacctttgattcaatgtaa

SEQ ID NO: 41007 - DNA, 20 bp, Artificial Sequence
  Synthetic oligonucleotide; AAG chr11 5291098 5291117 5291101 -
ctttgattcaatgtaatgga

SEQ ID NO: 41008 - DNA, 20 bp, Artificial Sequence
  Synthetic oligonucleotide; GAG chr11 5291096 5291115 5291099 -
ttgattcaatgtaatggaaa

SEQ ID NO: 41009 - DNA, 20 bp, Artificial Sequence
  Synthetic oligonucleotide; AAG chr11 5291086 5291105 5291089 -
gtaatggaaagagctctttc

SEQ ID NO: 41010 - DNA, 20 bp, Artificial Sequence
  Synthetic oligonucleotide; GAG chr11 5291084 5291103 5291087 -
aatggaaagagctctttcaa

SEQ ID NO: 41011 - DNA, 20 bp, Artificial Sequence
  Synthetic oligonucleotide; CAG chr11 5291080 5291099 5291083 -
gaaagagctctttcaagaga

SEQ ID NO: 41012 - DNA, 20 bp, Artificial Sequence
  Synthetic oligonucleotide; GAG chr11 5291078 5291097 5291081 -
aagagctctttcaagagaca

SEQ ID NO: 41013 - DNA, 20 bp, Artificial Sequence
  Synthetic oligonucleotide; AAG chr11 5291073 5291092 5291076 -
ctctttcaagagacagagaa

SEQ ID NO: 41014 - DNA, 20 bp, Artificial Sequence
  Synthetic oligonucleotide; CAG chr11 5290980 5290999 5290983 -
catttctctctctcatttct

SEQ ID NO: 41015 - DNA, 20 bp, Artificial Sequence
  Synthetic oligonucleotide; AAG chr11 5290977 5290996 5290980 -
ttctctctctcatttctcag

SEQ ID NO: 41016 - DNA, 20 bp, Artificial Sequence
  Synthetic oligonucleotide; AAG chr11 5290964 5290983 5290967 -
ttctcagaagtatattttga

SEQ ID NO: 41017 - DNA, 20 bp, Artificial Sequence
  Synthetic oligonucleotide; AGG chr11 5290963 5290982 5290966 -
tctcagaagtatattttgaa

SEQ ID NO: 41018 - DNA, 20 bp, Artificial Sequence
  Synthetic oligonucleotide; TAG chr11 5290955 5290974 5290958 -
gtatattttgaaaggattca

SEQ ID NO: 41019 - DNA, 20 bp, Artificial Sequence
  Synthetic oligonucleotide; CAG chr11 5290952 5290971 5290955 -
tattttgaaaggattcatag

SEQ ID NO: 41020 - DNA, 20 bp, Artificial Sequence
  Synthetic oligonucleotide; CAG chr11 5290948 5290967 5290951 -
ttgaaaggattcatagcaga

SEQ ID NO: 41021 - DNA, 20 bp, Artificial Sequence
  Synthetic oligonucleotide; AAG chr11 5290943 5290962 5290946 -
aggattcatagcagacagct

SEQ ID NO: 41022 - DNA, 20 bp, Artificial Sequence
  Synthetic oligonucleotide; AGG chr11 5290942 5290961 5290945 -
ggattcatagcagacagcta

SEQ ID NO: 41023 - DNA, 20 bp, Artificial Sequence
  Synthetic oligonucleotide; TGG chr11 5290938 5290957 5290941 -
tcatagcagacagctaaggc

SEQ ID NO: 41024 - DNA, 20 bp, Artificial Sequence
  Synthetic oligonucleotide; AAG chr11 5290927 5290946 5290930 -
agctaaggctggttttttct

SEQ ID NO: 41025 - DNA, 20 bp, Artificial Sequence
  Synthetic oligonucleotide; AAG chr11 5290922 5290941 5290925 -
aggctggttttttctaagtg

SEQ ID NO: 41026 - DNA, 20 bp, Artificial Sequence
  Synthetic oligonucleotide; AAG chr11 5290919 5290938 5290922 -
ctggttttttctaagtgaag

SEQ ID NO: 41027 - DNA, 20 bp, Artificial Sequence
  Synthetic oligonucleotide; GAG chr11 5290909 5290928 5290912 -
ctaagtgaagaagtgatatt

SEQ ID NO: 41028 - DNA, 20 bp, Artificial Sequence
  Synthetic oligonucleotide; AAG chr11 5290906 5290925 5290909 -
agtgaagaagtgatattgag

SEQ ID NO: 41029 - DNA, 20 bp, Artificial Sequence
  Synthetic oligonucleotide; AGG chr11 5290905 5290924 5290908 -
gtgaagaagtgatattgaga

SEQ ID NO: 41030 - DNA, 20 bp, Artificial Sequence
  Synthetic oligonucleotide; TAG chr11 5290902 5290921 5290905 -
aagaagtgatattgagaagg

SEQ ID NO: 41031 - DNA, 20 bp, Artificial Sequence
  Synthetic oligonucleotide; AGG chr11 5290901 5290920 5290904 -
agaagtgatattgagaaggt

SEQ ID NO: 41032 - DNA, 20 bp, Artificial Sequence
  Synthetic oligonucleotide; GGG chr11 5290900 5290919 5290903 -
gaagtgatattgagaaggta

SEQ ID NO: 41033 - DNA, 20 bp, Artificial Sequence
  Synthetic oligonucleotide; GAG chr11 5290891 5290910 5290894 -
ttgagaaggtagggttgcat

SEQ ID NO: 41034 - DNA, 20 bp, Artificial Sequence
  Synthetic oligonucleotide; CAG chr11 5290882 5290901 5290885 -
tagggttgcatgagcccttt

SEQ ID NO: 41035 - DNA, 20 bp, Artificial Sequence
  Synthetic oligonucleotide; TAG chr11 5290874 5290893 5290877 -
catgagccctttcagttttt

SEQ ID NO: 41036 - DNA, 20 bp, Artificial Sequence
  Synthetic oligonucleotide; TAG chr11 5290851 5290870 5290854 -
tttatatacatctgtattgt

SEQ ID NO: 41037 - DNA, 20 bp, Artificial Sequence
  Synthetic oligonucleotide; CAG chr11 5290817 5290836 5290820 -
atataaataaaattatttct

SEQ ID NO: 41038 - DNA, 20 bp, Artificial Sequence
  Synthetic oligonucleotide; TAG chr11 5290806 5290825 5290809 -
attatttctcagttatatac

SEQ ID NO: 41039 - DNA, 20 bp, Artificial Sequence
  Synthetic oligonucleotide; TGG chr11 5290791 5290810 5290794 -
tatactagctatgtaacctg

SEQ ID NO: 41040 - DNA, 20 bp, Artificial Sequence
  Synthetic oligonucleotide; AAG chr11 5290778 5290797 5290781 -
taacctgtggatatttcctt

SEQ ID NO: 41041 - DNA, 20 bp, Artificial Sequence
  Synthetic oligonucleotide; AAG chr11 5290769 5290788 5290772 -
gatatttccttaagtattac

SEQ ID NO: 41042 - DNA, 20 bp, Artificial Sequence
  Synthetic oligonucleotide; TGG chr11 5290750 5290769 5290753 -
caagctatacttaactcact

SEQ ID NO: 41043 - DNA, 20 bp, Artificial Sequence
  Synthetic oligonucleotide; TAG chr11 5290722 5290741 5290725 -
tcaaataaatacctgcttca

SEQ ID NO: 41044 - DNA, 20 bp, Artificial Sequence
  Synthetic oligonucleotide; AAG chr11 5290711 5290730 5290714 -
cctgcttcatagttattaat

SEQ ID NO: 41045 - DNA, 20 bp, Artificial Sequence
  Synthetic oligonucleotide; AGG chr11 5290710 5290729 5290713 -
ctgcttcatagttattaata

SEQ ID NO: 41046 - DNA, 20 bp, Artificial Sequence
  Synthetic oligonucleotide; AAG chr11 5290704 5290723 5290707 -
catagttattaataaggatt

SEQ ID NO: 41047 - DNA, 20 bp, Artificial Sequence
  Synthetic oligonucleotide; GAG chr11 5290700 5290719 5290703 -
gttattaataaggattaagt

SEQ ID NO: 41048 - DNA, 20 bp, Artificial Sequence
  Synthetic oligonucleotide; AAG chr11 5290686 5290705 5290689 -
ttaagtgagataatgcccat

SEQ ID NO: 41049 - DNA, 20 bp, Artificial Sequence
  Synthetic oligonucleotide; CAG chr11 5290669 5290688 5290672 -
cataagattcctattaataa

SEQ ID NO: 41050 - DNA, 20 bp, Artificial Sequence
  Synthetic oligonucleotide; AAG chr11 5290637 5290656 5290640 -
tacacacacacacacattga

SEQ ID NO: 41051 - DNA, 20 bp, Artificial Sequence
  Synthetic oligonucleotide; AGG chr11 5290636 5290655 5290639 -
acacacacacacacattgaa

SEQ ID NO: 41052 - DNA, 20 bp, Artificial Sequence
  Synthetic oligonucleotide; TAG chr11 5290618 5290637 5290621 -
aaaggattcttactttgtgc

SEQ ID NO: 41053 - DNA, 20 bp, Artificial Sequence
  Synthetic oligonucleotide; AGG chr11 5290617 5290636 5290620 -
aaggattcttactttgtgct

SEQ ID NO: 41054 - DNA, 20 bp, Artificial Sequence
  Synthetic oligonucleotide; AAG chr11 5290605 5290624 5290608 -
tttgtgctaggaactataat

SEQ ID NO: 41055 - DNA, 20 bp, Artificial Sequence
  Synthetic oligonucleotide; AAG chr11 5290580 5290599 5290583 -
cattgatgcattatatcatt

SEQ ID NO: 41056 - DNA, 20 bp, Artificial Sequence
  Synthetic oligonucleotide; TAG chr11 5290562 5290581 5290565 -
ttaagttctaatttcaacac

SEQ ID NO: 41057 - DNA, 20 bp, Artificial Sequence
  Synthetic oligonucleotide; AAG chr11 5290559 5290578 5290562 -
agttctaatttcaacactag

SEQ ID NO: 41058 - DNA, 20 bp, Artificial Sequence
  Synthetic oligonucleotide; AGG chr11 5290558 5290577 5290561 -
gttctaatttcaacactaga

SEQ ID NO: 41059 - DNA, 20 bp, Artificial Sequence
  Synthetic oligonucleotide; CAG chr11 5290555 5290574 5290558 -
ctaatttcaacactagaagg

SEQ ID NO: 41060 - DNA, 20 bp, Artificial Sequence
  Synthetic oligonucleotide; AGG chr11 5290554 5290573 5290557 -
taatttcaacactagaaggc

SEQ ID NO: 41061 - DNA, 20 bp, Artificial Sequence
  Synthetic oligonucleotide; TGG chr11 5290532 5290551 5290535 -
gtattatctaaatttcatac

SEQ ID NO: 41062 - DNA, 20 bp, Artificial Sequence
  Synthetic oligonucleotide; AAG chr11 5290512 5290531 5290515 -
tggatacctccaaactcata

SEQ ID NO: 41063 - DNA, 20 bp, Artificial Sequence
  Synthetic oligonucleotide; AAG chr11 5290474 5290493 5290477 -
tttgtcatatatttattcaa

SEQ ID NO: 41064 - DNA, 20 bp, Artificial Sequence
  Synthetic oligonucleotide; AGG chr11 5290473 5290492 5290476 -
ttgtcatatatttattcaaa

SEQ ID NO: 41065 - DNA, 20 bp, Artificial Sequence
  Synthetic oligonucleotide; GGG chr11 5290472 5290491 5290475 -
tgtcatatatttattcaaaa

SEQ ID NO: 41066 - DNA, 20 bp, Artificial Sequence
  Synthetic oligonucleotide; TGG chr11 5290456 5290475 5290459 -
aaaagggtaaactcaaacta

SEQ ID NO: 41067 - DNA, 20 bp, Artificial Sequence
  Synthetic oligonucleotide; AAG chr11 5290386 5290405 5290389 -
tattttataaaattattctc

SEQ ID NO: 41068 - DNA, 20 bp, Artificial Sequence
  Synthetic oligonucleotide; GAG chr11 5290376 5290395 5290379 -
aattattctcaagttattat

SEQ ID NO: 41069 - DNA, 20 bp, Artificial Sequence
  Synthetic oligonucleotide; AGG chr11 5290375 5290394 5290378 -
attattctcaagttattatg

SEQ ID NO: 41070 - DNA, 20 bp, Artificial Sequence
  Synthetic oligonucleotide; AAG chr11 5290365 5290384 5290368 -
agttattatgaggatgttga

SEQ ID NO: 41071 - DNA, 20 bp, Artificial Sequence
  Synthetic oligonucleotide; CAG chr11 5290361 5290380 5290364 -
attatgaggatgttgaaaga

SEQ ID NO: 41072 - DNA, 20 bp, Artificial Sequence
  Synthetic oligonucleotide; GAG chr11 5290359 5290378 5290362 -
tatgaggatgttgaaagaca

SEQ ID NO: 41073 - DNA, 20 bp, Artificial Sequence
  Synthetic oligonucleotide; GAG chr11 5290357 5290376 5290360 -
tgaggatgttgaaagacaga

SEQ ID NO: 41074 - DNA, 20 bp, Artificial Sequence
  Synthetic oligonucleotide; AGG chr11 5290356 5290375 5290359 -
gaggatgttgaaagacagag

SEQ ID NO: 41075 - DNA, 20 bp, Artificial Sequence
  Synthetic oligonucleotide; TGG chr11 5290352 5290371 5290355 -
atgttgaaagacagagagga

SEQ ID NO: 41076 - DNA, 20 bp, Artificial Sequence
  Synthetic oligonucleotide; GGG chr11 5290351 5290370 5290354 -
tgttgaaagacagagaggat

SEQ ID NO: 41077 - DNA, 20 bp, Artificial Sequence
  Synthetic oligonucleotide; GGG chr11 5290350 5290369 5290353 -
gttgaaagacagagaggatg

SEQ ID NO: 41078 - DNA, 20 bp, Artificial Sequence
  Synthetic oligonucleotide; CAG chr11 5290332 5290351 5290335 -
tggggtgctatgccccaaat

SEQ ID NO: 41079 - DNA, 20 bp, Artificial Sequence
  Synthetic oligonucleotide; AAG chr11 5290319 5290338 5290322 -
cccaaatcagcctcacaatt

SEQ ID NO: 41080 - DNA, 20 bp, Artificial Sequence
  Synthetic oligonucleotide; AAG chr11 5290314 5290333 5290317 -
atcagcctcacaattaagct

SEQ ID NO: 41081 - DNA, 20 bp, Artificial Sequence
  Synthetic oligonucleotide; CAG chr11 5290311 5290330 5290314 -
agcctcacaattaagctaag

SEQ ID NO: 41082 - DNA, 20 bp, Artificial Sequence
  Synthetic oligonucleotide; AAG chr11 5290306 5290325 5290309 -
cacaattaagctaagcagct

SEQ ID NO: 41083 - DNA, 20 bp, Artificial Sequence
  Synthetic oligonucleotide; GAG chr11 5290304 5290323 5290307 -
caattaagctaagcagctaa

SEQ ID NO: 41084 - DNA, 20 bp, Artificial Sequence
  Synthetic oligonucleotide; CAG chr11 5290296 5290315 5290299 -
ctaagcagctaagagtcttg

SEQ ID NO: 41085 - DNA, 20 bp, Artificial Sequence
  Synthetic oligonucleotide; AGG chr11 5290295 5290314 5290298 -
taagcagctaagagtcttgc

SEQ ID NO: 41086 - DNA, 20 bp, Artificial Sequence
  Synthetic oligonucleotide; GGG chr11 5290294 5290313 5290297 -
aagcagctaagagtcttgca

SEQ ID NO: 41087 - DNA, 20 bp, Artificial Sequence
  Synthetic oligonucleotide; TAG chr11 5290291 5290310 5290294 -
cagctaagagtcttgcaggg

SEQ ID NO: 41088 - DNA, 20 bp, Artificial Sequence
  Synthetic oligonucleotide; TAG chr11 5290286 5290305 5290289 -
aagagtcttgcagggtagtg

SEQ ID NO: 41089 - DNA, 20 bp, Artificial Sequence
  Synthetic oligonucleotide; AGG chr11 5290285 5290304 5290288 -
agagtcttgcagggtagtgt

SEQ ID NO: 41090 - DNA, 20 bp, Artificial Sequence
  Synthetic oligonucleotide; GGG chr11 5290284 5290303 5290287 -
gagtcttgcagggtagtgta

SEQ ID NO: 41091 - DNA, 20 bp, Artificial Sequence
  Synthetic oligonucleotide; CAG chr11 5290277 5290296 5290280 -
gcagggtagtgtagggacca

SEQ ID NO: 41092 - DNA, 20 bp, Artificial Sequence
  Synthetic oligonucleotide; AGG chr11 5290276 5290295 5290279 -
cagggtagtgtagggaccac

SEQ ID NO: 41093 - DNA, 20 bp, Artificial Sequence
  Synthetic oligonucleotide; GGG chr11 5290275 5290294 5290278 -
agggtagtgtagggaccaca

SEQ ID NO: 41094 - DNA, 20 bp, Artificial Sequence
  Synthetic oligonucleotide; AAG chr11 5290270 5290289 5290273 -
agtgtagggaccacagggtt

SEQ ID NO: 41095 - DNA, 20 bp, Artificial Sequence
  Synthetic oligonucleotide; AGG chr11 5290269 5290288 5290272 -
gtgtagggaccacagggtta

SEQ ID NO: 41096 - DNA, 20 bp, Artificial Sequence
  Synthetic oligonucleotide; GGG chr11 5290268 5290287 5290271 -
tgtagggaccacagggttaa

SEQ ID NO: 41097 - DNA, 20 bp, Artificial Sequence
  Synthetic oligonucleotide; GGG chr11 5290267 5290286 5290270 -
gtagggaccacagggttaag

SEQ ID NO: 41098 - DNA, 20 bp, Artificial Sequence
  Synthetic oligonucleotide; GGG chr11 5290266 5290285 5290269 -
tagggaccacagggttaagg

SEQ ID NO: 41099 - DNA, 20 bp, Artificial Sequence
  Synthetic oligonucleotide; CAG chr11 5290263 5290282 5290266 -
ggaccacagggttaaggggg

SEQ ID NO: 41100 - DNA, 20 bp, Artificial Sequence
  Synthetic oligonucleotide; TAG chr11 5290260 5290279 5290263 -
ccacagggttaagggggcag

SEQ ID NO: 41101 - DNA, 20 bp, Artificial Sequence
  Synthetic oligonucleotide; TAG chr11 5290241 5290260 5290244 -
gtagaattatactcccactt

SEQ ID NO: 41102 - DNA, 20 bp, Artificial Sequence
  Synthetic oligonucleotide; CAG chr11 5290211 5290230 5290214 -
tcaaacaatccatacacaca

SEQ ID NO: 41103 - DNA, 20 bp, Artificial Sequence
  Synthetic oligonucleotide; GAG chr11 5290204 5290223 5290207 -
atccatacacacacagccct

SEQ ID NO: 41104 - DNA, 20 bp, Artificial Sequence
  Synthetic oligonucleotide; AAG chr11 5290152 5290171 5290155 -
ttttgtttaaatgtataaat

SEQ ID NO: 41105 - DNA, 20 bp, Artificial Sequence
  Synthetic oligonucleotide; TGG chr11 5290149 5290168 5290152 -
tgtttaaatgtataaataag

SEQ ID NO: 41106 - DNA, 20 bp, Artificial Sequence
  Synthetic oligonucleotide; AAG chr11 5290142 5290161 5290145 -
atgtataaataagtggatga

SEQ ID NO: 41107 - DNA, 20 bp, Artificial Sequence
  Synthetic oligonucleotide; TAG chr11 5290137 5290156 5290140 -
taaataagtggatgaaagaa

SEQ ID NO: 41108 - DNA, 20 bp, Artificial Sequence
  Synthetic oligonucleotide; TAG chr11 5290133 5290152 5290136 -
taagtggatgaaagaataga

SEQ ID NO: 41109 - DNA, 20 bp, Artificial Sequence
  Synthetic oligonucleotide; TAG chr11 5290129 5290148 5290132 -
tggatgaaagaatagataga

SEQ ID NO: 41110 - DNA, 20 bp, Artificial Sequence
  Synthetic oligonucleotide; TAG chr11 5290125 5290144 5290128 -
tgaaagaatagatagataga

SEQ ID NO: 41111 - DNA, 20 bp, Artificial Sequence
  Synthetic oligonucleotide; CAG chr11 5290121 5290140 5290124 -
agaatagatagatagataga

SEQ ID NO: 41112 - DNA, 20 bp, Artificial Sequence
  Synthetic oligonucleotide; TAG chr11 5290117 5290136 5290120 -
tagatagatagatagacaga

SEQ ID NO: 41113 - DNA, 20 bp, Artificial Sequence
  Synthetic oligonucleotide; TAG chr11 5290110 5290129 5290113 -
atagatagacagatagatga

SEQ ID NO: 41114 - DNA, 20 bp, Artificial Sequence
  Synthetic oligonucleotide; TAG chr11 5290106 5290125 5290109 -
atagacagatagatgataga

SEQ ID NO: 41115 - DNA, 20 bp, Artificial Sequence
  Synthetic oligonucleotide; TAG chr11 5290085 5290104 5290088 -
agaataaatgcttgccttca

SEQ ID NO: 41116 - DNA, 20 bp, Artificial Sequence
  Synthetic oligonucleotide; CAG chr11 5290049 5290068 5290052 -
ttgttcaaaatgttcctgtc

SEQ ID NO: 41117 - DNA, 20 bp, Artificial Sequence
  Synthetic oligonucleotide; AAG chr11 5290042 5290061 5290045 -
aaatgttcctgtccagacca

SEQ ID NO: 41118 - DNA, 20 bp, Artificial Sequence
  Synthetic oligonucleotide; AAG chr11 5290023 5290042 5290026 -
aaagtaccttgccttcactt

SEQ ID NO: 41119 - DNA, 20 bp, Artificial Sequence
  Synthetic oligonucleotide; TAG chr11 5290009 5290028 5290012 -
tcacttaagtaatcaattcc

SEQ ID NO: 41120 - DNA, 20 bp, Artificial Sequence
  Synthetic oligonucleotide; AGG chr11 5290008 5290027 5290011 -
cacttaagtaatcaattcct

SEQ ID NO: 41121 - DNA, 20 bp, Artificial Sequence
  Synthetic oligonucleotide; AAG chr11 5289989 5290008 5289992 -
taggttatattctgatgtca

SEQ ID NO: 41122 - DNA, 20 bp, Artificial Sequence
  Synthetic oligonucleotide; AGG chr11 5289988 5290007 5289991 -
aggttatattctgatgtcaa

SEQ ID NO: 41123 - DNA, 20 bp, Artificial Sequence
  Synthetic oligonucleotide; AAG chr11 5289985 5290004 5289988 -
ttatattctgatgtcaaagg

SEQ ID NO: 41124 - DNA, 20 bp, Artificial Sequence
  Synthetic oligonucleotide; AAG chr11 5289978 5289997 5289981 -
ctgatgtcaaaggaagtcaa

SEQ ID NO: 41125 - DNA, 20 bp, Artificial Sequence
  Synthetic oligonucleotide; TAG chr11 5289937 5289956 5289940 -
gacccacaactcatgctttg

SEQ ID NO: 41126 - DNA, 20 bp, Artificial Sequence
  Synthetic oligonucleotide; TAG chr11 5289929 5289948 5289932 -
actcatgctttgtagatgac

SEQ ID NO: 41127 - DNA, 20 bp, Artificial Sequence
  Synthetic oligonucleotide; CAG chr11 5289914 5289933 5289917 -
atgactagatcaaaaaattt

SEQ ID NO: 41128 - DNA, 20 bp, Artificial Sequence
  Synthetic oligonucleotide; CAG chr11 5289900 5289919 5289903 -
aaatttcagccatatcttaa

SEQ ID NO: 41129 - DNA, 20 bp, Artificial Sequence
  Synthetic oligonucleotide; GAG chr11 5289896 5289915 5289899 -
ttcagccatatcttaacagt

SEQ ID NO: 41130 - DNA, 20 bp, Artificial Sequence
  Synthetic oligonucleotide; CAG chr11 5289889 5289908 5289892 -
atatcttaacagtgagtgaa

SEQ ID NO: 41131 - DNA, 20 bp, Artificial Sequence
  Synthetic oligonucleotide; AGG chr11 5289888 5289907 5289891 -
tatcttaacagtgagtgaac

SEQ ID NO: 41132 - DNA, 20 bp, Artificial Sequence
  Synthetic oligonucleotide; GAG chr11 5289861 5289880 5289864 -
ctcctcttttccctacatct

SEQ ID NO: 41133 - DNA, 20 bp, Artificial Sequence
  Synthetic oligonucleotide; CAG chr11 5289854 5289873 5289857 -
tttccctacatctgagatcc

SEQ ID NO: 41134 - DNA, 20 bp, Artificial Sequence
  Synthetic oligonucleotide; AAG chr11 5289846 5289865 5289849 -
catctgagatcccagcttct

SEQ ID NO: 41135 - DNA, 20 bp, Artificial Sequence
  Synthetic oligonucleotide; CAG chr11 5289817 5289836 5289820 -
aattctcactcttgatgcaa

SEQ ID NO: 41136 - DNA, 20 bp, Artificial Sequence
  Synthetic oligonucleotide; TGG chr11 5289810 5289829 5289813 -
actcttgatgcaacagacct

SEQ ID NO: 41137 - DNA, 20 bp, Artificial Sequence
  Synthetic oligonucleotide; AAG chr11 5289807 5289826 5289810 -
cttgatgcaacagaccttgg

SEQ ID NO: 41138 - DNA, 20 bp, Artificial Sequence
  Synthetic oligonucleotide; CAG chr11 5289800 5289819 5289803 -
caacagaccttggaagcata

SEQ ID NO: 41139 - DNA, 20 bp, Artificial Sequence
  Synthetic oligonucleotide; AGG chr11 5289799 5289818 5289802 -
aacagaccttggaagcatac

SEQ ID NO: 41140 - DNA, 20 bp, Artificial Sequence
  Synthetic oligonucleotide; GAG chr11 5289797 5289816 5289800 -
cagaccttggaagcatacag

SEQ ID NO: 41141 - DNA, 20 bp, Artificial Sequence
  Synthetic oligonucleotide; GAG chr11 5289795 5289814 5289798 -
gaccttggaagcatacagga

SEQ ID NO: 41142 - DNA, 20 bp, Artificial Sequence
  Synthetic oligonucleotide; TGG chr11 5289785 5289804 5289788 -
gcatacaggagagctgaact

SEQ ID NO: 41143 - DNA, 20 bp, Artificial Sequence
  Synthetic oligonucleotide; AAG chr11 5289776 5289795 5289779 -
agagctgaacttggtcaaca

SEQ ID NO: 41144 - DNA, 20 bp, Artificial Sequence
  Synthetic oligonucleotide; AGG chr11 5289775 5289794 5289778 -
gagctgaacttggtcaacaa

SEQ ID NO: 41145 - DNA, 20 bp, Artificial Sequence
  Synthetic oligonucleotide; GAG chr11 5289773 5289792 5289776 -
gctgaacttggtcaacaaag

SEQ ID NO: 41146 - DNA, 20 bp, Artificial Sequence
  Synthetic oligonucleotide; AAG chr11 5289768 5289787 5289771 -
acttggtcaacaaaggagaa

SEQ ID NO: 41147 - DNA, 20 bp, Artificial Sequence
  Synthetic oligonucleotide; TGG chr11 5289760 5289779 5289763 -
aacaaaggagaaaagtttgt

SEQ ID NO: 41148 - DNA, 20 bp, Artificial Sequence
  Synthetic oligonucleotide; AAG chr11 5289751 5289770 5289754 -
gaaaagtttgttggcctcca

SEQ ID NO: 41149 - DNA, 20 bp, Artificial Sequence
  Synthetic oligonucleotide; AGG chr11 5289750 5289769 5289753 -
aaaagtttgttggcctccaa

SEQ ID NO: 41150 - DNA, 20 bp, Artificial Sequence
  Synthetic oligonucleotide; CAG chr11 5289745 5289764 5289748 -
tttgttggcctccaaaggca

SEQ ID NO: 41151 - DNA, 20 bp, Artificial Sequence
  Synthetic oligonucleotide; AAG chr11 5289730 5289749 5289733 -
aggcacagctcaaacttttc

SEQ ID NO: 41152 - DNA, 20 bp, Artificial Sequence
  Synthetic oligonucleotide; AAG chr11 5289712 5289731 5289715 -
tcaagccttctctaatctta

SEQ ID NO: 41153 - DNA, 20 bp, Artificial Sequence
  Synthetic oligonucleotide; AGG chr11 5289711 5289730 5289714 -
caagccttctctaatcttaa

SEQ ID NO: 41154 - DNA, 20 bp, Artificial Sequence
  Synthetic oligonucleotide; AAG chr11 5289703 5289722 5289706 -
ctctaatcttaaaggtaaac

SEQ ID NO: 41155 - DNA, 20 bp, Artificial Sequence
  Synthetic oligonucleotide; AGG chr11 5289702 5289721 5289705 -
tctaatcttaaaggtaaaca

SEQ ID NO: 41156 - DNA, 20 bp, Artificial Sequence
  Synthetic oligonucleotide; GGG chr11 5289701 5289720 5289704 -
ctaatcttaaaggtaaacaa

SEQ ID NO: 41157 - DNA, 20 bp, Artificial Sequence
  Synthetic oligonucleotide; GAG chr11 5289686 5289705 5289689 -
aacaagggtctcatttcttt

SEQ ID NO: 41158 - DNA, 20 bp, Artificial Sequence
  Synthetic oligonucleotide; CAG chr11 5289678 5289697 5289681 -
tctcatttctttgagaactt

SEQ ID NO: 41159 - DNA, 20 bp, Artificial Sequence
  Synthetic oligonucleotide; AGG chr11 5289677 5289696 5289680 -
ctcatttctttgagaacttc

SEQ ID NO: 41160 - DNA, 20 bp, Artificial Sequence
  Synthetic oligonucleotide; GGG chr11 5289676 5289695 5289679 -
tcatttctttgagaacttca

SEQ ID NO: 41161 - DNA, 20 bp, Artificial Sequence
  Synthetic oligonucleotide; TAG chr11 5289669 5289688 5289672 -
tttgagaacttcagggaaaa

SEQ ID NO: 41162 - DNA, 20 bp, Artificial Sequence
  Synthetic oligonucleotide; AAG chr11 5289664 5289683 5289667 -
gaacttcagggaaaatagac

SEQ ID NO: 41163 - DNA, 20 bp, Artificial Sequence
  Synthetic oligonucleotide; AGG chr11 5289663 5289682 5289666 -
aacttcagggaaaatagaca

SEQ ID NO: 41164 - DNA, 20 bp, Artificial Sequence
  Synthetic oligonucleotide; TGG chr11 5289653 5289672 5289656 -
aaaatagacaaggacttgcc

SEQ ID NO: 41165 - DNA, 20 bp, Artificial Sequence
  Synthetic oligonucleotide; TGG chr11 5289644 5289663 5289647 -
aaggacttgcctggtgcttt

SEQ ID NO: 41166 - DNA, 20 bp, Artificial Sequence
  Synthetic oligonucleotide; TAG chr11 5289641 5289660 5289644 -
gacttgcctggtgcttttgg

SEQ ID NO: 41167 - DNA, 20 bp, Artificial Sequence
  Synthetic oligonucleotide; AGG chr11 5289640 5289659 5289643 -
acttgcctggtgcttttggt

SEQ ID NO: 41168 - DNA, 20 bp, Artificial Sequence
  Synthetic oligonucleotide; GGG chr11 5289639 5289658 5289642 -
cttgcctggtgcttttggta

SEQ ID NO: 41169 - DNA, 20 bp, Artificial Sequence
  Synthetic oligonucleotide; GGG chr11 5289638 5289657 5289641 -
ttgcctggtgcttttggtag

SEQ ID NO: 41170 - DNA, 20 bp, Artificial Sequence
  Synthetic oligonucleotide; GAG chr11 5289636 5289655 5289639 -
gcctggtgcttttggtaggg

SEQ ID NO: 41171 - DNA, 20 bp, Artificial Sequence
  Synthetic oligonucleotide; TGG chr11 5289614 5289633 5289617 -
gcttgcactttccccctttc

SEQ ID NO: 41172 - DNA, 20 bp, Artificial Sequence
  Synthetic oligonucleotide; GAG chr11 5289612 5289631 5289615 -
ttgcactttccccctttctg

SEQ ID NO: 41173 - DNA, 20 bp, Artificial Sequence
  Synthetic oligonucleotide; AGG chr11 5289611 5289630 5289614 -
tgcactttccccctttctgg

SEQ ID NO: 41174 - DNA, 20 bp, Artificial Sequence
  Synthetic oligonucleotide; CAG chr11 5289595 5289614 5289598 -
ctggaggaaatatttatccc

SEQ ID NO: 41175 - DNA, 20 bp, Artificial Sequence
  Synthetic oligonucleotide; AGG chr11 5289594 5289613 5289597 -
tggaggaaatatttatcccc

SEQ ID NO: 41176 - DNA, 20 bp, Artificial Sequence
  Synthetic oligonucleotide; TAG chr11 5289591 5289610 5289594 -
aggaaatatttatccccagg

SEQ ID NO: 41177 - DNA, 20 bp, Artificial Sequence
  Synthetic oligonucleotide; CAG chr11 5289574 5289593 5289577 -
aggtagttccctttttgcac

SEQ ID NO: 41178 - DNA, 20 bp, Artificial Sequence
  Synthetic oligonucleotide; TGG chr11 5289571 5289590 5289574 -
tagttccctttttgcaccag

SEQ ID NO: 41179 - DNA, 20 bp, Artificial Sequence
  Synthetic oligonucleotide; AAG chr11 5289561 5289580 5289564 -
tttgcaccagtggttctttg

SEQ ID NO: 41180 - DNA, 20 bp, Artificial Sequence
  Synthetic oligonucleotide; GAG chr11 5289559 5289578 5289562 -
tgcaccagtggttctttgaa

SEQ ID NO: 41181 - DNA, 20 bp, Artificial Sequence
  Synthetic oligonucleotide; TGG chr11 5289547 5289566 5289550 -
tctttgaagagacttccacc

SEQ ID NO: 41182 - DNA, 20 bp, Artificial Sequence
  Synthetic oligonucleotide; GGG chr11 5289546 5289565 5289549 -
ctttgaagagacttccacct

SEQ ID NO: 41183 - DNA, 20 bp, Artificial Sequence
  Synthetic oligonucleotide; CAG chr11 5289541 5289560 5289544 -
aagagacttccacctgggaa

SEQ ID NO: 41184 - DNA, 20 bp, Artificial Sequence
  Synthetic oligonucleotide; CAG chr11 5289533 5289552 5289536 -
tccacctgggaacagttaaa

SEQ ID NO: 41185 - DNA, 20 bp, Artificial Sequence
  Synthetic oligonucleotide; CAG chr11 5289524 5289543 5289527 -
gaacagttaaacagcaacta

SEQ ID NO: 41186 - DNA, 20 bp, Artificial Sequence
  Synthetic oligonucleotide; AGG chr11 5289523 5289542 5289526 -
aacagttaaacagcaactac

SEQ ID NO: 41187 - DNA, 20 bp, Artificial Sequence
  Synthetic oligonucleotide; GGG chr11 5289522 5289541 5289525 -
acagttaaacagcaactaca

SEQ ID NO: 41188 - DNA, 20 bp, Artificial Sequence
  Synthetic oligonucleotide; CAG chr11 5289501 5289520 5289504 -
ggccttgaactgcacacttt

SEQ ID NO: 41189 - DNA, 20 bp, Artificial Sequence
  Synthetic oligonucleotide; CGG chr11 5289496 5289515 5289499 -
tgaactgcacactttcagtc

SEQ ID NO: 41190 - DNA, 20 bp, Artificial Sequence
  Synthetic oligonucleotide; CAG chr11 5289487 5289506 5289490 -
cactttcagtccggtcctca

SEQ ID NO: 41191 - DNA, 20 bp, Artificial Sequence
  Synthetic oligonucleotide; AAG chr11 5289479 5289498 5289482 -
gtccggtcctcacagttgaa

SEQ ID NO: 41192 - DNA, 20 bp, Artificial Sequence
  Synthetic oligonucleotide; AAG chr11 5289472 5289491 5289475 -
cctcacagttgaaaagacct

SEQ ID NO: 41193 - DNA, 20 bp, Artificial Sequence
  Synthetic oligonucleotide; AAG chr11 5289455 5289474 5289458 -
cctaagcttgtgcctgattt

SEQ ID NO: 41194 - DNA, 20 bp, Artificial Sequence
  Synthetic oligonucleotide; TGG chr11 5289446 5289465 5289449 -
gtgcctgatttaagcctttt

SEQ ID NO: 41195 - DNA, 20 bp, Artificial Sequence
  Synthetic oligonucleotide; CAG chr11 5289405 5289424 5289408 -
taatctccctctcaacccta

SEQ ID NO: 41196 - DNA, 20 bp, Artificial Sequence
  Synthetic oligonucleotide; TGG chr11 5289393 5289412 5289396 -
caaccctacagtcacccatt

SEQ ID NO: 41197 - DNA, 20 bp, Artificial Sequence
  Synthetic oligonucleotide; AAG chr11 5289383 5289402 5289386 -
gtcacccatttggtatatta

SEQ ID NO: 41198 - DNA, 20 bp, Artificial Sequence
  Synthetic oligonucleotide; TAG chr11 5289363 5289382 5289366 -
aagatgtgttgtctactgtc

SEQ ID NO: 41199 - DNA, 20 bp, Artificial Sequence
  Synthetic oligonucleotide; AAG chr11 5289352 5289371 5289355 -
tctactgtctagtatccctc

SEQ ID NO: 41200 - DNA, 20 bp, Artificial Sequence
  Synthetic oligonucleotide; TAG chr11 5289349 5289368 5289352 -
actgtctagtatccctcaag

SEQ ID NO: 41201 - DNA, 20 bp, Artificial Sequence
  Synthetic oligonucleotide; CAG chr11 5289343 5289362 5289346 -
tagtatccctcaagtagtgt

SEQ ID NO: 41202 - DNA, 20 bp, Artificial Sequence
  Synthetic oligonucleotide; AGG chr11 5289342 5289361 5289345 -
agtatccctcaagtagtgtc

SEQ ID NO: 41203 - DNA, 20 bp, Artificial Sequence
  Synthetic oligonucleotide; TAG chr11 5289336 5289355 5289339 -
cctcaagtagtgtcaggaat

SEQ ID NO: 41204 - DNA, 20 bp, Artificial Sequence
  Synthetic oligonucleotide; TAG chr11 5289324 5289343 5289327 -
tcaggaattagtcatttaaa

SEQ ID NO: 41205 - DNA, 20 bp, Artificial Sequence
  Synthetic oligonucleotide; AAG chr11 5289316 5289335 5289319 -
tagtcatttaaatagtctgc

SEQ ID NO: 41206 - DNA, 20 bp, Artificial Sequence
  Synthetic oligonucleotide; CAG chr11 5289312 5289331 5289315 -
catttaaatagtctgcaagc

SEQ ID NO: 41207 - DNA, 20 bp, Artificial Sequence
  Synthetic oligonucleotide; AGG chr11 5289311 5289330 5289314 -
atttaaatagtctgcaagcc

SEQ ID NO: 41208 - DNA, 20 bp, Artificial Sequence
  Synthetic oligonucleotide; GAG chr11 5289309 5289328 5289312 -
ttaaatagtctgcaagccag

SEQ ID NO: 41209 - DNA, 20 bp, Artificial Sequence
  Synthetic oligonucleotide; TGG chr11 5289306 5289325 5289309 -
aatagtctgcaagccaggag

SEQ ID NO: 41210 - DNA, 20 bp, Artificial Sequence
  Synthetic oligonucleotide; TGG chr11 5289303 5289322 5289306 -
agtctgcaagccaggagtgg

SEQ ID NO: 41211 - DNA, 20 bp, Artificial Sequence
  Synthetic oligonucleotide; CAG chr11 5289284 5289303 5289287 -
gtggctcatgtctgtaattc

SEQ ID NO: 41212 - DNA, 20 bp, Artificial Sequence
  Synthetic oligonucleotide; GAG chr11 5289276 5289295 5289279 -
tgtctgtaattccagcactt

SEQ ID NO: 41213 - DNA, 20 bp, Artificial Sequence
  Synthetic oligonucleotide; GAG chr11 5289274 5289293 5289277 -
tctgtaattccagcacttga

SEQ ID NO: 41214 - DNA, 20 bp, Artificial Sequence
  Synthetic oligonucleotide; AGG chr11 5289273 5289292 5289276 -
ctgtaattccagcacttgag

SEQ ID NO: 41215 - DNA, 20 bp, Artificial Sequence
  Synthetic oligonucleotide; TAG chr11 5289270 5289289 5289273 -
taattccagcacttgagagg

SEQ ID NO: 41216 - DNA, 20 bp, Artificial Sequence
  Synthetic oligonucleotide; AAG chr11 5289267 5289286 5289270 -
ttccagcacttgagaggtag

SEQ ID NO: 41217 - DNA, 20 bp, Artificial Sequence
  Synthetic oligonucleotide; TGG chr11 5289264 5289283 5289267 -
cagcacttgagaggtagaag

SEQ ID NO: 41218 - DNA, 20 bp, Artificial Sequence
  Synthetic oligonucleotide; GGG chr11 5289263 5289282 5289266 -
agcacttgagaggtagaagt

SEQ ID NO: 41219 - DNA, 20 bp, Artificial Sequence
  Synthetic oligonucleotide; GAG chr11 5289261 5289280 5289264 -
cacttgagaggtagaagtgg

SEQ ID NO: 41220 - DNA, 20 bp, Artificial Sequence
  Synthetic oligonucleotide; AGG chr11 5289260 5289279 5289263 -
acttgagaggtagaagtggg

SEQ ID NO: 41221 - DNA, 20 bp, Artificial Sequence
  Synthetic oligonucleotide; GAG chr11 5289250 5289269 5289253 -
tagaagtgggaggactgctt

SEQ ID NO: 41222 - DNA, 20 bp, Artificial Sequence
  Synthetic oligonucleotide; AAG chr11 5289244 5289263 5289247 -
tgggaggactgcttgagctc

SEQ ID NO: 41223 - DNA, 20 bp, Artificial Sequence
  Synthetic oligonucleotide; GAG chr11 5289242 5289261 5289245 -
ggaggactgcttgagctcaa

SEQ ID NO: 41224 - DNA, 20 bp, Artificial Sequence
  Synthetic oligonucleotide; TGG chr11 5289226 5289245 5289229 -
tcaagagtttgatattatcc

SEQ ID NO: 41225 - DNA, 20 bp, Artificial Sequence
  Synthetic oligonucleotide; TAG chr11 5289217 5289236 5289220 -
tgatattatcctggacaaca

SEQ ID NO: 41226 - DNA, 20 bp, Artificial Sequence
  Synthetic oligonucleotide; AAG chr11 5289213 5289232 5289216 -
attatcctggacaacatagc

SEQ ID NO: 41227 - DNA, 20 bp, Artificial Sequence
  Synthetic oligonucleotide; TAG chr11 5289178 5289197 5289181 -
cttaaaaaaaaaaaaaaaat

SEQ ID NO: 41228 - DNA, 20 bp, Artificial Sequence
  Synthetic oligonucleotide; CAG chr11 5289174 5289193 5289177 -
aaaaaaaaaaaaaaattagc

SEQ ID NO: 41229 - DNA, 20 bp, Artificial Sequence
  Synthetic oligonucleotide; AGG chr11 5289173 5289192 5289176 -
aaaaaaaaaaaaaattagcc

SEQ ID NO: 41230 - DNA, 20 bp, Artificial Sequence
  Synthetic oligonucleotide; TAG chr11 5289153 5289172 5289156 -
aggcatgtgatgtacacctg

SEQ ID NO: 41231 - DNA, 20 bp, Artificial Sequence
  Synthetic oligonucleotide; CAG chr11 5289147 5289166 5289150 -
gtgatgtacacctgtagtcc

SEQ ID NO: 41232 - DNA, 20 bp, Artificial Sequence
  Synthetic oligonucleotide; CAG chr11 5289139 5289158 5289142 -
cacctgtagtcccagctact

SEQ ID NO: 41233 - DNA, 20 bp, Artificial Sequence
  Synthetic oligonucleotide; AGG chr11 5289138 5289157 5289141 -
acctgtagtcccagctactc

SEQ ID NO: 41234 - DNA, 20 bp, Artificial Sequence
  Synthetic oligonucleotide; GAG chr11 5289136 5289155 5289139 -
ctgtagtcccagctactcag

SEQ ID NO: 41235 - DNA, 20 bp, Artificial Sequence
  Synthetic oligonucleotide; AGG chr11 5289135 5289154 5289138 -
tgtagtcccagctactcagg

SEQ ID NO: 41236 - DNA, 20 bp, Artificial Sequence
  Synthetic oligonucleotide; TGG chr11 5289126 5289145 5289129 -
agctactcaggaggccgaaa

SEQ ID NO: 41237 - DNA, 20 bp, Artificial Sequence
  Synthetic oligonucleotide; GGG chr11 5289125 5289144 5289128 -
gctactcaggaggccgaaat

SEQ ID NO: 41238 - DNA, 20 bp, Artificial Sequence
  Synthetic oligonucleotide; GAG chr11 5289123 5289142 5289126 -
tactcaggaggccgaaatgg

SEQ ID NO: 41239 - DNA, 20 bp, Artificial Sequence
  Synthetic oligonucleotide; AGG chr11 5289122 5289141 5289125 -
actcaggaggccgaaatggg

SEQ ID NO: 41240 - DNA, 20 bp, Artificial Sequence
  Synthetic oligonucleotide; GAG chr11 5289112 5289131 5289115 -
ccgaaatgggaggatccctt

SEQ ID NO: 41241 - DNA, 20 bp, Artificial Sequence
  Synthetic oligonucleotide; CAG chr11 5289107 5289126 5289110 -
atgggaggatcccttgagct

SEQ ID NO: 41242 - DNA, 20 bp, Artificial Sequence
  Synthetic oligonucleotide; AGG chr11 5289106 5289125 5289109 -
tgggaggatcccttgagctc

SEQ ID NO: 41243 - DNA, 20 bp, Artificial Sequence
  Synthetic oligonucleotide; GAG chr11 5289104 5289123 5289107 -
ggaggatcccttgagctcag

SEQ ID NO: 41244 - DNA, 20 bp, Artificial Sequence
  Synthetic oligonucleotide; AGG chr11 5289103 5289122 5289106 -
gaggatcccttgagctcagg

SEQ ID NO: 41245 - DNA, 20 bp, Artificial Sequence
  Synthetic oligonucleotide; AAG chr11 5289098 5289117 5289101 -
tcccttgagctcaggaggtc

SEQ ID NO: 41246 - DNA, 20 bp, Artificial Sequence
  Synthetic oligonucleotide; AGG chr11 5289097 5289116 5289100 -
cccttgagctcaggaggtca

SEQ ID NO: 41247 - DNA, 20 bp, Artificial Sequence
  Synthetic oligonucleotide; CAG chr11 5289091 5289110 5289094 -
agctcaggaggtcaaggctg

SEQ ID NO: 41248 - DNA, 20 bp, Artificial Sequence
  Synthetic oligonucleotide; GAG chr11 5289087 5289106 5289090 -
caggaggtcaaggctgcagt

SEQ ID NO: 41249 - DNA, 20 bp, Artificial Sequence
  Synthetic oligonucleotide; CAG chr11 5289062 5289081 5289065 -
atgatcttgccactgcactc

SEQ ID NO: 41250 - DNA, 20 bp, Artificial Sequence
  Synthetic oligonucleotide; TGG chr11 5289057 5289076 5289060 -
cttgccactgcactccagcc

SEQ ID NO: 41251 - DNA, 20 bp, Artificial Sequence
  Synthetic oligonucleotide; CAG chr11 5289053 5289072 5289056 -
ccactgcactccagcctgga

SEQ ID NO: 41252 - DNA, 20 bp, Artificial Sequence
  Synthetic oligonucleotide; CAG chr11 5289050 5289069 5289053 -
ctgcactccagcctggacag

SEQ ID NO: 41253 - DNA, 20 bp, Artificial Sequence
  Synthetic oligonucleotide; GAG chr11 5289048 5289067 5289051 -
gcactccagcctggacagca

SEQ ID NO: 41254 - DNA, 20 bp, Artificial Sequence
  Synthetic oligonucleotide; CAG chr11 5289025 5289044 5289028 -
tgaaaccttgcctcacgaaa

SEQ ID NO: 41255 - DNA, 20 bp, Artificial Sequence
  Synthetic oligonucleotide; TAG chr11 5288961 5288980 5288964 -
ttccttgatgctctaccaca

SEQ ID NO: 41256 - DNA, 20 bp, Artificial Sequence
  Synthetic oligonucleotide; AGG chr11 5288960 5288979 5288963 -
tccttgatgctctaccacat

SEQ ID NO: 41257 - DNA, 20 bp, Artificial Sequence
  Synthetic oligonucleotide; TGG chr11 5288955 5288974 5288958 -
gatgctctaccacataggtc

SEQ ID NO: 41258 - DNA, 20 bp, Artificial Sequence
  Synthetic oligonucleotide; GGG chr11 5288954 5288973 5288957 -
atgctctaccacataggtct

SEQ ID NO: 41259 - DNA, 20 bp, Artificial Sequence
  Synthetic oligonucleotide; TAG chr11 5288913 5288932 5288916 -
tcattgctgttcataattgt

SEQ ID NO: 41260 - DNA, 20 bp, Artificial Sequence
  Synthetic oligonucleotide; TAG chr11 5288882 5288901 5288885 -
tgtaatattgatattattcc

SEQ ID NO: 41261 - DNA, 20 bp, Artificial Sequence
  Synthetic oligonucleotide; AAG chr11 5288878 5288897 5288881 -
atattgatattattcctaga

SEQ ID NO: 41262 - DNA, 20 bp, Artificial Sequence
  Synthetic oligonucleotide; GAG chr11 5288873 5288892 5288876 -
gatattattcctagaaagct

SEQ ID NO: 41263 - DNA, 20 bp, Artificial Sequence
  Synthetic oligonucleotide; AGG chr11 5288872 5288891 5288875 -
atattattcctagaaagctg

SEQ ID NO: 41264 - DNA, 20 bp, Artificial Sequence
  Synthetic oligonucleotide; AAG chr11 5288865 5288884 5288868 -
tcctagaaagctgaggcctc

SEQ ID NO: 41265 - DNA, 20 bp, Artificial Sequence
  Synthetic oligonucleotide; TGG chr11 5288844 5288863 5288847 -
agatgataacttttattttc

SEQ ID NO: 41266 - DNA, 20 bp, Artificial Sequence
  Synthetic oligonucleotide; TAG chr11 5288833 5288852 5288836 -
tttattttctggacttgtaa

SEQ ID NO: 41267 - DNA, 20 bp, Artificial Sequence
  Synthetic oligonucleotide; TAG chr11 5288797 5288816 5288800 -
tcaccatgttgtaactttct

SEQ ID NO: 41268 - DNA, 20 bp, Artificial Sequence
  Synthetic oligonucleotide; GAG chr11 5288795 5288814 5288798 -
accatgttgtaactttctta

SEQ ID NO: 41269 - DNA, 20 bp, Artificial Sequence
  Synthetic oligonucleotide; TAG chr11 5288792 5288811 5288795 -
atgttgtaactttcttagag

SEQ ID NO: 41270 - DNA, 20 bp, Artificial Sequence
  Synthetic oligonucleotide; AAG chr11 5288779 5288798 5288782 -
cttagagtagtaacaatata

SEQ ID NO: 41271 - DNA, 20 bp, Artificial Sequence
  Synthetic oligonucleotide; GAG chr11 5288769 5288788 5288772 -
taacaatataaagttattgt

SEQ ID NO: 41272 - DNA, 20 bp, Artificial Sequence
  Synthetic oligonucleotide; CAG chr11 5288754 5288773 5288757 -
attgtgagtttttgcaaaca

SEQ ID NO: 41273 - DNA, 20 bp, Artificial Sequence
  Synthetic oligonucleotide; TAG chr11 5288733 5288752 5288736 -
agcaaacacaacgacccata

SEQ ID NO: 41274 - DNA, 20 bp, Artificial Sequence
  Synthetic oligonucleotide; TGG chr11 5288698 5288717 5288701 -
aattgtctattgtcaattta

SEQ ID NO: 41275 - DNA, 20 bp, Artificial Sequence
  Synthetic oligonucleotide; GGG chr11 5288697 5288716 5288700 -
attgtctattgtcaatttat

SEQ ID NO: 41276 - DNA, 20 bp, Artificial Sequence
  Synthetic oligonucleotide; AAG chr11 5288689 5288708 5288692 -
ttgtcaatttatgggaaaac

SEQ ID NO: 41277 - DNA, 20 bp, Artificial Sequence
  Synthetic oligonucleotide; AAG chr11 5288669 5288688 5288672 -
aagtatgtactttttctact

SEQ ID NO: 41278 - DNA, 20 bp, Artificial Sequence
  Synthetic oligonucleotide; CAG chr11 5288657 5288676 5288660 -
tttctactaagccattgaaa

SEQ ID NO: 41279 - DNA, 20 bp, Artificial Sequence
  Synthetic oligonucleotide; AGG chr11 5288656 5288675 5288659 -
ttctactaagccattgaaac

SEQ ID NO: 41280 - DNA, 20 bp, Artificial Sequence
  Synthetic oligonucleotide; CAG chr11 5288648 5288667 5288651 -
agccattgaaacaggaataa

SEQ ID NO: 41281 - DNA, 20 bp, Artificial Sequence
  Synthetic oligonucleotide; AAG chr11 5288642 5288661 5288645 -
tgaaacaggaataacagaac

SEQ ID NO: 41282 - DNA, 20 bp, Artificial Sequence
  Synthetic oligonucleotide; AAG chr11 5288634 5288653 5288637 -
gaataacagaacaagattga

SEQ ID NO: 41283 - DNA, 20 bp, Artificial Sequence
  Synthetic oligonucleotide; GAG chr11 5288609 5288628 5288612 -
tacattttccgaaattactt

SEQ ID NO: 41284 - DNA, 20 bp, Artificial Sequence
  Synthetic oligonucleotide; AAG chr11 5288597 5288616 5288600 -
aattacttgagtattataca

SEQ ID NO: 41285 - DNA, 20 bp, Artificial Sequence
  Synthetic oligonucleotide; AAG chr11 5288592 5288611 5288595 -
cttgagtattatacaaagac

SEQ ID NO: 41286 - DNA, 20 bp, Artificial Sequence
  Synthetic oligonucleotide; TGG chr11 5288585 5288604 5288588 -
attatacaaagacaagcacg

SEQ ID NO: 41287 - DNA, 20 bp, Artificial Sequence
  Synthetic oligonucleotide; TGG chr11 5288579 5288598 5288582 -
caaagacaagcacgtggacc

SEQ ID NO: 41288 - DNA, 20 bp, Artificial Sequence
  Synthetic oligonucleotide; GGG chr11 5288578 5288597 5288581 -
aaagacaagcacgtggacct

SEQ ID NO: 41289 - DNA, 20 bp, Artificial Sequence
  Synthetic oligonucleotide; GAG chr11 5288576 5288595 5288579 -
agacaagcacgtggacctgg

SEQ ID NO: 41290 - DNA, 20 bp, Artificial Sequence
  Synthetic oligonucleotide; AGG chr11 5288575 5288594 5288578 -
gacaagcacgtggacctggg

SEQ ID NO: 41291 - DNA, 20 bp, Artificial Sequence
  Synthetic oligonucleotide; GAG chr11 5288573 5288592 5288576 -
caagcacgtggacctgggag

SEQ ID NO: 41292 - DNA, 20 bp, Artificial Sequence
  Synthetic oligonucleotide; AGG chr11 5288572 5288591 5288575 -
aagcacgtggacctgggagg

SEQ ID NO: 41293 - DNA, 20 bp, Artificial Sequence
  Synthetic oligonucleotide; GGG chr11 5288571 5288590 5288574 -
agcacgtggacctgggagga

SEQ ID NO: 41294 - DNA, 20 bp, Artificial Sequence
  Synthetic oligonucleotide; TGG chr11 5288554 5288573 5288557 -
ggagggttattgtccatgac

SEQ ID NO: 41295 - DNA, 20 bp, Artificial Sequence
  Synthetic oligonucleotide; TGG chr11 5288547 5288566 5288550 -
tattgtccatgactggtgtg

SEQ ID NO: 41296 - DNA, 20 bp, Artificial Sequence
  Synthetic oligonucleotide; GAG chr11 5288545 5288564 5288548 -
ttgtccatgactggtgtgtg

SEQ ID NO: 41297 - DNA, 20 bp, Artificial Sequence
  Synthetic oligonucleotide; CAG chr11 5288535 5288554 5288538 -
ctggtgtgtggagacaaatg

SEQ ID NO: 41298 - DNA, 20 bp, Artificial Sequence
  Synthetic oligonucleotide; AGG chr11 5288534 5288553 5288537 -
tggtgtgtggagacaaatgc

SEQ ID NO: 41299 - DNA, 20 bp, Artificial Sequence
  Synthetic oligonucleotide; TAG chr11 5288524 5288543 5288527 -
agacaaatgcaggtttataa

SEQ ID NO: 41300 - DNA, 20 bp, Artificial Sequence
  Synthetic oligonucleotide; TGG chr11 5288520 5288539 5288523 -
aaatgcaggtttataataga

SEQ ID NO: 41301 - DNA, 20 bp, Artificial Sequence
  Synthetic oligonucleotide; GGG chr11 5288519 5288538 5288522 -
aatgcaggtttataatagat

SEQ ID NO: 41302 - DNA, 20 bp, Artificial Sequence
  Synthetic oligonucleotide; TGG chr11 5288515 5288534 5288518 -
caggtttataatagatggga

SEQ ID NO: 41303 - DNA, 20 bp, Artificial Sequence
  Synthetic oligonucleotide; TAG chr11 5288508 5288527 5288511 -
ataatagatgggatggcatc

SEQ ID NO: 41304 - DNA, 20 bp, Artificial Sequence
  Synthetic oligonucleotide; TAG chr11 5288482 5288501 5288485 -
aatgactttgccatcacttt

SEQ ID NO: 41305 - DNA, 20 bp, Artificial Sequence
  Synthetic oligonucleotide; GAG chr11 5288480 5288499 5288483 -
tgactttgccatcactttta

SEQ ID NO: 41306 - DNA, 20 bp, Artificial Sequence
  Synthetic oligonucleotide; GAG chr11 5288478 5288497 5288481 -
actttgccatcacttttaga

SEQ ID NO: 41307 - DNA, 20 bp, Artificial Sequence
  Synthetic oligonucleotide; TGG chr11 5288471 5288490 5288474 -
catcacttttagagagctct

SEQ ID NO: 41308 - DNA, 20 bp, Artificial Sequence
  Synthetic oligonucleotide; GGG chr11 5288470 5288489 5288473 -
atcacttttagagagctctt

SEQ ID NO: 41309 - DNA, 20 bp, Artificial Sequence
  Synthetic oligonucleotide; GGG chr11 5288469 5288488 5288472 -
tcacttttagagagctcttg

SEQ ID NO: 41310 - DNA, 20 bp, Artificial Sequence
  Synthetic oligonucleotide; CAG chr11 5288462 5288481 5288465 -
tagagagctcttggggaccc

SEQ ID NO: 41311 - DNA, 20 bp, Artificial Sequence
  Synthetic oligonucleotide; AAG chr11 5288454 5288473 5288457 -
tcttggggaccccagtacac

SEQ ID NO: 41312 - DNA, 20 bp, Artificial Sequence
  Synthetic oligonucleotide; GAG chr11 5288452 5288471 5288455 -
ttggggaccccagtacacaa

SEQ ID NO: 41313 - DNA, 20 bp, Artificial Sequence
  Synthetic oligonucleotide; AGG chr11 5288451 5288470 5288454 -
tggggaccccagtacacaag

SEQ ID NO: 41314 - DNA, 20 bp, Artificial Sequence
  Synthetic oligonucleotide; GGG chr11 5288450 5288469 5288453 -
ggggaccccagtacacaaga

SEQ ID NO: 41315 - DNA, 20 bp, Artificial Sequence
  Synthetic oligonucleotide; GGG chr11 5288449 5288468 5288452 -
gggaccccagtacacaagag

SEQ ID NO: 41316 - DNA, 20 bp, Artificial Sequence
  Synthetic oligonucleotide; CAG chr11 5288443 5288462 5288446 -
ccagtacacaagaggggacg

SEQ ID NO: 41317 - DNA, 20 bp, Artificial Sequence
  Synthetic oligonucleotide; AGG chr11 5288442 5288461 5288445 -
cagtacacaagaggggacgc

SEQ ID NO: 41318 - DNA, 20 bp, Artificial Sequence
  Synthetic oligonucleotide; GGG chr11 5288441 5288460 5288444 -
agtacacaagaggggacgca

SEQ ID NO: 41319 - DNA, 20 bp, Artificial Sequence
  Synthetic oligonucleotide; TAG chr11 5288432 5288451 5288435 -
gaggggacgcagggtatatg

SEQ ID NO: 41320 - DNA, 20 bp, Artificial Sequence
  Synthetic oligonucleotide; TAG chr11 5288411 5288430 5288414 -
agacatctcattctttttct

SEQ ID NO: 41321 - DNA, 20 bp, Artificial Sequence
  Synthetic oligonucleotide; GAG chr11 5288405 5288424 5288408 -
ctcattctttttcttagtgt

SEQ ID NO: 41322 - DNA, 20 bp, Artificial Sequence
  Synthetic oligonucleotide; AAG chr11 5288399 5288418 5288402 -
ctttttcttagtgtgagaat

SEQ ID NO: 41323 - DNA, 20 bp, Artificial Sequence
  Synthetic oligonucleotide; TAG chr11 5288394 5288413 5288397 -
tcttagtgtgagaataagaa

SEQ ID NO: 41324 - DNA, 20 bp, Artificial Sequence
  Synthetic oligonucleotide; GAG chr11 5288382 5288401 5288385 -
aataagaatagccatgacct

SEQ ID NO: 41325 - DNA, 20 bp, Artificial Sequence
  Synthetic oligonucleotide; TAG chr11 5288375 5288394 5288378 -
atagccatgacctgagttta

SEQ ID NO: 41326 - DNA, 20 bp, Artificial Sequence
  Synthetic oligonucleotide; GAG chr11 5288367 5288386 5288370 -
gacctgagtttatagacaat

SEQ ID NO: 41327 - DNA, 20 bp, Artificial Sequence
  Synthetic oligonucleotide; CAG chr11 5288345 5288364 5288348 -
gcccttttctctctcccact

SEQ ID NO: 41328 - DNA, 20 bp, Artificial Sequence
  Synthetic oligonucleotide; CAG chr11 5288342 5288361 5288345 -
cttttctctctcccactcag

SEQ ID NO: 41329 - DNA, 20 bp, Artificial Sequence
  Synthetic oligonucleotide; GAG chr11 5288335 5288354 5288338 -
ctctcccactcagcagctat

SEQ ID NO: 41330 - DNA, 20 bp, Artificial Sequence
  Synthetic oligonucleotide; TGG chr11 5288331 5288350 5288334 -
cccactcagcagctatgaga

SEQ ID NO: 41331 - DNA, 20 bp, Artificial Sequence
  Synthetic oligonucleotide; TAG chr11 5288310 5288329 5288313 -
ggcttgccctgcctctctac

SEQ ID NO: 41332 - DNA, 20 bp, Artificial Sequence
  Synthetic oligonucleotide; AGG chr11 5288309 5288328 5288312 -
gcttgccctgcctctctact

SEQ ID NO: 41333 - DNA, 20 bp, Artificial Sequence
  Synthetic oligonucleotide; AAG chr11 5288294 5288313 5288297 -
ctactaggctgactcactcc

SEQ ID NO: 41334 - DNA, 20 bp, Artificial Sequence
  Synthetic oligonucleotide; AGG chr11 5288293 5288312 5288296 -
tactaggctgactcactcca

SEQ ID NO: 41335 - DNA, 20 bp, Artificial Sequence
  Synthetic oligonucleotide; CAG chr11 5288288 5288307 5288291 -
ggctgactcactccaaggcc

SEQ ID NO: 41336 - DNA, 20 bp, Artificial Sequence
  Synthetic oligonucleotide; TGG chr11 5288282 5288301 5288285 -
ctcactccaaggcccagcaa

SEQ ID NO: 41337 - DNA, 20 bp, Artificial Sequence
  Synthetic oligonucleotide; GGG chr11 5288281 5288300 5288284 -
tcactccaaggcccagcaat

SEQ ID NO: 41338 - DNA, 20 bp, Artificial Sequence
  Synthetic oligonucleotide; CAG chr11 5288278 5288297 5288281 -
ctccaaggcccagcaatggg

SEQ ID NO: 41339 - DNA, 20 bp, Artificial Sequence
  Synthetic oligonucleotide; AGG chr11 5288277 5288296 5288280 -
tccaaggcccagcaatgggc

SEQ ID NO: 41340 - DNA, 20 bp, Artificial Sequence
  Synthetic oligonucleotide; GGG chr11 5288276 5288295 5288279 -
ccaaggcccagcaatgggca

SEQ ID NO: 41341 - DNA, 20 bp, Artificial Sequence
  Synthetic oligonucleotide; CAG chr11 5288267 5288286 5288270 -
agcaatgggcagggctctgt

SEQ ID NO: 41342 - DNA, 20 bp, Artificial Sequence
  Synthetic oligonucleotide; AGG chr11 5288266 5288285 5288269 -
gcaatgggcagggctctgtc

SEQ ID NO: 41343 - DNA, 20 bp, Artificial Sequence
  Synthetic oligonucleotide; GGG chr11 5288265 5288284 5288268 -
caatgggcagggctctgtca

SEQ ID NO: 41344 - DNA, 20 bp, Artificial Sequence
  Synthetic oligonucleotide; TAG chr11 5288256 5288275 5288259 -
gggctctgtcagggctttga

SEQ ID NO: 41345 - DNA, 20 bp, Artificial Sequence
  Synthetic oligonucleotide; CAG chr11 5288244 5288263 5288247 -
ggctttgatagcactatctg

SEQ ID NO: 41346 - DNA, 20 bp, Artificial Sequence
  Synthetic oligonucleotide; GAG chr11 5288242 5288261 5288245 -
ctttgatagcactatctgca

SEQ ID NO: 41347 - DNA, 20 bp, Artificial Sequence
  Synthetic oligonucleotide; CAG chr11 5288238 5288257 5288241 -
gatagcactatctgcagagc

SEQ ID NO: 41348 - DNA, 20 bp, Artificial Sequence
  Synthetic oligonucleotide; AGG chr11 5288237 5288256 5288240 -
atagcactatctgcagagcc

SEQ ID NO: 41349 - DNA, 20 bp, Artificial Sequence
  Synthetic oligonucleotide; GGG chr11 5288236 5288255 5288239 -
tagcactatctgcagagcca

SEQ ID NO: 41350 - DNA, 20 bp, Artificial Sequence
  Synthetic oligonucleotide; GAG chr11 5288231 5288250 5288234 -
ctatctgcagagccagggcc

SEQ ID NO: 41351 - DNA, 20 bp, Artificial Sequence
  Synthetic oligonucleotide; AAG chr11 5288228 5288247 5288231 -
tctgcagagccagggccgag

SEQ ID NO: 41352 - DNA, 20 bp, Artificial Sequence
  Synthetic oligonucleotide; AGG chr11 5288227 5288246 5288230 -
ctgcagagccagggccgaga

SEQ ID NO: 41353 - DNA, 20 bp, Artificial Sequence
  Synthetic oligonucleotide; GGG chr11 5288226 5288245 5288229 -
tgcagagccagggccgagaa

SEQ ID NO: 41354 - DNA, 20 bp, Artificial Sequence
  Synthetic oligonucleotide; GGG chr11 5288225 5288244 5288228 -
gcagagccagggccgagaag

SEQ ID NO: 41355 - DNA, 20 bp, Artificial Sequence
  Synthetic oligonucleotide; TGG chr11 5288222 5288241 5288225 -
gagccagggccgagaagggg

SEQ ID NO: 41356 - DNA, 20 bp, Artificial Sequence
  Synthetic oligonucleotide; CAG chr11 5288215 5288234 5288218 -
ggccgagaaggggtggactc

SEQ ID NO: 41357 - DNA, 20 bp, Artificial Sequence
  Synthetic oligonucleotide; GAG chr11 5288213 5288232 5288216 -
ccgagaaggggtggactcca

SEQ ID NO: 41358 - DNA, 20 bp, Artificial Sequence
  Synthetic oligonucleotide; GAG chr11 5288192 5288211 5288195 -
agactctccctcccattccc

SEQ ID NO: 41359 - DNA, 20 bp, Artificial Sequence
  Synthetic oligonucleotide; CAG chr11 5288189 5288208 5288192 -
ctctccctcccattcccgag

SEQ ID NO: 41360 - DNA, 20 bp, Artificial Sequence
  Synthetic oligonucleotide; AGG chr11 5288188 5288207 5288191 -
tctccctcccattcccgagc

SEQ ID NO: 41361 - DNA, 20 bp, Artificial Sequence
  Synthetic oligonucleotide; GGG chr11 5288187 5288206 5288190 -
ctccctcccattcccgagca

SEQ ID NO: 41362 - DNA, 20 bp, Artificial Sequence
  Synthetic oligonucleotide; AAG chr11 5288145 5288164 5288148 -
aaatgatatatttattttaa

SEQ ID NO: 41363 - DNA, 20 bp, Artificial Sequence
  Synthetic oligonucleotide; CAG chr11 5288136 5288155 5288139 -
atttattttaaaagaaataa

SEQ ID NO: 41364 - DNA, 20 bp, Artificial Sequence
  Synthetic oligonucleotide; AGG chr11 5288135 5288154 5288138 -
tttattttaaaagaaataac

SEQ ID NO: 41365 - DNA, 20 bp, Artificial Sequence
  Synthetic oligonucleotide; GAG chr11 5288133 5288152 5288136 -
tattttaaaagaaataacag

SEQ ID NO: 41366 - DNA, 20 bp, Artificial Sequence
  Synthetic oligonucleotide; CAG chr11 5288124 5288143 5288127 -
agaaataacaggagactgcc

SEQ ID NO: 41367 - DNA, 20 bp, Artificial Sequence
  Synthetic oligonucleotide; TGG chr11 5288118 5288137 5288121 -
aacaggagactgcccagccc

SEQ ID NO: 41368 - DNA, 20 bp, Artificial Sequence
  Synthetic oligonucleotide; TGG chr11 5288107 5288126 5288110 -
gcccagccctggctgtgaca

SEQ ID NO: 41369 - DNA, 20 bp, Artificial Sequence
  Synthetic oligonucleotide; TAG chr11 5288096 5288115 5288099 -
gctgtgacatggaaactatg

SEQ ID NO: 41370 - DNA, 20 bp, Artificial Sequence
  Synthetic oligonucleotide; TGG chr11 5288086 5288105 5288089 -
ggaaactatgtagaatattt

SEQ ID NO: 41371 - DNA, 20 bp, Artificial Sequence
  Synthetic oligonucleotide; GGG chr11 5288085 5288104 5288088 -
gaaactatgtagaatatttt

SEQ ID NO: 41372 - DNA, 20 bp, Artificial Sequence
  Synthetic oligonucleotide; CAG chr11 5288060 5288079 5288063 -
ccatttttttttccttcttt

SEQ ID NO: 41373 - DNA, 20 bp, Artificial Sequence
  Synthetic oligonucleotide; TAG chr11 5288056 5288075 5288059 -
ttttttttccttctttcagt

SEQ ID NO: 41374 - DNA, 20 bp, Artificial Sequence
  Synthetic oligonucleotide; GAG chr11 5288054 5288073 5288057 -
ttttttccttctttcagtta

SEQ ID NO: 41375 - DNA, 20 bp, Artificial Sequence
  Synthetic oligonucleotide; AGG chr11 5288053 5288072 5288056 -
tttttccttctttcagttag

SEQ ID NO: 41376 - DNA, 20 bp, Artificial Sequence
  Synthetic oligonucleotide; AAG chr11 5288048 5288067 5288051 -
ccttctttcagttagaggaa

SEQ ID NO: 41377 - DNA, 20 bp, Artificial Sequence
  Synthetic oligonucleotide; AGG chr11 5288047 5288066 5288050 -
cttctttcagttagaggaaa

SEQ ID NO: 41378 - DNA, 20 bp, Artificial Sequence
  Synthetic oligonucleotide; GGG chr11 5288046 5288065 5288049 -
ttctttcagttagaggaaaa

SEQ ID NO: 41379 - DNA, 20 bp, Artificial Sequence
  Synthetic oligonucleotide; GGG chr11 5288045 5288064 5288048 -
tctttcagttagaggaaaag

SEQ ID NO: 41380 - DNA, 20 bp, Artificial Sequence
  Synthetic oligonucleotide; TAG chr11 5288026 5288045 5288029 -
ggggctcactgcacatacac

SEQ ID NO: 41381 - DNA, 20 bp, Artificial Sequence
  Synthetic oligonucleotide; CAG chr11 5288022 5288041 5288025 -
ctcactgcacatacactaga

SEQ ID NO: 41382 - DNA, 20 bp, Artificial Sequence
  Synthetic oligonucleotide; AAG chr11 5288018 5288037 5288021 -
ctgcacatacactagacaga

SEQ ID NO: 41383 - DNA, 20 bp, Artificial Sequence
  Synthetic oligonucleotide; CAG chr11 5288014 5288033 5288017 -
acatacactagacagaaagt

SEQ ID NO: 41384 - DNA, 20 bp, Artificial Sequence
  Synthetic oligonucleotide; AGG chr11 5288013 5288032 5288016 -
catacactagacagaaagtc

SEQ ID NO: 41385 - DNA, 20 bp, Artificial Sequence
  Synthetic oligonucleotide; GAG chr11 5288011 5288030 5288014 -
tacactagacagaaagtcag

SEQ ID NO: 41386 - DNA, 20 bp, Artificial Sequence
  Synthetic oligonucleotide; AAG chr11 5287998 5288017 5288001 -
aagtcaggagctttgaatcc

SEQ ID NO: 41387 - DNA, 20 bp, Artificial Sequence
  Synthetic oligonucleotide; GAG chr11 5287972 5287991 5287975 -
gatcatttccatgtcatact

SEQ ID NO: 41388 - DNA, 20 bp, Artificial Sequence
  Synthetic oligonucleotide; AAG chr11 5287968 5287987 5287971 -
atttccatgtcatactgaga

SEQ ID NO: 41389 - DNA, 20 bp, Artificial Sequence
  Synthetic oligonucleotide; GAG chr11 5287950 5287969 5287953 -
gaaagtccccacccttctct

SEQ ID NO: 41390 - DNA, 20 bp, Artificial Sequence
  Synthetic oligonucleotide; CAG chr11 5287944 5287963 5287947 -
ccccacccttctctgagcct

SEQ ID NO: 41391 - DNA, 20 bp, Artificial Sequence
  Synthetic oligonucleotide; AAG chr11 5287928 5287947 5287931 -
gcctcagtttctctttttat

SEQ ID NO: 41392 - DNA, 20 bp, Artificial Sequence
  Synthetic oligonucleotide; TAG chr11 5287925 5287944 5287928 -
tcagtttctctttttataag

SEQ ID NO: 41393 - DNA, 20 bp, Artificial Sequence
  Synthetic oligonucleotide; AGG chr11 5287924 5287943 5287927 -
cagtttctctttttataagt

SEQ ID NO: 41394 - DNA, 20 bp, Artificial Sequence
  Synthetic oligonucleotide; GAG chr11 5287922 5287941 5287925 -
gtttctctttttataagtag

SEQ ID NO: 41395 - DNA, 20 bp, Artificial Sequence
  Synthetic oligonucleotide; TGG chr11 5287917 5287936 5287920 -
tctttttataagtaggagtc

SEQ ID NO: 41396 - DNA, 20 bp, Artificial Sequence
  Synthetic oligonucleotide; GAG chr11 5287915 5287934 5287918 -
tttttataagtaggagtctg

SEQ ID NO: 41397 - DNA, 20 bp, Artificial Sequence
  Synthetic oligonucleotide; TGG chr11 5287898 5287917 5287901 -
ctggagtaaatgatttccaa

SEQ ID NO: 41398 - DNA, 20 bp, Artificial Sequence
  Synthetic oligonucleotide; GAG chr11 5287856 5287875 5287859 -
tttccgtttattaaatgcat

SEQ ID NO: 41399 - DNA, 20 bp, Artificial Sequence
  Synthetic oligonucleotide; AAG chr11 5287840 5287859 5287843 -
gcatgagcttctgttactcc

SEQ ID NO: 41400 - DNA, 20 bp, Artificial Sequence
  Synthetic oligonucleotide; GAG chr11 5287834 5287853 5287837 -
gcttctgttactccaagact

SEQ ID NO: 41401 - DNA, 20 bp, Artificial Sequence
  Synthetic oligonucleotide; AAG chr11 5287831 5287850 5287834 -
tctgttactccaagactgag

SEQ ID NO: 41402 - DNA, 20 bp, Artificial Sequence
  Synthetic oligonucleotide; AGG chr11 5287830 5287849 5287833 -
ctgttactccaagactgaga

SEQ ID NO: 41403 - DNA, 20 bp, Artificial Sequence
  Synthetic oligonucleotide; GAG chr11 5287816 5287835 5287819 -
ctgagaaggaaattgaacct

SEQ ID NO: 41404 - DNA, 20 bp, Artificial Sequence
  Synthetic oligonucleotide; TGG chr11 5287803 5287822 5287806 -
tgaacctgagactcattgac

SEQ ID NO: 41405 - DNA, 20 bp, Artificial Sequence
  Synthetic oligonucleotide; AAG chr11 5287799 5287818 5287802 -
cctgagactcattgactggc

SEQ ID NO: 41406 - DNA, 20 bp, Artificial Sequence
  Synthetic oligonucleotide; CAG chr11 5287789 5287808 5287792 -
attgactggcaagatgtccc

SEQ ID NO: 41407 - DNA, 20 bp, Artificial Sequence
  Synthetic oligonucleotide; GAG chr11 5287787 5287806 5287790 -
tgactggcaagatgtcccca

SEQ ID NO: 41408 - DNA, 20 bp, Artificial Sequence
  Synthetic oligonucleotide; AGG chr11 5287786 5287805 5287789 -
gactggcaagatgtccccag

SEQ ID NO: 41409 - DNA, 20 bp, Artificial Sequence
  Synthetic oligonucleotide; CAG chr11 5287775 5287794 5287778 -
tgtccccagaggctctcatt

SEQ ID NO: 41410 - DNA, 20 bp, Artificial Sequence
  Synthetic oligonucleotide; CAG chr11 5287750 5287769 5287753 -
ataaaattctcaccttcacc

SEQ ID NO: 41411 - DNA, 20 bp, Artificial Sequence
  Synthetic oligonucleotide; AGG chr11 5287749 5287768 5287752 -
taaaattctcaccttcaccc

SEQ ID NO: 41412 - DNA, 20 bp, Artificial Sequence
  Synthetic oligonucleotide; GAG chr11 5287740 5287759 5287743 -
caccttcacccaggcccact

SEQ ID NO: 41413 - DNA, 20 bp, Artificial Sequence
  Synthetic oligonucleotide; CAG chr11 5287734 5287753 5287737 -
cacccaggcccactgagtgt

SEQ ID NO: 41414 - DNA, 20 bp, Artificial Sequence
  Synthetic oligonucleotide; TAG chr11 5287719 5287738 5287722 -
agtgtcagatttgcatgcac

SEQ ID NO: 41415 - DNA, 20 bp, Artificial Sequence
  Synthetic oligonucleotide; AAG chr11 5287702 5287721 5287705 -
cactagttcacgtgtgtaaa

SEQ ID NO: 41416 - DNA, 20 bp, Artificial Sequence
  Synthetic oligonucleotide; AGG chr11 5287701 5287720 5287704 -
actagttcacgtgtgtaaaa

SEQ ID NO: 41417 - DNA, 20 bp, Artificial Sequence
  Synthetic oligonucleotide; GAG chr11 5287699 5287718 5287702 -
tagttcacgtgtgtaaaaag

SEQ ID NO: 41418 - DNA, 20 bp, Artificial Sequence
  Synthetic oligonucleotide; AGG chr11 5287698 5287717 5287701 -
agttcacgtgtgtaaaaagg

SEQ ID NO: 41419 - DNA, 20 bp, Artificial Sequence
  Synthetic oligonucleotide; TAG chr11 5287663 5287682 5287666 -
tttgtattctcacatacctt

SEQ ID NO: 41420 - DNA, 20 bp, Artificial Sequence
  Synthetic oligonucleotide; AGG chr11 5287662 5287681 5287665 -
ttgtattctcacataccttt

SEQ ID NO: 41421 - DNA, 20 bp, Artificial Sequence
  Synthetic oligonucleotide; AAG chr11 5287658 5287677 5287661 -
attctcacatacctttagga

SEQ ID NO: 41422 - DNA, 20 bp, Artificial Sequence
  Synthetic oligonucleotide; TAG chr11 5287651 5287670 5287654 -
catacctttaggaaagaact

SEQ ID NO: 41423 - DNA, 20 bp, Artificial Sequence
  Synthetic oligonucleotide; CAG chr11 5287635 5287654 5287638 -
aacttagcacccttcccaca

SEQ ID NO: 41424 - DNA, 20 bp, Artificial Sequence
  Synthetic oligonucleotide; CAG chr11 5287613 5287632 5287616 -
gccatcccaataactcattt

SEQ ID NO: 41425 - DNA, 20 bp, Artificial Sequence
  Synthetic oligonucleotide; AAG chr11 5287587 5287606 5287590 -
ctcaacccttgactttataa

SEQ ID NO: 41426 - DNA, 20 bp, Artificial Sequence
  Synthetic oligonucleotide; TGG chr11 5287581 5287600 5287584 -
ccttgactttataaaagtct

SEQ ID NO: 41427 - DNA, 20 bp, Artificial Sequence
  Synthetic oligonucleotide; GGG chr11 5287580 5287599 5287583 -
cttgactttataaaagtctt

SEQ ID NO: 41428 - DNA, 20 bp, Artificial Sequence
  Synthetic oligonucleotide; CAG chr11 5287577 5287596 5287580 -
gactttataaaagtcttggg

SEQ ID NO: 41429 - DNA, 20 bp, Artificial Sequence
  Synthetic oligonucleotide; TAG chr11 5287572 5287591 5287575 -
tataaaagtcttgggcagta

SEQ ID NO: 41430 - DNA, 20 bp, Artificial Sequence
  Synthetic oligonucleotide; GAG chr11 5287570 5287589 5287573 -
taaaagtcttgggcagtata

SEQ ID NO: 41431 - DNA, 20 bp, Artificial Sequence
  Synthetic oligonucleotide; CAG chr11 5287567 5287586 5287570 -
aagtcttgggcagtatagag

SEQ ID NO: 41432 - DNA, 20 bp, Artificial Sequence
  Synthetic oligonucleotide; GAG chr11 5287565 5287584 5287568 -
gtcttgggcagtatagagca

SEQ ID NO: 41433 - DNA, 20 bp, Artificial Sequence
  Synthetic oligonucleotide; AAG chr11 5287559 5287578 5287562 -
ggcagtatagagcagagatt

SEQ ID NO: 41434 - DNA, 20 bp, Artificial Sequence
  Synthetic oligonucleotide; GAG chr11 5287557 5287576 5287560 -
cagtatagagcagagattaa

SEQ ID NO: 41435 - DNA, 20 bp, Artificial Sequence
  Synthetic oligonucleotide; CAG chr11 5287552 5287571 5287555 -
tagagcagagattaagagta

SEQ ID NO: 41436 - DNA, 20 bp, Artificial Sequence
  Synthetic oligonucleotide; TGG chr11 5287545 5287564 5287548 -
gagattaagagtacagatgc

SEQ ID NO: 41437 - DNA, 20 bp, Artificial Sequence
  Synthetic oligonucleotide; GAG chr11 5287543 5287562 5287546 -
gattaagagtacagatgctg

SEQ ID NO: 41438 - DNA, 20 bp, Artificial Sequence
  Synthetic oligonucleotide; CAG chr11 5287539 5287558 5287542 -
aagagtacagatgctggagc

SEQ ID NO: 41439 - DNA, 20 bp, Artificial Sequence
  Synthetic oligonucleotide; GAG chr11 5287529 5287548 5287532 -
atgctggagccagaccacct

SEQ ID NO: 41440 - DNA, 20 bp, Artificial Sequence
  Synthetic oligonucleotide; TAG chr11 5287522 5287541 5287525 -
agccagaccacctgagtgat

SEQ ID NO: 41441 - DNA, 20 bp, Artificial Sequence
  Synthetic oligonucleotide; CAG chr11 5287514 5287533 5287517 -
cacctgagtgattagtgact

SEQ ID NO: 41442 - DNA, 20 bp, Artificial Sequence
  Synthetic oligonucleotide; TAG chr11 5287504 5287523 5287507 -
attagtgactcagtttctct

SEQ ID NO: 41443 - DNA, 20 bp, Artificial Sequence
  Synthetic oligonucleotide; TAG chr11 5287501 5287520 5287504 -
agtgactcagtttctcttag

SEQ ID NO: 41444 - DNA, 20 bp, Artificial Sequence
  Synthetic oligonucleotide; CAG chr11 5287488 5287507 5287491 -
ctcttagtagttgtatgact

SEQ ID NO: 41445 - DNA, 20 bp, Artificial Sequence
  Synthetic oligonucleotide; TGG chr11 5287468 5287487 5287471 -
cagtttcttcatctgtaaaa

SEQ ID NO: 41446 - DNA, 20 bp, Artificial Sequence
  Synthetic oligonucleotide; GAG chr11 5287466 5287485 5287469 -
gtttcttcatctgtaaaatg

SEQ ID NO: 41447 - DNA, 20 bp, Artificial Sequence
  Synthetic oligonucleotide; AGG chr11 5287465 5287484 5287468 -
tttcttcatctgtaaaatgg

SEQ ID NO: 41448 - DNA, 20 bp, Artificial Sequence
  Synthetic oligonucleotide; GGG chr11 5287464 5287483 5287467 -
ttcttcatctgtaaaatgga

SEQ ID NO: 41449 - DNA, 20 bp, Artificial Sequence
  Synthetic oligonucleotide; TAG chr11 5287452 5287471 5287455 -
aaaatggagggttttttaat

SEQ ID NO: 41450 - DNA, 20 bp, Artificial Sequence
  Synthetic oligonucleotide; GAG chr11 5287440 5287459 5287443 -
tttttaattagtttgttttt

SEQ ID NO: 41451 - DNA, 20 bp, Artificial Sequence
  Synthetic oligonucleotide; AAG chr11 5287436 5287455 5287439 -
taattagtttgtttttgaga

SEQ ID NO: 41452 - DNA, 20 bp, Artificial Sequence
  Synthetic oligonucleotide; AGG chr11 5287435 5287454 5287438 -
aattagtttgtttttgagaa

SEQ ID NO: 41453 - DNA, 20 bp, Artificial Sequence
  Synthetic oligonucleotide; GGG chr11 5287434 5287453 5287437 -
attagtttgtttttgagaaa

SEQ ID NO: 41454 - DNA, 20 bp, Artificial Sequence
  Synthetic oligonucleotide; TGG chr11 5287412 5287431 5287415 -
gtctcactctgtcacccaaa

SEQ ID NO: 41455 - DNA, 20 bp, Artificial Sequence
  Synthetic oligonucleotide; GGG chr11 5287411 5287430 5287414 -
tctcactctgtcacccaaat

SEQ ID NO: 41456 - DNA, 20 bp, Artificial Sequence
  Synthetic oligonucleotide; GAG chr11 5287409 5287428 5287412 -
tcactctgtcacccaaatgg

SEQ ID NO: 41457 - DNA, 20 bp, Artificial Sequence
  Synthetic oligonucleotide; TAG chr11 5287404 5287423 5287407 -
ctgtcacccaaatgggagtg

SEQ ID NO: 41458 - DNA, 20 bp, Artificial Sequence
  Synthetic oligonucleotide; TGG chr11 5287401 5287420 5287404 -
tcacccaaatgggagtgtag

SEQ ID NO: 41459 - DNA, 20 bp, Artificial Sequence
  Synthetic oligonucleotide; CGG chr11 5287390 5287409 5287393 -
ggagtgtagtggcaaaatct

SEQ ID NO: 41460 - DNA, 20 bp, Artificial Sequence
  Synthetic oligonucleotide; CAG chr11 5287366 5287385 5287369 -
tcactgcaacttgcacttcc

SEQ ID NO: 41461 - DNA, 20 bp, Artificial Sequence
  Synthetic oligonucleotide; AGG chr11 5287365 5287384 5287368 -
cactgcaacttgcacttccc

SEQ ID NO: 41462 - DNA, 20 bp, Artificial Sequence
  Synthetic oligonucleotide; AAG chr11 5287359 5287378 5287362 -
aacttgcacttcccaggctc

SEQ ID NO: 41463 - DNA, 20 bp, Artificial Sequence
  Synthetic oligonucleotide; CGG chr11 5287356 5287375 5287359 -
ttgcacttcccaggctcaag

SEQ ID NO: 41464 - DNA, 20 bp, Artificial Sequence
  Synthetic oligonucleotide; GAG chr11 5287333 5287352 5287336 -
tcctcccacctcaacatcct

SEQ ID NO: 41465 - DNA, 20 bp, Artificial Sequence
  Synthetic oligonucleotide; TAG chr11 5287330 5287349 5287333 -
tcccacctcaacatcctgag

SEQ ID NO: 41466 - DNA, 20 bp, Artificial Sequence
  Synthetic oligonucleotide; TGG chr11 5287326 5287345 5287329 -
acctcaacatcctgagtagc

SEQ ID NO: 41467 - DNA, 20 bp, Artificial Sequence
  Synthetic oligonucleotide; CAG chr11 5287318 5287337 5287321 -
atcctgagtagctggaacca

SEQ ID NO: 41468 - DNA, 20 bp, Artificial Sequence
  Synthetic oligonucleotide; AGG chr11 5287317 5287336 5287320 -
tcctgagtagctggaaccac

SEQ ID NO: 41469 - DNA, 20 bp, Artificial Sequence
  Synthetic oligonucleotide; TGG chr11 5287278 5287297 5287281 -
tcgctaattttttgtatttt

SEQ ID NO: 41470 - DNA, 20 bp, Artificial Sequence
  Synthetic oligonucleotide; TAG chr11 5287275 5287294 5287278 -
ctaattttttgtatttttgg

SEQ ID NO: 41471 - DNA, 20 bp, Artificial Sequence
  Synthetic oligonucleotide; GAG chr11 5287273 5287292 5287276 -
aattttttgtatttttggta

SEQ ID NO: 41472 - DNA, 20 bp, Artificial Sequence
  Synthetic oligonucleotide; TGG chr11 5287269 5287288 5287272 -
ttttgtatttttggtagaga

SEQ ID NO: 41473 - DNA, 20 bp, Artificial Sequence
  Synthetic oligonucleotide; GGG chr11 5287268 5287287 5287271 -
tttgtatttttggtagagat

SEQ ID NO: 41474 - DNA, 20 bp, Artificial Sequence
  Synthetic oligonucleotide; GGG chr11 5287267 5287286 5287270 -
ttgtatttttggtagagatg

SEQ ID NO: 41475 - DNA, 20 bp, Artificial Sequence
  Synthetic oligonucleotide; CAG chr11 5287250 5287269 5287253 -
atggggtttcacatgttaca

SEQ ID NO: 41476 - DNA, 20 bp, Artificial Sequence
  Synthetic oligonucleotide; AGG chr11 5287249 5287268 5287252 -
tggggtttcacatgttacac

SEQ ID NO: 41477 - DNA, 20 bp, Artificial Sequence
  Synthetic oligonucleotide; TGG chr11 5287245 5287264 5287248 -
gtttcacatgttacacagga

SEQ ID NO: 41478 - DNA, 20 bp, Artificial Sequence
  Synthetic oligonucleotide; CAG chr11 5287239 5287258 5287242 -
catgttacacaggatggtct

SEQ ID NO: 41479 - DNA, 20 bp, Artificial Sequence
  Synthetic oligonucleotide; CGG chr11 5287232 5287251 5287235 -
cacaggatggtctcagactc

SEQ ID NO: 41480 - DNA, 20 bp, Artificial Sequence
  Synthetic oligonucleotide; GAG chr11 5287230 5287249 5287233 -
caggatggtctcagactccg

SEQ ID NO: 41481 - DNA, 20 bp, Artificial Sequence
  Synthetic oligonucleotide; AAG chr11 5287224 5287243 5287227 -
ggtctcagactccggagctc

SEQ ID NO: 41482 - DNA, 20 bp, Artificial Sequence
  Synthetic oligonucleotide; CAG chr11 5287207 5287226 5287210 -
ctcaagcaatctgcccacct

SEQ ID NO: 41483 - DNA, 20 bp, Artificial Sequence
  Synthetic oligonucleotide; AAG chr11 5287197 5287216 5287200 -
ctgcccacctcagccttcca

SEQ ID NO: 41484 - DNA, 20 bp, Artificial Sequence
  Synthetic oligonucleotide; TGG chr11 5287191 5287210 5287194 -
acctcagccttccaaagtgc

SEQ ID NO: 41485 - DNA, 20 bp, Artificial Sequence
  Synthetic oligonucleotide; GGG chr11 5287190 5287209 5287193 -
cctcagccttccaaagtgct

SEQ ID NO: 41486 - DNA, 20 bp, Artificial Sequence
  Synthetic oligonucleotide; AAG chr11 5287182 5287201 5287185 -
ttccaaagtgctgggattat

SEQ ID NO: 41487 - DNA, 20 bp, Artificial Sequence
  Synthetic oligonucleotide; CAG chr11 5287171 5287190 5287174 -
tgggattataagcatgatta

SEQ ID NO: 41488 - DNA, 20 bp, Artificial Sequence
  Synthetic oligonucleotide; AGG chr11 5287170 5287189 5287173 -
gggattataagcatgattac

SEQ ID NO: 41489 - DNA, 20 bp, Artificial Sequence
  Synthetic oligonucleotide; GAG chr11 5287168 5287187 5287171 -
gattataagcatgattacag

SEQ ID NO: 41490 - DNA, 20 bp, Artificial Sequence
  Synthetic oligonucleotide; CAG chr11 5287159 5287178 5287162 -
catgattacaggagttttaa

SEQ ID NO: 41491 - DNA, 20 bp, Artificial Sequence
  Synthetic oligonucleotide; AGG chr11 5287158 5287177 5287161 -
atgattacaggagttttaac

SEQ ID NO: 41492 - DNA, 20 bp, Artificial Sequence
  Synthetic oligonucleotide; AAG chr11 5287150 5287169 5287153 -
aggagttttaacaggctcat

SEQ ID NO: 41493 - DNA, 20 bp, Artificial Sequence
  Synthetic oligonucleotide; CAG chr11 5287138 5287157 5287141 -
aggctcataagattgttctg

SEQ ID NO: 41494 - DNA, 20 bp, Artificial Sequence
  Synthetic oligonucleotide; GAG chr11 5287132 5287151 5287135 -
ataagattgttctgcagccc

SEQ ID NO: 41495 - DNA, 20 bp, Artificial Sequence
  Synthetic oligonucleotide; GAG chr11 5287128 5287147 5287131 -
gattgttctgcagcccgagt

SEQ ID NO: 41496 - DNA, 20 bp, Artificial Sequence
  Synthetic oligonucleotide; AAG chr11 5287113 5287132 5287116 -
cgagtgagttaatacatgca

SEQ ID NO: 41497 - DNA, 20 bp, Artificial Sequence
  Synthetic oligonucleotide; GAG chr11 5287111 5287130 5287114 -
agtgagttaatacatgcaaa

SEQ ID NO: 41498 - DNA, 20 bp, Artificial Sequence
  Synthetic oligonucleotide; AAG chr11 5287104 5287123 5287107 -
taatacatgcaaagagttta

SEQ ID NO: 41499 - DNA, 20 bp, Artificial Sequence
  Synthetic oligonucleotide; CAG chr11 5287101 5287120 5287104 -
tacatgcaaagagtttaaag

SEQ ID NO: 41500 - DNA, 20 bp, Artificial Sequence
  Synthetic oligonucleotide; TAG chr11 5287075 5287094 5287078 -
cttataaatgctaactactc

SEQ ID NO: 41501 - DNA, 20 bp, Artificial Sequence
  Synthetic oligonucleotide; TAG chr11 5287062 5287081 5287065 -
actactctagaaatgtttgc

SEQ ID NO: 41502 - DNA, 20 bp, Artificial Sequence
  Synthetic oligonucleotide; CAG chr11 5287027 5287046 5287030 -
aactgcaatcattcttgctg

SEQ ID NO: 41503 - DNA, 20 bp, Artificial Sequence
  Synthetic oligonucleotide; AGG chr11 5287026 5287045 5287029 -
actgcaatcattcttgctgc

SEQ ID NO: 41504 - DNA, 20 bp, Artificial Sequence
  Synthetic oligonucleotide; TAG chr11 5287016 5287035 5287019 -
ttcttgctgcaggtgaaaac

SEQ ID NO: 41505 - DNA, 20 bp, Artificial Sequence
  Synthetic oligonucleotide; AAG chr11 5286951 5286970 5286954 -
aaaataactgacatttattg

SEQ ID NO: 41506 - DNA, 20 bp, Artificial Sequence
  Synthetic oligonucleotide; AGG chr11 5286950 5286969 5286953 -
aaataactgacatttattga

SEQ ID NO: 41507 - DNA, 20 bp, Artificial Sequence
  Synthetic oligonucleotide; CAG chr11 5286943 5286962 5286946 -
tgacatttattgaaggctat

SEQ ID NO: 41508 - DNA, 20 bp, Artificial Sequence
  Synthetic oligonucleotide; GAG chr11 5286941 5286960 5286944 -
acatttattgaaggctatca

SEQ ID NO: 41509 - DNA, 20 bp, Artificial Sequence
  Synthetic oligonucleotide; TAG chr11 5286930 5286949 5286933 -
aggctatcagagactgtaat

SEQ ID NO: 41510 - DNA, 20 bp, Artificial Sequence
  Synthetic oligonucleotide; TGG chr11 5286895 5286914 5286898 -
ttaatcatatttaatactct

SEQ ID NO: 41511 - DNA, 20 bp, Artificial Sequence
  Synthetic oligonucleotide; CAG chr11 5286885 5286904 5286888 -
ttaatactcttggattcttt

SEQ ID NO: 41512 - DNA, 20 bp, Artificial Sequence
  Synthetic oligonucleotide; AGG chr11 5286884 5286903 5286887 -
taatactcttggattctttc

SEQ ID NO: 41513 - DNA, 20 bp, Artificial Sequence
  Synthetic oligonucleotide; TAG chr11 5286881 5286900 5286884 -
tactcttggattctttcagg

SEQ ID NO: 41514 - DNA, 20 bp, Artificial Sequence
  Synthetic oligonucleotide; CAG chr11 5286852 5286871 5286855 -
ttattatccccattttacta

SEQ ID NO: 41515 - DNA, 20 bp, Artificial Sequence
  Synthetic oligonucleotide; AAG chr11 5286822 5286841 5286825 -
aactacctctcaacttgctc

SEQ ID NO: 41516 - DNA, 20 bp, Artificial Sequence
  Synthetic oligonucleotide; TAG chr11 5286787 5286806 5286790 -
cacacacaaacataaactac

SEQ ID NO: 41517 - DNA, 20 bp, Artificial Sequence
  Synthetic oligonucleotide; TAG chr11 5286780 5286799 5286783 -
aaacataaactactagcaaa

SEQ ID NO: 41518 - DNA, 20 bp, Artificial Sequence
  Synthetic oligonucleotide; TAG chr11 5286777 5286796 5286780 -
cataaactactagcaaatag

SEQ ID NO: 41519 - DNA, 20 bp, Artificial Sequence
  Synthetic oligonucleotide; GAG chr11 5286770 5286789 5286773 -
tactagcaaatagtagaatt

SEQ ID NO: 41520 - DNA, 20 bp, Artificial Sequence
  Synthetic oligonucleotide; TGG chr11 5286764 5286783 5286767 -
caaatagtagaattgagatt

SEQ ID NO: 41521 - DNA, 20 bp, Artificial Sequence
  Synthetic oligonucleotide; TGG chr11 5286707 5286726 5286710 -
atttattgacatgtacttct

SEQ ID NO: 41522 - DNA, 20 bp, Artificial Sequence
  Synthetic oligonucleotide; CAG chr11 5286704 5286723 5286707 -
tattgacatgtacttcttgg

SEQ ID NO: 41523 - DNA, 20 bp, Artificial Sequence
  Synthetic oligonucleotide; TGG chr11 5286692 5286711 5286695 -
cttcttggcagtctgtatgc

SEQ ID NO: 41524 - DNA, 20 bp, Artificial Sequence
  Synthetic oligonucleotide; TGG chr11 5286685 5286704 5286688 -
gcagtctgtatgctggatgc

SEQ ID NO: 41525 - DNA, 20 bp, Artificial Sequence
  Synthetic oligonucleotide; GGG chr11 5286684 5286703 5286687 -
cagtctgtatgctggatgct

SEQ ID NO: 41526 - DNA, 20 bp, Artificial Sequence
  Synthetic oligonucleotide; GGG chr11 5286683 5286702 5286686 -
agtctgtatgctggatgctg

SEQ ID NO: 41527 - DNA, 20 bp, Artificial Sequence
  Synthetic oligonucleotide; AAG chr11 5286675 5286694 5286678 -
tgctggatgctggggataca

SEQ ID NO: 41528 - DNA, 20 bp, Artificial Sequence
  Synthetic oligonucleotide; AAG chr11 5286660 5286679 5286663 -
atacaaagatgtttaaattt

SEQ ID NO: 41529 - DNA, 20 bp, Artificial Sequence
  Synthetic oligonucleotide; CAG chr11 5286654 5286673 5286657 -
agatgtttaaatttaagctc

SEQ ID NO: 41530 - DNA, 20 bp, Artificial Sequence
  Synthetic oligonucleotide; AAG chr11 5286639 5286658 5286642 -
agctccagtctctgcttcca

SEQ ID NO: 41531 - DNA, 20 bp, Artificial Sequence
  Synthetic oligonucleotide; AGG chr11 5286638 5286657 5286641 -
gctccagtctctgcttccaa

SEQ ID NO: 41532 - DNA, 20 bp, Artificial Sequence
  Synthetic oligonucleotide; CAG chr11 5286630 5286649 5286633 -
ctctgcttccaaaggcctcc

SEQ ID NO: 41533 - DNA, 20 bp, Artificial Sequence
  Synthetic oligonucleotide; AGG chr11 5286629 5286648 5286632 -
tctgcttccaaaggcctccc

SEQ ID NO: 41534 - DNA, 20 bp, Artificial Sequence
  Synthetic oligonucleotide; AAG chr11 5286624 5286643 5286627 -
ttccaaaggcctcccaggcc

SEQ ID NO: 41535 - DNA, 20 bp, Artificial Sequence
  Synthetic oligonucleotide; CAG chr11 5286612 5286631 5286615 -
cccaggccaagttatccatt

SEQ ID NO: 41536 - DNA, 20 bp, Artificial Sequence
  Synthetic oligonucleotide; AAG chr11 5286608 5286627 5286611 -
ggccaagttatccattcaga

SEQ ID NO: 41537 - DNA, 20 bp, Artificial Sequence
  Synthetic oligonucleotide; AAG chr11 5286571 5286590 5286574 -
tgcattccactgtttttcct

SEQ ID NO: 41538 - DNA, 20 bp, Artificial Sequence
  Synthetic oligonucleotide; TGG chr11 5286529 5286548 5286532 -
tattcgtctgtgtcctgctc

SEQ ID NO: 41539 - DNA, 20 bp, Artificial Sequence
  Synthetic oligonucleotide; GGG chr11 5286528 5286547 5286531 -
attcgtctgtgtcctgctct

SEQ ID NO: 41540 - DNA, 20 bp, Artificial Sequence
  Synthetic oligonucleotide; TAG chr11 5286521 5286540 5286524 -
tgtgtcctgctctgggatga

SEQ ID NO: 41541 - DNA, 20 bp, Artificial Sequence
  Synthetic oligonucleotide; GAG chr11 5286501 5286520 5286504 -
tagtctgactttcctaacct

SEQ ID NO: 41542 - DNA, 20 bp, Artificial Sequence
  Synthetic oligonucleotide; CAG chr11 5286481 5286500 5286484 -
gagcctaacatccctgacat

SEQ ID NO: 41543 - DNA, 20 bp, Artificial Sequence
  Synthetic oligonucleotide; AGG chr11 5286480 5286499 5286483 -
agcctaacatccctgacatc

SEQ ID NO: 41544 - DNA, 20 bp, Artificial Sequence
  Synthetic oligonucleotide; AAG chr11 5286476 5286495 5286479 -
taacatccctgacatcagga

SEQ ID NO: 41545 - DNA, 20 bp, Artificial Sequence
  Synthetic oligonucleotide; TGG chr11 5286462 5286481 5286465 -
tcaggaaagactacaccatg

SEQ ID NO: 41546 - DNA, 20 bp, Artificial Sequence
  Synthetic oligonucleotide; GAG chr11 5286460 5286479 5286463 -
aggaaagactacaccatgtg

SEQ ID NO: 41547 - DNA, 20 bp, Artificial Sequence
  Synthetic oligonucleotide; AAG chr11 5286457 5286476 5286460 -
aaagactacaccatgtggag

SEQ ID NO: 41548 - DNA, 20 bp, Artificial Sequence
  Synthetic oligonucleotide; AGG chr11 5286456 5286475 5286459 -
aagactacaccatgtggaga

SEQ ID NO: 41549 - DNA, 20 bp, Artificial Sequence
  Synthetic oligonucleotide; GGG chr11 5286455 5286474 5286458 -
agactacaccatgtggagaa

SEQ ID NO: 41550 - DNA, 20 bp, Artificial Sequence
  Synthetic oligonucleotide; GGG chr11 5286454 5286473 5286457 -
gactacaccatgtggagaag

SEQ ID NO: 41551 - DNA, 20 bp, Artificial Sequence
  Synthetic oligonucleotide; TGG chr11 5286451 5286470 5286454 -
tacaccatgtggagaagggg

SEQ ID NO: 41552 - DNA, 20 bp, Artificial Sequence
  Synthetic oligonucleotide; TGG chr11 5286448 5286467 5286451 -
accatgtggagaaggggtgg

SEQ ID NO: 41553 - DNA, 20 bp, Artificial Sequence
  Synthetic oligonucleotide; CAG chr11 5286426 5286445 5286429 -
gttttgattgctgctgtctt

SEQ ID NO: 41554 - DNA, 20 bp, Artificial Sequence
  Synthetic oligonucleotide; TAG chr11 5286422 5286441 5286425 -
tgattgctgctgtcttcagt

SEQ ID NO: 41555 - DNA, 20 bp, Artificial Sequence
  Synthetic oligonucleotide; TGG chr11 5286418 5286437 5286421 -
tgctgctgtcttcagttaga

SEQ ID NO: 41556 - DNA, 20 bp, Artificial Sequence
  Synthetic oligonucleotide; AAG chr11 5286404 5286423 5286407 -
gttagatggttaactttgtg

SEQ ID NO: 41557 - DNA, 20 bp, Artificial Sequence
  Synthetic oligonucleotide; TGG chr11 5286391 5286410 5286394 -
ctttgtgaagttgaaaactg

SEQ ID NO: 41558 - DNA, 20 bp, Artificial Sequence
  Synthetic oligonucleotide; TGG chr11 5286383 5286402 5286386 -
agttgaaaactgtggctctc

SEQ ID NO: 41559 - DNA, 20 bp, Artificial Sequence
  Synthetic oligonucleotide; TAG chr11 5286372 5286391 5286375 -
gtggctctctggttgactgt

SEQ ID NO: 41560 - DNA, 20 bp, Artificial Sequence
  Synthetic oligonucleotide; GAG chr11 5286370 5286389 5286373 -
ggctctctggttgactgtta

SEQ ID NO: 41561 - DNA, 20 bp, Artificial Sequence
  Synthetic oligonucleotide; TGG chr11 5286364 5286383 5286367 -
ctggttgactgttagagttc

SEQ ID NO: 41562 - DNA, 20 bp, Artificial Sequence
  Synthetic oligonucleotide; CAG chr11 5286318 5286337 5286321 -
taacaaatgcatgaatgctt

SEQ ID NO: 41563 - DNA, 20 bp, Artificial Sequence
  Synthetic oligonucleotide; TGG chr11 5286311 5286330 5286314 -
tgcatgaatgcttcagaata

SEQ ID NO: 41564 - DNA, 20 bp, Artificial Sequence
  Synthetic oligonucleotide; GGG chr11 5286310 5286329 5286313 -
gcatgaatgcttcagaatat

SEQ ID NO: 41565 - DNA, 20 bp, Artificial Sequence
  Synthetic oligonucleotide; TGG chr11 5286295 5286314 5286298 -
aatatgggaatattatcttc

SEQ ID NO: 41566 - DNA, 20 bp, Artificial Sequence
  Synthetic oligonucleotide; TAG chr11 5286290 5286309 5286293 -
gggaatattatcttctggaa

SEQ ID NO: 41567 - DNA, 20 bp, Artificial Sequence
  Synthetic oligonucleotide; AGG chr11 5286289 5286308 5286292 -
ggaatattatcttctggaat

SEQ ID NO: 41568 - DNA, 20 bp, Artificial Sequence
  Synthetic oligonucleotide; GGG chr11 5286288 5286307 5286291 -
gaatattatcttctggaata

SEQ ID NO: 41569 - DNA, 20 bp, Artificial Sequence
  Synthetic oligonucleotide; AAG chr11 5286281 5286300 5286284 -
atcttctggaatagggaatc

SEQ ID NO: 41570 - DNA, 20 bp, Artificial Sequence
  Synthetic oligonucleotide; CAG chr11 5286263 5286282 5286266 -
tcaagttatattatgtaacc

SEQ ID NO: 41571 - DNA, 20 bp, Artificial Sequence
  Synthetic oligonucleotide; AGG chr11 5286262 5286281 5286265 -
caagttatattatgtaaccc

SEQ ID NO: 41572 - DNA, 20 bp, Artificial Sequence
  Synthetic oligonucleotide; TAG chr11 5286257 5286276 5286260 -
tatattatgtaacccaggat

SEQ ID NO: 41573 - DNA, 20 bp, Artificial Sequence
  Synthetic oligonucleotide; AAG chr11 5286254 5286273 5286257 -
attatgtaacccaggattag

SEQ ID NO: 41574 - DNA, 20 bp, Artificial Sequence
  Synthetic oligonucleotide; AAG chr11 5286237 5286256 5286240 -
tagaagattcttctgtgtgt

SEQ ID NO: 41575 - DNA, 20 bp, Artificial Sequence
  Synthetic oligonucleotide; AAG chr11 5286219 5286238 5286222 -
gtaagaatttcataaacatt

SEQ ID NO: 41576 - DNA, 20 bp, Artificial Sequence
  Synthetic oligonucleotide; TAG chr11 5286211 5286230 5286214 -
ttcataaacattaagctgtc

SEQ ID NO: 41577 - DNA, 20 bp, Artificial Sequence
  Synthetic oligonucleotide; AAG chr11 5286205 5286224 5286208 -
aacattaagctgtctagcaa

SEQ ID NO: 41578 - DNA, 20 bp, Artificial Sequence
  Synthetic oligonucleotide; AAG chr11 5286201 5286220 5286204 -
ttaagctgtctagcaaaagc

SEQ ID NO: 41579 - DNA, 20 bp, Artificial Sequence
  Synthetic oligonucleotide; AGG chr11 5286200 5286219 5286203 -
taagctgtctagcaaaagca

SEQ ID NO: 41580 - DNA, 20 bp, Artificial Sequence
  Synthetic oligonucleotide; GGG chr11 5286199 5286218 5286202 -
aagctgtctagcaaaagcaa

SEQ ID NO: 41581 - DNA, 20 bp, Artificial Sequence
  Synthetic oligonucleotide; TGG chr11 5286194 5286213 5286197 -
gtctagcaaaagcaagggct

SEQ ID NO: 41582 - DNA, 20 bp, Artificial Sequence
  Synthetic oligonucleotide; GAG chr11 5286182 5286201 5286185 -
caagggcttggaaaatctgt

SEQ ID NO: 41583 - DNA, 20 bp, Artificial Sequence
  Synthetic oligonucleotide; TAG chr11 5286167 5286186 5286170 -
tctgtgagctcctcaccata

SEQ ID NO: 41584 - DNA, 20 bp, Artificial Sequence
  Synthetic oligonucleotide; AAG chr11 5286163 5286182 5286166 -
tgagctcctcaccatataga

SEQ ID NO: 41585 - DNA, 20 bp, Artificial Sequence
  Synthetic oligonucleotide; TAG chr11 5286131 5286150 5286134 -
catcattgaataaatcccta

SEQ ID NO: 41586 - DNA, 20 bp, Artificial Sequence
  Synthetic oligonucleotide; AGG chr11 5286130 5286149 5286133 -
atcattgaataaatccctat

SEQ ID NO: 41587 - DNA, 20 bp, Artificial Sequence
  Synthetic oligonucleotide; GGG chr11 5286129 5286148 5286132 -
tcattgaataaatccctata

SEQ ID NO: 41588 - DNA, 20 bp, Artificial Sequence
  Synthetic oligonucleotide; GGG chr11 5286128 5286147 5286131 -
cattgaataaatccctatag

SEQ ID NO: 41589 - DNA, 20 bp, Artificial Sequence
  Synthetic oligonucleotide; GAG chr11 5286114 5286133 5286117 -
ctataggggatttctaccct

SEQ ID NO: 41590 - DNA, 20 bp, Artificial Sequence
  Synthetic oligonucleotide; AAG chr11 5286108 5286127 5286111 -
gggatttctaccctgagcaa

SEQ ID NO: 41591 - DNA, 20 bp, Artificial Sequence
  Synthetic oligonucleotide; AGG chr11 5286107 5286126 5286110 -
ggatttctaccctgagcaaa

SEQ ID NO: 41592 - DNA, 20 bp, Artificial Sequence
  Synthetic oligonucleotide; TGG chr11 5286103 5286122 5286106 -
ttctaccctgagcaaaaggc

SEQ ID NO: 41593 - DNA, 20 bp, Artificial Sequence
  Synthetic oligonucleotide; TAG chr11 5286076 5286095 5286079 -
gattaattcccaaactcata

SEQ ID NO: 41594 - DNA, 20 bp, Artificial Sequence
  Synthetic oligonucleotide; GAG chr11 5286069 5286088 5286072 -
tcccaaactcatatagctct

SEQ ID NO: 41595 - DNA, 20 bp, Artificial Sequence
  Synthetic oligonucleotide; AAG chr11 5286065 5286084 5286068 -
aaactcatatagctctgaga

SEQ ID NO: 41596 - DNA, 20 bp, Artificial Sequence
  Synthetic oligonucleotide; CAG chr11 5286006 5286025 5286009 -
catatgcacaacaataaatg

SEQ ID NO: 41597 - DNA, 20 bp, Artificial Sequence
  Synthetic oligonucleotide; AGG chr11 5286005 5286024 5286008 -
atatgcacaacaataaatgc

SEQ ID NO: 41598 - DNA, 20 bp, Artificial Sequence
  Synthetic oligonucleotide; TAG chr11 5286000 5286019 5286003 -
cacaacaataaatgcaggcc

SEQ ID NO: 41599 - DNA, 20 bp, Artificial Sequence
  Synthetic oligonucleotide; AGG chr11 5285999 5286018 5286002 -
acaacaataaatgcaggcct

SEQ ID NO: 41600 - DNA, 20 bp, Artificial Sequence
  Synthetic oligonucleotide; AAG chr11 5285988 5286007 5285991 -
tgcaggcctaggcatgactg

SEQ ID NO: 41601 - DNA, 20 bp, Artificial Sequence
  Synthetic oligonucleotide; AGG chr11 5285987 5286006 5285990 -
gcaggcctaggcatgactga

SEQ ID NO: 41602 - DNA, 20 bp, Artificial Sequence
  Synthetic oligonucleotide; TGG chr11 5285969 5285988 5285972 -
gaaggctctctcataattct

SEQ ID NO: 41603 - DNA, 20 bp, Artificial Sequence
  Synthetic oligonucleotide; CAG chr11 5285956 5285975 5285959 -
taattcttggttgcatgaat

SEQ ID NO: 41604 - DNA, 20 bp, Artificial Sequence
  Synthetic oligonucleotide; CAG chr11 5285945 5285964 5285948 -
tgcatgaatcagattatcaa

SEQ ID NO: 41605 - DNA, 20 bp, Artificial Sequence
  Synthetic oligonucleotide; GAG chr11 5285935 5285954 5285938 -
agattatcaacagaaatgtt

SEQ ID NO: 41606 - DNA, 20 bp, Artificial Sequence
  Synthetic oligonucleotide; TGG chr11 5285924 5285943 5285927 -
agaaatgttgagacaaacta

SEQ ID NO: 41607 - DNA, 20 bp, Artificial Sequence
  Synthetic oligonucleotide; GGG chr11 5285923 5285942 5285926 -
gaaatgttgagacaaactat

SEQ ID NO: 41608 - DNA, 20 bp, Artificial Sequence
  Synthetic oligonucleotide; GGG chr11 5285922 5285941 5285925 -
aaatgttgagacaaactatg

SEQ ID NO: 41609 - DNA, 20 bp, Artificial Sequence
  Synthetic oligonucleotide; AAG chr11 5285919 5285938 5285922 -
tgttgagacaaactatgggg

SEQ ID NO: 41610 - DNA, 20 bp, Artificial Sequence
  Synthetic oligonucleotide; CAG chr11 5285916 5285935 5285919 -
tgagacaaactatggggaag

SEQ ID NO: 41611 - DNA, 20 bp, Artificial Sequence
  Synthetic oligonucleotide; AGG chr11 5285915 5285934 5285918 -
gagacaaactatggggaagc

SEQ ID NO: 41612 - DNA, 20 bp, Artificial Sequence
  Synthetic oligonucleotide; GGG chr11 5285914 5285933 5285917 -
agacaaactatggggaagca

SEQ ID NO: 41613 - DNA, 20 bp, Artificial Sequence
  Synthetic oligonucleotide; AAG chr11 5285906 5285925 5285909 -
tatggggaagcagggtatga

SEQ ID NO: 41614 - DNA, 20 bp, Artificial Sequence
  Synthetic oligonucleotide; GAG chr11 5285904 5285923 5285907 -
tggggaagcagggtatgaaa

SEQ ID NO: 41615 - DNA, 20 bp, Artificial Sequence
  Synthetic oligonucleotide; TGG chr11 5285889 5285908 5285892 -
tgaaagagctctgaatgaaa

SEQ ID NO: 41616 - DNA, 20 bp, Artificial Sequence
  Synthetic oligonucleotide; CAG chr11 5285862 5285881 5285865 -
cgcaatgcttcctgcccatt

SEQ ID NO: 41617 - DNA, 20 bp, Artificial Sequence
  Synthetic oligonucleotide; AGG chr11 5285861 5285880 5285864 -
gcaatgcttcctgcccattc

SEQ ID NO: 41618 - DNA, 20 bp, Artificial Sequence
  Synthetic oligonucleotide; GGG chr11 5285860 5285879 5285863 -
caatgcttcctgcccattca

SEQ ID NO: 41619 - DNA, 20 bp, Artificial Sequence
  Synthetic oligonucleotide; CAG chr11 5285854 5285873 5285857 -
ttcctgcccattcagggctc

SEQ ID NO: 41620 - DNA, 20 bp, Artificial Sequence
  Synthetic oligonucleotide; TAG chr11 5285847 5285866 5285850 -
ccattcagggctccagcatg

SEQ ID NO: 41621 - DNA, 20 bp, Artificial Sequence
  Synthetic oligonucleotide; TGG chr11 5285839 5285858 5285842 -
ggctccagcatgtagaaatc

SEQ ID NO: 41622 - DNA, 20 bp, Artificial Sequence
  Synthetic oligonucleotide; GGG chr11 5285838 5285857 5285841 -
gctccagcatgtagaaatct

SEQ ID NO: 41623 - DNA, 20 bp, Artificial Sequence
  Synthetic oligonucleotide; GGG chr11 5285837 5285856 5285840 -
ctccagcatgtagaaatctg

SEQ ID NO: 41624 - DNA, 20 bp, Artificial Sequence
  Synthetic oligonucleotide; AAG chr11 5285827 5285846 5285830 -
tagaaatctggggctttgtg

SEQ ID NO: 41625 - DNA, 20 bp, Artificial Sequence
  Synthetic oligonucleotide; TGG chr11 5285822 5285841 5285825 -
atctggggctttgtgaagac

SEQ ID NO: 41626 - DNA, 20 bp, Artificial Sequence
  Synthetic oligonucleotide; CAG chr11 5285811 5285830 5285814 -
tgtgaagactggcttaaaat

SEQ ID NO: 41627 - DNA, 20 bp, Artificial Sequence
  Synthetic oligonucleotide; AAG chr11 5285808 5285827 5285811 -
gaagactggcttaaaatcag

SEQ ID NO: 41628 - DNA, 20 bp, Artificial Sequence
  Synthetic oligonucleotide; TGG chr11 5285799 5285818 5285802 -
cttaaaatcagaagccccat

SEQ ID NO: 41629 - DNA, 20 bp, Artificial Sequence
  Synthetic oligonucleotide; AAG chr11 5285794 5285813 5285797 -
aatcagaagccccattggat

SEQ ID NO: 41630 - DNA, 20 bp, Artificial Sequence
  Synthetic oligonucleotide; GAG chr11 5285792 5285811 5285795 -
tcagaagccccattggataa

SEQ ID NO: 41631 - DNA, 20 bp, Artificial Sequence
  Synthetic oligonucleotide; TAG chr11 5285789 5285808 5285792 -
gaagccccattggataagag

SEQ ID NO: 41632 - DNA, 20 bp, Artificial Sequence
  Synthetic oligonucleotide; AGG chr11 5285788 5285807 5285791 -
aagccccattggataagagt

SEQ ID NO: 41633 - DNA, 20 bp, Artificial Sequence
  Synthetic oligonucleotide; GGG chr11 5285787 5285806 5285790 -
agccccattggataagagta

SEQ ID NO: 41634 - DNA, 20 bp, Artificial Sequence
  Synthetic oligonucleotide; AAG chr11 5285784 5285803 5285787 -
cccattggataagagtaggg

SEQ ID NO: 41635 - DNA, 20 bp, Artificial Sequence
  Synthetic oligonucleotide; TAG chr11 5285777 5285796 5285780 -
gataagagtagggaagaacc

SEQ ID NO: 41636 - DNA, 20 bp, Artificial Sequence
  Synthetic oligonucleotide; GAG chr11 5285775 5285794 5285778 -
taagagtagggaagaaccta

SEQ ID NO: 41637 - DNA, 20 bp, Artificial Sequence
  Synthetic oligonucleotide; GAG chr11 5285764 5285783 5285767 -
aagaacctagagcctacgct

SEQ ID NO: 41638 - DNA, 20 bp, Artificial Sequence
  Synthetic oligonucleotide; CAG chr11 5285761 5285780 5285764 -
aacctagagcctacgctgag

SEQ ID NO: 41639 - DNA, 20 bp, Artificial Sequence
  Synthetic oligonucleotide; AGG chr11 5285760 5285779 5285763 -
acctagagcctacgctgagc

SEQ ID NO: 41640 - DNA, 20 bp, Artificial Sequence
  Synthetic oligonucleotide; CAG chr11 5285743 5285762 5285746 -
agcaggtttccttcatgtga

SEQ ID NO: 41641 - DNA, 20 bp, Artificial Sequence
  Synthetic oligonucleotide; AGG chr11 5285742 5285761 5285745 -
gcaggtttccttcatgtgac

SEQ ID NO: 41642 - DNA, 20 bp, Artificial Sequence
  Synthetic oligonucleotide; GGG chr11 5285741 5285760 5285744 -
caggtttccttcatgtgaca

SEQ ID NO: 41643 - DNA, 20 bp, Artificial Sequence
  Synthetic oligonucleotide; GAG chr11 5285739 5285758 5285742 -
ggtttccttcatgtgacagg

SEQ ID NO: 41644 - DNA, 20 bp, Artificial Sequence
  Synthetic oligonucleotide; CAG chr11 5285718 5285737 5285721 -
agcctcctgccccgaacttc

SEQ ID NO: 41645 - DNA, 20 bp, Artificial Sequence
  Synthetic oligonucleotide; AGG chr11 5285717 5285736 5285720 -
gcctcctgccccgaacttcc

SEQ ID NO: 41646 - DNA, 20 bp, Artificial Sequence
  Synthetic oligonucleotide; GGG chr11 5285716 5285735 5285719 -
cctcctgccccgaacttcca

SEQ ID NO: 41647 - DNA, 20 bp, Artificial Sequence
  Synthetic oligonucleotide; AAG chr11 5285703 5285722 5285706 -
acttccagggatcctctctt

SEQ ID NO: 41648 - DNA, 20 bp, Artificial Sequence
  Synthetic oligonucleotide; TGG chr11 5285690 5285709 5285693 -
ctctcttaagtgtttcctgc

SEQ ID NO: 41649 - DNA, 20 bp, Artificial Sequence
  Synthetic oligonucleotide; TGG chr11 5285669 5285688 5285672 -
ggaatctcctcacttctatc

SEQ ID NO: 41650 - DNA, 20 bp, Artificial Sequence
  Synthetic oligonucleotide; TGG chr11 5285663 5285682 5285666 -
tcctcacttctatctggaaa

SEQ ID NO: 41651 - DNA, 20 bp, Artificial Sequence
  Synthetic oligonucleotide; CAG chr11 5285652 5285671 5285655 -
atctggaaatggtttctcca

SEQ ID NO: 41652 - DNA, 20 bp, Artificial Sequence
  Synthetic oligonucleotide; CAG chr11 5285647 5285666 5285650 -
gaaatggtttctccacagtc

SEQ ID NO: 41653 - DNA, 20 bp, Artificial Sequence
  Synthetic oligonucleotide; TGG chr11 5285640 5285659 5285643 -
tttctccacagtccagcccc

SEQ ID NO: 41654 - DNA, 20 bp, Artificial Sequence
  Synthetic oligonucleotide; TAG chr11 5285636 5285655 5285639 -
tccacagtccagcccctggc

SEQ ID NO: 41655 - DNA, 20 bp, Artificial Sequence
  Synthetic oligonucleotide; AAG chr11 5285629 5285648 5285632 -
tccagcccctggctagttga

SEQ ID NO: 41656 - DNA, 20 bp, Artificial Sequence
  Synthetic oligonucleotide; GAG chr11 5285627 5285646 5285630 -
cagcccctggctagttgaaa

SEQ ID NO: 41657 - DNA, 20 bp, Artificial Sequence
  Synthetic oligonucleotide; CAG chr11 5285615 5285634 5285618 -
agttgaaagagttacccatg

SEQ ID NO: 41658 - DNA, 20 bp, Artificial Sequence
  Synthetic oligonucleotide; GAG chr11 5285613 5285632 5285616 -
ttgaaagagttacccatgca

SEQ ID NO: 41659 - DNA, 20 bp, Artificial Sequence
  Synthetic oligonucleotide; AGG chr11 5285612 5285631 5285615 -
tgaaagagttacccatgcag

SEQ ID NO: 41660 - DNA, 20 bp, Artificial Sequence
  Synthetic oligonucleotide; TAG chr11 5285603 5285622 5285606 -
tacccatgcagaggccctcc

SEQ ID NO: 41661 - DNA, 20 bp, Artificial Sequence
  Synthetic oligonucleotide; CAG chr11 5285596 5285615 5285599 -
gcagaggccctcctagcatc

SEQ ID NO: 41662 - DNA, 20 bp, Artificial Sequence
  Synthetic oligonucleotide; GAG chr11 5285594 5285613 5285597 -
agaggccctcctagcatcca

SEQ ID NO: 41663 - DNA, 20 bp, Artificial Sequence
  Synthetic oligonucleotide; TAG chr11 5285589 5285608 5285592 -
ccctcctagcatccagagac

SEQ ID NO: 41664 - DNA, 20 bp, Artificial Sequence
  Synthetic oligonucleotide; TAG chr11 5285582 5285601 5285585 -
agcatccagagactagtgct

SEQ ID NO: 41665 - DNA, 20 bp, Artificial Sequence
  Synthetic oligonucleotide; CAG chr11 5285568 5285587 5285571 -
agtgcttagattcctacttt

SEQ ID NO: 41666 - DNA, 20 bp, Artificial Sequence
  Synthetic oligonucleotide; TGG chr11 5285562 5285581 5285565 -
tagattcctactttcagcgt

SEQ ID NO: 41667 - DNA, 20 bp, Artificial Sequence
  Synthetic oligonucleotide; TGG chr11 5285553 5285572 5285556 -
actttcagcgttggacaacc

SEQ ID NO: 41668 - DNA, 20 bp, Artificial Sequence
  Synthetic oligonucleotide; CAG chr11 5285539 5285558 5285542 -
acaacctggatccacttgcc

SEQ ID NO: 41669 - DNA, 20 bp, Artificial Sequence
  Synthetic oligonucleotide; TAG chr11 5285526 5285545 5285529 -
acttgcccagtgttcttcct

SEQ ID NO: 41670 - DNA, 20 bp, Artificial Sequence
  Synthetic oligonucleotide; GAG chr11 5285477 5285496 5285480 -
ttatcttcctgaaccctgct

SEQ ID NO: 41671 - DNA, 20 bp, Artificial Sequence
  Synthetic oligonucleotide; TGG chr11 5285464 5285483 5285467 -
ccctgctgagatgatctatg

SEQ ID NO: 41672 - DNA, 20 bp, Artificial Sequence
  Synthetic oligonucleotide; GGG chr11 5285463 5285482 5285466 -
cctgctgagatgatctatgt

SEQ ID NO: 41673 - DNA, 20 bp, Artificial Sequence
  Synthetic oligonucleotide; GGG chr11 5285462 5285481 5285465 -
ctgctgagatgatctatgtg

SEQ ID NO: 41674 - DNA, 20 bp, Artificial Sequence
  Synthetic oligonucleotide; GAG chr11 5285460 5285479 5285463 -
gctgagatgatctatgtggg

SEQ ID NO: 41675 - DNA, 20 bp, Artificial Sequence
  Synthetic oligonucleotide; TGG chr11 5285455 5285474 5285458 -
gatgatctatgtggggagaa

SEQ ID NO: 41676 - DNA, 20 bp, Artificial Sequence
  Synthetic oligonucleotide; GAG chr11 5285445 5285464 5285448 -
gtggggagaatggcttcttt

SEQ ID NO: 41677 - DNA, 20 bp, Artificial Sequence
  Synthetic oligonucleotide; TAG chr11 5285427 5285446 5285430 -
ttgagaaacatcttcttcgt

SEQ ID NO: 41678 - DNA, 20 bp, Artificial Sequence
  Synthetic oligonucleotide; TGG chr11 5285424 5285443 5285427 -
agaaacatcttcttcgttag

SEQ ID NO: 41679 - DNA, 20 bp, Artificial Sequence
  Synthetic oligonucleotide; CAG chr11 5285394 5285413 5285397 -
ctcattcccactttaatatc

SEQ ID NO: 41680 - DNA, 20 bp, Artificial Sequence
  Synthetic oligonucleotide; AAG chr11 5285382 5285401 5285385 -
ttaatatccagaatcactat

SEQ ID NO: 41681 - DNA, 20 bp, Artificial Sequence
  Synthetic oligonucleotide; AAG chr11 5285379 5285398 5285382 -
atatccagaatcactataag

SEQ ID NO: 41682 - DNA, 20 bp, Artificial Sequence
  Synthetic oligonucleotide; AAG chr11 5285368 5285387 5285371 -
cactataagaagaatataat

SEQ ID NO: 41683 - DNA, 20 bp, Artificial Sequence
  Synthetic oligonucleotide; GAG chr11 5285366 5285385 5285369 -
ctataagaagaatataataa

SEQ ID NO: 41684 - DNA, 20 bp, Artificial Sequence
  Synthetic oligonucleotide; AGG chr11 5285365 5285384 5285368 -
tataagaagaatataataag

SEQ ID NO: 41685 - DNA, 20 bp, Artificial Sequence
  Synthetic oligonucleotide; TAG chr11 5285348 5285367 5285351 -
aagaggaataactcttatta

SEQ ID NO: 41686 - DNA, 20 bp, Artificial Sequence
  Synthetic oligonucleotide; AGG chr11 5285347 5285366 5285350 -
agaggaataactcttattat

SEQ ID NO: 41687 - DNA, 20 bp, Artificial Sequence
  Synthetic oligonucleotide; AAG chr11 5285343 5285362 5285346 -
gaataactcttattataggt

SEQ ID NO: 41688 - DNA, 20 bp, Artificial Sequence
  Synthetic oligonucleotide; AGG chr11 5285342 5285361 5285345 -
aataactcttattataggta

SEQ ID NO: 41689 - DNA, 20 bp, Artificial Sequence
  Synthetic oligonucleotide; GGG chr11 5285341 5285360 5285344 -
ataactcttattataggtaa

SEQ ID NO: 41690 - DNA, 20 bp, Artificial Sequence
  Synthetic oligonucleotide; AAG chr11 5285332 5285351 5285335 -
attataggtaagggaaaatt

SEQ ID NO: 41691 - DNA, 20 bp, Artificial Sequence
  Synthetic oligonucleotide; GAG chr11 5285330 5285349 5285333 -
tataggtaagggaaaattaa

SEQ ID NO: 41692 - DNA, 20 bp, Artificial Sequence
  Synthetic oligonucleotide; AGG chr11 5285329 5285348 5285332 -
ataggtaagggaaaattaag

SEQ ID NO: 41693 - DNA, 20 bp, Artificial Sequence
  Synthetic oligonucleotide; TGG chr11 5285317 5285336 5285320 -
aaattaagaggcatacgtga

SEQ ID NO: 41694 - DNA, 20 bp, Artificial Sequence
  Synthetic oligonucleotide; GGG chr11 5285316 5285335 5285319 -
aattaagaggcatacgtgat

SEQ ID NO: 41695 - DNA, 20 bp, Artificial Sequence
  Synthetic oligonucleotide; GAG chr11 5285311 5285330 5285314 -
agaggcatacgtgatgggat

SEQ ID NO: 41696 - DNA, 20 bp, Artificial Sequence
  Synthetic oligonucleotide; AAG chr11 5285307 5285326 5285310 -
gcatacgtgatgggatgagt

SEQ ID NO: 41697 - DNA, 20 bp, Artificial Sequence
  Synthetic oligonucleotide; GAG chr11 5285305 5285324 5285308 -
atacgtgatgggatgagtaa

SEQ ID NO: 41698 - DNA, 20 bp, Artificial Sequence
  Synthetic oligonucleotide; GAG chr11 5285303 5285322 5285306 -
acgtgatgggatgagtaaga

SEQ ID NO: 41699 - DNA, 20 bp, Artificial Sequence
  Synthetic oligonucleotide; AGG chr11 5285302 5285321 5285305 -
cgtgatgggatgagtaagag

SEQ ID NO: 41700 - DNA, 20 bp, Artificial Sequence
  Synthetic oligonucleotide; GAG chr11 5285300 5285319 5285303 -
tgatgggatgagtaagagag

SEQ ID NO: 41701 - DNA, 20 bp, Artificial Sequence
  Synthetic oligonucleotide; GAG chr11 5285298 5285317 5285301 -
atgggatgagtaagagagga

SEQ ID NO: 41702 - DNA, 20 bp, Artificial Sequence
  Synthetic oligonucleotide; AGG chr11 5285297 5285316 5285300 -
tgggatgagtaagagaggag

SEQ ID NO: 41703 - DNA, 20 bp, Artificial Sequence
  Synthetic oligonucleotide; GGG chr11 5285296 5285315 5285299 -
gggatgagtaagagaggaga

SEQ ID NO: 41704 - DNA, 20 bp, Artificial Sequence
  Synthetic oligonucleotide; AAG chr11 5285293 5285312 5285296 -
atgagtaagagaggagaggg

SEQ ID NO: 41705 - DNA, 20 bp, Artificial Sequence
  Synthetic oligonucleotide; AGG chr11 5285292 5285311 5285295 -
tgagtaagagaggagaggga

SEQ ID NO: 41706 - DNA, 20 bp, Artificial Sequence
  Synthetic oligonucleotide; TGG chr11 5285284 5285303 5285287 -
agaggagagggaaggattaa

SEQ ID NO: 41707 - DNA, 20 bp, Artificial Sequence
  Synthetic oligonucleotide; GAG chr11 5285256 5285275 5285259 -
aaaatctactactatttgtt

SEQ ID NO: 41708 - DNA, 20 bp, Artificial Sequence
  Synthetic oligonucleotide; TAG chr11 5285245 5285264 5285248 -
ctatttgttgagacctttta

SEQ ID NO: 41709 - DNA, 20 bp, Artificial Sequence
  Synthetic oligonucleotide; AAG chr11 5285161 5285180 5285164 -
tatctttattttgccatgac

SEQ ID NO: 41710 - DNA, 20 bp, Artificial Sequence
  Synthetic oligonucleotide; GAG chr11 5285155 5285174 5285158 -
tattttgccatgacaagact

SEQ ID NO: 41711 - DNA, 20 bp, Artificial Sequence
  Synthetic oligonucleotide; CAG chr11 5285150 5285169 5285153 -
tgccatgacaagactgagct

SEQ ID NO: 41712 - DNA, 20 bp, Artificial Sequence
  Synthetic oligonucleotide; AAG chr11 5285147 5285166 5285150 -
catgacaagactgagctcag

SEQ ID NO: 41713 - DNA, 20 bp, Artificial Sequence
  Synthetic oligonucleotide; GAG chr11 5285145 5285164 5285148 -
tgacaagactgagctcagaa

SEQ ID NO: 41714 - DNA, 20 bp, Artificial Sequence
  Synthetic oligonucleotide; AAG chr11 5285140 5285159 5285143 -
agactgagctcagaagagtc

SEQ ID NO: 41715 - DNA, 20 bp, Artificial Sequence
  Synthetic oligonucleotide; AAG chr11 5285128 5285147 5285131 -
gaagagtcaagcatttgcct

SEQ ID NO: 41716 - DNA, 20 bp, Artificial Sequence
  Synthetic oligonucleotide; AGG chr11 5285127 5285146 5285130 -
aagagtcaagcatttgccta

SEQ ID NO: 41717 - DNA, 20 bp, Artificial Sequence
  Synthetic oligonucleotide; CGG chr11 5285123 5285142 5285126 -
gtcaagcatttgcctaaggt

SEQ ID NO: 41718 - DNA, 20 bp, Artificial Sequence
  Synthetic oligonucleotide; CAG chr11 5285114 5285133 5285117 -
ttgcctaaggtcggacatgt

SEQ ID NO: 41719 - DNA, 20 bp, Artificial Sequence
  Synthetic oligonucleotide; GAG chr11 5285112 5285131 5285115 -
gcctaaggtcggacatgtca

SEQ ID NO: 41720 - DNA, 20 bp, Artificial Sequence
  Synthetic oligonucleotide; AGG chr11 5285111 5285130 5285114 -
cctaaggtcggacatgtcag

SEQ ID NO: 41721 - DNA, 20 bp, Artificial Sequence
  Synthetic oligonucleotide; CAG chr11 5285108 5285127 5285111 -
aaggtcggacatgtcagagg

SEQ ID NO: 41722 - DNA, 20 bp, Artificial Sequence
  Synthetic oligonucleotide; CAG chr11 5285102 5285121 5285105 -
ggacatgtcagaggcagtgc

SEQ ID NO: 41723 - DNA, 20 bp, Artificial Sequence
  Synthetic oligonucleotide; GAG chr11 5285091 5285110 5285094 -
aggcagtgccagacctatgt

SEQ ID NO: 41724 - DNA, 20 bp, Artificial Sequence
  Synthetic oligonucleotide; CAG chr11 5285082 5285101 5285085 -
cagacctatgtgagactctg

SEQ ID NO: 41725 - DNA, 20 bp, Artificial Sequence
  Synthetic oligonucleotide; TGG chr11 5285069 5285088 5285072 -
gactctgcagctactgctca

SEQ ID NO: 41726 - DNA, 20 bp, Artificial Sequence
  Synthetic oligonucleotide; GGG chr11 5285068 5285087 5285071 -
actctgcagctactgctcat

SEQ ID NO: 41727 - DNA, 20 bp, Artificial Sequence
  Synthetic oligonucleotide; GAG chr11 5285048 5285067 5285051 -
gggccctgtgctgcactgat

SEQ ID NO: 41728 - DNA, 20 bp, Artificial Sequence
  Synthetic oligonucleotide; AGG chr11 5285047 5285066 5285050 -
ggccctgtgctgcactgatg

SEQ ID NO: 41729 - DNA, 20 bp, Artificial Sequence
  Synthetic oligonucleotide; GAG chr11 5285045 5285064 5285048 -
ccctgtgctgcactgatgag

SEQ ID NO: 41730 - DNA, 20 bp, Artificial Sequence
  Synthetic oligonucleotide; AGG chr11 5285044 5285063 5285047 -
cctgtgctgcactgatgagg

SEQ ID NO: 41731 - DNA, 20 bp, Artificial Sequence
  Synthetic oligonucleotide; CAG chr11 5285039 5285058 5285042 -
gctgcactgatgaggaggat

SEQ ID NO: 41732 - DNA, 20 bp, Artificial Sequence
  Synthetic oligonucleotide; TGG chr11 5285035 5285054 5285038 -
cactgatgaggaggatcaga

SEQ ID NO: 41733 - DNA, 20 bp, Artificial Sequence
  Synthetic oligonucleotide; TGG chr11 5285031 5285050 5285034 -
gatgaggaggatcagatgga

SEQ ID NO: 41734 - DNA, 20 bp, Artificial Sequence
  Synthetic oligonucleotide; GGG chr11 5285030 5285049 5285033 -
atgaggaggatcagatggat

SEQ ID NO: 41735 - DNA, 20 bp, Artificial Sequence
  Synthetic oligonucleotide; GGG chr11 5285029 5285048 5285032 -
tgaggaggatcagatggatg

SEQ ID NO: 41736 - DNA, 20 bp, Artificial Sequence
  Synthetic oligonucleotide; AAG chr11 5285021 5285040 5285024 -
atcagatggatggggcaatg

SEQ ID NO: 41737 - DNA, 20 bp, Artificial Sequence
  Synthetic oligonucleotide; AAG chr11 5285016 5285035 5285019 -
atggatggggcaatgaagca

SEQ ID NO: 41738 - DNA, 20 bp, Artificial Sequence
  Synthetic oligonucleotide; AGG chr11 5285015 5285034 5285018 -
tggatggggcaatgaagcaa

SEQ ID NO: 41739 - DNA, 20 bp, Artificial Sequence
  Synthetic oligonucleotide; TGG chr11 5285002 5285021 5285005 -
gaagcaaaggaatcattctg

SEQ ID NO: 41740 - DNA, 20 bp, Artificial Sequence
  Synthetic oligonucleotide; AAG chr11 5284996 5285015 5284999 -
aaggaatcattctgtggata

SEQ ID NO: 41741 - DNA, 20 bp, Artificial Sequence
  Synthetic oligonucleotide; AGG chr11 5284995 5285014 5284998 -
aggaatcattctgtggataa

SEQ ID NO: 41742 - DNA, 20 bp, Artificial Sequence
  Synthetic oligonucleotide; GAG chr11 5284993 5285012 5284996 -
gaatcattctgtggataaag

SEQ ID NO: 41743 - DNA, 20 bp, Artificial Sequence
  Synthetic oligonucleotide; CAG chr11 5284989 5285008 5284992 -
cattctgtggataaaggaga

SEQ ID NO: 41744 - DNA, 20 bp, Artificial Sequence
  Synthetic oligonucleotide; AAG chr11 5284981 5285000 5284984 -
ggataaaggagacagccatg

SEQ ID NO: 41745 - DNA, 20 bp, Artificial Sequence
  Synthetic oligonucleotide; AAG chr11 5284978 5284997 5284981 -
taaaggagacagccatgaag

SEQ ID NO: 41746 - DNA, 20 bp, Artificial Sequence
  Synthetic oligonucleotide; TGG chr11 5284959 5284978 5284962 -
gaagtctatgactgtaaatt

SEQ ID NO: 41747 - DNA, 20 bp, Artificial Sequence
  Synthetic oligonucleotide; GGG chr11 5284958 5284977 5284961 -
aagtctatgactgtaaattt

SEQ ID NO: 41748 - DNA, 20 bp, Artificial Sequence
  Synthetic oligonucleotide; GAG chr11 5284956 5284975 5284959 -
gtctatgactgtaaatttgg

SEQ ID NO: 41749 - DNA, 20 bp, Artificial Sequence
  Synthetic oligonucleotide; CAG chr11 5284953 5284972 5284956 -
tatgactgtaaatttgggag

SEQ ID NO: 41750 - DNA, 20 bp, Artificial Sequence
  Synthetic oligonucleotide; AGG chr11 5284952 5284971 5284955 -
atgactgtaaatttgggagc

SEQ ID NO: 41751 - DNA, 20 bp, Artificial Sequence
  Synthetic oligonucleotide; GAG chr11 5284950 5284969 5284953 -
gactgtaaatttgggagcag

SEQ ID NO: 41752 - DNA, 20 bp, Artificial Sequence
  Synthetic oligonucleotide; AAG chr11 5284942 5284961 5284945 -
atttgggagcaggagtctct

SEQ ID NO: 41753 - DNA, 20 bp, Artificial Sequence
  Synthetic oligonucleotide; AGG chr11 5284941 5284960 5284944 -
tttgggagcaggagtctcta

SEQ ID NO: 41754 - DNA, 20 bp, Artificial Sequence
  Synthetic oligonucleotide; TGG chr11 5284935 5284954 5284938 -
agcaggagtctctaaggact

SEQ ID NO: 41755 - DNA, 20 bp, Artificial Sequence
  Synthetic oligonucleotide; AAG chr11 5284927 5284946 5284930 -
tctctaaggacttggatttc

SEQ ID NO: 41756 - DNA, 20 bp, Artificial Sequence
  Synthetic oligonucleotide; AGG chr11 5284926 5284945 5284929 -
ctctaaggacttggatttca

SEQ ID NO: 41757 - DNA, 20 bp, Artificial Sequence
  Synthetic oligonucleotide; CAG chr11 5284913 5284932 5284916 -
gatttcaaggaattttgact

SEQ ID NO: 41758 - DNA, 20 bp, Artificial Sequence
  Synthetic oligonucleotide; AAG chr11 5284903 5284922 5284906 -
aattttgactcagcaaacac

SEQ ID NO: 41759 - DNA, 20 bp, Artificial Sequence
  Synthetic oligonucleotide; CGG chr11 5284893 5284912 5284896 -
cagcaaacacaagaccctca

SEQ ID NO: 41760 - DNA, 20 bp, Artificial Sequence
  Synthetic oligonucleotide; GAG chr11 5284881 5284900 5284884 -
gaccctcacggtgactttgc

SEQ ID NO: 41761 - DNA, 20 bp, Artificial Sequence
  Synthetic oligonucleotide; TGG chr11 5284877 5284896 5284880 -
ctcacggtgactttgcgagc

SEQ ID NO: 41762 - DNA, 20 bp, Artificial Sequence
  Synthetic oligonucleotide; CAG chr11 5284869 5284888 5284872 -
gactttgcgagctggtgtgc

SEQ ID NO: 41763 - DNA, 20 bp, Artificial Sequence
  Synthetic oligonucleotide; CAG chr11 5284856 5284875 5284859 -
ggtgtgccagatgtgtctat

SEQ ID NO: 41764 - DNA, 20 bp, Artificial Sequence
  Synthetic oligonucleotide; GAG chr11 5284854 5284873 5284857 -
tgtgccagatgtgtctatca

SEQ ID NO: 41765 - DNA, 20 bp, Artificial Sequence
  Synthetic oligonucleotide; AGG chr11 5284853 5284872 5284856 -
gtgccagatgtgtctatcag

SEQ ID NO: 41766 - DNA, 20 bp, Artificial Sequence
  Synthetic oligonucleotide; CAG chr11 5284847 5284866 5284850 -
gatgtgtctatcagaggttc

SEQ ID NO: 41767 - DNA, 20 bp, Artificial Sequence
  Synthetic oligonucleotide; AGG chr11 5284846 5284865 5284849 -
atgtgtctatcagaggttcc

SEQ ID NO: 41768 - DNA, 20 bp, Artificial Sequence
  Synthetic oligonucleotide; GGG chr11 5284845 5284864 5284848 -
tgtgtctatcagaggttcca

SEQ ID NO: 41769 - DNA, 20 bp, Artificial Sequence
  Synthetic oligonucleotide; GAG chr11 5284843 5284862 5284846 -
tgtctatcagaggttccagg

SEQ ID NO: 41770 - DNA, 20 bp, Artificial Sequence
  Synthetic oligonucleotide; AGG chr11 5284842 5284861 5284845 -
gtctatcagaggttccaggg

SEQ ID NO: 41771 - DNA, 20 bp, Artificial Sequence
  Synthetic oligonucleotide; GGG chr11 5284841 5284860 5284844 -
tctatcagaggttccaggga

SEQ ID NO: 41772 - DNA, 20 bp, Artificial Sequence
  Synthetic oligonucleotide; TGG chr11 5284838 5284857 5284841 -
atcagaggttccagggaggg

SEQ ID NO: 41773 - DNA, 20 bp, Artificial Sequence
  Synthetic oligonucleotide; GGG chr11 5284837 5284856 5284840 -
tcagaggttccagggagggt

SEQ ID NO: 41774 - DNA, 20 bp, Artificial Sequence
  Synthetic oligonucleotide; GGG chr11 5284836 5284855 5284839 -
cagaggttccagggagggtg

SEQ ID NO: 41775 - DNA, 20 bp, Artificial Sequence
  Synthetic oligonucleotide; TGG chr11 5284833 5284852 5284836 -
aggttccagggagggtgggg

SEQ ID NO: 41776 - DNA, 20 bp, Artificial Sequence
  Synthetic oligonucleotide; GGG chr11 5284832 5284851 5284835 -
ggttccagggagggtggggt

SEQ ID NO: 41777 - DNA, 20 bp, Artificial Sequence
  Synthetic oligonucleotide; GGG chr11 5284831 5284850 5284834 -
gttccagggagggtggggtg

SEQ ID NO: 41778 - DNA, 20 bp, Artificial Sequence
  Synthetic oligonucleotide; CAG chr11 5284827 5284846 5284830 -
cagggagggtggggtggggt

SEQ ID NO: 41779 - DNA, 20 bp, Artificial Sequence
  Synthetic oligonucleotide; AGG chr11 5284826 5284845 5284829 -
agggagggtggggtggggtc

SEQ ID NO: 41780 - DNA, 20 bp, Artificial Sequence
  Synthetic oligonucleotide; GGG chr11 5284825 5284844 5284828 -
gggagggtggggtggggtca

SEQ ID NO: 41781 - DNA, 20 bp, Artificial Sequence
  Synthetic oligonucleotide; TGG chr11 5284821 5284840 5284824 -
gggtggggtggggtcagggc

SEQ ID NO: 41782 - DNA, 20 bp, Artificial Sequence
  Synthetic oligonucleotide; CAG chr11 5284814 5284833 5284817 -
gtggggtcagggctggccac

SEQ ID NO: 41783 - DNA, 20 bp, Artificial Sequence
  Synthetic oligonucleotide; CAG chr11 5284807 5284826 5284810 -
cagggctggccaccagctat

SEQ ID NO: 41784 - DNA, 20 bp, Artificial Sequence
  Synthetic oligonucleotide; AGG chr11 5284806 5284825 5284809 -
agggctggccaccagctatc

SEQ ID NO: 41785 - DNA, 20 bp, Artificial Sequence
  Synthetic oligonucleotide; GGG chr11 5284805 5284824 5284808 -
gggctggccaccagctatca

SEQ ID NO: 41786 - DNA, 20 bp, Artificial Sequence
  Synthetic oligonucleotide; CAG chr11 5284800 5284819 5284803 -
ggccaccagctatcagggcc

SEQ ID NO: 41787 - DNA, 20 bp, Artificial Sequence
  Synthetic oligonucleotide; TGG chr11 5284796 5284815 5284799 -
accagctatcagggcccaga

SEQ ID NO: 41788 - DNA, 20 bp, Artificial Sequence
  Synthetic oligonucleotide; GGG chr11 5284795 5284814 5284798 -
ccagctatcagggcccagat

SEQ ID NO: 41789 - DNA, 20 bp, Artificial Sequence
  Synthetic oligonucleotide; TAG chr11 5284789 5284808 5284792 -
atcagggcccagatgggtta

SEQ ID NO: 41790 - DNA, 20 bp, Artificial Sequence
  Synthetic oligonucleotide; AGG chr11 5284788 5284807 5284791 -
tcagggcccagatgggttat

SEQ ID NO: 41791 - DNA, 20 bp, Artificial Sequence
  Synthetic oligonucleotide; TGG chr11 5284784 5284803 5284787 -
ggcccagatgggttataggc

SEQ ID NO: 41792 - DNA, 20 bp, Artificial Sequence
  Synthetic oligonucleotide; CAG chr11 5284781 5284800 5284784 -
ccagatgggttataggctgg

SEQ ID NO: 41793 - DNA, 20 bp, Artificial Sequence
  Synthetic oligonucleotide; AGG chr11 5284780 5284799 5284783 -
cagatgggttataggctggc

SEQ ID NO: 41794 - DNA, 20 bp, Artificial Sequence
  Synthetic oligonucleotide; CAG chr11 5284775 5284794 5284778 -
gggttataggctggcaggct

SEQ ID NO: 41795 - DNA, 20 bp, Artificial Sequence
  Synthetic oligonucleotide; TAG chr11 5284771 5284790 5284774 -
tataggctggcaggctcaga

SEQ ID NO: 41796 - DNA, 20 bp, Artificial Sequence
  Synthetic oligonucleotide; AGG chr11 5284770 5284789 5284773 -
ataggctggcaggctcagat

SEQ ID NO: 41797 - DNA, 20 bp, Artificial Sequence
  Synthetic oligonucleotide; TGG chr11 5284767 5284786 5284770 -
ggctggcaggctcagatagg

SEQ ID NO: 41798 - DNA, 20 bp, Artificial Sequence
  Synthetic oligonucleotide; TAG chr11 5284763 5284782 5284766 -
ggcaggctcagataggtggt

SEQ ID NO: 41799 - DNA, 20 bp, Artificial Sequence
  Synthetic oligonucleotide; AGG chr11 5284762 5284781 5284765 -
gcaggctcagataggtggtt

SEQ ID NO: 41800 - DNA, 20 bp, Artificial Sequence
  Synthetic oligonucleotide; CAG chr11 5284758 5284777 5284761 -
gctcagataggtggttaggt

SEQ ID NO: 41801 - DNA, 20 bp, Artificial Sequence
  Synthetic oligonucleotide; AGG chr11 5284757 5284776 5284760 -
ctcagataggtggttaggtc

SEQ ID NO: 41802 - DNA, 20 bp, Artificial Sequence
  Synthetic oligonucleotide; TGG chr11 5284753 5284772 5284756 -
gataggtggttaggtcaggt

SEQ ID NO: 41803 - DNA, 20 bp, Artificial Sequence
  Synthetic oligonucleotide; TGG chr11 5284750 5284769 5284753 -
aggtggttaggtcaggttgg

SEQ ID NO: 41804 - DNA, 20 bp, Artificial Sequence
  Synthetic oligonucleotide; TGG chr11 5284744 5284763 5284747 -
ttaggtcaggttggtggtgc

SEQ ID NO: 41805 - DNA, 20 bp, Artificial Sequence
  Synthetic oligonucleotide; GGG chr11 5284743 5284762 5284746 -
taggtcaggttggtggtgct

SEQ ID NO: 41806 - DNA, 20 bp, Artificial Sequence
  Synthetic oligonucleotide; TGG chr11 5284740 5284759 5284743 -
gtcaggttggtggtgctggg

SEQ ID NO: 41807 - DNA, 20 bp, Artificial Sequence
  Synthetic oligonucleotide; GAG chr11 5284738 5284757 5284741 -
caggttggtggtgctgggtg

SEQ ID NO: 41808 - DNA, 20 bp, Artificial Sequence
  Synthetic oligonucleotide; CAG chr11 5284724 5284743 5284727 -
tgggtggagtccatgactcc

SEQ ID NO: 41809 - DNA, 20 bp, Artificial Sequence
  Synthetic oligonucleotide; AGG chr11 5284723 5284742 5284726 -
gggtggagtccatgactccc

SEQ ID NO: 41810 - DNA, 20 bp, Artificial Sequence
  Synthetic oligonucleotide; GAG chr11 5284721 5284740 5284724 -
gtggagtccatgactcccag

SEQ ID NO: 41811 - DNA, 20 bp, Artificial Sequence
  Synthetic oligonucleotide; CAG chr11 5284717 5284736 5284720 -
agtccatgactcccaggagc

SEQ ID NO: 41812 - DNA, 20 bp, Artificial Sequence
  Synthetic oligonucleotide; AGG chr11 5284716 5284735 5284719 -
gtccatgactcccaggagcc

SEQ ID NO: 41813 - DNA, 20 bp, Artificial Sequence
  Synthetic oligonucleotide; GAG chr11 5284714 5284733 5284717 -
ccatgactcccaggagccag

SEQ ID NO: 41814 - DNA, 20 bp, Artificial Sequence
  Synthetic oligonucleotide; GAG chr11 5284712 5284731 5284715 -
atgactcccaggagccagga

SEQ ID NO: 41815 - DNA, 20 bp, Artificial Sequence
  Synthetic oligonucleotide; TAG chr11 5284708 5284727 5284711 -
ctcccaggagccaggagaga

SEQ ID NO: 41816 - DNA, 20 bp, Artificial Sequence
  Synthetic oligonucleotide; GAG chr11 5284700 5284719 5284703 -
agccaggagagatagaccat

SEQ ID NO: 41817 - DNA, 20 bp, Artificial Sequence
  Synthetic oligonucleotide; TAG chr11 5284697 5284716 5284700 -
caggagagatagaccatgag

SEQ ID NO: 41818 - DNA, 20 bp, Artificial Sequence
  Synthetic oligonucleotide; GAG chr11 5284695 5284714 5284698 -
ggagagatagaccatgagta

SEQ ID NO: 41819 - DNA, 20 bp, Artificial Sequence
  Synthetic oligonucleotide; AGG chr11 5284694 5284713 5284697 -
gagagatagaccatgagtag

SEQ ID NO: 41820 - DNA, 20 bp, Artificial Sequence
  Synthetic oligonucleotide; GGG chr11 5284693 5284712 5284696 -
agagatagaccatgagtaga

SEQ ID NO: 41821 - DNA, 20 bp, Artificial Sequence
  Synthetic oligonucleotide; CAG chr11 5284690 5284709 5284693 -
gatagaccatgagtagaggg

SEQ ID NO: 41822 - DNA, 20 bp, Artificial Sequence
  Synthetic oligonucleotide; TGG chr11 5284684 5284703 5284687 -
ccatgagtagagggcagaca

SEQ ID NO: 41823 - DNA, 20 bp, Artificial Sequence
  Synthetic oligonucleotide; GGG chr11 5284683 5284702 5284686 -
catgagtagagggcagacat

SEQ ID NO: 41824 - DNA, 20 bp, Artificial Sequence
  Synthetic oligonucleotide; AAG chr11 5284679 5284698 5284682 -
agtagagggcagacatggga

SEQ ID NO: 41825 - DNA, 20 bp, Artificial Sequence
  Synthetic oligonucleotide; AGG chr11 5284678 5284697 5284681 -
gtagagggcagacatgggaa

SEQ ID NO: 41826 - DNA, 20 bp, Artificial Sequence
  Synthetic oligonucleotide; TGG chr11 5284675 5284694 5284678 -
gagggcagacatgggaaagg

SEQ ID NO: 41827 - DNA, 20 bp, Artificial Sequence
  Synthetic oligonucleotide; GGG chr11 5284674 5284693 5284677 -
agggcagacatgggaaaggt

SEQ ID NO: 41828 - DNA, 20 bp, Artificial Sequence
  Synthetic oligonucleotide; GGG chr11 5284673 5284692 5284676 -
gggcagacatgggaaaggtg

SEQ ID NO: 41829 - DNA, 20 bp, Artificial Sequence
  Synthetic oligonucleotide; GGG chr11 5284672 5284691 5284675 -
ggcagacatgggaaaggtgg

SEQ ID NO: 41830 - DNA, 20 bp, Artificial Sequence
  Synthetic oligonucleotide; GAG chr11 5284670 5284689 5284673 -
cagacatgggaaaggtgggg

SEQ ID NO: 41831 - DNA, 20 bp, Artificial Sequence
  Synthetic oligonucleotide; AGG chr11 5284669 5284688 5284672 -
agacatgggaaaggtggggg

SEQ ID NO: 41832 - DNA, 20 bp, Artificial Sequence
  Synthetic oligonucleotide; CAG chr11 5284664 5284683 5284667 -
tgggaaaggtgggggaggca

SEQ ID NO: 41833 - DNA, 20 bp, Artificial Sequence
  Synthetic oligonucleotide; TAG chr11 5284659 5284678 5284662 -
aaggtgggggaggcacagca

SEQ ID NO: 41834 - DNA, 20 bp, Artificial Sequence
  Synthetic oligonucleotide; CAG chr11 5284656 5284675 5284659 -
gtgggggaggcacagcatag

SEQ ID NO: 41835 - DNA, 20 bp, Artificial Sequence
  Synthetic oligonucleotide; TGG chr11 5284631 5284650 5284634 -
tttttcattctactactaca

SEQ ID NO: 41836 - DNA, 20 bp, Artificial Sequence
  Synthetic oligonucleotide; GGG chr11 5284630 5284649 5284633 -
ttttcattctactactacat

SEQ ID NO: 41837 - DNA, 20 bp, Artificial Sequence
  Synthetic oligonucleotide; CAG chr11 5284609 5284628 5284612 -
ggactgctcccctatacccc

SEQ ID NO: 41838 - DNA, 20 bp, Artificial Sequence
  Synthetic oligonucleotide; TAG chr11 5284605 5284624 5284608 -
tgctcccctatacccccagc

SEQ ID NO: 41839 - DNA, 20 bp, Artificial Sequence
  Synthetic oligonucleotide; AGG chr11 5284604 5284623 5284607 -
gctcccctatacccccagct

SEQ ID NO: 41840 - DNA, 20 bp, Artificial Sequence
  Synthetic oligonucleotide; GGG chr11 5284603 5284622 5284606 -
ctcccctatacccccagcta

SEQ ID NO: 41841 - DNA, 20 bp, Artificial Sequence
  Synthetic oligonucleotide; GGG chr11 5284602 5284621 5284605 -
tcccctatacccccagctag

SEQ ID NO: 41842 - DNA, 20 bp, Artificial Sequence
  Synthetic oligonucleotide; AAG chr11 5284598 5284617 5284601 -
ctatacccccagctaggggc

SEQ ID NO: 41843 - DNA, 20 bp, Artificial Sequence
  Synthetic oligonucleotide; CAG chr11 5284575 5284594 5284578 -
tgccttgactcctatgtttt

SEQ ID NO: 41844 - DNA, 20 bp, Artificial Sequence
  Synthetic oligonucleotide; AGG chr11 5284574 5284593 5284577 -
gccttgactcctatgttttc

SEQ ID NO: 41845 - DNA, 20 bp, Artificial Sequence
  Synthetic oligonucleotide; AAG chr11 5284558 5284577 5284561 -
tttcaggatcatcatctata

SEQ ID NO: 41846 - DNA, 20 bp, Artificial Sequence
  Synthetic oligonucleotide; AAG chr11 5284554 5284573 5284557 -
aggatcatcatctataaagt

SEQ ID NO: 41847 - DNA, 20 bp, Artificial Sequence
  Synthetic oligonucleotide; GAG chr11 5284552 5284571 5284555 -
gatcatcatctataaagtaa

SEQ ID NO: 41848 - DNA, 20 bp, Artificial Sequence
  Synthetic oligonucleotide; TAG chr11 5284529 5284548 5284532 -
taataattgtgtctatctca

SEQ ID NO: 41849 - DNA, 20 bp, Artificial Sequence
  Synthetic oligonucleotide; AGG chr11 5284528 5284547 5284531 -
aataattgtgtctatctcat

SEQ ID NO: 41850 - DNA, 20 bp, Artificial Sequence
  Synthetic oligonucleotide; GGG chr11 5284527 5284546 5284530 -
ataattgtgtctatctcata

SEQ ID NO: 41851 - DNA, 20 bp, Artificial Sequence
  Synthetic oligonucleotide; GAG chr11 5284517 5284536 5284520 -
ctatctcatagggttattat

SEQ ID NO: 41852 - DNA, 20 bp, Artificial Sequence
  Synthetic oligonucleotide; AGG chr11 5284516 5284535 5284519 -
tatctcatagggttattatg

SEQ ID NO: 41853 - DNA, 20 bp, Artificial Sequence
  Synthetic oligonucleotide; AAG chr11 5284509 5284528 5284512 -
tagggttattatgaggatca

SEQ ID NO: 41854 - DNA, 20 bp, Artificial Sequence
  Synthetic oligonucleotide; AGG chr11 5284508 5284527 5284511 -
agggttattatgaggatcaa

SEQ ID NO: 41855 - DNA, 20 bp, Artificial Sequence
  Synthetic oligonucleotide; GAG chr11 5284506 5284525 5284509 -
ggttattatgaggatcaaag

SEQ ID NO: 41856 - DNA, 20 bp, Artificial Sequence
  Synthetic oligonucleotide; TGG chr11 5284491 5284510 5284494 -
caaaggagatgcacactctc

SEQ ID NO: 41857 - DNA, 20 bp, Artificial Sequence
  Synthetic oligonucleotide; CAG chr11 5284486 5284505 5284489 -
gagatgcacactctctggac

SEQ ID NO: 41858 - DNA, 20 bp, Artificial Sequence
  Synthetic oligonucleotide; TGG chr11 5284483 5284502 5284486 -
atgcacactctctggaccag

SEQ ID NO: 41859 - DNA, 20 bp, Artificial Sequence
  Synthetic oligonucleotide; CAG chr11 5284475 5284494 5284478 -
tctctggaccagtggcctaa

SEQ ID NO: 41860 - DNA, 20 bp, Artificial Sequence
  Synthetic oligonucleotide; CAG chr11 5284470 5284489 5284473 -
ggaccagtggcctaacagtt

SEQ ID NO: 41861 - DNA, 20 bp, Artificial Sequence
  Synthetic oligonucleotide; AGG chr11 5284469 5284488 5284472 -
gaccagtggcctaacagttc

SEQ ID NO: 41862 - DNA, 20 bp, Artificial Sequence
  Synthetic oligonucleotide; CAG chr11 5284465 5284484 5284468 -
agtggcctaacagttcagga

SEQ ID NO: 41863 - DNA, 20 bp, Artificial Sequence
  Synthetic oligonucleotide; GAG chr11 5284463 5284482 5284466 -
tggcctaacagttcaggaca

SEQ ID NO: 41864 - DNA, 20 bp, Artificial Sequence
  Synthetic oligonucleotide; TGG chr11 5284457 5284476 5284460 -
aacagttcaggacagagcta

SEQ ID NO: 41865 - DNA, 20 bp, Artificial Sequence
  Synthetic oligonucleotide; GGG chr11 5284456 5284475 5284459 -
acagttcaggacagagctat

SEQ ID NO: 41866 - DNA, 20 bp, Artificial Sequence
  Synthetic oligonucleotide; TGG chr11 5284442 5284461 5284445 -
agctatgggcttcctatgta

SEQ ID NO: 41867 - DNA, 20 bp, Artificial Sequence
  Synthetic oligonucleotide; GGG chr11 5284441 5284460 5284444 -
gctatgggcttcctatgtat

SEQ ID NO: 41868 - DNA, 20 bp, Artificial Sequence
  Synthetic oligonucleotide; CAG chr11 5284437 5284456 5284440 -
tgggcttcctatgtatgggt

SEQ ID NO: 41869 - DNA, 20 bp, Artificial Sequence
  Synthetic oligonucleotide; TGG chr11 5284434 5284453 5284437 -
gcttcctatgtatgggtcag

SEQ ID NO: 41870 - DNA, 20 bp, Artificial Sequence
  Synthetic oligonucleotide; TAG chr11 5284423 5284442 5284426 -
atgggtcagtggtctcaatg

SEQ ID NO: 41871 - DNA, 20 bp, Artificial Sequence
  Synthetic oligonucleotide; CAG chr11 5284420 5284439 5284423 -
ggtcagtggtctcaatgtag

SEQ ID NO: 41872 - DNA, 20 bp, Artificial Sequence
  Synthetic oligonucleotide; AGG chr11 5284419 5284438 5284422 -
gtcagtggtctcaatgtagc

SEQ ID NO: 41873 - DNA, 20 bp, Artificial Sequence
  Synthetic oligonucleotide; AAG chr11 5284415 5284434 5284418 -
gtggtctcaatgtagcaggc

SEQ ID NO: 41874 - DNA, 20 bp, Artificial Sequence
  Synthetic oligonucleotide; CAG chr11 5284409 5284428 5284412 -
tcaatgtagcaggcaagttc

SEQ ID NO: 41875 - DNA, 20 bp, Artificial Sequence
  Synthetic oligonucleotide; AAG chr11 5284406 5284425 5284409 -
atgtagcaggcaagttccag

SEQ ID NO: 41876 - DNA, 20 bp, Artificial Sequence
  Synthetic oligonucleotide; TAG chr11 5284402 5284421 5284405 -
agcaggcaagttccagaaga

SEQ ID NO: 41877 - DNA, 20 bp, Artificial Sequence
  Synthetic oligonucleotide; TAG chr11 5284386 5284405 5284389 -
aagatagcatcaaccactgt

SEQ ID NO: 41878 - DNA, 20 bp, Artificial Sequence
  Synthetic oligonucleotide; GAG chr11 5284384 5284403 5284387 -
gatagcatcaaccactgtta

SEQ ID NO: 41879 - DNA, 20 bp, Artificial Sequence
  Synthetic oligonucleotide; CAG chr11 5284372 5284391 5284375 -
cactgttagagatatactgc

SEQ ID NO: 41880 - DNA, 20 bp, Artificial Sequence
  Synthetic oligonucleotide; CAG chr11 5284366 5284385 5284369 -
tagagatatactgccagtct

SEQ ID NO: 41881 - DNA, 20 bp, Artificial Sequence
  Synthetic oligonucleotide; GAG chr11 5284364 5284383 5284367 -
gagatatactgccagtctca

SEQ ID NO: 41882 - DNA, 20 bp, Artificial Sequence
  Synthetic oligonucleotide; TAG chr11 5284348 5284367 5284351 -
ctcagagcctgatgttaatt

SEQ ID NO: 41883 - DNA, 20 bp, Artificial Sequence
  Synthetic oligonucleotide; TGG chr11 5284342 5284361 5284345 -
gcctgatgttaatttagcaa

SEQ ID NO: 41884 - DNA, 20 bp, Artificial Sequence
  Synthetic oligonucleotide; GGG chr11 5284341 5284360 5284344 -
cctgatgttaatttagcaat

SEQ ID NO: 41885 - DNA, 20 bp, Artificial Sequence
  Synthetic oligonucleotide; TGG chr11 5284337 5284356 5284340 -
atgttaatttagcaatgggc

SEQ ID NO: 41886 - DNA, 20 bp, Artificial Sequence
  Synthetic oligonucleotide; GGG chr11 5284336 5284355 5284339 -
tgttaatttagcaatgggct

SEQ ID NO: 41887 - DNA, 20 bp, Artificial Sequence
  Synthetic oligonucleotide; CAG chr11 5284324 5284343 5284327 -
aatgggctgggaccctcctc

SEQ ID NO: 41888 - DNA, 20 bp, Artificial Sequence
  Synthetic oligonucleotide; TAG chr11 5284321 5284340 5284324 -
gggctgggaccctcctccag

SEQ ID NO: 41889 - DNA, 20 bp, Artificial Sequence
  Synthetic oligonucleotide; CAG chr11 5284307 5284326 5284310 -
ctccagtagaaccttctaac

SEQ ID NO: 41890 - DNA, 20 bp, Artificial Sequence
  Synthetic oligonucleotide; CAG chr11 5284298 5284317 5284301 -
aaccttctaaccagctgctg

SEQ ID NO: 41891 - DNA, 20 bp, Artificial Sequence
  Synthetic oligonucleotide; AAG chr11 5284292 5284311 5284295 -
ctaaccagctgctgcagtca

SEQ ID NO: 41892 - DNA, 20 bp, Artificial Sequence
  Synthetic oligonucleotide; CAG chr11 5284282 5284301 5284285 -
gctgcagtcaaagtcgaatg

SEQ ID NO: 41893 - DNA, 20 bp, Artificial Sequence
  Synthetic oligonucleotide; TGG chr11 5284278 5284297 5284281 -
cagtcaaagtcgaatgcagc

SEQ ID NO: 41894 - DNA, 20 bp, Artificial Sequence
  Synthetic oligonucleotide; TAG chr11 5284274 5284293 5284277 -
caaagtcgaatgcagctggt

SEQ ID NO: 41895 - DNA, 20 bp, Artificial Sequence
  Synthetic oligonucleotide; AAG chr11 5284257 5284276 5284260 -
ggttagactttttttaatga

SEQ ID NO: 41896 - DNA, 20 bp, Artificial Sequence
  Synthetic oligonucleotide; TAG chr11 5284252 5284271 5284255 -
gactttttttaatgaaagct

SEQ ID NO: 41897 - DNA, 20 bp, Artificial Sequence
  Synthetic oligonucleotide; AAG chr11 5284240 5284259 5284243 -
tgaaagcttagctttcatta

SEQ ID NO: 41898 - DNA, 20 bp, Artificial Sequence
  Synthetic oligonucleotide; AAG chr11 5284234 5284253 5284237 -
cttagctttcattaaagatt

SEQ ID NO: 41899 - DNA, 20 bp, Artificial Sequence
  Synthetic oligonucleotide; AAG chr11 5284226 5284245 5284229 -
tcattaaagattaagctcct

SEQ ID NO: 41900 - DNA, 20 bp, Artificial Sequence
  Synthetic oligonucleotide; CAG chr11 5284223 5284242 5284226 -
ttaaagattaagctcctaag

SEQ ID NO: 41901 - DNA, 20 bp, Artificial Sequence
  Synthetic oligonucleotide; AGG chr11 5284222 5284241 5284225 -
taaagattaagctcctaagc

SEQ ID NO: 41902 - DNA, 20 bp, Artificial Sequence
  Synthetic oligonucleotide; GGG chr11 5284221 5284240 5284224 -
aaagattaagctcctaagca

SEQ ID NO: 41903 - DNA, 20 bp, Artificial Sequence
  Synthetic oligonucleotide; CAG chr11 5284216 5284235 5284219 -
ttaagctcctaagcagggca

SEQ ID NO: 41904 - DNA, 20 bp, Artificial Sequence
  Synthetic oligonucleotide; CAG chr11 5284199 5284218 5284202 -
gcacagatgaaattgtctaa

SEQ ID NO: 41905 - DNA, 20 bp, Artificial Sequence
  Synthetic oligonucleotide; TGG chr11 5284164 5284183 5284167 -
ctaaaaaaatctgacttcac

SEQ ID NO: 41906 - DNA, 20 bp, Artificial Sequence
  Synthetic oligonucleotide; TGG chr11 5284156 5284175 5284159 -
atctgacttcactggaaaca

SEQ ID NO: 41907 - DNA, 20 bp, Artificial Sequence
  Synthetic oligonucleotide; AAG chr11 5284153 5284172 5284156 -
tgacttcactggaaacatgg

SEQ ID NO: 41908 - DNA, 20 bp, Artificial Sequence
  Synthetic oligonucleotide; AAG chr11 5284147 5284166 5284150 -
cactggaaacatggaagccc

SEQ ID NO: 41909 - DNA, 20 bp, Artificial Sequence
  Synthetic oligonucleotide; AGG chr11 5284146 5284165 5284149 -
actggaaacatggaagccca

SEQ ID NO: 41910 - DNA, 20 bp, Artificial Sequence
  Synthetic oligonucleotide; GAG chr11 5284133 5284152 5284136 -
aagcccaaggttctgaacat

SEQ ID NO: 41911 - DNA, 20 bp, Artificial Sequence
  Synthetic oligonucleotide; TAG chr11 5284123 5284142 5284126 -
ttctgaacatgagaaatttt

SEQ ID NO: 41912 - DNA, 20 bp, Artificial Sequence
  Synthetic oligonucleotide; AGG chr11 5284122 5284141 5284125 -
tctgaacatgagaaattttt

SEQ ID NO: 41913 - DNA, 20 bp, Artificial Sequence
  Synthetic oligonucleotide; CAG chr11 5284111 5284130 5284114 -
gaaatttttaggaatctgca

SEQ ID NO: 41914 - DNA, 20 bp, Artificial Sequence
  Synthetic oligonucleotide; AGG chr11 5284110 5284129 5284113 -
aaatttttaggaatctgcac

SEQ ID NO: 41915 - DNA, 20 bp, Artificial Sequence
  Synthetic oligonucleotide; GAG chr11 5284108 5284127 5284111 -
atttttaggaatctgcacag

SEQ ID NO: 41916 - DNA, 20 bp, Artificial Sequence
  Synthetic oligonucleotide; GAG chr11 5284103 5284122 5284106 -
taggaatctgcacaggagtt

SEQ ID NO: 41917 - DNA, 20 bp, Artificial Sequence
  Synthetic oligonucleotide; GAG chr11 5284101 5284120 5284104 -
ggaatctgcacaggagttga

SEQ ID NO: 41918 - DNA, 20 bp, Artificial Sequence
  Synthetic oligonucleotide; AGG chr11 5284100 5284119 5284103 -
gaatctgcacaggagttgag

SEQ ID NO: 41919 - DNA, 20 bp, Artificial Sequence
  Synthetic oligonucleotide; GGG chr11 5284099 5284118 5284102 -
aatctgcacaggagttgaga

SEQ ID NO: 41920 - DNA, 20 bp, Artificial Sequence
  Synthetic oligonucleotide; AAG chr11 5284092 5284111 5284095 -
acaggagttgagagggaaac

SEQ ID NO: 41921 - DNA, 20 bp, Artificial Sequence
  Synthetic oligonucleotide; TGG chr11 5284088 5284107 5284091 -
gagttgagagggaaacaaga

SEQ ID NO: 41922 - DNA, 20 bp, Artificial Sequence
  Synthetic oligonucleotide; AAG chr11 5284083 5284102 5284086 -
gagagggaaacaagatggtg

SEQ ID NO: 41923 - DNA, 20 bp, Artificial Sequence
  Synthetic oligonucleotide; AGG chr11 5284082 5284101 5284085 -
agagggaaacaagatggtga

SEQ ID NO: 41924 - DNA, 20 bp, Artificial Sequence
  Synthetic oligonucleotide; GGG chr11 5284081 5284100 5284084 -
gagggaaacaagatggtgaa

SEQ ID NO: 41925 - DNA, 20 bp, Artificial Sequence
  Synthetic oligonucleotide; TAG chr11 5284076 5284095 5284079 -
aaacaagatggtgaagggac

SEQ ID NO: 41926 - DNA, 20 bp, Artificial Sequence
  Synthetic oligonucleotide; GAG chr11 5284064 5284083 5284067 -
gaagggactagaaaccacat

SEQ ID NO: 41927 - DNA, 20 bp, Artificial Sequence
  Synthetic oligonucleotide; GAG chr11 5284062 5284081 5284065 -
agggactagaaaccacatga

SEQ ID NO: 41928 - DNA, 20 bp, Artificial Sequence
  Synthetic oligonucleotide; GAG chr11 5284055 5284074 5284058 -
agaaaccacatgagagacac

SEQ ID NO: 41929 - DNA, 20 bp, Artificial Sequence
  Synthetic oligonucleotide; AGG chr11 5284054 5284073 5284057 -
gaaaccacatgagagacacg

SEQ ID NO: 41930 - DNA, 20 bp, Artificial Sequence
  Synthetic oligonucleotide; TAG chr11 5284048 5284067 5284051 -
acatgagagacacgaggaaa

SEQ ID NO: 41931 - DNA, 20 bp, Artificial Sequence
  Synthetic oligonucleotide; TAG chr11 5284043 5284062 5284046 -
agagacacgaggaaatagtg

SEQ ID NO: 41932 - DNA, 20 bp, Artificial Sequence
  Synthetic oligonucleotide; TAG chr11 5284037 5284056 5284040 -
acgaggaaatagtgtagatt

SEQ ID NO: 41933 - DNA, 20 bp, Artificial Sequence
  Synthetic oligonucleotide; AGG chr11 5284036 5284055 5284039 -
cgaggaaatagtgtagattt

SEQ ID NO: 41934 - DNA, 20 bp, Artificial Sequence
  Synthetic oligonucleotide; TGG chr11 5284032 5284051 5284035 -
gaaatagtgtagatttaggc

SEQ ID NO: 41935 - DNA, 20 bp, Artificial Sequence
  Synthetic oligonucleotide; GAG chr11 5284030 5284049 5284033 -
aatagtgtagatttaggctg

SEQ ID NO: 41936 - DNA, 20 bp, Artificial Sequence
  Synthetic oligonucleotide; AGG chr11 5284029 5284048 5284032 -
atagtgtagatttaggctgg

SEQ ID NO: 41937 - DNA, 20 bp, Artificial Sequence
  Synthetic oligonucleotide; AAG chr11 5284019 5284038 5284022 -
tttaggctggaggtaaatga

SEQ ID NO: 41938 - DNA, 20 bp, Artificial Sequence
  Synthetic oligonucleotide; GAG chr11 5284017 5284036 5284020 -
taggctggaggtaaatgaaa

SEQ ID NO: 41939 - DNA, 20 bp, Artificial Sequence
  Synthetic oligonucleotide; AAG chr11 5284014 5284033 5284017 -
gctggaggtaaatgaaagag

SEQ ID NO: 41940 - DNA, 20 bp, Artificial Sequence
  Synthetic oligonucleotide; TGG chr11 5284011 5284030 5284014 -
ggaggtaaatgaaagagaag

SEQ ID NO: 41941 - DNA, 20 bp, Artificial Sequence
  Synthetic oligonucleotide; GGG chr11 5284010 5284029 5284013 -
gaggtaaatgaaagagaagt

SEQ ID NO: 41942 - DNA, 20 bp, Artificial Sequence
  Synthetic oligonucleotide; CAG chr11 5283976 5283995 5283979 -
actgaaatctttctatatgt

SEQ ID NO: 41943 - DNA, 20 bp, Artificial Sequence
  Synthetic oligonucleotide; AGG chr11 5283975 5283994 5283978 -
ctgaaatctttctatatgtc

SEQ ID NO: 41944 - DNA, 20 bp, Artificial Sequence
  Synthetic oligonucleotide; TGG chr11 5283937 5283956 5283940 -
tttaataatctcattacata

SEQ ID NO: 41945 - DNA, 20 bp, Artificial Sequence
  Synthetic oligonucleotide; GAG chr11 5283925 5283944 5283928 -
attacatatggtaattctgt

SEQ ID NO: 41946 - DNA, 20 bp, Artificial Sequence
  Synthetic oligonucleotide; AAG chr11 5283883 5283902 5283886 -
ctataattaatactaatgat

SEQ ID NO: 41947 - DNA, 20 bp, Artificial Sequence
  Synthetic oligonucleotide; GAG chr11 5283869 5283888 5283872 -
aatgataagtaacacctctt

SEQ ID NO: 41948 - DNA, 20 bp, Artificial Sequence
  Synthetic oligonucleotide; TAG chr11 5283862 5283881 5283865 -
agtaacacctcttgagtact

SEQ ID NO: 41949 - DNA, 20 bp, Artificial Sequence
  Synthetic oligonucleotide; TAG chr11 5283852 5283871 5283855 -
cttgagtacttagtatatgc

SEQ ID NO: 41950 - DNA, 20 bp, Artificial Sequence
  Synthetic oligonucleotide; AAG chr11 5283839 5283858 5283842 -
tatatgctagaatcaaattt

SEQ ID NO: 41951 - DNA, 20 bp, Artificial Sequence
  Synthetic oligonucleotide; GAG chr11 5283826 5283845 5283829 -
caaatttaagtttatcatat

SEQ ID NO: 41952 - DNA, 20 bp, Artificial Sequence
  Synthetic oligonucleotide; AGG chr11 5283825 5283844 5283828 -
aaatttaagtttatcatatg

SEQ ID NO: 41953 - DNA, 20 bp, Artificial Sequence
  Synthetic oligonucleotide; CGG chr11 5283821 5283840 5283824 -
ttaagtttatcatatgaggc

SEQ ID NO: 41954 - DNA, 20 bp, Artificial Sequence
  Synthetic oligonucleotide; GGG chr11 5283820 5283839 5283823 -
taagtttatcatatgaggcc

SEQ ID NO: 41955 - DNA, 20 bp, Artificial Sequence
  Synthetic oligonucleotide; CGG chr11 5283815 5283834 5283818 -
ttatcatatgaggccgggca

SEQ ID NO: 41956 - DNA, 20 bp, Artificial Sequence
  Synthetic oligonucleotide; TGG chr11 5283812 5283831 5283815 -
tcatatgaggccgggcacgg

SEQ ID NO: 41957 - DNA, 20 bp, Artificial Sequence
  Synthetic oligonucleotide; TGG chr11 5283801 5283820 5283804 -
cgggcacggtggctcatata

SEQ ID NO: 41958 - DNA, 20 bp, Artificial Sequence
  Synthetic oligonucleotide; GGG chr11 5283800 5283819 5283803 -
gggcacggtggctcatatat

SEQ ID NO: 41959 - DNA, 20 bp, Artificial Sequence
  Synthetic oligonucleotide; CAG chr11 5283779 5283798 5283782 -
ggattacatgcctgtaatcc

SEQ ID NO: 41960 - DNA, 20 bp, Artificial Sequence
  Synthetic oligonucleotide; TGG chr11 5283771 5283790 5283774 -
tgcctgtaatcccagcactt

SEQ ID NO: 41961 - DNA, 20 bp, Artificial Sequence
  Synthetic oligonucleotide; GGG chr11 5283770 5283789 5283773 -
gcctgtaatcccagcacttt

SEQ ID NO: 41962 - DNA, 20 bp, Artificial Sequence
  Synthetic oligonucleotide; GAG chr11 5283768 5283787 5283771 -
ctgtaatcccagcactttgg

SEQ ID NO: 41963 - DNA, 20 bp, Artificial Sequence
  Synthetic oligonucleotide; AGG chr11 5283767 5283786 5283770 -
tgtaatcccagcactttggg

SEQ ID NO: 41964 - DNA, 20 bp, Artificial Sequence
  Synthetic oligonucleotide; AAG chr11 5283762 5283781 5283765 -
tcccagcactttgggaggcc

SEQ ID NO: 41965 - DNA, 20 bp, Artificial Sequence
  Synthetic oligonucleotide; AGG chr11 5283761 5283780 5283764 -
cccagcactttgggaggcca

SEQ ID NO: 41966 - DNA, 20 bp, Artificial Sequence
  Synthetic oligonucleotide; TGG chr11 5283754 5283773 5283757 -
ctttgggaggccaaggcaat

SEQ ID NO: 41967 - DNA, 20 bp, Artificial Sequence
  Synthetic oligonucleotide; GAG chr11 5283744 5283763 5283747 -
ccaaggcaattggatcacct

SEQ ID NO: 41968 - DNA, 20 bp, Artificial Sequence
  Synthetic oligonucleotide; AGG chr11 5283743 5283762 5283746 -
caaggcaattggatcacctg

SEQ ID NO: 41969 - DNA, 20 bp, Artificial Sequence
  Synthetic oligonucleotide; CAG chr11 5283739 5283758 5283742 -
gcaattggatcacctgaggt

SEQ ID NO: 41970 - DNA, 20 bp, Artificial Sequence
  Synthetic oligonucleotide; AGG chr11 5283738 5283757 5283741 -
caattggatcacctgaggtc

SEQ ID NO: 41971 - DNA, 20 bp, Artificial Sequence
  Synthetic oligonucleotide; GAG chr11 5283736 5283755 5283739 -
attggatcacctgaggtcag

SEQ ID NO: 41972 - DNA, 20 bp, Artificial Sequence
  Synthetic oligonucleotide; CAG chr11 5283730 5283749 5283733 -
tcacctgaggtcaggagttc

SEQ ID NO: 41973 - DNA, 20 bp, Artificial Sequence
  Synthetic oligonucleotide; CAG chr11 5283725 5283744 5283728 -
tgaggtcaggagttccagac

SEQ ID NO: 41974 - DNA, 20 bp, Artificial Sequence
  Synthetic oligonucleotide; TGG chr11 5283720 5283739 5283723 -
tcaggagttccagaccagcc

SEQ ID NO: 41975 - DNA, 20 bp, Artificial Sequence
  Synthetic oligonucleotide; TGG chr11 5283711 5283730 5283714 -
ccagaccagcctggccaaca

SEQ ID NO: 41976 - DNA, 20 bp, Artificial Sequence
  Synthetic oligonucleotide; CAG chr11 5283674 5283693 5283677 -
tactaaaaaatacaaaaaat

SEQ ID NO: 41977 - DNA, 20 bp, Artificial Sequence
  Synthetic oligonucleotide; CAG chr11 5283670 5283689 5283673 -
aaaaaatacaaaaaatcagc

SEQ ID NO: 41978 - DNA, 20 bp, Artificial Sequence
  Synthetic oligonucleotide; AGG chr11 5283669 5283688 5283672 -
aaaaatacaaaaaatcagcc

SEQ ID NO: 41979 - DNA, 20 bp, Artificial Sequence
  Synthetic oligonucleotide; TGG chr11 5283664 5283683 5283667 -
tacaaaaaatcagccaggtg

SEQ ID NO: 41980 - DNA, 20 bp, Artificial Sequence
  Synthetic oligonucleotide; TGG chr11 5283661 5283680 5283664 -
aaaaaatcagccaggtgtgg

SEQ ID NO: 41981 - DNA, 20 bp, Artificial Sequence
  Synthetic oligonucleotide; CAG chr11 5283642 5283661 5283645 -
gtggcacgcgtctataatcc

SEQ ID NO: 41982 - DNA, 20 bp, Artificial Sequence
  Synthetic oligonucleotide; CAG chr11 5283634 5283653 5283637 -
cgtctataatcccagctact

SEQ ID NO: 41983 - DNA, 20 bp, Artificial Sequence
  Synthetic oligonucleotide; AGG chr11 5283633 5283652 5283636 -
gtctataatcccagctactc

SEQ ID NO: 41984 - DNA, 20 bp, Artificial Sequence
  Synthetic oligonucleotide; GAG chr11 5283631 5283650 5283634 -
ctataatcccagctactcag

SEQ ID NO: 41985 - DNA, 20 bp, Artificial Sequence
  Synthetic oligonucleotide; AGG chr11 5283630 5283649 5283633 -
tataatcccagctactcagg

SEQ ID NO: 41986 - DNA, 20 bp, Artificial Sequence
  Synthetic oligonucleotide; GAG chr11 5283625 5283644 5283628 -
tcccagctactcaggaggct

SEQ ID NO: 41987 - DNA, 20 bp, Artificial Sequence
  Synthetic oligonucleotide; AGG chr11 5283624 5283643 5283627 -
cccagctactcaggaggctg

SEQ ID NO: 41988 - DNA, 20 bp, Artificial Sequence
  Synthetic oligonucleotide; CAG chr11 5283621 5283640 5283624 -
agctactcaggaggctgagg

SEQ ID NO: 41989 - DNA, 20 bp, Artificial Sequence
  Synthetic oligonucleotide; AGG chr11 5283620 5283639 5283623 -
gctactcaggaggctgaggc

SEQ ID NO: 41990 - DNA, 20 bp, Artificial Sequence
  Synthetic oligonucleotide; GAG chr11 5283618 5283637 5283621 -
tactcaggaggctgaggcag

SEQ ID NO: 41991 - DNA, 20 bp, Artificial Sequence
  Synthetic oligonucleotide; CAG chr11 5283602 5283621 5283605 -
gcaggagaatcacttgaacc

SEQ ID NO: 41992 - DNA, 20 bp, Artificial Sequence
  Synthetic oligonucleotide; AGG chr11 5283601 5283620 5283604 -
caggagaatcacttgaaccc

SEQ ID NO: 41993 - DNA, 20 bp, Artificial Sequence
  Synthetic oligonucleotide; GAG chr11 5283599 5283618 5283602 -
ggagaatcacttgaacccag

SEQ ID NO: 41994 - DNA, 20 bp, Artificial Sequence
  Synthetic oligonucleotide; AGG chr11 5283598 5283617 5283601 -
gagaatcacttgaacccagg

SEQ ID NO: 41995 - DNA, 20 bp, Artificial Sequence
  Synthetic oligonucleotide; TGG chr11 5283595 5283614 5283598 -
aatcacttgaacccaggagg

SEQ ID NO: 41996 - DNA, 20 bp, Artificial Sequence
  Synthetic oligonucleotide; GAG chr11 5283593 5283612 5283596 -
tcacttgaacccaggaggtg

SEQ ID NO: 41997 - DNA, 20 bp, Artificial Sequence
  Synthetic oligonucleotide; AGG chr11 5283592 5283611 5283595 -
cacttgaacccaggaggtgg

SEQ ID NO: 41998 - DNA, 20 bp, Artificial Sequence
  Synthetic oligonucleotide; CAG chr11 5283586 5283605 5283589 -
aacccaggaggtggaggttg

SEQ ID NO: 41999 - DNA, 20 bp, Artificial Sequence
  Synthetic oligonucleotide; GAG chr11 5283582 5283601 5283585 -
caggaggtggaggttgcagt

SEQ ID NO: 42000 - DNA, 20 bp, Artificial Sequence
  Synthetic oligonucleotide; AAG chr11 5283577 5283596 5283580 -
ggtggaggttgcagtgagct

SEQ ID NO: 42001 - DNA, 20 bp, Artificial Sequence
  Synthetic oligonucleotide; CAG chr11 5283557 5283576 5283560 -
aagattgcaccactgcactc

SEQ ID NO: 42002 - DNA, 20 bp, Artificial Sequence
  Synthetic oligonucleotide; TAG chr11 5283552 5283571 5283555 -
tgcaccactgcactccagcc

SEQ ID NO: 42003 - DNA, 20 bp, Artificial Sequence
  Synthetic oligonucleotide; AGG chr11 5283551 5283570 5283554 -
gcaccactgcactccagcct

SEQ ID NO: 42004 - DNA, 20 bp, Artificial Sequence
  Synthetic oligonucleotide; CAG chr11 5283545 5283564 5283548 -
ctgcactccagcctaggcga

SEQ ID NO: 42005 - DNA, 20 bp, Artificial Sequence
  Synthetic oligonucleotide; GAG chr11 5283543 5283562 5283546 -
gcactccagcctaggcgaca

SEQ ID NO: 42006 - DNA, 20 bp, Artificial Sequence
  Synthetic oligonucleotide; GAG chr11 5283539 5283558 5283542 -
tccagcctaggcgacagagt

SEQ ID NO: 42007 - DNA, 20 bp, Artificial Sequence
  Synthetic oligonucleotide; AAG chr11 5283515 5283534 5283518 -
ctccatctcaaaaaaaaaaa

SEQ ID NO: 42008 - DNA, 20 bp, Artificial Sequence
  Synthetic oligonucleotide; AAG chr11 5283512 5283531 5283515 -
catctcaaaaaaaaaaaaag

SEQ ID NO: 42009 - DNA, 20 bp, Artificial Sequence
  Synthetic oligonucleotide; TAG chr11 5283490 5283509 5283493 -
gtttattatatgaattaact

SEQ ID NO: 42010 - DNA, 20 bp, Artificial Sequence
  Synthetic oligonucleotide; CAG chr11 5283468 5283487 5283471 -
gttttactcacaccaatact

SEQ ID NO: 42011 - DNA, 20 bp, Artificial Sequence
  Synthetic oligonucleotide; AAG chr11 5283465 5283484 5283468 -
ttactcacaccaatactcag

SEQ ID NO: 42012 - DNA, 20 bp, Artificial Sequence
  Synthetic oligonucleotide; TAG chr11 5283462 5283481 5283465 -
ctcacaccaatactcagaag

SEQ ID NO: 42013 - DNA, 20 bp, Artificial Sequence
  Synthetic oligonucleotide; GAG chr11 5283438 5283457 5283441 -
ttattacctcatttattgat

SEQ ID NO: 42014 - DNA, 20 bp, Artificial Sequence
  Synthetic oligonucleotide; AGG chr11 5283437 5283456 5283440 -
tattacctcatttattgatg

SEQ ID NO: 42015 - DNA, 20 bp, Artificial Sequence
  Synthetic oligonucleotide; GAG chr11 5283435 5283454 5283438 -
ttacctcatttattgatgag

SEQ ID NO: 42016 - DNA, 20 bp, Artificial Sequence
  Synthetic oligonucleotide; TAG chr11 5283419 5283438 5283422 -
tgaggagcccaatgtacttg

SEQ ID NO: 42017 - DNA, 20 bp, Artificial Sequence
  Synthetic oligonucleotide; TAG chr11 5283414 5283433 5283417 -
agcccaatgtacttgtagtg

SEQ ID NO: 42018 - DNA, 20 bp, Artificial Sequence
  Synthetic oligonucleotide; AAG chr11 5283398 5283417 5283401 -
agtgtagatcaacttattga

SEQ ID NO: 42019 - DNA, 20 bp, Artificial Sequence
  Synthetic oligonucleotide; AAG chr11 5283392 5283411 5283395 -
gatcaacttattgaaagcac

SEQ ID NO: 42020 - DNA, 20 bp, Artificial Sequence
  Synthetic oligonucleotide; AAG chr11 5283384 5283403 5283387 -
tattgaaagcacaagctaat

SEQ ID NO: 42021 - DNA, 20 bp, Artificial Sequence
  Synthetic oligonucleotide; TAG chr11 5283381 5283400 5283384 -
tgaaagcacaagctaataag

SEQ ID NO: 42022 - DNA, 20 bp, Artificial Sequence
  Synthetic oligonucleotide; TAG chr11 5283373 5283392 5283376 -
caagctaataagtagacaat

SEQ ID NO: 42023 - DNA, 20 bp, Artificial Sequence
  Synthetic oligonucleotide; TAG chr11 5283366 5283385 5283369 -
ataagtagacaattagtaat

SEQ ID NO: 42024 - DNA, 20 bp, Artificial Sequence
  Synthetic oligonucleotide; AAG chr11 5283363 5283382 5283366 -
agtagacaattagtaattag

SEQ ID NO: 42025 - DNA, 20 bp, Artificial Sequence
  Synthetic oligonucleotide; CAG chr11 5283359 5283378 5283362 -
gacaattagtaattagaagt

SEQ ID NO: 42026 - DNA, 20 bp, Artificial Sequence
  Synthetic oligonucleotide; TGG chr11 5283355 5283374 5283358 -
attagtaattagaagtcaga

SEQ ID NO: 42027 - DNA, 20 bp, Artificial Sequence
  Synthetic oligonucleotide; GAG chr11 5283349 5283368 5283352 -
aattagaagtcagatggtct

SEQ ID NO: 42028 - DNA, 20 bp, Artificial Sequence
  Synthetic oligonucleotide; GAG chr11 5283323 5283342 5283326 -
tcctactgtctacattacat

SEQ ID NO: 42029 - DNA, 20 bp, Artificial Sequence
  Synthetic oligonucleotide; TGG chr11 5283309 5283328 5283312 -
ttacatgagctcttattaac

SEQ ID NO: 42030 - DNA, 20 bp, Artificial Sequence
  Synthetic oligonucleotide; GGG chr11 5283308 5283327 5283311 -
tacatgagctcttattaact

SEQ ID NO: 42031 - DNA, 20 bp, Artificial Sequence
  Synthetic oligonucleotide; GGG chr11 5283307 5283326 5283310 -
acatgagctcttattaactg

SEQ ID NO: 42032 - DNA, 20 bp, Artificial Sequence
  Synthetic oligonucleotide; AAG chr11 5283292 5283311 5283295 -
aactggggactcgaaaatca

SEQ ID NO: 42033 - DNA, 20 bp, Artificial Sequence
  Synthetic oligonucleotide; AAG chr11 5283271 5283290 5283274 -
agacatgaaataatttgtcc

SEQ ID NO: 42034 - DNA, 20 bp, Artificial Sequence
  Synthetic oligonucleotide; CAG chr11 5283264 5283283 5283267 -
aaataatttgtccaagctta

SEQ ID NO: 42035 - DNA, 20 bp, Artificial Sequence
  Synthetic oligonucleotide; AAG chr11 5283254 5283273 5283257 -
tccaagcttacagaaccacc

SEQ ID NO: 42036 - DNA, 20 bp, Artificial Sequence
  Synthetic oligonucleotide; TAG chr11 5283251 5283270 5283254 -
aagcttacagaaccaccaag

SEQ ID NO: 42037 - DNA, 20 bp, Artificial Sequence
  Synthetic oligonucleotide; AAG chr11 5283247 5283266 5283250 -
ttacagaaccaccaagtagt

SEQ ID NO: 42038 - DNA, 20 bp, Artificial Sequence
  Synthetic oligonucleotide; AGG chr11 5283246 5283265 5283249 -
tacagaaccaccaagtagta

SEQ ID NO: 42039 - DNA, 20 bp, Artificial Sequence
  Synthetic oligonucleotide; TAG chr11 5283242 5283261 5283245 -
gaaccaccaagtagtaaggc

SEQ ID NO: 42040 - DNA, 20 bp, Artificial Sequence
  Synthetic oligonucleotide; AGG chr11 5283241 5283260 5283244 -
aaccaccaagtagtaaggct

SEQ ID NO: 42041 - DNA, 20 bp, Artificial Sequence
  Synthetic oligonucleotide; TAG chr11 5283235 5283254 5283238 -
caagtagtaaggctaggatg

SEQ ID NO: 42042 - DNA, 20 bp, Artificial Sequence
  Synthetic oligonucleotide; CAG chr11 5283229 5283248 5283232 -
gtaaggctaggatgtagacc

SEQ ID NO: 42043 - DNA, 20 bp, Artificial Sequence
  Synthetic oligonucleotide; AAG chr11 5283212 5283231 5283215 -
acccagttctgctacctctg

SEQ ID NO: 42044 - DNA, 20 bp, Artificial Sequence
  Synthetic oligonucleotide; CAG chr11 5283208 5283227 5283211 -
agttctgctacctctgaaga

SEQ ID NO: 42045 - DNA, 20 bp, Artificial Sequence
  Synthetic oligonucleotide; CAG chr11 5283194 5283213 5283197 -
tgaagacagtgttttttcca

SEQ ID NO: 42046 - DNA, 20 bp, Artificial Sequence
  Synthetic oligonucleotide; CAG chr11 5283178 5283197 5283181 -
tccacagcaaaacacaaact

SEQ ID NO: 42047 - DNA, 20 bp, Artificial Sequence
  Synthetic oligonucleotide; TGG chr11 5283169 5283188 5283172 -
aaacacaaactcagatattg

SEQ ID NO: 42048 - DNA, 20 bp, Artificial Sequence
  Synthetic oligonucleotide; GAG chr11 5283162 5283181 5283165 -
aactcagatattgtggatgc

SEQ ID NO: 42049 - DNA, 20 bp, Artificial Sequence
  Synthetic oligonucleotide; TAG chr11 5283155 5283174 5283158 -
atattgtggatgcgagaaat

SEQ ID NO: 42050 - DNA, 20 bp, Artificial Sequence
  Synthetic oligonucleotide; AAG chr11 5283152 5283171 5283155 -
ttgtggatgcgagaaattag

SEQ ID NO: 42051 - DNA, 20 bp, Artificial Sequence
  Synthetic oligonucleotide; TAG chr11 5283149 5283168 5283152 -
tggatgcgagaaattagaag

SEQ ID NO: 42052 - DNA, 20 bp, Artificial Sequence
  Synthetic oligonucleotide; TGG chr11 5283132 5283151 5283135 -
aagtagatattcctgccctg

SEQ ID NO: 42053 - DNA, 20 bp, Artificial Sequence
  Synthetic oligonucleotide; TGG chr11 5283098 5283117 5283101 -
tacttttacttcttgtcgat

SEQ ID NO: 42054 - DNA, 20 bp, Artificial Sequence
  Synthetic oligonucleotide; AAG chr11 5283095 5283114 5283098 -
ttttacttcttgtcgattgg

SEQ ID NO: 42055 - DNA, 20 bp, Artificial Sequence
  Synthetic oligonucleotide; TGG chr11 5283089 5283108 5283092 -
ttcttgtcgattggaagttg

SEQ ID NO: 42056 - DNA, 20 bp, Artificial Sequence
  Synthetic oligonucleotide; AAG chr11 5283083 5283102 5283086 -
tcgattggaagttgtggtcc

SEQ ID NO: 42057 - DNA, 20 bp, Artificial Sequence
  Synthetic oligonucleotide; CAG chr11 5283077 5283096 5283080 -
ggaagttgtggtccaagcca

SEQ ID NO: 42058 - DNA, 20 bp, Artificial Sequence
  Synthetic oligonucleotide; CAG chr11 5283071 5283090 5283074 -
tgtggtccaagccacagttg

SEQ ID NO: 42059 - DNA, 20 bp, Artificial Sequence
  Synthetic oligonucleotide; CAG chr11 5283036 5283055 5283039 -
caaccataattgcatttctt

SEQ ID NO: 42060 - DNA, 20 bp, Artificial Sequence
  Synthetic oligonucleotide; AGG chr11 5283035 5283054 5283038 -
aaccataattgcatttcttc

SEQ ID NO: 42061 - DNA, 20 bp, Artificial Sequence
  Synthetic oligonucleotide; AAG chr11 5283031 5283050 5283034 -
ataattgcatttcttcagga

SEQ ID NO: 42062 - DNA, 20 bp, Artificial Sequence
  Synthetic oligonucleotide; GAG chr11 5283025 5283044 5283028 -
gcatttcttcaggaaagttt

SEQ ID NO: 42063 - DNA, 20 bp, Artificial Sequence
  Synthetic oligonucleotide; AGG chr11 5283024 5283043 5283027 -
catttcttcaggaaagtttg

SEQ ID NO: 42064 - DNA, 20 bp, Artificial Sequence
  Synthetic oligonucleotide; GGG chr11 5283023 5283042 5283026 -
atttcttcaggaaagtttga

SEQ ID NO: 42065 - DNA, 20 bp, Artificial Sequence
  Synthetic oligonucleotide; GAG chr11 5283021 5283040 5283024 -
ttcttcaggaaagtttgagg

SEQ ID NO: 42066 - DNA, 20 bp, Artificial Sequence
  Synthetic oligonucleotide; AAG chr11 5283015 5283034 5283018 -
aggaaagtttgagggagaaa

SEQ ID NO: 42067 - DNA, 20 bp, Artificial Sequence
  Synthetic oligonucleotide; AGG chr11 5283014 5283033 5283017 -
ggaaagtttgagggagaaaa

SEQ ID NO: 42068 - DNA, 20 bp, Artificial Sequence
  Synthetic oligonucleotide; AAG chr11 5283009 5283028 5283012 -
gtttgagggagaaaaaggta

SEQ ID NO: 42069 - DNA, 20 bp, Artificial Sequence
  Synthetic oligonucleotide; TAG chr11 5282999 5283018 5283002 -
gaaaaaggtaaagaaaaatt

SEQ ID NO: 42070 - DNA, 20 bp, Artificial Sequence
  Synthetic oligonucleotide; CAG chr11 5282987 5283006 5282990 -
gaaaaatttagaaacaactt

SEQ ID NO: 42071 - DNA, 20 bp, Artificial Sequence
  Synthetic oligonucleotide; AAG chr11 5282980 5282999 5282983 -
ttagaaacaacttcagaata

SEQ ID NO: 42072 - DNA, 20 bp, Artificial Sequence
  Synthetic oligonucleotide; GAG chr11 5282978 5282997 5282981 -
agaaacaacttcagaataaa

SEQ ID NO: 42073 - DNA, 20 bp, Artificial Sequence
  Synthetic oligonucleotide; TGG chr11 5282966 5282985 5282969 -
agaataaagagattttctct

SEQ ID NO: 42074 - DNA, 20 bp, Artificial Sequence
  Synthetic oligonucleotide; GGG chr11 5282965 5282984 5282968 -
gaataaagagattttctctt

SEQ ID NO: 42075 - DNA, 20 bp, Artificial Sequence
  Synthetic oligonucleotide; CAG chr11 5282959 5282978 5282962 -
agagattttctcttgggtta

SEQ ID NO: 42076 - DNA, 20 bp, Artificial Sequence
  Synthetic oligonucleotide; GAG chr11 5282957 5282976 5282960 -
agattttctcttgggttaca

SEQ ID NO: 42077 - DNA, 20 bp, Artificial Sequence
  Synthetic oligonucleotide; AAG chr11 5282934 5282953 5282937 -
attgtcatatgacaaattat

SEQ ID NO: 42078 - DNA, 20 bp, Artificial Sequence
  Synthetic oligonucleotide; CAG chr11 5282931 5282950 5282934 -
gtcatatgacaaattataag

SEQ ID NO: 42079 - DNA, 20 bp, Artificial Sequence
  Synthetic oligonucleotide; GAG chr11 5282922 5282941 5282925 -
caaattataagcagacactt

SEQ ID NO: 42080 - DNA, 20 bp, Artificial Sequence
  Synthetic oligonucleotide; AAG chr11 5282912 5282931 5282915 -
gcagacacttgagaaaactg

SEQ ID NO: 42081 - DNA, 20 bp, Artificial Sequence
  Synthetic oligonucleotide; AGG chr11 5282911 5282930 5282914 -
cagacacttgagaaaactga

SEQ ID NO: 42082 - DNA, 20 bp, Artificial Sequence
  Synthetic oligonucleotide; TGG chr11 5282876 5282895 5282879 -
caaattaccctttgacccct

SEQ ID NO: 42083 - DNA, 20 bp, Artificial Sequence
  Synthetic oligonucleotide; AAG chr11 5282871 5282890 5282874 -
taccctttgaccccttggtc

SEQ ID NO: 42084 - DNA, 20 bp, Artificial Sequence
  Synthetic oligonucleotide; TGG chr11 5282859 5282878 5282862 -
ccttggtcaagctgcaactt

SEQ ID NO: 42085 - DNA, 20 bp, Artificial Sequence
  Synthetic oligonucleotide; AAG chr11 5282853 5282872 5282856 -
tcaagctgcaactttggtta

SEQ ID NO: 42086 - DNA, 20 bp, Artificial Sequence
  Synthetic oligonucleotide; AGG chr11 5282852 5282871 5282855 -
caagctgcaactttggttaa

SEQ ID NO: 42087 - DNA, 20 bp, Artificial Sequence
  Synthetic oligonucleotide; GGG chr11 5282851 5282870 5282854 -
aagctgcaactttggttaaa

SEQ ID NO: 42088 - DNA, 20 bp, Artificial Sequence
  Synthetic oligonucleotide; GAG chr11 5282849 5282868 5282852 -
gctgcaactttggttaaagg

SEQ ID NO: 42089 - DNA, 20 bp, Artificial Sequence
  Synthetic oligonucleotide; TAG chr11 5282833 5282852 5282836 -
aagggagtgtttatgtgtta

SEQ ID NO: 42090 - DNA, 20 bp, Artificial Sequence
  Synthetic oligonucleotide; TGG chr11 5282814 5282833 5282817 -
atagtgttcatttactcttc

SEQ ID NO: 42091 - DNA, 20 bp, Artificial Sequence
  Synthetic oligonucleotide; TGG chr11 5282801 5282820 5282804 -
actcttctggtctaacccat

SEQ ID NO: 42092 - DNA, 20 bp, Artificial Sequence
  Synthetic oligonucleotide; CAG chr11 5282782 5282801 5282785 -
ttggctccgtcttcatcctg

SEQ ID NO: 42093 - DNA, 20 bp, Artificial Sequence
  Synthetic oligonucleotide; CAG chr11 5282773 5282792 5282776 -
tcttcatcctgcagtgacct

SEQ ID NO: 42094 - DNA, 20 bp, Artificial Sequence
  Synthetic oligonucleotide; CAG chr11 5282765 5282784 5282768 -
ctgcagtgacctcagtgcct

SEQ ID NO: 42095 - DNA, 20 bp, Artificial Sequence
  Synthetic oligonucleotide; TAG chr11 5282743 5282762 5282746 -
gaaacatacatatgtttgtc

SEQ ID NO: 42096 - DNA, 20 bp, Artificial Sequence
  Synthetic oligonucleotide; AAG chr11 5282737 5282756 5282740 -
tacatatgtttgtctagttt

SEQ ID NO: 42097 - DNA, 20 bp, Artificial Sequence
  Synthetic oligonucleotide; TAG chr11 5282716 5282735 5282719 -
agtttgtgtgaaattctaac

SEQ ID NO: 42098 - DNA, 20 bp, Artificial Sequence
  Synthetic oligonucleotide; AAG chr11 5282709 5282728 5282712 -
gtgaaattctaactagcgtc

SEQ ID NO: 42099 - DNA, 20 bp, Artificial Sequence
  Synthetic oligonucleotide; GAG chr11 5282702 5282721 5282705 -
tctaactagcgtcaagaact

SEQ ID NO: 42100 - DNA, 20 bp, Artificial Sequence
  Synthetic oligonucleotide; AGG chr11 5282701 5282720 5282704 -
ctaactagcgtcaagaactg

SEQ ID NO: 42101 - DNA, 20 bp, Artificial Sequence
  Synthetic oligonucleotide; GGG chr11 5282700 5282719 5282703 -
taactagcgtcaagaactga

SEQ ID NO: 42102 - DNA, 20 bp, Artificial Sequence
  Synthetic oligonucleotide; TAG chr11 5282684 5282703 5282687 -
ctgagggccctaaactatgc

SEQ ID NO: 42103 - DNA, 20 bp, Artificial Sequence
  Synthetic oligonucleotide; AGG chr11 5282683 5282702 5282686 -
tgagggccctaaactatgct

SEQ ID NO: 42104 - DNA, 20 bp, Artificial Sequence
  Synthetic oligonucleotide; TAG chr11 5282678 5282697 5282681 -
gccctaaactatgctaggaa

SEQ ID NO: 42105 - DNA, 20 bp, Artificial Sequence
  Synthetic oligonucleotide; TGG chr11 5282670 5282689 5282673 -
ctatgctaggaatagtgctg

SEQ ID NO: 42106 - DNA, 20 bp, Artificial Sequence
  Synthetic oligonucleotide; TAG chr11 5282659 5282678 5282662 -
atagtgctgtggtgctgtga

SEQ ID NO: 42107 - DNA, 20 bp, Artificial Sequence
  Synthetic oligonucleotide; AGG chr11 5282658 5282677 5282661 -
tagtgctgtggtgctgtgat

SEQ ID NO: 42108 - DNA, 20 bp, Artificial Sequence
  Synthetic oligonucleotide; AAG chr11 5282650 5282669 5282653 -
tggtgctgtgataggtacac

SEQ ID NO: 42109 - DNA, 20 bp, Artificial Sequence
  Synthetic oligonucleotide; GAG chr11 5282643 5282662 5282646 -
gtgataggtacacaagaaat

SEQ ID NO: 42110 - DNA, 20 bp, Artificial Sequence
  Synthetic oligonucleotide; AAG chr11 5282640 5282659 5282643 -
ataggtacacaagaaatgag

SEQ ID NO: 42111 - DNA, 20 bp, Artificial Sequence
  Synthetic oligonucleotide; CAG chr11 5282631 5282650 5282634 -
caagaaatgagaagaaactg

SEQ ID NO: 42112 - DNA, 20 bp, Artificial Sequence
  Synthetic oligonucleotide; CGG chr11 5282607 5282626 5282610 -
ttctctgcatctccctttgc

SEQ ID NO: 42113 - DNA, 20 bp, Artificial Sequence
  Synthetic oligonucleotide; GGG chr11 5282606 5282625 5282609 -
tctctgcatctccctttgcc

SEQ ID NO: 42114 - DNA, 20 bp, Artificial Sequence
  Synthetic oligonucleotide; AAG chr11 5282593 5282612 5282596 -
ctttgccgggtctgacaaca

SEQ ID NO: 42115 - DNA, 20 bp, Artificial Sequence
  Synthetic oligonucleotide; AAG chr11 5282568 5282587 5282571 -
tccccaaattttaccaatgc

SEQ ID NO: 42116 - DNA, 20 bp, Artificial Sequence
  Synthetic oligonucleotide; TGG chr11 5282530 5282549 5282533 -
ctaactactttaaaatcatt

SEQ ID NO: 42117 - DNA, 20 bp, Artificial Sequence
  Synthetic oligonucleotide; GGG chr11 5282529 5282548 5282532 -
taactactttaaaatcattt

SEQ ID NO: 42118 - DNA, 20 bp, Artificial Sequence
  Synthetic oligonucleotide; GGG chr11 5282528 5282547 5282531 -
aactactttaaaatcatttg

SEQ ID NO: 42119 - DNA, 20 bp, Artificial Sequence
  Synthetic oligonucleotide; AAG chr11 5282498 5282517 5282501 -
ttgtctttctcatctgtaaa

SEQ ID NO: 42120 - DNA, 20 bp, Artificial Sequence
  Synthetic oligonucleotide; TGG chr11 5282493 5282512 5282496 -
tttctcatctgtaaaaagaa

SEQ ID NO: 42121 - DNA, 20 bp, Artificial Sequence
  Synthetic oligonucleotide; AAG chr11 5282490 5282509 5282493 -
ctcatctgtaaaaagaatgg

SEQ ID NO: 42122 - DNA, 20 bp, Artificial Sequence
  Synthetic oligonucleotide; CAG chr11 5282475 5282494 5282478 -
aatggaagaactcattccta

SEQ ID NO: 42123 - DNA, 20 bp, Artificial Sequence
  Synthetic oligonucleotide; TGG chr11 5282451 5282470 5282454 -
actccctatgtcttccctga

SEQ ID NO: 42124 - DNA, 20 bp, Artificial Sequence
  Synthetic oligonucleotide; GGG chr11 5282450 5282469 5282453 -
ctccctatgtcttccctgat

SEQ ID NO: 42125 - DNA, 20 bp, Artificial Sequence
  Synthetic oligonucleotide; TAG chr11 5282446 5282465 5282449 -
ctatgtcttccctgatgggc

SEQ ID NO: 42126 - DNA, 20 bp, Artificial Sequence
  Synthetic oligonucleotide; GAG chr11 5282444 5282463 5282447 -
atgtcttccctgatgggcta

SEQ ID NO: 42127 - DNA, 20 bp, Artificial Sequence
  Synthetic oligonucleotide; TAG chr11 5282423 5282442 5282426 -
agttcctctttctcaaaaat

SEQ ID NO: 42128 - DNA, 20 bp, Artificial Sequence
  Synthetic oligonucleotide; AAG chr11 5282400 5282419 5282403 -
ccattattgtatttccttct

SEQ ID NO: 42129 - DNA, 20 bp, Artificial Sequence
  Synthetic oligonucleotide; AAG chr11 5282394 5282413 5282397 -
ttgtatttccttctaagcca

SEQ ID NO: 42130 - DNA, 20 bp, Artificial Sequence
  Synthetic oligonucleotide; CAG chr11 5282389 5282408 5282392 -
tttccttctaagccaaagct

SEQ ID NO: 42131 - DNA, 20 bp, Artificial Sequence
  Synthetic oligonucleotide; GAG chr11 5282387 5282406 5282390 -
tccttctaagccaaagctca

SEQ ID NO: 42132 - DNA, 20 bp, Artificial Sequence
  Synthetic oligonucleotide; AGG chr11 5282386 5282405 5282389 -
ccttctaagccaaagctcag

SEQ ID NO: 42133 - DNA, 20 bp, Artificial Sequence
  Synthetic oligonucleotide; CAG chr11 5282371 5282390 5282374 -
ctcagaggtcttgtattgcc

SEQ ID NO: 42134 - DNA, 20 bp, Artificial Sequence
  Synthetic oligonucleotide; TGG chr11 5282356 5282375 5282359 -
ttgcccagtgacatgcacac

SEQ ID NO: 42135 - DNA, 20 bp, Artificial Sequence
  Synthetic oligonucleotide; AAG chr11 5282349 5282368 5282352 -
gtgacatgcacactggtcaa

SEQ ID NO: 42136 - DNA, 20 bp, Artificial Sequence
  Synthetic oligonucleotide; TAG chr11 5282346 5282365 5282349 -
acatgcacactggtcaaaag

SEQ ID NO: 42137 - DNA, 20 bp, Artificial Sequence
  Synthetic oligonucleotide; AGG chr11 5282345 5282364 5282348 -
catgcacactggtcaaaagt

SEQ ID NO: 42138 - DNA, 20 bp, Artificial Sequence
  Synthetic oligonucleotide; AAG chr11 5282340 5282359 5282343 -
acactggtcaaaagtaggct

SEQ ID NO: 42139 - DNA, 20 bp, Artificial Sequence
  Synthetic oligonucleotide; TAG chr11 5282337 5282356 5282340 -
ctggtcaaaagtaggctaag

SEQ ID NO: 42140 - DNA, 20 bp, Artificial Sequence
  Synthetic oligonucleotide; AAG chr11 5282334 5282353 5282337 -
gtcaaaagtaggctaagtag

SEQ ID NO: 42141 - DNA, 20 bp, Artificial Sequence
  Synthetic oligonucleotide; AGG chr11 5282333 5282352 5282336 -
tcaaaagtaggctaagtaga

SEQ ID NO: 42142 - DNA, 20 bp, Artificial Sequence
  Synthetic oligonucleotide; GGG chr11 5282332 5282351 5282335 -
caaaagtaggctaagtagaa

SEQ ID NO: 42143 - DNA, 20 bp, Artificial Sequence
  Synthetic oligonucleotide; CAG chr11 5282321 5282340 5282324 -
taagtagaagggtactttca

SEQ ID NO: 42144 - DNA, 20 bp, Artificial Sequence
  Synthetic oligonucleotide; AGG chr11 5282320 5282339 5282323 -
aagtagaagggtactttcac

SEQ ID NO: 42145 - DNA, 20 bp, Artificial Sequence
  Synthetic oligonucleotide; CAG chr11 5282315 5282334 5282318 -
gaagggtactttcacaggaa

SEQ ID NO: 42146 - DNA, 20 bp, Artificial Sequence
  Synthetic oligonucleotide; GAG chr11 5282313 5282332 5282316 -
agggtactttcacaggaaca

SEQ ID NO: 42147 - DNA, 20 bp, Artificial Sequence
  Synthetic oligonucleotide; GAG chr11 5282311 5282330 5282314 -
ggtactttcacaggaacaga

SEQ ID NO: 42148 - DNA, 20 bp, Artificial Sequence
  Synthetic oligonucleotide; AAG chr11 5282305 5282324 5282308 -
ttcacaggaacagagagcaa

SEQ ID NO: 42149 - DNA, 20 bp, Artificial Sequence
  Synthetic oligonucleotide; GAG chr11 5282303 5282322 5282306 -
cacaggaacagagagcaaaa

SEQ ID NO: 42150 - DNA, 20 bp, Artificial Sequence
  Synthetic oligonucleotide; AGG chr11 5282302 5282321 5282305 -
acaggaacagagagcaaaag

SEQ ID NO: 42151 - DNA, 20 bp, Artificial Sequence
  Synthetic oligonucleotide; TGG chr11 5282299 5282318 5282302 -
ggaacagagagcaaaagagg

SEQ ID NO: 42152 - DNA, 20 bp, Artificial Sequence
  Synthetic oligonucleotide; GGG chr11 5282298 5282317 5282301 -
gaacagagagcaaaagaggt

SEQ ID NO: 42153 - DNA, 20 bp, Artificial Sequence
  Synthetic oligonucleotide; GAG chr11 5282290 5282309 5282293 -
agcaaaagaggtgggtgaat

SEQ ID NO: 42154 - DNA, 20 bp, Artificial Sequence
  Synthetic oligonucleotide; GAG chr11 5282288 5282307 5282291 -
caaaagaggtgggtgaatga

SEQ ID NO: 42155 - DNA, 20 bp, Artificial Sequence
  Synthetic oligonucleotide; AGG chr11 5282287 5282306 5282290 -
aaaagaggtgggtgaatgag

SEQ ID NO: 42156 - DNA, 20 bp, Artificial Sequence
  Synthetic oligonucleotide; GGG chr11 5282286 5282305 5282289 -
aaagaggtgggtgaatgaga

SEQ ID NO: 42157 - DNA, 20 bp, Artificial Sequence
  Synthetic oligonucleotide; AAG chr11 5282282 5282301 5282285 -
aggtgggtgaatgagagggt

SEQ ID NO: 42158 - DNA, 20 bp, Artificial Sequence
  Synthetic oligonucleotide; GAG chr11 5282278 5282297 5282281 -
gggtgaatgagagggtaagt

SEQ ID NO: 42159 - DNA, 20 bp, Artificial Sequence
  Synthetic oligonucleotide; AAG chr11 5282273 5282292 5282276 -
aatgagagggtaagtgagaa

SEQ ID NO: 42160 - DNA, 20 bp, Artificial Sequence
  Synthetic oligonucleotide; GAG chr11 5282264 5282283 5282267 -
gtaagtgagaaaagacaaat

SEQ ID NO: 42161 - DNA, 20 bp, Artificial Sequence
  Synthetic oligonucleotide; AAG chr11 5282261 5282280 5282264 -
agtgagaaaagacaaatgag

SEQ ID NO: 42162 - DNA, 20 bp, Artificial Sequence
  Synthetic oligonucleotide; TGG chr11 5282247 5282266 5282250 -
aatgagaagttacaacatga

SEQ ID NO: 42163 - DNA, 20 bp, Artificial Sequence
  Synthetic oligonucleotide; TAG chr11 5282224 5282243 5282227 -
cttgttgtctaaatatctcc

SEQ ID NO: 42164 - DNA, 20 bp, Artificial Sequence
  Synthetic oligonucleotide; AGG chr11 5282223 5282242 5282226 -
ttgttgtctaaatatctcct

SEQ ID NO: 42165 - DNA, 20 bp, Artificial Sequence
  Synthetic oligonucleotide; GGG chr11 5282222 5282241 5282225 -
tgttgtctaaatatctccta

SEQ ID NO: 42166 - DNA, 20 bp, Artificial Sequence
  Synthetic oligonucleotide; GAG chr11 5282210 5282229 5282213 -
atctcctagggaattattgt

SEQ ID NO: 42167 - DNA, 20 bp, Artificial Sequence
  Synthetic oligonucleotide; GAG chr11 5282208 5282227 5282211 -
ctcctagggaattattgtga

SEQ ID NO: 42168 - DNA, 20 bp, Artificial Sequence
  Synthetic oligonucleotide; AGG chr11 5282207 5282226 5282210 -
tcctagggaattattgtgag

SEQ ID NO: 42169 - DNA, 20 bp, Artificial Sequence
  Synthetic oligonucleotide; TAG chr11 5282198 5282217 5282201 -
attattgtgagaggtctgaa

SEQ ID NO: 42170 - DNA, 20 bp, Artificial Sequence
  Synthetic oligonucleotide; AAG chr11 5282184 5282203 5282187 -
tctgaatagtgttgtaaaat

SEQ ID NO: 42171 - DNA, 20 bp, Artificial Sequence
  Synthetic oligonucleotide; CAG chr11 5282159 5282178 5282162 -
gaatctgctgccaacattaa

SEQ ID NO: 42172 - DNA, 20 bp, Artificial Sequence
  Synthetic oligonucleotide; AAG chr11 5282154 5282173 5282157 -
tgctgccaacattaacagtc

SEQ ID NO: 42173 - DNA, 20 bp, Artificial Sequence
  Synthetic oligonucleotide; AAG chr11 5282114 5282133 5282117 -
tgtacctccaattattcttt

SEQ ID NO: 42174 - DNA, 20 bp, Artificial Sequence
  Synthetic oligonucleotide; AGG chr11 5282113 5282132 5282116 -
gtacctccaattattcttta

SEQ ID NO: 42175 - DNA, 20 bp, Artificial Sequence
  Synthetic oligonucleotide; TAG chr11 5282110 5282129 5282113 -
cctccaattattctttaagg

SEQ ID NO: 42176 - DNA, 20 bp, Artificial Sequence
  Synthetic oligonucleotide; TAG chr11 5282094 5282113 5282097 -
aaggtagcatgcaactgtaa

SEQ ID NO: 42177 - DNA, 20 bp, Artificial Sequence
  Synthetic oligonucleotide; CAG chr11 5282060 5282079 5282063 -
tatttatcataatactgtaa

SEQ ID NO: 42178 - DNA, 20 bp, Artificial Sequence
  Synthetic oligonucleotide; TAG chr11 5282027 5282046 5282030 -
ctgaatatatactgtgtccc

SEQ ID NO: 42179 - DNA, 20 bp, Artificial Sequence
  Synthetic oligonucleotide; TAG chr11 5281984 5282003 5281987 -
tctcatcctcataattctat

SEQ ID NO: 42180 - DNA, 20 bp, Artificial Sequence
  Synthetic oligonucleotide; CAG chr11 5281955 5281974 5281958 -
catattatcatcctatattt

SEQ ID NO: 42181 - DNA, 20 bp, Artificial Sequence
  Synthetic oligonucleotide; GAG chr11 5281953 5281972 5281956 -
tattatcatcctatatttca

SEQ ID NO: 42182 - DNA, 20 bp, Artificial Sequence
  Synthetic oligonucleotide; AAG chr11 5281945 5281964 5281948 -
tcctatatttcagagacttc

SEQ ID NO: 42183 - DNA, 20 bp, Artificial Sequence
  Synthetic oligonucleotide; AAG chr11 5281942 5281961 5281945 -
tatatttcagagacttcaag

SEQ ID NO: 42184 - DNA, 20 bp, Artificial Sequence
  Synthetic oligonucleotide; AAG chr11 5281937 5281956 5281940 -
ttcagagacttcaagaagtt

SEQ ID NO: 42185 - DNA, 20 bp, Artificial Sequence
  Synthetic oligonucleotide; AAG chr11 5281924 5281943 5281927 -
agaagttaagcaacttgctc

SEQ ID NO: 42186 - DNA, 20 bp, Artificial Sequence
  Synthetic oligonucleotide; AAG chr11 5281914 5281933 5281917 -
caacttgctcaagatcatct

SEQ ID NO: 42187 - DNA, 20 bp, Artificial Sequence
  Synthetic oligonucleotide; AAG chr11 5281911 5281930 5281914 -
cttgctcaagatcatctaag

SEQ ID NO: 42188 - DNA, 20 bp, Artificial Sequence
  Synthetic oligonucleotide; TAG chr11 5281908 5281927 5281911 -
gctcaagatcatctaagaag

SEQ ID NO: 42189 - DNA, 20 bp, Artificial Sequence
  Synthetic oligonucleotide; AGG chr11 5281907 5281926 5281910 -
ctcaagatcatctaagaagt

SEQ ID NO: 42190 - DNA, 20 bp, Artificial Sequence
  Synthetic oligonucleotide; TGG chr11 5281904 5281923 5281907 -
aagatcatctaagaagtagg

SEQ ID NO: 42191 - DNA, 20 bp, Artificial Sequence
  Synthetic oligonucleotide; TGG chr11 5281895 5281914 5281898 -
taagaagtaggtggtatttc

SEQ ID NO: 42192 - DNA, 20 bp, Artificial Sequence
  Synthetic oligonucleotide; GGG chr11 5281894 5281913 5281897 -
aagaagtaggtggtatttct

SEQ ID NO: 42193 - DNA, 20 bp, Artificial Sequence
  Synthetic oligonucleotide; TGG chr11 5281885 5281904 5281888 -
gtggtatttctgggctcatt

SEQ ID NO: 42194 - DNA, 20 bp, Artificial Sequence
  Synthetic oligonucleotide; TGG chr11 5281865 5281884 5281868 -
tggcccctcctaatctctca

SEQ ID NO: 42195 - DNA, 20 bp, Artificial Sequence
  Synthetic oligonucleotide; TGG chr11 5281857 5281876 5281860 -
cctaatctctcatggcaaca

SEQ ID NO: 42196 - DNA, 20 bp, Artificial Sequence
  Synthetic oligonucleotide; AAG chr11 5281847 5281866 5281850 -
catggcaacatggctgccta

SEQ ID NO: 42197 - DNA, 20 bp, Artificial Sequence
  Synthetic oligonucleotide; CAG chr11 5281824 5281843 5281827 -
tgttgattgccttaattcat

SEQ ID NO: 42198 - DNA, 20 bp, Artificial Sequence
  Synthetic oligonucleotide; AGG chr11 5281823 5281842 5281826 -
gttgattgccttaattcatc

SEQ ID NO: 42199 - DNA, 20 bp, Artificial Sequence
  Synthetic oligonucleotide; GGG chr11 5281822 5281841 5281825 -
ttgattgccttaattcatca

SEQ ID NO: 42200 - DNA, 20 bp, Artificial Sequence
  Synthetic oligonucleotide; TGG chr11 5281818 5281837 5281821 -
ttgccttaattcatcaggga

SEQ ID NO: 42201 - DNA, 20 bp, Artificial Sequence
  Synthetic oligonucleotide; GGG chr11 5281817 5281836 5281820 -
tgccttaattcatcagggat

SEQ ID NO: 42202 - DNA, 20 bp, Artificial Sequence
  Synthetic oligonucleotide; CAG chr11 5281801 5281820 5281804 -
ggatgggctcatactcactg

SEQ ID NO: 42203 - DNA, 20 bp, Artificial Sequence
  Synthetic oligonucleotide; TGG chr11 5281790 5281809 5281793 -
tactcactgcagaccttaac

SEQ ID NO: 42204 - DNA, 20 bp, Artificial Sequence
  Synthetic oligonucleotide; TAG chr11 5281755 5281774 5281758 -
ttatgtgatctgcctgaccc

SEQ ID NO: 42205 - DNA, 20 bp, Artificial Sequence
  Synthetic oligonucleotide; TAG chr11 5281752 5281771 5281755 -
tgtgatctgcctgaccctag

SEQ ID NO: 42206 - DNA, 20 bp, Artificial Sequence
  Synthetic oligonucleotide; GAG chr11 5281731 5281750 5281734 -
agacttatgaaatttctgat

SEQ ID NO: 42207 - DNA, 20 bp, Artificial Sequence
  Synthetic oligonucleotide; AAG chr11 5281727 5281746 5281730 -
ttatgaaatttctgatgaga

SEQ ID NO: 42208 - DNA, 20 bp, Artificial Sequence
  Synthetic oligonucleotide; AGG chr11 5281726 5281745 5281729 -
tatgaaatttctgatgagaa

SEQ ID NO: 42209 - DNA, 20 bp, Artificial Sequence
  Synthetic oligonucleotide; GAG chr11 5281724 5281743 5281727 -
tgaaatttctgatgagaaag

SEQ ID NO: 42210 - DNA, 20 bp, Artificial Sequence
  Synthetic oligonucleotide; GAG chr11 5281722 5281741 5281725 -
aaatttctgatgagaaagga

SEQ ID NO: 42211 - DNA, 20 bp, Artificial Sequence
  Synthetic oligonucleotide; GAG chr11 5281720 5281739 5281723 -
atttctgatgagaaaggaga

SEQ ID NO: 42212 - DNA, 20 bp, Artificial Sequence
  Synthetic oligonucleotide; AGG chr11 5281719 5281738 5281722 -
tttctgatgagaaaggagag

SEQ ID NO: 42213 - DNA, 20 bp, Artificial Sequence
  Synthetic oligonucleotide; GAG chr11 5281717 5281736 5281720 -
tctgatgagaaaggagagag

SEQ ID NO: 42214 - DNA, 20 bp, Artificial Sequence
  Synthetic oligonucleotide; AAG chr11 5281713 5281732 5281716 -
atgagaaaggagagaggaga

SEQ ID NO: 42215 - DNA, 20 bp, Artificial Sequence
  Synthetic oligonucleotide; AGG chr11 5281712 5281731 5281715 -
tgagaaaggagagaggagaa

SEQ ID NO: 42216 - DNA, 20 bp, Artificial Sequence
  Synthetic oligonucleotide; CAG chr11 5281709 5281728 5281712 -
gaaaggagagaggagaaagg

SEQ ID NO: 42217 - DNA, 20 bp, Artificial Sequence
  Synthetic oligonucleotide; GAG chr11 5281707 5281726 5281710 -
aaggagagaggagaaaggca

SEQ ID NO: 42218 - DNA, 20 bp, Artificial Sequence
  Synthetic oligonucleotide; GAG chr11 5281693 5281712 5281696 -
aaggcagagctgactgtgat

SEQ ID NO: 42219 - DNA, 20 bp, Artificial Sequence
  Synthetic oligonucleotide; AAG chr11 5281685 5281704 5281688 -
gctgactgtgatgagtgatg

SEQ ID NO: 42220 - DNA, 20 bp, Artificial Sequence
  Synthetic oligonucleotide; AGG chr11 5281684 5281703 5281687 -
ctgactgtgatgagtgatga

SEQ ID NO: 42221 - DNA, 20 bp, Artificial Sequence
  Synthetic oligonucleotide; TGG chr11 5281669 5281688 5281672 -
gatgaaggtgccttctcatc

SEQ ID NO: 42222 - DNA, 20 bp, Artificial Sequence
  Synthetic oligonucleotide; GGG chr11 5281668 5281687 5281671 -
atgaaggtgccttctcatct

SEQ ID NO: 42223 - DNA, 20 bp, Artificial Sequence
  Synthetic oligonucleotide; CAG chr11 5281662 5281681 5281665 -
gtgccttctcatctgggtac

SEQ ID NO: 42224 - DNA, 20 bp, Artificial Sequence
  Synthetic oligonucleotide; TGG chr11 5281659 5281678 5281662 -
ccttctcatctgggtaccag

SEQ ID NO: 42225 - DNA, 20 bp, Artificial Sequence
  Synthetic oligonucleotide; GGG chr11 5281658 5281677 5281661 -
cttctcatctgggtaccagt

SEQ ID NO: 42226 - DNA, 20 bp, Artificial Sequence
  Synthetic oligonucleotide; GGG chr11 5281657 5281676 5281660 -
ttctcatctgggtaccagtg

SEQ ID NO: 42227 - DNA, 20 bp, Artificial Sequence
  Synthetic oligonucleotide; AAG chr11 5281649 5281668 5281652 -
tgggtaccagtggggcctct

SEQ ID NO: 42228 - DNA, 20 bp, Artificial Sequence
  Synthetic oligonucleotide; AAG chr11 5281643 5281662 5281646 -
ccagtggggcctctaagact

SEQ ID NO: 42229 - DNA, 20 bp, Artificial Sequence
  Synthetic oligonucleotide; TAG chr11 5281619 5281638 5281622 -
cactctgtctcactgtgtct

SEQ ID NO: 42230 - DNA, 20 bp, Artificial Sequence
  Synthetic oligonucleotide; CAG chr11 5281615 5281634 5281618 -
ctgtctcactgtgtcttagc

SEQ ID NO: 42231 - DNA, 20 bp, Artificial Sequence
  Synthetic oligonucleotide; CAG chr11 5281605 5281624 5281608 -
gtgtcttagccagttcctta

SEQ ID NO: 42232 - DNA, 20 bp, Artificial Sequence
  Synthetic oligonucleotide; TGG chr11 5281592 5281611 5281595 -
ttccttacagcttgccctga

SEQ ID NO: 42233 - DNA, 20 bp, Artificial Sequence
  Synthetic oligonucleotide; GGG chr11 5281591 5281610 5281594 -
tccttacagcttgccctgat

SEQ ID NO: 42234 - DNA, 20 bp, Artificial Sequence
  Synthetic oligonucleotide; GAG chr11 5281589 5281608 5281592 -
cttacagcttgccctgatgg

SEQ ID NO: 42235 - DNA, 20 bp, Artificial Sequence
  Synthetic oligonucleotide; TAG chr11 5281585 5281604 5281588 -
cagcttgccctgatgggaga

SEQ ID NO: 42236 - DNA, 20 bp, Artificial Sequence
  Synthetic oligonucleotide; GAG chr11 5281583 5281602 5281586 -
gcttgccctgatgggagata

SEQ ID NO: 42237 - DNA, 20 bp, Artificial Sequence
  Synthetic oligonucleotide; TGG chr11 5281578 5281597 5281581 -
ccctgatgggagatagagaa

SEQ ID NO: 42238 - DNA, 20 bp, Artificial Sequence
  Synthetic oligonucleotide; GGG chr11 5281577 5281596 5281580 -
cctgatgggagatagagaat

SEQ ID NO: 42239 - DNA, 20 bp, Artificial Sequence
  Synthetic oligonucleotide; AAG chr11 5281540 5281559 5281543 -
aaaataaattttcatttctc

SEQ ID NO: 42240 - DNA, 20 bp, Artificial Sequence
  Synthetic oligonucleotide; AGG chr11 5281539 5281558 5281542 -
aaataaattttcatttctca

SEQ ID NO: 42241 - DNA, 20 bp, Artificial Sequence
  Synthetic oligonucleotide; CAG chr11 5281471 5281490 5281474 -
ccactctctaaaataatcca

SEQ ID NO: 42242 - DNA, 20 bp, Artificial Sequence
  Synthetic oligonucleotide; GAG chr11 5281467 5281486 5281470 -
tctctaaaataatccacagt

SEQ ID NO: 42243 - DNA, 20 bp, Artificial Sequence
  Synthetic oligonucleotide; GAG chr11 5281465 5281484 5281468 -
tctaaaataatccacagtga

SEQ ID NO: 42244 - DNA, 20 bp, Artificial Sequence
  Synthetic oligonucleotide; TGG chr11 5281420 5281439 5281423 -
ataaatacctctattaaata

SEQ ID NO: 42245 - DNA, 20 bp, Artificial Sequence
  Synthetic oligonucleotide; TGG chr11 5281411 5281430 5281414 -
tctattaaatatggaaaatc

SEQ ID NO: 42246 - DNA, 20 bp, Artificial Sequence
  Synthetic oligonucleotide; GGG chr11 5281410 5281429 5281413 -
ctattaaatatggaaaatct

SEQ ID NO: 42247 - DNA, 20 bp, Artificial Sequence
  Synthetic oligonucleotide; TGG chr11 5281405 5281424 5281408 -
aaatatggaaaatctgggca

SEQ ID NO: 42248 - DNA, 20 bp, Artificial Sequence
  Synthetic oligonucleotide; CAG chr11 5281383 5281402 5281386 -
gtgtctcacacctgtaatcc

SEQ ID NO: 42249 - DNA, 20 bp, Artificial Sequence
  Synthetic oligonucleotide; TGG chr11 5281375 5281394 5281378 -
cacctgtaatcccagcactt

SEQ ID NO: 42250 - DNA, 20 bp, Artificial Sequence
  Synthetic oligonucleotide; GGG chr11 5281374 5281393 5281377 -
acctgtaatcccagcacttt

SEQ ID NO: 42251 - DNA, 20 bp, Artificial Sequence
  Synthetic oligonucleotide; GAG chr11 5281372 5281391 5281375 -
ctgtaatcccagcactttgg

SEQ ID NO: 42252 - DNA, 20 bp, Artificial Sequence
  Synthetic oligonucleotide; AGG chr11 5281371 5281390 5281374 -
tgtaatcccagcactttggg

SEQ ID NO: 42253 - DNA, 20 bp, Artificial Sequence
  Synthetic oligonucleotide; GAG chr11 5281366 5281385 5281369 -
tcccagcactttgggaggct

SEQ ID NO: 42254 - DNA, 20 bp, Artificial Sequence
  Synthetic oligonucleotide; AGG chr11 5281365 5281384 5281368 -
cccagcactttgggaggctg

SEQ ID NO: 42255 - DNA, 20 bp, Artificial Sequence
  Synthetic oligonucleotide; TGG chr11 5281362 5281381 5281365 -
agcactttgggaggctgagg

SEQ ID NO: 42256 - DNA, 20 bp, Artificial Sequence
  Synthetic oligonucleotide; GGG chr11 5281361 5281380 5281364 -
gcactttgggaggctgaggt

SEQ ID NO: 42257 - DNA, 20 bp, Artificial Sequence
  Synthetic oligonucleotide; TGG chr11 5281358 5281377 5281361 -
ctttgggaggctgaggtggg

SEQ ID NO: 42258 - DNA, 20 bp, Artificial Sequence
  Synthetic oligonucleotide; TGG chr11 5281349 5281368 5281352 -
gctgaggtgggtggactgct

SEQ ID NO: 42259 - DNA, 20 bp, Artificial Sequence
  Synthetic oligonucleotide; GAG chr11 5281347 5281366 5281350 -
tgaggtgggtggactgcttg

SEQ ID NO: 42260 - DNA, 20 bp, Artificial Sequence
  Synthetic oligonucleotide; CAG chr11 5281342 5281361 5281345 -
tgggtggactgcttggagct

SEQ ID NO: 42261 - DNA, 20 bp, Artificial Sequence
  Synthetic oligonucleotide; AGG chr11 5281341 5281360 5281344 -
gggtggactgcttggagctc

SEQ ID NO: 42262 - DNA, 20 bp, Artificial Sequence
  Synthetic oligonucleotide; GAG chr11 5281339 5281358 5281342 -
gtggactgcttggagctcag

SEQ ID NO: 42263 - DNA, 20 bp, Artificial Sequence
  Synthetic oligonucleotide; AAG chr11 5281333 5281352 5281336 -
tgcttggagctcaggagttc

SEQ ID NO: 42264 - DNA, 20 bp, Artificial Sequence
  Synthetic oligonucleotide; TGG chr11 5281323 5281342 5281326 -
tcaggagttcaagaccatct

SEQ ID NO: 42265 - DNA, 20 bp, Artificial Sequence
  Synthetic oligonucleotide; TGG chr11 5281314 5281333 5281317 -
caagaccatcttggacaaca

SEQ ID NO: 42266 - DNA, 20 bp, Artificial Sequence
  Synthetic oligonucleotide; AAG chr11 5281291 5281310 5281294 -
tgataccctgcctctacaaa

SEQ ID NO: 42267 - DNA, 20 bp, Artificial Sequence
  Synthetic oligonucleotide; TAG chr11 5281279 5281298 5281282 -
tctacaaaaagtacaaaaat

SEQ ID NO: 42268 - DNA, 20 bp, Artificial Sequence
  Synthetic oligonucleotide; TGG chr11 5281274 5281293 5281277 -
aaaaagtacaaaaattagcc

SEQ ID NO: 42269 - DNA, 20 bp, Artificial Sequence
  Synthetic oligonucleotide; TGG chr11 5281269 5281288 5281272 -
gtacaaaaattagcctggca

SEQ ID NO: 42270 - DNA, 20 bp, Artificial Sequence
  Synthetic oligonucleotide; TGG chr11 5281266 5281285 5281269 -
caaaaattagcctggcatgg

SEQ ID NO: 42271 - DNA, 20 bp, Artificial Sequence
  Synthetic oligonucleotide; CAG chr11 5281247 5281266 5281250 -
gtggtgtgcacctgtaatcc

SEQ ID NO: 42272 - DNA, 20 bp, Artificial Sequence
  Synthetic oligonucleotide; TAG chr11 5281240 5281259 5281243 -
gcacctgtaatcccagctat

SEQ ID NO: 42273 - DNA, 20 bp, Artificial Sequence
  Synthetic oligonucleotide; AGG chr11 5281239 5281258 5281242 -
cacctgtaatcccagctatt

SEQ ID NO: 42274 - DNA, 20 bp, Artificial Sequence
  Synthetic oligonucleotide; GGG chr11 5281238 5281257 5281241 -
acctgtaatcccagctatta

SEQ ID NO: 42275 - DNA, 20 bp, Artificial Sequence
  Synthetic oligonucleotide; TGG chr11 5281235 5281254 5281238 -
tgtaatcccagctattaggg

SEQ ID NO: 42276 - DNA, 20 bp, Artificial Sequence
  Synthetic oligonucleotide; GAG chr11 5281230 5281249 5281233 -
tcccagctattagggtggct

SEQ ID NO: 42277 - DNA, 20 bp, Artificial Sequence
  Synthetic oligonucleotide; AGG chr11 5281229 5281248 5281232 -
cccagctattagggtggctg

SEQ ID NO: 42278 - DNA, 20 bp, Artificial Sequence
  Synthetic oligonucleotide; CAG chr11 5281226 5281245 5281229 -
agctattagggtggctgagg

SEQ ID NO: 42279 - DNA, 20 bp, Artificial Sequence
  Synthetic oligonucleotide; AGG chr11 5281225 5281244 5281228 -
gctattagggtggctgaggc

SEQ ID NO: 42280 - DNA, 20 bp, Artificial Sequence
  Synthetic oligonucleotide; GAG chr11 5281223 5281242 5281226 -
tattagggtggctgaggcag

SEQ ID NO: 42281 - DNA, 20 bp, Artificial Sequence
  Synthetic oligonucleotide; CGG chr11 5281207 5281226 5281210 -
gcaggagaattgcttgaacc

SEQ ID NO: 42282 - DNA, 20 bp, Artificial Sequence
  Synthetic oligonucleotide; GGG chr11 5281206 5281225 5281209 -
caggagaattgcttgaaccc

SEQ ID NO: 42283 - DNA, 20 bp, Artificial Sequence
  Synthetic oligonucleotide; GAG chr11 5281204 5281223 5281207 -
ggagaattgcttgaacccgg

SEQ ID NO: 42284 - DNA, 20 bp, Artificial Sequence
  Synthetic oligonucleotide; AGG chr11 5281203 5281222 5281206 -
gagaattgcttgaacccggg

SEQ ID NO: 42285 - DNA, 20 bp, Artificial Sequence
  Synthetic oligonucleotide; CGG chr11 5281200 5281219 5281203 -
aattgcttgaacccgggagg

SEQ ID NO: 42286 - DNA, 20 bp, Artificial Sequence
  Synthetic oligonucleotide; GAG chr11 5281198 5281217 5281201 -
ttgcttgaacccgggaggcg

SEQ ID NO: 42287 - DNA, 20 bp, Artificial Sequence
  Synthetic oligonucleotide; AGG chr11 5281197 5281216 5281200 -
tgcttgaacccgggaggcgg

SEQ ID NO: 42288 - DNA, 20 bp, Artificial Sequence
  Synthetic oligonucleotide; CAG chr11 5281191 5281210 5281194 -
aacccgggaggcggaggttg

SEQ ID NO: 42289 - DNA, 20 bp, Artificial Sequence
  Synthetic oligonucleotide; GAG chr11 5281187 5281206 5281190 -
cgggaggcggaggttgcagt

SEQ ID NO: 42290 - DNA, 20 bp, Artificial Sequence
  Synthetic oligonucleotide; GAG chr11 5281182 5281201 5281185 -
ggcggaggttgcagtgagct

SEQ ID NO: 42291 - DNA, 20 bp, Artificial Sequence
  Synthetic oligonucleotide; CAG chr11 5281162 5281181 5281165 -
gagatcgtgccactgcactc

SEQ ID NO: 42292 - DNA, 20 bp, Artificial Sequence
  Synthetic oligonucleotide; TGG chr11 5281157 5281176 5281160 -
cgtgccactgcactccagcc

SEQ ID NO: 42293 - DNA, 20 bp, Artificial Sequence
  Synthetic oligonucleotide; GGG chr11 5281156 5281175 5281159 -
gtgccactgcactccagcct

SEQ ID NO: 42294 - DNA, 20 bp, Artificial Sequence
  Synthetic oligonucleotide; GGG chr11 5281155 5281174 5281158 -
tgccactgcactccagcctg

SEQ ID NO: 42295 - DNA, 20 bp, Artificial Sequence
  Synthetic oligonucleotide; GGG chr11 5281154 5281173 5281157 -
gccactgcactccagcctgg

SEQ ID NO: 42296 - DNA, 20 bp, Artificial Sequence
  Synthetic oligonucleotide; CAG chr11 5281150 5281169 5281153 -
ctgcactccagcctggggga

SEQ ID NO: 42297 - DNA, 20 bp, Artificial Sequence
  Synthetic oligonucleotide; GAG chr11 5281148 5281167 5281151 -
gcactccagcctgggggaca

SEQ ID NO: 42298 - DNA, 20 bp, Artificial Sequence
  Synthetic oligonucleotide; TGG chr11 5281116 5281135 5281119 -
attaactgttattttttact

SEQ ID NO: 42299 - DNA, 20 bp, Artificial Sequence
  Synthetic oligonucleotide; TGG chr11 5281106 5281125 5281109 -
attttttacttggactcttg

SEQ ID NO: 42300 - DNA, 20 bp, Artificial Sequence
  Synthetic oligonucleotide; GGG chr11 5281105 5281124 5281108 -
ttttttacttggactcttgt

SEQ ID NO: 42301 - DNA, 20 bp, Artificial Sequence
  Synthetic oligonucleotide; GGG chr11 5281104 5281123 5281107 -
tttttacttggactcttgtg

SEQ ID NO: 42302 - DNA, 20 bp, Artificial Sequence
  Synthetic oligonucleotide; AAG chr11 5281098 5281117 5281101 -
cttggactcttgtggggaat

SEQ ID NO: 42303 - DNA, 20 bp, Artificial Sequence
  Synthetic oligonucleotide; AAG chr11 5281067 5281086 5281070 -
tttattcttatttatgattc

SEQ ID NO: 42304 - DNA, 20 bp, Artificial Sequence
  Synthetic oligonucleotide; TAG chr11 5281055 5281074 5281058 -
tatgattcaagcactgaaaa

SEQ ID NO: 42305 - DNA, 20 bp, Artificial Sequence
  Synthetic oligonucleotide; TAG chr11 5281048 5281067 5281051 -
caagcactgaaaatagtgtt

SEQ ID NO: 42306 - DNA, 20 bp, Artificial Sequence
  Synthetic oligonucleotide; CAG chr11 5281041 5281060 5281044 -
tgaaaatagtgtttagcatc

SEQ ID NO: 42307 - DNA, 20 bp, Artificial Sequence
  Synthetic oligonucleotide; CAG chr11 5281038 5281057 5281041 -
aaatagtgtttagcatccag

SEQ ID NO: 42308 - DNA, 20 bp, Artificial Sequence
  Synthetic oligonucleotide; AGG chr11 5281037 5281056 5281040 -
aatagtgtttagcatccagc

SEQ ID NO: 42309 - DNA, 20 bp, Artificial Sequence
  Synthetic oligonucleotide; AAG chr11 5280993 5281012 5280996 -
atgattactatactttttac

SEQ ID NO: 42310 - DNA, 20 bp, Artificial Sequence
  Synthetic oligonucleotide; CAG chr11 5280988 5281007 5280991 -
tactatactttttacaagct

SEQ ID NO: 42311 - DNA, 20 bp, Artificial Sequence
  Synthetic oligonucleotide; CAG chr11 5280969 5280988 5280972 -
tcagctccctctatcccttc

SEQ ID NO: 42312 - DNA, 20 bp, Artificial Sequence
  Synthetic oligonucleotide; AAG chr11 5280945 5280964 5280948 -
atcctcatctctgattaaat

SEQ ID NO: 42313 - DNA, 20 bp, Artificial Sequence
  Synthetic oligonucleotide; CAG chr11 5280939 5280958 5280942 -
atctctgattaaataagctt

SEQ ID NO: 42314 - DNA, 20 bp, Artificial Sequence
  Synthetic oligonucleotide; TAG chr11 5280928 5280947 5280931 -
aataagcttcagtttttcct

SEQ ID NO: 42315 - DNA, 20 bp, Artificial Sequence
  Synthetic oligonucleotide; TAG chr11 5280897 5280916 5280900 -
acatttctgtgtgtctccat

SEQ ID NO: 42316 - DNA, 20 bp, Artificial Sequence
  Synthetic oligonucleotide; TAG chr11 5280884 5280903 5280887 -
tctccattagtgacctccca

SEQ ID NO: 42317 - DNA, 20 bp, Artificial Sequence
  Synthetic oligonucleotide; AAG chr11 5280878 5280897 5280881 -
ttagtgacctcccatagtcc

SEQ ID NO: 42318 - DNA, 20 bp, Artificial Sequence
  Synthetic oligonucleotide; GAG chr11 5280872 5280891 5280875 -
acctcccatagtccaagcat

SEQ ID NO: 42319 - DNA, 20 bp, Artificial Sequence
  Synthetic oligonucleotide; CAG chr11 5280869 5280888 5280872 -
tcccatagtccaagcatgag

SEQ ID NO: 42320 - DNA, 20 bp, Artificial Sequence
  Synthetic oligonucleotide; TGG chr11 5280863 5280882 5280866 -
agtccaagcatgagcagttc

SEQ ID NO: 42321 - DNA, 20 bp, Artificial Sequence
  Synthetic oligonucleotide; CAG chr11 5280859 5280878 5280862 -
caagcatgagcagttctggc

SEQ ID NO: 42322 - DNA, 20 bp, Artificial Sequence
  Synthetic oligonucleotide; AGG chr11 5280858 5280877 5280861 -
aagcatgagcagttctggcc

SEQ ID NO: 42323 - DNA, 20 bp, Artificial Sequence
  Synthetic oligonucleotide; CGG chr11 5280848 5280867 5280851 -
agttctggccaggcccctgt

SEQ ID NO: 42324 - DNA, 20 bp, Artificial Sequence
  Synthetic oligonucleotide; GGG chr11 5280847 5280866 5280850 -
gttctggccaggcccctgtc

SEQ ID NO: 42325 - DNA, 20 bp, Artificial Sequence
  Synthetic oligonucleotide; GGG chr11 5280846 5280865 5280849 -
ttctggccaggcccctgtcg

SEQ ID NO: 42326 - DNA, 20 bp, Artificial Sequence
  Synthetic oligonucleotide; CAG chr11 5280842 5280861 5280845 -
ggccaggcccctgtcggggt

SEQ ID NO: 42327 - DNA, 20 bp, Artificial Sequence
  Synthetic oligonucleotide; TGG chr11 5280821 5280840 5280824 -
agtgccccacccccgccttc

SEQ ID NO: 42328 - DNA, 20 bp, Artificial Sequence
  Synthetic oligonucleotide; AAG chr11 5280802 5280821 5280805 -
ctggttctgtgtaaccttct

SEQ ID NO: 42329 - DNA, 20 bp, Artificial Sequence
  Synthetic oligonucleotide; TGG chr11 5280790 5280809 5280793 -
aaccttctaagcaaaccttc

SEQ ID NO: 42330 - DNA, 20 bp, Artificial Sequence
  Synthetic oligonucleotide; AAG chr11 5280784 5280803 5280787 -
ctaagcaaaccttctggctc

SEQ ID NO: 42331 - DNA, 20 bp, Artificial Sequence
  Synthetic oligonucleotide; CAG chr11 5280779 5280798 5280782 -
caaaccttctggctcaagca

SEQ ID NO: 42332 - DNA, 20 bp, Artificial Sequence
  Synthetic oligonucleotide; GAG chr11 5280769 5280788 5280772 -
ggctcaagcacagcaatgct

SEQ ID NO: 42333 - DNA, 20 bp, Artificial Sequence
  Synthetic oligonucleotide; GAG chr11 5280759 5280778 5280762 -
cagcaatgctgagtcatgat

SEQ ID NO: 42334 - DNA, 20 bp, Artificial Sequence
  Synthetic oligonucleotide; GAG chr11 5280749 5280768 5280752 -
gagtcatgatgagtcatgct

SEQ ID NO: 42335 - DNA, 20 bp, Artificial Sequence
  Synthetic oligonucleotide; AGG chr11 5280748 5280767 5280751 -
agtcatgatgagtcatgctg

SEQ ID NO: 42336 - DNA, 20 bp, Artificial Sequence
  Synthetic oligonucleotide; TAG chr11 5280743 5280762 5280746 -
tgatgagtcatgctgaggct

SEQ ID NO: 42337 - DNA, 20 bp, Artificial Sequence
  Synthetic oligonucleotide; AGG chr11 5280742 5280761 5280745 -
gatgagtcatgctgaggctt

SEQ ID NO: 42338 - DNA, 20 bp, Artificial Sequence
  Synthetic oligonucleotide; GGG chr11 5280741 5280760 5280744 -
atgagtcatgctgaggctta

SEQ ID NO: 42339 - DNA, 20 bp, Artificial Sequence
  Synthetic oligonucleotide; CAG chr11 5280730 5280749 5280733 -
tgaggcttagggtgtgtgcc

SEQ ID NO: 42340 - DNA, 20 bp, Artificial Sequence
  Synthetic oligonucleotide; CAG chr11 5280720 5280739 5280723 -
ggtgtgtgcccagatgttct

SEQ ID NO: 42341 - DNA, 20 bp, Artificial Sequence
  Synthetic oligonucleotide; TAG chr11 5280715 5280734 5280718 -
gtgcccagatgttctcagcc

SEQ ID NO: 42342 - DNA, 20 bp, Artificial Sequence
  Synthetic oligonucleotide; GAG chr11 5280713 5280732 5280716 -
gcccagatgttctcagccta

SEQ ID NO: 42343 - DNA, 20 bp, Artificial Sequence
  Synthetic oligonucleotide; TGG chr11 5280696 5280715 5280699 -
ctagagtgatgactcctatc

SEQ ID NO: 42344 - DNA, 20 bp, Artificial Sequence
  Synthetic oligonucleotide; GGG chr11 5280695 5280714 5280698 -
tagagtgatgactcctatct

SEQ ID NO: 42345 - DNA, 20 bp, Artificial Sequence
  Synthetic oligonucleotide; CAG chr11 5280688 5280707 5280691 -
atgactcctatctgggtccc

SEQ ID NO: 42346 - DNA, 20 bp, Artificial Sequence
  Synthetic oligonucleotide; CAG chr11 5280685 5280704 5280688 -
actcctatctgggtccccag

SEQ ID NO: 42347 - DNA, 20 bp, Artificial Sequence
  Synthetic oligonucleotide; AGG chr11 5280684 5280703 5280687 -
ctcctatctgggtccccagc

SEQ ID NO: 42348 - DNA, 20 bp, Artificial Sequence
  Synthetic oligonucleotide; CAG chr11 5280674 5280693 5280677 -
ggtccccagcaggatgctta

SEQ ID NO: 42349 - DNA, 20 bp, Artificial Sequence
  Synthetic oligonucleotide; AGG chr11 5280673 5280692 5280676 -
gtccccagcaggatgcttac

SEQ ID NO: 42350 - DNA, 20 bp, Artificial Sequence
  Synthetic oligonucleotide; GGG chr11 5280672 5280691 5280675 -
tccccagcaggatgcttaca

SEQ ID NO: 42351 - DNA, 20 bp, Artificial Sequence
  Synthetic oligonucleotide; CAG chr11 5280669 5280688 5280672 -
ccagcaggatgcttacaggg

SEQ ID NO: 42352 - DNA, 20 bp, Artificial Sequence
  Synthetic oligonucleotide; TGG chr11 5280665 5280684 5280668 -
caggatgcttacagggcaga

SEQ ID NO: 42353 - DNA, 20 bp, Artificial Sequence
  Synthetic oligonucleotide; AAG chr11 5280655 5280674 5280658 -
acagggcagatggcaaaaaa

SEQ ID NO: 42354 - DNA, 20 bp, Artificial Sequence
  Synthetic oligonucleotide; AGG chr11 5280654 5280673 5280657 -
cagggcagatggcaaaaaaa

SEQ ID NO: 42355 - DNA, 20 bp, Artificial Sequence
  Synthetic oligonucleotide; GAG chr11 5280652 5280671 5280655 -
gggcagatggcaaaaaaaag

SEQ ID NO: 42356 - DNA, 20 bp, Artificial Sequence
  Synthetic oligonucleotide; AAG chr11 5280649 5280668 5280652 -
cagatggcaaaaaaaaggag

SEQ ID NO: 42357 - DNA, 20 bp, Artificial Sequence
  Synthetic oligonucleotide; CGG chr11 5280616 5280635 5280619 -
gactaaaactccacctcaaa

SEQ ID NO: 42358 - DNA, 20 bp, Artificial Sequence
  Synthetic oligonucleotide; AAG chr11 5280606 5280625 5280609 -
ccacctcaaacggcatcata

SEQ ID NO: 42359 - DNA, 20 bp, Artificial Sequence
  Synthetic oligonucleotide; TGG chr11 5280599 5280618 5280602 -
aaacggcatcataaagaaaa

SEQ ID NO: 42360 - DNA, 20 bp, Artificial Sequence
  Synthetic oligonucleotide; GAG chr11 5280590 5280609 5280593 -
cataaagaaaatggatgcct

SEQ ID NO: 42361 - DNA, 20 bp, Artificial Sequence
  Synthetic oligonucleotide; CAG chr11 5280586 5280605 5280589 -
aagaaaatggatgcctgaga

SEQ ID NO: 42362 - DNA, 20 bp, Artificial Sequence
  Synthetic oligonucleotide; TAG chr11 5280569 5280588 5280572 -
agacagaatgtgacatattc

SEQ ID NO: 42363 - DNA, 20 bp, Artificial Sequence
  Synthetic oligonucleotide; TAG chr11 5280480 5280499 5280483 -
tttgttgttatcaattgcca

SEQ ID NO: 42364 - DNA, 20 bp, Artificial Sequence
  Synthetic oligonucleotide; TAG chr11 5280471 5280490 5280474 -
atcaattgccatagaatgat

SEQ ID NO: 42365 - DNA, 20 bp, Artificial Sequence
  Synthetic oligonucleotide; CAG chr11 5280442 5280461 5280445 -
tgaatcaaatatttatcttg

SEQ ID NO: 42366 - DNA, 20 bp, Artificial Sequence
  Synthetic oligonucleotide; AGG chr11 5280441 5280460 5280444 -
gaatcaaatatttatcttgc

SEQ ID NO: 42367 - DNA, 20 bp, Artificial Sequence
  Synthetic oligonucleotide; TGG chr11 5280438 5280457 5280441 -
tcaaatatttatcttgcagg

SEQ ID NO: 42368 - DNA, 20 bp, Artificial Sequence
  Synthetic oligonucleotide; TAG chr11 5280425 5280444 5280428 -
ttgcaggtggcctctatacc

SEQ ID NO: 42369 - DNA, 20 bp, Artificial Sequence
  Synthetic oligonucleotide; AAG chr11 5280422 5280441 5280425 -
caggtggcctctatacctag

SEQ ID NO: 42370 - DNA, 20 bp, Artificial Sequence
  Synthetic oligonucleotide; CGG chr11 5280419 5280438 5280422 -
gtggcctctatacctagaag

SEQ ID NO: 42371 - DNA, 20 bp, Artificial Sequence
  Synthetic oligonucleotide; CAG chr11 5280416 5280435 5280419 -
gcctctatacctagaagcgg

SEQ ID NO: 42372 - DNA, 20 bp, Artificial Sequence
  Synthetic oligonucleotide; CAG chr11 5280410 5280429 5280413 -
atacctagaagcggcagaat

SEQ ID NO: 42373 - DNA, 20 bp, Artificial Sequence
  Synthetic oligonucleotide; AGG chr11 5280409 5280428 5280412 -
tacctagaagcggcagaatc

SEQ ID NO: 42374 - DNA, 20 bp, Artificial Sequence
  Synthetic oligonucleotide; TAG chr11 5280387 5280406 5280390 -
gctttattaatacatgtgta

SEQ ID NO: 42375 - DNA, 20 bp, Artificial Sequence
  Synthetic oligonucleotide; TAG chr11 5280379 5280398 5280382 -
aatacatgtgtatagatttt

SEQ ID NO: 42376 - DNA, 20 bp, Artificial Sequence
  Synthetic oligonucleotide; AGG chr11 5280378 5280397 5280381 -
atacatgtgtatagattttt

SEQ ID NO: 42377 - DNA, 20 bp, Artificial Sequence
  Synthetic oligonucleotide; AAG chr11 5280348 5280367 5280351 -
cacatgtattaatatgaaac

SEQ ID NO: 42378 - DNA, 20 bp, Artificial Sequence
  Synthetic oligonucleotide; AGG chr11 5280347 5280366 5280350 -
acatgtattaatatgaaaca

SEQ ID NO: 42379 - DNA, 20 bp, Artificial Sequence
  Synthetic oligonucleotide; TGG chr11 5280341 5280360 5280344 -
attaatatgaaacaaggata

SEQ ID NO: 42380 - DNA, 20 bp, Artificial Sequence
  Synthetic oligonucleotide; AAG chr11 5280338 5280357 5280341 -
aatatgaaacaaggatatgg

SEQ ID NO: 42381 - DNA, 20 bp, Artificial Sequence
  Synthetic oligonucleotide; GAG chr11 5280336 5280355 5280339 -
tatgaaacaaggatatggaa

SEQ ID NO: 42382 - DNA, 20 bp, Artificial Sequence
  Synthetic oligonucleotide; AGG chr11 5280335 5280354 5280338 -
atgaaacaaggatatggaag

SEQ ID NO: 42383 - DNA, 20 bp, Artificial Sequence
  Synthetic oligonucleotide; AAG chr11 5280332 5280351 5280335 -
aaacaaggatatggaagagg

SEQ ID NO: 42384 - DNA, 20 bp, Artificial Sequence
  Synthetic oligonucleotide; AGG chr11 5280331 5280350 5280334 -
aacaaggatatggaagagga

SEQ ID NO: 42385 - DNA, 20 bp, Artificial Sequence
  Synthetic oligonucleotide; CAG chr11 5280320 5280339 5280323 -
ggaagaggaaggcatgaaaa

SEQ ID NO: 42386 - DNA, 20 bp, Artificial Sequence
  Synthetic oligonucleotide; AGG chr11 5280319 5280338 5280322 -
gaagaggaaggcatgaaaac

SEQ ID NO: 42387 - DNA, 20 bp, Artificial Sequence
  Synthetic oligonucleotide; AAG chr11 5280314 5280333 5280317 -
ggaaggcatgaaaacaggaa

SEQ ID NO: 42388 - DNA, 20 bp, Artificial Sequence
  Synthetic oligonucleotide; AAG chr11 5280287 5280306 5280290 -
caaaccttgtttgccatttt

SEQ ID NO: 42389 - DNA, 20 bp, Artificial Sequence
  Synthetic oligonucleotide; AGG chr11 5280286 5280305 5280289 -
aaaccttgtttgccatttta

SEQ ID NO: 42390 - DNA, 20 bp, Artificial Sequence
  Synthetic oligonucleotide; TGG chr11 5280277 5280296 5280280 -
ttgccattttaaggcacccc

SEQ ID NO: 42391 - DNA, 20 bp, Artificial Sequence
  Synthetic oligonucleotide; CAG chr11 5280273 5280292 5280276 -
cattttaaggcacccctgga

SEQ ID NO: 42392 - DNA, 20 bp, Artificial Sequence
  Synthetic oligonucleotide; TAG chr11 5280269 5280288 5280272 -
ttaaggcacccctggacagc

SEQ ID NO: 42393 - DNA, 20 bp, Artificial Sequence
  Synthetic oligonucleotide; AGG chr11 5280268 5280287 5280271 -
taaggcacccctggacagct

SEQ ID NO: 42394 - DNA, 20 bp, Artificial Sequence
  Synthetic oligonucleotide; TGG chr11 5280265 5280284 5280268 -
ggcacccctggacagctagg

SEQ ID NO: 42395 - DNA, 20 bp, Artificial Sequence
  Synthetic oligonucleotide; AAG chr11 5280259 5280278 5280262 -
cctggacagctaggtggcaa

SEQ ID NO: 42396 - DNA, 20 bp, Artificial Sequence
  Synthetic oligonucleotide; AGG chr11 5280258 5280277 5280261 -
ctggacagctaggtggcaaa

SEQ ID NO: 42397 - DNA, 20 bp, Artificial Sequence
  Synthetic oligonucleotide; TAG chr11 5280245 5280264 5280248 -
tggcaaaaggcctgtgctgt

SEQ ID NO: 42398 - DNA, 20 bp, Artificial Sequence
  Synthetic oligonucleotide; GAG chr11 5280243 5280262 5280246 -
gcaaaaggcctgtgctgtta

SEQ ID NO: 42399 - DNA, 20 bp, Artificial Sequence
  Synthetic oligonucleotide; AGG chr11 5280242 5280261 5280245 -
caaaaggcctgtgctgttag

SEQ ID NO: 42400 - DNA, 20 bp, Artificial Sequence
  Synthetic oligonucleotide; CGG chr11 5280224 5280243 5280227 -
agaggacacatgctcacata

SEQ ID NO: 42401 - DNA, 20 bp, Artificial Sequence
  Synthetic oligonucleotide; GGG chr11 5280223 5280242 5280226 -
gaggacacatgctcacatac

SEQ ID NO: 42402 - DNA, 20 bp, Artificial Sequence
  Synthetic oligonucleotide; GGG chr11 5280222 5280241 5280225 -
aggacacatgctcacatacg

SEQ ID NO: 42403 - DNA, 20 bp, Artificial Sequence
  Synthetic oligonucleotide; CAG chr11 5280218 5280237 5280221 -
cacatgctcacatacggggt

SEQ ID NO: 42404 - DNA, 20 bp, Artificial Sequence
  Synthetic oligonucleotide; TGG chr11 5280207 5280226 5280210 -
atacggggtcagatctgact

SEQ ID NO: 42405 - DNA, 20 bp, Artificial Sequence
  Synthetic oligonucleotide; GGG chr11 5280206 5280225 5280209 -
tacggggtcagatctgactt

SEQ ID NO: 42406 - DNA, 20 bp, Artificial Sequence
  Synthetic oligonucleotide; GGG chr11 5280205 5280224 5280208 -
acggggtcagatctgacttg

SEQ ID NO: 42407 - DNA, 20 bp, Artificial Sequence
  Synthetic oligonucleotide; TGG chr11 5280196 5280215 5280199 -
gatctgacttggggtgctac

SEQ ID NO: 42408 - DNA, 20 bp, Artificial Sequence
  Synthetic oligonucleotide; GGG chr11 5280195 5280214 5280198 -
atctgacttggggtgctact

SEQ ID NO: 42409 - DNA, 20 bp, Artificial Sequence
  Synthetic oligonucleotide; AAG chr11 5280192 5280211 5280195 -
tgacttggggtgctactggg

SEQ ID NO: 42410 - DNA, 20 bp, Artificial Sequence
  Synthetic oligonucleotide; AAG chr11 5280179 5280198 5280182 -
tactgggaagctctcatctt

SEQ ID NO: 42411 - DNA, 20 bp, Artificial Sequence
  Synthetic oligonucleotide; AGG chr11 5280178 5280197 5280181 -
actgggaagctctcatctta

SEQ ID NO: 42412 - DNA, 20 bp, Artificial Sequence
  Synthetic oligonucleotide; CAG chr11 5280167 5280186 5280170 -
ctcatcttaaggatacatct

SEQ ID NO: 42413 - DNA, 20 bp, Artificial Sequence
  Synthetic oligonucleotide; AGG chr11 5280166 5280185 5280169 -
tcatcttaaggatacatctc

SEQ ID NO: 42414 - DNA, 20 bp, Artificial Sequence
  Synthetic oligonucleotide; CAG chr11 5280162 5280181 5280165 -
cttaaggatacatctcaggc

SEQ ID NO: 42415 - DNA, 20 bp, Artificial Sequence
  Synthetic oligonucleotide; TGG chr11 5280156 5280175 5280159 -
gatacatctcaggccagtct

SEQ ID NO: 42416 - DNA, 20 bp, Artificial Sequence
  Synthetic oligonucleotide; TAG chr11 5280148 5280167 5280151 -
tcaggccagtcttggtgcat

SEQ ID NO: 42417 - DNA, 20 bp, Artificial Sequence
  Synthetic oligonucleotide; AGG chr11 5280147 5280166 5280150 -
caggccagtcttggtgcatt

SEQ ID NO: 42418 - DNA, 20 bp, Artificial Sequence
  Synthetic oligonucleotide; AAG chr11 5280144 5280163 5280147 -
gccagtcttggtgcattagg

SEQ ID NO: 42419 - DNA, 20 bp, Artificial Sequence
  Synthetic oligonucleotide; TAG chr11 5280138 5280157 5280141 -
cttggtgcattaggaagatg

SEQ ID NO: 42420 - DNA, 20 bp, Artificial Sequence
  Synthetic oligonucleotide; AGG chr11 5280137 5280156 5280140 -
ttggtgcattaggaagatgt

SEQ ID NO: 42421 - DNA, 20 bp, Artificial Sequence
  Synthetic oligonucleotide; GAG chr11 5280121 5280140 5280124 -
atgtaggcaactctgatcct

SEQ ID NO: 42422 - DNA, 20 bp, Artificial Sequence
  Synthetic oligonucleotide; GAG chr11 5280119 5280138 5280122 -
gtaggcaactctgatcctga

SEQ ID NO: 42423 - DNA, 20 bp, Artificial Sequence
  Synthetic oligonucleotide; AGG chr11 5280118 5280137 5280121 -
taggcaactctgatcctgag

SEQ ID NO: 42424 - DNA, 20 bp, Artificial Sequence
  Synthetic oligonucleotide; AAG chr11 5280114 5280133 5280117 -
caactctgatcctgagagga

SEQ ID NO: 42425 - DNA, 20 bp, Artificial Sequence
  Synthetic oligonucleotide; CAG chr11 5280100 5280119 5280103 -
agaggaaagaaacattcctc

SEQ ID NO: 42426 - DNA, 20 bp, Artificial Sequence
  Synthetic oligonucleotide; AGG chr11 5280099 5280118 5280102 -
gaggaaagaaacattcctcc

SEQ ID NO: 42427 - DNA, 20 bp, Artificial Sequence
  Synthetic oligonucleotide; GAG chr11 5280097 5280116 5280100 -
ggaaagaaacattcctccag

SEQ ID NO: 42428 - DNA, 20 bp, Artificial Sequence
  Synthetic oligonucleotide; GAG chr11 5280095 5280114 5280098 -
aaagaaacattcctccagga

SEQ ID NO: 42429 - DNA, 20 bp, Artificial Sequence
  Synthetic oligonucleotide; AAG chr11 5280088 5280107 5280091 -
cattcctccaggagagctaa

SEQ ID NO: 42430 - DNA, 20 bp, Artificial Sequence
  Synthetic oligonucleotide; AGG chr11 5280087 5280106 5280090 -
attcctccaggagagctaaa

SEQ ID NO: 42431 - DNA, 20 bp, Artificial Sequence
  Synthetic oligonucleotide; GGG chr11 5280086 5280105 5280089 -
ttcctccaggagagctaaaa

SEQ ID NO: 42432 - DNA, 20 bp, Artificial Sequence
  Synthetic oligonucleotide; TGG chr11 5280073 5280092 5280076 -
gctaaaagggttcacctgtg

SEQ ID NO: 42433 - DNA, 20 bp, Artificial Sequence
  Synthetic oligonucleotide; GGG chr11 5280072 5280091 5280075 -
ctaaaagggttcacctgtgt

SEQ ID NO: 42434 - DNA, 20 bp, Artificial Sequence
  Synthetic oligonucleotide; AAG chr11 5280061 5280080 5280064 -
cacctgtgtgggtaactgtg

SEQ ID NO: 42435 - DNA, 20 bp, Artificial Sequence
  Synthetic oligonucleotide; AGG chr11 5280060 5280079 5280063 -
acctgtgtgggtaactgtga

SEQ ID NO: 42436 - DNA, 20 bp, Artificial Sequence
  Synthetic oligonucleotide; AAG chr11 5280052 5280071 5280055 -
gggtaactgtgaaggactac

SEQ ID NO: 42437 - DNA, 20 bp, Artificial Sequence
  Synthetic oligonucleotide; GAG chr11 5280050 5280069 5280053 -
gtaactgtgaaggactacaa

SEQ ID NO: 42438 - DNA, 20 bp, Artificial Sequence
  Synthetic oligonucleotide; AGG chr11 5280049 5280068 5280052 -
taactgtgaaggactacaag

SEQ ID NO: 42439 - DNA, 20 bp, Artificial Sequence
  Synthetic oligonucleotide; CAG chr11 5280032 5280051 5280035 -
aagaggatgaaaaacaatga

SEQ ID NO: 42440 - DNA, 20 bp, Artificial Sequence
  Synthetic oligonucleotide; CAG chr11 5280028 5280047 5280031 -
ggatgaaaaacaatgacaga

SEQ ID NO: 42441 - DNA, 20 bp, Artificial Sequence
  Synthetic oligonucleotide; TGG chr11 5280013 5280032 5280016 -
acagacagacataatgcttg

SEQ ID NO: 42442 - DNA, 20 bp, Artificial Sequence
  Synthetic oligonucleotide; GGG chr11 5280012 5280031 5280015 -
cagacagacataatgcttgt

SEQ ID NO: 42443 - DNA, 20 bp, Artificial Sequence
  Synthetic oligonucleotide; GAG chr11 5280010 5280029 5280013 -
gacagacataatgcttgtgg

SEQ ID NO: 42444 - DNA, 20 bp, Artificial Sequence
  Synthetic oligonucleotide; CAG chr11 5280001 5280020 5280004 -
aatgcttgtgggagaaaaaa

SEQ ID NO: 42445 - DNA, 20 bp, Artificial Sequence
  Synthetic oligonucleotide; AGG chr11 5280000 5280019 5280003 -
atgcttgtgggagaaaaaac

SEQ ID NO: 42446 - DNA, 20 bp, Artificial Sequence
  Synthetic oligonucleotide; GAG chr11 5279998 5280017 5280001 -
gcttgtgggagaaaaaacag

SEQ ID NO: 42447 - DNA, 20 bp, Artificial Sequence
  Synthetic oligonucleotide; AGG chr11 5279997 5280016 5280000 -
cttgtgggagaaaaaacagg

SEQ ID NO: 42448 - DNA, 20 bp, Artificial Sequence
  Synthetic oligonucleotide; AAG chr11 5279992 5280011 5279995 -
gggagaaaaaacaggaggtc

SEQ ID NO: 42449 - DNA, 20 bp, Artificial Sequence
  Synthetic oligonucleotide; AGG chr11 5279991 5280010 5279994 -
ggagaaaaaacaggaggtca

SEQ ID NO: 42450 - DNA, 20 bp, Artificial Sequence
  Synthetic oligonucleotide; GGG chr11 5279990 5280009 5279993 -
gagaaaaaacaggaggtcaa

SEQ ID NO: 42451 - DNA, 20 bp, Artificial Sequence
  Synthetic oligonucleotide; GGG chr11 5279989 5280008 5279992 -
agaaaaaacaggaggtcaag

SEQ ID NO: 42452 - DNA, 20 bp, Artificial Sequence
  Synthetic oligonucleotide; TAG chr11 5279985 5280004 5279988 -
aaaacaggaggtcaagggga

SEQ ID NO: 42453 - DNA, 20 bp, Artificial Sequence
  Synthetic oligonucleotide; GAG chr11 5279983 5280002 5279986 -
aacaggaggtcaaggggata

SEQ ID NO: 42454 - DNA, 20 bp, Artificial Sequence
  Synthetic oligonucleotide; AAG chr11 5279980 5279999 5279983 -
aggaggtcaaggggatagag

SEQ ID NO: 42455 - DNA, 20 bp, Artificial Sequence
  Synthetic oligonucleotide; AGG chr11 5279979 5279998 5279982 -
ggaggtcaaggggatagaga

SEQ ID NO: 42456 - DNA, 20 bp, Artificial Sequence
  Synthetic oligonucleotide; CAG chr11 5279972 5279991 5279975 -
aaggggatagagaaggcttc

SEQ ID NO: 42457 - DNA, 20 bp, Artificial Sequence
  Synthetic oligonucleotide; AAG chr11 5279969 5279988 5279972 -
gggatagagaaggcttccag

SEQ ID NO: 42458 - DNA, 20 bp, Artificial Sequence
  Synthetic oligonucleotide; TGG chr11 5279964 5279983 5279967 -
agagaaggcttccagaagaa

SEQ ID NO: 42459 - DNA, 20 bp, Artificial Sequence
  Synthetic oligonucleotide; AAG chr11 5279956 5279975 5279959 -
cttccagaagaatggctttg

SEQ ID NO: 42460 - DNA, 20 bp, Artificial Sequence
  Synthetic oligonucleotide; TGG chr11 5279952 5279971 5279955 -
cagaagaatggctttgaagc

SEQ ID NO: 42461 - DNA, 20 bp, Artificial Sequence
  Synthetic oligonucleotide; TAG chr11 5279943 5279962 5279946 -
ggctttgaagctggcttctg

SEQ ID NO: 42462 - DNA, 20 bp, Artificial Sequence
  Synthetic oligonucleotide; AGG chr11 5279942 5279961 5279945 -
gctttgaagctggcttctgt

SEQ ID NO: 42463 - DNA, 20 bp, Artificial Sequence
  Synthetic oligonucleotide; GAG chr11 5279940 5279959 5279943 -
tttgaagctggcttctgtag

SEQ ID NO: 42464 - DNA, 20 bp, Artificial Sequence
  Synthetic oligonucleotide; CAG chr11 5279933 5279952 5279936 -
ctggcttctgtaggagttca

SEQ ID NO: 42465 - DNA, 20 bp, Artificial Sequence
  Synthetic oligonucleotide; TGG chr11 5279930 5279949 5279933 -
gcttctgtaggagttcacag

SEQ ID NO: 42466 - DNA, 20 bp, Artificial Sequence
  Synthetic oligonucleotide; AAG chr11 5279925 5279944 5279928 -
tgtaggagttcacagtggca

SEQ ID NO: 42467 - DNA, 20 bp, Artificial Sequence
  Synthetic oligonucleotide; CAG chr11 5279916 5279935 5279919 -
tcacagtggcaaagatgttt

SEQ ID NO: 42468 - DNA, 20 bp, Artificial Sequence
  Synthetic oligonucleotide; AAG chr11 5279897 5279916 5279900 -
tcagaaatgtgacatgactt

SEQ ID NO: 42469 - DNA, 20 bp, Artificial Sequence
  Synthetic oligonucleotide; AGG chr11 5279896 5279915 5279899 -
cagaaatgtgacatgactta

SEQ ID NO: 42470 - DNA, 20 bp, Artificial Sequence
  Synthetic oligonucleotide; AAG chr11 5279882 5279901 5279885 -
gacttaaggaactatacaaa

SEQ ID NO: 42471 - DNA, 20 bp, Artificial Sequence
  Synthetic oligonucleotide; AGG chr11 5279881 5279900 5279884 -
acttaaggaactatacaaaa

SEQ ID NO: 42472 - DNA, 20 bp, Artificial Sequence
  Synthetic oligonucleotide; AAG chr11 5279869 5279888 5279872 -
atacaaaaaggaacaaattt

SEQ ID NO: 42473 - DNA, 20 bp, Artificial Sequence
  Synthetic oligonucleotide; AGG chr11 5279868 5279887 5279871 -
tacaaaaaggaacaaattta

SEQ ID NO: 42474 - DNA, 20 bp, Artificial Sequence
  Synthetic oligonucleotide; GAG chr11 5279866 5279885 5279869 -
caaaaaggaacaaatttaag

SEQ ID NO: 42475 - DNA, 20 bp, Artificial Sequence
  Synthetic oligonucleotide; GAG chr11 5279864 5279883 5279867 -
aaaaggaacaaatttaagga

SEQ ID NO: 42476 - DNA, 20 bp, Artificial Sequence
  Synthetic oligonucleotide; AGG chr11 5279863 5279882 5279866 -
aaaggaacaaatttaaggag

SEQ ID NO: 42477 - DNA, 20 bp, Artificial Sequence
  Synthetic oligonucleotide; CAG chr11 5279860 5279879 5279863 -
ggaacaaatttaaggagagg

SEQ ID NO: 42478 - DNA, 20 bp, Artificial Sequence
  Synthetic oligonucleotide; TAG chr11 5279851 5279870 5279854 -
ttaaggagaggcagataaat

SEQ ID NO: 42479 - DNA, 20 bp, Artificial Sequence
  Synthetic oligonucleotide; CAG chr11 5279843 5279862 5279846 -
aggcagataaattagttcaa

SEQ ID NO: 42480 - DNA, 20 bp, Artificial Sequence
  Synthetic oligonucleotide; AAG chr11 5279834 5279853 5279837 -
aattagttcaacagacatgc

SEQ ID NO: 42481 - DNA, 20 bp, Artificial Sequence
  Synthetic oligonucleotide; AGG chr11 5279833 5279852 5279836 -
attagttcaacagacatgca

SEQ ID NO: 42482 - DNA, 20 bp, Artificial Sequence
  Synthetic oligonucleotide; CAG chr11 5279824 5279843 5279827 -
acagacatgcaaggaatttt

SEQ ID NO: 42483 - DNA, 20 bp, Artificial Sequence
  Synthetic oligonucleotide; GAG chr11 5279801 5279820 5279804 -
atgaatgttatgtctccact

SEQ ID NO: 42484 - DNA, 20 bp, Artificial Sequence
  Synthetic oligonucleotide; GAG chr11 5279792 5279811 5279795 -
atgtctccactgagcttctt

SEQ ID NO: 42485 - DNA, 20 bp, Artificial Sequence
  Synthetic oligonucleotide; AGG chr11 5279791 5279810 5279794 -
tgtctccactgagcttcttg

SEQ ID NO: 42486 - DNA, 20 bp, Artificial Sequence
  Synthetic oligonucleotide; TAG chr11 5279787 5279806 5279790 -
tccactgagcttcttgaggt

SEQ ID NO: 42487 - DNA, 20 bp, Artificial Sequence
  Synthetic oligonucleotide; CAG chr11 5279784 5279803 5279787 -
actgagcttcttgaggttag

SEQ ID NO: 42488 - DNA, 20 bp, Artificial Sequence
  Synthetic oligonucleotide; GAG chr11 5279777 5279796 5279780 -
ttcttgaggttagcagctgt

SEQ ID NO: 42489 - DNA, 20 bp, Artificial Sequence
  Synthetic oligonucleotide; AGG chr11 5279776 5279795 5279779 -
tcttgaggttagcagctgtg

SEQ ID NO: 42490 - DNA, 20 bp, Artificial Sequence
  Synthetic oligonucleotide; GGG chr11 5279775 5279794 5279778 -
cttgaggttagcagctgtga

SEQ ID NO: 42491 - DNA, 20 bp, Artificial Sequence
  Synthetic oligonucleotide; CAG chr11 5279767 5279786 5279770 -
tagcagctgtgagggttttg

SEQ ID NO: 42492 - DNA, 20 bp, Artificial Sequence
  Synthetic oligonucleotide; AGG chr11 5279766 5279785 5279769 -
agcagctgtgagggttttgc

SEQ ID NO: 42493 - DNA, 20 bp, Artificial Sequence
  Synthetic oligonucleotide; CAG chr11 5279761 5279780 5279764 -
ctgtgagggttttgcaggcc

SEQ ID NO: 42494 - DNA, 20 bp, Artificial Sequence
  Synthetic oligonucleotide; AGG chr11 5279760 5279779 5279763 -
tgtgagggttttgcaggccc

SEQ ID NO: 42495 - DNA, 20 bp, Artificial Sequence
  Synthetic oligonucleotide; CAG chr11 5279749 5279768 5279752 -
tgcaggcccaggacccatta

SEQ ID NO: 42496 - DNA, 20 bp, Artificial Sequence
  Synthetic oligonucleotide; AGG chr11 5279748 5279767 5279751 -
gcaggcccaggacccattac

SEQ ID NO: 42497 - DNA, 20 bp, Artificial Sequence
  Synthetic oligonucleotide; CAG chr11 5279687 5279706 5279690 -
gtgaatgaatgacctcttgt

SEQ ID NO: 42498 - DNA, 20 bp, Artificial Sequence
  Synthetic oligonucleotide; CGG chr11 5279678 5279697 5279681 -
tgacctcttgtcagtctact

SEQ ID NO: 42499 - DNA, 20 bp, Artificial Sequence
  Synthetic oligonucleotide; CAG chr11 5279648 5279667 5279651 -
gtgaatgaatgatgtcttgt

SEQ ID NO: 42500 - DNA, 20 bp, Artificial Sequence
  Synthetic oligonucleotide; TGG chr11 5279639 5279658 5279642 -
tgatgtcttgtcagcctact

SEQ ID NO: 42501 - DNA, 20 bp, Artificial Sequence
  Synthetic oligonucleotide; AAG chr11 5279629 5279648 5279632 -
tcagcctacttggtttcgct

SEQ ID NO: 42502 - DNA, 20 bp, Artificial Sequence
  Synthetic oligonucleotide; GAG chr11 5279627 5279646 5279630 -
agcctacttggtttcgctaa

SEQ ID NO: 42503 - DNA, 20 bp, Artificial Sequence
  Synthetic oligonucleotide; CAG chr11 5279622 5279641 5279625 -
acttggtttcgctaagagca

SEQ ID NO: 42504 - DNA, 20 bp, Artificial Sequence
  Synthetic oligonucleotide; GAG chr11 5279620 5279639 5279623 -
ttggtttcgctaagagcaca

SEQ ID NO: 42505 - DNA, 20 bp, Artificial Sequence
  Synthetic oligonucleotide; GAG chr11 5279618 5279637 5279621 -
ggtttcgctaagagcacaga

SEQ ID NO: 42506 - DNA, 20 bp, Artificial Sequence
  Synthetic oligonucleotide; AAG chr11 5279615 5279634 5279618 -
ttcgctaagagcacagagag

SEQ ID NO: 42507 - DNA, 20 bp, Artificial Sequence
  Synthetic oligonucleotide; TAG chr11 5279609 5279628 5279612 -
aagagcacagagagaagatt

SEQ ID NO: 42508 - DNA, 20 bp, Artificial Sequence
  Synthetic oligonucleotide; TGG chr11 5279581 5279600 5279584 -
ctatgtaaaaacttcctttt

SEQ ID NO: 42509 - DNA, 20 bp, Artificial Sequence
  Synthetic oligonucleotide; AAG chr11 5279575 5279594 5279578 -
aaaaacttcctttttggttc

SEQ ID NO: 42510 - DNA, 20 bp, Artificial Sequence
  Synthetic oligonucleotide; TAG chr11 5279559 5279578 5279562 -
gttcaagtgtatgtttgtga

SEQ ID NO: 42511 - DNA, 20 bp, Artificial Sequence
  Synthetic oligonucleotide; AAG chr11 5279551 5279570 5279554 -
gtatgtttgtgatagaaatg

SEQ ID NO: 42512 - DNA, 20 bp, Artificial Sequence
  Synthetic oligonucleotide; CAG chr11 5279547 5279566 5279550 -
gtttgtgatagaaatgaaga

SEQ ID NO: 42513 - DNA, 20 bp, Artificial Sequence
  Synthetic oligonucleotide; AGG chr11 5279546 5279565 5279549 -
tttgtgatagaaatgaagac

SEQ ID NO: 42514 - DNA, 20 bp, Artificial Sequence
  Synthetic oligonucleotide; AAG chr11 5279508 5279527 5279511 -
ctaacataaacacaaacatt

SEQ ID NO: 42515 - DNA, 20 bp, Artificial Sequence
  Synthetic oligonucleotide; AAG chr11 5279504 5279523 5279507 -
cataaacacaaacattaaga

SEQ ID NO: 42516 - DNA, 20 bp, Artificial Sequence
  Synthetic oligonucleotide; AGG chr11 5279503 5279522 5279506 -
ataaacacaaacattaagaa

SEQ ID NO: 42517 - DNA, 20 bp, Artificial Sequence
  Synthetic oligonucleotide; AAG chr11 5279489 5279508 5279492 -
taagaaaggaaatcaacctg

SEQ ID NO: 42518 - DNA, 20 bp, Artificial Sequence
  Synthetic oligonucleotide; GAG chr11 5279487 5279506 5279490 -
agaaaggaaatcaacctgaa

SEQ ID NO: 42519 - DNA, 20 bp, Artificial Sequence
  Synthetic oligonucleotide; CAG chr11 5279476 5279495 5279479 -
caacctgaagagtatttata

SEQ ID NO: 42520 - DNA, 20 bp, Artificial Sequence
  Synthetic oligonucleotide; CAG chr11 5279462 5279481 5279465 -
tttatacagataacaaaata

SEQ ID NO: 42521 - DNA, 20 bp, Artificial Sequence
  Synthetic oligonucleotide; GAG chr11 5279460 5279479 5279463 -
tatacagataacaaaataca

SEQ ID NO: 42522 - DNA, 20 bp, Artificial Sequence
  Synthetic oligonucleotide; GAG chr11 5279458 5279477 5279461 -
tacagataacaaaatacaga

SEQ ID NO: 42523 - DNA, 20 bp, Artificial Sequence
  Synthetic oligonucleotide; GAG chr11 5279454 5279473 5279457 -
gataacaaaatacagagagt

SEQ ID NO: 42524 - DNA, 20 bp, Artificial Sequence
  Synthetic oligonucleotide; TGG chr11 5279433 5279452 5279436 -
agttaaatgtgtaataactg

SEQ ID NO: 42525 - DNA, 20 bp, Artificial Sequence
  Synthetic oligonucleotide; CAG chr11 5279428 5279447 5279431 -
aatgtgtaataactgtggca

SEQ ID NO: 42526 - DNA, 20 bp, Artificial Sequence
  Synthetic oligonucleotide; AGG chr11 5279427 5279446 5279430 -
atgtgtaataactgtggcac

SEQ ID NO: 42527 - DNA, 20 bp, Artificial Sequence
  Synthetic oligonucleotide; TGG chr11 5279423 5279442 5279426 -
gtaataactgtggcacaggc

SEQ ID NO: 42528 - DNA, 20 bp, Artificial Sequence
  Synthetic oligonucleotide; GAG chr11 5279415 5279434 5279418 -
tgtggcacaggctggaatat

SEQ ID NO: 42529 - DNA, 20 bp, Artificial Sequence
  Synthetic oligonucleotide; TAG chr11 5279391 5279410 5279394 -
catttaaatcacaaattaat

SEQ ID NO: 42530 - DNA, 20 bp, Artificial Sequence
  Synthetic oligonucleotide; CAG chr11 5279380 5279399 5279383 -
caaattaattagaaaaaaaa

SEQ ID NO: 42531 - DNA, 20 bp, Artificial Sequence
  Synthetic oligonucleotide; TGG chr11 5279377 5279396 5279380 -
attaattagaaaaaaaacag

SEQ ID NO: 42532 - DNA, 20 bp, Artificial Sequence
  Synthetic oligonucleotide; GGG chr11 5279376 5279395 5279379 -
ttaattagaaaaaaaacagt

SEQ ID NO: 42533 - DNA, 20 bp, Artificial Sequence
  Synthetic oligonucleotide; GGG chr11 5279375 5279394 5279378 -
taattagaaaaaaaacagtg

SEQ ID NO: 42534 - DNA, 20 bp, Artificial Sequence
  Synthetic oligonucleotide; TGG chr11 5279361 5279380 5279364 -
acagtggggaaaaaattcca

SEQ ID NO: 42535 - DNA, 20 bp, Artificial Sequence
  Synthetic oligonucleotide; TGG chr11 5279357 5279376 5279360 -
tggggaaaaaattccatgga

SEQ ID NO: 42536 - DNA, 20 bp, Artificial Sequence
  Synthetic oligonucleotide; GGG chr11 5279356 5279375 5279359 -
ggggaaaaaattccatggat

SEQ ID NO: 42537 - DNA, 20 bp, Artificial Sequence
  Synthetic oligonucleotide; TAG chr11 5279351 5279370 5279354 -
aaaaattccatggatgggtc

SEQ ID NO: 42538 - DNA, 20 bp, Artificial Sequence
  Synthetic oligonucleotide; AAG chr11 5279347 5279366 5279350 -
attccatggatgggtctaga

SEQ ID NO: 42539 - DNA, 20 bp, Artificial Sequence
  Synthetic oligonucleotide; TAG chr11 5279342 5279361 5279345 -
atggatgggtctagaaagac

SEQ ID NO: 42540 - DNA, 20 bp, Artificial Sequence
  Synthetic oligonucleotide; TAG chr11 5279331 5279350 5279334 -
tagaaagactagcattgttt

SEQ ID NO: 42541 - DNA, 20 bp, Artificial Sequence
  Synthetic oligonucleotide; AGG chr11 5279330 5279349 5279333 -
agaaagactagcattgtttt

SEQ ID NO: 42542 - DNA, 20 bp, Artificial Sequence
  Synthetic oligonucleotide; GAG chr11 5279325 5279344 5279328 -
gactagcattgttttaggtt

SEQ ID NO: 42543 - DNA, 20 bp, Artificial Sequence
  Synthetic oligonucleotide; TGG chr11 5279322 5279341 5279325 -
tagcattgttttaggttgag

SEQ ID NO: 42544 - DNA, 20 bp, Artificial Sequence
  Synthetic oligonucleotide; CAG chr11 5279319 5279338 5279322 -
cattgttttaggttgagtgg

SEQ ID NO: 42545 - DNA, 20 bp, Artificial Sequence
  Synthetic oligonucleotide; AAG chr11 5279310 5279329 5279313 -
aggttgagtggcagtgttta

SEQ ID NO: 42546 - DNA, 20 bp, Artificial Sequence
  Synthetic oligonucleotide; AGG chr11 5279309 5279328 5279312 -
ggttgagtggcagtgtttaa

SEQ ID NO: 42547 - DNA, 20 bp, Artificial Sequence
  Synthetic oligonucleotide; GGG chr11 5279308 5279327 5279311 -
gttgagtggcagtgtttaaa

SEQ ID NO: 42548 - DNA, 20 bp, Artificial Sequence
  Synthetic oligonucleotide; CAG chr11 5279299 5279318 5279302 -
cagtgtttaaagggtgatat

SEQ ID NO: 42549 - DNA, 20 bp, Artificial Sequence
  Synthetic oligonucleotide; TGG chr11 5279279 5279298 5279282 -
cagactaaacttgaaatatg

SEQ ID NO: 42550 - DNA, 20 bp, Artificial Sequence
  Synthetic oligonucleotide; TAG chr11 5279267 5279286 5279270 -
gaaatatgtggctaaataac

SEQ ID NO: 42551 - DNA, 20 bp, Artificial Sequence
  Synthetic oligonucleotide; TAG chr11 5279236 5279255 5279239 -
ttattttttcgtatcatgaa

SEQ ID NO: 42552 - DNA, 20 bp, Artificial Sequence
  Synthetic oligonucleotide; CAG chr11 5279233 5279252 5279236 -
ttttttcgtatcatgaatag

SEQ ID NO: 42553 - DNA, 20 bp, Artificial Sequence
  Synthetic oligonucleotide; TAG chr11 5279227 5279246 5279230 -
cgtatcatgaatagcagata

SEQ ID NO: 42554 - DNA, 20 bp, Artificial Sequence
  Synthetic oligonucleotide; TGG chr11 5279219 5279238 5279222 -
gaatagcagatatagcttga

SEQ ID NO: 42555 - DNA, 20 bp, Artificial Sequence
  Synthetic oligonucleotide; TGG chr11 5279207 5279226 5279210 -
tagcttgatggccccatgct

SEQ ID NO: 42556 - DNA, 20 bp, Artificial Sequence
  Synthetic oligonucleotide; AAG chr11 5279158 5279177 5279161 -
gaaatccttaatttttgaca

SEQ ID NO: 42557 - DNA, 20 bp, Artificial Sequence
  Synthetic oligonucleotide; AGG chr11 5279157 5279176 5279160 -
aaatccttaatttttgacaa

SEQ ID NO: 42558 - DNA, 20 bp, Artificial Sequence
  Synthetic oligonucleotide; GGG chr11 5279156 5279175 5279159 -
aatccttaatttttgacaaa

SEQ ID NO: 42559 - DNA, 20 bp, Artificial Sequence
  Synthetic oligonucleotide; GGG chr11 5279155 5279174 5279158 -
atccttaatttttgacaaag

SEQ ID NO: 42560 - DNA, 20 bp, Artificial Sequence
  Synthetic oligonucleotide; TGG chr11 5279131 5279150 5279134 -
tattcattttcattttatat

SEQ ID NO: 42561 - DNA, 20 bp, Artificial Sequence
  Synthetic oligonucleotide; GGG chr11 5279130 5279149 5279133 -
attcattttcattttatatt

SEQ ID NO: 42562 - DNA, 20 bp, Artificial Sequence
  Synthetic oligonucleotide; TAG chr11 5279125 5279144 5279128 -
ttttcattttatattgggcc

SEQ ID NO: 42563 - DNA, 20 bp, Artificial Sequence
  Synthetic oligonucleotide; TAG chr11 5279114 5279133 5279117 -
tattgggcctagaaattatg

SEQ ID NO: 42564 - DNA, 20 bp, Artificial Sequence
  Synthetic oligonucleotide; TGG chr11 5279110 5279129 5279113 -
gggcctagaaattatgtaga

SEQ ID NO: 42565 - DNA, 20 bp, Artificial Sequence
  Synthetic oligonucleotide; GAG chr11 5279103 5279122 5279106 -
gaaattatgtagatggtcct

SEQ ID NO: 42566 - DNA, 20 bp, Artificial Sequence
  Synthetic oligonucleotide; AGG chr11 5279102 5279121 5279105 -
aaattatgtagatggtcctg

SEQ ID NO: 42567 - DNA, 20 bp, Artificial Sequence
  Synthetic oligonucleotide; AAG chr11 5279097 5279116 5279100 -
atgtagatggtcctgaggaa

SEQ ID NO: 42568 - DNA, 20 bp, Artificial Sequence
  Synthetic oligonucleotide; TAG chr11 5279090 5279109 5279093 -
tggtcctgaggaaaagttta

SEQ ID NO: 42569 - DNA, 20 bp, Artificial Sequence
  Synthetic oligonucleotide; TAG chr11 5279064 5279083 5279067 -
gtctatttctctctctaaca

SEQ ID NO: 42570 - DNA, 20 bp, Artificial Sequence
  Synthetic oligonucleotide; CAG chr11 5279057 5279076 5279060 -
tctctctctaacatagttgt

SEQ ID NO: 42571 - DNA, 20 bp, Artificial Sequence
  Synthetic oligonucleotide; TAG chr11 5279045 5279064 5279048 -
atagttgtcagcacaatgcc

SEQ ID NO: 42572 - DNA, 20 bp, Artificial Sequence
  Synthetic oligonucleotide; AGG chr11 5279044 5279063 5279047 -
tagttgtcagcacaatgcct

SEQ ID NO: 42573 - DNA, 20 bp, Artificial Sequence
  Synthetic oligonucleotide; TAG chr11 5279038 5279057 5279041 -
tcagcacaatgcctaggcta

SEQ ID NO: 42574 - DNA, 20 bp, Artificial Sequence
  Synthetic oligonucleotide; AGG chr11 5279037 5279056 5279040 -
cagcacaatgcctaggctat

SEQ ID NO: 42575 - DNA, 20 bp, Artificial Sequence
  Synthetic oligonucleotide; AAG chr11 5279034 5279053 5279037 -
cacaatgcctaggctatagg

SEQ ID NO: 42576 - DNA, 20 bp, Artificial Sequence
  Synthetic oligonucleotide; AAG chr11 5279025 5279044 5279028 -
taggctataggaagtactca

SEQ ID NO: 42577 - DNA, 20 bp, Artificial Sequence
  Synthetic oligonucleotide; TGG chr11 5278980 5278999 5278983 -
ttcttattcaattctacaca

SEQ ID NO: 42578 - DNA, 20 bp, Artificial Sequence
  Synthetic oligonucleotide; GAG chr11 5278978 5278997 5278981 -
cttattcaattctacacatg

SEQ ID NO: 42579 - DNA, 20 bp, Artificial Sequence
  Synthetic oligonucleotide; AGG chr11 5278977 5278996 5278980 -
ttattcaattctacacatgg

SEQ ID NO: 42580 - DNA, 20 bp, Artificial Sequence
  Synthetic oligonucleotide; CAG chr11 5278964 5278983 5278967 -
cacatggaggaaaaactcat

SEQ ID NO: 42581 - DNA, 20 bp, Artificial Sequence
  Synthetic oligonucleotide; AGG chr11 5278963 5278982 5278966 -
acatggaggaaaaactcatc

SEQ ID NO: 42582 - DNA, 20 bp, Artificial Sequence
  Synthetic oligonucleotide; GGG chr11 5278962 5278981 5278965 -
catggaggaaaaactcatca

SEQ ID NO: 42583 - DNA, 20 bp, Artificial Sequence
  Synthetic oligonucleotide; TGG chr11 5278958 5278977 5278961 -
gaggaaaaactcatcaggga

SEQ ID NO: 42584 - DNA, 20 bp, Artificial Sequence
  Synthetic oligonucleotide; GAG chr11 5278956 5278975 5278959 -
ggaaaaactcatcagggatg

SEQ ID NO: 42585 - DNA, 20 bp, Artificial Sequence
  Synthetic oligonucleotide; AGG chr11 5278955 5278974 5278958 -
gaaaaactcatcagggatgg

SEQ ID NO: 42586 - DNA, 20 bp, Artificial Sequence
  Synthetic oligonucleotide; AAG chr11 5278943 5278962 5278946 -
agggatggaggcacgcctct

SEQ ID NO: 42587 - DNA, 20 bp, Artificial Sequence
  Synthetic oligonucleotide; AGG chr11 5278942 5278961 5278945 -
gggatggaggcacgcctcta

SEQ ID NO: 42588 - DNA, 20 bp, Artificial Sequence
  Synthetic oligonucleotide; AAG chr11 5278939 5278958 5278942 -
atggaggcacgcctctaagg

SEQ ID NO: 42589 - DNA, 20 bp, Artificial Sequence
  Synthetic oligonucleotide; AGG chr11 5278938 5278957 5278941 -
tggaggcacgcctctaagga

SEQ ID NO: 42590 - DNA, 20 bp, Artificial Sequence
  Synthetic oligonucleotide; CAG chr11 5278935 5278954 5278938 -
aggcacgcctctaaggaagg

SEQ ID NO: 42591 - DNA, 20 bp, Artificial Sequence
  Synthetic oligonucleotide; AGG chr11 5278934 5278953 5278937 -
ggcacgcctctaaggaaggc

SEQ ID NO: 42592 - DNA, 20 bp, Artificial Sequence
  Synthetic oligonucleotide; TGG chr11 5278929 5278948 5278932 -
gcctctaaggaaggcaggtg

SEQ ID NO: 42593 - DNA, 20 bp, Artificial Sequence
  Synthetic oligonucleotide; CAG chr11 5278921 5278940 5278924 -
ggaaggcaggtgtggctctg

SEQ ID NO: 42594 - DNA, 20 bp, Artificial Sequence
  Synthetic oligonucleotide; TGG chr11 5278912 5278931 5278915 -
gtgtggctctgcagtgtgat

SEQ ID NO: 42595 - DNA, 20 bp, Artificial Sequence
  Synthetic oligonucleotide; GGG chr11 5278911 5278930 5278914 -
tgtggctctgcagtgtgatt

SEQ ID NO: 42596 - DNA, 20 bp, Artificial Sequence
  Synthetic oligonucleotide; CAG chr11 5278902 5278921 5278905 -
gcagtgtgattgggtacttg

SEQ ID NO: 42597 - DNA, 20 bp, Artificial Sequence
  Synthetic oligonucleotide; AGG chr11 5278901 5278920 5278904 -
cagtgtgattgggtacttgc

SEQ ID NO: 42598 - DNA, 20 bp, Artificial Sequence
  Synthetic oligonucleotide; AAG chr11 5278895 5278914 5278898 -
gattgggtacttgcaggacg

SEQ ID NO: 42599 - DNA, 20 bp, Artificial Sequence
  Synthetic oligonucleotide; AGG chr11 5278894 5278913 5278897 -
attgggtacttgcaggacga

SEQ ID NO: 42600 - DNA, 20 bp, Artificial Sequence
  Synthetic oligonucleotide; GGG chr11 5278893 5278912 5278896 -
ttgggtacttgcaggacgaa

SEQ ID NO: 42601 - DNA, 20 bp, Artificial Sequence
  Synthetic oligonucleotide; TGG chr11 5278890 5278909 5278893 -
ggtacttgcaggacgaaggg

SEQ ID NO: 42602 - DNA, 20 bp, Artificial Sequence
  Synthetic oligonucleotide; GGG chr11 5278889 5278908 5278892 -
gtacttgcaggacgaagggt

SEQ ID NO: 42603 - DNA, 20 bp, Artificial Sequence
  Synthetic oligonucleotide; GGG chr11 5278888 5278907 5278891 -
tacttgcaggacgaagggtg

SEQ ID NO: 42604 - DNA, 20 bp, Artificial Sequence
  Synthetic oligonucleotide; TGG chr11 5278885 5278904 5278888 -
ttgcaggacgaagggtgggg

SEQ ID NO: 42605 - DNA, 20 bp, Artificial Sequence
  Synthetic oligonucleotide; GGG chr11 5278884 5278903 5278887 -
tgcaggacgaagggtggggt

SEQ ID NO: 42606 - DNA, 20 bp, Artificial Sequence
  Synthetic oligonucleotide; GAG chr11 5278882 5278901 5278885 -
caggacgaagggtggggtgg

SEQ ID NO: 42607 - DNA, 20 bp, Artificial Sequence
  Synthetic oligonucleotide; TGG chr11 5278879 5278898 5278882 -
gacgaagggtggggtgggag

SEQ ID NO: 42608 - DNA, 20 bp, Artificial Sequence
  Synthetic oligonucleotide; TAG chr11 5278861 5278880 5278864 -
agtggctaaccttccattcc

SEQ ID NO: 42609 - DNA, 20 bp, Artificial Sequence
  Synthetic oligonucleotide; CAG chr11 5278856 5278875 5278859 -
ctaaccttccattcctagtg

SEQ ID NO: 42610 - DNA, 20 bp, Artificial Sequence
  Synthetic oligonucleotide; GAG chr11 5278854 5278873 5278857 -
aaccttccattcctagtgca

SEQ ID NO: 42611 - DNA, 20 bp, Artificial Sequence
  Synthetic oligonucleotide; AGG chr11 5278853 5278872 5278856 -
accttccattcctagtgcag

SEQ ID NO: 42612 - DNA, 20 bp, Artificial Sequence
  Synthetic oligonucleotide; CAG chr11 5278847 5278866 5278850 -
cattcctagtgcagaggtca

SEQ ID NO: 42613 - DNA, 20 bp, Artificial Sequence
  Synthetic oligonucleotide; GAG chr11 5278825 5278844 5278828 -
gcctaaacatcaaattcctt

SEQ ID NO: 42614 - DNA, 20 bp, Artificial Sequence
  Synthetic oligonucleotide; AGG chr11 5278824 5278843 5278827 -
cctaaacatcaaattccttg

SEQ ID NO: 42615 - DNA, 20 bp, Artificial Sequence
  Synthetic oligonucleotide; CGG chr11 5278819 5278838 5278822 -
acatcaaattccttgaggtg

SEQ ID NO: 42616 - DNA, 20 bp, Artificial Sequence
  Synthetic oligonucleotide; TGG chr11 5278816 5278835 5278819 -
tcaaattccttgaggtgcgg

SEQ ID NO: 42617 - DNA, 20 bp, Artificial Sequence
  Synthetic oligonucleotide; CAG chr11 5278797 5278816 5278800 -
gtggctcactcctgtaatca

SEQ ID NO: 42618 - DNA, 20 bp, Artificial Sequence
  Synthetic oligonucleotide; CAG chr11 5278794 5278813 5278797 -
gctcactcctgtaatcacag

SEQ ID NO: 42619 - DNA, 20 bp, Artificial Sequence
  Synthetic oligonucleotide; TGG chr11 5278789 5278808 5278792 -
ctcctgtaatcacagcagtt

SEQ ID NO: 42620 - DNA, 20 bp, Artificial Sequence
  Synthetic oligonucleotide; GGG chr11 5278788 5278807 5278791 -
tcctgtaatcacagcagttt

SEQ ID NO: 42621 - DNA, 20 bp, Artificial Sequence
  Synthetic oligonucleotide; AAG chr11 5278780 5278799 5278783 -
tcacagcagtttgggacgcc

SEQ ID NO: 42622 - DNA, 20 bp, Artificial Sequence
  Synthetic oligonucleotide; AGG chr11 5278779 5278798 5278782 -
cacagcagtttgggacgcca

SEQ ID NO: 42623 - DNA, 20 bp, Artificial Sequence
  Synthetic oligonucleotide; TGG chr11 5278776 5278795 5278779 -
agcagtttgggacgccaagg

SEQ ID NO: 42624 - DNA, 20 bp, Artificial Sequence
  Synthetic oligonucleotide; GGG chr11 5278775 5278794 5278778 -
gcagtttgggacgccaaggt

SEQ ID NO: 42625 - DNA, 20 bp, Artificial Sequence
  Synthetic oligonucleotide; CAG chr11 5278772 5278791 5278775 -
gtttgggacgccaaggtggg

SEQ ID NO: 42626 - DNA, 20 bp, Artificial Sequence
  Synthetic oligonucleotide; GAG chr11 5278762 5278781 5278765 -
ccaaggtgggcagatcactt

SEQ ID NO: 42627 - DNA, 20 bp, Artificial Sequence
  Synthetic oligonucleotide; AGG chr11 5278761 5278780 5278764 -
caaggtgggcagatcacttg

SEQ ID NO: 42628 - DNA, 20 bp, Artificial Sequence
  Synthetic oligonucleotide; CAG chr11 5278757 5278776 5278760 -
gtgggcagatcacttgaggt

SEQ ID NO: 42629 - DNA, 20 bp, Artificial Sequence
  Synthetic oligonucleotide; AGG chr11 5278756 5278775 5278759 -
tgggcagatcacttgaggtc

SEQ ID NO: 42630 - DNA, 20 bp, Artificial Sequence
  Synthetic oligonucleotide; GAG chr11 5278754 5278773 5278757 -
ggcagatcacttgaggtcag

SEQ ID NO: 42631 - DNA, 20 bp, Artificial Sequence
  Synthetic oligonucleotide; TGG chr11 5278750 5278769 5278753 -
gatcacttgaggtcaggagt

SEQ ID NO: 42632 - DNA, 20 bp, Artificial Sequence
  Synthetic oligonucleotide; CAG chr11 5278743 5278762 5278746 -
tgaggtcaggagttggacac

SEQ ID NO: 42633 - DNA, 20 bp, Artificial Sequence
  Synthetic oligonucleotide; CAG chr11 5278738 5278757 5278741 -
tcaggagttggacaccagcc

SEQ ID NO: 42634 - DNA, 20 bp, Artificial Sequence
  Synthetic oligonucleotide; TAG chr11 5278729 5278748 5278732 -
ggacaccagcccagccaaca

SEQ ID NO: 42635 - DNA, 20 bp, Artificial Sequence
  Synthetic oligonucleotide; TGG chr11 5278719 5278738 5278722 -
ccagccaacatagtgaaacc

SEQ ID NO: 42636 - DNA, 20 bp, Artificial Sequence
  Synthetic oligonucleotide; TAG chr11 5278693 5278712 5278696 -
ctgcttaaaaatataaaaat

SEQ ID NO: 42637 - DNA, 20 bp, Artificial Sequence
  Synthetic oligonucleotide; TGG chr11 5278689 5278708 5278692 -
ttaaaaatataaaaattagc

SEQ ID NO: 42638 - DNA, 20 bp, Artificial Sequence
  Synthetic oligonucleotide; TGG chr11 5278683 5278702 5278686 -
atataaaaattagctggacg

SEQ ID NO: 42639 - DNA, 20 bp, Artificial Sequence
  Synthetic oligonucleotide; CGG chr11 5278677 5278696 5278680 -
aaattagctggacgtggtga

SEQ ID NO: 42640 - DNA, 20 bp, Artificial Sequence
  Synthetic oligonucleotide; GGG chr11 5278676 5278695 5278679 -
aattagctggacgtggtgac

SEQ ID NO: 42641 - DNA, 20 bp, Artificial Sequence
  Synthetic oligonucleotide; GAG chr11 5278674 5278693 5278677 -
ttagctggacgtggtgacgg

SEQ ID NO: 42642 - DNA, 20 bp, Artificial Sequence
  Synthetic oligonucleotide; TGG chr11 5278654 5278673 5278657 -
gagcctgtaatccaactact

SEQ ID NO: 42643 - DNA, 20 bp, Artificial Sequence
  Synthetic oligonucleotide; GGG chr11 5278653 5278672 5278656 -
agcctgtaatccaactactt

SEQ ID NO: 42644 - DNA, 20 bp, Artificial Sequence
  Synthetic oligonucleotide; GAG chr11 5278651 5278670 5278654 -
cctgtaatccaactacttgg

SEQ ID NO: 42645 - DNA, 20 bp, Artificial Sequence
  Synthetic oligonucleotide; AGG chr11 5278650 5278669 5278653 -
ctgtaatccaactacttggg

SEQ ID NO: 42646 - DNA, 20 bp, Artificial Sequence
  Synthetic oligonucleotide; GAG chr11 5278645 5278664 5278648 -
atccaactacttgggaggct

SEQ ID NO: 42647 - DNA, 20 bp, Artificial Sequence
  Synthetic oligonucleotide; AGG chr11 5278644 5278663 5278647 -
tccaactacttgggaggctg

SEQ ID NO: 42648 - DNA, 20 bp, Artificial Sequence
  Synthetic oligonucleotide; CAG chr11 5278641 5278660 5278644 -
aactacttgggaggctgagg

SEQ ID NO: 42649 - DNA, 20 bp, Artificial Sequence
  Synthetic oligonucleotide; AGG chr11 5278640 5278659 5278643 -
actacttgggaggctgaggc

SEQ ID NO: 42650 - DNA, 20 bp, Artificial Sequence
  Synthetic oligonucleotide; GAG chr11 5278638 5278657 5278641 -
tacttgggaggctgaggcag

SEQ ID NO: 42651 - DNA, 20 bp, Artificial Sequence
  Synthetic oligonucleotide; CGG chr11 5278623 5278642 5278626 -
ggcaggagaatcgcttgaac

SEQ ID NO: 42652 - DNA, 20 bp, Artificial Sequence
  Synthetic oligonucleotide; GGG chr11 5278622 5278641 5278625 -
gcaggagaatcgcttgaacc

SEQ ID NO: 42653 - DNA, 20 bp, Artificial Sequence
  Synthetic oligonucleotide; GGG chr11 5278621 5278640 5278624 -
caggagaatcgcttgaaccg

SEQ ID NO: 42654 - DNA, 20 bp, Artificial Sequence
  Synthetic oligonucleotide; GAG chr11 5278619 5278638 5278622 -
ggagaatcgcttgaaccggg

SEQ ID NO: 42655 - DNA, 20 bp, Artificial Sequence
  Synthetic oligonucleotide; AGG chr11 5278618 5278637 5278621 -
gagaatcgcttgaaccgggg

SEQ ID NO: 42656 - DNA, 20 bp, Artificial Sequence
  Synthetic oligonucleotide; TGG chr11 5278615 5278634 5278618 -
aatcgcttgaaccggggagg

SEQ ID NO: 42657 - DNA, 20 bp, Artificial Sequence
  Synthetic oligonucleotide; GAG chr11 5278613 5278632 5278616 -
tcgcttgaaccggggaggtg

SEQ ID NO: 42658 - DNA, 20 bp, Artificial Sequence
  Synthetic oligonucleotide; GAG chr11 5278602 5278621 5278605 -
ggggaggtggagtttgcact

SEQ ID NO: 42659 - DNA, 20 bp, Artificial Sequence
  Synthetic oligonucleotide; CAG chr11 5278599 5278618 5278602 -
gaggtggagtttgcactgag

SEQ ID NO: 42660 - DNA, 20 bp, Artificial Sequence
  Synthetic oligonucleotide; GAG chr11 5278597 5278616 5278600 -
ggtggagtttgcactgagca

SEQ ID NO: 42661 - DNA, 20 bp, Artificial Sequence
  Synthetic oligonucleotide; CAG chr11 5278577 5278596 5278580 -
gagatcatgccattgcactc

SEQ ID NO: 42662 - DNA, 20 bp, Artificial Sequence
  Synthetic oligonucleotide; CAG chr11 5278570 5278589 5278573 -
tgccattgcactccagcctc

SEQ ID NO: 42663 - DNA, 20 bp, Artificial Sequence
  Synthetic oligonucleotide; GAG chr11 5278568 5278587 5278571 -
ccattgcactccagcctcca

SEQ ID NO: 42664 - DNA, 20 bp, Artificial Sequence
  Synthetic oligonucleotide; GAG chr11 5278564 5278583 5278567 -
tgcactccagcctccagagc

SEQ ID NO: 42665 - DNA, 20 bp, Artificial Sequence
  Synthetic oligonucleotide; AAG chr11 5278551 5278570 5278554 -
ccagagcgagactctgtcta

SEQ ID NO: 42666 - DNA, 20 bp, Artificial Sequence
  Synthetic oligonucleotide; CAG chr11 5278490 5278509 5278493 -
catcaaattccctgaccgaa

SEQ ID NO: 42667 - DNA, 20 bp, Artificial Sequence
  Synthetic oligonucleotide; AAG chr11 5278440 5278459 5278443 -
tctaccattttccctcctta

SEQ ID NO: 42668 - DNA, 20 bp, Artificial Sequence
  Synthetic oligonucleotide; CAG chr11 5278420 5278439 5278423 -
aagaaactgtgaacttcctt

SEQ ID NO: 42669 - DNA, 20 bp, Artificial Sequence
  Synthetic oligonucleotide; TAG chr11 5278416 5278435 5278419 -
aactgtgaacttccttcagc

SEQ ID NO: 42670 - DNA, 20 bp, Artificial Sequence
  Synthetic oligonucleotide; GAG chr11 5278414 5278433 5278417 -
ctgtgaacttccttcagcta

SEQ ID NO: 42671 - DNA, 20 bp, Artificial Sequence
  Synthetic oligonucleotide; AGG chr11 5278413 5278432 5278416 -
tgtgaacttccttcagctag

SEQ ID NO: 42672 - DNA, 20 bp, Artificial Sequence
  Synthetic oligonucleotide; GGG chr11 5278412 5278431 5278415 -
gtgaacttccttcagctaga

SEQ ID NO: 42673 - DNA, 20 bp, Artificial Sequence
  Synthetic oligonucleotide; GGG chr11 5278411 5278430 5278414 -
tgaacttccttcagctagag

SEQ ID NO: 42674 - DNA, 20 bp, Artificial Sequence
  Synthetic oligonucleotide; TGG chr11 5278406 5278425 5278409 -
ttccttcagctagaggggcc

SEQ ID NO: 42675 - DNA, 20 bp, Artificial Sequence
  Synthetic oligonucleotide; CAG chr11 5278401 5278420 5278404 -
tcagctagaggggcctggct

SEQ ID NO: 42676 - DNA, 20 bp, Artificial Sequence
  Synthetic oligonucleotide; AAG chr11 5278398 5278417 5278401 -
gctagaggggcctggctcag

SEQ ID NO: 42677 - DNA, 20 bp, Artificial Sequence
  Synthetic oligonucleotide; TGG chr11 5278391 5278410 5278394 -
gggcctggctcagaagcctc

SEQ ID NO: 42678 - DNA, 20 bp, Artificial Sequence
  Synthetic oligonucleotide; CAG chr11 5278387 5278406 5278390 -
ctggctcagaagcctctggt

SEQ ID NO: 42679 - DNA, 20 bp, Artificial Sequence
  Synthetic oligonucleotide; AAG chr11 5278379 5278398 5278382 -
gaagcctctggtcagcatcc

SEQ ID NO: 42680 - DNA, 20 bp, Artificial Sequence
  Synthetic oligonucleotide; TGG chr11 5278358 5278377 5278361 -
agaaatacttgatgtcactt

SEQ ID NO: 42681 - DNA, 20 bp, Artificial Sequence
  Synthetic oligonucleotide; AAG chr11 5278352 5278371 5278355 -
acttgatgtcactttggcta

SEQ ID NO: 42682 - DNA, 20 bp, Artificial Sequence
  Synthetic oligonucleotide; AGG chr11 5278351 5278370 5278354 -
cttgatgtcactttggctaa

SEQ ID NO: 42683 - DNA, 20 bp, Artificial Sequence
  Synthetic oligonucleotide; TAG chr11 5278339 5278358 5278342 -
ttggctaaaggtatgatgtg

SEQ ID NO: 42684 - DNA, 20 bp, Artificial Sequence
  Synthetic oligonucleotide; AAG chr11 5278334 5278353 5278337 -
taaaggtatgatgtgtagac

SEQ ID NO: 42685 - DNA, 20 bp, Artificial Sequence
  Synthetic oligonucleotide; CAG chr11 5278328 5278347 5278331 -
tatgatgtgtagacaagctc

SEQ ID NO: 42686 - DNA, 20 bp, Artificial Sequence
  Synthetic oligonucleotide; GAG chr11 5278326 5278345 5278329 -
tgatgtgtagacaagctcca

SEQ ID NO: 42687 - DNA, 20 bp, Artificial Sequence
  Synthetic oligonucleotide; TGG chr11 5278322 5278341 5278325 -
gtgtagacaagctccagaga

SEQ ID NO: 42688 - DNA, 20 bp, Artificial Sequence
  Synthetic oligonucleotide; CAG chr11 5278294 5278313 5278297 -
catttccatatccacccacc

SEQ ID NO: 42689 - DNA, 20 bp, Artificial Sequence
  Synthetic oligonucleotide; AAG chr11 5278278 5278297 5278281 -
cacccagctttccaatttta

SEQ ID NO: 42690 - DNA, 20 bp, Artificial Sequence
  Synthetic oligonucleotide; GAG chr11 5278267 5278286 5278270 -
ccaattttaaagccaattct

SEQ ID NO: 42691 - DNA, 20 bp, Artificial Sequence
  Synthetic oligonucleotide; AGG chr11 5278266 5278285 5278269 -
caattttaaagccaattctg

SEQ ID NO: 42692 - DNA, 20 bp, Artificial Sequence
  Synthetic oligonucleotide; TAG chr11 5278263 5278282 5278266 -
ttttaaagccaattctgagg

SEQ ID NO: 42693 - DNA, 20 bp, Artificial Sequence
  Synthetic oligonucleotide; GAG chr11 5278261 5278280 5278264 -
ttaaagccaattctgaggta

SEQ ID NO: 42694 - DNA, 20 bp, Artificial Sequence
  Synthetic oligonucleotide; AAG chr11 5278221 5278240 5278224 -
ccttgacaaaattcaaccca

SEQ ID NO: 42695 - DNA, 20 bp, Artificial Sequence
  Synthetic oligonucleotide; TAG chr11 5278206 5278225 5278209 -
acccaaagactcactttgcc

SEQ ID NO: 42696 - DNA, 20 bp, Artificial Sequence
  Synthetic oligonucleotide; CAG chr11 5278173 5278192 5278176 -
cttactctgacatatactca

SEQ ID NO: 42697 - DNA, 20 bp, Artificial Sequence
  Synthetic oligonucleotide; CAG chr11 5278169 5278188 5278172 -
ctctgacatatactcacagc

SEQ ID NO: 42698 - DNA, 20 bp, Artificial Sequence
  Synthetic oligonucleotide; TAG chr11 5278162 5278181 5278165 -
atatactcacagccagaaat

SEQ ID NO: 42699 - DNA, 20 bp, Artificial Sequence
  Synthetic oligonucleotide; TAG chr11 5278152 5278171 5278155 -
agccagaaattagcatgcac

SEQ ID NO: 42700 - DNA, 20 bp, Artificial Sequence
  Synthetic oligonucleotide; GAG chr11 5278150 5278169 5278153 -
ccagaaattagcatgcacta

SEQ ID NO: 42701 - DNA, 20 bp, Artificial Sequence
  Synthetic oligonucleotide; GAG chr11 5278140 5278159 5278143 -
gcatgcactagagtgtgcat

SEQ ID NO: 42702 - DNA, 20 bp, Artificial Sequence
  Synthetic oligonucleotide; CAG chr11 5278101 5278120 5278104 -
accaattccatattctctgt

SEQ ID NO: 42703 - DNA, 20 bp, Artificial Sequence
  Synthetic oligonucleotide; TGG chr11 5278088 5278107 5278091 -
tctctgtcagaaaatcctgt

SEQ ID NO: 42704 - DNA, 20 bp, Artificial Sequence
  Synthetic oligonucleotide; AAG chr11 5278075 5278094 5278078 -
atcctgttggtttttcgtga

SEQ ID NO: 42705 - DNA, 20 bp, Artificial Sequence
  Synthetic oligonucleotide; AGG chr11 5278074 5278093 5278077 -
tcctgttggtttttcgtgaa

SEQ ID NO: 42706 - DNA, 20 bp, Artificial Sequence
  Synthetic oligonucleotide; CAG chr11 5278064 5278083 5278067 -
ttttcgtgaaaggatgtttt

SEQ ID NO: 42707 - DNA, 20 bp, Artificial Sequence
  Synthetic oligonucleotide; GAG chr11 5278062 5278081 5278065 -
ttcgtgaaaggatgttttca

SEQ ID NO: 42708 - DNA, 20 bp, Artificial Sequence
  Synthetic oligonucleotide; AGG chr11 5278061 5278080 5278064 -
tcgtgaaaggatgttttcag

SEQ ID NO: 42709 - DNA, 20 bp, Artificial Sequence
  Synthetic oligonucleotide; TGG chr11 5278023 5278042 5278026 -
cacctccaatgctaccactc

SEQ ID NO: 42710 - DNA, 20 bp, Artificial Sequence
  Synthetic oligonucleotide; AAG chr11 5278017 5278036 5278020 -
caatgctaccactctggtct

SEQ ID NO: 42711 - DNA, 20 bp, Artificial Sequence
  Synthetic oligonucleotide; TAG chr11 5277990 5278009 5277993 -
tgtcaccaccacctaaatta

SEQ ID NO: 42712 - DNA, 20 bp, Artificial Sequence
  Synthetic oligonucleotide; TAG chr11 5277914 5277933 5277917 -
tcccaatatactatccaaat

SEQ ID NO: 42713 - DNA, 20 bp, Artificial Sequence
  Synthetic oligonucleotide; AAG chr11 5277897 5277916 5277900 -
aattagtcttttcaaaatgt

SEQ ID NO: 42714 - DNA, 20 bp, Artificial Sequence
  Synthetic oligonucleotide; TGG chr11 5277887 5277906 5277890 -
ttcaaaatgtaagtcatata

SEQ ID NO: 42715 - DNA, 20 bp, Artificial Sequence
  Synthetic oligonucleotide; AAG chr11 5277869 5277888 5277872 -
tatggtcacctctttgttca

SEQ ID NO: 42716 - DNA, 20 bp, Artificial Sequence
  Synthetic oligonucleotide; TAG chr11 5277858 5277877 5277861 -
ctttgttcaaagtcttctga

SEQ ID NO: 42717 - DNA, 20 bp, Artificial Sequence
  Synthetic oligonucleotide; TAG chr11 5277807 5277826 5277810 -
atccttacaattctctacaa

SEQ ID NO: 42718 - DNA, 20 bp, Artificial Sequence
  Synthetic oligonucleotide; CAG chr11 5277777 5277796 5277780 -
tgcatatattatgtttatta

SEQ ID NO: 42719 - DNA, 20 bp, Artificial Sequence
  Synthetic oligonucleotide; TAG chr11 5277763 5277782 5277766 -
ttattacagatacatatata

SEQ ID NO: 42720 - DNA, 20 bp, Artificial Sequence
  Synthetic oligonucleotide; TAG chr11 5277720 5277739 5277723 -
tatatttatgtgtatgtgtg

SEQ ID NO: 42721 - DNA, 20 bp, Artificial Sequence
  Synthetic oligonucleotide; GAG chr11 5277718 5277737 5277721 -
tatttatgtgtatgtgtgta

SEQ ID NO: 42722 - DNA, 20 bp, Artificial Sequence
  Synthetic oligonucleotide; TAG chr11 5277690 5277709 5277693 -
tttcttacaactctatgatg

SEQ ID NO: 42723 - DNA, 20 bp, Artificial Sequence
  Synthetic oligonucleotide; AGG chr11 5277689 5277708 5277692 -
ttcttacaactctatgatgt

SEQ ID NO: 42724 - DNA, 20 bp, Artificial Sequence
  Synthetic oligonucleotide; TAG chr11 5277680 5277699 5277683 -
ctctatgatgtaggtattat

SEQ ID NO: 42725 - DNA, 20 bp, Artificial Sequence
  Synthetic oligonucleotide; TAG chr11 5277658 5277677 5277661 -
gtgtcccaaattttataatt

SEQ ID NO: 42726 - DNA, 20 bp, Artificial Sequence
  Synthetic oligonucleotide; AGG chr11 5277657 5277676 5277660 -
tgtcccaaattttataattt

SEQ ID NO: 42727 - DNA, 20 bp, Artificial Sequence
  Synthetic oligonucleotide; TGG chr11 5277602 5277621 5277605 -
caccgaatctcatcctacat

SEQ ID NO: 42728 - DNA, 20 bp, Artificial Sequence
  Synthetic oligonucleotide; AAG chr11 5277573 5277592 5277576 -
tgatattccttgaaaattct

SEQ ID NO: 42729 - DNA, 20 bp, Artificial Sequence
  Synthetic oligonucleotide; TAG chr11 5277557 5277576 5277560 -
ttctaagcatcttacatctt

SEQ ID NO: 42730 - DNA, 20 bp, Artificial Sequence
  Synthetic oligonucleotide; AGG chr11 5277556 5277575 5277559 -
tctaagcatcttacatcttt

SEQ ID NO: 42731 - DNA, 20 bp, Artificial Sequence
  Synthetic oligonucleotide; GGG chr11 5277555 5277574 5277558 -
ctaagcatcttacatcttta

SEQ ID NO: 42732 - DNA, 20 bp, Artificial Sequence
  Synthetic oligonucleotide; TAG chr11 5277511 5277530 5277514 -
atgccctaaatatttaatca

SEQ ID NO: 42733 - DNA, 20 bp, Artificial Sequence
  Synthetic oligonucleotide; TGG chr11 5277497 5277516 5277500 -
taatcatagtttcatataaa

SEQ ID NO: 42734 - DNA, 20 bp, Artificial Sequence
  Synthetic oligonucleotide; GGG chr11 5277496 5277515 5277499 -
aatcatagtttcatataaat

SEQ ID NO: 42735 - DNA, 20 bp, Artificial Sequence
  Synthetic oligonucleotide; TGG chr11 5277479 5277498 5277482 -
aatgggttcctcatcatcta

SEQ ID NO: 42736 - DNA, 20 bp, Artificial Sequence
  Synthetic oligonucleotide; GGG chr11 5277478 5277497 5277481 -
atgggttcctcatcatctat

SEQ ID NO: 42737 - DNA, 20 bp, Artificial Sequence
  Synthetic oligonucleotide; CAG chr11 5277467 5277486 5277470 -
atcatctatgggtactctct

SEQ ID NO: 42738 - DNA, 20 bp, Artificial Sequence
  Synthetic oligonucleotide; AGG chr11 5277466 5277485 5277469 -
tcatctatgggtactctctc

SEQ ID NO: 42739 - DNA, 20 bp, Artificial Sequence
  Synthetic oligonucleotide; TAG chr11 5277452 5277471 5277455 -
tctctcaggtgttaacttta

SEQ ID NO: 42740 - DNA, 20 bp, Artificial Sequence
  Synthetic oligonucleotide; GAG chr11 5277448 5277467 5277451 -
tcaggtgttaactttatagt

SEQ ID NO: 42741 - DNA, 20 bp, Artificial Sequence
  Synthetic oligonucleotide; AGG chr11 5277447 5277466 5277450 -
caggtgttaactttatagtg

SEQ ID NO: 42742 - DNA, 20 bp, Artificial Sequence
  Synthetic oligonucleotide; AAG chr11 5277423 5277442 5277426 -
ctttcctgccatactactta

SEQ ID NO: 42743 - DNA, 20 bp, Artificial Sequence
  Synthetic oligonucleotide; TAG chr11 5277420 5277439 5277423 -
tcctgccatactacttaaag

SEQ ID NO: 42744 - DNA, 20 bp, Artificial Sequence
  Synthetic oligonucleotide; TGG chr11 5277385 5277404 5277388 -
accctgtcctaatcacactc

SEQ ID NO: 42745 - DNA, 20 bp, Artificial Sequence
  Synthetic oligonucleotide; CAG chr11 5277373 5277392 5277376 -
tcacactctggccttcattt

SEQ ID NO: 42746 - DNA, 20 bp, Artificial Sequence
  Synthetic oligonucleotide; TAG chr11 5277353 5277372 5277356 -
cagttttttttttttctcca

SEQ ID NO: 42747 - DNA, 20 bp, Artificial Sequence
  Synthetic oligonucleotide; TGG chr11 5277337 5277356 5277340 -
tccatagcacctaatctcat

SEQ ID NO: 42748 - DNA, 20 bp, Artificial Sequence
  Synthetic oligonucleotide; AAG chr11 5277301 5277320 5277304 -
tcatttgcttatttaatgtc

SEQ ID NO: 42749 - DNA, 20 bp, Artificial Sequence
  Synthetic oligonucleotide; AAG chr11 5277284 5277303 5277287 -
gtcaagctctttccactatc

SEQ ID NO: 42750 - DNA, 20 bp, Artificial Sequence
  Synthetic oligonucleotide; CAG chr11 5277271 5277290 5277274 -
cactatcaagtccatgaaaa

SEQ ID NO: 42751 - DNA, 20 bp, Artificial Sequence
  Synthetic oligonucleotide; AGG chr11 5277270 5277289 5277273 -
actatcaagtccatgaaaac

SEQ ID NO: 42752 - DNA, 20 bp, Artificial Sequence
  Synthetic oligonucleotide; TAG chr11 5277230 5277249 5277233 -
ctgtttttgtgctgtattct

SEQ ID NO: 42753 - DNA, 20 bp, Artificial Sequence
  Synthetic oligonucleotide; GAG chr11 5277200 5277219 5277203 -
acaattttgaatgaatgaat

SEQ ID NO: 42754 - DNA, 20 bp, Artificial Sequence
  Synthetic oligonucleotide; CAG chr11 5277197 5277216 5277200 -
attttgaatgaatgaatgag

SEQ ID NO: 42755 - DNA, 20 bp, Artificial Sequence
  Synthetic oligonucleotide; AAG chr11 5277168 5277187 5277171 -
acatatacaactataattaa

SEQ ID NO: 42756 - DNA, 20 bp, Artificial Sequence
  Synthetic oligonucleotide; AGG chr11 5277167 5277186 5277170 -
catatacaactataattaaa

SEQ ID NO: 42757 - DNA, 20 bp, Artificial Sequence
  Synthetic oligonucleotide; AAG chr11 5277129 5277148 5277132 -
tccactgctatgcacacaca

SEQ ID NO: 42758 - DNA, 20 bp, Artificial Sequence
  Synthetic oligonucleotide; CAG chr11 5277122 5277141 5277125 -
ctatgcacacacaaagaaat

SEQ ID NO: 42759 - DNA, 20 bp, Artificial Sequence
  Synthetic oligonucleotide; TGG chr11 5277119 5277138 5277122 -
tgcacacacaaagaaatcag

SEQ ID NO: 42760 - DNA, 20 bp, Artificial Sequence
  Synthetic oligonucleotide; GAG chr11 5277117 5277136 5277120 -
cacacacaaagaaatcagtg

SEQ ID NO: 42761 - DNA, 20 bp, Artificial Sequence
  Synthetic oligonucleotide; TAG chr11 5277114 5277133 5277117 -
acacaaagaaatcagtggag

SEQ ID NO: 42762 - DNA, 20 bp, Artificial Sequence
  Synthetic oligonucleotide; GAG chr11 5277112 5277131 5277115 -
acaaagaaatcagtggagta

SEQ ID NO: 42763 - DNA, 20 bp, Artificial Sequence
  Synthetic oligonucleotide; TGG chr11 5277108 5277127 5277111 -
agaaatcagtggagtagagc

SEQ ID NO: 42764 - DNA, 20 bp, Artificial Sequence
  Synthetic oligonucleotide; AAG chr11 5277105 5277124 5277108 -
aatcagtggagtagagctgg

SEQ ID NO: 42765 - DNA, 20 bp, Artificial Sequence
  Synthetic oligonucleotide; AAG chr11 5277098 5277117 5277101 -
ggagtagagctggaagtgct

SEQ ID NO: 42766 - DNA, 20 bp, Artificial Sequence
  Synthetic oligonucleotide; TAG chr11 5277089 5277108 5277092 -
ctggaagtgctaagcctgca

SEQ ID NO: 42767 - DNA, 20 bp, Artificial Sequence
  Synthetic oligonucleotide; GAG chr11 5277087 5277106 5277090 -
ggaagtgctaagcctgcata

SEQ ID NO: 42768 - DNA, 20 bp, Artificial Sequence
  Synthetic oligonucleotide; TAG chr11 5277083 5277102 5277086 -
gtgctaagcctgcatagagc

SEQ ID NO: 42769 - DNA, 20 bp, Artificial Sequence
  Synthetic oligonucleotide; TAG chr11 5277079 5277098 5277082 -
taagcctgcatagagctagt

SEQ ID NO: 42770 - DNA, 20 bp, Artificial Sequence
  Synthetic oligonucleotide; CAG chr11 5277069 5277088 5277072 -
tagagctagttagccctccg

SEQ ID NO: 42771 - DNA, 20 bp, Artificial Sequence
  Synthetic oligonucleotide; AGG chr11 5277068 5277087 5277071 -
agagctagttagccctccgc

SEQ ID NO: 42772 - DNA, 20 bp, Artificial Sequence
  Synthetic oligonucleotide; CAG chr11 5277065 5277084 5277068 -
gctagttagccctccgcagg

SEQ ID NO: 42773 - DNA, 20 bp, Artificial Sequence
  Synthetic oligonucleotide; GAG chr11 5277063 5277082 5277066 -
tagttagccctccgcaggca

SEQ ID NO: 42774 - DNA, 20 bp, Artificial Sequence
  Synthetic oligonucleotide; TGG chr11 5277054 5277073 5277057 -
ctccgcaggcagagccttga

SEQ ID NO: 42775 - DNA, 20 bp, Artificial Sequence
  Synthetic oligonucleotide; GGG chr11 5277053 5277072 5277056 -
tccgcaggcagagccttgat

SEQ ID NO: 42776 - DNA, 20 bp, Artificial Sequence
  Synthetic oligonucleotide; GAG chr11 5277044 5277063 5277047 -
agagccttgatgggattact

SEQ ID NO: 42777 - DNA, 20 bp, Artificial Sequence
  Synthetic oligonucleotide; TAG chr11 5277038 5277057 5277041 -
ttgatgggattactgagttc

SEQ ID NO: 42778 - DNA, 20 bp, Artificial Sequence
  Synthetic oligonucleotide; TGG chr11 5277032 5277051 5277035 -
ggattactgagttctagaat

SEQ ID NO: 42779 - DNA, 20 bp, Artificial Sequence
  Synthetic oligonucleotide; TAG chr11 5277015 5277034 5277018 -
aattggactcatttgttttg

SEQ ID NO: 42780 - DNA, 20 bp, Artificial Sequence
  Synthetic oligonucleotide; AGG chr11 5277014 5277033 5277017 -
attggactcatttgttttgt

SEQ ID NO: 42781 - DNA, 20 bp, Artificial Sequence
  Synthetic oligonucleotide; GAG chr11 5277009 5277028 5277012 -
actcatttgttttgtaggct

SEQ ID NO: 42782 - DNA, 20 bp, Artificial Sequence
  Synthetic oligonucleotide; AAG chr11 5276972 5276991 5276975 -
acttgttctgaccaaaataa

SEQ ID NO: 42783 - DNA, 20 bp, Artificial Sequence
  Synthetic oligonucleotide; AGG chr11 5276971 5276990 5276974 -
cttgttctgaccaaaataaa

SEQ ID NO: 42784 - DNA, 20 bp, Artificial Sequence
  Synthetic oligonucleotide; AAG chr11 5276963 5276982 5276966 -
gaccaaaataaaaggctcaa

SEQ ID NO: 42785 - DNA, 20 bp, Artificial Sequence
  Synthetic oligonucleotide; CAG chr11 5276946 5276965 5276949 -
caaaagatgaatatcgaaac

SEQ ID NO: 42786 - DNA, 20 bp, Artificial Sequence
  Synthetic oligonucleotide; AGG chr11 5276945 5276964 5276948 -
aaaagatgaatatcgaaacc

SEQ ID NO: 42787 - DNA, 20 bp, Artificial Sequence
  Synthetic oligonucleotide; GGG chr11 5276944 5276963 5276947 -
aaagatgaatatcgaaacca

SEQ ID NO: 42788 - DNA, 20 bp, Artificial Sequence
  Synthetic oligonucleotide; TGG chr11 5276929 5276948 5276932 -
aaccagggtgttttttacac

SEQ ID NO: 42789 - DNA, 20 bp, Artificial Sequence
  Synthetic oligonucleotide; TAG chr11 5276916 5276935 5276919 -
tttacactggaatttataac

SEQ ID NO: 42790 - DNA, 20 bp, Artificial Sequence
  Synthetic oligonucleotide; GAG chr11 5276914 5276933 5276917 -
tacactggaatttataacta

SEQ ID NO: 42791 - DNA, 20 bp, Artificial Sequence
  Synthetic oligonucleotide; AAG chr11 5276896 5276915 5276899 -
tagagcactcatgtttatgt

SEQ ID NO: 42792 - DNA, 20 bp, Artificial Sequence
  Synthetic oligonucleotide; CAG chr11 5276877 5276896 5276880 -
taagcaattaattgtttcat

SEQ ID NO: 42793 - DNA, 20 bp, Artificial Sequence
  Synthetic oligonucleotide; CAG chr11 5276873 5276892 5276876 -
caattaattgtttcatcagt

SEQ ID NO: 42794 - DNA, 20 bp, Artificial Sequence
  Synthetic oligonucleotide; AGG chr11 5276872 5276891 5276875 -
aattaattgtttcatcagtc

SEQ ID NO: 42795 - DNA, 20 bp, Artificial Sequence
  Synthetic oligonucleotide; AAG chr11 5276866 5276885 5276869 -
ttgtttcatcagtcaggtaa

SEQ ID NO: 42796 - DNA, 20 bp, Artificial Sequence
  Synthetic oligonucleotide; AAG chr11 5276861 5276880 5276864 -
tcatcagtcaggtaaaagta

SEQ ID NO: 42797 - DNA, 20 bp, Artificial Sequence
  Synthetic oligonucleotide; AAG chr11 5276846 5276865 5276849 -
aagtaaagaaaaactgtgcc

SEQ ID NO: 42798 - DNA, 20 bp, Artificial Sequence
  Synthetic oligonucleotide; AGG chr11 5276845 5276864 5276848 -
agtaaagaaaaactgtgcca

SEQ ID NO: 42799 - DNA, 20 bp, Artificial Sequence
  Synthetic oligonucleotide; CAG chr11 5276842 5276861 5276845 -
aaagaaaaactgtgccaagg

SEQ ID NO: 42800 - DNA, 20 bp, Artificial Sequence
  Synthetic oligonucleotide; AGG chr11 5276841 5276860 5276844 -
aagaaaaactgtgccaaggc

SEQ ID NO: 42801 - DNA, 20 bp, Artificial Sequence
  Synthetic oligonucleotide; TAG chr11 5276838 5276857 5276841 -
aaaaactgtgccaaggcagg

SEQ ID NO: 42802 - DNA, 20 bp, Artificial Sequence
  Synthetic oligonucleotide; AAG chr11 5276815 5276834 5276818 -
cctaatgcaatatgccacta

SEQ ID NO: 42803 - DNA, 20 bp, Artificial Sequence
  Synthetic oligonucleotide; TAG chr11 5276798 5276817 5276801 -
ctaaagtaaacattatttca

SEQ ID NO: 42804 - DNA, 20 bp, Artificial Sequence
  Synthetic oligonucleotide; AGG chr11 5276797 5276816 5276800 -
taaagtaaacattatttcat

SEQ ID NO: 42805 - DNA, 20 bp, Artificial Sequence
  Synthetic oligonucleotide; CAG chr11 5276791 5276810 5276794 -
aaacattatttcataggtgt

SEQ ID NO: 42806 - DNA, 20 bp, Artificial Sequence
  Synthetic oligonucleotide; TGG chr11 5276785 5276804 5276788 -
tatttcataggtgtcagata

SEQ ID NO: 42807 - DNA, 20 bp, Artificial Sequence
  Synthetic oligonucleotide; TGG chr11 5276764 5276783 5276767 -
ggcttattcatccatcttca

SEQ ID NO: 42808 - DNA, 20 bp, Artificial Sequence
  Synthetic oligonucleotide; GGG chr11 5276763 5276782 5276766 -
gcttattcatccatcttcat

SEQ ID NO: 42809 - DNA, 20 bp, Artificial Sequence
  Synthetic oligonucleotide; AAG chr11 5276760 5276779 5276763 -
tattcatccatcttcatggg

SEQ ID NO: 42810 - DNA, 20 bp, Artificial Sequence
  Synthetic oligonucleotide; AGG chr11 5276759 5276778 5276762 -
attcatccatcttcatggga

SEQ ID NO: 42811 - DNA, 20 bp, Artificial Sequence
  Synthetic oligonucleotide; TGG chr11 5276755 5276774 5276758 -
atccatcttcatgggaagga

SEQ ID NO: 42812 - DNA, 20 bp, Artificial Sequence
  Synthetic oligonucleotide; TGG chr11 5276749 5276768 5276752 -
cttcatgggaaggatggcct

SEQ ID NO: 42813 - DNA, 20 bp, Artificial Sequence
  Synthetic oligonucleotide; TGG chr11 5276744 5276763 5276747 -
tgggaaggatggccttggcc

SEQ ID NO: 42814 - DNA, 20 bp, Artificial Sequence
  Synthetic oligonucleotide; CAG chr11 5276737 5276756 5276740 -
gatggccttggcctggacat

SEQ ID NO: 42815 - DNA, 20 bp, Artificial Sequence
  Synthetic oligonucleotide; GAG chr11 5276726 5276745 5276729 -
cctggacatcagtgttatgt

SEQ ID NO: 42816 - DNA, 20 bp, Artificial Sequence
  Synthetic oligonucleotide; AGG chr11 5276725 5276744 5276728 -
ctggacatcagtgttatgtg

SEQ ID NO: 42817 - DNA, 20 bp, Artificial Sequence
  Synthetic oligonucleotide; TAG chr11 5276709 5276728 5276712 -
tgtgaggttcaaaacacctc

SEQ ID NO: 42818 - DNA, 20 bp, Artificial Sequence
  Synthetic oligonucleotide; AGG chr11 5276708 5276727 5276711 -
gtgaggttcaaaacacctct

SEQ ID NO: 42819 - DNA, 20 bp, Artificial Sequence
  Synthetic oligonucleotide; AAG chr11 5276701 5276720 5276704 -
tcaaaacacctctaggctat

SEQ ID NO: 42820 - DNA, 20 bp, Artificial Sequence
  Synthetic oligonucleotide; AGG chr11 5276700 5276719 5276703 -
caaaacacctctaggctata

SEQ ID NO: 42821 - DNA, 20 bp, Artificial Sequence
  Synthetic oligonucleotide; CAG chr11 5276694 5276713 5276697 -
acctctaggctataaggcaa

SEQ ID NO: 42822 - DNA, 20 bp, Artificial Sequence
  Synthetic oligonucleotide; GAG chr11 5276692 5276711 5276695 -
ctctaggctataaggcaaca

SEQ ID NO: 42823 - DNA, 20 bp, Artificial Sequence
  Synthetic oligonucleotide; TGG chr11 5276662 5276681 5276665 -
tttttttttctgtgctttcc

SEQ ID NO: 42824 - DNA, 20 bp, Artificial Sequence
  Synthetic oligonucleotide; AAG chr11 5276639 5276658 5276642 -
ctgtccaaatctctaatgat

SEQ ID NO: 42825 - DNA, 20 bp, Artificial Sequence
  Synthetic oligonucleotide; GAG chr11 5276620 5276639 5276623 -
taagcatacttctattcaat

SEQ ID NO: 42826 - DNA, 20 bp, Artificial Sequence
  Synthetic oligonucleotide; AAG chr11 5276607 5276626 5276610 -
attcaatgagaatattctgt

SEQ ID NO: 42827 - DNA, 20 bp, Artificial Sequence
  Synthetic oligonucleotide; TAG chr11 5276600 5276619 5276603 -
gagaatattctgtaagatta

SEQ ID NO: 42828 - DNA, 20 bp, Artificial Sequence
  Synthetic oligonucleotide; AAG chr11 5276595 5276614 5276598 -
tattctgtaagattatagtt

SEQ ID NO: 42829 - DNA, 20 bp, Artificial Sequence
  Synthetic oligonucleotide; TGG chr11 5276587 5276606 5276590 -
aagattatagttaagaattg

SEQ ID NO: 42830 - DNA, 20 bp, Artificial Sequence
  Synthetic oligonucleotide; GGG chr11 5276586 5276605 5276589 -
agattatagttaagaattgt

SEQ ID NO: 42831 - DNA, 20 bp, Artificial Sequence
  Synthetic oligonucleotide; GAG chr11 5276584 5276603 5276587 -
attatagttaagaattgtgg

SEQ ID NO: 42832 - DNA, 20 bp, Artificial Sequence
  Synthetic oligonucleotide; TAG chr11 5276566 5276585 5276569 -
gggagccattccgtctctta

SEQ ID NO: 42833 - DNA, 20 bp, Artificial Sequence
  Synthetic oligonucleotide; GAG chr11 5276555 5276574 5276558 -
cgtctcttatagttaaattt

SEQ ID NO: 42834 - DNA, 20 bp, Artificial Sequence
  Synthetic oligonucleotide; AAG chr11 5276517 5276536 5276520 -
ctgtttttttaatatgcttt

SEQ ID NO: 42835 - DNA, 20 bp, Artificial Sequence
  Synthetic oligonucleotide; TGG chr11 5276511 5276530 5276514 -
ttttaatatgctttaagttc

SEQ ID NO: 42836 - DNA, 20 bp, Artificial Sequence
  Synthetic oligonucleotide; GGG chr11 5276510 5276529 5276513 -
tttaatatgctttaagttct

SEQ ID NO: 42837 - DNA, 20 bp, Artificial Sequence
  Synthetic oligonucleotide; GGG chr11 5276509 5276528 5276512 -
ttaatatgctttaagttctg

SEQ ID NO: 42838 - DNA, 20 bp, Artificial Sequence
  Synthetic oligonucleotide; TGG chr11 5276495 5276514 5276498 -
gttctggggtacatgtgcca

SEQ ID NO: 42839 - DNA, 20 bp, Artificial Sequence
  Synthetic oligonucleotide; TGG chr11 5276492 5276511 5276495 -
ctggggtacatgtgccatgg

SEQ ID NO: 42840 - DNA, 20 bp, Artificial Sequence
  Synthetic oligonucleotide; TAG chr11 5276458 5276477 5276461 -
catcaacccgtcatctacat

SEQ ID NO: 42841 - DNA, 20 bp, Artificial Sequence
  Synthetic oligonucleotide; AGG chr11 5276457 5276476 5276460 -
atcaacccgtcatctacatt

SEQ ID NO: 42842 - DNA, 20 bp, Artificial Sequence
  Synthetic oligonucleotide; TAG chr11 5276428 5276447 5276431 -
tcctaatgctatccttcccc

SEQ ID NO: 42843 - DNA, 20 bp, Artificial Sequence
  Synthetic oligonucleotide; CAG chr11 5276411 5276430 5276414 -
ccctagccccccacccccaa

SEQ ID NO: 42844 - DNA, 20 bp, Artificial Sequence
  Synthetic oligonucleotide; AGG chr11 5276410 5276429 5276413 -
cctagccccccacccccaac

SEQ ID NO: 42845 - DNA, 20 bp, Artificial Sequence
  Synthetic oligonucleotide; CAG chr11 5276404 5276423 5276407 -
cccccacccccaacaggccc

SEQ ID NO: 42846 - DNA, 20 bp, Artificial Sequence
  Synthetic oligonucleotide; TGG chr11 5276374 5276393 5276377 -
tgttcccctccctgtgtcca

SEQ ID NO: 42847 - DNA, 20 bp, Artificial Sequence
  Synthetic oligonucleotide; TGG chr11 5276366 5276385 5276369 -
tccctgtgtccatggatcac

SEQ ID NO: 42848 - DNA, 20 bp, Artificial Sequence
  Synthetic oligonucleotide; AAG chr11 5276336 5276355 5276339 -
ttgtttttttttttttttta

SEQ ID NO: 42849 - DNA, 20 bp, Artificial Sequence
  Synthetic oligonucleotide; CAG chr11 5276330 5276349 5276333 -
tttttttttttttaaagtct

SEQ ID NO: 42850 - DNA, 20 bp, Artificial Sequence
  Synthetic oligonucleotide; TGG chr11 5276318 5276337 5276321 -
taaagtctcagttaaatttt

SEQ ID NO: 42851 - DNA, 20 bp, Artificial Sequence
  Synthetic oligonucleotide; TGG chr11 5276298 5276317 5276301 -
tggaatgtaatttattttcc

SEQ ID NO: 42852 - DNA, 20 bp, Artificial Sequence
  Synthetic oligonucleotide; TAG chr11 5276290 5276309 5276293 -
aatttattttcctggtatcc

SEQ ID NO: 42853 - DNA, 20 bp, Artificial Sequence
  Synthetic oligonucleotide; AGG chr11 5276289 5276308 5276292 -
atttattttcctggtatcct

SEQ ID NO: 42854 - DNA, 20 bp, Artificial Sequence
  Synthetic oligonucleotide; AAG chr11 5276280 5276299 5276283 -
cctggtatcctaggacttgc

SEQ ID NO: 42855 - DNA, 20 bp, Artificial Sequence
  Synthetic oligonucleotide; TGG chr11 5276272 5276291 5276275 -
cctaggacttgcaagttatc

SEQ ID NO: 42856 - DNA, 20 bp, Artificial Sequence
  Synthetic oligonucleotide; TAG chr11 5276263 5276282 5276266 -
tgcaagttatctggtcactt

SEQ ID NO: 42857 - DNA, 20 bp, Artificial Sequence
  Synthetic oligonucleotide; CGG chr11 5276145 5276164 5276148 -
aacacacataacatatttat

SEQ ID NO: 42858 - DNA, 20 bp, Artificial Sequence
  Synthetic oligonucleotide; GGG chr11 5276144 5276163 5276147 -
acacacataacatatttatc

SEQ ID NO: 42859 - DNA, 20 bp, Artificial Sequence
  Synthetic oligonucleotide; GAG chr11 5276134 5276153 5276137 -
catatttatcgggcatttct

SEQ ID NO: 42860 - DNA, 20 bp, Artificial Sequence
  Synthetic oligonucleotide; CAG chr11 5276119 5276138 5276122 -
tttctgagcaactaatcatg

SEQ ID NO: 42861 - DNA, 20 bp, Artificial Sequence
  Synthetic oligonucleotide; AGG chr11 5276118 5276137 5276121 -
ttctgagcaactaatcatgc

SEQ ID NO: 42862 - DNA, 20 bp, Artificial Sequence
  Synthetic oligonucleotide; TAG chr11 5276096 5276115 5276099 -
gactctcaaacactaaccta

SEQ ID NO: 42863 - DNA, 20 bp, Artificial Sequence
  Synthetic oligonucleotide; TAG chr11 5276070 5276089 5276073 -
tttctatgtatctacttgtg

SEQ ID NO: 42864 - DNA, 20 bp, Artificial Sequence
  Synthetic oligonucleotide; AAG chr11 5276062 5276081 5276065 -
tatctacttgtgtagaaacc

SEQ ID NO: 42865 - DNA, 20 bp, Artificial Sequence
  Synthetic oligonucleotide; TGG chr11 5276057 5276076 5276060 -
acttgtgtagaaaccaagcg

SEQ ID NO: 42866 - DNA, 20 bp, Artificial Sequence
  Synthetic oligonucleotide; GGG chr11 5276056 5276075 5276059 -
cttgtgtagaaaccaagcgt

SEQ ID NO: 42867 - DNA, 20 bp, Artificial Sequence
  Synthetic oligonucleotide; GGG chr11 5276055 5276074 5276058 -
ttgtgtagaaaccaagcgtg

SEQ ID NO: 42868 - DNA, 20 bp, Artificial Sequence
  Synthetic oligonucleotide; GAG chr11 5276049 5276068 5276052 -
agaaaccaagcgtggggact

SEQ ID NO: 42869 - DNA, 20 bp, Artificial Sequence
  Synthetic oligonucleotide; AAG chr11 5276046 5276065 5276049 -
aaccaagcgtggggactgag

SEQ ID NO: 42870 - DNA, 20 bp, Artificial Sequence
  Synthetic oligonucleotide; AGG chr11 5276045 5276064 5276048 -
accaagcgtggggactgaga

SEQ ID NO: 42871 - DNA, 20 bp, Artificial Sequence
  Synthetic oligonucleotide; TAG chr11 5276039 5276058 5276042 -
cgtggggactgagaaggcaa

SEQ ID NO: 42872 - DNA, 20 bp, Artificial Sequence
  Synthetic oligonucleotide; CAG chr11 5276036 5276055 5276039 -
ggggactgagaaggcaatag

SEQ ID NO: 42873 - DNA, 20 bp, Artificial Sequence
  Synthetic oligonucleotide; AGG chr11 5276035 5276054 5276038 -
gggactgagaaggcaatagc

SEQ ID NO: 42874 - DNA, 20 bp, Artificial Sequence
  Synthetic oligonucleotide; GAG chr11 5276033 5276052 5276036 -
gactgagaaggcaatagcag

SEQ ID NO: 42875 - DNA, 20 bp, Artificial Sequence
  Synthetic oligonucleotide; TAG chr11 5276009 5276028 5276012 -
attctgactctcactgcctt

SEQ ID NO: 42876 - DNA, 20 bp, Artificial Sequence
  Synthetic oligonucleotide; TAG chr11 5276005 5276024 5276008 -
tgactctcactgcctttagc

SEQ ID NO: 42877 - DNA, 20 bp, Artificial Sequence
  Synthetic oligonucleotide; AGG chr11 5276004 5276023 5276007 -
gactctcactgcctttagct

SEQ ID NO: 42878 - DNA, 20 bp, Artificial Sequence
  Synthetic oligonucleotide; CAG chr11 5275987 5276006 5275990 -
gctaggcccctccctcatca

SEQ ID NO: 42879 - DNA, 20 bp, Artificial Sequence
  Synthetic oligonucleotide; CAG chr11 5275982 5276001 5275985 -
gcccctccctcatcacagct

SEQ ID NO: 42880 - DNA, 20 bp, Artificial Sequence
  Synthetic oligonucleotide; TAG chr11 5275977 5275996 5275980 -
tccctcatcacagctcagca

SEQ ID NO: 42881 - DNA, 20 bp, Artificial Sequence
  Synthetic oligonucleotide; GAG chr11 5275970 5275989 5275973 -
tcacagctcagcatagtcct

SEQ ID NO: 42882 - DNA, 20 bp, Artificial Sequence
  Synthetic oligonucleotide; CAG chr11 5275947 5275966 5275950 -
ctcttatctatatccacaca

SEQ ID NO: 42883 - DNA, 20 bp, Artificial Sequence
  Synthetic oligonucleotide; CAG chr11 5275930 5275949 5275933 -
acacagtttctgacgctgcc

SEQ ID NO: 42884 - DNA, 20 bp, Artificial Sequence
  Synthetic oligonucleotide; AAG chr11 5275914 5275933 5275917 -
tgcccagctatcaccatccc

SEQ ID NO: 42885 - DNA, 20 bp, Artificial Sequence
  Synthetic oligonucleotide; AAG chr11 5275907 5275926 5275910 -
ctatcaccatcccaagtcta

SEQ ID NO: 42886 - DNA, 20 bp, Artificial Sequence
  Synthetic oligonucleotide; TGG chr11 5275894 5275913 5275897 -
aagtctaaagaaaaaaataa

SEQ ID NO: 42887 - DNA, 20 bp, Artificial Sequence
  Synthetic oligonucleotide; GGG chr11 5275893 5275912 5275896 -
agtctaaagaaaaaaataat

SEQ ID NO: 42888 - DNA, 20 bp, Artificial Sequence
  Synthetic oligonucleotide; TAG chr11 5275871 5275890 5275874 -
gtttgcccatctctgttgat

SEQ ID NO: 42889 - DNA, 20 bp, Artificial Sequence
  Synthetic oligonucleotide; AAG chr11 5275848 5275867 5275851 -
aaaacaaaacaaaataaaat

SEQ ID NO: 42890 - DNA, 20 bp, Artificial Sequence
  Synthetic oligonucleotide; AAG chr11 5275840 5275859 5275843 -
acaaaataaaataagcccct

SEQ ID NO: 42891 - DNA, 20 bp, Artificial Sequence
  Synthetic oligonucleotide; CAG chr11 5275833 5275852 5275836 -
aaaataagcccctaagctcc

SEQ ID NO: 42892 - DNA, 20 bp, Artificial Sequence
  Synthetic oligonucleotide; CAG chr11 5275815 5275834 5275818 -
cccagaaaacatgactaaac

SEQ ID NO: 42893 - DNA, 20 bp, Artificial Sequence
  Synthetic oligonucleotide; AAG chr11 5275811 5275830 5275814 -
gaaaacatgactaaaccagc

SEQ ID NO: 42894 - DNA, 20 bp, Artificial Sequence
  Synthetic oligonucleotide; AAG chr11 5275808 5275827 5275811 -
aacatgactaaaccagcaag

SEQ ID NO: 42895 - DNA, 20 bp, Artificial Sequence
  Synthetic oligonucleotide; AAG chr11 5275805 5275824 5275808 -
atgactaaaccagcaagaag

SEQ ID NO: 42896 - DNA, 20 bp, Artificial Sequence
  Synthetic oligonucleotide; TAG chr11 5275793 5275812 5275796 -
gcaagaagaagaaaatacaa

SEQ ID NO: 42897 - DNA, 20 bp, Artificial Sequence
  Synthetic oligonucleotide; AGG chr11 5275792 5275811 5275795 -
caagaagaagaaaatacaat

SEQ ID NO: 42898 - DNA, 20 bp, Artificial Sequence
  Synthetic oligonucleotide; GAG chr11 5275784 5275803 5275787 -
agaaaatacaataggtatat

SEQ ID NO: 42899 - DNA, 20 bp, Artificial Sequence
  Synthetic oligonucleotide; AGG chr11 5275783 5275802 5275786 -
gaaaatacaataggtatatg

SEQ ID NO: 42900 - DNA, 20 bp, Artificial Sequence
  Synthetic oligonucleotide; GAG chr11 5275781 5275800 5275784 -
aaatacaataggtatatgag

SEQ ID NO: 42901 - DNA, 20 bp, Artificial Sequence
  Synthetic oligonucleotide; TGG chr11 5275776 5275795 5275779 -
caataggtatatgaggagac

SEQ ID NO: 42902 - DNA, 20 bp, Artificial Sequence
  Synthetic oligonucleotide; TAG chr11 5275767 5275786 5275770 -
tatgaggagactggtgacac

SEQ ID NO: 42903 - DNA, 20 bp, Artificial Sequence
  Synthetic oligonucleotide; GAG chr11 5275755 5275774 5275758 -
ggtgacactagtgtctgaat

SEQ ID NO: 42904 - DNA, 20 bp, Artificial Sequence
  Synthetic oligonucleotide; AGG chr11 5275754 5275773 5275757 -
gtgacactagtgtctgaatg

SEQ ID NO: 42905 - DNA, 20 bp, Artificial Sequence
  Synthetic oligonucleotide; GAG chr11 5275748 5275767 5275751 -
ctagtgtctgaatgaggctt

SEQ ID NO: 42906 - DNA, 20 bp, Artificial Sequence
  Synthetic oligonucleotide; CAG chr11 5275743 5275762 5275746 -
gtctgaatgaggcttgagta

SEQ ID NO: 42907 - DNA, 20 bp, Artificial Sequence
  Synthetic oligonucleotide; AAG chr11 5275738 5275757 5275741 -
aatgaggcttgagtacagaa

SEQ ID NO: 42908 - DNA, 20 bp, Artificial Sequence
  Synthetic oligonucleotide; GAG chr11 5275736 5275755 5275739 -
tgaggcttgagtacagaaaa

SEQ ID NO: 42909 - DNA, 20 bp, Artificial Sequence
  Synthetic oligonucleotide; AGG chr11 5275735 5275754 5275738 -
gaggcttgagtacagaaaag

SEQ ID NO: 42910 - DNA, 20 bp, Artificial Sequence
  Synthetic oligonucleotide; TAG chr11 5275729 5275748 5275732 -
tgagtacagaaaagaggctc

SEQ ID NO: 42911 - DNA, 20 bp, Artificial Sequence
  Synthetic oligonucleotide; CAG chr11 5275726 5275745 5275729 -
gtacagaaaagaggctctag

SEQ ID NO: 42912 - DNA, 20 bp, Artificial Sequence
  Synthetic oligonucleotide; TAG chr11 5275721 5275740 5275724 -
gaaaagaggctctagcagca

SEQ ID NO: 42913 - DNA, 20 bp, Artificial Sequence
  Synthetic oligonucleotide; TGG chr11 5275718 5275737 5275721 -
aagaggctctagcagcatag

SEQ ID NO: 42914 - DNA, 20 bp, Artificial Sequence
  Synthetic oligonucleotide; TAG chr11 5275713 5275732 5275716 -
gctctagcagcatagtggtt

SEQ ID NO: 42915 - DNA, 20 bp, Artificial Sequence
  Synthetic oligonucleotide; GAG chr11 5275711 5275730 5275714 -
tctagcagcatagtggttta

SEQ ID NO: 42916 - DNA, 20 bp, Artificial Sequence
  Synthetic oligonucleotide; AGG chr11 5275710 5275729 5275713 -
ctagcagcatagtggtttag

SEQ ID NO: 42917 - DNA, 20 bp, Artificial Sequence
  Synthetic oligonucleotide; GAG chr11 5275708 5275727 5275711 -
agcagcatagtggtttagag

SEQ ID NO: 42918 - DNA, 20 bp, Artificial Sequence
  Synthetic oligonucleotide; CAG chr11 5275689 5275708 5275692 -
ggagatgtttctttccttca

SEQ ID NO: 42919 - DNA, 20 bp, Artificial Sequence
  Synthetic oligonucleotide; TAG chr11 5275680 5275699 5275683 -
tctttccttcacagatgcct

SEQ ID NO: 42920 - DNA, 20 bp, Artificial Sequence
  Synthetic oligonucleotide; AAG chr11 5275670 5275689 5275673 -
acagatgccttagcctcaat

SEQ ID NO: 42921 - DNA, 20 bp, Artificial Sequence
  Synthetic oligonucleotide; CGG chr11 5275663 5275682 5275666 -
ccttagcctcaataagcttg

SEQ ID NO: 42922 - DNA, 20 bp, Artificial Sequence
  Synthetic oligonucleotide; TGG chr11 5275657 5275676 5275660 -
cctcaataagcttgcggttg

SEQ ID NO: 42923 - DNA, 20 bp, Artificial Sequence
  Synthetic oligonucleotide; AAG chr11 5275654 5275673 5275657 -
caataagcttgcggttgtgg

SEQ ID NO: 42924 - DNA, 20 bp, Artificial Sequence
  Synthetic oligonucleotide; CAG chr11 5275643 5275662 5275646 -
cggttgtggaagtttacttt

SEQ ID NO: 42925 - DNA, 20 bp, Artificial Sequence
  Synthetic oligonucleotide; TGG chr11 5275628 5275647 5275631 -
actttcagaacaaactcctg

SEQ ID NO: 42926 - DNA, 20 bp, Artificial Sequence
  Synthetic oligonucleotide; GGG chr11 5275627 5275646 5275630 -
ctttcagaacaaactcctgt

SEQ ID NO: 42927 - DNA, 20 bp, Artificial Sequence
  Synthetic oligonucleotide; GGG chr11 5275626 5275645 5275629 -
tttcagaacaaactcctgtg

SEQ ID NO: 42928 - DNA, 20 bp, Artificial Sequence
  Synthetic oligonucleotide; TAG chr11 5275622 5275641 5275625 -
agaacaaactcctgtggggc

SEQ ID NO: 42929 - DNA, 20 bp, Artificial Sequence
  Synthetic oligonucleotide; TGG chr11 5275610 5275629 5275613 -
tgtggggctagaattattga

SEQ ID NO: 42930 - DNA, 20 bp, Artificial Sequence
  Synthetic oligonucleotide; AAG chr11 5275603 5275622 5275606 -
ctagaattattgatggctaa

SEQ ID NO: 42931 - DNA, 20 bp, Artificial Sequence
  Synthetic oligonucleotide; AAG chr11 5275600 5275619 5275603 -
gaattattgatggctaaaag

SEQ ID NO: 42932 - DNA, 20 bp, Artificial Sequence
  Synthetic oligonucleotide; CGG chr11 5275595 5275614 5275598 -
attgatggctaaaagaagcc

SEQ ID NO: 42933 - DNA, 20 bp, Artificial Sequence
  Synthetic oligonucleotide; GGG chr11 5275594 5275613 5275597 -
ttgatggctaaaagaagccc

SEQ ID NO: 42934 - DNA, 20 bp, Artificial Sequence
  Synthetic oligonucleotide; GGG chr11 5275593 5275612 5275596 -
tgatggctaaaagaagcccg

SEQ ID NO: 42935 - DNA, 20 bp, Artificial Sequence
  Synthetic oligonucleotide; GGG chr11 5275592 5275611 5275595 -
gatggctaaaagaagcccgg

SEQ ID NO: 42936 - DNA, 20 bp, Artificial Sequence
  Synthetic oligonucleotide; GAG chr11 5275590 5275609 5275593 -
tggctaaaagaagcccgggg

SEQ ID NO: 42937 - DNA, 20 bp, Artificial Sequence
  Synthetic oligonucleotide; AGG chr11 5275589 5275608 5275592 -
ggctaaaagaagcccggggg

SEQ ID NO: 42938 - DNA, 20 bp, Artificial Sequence
  Synthetic oligonucleotide; GGG chr11 5275588 5275607 5275591 -
gctaaaagaagcccggggga

SEQ ID NO: 42939 - DNA, 20 bp, Artificial Sequence
  Synthetic oligonucleotide; CAG chr11 5275575 5275594 5275578 -
cgggggagggaaaaatcatt

SEQ ID NO: 42940 - DNA, 20 bp, Artificial Sequence
  Synthetic oligonucleotide; TAG chr11 5275560 5275579 5275563 -
tcattcagcatcctcaccct

SEQ ID NO: 42941 - DNA, 20 bp, Artificial Sequence
  Synthetic oligonucleotide; CAG chr11 5275547 5275566 5275550 -
tcacccttagtgacacaaaa

SEQ ID NO: 42942 - DNA, 20 bp, Artificial Sequence
  Synthetic oligonucleotide; GAG chr11 5275545 5275564 5275548 -
acccttagtgacacaaaaca

SEQ ID NO: 42943 - DNA, 20 bp, Artificial Sequence
  Synthetic oligonucleotide; AGG chr11 5275544 5275563 5275547 -
cccttagtgacacaaaacag

SEQ ID NO: 42944 - DNA, 20 bp, Artificial Sequence
  Synthetic oligonucleotide; GGG chr11 5275543 5275562 5275546 -
ccttagtgacacaaaacaga

SEQ ID NO: 42945 - DNA, 20 bp, Artificial Sequence
  Synthetic oligonucleotide; GGG chr11 5275542 5275561 5275545 -
cttagtgacacaaaacagag

SEQ ID NO: 42946 - DNA, 20 bp, Artificial Sequence
  Synthetic oligonucleotide; GGG chr11 5275541 5275560 5275544 -
ttagtgacacaaaacagagg

SEQ ID NO: 42947 - DNA, 20 bp, Artificial Sequence
  Synthetic oligonucleotide; TGG chr11 5275536 5275555 5275539 -
gacacaaaacagagggggcc

SEQ ID NO: 42948 - DNA, 20 bp, Artificial Sequence
  Synthetic oligonucleotide; TGG chr11 5275513 5275532 5275516 -
ttttccatatttcctcatga

SEQ ID NO: 42949 - DNA, 20 bp, Artificial Sequence
  Synthetic oligonucleotide; AAG chr11 5275495 5275514 5275498 -
gatggatgatctcgttaatg

SEQ ID NO: 42950 - DNA, 20 bp, Artificial Sequence
  Synthetic oligonucleotide; AGG chr11 5275494 5275513 5275497 -
atggatgatctcgttaatga

SEQ ID NO: 42951 - DNA, 20 bp, Artificial Sequence
  Synthetic oligonucleotide; TGG chr11 5275491 5275510 5275494 -
gatgatctcgttaatgaagg

SEQ ID NO: 42952 - DNA, 20 bp, Artificial Sequence
  Synthetic oligonucleotide; GAG chr11 5275482 5275501 5275485 -
gttaatgaaggtggtctgac

SEQ ID NO: 42953 - DNA, 20 bp, Artificial Sequence
  Synthetic oligonucleotide; AAG chr11 5275460 5275479 5275463 -
gatcattgcttcttccattt

SEQ ID NO: 42954 - DNA, 20 bp, Artificial Sequence
  Synthetic oligonucleotide; CAG chr11 5275436 5275455 5275439 -
cttgctcacttgccaatcct

SEQ ID NO: 42955 - DNA, 20 bp, Artificial Sequence
  Synthetic oligonucleotide; CAG chr11 5275420 5275439 5275423 -
tcctcagttttaaccttctc

SEQ ID NO: 42956 - DNA, 20 bp, Artificial Sequence
  Synthetic oligonucleotide; GAG chr11 5275418 5275437 5275421 -
ctcagttttaaccttctcca

SEQ ID NO: 42957 - DNA, 20 bp, Artificial Sequence
  Synthetic oligonucleotide; CAG chr11 5275397 5275416 5275400 -
agaaatacacattttttatt

SEQ ID NO: 42958 - DNA, 20 bp, Artificial Sequence
  Synthetic oligonucleotide; AGG chr11 5275396 5275415 5275399 -
gaaatacacattttttattc

SEQ ID NO: 42959 - DNA, 20 bp, Artificial Sequence
  Synthetic oligonucleotide; TAG chr11 5275378 5275397 5275381 -
tcaggaaacatactatgtta

SEQ ID NO: 42960 - DNA, 20 bp, Artificial Sequence
  Synthetic oligonucleotide; AAG chr11 5275356 5275375 5275359 -
gtttcaatactaaataatca

SEQ ID NO: 42961 - DNA, 20 bp, Artificial Sequence
  Synthetic oligonucleotide; AAG chr11 5275348 5275367 5275351 -
actaaataatcaaagtactg

SEQ ID NO: 42962 - DNA, 20 bp, Artificial Sequence
  Synthetic oligonucleotide; TAG chr11 5275344 5275363 5275347 -
aataatcaaagtactgaaga

SEQ ID NO: 42963 - DNA, 20 bp, Artificial Sequence
  Synthetic oligonucleotide; TAG chr11 5275335 5275354 5275338 -
agtactgaagatagcatgca

SEQ ID NO: 42964 - DNA, 20 bp, Artificial Sequence
  Synthetic oligonucleotide; AGG chr11 5275334 5275353 5275337 -
gtactgaagatagcatgcat

SEQ ID NO: 42965 - DNA, 20 bp, Artificial Sequence
  Synthetic oligonucleotide; AAG chr11 5275330 5275349 5275333 -
tgaagatagcatgcataggc

SEQ ID NO: 42966 - DNA, 20 bp, Artificial Sequence
  Synthetic oligonucleotide; AAG chr11 5275324 5275343 5275327 -
tagcatgcataggcaagaaa

SEQ ID NO: 42967 - DNA, 20 bp, Artificial Sequence
  Synthetic oligonucleotide; TAG chr11 5275317 5275336 5275320 -
cataggcaagaaaaagtcct

SEQ ID NO: 42968 - DNA, 20 bp, Artificial Sequence
  Synthetic oligonucleotide; CAG chr11 5275295 5275314 5275298 -
gctttatgttgctgttgttt

SEQ ID NO: 42969 - DNA, 20 bp, Artificial Sequence
  Synthetic oligonucleotide; AAG chr11 5275283 5275302 5275286 -
tgttgtttcagaatttaaaa

SEQ ID NO: 42970 - DNA, 20 bp, Artificial Sequence
  Synthetic oligonucleotide; AAG chr11 5275274 5275293 5275277 -
agaatttaaaaaagatcacc

SEQ ID NO: 42971 - DNA, 20 bp, Artificial Sequence
  Synthetic oligonucleotide; AAG chr11 5275269 5275288 5275272 -
ttaaaaaagatcaccaagtc

SEQ ID NO: 42972 - DNA, 20 bp, Artificial Sequence
  Synthetic oligonucleotide; AGG chr11 5275268 5275287 5275271 -
taaaaaagatcaccaagtca

SEQ ID NO: 42973 - DNA, 20 bp, Artificial Sequence
  Synthetic oligonucleotide; CAG chr11 5275259 5275278 5275262 -
tcaccaagtcaaggacttct

SEQ ID NO: 42974 - DNA, 20 bp, Artificial Sequence
  Synthetic oligonucleotide; TAG chr11 5275253 5275272 5275256 -
agtcaaggacttctcagttc

SEQ ID NO: 42975 - DNA, 20 bp, Artificial Sequence
  Synthetic oligonucleotide; TAG chr11 5275247 5275266 5275250 -
ggacttctcagttctagcac

SEQ ID NO: 42976 - DNA, 20 bp, Artificial Sequence
  Synthetic oligonucleotide; GAG chr11 5275245 5275264 5275248 -
acttctcagttctagcacta

SEQ ID NO: 42977 - DNA, 20 bp, Artificial Sequence
  Synthetic oligonucleotide; AGG chr11 5275244 5275263 5275247 -
cttctcagttctagcactag

SEQ ID NO: 42978 - DNA, 20 bp, Artificial Sequence
  Synthetic oligonucleotide; TGG chr11 5275241 5275260 5275244 -
ctcagttctagcactagagg

SEQ ID NO: 42979 - DNA, 20 bp, Artificial Sequence
  Synthetic oligonucleotide; TAG chr11 5275233 5275252 5275236 -
tagcactagaggtggaatct

SEQ ID NO: 42980 - DNA, 20 bp, Artificial Sequence
  Synthetic oligonucleotide; CAG chr11 5275222 5275241 5275225 -
gtggaatcttagcatataat

SEQ ID NO: 42981 - DNA, 20 bp, Artificial Sequence
  Synthetic oligonucleotide; GAG chr11 5275220 5275239 5275223 -
ggaatcttagcatataatca

SEQ ID NO: 42982 - DNA, 20 bp, Artificial Sequence
  Synthetic oligonucleotide; AGG chr11 5275219 5275238 5275222 -
gaatcttagcatataatcag

SEQ ID NO: 42983 - DNA, 20 bp, Artificial Sequence
  Synthetic oligonucleotide; TAG chr11 5275202 5275221 5275205 -
cagaggtttttcaaaatttc

SEQ ID NO: 42984 - DNA, 20 bp, Artificial Sequence
  Synthetic oligonucleotide; AAG chr11 5275195 5275214 5275198 -
ttttcaaaatttctagacat

SEQ ID NO: 42985 - DNA, 20 bp, Artificial Sequence
  Synthetic oligonucleotide; AAG chr11 5275187 5275206 5275190 -
atttctagacataagattca

SEQ ID NO: 42986 - DNA, 20 bp, Artificial Sequence
  Synthetic oligonucleotide; TAG chr11 5275170 5275189 5275173 -
tcaaagccctgcacttaaaa

SEQ ID NO: 42987 - DNA, 20 bp, Artificial Sequence
  Synthetic oligonucleotide; AAG chr11 5275135 5275154 5275138 -
taactctttatataaattga

SEQ ID NO: 42988 - DNA, 20 bp, Artificial Sequence
  Synthetic oligonucleotide; CAG chr11 5275115 5275134 5275118 -
aagcacattctgaactactt

SEQ ID NO: 42989 - DNA, 20 bp, Artificial Sequence
  Synthetic oligonucleotide; GAG chr11 5275113 5275132 5275116 -
gcacattctgaactacttca

SEQ ID NO: 42990 - DNA, 20 bp, Artificial Sequence
  Synthetic oligonucleotide; TAG chr11 5275088 5275107 5275091 -
ttgttttatttctatgttct

SEQ ID NO: 42991 - DNA, 20 bp, Artificial Sequence
  Synthetic oligonucleotide; TAG chr11 5275072 5275091 5275075 -
ttcttagttcataaatacat

SEQ ID NO: 42992 - DNA, 20 bp, Artificial Sequence
  Synthetic oligonucleotide; AGG chr11 5275071 5275090 5275074 -
tcttagttcataaatacatt

SEQ ID NO: 42993 - DNA, 20 bp, Artificial Sequence
  Synthetic oligonucleotide; AAG chr11 5275043 5275062 5275046 -
caatttaattaaaaaaaccc

SEQ ID NO: 42994 - DNA, 20 bp, Artificial Sequence
  Synthetic oligonucleotide; TAG chr11 5275033 5275052 5275036 -
aaaaaaacccaagaatttct

SEQ ID NO: 42995 - DNA, 20 bp, Artificial Sequence
  Synthetic oligonucleotide; AAG chr11 5275007 5275026 5275010 -
tttaatcatgaaaataaatg

SEQ ID NO: 42996 - DNA, 20 bp, Artificial Sequence
  Synthetic oligonucleotide; AGG chr11 5275006 5275025 5275009 -
ttaatcatgaaaataaatga

SEQ ID NO: 42997 - DNA, 20 bp, Artificial Sequence
  Synthetic oligonucleotide; AAG chr11 5274988 5275007 5274991 -
gaaggcatctttacttactc

SEQ ID NO: 42998 - DNA, 20 bp, Artificial Sequence
  Synthetic oligonucleotide; AGG chr11 5274987 5275006 5274990 -
aaggcatctttacttactca

SEQ ID NO: 42999 - DNA, 20 bp, Artificial Sequence
  Synthetic oligonucleotide; AAG chr11 5274978 5274997 5274981 -
ttacttactcaaggtcccaa

SEQ ID NO: 43000 - DNA, 20 bp, Artificial Sequence
  Synthetic oligonucleotide; AGG chr11 5274977 5274996 5274980 -
tacttactcaaggtcccaaa

SEQ ID NO: 43001 - DNA, 20 bp, Artificial Sequence
  Synthetic oligonucleotide; AAG chr11 5274971 5274990 5274974 -
ctcaaggtcccaaaaggtca

SEQ ID NO: 43002 - DNA, 20 bp, Artificial Sequence
  Synthetic oligonucleotide; CAG chr11 5274964 5274983 5274967 -
tcccaaaaggtcaaagaaac

SEQ ID NO: 43003 - DNA, 20 bp, Artificial Sequence
  Synthetic oligonucleotide; AGG chr11 5274963 5274982 5274966 -
cccaaaaggtcaaagaaacc

SEQ ID NO: 43004 - DNA, 20 bp, Artificial Sequence
  Synthetic oligonucleotide; AAG chr11 5274959 5274978 5274962 -
aaaggtcaaagaaaccagga

SEQ ID NO: 43005 - DNA, 20 bp, Artificial Sequence
  Synthetic oligonucleotide; AAG chr11 5274954 5274973 5274957 -
tcaaagaaaccaggaaagta

SEQ ID NO: 43006 - DNA, 20 bp, Artificial Sequence
  Synthetic oligonucleotide; CAG chr11 5274943 5274962 5274946 -
aggaaagtaaagctatattt

SEQ ID NO: 43007 - DNA, 20 bp, Artificial Sequence
  Synthetic oligonucleotide; CGG chr11 5274940 5274959 5274943 -
aaagtaaagctatatttcag

SEQ ID NO: 43008 - DNA, 20 bp, Artificial Sequence
  Synthetic oligonucleotide; TGG chr11 5274933 5274952 5274936 -
agctatatttcagcggaaaa

SEQ ID NO: 43009 - DNA, 20 bp, Artificial Sequence
  Synthetic oligonucleotide; GGG chr11 5274932 5274951 5274935 -
gctatatttcagcggaaaat

SEQ ID NO: 43010 - DNA, 20 bp, Artificial Sequence
  Synthetic oligonucleotide; GAG chr11 5274921 5274940 5274924 -
gcggaaaatgggatatttat

SEQ ID NO: 43011 - DNA, 20 bp, Artificial Sequence
  Synthetic oligonucleotide; AAG chr11 5274912 5274931 5274915 -
gggatatttatgagttttct

SEQ ID NO: 43012 - DNA, 20 bp, Artificial Sequence
  Synthetic oligonucleotide; CAG chr11 5274905 5274924 5274908 -
ttatgagttttctaagttga

SEQ ID NO: 43013 - DNA, 20 bp, Artificial Sequence
  Synthetic oligonucleotide; AAG chr11 5274898 5274917 5274901 -
ttttctaagttgacagactc

SEQ ID NO: 43014 - DNA, 20 bp, Artificial Sequence
  Synthetic oligonucleotide; CAG chr11 5274885 5274904 5274888 -
cagactcaagttttaacctt

SEQ ID NO: 43015 - DNA, 20 bp, Artificial Sequence
  Synthetic oligonucleotide; TAG chr11 5274871 5274890 5274874 -
aaccttcagtgcccatcatg

SEQ ID NO: 43016 - DNA, 20 bp, Artificial Sequence
  Synthetic oligonucleotide; AGG chr11 5274870 5274889 5274873 -
accttcagtgcccatcatgt

SEQ ID NO: 43017 - DNA, 20 bp, Artificial Sequence
  Synthetic oligonucleotide; AAG chr11 5274866 5274885 5274869 -
tcagtgcccatcatgtagga

SEQ ID NO: 43018 - DNA, 20 bp, Artificial Sequence
  Synthetic oligonucleotide; TGG chr11 5274861 5274880 5274864 -
gcccatcatgtaggaaagtg

SEQ ID NO: 43019 - DNA, 20 bp, Artificial Sequence
  Synthetic oligonucleotide; TGG chr11 5274852 5274871 5274855 -
gtaggaaagtgtggcataac

SEQ ID NO: 43020 - DNA, 20 bp, Artificial Sequence
  Synthetic oligonucleotide; TGG chr11 5274842 5274861 5274845 -
gtggcataactggctgattc

SEQ ID NO: 43021 - DNA, 20 bp, Artificial Sequence
  Synthetic oligonucleotide; AAG chr11 5274816 5274835 5274819 -
tctactcctttttcccatta

SEQ ID NO: 43022 - DNA, 20 bp, Artificial Sequence
  Synthetic oligonucleotide; AAG chr11 5274787 5274806 5274790 -
cctgcttaattaacattcac

SEQ ID NO: 43023 - DNA, 20 bp, Artificial Sequence
  Synthetic oligonucleotide; TGG chr11 5274778 5274797 5274781 -
ttaacattcacaagtaactc

SEQ ID NO: 43024 - DNA, 20 bp, Artificial Sequence
  Synthetic oligonucleotide; TAG chr11 5274767 5274786 5274770 -
aagtaactctggttgtactt

SEQ ID NO: 43025 - DNA, 20 bp, Artificial Sequence
  Synthetic oligonucleotide; AGG chr11 5274766 5274785 5274769 -
agtaactctggttgtacttt

SEQ ID NO: 43026 - DNA, 20 bp, Artificial Sequence
  Synthetic oligonucleotide; CAG chr11 5274761 5274780 5274764 -
ctctggttgtactttaggca

SEQ ID NO: 43027 - DNA, 20 bp, Artificial Sequence
  Synthetic oligonucleotide; TGG chr11 5274758 5274777 5274761 -
tggttgtactttaggcacag

SEQ ID NO: 43028 - DNA, 20 bp, Artificial Sequence
  Synthetic oligonucleotide; GAG chr11 5274750 5274769 5274753 -
ctttaggcacagtggctccc

SEQ ID NO: 43029 - DNA, 20 bp, Artificial Sequence
  Synthetic oligonucleotide; AGG chr11 5274749 5274768 5274752 -
tttaggcacagtggctcccg

SEQ ID NO: 43030 - DNA, 20 bp, Artificial Sequence
  Synthetic oligonucleotide; CAG chr11 5274745 5274764 5274748 -
ggcacagtggctcccgaggt

SEQ ID NO: 43031 - DNA, 20 bp, Artificial Sequence
  Synthetic oligonucleotide; TAG chr11 5274734 5274753 5274737 -
tcccgaggtcagtcacacaa

SEQ ID NO: 43032 - DNA, 20 bp, Artificial Sequence
  Synthetic oligonucleotide; AGG chr11 5274733 5274752 5274736 -
cccgaggtcagtcacacaat

SEQ ID NO: 43033 - DNA, 20 bp, Artificial Sequence
  Synthetic oligonucleotide; AAG chr11 5274717 5274736 5274720 -
caataggatgtctgtgctcc

SEQ ID NO: 43034 - DNA, 20 bp, Artificial Sequence
  Synthetic oligonucleotide; CAG chr11 5274710 5274729 5274713 -
atgtctgtgctccaagttgc

SEQ ID NO: 43035 - DNA, 20 bp, Artificial Sequence
  Synthetic oligonucleotide; GAG chr11 5274708 5274727 5274711 -
gtctgtgctccaagttgcca

SEQ ID NO: 43036 - DNA, 20 bp, Artificial Sequence
  Synthetic oligonucleotide; GAG chr11 5274706 5274725 5274709 -
ctgtgctccaagttgccaga

SEQ ID NO: 43037 - DNA, 20 bp, Artificial Sequence
  Synthetic oligonucleotide; GAG chr11 5274704 5274723 5274707 -
gtgctccaagttgccagaga

SEQ ID NO: 43038 - DNA, 20 bp, Artificial Sequence
  Synthetic oligonucleotide; GAG chr11 5274702 5274721 5274705 -
gctccaagttgccagagaga

SEQ ID NO: 43039 - DNA, 20 bp, Artificial Sequence
  Synthetic oligonucleotide; GAG chr11 5274690 5274709 5274693 -
cagagagagagattactctt

SEQ ID NO: 43040 - DNA, 20 bp, Artificial Sequence
  Synthetic oligonucleotide; GAG chr11 5274684 5274703 5274687 -
gagagattactcttgagaat

SEQ ID NO: 43041 - DNA, 20 bp, Artificial Sequence
  Synthetic oligonucleotide; CAG chr11 5274678 5274697 5274681 -
ttactcttgagaatgagcct

SEQ ID NO: 43042 - DNA, 20 bp, Artificial Sequence
  Synthetic oligonucleotide; TGG chr11 5274672 5274691 5274675 -
ttgagaatgagcctcagccc

SEQ ID NO: 43043 - DNA, 20 bp, Artificial Sequence
  Synthetic oligonucleotide; GAG chr11 5274645 5274664 5274648 -
aactcacctgcaaacttcgt

SEQ ID NO: 43044 - DNA, 20 bp, Artificial Sequence
  Synthetic oligonucleotide; GAG chr11 5274643 5274662 5274646 -
ctcacctgcaaacttcgtga

SEQ ID NO: 43045 - DNA, 20 bp, Artificial Sequence
  Synthetic oligonucleotide; GAG chr11 5274638 5274657 5274641 -
ctgcaaacttcgtgagagat

SEQ ID NO: 43046 - DNA, 20 bp, Artificial Sequence
  Synthetic oligonucleotide; AGG chr11 5274637 5274656 5274640 -
tgcaaacttcgtgagagatg

SEQ ID NO: 43047 - DNA, 20 bp, Artificial Sequence
  Synthetic oligonucleotide; CAG chr11 5274634 5274653 5274637 -
aaacttcgtgagagatgagg

SEQ ID NO: 43048 - DNA, 20 bp, Artificial Sequence
  Synthetic oligonucleotide; GAG chr11 5274632 5274651 5274635 -
acttcgtgagagatgaggca

SEQ ID NO: 43049 - DNA, 20 bp, Artificial Sequence
  Synthetic oligonucleotide; AGG chr11 5274631 5274650 5274634 -
cttcgtgagagatgaggcag

SEQ ID NO: 43050 - DNA, 20 bp, Artificial Sequence
  Synthetic oligonucleotide; AAG chr11 5274618 5274637 5274621 -
gaggcagaggtacactacga

SEQ ID NO: 43051 - DNA, 20 bp, Artificial Sequence
  Synthetic oligonucleotide; CAG chr11 5274612 5274631 5274615 -
gaggtacactacgaaagcaa

SEQ ID NO: 43052 - DNA, 20 bp, Artificial Sequence
  Synthetic oligonucleotide; TAG chr11 5274608 5274627 5274611 -
tacactacgaaagcaacagt

SEQ ID NO: 43053 - DNA, 20 bp, Artificial Sequence
  Synthetic oligonucleotide; AAG chr11 5274605 5274624 5274608 -
actacgaaagcaacagttag

SEQ ID NO: 43054 - DNA, 20 bp, Artificial Sequence
  Synthetic oligonucleotide; GAG chr11 5274593 5274612 5274596 -
acagttagaagctaaatgat

SEQ ID NO: 43055 - DNA, 20 bp, Artificial Sequence
  Synthetic oligonucleotide; TGG chr11 5274584 5274603 5274587 -
agctaaatgatgagaacaca

SEQ ID NO: 43056 - DNA, 20 bp, Artificial Sequence
  Synthetic oligonucleotide; TAG chr11 5274576 5274595 5274579 -
gatgagaacacatggactca

SEQ ID NO: 43057 - DNA, 20 bp, Artificial Sequence
  Synthetic oligonucleotide; GAG chr11 5274574 5274593 5274577 -
tgagaacacatggactcata

SEQ ID NO: 43058 - DNA, 20 bp, Artificial Sequence
  Synthetic oligonucleotide; AGG chr11 5274573 5274592 5274576 -
gagaacacatggactcatag

SEQ ID NO: 43059 - DNA, 20 bp, Artificial Sequence
  Synthetic oligonucleotide; GGG chr11 5274572 5274591 5274575 -
agaacacatggactcataga

SEQ ID NO: 43060 - DNA, 20 bp, Artificial Sequence
  Synthetic oligonucleotide; TGG chr11 5274556 5274575 5274559 -
tagagggaaacaacgcatac

SEQ ID NO: 43061 - DNA, 20 bp, Artificial Sequence
  Synthetic oligonucleotide; GGG chr11 5274555 5274574 5274558 -
agagggaaacaacgcatact

SEQ ID NO: 43062 - DNA, 20 bp, Artificial Sequence
  Synthetic oligonucleotide; GGG chr11 5274554 5274573 5274557 -
gagggaaacaacgcatactg

SEQ ID NO: 43063 - DNA, 20 bp, Artificial Sequence
  Synthetic oligonucleotide; CAG chr11 5274546 5274565 5274549 -
caacgcatactggggcctat

SEQ ID NO: 43064 - DNA, 20 bp, Artificial Sequence
  Synthetic oligonucleotide; GAG chr11 5274544 5274563 5274547 -
acgcatactggggcctatca

SEQ ID NO: 43065 - DNA, 20 bp, Artificial Sequence
  Synthetic oligonucleotide; AGG chr11 5274543 5274562 5274546 -
cgcatactggggcctatcag

SEQ ID NO: 43066 - DNA, 20 bp, Artificial Sequence
  Synthetic oligonucleotide; GGG chr11 5274542 5274561 5274545 -
gcatactggggcctatcaga

SEQ ID NO: 43067 - DNA, 20 bp, Artificial Sequence
  Synthetic oligonucleotide; TGG chr11 5274539 5274558 5274542 -
tactggggcctatcagaggg

SEQ ID NO: 43068 - DNA, 20 bp, Artificial Sequence
  Synthetic oligonucleotide; GAG chr11 5274537 5274556 5274540 -
ctggggcctatcagagggtg

SEQ ID NO: 43069 - DNA, 20 bp, Artificial Sequence
  Synthetic oligonucleotide; AGG chr11 5274536 5274555 5274539 -
tggggcctatcagagggtgg

SEQ ID NO: 43070 - DNA, 20 bp, Artificial Sequence
  Synthetic oligonucleotide; GGG chr11 5274535 5274554 5274538 -
ggggcctatcagagggtgga

SEQ ID NO: 43071 - DNA, 20 bp, Artificial Sequence
  Synthetic oligonucleotide; GAG chr11 5274531 5274550 5274534 -
cctatcagagggtggagggt

SEQ ID NO: 43072 - DNA, 20 bp, Artificial Sequence
  Synthetic oligonucleotide; GAG chr11 5274529 5274548 5274532 -
tatcagagggtggagggtga

SEQ ID NO: 43073 - DNA, 20 bp, Artificial Sequence
  Synthetic oligonucleotide; AAG chr11 5274526 5274545 5274529 -
cagagggtggagggtgagag

SEQ ID NO: 43074 - DNA, 20 bp, Artificial Sequence
  Synthetic oligonucleotide; AGG chr11 5274525 5274544 5274528 -
agagggtggagggtgagaga

SEQ ID NO: 43075 - DNA, 20 bp, Artificial Sequence
  Synthetic oligonucleotide; GAG chr11 5274523 5274542 5274526 -
agggtggagggtgagagaag

SEQ ID NO: 43076 - DNA, 20 bp, Artificial Sequence
  Synthetic oligonucleotide; GAG chr11 5274521 5274540 5274524 -
ggtggagggtgagagaagga

SEQ ID NO: 43077 - DNA, 20 bp, Artificial Sequence
  Synthetic oligonucleotide; AGG chr11 5274520 5274539 5274523 -
gtggagggtgagagaaggag

SEQ ID NO: 43078 - DNA, 20 bp, Artificial Sequence
  Synthetic oligonucleotide; CAG chr11 5274515 5274534 5274518 -
gggtgagagaaggagaggat

SEQ ID NO: 43079 - DNA, 20 bp, Artificial Sequence
  Synthetic oligonucleotide; AGG chr11 5274514 5274533 5274517 -
ggtgagagaaggagaggatc

SEQ ID NO: 43080 - DNA, 20 bp, Artificial Sequence
  Synthetic oligonucleotide; TGG chr11 5274499 5274518 5274502 -
ggatcaggaaaaatcactaa

SEQ ID NO: 43081 - DNA, 20 bp, Artificial Sequence
  Synthetic oligonucleotide; AAG chr11 5274491 5274510 5274494 -
aaaaatcactaatggatgct

SEQ ID NO: 43082 - DNA, 20 bp, Artificial Sequence
  Synthetic oligonucleotide; GAG chr11 5274478 5274497 5274481 -
ggatgctaagcgtaatacct

SEQ ID NO: 43083 - DNA, 20 bp, Artificial Sequence
  Synthetic oligonucleotide; GAG chr11 5274471 5274490 5274474 -
aagcgtaatacctgagtgat

SEQ ID NO: 43084 - DNA, 20 bp, Artificial Sequence
  Synthetic oligonucleotide; AAG chr11 5274380 5274399 5274383 -
tacccctgaacttaaaataa

SEQ ID NO: 43085 - DNA, 20 bp, Artificial Sequence
  Synthetic oligonucleotide; AAG chr11 5274369 5274388 5274372 -
ttaaaataaaagttgaaaac

SEQ ID NO: 43086 - DNA, 20 bp, Artificial Sequence
  Synthetic oligonucleotide; AAG chr11 5274365 5274384 5274368 -
aataaaagttgaaaacaaga

SEQ ID NO: 43087 - DNA, 20 bp, Artificial Sequence
  Synthetic oligonucleotide; CAG chr11 5274359 5274378 5274362 -
agttgaaaacaagaaagcaa

SEQ ID NO: 43088 - DNA, 20 bp, Artificial Sequence
  Synthetic oligonucleotide; TGG chr11 5274341 5274360 5274344 -
aacagtttgaacacttgtta

SEQ ID NO: 43089 - DNA, 20 bp, Artificial Sequence
  Synthetic oligonucleotide; TAG chr11 5274310 5274329 5274313 -
ctcattctttacaattacac

SEQ ID NO: 43090 - DNA, 20 bp, Artificial Sequence
  Synthetic oligonucleotide; TAG chr11 5274303 5274322 5274306 -
tttacaattacactagaaaa

SEQ ID NO: 43091 - DNA, 20 bp, Artificial Sequence
  Synthetic oligonucleotide; CAG chr11 5274297 5274316 5274300 -
attacactagaaaatagcca

SEQ ID NO: 43092 - DNA, 20 bp, Artificial Sequence
  Synthetic oligonucleotide; AGG chr11 5274296 5274315 5274299 -
ttacactagaaaatagccac

SEQ ID NO: 43093 - DNA, 20 bp, Artificial Sequence
  Synthetic oligonucleotide; AAG chr11 5274285 5274304 5274288 -
aatagccacaggcttcctgc

SEQ ID NO: 43094 - DNA, 20 bp, Artificial Sequence
  Synthetic oligonucleotide; AGG chr11 5274284 5274303 5274287 -
atagccacaggcttcctgca

SEQ ID NO: 43095 - DNA, 20 bp, Artificial Sequence
  Synthetic oligonucleotide; CAG chr11 5274281 5274300 5274284 -
gccacaggcttcctgcaagg

SEQ ID NO: 43096 - DNA, 20 bp, Artificial Sequence
  Synthetic oligonucleotide; CAG chr11 5274275 5274294 5274278 -
ggcttcctgcaaggcagcca

SEQ ID NO: 43097 - DNA, 20 bp, Artificial Sequence
  Synthetic oligonucleotide; AAG chr11 5274251 5274270 5274254 -
atttatgacttgtgatatcc

SEQ ID NO: 43098 - DNA, 20 bp, Artificial Sequence
  Synthetic oligonucleotide; TGG chr11 5274241 5274260 5274244 -
tgtgatatccaagtcattcc

SEQ ID NO: 43099 - DNA, 20 bp, Artificial Sequence
  Synthetic oligonucleotide; TAG chr11 5274213 5274232 5274216 -
gcaaaatctaacacaaaatc

SEQ ID NO: 43100 - DNA, 20 bp, Artificial Sequence
  Synthetic oligonucleotide; TAG chr11 5274210 5274229 5274213 -
aaatctaacacaaaatctag

SEQ ID NO: 43101 - DNA, 20 bp, Artificial Sequence
  Synthetic oligonucleotide; GAG chr11 5274178 5274197 5274181 -
cttacatctatttttgttct

SEQ ID NO: 43102 - DNA, 20 bp, Artificial Sequence
  Synthetic oligonucleotide; TAG chr11 5274171 5274190 5274174 -
ctatttttgttctgagaata

SEQ ID NO: 43103 - DNA, 20 bp, Artificial Sequence
  Synthetic oligonucleotide; TAG chr11 5274165 5274184 5274168 -
ttgttctgagaatatagatt

SEQ ID NO: 43104 - DNA, 20 bp, Artificial Sequence
  Synthetic oligonucleotide; TGG chr11 5274154 5274173 5274157 -
atatagatttagatacataa

SEQ ID NO: 43105 - DNA, 20 bp, Artificial Sequence
  Synthetic oligonucleotide; AAG chr11 5274151 5274170 5274154 -
tagatttagatacataatgg

SEQ ID NO: 43106 - DNA, 20 bp, Artificial Sequence
  Synthetic oligonucleotide; CAG chr11 5274148 5274167 5274151 -
atttagatacataatggaag

SEQ ID NO: 43107 - DNA, 20 bp, Artificial Sequence
  Synthetic oligonucleotide; TGG chr11 5274131 5274150 5274134 -
aagcagaataatttaaaatc

SEQ ID NO: 43108 - DNA, 20 bp, Artificial Sequence
  Synthetic oligonucleotide; TAG chr11 5274122 5274141 5274125 -
aatttaaaatctggctaatt

SEQ ID NO: 43109 - DNA, 20 bp, Artificial Sequence
  Synthetic oligonucleotide; AAG chr11 5274113 5274132 5274116 -
tctggctaatttagaatcct

SEQ ID NO: 43110 - DNA, 20 bp, Artificial Sequence
  Synthetic oligonucleotide; CAG chr11 5274110 5274129 5274113 -
ggctaatttagaatcctaag

SEQ ID NO: 43111 - DNA, 20 bp, Artificial Sequence
  Synthetic oligonucleotide; CAG chr11 5274095 5274114 5274098 -
ctaagcagctcttttcctat

SEQ ID NO: 43112 - DNA, 20 bp, Artificial Sequence
  Synthetic oligonucleotide; TGG chr11 5274092 5274111 5274095 -
agcagctcttttcctatcag

SEQ ID NO: 43113 - DNA, 20 bp, Artificial Sequence
  Synthetic oligonucleotide; AAG chr11 5274084 5274103 5274087 -
ttttcctatcagtggtttac

SEQ ID NO: 43114 - DNA, 20 bp, Artificial Sequence
  Synthetic oligonucleotide; AAG chr11 5274044 5274063 5274047 -
ctattttaaaaataaaaata

SEQ ID NO: 43115 - DNA, 20 bp, Artificial Sequence
  Synthetic oligonucleotide; AAG chr11 5274040 5274059 5274043 -
tttaaaaataaaaataaagt

SEQ ID NO: 43116 - DNA, 20 bp, Artificial Sequence
  Synthetic oligonucleotide; TGG chr11 5274030 5274049 5274033 -
aaaataaagtaagttatttg

SEQ ID NO: 43117 - DNA, 20 bp, Artificial Sequence
  Synthetic oligonucleotide; AAG chr11 5274025 5274044 5274028 -
aaagtaagttatttgtggta

SEQ ID NO: 43118 - DNA, 20 bp, Artificial Sequence
  Synthetic oligonucleotide; AAG chr11 5274011 5274030 5274014 -
gtggtaaagaatattcatta

SEQ ID NO: 43119 - DNA, 20 bp, Artificial Sequence
  Synthetic oligonucleotide; TAG chr11 5273997 5274016 5274000 -
tcattaaagtatttatttct

SEQ ID NO: 43120 - DNA, 20 bp, Artificial Sequence
  Synthetic oligonucleotide; CAG chr11 5273974 5273993 5273977 -
ataataccatgaaaaacatt

SEQ ID NO: 43121 - DNA, 20 bp, Artificial Sequence
  Synthetic oligonucleotide; AAG chr11 5273969 5273988 5273972 -
accatgaaaaacattcagtg

SEQ ID NO: 43122 - DNA, 20 bp, Artificial Sequence
  Synthetic oligonucleotide; AAG chr11 5273964 5273983 5273967 -
gaaaaacattcagtgaagtg

SEQ ID NO: 43123 - DNA, 20 bp, Artificial Sequence
  Synthetic oligonucleotide; AGG chr11 5273963 5273982 5273966 -
aaaaacattcagtgaagtga

SEQ ID NO: 43124 - DNA, 20 bp, Artificial Sequence
  Synthetic oligonucleotide; GGG chr11 5273962 5273981 5273965 -
aaaacattcagtgaagtgaa

SEQ ID NO: 43125 - DNA, 20 bp, Artificial Sequence
  Synthetic oligonucleotide; AAG chr11 5273944 5273963 5273947 -
aagggcctactttacttaac

SEQ ID NO: 43126 - DNA, 20 bp, Artificial Sequence
  Synthetic oligonucleotide; TAG chr11 5273912 5273931 5273915 -
tatataatttttcatactaa

SEQ ID NO: 43127 - DNA, 20 bp, Artificial Sequence
  Synthetic oligonucleotide; AAG chr11 5273904 5273923 5273907 -
ttttcatactaatagcatct

SEQ ID NO: 43128 - DNA, 20 bp, Artificial Sequence
  Synthetic oligonucleotide; CAG chr11 5273899 5273918 5273902 -
atactaatagcatctaagaa

SEQ ID NO: 43129 - DNA, 20 bp, Artificial Sequence
  Synthetic oligonucleotide; CAG chr11 5273879 5273898 5273882 -
cagtacaatatttgactctt

SEQ ID NO: 43130 - DNA, 20 bp, Artificial Sequence
  Synthetic oligonucleotide; AGG chr11 5273878 5273897 5273881 -
agtacaatatttgactcttc

SEQ ID NO: 43131 - DNA, 20 bp, Artificial Sequence
  Synthetic oligonucleotide; TAG chr11 5273856 5273875 5273859 -
gttaaacatatgtcataaat

SEQ ID NO: 43132 - DNA, 20 bp, Artificial Sequence
  Synthetic oligonucleotide; CAG chr11 5273852 5273871 5273855 -
aacatatgtcataaattagc

SEQ ID NO: 43133 - DNA, 20 bp, Artificial Sequence
  Synthetic oligonucleotide; AAG chr11 5273848 5273867 5273851 -
tatgtcataaattagccaga

SEQ ID NO: 43134 - DNA, 20 bp, Artificial Sequence
  Synthetic oligonucleotide; AAG chr11 5273841 5273860 5273844 -
taaattagccagaaagattt

SEQ ID NO: 43135 - DNA, 20 bp, Artificial Sequence
  Synthetic oligonucleotide; TGG chr11 5273831 5273850 5273834 -
agaaagatttaagaaaatat

SEQ ID NO: 43136 - DNA, 20 bp, Artificial Sequence
  Synthetic oligonucleotide; TAG chr11 5273810 5273829 5273813 -
ggatgtttccttgtttaaat

SEQ ID NO: 43137 - DNA, 20 bp, Artificial Sequence
  Synthetic oligonucleotide; AGG chr11 5273809 5273828 5273812 -
gatgtttccttgtttaaatt

SEQ ID NO: 43138 - DNA, 20 bp, Artificial Sequence
  Synthetic oligonucleotide; CAG chr11 5273799 5273818 5273802 -
tgtttaaattaggcatctta

SEQ ID NO: 43139 - DNA, 20 bp, Artificial Sequence
  Synthetic oligonucleotide; TAG chr11 5273792 5273811 5273795 -
attaggcatcttacagtttt

SEQ ID NO: 43140 - DNA, 20 bp, Artificial Sequence
  Synthetic oligonucleotide; TAG chr11 5273780 5273799 5273783 -
acagtttttagaatcctgca

SEQ ID NO: 43141 - DNA, 20 bp, Artificial Sequence
  Synthetic oligonucleotide; AAG chr11 5273772 5273791 5273775 -
tagaatcctgcatagaactt

SEQ ID NO: 43142 - DNA, 20 bp, Artificial Sequence
  Synthetic oligonucleotide; AAG chr11 5273754 5273773 5273757 -
ttaagaaattacaaatgcta

SEQ ID NO: 43143 - DNA, 20 bp, Artificial Sequence
  Synthetic oligonucleotide; CAG chr11 5273741 5273760 5273744 -
aatgctaaagcaaacccaaa

SEQ ID NO: 43144 - DNA, 20 bp, Artificial Sequence
  Synthetic oligonucleotide; AGG chr11 5273740 5273759 5273743 -
atgctaaagcaaacccaaac

SEQ ID NO: 43145 - DNA, 20 bp, Artificial Sequence
  Synthetic oligonucleotide; CAG chr11 5273737 5273756 5273740 -
ctaaagcaaacccaaacagg

SEQ ID NO: 43146 - DNA, 20 bp, Artificial Sequence
  Synthetic oligonucleotide; AGG chr11 5273736 5273755 5273739 -
taaagcaaacccaaacaggc

SEQ ID NO: 43147 - DNA, 20 bp, Artificial Sequence
  Synthetic oligonucleotide; TGG chr11 5273714 5273733 5273717 -
gaattaatcttcatcgaatt

SEQ ID NO: 43148 - DNA, 20 bp, Artificial Sequence
  Synthetic oligonucleotide; GGG chr11 5273713 5273732 5273716 -
aattaatcttcatcgaattt

SEQ ID NO: 43149 - DNA, 20 bp, Artificial Sequence
  Synthetic oligonucleotide; AAG chr11 5273697 5273716 5273700 -
atttgggtgtttctttctaa

SEQ ID NO: 43150 - DNA, 20 bp, Artificial Sequence
  Synthetic oligonucleotide; AAG chr11 5273673 5273692 5273676 -
cctttatacttaaatgtctt

SEQ ID NO: 43151 - DNA, 20 bp, Artificial Sequence
  Synthetic oligonucleotide; TAG chr11 5273663 5273682 5273666 -
taaatgtcttaagacataca

SEQ ID NO: 43152 - DNA, 20 bp, Artificial Sequence
  Synthetic oligonucleotide; TAG chr11 5273634 5273653 5273637 -
ttttactaattttaattata

SEQ ID NO: 43153 - DNA, 20 bp, Artificial Sequence
  Synthetic oligonucleotide; TGG chr11 5273570 5273589 5273573 -
ctaatctttctgatctatcc

SEQ ID NO: 43154 - DNA, 20 bp, Artificial Sequence
  Synthetic oligonucleotide; TGG chr11 5273566 5273585 5273569 -
tctttctgatctatcctgga

SEQ ID NO: 43155 - DNA, 20 bp, Artificial Sequence
  Synthetic oligonucleotide; TGG chr11 5273538 5273557 5273541 -
acacttatctctctgaactt

SEQ ID NO: 43156 - DNA, 20 bp, Artificial Sequence
  Synthetic oligonucleotide; GGG chr11 5273537 5273556 5273540 -
cacttatctctctgaacttt

SEQ ID NO: 43157 - DNA, 20 bp, Artificial Sequence
  Synthetic oligonucleotide; TAG chr11 5273525 5273544 5273528 -
tgaactttgggcttttaata

SEQ ID NO: 43158 - DNA, 20 bp, Artificial Sequence
  Synthetic oligonucleotide; AGG chr11 5273524 5273543 5273527 -
gaactttgggcttttaatat

SEQ ID NO: 43159 - DNA, 20 bp, Artificial Sequence
  Synthetic oligonucleotide; AAG chr11 5273520 5273539 5273523 -
tttgggcttttaatatagga

SEQ ID NO: 43160 - DNA, 20 bp, Artificial Sequence
  Synthetic oligonucleotide; AAG chr11 5273515 5273534 5273518 -
gcttttaatataggaaagaa

SEQ ID NO: 43161 - DNA, 20 bp, Artificial Sequence
  Synthetic oligonucleotide; TGG chr11 5273495 5273514 5273498 -
aagcaataatccatttttca

SEQ ID NO: 43162 - DNA, 20 bp, Artificial Sequence
  Synthetic oligonucleotide; GAG chr11 5273456 5273475 5273459 -
caaataaaatgcttaaaaat

SEQ ID NO: 43163 - DNA, 20 bp, Artificial Sequence
  Synthetic oligonucleotide; CAG chr11 5273453 5273472 5273456 -
ataaaatgcttaaaaatgag

SEQ ID NO: 43164 - DNA, 20 bp, Artificial Sequence
  Synthetic oligonucleotide; AGG chr11 5273452 5273471 5273455 -
taaaatgcttaaaaatgagc

SEQ ID NO: 43165 - DNA, 20 bp, Artificial Sequence
  Synthetic oligonucleotide; AAG chr11 5273447 5273466 5273450 -
tgcttaaaaatgagcaggtg

SEQ ID NO: 43166 - DNA, 20 bp, Artificial Sequence
  Synthetic oligonucleotide; AAG chr11 5273425 5273444 5273428 -
gcaatttatcttgaaccaac

SEQ ID NO: 43167 - DNA, 20 bp, Artificial Sequence
  Synthetic oligonucleotide; AAG chr11 5273417 5273436 5273420 -
tcttgaaccaacaagcatcg

SEQ ID NO: 43168 - DNA, 20 bp, Artificial Sequence
  Synthetic oligonucleotide; GAG chr11 5273407 5273426 5273410 -
acaagcatcgaagcaataat

SEQ ID NO: 43169 - DNA, 20 bp, Artificial Sequence
  Synthetic oligonucleotide; CAG chr11 5273396 5273415 5273399 -
agcaataatgagactgcccg

SEQ ID NO: 43170 - DNA, 20 bp, Artificial Sequence
  Synthetic oligonucleotide; GAG chr11 5273379 5273398 5273382 -
ccgcagcctacctgacttct

SEQ ID NO: 43171 - DNA, 20 bp, Artificial Sequence
  Synthetic oligonucleotide; CAG chr11 5273375 5273394 5273378 -
agcctacctgacttctgagt

SEQ ID NO: 43172 - DNA, 20 bp, Artificial Sequence
  Synthetic oligonucleotide; AGG chr11 5273374 5273393 5273377 -
gcctacctgacttctgagtc

SEQ ID NO: 43173 - DNA, 20 bp, Artificial Sequence
  Synthetic oligonucleotide; AAG chr11 5273365 5273384 5273368 -
acttctgagtcaggatttat

SEQ ID NO: 43174 - DNA, 20 bp, Artificial Sequence
  Synthetic oligonucleotide; GAG chr11 5273352 5273371 5273355 -
gatttataagccttgttact

SEQ ID NO: 43175 - DNA, 20 bp, Artificial Sequence
  Synthetic oligonucleotide; TGG chr11 5273340 5273359 5273343 -
ttgttactgagacacaaacc

SEQ ID NO: 43176 - DNA, 20 bp, Artificial Sequence
  Synthetic oligonucleotide; GGG chr11 5273339 5273358 5273342 -
tgttactgagacacaaacct

SEQ ID NO: 43177 - DNA, 20 bp, Artificial Sequence
  Synthetic oligonucleotide; AAG chr11 5273311 5273330 5273314 -
caatgctataacctttcttg

SEQ ID NO: 43178 - DNA, 20 bp, Artificial Sequence
  Synthetic oligonucleotide; TAG chr11 5273291 5273310 5273294 -
aagctcctccctaccacctt

SEQ ID NO: 43179 - DNA, 20 bp, Artificial Sequence
  Synthetic oligonucleotide; AAG chr11 5273284 5273303 5273287 -
tccctaccacctttagccat

SEQ ID NO: 43180 - DNA, 20 bp, Artificial Sequence
  Synthetic oligonucleotide; AGG chr11 5273283 5273302 5273286 -
ccctaccacctttagccata

SEQ ID NO: 43181 - DNA, 20 bp, Artificial Sequence
  Synthetic oligonucleotide; TGG chr11 5273275 5273294 5273278 -
cctttagccataaggaaaca

SEQ ID NO: 43182 - DNA, 20 bp, Artificial Sequence
  Synthetic oligonucleotide; TGG chr11 5273270 5273289 5273273 -
agccataaggaaacatggaa

SEQ ID NO: 43183 - DNA, 20 bp, Artificial Sequence
  Synthetic oligonucleotide; GGG chr11 5273269 5273288 5273272 -
gccataaggaaacatggaat

SEQ ID NO: 43184 - DNA, 20 bp, Artificial Sequence
  Synthetic oligonucleotide; CAG chr11 5273265 5273284 5273268 -
taaggaaacatggaatgggt

SEQ ID NO: 43185 - DNA, 20 bp, Artificial Sequence
  Synthetic oligonucleotide; TGG chr11 5273257 5273276 5273260 -
catggaatgggtcagatccc

SEQ ID NO: 43186 - DNA, 20 bp, Artificial Sequence
  Synthetic oligonucleotide; AAG chr11 5273250 5273269 5273253 -
tgggtcagatccctggatgc

SEQ ID NO: 43187 - DNA, 20 bp, Artificial Sequence
  Synthetic oligonucleotide; CAG chr11 5273246 5273265 5273249 -
tcagatccctggatgcaagc

SEQ ID NO: 43188 - DNA, 20 bp, Artificial Sequence
  Synthetic oligonucleotide; AGG chr11 5273245 5273264 5273248 -
cagatccctggatgcaagcc

SEQ ID NO: 43189 - DNA, 20 bp, Artificial Sequence
  Synthetic oligonucleotide; TGG chr11 5273240 5273259 5273243 -
ccctggatgcaagccaggtc

SEQ ID NO: 43190 - DNA, 20 bp, Artificial Sequence
  Synthetic oligonucleotide; TAG chr11 5273232 5273251 5273235 -
gcaagccaggtctggaacca

SEQ ID NO: 43191 - DNA, 20 bp, Artificial Sequence
  Synthetic oligonucleotide; AGG chr11 5273231 5273250 5273234 -
caagccaggtctggaaccat

SEQ ID NO: 43192 - DNA, 20 bp, Artificial Sequence
  Synthetic oligonucleotide; CAG chr11 5273228 5273247 5273231 -
gccaggtctggaaccatagg

SEQ ID NO: 43193 - DNA, 20 bp, Artificial Sequence
  Synthetic oligonucleotide; AAG chr11 5273224 5273243 5273227 -
ggtctggaaccataggcagt

SEQ ID NO: 43194 - DNA, 20 bp, Artificial Sequence
  Synthetic oligonucleotide; AGG chr11 5273223 5273242 5273226 -
gtctggaaccataggcagta

SEQ ID NO: 43195 - DNA, 20 bp, Artificial Sequence
  Synthetic oligonucleotide; GAG chr11 5273221 5273240 5273224 -
ctggaaccataggcagtaag

SEQ ID NO: 43196 - DNA, 20 bp, Artificial Sequence
  Synthetic oligonucleotide; GAG chr11 5273219 5273238 5273222 -
ggaaccataggcagtaagga

SEQ ID NO: 43197 - DNA, 20 bp, Artificial Sequence
  Synthetic oligonucleotide; AAG chr11 5273216 5273235 5273219 -
accataggcagtaaggagag

SEQ ID NO: 43198 - DNA, 20 bp, Artificial Sequence
  Synthetic oligonucleotide; TGG chr11 5273207 5273226 5273210 -
agtaaggagagaagaaaatg

SEQ ID NO: 43199 - DNA, 20 bp, Artificial Sequence
  Synthetic oligonucleotide; GGG chr11 5273206 5273225 5273209 -
gtaaggagagaagaaaatgt

SEQ ID NO: 43200 - DNA, 20 bp, Artificial Sequence
  Synthetic oligonucleotide; TGG chr11 5273194 5273213 5273197 -
gaaaatgtgggctctgcaac

SEQ ID NO: 43201 - DNA, 20 bp, Artificial Sequence
  Synthetic oligonucleotide; GAG chr11 5273187 5273206 5273190 -
tgggctctgcaactggctcc

SEQ ID NO: 43202 - DNA, 20 bp, Artificial Sequence
  Synthetic oligonucleotide; AGG chr11 5273186 5273205 5273189 -
gggctctgcaactggctccg

SEQ ID NO: 43203 - DNA, 20 bp, Artificial Sequence
  Synthetic oligonucleotide; GGG chr11 5273185 5273204 5273188 -
ggctctgcaactggctccga

SEQ ID NO: 43204 - DNA, 20 bp, Artificial Sequence
  Synthetic oligonucleotide; GAG chr11 5273183 5273202 5273186 -
ctctgcaactggctccgagg

SEQ ID NO: 43205 - DNA, 20 bp, Artificial Sequence
  Synthetic oligonucleotide; CAG chr11 5273180 5273199 5273183 -
tgcaactggctccgagggag

SEQ ID NO: 43206 - DNA, 20 bp, Artificial Sequence
  Synthetic oligonucleotide; AGG chr11 5273179 5273198 5273182 -
gcaactggctccgagggagc

SEQ ID NO: 43207 - DNA, 20 bp, Artificial Sequence
  Synthetic oligonucleotide; GAG chr11 5273177 5273196 5273180 -
aactggctccgagggagcag

SEQ ID NO: 43208 - DNA, 20 bp, Artificial Sequence
  Synthetic oligonucleotide; GAG chr11 5273175 5273194 5273178 -
ctggctccgagggagcagga

SEQ ID NO: 43209 - DNA, 20 bp, Artificial Sequence
  Synthetic oligonucleotide; AGG chr11 5273174 5273193 5273177 -
tggctccgagggagcaggag

SEQ ID NO: 43210 - DNA, 20 bp, Artificial Sequence
  Synthetic oligonucleotide; AAG chr11 5273149 5273168 5273152 -
caaccccatactctgaatct

SEQ ID NO: 43211 - DNA, 20 bp, Artificial Sequence
  Synthetic oligonucleotide; GAG chr11 5273147 5273166 5273150 -
accccatactctgaatctaa

SEQ ID NO: 43212 - DNA, 20 bp, Artificial Sequence
  Synthetic oligonucleotide; AAG chr11 5273144 5273163 5273147 -
ccatactctgaatctaagag

SEQ ID NO: 43213 - DNA, 20 bp, Artificial Sequence
  Synthetic oligonucleotide; TGG chr11 5273139 5273158 5273142 -
ctctgaatctaagagaagac

SEQ ID NO: 43214 - DNA, 20 bp, Artificial Sequence
  Synthetic oligonucleotide; TGG chr11 5273121 5273140 5273124 -
actggtgtccatactctgaa

SEQ ID NO: 43215 - DNA, 20 bp, Artificial Sequence
  Synthetic oligonucleotide; GGG chr11 5273120 5273139 5273123 -
ctggtgtccatactctgaat

SEQ ID NO: 43216 - DNA, 20 bp, Artificial Sequence
  Synthetic oligonucleotide; AAG chr11 5273117 5273136 5273120 -
gtgtccatactctgaatggg

SEQ ID NO: 43217 - DNA, 20 bp, Artificial Sequence
  Synthetic oligonucleotide; TGG chr11 5273109 5273128 5273112 -
actctgaatgggaagaatga

SEQ ID NO: 43218 - DNA, 20 bp, Artificial Sequence
  Synthetic oligonucleotide; GGG chr11 5273108 5273127 5273111 -
ctctgaatgggaagaatgat

SEQ ID NO: 43219 - DNA, 20 bp, Artificial Sequence
  Synthetic oligonucleotide; TAG chr11 5273097 5273116 5273100 -
aagaatgatgggattaccca

SEQ ID NO: 43220 - DNA, 20 bp, Artificial Sequence
  Synthetic oligonucleotide; AGG chr11 5273096 5273115 5273099 -
agaatgatgggattacccat

SEQ ID NO: 43221 - DNA, 20 bp, Artificial Sequence
  Synthetic oligonucleotide; GGG chr11 5273095 5273114 5273098 -
gaatgatgggattacccata

SEQ ID NO: 43222 - DNA, 20 bp, Artificial Sequence
  Synthetic oligonucleotide; TAG chr11 5273085 5273104 5273088 -
attacccatagggcttgttt

SEQ ID NO: 43223 - DNA, 20 bp, Artificial Sequence
  Synthetic oligonucleotide; AGG chr11 5273084 5273103 5273087 -
ttacccatagggcttgtttt

SEQ ID NO: 43224 - DNA, 20 bp, Artificial Sequence
  Synthetic oligonucleotide; GGG chr11 5273083 5273102 5273086 -
tacccatagggcttgtttta

SEQ ID NO: 43225 - DNA, 20 bp, Artificial Sequence
  Synthetic oligonucleotide; GAG chr11 5273081 5273100 5273084 -
cccatagggcttgttttagg

SEQ ID NO: 43226 - DNA, 20 bp, Artificial Sequence
  Synthetic oligonucleotide; TGG chr11 5273058 5273077 5273061 -
aaacctgttctccaaactct

SEQ ID NO: 43227 - DNA, 20 bp, Artificial Sequence
  Synthetic oligonucleotide; GAG chr11 5273051 5273070 5273054 -
ttctccaaactcttggcctt

SEQ ID NO: 43228 - DNA, 20 bp, Artificial Sequence
  Synthetic oligonucleotide; TGG chr11 5273043 5273062 5273046 -
actcttggccttgagatacc

SEQ ID NO: 43229 - DNA, 20 bp, Artificial Sequence
  Synthetic oligonucleotide; TGG chr11 5273029 5273048 5273032 -
gatacctggtccttattcct

SEQ ID NO: 43230 - DNA, 20 bp, Artificial Sequence
  Synthetic oligonucleotide; TGG chr11 5273022 5273041 5273025 -
ggtccttattccttggactt

SEQ ID NO: 43231 - DNA, 20 bp, Artificial Sequence
  Synthetic oligonucleotide; AAG chr11 5272998 5273017 5273001 -
aatgtctgaccctcacattc

SEQ ID NO: 43232 - DNA, 20 bp, Artificial Sequence
  Synthetic oligonucleotide; GAG chr11 5272991 5273010 5272994 -
gaccctcacattcaagttct

SEQ ID NO: 43233 - DNA, 20 bp, Artificial Sequence
  Synthetic oligonucleotide; AGG chr11 5272990 5273009 5272993 -
accctcacattcaagttctg

SEQ ID NO: 43234 - DNA, 20 bp, Artificial Sequence
  Synthetic oligonucleotide; AAG chr11 5272987 5273006 5272990 -
ctcacattcaagttctgagg

SEQ ID NO: 43235 - DNA, 20 bp, Artificial Sequence
  Synthetic oligonucleotide; AGG chr11 5272986 5273005 5272989 -
tcacattcaagttctgagga

SEQ ID NO: 43236 - DNA, 20 bp, Artificial Sequence
  Synthetic oligonucleotide; GGG chr11 5272985 5273004 5272988 -
cacattcaagttctgaggaa

SEQ ID NO: 43237 - DNA, 20 bp, Artificial Sequence
  Synthetic oligonucleotide; TGG chr11 5272965 5272984 5272968 -
gggccactgccttcatactg

SEQ ID NO: 43238 - DNA, 20 bp, Artificial Sequence
  Synthetic oligonucleotide; TAG chr11 5272957 5272976 5272960 -
gccttcatactgtggatctg

SEQ ID NO: 43239 - DNA, 20 bp, Artificial Sequence
  Synthetic oligonucleotide; CAG chr11 5272935 5272954 5272938 -
gcaaattccccctgaaaacc

SEQ ID NO: 43240 - DNA, 20 bp, Artificial Sequence
  Synthetic oligonucleotide; GAG chr11 5272933 5272952 5272936 -
aaattccccctgaaaaccca

SEQ ID NO: 43241 - DNA, 20 bp, Artificial Sequence
  Synthetic oligonucleotide; TGG chr11 5272918 5272937 5272921 -
acccagagctgtatcttaat

SEQ ID NO: 43242 - DNA, 20 bp, Artificial Sequence
  Synthetic oligonucleotide; GAG chr11 5272876 5272895 5272879 -
ctcaacgactgttcttctct

SEQ ID NO: 43243 - DNA, 20 bp, Artificial Sequence
  Synthetic oligonucleotide; TAG chr11 5272873 5272892 5272876 -
aacgactgttcttctctgag

SEQ ID NO: 43244 - DNA, 20 bp, Artificial Sequence
  Synthetic oligonucleotide; AAG chr11 5272868 5272887 5272871 -
ctgttcttctctgagtagcc

SEQ ID NO: 43245 - DNA, 20 bp, Artificial Sequence
  Synthetic oligonucleotide; CAG chr11 5272863 5272882 5272866 -
cttctctgagtagccaagct

SEQ ID NO: 43246 - DNA, 20 bp, Artificial Sequence
  Synthetic oligonucleotide; TGG chr11 5272858 5272877 5272861 -
ctgagtagccaagctcagct

SEQ ID NO: 43247 - DNA, 20 bp, Artificial Sequence
  Synthetic oligonucleotide; AAG chr11 5272852 5272871 5272855 -
agccaagctcagcttggttc

SEQ ID NO: 43248 - DNA, 20 bp, Artificial Sequence
  Synthetic oligonucleotide; AAG chr11 5272845 5272864 5272848 -
ctcagcttggttcaagctac

SEQ ID NO: 43249 - DNA, 20 bp, Artificial Sequence
  Synthetic oligonucleotide; CAG chr11 5272842 5272861 5272845 -
agcttggttcaagctacaag

SEQ ID NO: 43250 - DNA, 20 bp, Artificial Sequence
  Synthetic oligonucleotide; GAG chr11 5272837 5272856 5272840 -
ggttcaagctacaagcagct

SEQ ID NO: 43251 - DNA, 20 bp, Artificial Sequence
  Synthetic oligonucleotide; TAG chr11 5272822 5272841 5272825 -
cagctgagctgctttttgtc

SEQ ID NO: 43252 - DNA, 20 bp, Artificial Sequence
  Synthetic oligonucleotide; CAG chr11 5272802 5272821 5272805 -
tagtcattgttcttttattt

SEQ ID NO: 43253 - DNA, 20 bp, Artificial Sequence
  Synthetic oligonucleotide; TGG chr11 5272799 5272818 5272802 -
tcattgttcttttatttcag

SEQ ID NO: 43254 - DNA, 20 bp, Artificial Sequence
  Synthetic oligonucleotide; TAG chr11 5272773 5272792 5272776 -
aaatacgttctttccaaacc

SEQ ID NO: 43255 - DNA, 20 bp, Artificial Sequence
  Synthetic oligonucleotide; AGG chr11 5272772 5272791 5272775 -
aatacgttctttccaaacct

SEQ ID NO: 43256 - DNA, 20 bp, Artificial Sequence
  Synthetic oligonucleotide; TAG chr11 5272757 5272776 5272760 -
aacctaggatcttgtcttcc

SEQ ID NO: 43257 - DNA, 20 bp, Artificial Sequence
  Synthetic oligonucleotide; AGG chr11 5272756 5272775 5272759 -
acctaggatcttgtcttcct

SEQ ID NO: 43258 - DNA, 20 bp, Artificial Sequence
  Synthetic oligonucleotide; CAG chr11 5272738 5272757 5272741 -
ctaggctatatattttgtcc

SEQ ID NO: 43259 - DNA, 20 bp, Artificial Sequence
  Synthetic oligonucleotide; AGG chr11 5272737 5272756 5272740 -
taggctatatattttgtccc

SEQ ID NO: 43260 - DNA, 20 bp, Artificial Sequence
  Synthetic oligonucleotide; AAG chr11 5272734 5272753 5272737 -
gctatatattttgtcccagg

SEQ ID NO: 43261 - DNA, 20 bp, Artificial Sequence
  Synthetic oligonucleotide; TGG chr11 5272723 5272742 5272726 -
tgtcccaggaagtcttaatc

SEQ ID NO: 43262 - DNA, 20 bp, Artificial Sequence
  Synthetic oligonucleotide; GGG chr11 5272722 5272741 5272725 -
gtcccaggaagtcttaatct

SEQ ID NO: 43263 - DNA, 20 bp, Artificial Sequence
  Synthetic oligonucleotide; GGG chr11 5272721 5272740 5272724 -
tcccaggaagtcttaatctg

SEQ ID NO: 43264 - DNA, 20 bp, Artificial Sequence
  Synthetic oligonucleotide; CAG chr11 5272714 5272733 5272717 -
aagtcttaatctggggtcca

SEQ ID NO: 43265 - DNA, 20 bp, Artificial Sequence
  Synthetic oligonucleotide; TAG chr11 5272706 5272725 5272709 -
atctggggtccacagaacac

SEQ ID NO: 43266 - DNA, 20 bp, Artificial Sequence
  Synthetic oligonucleotide; AGG chr11 5272705 5272724 5272708 -
tctggggtccacagaacact

SEQ ID NO: 43267 - DNA, 20 bp, Artificial Sequence
  Synthetic oligonucleotide; GGG chr11 5272704 5272723 5272707 -
ctggggtccacagaacacta

SEQ ID NO: 43268 - DNA, 20 bp, Artificial Sequence
  Synthetic oligonucleotide; GGG chr11 5272703 5272722 5272706 -
tggggtccacagaacactag

SEQ ID NO: 43269 - DNA, 20 bp, Artificial Sequence
  Synthetic oligonucleotide; GGG chr11 5272702 5272721 5272705 -
ggggtccacagaacactagg

SEQ ID NO: 43270 - DNA, 20 bp, Artificial Sequence
  Synthetic oligonucleotide; TGG chr11 5272698 5272717 5272701 -
tccacagaacactagggggc

SEQ ID NO: 43271 - DNA, 20 bp, Artificial Sequence
  Synthetic oligonucleotide; AAG chr11 5272693 5272712 5272696 -
agaacactagggggctggtg

SEQ ID NO: 43272 - DNA, 20 bp, Artificial Sequence
  Synthetic oligonucleotide; TAG chr11 5272686 5272705 5272689 -
tagggggctggtgaagttta

SEQ ID NO: 43273 - DNA, 20 bp, Artificial Sequence
  Synthetic oligonucleotide; TAG chr11 5272644 5272663 5272647 -
acttacatgtaactgaaatt

SEQ ID NO: 43274 - DNA, 20 bp, Artificial Sequence
  Synthetic oligonucleotide; AAG chr11 5272618 5272637 5272621 -
tttcttctactttgaatgca

SEQ ID NO: 43275 - DNA, 20 bp, Artificial Sequence
  Synthetic oligonucleotide; AGG chr11 5272617 5272636 5272620 -
ttcttctactttgaatgcaa

SEQ ID NO: 43276 - DNA, 20 bp, Artificial Sequence
  Synthetic oligonucleotide; TAG chr11 5272608 5272627 5272611 -
tttgaatgcaaaggacaaac

SEQ ID NO: 43277 - DNA, 20 bp, Artificial Sequence
  Synthetic oligonucleotide; CAG chr11 5272594 5272613 5272597 -
acaaactagaatgacatcat

SEQ ID NO: 43278 - DNA, 20 bp, Artificial Sequence
  Synthetic oligonucleotide; TAG chr11 5272580 5272599 5272583 -
catcatcagtacctattgca

SEQ ID NO: 43279 - DNA, 20 bp, Artificial Sequence
  Synthetic oligonucleotide; AAG chr11 5272572 5272591 5272575 -
gtacctattgcatagttata

SEQ ID NO: 43280 - DNA, 20 bp, Artificial Sequence
  Synthetic oligonucleotide; GAG chr11 5272570 5272589 5272573 -
acctattgcatagttataaa

SEQ ID NO: 43281 - DNA, 20 bp, Artificial Sequence
  Synthetic oligonucleotide; CAG chr11 5272561 5272580 5272564 -
atagttataaagagaaacca

SEQ ID NO: 43282 - DNA, 20 bp, Artificial Sequence
  Synthetic oligonucleotide; TAG chr11 5272539 5272558 5272542 -
gatattttcatactacacca

SEQ ID NO: 43283 - DNA, 20 bp, Artificial Sequence
  Synthetic oligonucleotide; AGG chr11 5272538 5272557 5272541 -
atattttcatactacaccat

SEQ ID NO: 43284 - DNA, 20 bp, Artificial Sequence
  Synthetic oligonucleotide; CAG chr11 5272530 5272549 5272533 -
atactacaccataggtattg

SEQ ID NO: 43285 - DNA, 20 bp, Artificial Sequence
  Synthetic oligonucleotide; GAG chr11 5272503 5272522 5272506 -
ttttgtttttgtttttgttt

SEQ ID NO: 43286 - DNA, 20 bp, Artificial Sequence
  Synthetic oligonucleotide; TGG chr11 5272499 5272518 5272502 -
gtttttgtttttgtttgaga

SEQ ID NO: 43287 - DNA, 20 bp, Artificial Sequence
  Synthetic oligonucleotide; GAG chr11 5272497 5272516 5272500 -
ttttgtttttgtttgagatg

SEQ ID NO: 43288 - DNA, 20 bp, Artificial Sequence
  Synthetic oligonucleotide; CAG chr11 5272478 5272497 5272481 -
ggagtttcgctcttattgcc

SEQ ID NO: 43289 - DNA, 20 bp, Artificial Sequence
  Synthetic oligonucleotide; AGG chr11 5272477 5272496 5272480 -
gagtttcgctcttattgccc

SEQ ID NO: 43290 - DNA, 20 bp, Artificial Sequence
  Synthetic oligonucleotide; TGG chr11 5272473 5272492 5272476 -
ttcgctcttattgcccaggc

SEQ ID NO: 43291 - DNA, 20 bp, Artificial Sequence
  Synthetic oligonucleotide; GAG chr11 5272471 5272490 5272474 -
cgctcttattgcccaggctg

SEQ ID NO: 43292 - DNA, 20 bp, Artificial Sequence
  Synthetic oligonucleotide; CAG chr11 5272466 5272485 5272469 -
ttattgcccaggctggagtg

SEQ ID NO: 43293 - DNA, 20 bp, Artificial Sequence
  Synthetic oligonucleotide; TGG chr11 5272463 5272482 5272466 -
ttgcccaggctggagtgcag

SEQ ID NO: 43294 - DNA, 20 bp, Artificial Sequence
  Synthetic oligonucleotide; CGG chr11 5272452 5272471 5272455 -
ggagtgcagtggcatgattt

SEQ ID NO: 43295 - DNA, 20 bp, Artificial Sequence
  Synthetic oligonucleotide; AAG chr11 5272421 5272440 5272424 -
aacctccccttcctgcattc

SEQ ID NO: 43296 - DNA, 20 bp, Artificial Sequence
  Synthetic oligonucleotide; TGG chr11 5272404 5272423 5272407 -
ttcaagcaattctcctgcct

SEQ ID NO: 43297 - DNA, 20 bp, Artificial Sequence
  Synthetic oligonucleotide; GAG chr11 5272395 5272414 5272398 -
ttctcctgccttggcctcct

SEQ ID NO: 43298 - DNA, 20 bp, Artificial Sequence
  Synthetic oligonucleotide; TAG chr11 5272392 5272411 5272395 -
tcctgccttggcctcctgag

SEQ ID NO: 43299 - DNA, 20 bp, Artificial Sequence
  Synthetic oligonucleotide; TGG chr11 5272388 5272407 5272391 -
gccttggcctcctgagtagc

SEQ ID NO: 43300 - DNA, 20 bp, Artificial Sequence
  Synthetic oligonucleotide; GGG chr11 5272387 5272406 5272390 -
ccttggcctcctgagtagct

SEQ ID NO: 43301 - DNA, 20 bp, Artificial Sequence
  Synthetic oligonucleotide; GGG chr11 5272386 5272405 5272389 -
cttggcctcctgagtagctg

SEQ ID NO: 43302 - DNA, 20 bp, Artificial Sequence
  Synthetic oligonucleotide; CAG chr11 5272379 5272398 5272382 -
tcctgagtagctggggatta

SEQ ID NO: 43303 - DNA, 20 bp, Artificial Sequence
  Synthetic oligonucleotide; AGG chr11 5272378 5272397 5272381 -
cctgagtagctggggattac

SEQ ID NO: 43304 - DNA, 20 bp, Artificial Sequence
  Synthetic oligonucleotide; CAG chr11 5272360 5272379 5272363 -
acaggcacctgccaccatgc

SEQ ID NO: 43305 - DNA, 20 bp, Artificial Sequence
  Synthetic oligonucleotide; TAG chr11 5272340 5272359 5272343 -
cagtctaatttttgtatttt

SEQ ID NO: 43306 - DNA, 20 bp, Artificial Sequence
  Synthetic oligonucleotide; TAG chr11 5272337 5272356 5272340 -
tctaatttttgtatttttag

SEQ ID NO: 43307 - DNA, 20 bp, Artificial Sequence
  Synthetic oligonucleotide; GAG chr11 5272335 5272354 5272338 -
taatttttgtatttttagta

SEQ ID NO: 43308 - DNA, 20 bp, Artificial Sequence
  Synthetic oligonucleotide; TGG chr11 5272331 5272350 5272334 -
ttttgtatttttagtagaga

SEQ ID NO: 43309 - DNA, 20 bp, Artificial Sequence
  Synthetic oligonucleotide; GGG chr11 5272330 5272349 5272333 -
tttgtatttttagtagagat

SEQ ID NO: 43310 - DNA, 20 bp, Artificial Sequence
  Synthetic oligonucleotide; GGG chr11 5272329 5272348 5272332 -
ttgtatttttagtagagatg

SEQ ID NO: 43311 - DNA, 20 bp, Artificial Sequence
  Synthetic oligonucleotide; TGG chr11 5272315 5272334 5272318 -
gagatggggtttcgccatgt

SEQ ID NO: 43312 - DNA, 20 bp, Artificial Sequence
  Synthetic oligonucleotide; CAG chr11 5272311 5272330 5272314 -
tggggtttcgccatgttggc

SEQ ID NO: 43313 - DNA, 20 bp, Artificial Sequence
  Synthetic oligonucleotide; AGG chr11 5272310 5272329 5272313 -
ggggtttcgccatgttggcc

SEQ ID NO: 43314 - DNA, 20 bp, Artificial Sequence
  Synthetic oligonucleotide; TGG chr11 5272306 5272325 5272309 -
tttcgccatgttggccaggc

SEQ ID NO: 43315 - DNA, 20 bp, Artificial Sequence
  Synthetic oligonucleotide; CAG chr11 5272286 5272305 5272289 -
tggtcttgaactcctgacct

SEQ ID NO: 43316 - DNA, 20 bp, Artificial Sequence
  Synthetic oligonucleotide; TGG chr11 5272268 5272287 5272271 -
ctcagatgatctgcccgcct

SEQ ID NO: 43317 - DNA, 20 bp, Artificial Sequence
  Synthetic oligonucleotide; AAG chr11 5272258 5272277 5272261 -
ctgcccgccttggcctcctg

SEQ ID NO: 43318 - DNA, 20 bp, Artificial Sequence
  Synthetic oligonucleotide; TGG chr11 5272252 5272271 5272255 -
gccttggcctcctgaagtgc

SEQ ID NO: 43319 - DNA, 20 bp, Artificial Sequence
  Synthetic oligonucleotide; GGG chr11 5272251 5272270 5272254 -
ccttggcctcctgaagtgct

SEQ ID NO: 43320 - DNA, 20 bp, Artificial Sequence
  Synthetic oligonucleotide; TAG chr11 5272244 5272263 5272247 -
ctcctgaagtgctgggatta

SEQ ID NO: 43321 - DNA, 20 bp, Artificial Sequence
  Synthetic oligonucleotide; AGG chr11 5272243 5272262 5272246 -
tcctgaagtgctgggattat

SEQ ID NO: 43322 - DNA, 20 bp, Artificial Sequence
  Synthetic oligonucleotide; GAG chr11 5272237 5272256 5272240 -
agtgctgggattataggtgt

SEQ ID NO: 43323 - DNA, 20 bp, Artificial Sequence
  Synthetic oligonucleotide; TGG chr11 5272224 5272243 5272227 -
taggtgtgagccaccacgcc

SEQ ID NO: 43324 - DNA, 20 bp, Artificial Sequence
  Synthetic oligonucleotide; CAG chr11 5272214 5272233 5272217 -
ccaccacgcctggcccattg

SEQ ID NO: 43325 - DNA, 20 bp, Artificial Sequence
  Synthetic oligonucleotide; TGG chr11 5272177 5272196 5272180 -
catttatctgcatcactact

SEQ ID NO: 43326 - DNA, 20 bp, Artificial Sequence
  Synthetic oligonucleotide; AAG chr11 5272169 5272188 5272172 -
tgcatcactacttggatctt

SEQ ID NO: 43327 - DNA, 20 bp, Artificial Sequence
  Synthetic oligonucleotide; AGG chr11 5272168 5272187 5272171 -
gcatcactacttggatctta

SEQ ID NO: 43328 - DNA, 20 bp, Artificial Sequence
  Synthetic oligonucleotide; TAG chr11 5272165 5272184 5272168 -
tcactacttggatcttaagg

SEQ ID NO: 43329 - DNA, 20 bp, Artificial Sequence
  Synthetic oligonucleotide; TAG chr11 5272159 5272178 5272162 -
cttggatcttaaggtagctg

SEQ ID NO: 43330 - DNA, 20 bp, Artificial Sequence
  Synthetic oligonucleotide; TAG chr11 5272147 5272166 5272150 -
ggtagctgtagacccaatcc

SEQ ID NO: 43331 - DNA, 20 bp, Artificial Sequence
  Synthetic oligonucleotide; AAG chr11 5272128 5272147 5272131 -
ctagatctaatgctttcata

SEQ ID NO: 43332 - DNA, 20 bp, Artificial Sequence
  Synthetic oligonucleotide; AAG chr11 5272125 5272144 5272128 -
gatctaatgctttcataaag

SEQ ID NO: 43333 - DNA, 20 bp, Artificial Sequence
  Synthetic oligonucleotide; CAG chr11 5272065 5272084 5272068 -
gatgtctgataatgatattt

SEQ ID NO: 43334 - DNA, 20 bp, Artificial Sequence
  Synthetic oligonucleotide; TAG chr11 5272050 5272069 5272053 -
tatttcagtgtaattaaact

SEQ ID NO: 43335 - DNA, 20 bp, Artificial Sequence
  Synthetic oligonucleotide; TAG chr11 5272004 5272023 5272007 -
gcaataaaaacatatttttt

SEQ ID NO: 43336 - DNA, 20 bp, Artificial Sequence
  Synthetic oligonucleotide; CAG chr11 5271995 5272014 5271998 -
acatatttttttagcactta

SEQ ID NO: 43337 - DNA, 20 bp, Artificial Sequence
  Synthetic oligonucleotide; TGG chr11 5271982 5272001 5271985 -
gcacttacagtctgccaaac

SEQ ID NO: 43338 - DNA, 20 bp, Artificial Sequence
  Synthetic oligonucleotide; AAG chr11 5271964 5271983 5271967 -
actggcctgtgacacaaaaa

SEQ ID NO: 43339 - DNA, 20 bp, Artificial Sequence
  Synthetic oligonucleotide; TAG chr11 5271959 5271978 5271962 -
cctgtgacacaaaaaaagtt

SEQ ID NO: 43340 - DNA, 20 bp, Artificial Sequence
  Synthetic oligonucleotide; AGG chr11 5271958 5271977 5271961 -
ctgtgacacaaaaaaagttt

SEQ ID NO: 43341 - DNA, 20 bp, Artificial Sequence
  Synthetic oligonucleotide; TGG chr11 5271949 5271968 5271952 -
aaaaaaagtttaggaattcc

SEQ ID NO: 43342 - DNA, 20 bp, Artificial Sequence
  Synthetic oligonucleotide; TAG chr11 5271934 5271953 5271937 -
attcctggttttgtctgtgt

SEQ ID NO: 43343 - DNA, 20 bp, Artificial Sequence
  Synthetic oligonucleotide; TGG chr11 5271927 5271946 5271930 -
gttttgtctgtgttagccaa

SEQ ID NO: 43344 - DNA, 20 bp, Artificial Sequence
  Synthetic oligonucleotide; TAG chr11 5271923 5271942 5271926 -
tgtctgtgttagccaatggt

SEQ ID NO: 43345 - DNA, 20 bp, Artificial Sequence
  Synthetic oligonucleotide; CAG chr11 5271910 5271929 5271913 -
caatggttagaatatatgct

SEQ ID NO: 43346 - DNA, 20 bp, Artificial Sequence
  Synthetic oligonucleotide; AAG chr11 5271906 5271925 5271909 -
ggttagaatatatgctcaga

SEQ ID NO: 43347 - DNA, 20 bp, Artificial Sequence
  Synthetic oligonucleotide; TGG chr11 5271896 5271915 5271899 -
tatgctcagaaagataccat

SEQ ID NO: 43348 - DNA, 20 bp, Artificial Sequence
  Synthetic oligonucleotide; TAG chr11 5271889 5271908 5271892 -
agaaagataccattggttaa

SEQ ID NO: 43349 - DNA, 20 bp, Artificial Sequence
  Synthetic oligonucleotide; AAG chr11 5271882 5271901 5271885 -
taccattggttaatagctaa

SEQ ID NO: 43350 - DNA, 20 bp, Artificial Sequence
  Synthetic oligonucleotide; TGG chr11 5271875 5271894 5271878 -
ggttaatagctaaaagaaaa

SEQ ID NO: 43351 - DNA, 20 bp, Artificial Sequence
  Synthetic oligonucleotide; GAG chr11 5271873 5271892 5271876 -
ttaatagctaaaagaaaatg

SEQ ID NO: 43352 - DNA, 20 bp, Artificial Sequence
  Synthetic oligonucleotide; TAG chr11 5271870 5271889 5271873 -
atagctaaaagaaaatggag

SEQ ID NO: 43353 - DNA, 20 bp, Artificial Sequence
  Synthetic oligonucleotide; CAG chr11 5271862 5271881 5271865 -
aagaaaatggagtagaaatt

SEQ ID NO: 43354 - DNA, 20 bp, Artificial Sequence
  Synthetic oligonucleotide; TGG chr11 5271859 5271878 5271862 -
aaaatggagtagaaattcag

SEQ ID NO: 43355 - DNA, 20 bp, Artificial Sequence
  Synthetic oligonucleotide; TGG chr11 5271854 5271873 5271857 -
ggagtagaaattcagtggcc

SEQ ID NO: 43356 - DNA, 20 bp, Artificial Sequence
  Synthetic oligonucleotide; TGG chr11 5271838 5271857 5271841 -
ggcctggaataataacaatt

SEQ ID NO: 43357 - DNA, 20 bp, Artificial Sequence
  Synthetic oligonucleotide; GGG chr11 5271837 5271856 5271840 -
gcctggaataataacaattt

SEQ ID NO: 43358 - DNA, 20 bp, Artificial Sequence
  Synthetic oligonucleotide; CAG chr11 5271834 5271853 5271837 -
tggaataataacaatttggg

SEQ ID NO: 43359 - DNA, 20 bp, Artificial Sequence
  Synthetic oligonucleotide; AAG chr11 5271826 5271845 5271829 -
taacaatttgggcagtcatt

SEQ ID NO: 43360 - DNA, 20 bp, Artificial Sequence
  Synthetic oligonucleotide; CAG chr11 5271822 5271841 5271825 -
aatttgggcagtcattaagt

SEQ ID NO: 43361 - DNA, 20 bp, Artificial Sequence
  Synthetic oligonucleotide; AGG chr11 5271821 5271840 5271824 -
atttgggcagtcattaagtc

SEQ ID NO: 43362 - DNA, 20 bp, Artificial Sequence
  Synthetic oligonucleotide; AAG chr11 5271816 5271835 5271819 -
ggcagtcattaagtcaggtg

SEQ ID NO: 43363 - DNA, 20 bp, Artificial Sequence
  Synthetic oligonucleotide; TGG chr11 5271808 5271827 5271811 -
ttaagtcaggtgaagacttc

SEQ ID NO: 43364 - DNA, 20 bp, Artificial Sequence
  Synthetic oligonucleotide; TGG chr11 5271800 5271819 5271803 -
ggtgaagacttctggaatca

SEQ ID NO: 43365 - DNA, 20 bp, Artificial Sequence
  Synthetic oligonucleotide; GGG chr11 5271799 5271818 5271802 -
gtgaagacttctggaatcat

SEQ ID NO: 43366 - DNA, 20 bp, Artificial Sequence
  Synthetic oligonucleotide; GAG chr11 5271797 5271816 5271800 -
gaagacttctggaatcatgg

SEQ ID NO: 43367 - DNA, 20 bp, Artificial Sequence
  Synthetic oligonucleotide; AAG chr11 5271792 5271811 5271795 -
cttctggaatcatgggagaa

SEQ ID NO: 43368 - DNA, 20 bp, Artificial Sequence
  Synthetic oligonucleotide; AAG chr11 5271788 5271807 5271791 -
tggaatcatgggagaaaagc

SEQ ID NO: 43369 - DNA, 20 bp, Artificial Sequence
  Synthetic oligonucleotide; AGG chr11 5271787 5271806 5271790 -
ggaatcatgggagaaaagca

SEQ ID NO: 43370 - DNA, 20 bp, Artificial Sequence
  Synthetic oligonucleotide; GGG chr11 5271786 5271805 5271789 -
gaatcatgggagaaaagcaa

SEQ ID NO: 43371 - DNA, 20 bp, Artificial Sequence
  Synthetic oligonucleotide; GAG chr11 5271784 5271803 5271787 -
atcatgggagaaaagcaagg

SEQ ID NO: 43372 - DNA, 20 bp, Artificial Sequence
  Synthetic oligonucleotide; AAG chr11 5271764 5271783 5271767 -
gagacattcttacttgccac

SEQ ID NO: 43373 - DNA, 20 bp, Artificial Sequence
  Synthetic oligonucleotide; AAG chr11 5271727 5271746 5271730 -
tttttttttatcacaaacat

SEQ ID NO: 43374 - DNA, 20 bp, Artificial Sequence
  Synthetic oligonucleotide; AAG chr11 5271706 5271725 5271709 -
agaaaatataataaataaca

SEQ ID NO: 43375 - DNA, 20 bp, Artificial Sequence
  Synthetic oligonucleotide; CAG chr11 5271702 5271721 5271705 -
aatataataaataacaaagt

SEQ ID NO: 43376 - DNA, 20 bp, Artificial Sequence
  Synthetic oligonucleotide; AGG chr11 5271701 5271720 5271704 -
atataataaataacaaagtc

SEQ ID NO: 43377 - DNA, 20 bp, Artificial Sequence
  Synthetic oligonucleotide; TAG chr11 5271695 5271714 5271698 -
taaataacaaagtcaggtta

SEQ ID NO: 43378 - DNA, 20 bp, Artificial Sequence
  Synthetic oligonucleotide; AAG chr11 5271692 5271711 5271695 -
ataacaaagtcaggttatag

SEQ ID NO: 43379 - DNA, 20 bp, Artificial Sequence
  Synthetic oligonucleotide; GAG chr11 5271690 5271709 5271693 -
aacaaagtcaggttatagaa

SEQ ID NO: 43380 - DNA, 20 bp, Artificial Sequence
  Synthetic oligonucleotide; GAG chr11 5271688 5271707 5271691 -
caaagtcaggttatagaaga

SEQ ID NO: 43381 - DNA, 20 bp, Artificial Sequence
  Synthetic oligonucleotide; TAG chr11 5271676 5271695 5271679 -
atagaagagagaaacgctct

SEQ ID NO: 43382 - DNA, 20 bp, Artificial Sequence
  Synthetic oligonucleotide; TGG chr11 5271667 5271686 5271670 -
agaaacgctcttagtaaact

SEQ ID NO: 43383 - DNA, 20 bp, Artificial Sequence
  Synthetic oligonucleotide; TGG chr11 5271660 5271679 5271663 -
ctcttagtaaacttggaata

SEQ ID NO: 43384 - DNA, 20 bp, Artificial Sequence
  Synthetic oligonucleotide; AAG chr11 5271649 5271668 5271652 -
cttggaatatggaatcccca

SEQ ID NO: 43385 - DNA, 20 bp, Artificial Sequence
  Synthetic oligonucleotide; AGG chr11 5271648 5271667 5271651 -
ttggaatatggaatccccaa

SEQ ID NO: 43386 - DNA, 20 bp, Artificial Sequence
  Synthetic oligonucleotide; TGG chr11 5271636 5271655 5271639 -
atccccaaaggcacttgact

SEQ ID NO: 43387 - DNA, 20 bp, Artificial Sequence
  Synthetic oligonucleotide; GGG chr11 5271635 5271654 5271638 -
tccccaaaggcacttgactt

SEQ ID NO: 43388 - DNA, 20 bp, Artificial Sequence
  Synthetic oligonucleotide; GAG chr11 5271633 5271652 5271636 -
cccaaaggcacttgacttgg

SEQ ID NO: 43389 - DNA, 20 bp, Artificial Sequence
  Synthetic oligonucleotide; CAG chr11 5271629 5271648 5271632 -
aaggcacttgacttgggaga

SEQ ID NO: 43390 - DNA, 20 bp, Artificial Sequence
  Synthetic oligonucleotide; AGG chr11 5271628 5271647 5271631 -
aggcacttgacttgggagac

SEQ ID NO: 43391 - DNA, 20 bp, Artificial Sequence
  Synthetic oligonucleotide; GAG chr11 5271626 5271645 5271629 -
gcacttgacttgggagacag

SEQ ID NO: 43392 - DNA, 20 bp, Artificial Sequence
  Synthetic oligonucleotide; AAG chr11 5271613 5271632 5271616 -
gagacaggagccatactgct

SEQ ID NO: 43393 - DNA, 20 bp, Artificial Sequence
  Synthetic oligonucleotide; AAG chr11 5271605 5271624 5271608 -
agccatactgctaagtgaaa

SEQ ID NO: 43394 - DNA, 20 bp, Artificial Sequence
  Synthetic oligonucleotide; AAG chr11 5271599 5271618 5271602 -
actgctaagtgaaaaagacg

SEQ ID NO: 43395 - DNA, 20 bp, Artificial Sequence
  Synthetic oligonucleotide; TAG chr11 5271590 5271609 5271593 -
tgaaaaagacgaagaacctc

SEQ ID NO: 43396 - DNA, 20 bp, Artificial Sequence
  Synthetic oligonucleotide; AGG chr11 5271589 5271608 5271592 -
gaaaaagacgaagaacctct

SEQ ID NO: 43397 - DNA, 20 bp, Artificial Sequence
  Synthetic oligonucleotide; GGG chr11 5271588 5271607 5271591 -
aaaaagacgaagaacctcta

SEQ ID NO: 43398 - DNA, 20 bp, Artificial Sequence
  Synthetic oligonucleotide; CAG chr11 5271575 5271594 5271578 -
acctctagggcctgaacata

SEQ ID NO: 43399 - DNA, 20 bp, Artificial Sequence
  Synthetic oligonucleotide; AGG chr11 5271574 5271593 5271577 -
cctctagggcctgaacatac

SEQ ID NO: 43400 - DNA, 20 bp, Artificial Sequence
  Synthetic oligonucleotide; TAG chr11 5271565 5271584 5271568 -
cctgaacatacaggaaattg

SEQ ID NO: 43401 - DNA, 20 bp, Artificial Sequence
  Synthetic oligonucleotide; AGG chr11 5271564 5271583 5271567 -
ctgaacatacaggaaattgt

SEQ ID NO: 43402 - DNA, 20 bp, Artificial Sequence
  Synthetic oligonucleotide; CAG chr11 5271559 5271578 5271562 -
catacaggaaattgtaggaa

SEQ ID NO: 43403 - DNA, 20 bp, Artificial Sequence
  Synthetic oligonucleotide; TAG chr11 5271549 5271568 5271552 -
attgtaggaacagaaattcc

SEQ ID NO: 43404 - DNA, 20 bp, Artificial Sequence
  Synthetic oligonucleotide; TGG chr11 5271543 5271562 5271546 -
ggaacagaaattcctagatc

SEQ ID NO: 43405 - DNA, 20 bp, Artificial Sequence
  Synthetic oligonucleotide; TGG chr11 5271540 5271559 5271543 -
acagaaattcctagatctgg

SEQ ID NO: 43406 - DNA, 20 bp, Artificial Sequence
  Synthetic oligonucleotide; GGG chr11 5271539 5271558 5271542 -
cagaaattcctagatctggt

SEQ ID NO: 43407 - DNA, 20 bp, Artificial Sequence
  Synthetic oligonucleotide; GGG chr11 5271538 5271557 5271541 -
agaaattcctagatctggtg

SEQ ID NO: 43408 - DNA, 20 bp, Artificial Sequence
  Synthetic oligonucleotide; AAG chr11 5271534 5271553 5271537 -
attcctagatctggtggggc

SEQ ID NO: 43409 - DNA, 20 bp, Artificial Sequence
  Synthetic oligonucleotide; AGG chr11 5271533 5271552 5271536 -
ttcctagatctggtggggca

SEQ ID NO: 43410 - DNA, 20 bp, Artificial Sequence
  Synthetic oligonucleotide; GGG chr11 5271532 5271551 5271535 -
tcctagatctggtggggcaa

SEQ ID NO: 43411 - DNA, 20 bp, Artificial Sequence
  Synthetic oligonucleotide; GGG chr11 5271531 5271550 5271534 -
cctagatctggtggggcaag

SEQ ID NO: 43412 - DNA, 20 bp, Artificial Sequence
  Synthetic oligonucleotide; GAG chr11 5271529 5271548 5271532 -
tagatctggtggggcaaggg

SEQ ID NO: 43413 - DNA, 20 bp, Artificial Sequence
  Synthetic oligonucleotide; TAG chr11 5271523 5271542 5271526 -
tggtggggcaaggggagcca

SEQ ID NO: 43414 - DNA, 20 bp, Artificial Sequence
  Synthetic oligonucleotide; AGG chr11 5271522 5271541 5271525 -
ggtggggcaaggggagccat

SEQ ID NO: 43415 - DNA, 20 bp, Artificial Sequence
  Synthetic oligonucleotide; GAG chr11 5271520 5271539 5271523 -
tggggcaaggggagccatag

SEQ ID NO: 43416 - DNA, 20 bp, Artificial Sequence
  Synthetic oligonucleotide; AAG chr11 5271516 5271535 5271519 -
gcaaggggagccataggaga

SEQ ID NO: 43417 - DNA, 20 bp, Artificial Sequence
  Synthetic oligonucleotide; TGG chr11 5271510 5271529 5271513 -
ggagccataggagaaagaaa

SEQ ID NO: 43418 - DNA, 20 bp, Artificial Sequence
  Synthetic oligonucleotide; TAG chr11 5271507 5271526 5271510 -
gccataggagaaagaaatgg

SEQ ID NO: 43419 - DNA, 20 bp, Artificial Sequence
  Synthetic oligonucleotide; TGG chr11 5271501 5271520 5271504 -
ggagaaagaaatggtagaaa

SEQ ID NO: 43420 - DNA, 20 bp, Artificial Sequence
  Synthetic oligonucleotide; TGG chr11 5271497 5271516 5271500 -
aaagaaatggtagaaatgga

SEQ ID NO: 43421 - DNA, 20 bp, Artificial Sequence
  Synthetic oligonucleotide; GAG chr11 5271495 5271514 5271498 -
agaaatggtagaaatggatg

SEQ ID NO: 43422 - DNA, 20 bp, Artificial Sequence
  Synthetic oligonucleotide; CGG chr11 5271491 5271510 5271494 -
atggtagaaatggatggaga

SEQ ID NO: 43423 - DNA, 20 bp, Artificial Sequence
  Synthetic oligonucleotide; GAG chr11 5271489 5271508 5271492 -
ggtagaaatggatggagacg

SEQ ID NO: 43424 - DNA, 20 bp, Artificial Sequence
  Synthetic oligonucleotide; AGG chr11 5271488 5271507 5271491 -
gtagaaatggatggagacgg

SEQ ID NO: 43425 - DNA, 20 bp, Artificial Sequence
  Synthetic oligonucleotide; CAG chr11 5271485 5271504 5271488 -
gaaatggatggagacggagg

SEQ ID NO: 43426 - DNA, 20 bp, Artificial Sequence
  Synthetic oligonucleotide; GAG chr11 5271483 5271502 5271486 -
aatggatggagacggaggca

SEQ ID NO: 43427 - DNA, 20 bp, Artificial Sequence
  Synthetic oligonucleotide; AGG chr11 5271482 5271501 5271485 -
atggatggagacggaggcag

SEQ ID NO: 43428 - DNA, 20 bp, Artificial Sequence
  Synthetic oligonucleotide; TGG chr11 5271479 5271498 5271482 -
gatggagacggaggcagagg

SEQ ID NO: 43429 - DNA, 20 bp, Artificial Sequence
  Synthetic oligonucleotide; GGG chr11 5271478 5271497 5271481 -
atggagacggaggcagaggt

SEQ ID NO: 43430 - DNA, 20 bp, Artificial Sequence
  Synthetic oligonucleotide; CAG chr11 5271475 5271494 5271478 -
gagacggaggcagaggtggg

SEQ ID NO: 43431 - DNA, 20 bp, Artificial Sequence
  Synthetic oligonucleotide; GAG chr11 5271467 5271486 5271470 -
ggcagaggtgggcagatcat

SEQ ID NO: 43432 - DNA, 20 bp, Artificial Sequence
  Synthetic oligonucleotide; AGG chr11 5271466 5271485 5271469 -
gcagaggtgggcagatcatg

SEQ ID NO: 43433 - DNA, 20 bp, Artificial Sequence
  Synthetic oligonucleotide; AAG chr11 5271461 5271480 5271464 -
ggtgggcagatcatgaggtc

SEQ ID NO: 43434 - DNA, 20 bp, Artificial Sequence
  Synthetic oligonucleotide; GAG chr11 5271459 5271478 5271462 -
tgggcagatcatgaggtcaa

SEQ ID NO: 43435 - DNA, 20 bp, Artificial Sequence
  Synthetic oligonucleotide; GAG chr11 5271453 5271472 5271456 -
gatcatgaggtcaagagatc

SEQ ID NO: 43436 - DNA, 20 bp, Artificial Sequence
  Synthetic oligonucleotide; TGG chr11 5271443 5271462 5271446 -
tcaagagatcgagaccatcc

SEQ ID NO: 43437 - DNA, 20 bp, Artificial Sequence
  Synthetic oligonucleotide; TGG chr11 5271434 5271453 5271437 -
cgagaccatcctggcaaaca

SEQ ID NO: 43438 - DNA, 20 bp, Artificial Sequence
  Synthetic oligonucleotide; TAG chr11 5271399 5271418 5271402 -
tctactaaaaataaaaaaat

SEQ ID NO: 43439 - DNA, 20 bp, Artificial Sequence
  Synthetic oligonucleotide; TGG chr11 5271395 5271414 5271398 -
ctaaaaataaaaaaattagc

SEQ ID NO: 43440 - DNA, 20 bp, Artificial Sequence
  Synthetic oligonucleotide; GGG chr11 5271394 5271413 5271397 -
taaaaataaaaaaattagct

SEQ ID NO: 43441 - DNA, 20 bp, Artificial Sequence
  Synthetic oligonucleotide; TGG chr11 5271389 5271408 5271392 -
ataaaaaaattagctgggca

SEQ ID NO: 43442 - DNA, 20 bp, Artificial Sequence
  Synthetic oligonucleotide; TGG chr11 5271386 5271405 5271389 -
aaaaaattagctgggcatgg

SEQ ID NO: 43443 - DNA, 20 bp, Artificial Sequence
  Synthetic oligonucleotide; TAG chr11 5271373 5271392 5271376 -
ggcatggtggcatgcgcctg

SEQ ID NO: 43444 - DNA, 20 bp, Artificial Sequence
  Synthetic oligonucleotide; CAG chr11 5271367 5271386 5271370 -
gtggcatgcgcctgtagtcc

SEQ ID NO: 43445 - DNA, 20 bp, Artificial Sequence
  Synthetic oligonucleotide; CGG chr11 5271359 5271378 5271362 -
cgcctgtagtcccagctgct

SEQ ID NO: 43446 - DNA, 20 bp, Artificial Sequence
  Synthetic oligonucleotide; GGG chr11 5271358 5271377 5271361 -
gcctgtagtcccagctgctc

SEQ ID NO: 43447 - DNA, 20 bp, Artificial Sequence
  Synthetic oligonucleotide; GAG chr11 5271356 5271375 5271359 -
ctgtagtcccagctgctcgg

SEQ ID NO: 43448 - DNA, 20 bp, Artificial Sequence
  Synthetic oligonucleotide; AGG chr11 5271355 5271374 5271358 -
tgtagtcccagctgctcggg

SEQ ID NO: 43449 - DNA, 20 bp, Artificial Sequence
  Synthetic oligonucleotide; GAG chr11 5271350 5271369 5271353 -
tcccagctgctcgggaggct

SEQ ID NO: 43450 - DNA, 20 bp, Artificial Sequence
  Synthetic oligonucleotide; AGG chr11 5271349 5271368 5271352 -
cccagctgctcgggaggctg

SEQ ID NO: 43451 - DNA, 20 bp, Artificial Sequence
  Synthetic oligonucleotide; CAG chr11 5271346 5271365 5271349 -
agctgctcgggaggctgagg

SEQ ID NO: 43452 - DNA, 20 bp, Artificial Sequence
  Synthetic oligonucleotide; AGG chr11 5271345 5271364 5271348 -
gctgctcgggaggctgaggc

SEQ ID NO: 43453 - DNA, 20 bp, Artificial Sequence
  Synthetic oligonucleotide; GAG chr11 5271343 5271362 5271346 -
tgctcgggaggctgaggcag

SEQ ID NO: 43454 - DNA, 20 bp, Artificial Sequence
  Synthetic oligonucleotide; CAG chr11 5271327 5271346 5271330 -
gcaggagaatcgtttgaacc

SEQ ID NO: 43455 - DNA, 20 bp, Artificial Sequence
  Synthetic oligonucleotide; AGG chr11 5271326 5271345 5271329 -
caggagaatcgtttgaaccc

SEQ ID NO: 43456 - DNA, 20 bp, Artificial Sequence
  Synthetic oligonucleotide; GAG chr11 5271324 5271343 5271327 -
ggagaatcgtttgaacccag

SEQ ID NO: 43457 - DNA, 20 bp, Artificial Sequence
  Synthetic oligonucleotide; AGG chr11 5271323 5271342 5271326 -
gagaatcgtttgaacccagg

SEQ ID NO: 43458 - DNA, 20 bp, Artificial Sequence
  Synthetic oligonucleotide; AAG chr11 5271318 5271337 5271321 -
tcgtttgaacccaggaggcg

SEQ ID NO: 43459 - DNA, 20 bp, Artificial Sequence
  Synthetic oligonucleotide; AGG chr11 5271317 5271336 5271320 -
cgtttgaacccaggaggcga

SEQ ID NO: 43460 - DNA, 20 bp, Artificial Sequence
  Synthetic oligonucleotide; CAG chr11 5271311 5271330 5271314 -
aacccaggaggcgaaggttg

SEQ ID NO: 43461 - DNA, 20 bp, Artificial Sequence
  Synthetic oligonucleotide; GAG chr11 5271307 5271326 5271310 -
caggaggcgaaggttgcagt

SEQ ID NO: 43462 - DNA, 20 bp, Artificial Sequence
  Synthetic oligonucleotide; GAG chr11 5271302 5271321 5271305 -
ggcgaaggttgcagtgagct

SEQ ID NO: 43463 - DNA, 20 bp, Artificial Sequence
  Synthetic oligonucleotide; TAG chr11 5271298 5271317 5271301 -
aaggttgcagtgagctgaga

SEQ ID NO: 43464 - DNA, 20 bp, Artificial Sequence
  Synthetic oligonucleotide; CAG chr11 5271282 5271301 5271285 -
gagatagtgccattgcactc

SEQ ID NO: 43465 - DNA, 20 bp, Artificial Sequence
  Synthetic oligonucleotide; TGG chr11 5271277 5271296 5271280 -
agtgccattgcactccagtc

SEQ ID NO: 43466 - DNA, 20 bp, Artificial Sequence
  Synthetic oligonucleotide; CAG chr11 5271271 5271290 5271274 -
attgcactccagtctggcaa

SEQ ID NO: 43467 - DNA, 20 bp, Artificial Sequence
  Synthetic oligonucleotide; GAG chr11 5271269 5271288 5271272 -
tgcactccagtctggcaaca

SEQ ID NO: 43468 - DNA, 20 bp, Artificial Sequence
  Synthetic oligonucleotide; GAG chr11 5271265 5271284 5271268 -
ctccagtctggcaacagagt

SEQ ID NO: 43469 - DNA, 20 bp, Artificial Sequence
  Synthetic oligonucleotide; AAG chr11 5271238 5271257 5271241 -
cgtctcaaaaaaaaaaaaaa

SEQ ID NO: 43470 - DNA, 20 bp, Artificial Sequence
  Synthetic oligonucleotide; AAG chr11 5271234 5271253 5271237 -
tcaaaaaaaaaaaaaaaaga

SEQ ID NO: 43471 - DNA, 20 bp, Artificial Sequence
  Synthetic oligonucleotide; AAG chr11 5271230 5271249 5271233 -
aaaaaaaaaaaaaagaaaga

SEQ ID NO: 43472 - DNA, 20 bp, Artificial Sequence
  Synthetic oligonucleotide; AAG chr11 5271225 5271244 5271228 -
aaaaaaaaagaaagaaagaa

SEQ ID NO: 43473 - DNA, 20 bp, Artificial Sequence
  Synthetic oligonucleotide; AAG chr11 5271219 5271238 5271222 -
aaagaaagaaagaaaagaaa

SEQ ID NO: 43474 - DNA, 20 bp, Artificial Sequence
  Synthetic oligonucleotide; AAG chr11 5271212 5271231 5271215 -
gaaagaaaagaaaaagaaaa

SEQ ID NO: 43475 - DNA, 20 bp, Artificial Sequence
  Synthetic oligonucleotide; TGG chr11 5271199 5271218 5271202 -
aagaaaaaagaaaaaataaa

SEQ ID NO: 43476 - DNA, 20 bp, Artificial Sequence
  Synthetic oligonucleotide; TAG chr11 5271193 5271212 5271196 -
aaagaaaaaataaatggatg

SEQ ID NO: 43477 - DNA, 20 bp, Artificial Sequence
  Synthetic oligonucleotide; AAG chr11 5271187 5271206 5271190 -
aaaataaatggatgtagaac

SEQ ID NO: 43478 - DNA, 20 bp, Artificial Sequence
  Synthetic oligonucleotide; CAG chr11 5271183 5271202 5271186 -
taaatggatgtagaacaagc

SEQ ID NO: 43479 - DNA, 20 bp, Artificial Sequence
  Synthetic oligonucleotide; AAG chr11 5271180 5271199 5271183 -
atggatgtagaacaagccag

SEQ ID NO: 43480 - DNA, 20 bp, Artificial Sequence
  Synthetic oligonucleotide; AGG chr11 5271179 5271198 5271182 -
tggatgtagaacaagccaga

SEQ ID NO: 43481 - DNA, 20 bp, Artificial Sequence
  Synthetic oligonucleotide; GAG chr11 5271177 5271196 5271180 -
gatgtagaacaagccagaag

SEQ ID NO: 43482 - DNA, 20 bp, Artificial Sequence
  Synthetic oligonucleotide; AGG chr11 5271176 5271195 5271179 -
atgtagaacaagccagaagg

SEQ ID NO: 43483 - DNA, 20 bp, Artificial Sequence
  Synthetic oligonucleotide; TGG chr11 5271170 5271189 5271173 -
aacaagccagaaggaggaac

SEQ ID NO: 43484 - DNA, 20 bp, Artificial Sequence
  Synthetic oligonucleotide; GGG chr11 5271169 5271188 5271172 -
acaagccagaaggaggaact

SEQ ID NO: 43485 - DNA, 20 bp, Artificial Sequence
  Synthetic oligonucleotide; TGG chr11 5271165 5271184 5271168 -
gccagaaggaggaactgggc

SEQ ID NO: 43486 - DNA, 20 bp, Artificial Sequence
  Synthetic oligonucleotide; GGG chr11 5271164 5271183 5271167 -
ccagaaggaggaactgggct

SEQ ID NO: 43487 - DNA, 20 bp, Artificial Sequence
  Synthetic oligonucleotide; GGG chr11 5271163 5271182 5271166 -
cagaaggaggaactgggctg

SEQ ID NO: 43488 - DNA, 20 bp, Artificial Sequence
  Synthetic oligonucleotide; GAG chr11 5271156 5271175 5271159 -
aggaactgggctggggcaat

SEQ ID NO: 43489 - DNA, 20 bp, Artificial Sequence
  Synthetic oligonucleotide; TGG chr11 5271149 5271168 5271152 -
gggctggggcaatgagatta

SEQ ID NO: 43490 - DNA, 20 bp, Artificial Sequence
  Synthetic oligonucleotide; AAG chr11 5271140 5271159 5271143 -
caatgagattatggtgatgt

SEQ ID NO: 43491 - DNA, 20 bp, Artificial Sequence
  Synthetic oligonucleotide; AGG chr11 5271139 5271158 5271142 -
aatgagattatggtgatgta

SEQ ID NO: 43492 - DNA, 20 bp, Artificial Sequence
  Synthetic oligonucleotide; GGG chr11 5271138 5271157 5271141 -
atgagattatggtgatgtaa

SEQ ID NO: 43493 - DNA, 20 bp, Artificial Sequence
  Synthetic oligonucleotide; TAG chr11 5271128 5271147 5271131 -
ggtgatgtaagggactttta

SEQ ID NO: 43494 - DNA, 20 bp, Artificial Sequence
  Synthetic oligonucleotide; TGG chr11 5271113 5271132 5271116 -
ttttatagaattaacaatgc

SEQ ID NO: 43495 - DNA, 20 bp, Artificial Sequence
  Synthetic oligonucleotide; TGG chr11 5271104 5271123 5271107 -
attaacaatgctggaatttg

SEQ ID NO: 43496 - DNA, 20 bp, Artificial Sequence
  Synthetic oligonucleotide; TAG chr11 5271055 5271074 5271058 -
cattacttctgtcacattga

SEQ ID NO: 43497 - DNA, 20 bp, Artificial Sequence
  Synthetic oligonucleotide; GAG chr11 5271011 5271030 5271014 -
attccttgattctaaaatat

SEQ ID NO: 43498 - DNA, 20 bp, Artificial Sequence
  Synthetic oligonucleotide; AGG chr11 5271010 5271029 5271013 -
ttccttgattctaaaatatg

SEQ ID NO: 43499 - DNA, 20 bp, Artificial Sequence
  Synthetic oligonucleotide; TGG chr11 5270997 5271016 5271000 -
aaatatgaggataatgacaa

SEQ ID NO: 43500 - DNA, 20 bp, Artificial Sequence
  Synthetic oligonucleotide; AAG chr11 5270988 5271007 5270991 -
gataatgacaatggtattat

SEQ ID NO: 43501 - DNA, 20 bp, Artificial Sequence
  Synthetic oligonucleotide; AGG chr11 5270987 5271006 5270990 -
ataatgacaatggtattata

SEQ ID NO: 43502 - DNA, 20 bp, Artificial Sequence
  Synthetic oligonucleotide; GGG chr11 5270986 5271005 5270989 -
taatgacaatggtattataa

SEQ ID NO: 43503 - DNA, 20 bp, Artificial Sequence
  Synthetic oligonucleotide; CAG chr11 5270983 5271002 5270986 -
tgacaatggtattataaggg

SEQ ID NO: 43504 - DNA, 20 bp, Artificial Sequence
  Synthetic oligonucleotide; AAG chr11 5270977 5270996 5270980 -
tggtattataagggcagatt

SEQ ID NO: 43505 - DNA, 20 bp, Artificial Sequence
  Synthetic oligonucleotide; TAG chr11 5270969 5270988 5270972 -
taagggcagattaagtgata

SEQ ID NO: 43506 - DNA, 20 bp, Artificial Sequence
  Synthetic oligonucleotide; GAG chr11 5270963 5270982 5270966 -
cagattaagtgatatagcat

SEQ ID NO: 43507 - DNA, 20 bp, Artificial Sequence
  Synthetic oligonucleotide; CAG chr11 5270950 5270969 5270953 -
atagcatgagcaatattctt

SEQ ID NO: 43508 - DNA, 20 bp, Artificial Sequence
  Synthetic oligonucleotide; AGG chr11 5270949 5270968 5270952 -
tagcatgagcaatattcttc

SEQ ID NO: 43509 - DNA, 20 bp, Artificial Sequence
  Synthetic oligonucleotide; TGG chr11 5270942 5270961 5270945 -
agcaatattcttcaggcaca

SEQ ID NO: 43510 - DNA, 20 bp, Artificial Sequence
  Synthetic oligonucleotide; CAG chr11 5270907 5270926 5270910 -
acactgtaaatcccaacttc

SEQ ID NO: 43511 - DNA, 20 bp, Artificial Sequence
  Synthetic oligonucleotide; CAG chr11 5270901 5270920 5270904 -
taaatcccaacttccagttt

SEQ ID NO: 43512 - DNA, 20 bp, Artificial Sequence
  Synthetic oligonucleotide; AAG chr11 5270891 5270910 5270894 -
cttccagtttcagctctacc

SEQ ID NO: 43513 - DNA, 20 bp, Artificial Sequence
  Synthetic oligonucleotide; AAG chr11 5270886 5270905 5270889 -
agtttcagctctaccaagta

SEQ ID NO: 43514 - DNA, 20 bp, Artificial Sequence
  Synthetic oligonucleotide; GAG chr11 5270884 5270903 5270887 -
tttcagctctaccaagtaaa

SEQ ID NO: 43515 - DNA, 20 bp, Artificial Sequence
  Synthetic oligonucleotide; TAG chr11 5270880 5270899 5270883 -
agctctaccaagtaaagagc

SEQ ID NO: 43516 - DNA, 20 bp, Artificial Sequence
  Synthetic oligonucleotide; AAG chr11 5270876 5270895 5270879 -
ctaccaagtaaagagctagc

SEQ ID NO: 43517 - DNA, 20 bp, Artificial Sequence
  Synthetic oligonucleotide; TGG chr11 5270864 5270883 5270867 -
gagctagcaagtcatcaaaa

SEQ ID NO: 43518 - DNA, 20 bp, Artificial Sequence
  Synthetic oligonucleotide; GGG chr11 5270863 5270882 5270866 -
agctagcaagtcatcaaaat

SEQ ID NO: 43519 - DNA, 20 bp, Artificial Sequence
  Synthetic oligonucleotide; GGG chr11 5270862 5270881 5270865 -
gctagcaagtcatcaaaatg

SEQ ID NO: 43520 - DNA, 20 bp, Artificial Sequence
  Synthetic oligonucleotide; CAG chr11 5270854 5270873 5270857 -
gtcatcaaaatggggacata

SEQ ID NO: 43521 - DNA, 20 bp, Artificial Sequence
  Synthetic oligonucleotide; AAG chr11 5270843 5270862 5270846 -
ggggacatacagaaaaaaaa

SEQ ID NO: 43522 - DNA, 20 bp, Artificial Sequence
  Synthetic oligonucleotide; AGG chr11 5270842 5270861 5270845 -
gggacatacagaaaaaaaaa

SEQ ID NO: 43523 - DNA, 20 bp, Artificial Sequence
  Synthetic oligonucleotide; TAG chr11 5270835 5270854 5270838 -
acagaaaaaaaaaaggacac

SEQ ID NO: 43524 - DNA, 20 bp, Artificial Sequence
  Synthetic oligonucleotide; GAG chr11 5270833 5270852 5270836 -
agaaaaaaaaaaggacacta

SEQ ID NO: 43525 - DNA, 20 bp, Artificial Sequence
  Synthetic oligonucleotide; AGG chr11 5270832 5270851 5270835 -
gaaaaaaaaaaggacactag

SEQ ID NO: 43526 - DNA, 20 bp, Artificial Sequence
  Synthetic oligonucleotide; TAG chr11 5270810 5270829 5270813 -
gaataatataccctgactcc

SEQ ID NO: 43527 - DNA, 20 bp, Artificial Sequence
  Synthetic oligonucleotide; TGG chr11 5270759 5270778 5270762 -
ctctgtttgatgacaaattc

SEQ ID NO: 43528 - DNA, 20 bp, Artificial Sequence
  Synthetic oligonucleotide; TAG chr11 5270743 5270762 5270746 -
attctggctttaaataattt

SEQ ID NO: 43529 - DNA, 20 bp, Artificial Sequence
  Synthetic oligonucleotide; AGG chr11 5270742 5270761 5270745 -
ttctggctttaaataatttt

SEQ ID NO: 43530 - DNA, 20 bp, Artificial Sequence
  Synthetic oligonucleotide; TAG chr11 5270735 5270754 5270738 -
tttaaataattttaggattt

SEQ ID NO: 43531 - DNA, 20 bp, Artificial Sequence
  Synthetic oligonucleotide; AGG chr11 5270734 5270753 5270737 -
ttaaataattttaggatttt

SEQ ID NO: 43532 - DNA, 20 bp, Artificial Sequence
  Synthetic oligonucleotide; CAG chr11 5270726 5270745 5270729 -
ttttaggattttaggcttct

SEQ ID NO: 43533 - DNA, 20 bp, Artificial Sequence
  Synthetic oligonucleotide; CAG chr11 5270714 5270733 5270717 -
aggcttctcagctcccttcc

SEQ ID NO: 43534 - DNA, 20 bp, Artificial Sequence
  Synthetic oligonucleotide; GAG chr11 5270710 5270729 5270713 -
ttctcagctcccttcccagt

SEQ ID NO: 43535 - DNA, 20 bp, Artificial Sequence
  Synthetic oligonucleotide; AAG chr11 5270707 5270726 5270710 -
tcagctcccttcccagtgag

SEQ ID NO: 43536 - DNA, 20 bp, Artificial Sequence
  Synthetic oligonucleotide; AAG chr11 5270701 5270720 5270704 -
cccttcccagtgagaagtat

SEQ ID NO: 43537 - DNA, 20 bp, Artificial Sequence
  Synthetic oligonucleotide; CAG chr11 5270698 5270717 5270701 -
ttcccagtgagaagtataag

SEQ ID NO: 43538 - DNA, 20 bp, Artificial Sequence
  Synthetic oligonucleotide; AGG chr11 5270697 5270716 5270700 -
tcccagtgagaagtataagc

SEQ ID NO: 43539 - DNA, 20 bp, Artificial Sequence
  Synthetic oligonucleotide; CAG chr11 5270693 5270712 5270696 -
agtgagaagtataagcagga

SEQ ID NO: 43540 - DNA, 20 bp, Artificial Sequence
  Synthetic oligonucleotide; CAG chr11 5270689 5270708 5270692 -
agaagtataagcaggacaga

SEQ ID NO: 43541 - DNA, 20 bp, Artificial Sequence
  Synthetic oligonucleotide; AGG chr11 5270688 5270707 5270691 -
gaagtataagcaggacagac

SEQ ID NO: 43542 - DNA, 20 bp, Artificial Sequence
  Synthetic oligonucleotide; AAG chr11 5270684 5270703 5270687 -
tataagcaggacagacaggc

SEQ ID NO: 43543 - DNA, 20 bp, Artificial Sequence
  Synthetic oligonucleotide; AAG chr11 5270680 5270699 5270683 -
agcaggacagacaggcaagc

SEQ ID NO: 43544 - DNA, 20 bp, Artificial Sequence
  Synthetic oligonucleotide; AAG chr11 5270677 5270696 5270680 -
aggacagacaggcaagcaag

SEQ ID NO: 43545 - DNA, 20 bp, Artificial Sequence
  Synthetic oligonucleotide; GAG chr11 5270675 5270694 5270678 -
gacagacaggcaagcaagaa

SEQ ID NO: 43546 - DNA, 20 bp, Artificial Sequence
  Synthetic oligonucleotide; GAG chr11 5270673 5270692 5270676 -
cagacaggcaagcaagaaga

SEQ ID NO: 43547 - DNA, 20 bp, Artificial Sequence
  Synthetic oligonucleotide; CAG chr11 5270667 5270686 5270670 -
ggcaagcaagaagagagccc

SEQ ID NO: 43548 - DNA, 20 bp, Artificial Sequence
  Synthetic oligonucleotide; AGG chr11 5270666 5270685 5270669 -
gcaagcaagaagagagcccc

SEQ ID NO: 43549 - DNA, 20 bp, Artificial Sequence
  Synthetic oligonucleotide; AAG chr11 5270652 5270671 5270655 -
agccccaggcaatactcaca

SEQ ID NO: 43550 - DNA, 20 bp, Artificial Sequence
  Synthetic oligonucleotide; TAG chr11 5270649 5270668 5270652 -
cccaggcaatactcacaaag

SEQ ID NO: 43551 - DNA, 20 bp, Artificial Sequence
  Synthetic oligonucleotide; TGG chr11 5270633 5270652 5270636 -
aaagtagccaatgtcccctg

SEQ ID NO: 43552 - DNA, 20 bp, Artificial Sequence
  Synthetic oligonucleotide; TAG chr11 5270627 5270646 5270630 -
gccaatgtcccctgtggtca

SEQ ID NO: 43553 - DNA, 20 bp, Artificial Sequence
  Synthetic oligonucleotide; GAG chr11 5270625 5270644 5270628 -
caatgtcccctgtggtcata

SEQ ID NO: 43554 - DNA, 20 bp, Artificial Sequence
  Synthetic oligonucleotide; AAG chr11 5270615 5270634 5270618 -
tgtggtcatagagaaatgaa

SEQ ID NO: 43555 - DNA, 20 bp, Artificial Sequence
  Synthetic oligonucleotide; GAG chr11 5270613 5270632 5270616 -
tggtcatagagaaatgaaaa

SEQ ID NO: 43556 - DNA, 20 bp, Artificial Sequence
  Synthetic oligonucleotide; GAG chr11 5270611 5270630 5270614 -
gtcatagagaaatgaaaaga

SEQ ID NO: 43557 - DNA, 20 bp, Artificial Sequence
  Synthetic oligonucleotide; GAG chr11 5270609 5270628 5270612 -
catagagaaatgaaaagaga

SEQ ID NO: 43558 - DNA, 20 bp, Artificial Sequence
  Synthetic oligonucleotide; AGG chr11 5270608 5270627 5270611 -
atagagaaatgaaaagagag

SEQ ID NO: 43559 - DNA, 20 bp, Artificial Sequence
  Synthetic oligonucleotide; TGG chr11 5270599 5270618 5270602 -
tgaaaagagagaggattctc

SEQ ID NO: 43560 - DNA, 20 bp, Artificial Sequence
  Synthetic oligonucleotide; AAG chr11 5270596 5270615 5270599 -
aaagagagaggattctctgg

SEQ ID NO: 43561 - DNA, 20 bp, Artificial Sequence
  Synthetic oligonucleotide; TGG chr11 5270590 5270609 5270593 -
agaggattctctggaagcac

SEQ ID NO: 43562 - DNA, 20 bp, Artificial Sequence
  Synthetic oligonucleotide; TAG chr11 5270561 5270580 5270564 -
tcttttctgtctgtcctctc

SEQ ID NO: 43563 - DNA, 20 bp, Artificial Sequence
  Synthetic oligonucleotide; AGG chr11 5270560 5270579 5270563 -
cttttctgtctgtcctctct

SEQ ID NO: 43564 - DNA, 20 bp, Artificial Sequence
  Synthetic oligonucleotide; GGG chr11 5270559 5270578 5270562 -
ttttctgtctgtcctctcta

SEQ ID NO: 43565 - DNA, 20 bp, Artificial Sequence
  Synthetic oligonucleotide; AAG chr11 5270547 5270566 5270550 -
cctctctagggaatcacccc

SEQ ID NO: 43566 - DNA, 20 bp, Artificial Sequence
  Synthetic oligonucleotide; AGG chr11 5270546 5270565 5270549 -
ctctctagggaatcacccca

SEQ ID NO: 43567 - DNA, 20 bp, Artificial Sequence
  Synthetic oligonucleotide; TGG chr11 5270533 5270552 5270536 -
caccccaaggtactgtactt

SEQ ID NO: 43568 - DNA, 20 bp, Artificial Sequence
  Synthetic oligonucleotide; GGG chr11 5270532 5270551 5270535 -
accccaaggtactgtacttt

SEQ ID NO: 43569 - DNA, 20 bp, Artificial Sequence
  Synthetic oligonucleotide; AAG chr11 5270526 5270545 5270529 -
aggtactgtactttgggatt

SEQ ID NO: 43570 - DNA, 20 bp, Artificial Sequence
  Synthetic oligonucleotide; AGG chr11 5270525 5270544 5270528 -
ggtactgtactttgggatta

SEQ ID NO: 43571 - DNA, 20 bp, Artificial Sequence
  Synthetic oligonucleotide; TAG chr11 5270519 5270538 5270522 -
gtactttgggattaaggctt

SEQ ID NO: 43572 - DNA, 20 bp, Artificial Sequence
  Synthetic oligonucleotide; TGG chr11 5270508 5270527 5270511 -
ttaaggctttagtcccactg

SEQ ID NO: 43573 - DNA, 20 bp, Artificial Sequence
  Synthetic oligonucleotide; CAG chr11 5270487 5270506 5270490 -
ggactacttgctattctgtt

SEQ ID NO: 43574 - DNA, 20 bp, Artificial Sequence
  Synthetic oligonucleotide; TAG chr11 5270480 5270499 5270483 -
ttgctattctgttcagtttc

SEQ ID NO: 43575 - DNA, 20 bp, Artificial Sequence
  Synthetic oligonucleotide; AAG chr11 5270477 5270496 5270480 -
ctattctgttcagtttctag

SEQ ID NO: 43576 - DNA, 20 bp, Artificial Sequence
  Synthetic oligonucleotide; AGG chr11 5270476 5270495 5270479 -
tattctgttcagtttctaga

SEQ ID NO: 43577 - DNA, 20 bp, Artificial Sequence
  Synthetic oligonucleotide; CGG chr11 5270464 5270483 5270467 -
tttctagaaggaactatgta

SEQ ID NO: 43578 - DNA, 20 bp, Artificial Sequence
  Synthetic oligonucleotide; TAG chr11 5270449 5270468 5270452 -
atgtacggtttttgtctccc

SEQ ID NO: 43579 - DNA, 20 bp, Artificial Sequence
  Synthetic oligonucleotide; GAG chr11 5270447 5270466 5270450 -
gtacggtttttgtctcccta

SEQ ID NO: 43580 - DNA, 20 bp, Artificial Sequence
  Synthetic oligonucleotide; AAG chr11 5270439 5270458 5270442 -
tttgtctccctagagaaact

SEQ ID NO: 43581 - DNA, 20 bp, Artificial Sequence
  Synthetic oligonucleotide; AGG chr11 5270438 5270457 5270441 -
ttgtctccctagagaaacta

SEQ ID NO: 43582 - DNA, 20 bp, Artificial Sequence
  Synthetic oligonucleotide; CAG chr11 5270433 5270452 5270436 -
tccctagagaaactaaggta

SEQ ID NO: 43583 - DNA, 20 bp, Artificial Sequence
  Synthetic oligonucleotide; AAG chr11 5270430 5270449 5270433 -
ctagagaaactaaggtacag

SEQ ID NO: 43584 - DNA, 20 bp, Artificial Sequence
  Synthetic oligonucleotide; AAG chr11 5270405 5270424 5270408 -
ttgtttacaatgcactcctt

SEQ ID NO: 43585 - DNA, 20 bp, Artificial Sequence
  Synthetic oligonucleotide; GAG chr11 5270403 5270422 5270406 -
gtttacaatgcactccttaa

SEQ ID NO: 43586 - DNA, 20 bp, Artificial Sequence
  Synthetic oligonucleotide; GAG chr11 5270401 5270420 5270404 -
ttacaatgcactccttaaga

SEQ ID NO: 43587 - DNA, 20 bp, Artificial Sequence
  Synthetic oligonucleotide; TAG chr11 5270397 5270416 5270400 -
aatgcactccttaagagagc

SEQ ID NO: 43588 - DNA, 20 bp, Artificial Sequence
  Synthetic oligonucleotide; TGG chr11 5270391 5270410 5270394 -
ctccttaagagagctagaac

SEQ ID NO: 43589 - DNA, 20 bp, Artificial Sequence
  Synthetic oligonucleotide; GGG chr11 5270390 5270409 5270393 -
tccttaagagagctagaact

SEQ ID NO: 43590 - DNA, 20 bp, Artificial Sequence
  Synthetic oligonucleotide; GAG chr11 5270386 5270405 5270389 -
taagagagctagaactgggt

SEQ ID NO: 43591 - DNA, 20 bp, Artificial Sequence
  Synthetic oligonucleotide; CAG chr11 5270371 5270390 5270374 -
tgggtgagattctgttttaa

SEQ ID NO: 43592 - DNA, 20 bp, Artificial Sequence
  Synthetic oligonucleotide; TGG chr11 5270351 5270370 5270354 -
cagctttattttcttttcct

SEQ ID NO: 43593 - DNA, 20 bp, Artificial Sequence
  Synthetic oligonucleotide; AAG chr11 5270320 5270339 5270323 -
ttgtcactgtcaccaccttt

SEQ ID NO: 43594 - DNA, 20 bp, Artificial Sequence
  Synthetic oligonucleotide; AGG chr11 5270319 5270338 5270322 -
tgtcactgtcaccaccttta

SEQ ID NO: 43595 - DNA, 20 bp, Artificial Sequence
  Synthetic oligonucleotide; TGG chr11 5270298 5270317 5270301 -
ggcaaatgttaaatgcgctt

SEQ ID NO: 43596 - DNA, 20 bp, Artificial Sequence
  Synthetic oligonucleotide; GAG chr11 5270273 5270292 5270276 -
gaaactttttttcctatttt

SEQ ID NO: 43597 - DNA, 20 bp, Artificial Sequence
  Synthetic oligonucleotide; GAG chr11 5270254 5270273 5270257 -
tgagatttgctcctttatat

SEQ ID NO: 43598 - DNA, 20 bp, Artificial Sequence
  Synthetic oligonucleotide; AGG chr11 5270253 5270272 5270256 -
gagatttgctcctttatatg

SEQ ID NO: 43599 - DNA, 20 bp, Artificial Sequence
  Synthetic oligonucleotide; TGG chr11 5270244 5270263 5270247 -
tcctttatatgaggctttct

SEQ ID NO: 43600 - DNA, 20 bp, Artificial Sequence
  Synthetic oligonucleotide; AAG chr11 5270239 5270258 5270242 -
tatatgaggctttcttggaa

SEQ ID NO: 43601 - DNA, 20 bp, Artificial Sequence
  Synthetic oligonucleotide; AGG chr11 5270238 5270257 5270241 -
atatgaggctttcttggaaa

SEQ ID NO: 43602 - DNA, 20 bp, Artificial Sequence
  Synthetic oligonucleotide; GAG chr11 5270236 5270255 5270239 -
atgaggctttcttggaaaag

SEQ ID NO: 43603 - DNA, 20 bp, Artificial Sequence
  Synthetic oligonucleotide; TGG chr11 5270231 5270250 5270234 -
gctttcttggaaaaggagaa

SEQ ID NO: 43604 - DNA, 20 bp, Artificial Sequence
  Synthetic oligonucleotide; GGG chr11 5270230 5270249 5270233 -
ctttcttggaaaaggagaat

SEQ ID NO: 43605 - DNA, 20 bp, Artificial Sequence
  Synthetic oligonucleotide; GAG chr11 5270228 5270247 5270231 -
ttcttggaaaaggagaatgg

SEQ ID NO: 43606 - DNA, 20 bp, Artificial Sequence
  Synthetic oligonucleotide; GAG chr11 5270226 5270245 5270229 -
cttggaaaaggagaatggga

SEQ ID NO: 43607 - DNA, 20 bp, Artificial Sequence
  Synthetic oligonucleotide; TGG chr11 5270222 5270241 5270225 -
gaaaaggagaatgggagaga

SEQ ID NO: 43608 - DNA, 20 bp, Artificial Sequence
  Synthetic oligonucleotide; TGG chr11 5270210 5270229 5270213 -
gggagagatggatatcattt

SEQ ID NO: 43609 - DNA, 20 bp, Artificial Sequence
  Synthetic oligonucleotide; AAG chr11 5270207 5270226 5270210 -
agagatggatatcattttgg

SEQ ID NO: 43610 - DNA, 20 bp, Artificial Sequence
  Synthetic oligonucleotide; AAG chr11 5270198 5270217 5270201 -
tatcattttggaagatgatg

SEQ ID NO: 43611 - DNA, 20 bp, Artificial Sequence
  Synthetic oligonucleotide; GAG chr11 5270196 5270215 5270199 -
tcattttggaagatgatgaa

SEQ ID NO: 43612 - DNA, 20 bp, Artificial Sequence
  Synthetic oligonucleotide; AGG chr11 5270195 5270214 5270198 -
cattttggaagatgatgaag

SEQ ID NO: 43613 - DNA, 20 bp, Artificial Sequence
  Synthetic oligonucleotide; GGG chr11 5270194 5270213 5270197 -
attttggaagatgatgaaga

SEQ ID NO: 43614 - DNA, 20 bp, Artificial Sequence
  Synthetic oligonucleotide; AAG chr11 5270186 5270205 5270189 -
agatgatgaagagggtaaaa

SEQ ID NO: 43615 - DNA, 20 bp, Artificial Sequence
  Synthetic oligonucleotide; AGG chr11 5270185 5270204 5270188 -
gatgatgaagagggtaaaaa

SEQ ID NO: 43616 - DNA, 20 bp, Artificial Sequence
  Synthetic oligonucleotide; GGG chr11 5270184 5270203 5270187 -
atgatgaagagggtaaaaaa

SEQ ID NO: 43617 - DNA, 20 bp, Artificial Sequence
  Synthetic oligonucleotide; GGG chr11 5270183 5270202 5270186 -
tgatgaagagggtaaaaaag

SEQ ID NO: 43618 - DNA, 20 bp, Artificial Sequence
  Synthetic oligonucleotide; TGG chr11 5270175 5270194 5270178 -
agggtaaaaaaggggacaaa

SEQ ID NO: 43619 - DNA, 20 bp, Artificial Sequence
  Synthetic oligonucleotide; CAG chr11 5270160 5270179 5270163 -
acaaatggaaatttgtgttg

SEQ ID NO: 43620 - DNA, 20 bp, Artificial Sequence
  Synthetic oligonucleotide; TAG chr11 5270156 5270175 5270159 -
atggaaatttgtgttgcaga

SEQ ID NO: 43621 - DNA, 20 bp, Artificial Sequence
  Synthetic oligonucleotide; GAG chr11 5270151 5270170 5270154 -
aatttgtgttgcagatagat

SEQ ID NO: 43622 - DNA, 20 bp, Artificial Sequence
  Synthetic oligonucleotide; AGG chr11 5270150 5270169 5270153 -
atttgtgttgcagatagatg

SEQ ID NO: 43623 - DNA, 20 bp, Artificial Sequence
  Synthetic oligonucleotide; GAG chr11 5270148 5270167 5270151 -
ttgtgttgcagatagatgag

SEQ ID NO: 43624 - DNA, 20 bp, Artificial Sequence
  Synthetic oligonucleotide; AAG chr11 5270136 5270155 5270139 -
tagatgaggagccaacaaaa

SEQ ID NO: 43625 - DNA, 20 bp, Artificial Sequence
  Synthetic oligonucleotide; GAG chr11 5270134 5270153 5270137 -
gatgaggagccaacaaaaaa

SEQ ID NO: 43626 - DNA, 20 bp, Artificial Sequence
  Synthetic oligonucleotide; CAG chr11 5270128 5270147 5270131 -
gagccaacaaaaaagagcct

SEQ ID NO: 43627 - DNA, 20 bp, Artificial Sequence
  Synthetic oligonucleotide; AGG chr11 5270127 5270146 5270130 -
agccaacaaaaaagagcctc

SEQ ID NO: 43628 - DNA, 20 bp, Artificial Sequence
  Synthetic oligonucleotide; CAG chr11 5270121 5270140 5270124 -
caaaaaagagcctcaggatc

SEQ ID NO: 43629 - DNA, 20 bp, Artificial Sequence
  Synthetic oligonucleotide; TAG chr11 5270100 5270119 5270103 -
agcacacattatcacaaact

SEQ ID NO: 43630 - DNA, 20 bp, Artificial Sequence
  Synthetic oligonucleotide; CGG chr11 5270070 5270089 5270073 -
ccatcactgctgaccctctc

SEQ ID NO: 43631 - DNA, 20 bp, Artificial Sequence
  Synthetic oligonucleotide; GAG chr11 5270051 5270070 5270054 -
ccggacctgactccacccct

SEQ ID NO: 43632 - DNA, 20 bp, Artificial Sequence
  Synthetic oligonucleotide; AGG chr11 5270050 5270069 5270053 -
cggacctgactccacccctg

SEQ ID NO: 43633 - DNA, 20 bp, Artificial Sequence
  Synthetic oligonucleotide; GGG chr11 5270049 5270068 5270052 -
ggacctgactccacccctga

SEQ ID NO: 43634 - DNA, 20 bp, Artificial Sequence
  Synthetic oligonucleotide; CAG chr11 5270043 5270062 5270046 -
gactccacccctgagggaca

SEQ ID NO: 43635 - DNA, 20 bp, Artificial Sequence
  Synthetic oligonucleotide; AGG chr11 5270042 5270061 5270045 -
actccacccctgagggacac

SEQ ID NO: 43636 - DNA, 20 bp, Artificial Sequence
  Synthetic oligonucleotide; CAG chr11 5270038 5270057 5270041 -
cacccctgagggacacaggt

SEQ ID NO: 43637 - DNA, 20 bp, Artificial Sequence
  Synthetic oligonucleotide; AAG chr11 5270017 5270036 5270020 -
agccttgaccaatgactttt

SEQ ID NO: 43638 - DNA, 20 bp, Artificial Sequence
  Synthetic oligonucleotide; TGG chr11 5270009 5270028 5270012 -
ccaatgacttttaagtacca

SEQ ID NO: 43639 - DNA, 20 bp, Artificial Sequence
  Synthetic oligonucleotide; GAG chr11 5270007 5270026 5270010 -
aatgacttttaagtaccatg

SEQ ID NO: 43640 - DNA, 20 bp, Artificial Sequence
  Synthetic oligonucleotide; CAG chr11 5270002 5270021 5270005 -
cttttaagtaccatggagaa

SEQ ID NO: 43641 - DNA, 20 bp, Artificial Sequence
  Synthetic oligonucleotide; AGG chr11 5270001 5270020 5270004 -
ttttaagtaccatggagaac

SEQ ID NO: 43642 - DNA, 20 bp, Artificial Sequence
  Synthetic oligonucleotide; GGG chr11 5270000 5270019 5270003 -
tttaagtaccatggagaaca

SEQ ID NO: 43643 - DNA, 20 bp, Artificial Sequence
  Synthetic oligonucleotide; GGG chr11 5269999 5270018 5270002 -
ttaagtaccatggagaacag

SEQ ID NO: 43644 - DNA, 20 bp, Artificial Sequence
  Synthetic oligonucleotide; GGG chr11 5269998 5270017 5270001 -
taagtaccatggagaacagg

SEQ ID NO: 43645 - DNA, 20 bp, Artificial Sequence
  Synthetic oligonucleotide; CAG chr11 5269994 5270013 5269997 -
taccatggagaacagggggc

SEQ ID NO: 43646 - DNA, 20 bp, Artificial Sequence
  Synthetic oligonucleotide; CGG chr11 5269986 5270005 5269989 -
agaacagggggccagaactt

SEQ ID NO: 43647 - DNA, 20 bp, Artificial Sequence
  Synthetic oligonucleotide; CAG chr11 5269983 5270002 5269986 -
acagggggccagaacttcgg

SEQ ID NO: 43648 - DNA, 20 bp, Artificial Sequence
  Synthetic oligonucleotide; AAG chr11 5269978 5269997 5269981 -
gggccagaacttcggcagta

SEQ ID NO: 43649 - DNA, 20 bp, Artificial Sequence
  Synthetic oligonucleotide; AAG chr11 5269970 5269989 5269973 -
acttcggcagtaaagaataa

SEQ ID NO: 43650 - DNA, 20 bp, Artificial Sequence
  Synthetic oligonucleotide; AGG chr11 5269969 5269988 5269972 -
cttcggcagtaaagaataaa

SEQ ID NO: 43651 - DNA, 20 bp, Artificial Sequence
  Synthetic oligonucleotide; CAG chr11 5269965 5269984 5269968 -
ggcagtaaagaataaaaggc

SEQ ID NO: 43652 - DNA, 20 bp, Artificial Sequence
  Synthetic oligonucleotide; CAG chr11 5269961 5269980 5269964 -
gtaaagaataaaaggccaga

SEQ ID NO: 43653 - DNA, 20 bp, Artificial Sequence
  Synthetic oligonucleotide; GAG chr11 5269959 5269978 5269962 -
aaagaataaaaggccagaca

SEQ ID NO: 43654 - DNA, 20 bp, Artificial Sequence
  Synthetic oligonucleotide; GAG chr11 5269957 5269976 5269960 -
agaataaaaggccagacaga

SEQ ID NO: 43655 - DNA, 20 bp, Artificial Sequence
  Synthetic oligonucleotide; AGG chr11 5269956 5269975 5269959 -
gaataaaaggccagacagag

SEQ ID NO: 43656 - DNA, 20 bp, Artificial Sequence
  Synthetic oligonucleotide; CAG chr11 5269953 5269972 5269956 -
taaaaggccagacagagagg

SEQ ID NO: 43657 - DNA, 20 bp, Artificial Sequence
  Synthetic oligonucleotide; CAG chr11 5269950 5269969 5269953 -
aaggccagacagagaggcag

SEQ ID NO: 43658 - DNA, 20 bp, Artificial Sequence
  Synthetic oligonucleotide; CAG chr11 5269928 5269947 5269931 -
gcacatatctgcttccgaca

SEQ ID NO: 43659 - DNA, 20 bp, Artificial Sequence
  Synthetic oligonucleotide; TAG chr11 5269915 5269934 5269918 -
tccgacacagctgcaatcac

SEQ ID NO: 43660 - DNA, 20 bp, Artificial Sequence
  Synthetic oligonucleotide; AAG chr11 5269911 5269930 5269914 -
acacagctgcaatcactagc

SEQ ID NO: 43661 - DNA, 20 bp, Artificial Sequence
  Synthetic oligonucleotide; CAG chr11 5269904 5269923 5269907 -
tgcaatcactagcaagctct

SEQ ID NO: 43662 - DNA, 20 bp, Artificial Sequence
  Synthetic oligonucleotide; AGG chr11 5269903 5269922 5269906 -
gcaatcactagcaagctctc

SEQ ID NO: 43663 - DNA, 20 bp, Artificial Sequence
  Synthetic oligonucleotide; TGG chr11 5269898 5269917 5269901 -
cactagcaagctctcaggcc

SEQ ID NO: 43664 - DNA, 20 bp, Artificial Sequence
  Synthetic oligonucleotide; TGG chr11 5269890 5269909 5269893 -
agctctcaggcctggcatca

SEQ ID NO: 43665 - DNA, 20 bp, Artificial Sequence
  Synthetic oligonucleotide; GAG chr11 5269873 5269892 5269876 -
tcatggtgcattttactgct

SEQ ID NO: 43666 - DNA, 20 bp, Artificial Sequence
  Synthetic oligonucleotide; AGG chr11 5269872 5269891 5269875 -
catggtgcattttactgctg

SEQ ID NO: 43667 - DNA, 20 bp, Artificial Sequence
  Synthetic oligonucleotide; GAG chr11 5269870 5269889 5269873 -
tggtgcattttactgctgag

SEQ ID NO: 43668 - DNA, 20 bp, Artificial Sequence
  Synthetic oligonucleotide; AAG chr11 5269867 5269886 5269870 -
tgcattttactgctgaggag

SEQ ID NO: 43669 - DNA, 20 bp, Artificial Sequence
  Synthetic oligonucleotide; AGG chr11 5269866 5269885 5269869 -
gcattttactgctgaggaga

SEQ ID NO: 43670 - DNA, 20 bp, Artificial Sequence
  Synthetic oligonucleotide; TAG chr11 5269853 5269872 5269856 -
gaggagaaggctgccgtcac

SEQ ID NO: 43671 - DNA, 20 bp, Artificial Sequence
  Synthetic oligonucleotide; TGG chr11 5269846 5269865 5269849 -
aggctgccgtcactagcctg

SEQ ID NO: 43672 - DNA, 20 bp, Artificial Sequence
  Synthetic oligonucleotide; GAG chr11 5269844 5269863 5269847 -
gctgccgtcactagcctgtg

SEQ ID NO: 43673 - DNA, 20 bp, Artificial Sequence
  Synthetic oligonucleotide; AAG chr11 5269840 5269859 5269843 -
ccgtcactagcctgtggagc

SEQ ID NO: 43674 - DNA, 20 bp, Artificial Sequence
  Synthetic oligonucleotide; TGG chr11 5269830 5269849 5269833 -
cctgtggagcaagatgaatg

SEQ ID NO: 43675 - DNA, 20 bp, Artificial Sequence
  Synthetic oligonucleotide; AAG chr11 5269827 5269846 5269830 -
gtggagcaagatgaatgtgg

SEQ ID NO: 43676 - DNA, 20 bp, Artificial Sequence
  Synthetic oligonucleotide; GAG chr11 5269825 5269844 5269828 -
ggagcaagatgaatgtggaa

SEQ ID NO: 43677 - DNA, 20 bp, Artificial Sequence
  Synthetic oligonucleotide; AGG chr11 5269824 5269843 5269827 -
gagcaagatgaatgtggaag

SEQ ID NO: 43678 - DNA, 20 bp, Artificial Sequence
  Synthetic oligonucleotide; TGG chr11 5269820 5269839 5269823 -
aagatgaatgtggaagaggc

SEQ ID NO: 43679 - DNA, 20 bp, Artificial Sequence
  Synthetic oligonucleotide; GAG chr11 5269818 5269837 5269821 -
gatgaatgtggaagaggctg

SEQ ID NO: 43680 - DNA, 20 bp, Artificial Sequence
  Synthetic oligonucleotide; AGG chr11 5269817 5269836 5269820 -
atgaatgtggaagaggctgg

SEQ ID NO: 43681 - DNA, 20 bp, Artificial Sequence
  Synthetic oligonucleotide; AAG chr11 5269812 5269831 5269815 -
tgtggaagaggctggaggtg

SEQ ID NO: 43682 - DNA, 20 bp, Artificial Sequence
  Synthetic oligonucleotide; TGG chr11 5269806 5269825 5269809 -
agaggctggaggtgaagcct

SEQ ID NO: 43683 - DNA, 20 bp, Artificial Sequence
  Synthetic oligonucleotide; GGG chr11 5269805 5269824 5269808 -
gaggctggaggtgaagcctt

SEQ ID NO: 43684 - DNA, 20 bp, Artificial Sequence
  Synthetic oligonucleotide; CAG chr11 5269802 5269821 5269805 -
gctggaggtgaagccttggg

SEQ ID NO: 43685 - DNA, 20 bp, Artificial Sequence
  Synthetic oligonucleotide; AGG chr11 5269801 5269820 5269804 -
ctggaggtgaagccttgggc

SEQ ID NO: 43686 - DNA, 20 bp, Artificial Sequence
  Synthetic oligonucleotide; AAG chr11 5269797 5269816 5269800 -
aggtgaagccttgggcaggt

SEQ ID NO: 43687 - DNA, 20 bp, Artificial Sequence
  Synthetic oligonucleotide; TGG chr11 5269791 5269810 5269794 -
agccttgggcaggtaagcat

SEQ ID NO: 43688 - DNA, 20 bp, Artificial Sequence
  Synthetic oligonucleotide; TGG chr11 5269777 5269796 5269780 -
aagcattggttctcaatgca

SEQ ID NO: 43689 - DNA, 20 bp, Artificial Sequence
  Synthetic oligonucleotide; GGG chr11 5269776 5269795 5269779 -
agcattggttctcaatgcat

SEQ ID NO: 43690 - DNA, 20 bp, Artificial Sequence
  Synthetic oligonucleotide; AAG chr11 5269769 5269788 5269772 -
gttctcaatgcatgggaatg

SEQ ID NO: 43691 - DNA, 20 bp, Artificial Sequence
  Synthetic oligonucleotide; AGG chr11 5269768 5269787 5269771 -
ttctcaatgcatgggaatga

SEQ ID NO: 43692 - DNA, 20 bp, Artificial Sequence
  Synthetic oligonucleotide; GGG chr11 5269767 5269786 5269770 -
tctcaatgcatgggaatgaa

SEQ ID NO: 43693 - DNA, 20 bp, Artificial Sequence
  Synthetic oligonucleotide; TAG chr11 5269752 5269771 5269755 -
atgaagggtgaatattaccc

SEQ ID NO: 43694 - DNA, 20 bp, Artificial Sequence
  Synthetic oligonucleotide; AAG chr11 5269748 5269767 5269751 -
agggtgaatattaccctagc

SEQ ID NO: 43695 - DNA, 20 bp, Artificial Sequence
  Synthetic oligonucleotide; TGG chr11 5269740 5269759 5269743 -
tattaccctagcaagttgat

SEQ ID NO: 43696 - DNA, 20 bp, Artificial Sequence
  Synthetic oligonucleotide; GGG chr11 5269739 5269758 5269742 -
attaccctagcaagttgatt

SEQ ID NO: 43697 - DNA, 20 bp, Artificial Sequence
  Synthetic oligonucleotide; AAG chr11 5269735 5269754 5269738 -
ccctagcaagttgattggga

SEQ ID NO: 43698 - DNA, 20 bp, Artificial Sequence
  Synthetic oligonucleotide; AAG chr11 5269727 5269746 5269730 -
agttgattgggaaagtcctc

SEQ ID NO: 43699 - DNA, 20 bp, Artificial Sequence
  Synthetic oligonucleotide; TGG chr11 5269693 5269712 5269696 -
ctctaattttgtatctgata

SEQ ID NO: 43700 - DNA, 20 bp, Artificial Sequence
  Synthetic oligonucleotide; TAG chr11 5269680 5269699 5269683 -
tctgatatggtgtcatttca

SEQ ID NO: 43701 - DNA, 20 bp, Artificial Sequence
  Synthetic oligonucleotide; TGG chr11 5269658 5269677 5269661 -
gactcctcgttgtttacccc

SEQ ID NO: 43702 - DNA, 20 bp, Artificial Sequence
  Synthetic oligonucleotide; CAG chr11 5269652 5269671 5269655 -
tcgttgtttacccctggacc

SEQ ID NO: 43703 - DNA, 20 bp, Artificial Sequence
  Synthetic oligonucleotide; GAG chr11 5269650 5269669 5269653 -
gttgtttacccctggaccca

SEQ ID NO: 43704 - DNA, 20 bp, Artificial Sequence
  Synthetic oligonucleotide; CAG chr11 5269638 5269657 5269641 -
tggacccagagattttttga

SEQ ID NO: 43705 - DNA, 20 bp, Artificial Sequence
  Synthetic oligonucleotide; TGG chr11 5269632 5269651 5269635 -
cagagattttttgacagctt

SEQ ID NO: 43706 - DNA, 20 bp, Artificial Sequence
  Synthetic oligonucleotide; TGG chr11 5269603 5269622 5269606 -
gtcgtctccctctgccatcc

SEQ ID NO: 43707 - DNA, 20 bp, Artificial Sequence
  Synthetic oligonucleotide; GGG chr11 5269602 5269621 5269605 -
tcgtctccctctgccatcct

SEQ ID NO: 43708 - DNA, 20 bp, Artificial Sequence
  Synthetic oligonucleotide; AAG chr11 5269592 5269611 5269595 -
ctgccatcctgggcaacccc

SEQ ID NO: 43709 - DNA, 20 bp, Artificial Sequence
  Synthetic oligonucleotide; AGG chr11 5269591 5269610 5269594 -
tgccatcctgggcaacccca

SEQ ID NO: 43710 - DNA, 20 bp, Artificial Sequence
  Synthetic oligonucleotide; AAG chr11 5269586 5269605 5269589 -
tcctgggcaaccccaaggtc

SEQ ID NO: 43711 - DNA, 20 bp, Artificial Sequence
  Synthetic oligonucleotide; AGG chr11 5269585 5269604 5269588 -
cctgggcaaccccaaggtca

SEQ ID NO: 43712 - DNA, 20 bp, Artificial Sequence
  Synthetic oligonucleotide; TGG chr11 5269578 5269597 5269581 -
aaccccaaggtcaaggccca

SEQ ID NO: 43713 - DNA, 20 bp, Artificial Sequence
  Synthetic oligonucleotide; AAG chr11 5269574 5269593 5269577 -
ccaaggtcaaggcccatggc

SEQ ID NO: 43714 - DNA, 20 bp, Artificial Sequence
  Synthetic oligonucleotide; AAG chr11 5269571 5269590 5269574 -
aggtcaaggcccatggcaag

SEQ ID NO: 43715 - DNA, 20 bp, Artificial Sequence
  Synthetic oligonucleotide; AGG chr11 5269570 5269589 5269573 -
ggtcaaggcccatggcaaga

SEQ ID NO: 43716 - DNA, 20 bp, Artificial Sequence
  Synthetic oligonucleotide; TGG chr11 5269554 5269573 5269557 -
aagaaggtgctgacttcctt

SEQ ID NO: 43717 - DNA, 20 bp, Artificial Sequence
  Synthetic oligonucleotide; GAG chr11 5269552 5269571 5269555 -
gaaggtgctgacttcctttg

SEQ ID NO: 43718 - DNA, 20 bp, Artificial Sequence
  Synthetic oligonucleotide; TGG chr11 5269534 5269553 5269537 -
tggagatgctattaaaaaca

SEQ ID NO: 43719 - DNA, 20 bp, Artificial Sequence
  Synthetic oligonucleotide; AAG chr11 5269523 5269542 5269526 -
ttaaaaacatggacaacctc

SEQ ID NO: 43720 - DNA, 20 bp, Artificial Sequence
  Synthetic oligonucleotide; AAG chr11 5269508 5269527 5269511 -
acctcaagcccgcctttgct

SEQ ID NO: 43721 - DNA, 20 bp, Artificial Sequence
  Synthetic oligonucleotide; GAG chr11 5269503 5269522 5269506 -
aagcccgcctttgctaagct

SEQ ID NO: 43722 - DNA, 20 bp, Artificial Sequence
  Synthetic oligonucleotide; GAG chr11 5269499 5269518 5269502 -
ccgcctttgctaagctgagt

SEQ ID NO: 43723 - DNA, 20 bp, Artificial Sequence
  Synthetic oligonucleotide; AAG chr11 5269484 5269503 5269487 -
tgagtgagctgcactgtgac

SEQ ID NO: 43724 - DNA, 20 bp, Artificial Sequence
  Synthetic oligonucleotide; TGG chr11 5269474 5269493 5269477 -
gcactgtgacaagctgcatg

SEQ ID NO: 43725 - DNA, 20 bp, Artificial Sequence
  Synthetic oligonucleotide; GAG chr11 5269466 5269485 5269469 -
acaagctgcatgtggatcct

SEQ ID NO: 43726 - DNA, 20 bp, Artificial Sequence
  Synthetic oligonucleotide; AAG chr11 5269457 5269476 5269460 -
atgtggatcctgagaacttc

SEQ ID NO: 43727 - DNA, 20 bp, Artificial Sequence
  Synthetic oligonucleotide; AGG chr11 5269456 5269475 5269459 -
tgtggatcctgagaacttca

SEQ ID NO: 43728 - DNA, 20 bp, Artificial Sequence
  Synthetic oligonucleotide; GAG chr11 5269452 5269471 5269455 -
gatcctgagaacttcaaggt

SEQ ID NO: 43729 - DNA, 20 bp, Artificial Sequence
  Synthetic oligonucleotide; CAG chr11 5269447 5269466 5269450 -
tgagaacttcaaggtgagtt

SEQ ID NO: 43730 - DNA, 20 bp, Artificial Sequence
  Synthetic oligonucleotide; AGG chr11 5269446 5269465 5269449 -
gagaacttcaaggtgagttc

SEQ ID NO: 43731 - DNA, 20 bp, Artificial Sequence
  Synthetic oligonucleotide; TGG chr11 5269440 5269459 5269443 -
ttcaaggtgagttcaggtgc

SEQ ID NO: 43732 - DNA, 20 bp, Artificial Sequence
  Synthetic oligonucleotide; TGG chr11 5269424 5269443 5269427 -
gtgctggtgatgtgattttt

SEQ ID NO: 43733 - DNA, 20 bp, Artificial Sequence
  Synthetic oligonucleotide; AAG chr11 5269399 5269418 5269402 -
ttatattttgacattaattg

SEQ ID NO: 43734 - DNA, 20 bp, Artificial Sequence
  Synthetic oligonucleotide; TGG chr11 5269383 5269402 5269386 -
attgaagctcataatcttat

SEQ ID NO: 43735 - DNA, 20 bp, Artificial Sequence
  Synthetic oligonucleotide; AAG chr11 5269379 5269398 5269382 -
aagctcataatcttattgga

SEQ ID NO: 43736 - DNA, 20 bp, Artificial Sequence
  Synthetic oligonucleotide; AAG chr11 5269369 5269388 5269372 -
tcttattggaaagaccaaca

SEQ ID NO: 43737 - DNA, 20 bp, Artificial Sequence
  Synthetic oligonucleotide; CAG chr11 5269362 5269381 5269365 -
ggaaagaccaacaaagatct

SEQ ID NO: 43738 - DNA, 20 bp, Artificial Sequence
  Synthetic oligonucleotide; TGG chr11 5269353 5269372 5269356 -
aacaaagatctcagaaatca

SEQ ID NO: 43739 - DNA, 20 bp, Artificial Sequence
  Synthetic oligonucleotide; GGG chr11 5269352 5269371 5269355 -
acaaagatctcagaaatcat

SEQ ID NO: 43740 - DNA, 20 bp, Artificial Sequence
  Synthetic oligonucleotide; GAG chr11 5269347 5269366 5269350 -
gatctcagaaatcatgggtc

SEQ ID NO: 43741 - DNA, 20 bp, Artificial Sequence
  Synthetic oligonucleotide; TAG chr11 5269336 5269355 5269339 -
tcatgggtcgagcttgatgt

SEQ ID NO: 43742 - DNA, 20 bp, Artificial Sequence
  Synthetic oligonucleotide; CAG chr11 5269331 5269350 5269334 -
ggtcgagcttgatgttagaa

SEQ ID NO: 43743 - DNA, 20 bp, Artificial Sequence
  Synthetic oligonucleotide; CAG chr11 5269328 5269347 5269331 -
cgagcttgatgttagaacag

SEQ ID NO: 43744 - DNA, 20 bp, Artificial Sequence
  Synthetic oligonucleotide; TAG chr11 5269320 5269339 5269323 -
atgttagaacagcagacttc

SEQ ID NO: 43745 - DNA, 20 bp, Artificial Sequence
  Synthetic oligonucleotide; GAG chr11 5269316 5269335 5269319 -
tagaacagcagacttctagt

SEQ ID NO: 43746 - DNA, 20 bp, Artificial Sequence
  Synthetic oligonucleotide; CAG chr11 5269291 5269310 5269294 -
taaccaaaacttacatgatt

SEQ ID NO: 43747 - DNA, 20 bp, Artificial Sequence
  Synthetic oligonucleotide; TAG chr11 5269285 5269304 5269288 -
aaacttacatgattcagaac

SEQ ID NO: 43748 - DNA, 20 bp, Artificial Sequence
  Synthetic oligonucleotide; CAG chr11 5269279 5269298 5269282 -
acatgattcagaactagtga

SEQ ID NO: 43749 - DNA, 20 bp, Artificial Sequence
  Synthetic oligonucleotide; AAG chr11 5269274 5269293 5269277 -
attcagaactagtgacagta

SEQ ID NO: 43750 - DNA, 20 bp, Artificial Sequence
  Synthetic oligonucleotide; AGG chr11 5269273 5269292 5269276 -
ttcagaactagtgacagtaa

SEQ ID NO: 43751 - DNA, 20 bp, Artificial Sequence
  Synthetic oligonucleotide; CAG chr11 5269262 5269281 5269265 -
tgacagtaaaggactactaa

SEQ ID NO: 43752 - DNA, 20 bp, Artificial Sequence
  Synthetic oligonucleotide; TGG chr11 5269252 5269271 5269255 -
ggactactaacagcctgaat

SEQ ID NO: 43753 - DNA, 20 bp, Artificial Sequence
  Synthetic oligonucleotide; CAG chr11 5269239 5269258 5269242 -
cctgaattggcttaactttt

SEQ ID NO: 43754 - DNA, 20 bp, Artificial Sequence
  Synthetic oligonucleotide; AGG chr11 5269238 5269257 5269241 -
ctgaattggcttaacttttc

SEQ ID NO: 43755 - DNA, 20 bp, Artificial Sequence
  Synthetic oligonucleotide; CAG chr11 5269226 5269245 5269229 -
aacttttcaggaaatcttgc

SEQ ID NO: 43756 - DNA, 20 bp, Artificial Sequence
  Synthetic oligonucleotide; CAG chr11 5269205 5269224 5269208 -
agaacttgatgtgtttatcc

SEQ ID NO: 43757 - DNA, 20 bp, Artificial Sequence
  Synthetic oligonucleotide; GAG chr11 5269203 5269222 5269206 -
aacttgatgtgtttatccca

SEQ ID NO: 43758 - DNA, 20 bp, Artificial Sequence
  Synthetic oligonucleotide; TAG chr11 5269190 5269209 5269193 -
tatcccagagaattgtatta

SEQ ID NO: 43759 - DNA, 20 bp, Artificial Sequence
  Synthetic oligonucleotide; TAG chr11 5269182 5269201 5269185 -
agaattgtattatagaattg

SEQ ID NO: 43760 - DNA, 20 bp, Artificial Sequence
  Synthetic oligonucleotide; AAG chr11 5269171 5269190 5269174 -
atagaattgtagacttgtga

SEQ ID NO: 43761 - DNA, 20 bp, Artificial Sequence
  Synthetic oligonucleotide; AAG chr11 5269168 5269187 5269171 -
gaattgtagacttgtgaaag

SEQ ID NO: 43762 - DNA, 20 bp, Artificial Sequence
  Synthetic oligonucleotide; TGG chr11 5269156 5269175 5269159 -
tgtgaaagaagaatgaaatt

SEQ ID NO: 43763 - DNA, 20 bp, Artificial Sequence
  Synthetic oligonucleotide; TGG chr11 5269149 5269168 5269152 -
gaagaatgaaatttggcttt

SEQ ID NO: 43764 - DNA, 20 bp, Artificial Sequence
  Synthetic oligonucleotide; TAG chr11 5269146 5269165 5269149 -
gaatgaaatttggcttttgg

SEQ ID NO: 43765 - DNA, 20 bp, Artificial Sequence
  Synthetic oligonucleotide; AAG chr11 5269139 5269158 5269142 -
atttggcttttggtagatga

SEQ ID NO: 43766 - DNA, 20 bp, Artificial Sequence
  Synthetic oligonucleotide; AAG chr11 5269128 5269147 5269131 -
ggtagatgaaagtccatttc

SEQ ID NO: 43767 - DNA, 20 bp, Artificial Sequence
  Synthetic oligonucleotide; AGG chr11 5269127 5269146 5269130 -
gtagatgaaagtccatttca

SEQ ID NO: 43768 - DNA, 20 bp, Artificial Sequence
  Synthetic oligonucleotide; TAG chr11 5269121 5269140 5269124 -
gaaagtccatttcaaggaaa

SEQ ID NO: 43769 - DNA, 20 bp, Artificial Sequence
  Synthetic oligonucleotide; TGG chr11 5269101 5269120 5269104 -
tagaaatgccttattttatg

SEQ ID NO: 43770 - DNA, 20 bp, Artificial Sequence
  Synthetic oligonucleotide; GGG chr11 5269100 5269119 5269103 -
agaaatgccttattttatgt

SEQ ID NO: 43771 - DNA, 20 bp, Artificial Sequence
  Synthetic oligonucleotide; GAG chr11 5269086 5269105 5269089 -
ttatgtgggtcatgataatt

SEQ ID NO: 43772 - DNA, 20 bp, Artificial Sequence
  Synthetic oligonucleotide; AGG chr11 5269085 5269104 5269088 -
tatgtgggtcatgataattg

SEQ ID NO: 43773 - DNA, 20 bp, Artificial Sequence
  Synthetic oligonucleotide; TAG chr11 5269080 5269099 5269083 -
gggtcatgataattgaggtt

SEQ ID NO: 43774 - DNA, 20 bp, Artificial Sequence
  Synthetic oligonucleotide; AAG chr11 5269076 5269095 5269079 -
catgataattgaggtttaga

SEQ ID NO: 43775 - DNA, 20 bp, Artificial Sequence
  Synthetic oligonucleotide; GAG chr11 5269074 5269093 5269077 -
tgataattgaggtttagaaa

SEQ ID NO: 43776 - DNA, 20 bp, Artificial Sequence
  Synthetic oligonucleotide; AAG chr11 5269052 5269071 5269055 -
gatttttgcaaaaaaaataa

SEQ ID NO: 43777 - DNA, 20 bp, Artificial Sequence
  Synthetic oligonucleotide; AAG chr11 5269040 5269059 5269043 -
aaaaataaaagatttgctca

SEQ ID NO: 43778 - DNA, 20 bp, Artificial Sequence
  Synthetic oligonucleotide; AAG chr11 5269031 5269050 5269034 -
agatttgctcaaagaaaaat

SEQ ID NO: 43779 - DNA, 20 bp, Artificial Sequence
  Synthetic oligonucleotide; CAG chr11 5268996 5269015 5268999 -
aaatatgttaaatttcccat

SEQ ID NO: 43780 - DNA, 20 bp, Artificial Sequence
  Synthetic oligonucleotide; AAG chr11 5268983 5269002 5268986 -
ttcccatcagtattgtgacc

SEQ ID NO: 43781 - DNA, 20 bp, Artificial Sequence
  Synthetic oligonucleotide; AAG chr11 5268978 5268997 5268981 -
atcagtattgtgaccaagtg

SEQ ID NO: 43782 - DNA, 20 bp, Artificial Sequence
  Synthetic oligonucleotide; AGG chr11 5268977 5268996 5268980 -
tcagtattgtgaccaagtga

SEQ ID NO: 43783 - DNA, 20 bp, Artificial Sequence
  Synthetic oligonucleotide; TGG chr11 5268957 5268976 5268960 -
aggcttgtttccgaatttgt

SEQ ID NO: 43784 - DNA, 20 bp, Artificial Sequence
  Synthetic oligonucleotide; GGG chr11 5268956 5268975 5268959 -
ggcttgtttccgaatttgtt

SEQ ID NO: 43785 - DNA, 20 bp, Artificial Sequence
  Synthetic oligonucleotide; GGG chr11 5268955 5268974 5268958 -
gcttgtttccgaatttgttg

SEQ ID NO: 43786 - DNA, 20 bp, Artificial Sequence
  Synthetic oligonucleotide; GAG chr11 5268936 5268955 5268939 -
ggggattttaaactcccgct

SEQ ID NO: 43787 - DNA, 20 bp, Artificial Sequence
  Synthetic oligonucleotide; CAG chr11 5268925 5268944 5268928 -
actcccgctgagaactcttg

SEQ ID NO: 43788 - DNA, 20 bp, Artificial Sequence
  Synthetic oligonucleotide; TAG chr11 5268896 5268915 5268899 -
cattctacatttacaaaaat

SEQ ID NO: 43789 - DNA, 20 bp, Artificial Sequence
  Synthetic oligonucleotide; AAG chr11 5268882 5268901 5268885 -
aaaaattagacaattgctta

SEQ ID NO: 43790 - DNA, 20 bp, Artificial Sequence
  Synthetic oligonucleotide; CAG chr11 5268874 5268893 5268877 -
gacaattgcttaaagaaaaa

SEQ ID NO: 43791 - DNA, 20 bp, Artificial Sequence
  Synthetic oligonucleotide; AGG chr11 5268873 5268892 5268876 -
acaattgcttaaagaaaaac

SEQ ID NO: 43792 - DNA, 20 bp, Artificial Sequence
  Synthetic oligonucleotide; GGG chr11 5268872 5268891 5268875 -
caattgcttaaagaaaaaca

SEQ ID NO: 43793 - DNA, 20 bp, Artificial Sequence
  Synthetic oligonucleotide; GAG chr11 5268870 5268889 5268873 -
attgcttaaagaaaaacagg

SEQ ID NO: 43794 - DNA, 20 bp, Artificial Sequence
  Synthetic oligonucleotide; GAG chr11 5268868 5268887 5268871 -
tgcttaaagaaaaacaggga

SEQ ID NO: 43795 - DNA, 20 bp, Artificial Sequence
  Synthetic oligonucleotide; GAG chr11 5268866 5268885 5268869 -
cttaaagaaaaacagggaga

SEQ ID NO: 43796 - DNA, 20 bp, Artificial Sequence
  Synthetic oligonucleotide; AGG chr11 5268865 5268884 5268868 -
ttaaagaaaaacagggagag

SEQ ID NO: 43797 - DNA, 20 bp, Artificial Sequence
  Synthetic oligonucleotide; GGG chr11 5268864 5268883 5268867 -
taaagaaaaacagggagaga

SEQ ID NO: 43798 - DNA, 20 bp, Artificial Sequence
  Synthetic oligonucleotide; TGG chr11 5268848 5268867 5268851 -
gagagggaacccaataatac

SEQ ID NO: 43799 - DNA, 20 bp, Artificial Sequence
  Synthetic oligonucleotide; TGG chr11 5268840 5268859 5268843 -
acccaataatactggtaaaa

SEQ ID NO: 43800 - DNA, 20 bp, Artificial Sequence
  Synthetic oligonucleotide; GGG chr11 5268839 5268858 5268842 -
cccaataatactggtaaaat

SEQ ID NO: 43801 - DNA, 20 bp, Artificial Sequence
  Synthetic oligonucleotide; GGG chr11 5268838 5268857 5268841 -
ccaataatactggtaaaatg

SEQ ID NO: 43802 - DNA, 20 bp, Artificial Sequence
  Synthetic oligonucleotide; AAG chr11 5268835 5268854 5268838 -
ataatactggtaaaatgggg

SEQ ID NO: 43803 - DNA, 20 bp, Artificial Sequence
  Synthetic oligonucleotide; AGG chr11 5268834 5268853 5268837 -
taatactggtaaaatgggga

SEQ ID NO: 43804 - DNA, 20 bp, Artificial Sequence
  Synthetic oligonucleotide; GGG chr11 5268833 5268852 5268836 -
aatactggtaaaatggggaa

SEQ ID NO: 43805 - DNA, 20 bp, Artificial Sequence
  Synthetic oligonucleotide; GGG chr11 5268832 5268851 5268835 -
atactggtaaaatggggaag

SEQ ID NO: 43806 - DNA, 20 bp, Artificial Sequence
  Synthetic oligonucleotide; GGG chr11 5268831 5268850 5268834 -
tactggtaaaatggggaagg

SEQ ID NO: 43807 - DNA, 20 bp, Artificial Sequence
  Synthetic oligonucleotide; GAG chr11 5268827 5268846 5268830 -
ggtaaaatggggaagggggt

SEQ ID NO: 43808 - DNA, 20 bp, Artificial Sequence
  Synthetic oligonucleotide; AGG chr11 5268826 5268845 5268829 -
gtaaaatggggaagggggtg

SEQ ID NO: 43809 - DNA, 20 bp, Artificial Sequence
  Synthetic oligonucleotide; GGG chr11 5268825 5268844 5268828 -
taaaatggggaagggggtga

SEQ ID NO: 43810 - DNA, 20 bp, Artificial Sequence
  Synthetic oligonucleotide; TAG chr11 5268820 5268839 5268823 -
tggggaagggggtgagggtg

SEQ ID NO: 43811 - DNA, 20 bp, Artificial Sequence
  Synthetic oligonucleotide; AGG chr11 5268819 5268838 5268822 -
ggggaagggggtgagggtgt

SEQ ID NO: 43812 - DNA, 20 bp, Artificial Sequence
  Synthetic oligonucleotide; TAG chr11 5268816 5268835 5268819 -
gaagggggtgagggtgtagg

SEQ ID NO: 43813 - DNA, 20 bp, Artificial Sequence
  Synthetic oligonucleotide; AGG chr11 5268815 5268834 5268818 -
aagggggtgagggtgtaggt

SEQ ID NO: 43814 - DNA, 20 bp, Artificial Sequence
  Synthetic oligonucleotide; TAG chr11 5268812 5268831 5268815 -
ggggtgagggtgtaggtagg

SEQ ID NO: 43815 - DNA, 20 bp, Artificial Sequence
  Synthetic oligonucleotide; TAG chr11 5268798 5268817 5268801 -
ggtaggtagaatgttgaatg

SEQ ID NO: 43816 - DNA, 20 bp, Artificial Sequence
  Synthetic oligonucleotide; AGG chr11 5268797 5268816 5268800 -
gtaggtagaatgttgaatgt

SEQ ID NO: 43817 - DNA, 20 bp, Artificial Sequence
  Synthetic oligonucleotide; GGG chr11 5268796 5268815 5268799 -
taggtagaatgttgaatgta

SEQ ID NO: 43818 - DNA, 20 bp, Artificial Sequence
  Synthetic oligonucleotide; TAG chr11 5268789 5268808 5268792 -
aatgttgaatgtagggctca

SEQ ID NO: 43819 - DNA, 20 bp, Artificial Sequence
  Synthetic oligonucleotide; AAG chr11 5268771 5268790 5268774 -
catagaataaaattgaacct

SEQ ID NO: 43820 - DNA, 20 bp, Artificial Sequence
  Synthetic oligonucleotide; TGG chr11 5268753 5268772 5268756 -
ctaagctcatctgaattttt

SEQ ID NO: 43821 - DNA, 20 bp, Artificial Sequence
  Synthetic oligonucleotide; GGG chr11 5268752 5268771 5268755 -
taagctcatctgaatttttt

SEQ ID NO: 43822 - DNA, 20 bp, Artificial Sequence
  Synthetic oligonucleotide; TGG chr11 5268749 5268768 5268752 -
gctcatctgaattttttggg

SEQ ID NO: 43823 - DNA, 20 bp, Artificial Sequence
  Synthetic oligonucleotide; GGG chr11 5268748 5268767 5268751 -
ctcatctgaattttttgggt

SEQ ID NO: 43824 - DNA, 20 bp, Artificial Sequence
  Synthetic oligonucleotide; TGG chr11 5268736 5268755 5268739 -
ttttgggtgggcacaaacct

SEQ ID NO: 43825 - DNA, 20 bp, Artificial Sequence
  Synthetic oligonucleotide; CAG chr11 5268731 5268750 5268734 -
ggtgggcacaaaccttggaa

SEQ ID NO: 43826 - DNA, 20 bp, Artificial Sequence
  Synthetic oligonucleotide; GAG chr11 5268725 5268744 5268728 -
cacaaaccttggaacagttt

SEQ ID NO: 43827 - DNA, 20 bp, Artificial Sequence
  Synthetic oligonucleotide; AGG chr11 5268724 5268743 5268727 -
acaaaccttggaacagtttg

SEQ ID NO: 43828 - DNA, 20 bp, Artificial Sequence
  Synthetic oligonucleotide; CAG chr11 5268720 5268739 5268723 -
accttggaacagtttgaggt

SEQ ID NO: 43829 - DNA, 20 bp, Artificial Sequence
  Synthetic oligonucleotide; AGG chr11 5268719 5268738 5268722 -
ccttggaacagtttgaggtc

SEQ ID NO: 43830 - DNA, 20 bp, Artificial Sequence
  Synthetic oligonucleotide; GGG chr11 5268718 5268737 5268721 -
cttggaacagtttgaggtca

SEQ ID NO: 43831 - DNA, 20 bp, Artificial Sequence
  Synthetic oligonucleotide; TAG chr11 5268710 5268729 5268713 -
agtttgaggtcagggttgtc

SEQ ID NO: 43832 - DNA, 20 bp, Artificial Sequence
  Synthetic oligonucleotide; AGG chr11 5268709 5268728 5268712 -
gtttgaggtcagggttgtct

SEQ ID NO: 43833 - DNA, 20 bp, Artificial Sequence
  Synthetic oligonucleotide; TAG chr11 5268702 5268721 5268705 -
gtcagggttgtctaggaatg

SEQ ID NO: 43834 - DNA, 20 bp, Artificial Sequence
  Synthetic oligonucleotide; AGG chr11 5268701 5268720 5268704 -
tcagggttgtctaggaatgt

SEQ ID NO: 43835 - DNA, 20 bp, Artificial Sequence
  Synthetic oligonucleotide; AAG chr11 5268694 5268713 5268697 -
tgtctaggaatgtaggtata

SEQ ID NO: 43836 - DNA, 20 bp, Artificial Sequence
  Synthetic oligonucleotide; AAG chr11 5268660 5268679 5268663 -
tgtttgtttgttttttcatc

SEQ ID NO: 43837 - DNA, 20 bp, Artificial Sequence
  Synthetic oligonucleotide; CGG chr11 5268650 5268669 5268653 -
ttttttcatcaagttgtttt

SEQ ID NO: 43838 - DNA, 20 bp, Artificial Sequence
  Synthetic oligonucleotide; CAG chr11 5268601 5268620 5268604 -
ttattttgtcttttgcctaa

SEQ ID NO: 43839 - DNA, 20 bp, Artificial Sequence
  Synthetic oligonucleotide; TGG chr11 5268594 5268613 5268597 -
gtcttttgcctaacagctcc

SEQ ID NO: 43840 - DNA, 20 bp, Artificial Sequence
  Synthetic oligonucleotide; GGG chr11 5268593 5268612 5268596 -
tcttttgcctaacagctcct

SEQ ID NO: 43841 - DNA, 20 bp, Artificial Sequence
  Synthetic oligonucleotide; TGG chr11 5268582 5268601 5268585 -
acagctcctgggtaacgtga

SEQ ID NO: 43842 - DNA, 20 bp, Artificial Sequence
  Synthetic oligonucleotide; TGG chr11 5268570 5268589 5268573 -
taacgtgatggtgattattc

SEQ ID NO: 43843 - DNA, 20 bp, Artificial Sequence
  Synthetic oligonucleotide; TGG chr11 5268557 5268576 5268560 -
attattctggctactcactt

SEQ ID NO: 43844 - DNA, 20 bp, Artificial Sequence
  Synthetic oligonucleotide; AAG chr11 5268553 5268572 5268556 -
ttctggctactcactttggc

SEQ ID NO: 43845 - DNA, 20 bp, Artificial Sequence
  Synthetic oligonucleotide; AGG chr11 5268552 5268571 5268555 -
tctggctactcactttggca

SEQ ID NO: 43846 - DNA, 20 bp, Artificial Sequence
  Synthetic oligonucleotide; GAG chr11 5268550 5268569 5268553 -
tggctactcactttggcaag

SEQ ID NO: 43847 - DNA, 20 bp, Artificial Sequence
  Synthetic oligonucleotide; AAG chr11 5268537 5268556 5268540 -
tggcaaggagttcacccctg

SEQ ID NO: 43848 - DNA, 20 bp, Artificial Sequence
  Synthetic oligonucleotide; CAG chr11 5268532 5268551 5268535 -
aggagttcacccctgaagtg

SEQ ID NO: 43849 - DNA, 20 bp, Artificial Sequence
  Synthetic oligonucleotide; AGG chr11 5268531 5268550 5268534 -
ggagttcacccctgaagtgc

SEQ ID NO: 43850 - DNA, 20 bp, Artificial Sequence
  Synthetic oligonucleotide; TGG chr11 5268523 5268542 5268526 -
cccctgaagtgcaggctgcc

SEQ ID NO: 43851 - DNA, 20 bp, Artificial Sequence
  Synthetic oligonucleotide; CAG chr11 5268520 5268539 5268523 -
ctgaagtgcaggctgcctgg

SEQ ID NO: 43852 - DNA, 20 bp, Artificial Sequence
  Synthetic oligonucleotide; AAG chr11 5268517 5268536 5268520 -
aagtgcaggctgcctggcag

SEQ ID NO: 43853 - DNA, 20 bp, Artificial Sequence
  Synthetic oligonucleotide; TGG chr11 5268513 5268532 5268516 -
gcaggctgcctggcagaagc

SEQ ID NO: 43854 - DNA, 20 bp, Artificial Sequence
  Synthetic oligonucleotide; TGG chr11 5268489 5268508 5268492 -
gtctgctgtcgccattgccc

SEQ ID NO: 43855 - DNA, 20 bp, Artificial Sequence
  Synthetic oligonucleotide; AAG chr11 5268481 5268500 5268484 -
tcgccattgccctggcccat

SEQ ID NO: 43856 - DNA, 20 bp, Artificial Sequence
  Synthetic oligonucleotide; GAG chr11 5268471 5268490 5268474 -
cctggcccataagtaccact

SEQ ID NO: 43857 - DNA, 20 bp, Artificial Sequence
  Synthetic oligonucleotide; CAG chr11 5268460 5268479 5268463 -
agtaccactgagttctcttc

SEQ ID NO: 43858 - DNA, 20 bp, Artificial Sequence
  Synthetic oligonucleotide; CAG chr11 5268453 5268472 5268456 -
ctgagttctcttccagtttg

SEQ ID NO: 43859 - DNA, 20 bp, Artificial Sequence
  Synthetic oligonucleotide; AGG chr11 5268452 5268471 5268455 -
tgagttctcttccagtttgc

SEQ ID NO: 43860 - DNA, 20 bp, Artificial Sequence
  Synthetic oligonucleotide; TGG chr11 5268415 5268434 5268418 -
tgacaccctccttctgcaca

SEQ ID NO: 43861 - DNA, 20 bp, Artificial Sequence
  Synthetic oligonucleotide; GGG chr11 5268414 5268433 5268417 -
gacaccctccttctgcacat

SEQ ID NO: 43862 - DNA, 20 bp, Artificial Sequence
  Synthetic oligonucleotide; GGG chr11 5268413 5268432 5268416 -
acaccctccttctgcacatg

SEQ ID NO: 43863 - DNA, 20 bp, Artificial Sequence
  Synthetic oligonucleotide; TGG chr11 5268408 5268427 5268411 -
ctccttctgcacatggggac

SEQ ID NO: 43864 - DNA, 20 bp, Artificial Sequence
  Synthetic oligonucleotide; GGG chr11 5268407 5268426 5268410 -
tccttctgcacatggggact

SEQ ID NO: 43865 - DNA, 20 bp, Artificial Sequence
  Synthetic oligonucleotide; TGG chr11 5268402 5268421 5268405 -
ctgcacatggggactgggct

SEQ ID NO: 43866 - DNA, 20 bp, Artificial Sequence
  Synthetic oligonucleotide; GAG chr11 5268395 5268414 5268398 -
tggggactgggcttggcctt

SEQ ID NO: 43867 - DNA, 20 bp, Artificial Sequence
  Synthetic oligonucleotide; GAG chr11 5268393 5268412 5268396 -
gggactgggcttggccttga

SEQ ID NO: 43868 - DNA, 20 bp, Artificial Sequence
  Synthetic oligonucleotide; AAG chr11 5268389 5268408 5268392 -
ctgggcttggccttgagaga

SEQ ID NO: 43869 - DNA, 20 bp, Artificial Sequence
  Synthetic oligonucleotide; AAG chr11 5268372 5268391 5268375 -
agaaagccttctgtttaata

SEQ ID NO: 43870 - DNA, 20 bp, Artificial Sequence
  Synthetic oligonucleotide; CAG chr11 5268358 5268377 5268361 -
ttaataaagtacattttctt

SEQ ID NO: 43871 - DNA, 20 bp, Artificial Sequence
  Synthetic oligonucleotide; AAG chr11 5268306 5268325 5268309 -
atcttttactcttgtgttaa

SEQ ID NO: 43872 - DNA, 20 bp, Artificial Sequence
  Synthetic oligonucleotide; AGG chr11 5268305 5268324 5268308 -
tcttttactcttgtgttaaa

SEQ ID NO: 43873 - DNA, 20 bp, Artificial Sequence
  Synthetic oligonucleotide; AAG chr11 5268299 5268318 5268302 -
actcttgtgttaaaaggaaa

SEQ ID NO: 43874 - DNA, 20 bp, Artificial Sequence
  Synthetic oligonucleotide; TGG chr11 5268290 5268309 5268293 -
ttaaaaggaaaaagtgttca

SEQ ID NO: 43875 - DNA, 20 bp, Artificial Sequence
  Synthetic oligonucleotide; GGG chr11 5268289 5268308 5268292 -
taaaaggaaaaagtgttcat

SEQ ID NO: 43876 - DNA, 20 bp, Artificial Sequence
  Synthetic oligonucleotide; GAG chr11 5268284 5268303 5268287 -
ggaaaaagtgttcatgggct

SEQ ID NO: 43877 - DNA, 20 bp, Artificial Sequence
  Synthetic oligonucleotide; AGG chr11 5268283 5268302 5268286 -
gaaaaagtgttcatgggctg

SEQ ID NO: 43878 - DNA, 20 bp, Artificial Sequence
  Synthetic oligonucleotide; GGG chr11 5268282 5268301 5268285 -
aaaaagtgttcatgggctga

SEQ ID NO: 43879 - DNA, 20 bp, Artificial Sequence
  Synthetic oligonucleotide; TGG chr11 5268278 5268297 5268281 -
agtgttcatgggctgaggga

SEQ ID NO: 43880 - DNA, 20 bp, Artificial Sequence
  Synthetic oligonucleotide; GAG chr11 5268276 5268295 5268279 -
tgttcatgggctgagggatg

SEQ ID NO: 43881 - DNA, 20 bp, Artificial Sequence
  Synthetic oligonucleotide; GAG chr11 5268274 5268293 5268277 -
ttcatgggctgagggatgga

SEQ ID NO: 43882 - DNA, 20 bp, Artificial Sequence
  Synthetic oligonucleotide; TAG chr11 5268266 5268285 5268269 -
ctgagggatggagagaaaca

SEQ ID NO: 43883 - DNA, 20 bp, Artificial Sequence
  Synthetic oligonucleotide; AGG chr11 5268265 5268284 5268268 -
tgagggatggagagaaacat

SEQ ID NO: 43884 - DNA, 20 bp, Artificial Sequence
  Synthetic oligonucleotide; AAG chr11 5268262 5268281 5268265 -
gggatggagagaaacatagg

SEQ ID NO: 43885 - DNA, 20 bp, Artificial Sequence
  Synthetic oligonucleotide; AAG chr11 5268255 5268274 5268258 -
agagaaacataggaagaacc

SEQ ID NO: 43886 - DNA, 20 bp, Artificial Sequence
  Synthetic oligonucleotide; GAG chr11 5268253 5268272 5268256 -
agaaacataggaagaaccaa

SEQ ID NO: 43887 - DNA, 20 bp, Artificial Sequence
  Synthetic oligonucleotide; AAG chr11 5268243 5268262 5268246 -
gaagaaccaagagcttcctt

SEQ ID NO: 43888 - DNA, 20 bp, Artificial Sequence
  Synthetic oligonucleotide; TGG chr11 5268233 5268252 5268236 -
gagcttccttaagaaatgta

SEQ ID NO: 43889 - DNA, 20 bp, Artificial Sequence
  Synthetic oligonucleotide; GGG chr11 5268232 5268251 5268235 -
agcttccttaagaaatgtat

SEQ ID NO: 43890 - DNA, 20 bp, Artificial Sequence
  Synthetic oligonucleotide; GGG chr11 5268231 5268250 5268234 -
gcttccttaagaaatgtatg

SEQ ID NO: 43891 - DNA, 20 bp, Artificial Sequence
  Synthetic oligonucleotide; GGG chr11 5268230 5268249 5268233 -
cttccttaagaaatgtatgg

SEQ ID NO: 43892 - DNA, 20 bp, Artificial Sequence
  Synthetic oligonucleotide; TGG chr11 5268212 5268231 5268215 -
gggggcttgtaaaattaatg

SEQ ID NO: 43893 - DNA, 20 bp, Artificial Sequence
  Synthetic oligonucleotide; TGG chr11 5268203 5268222 5268206 -
taaaattaatgtggatgtta

SEQ ID NO: 43894 - DNA, 20 bp, Artificial Sequence
  Synthetic oligonucleotide; GGG chr11 5268202 5268221 5268205 -
aaaattaatgtggatgttat

SEQ ID NO: 43895 - DNA, 20 bp, Artificial Sequence
  Synthetic oligonucleotide; GAG chr11 5268200 5268219 5268203 -
aattaatgtggatgttatgg

SEQ ID NO: 43896 - DNA, 20 bp, Artificial Sequence
  Synthetic oligonucleotide; CAG chr11 5268192 5268211 5268195 -
tggatgttatgggagaattc

SEQ ID NO: 43897 - DNA, 20 bp, Artificial Sequence
  Synthetic oligonucleotide; AGG chr11 5268191 5268210 5268194 -
ggatgttatgggagaattcc

SEQ ID NO: 43898 - DNA, 20 bp, Artificial Sequence
  Synthetic oligonucleotide; AAG chr11 5268183 5268202 5268186 -
tgggagaattccaggattcc

SEQ ID NO: 43899 - DNA, 20 bp, Artificial Sequence
  Synthetic oligonucleotide; AGG chr11 5268182 5268201 5268185 -
gggagaattccaggattcca

SEQ ID NO: 43900 - DNA, 20 bp, Artificial Sequence
  Synthetic oligonucleotide; GAG chr11 5268180 5268199 5268183 -
gagaattccaggattccaag

SEQ ID NO: 43901 - DNA, 20 bp, Artificial Sequence
  Synthetic oligonucleotide; AGG chr11 5268179 5268198 5268182 -
agaattccaggattccaagg

SEQ ID NO: 43902 - DNA, 20 bp, Artificial Sequence
  Synthetic oligonucleotide; TGG chr11 5268167 5268186 5268170 -
ttccaaggaggatgatatga

SEQ ID NO: 43903 - DNA, 20 bp, Artificial Sequence
  Synthetic oligonucleotide; GAG chr11 5268165 5268184 5268168 -
ccaaggaggatgatatgatg

SEQ ID NO: 43904 - DNA, 20 bp, Artificial Sequence
  Synthetic oligonucleotide; CGG chr11 5268150 5268169 5268153 -
tgatggagaaaaatctttat

SEQ ID NO: 43905 - DNA, 20 bp, Artificial Sequence
  Synthetic oligonucleotide; GGG chr11 5268149 5268168 5268152 -
gatggagaaaaatctttatc

SEQ ID NO: 43906 - DNA, 20 bp, Artificial Sequence
  Synthetic oligonucleotide; GGG chr11 5268148 5268167 5268151 -
atggagaaaaatctttatcg

SEQ ID NO: 43907 - DNA, 20 bp, Artificial Sequence
  Synthetic oligonucleotide; TGG chr11 5268145 5268164 5268148 -
gagaaaaatctttatcgggg

SEQ ID NO: 43908 - DNA, 20 bp, Artificial Sequence
  Synthetic oligonucleotide; GGG chr11 5268144 5268163 5268147 -
agaaaaatctttatcggggt

SEQ ID NO: 43909 - DNA, 20 bp, Artificial Sequence
  Synthetic oligonucleotide; TGG chr11 5268137 5268156 5268140 -
tctttatcggggtgggaaaa

SEQ ID NO: 43910 - DNA, 20 bp, Artificial Sequence
  Synthetic oligonucleotide; AAG chr11 5268128 5268147 5268131 -
gggtgggaaaatggttaatt

SEQ ID NO: 43911 - DNA, 20 bp, Artificial Sequence
  Synthetic oligonucleotide; TGG chr11 5268125 5268144 5268128 -
tgggaaaatggttaattaag

SEQ ID NO: 43912 - DNA, 20 bp, Artificial Sequence
  Synthetic oligonucleotide; CAG chr11 5268121 5268140 5268124 -
aaaatggttaattaagtgga

SEQ ID NO: 43913 - DNA, 20 bp, Artificial Sequence
  Synthetic oligonucleotide; GAG chr11 5268119 5268138 5268122 -
aatggttaattaagtggaca

SEQ ID NO: 43914 - DNA, 20 bp, Artificial Sequence
  Synthetic oligonucleotide; TAG chr11 5268111 5268130 5268114 -
attaagtggacagagactcc

SEQ ID NO: 43915 - DNA, 20 bp, Artificial Sequence
  Synthetic oligonucleotide; AGG chr11 5268110 5268129 5268113 -
ttaagtggacagagactcct

SEQ ID NO: 43916 - DNA, 20 bp, Artificial Sequence
  Synthetic oligonucleotide; CAG chr11 5268107 5268126 5268110 -
agtggacagagactcctagg

SEQ ID NO: 43917 - DNA, 20 bp, Artificial Sequence
  Synthetic oligonucleotide; CGG chr11 5268092 5268111 5268095 -
ctaggcagtttttactgcac

SEQ ID NO: 43918 - DNA, 20 bp, Artificial Sequence
  Synthetic oligonucleotide; GGG chr11 5268091 5268110 5268094 -
taggcagtttttactgcacc

SEQ ID NO: 43919 - DNA, 20 bp, Artificial Sequence
  Synthetic oligonucleotide; GGG chr11 5268090 5268109 5268093 -
aggcagtttttactgcaccg

SEQ ID NO: 43920 - DNA, 20 bp, Artificial Sequence
  Synthetic oligonucleotide; AAG chr11 5268086 5268105 5268089 -
agtttttactgcaccgggga

SEQ ID NO: 43921 - DNA, 20 bp, Artificial Sequence
  Synthetic oligonucleotide; AAG chr11 5268083 5268102 5268086 -
ttttactgcaccggggaaag

SEQ ID NO: 43922 - DNA, 20 bp, Artificial Sequence
  Synthetic oligonucleotide; AGG chr11 5268082 5268101 5268085 -
tttactgcaccggggaaaga

SEQ ID NO: 43923 - DNA, 20 bp, Artificial Sequence
  Synthetic oligonucleotide; GAG chr11 5268080 5268099 5268083 -
tactgcaccggggaaagaag

SEQ ID NO: 43924 - DNA, 20 bp, Artificial Sequence
  Synthetic oligonucleotide; TAG chr11 5268073 5268092 5268076 -
ccggggaaagaaggagctgt

SEQ ID NO: 43925 - DNA, 20 bp, Artificial Sequence
  Synthetic oligonucleotide; TGG chr11 5268070 5268089 5268073 -
gggaaagaaggagctgttag

SEQ ID NO: 43926 - DNA, 20 bp, Artificial Sequence
  Synthetic oligonucleotide; GAG chr11 5268062 5268081 5268065 -
aggagctgttagtggtacct

SEQ ID NO: 43927 - DNA, 20 bp, Artificial Sequence
  Synthetic oligonucleotide; AAG chr11 5268058 5268077 5268061 -
gctgttagtggtacctgaga

SEQ ID NO: 43928 - DNA, 20 bp, Artificial Sequence
  Synthetic oligonucleotide; CAG chr11 5268055 5268074 5268058 -
gttagtggtacctgagaaag

SEQ ID NO: 43929 - DNA, 20 bp, Artificial Sequence
  Synthetic oligonucleotide; TGG chr11 5268047 5268066 5268050 -
tacctgagaaagcagatttg

SEQ ID NO: 43930 - DNA, 20 bp, Artificial Sequence
  Synthetic oligonucleotide; TAG chr11 5267995 5268014 5267998 -
caaaacaaaacaaaacttca

SEQ ID NO: 43931 - DNA, 20 bp, Artificial Sequence
  Synthetic oligonucleotide; AAG chr11 5267986 5268005 5267989 -
acaaaacttcatagatatcc

SEQ ID NO: 43932 - DNA, 20 bp, Artificial Sequence
  Synthetic oligonucleotide; TAG chr11 5267980 5267999 5267983 -
cttcatagatatccaagata

SEQ ID NO: 43933 - DNA, 20 bp, Artificial Sequence
  Synthetic oligonucleotide; AGG chr11 5267979 5267998 5267982 -
ttcatagatatccaagatat

SEQ ID NO: 43934 - DNA, 20 bp, Artificial Sequence
  Synthetic oligonucleotide; TAG chr11 5267975 5267994 5267978 -
tagatatccaagatataggc

SEQ ID NO: 43935 - DNA, 20 bp, Artificial Sequence
  Synthetic oligonucleotide; AAG chr11 5267937 5267956 5267940 -
ttactcttatttacattttg

SEQ ID NO: 43936 - DNA, 20 bp, Artificial Sequence
  Synthetic oligonucleotide; TAG chr11 5267934 5267953 5267937 -
ctcttatttacattttgaag

SEQ ID NO: 43937 - DNA, 20 bp, Artificial Sequence
  Synthetic oligonucleotide; TAG chr11 5267930 5267949 5267933 -
tatttacattttgaagtagc

SEQ ID NO: 43938 - DNA, 20 bp, Artificial Sequence
  Synthetic oligonucleotide; TGG chr11 5267900 5267919 5267903 -
catgttttatgaaattgatt

SEQ ID NO: 43939 - DNA, 20 bp, Artificial Sequence
  Synthetic oligonucleotide; GAG chr11 5267898 5267917 5267901 -
tgttttatgaaattgatttg

SEQ ID NO: 43940 - DNA, 20 bp, Artificial Sequence
  Synthetic oligonucleotide; AAG chr11 5267893 5267912 5267896 -
tatgaaattgatttggagat

SEQ ID NO: 43941 - DNA, 20 bp, Artificial Sequence
  Synthetic oligonucleotide; GAG chr11 5267888 5267907 5267891 -
aattgatttggagataagat

SEQ ID NO: 43942 - DNA, 20 bp, Artificial Sequence
  Synthetic oligonucleotide; TAG chr11 5267872 5267891 5267875 -
agatgagtgtgtatcaacaa

SEQ ID NO: 43943 - DNA, 20 bp, Artificial Sequence
  Synthetic oligonucleotide; AAG chr11 5267854 5267873 5267857 -
aatagcctgctctttccatg

SEQ ID NO: 43944 - DNA, 20 bp, Artificial Sequence
  Synthetic oligonucleotide; AGG chr11 5267853 5267872 5267856 -
atagcctgctctttccatga

SEQ ID NO: 43945 - DNA, 20 bp, Artificial Sequence
  Synthetic oligonucleotide; TGG chr11 5267836 5267855 5267839 -
tgaaggattccattatttca

SEQ ID NO: 43946 - DNA, 20 bp, Artificial Sequence
  Synthetic oligonucleotide; GGG chr11 5267835 5267854 5267838 -
gaaggattccattatttcat

SEQ ID NO: 43947 - DNA, 20 bp, Artificial Sequence
  Synthetic oligonucleotide; TAG chr11 5267831 5267850 5267834 -
gattccattatttcatgggt

SEQ ID NO: 43948 - DNA, 20 bp, Artificial Sequence
  Synthetic oligonucleotide; AAG chr11 5267825 5267844 5267828 -
attatttcatgggttagctg

SEQ ID NO: 43949 - DNA, 20 bp, Artificial Sequence
  Synthetic oligonucleotide; AAG chr11 5267820 5267839 5267823 -
ttcatgggttagctgaagct

SEQ ID NO: 43950 - DNA, 20 bp, Artificial Sequence
  Synthetic oligonucleotide; TAG chr11 5267786 5267805 5267789 -
cattgtgcattatcttctga

SEQ ID NO: 43951 - DNA, 20 bp, Artificial Sequence
  Synthetic oligonucleotide; AAG chr11 5267762 5267781 5267765 -
atgtaacatgcactaaaata

SEQ ID NO: 43952 - DNA, 20 bp, Artificial Sequence
  Synthetic oligonucleotide; TAG chr11 5267758 5267777 5267761 -
aacatgcactaaaataaagt

SEQ ID NO: 43953 - DNA, 20 bp, Artificial Sequence
  Synthetic oligonucleotide; GAG chr11 5267756 5267775 5267759 -
catgcactaaaataaagtta

SEQ ID NO: 43954 - DNA, 20 bp, Artificial Sequence
  Synthetic oligonucleotide; TAG chr11 5267752 5267771 5267755 -
cactaaaataaagttagagt

SEQ ID NO: 43955 - DNA, 20 bp, Artificial Sequence
  Synthetic oligonucleotide; AGG chr11 5267751 5267770 5267754 -
actaaaataaagttagagtt

SEQ ID NO: 43956 - DNA, 20 bp, Artificial Sequence
  Synthetic oligonucleotide; GAG chr11 5267744 5267763 5267747 -
taaagttagagttaggacct

SEQ ID NO: 43957 - DNA, 20 bp, Artificial Sequence
  Synthetic oligonucleotide; TGG chr11 5267741 5267760 5267744 -
agttagagttaggacctgag

SEQ ID NO: 43958 - DNA, 20 bp, Artificial Sequence
  Synthetic oligonucleotide; GGG chr11 5267740 5267759 5267743 -
gttagagttaggacctgagt

SEQ ID NO: 43959 - DNA, 20 bp, Artificial Sequence
  Synthetic oligonucleotide; AAG chr11 5267736 5267755 5267739 -
gagttaggacctgagtggga

SEQ ID NO: 43960 - DNA, 20 bp, Artificial Sequence
  Synthetic oligonucleotide; TGG chr11 5267729 5267748 5267732 -
gacctgagtgggaaagtttt

SEQ ID NO: 43961 - DNA, 20 bp, Artificial Sequence
  Synthetic oligonucleotide; GAG chr11 5267727 5267746 5267730 -
cctgagtgggaaagtttttg

SEQ ID NO: 43962 - DNA, 20 bp, Artificial Sequence
  Synthetic oligonucleotide; GAG chr11 5267725 5267744 5267728 -
tgagtgggaaagtttttgga

SEQ ID NO: 43963 - DNA, 20 bp, Artificial Sequence
  Synthetic oligonucleotide; AAG chr11 5267715 5267734 5267718 -
agtttttggagagtgtgatg

SEQ ID NO: 43964 - DNA, 20 bp, Artificial Sequence
  Synthetic oligonucleotide; TGG chr11 5267704 5267723 5267707 -
agtgtgatgaagactttccg

SEQ ID NO: 43965 - DNA, 20 bp, Artificial Sequence
  Synthetic oligonucleotide; GGG chr11 5267703 5267722 5267706 -
gtgtgatgaagactttccgt

SEQ ID NO: 43966 - DNA, 20 bp, Artificial Sequence
  Synthetic oligonucleotide; GAG chr11 5267701 5267720 5267704 -
gtgatgaagactttccgtgg

SEQ ID NO: 43967 - DNA, 20 bp, Artificial Sequence
  Synthetic oligonucleotide; TAG chr11 5267697 5267716 5267700 -
tgaagactttccgtgggaga

SEQ ID NO: 43968 - DNA, 20 bp, Artificial Sequence
  Synthetic oligonucleotide; AAG chr11 5267684 5267703 5267687 -
tgggagatagaatactaata

SEQ ID NO: 43969 - DNA, 20 bp, Artificial Sequence
  Synthetic oligonucleotide; AGG chr11 5267683 5267702 5267686 -
gggagatagaatactaataa

SEQ ID NO: 43970 - DNA, 20 bp, Artificial Sequence
  Synthetic oligonucleotide; CAG chr11 5267665 5267684 5267668 -
aaaggcttaaattctaaaac

SEQ ID NO: 43971 - DNA, 20 bp, Artificial Sequence
  Synthetic oligonucleotide; AAG chr11 5267661 5267680 5267664 -
gcttaaattctaaaaccagc

SEQ ID NO: 43972 - DNA, 20 bp, Artificial Sequence
  Synthetic oligonucleotide; TAG chr11 5267657 5267676 5267660 -
aaattctaaaaccagcaagc

SEQ ID NO: 43973 - DNA, 20 bp, Artificial Sequence
  Synthetic oligonucleotide; AGG chr11 5267656 5267675 5267659 -
aattctaaaaccagcaagct

SEQ ID NO: 43974 - DNA, 20 bp, Artificial Sequence
  Synthetic oligonucleotide; GGG chr11 5267655 5267674 5267658 -
attctaaaaccagcaagcta

SEQ ID NO: 43975 - DNA, 20 bp, Artificial Sequence
  Synthetic oligonucleotide; TGG chr11 5267632 5267651 5267635 -
cttcgtgacttgcatgaaac

SEQ ID NO: 43976 - DNA, 20 bp, Artificial Sequence
  Synthetic oligonucleotide; TGG chr11 5267624 5267643 5267627 -
cttgcatgaaactggctctc

SEQ ID NO: 43977 - DNA, 20 bp, Artificial Sequence
  Synthetic oligonucleotide; AAG chr11 5267621 5267640 5267624 -
gcatgaaactggctctctgg

SEQ ID NO: 43978 - DNA, 20 bp, Artificial Sequence
  Synthetic oligonucleotide; TAG chr11 5267618 5267637 5267621 -
tgaaactggctctctggaag

SEQ ID NO: 43979 - DNA, 20 bp, Artificial Sequence
  Synthetic oligonucleotide; AAG chr11 5267615 5267634 5267618 -
aactggctctctggaagtag

SEQ ID NO: 43980 - DNA, 20 bp, Artificial Sequence
  Synthetic oligonucleotide; AGG chr11 5267614 5267633 5267617 -
actggctctctggaagtaga

SEQ ID NO: 43981 - DNA, 20 bp, Artificial Sequence
  Synthetic oligonucleotide; GGG chr11 5267613 5267632 5267616 -
ctggctctctggaagtagaa

SEQ ID NO: 43982 - DNA, 20 bp, Artificial Sequence
  Synthetic oligonucleotide; GAG chr11 5267611 5267630 5267614 -
ggctctctggaagtagaagg

SEQ ID NO: 43983 - DNA, 20 bp, Artificial Sequence
  Synthetic oligonucleotide; GAG chr11 5267609 5267628 5267612 -
ctctctggaagtagaaggga

SEQ ID NO: 43984 - DNA, 20 bp, Artificial Sequence
  Synthetic oligonucleotide; AAG chr11 5267605 5267624 5267608 -
ctggaagtagaagggagagt

SEQ ID NO: 43985 - DNA, 20 bp, Artificial Sequence
  Synthetic oligonucleotide; TAG chr11 5267595 5267614 5267598 -
aagggagagtaagacatacg

SEQ ID NO: 43986 - DNA, 20 bp, Artificial Sequence
  Synthetic oligonucleotide; GAG chr11 5267593 5267612 5267596 -
gggagagtaagacatacgta

SEQ ID NO: 43987 - DNA, 20 bp, Artificial Sequence
  Synthetic oligonucleotide; AGG chr11 5267592 5267611 5267595 -
ggagagtaagacatacgtag

SEQ ID NO: 43988 - DNA, 20 bp, Artificial Sequence
  Synthetic oligonucleotide; TAG chr11 5267587 5267606 5267590 -
gtaagacatacgtagaggac

SEQ ID NO: 43989 - DNA, 20 bp, Artificial Sequence
  Synthetic oligonucleotide; AGG chr11 5267586 5267605 5267589 -
taagacatacgtagaggact

SEQ ID NO: 43990 - DNA, 20 bp, Artificial Sequence
  Synthetic oligonucleotide; AAG chr11 5267582 5267601 5267585 -
acatacgtagaggactagga

SEQ ID NO: 43991 - DNA, 20 bp, Artificial Sequence
  Synthetic oligonucleotide; CAG chr11 5267577 5267596 5267580 -
cgtagaggactaggaaagac

SEQ ID NO: 43992 - DNA, 20 bp, Artificial Sequence
  Synthetic oligonucleotide; TAG chr11 5267573 5267592 5267576 -
gaggactaggaaagaccaga

SEQ ID NO: 43993 - DNA, 20 bp, Artificial Sequence
  Synthetic oligonucleotide; CAG chr11 5267568 5267587 5267571 -
ctaggaaagaccagatagta

SEQ ID NO: 43994 - DNA, 20 bp, Artificial Sequence
  Synthetic oligonucleotide; AGG chr11 5267567 5267586 5267570 -
taggaaagaccagatagtac

SEQ ID NO: 43995 - DNA, 20 bp, Artificial Sequence
  Synthetic oligonucleotide; GGG chr11 5267566 5267585 5267569 -
aggaaagaccagatagtaca

SEQ ID NO: 43996 - DNA, 20 bp, Artificial Sequence
  Synthetic oligonucleotide; TGG chr11 5267561 5267580 5267564 -
agaccagatagtacagggcc

SEQ ID NO: 43997 - DNA, 20 bp, Artificial Sequence
  Synthetic oligonucleotide; AAG chr11 5267546 5267565 5267549 -
gggcctggctacaaaaatac

SEQ ID NO: 43998 - DNA, 20 bp, Artificial Sequence
  Synthetic oligonucleotide; AAG chr11 5267512 5267531 5267515 -
ctattgcaatactaaacgat

SEQ ID NO: 43999 - DNA, 20 bp, Artificial Sequence
  Synthetic oligonucleotide; TAG chr11 5267506 5267525 5267509 -
caatactaaacgataagcat

SEQ ID NO: 44000 - DNA, 20 bp, Artificial Sequence
  Synthetic oligonucleotide; AGG chr11 5267505 5267524 5267508 -
aatactaaacgataagcatt

SEQ ID NO: 44001 - DNA, 20 bp, Artificial Sequence
  Synthetic oligonucleotide; AAG chr11 5267497 5267516 5267500 -
acgataagcattaggatgtt

SEQ ID NO: 44002 - DNA, 20 bp, Artificial Sequence
  Synthetic oligonucleotide; CAG chr11 5267489 5267508 5267492 -
cattaggatgttaagtgact

SEQ ID NO: 44003 - DNA, 20 bp, Artificial Sequence
  Synthetic oligonucleotide; AGG chr11 5267488 5267507 5267491 -
attaggatgttaagtgactc

SEQ ID NO: 44004 - DNA, 20 bp, Artificial Sequence
  Synthetic oligonucleotide; AAG chr11 5267481 5267500 5267484 -
tgttaagtgactcaggaaat

SEQ ID NO: 44005 - DNA, 20 bp, Artificial Sequence
  Synthetic oligonucleotide; TGG chr11 5267474 5267493 5267477 -
tgactcaggaaataagattt

SEQ ID NO: 44006 - DNA, 20 bp, Artificial Sequence
  Synthetic oligonucleotide; GGG chr11 5267473 5267492 5267476 -
gactcaggaaataagatttt

SEQ ID NO: 44007 - DNA, 20 bp, Artificial Sequence
  Synthetic oligonucleotide; AAG chr11 5267467 5267486 5267470 -
ggaaataagattttgggaaa

SEQ ID NO: 44008 - DNA, 20 bp, Artificial Sequence
  Synthetic oligonucleotide; TGG chr11 5267442 5267461 5267445 -
atctgcttatgtgcacaaaa

SEQ ID NO: 44009 - DNA, 20 bp, Artificial Sequence
  Synthetic oligonucleotide; AAG chr11 5267435 5267454 5267438 -
tatgtgcacaaaatggattc

SEQ ID NO: 44010 - DNA, 20 bp, Artificial Sequence
  Synthetic oligonucleotide; CAG chr11 5267428 5267447 5267431 -
acaaaatggattcaagtttg

SEQ ID NO: 44011 - DNA, 20 bp, Artificial Sequence
  Synthetic oligonucleotide; TGG chr11 5267412 5267431 5267415 -
tttgcagataaaataaaata

SEQ ID NO: 44012 - DNA, 20 bp, Artificial Sequence
  Synthetic oligonucleotide; AAG chr11 5267399 5267418 5267402 -
taaaatatggatgatgattc

SEQ ID NO: 44013 - DNA, 20 bp, Artificial Sequence
  Synthetic oligonucleotide; AGG chr11 5267398 5267417 5267401 -
aaaatatggatgatgattca

SEQ ID NO: 44014 - DNA, 20 bp, Artificial Sequence
  Synthetic oligonucleotide; GGG chr11 5267397 5267416 5267400 -
aaatatggatgatgattcaa

SEQ ID NO: 44015 - DNA, 20 bp, Artificial Sequence
  Synthetic oligonucleotide; GGG chr11 5267396 5267415 5267399 -
aatatggatgatgattcaag

SEQ ID NO: 44016 - DNA, 20 bp, Artificial Sequence
  Synthetic oligonucleotide; CAG chr11 5267392 5267411 5267395 -
tggatgatgattcaagggga

SEQ ID NO: 44017 - DNA, 20 bp, Artificial Sequence
  Synthetic oligonucleotide; TGG chr11 5267383 5267402 5267386 -
attcaaggggacagatacaa

SEQ ID NO: 44018 - DNA, 20 bp, Artificial Sequence
  Synthetic oligonucleotide; AAG chr11 5267371 5267390 5267374 -
agatacaatggttcaaaccc

SEQ ID NO: 44019 - DNA, 20 bp, Artificial Sequence
  Synthetic oligonucleotide; GAG chr11 5267369 5267388 5267372 -
atacaatggttcaaacccaa

SEQ ID NO: 44020 - DNA, 20 bp, Artificial Sequence
  Synthetic oligonucleotide; AGG chr11 5267368 5267387 5267371 -
tacaatggttcaaacccaag

SEQ ID NO: 44021 - DNA, 20 bp, Artificial Sequence
  Synthetic oligonucleotide; GAG chr11 5267366 5267385 5267369 -
caatggttcaaacccaagag

SEQ ID NO: 44022 - DNA, 20 bp, Artificial Sequence
  Synthetic oligonucleotide; CAG chr11 5267363 5267382 5267366 -
tggttcaaacccaagaggag

SEQ ID NO: 44023 - DNA, 20 bp, Artificial Sequence
  Synthetic oligonucleotide; GAG chr11 5267359 5267378 5267362 -
tcaaacccaagaggagcagt

SEQ ID NO: 44024 - DNA, 20 bp, Artificial Sequence
  Synthetic oligonucleotide; TGG chr11 5267352 5267371 5267355 -
caagaggagcagtgagtctg

SEQ ID NO: 44025 - DNA, 20 bp, Artificial Sequence
  Synthetic oligonucleotide; AAG chr11 5267343 5267362 5267346 -
cagtgagtctgtggaatttg

SEQ ID NO: 44026 - DNA, 20 bp, Artificial Sequence
  Synthetic oligonucleotide; AGG chr11 5267342 5267361 5267345 -
agtgagtctgtggaatttga

SEQ ID NO: 44027 - DNA, 20 bp, Artificial Sequence
  Synthetic oligonucleotide; TGG chr11 5267338 5267357 5267341 -
agtctgtggaatttgaagga

SEQ ID NO: 44028 - DNA, 20 bp, Artificial Sequence
  Synthetic oligonucleotide; AAG chr11 5267332 5267351 5267335 -
tggaatttgaaggatggaca

SEQ ID NO: 44029 - DNA, 20 bp, Artificial Sequence
  Synthetic oligonucleotide; AGG chr11 5267331 5267350 5267334 -
ggaatttgaaggatggacaa

SEQ ID NO: 44030 - DNA, 20 bp, Artificial Sequence
  Synthetic oligonucleotide; TGG chr11 5267328 5267347 5267331 -
atttgaaggatggacaaagg

SEQ ID NO: 44031 - DNA, 20 bp, Artificial Sequence
  Synthetic oligonucleotide; GGG chr11 5267327 5267346 5267330 -
tttgaaggatggacaaaggt

SEQ ID NO: 44032 - DNA, 20 bp, Artificial Sequence
  Synthetic oligonucleotide; GGG chr11 5267326 5267345 5267329 -
ttgaaggatggacaaaggtg

SEQ ID NO: 44033 - DNA, 20 bp, Artificial Sequence
  Synthetic oligonucleotide; GAG chr11 5267322 5267341 5267325 -
aggatggacaaaggtggggt

SEQ ID NO: 44034 - DNA, 20 bp, Artificial Sequence
  Synthetic oligonucleotide; AAG chr11 5267318 5267337 5267321 -
tggacaaaggtggggtgaga

SEQ ID NO: 44035 - DNA, 20 bp, Artificial Sequence
  Synthetic oligonucleotide; TAG chr11 5267312 5267331 5267315 -
aaggtggggtgagaaagaca

SEQ ID NO: 44036 - DNA, 20 bp, Artificial Sequence
  Synthetic oligonucleotide; TGG chr11 5267295 5267314 5267298 -
acatagtattcgactgactg

SEQ ID NO: 44037 - DNA, 20 bp, Artificial Sequence
  Synthetic oligonucleotide; GGG chr11 5267294 5267313 5267297 -
catagtattcgactgactgt

SEQ ID NO: 44038 - DNA, 20 bp, Artificial Sequence
  Synthetic oligonucleotide; GAG chr11 5267292 5267311 5267295 -
tagtattcgactgactgtgg

SEQ ID NO: 44039 - DNA, 20 bp, Artificial Sequence
  Synthetic oligonucleotide; GAG chr11 5267287 5267306 5267290 -
ttcgactgactgtgggagat

SEQ ID NO: 44040 - DNA, 20 bp, Artificial Sequence
  Synthetic oligonucleotide; AAG chr11 5267284 5267303 5267287 -
gactgactgtgggagatgag

SEQ ID NO: 44041 - DNA, 20 bp, Artificial Sequence
  Synthetic oligonucleotide; AGG chr11 5267283 5267302 5267286 -
actgactgtgggagatgaga

SEQ ID NO: 44042 - DNA, 20 bp, Artificial Sequence
  Synthetic oligonucleotide; AAG chr11 5267280 5267299 5267283 -
gactgtgggagatgagaagg

SEQ ID NO: 44043 - DNA, 20 bp, Artificial Sequence
  Synthetic oligonucleotide; AAG chr11 5267277 5267296 5267280 -
tgtgggagatgagaaggaag

SEQ ID NO: 44044 - DNA, 20 bp, Artificial Sequence
  Synthetic oligonucleotide; AGG chr11 5267276 5267295 5267279 -
gtgggagatgagaaggaaga

SEQ ID NO: 44045 - DNA, 20 bp, Artificial Sequence
  Synthetic oligonucleotide; GAG chr11 5267274 5267293 5267277 -
gggagatgagaaggaagaag

SEQ ID NO: 44046 - DNA, 20 bp, Artificial Sequence
  Synthetic oligonucleotide; AGG chr11 5267273 5267292 5267276 -
ggagatgagaaggaagaagg

SEQ ID NO: 44047 - DNA, 20 bp, Artificial Sequence
  Synthetic oligonucleotide; AAG chr11 5267256 5267275 5267259 -
aggaggtgataaatgactga

SEQ ID NO: 44048 - DNA, 20 bp, Artificial Sequence
  Synthetic oligonucleotide; CAG chr11 5267249 5267268 5267252 -
gataaatgactgaaagctcc

SEQ ID NO: 44049 - DNA, 20 bp, Artificial Sequence
  Synthetic oligonucleotide; TGG chr11 5267244 5267263 5267247 -
atgactgaaagctcccagac

SEQ ID NO: 44050 - DNA, 20 bp, Artificial Sequence
  Synthetic oligonucleotide; AAG chr11 5267239 5267258 5267242 -
tgaaagctcccagactggtg

SEQ ID NO: 44051 - DNA, 20 bp, Artificial Sequence
  Synthetic oligonucleotide; CAG chr11 5267232 5267251 5267235 -
tcccagactggtgaagataa

SEQ ID NO: 44052 - DNA, 20 bp, Artificial Sequence
  Synthetic oligonucleotide; AGG chr11 5267231 5267250 5267234 -
cccagactggtgaagataac

SEQ ID NO: 44053 - DNA, 20 bp, Artificial Sequence
  Synthetic oligonucleotide; GAG chr11 5267229 5267248 5267232 -
cagactggtgaagataacag

SEQ ID NO: 44054 - DNA, 20 bp, Artificial Sequence
  Synthetic oligonucleotide; AGG chr11 5267228 5267247 5267231 -
agactggtgaagataacagg

SEQ ID NO: 44055 - DNA, 20 bp, Artificial Sequence
  Synthetic oligonucleotide; TGG chr11 5267209 5267228 5267212 -
gaggaaaccatgcactgacc

SEQ ID NO: 44056 - DNA, 20 bp, Artificial Sequence
  Synthetic oligonucleotide; AAG chr11 5267191 5267210 5267194 -
cctggtgactctcatgtgtg

SEQ ID NO: 44057 - DNA, 20 bp, Artificial Sequence
  Synthetic oligonucleotide; AGG chr11 5267190 5267209 5267193 -
ctggtgactctcatgtgtga

SEQ ID NO: 44058 - DNA, 20 bp, Artificial Sequence
  Synthetic oligonucleotide; GGG chr11 5267189 5267208 5267192 -
tggtgactctcatgtgtgaa

SEQ ID NO: 44059 - DNA, 20 bp, Artificial Sequence
  Synthetic oligonucleotide; TAG chr11 5267186 5267205 5267189 -
tgactctcatgtgtgaaggg

SEQ ID NO: 44060 - DNA, 20 bp, Artificial Sequence
  Synthetic oligonucleotide; GAG chr11 5267184 5267203 5267187 -
actctcatgtgtgaagggta

SEQ ID NO: 44061 - DNA, 20 bp, Artificial Sequence
  Synthetic oligonucleotide; AGG chr11 5267183 5267202 5267186 -
ctctcatgtgtgaagggtag

SEQ ID NO: 44062 - DNA, 20 bp, Artificial Sequence
  Synthetic oligonucleotide; GGG chr11 5267182 5267201 5267185 -
tctcatgtgtgaagggtaga

SEQ ID NO: 44063 - DNA, 20 bp, Artificial Sequence
  Synthetic oligonucleotide; CAG chr11 5267172 5267191 5267175 -
gaagggtagagggatattaa

SEQ ID NO: 44064 - DNA, 20 bp, Artificial Sequence
  Synthetic oligonucleotide; TAG chr11 5267159 5267178 5267162 -
atattaacagatttactttt

SEQ ID NO: 44065 - DNA, 20 bp, Artificial Sequence
  Synthetic oligonucleotide; AGG chr11 5267158 5267177 5267161 -
tattaacagatttacttttt

SEQ ID NO: 44066 - DNA, 20 bp, Artificial Sequence
  Synthetic oligonucleotide; AAG chr11 5267155 5267174 5267158 -
taacagatttactttttagg

SEQ ID NO: 44067 - DNA, 20 bp, Artificial Sequence
  Synthetic oligonucleotide; TAG chr11 5267149 5267168 5267152 -
atttactttttaggaagtgc

SEQ ID NO: 44068 - DNA, 20 bp, Artificial Sequence
  Synthetic oligonucleotide; TGG chr11 5267144 5267163 5267147 -
ctttttaggaagtgctagat

SEQ ID NO: 44069 - DNA, 20 bp, Artificial Sequence
  Synthetic oligonucleotide; CAG chr11 5267140 5267159 5267143 -
ttaggaagtgctagattggt

SEQ ID NO: 44070 - DNA, 20 bp, Artificial Sequence
  Synthetic oligonucleotide; AGG chr11 5267139 5267158 5267142 -
taggaagtgctagattggtc

SEQ ID NO: 44071 - DNA, 20 bp, Artificial Sequence
  Synthetic oligonucleotide; GGG chr11 5267138 5267157 5267141 -
aggaagtgctagattggtca

SEQ ID NO: 44072 - DNA, 20 bp, Artificial Sequence
  Synthetic oligonucleotide; GAG chr11 5267136 5267155 5267139 -
gaagtgctagattggtcagg

SEQ ID NO: 44073 - DNA, 20 bp, Artificial Sequence
  Synthetic oligonucleotide; CAG chr11 5267123 5267142 5267126 -
ggtcagggagttttgacctt

SEQ ID NO: 44074 - DNA, 20 bp, Artificial Sequence
  Synthetic oligonucleotide; AGG chr11 5267122 5267141 5267125 -
gtcagggagttttgaccttc

SEQ ID NO: 44075 - DNA, 20 bp, Artificial Sequence
  Synthetic oligonucleotide; AAG chr11 5267101 5267120 5267104 -
ggtcttgtgtctttcatatc

SEQ ID NO: 44076 - DNA, 20 bp, Artificial Sequence
  Synthetic oligonucleotide; AGG chr11 5267100 5267119 5267103 -
gtcttgtgtctttcatatca

SEQ ID NO: 44077 - DNA, 20 bp, Artificial Sequence
  Synthetic oligonucleotide; AAG chr11 5267081 5267100 5267084 -
aaggaacctttgcattttcc

SEQ ID NO: 44078 - DNA, 20 bp, Artificial Sequence
  Synthetic oligonucleotide; TAG chr11 5267077 5267096 5267080 -
aacctttgcattttccaagt

SEQ ID NO: 44079 - DNA, 20 bp, Artificial Sequence
  Synthetic oligonucleotide; GAG chr11 5267075 5267094 5267078 -
cctttgcattttccaagtta

SEQ ID NO: 44080 - DNA, 20 bp, Artificial Sequence
  Synthetic oligonucleotide; TGG chr11 5267062 5267081 5267065 -
caagttagagtgccatattt

SEQ ID NO: 44081 - DNA, 20 bp, Artificial Sequence
  Synthetic oligonucleotide; TAG chr11 5267044 5267063 5267047 -
tttggcaaatataactttat

SEQ ID NO: 44082 - DNA, 20 bp, Artificial Sequence
  Synthetic oligonucleotide; TAG chr11 5267033 5267052 5267036 -
taactttattagtaatttta

SEQ ID NO: 44083 - DNA, 20 bp, Artificial Sequence
  Synthetic oligonucleotide; CAG chr11 5267015 5267034 5267018 -
tatagtgctctcacattgat

SEQ ID NO: 44084 - DNA, 20 bp, Artificial Sequence
  Synthetic oligonucleotide; TGG chr11 5266984 5267003 5266987 -
ctgtgaattacttttgaatt

SEQ ID NO: 44085 - DNA, 20 bp, Artificial Sequence
  Synthetic oligonucleotide; CAG chr11 5266970 5266989 5266973 -
tgaatttggctgtatatatc

SEQ ID NO: 44086 - DNA, 20 bp, Artificial Sequence
  Synthetic oligonucleotide; TGG chr11 5266963 5266982 5266966 -
ggctgtatatatccagaata

SEQ ID NO: 44087 - DNA, 20 bp, Artificial Sequence
  Synthetic oligonucleotide; GGG chr11 5266962 5266981 5266965 -
gctgtatatatccagaatat

SEQ ID NO: 44088 - DNA, 20 bp, Artificial Sequence
  Synthetic oligonucleotide; GAG chr11 5266960 5266979 5266963 -
tgtatatatccagaatatgg

SEQ ID NO: 44089 - DNA, 20 bp, Artificial Sequence
  Synthetic oligonucleotide; GAG chr11 5266958 5266977 5266961 -
tatatatccagaatatggga

SEQ ID NO: 44090 - DNA, 20 bp, Artificial Sequence
  Synthetic oligonucleotide; GAG chr11 5266956 5266975 5266959 -
tatatccagaatatgggaga

SEQ ID NO: 44091 - DNA, 20 bp, Artificial Sequence
  Synthetic oligonucleotide; TAG chr11 5266939 5266958 5266942 -
agagagacaaataattattg

SEQ ID NO: 44092 - DNA, 20 bp, Artificial Sequence
  Synthetic oligonucleotide; CAG chr11 5266933 5266952 5266936 -
acaaataattattgtagttg

SEQ ID NO: 44093 - DNA, 20 bp, Artificial Sequence
  Synthetic oligonucleotide; AGG chr11 5266932 5266951 5266935 -
caaataattattgtagttgc

SEQ ID NO: 44094 - DNA, 20 bp, Artificial Sequence
  Synthetic oligonucleotide; TGG chr11 5266916 5266935 5266919 -
ttgcaggctatcaacaatac

SEQ ID NO: 44095 - DNA, 20 bp, Artificial Sequence
  Synthetic oligonucleotide; GAG chr11 5266906 5266925 5266909 -
tcaacaatactggtctctct

SEQ ID NO: 44096 - DNA, 20 bp, Artificial Sequence
  Synthetic oligonucleotide; CAG chr11 5266875 5266894 5266878 -
cctttcaatatgcccataaa

SEQ ID NO: 44097 - DNA, 20 bp, Artificial Sequence
  Synthetic oligonucleotide; GAG chr11 5266873 5266892 5266876 -
tttcaatatgcccataaaca

SEQ ID NO: 44098 - DNA, 20 bp, Artificial Sequence
  Synthetic oligonucleotide; CAG chr11 5266866 5266885 5266869 -
atgcccataaacagagtaaa

SEQ ID NO: 44099 - DNA, 20 bp, Artificial Sequence
  Synthetic oligonucleotide; AGG chr11 5266865 5266884 5266868 -
tgcccataaacagagtaaac

SEQ ID NO: 44100 - DNA, 20 bp, Artificial Sequence
  Synthetic oligonucleotide; GGG chr11 5266864 5266883 5266867 -
gcccataaacagagtaaaca

SEQ ID NO: 44101 - DNA, 20 bp, Artificial Sequence
  Synthetic oligonucleotide; TGG chr11 5266853 5266872 5266856 -
gagtaaacagggattattca

SEQ ID NO: 44102 - DNA, 20 bp, Artificial Sequence
  Synthetic oligonucleotide; TAG chr11 5266833 5266852 5266836 -
tggcactaaatattttcacc

SEQ ID NO: 44103 - DNA, 20 bp, Artificial Sequence
  Synthetic oligonucleotide; CAG chr11 5266829 5266848 5266832 -
actaaatattttcacctagt

SEQ ID NO: 44104 - DNA, 20 bp, Artificial Sequence
  Synthetic oligonucleotide; TGG chr11 5266818 5266837 5266821 -
tcacctagtcagtcaacaaa

SEQ ID NO: 44105 - DNA, 20 bp, Artificial Sequence
  Synthetic oligonucleotide; GGG chr11 5266817 5266836 5266820 -
cacctagtcagtcaacaaat

SEQ ID NO: 44106 - DNA, 20 bp, Artificial Sequence
  Synthetic oligonucleotide; GAG chr11 5266815 5266834 5266818 -
cctagtcagtcaacaaatgg

SEQ ID NO: 44107 - DNA, 20 bp, Artificial Sequence
  Synthetic oligonucleotide; TGG chr11 5266775 5266794 5266778 -
tacatatttttatatattta

SEQ ID NO: 44108 - DNA, 20 bp, Artificial Sequence
  Synthetic oligonucleotide; GGG chr11 5266774 5266793 5266777 -
acatatttttatatatttat

SEQ ID NO: 44109 - DNA, 20 bp, Artificial Sequence
  Synthetic oligonucleotide; GGG chr11 5266773 5266792 5266776 -
catatttttatatatttatg

SEQ ID NO: 44110 - DNA, 20 bp, Artificial Sequence
  Synthetic oligonucleotide; TAG chr11 5266749 5266768 5266752 -
acatgtgatacttacatgcc

SEQ ID NO: 44111 - DNA, 20 bp, Artificial Sequence
  Synthetic oligonucleotide; AAG chr11 5266732 5266751 5266735 -
gcctagaacatgtgatgatt

SEQ ID NO: 44112 - DNA, 20 bp, Artificial Sequence
  Synthetic oligonucleotide; TAG chr11 5266727 5266746 5266730 -
gaacatgtgatgattaagtc

SEQ ID NO: 44113 - DNA, 20 bp, Artificial Sequence
  Synthetic oligonucleotide; TAG chr11 5266719 5266738 5266722 -
gatgattaagtctagatatt

SEQ ID NO: 44114 - DNA, 20 bp, Artificial Sequence
  Synthetic oligonucleotide; AGG chr11 5266718 5266737 5266721 -
atgattaagtctagatattt

SEQ ID NO: 44115 - DNA, 20 bp, Artificial Sequence
  Synthetic oligonucleotide; GAG chr11 5266701 5266720 5266704 -
tttaggatatccattgcttt

SEQ ID NO: 44116 - DNA, 20 bp, Artificial Sequence
  Synthetic oligonucleotide; GAG chr11 5266677 5266696 5266680 -
atttatcatttctatgtatt

SEQ ID NO: 44117 - DNA, 20 bp, Artificial Sequence
  Synthetic oligonucleotide; TAG chr11 5266653 5266672 5266656 -
aaatttcaaatcctcatttc

SEQ ID NO: 44118 - DNA, 20 bp, Artificial Sequence
  Synthetic oligonucleotide; TAG chr11 5266628 5266647 5266631 -
attttgaaatatataataaa

SEQ ID NO: 44119 - DNA, 20 bp, Artificial Sequence
  Synthetic oligonucleotide; TAG chr11 5266615 5266634 5266618 -
taataaatagtaattaacta

SEQ ID NO: 44120 - DNA, 20 bp, Artificial Sequence
  Synthetic oligonucleotide; TGG chr11 5266586 5266605 5266589 -
tactcaaatatcaaacatta

SEQ ID NO: 44121 - DNA, 20 bp, Artificial Sequence
  Synthetic oligonucleotide; CAG chr11 5266502 5266521 5266505 -
atacacactcacactttttc

SEQ ID NO: 44122 - DNA, 20 bp, Artificial Sequence
  Synthetic oligonucleotide; GAG chr11 5266464 5266483 5266467 -
attctactctctaccaccat

SEQ ID NO: 44123 - DNA, 20 bp, Artificial Sequence
  Synthetic oligonucleotide; TAG chr11 5266450 5266469 5266453 -
caccatgagacccacttttt

SEQ ID NO: 44124 - DNA, 20 bp, Artificial Sequence
  Synthetic oligonucleotide; CAG chr11 5266441 5266460 5266444 -
acccacttttttagctccca

SEQ ID NO: 44125 - DNA, 20 bp, Artificial Sequence
  Synthetic oligonucleotide; TGG chr11 5266402 5266421 5266405 -
gatatttgactttctgtatc

SEQ ID NO: 44126 - DNA, 20 bp, Artificial Sequence
  Synthetic oligonucleotide; TGG chr11 5266377 5266396 5266380 -
tattttattatctatctctt

SEQ ID NO: 44127 - DNA, 20 bp, Artificial Sequence
  Synthetic oligonucleotide; AAG chr11 5266368 5266387 5266371 -
atctatctctttggcatacc

SEQ ID NO: 44128 - DNA, 20 bp, Artificial Sequence
  Synthetic oligonucleotide; GAG chr11 5266366 5266385 5266369 -
ctatctctttggcataccaa

SEQ ID NO: 44129 - DNA, 20 bp, Artificial Sequence
  Synthetic oligonucleotide; CAG chr11 5266345 5266364 5266348 -
agtttgtttttgttctgctt

SEQ ID NO: 44130 - DNA, 20 bp, Artificial Sequence
  Synthetic oligonucleotide; AGG chr11 5266344 5266363 5266347 -
gtttgtttttgttctgcttc

SEQ ID NO: 44131 - DNA, 20 bp, Artificial Sequence
  Synthetic oligonucleotide; GGG chr11 5266343 5266362 5266346 -
tttgtttttgttctgcttca

SEQ ID NO: 44132 - DNA, 20 bp, Artificial Sequence
  Synthetic oligonucleotide; TGG chr11 5266317 5266336 5266320 -
tcaattaacataatgacctc

SEQ ID NO: 44133 - DNA, 20 bp, Artificial Sequence
  Synthetic oligonucleotide; AAG chr11 5266289 5266308 5266292 -
tccatgttgctacaaatgac

SEQ ID NO: 44134 - DNA, 20 bp, Artificial Sequence
  Synthetic oligonucleotide; TGG chr11 5266270 5266289 5266273 -
caagatttcattctttttca

SEQ ID NO: 44135 - DNA, 20 bp, Artificial Sequence
  Synthetic oligonucleotide; TAG chr11 5266262 5266281 5266265 -
cattctttttcatggcaaaa

SEQ ID NO: 44136 - DNA, 20 bp, Artificial Sequence
  Synthetic oligonucleotide; TAG chr11 5266217 5266236 5266220 -
ttaatccgttcatctgttga

SEQ ID NO: 44137 - DNA, 20 bp, Artificial Sequence
  Synthetic oligonucleotide; TAG chr11 5266209 5266228 5266212 -
ttcatctgttgatagacact

SEQ ID NO: 44138 - DNA, 20 bp, Artificial Sequence
  Synthetic oligonucleotide; AGG chr11 5266208 5266227 5266211 -
tcatctgttgatagacactt

SEQ ID NO: 44139 - DNA, 20 bp, Artificial Sequence
  Synthetic oligonucleotide; TAG chr11 5266178 5266197 5266181 -
caaaccttaactattgtgaa

SEQ ID NO: 44140 - DNA, 20 bp, Artificial Sequence
  Synthetic oligonucleotide; GAG chr11 5266160 5266179 5266163 -
aatagtgcttcaataaacat

SEQ ID NO: 44141 - DNA, 20 bp, Artificial Sequence
  Synthetic oligonucleotide; TGG chr11 5266143 5266162 5266146 -
catgagtgtaatgtgtccat

SEQ ID NO: 44142 - DNA, 20 bp, Artificial Sequence
  Synthetic oligonucleotide; TGG chr11 5266119 5266138 5266122 -
tatactgatttcctttcttt

SEQ ID NO: 44143 - DNA, 20 bp, Artificial Sequence
  Synthetic oligonucleotide; TAG chr11 5266104 5266123 5266107 -
tcttttggataaataaccac

SEQ ID NO: 44144 - DNA, 20 bp, Artificial Sequence
  Synthetic oligonucleotide; GAG chr11 5266100 5266119 5266103 -
ttggataaataaccactagt

SEQ ID NO: 44145 - DNA, 20 bp, Artificial Sequence
  Synthetic oligonucleotide; TGG chr11 5266092 5266111 5266095 -
ataaccactagtgagattgc

SEQ ID NO: 44146 - DNA, 20 bp, Artificial Sequence
  Synthetic oligonucleotide; TAG chr11 5266080 5266099 5266083 -
gagattgctggattgtatga

SEQ ID NO: 44147 - DNA, 20 bp, Artificial Sequence
  Synthetic oligonucleotide; TAG chr11 5266068 5266087 5266071 -
ttgtatgatagttctgtttt

SEQ ID NO: 44148 - DNA, 20 bp, Artificial Sequence
  Synthetic oligonucleotide; GAG chr11 5266059 5266078 5266062 -
agttctgtttttagtttact

SEQ ID NO: 44149 - DNA, 20 bp, Artificial Sequence
  Synthetic oligonucleotide; TGG chr11 5266032 5266051 5266035 -
cttcatactgttttccataa

SEQ ID NO: 44150 - DNA, 20 bp, Artificial Sequence
  Synthetic oligonucleotide; CAG chr11 5266004 5266023 5266007 -
ctattttacattcccaccaa

SEQ ID NO: 44151 - DNA, 20 bp, Artificial Sequence
  Synthetic oligonucleotide; AAG chr11 5265996 5266015 5265999 -
cattcccaccaacagtgtgt

SEQ ID NO: 44152 - DNA, 20 bp, Artificial Sequence
  Synthetic oligonucleotide; AAG chr11 5265992 5266011 5265995 -
cccaccaacagtgtgtaaga

SEQ ID NO: 44153 - DNA, 20 bp, Artificial Sequence
  Synthetic oligonucleotide; GAG chr11 5265990 5266009 5265993 -
caccaacagtgtgtaagaaa

SEQ ID NO: 44154 - DNA, 20 bp, Artificial Sequence
  Synthetic oligonucleotide; AAG chr11 5265964 5265983 5265967 -
ccttttctccatatcctcac

SEQ ID NO: 44155 - DNA, 20 bp, Artificial Sequence
  Synthetic oligonucleotide; AGG chr11 5265963 5265982 5265966 -
cttttctccatatcctcaca

SEQ ID NO: 44156 - DNA, 20 bp, Artificial Sequence
  Synthetic oligonucleotide; TAG chr11 5265932 5265951 5265935 -
ttttttgtcttttttgttaa

SEQ ID NO: 44157 - DNA, 20 bp, Artificial Sequence
  Synthetic oligonucleotide; TAG chr11 5265919 5265938 5265922 -
ttgttaatagccgttttaac

SEQ ID NO: 44158 - DNA, 20 bp, Artificial Sequence
  Synthetic oligonucleotide; GAG chr11 5265917 5265936 5265920 -
gttaatagccgttttaacta

SEQ ID NO: 44159 - DNA, 20 bp, Artificial Sequence
  Synthetic oligonucleotide; AAG chr11 5265913 5265932 5265916 -
atagccgttttaactagagt

SEQ ID NO: 44160 - DNA, 20 bp, Artificial Sequence
  Synthetic oligonucleotide; TAG chr11 5265910 5265929 5265913 -
gccgttttaactagagtaag

SEQ ID NO: 44161 - DNA, 20 bp, Artificial Sequence
  Synthetic oligonucleotide; TAG chr11 5265896 5265915 5265899 -
agtaagtagatatctcattg

SEQ ID NO: 44162 - DNA, 20 bp, Artificial Sequence
  Synthetic oligonucleotide; TAG chr11 5265868 5265887 5265871 -
atttgcatttccctgatcat

SEQ ID NO: 44163 - DNA, 20 bp, Artificial Sequence
  Synthetic oligonucleotide; GAG chr11 5265858 5265877 5265861 -
ccctgatcattagtgatgtt

SEQ ID NO: 44164 - DNA, 20 bp, Artificial Sequence
  Synthetic oligonucleotide; TGG chr11 5265836 5265855 5265839 -
gaattttttcatatgtttgt

SEQ ID NO: 44165 - DNA, 20 bp, Artificial Sequence
  Synthetic oligonucleotide; GAG chr11 5265813 5265832 5265816 -
tcatttgtatatctttttct

SEQ ID NO: 44166 - DNA, 20 bp, Artificial Sequence
  Synthetic oligonucleotide; TAG chr11 5265791 5265810 5265794 -
gaattgtctgttcatgtcct

SEQ ID NO: 44167 - DNA, 20 bp, Artificial Sequence
  Synthetic oligonucleotide; TGG chr11 5265776 5265795 5265779 -
gtccttagcctactttttat

SEQ ID NO: 44168 - DNA, 20 bp, Artificial Sequence
  Synthetic oligonucleotide; GGG chr11 5265775 5265794 5265778 -
tccttagcctactttttatt

SEQ ID NO: 44169 - DNA, 20 bp, Artificial Sequence
  Synthetic oligonucleotide; TAG chr11 5265732 5265751 5265735 -
taatctatttgtgttcattt

SEQ ID NO: 44170 - DNA, 20 bp, Artificial Sequence
  Synthetic oligonucleotide; GAG chr11 5265730 5265749 5265733 -
atctatttgtgttcatttta

SEQ ID NO: 44171 - DNA, 20 bp, Artificial Sequence
  Synthetic oligonucleotide; TGG chr11 5265725 5265744 5265728 -
tttgtgttcattttagagcc

SEQ ID NO: 44172 - DNA, 20 bp, Artificial Sequence
  Synthetic oligonucleotide; CAG chr11 5265707 5265726 5265710 -
cctggatattattcttttgt

SEQ ID NO: 44173 - DNA, 20 bp, Artificial Sequence
  Synthetic oligonucleotide; TAG chr11 5265699 5265718 5265702 -
ttattcttttgtcagatgta

SEQ ID NO: 44174 - DNA, 20 bp, Artificial Sequence
  Synthetic oligonucleotide; AAG chr11 5265690 5265709 5265693 -
tgtcagatgtatagattgtg

SEQ ID NO: 44175 - DNA, 20 bp, Artificial Sequence
  Synthetic oligonucleotide; TGG chr11 5265671 5265690 5265674 -
gaagattttctcccactctg

SEQ ID NO: 44176 - DNA, 20 bp, Artificial Sequence
  Synthetic oligonucleotide; GGG chr11 5265670 5265689 5265673 -
aagattttctcccactctgt

SEQ ID NO: 44177 - DNA, 20 bp, Artificial Sequence
  Synthetic oligonucleotide; CAG chr11 5265651 5265670 5265654 -
tgggttgtctgtttattctg

SEQ ID NO: 44178 - DNA, 20 bp, Artificial Sequence
  Synthetic oligonucleotide; AAG chr11 5265627 5265646 5265630 -
ctcttccttttgccatgcaa

SEQ ID NO: 44179 - DNA, 20 bp, Artificial Sequence
  Synthetic oligonucleotide; TAG chr11 5265619 5265638 5265622 -
tttgccatgcaaaagctctt

SEQ ID NO: 44180 - DNA, 20 bp, Artificial Sequence
  Synthetic oligonucleotide; TAG chr11 5265609 5265628 5265612 -
aaaagctctttagtttaatt

SEQ ID NO: 44181 - DNA, 20 bp, Artificial Sequence
  Synthetic oligonucleotide; CAG chr11 5265603 5265622 5265606 -
tctttagtttaatttagtcc

SEQ ID NO: 44182 - DNA, 20 bp, Artificial Sequence
  Synthetic oligonucleotide; TGG chr11 5265562 5265581 5265565 -
tgtatttgcatttgtgttct

SEQ ID NO: 44183 - DNA, 20 bp, Artificial Sequence
  Synthetic oligonucleotide; AAG chr11 5265542 5265561 5265545 -
tggtcatgaaatcctttcct

SEQ ID NO: 44184 - DNA, 20 bp, Artificial Sequence
  Synthetic oligonucleotide; TAG chr11 5265531 5265550 5265534 -
tcctttcctaagccaatgtg

SEQ ID NO: 44185 - DNA, 20 bp, Artificial Sequence
  Synthetic oligonucleotide; AAG chr11 5265528 5265547 5265531 -
tttcctaagccaatgtgtag

SEQ ID NO: 44186 - DNA, 20 bp, Artificial Sequence
  Synthetic oligonucleotide; AGG chr11 5265527 5265546 5265530 -
ttcctaagccaatgtgtaga

SEQ ID NO: 44187 - DNA, 20 bp, Artificial Sequence
  Synthetic oligonucleotide; GGG chr11 5265526 5265545 5265529 -
tcctaagccaatgtgtagaa

SEQ ID NO: 44188 - DNA, 20 bp, Artificial Sequence
  Synthetic oligonucleotide; TAG chr11 5265504 5265523 5265507 -
gtttttccgatgttattttc

SEQ ID NO: 44189 - DNA, 20 bp, Artificial Sequence
  Synthetic oligonucleotide; CAG chr11 5265493 5265512 5265496 -
gttattttctagaattgtta

SEQ ID NO: 44190 - DNA, 20 bp, Artificial Sequence
  Synthetic oligonucleotide; CAG chr11 5265487 5265506 5265490 -
ttctagaattgttacagttt

SEQ ID NO: 44191 - DNA, 20 bp, Artificial Sequence
  Synthetic oligonucleotide; AGG chr11 5265486 5265505 5265489 -
tctagaattgttacagtttc

SEQ ID NO: 44192 - DNA, 20 bp, Artificial Sequence
  Synthetic oligonucleotide; GGG chr11 5265485 5265504 5265488 -
ctagaattgttacagtttca

SEQ ID NO: 44193 - DNA, 20 bp, Artificial Sequence
  Synthetic oligonucleotide; TAG chr11 5265480 5265499 5265483 -
attgttacagtttcagggct

SEQ ID NO: 44194 - DNA, 20 bp, Artificial Sequence
  Synthetic oligonucleotide; AAG chr11 5265473 5265492 5265476 -
cagtttcagggcttagattt

SEQ ID NO: 44195 - DNA, 20 bp, Artificial Sequence
  Synthetic oligonucleotide; GAG chr11 5265455 5265474 5265458 -
ttaagtccttgatccatctt

SEQ ID NO: 44196 - DNA, 20 bp, Artificial Sequence
  Synthetic oligonucleotide; AAG chr11 5265439 5265458 5265442 -
tcttgagttgatttttgtat

SEQ ID NO: 44197 - DNA, 20 bp, Artificial Sequence
  Synthetic oligonucleotide; AGG chr11 5265438 5265457 5265441 -
cttgagttgatttttgtata

SEQ ID NO: 44198 - DNA, 20 bp, Artificial Sequence
  Synthetic oligonucleotide; GAG chr11 5265434 5265453 5265437 -
agttgatttttgtataaggt

SEQ ID NO: 44199 - DNA, 20 bp, Artificial Sequence
  Synthetic oligonucleotide; GAG chr11 5265432 5265451 5265435 -
ttgatttttgtataaggtga

SEQ ID NO: 44200 - DNA, 20 bp, Artificial Sequence
  Synthetic oligonucleotide; AAG chr11 5265426 5265445 5265429 -
tttgtataaggtgagagatg

SEQ ID NO: 44201 - DNA, 20 bp, Artificial Sequence
  Synthetic oligonucleotide; CAG chr11 5265420 5265439 5265423 -
taaggtgagagatgaagatc

SEQ ID NO: 44202 - DNA, 20 bp, Artificial Sequence
  Synthetic oligonucleotide; TAG chr11 5265400 5265419 5265403 -
cagtttcattctcctacatg

SEQ ID NO: 44203 - DNA, 20 bp, Artificial Sequence
  Synthetic oligonucleotide; CAG chr11 5265392 5265411 5265395 -
ttctcctacatgtagcttgc

SEQ ID NO: 44204 - DNA, 20 bp, Artificial Sequence
  Synthetic oligonucleotide; TAG chr11 5265366 5265385 5265369 -
tccccgcaccatttgttgaa

SEQ ID NO: 44205 - DNA, 20 bp, Artificial Sequence
  Synthetic oligonucleotide; AGG chr11 5265365 5265384 5265368 -
ccccgcaccatttgttgaat

SEQ ID NO: 44206 - DNA, 20 bp, Artificial Sequence
  Synthetic oligonucleotide; GGG chr11 5265364 5265383 5265367 -
cccgcaccatttgttgaata

SEQ ID NO: 44207 - DNA, 20 bp, Artificial Sequence
  Synthetic oligonucleotide; AAG chr11 5265323 5265342 5265326 -
tgtttttgtttgctttgtca

SEQ ID NO: 44208 - DNA, 20 bp, Artificial Sequence
  Synthetic oligonucleotide; CAG chr11 5265318 5265337 5265321 -
ttgtttgctttgtcaaagat

SEQ ID NO: 44209 - DNA, 20 bp, Artificial Sequence
  Synthetic oligonucleotide; TGG chr11 5265314 5265333 5265317 -
ttgctttgtcaaagatcagt

SEQ ID NO: 44210 - DNA, 20 bp, Artificial Sequence
  Synthetic oligonucleotide; AAG chr11 5265307 5265326 5265310 -
gtcaaagatcagttggatgt

SEQ ID NO: 44211 - DNA, 20 bp, Artificial Sequence
  Synthetic oligonucleotide; GAG chr11 5265299 5265318 5265302 -
tcagttggatgtaagtattt

SEQ ID NO: 44212 - DNA, 20 bp, Artificial Sequence
  Synthetic oligonucleotide; TGG chr11 5265288 5265307 5265291 -
taagtatttgagtttatttc

SEQ ID NO: 44213 - DNA, 20 bp, Artificial Sequence
  Synthetic oligonucleotide; GGG chr11 5265287 5265306 5265290 -
aagtatttgagtttatttct

SEQ ID NO: 44214 - DNA, 20 bp, Artificial Sequence
  Synthetic oligonucleotide; TGG chr11 5265266 5265285 5265269 -
ggttctctattctgttccat

SEQ ID NO: 44215 - DNA, 20 bp, Artificial Sequence
  Synthetic oligonucleotide; CAG chr11 5265242 5265261 5265245 -
cgatgtgcctatttgtacac

SEQ ID NO: 44216 - DNA, 20 bp, Artificial Sequence
  Synthetic oligonucleotide; TGG chr11 5265226 5265245 5265229 -
acaccagcatcatgctgttt

SEQ ID NO: 44217 - DNA, 20 bp, Artificial Sequence
  Synthetic oligonucleotide; TGG chr11 5265217 5265236 5265220 -
tcatgctgttttggtgacta

SEQ ID NO: 44218 - DNA, 20 bp, Artificial Sequence
  Synthetic oligonucleotide; TAG chr11 5265204 5265223 5265207 -
gtgactatggccttattgta

SEQ ID NO: 44219 - DNA, 20 bp, Artificial Sequence
  Synthetic oligonucleotide; GAG chr11 5265193 5265212 5265196 -
cttattgtatagtttgaaat

SEQ ID NO: 44220 - DNA, 20 bp, Artificial Sequence
  Synthetic oligonucleotide; AGG chr11 5265192 5265211 5265195 -
ttattgtatagtttgaaatg

SEQ ID NO: 44221 - DNA, 20 bp, Artificial Sequence
  Synthetic oligonucleotide; CAG chr11 5265175 5265194 5265178 -
atgaggtaatgtaatgcctt

SEQ ID NO: 44222 - DNA, 20 bp, Artificial Sequence
  Synthetic oligonucleotide; TAG chr11 5265157 5265176 5265160 -
ttcagatttgttcttttttt

SEQ ID NO: 44223 - DNA, 20 bp, Artificial Sequence
  Synthetic oligonucleotide; TGG chr11 5265140 5265159 5265143 -
ttttagacttgcttgtttat

SEQ ID NO: 44224 - DNA, 20 bp, Artificial Sequence
  Synthetic oligonucleotide; GGG chr11 5265139 5265158 5265142 -
tttagacttgcttgtttatt

SEQ ID NO: 44225 - DNA, 20 bp, Artificial Sequence
  Synthetic oligonucleotide; TGG chr11 5265128 5265147 5265131 -
ttgtttattgggctcttttt

SEQ ID NO: 44226 - DNA, 20 bp, Artificial Sequence
  Synthetic oligonucleotide; AAG chr11 5265119 5265138 5265122 -
gggctcttttttggttccat

SEQ ID NO: 44227 - DNA, 20 bp, Artificial Sequence
  Synthetic oligonucleotide; TAG chr11 5265111 5265130 5265114 -
ttttggttccataagaattt

SEQ ID NO: 44228 - DNA, 20 bp, Artificial Sequence
  Synthetic oligonucleotide; AGG chr11 5265110 5265129 5265113 -
tttggttccataagaatttt

SEQ ID NO: 44229 - DNA, 20 bp, Artificial Sequence
  Synthetic oligonucleotide; TAG chr11 5265096 5265115 5265099 -
aattttaggattgttttttc

SEQ ID NO: 44230 - DNA, 20 bp, Artificial Sequence
  Synthetic oligonucleotide; AAG chr11 5265086 5265105 5265089 -
ttgttttttctagttctgtg

SEQ ID NO: 44231 - DNA, 20 bp, Artificial Sequence
  Synthetic oligonucleotide; TGG chr11 5265078 5265097 5265081 -
tctagttctgtgaagactaa

SEQ ID NO: 44232 - DNA, 20 bp, Artificial Sequence
  Synthetic oligonucleotide; TGG chr11 5265075 5265094 5265078 -
agttctgtgaagactaatgg

SEQ ID NO: 44233 - DNA, 20 bp, Artificial Sequence
  Synthetic oligonucleotide; TGG chr11 5265064 5265083 5265067 -
gactaatggtggtattttga

SEQ ID NO: 44234 - DNA, 20 bp, Artificial Sequence
  Synthetic oligonucleotide; GGG chr11 5265063 5265082 5265066 -
actaatggtggtattttgat

SEQ ID NO: 44235 - DNA, 20 bp, Artificial Sequence
  Synthetic oligonucleotide; TAG chr11 5265044 5265063 5265047 -
tgggaattgcaatgaatttg

SEQ ID NO: 44236 - DNA, 20 bp, Artificial Sequence
  Synthetic oligonucleotide; AGG chr11 5265043 5265062 5265046 -
gggaattgcaatgaatttgt

SEQ ID NO: 44237 - DNA, 20 bp, Artificial Sequence
  Synthetic oligonucleotide; TGG chr11 5265033 5265052 5265036 -
atgaatttgtaggttgcttc

SEQ ID NO: 44238 - DNA, 20 bp, Artificial Sequence
  Synthetic oligonucleotide; TGG chr11 5265025 5265044 5265028 -
gtaggttgcttctggcatta

SEQ ID NO: 44239 - DNA, 20 bp, Artificial Sequence
  Synthetic oligonucleotide; GAG chr11 5264990 5265009 5264993 -
tattgattctacccatctat

SEQ ID NO: 44240 - DNA, 20 bp, Artificial Sequence
  Synthetic oligonucleotide; TGG chr11 5264985 5265004 5264988 -
attctacccatctatgagaa

SEQ ID NO: 44241 - DNA, 20 bp, Artificial Sequence
  Synthetic oligonucleotide; CAG chr11 5264943 5264962 5264946 -
gtgtcttatatgattacttt

SEQ ID NO: 44242 - DNA, 20 bp, Artificial Sequence
  Synthetic oligonucleotide; TAG chr11 5264930 5264949 5264933 -
ttactttcagccgtgttttg

SEQ ID NO: 44243 - DNA, 20 bp, Artificial Sequence
  Synthetic oligonucleotide; TAG chr11 5264918 5264937 5264921 -
gtgttttgtagttttccttg

SEQ ID NO: 44244 - DNA, 20 bp, Artificial Sequence
  Synthetic oligonucleotide; TGG chr11 5264899 5264918 5264902 -
gtagatgtctttcacctcct

SEQ ID NO: 44245 - DNA, 20 bp, Artificial Sequence
  Synthetic oligonucleotide; TAG chr11 5264895 5264914 5264898 -
atgtctttcacctccttggt

SEQ ID NO: 44246 - DNA, 20 bp, Artificial Sequence
  Synthetic oligonucleotide; AGG chr11 5264894 5264913 5264897 -
tgtctttcacctccttggtt

SEQ ID NO: 44247 - DNA, 20 bp, Artificial Sequence
  Synthetic oligonucleotide; AAG chr11 5264880 5264899 5264883 -
ttggttaggtatatattcct

SEQ ID NO: 44248 - DNA, 20 bp, Artificial Sequence
  Synthetic oligonucleotide; CAG chr11 5264849 5264868 5264852 -
ttgttttgttttgttttttg

SEQ ID NO: 44249 - DNA, 20 bp, Artificial Sequence
  Synthetic oligonucleotide; AAG chr11 5264837 5264856 5264840 -
gttttttgcagctattgtaa

SEQ ID NO: 44250 - DNA, 20 bp, Artificial Sequence
  Synthetic oligonucleotide; AGG chr11 5264836 5264855 5264839 -
ttttttgcagctattgtaaa

SEQ ID NO: 44251 - DNA, 20 bp, Artificial Sequence
  Synthetic oligonucleotide; GGG chr11 5264835 5264854 5264838 -
tttttgcagctattgtaaaa

SEQ ID NO: 44252 - DNA, 20 bp, Artificial Sequence
  Synthetic oligonucleotide; GGG chr11 5264834 5264853 5264837 -
ttttgcagctattgtaaaag

SEQ ID NO: 44253 - DNA, 20 bp, Artificial Sequence
  Synthetic oligonucleotide; GAG chr11 5264829 5264848 5264832 -
cagctattgtaaaaggggtt

SEQ ID NO: 44254 - DNA, 20 bp, Artificial Sequence
  Synthetic oligonucleotide; CAG chr11 5264810 5264829 5264813 -
tgagttcttgattttattct

SEQ ID NO: 44255 - DNA, 20 bp, Artificial Sequence
  Synthetic oligonucleotide; TGG chr11 5264805 5264824 5264808 -
tcttgattttattctcagct

SEQ ID NO: 44256 - DNA, 20 bp, Artificial Sequence
  Synthetic oligonucleotide; TGG chr11 5264795 5264814 5264798 -
attctcagcttggtcattgc

SEQ ID NO: 44257 - DNA, 20 bp, Artificial Sequence
  Synthetic oligonucleotide; AAG chr11 5264787 5264806 5264790 -
cttggtcattgctggtatgt

SEQ ID NO: 44258 - DNA, 20 bp, Artificial Sequence
  Synthetic oligonucleotide; AAG chr11 5264783 5264802 5264786 -
gtcattgctggtatgtaaga

SEQ ID NO: 44259 - DNA, 20 bp, Artificial Sequence
  Synthetic oligonucleotide; TGG chr11 5264772 5264791 5264775 -
tatgtaagaaagcaactcat

SEQ ID NO: 44260 - DNA, 20 bp, Artificial Sequence
  Synthetic oligonucleotide; CAG chr11 5264750 5264769 5264753 -
gtgtacgttaattttgtatc

SEQ ID NO: 44261 - DNA, 20 bp, Artificial Sequence
  Synthetic oligonucleotide; CAG chr11 5264725 5264744 5264728 -
actttgctgaattattttat

SEQ ID NO: 44262 - DNA, 20 bp, Artificial Sequence
  Synthetic oligonucleotide; TAG chr11 5264719 5264738 5264722 -
ctgaattattttatcagttc

SEQ ID NO: 44263 - DNA, 20 bp, Artificial Sequence
  Synthetic oligonucleotide; AGG chr11 5264718 5264737 5264721 -
tgaattattttatcagttct

SEQ ID NO: 44264 - DNA, 20 bp, Artificial Sequence
  Synthetic oligonucleotide; GGG chr11 5264717 5264736 5264720 -
gaattattttatcagttcta

SEQ ID NO: 44265 - DNA, 20 bp, Artificial Sequence
  Synthetic oligonucleotide; GGG chr11 5264716 5264735 5264719 -
aattattttatcagttctag

SEQ ID NO: 44266 - DNA, 20 bp, Artificial Sequence
  Synthetic oligonucleotide; GGG chr11 5264715 5264734 5264718 -
attattttatcagttctagg

SEQ ID NO: 44267 - DNA, 20 bp, Artificial Sequence
  Synthetic oligonucleotide; TGG chr11 5264709 5264728 5264712 -
ttatcagttctagggggttt

SEQ ID NO: 44268 - DNA, 20 bp, Artificial Sequence
  Synthetic oligonucleotide; GAG chr11 5264707 5264726 5264710 -
atcagttctagggggttttg

SEQ ID NO: 44269 - DNA, 20 bp, Artificial Sequence
  Synthetic oligonucleotide; AGG chr11 5264706 5264725 5264709 -
tcagttctagggggttttgg

SEQ ID NO: 44270 - DNA, 20 bp, Artificial Sequence
  Synthetic oligonucleotide; GAG chr11 5264704 5264723 5264707 -
agttctagggggttttggag

SEQ ID NO: 44271 - DNA, 20 bp, Artificial Sequence
  Synthetic oligonucleotide; TAG chr11 5264697 5264716 5264700 -
gggggttttggaggagtctt

SEQ ID NO: 44272 - DNA, 20 bp, Artificial Sequence
  Synthetic oligonucleotide; GAG chr11 5264695 5264714 5264698 -
gggttttggaggagtcttta

SEQ ID NO: 44273 - DNA, 20 bp, Artificial Sequence
  Synthetic oligonucleotide; CAG chr11 5264667 5264686 5264670 -
tacatacacaatcatatcat

SEQ ID NO: 44274 - DNA, 20 bp, Artificial Sequence
  Synthetic oligonucleotide; CAG chr11 5264660 5264679 5264663 -
acaatcatatcatcagcaaa

SEQ ID NO: 44275 - DNA, 20 bp, Artificial Sequence
  Synthetic oligonucleotide; CAG chr11 5264654 5264673 5264657 -
atatcatcagcaaacagtga

SEQ ID NO: 44276 - DNA, 20 bp, Artificial Sequence
  Synthetic oligonucleotide; TGG chr11 5264629 5264648 5264632 -
tgactttctctttaacaatt

SEQ ID NO: 44277 - DNA, 20 bp, Artificial Sequence
  Synthetic oligonucleotide; TAG chr11 5264588 5264607 5264591 -
tcttgtctgattgctcttgc

SEQ ID NO: 44278 - DNA, 20 bp, Artificial Sequence
  Synthetic oligonucleotide; AGG chr11 5264587 5264606 5264590 -
cttgtctgattgctcttgct

SEQ ID NO: 44279 - DNA, 20 bp, Artificial Sequence
  Synthetic oligonucleotide; CAG chr11 5264579 5264598 5264582 -
attgctcttgctaggacttc

SEQ ID NO: 44280 - DNA, 20 bp, Artificial Sequence
  Synthetic oligonucleotide; AAG chr11 5264566 5264585 5264569 -
ggacttccagtaatatgtta

SEQ ID NO: 44281 - DNA, 20 bp, Artificial Sequence
  Synthetic oligonucleotide; GAG chr11 5264564 5264583 5264567 -
acttccagtaatatgttaaa

SEQ ID NO: 44282 - DNA, 20 bp, Artificial Sequence
  Synthetic oligonucleotide; AAG chr11 5264561 5264580 5264564 -
tccagtaatatgttaaagag

SEQ ID NO: 44283 - DNA, 20 bp, Artificial Sequence
  Synthetic oligonucleotide; TGG chr11 5264558 5264577 5264561 -
agtaatatgttaaagagaag

SEQ ID NO: 44284 - DNA, 20 bp, Artificial Sequence
  Synthetic oligonucleotide; GAG chr11 5264554 5264573 5264557 -
atatgttaaagagaagtggt

SEQ ID NO: 44285 - DNA, 20 bp, Artificial Sequence
  Synthetic oligonucleotide; GAG chr11 5264552 5264571 5264555 -
atgttaaagagaagtggtga

SEQ ID NO: 44286 - DNA, 20 bp, Artificial Sequence
  Synthetic oligonucleotide; TGG chr11 5264549 5264568 5264552 -
ttaaagagaagtggtgagag

SEQ ID NO: 44287 - DNA, 20 bp, Artificial Sequence
  Synthetic oligonucleotide; GGG chr11 5264548 5264567 5264551 -
taaagagaagtggtgagagt

SEQ ID NO: 44288 - DNA, 20 bp, Artificial Sequence
  Synthetic oligonucleotide; CAG chr11 5264529 5264548 5264532 -
tgggtatccttgtctcattc

SEQ ID NO: 44289 - DNA, 20 bp, Artificial Sequence
  Synthetic oligonucleotide; CAG chr11 5264522 5264541 5264525 -
ccttgtctcattccagtttt

SEQ ID NO: 44290 - DNA, 20 bp, Artificial Sequence
  Synthetic oligonucleotide; CAG chr11 5264518 5264537 5264521 -
gtctcattccagttttcaga

SEQ ID NO: 44291 - DNA, 20 bp, Artificial Sequence
  Synthetic oligonucleotide; TGG chr11 5264481 5264500 5264484 -
tttcccattcaatataatgt

SEQ ID NO: 44292 - DNA, 20 bp, Artificial Sequence
  Synthetic oligonucleotide; TAG chr11 5264464 5264483 5264467 -
tgttggctgtgtgtttacca

SEQ ID NO: 44293 - DNA, 20 bp, Artificial Sequence
  Synthetic oligonucleotide; TGG chr11 5264460 5264479 5264463 -
ggctgtgtgtttaccatagc

SEQ ID NO: 44294 - DNA, 20 bp, Artificial Sequence
  Synthetic oligonucleotide; GAG chr11 5264444 5264463 5264447 -
tagctggcttttattacatt

SEQ ID NO: 44295 - DNA, 20 bp, Artificial Sequence
  Synthetic oligonucleotide; AGG chr11 5264443 5264462 5264446 -
agctggcttttattacattg

SEQ ID NO: 44296 - DNA, 20 bp, Artificial Sequence
  Synthetic oligonucleotide; GAG chr11 5264414 5264433 5264417 -
ctttgtaaaccgattttgct

SEQ ID NO: 44297 - DNA, 20 bp, Artificial Sequence
  Synthetic oligonucleotide; TAG chr11 5264408 5264427 5264411 -
aaaccgattttgctgagttt

SEQ ID NO: 44298 - DNA, 20 bp, Artificial Sequence
  Synthetic oligonucleotide; AAG chr11 5264400 5264419 5264403 -
tttgctgagttttagtcata

SEQ ID NO: 44299 - DNA, 20 bp, Artificial Sequence
  Synthetic oligonucleotide; CAG chr11 5264375 5264394 5264378 -
atgttgaattttgttgaatg

SEQ ID NO: 44300 - DNA, 20 bp, Artificial Sequence
  Synthetic oligonucleotide; TGG chr11 5264366 5264385 5264369 -
tttgttgaatgcagtttctg

SEQ ID NO: 44301 - DNA, 20 bp, Artificial Sequence
  Synthetic oligonucleotide; GAG chr11 5264358 5264377 5264361 -
atgcagtttctgtggctatt

SEQ ID NO: 44302 - DNA, 20 bp, Artificial Sequence
  Synthetic oligonucleotide; TGG chr11 5264247 5264266 5264250 -
gcatgaaacccacttgatca

SEQ ID NO: 44303 - DNA, 20 bp, Artificial Sequence
  Synthetic oligonucleotide; GGG chr11 5264246 5264265 5264249 -
catgaaacccacttgatcat

SEQ ID NO: 44304 - DNA, 20 bp, Artificial Sequence
  Synthetic oligonucleotide; CGG chr11 5264229 5264248 5264232 -
catgggttttgatatgctgt

SEQ ID NO: 44305 - DNA, 20 bp, Artificial Sequence
  Synthetic oligonucleotide; TAG chr11 5264219 5264238 5264222 -
gatatgctgtcggatgctat

SEQ ID NO: 44306 - DNA, 20 bp, Artificial Sequence
  Synthetic oligonucleotide; TAG chr11 5264215 5264234 5264218 -
tgctgtcggatgctattagc

SEQ ID NO: 44307 - DNA, 20 bp, Artificial Sequence
  Synthetic oligonucleotide; AAG chr11 5264203 5264222 5264206 -
ctattagctagtattttgtc

SEQ ID NO: 44308 - DNA, 20 bp, Artificial Sequence
  Synthetic oligonucleotide; AGG chr11 5264202 5264221 5264205 -
tattagctagtattttgtca

SEQ ID NO: 44309 - DNA, 20 bp, Artificial Sequence
  Synthetic oligonucleotide; TGG chr11 5264195 5264214 5264198 -
tagtattttgtcaaggatgt

SEQ ID NO: 44310 - DNA, 20 bp, Artificial Sequence
  Synthetic oligonucleotide; CAG chr11 5264179 5264198 5264182 -
atgttggcatctatgttcat

SEQ ID NO: 44311 - DNA, 20 bp, Artificial Sequence
  Synthetic oligonucleotide; AGG chr11 5264178 5264197 5264181 -
tgttggcatctatgttcatc

SEQ ID NO: 44312 - DNA, 20 bp, Artificial Sequence
  Synthetic oligonucleotide; GGG chr11 5264177 5264196 5264180 -
gttggcatctatgttcatca

SEQ ID NO: 44313 - DNA, 20 bp, Artificial Sequence
  Synthetic oligonucleotide; TAG chr11 5264163 5264182 5264166 -
tcatcagggatattgatctg

SEQ ID NO: 44314 - DNA, 20 bp, Artificial Sequence
  Synthetic oligonucleotide; TGG chr11 5264147 5264166 5264150 -
tctgtagtgttttttttttt

SEQ ID NO: 44315 - DNA, 20 bp, Artificial Sequence
  Synthetic oligonucleotide; CAG chr11 5264131 5264150 5264134 -
tttttggttatgttctttcc

SEQ ID NO: 44316 - DNA, 20 bp, Artificial Sequence
  Synthetic oligonucleotide; TGG chr11 5264125 5264144 5264128 -
gttatgttctttcccagttt

SEQ ID NO: 44317 - DNA, 20 bp, Artificial Sequence
  Synthetic oligonucleotide; AAG chr11 5264118 5264137 5264121 -
tctttcccagttttggtatt

SEQ ID NO: 44318 - DNA, 20 bp, Artificial Sequence
  Synthetic oligonucleotide; AGG chr11 5264117 5264136 5264120 -
ctttcccagttttggtatta

SEQ ID NO: 44319 - DNA, 20 bp, Artificial Sequence
  Synthetic oligonucleotide; TGG chr11 5264108 5264127 5264111 -
ttttggtattaaggtgatac

SEQ ID NO: 44320 - DNA, 20 bp, Artificial Sequence
  Synthetic oligonucleotide; TAG chr11 5264100 5264119 5264103 -
ttaaggtgatactggcttca

SEQ ID NO: 44321 - DNA, 20 bp, Artificial Sequence
  Synthetic oligonucleotide; TAG chr11 5264090 5264109 5264093 -
actggcttcatagaatgatt

SEQ ID NO: 44322 - DNA, 20 bp, Artificial Sequence
  Synthetic oligonucleotide; AGG chr11 5264089 5264108 5264092 -
ctggcttcatagaatgattt

SEQ ID NO: 44323 - DNA, 20 bp, Artificial Sequence
  Synthetic oligonucleotide; GGG chr11 5264088 5264107 5264091 -
tggcttcatagaatgattta

SEQ ID NO: 44324 - DNA, 20 bp, Artificial Sequence
  Synthetic oligonucleotide; GAG chr11 5264086 5264105 5264089 -
gcttcatagaatgatttagg

SEQ ID NO: 44325 - DNA, 20 bp, Artificial Sequence
  Synthetic oligonucleotide; AGG chr11 5264085 5264104 5264088 -
cttcatagaatgatttaggg

SEQ ID NO: 44326 - DNA, 20 bp, Artificial Sequence
  Synthetic oligonucleotide; TAG chr11 5264061 5264080 5264064 -
ttctctctttctctatcttg

SEQ ID NO: 44327 - DNA, 20 bp, Artificial Sequence
  Synthetic oligonucleotide; TAG chr11 5264047 5264066 5264050 -
atcttgtagaatactgtcaa

SEQ ID NO: 44328 - DNA, 20 bp, Artificial Sequence
  Synthetic oligonucleotide; AGG chr11 5264046 5264065 5264049 -
tcttgtagaatactgtcaat

SEQ ID NO: 44329 - DNA, 20 bp, Artificial Sequence
  Synthetic oligonucleotide; TGG chr11 5264041 5264060 5264044 -
tagaatactgtcaataggat

SEQ ID NO: 44330 - DNA, 20 bp, Artificial Sequence
  Synthetic oligonucleotide; TGG chr11 5264016 5264035 5264019 -
tcaattcttctttgaatgtc

SEQ ID NO: 44331 - DNA, 20 bp, Artificial Sequence
  Synthetic oligonucleotide; TAG chr11 5264013 5264032 5264016 -
attcttctttgaatgtctgg

SEQ ID NO: 44332 - DNA, 20 bp, Artificial Sequence
  Synthetic oligonucleotide; CAG chr11 5264006 5264025 5264009 -
tttgaatgtctggtagaatt

SEQ ID NO: 44333 - DNA, 20 bp, Artificial Sequence
  Synthetic oligonucleotide; TGG chr11 5263990 5264009 5263993 -
aattcagctgtgaatctatc

SEQ ID NO: 44334 - DNA, 20 bp, Artificial Sequence
  Synthetic oligonucleotide; TGG chr11 5263984 5264003 5263987 -
gctgtgaatctatctggtcc

SEQ ID NO: 44335 - DNA, 20 bp, Artificial Sequence
  Synthetic oligonucleotide; TGG chr11 5263968 5263987 5263971 -
gtcctggacttttttgttgt

SEQ ID NO: 44336 - DNA, 20 bp, Artificial Sequence
  Synthetic oligonucleotide; CAG chr11 5263946 5263965 5263949 -
gtaaatttttattatcattt

SEQ ID NO: 44337 - DNA, 20 bp, Artificial Sequence
  Synthetic oligonucleotide; TGG chr11 5263927 5263946 5263930 -
tcagtcttgctgcttattac

SEQ ID NO: 44338 - DNA, 20 bp, Artificial Sequence
  Synthetic oligonucleotide; CAG chr11 5263918 5263937 5263921 -
ctgcttattactggtctgtt

SEQ ID NO: 44339 - DNA, 20 bp, Artificial Sequence
  Synthetic oligonucleotide; AGG chr11 5263917 5263936 5263920 -
tgcttattactggtctgttc

SEQ ID NO: 44340 - DNA, 20 bp, Artificial Sequence
  Synthetic oligonucleotide; GGG chr11 5263916 5263935 5263919 -
gcttattactggtctgttca

SEQ ID NO: 44341 - DNA, 20 bp, Artificial Sequence
  Synthetic oligonucleotide; AAG chr11 5263893 5263912 5263896 -
tatctaattcttcctgactt

SEQ ID NO: 44342 - DNA, 20 bp, Artificial Sequence
  Synthetic oligonucleotide; TAG chr11 5263889 5263908 5263892 -
taattcttcctgacttaagc

SEQ ID NO: 44343 - DNA, 20 bp, Artificial Sequence
  Synthetic oligonucleotide; GAG chr11 5263887 5263906 5263890 -
attcttcctgacttaagcta

SEQ ID NO: 44344 - DNA, 20 bp, Artificial Sequence
  Synthetic oligonucleotide; CAG chr11 5263871 5263890 5263874 -
gctagagccctgtatctttc

SEQ ID NO: 44345 - DNA, 20 bp, Artificial Sequence
  Synthetic oligonucleotide; AGG chr11 5263870 5263889 5263873 -
ctagagccctgtatctttcc

SEQ ID NO: 44346 - DNA, 20 bp, Artificial Sequence
  Synthetic oligonucleotide; TAG chr11 5263850 5263869 5263853 -
aggaattcgaacgtctcctt

SEQ ID NO: 44347 - DNA, 20 bp, Artificial Sequence
  Synthetic oligonucleotide; AGG chr11 5263849 5263868 5263852 -
ggaattcgaacgtctccttt

SEQ ID NO: 44348 - DNA, 20 bp, Artificial Sequence
  Synthetic oligonucleotide; TAG chr11 5263841 5263860 5263844 -
aacgtctcctttaggttttc

SEQ ID NO: 44349 - DNA, 20 bp, Artificial Sequence
  Synthetic oligonucleotide; AAG chr11 5263826 5263845 5263829 -
ttttctagtttatgcatgta

SEQ ID NO: 44350 - DNA, 20 bp, Artificial Sequence
  Synthetic oligonucleotide; AGG chr11 5263825 5263844 5263828 -
tttctagtttatgcatgtaa

SEQ ID NO: 44351 - DNA, 20 bp, Artificial Sequence
  Synthetic oligonucleotide; TAG chr11 5263816 5263835 5263819 -
tatgcatgtaaaggtgttca

SEQ ID NO: 44352 - DNA, 20 bp, Artificial Sequence
  Synthetic oligonucleotide; TAG chr11 5263813 5263832 5263816 -
gcatgtaaaggtgttcatag

SEQ ID NO: 44353 - DNA, 20 bp, Artificial Sequence
  Synthetic oligonucleotide; TGG chr11 5263785 5263804 5263788 -
aataatcttttgtatttctg

SEQ ID NO: 44354 - DNA, 20 bp, Artificial Sequence
  Synthetic oligonucleotide; CAG chr11 5263779 5263798 5263782 -
cttttgtatttctgtggtat

SEQ ID NO: 44355 - DNA, 20 bp, Artificial Sequence
  Synthetic oligonucleotide; TAG chr11 5263773 5263792 5263776 -
tatttctgtggtatcagtaa

SEQ ID NO: 44356 - DNA, 20 bp, Artificial Sequence
  Synthetic oligonucleotide; GAG chr11 5263747 5263766 5263750 -
ctcctgttttgtttctaatt

SEQ ID NO: 44357 - DNA, 20 bp, Artificial Sequence
  Synthetic oligonucleotide; TGG chr11 5263717 5263736 5263720 -
gcacttctctcctcttttct

SEQ ID NO: 44358 - DNA, 20 bp, Artificial Sequence
  Synthetic oligonucleotide; TGG chr11 5263701 5263720 5263704 -
ttcttggttaatcttgctaa

SEQ ID NO: 44359 - DNA, 20 bp, Artificial Sequence
  Synthetic oligonucleotide; CAG chr11 5263693 5263712 5263696 -
taatcttgctaatggtctat

SEQ ID NO: 44360 - DNA, 20 bp, Artificial Sequence
  Synthetic oligonucleotide; AAG chr11 5263673 5263692 5263676 -
cagttttatttatcttttca

SEQ ID NO: 44361 - DNA, 20 bp, Artificial Sequence
  Synthetic oligonucleotide; CAG chr11 5263667 5263686 5263670 -
tatttatcttttcaaagaac

SEQ ID NO: 44362 - DNA, 20 bp, Artificial Sequence
  Synthetic oligonucleotide; TAG chr11 5263650 5263669 5263653 -
aaccagctttttatttcatt

SEQ ID NO: 44363 - DNA, 20 bp, Artificial Sequence
  Synthetic oligonucleotide; CAG chr11 5263631 5263650 5263634 -
ttagcttttgtatttttttg

SEQ ID NO: 44364 - DNA, 20 bp, Artificial Sequence
  Synthetic oligonucleotide; TAG chr11 5263612 5263631 5263615 -
gcagttgttttaatttcatt

SEQ ID NO: 44365 - DNA, 20 bp, Artificial Sequence
  Synthetic oligonucleotide; TAG chr11 5263595 5263614 5263598 -
atttagttctcctcttatct

SEQ ID NO: 44366 - DNA, 20 bp, Artificial Sequence
  Synthetic oligonucleotide; TGG chr11 5263574 5263593 5263577 -
agttattccctttcttttgc

SEQ ID NO: 44367 - DNA, 20 bp, Artificial Sequence
  Synthetic oligonucleotide; GGG chr11 5263573 5263592 5263576 -
gttattccctttcttttgct

SEQ ID NO: 44368 - DNA, 20 bp, Artificial Sequence
  Synthetic oligonucleotide; TGG chr11 5263567 5263586 5263570 -
ccctttcttttgctgggttt

SEQ ID NO: 44369 - DNA, 20 bp, Artificial Sequence
  Synthetic oligonucleotide; TAG chr11 5263543 5263562 5263546 -
tctgtttgtttttgtttctc

SEQ ID NO: 44370 - DNA, 20 bp, Artificial Sequence
  Synthetic oligonucleotide; TGG chr11 5263533 5263552 5263536 -
tttgtttctctagtttcttg

SEQ ID NO: 44371 - DNA, 20 bp, Artificial Sequence
  Synthetic oligonucleotide; CAG chr11 5263499 5263518 5263502 -
attgtctgtctgtcctcttt

SEQ ID NO: 44372 - DNA, 20 bp, Artificial Sequence
  Synthetic oligonucleotide; TAG chr11 5263477 5263496 5263480 -
gactctttgacatcgacatt

SEQ ID NO: 44373 - DNA, 20 bp, Artificial Sequence
  Synthetic oligonucleotide; AGG chr11 5263476 5263495 5263479 -
actctttgacatcgacattt

SEQ ID NO: 44374 - DNA, 20 bp, Artificial Sequence
  Synthetic oligonucleotide; GGG chr11 5263475 5263494 5263478 -
ctctttgacatcgacattta

SEQ ID NO: 44375 - DNA, 20 bp, Artificial Sequence
  Synthetic oligonucleotide; TAG chr11 5263456 5263475 5263459 -
agggctgtgaactttccttt

SEQ ID NO: 44376 - DNA, 20 bp, Artificial Sequence
  Synthetic oligonucleotide; TAG chr11 5263434 5263453 5263437 -
gcaccatctttgctgtatcc

SEQ ID NO: 44377 - DNA, 20 bp, Artificial Sequence
  Synthetic oligonucleotide; GAG chr11 5263432 5263451 5263435 -
accatctttgctgtatccta

SEQ ID NO: 44378 - DNA, 20 bp, Artificial Sequence
  Synthetic oligonucleotide; AGG chr11 5263431 5263450 5263434 -
ccatctttgctgtatcctag

SEQ ID NO: 44379 - DNA, 20 bp, Artificial Sequence
  Synthetic oligonucleotide; TAG chr11 5263422 5263441 5263425 -
ctgtatcctagaggttttga

SEQ ID NO: 44380 - DNA, 20 bp, Artificial Sequence
  Synthetic oligonucleotide; AGG chr11 5263421 5263440 5263424 -
tgtatcctagaggttttgat

SEQ ID NO: 44381 - DNA, 20 bp, Artificial Sequence
  Synthetic oligonucleotide; CGG chr11 5263403 5263422 5263406 -
ataggttgtgtcactattgt

SEQ ID NO: 44382 - DNA, 20 bp, Artificial Sequence
  Synthetic oligonucleotide; CAG chr11 5263399 5263418 5263402 -
gttgtgtcactattgtcggt

SEQ ID NO: 44383 - DNA, 20 bp, Artificial Sequence
  Synthetic oligonucleotide; AAG chr11 5263393 5263412 5263396 -
tcactattgtcggtcagttc

SEQ ID NO: 44384 - DNA, 20 bp, Artificial Sequence
  Synthetic oligonucleotide; AAG chr11 5263364 5263383 5263367 -
tgttgttcttattatacttt

SEQ ID NO: 44385 - DNA, 20 bp, Artificial Sequence
  Synthetic oligonucleotide; TGG chr11 5263358 5263377 5263361 -
tcttattatactttaagttc

SEQ ID NO: 44386 - DNA, 20 bp, Artificial Sequence
  Synthetic oligonucleotide; GGG chr11 5263357 5263376 5263360 -
cttattatactttaagttct

SEQ ID NO: 44387 - DNA, 20 bp, Artificial Sequence
  Synthetic oligonucleotide; CAG chr11 5263345 5263364 5263348 -
taagttctgggatacatgtg

SEQ ID NO: 44388 - DNA, 20 bp, Artificial Sequence
  Synthetic oligonucleotide; CAG chr11 5263336 5263355 5263339 -
ggatacatgtgcagaatgtg

SEQ ID NO: 44389 - DNA, 20 bp, Artificial Sequence
  Synthetic oligonucleotide; AGG chr11 5263335 5263354 5263338 -
gatacatgtgcagaatgtgc

SEQ ID NO: 44390 - DNA, 20 bp, Artificial Sequence
  Synthetic oligonucleotide; TAG chr11 5263323 5263342 5263326 -
gaatgtgcaggtttgttaca

SEQ ID NO: 44391 - DNA, 20 bp, Artificial Sequence
  Synthetic oligonucleotide; AGG chr11 5263322 5263341 5263325 -
aatgtgcaggtttgttacat

SEQ ID NO: 44392 - DNA, 20 bp, Artificial Sequence
  Synthetic oligonucleotide; TAG chr11 5263317 5263336 5263320 -
gcaggtttgttacataggta

SEQ ID NO: 44393 - DNA, 20 bp, Artificial Sequence
  Synthetic oligonucleotide; TGG chr11 5263306 5263325 5263309 -
acataggtatagatgtgcca

SEQ ID NO: 44394 - DNA, 20 bp, Artificial Sequence
  Synthetic oligonucleotide; TGG chr11 5263303 5263322 5263306 -
taggtatagatgtgccatgg

SEQ ID NO: 44395 - DNA, 20 bp, Artificial Sequence
  Synthetic oligonucleotide; TAG chr11 5263269 5263288 5263272 -
catcaacctgtcatctacat

SEQ ID NO: 44396 - DNA, 20 bp, Artificial Sequence
  Synthetic oligonucleotide; AGG chr11 5263268 5263287 5263271 -
atcaacctgtcatctacatt

SEQ ID NO: 44397 - DNA, 20 bp, Artificial Sequence
  Synthetic oligonucleotide; CAG chr11 5263220 5263239 5263223 -
ctaaccccctcaccccccga

SEQ ID NO: 44398 - DNA, 20 bp, Artificial Sequence
  Synthetic oligonucleotide; AGG chr11 5263219 5263238 5263222 -
taaccccctcaccccccgac

SEQ ID NO: 44399 - DNA, 20 bp, Artificial Sequence
  Synthetic oligonucleotide; TGG chr11 5263213 5263232 5263216 -
cctcaccccccgacaggccc

SEQ ID NO: 44400 - DNA, 20 bp, Artificial Sequence
  Synthetic oligonucleotide; GAG chr11 5263154 5263173 5263157 -
attgttcaactcccacttat

SEQ ID NO: 44401 - DNA, 20 bp, Artificial Sequence
  Synthetic oligonucleotide; GAG chr11 5263150 5263169 5263153 -
ttcaactcccacttatgagt

SEQ ID NO: 44402 - DNA, 20 bp, Artificial Sequence
  Synthetic oligonucleotide; TGG chr11 5263141 5263160 5263144 -
cacttatgagtgagaacgtg

SEQ ID NO: 44403 - DNA, 20 bp, Artificial Sequence
  Synthetic oligonucleotide; TGG chr11 5263134 5263153 5263137 -
gagtgagaacgtgtggtgtt

SEQ ID NO: 44404 - DNA, 20 bp, Artificial Sequence
  Synthetic oligonucleotide; TAG chr11 5263114 5263133 5263117 -
tggtttctctgttcctgtgt

SEQ ID NO: 44405 - DNA, 20 bp, Artificial Sequence
  Synthetic oligonucleotide; CAG chr11 5263105 5263124 5263108 -
tgttcctgtgttagtttgct

SEQ ID NO: 44406 - DNA, 20 bp, Artificial Sequence
  Synthetic oligonucleotide; TGG chr11 5263097 5263116 5263100 -
tgttagtttgctcagaatga

SEQ ID NO: 44407 - DNA, 20 bp, Artificial Sequence
  Synthetic oligonucleotide; AAG chr11 5263068 5263087 5263071 -
ccttcatccatgtccctgca

SEQ ID NO: 44408 - DNA, 20 bp, Artificial Sequence
  Synthetic oligonucleotide; TGG chr11 5263045 5263064 5263048 -
acatgaactcatcattttta

SEQ ID NO: 44409 - DNA, 20 bp, Artificial Sequence
  Synthetic oligonucleotide; TAG chr11 5263037 5263056 5263040 -
tcatcatttttatggctgca

SEQ ID NO: 44410 - DNA, 20 bp, Artificial Sequence
  Synthetic oligonucleotide; TGG chr11 5263027 5263046 5263030 -
tatggctgcatagtattcca

SEQ ID NO: 44411 - DNA, 20 bp, Artificial Sequence
  Synthetic oligonucleotide; TGG chr11 5262984 5263003 5262987 -
tttatccattatatcgctga

SEQ ID NO: 44412 - DNA, 20 bp, Artificial Sequence
  Synthetic oligonucleotide; TGG chr11 5262976 5262995 5262979 -
ttatatcgctgatggccatt

SEQ ID NO: 44413 - DNA, 20 bp, Artificial Sequence
  Synthetic oligonucleotide; GGG chr11 5262975 5262994 5262978 -
tatatcgctgatggccattt

SEQ ID NO: 44414 - DNA, 20 bp, Artificial Sequence
  Synthetic oligonucleotide; TGG chr11 5262971 5262990 5262974 -
tcgctgatggccatttgggt

SEQ ID NO: 44415 - DNA, 20 bp, Artificial Sequence
  Synthetic oligonucleotide; AAG chr11 5262964 5262983 5262967 -
tggccatttgggttggttcc

SEQ ID NO: 44416 - DNA, 20 bp, Artificial Sequence
  Synthetic oligonucleotide; TAG chr11 5262945 5262964 5262948 -
caagtctttgctattgtgaa

SEQ ID NO: 44417 - DNA, 20 bp, Artificial Sequence
  Synthetic oligonucleotide; TAG chr11 5262908 5262927 5262911 -
tacgtgtgcacgtgtcttta

SEQ ID NO: 44418 - DNA, 20 bp, Artificial Sequence
  Synthetic oligonucleotide; TAG chr11 5262905 5262924 5262908 -
gtgtgcacgtgtctttatag

SEQ ID NO: 44419 - DNA, 20 bp, Artificial Sequence
  Synthetic oligonucleotide; TGG chr11 5262885 5262904 5262888 -
tagaatgatttctaattctt

SEQ ID NO: 44420 - DNA, 20 bp, Artificial Sequence
  Synthetic oligonucleotide; GGG chr11 5262884 5262903 5262887 -
agaatgatttctaattcttt

SEQ ID NO: 44421 - DNA, 20 bp, Artificial Sequence
  Synthetic oligonucleotide; CAG chr11 5262873 5262892 5262876 -
taattctttgggtatatacc

SEQ ID NO: 44422 - DNA, 20 bp, Artificial Sequence
  Synthetic oligonucleotide; TGG chr11 5262867 5262886 5262870 -
tttgggtatatacccagtaa

SEQ ID NO: 44423 - DNA, 20 bp, Artificial Sequence
  Synthetic oligonucleotide; GGG chr11 5262866 5262885 5262869 -
ttgggtatatacccagtaat

SEQ ID NO: 44424 - DNA, 20 bp, Artificial Sequence
  Synthetic oligonucleotide; TGG chr11 5262858 5262877 5262861 -
atacccagtaatgggattgc

SEQ ID NO: 44425 - DNA, 20 bp, Artificial Sequence
  Synthetic oligonucleotide; GGG chr11 5262857 5262876 5262860 -
tacccagtaatgggattgct

SEQ ID NO: 44426 - DNA, 20 bp, Artificial Sequence
  Synthetic oligonucleotide; CAG chr11 5262849 5262868 5262852 -
aatgggattgctgggtcaaa

SEQ ID NO: 44427 - DNA, 20 bp, Artificial Sequence
  Synthetic oligonucleotide; TGG chr11 5262840 5262859 5262843 -
gctgggtcaaacagtatttc

SEQ ID NO: 44428 - DNA, 20 bp, Artificial Sequence
  Synthetic oligonucleotide; TAG chr11 5262834 5262853 5262837 -
tcaaacagtatttctggttc

SEQ ID NO: 44429 - DNA, 20 bp, Artificial Sequence
  Synthetic oligonucleotide; GAG chr11 5262825 5262844 5262828 -
atttctggttctagatcctt

SEQ ID NO: 44430 - DNA, 20 bp, Artificial Sequence
  Synthetic oligonucleotide; AGG chr11 5262824 5262843 5262827 -
tttctggttctagatccttg

SEQ ID NO: 44431 - DNA, 20 bp, Artificial Sequence
  Synthetic oligonucleotide; TGG chr11 5262798 5262817 5262801 -
cgccacactgtcttccacaa

SEQ ID NO: 44432 - DNA, 20 bp, Artificial Sequence
  Synthetic oligonucleotide; CAG chr11 5262770 5262789 5262773 -
ctaatttacacacccatcaa

SEQ ID NO: 44433 - DNA, 20 bp, Artificial Sequence
  Synthetic oligonucleotide; CAG chr11 5262734 5262753 5262737 -
ctattcttccacatcctctc

SEQ ID NO: 44434 - DNA, 20 bp, Artificial Sequence
  Synthetic oligonucleotide; TGG chr11 5262690 5262709 5262693 -
ttaataattgccattctaac

SEQ ID NO: 44435 - DNA, 20 bp, Artificial Sequence
  Synthetic oligonucleotide; GAG chr11 5262684 5262703 5262687 -
attgccattctaactggcat

SEQ ID NO: 44436 - DNA, 20 bp, Artificial Sequence
  Synthetic oligonucleotide; TGG chr11 5262680 5262699 5262683 -
ccattctaactggcatgaga

SEQ ID NO: 44437 - DNA, 20 bp, Artificial Sequence
  Synthetic oligonucleotide; TGG chr11 5262667 5262686 5262670 -
catgagatggtatctcattg

SEQ ID NO: 44438 - DNA, 20 bp, Artificial Sequence
  Synthetic oligonucleotide; CAG chr11 5262639 5262658 5262642 -
atttgcatttctctaatgac

SEQ ID NO: 44439 - DNA, 20 bp, Artificial Sequence
  Synthetic oligonucleotide; GAG chr11 5262629 5262648 5262632 -
ctctaatgaccagtgatgat

SEQ ID NO: 44440 - DNA, 20 bp, Artificial Sequence
  Synthetic oligonucleotide; TGG chr11 5262607 5262626 5262610 -
gcttcttttcatgtgtttct

SEQ ID NO: 44441 - DNA, 20 bp, Artificial Sequence
  Synthetic oligonucleotide; TAG chr11 5262586 5262605 5262589 -
ggccacataaatgacttctt

SEQ ID NO: 44442 - DNA, 20 bp, Artificial Sequence
  Synthetic oligonucleotide; GAG chr11 5262584 5262603 5262587 -
ccacataaatgacttcttta

SEQ ID NO: 44443 - DNA, 20 bp, Artificial Sequence
  Synthetic oligonucleotide; AAG chr11 5262581 5262600 5262584 -
cataaatgacttctttagag

SEQ ID NO: 44444 - DNA, 20 bp, Artificial Sequence
  Synthetic oligonucleotide; TGG chr11 5262547 5262566 5262550 -
atcctttgtccactttttga

SEQ ID NO: 44445 - DNA, 20 bp, Artificial Sequence
  Synthetic oligonucleotide; GGG chr11 5262546 5262565 5262549 -
tcctttgtccactttttgat

SEQ ID NO: 44446 - DNA, 20 bp, Artificial Sequence
  Synthetic oligonucleotide; GGG chr11 5262545 5262564 5262548 -
cctttgtccactttttgatg

SEQ ID NO: 44447 - DNA, 20 bp, Artificial Sequence
  Synthetic oligonucleotide; TAG chr11 5262538 5262557 5262541 -
ccactttttgatggggtcgt

SEQ ID NO: 44448 - DNA, 20 bp, Artificial Sequence
  Synthetic oligonucleotide; AGG chr11 5262537 5262556 5262540 -
cactttttgatggggtcgtt

SEQ ID NO: 44449 - DNA, 20 bp, Artificial Sequence
  Synthetic oligonucleotide; AAG chr11 5262513 5262532 5262516 -
tttttcttgtaaatttgttg

SEQ ID NO: 44450 - DNA, 20 bp, Artificial Sequence
  Synthetic oligonucleotide; TAG chr11 5262503 5262522 5262506 -
aaatttgttgaagttctttg

SEQ ID NO: 44451 - DNA, 20 bp, Artificial Sequence
  Synthetic oligonucleotide; TGG chr11 5262496 5262515 5262499 -
ttgaagttctttgtagattt

SEQ ID NO: 44452 - DNA, 20 bp, Artificial Sequence
  Synthetic oligonucleotide; TAG chr11 5262489 5262508 5262492 -
tctttgtagattttggatgt

SEQ ID NO: 44453 - DNA, 20 bp, Artificial Sequence
  Synthetic oligonucleotide; CAG chr11 5262478 5262497 5262481 -
tttggatgttagccctttgt

SEQ ID NO: 44454 - DNA, 20 bp, Artificial Sequence
  Synthetic oligonucleotide; TGG chr11 5262474 5262493 5262477 -
gatgttagccctttgtcaga

SEQ ID NO: 44455 - DNA, 20 bp, Artificial Sequence
  Synthetic oligonucleotide; TAG chr11 5262470 5262489 5262473 -
ttagccctttgtcagatgga

SEQ ID NO: 44456 - DNA, 20 bp, Artificial Sequence
  Synthetic oligonucleotide; TAG chr11 5262442 5262461 5262445 -
aaaaattttctcccattctg

SEQ ID NO: 44457 - DNA, 20 bp, Artificial Sequence
  Synthetic oligonucleotide; AGG chr11 5262441 5262460 5262444 -
aaaattttctcccattctgt

SEQ ID NO: 44458 - DNA, 20 bp, Artificial Sequence
  Synthetic oligonucleotide; TAG chr11 5262418 5262437 5262421 -
ttgcctgttcactctgatga

SEQ ID NO: 44459 - DNA, 20 bp, Artificial Sequence
  Synthetic oligonucleotide; CAG chr11 5262403 5262422 5262406 -
gatgatagtcttttgctgtg

SEQ ID NO: 44460 - DNA, 20 bp, Artificial Sequence
  Synthetic oligonucleotide; AAG chr11 5262400 5262419 5262403 -
gatagtcttttgctgtgcag

SEQ ID NO: 44461 - DNA, 20 bp, Artificial Sequence
  Synthetic oligonucleotide; TAG chr11 5262392 5262411 5262395 -
tttgctgtgcagaagctctt

SEQ ID NO: 44462 - DNA, 20 bp, Artificial Sequence
  Synthetic oligonucleotide; TAG chr11 5262383 5262402 5262386 -
cagaagctctttagtttaat

SEQ ID NO: 44463 - DNA, 20 bp, Artificial Sequence
  Synthetic oligonucleotide; TGG chr11 5262363 5262382 5262366 -
tagatcccatatgtcaattt

SEQ ID NO: 44464 - DNA, 20 bp, Artificial Sequence
  Synthetic oligonucleotide; TAG chr11 5262333 5262352 5262336 -
tgtcattgcttttgatgttt

SEQ ID NO: 44465 - DNA, 20 bp, Artificial Sequence
  Synthetic oligonucleotide; TGG chr11 5262298 5262317 5262301 -
gcccatgcctatgtcctgaa

SEQ ID NO: 44466 - DNA, 20 bp, Artificial Sequence
  Synthetic oligonucleotide; TAG chr11 5262288 5262307 5262291 -
atgtcctgaatggtattgcc

SEQ ID NO: 44467 - DNA, 20 bp, Artificial Sequence
  Synthetic oligonucleotide; AGG chr11 5262287 5262306 5262290 -
tgtcctgaatggtattgcct

SEQ ID NO: 44468 - DNA, 20 bp, Artificial Sequence
  Synthetic oligonucleotide; TAG chr11 5262276 5262295 5262279 -
gtattgcctaggttatcttc

SEQ ID NO: 44469 - DNA, 20 bp, Artificial Sequence
  Synthetic oligonucleotide; AGG chr11 5262275 5262294 5262278 -
tattgcctaggttatcttct

SEQ ID NO: 44470 - DNA, 20 bp, Artificial Sequence
  Synthetic oligonucleotide; TGG chr11 5262265 5262284 5262268 -
gttatcttctaggattttta

SEQ ID NO: 44471 - DNA, 20 bp, Artificial Sequence
  Synthetic oligonucleotide; TAG chr11 5262259 5262278 5262262 -
ttctaggatttttatggttt

SEQ ID NO: 44472 - DNA, 20 bp, Artificial Sequence
  Synthetic oligonucleotide; AGG chr11 5262258 5262277 5262261 -
tctaggatttttatggtttt

SEQ ID NO: 44473 - DNA, 20 bp, Artificial Sequence
  Synthetic oligonucleotide; AAG chr11 5262245 5262264 5262248 -
tggttttaggttgcacattt

SEQ ID NO: 44474 - DNA, 20 bp, Artificial Sequence
  Synthetic oligonucleotide; GAG chr11 5262227 5262246 5262230 -
ttaagtctttaatccacctt

SEQ ID NO: 44475 - DNA, 20 bp, Artificial Sequence
  Synthetic oligonucleotide; AAG chr11 5262211 5262230 5262214 -
ccttgagttaatttttgtat

SEQ ID NO: 44476 - DNA, 20 bp, Artificial Sequence
  Synthetic oligonucleotide; AGG chr11 5262210 5262229 5262213 -
cttgagttaatttttgtata

SEQ ID NO: 44477 - DNA, 20 bp, Artificial Sequence
  Synthetic oligonucleotide; AAG chr11 5262204 5262223 5262207 -
ttaatttttgtataaggtgt

SEQ ID NO: 44478 - DNA, 20 bp, Artificial Sequence
  Synthetic oligonucleotide; AGG chr11 5262203 5262222 5262206 -
taatttttgtataaggtgta

SEQ ID NO: 44479 - DNA, 20 bp, Artificial Sequence
  Synthetic oligonucleotide; AAG chr11 5262200 5262219 5262203 -
tttttgtataaggtgtaagg

SEQ ID NO: 44480 - DNA, 20 bp, Artificial Sequence
  Synthetic oligonucleotide; AGG chr11 5262199 5262218 5262202 -
ttttgtataaggtgtaagga

SEQ ID NO: 44481 - DNA, 20 bp, Artificial Sequence
  Synthetic oligonucleotide; GGG chr11 5262198 5262217 5262201 -
tttgtataaggtgtaaggaa

SEQ ID NO: 44482 - DNA, 20 bp, Artificial Sequence
  Synthetic oligonucleotide; GGG chr11 5262197 5262216 5262200 -
ttgtataaggtgtaaggaag

SEQ ID NO: 44483 - DNA, 20 bp, Artificial Sequence
  Synthetic oligonucleotide; CAG chr11 5262192 5262211 5262195 -
taaggtgtaaggaaggggta

SEQ ID NO: 44484 - DNA, 20 bp, Artificial Sequence
  Synthetic oligonucleotide; CAG chr11 5262186 5262205 5262189 -
gtaaggaaggggtacagttt

SEQ ID NO: 44485 - DNA, 20 bp, Artificial Sequence
  Synthetic oligonucleotide; TAG chr11 5262168 5262187 5262171 -
ttcagttttatgcatattgc

SEQ ID NO: 44486 - DNA, 20 bp, Artificial Sequence
  Synthetic oligonucleotide; CAG chr11 5262164 5262183 5262167 -
gttttatgcatattgctagc

SEQ ID NO: 44487 - DNA, 20 bp, Artificial Sequence
  Synthetic oligonucleotide; CAG chr11 5262155 5262174 5262158 -
atattgctagccagtttttc

SEQ ID NO: 44488 - DNA, 20 bp, Artificial Sequence
  Synthetic oligonucleotide; TAG chr11 5262138 5262157 5262141 -
ttccagcaccatttattaaa

SEQ ID NO: 44489 - DNA, 20 bp, Artificial Sequence
  Synthetic oligonucleotide; AGG chr11 5262137 5262156 5262140 -
tccagcaccatttattaaat

SEQ ID NO: 44490 - DNA, 20 bp, Artificial Sequence
  Synthetic oligonucleotide; GGG chr11 5262136 5262155 5262139 -
ccagcaccatttattaaata

SEQ ID NO: 44491 - DNA, 20 bp, Artificial Sequence
  Synthetic oligonucleotide; AAG chr11 5262099 5262118 5262102 -
tgcttttgtgatgtttgtca

SEQ ID NO: 44492 - DNA, 20 bp, Artificial Sequence
  Synthetic oligonucleotide; CAG chr11 5262094 5262113 5262097 -
ttgtgatgtttgtcaaagat

SEQ ID NO: 44493 - DNA, 20 bp, Artificial Sequence
  Synthetic oligonucleotide; TGG chr11 5262090 5262109 5262093 -
gatgtttgtcaaagatcaga

SEQ ID NO: 44494 - DNA, 20 bp, Artificial Sequence
  Synthetic oligonucleotide; TAG chr11 5262084 5262103 5262087 -
tgtcaaagatcagatggtcg

SEQ ID NO: 44495 - DNA, 20 bp, Artificial Sequence
  Synthetic oligonucleotide; TGG chr11 5262076 5262095 5262079 -
atcagatggtcgtagatgtg

SEQ ID NO: 44496 - DNA, 20 bp, Artificial Sequence
  Synthetic oligonucleotide; GAG chr11 5262063 5262082 5262066 -
agatgtgtggcattatttct

SEQ ID NO: 44497 - DNA, 20 bp, Artificial Sequence
  Synthetic oligonucleotide; AGG chr11 5262062 5262081 5262065 -
gatgtgtggcattatttctg

SEQ ID NO: 44498 - DNA, 20 bp, Artificial Sequence
  Synthetic oligonucleotide; TGG chr11 5262042 5262061 5262045 -
aggcttctgttctgttccac

SEQ ID NO: 44499 - DNA, 20 bp, Artificial Sequence
  Synthetic oligonucleotide; TGG chr11 5262024 5262043 5262027 -
actggtctatatatctgttt

SEQ ID NO: 44500 - DNA, 20 bp, Artificial Sequence
  Synthetic oligonucleotide; CAG chr11 5262018 5262037 5262021 -
ctatatatctgttttggtac

SEQ ID NO: 44501 - DNA, 20 bp, Artificial Sequence
  Synthetic oligonucleotide; TAG chr11 5261993 5262012 5261996 -
ccatgctgtttttgttactg

SEQ ID NO: 44502 - DNA, 20 bp, Artificial Sequence
  Synthetic oligonucleotide; TAG chr11 5261985 5262004 5261988 -
tttttgttactgtagccttg

SEQ ID NO: 44503 - DNA, 20 bp, Artificial Sequence
  Synthetic oligonucleotide; TAG chr11 5261980 5261999 5261983 -
gttactgtagccttgtagta

SEQ ID NO: 44504 - DNA, 20 bp, Artificial Sequence
  Synthetic oligonucleotide; AAG chr11 5261973 5261992 5261976 -
tagccttgtagtatagtttg

SEQ ID NO: 44505 - DNA, 20 bp, Artificial Sequence
  Synthetic oligonucleotide; CAG chr11 5261969 5261988 5261972 -
cttgtagtatagtttgaagt

SEQ ID NO: 44506 - DNA, 20 bp, Artificial Sequence
  Synthetic oligonucleotide; AGG chr11 5261968 5261987 5261971 -
ttgtagtatagtttgaagtc

SEQ ID NO: 44507 - DNA, 20 bp, Artificial Sequence
  Synthetic oligonucleotide; TAG chr11 5261965 5261984 5261968 -
tagtatagtttgaagtcagg

SEQ ID NO: 44508 - DNA, 20 bp, Artificial Sequence
  Synthetic oligonucleotide; CAG chr11 5261951 5261970 5261954 -
gtcaggtagcatcatgcctc

SEQ ID NO: 44509 - DNA, 20 bp, Artificial Sequence
  Synthetic oligonucleotide; TAG chr11 5261932 5261951 5261935 -
ccagctttgttctttttgtt

SEQ ID NO: 44510 - DNA, 20 bp, Artificial Sequence
  Synthetic oligonucleotide; AGG chr11 5261931 5261950 5261934 -
cagctttgttctttttgttt

SEQ ID NO: 44511 - DNA, 20 bp, Artificial Sequence
  Synthetic oligonucleotide; TGG chr11 5261921 5261940 5261924 -
ctttttgtttaggattgtct

SEQ ID NO: 44512 - DNA, 20 bp, Artificial Sequence
  Synthetic oligonucleotide; TGG chr11 5261913 5261932 5261916 -
ttaggattgtcttggctata

SEQ ID NO: 44513 - DNA, 20 bp, Artificial Sequence
  Synthetic oligonucleotide; GGG chr11 5261912 5261931 5261915 -
taggattgtcttggctatat

SEQ ID NO: 44514 - DNA, 20 bp, Artificial Sequence
  Synthetic oligonucleotide; AAG chr11 5261882 5261901 5261885 -
ttgattccatatgacattta

SEQ ID NO: 44515 - DNA, 20 bp, Artificial Sequence
  Synthetic oligonucleotide; TAG chr11 5261879 5261898 5261882 -
attccatatgacatttaaag

SEQ ID NO: 44516 - DNA, 20 bp, Artificial Sequence
  Synthetic oligonucleotide; AAG chr11 5261855 5261874 5261858 -
tttttctaattctttgaaaa

SEQ ID NO: 44517 - DNA, 20 bp, Artificial Sequence
  Synthetic oligonucleotide; CAG chr11 5261851 5261870 5261854 -
tctaattctttgaaaaaagt

SEQ ID NO: 44518 - DNA, 20 bp, Artificial Sequence
  Synthetic oligonucleotide; TGG chr11 5261848 5261867 5261851 -
aattctttgaaaaaagtcag

SEQ ID NO: 44519 - DNA, 20 bp, Artificial Sequence
  Synthetic oligonucleotide; TAG chr11 5261845 5261864 5261848 -
tctttgaaaaaagtcagtgg

SEQ ID NO: 44520 - DNA, 20 bp, Artificial Sequence
  Synthetic oligonucleotide; TGG chr11 5261837 5261856 5261840 -
aaaagtcagtggtagcttga

SEQ ID NO: 44521 - DNA, 20 bp, Artificial Sequence
  Synthetic oligonucleotide; GGG chr11 5261836 5261855 5261839 -
aaagtcagtggtagcttgat

SEQ ID NO: 44522 - DNA, 20 bp, Artificial Sequence
  Synthetic oligonucleotide; GGG chr11 5261835 5261854 5261838 -
aagtcagtggtagcttgatg

SEQ ID NO: 44523 - DNA, 20 bp, Artificial Sequence
  Synthetic oligonucleotide; TAG chr11 5261831 5261850 5261834 -
cagtggtagcttgatgggga

SEQ ID NO: 44524 - DNA, 20 bp, Artificial Sequence
  Synthetic oligonucleotide; TGG chr11 5261807 5261826 5261810 -
attgaatctataaattactt

SEQ ID NO: 44525 - DNA, 20 bp, Artificial Sequence
  Synthetic oligonucleotide; GGG chr11 5261806 5261825 5261809 -
ttgaatctataaattacttt

SEQ ID NO: 44526 - DNA, 20 bp, Artificial Sequence
  Synthetic oligonucleotide; CAG chr11 5261803 5261822 5261806 -
aatctataaattactttggg

SEQ ID NO: 44527 - DNA, 20 bp, Artificial Sequence
  Synthetic oligonucleotide; TGG chr11 5261798 5261817 5261801 -
ataaattactttgggcagta

SEQ ID NO: 44528 - DNA, 20 bp, Artificial Sequence
  Synthetic oligonucleotide; AAG chr11 5261787 5261806 5261790 -
tgggcagtatggccatttta

SEQ ID NO: 44529 - DNA, 20 bp, Artificial Sequence
  Synthetic oligonucleotide; GAG chr11 5261763 5261782 5261766 -
tattgattctttctatctat

SEQ ID NO: 44530 - DNA, 20 bp, Artificial Sequence
  Synthetic oligonucleotide; TGG chr11 5261758 5261777 5261761 -
attctttctatctatgagca

SEQ ID NO: 44531 - DNA, 20 bp, Artificial Sequence
  Synthetic oligonucleotide; GAG chr11 5261716 5261735 5261719 -
gtgtcctctcttatttcctt

SEQ ID NO: 44532 - DNA, 20 bp, Artificial Sequence
  Synthetic oligonucleotide; CAG chr11 5261713 5261732 5261716 -
tcctctcttatttccttgag

SEQ ID NO: 44533 - DNA, 20 bp, Artificial Sequence
  Synthetic oligonucleotide; GAG chr11 5261709 5261728 5261712 -
ctcttatttccttgagcagt

SEQ ID NO: 44534 - DNA, 20 bp, Artificial Sequence
  Synthetic oligonucleotide; TGG chr11 5261706 5261725 5261709 -
ttatttccttgagcagtgag

SEQ ID NO: 44535 - DNA, 20 bp, Artificial Sequence
  Synthetic oligonucleotide; TAG chr11 5261699 5261718 5261702 -
cttgagcagtgagtggtttg

SEQ ID NO: 44536 - DNA, 20 bp, Artificial Sequence
  Synthetic oligonucleotide; AAG chr11 5261687 5261706 5261690 -
gtggtttgtagctctccttg

SEQ ID NO: 44537 - DNA, 20 bp, Artificial Sequence
  Synthetic oligonucleotide; GAG chr11 5261685 5261704 5261688 -
ggtttgtagctctccttgaa

SEQ ID NO: 44538 - DNA, 20 bp, Artificial Sequence
  Synthetic oligonucleotide; AGG chr11 5261684 5261703 5261687 -
gtttgtagctctccttgaag

SEQ ID NO: 44539 - DNA, 20 bp, Artificial Sequence
  Synthetic oligonucleotide; TAG chr11 5261667 5261686 5261670 -
aagaggttcttcacatccct

SEQ ID NO: 44540 - DNA, 20 bp, Artificial Sequence
  Synthetic oligonucleotide; AAG chr11 5261664 5261683 5261667 -
aggttcttcacatcccttag

SEQ ID NO: 44541 - DNA, 20 bp, Artificial Sequence
  Synthetic oligonucleotide; TAG chr11 5261652 5261671 5261655 -
tcccttagaagttgtatttc

SEQ ID NO: 44542 - DNA, 20 bp, Artificial Sequence
  Synthetic oligonucleotide; AGG chr11 5261651 5261670 5261654 -
cccttagaagttgtatttct

SEQ ID NO: 44543 - DNA, 20 bp, Artificial Sequence
  Synthetic oligonucleotide; CAG chr11 5261627 5261646 5261630 -
attttattttattctctttg

SEQ ID NO: 44544 - DNA, 20 bp, Artificial Sequence
  Synthetic oligonucleotide; TGG chr11 5261614 5261633 5261617 -
ctctttgcagcaattgtgaa

SEQ ID NO: 44545 - DNA, 20 bp, Artificial Sequence
  Synthetic oligonucleotide; GGG chr11 5261613 5261632 5261616 -
tctttgcagcaattgtgaat

SEQ ID NO: 44546 - DNA, 20 bp, Artificial Sequence
  Synthetic oligonucleotide; GAG chr11 5261611 5261630 5261614 -
tttgcagcaattgtgaatgg

SEQ ID NO: 44547 - DNA, 20 bp, Artificial Sequence
  Synthetic oligonucleotide; TGG chr11 5261595 5261614 5261598 -
atgggagttcacccatgatt

SEQ ID NO: 44548 - DNA, 20 bp, Artificial Sequence
  Synthetic oligonucleotide; TGG chr11 5261573 5261592 5261576 -
gctctctgcttgtctattat

SEQ ID NO: 44549 - DNA, 20 bp, Artificial Sequence
  Synthetic oligonucleotide; TAG chr11 5261566 5261585 5261569 -
gcttgtctattattggtgta

SEQ ID NO: 44550 - DNA, 20 bp, Artificial Sequence
  Synthetic oligonucleotide; AGG chr11 5261565 5261584 5261568 -
cttgtctattattggtgtat

SEQ ID NO: 44551 - DNA, 20 bp, Artificial Sequence
  Synthetic oligonucleotide; GAG chr11 5261526 5261545 5261529 -
gcacactgattttgtatctt

SEQ ID NO: 44552 - DNA, 20 bp, Artificial Sequence
  Synthetic oligonucleotide; AAG chr11 5261514 5261533 5261517 -
tgtatcttgagactttgctg

SEQ ID NO: 44553 - DNA, 20 bp, Artificial Sequence
  Synthetic oligonucleotide; CAG chr11 5261503 5261522 5261506 -
actttgctgaagctgtttat

SEQ ID NO: 44554 - DNA, 20 bp, Artificial Sequence
  Synthetic oligonucleotide; AAG chr11 5261497 5261516 5261500 -
ctgaagctgtttatcagctt

SEQ ID NO: 44555 - DNA, 20 bp, Artificial Sequence
  Synthetic oligonucleotide; TGG chr11 5261490 5261509 5261493 -
tgtttatcagcttaagattt

SEQ ID NO: 44556 - DNA, 20 bp, Artificial Sequence
  Synthetic oligonucleotide; GGG chr11 5261489 5261508 5261492 -
gtttatcagcttaagatttt

SEQ ID NO: 44557 - DNA, 20 bp, Artificial Sequence
  Synthetic oligonucleotide; GAG chr11 5261484 5261503 5261487 -
tcagcttaagattttgggct

SEQ ID NO: 44558 - DNA, 20 bp, Artificial Sequence
  Synthetic oligonucleotide; CAG chr11 5261477 5261496 5261480 -
aagattttgggctgagatga

SEQ ID NO: 44559 - DNA, 20 bp, Artificial Sequence
  Synthetic oligonucleotide; AGG chr11 5261476 5261495 5261479 -
agattttgggctgagatgac

SEQ ID NO: 44560 - DNA, 20 bp, Artificial Sequence
  Synthetic oligonucleotide; GGG chr11 5261475 5261494 5261478 -
gattttgggctgagatgaca

SEQ ID NO: 44561 - DNA, 20 bp, Artificial Sequence
  Synthetic oligonucleotide; CAG chr11 5261440 5261459 5261443 -
acaatcatgtcatctgcaaa

SEQ ID NO: 44562 - DNA, 20 bp, Artificial Sequence
  Synthetic oligonucleotide; GAG chr11 5261438 5261457 5261441 -
aatcatgtcatctgcaaaca

SEQ ID NO: 44563 - DNA, 20 bp, Artificial Sequence
  Synthetic oligonucleotide; TGG chr11 5261372 5261391 5261375 -
tttctcttgcctgattgtcc

SEQ ID NO: 44564 - DNA, 20 bp, Artificial Sequence
  Synthetic oligonucleotide; GAG chr11 5261368 5261387 5261371 -
tcttgcctgattgtcctggc

SEQ ID NO: 44565 - DNA, 20 bp, Artificial Sequence
  Synthetic oligonucleotide; GAG chr11 5261347 5261366 5261350 -
agaacttccaatactatgtt

SEQ ID NO: 44566 - DNA, 20 bp, Artificial Sequence
  Synthetic oligonucleotide; AAG chr11 5261343 5261362 5261346 -
cttccaatactatgttgagt

SEQ ID NO: 44567 - DNA, 20 bp, Artificial Sequence
  Synthetic oligonucleotide; GAG chr11 5261341 5261360 5261344 -
tccaatactatgttgagtaa

SEQ ID NO: 44568 - DNA, 20 bp, Artificial Sequence
  Synthetic oligonucleotide; TGG chr11 5261338 5261357 5261341 -
aatactatgttgagtaagag

SEQ ID NO: 44569 - DNA, 20 bp, Artificial Sequence
  Synthetic oligonucleotide; GAG chr11 5261334 5261353 5261337 -
ctatgttgagtaagagtggc

SEQ ID NO: 44570 - DNA, 20 bp, Artificial Sequence
  Synthetic oligonucleotide; GAG chr11 5261332 5261351 5261335 -
atgttgagtaagagtggcga

SEQ ID NO: 44571 - DNA, 20 bp, Artificial Sequence
  Synthetic oligonucleotide; AGG chr11 5261331 5261350 5261334 -
tgttgagtaagagtggcgag

SEQ ID NO: 44572 - DNA, 20 bp, Artificial Sequence
  Synthetic oligonucleotide; GGG chr11 5261330 5261349 5261333 -
gttgagtaagagtggcgaga

SEQ ID NO: 44573 - DNA, 20 bp, Artificial Sequence
  Synthetic oligonucleotide; CGG chr11 5261311 5261330 5261314 -
agggcatccttgtcttgtgc

SEQ ID NO: 44574 - DNA, 20 bp, Artificial Sequence
  Synthetic oligonucleotide; AAG chr11 5261302 5261321 5261305 -
ttgtcttgtgccggttttca

SEQ ID NO: 44575 - DNA, 20 bp, Artificial Sequence
  Synthetic oligonucleotide; CAG chr11 5261247 5261266 5261250 -
ttgttgacccaatgatcatt

SEQ ID NO: 44576 - DNA, 20 bp, Artificial Sequence
  Synthetic oligonucleotide; AGG chr11 5261246 5261265 5261249 -
tgttgacccaatgatcattc

SEQ ID NO: 44577 - DNA, 20 bp, Artificial Sequence
  Synthetic oligonucleotide; GAG chr11 5261244 5261263 5261247 -
ttgacccaatgatcattcag

SEQ ID NO: 44578 - DNA, 20 bp, Artificial Sequence
  Synthetic oligonucleotide; CAG chr11 5261241 5261260 5261244 -
acccaatgatcattcaggag

SEQ ID NO: 44579 - DNA, 20 bp, Artificial Sequence
  Synthetic oligonucleotide; AGG chr11 5261240 5261259 5261243 -
cccaatgatcattcaggagc

SEQ ID NO: 44580 - DNA, 20 bp, Artificial Sequence
  Synthetic oligonucleotide; TGG chr11 5261213 5261232 5261216 -
ttaatttccctgtatttgca

SEQ ID NO: 44581 - DNA, 20 bp, Artificial Sequence
  Synthetic oligonucleotide; AAG chr11 5261205 5261224 5261208 -
cctgtatttgcatggttttg

SEQ ID NO: 44582 - DNA, 20 bp, Artificial Sequence
  Synthetic oligonucleotide; AGG chr11 5261204 5261223 5261207 -
ctgtatttgcatggttttga

SEQ ID NO: 44583 - DNA, 20 bp, Artificial Sequence
  Synthetic oligonucleotide; TAG chr11 5261192 5261211 5261195 -
ggttttgaaggttccttttg

SEQ ID NO: 44584 - DNA, 20 bp, Artificial Sequence
  Synthetic oligonucleotide; TGG chr11 5261165 5261184 5261168 -
tttccaattttattctactg

SEQ ID NO: 44585 - DNA, 20 bp, Artificial Sequence
  Synthetic oligonucleotide; GAG chr11 5261159 5261178 5261162 -
attttattctactgtggtct

SEQ ID NO: 44586 - DNA, 20 bp, Artificial Sequence
  Synthetic oligonucleotide; GAG chr11 5261157 5261176 5261160 -
tttattctactgtggtctga

SEQ ID NO: 44587 - DNA, 20 bp, Artificial Sequence
  Synthetic oligonucleotide; GAG chr11 5261155 5261174 5261158 -
tattctactgtggtctgaga

SEQ ID NO: 44588 - DNA, 20 bp, Artificial Sequence
  Synthetic oligonucleotide; GAG chr11 5261118 5261137 5261121 -
tcaatttttaaaaatttatt

SEQ ID NO: 44589 - DNA, 20 bp, Artificial Sequence
  Synthetic oligonucleotide; AGG chr11 5261117 5261136 5261120 -
caatttttaaaaatttattg

SEQ ID NO: 44590 - DNA, 20 bp, Artificial Sequence
  Synthetic oligonucleotide; TGG chr11 5261105 5261124 5261108 -
atttattgaggcttgttttg

SEQ ID NO: 44591 - DNA, 20 bp, Artificial Sequence
  Synthetic oligonucleotide; TGG chr11 5261093 5261112 5261096 -
ttgttttgtggcatatcata

SEQ ID NO: 44592 - DNA, 20 bp, Artificial Sequence
  Synthetic oligonucleotide; TGG chr11 5261083 5261102 5261086 -
gcatatcatatggcctatct

SEQ ID NO: 44593 - DNA, 20 bp, Artificial Sequence
  Synthetic oligonucleotide; GAG chr11 5261081 5261100 5261084 -
atatcatatggcctatcttg

SEQ ID NO: 44594 - DNA, 20 bp, Artificial Sequence
  Synthetic oligonucleotide; AAG chr11 5261077 5261096 5261080 -
catatggcctatcttggaga

SEQ ID NO: 44595 - DNA, 20 bp, Artificial Sequence
  Synthetic oligonucleotide; TAG chr11 5261057 5261076 5261060 -
aagttccatgtgctgatgaa

SEQ ID NO: 44596 - DNA, 20 bp, Artificial Sequence
  Synthetic oligonucleotide; CAG chr11 5261041 5261060 5261044 -
tgaatagaatgtgtattctg

SEQ ID NO: 44597 - DNA, 20 bp, Artificial Sequence
  Synthetic oligonucleotide; TGG chr11 5261034 5261053 5261037 -
aatgtgtattctgcagttgt

SEQ ID NO: 44598 - DNA, 20 bp, Artificial Sequence
  Synthetic oligonucleotide; GGG chr11 5261033 5261052 5261036 -
atgtgtattctgcagttgtt

SEQ ID NO: 44599 - DNA, 20 bp, Artificial Sequence
  Synthetic oligonucleotide; TAG chr11 5261030 5261049 5261033 -
tgtattctgcagttgttggg

SEQ ID NO: 44600 - DNA, 20 bp, Artificial Sequence
  Synthetic oligonucleotide; AAG chr11 5261006 5261025 5261009 -
atgtcctgtaaatatctgtt

SEQ ID NO: 44601 - DNA, 20 bp, Artificial Sequence
  Synthetic oligonucleotide; TAG chr11 5260971 5260990 5260974 -
ttaaatccattgtttctttg

SEQ ID NO: 44602 - DNA, 20 bp, Artificial Sequence
  Synthetic oligonucleotide; TAG chr11 5260949 5260968 5260952 -
gactgtcttgatgacctgcc

SEQ ID NO: 44603 - DNA, 20 bp, Artificial Sequence
  Synthetic oligonucleotide; CAG chr11 5260944 5260963 5260947 -
tcttgatgacctgcctagtg

SEQ ID NO: 44604 - DNA, 20 bp, Artificial Sequence
  Synthetic oligonucleotide; CAG chr11 5260940 5260959 5260943 -
gatgacctgcctagtgcagt

SEQ ID NO: 44605 - DNA, 20 bp, Artificial Sequence
  Synthetic oligonucleotide; TGG chr11 5260937 5260956 5260940 -
gacctgcctagtgcagtcag

SEQ ID NO: 44606 - DNA, 20 bp, Artificial Sequence
  Synthetic oligonucleotide; GAG chr11 5260935 5260954 5260938 -
cctgcctagtgcagtcagtg

SEQ ID NO: 44607 - DNA, 20 bp, Artificial Sequence
  Synthetic oligonucleotide; AAG chr11 5260927 5260946 5260930 -
gtgcagtcagtggagtattg

SEQ ID NO: 44608 - DNA, 20 bp, Artificial Sequence
  Synthetic oligonucleotide; TAG chr11 5260898 5260917 5260901 -
actattattatgttgctgtc

SEQ ID NO: 44609 - DNA, 20 bp, Artificial Sequence
  Synthetic oligonucleotide; TAG chr11 5260893 5260912 5260896 -
tattatgttgctgtctagtc

SEQ ID NO: 44610 - DNA, 20 bp, Artificial Sequence
  Synthetic oligonucleotide; TAG chr11 5260890 5260909 5260893 -
tatgttgctgtctagtctag

SEQ ID NO: 44611 - DNA, 20 bp, Artificial Sequence
  Synthetic oligonucleotide; TGG chr11 5260870 5260889 5260873 -
tagtaattgttttataaatt

SEQ ID NO: 44612 - DNA, 20 bp, Artificial Sequence
  Synthetic oligonucleotide; GGG chr11 5260869 5260888 5260872 -
agtaattgttttataaattt

SEQ ID NO: 44613 - DNA, 20 bp, Artificial Sequence
  Synthetic oligonucleotide; CAG chr11 5260861 5260880 5260864 -
ttttataaatttgggatctc

SEQ ID NO: 44614 - DNA, 20 bp, Artificial Sequence
  Synthetic oligonucleotide; TAG chr11 5260855 5260874 5260858 -
aaatttgggatctccagtat

SEQ ID NO: 44615 - DNA, 20 bp, Artificial Sequence
  Synthetic oligonucleotide; AAG chr11 5260839 5260858 5260842 -
gtattagatgcatatatatt

SEQ ID NO: 44616 - DNA, 20 bp, Artificial Sequence
  Synthetic oligonucleotide; TGG chr11 5260817 5260836 5260820 -
gaattgtaatattctcccat

SEQ ID NO: 44617 - DNA, 20 bp, Artificial Sequence
  Synthetic oligonucleotide; AAG chr11 5260812 5260831 5260815 -
gtaatattctcccattggac

SEQ ID NO: 44618 - DNA, 20 bp, Artificial Sequence
  Synthetic oligonucleotide; AGG chr11 5260811 5260830 5260814 -
taatattctcccattggaca

SEQ ID NO: 44619 - DNA, 20 bp, Artificial Sequence
  Synthetic oligonucleotide; GGG chr11 5260810 5260829 5260813 -
aatattctcccattggacaa

SEQ ID NO: 44620 - DNA, 20 bp, Artificial Sequence
  Synthetic oligonucleotide; AAG chr11 5260754 5260773 5260757 -
ttttaactgctgtttcttta

SEQ ID NO: 44621 - DNA, 20 bp, Artificial Sequence
  Synthetic oligonucleotide; AAG chr11 5260734 5260753 5260737 -
aagtttgttttgtctgacat

SEQ ID NO: 44622 - DNA, 20 bp, Artificial Sequence
  Synthetic oligonucleotide; TAG chr11 5260729 5260748 5260732 -
tgttttgtctgacataagaa

SEQ ID NO: 44623 - DNA, 20 bp, Artificial Sequence
  Synthetic oligonucleotide; TGG chr11 5260720 5260739 5260723 -
tgacataagaatagctgctt

SEQ ID NO: 44624 - DNA, 20 bp, Artificial Sequence
  Synthetic oligonucleotide; TGG chr11 5260709 5260728 5260712 -
tagctgctttggctcgcttt

SEQ ID NO: 44625 - DNA, 20 bp, Artificial Sequence
  Synthetic oligonucleotide; TGG chr11 5260694 5260713 5260697 -
gcttttggtgtccatttgtg

SEQ ID NO: 44626 - DNA, 20 bp, Artificial Sequence
  Synthetic oligonucleotide; AAG chr11 5260665 5260684 5260668 -
attttccacccctttacctt

SEQ ID NO: 44627 - DNA, 20 bp, Artificial Sequence
  Synthetic oligonucleotide; GAG chr11 5260655 5260674 5260658 -
cctttaccttaagtttatgt

SEQ ID NO: 44628 - DNA, 20 bp, Artificial Sequence
  Synthetic oligonucleotide; TAG chr11 5260641 5260660 5260644 -
ttatgtgagtccttatgtgt

SEQ ID NO: 44629 - DNA, 20 bp, Artificial Sequence
  Synthetic oligonucleotide; AGG chr11 5260640 5260659 5260643 -
tatgtgagtccttatgtgtt

SEQ ID NO: 44630 - DNA, 20 bp, Artificial Sequence
  Synthetic oligonucleotide; GAG chr11 5260636 5260655 5260639 -
tgagtccttatgtgttaggt

SEQ ID NO: 44631 - DNA, 20 bp, Artificial Sequence
  Synthetic oligonucleotide; AAG chr11 5260626 5260645 5260629 -
tgtgttaggtgagtctcctg

SEQ ID NO: 44632 - DNA, 20 bp, Artificial Sequence
  Synthetic oligonucleotide; AGG chr11 5260625 5260644 5260628 -
gtgttaggtgagtctcctga

SEQ ID NO: 44633 - DNA, 20 bp, Artificial Sequence
  Synthetic oligonucleotide; CGG chr11 5260622 5260641 5260625 -
ttaggtgagtctcctgaagg

SEQ ID NO: 44634 - DNA, 20 bp, Artificial Sequence
  Synthetic oligonucleotide; CAG chr11 5260619 5260638 5260622 -
ggtgagtctcctgaaggcgg

SEQ ID NO: 44635 - DNA, 20 bp, Artificial Sequence
  Synthetic oligonucleotide; TGG chr11 5260611 5260630 5260614 -
tcctgaaggcggcagataac

SEQ ID NO: 44636 - DNA, 20 bp, Artificial Sequence
  Synthetic oligonucleotide; TGG chr11 5260607 5260626 5260610 -
gaaggcggcagataactggt

SEQ ID NO: 44637 - DNA, 20 bp, Artificial Sequence
  Synthetic oligonucleotide; AAG chr11 5260569 5260588 5260572 -
tctgcaattctgtatctttt

SEQ ID NO: 44638 - DNA, 20 bp, Artificial Sequence
  Synthetic oligonucleotide; TGG chr11 5260566 5260585 5260569 -
gcaattctgtatcttttaag

SEQ ID NO: 44639 - DNA, 20 bp, Artificial Sequence
  Synthetic oligonucleotide; GAG chr11 5260564 5260583 5260567 -
aattctgtatcttttaagtg

SEQ ID NO: 44640 - DNA, 20 bp, Artificial Sequence
  Synthetic oligonucleotide; TAG chr11 5260557 5260576 5260560 -
tatcttttaagtggagcatt

SEQ ID NO: 44641 - DNA, 20 bp, Artificial Sequence
  Synthetic oligonucleotide; CAG chr11 5260536 5260555 5260539 -
agtccatttacattcaacat

SEQ ID NO: 44642 - DNA, 20 bp, Artificial Sequence
  Synthetic oligonucleotide; GAG chr11 5260529 5260548 5260532 -
ttacattcaacatcagtatt

SEQ ID NO: 44643 - DNA, 20 bp, Artificial Sequence
  Synthetic oligonucleotide; AGG chr11 5260528 5260547 5260531 -
tacattcaacatcagtattg

SEQ ID NO: 44644 - DNA, 20 bp, Artificial Sequence
  Synthetic oligonucleotide; GAG chr11 5260522 5260541 5260525 -
caacatcagtattgaggtgt

SEQ ID NO: 44645 - DNA, 20 bp, Artificial Sequence
  Synthetic oligonucleotide; AGG chr11 5260521 5260540 5260524 -
aacatcagtattgaggtgtg

SEQ ID NO: 44646 - DNA, 20 bp, Artificial Sequence
  Synthetic oligonucleotide; TGG chr11 5260501 5260520 5260504 -
aggtactattccattcttcg

SEQ ID NO: 44647 - DNA, 20 bp, Artificial Sequence
  Synthetic oligonucleotide; TGG chr11 5260447 5260466 5260450 -
tttttgttgtatatgtccta

SEQ ID NO: 44648 - DNA, 20 bp, Artificial Sequence
  Synthetic oligonucleotide; GGG chr11 5260446 5260465 5260449 -
ttttgttgtatatgtcctat

SEQ ID NO: 44649 - DNA, 20 bp, Artificial Sequence
  Synthetic oligonucleotide; AAG chr11 5260431 5260450 5260434 -
cctatgggatttatgcttta

SEQ ID NO: 44650 - DNA, 20 bp, Artificial Sequence
  Synthetic oligonucleotide; GAG chr11 5260429 5260448 5260432 -
tatgggatttatgctttaaa

SEQ ID NO: 44651 - DNA, 20 bp, Artificial Sequence
  Synthetic oligonucleotide; AGG chr11 5260428 5260447 5260431 -
atgggatttatgctttaaag

SEQ ID NO: 44652 - DNA, 20 bp, Artificial Sequence
  Synthetic oligonucleotide; CAG chr11 5260406 5260425 5260409 -
gttctgttttgatgtgcttc

SEQ ID NO: 44653 - DNA, 20 bp, Artificial Sequence
  Synthetic oligonucleotide; AGG chr11 5260405 5260424 5260408 -
ttctgttttgatgtgcttcc

SEQ ID NO: 44654 - DNA, 20 bp, Artificial Sequence
  Synthetic oligonucleotide; GGG chr11 5260404 5260423 5260407 -
tctgttttgatgtgcttcca

SEQ ID NO: 44655 - DNA, 20 bp, Artificial Sequence
  Synthetic oligonucleotide; AAG chr11 5260393 5260412 5260396 -
gtgcttccagggtttatttc

SEQ ID NO: 44656 - DNA, 20 bp, Artificial Sequence
  Synthetic oligonucleotide; TAG chr11 5260387 5260406 5260390 -
ccagggtttatttcaagatt

SEQ ID NO: 44657 - DNA, 20 bp, Artificial Sequence
  Synthetic oligonucleotide; GAG chr11 5260385 5260404 5260388 -
agggtttatttcaagattta

SEQ ID NO: 44658 - DNA, 20 bp, Artificial Sequence
  Synthetic oligonucleotide; CAG chr11 5260372 5260391 5260375 -
agatttagagctccttttat

SEQ ID NO: 44659 - DNA, 20 bp, Artificial Sequence
  Synthetic oligonucleotide; TAG chr11 5260363 5260382 5260366 -
gctccttttatcagttcttg

SEQ ID NO: 44660 - DNA, 20 bp, Artificial Sequence
  Synthetic oligonucleotide; TGG chr11 5260357 5260376 5260360 -
tttatcagttcttgtagtgt

SEQ ID NO: 44661 - DNA, 20 bp, Artificial Sequence
  Synthetic oligonucleotide; TGG chr11 5260352 5260371 5260355 -
cagttcttgtagtgttggct

SEQ ID NO: 44662 - DNA, 20 bp, Artificial Sequence
  Synthetic oligonucleotide; TAG chr11 5260349 5260368 5260352 -
ttcttgtagtgttggcttgg

SEQ ID NO: 44663 - DNA, 20 bp, Artificial Sequence
  Synthetic oligonucleotide; CAG chr11 5260333 5260352 5260336 -
ttggtagtgccgaattctct

SEQ ID NO: 44664 - DNA, 20 bp, Artificial Sequence
  Synthetic oligonucleotide; AAG chr11 5260287 5260306 5260290 -
gtgtattttcttcatttgtg

SEQ ID NO: 44665 - DNA, 20 bp, Artificial Sequence
  Synthetic oligonucleotide; TAG chr11 5260282 5260301 5260285 -
ttttcttcatttgtgaagct

SEQ ID NO: 44666 - DNA, 20 bp, Artificial Sequence
  Synthetic oligonucleotide; TGG chr11 5260273 5260292 5260276 -
tttgtgaagcttagtttcac

SEQ ID NO: 44667 - DNA, 20 bp, Artificial Sequence
  Synthetic oligonucleotide; TGG chr11 5260258 5260277 5260261 -
ttcactggatataaaattct

SEQ ID NO: 44668 - DNA, 20 bp, Artificial Sequence
  Synthetic oligonucleotide; AAG chr11 5260237 5260256 5260240 -
ggctgataattgttttgttt

SEQ ID NO: 44669 - DNA, 20 bp, Artificial Sequence
  Synthetic oligonucleotide; AAG chr11 5260234 5260253 5260237 -
tgataattgttttgtttaag

SEQ ID NO: 44670 - DNA, 20 bp, Artificial Sequence
  Synthetic oligonucleotide; AGG chr11 5260233 5260252 5260236 -
gataattgttttgtttaaga

SEQ ID NO: 44671 - DNA, 20 bp, Artificial Sequence
  Synthetic oligonucleotide; AAG chr11 5260227 5260246 5260230 -
tgttttgtttaagaaggctg

SEQ ID NO: 44672 - DNA, 20 bp, Artificial Sequence
  Synthetic oligonucleotide; TAG chr11 5260223 5260242 5260226 -
ttgtttaagaaggctgaaga

SEQ ID NO: 44673 - DNA, 20 bp, Artificial Sequence
  Synthetic oligonucleotide; AGG chr11 5260222 5260241 5260225 -
tgtttaagaaggctgaagat

SEQ ID NO: 44674 - DNA, 20 bp, Artificial Sequence
  Synthetic oligonucleotide; GGG chr11 5260221 5260240 5260224 -
gtttaagaaggctgaagata

SEQ ID NO: 44675 - DNA, 20 bp, Artificial Sequence
  Synthetic oligonucleotide; TAG chr11 5260205 5260224 5260208 -
gatagggccatattcacttc

SEQ ID NO: 44676 - DNA, 20 bp, Artificial Sequence
  Synthetic oligonucleotide; CGG chr11 5260196 5260215 5260199 -
atattcacttctagctttta

SEQ ID NO: 44677 - DNA, 20 bp, Artificial Sequence
  Synthetic oligonucleotide; GAG chr11 5260185 5260204 5260188 -
tagcttttacggtttctgct

SEQ ID NO: 44678 - DNA, 20 bp, Artificial Sequence
  Synthetic oligonucleotide; TAG chr11 5260163 5260182 5260166 -
gaaatctgctgttaatctga

SEQ ID NO: 44679 - DNA, 20 bp, Artificial Sequence
  Synthetic oligonucleotide; AGG chr11 5260162 5260181 5260165 -
aaatctgctgttaatctgat

SEQ ID NO: 44680 - DNA, 20 bp, Artificial Sequence
  Synthetic oligonucleotide; TAG chr11 5260149 5260168 5260152 -
atctgataggttttctttca

SEQ ID NO: 44681 - DNA, 20 bp, Artificial Sequence
  Synthetic oligonucleotide; AGG chr11 5260148 5260167 5260151 -
tctgataggttttctttcat

SEQ ID NO: 44682 - DNA, 20 bp, Artificial Sequence
  Synthetic oligonucleotide; TGG chr11 5260140 5260159 5260143 -
gttttctttcataggttacc

SEQ ID NO: 44683 - DNA, 20 bp, Artificial Sequence
  Synthetic oligonucleotide; TAG chr11 5260137 5260156 5260140 -
ttctttcataggttacctgg

SEQ ID NO: 44684 - DNA, 20 bp, Artificial Sequence
  Synthetic oligonucleotide; CAG chr11 5260124 5260143 5260127 -
tacctggtagtttcacctca

SEQ ID NO: 44685 - DNA, 20 bp, Artificial Sequence
  Synthetic oligonucleotide; AAG chr11 5260116 5260135 5260119 -
agtttcacctcacagctctt

SEQ ID NO: 44686 - DNA, 20 bp, Artificial Sequence
  Synthetic oligonucleotide; TAG chr11 5260099 5260118 5260102 -
cttaagattctctttgtctt

SEQ ID NO: 44687 - DNA, 20 bp, Artificial Sequence
  Synthetic oligonucleotide; TGG chr11 5260089 5260108 5260092 -
tctttgtctttagataactt

SEQ ID NO: 44688 - DNA, 20 bp, Artificial Sequence
  Synthetic oligonucleotide; TAG chr11 5260065 5260084 5260068 -
tactctgatgacaatgtacc

SEQ ID NO: 44689 - DNA, 20 bp, Artificial Sequence
  Synthetic oligonucleotide; AGG chr11 5260064 5260083 5260067 -
actctgatgacaatgtacct

SEQ ID NO: 44690 - DNA, 20 bp, Artificial Sequence
  Synthetic oligonucleotide; CAG chr11 5260035 5260054 5260038 -
tatttttgcaatgaatttcc

SEQ ID NO: 44691 - DNA, 20 bp, Artificial Sequence
  Synthetic oligonucleotide; AGG chr11 5260034 5260053 5260037 -
atttttgcaatgaatttccc

SEQ ID NO: 44692 - DNA, 20 bp, Artificial Sequence
  Synthetic oligonucleotide; GAG chr11 5260023 5260042 5260026 -
gaatttcccaggtgtttatt

SEQ ID NO: 44693 - DNA, 20 bp, Artificial Sequence
  Synthetic oligonucleotide; TGG chr11 5260009 5260028 5260012 -
tttattgagcttcttgtatt

SEQ ID NO: 44694 - DNA, 20 bp, Artificial Sequence
  Synthetic oligonucleotide; TAG chr11 5260001 5260020 5260004 -
gcttcttgtatttggatatc

SEQ ID NO: 44695 - DNA, 20 bp, Artificial Sequence
  Synthetic oligonucleotide; AGG chr11 5260000 5260019 5260003 -
cttcttgtatttggatatct

SEQ ID NO: 44696 - DNA, 20 bp, Artificial Sequence
  Synthetic oligonucleotide; TAG chr11 5259993 5260012 5259996 -
tatttggatatctaggtctc

SEQ ID NO: 44697 - DNA, 20 bp, Artificial Sequence
  Synthetic oligonucleotide; AAG chr11 5259989 5260008 5259992 -
tggatatctaggtctctagc

SEQ ID NO: 44698 - DNA, 20 bp, Artificial Sequence
  Synthetic oligonucleotide; AGG chr11 5259988 5260007 5259991 -
ggatatctaggtctctagca

SEQ ID NO: 44699 - DNA, 20 bp, Artificial Sequence
  Synthetic oligonucleotide; TGG chr11 5259985 5260004 5259988 -
tatctaggtctctagcaagg

SEQ ID NO: 44700 - DNA, 20 bp, Artificial Sequence
  Synthetic oligonucleotide; GGG chr11 5259984 5260003 5259987 -
atctaggtctctagcaaggt

SEQ ID NO: 44701 - DNA, 20 bp, Artificial Sequence
  Synthetic oligonucleotide; GGG chr11 5259983 5260002 5259986 -
tctaggtctctagcaaggtg

SEQ ID NO: 44702 - DNA, 20 bp, Artificial Sequence
  Synthetic oligonucleotide; GGG chr11 5259982 5260001 5259985 -
ctaggtctctagcaaggtgg

SEQ ID NO: 44703 - DNA, 20 bp, Artificial Sequence
  Synthetic oligonucleotide; AAG chr11 5259979 5259998 5259982 -
ggtctctagcaaggtggggg

SEQ ID NO: 44704 - DNA, 20 bp, Artificial Sequence
  Synthetic oligonucleotide; TGG chr11 5259957 5259976 5259960 -
gttttccttgattatttccc

SEQ ID NO: 44705 - DNA, 20 bp, Artificial Sequence
  Synthetic oligonucleotide; AAG chr11 5259952 5259971 5259955 -
ccttgattatttccctggat

SEQ ID NO: 44706 - DNA, 20 bp, Artificial Sequence
  Synthetic oligonucleotide; TAG chr11 5259936 5259955 5259939 -
ggataagttttccaaacttt

SEQ ID NO: 44707 - DNA, 20 bp, Artificial Sequence
  Synthetic oligonucleotide; CAG chr11 5259918 5259937 5259921 -
tttagatttctcttctttct

SEQ ID NO: 44708 - DNA, 20 bp, Artificial Sequence
  Synthetic oligonucleotide; AGG chr11 5259917 5259936 5259920 -
ttagatttctcttctttctc

SEQ ID NO: 44709 - DNA, 20 bp, Artificial Sequence
  Synthetic oligonucleotide; TAG chr11 5259899 5259918 5259902 -
tcaggaatgctgattattct

SEQ ID NO: 44710 - DNA, 20 bp, Artificial Sequence
  Synthetic oligonucleotide; AGG chr11 5259898 5259917 5259901 -
caggaatgctgattattctt

SEQ ID NO: 44711 - DNA, 20 bp, Artificial Sequence
  Synthetic oligonucleotide; CAG chr11 5259874 5259893 5259877 -
ttgattgtttaacataatcc

SEQ ID NO: 44712 - DNA, 20 bp, Artificial Sequence
  Synthetic oligonucleotide; TGG chr11 5259865 5259884 5259868 -
taacataatcccagatttct

SEQ ID NO: 44713 - DNA, 20 bp, Artificial Sequence
  Synthetic oligonucleotide; GAG chr11 5259863 5259882 5259866 -
acataatcccagatttcttg

SEQ ID NO: 44714 - DNA, 20 bp, Artificial Sequence
  Synthetic oligonucleotide; AGG chr11 5259862 5259881 5259865 -
cataatcccagatttcttgg

SEQ ID NO: 44715 - DNA, 20 bp, Artificial Sequence
  Synthetic oligonucleotide; TGG chr11 5259819 5259838 5259822 -
tcttttttctttgtctttgt

SEQ ID NO: 44716 - DNA, 20 bp, Artificial Sequence
  Synthetic oligonucleotide; TGG chr11 5259814 5259833 5259817 -
tttctttgtctttgttggat

SEQ ID NO: 44717 - DNA, 20 bp, Artificial Sequence
  Synthetic oligonucleotide; GGG chr11 5259813 5259832 5259816 -
ttctttgtctttgttggatt

SEQ ID NO: 44718 - DNA, 20 bp, Artificial Sequence
  Synthetic oligonucleotide; AAG chr11 5259788 5259807 5259791 -
aattcaaaaactttgtcttc

SEQ ID NO: 44719 - DNA, 20 bp, Artificial Sequence
  Synthetic oligonucleotide; TGG chr11 5259767 5259786 5259770 -
agctctgaatttcttctgct

SEQ ID NO: 44720 - DNA, 20 bp, Artificial Sequence
  Synthetic oligonucleotide; GAG chr11 5259753 5259772 5259756 -
tctgcttggattctattgct

SEQ ID NO: 44721 - DNA, 20 bp, Artificial Sequence
  Synthetic oligonucleotide; TAG chr11 5259744 5259763 5259747 -
attctattgctgagactttc

SEQ ID NO: 44722 - DNA, 20 bp, Artificial Sequence
  Synthetic oligonucleotide; GAG chr11 5259742 5259761 5259745 -
tctattgctgagactttcta

SEQ ID NO: 44723 - DNA, 20 bp, Artificial Sequence
  Synthetic oligonucleotide; AAG chr11 5259723 5259742 5259726 -
agagcattttgcatttctat

SEQ ID NO: 44724 - DNA, 20 bp, Artificial Sequence
  Synthetic oligonucleotide; AAG chr11 5259694 5259713 5259697 -
cattcatccattgtttcctg

SEQ ID NO: 44725 - DNA, 20 bp, Artificial Sequence
  Synthetic oligonucleotide; AAG chr11 5259654 5259673 5259657 -
ttatgctatctctttaactg

SEQ ID NO: 44726 - DNA, 20 bp, Artificial Sequence
  Synthetic oligonucleotide; TGG chr11 5259620 5259639 5259623 -
catttcttgtatcatatttt

SEQ ID NO: 44727 - DNA, 20 bp, Artificial Sequence
  Synthetic oligonucleotide; TGG chr11 5259605 5259624 5259608 -
atttttggtttttttaaaat

SEQ ID NO: 44728 - DNA, 20 bp, Artificial Sequence
  Synthetic oligonucleotide; CGG chr11 5259589 5259608 5259592 -
aaattggacttcaccttcct

SEQ ID NO: 44729 - DNA, 20 bp, Artificial Sequence
  Synthetic oligonucleotide; TAG chr11 5259573 5259592 5259576 -
tcctcggatgcctccttgat

SEQ ID NO: 44730 - DNA, 20 bp, Artificial Sequence
  Synthetic oligonucleotide; CAG chr11 5259541 5259560 5259544 -
tgaccttctgaattattttt

SEQ ID NO: 44731 - DNA, 20 bp, Artificial Sequence
  Synthetic oligonucleotide; AGG chr11 5259540 5259559 5259543 -
gaccttctgaattatttttc

SEQ ID NO: 44732 - DNA, 20 bp, Artificial Sequence
  Synthetic oligonucleotide; CAG chr11 5259532 5259551 5259535 -
gaattatttttcaggtaaat

SEQ ID NO: 44733 - DNA, 20 bp, Artificial Sequence
  Synthetic oligonucleotide; AGG chr11 5259531 5259550 5259534 -
aattatttttcaggtaaatc

SEQ ID NO: 44734 - DNA, 20 bp, Artificial Sequence
  Synthetic oligonucleotide; GGG chr11 5259530 5259549 5259533 -
attatttttcaggtaaatca

SEQ ID NO: 44735 - DNA, 20 bp, Artificial Sequence
  Synthetic oligonucleotide; TGG chr11 5259518 5259537 5259521 -
gtaaatcagggatttcttct

SEQ ID NO: 44736 - DNA, 20 bp, Artificial Sequence
  Synthetic oligonucleotide; TGG chr11 5259513 5259532 5259516 -
tcagggatttcttcttggtt

SEQ ID NO: 44737 - DNA, 20 bp, Artificial Sequence
  Synthetic oligonucleotide; TGG chr11 5259501 5259520 5259504 -
tcttggtttggatgcattgc

SEQ ID NO: 44738 - DNA, 20 bp, Artificial Sequence
  Synthetic oligonucleotide; GAG chr11 5259497 5259516 5259500 -
ggtttggatgcattgctggt

SEQ ID NO: 44739 - DNA, 20 bp, Artificial Sequence
  Synthetic oligonucleotide; TAG chr11 5259493 5259512 5259496 -
tggatgcattgctggtgagc

SEQ ID NO: 44740 - DNA, 20 bp, Artificial Sequence
  Synthetic oligonucleotide; TGG chr11 5259480 5259499 5259483 -
ggtgagctagtatgattttt

SEQ ID NO: 44741 - DNA, 20 bp, Artificial Sequence
  Synthetic oligonucleotide; GGG chr11 5259479 5259498 5259482 -
gtgagctagtatgatttttt

SEQ ID NO: 44742 - DNA, 20 bp, Artificial Sequence
  Synthetic oligonucleotide; GGG chr11 5259478 5259497 5259481 -
tgagctagtatgattttttg

SEQ ID NO: 44743 - DNA, 20 bp, Artificial Sequence
  Synthetic oligonucleotide; GGG chr11 5259477 5259496 5259480 -
gagctagtatgattttttgg

SEQ ID NO: 44744 - DNA, 20 bp, Artificial Sequence
  Synthetic oligonucleotide; GGG chr11 5259476 5259495 5259479 -
agctagtatgattttttggg

SEQ ID NO: 44745 - DNA, 20 bp, Artificial Sequence
  Synthetic oligonucleotide; AAG chr11 5259468 5259487 5259471 -
tgattttttggggggtgtta

SEQ ID NO: 44746 - DNA, 20 bp, Artificial Sequence
  Synthetic oligonucleotide; CAG chr11 5259445 5259464 5259448 -
aaccttgtttttcatattac

SEQ ID NO: 44747 - DNA, 20 bp, Artificial Sequence
  Synthetic oligonucleotide; GAG chr11 5259443 5259462 5259446 -
ccttgtttttcatattacca

SEQ ID NO: 44748 - DNA, 20 bp, Artificial Sequence
  Synthetic oligonucleotide; TAG chr11 5259439 5259458 5259442 -
gtttttcatattaccagagt

SEQ ID NO: 44749 - DNA, 20 bp, Artificial Sequence
  Synthetic oligonucleotide; TGG chr11 5259431 5259450 5259434 -
tattaccagagttagttttc

SEQ ID NO: 44750 - DNA, 20 bp, Artificial Sequence
  Synthetic oligonucleotide; TGG chr11 5259416 5259435 5259419 -
ttttctggttccttctcact

SEQ ID NO: 44751 - DNA, 20 bp, Artificial Sequence
  Synthetic oligonucleotide; GGG chr11 5259415 5259434 5259418 -
tttctggttccttctcactt

SEQ ID NO: 44752 - DNA, 20 bp, Artificial Sequence
  Synthetic oligonucleotide; TAG chr11 5259412 5259431 5259415 -
ctggttccttctcacttggg

SEQ ID NO: 44753 - DNA, 20 bp, Artificial Sequence
  Synthetic oligonucleotide; AGG chr11 5259411 5259430 5259414 -
tggttccttctcacttgggt

SEQ ID NO: 44754 - DNA, 20 bp, Artificial Sequence
  Synthetic oligonucleotide; CAG chr11 5259402 5259421 5259405 -
ctcacttgggtaggctctgt

SEQ ID NO: 44755 - DNA, 20 bp, Artificial Sequence
  Synthetic oligonucleotide; GAG chr11 5259400 5259419 5259403 -
cacttgggtaggctctgtca

SEQ ID NO: 44756 - DNA, 20 bp, Artificial Sequence
  Synthetic oligonucleotide; AGG chr11 5259399 5259418 5259402 -
acttgggtaggctctgtcag

SEQ ID NO: 44757 - DNA, 20 bp, Artificial Sequence
  Synthetic oligonucleotide; GGG chr11 5259398 5259417 5259401 -
cttgggtaggctctgtcaga

SEQ ID NO: 44758 - DNA, 20 bp, Artificial Sequence
  Synthetic oligonucleotide; AAG chr11 5259394 5259413 5259397 -
ggtaggctctgtcagaggga

SEQ ID NO: 44759 - DNA, 20 bp, Artificial Sequence
  Synthetic oligonucleotide; TAG chr11 5259389 5259408 5259392 -
gctctgtcagagggaaagtc

SEQ ID NO: 44760 - DNA, 20 bp, Artificial Sequence
  Synthetic oligonucleotide; AGG chr11 5259388 5259407 5259391 -
ctctgtcagagggaaagtct

SEQ ID NO: 44761 - DNA, 20 bp, Artificial Sequence
  Synthetic oligonucleotide; AAG chr11 5259381 5259400 5259384 -
agagggaaagtctaggcctc

SEQ ID NO: 44762 - DNA, 20 bp, Artificial Sequence
  Synthetic oligonucleotide; AGG chr11 5259380 5259399 5259383 -
gagggaaagtctaggcctca

SEQ ID NO: 44763 - DNA, 20 bp, Artificial Sequence
  Synthetic oligonucleotide; GAG chr11 5259375 5259394 5259378 -
aaagtctaggcctcaaggct

SEQ ID NO: 44764 - DNA, 20 bp, Artificial Sequence
  Synthetic oligonucleotide; GAG chr11 5259359 5259378 5259362 -
ggctgagacttttgtcccat

SEQ ID NO: 44765 - DNA, 20 bp, Artificial Sequence
  Synthetic oligonucleotide; AGG chr11 5259358 5259377 5259361 -
gctgagacttttgtcccatg

SEQ ID NO: 44766 - DNA, 20 bp, Artificial Sequence
  Synthetic oligonucleotide; TAG chr11 5259342 5259361 5259345 -
catgaggtgttcccttgatg

SEQ ID NO: 44767 - DNA, 20 bp, Artificial Sequence
  Synthetic oligonucleotide; CAG chr11 5259337 5259356 5259340 -
ggtgttcccttgatgtagca

SEQ ID NO: 44768 - DNA, 20 bp, Artificial Sequence
  Synthetic oligonucleotide; TAG chr11 5259322 5259341 5259325 -
tagcacagtcccccttttcc

SEQ ID NO: 44769 - DNA, 20 bp, Artificial Sequence
  Synthetic oligonucleotide; AGG chr11 5259321 5259340 5259324 -
agcacagtcccccttttcct

SEQ ID NO: 44770 - DNA, 20 bp, Artificial Sequence
  Synthetic oligonucleotide; TGG chr11 5259316 5259335 5259319 -
agtcccccttttcctaggcg

SEQ ID NO: 44771 - DNA, 20 bp, Artificial Sequence
  Synthetic oligonucleotide; GGG chr11 5259315 5259334 5259318 -
gtcccccttttcctaggcgt

SEQ ID NO: 44772 - DNA, 20 bp, Artificial Sequence
  Synthetic oligonucleotide; GGG chr11 5259314 5259333 5259317 -
tcccccttttcctaggcgtg

SEQ ID NO: 44773 - DNA, 20 bp, Artificial Sequence
  Synthetic oligonucleotide; GAG chr11 5259305 5259324 5259308 -
tcctaggcgtggggcttcct

SEQ ID NO: 44774 - DNA, 20 bp, Artificial Sequence
  Synthetic oligonucleotide; GAG chr11 5259303 5259322 5259306 -
ctaggcgtggggcttcctga

SEQ ID NO: 44775 - DNA, 20 bp, Artificial Sequence
  Synthetic oligonucleotide; TAG chr11 5259292 5259311 5259295 -
gcttcctgagagccgaactg

SEQ ID NO: 44776 - DNA, 20 bp, Artificial Sequence
  Synthetic oligonucleotide; TGG chr11 5259271 5259290 5259274 -
agtgattgttatctctcttc

SEQ ID NO: 44777 - DNA, 20 bp, Artificial Sequence
  Synthetic oligonucleotide; TAG chr11 5259265 5259284 5259268 -
tgttatctctcttctggatc

SEQ ID NO: 44778 - DNA, 20 bp, Artificial Sequence
  Synthetic oligonucleotide; CAG chr11 5259254 5259273 5259257 -
ttctggatctagccacccat

SEQ ID NO: 44779 - DNA, 20 bp, Artificial Sequence
  Synthetic oligonucleotide; AGG chr11 5259253 5259272 5259256 -
tctggatctagccacccatc

SEQ ID NO: 44780 - DNA, 20 bp, Artificial Sequence
  Synthetic oligonucleotide; CAG chr11 5259245 5259264 5259248 -
tagccacccatcaggtctac

SEQ ID NO: 44781 - DNA, 20 bp, Artificial Sequence
  Synthetic oligonucleotide; CAG chr11 5259238 5259257 5259241 -
ccatcaggtctaccagactc

SEQ ID NO: 44782 - DNA, 20 bp, Artificial Sequence
  Synthetic oligonucleotide; AGG chr11 5259237 5259256 5259240 -
catcaggtctaccagactcc

SEQ ID NO: 44783 - DNA, 20 bp, Artificial Sequence
  Synthetic oligonucleotide; TGG chr11 5259233 5259252 5259236 -
aggtctaccagactccaggc

SEQ ID NO: 44784 - DNA, 20 bp, Artificial Sequence
  Synthetic oligonucleotide; TGG chr11 5259227 5259246 5259230 -
accagactccaggctggtac

SEQ ID NO: 44785 - DNA, 20 bp, Artificial Sequence
  Synthetic oligonucleotide; GGG chr11 5259226 5259245 5259229 -
ccagactccaggctggtact

SEQ ID NO: 44786 - DNA, 20 bp, Artificial Sequence
  Synthetic oligonucleotide; GGG chr11 5259225 5259244 5259228 -
cagactccaggctggtactg

SEQ ID NO: 44787 - DNA, 20 bp, Artificial Sequence
  Synthetic oligonucleotide; CAG chr11 5259212 5259231 5259215 -
ggtactggggtttgtctgca

SEQ ID NO: 44788 - DNA, 20 bp, Artificial Sequence
  Synthetic oligonucleotide; GAG chr11 5259210 5259229 5259213 -
tactggggtttgtctgcaca

SEQ ID NO: 44789 - DNA, 20 bp, Artificial Sequence
  Synthetic oligonucleotide; TGG chr11 5259186 5259205 5259189 -
cttgtgacgtgaaccatctg

SEQ ID NO: 44790 - DNA, 20 bp, Artificial Sequence
  Synthetic oligonucleotide; GGG chr11 5259185 5259204 5259188 -
ttgtgacgtgaaccatctgt

SEQ ID NO: 44791 - DNA, 20 bp, Artificial Sequence
  Synthetic oligonucleotide; CAG chr11 5259177 5259196 5259180 -
tgaaccatctgtgggtctct

SEQ ID NO: 44792 - DNA, 20 bp, Artificial Sequence
  Synthetic oligonucleotide; TAG chr11 5259171 5259190 5259174 -
atctgtgggtctctcagcca

SEQ ID NO: 44793 - DNA, 20 bp, Artificial Sequence
  Synthetic oligonucleotide; TGG chr11 5259149 5259168 5259152 -
gatacaaccacctgctccaa

SEQ ID NO: 44794 - DNA, 20 bp, Artificial Sequence
  Synthetic oligonucleotide; GAG chr11 5259147 5259166 5259150 -
tacaaccacctgctccaatg

SEQ ID NO: 44795 - DNA, 20 bp, Artificial Sequence
  Synthetic oligonucleotide; AGG chr11 5259146 5259165 5259149 -
acaaccacctgctccaatgg

SEQ ID NO: 44796 - DNA, 20 bp, Artificial Sequence
  Synthetic oligonucleotide; TGG chr11 5259143 5259162 5259146 -
accacctgctccaatggagg

SEQ ID NO: 44797 - DNA, 20 bp, Artificial Sequence
  Synthetic oligonucleotide; CAG chr11 5259140 5259159 5259143 -
acctgctccaatggaggtgg

SEQ ID NO: 44798 - DNA, 20 bp, Artificial Sequence
  Synthetic oligonucleotide; GAG chr11 5259138 5259157 5259141 -
ctgctccaatggaggtggca

SEQ ID NO: 44799 - DNA, 20 bp, Artificial Sequence
  Synthetic oligonucleotide; AGG chr11 5259137 5259156 5259140 -
tgctccaatggaggtggcag

SEQ ID NO: 44800 - DNA, 20 bp, Artificial Sequence
  Synthetic oligonucleotide; TGG chr11 5259128 5259147 5259131 -
ggaggtggcagaggatgaaa

SEQ ID NO: 44801 - DNA, 20 bp, Artificial Sequence
  Synthetic oligonucleotide; GAG chr11 5259118 5259137 5259121 -
gaggatgaaatggactctgt

SEQ ID NO: 44802 - DNA, 20 bp, Artificial Sequence
  Synthetic oligonucleotide; AGG chr11 5259117 5259136 5259120 -
aggatgaaatggactctgtg

SEQ ID NO: 44803 - DNA, 20 bp, Artificial Sequence
  Synthetic oligonucleotide; GGG chr11 5259116 5259135 5259119 -
ggatgaaatggactctgtga

SEQ ID NO: 44804 - DNA, 20 bp, Artificial Sequence
  Synthetic oligonucleotide; TGG chr11 5259103 5259122 5259106 -
tctgtgagggtccttacttt

SEQ ID NO: 44805 - DNA, 20 bp, Artificial Sequence
  Synthetic oligonucleotide; TGG chr11 5259076 5259095 5259079 -
tcaatgcactatttttgtgc

SEQ ID NO: 44806 - DNA, 20 bp, Artificial Sequence
  Synthetic oligonucleotide; TGG chr11 5259072 5259091 5259075 -
tgcactatttttgtgctggt

SEQ ID NO: 44807 - DNA, 20 bp, Artificial Sequence
  Synthetic oligonucleotide; CAG chr11 5259061 5259080 5259064 -
tgtgctggttggcctcctgc

SEQ ID NO: 44808 - DNA, 20 bp, Artificial Sequence
  Synthetic oligonucleotide; AGG chr11 5259060 5259079 5259063 -
gtgctggttggcctcctgcc

SEQ ID NO: 44809 - DNA, 20 bp, Artificial Sequence
  Synthetic oligonucleotide; GAG chr11 5259058 5259077 5259061 -
gctggttggcctcctgccag

SEQ ID NO: 44810 - DNA, 20 bp, Artificial Sequence
  Synthetic oligonucleotide; AGG chr11 5259057 5259076 5259060 -
ctggttggcctcctgccagg

SEQ ID NO: 44811 - DNA, 20 bp, Artificial Sequence
  Synthetic oligonucleotide; TGG chr11 5259054 5259073 5259057 -
gttggcctcctgccaggagg

SEQ ID NO: 44812 - DNA, 20 bp, Artificial Sequence
  Synthetic oligonucleotide; TAG chr11 5259044 5259063 5259047 -
tgccaggaggtggcactttc

SEQ ID NO: 44813 - DNA, 20 bp, Artificial Sequence
  Synthetic oligonucleotide; AAG chr11 5259040 5259059 5259043 -
aggaggtggcactttctaga

SEQ ID NO: 44814 - DNA, 20 bp, Artificial Sequence
  Synthetic oligonucleotide; CAG chr11 5259034 5259053 5259037 -
tggcactttctagaaagcat

SEQ ID NO: 44815 - DNA, 20 bp, Artificial Sequence
  Synthetic oligonucleotide; CAG chr11 5259031 5259050 5259034 -
cactttctagaaagcatcag

SEQ ID NO: 44816 - DNA, 20 bp, Artificial Sequence
  Synthetic oligonucleotide; GAG chr11 5259029 5259048 5259032 -
ctttctagaaagcatcagca

SEQ ID NO: 44817 - DNA, 20 bp, Artificial Sequence
  Synthetic oligonucleotide; AGG chr11 5259028 5259047 5259031 -
tttctagaaagcatcagcag

SEQ ID NO: 44818 - DNA, 20 bp, Artificial Sequence
  Synthetic oligonucleotide; CAG chr11 5259025 5259044 5259028 -
ctagaaagcatcagcagagg

SEQ ID NO: 44819 - DNA, 20 bp, Artificial Sequence
  Synthetic oligonucleotide; CAG chr11 5259021 5259040 5259024 -
aaagcatcagcagaggcagt

SEQ ID NO: 44820 - DNA, 20 bp, Artificial Sequence
  Synthetic oligonucleotide; AGG chr11 5259020 5259039 5259023 -
aagcatcagcagaggcagtc

SEQ ID NO: 44821 - DNA, 20 bp, Artificial Sequence
  Synthetic oligonucleotide; TGG chr11 5259017 5259036 5259020 -
catcagcagaggcagtcagg

SEQ ID NO: 44822 - DNA, 20 bp, Artificial Sequence
  Synthetic oligonucleotide; TGG chr11 5259014 5259033 5259017 -
cagcagaggcagtcaggtgg

SEQ ID NO: 44823 - DNA, 20 bp, Artificial Sequence
  Synthetic oligonucleotide; TGG chr11 5259011 5259030 5259014 -
cagaggcagtcaggtggtgg

SEQ ID NO: 44824 - DNA, 20 bp, Artificial Sequence
  Synthetic oligonucleotide; TGG chr11 5259007 5259026 5259010 -
ggcagtcaggtggtggtggc

SEQ ID NO: 44825 - DNA, 20 bp, Artificial Sequence
  Synthetic oligonucleotide; GGG chr11 5259006 5259025 5259009 -
gcagtcaggtggtggtggct

SEQ ID NO: 44826 - DNA, 20 bp, Artificial Sequence
  Synthetic oligonucleotide; GGG chr11 5259005 5259024 5259008 -
cagtcaggtggtggtggctg

SEQ ID NO: 44827 - DNA, 20 bp, Artificial Sequence
  Synthetic oligonucleotide; GGG chr11 5259004 5259023 5259007 -
agtcaggtggtggtggctgg

SEQ ID NO: 44828 - DNA, 20 bp, Artificial Sequence
  Synthetic oligonucleotide; GGG chr11 5259003 5259022 5259006 -
gtcaggtggtggtggctggg

SEQ ID NO: 44829 - DNA, 20 bp, Artificial Sequence
  Synthetic oligonucleotide; GGG chr11 5259002 5259021 5259005 -
tcaggtggtggtggctgggg

SEQ ID NO: 44830 - DNA, 20 bp, Artificial Sequence
  Synthetic oligonucleotide; TGG chr11 5258998 5259017 5259001 -
gtggtggtggctgggggggc

SEQ ID NO: 44831 - DNA, 20 bp, Artificial Sequence
  Synthetic oligonucleotide; GGG chr11 5258997 5259016 5259000 -
tggtggtggctgggggggct

SEQ ID NO: 44832 - DNA, 20 bp, Artificial Sequence
  Synthetic oligonucleotide; GGG chr11 5258996 5259015 5258999 -
ggtggtggctgggggggctg

SEQ ID NO: 44833 - DNA, 20 bp, Artificial Sequence
  Synthetic oligonucleotide; TAG chr11 5258988 5259007 5258991 -
ctgggggggctggggcaccc

SEQ ID NO: 44834 - DNA, 20 bp, Artificial Sequence
  Synthetic oligonucleotide; AAG chr11 5258978 5258997 5258981 -
tggggcaccctagaactccc

SEQ ID NO: 44835 - DNA, 20 bp, Artificial Sequence
  Synthetic oligonucleotide; CAG chr11 5258956 5258975 5258959 -
gaatatatgccctttgtctt

SEQ ID NO: 44836 - DNA, 20 bp, Artificial Sequence
  Synthetic oligonucleotide; CAG chr11 5258949 5258968 5258952 -
tgccctttgtcttcagctac

SEQ ID NO: 44837 - DNA, 20 bp, Artificial Sequence
  Synthetic oligonucleotide; AGG chr11 5258948 5258967 5258951 -
gccctttgtcttcagctacc

SEQ ID NO: 44838 - DNA, 20 bp, Artificial Sequence
  Synthetic oligonucleotide; GGG chr11 5258947 5258966 5258950 -
ccctttgtcttcagctacca

SEQ ID NO: 44839 - DNA, 20 bp, Artificial Sequence
  Synthetic oligonucleotide; GAG chr11 5258943 5258962 5258946 -
ttgtcttcagctaccagggt

SEQ ID NO: 44840 - DNA, 20 bp, Artificial Sequence
  Synthetic oligonucleotide; AAG chr11 5258939 5258958 5258942 -
cttcagctaccagggtgagt

SEQ ID NO: 44841 - DNA, 20 bp, Artificial Sequence
  Synthetic oligonucleotide; AGG chr11 5258938 5258957 5258941 -
ttcagctaccagggtgagta

SEQ ID NO: 44842 - DNA, 20 bp, Artificial Sequence
  Synthetic oligonucleotide; AAG chr11 5258935 5258954 5258938 -
agctaccagggtgagtaagg

SEQ ID NO: 44843 - DNA, 20 bp, Artificial Sequence
  Synthetic oligonucleotide; AGG chr11 5258934 5258953 5258937 -
gctaccagggtgagtaagga

SEQ ID NO: 44844 - DNA, 20 bp, Artificial Sequence
  Synthetic oligonucleotide; CAG chr11 5258926 5258945 5258929 -
ggtgagtaaggaaggaccat

SEQ ID NO: 44845 - DNA, 20 bp, Artificial Sequence
  Synthetic oligonucleotide; AGG chr11 5258925 5258944 5258928 -
gtgagtaaggaaggaccatc

SEQ ID NO: 44846 - DNA, 20 bp, Artificial Sequence
  Synthetic oligonucleotide; TGG chr11 5258922 5258941 5258925 -
agtaaggaaggaccatcagg

SEQ ID NO: 44847 - DNA, 20 bp, Artificial Sequence
  Synthetic oligonucleotide; GGG chr11 5258921 5258940 5258924 -
gtaaggaaggaccatcaggt

SEQ ID NO: 44848 - DNA, 20 bp, Artificial Sequence
  Synthetic oligonucleotide; GGG chr11 5258920 5258939 5258923 -
taaggaaggaccatcaggtg

SEQ ID NO: 44849 - DNA, 20 bp, Artificial Sequence
  Synthetic oligonucleotide; GGG chr11 5258919 5258938 5258922 -
aaggaaggaccatcaggtgg

SEQ ID NO: 44850 - DNA, 20 bp, Artificial Sequence
  Synthetic oligonucleotide; CAG chr11 5258916 5258935 5258919 -
gaaggaccatcaggtggggg

SEQ ID NO: 44851 - DNA, 20 bp, Artificial Sequence
  Synthetic oligonucleotide; AGG chr11 5258915 5258934 5258918 -
aaggaccatcaggtgggggc

SEQ ID NO: 44852 - DNA, 20 bp, Artificial Sequence
  Synthetic oligonucleotide; TAG chr11 5258910 5258929 5258913 -
ccatcaggtgggggcaggac

SEQ ID NO: 44853 - DNA, 20 bp, Artificial Sequence
  Synthetic oligonucleotide; GAG chr11 5258899 5258918 5258902 -
gggcaggactagtcgtgtct

SEQ ID NO: 44854 - DNA, 20 bp, Artificial Sequence
  Synthetic oligonucleotide; CAG chr11 5258894 5258913 5258897 -
ggactagtcgtgtctgagct

SEQ ID NO: 44855 - DNA, 20 bp, Artificial Sequence
  Synthetic oligonucleotide; GAG chr11 5258892 5258911 5258895 -
actagtcgtgtctgagctca

SEQ ID NO: 44856 - DNA, 20 bp, Artificial Sequence
  Synthetic oligonucleotide; TGG chr11 5258883 5258902 5258886 -
gtctgagctcagagtctcct

SEQ ID NO: 44857 - DNA, 20 bp, Artificial Sequence
  Synthetic oligonucleotide; GGG chr11 5258882 5258901 5258885 -
tctgagctcagagtctcctt

SEQ ID NO: 44858 - DNA, 20 bp, Artificial Sequence
  Synthetic oligonucleotide; CAG chr11 5258879 5258898 5258882 -
gagctcagagtctccttggg

SEQ ID NO: 44859 - DNA, 20 bp, Artificial Sequence
  Synthetic oligonucleotide; AGG chr11 5258878 5258897 5258881 -
agctcagagtctccttgggc

SEQ ID NO: 44860 - DNA, 20 bp, Artificial Sequence
  Synthetic oligonucleotide; TGG chr11 5258867 5258886 5258870 -
tccttgggcaggtctttctg

SEQ ID NO: 44861 - DNA, 20 bp, Artificial Sequence
  Synthetic oligonucleotide; TGG chr11 5258858 5258877 5258861 -
aggtctttctgtggctactg

SEQ ID NO: 44862 - DNA, 20 bp, Artificial Sequence
  Synthetic oligonucleotide; GGG chr11 5258857 5258876 5258860 -
ggtctttctgtggctactgt

SEQ ID NO: 44863 - DNA, 20 bp, Artificial Sequence
  Synthetic oligonucleotide; GAG chr11 5258855 5258874 5258858 -
tctttctgtggctactgtgg

SEQ ID NO: 44864 - DNA, 20 bp, Artificial Sequence
  Synthetic oligonucleotide; AGG chr11 5258854 5258873 5258857 -
ctttctgtggctactgtggg

SEQ ID NO: 44865 - DNA, 20 bp, Artificial Sequence
  Synthetic oligonucleotide; TGG chr11 5258850 5258869 5258853 -
ctgtggctactgtgggagga

SEQ ID NO: 44866 - DNA, 20 bp, Artificial Sequence
  Synthetic oligonucleotide; GGG chr11 5258849 5258868 5258852 -
tgtggctactgtgggaggat

SEQ ID NO: 44867 - DNA, 20 bp, Artificial Sequence
  Synthetic oligonucleotide; GGG chr11 5258848 5258867 5258851 -
gtggctactgtgggaggatg

SEQ ID NO: 44868 - DNA, 20 bp, Artificial Sequence
  Synthetic oligonucleotide; GGG chr11 5258847 5258866 5258850 -
tggctactgtgggaggatgg

SEQ ID NO: 44869 - DNA, 20 bp, Artificial Sequence
  Synthetic oligonucleotide; TAG chr11 5258842 5258861 5258845 -
actgtgggaggatgggggtg

SEQ ID NO: 44870 - DNA, 20 bp, Artificial Sequence
  Synthetic oligonucleotide; CAG chr11 5258835 5258854 5258838 -
gaggatgggggtgtagtttc

SEQ ID NO: 44871 - DNA, 20 bp, Artificial Sequence
  Synthetic oligonucleotide; AGG chr11 5258834 5258853 5258837 -
aggatgggggtgtagtttcc

SEQ ID NO: 44872 - DNA, 20 bp, Artificial Sequence
  Synthetic oligonucleotide; TGG chr11 5258827 5258846 5258830 -
gggtgtagtttccaggtcaa

SEQ ID NO: 44873 - DNA, 20 bp, Artificial Sequence
  Synthetic oligonucleotide; TAG chr11 5258813 5258832 5258816 -
ggtcaatggatttatgttcc

SEQ ID NO: 44874 - DNA, 20 bp, Artificial Sequence
  Synthetic oligonucleotide; AGG chr11 5258812 5258831 5258815 -
gtcaatggatttatgttcct

SEQ ID NO: 44875 - DNA, 20 bp, Artificial Sequence
  Synthetic oligonucleotide; TGG chr11 5258802 5258821 5258805 -
ttatgttcctaggacaatta

SEQ ID NO: 44876 - DNA, 20 bp, Artificial Sequence
  Synthetic oligonucleotide; CAG chr11 5258780 5258799 5258783 -
gctgcctctgctgtgtcatg

SEQ ID NO: 44877 - DNA, 20 bp, Artificial Sequence
  Synthetic oligonucleotide; AGG chr11 5258779 5258798 5258782 -
ctgcctctgctgtgtcatgc

SEQ ID NO: 44878 - DNA, 20 bp, Artificial Sequence
  Synthetic oligonucleotide; CAG chr11 5258772 5258791 5258775 -
tgctgtgtcatgcaggtcat

SEQ ID NO: 44879 - DNA, 20 bp, Artificial Sequence
  Synthetic oligonucleotide; AGG chr11 5258771 5258790 5258774 -
gctgtgtcatgcaggtcatc

SEQ ID NO: 44880 - DNA, 20 bp, Artificial Sequence
  Synthetic oligonucleotide; AAG chr11 5258767 5258786 5258770 -
tgtcatgcaggtcatcagga

SEQ ID NO: 44881 - DNA, 20 bp, Artificial Sequence
  Synthetic oligonucleotide; TGG chr11 5258764 5258783 5258767 -
catgcaggtcatcaggaaag

SEQ ID NO: 44882 - DNA, 20 bp, Artificial Sequence
  Synthetic oligonucleotide; GGG chr11 5258763 5258782 5258766 -
atgcaggtcatcaggaaagt

SEQ ID NO: 44883 - DNA, 20 bp, Artificial Sequence
  Synthetic oligonucleotide; GGG chr11 5258762 5258781 5258765 -
tgcaggtcatcaggaaagtg

SEQ ID NO: 44884 - DNA, 20 bp, Artificial Sequence
  Synthetic oligonucleotide; GGG chr11 5258761 5258780 5258764 -
gcaggtcatcaggaaagtgg

SEQ ID NO: 44885 - DNA, 20 bp, Artificial Sequence
  Synthetic oligonucleotide; AAG chr11 5258757 5258776 5258760 -
gtcatcaggaaagtggggga

SEQ ID NO: 44886 - DNA, 20 bp, Artificial Sequence
  Synthetic oligonucleotide; AAG chr11 5258753 5258772 5258756 -
tcaggaaagtgggggaaagc

SEQ ID NO: 44887 - DNA, 20 bp, Artificial Sequence
  Synthetic oligonucleotide; CAG chr11 5258750 5258769 5258753 -
ggaaagtgggggaaagcaag

SEQ ID NO: 44888 - DNA, 20 bp, Artificial Sequence
  Synthetic oligonucleotide; CAG chr11 5258733 5258752 5258736 -
aagcagtcacgtgacttgcc

SEQ ID NO: 44889 - DNA, 20 bp, Artificial Sequence
  Synthetic oligonucleotide; AAG chr11 5258714 5258733 5258717 -
ccagctcccatgcaactcaa

SEQ ID NO: 44890 - DNA, 20 bp, Artificial Sequence
  Synthetic oligonucleotide; AGG chr11 5258713 5258732 5258716 -
cagctcccatgcaactcaaa

SEQ ID NO: 44891 - DNA, 20 bp, Artificial Sequence
  Synthetic oligonucleotide; TGG chr11 5258709 5258728 5258712 -
tcccatgcaactcaaaaggt

SEQ ID NO: 44892 - DNA, 20 bp, Artificial Sequence
  Synthetic oligonucleotide; CAG chr11 5258697 5258716 5258700 -
caaaaggttggtctcacttc

SEQ ID NO: 44893 - DNA, 20 bp, Artificial Sequence
  Synthetic oligonucleotide; CAG chr11 5258675 5258694 5258678 -
gcgtgcaccctcccccgcaa

SEQ ID NO: 44894 - DNA, 20 bp, Artificial Sequence
  Synthetic oligonucleotide; CAG chr11 5258653 5258672 5258656 -
gcaccgaatctgtttccatg

SEQ ID NO: 44895 - DNA, 20 bp, Artificial Sequence
  Synthetic oligonucleotide; CAG chr11 5258649 5258668 5258652 -
cgaatctgtttccatgcagt

SEQ ID NO: 44896 - DNA, 20 bp, Artificial Sequence
  Synthetic oligonucleotide; GAG chr11 5258645 5258664 5258648 -
tctgtttccatgcagtcagt

SEQ ID NO: 44897 - DNA, 20 bp, Artificial Sequence
  Synthetic oligonucleotide; AAG chr11 5258641 5258660 5258644 -
tttccatgcagtcagtgagc

SEQ ID NO: 44898 - DNA, 20 bp, Artificial Sequence
  Synthetic oligonucleotide; AGG chr11 5258640 5258659 5258643 -
ttccatgcagtcagtgagca

SEQ ID NO: 44899 - DNA, 20 bp, Artificial Sequence
  Synthetic oligonucleotide; GAG chr11 5258635 5258654 5258638 -
tgcagtcagtgagcaaggct

SEQ ID NO: 44900 - DNA, 20 bp, Artificial Sequence
  Synthetic oligonucleotide; CAG chr11 5258623 5258642 5258626 -
gcaaggctgagaacttgccc

SEQ ID NO: 44901 - DNA, 20 bp, Artificial Sequence
  Synthetic oligonucleotide; AGG chr11 5258622 5258641 5258625 -
caaggctgagaacttgcccc

SEQ ID NO: 44902 - DNA, 20 bp, Artificial Sequence
  Synthetic oligonucleotide; CAG chr11 5258615 5258634 5258618 -
gagaacttgccccaggctac

SEQ ID NO: 44903 - DNA, 20 bp, Artificial Sequence
  Synthetic oligonucleotide; AAG chr11 5258602 5258621 5258605 -
aggctaccagctgcgaaacc

SEQ ID NO: 44904 - DNA, 20 bp, Artificial Sequence
  Synthetic oligonucleotide; TAG chr11 5258599 5258618 5258602 -
ctaccagctgcgaaaccaag

SEQ ID NO: 44905 - DNA, 20 bp, Artificial Sequence
  Synthetic oligonucleotide; AGG chr11 5258598 5258617 5258601 -
taccagctgcgaaaccaagt

SEQ ID NO: 44906 - DNA, 20 bp, Artificial Sequence
  Synthetic oligonucleotide; GGG chr11 5258597 5258616 5258600 -
accagctgcgaaaccaagta

SEQ ID NO: 44907 - DNA, 20 bp, Artificial Sequence
  Synthetic oligonucleotide; CAG chr11 5258577 5258596 5258580 -
gggctgtcctacttccctgc

SEQ ID NO: 44908 - DNA, 20 bp, Artificial Sequence
  Synthetic oligonucleotide; TGG chr11 5258574 5258593 5258577 -
ctgtcctacttccctgccag

SEQ ID NO: 44909 - DNA, 20 bp, Artificial Sequence
  Synthetic oligonucleotide; GAG chr11 5258572 5258591 5258575 -
gtcctacttccctgccagtg

SEQ ID NO: 44910 - DNA, 20 bp, Artificial Sequence
  Synthetic oligonucleotide; CAG chr11 5258525 5258544 5258528 -
ccaccaacccccccactgcc

SEQ ID NO: 44911 - DNA, 20 bp, Artificial Sequence
  Synthetic oligonucleotide; TAG chr11 5258518 5258537 5258521 -
cccccccactgcccagcccc

SEQ ID NO: 44912 - DNA, 20 bp, Artificial Sequence
  Synthetic oligonucleotide; TGG chr11 5258512 5258531 5258515 -
cactgcccagcccctagatc

SEQ ID NO: 44913 - DNA, 20 bp, Artificial Sequence
  Synthetic oligonucleotide; CAG chr11 5258508 5258527 5258511 -
gcccagcccctagatctggc

SEQ ID NO: 44914 - DNA, 20 bp, Artificial Sequence
  Synthetic oligonucleotide; AGG chr11 5258507 5258526 5258510 -
cccagcccctagatctggcc

SEQ ID NO: 44915 - DNA, 20 bp, Artificial Sequence
  Synthetic oligonucleotide; TGG chr11 5258504 5258523 5258507 -
agcccctagatctggccagg

SEQ ID NO: 44916 - DNA, 20 bp, Artificial Sequence
  Synthetic oligonucleotide; GAG chr11 5258502 5258521 5258505 -
cccctagatctggccaggtg

SEQ ID NO: 44917 - DNA, 20 bp, Artificial Sequence
  Synthetic oligonucleotide; CAG chr11 5258473 5258492 5258476 -
tttttcctgtcatcttttcc

SEQ ID NO: 44918 - DNA, 20 bp, Artificial Sequence
  Synthetic oligonucleotide; TGG chr11 5258464 5258483 5258467 -
tcatcttttcccagttcctc

SEQ ID NO: 44919 - DNA, 20 bp, Artificial Sequence
  Synthetic oligonucleotide; CAG chr11 5258461 5258480 5258464 -
tcttttcccagttcctctgg

SEQ ID NO: 44920 - DNA, 20 bp, Artificial Sequence
  Synthetic oligonucleotide; GAG chr11 5258438 5258457 5258441 -
ccctcccaaatgacccctgt

SEQ ID NO: 44921 - DNA, 20 bp, Artificial Sequence
  Synthetic oligonucleotide; AGG chr11 5258437 5258456 5258440 -
cctcccaaatgacccctgtg

SEQ ID NO: 44922 - DNA, 20 bp, Artificial Sequence
  Synthetic oligonucleotide; AAG chr11 5258433 5258452 5258436 -
ccaaatgacccctgtgaggc

SEQ ID NO: 44923 - DNA, 20 bp, Artificial Sequence
  Synthetic oligonucleotide; AGG chr11 5258432 5258451 5258435 -
caaatgacccctgtgaggca

SEQ ID NO: 44924 - DNA, 20 bp, Artificial Sequence
  Synthetic oligonucleotide; CAG chr11 5258429 5258448 5258432 -
atgacccctgtgaggcaagg

SEQ ID NO: 44925 - DNA, 20 bp, Artificial Sequence
  Synthetic oligonucleotide; TGG chr11 5258423 5258442 5258426 -
cctgtgaggcaaggcagaaa

SEQ ID NO: 44926 - DNA, 20 bp, Artificial Sequence
  Synthetic oligonucleotide; TAG chr11 5258415 5258434 5258418 -
gcaaggcagaaatggcttcc

SEQ ID NO: 44927 - DNA, 20 bp, Artificial Sequence
  Synthetic oligonucleotide; AGG chr11 5258414 5258433 5258417 -
caaggcagaaatggcttcct

SEQ ID NO: 44928 - DNA, 20 bp, Artificial Sequence
  Synthetic oligonucleotide; GGG chr11 5258413 5258432 5258416 -
aaggcagaaatggcttccta

SEQ ID NO: 44929 - DNA, 20 bp, Artificial Sequence
  Synthetic oligonucleotide; GGG chr11 5258412 5258431 5258415 -
aggcagaaatggcttcctag

SEQ ID NO: 44930 - DNA, 20 bp, Artificial Sequence
  Synthetic oligonucleotide; CAG chr11 5258406 5258425 5258409 -
aaatggcttcctaggggacc

SEQ ID NO: 44931 - DNA, 20 bp, Artificial Sequence
  Synthetic oligonucleotide; GAG chr11 5258404 5258423 5258407 -
atggcttcctaggggaccca

SEQ ID NO: 44932 - DNA, 20 bp, Artificial Sequence
  Synthetic oligonucleotide; GAG chr11 5258402 5258421 5258405 -
ggcttcctaggggacccaga

SEQ ID NO: 44933 - DNA, 20 bp, Artificial Sequence
  Synthetic oligonucleotide; CAG chr11 5258395 5258414 5258398 -
taggggacccagagagccca

SEQ ID NO: 44934 - DNA, 20 bp, Artificial Sequence
  Synthetic oligonucleotide; AGG chr11 5258394 5258413 5258397 -
aggggacccagagagcccac

SEQ ID NO: 44935 - DNA, 20 bp, Artificial Sequence
  Synthetic oligonucleotide; GGG chr11 5258393 5258412 5258396 -
ggggacccagagagcccaca

SEQ ID NO: 44936 - DNA, 20 bp, Artificial Sequence
  Synthetic oligonucleotide; TGG chr11 5258354 5258373 5258357 -
ctctacccctgtattttgct

SEQ ID NO: 44937 - DNA, 20 bp, Artificial Sequence
  Synthetic oligonucleotide; CAG chr11 5258336 5258355 5258339 -
cttggccctctaaattgact

SEQ ID NO: 44938 - DNA, 20 bp, Artificial Sequence
  Synthetic oligonucleotide; CAG chr11 5258330 5258349 5258333 -
cctctaaattgactcagctc

SEQ ID NO: 44939 - DNA, 20 bp, Artificial Sequence
  Synthetic oligonucleotide; AGG chr11 5258329 5258348 5258332 -
ctctaaattgactcagctcc

SEQ ID NO: 44940 - DNA, 20 bp, Artificial Sequence
  Synthetic oligonucleotide; AAG chr11 5258325 5258344 5258328 -
aaattgactcagctccaggt

SEQ ID NO: 44941 - DNA, 20 bp, Artificial Sequence
  Synthetic oligonucleotide; AGG chr11 5258324 5258343 5258327 -
aattgactcagctccaggta
